United States Patent Application Publication US 2007/0067865 A1 - sequence listing, part 49

SEQ ID NO: 296222 - DNA, 377 bp, Zea mays
ccggttcggaattcccggggcgagccacgcgtccgcccacgcgtccgcccacgcgtccgcccacgcgtccgggtaacgaagccctctatgacgtgtgcttcaggactcttgaggtgaccacccctagctttggtgatctgaaccatttgatctctgcaaccatgagtggagtcacctgctgcctaaggttccctggtcagctgaactccgacctcaggaagctggcagtgaacctgatccccttcccccgtctccacttcttcatggtcggcttcgcgccgctgacgtcccgtggctcccagcagtaccgggccctcacagtccccgagctcacgcagcagatgtgggatgccaagaacatgatgtgtgccgctgac

SEQ ID NO: 296223 - DNA, 268 bp, Zea mays
aattccacggtcgaccgactcatccgatatactggaactcctgctgtctgctcattttttctggagagactttatgtaacgaacaggactgtgtcaatggggggagtggtacaaaccactctgtgtatgggcctctctatcagaaacagcaatgagactacacgtatgtcacctacagtcattaaactcatgagcacatcatcgacttactagaactaaaatatgtggataaactgtccacactatgcatcattgatcacttattcac

SEQ ID NO: 296224 - DNA, 389 bp, Zea mays
cggtcctgaattcccgggtcgacgcacgcgtccgcccacgcgtccgcccacgcgtccgtccacgcgtccgggaagaacgcattttgatggctgcggaggaacctgctggacagggcggtgaagatggtcgccgaactggacgagccagcagagatgaactacgtgcgcaagcacgcccaggagcaggcggaggagctcggcgtgtcgctaagggaggcggcgacaagggtgttctcgaacgcatcaggctcctactcgtccaacgtgaacctggccgtggagaacgcgtcatggaccgacgagaagcagcttcaggacatgtacctgagccgcaagtccttcgcgttcgacagcgacaccctcagggcaggcatgaatgagaagcgcaa

SEQ ID NO: 296225 - DNA, 397 bp, Zea mays
tgaattcccgggtcgacccacgcgtgcgatcggggctttttgtgagttcagaccgaaagagtggtccttcgtgatctaattcaactactgcatgggctattttccatggacgtgatagtaaaggtatattttatttctcgaacgcgcatgagagctgcacatcattatattaagagaggaaaggtccaaagtggaccgaaatacaacaccaagaccaaacccttaagccttcactccagcacccctacaaatggggtggggggagagcctgactgaccctactagaccctatttagggcttgttcggatattactaatacacatcgattggatgtgattggaaaaaattgagaagaattttgactcgattgtgattcaaacccattcaatttcactt

SEQ ID NO: 296226 - DNA, 319 bp, Zea mays
gtcttgaattcccgggtcgaccgactctaccggtttctactctgcctacctcatcttttatatagttgtcttgaccaccaatcacaagtatgaggatcattacatatgggagtcgcaaacttacatttcattcactgttactcatgacacttcagggcatcagcttttaatgggcactaaaatcacactgttccttaaagactatcatctgtagtacctttacgatcgtctcctcaaggatcttttcaacaatcactctgagttcatcaactaccccatctccctgtatactgaaaagacaacatacaatgaaatttct

SEQ ID NO: 296227 - DNA, 298 bp, Zea mays
gaatttccgggtcgaccgcacgcgtccgcagatccaatcggacgcgactggcaaccttctaccgtatatctcacgcaaacgcaaggccggcaagtgtctcattaacaacggcgcgaagcgtcacctgaaggtccttcccaacaacatccagaggatcacgaaccccaccatccagaggctcactaagacggctatcctgaagctcatctgcaggcttatctactagtacaccctctgcctgctctacatctttatccacaatgtgatccacaactctgtgacctacactgatcacgcc

SEQ ID NO: 296228 - DNA, 319 bp, Zea mays
gaattcccgggtcgaccgacgcttcacgtaccaaccatatgaccctacacacatctagtgaactgaagaaagacacaagaggggatagcgaacattcctactgcctatggtatacctacatatatatatctgaacaagtcccaccggcgagcacacacactgccacccgttcacagcaggcgaacctatcaatatattccgattccatactactgataccgaactaggcttacactacctcaagaaaaaatctagctccactcctttttcggatgcaatcatagctgacgttgatatgtacaagtttgatccatgcaaa

SEQ ID NO: 296229 - DNA, 259 bp, Zea mays
atttccggatcgacccacgcgtgctacacttagatctccaaacactcgtaactatcctactatgaggttacatctgtccccaaaagcatttgtggtcatagaagctggccttggtttgtcagacctacaatcttacttacatacaattccttcttttaaatatcttatgaattgctgctacttaaaaaaatcatacttttttaacaactcattaatttaatcaacaaaactctctacaacttaaaatatctatatcatt

SEQ ID NO: 296230 - DNA, 372 bp, Zea mays
gtaccggttcggaattcccggtcgagcacgcgtccggagaaaactgcaatgtgtgtaacagtgcttcagatgctcatgctaggcagcggttattggcttgttactaggcctggaaagggcctgcattgtccacagcttgttctcactttgaccagattcctacatattgcatcattctatgatacgattggcgtctatgacagtgctgaccttgttcaaatctatgcagttactagccgaatcttctaataggcggttgtagattttgcaggcgacgaactactgcatattgcgacaactgtaaaagttacacatgatcatctcgatcgcgctctagaggacaccaactcatgagttcttattaacttgata

SEQ ID NO: 296231 - DNA, 343 bp, Zea mays
cccacgcgtccggaggcattgtcagtagtgagcaaggccagcagcacagcagagcatcgactcaccagggagcagcacggcgactgcgcggcgtggctgaacctgacgctgggcgcgagcgaatcgccgtcgccgtctccgtccccggacgccgcgagctgctccgcggactccgagtccgggtccgggtccgggcccgggcccgccgtcaagccgaccccgcacaaggtgttcttctgcaacttctgcctgcgcaagttcttcagctcgcatgcgctgggcgggcaccagaacgcgcacaagagggagcgcattgccgtcaagcgatcctcgttccacgcgc

SEQ ID NO: 296232 - DNA, 493 bp, Zea mays
  unsure (1)..(493): unsure at all n locations
accggnccggaanacccgggtcggccgcacacgtacactcacgcttcctgacacttcactcgaatcattatacatcactcttcatgtgtgccaccgtcgcgcttatataagtgcgcgccggcctgcaaatcntatatattgtattctcaaaaagctgggcaaagacaaattgcttggtcactttagccagcaaaggactgtattttttattgacggtggcttatacaaacactacaagaatttcattgcctgcctagaggctacgctcacatacctgctctgcgaggaggttgcctcatcttttgttgtcaagtataccaacgacttctcatgaatttgatctgcacttcttgcttccttccactcccagtatgctgaagctgcatatttctagtatctcggttttcctactataccttttttttctttcccaccatttcccccttcatccaaagccccccttttgccacttcatctctctattttctttcct

SEQ ID NO: 296233 - DNA, 420 bp, Zea mays
  unsure (1)..(420): unsure at all n locations
cggaattcccgggtcggccgacgcgtacgatctgtgtgtgaccccngcgcattaccccatccgagaaattctggagaaggaaaanaangaggagagttttgctaaaacagaaggtaggccggagcctgcattatatggaagcgaggacatccgccctcttagcatagatgacttcaaatctgcccatgagcaggtttgtgctatcgtttcgtccgactcggcgaacatgaacgagctccttcaatggaacgacctgtacggtgaaggcgggtcaaggaagaagaaagcgctgagctacttcatgtgatggggtgagagtatagaatccagaaggatcacaaccgtggcataagatcagaagaaacacagccgtgccaccacatcggtacagcggccatagtaccacacccactatggccc

SEQ ID NO: 296234 - DNA, 355 bp, Zea mays
  unsure (1)..(355): unsure at all n locations
ccggnccggaatncccgggtcgacccacacgtacaatttcaagtcctcatcagtaccatagatcttttgaactgaatcaaactttctaaaggtgcggttttataactagggtgggtggccgaaactctntcttnncttcatttgtatatgacatcactcaccactcaacctttcagaactttgagcgttgtctgactgattttttataccacacaaacccaaatatacttcttatgctgtttggcatcatatcttatctaccacatctcgtatcagttcacacccacgaaggaaaaccattcgcagagagggaatcgttgtacttcatggagacctctgcgcttgagtcgaccaa

SEQ ID NO: 296235 - DNA, 470 bp, Zea mays
accggtccggaattgccggatggacgcacgcgtgcgatcacaagcaaaatcaacacggtcgcagcacaagcaagaaccacacctactcggtcaccggtgatcatgttgtcgggctgcggcagcaagtgcgagtgcggctccagctgctcctgcatcagcgtatgcaacggctgcggtatgtacactgacgtgtacaccaccgtcaccagcagcgtcaagaccacggtcctcgacgctccgaccaccaaggtcagcgccggcagcttcgacgcggtcaccgacggcgacagctgcgactgcaacacctgcaagtgcaggaccagctgcggctgcttctagtgcagctgcaactgaaccggcccggttcggcgatagctcacgagagtcgagaggacgacgaccaggaggcgtataatacatataatagcggtctacagttaataagatcctgtcaactgcacccgccatta

SEQ ID NO: 296236 - DNA, 461 bp, Zea mays
accgtccgaaatccccggtcggacccacgcctaccggccacttaccaacacctgggtgctcatgccctggaacttcccaacaatgctattcgtggggtgcaaggtgctggcaatctgcatgctgcaccactgctattcaacgtattcactgccaatgagcacaaaacgccgtggcgcacgtattgcttgaaggaagatgaaccaaggcgcattcaaaaaggtgcttgagaagcttgcttgtgaaaggtacaactcttgttaatccaattgacttgaaacattttgggctaaacatggcacaaataaagtttgttaacgatcaaggtaattgagaaaaggctttgctattgttttgccactttgtaggttgttattcttcaattaggcctgatttattggctgtatgtctatgtgcccatcttcagacatttgtaggaattagtttgttctcttgtttaagt

SEQ ID NO: 296237 - DNA, 339 bp, Zea mays
gcggctgctgctgtgtggacatctgtccgacggtctggggcgctcatggtcaacatcggagggcttttggagctagggaccaatgaccggttcaggagcgtggagcacccgtggccagccaacatgagcagggacacggacagggtctacgaggcggtcttcttcaacactgacgttaggaggtccgagaggatgtacggacccattccagaccccagcaagcccccgatgtacaggagcgtcatggaccgagacttcatcgtatagttcaacaccattggactcgatggccgttcgcttgaccactttaagctctagctggctggctgggtacgtttc

SEQ ID NO: 296238 - DNA, 439 bp, Zea mays
cccacgcgtccgatcaacgcgtccatcactaactccaacaccgccatcgagataagggagttcctctgcgagaagaaggtcagaaaggtggacatgcttgactgcgtgaccatcctccgctccgagaaggtcaaggacgagcttattctcgatggcaacgacgtcgagttagtctctcgctccgtcgtcctcatcaaccagaaatgccatgtcaagaagaaggatatcatgaagtttttggatggtatctatgtgagcgacaagggtgtgatcgaataggttcagtgtgggtcaatttgtgttatcttttgagttggtattattgtttgttttgctatttctctaggtttctttgttatcttttgtatgtttttttgtccttttttttttcctctattttatcttttttttttttttttaatttttattcttttttttt

SEQ ID NO: 296239 - DNA, 447 bp, Zea mays
ttcccgaattgacggacggacgcactcgttctgatacagcacgcctaaacatactcacatagtctgttacctatcccgaacgatcggagcttagtgaaccaaccatccgggagtgggatgccaaaaagacacaagctcaaaatgatccacctgatcaccagagaaattgcgaaactctctagcctatcactcatatccatcatcataggagccgctacatatatgatcttcactacacaaggaatcagatatcacaccatctttaccagtttagcgctcgaccagagctatgcagatcatcacctgatctcaaagtgaaaaaagccaggatactagcacatacgctggctcaggtgcatacagacacctgaccacaactttgcaacgacttgtacctgcctagtccccaagcatttgatggatgatcaagatattcaatgtgtccat

SEQ ID NO: 296240 - DNA, 256 bp, Zea mays
agcccacgcgtcccagcatggactgcgcatcgatgggtgctggtacccccgtcaggctctatgctaagcggaatcctaaggaaaacaatggggcttcctggtgctgcaaaacaaacaataactaacacgggcggcccgtctagaagatccaaactcacgtacccgatcatgccacctcataactcttctatactgacaactaaaactaatcacttggccgtcagtacacaacgctctgacttggaaaaccctgacg

SEQ ID NO: 296241 - DNA, 389 bp, Zea mays
ccacgcatgcgtccctcactctcgtcgccggttggaggaataagacgaccaagcgcactgcccgggaatctggcgatgtctacctcgagctcggtagtaagctctaccgtttctcgcaacatgatgaccaagagcaatatacaacgctgtcattctcaataggcgtactatggagtaaaaccaatccaccaccaatctacatgctccgatcttgtcaagtatatggaaagaaaagagaagaacatttctagcattgtctgacaaacacacatgacaacaggatccatgacagttcagcaatgaacgttactgtcctgaggttcactgagacagaaagggccatgattgacaattctgcgagctagtgcctcacatttgaccagatttgt

SEQ ID NO: 296242 - DNA, 405 bp, Zea mays
cggtccggaatggcccggtcgacccacgccgaccgcacgcgttcgctgaagctgatgttgggcacgcctaacgccccaaagcctgaagaggatgagtctgctaggctaacgcaagcttaccaccgggggctgctccctagggctgtcatatctcaacatcaaagcggtgaccagcctcagccactcctgatggagggccaacagcagcatgctgcaccagcatctgactacttcaacacttcagcaccaccagcagcggatcggactgtgtatccatcaatggatccacagacgatgggtgctatagtttaaccccatgacagtgaatgcaaaccagtgccctaacaagcttggcaaggtcaggcattaagcaacccagcacatgggggccgtttattctgcatt

SEQ ID NO: 296243 - DNA, 380 bp, Zea mays
aacggatagcgctcctcgttggcgccactggcgggtggttctgcctctggtctggtgtgtgtgtgtgtggtcacacttgccagctagcagaggcgcctgcttgtacctagattactgttaccattgtcgtcgtcatcggctaacattgtcataatgtcagtttgggtcatgttagattaagtcaaaaaaccaagtcaataatgaagatacaatctgtatgagatattttattcggttcaaaccattctctatatttaattgctagtatgatgtgatttcgtgttttctaactctactctctttattgttttgctttttattagtattaaaggggggtcttttttaagggaacaactttttgtgtggcgctttttttatgt

SEQ ID NO: 296244 - DNA, 410 bp, Zea mays
cggaattcccgggtcgacggacgcgtgcgcccactcgtccgcccacgcgtccgtccatggccaatgaattggccggcaccgtcaaggagatcctcggtacctgcgtcagcgtcgggtgcaccttctactgcaaggaccccaaggacctgcagcaggagattgacgacggcgaggtggagatcccgtccgcttaagaaggattggtgtccaggactgtgttatctttgctgctgaagccattttctctgcctagattttctcatatttatttgaggtgggggtggacgtggacgtggaactatggaagttatcacagcggagttttgcttagaaacttgtcatgctttagtctgagacaatttatgaacattcctaggtacaatccaagttaccaggcctgggtttgttgg

SEQ ID NO: 296245 - DNA, 274 bp, Zea mays
  unsure (1)..(274): unsure at all n locations
gaattcccgggtcgaccgacgcgtccgcccacgcgttcgcccacgcgttcgggtggatcgcttggtcaaggtccgtgtgctttaaagacccagcttcagtggcagtgagtgtggctgcttgtgtangctttggtacgtacgggctttatttgcttccaagtcagggtctggatgttgtgtactacttgggtttgtcgaattattatgagcagttgcgtattgtaattcagctgggctacctggacattgttatgtattaataaatgctttgctt

SEQ ID NO: 296246 - DNA, 370 bp, Zea mays
  unsure (1)..(370): unsure at all n locations
cggaattcccgggtcgaccgacgcgtgcgcccacgcgtnncgccacgcgtnccgcgtgcgaaaggcttgacccaacaacaacaacaacagcagcggtggcgccttttgaagcttgacgggatgccgctgtcccccaacgtggtgcgcgtggccaccgtgctcaacgagaaggggctcgacttcgagatcgtccccgtcgacctcaccaccggcgcccacaagcagnccgactttctcaccctcaaccctttcggncagatcccggctctcgtcgacggagacgaagtcctcttcgagtcccgtgcgatcaaccggtacatcgccagcaagtacgcgtcggagggcacggacctgctccccgcgacggcgt

SEQ ID NO: 296247 - DNA, 274 bp, Zea mays
gcactcgatctgatagagctgttccaagagaacgcatcagtagcctgtgagccacgccgcagggcgggcgtcaagaggcacaccgaccctggcttcttcaccatcctcctgcaggacggcatggtcggcctgcatgtgctcctcgtcaacaacaggcagagcggcggctgctgggtggacatcgctccccggcctggggcgctcatggtcaacatcagtgatcttctgcagctcgtgaccaatgaccggctcatgagcgtggagcaccgggtgc

SEQ ID NO: 296248 - DNA, 320 bp, Zea mays
acgcattcttgccgtgacatatgccacctgtcgggctgagccctactcgcactcctctgaggcctcactggccatggcgatccggacgagcaacaacgtgatcggctcgctgaacctggcgacactcctgctctcggtccccatcctcgtctcgggaatctggctgcggtcgcgcgcctacggctccgagtgcgaccacctactgtccaccccgtccatcgcgctgggcgcggtgctcatggccatcgctgtcgcgggcctcgccggcgcctgcttccgcgccacctgtctgctatggctctaccttctcaccatgctcg

SEQ ID NO: 296249 - DNA, 321 bp, Zea mays
tgacgtaccgttccggaattgccggatggacccacgcattcgtgagcagctatgtgtatgcatgttgtctacttacaaacttatatctggtttgaggtccatggggatcaactaatgggtctgggaatttatattatgatgttgacgataaaaataaaaaattactattaaaatataattaaataaaaaaaataaaatataaaaaataataatataactaatttataattaaaatataataacaaaaatacaaataaaatttaaaaataataatatattaattatttaatttaaattataataatttaaaacttttatttt

SEQ ID NO: 296250 - DNA, 358 bp, Zea mays
tccggaattgaccggatcgatccacgcataatatgccgcaaccctagcttccgatctcaattgcgaaccctcgcgtgttcttcggcatgacggtctgcggtgcccctgctggccggatcgtgatggatctgtacgccaaccaggtgcccaagactcgtgagaacttgcgcgcgctgtgcacgggccataagggcgtgggcaagtccgggaagccgtttcactacaagggcttcaccttgcaccgtgtcatacccgagttcatgtgccatggcagatactttacccgcggcaactgcaccggctgcgagtgcatctacggtgagaagtttcccgactagaagttcgagcgcaagcacac

SEQ ID NO: 296251 - DNA, 295 bp, Zea mays
gatgatccgaatggtcgacatattcgtactaatcttggtcagcatgactcgtgcaatatggattcaaatgtgcatgtcgttgactcaactttacagatccgaggaatgcatactcttatccgcgattgggtcatctccacacctgactttgtatgatattcagatctattgatccattcggcagtggctcatggtcttggacattgtgccatttacagaaaaacatgttattaccccaacaggatcctgtaatatgggagttgacttgcgtatgaagctctattgaatctctatt

SEQ ID NO: 296252 - DNA, 371 bp, Zea mays
tcggcccgcaattcccgggtcgacccacgcgtgcgcggacgcgtgggtggaaggtgaggatggaggccaaggccgagggcacgaacggacggctcgcgggcgagcgccgaggtgctcgaggtggccgtggacgtgaccgtggtctagttcgtgcacgacgccggggacgcgctggactttaacaagttctgcgccgtcgacgtccgcccggggcttacggagatcgtctgggcgtggcagggcgacagcctcggcgacgacgtcggcaccgcgtgaacaagcgtccccgtctgtcacgtggaagttgtagcaactttacgtaggagttaaacacggctgtactggcaccagctttttatagcatgtaaagt

SEQ ID NO: 296253 - DNA, 313 bp, Zea mays
cttcgcaaagcgccgacgtcttcccatccttcatggctccgaagaaggatggggtcccggccccgtcgtcgaagcccgtcaagtctctgctgtggcaagcagaagaagaagaagtggatcaagggaaagctaatggagaaggtgaacaactcggtgcttttcgaccaggcttcctactacaagctgctctttgaggtgcccaagtacaagcagatcacccttctccattctattctagcgtcctatgatcaatggctctctggctcgtagggctatcaaggaccttatggctcgtgttcttatcctgttggtc

SEQ ID NO: 296254 - DNA, 330 bp, Zea mays
ccggtctcggaattcccgggtcgacgcacgcgtccgcccacgcgtccggacatttgaaaacatacagaggtggctccgcgagctccgtgaccacgcggactccaacatcgtgatcatgatggtcggcaacaagtccgacctgaaccacctgaggtcggttccagaggaagatgggcaggcgttagcggagaaggaaggcctatccttcctcgagacatccgccctcgaagcccttaacgtcgagaaggcgtttcagaccgtcctctccgacatccatcagatcataagcaagaaggcgcttgcagcccaagaggcagcatgtagtggacc

SEQ ID NO: 296255 - DNA, 424 bp, Zea mays
cggttcggaattcccgggtcgacgcactcgtccgctcgtagagagaaggaaaaatatccggataccctagctcccgatctcgatggcgaaccgtcgcgtcttcttggacatgaccgtcggcggcgccccggcgggccggatcgtgatggatctgtacgccaactaggtgcccaagaccgcggagaacttccgcgcgctgtgcacgggctagaagggcgtgggcaagtccgggaagccgttccactacaagggctccacctttcaccgtgtcatccccgagttcatgtgccatgacggcgacttcacccgcggcaacggcaccggcggcgagttcatctacggcgagaagttccccgacgagaagttcgtgcgcaagcacaccgtccccggtgtgctctccatggccaacgcctggcccaacacc

SEQ ID NO: 296256 - DNA, 399 bp, Zea mays
accggttcggaattcccggggggacgccacgcgtccgtgctttcgaactctgaagctgacgtcccttagctttggagacttgaaccacttgagcagtgcaacgatgagtggtgtcacttgctgcctacgcttcccaggacagcttaactctgacctgcgcaagcttgcagtcaacctgatcccgttccctcggctccacttcttcatggtcggctttgcgccactcacctcgcgtggctcgcagcagtaccgtgcactcactgtccctgagctaacccagcatatgtgggatgccaagaacatgatgtgtgctgctgacccacgccatggtcgttattctacagccctttccatgttccgttgcaagatgaacactaaagaggttgatgagcaaatgat

SEQ ID NO: 296257 - DNA, 359 bp, Zea mays
ggtccggaattcccgggtcgacgcactcgttcgcccactcgttcgcggacgcgtgggttgactattaggtcagtatctgtttgtggagactgggtgtttgatttatttagccgtttgtgactggttgtagctagcggtggtgcggtggtgatgttcttgaggcatgaataatgctacatgcatgtgatgtatccatgttttgtgtgtggtaaacctgttgtttgtataagctgtatgcatgtgggtctttaatttgttttgaaagcaggtttacgttattgaaaaatatatattatatatattttatatttcttatatatgtaatttattttttttattaataaaaagggcgggctttt

SEQ ID NO: 296258 - DNA, 361 bp, Zea mays
gaattcccggctgcgcgcacgcgtccgcccacgcgtccgcccacgcgtccgtgcactcgtccgcccacgcgtcctcaaaggacgtgttgcggctgcatgggagaacggaaacctactggacatggtcgaagagtgcttatcaccaacatttgattgatgcctgaatatcaatatatcggtgtgacatggtgttgatgttcaggagccacacatgctcattgccaatggagttcactcctgtctttcgagaaccaaaatgccttgggtgttaagtgacgtgttgcatgattcttttcctccgccccgttcagttaatatatatgctactatggatctacccttttggacgtttttggtgctt

SEQ ID NO: 296259 - DNA, 289 bp, Zea mays
cacgcgttcgaaaagaaaggaatgctgcgtatgaatcatttacctattcttccgaattatatgtatccgcgagattaatttgtggtttcgatgtgcaaaatgaaaccatttctattggaaacattcctattatgaattccttaggaacctttataataaatggaatataccgaattgtgatcaatcaaatattgcttagttctggtatttactaccgttcggaattagaccataagggaatttctatatataccgggactataatatcagattggggaggaatgtttga

SEQ ID NO: 296260 - DNA, 390 bp, Zea mays
gaattcccggggggacgcacgcgtccgatttagtggtctggatcaatggaagggttttgtcctagccagccggcaaagatgagctggtgattgtaatgaggaggagaggaggccactgctaccctactacgtaccctcctctttgtgtgctgccatccgtccccgttagacgatcgaggagagaataacgcatagctctctgctcccggcctgtcttctgccgtcccggccgtttaatttactagtgtgttcgtcctatatgtttagcagcagcaggtgtattgtgcgggtatgtaatggtattgcaactatattgggtgtaaaaccataataaatgtgggcaaatatgcaaggaaaaaaaaaaaatataaatatataataattaaatta

SEQ ID NO: 296261 - DNA, 441 bp, Zea mays
gaattcccgggtcgacgcacgcgtccgctagaagctcgcgtccttgtccgccttgtctttctcgctataacatgaatcccaccgggacgtccctctagatcgggacctgggtgcgcctcttcctcccctgtgagctttccaatcactccttctcctatggcaccatgtgcctcaccaagttcacttcttcttatgctcatagtactaggctgggtggtgttggtagacgttgctcaatttatctggtttgggtagtgatggatgatatgatcttcgtctatttgagctgttaagactgatttacatttttccacgtcacgttttgtttgatggtgcattgttccaaatcacgtttttaatactgcattactgtttcttacatttaacaagttttattccttgaatttttcaaactttaattcttttttttcatttttattt

SEQ ID NO: 296262 - DNA, 384 bp, Zea mays
acgcgtcggattcaataccatttaccaaactctttcatcaattctcatctttcttctcacgaactattaattcatcatgtcgagcacagctggccaagtcatcaaatgcaaagctgcggtttcatgggaggcagggaagccacttgtgattgaagaagtagaggttgcgccaccacaagctggtgaagtgcgtttgaagatcctctacacctctctttgccacactgatgtttacttctgggaagctaagggccaaactccattgtttcctcgtatatttggtcatgaagctggaaggattgtggagagcgtaagtgagggtgtgactcatctgaaaccaggggaccatgccctccctgtgtttaaccgggagtgtggggactg

SEQ ID NO: 296263 - DNA, 383 bp, Zea mays
cggaattgccggggcactcacgcgtgcggaaaagagtagtggcctgtaggatgcgaagaacaagagctcaaatcggatggaatcttataaagaaagaaagatcatattcatggcgatggcaagcctggctcgacggaagggttacgccgtcgtcttgtcgtcgaggtcgacgttttgtctgacaagctggaggggattcgcgtccggatctgacgaaaacgacgtcgtcgtcatcggcggcggtcccggcggctacgtggccgccatcaaagccaggcagctcggtctgaaaaccacttgcatcgaaaagcgtggcacttctcgcggtacctggctaaacggtcgatgcatccttttcaaggcacttctgcattcttccacat

SEQ ID NO: 296264 - DNA, 394 bp, Zea mays
cggaatgcccgggtcgactccacgcgtcgggagcgtgggagggtccgaagtggtagatagcgagtctggttcctgaggtgtgcttctttctacggcagcaacgtcacaatcagaaacaacaatggccaacactaactcggaagatgatccctctctggatctcatgactgagctccttcgacgactcaagcgctctctcaaacctgacaagcgtcttattctcattggcccacctggatctggaaaaggcacccagacaccaagcataatagatgagtactgattatgccactgagctactggtgatatgtgaagagcagctgtagcagctaagacccctcttggtgtcaaggctaaagaacctatggataagggagaactcggtgctgatgac

SEQ ID NO: 296265 - DNA, 476 bp, Zea mays
accggtctcgaattcccgggtcgaccgacgcgtccgcccacgcgtccgcccacgcgtccgccaagatgtaccagggcgcgggtgaagacatgggcgtcgctggctgcatggacgaggacgcccccgctggcagcggcggccctggccccaagatcgaggaggtggactaagcggtttgttgtcagtcttgagcgtgctgcagttgctggctggcccagtcgctgccgcgagttatcgtcgtcggtcggtgcggtgtgtccgcttaaactttatttgtggggggctgtgacttttgaggtgtttattttttttggacctttggtatattctttattatttcatgtttttttcgtgttcttgtttttttttattgtttatatttttttttgattttttatttttttgttttttcttatttatttttattatttttcttttttttttttatttttcttttttattttttttattttttt

SEQ ID NO: 296266 - DNA, 323 bp, Zea mays
tcaacttcctccacttcgaccgcgcgatgccccactgtaaccttaaggccaccaacgtgctgctggacgggctggacctgaacgcccgcgtggccgactactgcctgcaccgcctgatgacgcagtcgggcgtggcggagcagatcctggacctgggggtactgggctaccgcgcaccggagctggccgcgtccaagaagccggcgccctcgttcaaggccgacgtgtacgccttcggcgtcgcgctgctggagctcctgacgggccggtgcgccggggactgttgttcggggcccgagggcgccttcgtcttttatcttatt

SEQ ID NO: 296267 - DNA, 361 bp, Zea mays
gggtgcgtgggagggtccgaagctgtagagacagatgctggttctgttctgcggtgctttctactggcagcagcatcagaatcacaaacaacaatggccaacactaacttggaagatgtcccctctctggatctcatgactgagctccttcgtcgtctcacgtgctcttccaaacctgacaagcgtctaattctcattggcccacctggatctggaaaaggcacccagccaccaatcataaaagatgagtactgcttatgccacttagctactggtgatatgttaagagcagctgtcgcagctaagacccctctcggtgtcaaggctaacgaagctatggatcacggagaacttgattctg

SEQ ID NO: 296268 - DNA, 409 bp, Zea mays
cgggtcggcccactcgtgcgtcgattggtactacacctacatgctgatagctgacgaggcggaaatcggaggccaggttgctaccatctaggaggtgcgcctggtatcatgcaccaggtctactgctcccgagaacacgagcctacagacgcgctcacatgtcgagagctccgtttgccgcacaatacctcaacgacactgtgccagacacagtggactcaccatcgacagaggagtctaatgaccggagatcatccagcgcactatatatgcgaactggaactgtgggtggaattacaaaccgctagagtcatcgtgccgcctgtgggatgtgaaggattccatgcactccagtcatctggcaatcactcaaagaaattcatgattgacccattctactagcaagatt

SEQ ID NO: 296269 - DNA, 271 bp, Zea mays
taccgtaccggaattgccgggtcgactcatgcgtcgagcgcatacgtccacgcgttcggagtcttccaaaatcttccaaggtgacgagctgctctttcctaccggtggacaaggcacagctgatcgaggacgtgaggcatgctctatataccgacaagatctacagttacgcacagggcatgaacatcatcaaggccaagatctaagatacaggattgggcctgaaccctagggagctagcgaggatcttgatggcagggtgcattatacg

SEQ ID NO: 296270 - DNA, 385 bp, Zea mays
cggatgggccgacccactcgtgcgtcgggatcctgtgagtctctactctgctttcacagagtcgaatcctctgacgcagcatgcgtcaaatggcggacggaggggcctaggcatcgccgctgcggccccggcggcgcgtcggctctagggacgagcttataatattgtgccgcatatacgatcaagacaggctcgccttccagattcctatgatacacgtttatcgtaaccaaccatcaatggcagagaaagacccagttcaagtgattcggaaagcactggcaaaaacacttgtgatctattacccttttgcgggtaggcttaaggagaggcctgaccacaagttaatggtggattgtactggagagggcgtcttggtcattga

SEQ ID NO: 296271 - DNA, 361 bp, Zea mays
cccacgcgtccgctcgctgcgcgctgggagccccgccgagttcgctgttgagcaccgccgcgaagactcttcctgccgtgcgtcgtcgcaaggttgcctttggtgcaatctatgcttaggtaaagaagaaggcgtcgaggcggatctccaggagtttcggggctttgatgagttcgaggattaggctagcgactacccccagtcagctgcctgtggtgggtttatttacgttggctacgtttctatttctggtactttgattatattatgttaattgactctagtcttttatattattacttactctttattgtattcgaaagcattgtgctatgatgagtcatttatttaaatctcttgt

SEQ ID NO: 296272 - DNA, 362 bp, Zea mays
cgggcgcgtggggcatgctattagcgtttgatgggcctctgctgccagactggggggcggattatcgcggtagactagtccattgctaactgactacatcatcgactcaggtgatgctatcgcacatcaagacaaatgtagccactgagccttgatcgatccggggtttggtgtggaggcaatgaatactcttagtgggtattctaacaggagatcatacactacactttatatgggaactggaactgagggtgggattacaagtgctagaatcagggtgccaaatgtaggatgtgaaggattcatgtgctcaagtcatctgtcaatcactcaaagaaattcaagattgatccattctacta

SEQ ID NO: 296273 - DNA, 390 bp, Zea mays
agccgccacctctgattagcgtgagtacatgggtacgtcgactcaagaacgtaagctggctagttggttccatgtatgtatggagagggttaaatgtaattctttccaatggtccaaggcggatgctgcttccgaattagcaccatccgattcttttggaaaagatgtatactattacagtgaaaagtgaaaaaaagagagagttagctccttataaagctttctgagctctacacgtactacctccgttctcggaataaaaaatttttttatttaaaaaaggggcggccgttttaaaggatccaagcttacttacgcgtgcttgctacttctaacctttttatagggtcacctaaatttaaattatctggccgtctttttacaattttt

SEQ ID NO: 296274 - DNA, 264 bp, Zea mays
cgtccggaggccagctatgacatctgccgccgctctagatacattgagcgcccaacctacaccaagctcgacttgctagagtcccaggccatcttatccctaactgcttccctgaggatcaatggagctctgaacgtagacgaaaacaagttccagaccaacctggagccctacccaaggatccacttcatgcatgcgaccaacgctccaaacaaagctgactagaaggcccacaaccaacaacagtcacagagccaaaacaac

SEQ ID NO: 296275 - DNA, 154 bp, Zea mays
gcaacgactggttcatcaaccagcggaagcggtaccggaagccgtcggaggagatgcagtagcccggttttgaatgggggcaggcgggccttttttaccgccgccgagtcctacttcgacccaagcttcgtggtagcaacgccggcaaagttca

SEQ ID NO: 296276 - DNA, 162 bp, Zea mays
gtccggtagattcgcgactggtttcctctagggcttagttctgttggcaaggcctcaatttagcgagatgtttagtcatgagttgcgcacacactataccaacctcccaagtacaaagcataccagtatattttgtgggtagtggcactcgtctagctgtta

SEQ ID NO: 296277 - DNA, 325 bp, Zea mays
aatacccggctcgacccactcgtccgcgagttactagcccaagaacattctcaactcctgtgctgctggttttatagcatcgcatgtcaccatctgtctggtgaggagactacccttactacaagattgctgtcctcgacaagctcgattactgctccagcctaaagaacctcaacccctcacgggcttcaccaaatttgaagtttgtcaagggtgacattgcaagtgctgatctggtgaaccaccttctggtcacagagtcgattgacaccatcatgcactttgctgctcagactcatgtatatatttcaattggcaattcatt

SEQ ID NO: 296278 - DNA, 342 bp, Zea mays
gtgcggcagggcacagcatacaccgcgaatttcgattccggcccgctcccaaacccgaccgagcagagcgcatagccccccaacctcagatcaatccgcagcatcgatggcgcccaaggcggagaaaaagccggcggcgaagaagcccgaggaggaggagcccgcgacggagaaggcggagaaggctccggcagggaagaagccgaaggcggagaagcgcctccccgcgggcaagtccggcgccggcgagggcaagacgggcatgaagaaagccatgaagagcgtggagacctacaagatctacatcttcaaggtgctcaagcaggtgcaccccgacattgg

SEQ ID NO: 296279 - DNA, 414 bp, Zea mays
tgacaggtatccaataaaaacgatgaccttaatcgaaaattttgctgatacgctgatgcaggacttagggtctactattgctatcgatgtagacaacggattgcaaatgggaaaaatggtataaaaacgctggatatttttttttgcctaaactacagctgtgctacagcaaattttgcttaaaagcagaaaaagtgatctatggttttgctgacaccaagctgggaaataggaagactgaatcgacctcttaagcggggaatgtatccttttttgctgccacatataaaatgctacccatgcatacctgggcaccttataacttatgtttggggatttgctacaaagatggtttcaatatataggggtactagaatgtctgtggaaaactaccgtataacgcacatttgagtg

SEQ ID NO: 296280 - DNA, 335 bp, Zea mays
ccggatttccgggggggacgaacccttccgccaacccttccgccaacccgtccggggtaaaaatgaaccatgttattctggccgggcttgcaaaccttgtcgggaaaaaatgaggaggaccaacctgattgacaggttcctggaattaagttcagttatgaatcctggtaaggaagcaaagttagataaagtaaatatattgagtgatgcagcccgtatggtggcacaacttagaggtgaggcagaaaagcttaaggaatcaaatgagaagctgcaggagaatatcaaggatctgaaagaggagaagaacgagctccgtgaagagaaagtgagac

SEQ ID NO: 296281 - DNA, 270 bp, Zea mays
cccacgcgttcgcccacgcgtccgcccacgcgtccgcccacgcgtccggttctagattccgccgcccgcgaagaccttatttttgaagctcgtatgtccatatggtttgcagaacatggacgatgagacggcttgaccttatattcccgcgtcctattacttcatagcttattcgggatgttctcagacatgttattcccatattgacgatgcttaagatttgtactgtattgtttcagtgacagttacgcaaaacgattatgatctaaa

SEQ ID NO: 296282 - DNA, 286 bp, Zea mays
gggctcatttcctattctaaatactccaatgtccttcattctttttacgacaaacttgatcgggatttcgtggatattaggacaaaaactcgcatcttttttcaaagagaagactatctaaacaaaattagacatcttcgtggtaaatatgcgctgacagaaatctacaagattaccctctagacaacacaacttttgagagatgataattttgcacaaaatgcattcacccgatatgataagatctgcccattctacatatatttttgcatgatgcgcaacatta

SEQ ID NO: 296283 - DNA, 366 bp, Zea mays
  unsure (1)..(366): unsure at all n locations
cccactcgtcctcccactcgtcttgtgatgtcctccgccgctgcattgtccatgggcaccggtggagactgagatggggggttttgtcaagacccacaagatcaatgcgtacttgaagcgtttccaggtgaagttcaagagaaggcgcgctggcaagacagactacagggccaggataagtcttattaaccaagacaaaaacaattacaatacacccaaatacatatttgttgtgcgatttaccaacaaggacatcacagcacaaatcatctctgctagtatagcangtgatatggttcttgcttctgcttactcccatgagttgccacaatatggtcttgaagttggtctgaccaactatgcatt

SEQ ID NO: 296284 - DNA, 449 bp, Zea mays
accacgcgggcgatacacctgtgctcacgtctcccttcccatatccatctactcactcgggccgcccctccggtcgtagccgttcgaaggtgcggcacccggcaaaccacccatttcattctacatgaatcccgagtacgactaccttttcaaacttctgcttattggtgattctggtgtcgggaaatcatgcttgcttctcagatttgcatacgattcttatttggacagctatatcagcacaattggggttgatttcaaaattcgcacaatggagcaagatgggaagaccataaaacttcaaatttgggatactgctgggcaagagcgcttcatgacaatcactatcagctactaccgcggagctcatggaatcattgtaagttggccacctgaactagcaacttctgaaattttgcaaccatattgaacatattacattaattgct

SEQ ID NO: 296285 - DNA, 399 bp, Zea mays
cccacgcgtccggtgctgcacaggcaatgaggaggcctggaacagcccgaactggcggaggacccggtgcacaacgtgctcctccacgaagatgtcgaagacgagcggtttcctagtcggccaatagtccctgtcttaaaagcatagggacaaaaggccgtaaggagcacgttgttgcacgacgttgtcggcgtacagggtctagtggacctggtcatccttcaggtcgtcgagctcagcgacgaagctcaggtgttaccttcctcttggtctccttggccatgagacacttatggccgaagttggggaaaagaagtcccttgttgacgacgatgttggcggcgtcctcgtcggaggaatcggtggagctctcgtcggagtcccactctcacaacatgt

SEQ ID NO: 296286 - DNA, 333 bp, Zea mays
  unsure (1)..(333): unsure at all n locations
cggatgcccgggccgaccgacgcgaacgtctggactttctttaccttgttccatttctatccaatggcgccgacctcgagggtgtctgcgggcattaaacgcgcttcacgctcncacgcgtaccatcgccgtgggctgtgggccatcaaggccaagaacggcggcgccttccccaaggccgacaaggccgccgccgccgtggaacccaagttctaccctgccgacgacgtcaagccccgcgttcccagcacccgcaagcctaagcctaccaagcttatgtcgagcatcacgcctgggacggtgctgatccttctctcagggcgcttcatgggg

SEQ ID NO: 296287 - DNA, 162 bp, Zea mays
  unsure (1)..(162): unsure at all n locations
actcgttcgggcttcttcttccccaccggttcgttttctttttctggttcgtggcccaaaaggaaggaggtgtcttctttctgacgttgagtaccnctgcttcnttttcggcctctcctgtgccaccgactaccactccctttacaactccttcagcaccta

SEQ ID NO: 296288 - DNA, 325 bp, Zea mays
ccggttttgaattcccgtgtcgacccactcgtcctccttaacccattgatcgagactgatcatctttcctagacgccatgaacgtggaggaggaggtcgtttggctcaaggaggagatccatatgctcgtcctgcatcatccctatggctcttacaaggtcaagtttggcgtcctcttcaacgtctaccgttgtgcaaatatctttgaagcactatttgtcacctttagggccgtcttgaagagtatgatctttgacctactatggcgagcttcttctgcaagtgtttcatgtctacttttatataactctgttgcccctacctt

SEQ ID NO: 296289 - DNA, 222 bp, Zea mays
accggtctctgattcccgtgtgcattttgagcacatgactattcgattagtggagtttttgaggtttaacctcggcagtgtcctggtttcagatgtcggaaatcaatatgcatgggagctaccatcctgtatcctctccaaatcagagagttcatggagattcatacagtaaattacaatggtgattccttccatttgttattttaatacttcaaccatttc

SEQ ID NO: 296290 - DNA, 366 bp, Zea mays
gacccacgcgtacgctaagtttgagtcctaactaatatttaagtttagctttccatcatcacttgctgaactggtctatgatttacatttataattgaagtctctcactttaatcaaaaaaaaaaaaaaaaaaaaaaaaaaaaaaaaaaaaaaaaaaaaaaaaaaaaaaaaaaaaaaaaaaaaccaaaaaaaaaaaaaaaaaatgccaccctttttaaaaaacccaacttaactaacccttccatccaacttaaaactttttttatatctacccctaaattaaattaaatgcccctaatttaaaaacattataattgaaaaaaccttattttaccaaaattaataccccttaaaaaaaaccccctt

SEQ ID NO: 296291 - DNA, 366 bp, Zea mays
gagggaagagatggcggcgtcggacgttgtttacctttgcttcgttggcggcctcgcctgggccagcgactaccactccctcaacaacgccttcagcacctacggcgaggtcctcgagtcgaagatcatcctggatcgggagacgcagaggtcccgcggcttcggcttcgtcaccttctccacggaggacgcgatgcgcagcgccatcgagggcatgaacggcaaggagctcgacggccgcaacatcaccgttaacgaggcccagtcccgcggcagccgtggaggctgcggttgcggatacggtggcgggcgccgtgatggaggctgctacggcggttgcggtggaggctacggcggtggtcgtgg

SEQ ID NO: 296292 - DNA, 390 bp, Zea mays
atttcgggtcgaggacgcgtgcggcagcttctgcttgctctggggggaaggatttagagtgagagcgagagagagatctagtagagagggtagtatgtggtcgtcgaacgagacatgttggcggtgttcagcgggcaggtggtggaggtgccggcggagctggtggcggctgtcagccggacgccgtcgcccaagacgaatgcgtcgcatctggtggggcgcttcctggccgcgtccgaaccggtcgtgttcgtgcagcttggcgaccaccggcacctcgtctactcccacaccaaccatgcgctccttcgtcccatgtcgttcgcggtcaaggacgatgtgttctgccttgtcgagggggtgctggacaaccttggtcgtttgatccag

SEQ ID NO: 296293 - DNA, 408 bp, Zea mays
aattcccggaccgaccgactcgtacgttccgaaaataaaatccatctgtttagaattcctatactagtactgactctgaggctaatgtctcattcaataattaaactcctccatctctataatacaaaaatggaacttcttaactacaaaatcctgcttaaaatccatatgcacaataaactaacactactacatatgaaacacctgctgtatatgaatcaagttatactacctatgacgaataggcttacaaacctgatatcaacatccaaacaactccaccatattttcttttcccaacaacaaaccaaacaaggcattttttcacactctatattcaatatcacatgcttgtttcttcaaaatagtatgattcaccttaatgttataaatttccccaaatactat

SEQ ID NO: 296294 - DNA, 397 bp, Zea mays
gaattaccgggccgacccacgcgtgcgcggacgcgtgggattcatcagtcagcaaattaaataccaaggacgattggtgaagcaattgcaattgatgcaaccttttttataacatatacaatggttgatggttgggctggggtagctggtgagatattgagattgaagccactagtgatcttccacctgaaaaactttttcttggtcaagactgagaaagacagggaagaggcaatggaccctggaagtattggttttgactcaagcgaacctcaaattcagctgtatttcttacttggtcttgtctatgcggcagtgacaccatttttgctcccttttgtattgatattctttgggtttgcgtacattgtataccgtcaccaggtaagcaagcata

SEQ ID NO: 296295 - DNA, 473 bp, Zea mays
cggtccggaattcccgggccgaccgcacgcgtacggttcgaacctactgaaaagaatgatatcataacatccacggcgtcctggctgggcatgaagagtgttctgaccggtctcacgtctctgatgggtcctgttccgatgctaaagctctacggagtcccatacttggtatttgttgcttggctagatatggtcacatacttgcaccatcatggccacgaagacaagcttccctggtaccgtggaaaggagtggagttatctgcgtggaggactgacgacgctcgaccgggactacggatggatcaacaacatccatcacgacatcggaactcatgtcatccatcacctcttccctcagatcccgcattaccatctcatcgaggcgaccgaagcagcaaagccggttcttggcaagtactacaaagagccgaagaagtcgggtgctctgccgtggcatctattccgggtgct

SEQ ID NO: 296296 - DNA, 252 bp, Zea mays
ccggctcgacccacgcgtacgatactgacttggtcgagactataaaatcattctggatgcggagacccatagggccgcgtagagaaagcttaagagcttattctacagagacgcgatacccagccccatggacggcatgaactgtacagagctagacgggcggaacattatcgcctacgatgcccagatccgcggcttgcggagaggcagcggtggcgcatacagtggcccgcgccctgatagaggcggcta

SEQ ID NO: 296297 - DNA, 366 bp, Zea mays
cccacgcgtccgcccacgcgtccgcggacgcgtgggatcagattgcaatctcggatcgtgtagatgcattctctacgttcctccggacctcagtctggtgataatctcaagatccgagaatttccggcgatttggtagcaaacgtgatgtaaagaaactaagagtgtgtttggtttgaggaatgaagtaatccatcttcttctcaaaaaaaaaaaaaaaaaaaaaaaaaaaaaaaaaaaaaaaaaaaaaaaaaaaaaaaaaaaaaaaaaaaaaaaaaaaaaaaaaaataaaaaaaaaaaaaaatataatataaaaaaataaaataaatttatttaaagaagaattaaaatgaaaagttttgggggg

SEQ ID NO: 296298 - DNA, 438 bp, Zea mays
  unsure (1)..(438): unsure at all n locations
ctacgcgtccgcccacgcgtccgcccacgcgtccgcccacgcgtccgcggacgcgtgggaagagctcaaggaggccttccgtgtgtttgacaaggaccagaacggcttcatctcggccgccgagctccgccatgtcatgacaaatcttggtgagaagctaactgatgaggaggtggacgagatgatccgtgaggctgatgtcgatggtgatggccagatcaactacgaggagtttgtcaaggtcatgatggccaagtgagccacagaaccataatctgaaggcagagaagattatgcattgcatattagtcaagatgcaactttttattccatcgacttctagtgaaacattctgctagttgtagttgcttgaaaaagcaatgtaagtcccggcttnggtcttccttcaatgtggtttcagaactggtgtttcatgtg

SEQ ID NO: 296299 - DNA, 386 bp, Zea mays
cggacgcgtggggctcgtacgaagcagacttcccgcatgtccaccggaggcaaggccacggcgcaagcgagctcgccaccaaagctgcgaggaagtcggcgccgacgaccggcggcgtgaagaagccccacaggtacaggtccggcaccgtggcattgcccgagatccggacgtaccacaagagcaccgagctggtcatccggaagttgaccttgcagcgcctggtccttgagatcgctcaggacttcaagacggatcttcgggtccagagccacgccgctctggccctccaggaagacgccgaggcctacatcgtcggtgtgttctaggacaccaacctctgcaccatccacacctagcgcgtgaccatcatgcccaacgacatt

SEQ ID NO: 296300 - DNA, 403 bp, Zea mays
  unsure (1)..(403): unsure at all n locations
tggagtactgcttttatgtgaggttgcattgggcgatatgaatgagctactgaatgcagagtacgatgctaataacctgcccaaaggaaaattaagtaccaagggagttggtcaaacagcacctaacatggtcgagtctaaggtcgctgacgatggtgttgttgttccccttggcgaacccaaacaggaaccttccaaaaggggtggcttgctttataatgagtacatagtgtacaacgtagaccagataagaatgcggtatgtcttacatgttaacttcaatttcaagagacggtagatgttgcaaagagctgaaactgttgctgagatcttagcagaacatatgtggacttatagcaccaggtgcnctcagcctcattttctgagcaaattggtagccctt

SEQ ID NO: 296301 - DNA, 296 bp, Zea mays
cccacgcgtccgcccacgcgtccgcccacgcgtccgcccacgcgtccggagggccgtggagcacagcctggcaagcacaggccacgcaacctcgcgagctgcggaggtctactcgctggcttccaagactacgtgcttccagtggctgctaatgtttgtgatgacctgcatgtttgtaatggtggttctgctgataagggtcacttgaatgatgaggctgtagcaggcactcaaatcgtactcacccttgtcattgtttcatgggaattctttgtggtcaggtcatggtatttttc

SEQ ID NO: 296302 - DNA, 341 bp, Zea mays
gtgaaggaaaaatatactcaaaccctagctgccgatctcgacggagaacacttgtgtctggttagacatgaccgtctgtggcacccattctgcccggatctttatggacctttacaccaactatgtgcctaaaaccggccataactttcgtgcgctgtgcacggccgagaaaggcgtgggttagtccgggaagccattccattacaagggatccaccttgcaccgcgttataccggagatcatgtgccacggcaagaacttcacccgaaggaacaggaccggcgacgaatccatctactgatagaagttccccgacaagaagataatgcgcaagcacaccg

SEQ ID NO: 296303 - DNA, 407 bp, Zea mays
  unsure (1)..(407): unsure at all n locations
acccgggtccgacccacgccgtccgcccaggcnntacnnnnacgcgtgggctggactctgtgggcatggcatcatatagctcgtggtgagcgcggcatataattaccactgtgtgcactcaacatttacaccacaacatattgtgccttcttgtcacttccatgtccattgatttcatacacgtgatttggttggcgtggcctatactgaagatgaaactaatgcaatggctgctgaaattgaggtagttgatggtcctaatgatgacggtgaaatgttcacccgcccttttaaactgagcgatcgcttaccacagtcttatgcaaacgagcaatcaacccggtttgctaatggtggtgcatacccttcggaccttagtcttatcacaaatgcaaggcacaattgtc

SEQ ID NO: 296304 - DNA, 329 bp, Zea mays
gcctctttcatttgccgtacgtacgtgtggtacagctgcgatgggctcgggcttcatcgcgaagggcctcaccatcgtgaacagcgccgggccagggaaggggcaggccgtggcgctgcgcgtcggcggcgacctctccgtggtgtaccagtgcgccatccaggcgtaccaggacacgctctacgtgcactccggccgccagttctacgccgacgacgacatcgccggcacggtggacttcatcttcggcaacgccgccgtggtgctccagagctgcgacatccaggcccggaggccgagccctcggcagaaggacacggtgacggcgc

SEQ ID NO: 296305 - DNA, 319 bp, Zea mays
  unsure (1)..(319): unsure at all n locations
cccacgcgtccgaaaaanaaaaaaaaaaaaaaaaaaaanaaaaaaaaaaaaaaaaaaaaaaggaaggggaaaaaaaaaaaaaaagggaaggaaaaaaaaggggagccaatctaaaaaacccaaacaaaaaggccgccccctctaaagaatccaaccttactaccccgtccatgcaacggaatatctcttctatagggcccccaaaatccaattcactgccccccttttaacaccgtcgtaactggaaaaaccctgccgttccccaactaaatagcctggcaaaacatccccctttccccaattggcgtaaaaccaaaaa

SEQ ID NO: 296306 - DNA, 299 bp, Zea mays
  unsure (1)..(299): unsure at all n locations
cccgcctcgctctctagctctcctcgctcatcgctagtgccgttcgtcgccggagtttgccgctcgtcgccggagcccgtggagttcgccggagctacgccatccgccgtccgtagtcaagcccctgctcttctccatccggtcgaaacccgtcgatccatccccgtcacacgcacggacccaaggttgaagacgacccaattattttgtgtattttataaaatactttttgatgcaattcatgagttgtatattttgtttgttgtaatatgaacacgtgtgattcgcaattcnnaana

SEQ ID NO: 296307 - DNA, 470 bp, Zea mays
  unsure (1)..(470): unsure at all n locations
cccacgcgtccgcccacgcgtccgcccacgcgtccggggttacatatacttcactttataggttgaaacagtgggagcaccttgattggattgctcgtaccactacttttatcttgtagttcatgccaaccagctcgctcaagccaagtgttgaccggaaatgcgtataggttctggattattatttttagtgtatataggatggtgattgttcagcaaagtttgctcaagtaaaaaaaaaaggtgatcctcattcctcctctgtttttattgtgattattatttttagtgtatataggatggtgattgaacagcttgcaaccttgcacttgcagcatattccatccactggaaataattttcctgcagtaatctgcatagcgcaatccttgagtaatctgatcgatataagagcagcatgtagtacctggacctgatcttcttcttttanggaaaaaaaacaaactaca

SEQ ID NO: 296308 - DNA, 174 bp, Zea mays
cccacgcgtccgcccacgcgtccgcggacgcgtggggtactgttcacgctgacttgtacttgctcgtgcgtcacgcttgtacttttatcttctgtcaaaccaaaggtacatttgtaattcaatattgtttatatttttccatgataatataatgaggataaattgacagtgcta

SEQ ID NO: 296309 - DNA, 310 bp, Zea mays
cacgtccgtggatggagacctcaataagaaagtggacgccaagaactcgctggagaactgcggctacaacatgcgctacacgatcaaggactagaagattgcgtacaagctgacggtcgatgactagaagaagatcgaggacgccatctacgcggtcatcagctggctggacgccaaccagctcgacgaggcagacgagttctatgacatgatgaaggatctggagagtctctgctaccctatgattgtcaagatgtacctatgcgctggtcaagacatgggcggcgctggcggtatggacgacgacgcc

SEQ ID NO: 296310 - DNA, 406 bp, Zea mays
ctacggcgaggtcctcgagtcgacgatcatcctggatcgggagacgcagaggtcccgcgggttcagcttcggcaccttctgcacggaggacgcgatgcgcagcgccatcgagggcatgaacggtaaggagctagacgggcggaacatgaccgctaacgaggcccagttccgcggctgccgtagaggcagcggcggcggatacagtggccggcgccgtgatggaggcggctacggcggcggcggtggacgctaccgcatgggtcgtggaggctacggccgcggtgggggatacggtggtgcaaaccgcggcggcggctacggctacaacgacgggaactggatgaactgagcggtggagtccgctgaggcctagttaatccggtcgcttatgctaccgcggtcaccc

SEQ ID NO: 296311 - DNA, 417 bp, Zea mays
gccggcttctaatccgtactctttgtggcttcgcattcatggcgccctacgcggttaagaggcccgtttcgaacagagccacataggacgatcccattgccaataccgctccttccgcgaagaactccaatgcggcaaagcctatcacagcatgcaaatccgccttcacagactacggcaagggaatagaggtgccggtcgaaggtcaagaagagcagtgcagacctacaacatctacatcttcaaggcgctgtagcaggtgcacgcgaacatcaacatcttctataacgtcatgtgcatcatgaactacttgatcaacgacatcttccagaagctcgccgtcgaggccgtcaagctcacgcggtacaacaagaagctcaccatcacgtcccgtgagatccagatcttcctgcgcct

SEQ ID NO: 296312 - DNA, 370 bp, Zea mays
ctcacgctttcgttaatgctctgatgactggtctgacatgtcgtgggacctgacaagcctggactttgcgaagcagctaccatggttctcggcattacaattcaacctacatgcgaacaggattactgctgagactctgactggtgctggtgttcttagcgctgattggaacatcaatggtgactggcttgctgtggagaacacctctgagcttacttttgacctgatattgtctgcgacatgcgcgacacactgagactgacaggacacaaactggtacgtgacaggccatcaaaacggctcggataaggtatgcaagatgtttcactgatcatctgatgacgcgatcaattgccctagcgaatcacct

SEQ ID NO: 296313 - DNA, 432 bp, Zea mays
cggacgcgtgggcggacgcgtgggcggacgcgtgggcttgcctggttcctggcgctggacttctgaaccactcggtatcccctcatatcttgaactatggtcgagtagatgaagccacaaaatcgttgacgtttcccttgtctcgaccctgtgatgcaggggagcaatgctttctcagttatgggaaacatccagggtcgcatcttgatacgctctatggattcctaccaagaggagacaacccttatgatgatatacctttagatcttgacacatcccccgatgacgaggacatcgcagctcagccttcggcgactacaagccaaacaactcatatggatcgtgggacatggctgtcgacatccggaggattccccacgtatggcctgccccagcccttgctgacctatctccgtgctgctctaggctgtg

SEQ ID NO: 296314 - DNA, 376 bp, Zea mays
  unsure (1)..(376): unsure at all n locations
cccacgcgtccgctgcgccaaaatctggtgtcccttgcaaatcgtgcagcaagtcattcagcagtgagacggcacttcaggctcactcgaaggcgaagcatgggggcaagtgagtcgcaggtccaatagagtcaacaacaaatgcgaaacatgggagaggagtcgggtttgttgggaaggaaaattagattagtatcagttttttttgaatgggatgggaacgtggctgtgaatctcagggttgtatgctcggtgaagaaaaaaatggaaggacttcggaatgcacgatgttgatgccgaatattatccagcgtaaaaaaaaaaagtntttccacgtgntgataaactttctcaacctaattgctaaaatagacat

SEQ ID NO: 296315 - DNA, 432 bp, Zea mays
cccacgcgtccgcccacgcgtccgcccacgcgtccgcccacgcgtccggcaccacaggggagctgctttcccagcttgtcgacttgctgaagctgtctggggctagacacacgattctctacgcttcccagccatctggttatctactggagaacccttccggctcgccagtggctaggcaccttgcggagaggactaacggtacaaaaactggcctactgagcaaatgtgacggagagtgcctagtcaaatcaactcttcttgaaggaacctttgtcggaatagtgctccttatcatcttgatatcagggctcatgtgtatgatgggaatcgatactccctccaagtttgaagctccccaggagtcttgatctcccttcgaagcagaacccttgttttgttggtctgcactgtggatagatattattcagt

SEQ ID NO: 296316 - DNA, 447 bp, Zea mays
cgcagtccttcgaggacgcgttggagtacgccttcggccagatctgccgctaccctgaagaggggcctggtactcacaatgcgtgatcactgggacatgtgtctacctctgatccatcctgaagtaccttgctgcatacgttatggagttggcagggaacgcggcgagagacaacatgaagacgctcatcattccgcgccacgtgcttgtgacgatccgcatcgactatgagctcggctagctgctggcaagtgtcaccatctttcacaggggcgtactgggcaacatccagtgcgtgctaatgtccaagaatgcggcggaaaaagcggtcagcgccgtcagcaaggagcccaaatgccccaagaagggcgccatttccaacaagaaggcttacaaagtagggactgtatttgcactgtgtgctgtagcatgctcgcgtctagatct

SEQ ID NO: 296317 - DNA, 393 bp, Zea mays
aaaaaaaaaaaaaaaaaaaaaattaaaaattttaaaaaaaaaaaaaaaaaaaaggaaaaaatggaaaattaaaaaagaaaaaaaaaaaaaaaaaaaaaaaaaaataaaaaataagggccggccgttttaaaggttccatgcttacttacccttgcttgcaacttcatagctcttttttagtgtcccctaatttcatttcattggccttcgttttacaccgttgtgcctggaaaacccttgccttttcccaatttattccccttgcattacatccccttttcgccacttggcttattacctaataggcccgcaccaatcacctttccaaacagttgcccagcctgattggcaattgggacccccccttttgcggccctttaagccctgcggttt

SEQ ID NO: 296318 - DNA, 436 bp, Zea mays
gggctttgatgggatgtatgcgtcaataatctcagagcagatgacaacacagagattacgtgagattatgtacaggtccatgaagaggtacagcagatgacattcataggcaaggatttagctaaaacttatcgagtaaatgaaacttattaaggatcacttgctagtatgcctactcgatcatactcatacacctgctacagctagtaagaatacttctatgatacaggaaatggatgccacactatgatgatagggtactggatagcaactgcacttactaagaccaaactgactagctcgataattatggtgctgacatcagagatacagtatcaaggctgctctggtcctttttccattactgggcatatgagcactattacacatgagatgtcatatcaattcgcactggacggattatcagtaatgaacg

SEQ ID NO: 296319 - DNA, 365 bp, Zea mays
gtccttcattcagtttagtaatgagtgtgatgatagatataaaaaaaaagagggaaaaaaagaaaaaaaaaaaaaaaaaaaaaaaaaaaaaaaaaaaaaaaaaaaaaaaaaaaaaaaaaaaaaaaaaaaaaaaaaaaaaaaaaaaaaaaaaaaaaagggggggcccttttaaaggatccaagtttacttacgcgtgcatgcaacgaaaaaattttttaaaagggtcacctaaattaaattaattggccgtgttttaaaaactgtgggattggaaaaaccttggggttaccaaatttaactgctttggagaaaatccccttttccccagttggcgtaataccaaaaaggccacaacggaaggcctt

SEQ ID NO: 296320 - DNA, 332 bp, Zea mays
  unsure (1)..(332): unsure at all n locations
cgcttttgctctctccctcccggctctcggcttcttctacacgctaccgtaaacgccccggtcccggatcccgctagttcttcgccccagcatggccgcctcgtcgaccgccacctccgtccacgacttcatcgtcaaggatgcgagcggcaaagacgttgacctcagcgcctacaaggggaaggttcttctcattgttaacgtcgcatcccagtgtggcttaactaactccaactacactgagctggcccagctctacgagaagtacaaggatcaaggctntgaaatcctggctttcccatgcaaccagtttggtgggcaggagcctggta

SEQ ID NO: 296321 - DNA, 445 bp, Zea mays
  unsure (1)..(445): unsure at all n locations
cccacgcgtccggctgcttctagtgtctgccccgttcgtcctttaagcagataatgacttgtgttaacaaaaatagatgcccctcacatttccttttttgtccccccacaacaacaccatgcatgattacttctcctgaacaatgcatgcacacctagggtaaaataaaatactctcacatccaccacccttaggctatggagtgtgttgattacattacaggcatgccagcatccgtgtttgcttgtgtgtgcagataacaggcgagacggttggggaggtgaaggccgtggcaggtatgcatcagaggaaagctgacatggccagtcaatctgacgccttcatagcacttcctggagggtatggaacccttgaggagctgctggaagtgatcacctgngcgcagcttggcattcacaacaagccggttggcctgctaaacgtg

SEQ ID NO: 296322 - DNA, 428 bp, Zea mays
cccacgcgtccgcccacgcgtccggatacaagcagttgtccttgatatgtcaagtgtggtgaacatcgacacttcaagactcactgcactggaagaaatacacaaagagttggtgtctcttggcttacagatggctatagccagtccgggatggaaggcagttcagaagatgaaagtgtcacaggtggtggacagggtaggacaggactggatcttcatgacagtaggtgaagcggtggatgcctgtctagctgctcataagggcacagctctcgcatgttgagtatgcgttaattactactattagtactcctaaagataatcccataagcgatgcgggtatttgcatcctatgaaagtgttactggaaatgcttacgaaacagaaatgcatggtatgacttgactggagtggtcgtggcgagtaat

SEQ ID NO: 296323 - DNA, 444 bp, Zea mays
ggattcttccacactcggagtggtgattgtcaagcattgtggatatacagcaactgtgaaggtttctggacgtgcaaaggacagtaatgatgttaaacaaacacatgacatctctgataattttgatggaatgctgaacattgatgtgcctgaccatccagatggaggttctaatgccttgaatgtcaacagtctaaggataccactccaaagtgttacgcatccagaaactgttgttggtaagcagaaccctagcccaaagtctcatgctaataaccccgcaaggaaactggcacgtaaaatacttgaggacagcttggtaaagctggatagcatgcctagcataaattctagaattatcagatgggaacttgggtcctcctggctacaacagttacagaaaaaggattctccagcatctgagaatgttaagcggaatgcaac

SEQ ID NO: 296324 - DNA, 307 bp, Zea mays
cggacgcgtgggcggacgcgtgggcggacgcgtgggcggacgcgtgggcgctttttaaagtgataaatacttagctgcaaattcagcaatgttcttgttgaaaaaaaaaacaaaaaagataaaaaaaaaagaaaagaaattaacaaaaaaaaaataaaaaaaaaacttacaagcataaaagagtatgaaaagataatgggcgtccgttttagaggactaaactttatgaacgcgaacattcaacgctatagttatattatagggtcacgtaaatgtaattcactggccggacttttaaaaaggcaca

SEQ ID NO: 296325 - DNA, 342 bp, Zea mays
cccacgcgtccgcccacgcgtccgtgtgtggcagatttgcatcgttttggtgtttcgtggctccatgtgtgagcatgctgtgtcctataacctggtttatgagatgagttgttaaacttgcttggcttgattggttttacctgtaagagctgatagttatataaaaaaaaaaaaaaaaaaaaaaataaaacaaacaatctacaggaaacaaaatgacacacacatgcattgccaattgacaaaacttgaataaaagggcgtgccgttttagaggatccaagtttacttacccgtgcatgcaacgtcatagctcttttttagggtcacctaatttcaattcat

SEQ ID NO: 296326 - DNA, 173 bp, Zea mays
attacgcgaatcaactcacctacaaatctttaacccaagtgattcgctggcgacctcttgccaaatcaaaatgggatgaatcttctcatgccacttttatcttattcaaggcgctactaagcatcaatgctagggggtaaataaaataacggggaagaggagatgtcacgatt

SEQ ID NO: 296327 - DNA, 216 bp, Zea mays
cccacgcgtccgcccacgcgtccgcttatatttgctggaacatgaataaaagggtctccagctggtactgcttagctcttacaggaaaacaatgggagagactttggacttcctgacctaaattaagcattgcgcatggagaaccttatatttgctggaacatgaataaaagcatttgacaaaaaaaaaaaaaaaacaaaaaataataaaaaacta

SEQ ID NO: 296328 - DNA, 312 bp, Zea mays
cggacacgtgagacgaattcgacacgcacaacgcaacgacaacgacaaagagatcgacgccgaatgtaaagaggagctgagggccatggaagcggagaaggcggaaatcgaccggactgcggcggctcggatgcatcgccagctgtggtgcgaactgacgtacctggtgatccaaacagccggattcatgcagatcaacttctgggagctgtattgggacgtgatggagcccatctgcttctacgtcacgtgacatgtacttcatgagcggatacgccttcttactccgcaccaagaaggaaccgtacgtcg

SEQ ID NO: 296329 - DNA, 407 bp, Zea mays
gttataaaaggttggaagaagataatggtgtctcacaaaactttgcgaagtgggggtaagcgggagatagctaaatgggtaatgcatcagtatcaccttggaaaagaggaagatgaaaaggacggggagcttgtagtatctaaaatcttcttccagttggcaaataagagtatggaaatttctgaaacagaaactgcttgtgaagaacctgaagcacctgcttcagtgattggtccgaaaactccaaagacaatcacaccgcagccacgtcatcctaaaagtagtccatgtgaaactcagcagaatatttccattgtgcaggatcagctactactggacagcgaaagcgagcctaccatgcctattgttagtctggaggatgatgctatgaaccctgcatggtgtgc

SEQ ID NO: 296330 - DNA, 412 bp, Zea mays
  unsure (1)..(412): unsure at all n locations
cagagaaaagcgccacatgaagaaacaggtaaacgcttatcccaacctgatacaatatatgagcnctatgcgtctctaaagaccagcgcagaagccaagaaagcaagttcgaccagaaccctctggcgtccataagttaacattcatggcactcaaggccaagaagctgttcttaccatgcgacgatactatgcacgcctgcaagaaggactgctgggtcgtcatcggctgcaaggtgtatgatgtgaccaagttcttggaagaccaccctgtatgagaggatgtgcttatccatgcatcagcctctggggatgccacggaagcattctaagaggtgagacacagcactttaaccgtcagcatgatggacagctacttgattggaagccataaagactatgttcgtccaatg

SEQ ID NO: 296331 - DNA, 231 bp, Zea mays
cccacgcgtccgctcgttggcgccactggctggtggttctgcctctggtctggtgtgtttgtgtgtggtcacacttgccagctagcagaggcgcctgcttgtacctagattactgtttccattgtcgtcgtcatcggctaacattgtcataatgtcagtttgggtaatgttagattaaaaaaaaaaaaatataaaacaaaaaaaaataaaaaaaaatataaaataaaaatt

SEQ ID NO: 296332 - DNA, 348 bp, Zea mays
cccacgcgtccgctcaaccatcacttcagaatccaggacaagggcttcggcatcacctcgtcgctttgggacgctgtctttgggacattgcctccatccatgacgtctgggaagaagaactgacgcacgtaactcaattcttggcatgagagattctaggggacctgtaatatatattcaagctagggataatcctggatctgtcttcgtgcgatgggttgacatgttcattcagttctcgaagttcttgtagtgtactgattgtctgttgatctaaaaaaaatcacctttaaattcaatactttagtcaatagaccatatttaagatagagaaatatcaaaacaaaa

SEQ ID NO: 296333 - DNA, 442 bp, Zea mays
  unsure (1)..(442): unsure at all n locations
cccacgcgtccgagctcagcatcacactcgtcggccacagccttggcgcgtcgctggccgggctcgccgccgacgagctcagcgcctgcctggctgctgaaacagacggcaccgcggaccaccagccgccgccgatcgcggtggtctccttcggaggccccaagaccggaaaccgcgcgttcgcagagcggctgcagcgcgagcgcggtgtgaacgtcttgcgggtggtgaacgcgggcgacgtggtgacgcgcgtgccggcgccgatcgcgcgggaagggtatgtgcacgcgggtggtgctgagcttagactgcacaacagcgactcgccgtgcctgcgtcccgacgcgggcccagcgtgctgccacgacctggaggcgtacctacaccttctggatgggttcgccggctccgggcggccgttccgncccgacgcgagccg

SEQ ID NO: 296334 - DNA, 384 bp, Zea mays
ggattcccggtcgaccacgcgtccgacacgcctcgtcctcatactacattcacgtctgcatgcgccaactactcctagcctacggagggtccttccagaagcgcaggactctaaaagccctcgacttgccattatccctcgccgaggaggtctactgatatcacataaacaatgacaacaggctgttgctatgcttgctagcataccatcgtgtcaagggcaccatctttttcacccaatagggagatggccgtaccactgtcaccggaagtgtctttggcctgaagactcggcttcatggtgtccatgtacactcactctttgacaccaccaatggatgcatgataactggaccacactacattgatgcgagcaaggagcatg

SEQ ID NO: 296335 - DNA, 377 bp, Zea mays
ctgtccactacttctcccacaacaaccttttgcatctggacgcccgcatctctcgtctgggcagggatgcattctaagatgtgctggcaatccctcgttcacctcctcaagtatgacaactcctacagactacggcactcctgaaaccgtgaagtttggacgcatttgccgaccactcctgaactctgaccgaccaatcttctactcgctttgccaatgctgcttcatggaatgtcccaaatggtgcggcatgtaccgcaacagctggaggaccaccgcccaacataactacacatggtcaaccatgctggacaacatctacctgaactactcctacgcccggtacgccaaaccccgctgctggaacgaccctgaca

SEQ ID NO: 296336 - DNA, 420 bp, Zea mays
ggtgaaattcgtactgtccgagttgccttatatacagcgcagtaccacattgatgttaccgagacatcagagaagggcacagaaaatgtgtatggaacatttaatattctaatgagaaggaaacccaaggagaataatttcaaagcaatcctggaatctatacgtgatctaatgaatgaaacatgtgtagttccagaatggttgcataacatattcttgggttatggaaatccttctgctgcacagtggatgaatatgcctgatcttctggaagttatagatttcaaggacacttttcttgatgccaaccatgttcagcaaagttttccagattaccaggtatatattttgactattttttttttttttgcttttttggagtgtatctattctcattttcatcttcaatctccagtgatc

SEQ ID NO: 296337 - DNA, 370 bp, Zea mays
  unsure (1)..(370): unsure at all n locations
cccactcnnttcttgacgccttttcggactcgttttcataactactacaacggctcactggaaaggtcaaaattgttgactggacggatgangaattagagcaaacttcagaggcagttggatatggtgctgtgaagtatgctgatctcaagaataatcgtctgactaattacacatttagttttgaacaaatgctgagcgataagggaaatactgctgtgtaccttcagtatgcacatgctcgtatttgttccattattcggaaatccaacaaggatgtggaagatctgaagatgactggagccatttctcttgaccatccanatgagcgtgtgttggggctgtatcttatccgatttgctgaggtggt

SEQ ID NO: 296338 - DNA, 240 bp, Zea mays
ccgacgcgtgcgctctctcctgcgttccatggtctctcaaaagcgctaccgggggtcgagacatacttaacggtcacatgaaatgcaaccgactatgatggggattctgctgaactgtatgcgttcaaaaggacaactatattgatccgccccaccactgtgcttgtgatcaacctgcttggcataatggctggcgttgcacttgctatcatcacgttgttccaatgcatcacttccact

SEQ ID NO: 296339 - DNA, 464 bp, Zea mays
  unsure (1)..(464): unsure at all n locations
acccacgcgtccgaccactcttggcgaagcgaaatccaccgtacaccgctgcctccctctccctgtctcgtctcgtcgaaccagccgaggaagccaacgcagacccagcgatcctcgtcgcgcgtcctccactcctcccccacggagggaaggatggcggagcccaaagcggcggcggcgaggaagacgcgggtgggcccgtacgaggtcggcaagaccatcggcgagggcagcttcgccaaggtcaagcacgcgcgcgactcccgcaccggcgccgtccgcgccatcaaggtgctcgaccgcaaccacgttctncgncacaggatggtcgagcaggtctgtccgtccgtgatccgtcccttccgncttcccttcgccggccgctggggaacatatgtaatgtaacctccgggaaaatttttaaatataccggagctgccatagaaagaacggcttcgcgaatc

SEQ ID NO: 296340 - DNA, 456 bp, Zea mays
gcgggcaccagatgtgctcggcgtgcacgctggcgctgtgctgccacgccaagcccaacgcggcgacgcagtcccagccgctgccgacctgcccgttctgccgcggcggcatcgcgcggctggtggtggcgacgcggacgagggctggccacgacgacgagcgggacaagctggagtcgcccaggcaccgccggtcccgtcggtccatgaacctcagcggcgacgcgggcagcaccagcagcacactcatgggcagcatcgcctcgtccatcggcaagatgggccgccggcgaacagatagcagcgagcaggtcgacgacaagccgtagcagaatcctttcatgcacccgtccattcataatccacgtgaaatcttgcgccgtcgtggccgtcggcattccattccttcaggaacgaacaagccggtgtgttttgagattatttttggcaaatgag

SEQ ID NO: 296341 - DNA, 344 bp, Zea mays
gccactcgtacgggcacaaggatctcctgtacggtgatctatagctgaagcagcgtcttgggctgcgggatgcgttcatcaccagcctggacgactgccaggcctacaccctgaaccggatccacgacccggactaccatgtcgagctgtgcacagagctcatcaactagatcatggactcgaccaaggctgcggaggtgctcgctaagctgaactatggaagcgaattcgcacacacgctggtggacaccctgatcctgaccatgaacggcataccaaacagccttcaaaacaccggttaaaccactaagaggtgatcttgattattctcctgatcattggct

SEQ ID NO: 296342 - DNA, 251 bp, Zea mays
cccacgcgtccggccacgcgttcgaggagctcgacggtcgcaacatcaccgacaacgaggcgccagtcgcgcggcggccgtggaggcggcggaggcagatacggaggctggcgccgtgatggaggcggctacggcggaggcggtggaggctacggcggcggtcgcggaggctacggctgccgtggcggatacggtggtgcacaccgcggcggcggctacaggaacaacgacgggaactggaggaactgagc

SEQ ID NO: 296343 - DNA, 341 bp, Zea mays
tcgacgcgtccgcagcatcttatgcccaagttctcgaggtacttccggacgccttcctatagagactctttcgaatgtgaatgaaatcgaggctctgaatgagctgctcaagaagattatcaatactctcactgattatagctcgattaactaggatgaattccaactagccttatttaagaccatcacaaaggatagcatgttagctcaccgggtcatagactagtttgacacgatacacaacggaattctcgagtttgatgaatttgctcgtgccctttctgtgttccatccgtgtgcaccaatcgatgacaaatttgattttgctttccaattgtatg

SEQ ID NO: 296344 - DNA, 282 bp, Zea mays
ccgaatcgttcggaagtccagaacattttgttgtcgttcgaaacaagccattcgaaattgaggtacaacggtgatctgcagaggtaccgaggcatgtcgttagggatcgaaggcaccggccgagcgcacggtcggcgggccatggaagaagtcgatgtcgaggtgcttgaaggccgatctacagttccgcgtcggacgcatctggcgctacttgaagaaaggccggtacgcgcagcgtgtcggcaccggcgccctcgtctaccttgacgatgtcctcgaata

SEQ ID NO: 296345 - DNA, 375 bp, Zea mays
attcccgtctcgacccacgcgtgcgccaacccttccgcggacacgtactctgcattcaaggatcatgacgcaccacaagatcagggccgccatggtggtaatcttggaaaccagacagatggagcagatcgtgtcactaatatcaatgtcactcgacagccagatcctactgactggcccagactcaatcattgccagatctgtttgtgttgacgctgatcctgatgatcgtttaaagattgggcacgaccttagccagaccactggaatcgccgcatgctcatgtcgcttgaggtatcacagtactccagcgctgtataccatcgacggacttgggggagcctgataggtacctatcctgccgaacccatgaca

SEQ ID NO: 296346 - DNA, 213 bp, Zea mays
accattccgcaccaacagatgatgggctccatgcgggcgatcttgtaaacatgacacgctgcatcagacggcgttgataatatcaatgtcacctacagccacaaccgactgactgcaccaaactcaatcatcatcagagctgtctttgttcacactgatcctgatgatctcgtaaaggttgcacacgagctcagtacgagcactggaaactcc

SEQ ID NO: 296347 - DNA, 359 bp, Zea mays
ctcgttctgctctgcctctccccggcatgcgccgccgggagagtcccggtgtcggtctagtacgaagcgctgtgcccgttctgctccgcgtttgtcgtgaacgacctctccagggtcttccgcgacgggatctcctccatcgctgagctgcggctcgtcctttccgcaatgggcctttctcggcccacggaaccgtcacttggcaacattgaaaggaccagtggccaactcaacgctatagaagcttgcgtgatcagaatatggcctgacgcggagcagcattttcctttcattcaatgcgttgagcatttagcactgactcggaaatgggactcctggcagtcttgctttcatgaaac

SEQ ID NO: 296348 - DNA, 391 bp, Zea mays
actacgcgttcgcccacgcgtgctggcacgcgtccgactaatctactctacaccagatatggttctcagttctttggtgcgcagtcagagaggcagcggcgatgtctgggcgcgtcaaggtcggcatgggtctgatccagggcggcgcgaagcgccaactgaaggtgctacgcgacaacatccatagcatcaccaagccgatgatccggaggctggttaggatgggtggcgtgaagctcatctaggagcttatatactaggagacccgaagcgtgctcaagatctttctcgagaacgtcatccgcgacaccgtcacctacaccgagcacgctcgccgcatgaccgataccgtcatgtacgtcgtctacgcgctcaagcgctagggacgcac

SEQ ID NO: 296349 - DNA, 354 bp, Zea mays
acccacgcgtccggagaaccgcgagacgcgctacgtagcagagtacaaactaaaagcagccgcaacggcgagcggcactatatggccgggcacaggagggtcggcaggcggcaaggccgggaacgagccgacggcggccgcctccggcgaggcccgcgagacgaagcgcaagacggcggcgaaggccaagccggcggcggcgaccgggagcccgaggaacggccccgaccgcgagcgagaccggggcccacgggccggagagccggcgagcaacccgacgggcgagtacccgggcgacgacggaagggacacccgaggggcagtcggcgggaccggggaccggcgccaagaacc

SEQ ID NO: 296350 - DNA, 267 bp, Zea mays
ctgcgcaccaagctgccttcggagcaccgctactactttccggacagcgagaccgcggaggccgtcatggccaccttcacggcggtcttgacgcggggcttcgccatcgaggtgctcgacgatcacaacggcccgtccaggatcgacttcaagttccgccactggggctacatggaggggcccttcaagggccacccgtcgcacggccagcgggtcgagctcttcgcgtctagatctaccatgtcgactaatacatgaatgtggaca

SEQ ID NO: 296351 - DNA, 358 bp, Zea mays
gggatgcgtacgcgtcggcttctcaggcgttggaagagcaagcacatctccaggccatgtaccctgtcatggaggatgatagcaacttgaggacctatcctagacaacgtagccgtcaagaagctgttcaccccacacaaaccaaaggataacggggtgctgaatggagactctgaagagaggtccatggatgttccccaacacgagctctgggagaagctatgtccaactaaccttgacgagcaaacgtatgtcttacctgggtggatgaacgaatcaaaccgtgccgacgttacattaactctgactgagttctaagttcccaagggaaagcgtgccattgagcttctgtcaggct

SEQ ID NO: 296352 - DNA, 464 bp, Zea mays
cccacgcgtccgcccacgcgtccgcccacgcgtccgcccacgcgtccggcaccctccggggcatgaccaaggggcgagcgtcctacacgatgcagctcgccaagtttgacgtcgtcccacagcacatccagaaccagatctccgtggcaaaaacagaggaagctgctgcttagttttggttttccgtagatatatccatacagcaacaggagagcaggttgataggaaggacatcaaggtgtatgtagctttgtagtgtaaatctcttaaggcttgttcggatgattggaggggattgatatggattgagagagattttaatttactatggattgaaacttcctcaattcatatggattggactagaaccgaacatggtctaagggagcattatttgccattgattttgcacctgataataatggcctttgttgagttttcacaatgacaggacagttgaatta

SEQ ID NO: 296353 - DNA, 428 bp, Zea mays
cggacgcgtgggctaacaagggaggactcgttcacccgcggacgtcggtagaggacctggacgagctgtccacgctgctgcaggtgcccatggtcgccggcaccgtcaacaggggcagcgaggtggtctccgccggcatggccgtcaatgactggacggccttctgcggcgcggacaccacggcgaccgaggtgtcggtcatcgagagcgtcttcaggctgagggacccccgccctgtggcgctgggttcagacgtcaaggactacacggttcaggatttctttacgagttgagctgagttttgctgcaggagagtagagagaccagtcgcattggccgccgaattgcctgcatctgcattgctggctaccagcaatttgtatcatgagaacctattattatcagacgtaaaatgttttttctttcct

SEQ ID NO: 296354 - DNA, 330 bp, Zea mays
atcacgagcgagagcaggacggtgtcttcattgagctggaccacgcctaatgactgtgacaggtacatcagtgtacgccaagctctttacgactaggtgccacaaggactacatcataatctatagagagcgaagagctggacaagctttctatggtgctgacgctatcacgacagactcacctgagtagctgtggagctatcacgagcatgcattgattgcgaccggactgacatggtatgaataggggcggccgctataaaggatccaagctgacgaacacgtgcatgctacgtaataactcttctatagtggcacctaaattcattt

SEQ ID NO: 296355 - DNA, 464 bp, Zea mays
ctcctcccgcggtcagggtaacgcggcgtgtgtcccgtcgcatactcgctcacacccatggccgcaccgccggccgcctcgctagtggcacgcgccgacctcccgccgcgccttcgcccaaccaccgcttctccccttggccccgccgtcctcggtcccagcagccgccgccggtacctccgtctccgccgctcgccatcgctggcggagactgccgcggcggcggcgagctccccatccgtgccttcctcgtttccggtgcccgggccaggtatcggcgatgccctcggcgacgtcgaaatctactccgcggccaccggcgagcccgtcctgttcagagacctgtgggaccaggacgagggaatgtctggtggtgcgctgctaaggcatttcgggtgcccatgctgctgggagttggcctctgatctgagggacacaaaggagagatttgaatctgctggagt

SEQ ID NO: 296356 - DNA, 469 bp, Zea mays
cgcacacgttcgtcagaggagtacaagtgctggtaccgtcaccatgttccagaagtgctcaggcgcttctatagcttcccttaatgcctagcacctctaaccaacggtctctttggaatgtgagaacccacttcttcaaccctacaagatccaacatgcaatcgcagctgtcatataacctcaatcacccttgatacttcaacaatcattagccgtattacagcagctacctttggtgcatgtattggcacacaacatacaggcacaacagctactacaacacgtgctatcaaaccttgctgcctactctcagcaacagcagtatcttgcatttgactatctagctgtattgaactctgctactatttgcaacatcatcaactaccattcaaccagcttcctgttgactacccccagcaataacttccattcaaacaactggcagcattgaactctactgcttatttac

SEQ ID NO: 296357 - DNA, 361 bp, Zea mays
  unsure (1)..(361): unsure at all n locations
cggtcttgaattcccgggccgaccgacacgtgcgcacacgctgacgctcaacaactccgaacgtctttacctacacaaaatggaccaggctgctgagtganacctgccttgctatgtcgccttacaagtcgaccgtaccctgagctcgaacgacgtcaactggtcgcttaccatcaccacactgccgattcttgtcaatggagtgcttaccgttgaagacacgatgctcgcctttgccaacggcgctgtaaatatcatgctgtctaaccactgcccacggaatgttgaatacgtgccggagaccatcaaacctctggaggatgacgggaaagccagccggcgacagctccccgtgatcgtc

SEQ ID NO: 296358 - DNA, 466 bp, Zea mays
ggggattgcaattgcaagttgccgctgtgcggttgcggtcgctcccctcccgactctggccagcagcagcgacggtgccggcagtcgattactccacgcggcggaggcggcggtagcccatcctttcccgttttctgatccagtcctactgataccgcgcacagcacgcctgctctattaaaggtacggcgtgaagatgagggttctcttggtctcgtgaaggcgacgctcttgtctgctaactacatattatagaatgttttgcttgaggggctactggtcgccttcactagctccagtgagggaagggcctgttcgacatcatataaagttcaattctgtagtggtttgtggtgctaggggaccgagaccgagatatccccgtgtgtggaaaactcgtaagaaaattgggactatttccaagtcgcagaagcttgtcgaatgtgtcattaaaaggatgttcaac

SEQ ID NO: 296359 - DNA, 394 bp, Zea mays
ggacgcgtgcgcggacgcgttggtcccaccagagtgcaggatggtggcagagtcgaatctgaacatagaggagggcaaccaatggatgacgacatcgagccctgcaagctagctgctcaagcagatgccagagcaatggccatcgatgaaccaagcaatgtccagaatgaacctgaaagctgagctaaattgcacggccaaccagatgtagtccacaagccatagcgtgcaccataactagtggctgtactgctgctcggctacttgctgcttgatgtggacagtgcacaccacagacttgaatacgtaattcgtgcctgacattcaaaaatggactaggtgacacctatcggtgacaatgttaacgttatgagaatccatggcactagtgaag

SEQ ID NO: 296360 - DNA, 408 bp, Zea mays
cccacgcgtccgcggacgcgtgggcggacgcttgggtgagcttgcagagcttggggggctagggacatccatgaggaagcttgcgagagagctgagggacagataaatatgagaacgagcagtaccaggacaaactgaggcagtcagatgaacggctcctggccctggtcaaggcggccatggacgtagtcgtggccgtcgggcttcttcagctggcgcccaagaaggtcactccgagagtgacaggagcctttgggttcgtcacctcgcttatctcctgctatcagcaacttccttgccgcgctcctgttgccaaagtcaaagtttgagaggtgtcgccgacctagtaaaaaataaggagcgacgctggacatcgatctctgtttcacaatggatcgtaatataatt

SEQ ID NO: 296361 - DNA, 437 bp, Zea mays
cgttcgaacgacacgtcaccaaactcatgagctgactcattggaaaaattttccacgaatcgaccacgggccaacccggaggaggcaaccaggtgactacgggcctaggtcatgggtgacagacaatactccatctcggttaccactttcagccccgtaggaaagcctgtgcagattgatcacgctctcaaacgtgttcgatgccaccgagaccacctagggatccaaagtcacaaccgtggatgaattgccactgaaaagaaactgccctctatatctgtacgatgaaacatatgttcaaaagattcaggcactaacaccaaatattgtacatgtctatagtgggatgggtccagattttcacgatctggctagaaaaaatcgaaagcacgcacagcagtaatatccgttgtacaaagagcatatacctgtaacac

SEQ ID NO: 296362 - DNA, 473 bp, Zea mays
  unsure (1)..(473): unsure at all n locations
ctgcaatccgatctcattcagttcaagcccaagctacctgtcagttagttgttcctacctacgacctcgatctgtcatcagctgatcgattatatgttctcaatattaattatagtatattaatttgatatatggtcgtttcctcttgtctgccccagacatggaaggttagggcgatctaccaattcgacatggccgtgtacaccaagatcttactcaagttccccaggaagttctggcctgaagggaaaggaagggagttcttcctctacgccagcagcaggagaagttactacggagtgtggcaggagttcgagaagcagtaccctgacgccaatgtcctcctggtcaccgtgaccgacgaggagtcgaggcgcatcgagcagcagtcggacgagcagaccaaggcggagatcatgcangtgctgcggaagatgttccccggcatagacgtnccggacgccaccgacatt

SEQ ID NO: 296363 - DNA, 279 bp, Zea mays
gcgtgcgaacacacctgcttccacgcctcaagccactcgtgcttgcggcgatgcaaaccagcaccgcgaacatggtcacagcgaggttgaaggagaggcttgaccatgcgtacgacgtgaaggacctcaactccatctttgacttgaagttccgcacccactttggaggaggaaagttcactggcttatgactaatttacgataacctacaggctgacaataagttggagcccgaataccgcctttataggaatgggcttgctactaaggttgagaagt

SEQ ID NO: 296364 - DNA, 411 bp, Zea mays
ttagttgctatttaaccaggtgccaagtgcagataccttccctgcctcacaaacaacgccgcggtgtactagataccatcagggtcttcaaccagggcaggtttatgttcaggtggcactgccagcagaagtgatccgttgacttcagctatgggcaacctgtgctgctgtgttcaagtcgaccagtcgactgtggccattagggagcatgttggcaagtttgacagcgtgcttgagccaggatgccactgcatgccttgggttgccggcaagcgtttatctgggcaacttacacttaggctgcaagaactggatgtgcgctgtgagacaaaaacaatggacattgtttcgtgaatggggtggcattttatttagttccgtgcttcttggcttacaaaagaagtgacgctt

SEQ ID NO: 296365 - DNA, 452 bp, Zea mays
cacagagaggacacgaggagcacgctgggccgcgtcgtggtcatcatctggctgttcgtagtcctgatcatccagtccagctacaccgcgagcctgacctccatcctcaccgtgcagcagctgacgtccccgatcaagggcatcgacagcctgatcgccagcgacgagcccatcgggttccaggttgggtccttcgcggagagctacctggtgcacgagctgggcgtctccccgtccaggctcaaggcgctcggcaccccggacgagtacaagaacgcgctagagctcgggcctcgcaagggaggcgtcgtggccatcgtcgacgagcgcccgtacgtcgaggtcttcctggtgcagcacgacaagttcgccatcgtgggcgcggagttcaccaagagcggctggggcttcgcgttcccgcgtgactcgcctctggccgtggacctgtcgac

SEQ ID NO: 296366 - DNA, 357 bp, Zea mays
  unsure (1)..(357): unsure at all n locations
ccggaannnccgggccgacccgcgcgggcgccaccaactccgagaccgccgncnncgccagcgcccgcatcgacgggaaggagacgcccgaggggcagcgggncaaggccgacctccccagcgncaagaaggaggaggncaagggcgagggcgaggacggcaacgngcnggncatcagcggccagcgcagcagggagaaggaggacaaggacgacaagnggcaccgcgncgagcgcagcagcggccagnncgncaggcgctnccgccngccagagaacgccaaggnggaacagggcaaggcgggccccgagaacggcgngcncacgggcaccgngcccaaggcggaggagaagaagc

SEQ ID NO: 296367 - DNA, 349 bp, Zea mays
  unsure (1)..(349): unsure at all n locations
gcccgcaggnaccggtccggaattcccggggcgcgcggtggacaccggcaaggaggcaccatatgacttcctcaccgatggcctgccagatcgtgctgtcaccgggtggggggtctctcatggttggactccaatctctatcctatgctcagctactcctccatcatccttgtattgcgccctgatgtctgaaagaaatggatacaatagagtatattggagccgtagtatatattttctttgacttttctttgacttccttttgtagatctgccaaacacaaacacaactaagcaatgtagcacatactattggcacgacccttcactcatttacattctaaatttta

SEQ ID NO: 296368 - DNA, 245 bp, Zea mays
  unsure (1)..(245): unsure at all n locations
attcccgagccaggccacgcgtacgnccaccccttctcttaaaaanaatgctatctaagacccgtactacacacaaaaaaaatgtcgctgcttgatactaatgctgcgcaacgactntatatattttccctacctctccttcatttcctgtctcacctcttccacggactaccactccctccacaacgccttcaatacctacggctaggtcctcgactccaatatcatcctccatcggtagactc

SEQ ID NO: 296369 - DNA, 475 bp, Zea mays
  unsure (1)..(475): unsure at all n locations
cacgtaccggaactncattcccgacccaggcgtcccggtgggttggcttgtcctaccgctccgggtcggcgttcgggttcgcgaggttctccggggttcggggtgcgtgggtgagcggatcgagatggcggcgtccgatgttgagtaccgctgcttcgtcggcggcctcgcctgggccacggacgaccactccctccacaacgccttcagcacctacggcgaggtcctcgagtccaagatcatcctccatcgggagacgcagaggtcccgcggcttcggcttcgtcaccttctccacggaggaagcgatgcggaacgccatcgagggcatgaacggcaaggagctggacggccgcaacatcaccgtcaacgaggcccagtcccgcggcggtcgtggaggcggcggcggtgggtacggtggtggccgaggaggcggcggctaccgcggtggcgggcgccgtgatggcggtggcggc

SEQ ID NO: 296370 - DNA, 416 bp, Zea mays
tccggaattaaattgtcggaacacacgttggccaggcatacatccgggcctttttcgtaaaactattcgaataacggcttggtctacttgatagagaagagaggataacagacttgacactggacaatggtgtacgagcattgttgaggggctgcaccaagcttctgaggtttggtctgtactttaaaccaggaaggctttcaaatgcaggtctcgggtacattggacagttgcagcggaacatccagtacatgcttttacgtaatgttggggaaactgatgatggattgataagcttctgaattgggttgcgtaaacctgcgaaagcttgaactcaggagttgctgttccagcaagcaagcactgtcccttgcaatattacatattgccttccttgaggtccttatgggttaagg

SEQ ID NO: 296371 - DNA, 217 bp, Zea mays
ggatgctgacagtgatgtccatgttaaatactcgagccgacattcgggagaacactgtaaagtgcttcatggaaactgagttacgtgagatatcatcagaattggaagtccatgatgagatatatgagcacatacaaaggatcaaagctactatagttacatctgctaatactggtgatgataccactgtactgaggactgagctaatgcttaatga

SEQ ID NO: 296372 - DNA, 430 bp, Zea mays
aagtgataaaatctgatgccgagagattggacaaacgtgggctagatgccaaaataagatatagtggtggccaggaccttgatatattacctcaaggagctggatagggccaagcacttgcatatttgcttaaaaggctaagatcatgtggaaaaccgtctaccaatactgttgattgtggtgactctggtaatgatgcataattattcatgatacctggtgtacatggcgcaaacggcagcatgcgctagaaggaaactcgtaaactgctcacacaaaatgcgaatggctgcctattaatattctaatccaatgatagatgtgcagctggtattatacaagctatggcacacttcaagctaggacctagaatttctcctatagacctgcattgtacttatgcaaaggaagccgctttcaaacctacaga

SEQ ID NO: 296373 - DNA, 395 bp, Zea mays
cggaactgaattcccgggccgagccacacgtccgatgttatataatcagacgcctcgagattggcttcacggcggctagctgccaaaataagaggggggtatttttcaggaccttggtgtattaccttaaggagctagcatcggccaaacactcgcatacttgcttaaaaagctaagtccatgtggaaaaccgaccaacaatacactcgacagtagagactctggtcatgatgcataattattccacatacctgcagtacatgccgtcatggatagcaattcccaaatggaactactccagtggcacacctaaaatgccaacgataacccaaacataattcattcatatgagatatcgtcatctggtattatacaagctattggacactttaatc

SEQ ID NO: 296374 - DNA, 426 bp, Zea mays
tggattgttaccaatgatccgaatggtgtatttcagaggactaaggtagtgcacagcatcaagagctaccttgatatctcctctgatcctgcaacatttgtccagggagcaataccaaaactcgtggagaacacaaaggaggaattcttcgaaaaaactatcgaaattctaaaacgatgtgtagatatatgctgtgaaaagctgaagggcatcaatgcaatcacgtgcccaagcaaaccagagggatccatgtttgtaatggtgaaactggatctggcccggcctgaaggccttaaaaaataccatgaactcttgttgccgcttgccaaaggaggattaagtggtggtcctgccagaatgtcctgccgaatccaaggatggcctccgattaaccttggcaatggaccaatctcttttgaaaaaggg

SEQ ID NO: 296375 - DNA, 129 bp, Zea mays
tggcctattgggtaaaaaatgggctgatttaaccaaaatttaacccggattttaaccaaatattaaccccttccaattaagggggacttttacgggaaattttccccggacccctaattggttaatttt

SEQ ID NO: 296376 - DNA, 266 bp, Zea mays
tccgtattcccggtcgacctacgcgtccggagaccacaagcaacatagaaagtggaatccagtagcaacaattgaaccacaattggaaaccgagatatttttccttcctaatgcttctttgctcctttcaacatgtgtttgctaacgcgacaattttttccctaattgctcaacaagctcctatagctttccctttttcccctataccttccatcaattatagcttcagtatgtgaaaccctagctctttacccatataggctttt

SEQ ID NO: 296377 - DNA, 277 bp, Zea mays
tccggaattcccgtgattgagaccaactagcaacatacaaagcacaatagtgtaccaacaatgttagccaaaatattttgcctccttatgctggatggtctttctgctagtgctgctacttactaccatcttaccgtaatgctcataagctcctatagcttttctttttaccccatacctcttaccaactttgtcttcagtatgttaaaacccaattctttaaccctacatgatccaacatgcaatctcatcattgcatttttacctttatcatcct

SEQ ID NO: 296378 - DNA, 339 bp, Zea mays
gtaccatggtattttatgagaacaaagaaaatctttccaaattatgggatattctaaccgtgtatggatggattgacaaagatgttggttactgccaaggaatgagtgatttatgctcaccaatgatagttctactaaaggatgaagcagatgccttttggtgctttgagaaattgatgcgtagattgcgaggaaatttcaaatgcacacatcaatctgtgggagtatccaaccaacttcaacatcttgttaatttttaaaaaaaaaaaagaaaaaattattatttatatatggataagcctcattcttttttttttgttgaaaatgtaatgtttggat

SEQ ID NO: 296379 - DNA, 346 bp, Zea mays
ccggaccggaattcgcggggcgaccgcacgcgtccggcaaaccgagaaaatggcggctcggcgtggtctagagtgggacggggaccagcagggagcggtgctgccaacgccggggcccctctgcgcgcccgtcgtctgccttctcagctccggcggagacctagaccccggcgccttcgcaggcttcctcgtgggatactgaaaacgttggatcacaaaccatggcacgaaggctcgtcttagcattgatggatcttctgcaaacacattcgctgctcttgctggtgtccaaagcttcattatgtgcttgctaagaacactgcgttggaaagatgacatgaacaat

SEQ ID NO: 296380 - DNA, 314 bp, Zea mays
cggacacgtgggcagcagcacaagcaagaaccacaccttctgccttcgcctgggatcatgggggcttgctacggaggaaagcgcggataccgttccagctgctcatacggcaccggatacaacggctgcggtatgtaccctgacgtggagaccgtcgctaccaacaccagcaagaccaccgtcctcgccgcgccgaccaccaacgccagtgccggcggcttcgatgccgccaccgatggcggccgctgctactgcaacacctgcaagtgcggcaccaactgcaactgctcctgctgcatctgcaactgagctgg

SEQ ID NO: 296381 - DNA, 353 bp, Zea mays
cctgcggtaccggtcccgaatgcccgggtggagccacgcgtccggcggcagacgactaccaagcgtgcctgaagcagcttgtcaagaaccgtgtggtttctgtgtcaacggcgactggatttgccacctttcatctccaccttctgggaatgggacctgatggccacattgcgtctctcttccctggccaccctcttgttaacgagaaagagaggtgggtcacatacattaaggattctccaaagccacctccagagagaattacattcacgtttccagtaatcaactcatccgcatacgttgcgatggtggtgactggagctggaaaggcggcagcggtgcaaaaagcgctc

SEQ ID NO: 296382 - DNA, 116 bp, Zea mays
gactcgccctttatctgcgcattaatctctgctggttttgttgttactcgcatctttaccgctacacttaccatctccctagctcccactcctttcgctatcttcccttcctttct

SEQ ID NO: 296383 - DNA, 243 bp, Zea mays
  unsure (1)..(243): unsure at all n locations
ctgcagtaccggtcctgaattcccgggtgtacgcacgcatcccggtggaggatacaaaacactcattccatatttataccgtggaaaactttctcttcatggtgcttatgcacaacatctggtggagtgtctttacttgcatcgtgcattcaatgatatccacgcttcatttaaatggctcaangcaaatggatcacccaacgtttgtcttactggctattgcattggaggggctttatcaat

SEQ ID NO: 296384 - DNA, 294 bp, Zea mays
  unsure (1)..(294): unsure at all n locations
taccgcgccggaattcccggggcgaggcacgcgggcgcccacgcgtccgggtgggttggcttctcctcccccttcggttcgggttctccttcctgaggttcgctcacgttcggtgggggtgggtgagcncatctagatggcggcgtctgatgttgagtaccgctgcttcttcggcggcctctcctgggccacggacgaccactcccttcacaacgcctttagcacctacggcgaggtgctcgagtccaacatcattctccatcgggagacgcataggtcccgcggcttctgctt

SEQ ID NO: 296385 - DNA, 367 bp, Zea mays
  unsure (1)..(367): unsure at all n locations
gtacgcctgcagtaccggtcccgaattcccgggtggacgcacncgtcctagcaggcagcanccatttccaatgtcttcaccctcgacgctgtctccaatcagaacttgaannatggttgctgggtcatgatctncntcaangtgtattatnttactaactttttcgtagaccacctcaaacgtgattatcgtctggtggcctcaacttgcaaggatgctacttattatttcgaggatgtctgtcacagcaacactgccctcgcgattattgatgagtacttcgggggtgaaatctactcttctaccatcccttccaggactaagtatgttccccctaaacaacctcactacaaccaggacaagactc

SEQ ID NO: 296386 - DNA, 320 bp, Zea mays
  unsure (1)..(320): unsure at all n locations
ccaacaatcaacatataaagtttaatacanttgcaacaatatancaacaatggcggcgcgagatattgtccatccgtatgcgtcctttctctttcttcatttgtttctaactctaccatttttcctcaatactcacaaactcctatagctgcccttcttcccccataccttccatcaattacctcttcattattttaaaacccaaccctttcaaccctacatgctccaacaatcaatctcaacaagcaacttacctttatcaccccttttctttcaacaatctccatccctatctttggtgcaatcattcgtacaaacca

SEQ ID NO: 296387 - DNA, 296 bp, Zea mays
acgacgcgtgggcggacacttgggaataaagcgcgcgcgcgcacgccgagaggctctgagggctgtgtgagatggcacaagccattgcttccatgaccgggctctagaagggcgttctgcccaggaggcgcgccagcaacagggccaggactggcgacgtcatcagggcgtgcgccgaggcgcaagcgcatgcagtccggcgggccgcgctatggctgtgggacactgtcatcgtcggtggcgccttgtaacaagcagtgcacgctctgaccgtcaagaccatcaagatcggagcc

SEQ ID NO: 296388 - DNA, 340 bp, Zea mays
ggagaaggagcaactgcaaagcaacatctatgcaccaataatagtactgtagtagtttggcaatgggcaccgtgggatccaaaccaaagcagaacaaacttgatcaagggcagaatggcgtgccgtccttgtcgcggtgtgacgggatgacgaagtgcctgatccgtacgacctgctaggcgaggtagcccttgtacaggaacgccctggagaaggcgtactttacggggcggtccacgtcgtggacgaagacgtgggtggggccggacactggcctgcacgcgcgcgccgacatgccggaggtgtatatggcgcccatgcagtcgggcgcccggggcgt

SEQ ID NO: 296389 - DNA, 322 bp, Zea mays
ctcgtttcattgattcttgaagagatcgagcttcttttgcaccacacggtcaaggatgtcgggcaacggcggatcaagctgcggctgcggctcaagctgcaagtgcgggaagaagtaccctgacctggaggagacgagcaccgccgcgcaggccaccgtctgcctcggcgtggacccagagaagaacgccgcgcccgcattcgtcgaggccgcagcggagtccggcgaggacacccacggctgcagctgctgtggcaactgcaagtgcgacccctgcaactgctgatcacatcgatcgacgaccatggatatgagtattatc

SEQ ID NO: 296390 - DNA, 162 bp, Zea mays
gttccagatcagcaaatcttcattgcgtatttatgatcgtctaacagtgcagcattaagatggtcattcttctcgtcgtgtgcctgtctctgtcagctgccatcgcctcttcaatgcacatgccctgccccttcgcggggttgcatggcttgtactgcgctg

SEQ ID NO: 296391 - DNA, 405 bp, Zea mays
gtaccagctctgactcagctagtacaatctgttgcaacaattgttgttgcaggtatgtaggtgcattggccacagcgagcgggctagatgaaagcagttgttgctgttgtaggtaggcggcagggttcaccatggctagttgactgagcgctggcagaaactgttgcagctgttgttgtggctggtttgcaactacgtttgccagagcaagtgggtttgatgcaagcaactgctgttgcaagtaggcggcagggttcaccatggctaggtggctcagtgctggtaggaattgttgttgctgttgcgttgcgatggtttggtttttttagatgtgccaaagatttgttgttgcaactgactatgtcgaactctgctgcgtacctacaacagcgacaacagttactt

SEQ ID NO: 296392 - DNA, 407 bp, Zea mays
agaacttcagggaccacatttacaacgactccaacatcaaccagggctgcgcgagctcggggaaggtcaactgcccccggcccaccggcttctgcgacggcaacctggcgccgctcgacaccaccacgccgcacagttttgacaacgcctactacagcaacctgctgagccagaaggggctcctgcactctgaccaggagctctttaacggcggcagcaccgacaacaccgtcaggaacttcgcgtccaactcggccgccttcagcagcgccttctccgcggccatggttaagatgggcaacctcagcccgctcaccggatcttagggccagatcaggcttacctgctccacagtgaactaagatttataattatcaccatacgcaaaaaagagtggtatttttaca

SEQ ID NO: 296393 - DNA, 364 bp, Zea mays
aaaaaaaaaaaaaaaaaaaaaaaaaaaaaaattaaaaaataaaaaaaaaaaaaaaaaaaaaagaaaaagggaaaaaaaaaaaaaaacaaaaaaaaaaaaaaaaaaaaaaaggggccggcccttttaaagaatcaaactttacttccccttccatccaacgaaatactttttttttagtgtccccaaaaataaatccaatgcccgcctttttaaaacgccggaactggaaaaaccctgcctttaccaaactaaattcctttgcaaaaaatccccttttccccagttggcttaaaacaaaaaaggccccaaccaatcgcctttccaaaaatttgcccaccctaaatggcaaatggaaccccccctt

SEQ ID NO: 296394 - DNA, 176 bp, Zea mays
gatagaccttctcaatacaatggaccgtgcttcatccaacaatggaacggcttcacatggtgccgtgtccatcacaaaaaaggagcctatattcatgtactagaattattcagattcagttcacattgtgatgtgttatttttactttcgtcgtgctataaccgatagcgctcttc

SEQ ID NO: 296395 - DNA, 278 bp, Zea mays
aatcttcgtaatcgattaattaacacggttgttaaccagcttatgaaacaccgaaaaaagagggagggcttatcaaattatctatccagccccttaaaagattcaacaattgacatacacaaaaccactatttgttttacgtcaagctatacgtagagtaactcccaatatatgcgtgaaaacaaagacgtttctaaataaggatcgactccgtaagatccttattgaaatattatctaaacaaggaaaagcacttgccattcgttggttataaaaag

SEQ ID NO: 296396 - DNA, 129 bp, Zea mays
gtgcctaaaaactagtagctagtgattgcttctgtcgaatgacactatgcaatgtgatcgggaaccttgggtcttgttttcgaccctctgtatgactttcgtcataaaaatatgttggctccccgtatg

SEQ ID NO: 296397 - DNA, 309 bp, Zea mays
cccacgcgtccgcccacgcgtccgaccacgcgtatggttcgtgggtgaccggatcgaaatgggggcgtctgatgtggaataccgctgcttcgtccgccgcctcttctgggccactgactaccacttccttcacaacggcttcagcacctaccgcgtggtcctcgagtccaacatcatcctcgatcaggagacgcataagtcccgtggcttccgcttcttgaccttcttcaccgaggatgcgatgcgcaacgccatcgttggcatgaacggtactgagcttgactgacgctacatcaccgtcatctaggc

SEQ ID NO: 296398 - DNA, 283 bp, Zea mays
gcgtccgtgcctagaaactagtatctagtgttagcttctgtctaatgacactatgcaatgtgatcgggaacctggtggcttggttgcaacgcttgttattactgtcgtcagtaaaatttgggggcttcccttatgagatgctttcgggcaaggcctctgtgtcccaccttttttgtggcttgtggcgcttgaacctcgtctggtttgattgattagccctttaaaccgttgactcttgcattttacctttaaaaaaaaaaaaaaataagggctgttttttttt

SEQ ID NO: 296399 - DNA, 382 bp, Zea mays
cgccgtagtcaatccctccccagcagccgtcgttgtcaccgctgcaacgcggaggctacggcccagggccgtcaagatgcagatcttcttgaagaccctgacggggaaaacgatcactttggaggtggagtcctcggacaccatcgacaacttgaaggccaagatacaggacaaggagggcgatcccgtctgaccagcatcggctaatcttggcggcaagcaactcgaggacggccgcaccctctccgactacaacatccagaaggagttcacccttcacctggtgcttcgtctcctaggaggcgccaagaagcgcaagaagaagacgtacaccaagcccaagaagatcaatcacacgcacaagaaggtaaagctcgcattg

SEQ ID NO: 296400 - DNA, 422 bp, Zea mays
  unsure (1)..(422): unsure at all n locations
agctccacatggggggcgaccacaagaaggaggatgagcaccacaagaaggccgcggagcggcacaagaaggaggagggggagcaccacaagaaggacggcggggagcataaggaaggcatcgtggagaagatcaaggacaagatcaccggcgagcacggcgacaagtccggcgaccacaaggaaaagaaggacaagaaaaagaagaaggagaagaagaagcacggcgagggccacgaccacgacggcggccacagtagcagcagcagcgacagcgactgagatctggtgtcgcagcacaggtgcaacacaagtatgcttgctggatggaggattcataccanctgatgctgatgtagtgtttcactggtgtcatgcatgcatgtatcgtgctattattatcaaaaaggaaaaagaaataac

SEQ ID NO: 296401 - DNA, 234 bp, Zea mays
tcgacccacgcgaccgaccaatcttcggttgtttcaaacagatctttgtattgactgactcccggttgcctagggtgccaattatttatgctcgtgatgcttttacatcattaacaggttactcaagagaagaaatattgggctgtaactgcaaagtcttaaatgggccaagcactatcttggaggttttagaggatgcatgcacggtggatctactgttttacagatggaagt

SEQ ID NO: 296402 - DNA, 162 bp, Zea mays
agcaagcaagctcaatctactactactactatctggtacacattctatccagcctgtcaggctattgtgggggcactgaccgtgattatctcctctacagtgacagcctaattcccattacaggggtttaagtaaaacgctagccattaataaaaccttcgc

SEQ ID NO: 296403 - DNA, 342 bp, Zea mays
cgggccgacccacgcggccgaacacacaaaaaaccactcgtacggagaccttcaagcaacatagaaagtggaatccaatctcgcacaggtgaacaacaatggcgaccaatatattatccctccttattctactagctctatctgcatgtgttgctaactccacaatttttcctcaatgctcacaagctcatataacttcccttgttcccccataccttccatcaatgatagctatactatgtgaaaacccaactctttaaccctataggcttcaacaagcaatcgcagtaagcaacatacctttatcacccttgtttaaacaatctccaaccctatcttttt

SEQ ID NO: 296404 - DNA, 323 bp, Zea mays
cccacgcgtccgcccacgcgtccgtccacgcgtccgcccacgcgtccgcgtttcgttctcgcctttcagggttccgattgctaggctagctgcagctcaggtgcttgtctgaggctgcctcctcgttggcaaccggattgcctgctgctggtggatgtggtgatcaacagtattattacagagccatgctatgtgaacattactagtagcagtgctcataaaagctacaatcccatctcccttttttttccagtcatgtaaaacttccaaactgctccatggttcataactctgttcttcaatacatcattcaattatcgatt

SEQ ID NO: 296405 - DNA, 294 bp, Zea mays
atggccgacaatgggcttacattatcaagccctgcagcgctaacaccgaccccatctttgggagcaacaagctcaccggcaccgacaaatggtaccctgaaggcctatggtttgacccgctcggctgttgcaacggctctcccgagaagatcaaagagctgcgcaccaatgagatcaagaacggacgcctctccatgctcgtcgtcatgggcgcctggttgcaggccgagtacaccggaaccggccccatatacaacctattatatcacctcgccgaccctgggcacgccacca

SEQ ID NO: 296406 - DNA, 301 bp, Zea mays
attacacagacgtcatctatccttttggcccctgttaccttctttacagaatgtttcagaagtactcttacatttttccaatctgctggtctgaatgtaaaccaagtccttacaaggtgccttttcgctggactgtgtttacatgcataccaccagatgacttacatgactttggcgatggtgtctcctatcactcattctgtgggcaactgggttaaacatcatatcgtcattgtaacatcacagctgctcttaaagacaccacgttctactatcaactctctacgttctgcgattgaac

SEQ ID NO: 296407 - DNA, 274 bp, Zea mays
gctgccgccacttgtgacgcgttggccatcccgcgcgacccggcgttgtggcccgactcgcccgacggcgttcatccagagcggttcctgggtgcttccgccgctgtggacatgcgctgtgcgcactttgagctgctgtcgttcgggtccggccgactcatctgccccgcgtacgatctcgccatgaatctggtcgccgccggcgtggcgaacctggtgcacgggttctcgtggcggctgccggaccgggtggcggccgatgaccttagcattg

SEQ ID NO: 296408 - DNA, 344 bp, Zea mays
gtcgacccacgcgtgcgctcaactgtccttcttcctgaatgaccagcctatgtttgatgacttgctaccacatcgctcttgcgagggggaaggaagtcgaggatcttgatgctggtggtattcatgttatccaaatcgacgaggctgcactgatagaaaggctgccgctcctcaaggctgatcatgcattctacttgtactgggctgtccactccttcataattaccaactgcgagatccaggacaccacccagatccacacccacatgtgctacttctacttcaacgacatcatccactcgatcatcgacattgactcggacgtgatcaccattgagaactct

SEQ ID NO: 296409 - DNA, 365 bp, Zea mays
cgatgggtcgattgtggttccagagccactaataccctatatgggtggactagagttgctctgggcaaaattcaagtgaccctctacggtcacccgctgttgtgcttgtggacttagaactgtctggctgaagtaaaagttaaaggaaggtcacttctcactacaaatatacactactgaatttcgtgattgggggcttctgtttcataagcagtcgactactctgatctgatctgcatagcattatactggtcggctactctgatctgcatagcactacaaagcttatgtgcatgcattaggccctctatggttcccaagaatcgagtgacatttaaaagtattctaatactccctacattcta

SEQ ID NO: 296410 - DNA, 435 bp, Zea mays
ctgactcgttttctgactctttgttctacactttttctgactcgttgtcagcggcgtcttcaatgttgtaaaacccaattgttcaaccctacatgatccaacatgcaatcgcaacatgcatcttaccattatcacccttgttcctccaacaaccgtcatccctattacatcatttacctttggtccatttgttggcacataacatcattgcacaacatcttcaacaacttgtgctagcaaaccttgctgcatactctcaacaacatcagtttcttccattcaaccaacctggcttcatagaactctgctgcttatttgcaacaacaattaccattcatccagctagttgcttcctacccccactaattctttcattcaaccaactaacaacattgaactctgctgcttatttacagcagcaacaacttctaccat

SEQ ID NO: 296411 - DNA, 339 bp, Zea mays
ccggtcctaattcccgtgtcggccacgcgtccgtcagcattcaaaaacacaccaagcgaagcgctctatcatacgacctaacaccaatgtctaccaagatattatccctccttgcgctggttgcccttttagtgagcgcaacaaatgcgttcattattccacagtgctcacttgctcctagtgccattattccacagttcctcccaccagttacttcaatgggcttcgaacattcagccgtgcaagcctacagtctacaactagcgcttgcggcgagcgccttacatcaaccaatttgcccaattgcaacaacaattcctttggcacatttaaacccta

SEQ ID NO: 296412 - DNA, 325 bp, Zea mays
tgaatgactgccaacgcactgcattctatgtgtggaattggtctggacaccaaagaatttgacgtggatgttatcattgagaccgaccgcacaacggggatgatcgttcttgctgtcctagacgtgccgaacgctgctttcaagaggtaccttgtacagtctcggcgacatgaacgagaagatcattgtcatcttagatttgcgcggaagtaccttcgatgtgtaccttttgaccatctctggtggcgtttttgtcgtgaacgccaccattggtgacacccatatgggtggtgaagattttgattacaccgttgtcaaccacttt

SEQ ID NO: 296413 - DNA, 349 bp, Zea mays
  unsure (1)..(349): unsure at all n locations
ccggaacnnaagggccganccaacccacaccgtaccncgaaagaccagcaaataaagctggacatttctctttcccgcttaccttcaacgcattctcagggtgggagctaccaaagatgactggtaccgatttctggtatggaggttctccgtatcattaacgagcccactgctgctgccatcgcctacggtcttgatgccaacgacaagcaggagaagaacgtcctcatcttcgatttgggtggtggtaccttcgatgtctcccttttgaccatctccggtggtgttttcgccgtcaaagccaccgctggtgacacccatcttggttgggaagattttgataacaccc

SEQ ID NO: 296414 - DNA, 172 bp, Zea mays
cagggatgatgtgggaaagctcattcctgcatatcttgctcagggcattcttcaacatgaccggttttaggtcctggaccagaggggagtaagccagctgtttaatctagctacagagaggggccgcaaagctaggcctaacttgtaagtgggcttatgttgagaacacaat

SEQ ID NO: 296415 - DNA, 430 bp, Zea mays
  unsure (1)..(430): unsure at all n locations
ccgaccggaangaagaccggtcgcgcgaccgtaccacacttttgttattcaacaatgggtgtctctcacatcaactttgctgtctaccaacggtggacagcttaagaatctcttgaagcgagatcctaaatcgtatgaagctgagttcgagcaacaataccgccattatgaagcaagtctatccatcttcaagctgaagccagacgacgaggcaaaagatcttggcgacctgatcaacttcatatcccaagtctcgcaatgctttcctcatagaactgctgaattcccaggtcaaatgattgaattgcttgaggagcactatcaagtgctgaatcctgatctgcgcaaaaatatagtacaggcactgattttgcttcgaaacaagaacgtcgtcgataacactcctctgcttcctttgttttttacattg

SEQ ID NO: 296416 - DNA, 360 bp, Zea mays
ggcttcggaaaatgtctgatgacaaggccgtatgagctcggaatgaagtcaaaagactcctcagtgcaggagttatcagagaagtaaagtacccagaatggctagctaacactgttatggtaaaaaaggccaatggcaaatggcgaatgtgtatcgatttcacggatctcaacaaggcttgtccgaaggacgaattcccattgccaaggatagactccttagttgatgcagcagcttcgtcagagcttatgagtcttttagattgttattcatgctatcatcaaatttggatgaagaaggaggatgagccgtataccatgttcataacccctagtggaacatattgttaccttcggatgc

SEQ ID NO: 296417 - DNA, 197 bp, Zea mays
catggggccacctccctggcgtgagccctcctaccatgttctttcaaccacagtccttgtcgttctaccagcactctgttcctaaccctagcaccctcttacaactgcatcaatcttttccattcaaccaacttgcttttacaaaccctatagccttctaccaacaacccatcatctttggtgccctcttgtagatt

SEQ ID NO: 296418 - DNA, 418 bp, Zea mays
gtcaagatcttggacgaggagttcggaattgttaaggggaccatgacgacgacgcactcgtgcaccggcgaccagaggctgctggacgcgtcccaccgcgacctacggcgggcccgcgcggcggtgctgaacatcgtgccgacgagcacgggcgccgccaaggcctgggcgctggtgctgcctgatctgtaggggaagctgaacggtatctggcttcgggtgcctactccaaacacatacgggggggtcctggagaacaacacctgggcaactgtctttaggacataccacttgggctcgtcactgtcaaaggtcacccatcaactcccatactgacatatctgattctaccaacgagttggttatgttttacaactgtatgatcaccaactacaacggaactaaagactgttttggt

SEQ ID NO: 296419 - DNA, 302 bp, Zea mays
ccggcgactacggctgggacaccggctggctgtccgccgaccccgagaccttatccaagaaccgacagctggaggtgatccactccccctggggcatgctcggcgcgctcggctgcgtattgctcgagctgctttccctcaacggcgttaagattggcgaggccggctggtttaagggcggttctcacatcttcaaggagggcgggctggactacctaagaaacctcagtctgattcacgcgcagagcattctttgcatctgggcctcgccaggtcgtgctcatgggtgccgtcgagggcta

SEQ ID NO: 296420 - DNA, 408 bp, Zea mays
  unsure (1)..(408): unsure at all n locations
gccctggacgacccacgcgtggcggctagtgccatttataccacacgttcctccggctctgttactttaatgggctttcgaacacctaggggagcaagggtacaggctacaacaagcgcttgcttcnagcgtcttacaacaaccaattaaccaattgcaacaacaatccttggcacatctaaccatacaaaccatcgtaacacaacagcaacaacagttcctaccagcactgagccaactagatgtggtgaaccccttcgcctacttgcaacatgcagtgcttgcattcaacccacttgctctggcaaacgtagctgtataccaacaacaacaacaattgcaacactttttgccagcgctcattcaacttaccatggtgaaccctggtctccttcctacaacagcaac

SEQ ID NO: 296421 - DNA, 294 bp, Zea mays
agcaccacaaggttgaggatgtcttgtaactgcgcctcaagcttgggctgaagatgaagatgcaagtgcgtgaagagacaccctgacctggaggagacgagcaccgtcacgcatgtacacacgtcgtcttagggtgagcccagagaagaaagcccgccccgagttactaaaggccaggggcgagaccgataaggtccctcacagctgctgctgtcatggcaactgcaagtgccacccctgcaactgctgatcacatctatcgacgaccatggatatcattcttatctatctaac

SEQ ID NO: 296422 - DNA, 200 bp, Zea mays
gctggacgcgtgccaccgtgactttcggctgttccgtgcggaggcgctaaacagggtgccgacgagcacgggcgccgccaagggcgtggcgctggtgctgtcgcatctcatggggaagctgaacgggatcgatctgcgggtgccgaccccgaacgtgttcgtagtggacctggtgctcaacatcgtggagactggcatta

SEQ ID NO: 296423 - DNA, 483 bp, Zea mays
taccggtccggaattcccgggtcgaccacgtagcgcgaatagcgggcgccgagcacggaggcgcccattgcgtcggcgaactggtacagcgtgtccaggtgccaatcggtgtcgccggactgttggccggcggcggtcatgcgggcgcgctgggcgtcgggaagctggctgcccaggtgggggatggagatcagcagcggggcagtgccgcggctgaagtggtagatgtcgctcaagaaaaactccgggtggcaagggcaaggcgccgcgggctgggccgcggatggcgggcgcccttacgccggagcgctgtcccgcggagaccggacagcactctagacaggaccacccgccagaggttttgcatcagtttagtggatatagatgatcggtatcactgatgcaaatgacgccggcccgggagcatgcggacgtttgttccagcccccgcgttgtcatgccggcgcacacacaggccttatg

SEQ ID NO: 296424 - DNA, 268 bp, Zea mays
ccgaaccggactgcccgggtcgacggacgcgtacattgacgcttgggcggacgcatgtgtatacgtttgggcggacgcgtgggcgtggggccgccggggacgcatcagcgggagactcgccaaggagagcccgcaaggaggcgactatgagggccaagtggaagaagaagcgcatgatgaggctgaagaggaagcgttgaatgatgaggcagatatccaagtaggctgatggggattgtggatggtggtgtctgcatagttgttttac

SEQ ID NO: 296425 - DNA, 346 bp, Zea mays
cccacgcgttcgcggacgcgtgggtcatcctatgctcacgcatctccgtcgccccgccaccatcctctcccctctcctccgccgcaacatgtccgtctacaaggtcgtctccacctcgtccgcgccctcggctatcggtccttactcgcaggccgtggtgcacaacggcctcgcctactcgagcggctcgattggctttgagccgtcgacgatgcatattgtcgagggcggcgtcgaggcgcagacgcgccaggcgctcaagaacctcaaggctgtcgttgaggcggccggtgcaagcacggccagtgtgctgaagacgaccgtgttcctgaaggacatgggggac

SEQ ID NO: 296426 - DNA, 458 bp, Zea mays
  unsure (1)..(458): unsure at all n locations
ccgccgattccggcgccaccgncgccacgcgtcgcttaggaaaccctgggttgacacagtccaagaattccatggtcttttcaagcgcattatccagccccatccggcggagcctgcaaccttaccacctagagcaggacggggatgcagggtacttcgcgaacggtgcaagccgcgatgtgaaccccacggcttcgaatgattcgtccatggacatgcactcggacagcccagctcatgactcctactgagcagctcccaccatggaaccagcctcaagaacagcacttcaagtggaagaagtctgctgtcacagccttcccaggcctagtagtaatattcaatttaacaccttccatagcctctcttacactaagcgtgtgatgtcttgtgttggtactactacttaccacttgttgctttgcgagaattatgtaaattgcatgtactatactata

SEQ ID NO: 296427 - DNA, 429 bp, Zea mays
cggacgcgtggggtgaggaagcagaccacatggcggacgccgccggcgagcacaggaccagctcctctaattaaggtcgcagtcgcagcgtgtcctggccgtgggcggcgattagaagctagctagcgttggcatgtgtgttgggttctggtttgcttttaccaaaagtttgtttcaaggtggatcgcctggtcaaggtccgtgtgctctattaaggtggatcgcgtgactctggcagtgagtgttgctgcttgtgtaggacgtggtacgtacgggctttattttggtcccaagtcaaaagtcacggtcggtctggatgttgtgtacttgggtttgttgaattatgagcagctgcgtgttgtaattcggctgggctacctggatgcgttaataattgctttggtttctgcccagcgcgcgagcgtgtta

SEQ ID NO: 296428 - DNA, 99 bp, Zea mays
aataatgcagtaagacgacacacattatcatttgtggtatgaccaataatatatgcatggtcataataaagctccggttttaatgaaaacaaaccaaaa

SEQ ID NO: 296429 - DNA, 431 bp, Zea mays
ccggaattcccggttcgacccgcgcgtccgcatgttcttcggcaccgtgatcctcttcgcgttgtagacgatcaacaaggccaaagccaacgccttctcgccagcggttgcgtcggggctgatctgcggcgacggcatctggaccctgccgcagtccattcttgcgcttgccaaggtgaagccgcccatctgcatgaagttcttgtccaggtcggtgaatgcccaggtggacggcttcctcggaagttgaactgttgaaatcgtgacgtgcatgtatattgtgttgatgcaccacgcgtgctgtaaaacgtaccgggtaatgttgtgtcgacacgttctggttttgatgtacatgagtaagtacactagtcgtagggattgctaaattaatgtttggcgtatacgcgtcagcattagtaatgtacatgagt

SEQ ID NO: 296430 - DNA, 433 bp, Zea mays
attaccgcaagctgtcgccacggcgagaccttttctgacccaagaaaagtcgccctcgcgcgcgtctagatctccgagcgaagggagagcttgccgtgtgccgagacttccatggagctactccacgccgtcatccatggagctgcgacgacgacgacgaccaccaccaccaccaccacgagcagcagcgccaccgtcaccagcggcgacgagggcgcccacctgccccaggggtgggccaagaagaagcgctcgcggcgccagcgctcataggaggagaacctcgcgctgtgcctgctcatgctctcccgcggcgaccgccaccgcgtccaggcgccgccgtcgccggtcccgtccgcggagttcaggtgctccgtctgcgggaagtccttcggctcctaccaggcgctggggggccacatgaccagccacc

SEQ ID NO: 296431 - DNA, 205 bp, Zea mays
cttatcctccccctcttaccaagtcctcctcgtgttagggttccttagggttttgtggaggggcgatggcggcggctgatgtggagtaccgttgcttcgccggctggcttgcctgggccaccagcaacgagtcgctggagaatgccttcgcctgctacggcgagatccttacctccaaggtgataaccgaccgggagacggggag

SEQ ID NO: 296432 - DNA, 366 bp, Zea mays
tgcacgtacacgtaccgaatcggaatttcgggctaggcgcacgccttcacggtaaagccgctgataagtgatggactccttcggcaagcgcggagcccccgtcgagacctactactactaccccgaggaggaccggtccaacttctggtacatggtggactacggcatggtccgcttctgcgtgggcgactcggagcacgactggcgcgtcctgacgcacgacctcgacttcatcgagcactgcctattcacggtggaccgcatgcaccagtcgttgctcatcttcgcgcacgctccgggagctaggctactccttcaacagctggcacagctgggaagggttcttttgaggaagccaagggcctt

SEQ ID NO: 296433 - DNA, 418 bp, Zea mays
cgcctgcaggtaccgatccggaatttcgagctagacccacgcgtacgcctgcataaagacgcctgcgcgccatcccctgtatctgtctcagggactcagaccaggtaacagattcccgggtggctgggagactgcgcacttcttcaagtttgacatctacaaggacgtcaggaacttacaggtactcaaagagatgtacaacgagtggccattcgttgaggggcaccctggacctgctggatatggctttcgccaagggagaccccggcattggcagcttgcatgacgagctgcttgtggcggaagaactcacgccctttgggaagcacctcatggtctaatacgtggagacacagcatcttctcctccagatcgctgggcacaaggatattcttgaaggcgatccattcctgaagca

SEQ ID NO: 296434 - DNA, 362 bp, Zea mays
gggaaaggttcacggatcgctcgcgcgtgccgtttatgtcaagtcgcaaacccccaaggttgaaccccaagagaagaagaagagggtgactggtcgtgccaagaaacgtctcatcttcaactctcgtttcgttaacgttacctccgctcccggaggcaaggttcaacgcaacaagcaacctcaaggaaagtccggttaaacgaaccaacaaggagagataagaagaatcaatccagtgaaaacacgaatattccagcagaaacagacttttattcagaattacattactcttatcactctcgccctttcctgccttcccctatcttcgcctttactcgttctactccctatcaatcctactt

SEQ ID NO: 296435 - DNA, 238 bp, Zea mays
cccacgcgtccggaccctttccatccaagctatgccaaaccctagccaccgtcggttccaatctgccaacatctcgtccgctggtgggtggctcggcctcggcggcatggcctcgtccgcctacgccgcttgggacgccgcggaggaggcggacatcgacgcctccgcatcgcaggaggagctcatcgtccgcgcccgcttcatctcccgtgacaatgaggaggatggggagggggag

SEQ ID NO: 296436 - DNA, 390 bp, Zea mays
cccacgcgtccgttcaagatcgactcaacatgcctcccaagaccaaggctcaaatcgcggctggcggtcaggccggttctcgtgccgggaagaagaagaagtggtccaagggtaaggtcaaggacaaggccaacaacgccgtcatggtcgacaagcccacctacgacaagatcctcaaggaggtccctacctacaagatgatctcccagtcggtcctcatcgagcgaatgaagatcaacggttctttggcccgaaaggccatgaggactttggaggacatgggtttgatcaagaaggtcgtgcaccaccacggacaatgggtttacacccgtgccaccggctcggactaaagcgcttagcccgatgactggccttcgactttcgtcaaca

SEQ ID NO: 296437 - DNA, 326 bp, Zea mays
cccacgcgtccggttctattgagacagggtgtgcttggtatcaaggttaagattatgctggactgggatccaaagggcaagcaagggccaaccatgcctttacctgatttggttacaattcacgtgcctaaggaagaggatgagttattgaggcctcttgcagctgaaatccaagttgcctgaagtaaaaaagttccagtgaggcctacgcctatggttgtggtcctcatttttttgtgtaatgttcattattaacatgttgaaagtaaaaagagctttactttctatagttgcaagcagtgataatcaatgaattctttctgctt

SEQ ID NO: 296438 - DNA, 452 bp, Zea mays
aagacagaacgtttgtgtcatctatccttaattcgcttcctggtgttgatcccaatgatccatctgttaaagatttgctggcatcattgcacagccagggagagcaagagaagaaggaagacaagtcagacaaaacagaagacgagaagaactgatgtagccatgttcatgcttccatgctcacaaagaaattgaacattggtctgcattggctgcgcttactctcttggctatgaaatttgcttatcctcatgtaacagtgctttgtttataacttaatgccgagggaatttgtattgtgactgcaacaatcttctcgtcataaatgttcaagtgatttcgtgtttcaagctctaaaaaaaaataataaattattattatataaaaaaaaatatataatttataaataataaatttaataattggggcggccgctctagaggatccaagct

SEQ ID NO: 296439 - DNA, 414 bp, Zea mays
cgaatttcccgggtagacccacgcgtccgcccacgcgtccgcggacgcgtgggatctaccagcgactcagcgagcgagagcagcacacacgcagctagctaggagcagcagcagcggcggcggcgatggcggcctccatgatctcctcgtcagctctggcggtggcgcctcagggcctgccgcccctcggccgccgcgcctcctccttcgccgtcgtctgctccaagaagaagatcaagaccgacaagccctacgggattgggggtggcctgaccgtcgacgtctactccaaacttagaaagggcatgggctagggcgttaaccatttcgtctaccagttcggctcgatcgtcatcagtatcaggccaatctacaacgaggatgacttggtcttccacctgccgcgttttacat

SEQ ID NO: 296440 - DNA, 406 bp, Zea mays
ctcactgggaacgtcattggcagtcgcgtcctgggaacgaagtggtgttagtgttttgtaaaagggggtggtgggtgcatagtgaccaagactcgtggggaagaaacagaccatcttagcaatcacgacttcctcgtcgctctggagagtggtggctgcctcgtccaagatgggcgccagcttcttgcagtgtccgcaccagggggcatagaattcaataaggactgcaacagagttatacatatcaagactatttcaatctattaaagggaaaaaaagacttccatccctgagacgaagacaagaactacatgctaaacacaattcttgtgaaattttgcctgccataaataattcttattgtttgatgaaaaataacagaattatcaggccacattccattttt

SEQ ID NO: 296441 - DNA, 331 bp, Zea mays
tcgacgctttcgaacacgcgtacggccacgcgtacgagtatgttcaatacatatggacctagcatgtgcattgacaatggccgggttgtcagtaactttattgctcaagcactgaagaaggagcccttgacggtttatggtgatggaaagcaaaccaggagtttacaatatgtctctgatgttgttgagggccttactaatctgatggaaggcgagcatgtggggccattcaacctgggtaaccctggcgagttcaccatgcttgagcttgacaaggttgttcacgacaccatagaccccaactcacggatcgagttccgcaagaacaccc

SEQ ID NO: 296442 - DNA, 337 bp, Zea mays
atccacgctttcgaacacgcgtacggtcacgctttcttgtatcctcaatacatataagacctaggatgtacattgacgatgggcagcgtgtcattaactttattgcacaagcactaaaaaaggaacccttgacggtttatggtcattgaaagcaaaccaagattttacaatatgtctctgatcttgttaaaggccttacttaatcttattgaaagcgagcatgagtggccattcaacctgtaattaccctggctagttcaccattcttaatctagacaacgtttgttcactacaccataaacactcaactcacggatcgagtttctcaaataacacc

SEQ ID NO: 296443 - DNA, 436 bp, Zea mays
cccacgcgtccggctgaagcgaacacagagctgctcgccgtgtaacgcatcaggcagcagcacccataggcggcaggccacacacacagcacacgcagatcttcgatcaccaccatgggttctctcggcgtcccggtcatcagctggcccttcttcgccgaccagcagaccaactgccgctaccagtgcaacgagtggggcgtcgggatggagatcgacagcaacgtccggcgcgacgccgtggcgagcctcatcgctgagctcatggagggggagcaggggaaggagatgaggagaagggcactggaatggagggacaaggccatcgaggtggccaagcccggaggcacgtcttaccggaatttcgatgaactggttcgcaatgtgctcctgccaaagaactaggcaacttagctctatatttgcagtttgcacg

SEQ ID NO: 296444 - DNA, 330 bp, Zea mays
cccacgcgtccgcccacgcgtccgcccactcgtccgcccacgcgtccggtgcagtgttgttcgcaagatgggctacggtgatggtttcaagtgggtctcccagtacatcaagtagggccctcgccgaggcgcatgctcagcccggcgaatttttttgccttgttcgttccggttggttcgtgacgagaacgaacgatggtcgctaggaaagtatcatggagggtatgaagaggaaaaacagtgcttaacattgttgaacatgttgagtctttagcgtcaaaacaatttatgtcgaactctattctttcgcttttccatacaacgtttact

SEQ ID NO: 296445 - DNA, 376 bp, Zea mays
cgccacggtcctggacccccctaccagtgccgcatgtccaggaacgggttctggcagtgggaggacgagagcccgccgtcgggcgcctggaagggcaccagcggaggccacgccgtgctcatcagcggatacagcgagggcaaaggcaacttcgccatgccgcgcggggtcacctacggccacctgctcagctccatgagggccatcatgaagaaccgcggcgggggctgcgatctgcagggggccatcggcgcacccatccgcaccgtcgccaacttcagcggcgtgcaggagcctaacctgtcctcttcggagacgtttgacatttaccgcaagcagttcgtcctgtagacaccaccacaccaagggtttgccc

SEQ ID NO: 296446 - DNA, 378 bp, Zea mays
ctattcctcacgagcgattgcggttttggttgttagaggcgatggggcactccagcgtgtgggactcgcaccccaagaactacggacccttatcccttgtttgcctggtctgtgcgaacccttatggactgatcaggaagtacgggctgatgtgctgcatgcagtgctttcgcagcaactccaaggacattgtctttatcaagtaccgctgaaggtagcttggctggctatctgtatgccatcacttgctcaaggttttatatgccatgccacaattttatatacctgtctttaaatgtttcctttaaaaccttcagtatttaagttccctcaattttttttactggtgaaacttaaatcttttgcttttctcattta

SEQ ID NO: 296447 - DNA, 224 bp, Zea mays
ggagaagatcaacgcgctgcccaccatggagatcaagagcggacgcctcgccatgctctccgtgatgggcgcctgggtccaggccgagtacaccggcacctgaccgatggacaacctattcgaccacctcgacgaccctggccacgccaccatattccaggactttacccgcaaatgaggagtcgaacttattattagcattgtggggagtgctaccacacatg

SEQ ID NO: 296448 - DNA, 197 bp, Zea mays
agccgacctgcccaatatcatgttctgtgggatgagaacaaatctacggctgatgggatgcaaacactcaccaacaacatggggtacacgtatgccaggtgcacacgctcaggatcaaacggtcctcctgcatactatgctcatcgggcagcctgccgagcacgggtttacatggagccagagacaagtgacagcgg

SEQ ID NO: 296449 - DNA, 359 bp, Zea mays
  unsure (1)..(359): unsure at all n locations
ccctgcagaccgtccgaattcccggtcacccaccgtcgacaccataactcactacctacacatcttacaagcatagccaataccaccgattagacagggacaagcccgacctcgagagannnnnnnacgagtggtcattctccagacccgcatgccgggggcgctgaaggaccgtgtgtacatgtactacggagataacgctgcagtcattgacaatgccaagggtgccatgaaaggctgtggaatcactcgacctatcgtcacggactgtgccgacattggggctacgatcgctagcgcaaaagatgtcatcgtctcagaccttgttggaatggacatagacttgcttatgaccatct

SEQ ID NO: 296450 - DNA, 305 bp, Zea mays
cccacgcgtgcgcacacgcgtgggtggctcttatgctccatacctcgctctacgggcatatgatccccaaccctgcttacgcgggggtccctacggcaagctacgactactgtgctagggagaggccatgaatcttctgatcgagcaggcaggaggccagtccttcacaggcaaagaacgggctcttgatctggtcccaaccaagatccacgacaggtccccgatattcctcggaagctacgactacgtggaggagatcaaagcgttttccgccgagcaggctaaggcaacctcggtttcatcct

SEQ ID NO: 296451 - DNA, 400 bp, Zea mays
ctccctgttcgactatgagttgtgtgtgtcatttgtatctcagaagtggtggtttggtcctgttgcgcgtatttaatcttgctgtcctgtctttaaccgggagaactcttggtaattgttacaagcgacctgttccagtttatgtgagaattcgatatgctgcctggaatcatatattctgcttgccattgatatactgataggttctgggagattattggcgcgacggacttccctcatgctcgtccctcgctgctctcgaggctcccgggacagaagctacagcgacaaaggtgaaacctcttctggctgggacatggcatgggctaaaattaagaagaaagggaagaggaccctattttttgattatttaccacacaagtatgtgacctggaaccca

SEQ ID NO: 296452 - DNA, 421 bp, Zea mays
cgactagtttcattgattcttgaagagatcgagcttcttttgcaccacaaggtcgaggatgtgttgcaactgcggatcaagctgcggctgcggctcaagctgcaagtgcggcaagaagtaccctgacctggaggagacgagcaccgccgcgcaggccaccgtcgtcctcggcgtggccccggagaagaaggccgcgcccgagttcgtcgaggccgcggcggagtccggcgaggccgcccacggctgcagctgcggtggcaactgcaagtgcgacccctgcaactgctgatcacatcgatcgacgaccatggatatgattattatctatctagctggtggtggtggttgaacaataataaagcgaggccgagctggctgccatacataagtattgtgaggtgtgtgtgaaagagagagaaac

SEQ ID NO: 296453 - DNA, 320 bp, Zea mays
gcagtgcaggctggcggtgacctgcatcgctctggcggtggcgccgaccagctttgcgcaggggacgcccgtccggccgacgagcatactggtggtaggcgccacggggacgctggggaggcaggtggtcaggagggcgctggactagggctacgacgttaggtgcctcgtcaggccgagcccagcgcctgcagatttcctcctggactggggtgccaccgtagtcaatgtaggattttgttgggctgcctgtgcttctgttatatgtctatttttgcaattgggcttgcttttgtcgttaatggtttatttgtgatttt

SEQ ID NO: 296454 - DNA, 294 bp, Zea mays
gctccactgtgcagtgcgcgcgtaaatcttgcttatctagccgacatggcctgactagcaggcgtcttccccaagcccatgacgatcaaaattctcgccatcaactccatctacggaaggaagctcgccgacaccaggacgacggtccgctacatactcatgcccatgtcagccgaccagatggacatgttcggtgacaagcacctgtaccatgaccttgacctcatagacatcaccaccggacagtgggacctctactgatttgacgcgcactcgtcatacaaccggatacag

SEQ ID NO: 296455 - DNA, 285 bp, Zea mays
cccacgcgtccgctgcaagtctcgctacgtttttttcaataaaaaaagcagccgcattggcgagcagcaccatggccctctcctcgagggccttggccagcaaggccgtgaacgtgccgtcgtcgtccgccttcggcgaggcccgcgtgacgatgcgcaagacggcggcgaatgccaagccagcggcggcgtccgtgagcccgtggtagggacccgaccgcgtgctgtacctgggcccactgtccggcgagccggcgagctacctgacgggcgagttcccgggcg

SEQ ID NO: 296456 - DNA, 395 bp, Zea mays
aggagtcgcacctgccgcagcttccctacctgcacgcggtggtcaaggagacgctgcggctgcacccggcgctgccgctgatggtgccgcactgccccagcgccgacgccacggtgggcggctaccgcgtcccggcggggtgccgcgtgttcgtcaacgtgtgggcgatcatgagggaccccgccgtgtggaaggacccgcgggacttcgtcccggagcggttcctggacggcgccggcgaatggcgcaagtgggacttcacgggcagcgagatggagtacctcccgttcgggtccgggcgcaagatctgcgctggcgtcgccatggcccaacggatgacggcctactcgctggccatgctgttgcaagcgttcgactgggagctgcctgccggc

SEQ ID NO: 296457 - DNA, 355 bp, Zea mays
  unsure (1)..(355): unsure at all n locations
gggaactccgttacccggccccggctgtgcgtggcgtcagaacgccccgcggacaggagggggaggctgctgagcgtgaggtgcgagcagggagccaagggcggtggcgggctggacgtgtggctgagccgcggggcgatgctgggcttcgtcggagcggtggccgtggagctgaccaccgggaaaggcgtgcttcagaatgtgggattgaccgcgccgngcccggcactcgatccttcgcttacaagccctggcgcctggtgcaccagctggcagcttgagacttccgtgactctgactagtggatgttaatggttaaactgacacatatgattgctcacatgtattgatttgt

SEQ ID NO: 296458 - DNA, 398 bp, Zea mays
cccaaaccctagccaaggaccacgttgccctatcaatgaccgccaccgaagaagcgcttgggggcttcaccaacacacggggggaacccaagacctttttcccgaatttcccgcgcgcccagaccgcatttgtaaagggcttaccaccggattggagaagttctatcaccagagcgatccacagaaagagaacttgtgcctttattgtttgccaaataagacttgtgaggtcactcttccagctgaagaagtaccttctgagcttccagaaccagcactggggataaactttgcccgtgatggaatggtctaaaaagactggttgtctttagttgcagttcatagtgatgcatggctcctgtctgttgcattctactttggagcttcgtttggatttg

SEQ ID NO: 296459 - DNA, 283 bp, Zea mays
  unsure (1)..(283): unsure at all n locations
aaatatttttttttttccaaaaaaatttgttgtttagcagaaaaatataaaaatttttttttttcagccaacaaattatttttccagcaaaaattnttttnnggccgggaagcagctggaggatggccgcacccttgcggactataacatccaaaaggagtctacgctccacctcgtgctcaggctccgcggtggcatcattgagccctcgctgcaggcgctcgctcgcaagtacaaccaggacaagatgatctgccgcaaatgctatgcacggctgcaccct

SEQ ID NO: 296460 - DNA, 218 bp, Zea mays
gatgtcggtggcgtcgctcctctgcccctgcaacgacgcgcgcatcggccccgccgccaggctcctcaccgacggcacgcccgccgtctacagggactacacctacgccgagtactacgccaagttctggagcaggaacctggaccaggagcactgcctcgagctcttcaggaccccgacctcctaggagtaatttggatgcttctctttcattttag

SEQ ID NO: 296461 - DNA, 263 bp, Zea mays
cgaagatctccaacagaggattatttgatctatcgtcgaccttttgccacgtgtttaggctttacagccagcttattattaggtttttttctccctttcgtttgaatattactggatgggtaaaagaggtcatgtatctaaattgtctcctcagggcttgttcggttctactccaatctatatggattgaggggattgagatggtttcaatcactagtaagtccaaatctctccaatccgtatcaatcccttccaatccatat

SEQ ID NO: 296462 - DNA, 170 bp, Zea mays
tgagcgcatccaccgtgagaagaccaacggcgccactgttccgcttggcatccacccttccaacgttgtgatcaccagcctcaagctcgacgaggaccgcaagaagatcattgcccgcaagtctggttccaagaaggaggctgctgagaccaaggacaactaagcgcttc

SEQ ID NO: 296463 - DNA, 419 bp, Zea mays
  unsure (1)..(419): unsure at all n locations
aaaaccgggccgacccacgcgaccgggaagctacaaaactttttttgaaagttttattgtccatcgaagccgaantattcgccggtctccctaacggacagctgggggggataaaaaaaacnaatggcgacactctagagtatcaaaaggtcctgaaccaagaaatgaggcccgcactcaatgaaatagtgtgggcttggcaaggtgagcaatcaaagcaaaagcaggaacaacagtcgtgttaaaaacttatgagctagtgcaatacatctttttagccaatttccaatctttcgtgtatttgagtagcttttactcttttattatccatttttgttttcccgtgtaatgccaacataaactagtgttattttctgaggacaaatttatctcaaagatgtgtttacgctgtttaaaaa

SEQ ID NO: 296464 - DNA, 394 bp, Zea mays
cggacgcgtgggtgtgcgtggagtggcttggcatagcgacgcacggcgcgccagaggctggacacggccctcgaggcgagcacgtgtgcgcccgggatcatgggcaatgaaaggcgagcggaacaacggaacgaatgacggaagagcgcgattagattccgtcggcgtccttgaacatgaacgtcacgtccttgcccgtgagcttgcggtacacggacgagaagctgtcgagcttgtactcgaggctcgtggcgtccttggagtcaaggaagcacttaacgagcttgctgccgtcggtggcgacgcgcacgcgcttgccggtgatctcggtggggaacacgaagtcctcgaggatcgagtcgtgcaccgccgttagggtgcgcgagcgcgggcg

SEQ ID NO: 296465 - DNA, 413 bp, Zea mays
accacgcgtgcgtccacgcgtgcgcccacgcgtgcgaccacgcgtacggcagaggatcccgcggcttttgcttcggcaccttctccacggaggaggcgacgcgcaacgccatcaagggcatgaacggcaaggagctggacggtcgcaacatcaccgacaacgaggcccagtcccacagcagccggggaggcggcggccgtgggtacagtggcggccggggaggctgcggctactgcggcagcgggcgccgtgatggcggaggcagatacggaggtggcggcagatacggtggccgccgccgatacggtggaggcggcggcggctacggaactagcaaccgaaggggatgctacagcaactgcgacgggaactggaagaactgagctgtggggctcgcgcggacaagttatgct

SEQ ID NO: 296466 - DNA, 449 bp, Zea mays
  unsure (1)..(449): unsure at all n locations
cggaattncccgggtgcggcccacgcgtcacgcccacgccgtccgccagtcgcgtgcgccactcggtctgacccgtaccccccttccnccggagaggcgatgggcgacgtgagcctgaccggcgggcgcgagctgctccgcgtacccgacggcaccgacctcgtccaagncccatctancgtctccgtccggggcaagggtcttacgacgtcaccttccggcccgcggctttctacccggccccggcggcgcctaacgccgtcttcgcgggccgcgaggccagccgcgccctcggcaagatgtccaaggacgaggccgacgtctccggggacctctccgggctcaccgacaaggagctcggcgtcctcgccgactgggagaccaagttccaggccaagtaccccgtcggtcgccgactcgccgtcgacgcctgaactcggcagtctcgg

SEQ ID NO: 296467 - DNA, 390 bp, Zea mays
cacaagcatgccatgttctacaaccaaggctaatttctctccaaactgaataatacctcggaccgcaaatcacaataagctaaatggcctgtcaagacacaaatattaatggactttggaggaccattgtgccaagttaaactgatgttttacctaggcaaggccctaaaaaagggtttcaaccggaccgtatccttattgaatccagttcatataaaaacgcatcctgctaaattaaccatactcttatataaagaggggaccctctgagagagcaatctgtgatcaggttgacaataaactgatagatagacgattccagcgcgcgcaacacaatgtgtgcactgtcacatctttttgttctagcacatacatagaaggatattgctt

SEQ ID NO: 296468 - DNA, 465 bp, Zea mays
  unsure (1)..(465): unsure at all n locations
cggaattnccgggtcgagccacgcgtccgtgacagtttctcagaaccacagcctcgatccatcgttggagaggatgggagagcctacgcggcaggggctggcggaggcggggctcgccgttgagtcggcggagcagcgcaaccgcttcctggtgctgcggctgtacgaggcgctcggctcccgcgacgcgcgccgggcgcggaagctgctggcgcccgacctcgagtggtggttccacgggccccccacgcgccagcacatgatgcgcctcctcaccggcgcggaccaccagcgccacatgagcggcggcgggttcgccttctccccgcgctccgtcgacgccttcgggtccaccgtcgtcgcggagggcggcgctgactacgcgcgccagctctactgggtgcacgcctggaccgtggggcccgactgggtcattacacagctcagggagtaccttaacaccga

SEQ ID NO: 296469 - DNA, 273 bp, Zea mays
cggaaaggtaaagatgatcatggcctccaatttacctgatgttcttgacccttcggggctgggttcttgacctttaggccggaacattgaaatttcccttcccaaccagccatcaagaatggaagtttttaaaattcattccacttgtattgcccagcattgggaaattgattattaaacaatcctgaaactatctgaagggttcaatggtgctgatctttcgaacctgttcactgaaactggtatggctgcaattcgtgcagagagagatta

SEQ ID NO: 296470 - DNA, 420 bp, Zea mays
  unsure (1)..(420): unsure at all n locations
cggacgcgtgggcggacgcgtgggcgtccccgttcgaaggcgcggcaagcgagcgattcaggcaggttcgattcgacatgaatgccgagtacgactaccttttcaaacttctgcttattgctgatgtagctgtccaaatatgaatcatccgcaaatctgagaagcaagcatgatttcccaacaccagaatcaccaataagcagaagtttgaaaaggtagtcgcggacgcgtggggggtttttgattttagccgccgccgctgctcatctcacatccctcgagaagacgcctgctcctcgccgatcgatacgatggccgtcttctccgacctccacaccgncgacggcctcaagtccctcgaggctcacctcgccggcaaaacctatgtgtctggtgactccattactaaggatgacatta

SEQ ID NO: 296471 - DNA, 407 bp, Zea mays
ccaacggcggcgactcgcgcgccgtcctctcccgcggcggcgtccccgttccgctctccgtcgaccacaagcctgaccgacctgacgagctggctcgcatcgaggcggcgggtggccgcgtcatttactgggatggtgcccgtgttctcggcgtcctcgccatgtctcgagccataggcgatagatacctaaagccgtttgtgtcgtcggagccggaggtaacggtgacggagcgcaccgacgacgacgagtgcctgatcctcgccagcgacggcctgtgggacgtcgtgaccaacgagatggcgtgcgaggtcgtccgggcgtgcttccgcagcaacggtccgccggcgccggccgctcgcccgaacggcgtggcccttccggcagccggcgcgggcgccgaggac

SEQ ID NO: 296472 - DNA, 301 bp, Zea mays
  unsure (1)..(301): unsure at all n locations
ccggnccggaattcccgggtcgagccacgcgttcgctcacgcgtacgtgagagggtgcggagagaatatgcgcgcgacaatcccaaccctggcgctgctggtgactccgaggctccccgggctcgccgtgccgctggctggaggccgcctccgcgtgggcggtcgtcctcggacccgcctccgcgtggcggcgccgacgtccgtcccaggggaagcggcggatcacgcagagccaagcacgtctgcgcccgagtacggcgagaagttctcgcggagggatcactggtacccggtctccctc

SEQ ID NO: 296473 - DNA, 412 bp, Zea mays
  unsure (1)..(412): unsure at all n locations
gacccacgcgtncgcaactatgcacctgcctccgaatcccccctcttcccgccgctgctggtgccagtttccatgaactaacatccccttttttcgggtggtacccaccctgctcttccagctggtagctcctccccttcccttccaatccggtcttgcacaatttccgtcgtcctccccttcctttcaatcctgcaggttgcagcccctccttttcttcgattttgcagttcaacggcgaccggctgaccgccatctgccgggattggtccggcgtggaccttcttgccatctctggcgctgctgcagggcgcccaaccagcagccagggcccactggtgggcacccgtgcacgttcaagcttaccttgcagtttacagaagaatacccaaacaagccaccaactgttcga

SEQ ID NO: 296474 - DNA, 423 bp, Zea mays
  unsure (1)..(423): unsure at all n locations
cccacgcgtccgcccacgcgtccgcccacgcgttcgcgtacgcgtgggctcctcttgcgattcgctcggtcgatcctagcttctgttccaagaagcgcancgcccatggccatggccacgcaagcctccgccgtcacgcgccacctgctggccgtcgcctgggcgccggcggcgaagccgcggcagctgagctcgcagctcgcgctgccgtcgtcgtcctcccgcgggccggccccgctccgcgcgtccaccgaggaggcggtggaagcgcctaaggggttcgtggccccgcagctggaccccagcacgccgtccccgatcttcggcggcagcacgggcgggctgctccgcaaggcgcangtggaggagttctacgtcatcacgtggacgtcccccaaggagcaggtgttcgagatgcccacc

SEQ ID NO: 296475 - DNA, 283 bp, Zea mays
gaccgcccttttttttttttcttcttctctttcggtctctctccgacttttccacgcgggcgtggagcgatggttgggttggggctaccgcggcggcggcggcggctggagggactgatgtgtgggcccatcctggcttcggccgagttatcttatctatctatagtatcgtgttaccgctcgctactggaaccgagttagagtccgttctacctttggactaagtgttggtacccctgttgttcccttgtgttgctcccgctatgaaacgaggccagagaag

SEQ ID NO: 296476 - DNA, 238 bp, Zea mays
acggaaggcccgggtcgaccgacgcgtccgaccacgcgtccggtgataactactttgtgatttacattgacatgcacagatttagctacatgggaaggaaaggtatagaaacatttttggacaggctaaaagcatgcgttttagatgttgggctgacaattcaaggaaataaagctgaagagctgcccgagcagatcttatgctgtgttaggttaaatgggatagattacaccaaata

SEQ ID NO: 296477 - DNA, 421 bp, Zea mays
  unsure (1)..(421): unsure at all n locations
cggacgcgtgggtggatcccgacgcagaggttacgttcgagttcgtccccgtgatccggcggtacaggagcggccgtgtggagcgcctgctccccgtcaatccggtcccaccctccgtcgacgccgccaccggggtcgcctccaaggacgtcaccgttgacaaggccacaggcctatgggcgcgcctctacctcccagacccagatctatccgcgcgcccaggcggcgataggcgtctccccatcgtcctctacttccacggcggnggcctcgtggtcggatccgtggccgacgcccccgagcacgccttcgtgaaccgtctcgcagcgcgggccggcgcgctcgccgtgtacgtggagtaccggctggcgccggagcaccccgtccccgcctgctacgacgacgcctgggccgcgcttcg

SEQ ID NO: 296478 - DNA, 465 bp, Zea mays
gcaagaacttgtagcttcagtctccggtcccgacggttaaatcgattgaactcctggtcctgcaaatcaccaaaccacaatcacaatgaagcacctcgcggcatacctcctcctcggccttggtggcaacacctcgccctccgctgccgacgtcaaggccgtccttgagtccgttggtatcgaggctgactccgaccgtcttgacaagctgatctccgagcttgagggcaaggacatcaacgagctcatcgcttccggttccgagaagcttgcttccgttccctccggcggtgccggtggtgctgccgcttccggtggtgctgctgccgctggtggctccgctgaggctgaggccgctcctgaggccgccaaggaggaggagaaggaggagtctgacgaggacatgggtttcggtctcttcgactaagcgcattaccatcggcaaaacaacaccttcacctacct

SEQ ID NO: 296479 - DNA, 410 bp, Zea mays
gattaccaaacgaattttatattgggttattgctcaatatacatcttcatgcaaacattcatgatgcctgggacaatattcatgtctttacttgctggggctctttttggagtgattaaaggtggcattttggtagttttcactgccacagccggtggatcttcttgctattttgtctccaagctgattggcaggcccttggttagttggttgtggcctgaaaaactgagatatttccaatcagagattgctaagaggaaagaaaagctgctgaattatatgctttttctgagaataactccaactttgcccaatacattcataaatatggcgtcaccgattggtgacatacctttccatattttctttgctgcaacactagttggtcttattccagcatcttatattac

SEQ ID NO: 296480 - DNA, 265 bp, Zea mays
aaagggaaaagcggggcggggccgcacgcgtccacacacgcttccaaaagtggctcttttatggttctgtagatgtgcacattggcggcaatctgtccaccgagggtggcgcgcaccaaagcgtttatgacacacttgtgaaggtggttgatattgttgacacattccgtctacagtgccaacctccttttgacaggaaattatttgtgtattacataaaaaaatacatcaagaatctcactgctgcgttgtaccctgagaaagc

SEQ ID NO: 296481 - DNA, 309 bp, Zea mays
gcacagcccattattgccgtttcctttttgcttgagcaaagaaggagaccaagaaaagcgggggccttgtttgccatcatccacaaaaccaagaaaaacctccacatggggggcgaccacaggattaaggaggaggagcaccacaggaaggccgaggagcaccacaggaaggaggagggggagcaccacaagaaggacggcgggaagcacaaggaaggcatcgtggagaaaatcaaggacaggaccaccggcgagcacggcgacaggtccggcgaccacaaggaaaagaaggccaggaaaaagaagaag

SEQ ID NO: 296482 - DNA, 355 bp, Zea mays
gcgtccgatctagaccaactagcaacataaaacgctcttgattgtaccaacaatgacaaccaaaggtgtggccttcttatgctccttggtattactccaagtgctgctacgccgaccattttcccgcaatgctcacaagctcctatagactaccttcttcccccgtacctctcaccagcggtgtattcggcatgtgaaaacccaattcttcaaccctacaagatccaacaagcaatcgcagctggcatcttacctttatcacccttgttccttcaacaattatcaaccctattacagcaagtacctttggtgcatttattggcacaaaacatcatggcacaacaacttcaacaac

SEQ ID NO: 296483 - DNA, 392 bp, Zea mays
  unsure (1)..(392): unsure at all n locations
ggggctggcagggttcggcgagcaggagcgctacttcttcacgtgcaaggaggccaagtacgtgaagggccggcgcgcgaaccgcgccacgggggccgggtactggaaggcgacgggcaaggagaagccggtggccgtggcggtccggggcgtgcaggggcagagccagagccagagccaggccgtgctggtgggcatgaagcgctcgctggtgttctaccgcggcaagccgccgacgggaagcaagacggagtgggtgatgcacgagtaccggctggcgggcgccgggctcgcgccgtgccgtcgccgtcacnccnactccgactgagactgtgtggcgcgggcgccggccgagggctgtgtgctgtgcttgcgtgtttcggtagaagggt

SEQ ID NO: 296484 - DNA, 454 bp, Zea mays
  unsure (1)..(454): unsure at all n locations
cgggnccggaatcccggggcggacccacccgtccgttggagaccaatgagaccaggcttgtaacaatcagccgcgccactaaggaaatccgcctggaccagggccttaaaatgctaaggatattaagggatcatgtaagcaggacttcaatcctggacaacttggccttttacaagggccgccagaagtggatgcaggataggaggtcgaaccagcaccagttccaaaggcaggtttgggccactaggacccccgtttttgtaaccggggggcgaccgaaggaccctgttaaggggaagcccaatccgcccgaaccagagggggtaacggcaaaggtgaaggcggtaaaggttcccgcaaagaacggcttaactgctccggtggtttccaatgcagaaaagggggcccaaccggaaccagaaaaacccgtcttttccaacggagtcgccaggac

SEQ ID NO: 296485 - DNA, 288 bp, Zea mays
cccggcccggaattccggggtggaccacacgcttcctcgaacccttggccggccccttggctggccctttggccggacccttggccccatgtcctggtaatagaattggaactcccggatgcccggaaaacgccattttccgttggcttaaggttccaaaggatacttaagttttcaaaagggccccataccaactgggatttccggatggccattgcctgggtagtcggggaacttttggcggaagttgctcttgttttcgggttaaactggaatgggggtccggcc

SEQ ID NO: 296486 - DNA, 446 bp, Zea mays
ggggcggaccacacccgtccgggtggatttcatggaccaggaccggccacgtttatttgttcttgggaggctgcactgcaggatggatagggttgttgtggttttggagactaaccgacctgttagggggaatgttttttaccaggccaccatcaagcagggggcctttttgttgaaccgattccagaagctttaacgggtcatggaccttaaaggcctgtctgggtgggagcttttcttgcattcggggcctgcaaatgtttccaaccctacggtttcaacaggacttgaccatttttctcgggcggggaacaggttttaagaccattttggttttaagtgcagaatatttgggttttatatagtaaaccctgtcctgtcttttaaggtttcctatttggggttttgccggggaattcttaacttaagtggctggctggccaatc

SEQ ID NO: 296487 - DNA, 346 bp, Zea mays
cgggcccggaattccgggttggaccaaggcgtccgcccacccttccggagggggcacattaggattaatggttccggagcaaccgccgggtccatagcaaaccaaccttgattgcagggccagttaataatatataaaatcggagggggagcatatttatttggttgggtcctacaagcaggcttagtacgccgcctgcccgttcttcttataccacataacaaatttagccccttccttgcgggattgctggtggccgccgggtcaaatttggacctacaaggttccgtcaaacttgaatggttggttttttaataaaaccatgttggattaaacgtttttgggt

SEQ ID NO: 296488 - DNA, 282 bp, Zea mays
gccccaggacctggggaaagaacggaaactcccggaggcccggaaaaccccaagacccgtgggcctaagggaccaaaggaaacctaagctctcaaaagggcccaaaaccaactgggacctccgggagaccatggccaaggaggcccgggaaccttgggcggaagcggcccaggaagtcggggaaaacctggaggggggcccggccccggggcacggaaagggggtccaacccaaggaagaggaactgggaatcccggcgacggacaccggaccgggaaacca

SEQ ID NO: 296489 - DNA, 308 bp, Zea mays
cgggtctggaattccgggtcggaccacagccgtccgccaacgcttccggggccccttggccacagattaaagtttagggaggagtttggaatcaagccatggacttttgtccaaagactgggaaatccggttttaatacctgttgggggtcctaataaagaccggaatctaagagtttgcaccaagatagttttggattttgtttaaccagaaaacattcataaatgttttactttaaccgaggttttccggagacttcaagggggccccagggcaaaaaaggaaaaactagaggtgataaaaataat

SEQ ID NO: 296490 - DNA, 349 bp, Zea mays
  unsure (1)..(349): unsure at all n locations
cgggccgggaannccggggtggacccacgcgtccggcctcaaagcgcccccggaggcaagttccgtttaagttttcagaaccaacctgggcggccacgaaggggtaacccgcggggacgctcggaccgcccaggttatggaccaaccgcctcttttcccgaaggcagttggggctcgaggttttccacccgggccgggccaacgtttttaaggcgggcctaaaggaagggctggttaagatgtccgaggggagggatcccaccggcatttttgttttaaggtacggaacccactttgggggcggcatgttaaccggattcggttcaattaacaacacctttaatttatc

SEQ ID NO: 296491 - DNA, 424 bp, Zea mays
cggaatagacctacccttccggctatccttaaggtctgcaacgtcccgtttttttccttttttttaaggggctccaacttttcttcaacaattaacccttccttaacaagggcaatggccaacaccatgttaaaggcaatttcctggtccgacaccaaggggggttcttcccaaagggtcgcgaacttcgttaccatttgccccaaccagtgaaagtgaagcgttgcattgaaatagcactttgaaactcctaaccctccaaagggttttggaatcaaccccaaaatgactaactttcggggaaaataataatatttttttattatttttaaaaaaaaaagggggggccgttctataggatcaaagttatcttaccttgtcttgcaagttaataacttttctatagggtcaccaaaatcaaatt

SEQ ID NO: 296492 - DNA, 451 bp, Zea mays
ccggtccggaattccgggttggaccacacgcttccgccacacccgtccgccaacccgtcctcccgtttttaacgccaagcccccttccggggaaatggcccccaaccaagggggcagggggccgttcccgcccaaaaaaaaaacggttaaagggacaaacctttttttcaaaaaaaggccgaagcagttcggattcggggggggtgttcctcccaaaaaggacctgaaccggttcttcaaggggccaaaggtcttgcgtttccaggagacaggtccgaatcttaaaacagggctttaaggtaccaccggggttaaaccagttaacccgaaccttctacaagaaccttgttccaaacctgtttaaaatgcttttatagtaccggcctgaaaacaaggctgccaaaaaggaaaggctttttaaaaggtcccatgctgaaattgaaggaaaaat

SEQ ID NO: 296493 - DNA, 488 bp, Zea mays
ccggccgacccggcccggaattccggggtcgaccacacccttccaagacctaaggcctttggggaggcagttaagtttccaaatcctgggagccccagaagtttttcttccaaatcgttgggcccagggatatttttgaaggcaatccattcctgaagcaggggttggtgctgcccaacccttacataaccaccttgaacgggttccaggcctccaccctgaaccggttaagggacccaaacttaaaggggacccccaacccgccgttgtccaaggggttcgccgccaagaccaagcccgccggactggtaaagctgaacccggcaggcaagtccccgcccggcctgaaaaacacgctaatcttaaccatgaagggcatggccgccggcttgcaaaacactggttaggcggttttttttaattaacctgcaaagtgcaccgaaataataagtttccggtatggtggcgttttgtcagttttggatgga

SEQ ID NO: 296494 - DNA, 455 bp, Zea mays
ccggcccggaattccggggtggaccaaggcgtccgggcttcaaagatttggaaggaggggtccttaaacgggccaggcgggacttattcggtaaccttaaccgggccgggaacttacggtttttactgcaagccgaacaaaggagcaggattggtcggaaggataacagtaaattaaagttggttatcaattcaatgcatttgaatttgattgtactccgcccgtcaatggatgatgcatcaatttttactggttttcttaacatgtccaacaattaatgcaccaaattaagtccttacttgggggaaaaaaaaaaaaaaaaaaaaaaaaaaaaaaaaaaaaaaaaaaaaaaaaaggggggggccgttttaaaggatcaaagttaacttccccgggattgcaacgtaaaagttttttattggggtaactaaaattaaattaattggccgtggttt

SEQ ID NO: 296495 - DNA, 423 bp, Zea mays
cccacgcgtccggtacactgatgactggtcgagagagccagctgatcgatcgagtgacccttagttattagacagggatggcttcgttccggaccagctggcattgcttgctcgccgcctgcctgttcctgctcgcttcggcggcgcacgggcagcagctctcgtcgtccttctacgcggcgacatgcccgacgctggagctcatcgtgcggaccaccatgctcacggcgctcctcgccgagcgtcggatgggcgcgtccctcgtcaggctcttcttccacgactgctttgtccaaggctgcgacggctccattcttctggacgacgtcggcagcttcgtcggcgagaagggcgccggccccaacgtcaactctctccgcggcttcgacgtgatcgaccagatcaaggccaacgtcgagctca

SEQ ID NO: 296496 - DNA, 347 bp, Zea mays
cggacgcgtgggcggacgcgtgggcggacgcgtgggtttgaccttgagctagtagaagccatgcgcaaatcatgctatacccacggttgcaccatactagtgcactaggcgagggaaaccctatcgaccgaccatggtgttgctcccgcgcaccgggcggatggcccttctttgcaccccgcgggcgtactccgctgtcgctgatgcgggcgcctacccggcgtccccagagccatacgggggcgcccccccaccggcgatgtcgaagacggccgacttcggggtctttaaggtggacgacctgatgaactgggcgcggtagggctcgatctggcccatgacctttg

SEQ ID NO: 296497 - DNA, 487 bp, Zea mays
cggaattcccgggtcgaccgcacgcgtccgcccacgcgtccgcaccgggacccggcgatgtgttaggacccggaggagttcaggccggagcgggtcgagctcggcagggcagaggggaagttcatgatgccgtttgggatggggaggcgcaggtgccccggcgagaacctcgcgatgcgaaccatggggctggtcctgggggcgctgctccaatgcttcgattggaccagggttggggatagagaagttgacatggcaacagccactggcaccatcatgtctaaggctgtcccactcgaagctcaatgcaagccgcgagcgaacatgtctgctgttcttcagaaaatctagagtgagattgtgaatatttctagttgcagataaacgatacataactatgcaatgcttatatatagtgtatagtagtatagcagtttcttcattttaaagttgtacaatgacatttatagaaaataacgacataaat

SEQ ID NO: 296498 - DNA, 434 bp, Zea mays
cggaattcccgggtggacccacgcgtccgcccacgcgtccgggtttttgcaactactacagtttgagtacaaaaaccaacatgattagtggacaagttgtagggggtgctttttttttttttttcgtgaaccgaatctgttgggccagaaaactaaatttaacatccaaattacttatccatatgctacactgaaatacatcacagcaaaaacaactgaacagcatcaaactagaaggatgtccggacgcgtggtctgtgccacccacctgagcgacccgctccacactaccattttctacacgttctgagggtcctgttaagcctgccattgctctttcctgttcatttaccggaacgtgtttttggattaatttattacgatttttatattcctgtggatggatcatctcctttttcgttgtctcatttttt

SEQ ID NO: 296499 - DNA, 417 bp, Zea mays
ccaacacacactgtcattgacctcatagtaaattatgccgaacactagctatacatagaggaggtgttatttcaaggagagggacaaaacatcatccatcaagatacagcagctgacgaggaggccgagtctgcgctgttgcgcaagatctccggcctggccgcctccatctccaggctgccgtcgctgagcccgtcgccggaggtgaacgcgctcttcaccgacctcgttacggcctgcatcccacgcatcaccgtggacttggagcgcctgggccctgagcttcatcgcatgcgcgcgggcctcatccttcttttcactaacaccaatgctctgcttgaggcgcactacttcgacattctgtcctccttcgacaacccgctggaccacctgcctttctatctctactttaccaac

SEQ ID NO: 296500 - DNA, 382 bp, Zea mays
cggggcggaccaagccttccgccaacccgtccgccaacaggcaacatagatgtgggattacagtagcaccaatagagcaccagtggcggccaagatattttccatccttatgctccttgctctttctgcatgtgttgctaacgcgaccatttttccttaatactcacaagctcctatagctgcccttcttcccccataccttccatcaatgaccgcttcagtatgtgaaaacccagcccttcaaccctacaggcttcaacaagcaatcgcaacaagcaacttacctttatcacccctgttctttcaacaatcgccagccctatctttggtgcagtcattggtacaaaccattatggcacaacaggtgcagcaacttgtgcta

SEQ ID NO: 296501 - DNA, 303 bp, Zea mays
  unsure (1)..(303): unsure at all n locations
cggaattcgcgggacgacccaggcnattngttctacaacatgtcaacatatattttggtattctttagcaacaanagagcaacaggggcggtgaagatattttacattcttatgctccttgctcttnctgcatgtgttgctaacgctaccatttttcctcaatactcacatgcttctatagttgtccttttttcctcataccttttatcaatgacctgctttagttatgtaaaactctacttttcaattttacatgctttaatcagtaattttatcatagaacttacttttatcattcttgtt

SEQ ID NO: 296502 - DNA, 314 bp, Zea mays
ggccgacccacgcgtacgcacacgcgccggcaaggctttagccctggattttttttagctgaacgggaagctgaacggggtcgggctccttttgccagccccaaacgtatcctttgtggacctgacgatcaacaccgtaaagactggcgtaaacggtcgatgacgtgaacgcggcgttgcgtaaggatcgtcaccggccctctgtatgagattctggatgagtgcgacgtgccgctcgtgtccgtcgacttcaggtgcttccacatgtcctgcaccatagacgctgcgctcatcatggtcatgggccacaacat

SEQ ID NO: 296503 - DNA, 347 bp, Zea mays
  unsure (1)..(347): unsure at all n locations
gaaggagaccgcgctactagggtcggttttttttatggcgcggccaacctatccgggacgcgtggcgctgtccagaactcgccgcacgacttcncgaacccggacaacgcggcgcgcgcggccgtgggcgtgggtccggtgtcgggggatgagaacgtggccgccttcgctcggagctactccgagcagcgccagggcgactgtaagctggtgcactccggcggtgggcccaaccactacggggagaacatattttggggcggtggtagcgctctggaggcgtctgacgccgtccgcttgtgggtgggggagaagcataactactactacaacagcatcagctgtgc

SEQ ID NO: 296504 - DNA, 242 bp, Zea mays
ggccgaccacgcgttcgaccactcgtccgtagaaagtggattttttgttgcttcaccccggaagagcccaagggagatgggataactcataataggaggacagatccaaccttaatagcttcatagttcggaggatggacaggcgcatctgcctggagggtacaagggaaggagttaaggggccattaacaattgtcgcggcgatatatgaactcacaccttcccttgtttatggtggaggt

SEQ ID NO: 296505 - DNA, 312 bp, Zea mays
gatggccgtaccctagcagactacaacatttataaatgtagagcaccctccaccttgtgctccgtgtccgcggtggtcagtaagtcatgggtcgtttaagctgccgatgtgcctgcatcgtctggtgccctctccatatggaggctgactacctatctgctgttcgtgtcagtgttggtgtaataatggaccggttgtgttgtgtgtgcgtactacccacaactatgacaaatcatgaataactttgctgtgtgaccttgctgcaccaagttttgtagcccgatgggttgggagcctggtccggtcttttat

SEQ ID NO: 296506 - DNA, 349 bp, Zea mays
ggcggacgcgtgggccgtactaatcgaccaggtcgccatccgtttctttcattcaaaacgggtcgtcttcacagcaacggtaagggcatatcagcctccgccatcccctactcccgcagcgctcctgcgtggttgaagaccactcccgagcaggttgtcgaccagatctgcaagctcgcgaagaagggtgctacaccatctcagattggtgagatcctccgtgacagccacggtgtcgtccaggtcaaggtcattactggcaacaagatcctccgaatcctcaagtccaacggccttagccccgatattccagaggacctctacatgctcatcaagaaagccgttgccg

SEQ ID NO: 296507 - DNA, 345 bp, Zea mays
gaaagatgctgcagtggtagtccgccaaatgctcaatttagctgctgaatgctatctgcgtgggttagttcaccgagatatgaagcctgaggtcatgtaagactgtacctattttccttcccagaacttccttttcaaatcgaacaaggaggattcaccactaaaggcgacagattttggtttgtcagatttcattaagccagggaagaagttccatgacattggtggaagtgcttactatgtcgcaccaaaagtactaaaacgaccggcttgtcctgagtcaaatgtttggagcataggagtcattacctacattttgctctgtgggaggcgccctttttggga

SEQ ID NO: 296508 - DNA, 224 bp, Zea mays
  unsure (1)..(224): unsure at all n locations
ccacgcgtccgcggacgcgtggggccaccaaggacccgcgcgnctcgcgcgcgccgaggagtacgtgcccgacaggttcctcgcgaggacgggcgcagctgctccccacgtcgtctggtccaacggccccgagacggcgttgcccacgctgcaagacaagcagtgcgctggcaaggatcttttttgtgcttatttatttgtataatttttcactttatcttttt

SEQ ID NO: 296509 - DNA, 357 bp, Zea mays
  unsure (1)..(357): unsure at all n locations
gaaaaaagggncgacccacgcgaccgcccactcgtccgcgtgaacttgtccctttagtacctcaagaccnaccccttcgtcaagggggtgcttttaaatgggaccctggggctcatcaacacccactacgactatgtctcacgagagttcctcatatggaaaaagtgaaaaactagggctaaggcaattctaccggcccgccgactcctgcattatcataaatatatatactataactatactactacgtacctaccgatatgcacccgaacaatgtgaatgcgttgaagtctatctgttttctgcatctacatttatatacccggatcaacaatcgcccaatgtgaatgtaataag

SEQ ID NO: 296510 - DNA, 398 bp, Zea mays
  unsure (1)..(398): unsure at all n locations
atatgattcctcaacactgcattgctatttttaaagatcccccngcagctcggtggtcgtgggcgacctgccccatattccttcaaatgatacctaactccgcgatatggggcaaggaaagatggtgtgttggcataaccgccatctactaaataaaatttccccagaggtacttgaaagccattgttcattgcagccctaagaactctagcatccgtcgcggacccctcccacctagtggatatgaaagttacattgagatcaaaatcacacgcttccattacattttgagtaagagtgcccttgctatgtctaaatggagcggctttgtcaggtgatatcctaatatgcacatgagtgccatcgatttgaccaaagcaaatcttgtttgtaaaaac

SEQ ID NO: 296511 - DNA, 314 bp, Zea mays
aggtgcattttaagcacgcatttctatattaaagccaaaaaaaaacgaatgggggtgtggttttttttgcaacggcccagggcacccctgaacatgtgaaaattctgcttggaacgcgagttattactcagcattctggattttaaataccaatggatggggtactttttaatggcattggaaacacattacattatggcagggcaacgattcacaaattaatgaaacctccacttattaaatgggatggttaagagaccacccatagattaactcttcacaacttataaatgtatataagctttagggatgaa

SEQ ID NO: 296512 - DNA, 403 bp, Zea mays
gggcgccctcgcgggcggtgcctttgctctttacgaggggcaccgtgcgaagaaggaccgggcgaacgcgcagaggcacaagatcgaggccggcgtggcaacggcggctgcgctgggcgccggcggctacgcgtaccacgagcaccgcgagcagaaggaggcccactacgagagcaggcagtatgagcacagggtgccgtacgggcacgggcacgggcacggtttctcctactactgcgactgaaacgactgatcattccatctatcgagatatgcatgcagaactcgatatattatacttgctctagcgccgggcacgtgcgttcgtttaattttaataatagtcattacgttttcacgttgtgtgttgttttatctctttactttatctaattttctttat

SEQ ID NO: 296513 - DNA, 184 bp, Zea mays
gctttgagaccattctacgtggaggatctccctgggccaccagttctgccacccgtatggtcaacgtgtttcaccatcggcatgggtaataagccgtgggtgagcctgtcctagggctagggaatcaagcttagcatcataaaaaagcaaaggaagcgggatgccgctttccaggcttgttgtc

SEQ ID NO: 296514 - DNA, 457 bp, Zea mays
ggggcaattaatgactttgaaaactttaattatctgatgagggaagttgttgttgagaagtaggaaagtggaatgaaatccagtcttagtcaaatatttcatatctcttctcttcttgtccaaacagaaggaaaaggagacaatttgagctgagcggaaaatccatatctctcttatccatttagagcatatggatcgatttataagaatcgaatgttttggttttatgttattttgtgatagaatgaaaagaattctatatagaatgggttgggaattatgcctagatcccgtataaatggaaatttcattgttataaccttctcgattggtaccattattttattgcaaatatttccgacatcctttcggtggaaaaaaggggcattttctaattattagaaaatgggttgtttgccttaatcccttagaaaatttttctgcaatcctttctcta

SEQ ID NO: 296515 - DNA, 462 bp, Zea mays
gcccggaattaccgggtcgaccgacgcatgcgtccacgcgttcggttatcaagaactggaactacaccggtctggtggaagcgttccacaatggcgggggctactgctacacagcgaaggatcgaacagaggaagatctgacagaggatctggaagcagatctacgacctaagaaagacatgcttatgcttcatcgaggtcatcgtgcgtaaggatgacaccatgaaagagcttctcaagtggggatctaggctttctgatggcattatgcgaccacctaatgctcagtgcatacatcaggtctcctagaattgacctgaaacccgaacgcttactggcgacgatcatgacacgaaggctatacgatgacatgctgccgacttccgaattgatcgtcactgtgattcactgaaggtgcaagtacttgatggaaaactcgaaatccacttgcatgaatcatgg

SEQ ID NO: 296516 - DNA, 337 bp, Zea mays
ctgacgcgtgcgcccgtagctctagactatgtagaccatgtgccatatactggagtcctgggtgcgaatcccgtggcaattgatgacctggctggacgagcggattgaagacagaagctgggaggcggcaggccgtgactgctgtatactggagcgcgtgtggaagctgctcgcggacgaagagcacctacaccagctgatagacccagactagctactacggctcaagaaccagatagccgtaccatcaccgctgtgacgtgagttcgcgttattatgtgttccatacacagcgcttctacacgttggtagctccactaaggacctgaggaatcgt

SEQ ID NO: 296517 - DNA, 287 bp, Zea mays
ttattccatggtttcttttgcataacttcacttgtctatttgattaattctctatcctctttatctctatctttcctcttcccatccttcatttttattcaaacccatcaagatatataaataactacctatatataaattataaatacactaaaaatctctcaatttatacattattgaatacataaaatactgctcaacatacaaacatattattttatatactataaaatacttctaaatatattttataattttaaacttttatttaacataaacccttatct

SEQ ID NO: 296518 - DNA, 383 bp, Zea mays
gtcgacccacgcgtacggtgcgttacagcgtgggcgctgcacgcactttctggcatcaaggacaggctcctcgtctgggggcctttgctaccgtcgaagcgggcgctcgcaccactgcccgtgggccgctgtaacacgcgccggactgtgcacgtctgacaatccaagaacgcactggaccaaattgcagtggctgactagaagaactgtgacaggttgctgatggcgtgcgagactccactgctcatggagttctgggcgctctggtgagtaccgtgccaaaagatcgcgccgatgatctacgagctacccaatgactacaccaacaagatcacctgctgtatcgtgaacactgacgacagcttatacatggcgtctaccta

SEQ ID NO: 296519 - DNA, 430 bp, Zea mays
gacaccatgggtaattctcattgggcatagaccgatgtactcatcccatgtcggaataccagttaatgtagatctagcatttgtagcctacgttgagccactcttgctcaagcaccaggtggatttgggtctctttggccatgtacacaactatgagaggacttgtgcaatatacaagaatatatgcaaaggcaagccaaagaaggatgaaagtggaattgatacttatgacaacagcaaatatactgcacccgttcatgccactgttggagctggaggatttagcttggacaagttccctaggattgtgttgaacacgtggagcttatcaagagtttcagaattcgggtatgccagggtgcatgccacatgaggtgatatgctggttcagtttgtaagctcaagtacgatggaagttttggaccaattt

SEQ ID NO: 296520 - DNA, 330 bp, Zea mays
gccacgcgttcgatagcaacatggcagcagcacaagcaagaaccacacctaacacccttcaggctgagatcatgacagtcttgctgacctcggccagtagcagatgcctggtccagctagatcctgcctgcagcagatgcaacaggctgcagtatgtaccctgacgtggagaccatcagtcaccagcatggtgaagaccacggtcctagacgtgccgaccaccaaggccagcgccgaacgattaaaggcagtcaccgatggcggctgatgcaactgcaacacctgcaagtgcggaaccagctgctgatgctcctgctgcagctgcaactg

SEQ ID NO: 296521 - DNA, 362 bp, Zea mays
caattcatcagctagaagttcgaaatgggggtcaagtttttagtccttctcggtgttgtcctggcctctcttgtcttccaggacgtggcatttgctagagagctcactgaggccaataatgaggatgagggaaagaacatgaaacaaggaggaatgactgaattaaaggatgagaaatggggaggtggatataatggaggatatggatatggaggtgggtatggaggtggatctggaacaccgggctagggcaggggttatggtgattgcctacaagcctaaagggtactaagttgtgtactcccctcctaggaattccatctgcttcaaagatgtacttaaattaagccctctcaaacccc

SEQ ID NO: 296522 - DNA, 377 bp, Zea mays
  unsure (1)..(377): unsure at all n locations
cggacgcgtgggcggacgcgtgggtgctggcgctggccctgctctactcggccgtgggagccgccgcggagttcggcatcctgggcgagcgcggcaactcgcacgtccgctggcctaaggtctgcaacgtctatggccgcttctgcgagcgcgccatggcggccgtcatcgtctccctcatcgccgcattcgccaacctcgtcctcctcatgctcaacatcctcaccatccacaagagctcttcctactactaagctagctactatactgtagagaagagaaaccatatacaatgcgagctagctactcatatatagctgntgctgcatgcatgcatggngattaactaaagtgatcgacctcaacttgttgaaaaa

SEQ ID NO: 296523 - DNA, 320 bp, Zea mays
  unsure (1)..(320): unsure at all n locations
cggacgcgtgggcggacgcgtgggcggacgcgtgggcggacgcgtgggcggcgatccgatcgttctcgagcaaggtcggtggccatggctcgctgccgccatcacctcctcctcctttccgtcttacttgccttggctgctgctgctgcggcgcanagtcatggggaagcctccgccgtcttcatcgatgcctcgtcgcaccgctaccttcgggaccagcaagccgaccaccaggacgcttcaatgtcgttaaatgaagtttctgcgggtgtttctgtcttgcttggtttcgcaccgtcaacatccctaccagctatttc

SEQ ID NO: 296524 - DNA, 201 bp, Zea mays
cgggccgacccacgcgtgcgatcctgttcgctaccgtgatgtttaccctattccagatggtttatcttgcgtcatgtcgcggatggtgttgcccatctgaggctttgattgcaaagtcacttctgtgtcaattgttaaaaaaaaaaaaaatataaaaaaatggtcgtcgctttatatgttccaagcttacttactctttca

SEQ ID NO: 296525 - DNA, 317 bp, Zea mays
actagttctagggtcgactacgagaagaatgtatgaagcaccacaagcacatggagaagctcggcgagctcggcgccatcgccgccggcgcgtacgccctgcacgagaagcacaaggccaagaaggacccagagaacgagcacgggcaccgggtcaaggaggaggtggccgccgtcgccgtcgtgggctcctgcggctttgctttccacgagcaccatgagatgaaggactcctagaagcacgcccactactgattcgatttatggtagttgttcatttgtttctttcagcctgtgttttttttatttgttgccggt

SEQ ID NO: 296526 - DNA, 374 bp, Zea mays
cccacgcgtccgcccacgcgtccggaccaacaccactccactccctccatttccctcacctcccgcagcagctagccgccgccagccaacaaccgaaccaaccaaccaacccacagcgagcgaggaaagcgtccaatggtagcgatggcggccgtgcagcagcagcgccgcgacgcggaggcggagctcaacctgcccccgggcttccggttccacccgacggacgaggagctggtggcgcactacctctgcgcgcgcgccgcggggcgccgcccgccggtgtccatcatcgccgaggtcgacctgtaccgcttcgacccgtgggacctgccggagcgcgccctcttcgggcgccgcgagtggtacttcttcac

SEQ ID NO: 296527 - DNA, 443 bp, Zea mays
  unsure (1)..(443): unsure at all n locations
catggatctaaccctgtcaatcgtcttaggaaagcatgggcggtgttgttcgacggtttcatggttgaggcgagatggctagcgaccgaccaagtccctacggcggaggactacctacgaaacggcgtcatcacatcaggagtgccgctcacatttatgcacatattcagcatgctagggtatgatgacccaagcaccgaggaagaagaagaagaagcgatcatcgaccacatgccctcaatcatctcctgcccagccaagatcctcaggctctgggatgacatgggcagcgcagaggtcgtcgttagttcatcgaaccatacactacatatactagcttgttaattaaatgcttttacctttaaattttgcaatccaatcgtacttgatgtgtgcatgggctttgcaggatgaggctcangaaggattcgatgggtcgtaca

SEQ ID NO: 296528 - DNA, 448 bp, Zea mays
cacaagatcgaggagaagctccacatggggggcgaccacaagaaggaggatgagcaccacaagaaggccgaggagcaccacacgaaggaggagggggagcaccacaagaaggacggcggggagcataaggaaggcatcgcggagaagatcaaggacaagatcaccggcgagcacggcgacaagtccggcgaccacaaggaaaagaaggacaagaaaaagaagaaggagaagaagaagcacggcgagggccacgaccacgacggcggccacagtagcagcagcagcgacagcgactgagatctggtgtcgcagcacaggtgcaacacaagtatgcttgctggatggaggattcataccagctgatgctgatgtagtgtttcactggtgtcatgcatgcatgtatcgtgctattataatcaaaaagaaaaaagaaataacagtcagggat

SEQ ID NO: 296529 - DNA, 357 bp, Zea mays
gactagaccttgagaggaggtggacaggtcttaggacacatgctgagatcagtctgtatgcggcgatgtctcttacggacggggctacatcgccacgcttaactagggccgcgcctacgacatcaagaactgtcaaaacagtgccgttcaggaatttaatagcgtcttagccgatcacattgtgatgatctgcaagcttaacaacgagtgtttcatggatctcctatggtactgcttgcacgacgtgaaccgaatgctgaactatcagtgctgcacaacgggatgcgcggacaacatactacacacgaacaacggagtccatggcgtggagaccggtctagtgctcaactggtttta

SEQ ID NO: 296530 - DNA, 448 bp, Zea mays
  unsure (1)..(448): unsure at all n locations
cccacgcgtccggtcattttctttcgtgccatgccaaataaataaataaaaacaggatctttgagatcgcgccgggtgccaagcagatgttctccttcctgcgcgacgccggcgacgcgccgctggagaaacaccccaagctcaaggcccacgccgtcaccgtcttcgttatggtcagccacctcgatctatctctgtactgtacgcatgtttctatcctcatctagctacctgctgctttaatttgctttaattggcgttccaggcttgcgagtcggcgacgcagctgaggagcaccggcgacgtgaaggtgagggaggccaccctgaagcggctgggcgcgacgcacgccagggcgggcgtcgncgacgcgcatttcgaggtcgtcaagacggcgctgctggacaccatcagggacgcggtccccgacatgtggacgctggagatg

SEQ ID NO: 296531 - DNA, 316 bp, Zea mays
cccacgcgtccggcgacgcgccgtggtggccgcgcctgtcgacgcccgcggacctggcgtcgctgctgacgacgctgctgtggctcacctcggcgcagcacgcggcgctcaacttcgggcagtacccgctgggcggctacatcccgaaccggccgccgctgatgcggcggctggtgcccgccgagggcgacccggagtacgcgcacctggtggccgacccgcaccgcttcttcctgtcggcgctgcccagcctgacgcagaccaccacgttcatgaccgtcatcgacacgctgtccacgcactccgccgacgagca

SEQ ID NO: 296532 - DNA, 433 bp, Zea mays
  unsure (1)..(433): unsure at all n locations
cccacgcgtccgcggacgcgtgggatcctcccctgcgccgacgcggcggtgacggcggaggcgctgcggcggagcaaggaggtgaactaccagctggtctccaagctcaaccagctgctctccaacgtgtcgaacggcaacgtgcctccgcaggccgggcccccgctctactacaaccagtcggggcctcccgtgccgctcctctgcagcccctacagcgccgacctctccgaccggccctgcgccgtcggcgaggtcaccgccgncgacgcgcagcaggtacgtacggtacggtacggcacgaacaaagaacctgtgcgtgcgttgttggcgagatgtctgacgtcgcgtgttcgtttcggtcgcaactcgcatcgcatcgcatctgcaggtctggcagcgctacgtgtgccgcgcggcggcggggtcgggc

SEQ ID NO: 296533 - DNA, 384 bp, Zea mays
  unsure (1)..(384): unsure at all n locations
aaccaattgccatcaatccaggcatccatccatccacccgccccgctgacggaagcaatggcccggatcgtgctcttcgagtggtgagtggtcgcgccgttacaccgtctgcgcgccggccggggcgccattgcggcgccgtcaccccccgcgctctccgcggcgccgcgccgtcgtcccgcgttcgcgttcattcaccgcgactgggcgctccgcgtnttcgcgcccacccgcctcgccttcggcggcgtcgaggaggacaagccgagcgccgcgcctgggcatgaagaaggcgcagaaaacaggtttatcataacacaaaatgcgataattagttacccgccaaccgactttgcttgttggctatataaatgtacatggggc

SEQ ID NO: 296534 - DNA, 369 bp, Zea mays
catcaacccgtcggcgttcaggcactatcttgtcatacccattgatcatataccaactgtaaatagcctccgcaaaaccaaagatgatcaccagttagtgagccacatggtgaaggtggggaaagacttcctcaatcaagatgctccaaattctgaggaacacaggtttgggttccatcagcccccatttaatagtattgatcaccttcatcttcattgcctggcactgccatttatccccagttggaggcaagtaaaatatacccctctgggacctttaggggggtttatcgcagcagaaaagctattggaaagaataaaaccagaagcagaagcatacagttagcatcaatatttttactgatacct

SEQ ID NO: 296535 - DNA, 396 bp, Zea mays
  unsure (1)..(396): unsure at all n locations
taccgtccngcatcccggtcgaccacgcgtccgccaacgttcgggacgcgtgggcggacgcgtgggggacggagccgaagatttgtattcgcgacagggtcttcggccgaagaagccggagctgctgtcgagcacttcaacggttatgcatttcaaggaagacaactgagggtgaactgcgggccaccgccacctagagatgaatccacaccaagagcaccaaagggtggtggtggcggctgcggcggcggctttgtcgattcacctaacaaggtctacgtggggaaccttgcgtggggcgttgacaactccactctggagaacctgttcagtgagcaagggcaagtgcttgatgcttaggtcatctaccacagggattagcggcaggtcaaaggg

SEQ ID NO: 296536 - DNA, 491 bp, Zea mays
  unsure (1)..(491): unsure at all n locations
gcctgaggtaccggtccgaattcccgggtcattctctatggtgcgccaggtaccggaaagacgcttctcgcaaaggccgtcgccaaccagaccagcgcaactttcctgcgtattgtgggtagtgagttgattcanaagtaccttggagacggacccaggctagtgcgacagctcttccagaccgccgccgagaacgcgccttccattgtcttcatcgacgaaatcgacgctattggtaccaagcgttacgagtcaacatctggtggtgagcgcgagattcagcgaactatgttggagctactcaaccagctggacggtttcgatgaccgtggagacgtcaaggtcatcatggccaccaacaagatcgagacgctcgaccctgcccttatccgtcctggtcgtattgaccgaaagattctcttcgagaaccccgaccaaaccaccaagaagaagatctttactctccacacttncaagatgtcactcaacga

SEQ ID NO: 296537 - DNA, 375 bp, Zea mays
  unsure (1)..(375): unsure at all n locations
gtctgaagatccatgttctgtgtgccttgaaaatccttctgtgggagatactatccgccatttgccttgctttcacaagttccataaagagtgtattgacgagtggcttangagaaagaaactgtgcccagtctgcaagtttgggattaactgaagtttgccgtaccagtctacagtggagttctacttggtagtggcagcgacgaggtgctgcaatttctcatacgggatgctttcctgcagagatttttttttgtctaagataaaaaaaacaatgtattgctgtgatctgcgcttttgggcatcattttgtatgcacgcacgttttcttgctatttttggtggtcgaatccaccaattcccatgaattgggta

SEQ ID NO: 296538 - DNA, 341 bp, Zea mays
gccacgcgtgcgcgtgcttctacgccgtctaggccgcgtgccagtgcgaagagaccactactcaaatgggcaggcggtgggtgcggaccgaggtgtacccgctgttcgcgggaactgacgtggacgcctgcatgtgccgatgtcagatcttccggaacatcgccggctacccggaagacatgatggacacagcagggagggccactagggtgcttgagaaccatgaggaggggagacgttacgccatgcatggcctaagaatctttatgcacgacaagacttcatgtatcatgcccgaaggtaacaggttctgaactgaccctaactgaagcatgctgatt

SEQ ID NO: 296539 - DNA, 401 bp, Zea mays
cccacgcgtccgcccacgcgtccgcccacgcgtccgcttcctcgctccgccaccgccacgctgaaaacccacgcgctaagtgcaccccgccaggtctaccagacgctctccggagcggcacgcgcgcgccaatggcggggccttgaggtgctcgtggggtgagggagggaggacggcgctggttagtgagggcgttaagcggcggctcggcgcggcgggccgggaggatgatacggcaccagatacggaacgagtatgggctggcggatccggaggtgtacgcggccccgggggaggaggatgacccggaggcgctcctcgaaggcgtcgccatggccggcctcgtcgggcgtggctcccgggccaggcttcgggggggggggaaaatttcctttttgggg

SEQ ID NO: 296540 - DNA, 302 bp, Zea mays
cggaattcccgggtcgacccacgcgtgcgaccacgcgttcgacctgacatggaaaaagtgaaaaactacggctaaggcaattctaccggaccgccgactcctgcatcatcataaatatatatactataactatactactacggacctaccgatatgcacccgaacaatgtgaatgcgtcgagtactatctgttttctgcatctacatatatataccggatcaacaatcgcccaatgtgaatgtaataggcaatctcatttggtacaatttttcattcctaacgcggaccttttatatgccta

SEQ ID NO: 296541 - DNA, 357 bp, Zea mays
gccacgcgtccgaccacgcgtccattgacgcgtggtcaccgagtaacacacctgcctcagcatacctaacggccgctccgagctcgccggctaagaggtctcttgggggcttgcacgcttcgccggcatgtaacaggacaacgggcttgtgccgatcgtggagccgcagatcctgctggacggcgagcaccgcatgaatcgcacgcttgaagtggctcagaatgcgttggcctaaaccttctacgccatggcggagaacaacgtactgtacgaaggcatactgctgaagccgagcatggtgacgcccggcgcggaggccaatgacagggccaccccggagcaggtggccgcgtacac

SEQ ID NO: 296542 - DNA, 343 bp, Zea mays
cccacgcgtccgcaactcgctggtcgccagagcacgcgtcgtcgctgtctccgccgactaccggctcgcgccagagcacccgctcccggcagcctacgacgactcctgggccgcgctcaagtgggcggtctccggcgcggaccagtggctgtccgaccacggcgacctcggccgcgtcttcctggtcggcatcagcgccggcggtaacattgcccacaacatggccatctctgtgggcgtgagcggcttgccggccgctgaaccaccgcgcatagaaggcgtgatcctgctccacccttccttttccggcgaacagaagatggatgtagaagaagaggagttc

SEQ ID NO: 296543 - DNA, 383 bp, Zea mays
accggtctctgaattacagggtcgacctacgcgtacggtcgctgctgaactaactgaaccgcatgcgcatctgccagaccgtggtcgccggcctgggcatcggcgccgccgccgtcaacgcgatgtccttcctgtacgaacccttcaccattcgcaagaacgatctcaagcccatcgtcgccgctgtcctcagccacttataccgagcactaccgcatcaaataccttgggcccttctccatcgagctacccgatctaccttaccggcaagttcccctgctactaactctgtgacaccgacgggctgtccgtcgaccccctgaccttagccaagaaccgcgagcatgaagtgatccacttccgctgtgccatgctctgctcgc

SEQ ID NO: 296544 - DNA, 374 bp, Zea mays
tgcgcctgcggtaccggtctcggaattccgagggtacgacgcacgcgtacgcggacgcgtaggcacgggcaacgtcgtagatgccgtgcgcgacgtgcgctgcggcatgggcgacgtacgcgcgctgcgtagcatggacgacgacgaggggttggcctacgccaagcgcatcgacgagcgctacgacctcgtcatgcagaccaagcagctgggccgactccccgtcgtgcagttcgcctcgcggggtgtcaccacgcccgtcgacgccgcgctcatgatgcagctcggatgcgacagcgtcttccgcggctcgggcatatataagagcggtgacaccgtgcgccgagctcgtgccattgtgcaggcagtcaccc

SEQ ID NO: 296545 - DNA, 382 bp, Zea mays
gcagctagctctagcaaagcacttgccatctaccgaccggcgcattccaaacagaccgacgagctagcagagcggcaggcacctaccttctaaaggaacatggcccgcatgcagcagatggcaatggcgacggcagccgcggtggccttggtgctgctggctgcctttacctcggaagcaagcatcaactgcaatcagatggcgtgggccatcgtgctctgcatatcctacactcgcggtcagacattggagccctccatcggctgctgcactggcttctggagcctaaacaacgccatccgaaccaccgactaccgtcaagccgtctgtaactagctcaaaaacgtcgacaccggcgtcagccggcataacgccggcaacg

SEQ ID NO: 296546 - DNA, 368 bp, Zea mays
tgccggaccggaattgccgggtcgacccaggcgtccgctgtcgagtactgtcacgctcagctacagcattgggtgtctgcacgatggcgatctcctacacggcgatcgtcggcacccacggaaggtggcctccttcggcgagggccgcatcacgcatgcgcaagaccgtgggcaagcccaatgtggcggcgtgcggcagccgctgatacggtcccgaccgcgtcaagtacctaggacccttatacggcgagcccctgagctacctaaccggagagttaccaggatactacggatgggacaccgccgggctgtccgcccaccccgagaccttcggcaagaaccgagagctggaagtgatccactcccga

SEQ ID NO: 296547 - DNA, 375 bp, Zea mays
ctcacctttccttcacttcttcttcaccaaataatgtcccgcccttggcgggcttcttaggtgggacaggagagtcatctccatgtcctctattccggctactaccttctccgtcatcttatccgttcccttctagtgccgaagctgacaccgccatctacaacgaccttcattactacacatttcatgtccgcatctactgcgacacctgccgcgccgctttcgtgaccaatgtcaccaagtacatcgtgttcgccaaggtgaggcttgagtgcaagcacttattcaccggcaagctctagcgctccatcgactgtgtgacctactctaactgcacttacacgatcgatctcaatgacagccactatgaggaca

SEQ ID NO: 296548 - DNA, 208 bp, Zea mays
ccgcctcgctggtgcacatgtgtgccccacaacatctggcttagcactggaaaacccctgtaggagggcggcgcctgcttctgcctcagggagaaaaactactttttggactggcctttcctttcttatgcccgatcaacccactctttcgcctcaaagccaaatgtattgagccggactttgggctcttcggcctcaaggcgatcac

SEQ ID NO: 296549 - DNA, 335 bp, Zea mays
gaaaaccgagagcttcaactctataggatccaacaagccatccgcgtgcgcaacataccttgatcaccctagattgaacactagacagcacctaactttggtgcagtcatacggcgcaaaccatgagggcacagcagctgcaccaactcgtgctacctgtgatcaacacaagtagttctggcagaacctttattactactctaagcaacaacagttcgttccattcaaccaactgtctacattgaaccgtgctgcttatctgcatgaacaactattaccattgaggcagctagctactgtactactctcagcaacaacaactctttccatttaac

SEQ ID NO: 296550 - DNA, 158 bp, Zea mays
tgaatccttaacgaacacatcttggacgaagatatttaagcttaagtgggcgctccttgcctttggtttgagcataacatattcttttttcaccgaggaaaagataaaacttctggatatatagaccctgttcactcgaattcactaattcagtttcc

SEQ ID NO: 296551 - DNA, 330 bp, Zea mays
gtccgatctctatgtccaactgctattacggactcttttttttcattcagaacttcacggtcatcaccgtcttcaactgccacttgagcaggcacaactacgtcttgctcttctgtgccagctactcctggccgcaagaccagatcatgcacatcaccgtcgtcttcaaccacttaggcaggggcctgatgcaacggatgccaaagtgcctctggggcttcttccacgttgtcaacaactactacacgcactggctcatgtactccatttgctggtgctacgcgccatccattattaaccatagcaacccctacatatcacctccaaaca

SEQ ID NO: 296552 - DNA, 365 bp, Zea mays
acgcgccacgcttatttgcagcacaactattaccagttttctgttagctactgacgactttcagcaagaacaaggtttttcattcaacgactcgggcgaactgaaccccgatgcttatttgcaggagctgaatactactaccattgagccagcttgctgcggcataccgtgcttccttcttgacacagtatccgttgctgactttctaccagcagtttgaggctaacctggcctccctatgacacctacaagatttgatgtccttcggtcaacttgctatacacaagcgcaccggcctcttaccaacaacacatcattggtggtgccctcctttaaattgcttattaattggaatccaataataa

SEQ ID NO: 296553 - DNA, 413 bp, Zea mays
gcttatttgcagcaacaactattaccatttagccagctagctactgcctactctcagcaacaacaacttcttccatttaaccaattggccgcactgaaccccgctgcttatttgcagcagcaaatactactaccatttagccagctagctgcagcaaaccgtgcttccttcttgacacagcaacagttgctgcctttctaccagcagtttgcggctaaccccgcaaccctcttacaactacaacaattgttgccctttgtccaacttgctttgacagacccagcggcctcctaccaacaacacatcattggtggtgccctcttttagattgcttattaagtgaattcaataataaaagtttttggatgatgtatgtggccaaccaaaaataaagaagtacattttcagattct

SEQ ID NO: 296554 - DNA, 326 bp, Zea mays
tgatcttgcaacgcacaggctctcaacatatcttcaagaatttgattggttctttcagtctgaccatctgtctgcgggtgataagctgaactgaaattcagatgcgtgcccaaggcttcatgcaactgctgccagaaatgagaggtgaactgcgttcctctgtctgacactatcttctttggcacaccatgaagacaaacgatccgagacatatacaattctgccaatactgcactgttgtagttggtcttgacaggtatgaagtgggctgacttggtcaagcggtccactactacccaaatggaatcgtagccggctcgagtgcg

SEQ ID NO: 296555 - DNA, 403 bp, Zea mays
aatgggtcgacccacgcgtgcggctcagcacgatcatcgacacacacacatatctttttatcgtgtcacgccagcagatcacgagcacgttgcttcaatacagagccatgtcgaaaccaccgtcttcttcgtcgttcctcctcctcctgctgctgtcggcgacgcttctcgccaccgtatgcctcgccgacccggacccgatgcatgacttctgcgtggtcgcggcacctggccgccactacaacgcgtccttcttctccagcacctacccggtcttcccgtgcaagccggcttcgacagtcgtcttcgaccacttcttcttttaggatcacgccgtctgcgctagcacggacaaccctgagggcgcgggcgtgactccgggcaacatgcaggcgttcccggg

SEQ ID NO: 296556 - DNA, 264 bp, Zea mays
ccagcccaaattttttttattccgggacatgcacgagggggggttgaataactctgtagaaggttatcaggagataaagctaccctatcaaatcgtcgccattgtttttggcgctcttaaagatgccgctgccaaaaaatatgatttggaagcatgggttcctgcatctcaaacttacacagagctggtgtcttgctcgaattgtacagattatcaatcaaggcgactagaaaatagataccggcagaaaaagaacaatgaaca

SEQ ID NO: 296557 - DNA, 299 bp, Zea mays
ccacgcggccgccagcaacgcccgacgcctccctttccccaaccctccctccctctccgggggggccgccagaggcaagggggccctctattcgaccccgaatcggccgcccgcgaccgggattccctccgccaagcgcggatctgaacgctgcgctccggggcgccgctcgaatccgccatgaagggggccaaagccaaaggcgccggcaaggccgatgccaagctggcggagaaaagcaagggggcggagaagcccgccaagggcaggaaagggaaggccggcaaggaccccaacaa

SEQ ID NO: 296558 - DNA, 347 bp, Zea mays
ctcacgcgttcgcctgcaacgcccgtcgtcttttttttcccttccctccctccctcttcgcgggggccgtcagaggcaagggcgccctcaattccaccccgattcgtccgcccgcgaccgggattccctccgccaagcgcggatctaaacgctgcgcttcgtgtcgtctctcgaattctgcatgaagggggccaaatccaacggcgccgccaaggccgatgccaagctggccgtgaagagcaagggggcggagaagcctgccaagggcaggaaagggaaggccggcaaggaccccaacaagcctaagagggcttccagcgctttcttcgtgttcatggaggcatttc

SEQ ID NO: 296559 - DNA, 371 bp, Zea mays
caactagcaacatagaaagcacaatatgtgtaccaacaatggcagccaaaatattgggctgccttatgctccttgggcgttctgcaagtgctgctaccgcgaccattttcccgcaatgcttacaagctcctatagcttcccttcttcccccatacctctcatcagcggtgtcttcaggatgtgaaaacctaattcttcaaccctacaggatccaacaggcaatggcagcaggcatgttacctgtatcacccttgcgcctccaacaaccgacatgcctattacagctgttacctttggggcatttgttggcacaaaacattactgcacaacaactacaacaacttgtgctagcaaaccttgctgcctactct

SEQ ID NO: 296560 - DNA, 491 bp, Zea mays
  unsure (1)..(491): unsure at all n locations
taccggtccggaattcccgggctgggaggcattcttatgaatctgtctctagcatccctcaaaagtcgctctacctcaatgagcaatacttgaatgtgaaaaaggctatggtcgatgctttctttggtcctcctgaacggagtgtatatagtgcatctgttcaaagcactcttttgcagatggcaaaggctgtacttggcaggttcagtgacatatcatcagttaaactaaaaatgccgaatatccatttcttacctgttaatatatcaagcaaggatcacggcagcattggaaagttcgatgatgatgtatatcttccgacagaatgggatacctaagggatcgattgaaagtagtttgagttggtttaggacaaagagnnngtacaagacaaacgtagtgtatggtggaagaagggtataatanatttctgcttcatgctttgttcattatctaataacgataatcagaaggtttacttatggtaaaga

SEQ ID NO: 296561 - DNA, 446 bp, Zea mays
  unsure (1)..(446): unsure at all n locations
tgtagatctcctcgcacctcgcccattcgcttcaccaagggtttaagaccggcggcgatggcggcgaagctggcgcagctgcgcacacaggtaacgcgtgcggcggagttcgcctcgaagcacggctgctcctactacaaggaggtaatggagaagaacaagcagtacgtcgttcagccccccaccgtcgagaagtgccaggagctctccaagcagctcttttacacccgcctcgcaagcctaccaggtcgctatgagtcattctggaaggagcttgattgtgtcaaggccccntgtgtggaatggcactgtggtgtttatggtggtggaccttggttttgtntatttatttggagttgagctctatgcatggttctgcgtaggcgagattgtcggcagaggtttcaccttgaccggctataaggtctagatgatttccactggtc

SEQ ID NO: 296562 - DNA, 167 bp, Zea mays
aatggcccccacgatcgaccccaacgagatcaagttcatctaccttcgaaccaccaaacgtgaggtcagagcttctcccgctttggccctcaagatcggacctttgggtctttcgcccaataaagacggcgaagacattggcaaggccaccggtgactggaaaggtc

SEQ ID NO: 296563 - DNA, 116 bp, Zea mays
cccacgcgtccggtgcttctggtttcgtcctcattcgcctgaaggacaagcctcactggatcatcaagaactcgcggtgcgagaactggtgggtgaacggatactacaagatatgc

SEQ ID NO: 296564 - DNA, 366 bp, Zea mays
cgcctgatgaatacgattaagtcaaggctcggtccactcaagggatgtgatctcgcctcgcccgagcccagtctcgggcaagggcagccgaccccggaggatttacgtctcgtccgaggaccccctcaagcaacggacacaccttcggctcgcccgaggcccagtcttcgccaagaagcaaccttggccaaatcgccacaacgaccgaccgtatcacaggagcatttaatgcaaaggtggcctgacaccttatcctgacgcgcgcccttcagtcgactgatctgaagtgatcgcagtcacttcgccgctccactgaccagtctgacaagaagacagcgccgcccgcgtcgcttcgactacaggcga

SEQ ID NO: 296565 - DNA, 293 bp, Zea mays
ctggcttctcctccccctcttaccaagtccttctcgggttagggttccttagggtattgtggaggggcgatggctgcggctgatgtggagtaccgatgcttcagttgcgggcttgcctgggccaccagcaacgagtcgctggagaatgccttcgccttctacggtgagatcctcgactccaatgtcattaccgaccgggagactggggagtttccgtgtcttatggcttctttaccttttcttttgagaactccatgcttgtcgctattgtgatcattatctgtaatggtgtt

SEQ ID NO: 296566 - DNA, 347 bp, Zea mays
tgcccagagcacgccggagataccaccgaagaagaaccctccggtgaacttggcccagccgtgggcggtctgcagcttgtcggcctccttcttccggccggtgagcgtgagcgtgggcatacttcctcctctacgtgctcgacctcccctactacttcaagtagaatacaaattcataaagatgcatatatataatatagctccgcctccgatcctcctctctgcgtgcaaaggtatgccatttcagcagtgacgagcatcgtggatacatgcaattcctctgcacatggatggattgggatgtaacttggaactggtaattttcttttactttgatttggatgcaa

SEQ ID NO: 296567 - DNA, 353 bp, Zea mays
cgagatcgatctctctcaagggaccttgtttgcttgccgccacccccaccgcagttacagttatagctagggatctgagggctagctgatggacagcaggagggagtcctcggagaccttgaggaacaaatgcgcggcctgcttcaggcagtacaacaggatggagcacctggtggagcacatgaaggtctcgtaccactcggtgcacgagcccaggtgcggcgtctgcgggaagcactgccgctccttggagtcgctcagggagcatcttatcgggccgttgcccaaggtggagtgcgcgcgggtctttggcgtccgcgggtgcagcatttgtctcaacgttttcgacagca

SEQ ID NO: 296568 - DNA, 379 bp, Zea mays
  unsure (1)..(379): unsure at all n locations
gtgagattcgaactcgcaacctctctctcgcgcatacccttctataccactacactactacaccaattatgtttatattacgtttccattccccatgtactataacaaatcgagagtaatttgattatttaaggcaataaatgagttcatttgaaaatgtgaccaactataaagttgcataactttttgagatctaaaagttttattttaatagtttctacatccgagaccgtttataaaatttgaattttaaatttaaaaacttcacacgaaattttcaatgataagatgatttcaaatcaaaaaattgttaactacaaagtttcattacatttcaagacctacaacttttattntggtggtttttccatccgagaca

SEQ ID NO: 296569 - DNA, 337 bp, Zea mays
aaaccgcggacgcagcagaaaagaggtagaggggcggcgaccgatggcgcggcggggcacggaggcgttccctaacctgggcgcgcactgcgacaagccggactgcaaccagctcgacttcctgcccttcgactgcgacggctgcggcaaggtcttctgcgccgcgcaccggacctacggggaccacggctgcgccaaggcggcggaccagggccgcaccgtcgtcgtctgcccggactgcggcgacgccatcgagaggctggttccggggcagggcgagcgggagatcctggaggcgcacgtgcggtcgcggcgctgcgacccgggcaagaagcgc

SEQ ID NO: 296570 - DNA, 359 bp, Zea mays
aaagtcccaaagtggaatttaaaatataaaagaaaatctagaatttagaagtggagaaagggaaaaaaaaaaaaaaaaaagggaaaaaaaaaaaaaaaaaaaaaaaaaaaaaaaaaaaaaaaaaaaaaaaaaaaaaaaaaaaaaaaaaaaaaaaaaaaaaaaaaagggggcggccgttttaaaggatccaagtttacttccccttgcttgcaacgtaatattttttttttagggccacctaaattaatttcattggccgtcttttaacaacttcgtaactggaaaaaccttggctttacccaactaaatccccttgcaaaaaatccccttttcgccagttggttaaaaacaaaaaggcc

SEQ ID NO: 296571 - DNA, 349 bp, Zea mays
cgtgcgatcctggtacctggaatctcaagtctcaggcaagttgtgcccttgaccacttttattatccaataatgttctttataatcatttattcatgcataggcctaattttgatgggacccaataggtcaccctagactgattatcttgttaccttgtttacccctgaactatttgggtaggtttgctattgctctatatagttttgggttttatattacattatgttcatgttccaattatactgctattttatttattgttcatgacaagatcattattttaattggaacatggagaaacacgtgccaccacaatggtggaatgggatgcccttggctgactaact

SEQ ID NO: 296572 - DNA, 306 bp, Zea mays
aaaccatcacagcacatcatatacaccaactacctctaactgtgatcaaccaagtagctcttgcaaacctttctccctactctcaacaacaacaattgcttccatttaaccaactatctacattgaaccgcgctgcttattttcagcaacatttattaccattcatgcacctatctatttcctactctcaacaacaacaactacttccatttaaccaattagtcgcactgaaccctgctccttattttcttcatctaatactaataccatttatgcagctaacttaaacaagccttgcttactttt

SEQ ID NO: 296573 - DNA, 276 bp, Zea mays
  unsure (1)..(276): unsure at all n locations
accggtccggaattgccgggtcgacccacgcgaacggccttgtcgaggtacaacttgcggctgtgacgaagaccaggtgccgagcggcgttgacgccaccaagatctcgcaggagtagtacctcaacgcgccaggcgagacctactccgtcaccctcaccgcgacgggaacctaagggtattactgacagccacaataaagagccgcaatggtcggtaagatcactgtcaactaattaagctagctatcgatcgagatccatntatgtattagctg

SEQ ID NO: 296574 - DNA, 186 bp, Zea mays
  unsure (1)..(186): unsure at all n locations
cgcgtccggaacaacgccggcttcccgcacaacgtcgtcttcgacgaagacgaggtgccgagcggcgtcgacgccaccaagatctngnaggaggggggcctttatagaggatgcaaggatatattccggtgcatgcaacgtgataggtattttatggtgttacctaaagtcaattcaatggagcgg

SEQ ID NO: 296575 - DNA, 435 bp, Zea mays
ccctagctagcttattattgcttaccaggcttactgtggtccatggcacctcctcgcagccctgttccagtcgctgctgtacgaggcggcggggcggaccatcaacccggtgcacggcgcggtggggctgctgggcacggggaactggcacctctgccaggccgccgtcgacaccgtgctgcggggcggcgccatcggcccgctgccggagcttggcgccgggacgggccacctgtacgggccccccgccgccaccgacaagcgcgccggcggctggtccaccttctccacggcgaagcgggcggcgaaggccgccgccggtgccggggcgccgcccgcggcggaggcggcggcgtactgcgacctaaggctgtgcctcagcagcagccccgggtcccccgcggcgaccgcggaccggtagagggccccccttct

SEQ ID NO: 296576 - DNA, 365 bp, Zea mays
  unsure (1)..(365): unsure at all n locations
ggaattnccgggtcgagccacgcgtgcgcggacgcgtgggttcaaatcacaccaaattatcatcttgtggagatcaagaaaatcaatggggacagccttgagtatcatagcgttaggaaccaaagcatgagaccggcactagaagatattgtgtgggcatggcatggtgaacaacctgacgagaagtagattcatcaactttagataatcgtcaacctacaaccttagatattatgacaggtgtaatgctattagaaagtgtatcaggccaaaaaaaatgtcatgggacttaataatattacttctatgttgtttttattctcatgctcatgctgtcatgcagtaaagtgttctttctattgacc

SEQ ID NO: 296577 - DNA, 387 bp, Zea mays
  unsure (1)..(387): unsure at all n locations
ggaatanccgggtcgagccacgcgtccgcccacacgtccgggcccgacaccatgctccttatttttccgggaacccaacaacaaccccgggttgggccccaacgcccgggggtgggggcacaagccttccattttcttcctggcggacccctcgtcctccccctgccatcgcatcgtcagtttcaaaagcaggaggctgccacttcgctctctccacatcgccgctgccgctgccgccggggcagaggaagaagaggcgcaactaggtggaagtgtgaacgcggtcgacgaggaggaagcggagaataaggtggtggtgcccgagagacaggacccgatgctggtactcaagttcatctggatggagaagaacatcggcatagcact

SEQ ID NO: 296578 - DNA, 226 bp, Zea mays
catggatgggggctcttcgccgcagggaatattcaggagggtcaaatggttattgagtaccgtggcgaacaagttagacggtgtgttgctgacttgagggaagcacagtaccatagagaaaaaaaggattgctatttgttcaagataagcgaagatgttgtcatcgatgctaccgacaaaggaaacatagcgcgcctaattaatcactcgtgtatgtcgaaccgct

SEQ ID NO: 296579 - DNA, 227 bp, Zea mays
agtagcctgcagctctcccaccttctcgctgcgctgtactgtgctggcaggggaggggccatggacgaccccgtcgagcgcttgaaggacgggttccacaagttcaagaccgaggtctatgacaagaagccggagctgttcgagcctctcaaggccggccaggcccccaagtacatggtgttcggctgcttcgacttccgcgtgttgccgtcggtgacacttgggac

SEQ ID NO: 296580 - DNA, 218 bp, Zea mays
  unsure (1)..(218): unsure at all n locations
cggnccggaattcccgggtagacccacgcgtccgcggacgcgtgatcatacacgtgggcactgttttttcaccgttgttatcaccggcagtgggggcgcctaggcaggggcgggagactgtgccactccatgtcctaaaatgacctcaccgcgccagctcgtgcccaagaaggatgatgagtacacaaaagacgccaaagctatctgcgtccttgtcc

SEQ ID NO: 296581 - DNA, 389 bp, Zea mays
cccacgcgtccgccgcggggcaggggcagccctccgagctcgccgtcaggcagaacgtcgagggcctcgcgcggtacgcgctcatctgccaggagaacgggctggtgcccatcgtggagcccgagatactcaccgacggcggccacgacatcgggacctgcgccgccgtcacggagcgcgtcctcgccgccctctacaagtcgctcagcgaccacaaagtcctgctcgaggccacgctcctcatagaccaacatggtcacccccggttccgatagccccaaggtctccgcggaggtgatagcggagtacacggtggcggcgctgcggcgcaccgtgccgccggcggtgcccggggtggtgttcctgtcgggcgggcagagcgaggagga

SEQ ID NO: 296582 - DNA, 309 bp, Zea mays
tcgacaagtcgttcggatttgacactgccgtggaggaggcccagagggccatcaacgctgctcatgtcgaggctgagagtgcagagaacggcatcggtgtcgtgaagctgatgggtcgcaacagcggtttcattgccatgtacgctactctagctagccgcgacgtggactgttgcttaatcccggagtcgcccttctaccttgaagggaagggagggctccttgagtttgtcgagagacggctcaaggacaacggacacatggtcatcgtggtggccgagggtgctggacaggatctcatcgcgaaaa

SEQ ID NO: 296583 - DNA, 423 bp, Zea mays
cgcgtccgcccaaccaggacagcgtccacagaaagaagaaagagcacagagagtggagtagtggacagacgcggggagctctgcgtctctacgagcgcccatcctccgtccgcgccaccgccgcgcccatatccttcgccccgccccgacgtggcgcgtctgcctccaccgccgttccgccccaccgccgcatcccaactcgagttgaacattgaagtgactccgactttaatcctcactggatttggtgcttttattgctttatggatcctatcttctgttgttgctgcagttgattcagtccccctgctcccaaaattgctggaattaataggaactgcttacacaatttggttcatcgcacggtatctccttttcaaggaaagcagagatgaactgtttgcaaagttcgaagatctcaaa

SEQ ID NO: 296584 - DNA, 331 bp, Zea mays
attcccgggtcgaccgacgcgtccgcccacgcgtccgtataaatagtgttgtcaactctgtatatcattatattacgatgattatagtggtgatgaacataataacgcaataaaaccatgcaggcgatttgtgagccataaaaaaaaaaaaaaaaaaaaaaaaaaaaaaaaaaaaaaaaaaaaaaaaaaaaaaaaaaaaaaaaaaaaaaaaaaaaaaaaaaaaaaaaaaaaaaaaaaaaaaaaaagggggcggccgttttaaaggatcaaagtttacgtacccgtgcatgcaacgaaaaagtttttttatagggccaccaaaattaaatta

SEQ ID NO: 296585 - DNA, 404 bp, Zea mays
cggaattcccgggtcgaccgacgcgtccgcggacgcgtgggggagccaacagcacctccaaggtcctttaaaggaaaaaacttgttctcggtggttgacaaaaactcatccgagggaaattccaggaactaccggtttcgaagggcccagcaacagaaagtcagaactcacaacaggggtccaaatttgttaagacaggtttagatagttcaggtaacattgggagctcatcaattgcacctccgaagaaagttcaccctggatcaaatggaatgcttccggcagaagaagcggatatgccatcacatctctctatatccactaagatgctaccaccacccctgaagagcatgctgccactgccacccaaaagcatgcccccaccaccacctaagaacatgcct

SEQ ID NO: 296586 - DNA, 437 bp, Zea mays
cttcctccttcccaggaactccattgcactatttccaccccaagaacacagcacagagggggatccgaatccacaggagaggcagaagcacaactcactccccactccctccacccatcagctagccatgggcaaggactgcggcaaacacggcgacgacgacctccggcgctcgtgcaggcgcctgctagccatcctcgtggtcctcgcgctgaccgttggcgtcgtcgcgctgatcgtctacctggtgctccgccccacgcacccgcgcttctacctgcaagacgcgtcgctccggcagctggacctctccaacgccaccaccagcaccagcaccagcaccctgctctccaccgcgatccaggtgacgctagcgtcgcgcaacccgaacgagcgcgtcggggtctactacgaccgcctcgacgtgtacgcgtcgt

SEQ ID NO: 296587 - DNA, 468 bp, Zea mays
cggacgcgtgggcggacgcgtgggcggacgcgttggcggacgcgtggggggttacagctggtagattaccactctggaggacttcggattaatccaaacttgtataacaatgggaaagtgtgtcttagcctgttgggtacctgggatggtagaggttgtgagaagtggaatccagctcaatcgacaatgctgcaagttcttgtctccattcaagctctgattttgaatgacaagccatattacaacgagccaggatatgagtcctatgccaacactccgaatggagagcggttggctttggactataatgacaacacctttctgcactcatgcaagactatgttatactcacttcggaggcctccagagcactttgcagatcttgtcgctggccactttcgggtgcatgggcacacgattctcgcggcatgcaagcactacatggcgggtaatgatattgggtcagtg

SEQ ID NO: 296588 - DNA, 464 bp, Zea mays
atcgaatcgtgtcgttcgtggctgtcatactcgagctgcttgcactcaccacacttcgctgcacacacaatgcacaaagggagtccatcactaacaacaccgatatgttggcaagctgtatcaaggacgtaccgatgaacaagaacaagctgcagctccaggagctcgcgcgcttcggcggatatgaccacaaccaaacggccaatagctcttatggggatcgagaagcttgtgaacgccaagacacagattggtgcttgcacgatgtactatctaactattgaaacgaaggatggcgtaggcaagaagctttatgaaactaacgtctgggaaaagccatgagagaactttaagcaacttcaggaatttaagcctgttgacaaaggtgctagcgcctaaggatctgtcgtctccctgcgcaatttgctgtctgaagcgcaaaactaaattacaaaataaggagc

SEQ ID NO: 296589 - DNA, 308 bp, Zea mays
gcgacacgtacggtctcctgcatatgtacagtagcaacaactactaccattcagccagctagctgctgtgagccctgctgccgtcttgacacagcaacaattgttgtcgttctacctgcacgctgcgcctaacgttggcaccctcttacaactgcaacaattgctgccattcaaccaacttgctttgacaaacccagcagcgttctaccaacaacccatcattggtggtgccctcttttagattgcttatgagttatagttcaataataaagtttttttgatgaataaaaaattatttattttaaatt

SEQ ID NO: 296590 - DNA, 326 bp, Zea mays
  unsure (1)..(326): unsure at all n locations
cgggtcgaccgacgcgtccgcggacgcgtgggcggacgcgtgggcggactctttttcggacgcgtgggtggtatctccggcgggctcttggcatacttcctcctgtacatnctcnacctcccctactacttcaagttgaatacaaattcataaagatgcatatatataatatagctccgcctccgatcctcctctctgcgtgcaaaggtatgccatttcagcagtgacgagcatcgtggatacatgcaattcctctgcacatggatggattgggatgtaacttggaactgttaatttttttttactttgatttggatgtnnnnnaa

SEQ ID NO: 296591 - DNA, 226 bp, Zea mays
accgacgcgtccgtggacacttgggctgcgcctctacatttctttttttactgctcatccgcctccgcctgatccatgcaaaacagggatcgccatgggggactcggaggagcaccactttgaatcgaaggccgacgctggggcgtccaagacctacccgtagcatgctgtcaccgtccgtaagaacggctttatcggcataaataaccatccctggctggttgtg

SEQ ID NO: 296592 - DNA, 461 bp, Zea mays
  unsure (1)..(461): unsure at all n locations
accgccccgaaanncccgggccgaccaacccgtccggttgaacttaagtttgttggactgagggtttttaactcttactgggtgaatgaggatagaccctacaggtcctttaagataatccttggggactttgccaacaaagccataaaaaccgacccggggatcaactggttttgcaaccttgtgcacaagaaccggaggctccggggcttaacttaagaaggcaagaagaaccgtggcctgcttggcaagggccaaacccacaacaggaccaggccctaagggagagccacctggaagcgcaaccagaccttttccttccgccgttaccgttaagaaattcgtcggttgcttggttactgccattgtccgatcattccaaataaaaaaaccaagcgggcctgtttttggttgcattttaaaagttttgttatttgggttcttggcacttttaatgttag

SEQ ID NO: 296593 - DNA, 366 bp, Zea mays
ccggccgaaattccgggccgaccacacccttccggaatttaatggaattgaactggtaaagttgttggaaaaaagcaccggtttaatgacaatggaggcttccttgtaagggggcggggtaaatatttgtttgatacctgaggtaccattaattgttgatggaccgaatggagtttttcgacatttcgaacacttgttaaaaaccaagggatttgttttggtttgcgttgctgaaggaccaggacaggattattttaaaaagtaaaatgcaactgttgcataagggaacatggtttttagggacattggtgtgcaccttaagcaaaaaatcaagtcccattttaaggacataggagtccattttga

SEQ ID NO: 296594 - DNA, 423 bp, Zea mays
cggaattcccgggtcgaccacacccttccgcggccccttggaacccggaaaaggttcttatttttgaatcgcagggccataacctgaactggggttttaaatgcatgggctggttactttggtaataagggcataaaagttgttttttccaatggccagttggccttggttccaatgaaattaggtgggatggcaaaatcagtaccatttgttgcgaccccaaagggaagggggaggggtttgtttcctcgtccggttcgggctggaatagttggatttccaaatgttggcaaattttccttgattaatcgtttgttaaaacgaaaaatgtgcccagcagaacctaaggccaggtttaacaggaaagctgaagtggtttcgttttggaacagacctaaagttgttggattcacctggaatttt

SEQ ID NO: 296595 - DNA, 444 bp, Zea mays
cgggcccggaattccggggtggcccacagccgtccggccccaccaaaccggagggggggctaaggacaggccctgaacttttgttgaatccggtcctgttttgccgaaccgaagcagaaaaatgtttgttggagacttaaatcaattccatccgattaagcttgaaggttaagcaggcagatgaatgggagaccatttttgccaagaagttctttaggttttggtcaatgggggcagaggctttccaggggttggggagaaaaccggttcagggttatgatatcagtttcctgttaccaaactaccatgggggggccatgcttaagcccaagctcatagatttaatcgggcaattaatggaggtttttgccagggagatcagcgggctgaagctgtcagtaaccacttctggccggttgggggccactgaatttttgaagcagt

SEQ ID NO: 296596 - DNA, 333 bp, Zea mays
cgaaattcccgggcgcgccaacccttccgttccaccaaaaccccaaaatcaattaaccattttttttggaaacctttgcctaccagtagcgtttatttattaaaggaggaggctaatcctaaaaaaatcctaactcttgaaactaaaattaccctgtttttaaaacctgttaataagtccaattttccgaccccttaaaggattcaaggcttattaaaaaataactctaagtttggttttttcccaaattccacatggcagtaaaaataaaaaccttgttaggttaaaaaggttaaaaacctcaaataattttaaaagccacctaaggttgag

SEQ ID NO: 296597 - DNA, 295 bp, Zea mays
ccgggcggaccacacgggtccgccacacccttccgaacaaaagaaccgttgccaaaggtggtaaaaaaggcgccggcggaggaaccggacgcggcacctcttaggaagggagagccgaggaaactccagccatgggggtccggatccgtttggcccggttcggttgccggaatcggcctttttaccggttgatggccgccgttagccgttcccttggggacggcaggaacttgagggtcttcggttactttaacccgtttccagggaaggttggaggcaaaaggatgggccttaa

SEQ ID NO: 296598 - DNA, 479 bp, Zea mays
  unsure (1)..(479): unsure at all n locations
cgggnccgaaattccgggttggaccacacccttccggaacaaaggaccttcggcccccgttaagaatcaaaattttcccaagcaagttttgggtgggccttttctttttgggaccacttcaaaggtttttggggtagttggccattttaacaaataaagttttaatgtttgatttcaaaattaaaatccaaactgctttgaatcctttggttgaggccaatgttgggaactttggtgcggaagaagggtaaaaggactacttcaacgtccccatccagaagcgaaatggtcgaaggagcctgaccaccgtccagggattgaaaaaggagttaagttccagcaagatccttaaaaaatttaaagaaagagttttgttgaattggaccaggggtccaggaccaaaaacttgacaaggtaattaagttccagggggatcagaggaagaccgtttggaatttcttggtccaggccggtatggt

SEQ ID NO: 296599 - DNA, 401 bp, Zea mays
  unsure (1)..(401): unsure at all n locations
aaanncccgggccgaccaaggggncggngaacccccggnccgccccaaaccagnnaaattccatcttgaaaaaccgaacccctaaggggaacgggttgaaggcggcttgggacaggctcgccttaattttaatcgcttcctccccaatcgccaaaggtcttttgccggaaaattccaccccgaaaagtcctcttaaaggccttcaaggccggttttccaccccaaatttcttaacaaacttccagccactaataaaccgaataaaggaaatcggagaaagttccggaaggacttaaacccaggtgggcctaaactgcttgttttcccagggcaacgtgttgccaatcccggcccccaaaaacccctaccagccccggaagttccttggcccttttgggtga

SEQ ID NO: 296600 - DNA, 323 bp, Zea mays
  unsure (1)..(323): unsure at all n locations
cgggncggcccaggccttccgggaacacctacaaggtatttgccactgatctttggactgaccccactccatggccattcaaggagacggcctataagctttagggtgggggggaaacatggaccctttgggaaagtgccatactatggtactgcaccgggtgtagtccatcagcctaattttgctgcaacatttacattcatagcaggggaaggggcaaaaggtctaatgaagtcccaaccaggttgtaatttcagggtccaccctttaatgcaccatgtccccttccgaattttaagatcgaagggttttttggataaaat

SEQ ID NO: 296601 - DNA, 423 bp, Zea mays
aaataccggtcggacaacccttccgccacacccttccggaaccataaaaggaccattattgtcccaccattgccacccaaaaggtgtgggcctcttaatcctcctggggggttctcaaaatcctgttacggcaaccattttcccgaattgttcgaaggctctaatagtttccttttttcccccgtacctttaacaagcggggttttcggattgtaaaaacccaatttttaaaccttccaggatccaacaggcaataacagttggcatttaaccttaataacccttgttcctccaccaataataagcctaataacataagttacctttggggcattaattgccccaaaccataagggcccaccacctccaacaacttgtgctagcaaaccttgttgcctactttaagaaacagaagttttttcc

SEQ ID NO: 296602 - DNA, 368 bp, Zea mays
cgggcccggaatccccgggccgaccacacccgtccgaagaatcacagaacagggagggcattccccaaaaccagcaccgtttgatttttgcggccaggcgcttgaaggatggccgaactttcccgaactacaacatccaaaaggggagcacccttaacctggttttccgcctaaaagggggtttgcaaatttttgtaaagaccctgactggaaaaaccataaccctggaggtggaaagctcggccacaatcaacattgtgaaggcgaaaatccaggacagggagggcttccccccggaccagcagcgtttgattttggccggcaaacagttgaaggatggccgaaccttagcagactacaccatccaa

SEQ ID NO: 296603 - DNA, 391 bp, Zea mays
  unsure (1)..(391): unsure at all n locations
aaatnccggggccgaccacacccttccgccacacccttccggggggatttaataagcctgtcggtccccttaagaactttccccttaccgtgggggctcccaaataacatgggccggatgttaaagggccctaacctggttcccatccaaaaataatggccctgcctcaatgttcttgggttaactgccctgcctgttgcaccggcggtctccgcaataaggctaataatgcgtgattccagcacctaccattttttcgttgttctttgaaaccgaccgtttcctttcctttttgttggaatgctgacccagacctagttttttttcattttaagggaatttttttccatttttgtaaggttgcccctttttttttttgattagatgtttt

SEQ ID NO: 296604 - DNA, 379 bp, Zea mays
acgggcccgaaattcccgggcggaccacacccttccggccaaggaccgaatcggcttttgaaaggcctttttccgaaccgacggcttcaacaaggggagggtcttcaagttggtgggaactttccttggccagtcaatcaattttttggggccgttgcgtgcccggttttacaacaacaaggtccaacggtggttaagcaaaaccgccttcaaaaccatcgccagaaagttgttaaattccaaggagggcccgcccactttcaagcagccaaagataacgatcgaaaagcttttgaagtacggccacatcctggtggcggaccagaaaaacttaaagcgtgggcagtttgtttccaggttctttaacagggcttttttt

SEQ ID NO: 296605 - DNA, 257 bp, Zea mays
cccacagccttccgccttaataatccatgacctgcccaaaccatttggccccagggaatggaataatcccgaccagaggccattttttttgtttaagacgggaggattaaggctgccagccaaataataatggctccaacccttgacctaaggcagcaggccctcgaccgttttttgccgaataaaaggtctgacttcaaaggcattttccggcctttggatggactcccggtgacaatccaactcctgaaccttcc

SEQ ID NO: 296606 - DNA, 342 bp, Zea mays
ggaattcccggggcggaccaacccttccggggttttcccctttaaccccggcaagtgttcttctttggttcgttgaaccgggaaaaataaaggcggaaaccaggattaagcgccgggcggttaaaggcgaagcccctccaaatcctgggcctattcaaggtgctcccccgcttggtcgttttgaaccttaattttaccttttggcccttttactgcaagtgccggtccaagagggattcgccgagccttttaaggccccccagggccataatgtcccccttaaaggagaaggggatcgacttgccaatggttttttgttccccaacccgggacatagccaag

SEQ ID NO: 296607 - DNA, 424 bp, Zea mays
  unsure (1)..(424): unsure at all n locations
aacgggnccgaaattcccgggcggacccacccgtccggaccaacaggcaccataaaagggggaatccattaccaccattggaccaccattgaaagccaggatattttccttccttgaggcggctggttttttttacatgggtggttaacgcaacaattttccttaaatgttaacaagctctaatagtttccttttttccccaataccttcaataaatattagcttaagtttgtgaaaacccagtttttaaaccatttaggcttaaacaggcaatcgcagaaggcaacataccttaatggcccttgtggggtaaacaatcgccagccttatttttggtgcagtaatgggtccaaacaataagggaacaacagttgaagaaactggggctacctgggatcaaccaagtagttttggcaaacctttt

SEQ ID NO: 296608 - DNA, 373 bp, Zea mays
aacgggcggaaattcccgggccgccacacccttccgaacggccttaatcccccccgcggccacttacaactactggcccaactcctacacccggttgggtttaaacatggccctggagggcttccccaaccaccgccgcctccagaactgttccaacccggcctccatggccaaccagtccttcctcggcctcaaaaagttcctggccggttccggcaacccgtcctaccccggcggcccctttttaaacccgttcggttttggcaaaaccaaaaaggaaataaatgacctcaacctcaaggaaatcaaaaacggcaggctcgccatgcttgccatcctgggttacttaatccagggcctcgtaaccgccttt

SEQ ID NO: 296609 - DNA, 407 bp, Zea mays
cggaattcccggtcggaccacaggcgtccgccacacgcgtccggaaaaggcaaaccaaacaggacttttggggttcggtcttcttcctggccgttgttgccgttccctttgtgcttaatttttcttgccggttgttgccttccgtccgggtccagatccggcaacaaaccgatccggggccttcaacattggcggggccggaagcgggaccaaaggcggcggaagccttggttttggggttggggctggggctggggggggccaattccaggggcgacgcgttttgggggttgggccggagcttaagggaccccggcggggttctgaaaagttggaacccaaggttggtaaacccttgaacttggttcaacgtaacttgggacgggaaaaacggtgtaaccggctta

SEQ ID NO: 296610 - DNA, 343 bp, Zea mays
accgggtccgcccacacccttccgtcaaataatggttttaatggttggaatcccgtttgcagggaccttggaaggcccccgcttgtggcggcttggtttacagggtggccgttgcaaaattaggcttgccaaagtttgttagtgacctatttttggttggactgttttaccatttgtccaaccagattgttacgaacaccttggagcggggggttcctttgccacatgctgggggcattgtgttgaagcttttgtttgtcattggcttttaaatcgtggtttttggcaccaaaattagcccccaaactggaatgggcacgtccattgccatagctggggttgt

SEQ ID NO: 296611 - DNA, 365 bp, Zea mays
cggaattcccgggcggaccacacccttccgccaaggcttccggggacccttggttgttgtctaactggcaccttagaaggcccattgggggcccaccattggcggccaaatttttttgcctcctaatgctcctgggcttttttgaaggggctgttaccgggccctttttcccgaatggttaacaggctcttatggcttccttttttcccccgtacctttaaccagcggggtcttgggtttgggaaaccccaattcttaaaccttttaggttccaccaggcattcgcagttggctttttacctttataaccctggttcctccaacattaataagccctattccagcagttacttttggtgcttttt

SEQ ID NO: 296612 - DNA, 416 bp, Zea mays
attccagggcggaccacacgcgtccgccacacgcgtccgcaaggacaaggagggtttctcctcggaccagcagcggttgatcttcgccgggaggcacttgaaggatggtggaaccttgcctgactccaaaatccaaaaggggagcaccctcaatttggtgctccgcctaaggggcggtttgcaaacctttggaaaaaccttgactggcaagaccataaccctggaggttggaagctttaacaccatcaacaccgtgaaggctaaaatccaggacagggaggggtttccccaaaaccagcagcgtttaatttttgccggcaagcacttgaagaatggtcgaacccttgcagactacaatatccaaaaggaaagcaccctccacctggggctccggcttggagggggttttaaaacca

SEQ ID NO: 296613 - DNA, 364 bp, Zea mays
cttccgttcttcaatgctgaacatgctctcaatctcttttgggggggccatggccgcctacggcaaggggcgcttcaacgtgcgcggggtcgccctgaacttggttgccgccgccttgaaggccacccggttggggctaatccaaatcctgctaacatccaagggcatttccttaaaccttataacctggttttactacgtggggccgggctgcctttgtttcctggtggggccctgggtcttcgtcaagctgcccaggctaccccccgtaggcaccttccaaccgaattttttcgcttttggaaccaactaactttgggcctttgggctaaaccttgctgggttcctgctagggggcaaaacc

SEQ ID NO: 296614 - DNA, 340 bp, Zea mays
ggcggacccacgcgtccgcccacgcttccgcccacgcgtccgggcgttttgtttgtttgggatggaaaggccgaccgggcggggtttgttttccctatgcttaggtattttccggcctttttttatcaactctggtggccaagcccaaggggaaaatctgggctttttttccatatggtattattaaacatggtccattcggcaaaaaaaaaaaaaaaaaaaaaaaaaaaaaaaaaaaaaaaaaaaaaaaaaaaaaataaaataaagggggggccgttttagaggtcccaagtttccgtccccgggcttgcgacggattagtttttttttggggccccct

SEQ ID NO: 296615 - DNA, 391 bp, Zea mays
cctttaaggaaccgactggccggggccagaaagagagaccgccccccctgtttttccaaagctaaccctaaagggggaggagggcgcccgaaggcggcattgggtttaatattggccttgggggagaatctgttcctccgtttgttggaggacccggccatgcccgaccagtttcggcggaagcttttttccaagttaaaggagcgttccaagccccctaaggcgggttggagcctccttttgggcccttacggtttttgagaccttaaccgtttaaactggaagttttcctgggttcccaaaataatccaggccgccggccgttggtacccttacaacaacctaatggaacgccattttggttggccgccgttttcttgaacacccgttc

SEQ ID NO: 296616 - DNA, 378 bp, Zea mays
  unsure (1)..(378): unsure at all n locations
cgggnngggaatccccgggtggaccacacccttccggaagcaggcggaggaggagttgtcccattgtttcattgggtttttggcgtgcctcgatggggaggcccctagccaccgttggaaggcaaaaggcctggaggaagaagcgaaagtttgagcttggtcgccagccagccaacaccaagttgtaaagcattaaaacagtggggagggtccgggtccttggaggtattgtgaaatggagggttttcggccttgttcctggtacctcctaatggggaagggaagttgtttcccgtatgacctgttatccttacttggtttacaatgctttatactttgggctggtggggcctcaatccttttttaatagtgcctttt

SEQ ID NO: 296617 - DNA, 394 bp, Zea mays
cgggtcgggatttccggggtggaccacacgcgtccgccaaggcttccggtttttcaatccgggattttacaatccagttaaacggcccaagatggaaatggaaaagctcttagcccaattggttgaaaccgaaagggccaaccccctagttctgggccttgtttgttttaacatcgtaccggttggttggaacggttccttggccactgggcccaaccttaagggtccagtaaccaaagggaaatggggggctgttcccattccatctatgttgactgggaaaggatggccacgtggggctgccaccagccaattcggtaagcctgctgtccacatggcgagggtggccttaaaaggaaaggcatttgagtggtggggccaaaatccttttagc

SEQ ID NO: 296618 - DNA, 335 bp, Zea mays
tccgggtcggaccacacgcgtccgccacacccgtccgggaaacgggccctgggtttaattaaaattggttccactatctgtccatgtaggaaggatgggaatggtggggcttcttcataaggcttttgcttactttgcccggacccaggagggttttttggaaatcgatgaaccccgggggtcattagctgttgcccttggccagataaaggaaagggttttcaatgccattttccgggccgtatcccccgttatggttggcaggttaggctccgataagtttgcagcgttattgaaggccggaccagactggaggaaagcgttgggccagtttt

SEQ ID NO: 296619 - DNA, 389 bp, Zea mays
ccgggcggaccacacccttccgttgcgtcggccacctcctaatcgccttagtttttccgaagccgctgtacttggcctccggggggatcggtttttgcttaggggcgcattgcccactgttgttcgccataatttccaaggtgtttgggctaaagtcctactaaacgctttacaacttcggttccgaggccagcccaatcggcccctacttgctaaacttccggttggggggggccctttacaacttgaaggccgccaagcagaacgggggttccttggcggccggtccaaccaaaacctgcatcggcttccattgtttccgaaaggcgtccctaatatttacggccgcacacggtcgccggccccctttttttgtttttcctgttttg

SEQ ID NO: 296620 - DNA, 361 bp, Zea mays
  unsure (1)..(361): unsure at all n locations
cgggnccggaattcccgggcggaccacacccgtccggaccgccttaaccaccaaaaaggacttcgtgttcggaaaaagagggaggcccatggggccacggtccaaagaaccctgaaggggctccaccccccgaaggcttcttccaacaccctgttaaacgccaggagcagttcccgctggctgccctaaatcgcctagctggccaagaaacatgcttatatcgcagaggcttagggagcccaacaccctcaaggttcacttgaagtcgggggttaagcctaagggcctgtacatcgtccccatccagcatacctacccggtttgggagcccttttttttgaatgtggatgactacaccttt

SEQ ID NO: 296621 - DNA, 274 bp, Zea mays
  unsure (1)..(274): unsure at all n locations
gggnnnggaattcccggtcggaccacacccttccggctttagaggacccaagcttacgtcttttgtcttgcaacgtaatagctcttttttggggcgacctaaattaaattaacgggccgccgttttccaccgcctggcctggaaaacccctggcgttccccaacttatccgccttgcagaccatccccctttggccggctggcgtattaccaaaaaggcccgtaccgttcgcccttccaaacagttgcccatcctgaatggcaattgggacccc

SEQ ID NO: 296622 - DNA, 469 bp, Zea mays
ccggcaggtccgggtccggatttccggggtggaccacacgcgtccgccaacgcgtccggggaaatggacgaggggccctccaccaaactcgaaggccttccaggggttcttttggggcttccgggctttaacgttgatcctgaaaccagggtttttggggctgggtatttggtgaccggggaaatggtccagggacctccaaaagggcagagaagggtggggccggtgcctaagagggctaaggttcgaccacggtccagtgcccggccccgttttgtgaagcggagggggacccattcttcccagagatgttgttcccgcttctgaagatgtaaaaggtaacggttcccacaggggtccaataccgtgcctgaagatgcagaatcacctccccattacttatttgataatggcatccgttttgtttgcctgccattttaagcgtgttttgctaatattgcatttgggc

SEQ ID NO: 296623 - DNA, 412 bp, Zea mays
caggcccggcccggaatccccggttcgacccacccgtccgaaaccaagtaactggcattttcctccgggttccaagttttagcaccccacccctcggtttcggcattgtcgggccccgccaggggcggcagaggttttggccagagggcggccccaagccccaccgaagaggtcctgcccgccaccttccagggcttaaccaacccgccattccgaaggctgtctagaaggggcggcttaaagcccttttccggcctattttacaagaagacccgcggggggctcaaaacctttctgaagaacgtaatccgggacgccgtaacttacaccaagcacccccgccgaaggacctgaaccgccatggttttcttttaccccctcaagcaacagggccgaaccctttacggttttg

SEQ ID NO: 296624 - DNA, 454 bp, Zea mays
gcaggcccggtccggatttcccggttggaccacacgcgtccgaaattttttccattcaaccaacggcctacattgaaccgggcggtttattggcagcaccaccttttaccattaagccggttggttacggcctactttaagaaccaccaactttttccatttaaccaattggccgaactgaaccccgttgtttattggcggcagcaattcctactaccatttagccggttggctgcagaaggccgggcttccttttggccacagaaccagtggctgcctttttaccagcagttgggggttaacccggaaacccttttacaactccaacaattgtggcccttggtccaactggcttggccaaacccagaagcctcctaccaacaccacattattgggggggcccttttttagatggctaattagtggtaatccaatattaaagtttttgggagga

SEQ ID NO: 296625 - DNA, 457 bp, Zea mays
ccttccgtttcccataggctcattcttcgaaccccatttttttgggccgggaaaggaaaaaagatttgggtgcaattcattagaaggagggagcccttccctgttttgaattccatcctcctttaaataggatttgctctaagccttcccatactttcctttattgcctgcaccatttttttccattttgcgaatccctattttatttgaagttttttactttcatttccattttctaaatcgacccactttaattaaattggaaaaattcgaaggaaaaaaaaaaggaaggggttattattaaaccaggttttccggttccataatcctgaaataaagtccttttttttgagtttactcctcattaggatgttttttttaaccacccaattttaatttatattaaccatcctattttaattaggttctataccaattagtagtaagatttttcttt

SEQ ID NO: 296626 - DNA, 403 bp, Zea mays
cggcccggaattccggggccgaccacacccgtccgggatctggaacctagggtttggtttggtggttttggtcctccgcaaaaatcccgaaaaccagggttaggggaggcaagacccggaagcggggaaggaccaaggttgccaacaccaggcccaagttcgttttaaaggaaaacggccaggattccccccaggtaacccggttgttcggaaccggccggggcagggccatttgcgtcaatggacccccccgcttttgccatatccggggtaagatgcacaaaagggtttggatcggggttgggaacattgtcctcgtgggcctccgggattaccaggacaacagggccgacgttatcctaaagtccatgaacgacgaggcccccttgttaaaggcctacgg

SEQ ID NO: 296627 - DNA, 446 bp, Zea mays
  unsure (1)..(446): unsure at all n locations
acgggnctggaataccggggccgaccacacgcgtccggccagttgaggcgccagggttgggccgccattcccggggtcaacaagggccaaatcgggggggacttcccgaagggcttccgccggaacataaagtacaacttttgcttgaacttggtccgccaggtccaatttttccagaaaatggacaacctggggttcaaaaccatttgcaacggggggaaatccttaatttttccaaagggaaaaacaatcgtagggaagggcaacgtggtgcaccggatgctgttaatcgggcggggccacctgcattgcagccagttgttgcggaacggcccaacaagcagttgaaccttggggcctggcaacttaagggggaacaagctgtttgcggggtgcctgcgccgcccgttcttggaacgcttcccaacgttgttgggaaccttggt

SEQ ID NO: 296628 - DNA, 453 bp, Zea mays
cggaattccggggtggaccaaggcgtccgcccacgcttccgaaggccaagggttgccagtttaatttcttaaggtaaggtaccaggagcgggaccttgttaaacggttgccttgaaattttgaacctttgtaatatttgaggttttgggggttccctgtttaaaaattttgggttcttgaacccagttaaaaaaaaaaaaaagggggggccgttttaaaggatccaagtttacttccgcgtgcttgcaacgtattagtttttttttggggtaacctaaattaaattaattggccgtggtttaacaacgtctggattggaaaaaccttggggttaccaaatttaatggcttggcagaaaatccccttttggccagttggggtattagcaaaaaggcccgaacggatggcctttccaaacagttgcccagcttgaatggcaattggaacccgcct

SEQ ID NO: 296629 - DNA, 418 bp, Zea mays
gggaattccgggaccgaccacacccgtccaagcacacctaatggccgagtttatttttgagttccaaaaaaaggaaaggcaactgaaggaggagaccagggttttgaaaaaggaacttgcggagaggcaaaaggccgtcgcaagccgccagaagaaggtgcaggggaaccagaaaacacatgcccaggcccaaacaggctaataatggtcctccttaatgagagggcaggatcagcagggatggccgcttcaaaacaaaatttgtttcccgccgtggccaatggaaaatagaggtgaaaagctggttgcggcggcccacaagaagccattgccggggcaggcccaaccgaagttccgaatggaaggtctgccaccatggatgctgagcacacctaaatgcataaggaaagggtcgatg

SEQ ID NO: 296630 - DNA, 462 bp, Zea mays
cggacggaattccggggccgaccacacgcgtccgaccgagcaagggacccggggcggagaaaaaaagaaaaaacgtttttttcttttgggggtcccggttcccaaacctttggttggttgcctgcctgcctgcaaaagggagttggtattggggtttaagcccttcttaaaggagctgagggacctgcaaaaggaccccccaacataatgcagggcaggtcctgttgggggggccatgtttaatgggcaggcaccatttttgggaccacctgccagcccttatgctgggggggtttttttagggaacattaatttccggccagattaccctttaaaacttccaagggtttttttaaggacaaaggttttccatcttaattataccagcattggagagttttgcctggccattttaaaagagcaggggagccttgttttgacaatttttaaggtcctgttttc

SEQ ID NO: 296631 - DNA, 309 bp, Zea mays
cgggcgcgaccacacgcgtccgcccacgctgtccgccacacgcttccgtgtgagtcttttttacttaaaatggcaccattaaggaggatcttaaactccaaactgatgaaactctgggggcccaaattaaggaagggttcaaaggcggaaaggattttgttgggactgtccagtctgcaatgggggaggagcaaatttgtccgtttaaggattttgtccccaataaacttctcttcttctgtaaacttaaccttactttttctaaactaaaatcgaaaattaagtgtatttctaaaggattatttacct

SEQ ID NO: 296632 - DNA, 422 bp, Zea mays
gggcggacccaggcgtccgagaccaattggcaccatagaaggcacaatagtgttttaccatgggcggccaaaatatttgggttcgttaggctcttgggctttttggaaggggctgttaccgaaaccattttccaacaaggttaacaggttcttatggtttctttttttccccaatacttttaaccaggggggttttaagtttgggaaaacccaatttttaaaccttccaggatccaacaggcaatggcagaaggcatttaactttaataaccttggttcttccaacaacggtaagccttattacagaagttactttgggggcattggtgggaccaaaccataagggcccaccacttccaacaacttgggctaggaaacctggttgcttactttaagaaccagaggttttttccattaaacca

SEQ ID NO: 296633 - DNA, 414 bp, Zea mays
ataaggggccgaccaaggcgtccgggacgcttggccccccgggacggtttaagttccttcagtaacaaggttatggcttgggaggccagggttttgtttaatggggaccttgtaaaaagggtcctccggtgtttgggcccttaaaagatttccgttgccgtgaccattttcgggggtcttggcattgccgggacatgggaaagggaatttggtgcaaaggttaataattgtaaaataatggtggagaagtatctgcttgtaggtcggatttttggttatcaaaatcttttgtgtttttaataaacattgatttatctttcccaaatttgtgttttctatttgtttaatggtgaaaccttgttaattgtttttcttcttataattatgatactttttttgtcaatattatttttt

SEQ ID NO: 296634 - DNA, 421 bp, Zea mays
atccggggtcgacccacccgtccggcccgccgttgagggcttccagaaggaacactttccaggcggaagcggcggaaacggccaaaagggccgaccaaaaccagaaccagggaggcctgtccttaaaggtaagcatggccggccccccttacttaaggaggggggacctccggttgtccaagggttccagggagttaaggggggttttggacccccttttaacaaactctttttccgggggggaaaagggcggggggaacaacaaccagaacgccttggtttacaaggccaaggacgggaacttaatgctcgccgaaaacgtgccctgggatatgttaattttttcgtgcagaaagttaaggataatgaagggttttgcctttgaggccaggggatcgttgatccatacataaacagaggt

SEQ ID NO: 296635 - DNA, 463 bp, Zea mays
  unsure (1)..(463): unsure at all n locations
cgggncgggaatcccggggcggaccaaggcttccgtcaacgcgtccgaatatggggtccaattacctaactgggatgaacagaaaggtgtccagaaggggaagggttgaacaggaaaccaacaatgcttcaacagagttggacaggattgaaaaggacataattccaatggggggtttccccaattatggattggggaggggtgattacttgataataaagggttgttggggggaaccaaaaaaaaggggggtgaccttccgccagtccttcttgaagaaaatttccgggttggggctggaggaaatcaagttaaagttatttgacaaatggtccaaattggggaacggcggtttcaaaattaccgttaagaagcaaaggttttttgggaagttaaaggcttaaggggctgcggtgaaccaaattcccttttttaaaaataattaaactgtgaatcttttgtt

SEQ ID NO: 296636 - DNA, 395 bp, Zea mays
acgggccggaatccgggcggaccacacccttcctgaccccttggggcttgcgaggacaccttggttggaggaggagagagaggacgtttttttcttttgggggtcccggttcccaaacctttggtttgttgcctgcttgcctgaaaaagggagttggcaatggggtttaagcgcttcctaagggagttgagggacctgcaaaaggaccccccaacataatgcagggcaggtcctgttggggaggccatgtttaatgggcaggcaccatttttgggaccacttgccagtccttatgttgggggggtttttttagggaccattaatttcccgccagataaccctttaaaacttccaagggtttttttaaggacaaaggttttccatcctaatttcaa

SEQ ID NO: 296637 - DNA, 304 bp, Zea mays
cggggcggaccacacgcgtccgccacacgcgtccgccaaggaagccggaaggctgttggtaatggacttaattgccgcttggggggggcaatgccgggcaatggcccaattgttggtcgaccaccccaagaagttaattaaggtcgggttcttgaagggggacgtggccaaagggaaggaagtaaccgcggcttacaaggtcgggggaatgccgaccttcaatttggtaaaaaacggaaggacggtcgggaccttcgggggtgccagaaaggacaagttctgggcccaaatcgagaagtatgct

SEQ ID NO: 296638 - DNA, 454 bp, Zea mays
atccggggcggaccaaggcgtccggaaggtgtggttaacgggaccatttttcttaattattaacaggttctaatggttgccttttttcgccaatactttcaataaaggacggtttaagattgggaaaaccaagcctttaaaccttacaggttccaacaggcattggaaccaggcaattaactttaataaccctggttttttaaacaatggccggccttattttgggggcagtaatgggtccaaacaataagggaacaccagttgcagaaactggggttaccagggatcagccaagtagttttggcaaacctttttccttactttaagaaccaccaattttttcaattaaaccaacggtttacattgaaccttgttgttaattggcagaaccaccaactactacatttaagccggttggttacggcttactttaagaagcaccatttttttcaat

SEQ ID NO: 296639 - DNA, 167 bp, Zea mays
gacgcgccttgtaccggggctttaagcccggcggtttttggggttactcccagggggaccgtttaattggccagggccctagggcccgttcttttcgtttttttcccttcttttttggccacgttggcgggttttcccggtaaagttttaaatggggggttcccttt

SEQ ID NO: 296640 - DNA, 427 bp, Zea mays
  unsure (1)..(427): unsure at all n locations
acgggnccggaatcccgggccgaccacacccttccgcgacacccttggccccccaaggacggtttaagttcccccagtaacaaggttatgggttgggaggcaattgttttgcttaatgggaaccttgtaaaaagggtcttccgtggtttgggcccttaaaagttttccgttgccggaaccattttcgggggccgtggccttgccggaccatggggaaaggaatttgttgcaaagttttataattgaaacaccatggtgaaccagaacttgcctgaaggcggcttcttttggtccaaaagtttttgtgttgttgaaaaccttgttgttactttgccaaaattggttttcaactgttttaacggtaagaccttgaaaagtgctcttccttttatgaagaaggatatcaagttggttatttttttttgtt

SEQ ID NO: 296641 - DNA, 277 bp, Zea mays
gggcccggaattccggggtggaccacacgcttccgggcccccggaaggcagttggccaccaaggcggtaaggaagtcggcgccaacaaccggcggggggaaaaagcccaacaggtccaggcccggaccaggggcgttgcccaggatccgaaggtcccaaaaaagcacggggttcttgatccgaaggttgcctttcaagggcctggtgcgcaagatcgcccaggatttaaaaacagacttccggttccagagccacgccgggctggcgttcccagagg

SEQ ID NO: 296642 - DNA, 457 bp, Zea mays
cggaataccggggcggaccacacgcttccgaaccagttagttttagcaaagaattggcaatttaccgaccgccgaattcaaaacagcccgaggggttagcaaagcggaaggcacttccttcttaaaggaacatggcccgattgcagaatttggcattggcaacggcggccgggggggccttggtgttgttggcggggggaacctcggaggcggccataagttgcgggcagtgggggtcggcaatggggccttgaatttcttacccgcgcggccagggttgggggccttccgccggttgttgaaggggtttaagaagcttaaaaaacgccgccggaacaaccgccgaccggggggccgcttgtaactgcttaaaaaacgccgccgccggcgtaagggtgctaaacgccggaaacgccgccagaatcccttccaagggcggggtaagaatcccttaaac

SEQ ID NO: 296643 - DNA, 422 bp, Zea mays
ggccgccggtgagggcgtacaggaagaacacttttttaggcggcagcggcggaaacggccagagaaggccgagcagaagcagcagcagggaggcctgtacgtgaaggtgagcatggacggcgcgccctacctaaggaaggtggacctccggatgtacaagggctacagggagtcagggaggctttggactcgctcttaaccaactccttttccgcggcggcagagggcggcggcgaccaccaccagcacgccatcgtttacgaggacaaggacggcgacctcatgctcgccggagacgtgccctgggatatgttcatctcttcgtgcaagaagctcaggataatgaagggctctgcctctgaggccaggtgatcgctgatccatacataaacagaggctacagacacgccacctggccacct

SEQ ID NO: 296644 - DNA, 322 bp, Zea mays
atcagatttccagttcacactattcgaattttttatattcatgctccgaaaaacacaaagaaacagtaatttataatataaatccttggcgaatgtatcccgctcacgtatatgttcacacaactccttctgttgcggaagacccaacgtgcactcaatagcatgtgagtttaaagatctcattttttctacgatggaccatacatctaattggaggcacatgaacatttctctcatcttttttttgaacccaattcaaacggtttccatcccattaacatttgacatcttattacctatcctgttaaaacatatatgttct

SEQ ID NO: 296645 - DNA, 458 bp, Zea mays
ggccccccgcaagcagttcgccaccaaggtggttaggaagtcggcgccgacaaccggggtgttgaatattcccaataggtgcgggcccggaacagtggcgctgcgcgagatccgcaagtaccagaagagcacggagctcctgatccgcaagctgcccttccagcgctggtgcgcgagatcgcgcaggacttcaagacagacttccggttccagagccactccttgttgtcgctccagtagttcttatttatttttttttctttttatatttttttttatttttttattttttatttttttttaattttgggttgatggttggttgttttttttttttaaataattaatatttattaattattttcttcttttatatatatattattttaaatattttttctttttttctattttttatattttatatatttattttttattaatttatttatttattt

SEQ ID NO: 296646 - DNA, 243 bp, Zea mays
caggcgtccgaacaaccccggcttcccttacaatgccgtttttgtttatgacaaggcgccaaacgccgtggacaggtcaattatataatagggggggcacctcaacaccccatgcgagacctactccgtcaccctcaccgtgccgggcacctacggtttctactgtgtgccgcaccaaggcccggaatgggcggcatgaccacactcaactaaagctagctatccattccatgcatcttgatc

SEQ ID NO: 296647 - DNA, 294 bp, Zea mays
cccacgcgtacgggcgtcccggagctttcgttttcactagcgatcaagtcgcaaaggggggtcctttttatcttgctcagggcatcctccaacatgaccctttcgaggtcctggaccagaggggtgtggtcaagctgttaaatgttttttcataaggggcctcaaagtttgtcctaatttttaatgtttttcttttttggtataacatgtttgtaaattctctttctttgttgaccttttttttttaaaatgctctttactattttattctttattttttgttactcatatttt

SEQ ID NO: 296648 - DNA, 337 bp, Zea mays
acccacgcgtccgcccacgcgtccgcccacgcgtccgcccacgcgtccgtgatcgcgagcgcaagcacgtacgtggtcggaagctcaagttagaagaagcaccagtgcctgatcgatggcggcccaggctctcctttccggccggcagttgttgggccgccccgtgcagtcgccgtctttaggtcgtcggcgaggaaggcgcccttcgtcgtaagggccagttccagccctccagccaagcaaggtgccgacaggcagctggggttcgcgtccaagcagtccctctcctacctcgatggcacgctgcccggcgactatggcttcgacccgttgggcc

SEQ ID NO: 296649 - DNA, 261 bp, Zea mays
  unsure (1)..(261): unsure at all n locations
aaacccgggccgaccgcacgcttccggccagttcaagcgccatctttggccctttactcgcttcgccgacaagtgccaaatcntcgccaacttttccaaggtcctgcggcgtaacataaaaaaccacctctgccttgacctcgtccgccaggtcccattcttccagcacatgtactacctctgctctataacattttctacagggtgaaatccttaatctttcccaaggtagaaaccatcttaagggaggtctacttttta

SEQ ID NO: 296650 - DNA, 262 bp, Zea mays
acggcaaggagctcgacggccgtaacatcactgttatccaggcccagtcccgtggcggtggccggggcggcggtggctacggcggcggtcgcggcggcggcggttatggtggcgggcgccatgacggcggttatggcggcggtggcggttacggcgtcggcgcgaggttggtggctccagctacagaggctgtgtgccgctactgtggttggaacgtggtgtaaggccgccgtttacctttaagtttttgccgttttctttt

SEQ ID NO: 296651 - DNA, 450 bp, Zea mays
ggcaaacctttctccctactctcagcaacattaatttcttccattcaaccaactgtgtacactgaaccctgctgcttattggcagcaacaacaactactaccattcagccagctagctactgcctactctcagcagcaacaatttcttccatttaccaattcgccgcactgaacccctctgcttatttccagcagcaaatactactaccatttggccagctagctacaacaagccccgcttccttcttgacacaacaacaattgcttccgttctaccagcagtttgtggctaaccccgcaacccttttacaactgcaacagttgctgccctttgtccaacttgctttgacaaacccagcagccttctaccaacaacacatcattggcggtgccctcttttagattgcttattagttgtcattcaataatgaagttttttggctgatgtat

SEQ ID NO: 296652 - DNA, 225 bp, Zea mays
gcaagtttcgctacgtagcagtgcaataaaaaaagtatccgcaatggcgagcagaaccatgggcctttcctccacggccttcggcggcaaggccctgaacatgccgtcgtcgtccgccttcggcgaggcccccgtgacaattcgcaagacggcggcgaaaccaaaccagcgggggcgtccgggagcccctggtacggcccccaccgcgtgctgtacctgggccca

SEQ ID NO: 296653 - DNA, 522 bp, Zea mays
  unsure (1)..(522): unsure at all n locations
gggtgcgacccaccgccgtccgcgtatctaacaccannatccattttatattatacataccgactatgccacacggttaacacacacttattgagaaatgcagagacacgccaatacggaaatgtctagaaaatcggccgccgcttaaggggatgtctctcagcggtcgagagaacaatgtgctaggggtgtatcactatcacacccaaaaacacccaacttctgctcttacgtaagagttgccaggagtaccgattacacctctggatttgagaatcacgtgcttatataccctggtatgtggccaataatttacaaagaactattctgtatgtattatgtaagaggaggagagggttaagggatttaccccggtgtgaagatatcgcattanttcgagggaaccctagatgctgtcgcagtaaagaatcgtcaacaagggcgttctaaatatggggccaaaaagccaaaaaaataagtgattcgtttttagcccttataaaaagaaaacggattcttgaa

SEQ ID NO: 296654 - DNA, 293 bp, Zea mays
  unsure (1)..(293): unsure at all n locations
aacgnggcgaaatccccggcggaccacacccttccgccaacccgtccggccggcggcaaggtctctatgaaccaccgaatcgcaaaggtccgcgggcgtttatcaaccttgaagatggaccccattaccaccaacttttacccgttgataaccctaacccccggcggcctaaaaaaaaccggcaagctgaacctggcggtccgtttaacttttacggaatggcccaacaagtttgtaaaattctgaaagccttttatatcaaaaaattccacttacatcttaccttaattatc

SEQ ID NO: 296655 - DNA, 383 bp, Zea mays
cggaattccggggtggaccaaggcgtccggaagaagccaccgccgcttaatcctggaagccgccgtcttgttttccgggctcgcggttgcaagggccagccccggaacctggtgggtgccggggtgggccatccggaaaaaccggttcccaagttgccgttggtccgtgaccagccggacctggggaatggggccgggcttcccgtggccggagctgaaaaggaaatgctgccggaggctggcggccatcccggcgtactgccggggcacggggctgagcatcctaatggacggggcgatcccgccgggcccggacgcccagttgaagggccgcctaaaggacctgccggcctgcccgcggaaggtgcaaaggggattcgccg

SEQ ID NO: 296656 - DNA, 302 bp, Zea mays
tcctatgggttaaaaaatgacctgtgtaacgaaaaatttaccccggggtttgcgcaaattataacccctaccaattaagggggcccttttcggggaaaggtccccggacccccaattggttaattttcctaaatccatccaaatttgtatccgttcatgagccattacccctgttaaatgcttcattatttttgaaaaaggaagggtttgagttttcaccatttccgggttcccctaatcccctttttggcgccattttgccttccggttgtggccaccccaaaaccgctggggaaggtaaa

SEQ ID NO: 296657 - DNA, 403 bp, Zea mays
  unsure (1)..(403): unsure at all n locations
caagccttccgtttttttgtttttaaacccttttttgaattttttcttgggcctctggttcctgnnncccgaatggctttttttgaatccagcactgagaaaccctggaccaccccaaaaaaatccattaaggctgttccatttaaccatccaaaaaccttggccccaaaaggttaaaaccaacacaaggttgttttaattggtaccaccatcggtaatcccttaaagaccacttaaggcccttcgttaaacatcctaataaacctaatggttgtcaagtcccttgtttttgttccctttttcgcaaccaatggaggcatccttttaaaatgcctttaaagaaaaaatggaaaatgaatggttagtttatttttcccggggaagagccctaaatttttttaat

SEQ ID NO: 296658 - DNA, 431 bp, Zea mays
ccggcccggaatccccgggcggaccacacccttccgttaccagcaactaagcaggcgaaagcagaccacacccacttggttagaaccaccaccaggggcgccggcaatggcggcctgcataacctcctcgtaagttttggcgggggcccttaagggcctgccgcccttgggccgccggccttcttctttggccgtggtttgttcaaaaaagaaaatcaagaccgccaggccctacggaatgggggggggcctgcccgtcaacttcaaccccaccggaagaaaggccaaggccagggccttgtcccatttcgtcaccaattccggctcaaccgtggacggttccggccaattttccaacaaggataactgttttccaaccgggaacttttccttcgttggaaccattggcctttttatctgggcctcaacct

SEQ ID NO: 296659 - DNA, 413 bp, Zea mays
  unsure (1)..(413): unsure at all n locations
cggaaatnccggggcggcccacagccttccgggcattcttgttaaagccgtcaatggggccccccgtgccggaggccaaggccagggccacccgggaccagttggccggttccagggtaaagttcttcaaccgccggatccccccttccgggcccggaataatgttcttttccggcggccattcggaggtggaggcaacccaaaacttaaacgccttaaacaaggggccaaaccgggggaacgtgtccttttcttacgcccgggcgctgaaaaaaacctgcttaaaaacctggggcggccagccgaccagggtaaaggcggcccagaacccgctgttgttgcccgcaagggccaactccttggcgcagttcggcaggtccacttccaacggcaaggccgccagggccaaggag

SEQ ID NO: 296660 - DNA, 417 bp, Zea mays
cggaatcccggggcggcccacacccttccaaaaacaaataaccttgggggccttcctttttggcggcggcggcccaggtccctttgattgccgccccggaaaatgggggggggaaggtttcaacatgctaccttaaagggcccaagcgtggtaaaggaaattttaattgaactgaccctggttttaatcgttgaaggtttgtggaaaatccaccattggaccaggcaaaggaaaactagatccttttacaacatgcttgacaggggccaaatcagcgtcttcgtcaaggagtagttcttacttgtaaacactgaagtttttttttccagatgtttttgaaaactaattttttgaaaagcttgacaaagtgaatgctgtgaaaatttggcttgaaaataagcttaaccatttgggacc

SEQ ID NO: 296661 - DNA, 366 bp, Zea mays
gaccacacccttccgtttttcaaaaaaggtaatggttggtaacctttaattcctttgtcaattcctcccgatatgtttaaaattataatggggagggcattaaccccaacacccataaacattgttcttgcccctaaattcaaagggcctttcattgaacttttccatttgttaattccaaaacccattaaattccttccttttcgtaaggctttttaccgccaaaaccttccaaatttaaccaatttctttgccactgcttgggatttcctaatagtaatttttttccaagccttcctttttgggcttccagggggatcaaaaattgctcttgtccaccaaggttaatttccaattaacttgttt

SEQ ID NO: 296662 - DNA, 423 bp, Zea mays
aaatcccggggcggaccacacccttccaaccttagttccggaaattgccgcctttattttatacgcccgaagccttgccgcccaggttggacccttccaaggtggggggggggttcttccgtttaaccgccggcaaggtcggcccacctttttcgttggccccaaaaatcggcccgttcggtttttcccccaaaaagatcgggggggccatcgccaaggaaccggccaaggactgaaagggcttccggttaaccgtaaagttaaccgtccaaaaccggcaggccaaggtttccgtggtcccttccgccggggggtttgtaataaaggccttaaaggggccaaaaaggaaccccaggaaggtcaagaccttaaagcccaggggcaccataagccttaacaacttatataaaatcgccaggacct

SEQ ID NO: 296663 - DNA, 350 bp, Zea mays
gaaaccggggcggaccaacccttccgccaacccttccgcttaagccgggtgttaatgtccggttcccagggccccaggtcggggcggagggttacaaaggccagccggggcccccggccctacttccgttgttctttcgccccggcctgcccagcaaaaaaaaaggtgcagcgcagggccaccaacccaacaatcttggtcgcaacttccaagggcaaccacaacaacggccagcccccgcaacaggcccaggccccgaacaacggttcaagccttggccccagaaaaaagccgccttctcctccaaggccgttcgccgccgttccggggcggttccacaacaagcaggt

SEQ ID NO: 296664 - DNA, 337 bp, Zea mays
gacccggcgtccgcccacccgtccggaatttttaattaatgagttgtgggtggggcctaatgtcaccccaaccagaacgtaaaccaggtgttggttttagaggctttttttaaggattttaaatggccttactccaccccggggtccgaaaccaaggttcctgtttttttggcggcattccgggtaactcttaagttcggggttccgcctgaagaaccaggacctgcagaacctgcggaatctcttactggtccatggccaactgtttggactgatggactaaccagtcttgatcgttccaaaggacgatgtctttacattgggcccgtttcttggg

SEQ ID NO: 296665 - DNA, 351 bp, Zea mays
cggggcggacccagccgtccgcccacccttccgataaattttttcaaggagtgtcccagggccaaaaacctaagaaatttgatatggtttggcaactctttggggggatttgttgttgcaaaatttgccctaaagcaccctgaacacgttcaacagttgattttggtgggtcctgctggcttttaataaaaaacagagcttagttttgaggggttaaccaagtttcgggcaccatggaagggcttgctaatgaatcgtttttgggggtccaattttactccccaaagggtatttaggggatggggtccttggggtccaggtttagtccagagatttaccagtgccaggttt

SEQ ID NO: 296666 - DNA, 385 bp, Zea mays
tggaaaaccggggcggaccacaggcgtccgccacacgcttcggttgattttaaggccggttgtttgccggccaaacttggattggaaccaggggcccttggggttgttaaaggggcaaagcgtaggaaaatacatgctttaaaataaaaatcccgttttgggcagttggaatttgcccaaaacaaagggcagattgcttggcagcagttttaacccaaggggaaggccaaaaagggggggtttttttccggtggcaggagggggagcattttaaggtaaccggccgaccacagaggtaggggggtggtaactgggggtggcaaaggcctagccgacttccagaggggggggaagctttggtaccttaaaggtgggtccggggatg

SEQ ID NO: 296667 - DNA, 338 bp, Zea mays
cggggcggaccaagccgtccgccaacccttccaaagcaggttcgatttattattattactagctggtccaaatactacccggcttgccagcaagttggccaggggcccaaccgtaataatggcctcttcggaaaccgccgtcgccccgttcaagggtttaaagtccgccgccggcttcccggtgtcccgccgaagaaccagaagcttgggaaacttaagaaacggcggagggatccggtccatgcaggtttggccggcctacggcaccaagaagttcaagacgctttcttacctgcccccctttgtcaacggacaacctgttgaagcaggtggactac

SEQ ID NO: 296668 - DNA, 384 bp, Zea mays
  unsure (1)..(384): unsure at all n locations
aaancccggggcggaccacacccttccggggacccttgggttgggacgtaaacgcgcataaggccgccgccgccccgccgggtggttggccgacaccgcccggcgggaggccaaaatgccgttaaagaggttcggggggatcggccaaggggcctttgtaaactacggcagggggtttggccgcttggtcgtaatcgtcgacgtcgtcgaccagaacagggtttttgttgttgcccccgccttggttggttgccaaatgaacttaaagcggttttccttgcctgccataaagattgacattaaacttgtccaaaagaagactccattgttcaaggcattggtggaagcttttttgaaaagcaagtgggagattagtttatgggg

SEQ ID NO: 296669 - DNA, 410 bp, Zea mays
ggggaccaggcgtccgaaatccccccggagaccgggctgccggggttaatgtcgggcgcaaacccgcccccggccacctggaactactgggccgattctcggacccttttcgttttaaacatggcgctaatgggcttggccgagcaccgccgcctccaggactgggtccaacccggcctccatgggcaagcagaacttcctgggcctcaagaagttcctggccggttccggggacccgtcttaccccggcgggccctttttaaacccgttcggtttcggcaggaccgagaaggagatgaatgacctcaacctcaaggggatcaagaccgcaggtctcccatgttcgccatctttggtaacttaatccaggggttcgtaaccgtcgtgggcccgttcaaaaactttgttta

SEQ ID NO: 296670 - DNA, 381 bp, Zea mays
cccggcccggaatccccgggcggaccaacccttccgcttgggccggggacaacccaattcgaacctttcggaaagaccaaaaaaccggaggagatggttggtaccaagcagactgttggaaagtccacggaagggaaggttcccaggaagcagtttgccaccaaggttgcccgtaggtttgccccaaccactggtggagggaaaaagcttaaccgttaccgccctgaaactgttgccttccgggggatccgaaggtttaaaaaaagcactgagctgttgatcaggaagttgcccttccaaaggctcgtaagggaaattgcacaggacttaaaaactgatttgcgtttccaaagccatgcggggcttgccctccaggaggct

SEQ ID NO: 296671 - DNA, 448 bp, Zea mays
  unsure (1)..(448): unsure at all n locations
cgggnccggaatnccggggcggccccacgcgtccgccaacccttccgaaaaaaaaaaaaaagggatcgggggagccaaatgaatcaaaggattaatgtttggttcgggaggggatcttaaaaatggtaaacttaataccaggatattttattttaattaaaggattaattagatattcgaaaccagaggattttaagtcctattcgaaattcggaggaatggcttaaggggccctttgaccacctcgaaaaagctcgttttcgattccagaaggtcgacctggaaccagatgagtttcgattgaatggttcctttgaattggaccgggaaaaagaaaattggattaatgctccttttattagttgggaccatttagaaaggtttaaaaccgaaccctttatttttgaaaaccaaagggcgatgaataaggtccgccaccgggttttcc

SEQ ID NO: 296672 - DNA, 381 bp, Zea mays
gggcggaccacaggcgtccggggccgccgccggttaatttgccgccgcattaatgctattaccttactaaaccgccccggcttaggcttaatcccaagcaacaccagggcccgggccaacagccgaatcaaagcccgggccagttgaagggaacctgcggggtgggcagaaccccgatcctgggccagggcgtcaggtttttggggcataagggcagccggacggggacgccttactgttggcttaagggccagtcgttgcggcagcagtgttgccagcagttaaggcaggtggggccgacaaaccggtcccaggcgatcttgggttgggtcctccagtccatcctgcagaagaagccgaaaaggggccaggttcgggggt

SEQ ID NO: 296673 - DNA, 264 bp, Zea mays
  unsure (1)..(264): unsure at all n locations
gaanaccgggcggaccacaggcttccgttttcttccccttttaacaaagtcctcctttttttagggttcctaagggttttttgaaggggcaatgtcgccggttgatggggagtaccattgcttcgtcggcggccttgcttgggccaccagcaacaagtcgttggaaaatgctttcgcctcttacggcaagatcctcgattccaaggtcataaccaaccggaagacggggaggtcccgcggttttggtttcgttaccttttcttc

SEQ ID NO: 296674 - DNA, 390 bp, Zea mays
cggggcggacccacccgtccgccaggggggtccattaacccacctagggttttggggccgccgccgccgccgccgccgagggggaaccattgccgtggacgaggaccttccggatcaagaagaacctggcaaaaaaaatgccccagaaccgcccaatcccttactggatccgattgccccctgccattaccataaggtccaacgccaagcgcaggccctggcgccgaaccaagctcggtttttgagcgtcggaattggccggctgttgcttcggaaggctagggtttaagagctatcttccttttgtttaataaatgggtcagtttttttgtaagctagcaagggttgttttgacccttttattaagattttggtgagcggggatgttaa

SEQ ID NO: 296675 - DNA, 375 bp, Zea mays
cggggcggaccaacccttccgccaacccttccggtggggtgggtttttccttcccctccggtccgggttcggtttcgggaggttttccggggttcggtttcggggttaaccgaaccaaaatgccggcgccgaatgttgagaaccgttgtttcgtcggcggcctcgcctgggccacggacaacaactccttcaaaaacgccttaagaaccaacggcaaggtcctggagtccaaaacaatcctcaatcggaaaacccaaaggtcccccggtttcggtttcttaaccttttcaacggaggaggcgatccgaaaccccatcaagggcataaaccggaagaagctgaacggcctaaacataaccgtaaacaaggccaata

SEQ ID NO: 296676 - DNA, 380 bp, Zea mays
ggggcggaccacacgcgtccgaacctggtgctgggcttaaggggaggaatgttaattttcttgaaaacattgactggcaggacaataactttggaggtggggggctccgccaccattgataatgtgaaggccaaaatccaggacagggagggtttccccccggaccagaagcggttgatttttgccggaaagcagttgaaggatggtcgaaccttggttgactccaacatccaaaaggggagcaccttccatttggggctccgcctgaggggcggattgcaaatttttgtgaagaccttgactggcaaaaccataaccttggaggtggagagctttagaaccatcaacaacgggaaggctaaaatccaggcaagggaggg

SEQ ID NO: 296677 - DNA, 334 bp, Zea mays
ggcggacccacgcgtccgccacacccgtccgaatttaccagcgactaatttggcttgagcagaaaaaacccacttagttgggagcagcacaaacggcgggggggatggcggcctcaataatctcctcgtaagttttggcgggggcgcctaaaggcctgccgccctttggccgccgggcctcttcttttgccgtggtttgttccaaaaaaaaaatcaaaaccgccaagccctacgggattggggggggcctgaccgccaacttttaccccaacggtagaaagggcaagggcaagggcgtttaccaattctttaacaagtacggggcgaactgtta

SEQ ID NO: 296678 - DNA, 436 bp, Zea mays
gaaaccggggcggaccacacccgtccgttggagcaccataaggtgccccagcaccatctggcatagcagttggaaaaccccctggaggagggccggcccttgttccggcctaagggggaaaaactatttcaggactgccctttctttccgtggccggatcaaccaattcgttcgcttaaaagccaaaggtttggggccggacttggggttttacggcctaaaggcgatcaccaaggttttaaagagcggcttaaacccgacgccggtgttccagtgcagcaggggccctttcgccaggtccatgctgttccagttttacttttgcgcgggggggaacggaccgttaattgactgccccgggccgaagaagttcacttgttccagggagatccttttccaccctttcaagaaggggttgctaaagcagaagtttaac

SEQ ID NO: 296679 - DNA, 216 bp, Zea mays
cggcccggaatcccggggcggaccacacccttccggactggtttaatggattctggaaaagatcttgcttttttggcaccacagggtcggggatgttttgcaactgcggatcaagctgcggttgcggttaaagctgcaagggcggcaggaagtcccctgacctggaggagacaagcaccgccggccaggccaccgttgtcctggggggggccccgg

SEQ ID NO: 296680 - DNA, 397 bp, Zea mays
gggcggaccacaggcgtccgcgttgaaggctttgaaattcccacaggaatataccagattcggggattttgaactgcatgacctgggccttttagccaactggcaattgggggtaatattaaggggggaggctgaaccatttaaggttttgaagggggggccagatagacctgaagtggggctcgtgaatttaagggggttaaaaggcaaatttgatgggccctcatcacttaaggatcgtcttattaatataatttttgcaaaagatgtcttaggggttgttgaaggaccatccaaggggatgcagggccccttggaacacatccacagggggtggctgtttatttatgacaggcataaccttgaacatgcaggttttatttgtccaaaagcccat

SEQ ID NO: 296681 - DNA, 296 bp, Zea mays
cggaatacccggtccgaccacacccttccgaaacacttccggaagccccaagtccatcgtctccacacaaggtccaaaaggcttcttccagggttggggtcttcctggccagcgtaatccgcttgaacttccacaactgtttcttaaatggttgcaacggttcggtccttttgaaggccagtgaccgccagccggaaaaaaacgccaagcccaacctgaccctgcaaggtttcgacttaatcaaaaggatcaagcataggctgtaggccactttcccccttccggttttttctccg

SEQ ID NO: 296682 - DNA, 364 bp, Zea mays
cggggcggaccacaggcgtccggttggattgggttaaaaggcaattttggtttctaggtttccaggggggtccggggaagaggaggccggttttttgatatttttgggccacgacaggaatccagggaaatttgaagtaaaggttttggttgcaaagccattgtttgttgttccagttgcgggggtggagcttcctaatagggttcctaatggattccatgccttttttgtaactggggaccaactggttcgccaggcggaggggcagggaaaatacggaacctgcagattttgaacacccgggtccatgtgggaggttatggcaggccttgtttttgtttaggccaggttttttccacatgtt

SEQ ID NO: 296683 - DNA, 473 bp, Zea mays
  unsure (1)..(473): unsure at all n locations
gggnccggaatcccgggccacaacctttggaagctgccccgcagggagcagggcttgcccttcgttaccaggtggcgctccaggtccaggataacttacaagttttaccgggttttcccaaacggcaaggtgcattacttcaacccaagggccggcttttacccggagaaggtaaaccccggcggggggggcgtgggccaaaatttccgaagaatcggcaggaacgtaaacccaatcaacgtaaagttaaccggcagggccactttcaattaataaaacttaaggtacgccgaacgcccaagccgggatccaaattaaagaacttttttttttattaattccagtttattgtaattgggctgctggtccggtggtggcttgatttgagatgtgcatgatgatccttgtgtaattttaaaaaaaaaataattttattataaaataatattaaaaaaatttattataaatttttt

SEQ ID NO: 296684 - DNA, 382 bp, Zea mays
cggaattccgggttcgaccacacccgtccggttgacacagcctaaaggataatgggaccagaatgaaggagggccagaacgccattttttacataattgttaagagcaagaaggttgtggaaaactcccggttctttgagaagttgaaaaaaaggggttttgaggggctgttaatgggggatgccattgccaggttttttatgggccagttgaaggagtttgggggcaagaagttggtttttgccaccaaggagggcctgaagttggacaagagtgaggatgaaaagaaccccaggggggagctaagggggaagtttgggggcctttgcaaggtaataaaggaggggctggccaacaaggtggaaaagggtggtggtttcct

SEQ ID NO: 296685 - DNA, 391 bp, Zea mays
  unsure (1)..(391): unsure at all n locations
ggaaatnccgggtcggcccaagccttccgccaacccttccggccccaagggccaatatttttaagttgccattgccggcccagcttacccaaccggttgtctttaataggttggggggccagttccacctgccctcgatcatttttgaaggtgtccggccccgaaccatatccccatttgtttaatctaatgaaaggggttttgccacagggacctccttgccccaaagccttttggccccttcaatgtttgttagcggtggcataaatgtccaagtgttccggcccccgttttttgctaatgctcctgctaagaagggaggcaggacctccatgatcgatttaatgatggccgtgttttaagcttttttttcaaaaactgttgtttttcc

SEQ ID NO: 296686 - DNA, 252 bp, Zea mays
cggaatcccgggcccgttttggaggacccaggcttccgtccccttgcttgcgacttattagtttttttatggggtaacctaaatcgaattgattgcccgtcgttttcgaccgtcttacctgggaaacccctgccgttccccaccttaatcgcctggcagaccatccccttttcgccggttggcgtattagcgaaagggcccgaaccgatcgcctttccaaccagttgcccagcctgattggcgattgggccc

SEQ ID NO: 296687 - DNA, 470 bp, Zea mays
  unsure (1)..(470): unsure at all n locations
cggggcgaggcccaggcggtccgcccacccttnccgccacacccttccgttgaaggtgtctgttccggcacaccatttctccaacattgtgaacggagttcttttagatttccgttttgtccccctacacctttaaccaacggggtttttcggtttgtagaaacacccaatttttaacaccttcacaggatccacacaggcatatcgcagttggctattttactttaatacaccctggttcttccaacattaataagccttattccagcagttcccttgggggcattaattggcccaaaacataagggcccaccacctccaacaccttgtgctagcaaaccttgttgcctactttaagaaccagcatttttttccattcaaccaactagctgcattgaactttgtttttaatttgcaccaccaccaactaccattaagccagttttttgttgcctacccccagcaatttt

SEQ ID NO: 296688 - DNA, 414 bp, Zea mays
gggccgaccacaggcggccgaacgaacccaacaaaccaataccaataccagaggttttttgatttaacttttaaccgttagatcgggccacgtggttggttaaccggggcacacggttagaaaagcaggatgtcggccggaccggggacctgaatcgccataatcttggccataatcctgccgccgttgggggtttttttaaagttcggttgcggggttgggttctggatctgcctaatcctaacctttttgggttacttccccggattaatttacgccgcttgggccataaccaagtagccggccgaagcaaagcaaccacggccccttgaattgacttccgccggtgcgttagcttgcaatgttttgggatgggattcctttctttttggttaagtggctgctgctcctgtt

SEQ ID NO: 296689 - DNA, 333 bp, Zea mays
  unsure (1)..(333): unsure at all n locations
cgggncggaaatcccggggcggaccacacgcgtccgttattatgaaagccacccaacgccattttattttttgtttgtttgccaaaaagtccgcgaatggcggaatggcaaatttggcagagattttaaacaccttaccaccaagtttgggggttgttccttgccgattgcgacggatcgaccggggtttgcagtccaaagcaagctacttaaccatgcaaatggaaaagctgggcttaaattttgccggccgggcccggtttggggggtttctggggtccctttttgatcggcaggaggtccggtgacccccacccccttccctaggccaaa

SEQ ID NO: 296690 - DNA, 261 bp, Zea mays
  unsure (1)..(261): unsure at all n locations
acgggnccggaatcccggggcggaccacacccttccggggaaaaccctgcacacacaataatggggttaatttccggccacaattcggccgtaaagggggggcagaacaacttggcgggttacttcccaaaccggccgacaacaatccgaaagaacatcccgttgaaggaggccggcccggccaaggaaatgagaaagttcttgaaaaacccgtggcctaccctatttaaattgcttccaaccaaattccagttcatcaag

SEQ ID NO: 296691 - DNA, 240 bp, Zea mays
  unsure (1)..(240): unsure at all n locations
acccacgcgaccgctacggcgaggcccgcgtgacaatgctcatgttggcggcaaaggccaagccggcggcggcgtccgttttccaaaggaacgggcgccgaccaaangctgaacctgggcccactgtccggcgagccgccgagctacctgacgggcgagttcccgggcaactacggctggaacaccgcggggctgccggcagacccggagacgttcgccaagaacctttagctggaggtg

SEQ ID NO: 296692 - DNA, 294 bp, Zea mays
  unsure (1)..(294): unsure at all n locations
ggggggagccacgcgtccggatgggaggacccttgctgactacaacanctagaatgagagcaccctccacttggtgcgcgggcttatttgtggtatgcagggcttttttaaaacccttactggcaagaccatcactcttgaggtggagtcttcagataccattgacaatgtcaaggccaagatccatgacaaggtaggcatcccgcctaaccagcatcgtcttatctttgccgttaagcagctgaaggatggactcacccttgcggattacaacattcaaaaggagagcaccct

SEQ ID NO: 296693 - DNA, 330 bp, Zea mays
cgcgtccggccgtgtccacgctcatggtagactcgctcatgctctcgttccacggccggggcaaggccaagaggagcgctgctgcggtcacgcaccataatcatggaggccaataccatgacagccctccggtgcacgggcacgggcacgggcatctagacatgagtgagggtgagacggacgtcgaggccggcgtggcgcagcagctttgcaggaaccgtgtcattgttcaggtcctggagatgggcatcgtggtgcactcggtggtgatcggcctcagcatgggcgcgtcgcagaacgtgtgcaccatccggccgctcgtggcggcgc

SEQ ID NO: 296694 - DNA, 253 bp, Zea mays
acccacgcgtccgaataagacgacttgtttcattgattcttgatgtagatcgagcttcttttgcaccacagggtcgaggatgtcttgcaactgcggatcaagctgcggctgcggctcaagctgcaagtgcggcaagaagtaccctgacctggaggagacgagcaccgccgcgcaggccaccgtcgtcctcggcgtgcccctggagaagaaggactttcctctatttgtctatgttctctttcatatttcttct

SEQ ID NO: 296695 - DNA, 452 bp, Zea mays
ctttcacaaccaaaccatcaaccaaccaaccaaccatcaacatgtctgacaacctccgcaagggtctcggcgagcaggcgtcggagaagatcacccccgactcccagaagtccaccacctccaagatcggcgagaacgtctccggtgcagctgacaaggcggccagcgctgtccagcctgagggccagaagtccaccacccagaaggtcggagatgccacccgtggcggctccgacaacgcccagaaccagggcgagggtgtcctgaagcaggctcaggatggtcttagcaacgctgccgctggcgtccagaacgctctcggcggtggcaagcagtagattacttcggtagtgctgttgcggttcgactttcccttgcggcttagattggccaggtggatatgattatacccctatgatacgaattcaatgaacaaaacctttgatcaaaaa

SEQ ID NO: 296696 - DNA, 330 bp, Zea mays
atcagtcgccattatacccacaagctgttttaaacattaattccttcatgcaccatcagcggtggttctcattctaccggcagaacgtggcaaacattgacgccttcatacatcaacatcactagctgccatttatccaacatgctttcactaatcctaccaccttattccaaccatacaccattgatgatcccatcttctagattatataccacttatacagtaatggtctagttattatgctaataaatgcgacctctctgttataatatcttacatatctatatcttaaaatgaaatacatgtaatatttgctattatatatattct

SEQ ID NO: 296697 - DNA, 328 bp, Zea mays
cgcacactgcaccaagaaatccatcgagaggctcgtcgacaggggtattaatggcgtcgtcgtctagcatcagccaccggcggctgattctcgcagccgccgtactgctctccgtgctcgcggctgccagcgccagcgccggtacctcctgcgtgccggtgtgggccattcagtacaacccgttcccgagctgtctgtggtacttgaccagccggacctgcggcatcgggccgcgccttccgtggccggagctgaagaggctatgctgcctggagctggctgacatccctgcgtactgtcattgcacggcgctgagcatcctcatgga

SEQ ID NO: 296698 - DNA, 317 bp, Zea mays
ggtctcgtgataccatttactttcacagcggttaggtatttatagttaagtgtggagtgcaatgcaattcaatgcctgatattcgcttctttacttgttggattgtcctcatcttctctcatagcaatcaaatcacacttccatcttctcatctcgtaaaccctataccctggtttcagtgacatcgatatcgatcgaacatggatgatgactaccatgtgatcgtattgggcactgatcttaaggagtgcattctcagtcttcttctctccgtagatggactcatggctctgcacatggtcaggtatgactattac

SEQ ID NO: 296699 - DNA, 393 bp, Zea mays
cccacgcgtccgatcagcaaagcggcagtgcgtagagaggatcgtcgaacagaacagcgtggagatggtcatcgttctcgtcgtgtgcctggctctgtcagctgccagcgcctctgcaatgcagatgccctgcccctgcgcggggctgcagggcttgtacggcgctggcgccggcctgacgacgatgatgggcgccggcgggctgtacccctacgcggagtacctgaggcagccgcagtgcagcccgctggcggcggcgccctactacgccgggtgtgggcagccgagcgccatgttccagccgctccggcaacagtgctgccagcagcagatgaggatgatggacgtgcagtccgtcgcgcagcagctgcagatgatgatgcaacttgagcg

SEQ ID NO: 296700 - DNA, 414 bp, Zea mays
  unsure (1)..(414): unsure at all n locations
ctgcaagctgccggagaaccggcgccgcgcggtgcgcgagggcgcggcgcccgcgctcgccgacttcgccgccgccggctccgcgcgcgccgtcgaggtgctcggcctcctcgcccggtgccgggaggggcggcaggagctgtgcagggtccccggcgtcgtgtccgtgctcacgggcgccgccgggagcggcaacgcgcgcgcaatcgagcaggccctgctcgtcctcaactggatttgctccgagagcaacgagttggcgctggaagcaatcaagctgcaggctntcgacctctgcgagggctttgtgaaacaacaccaactgcagaacggcaagaacgcgggcgacttggcccggacgctcgagaaagcgtagaattggattgggcttggctccccaaaacatgagatgag

SEQ ID NO: 296701 - DNA, 480 bp, Zea mays
cccacgcgtccgatcagcaaagcggcagtgcgtagagaggatcgtcgaacagaacagcatgaagatggtcatcgttctcgtcgtgtgcctggctctgtcagctgccagcgcctctgcaatgcagatgccctgcccctgcgcggggctgcagggcttgtacggcgctggcgccggcctgacgacgatgatgggcgccggcgggctgtacccctacgcggagtacctgaggcagccgcagtgcagcccgctggcggcggcgccctactacgccgggtgtgggcagccgagcgccatgttccagccgctccggcaacagtgctgccagcagcagatgaggatgatggacgtgcagtccgtcgcgcagcagctgcagatgatgatgcagcttgagcgtgccgctgccgtcagcagcagcctgtacgagccagctctgatgcagcagcagcagcagctgctggcagcccaaggtctcaaccccat

SEQ ID NO: 296702 - DNA, 266 bp, Zea mays
aaaccatacacaataacacctgaaacattttttcacaccgctcaaacaactatccatggcggactctaacgactacctacaacagcaacaactgtttacatgtacccaactcactgtcgccaatacacctacacacctccaacaacaatcgcaccatcaacatataccatatcacacacagctacatgctgcaaaccatgaatactatttacaacaacaactaaaattccatcaactgactatgtctaactctgctgactacctac

SEQ ID NO: 296703 - DNA, 302 bp, Zea mays
cgctcgtcgccgcgcagcattagtcgccgagagcgccgtccgcgccgaatggtactcgccgtcgaactccgtcatggtggtgatcgcaatctgtcttcaagcttcgagggatcaaagatcaagcgttggcgaccaagtgatccagttcttcgagttccgcgagattgaagatcctgagcatctgtttggtgaaggttgtccacattgcaaccactgctcaggagaagacgaacccgtggaaggagacttccaggagttccaagactacgacgagttctaggtatgggttggcggcaaccccc

SEQ ID NO: 296704 - DNA, 255 bp, Zea mays
ctcaaactatcttggacgtatcctactggttgattgaacattaatggatcatcttgggtcaggtctatctgtcgcaccgaaacttttaatcaaatcacatcactctttaaaaaaaaaaaaaacaaaaaaagaaaaacctaaacaaaggaaaacaaacaactaatactaaatatagataataacactaagggcatccgtactacagtatccaactttacctacccgtacatgcaaagtcactactgattgatacaa

SEQ ID NO: 296705 - DNA, 276 bp, Zea mays
  unsure (1)..(276): unsure at all n locations
ggcgacccagcatacgaccaccctncgagcatacaangagctccactgctcttacattttttttattaaaccccgctagatttaaaaactagctatcgagtatngattactccaaatcccatccatgccacaagtgaagcatcattctctttcactataaggatttatttctgttgattattttgatattacacaaatcaaatacaaggataaaactcgagaaaaacaacgcaagaaagcgctcaaaaagaaagcaaaagatgaggctcaaaatcc

SEQ ID NO: 296706 - DNA, 269 bp, Zea mays
cgcaggattaggcgcttgcaggatgctgttacgagttcgtgagagatctaggtcgtcgtgtcccattcaactttgggtggctggaccgttctcttcttataatgtaattatttattttgtataaaactcctgttatgttataaagatgtgacattcgatccaaagaatgattataccctaaaaaactacaccgaatgaaaagcatttatatgctcctgatgcttaaggataaaaaacctaatcaagtttctgcgtcctatactacacac

SEQ ID NO: 296707 - DNA, 286 bp, Zea mays
cggacgcctgggcggacacatgggcggacgcgtggggtcgccgcgaagcgctccaggggagctttcgtcaacatggggaagacacatggtatgggagccgggcgcaagctcaagacccaccgcaggaaccagcggtgggctgacaaggcatacaagaagagccatttgggcaatgagtggaagaaacccttcgctgggtcatcccatgccaagggcattgtcctggagaagattggtattgaggccaagcagcccaacttcgttatccgtaagtgtgctcgtgttc

SEQ ID NO: 296708 - DNA, 387 bp, Zea mays
acgcggactcttaagcagacacttcgacgttctcttggggtcgccgcgaaacgctccagagagcttccttcaacatgggggggacacatactatggcagccgggcgcaagctcaagacccaccgcaggaaccagcggtgggctgacaaggcatacaagaagagccatttgggcaatgagtggaagaaacccttcgctgggtcatcccatgccaagggcattgtcctggagaagattggtattgaagccaagcagcccaactccgctatccgtaagtgtgctcgtgttcagcttgttaagaatggcaagaagattgctgacttcgtgccaaatgacggttgtttgaactacattgatgaaaatgatgaggtctcgattgctggatttg

SEQ ID NO: 296709 - DNA, 264 bp, Zea mays
acgaccacacatacacccacacatcatcctatgcttcaaaacctatttccaaaccaccaacagcggctattacaacaacttgttgccgactacttagtctactacaccatatagaaccctgcaccactacgtacaacaacaacaactagctattatctagcaccaatacgagattaacaaatgcacctacatacctacaacaacaattgcagcaacataatgtaccatatctaacctaactagacatgacaaaacctgatgcct

SEQ ID NO: 296710 - DNA, 334 bp, Zea mays
accacgcgtacgacaatccgagaacttacccgagataaagcctaacgacgccgctggggggataaataactttgctgaacctgcaactacttgcaccaactgaactttttgttggagagtgcgaaatacatggtgatccaaggctaaccttgagctatcatccgaagaatgaagggcactgcatgcatcactatcaaaaaaacctgtatgtccttgattatcggaatatatgatgagccaatgactccacaacaatgcaatatgctgttggagacgctccacgattaactgatccaacaaggcatttgacgttgtcataatgctatttacgaca

SEQ ID NO: 296711 - DNA, 326 bp, Zea mays
  unsure (1)..(326): unsure at all n locations
actcaaaaacacactatactaatctcattatcaacaacctaacaccaatttctaccactcgtatttttaaaaacatctcgtctcccccatatnatcaacacaacatattctttcattattccacacttctcactttctcctataaccaatattccacaatccctcccaccacttacttcaactatcttcaaacatccaaccatacaaacctacaatctacaactatcacttacttatatccccttacatcaaccaaattcccaacttctacaacattcctttttacatttaaccctacaaaccatatcatctcaacaacatcaact

SEQ ID NO: 296712 - DNA, 324 bp, Zea mays
  unsure (1)..(324): unsure at all n locations
atttaaaaacacaccaatctaatcgctttagcaacnacctaacaccaattgctaccaggtattttccaacttgcgctgcttgcccttttactgaacgcaacaaatgctttcattattccacagtgctcactttctcctattgccagtatttcacagttcctcccactcatttctttaatgggcttctaacatccaaccgtgcaagcctacatgctacaactagcgcttgcgtctagctccttacaacaaccaattgcccaattgcaacaacaatccttggcacatctaacctttcaaaccatttcaacgcaccaactacaacaa

SEQ ID NO: 296713 - DNA, 395 bp, Zea mays
  unsure (1)..(395): unsure at all n locations
acgagcattcaaaaccacaccaacccaatcttactaacaacaacctaacaccaatggctacgcacgatattatccatacttgcgcttctatcccttttactgagcgcaacanatgcgttcattattccacactgctcactagctcctagagccagtcttccacagacactcccaccagttacttcactgtgcttccaacatgcaacctctcagcctacaggctaaactagcgcttgggctactctctacacaccaattgccaatgcacaacatccttgcacattaccttacaacattgactcaacacacacacagatctgcatactgagcactaccgtgtgacctgcactactcacacatctctcatcaccactctctgcaactactcatacaca

SEQ ID NO: 296714 - DNA, 290 bp, Zea mays
gagttcctgagtcaccttgccaccatactcatcaccggcacaggaatcaaccctgcgtagcggccttggatcggtcgggatctacaaccgaaatcatgccatgcacgaccattgaatcttctggagtgcacccttcatcggagcgcagacctggctgccatctaccaccaggtgatcatcattgccatccacctcaagagcatgactaaagctgccgcggaactgccaagacatgcctgccagacctgaaggacgagcgctataatgtcgggctgaatgccttgattgac

SEQ ID NO: 296715 - DNA, 366 bp, Zea mays
  unsure (1)..(366): unsure at all n locations
aaggnccggcgcgcgcgaacanccacacctcccgtttcttgctcccctttttttgtcccaaacggctagcttagctccaggtgangtgcttaaatgagggtgcgtctgctccttggcagccgtatcgcctgctgttggtgcatctggagatcaataatactactatgacagagccatgctctgtgaagagtattagtagcaacgctcataaaagctacagttccgtctcttttctcagctatgtcaaacttccaaactgttcatgcttaaaactgatggttctcttggcgtgaagaaagtatctaacataattgatgatcttcttgaatggtccccgaagataactatttctggaatgattgaaaa

SEQ ID NO: 296716 - DNA, 276 bp, Zea mays
  unsure (1)..(276): unsure at all n locations
gaggagaggagaggagaggagaggttgggtctgggacaccatggctccgatgaagctgtgcggggcggtgatgtcgtggaacgtgacnaggtgcgcaacggcgctggaggaggctggctccgactacgagatcgtgcccatcaacttcgccaccgccgagcacaagagccccgagcacctcgtccgcaacccgtttggtcaggttccagctctgcaggatggtgacttgtacctcttcgaatcacgagcaatctgcaagtacgctgctcgcaaaaa

SEQ ID NO: 296717 - DNA, 256 bp, Zea mays
  unsure (1)..(256): unsure at all n locations
acgaccacacntcccactactcctagcctcactcatttccaaacccacccaacaaaccacattggggccatacatacaacagtggctaccacaatattatccctccttgcacttcttgcgctttatccgaactcaacaattgcgtacattattccacaatgctcacttgctccaacttccattattacacatttccttccaccactttcttaaattggcttcgaacacccaaatgtccacacctataacctacaac

SEQ ID NO: 296718 - DNA, 333 bp, Zea mays
  unsure (1)..(333): unsure at all n locations
ggaaaaccggccgacccacgcgtacgaccacacnttctactgctactagccaaattttcatccaatcccaaacaacaacctgcgctgcccttttaatatctttagccaccctcactacaactctcaataaccatggttcctcattaaccataattacacccttctctacaatgacaccaagtgtcctctcctttatccactaaccggctaccctcaccctcatagaccttactactgtgccgtcggagccaacaattcctacaccccttacatcgtgcacgctcactacaatgactgcctctacgaccccatcgacatcaatgacatcaactc

SEQ ID NO: 296719 - DNA, 200 bp, Zea mays
  unsure (1)..(200): unsure at all n locations
cactaatnctacccatatcccagagcacttgtcaccactactgatgccattccctaccatgaacccataaatgcagtacttcatgaagcaacaagtggttgccaacttaatagcgatcccgaccctgattctgcatcaactgctgacctcaccgcttcatcagtgccagataccaatgattactccgggtatgatgccac

SEQ ID NO: 296720 - DNA, 286 bp, Zea mays
cacttactcacctactctctatttttcacctacttcacatcatctctagagccttttacaactttggctaacgtaactacataccatcaacaacaacatcttcaacaatttattccaattctcagtcaactatccatttttaaccctaccttctacctacaactactttcatctatcccactctcattttcaattcacctacttacctacaacaacaattacttcaacaaattttaccaactctcactcatctatcttattcaaacccttctacctacttacaaca

SEQ ID NO: 296721 - DNA, 334 bp, Zea mays
  unsure (1)..(334): unsure at all n locations
atcactnatccacctatccttcatcaatcctttcacctacttccaacatcatctactggaagacttttttaaaactgttgctaacccaacttcatactatcaacaacaacaactacaacaatttattccatttctcactcaactaaccatccttaaccattccttctacctacaactactttcatctatccctctcaccaaaatcaattcacctacctacctacaacaacaatttctacaacaaattacaccatctattactcatctatctctttcaaaccctactacctacttacaacattttcttacattcaaccaactttctttatcaaac

SEQ ID NO: 296722 - DNA, 419 bp, Zea mays
taattccctctccagccactcctccaacctactctaatcaacaacactatcttcattttaaccaactaactgcatctaactctgcttgtaatttattacaactacatctaccattcagccatctatctactgcctacccccaaaaaattcttccattcaaccaactaacacctataaactcttctgcttattcacacctctaacaactactaccattcatacatctaaatccaattatccaatcttacattatcacacaaccacaattatcacccatctaacattaatcatcctctaacctccaacaacctcttacaactattacaacagctaccattcaaccatctttctttacaaaacatcaacacactctacctacaacccatcattctaggaaaccttctttacaactcttaaca

SEQ ID NO: 296723 - DNA, 351 bp, Zea mays
gacaagcgtacgatcggtcctacagcgcatgctgtagcatcagtcgcaaagcgggcagcgcgcggggctgatcgacagcgcacagcgcccacgaactgacagccatgagcaggctgcagcagtccactccatgcgcctacgctactgccggcagcgtccgccagtggagaaactacgagctggacgatagccagtggctagctagctagatcagccatgtatcgatgatgattgagtaataatgtgtcacgcatcaccatgcgtggaagtgccagtgcgagcaatgacctgaatgaacaacttatatggaaagaaaaaagtcttggtgcaaatcgagcacaaacgggcagc

SEQ ID NO: 296724 - DNA, 428 bp, Zea mays
cccacgcgtccgcggacgcgtgggcgcgcgtcaattaacccagcagaaggtccgtcgtctcggcgccgacgactcggcttctgctcatcaccaccagccactagctgtcgtcgccgacatcgacgcacgcggaggagatcgatcggcccggccgccggccgcaggagaagatgagcttctttggccgcggcagcagaaaccagagaaccttcaggccgaagaagagcgcgccgtccgggaacaaggggatgcagctgaaaaggcacatcgacgccaccctcggcagcggtaacctgcgagaggcggtgcgtctgcccatcggggaggacctcaacgagtggctcgctgtcaacaccgtcgacttcttcaaccaagtgaacattctctacggcaccctgatggagttctgcacgccagcgacatgcccg

SEQ ID NO: 296725 - DNA, 354 bp, Zea mays
cccacgcgtccgggcttgcgagctgggcctaagcggcaccgaaaggaagcttcagattctgtcgggaattaaagtcatggggctgcgagtgcaaagtgctggggcaggaaccccaggtgctggcgtgcctcgccgcggactcgccgctctcgccgcagccctcggcggcgggcaccccgcgccttctcgcgggtcccggcatcaaggtctgggacccctgccacgttctcctgcccccgccgccgtcgtctccgcacgcagggaggcaggttgacgccgcggtcatcgaggtccttgtggtcagccacggcgagtgcgcagccgcgatgcgctcggaccttgtcggcggccggt

SEQ ID NO: 296726 - DNA, 217 bp, Zea mays
acctctgcttcctcagcagcctctcctgtgccacttactaccactccctccacaactccttcatcacctactgctaggtcctcgagtccaatatcatcctcgatcttcatactcatatttcccacttcttcttcttcttcaccttctccacttatgatgctatacttaactccatctattgcatgaacttcaatgatctttacttcctcaacatcac

SEQ ID NO: 296727 - DNA, 335 bp, Zea mays
ggcacgcgtacgtccacgccatcgttatcattctctatcgggagactcatacgtccggcggcttcttcttcgtcacctgctgcacagatgaggcgatgctgaacgccatcgagggcatgaacagcaaggagctgaacggacgcaacatcaccgtgaacgaagcccaatcccactgcgagtcgttagtccactgcagtgggtactgcggtcagccgtggaggctgcggctacagcagaggcgagcgccgtgatagctgtgacagatactgcggtgagcacgctgctactgttgaggcagccgctacagtagttgtagcagcggctactgaggtggc

SEQ ID NO: 296728 - DNA, 357 bp, Zea mays
gaccgacgcgtgcgaccatcgcaacgcagcagcatcaacaatttttaccagcactaaaccaactaactgcggtcgacggtgtcgactacttgctacagcagttgctcgcattcaacccacttgctctggcaaacatagttgcataccaacaacaacaacaattgcatcagtttctaccagcgctcactcaactagctatggtgaaccatgacgtctacctacatcagctacaactgatttcatctagccctctcgctgtggttaatgcacctacatacctgtaacaacagttgctgcaacagattgtaccatctctgactcagctagctgtggcaaactctgctgcctacttgcaac

SEQ ID NO: 296729 - DNA, 395 bp, Zea mays
cgtccacgcgtaacggctagcgcactacgattctctactaacaaagtctctcttccacgagtcggtgccattgccctttgagagaaaaaggtacaatggcgagtctcctccaaatcagttcactgcgacacgcctgttgcactactagtagtgggattgaaacgcactgctttatcgtgcactcttctttccaatgttggtcaccactgatgatcatgatcatgggtggtaaaatcagtcacggcctttgaactcctactcttcgtgttcacctttgtgctccaatagtgcacgatctccctgattgttgcaactgctcatgcaactaaccggatgctatcttgacacctacgtacaacaacaacaactgctttcatctagcccgctcgctaaaa

SEQ ID NO: 296730 - DNA, 390 bp, Zea mays
acgctttttctttaatgatctataaatgtactttcttatatctgggaagccacaaacattagagaagaaactttattattgaactataactcataagaaatctaaaagagggcaccaccaatgatgggttgttggtcgaacactgctaggtttgtcaaagcaagttggctgaatggcagcaattgttgcagatgtaagagggtgccagcgttaggcgcaccgtgctggtagaactgcaacaactgtggttgtgtcaagaaggtatcagagctcacaccagctagcttggggtatgctactggtagctggctgaatggtcattgttgtttgtgcacatcagaagctgagttcaatgcagctagttggtttaatggaagaaactgctgttgc

SEQ ID NO: 296731 - DNA, 375 bp, Zea mays
gattattcaacaattactgacaccatttacttcaatgggcttcgaacacctagctgggcaggccaacatgcaacgaacaggcgcttgctgcgagcgtcttacaacaaccaattgcccaattgcaacaacaatccttgccacatctaacaatacaagccatcacaacgcaacatcaacaacagttcctaccagcactgagccacctagccatggtgaaccctgccgcctacttgcaagagcagctgcttgcatccaacccacttgctctggcgaacgtagttgcaaaccagcaacaacaacagctacaacagtttctgccaacgctcagtcaactagccatggtgaaccctgccgtctacgtacaacaacaacaac

SEQ ID NO: 296732 - DNA, 405 bp, Zea mays
cccacgcgtccgcccacgcgtccgcggacgcgtgggcagcactgagccacctagccatggtgagaccctgccgcctacttgcaacagcaactgcttgcatccaacccacttgctctggcaaacgtagttgcacaccagcaacaacaacagctgcaacagtttctgccagcgctcagtcaactagccatggtgaaccctgccgcctacctacaacagcaacaactgctttcatctaccccgctcgttctggccaatgcacctacatacctgcaacaacaattgttgcaatagaatctaccagctctgactcagctagctatggcaaaccctgctgcctacttgcaacaagctgttccattcaaccaactgaatgtgtcgaactctggtgcgtacctacaacaacga

SEQ ID NO: 296733 - DNA, 309 bp, Zea mays
acattcgggctgctcctgttgctgagaatcgaggtgagcagatcgatgccccagcagcagatgaggacggatgagacaaggatgctactgcaaatgaggatgaggaaaaggatgaggacaaggagatgactctgtaggaatttgtgaaaataagagaggagaataggaaagcactacttgcagtgaaagctgaggagaggatagttgaagttgacaaggatctagcgtctctgcagccactttcaaacaagaaagaaaatgatgaagttttcattaagctgggatctgacaaggataagaagaaggaaa

SEQ ID NO: 296734 - DNA, 186 bp, Zea mays
cactcgttcgccgacgcgtgggtgggacctccctaaatttgcaaagatgggcgacaaggactggtacggagtgtaccataaagaccggaagtgcccgacagtgctgatggctaaccgggccactgacgcgggttattggaaggcgaccgctaaggacaatgatgtctacaacccctttgcagcgga

SEQ ID NO: 296735 - DNA, 286 bp, Zea mays
  unsure (1)..(286): unsure at all n locations
cgtgtctctccctcgtcggtcggtctatgtctcgggtcggtcgtggtagcggatcaatgctggtctgtgtgataccgctcttttctgcggctcgctgtgcacggaaaccactccctcacaacgccttcagacctacggcgaggtactcgagtccaagatcatnctcgatcgggagacgcagaggtcccgcggcttctgcttcgtcaccttcttcacggaggaggcgatgcggaacgccatctatggcatgaacagcaatgagctggacgggcgcaacatcaccgtc

SEQ ID NO: 296736 - DNA, 305 bp, Zea mays
caacaagcaatctcatcaagcaacatacctttatcacccttgctacaacaatcgccagccctatctttgaagcagtcatttctacaaacggatgaaggcacatcagctgcatcaactcgtgctacctgttatcaaccaagtagctctggcaaacctttctccctactctcagcaacaacattttcttacattcaaccaactgtctacattgaaccccgctgcttatttgcagcaacaactatatccatacaaccaactagctactgactactctctgctgcaacaacttcttccatttaaccaat

SEQ ID NO: 296737 - DNA, 127 bp, Zea mays
cgacgccacggcgtccaggccacgcgtcacgaccacgcgtccgctcttggagattgcttatgagttatagatcaataatgaagtgattgtggatggaggcttcccagaaataagaaagtacatttct

SEQ ID NO: 296738 - DNA, 421 bp, Zea mays
caacaagcaattgcggcgagcgtcttacaacaaccaatttcccagttgcaacaggaatccttggcacatctaacaatacaaaccatcgcaacacaacagcaacaacaattcctaccagcactgagccacctagccatggtgaaccctgacggctacttgcaacagcagttgcttgcatcaaacccacttgctctggcaaacgtacttgctaaccagcctcaacaacagctgcaacagcctctgacagagctcaatccactagccatggtgaaccctgccgcctacctacaacagcaacaactgctttgatctagcccgctcgctgtggccaatgcacctacatacctgcaacaacaattgttgcaacacattgtaccagctctgactcaactagttgtggcaaaccctgctgcctacttgc

SEQ ID NO: 296739 - DNA, 373 bp, Zea mays
ggaggcggacaaggtaagcagcactagcaggaaccctagcgccgccgcgacccgtgggaatgggtatcgacctagtcgacggtgggaggactgagacgaccaagcgcactgggcctaagtctgactatgtctacctcaagctgctggctaagctctaccgcttcttgttgaataagacccagatgatttgtcacgctgtcattctcaacaggctcttcatgagttgaaccaaccgatgaccaatctccatgcactgccttgtgaagattatggcaggtaacgagaagaacattgctggcattgatggcacacgctcagtatgaccaaatgatccacgtagctgcagcaatgaatgttactgccctttggttca

SEQ ID NO: 296740 - DNA, 240 bp, Zea mays
taatcaaataaatgccttattttaaaacttgaggagaccagcaaccaatttcgtgaccgggtgttttaacacggggccaacttattactcggctactaacggcactcttcaccacagcaagccccatcacatgtttgcaatggattattctttcattccctggaaacttcagcataaccaacccttcaaatcgggatctctccccagcatattaataatttcatgcccgcatggctaccc

SEQ ID NO: 296741 - DNA, 346 bp, Zea mays
atgaagcgattgcggccagcgacttacaacaaccaatttcccagttgccacaggaatcgttggaacatttaacaatccaaaccatggcaacacgactgcgacaactattcgtaccaggactgagccagctagccatggtgaacgctgccggctacttgctacagcagctgcttgcatcagacccacttgctctggcaaacttagatgcaaaccaggcacaacatcagctgcaacagctgctgacaacgctcaatgaactagccatggcgaaccatgccatctacctacaacagcaacaactgctttcatctaacccgctcgctgtggccaatgcacctacatacct

SEQ ID NO: 296742 - DNA, 365 bp, Zea mays
aaccaaggtgttcttacgtgatactagcgtcgtttccccctactcacttcttttgtttggtggttccatggtaatccaacatcagacaggagtggttgttatagatggatggttgaagctgtctgctgctgcacagactgctgttttattcaagcaacttcggatgactcttgatgctgttctaaaagaactgacaagaaaaccagagatggcaacttttgttgacaacgaagtggtcaggtccatcattcatttattgttagaagaagacaaggctcgataagcatgaattcatggcaatcctatcgatactaattttttagtaaaaacactatcggtgcctaaaattttttagtaaaaacact

SEQ ID NO: 296743 - DNA, 200 bp, Zea mays
  unsure (1)..(200): unsure at all n locations
cccacgcgtccgcccacgcgtccgctcttttagattgcttatgagttatagttcaataatgaagtttttgtgatgatangaaccgcggggagaactgcaaaaaccccttcaaagagggcgcgctctatgccacgacaaactacaacctgtcgaagcacccccagatcgacgtgcccaacctccacgtgatcaaactcata

SEQ ID NO: 296744 - DNA, 279 bp, Zea mays
  unsure (1)..(279): unsure at all n locations
agcacctgacgccacactatgcccgtggtgaaacgcctatcgcactactatgcatacaaccagactgctatgcattccatacgccacttgcctttggcaagacgtagcatgcataccatcatacaacaaccagttgcaacaagtttactgccagcgctcagtcaactagccatggtgaaccctatcgnctacctacaacagcaacaacttctttcatctagcccgctcgctatgggcaatgcacctacatacctgcaacaacagttgttgcaacaacag

SEQ ID NO: 296745 - DNA, 296 bp, Zea mays
aagcccacgcgtccgcccacgcattcgtttgcttttagtgccattattccacatttcctcgccttcgtttacttaaaataagcagcgaacacccaactcttcaatcctataagctacaacaagctcttgcatctagcatcttataacaaccaatttcccaattacaacaacaatccttatcacatttaaccatacaaaccatcttaactcaacatcaactatcacttaacctactatcccttattaaccctattccctactttcaacaacatctgctttcatacaacccactttct

SEQ ID NO: 296746 - DNA, 388 bp, Zea mays
accacgcgtccgcgttgcccttgctctcctggcgctcgctgcgagcgccgactgcagtacaggcggcggctgtggctgccagacaccaccgtttcatctaccgcctgcgatctatatgccgactccggtctatctgccggcgcagcagcagccgcagccatggcaataccccactcaaccaccgcagctaagcccgtgccagcagttcggatcctgcggagtcggcagcgtcggcagcccgttcctgggccagtgcgtcgagttcctgaggcaccagtgcagcccggcggcgacgccctacggctcgccacagtgccaggcgctgcagcagcagtgctgtcaccagatcaggcatgtggagccgctgaaccggtaccaggcgacatac

SEQ ID NO: 296747 - DNA, 277 bp, Zea mays
  unsure (1)..(277): unsure at all n locations
ngcgacagcaacaacagcaccgaccagcacngagccaacaagaagnggngaacccaggggccgnacagcaacagcaggggcaggcaagcaacccacaggcacaggcaaacggagcagcagaccaacaacaacaacaagagcaacaggnncggccagcgcncaggcaacnagccanggagaacccngccgccgaccgacaacagcaacaacagcngncaacnagcccgcacgaggaggggaaagcaccnacataccngcaacaacaagggcngcaaca

SEQ ID NO: 296748 - DNA, 382 bp, Zea mays
gtgggttggcttcgcctccccctccggttcgttttcgggttcgtgaggttctccggggttcggtttcgggggtgagcggatcgagatggcggcgtctgatgttgagtaccgctgcttcatcagcggcctctactgggccacggactaccacttgctacacaacgccttcagcacctacagcgaggtcctcgagtccaagatcatcctccatcgggagacgcagaggtccctcggcttctgcttcatcaccttctccacagaggacgcgatgcggaacgccatcgagggcatgaacggcaaggagctggacggccggaacatcaccgtcaacgaggcccagtaccgcggcagccgtagaggctgctgctgtgggtacagtggt

SEQ ID NO: 296749 - DNA, 398 bp, Zea mays
gggaatcgcaccggcagggccgcggccggcttgcgtcgcactgctgcgactaggacggctgggacttaccttcgtcagcctacgatgcgacgccgcgccaaaacgaggaatcctctgaagacaacgacgacaccagcgacgcaacagcgggagacgaaccaaaaaaggaatccggaagcaggcaaccaggaccaatggcaaggatcaatgccttccaagtttaacctataccagctttccgtgcagcaccaagtggatccgtactgatgcaagaaggacagcaattggcttagacttggatcttgattcacttgaatggggccttgaaaacaacctaagcaagattggaactgaagggtattcaaaaatgtagcttttccatggaaatgttttacaac

SEQ ID NO: 296750 - DNA, 396 bp, Zea mays
caccattgatgatgccgagcatgatgtcaccaatggtcttgccgagcatgatgtcgcaaatgatgatgccagaatgtcactgcgacgccgtctcgcagattatgctgcaacagcagttaccattcatgttcaacccaatggccatgacgattccacccatgttcttacagcaaccctttgttggtgctgcattctagatagaaatatttgtgttgtaccaaataatgagttgacatgccatcgcgtgtgactcattattattaacaataaaacaagtttccttttatcaaaataaaacgatgccatcttaataaaagataacataaactaagctacaaaaagtccaaagtacatggtttgtaaaaaaaaaaaaaaagggcggcccttttaaaggat

SEQ ID NO: 296751 - DNA, 306 bp, Zea mays
cgagctctcaattttttacctatccaccgttctcaccacccatcagttctatttcacgagagggacttcaacttcgtagtgttcttcgtcgacaaccgacaaatcgtctccttctccctagacaagaccatcaagctctggaacactctcggcgagtgcaagtacaccatctgcggcgacctctgctgcagcaacggccacaacgggtgggtctactgcattaggttctccccaaacacctttcatcccaccattgtcttcggatcctgtgacacacaccgtcaaagtctggaaccttaccaactg

SEQ ID NO: 296752 - DNA, 337 bp, Zea mays
acgcccacgcgttcgctgcaacagcagttaccattcatgttcaacccaagggccattacgattccacccatgttcttacagcaacaagtttgttggtgctgcattctacatagaaatatttgtgatgtaccgaataatgagttgacatgccatcgcgtgtgactcattattaacaataaaacaagtttgctcttattatcttttaaaaaaatacaactgacaccgacagaacatgtgccgacaacggttcaatctgccgtcgtcaccatgccactactctacttaaccgtcccggccttaacctcattcttcagtcacacccatgcccgttgccaac

SEQ ID NO: 296753 - DNA, 204 bp, Zea mays
cccacgcgtccgacgcatattgcaccagtttatccatctagaggccgtcgacaggggaatggatgtctttttcgtgtagcagcatccaccgccgtctcatcctctcagccgtcgtccttctcttcgtgctcgcggctgccagcgccagctccggtaccttctgcgtgccggggtggtccatcccgcacaacccgctccctatct

SEQ ID NO: 296754 - DNA, 193 bp, Zea mays
gggctctgcgccgccggccacgctggccgagttcacgctcgacggcagtggcgggctggacttctacgacgtcagcctcgtggatggctacaacctccccgtgctggtggagacctcctgttgctcatgctccagcgggccggcgttgttcgcggcagccgggtgcgcatcggacctgaacgcgatgtgcccc

SEQ ID NO: 296755 - DNA, 330 bp, Zea mays
tcgacaagattgttgagatctacctgctttctctgcctgtcaaggagcaccatatcttggtgactttcttacctttgctcagggactacgtgatgaatatcactcccgtccataatcataccctctcctgtcagctcactctcttcaaggccttcgtcgtcgtctgctaccgtgactgccacgtcggtctcgacgtcaagtgctccaaggaggtcgccaccgccatccttgtcgccatcatcctgtccaagctctcggtcgtgcccgtcatgaagtgctactgctgaaacaatatctgccagccttacactgtgccctgcaaggtcacct

SEQ ID NO: 296756 - DNA, 342 bp, Zea mays
  unsure (1)..(342): unsure at all n locations
acccacgcgtacgtgactgtntcgaactctnctgcntacctacaacatttacaacanttacttaatccactggcnnttgctaacttataaatcgttgccgtcctacaacancaacaattnctttccatacaaccatttctctttgatgaaccctgccttgttgtgtcatcaacccatctttttattttccatcttttatattacatattataattactctataatggtaccctcatatcctcatctttttcctataaataatcaatttttttcatttatattttattaaatcttatctattattcttatcatctcttatactcacatctcatactatcttta

SEQ ID NO: 296757 - DNA, 371 bp, Zea mays
cccacgcgtccgcgatcccggcccggcggcgcgtacgtcgacgaggaggaggaggacgtgcgtacgcagagcagctgctggcaccatggctcccgtgagcatcagcgctgttccgttcctcccgacggcggcggagggggagacgaagctgcgcgcgtcgttcgtgcgcgaggaggacgagcgccccaaggtgccgcacgaccgcttcagcgacgaggtgccggtggtgtcgctcgagggcatcgacggcgcgcggcgggccgagatccgcgcgcgcgtggccgcggcctgcgaggactggggcatcttccaggtggtggaccacggcgtggacgccgcgctcgtggccgacatggcgcgcctcgcgcgcg

SEQ ID NO: 296758 - DNA, 298 bp, Zea mays
agatacatacacaatcactatatgaacttcaatctactgaacagcatgagggcaccacacctttattatgaggcaatcataaggaaaaaccctgacgacagtaacagcatccatcaaaccagcatgaatactgtttgatgcatggatctgtatccagcccacgatgaacacaggactaacaactagacacagagccaccttgcaatgcaacacacagaaggacaccaacacacacgacaccaacgaagataaaccctgtggactaggctaaacatcacgagaccaaacacgataactt

SEQ ID NO: 296759 - DNA, 235 bp, Zea mays
cgtggcttcgagccgccgccgcatccgtcttgcctaacccaacaacccccccaacacatgtttctgtcgatctcaaccatggcggaggtttttcattaacaagacaccccgaagctgttcaaccgctggaccttcgatgatgtccaagtgaacgacatctcgctgaacgactacctcgctgtgaacgccaccaaacacgccatgtacctgccccacaccgcggggcgttacttca

SEQ ID NO: 296760 - DNA, 368 bp, Zea mays
ggcttctcctccccctcttaccaagtcctcctcgggttagggttccttagggttttgtggaggggcgagggcggcggctgatgtggagtaccgctgcttcgtcagcgggcttgcctgggccaccagcaacgagtcgctgcagaatgccttcgcctcctacggcgagatcctcgactccaaagtcatcaccgaccgttagacgcagaggtcccgcggcttcggcttcagtaccttctgctgcgagaactccatgctcgacgctatcgacaacatgaacagcactgagctcgaaagacgtgacatcacccttgaccaggaccagtcccgtagcgataaccgtagcggacactgctaaggttgacgctgct

SEQ ID NO: 296761 - DNA, 449 bp, Zea mays
attttgaacattcagaaacacacctagcgaagcgcactagcaacgacctaacaacaatggcgaccaagatattatccctccttgcgcttcttgccctttttgtgagcgcaacaaatgcgttcattattccacaatattagttatactcttaatgtcacgatgtatatgtttgattaaattgtttaatagatataatcaaagataaataacttgcatggctccgtaggatattaggtgtatcttgttcatgatcactaatggtcctcataggcaccatttgatttgctgctcccattgtctcaatttccattgtattgtcatcgttgacccccgacgctcgaaattctgcaggtggtgttacaatatgtctccgtggactcgtagcacagtttggagatttaagtcttagggtgagcgctgttggtagaccactctctgtgcatgatgca

SEQ ID NO: 296762 - DNA, 450 bp, Zea mays
cgacccacgcgtccgcccacgcgtccgcccacgcgtccgcccacgcgtccgcggacgcgtgggcttggatgaatcagatgatcatgggggaacgcggacccagaaggctatggcctgtttgctttcgatttccttcatcatccttcaattcaggcaaagctcggttgtaaggtgtccgcatgatgaccacatggattcagaagaattgcttgtttactcggccctcttcccgcactcctttgttcctttgctcatgtagtatagatgatagacttgaacaacatcaataaacgacattcaaaggccatgcagttagctcttcagtttgtctgctgtttgtttttcatggggacagcccgaaaggtcggtgaaacgttcaatgtttcgtgaaatgtccgaaaacagtcagtgttattactctgtagattccagctcgctcaaaactattca

SEQ ID NO: 296763 - DNA, 360 bp, Zea mays
cccacgcgtccgcggccggggaagagcgggcggcggcgcaacaggaagcagcagcagcagcggcagcagacggcggcgaaggaagaagaagaagaagaagaggaggaagatgaggacgaggaggaggagcgtgacgcgacgatcccggaggtggtgacgaaccggatgatgcggcgggtgggcgcgtcggtggggcttccgctggcgctgggcgtggggttgttcccggtgttctactacctgaaggcggtggcgaaggtggacgtgccgacgtggatccccttcggcgtgtcgttcgtcttcttcggcgcggcgctggccggggtgagctacggcatcctgtccgcgagctgggacccc

SEQ ID NO: 296764 - DNA, 221 bp, Zea mays
cgacccaccggcacccacgcgtcctaccacacctccttcacgcttccagctataacgtctgctagagtcaacagcgttcccttcaacactggatctgctaaagcttttgacaaagtgcttcctgtccttaacggaaaattgactggaatgtctttccgtgtcccaaccatctatgtttctgttgttaatttgactgttaaccttgaaaagtcatcaaccta

SEQ ID NO: 296765 - DNA, 287 bp, Zea mays
cttacacattacttacctatacccattaccaacattccacactttctccatacaaacacttcaataatcttttaacacccacttatgcaaacctataatctacatcaaacactatcaccaaacatcttataacaaccacttcccctaactctacaccaatcctaatcacatcttaccattcaaaccatctcaactcaacatcatctaacactaaaccacctaaccatctttaaccctatctcctacttgcaacaacaacctattctcattcaacccacttatctttt

SEQ ID NO: 296766 - DNA, 356 bp, Zea mays
cccacgcgtccgcggacgcgtgggtctagatcgcgagcggcgcccttttttttttttttggagtgattagggcattaaaacaaccaaaatagcacaaaacatagtcactgcagttctgaagcgtagaacaatccattgaagaccggaacatgctcccaaatcatcctgctacaaaacttggtacagcaaggtaacaaacaaaggtttcacagtttgatgattttgacaaatgggactttcgctgcaccgcagcaccttacgccttgagcttaccaaagaacctctgcttctcatcggtagtctggaagcgaccgtgcccaaatttggacgatgtgtcaatgaacttgagcttgatc

SEQ ID NO: 296767 - DNA, 301 bp, Zea mays
tcttcatgtcatgatcctttacctttctcattcaaccacaatacttacctttctgccaacgtctcttttttaacgctgacaccctcttacaacttcaacaataacttccattcaaccaacttgcttttacaaacccatcaccttctaccaacaacccatcattaatagtaaccctttttatatttaatataaattataaatcaataataaaattttttgtctgataaaaaaagcttcccacaaataacaaagtacatttctaaaaaaaaaaaactaaatacccgacgatctacattatcca

SEQ ID NO: 296768 - DNA, 315 bp, Zea mays
  unsure (1)..(315): unsure at all n locations
gaactctcctgcttatttacagcagcaacaactactaccattcagccagctagctggtgtgagccctgctaccttcttgacacaaccacaattgttgccgttctaccagcacgctgcgcctaacgctggcaccctcttacaactgcaacaattgctgccattcaaccaacttgctttgacaaacccaacagcattctaccaacaacccatcattggtggtgccctcttttagatttcttatgagttatagttcaataataaaagttttntgtctgatgtttgtggctttcccagaataagaaagtacatttctag

SEQ ID NO: 296769 - DNA, 335 bp, Zea mays
ctctcctgcttattacatctcagctttactaccattcatccatctagcgcgtgtgagcccttctaccttattgacacaaccacaattgttgccgttctaccatcacgctgctcctaacgctggcaccctcttacaactgcaacactctctgtcattaaaccaacttgcttttacaaacacaacatcattctaccaacaacccatcattggtagacccctcttttacatttcttatgattcataacctaatactcaaattatgccgactgataactccatgcttgccaaaaataacaaagtacatttatagactaaacatcacaaaaaaccagtcc

SEQ ID NO: 296770 - DNA, 327 bp, Zea mays
aataccccgacccacccactcatcctaatgcactatcaacaatacatcatcaatcttacaccaacatattttccctcctggttctcgttgctctttatacatgtcttgctaacactacaattttccctcaatgctcacaacctcctatagcttcccttcttcccccataccttccatcaatgatagcttcactatgtgaaaacccatctcttcaaccctataggctccaacaagcaatcgcagcaagcaacatacctttatcacccttgtttcaacaatcgccagccctatctttggtgcagtcattgttacaaaccatcagatcac

SEQ ID NO: 296771 - DNA, 532 bp, Zea mays
  unsure (1)..(532): unsure at all n locations
taccggttccgnngaattcccgggtgcgactccacgtcgtnnccgctgaagaagccagctnnggatggttcctagggtacccagcagactctttatcanngaaaatttagtgcgtgggtactnnncgaggannttatgtacagtncnnacaatatccattngnnacaacatnntgtaanntcttgagtggggcgaatcagcnntttatcggnnatgaattacatggnnaacttgtgcagaaacantgtcgaggaccgatgnctgatatcacttatatcanntgtgctcctgttgatgagaaagccgagcttctaaanaatgggctttagtgaagattggatcatannctggacgtgtacccttcaattctttgaannaaaccaaagggtgctgattntgaattctatgagaaagttgagaccaacttcctgagctatgnnctatagatgatgncacagaaatatccataccttgcatcaatgggcatttatgtcttcaagaaagatgcacttttagaccttctcaagtcaaa

SEQ ID NO: 296772 - DNA, 349 bp, Zea mays
tggagggaagggagaagggtcgctggctctgcaggcgtggaggcagtacctgctccagctgcagcaacatcctctccgcacaaagctctttggttttgcgtatggtggcccatttggacatttcttgcacaaaattttggattacatcttccaagggaagaaggataccaaaaccatagcaaagaaggtgttgctggagcaagtgacatcttctccctggaataacatattgttcttgttctattatggatatgttgttgagaggaggcctttgaaagaggtgacgaccagggtgaagaaacaatacccttctgtgcaactcatcgcttggatgttttggccgatagtt

SEQ ID NO: 296773 - DNA, 423 bp, Zea mays
  unsure (1)..(423): unsure at all n locations
ggtgaatncaangtataatggtcgcttctctcatggcgtggaagcactacctgctagacgttttcaacatcctgtgcgcacaaacctctttggttttgcgtatggtggcccattcggacatttcttgcacaaaattttggattacatcttccaagggaagaaggataccaaaaccatagcaaagaaggtgttgctggagcaagtgacatcttctccctggaataacatattgttcttgttctattatggatatgttgttgagaggaggcctttgaaggaggtgacgaccagggtgaagaaacaatacccttctgtgcaactcatcgcttggatgttttggccgattgttaagtgggataaccaccaggacatgcctttacaattccgagtgatctttcacacttttgtcgcatgttgttgggg

SEQ ID NO: 296774 - DNA, 354 bp, Zea mays
ccacgcgtggcggagacagagacccgatctacaccatcgatttttttttctcacttgccctcacttctcctcgctatcgtatgttatcaccacctccacccatacaaccttcggctgctgctaccacccaccaccgccgattcatctaccgactccgtttcatctgccacctcctgttcacctgccacctccagtgcatctcccaccgtctgtccaccttacgacgcctttccacctgccacctccgttccatgttccgccaccggttaatatgaccccgtcaccattccactaccctactcaacctacccaacctcagtctcatccccagccacacccatgcccataccaaca

SEQ ID NO: 296775 - DNA, 306 bp, Zea mays
  unsure (1)..(306): unsure at all n locations
aactactaccattcttctttttanctagtgtgagccctgctaccttaagaactcttccacattttttgcccctctaccatcacgtttctcctaactctttcaccctcttacaactgcaacaattgcttccattcaaccaacttgcttttacaaacccatcatttttctaccaacaacccatcattgttggtgccctcttttatatttcttatgagttatagttcaataataaagttttttatctgatgtttgtggcttcccagaaataataaattacatttctaaaaaaaaaaaaaaaaatgtctt

SEQ ID NO: 296776 - DNA, 341 bp, Zea mays
gaggaccgcatcctcttgagcattcctctcatgggttaatccaacgcttcttccatgcatgtctttcaacatttgtctccctttctccaacttgctcttacatacccatcctcctgctaccaacaacacatcattgatggtgccctcttttagattgcttattagttgtaattcaataataaagttttttggatgatgtatgtggccaaccataaataagaagttacatttccagattctaaaaaaaaaataataaacaaaatttatataccttaaaatttatcatttccaaataaacaaggacaggggttatacattttaacttaaataaaaaaaaacat

SEQ ID NO: 296777 - DNA, 438 bp, Zea mays
  unsure (1)..(438): unsure at all n locations
cgggacggaatggccggacggacgcgtgcgaggggtgttaactcctactgggtgaattaggatagtacctacaagtattttgagatcagccgtgtggacgttgcccacaaagccatcaaaactgacccgaggatcaactggctatgcaaccctgtgcacaagcaccgcgagctccgtggcctcacctcggcaggcaagaagttccgtggcctgcgtggcaagggccacacccaccacaagaacaggccctcaaggagagccacctggaagcgcaaccagaccctcntcctccgccgttaccgctgagcacctctcccaatcatgacaagaagggtgcctggctctggttgcattttcaaaagtttgctatttgtgttctnggcacttttaatgttagaagtcaattatggagcatatgtcatgaactatttgcaattc

SEQ ID NO: 296778 - DNA, 337 bp, Zea mays
  unsure (1)..(337): unsure at all n locations
gccgacgcactcatacgcaactagcaacatanaaatcactttagtgtattaacaanggcagccaaaatatggggcttgctaattctaaatggtctttcggcaaatacaactaccncaaccattttcccacaatgctcacaaactcctataacttcctttcttcccccatacctctcaccatctttttcttcagtatgtgaaaacccaattctttaaccctacattatccaacatgcaatctctacaatcatcttacctttattacccttgttcctccaacaaccttcatccctattacaacaattaccttttgtgcattttttggctcaaaacattt

SEQ ID NO: 296779 - DNA, 277 bp, Zea mays
  unsure (1)..(277): unsure at all n locations
cttctctcccctcggtcggttcgtttcggaggtctcccanttcggattcgtggattagcagatcgagatggcnncntcagatgttgagtaccgctgcttcgtcggcggcctcgcctgggccactgacgaccactctctccacaacgccttcaaaaaaataaaaaaaaatcctcgagtccaagatcatcctcgatcgggagacgcataggtcccgcggcttcggcttcgtcaccttctccacggaggaggcgattcggaacgccattcagggcattaa

SEQ ID NO: 296780 - DNA, 486 bp, Zea mays
  unsure (1)..(486): unsure at all n locations
ggcggagacccaactagcaacattagaaagcacnaatatgtgtactcnacccaatggcccagccaaaatatttgtggcctgggcttatgctccttgggtcttgtctggcaagtgccctgctaccgcgaccccattttcctcgcaatggctcacnaagctcctatnagcttcccttcttcccccgtaccctctcaaccagcggtgtcttcggtattgtgaaaacccaattcttcaacctctatanggatccaacccaggcaatcgcnnagctggcatcttaacctttatcaacccttgttcctccaacaatcatcagccctattacagcagttacctttggtgcatttattggcacaaaacatcagggcacaacaactacaacaacttgtgctagcaaaccttgctgcctactctcagcaacagcagtttcttccattcaaccaactagctgcattgaactctgctgcttatttgcaacaacaacta

SEQ ID NO: 296781 - DNA, 450 bp, Zea mays
ggcggcgcctgtcttcctcactatccctaccatggacgaagaaggcgccccccccgcccggcccagcctccccttcccgcaccccaccgcagcaggagccgaagcccgcggtcctacgctggcgcccacccgtccgcgtgacctcggagtttgacagcgaacgacggctcttctcccaccgcctctcctgccgcgtcctcgacggcctcgccaagctccgcctccgcattagccatggtgctgggggaggagggattctctggggcccgactgatgtggggctcctggcgcggaacttctccgtcgtcgtcgaccctgcaacccgaggcgccgtgctgcgcggcgccgtcgacctcgccggctcgctgcgactgcgcgcctcgcacaacaccaaaatgttaatgtgtctggtttctcaggagcaacaaggagaagtggcaattactgcaa

SEQ ID NO: 296782 - DNA, 417 bp, Zea mays
tccacgcgttcgcagaaacacacctatcgattctcactatcaacgacctaacaacggtggggtgcaatacattatccctgcttgcgcttcttgccctttttgtgagtgcaacaaatgcgttcattattccacaatgctcacttgctccgagtgccattattccacagttccttcctccagttacttcaatgggcttcgaacacccagctgtgcaagcctataggctacaacaagctcttgctgctagcgttttataacaaccaattgcccaattacaacaacaatccttggcacatctaaccatacaaaccatcgtaacgcaacatcttccagcactgagccacctattcgtggtgaaccctatcgcctacttgctacaacagcttcttgcattcaacccactttctttggcaaact

SEQ ID NO: 296783 - DNA, 260 bp, Zea mays
ccacacataggctgacgcgtgggcaacaacttgtgctcgcaaaccttgatgcctactatgggcgacagtaaactctgctattcaaccaactagctgcatagaactatgctgcttatttgctacagcatctactattcagccagctagctgctgactacacccaacaatctctctgattcaaccaactgacatgattgaactcttacgattatttacagcagcgacagctactaccattcaggctgctagctggagtgagc

SEQ ID NO: 296784 - DNA, 185 bp, Zea mays
gtcaaaccctgctgcctacttgcaacagctttttccattcaaccaactgactatgtcgaggtctgcttcatacctacagcagcgacaacatttacttaatccactatcactagctaacccattgatcactattcttcctacatcaataacaatttctcccatacatccaattcatttatataaac

SEQ ID NO: 296785 - DNA, 382 bp, Zea mays
ggattgagctgcctatgaaccatgttttgattaacctgtcccatatgattctctacgagaagttttcatgtacacttgagcaaagctcttactgcctcatcatcttctaggacagcaagacttatgagatcttccctgccacacttgaaacgatcactaatgtttgcaaggttttggacagcctgtacatgagatcggccaatatcatggcctgaaagatgcattgggaggcctatgtgtcgctagcttcttttcttggtctattgtcagttcattttaccaaactttagctgttcaatatacatctcattgtggatttatcctaatttgtctctttgttttgcattcttttagctttttcaattttttcatgttttttatt

SEQ ID NO: 296786 - DNA, 229 bp, Zea mays
cagcaagctgcatagatagcgtgcatccatactcaacaatcgagcatcaatggcatccaaggtattctccgtacttatgctccttgctcattctacatgtgttgctctcgcgacaattgtccctctatgctcacaaggtcctagttgcttcctgactcaaccatacctgccatccgttatacgctccaatatgtggataacccagctattcaaccatatctgcttcaac

SEQ ID NO: 296787 - DNA, 427 bp, Zea mays
cccaccaactcctcaaagtagcggctggcaatggtgttgatgaggctttccaaatgctgtggtgtcgttgttgtttcttgcggctctgacacgattcacccatggatttgtcatgtcacctcgcactttgcttaaccgcttctctcaaaacagcaattattatttaaccactgaagagcactggttctatcagactctcgatcactattctccttacgaccaccggcaatttaagcaacgttactatgaattccttgactactttcaagttcccgatggacccattttcttaaaaatttgtagggagtcttcgtgcaatggcataagcaatgactatctcagcgttttggccaagaagtttggggctggcgtgggttcacttgagcatcgttactatgggaaaaacagcccctttaagtcacacaca

SEQ ID NO: 296788 - DNA, 264 bp, Zea mays
cccacgcgtccgcgcggcgacgcaggcccgttccgttgcgctggagcgcgacctgtgcacggtggactgctacaacgcggtgctgcgcgcccgacacgccgagctggccggccgactgcagtcgctgggcggcgttctctaggtgctgcagatggccggcgccgacggcgacatgcacgagatggtcactgacgacgacatgctcctccttgacagacgtgctactgcctgatgcaagttatcgtactctgagaatcttagcct

SEQ ID NO: 296789 - DNA, 473 bp, Zea mays
ggaatattatatcagttactgtagcttggatcaaaggagaaggggggttttactactagatattgaggcaacaaacacagtagggctgttgtttacataaatttgtcttaccttgtaggtctttcaatctggtttctatctatcatatactttatttccggtgttccagcatcctatgtgatgtggtatcgtcctctttatcgtgcgacaaggtagttttcaatttgattgaattcaattcttatggtatggcatggataattgatattcaagatgatttcagccttttcctaaactataaaaaattgttaatgtcatccacattggctttattgccattgtgaagcattaaacattttctgtagcaacagtatgtacatctggggactctgtgagcagaatgtaagtcaattaatgacaacgttgtcattttgaaactgaaaagcttgtgggtgcaaagtttacattattaa

SEQ ID NO: 296790 - DNA, 269 bp, Zea mays
atggaactaactcttcttcaaaagtgatcactcatcatcctatcattatcattagtatctcaaaaccatgctgttatctctacatgtgcacacgctcaattcctcctcaattcatcttttaaaatattacgctaaatacatgccactcacattgtattatctgtatgttcacactctcacatccactacagtgtctttgtcttgacaccaacaacttcttctacaaacctttcaagtccatatatgactataaaaactaatatctctct

SEQ ID NO: 296791 - DNA, 219 bp, Zea mays
cttcaccacctcatacctaccttcacccatcactgatttcccactcaataatcaactcaaccctcttgaaaatattaccacatattatatcttgacacacatcacaacatttactttaataagatcactcccaacataaaattaaatatgccctctcactcctccacaatctctcaataacccctacatacagattacaacaatcatctcatccccata

SEQ ID NO: 296792 - DNA, 140 bp, Zea mays
catcttctttgcgctctttctaaattgagccttcaccatctcatacctacctatcaccatcactgatttcccactcaataatgaacgtaaccctcttgaatatagtaccacatattatatcttgtcagacatcacaacat

SEQ ID NO: 296793 - DNA, 226 bp, Zea mays
tgtttcggtttggtggaccgcatgttgccttaattgcctgttaatattcagagcagcaaggtgcttcatactaacaggcaattaaggcaaggtgctgtttcggtttggtggaccgcatgttgcagataataaattagttgttttgtcaaaaaatacaaaaaataaaaaatagaaaaaaaaataaaaaaacacaacatataaaacataaaaagctaaaacaagcaat

SEQ ID NO: 296794 - DNA, 310 bp, Zea mays
catagacagtgtcaatcatattctacaatataccatcatatggcgaccaagggatttacgggcattatgctccatgctgtttctacatgtcttgttaacgcgacaattatattatcaatgctcacaagcatcctatagctctacatacttgaatcatactttccatcaattatagcttctatatgccaaaacccagatctataaccatatacgctgcaacaagcaatcgtagctagcatcatatctttatcgtccttgaagttcatacaatttcagccctatcttaaggcagtcattgagacaaaccatc

SEQ ID NO: 296795 - DNA, 438 bp, Zea mays
  unsure (1)..(438): unsure at all n locations
acgcaacaagcaacatagaaagtgtaatccattttcaacaatatagcatcaatgtctaccaatgtattatcggtcattatgctcgttgctgtttctacatgtgttgctaacgcgacaattttccctcaatgctcacatgcttctatagcttaccttgttnctgcatacctttcatcaattatagcttcaatatgtgaaaacccagctcttcaaccatataggctttatcaagcaatcgcagcacgcaacatacctttatcgcccttgttgtttcaacaatctccagccctatctttggtgcagtcattgttacaaaccatcaaggcacaacatcttgaacaacttctgctacctctgatcaaccaagtaactctggcatacctttctccctactctcagcaactacaatttcttccattcaaccaactgtctacactg

SEQ ID NO: 296796 - DNA, 358 bp, Zea mays
cgggttcgtgaggttctccggggttcgggttcgtgggtgagcggatcgagatggcggcgtcagatgtggagtaccgcggcttcgtcggcggcctcgcctgggccacgtacgaccactccctccacaacgccttcggcacctacggtgaggtccttgagtgcaggatcatcctggatcgggagacgcagagatcgcgctggttgggcttcgtcaccttctccacggaggaggcgatgcggaacgccagaggagggcatgaacggcaaggagctggacggccgcgtcgataccgtcaacgaggcccggtgccgcggctggcggggaggcggcggcggtgggtacggtggtggccgtggag

SEQ ID NO: 296797 - DNA, 260 bp, Zea mays
gcgcccacgcgtccgaacacgcgtccgcttgcttctagtgccattattccacagatccttccaggaattactgtaataggcttggaacacctagatgtgcaagccaacatgcgataacacgcgcttgcggcgagctcttacaacaacctattttcctattgcaacaacaatatttgtgacatctaacaatacaagcgattacaacacagcagcttcaacaggttctaccagcactgagccacctatccatggtgaaccct

SEQ ID NO: 296798 - DNA, 372 bp, Zea mays
caagcaatgctagtggcatcatacgtgagacttgcgggtgggacccgcctgctagtgcatgatgtagatggttggcgcgagatggtcagttgggcccagggtcgcgcacttaatgggccgaggcaggatggggttactagggccgcgtagaagcgaagccgttccaagagcaggtccgctgcatcggaagctgtcttggaccagtagaatccttgtctaaaaactttgcgaaggagtggcatggatgcaaggtgggctccacatattcctaagtgtatttccatcatcaattcttgacctttggctctggatagacactttagtaatggggagtatactccttgcttgaacaattcaacttcagactgtgtc

SEQ ID NO: 296799 - DNA, 260 bp, Zea mays
gcgcccacgcgtccgaactttcccaactatatttaatgcctataaaacgttgatgatgcttacggagatcagaatatatgggcatgtatgtcgatcctccacacggatgtcttatccaagttcaacaccgatatgtctaatcactattacaccactgatatctggtatatcatcccttccatccatccctataccagtttgatatcaggttctatcacctatatttctgagaactatcatgatcaaggatcaattggtta

SEQ ID NO: 296800 - DNA, 379 bp, Zea mays
cagaaacacaccaagcgaagcgcactagcaacaacctaacaacaatggctaccaagatattatccctccttgcgcttcttgcgctttttgcgagcgcaacatattcgtgtattattccacaatgctcacttgctcctagttccattaattcacagtttcttttatcagttacttgaatggccttcgaacacttaatttttcaagcctataggctacaacaagcgattgctgcgagcgtcttacaacatccaattgcccaattgcaacaacaatccttgtcacatctaactatacaaaccatcgcatctcaacagcttcaacagttcctaccagcactgagccacctagccatggtgaaccctgtcgcctacttgcaaca

SEQ ID NO: 296801 - DNA, 448 bp, Zea mays
tgagcacgcgtccgcccacgcgtccggaggaagttcatccccatttatctggctcatggcatactgcagcatggggcattctaggatctcgaccagagaggagttgtctagctgtttaagctcgctacagagaggggccgaaaagttaggcctaacttgaaggtggacatatgtggagaacatggtggacagccttcatcggatgcttagttagccaatactgagatggattacgtaatcttgctccgctttcaggaaacccgatcgttatgctagctgcagctaatgtgcttgactgaggggctgcctgctagttggcaatctgctgttgtacaaatggagattaataatactactattacagaaccatatgctctgtgaagagtattataatcaaaatctcataaaaagctacagttccatctatttacttagattatgaaaaact

SEQ ID NO: 296802 - DNA, 385 bp, Zea mays
cactagagacagaggccgcttctatctccaagttgtccatcgcttcttcgagagagaggagctgcgatcatgcactgacgacaacgttcacgaagaacaagcagaacagagtacacgtgagagccttacacgctcgtgtctgcaaggacctgctgcatccacctggtcactttaatgcatttgtcttgcaccagcaccgcatgctcttcaacaagtaccatctcgggttattcggataggtgggtatgcactacttccacatactccgtaacagattctactggcccatgctcagtattgatgagctatggtccatcctaccacactaggtcaaggacaaggacaccggctgcaaagtgccattgctcgatgtcacccaggtcgg

SEQ ID NO: 296803 - DNA, 436 bp, Zea mays
cagatgcttacggtatttacgctagaagctatttctgtatgagatggtgtcacgacaattatacctcaacgatcactagctcatgtagcatgccttcttcaacaataccttcgatccgtggtaggtgcactatgagcaaaagaagatgctcaatcgtataagcctcaagacgcacgccgtctacggattaaacctttataacgatggtggtatgagcaacgacgaggactatatgaactgcaagtatttggacgaacgcacgaggctcagaagctgcagccactgctgctatcggcgatcaagacagacgctttagctaagctgcttccatgctgtcagcgacaactatttgttatatgcatccgactggccacagcgaaatctgttgttgatttggaggcaccagtattgccttctacactgctagctactgact

SEQ ID NO: 296804 - DNA, 339 bp, Zea mays
ggcagcattgaactctgctgcttattcacaacagcagcagcttccaccattcagccagctaggtgatgtgagccctgttgccttcttgacacaacaacagttgttgccgatctacctgcacgctgcgcctaacgctggcacccttttacaactgcaacaattgctgccattcaaccaacttgctttgacaaacccatcatcgttctaccaacaacccatcattgggggagccctcttttagatttcttatgagttatcgttcaataataaagattcttgtctgatgtttgtggcttcccagaaataaaaaagtacatttctcttaaaaaatttagcttt

SEQ ID NO: 296805 - DNA, 439 bp, Zea mays
  unsure (1)..(439): unsure at all n locations
acgacgcgtccgcggggctccgggcctgcatgaaggccgacgtgcgcgcgctcttggacctcgccgacgacgccaagcgccggaacgccgacatcatttccggcagcagctacgtcacgccctgctccgccaacccgatatacgaggccttcgggctcctcgacgacgccgcgcccgtcgacgtagacgcattctgcgcgcgcctagacgcgccgaccaaagtcagggagaccgtcaagacctacgcggagaagatgcacgacgtgatcgtctgcgtctgcggcgagcaggccaccagccagtggctgggcctggaggagcactcgttccaggactggccgagccagttccgcatcaacaggtacaactacacgcatgagacggtgggctgctncggcgtgcagacccacacagactagggctttctcaccaggctcag

SEQ ID NO: 296806 - DNA, 423 bp, Zea mays
cacagacgtctgctgcttatttgcagcaacaactattaccattcagccagctagctactgcctactctcagcaacaacaacttcttccatttaaccaattggccgcactgaacctcgctgcttatttgcagcagcaaatactactaccatttagccagctagctgcagcaaaccgtgcttccttcttgacacagcaacagttgctgcctttctaccaacagtttgcggctaaccccgcaaccctcttacaactacaacaattgttgccctttgtccaacttgctttgacagacccagcggactcctaccaacaacacatcattggtggtgccctcttttagattgcttattagttgtaattcactaataaacgtttttggatgatgtatgtggccaaccataaataagaagttacatttccag

SEQ ID NO: 296807 - DNA, 258 bp, Zea mays
cttactcgtattcaaacaacttgcagcattgaactcttccgcctatgtacaacagctacggcggctaccattcagccagcttgctgctgtgagccctgctgtcttcttgacacagcaacaatggttgtcagtctacctgcactcagcgcctaacatttgcacccttttacaactgctacaattgctgacaattaaccaacttgctttgaccaatccatcatcgttctacctacaacccataattggtagggccctctt

SEQ ID NO: 296808 - DNA, 243 bp, Zea mays
ctcaatcgtgagcggaccccttcttttgtttttttgatcccataaacaattaacgctaggatttatgcccatttacccagttcataactgctttacaactcattattatttccaatcaaagtgttttacatggttccatatacacattcataaatatgggaatgtcatactagcgatagcttaaaaaatgtataccaatcttttgttagcgaataccccaaagttttgactgaagatcctttt

SEQ ID NO: 296809 - DNA, 395 bp, Zea mays
cccacgcgtccgaccacgcgttcgggtgggttggcttatcctcccactccggatcgggttcgggttcgtgaggctctccgtggttcggcttcgtgggtgagcggatcgagatggccgcgtcggatgttgagtaccgctgcttcctcggcggtcttgcctgggccacagacgaccactcccttcacaacgccttcaacacctacggctaggtcctcgagtccaagatcatcctcgatcgggagacgcagaggtcccgcggcttcggcttcgtcaccttctccacggaggaggcgatgcggaacgccatcgagggcatgaacggtaaggagctggacggacgcaacatcaccgtcaacgaggcccagtcccgctgcggacgaggaggcggcggccgt

SEQ ID NO: 296810 - DNA, 399 bp, Zea mays
ctcacgcgtagcacatctaacatgtggcggcagacaaagatttgtgagggcgatccgcgctgagaagagatggctatgatcgccgcggcggcaggggcggccctttgcttcctggccctggtggccgaggccgactggcaaggccaggtcgatcggcagaggctgagggaccagcactgctgtcaggaggtccaggagagcgcgctcgacgcgtgccgccaggtcctagaccgtcagctaaccgccggcggctgcggcggcggcgttggtccgtttctgtggcggaccggactccgcatgcggtgcttccagcaactacaggacgtgagccgctagagccgcttgcgccgcatcccgagcatgcacagcggctacgaagaggccatgccggcgctggag

SEQ ID NO: 296811 - DNA, 320 bp, Zea mays
cgcgcgcctgggacctacaccgagcacgcgcgccgtatgaccgtcaccgccatgggcgtcgggtacgcgcttaatcgccatggccgaaccctctacggcttatgcggctaggcgtgccgagcggagattggtcggcattgggggtctcgtgttgctgcagttagcaagctggctgcgtggtccgaaaaatgctaaatactgttgaactgtaacgcggtgtgagcacatggtgtgtttgcttatagaaatgttgtcaatgctggcttgttttggactcaaacatgctccattctgggttcaaataagaaaaagaaacaaaa

SEQ ID NO: 296812 - DNA, 194 bp, Zea mays
gtgttgtcttatacatacccctccggttcctgttcagtttcttaaggttcttctagactcggagtcgtttttcagccgatctaaatttcgaccaaaaatctttaatacccctgcttcatactatgactctcctggtccactgacaaccactccctacacaacgccttcatcacctacagcgaggtcctcaaata

SEQ ID NO: 296813 - DNA, 457 bp, Zea mays
  unsure (1)..(457): unsure at all n locations
agcttcagtatgtgaaaacccagctcttcagccctataggctccaacaagcaatcgcagcaagcaacatacctttatcacccttgttgtttcaacaatcgccagccctatctttggtgcagtcattggtacaaaccatcagggcacagcagctgcagcaactcgtgctacctgtgatcaaccaagtagctctggcaaacctttctccctactctcagcaacaacaatttcttccattcaaccaactgtctacactgaacccctcttcttattttgcagcaacaaactattaaccatncaagccaagttagctactggcctacttttaaggaaacaacaaactttctttccattttaaccatattggccgcacctgaaccccgctgtttatttgcagcagcaaatactactaccatttagccagctagctgcagcaaaccgtgcttccttcttgacac

SEQ ID NO: 296814 - DNA, 444 bp, Zea mays
agcacgcgtatgtgaaaacacaggtgtacaggcctataggctccaacaagcaatggcaacgagcaacatacctttatcacccttgttcggtcaacaatcgtccgccctatctttgcagcagccattggtacaaaccatcagggctcagcatctagaccaactatggctaccacggagcaaccaactaggtgtcacaaacaagcatccctactctgcagaacaacaatttcttatcattcaaacaactgtctacactgaactctgctgcttatttgcaggaacaactattaccattcacccagctagctactggctactctcagcagcagcaacttcttacatttaaccaattggccgcactgaacaccgctgcttatttgcagcaccaaatactactaccatatagccagctagctgcagtagaccgtgctttcttcttgacac

SEQ ID NO: 296815 - DNA, 270 bp, Zea mays
ccctttcccatctcatgggatcagcatttggaatgtatgatcgtgccaatatcgaggtcttttgctatgcactcagtcaaaacgatggtactgagtggaggcagcgtattcggtctgaggcaaaacattttgtcgatgtttctgccatgactagcgataatatcggcgagcttatcaatcaagacaaaatacagattgtgatacatcttaatggctacacaaaggatttcgactcttatgaagtgactcctacacctcacgatgactttg

SEQ ID NO: 296816 - DNA, 414 bp, Zea mays
gcctgtagcgaccggtgcaccattcccgggttgaccgatgcacccacacttccagaggcgatggggcactccaacgtgtggtactggcaccccaagaactactgtcccggatcccgcgtttgccgggtgtgtgcgaaccctcatggactgatcaggaagtacgggctgatgtgctgcaggcagtgcttccgcagcaacgccaaggacattggcttcatcaagtaccgctgaagtcagctgggcgggctatctgaatgccatctcttggacagtgtagtagaggcgatgccacaattttaattactgtcatttagatgttcccttcagaactctgctatttaagtccgccatgtttgtgatggagaacttaagctttgtttgttatactgattatgagttacctgtgctttgctt

SEQ ID NO: 296817 - DNA, 331 bp, Zea mays
cggacgcgtgggcggacgcgtgggcggacgcgtggggcggaggcggctaccgcggtcggcgcgagggtggcggtggcggctacggcggcggtggcggcggcagctggagggactgatgtgtgggcccatcctggcttcggccgagttatcttatctatctatagtatcgagttaccgtgcgcttctgtcaccgtgttagtgtccgatctacctttggattacgtgatggtaccctgttgttcgctttggttgctcccgctatgaaacgagacgagagaagaatgagcaaggttgttgttcgcctcaaatcttgaaaacttaaatgatctac

SEQ ID NO: 296818 - DNA, 379 bp, Zea mays
  unsure (1)..(379): unsure at all n locations
gccgcactgaaccccgctgcttatttgcagcagcaaatactactaccatttagccagctagctgcagcaagccgtgctttcttcttgacacagcaacagttgctgcctttctaccagcagtttgcggctaaccccgcaaccctcttacaactacaacaattgttgccctttgtccaacttgctttgacaaacccagcagcctcctaccaacaacacatcattggtggtgccctcttttagattgcttattagttgtaattcaataataaagttttttggatgatgtatgtggccaaccagaaataagaagttacatttccagattctaatgtgaaaaaattaaaatntattnncnnaaattaanaantaactttttttt

SEQ ID NO: 296819 - DNA, 330 bp, Zea mays
gcggacgcactgaaccccgctgcttatttgcagcatcaaatactactaccatttaaccatctagctgcagcaagccgtgcttagttcttgacacagcaacagttgctgcctttttaccaacagtttgcggctaaccccgcaaccctcttacaactacaacaattgttgccctttgtccaacttgctttgacaaacccagcaacctcctaccaacaacacattattggtggggccctctttcacattgcttattagtcgtaattcaataataaaattttttggatgaagtatgtggccaaccacaaaaaagaaggtacattttcagaattc

SEQ ID NO: 296820 - DNA, 204 bp, Zea mays
  unsure (1)..(204): unsure at all n locations
attcgtaacaattgcttccattcaaccaactcgctttgtcaaacccatcagctttctaccaacagcccatcattggtggcgccctcctttatatntcttatgagttatagttcaataataaagttttttgtctgatgtttgtggcttcccacaaataataaagtccatttctaaggaatatatggactggcaacacaaacatac

SEQ ID NO: 296821 - DNA, 332 bp, Zea mays
gcggggcacaccagctgcagcaactcgtgctacctgtgatcaaccaagtagctatggcaaaccggtctaggtactctcagcaagagcaatcgtgtttcattcaaccaactggctacattgaaccgtgctgcttattggtagcaacaactattaccattcagccagttagcgtactgcctactatgagaacgacaacttttgacatttaaccaattggccgcactgaaccccactgctgaattgccgcaggaaattctactatcatttagccagatagctgtaggaagccgtgcttacttcttgacacaacatcgggggctatctttgtacca

SEQ ID NO: 296822 - DNA, 183 bp, Zea mays
gcgggcgcccaccatccgaaaagacttacatattttttggaagtcacaaacatcatccaaataacttgggtattgaactttaacttataagcaatctaaaagagggcaccaccaatgatggcgctgtggtagaacgcttttggcgttgtcaaaacaagttggttgattggcacaaattgttgc

SEQ ID NO: 296823 - DNA, 412 bp, Zea mays
caccgttccggggttgccggatgcgtccaggcatgcgtggcgttagaatatcgagggtgagcggatcgagatggcggcgtcagatgttgagtacccgcgcttcatcggcggccttgcctgggccacggacgaccactccctccacaacgccttcagcacctacggcgaggtcctcgagtacaagatcatcctcgatcgggagacgcagaggtgccgcggcttcggcttcgtcaccttctccacggaggaagcgatgcggaacgccatcgaggtcatgaacggcaaggagctggacggccgcaacatcaccgtcaacgaggcccagtcccgcggcggccgtggaggcggcggcggtgggtacggacgtggccgtggaggcggcggctacggccgtggcggtcgccgtgatggc

SEQ ID NO: 296824 - DNA, 473 bp, Zea mays
tgttctgggacgtgcacccgggctcgtcggcgatcctggaccacgtcgacgccgtgctcaagctcaagcctgagaagctggcggcgagcagacgtgtcctcagcgagtacgggaacatgttcggcgtcacggtgatcttcgtgctcgacgagctgcgccgccggatgacgaatggggaagaggagggggcgcctgcagagtggggggtcatggtggcgtttggacccgggctcaccgtcgagacgatggtgctccaccgatcaggcaccccagccgagacgaaactaggtgaggcatgaaaaggtggacgtgaccaatttgtgttggaacttggatcacgattgcatcattgcatgcatgttacttggtcaacatattccgactatgtcactattcttgacttcagcctataataaattcaactacataaacaactgttaaacttgaaaaaaaaaaaaaaaaaaagggcgggc

SEQ ID NO: 296825 - DNA, 310 bp, Zea mays
cgtacggacccgcaagccaatgccgcgcccaaatcttcgtgacagatcaatcgttcgagcaagtaacgtggctggacgcaatgggcaccggggggaaccgagcgaccaatacgactggaccggcgcaagaacatgaggccaacggcaacggcaacggcgaacaaaaaacgcgccacttcgaggtcgggcacaagagcctggttaagagcgacgacctttaccagtacattctggacacgaacgggtacccgcgggagcccgagagcatgaatgagcttggcgagaacaccggcgagcacacatggaacct

SEQ ID NO: 296826 - DNA, 314 bp, Zea mays
gacgcgcaagccaatgccgagcccagatctgcgcgacatatcagtcgttcgtccaactaactgcactggacgcaatggccaccggggcgaccgaagctaccaagacgactgcaccggcgcatgagcagcaggccaacggcaacggcaacggcgagcagaagacgcgctactccgagggtggtcacaagagcctgctcaagagcgacgacctttaccaggacattctggacacgagcgtgtacccggggagccggaaagcatggaagagctgcgccagatcacctgcaagcacccatggaacctgatgaccacct

SEQ ID NO: 296827 - DNA, 298 bp, Zea mays
acgatttgttctgggcgagggaaatactttcaagtttcttttcttttcttttcctcacgtgtactgggggcacgttcttcgcttcggatgagaggattaaggctgtgaggcacatgattatggctcccacacttgatctgaggcagcaggcgctggatcgccttttgccttaccagaggtctgacttcgaatgcattttccgtgctatggatggactttcagtgactattcaacttgtggaccctcccctacacgagttccttgcaaaaaggaacgtcgaggaaatcgtgcgtgaact

SEQ ID NO: 296828 - DNA, 383 bp, Zea mays
ccaacctgccgccttcggacgcgtcgctgccggcgctgctgtccgcgttcggcgccaaggggctggacgcgcgggacctgacggcgctgtcgggcgcgcacaccgtggggcgcgcccgctgcgcggtgttccgcgcccacatctacaacgacaccggcaccaccgacgccagcttcgcggcgggcctccggggcgccgtctgcccctacacgggcggcgacgccaacctggcgccgctggagccgcaggcgcccgacgccttcgacaacggctactttcgggacctggtcgcgcgccgcgtgctgcttcgctcggaccaagcgctgtacggcagcggcggagacggtggcaacaccacggacgcgctcgtgcgcgcgtacgcc

SEQ ID NO: 296829 - DNA, 277 bp, Zea mays
ccacgcaaacgaccacgcgacctttcacacttccgaccacgcagacagcctatgggcgacggcaagcaatagcggagagcggctcacaacaaccaacttcccacgtgcaacaacaatccttggcacatctaacaatacaaaccatcgcaacgcaacaacaacaacaattgctaccagcactgagccacctagccatggggaaccctggcgtctactagcaacaacacgtgcttgcataaaacccacttgctccggcaaacataggtgcaaaccaacc

SEQ ID NO: 296830 - DNA, 324 bp, Zea mays
cccacgcgtccgaccacgcgtacgtggacgcgtgggcggacgcgtgggcccacacaacggcgcgattctcctcctccgtccgcgtagctctcgctttccgccatgtccgggcgcggcaagggcggcaaggggctgggcaagggcggcgccaagcgccaccgcaaggtgctgcgcgacaacattcagggcatcacgaaaccggcgatccgtatgctggccaggaggggctgcgtcaagcgcatttctgggctcatctacgaggagacccgccgcgtgctcaaaatcttgctggagaacgtcattcgcgacgtcgtcacctacacc

SEQ ID NO: 296831 - DNA, 247 bp, Zea mays
acgatttttcttatctgattgtctaaaacctataattggtgtaatggtatcgtagtggttgggtgagcattgagtgactcatattttgtcaggtctatgtgttatcgttaaacttttaacggtcattctatttcaaaaaaaaaaaagggggggggaaaaaaaaaaaaaaaaaaaaaaagccaagaattgaaaaagaagggttttttaaaagggaagggaaatattttttgcggggccggggtttaaa

SEQ ID NO: 296832 - DNA, 269 bp, Zea mays
cgcgtggacgatgattgagatatccttgcggctctagagactcacgggatggctgggcatgctgaattggggtcctttaaaactaacgacctctcgcagattatcttgggctacagcagggatgatgtgaggaacttgatgctcatatatctggctcatggcatcctgcagcatgacctcttcgaggttgtcgaccacagaggactgggcgaactggtttagctggctacaaatatgggccggacagctaggcctaacttgaaggcggg

SEQ ID NO: 296833 - DNA, 303 bp, Zea mays
cagaaacacacctagcgaagcgcactagctacgacctaacaacaatggctttcaagacatgatccctccttgcgcttcttgccctttttgtgaccgcaacaaatgcgttcattattccacaatgctcacttgctccgagtgccattattacacaggtactacctacaattacttcaatgggcttctaacacccagctgtgcaagcctataagctacaacaagcgcttgcggcgagcgttttacaacaaccaattggccaattacaacaacaatccttggcacatgttaccatacaaaccattg

SEQ ID NO: 296834 - DNA, 362 bp, Zea mays
cccacgcgtccgcccacgcgtccgcggacgcgtggggccgcgcacctatctggcaagcgacgccgcgggctccatcggagtcggaggcgaacacccccatggcggcggctggcggcggcgcacgagggaaggtatccttcaagatcatcctcacctccgaccccaagctccctttcaaagtgttcagcgtgcccgaggcggcgcccttcaccgcggtgctcaagtacgccgcggaggagttcaaggtcccgccccagaccagtgccatcatcaccaacgatggaattggcatcaacccccagcaaagtgcacgcaacgtgtttctgaaacatggttcggagctgcgtctcatccctcgcgat

SEQ ID NO: 296835 - DNA, 302 bp, Zea mays
  unsure (1)..(302): unsure at all n locations
acgcccacgcgtncgcaacgacctaacaccaatggctaccaaaatattaaccctcctttcccttcgtgcccttttaatgagcgcaagaaatgcgttcattattccacagagctcacttgctcctaatgccagtattccacagttcctcccaccaggtacttcaatgggcttcgaacatccagccgtgcaagcctacaggctacaactagcgcttgctgcgagcgccttacaacaaccaattgcccaattgcaacaacaatccttggcacatctaaccctacaaaccattgcgacgcaacaac

SEQ ID NO: 296836 - DNA, 265 bp, Zea mays
gccgattactaattatttataagtagcctactctgtttctcggactaacactccctccacggggccttgacaacctacggcgggggcctcgagaccaacatcatcctccatcatgagacgcaaaaatacctcggcttaaacttcaacaccttctccacggaggaggcgatgcggaacgccatcgatggcatgaacggcaaggagctggacggccgcaacatcaccgtcaacgatgcccaatccctccgctgacgtggaggcggcg

SEQ ID NO: 296837 - DNA, 423 bp, Zea mays
gggagcgttcgtgctagcgtggccgaccctgatgctgcattttttgttggcctcaccgcttcatccatgcggggggccaatgatgatgccaggggtgatgccaccgatgacaatgatgccgatgccgaatatgatgccatcgatgatggtgccgactatgatgtgaccaataacgatagctattatgatgccaccgatgataatgccaaacatggtttcaccaatgatgatgccgagtatgatgcctttgacgatgacgccgagtatgatgccaccgataatgatgccaagtatgaaaccaccgatgatgatgccgtacatggtgtcataaatgattatgctaaacatgatgacagtgtcacaatgttactcttgattcatctcgtacattatacaacaacaacattttccaatcatgttcag

SEQ ID NO: 296838 - DNA, 401 bp, Zea mays
ctagcgtaaccaaccctgatgctgaatttttcttttggcctgaccgattaaaccatatgagaggccattgatgatgccaggggtgatgccacctattacaattatgccgatgccgaatatgatgccatcgattatggtgcctactatgatgtcaccaataacgatagttattatgatgccaccgatgatgataccaaacatggttttaccatatatgatgccaaatatgattccttttactatgacgccaagtatgaagccaccgataatgatttcaagtatgataccacctatttatgatgtctaacatttgtgtcatcaatgataatgccaatacattattgacagtgccacaatgttactctgattttcattttttacattattcataaacaacaatt

SEQ ID NO: 296839 - DNA, 427 bp, Zea mays
cggacgcgtgggttttgaagcttgctgaaccggccattcatcgctagtcttttatttcataattctgcagcaggcaggggtgctggcattacacggccagccttgggacgagcaggagcttctgcttgcgacggcttgtgagtccgtacctgacagacatgtccacgtcctgtggcgtcatcccaggcgggagctcccagcgaaagcagtagagaaggttcgccagcatgagctcgacgacggccatcccgaagttgatcccggggcacatgctcctcccagccccgaacggcacgaacttgaaatccctgcccctgaagtcggcatccgcgctgctgccgccgtgcaggaacctctgcggcgcgaactcgtccggcttcttccacgcgctggcgttcctgacgagcgcccactcgttgacgataac

SEQ ID NO: 296840 - DNA, 302 bp, Zea mays
ccgcccaacatgcaccaacaaaaccatcgagaggccttcgcaggggaaaaatggcacaacgggggctcaaccacgggcgcgggggctctcaacctccgaccagccctccgagctcgcggctgccaacgccagcgccgggaccacctgcgggccggggtgggccaacccgcacaacccgctcccgagcagccactggtacgtgaccagccggaccagcggcatcgggccgcgccccccgcggccggagctgaaaaagagaagctgccgggagcaggcggacatcccggcggacagcccgagca

SEQ ID NO: 296841 - DNA, 368 bp, Zea mays
tggattctcctgcccctacggttcgggttcgggttcgagaggatctacgctgttcggctccggggttgagcggatcgagatggcggcgtctgatgttgagtaccgctgcttcgccggcggcctcacctgggccactgacgaccacttcgtgcacaacgccttaagcacctacggcgaggtcctcgatgtccaacatcatcctcgatcgggagacgcacaggtccgagcgctcttgcttcatcaccttctccacggatgaggcgaggcacaacgccatcaacggcatgaacagcacggagcttgacgggcgtaacatcaccgtgaacgatgcccatgcccgcggcgtacggggaggtggttgcggtggg

SEQ ID NO: 296842 - DNA, 200 bp, Zea mays
cccacgcgtccgcaacttgctttgacaaaccctgcagcgttctaccaacaacccatcattgggggggccctctcttagacgtcttatgagttatacctcaataataacctttttcggctgacgtttgtggcttaccaaacataatatactccctttctgaacctgtatgatgaggatggagatgctgcttcatacaaaat

SEQ ID NO: 296843 - DNA, 331 bp, Zea mays
ctgctgtacgcgcccggacttattggctcgaccgacgcgtccggcaccaactagcatcacatgaagcacaatactgtaccaacaatggctgtcaaaatattttggctggctatgctccttggtctttcggcgagcgctgctacaagcatccattttcccgcagtgctcacaagctagtatagcttcccttcttcctctgtgcctgtgaccattgttgtcatcaggatgtgactacccaattctttagccctacgggagccgactggcatttgcatcgagcgtgttacctttatgacgactgttcctacgacagtcgtcattcctaatacag

SEQ ID NO: 296844 - DNA, 308 bp, Zea mays
  unsure (1)..(308): unsure at all n locations
gaccacgcggccgcggacgcgagggngggaatttgaacaggaataggaatggcatctactgggggggcaacaacggagggcaaggggattgcaagccctttacttgccgcagtgcatatatagggggtcatccaagagatgagagcaactactggaaacacactcaacccacaaagaacagcaaagaacgaggctaaaataaacaagagaggaaaggaatctagccccgccgagctaaggcacaaggaagacctgcttgttcccagccgaggtaaaaaagaagccggcagtgggaaaaatggacagac

SEQ ID NO: 296845 - DNA, 427 bp, Zea mays
ttcttgaaccaaatgacttaccaagtatttgaattctgctgttgctggactacctcatgcaaaaggggctagtctaccttgttggggcgggcgcccaccaaaacaaacctttcgtccctattcttgcgacatccaaggtcttatataagattacctacattgaattcactggtcgcgaattgtccatatcctcatccttggaaaacctttgatctacacatcttacaaggcacaaagatcttcccctttaaaacctctgggggaatatcaaaaacttcagctcgcaacttcttttataaaaatagcgaacgcaaaaggggtttatgtactccccccgactgatatcataatacccgacaagtttgcagcttacgctcatagcaacattgtccctggcactgatattacagacgactggatgcgtttt

SEQ ID NO: 296846 - DNA, 256 bp, Zea mays
  unsure (1)..(256): unsure at all n locations
ctgaagaaactatgtgctgtagtatagccgttggctagctagctagttgagtcatttagcggcgaggattgagtaataatgtgggacgcatcaccatgggtggcagtgtcagcgtgagcaatgacctgaatgaacaattgaaatgaaaagaaaaaagtattcgttcnaacaaaaagctttgacgaaacccaacaacggtctatcaacaacccatcattggtggagccctcttttagacttcctatgaaaaataagg

SEQ ID NO: 296847 - DNA, 339 bp, Zea mays
aagagttcgaggaggtccatcttggcggcctcggtcttcgactcgtcgtaacaggtcggggccaacttgagcggtccatgaggaaattcttgctggctgggggcttcaacaaggggcagccccacttcgccgagaacatcttcaaagggatcgacgcccggttcctgagcgaagccctgggcgtcagcatgcacgtcgcctagaagctgcagagccggcgtgaccagcgaggcgagatcgtgcgcgtggagccggagcacggcttttaccatctgaaatcgtcgccgtcgtcgtcgtcctgtttcgataccatcgtgacaagtccagtaccaaacgtgc

SEQ ID NO: 296848 - DNA, 359 bp, Zea mays
cccacgcgtacggagcaacatagaaagcacatttgtgtaccaacaatgggagctaacatattacgcctgcttatgctccttggtctttctggaagcgctgctacggcgaccattttaccacaatgctcacatgctcctatagcttggcttcttcccccgtacctttcaacatcggtgtcttccgtatgtgtaaacccaattcttcaacccttcaggatccaacaggcaatcgcatctggcatgttacctttatcaccctcgttcctcacaacaatcatcagccctattacaggaggtacctttggtgcattcattggcacaaaacatcatggcacaacatctacaacaacttgtgctag

SEQ ID NO: 296849 - DNA, 361 bp, Zea mays
tgcggccacgcgtacgtagcaacatataaagcacatttgtgttctatcaatgggagctaaaatatggggactgcttttgcttcttgggggttttgctagtgctgctacggcgaccattttaccacaatgctcacatgctgctatatctaggcttcttcccctgcaccatacaagaacggtgtcttcggtttgagaaaaccacaattctgtaaccttacaggatggatcaggcattctcagctggaattttacctttatcacccttgtttctcacaacaatcattattcctattacaggagttacctttgtgtgcatttattggttcatataattatggtacatcaacttcaacaacttgtg

SEQ ID NO: 296850 - DNA, 239 bp, Zea mays
  unsure (1)..(239): unsure at all n locations
gatcttnatgcccaaatcctcttcttgttccttaagccccctcgtgctttttcggggtctctgcttggatacgagggactgacaacttccccggatgattttggattataagattatcttaacatgcctcatgatttttacagcttccgtcaacctcacatgcaccacggaatgaaggttgtccttcgtatgttcataggacctatctgttctagcttttattgaggcggcaatgtaat

SEQ ID NO: 296851 - DNA, 361 bp, Zea mays
  unsure (1)..(361): unsure at all n locations
gaagcatagaaaatttacaatcacacgtaccacgatatgtatatgaaacctcaagggaacatgcttaaaaataagagggtactcatgcanaacatccacaagtcaaaggcccacaacgccatatagaagactctttccgatcaatttgatgcctagcgagccaacagcaaagctatccgtgagagaaacatttcaaggatggttgagagattggctcatggcccaatggaacctgctgcatctccagtaacaactactgatccccttgcagctgcaccaaagaaggcgaaaaattgaaacacgtggtcttctacatctaggacctacttttggttctcccccactctcttgctggtacata

SEQ ID NO: 296852 - DNA, 313 bp, Zea mays
  unsure (1)..(313): unsure at all n locations
cccactcgttcgtggacgcgtgggcggacgcgtggggagaaggttgtgtgcatggnagaaagggggtatggtgctgagcagcgggagagggcatttgagcatggcttccagtgcggaagctacaaggttccagcaaactgatgatatcacaagagggaagcgcttgacgtagtctttatatttcaattgttgcagccgatcaaccttcttagggttgtataatatgaagccaatgtggagactaatgtgaggtgggagaggcctattgatgcatcaaaaggattatgagctaataataaagccttctccacag

SEQ ID NO: 296853 - DNA, 389 bp, Zea mays
caacataaaaagcgacattagtgtaccaacaatggcagccaaaatatggggcctccttatgctccttgggctttctgtaaatgctgctaccgagaccattttcccgcaatgcttacaagcttctatagctttcgttattgccccgtacctctcaccagcgagtgtttttcggtattgtgaaaacccattctcttcaaccctatatgatccaacagtcgaaaggatctggcatcttaccttaatgacccttgtttctccaacaaacatcatctctatttcaggatttacctttggtgcatttattggcatacaatatctgggaactactgctacttcaacttgggctaacttactttgaagctaatttttagtaacagtagttatttttt

SEQ ID NO: 296854 - DNA, 297 bp, Zea mays
gcgcagacacgtgggcaagctcctacttcccctttaccaagtgctacacggaatatggggccggaggacattgtggaggggggagggcttcaatcttatgtggagtaccgtcgcttcagcggcgggcttgcctgggccaccagcaacgagtcgcaggagaaagccttcgcctcctacggtgagatcctcgactccaagggtatcacctgaccggtagacggggaggtcccgcggcttacggcttcggtaccttaccctccgagaactacatgctcgacgctaataagaacatgaacg

SEQ ID NO: 296855 - DNA, 306 bp, Zea mays
cggacgcgtgggctggcttctccttccccttttaccaagacctcctcgggatagggggcctgagggttatgtggaggggcgatggcaacaactgatgtgaagtaccgttgcttcgacggcgggcttgcctgggccaccagcaacgaggcgctggataatgccttcgcctcctacggcgagatccttgactccaaggtcatcaccgaccggtagacggggaggtcccgcggctacagctacgttaccttcacctccgagaacttcatgctcgacgctatagagaacatgaacggcaaggagctcgac

SEQ ID NO: 296856 - DNA, 357 bp, Zea mays
gccacgcgtgcgattttgagcattcagaaacacacctagcgaagcacatttgcaacaacctgggagcaatggctaccaagatattatccctccttgcgcttcttgcgctttttgggagcgcaacaaatgcgttcattattccacaatgctcacttgctccaagttccattattacacagttgctcccaccaggtactataatgggcttcgaacacccaggtgtgcaagcctattggctacaacaagcaattgcggtgagcgtcttacaacaaccaattttccagttgcaacaacaatcctttggcacatctaacaatacaaaccatcggtacgcatcagcagcatacaatttctacc

SEQ ID NO: 296857 - DNA, 238 bp, Zea mays
cccacgcgtccgcccacgcgtccgcccacgcgtccgcggacgcgtgggcgctcacagacgaggagagtaacaatcttcagttgaatgtcagggaagctgtgaaagataaattgggcgtaagagtgtcagaagagtgcagcagtaactatatcgatgcgactttttatatgttgctatatcatgtgtgacaatctcctaataataaatatatggagtatcgtcctacgtttctgtggct

SEQ ID NO: 296858 - DNA, 274 bp, Zea mays
tcgcccacgcgtccgaacggatatctcggctctcgcatcgatgaagaacgtagcaaaatgcgatacctggtgtgaattgcagaatcccgcgaaccatcgagtttttgaacgcaagttgcgcccgaagccttctggcggagggcacgtctgcctgggcgtcacgccaaaagacaaaaaaaaagaagaaaaaaatacttcatgaagaggaaaaaaaatgaagggaagaagctaaacgaagatgaacgcaggctaaatcatacaataatctatactg

SEQ ID NO: 296859 - DNA, 391 bp, Zea mays
  unsure (1)..(391): unsure at all n locations
cccacgcgtgcgcaccatgactagtgctgtagcaaggtcagccaagaggaagagaaagaatctatacaggggtatccgccagcggccttggggcaagtgggctgctgagatcagagatcctcagaagggtgttcgtgtttggcttggtactttcaatagtcctgaggaagctgcaagagcttatgatgccgaagcgcgcaggattcgtggcaagaaggccaaggttaactttcctgatgcaccagcagttggtcagaagcaccgttctggctcagcttctgctaaagcatccaagtcaagttttggacagaagcctatcgtcaaaggaagtaactcctttggctgctcagacttgggctgggagaatgataccaagacaccanacatcact

SEQ ID NO: 296860 - DNA, 158 bp, Zea mays
gcgaacacgcgtccgacgaaatagagctagaccatccgcacatcaaccaaaaccaagaccagtgcggccaaggtcgcggaggcggaggagaagaataccgaggacgccatcgacgcggccattacctgggtggacgccaaccagatggccgaggcgga

SEQ ID NO: 296861 - DNA, 345 bp, Zea mays
  unsure (1)..(345): unsure at all n locations
cggacgcgtgggcgcagaagacgtcggcaagcgttacgccgtctcggcaagccatgacggcatggaccagcgcgccagggacgcggccgtccagaagttcaggtctgggtcgtccagcatcctcatcgccactgaccacggaggcaccaccaacgcgatgccgcaggttcccatcatcatcaactatgatcttccgacagagtccatgcggtacgtccgtcgtctccagcagcagaacaggcagttcaggaggtcggtcagtgtggccatcagtttcgtgactcctgctgaccgacgcaccctctccgncatcacgagctttttgcagtgctacatgggggagct

SEQ ID NO: 296862 - DNA, 457 bp, Zea mays
actagctgtggtgaaccctgtcgcctacttgcaacagcagttgcttgcatccaacccacttgctctggcaaacatagttgcataccaacaacaacaacaattgcaacagtttctaccagcgctcagtcaactagccatggtgaaccctgccgcctacctacaacagcaacaactgatttcatctagccctctcgctgtggttaatgcacctacatacctgcaacaacagttgctgcaacagattgtaccagctctgactcagctagctgtggcaaaccctgctgcctacttgcaacagctgcttccattcaaccaactgactgtgtcgaactctgctgcgtacctacaacagcgacaacagttacttaatccactagcggtggctaacccattggtcgctgccttcctacagcagcaacaattgctgccatacaaccagttctctttgatgaaccct

SEQ ID NO: 296863 - DNA, 303 bp, Zea mays
tgccgcaccacccggccttaattcctgcgtcgacgcactcgttcgaagcaacatatattgtggtatccagttgctgctacggagcatcttatgcaaccaaaatggggtccctgcatatgctagtgggtccttctgcatgtgttgcgaacgcgacaattttccctcactgctcacatgcttctatagctggccctcttacctcataccttctatcaaggatagcttcagtgtgagaaaacccaacagtttacatctattggcttcttcaagaaaactgagctagcatcatacctttattaccct

SEQ ID NO: 296864 - DNA, 287 bp, Zea mays
  unsure (1)..(287): unsure at all n locations
atgggacctgagattagctttttgctgcttgtggtgaggttgcatattagcgagccnnnntggggtcgntgcttaggctgcttgggcgttctgcatgtgttgcttcctcttcattntttccttattgctcacaagctcctatatcttcccttcttcccccatacctttcatcaatgattgcttcagtttgttttaactcagcttttcgntcttgtttgcttctacaatcaatctcatcttgcatcatacctttatcacccttgttgttttaactatcgcctgcccta

SEQ ID NO: 296865 - DNA, 300 bp, Zea mays
agcggctcatgggcaccgacgtcgtggccgcgtccacggacgcgcgcacgggcgtcacctcccgcgacgtcaccatcgacccgtccacgggcgtcgccgcgcggctctacctcccgagcctccgcgcccgcgcgcccgtggtcgtctacttccacggcggcgcgttcgtggtggagtccgcgttcacgcccgtctaccacgcctacctcaacacgctggccgccagggcgggcgcggtcgcggtgtcggtgaactaccgcctcgcgcccgagcacccgcttccggcggcgtacgacgact

SEQ ID NO: 296866 - DNA, 234 bp, Zea mays
ggttggagaactcgacaccaagaaagtgctgatcgctgcccttgctctactggcgctcgctgggagcgccgtctacagtacaagcggtggctgtggctgccatataccaacgtttcatttaccggcttcgttctatatgccggcttcgttctatattccggcggagcagcatccgcatccatggcaataccccacttaacctccgtagcttatcccgtgccagcagttcggatc

SEQ ID NO: 296867 - DNA, 304 bp, Zea mays
gtcgttgtcgtccagtttacacgtaacccctcgcgcttattcagaattctgaaattccaagggcgatctcctctcctcttccccgaatctcgggcgccggcgtaaccctagcccccgcgatccgctcgccggagggaaggagggatctccgcaggcgcccatggaggtgaagttgtggaacgacaagcgcgagcgggagctcctggagagctacgcggacctgtacgcgatcatcaaggccgtggagaagctggaacgggcctacgtccgggacctcgtctcattcgccgactacgaggcggag

SEQ ID NO: 296868 - DNA, 372 bp, Zea mays
attcacaccaaccttgaccttcacataacccagcgagagatctaccaacacccaagcgcctggcgcgccctcatgtagatggcacacacaatatcataatgcccagctgataagttgggcttccacatacctacatacatatatcgatcctatgtgaaaacccagctcttcagccctataggctccaacaagcaatcgcagcaagcaacatacctttatcacccttgttgtttcaacaaatcgccagccctatctttggtgcagtcattggtacaaaccatcatggcacagcagctgcagcaactcgtgctacctgtgatcaaaccaattaggtgtggcgaacctttgtccctactctcaacaacaacaatt

SEQ ID NO: 296869 - DNA, 303 bp, Zea mays
tcgggccgagcgacgcgttcacacaaagtgaagagcactatcaacaactctttcaacaatggctaccaatatattatcgggccgtgcgcttcttgcgcttgattgaagcgcaacaaatgcgttcattattccacaatgcttacttgatccataatacattatttcacagttcatcccaccaggtactactaaggcattggaagacccagatgtgcaagcctataagctacaacaagttattgcggcgagcgtcttacaacaaccaattgtccaattgcaacaacaatccttggcacatctaac

SEQ ID NO: 296870 - DNA, 213 bp, Zea mays
  unsure (1)..(213): unsure at all n locations
ccgcgcgttcganttggttttagtggcaccattccacagtatttccatgcacttgcttcaatgagctacccgggggaagctgtaaaagcctaccggctacaacaagtgcttgcgtccaccgtcttacaacaacgccattgtccactcccaacaacaatccttggtacatctaaccatacacaccatgaaaacgcaacagcatcaacaacctct

SEQ ID NO: 296871 - DNA, 401 bp, Zea mays
cccacgcgtccggcaacaacaactaccattcagccagctagctgctgcctacccccaacaatgtcttccattcaaccaactggcatcattgaactctcctgcttatttacagcagcaacaactactaccattcagccagctagctggtgtgagccctgctgccttcttgacacaacaacagttattgccgttctacctgcacgctgcgcctaacgctggcaccctcttacaactgcaacaattgctgccattcaaccaacttgctttgacaaacccagcagcgttctaccaacaacccatcattgggtggtgccctctttagaatttctatgaagtataggtcaatataaaagttttttgtctgatgttcggggcttccaagaaataataaagtccattct

SEQ ID NO: 296872 - DNA, 402 bp, Zea mays
cccacgcgttcggcaacaacaactaccattcatccatctagctgctgcctacccccaacaatgtggtccattcaaccaactggggtcattgaactctcctgcttatttacagcagcaacaactactaccattcagccagctagctggtgtgagccctgctgccttcttgacacaacaacagttattgccgttctacctgcacgctgcgcctaacgctggcaccctcttacaactgcaacaattgctgccattcaaccaacttgctttgacaaacccagcagcgttttaccaacaacccatcattggtggtgccctcttttagatttcttatgagttataggtcaataaatcaacttctttgcctgacgcttgtggccttccagaaataataaagtccatttt

SEQ ID NO: 296873 - DNA, 430 bp, Zea mays
attgagaccaactagcaacatagaaagcacattattgtaccaataatggcagccaaaggagtgtgcctcattatgctccttggtctttctgcaagtgctgctacggctagcattttcccgcaatgctcacaagctcctatagcttcccttcttcccccatacctctcaccagcgatgtcttcagtatgtgaaaatccaattcttctaccctacatgatccaacaggcaatcgcagcaggcatcttacctttatcacccttgttcctccaacaatcatcatccctattacagcaagtacctttgaggcatttatttggacaaatcatcatggcacaacatctacaacaactcgcgctatcaaaccttgcttcctactcttagcacagtcagtaccttttgtgcaattgttgcatcaaaacattatggctca

SEQ ID NO: 296874 - DNA, 380 bp, Zea mays
gaagaaaatgagaaattgcagcaggcatttattgaagatgccaattcccaagcagggagtggttcatcaattaatgagcggacgaattctgggttttctcgcggttcatcagaggctgggttagatgaagatcagtcctcaaccggtaagagtggggactcatcattttttgctggtttcttgaagaagggtttcaaggacctttctttattaaataagtccatggacagcgttaaggtttcaattaatggtcatccaatctctgaaatagcccttaagaaggcagagaagaaagctggtcctgttgacccaggttcatattggtacgactaccgtgctggtttttggggtatcatgggacgagaatgtatcggcattgt

SEQ ID NO: 296875 - DNA, 341 bp, Zea mays
tcgaactaacaacatagaaagcgcactagtgctccaacaatggcagccaaaatattttgccggcttatgctcctcggtctttctgcaagtgctgctacctcgaccatctttccgcgatgctcacaagctcccatagattaccttcttgcgccgatcctctcaccatcggtgtcttcggtatgtgaaaacccaattcttcaaccctataagatccaacaggctatcgcatctggcatcttacccttatcaccctcggtactccaacaatcatgagacctattacagcacttacctttggtgcatttattggcacattacatcagggctcagcaactactaca

SEQ ID NO: 296876 - DNA, 310 bp, Zea mays
tgatgacctccctgagcagacattctacatggttggtggcattgacgcacctcagccgcggcggggtctttaaagaggcgcggggtacctccactattattgcacaatggcttacaaacatttcctgtctcccgaaacatgccgatggatttcaatacccaactatacaatcctacatgggacaagaggccatccaagcatgcatcgtacgggcattagcattaacccttctacaaccatatgctctattggaacatccatccttaatgcatctgtatctccaaagaatcggggtataaccacctccacc

SEQ ID NO: 296877 - DNA, 369 bp, Zea mays
cccacgcgttcgcccacgcgttcgcccacgcgttcgcccacgcgtccgcccacgcgtgcgcccacgcgtccgcccacgcgtccggaattaatggcgtcgtcgtctagcagcagccaccgccgcctcatcctcgcagccgccgtcctgctctccgtgctcgcggctgccagcgccagcgccgggacctcctgcgtgccggggtgggccatcccgcacaacccgctcccgagctgccgctggtacgtgaccagccggacctgcggcatcgggccgcgcctcccgtggccggagctgaagaggagatgctgccgggagctggcggacatcccggcgtactgccggtgcacgggcgctgagcatcctcatgga

SEQ ID NO: 296878 - DNA, 280 bp, Zea mays
ctggtgcttatctgaaacaacatctaccattcaatcaggtacctgctatctaccggcaggactatctttcattgagccgactcgcaccataaaactatgctgcttattcacaacacctacagctaccaccattcaaacacctagctgacgtgagccctcttgccttcttaacacaacaacatgtgttgacgctctacctgcacgctgcgcctaacgctgacaccctattacaactgcaacaattgctggcattcaaccaacttgctttaacaaacccaac

SEQ ID NO: 296879 - DNA, 395 bp, Zea mays
  unsure (1)..(395): unsure at all n locations
cggacgcgtgggtaataagcacgaagaaatcaaatgtactagaaagacagcaggttagcatgcgagatcacggtgtgtgacgcatgcgccgcgaagttaaatgtgcaatcaaactctaaggaggtagatgctaagctccgggccgccattgccgccggtgctgctgtcagggttcatcatgtagaatgcctccgagtcgcgggagcccacgacgcgctcaaagcgagcgcgcatgtacatgacgtncccctcgccgncaccgcacgccgncggtatgacgcccgcgcccatagagacgggctccagcgcgcgcagcacgcgcaggtctgcggnaccgnactcgcgccgcaccgcgtacccgcagcccttgccgntgcagtacgcgcgccacgcct

SEQ ID NO: 296880 - DNA, 380 bp, Zea mays
  unsure (1)..(380): unsure at all n locations
acattcgggggnnncntttgcccacgcgttctgccactcttgcgtgcacacatatggacaggctttcactaactcttggggcgactcttgcgaccacgcgggcggaattaatgacgtcttcatctatcaacagccaccgccgcctcattctcgcgggcggcgttgttaaaggacccctccttactgccagtgccagcgacgggacctccttcgtatcggggtaccccattccaaacaaccggctcccgatctacacctcgtacatgaccaaaccgtcctgtgacataagttcaatcctttcgaggacatagctctttaggagatgctgccaatagctaacagacatccacgcatactgcttgcgcacagtgctgaacatt

SEQ ID NO: 296881 - DNA, 311 bp, Zea mays
  unsure (1)..(311): unsure at all n locations
cccacgcgtccggcaaagcggcagtgcgtatagaggatcgtcgaacanaacagcgggaggattgtcatcggtgctgggcgggtgccttgctctgtcaactgccancgcctctgcaatgcacatgccctgcccctgcgcggggctgcagggcttgtacggcgctggcgccggcctgacgacnatgatgggcgccggcgggctgtacccctacgcggagtacctgaggcagccgcagtgcaacccgctggcggcggcgccctactacgccgggtgtgggcagacgagcgccatgtaccagccgctccggcaac

SEQ ID NO: 296882 - DNA, 306 bp, Zea mays
  unsure (1)..(306): unsure at all n locations
ncccacccctccnnctttgcctcctttacttttagcacatctcctcntaccccggcggggactatctccggctcacgggggcgccacnanacctcctacatcaacaccttcntcttgggcgtctctaaccgctgtgcgtccgtgcgcgtgggcctctacacctataatgaatgcaaattctacttctatgaccggatgcctgcctccaacatttacccttacgtcgtgacctctctcatctcttatacaaccattctgtgtgagcccatccactccaacttcgactacaatggcccccccgctcct

SEQ ID NO: 296883 - DNA, 270 bp, Zea mays
  unsure (1)..(270): unsure at all n locations
aaatctctcttntaaaaaaataaactctatctcncaacttctcttattnanaacgcccggcctaattgcaaggctctccgccttcccacttatattntaatatcanacaacttttcacccaatccttataacaaaattntccctcccacttctatccctcattactacattcntcttaataaaaacccttaatccaccaaaacattctaccaaccattttacaccaccaaaacttttattttaaacctccccattctaatcttttacttc

SEQ ID NO: 296884 - DNA, 406 bp, Zea mays
  unsure (1)..(406): unsure at all n locations
nnccacncntccntatcaatagccatggtttaccctcttgggcaaacctatanagtacggcaatcncttacaggggcacgggacaacaaccctttncccaattacaacaacaactcttggcacatctaaccatacataacatcctaagccaacaacaacaacattttttgccatcactgaaccaactatccacctttaaccctttctcctactttcaacaataactactttcattcaacccactttctctagcaaacatagctgcttaccagcaacaactacaattgcaacaccttcttccatctctcaatcaactatccattaagaacctcttcacatacctactacaacaacaactcctttcatctaacccactctccttaaacaatgcggctacataccttca

SEQ ID NO: 296885 - DNA, 282 bp, Zea mays
tcgcccacgcgttcgcccactcgttttaagagttatcaacggaacacaacatattcgggggctgggataactgttccgcggggtgccatgctacctgtgagcgggataaatcgttcattcaaccgctatgtgctggggcctgctatgtttccaggcctgcgtttaccaaacgaatggaagcacagatgggataccccttaagacatattggaaggcttatttgcttacgtagtctgcgacagcttgggatattgtgttaagaccggactgtcttatgtgatg

SEQ ID NO: 296886 - DNA, 337 bp, Zea mays
  unsure (1)..(337): unsure at all n locations
cgtccgcatcccggtcgaccacgcgtccgcccacgcgttcgnggacgcgtgggcggactcttgggcggacacgtgggcgccacgctgctgagggggagggccgtcatgggggggctcacgtcaggcacgctggggctcgggggcctgtcctcgctcacgtgcctcgccaacacggcgcggcaggcgttccagcgcaccccggactacgtggaggaggcgcaccgcaagatggcggaggccgtggtgcacgctggccacaagaccgggcaagcagggcaggccatccacggcaaggcgcaagaagcccgcgccgggggaggtgcatgtgcccgcgctt

SEQ ID NO: 296887 - DNA, 238 bp, Zea mays
acgtggacgcgtgggcagacacttggtgtccctttcactgctatccctcataactgggggggtggggatatttatcctggtgccaccaaaacatttaattaagcattggacaccatcaagactgttatttggaacggccccaagggagtgtttgagttctagaagattgcatctgtcacttatgctaatgtcaagaaacttacttaccttacaaccacgaaaggtgctactaccatca

SEQ ID NO: 296888 - DNA, 362 bp, Zea mays
cggaggcgatgggaaggtgtggttcgctggtaagcgagtgcgcgggaagcttgcaatgtgggaggaagatgacatggggagcagtggcaagtgggactgggtggatggtcttcctggctatggtgatggtgtataccgtggatttgtgttcgatggcgggttcacagcgattccttgaaaacgaatcctagtctggtgggtgtccgctcaaattgcgccggtttactttgacccaggacatctacctatcttatctcatgcatgatgaaaactctagttgttgtacttgattattggaaaagatcagtaagctgtgtgtttcagacaataaaatgatgtagaccatactctatttacatatc

SEQ ID NO: 296889 - DNA, 414 bp, Zea mays
gaactctgctgcttatttgcaacaacaactaccattcagccagctagctgctgggtacccggggcaatttcttgcattcaaccgactagcagcattgaactctgctgcttatttacagcagcaacaactactaccattcagccagctagctgatgtgagccctgctgccttcttgacacaacaacaggtggtgccgttctacctacacgctatgcctaacgctggcaccctcttacaactgcaacaattggtgccattcaaccaacttgctttgacaaacccagcagtgttctaccaacaacccatcattgggggtgccctcttttagattgcttatgaattatacgtcaataatgaagtcttttggatgatgcttggggcttccagaaaaaagaaagtacctttttagatctt

SEQ ID NO: 296890 - DNA, 420 bp, Zea mays
  unsure (1)..(420): unsure at all n locations
cccacgcgtccgcccacgcgtncgggcacgcgcgggtacctggcccccgagtggtaccgcggcgccgggcccgtgacggtgaaggcggacgtgtacagctacggcgtggtgctgctggaaatcgtgacgtgccggcggagcatggagctggaggaggcaggcgaggagcggacgctcatggagtgcgcgcacgagtggttggtgcgcggcgaggtgtggcgggtggttggcggcgacgatgccgtggacgtcacggaggtggagcgggcggttaaagtggcagtgtggtgcgcgcangcggagccccaggcgaggcccgacatgaggagcgtcatcctgatgctcgaaaggctcgtggaggtgccgttccccccgccgccgccggcgttcttgtgatccccagataccggtgggggattg

SEQ ID NO: 296891 - DNA, 219 bp, Zea mays
aacacatctaatgtcatcctttactttctcacacatgcattgaactttacggtgaacgggcacttcttgtgcatgtgtaactttaataaggacattgattcttactcgaattcgtttcccttatatctcctttctcattgaactgatggcgctagctctctattctttgtctattcttcttactacccccttactcttttttccatattattccaattc

SEQ ID NO: 296892 - DNA, 371 bp, Zea mays
ccaactagctgaggtgaaccctgtcgcctacttgcaacagcagttgctttcatggaacccggttgctctggcaagggtagttgcataccaacaacaacaacaattgcaacagcttctaccagcgctcagtcaactagccatggggaaccctgccgcctacctacaacagcaacaactgatttcatctagccctctcggtgtgggtaatgcacctacatacctgcaacaacacttgctgcaacagattgtaccatctctgactcaactagctgtggcaaaccctgctgcctacttgcaacagctgctttcattcaaccaactgactgtggtgaactttgctgcgtacctacaacagcgacaacagttactta

SEQ ID NO: 296893 - DNA, 378 bp, Zea mays
  unsure (1)..(378): unsure at all n locations
cccacgcgtncggctagctgctgcctacccccaacaatttcttccattcaaccaactggcatcattgaactctcctgcttatttacagcagcaacaactactaccattcagccagctagctggtgtgagccctgctgccttcttgacacaacaacagttattgccgttctacctgcacgctgcgcctaacgctggcaccctcttacaactgcaacaattgctgccattcaaccaacttgctttgacaaacccagcagcgttctaccaacaacccatcattggtggtgccctcttttagatttcttatgagttatagttcaataataaagtttttttgatgatgtttggggctttccagaaataagaaagtacatttct

SEQ ID NO: 296894 - DNA, 321 bp, Zea mays
accggctgaagcccgagcgacccacgcgtccgatgtagttgagatgcttactgaaatacttcatcactcacatccgggaaactcaaatgtccggaatggtgccaccgcatattcccaattcaagaaacttgcattctatcagaagaagacctgcatgccactgtgtcaaagttattccttgacttctcgaggagcaagacaaacgaagacaagcctataaagtttgcggttgcctataatagaaggggcattgatgagacagagaagaacagttatgaagggtcaaaccagcaaactttgatggatagggagcaatgtttc

SEQ ID NO: 296895 - DNA, 400 bp, Zea mays
  unsure (1)..(400): unsure at all n locations
cgcagagatacggcgtcttcgtactcgtcctacctctcgcggnctcaaaacctttcccccttctcgccaattccttccgcgcggccggcgctccactccgtacgatcgacanctcatgagggagtgcactttccgatccacaaatcggccaggccggtatccaggtncggaaaccgcgtgctgggatgctgtacctgccttgagcataggcacttcaggctgacggtcagatgccccggtgacanagaccattgggggacgggtgatgatgctttcaacanccttcttcagtgagactggtgctgggaagcacgtgccccgtgctgtttttgttgaccttggacccactgtcatcgatgaggtgagaactggcacctaccgccagctctttcaccctgag

SEQ ID NO: 296896 - DNA, 262 bp, Zea mays
agaacattagcttcactgtctgggatgtaggttgtcaggacacgatcaaacctctttcaagggattacttccagaacacccagggaattattatcattgaagacagctatgaccgtgaccatgctgttgaagacagagattatctccacaaaatgctgatctgttgatgagctacgtgatgctatgctgctcgtttttgccaacatgcatgatcttgccaatgccatgaatgcttgtgatattactgacaagcttgcattac

SEQ ID NO: 296897 - DNA, 327 bp, Zea mays
agttcccggagagactcgcgtacatcaacactttcatctacccgctcacgtacataccgcttcggatgtactgcattctgcccgccatctgcctgctcaccggaaagttcatccttccagaggcaaagcatgcataagagcgttctttctttattacagcaggggagcatttggacaacgtacggtgctgatgacaaagaatctaccttggaatggaatgcatgcagatcagcaactttgccagcatctggttcatactcctcttcatctcgatcttcgccacgggcatcctggagatgaggtggagcggagtgggcatcgactagt

SEQ ID NO: 296898 - DNA, 455 bp, Zea mays
  unsure (1)..(455): unsure at all n locations
gtggacggccgcgtcgtgcgcgctcctggcgctcgttcgcaccgacgcgctccgggaggacgtcggcgaccaggccgcaaacagggtggacgagccactgatctcccacccgggcctcgccagctaccgcgtccgtgacctcccagacggcgtcgtctccggcgacttcaactacgtcatcaacctcctcgtccaccgtatggggcagtgcctcccgcgctctgccgccgccgtggcactgaacacgttcccaggcctggacccgcccgacgtcaccgcggcgctcgcggagatcctgcccaactgcgtcccgttcggcccctaccacctcctcctcggcgaggacgacgccgacaccgncgcaccagccgacccgcacggctgcctcgcctggctggaccgncaacccgggcgcggcgtcgcgtacgtcagcttcggcacggtggcgtgcccgc

SEQ ID NO: 296899 - DNA, 287 bp, Zea mays
cacactagagccgccgccgtcgccgcctctgttttttcgcgcaccgtaccctagccctggtcagcggcggtttcgagctcctccagccataaccttcaagcgtaggaatggcctacgcaacaagcacttacgcgatcacgtcaagtacattcgctgctccaactgctccaagtgctgccccatggataaagctataaagccgctcttgctgaggaacactctatagcatactgccatcagagacgagcacaaggactacgtacatgactaatatgtcctaaccatat

SEQ ID NO: 296900 - DNA, 170 bp, Zea mays
ctctgtcaaagtcagaggatgggagactgagaatatagaggagattgctgtgaagaactctcgacttccttcggcttcaggcaagcataagcggatagctgcgattactcaaggtgctgatccagtggctgttgctgaggatgggaaggagaaaacagtccctgtgatcc

SEQ ID NO: 296901 - DNA, 320 bp, Zea mays
aaacactttacaggatctctctacacttacttttctttttaacgcacagtgaaatgcggccaggccggagacaatctctcttgcgctcttgtcatacaatggatcatattcaacatccatctgtcatgcagaaggtagctgtccagctactttcttctagcacttccctagattttcaaaggtatgataggtctttcaagaagcctgctctataccaaggacattttgcatataggcaatattccaatgctggaatgcactatcctattgtttcatcaacaactaccgccatctgtgttctagcccctgcataaaaagga

SEQ ID NO: 296902 - DNA, 377 bp, Zea mays
  unsure (1)..(377): unsure at all n locations
ctgtggtgccactgatgtcaagtcaccagaaacgattcttgagcatgagcatgtgggcatgctcttttttccctgagtcgtatcatttggcttgggggtttgaattatcggattgccctatcatactgcttagctaaagcccttgtcgaaatgcataagcaactgttagagaaagatcagcttcagatagagtgaagatgcgggtgcattttccagggatggaaagaaggcatgattaatttcctccgatatataaatactcattcaactcggatcgtaactctggtgcgatcacattatgtggcctcttgcagtcgtcctacatccgangagagtctcgcttctctgaccacagaccagtgtacaaccttttcatg

SEQ ID NO: 296903 - DNA, 270 bp, Zea mays
  unsure (1)..(270): unsure at all n locations
ccggcgacgcgnccaatcccctttccaccgccggcgaagatggcgccctcacccccgcggagaccctcggagagaggcccatccgcatcgcgaccttcgcgaacaaacgcaccagcacgtcagtggaggacctagggcaccacgcgggggattaccggcttcgcagcacccacgaccccaggacaggctacgtacatctacagaggaggggccacaaagacgaccccgaaacgatctggctcacgggcgggcccagccgcagcagcgagc

SEQ ID NO: 296904 - DNA, 297 bp, Zea mays
  unsure (1)..(297): unsure at all n locations
ggccgacccacgcggncgacaggctatataagaagctggtttccatcttttcggntctctcacagntngaggcagtcctggattgcgacatttacttgaactgactctttatcattgaaatccacatactggaaatatttttgcaatgcaggattatcgtattgattatgtcgactaacaaaatgtagacgctcttagccagcaaaacaaacaaatactaattgacactcttgctcatgcttgtaacaaacactattctgaaatggcaaatgacttcacatggtttgctttccttgc

SEQ ID NO: 296905 - DNA, 360 bp, Zea mays
cggacgcgtgggcggacgcgtgggcggacgcgtgggcggacgcgtgggcggacgcgtggggggagaagttggacccaagaccattcatgttcctactggggagaagctttctgtttttgatgcggccatgagatacaaatctgagggccatgctactataatcctcgctggcgctgagtatggaagcggcagttctcgtgattgggctgctaagggtccgatgctcctgggagttaaagctgtaattgccaagagctttgagcgtatccacagaagcaacttggtggggatgggaatcattcctctgtgcttcaaagctggtgaggatgctgattcacttggcctcactggacatgagcg

SEQ ID NO: 296906 - DNA, 384 bp, Zea mays
  unsure (1)..(384): unsure at all n locations
caccgcttcccgtgcaacgccctccctctacattcccccatttcctgtgttggcggggattgcgcggcactccgtgctcaacaccggaaccaatatcccatacgtggggctcgtcacctgacagtctgaccccggcgtccttggcaacgctgactacgccgtcatcaaagctgcttacctacatatacattgagccacattctacatgtacgaaaagaagattgcattggcgctgaagaagctatttcaacacggtgtaatgaagctagaagatctgtttatcacctataagctatcgaatgatcataatgctcctgaagatatgcctgangcactaaatgacagcctgaatgatatgcagcttgagtacctgcatctttatct

SEQ ID NO: 296907 - DNA, 203 bp, Zea mays
ggcggccaacatcaaggtcgagtcctactgtccggcgctcttcgctaagctcctggagaagcgcagtgttgaggatctaatcctctccgttggatctggtggtggcgctgctccagttgctgctgccgccccagctggaggtgctgcatctgctgctgcccctgctgcacaggagaagaaagtttgagcccacggcggagtct

SEQ ID NO: 296908 - DNA, 374 bp, Zea mays
cggacgcgtgggtcgtgtcgcactcgcacagtcgcactccataaggcaaggaggaaaacagagagacgaccaccgcttcgcgccggccggccattccatccggcaatggcctccgccgccggtgctgcgttcgccgccatcaccctcctcatcctggtacccctcgccgccgcctcggactccgaccacaagtaccaagcagcggagcctgtgacgctctgggtgaacaaggttggtccgtacaacaatccgcaggagacatacaactactacagcctcccattttgccatgcgtcagaaaaccatgtgcataagtggggaggactcggcgaggtccctggtgggaatgagctcattgacagccagatcgacat

SEQ ID NO: 296909 - DNA, 423 bp, Zea mays
cggacgcgtgggttcttacacaccaatgcttacaaacaaacacacacacacagcacgcgatcccgctgtcccagcagctggagtacttcagggagtaccagacgaagctggcggcggtggccggcgccgggcaggcgcgctccatcctcagcggcgcgctgtacatcgtcagtgccggcgccagcgacttcgtgcagaactactacataaacccgctgctgttcaagacgcagacggccgaccagttctccgaccgcctcgtggccatcttcggccgcaccgtgcaggagctctacggcatgggggcgcgccgcgtcggcgtcacgtcgctgccgccgctgggctgcctgccggcgtccatcacgctgttcgggcacggcgccgccgggtgcgtgtccaggctcaacagcgacgcgcagagct

SEQ ID NO: 296910 - DNA, 380 bp, Zea mays
gcacgcacgaactgaacggagctgacgccgtgctttgtgattgtgactgtcacgcatgttcttcgtgtcactgtgacaactttcgtgacgaccatgtgcatgcatgatcgaccggaccgacggatgcagtacgagaggcacgaggcgaagaaagacccggagcacgcgcagcggcacaagatcgaggagggcgtggcggcggtggctgccctgggcagcggcggcttctcgttccacgagcaccacgacaagaaggaggccaaagacgcggcggaggacgccggggaggaggaggagtccggccgccgcggcgaggggaagaagaagcaccacttcttcggctgatcgggctgctgctcgatcgatctacttgcgtacgt

SEQ ID NO: 296911 - DNA, 307 bp, Zea mays
tctgggactctttgtcggacgcgtgtgcgtactcgtggactgcggcggaggatccaccggggcagggtcatgcgccgaggtcgtgtgcgctgcttacctaaacacgatgtgccacgacgagctccgagcctgtggcggaggggcgtgcctgagcgcatgcgacgcgttctagcggtcctagtactgctgcagcggagccttcaagtacacagcgtagtgccgttcgacggcctactggcaggtgttgaagactgcgagccctaacacttacaactacgcattatacgattccaccttcacattcacc

SEQ ID NO: 296912 - DNA, 337 bp, Zea mays
atggcccgcgtgcgcaagtcctacgtaaaggctggcgagatcgccgaggaggtgatcgggaacgaccagaccgttcaagctttcgtccaaaatgaaaatgcaccgaggctctacccggaggcgcttcttaggacgctcacctaccgcatgaggggccgtcatcgcaagggcctcgggctcggctacatgcactatgtgctttttctctgggaagcgcgtgtcatatgattcaacagagtcgctctccacaaacgtatatggaatggcgtagagtgctttacctccatgcgtcaaggccaaattcatggctctgtgctcggtcaggcggttcctaaca

SEQ ID NO: 296913 - DNA, 430 bp, Zea mays
cttaggagggcaacgaccgaaggaatttgggtcgcggtatgcaagaatcctaacgttgttgtgtgggatatagaaggagccgatggtcaagaacatcaagatgatgcatgatttgagaatcaagctgcattgtttgccttgtcgatatccgatgtaatattttttaacatgtaagtgtcgaatctagcttgcaaataactgctttcgttccttgatcattcatatatgttacgtacgctccgatatcgaaccgcttaattaattcagcacaacacaggacacatatatatatatatatatatatagtcttcttttttcagtaatgtgcaggacatcggtcgactgcatggcgcgagtattcctcttcttcgtacaacatttctggagagacataatcacgatatgcatatgacgaaagtggtgatcgctg

SEQ ID NO: 296914 - DNA, 310 bp, Zea mays
cggacgcgtgggctcgtctccccttaacacatgcaactatatcttcagctagcttctccctgcctcgccaccaccatccctgtctccgggaaccttcctgtcacctcggaggccatggcttccatggcctatatagctgcctgtgccgcggcattggcgatcttcgtcgctctgctccgctgggcgtaccgatggagccaccccaagtcgagaggcatgctcccgccgggctccatgggcatccccctcctcggcgagacgatgcagttcttcgcgccgaacccgacctacgacgtgtcccccttcgtga

SEQ ID NO: 296915 - DNA, 336 bp, Zea mays
  unsure (1)..(336): unsure at all n locations
gcacattcacccgncgtcacgcatagtacgaactcccggtccgaaaggcaaaccagggaccgggcccaccaccaccaccctctgtcttctcctccgctgccgattcaaaagcacccgtcctgtcccctcgcaaaaccctagctccagccaccatgaagggcaaggctgacacctccaagaaggaccagggcatgctcctggcgggcggcgccgctccaaagcgcaagaaggccgccgcgagcgggaagaccaaacgcccgcccttcggctttttcgtcttcatgtgtgaattcaagcacgaagtataagcgctgcaccctggcaacaagagcgttt

SEQ ID NO: 296916 - DNA, 324 bp, Zea mays
cggacgcgtgggcggactcgtgggcggacgcgtgggaaacagtttatcagttgtgcaaacggtctgtttcacaggctcgtgccggtgctgatgttgtcagccctagtgacatgatggatggccggattggagcacttcgctctgctctggacgccgagggcttccacgatgtctccattatgtcctacaccgcaaagtatgccagttcattttatggccctttccgagaagctttagattcaaatccaagatttggagataagaagacgtaccagatgaacccagctaactacagagaagccctcatagaaaccgcagcggacg

SEQ ID NO: 296917 - DNA, 248 bp, Zea mays
  unsure (1)..(248): unsure at all n locations
aggcgtccgcgagttttgccatttgaaaatgatagggataatgatgacctcgtggcttctgaaccgggaggggcgctccttcttatcctgcagttccaccccccaccaaatcacgcatggcatctccgccgccgtcctcacccccatcgtaactggagcgtccatcttcatcagcgcggagacagtgcgaacgctggcgctgcgcggagcccacgtcatcatggccctcangaaccttcccgctgccc

SEQ ID NO: 296918 - DNA, 279 bp, Zea mays
  unsure (1)..(279): unsure at all n locations
gcagccatgggtttatctttggccgccgtttcgagcacattcctgggcacccgcctgggggaccgggcgccacagaacgggcgcatcgtagcccagttcgggttcaggttgggctgaaaggcgaatcctgcttcgaaaaaagtggcgaagacatcgacctcctctgaccggacgctgtggttccccggcgccgtggctcccgactacctgtacttgctcctggtcggcgactacngattcgacccgttcagtctctggaagcccgtggagtacctgcag

SEQ ID NO: 296919 - DNA, 276 bp, Zea mays
  unsure (1)..(276): unsure at all n locations
cggccgaaaaaccgggccgccgacgcgtccgggccgtgctacacaacatccaacgggggggcttcacagtggcaggcatcntaccacacagggtggtcttcctaggcaaaaagcgctccctcaacaaacaccacctcacctccataccgatcgtgctatgcggcgctgcgccacttggcaaagacctccacgacacactcttagcccgggtggcacaggacgacttccgacaaggatacgggatgacggaagacaggccctggctgttcatatgcc

SEQ ID NO: 296920 - DNA, 300 bp, Zea mays
  unsure (1)..(300): unsure at all n locations
accgggntggaaaacccgggccggccgacgcgtacaaancacactnatnttgctgtcctgctcgacaatgangccatctatgacatctgccgcctttgccttttcattaagcgcccaacgctacaccaacctcaacangcttgtctcccaagtcatctcatccctgaccgcttccctgaagttccatggtgctctaaaccttgattttaacgacttccagaccaacctcgtgccctacccgagcatccacttcatgctttcgtcctacgctccatacatttctgctgagaaggcctacca

SEQ ID NO: 296921 - DNA, 396 bp, Zea mays
ccatctccggctgacgacgctgcagcagatgcacaagatcctgacgccgcggcaggcgggcaggggcctcctggcgctcggcgactacttccagcgccttcgcacgctcagctcgatgtgggcggcgcgcccgcgggaggcggccatcagctagatgcctgcggcgtggcaggccaaaagctcgctcactggtgaggcgaccgtaccaaagaacacgacgccgacgacgacgaagactaaagagtggtagcagttcgctgtatacttgcccccccaatgcaaggtgtaaagcccagtggaggacgaagagatcgaccttgctgtacgagtacgacgaacggaagggatgcttctcggtcggcggcggcggcgatctctctttacaaagcgattagt

SEQ ID NO: 296922 - DNA, 371 bp, Zea mays
gtcaagaagcatctgcgagcacaggaaatagcttcggagtgcaaactgccttgcatatatgtcgtggacagcggaggtgctaatctccccaggcaggctgacgttttccctgaccgtgataattttggccggatattctacaatcaagctaagatgtcttcagatggtatccctcagattgcagtagtcttgggttcttgcactgctggtggggcatatattcctgcaatggcggatgagagtgtaatagttaagggaaatgggactatatttctagcgggtccaccacttgtaaaggtcagaatattctggaaccattttgtttattttctaaatgataaaatttgggtggctaaatctctaatatatta

SEQ ID NO: 296923 - DNA, 348 bp, Zea mays
gtatttaccaggcatgggaccttacaactcggcagtgtgtccaaacactctctgagcataaagctggtgtaacatctgtgctttgttgggatgagaagttattatcttgctcccttgacaagactgtaaaactctggactctgtcagagtcaggaaaccttcaagtcaaatatacccatgctgaggagaatgtaagaactgcactcctgccgatcatgcgttatttttgttttgttggatgctgcatactgtctatacctaaatagtttatggcaacaacatttttatcggtgtagtaactaagttttactattaaggttcagagttaagagcaacaattacattttc

SEQ ID NO: 296924 - DNA, 313 bp, Zea mays
agccatgtggaggagggcttcaacgatgggccggttcatggttggcgcctcgctgcgacgcggggccggcgacagccggcgcgcaaaactgcgtatgcagcatcataacacggtccatgttgcagagcatgctgagacaccggggatacagagggtgccagggcgccttctacacctacgaagccttcatcgaagccgccagcaagttgctcggctttagcaccaccatcgacgagcatacgcacatgccgtagctcgccgccttcttcggccagacgtaccacgagaccacctgtggatgggcgactgctcc

SEQ ID NO: 296925 - DNA, 432 bp, Zea mays
gtgccatgctagagtgtgatggaatatgaagagcatgagaagagagcatggagtgttgatggttctcgcacagactcttcaatgctagtatctgggagtgatgattgcaaggtgaaagtgtggtgcacaaatcaagaagcaagtgtgatcaatattgatatgaaagcaaatatttgctcggttaaatataatcctggatcaagcttctacgttgcagtcggatctgctgatcaccatattcattactttgatttacgtaatccaagttcgcctgtccatattttcggggggcacaagaaagcagtatcatatgtgaaattcttatctaacaatgagcttgcgtctgcatcaacagatagcacattacgcttatgggatgtcaaggataactgcccggtacggacattcagaggacacaaaaatgaaaagaac

SEQ ID NO: 296926 - DNA, 371 bp, Zea mays
ctctgtttcgtcctcatcgaatcggagtttcgcatggagtcatcgcggtctcgggagcgggcgcgccaagcgcatgactgtgccgccgctccgccaccaaagcgagaagtggtagccaggggtggcgcgtcgccaccatggagggaggatgaccgtgatggacacttcgtattcgaccttggcgagaacttgacccgccgatataaaatcttgagcaaaatgggagaaggtttgggttttctgcaatctgtcgtctcctcttctgctgggtatctccgttattattctaatgaagagggctacgagttggattttcgtaggtacattttggcgtgttttggaatgctgggaccgtgaaacacatgaatatg

SEQ ID NO: 296927 - DNA, 388 bp, Zea mays
tcttccatcctccgccgcgtcctttttgccaagcgcagcatccgccgcatcacggggctgtgttgatctcatccatggcggatgtgtatcatcaacaggacacgccgaagctcttcaaccgctggacctttgatgatgtccaggtgaacgacatctctctgaacgactaccttgctgtgaactcgtcttatcacgctatgtacctgccgaacaccgttgggcgctactccaagaagcggttccgctaggcgcagtgcccgatcgttgatcgccttacatactccctcatgatgcacgggcgcaacaacggcaagaaggtcatggctagtcgtatcatgaagcataccatggagatcattcacctgctcaccgattccatcaccatcca

SEQ ID NO: 296928 - DNA, 411 bp, Zea mays
cacgcacaagcgcactctagcaatggcttctgaggttgtccgccctagcgacgccgagctgctaaaggcacaagccgacatatggcggctcaccctctcctacctcacgcccctgtcactgaggtgcgccgtggagcttggcatccccacggcgatctaccgacatggcggggctgcctcagccgctgagctggtcacggagctgtctctcccctacacataagctgccgttcctgcgccgcctgctgcgtctcctagccgcgtcgggcgtgttcaccgtcgacaagcagagcacggaggacgagcggtaccgcatcacccccgtgtcctacctactggtggacggcatccctcacgaggaccacatgaaccacaccgctctggtgctcacctgcaccttgacgcgctaca

SEQ ID NO: 296929 - DNA, 412 bp, Zea mays
caacgggtgagctttatacatggggagatggaacttacaatgttggccttctcggacaggggaatgatgtaggacactggatacctaataggatttctggagcactggaaggtcttcaagttgcttatgtttcatgtgggacctggcatacagccttgataacatccatgggccagttatttacctttggggacggttcatttggtgtattaggtcacggacatctgaaaagtgtttcttacccaagggaggtagagtcactatcagggttgaaaacaattgctgtggcatgtggtgtgtggcacactgcagctatagtggaggttattgtcactcggtccagttcaagtgtaaagctatctgctggaaagctgttcacatggggagatggtgacaagcatcgacttggtca

SEQ ID NO: 296930 - DNA, 263 bp, Zea mays
agtacgcatggggtctgcacgaggagctcatgtcgaacaccaataacgttagtcgtgggcgaccaccagtaggcagtagccacagcaatcatggggtcggtgccgccggcagagggggacaggcgccagccccagcagcagccgcacgtgatgatgatcctgtacccggcgcagggccatgtcacgccgatgctgcagctggccaagctactccacacacgcggattccacgttacctttcgaaacaacgagtttaaccaccg

SEQ ID NO: 296931 - DNA, 438 bp, Zea mays
  unsure (1)..(438): unsure at all n locations
cggacgcgtggggtgaatactgattgaagatttgtactaggtcattcgagctgctaagtcggattcccgccttgcaaacaaccaccttcctcctgacattcagaagcttcgttgtcgggcttttttccaagcactgagatttgctcccccaattgaagctctaggcaaactattggtggagaggatgaggtcatttgggaagtatattgctttgcatttgcgctatgagaaggatatgcttgcctttagtggctgcacatatggtttatcacggacagaatcagaagaacttgcaatgatcagagaaaacacaacctactggaaggtgaaagacattgatccattagaacaaagatcccatgggtactgccccctgacaccaaaagaagtcggtatgtttctttctggactanggtatccatcaagcaccccaatcta

SEQ ID NO: 296932 - DNA, 432 bp, Zea mays
  unsure (1)..(432): unsure at all n locations
atcagctcgacgctcaagattgcgcaagcaggctgaatgggaggaagtagccaatcgggcggatttgctaaagcaggaaaatagttcacttaaagaagaattgaaacaacttcaggagaagtgtgatggcttgacctcagaaaatacatctttacatgagaagcttaaagcgctcgtggatgagaaatcaaatggaaattggtacaaggattaaaggctgaaacttctctctctttctgactgctgatgtaaggttacttgtgagctgccgttaggcttacagaataccaactctgattgccggtgtaatgttctccatattttttttccagataacttggtggtaacctgataggacgacaactaaagaggtattcatatacggtattagacttttgtccgagggggtaaaattgtatcatangatttgac

SEQ ID NO: 296933 - DNA, 369 bp, Zea mays
cggacgcgtgggcggacgcgtgggcggacgcttgggttgtggcgcagcagggctcctccagcggtccagttcctctgcttccggtgattgattggtccggaggcgcctcgccccgctcctccgccgccacaggatggcgctgctcacggcgccggcggtggccgcgctgctgctgctcttctggtcctcggcgtacggcggtgaccccccaaggcgagggcgtgccgccgccgtaccaggacgccagcaaggacgtggaggtccgcgtcagggacctgctcgcgcggatgacgcttgccgaaaaagtcggccagatgacgcacatcgagcggatcgtcgcgtcgccgcaggcgcttcaggactactaca

SEQ ID NO: 296934 - DNA, 174 bp, Zea mays
gtcgcccacgcgtcgaagccccactcccccagcctcgaaggaccttcagaacccagaatctaaggcctcagcgttccatcttcctgcccgggggtcgcctgagatcacataaacaatggtgaaggctgttgctgtgcttggtagcaccaatgggtgtaaagggcaccatctttt

SEQ ID NO: 296935 - DNA, 214 bp, Zea mays
  unsure (1)..(214): unsure at all n locations
atgacgcacaggntatctaataacttattgtgtcccttaggggacactgtgctctgaacgggggtgtttacaagattcagaccaacctgttaccctatacgaggatacactttatgctttctttgtacactctacacatatctgttgtgaaagcctatcacaagcacatctctgtgggtgtgataacaaacacagcgttttagacctattttat

SEQ ID NO: 296936 - DNA, 387 bp, Zea mays
tcgttgacacgtgtgtacaagtggcaagggctctaagtctggagcctcaataaggtgcgccggttgccaggactcaagcatgatattcactattcgttagcctttcccttacatgatacaccttatgcagcatccttgcaatgagtgcaaggggactgaatagtgcatcaatgagaatgaccgctacccagcgtgctaggctgagaaagtcattcacgagaagaaggttcttgatgttcatgtctagaatgtgatgctacacaacctataaatcacccttcctgctttagcaaatttatcgcctgatactacactggagacattgtattcactctccagcagagagatcactcctaatttaatagaatgtgtgaagatcttttctat

SEQ ID NO: 296937 - DNA, 346 bp, Zea mays
cagagagagacaagtggtttccaaagccaagtgtgtactagcagtctagcaaccagctagctggggcggcagcaggcagccatcatgtcggaggagaagcaccaccacttcttcaaccaccacaagaaggacgaggagcagcccgccggcgagtacgggtactccgagaccgaggtggtcaccgccaccggcgagggcgagtacgagaggtacaagaaggaggagaaggagcacaagcacaagcagcacctcggcgaggccggcgccatcgccgccggcgccttcgcactctacgagaagcacgaggcgaagaaggaccccgagcacgcgcacaggcacaagatca

SEQ ID NO: 296938 - DNA, 451 bp, Zea mays
cggacgcgtgggcggacgcgtgggcggacgcgtgggcggacgcgtggggtgtgttgggtgcatccgttgcagaaaaacgcgaaggttgtcactattgacagctacgaagatgtaccagtgaacgatgagaagagtctgcagaaggcagttgcaaaccagcctgtcagtgtcgcaattgaggctgctggcacagcatttcagctctacagctcggtaattggcgctcaccttgctgctgggttcatctgtggaccatttggttaaattccgagatgaatgattcaatcatctagtattctagtgtttgattatcagttggtggccattaaagaaataaaatccatctgccttgaacaagacatgcccatgttaggtcgaggtcacctaattgctttaaaactgtctctttcatatcgctttactcaagattattttctctggaaagaaatga

SEQ ID NO: 296939 - DNA, 347 bp, Zea mays
cagagagagacaagtggtttacaaagccaagtgtgtactagcagtctagcaaccagcgtagctcgggcggcagcacgcagccatcatgtcagaggagaagcaccaacacttcttcaaccaccacaagacggacgaggagcagtctgcctgcgagtactggtactccgagaccgaggtgggcaccggcaccggcgagggcgagtacgagaggtacaagaaggaggagagggagcacaagcacaagcagcacctgtgagaggccggcgccatacgcagacgcgccttcgcactatactagaagcacgaggcgaataacgaccatgagcacgcgcacaggcacaagatca

SEQ ID NO: 296940 - DNA, 457 bp, Zea mays
atcgaggagcttggtgaggctggtaaagtggatgaagctgaggcacttatgaaacgggtggacattctaaacgctgagaagacagctttatctaaccaagcagacagcaaagtggctatgcttgagaagaagatggagctttgcgaaacgtgtggatcattcttagttgctgatgatgctcttgagagaacccagtcccacgtgactgggaaacaacacattggatatggtatggttagagatttcctggtggaatacaaggcggcaatagagaagtcaaaagaggaagataggcttgcaagggagcagaaagcagaggagcgtcggaagcagagaggaaaagagtatgataatgggggcagggatagagataccagaagggagaagtctggggagcgtgactatgaccgtgatcgtcagtatgagcgaagccgtggaagagacaggtcttatgatt

SEQ ID NO: 296941 - DNA, 371 bp, Zea mays
gcattggcaagattgataattttttgacttttgaaagggggtttctgcatggggatagaggcggccctgtttctgatccctcaagtcaccttggacgtgttgctggtgttgcaatgtttgttgacttggagacaagctcatgtgacataattaaagatgtaaacagcaagaagctatcaagagtgagatcttttgtttccggtgactgcgttgttatggggccatggattggacgagtgataagagcatttcatcttgtcacacttttattcagcgatggagcaaagtgtgaaatcctgttaagggattctgatgtactgaagcccattcctactgttctttttgaagatgcaccttacttttattatcct

SEQ ID NO: 296942 - DNA, 180 bp, Zea mays
cactttactacagaggagctgctgctgcaattgttgtctatgatataacaagtccggaatgattgagcaaagcacagtattgggtaaaggttaatggccgcatcatcaggaagcggatccatgtccgtgtggagcatgtgcagccctcccgttgcacagaggaagttccggcctgaggaa

SEQ ID NO: 296943 - DNA, 296 bp, Zea mays
ggaggacataagggatttgtctcgagaggaatgtgtgacatacttgagaaggaggagcaggggcttttcaagaggagcttctatttatagaggagtgacaagaaggcagaaagacgggagatggcaagcacgcataggactggttgctggaactagagacatttacctgggaacattcaaaacagaggaagaagctgcagaggcttatgatattgctgccattgagatacgtggcaaaaacgctgtgaccaattttgaccgaagcaactatgtcgataagggtatgcactgtatag

SEQ ID NO: 296944 - DNA, 424 bp, Zea mays
gcgggcagcggcctgccggtctccgccccgcactcccgcagccatggccgccgccgccggggcgttggttgccgagcccaagaccaattacgatcgccagctcaggatttggggtgatcaaggccaaactgcactggagaaggccagcatatgcttgcttaactgtggtcctaccggaacagaagcattgaagaatctcgtgcttggaggaataggaagtgtgattgttgttgatggctccaaagttgaagcatctgatctggggaacaattttatgtgtaatttctttgctatgtgattccacctgttcttctgaattcatcctcagaaattgatggaactcatattctggtaccttatatttgcattcagtggatgaaggatgtttggggcaaccaagagctaaattatatgtcattcctac

SEQ ID NO: 296945 - DNA, 317 bp, Zea mays
ccaagtcggcgtcccaggacgatctcaagaaggcctaccgcaaggctgctatcaagaaccagcccgacaagggcggtgaccccgagaagttcaaggagctcgcacaagcctatgaggttttgagtgatccagagaaacgtgagatttatgatcagtatggtgaagatgcccttaaggaaggaatgggcggtggaggatcccatgttgatccatttgacatcttctcatcattttttggaccctcttttggaggaggtggtggaagcagcaggggaagaaggcaaaggaggggagaagatgtagtccacccacttaaa

SEQ ID NO: 296946 - DNA, 342 bp, Zea mays
caaggtttcaaggccattaccttggaggccagcgactaatgttttccgtgttaaagaggggggtcgagctatattctgggccaacagaccaaagagctatcttaaaaggacattaggttgggatcagtatccccatggacggtggggtgattctcggaacccatcatatggagcacttactgaccaccagcgcttcacaaacttctgtcaagggaaactcacaagcagcccatggtcagaattggacggtcttcaaccagagacaaagattatcgatgaccagttggtgaatattaaccagaagggtttccttacaattaacagccaacctgctgtaaatgg

SEQ ID NO: 296947 - DNA, 294 bp, Zea mays
gcattggtggcgagtacctctccgacgccacggcaggaagcctatcgacgatcttcgacggcggcggcgtgctgggaggggtcctggcgggccacatctccgaccgcctgaacgcgcgcgcgatcacggccgcgagcttcacttactgcgcgatccccgcgctcttcctgtaccgcacgtacgggagcatgtcgatggcgtggaacgtctcgctcatgttcgtcacggggatgttcgtgaacgggccctacgcgctgatcacgacggcggtgtcggccgacctcggcacgcaca

SEQ ID NO: 296948 - DNA, 344 bp, Zea mays
  unsure (1)..(344): unsure at all n locations
gcccacgcgtacgccacaacacgggttggttatatcctaccactgcggttcgggttcgggttcgcgaggttctccggggggcggtttcgtgggtgagcggatcgagatggcttcgtcacatgttgagtaccgctgcttcgtcggcggcctagcctgggccacggacgaccactccctccacaacgccttcagcacctacggcgaggtccttgagtccaagattatcctcgatcgggagacgcagaggtacggcggcttcggcttcgtcaccttctccacggaggaggcgatgcggaacgccatcgagggcatgaacggcaaggagctggacggncgcaacatca

SEQ ID NO: 296949 - DNA, 328 bp, Zea mays
  unsure (1)..(328): unsure at all n locations
ccttctnctcccccttctccttctcccgtccactcagcgtgcctgactgcccgtgcgcgccgtcgcgcagtcgctctcgcgcgcggcgacaactgagccaccgccgacggtccaactcttcgtcggaccctttgccggcgacgagcacccaccaggggtttcatggtagcgtgacctgtctcggcctagaaaatgtatataaagaaggtcgtaatcgaagggtttaagagctacaaggaggagatatcaacagagcccttcagtcccaaagttaacgtagttgttggtgcaaatggatctggcaaatcaaatttctttcatgctatac

SEQ ID NO: 296950 - DNA, 298 bp, Zea mays
gtggagcagcagctgctgtcgcgggagatccgcaacgtgctggccgtgggcggggcggccggcaccggcgacgtcaagttcggcagctggcgcgagaagctggcgcagtccgggttccgcgccgcctcgctcgccggcagcgccgcggcgcaggcgtccctgctgctcggcatgttcccctccgacgggtacacgctggtggaggagaacggcgcgctgaagctcgggtggaaggacctctgcctgctcaccgcgtcggcctggcgccccatccaggtgccgccgtgccgttgatgag

SEQ ID NO: 296951 - DNA, 357 bp, Zea mays
  unsure (1)..(357): unsure at all n locations
cgcgtccggcaggggcctggannngnnnnnnnnnngnttttttcacgtagctatggccaccttttaagtgggcgtggaggctgtcaccgggaaccccgacacgctcggcgattgcccgttctcgcagagggtgctgctcacgctggaagagaagaaagtcccgtacgaggtgaaactcgtcgacctcggcaacaagcccgaatggtttctgaacatcagcccagagggtaaggtgcctgtgttcaacggtggagatggcaaatgcattgctgattctgatgtaatcacccaagtcattgaggagaagttcccgactccttctctggtcaccccttcaaaatatgcattagtgggatc

SEQ ID NO: 296952 - DNA, 263 bp, Zea mays
attccgagaaatccagtgctttccaaacgtgacgaaccagaaagaagaacctcccttcgggaaaagagcaaaatgatcagggtacgacacaccaatgtggggcctgcaattgcattgtgtgcgcactagcttaataaggacttgggccggccaaaggcgttgccccccggaatccatcagatccatcaatttcttgaacgcttttacatgtcaaggattgggatccggatgctcatatggcataacgttggtttgcatgaccc

SEQ ID NO: 296953 - DNA, 358 bp, Zea mays
  unsure (1)..(358): unsure at all n locations
ggccggcggaggcgtatcggatccatttattgaactgttaacttaacttttcttagctcaccaccaccacacacggganagaggtatatctagcatagcaagccacccaatcatctacttaacaacaactagctagccatgctgccgtccttcttgtcgccgacggcgagcgccgcggcctctgtgacgcctccgtcgcggcccataccaagcaactacgggccccccgtgctgggcccgctgcgggaccggctcgactacttctggtttcagaaccaggaccagttctttctgaagcgcgcggcggcgcaccgtagaaccgtgtttctgaacaacataccgcccacctttccctttt

SEQ ID NO: 296954 - DNA, 144 bp, Zea mays
  unsure (1)..(144): unsure at all n locations
caagatgccacnaatgttggtgacgaaggtggttttgctccgaacatccagganaacaagggaggagttgagctcttgaaaactgcaattgtnaacccagtcatcctggtcaaaaggatcttcaatactagttctagatcgcga

SEQ ID NO: 296955 - DNA, 370 bp, Zea mays
aaaaaaggcaagattggactgagatggaaaacagaaaaggaggtgatatctggcaaagggcgattcatctgtggtaataggcattgagatgaaaaacatggtctatgtagttatgaggtcaatttttcttatgttgaagcagacgagcagaaacaagcactagtgaaattggtagcttgcaaaagatgtgcagaaaagcttgcttataagaggcaaaaggagaaagagaatgaaaatgagctccctggtgaaaaggaaattgattttaaagacagctacaagagaaagagaaaacatgtggaaagtgaccacaactcacaggacgagaaatatagaagaaaggaaaaaggatttaaggatgccaaacatt

SEQ ID NO: 296956 - DNA, 274 bp, Zea mays
attctcaaccgccgccaatcccttcccgtgctccgcaaccgctgagtgagaataatagatggcctggaaggtctatagcccggctatcggcatccatctcggcacgacgtactcttgcgtcggcgtgtggcagcacgaccgcgtctagatcattgccaacgaccagggtaaccgcaccacgccctcgtacgtcgccttcaccgactccgagcgcctcatcggagatgcggtcaagaaccaggtctccatgaaccccatcaacaccgtctttgat

SEQ ID NO: 296957 - DNA, 368 bp, Zea mays
ggaaatgtctgtcttgggcttctcaacggaacggagattaatcatgggtcaactatcataggaggggatgtttctctgcgcggcaagttggttgtgtacgacaatcaacggaagcagattggatgggcagattcagactgcaccaaacctcaatcacaaaagggctttcctttcttcctctgacgaagcatcactcgctacataatacatgtgtaaagcgtaaatagtgaacgccattgtattgtaaaataccattattaatggggactggccttggggatgggtattatcgtcccttggaaccggcaaaaattcttcaatggggtggaccccgctggaaaggggataccatggtggttacctggatg

SEQ ID NO: 296958 - DNA, 171 bp, Zea mays
caaatccccaaagcctccgacccccttcctctctccctccgccgccgctgcgcacgcgagggacaagcgacatgggcgtctacacctttgtgtgccgcaacaacggcggcgagtggaccgccaagcagcactccggcgagatcgaggcttccgccgctaccccatacgagc

SEQ ID NO: 296959 - DNA, 369 bp, Zea mays
  unsure (1)..(369): unsure at all n locations
ggcttcgccgtgaactactggatgctcatgttcgggcgcttcgtggccgggatcggcgtgggctacgcgctcatgatcgcgcccgtgtacacggccgaggtgtcccccgcgtcggcccgcggcttcctgacgtcgttcccggaggtgttcatcaacttcggcatcctcctaggctacgtgtccaactacgccttctcccgccttccgctccgnctgggctggcgcgtgatgctcggcatcggcgcggcccctnccgtggtgctcgccttaatggtgctcggattgcccgaatcgccccgtgggttgtattgaagggccgcttgccgaccccaaaggtgtgcttgggaaaaacttccacacccccgaaga

SEQ ID NO: 296960 - DNA, 349 bp, Zea mays
tcggacaatcaaacttctgcctgcactgaagagactgtatatccttacaatgtacacttaaggctgaggaatcattaagcatcgggtctcaattctctatttgtgttacccatcgcgtgcatagaaagaatgggtgagcaagatgcaatctgcacctcgcaccatgtgaacaggttatttacttggccttctttgcctgctctaatacaaaaaaagataatttctatgcacggcggcattacacgatccatcaaccatataaagctaacataaaatctttatagaccatttaccatcaaatcatgctcacttgttctgatagaacttatatggactgatccaactgaaa

SEQ ID NO: 296961 - DNA, 210 bp, Zea mays
  unsure (1)..(210): unsure at all n locations
gcgtgcgccactgtccacctgggcggcgatggcgaccgccgcgagggagaggcgcctgccgggggcggtggccctggcgactctgatcggccggaagctccncacggggggctccgagcgcccggccctgcgctactgacacgccggctttgccaagcgtggagaggactactttctcgtcaagcccgactgtcttcgcgttcccgggga

SEQ ID NO: 296962 - DNA, 367 bp, Zea mays
cgctgcttcaagaaaccaccgagagcccaagcgcgcaaggcaggagagagagagagagaggagggggagaagcgtggggccggggagcaaagatggaggggaaggaggaggacgtgcgcctgggcgccaacaagttctcggagcggcagcccatcggcacggcggctcaaggcgccagtgccggtgacgacgacaaggactacaaggagcccccgccggctccgatgttcgagcccggggagctcaagtcctggtccttctaccgcgcgggcatagccgagttcgtcgacaccttcctcttcctctacatcaccgtcctcaccgtcatgggcgtcttcaagtgcacctccaagtgcaccaccgtcgg

SEQ ID NO: 296963 - DNA, 290 bp, Zea mays
cgctcctgtgcaccctgctgccggcgtcgcctgcccgtggcataaactgtcaccgtaactgtggggggtgtcaaagcgcacgagctcccgtagaagagcaagactgacctgcgagcgcaggtcaaggagctgaagtatgagctatccctcctccgcgtagacaacgtcaccggcggcgcacccaacaagctatacaagaacaacgtggtgcgcacctctatcgagcgcgagctcacagcgatctctcataagcagaaatcggcgttgcgggaggcgtacaataagaagaa

SEQ ID NO: 296964 - DNA, 346 bp, Zea mays
cggacgcgtgggcggacgcgtgggcggacgcgtgggcgcgtccggaggcaagagcgttccgcgccgaacgcggctcgccgctcttcctcctcctccccctctcccgtaggcgtcctcgccgtcctagcgtctgcctttcgacgctgctgccgtggagcgcagatcaaccctgactcttgccgatttcttctctcgttgatgctgaaagtcatttcttacatgttgcaaaatgtggaaaaaccttgccatgaaatggaaaaatggtttgaaaggaatggcaccgcttaagtccacaagcagattcttttaacgccattcttcaactatttgcttactgaattttcta

SEQ ID NO: 296965 - DNA, 229 bp, Zea mays
agccgccgccgctgcagtgtccatagccaccgcaggagactgacatggggggtttggtcaggacccacaagagcaatgcatacttcaagcgtttccaggtgaagttcaagagaaggcgcgctggcaagacagactacagggccaggataaggctgattaaccaagacaaaaacaagtacaatacacccaaatacagatttgttgtgcgatttaccaacaaggacatcac

SEQ ID NO: 296966 - DNA, 440 bp, Zea mays
  unsure (1)..(440): unsure at all n locations
ncnngccgcctctctctcttcttctcgtcgctttgggcagctagggcccttctcttcccgaactcnnccgagtcccgaggcgagggcgatgctccccctggctcgagccctcgcctccccgccgcgaaccagcgcctccggcttccgcctgctcgggcggggcggcancccacgctccctgcatncttcgnnctgcggcgagggtaccacgatnnggagggagctggaagaagaatgccaaccctttgggcggttaccgaattggcaaaaccctgggaatcgggtccttcggtaaagtgaagatcgcggaacatatattgactggccataaggtggcaatcaagatcctcaatcgccgtaagatcagaagcatggaaatggaagagaaagtgaagagagaaatcaagatactgagattatttatgcatcctcatatcata

SEQ ID NO: 296967 - DNA, 239 bp, Zea mays
ctttgaccataccattgaaatcaacgttccaatgtcccgcttcctaccatttaaggggacgggagattttaagctagcacagtctgatctatatacctatgatgatcgctctgttacacttaattcaaccctaacaaatccataaaatacttcaatagaacattttcctgatttcaacaatgactggagctatcttggtctctaacaatccatacctatcattgttgagcttgacactc

SEQ ID NO: 296968 - DNA, 430 bp, Zea mays
gctactactagtagcaccacactcgcagcgggagatgcggtgctgatccgcgcccgggctgggatctcgggagtggtgccgactcgtgtcggctcggctctgcctaggccagctccttgtcggttctgggcgagctcgcctgccatggagggcgacgcggacggcgtgaagtcggggaggcgcgggggagggcaggtgtgccacatctgcggcgatggcgtgggcactacggcggagggagacgtcttcactgcctgcgacgtctgcgggttcccggtgtgccgcccctgctacgagtacgagcgcaaggacggcacacaatcgtgcccccagtgcataaacatgtgcaagcgccacaaggtgagcccagccatccgaggggaggaaggagacgatactgatgccgatgatgctagcgacttcaactacc

SEQ ID NO: 296969 - DNA, 413 bp, Zea mays
ctttgataatgcatacagaggtggccaagatgttaaggttagttgattttcactacagctgtgggcttttaatcgagcatattaattcaatgcctactttctttattccccgaactgtaggtttctgttgaactatcattcatggaagctgtccaaggttgcagaaaaaccattacgtacgaagctgatactttttgtggaacttgcaatggaagtggcgtcccccctggaactgtgcctaaaacatggtaaacatgtccagggttttgtgtgatatacattcccaaagggatatttactgtgcaatgtacctgctccctgtgccatgggagcgggaaaaatgtcaagaatttttgcaagacttgccaaagagaacacgtagtgaaagggaaaacgtcagtcaagctagacat

SEQ ID NO: 296970 - DNA, 327 bp, Zea mays
ctaccctcttccttcacatcgtcatggaacttttcccccgccgcgaacttttcgagcggatcttgggcgagggccactaccattagccccccacttctaatctcatcaacgaccacttgtcgtgggtccaaagaaggatttcacttgctctgcgttattcacacgggacctcaagccccataattttctctttgtcaacaccgccgcggaagccccactcaaggccactgactttgggctatacatgttctacaaaccccgtgataaatactctgatgtcctcggaagtccatactatgttgcaccagaggtgctctagaaatgcta

SEQ ID NO: 296971 - DNA, 385 bp, Zea mays
cccccttctcccaattccttccaggtgccttctatccacccgtacgacgacaccattagggagtgcatttccatccacatcgaccaaaccagtttccatgtctgaaacgcgtgctgggagctgtactgtctttagcatggcattcatgctgacggtcagatgcccggtgacattatcattgtgggaggtgatgatgctttcaacaccttcttcagtgagactggtgctgggaagcactttcccctgtgctgttttttgttgacctttaaacctaacttgttattctattatgtgagaacctggcacctaccgccagctctttcaccctgagcagcttatcattttgaaggatgatgccaccaacatcttttgccttggtcactac

SEQ ID NO: 296972 - DNA, 392 bp, Zea mays
gcttgtgcagggagtgacgaagcagatcggtggctcagtgcacgagctggcggcgaaggtggacgagtacgcccgcggcatgatcagcgggcccggctcctcgctcttcgaggagctcggtctctactacatcggccccgtcgacggccacaacatcgacgacctcatcaccatcctcaacgacgtcaagagcaccaagaccaccggccccgtcctcatccacgtcgtcaccgagaagggccgcggctacccctacgccgagcgagccgccgacaagtaccacggtacaacgcaccacatgagctagcatatgtgccactgtttgcctgttgcacagcacagatcgtaccccgaccggaatctgtgcgtcatcttggcttctgtgtttgatg

SEQ ID NO: 296973 - DNA, 418 bp, Zea mays
  unsure (1)..(418): unsure at all n locations
acgattccaaagcgtgaaattgttgattgggttgatcttcatgaaatggttactgctggctgctgtactccagatggaaagggcgcgctgatcgggtcccacaagggcagttgccatttgtatgatacatatgatgacatgctttgctacaaaacacagattgacctgcaaaacaagagaagaaaatctagccagaagaaaataacaggatttcagtttgtcccaggggattcttcaatggtcataatcacatttgcagattcacgaatcagagttcttgatggatttgagctagttcataggtttaaaggattccggaacaccagcagccaaatctcagcttgcttagctggaaacggacggcatattatctncgcaagcgaggattcccgtgtatatatctggaggaacgatgatg

SEQ ID NO: 296974 - DNA, 362 bp, Zea mays
cgataggaggccccgggcttgcgcctggcgtcaggttccgtacagacctcgcaagtgccggcctcgccaatgttgcggcgacggtcatgaaccttcatgggtttcaggcacccgatcactatgagccaacgctgatccaagtcgtcgacgagtgatttccgctttgctggttgctgcgttgcagttttcagacattatctgaactaactcctaccacagttgtccggcatgtaatcgtactcaaactagactacctgggcaattacctgtgccaattaccgtgtcgaatgttcaaaaatgttttcgttaaggccttgttcgtttgtatcggattacactcgcaatgtatcggattacactcg

SEQ ID NO: 296975 - DNA, 307 bp, Zea mays
cggacgcgtggtcaggccagccttcgtctcggtacaaagcgcgttcatcgaggcggaccgggagaaaaaccgcctccatgcagacaacgtgatggctgaagcaaggttttctgcaaagcgcggtgacctgaccaccgctgtttctatactcaaggactgccggaggatgatcatatggtgcgcgtcaggacaatctggtgaccgtctgagccaggcactggatgccgagctgaaggagatgcatgatcggatggacaaccggcagaggtacgatgcattcggtcgagcatatgtgctctcaggcttg

SEQ ID NO: 296976 - DNA, 377 bp, Zea mays
ctgctagtagtaagcgttttctgccgatagtggtggttgcggcaatggttgccgccgccagtggcgccgtggagttcgcctacaacggcttcggcggcgcgggcttgtcgctcgacggtacggccaccgtcacgccggccggtctgctccagctcaccaacgacaccaacatgtccaagggccacgcgttccacccggatccagtcaagttccaccggccgatgctgtcgtccttctacacgacgttcgtgttcgccatcgtgtcggagttcctcgacctgagcaccagcgggttcgcgttcctggtggcgccgaccacggacctgttcacggcgatgccgcagcagtacctgggcatgttcaacggcaccgacaac

SEQ ID NO: 296977 - DNA, 420 bp, Zea mays
gtgcagggggtgtcatgtgatctcttcaatggcctgtggtacccaacagtgatgagcattggcccagtccttgacaactcgctgcagtgcggccccgacgccaagttcagcgcccagctgttcgacctgaggcgcctccggacgctgtctttctacagctgcttcccggcgagcaaccccacggccatcccgaccggcagctgggagaagctggcggggacgctggagacgctggagttccgcaccaacccgggcctgaacggcgccatcccggcgtacctcggccgcctggccagcctgcagtcgctggtgctcgtggagaacaacctgacggggcccgtgcccgcggagctgggcgcgctgtcgaagctgagacggctggtgctgtccggggacgggctgtcggggccgatccccgtg

SEQ ID NO: 296978 - DNA, 310 bp, Zea mays
aagaagaaagctcgtgtctttttcaagacttatgctgatgggatcacagcttgtgccaaggagatgacaaagctctctggcatatgttaaatcatcccagagatggagatctgggactatgacttcgaacccatgtgcttctccatgaatgccatccatggctcttcattcttcacaatccatgtgacatcagtggaccttattatctactccagacacgatgtgatgggcttgacttccaatactgaaggctatggtaacctttttacgttggatcgccagtccttctgcacacataatgaactcttgt

SEQ ID NO: 296979 - DNA, 422 bp, Zea mays
tacggattcgaattcgagccacgcctcacgcgtacgaacgtgaccaatgatacacaggatggtttatctggtgctgtaagttctggggggcgagagcgctgacagagattatctgaagagattgaggcttcaattatctgggtaaactgttcacagtcgctgcttctgccaggctccatggggcggtaacaaacgtaaaggatttggacgtgagcttggacaacggggcattgataactacctgagcgtcaaacaagtctcggagtacatctctcatgagcctcggggatggtgtcgataccactacaagctgtaaactgtcttgaaagattgtttggtccataagaataaatatatcttgatgctatacataactaacccgtgctttaaatggagtatgacatttcgaaaaaggcacatta

SEQ ID NO: 296980 - DNA, 393 bp, Zea mays
acgcggacgcgtgggttagacttgtttgacacgaaacacaatggaattctcgagtttgaggaatttgctctagccctttctgtgttccatccgagtgcaccaatcgatttcaaaatcgattatgctttcaaattgtatgatctcaagcaacaaggtttcattgtaaagcaggaggtaccttgcacttgcttatattcttaagtaaataacttctttcgcgccaatatttgttattgcatttgattcgtctgcatgaaccatgttgcttaaattttttctacatgtgttacacttgcttgtacgtgagtgcaattattcaccctctcaagtcatgtcctaatttagcataacgcattattcagtggaaatctatatctctagttaaattgaact

SEQ ID NO: 296981 - DNA, 341 bp, Zea mays
gacaactgcacgttacacaccttacagagctggagcagcatcagctgacacgctggtgcctatacttacttccttagttcctgcataggttgctacacctatatattctgaagaagagatcgagatgaccagcgtgtggaagaccaaagttctgcctggcctcaacaagatctttgacaaggatggcaagaaggctgcagctgcaggcttcttgaagtccttgaacacggaggagttagacaaggagattgaggacaagaagacagagctggagcccaaggtcgaggaagcctacgaagcatctcctgctgaggtcaaggctctgtacaaagataagaagc

SEQ ID NO: 296982 - DNA, 400 bp, Zea mays
ggttcgctgagaacctaccagacgctagtcctggtcctcacattcttcgcatacgcatgcttccacatgactcggaagatcacgagcatcgtcaagagcgcgctggacccccagacgaagatggggttctcccactggggacggctgcacctgcacacgagcgaggctccggctcttaacactggctggctgccgttcaacaccgctgacggctcatcgttgctcggcgagatagacgtcgcgttcctcgctgcgtattccatcgggatgttcttcgccggacacatcggggaccgcatagatctaaggatctttctgacgatcggcatggtcgggactgccgtgttcacggctctcttcggcgctggatactggctgaacgtccacagcttttactatt

SEQ ID NO: 296983 - DNA, 216 bp, Zea mays
ggagtacatcgagctggcgcgcaagatcggcaagttcgacgaggacaggctggcgctacagatgcgtctgctgggcaaatccggcatctgggaccagtcgtacatgccgcgctgtgtgtttgagcccaacgcccgctgcgccaccatgaatgagggtcgcgccgaggcgttcacagacatgtttgcggtgctggacgagctgttctacaagagccg

SEQ ID NO: 296984 - DNA, 386 bp, Zea mays
ccgtgccaatctcatatcttcatcacaatggataagcattccataccctttacaatggggtgcacgaacattcagtgcagaccatgcatttggtatgatggcagcggtgatggtttctttaatagagaccacgggagcattcaaagctgctgcacgattggctagtgcgacacccccaccagcatatgtcctgagcagaggcattgggtggcagggcattggcaccctactagatggcctgtttggcactgggactggttctactgtttctgttgagaacgttggtctcctaggatcaacgagggttggtagcaaaaagagtgatacaaatttctgctgggttcatgatcttcttctccattcttggaaaatttggagcacttttt

SEQ ID NO: 296985 - DNA, 268 bp, Zea mays
gccccacgtgatccgagccatctccgatggagtcgaacaactgatcgccgagggggcaaacgatgtgatcgtgcccagagtgatgacatcagggtgcttttcggtctacctgaccatgtacgctgaccccaaggaagggcatggctcacgcacctgttgcctcaagcggtttaacactttgtcttgggtgcacaatgcgatgctgaagcgcgcgctcttgaagctcccagcgaagcaacctggggcgaggatcatctatggcgattac

SEQ ID NO: 296986 - DNA, 285 bp, Zea mays
cttctgctccccctacctatcaggttctttttcatgacgctctccagactattgtttcgggggtgagcgtatccatattgcagcgtcggatcatgaataccgttgcttcattggcagccatttctgggccacggacgacaactacctccacaacgtcttcagcacctaccgcaaagtccttgactacaagattatcctcgatcgctatacacacaggtgccaccgctctcccttcgtcacctttttcactgaggaggcgatcaagaacgccatcgatggcatcaa

SEQ ID NO: 296987 - DNA, 422 bp, Zea mays
  unsure (1)..(422): unsure at all n locations
ctccggcgccgccgcacagtccccgtcgtccgcgcccaacaaggagcccccgcagctgtcccccgccgaccggttcgagcagcagcgcaagaaggccaagctcatctccatgctcgacgaggtggaccggcggtacaaccactactgcgaccagatgcagatggtggtgaacttcttcgactcggtgatggggttcggcgcggcgacgccgtacacggcgctggcgcagaaggcaatgtcgcggcacttccggtgcctcaaggacgccatcgcggcgcagctgcgggccacgtgcgagctgctgggcgagaaggacgccggcaccagctcggggctcaccaagggcgagacgccgcggctgcgcgccatcgaccagagcctncgtcagcagcgcgccttccaccacatggtgatgatggagc

SEQ ID NO: 296988 - DNA, 338 bp, Zea mays
cgtcaactgcacttgtgttctactagtgacctcctattcatcgacggcgacgctttaccttccaggcaggggtggatgatgagtaccacgtcaccatactaatcgctgtgataagggagtacatcactcagcggtcctccaatctgtcgaccgactgaaggttttttatatgggcagaactgactactatggaggagatttctcctcactcaacattaatcagatttttactatgttcagagtggaacacaagccttctttacatctaagcgcaagcagagacaacaccgtggacatagggccaaaggttatcatagcgaatgggacattgattcaaa

SEQ ID NO: 296989 - DNA, 396 bp, Zea mays
gccgtgcgcggaatgcccgtggaaggaggggagagagggagggcgcatgcgcaggcgcagctgagctgagctaagctgagcccgcgaggttcgcggtctgcggtgcggcggcggaggtctcgccagcgcgatggccagcggcggctcctccaggtacagctcgtacaaggcgccggggctgcgcggcgcgctgctggaggcggcgcacgtgtcgtgcctcgaggaccggtacgcgctgggcccgcagctggggtggggccagttcggcgtgatccggtcctgctccgacctggtcaccggcgaggcgctggcctgcaagtccatcgccaaaggccgggtcgtgttccccgacgacgtgcgcggggtcaggctggagatcgacgtcatggggcgcct

SEQ ID NO: 296990 - DNA, 206 bp, Zea mays
aagatttgaaaccagacttggttcttctgggcccgtgggccaatatattttgggtggtgaaaatttacaagggagggtttaaatcacttttgatggacatgtgatgaatgggggggcttggcatctggagtctcgaggctattattccttatgccaagcaacccaaggaatagttggccacatggggccctatttcattaccggga

SEQ ID NO: 296991 - DNA, 318 bp, Zea mays
acgatctgacccaagcgagggttacacctcacccaaggacctatccaatcctatggagggcggcgactcgtacggcgccgacgccagccgctccttggtgtaccgcgcggtcatcgccaacttcatcgccacgctgctctttctctacatgaacgtggccaccgtgatcgggtacaagcaccagacggacgcgttggcgtcgggccccgactcggcgtgcggcggcgtctgcatcctcggcatcgcgtgggccttcggcggcatgatcttcatcctcgtctactgcaccgtcggcatctcatgtgggcacatcaaccc

SEQ ID NO: 296992 - DNA, 404 bp, Zea mays
  unsure (1)..(404): unsure at all n locations
atttccggtccaccatcagcagacttgcgtcgtcgcggagggctcgcgtcggggtccatctgaacatccgccagaccgccgccaccatgccgcaacctaccgccgattcgagcaccatggtcgccggcgagcatcagcaacaacagcaacctgccaccgcgcggatctcctcctcctcaaccagctccggaaggctcgtcactccgttctggaaagtatgagagggacgcgaggaggtactgggacatcttctacaggcgccacgaggacaagttcttcaaggatcgacactacctggataaagaatgggggaaatactttaagggacgagatggagaaaagaaggtggttctagagggtggttgtggagctgggaacacaatctatccatggctntctacata

SEQ ID NO: 296993 - DNA, 413 bp, Zea mays
acaaggcagcagcacaagcaagaaccacacctcctcccttcgcctgtgatcatgtcgtcttgctgcggcggcaagtgcgggtgcggctccagctgctcctgcggcagcggatgcaacggctgcggtatgtaccctgacgtggagaccgccgccaccagcagcgtcaagaccacggtcctcgccgcgccgaccaccaaggccagcgccggcggcttcgaggcggccaccgagggcggcggctgcgactgcaacacctgcaagtgcggcaccagctgcggctgctcctgctgcagctgcaactgagccggcccggctcgcgatgcgcacgagagtcagagacgagacgaggagcgataatataatatatagcgcgtcagaatagatctgcactgaccgcatatcatgtcgtcgtc

SEQ ID NO: 296994 - DNA, 362 bp, Zea mays
cgcaggaggagtatgaggcggcgctgcttgcgtcgacaacgctgtacatcggtaatatgtccttctacaccacggaggagcaggcctacgagctcttctcccgcgccggcgagatcaagaagatcatcatggggctcgacaagaactccaagaccccatgcggtttctgctttgtactgtactactctagggaggatgctgaagatgctgtcaaatacattagtggaacgatgcttgacgatcgtccaatccgtgttgatttcgattggggctttgaagaaggcagacagtgtggccgtggacgaagtggtggacaagtagtggcctggtcttattctaacaaatatacatgggtttctaca

SEQ ID NO: 296995 - DNA, 233 bp, Zea mays
  unsure (1)..(233): unsure at all n locations
angaaggctngnttctctacattcgcagttgccgcctaagagctttcgccctgccaggctggagagctagtgctgcctaatccttccttggatgtctgatgcaaagaaataagaacatttatttagctgataggttgaatcgttcccttgtacatttgcagtttattttgacgttcgccattctttattttgttgagcgttcgttctgactccgcccaatgatgatagaagtg

SEQ ID NO: 296996 - DNA, 473 bp, Zea mays
tgcaaggctcagggagatccgaagctatttggatcttgtaattgaagggaagctcccactgaatcatgagattttgtatcatttgcaggttagtccctctcttgcaatttgtcaggtgttactctcgtggaatgaactatgcagtaaaagctgaaatataccagctttgttagtttgcagtagtattgcaattggaatttgaattttgaacacataaggtgatgaaaggatgtttcaacatattttggtttatcattttctttattttatgtttttgtacattgctcccttcaaaacagttatttttccgcacatagctatgttttaagttcttccattatgtgcagcattgatttttaattctgccatcaagttgtgcttcaaagggactgtagattatattagagatatgcatagtctagagatatgtgtgtattttacttgcgcttcaagtttgtatcctgctatatata

SEQ ID NO: 296997 - DNA, 428 bp, Zea mays
ggcccgcgcgctggggctgcagccccgccaggtggccatctggttccagaaccgccgcgcccggtggaagaccaagcagctggagaaggactacgacgcgctgcgccgccagctggacgccgcccgcgccgagaacgacgccctcctctcccacaacaagaagctccagacagagatcatggcgctcaagggaggcggaggagggaggcaggaggcggcgtcggagctcatcaacctcaacgtcaaggagacggaggcgtcctgcagcaaccgcagcagcgacgagaacagctccgagatcaacctcgacatctccaggccgcctcgggccgccgacgagagccccgccgccatggacagctaccgcggcatcccgttctacgcctgcgcccgcgccgacgacgtcgaccagctccagctcctgcaca

SEQ ID NO: 296998 - DNA, 447 bp, Zea mays
  unsure (1)..(447): unsure at all n locations
cggacgcgtgggcggacgcgtgggcggacgcgtgggcggacgcgtgggtagtggttctgaaaacggttgcgatatgtcaatacggggtgcacaatgtcactgcagattacatcatgaagtgcgacgatgacacctttgtgcggctggatatagtactgcaccaaatcagtacctacaacaaaacctcacctctgtatctgggcaacctgaatctcttgcacaggcctctaagaaggggcaaatgggccgtcacctacgaggaatggccagaagcggtgtatcccccgtacgccaatggacctgggtacgttatctcggccggcattgcgagagacgtagcatcccggcatacaaaccactccctacggctgttcaagatggaagacgtgagcatgggcatgtgggtggaggactacaacgccagcgcccncgtgcagtatgtccaca

SEQ ID NO: 296999 - DNA, 100 bp, Zea mays
ggactgcaagagcgtattacgacaacaaagaagggttctattacgtctgtccaggctatatatgtgcctgctgatgacttgacagatcctgctcctgcta

SEQ ID NO: 297000 - DNA, 207 bp, Zea mays
ccgcgccacgacggcggtgttctggaaggcgactgggcgagacaagggcgtcttcctcggcgacgcctccaggaggatcggcttgaggaagaccctggtgttctacatcggcagggcgccacacggcaagaagactgactggatcatgcacgagtaccgcctggaccaagagaacgttgaaattcaggaaaatggttgggtggtgtg

SEQ ID NO: 297001 - DNA, 141 bp, Zea mays
ggcagaggcggcaacaacaacaacagcaaaacctcctcctccctagactggaagcagagatgcagcgtggccctgggcgtcgccaagggcctggcctacctccaccacgagtgcctggagtggatcgtccactgcaacctg

SEQ ID NO: 297002 - DNA, 373 bp, Zea mays
tggcagtcttgcatcttcgaaggtggtaccacatcacgctgatgcacgtgtctacatgctcgcacacccaaaagaatttgatgtggttgaccttgatccttatgggtcaccagctgcattccttgattcagcggttcaatgtgtagcagatgggggcatcttgatgtgctcagctacagacatggcagtgcttgctggtggaaatgcagaagtttgtttttctaagtatggttcttatccattaagaagtaaacactgccatgaaatggcgctgaggattcttcttgcctgcattgagtcacatgcaatccgtcacaagcgctacataattcctataatatcagtacacatggatttctacattaaggttttt

SEQ ID NO: 297003 - DNA, 357 bp, Zea mays
cgttaatgcaacatgccagaacagaacaaaatgggcccttcttcgtcaggaaagcaaattgacagattggcagcgggtcagaatgcaggagacatcaaaagagatacccgctgggtcacttcctcgttcccttgatgtcattctgcggcatgagattgttgagaaggccagagctggggacacgtgaggaagcttttttttggcctcttcctccttggaatgacttcatttgactgaatgttttgtttctggtatttccagggttatatttactggaactgttgttgcagttcctgatgttatggcactaacttcacctggcgaacgagcagagtgtcgcagggaagctcctcagcg

SEQ ID NO: 297004 - DNA, 362 bp, Zea mays
  unsure (1)..(362): unsure at all n locations
gtaccggtcgagcaacgcgtgctcggacgcctcgtcctcttacgatgattgttcaggtaagatctctttcgagacagaaagacgtggcangctcctgagtgccgtactccccaagcaggagcgcgaggagcaatgggccgccgagaagaaggagaagtccctggccgagaggaagaagtccatcgagagccggaagctgatcttcacccgcgccaagcagtacgccgaggagtacgatgcccaggagaaggaactggtacagcttaagcgtgaggcccgtttgaagggtggtttctatgtcagtcctgaggcaaagctgctatttgtggtccgcatccgtggtatcaatgccatgcacccta

SEQ ID NO: 297005 - DNA, 358 bp, Zea mays
  unsure (1)..(358): unsure at all n locations
gccngacaggaaggangaacgagcgagganngaggcccnggggggaaaggncanccaagggganggcnaccgggncnccggnanacccgcnangncaagaacgannggggaccggnancngaagccgnncgngannccaaaaccagaggncacggnggnncccagggcgaaagaagacgacngncncanccncgcaagcgaagggcngngggaagnggngacgaacgaagaggcgngcagagcngcgcgccggcaaaaccaagngnggcacaagaacaacggngccgcnggcgcaacgnggncgnngngcgacgagggngaaggaaccaccaccgaccccgcngcccaagccgcagcg

SEQ ID NO: 297006 - DNA, 456 bp, Zea mays
  unsure (1)..(456): unsure at all n locations
gacccacgcgaacgccggacccggaccngccgcccaccgcgggctaccnggcgcccgccaacgcctaccgcgggggcgccggcgacgagnccgggagcggcgacgacgacgacgacgacagccggagcgagngctcctcgctcgacgacccaaagnacgtgccgntccaggccaacaacatcagcttccagaagaggcaggcgctggtgacgtacctggagaacaaccgggcggggatcacggtgtacggcttcgtggtggaccgggcgtggctgcacgcgctcttcatgatcgagttctcgctcgtcatgtggctgctcgggaagaccgtcggcatctcctgagctcacgcacacccttctttttgccggctctggctcctgtcaggtgcagagttctcagcggaggattgtacaaagtgagtgcagatacaagatactctgatcatctgatgga

SEQ ID NO: 297007 - DNA, 409 bp, Zea mays
cacaaaccctagccgccgccagcaaggtatggccgccctcctacggctcaccgcagccgaatccgccctgccccggcgcaccctcgccccacaccggatgctccacacacgcaagttcatgaccaaccgtcttctctctcccaagcagttcgtgctcgaggtcatccaccccggccgccccaacgtctccaaggcggagctcaaagagaggctggcgaacatctactaggtgaaggaccccgactgcatcttcgtcttcaagttccgaaccaacttcggaggcggcatactatgccacggccggaggaggaaccgctgtcggcctactccacctccacggctccacctgtctgctctctgtctgccccgcgtcctcctccgcagcacgacgaccgcatcgcgttctacg

SEQ ID NO: 297008 - DNA, 416 bp, Zea mays
ccggctggacccacgcgtccggctgagcccaactgtgaggatgggctattcatgatgacaattgatgacagtgatgtgagtaatcatcacggtgctgcagatgataaacgattgttggaaatagctaacacagcactcatgagtgatccaccttcacctgacacgcttaaacctctgataggctcttcttctggagatgggtctgatgttctgcctctagccacacatcagcctgctggaccagtttcagcgacacctaacgtaccttatgccagagatgacaataagttcaatgatggcatgtatgaagacttatgtgtggatgatgctgacctgacattcgagaattatgaagagctattccgtacctctcacattcgaatagaggaactctttgatgacgccggatttgacag

SEQ ID NO: 297009 - DNA, 450 bp, Zea mays
gaccacgcgtccgcggacgcgtgggcggacgcgtggggtccagcctcagctccaagtcccctcggtggtcgcaggccccgccaatccccccggcgcaggcgattcccgtggtgggggttctctcgccgccgctggagccacaggccgcggtgaaatcaacgaagcgcgcgggaatcattgggatcgcatttgaggcctactattctaagatttggcagatgcttgctgcgtcgaaggtggatgcctgcaatgctgctgctgcgtgggcggggcagtactgcaaatgccgttttgagctggatgagaaggaactggaagaagaggaagctgactctctggggtctgtctcgccaatgtcctcggaggctgagaatgggaaggagctggtggacgaattggccaggctgcgtatcaatggagacaacaattgcagcgaggaggacatggagg

SEQ ID NO: 297010 - DNA, 412 bp, Zea mays
ccgaagggcgccttcacggcgaccacctacacatcggctgcgcccaccggtggcggcgccggcgcggcccaggggcaggggcaggggcaagaccaccaggagagacggcagactccgcggacggagctccggtcggccgaggacgagcgcgggctgcctgtcaggaagctggaggacgcggtcgaggatgccgcgggcaagggcgggccggtgttcggcgccggcacggacgacgggaagccggatctcggggtcaccggcaccggctgatgctagccggatgtgcttcttgatgtgacgctcagtcaacgagcgagtcagcaagtgaaagcacaaggatgtgtccagcacatagtgcatacgatcggtcgtgtaaaatactgtacaaagtatgcacgtgcgaaataacact

SEQ ID NO: 297011 - DNA, 429 bp, Zea mays
cttcgtcgttgtgtatgagttgctggatgagatgatggatttcgggtaccgacaatggacggaggcgaagatcctaagtgagttcatcaagacagatgcgtacaggatggaggtcacacagcgtccacccatggccgtgacaaatgctgtgtcatggaggagcgaggggatccgttacaagaagaatgaagtcttcttggatgtagtagagagtgttaacattctagttaacagcaatgggcagattgtgagatcagatgtggttggggcactgaagatgcgaacatatttgagaaaacagcttgcattgctgtcggcgaatttgttcctgagatctacggattttatgctggattgggatagcataccaaggcttttgttactatggcctctctttggtatgatgtagattagtgatcgaaatatatg

SEQ ID NO: 297012 - DNA, 230 bp, Zea mays
catcgattatgtaaggactgtcacctaccctcagctcttacatccggagcagctcatcaggggcatggacgatgcatccaacaacttcactcgtggtcactacaccacaggcacggatatcgatcacctgcgcctagaccaaatacacgaaactcgcatataattgcactgatcttgactaatagctactacctaacgctgttcatggtggacccgaccctgtactcggt

SEQ ID NO: 297013 - DNA, 438 bp, Zea mays
cggacgcgtgggtgcggccgggtcggatctgagacgagacgagtcccctgcggccaggtcgcctcacccaaccggaacgaacaagttacaatctcatcccaaccccgcctcgaccggatctcgtcggactcggatccgcccgaccaccccgcgccgccgcagatcaaagaagatggcagctctcgacaccttcctcttcacctcggagtctgtgaacgagggacaccctgacaagctctgcgaccaggtctcagatgccgttcttgacgcttgccttgctgaggaccctgacagcaaggttgcttgtgagacctgcaccaagaccaacatggtcatggtctttggtgagatcaccaccaaggccaatgtcgactacgagaagattgtcagggagacctgcccgcacattggttttgtgtcaaacgatgtcgggcttgg

SEQ ID NO: 297014 - DNA, 416 bp, Zea mays
cgccagccccgggcgcgccgaggaggtgccgttctttgaggagtacagccggccgctcctgggcacggtggccggcctggcgcccgaggagaaagtggtcctcgtcggccacagcttcggcggggtcagcctcgcgctggccatggagcagtacccggacagggtcgccgtcgccgtcttcgtcgcgaccggcatgccctccgcttggaaaccgatggcgttcgtcttcgaacaagtttttgcagaagaagtcccaacggaccgctacatggactgcgaattcgaaaccagcggcgacccccagcgtcccgtggagacatttcggttcgggccacagtacctgaagcagagactgtaccagctcagccccccagaggatttgaccctggcaatggcgatggtgaggccgtcacagc

SEQ ID NO: 297015 - DNA, 386 bp, Zea mays
  unsure (1)..(386): unsure at all n locations
gcagagacaggcgtcttcgtactcgcctatctccgcgactcaaagctttccccaatggccgcccttctcccatttctcaccaccgccgccgctccccccgttcaacaacaccatgagggagtgcatctcgatccacatcggccaggctggtatccaggtcggaaacgcgtgctgggagctgtactgcctcgagcatggcattcaggctgatggccagatgcccggtgacaagaccattgggggaggtgatgatgctttcaacaccttcttcagtgagactggcgctgggaagcacgtcccccgtgctgtttttgttgaccttgagcccactgtcatcgatgaggtgaggactggcacctaccgncagctcttccatcctgagcagc

SEQ ID NO: 297016 - DNA, 384 bp, Zea mays
ccacagtgtacttcttatgaagaacaggaatcgtgtacaggagcttttctgctctaacaggataagagtggttgttgcaacagtggcattcggaatgggtcttgataagagtgacgttgaaggggtgattcactatagcttgccagaaagcttagaagaatacatacaggaaactggccgtgctggaagggatggacgactgtcatattgtcatctatttcttgattcaacaacattctataaaagtcgtagtcttttgcacagtgacggtgttgacgaatatgctatgagcaaatttcttttccaggtattttcatgtgaaaattcagtggggtgcatttgctccttggttaaagagtcgacttcgcgcaagttcgatataaa

SEQ ID NO: 297017 - DNA, 334 bp, Zea mays
gagttgacttctcctccccctccggttcgttttccggttcgagaggttctccgggggtcggtttcatagataagcggagccagatggcggcctccgatgttcagtaccgctccttcgccggccgcctctcctggaccactgacgaccactcactacacaacgccttcagcacctacagcgaggtactcgagtccaagattatcctccatcgggagacgcagaggttccgccgcttccgcttcgtcaccttatgcacagaagaggcgatgcggaacgccatcgagggcatgaacagcaaggtgctggacgggcgtaacatcaacgacaactaggc

SEQ ID NO: 297018 - DNA, 333 bp, Zea mays
tcggctcaagcttatcgagtctgcacaaccattgatcggatcacgtcttaacagctacaaggccggctggagatatggggcgccaacacgctcgtatacgtcatctaaagcttcatcccctccctcgacatgatacatacaacagggtccatacaataaccgaaggcattaacttccaccttccacacgtacaaggcggagcgccagccatacccggagtgaggcatgtaggcctatatatattcaagtccatgccttatgatgatgccactatcatgaagtggcttctgacgacttggacctacgacaagtgcacggccatgactagaaact

SEQ ID NO: 297019 - DNA, 388 bp, Zea mays
  unsure (1)..(388): unsure at all n locations
gtgaccaaggagaagagggcggccggcgtcctggacaaccacgacgagggcgagaggtacgccatgcacggcctcaggaagttcgtccgcgggaagaagcccgagatcatggcttccatcaactccttcttcgccgaccctcccaaggacgattaagctagattccgtcatggatggatgagtatgttttaccaatcattagctgccgggggcgcgccttgattcgtagccatcgtcggtacttttttttttggtttctaaaattctaattctcccatataaatggaacatcatgcatttgtcgtgtgtgcttgcatggctgcgaacgaattcagcatgccttgtgattttcatcacatatttgattaataactgatgactatntgat

SEQ ID NO: 297020 - DNA, 320 bp, Zea mays
  unsure (1)..(320): unsure at all n locations
cggtcttatagtgcctgatctcccgtacgtggccgcgcactcgctgtggacccccgcctctttcatctcggccaagctgcgagacatgatgggcttgtagtaggagagcgagtggccgcagcatcaggaccgtctccaactcgccagtactcagccgccgcaatcagggacagggagctcgagcgcgcgccccacctgcgccgacgcgatgcgggccaaggttcctcttccctcgcctccgctgcgttcttctttccatgatgatgcgatgaaaccgtgtcctaggtagctntgcggagctagtcattttctaggttttc

SEQ ID NO: 297021 - DNA, 446 bp, Zea mays
tggcaaggtcgtatcatcatctcttcccggtaccaccgtttgatgaggtcacccctgtcccaaatagaattcaaaggggagggcagatctgtttcagctgccagcagagcctttataacccagacggccaatctaacctccatgtgcgctgcccaaaatgcaaccaacacttctgccttgattgtgatatttacatccatgagagcttgcacaattgccctggttgtgagagccaacgcagcatcgcttcatagagaccgtgttactgcgtgcattattcagctgtagagagaatctggctgtgagaagaatctgtgtatcgtgggaattacatgcggaggaagatgaagttgtccaaatggttcacgatctagaaagcgatggatttctactatcgcgacgattcaaccgattctgtgtttatgttgattttggacggtttttac

SEQ ID NO: 297022 - DNA, 411 bp, Zea mays
gtatggatgtacaggcctctagttcagcccaacctaagcaagatcttaatattgggaaatcctgttcaggacagaaaatttcagatagttctattatatggagaactcctgtggattttccagatgcaaaaccagaaatattgcggaggacgcggtcaatattacataaactgaaggaacagatcagtgacggtactccagttattggagctggtgctggcacaggcatatctgcaaagttcgaagaagctggtggggttgatcttatagtgttgtacaactctggacggtttcgaatggctggaaggggctcactagctgggctcttgccctttggtgatgcaaatgacattgtacttcaaatggccaacgaagtgttgcctgtggttaaaggagttcctgttcttgctg

SEQ ID NO: 297023 - DNA, 396 bp, Zea mays
attatatcatgtagttttcttgttgagcaggtctggtttatgggggagctttctcatatctcatcagagtttgacaatgttgttcaagttgtgctggaaaactacaaaccttagaggatgcaaaatgatgatcagggtaccaatgatgctgacagccagttggtgcaggaagaccagaaggctgagcaccccccttcccctttcattatcactgcggccccctcttgggagagcatagttaatgttaaaggagaagtcagcctaccagaggaagatgctagagatcccaaattttggtccagaatctgtgtgcacaatatggccaagctttctagggaggcaaccacattccgccgcatcttgggatgtcagttattgagtccctctctttggata

SEQ ID NO: 297024 - DNA, 319 bp, Zea mays
gctccgcctccgggacccacgtccggtacagccgcttcgaggcgcagctgcgcgcgctccaggcggatccggccacgtggacgtccgatcccgaggacgccgaggacttcgccgcgtggagcaaggggtttatcctggacgagagggaggaggagatcgaggccctgtgctacgacagcgacgcgctggaagccatggcggacaggctcgttccggacgccgtgccccgcgaggtgttctggccgaggtacttttaccgcgtccatatgctgaagcagcatgaggacgccagggcgaatctcgtgcagcgtgtgattgc

SEQ ID NO: 297025 - DNA, 394 bp, Zea mays
ggtgggttggcttcttctccccctccggttcgggttcgggtacgtgaggggctccggggttcggtttcatggatgagcggatcgaaatggctgcgtcagatgttgagtaccgatgcttcgccggcggcctcgcctgggccacggacgaccactcattccacaacgccttcagcacctacggcgaggtcctcgagtacaagattatcctcgatcgggagacgcagaggacccgcagcttcggcttcatcaccttcttcacggaggaagcgatgcggaacgccatcgacgacatgaacggcaaggagctggactgccgcaacatcaccgacaacgaggcccagtcccgcagcaaccgcagaggcggcggccgccgctactaccaaggccgatgagg

SEQ ID NO: 297026 - DNA, 418 bp, Zea mays
cggacgcgtgggattttcgaattttgagaaagttttttttccttataaccttggtatgtctatctagaacctgtcatgtttaggcaataactgttttgtggttcatcgactgcaggatgagagggaattgaagcgcgaaaagaggaagcagtcaaatagggagtccgctagacgatcaaggctgagaaaacaggctgagacagaggagttggctacacaagtggagtctcttgcagcagagaacacgtcccttagatctgaaatcggccggctaacagagagctcagagaagctcagactagagaactcagctctaatggtgaagctgaaggacaccgcaaaaccgtctcccagcaaagcagccgcattcccattctatcccgtgcctcggcggagaacatcctttccatgatcgaca

SEQ ID NO: 297027 - DNA, 342 bp, Zea mays
gtggagactctggttctgacatgcagcaattattgcaggtgcatttgatccgtcccggccgcctacacgatgtccaagtcgggagcgctggatcttgcttctggcctcggagggaagatcaacaaggtggaagtcaagtcggccgtcgatgagtatgagaaatatcatggatactatggagggaaggaggaagcaaggaagtccaactatactgatatggttaataaatactatgatcttgccactagcttctatgagtatggttggggtgaatccttccactttgctcacagatggaatggagaatccttacgtgaaagcatcaagcgacatgagcatttt

SEQ ID NO: 297028 - DNA, 383 bp, Zea mays
gtcctgtactgaccacctttcctccaactccgatcctctaagccatggggctactctaggggaactggtgctctaaacacccaaaccctaaccgcctaacctctgcgctaccggcgtcaccaccgtcagagctgcggccatgaacgccttgctgctcctcggatacatcacccacctcttctcggtcctggggctcctcctaaagatctacgccaccaattcctgctcacgcgtgtcgagggagactcatgagctgtacatgttggtcttcgcggcgagctacctctacctctgcacggactacgtctcgctctacaactgactgatgaagatagtgttcatcaccagctcggccgctattgtcatgtgcatgcgccaccacc

SEQ ID NO: 297029 - DNA, 225 bp, Zea mays
cgcgtccgcttgcatcctgatgctggaactgtgaggtgtagattcgagaacactgcaatgcttggtgggagagggaactgcaatctgccaggaattgtcgtggatcttcctacattgactgagaaagataaagaagacactttggcctgtggcgttccaaatgatattgacatgatcgctctatacctctaacgtaaaggatcatacttggtgactgtgagacag

SEQ ID NO: 297030 - DNA, 269 bp, Zea mays
gccggaagaagtgtggggggtgagctgtggaccatgagcgcgaccgggcgagccccgtgcggcctgccgcgcgtcggcctgggcacggcggtgcagggcccgcggccggaccccgtccgcgccgcggtgctgcgcgccatacagctcgggtaccgtcacttcgacacggtcgggcactacgccaccgaggcgcccatcggggaggccgccgtctaggccgtgcgcacggggcttgatgacttccgtgaggaccttttcgtgacgttcaa

SEQ ID NO: 297031 - DNA, 291 bp, Zea mays
gtcttcgtggacaaggtggcgatccgtgtgtacccgaacgacgcgttcaaaccacccggcgcaggcggcggcttcttcccgatcgccaagcccatgtacatcttctccagcatctggaacgcggacgactgggcgacgcgcggcgggctggagaagacggactgggccaaggcgcccttcgtgtcgtcctaccgcgacttcgccgtcgacgcctgcgcctggccgccgacggccgcgggggtcgccccgttctcgccgacacccgcgtgcgccgcggtcacgagggacagc

SEQ ID NO: 297032 - DNA, 334 bp, Zea mays
acgactggtttcattgattctcgaagagatcgagcttcttttgcaccacaaggtcgaggatgtctggcaactgcggatcaagctgaggctgcggctcaagctgcaagtgcggcaagaagtaccctgacctggaggagacgagcaccgtcgcgcaggccaccgtcgtcctcggcgtggccccggagaagaaggcctcgcccgagttcagtcaaggccatggcggagtccgccgaggccgaccacgcctgcggctgcggtagcagctcgaagtgcgacccctgcaactgctgatcacatcgatcgacgaccatggatatgagcattatctatctag

SEQ ID NO: 297033 - DNA, 276 bp, Zea mays
gccctggcttgtttagcatatcaacccatcttcgacacactagagctagctagagagagatggaggggacggtttcctccttcccggtggagaacatggtgaagctggagaccgacgagagggccactgccatggaggtcatccgccacagctgttagaactggggcttctttctgctggtgaaccacggcatctcccacgagctggtggacgaagtggaacggctgaccaaggcgcactactccacctttcgggaggccaagttccaggagttcg

SEQ ID NO: 297034 - DNA, 222 bp, Zea mays
gcgacgcgttagcggactcgtgaggttacgcgttgcttttgacggatgtgattaccagtgggaagacgatcgtgtaccacaccctggtttatcactccatgctttctttgacgcttcactcaatttatgctgagaatgcctaccacgagccgctctctgtggatgtgatcaccaacagtgccttctagccatctttcatgatggtcaagtgcgacccacgcc

SEQ ID NO: 297035 - DNA, 297 bp, Zea mays
  unsure (1)..(297): unsure at all n locations
cccacgcgtccggtcggatgggtccttccttgatgacgggcagcaggaggaagggtatgtgctgacatgcgtctcctacccaaagtccgactgcgtcatccacacccacaaggaaggcgacctgtactagggctagggctttccaatttggcgagggaccaaaaatgctctcgagtggtgtgttgtcaagcaaagctccatctgcgcgccctaccccgttgtgcgaactgttttggcatcnaaaaaaaaaaaaaaaaaacccccttttgaaatactccaaaaaaaccaacccaaagg

SEQ ID NO: 297036 - DNA, 292 bp, Zea mays
gggaacttggcatcgaaattgtgaaggacacggtctattaccccaagttcaaggagttctgcgggcctagttgctactctgatgagcactatatccaaacaatgctctcaattgaaactccgcagagcctatctaacatgagtgtcacctgggtagactggtctagaattgctgcgcatccagcatggtttggcagggttgacatcacggaggaattcttgagggaagttcgagaggggcagacctgtttgtacaatgagcagaattcaacagtgtgcttcttggttgcttc

SEQ ID NO: 297037 - DNA, 319 bp, Zea mays
tcgaggacatcgacatgcggatccgcgtccgaggcggcgggaagacgtctcacatctacgccggccgccaggccgccgccaaggggctcgtctgctactaccagaagtacatctacgaggccgccaagaaggagatcaaggacatctgtacccgctacgatcgcaccctcctggtcgatgacccctagcgctgcgaaccaaataaagtttgctgacgtcgtgcccgcgccgagttccaaaagtcgtaccgctgagcgggtgcctgctccatttcaagttttcaaaaccaggtgggggttgctcggcttatttcctatcc

SEQ ID NO: 297038 - DNA, 286 bp, Zea mays
ctcctatgccgccgtcaccgccccttcctttttcgcacccgcaccagcccgcgccgtggtgggaaggaggtccttcaccgtgcgcgcctctatccggaaggccaccggcaccgccgccgtggcaatggctgccagcgccctgcttgccggcggtgccatggcccaggaggtgctgctggacgcaggcgaccgcgggctcgtcttcaaacccagccagttcaccgtcaaggccggcgacaccatcacattcaagaacaacgccggcttcccgcacaacgtcgtcttc

SEQ ID NO: 297039 - DNA, 280 bp, Zea mays
acgctagggttttagcccggtacccctaatcctgctacttcgacgtctcgcgtacacccttggggttggggcgctcccatccaaaagatggccgtgccgctgctgacaaagaacatcgttaataagcgggtcaagcacttcaagaggccccatcttgaccggtataagtgccttaagccaagctgtctcatgccaaacggtattgacttccttgtcaggacgaactttaagggatgcacctagatgcccaacattgcttacggttctgacaaatcaacca

SEQ ID NO: 297040 - DNA, 332 bp, Zea mays
ctcagagaatccccaaccaaacaaacagggtagaggtcgagggagaggacaggagaggagaggagaggagaggttgggtctgggtaccatggctccgatgaacctgtcggggcgttgatgtcgtggaacgtgacaaggcgcgcaacggctctggaggaggcatggctccgactacgatatcgtgcccatcaacttcgtcaccgccgagcacaagagccccgagcacctcgtacgcaacccgtttggtcaagttccagctatgcaggatggtgacttgtacctctatgaatcacgcacaatctgtctgtacgctgctcgcacaaacaagccag

SEQ ID NO: 297041 - DNA, 367 bp, Zea mays
ctttgctttatcacagtcaggagtatgtgctgcttttagtagagagacaaatcggagaatatgctttctgaacggaagtccagataagttatccgcagtttattttaaacaagaataatgattcactcattactgtatcagtatatggttctgaaaacttcagtgctctgcgatgcagaacaactcgaatagagtatgctttgtcattgcaattgctttttttatcatgtcatctttcttaaattttccccaaccattcaaggtacgttcggcgaggacaaccggatgctggtttccctctttttgagtctgagtccttgaaatggcctgcatttgtagagtttgatgatgtcaaatgaaggggttt

SEQ ID NO: 297042 - DNA, 246 bp, Zea mays
  unsure (1)..(246): unsure at all n locations
tttgtcatccccaccggatccngtacaggttttgggacgagggcgagagggaagagatgggggcgtctgacaatgagtacagttacttcgacggcggactcgtctgggccaccgacgaccactccctcaacaacgccttcagcacctacggtgaggtcctcgagtcgaagatcatcctggatcgggagacgcaaatgtcccgcggcttcggcttcgtcaccttctgcacggaggacgcgatgcgca

SEQ ID NO: 297043 - DNA, 315 bp, Zea mays
gtggagtcctcagacaccattgacaacgttaaggccaacatccaggacaaggagggcattccaccggaccagcagcggctgatcttcgccggcaagcagctggaggatggtcgcaccttggctgactacaacatccagaaggagagcaccctccacctggtgctccgcctcaggggtggtatgcagatttttgtgaagacattgactggcaagaccatcaccttggaggtggagtcgtctgacacaatcgataatgtcaaagccaacatccatgacaaggagggcattccaccggaccaacagcgcctgatcttt

SEQ ID NO: 297044 - DNA, 248 bp, Zea mays
gcggatccagagagggtttacccgatggagcacctcttctgaaactagctgcgaagctgttcgggagacctgtgtcgcactctttgagagactgaagcccatcaaggagaatctgctagctgaggcaggcaccgcggagtgatgttccttcatcgctcacgcacgtatagcgagtgtgaacttatttgaacatgcatactggaccccagaaccatctttcataaggtctttaaactacggaccttgca

SEQ ID NO: 297045 - DNA, 183 bp, Zea mays
gtgaggaacattgttgaacacgctgaccgaatagatgtgcacgaagcctgcctacatgatggatatcttctacccaaatcgtatgcaaagcttcatcactgtgtctgatgcgcaatccatgcgcacattggacgagtacgctctcgtgagaacaagaggaaccgagagctaccacagtgcttc

SEQ ID NO: 297046 - DNA, 321 bp, Zea mays
acgactacgcgtccgaaaaattgatacctgtttaacctaacatattttacatttactcgccggattattgggctcgtgaacttacatttggagctacagaatataccactgccattgatatctagactgttggatctgtaaaggctgaccttcttattagacaacctttagatcctgtgaaaagaggtgtttaacaaatggctgaaatcataaaaatttttggttcttccacacgaaaaggaaactagggcgtgaatccaaaacattttttattcaaagttccttacataaaaacccattcattgcacaaacttttttgta

SEQ ID NO: 297047 - DNA, 414 bp, Zea mays
agtgtcaagacaaagcttttattaagagatggttcattcacgcgttgatatctgtcataagtatcatagaaaatctcatctacataaccaagtagatcaatctcaagctttagctcagactggggattatcagtctttgcttctgcagacacaaatccaatgaacttccctcttggtgcaacattgtgggtgtatgaacataaaacatacctagaaagagaataccgacagaaatatcataactctgtcaagaatagtgatatgttcgataaaagtgtttaagtaaatagcatgagagaaggcctcatatgtctgatttgcgtccaagttgcttatgaggcacaatcattcgaatcgagtcggactcatttgtattaaggattgggtagctcatgatagcaattgacaaacaac

SEQ ID NO: 297048 - DNA, 386 bp, Zea mays
  unsure (1)..(386): unsure at all n locations
tataacttccctttttcgttttttcacaacaaacngcaaacacgagaaggttcatattcaaatttacattatccacttataataagtagcattctaaacaacactctacggccaccagtgcccgactactacgaccccgaatttatgtcactcataaaacaatgctcgtcaacacaaccatcttaactgccaaacttcacaaaaatttctaataatctacactacatcgcctcataccataaagttcaacaacacttaaggaccatcttcactcaaaatttttaccaaatcaatatacaatcaaacttgcaacttacattcactttccctcaatttactccatccaacatatataactaacatctgctcaataccctttatttttt

SEQ ID NO: 297049 - DNA, 408 bp, Zea mays
tgtttttaatcatatttatgtgatggttataactcgagttttcacaagtcgtgcttgtgccgggtatatgggggtgaggcctctacctcctgaaaaaggtgtgttcccattggatcacttacatgaatgcgacttggagaaaaaagattatcttggctgcctgaaatctacaggattccagtctgaaaaatgtccgcagttatcaaaaaagtatttggagtgtcagattgagagaaacttgatggccaaacaagacatgtcagagcttgggttcagaactgtggacgaagcgggtacatgtcctgacaagaacagcaaactggagagcccttctaatcagccaaaagattaaaaaaatacttcgttggctttgatgtagcttttgtatgtatcttcatcccggagatc

SEQ ID NO: 297050 - DNA, 304 bp, Zea mays
gggaaattgaaaaacaatggtcttcaatataattttttttttaaacaaagcgcaaaacaacaaccccccgcttaatttatataaatctctccacaacattaatctattttcaataattacaatcatttcattcttcctctttgcccccctaaccttacttacataatcttttaaacttattccaacacactttacattcttctacttttaactttaaacagatatacacaaactcatttattccttcatgcttctttcattcataccaacacctgtcatacattatcctctccattgtattccc

SEQ ID NO: 297051 - DNA, 303 bp, Zea mays
  unsure (1)..(303): unsure at all n locations
ggtcnttttagtattaaagatgttttctatatttttatgaccccgcaccacaaacgccggcgggtttacattcaaaagttctacaaccttctttattgacgagctgcctgccaatgttgctgaccttctttcatcaatttcaagaaaaaacaaatcaaaaaagggttgtaaggaacctcgtaaagcttgattttgtcgaaatacccttggaaaaggggttataaagaccgttgggtttctatttttaaatccttgtcatccacaatttgtgattttttatcctttataccatgttttggaatt

SEQ ID NO: 297052 - DNA, 401 bp, Zea mays
  unsure (1)..(401): unsure at all n locations
gactacaaaagctggattacattcancttccatctctctcttaaggaatcaatgaccccgcatctaatatgcaaggctactctccttcatctctactggacaacttttaatggttcgccggcttcaccaaacattatttcattatctacatccaccctaacaataacttaactctctccattaatgaaatatccaacccctttatacataccaacactctctaataaacctctctataaaatttttaccccaccttataaatctgtcgcctcatgatgtgggtgcaacccataaaaaactctcgtgtggtttcgaaccgaaaattttcttttttttttcctcaccataggttctttaggcatactcttcatcacccgtgctaataacacattttttcattt

SEQ ID NO: 297053 - DNA, 304 bp, Zea mays
cagtgattttcatgaaccaaaagtgcttatcattggcaacgctttctattcatttcctggcctggttcaaaataaaaagcggataacattcatttaatggaaccatccaaacatgccctgggataaatcacaactcttggttggttacttcgccgaaagcggagacttgaccaaaccggtctgtatttcccgtggcaatcggctgctgattgaatctcctagtgaacctaaatggtcaccgaaaagagaactgttttttgttactgacaaaaggagtggattttggaatatttataaatgggtt

SEQ ID NO: 297054 - DNA, 272 bp, Zea mays
ggttcatttctacgttctatttcactctctaacgtagcttacaacatcaacaagtgggtgggacattctctttatgcatgtaactataataccccatctccatgtgcatacatacataatgcaaaagaaactaagatctaactccttaccatggcgaatgaaaaagagatatctattacttacactatattggaggcaacaacacgatggaacttatgctattatatacaactctgttatgcatcacaaacgtcgtcccgagaaaggataca

SEQ ID NO: 297055 - DNA, 385 bp, Zea mays
ggcagctgggcgatcccaccctgccccctggcggtgaagcctccccgttcgccggggtctctggggatcacccagtgccggagatctcatcgccgacggctgtccgagtgcgagtcgcggcgaccagcctcaacttcgccacgttcctccaggtgcagggcaagtaccaggagcggcccccgcttccgttcgtgcctggatccgactactctggcgtggtcgacgcagtcggtcccggcgtgcgtgggctccggcccggcgaccgcgtctgctcctttaccggcctcggttccttcgctgacttcatcgtcgccgaggagaagcagctgtgctacttgttcttggagctgctggtggtgtcggggcatctgctgtgcaaatagga

SEQ ID NO: 297056 - DNA, 182 bp, Zea mays
gtctgtggtcgggggcggctttgactggtcgcaacatggccgccatggctccagggtacgacttgaccaaggtcacccgtatcgggttcgccatcgagtacgctgtgtgcgctttgatggtggaggtcatcgtggacattggacatatctgatgacgaggcatcaggacgctcctatgcctg

SEQ ID NO: 297057 - DNA, 383 bp, Zea mays
tttatattacatacaacccatcccttacactacacagcgaactatcacgggacatgttctttctaacatagaaaatccaccacacccttaaaaaagcatccaacgtcatgtactccaatccatctgcatacatcaataccccacgcacacccaccctttttatttatgacatcataacaccaagccacgcaagtcacccacacacatacatatatgtatgtaaatatctatatatatctcaccgatagacttggaacgcaacacgagctccacattcattcacgatcttttattcggttaaccctcctttgacgaatagcctactcaattctctatcatctctctgccatccttttgtcattgtcatcattccgatgttcatc

SEQ ID NO: 297058 - DNA, 366 bp, Zea mays
gcaaactcagaagccgcaagactgttcagctagaacaagcgggagtacaaccgcaaagtcggcgagattgtggagcagagctggacagccgactagtgcaggaggatgctcatcgtgcccgaaagggcacaataaggaaccatgaaaaaacatccttgtgtttgtggttcgccagacctgtcgaaacattgaagaactctagttctagtctgtcgttgtcatggttttggtctgatccagagcaccggttgctcatggtggtggctgtcgaaatgtagcgggtggtggtgacatatatcttcttaaaaaggacctggctgtggaccaaaacctatacgggggaatggtgggtccattgaaccgact

SEQ ID NO: 297059 - DNA, 255 bp, Zea mays
gacgtatatatatgtatgtacaggtggcgcgtgcgggtacggcaacctgtactcggcgggggacggcgcgagcacggcggcgctgagctcgacgctgttcaacgacggcgcggcgtgcgggcagtgctaccaggtgcagtgcgaccagcagaacagccggtggtgcaagccgggcgtggtcgtcaccgtcaccgccaccaacctgtgcccggccgactactccaagcccagcaacgacggcggctggtgcaaccc

SEQ ID NO: 297060 - DNA, 233 bp, Zea mays
agcggaccgagacggctgcttcgcatgttgttatccgatgcattcgtcctgagcgctgacggggccactggcgaccactccgttcgcaacgactccagcacctacggtgaggtcctacagtgcaacatcattctcgatcgggagacgcagaggtcccgaggctccagcttatacaccttctccacggaggaggcgatgccgagcgccatgaaaggcatgaacgtgagggagct

SEQ ID NO: 297061 - DNA, 368 bp, Zea mays
ctcccccacgagtccactctccgaccgcacgctccgcgacgcgatggccgcgctccgcctggcctccttcaccctccgccccgccgccgccgccgcctcttccggcgcgaccccatcggctccccggtccgcctccttctccagcgcggcgcgggggctcccctccctccgcctggccccgccccgccgccgccgcggggacctcgccaggccccgcgccgcggccgaggccgcggcggagagctacgcgtccgcgctgtcggaggtggccgtcgagaacggcaccctcgagcagacggtctccgacctcgagaagctggagaagatcttcgccgacgaggccgtcgccgagttcttcgacaacccca

SEQ ID NO: 297062 - DNA, 393 bp, Zea mays
cccttcctgtgggtcgtccgggccacggagaccgccaaggtgcccaggggcttcgccgacagggcccatgccaccagggggctcctggtgtcgtggtgcccgcagctggaggtcctggcgcaccctgccgtcggctgcttcttcacgcactgcggctggaactcgacggtggaggcgctcagcgccggcgtgcccatggtggcgatgccggactggtctgaccagacgaccaacgccaagtacatacaggacgtgtggcgcgtctgcgtgcgggtgcgcccggacgcccgtggcgtggtgaggagcgaggaggtggagcggtgcgtgcgggacgtcatggagggggagatgggcgatgagtttagggccagggcttcgcactggagcagcaag

SEQ ID NO: 297063 - DNA, 276 bp, Zea mays
ctcgtggccagggtcgccctgcagagcgaggatgtcgagctcgtcgccgtcaacgaccccgtcatcaccacggattacatgacctacatgttcaagtacgacaccgtgcacggccaatggaagcacagcgacatcgccctcaaggactcgaagacgcttctcttcggcgagaagccggtcaccgtctttggcatcaggaaccccgaggagatcccgtggggtgaggctggtgctgagtatgtcgtggagtccaccggtgtcttcactgacaaggac

SEQ ID NO: 297064 - DNA, 415 bp, Zea mays
gggaggagggtggtgcaggaatcctgatgagtgtgctgtccgcaagggcaacttcaggggggcctccaaatttatgaagccactctcgttttcagggatattaggcggcaaccaaaaatccaatcctgatttctacaactggaatagagtaaagatcagatactgtgatggttcatcatttactggtgacgttgaggctgtggacactgtatgttctgaactgaacttatggattcattgtacgatcagctctgcagaaacaaaaaaaaaaaaaagaggagagattaataccatgttttcaatttaggcgaaagatctccgttacagagggttcagagtctggcgtgccgtcatcgatgatctacttactgtgaggggaatgagcaaggcgcaaaatgctcttctttctggatgc

SEQ ID NO: 297065 - DNA, 439 bp, Zea mays
gccagctgccatccagcgccaccaggaaagccgcccaggcgccccgcctctgcatccgggcgccaggagcagcgcccctgcaacccgcgctgaagactcgacgcccagagccgcgtgcaaccccgttcgccgccccgccctccgtatcccgtcgcctcgcccctgcgctccgtcagctgcccctctccgtctacaggaatcagtggtcttctccgctacgctcctgaaatatttgagcagtctggagtggctagtttgttttcagacattggactttctcctcattcaacatcaattctcatgagtacccttaatgctttgctgatactcccttgtataactgccgcaatgctgttgatggatgtctgcgggagaaggtagaatctgagacaccatgaaaattagtgatgcagttgtggacttttgaacaatagctaga

SEQ ID NO: 297066 - DNA, 348 bp, Zea mays
cccgccgcgaggacgatccgccagcactggctgcgtcgctgtcgttgccgtcgtcactgtcggaggacgatggcgacgccatgccgcagccatcttcatacgcggtcttgccgcgccgggaaggcgagctggtgtctgcggaggagctgctgctggtgccgccgctcaacttcgccatggtggaccacggcgtgtaccgctccggattcccggacgcctccaacttgccgtttcttgagacgctccgactccgctccgtcctgtgcctgtgcccggagccatacccggaggctaatctggagttcctccgtgccccacgggatcaagctcttccagttcggaatcgac

SEQ ID NO: 297067 - DNA, 307 bp, Zea mays
  unsure (1)..(307): unsure at all n locations
cgtctatcatctctctgttcctctctcgtttacttcctcgccttcctcagcgccggcgnagctgctgttagctgacaattggtatcaaaggtagttcccatcgagggcctagctcacttgtactacacacgccgcgccaaacactccggagccatggagccgaacctcaagttggcgattgaggagcagcccagcatcttgcgtgacatctctgaccgcctctcggcgcaagattcgcgctgggcagcgctggaatccgtcgtcgcccggcaaacgtcttccatctaacaactggagaccgccgcac

SEQ ID NO: 297068 - DNA, 347 bp, Zea mays
gacaatgtcaacttgaattgactaattcagttccgcctattccacattaatggccagacatttatgtttctgcttcacgaatatgatattttttggacatttctaataatagcaagccttattcctattttggtattttggatttcaggacttttagccccagttagtgaatgaccacagaagccttctagttatgtatcgcttatagaacccatggctggggctttatgacaattccattactcgttttcacatatagttacttttagttttgcacaaaataaacaaacatttttgggttcttttttaccactcatttttatgcccctgaaaaaaagttttctttt

SEQ ID NO: 297069 - DNA, 335 bp, Zea mays
gctgattaccctgaaaaggggatccgttttttctctgaaaaggtcagtcatcatcctatggtcatggcatgtcactgtgaggggaaaggttggaaaatttggggagacagcaatctgaagagcaaattctggggacaatccattcaattggatcctaatggtgtgctaactttagagtttgatgatggagaaattttccaatggagcaaggttacaacaacaattaacaaccttatcctttgtctagtatattgtcttcaccatggcacaatgaacataatttgggaattgaccatttttaatgcatgctgactcttaatgatcattcttttctt

SEQ ID NO: 297070 - DNA, 426 bp, Zea mays
ccttattaggcctccatctcttgaaacttcagtcaaaatccttggaaatcctcgatggtatccttactttgagaattgtattggcgcaattgatggtacacacatacgagctagtgtccccaagtctcgtgaggcagcttttcgaggtagaaagagtttcacaacccaaaatgtgatggccgcggtagactttgaccttcgcttcacatatgtgctagctggttgggagggttcggcacatgatgccgtcgttctagctgatgccttacaaaggcagaatggtctcgttgtacctgaaggaaaatattacctagttgactgcggttatggtgcaaagccagggttcttaccaccttttcgtggtgtccgataccacttaaaaagaggggtgtaatgataacaagccagaaaatgagaaggaattat

SEQ ID NO: 297071 - DNA, 403 bp, Zea mays
  unsure (1)..(403): unsure at all n locations
aattcctgtgtcgacccactcttgctggtactcttggttgtggggccaacaagcatgttccctcttgcttatatgtggtataactaggaagtagtgactctctnnnnnnnttgaaggattggatgcgcttcagtgttgcgttctggcacacgttccgcgggactggcgctgatcctttcggagctcctacaaagactaggacttgggaggatgggacaaattcgttggacatggctaagagaagaatgagagctcactcagagtggatggagaagtagggagttgacaaagaggtcgaacaatgacagggatatcgccaagggcagggaagactctgggaggagcaaagaatagcttggaggagatagggaaactggaagagcagagtgggggagagaccaag

SEQ ID NO: 297072 - DNA, 350 bp, Zea mays
  unsure (1)..(350): unsure at all n locations
cacttacattaacaacaattatgttttcaagtaatacaaannaaacttatggaccctaacctaggaaggagtgtctgctacgtccagcttccccagagattcgatggcattgacaggaatgatcgatatgccaacaggaacaccgcgtttttcgatattaacttgagaggtcttgatggcattcaaggaccagcttatgtcggaactggctgtgttttcaaccgaacagctctatatggttatgagcccccgattaagcagaagaagggtggtttcttgtcatcactatgtggtggtaggaagaaggcaagcaaatcaaaagaagaagggctcggacaagaagaagtcac

SEQ ID NO: 297073 - DNA, 382 bp, Zea mays
cggacgcgtgggatttaaaactgtcagctctcataaacagtgtatcagaaataatggtcctggcattttggttttgcaggcgttgttctatttcctggagctaccctgcctctcagagtaattcaggatagattagtagtaactattgacaaagctttgagactggtcgatgctccatgcacaattggggtggttctcatgcgacgactcccaaatcatcgacattatgctactgcttcagttggaacaaccgcagagatacgtcaatttggaaggttggaagatggttcattaaatgttgttgcccgtgggcagcaaagatttcgtttaaggaggcaatggattgatgttgatcgggtggtgtggggtgagggtcaaaatt

SEQ ID NO: 297074 - DNA, 250 bp, Zea mays
  unsure (1)..(250): unsure at all n locations
gacgcacgcgtccggncgaggccgccgcccataccgcctcctctttcccgcctccggtgcccaaggccaggccgacagtttttaaaaaggaatggcgccccactctaaccaacccactgtccttcataagctaggtggccagttccaccagatctccatcttcttttaatgtgcaccgacccgtaacatctgctcctactttctcaccttattaaaagagatttgccatcttcaactacattacccaaaa

SEQ ID NO: 297075 - DNA, 402 bp, Zea mays
  unsure (1)..(402): unsure at all n locations
cacctccctcactcgtgaagaaccagagatctccacccaccctcctctacctcctacatccgangtccgttctctcctgttcctcgtcctcctccccgctcccctcagcactaatctccgcacagcaacctcgctcctccgtttcggttttcctctgtgtgccatgggcgacgccgtggagcacctcaagagcgggttccagaagttcaagaccgaggtgtatgacaagaagccggagctgttcgagcctctcaaggccggccaggcccccaagtacatggtgttcgcctgctccgactcccgcgtgtgcccgtcggtgaccctgggcctgcagcccggcgaggccttcaccgtgcgccaacatcgccgcatggtcccagcctacgacaagaccaagtacac

SEQ ID NO: 297076 - DNA, 389 bp, Zea mays
  unsure (1)..(389): unsure at all n locations
cggctgaaaaccggccgacccacgcgtcgacaagccccctcaccgtgcctgttttcccgatccccgagcaaagctgcgactgtcaaccttcgcatggcgttcgagaagatcaaggtctccaacccaatcgtnagatgacggtgatgagatgaccagctattctgcagtctatcaaggacaagcttatctcccattttggacctggacataagtctatatttggggatactgcaccggagcactgatgaaaggtacagtgaggctgcaaggctctctaagtacaacggctattagtgtgcacatactcagataaactcggttaggagtcaatctgaacacatgtggagagcccaatggccaataggacatttaatggcactggttcagag

SEQ ID NO: 297077 - DNA, 320 bp, Zea mays
cagacgcgtaggctcaacggcatgggcactattcccgtcatccctgcgacgatgctcgagggcgatcttcttggcgctagtagcactgcctgcttctgcgccaccgacaccgacaccgacagctccattcgtttccccagcagctatggtgctgttgttctaccgtgggagagctgtgactatcacaccaaggagccctttatcaaaccgtctctgttgcgctacaacgacttggtggacaagagctcctccaactgacaatagtgctaggatggtacgcccggcaacggctttttcagccgtgactggatcgttaacac

SEQ ID NO: 297078 - DNA, 421 bp, Zea mays
ggaaactggagcacgacatatgctccctcttcgttctacatgacctcaaagatgagatctgggtacctcgaaggatacgagtactccatcttcgacctgacgagacctgacagggtgcaaattcagatttatggcaattcagtacagggacggatacttgacggcgactcaccgacggagctgctcaccagctacacggagtcaaccggaaggccgccggttcttcccaggtggatcacgttcggcgccgtcgtcggcatgcagggtggcacagacgccgtccgcagagtttgggaccagctcaaggactacgacgtccctgtctctgcgttctggctacaggattgtgttggccagaggaagacggcgatcgggtctcagctttggtggaacttggagctcgatgacgcccactacaatg

SEQ ID NO: 297079 - DNA, 281 bp, Zea mays
cgccacagcaacagcgtcaaggacgaggaagggtacccggtcttcgcgctcgtcaacagggtcaccggcgaggccattaagcactcccagggcgagggccacccggtcaagctggtgccctacaaccccagctaccaggacgagttggtgctgtggacggagagtttttacgttggtctctgtttttgttttgttttcatgttgtattttattttacttttacttttacggttttttaattgttctttggttcatttgtgttgtgttttttctttttttct

SEQ ID NO: 297080 - DNA, 421 bp, Zea mays
gttggctccaagaccgtcatccatattaggagtcatgcacaaaagtactttttgaaggttcagaaaaatggaaccagtgaacatgtcccacctccacgaccaaagcgaaaagctgcccatccatatcctcagaaagctttcaagaatgaaccaaactatggcctcaagacagattcatcttccatacataggaactctggcatgaatgtgtcttgttcttcatggcctcataagtctatcccgcaagctgttgcttcgtcgatggtgaaagatttaggtgctggaacaccaggtccaaacaatttttgctcaagcagtactgaaagcccttcaagaacttggcaacctggtgaaacaaatgggccaataaattaaatttcggcactccgccttatgccggattttgcgggagtgtacagct

SEQ ID NO: 297081 - DNA, 429 bp, Zea mays
gcgcctcaggggaggcatgcagatcttcgtgtagattctgaccgagcaagactatcacccgggagggggtgtctgcagacacgagctacaacttcaaggccaatatccaggacatggagggcattcccccataccagtagtgtatgattttttctgaaatgaatcttgaggactttcttacgctttcctttattcattattcagttggttatcatcatttatttggttttaagttttatagttatgcattcttattttatgtaaaactcttatttgttatttgttttattttttcttatatcttatttttttgtggttgtttttattttttatttttattttatattatatacgtttattagtttattgttaatatctacatcttattttttatttttattttttctttttctactttttttttattat

SEQ ID NO: 297082 - DNA, 230 bp, Zea mays
  unsure (1)..(230): unsure at all n locations
gcgctcttcctctcctttgctccgagctctgtctttccggtctgcttcctgcgacccgccgntgcagatcgacggtatcgtggcggcggagaaagccaccaggagctgcttcgaatgccgcgccaccaccacgcccatgtggcgcagcggcccnaccgggcccaggtcactttgcaacgcctgtggcatccacttccgaaaaaagaggaggcaagagcttggcctatacc

SEQ ID NO: 297083 - DNA, 390 bp, Zea mays
atcttcctagttcttcacaagtttttcactttccggtttccgggggttatgtggtggtttttggcacggacggactttttgacaatctatacaataatgagataagtggtgttatcgtttaatcgcttatggttggacttgaaccttaagttgcgtcacaaaaaattgctgacctggctcgacaaagagccacagacaaaaataggcagtcaccatttgcatctgccgtccaagaagctgtgtaccggtactactgtgggaagctcgactacataactatttgtggtgtcttatgtgaaaactgcttgatttcgagcctttttttttattatatgtctttgatcctaactaaattgcacaatgtgtatttaatgtgtgaaattttcttat

SEQ ID NO: 297084 - DNA, 380 bp, Zea mays
gacttttccatctgacaacgggtggtgtcagtaaggcatcaaagagtatcaatttaagtgaagacatttttgcaggttataactcaactcttcgtggaggcaatgtaacacaccatgaatatgtacaagttggtaagggaagagacgtcggattaaatcagatctctaagtttgaggctaaaatagcaaatggaaatggtgaacagactcttagtcgtgatatctaccggcttggacaccgctttgattttttcaggatgctttcatgctacttcacaaccgtggggttttatttcagtacactgttgacggttgttacagtttatgtatttctgtatggacgcctttatcttgctctcagtggacttgaagaggggcta

SEQ ID NO: 297085 - DNA, 281 bp, Zea mays
gcctggtgcactggacaaccgggttcgtatgatctaccagcacgggctgacaaggaggatcggcgggcaggtgctcctcctcctacacccttacaggacactgctcgaccccgccctttgaacgggctgattgatgttaaccaacctcaccagctggtaggggttggttctaacttacaagaccgcaaactttgtgctcccaaaattccattttgagggcttgacatctttcatgggaaaaagctttgagatattgttcctttattacacaactgtgacat

SEQ ID NO: 297086 - DNA, 243 bp, Zea mays
ataactcataaagtgagaaggttcaagataattcttccaactgcaacttttgccttaggcattacattcgcccaatatatcacatgcatatgacaagacgctacaggtgaagaagtaatctttctttatacgattactacattgcattctcatctaggatatcctgagctcgtgataaagatgtatccttaatggagaatgtcacatcatttgcgcgagatgaaacgtggggattatttgtct

SEQ ID NO: 297087 - DNA, 433 bp, Zea mays
  unsure (1)..(433): unsure at all n locations
tgcatgcatggtgcacgactgcacgccgcaggtgagcacctcggcgcggagcccgtgctgccgtacctgaggccggagctcgacggcgacaagatgctcgtcggcgccaacttcgcgtccgccggcgtcggcatcctcaacgacaccggaatccagttcgtacgtaacacacgcgatccatcgccgccctatcctgcttgcactggtgagctcggagctctggtacagctaagcgcctaaactaataatgcatctgcaccgctgtccgctgcaggccaacatcatccatatctccaagcagctgcgctacttcgagcagtaccagaggcgccttggccgcgctgatcggcccggaggcggcgtcccgcgtggtgcgcggcgcgctggtgctcatcacgctgngcgggaacgacttcgtgaacaactactacct

SEQ ID NO: 297088 - DNA, 437 bp, Zea mays
ggccggccgaggcgtacggctgatatgctccagactgttttgaggggtttctatggcaagcctcatggcaccttttctggggtggacattgggcaggtcctcctttcttttctatgcaaggacaacaatgcttcacatgccattgaagctctgcgtcgcgccatgttcaagttccttgtcctcctaaagattattgtgagcagaaagtggtgcttcaccaagttcattcgttcctactaccttaattacaagagtgatggtagaattgttcctgatggtgttaactcatagctgctctttaaccatgtaatactttatattcgtgctcctgggaaggcttttctttaggccgtttcttatatctaatctactttttgaatgttattacatactttttggtttatcctatcttttatgctatgtgcaacatttatttt

SEQ ID NO: 297089 - DNA, 255 bp, Zea mays
ctcagacgtgtatcacacgatagtatactacaattcgaagctctgtgtgatcgtattcatggggaaaaattaaccaaccgtgagcgccgatttcagtgaggtcttctagaaagccaggcgcaagcatgaagcccttatcgaagaaaatagctgagctccactaatgctacgtcttgcgtggcattctgttgggacattagacgtttagtttatgaccgcgcatctctttgcaactatgaagtgccaagtgcaact

SEQ ID NO: 297090 - DNA, 385 bp, Zea mays
ctctcctgccccgccaccccaccagcgatggccctgtgcgccgccgcggcctccacggccaccgcctacgcgtcggcccgtctatcggcctccaccgctcgcccgcggggcccctcctcgacgtcgctgccgtcgtccttcgtcggcgcgttcccgtgcgcggtcgctgtgaggacgaggaggaggaggcgcgcggcgccggcggcggcccgcgccaccgtcacggtgcgcgcggaggccaggaagagcgtgctgatcgtgaacaccaacggcggcgggcacgccgtcatcgggttctacttcgccaaggagctgctcgccgccgggcacgccgtcaccgtgctcaccgtcggcgacgaggcctccgacaagatgaagaagcccc

SEQ ID NO: 297091 - DNA, 221 bp, Zea mays
  unsure (1)..(221): unsure at all n locations
ctagttcatgacggatgctctggataaccaagttnagagtatggtttctgncnagggttgggtgcgcacctacaggttctgtgacaatgtttggacctncanctntacagacgcaagctttaagaacgaggaggccacggagcacgtncgcatggtgaatattgtggcatgttattccaaattgctcggacaatatgcccgtgtaccctctacgtcaatga

SEQ ID NO: 297092 - DNA, 374 bp, Zea mays
  unsure (1)..(374): unsure at all n locations
caatgaaacacagcatttttaatttctacctatacaagggcccctatcccaaggccatgggggcatattaaaaagctctcagtggataccaagccggctaatggcataatcatgcaactatgccttctgctgatgtcagcataacngactctagccatacgacagggaacctcacggagccaaaatcttactgtgaaaactatctaacacactaccaaaaacctattccaacaacttctttagaagaaatctccactggttgaacngacctggcatccctctatgagactatgaatgagcaagatacatcactcacgataatagaaaaacccttacaaatgtacaacattactggttgccaacagatcacaact

SEQ ID NO: 297093 - DNA, 315 bp, Zea mays
cccaaaacgaactattaatgtgaactatgatggatttgctgaaaatgtgagagttggtgatgagctcctagcggatggctgcatggctaatgctgaggatatctataagatatgaccagatgataagacgccgctgcgcagatcctggctaattgatgccacatgccaatctcacattttcgcgtgacctgtgtatcggtcaccagagaaatactatgcttcctacaatttcatcaaaggattggctcgacatagactctatgattgccgaacgtgtacatttcatcacttgttcatatgtactgtgtgcagaag

SEQ ID NO: 297094 - DNA, 397 bp, Zea mays
  unsure (1)..(397): unsure at all n locations
cagtggattgcatcattcgttatttcnacctctccttgggccggttttatnaggctgtgggggcttaccataaagctcttactgcattcaagaccagcnaatggtagaatcatgcaactgtggcttctgcttttgtgcgcataacggntccgtacaataagtcatggaatctgatggagccaaaatcttactgtgaaaacgctctcaatatttaccaaagacctattcctaggacttctttggaagaaattgccactgttttaacttanntttcatccatatattagactattaatgagcatgagcaagcactcangttacttcaaaaggccttaaaaatttacaacaattttgcttgccaacataacacaatttcttgtaattgaagctcatattg

SEQ ID NO: 297095 - DNA, 232 bp, Zea mays
gcgacctgacagaatgccaaggaccatattgaggctgctagtactaaccttgtcggtccgctcagctgccacaacgactcctcgtatggacagctgctctccaaatatgtggatgacccaaaaaacttcttttctgtgtcgtctgacttctgccattggggatccaggtttagctacacatactacgaaaagaagcacggtgccatccataaatctatcgaggccttggacc

SEQ ID NO: 297096 - DNA, 155 bp, Zea mays
tcgtgggctagagggaagagatggctgctttggacgttgagtaccagttctttgttggcggcctcacctgggccaccgacgaccacttcctcaacaactccttcagcacctacggcgaggtcctcgagtccaagatcatcctggatcgagagacg

SEQ ID NO: 297097 - DNA, 381 bp, Zea mays
tgcagccgtgggcggcagccctcagacttattgtccctggggtgggagcggcggcaccatatttgactacggcgtgtacactggcgtgtggcacatcaacttgacgcgcgcagtgggaatctcttctatcaaggttctgtatgatcggaacgggcaggccgtgtggggtaacaagcatggtttcagcagcggtgtcataccagacaagataatattcgacttcccgtcagatgtgctgactcacataaccgggttctacgattcagcaataatcatgggcccaaccgtggtcaggtctttgacgtttcacacgaacaagcggacgtactggccgtacggcgataagtacagtacgtactttttcacgagctttaccaatgg

SEQ ID NO: 297098 - DNA, 378 bp, Zea mays
tgattactctgcgcacactatttttggcggcgtctgtcgcaccagtcgtattgtttgctcaggccatgttactgcgagaaaagaggtgaatgtgaaatcatcgatatcgcctctcgagaaaagaggtgaatgggaaatcatcgatatcggtccgctcacccagaacctgcgtaaatttgcggtcgacgaagaaaacaaaattggccagttcggacgtctgacctttaacaaggttattcgtccatgcatgaaaaagactatctacgacaacgaacgcgatatcaaaggttatgagtaccatctgtacgtttacgcgtctgaaaaactgttccgtgcggacattttcatgtgactataaaacccgtggtcgtaagctta

SEQ ID NO: 297099 - DNA, 422 bp, Zea mays
  unsure (1)..(422): unsure at all n locations
gctcatcaccgacgatggtgccacggctaacacaagcaagcaagcaagtcactgagtagctagcagtatataccaccataaaaacaacacacacacacacgtgcgctaataagctaagcttaaggcggtagccgtagctcctctcgatctccggctcggacggacgacgttgccatggctgctcaactgcatcacgcactatacgagctgctgcacgaagcagcagcagcgcaacaagctttgttgttcgcaatccctttttccttgttgttctggcggttctggtttcgctacctcgcggcgtcgacggcgttggcgtcggcgacaaagaacaacggagcggcggcggtggcggccagcgaccccgacaagctcttgagcctgctgncgtcgccggccatgaaagctcccatcatcgggca

SEQ ID NO: 297100 - DNA, 255 bp, Zea mays
cactccacagccgttctccgcgtcgcacgtccaaattatgctgcggccgagttcattcaggcggcggcgaactccagcgaggcccacgacggcttcacctctcgtctcaactgcaagcacgaccactcgcactgctgatcagattaatcgatcaacatggatatgattatcatgtatttagcttttggtggtggttgaacaatactaagcgaggccgagcagcatggcatacataggtattgagtggctttcact

SEQ ID NO: 297101 - DNA, 301 bp, Zea mays
tgggccgacccgtgggcggacgcgtgggcggacgcgtgggcaccaatggcttgttccactgcatctttagcggcgacgctgctggcgttcgcgctgatgttccaggcctgcgtcgcggggaggaggaggctcaccgcgctcgtgcaggagccggccgtcaccatgaagtaccacaagggcgcgctcctgtcgggccccatcgccgtcaacttcatctggtacggcgacttcacggcgccacagcgggcggtgatcaccgacttcgtctcgtcgctgtccgcggccccgcgggcgggggcgc

SEQ ID NO: 297102 - DNA, 258 bp, Zea mays
acgcggacgcgtgggcctgtagcttcatccgatgtgctgcgcccggttccctcgcgcagtgcggaatttaacatggccgagccggaggtggtggacgacggcgtcctcttcccaccggtggaccagacagcgggctccggcggctcgcactttcttggcggcgcaagcgtgcgaagcctagagatcggaggcaacttcatcaaggagacggtcatcggcctctaccaggaggacgcgaccgtgcccgcccttgtcaac

SEQ ID NO: 297103 - DNA, 380 bp, Zea mays
gtactctggtaatttgatttttaggttgatttgctttagttccttggttcagttgctttaccattttattacctgacatcactgtcatgtggctaaagagttaacttaactgatacgatgatttctgatggcttgagcaggatgaaggttgttgctgcctacctgcttgctgtcctcgctgggaatgccagcccctccgctgaggatttgactggcattctggagtcagttggctgtgaagttgacaatgaaaggatggaactgctgcttgcccaactgagcggtaaggacatcaccgagctcattgccgcgggcagagagaagtttgcttcaatcccatgtggccgcggccgtgtggctgttgcggcaagtgcacctgc

SEQ ID NO: 297104 - DNA, 433 bp, Zea mays
attcatttgaaaaacatggatgatactgagtttttggctctttttaaacaccatgctttctctggagcagaaatcaaagaccaactattacgcacgaagctggaagacactgcagtggagattgctaaaaggcttggacaatgtcctttggcagcaaaagttctgggttctcgattgtgcaggaaaaaggatattgctgaatggaaagctgctctaaagcttggagatttaagtgatcccttcacatctctgttgtggagttacgagaagttagatccacgtctgcagaggtgcttcttgtattgcagcttgtttccaaaaggtcatagatatgatcctaatcagttggtcatagatagatatttatgcaaagattgccctttcatgaaagtagagaggtgtggaacaaaattttgatatgggggaactgttc

SEQ ID NO: 297105 - DNA, 448 bp, Zea mays
gcctggcgtccatcgcggtggccggtctggccgtcgaccgctacggccgccgctccctcctcatgctgggaagcgccgttctgatcctctcccaggtggccatggcgtggatctttggcgcgcagctgggcaccgatggcggcaagtccatgccgcgtgggtacgcggtcgcggtggtggcgctggtgtgcgtgtacactgccgggttcggcgtgtcgtggggcccgatcaagtgggtggtcacgaccgagatcttcccgctggaggtgaggccggcggcgctgggcctaggtggcgccatatcgggggtgctcatcttcgtgcagtcacagtcgttcctggagatgctgtgcagcttcaagtacggcaccttcttgttctacgccgggtgggtggttgttatggcggcggccgtggccgcgtttctggcggagacccggggcgtgcc

SEQ ID NO: 297106 - DNA, 244 bp, Zea mays
  unsure (1)..(244): unsure at all n locations
cggacgcgtgggcggacgcgtgggcggacgcgtgggccggcccgccgttcgccaccgccgtcgtgggcccatccacatcggtcgccacacccccttccgcccaccaccaggccgtcatctgcggcagaaggcgcgcgcccgtccgtccgccaccacgccgtcgcctcgcccctcttcgctgccgccccgtcgtcagctcggccccgtccgcagccgcgacttcatccacatncgtcgtcacacc

SEQ ID NO: 297107 - DNA, 162 bp, Zea mays
tcggctcgccgacccgccccgcgggcagccaaaatgccgatcaagaggctcgtggagatcgggcgagtgtcccttgtgtactacggcgaggagtatggccgcctcgtcgtcatcgtcgacgtcttcgaccagaacaaggctcttgtggatgcccccgacatg

SEQ ID NO: 297108 - DNA, 460 bp, Zea mays
cggtgaggccggctgtggaggagcctttgccggcgaaaaatcaccgtcgtcgacggcatcgtcgtcgcatgaggctgagagccggcgcaaggtgtccaagaagcactcccaagggaagaagaaagcaaaggtggattggacgccggagcttcaccggagattcgttcaggcggtggaggagctgggcatcgacaaggcggtgccgtccaggatcctcgagatcatggggatcgactccctcacgcggcataacatatccagccatctgcagaagtaccgttcccacaggaagcacatgcttgcgagggaggtggaggcagcgacatggacgacgcaccggcggccgatgtacgctgcccccagcggcgccgtgaagaggcccgactctaacgcgtggaccgtgccgaccatcggtttccctccgccggcggggaccactcctcgtccggtgcagcacttt

SEQ ID NO: 297109 - DNA, 174 bp, Zea mays
gctcgcccaccctcccttcggacagtcaaatttccgtacaagagggtcgtggaaatcgggcgagtggtccttgcgaactacggcgcggagtatggtcgtctcttctacatcgtagacctagtcgaccataacatgccccttgtagatgcccccgacatggttcgtttccaaatg

SEQ ID NO: 297110 - DNA, 301 bp, Zea mays
tcggctcctcctgctggtgtccgccaaggcccggcggctcaaccagaagtggaacgacgtggtcgacgatgctcatccaagaacacgtgcagagcttgccctccggcgagagcgaggagagcgatgcggacttcatacacggtgtgctcttcatacaggaagaggacggcctcactactgacaatcttaaggccatctttgttgacatgttctaggcaggcatttatacactcttacctgacgctcgaatacggcatgggcgacctcattaacaacaatcacgccattgagaaactatata

SEQ ID NO: 297111 - DNA, 272 bp, Zea mays
  unsure (1)..(272): unsure at all n locations
cgcccgtgtacggcgcgccgtcgctggagcttccggngctcatcaagatcagctgcgacggtggcccgccgtgcgacccggacgcccgcgactggctcgcgggcgacgcggaggtcacgcaccgggtggccaggtggatccaggagggcatgccggaccacgtggaccccgcgggagggccggtcgtccggcagtcgtgcatctgcttcatgacccccgacgccgacttcgtcatggactttctgggcggcggcccggacgtggtggtcggg

SEQ ID NO: 297112 - DNA, 446 bp, Zea mays
caagggttctattatgaagctgcatctagtatcttggataaaaatgcttctatgctgccatccatgtcgtcttcaaatgagtctttcgaaaacaaccataaattttcaaggtttgcaccaactgaggaattaacatcagggttttatgattcatttctgtcagctttaaaagatctgcaccacgaaatcgatctgaacaatgaaaagatagctctgagaagcaaatatactgtcatttgtatatatgcaaaacaattccatgatcttcggaagatgtgcttgccatcagaacttgcatatatttcgtcgataagccgctgcaaaaactggaatgcacagggtggaaagagtaagggtttctttgcgaaatcaatggatgacagatttatcataaaacaaatcaagacgactgaatttgactcgttcttaaacgttggtcttgagta

SEQ ID NO: 297113 - DNA, 280 bp, Zea mays
  unsure (1)..(280): unsure at all n locations
ggaacaatcccttctgagctcggnaacatgtataatctaataagcttggacttggtcaagaacaaccattcggggaccataccctcctcccttgggaaggtggaaacccctggaattccggcggtcaaagggacaaaattggccggggccgacccaaagggaactttctggaatattaagtctaaaagtgtgggaggttaaaagcaaagatatatgggggacaattcccacatggggaccattagagcacattcctgtgagaaactgtgagaaaaaccca

SEQ ID NO: 297114 - DNA, 344 bp, Zea mays
gcgcaccacaagcgagcgagggacccggggcggatattatagatagaagacgtctctctcctgtgggcggtttttttgggaacctgtcgcctgctgcctgcctgcctgcctgcctgcaaaaaggagtttgtcatggcgtctaagcgcatcctcaaggagctgaaggacctgcagaaagacccccccacatcatgcagtgcaggtcctgctggtgaggacatgtttcattggcaagcaacaattatgggaccacctgacagtccctatgctggcggcggttttttagtgaacattcatttttccgcagaataccccctcaaaccctcaaagggttctttcaagac

SEQ ID NO: 297115 - DNA, 308 bp, Zea mays
ggcttcttcttccccaccggttcgtgtttttgtttctggttcgtgggcgagagggaagagagggtggcttctgacgttgagtacccgtgcttcgttggcggcctctcctgtgccaccgacgaccactcccttaacaacgccttcagcacctacggcgaggtcctcgagtcgaagatcatcctggatcgggagacgcaaaggtcccgcggcttcggcttcctcacctttttcacggaggacgcgatgcgcagcgccatcgagggcatgaacggcaaggagctcgacggtcgcaacattaccgttaacga

SEQ ID NO: 297116 - DNA, 431 bp, Zea mays
  unsure (1)..(431): unsure at all n locations
cgcgancgcgggtaaagactttgttacctccatcgtttattgaaatgacctaatgccatcacttgggcgagattctgctgccaagcttcgggcagagggtatgtcatcgtcttgggcacatgaccttcgcaaacaaattcagcagactagattcttagggtttgtgaaccgggccgtgaggttcataagggctcatgtgccccttgcctctgatccaagatcgaaggtcgtggatgttgatatgatgcaatctcagagtcctgaggctgggagtaagccttcagcagatacccatgctgtggtgaagaaacgccctgcactggcttgctgggcatgtgtggctgcacccaaaacagagatggaatcggcaaaacaaattgagggcacgaaaagtcaaaccgacactggtgtccaaactgagaaaacaaccg

SEQ ID NO: 297117 - DNA, 287 bp, Zea mays
catcgatccggcattggtcaccgcacaagtgcacgactacctgtcaccttatacactctggtaagtagctaacgccggaggcgagaacaataaaaagctcgacatgggcgtggagaaaaagcatggcctgcagctgctggacttttgtgtgagcccattcggacagcgctgacgaatcgcgaaggtcgagaagggcctggcctactagtacctgcagcatgacctggggaacaagagcgagctgatcatccgagccaacctagtgcataagaagatccccatgctgc

SEQ ID NO: 297118 - DNA, 447 bp, Zea mays
gctcgacttaccgatggtttctttgtggacgaatgaacagatcctcgcccctcttccaatcgggtttgccgtgttcctcgtccacctggccaccatccctatcaccggcaccggcatcaaccccgcgcggagccttggcgccgccgtaatttacaaccagcaccatgcctgggctgaccacgtgagtggaaaacaactttcttctaccttcatgttgctaactagtttcactgttaaaagtagtatgaagagtctaaaattaaatagtgaaataaagcctaaatagttgatataaaacaagaaagtaattacaaaatataaaaagtttttctatctacttggatacagatagcaaaaacattagttatatgtaggaaaaaatcatgtatctaaaaagacaaaaaacgtcttatctgaaggtcaaagcacgatatggtaggacacaat

SEQ ID NO: 297119 - DNA, 303 bp, Zea mays
cgctctcccgtacggcggtcgctttggatgtcatttgggaagggaagggaaggggaggggagggacgggggcgcgttcgtgccgcgtcctgtccttgtcgcgtccgtcgttcgtcggtcgccaacgccgtgaccccatcctgcaactgaccaccagctgcttctgacgcatggctgcgacgcgtcgatcctgctggacaccgcgcatagctagaagactgaggctccgaacctgtcggtgggcgggtacgaggtgatcgacgcgatcaaggcgcatgtggagagtgcgtgcccagtcgttgtg

SEQ ID NO: 297120 - DNA, 345 bp, Zea mays; identical to SEQ ID NO: 258519

SEQ ID NO: 297121 - DNA, 331 bp, Zea mays
ggaggtcgggatggggcgtctgggtacggcgatgctggcggagaggatgtgaggggggcgggcggcgactcatcggggtgagcgatctgggccctaggatttctgaacattaatgatgtaggtcaaaaggagatatattatttttgctttctgcaggaagatttttgtcggaggcgttgcttgggagacaactgaagaatcattctccaagcatttcgagaagtatggtgcaataactgattctgtaattattaacgacaagcatactaagatgccgtcgtgatttggattcgttacaattttttgatccatttgtatagacaaggttttt

SEQ ID NO: 297122 - DNA, 439 bp, Zea mays
  unsure (1)..(439): unsure at all n locations
gtccactcaagggtatcatgggttatgtggaagaggatctggtttctaccgacttccttggtgacagcaggtcgagcatcttctacgccaaggccgggatcgctctgaacgaccacttcgtcaagctcgtctcgtggtacgacaacgagtggggctacagcaaccgcgtcgtcgacctgatccgccacatgttcaagacccagtaggggtttttcccccctgcttctcatggatggttgctgcttgtgtatgccgagaataaatgtggatggcgcgtgcctctgggtcgccaggttcatgctgagtctggacatgttttgcacttttgtttcccttcctgctaccatctgtgacagatccgctcgctaatatgggacctgagattagcttataanaaaaaaaaaaaaantaaaatttatattttattatttaatatttt

SEQ ID NO: 297123 - DNA, 322 bp, Zea mays
ctgacgcgtggtcggacgcgtgggcaaagaattccctcccctagccgccgccggcgatcgtgtccctgttaggtgccgggaccgatgaactggccgagttctatgtagagaatcggatttgcttgtatcaacacggggtccgctgcgtctggtggtggtgaatgggagaaattcatgagatctgttcctgatcaggcgtgcgagctcgggaatcaagagtttcacacatagctcctgcgatttgaatttgacgtactaatggagcctcacggtggcaaaaaggctatcagtaatcgatccatgatgtatgaagctccccttg

SEQ ID NO: 297124 - DNA, 319 bp, Zea mays
  unsure (1)..(319): unsure at all n locations
gccgtcanctgatatcctcagatcatcggctatgccgtaatcatcgacacttctgctgactcccggcgaggtacttctgacgcatgtcagcgagcgcttctcttcttctcttttcgctgtgcttttagtctgttcgtttgatgcccacatctactaggtttgtgtgatgagccgagccgatttatgcactggatttttagtcaagtgttgtttccgcctccgctacctttagtgtctatgtctgaatttgggttgcagtgattatcgagctataaattatagctgttgcgctgntctatactagatccagttaccgatc

SEQ ID NO: 297125 - DNA, 208 bp, Zea mays
cacacgtttggtcccaatcactcggaagggatactggccggtcaacatgggtgatgtcccgggtgatggaaaggccacctggttttgggcctgtggcctggccacccttgcaaattcttgaaccttcctgcttgcttgccccaccacccttattaccggaatcaatgaaaaaattggtgcctcttgtgttatcaggccagaatgccag

SEQ ID NO: 297126 - DNA, 311 bp, Zea mays
  unsure (1)..(311): unsure at all n locations
caaccgccaccgtgaggtatccgtcgtttccttctctctccacgactgctccaacatttactaactgaccagcaccatctccgggcccgccgacagcccctactagggccgcacgttcgtcatcgatatccgtcttccccatgaatatcccttttagccttctaagattcatttcatcaccaaagtatggtaccctaacannggcaggcaaaatggatctatttgcttgtacattcttaaagatcagtttaccccatccctttacctttaaaactgcgcttccttcccttcaaactctgcttttctacttc

SEQ ID NO: 297127 - DNA, 400 bp, Zea mays
  unsure (1)..(400): unsure at all n locations
aatgaagatatattgaaccaaaacccaagcctgagtacggttgttttttcatgatccagtttgtcagcgatgtaacaaaatacatcagtggttgcatggcttctctatctgctatgattcagcttgaacttcctcatatcaacatcctttcaaagatggatctggtctccaacaaaaaagatgtagaagagctctaggtacctggacccgaatgcacaggttcttctttcacagctgaatcggcagatggcacctcggtttggcaagttgaacaagtgtttagctgaactggnngatgattacagcatggttaatttcattccacttgatttgagaaaggaaagcagcatacaatatgtgctatcttctatcgacacatgtatccagtatggggaagatg

SEQ ID NO: 297128 - DNA, 448 bp, Zea mays
gttcgtgaccttctctcccatcccgatttcccttcccaccgacatccctcgccttcatgaggtcttgactgcggcggaggcggcttctttgatcggtagcccaattcccccgactaccgcccttagcccgctgctgctgcttgtcaaccgcatccgctttagtgtccgtttgctcacgtcttcttcgagctcgccgtgttataagatttacaagatgtttacataatctctgcaattgagtttgacaaatttgtgaatcatcttgctactggagatagaggtggtcatttggttttgttcgaaagatcagacattgcttataattcttgttgaagagaacttgataggcaagaatatcttgtttttatagcatttttatttccttttctatacccaaatttataattctttaaacctttgcttgacctaccttataagttttgaatat

SEQ ID NO: 297129 - DNA, 282 bp, Zea mays
ctgacatttatcgccgaggtgccagaacaaaaggggctcttgtagatgtagcttactgcgaagaacttggagtttctctgctggaagctgctatgaatggatagtctattcatgcgacataaagtggatcccctgtggagattgatcaggtccagtacaatggtgtcacttagcgatcctgacgatcagattgccagtgacgctgcactatataaacttccttttaatgaacatctatggtcaaggcgcagacagaatggactgaccaatactgaccaaatc

SEQ ID NO: 297130 - DNA, 373 bp, Zea mays
  unsure (1)..(373): unsure at all n locations
gagagattcgccgatatgcggtccaaaggctttaatttgctaggaccacagtgcattctttgctgtgctaaagaacgtcgctgtctacctaaacaaagttatacgtgttgtcttgcaatggatggggttaaaacactttgttcaggctttgaaaagtctgagaaggttaggattgaagaactagtaacagccatgggaggtcatttgctaactaaacactctatggacgtgaattttgtaatcgtgaaggatgtcttggctgccaaatataaatgggctctgaatactttnnanaatcccattgtcaccatgaagtggttagagcaatgctggattgagcatcgtgttgtgcctcatgaaccttacaggattc

SEQ ID NO: 297131 - DNA, 432 bp, Zea mays
ctggcatacaattaatccagtccctggtattatcagcatgttggactaccagtaaaaatgcaggttctctttaatggaaccagtagtatgagttatcgagattctgtttgttttactccttttatttctttgatcttactgcacatcttttttccgatccatgccaggagcgttccttaatgcatttggagcaatcattcttggggcacctgttggagtcaagtactggatagctactatttactggtcgcttgtcatgtccctgttcacgtttgttcccgcagcatgtgtctttggagcatccaggatcgattggcaggatgtgctttctcactccatttatttcacgccaactgatgttgagaactacatgatctctgcaccttgccatggaactgtgctaagaacatggctcggtgcttggcctatgcc

SEQ ID NO: 297132 - DNA, 277 bp, Zea mays
  unsure (1)..(277): unsure at all n locations
cttattaattgtatcttgtatacntttcattttcagactagagataaaacaactggtcaacttaaaaataaatgtggtctcctcaaaacacttggacaaagagttaatccttaccttcctcatatttttggaaccatcaagtggctatttaacaataatagttcaaaatttaagcatcatgctgctcatctcatctccattatagccattgtcattaagcatttccaggacgatcaatttatgtctcactagagtgtttaactgtatgattacttat

SEQ ID NO: 297133 - DNA, 169 bp, Zea mays
tgaaatcgataacatgatagcagatgccatgatcaacgtaagtcataacggccttgggggccgggaagacgggaagagttctgataactatctttatgctgaggatggaacgcactttgaccgtggttacatctgtccacactccgtaacagacactgacaaaatgact

SEQ ID NO: 297134 - DNA, 306 bp, Zea mays
aaaaataaaaatatagaatacgaaaaagggcaatacaaaaaaagcaaccggcatggcgaccagggccatggcacctctcctccacggtcttcgccggcaaggccgtgaacgtgccggcgtcgtccgacttcggcgaggcccgcgtgacgatgcgcaagacggcggtgaacgccaagcctgccgcggcgttctggagcccgtggtacggacccgaccgcgtgctgtacctgagcccactgtacggcgagccaacgatctacctgacaggcgacttcccctgcaactacggcttgaacaccgcggggc

SEQ ID NO: 297135 - DNA, 435 bp, Zea mays
gttcaaatcctccgacaccgtttcgagtttgagagattctactcacagttctgtcttggcagcgtgacactctgaaacatgcagatatctggagagacagcgtccgcgtctgtgaattcgagctcattatctgatctgtcgaacgtcactaatgcgacgctctacgggtttgaagattaccatggagtggatattggtgtggtaaaggcagcacggctttggtacagctgcgtaggaggagaattgctgctggaaatcccacttgaagaaggtgacacaaggcttggctttgctatcagccgaactgaggaggtctttgtttttactagcactcgacggagtactcacagttagtatgtactacttgagcagttagaatcagccatggaatctgctgacgtgcttgtttttggtacggctttatctacatatcat

SEQ ID NO: 297136 - DNA, 322 bp, Zea mays
gctcaatctccctgcgccactccatacatctactcactcccaggacacgggaagctacgaagggtggcgttcgtcaccgcccgggcctcggtcgagacccttcgcccgtcggcggcatcgatcaaatcgtcggaggccttccttggccactctagccggctctgacgcacctgcgtattccacgaggcgcgaactcaagggggaagccaacggcaaggggctgcccagccttccctccacctgctaccttgacggcaacctgacgggtgacaatggctacaacccgttgggcctggctgaggaccactagaacctgcggtgg

SEQ ID NO: 297137 - DNA, 428 bp, Zea mays
  unsure (1)..(428): unsure at all n locations
ataaaggtcgttccttttccggattcactcactgttccatgcattggaagttcaaggacaacatggcgtaggttctagctctgaatggcatggcatggcttgggcttgggcgtgcagggggtgctatcaaagggcgcggatggaagtacggctccgggttcgtcgacggagtgttcccagtgctgagtccgatggcgcangatgtgctagaactcgtgcagacgagggggaccgacgcggccagcgtctgggagtcactggacaagatccctcaagcgcacgatctttgggacgacatcgtcaacgtcgccgtccagctccgactgaaccggcaatgggagccgatcatcacagtctgcgagtgggtcctgcgccggagctcgttccgccccgacatcatctgctacaacctgctcatcgacgcgtac

SEQ ID NO: 297138 - DNA, 414 bp, Zea mays
  unsure (1)..(414): unsure at all n locations
aggagtggtgttgttgctgatcaaagtgggtctggcaagacactggcatatctttgccctataatacaaaacttaaggaacgaagaagttcaagggctccataaatcatcccctaggaaccccagggtgatagtattgacccctactgctgaacttgcttatcaggtccttaacaactgccggttgatatcaaaatctggggttccatttaggtctatggttgcaaccggaggatttcgacaaaagactcacttagagagccttgaccaagagctcgatgtaattatagcaacacctggccgtttcttgtctctgcttcaagaaggcttggtgcaactagctaaccttanatgagctcgttctgtttgcactgtggtgttggatgaagtggacattttatttggtgaagaaggt

SEQ ID NO: 297139 - DNA, 246 bp, Zea mays
cggacgcgtgggccagcgctgacatgctcctcaccggccaccaacctaaccgtgaacttattaaaagggctgggggctttcactaccgatcaataaacttgattgctgaaccttggccgaccggacaatttccggccatggaaaatggccaaaaaggccgggccctggttttttattacccaaacctgaaggaagcgctattggcattccgggaggaaggccggacccaaaacttgaacatttggg

SEQ ID NO: 297140 - DNA, 358 bp, Zea mays
gagcctcaagaaacaactttcggtgcctttccacaagaggaaaatacacaaatctgctttgggcttctctgagaagtctgtctctactttggagcttctcaaggtctcatggtccaaagaatggcttctcatgaagaggaattcatttgtgtacatcttcaaaatagttcagcgcttctttgctgaggtgcactacaagccaaccgcgatcagcagctcctcatcgtcttcgtcatcaattgcaataactgcagttcctatagttgaaatatgcatcattatcgaggaacctctatcccaatataggcgtagttgtgccttttgtcccagctaccagaacgttttacaccctaaaggc

SEQ ID NO: 297141 - DNA, 429 bp, Zea mays
gttgctcgcctctgatcaaaccctaaacatggagttgatttatccgctccagccatgggtaggttgcagactgagtctgtcaaggatgccatctcccaaattgatggggatgccaaggagaagaataggaagttcactgagactgtggaacttcagattggtctgaataattatgattcacagaaggacaagcgtttcactggctatgttaacttgccccatatccctcgtcccaagatgaacgtgtgcatgcttggtgatgcacaacaccttgaggaggccgagaagatgggacttgactacatggatgttgaggctctcaagaaaatgaacaacaacaagaagcttgttaagaggcttgccaagaagtaccatgctttcttggcatcagaagccatcatcaagcagattccccgtctccttggtcct

SEQ ID NO: 297142 - DNA, 423 bp, Zea mays
agctcccacatgcagcttggtggtcctaagatcatggcgactaatggtgttgtccacctcactgttccagatgaccttgaaggtgtttccaatatattgaggtggctcagctatgttcctgcaaacattggtggacctcttcctattaccaaacctctggaccctccagacagacctgttgcttacatccctgagaacacatgcgatccacgtgcagctatctgtggtgtagatgacagccaagggaaatggttgggtggtatgtttgacaaaaacagctttgtggaaccattggaaggatggccaaaaccaggggttcctgccaaaccaaacttggaaggatttccgggggcctcataacttgggaaaccccaaccattgtgccaatcattccttgttatccaagtcaacttggtttccatt

SEQ ID NO: 297143 - DNA, 165 bp, Zea mays
  unsure (1)..(165): unsure at all n locations
cgcacatatttgctagccccacatattnatttctggacacaaaatattgaactgggcctgggggccctttttagatccacaacgtggccttcaaaataacagtcanaggaggctacctgacggtgaacacgcttgtggccgtggtgcttccatttctcggggact

SEQ ID NO: 297144 - DNA, 452 bp, Zea mays
cacacaagatgagagccgagagctagctacctagcgcgcgatggcgatgtccgcttccaagatgatggcggtcgccgcccctgcccttctagccctggtcctggccccgtcgaccggggaagccaggaacattaagaccaccaccaccaccaccgaaaaaaaagacgattccgttggtgctgatttttacctttctagtttttgaccaactaggaggcggcccgtccccggcgtccggtggcctccccggcacctcgtcgggcggcagcagcattccagcgttcagcatgccgggcagcggcagcagcctccccggcgggtcgttcttgcccggcagcagcggcagcatcggcagcatgcccctcttcagcggcggctccccggccttcagcggcttcggcggcatgcccgggtccaccgccgacggctccgtctccgtcgtccccgtgcac

SEQ ID NO: 297145 - DNA, 235 bp, Zea mays
ggggttcacggtgaagcagatggtgaacccgtggcggacctacgtgcgcctctcggcggtgctcatgggctccaatggcctcaccaagggctccctcgccttcctcaattaccctgcacagatcatgttcaagtcaaccaaggttctaccggtgatggtgatgggagccttcatccctggtctgaggcgcaagtacgcgttccaagagtacgtgtcggccgtgatgctcgtcgtc

SEQ ID NO: 297146 - DNA, 397 bp, Zea mays
atccggagcaggcgcagtcccaccgaacccgccgccggtcggcctggatctcctgggcggtgcctctcgtttctcttttcaataatcaagatgagccgtggcggtagtgccggcggcggtcaacacctctctggcatgtctattcggaagcggggagccccccaaaccaggagtggcacgagcagcaacagctccacctgttgagaaaccatctgctccaaagactgatgcggccaaacatgttgctgctggcgctaccagacaaaccaataactaccacacggctcatggtcaaaacactggcaactttcttactgaccgtccttaaaccaacgtacacactgcttttgacggtggatataacctgtgctacctgatccgtggcaactgatgcccg

SEQ ID NO: 297147 - DNA, 314 bp, Zea mays
cccacgcgtccgagcgcgctggcgaccgtgctggactacaacgtgatgcgggtcaagggcggcgccatctgggccgtgaacgggatgcgccccgacggagccgtcgacgcatcgtccacgcagtccaaggaggtgtggcccgtggtcacgtacgccgttgtggaggtcatggtccacgagggcatgacggaggccgccttccggacggccaatggcgcccacgacgccgtctggggcaacgacggcttcgggtacgcgttccagacgcccgaggcttggacggaggacggcggatatcggtcgctgcactacat

SEQ ID NO: 297148 - DNA, 427 bp, Zea mays
  unsure (1)..(427): unsure at all n locations
tttcaactcattgatatgtgttgtctgaatttcatcttgcacagagattgggcttggcctgacaggctttggaatattcttctcatttctgggaattgttttcttctttgacaaggggctcatcgcaatgggcaatattcttttcctgtcaggtttgggtttgacaattggtctgaaatcaactatgcagttcttcaccaagccaaagaattacaagggtactatctcatttggngctggtttttttctggttctcattgggtggccgctttttggcatgctcttagaggcatatggctttattgtactcttcagtgggttctggccaacactttctgtgttcttgcagaggattcctatcatcggctggattttccaacaaccatttgtgacatcggtaagaagctcgcgacacatgatgttcttc

SEQ ID NO: 297149 - DNA, 325 bp, Zea mays
tcaagcctgttacacttggactcggtgtaaaaagtcctataaaaaggagcagatatgacgacctttacaaagcagtctagaggactatgtttgtgttcttctgaaccaatggacagaggtgctgcccgacatctaatgttattatccatacaaaaattgctcaaaaatttaatgagaggacagctgcatggcccacacgaattattgatccagatccacttcaagaggtttgcacgctatggccaaaccttagtgaacgacgacgtgagaatattaagaagcatatatcgaatgccaaaagacgaggcgcaactattctgactgg

SEQ ID NO: 297150 - DNA, 375 bp, Zea mays
caacgagtcatcaaataggtgttctgtgaaaagctgggtgcgtgggggtgtctctgcgaacagtgatgatgtcattgagcttgaaaagagtaacatccttctgattgggccgacagggtcaggtaaaacactggtagcgaaaacgctagctcggtatgggaatgcgccattcgtgattgctgatgcaacagcaattacacaggctggatattctggtgaagatgtgggatctgtaacctacaaacttctagtggctgttgacttcaatattgaagctgcagagcatggtattgtgtacattgactgagttgatcagctcacacagaaggctgactgccgcaaggatcgaaaggatgtatttcgagaggttgtgca

SEQ ID NO: 297151 - DNA, 260 bp, Zea mays
ggcctttgtcgcttgtgtctccctttcttccggagcgaaaccaaatatcggccagagcgctagcgtctacgagatggtgctgcaaaacaacatttactcactcgatccaccgggcgagcttgagaatctattgctcaagatgaagcggctagcccattccaacaacttcttcttcatggatgttaagtgccagcgctgtttaatcataaccactgtgtacagccactcccatactgggggggtgtgcccaggctttcaaa

SEQ ID NO: 297152 - DNA, 395 bp, Zea mays
tgcccacctcccctttcccgcctggtcctcccattcacttgcccccttttttccctctcccgacctcccaattcccgaaatcacccccgacactccccacccaagaacccctcgtccccacctcgccatgggcagcgccgccgcctcgccgccgccgtccgggaagctgacgcaggaagagctgaagcgcgtggcggcgcaccgcgcggtggagttcgtggagcccggcatgacgctgggcctgggcacgggctccacggcggcgcacgcgctggaccgcctgggcgacctcctccgcgcgggcgcgctgccgggggtggccggcgtgcccacctccctcaagacggaggcccacgcggcgcgcgccgggatcccgctgctcccgctcccgggcg

SEQ ID NO: 297153 - DNA, 392 bp, Zea mays
tcggcccacacgtgcgaccaacgagcgcggtccgaacgagcagcgagcctaagtcacactcgggagctaactggctagctaggttaagaaagagaaagctgaccacaaggatgcggaggaagctgcagccggcgccggccccagagctgatactagacctggccaccatgggcactcgtcgaggaggtgcaagcggagtcccatgtgccgcgctacttcgtgaccggcgactacctcgtggacaacggccactacatcgacatcgagttgatggcgcacaccaactacccgccctaccgcatcaactttgacggcggccccaccggccgatttagcaatggccttaccaccgaagactctatatatcggtttttgagcttctacgataacat

SEQ ID NO: 297154 - DNA, 375 bp, Zea mays
catcccaccatgtcctcttctctgttcctctccagcccccttttcaacctttgacgctgtagcttgagagcgagcttagtgcctaccatattctcctcctgagcgactgagcgctggtctccgataggctcgccatgcaggtgctctgcgacgtctgcggcggcgcgccggccgccgtgctctgctgcactgacgaggccgcgctctgctccgcctgcgaccgccgcgtccaccgcgccgacaagcgccgtcgcatcccgctcgtccagccctgcgccgacgactccgccgtcgtcgcgccgctctgcgacgtctgcaaggagcggaggggcctcgtgttctgcgtggaggaccgcgccatcctgtgccccgact

SEQ ID NO: 297155 - DNA, 304 bp, Zea mays
cgcgcatcctatagcaactagtgccattgtcttcgcagttgtagcaagccaacgagcctggcgttgcctgatgtacacaccaaaccaccgacatggtgcgcacgcacagccatgggaagggtatctattcatcggcgctggcgaacacgcggactcctctcatctagattaagacacctaccagcgaggtggcggagatgaacaccaaagatggcaaaaacgggcagaagacgggcgataatggtgttctgctccgccaccaggagggcaaccaccttgtcaagagcgttactgatatcaagaa

SEQ ID NO: 297156 - DNA, 253 bp, Zea mays
gaccctgaaaggaatcacacatttttatgctttctgtgaagaaaggcacaaaggggattgggtgaatacactctggtcaaagctttaaattaatcaattcattttattctgcaactctgtttatagagttgatctgctggctaaaaaaataactgtactaggttattcatgcttctacatgcatgctaagatgttgcaagaccacagaaattgagtttttcatgattttcataatggagcttgcagaaacctt

SEQ ID NO: 297157 - DNA, 402 bp, Zea mays
cggacgcgtggtcggacgcgtgggcggacgcgtgggtagcttttcacgtacagttgcagttcagagagaagagaaagagaccgacatctatctcgccgatagctagcatcatggcgtccaaggcgctcctcgtggtagcgctcctgctcgccgccaccttcctcgtcgcctccgctaacgagcaagcccaggcggccaaagaggagaagaaggcggaggtccaagactggcacggcggcggcggctacccgcactgccggtggggctgctgcaaccgcgggtaccatggcggctgccggtgctgctcgcaccctgatcagataccagagcccatgtaccgtcctgagctcgttgaggtccacaactaaatagtaatgagctgcgctgctactatatataccg

SEQ ID NO: 297158 - DNA, 430 bp, Zea mays
ccacgcgtccgcgagcttatgtttttgcttatgaaccgcattcggtgctgcctattggcgtttgtgcgcttgcggatcatacaggttttttgcccctgccgaagattaaggctcttgcgagtaccgcggttttctatgtgccgtttgtgaggcagatatggacatggttggggcttgtccctgcgtcgagaaggaatttttacgagtacttggcggctgggtatagttgcatcatagtgccgggtggtgtgcaggagttgttgtatatggaatgtgattcggaggttgcttttcttaaatcaaggaaaggatttgtaaagatagccatggagatgggtcaacctcttgtacctgtattctgctttggtcagagttaagcgtacaagtggtggaagccaagtgggaaattatatttacgtatttccagagc

SEQ ID NO: 297159 - DNA, 452 bp, Zea mays
ctcacaaacgcccctcgagctccttgtatttactgccattacgctaggtctggtgtacattggttcctgcaatgaagaagatcgctcaagccattattcatgctttaatggtgcgcagcgacaacgaaatgggggaaccactttctcgcctgctgcctgtagcccttggccttctgtaccttggaaagcaggaaagtgtcgaggcttcggcagaggtttctaagaccttcaacgagaaaatccagaaatactgtgacatcacacttctatccttggcctatgctggaacaggaaatgtcctcaaggtccaaaaacttctgggatactgttctcaacatcttgagaaaggtgaaacccaccagggatctgcagtgctcggaataggccttgtggctatgtcagaggagctaggcattgatatggcaattcggtctctttgacatttgttacag

SEQ ID NO: 297160 - DNA, 327 bp, Zea mays
acgcgtgcgaaaacgttggtccgagtcctccgatctcattcgccgtcttaccggcgatcccaaagagggtttggtttagggttcggatggcgtcgaagttgctacagctgcagggaaaggccgcccaggcctcgagtttcgtggctaaacacgggtgcgcttactacaagcagctcttggagaagaacaagcagtatatcgtggatccgccgactgcggagacgtgccaggagctgtcgaagaagttgttttaacactcggctttgcgaatattcctttgcgctattaggagttttggaaaagaggctcgacgggtgtggaagcata

SEQ ID NO: 297161 - DNA, 342 bp, Zea mays
ggcgtcggcgcagcagcggtggcgacaacgacgacagcaacagcgggcgcgaaggcgacgaggcagcagcaagaggcaaagcaggataccggcggcggcgcgaggagggccgcgcggggccctgcaggcgcgctgatggaggggtcgcggtgcagccggaagaacgggcgcgggtggcggtgcagccagccgacgctggtgggctacgctctctgccagtaccacctcggcaagggccgtatgcggagcgggagcgccgcgaccggcgggcgcggcccaggccagctcggacgcaccgagcacgcgaagaaaacctccgccgctgcgcccaaggcggacgtg

SEQ ID NO: 297162 - DNA, 257 bp, Zea mays
cgcgtccgcggacgcgtgggcggacgcgtgggttgcgcatgtcgcctggattggacccaagaaccgggcgacccgtggcgaccggcgacatggccggcggtggcggagaggaggagtgggagggcccccccggctacgtgctctcgctcccggcggtggcgccgctcctgcccgtcgccgtctcctgcctcgacgccaccgtccggtgcaagatgcgcaaccgatcccgtcttcgtgcccagccgtctggtctggtg

SEQ ID NO: 297163 - DNA, 442 bp, Zea mays
tgaaatcgggcgaggttttctctgactcaacccacaagtggtatgaaccagactggtggaaatttggtgatgggaaatcgtacttccggcacgcttctagtgaaatgtttgtcatatcaagggccattgctcagttcatttctataaacaagtctgttctccggacatatgcccatgatgatgttagtgtaggatcgtggatgattggccttgctgtgaagcatgtaaatgaagcaaagctgtgctgttcatcgtggccctcaggtgcaatgtgttcagcgctataacgagcaacaatgcatgctgaggagttttgcaaacatcgtgcctggtggataatacatgcaatatgaggtcgaatacctgaggaacatttcgtttcttctgccattttttgtaacgtcttttggaggaagctcttgcgagccagttcataccgaat

SEQ ID NO: 297164 - DNA, 306 bp, Zea mays
gcaggtcctgatcgaggcgcacaagtccgacgtgcgcatctacgccagcctcacccgcctccacttccacgactgcttcgtccaggtacggtacggtaccatggccatgccgcatgcacgcatcagcaataatcagctggtgtatataacctgttgccgccgtgccgcatatctctgctgtatgcatgtcttcaattagggctgcgatggctcggtgctcctggacgccgttccgggggtggccaactccactgagaagctggcgccggccaacaacaactcggcgcgggggttcccggtggtgga

SEQ ID NO: 297165 - DNA, 450 bp, Zea mays
ctgctggctgcttccctctccctccggtgctgagctgatccaccgccatgggggtggcgatggggaggcttcttgggtggaagcaggaggcgcacatcgcgctgtttggcctcggtggcgctggcaagacagccattctgcacaagctcaagctcggccacgccgtcaccaccgggccaacgatagggttcaacagcgagacgcttgaatacaatggcatcagcttcagggtctgggacgtgggtggtcaaggcgaggtagctcatgtatcagcagctgtattgttcttgcattcaaggcgtggtattcgtcgtcgacagcagcgaccgggagtggattcttcgagccaaagatctgctgaacatcattctggacgaggaccagtttaagaatagggatctcgcgctgcttgtgtttgcaaacaaagcaggaccgccgaacgtcatgagc

SEQ ID NO: 297166 - DNA, 202 bp, Zea mays
gtgcattttcgctgacgtggatggttgacatctaagggctagtttgggaacatcaggttcccaaaggaaaatgaactaatttcccttggtaaaatagaaatcccttgagaaaattgggttcccaaactagccctaagtgttcattttaaagaaaaagtatgtagaggtacatacccaacaatgtgacaaggtacaaaagggg

SEQ ID NO: 297167 - DNA, 388 bp, Zea mays
attcttaagagatcgagcttcttttgcaccacaaggtcgaggatgtcttgcagctgcggatcaagctgcggctgcggctcaagctgcaagtgcggcaagaagtaccctgacctggaggagacgagcaccgccgcgcagcccaccgtcgtcctcggggtggccccggagaagaaggccgcgcccgagttcgtcgaggccgcggcggagtccggcgaggccgcccacggctgcagctgcggtagcggctgcaagtgcgacccctgcaactgctgatcacatcgatcgacgaccatggatatgattattatctatctagcttgtggtggtggttgaacaataataaacgaggccgagctggcttgcatacatatgtattgtgtggtgtgtg

SEQ ID NO: 297168 - DNA, 335 bp, Zea mays
ctagtacagtctgctaggtaatctgttggtactacgactgaccaccacatgactgagaccagcagaaagtcgtcgtgggcctggacctcggtacaaccatcaatatctgcacgacttactcttgcgttgtcctgtctcatcacgaccgcgtcgagatcattgccaacgaccaacgtaaccgcacaacgccctcatacgttgccttcaccgactacgaacgcctcatcggagattcggccaagaaccatgtcaccatgaaccccatcaacaccggctttgattccaagcgtctcatcagcaagaggttcagtgatgcgtctattcagaatgatatc

SEQ ID NO: 297169 - DNA, 327 bp, Zea mays
  unsure (1)..(327): unsure at all n locations
ggcaaatgttattaaagggtattcattacataagtcatgtaatctcaatgtgggtgatgagtactgctttagtacgaaggagttatggttcatcatctttccttctgattctgaaaggattactatctctgaaacacgaaagatgaatgacgntctttatacccgacctcacttaatccgtgatcatcttatgagggccactgacgttatgatcgcccgaaaggttgccgcggtctgcggataccgtgatgtcggcaagggctgtgctgctgtcctaaagcaggctggtgcccgtgtcattgtgaccgagatcgaccccatctgtgc

SEQ ID NO: 297170 - DNA, 250 bp, Zea mays
tttagatgttactcaaggttatccataccattcttattgtaatctcacagtccatcatcagtgctgctttactacaaaagaggcatgagacatcatctctccttttgattctcaaagaattactatctctgaaacacaaaacatgaatgacaacctgcatgcctgcccccactcgctccctgatcgtctgatgagggccactgaccttatgatcgccggaaaggttgccgtgctctgcgaataccgtgat

SEQ ID NO: 297171 - DNA, 203 bp, Zea mays
atcgaccttcaagtctcgctacgtagcagttcaataaaaaaagcagccgcaatggcgagcggcaccatggccctctccttcacggccttcgccggcaaggccgtgaacgtgccgtcgtctttcgccttcagcgaagcccgcgtgacgatgcgcaagacggcggcgaaggccaaaccagcggcggcgttcgggagcccgtggta

SEQ ID NO: 297172 - DNA, 378 bp, Zea mays
cgcgtccggctttaatatgctccgccgcatgtacgaaacctttattagaagactcaatgttgctcataggtctgtgtgtgttccgcatcatctctctcatgatttcagggttcctagcagcttcgagtgtttggcggaggacgcctgcgatggctgtgtatggctctcgcagctccggtgatatggttagactgctgcctgtagctgtgtacttggtgtactgtcttcccgcgtatgtggatttggtgaaaacttctgtatgagcagtggtgtgccacagatcaccgtgtgctttgacatcgacgccaacggcatcctgaacgtgtctgccgaggacaagacaacggggcagaagaacaagatcacaatcaccaacga

SEQ ID NO: 297173 - DNA, 364 bp, Zea mays
ggtgggttggcttctcctccccctacggttcgggttcgggttcgtgaggttctccggggttcggggtcgtgggtgagcggatcgagatggcggcgtcggatgttgagtaccgctgcttcgtcggcggcctcgcctgggccacggacgaccactccctccacaacgccttcagcacctacggcgaggtcctcgagtccaagattatcctcgatcgggagacgcagaggtcccgcggcttcggcttcgtcaccttctccacggaggaggtaatccggaccgccttcaaggccatgaccgccaagaacctgaacggccgcacattaccggcaaccaagcccaatcccgaggctgaccatgaagcagc

SEQ ID NO: 297174 - DNA, 472 bp, Zea mays
cggacgcgtgggtgcatctcgacctcaccggcgtccggcggtggtatcacgatggtggcgttgctgggccggcggatcggggtggctgcggcagctgccgcgttcatcgccctcgtggcgttcggatccgcctcatactcgcccaagtccttcgtgaagttcatcgtctacgcacacgacgagacagtgttcacatacatactctgctcgtcagctgaggatcgatcgctcggtctaatgagctcgaagtgaggaacgagccatatgttggcgatcatgatccatcgagaggatgcttagagattcaagatgccctacttgagatagttggcaagcgtactgtcccttaagtttttgtccatggaaagcacctgggtggttctgacgatactgttgactcctacgaaagtggaaaactggctagacttctaaacatcggagtcaaggacgacctttgagtgacatgctacat

SEQ ID NO: 297175 - DNA, 321 bp, Zea mays
ctgacacctggcttcaaactgttccgtgagaccaatactgtggactctggctcagcagcgggctcaaaggactacgttcacgtgcgcatacagcaacataatggtcgaaagagcctgaccaccagccatagattgaagaaagagttcagatacagcaagattatcactgatctgacgaccgagttctgctgcaatgatacagtgtgccacgacccagaactcggacaggtcattcatcttcagggagatcagaggaagaacgcctataatatcatactgcaggccggcattgctaatactgagcacatcgagattcatgga

SEQ ID NO: 297176 - DNA, 332 bp, Zea mays
ctccgctcggccaccagctttgaccgtctccgcttccctactgtcctgtgttcctccatacgccagtacgcctgcaggagcggcgcggcggcggcaaaggcaaaggcaaaggcaagatgttcgggcgcgcgccgaagaagagcgacaacaccaagtactatgagaatcctcggggttgcccaaggtcggcgtcccaggacgacctcaagaaggcctaccgcaaggccgctatcaagaaccaccccgacaagggcggtgaccccgagaagttcaaggagctcgcacaagcctatgaggcattgagtgatccagagaaacgtgagatttatgat

SEQ ID NO: 297177 - DNA, 255 bp, Zea mays
gtcgacccacgcgttcgattgcgcacaaaaagacaaccggatctcaccgaataccaccagtgggcacatgaggtagaggcgcggatcttatgcaaatctctgactggacagactatgagaactacgatgtggactcgagtgacaacattgacaacgttacggccaagatacagtacaatgaaggcatacgaatggaccagcagaggctcatctttactgacatacagtttgaagacggtcgcacacttactgact

SEQ ID NO: 297178 - DNA, 327 bp, Zea mays
gatccaattgtcacttgctctccctccaacaagctaattaaggccggtcatccctcttctagctggtttgattatccatggcggaggagaagcaccaccaccaccacctgttccaccacaagaaggacgaggagcagctcgccggcggcgggtacggcgagtccgccgagtacacggaggccacggtgacggaggttgtgtccacgggcgagaacgagtacgacgagtacaagaaagaagagaaagagcacaagcacaagcagcacctcggcgaggccggcgccattggccgccgcgccttcgcactctacaagaagcacaaggcaa

SEQ ID NO: 297179 - DNA, 289 bp, Zea mays
gtcgacccacgcgttcgtacatggagaacacacagatgctcattattgaagctgaccgcctcgaccggaaacgatgggtagaggctatatatgacctccacaggatgctgaatgcggatcaactgatcgacgctagactgctagaatatgcatacatgctagatcttgcatgtgatatgaatgctgctggaatatctgacatgcttaggctgcattccatgctacagcggcgctcatgcatgcacaacacttacgctacatctggagcagggatctatgacgatctaga

SEQ ID NO: 297180 - DNA, 269 bp, Zea mays
tcagagccacccgtactgttccaagtctcatggaaagagtccgtcaccgactaacacgactgtgctcagtaagcagaggcgatcagcttagcatcagcgcaggaagaccctgccgggaaagacgatcacgctctaggtggacagcatcgacactgtcgaccacgtccaggccaaaatccaggactaggaagggattcccccagatcaacaattactgatattcgctggcaagcagctggatgattgactcacgctggcttactacaaca

SEQ ID NO: 297181 - DNA, 313 bp, Zea mays
aggcgacccggaaatttaatgcttgtacagtggccactgtttctattgactagcaagatcatgtcggcaaatgactatgcgttctgactgcaaagactcgcagcatgagctatgggatagaatatcaactgatgaatacatggcttatgccgccaaagaatgttactacagcactgaaaaaattcttcactctttagttgatgctgacaggcatcactgggttgtaaggcttttccgagatcttaatgacagtataacacacgggtcactcctagtgactataaatctgaggaagctgcagatagtacagtct

SEQ ID NO: 297182 - DNA, 326 bp, Zea mays
cccgttcctctctatctcacacacaggcacaccgagtagaaggcggcagttgcgagccaggacaagcagagcgcaacccgtgggcggcagcggcacgcaatggtgtcggagaggcagcaggcggcggggaaggtggccgccttcaacctcacggaggccgggttcggcgacgggtcggacctgctggacgacgacgggcgcgagaggcgcacggtgaccctggtgacggcgagcgcgcacatcatcacggcggtgatcgggtcgggcgtgctgtcgctggcgtgggcgatcgcgcagctggggtgggtgatcggccccgtggtgct

SEQ ID NO: 297183 - DNA, 290 bp, Zea mays
  unsure (1)..(290): unsure at all n locations
gcagtgtcagtcattgtaacctagatagcgtattacatctggcaccacatggcattctacggtgcgaagctctctctgctcgcagccatggcgaagaattacccaaccgtgagcgccgagtacagcgaggccgtcgagaaggccaggcgcaagctccgcgccctcatcgccgagaagagctgcgcgcccctcatgctccgactcgcgtggcacttccgcgggacgttcgacgtgtcgncgaggaccggcggtcccttcggtactatgaagtgcccggcggactggctcac

SEQ ID NO: 297184 - DNA, 380 bp, Zea mays
ggctcctcctcggcaagcccttgtagtcgtcgtcgtgcagctcgtccgacgagaacctgtgcaagagaaccggcgcggtatggacggcgatggcgcacatcatcacggcggtgatcgggtccggcgtgctgtccctggcgtggagcgtggcgcagctggggtgggtgggcggcccggcggcgatggtgttcttcgccggcgtcaccgcggtgcagtccaccctcatcgccgactgctacatctgccaccacccggagcgaggcgtcgtcaggaaccgctcctacgtcgacgccgtgcgcatctacctgtgcgacaagagccatttgttttgcggcttcttcctcaacctgagcttgtttggcacccggtgtggtgtacac

SEQ ID NO: 297185 - DNA, 455 bp, Zea mays
gtgatctacgaagaggatggattccagagtctccctcctctgccccctcgccttcccttcgtccttcttgaattgcccaaaatccaacgtaattaccccccacttcttaaaggcattaacaactacaggtccttgctcaaggtcccggcgcttgcccagaacaagaaccccgcgtgcctggccgagcagctcgcgaggcagttcaagggccaggagtgcaccaacacgacgggcgccaacaccgtcatcggcaccaaccagcaattcccgaactacccaaggaccctgaaccgttgccacctcaccccttcggtaaccaagaccggccagttaatcccgccttccttcccggcccttgcccccgccgtcttccttgcaaattacacaaagtcgaagaccaaccggtccttaaacaacagccagtcttccgcccccggatccccaaccaaggccaa

SEQ ID NO: 297186 - DNA, 373 bp, Zea mays
cacactcctcgccatcacataaaaccagtgcaagcagaagcagcgcaatggcgagcagcacgatggccctctcctccacagccttcgccggcaaggcagtgaacgtgccgtcgtctctcttcggcgaggcccgcgtgacgatgcgcaagacggcggcgaaggcaaagccggcggcgagctccggcagcccgtggtacggccccgaccgcgtgctctacctgggcccgctgtccggcccgcccccgaactacctgaccggcgagttccgggcgactaccggtgggataccgcgggggctgtcgcggaccccgaaccgttcgccaagaaccgggagctggaggtcatccacttcccgctggcccatgctggggcg

SEQ ID NO: 297187 - DNA, 319 bp, Zea mays
gtggttcccaaggacgtgaacgctgctgtggccacaatcaagaccaagcgcaccatccaggtcgtggactggtggccgacttgctttaaagggcggattaaattacaagcttccaagggtcgtccccggcggtgacctggccaaggtgcagcgtgccgtgtgcatgatctccaactccaccagtgtgtgggaggtcttctcccgcatggaccacaagttagacctaatgtacgcaaagcgcgctttcgcgcactgacacttgtgagaggatatagaagagggagatttctcagggtctcgaggagatgtgtgtgctcta

SEQ ID NO: 297188 - DNA, 452 bp, Zea mays
  unsure (1)..(452): unsure at all n locations
cacggtgtcaccaaacctgccccctccccttcccgctccgctccgctccacgcacggcgcgggatctgctgctgctgcggcggccggtggacgccgcgccgcgcgtgccggcggcggtgacgtgagcggcggatcctgcccggccgtgccatcccggcgacgatgacagcgtaagcgggcggcggacgaccgcgcccccccggcccctactcccgaggtcattggcgtgtgctccttggcagaaaatggcgatgatggtggatccccccaatggcatggcaagtcaaggaaagcattactatactatgtggcagacactgtttgagatcgacaccaagtacgtgccgatcaagcccatcggaagaggagctnacggaatcgtttgctcatctggnaaccggnanacccatgaaaaagtcgcgataaaaaagataacaacgtctttgacaacc

SEQ ID NO: 297189 - DNA, 390 bp, Zea mays
cgcttccaggcttactctccgctgggttcgtcagagaagaacctagcacacgacccgctcgtcgaaaaggtcccttactactacagttgaacccaagctcctaaactaaaactacatgctgctgttcctaggtctgactccaagcgtttaaaccacaggtagccaagaaactggacaagaccccggggcaggtgctcctcaggtgggcgctgcagagggggacaagcgtcattcctaagtcgaccagggacggaaggatcaaagagaacatccaggtgttcgggtgggagatccctgaggaggacttcagggccctgtgcggcatcaaagatgaggtgagtgagggatgccattgtccttggggtttaggctttagcgataactttagca

SEQ ID NO: 297190 - DNA, 405 bp, Zea mays
gccaaatgaaaagatgtactctattttaatttatggttggtgcaaggtgaatcggagggacatggggaagaagttcctaaaagatatgcttgttcatggcatagaaccaaacattgttacatacaacatccttctaaatggtatctgcaggcatgcaagcttgcaccctgattaccgatttgatagaacagttcatgcagcagaggatctcttgaaggagatgcgtggcaggggaattgaaccagatgtaaccagttattcaatcattctgcatgtttacagtcgcgcacataaacctgacttgcgtctctgcatgttccgctcgatgaaagaaagaggcatttgccccacagtggcaacatacacttctgtgataaagtgtctttcctctcgtgggagattgga

SEQ ID NO: 297191 - DNA, 301 bp, Zea mays
gaagaccgagcgagcgacgcgtccgcagaatagtctctgatcggtttgttgctagcacatctgagaaatccatgggaagcttgccggtctaagtatctgatgcggctaacttgcttatcacggatcggtctggggggcaccgaacatcacaaactgtcttaagatctgactgatcctacaaacaagagcagctcttctctgctgtcccattgctctggcacaagctcataggtcgtccccagatgcatatagctgcagacagctcatcaggtcaccaatgatggaggaacggcgccgatgc

SEQ ID NO: 297192 - DNA, 342 bp, Zea mays
ctactactcgaggaacagctacatgggccgcgttcctcggcattgtcctttgcgcggcgctcttccacaggaccttccttgcgcgcggccggcgccgggccaacaaccccccgcccggccccaagccatggccgatcatcggcaacctaaacctcgtgggcgagctcccccaccgctccatgaacgagctctccaagcggtacggtccgctcatgcagctccggttcgggtcgttgcctgttgtcgtcggcgcgtcggttgagatggcaaagctcttcctcaagaccaatgacgcggcgtttctccgaccgggccgagggttcgcagtccggcaagtacatc

SEQ ID NO: 297193 - DNA, 447 bp, Zea mays
  unsure (1)..(447): unsure at all n locations
ccacgcgnntccgcggactgccgtgggctgggtgattctcacgagagtcccgctcgtcgtggtaggggaagggggaaggagaggcgcgaagcgggaggcgacgattgggggccggcccgaatcctgtgcccggagaacctctcatancacagacattcaccgtcgaagggacttgcaacaggcaagtgaagtggagcctctggaaacctacaagggganaggtcctctcttgttgttatacgtcgcctccaaatgtgggttcacggagaccaattacacgcagctgacggagctttatcagaagtacagggacaaagacttcgagatattggcattcccttgcaatcagttcttgcgacaggagccaggtactgatcagcagatacaagactttgcttgcaccagatttaaagctgaatacccagtttttcagaaggtgcgcgtaaa

SEQ ID NO: 297194 - DNA, 469 bp, Zea mays
gttctagatcgcgagcgccgccctttttttttttttttttaaagcttcaagtacccatcagggactaatattaacatgaagttcaaaccaacatccatcacaaaccaactacccttaactggcactaagtttttagggttcaagaaaagaaagcatctaacagaccaaacataacacactagcagatggagtcccagtagcacaatcaggccctttcacccctgatccggcgagccagctgaatgtctttaggcatgatggtcacacgcttagcatggatggcacacaagtttgtgtcctcaaacagacccacaaggtaagcctctgctgcctcctgaagtgcaaggactgcatggctctggaatcgcacatctgtcttgaaatcctgagcaatttccctgacaagcctctgaaatggcagcttccttatgagaagctctgtgctcttctggtacttcctgatttcacg

SEQ ID NO: 297195 - DNA, 465 bp, Zea mays
  unsure (1)..(465): unsure at all n locations
gatcgcgagcgccctttttttttttttttttttggatacaacaaaaacaaagacgataaatgtcatatttatacaattccgtcccgcatacaaaaactgcatcatcaactggctgaagattgcagaagtggacgcatttcatggtttgctacatttctggaaacacaagaatttcaagaaaatcgacacactaacaccaagatgatctaatatagattcaaataaatgcaatgcagactcgaactactaaggagaagagtacaccacgcgcctgttaatcagaattgagaattactaaggaatgtaaccatgcatcgactactttgaaacattttatctattctctgccaaaccgagctctgaacttccagaagccgtctggccttctcctgtaacttcgtctgacaccgcaatgtttcaccatgtatcttgagaaacaatctgataacagctngaatgaactca

SEQ ID NO: 297196 - DNA, 445 bp, Zea mays
ctcatacatatgttggaagaggttgatcagtaagtatcctacatgtgttttacactatccataaatgttacacgacattttcacttttattttcagttattctcttaatttttagtacaccatgtttaccatgccatgcacaacaatctgtgataaatgtgaaccttgatccattgccttgagccacttggctatatccaccccttatctagttaaatgattttatcttttttccattaatcattgttctatttgttttgacttccatacctgatcgagatagtggacataggatgccactctttaaaatggaaaaggagtaatcagttgtgacacggaaaaaaacgacttcttttgtagctcgacatttattggagaaattcaactgtatctttggtttgaagaatctttgttttcaactgcaaaaaggcctctagttaagttg

SEQ ID NO: 297197 - DNA, 300 bp, Zea mays
caaatggattgaacttctgaagcaaagtgacgaatattgggaaatgggtgacatcgtgcacaccttaacaaatagaaggtggcttgaaaagtgtgtcacttattgtgaaagtcatgatcaagctcttgttggtgacaagacaattgcattctggttgatggataaggatatgttgagcgcgtgcgtgcgtgccctgatcgagcaccgattgccatggactctactacgacgacagctccgctgctgcatccggccgccgccgccccgagcaaggaggagccggcaccggcgtccccgcac

SEQ ID NO: 297198 - DNA, 453 bp, Zea mays
acggttctagatccctagcgccgcccttttttttttttttattaaagcttcaaatacccatcaagcactattattaacatggagtgcaaaccaacatccatcacaaaccaactacccttaactggcactaagtttttagggttcaagaaaagaaagcatctaacagaccaaacataacacactaccagatggagtcccagtagcacaatcaggccctttcacccctcatccggctagccagctgaatgtctttaggcatgatggtcacacgcttagcatggatggcacacaactttgtgtcctcaaacagacccacagggtaagcctctgctgcctcctgaagtgcaaggactgcatggctctggaatcgcacatctgtcttgaaatcctgagcactttccctgacaagcctctgaaatggcagcttccttatgagaagctctgtgctcttct

SEQ ID NO: 297199 - DNA, 475 bp, Zea mays
cagtacttacaaggggaaggtccttctcattgtctatgttgcatctcaatgtggcttgactgactctaattacactgagctgagtcacttgtatgagaagcacaaggggcaaggtttcgagattcttgcttttccctgcaatcagttcggagcgcaagagcctggaaccaacgacgagattgtagaatttgcttgcactcgcttcaaagcggagtaccccatctttgacaaggttgatgtgaatggggacactgctgcgcccatctacaagttcctcaagtcgagcaaaggcagcctctttggcgatggcatcaagtggaacttcgctaagtttcttgttgacaaagaaggccatgttgtccatcgctacgcaccgaccacctctccactgagcattgagaaggatatcaagaaactgctctgagtctcttgagctctttgatgtccttatgttgttactctcttccaagctttt

SEQ ID NO: 297200 - DNA, 477 bp, Zea mays
gctggacacaagcgcactacaaatccagaaccatattcgcccccccaactctaccgactcggtcccattctcatcgggataaagatccaatcttttccgccaagcgactcggatcggtcctgaactccggcgatgtcaacgccggcgaggaagcgcctcatgagggacttcaagcgcctgcagcaggaccccccagcggggatcagcggcgccccaatggataacaacatcatgctgtggaacgcagtcatattcgggcccgatgatacaccgtgggatggaggcacgttcaagctaacactgcagttcacagaggactatcctaacaagccgccgactgtccggtttgtttctcggatgttccatccaaacatctatgcagatgggagcatttgcttggatattttacagaatcaatggagtcctatatatgacgttgctgcaatactgacatcgattcagtctctcctctgcgac

SEQ ID NO: 297201 - DNA, 440 bp, Zea mays
  unsure (1)..(440): unsure at all n locations
acaatctcactacatttccataaccattttcncccccccaactctacctactcagtcccattctaatcggggtaagcatccaatcttttcctccaatctactcncatctatccttaactcctactatatcaactccatctaggaagctcctcattatttatcttaatcgcctgcatcaaaaccccccatcttatatcatcttctccccaatgtataacaacatcattctgtgtaactcagtcatattctttccctatgatacaccttagcatttattcactttcaatctaacacttcatttcacagaggactatccttacaatctctctactatccatattaattctcacattttccattcaaacatttattcattatttagcactctctttgatattctacataatcaattatttcctatttattcctttcttcattac

SEQ ID NO: 297202 - DNA, 415 bp, Zea mays
ctctctctctctctctctccacccgtgctgctacgtaggatcaatggtttggcttgcactctagctgctccaccggacaagcgagtagtgatggttctttgatgtgtactccaggggggcggcctgtccgagttctccgggctcaggagctccgcgtcgctgcccatgcgccggaatgccacctccgacgacttcatgtccgccgtctccttcaggacccacgcggtcggcacgagcggcgggccgcggcgggcgccgacggaggcgaagctgaaggtggccatcaatgggttcggccgcatcgggcgcaacttcctgcggtgctggcacgggcgcggcgacgcctcgcccctcgacgtcatcgccatcaacgacaccggaggcgtcaagcaggcgttccacctgctcaagtacg

SEQ ID NO: 297203 - DNA, 481 bp, Zea mays
gccaacactagagcagttgccacttagggtttcaagttctcaacaatcaagctgcaaaatcgagtacatcaagatggtggagattctgttcgaggatatcttcactgtcacccagctcgatcctgatggaaagaagttcgataaagtgtcgagaattgaggctgtaagtcagcaattcgacatgcagatgcagctggatgttaatactgagatctatccccttagtgtggggaagaagtttactatggttttggctccgacgctgaatttggatggaactcctgataccggatactttattcagggagggagaaaatcgcttgctgataaatttgagtatgtcatgcatggaaagctgtttaaaatctctgaagagtctgccagtggacctaatgtgaaagtggagatgtatgcttccttgggaggtcttctgatgatgctgaggggcgacccgtcaaatgcggccaatttcgagctggat

SEQ ID NO: 297204 - DNA, 354 bp, Zea mays
gtcaggatcaacatcagtagcacatgagaatttagctacaaagacacgtgtggggggttgggtcaagacccacaagagcaatgcatacttcaagcgtttccaggtgaagttcaagagaaggcgcgctggcaagacagactacagggccaggataaggctgattaaccaagacaaaaacaagtacaatacacccaaatacagatttgttgtgcgatttaccaacaaggacatcacagcacaaatcatctctgctagtatagcacgtgatatggttcttgcttctgcttactcgcatgagttgccacgatatggtcttgaagttggtctgaccaactatgcagatgcctactgcac

SEQ ID NO: 297205 - DNA, 481 bp, Zea mays
cggacgcgtgggcgactggccatggaagtccgacttcttgcctcggcacgtccaataactggtctcaatggaagtggaggccaatcaggtaatttctcatcacttttggtgccagccgcaaccgtgggggcattaggttatggatatatgtggtggaaaggcctctcattctccgaccttatgtatgtgaccaagcaaaatatgtccaatgctgtttcaagcatgacaaagcatctcgaccaagtgtctgctgcccttgctgcgacgaagaaacatttgacacagcggattgagaatttggatgggaaaatggacgagcagaaagcaatatcatccgaaataaaaaatgaggttattgatgctcgtgataaactcactgatattggttataacctgaactctctccagcagctcgcttggggtctcgatgggaggtgaatgctatagagaccaagcaggattttgcatgcgctggtgtgat

SEQ ID NO: 297206 - DNA, 502 bp, Zea mays
cgtccgtattcccggtcgagcacgcgtccggcatccggtccccctctcagatctcaacctccatttatcaacaaggtaaatctctgattcgttaccgttttctaggggtgtcccgaggtgtaacctgatggatcagagcccgccggagttcgattacttgttcaagctgctgatgatcggcgactccggggtcggtaagagcagcctccttctcaggttcacctccgactcgttcgaggatctctcccccacgatcggtgtggactttaaggtaaagatggttacaattggtggcaaaaaactgaagcttgctatttgggacacagctggacaggagaggttcaggactttaacaagctcatattacagaggagcgcaaggggtcataatggtttatgatgtaacacggagggagacattcaccaatctttctgatgtatgggcgaaagaagtcgacctctatgtaactaatcaggactgtatcaagattgctggtggtaac

SEQ ID NO: 297207 - DNA, 394 bp, Zea mays
cacatacacaagcacaagcgcactctagcaatggcttctgaggttgtccgccctagcgacgccgagctactaaaggcacaagccgacatatggcggctcagcctctcctacctcacgcccctgtcactgaggtgcgccgtggagcttggcatccctacggcgatctaccgccatggcggggctgcctcagccgctgagctggtcacggcgctgtctctcccctccactaagctgccgttcctccgccgcctgctgcggctcctcgccgcgtcgggcgtgttcaccgtcgacaagcagagctcggaggaggagcggtaccgcatcagccccgtgtcctacctcctggtggacggcatccctcacgaggaccacatgaaccacaccgctctggtgc

SEQ ID NO: 297208 - DNA, 435 bp, Zea mays
ctctgatgaagatcctcaccgagagaggttattcctttaccactactgcagagcgggaaagggtgagggacataaaggagaaacttgcgtatgtggcacttgattacgagcaagagctggaagcagcgaagagcagttcctctgtggagaagagctatgagttgccggacgggcaggtgataaccatcggtgctgagcggttcaggtgccctgaagtcctcttccaaccatcgttggttggaatggaagctgctggtatacatgagaccacttacaattccatcatgaagtgcgatgtcgatatcagaaaagatctgtatgggaatattgtgctcagcgggggggacaaccatgttccctgtatcggtgatcgcatgagcagggaaacactgccctgccctagcacatgagatagggtgtcgcccgctgacggaa

SEQ ID NO: 297209 - DNA, 450 bp, Zea mays
  unsure (1)..(450): unsure at all n locations
ccctaaccctaatctcccctcccttctccgatggcccgcaccaagcagacggctcgcaagggcaccggcggcaaggccccccggaagcaactggcaaccaaggcggcccgcaaatccgcccctgccacaggcggcgtgaagaagccccatcgcttccgccccggcactgtggctctccgtgagatccggaagtaccagaagagcaccgagttgctgatccgcaagctccccttccagcgccttgtccgtgagattgctcaggatttcaaggcccgatctccgcttccagagctctgcctgtgtcggcgctgcaggaggcngtcggaggcctacttggtggnnnctgntcgaggataccaacctctgcgcgattcacgcaagagggtgactatcatcncgaaggacatccagctggccaggagatcccgggcgagagggcttgacatgtct

SEQ ID NO: 297210 - DNA, 483 bp, Zea mays
  unsure (1)..(483): unsure at all n locations
cccacgcgtccgcggacgcgtggggttgatgaggatgatggcccggtgaccagcgtaagcggggctcccgatgggaggcacatcgccatcggtctcaactcgtcggacatccagatgtgggatactagctccaacgccctgttgaggactttgaggggtgttcaccaatctcgagttggatcactcgcctggaacaacaacattctgactacaggcggtatggacggagtaatagtgaacaatgatgtgcgtgtgaggtctcacattgtgcagacctaccgtgggcaccagctagaagtctgtggtctaaagtggtctggttcggngcagcagttggctagcggaggcaatgacaatcttctccacatttgngcattgtcgatggccacaaattcagtgcctggtcagaaccagtgggtgcaccgcatggaggaccatacggctgcagtcaaggcgcttgcctggtgcccgttccagagcaat

SEQ ID NO: 297211 - DNA, 486 bp, Zea mays
  unsure (1)..(486): unsure at all n locations
cggacgcgtgggcggacgcgtggggcgccaccgcatggtgctccgggataacatccagggggtcaccaagccggcgatccggcgtctcgctcggcgcggcggcgtgaagaggatcagcggcctcatctacgaggagacccgcggggtgctcaagatctttcttgagaacgtcatccgtgatgctgtgacctacaccgagcatgcccgccggaagacggtgacggcgatggatgttgtgtatgcactcaagcgccaggggcgaactctgtacggctttggcggctgaagggccgagcgtttggtccaggactaggcgtttctgctttggcttagtagttcgtgggctgtcttcggagtatggagggctttgngggaacgtagacttgtanggatnggcagatatcttatctgatatggtaatggaggaaagtttgagttaatgttttcttgcgttatctgatatgtgattaaatgtatattctgaaa

SEQ ID NO: 297212 - DNA, 408 bp, Zea mays
ctgcacgcgaggaaacatgctggtctaccaagatctgatctccaatgatgagctcctctctgattcatttccctacactgagattgaaaatggtatgctgtgggaggtggaagggaagtgggttgtccaaggagccctcaatgtagatattggtgcaaatccctcagctgaaggtggtgaagatgatgaaggggttgatgaccaggccgtaaaggtggttgatattgttgacaccttccggcttcaggagcaacctgctttcgacaagaagcagtttatggcatacatgaagcggtatgtcaagcacttgacgcctaaacttgatgccgagcagcaggtgctatttaagaagcacattgagggggccattaagtttctgctttcgaagctcagtgatctgcaattttt

SEQ ID NO: 297213 - DNA, 335 bp, Zea mays
tttcaatctccgatgaaaaaagaggtaataaaacaacattgtcaacttccagaaaatttggaggagtgaacaagaatataggcaccgttgtgcattgtttccaaagcaggttgtcgatgatagcaccatatgcagcatttggaggccaatttgtcctgatgggtatgtttctgttggtgatgtagctcatgttggcgtccattcaccgcatgttgcagccatctatcgagattctgatgaaaactttgccctccctgtgggctatgacctagtgtggaggaactgtgttgacgactatgcaactcctctgacagtttggctaccaagagcaccga

SEQ ID NO: 297214 - DNA, 432 bp, Zea mays
  unsure (1)..(432): unsure at all n locations
tgttgcagcttggtaggatatgcctcgacattctcaaggacaaatggagccgagcacgtagattcgaacagttcttttgaggtctctatatttgtctatgtgtgtcagtatacatactttatgtttttgccaacaaaaacgttgttcttcttttttaacctaataaaccaaatgtacaaagggaagctgntctctttcatcttggcagcaccgaaatacgactttataaaccttgttagttactatgcctgttatatccatgaacatgcttgctattctgacactattctggctttcagtatacaggctctactgagtgcaccaaatccagatgaccctctctccgataacattgcaaagcactggaaatccaatgaggtagaagcttgtgaaacaaccaaggagtggactcgcctgtatgcgagcggtgca

SEQ ID NO: 297215 - DNA, 267 bp, Zea mays
aaattaatgtaggacagcgaattttggaaactttataaggacaatccagcaagctgtgcgattgtgatgaaaacttcagctggtcttgtatatctccttgcctgtctcctggaacctttcatgccttccttttcaaaagaagtatggtcctaatcattattgagtgttgagtttcttcgagtagcattctctcgccttcaaatctcactatgtgatatcttctataacgtgctacgtcaattaaacctgtccccagaagaaaatatt

SEQ ID NO: 297216 - DNA, 419 bp, Zea mays
cccgcctcatggacggtggccgagccgcagccgtcggcggcgacccctctcccatcggtgcggcttccaatcccccggcgctgagcagcaggcccgtcgacgtctccttgttcacccacaccccgtgctactgcgaagaaaatgtttacatgttatgtaacgagcttattagaaccggagtggctgatcctgcgggcactgatctttatgttgttttcatatccaacgaggaaaaaaaggttcctctctggcatcagaaagcaggccattctgatgatggatttatttgctgggattatcacgtgatatgcatccagtgtttcatggtacttcttgatgtgcatatggaagtctaggcgaagcaaagaagttcttgattctgtttgggatctggactccgatcttcctttcccttcccc

SEQ ID NO: 297217 - DNA, 445 bp, Zea mays
  unsure (1)..(445): unsure at all n locations
cgtgtgtatggatgttttctcactactttttactgttctaattagttgtggttttaaggagcatacaacaattgagagcaacagtgatactctttacaagatgtgtttgtactaatactgttggagataaaccacctgctaaagaaaaaaatgtaggacaatgttgatgaaagcattgtctttattgtgtaggacaagcctgagcctccaccggaaggccgccttcctgatgccacccaaggttctgatcacctcaggcaggttttctcgacacagatgggtttgagcgaccaggacattgttgcgctttctggtggtcacaccctgngaagatgccacaaggacaggtctaggtttgagggagccttgacgtctaaccctttgatctttgacaacttttacttcaagtccatgaccttccttgatactgggcttgactttgtta

SEQ ID NO: 297218 - DNA, 305 bp, Zea mays
gctggcttctcctccccctcttaccaagtcctcctcgggttaggggtccatagggttatgcggaggggcgatggcggcggctgatgtggagtaccgttgcttcgtcagcagtcttgcctgggccaccagcaacgagtcgctggagaatgccttcgtctgctacggcgagatcctcgactccaaggtcatcaccgaccgggagacggtgaggtcccgcggcttcagcttcgttaccttctactacgagaactacatgctcgacgctatcgagaacatgaacggcaaggagctcgacggccgtaaca

SEQ ID NO: 297219 - DNA, 304 bp, Zea mays
gtacaatgcatgccttaacacaatggctacaagaattgctacagtgtttgcatcattgagggaatttcctcgtgtgcactatcgcgtagccaggacaatcgatgcatctactctgacgacactacgagatttggtcccaacaaagcttgctgcttccctgtggaattcccttgtcagatttaagtcaacgatacctgaatttccacaaacagaaacatgtgaactacttattgatgaccggtcaatagatcagattgcacccattattcatgagtggacgtatgatgctatgtgccatgatcta

SEQ ID NO: 297220 - DNA, 279 bp, Zea mays
acccacgcgtccgctatcacataggcattgactctttttttcaatctatgtccataaattccattccttgcgaatggcgaattaacccagtaataagcgcattacaaaaagcacaagattgtcttcttcccattcaaattaccttttaaaatcttgcccatctatattgtgtaaccaggcaagatcaacatcaagcccacgattaatctcataagaaagcttcttcaaccacaatcttttgaaaattcaaggattacatcctccctcgtccaacaaaaa

SEQ ID NO: 297221 - DNA, 364 bp, Zea mays
  unsure (1)..(364): unsure at all n locations
acccacgcgtccngcttgaacaacacgctgattttaacctttttactagattttgccaaactggtcttcgtggttcttcgagtcaaaagaggcttaacatatcttaaaaactaatagcttcatggtgctaatgtcaacaagaaagacacgaccagttgcacacctatgcatagagctgctaccactagaaactcggatctgagagaattcctcatcgaggaacgtactgaagttgatgcttttgacaagacaccacaaacacctatgacgcatgctggtataccttagaacacatgaactgctattatgttaattagacatacatctgatgttaatatccacgacaaggaaggctacactgacc

SEQ ID NO: 297222 - DNA, 411 bp, Zea mays
ggcgatgggacgagcggcggaggatgagggtgacgtggagtttgctgactacgaccgggacgacgaggacgccatggaggaggacggccgcgccgcccgtgcgctccccgtgccccgcatcgtctcccccgccgtggtgcgcacccgcgggcgcttcgttggtcgcagcccctccgttctcacctccagccgctaccgcttcgacttcaccactaacaacggagaccatggtccatcccactaccgcagcgctctatcgaaaggctggcaattctttgtttctggagttaaagacgatgctgaagaagatgatctttacaatgctttcagtgattttggtcatgtcaaggacttgcatctcaatctagaacgccgcactggatatgccaagggatacgcgctgattgaata

SEQ ID NO: 297223 - DNA, 283 bp, Zea mays
gtctagtccacccgccgttctcctagctcctctactcgccagtcgccatgggcacgggtaagatcggaatcaacggcttcagaacgatcggcacgctcgtggccagggtcgccctccaaagcgaggatgtcgagctcgtcgccgtcaacgaccctttcatgaccacagactacatgacctacatgttcaagtacgacaccgtgcacggacactggacgcacaacgacatgacactcaacgactacaagacccttctattcagagacaagccagtcaccgtctt

SEQ ID NO: 297224 - DNA, 215 bp, Zea mays
cggagggacccgtggacccacgcatacgcggaccccttgggccccaaaaattcctcagccaacccaacacggtcacgggacaggggacgacaggacaggacaagacacgctggctctgccacaccatggttccaatgaacctgtacggggctattatttcgtggaacgtgacgaggtacgcaactgcacttgatgaggctggctccgactaccat

SEQ ID NO: 297225 - DNA, 287 bp, Zea mays
aggacgcgtgggcctggaacgactcattggatcttttgggtcggccccttcattggcgctgccctggctgccatataccaccaggtgatcatcagagtcatatcgttcaagagcaggttttaagctgacgcggccgtgccgagacatgcctagcctaagaacgggcgtgttcctgagatgtcttattgtctgcgccacgcctagtttctgtgaacagtgctattatttacctcttcagggctgtctcttattgctgcgccgatctgttaaccgtaacaagaactctg

SEQ ID NO: 297226 - DNA, 450 bp, Zea mays
  unsure (1)..(450): unsure at all n locations
ggaccggaangaccgacgcgaccgacccgaacaacatttactttgtcatggagtatttaaaatttagacagctctacaacaagatgtgcaagggtggcaagctcacagaggccgttgcacacaaatacttgcagcagctcattgatgctgcggattactgtcacaccccaggtgtgtatcacctgaacttgaagcctgagaaccttctgtttgatgacaatgaaaacctgaaggtctcaaattttatactgactgcactttcataattcaactcgcatcatggcttactccacaccacctttggcactccagcatatgtcgctcccaaagcgatcaagaaaaaaggctataatcgatcaaagtcaaacataattgcctgccctcttattctatttctactacttggtggatatcttccttttctgacccaaaacataatggaaatgtatt

SEQ ID NO: 297227 - DNA, 309 bp, Zea mays
cgcacgcgtgcacggactcgtggacggactcttggacttgaatcgatggacgccaaagccggggtcggtggcgccgaccagcttccgcggatgcacaactacctgaatctactgcttttagcttaccagatctttggtgttgtttacggggacctgagcacattggcactctacgtgtataaaagtacgtgctatggaaagctcagacactaccgatacgaggagacagtgttcggcatactttagctcatcttgtggaccttcactctgattcctttgctaaagtatgtcaccatcctcttgagtgct

SEQ ID NO: 297228 - DNA, 325 bp, Zea mays
tggacagtcattgcagccaactttctaaatgagtacgagaagcagtgttatgagtttaaagaagattgcaacacaaagaaaaagattattgtaaaaattaaaacaagtgctgaaaaatcacttggggtagaaaaagaagaccattttcggcccggacttttgggattacttcaaaatattggtcttattaaaaattcaaaagacttcacaaaattattttcccggtttaacctggaagacacattaaagtttaaggacctttgtgaacaccacaaaaatgtgcttaaaagatatggttatgactattattttggtcgccaagaaa

SEQ ID NO: 297229 - DNA, 112 bp, Zea mays
cttttgttgaagaggtgatggaacttgttgagttgaatcccttaagcggtgctgttgttggtctgcctggggtaaatggtttatcgactgaacaacgtaaaacgttgacaat

SEQ ID NO: 297230 - DNA, 250 bp, Zea mays
gaactatacaagttcacaataccttttgatgaaagaaagggctccggtgtatagagagggcctcgcgctccgctcctccctgcacctcatccccttcccctgctccccctcacacgacgtgcggcggtgcgaggaccggccctggcaccagcgcccccggtgcctggagcagtgcagggaggaggagcgggagaagcggcaagagcggagcaggcatgaggccgacgatcgtagcggcgaaggctcatcg

SEQ ID NO: 297231 - DNA, 446 bp, Zea mays
cgatcaggccactgccggacccgccggagatccgctcagcccgcgctattccgatccgaagcacctcgtcggatctccagggatctgacggaggaccagcgcgtcggctgctgacccggcggggcacgcgcgcacgccagccatggcgcgtggtggcggatgcgggtgctgcccgccgatggatctgatgcgggcggaggcgatgcacctggtgcaggtcatcatacccgctgagtctgcacacctcacaatctactatgtcggcgacactggcctcctgcacttcaaagaccttaatgcaaaaaaaaacccggttcaacgtacatatgcttgccagatcaaaaaggtgtagggaaatggctcgtatattgaggtttttaaggagcagatgtcaaaagctgacataggtcctacacaattaaatgaaactcatctggaatttgatg

SEQ ID NO: 297232 - DNA, 189 bp, Zea mays
ctcttctccctcttgccggtccgctatatagagagcaactgcgcacgatgttgggggaaagcaagatatgagccatctgactgaacctttcttttaacctcggagaccaaaaacgaagggcaccccgacaagctgtgcgaccaggtgtcggacgcctagcttgacgcatgtctcgcgcatgaccccgac

SEQ ID NO: 297233 - DNA, 422 bp, Zea mays
gcccccttctccagcgtcaagcgccttctcatgggcgccacggggaggcacccggactgctccctactccgcgacctgtcccgcctccccttccccgctgccgtcggtggcggcgctgtcgtccacgccgaccacatcggccgccgcatcgcgctctcgccgacccacctcctctccatgctgctggcctacctcaagcagctcgcggaggccgacctcggcggcgcccccgtagccgactgcgtgatctccgtgccctgctacttcactcaagcgcagcgccgagcctacctcgacgccgccgccatcgcggggctcatgccgctccgcctcatgcacgacctcgccgccaccgcgcttggctacggcctctaccgctccgacctcggcggctccgggggtcccacctgtgtcgcgttcgt

SEQ ID NO: 297234 - DNA, 338 bp, Zea mays
gtagagagtacctgagtaacctgacaaaaaaacagccacctccatttagagaaaagtgtgctaaagcagatcctgattcactcaaacttttgcaaaaacttttggcatttgatcctaacgataggccaactgctctacaagcatttgctcatccgtattctaaaggccctccaggagtaacgagagaaccatcacgccatcctataacaaaaatgcagttccagtgtcagcgatacaaggctacccaacaggatgtcaaggtacttatatgccaggagatattgtagtatcatcctcaacttagcaaggcatacatgaattggacatgcaaaacaaac

SEQ ID NO: 297235 - DNA, 360 bp, Zea mays
cgcgtactcatgcaagtggccccttactttcacaaaaaatggtataggcttagaataggggacacttacgaacaacagtcactgtttcaatacatgcatatataacggactttgctttctctaagcctgcagaaggaggcatatatgacaataggaatggaatggattatcatattcatgcgattgatatcgcatgcacgggaacctccaatgcatattgtgcacattgcacaggtaatggttcctatcgcaaaggttggaggacttggtgatgaatgtacaaaccattgacgacctcttcacgatttacgccatatagatctacattttctgacaaaatatgatcgttgaatcctaatc

SEQ ID NO: 297236 - DNA, 344 bp, Zea mays
  unsure (1)..(344): unsure at all n locations
cacgcgtncggattcatcaataagactgcaatcatttctgcgtctggtatgattcacagagcagacaagggcataggggctgttcttgaagactttcctctcctacagacaaaagtcacactagcatcctattaggtacttgctccactcaacaatttctactaaaggatggctgacgccaactatagtgcctgcgaccaaagcgtaattattgtgaccacacacaggagaaattttccacattaccttatcgatgacaagatatacttctctagcgggcactcaaaaatcctttacccacacaaaaaaaagcttgccttactttttgataatccacgtatagg

SEQ ID NO: 297237 - DNA, 306 bp, Zea mays
tcggccaccatcgatctgcaagtctcgctacgtagcagtgcaatacaaaaaaagcagcccgcgatgcgaacagcaacatgggcctcttcttcacgggccttgcccgcaagggcctgaacctgccgtcgtcgtccgccttcggcgaggcccgcgtgaccattcccaagaccgcggcgaaggccaatcctgcggcggcgttcgggagcccgtggtacggccccgaccgcgtgctgtacctgggcccactgtccggcgagccaccgagctacctgacgggcgagttcccgggcgactacggctgggaca

SEQ ID NO: 297238 - DNA, 390 bp, Zea mays
cggacgcgtgggcggactcgtggtcggacgcgtgggcggacgcgtggggaaaaaaatgaactctaacgggcgggtggcaaccaaccaccaagcggcgagggcgatggcggcgtccccgccgcggaagcggctccctgctgcgcgcctcatcttcgccctccttctcctgatgtcctccgtgctgccgagggacgccggggcggtggaactggggctgaagctgcccttcagtccgggggacgtgctccccgtcctgccgcggcaggtggcgtggcccgtcatgaacacgctccacagcgccgtcgacctactgccgtccttcgtcgccggcgtggcgcccgggtcgccggcgccggcggcctggaaaggcgcgtgcttctcggagaacga

SEQ ID NO: 297239 - DNA, 305 bp, Zea mays
tcgtgatgatctaactgcgatgctgtcatttgatgcactagctgagacttgagagcttgcgggaaaatggctaccatttgctaagaagcacaacattgaacctatagctcctgaatggaacttttgccataaaacggagtacttgaaggacaaaattcacccttcatcttgttaataccggctggccatgaagacagaatatcaataattcaaagttagggtaaatgggcttgacgctaaagcacaaaaagctcctgaagtaagatggatcatgccagatgacgcaccatggccacgaaacaata

SEQ ID NO: 297240 - DNA, 328 bp, Zea mays
gcgaccactcctcactagcttaggacggttcagcggcacagacgtgcgacggacgatcacggcgactcatgctccacacatggcattccagctctccgacgtcgggccccggttccacggcctctggtgctacgccgcgcccaggtccgcggtggcggagctggcgcccgtgaggttgggcatgaagaggtcgtcgtcgcaaggcatccgatgggactacatcggctgtgggaccaatatgatcatggtgacgacgacaacactgatgctgttcgcgtgacggttctgactggcgccgtcaaggaaacgcactgctaaggccgggctg

SEQ ID NO: 297241 - DNA, 410 bp, Zea mays
atcgtatcatctcaggacgtgccgccgccatggctgctatgggccggggcctgcccgtgctatcctgctcctcctactcaccgaaccggcggccgccaacgccgcggcagcgcccggcgacatgtccatcaacacctacaacgaggagcaccgcgcgcgacgtctggagcggacggaaccggacgtgcgggccatgtacaactctgtggctctgcggagcacggccgcgcatacaactcactgggcaatggcgagggcaatcgcgaccgacacttcctcgtctgctgggacaacctgcgactcgtcgacacacacaacgagcgcaccggctcccgcggctttcggctatgcatgaaccagttcgccgacctcaccaacgactagttccgcgccgcatacctcagcgccag

SEQ ID NO: 297242 - DNA, 419 bp, Zea mays
ctggtggccatcttcgttcttgcggaaatcgagtcgagcatgatgtggctatgaaactagggcgtcctccatgaagagatgaaaactttatccaaacccatacaagaaaaaatggagttcctacagaacaggcaaaaccaataatgggtgttctggataaagaaagcttgtaccttaaaacaggaggatacaagaagctggagtggttgtctgaaggcttttgaactgcttgaagcattagtgtagctttggtgcttttgtgactgatcagctctggagcagctagagtgatgtagttgtgggcttttgaacaatagctggagtgatatgaaacattagtgatgtagttgtgggcttttgaactgcttcaagctggagtgatgttgctgtgatgcttttgtgactgatcatatctggag

SEQ ID NO: 297243 - DNA, 198 bp, Zea mays
  unsure (1)..(198): unsure at all n locations
gcgtccgaacactatctancacacaatcacgaagactctttttgtttttaccacaaaccaccaatccgtgaaagcagcttggtttactgtcagcaggggcagcacagacaccgcgccacggtccatgtccaccaatacgcctacccattctgactcgttaatctcggtaccgtctgcatgagtcacaccacgttaaca

SEQ ID NO: 297244 - DNA, 311 bp, Zea mays
  unsure (1)..(311): unsure at all n locations
acgcgtccgaaacgatcnacacacaacacnaatactttttattttaacacaaanaccaaccgtggagcagtgattattctgtcacaagggcatcacagcactgctccactgtccatgtcgaccagtacggcaacccattcggcggcgtaaagcacggcacctgcggcatgatgcacggtacgggaaccgtctgcattggccagctgtgtgagcactgcagcgctcgcatgggtggcaggcagttacagcctacgaggtaggagcacaagaccgaaggcattctgcatcgattctgcagcttcaacttcagc

SEQ ID NO: 297245 - DNA, 315 bp, Zea mays
gacgtactcttgcgtccgtgtgtggcaacacgtaccgcttccagatcattgacaacgaccagggtaaccgaactacaccatcatacgtggtttttaaagaatctgagcgcgtaaatctagatgcgggcaaaagccaagtcgccatgaaccccatcaacaccgtctttgatgccaagcgtctaattcatacgaggttcagtgatgcgtatgaccagagtgatatcaattaatgggcctgaaacgtcatttctggccctgatgagaaacctatgaatggagtacaaaaaagcggacacgagaaacacctagtgattg

SEQ ID NO: 297246 - DNA, 218 bp, Zea mays
ccggaacggaaggcccggcccgaacccacgcgatcaggacgacgaccattgccagctgtctgtcgttgacaaggacaactgatgcaccgaccccttgaagaagtggatgctcaagcaacagctgaacgcggacgtacgaagaacctttacaggtggctggcgttgtcatggacaactgatacaccggaccgacgtgtctgcttgcgtttctgtgaagt

SEQ ID NO: 297247 - DNA, 448 bp, Zea mays
gggagattcgctctcttcccgcgatttaacagagtcaactagctgcgctgagagccctcgcctccctcagatccaaccctgtacagattcacgaactaaggtgtctgagatcgatgtcaatcgggagcctgctgtcacagaaactggtccgacaagggaccaacctgccgaggagcctccccacgtagcagctggggtgaacgatggcttctggcagcagttcctcaccgagcagcccggtcctgatgtacaccaggaggcccagtcagaaaggagagatggagatgatgataagggcgatcagacgaagataggggaccgagaaaatttttggtgggggaagaagaatgttgagcagatgagagagaagctggggcgtctcaccttggtggagaaaacctgactgtatttcttgtagctggaaaaaaaaagttagcacagaaacaca

SEQ ID NO: 297248 - DNA, 351 bp, Zea mays
atgattactacggagactgtcgcgactgctcacggtagagttgataatggtgatagaggcacgtaagacgatgcaacaaataatgcagagcctcgaaaggcaggtggtcaatgttgagacgtccctaccttggctcatttgcatgaacatgatttccgtaagttctgccctgatctagaacatgaagagactgatcatgttcttgcagaggcattctcaatatatccatgcattaatatggccaaggatatacgggacaataggaccggttaaactaaaggatatagatttatttgtacagctgaagaaggtgatcatacttgtgacttagaagttacgaataggctatat

SEQ ID NO: 297249 - DNA, 350 bp, Zea mays
aacagttgttccaaaaggactcgaagataattactcctgaagctctagctactgttaaggctgctattgcaaatagtgagaaagacaagaaggttgatgcaacaaaaaaggcagtgcctcgaaaggcagctgggcaaagttgggaggaccctaccttggctgattggcctgaaaatgatttccgtttgttctgcggtgatcttggaaatgaagtgaatgatgatgttcttgcaaaggcattctcaaaatatccatccttcaatatggccagggttatacgggacaagtggactggtaaaactaaaggatatggttttggtagttttgctgatgcgtctgatcttactttt

SEQ ID NO: 297250 - DNA, 403 bp, Zea mays
cggacgcgtgggcggacgcgtgggcggacgcgtgggtgcgtgctcagcagtcagcacttccacctccatggggatggggctcccacttccaccccgtcgctgctgaactgaaccatcctagtaggtgtcggctccggctccgggctccctctccccctttcccttcccttccaccagccggactgccggactccgaaccgaaggagagtgacgacgcgccccgcgcacgcatcgcagtcgcatcagtaacaaacaaaggcggaagctgtaacaacgaccggaaaccaaacacctcgcgtatagaatccgctcgcctggtggggccacgtaggggcttgccgtgccggaaggacggcaatgccggaagcggcgcggggcctgctggatccggcggccgaggggg

SEQ ID NO: 297251 - DNA, 417 bp, Zea mays
gcccactcctctccggctcctcttcttctccaccacaccacaggcaccggcaccggcaccggcaccggcaccacctcctccctccctccgtcctgccaccgcgcggcaccccagccacagcacagcaatggcgggcaacggcgccatcgtggagagcgacccgctgaactggggcgcggcagcggctgaactggcggggagccacctggacgaagagaagcgcatggtggcgcatgccctgcagccggtggtgaagatcgaaggctacacgctccgcgtccgccaggtggcccgcgtcgcgtccggcagggacgcgtacggcgttgccgtcgagctcgaccaggaggccccgccccgcctcaaggccagcatccagtggatcctcgactggatcgcccaccggggcgacatctaccg

SEQ ID NO: 297252 - DNA, 358 bp, Zea mays
gaaggaaggccggcccgcgcatgcgttcgcaggcccaactacccaagcctcggttctcaaccacgcagaaacctcagacttcagggccgctgcctttctatccatcccttcctcgccgcggcggtcgcccgctatcacataaacaatggcgaacgctggggctctgcttcggctcagctacggtgacaacgccaccatcttcttcacccctgagggagatggccctaccactgtcactggacgtgtgtctggccttacgcttggcccacctgggttgcatgtgcatacacttactgacaccaccaatggctggctgagcactggaccacactaacattcttcctgcaaggcacctggg

SEQ ID NO: 297253 - DNA, 381 bp, Zea mays
ggctgaggaagtacgggagaggggactggaggaacatctcgcgcaagtacgtgacgacccggacgccgacgcatgtggccagccacgcgcagaagtacttcatccggctcagctccggcggcaaggacaagcggcggtccagcatccacgacattaccaccgtcaacctccccggcgacgccccgcgctcgtcgccgcccgcggtcaccacggccaccaccaacccctccgccggcgccctggtggtggacgtgaagcccttcgtgccgcacccctacggccacgtgaagctggagcccaagagctcgctcgtcgtggccggcctgggcttcaacgactcatcagtccacctactgatgcgctgcggacaagtgtgagtga

SEQ ID NO: 297254 - DNA, 211 bp, Zea mays
cccacgcgttcgcccacgcgtccggagcggattcggatactaactccgagcgccggccgcgcatggctgctgatgctgctactacttcgcctcctcctatataagatcgcattgcaatgggggatacagaaccactgtgctgctgacgatcatgaacatctatcctcatacatacatgcatacgcatggcgcgatgaggaatcctgcctga

SEQ ID NO: 297255 - DNA, 337 bp, Zea mays
gagacagtgcgtggccatggcctctcgcgacggcgccaccttccaagtgtaccgggccatgcccgcgccgacgccgatgtctctggcgtccgccgctccagccgcagccgccgccgacgccgcggcgccgaagaaggcgggcgcgggcgctggaaaggaccggcacagcaaggtgaacgggcgcgggcggcgcgtgcggatgccgatcgtgtgcgcggcgcgcgtgttccagctgacccgcgagctggggctcaagtcggacgggcagaccatcgagtggctgctccggcaggccgagccctcgatcctggcggccacggtgtccggcaccaccccc

SEQ ID NO: 297256 - DNA, 308 bp, Zea mays
agcagagatatcttgctcaattgctgtcgaaactgctgcacatcggcaccctgcagttgaggagctctctatcaggtgagtctgctgatgcattacatgctgacccacttgcctcgtctgaaaacatggtgcttgacccaatcagatcctcgcatctcgtatccgctcaccatgctaaggagaaccacaccgactgctgcctagactgcaaccatgtatgcaccatcgacatcaaacagcataacgcctttgagaccctgattggcaagcaggacgagatcctgctgccacctcaagcggtgaatatg

SEQ ID NO: 297257 - DNA, 456 bp, Zea mays
  unsure (1)..(456): unsure at all n locations
ggttcttcgacgtggtggaccgcgccaaggcgtccctggaggcgcggtgccccggcgtggtgtcctgcgccgacatcctcgccttcgcggccagggacagcgtcgtgctcaccggcggcctcggctacaaggtgccgtccggacgccgtgacggccggatatccaatgccacgcaggccctgaacgagctgcccccgcccttcttcaacgccacccaactcgtcgacaacttcgcctccaagaacctcagcctcgaggacatggttgtcctctccggcgcacacaccantcggcgtctcgcactgcagcagcttcgccggaattaacaacacaggcgaccggctctacaacttcagtggctcatccgagggagcatttgcccgtaaacagcgtcggttctttcccacacacgacgttcatggacctatacgccggcagttcgacacaagtctacgt

SEQ ID NO: 297258 - DNA, 398 bp, Zea mays
gctggggactggctgcaggggccctacgcgtactacctctacagccagtacggcttctacgggggcgtcattggccgcctcttcatcgccggcttctgttcctccatgctcttctgcaccatcgtccgatccctcgcggataagcagtgcgttgtgcccatctccgccttgaggatgaattcagtcgatttcgttctgccatggtggataccgccgccaggctgatggattttcccaggtcagggggcgtaagagggcgtgtgtcacgtactgcataacctacatcctaagctgcataaccaagcactctccccagtacaaagttcttatgattgggcgcgtccttggtggcattgccacttcgatgctcttctagcgattgagtcgaggctcgtggc

SEQ ID NO: 297259 - DNA, 431 bp, Zea mays
  unsure (1)..(431): unsure at all n locations
gttctagatcgcgagcggcgcccntttttttttttttttttttttactcaggcaaatgcacagatcttacagaagcaaacgggtccggaattcacggttacaagcagctcaacctgacggcgacgactgctgatccaaggaaaagcaaacgatgcgagcggcgccggcgcatcggcggcccgacgaccccggcgggcctgatcgcggctgcggtggcgcacgcgttcgcgctgttcgtggcggtgtctgtgggcgctaacatctccggcgggcacgtgaaccctgccgtgaccttcggcgccttcgtgggcggcaacatcaccctgttccgggggctcctgtactgggtggcgcatctgctggggtccaccgtggcgtgcttcctgctccgcttctcgacgggcggacaggccacggtcaccttcgggctg

SEQ ID NO: 297260 - DNA, 212 bp, Zea mays
taaagcgacgcaccccgcagcggatcattatgcgtcgccgttcttgcactaatgtcgttaccacctttgatgataacgaacacgtgtcttccagtgttattgaacaaaaagttggagtactgttattaaaccttgttggtccagagacacttgacgatgttcaaccatttttattcaacctatttgctgatccatatatcattcgactccct

SEQ ID NO: 297261 - DNA, 302 bp, Zea mays
gcgagtcaatctcaatcgtggtctgttcagtggaagacagagtcctcttcgcgctctcactggcaagctgagggctctccagaagctgatgaccgcttgtaaaaggctgatgatctctctctttaagtccatcccgtccatgtttcaccacccgccggaagccctgagcgacatgatttctccggcgccgactctgccttcgtcgtctccctccgccgccgtcataccgttgatggacctctcggtgacgcggcgcgaggacctagtagagcatttgatgcactcttcctttactgtgggct

SEQ ID NO: 297262 - DNA, 365 bp, Zea mays
gagggattaaactggcgcaagtccaaccacgtattctctttttacatggccatggacaggggatgagaacatacatcgttacgtccttaacatgttcatgtaccctactgtacgccatgacataaaacaaattgagaagaccatacattatctaactggtatccctatagatcctgataatgctaactccccatactcagagttcctgtacatatgatgttcaatcacattttactattaggacactatgcgcatacccatcggtcgtcacaaactgcaaggtgatcttcagccgcatcataaccgttatccaatagcagccccatagcagccgcataagacactatagaccattcagttgcata

SEQ ID NO: 297263 - DNA, 279 bp, Zea mays
ctgatgcccatactatcgctcgttctgaaccatttctatcataaacccttactacctcgcggtgactcacatacgtagggcgagatcctcaactatctaatcatatcgctcgtgtatactccacacgagcagtaagtcatcaaatacaacacatacgatggcaacttgaccaccacacccataaacggtgctatcctcactctcaatacaagaacggctcaacttcttcttaagggcatgcacacaagtgtctggactggccacaaacatcctgagcaa

SEQ ID NO: 297264 - DNA, 439 bp, Zea mays
acgattcgtgaagcgattcgccgactcgctcggtcacccaaaggtcagccaggagctcaggtccatctggttagacctgctggccaagtgcgacgcgtcgctggggatgaagattgccacccggctcaacatgaagccaaacatgtgatgcatcatgcttgtgctgaataataatgaagacgcatgcatgtcgtcgccaggaacaaagatcgacaaataatacaagaccagcacgcatgggcatactctatatatacgtatagcccgtgcccgtgcccgcctttgtaccaatacaagccaaaccaagtggatgtgtattattattattattactaggtgagtgcccgtgcgttgcaacggaacacaaactattcgttaaaatgttagcctacgatgattatagtaaaaaaaacaacacataacttataatcaacatcgt

SEQ ID NO: 297265 - DNA, 337 bp, Zea mays
  unsure (1)..(337): unsure at all n locations
gagccttccgggttggctttttcttccccttccgttcggtttctggttcctgagggtcttccgggttcgggttgcgtttttaaccgatccagatggccccttccgattttgagtaccccttcttcggtcgcngcctcgcctgggccacggacgaccactccctccacaacgccttcagcacctacggcgaggtcctcgagtccaagatcatcctccatcgggagacgcagaggtcccgcggcttcggcttcgtcaccttctccacggaggaggcgatgcggaacgccatcgagggcatgaacggcaaggagctggacggccgcaacatcaccgtcaa

SEQ ID NO: 297266 - DNA, 352 bp, Zea mays
gaaagaattaaagcaccaactcagcctcatgctttccgccctaaaatccctttttcctggggaggctttgtccactacccatcctaatatggactcatagctccgcaaccagacaaggatcatactcttcaatcgcaaggacatcatctcaactgatgatatgaatgcataggctacttactttcgtaatcagggcatcaaacatgttttctccaactgccatatatgatatgcttacaatgaaattatgtaggatggcaaaatcagtaccatctgttgctaacacatacagaaacgagaacggattgcttcctccaccgattcgagctaaaatacctacatatccaaatgt

SEQ ID NO: 297267 - DNA, 320 bp, Zea mays
  unsure (1)..(320): unsure at all n locations
ataccgggccgccgacgcgtacgatccaatangaacggtcatctaatcgtccatctgtttctgtagtactanctnttccggggggggtttttagattgatgggcggccatcatctcacgtccagggatgatgatgattcccttgtaccaagtccacttatgctcaaaagtgaaaatgtacaagaggatggggtctatttattggaaaacggtgaggatggtctagtctacgtaagaaacatggtaaatccggctaccctggaacaaatattcggtgtctcttctttggctgcaataccagcccagttagcattggagcac

SEQ ID NO: 297268 - DNA, 422 bp, Zea mays
gttgtttattgcttgcgagcccctaaaaacctgaggccactactcaccaatgcaatagggaggagagtgggcggacgtaaactacaagcacataagaatcgcgaagccatgtatcgtggctcataagagaactctgacgcgctgccctgcgaggctctgatcttcgtcacccgttcccgtagctggtccttcgtggagcgccctggtctgctcctggtcaccgcgttcctgctcgctcaacttgttgccaccttcctcgctgtctacgccaactggggcttcgccaggatcaagggtatcggctggggctgggcaggtgtggtctggctctacagcatcgtcttctacttccccctggacctgctcaagttcttcatccgcttcgtgctcagcggcagggcatgggacaacctcctcgagaa

SEQ ID NO: 297269 - DNA, 385 bp, Zea mays
ggcggagcggttccaaagggttaaaagttgtccaatctgccgttgtttccttgctgtgccttccccggattcctgggggcgggtatttttggccctgggcacctggttaaagccccaggattggccggccttccccggcgggcaggccacttacctgggcgccccgttgccgtggggcacgctgccgaccatcctggtgatcgagttcgtggccatcgccttcgccgagcaccagcgcaccatggagaatgaccccgagaagaagaagtaccccggcggcgccttcgacccgctcggcttctccaaggaccccgccaagttcgaggagtacaagctcaaggagatcaagaacggccgcctcgccatgctgtgccttcgtcggctt

SEQ ID NO: 297270 - DNA, 344 bp, Zea mays
tctcgtactacccttctctctctcttctttctttcttatctccgacgaatgctatctacaccaccgtgtgctttctcttacacataccccgccaccctctccttcttcttcttcccctcctctcctatccctaatctaatgttgagcctgtcgtccgagatgaacgtggtctttttttcctccatgtactccaccggacacctctccccctactcctacaccctcattaacacatgccctgaacatttcgtggtgaatgtgctctactgcagcatctgccacactgacatccaccaatccataaaccacctcgttgcttcaaagtatcctatcttcccttttca

SEQ ID NO: 297271 - DNA, 177 bp, Zea mays
ccactccctccacaacgccttcagcacctacagcaaggtcctcgaatccaagatcatcctcaatcacgaaacgcagatgtcccgcggcttcgccttcgtcaccttctccacggaggaagcgatgccgaacgccatcgacggcatgaacggcaaagaactggacggccgcaacatcac

SEQ ID NO: 297272 - DNA, 387 bp, Zea mays
agcaaaagcaacaacgcagcagcagcttaagtttgaccacacctcccttcgcctgtgagcatggcggcttgctgcggcggcaagtgcgggtgcggctccagctgctcatgcggcagcggatgcaacggctgcggtatgtaccctgacgtggagaccgccgccgccagcagcgtcaagaccacggtcctcgccgcgccgaccaccaaggccagcgccggcggcttcgaggcggccaccgagggcggcggctgcgactgcaacacctgcaagtgcggcaccagctgcggctgctcctgctgcagctgcaactgagccggcccggctcggcgatggcgcacgagagtcgagaggacgacgacgaggaggcgtataataaatataatagcg

SEQ ID NO: 297273 - DNA, 301 bp, Zea mays
cagtaatacattgccttcttacacagtactactttactgagtggttatttgaaaacaggttttcccaccagtaagcaagatggatcctgcaatctatggcccgccagaatcatcgatcacagaagcgcacatcactggacagctcaatgggctcacagtacaacaggcggtggacgaggcaaagctgttcatattggactaccatgatgtatatctgccattcctggaccggatcaatgcaatagaggggcggaaggcgtatgcaacccggacaatcttgtttcttaccaaagctggcaca

SEQ ID NO: 297274 - DNA, 302 bp, Zea mays
gtgagtgaaacaagcaggacctacacttgctttattggtttaaagacaggtgcacatcagggggcaagggcccacgttgcaatgtttgttgttcttgccatgactttaagaagaaagcctgatgtactggtaaatgttatgccaaagataatgggaaacaataaatatctgggacaggaaaagctttccatcattgtctgggttattgctcaagcctctcaaggtgacctaaagtctggcatgttttgctgggctcattctctatttcccacattatgtgcgaagtcaagtgggaatcccct

SEQ ID NO: 297275 - DNA, 384 bp, Zea mays
atcgatctgcaagtctcgctacgtagttttgttataaaaaaagcagccgcaatggcgagcagggccatggccctctgctccacggccttcgccggcaaggccgtgaacgtgccgtcgtcgtccgccttcggcgaggcccgcgtgacgatgcgcaagacggcggcgaaggccaagccagcggcggcgtccgggagcccgtggtacggccccgaccgcgtgctgtacctgggcccactgtccggcgagccgccgagctacctgacgggcgagttcccgggcgactacggctgggacaccgcggggctgtcggcggacccggagacgttcgccaagaaccgggagctggaggtgatccactcccgctgggccatgctgggcgcgctc

SEQ ID NO: 297276 - DNA, 312 bp, Zea mays
gcagcgtccggacaaaaaaaacaataaaatgaagaaaaaaaattttactttttattacaaaaataaaaaaaaccacgagggccttaaagaaagcatgcaacgggatgtgctcatatccatggccatacatgaataccgcaagcacacccaccctctttatttatgacatcatgacaccaagccacgcaaggcacccacacacatacatatatgtatgaaaatatatatatatatctcacggatagacttcgaaggcaacacgatcttcaaatttcttcaagatcttgtattcgctgaaccctgctttgatga

SEQ ID NO: 297277 - DNA, 384 bp, Zea mays
cgatcccttcacaaagcgccgccgtcgcttcatctaacatggctccgaagaaggataaaggcccgcccccgtcgtcgaagcccggcaaatcccgcggtggcaaacaaaaaaagaagaagtggagcaagggaaaggttaagggaaaaggggacaacgccggggttgttgaacaagcttactaacacaaggttgtttttgaggtgcccaagtacaagcagatcacccccttcattctattcgagcgccttaagatcaatggcttcctggctcggagggctatcaaggacctgatggcgcgtggcctcatccggttggtctcggttcactcaagccagcagatctacaccagggcaacgaatacctaaggatgggattcccttgttt

SEQ ID NO: 297278 - DNA, 395 bp, Zea mays
caggattggagcagcacattgttctgccacgttattcctatttacaggattattttgatgacgttgcaaagtacatgaaagtaggtccaccattatactttgttgtgaaggacttcaattacagctctgcgtcggtggatacaaatcaaatatgttcaatcagccagtgtaattcaaattctcttttgaatgagatatcacgacaatcattatcccctgagactagttacattgctaaacctgctgcttcatggcttgatgacttcctaatttggatgtcccctgaagcatttggatgctgtagaaaatttgtgaatggaagttactgccctccagacgatcagcctccatgctgccaactcgatcaggtttcaagctcttgcatgacaagcaaa

SEQ ID NO: 297279 - DNA, 420 bp, Zea mays
tggaaataggttttgaaaggccacattgcactatactttgctgtgtttcctaatgggacgacagggacctccctcaagctgtactggtgtactgctggaggttggcgggggactgggcgagagggacgccgggacgccgtgttcacggcgtgggaaaacaggctagctcaagttccggcttgcacagggaagacggctaggacatgctcttgatattctttcacgagcaccactctggagagagggtcttgactatcggcatggtacaggccatggaattggatcttatttgaatgtccatgaaggtcctcatctaattagcttcagaccttctgctcgaaatgtaccgctgcaagcatcaatgactgtgacagatgagcctggttattatgaagatggggccctgtgtataagattgga

SEQ ID NO: 297280 - DNA, 337 bp, Zea mays
gcgtacgactcgtttcattgattcaggacagagatcgagctttttttgcaccacaaggtcgaggatgtcgtgcaactgcggatcaagctgcggctgcggctcaagctgcaagtgcggcaagaagtaccctgacctggaggagacgagcaccgccgcgcaagccaaccgtcgtcctcggcgtggccccggagaagaaggccgcgcccgacttcgtcgaggccgcggcggagtccggcgaagcccgccacgcctgcggctgcggtagcagctgcaagtgcgacccctgcaactgctgatcacatcgatcgacgaccatggatatgattattatctatct

SEQ ID NO: 297281 - DNA, 370 bp, Zea mays
agaaccctaacctgctcgacgaagaaaccactactctcacaccatgaacggaaacgcctccgggaagctataccagaccgcggggtccatcatactctccgcttctcaacgctcctacttctccgtactcgccgccgagggccgaaccgccgcactcgacaactatgacacgaagaacctacccaccgcctgctcctaccacaggcacagatcccacaccgcgtcaagatggggagccatcgctgtcgcagaccccgccgcacattacatgctccaagaccagcaagctcatgctgcagagatagaacacactttcattgacatcaaacccaacggcgtccaaagaggcctgatatcagagattgtgaac

SEQ ID NO: 297282 - DNA, 455 bp, Zea mays
  unsure (1)..(455): unsure at all n locations
ccggttttcggaattacccgggctcgacgccacgccgtctcgagtcctagagtctgnnagagccgacggagggaaacgtattaagcggccatggcgatgaagcggccggggcgcatcgacccacacctgccacccgaggaggcggcacgggtggaggccgaggttcggagctacttcgacagcgtcgcgccgaggcgcccggccaagccgccgcgcagcgacccgtcggtggacaccttcgcggaacccgccgccgtcgacgccggggaccacgacttgccggagctccgcaagctgcgcgacctcgaggcgaagccccagaagctggtgttggacggagggggaggggacgtggatggcggggaggattacgtggagacgcgatactacgatggcctcataggcatcgacaagcagcatcacacgactgggacaggctttatcaaagtggagag

SEQ ID NO: 297283 - DNA, 376 bp, Zea mays
  unsure (1)..(376): unsure at all n locations
ctccgatgggccaccagctatgaccgccgnctctttcccctccgctactgctcctacccagcgccggatgcaaaggcaagatgttcggtctcgcgccgaagaagagcgacaacaccaagtactacgagatcctcggggtgcccaagtcggcgtcccaggacgatctcaagaaggcctaccgcaaggctgctatcaagaaccaccccgacaagggcggtgaccccgagaagttcaaggagctcgcacaagcctatgaagttttgagtgatccagagaaacgtgagatttatgatcagtatggtgaagatgcccttaaggaaggaatgggcggtggaggatcccatgttgatccatttgacatcttctcatcattttt

SEQ ID NO: 297284 - DNA, 381 bp, Zea mays
acttttcgactcccccatctcctccctgactttgtttacaacgctaatgccgcatcttcgcgtgctattccagagtcatcggaggatgattaataggactggaaggagtcctagggggacttcgccaaagtcttccgcgccgccaccaatggcgcctgctaatggggcttgcccacatacaggccgatcctcatctactcctacaccatctacgacatgttccacttaggccacgccaagtcgctgtagcaggccaagaagtcgtttccaaacacatatcttcttgaaggatgctgcaattatgacttgacacatatattcaaaggaagaactgttatgactgaagatgagcgagatgattcacttaaacattgcaaagta

SEQ ID NO: 297285 - DNA, 440 bp, Zea mays
cccttctcccccctcatctactccccctttttttgttcctgtgcctgtgcattggctggcgagggggtccacttgtccttcaggcctggagctcaccatggctgtcccgggcctcagctcctcctctggctcagaggggtttggatgcaacaacaacaacgggagcgggaacgggatcaacatgagggacctggacatgaaccatccggcgagcggcggcgaggaggacgagttcccaatggggagcgtgaaggatgaggaggacgagcgcggcggcgccggcggtccgcaccgcgccaagaatctccggctgtgcaaggagcagtcccgcctcctggaggagagcttccgcctcaaccacaccctcacaccgaagcaaaaggaggccttggctgtcaagctcaagctgcggcccatgcaggtggaggtctggttccaga

SEQ ID NO: 297286 - DNA, 243 bp, Zea mays
cggggcgtggaccgtgtacgtcacaagcctctcgctcgggcgactcgccatgctgtacacgggctccaccaacgcctgcgtgcagatgcagagcctggccgtgcccgtcgactacgccgacccggtggtcaccaactggacacaagcacgatggcgactacgagctgtacccgcccacgaacatcgggcccaaggactctgcgaaccccaccacgcatctggatcgacccctgggacggcagc

SEQ ID NO: 297287 - DNA, 389 bp, Zea mays
tgccgatccaataaaactcctgccattgtcctatctctttctcctccattccccactgcatgcgcgctaccttggcgacgactggttgaccgccgctgccgctctagagcaggtgcccactgcccaggtcttcttctggcccttcgccggcgacaagcacaaccagggtgattcaagtactctgctttcaccaatatgtctgacggtcaggaaactgacaagaacattgagatttggaagatcaagaagttgatcaaggcattggaatctgctagaggcaatggcaccagcatgatctctctgattatgccaccacgtgaccaaatttcccgtgtgaccaagatgttgggtgatgaatatggtactgcttcaaatattaagagtagagt

SEQ ID NO: 297288 - DNA, 334 bp, Zea mays
ggcttctcctccccctcttaccaagacctcttcgggttagggttccttagggttttgtggaggggcgatggcggcggctgatgtggagtaccgatgcttcgtctgcgggcttgcctgagccaccagcaacgagtcgctggagaatgccttcgcctcctacagcgagatcctcgactccaaggtcatcaccgaccgagagacggtgaggtctcgcggcttcggcttcgctaccttctgctccgagaactccatgctcgacgctatcgagaacatgaacggcaaggagctcgacggccgtaacatcaccgttaaccatgcccagtcccgtggcggt

SEQ ID NO: 297289 - DNA, 387 bp, Zea mays
tccaatctcgctgaaccaacacatgggcttttgttcgctgatgctcttcacaagccctagggggatagcaatagagcttgtgatggaaccagcttcatgcttgcgtgtattagatttgaacaagacagcagtggacgccatcccgaaattcattggtaacttggcacatttaacgtacctgaatcttgatggggctcacgtcacatacataccttctttcattggatttgtcataaactcgcagaccttgagccttcatgggttccaaaacttgcagagactttctatgtccatcatggcattgatagagcttagatgcctctgtgtatatagaacttacctaagccatgcaccaaagggtgatgtgctatcgacacatcctaatca

SEQ ID NO: 297290 - DNA, 347 bp, Zea mays
cggacgcgtgggggcggcgtggccccgcctttacgaggccgtgcttgaccccgcggggccggagccgttcgcgcgcgccaacgccggggtcaccgcctacgcctactacggcaaggaccaggacgccaaccgggtcatgctccgcgccatggcgggggtatccgagcccttcatgggtgccctcctcgacggctacggcgccgccggcgggtttcgcggcgtcgccacgctcgtagacgtcgggggaagctccggcgcctgcctcgagatgatcatgcgcagggtccccacaatcaccgagggcatgaacttcgacctccccgacgtcgtcgacgcatcgccggcca

SEQ ID NO: 297291 - DNA, 401 bp, Zea mays
ctctcgagacagtacttccaccaaggccttctttcaagctgacagacatggagatagatgagggcgaggagacgactatgcatgatgtgaacaacatcgaggaagagatgcgcaggaagcaagctcacgctgcccaggaggcgtacgaggaggacgacgagatgccgggcggagcccagagagtgcagtgcgcgcaacagtaagcagactatcatcaaggcaattgggaggggtggtgcccttaaagcatgggagtgatctctggttttgctgtcgccgagctgggaaataggaagctgaatcgaccccacaaacagaagttaaaaggtacccagctatgcctgggtagcattttttatgttgcagcaaaaacccacgcgtgcgctggcttctcctccccc

SEQ ID NO: 297292 - DNA, 449 bp, Zea mays
cccacgcgtccgcatcaacctggtgttgaggctgggaaaaaggcagcaggagaaggggtggcccttcagaaaagggtgctgactgtattaaatgaggcaacctgcaaggacccttgtgagccattgactatagatgaaattgcagatcgctgccattgccctgaagataaacacaacgcttttcccccctctataacacatgcccaacgtttgcttcctcagattgagatgatctacaaaatagtccagcacatggctgctaacgacagagcaatcatagcagaaggcagctgtggctctcctcgcagcgttaaggtgtacctcggtgaatgcaatgtagacgaagacttgcaggccgcgtaggttccgagcctggatccgtgtaaaattgttggaataaatcaggcgcaacaagatagcgatgcaatgcatgggtgttggcggatcct

SEQ ID NO: 297293 - DNA, 447 bp, Zea mays
  unsure (1)..(447): unsure at all n locations
ccagctttgaccgccgcctcccttcccctccgctactgcgacctccccaccccagtgcccggcaggagcggcggcggcggcggcggcgaggtcgtaccccacatcggcgagcggcggcggcaccgccggaggcaaaggcaagatgttcgggcgcgcgccgaagaagagcgacaacaccaagtactacgagatcctcggggtgcccaagtcggcgtcccaggacgacctcaagaaggcctaccgcaaggctgctatcaagaaccaccccgacaagggcggtgaccccgagaagttcaaggagctcgcacaagcctatgaggttttgagtgatccagagaaacgtgagatttatgatcagtatggtgaagatgcccttaaggaaggaatgggcggtggaggatcccatgttgatccatttgacatcttctcatcattntttggaccctc

SEQ ID NO: 297294 - DNA, 449 bp, Zea mays
gaaaaaagaggattgcctcctttgccccactgggttttctgccaacatggctgcaaggacaggcctggggagtattacctctcttttgtcccctggaagaaaacctgcagagcacgagagaattgccatcttctcagatgcgctgaaccatgcttcaatcattgatgggattcgccttttggagcggcagcaagaagcattagtgtttgtgtacaagcactgtgacatgtttcatctcgatttcctgctgtccagttgctcattggaaaagaaagttgttgtcacagatagcctgttcagcatggatggtgatttcgctccatttcctgaacttattaaattacgcagaaagtatggttttttgttggtcatcgatgatgctcatgggacacttgtttgcggtgagaatggtggtggtgcagctgagctgtttgaatgtgaaaaggaca

SEQ ID NO: 297295 - DNA, 292 bp, Zea mays
  unsure (1)..(292): unsure at all n locations
cgcgtccgctcctacttcatgncatcttcactctctatttcaagctcaccccaaccacttcctgggaccgacagtttttccatgcttgcctgcctcttctctacagttgtagaacgacaagccgctaattcatgggacgcttggacaactatacatgtgattcaacagtgaacgcggtcaaacgtgctcaattaaacatgctaatgccatttcacatgatcctaactcaaacgactcccttctgcaactaaatcaagaaatcgagctactgagtcagctgccacatccaaac

SEQ ID NO: 297296 - DNA, 436 bp, Zea mays
cggacagggaccttggcgacaagatcgaggaaggtctgggtccccatgggctcggcatcgtgaccggtgccgatgtacctgagtttccagagctaaaaaaaaggctgctgcgcttggcaccaaggattgcaaaccttcctgaagaggtgaagaaacagcttgaagatccagatagcagatataactttgggtggagtcatgggaaggagaaactcgagtccgggaaacttgacacatttaaaggttccttttatgcgaaccctgttttggatgtccctactactgatgatgtgcttgtaagtaggtatccatcatattgccgaccaaatatatggccaaacgataatcttcctgagcttgagatagcatttaaagatcttgggaagctgatgatggaaagtgggttgatggtggctcatcattgtgatcgctatgt

SEQ ID NO: 297297 - DNA, 206 bp, Zea mays
  unsure (1)..(206): unsure at all n locations
gccggacgccgccnncananagcggccgncaggaaccccagcaagcaacccagccgcccanngccggcaangcncgcagcgcnagcnncnngcgcccaacacacggcnccgaccaagaacagcaaggacggcanggcgcncgaagcagcgnacgacaacccgcacgncgccgnncgccagagcacgcccacacaagcagcagcaag

SEQ ID NO: 297298 - DNA, 455 bp, Zea mays
cttcaaggtcccgctttctaacaagattccttcctttctctatccgataaccctggcctgcgccgacgacgtcaacgaatccgtcatgtccatgttcaacaagatcttccgtaagcccatagagcacgccaactccattgccttggccacactcgacaagttaaatgagactcttgatatgctggacaagaaagagaaggtgctggacaaaaaagcagccgctgagcttgagagagccaaggagttctccaaagctaagaataaaagagcggctatccaatccttgaagaggaaaaaactttatgaacaacaaattgagcaactcggaaattttcagttgagaattcatgatcagatgatcatgttagaagcagctaaagctacaacagagactgctgatgcgttgagaactggagctgcagctatgaaagcaatgcataaagcaacaaacattg

SEQ ID NO: 297299 - DNA, 445 bp, Zea mays
ggtgtcggaaacagttcattactgttcctgctaatctagactgaagtctctgttgggggggggctgcgacgaagagattggcctgttcctgtacaggggccgcgttgacgaggagaccataagatcgctccaggggaaggaaaccgggctgcgcgaccacggtgagctgatcaagctgcgcgtggttccgtacagcgagctctggcggtcgaccggcgacgcgaaagcactctccgcgatagccctgtacgagatggccaagagggaaggcctgctgccgcagccgacgccgtcggccaacttgtgaagacctgctagcactgcggcgtttggaccgacgcctaggcgagataggcgtctaggcattggaccaccgtctcgtctacgcggcgcccttaaaacagtggtggccgtcatgcctgtaaaaatggaagaggaacgtcac

SEQ ID NO: 297300 - DNA, 456 bp, Zea mays
gaaaaatatccccaaaccctagctcccgatctcgatggcgaaccctcgcgtcttcttcgacgtgaccgtgggcggcgccccggcgggccggatcgtgatggagctgtacgccaacgaggtgcccaagaccgcggagaacttccgcgcgctgtgcacgggcgagaagggcgtgggcaagtccgggaagccgctccactacaagggctccaccttccaccgcgtcatccccgagttcatgtgccagggcggcgacttcacccgcggcaacggcaccggcggcgagtccatctacggcgagaagttccccgacgagaagttcgtgcgcaagcacaccgcccccggtgtgctctccatggccaacgccgggcccaacaccaacggctcccagttcttcatctgcaccgtcgcgaccccttggctcgacggcaagcacgtcgtcttcggccaggtcgtcga

SEQ ID NO: 297301 - DNA, 437 bp, Zea mays
cggacgcgtgggctcatcctctcccacgcatgtcacaatcgccatgaccgacagaggccccggcgccgcctcaagcaagcgtcactgtgacctctccctcgacgatcccacgccgtcggccaagctccagcggtgctccgagccgtcagaaccaacgccggcggggaaaccgaacggcggcgcggcgacaggagaggagagcgagatgatggccggcgcacggaaccctagggcgcagaggtacctggtcgccgtggagtacattggcacccgcttctccggctcacagaagcagcccaaccagcgcaccgtcactggggtcctcgaggaggcatatcaccgatttattgggcagccagcttcaataatcttttctagccgaacggatgcatgtgttcatgctatatcaaatgtttgtcatgttgatgttgagcgga

SEQ ID NO: 297302 - DNA, 458 bp, Zea mays
  unsure (1)..(458): unsure at all n locations
cgacccacgcgtgccaccatgacattatcgcaactgtttctattttacacgccaacactgacnccatgaagcctggtatactttttactcgtctgccctactatcttactacagacgttcaatcctcttaaatccaccatgatgctattcagtactcacttcctccagacaatttttccttcaacctctagaaattatctctgaaagatctgaatcgttactatactacctccaactccaaacattaccctaccaaggatacttctagcttaaactccaatgtaattatcattaactacaatcgtcatattggaaattactatcccacagatattaacttacacaccttacacattacatacaagcatactaacctcattaccaacatttactacccataccccaatgacctgtaaaagaaccccaaattttttacaaactctaatctctatattttt

SEQ ID NO: 297303 - DNA, 384 bp, Zea mays
cccaccgacccacgcgtggcgtcttactccctaacaccatacgctctacccttatttccccatctctcttcttctgcttcttgttccccatccagaggaggaaggaacaataataagcaggaggcctctcccccccagcccagccaccccgtagcgactactgatgacggaagaggatgagcgcgtccaggttcataaagtgcgtcactgtcggcgacggcaccttcggcaagacctgcatgcttcatttctacacctgcaacaccttccccaccgactatgtaccacagtgtttgacaactttcatcctaactttctggttgatggtaacactttcaacctcggccttttttacactttatgttaagaggatacaacatactt

SEQ ID NO: 297304 - DNA, 398 bp, Zea mays
cttcgttcattcttgtccactcgaggactgcccgtttgacgactgctcgatcagtgtgctagctagctagctagagcaagagaacggctgtaagcgaggagatcgatcgagatggctttcctcaacatggagcagcagacctgggccttcacctttggtatcttaggtaacatagtctcactgatggtgtttctttcaccgctgccgacgttctaccgcgtgtaccgcaacaagtcgacggaggggttccagtcgacgccgtacgtggtgacgctcttcagctgcatgctgtggatcttgtacgccctgctcaagcccggcgccgagctgctggtcaccatcaacggcgtgggctgcgtcgtcgagaccgtgtacctggccatgtacctggtgtacgc

SEQ ID NO: 297305 - DNA, 429 bp, Zea mays
ggcgacccacgcgtgcgctcattgaccctacggcaagctcatactagtgaatctttaacacgacctcaagtgacatttgttcaggggctgactagaggggagctcaaaatggctacgccagactggccttgacgtttgccttgctcatagatactatggacagcggccctaacactctactgcaagattgaaacgcatctttcatattagtgatgacaacccttatcctatactccagatcgatccaacactaccgaagcaaatccatcattgcaaatcgcatgcccttaatgtaacaactcccgcaaattatcctcatgtactgcaccgccagatacaccgtgacttcactaagcctctcattgtgatatgctcaaagaaccttcttcccacaagtactgccaatggaacctatctgaattttatcat

SEQ ID NO: 297306 - DNA, 329 bp, Zea mays
cgaccgacgcgtgcagacttctactccacttcttaccaattctacttcatcttatggttacataaaattttgtgggggggcggtggcgacttcttatgtgtagtacctaatcttcatccgccggcttgcctgggccaccagcaacgagtcgctgtagaatgccttcgcctcctactgcgagatcctcaactccaaggtcatcaccgaccggaagacggcgaggtctcgctgcttcggattctttaccttctcctgcgataactccattctcgacgctatcgagaacatgaactgcaaggatcttgacagtcgtaacattacctgtaacc

SEQ ID NO: 297307 - DNA, 312 bp, Zea mays
ctctcgctcacccagaatacttttatctcttctactcgccagtatccatgcgcacgactgagagctgaatcaaccgattcggaaggatctgcactctcttatccagggtcgccctccagagctagcacttccagctcctcaccttcaacgacccctttatcaccacatactacatgacctacatgttcacgttcgacaccgttcactgacactggaagcacaaccacatgacactcaacgactcctagacccttctcttcacagacaagccggtcaccgtctttggcataaagaaccctgattatataccgt

SEQ ID NO: 297308 - DNA, 403 bp, Zea mays
ggcgggaaaagtgtggctggtgacggcggcttaggctaggtaccaaacatgcccaaggagggccaactaaaagagacagtacgtaggtgcattgcggcttttcacctagctggggccgtgggacttctgcttcgccttcgccttctctatcaggggcttcagctgctgcttctcctcgagaatcttgaggaaattgaacaggaagggcacgtagttatgcttcctcctcaggttctccgctttccacttcttcaccttctcctcctccattatgatcttctccgtcacagactcgatctgagctgccacctccgcgagtgactgctcaacatgcctgcttgcgttgggatcgcccatctgctgcaagaggccctccctcttcctctggagttctttgatcttc

SEQ ID NO: 297309 - DNA, 368 bp, Zea mays
tttctctttccttccccacattttcccttgcagccccaatcccccacggcggccatttttttactcgcatatttcctctttctcgttgtcactattctcttccataacttcaaggtgactgctatcgctacccctatcgacaacttccctttcatcgtcttctcctcccgggacaagtccgtgctggtgtgggacctgaccaacccgtttcactccaccccgtaatccggcgtcaccgccgactacagcgtcccctttcgccgccttaccggccactcccacttcgtccaagacgtcttccttagttccgacggccatttctcactcttttgcttcttggacggcgagctccgcctttgtgacctttt

SEQ ID NO: 297310 - DNA, 407 bp, Zea mays
cgctcggccaccagctttgaccgtctcccctgccctccgctccgatgctgttcctgcatgccccactcccccgcaggagcggcgcggcggtggcaaaggcaaaggcaagatgttcgggcgcgcgccgaagaagagcgacaacaccaagtactacgagatccttggggtgcccaagtcggcgtcccaggacgacctcaagaaggcctaccgcaaggccgctatcaagaaccaccccgacaagggcggtgaccccgagaagttcaaggagctcgcacaagcctatgaggttttgagtgatccagagaaacgtgagatttatgatcagtatggtgaagatgcccttaaggaaggaatgggtggtggtggatcccatgctgatccatttgacattttttcatcattctttg

SEQ ID NO: 297311 - DNA, 407 bp, Zea mays
ggacaaggccaatccattggctacaattcttagtgcagcgatgctattgagatatggcctaggagaagaaaatgctgcgaacagaattgaagctgcagttactgaaacactgaaccatgggttccgaactggggacatatattctcctggaacagtaagatagattttcttgcagaaccattatcaatgaattatggggctgtttggtttgaggaatcacctcatccttagttgagatggtccatcatgattcatgagttcatcacatgaattttggtggaatggatccaaccttcatgctttttttagctttatatcgtacatgtttaatgccaattacttgatcctcacctagagaaggtagtattggacaaatcattcaggtagtgtaatagcattggacaaat

SEQ ID NO: 297312 - DNA, 408 bp, Zea mays
ctaattaagggaaggaaataaagctccgtcgtcgagccgatcgacgaccaccatcaccatgtcggcggcacggcggtgcggcggccggcggcggctggagagggcggcggcggcgggagacaacgccaacggatacgtcgagactgaccccaccggtcgctatggacggttcgacgagctcctgggcaaaggcgccatgaagtcggcgtaccggggcttcgacgaggagcgcggcgtggaggtggcgtggaaccaggcgagcctcgccgacgtgctccgctccccggacgccgtgcagcgcatgtactcggaggtgcagctgctgagcgagctccggcacgacggcatcatcggcttccacgcgtcctgggtggacgtgcccgggcgcagcttcaacttcatcaccga

SEQ ID NO: 297313 - DNA, 290 bp, Zea mays
gcgtacggaacacgatcgatcacatatcacgatgatttttttacgagaaaccacataccacgggggggtgaaagcatcatggagtacggtcagcaggtgcagcacggccacggcgccacgagacatgtccaccagtacggcaacccattcggcggcgtggagctcggcaccggtggaatgagtcacggcacgggaaccggcggcatgggccaactgggtgagcacggcggcgctggcatgggaggcggtcagttccaacctgagagtgaggaacacaataccgtcggcat

SEQ ID NO: 297314 - DNA, 444 bp, Zea mays
aaaaccggccgacggcacgcgtcggagttcgtcagcctcattagatcccgttttcaggaatgggaacagcggatgcagtgggctggattgggatgccatacgtcgcgtttccttgaattttatgcagcccgtggccacaagatccttccgagctcgtcgcttgtgcctgacgacccaactgtgttccttaccatagcgggaatgcttcagttcaagcctatattcctcggcaaggaacctaggcgtgtgccacgcgccactacctctcagaagtgcatacggacaaacgacattgaaaacgtgggtcgcactgctcgacaccagaccttctttgaaatgcttgggaatttcagtcttggtgattacttcaagaaggaagcaaccacatgggcatgggagcttgcaaccaatgagtacggattgcctgcagaaaggctgtggatt

SEQ ID NO: 297315 - DNA, 427 bp, Zea mays
  unsure (1)..(427): unsure at all n locations
tgaggatcctgcagttcggtgttggcggcgttgacctgtggccaccatgcagcgggacacgctagagccatgtactgcgccgatcatatcgaccttctggccgtgttattactgatgctgctgctgatgagcccaaccacacgcagcgacccatttagcctccgttggacctaggctgcatccactgactgagccatgccttgtagtgtgggaaggatgacgactgcattctaaacagtatgaatgaaaatcacgangacatatttactgtgctggtgtgaggcatgtatgttactgtcactcctggaccctatactgttactacacaattggtgtgcagatcttgcatacacagcctggactttcacacctacaccattttgcttatggaaaagatttttgatctgcaacattcaaattttaaccc

SEQ ID NO: 297316 - DNA, 314 bp, Zea mays
cccggcacaagcattaacgagatacacaatcattcggtaaagctgttgataaagggattggaagaactgaggatcctggagaaggggaaatccatccaatacaactacttgaacccaaccgcaataggccactcgttaggcatggatattcatgactccatgacactccccaaggacaagcccttggagcctggcgtcgtaataacgatcgagcccggcgtgtacatcccggcggccccggtcctgaacgagcgcgcgccgagcaggtaccgcggtatggggatccggatcgaggacgagatcctcatcaccga

SEQ ID NO: 297317 - DNA, 407 bp, Zea mays
  unsure (1)..(407): unsure at all n locations
cgcgcgcgggggagcgataaaccctagtcttcgccgtcgtcgcaggaggacccgcgatgtcgcacttcgggaggtcaggcccgccggacatccgcgacaccttctcgctcctcgtcctcaacatcagcttccgcaccacggccgacgacctcttcccgctcttcgagcgctacggcaaggtcgtcgacgtcttcatcccgagggaccggangaccgggggactccaaggggtttcccgttccgtccggtccaggtcccccaccaagccccaaaaggctataaatcgctccaatgcccggattttgattggaaaaacatcattgtgccatttgcaaaagaccggccccatgcttaacccatgaaaggttaaagagggggttgggaaatcacaagaccgatcaagaagc

SEQ ID NO: 297318 - DNA, 442 bp, Zea mays
cggacgcgtggggcatctcagcaaggttctttcaaagttgggaggtggaaaattaactgggtgtcaacccaaaagtgggagaacccgttgatgggatggacatctactggggatccatatgctaatgtcggtgaagcaggacttacattcaacagtgcggagtcagcaaaagcatttgctgaaaaacatggatggaattatgtggtacggaaacggcatacacctcttctgaagcctaaggcctacgctgagaacttcaagtggaaaggccccccgaaggcggagcaagcataagacctccagcagcatgtgaccctgacactggaatgatgttattttcctcctgagctctagagtctagacctcttgtccgtgagcctggcattgggacggtgttgttttcttcctggacagccttttctttcaacagtgtccgtggtga

SEQ ID NO: 297319 - DNA, 163 bp, Zea mays
agagcttccagggtgttttggatggcacttattatgacctccctgagcagtcatccggcgtggtcaatggcatagaggaagtcattcctaacgctgagaaaattcccaagtagtttttgtaataagaggctttttggctgtaccatccttgacaaatttccat

SEQ ID NO: 297320 - DNA, 424 bp, Zea mays
cgctgcttctgctgctgctcgcgccgctcgccgcggcggcggacatgtcgatcgtctccgacggcgagcggagcgaggaggaggcgcggcggatgtacgccgagtggatggcggcgcacggccggacctacaacgccgtcggcgaggaggagcgcaggttcgaggtgttcagggacaacctccgctacgtcgacgcccacaacgccgccgccgacgcggccgtccactctttccgcctcggcttaaaccgtttggccaacctaacaaccaacaagaccgggccaactaactttgccttaagaaccagccggaaaaggagaagaagcttcgttaccggtacctggcccgcgacaaccaagacctgccggagttcgtcgactggcgggccaagggcgccgtcgcggagatcaaggaccaaggcaac

SEQ ID NO: 297321 - DNA, 423 bp, Zea mays
ggctgacattgttactcacccaaccaattttactttcgcacgtcctaccacttctggccgcggcctaactgaacatggccttactgcaactattaatgctctgctgcctagtcgggcactattccaactaataaagaatcacaccatctatgctgtatcgattaccataccgcttcttcttcgttttatgctccttgcgctgatctgaaatctttgacttcccaccatttatagtcctcatcattgccatcctcaatgacagcaccattattaatatctccaacgacaaagtaaaaccatctacacaaccagacaacttgaagttacctgacatttttccaactggagtaattattggtggatatctgaccatgaacactgtcattatcttctgccctgcatacaacactgacttcttcccac

SEQ ID NO: 297322 - DNA, 198 bp, Zea mays
ctagtccccacagcgcaagggttgccgttgtcaccggcgggaacaaagggatcgggctggaggtgtgcaggcagctggccagcaacggcatcaccgtcgtcctgacagccagagaccaaaagcggggcgccgcccccgtaaaagaacttgcggacgccggccttttcggcgtcgtttttcattaactggaggtcaccg

SEQ ID NO: 297323 - DNA, 324 bp, Zea mays
actaccccaatgaggagaacgtttttttcggacccactgtcctcgaattagactgccgctttcgtatcactcacatctttacatcctccactgacaccttcattcatgtcactgatttgtctgggaggtaaactttgttccagatcactggtctcatgaaaaataaaactcatcgatatgagaccgttccttattcagctatgctagctgctcaacatagtatacatccttacaacgacactccatatcaccctcctgcgcattaagcttcgtgcgactggacgcaacaagaccaagacccctggacctgtgtctcactctgct

SEQ ID NO: 297324 - DNA, 405 bp, Zea mays
ccgacccacgcgtccgccggcacttaacccgactcaacctctaactcatgtatacagcctctcgagcccatcaaggaggagtatcataccctattctatgcccacttcaaccagctagaccaagttgtggccgtcgaagctaccgacagacctgtgatcccattccacccacacagggagcacaagcctcactcgacacctgaggaccgtcttccttatgccaccaaggcttctgaccacctcatgcaagtgtttggcaaacatatcaccttgagtcatcacgacatccttaccctctttgccgaccacaccttgataatgagcctcatagagcacactgtttttgacggtgcctagactactaacccttagctctttgacaactcttacttcaacgaacttctg

SEQ ID NO: 297325 - DNA, 220 bp, Zea mays
acgaatgccatttgttcgccatatttacgatgcatctaagcaaatcagtgctgccatttcgggtgatcaaaacaagcatgcattcaaagaagtggtcatcattaggcacccaagaattggtgaatatgcatttggatttatcacttcggaagttcttcttcagggttattctagtgaagaacagatgtactgtgtttatgttccgaccaaccatctctat

SEQ ID NO: 297326 - DNA, 417 bp, Zea mays
ctccgcatacgcacctacgagagtcgagtgacagcgagcgagcgagcgagcgaagccatggctctccgcaccctggcatcgaagaacgccctatccttcgcgctcggcggcgcggcccggccgtcggcggcgtccgcgaggggggtgacgaccgtggcgctccccaacctttcttacaatttcgggcccctgaacccgcccttttgggggaaaatattccccttgaccaaccaaaacaacaagccaactaacttggccacttcaacaaggggcttgaacaacttgacccttccctcggcaaaggccaagccttcggtggcgttcaacttcaaggcgccattaagttcaacggcggcggtcatgtgaaccattcaatcttttggaagaaccttaagcctattaaccaaagtggtgggg

SEQ ID NO: 297327 - DNA, 412 bp, Zea mays
gtacgggtgtagtttttcttttgtaagaaccttccttttttttttttttttttttgcatggtgtgaattaagatcaaacgaatccgagcccttccaaaccctaagctcgcctcccctcccccccaaacaccaccgcgcacctatggcgaagtacggcgagggcgacaagcggtggatcgtggaggagcgcgccgacggcaccaacgtccacaactggcactgggcggaccgcgcctgcctgaatgggcccgggccgcggtttttttcctggttggggggcttaacattcttgaccgggagggggggcttaggtttcggaacggcgcgcttgaaaaggttggtggggagggctacctcaaccttcggaagggccagggcattccggggtaccaggttttgcttacccttttct

SEQ ID NO: 297328 - DNA, 276 bp, Zea mays
cacaagcccattcgctctacttcacaagcattgcgcgccaagcaagtctttcggtcggccgggaccagcgcactcaagcacgacaagacggtgaacctctccttctgaagcgtccgcgactgcttcagcgccacctccatcaaggcctacatggccgaattcatcgccacccttctattcgtcttcgccgacgtcagttccgccatctcctacggtcaactgacgaatggctgcgcgctggacccggcggtcctcgtggcgatcgcgatcgcgcac

SEQ ID NO: 297329 - DNA, 335 bp, Zea mays
ggccgctccgccaccttggcactcggctcttttcgctctagccaccgggccaggggagggggcattcgatcggctgcgttatggctggagctgctgctctcaatgagggtatgctttcttccgtgatcgaaaaaaatgtggctgctcacccatggcctgatttggagataggaccagatgttcctcaatggctaaattgtgtggtagagattcctacatgcaccatggttaattttaagacggactcaatctgtatgctgaataaggtgcaccgtgtactttactgcttatttagtgacccaccattccttcggattattctacgcttactgtgt

SEQ ID NO: 297330 - DNA, 419 bp, Zea mays
gctacggactgacctacctgcaggtctcatttctttcccccttctccctatttcttccgggggccgccgctccacccgtacgactacaccatgagggagtgcattttgatccacatcggccagtccgatatccatgtcggaaacgcgtgctgggtgctgtactgccttgagcatggcattcaggctgacagtcagatgcccggtgacaagaccattgggggaggtgatgatgctttctacaccttcttcagtgagactggtgctgggaagcacgtgccccgtgctgtttttgatgaccttgaacccactgtcatcgatgaggtgagaactggcacctaccgtcagctctgtcaccctgagcagctcatcattgggaaggaggatgcagtcaacaactttgcccgtggtcactacaccat

SEQ ID NO: 297331 - DNA, 356 bp, Zea mays
cacatacacaagcacaagcgcactctagcattggcttctgaagttgtccgccctagcgacggcgcgctactaaaggcacaagccgacatatggcggctcaccctctcctacctgacgcccgtgtcactgaggtgcgccgaggagcttggcatccccacggcgatctaccgccatggcggagctgcctcagccgctgagctcgacacagacctgattatcccttacactaagctgtcgttcctccaacagctgctgaggcttcttgccgcatctggcgtgttcaccgataacaagcagatcacgtctgaggagcgaacccatattagccacgcattctccctcctggtggacggcat

SEQ ID NO: 297332 - DNA, 276 bp, Zea mays
gttcactccgtccctctccccgcgagccgccagaggcacgttcgccctcggttcgacccggattcgtccgcccgagaccgggattcgctccgcaaagcgcggatctgaacgctgcacttcgcgtaaccaatgaaatacgtcatcaagggggccaaatccaagggcgccgaggaggccgatgccaagctggcggcgaacagcaaggtggcggacaagcccaccaagggcaagaaagagaaggccggtaaggaccctaacaagcctaacacggctccc

SEQ ID NO: 297333 - DNA, 352 bp, Zea mays
gcggcaagtacccgctggggttcgtcctcgtgctggccgcctcggcggtgttcgcgctcattttgtccctcttcgagctcaccttcgagaaggtggtcagggtgcggacggcgcggtgggtgctgcggatgcagatgcacaccaacctggtggcgtcggcggtgtccgtggcggggctgctcgcgtcgggggactggcggacgatcccgggggagatggcgtcgttcaaagacgggaggacgaggtacgtgctgacgctggtgggcacggcggtgtcgtggcaggcagcggccgtgggcttggtgcggctgatcatgagggtgtcgtcgctgttcgcgaacgtgacgtgcac

SEQ ID NO: 297334 - DNA, 435 bp, Zea mays
gaacgaacaggacagcgagagaaagcaaagcgagctgctgcttccttatccggttcttcgccgtgagcgctccacagggaacggaacgggaactgggggatcgggatccttacgttgttgtgtgtattatcgagcaagctaagagccatgggcagcgagtgcaagggctacggcgtcggcgtcgccaccagcccgcagcaggagcaggagcacgagcaggctggcgccgccgtcgcaccgttcgtggccaagacgttccacatggtgagcgacccggccacggacgccgtcgtgcgctggggtggcgccagcaacacctttcacgttctctacccggccaccttcttcgactacctgctgcccttctactttaagcacgcgaacttcgccagctttgttcggcagctcaacacctacgggtttatgaaggtggac

SEQ ID NO: 297335 - DNA, 438 bp, Zea mays
gcagaagagcggcaaccgcgtgtgtgccgactgcggcgcacctgatcccaaatgggcatcggctaacattggagtattcatttgcctaaagtgttctggtgttcacagaagcctcgggacacatgtttcaaaggtgctgtcagtcacactagatcaatggacggatgatgagatcaactccatgatagaagttggtggaaactcttatgccaatgctatatatgaagcatttctgccagagggctatcagaagccgcatccagattctagccaagaagagagagctgatttcatcaggtcgaagtatgagttgcaagaattcctgaagccaagcctaaggttagtttccagcaataagggctctttagaggctaccagtaccagctctcgaaaacataaggacaatactgtgtctctttctgctagtttcagcagtga

SEQ ID NO: 297336 - DNA, 400 bp, Zea mays
ccgggccgacccacgcgtacggcccaaaacaccgactcttacgtcgcccgttttgcttactgcaccgccaaacgagggataggactcaaggagcgtgatggcggccatgccggcgcctcttctgcctatgattctgctgacggtggacgcggcgatgacgctctgccccgcctgacaacgcattccaggtgtgatcagccacgacgcgaccagctgcccaagccctcacgacaaggtctactgcggaagctacgcttcggacaccatgggcaacgcctgcgggtactgtaacctgtacagccaagggtactgcgtgaacaacgcggtgctgatcacggaactgttcaacgaggggctacgctgcggcgcgtgcttctagatcaggtgcgaggagcacccc

SEQ ID NO: 297337 - DNA, 321 bp, Zea mays
atgaggtgggcagatcatggattgacaatctatcagaagctagagcgcttctggtttcgcgcccattcgcctgaaggacaagccttactggatcatcaagaactcgtggggcgagaactggggggagaacggatactacatgatatgcaggggttccaacgttcgcaacaagtgcggcgtctattccatggtctctaccgtgtccgcagtccacgcctcgaaggagtagactctggtcatcggtgataatcgtgattccatatattgtagaactataatccctgctaagtaatcaattgctattgcctggagaggctaatc

SEQ ID NO: 297338 - DNA, 423 bp, Zea mays
cttggacttccattaacgctgcgaaagataaccaaggatcaggcgcagccaattattgacaaatttgcaaatcagcttcctggatggaaggcagacttgatgacaagggctgggagaacagttcaagtgcggtttgtgcttactgggatgctcatctacttagtaatggcaattgatctcccaacttatatcacaaaagcaatcgataaaatccgaagaggctttctttggagaggtcgcaaagagctaaatggggggcattgtcttgtttcttggagcaaagtttgtcggcctcttgatttgggtggtcttggtatttcaagcattaaggagctgagttgggcgctgcggatgcgttggttatggctgcaaaaaacggagcttaaccgaccttagtcatccttgactattcgagttccggac

SEQ ID NO: 297339 - DNA, 329 bp, Zea mays
cggacgcgtgggcggacgcgtgggcggacgcgtgggcggacgcgtgggcggacgcgtgggatcgaaatagcacaaaagatcggtgaggtgattgccaagtcttgcttggagaaagggatcaccaaggttgtcttcgaccgaggtggtttcctctaccatggccgcataaaggctctcgctgattctgccagagagcacgggcttgaattctgagtcgtccaggcgtttgttcatatctccaggatcacctgtaatcttcttctttttttgttctctccatatgccgaacagagctgttttgtagtcactcgccttgttctacagggtgc

SEQ ID NO: 297340 - DNA, 302 bp, Zea mays
cccacaccccccgcgctttccgcaccaccaatctatcttcgctcactacagtgaccagagcgcgagagctaactagagggccgcgcaaatgcccatcaatacgatcgccctgcggagccaccatgacgtgtaccaccccggcgcactccaagaggggtgcgagcggttgcatgacctatctggcgtagcagacgcagcagcagcatgcgatggctaactttagggaccacatgcagcggatccgcagtagaaacgcctacattcaatctgctccacatcaagaagctcaacctgctacactt

SEQ ID NO: 297341 - DNA, 383 bp, Zea mays
cgaaccagagctgaacggtttcgaagcagtattatatgctcatcaaggatccgagccaacgggggaattgttgcgggtgagcagacgcccacggaataaaacacgccgaaacaagggcttatcaccgaccctgatacctcgatctggaacaaccgacatgctgatgaaagataaggttgtgaaaaagtgtatggaggaatggattctagccactacaaaggtgatcacacgtttgtcccagtcactcggaatggatacaggctagtcaacattgggtgatgtccttgttgatgtaaagaccactgggttctgtgctggtggcttagcatccatctcatattcgggaactaccttgtttgttggtcccacatacattattactg

SEQ ID NO: 297342 - DNA, 401 bp, Zea mays
cccaaacaaccacactgacatctcatcttgatccatccagctttgcctcgatcgccggccggtagccatgtcccccacggaagaagccgctggtggtggtggcgacgactatgaccgcttgagcgagctgaaggcgttcgacgacagcaaggccggcgtcaagggcctcgtggacgctggcgtcacgaccatccctgccatcttccgcggccatctccttcaggaagggccgaaggtatcgtcctctagcagtagcagcagtactagtcttagcattatcccggtcatcgacctctcggcggcggacgcagtcgcacgggaggaggtggtcgcccagttgaaggctgcagccgaaacggtggggttcttccagcttgtgaaccacggcgttcccagcgagc

SEQ ID NO: 297343 - DNA, 396 bp, Zea mays
atcgggtactactcctacctaaaacacaggctgttatccttgaagccttcgccgagcatggggcatgtctatctagtaggcgggggaccctgatgaactcatcaacaatgctgcctacatcggtacccatcacaaggctatccttgatgctgatgagggaactggcactatagctaagcgcctttacactgtaaatgtctaaaacttggacgagaaccggcgggctctacgcgagctactgttctgctgccctggtgccctccaatacattgacggtgtgatctctggttctaggagacactataccggaagaccaaggatggcaatccttttgtcgatgtcctcaaggagggaggcgtcctccctggcatcaaggttgacaaggtcaccattgag

SEQ ID NO: 297344 - DNA, 390 bp, Zea mays
cgtcgctgtcctgcgtcagcgacacgctgttctatgtgggcgccgtgtcggccatcctcgacgagttcgcgctgcggtgcgccgcgctcccgccggcgccggcgctggctctgtccgggagcctcgacgacagcccggcgcactcgggcggccaccggcggtcccgttcggcggagagcgtgagcttcgacggcacgcgacgctccttgtcggccgcacccgtgtcgcagggcggtctggtgcaggtgggcaagttggtggacgggttcttgattgaggtcgcaaaggaccccaacatgccgatggacaagctgctcgccattgccgaggccgtgccagacagcgcccgggccgagcacgatggcatgtacaaagtcgtcgacacatacc

SEQ ID NO: 297345 - DNA, 383 bp, Zea mays
ggccgccgctcaccttctctttgctggtggttttcttcctgctagcgctgtgtgggataactgcgaaccagggcttctacctcctgggcctgtatcacctgtcaccaacctacgcctctgcgatacagaacaccgtccccgcgatcaccttcgtcatggccgctgtcctcaggctcgagcaggtggacctgagcaggaggcatgggctggccaaggtggtgggcacggtggtgagcatcggaggggccaccgtcataaccctgtacaagggcctgccgctgctccatcacagtgatgtgcacgtcaagtcgtctccggtgacgctgtcctcctccagcggcagccccatcctcaactggactctcggctgcgtcttcatcctc

SEQ ID NO: 297346 - DNA, 322 bp, Zea mays
cgctccccagatccagcatgcagatcagatgtttacattcacggaccggaaggaaaggaaagggttgaactatgagcgccgtggcagtttcgtcgtaactgaacccggacgcgccgctcttcatgccgacggcgctgctgtgggtggaggacttctcgccgcactggtggaacctcatcaccaccactggctggttacgtgaccactggctccgcgagcgcgcacatctggacgagatggccgagcagatcgactcggaacgatctcctttcatacgacgaggacctcttgtactacgaccagctcgagcagggccccgtcg

SEQ ID NO: 297347 - DNA, 350 bp, Zea mays
caacgacctcggtgagccagacaagggtgaataccatgcccggcctgtcctcgggggcagccaagaacacccgtatccccgtcgctgcaggaccggccggcgtccaacagagacagaccccaactcggagagcaggctgtttctgctgaacctgaacatctacgtcccgcgcgacgagcggtttgggcatctcaagatgtcggacttcctcgggtactcactgaaggcgatcatcgaggctgtccttccgacgctggggacgttcgtcgacgatacgcccaaggagttcgattcgttcgaagacatccttgggctctacgagccgggttcagaggcgcccaacaacccac

SEQ ID NO: 297348 - DNA, 276 bp, Zea mays
cttctcctccgcttattaccacgagctccttttttttgggatccttatggtcttatgtaggggggaaagccgcatccgatgtggtgcaccaccgctccgcctgcaagcttgactgacccaccatcaacgagccggttgagaatgcctatccctcctacggacgagatcctcgactacaaggtcatcacatgacaggagacggagatgtcccgcaacttcgctttggctaccttctcatgcgagaactccatgctcgacgctgtcgagaacatgaac

SEQ ID NO: 297349 - DNA, 430 bp, Zea mays
cgccacgcctacgtgcgcgcctgcgagttcttcgccatgttcgacgcagacttccagccggcgccggacttcctcgtcagaaccgtcccgttcctcgtccacaaccccagcctcgcgctcgtgcagacacgctggaagttcgtgaatgccaacgactgcttgctgacgagaatgcaggagatgtccatggactaccatttcaaggtggagcaggaagctggctcttccttatgcaacttctttggatacaacggaaccgctggagtatggagaacgcaagcgatcgtcgagtccgggggctgggaggaccgaaccactgctgaggacatggacttggcgctgagagcagggctcctgggctgggagttcgtctacgtttgaagcataaaggttaagagtgagctgccgagcactctcatagcgtaccggt

SEQ ID NO: 297350 - DNA, 368 bp, Zea mays
tggccgggaagacccaggcgtaccgacagcgtccgatcgtataggtacacaacagcgcgcgttaccggaagcggaaccgtcttgttgcttgctggtcgagctgtttatgggagtatggcatgggttacatacttgagcgccgtaacgcctggtatgagcctcgtggagaagcaatggctagtccacggggctcatacttcagcgctgcatcgcttggtactcggacctcggctcgaggcattttctctaccccttcttaccctgaaaaagcagggtcaccttgtgtccttaaacctataaccatctttcggctaacctaaccttcttcgtcccttcgtaccaacaaggggtagtacaagaatattgac

SEQ ID NO: 297351 - DNA, 305 bp, Zea mays
gggccgacccacgcgttctttagaaacatttaccctgagcttcttctcttttttgccgagaagtataaaaggagtccatgcagttttttctggacagctgcatacaatcaatctaatctcgataaccaggttggagtgggcggctactgctatcccgccatggttgctctcaacgtgaagaaaggtgcatacgctccactccgtagtgccttccatcgcgacgaaatcatcgagttttgttaaagaagcataggcgcttttgaacattaaatctttctctgaactatgctccgtcagtttgtact

SEQ ID NO: 297352 - DNA, 365 bp, Zea mays
ggaatatacatagccactggaatcaagcagttcatggtctcactgcaaatgtgcgcaagatgtttctggacatggacagtgaactatttgaagagtgccagcagcagtatatggataaacaagcaaaagccaaagagatgcaggagcaacgagaatcagcatggagacaattggaagctgttgttgctgccaaggctgctggggatgacatggttttggtcaactaggtaatataaccaacctttccacttcatttatttgttagtgcttgttgtttttagtcttgtaacctaaaattgtactacttttgttctcggctttgttctagcatatctgtgagatgcattgccaccttttgtactgct

SEQ ID NO: 297353 - DNA, 418 bp, Zea mays
cggacgcgtggggacaagctagctagctagctgtacagcagaatgcggtgcgagccccgtagctatgacaaggtcgatcgaatcgccttttcagcaggcgacagcgctatttgtccggtggaattattccggccgtgtctcaaagccttccttccgtacgtgtcgctgcaggcaggtgatggagcagttcgcatcggagatccggaagctgtcggagaggctgctggacctgctgtgcgagaacctgggcctggagcccgggtacctgaaggcggccttcgcggggtcggacggcccgacgttcggcaccaaggtgagcgcgtacccgccgtgcccgcgcccggacctcgtcgacggccttcgcgcgcacaccgacgccggcggcatcgtgctgctgttccaggacgaccaggtgagc

SEQ ID NO: 297354 - DNA, 356 bp, Zea mays
ggagaccatcgccgagatgaaggtcgaggtttagggcgccgcggaggacccggacacctcgaccgtgccggcgacgctgatgccgcactaccccaggccggacgcgcgcgaggcggccacggcgcggcacatcaccatgtacgagtacaccagggccggcacggacgagccgacgcacctgtacctgaacgcgcgctcgtacatggacccggtgacggagacgcccaaggaaggcacgtcggaggtctgggaggtgatcaacctcacggacgacaaccatccgctgcacgtgcacctggcggtgttcgcggtgctggagcagcggtcgctgcgccgcgtggacgagttcagggact

SEQ ID NO: 297355 - DNA, 435 bp, Zea mays
gtttaaggacatcaacaacaaccacatcggtttcgacatcaacagcatgacctccgtgcagggcaacccggctggtttcttccatgatcaagatggaaccttcgaaaacctgacactcagtagcaaagaggcgatgcgggtgtgggtggagtacgatcgagagaatacacagattgacgtcaccatggctcctctggccatagtcaaacctaagagaccaacagtgtccactatccaaaacctctcagacgtgctcaccgacgtggcatacgtcggtttctcatcgtcaacgggcaagatccatacgcaacactatgttctcggctggagcttcgccatgaacggccctgctccgtccatcgacctgagcatgcttccaaagcttccacggcatcatcacaagagtcgacgatcctgggtgttagagacagttct

SEQ ID NO: 297356 - DNA, 310 bp, Zea mays
cgcgcgcgcccgacggtcgatgtcttcatgttagtcgacgcgttcctgcttatcgtcctgccttctgcgctcatgatgtgtcttgaatggtggtcgtttgacctccttactctcatgtcagggcttgtacccaacccagagctgcagacctcatggctttcgatctgtcatacgagtgtaacattactcttcactataccttgtggccttggagctgctgtaagcacgcgagtggcaaatgagctgcgcgctgggtaccctgacggagctcgatcagcactccgcgtggtgctgaccatggcggggatcg

SEQ ID NO: 297357 - DNA, 405 bp, Zea mays
cccacgcgcacggagtgtcccttcccatatttctaacgtgctttgggtttgacgcacccggggtcgttcgtcgagatgccgaagccggtcacgaagctggaatacatcatgactgaggaccttgaccgcaaagagcgacctgtacaattatcggcgtgctgtactacaacaacatgatggtctggaacgcatcgatcggtctcgggggtccaaggagcagagactgtgggactgtgacacatacctagctgtatacagaagattagctatacacgccatcgactgagcgatttgtgtgtacgatgtttgatccaaatatatatgctgatggaagcatcttgttgcatatcatagacaaccagacgagtcctatatacgatgttgctgcatttttaacttctatcc

SEQ ID NO: 297358 - DNA, 320 bp, Zea mays
  unsure (1)..(320): unsure at all n locations
gcgaaaggctcccaaccctacccacagcccttacttctatgcacgctcggcgacggcaaaagcccgttttttgatgggcaacgcatgcatcgacgccctcagatccaattacctgctcatcttcaagcacgccgagttccagcgccacgactccgagtacagcgccagcgccagcgccgacgactcgtccaggaagcccacaccgtccgccaccacggacgcccacgcgccggttccgtccgccgtcgccattatgttcggcgcggctggcgcgacgccggacctcgggtcngggctcggccacacaacccccaaccttc

SEQ ID NO: 297359 - DNA, 418 bp, Zea mays
cggcgctggacgcggcccgccgacacggggtcggcgctgcatccgcgcggctgtacccggtgttcgtgctcgatccgcgctaccttcgcccggatcccgtcgcggcgtccccaggttccgcgcgcgccggggtcgcccgcatccgcttcctcctggagagcctcagcgacctcgacgctcgtctccgccgcctagggtcccgcctcctcctcctgcgtgcccgcgacgacgtcgccgacgctgtctgcgcggccctaaaggactggaacattggcaagctgtgcttcgagtccgataccgagccgtacgcgctggcccgcgataagaaggtcacggattttgcattggcgtccggcatcgaggtgctcacgcccgtcagccacaccctcttcgacccagaagaaattataaagaagaa

SEQ ID NO: 297360 - DNA, 413 bp, Zea mays
  unsure (1)..(413): unsure at all n locations
gcgaaggcgtccgtgaccgaccgaccgaccgtagcttcatgcgccaggggcggcggcttcaccccgtcgtttgatgggcaacgcatgcagcggcgcccttagatccaagtacctgcacagcttcaagcacgccgcgtcgcagcgccacgactccgagtacagcgccagcgccagcgccgacgactcgcccaggaagcccacaccgtccgccaccacggacgcccacgcgccggcgccgcccgccgccgccatgaggcgcggcgcggctggcgcgacgccggacctcgggtccgtgctcggncacacaacccccaacctccgcgacctctacccgctcggcatgaagctcgggcaggggcagttcggcaccacctacctctgcaccgagctcgccacggggatcgactacgcct

SEQ ID NO: 297361 - DNA, 282 bp, Zea mays
accgacgcgtccggtttgaatgaagaagctattctgcccgctcttctttacagtggccatgctgccaacatattgcattggtggtctcgagcttgtgtagaactttatcacaagggaactataatagaaatctatcgcatgagtcgcaagaatattcaacgtacttggcggattgatgactttgacatgttcaaaaagagaatgcttactgattggaatgaccaaacataaacaagatcaaccatgtttgttgataactcaggtgctgatgtggtccatgga

SEQ ID NO: 297362 - DNA, 424 bp, Zea mays
ggaaaaaccgggccgacccaagcgttcgaaccgggagacccaaaaggtgaaaaaagagtgtttgagtgtgtgtaatcgttacaaggatagggggtgtgcctgcgcgtgctgtttaaccaaatcaagtagaatcctgtccgaatccgacctaagggatggcaaccggtagtgaagcctcaaacgcagctgaggctgtggttgactggcataaacacgacagcaagaggatgctccatgcggtttaccgtgttggggatctggaccgcacaatcaagtactacacggaatgctttgggatgaaactgctgaagaaaagggatgttcctgatgagaagtacaccaatgcctttcttggctatgggccagagaacaccaactttgcagttgaattgacatacaactatggcgttgacaagtatgacat

SEQ ID NO: 297363 - DNA, 195 bp, Zea mays
accttcactgaggcgaacaccaatcaaagaagttaaattactcttatttggcaaacaaatactaatatcttgtcactggcttctactaatatagatggtgcgactcattccaatttgctggctgataattctgtgaaactttccgtgaagccattaatcggcaccatcattttattgcactacaaatgttgctca

SEQ ID NO: 297364 - DNA, 350 bp, Zea mays
ggcccgaggcgggggcctgggcgggcaaggcagtgaacgtgccgttttttttcttcggcgaggcccgcgtgacggggcggaagacggcggcaaaggcaaagccggcggcaagctccggcagcccgtggtacggccccgaccgcgtgctctacctgggcccgctgtccggcgcgcccccgagctacctgacgggcgagttcccgggcgactacggctgggacaccgcggggctgtcggcggacccggagacgttcgccaagaaccgggagctggaggtcatccactcccgctgggccatgctgggcgcgttgggctgcgtgttcccggagcttgtcgcccgcaacggcgtc

SEQ ID NO: 297365 - DNA, 441 bp, Zea mays
  unsure (1)..(441): unsure at all n locations
cgtccgcccaggcctccnntcccttttaacgaacngtacatcttagtggttgaggggaagaatagaagcatggtttacattaaccaaaagttttccaacattacattanttccaacattaaatacggatgtatcataaacataaagcaagaggatgttgaatgggctgccaatctggcacatgcccatgacttcatcacattactccccaatggatataacacacttgttgatgatgatctgctcactgggggacaaaagcatagaattgccattgctcgagccattcttatagaccctacaattctcatccttgatgaatcaaccagtgcattgtatgcataaagtgaacacaatgttaaggctgtgcttcgttctgtcaaaagtgatttgtcatctataacaaccgtcatagtaattgctcatcgactttctacaattc

SEQ ID NO: 297366 - DNA, 435 bp, Zea mays
ctgacgcgtgggccgattgggtaaatgagttctattctggggatttctggtaccatgaagatagagaggcatactttgatgatgcggaccactaccggatgatacggaccatgtgtcaactttcctgtaatgtttgtgacaacgcacaagatcaggttgctcaagcaaagcgcaaaagcaagttcaagagcattgatcaactgaagggacatttatactgtgtgcataggttgcacatgtgcaatctttgtttggaggagaggaaggtgttcatttgtgaacaaaaggtttatttgaagtcacagttagctcatcatatgaaaactggcgactctgaattggatggctctgacgtagagcgcaatggttttgctgggcatacaatgtgtgagttctgcagaaattcattttatggagatagtgagctttacatgc

SEQ ID NO: 297367 - DNA, 262 bp, Zea mays
  unsure (1)..(262): unsure at all n locations
gggacgagttncatttttttctcacattggttatcacataaacaanggngaaagctggtgcgattctttttaacagggatggtgccaaagacaccatctttttcacccaaatttgaaatggccctaccactgtcaccggaagtatctcttgcctcaaaccttaccttcattggtttcatgtgcatgcgcttttttacaccaccaaatgcctcctttatacttgtccacactacaatcctgcgaacaatgaacattgagcacc

SEQ ID NO: 297368 - DNA, 359 bp, Zea mays
cgatcttcaagtctcgctacgtttcagtgctataaaaaaagcagccgcaatggcgagcagcacgcatggccctctcctccacggccttcgccggcaaggccgagaacgtgccgtcgtcgtccgccttcggcgaggcccgcgtgacgatgcgcaagacggcggctaaggccaagccggcggcggcgtccgggagcccgtggtacggccccgaccgcgtgctgtacctgggcccgctgtccggcgagccgccgagctacctgacgggcgagttcccgggcgactacggctgggacaccgcggggctgtcggcggacccggagacgttcgccaaagaaccgggagcttgtaggtgatcccac

SEQ ID NO: 297369 - DNA, 328 bp, Zea mays
tctagatcgcgaggccgccctttttttttttttttttttttttttttttttttttttttttgttttttgttaaaaacaggagcaaaataagacaattattttttattacaagaagaataattgttgttattcccttcttatttccacacccgcgttggaacagtaggagcctaaacagttgccttggggggcagggcgatgatattaagtaattaatgagataccggatacgcaagggccattccattgggcatgacggggggggggaacattaacttgctcatgttacgcaactttcttggggagcccatgatgagggtaatgagga

SEQ ID NO: 297370 - DNA, 332 bp, Zea mays
ctccaagggctaagtaccttaggtgcgcaatacagaatttgttgtagtgtgaaaagcggatgcctccctcccttttctccccctttgatgaatagtataagcacaggagataccttcacgtctagttcgcttttgactcgattaccctctttgcaaaagaaggcaaacagaatgatgccgtgtggatctccgaggccgccgccgctgcagtgtccatagccaccgcaggagactgagatggggggttttgtcaagacccacaagagcaatgcatacttcaagcgtttccaggtgaagctcaagagaaggcgcgctggcaagacagactacag

SEQ ID NO: 297371 - DNA, 176 bp, Zea mays
aaatagctacatggcgaatctctcctaacaggcacagatgtactaggaaaatgatgacttcatggagaaggtaaccaaaactgttcactctgatgagctcactgtataagaacccaaccttctgtcttttgcatacaaaaacctcattggaaccctccgttcctcatgtcacatca

SEQ ID NO: 297372 - DNA, 345 bp, Zea mays
  unsure (1)..(345): unsure at all n locations
ctcggccnctccgagttcatttggacgcatctactgcttttctggaagacagacctgacggagagactggcagacattatgcgagcgcatcgcatggcaaccaggccggcttttgacgggaagccttggtagctggatgcgcaccagacgatgtccaaggacaagactgttgtcaaggtcgagctggacaggtggggcgaggcagtgacctaccccttcaatggcatacacgtcgtcgacacgcccacgcttgacgtcctcaagcaagaaggtccggagagatagaggctcatcaatgctcaccgcacggttgcggcgctgtcgactgactactacgtggggaac

SEQ ID NO: 297373 - DNA, 386 bp, Zea mays
gaaaaccgggccgacgacgcgtacgcagaggtgggttggcttctcctcccttactttttcgtgttcaggttctggttcgtgggcgagagggtagagatggcggcgtccgacgttgagtaccgttgcttcgttggctgcctctcctgggccaccgacgaccactccctcaacaacgccttcatcacctacggcgaggtcctcgagtcgaagatcatcctgtatcgggagacgcagaggtcccgcggcttcagcttcgtcaccttctccactgatgacgcgatgcgcatcgccatcgatggcatgaacggtaaggagctcgacagccgcaacatcaccgtttacgaggcccagtcccgctgcggccgtggaagcggcggtggctgata

SEQ ID NO: 297374 - DNA, 250 bp, Zea mays
gatttaaatcggggtcggcggcttctgaaggatcggcaggctccttgccagggtcgccctccagaacgaggatgttcagctcgttcgtcgtcaactaccccttcatcaccacggactacatgacctacatgttcaagtacgacaccggccacggtctctggaagcacatcgacatcacactccaggactcccagaccctttttttttgtgacaagccggtcaccgtctttggcatcatgaaccctgagga

SEQ ID NO: 297375 - DNA, 404 bp, Zea mays
ctcagttttacaaagatattaactggtttctacacaagacgagcaaatgtacacgagtagagtggctaaacgtcacaagctggacgcctacacctccagcgacaactccgccatcgtcgccacagattccatcaagaacaccgtgtatgtcaaggcgaaagagtgcacggaagtggtgtccatggaggaattcgccgtgattcttggaaggcatttcacctcgctgtaccctcaggttacagaggccacggtgactatcgtggagcgcccatgggagcgtgtgactgtcgacggaaagcctcattcgcatgggttcaaagttggtgttgagaagcacagcacagaggtcattgtaaaaaaatctggaagcctgcttataaattctggaattcaaggatactcgc

SEQ ID NO: 297376 - DNA, 214 bp, Zea mays
  unsure (1)..(214): unsure at all n locations
ccacctnncctaccacctcaacaacaactcatggtcctacgccaccaacttcgtgcccggcaagtgagggggtcggatgcgccaccgtccaccgacaccggccaccgctgtctatatctaggagttctgatgcacgttagcgctcactgatttcagtttgtaccatgatgtaaattacttaccgtaccactgttcaatcggcatggaataattg

SEQ ID NO: 297377 - DNA, 321 bp, Zea mays
  unsure (1)..(321): unsure at all n locations
acacagggcagcatggatacactgatttctggtgggcccgctcctngcgctgccatcgcggccttctaccaccagtacatcctccgggcgggcgccatcaaggctctcggctccttcaggagcaacgcgtgatgagcagagctaaagaaaggccttcgctggactgcgtgctggagcaacggcgatcgatcgatctagcgtggggagaggaggataggcgggcgggcgcgcgagggaggagaataagtttgtgggatttgggtctcgttaattaccccggccctgtaatcatcaatcaccatgtgtgcagtgtgcgtataa

SEQ ID NO: 297378 - DNA, 290 bp, Zea mays
gttattagcgaaaaagtttacatttgggccttgggttaataaccctttccataacacaaagtttagtgtgtacaaataattactcaactaaacaacctctttatatcatcataacattataattatctctatttagctcccaagaaaaatgtatctactctatcttctaatacttctatatgcattccttaccactatttctattcacttcataaagtattagtatacactcaactaattaataaataatatatacataacatgaaatctcttaatattttcaacaaata

SEQ ID NO: 297379 - DNA, 344 bp, Zea mays
ggaaaaccgcggccgacgcacgcgtccggcgagagactggcagggtagtttaaaagtttatctaaccctagcatccgcggcgctaggggtcgggggttgcgagggccgcggctgttacacaacggaggacggtgaagtggttcaacgacaccaaggtcttcggcttcatctgccccgaggacggcagcaaacatctcttcgtgcaccagtcgtacatcaagtcggacggcttccactcgctcgcggacggcgatgatgtcgagttttccatctaccacggtgactacggccgcactaaggccgtcgacctgaccatccccgacggatcctttctcaggggctgc

SEQ ID NO: 297380 - DNA, 295 bp, Zea mays
  unsure (1)..(295): unsure at all n locations
cgccctagcgacgccgggctacttaaaacacgaagccgagatattacaactcancctctcctacctcacgcccctgtcactgaggtgcgccgtggagcttggcatccccacggcgatctaccgccatgtcggtgctgcctcagccgctgagctggtcacggcgctgtctctcccctccactaagctgccgatcctccgccgcctgctgcggctcctcaccgcgtcaggcgtgttcaccgtctacaagcagagcacttatgatgagcggtaccgcatcagccccgtttcctacctc

SEQ ID NO: 297381 - DNA, 368 bp, Zea mays
cgcgtccggaagaataactcatcgtcgtttctgcatttcttctctgtagcgtgagatgtggaaataagtaaagtcaccttgggatgaacaacccattggacggatcgagctggtactggcacactcgatccaatattttagctagctagcaagcaaagcaagccttgagcttgagcggcggctagcgcaatgggaggcgtggcgtcggagctggtaggagccaccatggagaggcagagcaagaagaggaagcagttccacacggtggagctcaagatcatgatggactgcgacggctgcgagctcaaggtcaggaacacccttgcccgcatgagaggtgtggagtccgtggagatcaaccggaagca

SEQ ID NO: 297382 - DNA, 349 bp, Zea mays
cgggccgaccgcacgcgtccgatttcctcgtggctcgttcgcgcgctgcttgccatacacgctccaggctctcgtttccgggtaggcgctggtacaagcggaagcagcagtagcgtgaggcatccccatgccgggggcaatctcttcctcgtcgtcggcttttctcctccccgtcgcgtcctcctcgccgcggcgcaggcggggcagtgtgggtgctgctctgcgctcgtacggctacagcggcgcggagctgccgttgcattgagcgcagcggggcccgcctcatgatggagcggcgtcagtacgcgccgcatcggcaccggacgggggcgaaagcgaggaggcagcg

SEQ ID NO: 297383 - DNA, 383 bp, Zea mays
aagaagcatgcggacggaagcctccaactaccttcagcccgggaattaaccgcctataagcgcaagactctaagggggccacctgggcattgttacaggccgcgggggtcccctgagatcacataaacaatggtgaaggctgctgctgtgcttggtagcagcgatggtgtcaagggcaccatctttttcacccaagaaggagatggccctaccgctgtcaccggaagtgtctctggcctcaagcctggcctccatgggttccatgtacatgcacttggtgacaccaccaatggatgcatgtcaactggaccacactacaatcctgcgagcaaggagcatggtgcaccaaaagatgagaaccgccatgctggtgatcttggaaa

SEQ ID NO: 297384 - DNA, 357 bp, Zea mays
aactggcgaagatgagaatgttcaacttattaaaatgtttcaacaccaaactgctggggaatatcgtatcatgatgggcaccgatgtgcgtattcagcgagatcctttggccatgagaatgcgggaagaccagatcaaacagatttggggcggtgatcctgtctatccaacaattaattatgttcaggatcctgatgaagtgattgactacagaggtcctgaatttcatgagcctacccctgaagttgtaccttacctgatggagcatgggataatgatcacaaaggaagagctatatgcacgtctgaatgaagagagagaggacgtcaatcaagacataacgtatattcctgaagc

SEQ ID NO: 297385 - DNA, 269 bp, Zea mays
cactggctctcataatattataccgcagattttctaccgctgctgagcggaagccgcacggagccatgtcctacggtgagcacggctgcacctacaccgctatcatcctcagccacgatagtgtcggcataaccgcccagaagaactccacgatcgggaacgcggtcaacatcaatgtagagtgctactgaccgggcctattcgacaagctcctgaagaagcgcaacgtctaagacctcatcctctgcggtgcatctgcgtgcggagct

SEQ ID NO: 297386 - DNA, 356 bp, Zea mays
aaaaccggcccgacgcacgcgtcggctctttctccctatatttctgccttacgatcccgttcctgcatcgcggaggagatggccgactccagcacgccgctcgcgtcggctgatgcgctgctactagctgctgctcgcgccgctcgccgaagagggggacaagtcgatcggctgctaccatgagcggagcgaggaagaggcgcggcgtatgtacgccgagtggatagaagcgcacggccggacctacaacgctctcggtgaagatgagcgcaggatcgaggcgatcaggtgacaacctcacctacttggacgcccacaacggctgcgtcgacgcgggcgtacactaattacgacta

SEQ ID NO: 297387 - DNA, 298 bp, Zea mays
  unsure (1)..(298): unsure at all n locations
cggacgcactcccaagccagtactgagncctacgattagacgcatgcaagtggcaagagacgaagcggtcgacatggctcgtacgcaatctgccgtagcggtcgacgaggtggccgcggggctgctgctggcagcggcggcgacaacctcggaggccgtcatcacctgcgggcaggtgagctccgacatcgcgccctgactgtcctacgcccgcggcacggggtccgacccctgcgagtcctgctgtagcggcgtgaagaacctgaagagcgccgtcagcaccgtcgtcgacaggcgc

SEQ ID NO: 297388 - DNA, 388 bp, Zea mays
  unsure (1)..(388): unsure at all n locations
ggggcccgggcccttttttgtgtgcccccttttgtgacactttttccggcccagaccaagcggcaatggaccccgtcgccacatgggggctaaccccgttcgcgggcgccgacccggagatctacgacctcctggagcgcgagaagcggcgccagcgtcgcggcatcgagctcatcgcctccgagaacttcacctccttcgccgtcatggaagcgctcggctccgcgctcactaacaagtactccgagggcatgcccggcgcccgctactacggcggcaacgacgtcatcgacgagatcgagaacctctgccggtcacgcgcgctcgctgccttncgccttgacgccgcgtcctggggcgtcaacgtgcagccctactcgggctcccc

SEQ ID NO: 297389 - DNA, 417 bp, Zea mays
accttccgggttatccaggccaaaagggttcacacttacctaataaaaagaccaaaagttgggttcaacacaagagcaaaggagcaacagaaggcttctttggtctggcgcaccggactgtccggtgtgccaccggacatgtccggtgcaccaggggactccaacttcgaactgctcggcttcgggaatttctagagggcactccgctaaaattcaccggacagtgtccggtgctccaagggaggtcgtcctcaggaactcgccagcctcgggttttcactccagccgctccgctataattcaccggactgtccggtgtgcaccggactgtccggtgtgcaccggactgtccggtgcatctgcggagcaacggctacttcaggcgccaacagctacctgcagcgcatttattgcgcg

SEQ ID NO: 297390 - DNA, 372 bp, Zea mays
gttcgcgagcaagtacgtgggtccccgaggtactgctgcagcaccatttgctgaaacactgccgggcatcgtcaggatgttcgcgagcgagatgaccgtcgcctccgcatggatccacctcctagcagtcgacctcttcgcggcgaggcaggtgtaccacgacggtgtcaagaacaacatcgagaccaggcattcggtctcgctgtgcctgctcttctgcccggtcgggatcctggctcatgtggtaaccaaggtattggcaggggcagctggccgctcacattgatgattggaattgagtggttgtatctaggattccgtttgtttagctggtggagtttatgagatctggatatgaataaagcttgttca

SEQ ID NO: 297391 - DNA, 272 bp, Zea mays
  unsure (1)..(272): unsure at all n locations
ttccagaaccgcaagactctaaaagcggcactttacaaggcttcctgccctcttcaatcncctgatatcacataaacaatgcttaatgctgttgctctgcttagtagcaccgatcgagtaaaggacaccatttttttcacccaatatgaacatatccctaccgctgtcaccggaagtgtctctctcctcaagcctgacctccatgagttccatgtacatgcacttcgttacaccaccaatttattcatgtcaactgcaccacactacaatcc

SEQ ID NO: 297392 - DNA, 400 bp, Zea mays
agatctccaatggccgccgcacccgtcgctccgccgctagcctccacggacgacgagatcgtctacgagtccatgccctgcattcgcgtctacaagaaacgcgtggagcgctacttcggtaccgagttcgtcgccgcctccacggacgccgccaccggcgtcgcctccagggacgtcgtcatctcccccaacgtctccgcgcgcctctacctcccccgcctcgacgacgagagcgccaagctccccatcttcgtctactaccacgggggcgggttcttgctcgggtcccgtttcaaccccaccttccactcctacttcaacaggttcgcgggccttggcaaccgtctcgtcggctccggcgagtaccggctggcccccgagcaacccggtcccggcggct

SEQ ID NO: 297393 - DNA, 232 bp, Zea mays
  unsure (1)..(232): unsure at all n locations
aaggaangggccgaccgacccatgcgtgcggatacgcgacattaccgtgttcaccatttaggaggcgaaaccatggacaaacagtattgggtgaatctttgcgtggacaagaagacttgcccacaagacatagattgatgacaaagctagactacttgacttcacccacaaactagaagctccctgccttggaaccccctagtctgaaatgataaccaacgaccctgcgctt

SEQ ID NO: 297394 - DNA, 382 bp, Zea mays
gaaggatacgaaaggaaccatggatttcttcgtcggcggcggcggcggtggagcgcaggtgaagggtatggcgacgcacgggggccgctacatgctgtacaacgtgtacggaaacctcttcgaggtctcctccaagtacgccccacccatccgccccatcggtcgcggcgcctacggcattgtctgcgcggctgtcaactcgcagtcattggaggatgtagcgatcaataacgggggaaattcgttttaaatccatttgccctccaaacgggcccgtaaaacttttagcggtttaagggagtaaaaggtgttgaaaaccatcttgccttaaaagatgtaatttggcccccaactagaaagaactttaatgacgtgtacaatt

SEQ ID NO: 297395 - DNA, 412 bp, Zea mays
gacgacgcgtccggattgctttcccgaccaccttgcgtgcttgctcctgagctctcgaggcgcaaccacaacttgccgactttcgacgcccctacgccacttgctcaaatctagcctcgtcgattgcttccccagtttaattgatctacaagcttcagaacatgttcaagaatacattcaagcctgggtccctgtccattcttaatagcctcggacccaacccattgcaaatttggataaaggaagttgtgaatggccccattaaacacccccaaaataaaattttccaacttattgtccttaaaatgtttgaaccaattttccagtcaatttacttaacatccccacttattcctctgcttcactttggaataaaccttccattcttgccttttatgtgaaaaaattttaa

SEQ ID NO: 297396 - DNA, 427 bp, Zea mays
  unsure (1)..(427): unsure at all n locations
gcgtccggggcggcaagcaaccacagtcggacctcgnggtgntctcctcctcccgtctataaattcccctgttttttttactccatatatgggggccatcacatccaagaagagggaagagcaccaaggaccttcagcgcccgttcaggatccacatctacccgagcgagttcttgcttgaccattttctgttcggaccacctacaaggctcttggagtaacttgccactctcaacaaacaaattttcatgtcttatcttcacattcaaaacccaacttccttccaacccttctcttaagccaaatcttgggacccttggtcaacaacctggtcaaaagactaccttcaccttcgcattcatcaaccgaattgttgcaagaaccttaccacaccccactgattgaaaaaagaatttaacttctgcca

SEQ ID NO: 297397 - DNA, 393 bp, Zea mays
cggccggagacgaagtgaccaacatacctctaaaatttttctagccccgcgccgccgccgccgccgtcgtggtttaggaaggaagcaggggcgccataccgaagtcgaagcgcaaccgcccagtgaccttatcgaagaccaagaagaagccaggtttagagcgcaagggcaaagtagtcgccgagataaaagatgctgtcgacaaatacagcagcgcctatgtttttacctacgataacatgaggaatcaaaagctcaaggacctcaaggagcaacttaagtcttttaacaagatttttcttgctggaaagaaaggtatgcagatagcgctggggcgttcgcctgcttatgaaactaaaacaagccttcacaaacttttcaaggttctttaaa

SEQ ID NO: 297398 - DNA, 317 bp, Zea mays
gacgacacgcgcgtgcgttgaacatatgttctgaagggcaagtttttttttaagggtctgctcattacagatagggcgggcattgacaggatctgggagccacaaaagccttgagggtatgattatcgctattgcattgcacaatcagtaaatgcatgaatggacatgaatatgatatgtcacaggtctgagaaatctttggatgatattgcttacttgatggaggcggaccacataccaacacctcggattgatgatgctgttgaacgaattctgacggttaagtatatttctggagtgtatgagcatccattttc

SEQ ID NO: 297399 - DNA, 299 bp, Zea mays
cacatcgagaacacgatcgagcacacaagcattaatactcgtttaggagaaaccacaaaccacgcaagccgtgaaagcatcatggagtacggtcagcaggggcagcacggccacggcgccacgggccatgtcgaccagtacggcaacccagtcggcggcgtcgagcacggcaccggcggcatgaggcacggcacgggaaccggcggcatgggccagctgggtgagcacggcggcgctgcatgggtgcggcagtccagctgcaggagacacagaccgcgatctgatcgctcgagtcagtc

SEQ ID NO: 297400 - DNA, 404 bp, Zea mays
  unsure (1)..(404): unsure at all n locations
cccacgcgtccgattcctccttcggatctcttattcagcgcagcgcangtgtgaaggaagggggacgcggaggaagatggggctcgcgttcgggaagctcttcagccggctcttcgccaagaaggagatgcggatcctcatggtcggcctcgacgccgccggtaaaaccaccatcctctacaagctcaagctcggcgagatcgtcaacaccatccccaacatcgggtttaaatgttaaacctgttaataccaaaaccttaacttcacttgcttggattgtcggggttaagaacaaaacaaaactttttggaagcattactttcaaaacaaccaaggtcttatttttggtggggacaagaatgaccgtgaccgggttggtgaaaccagaaattaacttcacaaga

SEQ ID NO: 297401 - DNA, 361 bp, Zea mays
aggtacgatcggacaccagctttgaccgtctgacgtgccctgcgctacggtcccgttgctacatacggcactagcccgcatgtggggggtgaggctgtcctacgtaacggccctatgactgagggcgcgcctgagaacagcgactacaccaagtgctacaacatcctgggggtgccgaattaggcgttcgacgacgacctgaagaaggcctaccgcaaggccgatatcaagaaccacccccacatggtcggtgaccccgagaagttcaaggagctcacacaagcctatgaggatttgagtgatccagagaaacgggagatttatgatcagcttcgtgaagatggcctgtatgaatgaatgg

SEQ ID NO: 297402 - DNA, 389 bp, Zea mays
caccggagtccgaatccgactcccctgccttcaccggcacccaggagctaaagccgtgggagcagcacgccgtggtgatcaaccttccgcgctacgactaccgcgcatcagggtccctcctcctccgttcgcattccggctttctcatcacgtgccccatcaagcgtgaaaaaagtgcaaccaatgaagccattcccatccttgaagagaaccatgtgatgtgaaaaatgcaattaagaaaagaaaactgtgctcggaggcatcatgaagtttagaagaggcagtaacgaatgggaatagtagccgtggttcagaatcaattggaagcaccggaaacacaagctcaccccagtccaaggtgaatgacaactgtgacagggcttcaaatc

SEQ ID NO: 297403 - DNA, 396 bp, Zea mays
tctagatcgcgagcgaccgccctttttttttttttttttttttttttttttttttttttggtttgtttttaacaagccaacgccaacactagatggcgatatattattttacagcttcttccaaatatagaagatccacgagagccttaagaaagcatccaacgtcatgtgctcagatccatggccatccatgaataccgcaagcacacccaccctttttatttatgacatcatcacgccaagccacgcaaggcacccacacacatacatatatgtatgtaaatatatatatatatatctcacggatagacttcgaaggcaacacgagctccaaattccttcaggatcttgtattcgctgaaccctgctttggtgaagagctcgctccattctttt

SEQ ID NO: 297404 - DNA, 436 bp, Zea mays
gagattttcatttagtaggtcaacaaaacataaactagaaacttttgttaatttgccaagggatgacttggatttgacaaattacattgccaataagaagacttcagagcgccagatctatgagctgtatgctgtgagcaatcattatggcaacatggcaagtggacattatactgcacacattaagcttgtggatgagaatcggtggtacaacttcgatgatagccatgttgcttccattgatgaagatgaggtgaagactgctgcagcttatgtgctattctatagaagggtcagagaacaagacatagcaaggggaactagtaatggatctcagttatatgcaaaaagaagtcacggatatagccatacgtaggctgatgattactgtggttcggtgcaagggggattctggaaatgacacccgcacgccttt

SEQ ID NO: 297405 - DNA, 425 bp, Zea mays
gttatcctcaattttcaatggctcaatcccattctggaaaagccggttccatgacttcaatactcctcctgtttatgcttcttatcagtaatacaggcacaacaggtgcacaatctggtgtatgctatggaagagttggcaacaatctgccatcgccacaagaagtagtttccctttttaaacagtacggcttccaaaggatgagaatctatgatcgaaaccatgaagtcctccaagctctgagagattccaacattgagttgctgctagatcttcctaacatcgacctccaatatgtagcttccagccaagataacgcaaacagatgggtgcaagacaatgtcagaaacttttggaatgtcagattcaggtacattactgtgggaaatgaagtgaagccttgggactcatttgcacagtttgta

SEQ ID NO: 297406 - DNA, 424 bp, Zea mays
caattctcaaatttatagctcgggaacagagaaggagaaatagaatggacgccattgattctgtgttcgatccgttgagagaattcgcaaaggacagcgtgaggctcgtgaagcgctgccacaaacccgatcgcaaagaattctccaaggttgccgtgcgtaccgcaattggtttcgttgtgatgggattcgtgggtttcttcgtgaagcttattttcattccaattaacaacatcatcgtcggatctggttaggatgaagggtactacaatcgcctcaggaattcaggttgtcaagcaaaagtaggcagaaagagttcccacatcaatagatcattctatgccctcaatcttagttctgtttttcattttttgttttttttctcatcttaagaagtgttacttactttagacgtaaaatttta

SEQ ID NO: 297407 - DNA, 322 bp, Zea mays
gcgctcgccttggagcacacgccgtcgctagcgcctgcggcctgcctcgcttaacctgttgcggtaacgtccgcccggcttgggtcttcatcaatcaccaagatatctggcatctacctggcactgcatctgatcaggccttttctggctttcttgccagaggtgcccagctctgatcttaagatacccttcagagaaaaaacattatccactgttatttgcttcttaattctcgtggtctgcaatcctctactactctataatatatattcatcaactgaatctgatcctatctacactatgccacttatcctcatattaa

SEQ ID NO: 297408 - DNA, 378 bp, Zea mays
ctctagctcaacaaaaacttttttcacacgtctcatgttttgaacttggggcgtgccgacaacgccagcttacgaccacaacttcattatttttcctgtaattatctttaaatacacgaatcttatctcgtcaatctcgtaaatgtcttacgggcattttcttttcacattctccgatgaagcataccaatctagaacgaaagctctgtctcttatccaatggcaacaacaatctgatgtccctaccatagcacagatctaacagtaccattcctatcacaggattatcaattctaccgcttcaaaatataatattgatctactgttcagcaatgattagttatatttacaatgcgcctataaaacttttccaaacaa

SEQ ID NO: 297409 - DNA, 278 bp, Zea mays
cccatactctttttaatggactggtttggccaatacattagtcagttatttcaaccatattctctctttcaattatgctacttttcatggtttcattaccaatcaacttatcagcaacatggcataaattataaacactcttcttggtggtcatggaaaattcatgcttgaaatgacacacctgctcttgactttttgttcaacgatggcaatttgtaacaaagatatttccagagttcaatgtctaatcccttcttgatttccattcacatttattt

SEQ ID NO: 297410 - DNA, 442 bp, Zea mays
  unsure (1)..(442): unsure at all n locations
cccgggcgcgacgcgcacgcgtaccgcacacacacacacacagncaagtggtnttccatanccaagtgctgtgtactatccacgcagctagactcagtttggcagcaggctagccatcatctcggatggagaagcaccaccacttcttcaaccaccacaagaaggacgaggagcatcccgccggcgagtacgggtactccgagaccgaggtggtcactgccaccggcgaggccgagttcgaaaggtacaagaaggaggagaaggagcacaagcacaagcagcacctcggcgaggccagcaccatcatcgcctgcgccttcgcactctacgagaagcacgaggcgaagaatgaccccgagcacgcgcacaggcacaagatcacagaggacgtctctgccgcagtggccgtctacgccggcggctacgtattccacgagcacca

SEQ ID NO: 297411 - DNA, 430 bp, Zea mays
  unsure (1)..(430): unsure at all n locations
aattctnctctatcacaactcactattatcacaacttctctctttctacacaaatgactttttctcaaagtgagcagcgccataacanacatcatcatcaactttaatgaatctaccatcttgcatccgtctgaggaggtggcgcgccacatgttctttaactccaacttgtacctgatcgtccccaatttccacacgcccatcgtctatttctatatgtccaatggcgcccccaactttttcaacggcaatgttattaaggaggcactgaccaacgcgctgatgcccttctacccaatggctgacctgctcctgctacatgacgacgctcgcctctacattgactgctacggtcacggcgtgcttttcattaatgccaacactggcgccgtcatcgacgatttctaggattttgctcccaccctttatc

SEQ ID NO: 297412 - DNA, 437 bp, Zea mays
gtgactcgttcttcttcgtcgttatcttcttcttttgtatgtctgtgtttgtattttctgtcaccttaaaatgtcttgctgcggtggtaactgtggttgcggaagcgcctgcaagtgcggcaacggctgcggaggctgcaagatgtacccagacttgagctacacctagtcaaccaccaccgataccttggtcatgggagtggcaccagttaaagctcaattcgagagtgctgaaatgggtgttcccgctgagaacgattgctgcaaatgtggagctaactgcacctgcaacccctgcacttgcaagtgaagtgttggatagctaaagcttcaagcagaaatggcccttacaaataatgataaaaactatatgtattttcaaaactccaaaattatgtagtatgtattatgttgcactctgatgttttgtgtctaaa

SEQ ID NO: 297413 - DNA, 349 bp, Zea mays
acgcgtccgatcaaaaccaatccgggtcttaaggacaggatacttattgcaaaaacaatggcgtgtctactgcggggctcctcggcgctcctcgtcgctgctactgtctgcgctgacggcgcctccacgttctactactcccaccccaacctcgcatccgctcgcgtcgccttacaaactaattatactgatattgaacttagcttatctcctcatataccacctaaaactgtctaacacattttcaaactcattcggctagtatgctacattacaaatcacttcttacggattgacaaagatttcatctcacaagacgctgatgctatgtaatgtcaaaccaccccta

SEQ ID NO: 297414 - DNA, 356 bp, Zea mays
ctccctacttcccagccaccccatggctcgcttaacccccacgaagtccaaatcctccaggaggcggaagccctcctcctcctccgccatgggcgccggagcggagccggatgcgatgtccacgcggcggccgaagcgtggcaagtcggtgggcggcgtcagcaagaagtccaagtcgggcgggttcgagtcgatggggctctgcgaggaggtgtaccgcggggtgcgccacaaagggtaccgcgtgcccacgccgatccagcgcaagaccatgccgctcatcctcgcgggcgtcgacgtcgctgccatggcccgcacgggctccgggaagaccgccgcattcctggtgcccatgc

SEQ ID NO: 297415 - DNA, 362 bp, Zea mays
ctccgctgggccaccagctttgaccgccgcctcccttcccctccgctactgctcctcctcggccgagtcccccgcaggagcggcggcggcggcggcgaggtcgtaccccacatcggcgagcggcggcggcaccgccggaggcaaaggcaagatgttcgggcgcgcgccgaagaagagcgacaacaccaagtactacgaaatcctcgggggggccaaatcggcggtccaagaccatcttaagaaaggctaccggaagggtggttataagaaccaccccgaccagggccgggaccccgagaaggtcaaggagcttgcacaagcctatgaaggtttgagggatccaaaaaaaccggagaattatg

SEQ ID NO: 297416 - DNA, 273 bp, Zea mays
gacttcctcagcaatcaatcagctttccagcgatcggcagctcctcgatcgtttcgaggctccaatccgcccggccgcctccgcctgttgccactagctaggtgatcgatcgaatggactgcggtggcgcgctgcagctcccgcctgggttccgcttccaccccaccgatgacgagctggtgatgtactatctcctccgcaagtgcggcggcctgccgctcgccgcgccggtcatcgccgaggtggatctctacaagttcgacccatggcagc

SEQ ID NO: 297417 - DNA, 335 bp, Zea mays
  unsure (1)..(335): unsure at all n locations
gtggtgattgggatcctggacacggggatcctgcccagccacccgtccttcggcgacgacgggctcctgccgccgcccaaggggtggaaggggacctgcgagttcaagagcatcgccgggggcggatgcaacaacaagatcatcggggcgcgcgcgttcgggagcgcggcggtgaactcgacggcgccgcccgtcgacgacgcgggccacggcacgcacacggccagcacggccgccggcaacttcgtggagaacgccaacatcatgggcaacgcggacggcacggcgtccgggatggcgccgtacgcgcacctntncatctacaaggtgtgcac

SEQ ID NO: 297418 - DNA, 300 bp, Zea mays
cggacgcgtgggtccacatggaggagctgcttggtgcagttgccaatgcgcgccaggtgtgggagcgctggatgtcttggcgacccgacacagccggctggaattcttacatcaagtttgagctgcggtacggggaggtcgagcgtgccagggctatctatgagcggtttgtagctgagcacccaaggccagataccttcatccgctatgctaagtttgagatgaagcgcggcgaggttgagcgggcacgtccggtgtatgagcgtgcaacagacctgcttgctgatgatgaggatgctg

SEQ ID NO: 297419 - DNA, 337 bp, Zea mays
attcgctcaccaacacatacctgacacagaacaccccacgccttgactcgctcggttggagtggagcgcacaggcaccggtcgtccaccagagagggagcggatcgagggggctcggcttgagtggaggagatggaccgcaaggatgtcggcatcctcgccatggacatctacttaccgtcctcctgcgtgcagcatgaagcacttgaggcccatgatggggcgagcaaaagcaagtacaccattgggcttgggcaaaattgcatggccttttgcaacgaggtggaagatgtcatctcaatgagtttgacggttgtcaattctctgctgaaaaaata

SEQ ID NO: 297420 - DNA, 310 bp, Zea mays
  unsure (1)..(310): unsure at all n locations
tggaaaaaccaaccgacgcgcacgcgaacgaaacgactaccctaattttaggacaagcngttgtatcaagataaccacatcctataacatgttggggttaaactactacacgtcacccatatccaaaaacattgacatctcaccaaactactcacctgtgctcaacactgacgacgcctacaccagtcaagaagttaacggtcctgactgaaagcccattcttcctcctatgggaaatccatacatctacatgtaccctgagggcttgaaggatctccttatgatcatgaagaacaaatacggaaaccca

SEQ ID NO: 297421 - DNA, 393 bp, Zea mays
tctatagcaaccggtccagcactttcacgctcagctccagcaatggctgcctccaccgtggcgatctcctccacggcgatggccggcacccccatcaaggtgggctccttcggcgagggccgcatcaccatgcgcaagaccgtgggcaagcccaaggtggcggcgtccggcagcccctggtacggccccgaccgcgtcaagtacctcggccccttctccggcgagcccccgagctacctcaccggcgagttccccggcgactacggctgggacaacggccggcttgcccgccaccccgaaaactttggccaaaaccgggagctggaagggatccacttccgcttggccatgcttcgcgcgcttgggtgcgtctttcccgagctggtcttccgc

SEQ ID NO: 297422 - DNA, 301 bp, Zea mays
  unsure (1)..(301): unsure at all n locations
cgcgttcgcgacaattaataaagcgcgcgcgcgctcttttagaggctcggagagctgantgagaccgcacatgctatggcgtccatgaccgtcctctctcatggcgttctgcccatcatgcgctccgccaacagggccaggacggccgtcgtcttcagggcgtccgccgaggcgcatgctcatgcgggccgccgcgcctttctttttctggttgccactggcatcctcggctgctccttttttttattcttttcacaccaagactgtcaagaccatcaagatcggatcctcaactcctccc

SEQ ID NO: 297423 - DNA, 333 bp, Zea mays
cttgctttctagtgccacaacttggttagtttaaaaatctccaatatttggagctcggcagcatcaacataagtgggacaataccccctgaactggggaacctgactaacctggtcagtttgcatctgtatatgaacaacttctctggcaatatccctgacagcctggtgaatctattaaacctccttttcctacgtctaaccaacaatactttgtttggtccaattcccgtattccttaaccaattttttcaatttttaaataactggatttttttaaaaaaaaccttttaaaaaaaattctcatatacatggttctttttaaatttttacc

SEQ ID NO: 297424 - DNA, 384 bp, Zea mays
gaagaagagctcctagagatacaaggaacacagttgctaagcaccacagtgggcgtgaaagagtatgtgcaaagcgaatttgatagtgttcaagcagagatcataagcacaaataaggacctgttcccaggtagcataacatttgatgatttcctatgggcatttggaatgctcagatcaagggtgtttccagagctccgcggagataagcttgctctcataccatttgctgatttggttaatcacagtcctaatatcacctcagaagggtcaagttgggagatcaaaggaaagggtctttttggtagggaactcatgttcttcttgcgaacaccaatgaatggtaaatctggacagcagatatatattcagtaccatctggac

SEQ ID NO: 297425 - DNA, 444 bp, Zea mays
ggtatccttctcagcaccagcaaccccagaatcatcaacagttattgctgaaatatattacgcaggatcttggattctctgggagaaaacctattgctgcgtctcttatatactactgtcttcttcattggagatcttttgaagaagcaaagacaactgtctttgacagtattatacaaattgtaaactcagcaactgaggctcaacatgatacgagaagcttggcctactggctgtccaacttatccacattgtcagttctcctgcaacgttcatttaaagccaccagggcaactgcctcaactccacatagacgaagaatttcctgtgaaaggatttttcaagccaatcaaacttcaagcagtggacttgcttgtctcagtgctcaatcagtggatggaggtaccgtgtttcaccaaattgaagcaaggtatccggcttcgc

SEQ ID NO: 297426 - DNA, 427 bp, Zea mays
ccgaggatttccttgctgctgcaaagttgttcttagcctcgggaaagaaggttaaagttccgacgtgtcttgtccctgccacgcaaaaggtgtggttggacgtatatagcctccctgtaccaggatctggtggcaaaacttgctcccagatatttgaggaggctggttgtgacacaccagcaagtcctaattgtggtgcttgtttgggtagccctcgtgatacatatgcacggatgaatgaacctactgtctgcgtgtccaccacgaacaggaaccttttccggcaagatggggcacaagggaaggcaaatctacctggcggccgcccttttttttttttttttttttacataaaacactcttttaatggggttgcttgcatgactttaaaggccaaaacaaaaaaaggtttacaaattaatatgaa

SEQ ID NO: 297427 - DNA, 410 bp, Zea mays
  unsure (1)..(410): unsure at all n locations
gcggaaaaaaagagtgtcacaaacaactactccctccggtttcctattagttgtcgtgttggagaaggttcgagtcaaacttataaaattttgactacaaataactatttcgttatttagttttggaacataatatttatatatgcaccaatttgtcataaagagnacttttataaaagtataaatgtattaagagttaatttgtattttaacaaaaaaacattggtcaaagttatattttggagaccatgtcgttgttctaaacgataactaatatgaaaccggagggagtatattttagcggaatgattaataatctaatggtatacatgacgtatgggcgtcttaagcaagccatgttcggaaatgcagaatcggcgcatagcctgcatcggcggacctggacatgt

SEQ ID NO: 297428 - DNA, 322 bp, Zea mays
gtcttctccttcccctccggttcgaattcatgttcgttaggttctccggcgttcgctttcgtgggtgagcgtatcgagatggcggcgtccgatgttgagtaccgctgcttcgtcggcggcctcgcctggaccacggactaccactccctgcacaacgccttcagcacctacagcgaggtcctcgagtacaagatcatcctcgatcgggagacgcagacgtcccgcggcttctgcttcgtcaccttctccacggacgatgcgatgccgaacgccatcgagggcattaacagcaaggagctggacggccgcaacatcaccgtca

SEQ ID NO: 297429 - DNA, 321 bp, Zea mays
tcacgatcccaacacgaacgagcacacaatctcgaatactcgtttaggaaaaaccacagtgcgtcgggccacgcatgcatcatggactacggtcaacataggcatatcggccactgttccacggtccatgttgaccagtacggtaacccactcggcggcgtatagcactgaacacgagttattacacacaacactgaatccaccatcagaatgggccacttgagtgagcactgcggagctgtcataggtgtcatgcaactccagccttcgaggaatgatcacaagatcggctgcatactgcatcgttccggcagctacagc

SEQ ID NO: 297430 - DNA, 319 bp, Zea mays
  unsure (1)..(319): unsure at all n locations
gggacgacccacgcgtgctaaagcaagccatgtagaggagggctttacctatggtcctgttcatggntggcgcgaggcggctcgtctgcaccggcgcctccttcactcatcatttcttgtgtatcatcataacccggcccatgttctagagcatgctgatacactcattcgacaagctgtnccacccctccttgtacacctactacgccttcatcgaggccaccagcatgttccccgtcttttgcaccaccggcgacaagcagactcgcattcggaagctcatacccttatatctccaaacgtcccactaaaccaccgg

SEQ ID NO: 297431 - DNA, 249 bp, Zea mays
aaaaaagcaatacatcattgtctgcaactacacagatttttctgcatacgcgcattgtgtggaagggggagcaggaagaccgaccacaacggccatctcaacctagatacacggtacaactatcgcttgcaccgtctgtcgctggactgtttaccttctgcacatacttaccgttgacaaccgagtctaccacatgggctgcttccgctgtcacctctgttaggacaccctcaagcttgccaactacaa

SEQ ID NO: 297432 - DNA, 301 bp, Zea mays
cacacaccagtacctaccccccttgttgtcttcatctatccgggccaccgatctaccagggcgggtgccaagtcgctgaacgcccgcctggacttcaaacatattctgcgtctgctgatcaccaacaagcatgggaagaagaagatcatgtttgacatgacactaataatgggcgttgtctaccagatattcaacactttcagcaacaacgccgacatcgacatgaacaagacggctctcgagctgacgcatgaacagttgcagcacctcatgacggtcgtggccaaccctatgcagttca

SEQ ID NO: 297433 - DNA, 401 bp, Zea mays
cggacgcgtgggcggacgcgtgggcggacgcgtgggcggacgcgtgggtccagggtaaagaggattgagaggaaggtgcgatcactcactccaacatctgacgagcttgcatctcttgatctcagagagggcaggaacgtggtaacattaacgttctcaactgcaattgttgggaaacagcaggttgattgccacatatatttatggagatggaatacacgcattgtaatatctgatgtggatggaactatcaccaagtctgatgttcttgggcagttcatgccactagttggagttgattggtcccaaaacggagttgctcatttattttctgcaataaaggaaaatggatatcagcttctatttctcagtgcacgcgctatttcacaagcccacatcac

SEQ ID NO: 297434 - DNA, 264 bp, Zea mays
  unsure (1)..(264): unsure at all n locations
ataaacaccaatacaatttatagtttatgacaaattccatcgtactacggcaggtgatactatccgccggaagaccatangaaattattcttcactgtttatccctcagaaaatttcacaataaaagggttattctgatcgcctgtacttttacgctgttcacaatacgtaccttgaagaaccttcttcatgcaatgcttttgttgtcaaagacaatgtcatctctaccgcagccatacaaggaacaatatcacctggcatcac

SEQ ID NO: 297435 - DNA, 435 bp, Zea mays
cggacgcgtgtgcttggaccggcctttcaagcagggcgagaccctgcggatggaaacggaggtggacatggacgccgagctgcgggtggccagtgactaccagcagcaggtcgccggggacgacgccgagcagaagaacgagaggaaggccatgaaggagctgggcctcgccagggcccgggagttgggctggcccaacacgtacgtcttcaccaaggcgctaggggagatgatgctggcgcgggagctgggcggcgtcgtccccgccgtgatcgtgcggcccagcatcatcacaagcatccataaggagccgctgccggggtggatggaagggaccaggaccatcgacgccatcctcattggctacgccaagcagagcctctcctgcttcctagccgacctccagctcaccatggacgtgatccccggggacat

SEQ ID NO: 297436 - DNA, 377 bp, Zea mays
caacctcatcttctacgcttctagagaactttcacctgctcatcacctatttcattcccaactacactctctccaatcacctcttccactttgaaaaccatacaattgaatcttctttgccttttatagtttcatactacatctctaaatcactctattatttcatcacttatttatatccttcttaccattacctaaattcatatataatcctcttttattataatgatcatcctcaccttatattctttttccttattaaaaacacttttcattttaaaatctatatcactcatctttcatattcaccttcaaatattttaatatatggaatatttacattcataaattttcatattcatctttttcaactattc

SEQ ID NO: 297437 - DNA, 449 bp, Zea mays
  unsure (1)..(449): unsure at all n locations
gaataacggggccgaccgacgcgtcctgtggactattgctttagcgactttgctgtttttggtcgnggcangcgccgggctgctctggttctgtttctccagctctcagcatttcttgtggagcatcatcacccggcccatgttccatatcatgctgagccaccgcggcgacagcgggtgccagggcgccttctacacctacgactccttcatcgaggccgccagcaagttccccgtcttctgcaccaccgtctacgagcagacgcgcatgctgtagctcgccgccttcttcggccagacgtcccactaaaccaccgttggatgggcgactgctccgggtggaccgtttgcctggggatactgccgggtgaaggaacagaacccgactgacccaccctactatggacgatgacccatacagcttactcatgagtacaactacatgctcg

SEQ ID NO: 297438 - DNA, 295 bp, Zea mays
  unsure (1)..(295): unsure at all n locations
gggacgcgnggaatcgagttggattggttttttagangttctttttgacatatganatggggacatcatgtgtgttacttgtgaagatgaacgtaagaagaaagcggatccatttcgtttaatcgcatcctcaatgatctcaaggacctgcataatgatcctcccacctcttgcatcgcatgccctgttgcctaaaatatgttctactgtcatgcgactattattgggccatcaaatagcccatacgctgtttgcgtatttttcgtcactattcacttttcaccggactacccat

SEQ ID NO: 297439 - DNA, 421 bp, Zea mays
  unsure (1)..(421): unsure at all n locations
gttcgtgttcaggttctggttcgtgggcgagtagggaagagatggcggcgtcggacgttgaggaccgttgcttcgttggcggcctcgcctgggccaccgacgaccactccctcaacaacgccttcagcacctacggcgaggtcctcgagtcgaagatcatcctggatcgggagacgcagaggtcccgcggcttcggcttcgtcaccttctccacggaggacgcgatgcgcagcgccatcgagggcatgaacggcaaggagctcgacggccgcaacatcaccgttaacgaggcccagtcccgcggcggccgtggaggcggcggtggcggatacggtggcgggcgccgtgatggaggcggctactgcggtggcggtggaggctacngcggtggtcgtggaagctaccgcggccgtgggggata

SEQ ID NO: 297440 - DNA, 265 bp, Zea mays
gcgacgagtactcctccttctacaagtctctttccaacgactgggaggaccacctcgccgtgaagcacttctcggtggaggggcagctggagttcaaggccatcctgttcgtgcctcgccgcgcgcccttcgacctgttcgacacgcgcaagaagctcatcaacatcaagctctacgtccgccgcgtcttcatcatggacaactgcgaggagctcatcccggagtggctgggcttcgtgaagggcgtggtggactcggacgacct

SEQ ID NO: 297441 - DNA, 338 bp, Zea mays
cgcgggctcaagtgctctgttgtcggtgtcctaaagactattgataacgacatcgcggtgagtgacaagtcgtttggattcgacactgctgtggaggaggcccaaagggccatcaatgctgctcatgtcgaggctgaaagtgcggagaacggcatcggtgtcgtgaagctaatggcccgaacaaccgctttattgggaatgaacccaattttacctagccggaatgtgaactgttgtttaatcccggagtcacccttctacctcgaagggaagggaggactcctcgagttcgtcgagaggcggctcaaggacaacggccacatggtcatcgtggtggc

SEQ ID NO: 297442 - DNA, 283 bp, Zea mays
cacatgcacaatcacaagctcactctagcaatttcttctgaggttgtccgccctaacgacacgcagcttctaatggcccaagccggacttatggcggctcagcctctcctacctcacgcccctgtcactgaggtgcgccgtggagcttgtcatccccacggcgatctaccgccatggcggtgctgactcaaccgctgagctggtcacggcgctgtctctcccctccactaatctgccgttcctccgccgcctgctgctgctcctcgccgcgtcgggcgtgttc

SEQ ID NO: 297443 - DNA, 316 bp, Zea mays
gaccggttctgttcgccgcaccgcaggtttcggcggcaagcaggtgtacggtcggcctgacggggagtaccgcgtcgccgactactccccgtggctgcagaggcccgtgcgggacgccaggtactggcgccccgcactcgcctgcgtcgtcgggtccgggccgtgccccaagatccacaactggactcccatggactaccttcagcacgacctcacgccgatacagtccggctgctgcaagccggcgacggcgtgccagtacagcgggggcgtggccgtctgggcgcatgacgaggactgctaccgctgggaacaa

SEQ ID NO: 297444 - DNA, 389 bp, Zea mays
ggcgtcgggggcgctctaatcggcggccccacggtgacgttggcctaaccggccgaaagatcatcagtggggcgtacggcggctggggagcccacggcggtggcgccttctccggcaaggaccccaccaaggtggaccgcagcggcgcctacgtggccaggcaggccgccaagagcatcgtggccagcggcctcgcccgccgctgcctcgtgcaggtgtcgtacgccatcggcgtgccggagcccctgtccgtgttcgtcaactcgtacggcaccggcacgatccccgacaaggagatcctcaagatcgtgaaggagaacttcgacttcaggcccgggatgatcagcatcaacctcgacctgaagaagggcggcaacaggttcatcaag

SEQ ID NO: 297445 - DNA, 434 bp, Zea mays
ggcgccgggaagccgcgccacgtcccttatttctatcaccggcacgccagcgtcctggaccgtgtcgtaggccaccgcgtcggcgaccacgagcctggcctcggagtcctccacctgcttcttgatctcggcggcgacggcgcgcgggttcacgccggagaagaccgctccggcggacatgatcccgaggctcaccacggggtacaccgccaggttcgggagcgcgaccaccacgacgtggcccctgcggacgccgatggaccgcagcgccctggcgaaccgcgccacgtcccggaccagctcgccgtaggtgtaggaccggccacccggcgcggcctccacgagcgccgtcttgtccgcgtaggcctcggcgtccgccagcacgaactccggcacggtgacgtcgtctggtacggccacgggcgggaaccggc

SEQ ID NO: 297446 - DNA, 374 bp, Zea mays
  unsure (1)..(374): unsure at all n locations
cgttacactaacaatttggactccngcttttnattttccaaaaacancacatgctatgtggtcgcttatatcatcaatgaaatgctatcaccacttctttggtctggagtatcatcttcatttattcaacattcttcttgttccttatttcaatattgtaccaatgtaaaacaagatctttaatatatttcaatctacactttttttgtcatcaccttatacttccactgatgtttattatgctcctattttccctgtccttggacatgactatttccacaactttaactggcaatatactaacttttcctgatttgttccatcttaccctttaagaattacttaccctttttcaatcatcaagcacttctctt

SEQ ID NO: 297447 - DNA, 374 bp, Zea mays
  unsure (1)..(374): unsure at all n locations
gaaaaacggcccgacggacgcgtccggtttagaacctctaaaatttcccccactcgctagtcgcagcagcacctgnagcagccatggggggccatttaaccgggagcaaggggaacaatcatccagccggtcgcaaggcaagcggccccaggaagaagtcggtgacgcggtccgtcaaggctgggctgcagttccccgtctgccgcatcgggcgctacctcaagaagggccgttacgcgcagcgcgtgggcactggcgcccccgtctacctcgccgtcgtcctggagtacctcgtcgtcgaaagtcttggaattggcaaggaacgcggcgaaagacaacaagaaaactcgcattatcccgcgccacgtgctcct

SEQ ID NO: 297448 - DNA, 227 bp, Zea mays
agctagcattacctctccttcacctcattattttcaccatctcgaacactcccacctgcgaggggggcctttatcaagtacacccagcagctgaacatgcgccccaaccgctccattccctactgcatccctatgcgcactgacaacaccatcatgtacaacgccaaccgcaggcactggcgccgcaccaacctcatcttctgcgcctccccattggtccactactg

SEQ ID NO: 297449 - DNA, 296 bp, Zea mays
ttgaaaaaccggctcgaccgcacgcgtccgcggacgcgtggggctcatgtgaggagaactatgatcagtgagcgaatccgaaagctgcaagggggcgtttcgaacatggacaagcaaaccaacacatctgacatgctagatttggctgtcgactacatcaaggaactccagaagcaggttaaggtaagcaatccagtaagttctctgcagatgagcacttgtcaggccctgtttggaacctaggtctaatagttagccggctaacaaattgttagctgggctgagccaactaatga

SEQ ID NO: 297450 - DNA, 380 bp, Zea mays
gatggcttctcctccctttacggttcggcgttgttttcgtgaggttctccggggttcggttgcgaagggttagcggatcgagatggcggcctcagatgttgagtaccgctgcttcgtcggcggcctcgcctgggccacggacgaccactccctccacaacgccttcagcacctacggcgaggtcctcgagtccaagattatcctcgatcgggagacgcagaggtcccgcggcttcggcttcgtcaccttctccacggaggaggcgatgcagaacgccatcgagggcatgaacggcaaggagctggacggccgcaacatcaccgtcaacgaggcccagtcccgcggcagccgtggaggccgctgctgcggctacggtggtg

SEQ ID NO: 297451 - DNA, 380 bp, Zea mays
  unsure (1)..(380): unsure at all n locations
cacacacccgagcatataacagtgacagacactacactatggtgagcgccagaatcgttgtcgggctggccaccctcctatgcgctgccgccgcagtcgcgtcgtcctgggaggacgacaaccaccaccaccacgggggccacaagtccgggcgatgcgtgcggcggtgcgaggaccggccctggcaccagcgtccccggtgcctggagcagtgcagggaggaggagcgggagaagcggcaatatctgatcnngcacgaggccgacgaccgcagcggcaagggttcgtcggaggatgagcgcgagcgagagcnncttgntgtataagcataaggaccgatgggcgttcgtgttcgaccggcgcagcttccgtcgcgtggt

SEQ ID NO: 297452 - DNA, 268 bp, Zea mays
gccagacccacgcggacgttataactttcaccgttccatttaccttttacacagcaacccaacgaaggaggggccgggggccatccacaagcagtcgctgcttaacccaccgccaattatgtacagctacaaccagttccgcgtcactttccactctgaggtgaaaaaccacttcatccccgacgccatcatcgtcaagaacaaccacgccttctagttcttccttaagaccatcaccctcaacaacgtcccctgccacgacaccatc

SEQ ID NO: 297453 - DNA, 387 bp, Zea mays
gagccacgcgtgcgaggtgcctgctacattacacctttgcttttatccatctttccggttcagccgcgtgaggtaagttaacaagcaaggaagagccatggctagcgagcacgcggcggggggcgaggctaagcatgaccagaagcagagcctgatggacaaggcgaaggggttcgttgtggagaagatcgcgcacatccccaagcccgaggcgacgctggacggcgtgacgttcaagggcctgagccgggagtgcatcacgctgcacagcagcgtgaacgtgttcaacccctacgaccaccgcctccccatctgcgaggtgacctacacgctcctgtgcgccggcaaggaagtggcgttcggcaccatgccggaccccggctggat

SEQ ID NO: 297454 - DNA, 243 bp, Zea mays
  unsure (1)..(243): unsure at all n locations
cgcgtccgnaactgtaaatattactctaaacctacattttcgattatccacacaccctcagcgacttggcttctctaaaggagtatatggccaacacacaacatttcatcaacatacaactgtataacgtaccgaaccagctgatccaattcgagctgatcctgaccaccgccacattcgtgataaccatcttcaacttcgtctcaacgcttttctgcatcaacttcaaggtccctctgttct

SEQ ID NO: 297455 - DNA, 444 bp, Zea mays
aaaaccgggccgaccgcacgcgtccgaccggcctccacaaccttttgaaaacgctctgttaaccatacagaaagaactcggacaaggtaccatttatccattcgctgccctccccctaaatcctctcgcaaccacatcaatagcacaagttcatctttcaactctcgcagatggcaaaccagtatttgtcaaacttcaacatcatggtgtgaacgaaatcatattacacgatctgaagaatgcaaaatcattgattgaatggatagcgagctcagaacctcaatatcattttcatcctatcatagatgaatgccccaaggaggctccaaaggaacttgatttcaaccatcaagcagagaatactatggctgtctccaggaatcttactcgcaaaagtgactgtgggagaggcactgcttccagaactgttgatgtactcattcc

SEQ ID NO: 297456 - DNA, 336 bp, Zea mays
  unsure (1)..(336): unsure at all n locations
ttgaaaacccgggccgacggacgcgtccgcagctaggaccgncgcctaccttttaaggttctactgcccctcctcaccccaggccccagcaggagcggaaggggccgcggccacgtcataccccacatcggcgagcggaggcggcaccgccggatgcaaaggcaagatgttcgggcgcgcgccgaataagagcgacaacaccaagtactacgagatcctcagggtgcccaagtcggcgtccaaagacgagctcaataaggcctaccgcaaggctgctataaagaattttttattttttttttttttaccccgagaagaacaaggagcncgcacaag

SEQ ID NO: 297457 - DNA, 304 bp, Zea mays
  unsure (1)..(304): unsure at all n locations
aacaaatgcctcctacctcaaagccttaaatcttgatcacgtcaaaaggtcattagctggtaagcagtactcccaactcgcctacaagcccacattccaccacctcctggactacaacatctctacccctcncatttttattttctcttatgcccctatccttctcacaccncgccggaagaacaaaggccccaccaaccccctatcttatgagcccaacaccataccagaccactctgcaggctacattctcaagaaaatcatccatgaaaaacacaccatcgagagcgctaataaagagacc

SEQ ID NO: 297458 - DNA, 167 bp, Zea mays
catgctgctaaaccgctgattgataaaaaattatggcctggaagggcgatggggcgcatgcgggaaattatatcggcaccacgtactcttacgagtaagtgtggaaacacgaccacgttgagagcattgccaacgaccagggttaccgcactacgccctcaaacgtc

SEQ ID NO: 297459 - DNA, 429 bp, Zea mays
cgcttcctccacgaccttttgaagaggttcgtgaaacgatagagaaagaacttggagaacctatgagtgatctatttgctgattttgtcctacatcctctcgcaaccgcatcaatagcacaagttcatcgtgcaactctggcagatggcagagaagtagttgtcaaaattcagcatgatggtgtgaaggagatcatattagaggatctgaagaatgcaaaatcattgattgaatggatagcgtgggcagagcctcagtatgattttaatccgatgattgatgaatggtgcaaggaggctccaaaggaacttgatttcaaccatgaagcagagaatactagggctgtctccaggaatcttagtcgcaaaagtgactgtgggagtggcagtgtttccagtactgttgatgtactcattccagaagttattc

SEQ ID NO: 297460 - DNA, 437 bp, Zea mays
  unsure (1)..(437): unsure at all n locations
gcaagttcctatttttataaaagagttcaaatggactgcaatgttgcaataaactctattacttgctgtcttatgtactgctctctattctttagttactttgaatatttggatatcgttgacaaggtagaatgctgcaacagtcgttccatctgagctgcagctgccaagaatattattgatccattgaccttttgtttttaatgctggtggctaaatttttattcagttttaaatattaacaaacaacttccttaactctgttaattattctgctacaggttgtattggaaaatcaagtatattagtcgactggagtatctctggggggatataaaaaagagagaggttgaaattccagattttgttattgaacatgataaggttcttgagcaccggccactgactgattatggcatagaaccagatccnctaca

SEQ ID NO: 297461 - DNA, 298 bp, Zea mays
acggacgggctcatagcctgtcctttccagacttttgaacacaacgtaccaaaagagcgactgtggacaacacaatcatgcactccatgccccgcctcgcccgtgtgaaccacttgactgacctgagcgagctactcgtccggaacaagcgactgtagcagctggtgaacctgaacgccgtctgccgctaccatggcatcccttccaaggacaaagaggagcagacctagttcacaatgatgttagacctgatagagcagtacaacctgaacaggcacatctgctggatctccaccca

SEQ ID NO: 297462 - DNA, 410 bp, Zea mays
  unsure (1)..(410): unsure at all n locations
atgcgggcgccgtgcggcaggggctcggcgctggcgcgcatcgccatgtggtgcgcgatgttggcgcccgcgctatcgccgccgacgcacaagcgggagaagtcaccgtggtcggtgagccagggttcctcaccggatccagtggcgtgggatgcgacccagaggagcgcccgccaggagtcgtcgtacgcggcggggagcgggtgctccggcgcgaggcggtactcgacggagacgacgatggcgcgggcacgcgcggcgagggaggtcaggtaggcgtggaagacgaagttgaaggcggtgtggaggcagaagccgccgccgtggaagtacacgaggattggaagcttcttactgcttccgccgttgtcttcggtatccttggcggncggcgggaggtagaggcggac

SEQ ID NO: 297463 - DNA, 319 bp, Zea mays
gaaccacgcgtgcgccctgagattgatgagctcattgacacccttttcaaacacttctctgcacagagtatctctgctggacgtactggggcatagcatgatcactcttctccatggctcgtcttgaccgaataaacaactactactgccttcggccctgctaacccgccggaacaagctactacaggagctgaagaacctgttggtcgtttgccgcgaccatcgctaccctttcaacgacaaagctgagctagcctagttcaactagacgtatgtcctcgtcgagcagtacaacctgaacgggcacatccgcttgatc

SEQ ID NO: 297464 - DNA, 349 bp, Zea mays
cgcctgcactgcacctatctccttggcttcttcccgttacccgtctcggcagatgcctggcttcgtgcaccttcaacttcagggtgcctgtccacttactcagtactgcggcggcgaaatctgaaggtccgactaatgtgatgtcaatcacatgctgcttgcctgtcgtcgagtgcgtgtactgcctggcgtgtgcgcggtgggtgtggcagcgctgcctccactccggaggctacgacagtgagacctggggtgttgcatcggctgaagagcttgagcctgtgccgcgcttgtgctggatcattctctcgatctatgaggatgaccttgagaacccccaatgggcgcc

SEQ ID NO: 297465 - DNA, 243 bp, Zea mays
  unsure (1)..(243): unsure at all n locations
gggaactaggcatacaggaaaaggaaggagcctgatgtagagaagcaaaaggaaccaattgtagagcaagtaacactgtgacatgctctagaattggtcagcttgggatatggtgtgaagaccggactgccttatgtgatgagaagtgatgcanaagcaagtaaagctcttgagagctttgaagagtgggaaggggtaaaagtcattgatgatgttctcccattctttcagtcgctcaagcta

SEQ ID NO: 297466 - DNA, 370 bp, Zea mays
caagccgtccggccggggccaccacctttgaccgccgcctcctttcccctccgctactgctcctcctcaccggggtcccccgcaggagcggcggcggcggcggcgaggtcgtaccccacatcggcgagcggcggcggcaccgccggaggcaaaggcaagatgttcgggcgcgcgccgagaagagcgacaacaccaagtactacgagatcctcggggtgcccaagtcgcgtcccaggacgatctcaagaaggcctaccgcaaggctgctatcaagaaccaccccgacaagggcggtgaccccgagaagttcaaggagctcgcacaagcctatgaagttttgagtgatccagaagaacgtgagatttatgat

SEQ ID NO: 297467 - DNA, 408 bp, Zea mays
gccaccatcgaccttcaagtctcgctacgtttcagtgcaataaaaaaagcagccgcaatggcgagcagcaccatggccctctcctccacggccttcgccggcaaggccgtgaacgtgccgtcgtcgtccgccttcggcgaggcccgcgtgacgatgcgcaaacggcggcgaaggccaagccagcggcggcgtccgggagcccgtggtacgccccgaccgcgtgctgtacctgggcccactgtccggcgagccaccgagctacctgacgggcgagttcccgggcgactacggctgggacaccgcggggctgtcggcggacccggagacgttcgccaagaaccgggagctggaggtgatccactcccgctgggccatgctgggcgcgctcggcttgcgtcttcccgagct

SEQ ID NO: 297468 - DNA, 441 bp, Zea mays
gaagctcactcgctgctcgttgccggctgttcccgcccactccaccgctgatatttgtcagggtctcgttcctgccctcggccctcccctcgctcgctccccaactccagcaggcagatcagatacatccattcacggaccggaaggaaaggaaagggttaaccatgagcgccgtggctgtttcgtcgtcgctgaacccggacgcgccctcttcatcccggcggcgctgctgcaggtggaggacttctcgccgcagtggtgggacctcatcaccaccactgcctggttccgcgaccactggtcccgcgagcgcgcccacctggacgagatggccgagcagatcgacgcggccggcctcctccccgacgacgaggacctcttctacgacgaccagcccgagcagggccccgtcgccgccgcccttaagacagattcggtgct

SEQ ID NO: 297469 - DNA, 500 bp, Zea mays
  unsure (1)..(500): unsure at all n locations
cccgggtgcgaccgacgcgtnccgatgtcngttgcagctgcgcgatctaagctgcggttttgttgctctaagctgcaagtnnngcggcaagaagggaccctgactctggaggggagactaggctaccgccgcgcagggcctacctgtcgtccttctggcgtggcctccggagaaagaagggccgcgctccgagttctgtcgagggccgcggcggagtctcggctgaggctcgcccacgtgcttgcagcttgcggtggcaactgcaagtgcgaccctctgtcaactgctgatcacatccgatcgacgaccatggatatgattattatctatctagcttgtggtggtggttgaacaataataagcgaggccgagctggctgccatacataagtattgtgtggtgtcactggtgtgtgtgtgagagagagagaaacagagttctttagtttgctatctctctctctttctctctctgcatgcttggcgtcagtctttgtgctc

SEQ ID NO: 297470 - DNA, 434 bp, Zea mays
  unsure (1)..(434): unsure at all n locations
tccgatccaaatcgcgtaaaaaaagcagacgtccttgctaatggcggttccagatcgtggttcgtgtgtgagcttcgaggaatcgacggtcaagcttcggcgaccaaatgacccagctcttcgagttctacaaggctgaagattttgagcatctgtttggtgaaggtgtccgcattgcaaccactgttcaggcgaagatggagccgtggaagggacttccaggagttccaagactacgacgagttctaggcgtgggtagcggcaaacccccagtcggctgcctgtgaaggccgcgtttatctacgttccgttttcgcactttggttattgtaaagactatgtggatgtctcagacatatgatgtaatcgactattatttccctttttaatactatttgagcactgtgtgttggaaaaaaaaaanaaataaattt

SEQ ID NO: 297471 - DNA, 447 bp, Zea mays
cgtccgcgcagagataggcgtcttcgtactcgccttctttcgcggctcaaacctttcccccttctcgcaattgtttccgccggccggggctccacccgtacgacgacaccatgagggagtgcatttcgatccacatcggccaggccggtatccaggtcggaaacgcggctgggagctgtactgccttgagcatggcattcaggctgacggtcagagcccggtgacaagaccattgggggaggtgatgatgctttcaacaccttcttcagtgagactggtgctgggaagcacgtgccccgtgctgtttttgttgaccttgaacccactgtcatcgatgaggtgagaactggcacctaccgtcagctctttcaccctgagcagctcatcagtgggaaggaggatgcattcaacaacttttgccgtgggcactacaccattggcaaggag

SEQ ID NO: 297472 - DNA, 334 bp, Zea mays
gtccggaagaattcgcgttgttcgaacagccattcatcatgaacgacaaggtcacaataagtgagtggctgaagcaaactatagctacaactggagagaatatgaaggtcaggagatttgcccggtacaacctaagtgaagggctggagaaaaaaagccaggatttgctgctgaaagttgcacccaaaacaggaacgaaagccgcaacaagttcttcaaaggataacaggcttgttgaaccaccaaattccgggaaaaaaaacccggttgtggaagtttaagcttcgtggtggaaccacttccaaaacaaaaccgggcttgccttaatgaatgg

SEQ ID NO: 297473 - DNA, 447 bp, Zea mays
cggcgagccgacgaacccaccctcgtggcacctacggcaccgccgcgatgtcgttgccggcggcgaccgcgccgtcctcttcgggggcgacgcagccccatccccagcccacggagcagcagggaggctcgagggagcggcgggtggagtcgctgggatggctacggagtcggcggtgatgccgaagaagcacaaggccatcgagggggtcgcgccgcttcgatcctcgacctcaaggcccagctctaccgcacccaggaggaggcccgaaaccccaccgcccccggcgccgctgcttccggcggggagttccgccgcgcaaagatacgctccgcacccaccgaccctctcggggccaagaactccggcgttgcatcccgggcccacaaggataagctggagcttaaagccgtgaaagacggttctgcaagctatgctgctctagaa

SEQ ID NO: 297474 - DNA, 265 bp, Zea mays
atgactcatcatataagaatactttttaaagcaacactggcactacatacaaaactattccaaagtatgatctgcataaatcgtataactctctcactgaataacgaaataagcatttaattgagtcctataatgcaacatattacccatgcattcacatatcgtatgacttctatatatacttctcttctttaaataacattataactctaactttccctttcatcaaattttataataaagaaaaacaccctacttcccctat

SEQ ID NO: 297475 - DNA, 378 bp, Zea mays
gtgaaatcccgcacctacctccttcctctctcatctaggaccctcgcaccaagaactgagcgggaagagaggtagagagataatggcgaccacgacgtcagcgaccaccgccgcagcagcagccgccaccaccgccaagccgcgggggtcgtcgtcggccctctgccagagggtggccggcggcggcaggcggcgctccggggtggtgcggtgcgacgccgtcggcgtggaggcccaggcgcatgccgtggcaaaggcggccagcgtcgccgtcctcgagcagttcaagatatccgcctaccggtacatgaaggaaaggagtaccatagctgtgataggcctcagtgtacacacagcacccgtggagatgcgtgaaaa

SEQ ID NO: 297476 - DNA, 390 bp, Zea mays
  unsure (1)..(390): unsure at all n locations
cgaccgacgcgttcgagcctccacacacacannttgttttagnacttttttttatcctcgatcgctcctccgaaccggaaggccaacccgctttggcgatcgtgcgtcttgcttggttcctgccggccggagccagcgagagctanctagctgctgctgtcgtggtagacgtcttgccgcacgcacgcctagctcggtctctctggtacaacgtatggaggacgccgacgactactatggccggcgcgaccgtgaccgtggaggatgtgaggaatgcccatcgcgccaccggccccggcaccgtgctggcgatcggcaccgccacgcccgccaactgcgtgtaccaggccgactacccggactactactttcggatcaccaagagcgagc

SEQ ID NO: 297477 - DNA, 206 bp, Zea mays
gcgacgcgtggcgcactatggaccttgcgttatctgaaactccttcgactggtgcggcatgagaatgtcattgctgtgaaggatgtaatgatgccaatacacacgagaagctctaaggatgtgtactagaggtacgaactcatggatactgacttgcaccatataatcaaatcacctcaaggccttagcaatgaccactgacagta

SEQ ID NO: 297478 - DNA, 357 bp, Zea mays
  unsure (1)..(357): unsure at all n locations
ctgttgaaagtggngatngnaaactagntttgctgataccatcattgaaaccggtgcngggtttattaaatatgttgggggagatgtgaagactcctcgtggcctccgcacactcaactctgtttgggcccaacatcttagcgaagaagcgaggagaaggctctacaagaactggtgcgagagcaagaagaaggctctcacaaagtatgctctcaaatatgaaaatgatgctggcaagaaaggaaattcatctgcagcttgagaagatgaataaatatgctgacgatatccgtgacatngctcatacccaaattaggaagatgaatggtttgtagcanaanaaggctcacctgatgg

SEQ ID NO: 297479 - DNA, 284 bp, Zea mays
  unsure (1)..(284): unsure at all n locations
ccacaacccccgagcncagcnaagcnccactccagcnccaancgcagncgcgaccagagggcgagagcnagcnagagggccgcgaaaaagccgancaanaggaccgcccnggggagccaccaggaggcgnaccacccgggcgcccncaaggcggcgnncgcngagnacaacaccacccncagcnncgacnacgccggccagggcnccggcagggccancagcaagcngaccggcggcggcccgacgaccccggcgggccggaacgcggcggcgagggcgcacgc

SEQ ID NO: 297480 - DNA, 255 bp, Zea mays
  unsure (1)..(255): unsure at all n locations
gnggaggagcagagccanggcnncancggtggccgccgcggcgagcacannccggggcacccnccaggcggacccggcgccacagaacgggcgcancgnggcccggnncgggnncgggnggggcggcaaggcgaagccggcnccgaagaagggggcgaagacancgaccnccncggaccggccgcngnggnnccccggcgccgnggcgcccgacnaccnggacggcncgcnggncggcgacnacgggnncgaccc

SEQ ID NO: 297481 - DNA, 332 bp, Zea mays
gcgccctcttctcttcctcggcgacctcaagacagccgccagccgcgccacgcccagcccggacacctcggaggtacgatccaccgatatcacgattgacgtctcccgcggcctctgggcacgcgtgttctgccccacggcgatcgctgacgatgctccagccccgctccccgtctttgtctacttccatggcggcgggttcatgctcttctccgcgtcgttcggcccctatgacaccttctgccgccgtctctgccggaagctccgggccgtcgtcgtgtccgtgaactaccgcctcgcccccgagcatcgtttcccggcagcatacgacg

SEQ ID NO: 297482 - DNA, 288 bp, Zea mays
cggtggccaacgacttccggaaggacgcgctcatcggcggcggcggattcggccgggtgtagaagggttccttcgcgtcgccggccggggcggcagacccgagcggcggcaccctcccggtgccggtggccatcaaggtgcacgacggcgacaacagcttccagggccaccgggagtggctggcggaggtgatcttcctgggccagctctcccacccgaacctggggaagctggtggggtactgctgcgagggcgagcaccccgtgctggtgtacgagtacatggccc

SEQ ID NO: 297483 - DNA, 284 bp, Zea mays
ctccaggggaccatggcgaaaaactacccaccgtagcgcctagtacagcgaggccgtcgagaaggccaggcgcaagctccgcgccctcatcgtcgagaagagctgcgcacccctcatgctccgcctcgcgtggcactccgctgggacgttcgacgtgtcatccaggaccggctgtccctttggtaccatgaattgcccggttgaactggctcacggcgccaactcggtgctggacatcttggtacggctgttctagcccatcaaggatgatttccccacccttt

SEQ ID NO: 297484 - DNA, 292 bp, Zea mays
  unsure (1)..(292): unsure at all n locations
ctccagtttcaacattactcgtttgagaatttaatccctaaaactgttgaggggtaaacgtctaatctatactaccattactcacatgcctatcagccaaccaacaaccttgctgaaatcctcagcaatatccttgctctacacaaaatgacaactttgaatcgtgactagctcggccaggaaactctgctgcatctattcatgcagacttacctccactacancgngngtgatcagtccgnnnnncttacatccaacgcacctaaattggaagcacattccaaccaacaat

SEQ ID NO: 297485 - DNA, 380 bp, Zea mays
  unsure (1)..(380): unsure at all n locations
gggtccgacccacgcccgtccggtctccaaacgcttccacactctctacagagaaacacgtttctctcctctgtaaagtctcgaagagacttttactgggggcgaacgcgctcttcgtgacgtagagcccaatcgggagaaggacctcgctcgtccgatctgccacaggacggtctaccgagtttgatctgggaacacagcgcgctggtgtacactcaacaagtgtgtaccgatgcggtgcagtacggccgcgtctcacgtcaagactcgagtccatgtgagccctgctccagcgtcaaggataggattggcnncnncatgatcacggacgcagaggagaaagggctgattactccaggcgtgagtgttctgattgaacc

SEQ ID NO: 297486 - DNA, 225 bp, Zea mays
aaagcccttctctgacattcggttctacattttgctccaggccaccatcatctgcatagacgaactattatgtatgcggaacaaccactactccacaacaacttccaggcacaggccgatgccgtcaaccttatatgcagtgccaacacccattctaaccccaagaacacaataggcgtgatgacaatggccgcgaagggcgatcactttctaaacactcccacc

SEQ ID NO: 297487 - DNA, 333 bp, Zea mays
gcgactacatgggcgactagtacaccgacttctgcaaggaaggcgacaaccacggctatgtgcatttcaggatacagttccagaggccgaacccggtcggcaccaacaccgcgccagcaccgtcagcagcgactacagctgcgccagcggtgcctacttctgctgcgaccagcaccttcctcgacatggttcaataggggcgcgggcggcacccctttcaaaccgtacgttcgtatatgcgtccaaaccatgtacctgcgcgcatcagcgtgacctactactatactataccagtccaccaagcatgcaccatcaggccatcacactgttctc

SEQ ID NO: 297488 - DNA, 286 bp, Zea mays
  unsure (1)..(286): unsure at all n locations
ggccgaccgacgcgtgcgggngggtngtcttctcctccctttccggttttttancgganncgngaggaacgggggcgggcggcttcanaagtgagcgcagccaaatggcggcatcggatgttgaataccgctgcttcatcggcggcctcgcctgggccacggacgaccactccctgcacaacgccttcaacacctacggcgaggtcctcgagtccaagattatcctccatcgggagacgcagaggtccctccgattaggntnnnaaaccttatacacggaggaggc

SEQ ID NO: 297489 - DNA, 357 bp, Zea mays
  unsure (1)..(357): unsure at all n locations
aggccgacccacgcgtncgcggacgcgtgggcggactcttgggttgatgtcntccttttcaccattgaggaaggaatctgtgaggtgggggccacagctggtgacacccatcttggtggtgaggactttgacaacaggatggtcaaccacttcgtccaggagttcaagaggaagaacaagaaggatatcactggcaaccccagggctctccggaggctgaggaccgcttgtgagagggcgaagaggactctgtcttccactgcttnnnccacaattgagattgactcgttgtatgagggcatctacttctactccactatcacccgtgccaggtttgaagagctcaacatggacctg

SEQ ID NO: 297490 - DNA, 300 bp, Zea mays
  unsure (1)..(300): unsure at all n locations
gccgaccacgcgtccgagtggctattatcccttccatgtgnctttctcacaagatcgccggcttttccagccatgtcatgaagcggatccagaagggtcccgttcgtggcatctctttgaagctccaagaagaagagcgtgagcgtcgcatggatttcgttcccgacgaatccgccatcaaggttgatcaaatcgaagtcgataaggaaactctcgatatgctttctgttctcgggatggctgatattcccggccttgttaaggtcgatccggttgctgttgctgttcctcatatctggt

SEQ ID NO: 297491 - DNA, 247 bp, Zea mays
ctctaaccaagacctcttcggggtaggggttcttatggttttgtggagggcctatggcagcggctgatgtgtagtaccgttgctacgtcggctggcttgcctgggccaccagcaacgagtcgcttgagaatgccttctcctcctactgcgagatcctcgactccaaggtcatcaccgaccgggagacggggaggtctcgcggcttcagctttcttaccttctcctccgaaaacttcattctctactc

SEQ ID NO: 297492 - DNA, 256 bp, Zea mays
  unsure (1)..(256): unsure at all n locations
ggccgacgcacgcgtgcggnagaagcagccgccgntgctgttgttcctttcacaaaaagggggganacggggagacccggaagatcaatgcggatttcaaacctttccaagtgaaattcaagataaggctggctgtcaagacagactacagggccagcataaggctgattaaccaagacaaaaacaagtacaacacacccaaatacacatttgttgtgcgatttaccaacaaggacattactgtacaaattatatt

SEQ ID NO: 297493 - DNA, 237 bp, Zea mays
aaatacatactagatccgatccgccgagtgtacaccacctttccccactccgatcaaatggggggccggcgagggcgaaaagaagatgataaccctcaaaagctccgatggcgaggagttctaggtggacgaggctgtggttatggagtcgcataccatccgccacatgatcgaggatgactgcgcctacaacggcatacctcttcctaacgtcaactccaatatcctatccaaggt

SEQ ID NO: 297494 - DNA, 422 bp, Zea mays
  unsure (1)..(422): unsure at all n locations
gatcgccgcacgatctcctcggcggcggcgccgttgcggatgtggtgctgtggaggaagaaggaggtggccaccgggacgctggcggccgtggtggcctcatgggcgctcttctactgcgtgcccggctacactctgctctccttcctggcccaggtgctcatgatcctgctcaccgtcctcttcgtctgggccaaggctgcgcagctgctcaacagggcacctccgcctatcccattgatgaaaatttctgacgagtcaatgagtgaagcagcagaaatggttggtagcttcatcaacaaggtgctcaaggatttcgaaaacattgcacttgggaaggataacagcctcttctacaaggtggcttttgtgctgntgctggcctccatagttggacgactgaccgatcttatcactttagta

SEQ ID NO: 297495 - DNA, 481 bp, Zea mays
aagctatacaccgatgcacgcggccgtagcctgggttcctttaaagtcgacccacccgtttgtgacccttcgcccgcgcgccctcacgacgggggccgtctccgtctccgccggcgccaaggccgccgcggcgttcgcgcacaaggtccagaaggagctggccgcgccggcgcagcgccgcgcgggcttgacccgccggaccaagccgtgcagcgtgcgcgccgtcgcttagcccgcgcgcgccccccgagccacgtgtgacagcgcctcgttgaagagcgcgattacgatgactgagaagatactggcgcggtcgtcggagcgcgcggcgcttgatcccggagagaacgtgtgggtcgactttgacttgctcatgactcacgacgattgtgggcccggcgccttcgacatatgcaagactgagttctatgagtgctggcatcctgaagctgcttgactgccacctagtgccttttctact

SEQ ID NO: 297496 - DNA, 407 bp, Zea mays
ggatcaatgggtggggcaggatcggaaggctggtggccagggtggccctgcagagtgacgatgtcgagctcgtcgccgtgaacgaccccttcatcagcaccgactacatgacctacatgttcaagtacgacactgtgcacggacagtggaagcaccatgaagtcaaggtgaaggactccaaaacccttctctttggtgagaaggaggttgctgtgtttggctgcaggaaccctgaggagatcccgtggggttcggttggtgctgaatatgttgttgagtctactggtgttttcactgaccaggagaaggctgcagctcacttgaagggtggtgccaagaaggttgtcatctctgctcctagcaaggatgcccccatgtttgtcgttggtgtcaacgagaaagagtac

SEQ ID NO: 297497 - DNA, 394 bp, Zea mays
gtcagtgccttggcacattttgcacgcttggaacacgcaaaggtacacgggtgatacacatttcttgattaagaccgttgaccctttttttaagaaggattgttctatcatcaagagtcactgatgaacgattgtgctcaacattctgaagagtgttttatttatgaaatatggtactagcatatattgtgtggatcatatacttaatgtctaaaaagaaaaactacgtcatattcatcttgacagaggatcaagcttacaggaaaatcaggctccgtgctgaagatgtgcaaggcaggaatgtgctcacaaacttttggggtatgaattttaccactgacaaactcagatccctagtgaagaagtggcagacattaatcgaagcccatgttta

SEQ ID NO: 297498 - DNA, 317 bp, Zea mays
tgaccttctataaaccgctaggtgacgtaggcgacatttcaaaactctgtctggtcggactgcacacccatgtccaagaactacccacccgagtgcgctgagtacacagcggctgtgaacgcggtcacgctcaggccttcagccccaatctgggacatgagctgctcaccgctcatgctctccctggagtgtcactgcgtgggcacgttctacttttcgttgaggacctagactacattttgaacgatgatacactagtccgaattgtctcacagcactaacgcggagctggacatctcgatgcggatgatcaagcg

SEQ ID NO: 297499 - DNA, 296 bp, Zea mays
ttttgatcagggggggggtgcatattgactatgtctagctcgtcgccgtgaacgaccccttcatcagcaccgactacatgacctacatgttcaagtacgacactgtgcacggacagtggaagcaccatgaagtcaaggtgaaggactccaaaacccttctctttggtgagaaggaggttgctgtgtttggctgctagaaccctgaagagatccctgtgggttcgtgtggtgctgaatattttgttgagtctactgtggttttttactgaccttgaaaatgcttgtatctttacttt

SEQ ID NO: 297500 - DNA, 393 bp, Zea mays
ttaaagtcgacccacccgtcctttttaaggttttagatacagtgtgagaaaggctttcataatatatattttacatgttgtaaaaattatatagatttttttttagaaaaaaacaatgttgaagttcacaatatttgacttaggatctaactaatatgtttggcctgagaaatttgcaatcgattcttatgtagatgggaagggtcggggagaagctcgatatcgactttgttatatccacaggggacaacttctacaagaacggcctcaagggcgtgcgcgaccaggcatttgaagaatcgttcgtggatatctacacagctcagagcttacagaagccatggtactcatttctaggaaatcatgattacaggggcaatgcgctcgcacaac

SEQ ID NO: 297501 - DNA, 228 bp, Zea mays
  unsure (1)..(228): unsure at all n locations
aaacccaacacacctaaccaaccaaaggaaatttttaaaattcgccggggcgtgancaagagctagagatggacggtaggatgttcggtctcgagacccccctgatggaggcgctgcagcaccttctggacgtgcccgacggcgacgcctgctcggacggcgacaaggcaggctgcggcggtcccacgcgcacctacatccgctacgcgcgcgccatggctgtcaccc

SEQ ID NO: 297502 - DNA, 264 bp, Zea mays
gatggatagaaggaacatatcaatcccaactcatcgacagcactcccccaaaaaccgcagagctgaaacacaaccatgcggagcgcgtcggcgccggggcccgcgcgtacctttacgccgttctagagcatatcgccgccgaggtgctggagctggccgggaacgctgatcgggacaacaggaagaaccgtatcgtgccgtgccacatacagctggcggtgcggaacgacgaggagctgagcaggctgttgtgcactgtgacga

SEQ ID NO: 297503 - DNA, 258 bp, Zea mays
gggaaatggggaagggagcgcaagggagcgatgcggcggcggcgggcggcgaggtggaggagaacatggcggcgtgctcgtggtgggcgccggccccatcggcctggtgtcgctgctggcggcgcgggccttcggcgcgccgcgcgtggtggtcgtggatgtggacgaccaccgcctggccgtggccaggtcgctgggcgcggacgcggccgtgcgggtgtcgccccgcgcggaggacctgtcggacgatgtggagcg

SEQ ID NO: 297504 - DNA, 291 bp, Zea mays
gcgagtagcacctgccctgataaaggaacacgcataactgtgggtgaccgatgtaccctccgagatgaacacgtgcttgatcgaaccagaggactaccagtatttgctggaggcgctgaacaccaacgtggatgggaagcagaagatcatgtttgccatgacctcaatcaagggtgtcgggcgccgcttctccaacatcgtctgcaagaaggccgacatggacatgaacaagagggccggcgagctgactcctgatgagctggagcgcctgatgacggtcgttggccaacc

SEQ ID NO: 297505 - DNA, 270 bp, Zea mays
ccgtcttcaagaaggaaaaggtgtccctggccggccatgaggagtatattgtgaggggtgggagggatctgttcccgctgttaccggaagctttttagggaatcaaacacatcggcctaatctcctggggctagcagggtcctacgccaggtcataactcgacacactcacttgctgatgctaactcagaagtgcgggctccgactatgacaacgaggaggtggacagctcgtcaggcacccctgacatctgccgtcactcccacacagc

SEQ ID NO: 297506 - DNA, 421 bp, Zea mays
gtcgtgatgctgtatagaagaacgaacaggcgtttctggccggccatgaggcacacattgcgagcgcgcgggaaggaattgaatggaggcggaccaggaagccttgaagggaatcaaccagatcggcgtaatcagttgcagctagcagggttctgcgcaagctcataactcgagagactcacttgctgaggcaaagtcagatattgttgttaagattggtctccggaaaggttctaaatcttttgaagaagcccgagcagcaggattcaccgaagagagtgggacgctgggtgatatatgggagactgtatcaaacagtgatcttgttttgctactgatatctgattctgctcaggctgataactacgagaaaagtttctcgcacatgaaaccaaacagaattcttgtttgtcacatggat

SEQ ID NO: 297507 - DNA, 349 bp, Zea mays
gctttgactgatgaaggcgaagttctctcttgggggcatggtgggcatggtcaacttgggcatcccacccttcaaaatcatagagtcccacttgccatcaaagctttatcagatgagcgaattgtccatatagcctgtggaggatcaacctctgctgctatatcagagaaaggtgacttgtacatgtggggaaatgcaagagactgccagctaggcatccctggtctgccagaagttcagccactcccagtcaaggtgattttcctcagagacgatgatgaagggttgggcccttctcgtgtcatctccgttgcaataggagcctcccatgccatgtgcttggtctcca

SEQ ID NO: 297508 - DNA, 312 bp, Zea mays
tctatatagtagacccacgcgtccgcttctgttgcaacaattgcataaagtgctcgtgtgagcacctagaaccaggcacatttatcctgggatattcaattatttgttcatgtaaactcaagccatggctgggatggccaacatccccactaacaactccttccttatcgcaatcatggccgacgaggacaccgtcactggcttcttgattgccggcgtttgcaatgttgatctgcgcaagaaaaccaactaccttctcgttgacaacaagacgacagttaaacaaatcgaggatgcgttcaaagaatttac

SEQ ID NO: 297509 - DNA, 386 bp, Zea mays
acccacgcgtgcgtgtctaaagtctcacagacggcctttataatgagggacccgctgcggcaacacggcgtacactgccagtggggcccgctggaacagggtcgccgcctgaccggcgtcaactctacgatcgaggctcacatcgttgagatccctgtggggacagaggatgacgtgagacaccgcggtggcggtggcgcggccggtgatcaacaggaaccgcagacgggactgggcacgctcaacgagggacgcccgggccaagttcatacgggctatcgtcttcaacgtgatagagaggaaacctgctcttgctaaactagaggcacttgaaagttcgaagccttattatgaagcagaattggacatagatgatgtttttagga

SEQ ID NO: 297510 - DNA, 217 bp, Zea mays
ctggcttctcgcccgtgccaccgcacggagaaatgaacgaagagggtggctatggacatgggcctgatcagagacgttgctgggtacgctccttatgagaagcacatcactgagctcatgaaggttggcaaggacaagcgtgccctgaatcttgctaagagaaagcttgtaactcacattagggcacataagaagatagaggagatggctggcgtac

SEQ ID NO: 297511 - DNA, 225 bp, Zea mays
gatcgtgatggagctgtacgccaacgaggtgcccaagaccgcggagaacttacgcgcgctgtgcacgggcgagaagggcgtgggcaagtacgggaagccgctacactacaagggctccaccgtccaccgcgtaatccgcgagttcatgtgccagggcggagacttcacccgcggcaacggcaccggcggcgagtccatctacggcgagaaggtgcccgacgagaa

SEQ ID NO: 297512 - DNA, 328 bp, Zea mays
  unsure (1)..(328): unsure at all n locations
tcaacccacgcgtccactcatctctcctgcacgccatactgaccgagtcctgacttcaataccacgaaccaaccacctcaaatactccctactagctacctctcaannncagcagacacctgcctgctaaaacccgacgcacaggggagtgtcgctgatgtggtgctcggattcgatggcttggatccgtacgtgaaaggcatgtcaccttattttggctgcatagttggccgtgtctctaatataatcaaggatgggaagtttacactaaacggacttgagtattcataacctgtcaacaatggacctaacagccttcatggtgggt

SEQ ID NO: 297513 - DNA, 345 bp, Zea mays
  unsure (1)..(345): unsure at all n locations
gggggagggggggggggggggggggggaggggaggaagaggggggggggggggagggagaagggggggggggggaggggaaagacggacgagaggggggagaaggggagggggaagnnnggggggagcaagggcaaagcggcggcggcaagggagggcggcaagccactgacgatcgaggaggaggaggaagcgcctccgcaggccaaggaggagcgcgncaagagcgacaaaacgacggcaggggcacagcggagggtaccggagggagggcaagggggagacaggcgtggaggccgggagcgaggggcacgaggccggaggtatcatagagagcggaggagag

SEQ ID NO: 297514 - DNA, 409 bp, Zea mays
cactccctgacatcgagaccggctgcccggccccggtccggcgatccctctgcacccctttctttgcgctgccagccccaatctctcgcattaagctctgcgccgtcgggacgtcgccgccatggtctccgcgccgccggtcgtctgcaccgccatgccgttgctcgacttcgacaccttcgtctttaacaaggagaaggtctccctcgccggccacgacgagtacatcgtgcgcggcgggaggaacctgttcccgctgcttccggaggcgttcaaggggggcaaggtagatcggatttattggatggggcttgcatgggttctgccaagcccaaaacctgagagattaactggctgaagcctaatgaaaaattgttgtgaagattggtcttcggaaaggatccaattt

SEQ ID NO: 297515 - DNA, 338 bp, Zea mays
gccaccacctctccttctacatcaacgcggcgaaaccctaacgccggagtcccgctccctcctcccactacccatggcgttagatatggcgtacgctccggctatgaacgctgccaaggccgagttcgaagctgtcatgatggatccgcagcacacgatccgcatcacgctctactccaagagcgtgaagaacctcgagaaagtctgcggggatctcgtgaagggcgccaagggtaatgatctcaacgtcaacggccccatgcagatccctaccaacgtgctccacatgaccaccaagaaatctccctgttgctaatgtaccaacacctgagatctct

SEQ ID NO: 297516 - DNA, 250 bp, Zea mays
ctttaaagtccacccacccttccgttgcaatggtggtcatcccaatggctgtcggggctactaactacttcggcgagaaacacaacactgaccatcttatttccaaggatgataacatcgatgcttcaaacataatttcaggcgatactctcgatgacctcgtcaagtcctttgtttctcattaccctatccacgcgatcgaacatccatatgatcatcgatgactagaacacttatgcctaactcactg

SEQ ID NO: 297517 - DNA, 359 bp, Zea mays
ttttaaattccaccaacccttccgctacattgttgttcaaccccaaggcgttcggtgacaccatcaacctcttcgttgaacgctacattgaccaagggatcaccctagttgctggcgtggaaactttagacttcatttttggtcctactatcactctaaccatcggggctaaatttgtacctttgacgaaaccgaaaaaatttccaccctatatgatctcccaagaatattcttttgaataccgaactgacaagatatagatgcatgtttgaattgtacacgccaaccatctggctcttttattccacaatcttatttccaccggagtaacactcttttcatatgttaaacttattgaa

SEQ ID NO: 297518 - DNA, 369 bp, Zea mays
ttaaaatccaaccaccccttccgtacaattgttgttaaccccaaaggccttggtgacaccataaacctcttcggtgagcgccacactgaccaaaggatcaccctagttgctgatgtgaaaactatagggttcattttaggtcctactatcactctagccatcggtgctaaatttgcacctttgaggaagccgaagaagttgccacgcgatgtcatctacgaagaatattctatggaatacggaactgacaatatagagatgtatgttgcaactgtacaagccaaccatcgaactctctgactcaatgatcttattgccaccgctcaaacactctgttcaactgtaaaacttattgaacgtatcttaaca

SEQ ID NO: 297519 - DNA, 389 bp, Zea mays
ctggcttcttctccccctattaccaagtgcggttcggtttatggtaacttagggttttgtggatgggccatggcggcagctgatgtgaagtaccgatgcttcgtcggcgggcttgcctgggcacactcagcaacgagtcgctggagaatgccttcgcctgctaccgcgagatcctcgactacaaggacatcaccgaccgtgagacagggaggtctcgcggcttacgcttagataccttgtactacgagaactccatgctcgacgctatcgacaacatgaacggaaaggaactcgacggacgaaacatcaccgctaaccaagctcagacccgtgacggtggcggtggcggatgtagctacagtggctgtcgcggccgaggctgatatggt

SEQ ID NO: 297520 - DNA, 428 bp, Zea mays
accttgaatcctttaaagtcaacccacccttccggttgtcctcctaacagcagttaccacggccgacgcaaatatgcctggtagttcgagggaagaacttgccgccaccaagatccaaactgccttcaggggttatctggcaaggagagcattgcgtgcactaagagggctagttagattgaagtcgcttgttgatggaaatgctgtcaaactccaaaccgctcacaccttgcaatgcacacaagcaatgacaagagttcaaactcaaatctactctataatggtgaagttggaagaggagaaacaggctcttcaaagacaattccaattgaaacatcaaatggaacttgagaaaatgaaaattgattaagattgggatcacatccatcaatccaaagagcaaatttaggccaaccctaatattaaac

SEQ ID NO: 297521 - DNA, 437 bp, Zea mays
aagccgaccaacccttccgcccttttcttcctttccgacgccgggggggggaattccgaatcgagggcgagacgggcttgatcgaaaagtcgactatggacggagagaacgaaccctacgttatctccgacctcaacgcctccctccccgcagccgctgcagcccttagcgccgaggaccgcgccggcctcgtcaatgctcttaaggataagctgcaaagcctggcgggccagcatgccgatgtgctaaagacgctttcgcccaatgttaggaagcgtgttgagtttttgagagggatccagagccaacacgattaaattgatggcaagttttttgaagaacgggtagcacttgaggctaagtaccataaagctttatgaaacctttatacacaaagagggtattgaaattggtaaagggagaaaatggaggtagat

SEQ ID NO: 297522 - DNA, 195 bp, Zea mays
gcaatctctagcagcagatcctcgtgcgtggcggatctctagcctgggtactgtcccgatggcccgcacgaatcatactgcgaggaagttcactggcggcaaggcgcctaggaagcagctggccacgaatgtggttctcaagtctgtctcggttactgactgtgtgaatatttttctttgttttcgtcctgtgtt

SEQ ID NO: 297523 - DNA, 385 bp, Zea mays
gtataacatcacatttttccactttgatggtccatgctcaaatttatttatagggatttaaagccacaaaacctgctggtggacaaggagaagggtatactgaagattgctgatctgggactcggtagggctttcactgtgcccatgaaaagctacacccatgagattgtgaccctttggtacagagctcctgaagttttgcttggagcaacacattactcaactggcgttgatatgccgtctgatgaatgcatctttgctgaaatggcccgacggcaggctctctttcctggtgactcggaggtgcaacagttgcttcacatcttcaggttgctgggaacacctactgaagaacagtggcctggagtgagtgatttaaaggact

SEQ ID NO: 297524 - DNA, 320 bp, Zea mays
gtcgtgcatttgaattcaatgtgtagacgcatattgtcccattgacgatctcgcagtaaatgtgacgctggatatcccttacgctggaaatgaggcacactgatgatggtctcctacactccgatgctgtgactactgaaacgagcttatctatgaccgtaaagctgcaaccaggagctcaagagcgacctctaggacctttacatcaacggtgctatccagctggatgttgccgggagcaggaaggctgttgtgatgcccgtcccataccgattgcccaagggcttcatgaagatccatgtcttgatcgatagggagct

SEQ ID NO: 297525 - DNA, 348 bp, Zea mays
ttaaagtcgacccacgctttcgatatatcacccgacttatccttacggacgcttctattcaaaaccaacggtcaatacatgaccttccagcaggcctggcgcactctcaacgtttacgtccttaccccataccacctcatgcatcgcctctccgcttccgccttcctgctcgactttctctacgcagcatacttgttcacatttacagtcactccaaactacaccaagatcctctcgaccgtaatccgtatcgatctcggtaccacctactcatctgtaggtgtctacaacaacgctcatgtatatatcatcgctaatgaccaggctaaccgtatcacaccctcatag

SEQ ID NO: 297526 - DNA, 340 bp, Zea mays
tagtctacccactcgttcttctccctcgcgcgctcaatatttcgggagcgtacttaagcggcggcgcaggatgactctttatatctctgattacaccatctcgtatacaatctccttcttcatccccggatggattttctatatcattcctatgtaacccattaaggctcactcttttaatgagtataatgtgctttttcaatgtaagttatactaccaaaacgttatggtctttcagttctttacgtacggtaaggtgctcttccttgatttaattattcatgttacagagagggatgagttttcgtaccaagagattatcactcacctgcccctttgt

SEQ ID NO: 297527 - DNA, 391 bp, Zea mays
tagtcgacccacgctttcggaaagtgtatggcataatactggagagtaatttcgttgagtcgggcgctcaaacaaattctacacttgagtcataaaaagtttggaaagagctgtatcctgaggagcccttctaattgttgttcacaagaacctttgacactgccgtggatgtcaacccttcatgtgcataggaggacattacctatgatctggtcttggctgttaatagacaatcctctttctattatcatgtttgaacaccaacaatgcatgatccacggtttctccaagaagctctatctcgatacaaggtgtttttttacctgatcaagattaatcatttaaaatgatttcatcgctttctttgaccaacctattatgtggatctttt

SEQ ID NO: 297528 - DNA, 329 bp, Zea mays
ggacgccggagacgtctcgtgagccctgcctttaccgggtccggggggactttttctgctctttctggatgggcgccgttggcggctccgcctatcactttatcaagggcatctacaactccccaaacgggatgcgcctgtcctgaggcgcgcataccgttcgcatgaacgcgccgcgcgtggggggcagcttctctgtttggggcgtgcctcttcttcaccttcgactgcaccatggtgtacgcgcgccagaaggaggacccttggaactccatcgttgcgggcgcagccacggtcgggttcctctctatgcgccagggcatgggggc

SEQ ID NO: 297529 - DNA, 378 bp, Zea mays
aagtcgacccactctttctttatctccctaatacaacacatcgggccgccgatatcaagatcacaggcggcaattactagtgtccttctctccaaggaggagatcgataacatgtttcaagacgctcataagtacaagtctgacgatgatgatcacaatataaatgtggaagccaataactctctggagaactacttctacaacatgcgcaacacgatcaacgactataatattgcttccaagcttcccaccgatgacaataataagatctatgactccatcgactcagccatcacctggctggactccaaccatctcttctaggctctactaattctagtgacattatgaatgagctttataacctttgcaacccca

SEQ ID NO: 297530 - DNA, 283 bp, Zea mays
taacattattggaccagcaattgttggaggggacctcactgtgcaggaggggatttacaactacatgatcctacacctagacaaaacctccaatgagtggaccatctgctaacagaagctcacactaaataccatgcttacgctttcacttgctaagtgcaaaattaaacctatcgtgcagaagattattttttaccagcacattggaaatgtttacttgatcaaaactatcagaatactctgcctctccttaatgcgattaatggaagcaacatgctgaaaa

SEQ ID NO: 297531 - DNA, 386 bp, Zea mays
gtcactgggttcggcaacccggactgggcgaggacgcatgcccccgccggcgccacctcccccgtcgtcctggcggcgctggccgccggcgccatcagcatcggcaagaccgtcatggatgagatggcctacagcataaatggggagaacgcgcactatggcacgccgactaatccgtgcgctcccgatagagtccctggaggatcctccagtggatcagctgttgcagttgctgcaaaactcgtcgacttcgctctgggtcagcagtccctgcaccggctcttctcctggcactgacactggaggtagtgtgagggtacctgctgcctattgtggcatatttggactcaggccttcccatggattggtttctacagaaaatgtca

SEQ ID NO: 297532 - DNA, 342 bp, Zea mays
accacgtctgtgaccgctgtgtcttgtccagggcctatggggactacgccattgttatcatccacaacccttacaacggcacatcgaggattaagctgccctttggcgcctagaagattgtccccagcagcttccgtgctatgattgggcaggttgttggttgaggcaggactgataagccgatgctcaaggcttgttacgcttaccacaagtaccgtgtgaagaggaacagctgtcccaatgtgcttggtgtggccatgaaccctgtggagcattctcacggatgatgtaaccaccaacacatttgttacgcctttaatgttcagttagacactccccctt

SEQ ID NO: 297533 - DNA, 176 bp, Zea mays
aagtcgacccacgctttcgcaaccccgtcatcgatctcgtttcaaggggtccatcctcgtttcctgcgtcccgcatcatctcaaccccatggccaagatcaagatcggtatcaatgggttcggcaggatcggaaggctggtggccagggtggccctgcatagttactatgtcgagc

SEQ ID NO: 297534 - DNA, 381 bp, Zea mays
actcatcattcttacacctatcccgtgcgcgctgttaatggaggtgcgagaatagcctctccacaatgtttttgctatcttccatgaccttgacaactgcatgcacccaatcattgtcctctatccttacctaccaatccctgcgcataatctccgtaacatgtcacagccacttttggtcttaaatcttttccaccatctttaagtcccccaatgcctcttgacagtcttatgaagacatgctgcattgctatattgattccaattacaataataggcgccccaccaccgaggtttaagttacccaactacttatcgcaatactctttgttatacaacttaccatctcaatcaccttaacccttactgaaccatacattc

SEQ ID NO: 297535 - DNA, 368 bp, Zea mays
ggcaaggccaatcccgatcagtggtgggaaacctttagcgctagcgccggtgaccataacaaagaggaagccgcggtttctctggtatcggcagcagtaagggggagatgtcgttggcgtttaacggcgatgagaccgcccctttgttcggcttccttggcgcctacgatgagctcgtcttcttatgcatgggggcggcgtacggtacagccaagattggcatcggcgtggcgtgcatgggtgtcatgcgcccagagctcgtcatgaaatccatcgtgcccgttgtcatggctggtgtgctcggtatatacggtcttatcatcgccgtcatcatcagcactgggatcaaccacaaggacaagccatac

SEQ ID NO: 297536 - DNA, 307 bp, Zea mays
gttcgagaaggacgctgattaagggaggactcgttcattcaagcgcccctgcctgctccacacgctcagggctgaccgttagagagggattaccatggatatagctctatcgaagtttgagaccaccaggtactactgcacggtcattgatgcccctggacaccgctacttcatgaagaacatgatcactggtacatggaatgctaactgtgctggccttatcattgactccaccactggtggctctaagggtgatatctacaatgacggccagacccgtgaacatgctctcgttgcagtaactctt

SEQ ID NO: 297537 - DNA, 305 bp, Zea mays
gcaggctgaagaaactgacacagttggacctttcagataaccatctcagtgggaacattcctgaggagcttggggagatcgtcgagataaacacgcttgatctgtcacacaatgagctttccggtcagttgcccgtgcagttggggaatctcagactggctcgtttcaacatatcctataacaagctctcagggcctatacccagtttcttcaatggcttggagtaccgagacagcttcttgggcaaccctggcctgtgctatgggttctgccgtagcaatggcaattctgatggcagacagagc

SEQ ID NO: 297538 - DNA, 369 bp, Zea mays
  unsure (1)..(369): unsure at all n locations
gcagagataggcgtcttcgtactcgcctacctccgcggctcaaacctttcccccttctcccaattcccgccgccgctccatcccgtaacgcgacaccatgagggagtgcatttcgatccacatcggccaggccggtatccaggtcggaaacgcgtgctgggagctgtactgccttgagcatggcattcaggctgacggtcagatgcccggtgacaagaccattgggggaggtgatgatgctttcaacaccttcttcagtgagactggtgctgggaagcacgtgccccgtgctgtttttgttgaccttgaacccactgtcatcgatgaggtgagaactggcacctaccgncagctcttncaccctgagca

SEQ ID NO: 297539 - DNA, 417 bp, Zea mays
atcctttaaagtcaaaccacgcgtacgcagacacagagctcgaccccccctcccctatcttcgctcgtccagccctgaccacccgcatccccgtcagtcatggcagcggcagcaggcggaggcgcggtgcgtgcgctgtcccagaaggagcaggacatacagatgatgctcgccgccgacgtccaccttggcaccaagaactgcgatttccagatggagcgctatgcctttaagcgccgcaccgacggcatctacatcatcaaccttggcaagacatgggagaaactgcagcttgcagcgagggttatcgttgccatcgagaacccgcaggacatcatcgtccagtccgcccgcccctatggccagcgtgctgtcctcaagttcgctcagtacactggcgctcatgccatcgctggg

SEQ ID NO: 297540 - DNA, 226 bp, Zea mays
tgttcatcgagatctgaaatctccaaacttgctggttgacaataattggaatgttaaggtttgtgactttggactttcgcggttgaagcacagtacatttttgtcatccaaatctacagctggaacagtgtgatgtttatagctttggtgtcatcttatgggaactggcaacacttagaatgccatggagtgggatgaatccaatgcaagttgtgggggcagttgg

SEQ ID NO: 297541 - DNA, 481 bp, Zea mays
  unsure (1)..(481): unsure at all n locations
acgtcgcatcgcgacgcgtacagtaatgcttgtgatccctctatgagnntcgacccacgcccgtctcgtcccgtcgtcctcggcttgatcccgtaccacgctgcgcttcttttcccctcgtggtccgccgtctacatcgcgcccgtccggaacccctatgcctccatccgccacagggcagcaggggatgggagaaagggatgcctcggagggcgtcgcccccnttgcgcctcgctgcggcaagtcccgctcagcttcaatgccccaagtgtgtcgaacttaagttaccgcgtgagaatgcagctttctgcacacaggattgttttagggcagcatggagctctcacaaatctgttcacccaaagcctggtgcaccggcatcccagcagtctccagaaggttggaaatattgtctgagaaaagggcgggaacgtgcattgcaacttcctcgttttgattggacaggtccattgagaccaca

SEQ ID NO: 297542 - DNA, 325 bp, Zea mays
tgagggggggcacgctcgtaacttgttcctctaagtcgacccagctttcgatctgcaaagttgaactggcgcaggtgtgctgtttttggccttgtaacagttggactcgcagttgctgagggagcaaatgctgctggtgcttctcgagttattggcattgacatcgacaattaaaagtttgatgttgctaagaactttggagttacagaatttgtttacccaaaagagcatgactaaccgatacagcttgtcctggtcgttcttacagatggcgtgttggattacactttttagtgcattggaaatgtttcggttattaaaggct

SEQ ID NO: 297543 - DNA, 176 bp, Zea mays
tcgatacaacagtgtcccgtccacatcactggctgctttatcacagtgtactggctatccttatggacaaccaggccatatatgacatctgccgtcgttccctcgacattgtgcgcccaacctacaccaacctcaactggctcgcgtcccacgtcatcttatccctgactgcctac

SEQ ID NO: 297544 - DNA, 354 bp, Zea mays
gtacgctcgatcctctcacataacccacgcgtactgttccaccgaaggcatgtcaaatattgcgggttcctgtgctggttggatgtctgcagtctcttctactcccacgataccgccacaatgggtcacgaccgacgaataactgtcctttttgcgagtgccgtgtgctaacagtggtctaagtgttactcaactgaagtctgtctcacctaacgatccatcgatggatatcttctcgcatcttacccttataacgcttgtttctccaacaatcatcaacactattacagcaattacctttggtgcatttattggcacaaaacatcatggcacaacaactacaacaacttgtgc

SEQ ID NO: 297545 - DNA, 309 bp, Zea mays
gcgtggaccaaccatcacgggagagctcggccgctaccacatgattcctaacactggaagagctctgagcatcatctaaaattcccaacatctggcccatatgacatgctctgtcatgtgtacacggctatctcagacccagtcactgaggtcagaattttcgtaggtagggaagaaaagaagaaggcgcacttgctttctgctgaagatttagagccatcactgatagaatccaagaccattcctgaccctgttgactagatgccggatgacggagatgagagagctataattcctgacccacatgca

SEQ ID NO: 297546 - DNA, 359 bp, Zea mays
caactaccaacatacaaagcacaatagtgtaccaacaatgccacccaaaatatgcgggctccttatgctgcttgggctctatacaagaacatataccgccaccatacttccaaaatgctcgcaagctcctatagcttgccttgttcacccgtaactattaccatcaagagtcttctgtatgtgaaaacccaattcttcaaccctacagaatacaacagaccatcacacctggcatcttacctgtatcacccttgttactccaacaatcatcaaccctattacatcagctacctatggcgcatacattggcgcaaaacatcagggcacaacaactacaacaacttgtgctaacaaacctt

SEQ ID NO: 297547 - DNA, 221 bp, Zea mays
agtaaacccacgcgtgcggtttggttcctgcaacgtcagcagcttacggagccgggtcctgggccagtgcgtcgagttcctgaagcaccagtgcagccccggggcgacgccctacggctgggcgcagtgccaggcgcttcaggagcagtgctgccaccagatcaagcacgtgcaacagctgcaccggtaccacgcgacatacagcttgggcctgcagtcct

SEQ ID NO: 297548 - DNA, 407 bp, Zea mays
caccagactttaacctctgccagctgttctgatcctacacattgacccccttagggagaagtgtccttggtctctgcttcgcattcctaactcaccattgctccccttcagcgacaccctacggctcgtcaaagtgccagacccttcagctgcactgctgccaccaaatcacgcactttgaacccctgaccagcttccacgcgtcatacagcgtggccctgaagtacatcctgcagcaccagccagaacacgagctcacggtcctgatgacgacccaggtatcacaacatctgacggcgatgtgcagactgcacctgatataaccacctccctgtgcttgcaacgcacctgacgccagtgcctactactgacgaaactatacactgttatcataatgtaatggatcc

SEQ ID NO: 297549 - DNA, 302 bp, Zea mays
atccccaaaccctagctcccggtgctcgatggcgaaccctcgcgtcttcttcgacatgaccgtcggcggcagccccagcgggccggatcgtgatggagctgtacgcccacaaggtgcccaccaccgccgagaaatttctcgcgctgtgcacggacgagaagagcgtgggctagtccgggaagccactccactacattgggtggaccttccatccccgcattccttactgtatgtgccagggcggggacttcaccctcagcaacggcaccggcggcgagtgcatctacggctagaagttcccc

SEQ ID NO: 297550 - DNA, 321 bp, Zea mays
gtgacccacgcgtacgcactggagtaaacatgccactttttggatcctgcacgtcagcatttaggagcgggggctgggccaggcgtcggtgctgagcaccataacccccggcagagagccctaggatcaccacatcgcgacgctcaacacagtgctgccaccaaatcaggctgtagaacccataaccgttccaggcgacataagctgagtcctgcagtgcttgctcagcatcagccggaggcgagctcgccgtgctgatggcaggccaggtagcgcaacatctgactgcgatatgcggactgcatctgtaacagccaggtc

SEQ ID NO: 297551 - DNA, 346 bp, Zea mays
tgcacccgtgcgtccactcgtatcctctagcagccagattagctccctcgttacagtgcagcacgccgcctgttatgcggaggaagaggcagccaaaacaaggatgcagatcggctgccgcatcaagaagcagcagcagctaggcgatctgctcctgacgaaggtcaaggtctatatcgtcaacccgcacctgctgctcctggttagcggcgccatcgcctgcgccctgtgcagaacatttatggcgcctcttgagactaaccgcactcacttgattgtccgcttcatcggcgtcaactccatggccccagtgttccaattgatcatgcacaaccaacggtggacc

SEQ ID NO: 297552 - DNA, 325 bp, Zea mays
ggcggatccgacgaacccaccgaccctggggaagtgtaaccctagatccggaccggacatggcctcccgacggattgcttcctcgatagttcgttccgacttcagcctcatagcctcctcctccgtcatgccgagcacgcgcgaagcgccgcaccgcccttccccagccaggtacctctttaaccgcgccggcgtctactcctctaccatcgctgaccaggtggcgcccgtcaccccgacgtcagccacacagaataccggcggtctgcagatcaccgacgagtctaccaagccccacgccatcagtcatgtgtgacacgtgatc

SEQ ID NO: 297553 - DNA, 263 bp, Zea mays
gccgactcgagagccactccaaaacccaggcttccagaaccttattgaagctacccggcgactgctccactcgcaccgacggagaaggaaccaatgcgcgtgctcgtcactggcgccgcaagacatattggctatgccgtggttcccatgatcgctaagagtgtcatgctcggtgcagaccaccctgttattctgcacatgcttgacattgcgtcagcctctgaagccatcaatggtgttaagacggagttggtcgatgctgc

SEQ ID NO: 297554 - DNA, 378 bp, Zea mays
accaagcaacatacaaagtacaatccagtagcaacaatagagcaacaatgccaaccaagatattgtgcctccttatgctccgcgctctttctgcatgtcttgctaaccctacaattttccttcaatgctcacaagctcctatagcttgcctacttgccccataccttccatcaatgatagcttcactatgtgaaaacccagctcttcaaccctatatgctccaacaagcaatcgcagcaagcaacatacctttatcacccttgtttcaacaatcgccagccctatctttggtgcactcattggtacaaaccatcacggcacagcagctgcagcaactcgtgctacctgtgatcaaccaattagctctggcaaaccttt

SEQ ID NO: 297555 - DNA, 273 bp, Zea mays
gtacactcccggcggcgtcgcatgatcagggttacgggcacccgaagatggtgaaattcctcaagcccaggtaagagccgtgatcctactgcaaggccggctcgccggcaagaaggccgtgatcagacacgtgttctaagatggcacccacgaccgcccctactgccactgtctttgtaacggactctccaattaccccaataaagtagtccgcaaggactctggcaagaatacagcgtataaatcacgcgtcaagtgcttcatcaaactcgt

SEQ ID NO: 297556 - DNA, 400 bp, Zea mays
ccgggagcgacggacgcgtaacgcttgtaacctttataaaccacccaagcgtacgcccactacaccaaacctaaccagtttcgaggccatcatattacggctacgtgcgctctttccctttgaagccaacccagcacatgcgttcattactcccgaaggctcacttgctcctaatcacaataagctacagtcgctggtaccagttccttgacagatcttcgaacacgcaaacttgcatgtctacagactacctctagcacttcttaccagcgcattacaacagacagttccacaggagcttcaacagtcttcggatcatgttaatctacaaaccgttgccagccaacaacgatcccaatatctgccatgaatgaaaaacctacccgatagataccctgta

SEQ ID NO: 297557 - DNA, 350 bp, Zea mays
  unsure (1)..(350): unsure at all n locations
tacgaggtcggaagcacgcgtgcgtagaactcgtatcctctaaaatacacccacnacattttaatccttctacaacaatcactcatcaattaccaccagcatatttacaaagcttatgctccttgctctttacacattccttcaaacgcaacaattttccctcaaagcacacaagctcctataacttgaccacatgccccataccttccatcaatgatacacaaaattatatcaaaaccaactggtgcaaacttattttctccacctcactaatgaaaacagcgacctaccctcttcacccttctttaaacaatcaacaaccctactatttttacagcaatatacaaacc

SEQ ID NO: 297558 - DNA, 357 bp, Zea mays
acgcatactatctatactcaactgcaacatttatgctcattattgcacccacaataacatccgaatattgtgccttcttattctcctagctccttctacaagtactatttctccgaccattttcccacaatgcttacaagctcctataacttcccttcttcccccatacctctcaccatcattgtcttacgcatgttaaaacccaattcttcaaccctataggatccaacaggcaatctcagctggcatattacctatatcacccttgttcctccaacaatcatcaaccctattacagcagttacctttggtacatttattggcacaaaacaatatggcacaacaactactacaact

SEQ ID NO: 297559 - DNA, 451 bp, Zea mays
tgggacgccggaagcaaccacgcgtgcgctcgtacgctctaaaaaccaacataaaatgtgtaatacttttcaccaatatagtaacaacggcgaccagcagtattttcaatccttatgcgtgcctgctctttcttcatctattgctaactcgacaattatccctcaatgctcacaagcacctatagcttggcttcttcacccataccttccatcaatgatagcttcagtatgtgaaaacccagctcttctaccctatacgctccaacaagcaatcgcatcaggcaacatacctttatcacccttgtttcaacaatctccaaacctatctttcgtgcaatcattggtactaaccatcacagcacagcatctacagcttctcgtgctatctatgatcaaccaagtaactctttcaaacctttctgcctactctcatcaacaacaatttcttcca

SEQ ID NO: 297560 - DNA, 398 bp, Zea mays
  unsure (1)..(398): unsure at all n locations
atgcacgcgtgcgcccactcgtaccctacacagtcgaccctagcttccgaccggaccccctcttttttttttttttttaggaagagactcgttttattgtgaagaaggacccacacgcgcttgcatgtcaacttattattcggttcaacacaaatatttctatctaaaatgcancacccacaaaggcttcctgtaagaacatgggtcgaatcctcatgggcattcggttcaacatgaatggtaactgctgctgcaccataatcttttatacggcgtcccaacgacattgtggcatcatcatttgcaacattatgctccgcaagaccattggtgacattattctccgcatcatcaatggtgacatcatgttaagcgttatcatctgtggcatcatcact

SEQ ID NO: 297561 - DNA, 208 bp, Zea mays
tggcttctcctccccctcttaccaagtcctcttcgggttacggttacttagggttttgtggaggggcgatggcggcggctgtgttgaataccggttgttcgtccgggggcttggcttggccaacaaccaccagtcgcttgagaattgctttggcttctacggggagatccttgacttcaaagtcatcaccgaccgggagacggggagg

SEQ ID NO: 297562 - DNA, 309 bp, Zea mays
cgtcccgcagcatctcaaaccccatggccaagatcaaaaatcggaatcaatggttccggcggatccggaaggtggtggccagggtggccctgcagagtgacgatgtcgagctcgtcgccgtgaacgaccccttcatcagcaccgactacatgacctacatgttcaagtacgacactgtgcacggacagtggaagcaccatgaagtcaaggtgaaggactccaaaacccttctctttggtgagaaggaggttgctgtgtttggctgcaggaacccttaggagatcccgtggggttccgttggtgcttaat

SEQ ID NO: 297563 - DNA, 200 bp, Zea mays
ttaaagtcaaccaacgcgtccgcgcaaattgcaccaagaaatccatcgagaggccgtctacaggggaattaatggcgtcgtcgtctagcagcagccaccgccgcctcatcctcgcagccgccgtcctgctctccgtgctcgcggctgccagcgccagcgccgggacctcctgcgtgccggggtgggccatcccgcacaac

SEQ ID NO: 297564 - DNA, 440 bp, Zea mays
  unsure (1)..(440): unsure at all n locations
ttttcgacccacgtcttttacaccaacaagcaacatanaaaggagaatgctttatcaacaatagagcgccaacccacaccaacatattttccctccttatgctccttgctctttctacatgtgttgctaacgcgacaattttccctcaatgctcacaagctcctatagcttccctttttcccccataccttccatcaattatagctccagtatgtgaaaacccacctcttcaaccatatacgcttcaacaagcaatcgcagcaagcaacatacctttatcgcccttgttgtgtcaacaatcgccagccctatctttggtgcagtcattgttacaaaccatcacggcacaacaactgcatcaactcatgctacctgtgatcaaccaattatctctagcaaacctttctccctactctccgcaacaacaatttcttccattc

SEQ ID NO: 297565 - DNA, 234 bp, Zea mays
tcggaaatgtgacccgggccacactccgctgctgcgacatggcgatccgctacaaggcctgaatctcgctgctgctcgcgctgaccgtcgctctctccgtccgggcggaggaggagcccgccgccgcggctgacggcgaggcacagctcaccctccacgtgcacagcttcgacaaggccgtcggcaagcaccgctacatggacgacgagtactacgccccctggagtgcgcact

SEQ ID NO: 297566 - DNA, 354 bp, Zea mays
  unsure (1)..(354): unsure at all n locations
tttctacccacgctttctctccagactgtgccgtgggantgggagtaggattatacaaaggtgctgggcactcaccagctgcnaccgccggtgtcggatatgaatgatagaagcggctccagggctgctgtgtacgagcgctactcgcattttttgtctctcatccccgtcctatacaactggtttgccaaccacaacctcgtctggccatccctcttatgccggtggggcccacatttttagaaatcttcctacaaaaatcatcaacctcctttacctatctcaaccaaacagattggatttttcccaaatactcctgcttatcccataattttttaattttcttaaaaccct

SEQ ID NO: 297567 - DNA, 305 bp, Zea mays
gttggcttctcttgccccttcggttcggggtctggttcgggagggtatccgcggttcggtttctcgaatcagcggatcgagatggccgcgtatgatgttgactaccgctgcttcttcggcggcctcgcctgggccaccgacaaccactctcttcacaacgccttcagcacctacagcgaggtcctacagtgcaagatcatactcgatcgggagacacaaaggtcccgcggcttccgctacatcaccttcttcacagaggaagctatgccgaacgccatcgaaggcatgaatctgaaagagctgga

SEQ ID NO: 297568 - DNA, 358 bp, Zea mays
gttttgctgctctcggaccccgatctccgaaggccgcagcatcatgcgaggccgcgctaccgtgtgaccgagatggcactgccgaatgaggggaccgttgattaccccggcttcaagctccatgtcctcggcgatggtggaactgggaaaactacatttgtgaagaggcatctcactggagagtttgagaagaaatatgaaccaaccattggtgtgggagttgatccgctggagttcacgactaactggggtgagatgacgtcctactgctcgaataccgcagggcaaaagaaggctaccggcctcagggcgggatactatatccatggacagactgcgatcatgatgtttgacatga

SEQ ID NO: 297569 - DNA, 304 bp, Zea mays
ggccaagatcaagatcgggatcaatgggttcggccggatcggaaggctggtggccagggtggccctgcagagtgacgatgtccagctcgtcgtcgtgaacgaccccttcattagcaccgactacatgacctacatgtttaagtacgacactgtgcacggacaggggaagcaccatgaagtcaaggtgaaggactccaaaacccttctctttggtgagaaggaggttgctgtgtttggctgcaagaaccctgaggagatcccttggggctcggatggagctgaatatgttgttgagtctactggt

SEQ ID NO: 297570 - DNA, 203 bp, Zea mays
tcggttggcttctcctccccctacggctcaggttcgggttcgcgaggttctcccgggttcggtttcgcgggtgaacggatcgagatggcagcgtcggatgttgagtaccgctgcttcgactgcggcctcgcctggaccacggacgaccactccctccacaacgccttcagcacctacggcgaggtcctcgagtccaatatcat

SEQ ID NO: 297571 - DNA, 303 bp, Zea mays
tccatccacgcgattcgaaacaggttgtgcttgtgactgcatcacaggtcagtgcctccatgtgcgttcagttttggcttctgcccaaaatgtataggaggaagacgcagggaaccaaatgcggagaacgtctctcctggaccatactgaacgaactgataatttgtcttaaggggggctcacatctttgcatggtgaaatgacacgttcattcatatcactgatatgagagggagggaaactcttgttttgatcagcggatgaataaatatgaaggctgaccgctgatacacttcagcttac

SEQ ID NO: 297572 - DNA, 359 bp, Zea mays
  unsure (1)..(359): unsure at all n locations
cttcgaaataatgacctcaaccaagatgatcctatctcggaggttgaaactgaggccaatgatggtgacgagagcaagttacctttgcagttggcaattgtgggacgtcctaatgttgggaagtccacccttttaaataccttgttgcaagaacagagagttcttgttggtccagaggcaggcctaacaagggactcgattcgggctcaatttcaatttgatagtcgaaccgtgtatttagtggatactgctggttggatggaaagatcagggaaggagaaagggccagcatctttgagtgttgtgcagtctangaagaacttaatgagagctcacatttgtgctcttgtgctggatgc

SEQ ID NO: 297573 - DNA, 279 bp, Zea mays
cggacgcgtgggcggactcgtgggcggacgcgtgggcgccgacgcctacctattcggcgggcccatcttcaacgactacagctgcgtcggctaatccctgctgctaaagcgggagaaggccggcatagagcagccggaccgtatggaggtcggagacggacagcagatcgggtgaatccatatgcccgagttcctgcgcgcgctcgccaagcgcctgatgcgcaacagcactgagtacgacaactatcgacggatcatagtactcgaccgcgagccgat

SEQ ID NO: 297574 - DNA, 274 bp, Zea mays
gcgcttctgcgacgccaccaccacacgttcacggtggcgagagcttatcgtcttcggcggcgaagatggtgtcgcttaagcttcagaagccgctcgccccgagcgttcttaagtgtgggaaaggcaaagtctggcttgagccccatggaatcaggcagaacttcattggttacttccggccgaccatccggaattgggttaaggttgggttattattcaggaaccctcaaaaggttcattttaggtcccgtccaggaagggcacatgaggccaa

SEQ ID NO: 297575 - DNA, 135 bp, Zea mays
aaagcattagaaccctatcctcgctgcgtgcgcccacgctgcgcacggagggaataagcgacgtgggcgtatacacctttgagtgcctcaacaacggcgggaagtggaccgcggagcaacacttcggcaagatct

SEQ ID NO: 297576 - DNA, 338 bp, Zea mays
aaaggctcctcccgaccgcaacgcccgtgatctacctcgaccccgacatccccgacccgatggcgcccaacgcggagaacaagccggcggataagaagccggcggccgaggagaaggcggagaagacgaccgcacggaagaagcccaaggccgagaagcggctgcccgagtgcaagtccttcggcaaggagggcggccagaagaacgggaagaagaacgccaacaagagcgtgcagacctacaagatctacatcttcaaggagctgaatcacgtgcaccccgacatcggcatatgctacaaggccatgtacatcatgaactccttcatcaacgacatc

SEQ ID NO: 297577 - DNA, 342 bp, Zea mays
gtgcgctccatgctagtaggtttggactcgggagccatcgcgtggttccacaacgcagcttccgaattggacttccgtgaatagtcatagccaccttcgaacaacaaacctaaggctgattctgcgaaaggtactgcagtggggattgccacggacctgacctagaccaccaagtagtacggaactacacttgataccatgggagcccgacacttcataaacaatctcactactggatcggctcaagctgactgtgctggtgttatcattgactaaaccactgggggtgttgaagcttggatctccatagatggccagacggatgagcatgttcggcttgct

SEQ ID NO: 297578 - DNA, 310 bp, Zea mays
cggacgcgtgggccgccaacagccccgcgacctgcagcaggcgactccatgcccctacgctgctgccggcggtgtcccccactgaagaaactatgtgctgctgtatagccggtggctagctagctagttgagtcatttaccggcgatgattgagtaataatgtgtcacgcatcacaatgggtggcattgtcagtgtgagcaatgacctgaatgaacaattgaaatgaaaagaaaaaagtattgttccgtagcacggaacgatttctcgtggggggacgcctcgtaccaccagaaaacgctggagaaccta

SEQ ID NO: 297579 - DNA, 309 bp, Zea mays
cgctgagctcgatcgggctactacatccatggcgaggtagcgcaaggcctccgactccgccgcgggtatcgacggcgtccactcgctgccaccaccgctggctctggcttcaacagacgcgtgtgcatgggcatcgtccgacggtactagcatggccgcggcggctgaggcagcggcagcgcaacaacagcggcggggaaggaagcggttcgtgtgtgtgcggcagcgaccgtcgggacggtgggtggcggagataaaggacaccatccagatgatccgcgtgtggctaggcaccttcgacacggccga

SEQ ID NO: 297580 - DNA, 311 bp, Zea mays
ggcggctgaggcaacgcctcttcctcgcaccaccacgggcactcaacacagcacaggcagttcgagagagagagagagagagagagagataaagatgtcggggttcgggcaccatcaccacaacgagccggcttccccggcgtagggccccaaccaggtgttcaagatctactgccgcgccaacgataactactgtctggccgtacgcgaccgtgcccttatgctggccccggtgaaacttaaggacgaccaaccacacttgtacaaggacatgcgcttgagctcccgggacaaggacgaggaaggtatgc

SEQ ID NO: 297581 - DNA, 240 bp, Zea mays
acgatcgatctcgtttcaaatccatgcatgctcgtttcctgcgtaccagctcatcttatccccaatggccttaacaatatgcggaatcatgggtttggctggatccggaggctggtggccatggtggccctgctgagtgacgatttcgagctcgtcgccttgaacgtcccctttatcaggaccgactacatgacctacatgttttagttcgacactgcgcactgacagttttgcaccatg

SEQ ID NO: 297582 - DNA, 196 bp, Zea mays
gctctcccacacagaaaaccctagccgccgtcaccgtatcggcctcccaggtaagcaagatcgtcgagtccgtcgccgtcatgaatcgcaatccccgcgtcacgtgctatcgccggaagtgccgcatggctcactttattgcatcgttctctgtccgtcgagttctcatgtatgtggagctgtcgactgatctcct

SEQ ID NO: 297583 - DNA, 328 bp, Zea mays
cccgatcgacaccatgagggtgttgctcgttgccctcgctgtcctggctctcgctgcgagcgccacctgcacgcatacaagcgggggctgcggctgccagccaccgccgccggttcatctaccgccgccggtgcatctgccacctacggctcacctgccacctacggcgcatctgccaccgccggtccacctgccgacgccggtccacctgtcaccgccgatccatgtgcacgacgccggttcatctgccgccgacccatgccactaccatacttaaccgtcccggacttagatctatacgcagtcacacgcatgcccgtgccaacag

SEQ ID NO: 297584 - DNA, 279 bp, Zea mays
gacatctctgataagctgcaatggctgctaaagctggtcctgccaagaagggtgatgcctagacccactccttgtaggttgccacggctgcaaagtctggggcagccaacactatgaccaataagatccgtacgtctgtgtcatttcaccgccccacgaccctgaacaatgcttgggaccccaactacccacgaatcagcactaccggaaggaacaagcttgatcagtaccacaatctcacgtacccccttaccacataattagcgatgaagaagattg

SEQ ID NO: 297585 - DNA, 411 bp, Zea mays
ctggctcagctctgtgcctctgtcgcccttctccttcctctcggtgtcccctctgtcggtccatgctcgtctgctggctcctgcttgttgcttaggcgttcttggtcaggtgagcagcactggcggcgatggcgaaggagacggagtactacgacgttctcggcgtctgccccgccgcatccgacgaagagatccgcaaggcctactacatcaaggcgagacaggtgcatcctgacaagaatcccaacgacccacacgcggccgagaacttccaggctcttggagaggcttaccaggtgctgagtgaccctctgcagaagaaggcctatgacggctatggcaagaacagcgtatctagggagaacatactggatggtactgtggtgtttacccttcttttcgggagcgagc

SEQ ID NO: 297586 - DNA, 343 bp, Zea mays
gttctggaacttaaacgcccaccgcgtcatgtacggtatcaggggcagcgccagggtccaggtcgccagcgacaacgggacaacggtgtttgacgaccttctgcgagcggggcatctacttatcggaccacaaggctacctcgatgctaccaaggcgcaaggagaacgttatcattacattgacttagagacgaaacatgacaccatggtcagtcatatatgggcgaagaaatctgatctgagcgacttgctacacgttgctatcgacagctattattacatctgcatgcaagaagctgaacatctcaggaacggaaggaagcctgatcttggtgggcatact

SEQ ID NO: 297587 - DNA, 352 bp, Zea mays
acggccaaaccctagccgccgtcagcttcggcgacggcatggtcgccgtcaaccgacccctcgtatacgtgaaagccctacaaggcgacatggtaaccgacgcccccagcatctccttaccgcccgttttaggggcgccgttccgccccgacgtgatcaggttcacccacaagctgatgtcctgcaacaagcgccaaccctacacagtgtcccgacgggcccgccaccatacatcagccgagtcctggggtaccagccgcgccgtgtctcatattccacgcgtacgcatgtgcggcacccaccgtgccggccagggagcgttctggaacatagtgccgggcgggcgcatgtt

SEQ ID NO: 297588 - DNA, 260 bp, Zea mays
gctcgactcacgcaatcagcaagaagcggaagttcgtggcggatggcgtgttcttcgcggagctgaatgagatgctgacccgcgagctcgcggaggatggctactccggcgtcgaggtccgcgtcacccccatgcgcaccgagatcatcatccgtgccacccgcactcagaacgttctccgcgagaatggccggaagatcaaggagctgacttctgtggttcagaagcgcttcaacttcccggagggtggtgttgagctc

SEQ ID NO: 297589 - DNA, 314 bp, Zea mays
ggtctttgacggtgagcgcagtctgaccaaggactgccagcttctcgacaagttcaaccttaacagcattgctccagctccaaagggcacaccccagatcgaggtgaccttcgatgtggacgccaacaatttcctgaacgtgaaagcgagcgacaagatcccgcgcaactcacataagatcacgatcacaaactagaaagggctgctgacccacgatgagatcgaccgcatggtgccggaggcaacagacttcaccaaggacgacaagtcagtgatggagcggatcgacacccgcaaccaaatagaaacgtaca

SEQ ID NO: 297590 - DNA, 285 bp, Zea mays
ttcaagctatgtttccttttggcttactgcgcaagaagggtaacgcgcggacggtgatcattgctaataggcttctcccgtgtttgaaccgggtgctggtctagaaacttgtacatgccattatgactcgactactgatcctactcccaggaacatgcaagcagctgaatgctgctcaagtggtggctgttggccatgatgatcgccacactgctggcaatctaatcccacttgctcttaatgaaggtgacactgtcctcctgcctcattatgatcgcactgaac

SEQ ID NO: 297591 - DNA, 468 bp, Zea mays
  unsure (1)..(468): unsure at all n locations
tagtcgacccacgctgtccgcggacgcgtgggttccancccctttttgggggatggttctaaagaaactttcccagattggttattttgcaaagcatgtcaaacttcgctgggaaaagctgctgcatctttacttggtcattcattttgtttcaaatattccttcatttgagttttattttcacattaccaagttctgatctccttacatttttgctttcagatccaagtcaccatggaattagagaagaacacccagtcttccttggagagaaccaatgttgtgctggtggcatggattttattaccatgatattcacactgtcagccatacccttcgacataatgccaactaccatagaacaatgtgtttctgttctgaaacccggcggtcttcttctgtttagggattacggtctttatgacatgacaatgcttcggtttttacctcatcaaagaataggatttc

SEQ ID NO: 297592 - DNA, 360 bp, Zea mays
tccacccacgcgtgcgttctcttccagccgtcaccaccggcagaggctgtcgtcatctttggtgcggccaagaacctccatccgcccaccaaatcacttggtatactttgttgcggggagatggatgtctcttacacaatcctcaacaccgaggcatggctaaaaaagcttgatgagtacataatcactcgcagctgcatcactggctaccaagctttcaaagatgactgggctgtctacacttcgttatcgtctgctccctcctccaaatatatcaacgtcgcaaggcggtttaatcacattgatgcgctcccgcggctaagcgctattactgcacacggccatggtgtgaaggttgaa

SEQ ID NO: 297593 - DNA, 442 bp, Zea mays
  unsure (1)..(442): unsure at all n locations
ccggaaactcaggncagaaaaacatggtgacagcccttttcagtttcgaccctaaccaaaacacgggcatggtggtgcanaaatgtaggataggtgccacttctcatttacagcctgttcgtaaaaacttcccaacatatcttggcaggccctggaaggagtactcgaggactgtggtaatgcaatcaacaatcagtgacgtgattcaacctgctggttggcacgagtggagcgggagtttcgccctgaaaacactgttttatgccgagtaccagaacaccggggctggtgcctcaacttctgcgagagtgaaatggggagggtacaaggtgatcactagtgcaagtgaatctcatgcttttactcctggcaggttcattgctggaggaagttggttaagctctacaagctttcctttcgcttttgggttgtaataatttta

SEQ ID NO: 297594 - DNA, 427 bp, Zea mays
  unsure (1)..(427): unsure at all n locations
gttttcgcgccgccgccgcatccgcaacaatgccgtcgcacaagaccttccggatcaagaagaagctggcgaagaagatgcgccagaaccgccccatcccctactggatccgcatgcgcactgacaataccatcaggtacaacgccaagcgcaggcactggcgccgcaccaagctcggcttctgagcgtcgggattggccggctgctgcgtcggaaggctagggtctaagagctatcttctgttttatcattgtctctgtttctgtaagctagcaagtgatgctgtgatgcttttattaagattctgatgagtggggacgttaagagaaaattggcagtactgtgttgtaccccaagattccttgcagcattgctatgctaagtaaccgaacccttatctcttttttaaaaaaaagatgggnggggg

SEQ ID NO: 297595 - DNA, 287 bp, Zea mays
gacccacccgcccggtggcttctgccaatatggtgagagtcacatactgccgaccacaccgagccgccgccacgcatcaactccagattatcaaacaacatggccggactcgacacccacctctttacctcgcagtccgtgaactagggacaccctgacaagctctgctacccgatctgaaatgctgctctggacagctcgccttgctgaggaccccgacagcaatgttgattgtgagacctgcaccaagaccaacatggtcatggtctttggtgagatcaccacca

SEQ ID NO: 297596 - DNA, 221 bp, Zea mays
cgagaacagtaacaatgcttattgaatccagctacttgcttattggtgggatcaaatcaataccaacccaaccgggctggcccccgccatatatcagaacacctcgctgtgcgcgtcccatcgaatgccaaccaaatgccgtctgtgaccggacgtatccatgctgataggatgtcccagcgcgccaaatggggagcgacacaatgccacacgacttacga

SEQ ID NO: 297597 - DNA, 375 bp, Zea mays
acctggtgcccagtctgccctcatggcgcttgctcgttccgggatgaaaatcggacgcattgaggacgttaccccggtccccacggacagcactcgcagaaagggcggtaggaggggaaggaggctgtatgcgtctctgctgcgtgccatttgctggctcttggcgggtggccatcatgaagctagtcctctctgggtggtgatgctgatttctgtgtttgtcaagacgagctttaattttgctctatgtggatgaccgcttaccgttaagtgaacctgtatgatgttgcaatggataatgttttttggctgagggaatttaaaaaaaaactttgtaggtagcaatgatttaaaaaaaaagggcggccgccccgg

SEQ ID NO: 297598 - DNA, 393 bp, Zea mays
cggacgcgtgggcggacgcgtgggcggacgcgtgggcggacgcgtgggcggacgcgtgggcgccgcaggcggcccaggcccaaccgcagccactggcgcagcagcctccgccgcctcctcctccagcggggctgagccggtacgagtcgcagaagcgccgcgactggaacacgttcctgcagtacctgcggaaccacaagccgccactgacgctggcccgctgcagcggcgcgcacgtcatcgagttcctccgctacctggaccagttcggcaagaccaaggtgcacaccgagggctgcgcccacttcggccagcccaacccgccggcgccctgcgcgtgcccgctgcgccaggcgtggggcagcctcgacgcgctcatcggccgtctccgcg

SEQ ID NO: 297599 - DNA, 285 bp, Zea mays
gatcagcacagcggcagtgcgtagagaggatcgccgaacagaacaccatgaagatggtcatcgctctacgagtgtgcctggctctgtcagctgccaacgcctatgcaatgcagatgccctgcccctgctcagggctgcagggcttgtacagcgctcgcgccggcctgactactatgatgggcgccggctggctgtacccctacgcggagtacctgacgcagccgcaatgcaccccgctggcagcggcgccctactacgccgggtgtgggcagacgagcgccatgt

SEQ ID NO: 297600 - DNA, 335 bp, Zea mays
tccacagtcaccgccgcctcccccagcgtgcagcccgtacgccgcgcagccaacccagcggacacgatgcatgcccacggcatcgccatccgcgcccgcgggccggtggcggcgacgcaggcccccgcgcgccgactgcaatgccgcgtgtctgcggcggcggtcggcgcgcccgccgcgcgagcccgcgtgacgcactcgatgccgccggagaatgcggaggtgttccgctcgctggagggctgggcggcgcggtctctgctgccgctgcttaagcccgtggaggagtgctggcagccggctgactttcttcctgacttcttgtccgagatgtt

SEQ ID NO: 297601 - DNA, 400 bp, Zea mays
gcggatgcggcaagcagcagtacggctaccggccgactgagcccgtctggttcggcagcgccggcaggggcgacgccgtcgtcgacgttccgctcgagaacatggggagcaaggcgagtgagctctcgtcgtgggaatcagatctgaagcggatattaagaggaggtaggaggcgctgaagaatgctggcgtgccgatggaggagatgaactggccaccattctttcctatcatccaccatgatattgccaatgagataccagccaatgtgcagaaattgcagtatcttgcattcacaagctggcttggtgtgttgtcatggaccattctgttgcaagtgtgatttagtaatagcaagtcattttcttatcttggtggtggtgcgtaaggccataagcat

SEQ ID NO: 297602 - DNA, 406 bp, Zea mays
gccaaccgcatccagtccaccccatccccctcgaccccgacaaccccgagtcccgacccgatggcgcccaaggccgagaagaagccagcggagaagaagccggcggccgaggagaaggcggagaagacgaccgcaggtaagaagcccaagtccgagaagcgcctgcccgcctcgaagtcctccggcaaggagggcggcgagaagaaggggaagaagaaggccaagaagagcgtggagacctacaaaatctacatcttcaaggtcctgaagcaggtgcaccccgacatcggcatctcctccaaggccatgtccatcatgaactccttcatcaacgacatcttcgagaagctcgccggcgaggccgctaagctcgcccggtacaacaagaaacccaccatcacctccc

SEQ ID NO: 297603 - DNA, 178 bp, Zea mays
gttgatcgacatcatccaatacatgatcgacgtggatgccggtgtgatcacgatcgataactcgcggtctgaccagaagctactgtccgtattccatgcgggtgtgaaggacagatccagcctaggccctggtgtgtacgacatccactatcgtatgattccctacaccgaggagatc

SEQ ID NO: 297604 - DNA, 323 bp, Zea mays
  unsure (1)..(323): unsure at all n locations
cgacgccaaccgcgccgaggaggtcgcggacaccgtcatggcgctcttcctgggcctcctccgccgcacccacctgctggtccgccacgccttctcgtcgtccccgactgctgggtggctcggctcccggcaaccgctgtgccggggcatggcccgatgcagggggctcgtactgggcattcgtcggcgtcaacgccggcgcacgggtgcctggccaccccgcaccttgcctttcccatgagcgtcctctactttcgatccgctctaacgaggttactgggaaaaggaaagacgtccttctattgtatnttccttctggctgg

SEQ ID NO: 297605 - DNA, 352 bp, Zea mays
ctagagcgtgacttacgtgactatgatgtgtgatgtcgtcgtgaagctgcgggacacccatcttgtgccgggtttcactgctggcgtgtccaacgtcatgtatctcaagacgaatggtaattactctagataccgcgacgagtgcaagactggaccaggcataaaggtccttgatgataacatgctggtcgcatataatgatagcaatgacattgttcttgcgaaacttgggtgaccttaatttactataggatgaatgcccacttatctgttgagtgacctactatgagatcctgatgtaagctgaccgaacttgaagtcgtgaaaaagattgttgggacgacgccagctt

SEQ ID NO: 297606 - DNA, 335 bp, Zea mays
attccctagcacccccagtctgtagccgggcaaccgagacaccgtgtgtgaaccaagcagaccacaacaagaagaagcgtagtcgtcgccggacggaaaggcgcggagcaagatgtcgtggcaggcgtacgtagacaagcacctgatgtgcgagatcgaaggacagcatctcagcgccgccggcatcgtcggtcacgacggcagcgtttgggcgcagtccgagagcttccccgagttaaagcctgaggaggttgctggtatcataaaggactttgatgaacctggtactctttcactaactggtcttttcgttggaggtacaaagtacatggtga

SEQ ID NO: 297607 - DNA, 201 bp, Zea mays
acggatatgcaagacgttctatccctgtatgcgggcagttgcactagaggtatcgagctcaatgatcgagatggtgagacacaagctaggccaaactaccatggatgcgctcttagtcatgccatcagtaggcgcgctcttgccgaggaagatctgacagattgcgtaaggaacatccttaatgaaagggctcattcgttc

SEQ ID NO: 297608 - DNA, 127 bp, Zea mays
gtcgtccgccttgccattaacgaaggcttggtctttcttcttggatctccactcgtccattcacagatccgttccttcagctaggggtagcgttcatctgcagcgatggctatcaagcggagcaagg

SEQ ID NO: 297609 - DNA, 294 bp, Zea mays
tcggtacggcttgtcctccccctacggttcgggttcgagttcatgaggctctcctgagttcggctacatgcgtgatcggatctagatggcggcttcggatgtttactaccgctgctttgtcggaatcctgtcctggttcacagacgaccactacttacacaactccttctgcacctacggcgaggtccacgagttcaagatcatccttgatctggagacgcagaggtgccgcggcttcagcttcgtcaccttttacacggaggaggctattcgatacgccatcgccggccttaa

SEQ ID NO: 297610 - DNA, 326 bp, Zea mays
tcgacaacccagcgcccgcagtcatcgttatcgatcgatcgccggcaaactaacctctaatgttgtctggagcctgcgaggaggacatgaagctcgcggtgggcggcgcccacatgaaccttaaggtcaagggacaggatggccatgaggtgttctttcgcgtaaagaggtccacccatctgaagaagctggtgaacgcttattgagaccgatagtctgtggatatgtgtgccattgcgttactgtttgatggccgcacgctttgcattgagcaaaccctcgatgagctggagatggaggactgcgactagatcgacgccatgctt

SEQ ID NO: 297611 - DNA, 228 bp, Zea mays
gcataataatgacaataatcgatcttgtccgaaggcctgaatatcacgcgcggcccccgtagcgtgtgaccgaaaaggcgctgcgcgcatcacgggaccgctgaattccatagcttcaacgctcgaaattttccgcgaaggtggaactggtaaaactacatttgtggagaggcatctcactggagcggtcgagaagaaatatgaacccaccattgaggtggaagtcca

SEQ ID NO: 297612 - DNA, 254 bp, Zea mays
ggagcctggccacgacgccgccacgggcgtgcagtccaaggacgtccacctcggctcctactccgcgcggctctacctgcccccaagcgccggcgccggcgccaagctgcccgtcgtcgtgtacgtccacggcggcggcttcgtggccgagtccgccgcctcgcccaactaccacctcttcctcaacaggctcgccgccgcctgccccgcgctcgccgtctccgtcgactaccgcctggcgcccgagcaccctc

SEQ ID NO: 297613 - DNA, 331 bp, Zea mays
gcggaaacctaacccacccaagcggcagccatggagcccttccccgacggcgccagcggctcggtggagcggtggcgcgcggaggcggcgcgtgcgttccagcactacctgcaccgatcggggccacacactgcggggcggggggcgggcactctcgttgccgtggcggagtacgcgctgcgagtctactacgtgcggggcttctacatagtcacctaccgtctgggcatctacctgatcaacctcctcatgcgattactgtaccccatggtcgaaccggagctagacgccagacccgagctttcaaccagcggctacgacgagttcaagc

SEQ ID NO: 297614 - DNA, 357 bp, Zea mays
cgatgagctcgacagctacatgtaccggggggtggggcaccagattgtggtgagctacgcgaaatgcatgggcttgcctcttttccggaggcgcattcgcggatccacaagggatcagggtcttaggtacagtgtcacggcaggtgatgaggtagaagatatgtttgctctgttgagcgaggttaaacgtctaatcccatccatcagtgcggagatgtcaggtgcaatcgcattcgattaccagaggctttggtgtgagagtgtttgttcgaggctgggcctggtctcgctggggtatttatggaagcaggatcaaacttttgttcctatgagaaaatgataaagatgggcattgtg

SEQ ID NO: 297615 - DNA, 351 bp, Zea mays
aaaaaacaacgcatgcacgccgcccgcagctgggatcctctcctgtagacgagctcactacttaccgcggccgtcccccgaattattgaccggtgtgtgccggcgtaccaccctttcgtatactaacgcgcattcatggtgggacagactgagaaagcttttctcaagcaggctaaagtgttcctcagctcaaaaaaatctggcaagggtaagaagccaggcaagggtggcaatcgattttggaagaacattggccttggtttcaagactcccagggaagcaattgaagggacctacattgacaagaaatgtccattcactggaaccgtttgtatcagaggcagaattatt

SEQ ID NO: 297616 - DNA, 358 bp, Zea mays
gtcactgatcagagctgtatgctttgcgtggacatcctaatggcgcccgctccatgtggacacacactgcagatggtgttacacttacacatgggcaagagcgagggcaacaagaacatgaacgaactgctcggcgataagggcgcgaacctgccggatatcgccagcatcaggctgtcggagccgacctggttcattgtgtctactgaggcgtgccaacattaccagtaggccggtcgcgccctcccgccctcgctctggtctgaagtcctaaaccgcctgcgatggcttaaatattacataacctcctccctccgccacccgcgttgcccgctcctgctatccaaccgctctggca

SEQ ID NO: 297617 - DNA, 279 bp, Zea mays
atcggccagctcgagggcagggtcgacctcgagagcgaggatgtcgagctcgtggccgtcaacgaccccttcatcaccacggactacatgacctacatgttcaagtacgacaccggccacggacactggaagcacaacgacatcacactcaacgactccaagacacttctgttcggtgacaagccggtcaccgactttggcatcatgaaccctgaggaaatcccatggggcgaggctggcgctgactatgtcgtggaggccaccagcgtcttcactgac

SEQ ID NO: 297618 - DNA, 322 bp, Zea mays
gtcggttgacttcctttactgcctgtatgtgatgtcataacttgacctccctcggattcgccattctacgcgtgccctcgtctctcggcccctcaaccctctccctgctttactaggttacctcaacaatccgtcaaatacgagcctggcggtggacgcagaggatcttttggagggaagctaggccggtcgggtccctgccggaaaaagataagaaaaggaacctgtatcgatgacgtcgtactcgctgactacgactgcggtgaggacatccggatcagacggagactcgacagccgacacgcacacgcgcgagaaacgc

SEQ ID NO: 297619 - DNA, 412 bp, Zea mays
aaaagttcccgaggagggatggatcatgcaagatggtacaccttggcctgggaacaatactagggaccatcctggaatgattcaggttttcctgggtcacagtggagggcttgacgttgaaggcaatgaacttcctcgtttggtttatgtgtctcgtgaaaaacgtcctggattccaacatcacaagaaggctggtgccatgaatgcacttgttcgtgtatcagctgtccttactaatgggcaatacatgttgaatcttgattgtgaccactacatcaataatagcaaggctcttcgagaagctatgtgcttccttatggacccaaacctaggaaggaatgtctgttatgtccaatttcctcagaggtttgatggtattgataggaatgaccgatatgcaaacaggaacact

SEQ ID NO: 297620 - DNA, 365 bp, Zea mays
gacaccactatactgacgcccgacgggcagtgtaacattttacttgagacatgggtaaggagaatactcacattaacattgcggtcattgggcatgtctactgtgacaagtcgaccaccactggccacctgatctacaagcttggaggtatcgacaagcgagtgattgataggtgcgagaaagaggctaacgagatgaacaagcggctattcgcgtatgcgtggatgcttgacaagctaaaggctgagcgtaagagaggtataacaattgatattgctatgtggaaggtagagaccaccacgtactactacgctgctattgatgcaccgacacaccctgactgcatcaaaaatatgatcactggc

SEQ ID NO: 297621 - DNA, 305 bp, Zea mays
ttcatgcaaacaaacaaggtatacggcggggagatgacacgacaggtgcggttgtttctcggacaccatggatccgctgaagctgtactgagcggtgatgcaatcaaacgtgactaggtgcgcaacagcgctctatgacgctgcctcccactactagatcttgcccatcaacttagccaccgccgatcacaagagccccgacctacctattcgcaacccgtttggttatgatccagctctgcatgattgtgactggtaacctctttaatcacgaacaatttgcatttacgctgctcgcaaaaaca

SEQ ID NO: 297622 - DNA, 399 bp, Zea mays
ttctttcagaaggcactatcactcttgcgccctattacacaaacgaatcttgcgaatctatcagtggcaatagcgctcttccgaccgctcccgcgagtcgatcctcccgagcttcctttacacctcctcggcgcgctctttcactgacacaggaccctgcgcgcgcttacctgtctcctacccaacgcctgccactgttggagcacgaagcggcgcacccatctctatccatgcgcccaatgagaagatcgatatgtactctccggtcttctatcccgcctgcactgacggatgaatcgtcagattaagtatcactcacatgtccgtcacccctttagacctcctcaagtgcattatgcatatcgacccatctaaatacacaagtatttcatctctatt

SEQ ID NO: 297623 - DNA, 366 bp, Zea mays
tcgagcgatcttgctcgacagacatccctcctcggtacctgcgtcccgaaccatctaaactacatggccacaatcaagatcgggatgaacgggttgctaacgatcggaacggtggtggactgggagcccctgccgagtgacgatatcaagctcgccggcttgaacgaccgattgatcagcaccgactacatgacctacatgctcaagatcaacactgggcacatactatggaagcaccatgaagtcaaggtgatggactccaacacgtttatgtatcgggcgaaggacgttgatatgtttctctgctagaaccctcaaaagaccccgatgggttcagcaggggctcaatataccgctgagtgcact

SEQ ID NO: 297624 - DNA, 354 bp, Zea mays
gggtctccagctgcaagcacgcatcgggcaggccacaaacgaaatggcggcgacggcaaacgtaccttcttggcgccacgcattcgcggcagcatatagctgtgactcgcaaatgcccgagactgagatgcacggtgaattattcgcgaacaactgcggctacacggtgtggtcggggctgctgtccagcgcgggctccgcgccgctgcccaccacggtgttcgcgctggcgccttcggagtcccgtgccgtggcggcgcccgcggggtggtctggccgactctggggccgcacgctctgcgccgccgacgccgccactgggcggttcttgtgcaccacaggggactgcaggtc

SEQ ID NO: 297625 - DNA, 392 bp, Zea mays
atacaatccacccactcgtcctataattccgaccccctctccctcagtgcgggcctattttcttcccgcggtctgctcgttcgatctgtgcatcagatctgatgtctcgagcgaccgtgaagcatcttaaatacgcggcatcgctctcgtattgcatagtggggctggaaacaagaatgccttcaaagcacttattgctgcagaatacagtgggatcaaggttgagttgaccaaagattttgagatgggtgtttccaacaagacccctgagtttcttaagatgaacccccttgtgaaggttccttgtttggaaactcctgatggcccttgttttgagagaaatgctatcacatcctttgttgctcccttgaaggataacaaccctttttttg

SEQ ID NO: 297626 - DNA, 321 bp, Zea mays
ggaaaattgcactgcagcaagacgtggacgggctgaggaagaagctgcggcacgaggagaacgtgcaccgagctctggagcgggcgttcacgaggccgctcggggctctgcctcgcctcccttcttttctgccgtctcaaacgttggagcttctggccgaagtcgccgtcctggaggaggaggtcgtccggctggaggagcaagtcggcaatttccggcaaggactgtaccgggaggccgtcatcaccaccttcatggcggctaagagcgcgtacttcctggacggttaccggagcacgccggtacggcacaagccatttt

SEQ ID NO: 297627 - DNA, 243 bp, Zea mays
tttcgacaccatgagggtgttgctcgttgccgtcgctcttctggctctcgctgagagccccacctccacgcatacaagcggcggctgcggttgccagccaccggcgacggtttatgtaccgtcgtcggtgcatctgccaccttcggttcacctgccacctccggtgcatatcccaccgtcggtccacctgcggacgccggtacacctgccaccgctggtccatgtgcctgcgtcggttcattt

SEQ ID NO: 297628 - DNA, 382 bp, Zea mays
cgcagagacaggcgtcttcgtactcgcctgtctccgcgactcaaagcttcttccatttcctaccgccgccgctgcagctccaccccattccgtcgacaccatgagggagtgcatctcgatccacatcggccaagccggtatccaggtcggaaacgcgtgctgggagctttactgcctcgagcatggcattcaggctgatggtcagatgcccggtgacaagaccattgggggtggtgatgatgctttcaacaccttcttcagtgagactggtgctgggaagcacgtccctcgtgctgtttttgttgaccttgaaccaactgtcatcgatgaggtgaggactggcacctaccgccagctcttccaccctgagcagcttatcagt

SEQ ID NO: 297629 - DNA, 152 bp, Zea mays
ggaaaaatatccccaaaccctagctcccgatctcgatggcgaaccctcgcgtcttcttcgacatgacacgccgcggcgccccggcgggccggattcggaaggagctgtacgccaaccaagggcccaagaccggggagaactttccgccgctg

SEQ ID NO: 297630 - DNA, 342 bp, Zea mays
tttctcgttattggcactgcccctgttgggcgtgttgagactgtggtcattaagcccgccctggaccacactttctagtctactggtcttactactgaggttaacatcgtcgagatgcaccataacagctctccaggaggcccatcctgttgacaacggtggcttaaacgtgaagaatgctgctgcgaaagatctctaaagctggtctgcagccttgaactccaaggatgacccttacaactaggctgatagcttaacattgcatgccatcataatgaatcatcttggccagattggcaatcgctattccccaattctggactgacacacaccacacattgc

SEQ ID NO: 297631 - DNA, 157 bp, Zea mays
ggaaaactatacccaaacgctagctcacgggcctcatggcaaacccgtacgtattctccgacatgacgggcgggagcgccccggccaaccggatcgacatcgaactctacgccaactaggtgcccaagaccgcagagaacttccgcgcgcgtgtgca

SEQ ID NO: 297632 - DNA, 143 bp, Zea mays
tgttcaatgcgctcaaacatttgatgctagagaagcttggcagagcattatggtctcaagccctctttaggaactcacaaacctagggagtgcctgccactgaaccacatcatgaggaacaggctcaagtatcctcttacata

SEQ ID NO: 297633 - DNA, 331 bp, Zea mays
tagtcgacccactcgttcgtgaaaaccctgaccggctagactagcagcctctatgtggagtcgtctgacaccattgacaacgtttaggccaagatccaggacaaggagggcatccccccagaccagcagcggctcatcttcgctggcaaacagcttgaggacgggcgcacgcttgctgactacaacatccagaaggagagcaccctccaccttgtgctccgcctcaggggaggcatgcagatctttgtgaaaaccctgaccggcaagactatcacccttcatgtggagtcctctgacaccattgacaacgtctaggccaaaattcaagaca

SEQ ID NO: 297634 - DNA, 334 bp, Zea mays
tcgacccactcgttcgctcctgctaccctcctatgcctaagcggctcttcgcaagggtgagtgtccgatcgcttctctgccctagcgtggatggccaatagctattagggtaatcacctgaccatgacccttgttctccgccgactactttgatctacgataggctgtcaggattcaatatgtacaccagcacattcgctactttctgcacgctgtttagcaatatttgatcaactcttgctctccagacatcagtgaagaacccttcctctctaatcttatttatccaatctacgataagttcaaacctgaagaccttcaataaacttgatgt

SEQ ID NO: 297635 - DNA, 167 bp, Zea mays
tctacccacgcgtcctctcccacacagaaaaccctatccttcaccagccgcatctgttctaacaaataagcatccatccccatcccgccgtcgtcattaaacgcaatccccgcgtcacgagctccctcctgaagtgccgcaaggctcacatttacggccccttcctc

SEQ ID NO: 297636 - DNA, 259 bp, Zea mays
tcgacccacttcgttcgcactcagcaactccgtttctatggggggcgtattctacgcatcctcggttcctccgtctagcatccttccaccctcatgggctcgatcactatcgggatccatgggttcggcaagagcagacagctggtggccagggtcgccctgcttagcgacgacatctagctcgccggcttgaacaaccccttcatcagcaccgattacatgacctacatgttcaagtatagacactgtgcacgcgaca

SEQ ID NO: 297637 - DNA, 113 bp, Zea mays
tcagactcgcgaactccatttcgatgggagggaaattcaacccgggcgagtttcctccgactagcatcctatcacccttatggccaagaacaagatccgtatcaatgggttcg

SEQ ID NO: 297638 - DNA, 297 bp, Zea mays
cacaacagcagctcaaaaaacccaacacgccttagcaagcagaggaaagacccgggattcgatggcgcggaagcagagagcgagagatggacggtaggatgtacggacttgagaccataatgatggtggctctgcaacacctatgtggacgtgcctcatggtaacgcatgcagcgacggctaattggaagaccagtgcggagataaccgcacttactattgagacacgcgcgccatagtcggtgatatggacgacggctatgagcaaatgggcgcgttctcctgcgaagggtaaatg

SEQ ID NO: 297639 - DNA, 246 bp, Zea mays
tcttctcaaactctgccgatcgtgatagtgcgggggacatctttgagaagcttgtctatatcgctctcgactttcagcatgaatcggtgactgtaaagatcagctgctcacgtgagaacagctatgacctacgctatggccaggtcatcaccataagagcagatagattcaggtgcgcagaagtgctttttcaaccatgcatgcttgatctggaggatgatgacatccatgatacaacatacaatt

SEQ ID NO: 297640 - DNA, 215 bp, Zea mays
cgctccttggtggtgtccaactttacggcgacaaggggacagctgcctttttttcttgtctacatggatgggcctttacactcactaactttgcgaagaggtattcatctaaattcggagtgggtggatctcagatgatgggaaggctatggggcgagaatttctttgaccctgccacaaagaaatggaccacccacaacacaaggactcctacc

SEQ ID NO: 297641 - DNA, 359 bp, Zea mays
  unsure (1)..(359): unsure at all n locations
gtcgggcagggcagctcctccgcgggcgaccaaaacgagatcgccaatcttttcccgaaccggtcacaccagtcctcggcgtgcctgtttccggcgctcgagcccgtggcgaccactccactaacaataggctttgttctctgcactcaacacgtcccgtgcggtcacaatggcatttgatgcatattctactatctacaggtgcgtgcgtaaggcagcaccttgtctggattctaaggacgcccagctataatcatgtagtgcaagtatgtacaactcactatagaacatgtgtgtgcctacagatatcatggtagatccgaactgatccgcantgaaaggaacatgattgtaacacc

SEQ ID NO: 297642 - DNA, 258 bp, Zea mays
  unsure (1)..(258): unsure at all n locations
cgctgtccgctgcccaccgcgtgcgcggcgctcccgtgcggcactgccggcggcgcgaccccgcgcccattggacgagcttccgccccgccccgatcgatcccgccgccatgtcgtcagcggccgtgtcgtcctcttnctccaccttcttactcgcgctcgccttcgcctcccccggggggccgcaaggcgggctagggtcggctcctcgccgttccacaccggcgccagcctgagtttcgcgttctgggcgccaccg

SEQ ID NO: 297643 - DNA, 397 bp, Zea mays
tctacccaagactgcacaaccagattagctgcatggctggcggacaatgtgcaagccgcggaagagttgtgccaagcctcaatggtgttatagcgagacgtcgttgcacaagctcctgagccaacagttggaaatgcataaagcccggatgttgaagcagaaagtgttaacttggccgtgaggcagacaactcctatttgtaatgcaatttgacagtgacgaggatgcgtgttcaaagaagaaatgtgaaataggatggttcttctccttgatactggatactacttatgtcgaagtgaagctgttttccattagacccgaatcgtcgacgagatctacaatgcatcaaacaattaacttgtgaggacacaaacccttgtgatgagtgccattgggc

SEQ ID NO: 297644 - DNA, 367 bp, Zea mays
tcgatacctttcacccttcctctcaggaagccgaaccctagccaccgtgctcactttccagctctgaacccttcgcgggcgagtccacggcagtgcatgacctgatcctgctgtctaagccaccgcggtgagatgttgatggtgtctggcggccgacggaactcctatgcgaaagagatgaccctccgccgcaggatatccatcatattcaacatgacgcaagaacacttaccttctttaaaagactactacgatcatttagaacaacctgagcacatgactttcaacctcatccaacgcatacatctcgtggagattgaaccgaagattgcacgataccaacaagaaaatgcagagcagatttact

SEQ ID NO: 297645 - DNA, 261 bp, Zea mays
cttacacgatggccaaatgcgacacacgcgatggctagtacatggactggtgcctcatgttccggggtgatggatcccccaaggatgtgaatgctgatgtggccaccatcgacaccatactcaccatgcacgtcgtgtattgctgcgctactagcttcaagtacggcatcatctaccagcctgcttacgttacgcctgatggcaacctggtcaaggtgcaccgtgccaggcgcatgatgtacaactccaccaatgatgcgg

SEQ ID NO: 297646 - DNA, 374 bp, Zea mays
cgctcgccgcccactcgcatggcgtggtcgctcgtgtcgcgcccgcacctcacccagcgcccggtccgcgccgccacgctcgcctccgctacccggccccgcctcgcggccggggcccttagcgggcgctgccaggcgcaagcggcggtggacttggacgacgctcactacatgcggtggtgcgtggagctggcgcgcaaggcggccggccacaccagccccaaccctatggtgggctgcgtcatcgtccgcgacggccgcgtcgtcagtaaaggatttcaccccaaggccggccaaacctatgccgaggtattcgcactaaaagatgcaggtaatctacctgaaaatgcgacagtctatgttagcttggagcc

SEQ ID NO: 297647 - DNA, 294 bp, Zea mays
aaagattttgacttctgcgcgcgccttcaacttctatcctccttaatagacccacgcgtcctcggacgcgtggggtcagactacaaatttggggagcaaacatcagtggccagactccccatattatactatcgagagactcttttgaccaggattatcagggtatactatgctaagatgactgtaaaaataggatagcaagtgctgatcgttggggatgaccttctttgcaccaaccccactagggcagctaaggctataaaggtgaaaacatgcagtgcccttatattcaaa

SEQ ID NO: 297648 - DNA, 402 bp, Zea mays
cggacgcgtggggtaagattacagatttcaccagcaaacaacaatggctagtcttttaatattatatttactggcctttaatttgtcgccatatcattgcatctgacagcatctttcatatgattttattatagtcagtttttaacatcccgttaaaattctctcctattccatcagattttacagtaatcctagaatgattattcagtagtgtattctgaaattttgaactttgtaggcgttgacatcagcatgaatactcatctgaagactgtgaagctgacactaaaagggaaaaatcctgttacccttgatcaccttagtgtgaggggaaacaacatccgctattatatccttcctgacagcctaaacctggagactttgctggttgaagaaacacca

SEQ ID NO: 297649 - DNA, 270 bp, Zea mays
agaagccgatcatcttctcgatggcgcgtctcgaccgcgtgaagaacatgacaggcctggtggagatgtacggcaagaacgcgcgcctgagggagctggcgaacctcgtgatcgtcgccggtgaccacggcaaggagtccaaggacagggaggagcaggcggagttcaagaagatgtacagcctcatcgacgagtacaagttgaagggccatatccgggtcatctcctcctcctcagaaacccaccaaccccgtccagccgccggctgtc

SEQ ID NO: 297650 - DNA, 293 bp, Zea mays
gttattgacgactgccccgatgatctgattgtctggtaccgccacacatttaaaggcgcatggccattctctaccggggctcacggttggtctatatctgattgcactgctggaggactaaaggcttgattattgctatgaaagacttatcctgaaattgttcgtggaccgatagaacctaataaatcttatgatgctggcagttgactgatgtcttatatgaatgatcacgtggggatagcgacttaagaacttacaagatcctatgcctggcttaagctgatcaatcctgc

SEQ ID NO: 297651 - DNA, 195 bp, Zea mays
ttactccatattactctgagattgccctctacaacttggcttgacttcaaaagaaaaacgaagacggtctaacttcactgttttatctccagaagatttacccatatgaatggaagaacttttcttacttgtattaacaaggattaaaatgccaaatacctttttcttttttggctcccaaatgacactacttta

SEQ ID NO: 297652 - DNA, 392 bp, Zea mays
tggagtttgggggggaccaggtagaccacctggtggctgtttggagggaaccccggtcccataaagaaaaaaaggatggctattggtccaaaataagtgaaaatgttgtcatcgatgctactggcaaaggaaacatagcgcgcctgattaatcactcgtgtatgccaagctgctatgctaggatcgtgaccgtcagtggtgacaggagccagatcattcttattgcgaagagagacgtctctgccggagaagagctgacgtataactacctgtttgaccctgacgagtccgaagactgcaaggttccatgcctgtgcaaagctcctaactgtcgtggatacatgaactagggtgctgctagaagagtaaaaaccaatctaacaaacaaggac

SEQ ID NO: 297653 - DNA, 222 bp, Zea mays
aagacgccccacccgcccgctgggtctcaagaccattagctttatctggtcgagagcgcagaagaacccgagcgacaccatgagggtggtgctcgttgccctcgctctactggctctcgctgcgagcgccacctgcacgcatacaagcggcggctgcggctgccagccaccgccgccggttcatctaccgacgacggtgcatctgccacctccggttcacct

SEQ ID NO: 297654 - DNA, 431 bp, Zea mays
  unsure (1)..(431): unsure at all n locations
ctggattcctttaaagcgaaccaagccttccggttggccgggcttaatggggcattgtcggttctattgaacagaaggaggagtcccgtaagaacgaagagcatgtgaaccttatcaaggaataccgtgcgaagatcgaggctgaactgagcaatatctgtgatggcatcctgaagctgcttgactcccacctagtgccttcttctactgctgctgaatcaaaggtcttctacctcaagatgaagggtgactatcacaggtatcttgcggaatttaagactggtcctgagaggaaggaatctgctgagagcacgatgatggcctacaaggctgctcangacattgcgctggctgagctggcacctacccatccgataaggcttgggcttgctcttaacttctcagtgttctattatgagattctgaactcc

SEQ ID NO: 297655 - DNA, 146 bp, Zea mays
gcgaggcaaaagcattgcgaccacagggggcgctctcttcacggccatttttttttttacataccactctagcagaggaggtgatggcggtcacgatcacgtgggtgaaggcgaggcatatcttttacagccgcggcaaccccacc

SEQ ID NO: 297656 - DNA, 382 bp, Zea mays
  unsure (1)..(382): unsure at all n locations
gacccacgcggccgcacgccgccgccgccgcncgggccgggccccaacgcgaaggcccggagcaaggggcacgagccgcgggggaagagcaaggcggaaccgcaagcgcagcnnaaggagggnaaggcggagcgcgcccggcaacgcggagccaaggacaccggcggggcgcccaacaagcgccccaagagcaagggagggcgcaccaccaacgcgcgcgggcngaccgacaacgcgcagaagcaaaaaacggcgccgcgcgaggcggacaagaaaaaaaaagggggncccgcacgacccaccggcccaagaagaccccgggccaaccgcaggcgccncaacaagcaccagcgcncccnggaaaccgagagggaaaagaagc

SEQ ID NO: 297657 - DNA, 326 bp, Zea mays
taaactttgatcccttaaaatccacccattctttcctttaaacatgcccatcattcgggaagttgttcttattaccaacccctattttatatcccatcctttctacaagaaattcagtggaaacttcctttgtaaccttcttgggaagtggaaggagtcttaatactcttgccaatctattccttttggttgtcttgcttactatttaactgccccatcaaatttggctgatgttcttgcaaatacattccatgcactgttttatgtggtctttattctttcatcctgtgctcttttcttcaaagacattgattgaaatttctttt

SEQ ID NO: 297658 - DNA, 258 bp, Zea mays
tctttatagtttacccacttcgttcgtcgcattatttagcataccctggggagggttcacctgcttaccgatgccaaccccaatcaggtcgttgtttattcgatcattaacagtggaccccttgaggatgccacccgtattggtttctcttgttttgtgaggaggcaagccgtggatttcttacccctgaggagggtgaaccatgccatttaccttcttaccacttgtgccatggatagtgctttccggaacattaaa

SEQ ID NO: 297659 - DNA, 315 bp, Zea mays
cgacccactccttggtgacctccaaccattcagagggaccgggacagcgcggggctgtggtgatgtccatgaatccgccgattagacctgctcaactccccatcatgtatgcatagaagtctcgacttcacgactcttacaagctcgtgaggctcttttgtgagaacttctttgaccctcccacaaagaacttgaccaccatgaacacaggtgctcccaccctcttgagaggatttgacgacttctagtaccagcccatcaaacaaatcatctagagctgcatcaatgaccaataggagaaattgtcccccatat

SEQ ID NO: 297660 - DNA, 317 bp, Zea mays
gcatgttggtggaagtcccaacggaggggttgatactcttctcattgattgaaaactcctactctccgtcatcaataccgacattgttgcatcaattaatgcttcaaaaccttctaatggttcgactgtggctgttttctgtttaggagccgatggtcttgccaaggtgcaaggattgctctagcgtcaaggatcatttgtgtttgacctgaaccccatctcattcttagtatcttggaagtttcggttgcactgaattttttgaacctctaagaccacaatatgtcatttctatgagttacttgctttatatgacc

SEQ ID NO: 297661 - DNA, 99 bp, Zea mays
cgtcgccggtgggaggaataagaagaccaagcgcactgcgcccaagtctgacgatgtctacctcaagctcctcgtcaagctctaccggttcttggtcag

SEQ ID NO: 297662 - DNA, 193 bp, Zea mays
gcaggtacctcgcgcccgagacgcagccccgcgccaggagtaagtttgctcttttatccatattatcgatatggcgagggaggagaatgtctacatggccaagctggctgagcatgccctaaggtttgaagaggtggttgagtatatggatgaggcggcttcaacttgcaaatttgcgagacgcttacagatt

SEQ ID NO: 297663 - DNA, 159 bp, Zea mays
tcgctaaaaaccctactcacgttatcaaggtgagcttagacccgggattcgccggctcgttttctagagcgagagatggacggtaggatgttcggtctcgatacccccctgatggtggcgcttcatcaccttctggacgtgcccgactgctactccggc

SEQ ID NO: 297664 - DNA, 302 bp, Zea mays
tcgctcgtagagaggaaggaaaatattcccaaaccctaacttccgatcttgatggggaaaccttgcgttttctttgacattgccggcgggggggcccccgggggcccgattgggattgaactttacccccaccaaggggccaaaaacggggagaactttcccgcgctttgcaccggccaaaaagggcttggccaattccgggaagcggttcaattcaaagggttcaactttcaacggggtattcccgaagttatggtgcaagggcggggatttaacccggggaaacggaaccggggggaggt

SEQ ID NO: 297665 - DNA, 363 bp, Zea mays
agatgatagaagtgtcagcgcttaatcatgttatgtcaacacatgttctacaacaagcgcaacaaattcagtatttatatgatcaggctgttgaagctacaaataatgtggagcctgggaaaggccatgacgaccttggcaagcgctgcgccaagtactacgaggccggtgcccgctttgccaagtggcgcgctgttctcaagattggccccaatgagccatcacagcttgccatcgacctgaacgctcagggtctggctcgctatgccatcatctgccaggagaatggtctggtgccaattgttgagcctgagatccttgttgatggccctcatgacattgatcgctgcgcttacgtcactg

SEQ ID NO: 297666 - DNA, 377 bp, Zea mays
gccgccgatcgaggacgacgccttccagcagctcgacgacatcgagtcgtccgcgctgctcccgcgacggttcggcagctcggcaacgttcgtggcgtccatccccgtggcagagtaccaggggcggctcctgcaggacacgcccggcgcgcaccagggccgccccgccggcgccctggccgtgcctcgcgagccgcttgacgcggacaccgtcgcggaggccatcagcgtcatttcgtgcttctacgaagacaagacggagtgggggcggcgcatcgggtggatctacgggtcggtgaccgaggacgtggtgaccgggtaccggatgcacaaccgcgggtggcggtccgtgtactgcgtgacgcggcgcgacgcgt

SEQ ID NO: 297667 - DNA, 249 bp, Zea mays
tcgggcttatcctccccctcttaccgagtgcttttcgggttagggttacttacggtttcgtggaagggcgattgcggctgctgatgcggagtaccgtacctttgtcggcgggcttgcctgggccaccaacaactgattcgctggagaatgcctttgccttctacggcgagatcctctactccaaggtcatcaccgaccgggagacggggaggtttcgcggtttatgctttgttaccttctcctccgata

SEQ ID NO: 297668 - DNA, 319 bp, Zea mays
cgtatacagtagagtcaaccgacgcgttcgtgtcaaacgaagcaccttgaaggcacgtgtgtaaggctttaagaccctattatcttttagatctgaggttgcaggttaagctgcttgaacccagagatgagttcatgtcactcgacaacttccggacatgtctgacaagatactggtgtgacgacttaagaaaataaaggtttcttgaatttcaacgtgcgttgcaaccacttgcgtacataaagatggactatggatacttctatgctgcatgaatcagtccgcaccagctggaatctttgtaaaggcaacaagaaat

SEQ ID NO: 297669 - DNA, 403 bp, Zea mays
ggcctcctcaagattggagcttcaacaagcgcacactgagctttggaacctcacctttagctaccttaagtccatggcacttgagtgtgttgttcaactaaacatacccaatgttattcacaactttggtggcaatgccactctacccagtattctctctgccatccaagttcctgaacataagaagccctaccttccacgcctcatgaggtttcttgtcgtatcaagtatcctttcatttgattctcccaccttaagggaggagggtacttaccacctcaccccattatcacgccttcttgtggatgacacccacattaatggctatgggagcctcggtccatttgtgctctccaaaccacaaagtaccatggtctatcggcacgtacttgtctgagtggtt

SEQ ID NO: 297670 - DNA, 346 bp, Zea mays
tgaaatgccatgtgaagaacaaggatgtccgaaagtttttgaaccaacaaacactggctggcaactatttaaggaatgagaaaaaggttcacattcagtctcgcaaaattgcaactcaaacgacattcatattcatctcctggcatttcggctacactgtcgctcactgctactcttcgatgacgcccttgtcgctcacatagataccgtcctgagaggcgcatagacaggcggtattcgtacttcgcttattttcggaactaaaacttgttccattttctacctggcggcgctgcaactccaccccattgcgtcgacaccatgagggaatgcatctcgatccaca

SEQ ID NO: 297671 - DNA, 282 bp, Zea mays
gtcagactgcaaggttgaattccatatggcggggaaagtgtgtggtgtcacatctgacggtgaaactgccaagtgcaagaaggtggtctgggatccttcgcatttaccaaacaatgataggcagattgatggattatctcgtgcaattgctattatgatccacctaatacctaatacaaattaatatcactcgattcaaattattttacgtcagaaacaattttgacataaatcagacatgtatgtaatatggtgctaatacacgcacaatgttgcgccaat

SEQ ID NO: 297672 - DNA, 316 bp, Zea mays
gcaacacacaactccttaccgtccgagaccccaagcaccagcacgggcgtggccgcggaggccaccatgggtgaggggaagaacaagaggatctccaagggaaagaatggtggcaagaaaaagacacgttgccctatctataagaatgatggctatgacatcaacgcaccggccgtgttcattgtgcgcaacatcgggaagactctcggatccaggacacaagttactatgattgcttctgatggtctgaagcacagagtctatgaggtttgcatagctgatcttcaaggtgacaaggatcaagcttacacgaaaa

SEQ ID NO: 297673 - DNA, 400 bp, Zea mays
gccaccgatcgctcctctccactttcgacattccagttccactccgcctccgctgccggtcgccgactccgaaactccgacagtccgaccacaagaaggatgagtgaagaggataagactgctgcttctgctgagcagccgaagagggcccctaagctcaatgaaaggatcctctcttctctgtccaggaggtccgtagctgctcatccgtggcatgatcttgagatcggtcctgatgctcctgctgttttcaatgttgtaagtaccagcattaccttagaaccgtttgatgtgttatatgtttggtgctgtggggagtggggacttaggttgtctggaaccatctacgggaaggttgttgagatcacaaagggaagcaaagttaaatatgagcttgaca

SEQ ID NO: 297674 - DNA, 417 bp, Zea mays
  unsure (1)..(417): unsure at all n locations
atagtnnaacaacgcgttcgtgagggtggatggaacgactggccagcgttcaggtgcacgaaatgnnctctctcctctccctcctgccaatcgcctcgggccctacccttcgggcctccggacacctgccggcgactgtgcctcgctacgacgctacatcaacatgaggctcaataaggtggaagtgaaccttataaggctgctggaggctgctccaccgcagcaaaatcaggctaaacttgtctattactgaaccacagcgcgggagctgttggagcagctaggagctgagacaacaccagaagggatatcaagcatttcaaaagctaagctttctgagtattcagaaaagattgaagcactagcttccaggcttgctgcttcagtgcctgaaaatgaaaatccgattattgaaag

SEQ ID NO: 297675 - DNA, 179 bp, Zea mays
tgcgacggaggggtagaccccacgatggcggggtccgcttcaacttaatctacagcggctcccagctcctacaacgcgaattggatctctcgacaaggggagagggaagagatggggctcacgttcaccaagctgatcagccggctgatcggcaagaatgagatgcggattctgatggt

SEQ ID NO: 297676 - DNA, 362 bp, Zea mays
cggacgcgtggggtgaaagatgcccgggaggatgatgcctgctctgatacaccggttgctgctatgttcaatagcgtcgtcgcgatttcgatgctcacgtggcttaactacgagatgcgcaaaagcgagagatgttaaacgaatgatatggtctaacacgcgccctagcgagcccatcaagtgctcagcggcgtcacccgccatgccgatggctccgccggccaccccgctcctgccgtggggccccaacgagccccgcaagggtgctgacattctggtcgagtacctcgagcgctgctgcgtgcgcgacgtcttcgcctacccaggcggcgcgtccatggagatccaccaggcactcaccc

SEQ ID NO: 297677 - DNA, 434 bp, Zea mays
tcgacaccacgctgtccgctcgtacctcaaaaaaaaatcgtgcttcggcacacgcaggtcggcgctccgtctcgggcttctcagcgacgggaggggctagacgccagacgggctagtcccaggttctggcgtcgtcgtcaggcggctccccctcctgccagtcgcctcgcgccctcgcctccggtcctccgcacacctgccggcgactctgcctcgctacgacgctacatcaacatgaggctcaataaggtggaagtgaaccttataaggctgctggaggctgctccacggcagcaaaatcaggctaaacttgtctattatgtaaccacagcgcgggagctgttggagcagctaggagctgagacaacaccagaagggatatcaagcatttcaaaagctaagctttctgagtattcagaaaagattgaagcact

SEQ ID NO: 297678 - DNA, 272 bp, Zea mays
cataaagctggcagacgaatccttaatcgtaccctgacgtcgtcgcagccgcagccgcggccacaccatcaagcagaactagcagccatgccgtccaaattggacccctctcaggtggtggatgtcttcttgcgcattactggaggcaaggtccgcgcggcatcttgcttcgcattcaaaatctggcagatctgtttgtaccgactgaagatcgtcaaggacatcaacatggagacctataaggactggtagggccttcacgtcaccgtcaa

SEQ ID NO: 297679 - DNA, 305 bp, Zea mays
cttgcagggaaagaatgaggaggaacgggcggcatgacaggtttcgtgaactgggttctgcattacaacctggtaagccagtgaacgctcacaaagctgccatcctaaacgatgctactcgcatggctattcacctcctttcagaatcacacccactcaatgagactaatgacagcctccaagaaaagattaaagaactaatcgctgagaaggacgatcttggctactagcagcataaactggaactggtgaaggagagtctctatcacctgatgaagctgatggcacaggctccagcctacatg

SEQ ID NO: 297680 - DNA, 389 bp, Zea mays
ggcaaaccttgtactggagtgccacatggcctagagaagttgaagccttagcaagacaatttctacaaaatccttacaaggctcacctgaacttaaagctaatcattccatacaacaaattgttgaagttatttcagaccatgagaagtatccaagtgtacaagttatacaggtgccaaaggttcacacttagccaataaaaagaccaaatattgggttcaacaaaagagcaaagggacaaccgaaggcacctctggtctggcgcaccggactgtccggtgtgccaccggacatgttcggtgtacaccggaagactccaactcgaactcgtcaccttcgggaaattccagaggcaactccactataattcactggactgtccggtgtac

SEQ ID NO: 297681 - DNA, 305 bp, Zea mays
tcggttgtttaccattcctcccaaaacgggtgggcgatcctagaagcctccgccgagcatcgatcatgtgtgcctactgtggcaagtgcgcggatgaactcatgaagaatgctgcctacatcggcacccctggtaagggtatccttgctgctgatgagtcaactggcaccattggcaagcgcctttccagcatcaatgtcgagaacgtggaggagaaccggggggctctccgtgaagctctggtctgcttccctggtgccctccatttcattagcggtgtgatactcttttaggagaccctttac

SEQ ID NO: 297682 - DNA, 406 bp, Zea mays
tcctctagagaggacccacgcgttcgcccacgcgttcgcccacgcgtccgcccacgcgttcgctgcttcgcctccacctatccgccgcctcccaatcatcctgcccccaaactcccaccccgcagcatccccacgccgccgcacctcgtcgcgtcgcgtcgtcaccggcgtgaagatggtcgggccaggcctctacaccgagatcggcaagaagaccagggatctgctgtacaaggactaccagactgaccacaagttcaccctcactacctacacctccaatggcgtcgctgtaactgcttctagcacaaagaaagctgacctgatccttggcgagatccaatcacagataaagaacaagaacatgaccatagatgtgaaagcaaactcggagtcaaatatcatt

SEQ ID NO: 297683 - DNA, 151 bp, Zea mays
tcgacccatgcgtgcgctttacaaactccagcgcatactgggggccgagcccgacagatcgtcaattccctatttttctcaccgatcgacctttacgccggtctcgatctcttcctaatgctgttcgcactggtgtgtgagaggattagga

SEQ ID NO: 297684 - DNA, 321 bp, Zea mays
  unsure (1)..(321): unsure at all n locations
gagagacgacccacgcggccggcaaccagcncccgcgcancaaagacgagcgaggcagcccggagggcaagnccaccagcggcgaggaagacgccacccgcagcagccacggggacgacaagggcgacaaggcccagagcggggacaccgacaggcaggaaagggaccgcgcnagcacgagcgcggacgaccgcagagcaggaggggcgcccggcggcaacgacgacacgcggcacgncacccncgagaacgnggaaaggaggacgagggagcncaaggaccacacggacgccaacaacgggaacangcagggcgggaaca

SEQ ID NO: 297685 - DNA, 377 bp, Zea mays
tcgcgagaacatgaacggcaaggagcggggcggccgtaacatcaccggtaaccaggcccagtcccgtggcggtggcggtggcggcggtcgctactgctgaggtcgcggacgccgcagctatggtggcgggccccatgacagcagctatggcgccggtggcggctactgcggtctgcccgcgggtggtggcggcacctactgaggcggtggcggctacagcagtcggcgcgagggtggtggtggcggctactgcggccgcagcggctgctggagggactgatgtgtgcgcccatcctggcttctgccgagttatcttatctatctatagtatcgtgttaccgctcgcttctgtcaccgtgttagtgtccgttctacct

SEQ ID NO: 297686 - DNA, 174 bp, Zea mays
tcgatctcggtaccacctactccgggggcggggtctacaacaacaggcctctttacatacatctctattaccaaggcgaccccattacaaccttctgggtttcctttacccatagacagagggtcattagtgagggtttcacaaaccatgcagcctccaacccttagaggacca

SEQ ID NO: 297687 - DNA, 308 bp, Zea mays
  unsure (1)..(308): unsure at all n locations
tctcagacgatgctgtcgtgtctcaagtcccgccgaccgtcgatccagcaacagcgacaccatgaggaagtgcattacgatccacatgcgaanaacgcgcatccaggtaagaaacgccttctgggagctaaactgtcttgagcatggaattcaggctgacagtcagattaccgtgaaaaaaacgcataggcgaggcgatgatgcttgcaacaaatgcgtcagtgctactggtgatgagaagcaactgccaggtgctgcatgtgttgacgttgaacacactgttatggatgaagttagatctgcaactt

SEQ ID NO: 297688 - DNA, 367 bp, Zea mays
gaggctaacttactgagatctaggcgacactctgcactatgatcaatgacctagctgcattaacggagatgattgagactgtcaaacagcacgttaacgatgctaaatctcctgaactaaaagacactcgcatgctgcgcgatgtgctcattgaggctgttcattgatctgggaagaaccatcgacagaattctaatgcagcaccttgccaattcaaaccatcaactgagcttttgaatgctttctgcacgagtggccgactcatactggaactcatatacaaagcacacacacagtgctatgaggatgcttatctgatgcaagctgttgctgaaatcataagaacactgcatgaccaagatgtcct

SEQ ID NO: 297689 - DNA, 349 bp, Zea mays
gcgctccaccgccagaattatcgtcaccccggagcctctacttcccggtctcttccgaccgttgccttactacactacatctacagctgcgacgccggcgagcccgacaccgcgaatcggatccgacgacaaggcgagagggaagagatggggctcacgttcaccaagctgttcagccggctgttcgccaagaaggagatgcggatcctgatggtggcactcgacgccgtcggaaagaccaccatcctctacaagctgaagctcggcaagatcgacaccaccatgccgaccatacgatacaatgctgaaactgtggagtacaagaacatcagcttcactgtctgggatg

SEQ ID NO: 297690 - DNA, 370 bp, Zea mays
cgagaagcgagagcatggacaccacaacagcaagcttcacctgggccgctgcagtgtccatagccaccgcaggagactgagatggggggttttgtcaagacccacaagagcaatgcgtacttcaagcgtttccaggtgaagttcaagagaaggcgcgctggcaagacagactacagggccaggataaggctgattaaccaagacaaaaacaagtacaatacacccaaatacagatttgttgtgcgatttaccaacaaggacatcacagcacagatcatctctgctagtatagcaggtgatatggatcttgcttctgcttactcgcatgagttgccacgatatggtcttgaagttggtctgaccaactatg

SEQ ID NO: 297691 - DNA, 426 bp, Zea mays
ttatagtcagacccacgcattcgtgcggagggtacgcttttactgatcggcactgcaaagggactgcatcctcaattgtatctccacttcttgaccaacttccaatagattgaatcattctctgctttcaatagcgtatataacaactagacccttttagagaatatatgcagctcctagctcacacttttcatcaaaggctgtggatttttcaggatgggaacatcttgagaaagccacacctggaaccgtttcacaacaacaactagatcgtgcatgagaggcaaccaaatctgcagttctgatgaacttgcaatcaaggtctatcccatctgacgatattggaagacaagatcttacttatgaggagaggacgcccatcgagtattttctgaaacagtataggagatcactatgaatgacatt

SEQ ID NO: 297692 - DNA, 252 bp, Zea mays
tcgcgccggctgactagagcgccttcagtggggcctctgacccttgcaagtacactctcacctactaccatgggtaaagagaagtcccacattatcattgcgcgtattggcgcatgatgactaccgcaagtccatcaccacaggacaccttatctacaagcttagaggcattgacaagcatttgatcaatacgtttgagaaggaagctgctgaaaagaacattcttttctttaagaacgccattgtgcttca

SEQ ID NO: 297693 - DNA, 322 bp, Zea mays
gaaggcttggtcctccttgtatcccgacctcctccggcacaaacccgtttccccgctagagttatcggtcctctgcagcgatggcgatcaaaccgaccaaggccgaaaagaagatcgcgtaccacaagaagctgggcaacctgctcgatgagtacaacaagtgctcattgcctcgcgacacgtcggtccaagcagctcagacattcgcgggccctagggcgacttcgtgtgctatggcaagaaacgctcatagcgctgatcaagtctacccagagaccgaaccaactttgaccgtatgacctgtgcgcacgtggctatttac

SEQ ID NO: 297694 - DNA, 263 bp, Zea mays
ggtcgttagagcaccaattatctcatcgacttctgatcggtgaactcgacaccatgctggtgctgatcgttgtacttgctctcctggcgctttctgcgagcgccgacttcagtacaagcgacggctgtgacttccacacaccaccgtttcatataccggctccgtgctatatgccgcctacgctctatctgcctgcggagcagcagccgctgacattgctataccccactcaaccaccgcaactaatcccgtgccatcagttc

SEQ ID NO: 297695 - DNA, 165 bp, Zea mays
ctccttcccctcttaccatgtcctcttagggttagggttacttagggttttgtggaggggcgatggcagcggctgatgtggagtaccgttgcttcgtcggcgggcttgcctgggccaccatctacgagtcgctggagaatgcctttgccttctacggctagatcc

SEQ ID NO: 297696 - DNA, 268 bp, Zea mays
ttcaattttcaaaatccaggttcaattcggcttcggttgccggtggcgaattccaaacctccaccggccggccaccagaagggtgagtgaagaggataagactgctgcttctgctgagcagccgaagagggcccctaagctcaatgaaaggatcctctcttctctgtccaggaagtccgtagctgctcatccgtggcatgatcttgagatcggtcctgatgctcctgctgctttcaatgtttgtgttgagatcacaaagggaagcaaa

SEQ ID NO: 297697 - DNA, 415 bp, Zea mays
ctcggccctcgcccacctctcgctagtcgctctccacttccaagtctctgcggccggacgccccggcgaggatgaggacaccggcgcccaggtcgcgcccatcgtgaagctggaggaggtcgccgttaccaccggagaggaggacgaggacgcgctcctggacatgaaggcgaagctctaccggttcgacaaggaggggaaccagtggaaagagcgcggcacaggcactgtgaagctgctcaagcacaaagacaccgccaaggtccgcctcgtcatgcgtcaggcgaagacgcttaagatctgcgccaaccatctcgtggtggcgacgactaagatgcatgagcacgcggggagcgacaagtcgtgcgtgtggcacgcgctggacttcgccgacggcgagctcaaagaggagatg

SEQ ID NO: 297698 - DNA, 160 bp, Zea mays
aacaccacctagcctgcgatctccagagccttcgtagcgtcgaacattgatcatgtcggcctactgcggaaaggacaaggatgagctcatcaagaatgctggctacattggcacccccggcaagggtatccttgccgcttattaatccactggcaccatt

SEQ ID NO: 297699 - DNA, 215 bp, Zea mays
  unsure (1)..(215): unsure at all n locations
tcgcgaccctgcatcttcgccgcggtctagagccgcagccgccggtggcgcccggttcaggttgcgtgcgaaaaggttgtaagcatcgacctggggaccacaaattccgcggtggcagttnttgagggcggcaaggccacgatcggttccaactcccatggggcgcgggacacgccctcggtggtggcttaaaccaactccnncgagcttcttgt

SEQ ID NO: 297700 - DNA, 219 bp, Zea mays
cgcgtcactcaacacatcacaagcagttcgagagagagagagagagagagagagattaagatgtcgtggttcgggcaccaccaccacaaccagccggctcccccggcgtctggccccaaccaggtgttcaagatcttctggcgcgccaacgagaacttcttgcttgcccgtccgcgacagcgccgtcgttcttgccccggtcaaccccaatgacgacca

SEQ ID NO: 297701 - DNA, 233 bp, Zea mays
tcgggaaaaatatccccaaaccctatctcccgatctcgatggcgaacccttgcgtcttcttcgacatggccggcggcggggccccggccggccggatcggggttgaacctgtcccccaccaaggtgccaagaacggggaggaacttcgggcccctgtccccggccaagaaggccttggccaagtccgggaagccgttcaattacaagggctcaaccttcaacggggtattccc

SEQ ID NO: 297702 - DNA, 304 bp, Zea mays
  unsure (1)..(304): unsure at all n locations
aatccattgtcactcgattgttaaaagctccagcaaatgttggcactcaaaaagcttcagcaactgatgcagccacagcttccgatgagaggataactgtactggtcattggtggcggaggcagggagcatgctctttgttatgccttgaaccattccccatcatgtgctgcagttctatgtgcccctggcaatgctggtattgctcagtcccgggatgcaacatgtatcccaganttggacatctcgagtagtgatgatgttatctcattctgccgcaagaggggagtgggaattggtgtagt

SEQ ID NO: 297703 - DNA, 254 bp, Zea mays
ggtctcggaaggatcggcaggctcgtggccagggtcgccctgcatagcgaggatgtctagctcgtctccgtcaacgaccccttcatcaccacggattacatgacctacatgttcaagtacgacaccgtgcacggccaatggaagcacagcgacatcaccctcaaggagctcaagacgcttctcttcagcgatgagccggtcaacgtctttggcatcaggaaccccgaggagatcccagtgggtgaggctggtgc

SEQ ID NO: 297704 - DNA, 172 bp, Zea mays
  unsure (1)..(172): unsure at all n locations
gcgagaggaagaggcgcgcgtgggtgcagtgcanacgtgcggggcagagcacaacagctggggatccggggagggagggaagccatgggcgaggaggcggccaagatagaggaggtggagaagccctaccagctcatcatcgtgcaggacggcgacccgaccaataccatca

SEQ ID NO: 297705 - DNA, 375 bp, Zea mays
cccacactgacgtggtgccgtcggagccgaacaagtgggagttgaggagtatggaggggagcgacggccgccgaccgggccaccgcagcagcagcaggggcttcccggcgacgagccatccggtcgcatctacgcgcgaggctcccaggacatgaagtgtgtggggatgcagtaccttgaagccattcgccgtctccgttctgcaggatttgttccagatcgaaatatctatataacatttgttcctgacgaggagattggtgggcatggcggtgttgaaccatttgtttcatccaaggagttcaaagatatgaacgtggcattagtccttgatgaagggcttgcctctccaggggaggagtaccgtgtgttcta

SEQ ID NO: 297706 - DNA, 171 bp, Zea mays
tctttctctcttccttcctgcctgcttcggtggcggtgttatatccccgctcgggttgccatggcagaccagctcaccgactaacatatctccgatttcaaggaggccttcaccctcttttacaagtactgctacagctgcatcaccaccaacttactatgctctgtgatg

SEQ ID NO: 297707 - DNA, 343 bp, Zea mays
  unsure (1)..(343): unsure at all n locations
tcgcccaacaccacctcgcctgcgatcgcgggagcctccgtcgcgtcgagcatcgatcatgtcggcctactgcggaaagtacaaggatgagctcatcaagaatgctgcctacattggcacccctggcaagggtatccttgctgctgatgagtccactggcaccattggcaagcgcctttccagcatcaatgtcgagatccttgttgatggccctcatgacattgatcgctgcgcttacgtcactgagaccgtccttgctgcctgctacaaggcgctcaacgagcaccatgtcctnctggagggtaccctcctgaagcccaacatggtgactccaggctccgac

SEQ ID NO: 297708 - DNA, 361 bp, Zea mays
  unsure (1)..(361): unsure at all n locations
tctacccacgcgactgtctccacctagtcatcttccaacaccnccgcacgttatccctagccctatctatccaacaacaaacaccacatcccgccgaccgagaactaccggaacacgccccaccgaatccaccactcctcgcactgaaacacgcacggaccacggtgcatttgatccgacccagccgcctacactatgtccaagtcagtagcgctacatacagcttctggcctatgatggaagatcaacaacgtgtaactcaagtctacactcgacgaatatgacaaatatcatggatactatccagacaaggatgaatcaagcaagtccaactatactcatattcttaataaatactata

SEQ ID NO: 297709 - DNA, 409 bp, Zea mays
  unsure (1)..(409): unsure at all n locations
attctcacaccatcaatnncgacagatagatttacaaaaanctgcccttcaaacaaanagatatacattgtcatttaaaccatgaaaaacatacatgcttcgtatcatcaatgctgcactgaatgaaaaactgttttttatgattgccggccatcaactcactgtcgtcgaagttgatgccacatacgtgaaaccttttaaaacagacaccatcgttatatccccagggcagaccacaaatttccacgtaacaacccatcttctttcctgaaagtacttgattcccccctctcctttcatgtacgcacccaattcattctacaacctgacccccacttctaccttacattacgccagtttctcttacgaatttccttcactacttttcttatcacccccttcctaaaaa

SEQ ID NO: 297710 - DNA, 398 bp, Zea mays
gtctatattcctgaccaatagcttctcctgccatacaagccaattgtaaccgataaacaaccatggacttacaccggtaccgacaccacgatgagggagagcatcggggcgcacatccgcaaggccggcatgcaagtgaggaacgcgtgctgggagctgtactgcgtcgagcatgacattcaggctgatggtctgatgcgcggcgacaagaccattgggtgaggtcgatgatgcttgcaacacctccttcagtgagactggcgctgggaagcacgtcccccgtgctgtttacgttgaccttgaccccactgtcatcgatgacgtgaggactgacacatatcgacagctcttgcatccagagcagctgatcagtggcaaggaggatgcatgcaacaact

SEQ ID NO: 297711 - DNA, 412 bp, Zea mays
gaaaactagggttttgctcctggaatcgggtcgcccgcagccgccgcccgaccgtgcgccaacgatacatccttctccctcctccgatccggcctttttgatccccggatcccgtacaatatgcttcccctctcgctcctcaagaccgcccaggggcaccccatgctcgtggagctgaagaatggtgagacatacaacgggcatctggtcaattgcgacacgtggatgaacatccatcttagggaggttatttgcacctcaaaggacggtgacaagttttggaggatgccagagtgttacattcgcgggaacaccattaagtatcttcgagttcctgatgaggtgattgacacggttcaggaggaaacttctaaaagccgatcagatagggagccaccaggtgttggccgtg

SEQ ID NO: 297712 - DNA, 481 bp, Zea mays
cgtcgacaccacgtcgtcttcgctctagatcgctgcctgcgactcagattcacgggcggagagcctctccttgttccaggcgagaaatcgcacgaactcatcgagtggcctggatgtcatgacgctagcggtatcaccggaggctggacgctcgcaggtgatgtatccagagtgaatgcacattcgcatgacaatgggcggcgtacgctctcgttagctcgagctacaacgaacatgcgagggcatgatctctctgtctccgagcctctcccgcgcgtcgtatcacgatacatctcctccctcatcaaggttggccgccaggagcccgccatcgtgctccgtgtcgaccgcgacaagggctacatcgacctttcgaagcgtcgcgtctacgaagaggaggcgcacgcatgctaggacaggtacaacaagtccaagctcgtgcactccaatatgcgccacgtccgcgagacgctcgagatcg

SEQ ID NO: 297713 - DNA, 390 bp, Zea mays
  unsure (1)..(390): unsure at all n locations
cccctaataccaaggaggtcttttttcaactctgggcgcccctaattnntnctnnccnnntattttccatcactttcctgggaaaaaaaagcataaaatgaaaaagtttcaggacaaatgtactcagctattcgttcgttaccgttcaatggaagtgtaagatattatcaacggtcgtctgatggaaccaacttgcctaacgatgcttgtttggttttaacaacggatcccaagcctctactccttttgacagctgagctccatgaacgtttcgtcgatgctaatactcaactctgtggccctgacaaatcaaccccaaagactattttgataacaatacgatcaaaaagccttaccctttattacttaaaatcacacctttataaatac

SEQ ID NO: 297714 - DNA, 262 bp, Zea mays
gaagagggtgggaatgctgggggtagcagcaaggtgcgtgtgaaggtgctaatgaagaaaggacacaagcaacagacaagacaaatgttaattccggccgatagttcaattgtgcaaagcacgaagcagcaggaagctgctgagcttgaggagaagcagagcatcaagcggaggatccttgagtacaatgagagggaggaagaattgaatggagcatcccaaatggggaactggggccaaggagctaccagtaccagcagta

SEQ ID NO: 297715 - DNA, 448 bp, Zea mays
  unsure (1)..(448): unsure at all n locations
aagagctatgacgtcncatgcccgcctaccttagcttggattcctttaaagtcaaccaacccgtccggccgaaccctggcgtttttttcgacagggccgtcggcggcgccccggcgggccggatcgtgatggagctgtacgccaacgaggtgcccaagaccgcggagaacttccgcgcgctgtgcacgggcgagaagggcgtgggcaagtccgggaagccgctccactacaagggctccaccttccaccgcgtcatccccgagttcatgtgccagggcggcgacttcacccgcggcaacggcaccggcggcgagtccatctacggcgagaagttccccgacgagaagttcgtgcgcaagcacaccgcccccggtgtgctctccatggccaacgccgggcccaacaccaacggctcccagttcttcatctgcaccgtcgcgaccccttg

SEQ ID NO: 297716 - DNA, 394 bp, Zea mays
cactgagctcgacgcggtcgccggcttcagcgagatcgtgccggacaccgtcgtgttcgatgatttcgagagtgagctcgtcgctgctgcttgggatcactgggctcccagacactaagttcaagagtgcgatagatactgcactggcagatggtgagtgcaacgcactggagaaggctgaggacaggatgtcctgttacctcaccaaggctcttgcaaatgttggcgctgaactggctcatcaagtccctgggagagtttcgacggaaatagatgcccggttagcttatgacacccagggcataatccacagggtacatgaactgttgaatctatacaaccaacatgatgtctcaactgaccgcctgttattcaaaattcctgctacatggca

SEQ ID NO: 297717 - DNA, 476 bp, Zea mays
  unsure (1)..(476): unsure at all n locations
aagagctatgacctcncatgcacgccgtccttaacctggaatcctttaaagtcgacccacccgtccgatttccctgtgggacgcatccaccgccgcgtgaaggatagcgcacaggccggcgagcgggtgggggcgacggcggccgtgtacgcggcggccgtcctggagtacctgacggcggagatcatggagctggccgggaacgcgtgcagggacctcaaggtgaagcgcatcaccccgcggcacctccagctggcggtacgcggggacgaggagctggacaccctgatcaaggccaccatcgccggcggcggcgtcatcccccacatccacagggagctcatcgacaaggctgcctaggaatgacgaaggagcaagcagtctgagaaaaaaacctgagaaccaagtagtaccatgaacctcttgtgggtggcttcgctcttgttgcgttgtcaatctgctgatacatacacatt

SEQ ID NO: 297718 - DNA, 217 bp, Zea mays
  unsure (1)..(217): unsure at all n locations
ttcggcgaaaacggggggcttccttaagttgtggtcgccttggccaaaaggcctgttaaatcctttcgccagatcaagaacaagccgtaccctaagtccaggtcctgccgtggtgtccctgaccccaagatcaggatctacgatgtcgggatgaanaggaagggtgttgatgagttcccctactgtgtgcaccttgtctcttgggagaaggagaatg

SEQ ID NO: 297719 - DNA, 338 bp, Zea mays
gcagaaccccttcgccattttcacgaactccctccgatcccggccatggcgggggaggactgccgctccggcgcggaaatggacgcgctcgtacgacgcttgaagctccaccagccgtccccatccccctacgaccccgatccggccgcggcccccgtccccgccaccgccggcgacggcgagctgttccggccgcggagagctgccgtgcttgtctgcctcttccggggagactgcggctagcttcgcgtcatcctcactaagcgctcgttcttcctctacacccactctggaggaaaggtcgaggagggtgatcctgatgatttatctacatcgtt

SEQ ID NO: 297720 - DNA, 265 bp, Zea mays
tcggtcgctgatgaacttcgagaactcctgcgggaacagtcaccatagagtggggctggctctctacagagtcatgtgtgttcagccaattctcggctttttcaggccagaaagaggcgtcaaggtgaggagcctatggtacttattacactggctcctcgggatcgcggtctgcgccacggtgatctgcgacgtctacatctggcatcggacctactcacgagaggaccgcccagagcgtgaggctatcgacggcgctcctcac

SEQ ID NO: 297721 - DNA, 149 bp, Zea mays
tcgctaaggcaggccaccaaggaccccggtgggattgctggcctcaatgtgatgcgtatgatcaacgaccccactgctgctgctattgactacggtcttgacaagaacgccaacaactcctgcgagaagaacgtgctcatgttctacct

SEQ ID NO: 297722 - DNA, 318 bp, Zea mays
tcgacccacgctttcggtcgcgggagcaaacatttcgcacgcgcatgtttgtgccaatatgggccaaaacgcagaacctccttttcgaaaacacaagctccaggaattcacattatatgaggacccgatggacattcctggaccacaggcgtaccttatgcactgtttacctgcacagcgagcacttgctatgactgacagccccattgaggctccaaactcaatcgtgttcccccaatctgataacacaatgcactctcacaactccatcatgcttcatgtgctctgcgcttaactctcctattgcacactcaagac

SEQ ID NO: 297723 - DNA, 380 bp, Zea mays
aaatccgttacttcccatatacatagagagaatacacagagataagcatgggagtgagtgagcaacatatgataccgaaggaaggttcatgccagtgaacctggagaacatgttcaccaagtatgcactcacaaagcccgacaatttatcactcaaggagttgtggcagatgactgagggaaatcgggccgctttcgactatcttggatggatggcatccaagttggaatggttgctgttgtattatgtagccaaggacaagcagggttttctgtccaaagaagctgttagagggtgttttgatgggagcttgttcaagaacatttccaaaatgtacaaggactcagatagaaagagtaaataaaaaacactacccatca

SEQ ID NO: 297724 - DNA, 352 bp, Zea mays
  unsure (1)..(352): unsure at all n locations
ccgtcatcgatctcgtttcaaatccatgcatcctcgtttcctccgtcccgcagcatctcaaccccatggccaagatcaagatcgggatcaatgggttcggcaggatcggaaggctggtggccagggtggccctgcagagtgacgatgtcgagctcgtcgccgtgaacgaccccttcatcagcaccgactacatgacctacatgttcaagtacgacactgtgcacggacagtggaagcaccatgaagtcaaggtgaaggactccaaaacccttctctttggtgagaaggaggttgctgtgtttggctgcangaaccctgaagagatccccgggggttcggttggtgctgaata

SEQ ID NO: 297725 - DNA, 272 bp, Zea mays
tcgcacaacatccaatgagaaagcagagcgggcctatccacccagggagaaagaggccaaaagggaggggagagtgtcatcatggcttccattgtcgcttccaggagggcctttcctctagttcgcgctctggataagctcatcgcagcatcctccgctcccggcactgtctccgcccttattccttttgcagacgcccgcggtcttcaagtatacaacacctgcccttcgctacaactctactaaggggccgagtctgaagacgatagcgt

SEQ ID NO: 297726 - DNA, 253 bp, Zea mays
tctttcttctcctccccctccggttcggggtagggttctttagggtgttcggccttccttcccatcggtgagccgatccagatggcggcctctgatgttgagtaccgctgcttcgtctgctgcctcatcttggccacggacgaccactccctacacaacgccttcatcacctacggcgaggtcctcgagtccaagatcatcctctatcggtagacgcacaagttccgcagcttcagcttcatcaccttctcca

SEQ ID NO: 297727 - DNA, 342 bp, Zea mays
ggaggctgctgcgtttcgctgcaggaggccttacgtgaccccgcggcgttcgtttgcttctcaatatgtctgcaagtctactgccagttccactgaccactacaacgctccagctaactcgaagggtgactccaacaatgtagacatctatgctcctagcaaggatgccatcatgtatgtcagcggtgtccacaagcaagagtacaagctctgacatcaacatcgcctccacatgctagctgcacaaccaactgccttgttaatgttgctaacgtcatgaatcacaagttgggcatcattgatggtatgatgaccactgagcatgccatgactactacgcac

SEQ ID NO: 297728 - DNA, 404 bp, Zea mays
cttcctatatttggcctagggggcaatgggaagactaccttcacccagcacctatacaatcacacagagtttgaaaaacatttcactgttagggtctggatatgtgtatcgactaattttgatgtgcttaggctcaccaaagagatcctgagctgcctacccgcaactgaaaatgcaggagataaaatagcaaatgacacaaccaactttgacctgcttcagaaatccatcgcagagaggttgaaatccaaaaggtttctgattgtcttggatgacatatgggaatgcagcaataatgaggagtgggagaaactagtagctccattcaaaaagaatgataccactggcaacgtgattctggtcacaacccgattcagaaaattgcagatttggtgaaaaaagaa

SEQ ID NO: 297729 - DNA, 320 bp, Zea mays
gtctgctcatctcacatcgagtccggtgcgttctccataagggacctatgctccatcttttatggtcagatccacacgaccgctgtggttgatgcatcttccctcgtcttgctggctacactttcctgcaccacatatcacaactgcttaaacacacacacaatctcatactggtagctccgtctcatcaattacatatctaagcataagactcagctcatcagcaaaatgttctcaccatattctatgctccaaaatactattctcgatcgccatatatggcatacattttagaagttgacaagtgcgacaatcacaca

SEQ ID NO: 297730 - DNA, 402 bp, Zea mays
aataacaaaaacctttctggggtaaagtgattaggcctgttgattttaataatgcaagtccacaattttttgatggggctcgttttgaatggggtgccaaggttggcataagcacagggcgtatacatgctcgcgggcctgtgggtgttgaaagtctcttaacaacacgctggatcatgcgaggaagtgggcaagtggtgaatggtgacaagaatgttgcatacacccataagaaccttcccttacaatgaagctgtttttgtgcttgatcaagattcgtgtctatccagtgatgtttgatagtttcatcaagcaagagcataaaatggtgaatcttttcgattgaggactgtgaatccatggatgttcagtcattgtttgtgtagacattgtggtgagctt

SEQ ID NO: 297731 - DNA, 470 bp, Zea mays
  unsure (1)..(470): unsure at all n locations
cctctagagtcgacaccacgccgtctctngtgccacagtactttatgattgtagagaaggtggagagagaactataagaatgtggttgcctacatttgggagattgcattgcagcattctggctaaacacctcctcacattcataccattgtgtgcctacgaaacccacatgattgggaaccgtcannagagaaagctggcttattgttgggaaagggtttaacattttgacacgtggtggctacaacattaagaccgggccaggctgcagcatcgagctgatgaaatttgacatgggaggctctgcagctgtatttggtgcagctaaagctttgggacaaatcaagcctcctggagtagaagttcactttatagtcgctgcctgtgaaaatatgatcagtggcacangcatgaggcctggtgacattgtaactgcttccaatgggaagacaattgangtaataacactg

SEQ ID NO: 297732 - DNA, 410 bp, Zea mays
gaggtacctaacgaaacgagaacgagggaaacccttcaattccatattttttcattatggaatttttaaaaaaaatccaaatatatcgaaccaatttgatcggtatagattttgatagcattggaaagatttgtttcaaaataacggtgataacattcaagggattaaaatttaaattcgatgacatcgaaggaaagctataaatttcgatgacatttaagggattgatataagtttggatgacagggaatggattttctatagattagccgttcggctggcgtcatgcccagcactgctgctgctgattttgtacagtgtatttgatctacgtattgcagtagcagcggcggctggcttaaagataggcaaagacatttgtatttcatctgggcctgatttgatacttg

SEQ ID NO: 297733 - DNA, 429 bp, Zea mays
tcgacccacgctttcggggaagcatgcagcgttcttatatccgctgtgcaagttctacagagattggcatgccaagtctgatggttttcatggaattttccttcatgatcctgtgagcttcactgccgtacttcatccagagtacttcacattcaagaagggtgtggtgagagtagagacccagggcatttgcactggccacactttgatggatcagggattgaaaaagtatatttttttctctgagtaactcataaaagattgacccgtctgatgttttttagtttcagcattcttacatacaccacattgatatgacataaatctcaccaaattactttataactcttggagtaagcaaactaaggcaaaagttaccccacatgatctatatgtttcagcagatttcacacttgtttctcctatgct

SEQ ID NO: 297734 - DNA, 355 bp, Zea mays
ctccgtggacgtcttggcgactgctggcgacgggacggaaacggtcgtatcaagggcgtgtcggcgcggcatggccggcgagatcggcgtgatgctcaacataccacagccgttcaccgtccggtgcaggaggctcacccaggcagtgcgcgtcagccaaggccaccttctgcgggtagtccggcctcacaccgccgacgccgacagggtgttctgcaacttcgttcgtcagcaccttggatctcccgtgtggaaagttgcgaggaaagaaacgccactattcggggagatcgcggatgagcttgaagtcggtgccgccaccgcagcgtcaatgtcgaagcggaagagcgagatg

SEQ ID NO: 297735 - DNA, 332 bp, Zea mays
  unsure (1)..(332): unsure at all n locations
aaatcgacccacgccttcggaacaaaacacaagccagttcagaaaagggggaaaaaaaaaaaaagataaagatgtcggggttcggccacaacaacaaaacaagcggttcccgggtcggcccaccagtgtcaagactttgcggcaacgaactactgctggcgtcggacgcccgcggctgcccgtcaaccaaggcacaacacactggtcaagacatgcgcttancacccggtcaggacgagaaagcatgccggcgttcgcgctcgtcaacaaagccacggngctcgccatcaaacactccctcggccagtcccacccggtcaagctcgcgcctt

SEQ ID NO: 297736 - DNA, 342 bp, Zea mays
  unsure (1)..(342): unsure at all n locations
acccacgctgttttcaacacagcacaggcagattnagagagctgttagtatatagagagagataggacgatgtcatggttccgggcacccaccacacacaacttcagccggcttcccacacggcgtctgggcccccaaaccaggttgttcaaagatcttcgtgccgcgccaacccgagaactactgcctggccgtccgcgacgggcgccgtcgtgctggccccggtcaaccccaaggacgaccaccagcactggtacaaggacatgcgcttcagcacccgggtcaaggacgaggaangcatgcctgcgttcgcgctcgtcaacaaggccacggagctcgcca

SEQ ID NO: 297737 - DNA, 389 bp, Zea mays
ctcacgcatagaatggtaaagagacggaaaaatttgctcaaaccctagctggcgaactcgatggcgaaccctcacgtgaccttcgacatgaccgtcggcggcgccatcgcggaccagatcgtcacggacctggacgccaacaacgtgcccaagaccggggcgaacttcaccgcgctgagcaccggcgacaagggcgtgagcgagttccagtagacggtctactacaaggactgcaccttccaccacgtcatgcgcgagtgcatgtactacggccgcgactacaccaccggcaacggaaccatctgcgagtacatgtaccgcgagaagatgctcgaccagaagtacatgcgcaagcacacggtctccatggtgctctccatggccaacac

SEQ ID NO: 297738 - DNA, 275 bp, Zea mays
  unsure (1)..(275): unsure at all n locations
ttcaacccactctttctcggacgcgtggcgagatgtttgcttgttttgttaaatgctcttgctgctcnnaaacaccgngtgatggttgtaatgcccagatatttaaatggtacctccgataagaattatgcaaatgcattttaaacaaaaaaacacattcgaattcaatcctttgccggtaaacataaagttacctttttccataattataaaaattaagttaactggttgttttttaaaaatccttaatataacaaacttggaaatatatttaa

SEQ ID NO: 297739 - DNA, 212 bp, Zea mays
tcgcaaagcggcagtgcgtaaagaggatcggggaacaaaacaacatggaaatgggcatcggtctcggcgggtgccttgcttttgcaacttgccaccccttttgcatggaaaatcccttgccctgcgcggggcttgcaggcttgtacggcgcttgcgccggcctgacgacgatgatgggcgccggcgggcttgtacccctacgcgggagtacc

SEQ ID NO: 297740 - DNA, 280 bp, Zea mays
gttgggttctcctcccccaccggttcgtgttcaggttctggttcgtgggcgagagggaagagatggcggcgtgggacgttgagtaccggtgcttcgttggcggcctcgcctgggccaccgacgaccactccctcaacaacgccttctgcacctacggcgaggtcctcgagtcgaagatcatcctggatcgggagacgcagaggtccctgcgtttctgattaagtgaccttctccacggatgacgcgatgcgcagcgccatcgacggcatgaacggtaagg

SEQ ID NO: 297741 - DNA, 339 bp, Zea mays
cgcagcgcggggcgacgagcacgctcctcctttcgcgcagggccagctccaccccgtaccgtggctttatatacacccctcgtggcaaccctaccgaatcatcactaccacgcgtctctcttactttcgcgcatctgtcaacgcctgaagctgacctaacctcccctactcagcgcagatcccacactactctggcagaaaatggctgacactgaagatatgcagcccctcgtctgcgacaacagaactggcatggtcaaggctggtttctgcggcgacgacgctccaagggccgtatctccagcatcgttggtcgcccgcgccacaccgatgctgatg

SEQ ID NO: 297742 - DNA, 375 bp, Zea mays
gccatctcgagatcattacacatgcatggttgacttgcttggtcgtgccggtcatctcaaagaagctgaggagctcataaaggacatgccaacggaacctgactctgtgctctgggcttctctgctaggtgcttgcaggctgcataagaatgttgagttgggggaacggacggctggaagattgtttgagcttgatcctgagaactctggaccctatgtccttctctcgaatatgtacgctgagatggggaaatgggcagatgtttttagagtcaggagatccatgaaggacaggggtgtcagtaagcaacccgggtgtagttggattgagataggaaagtaaatgaatgtgtttcttgcacgagataatcgaca

SEQ ID NO: 297743 - DNA, 381 bp, Zea mays
acgagagcccataaattctgccccgccgcctcgtgtcaaccccgtcactcttgtgtcctcctaaaaccctaaccctccgccgcccctcggacccccaaccagcagctgccgcggccatccgccggcgagatggcgctgtacctgctgttcgagtcggcgtccggctacggtctattccacgcgtacggcatcgatgagatcgggcagagcgtggaggccgttcgctcctccgtgctggacctcgatcgcttcggcaaggccgtcaagctcaccgccttcaaccctttctcctctgccgtcgatgcactcaatcagtgcaacgctatatccgaagggatcatgaccgatgaactgaggagtttcctggagctgaacctgccg

SEQ ID NO: 297744 - DNA, 330 bp, Zea mays
aaaattctaagtctgagagctaatgttaggttgaccactaagggaattgatgatatgtccttgaagtactttgttgaggctggagctattgcagtaaggcgtgtgcgcaaggaagatttgcgccatgttgccaaagccactggtgcaactatggtgagtacatttgcagacatggaaggtgaagaaacatttgattcatcattccttggacatgctgatgaagttgtggaagaaagaattgctgatgatgatgttattctggtgaaaggcacaaaaaacaccagcgcggtctctataatacttaaaagcgcaaatgacttcatgcttgat

SEQ ID NO: 297745 - DNA, 289 bp, Zea mays
  unsure (1)..(289): unsure at all n locations
cgttaactccgccgccgacgcagcagcagaggagacgccaaggagagcccgcaaggaggcgactatgagggccaagtggaagaagaagcgcatgaggaggctgaagaggaagcgccgaaagatgaggcagagatccaagtaggctgatggggattgaggatggtggtgtcngcatatctgtgctacgtttattctatgcgcgagctcatggagagatgtcacatcctatttcgtccacaccgtttgccatgggttcaatggctcgttttggaaacctgcacttcagtag

SEQ ID NO: 297746 - DNA, 302 bp, Zea mays
ttgctagacctgacgttgtcagctacggtaagataatatcagcatgctgcagcacgggcgatactgataaagcattggagcttctccaagaaatgaacaagtatggcatcagacctacactgagaacgtaccatacactcgttagtgcattggctagtgcagggagagctcatgatatggaatgcctatatcagcaaatgttgcacatgaatgttgacccgagcagtaacatatatgagatcatggttgatgcctatgtgagatgggactacgatccaaaagtagcatctttcaaaaaagta

SEQ ID NO: 297747 - DNA, 352 bp, Zea mays
  unsure (1)..(352): unsure at all n locations
atcgttttgcaaaggataatgtaattggagagggtgggtatggtgttgtatatcgaggcanattatcaaatggcaccccagttgctgtcaagaaaatccttaacaatttaggacaggctgagagagaattcagagtggaagttgaggcaattggccatgttcgtcacaagaatttggtccgccttttgggttactgtgttgagggtactcaaaggatgcttgtgtatgagtatgtgaataatggaaatcttgaaagttggctccatggggaattgtcccagtacagttctctcacttggttggctcgcatgaaaatccttctgagaactgcataggcccttgcttacttaca

SEQ ID NO: 297748 - DNA, 307 bp, Zea mays
gaggctactgatgcgagggtgagcacggactgggagactgggagggaaagaggctttgactctgtgaactactccgacagtgatgctgccaaggaagctatctctgcaatgaatggccaggtaattgatggtcagcagatacatatcaacatggctaatgagagagctgctgagaacctgcgtgatgatggctatagcgagcagtattatagaggtagtaactacgaatgtaacggcggctacagaggcggtggctatggtggctgcaggcaaagatatgatgcgtgcagggggcaggatcctatta

SEQ ID NO: 297749 - DNA, 224 bp, Zea mays
aatctcgtttcaaatacgggcatccttttatgctgcgtgaggcaccccctcaaccccatggtcaacatcaagatcgggatcaatgggttcagcaggatcggaagactgcgcgccaaagcggcccttcacattgacgatgtttagctcgtcttcctgaaccaccccttcatcaacaccgactacatgacctacatgttcaaatccaacactgtacacggacagtg

SEQ ID NO: 297750 - DNA, 379 bp, Zea mays
ctctccttcccggtctcctccgcccggggccttcgtaccctccatatccggctgcgacggcggcgagcccgacaccgagaatcggatccgccgacaaggcgagagggaagagatggggctcacgttcaccaaactgtgcagcccgctgttccccaagaaagacatgcggatcctgatggtgggactccacgccgtcggaaagaccaccatcctctacacgctgaagctccgagagatcgtaagcaccatacccaccatccgattcaatgttgaaactgcggagtacaagaacatcatgttcactctctgagatgacgcgggccaggacaagatcaggccactgtggaggcgtgactaccagaacacccactgtctcatc

SEQ ID NO: 297751 - DNA, 438 bp, Zea mays
tccacccacgccttctcccaatctcccctacaccagaacaagtggcagttctttggtccgcgtcagagaggccgcccccatgtctgggcgcggcaagggcgccaagggtctgggcaagggcggcgcgaaccgccacctgaaggtgctccgcgacaacatccaacgcatcaccaatcccccgatccggacgctggctaggaggggtggcgtaaagcgcatctcgggcctcatctcccaagagacccacggcgtgctcactatctttctcgagaacaccatcctcaactccatcacctacaccgagcacgctcgccgcaagaccgccaccgccatgtacgtcgtatacgcgcttaaccgccagggacccaccctctacagattcagaggctaggctaggcgcctcttatactctgagactgcctaggggacatgtctctg

SEQ ID NO: 297752 - DNA, 386 bp, Zea mays
gttcaaatttatatccagtggaaagaacgcagctgtatgacagactgtcgctacttttgcatgacgcggagagaaggggaacggtaggcacttggtctgagccccgttaaatatcatggaaagtggccgttcttacacatcattgtgttccaggaacccctttcagctgcactttctgctgtcaacctactgatgcacttcactggctggctttcattacttcttctagtgaattaccaatagcctcttagaccccaggccaagagaacttactatgaatatactagctcgtggcatatctatgcaatcttatcaatgaacgcatggttctggagctctattttccatactcgagacattgacttgactgacaaattgaactattc

SEQ ID NO: 297753 - DNA, 187 bp, Zea mays
tgtttctcagcgccgacgtcatcgtgggggcgactgcagagtttgggcgcactcccagagcttcccctagttaaagcctgactaggacgctggcatcataactgactttgatgaacctggtactcttgcaccaactggtcttttcgttggaggcacaaaccacatcgtgatccaaggccaacctgga

SEQ ID NO: 297754 - DNA, 281 bp, Zea mays
ggaaggaaaggaggtgttttaatatgagggggggcataatagtagggggggatggaacccgggttgggacttggactcttagatccccgaaggccatagccgattgtgtaaacaacgccatgattctgcatacgatcaaaggtttcaaaaaagtttgagtgacaaatgcggttctgtcaatgaactaccgtccataagcaatgacaaatacatcgaaggacttcgcagataagcttgcaatcacaagtgcatgctctcaaaagactgatcccttaagaact

SEQ ID NO: 297755 - DNA, 354 bp, Zea mays
tttcatcgcccctatcaatttctcgtgtgcggactctttttaccaccaccagactcttgataacctgaatctattcatcaaggaacaccaagaacctcttcgctactatgctcgacacacatattccatatctcctggttgcgaacaatactcagaccccaatcttcctccaggagaatggtacggtcattctcacccctcacctgtgccaagacacctacttcagattgcttgccatcaacttctttggactcgccaaggctgctacaccaatggcaacaatatttagaggacaatacttgttcactggcagtgagaccacctcagtctggttggaggtttcttaaatgaaaa

SEQ ID NO: 297756 - DNA, 358 bp, Zea mays
gaagggatgggtctatatatagacccacccactccgctttttacaggccgacaccagaccaacggcggccacttccacatggcgggcgggactcccgcctgaaccgacaagaagaaccgccacggcgacatccttgacaagtacatgtacctattctgccgcgtcgacatgctcatggacgagaagaccgtgcaatacctcatgaactccggcatggatccctgaacggagaacaacccgtacctgtgcttcttgtacactagctatcagaagcgcgcgactgacgtgtcgcacagcaacaccgtgctgctcgccagggcgcacagagacgacgtcctgttgcgcgcctgcggcacca

SEQ ID NO: 297757 - DNA, 327 bp, Zea mays
tccacccacgcgtttttttaaaaccgacaagaccatagcggagggcaggaggacacgggtggtggtggccccattctgtccggggaggagcacgacgagacatggcctgtctgtacgaccacagatgagaggatcacaactgggccgcctactggtccctctacaaccacatacacgttcctacagtggcgggtatcaacgaatcggtgcccgggagcgtcaagttcgccttgaagtcctgggagcacattcttgacacatgggtgggttttttggagaagcatgaaggtgagccctgacctacttattttgatgccgactatacat

SEQ ID NO: 297758 - DNA, 306 bp, Zea mays
tcgtgggttggcttctcctgccccaccgggtcggggtcatgttctggttcgtgggcgagaggtaagagatggcggcgtcggacgttgagtaccgttgcttcgttggcggcctcgcctgagccaccgacgaccactccctcaacaacgccattagcacctacggtgaggtcctcgagctgaagatcatcctggatcaggagacgcagaggtcccgcggcttgcgcttcgtcaccttctccacggaggacgcgatgcgcaccgccatctaagtcatgaacggtaaggagctcgagaggcgcaacatca

SEQ ID NO: 297759 - DNA, 230 bp, Zea mays
ctaggcataagcattgcaaccacagacagcgcgcgcttcaaggccttttttttttgagataacaaggacgagaggaggagatggctgtcacgatcacatgggttaaggccaggcatatcttgtacaggcggaggaaccccaccgtgtaggaggacttgtgccttaacgactgcagctactcgaggagggcgcgacccagcatcgcatccactggaatatatgaagccttg

SEQ ID NO: 297760 - DNA, 373 bp, Zea mays
  unsure (1)..(373): unsure at all n locations
aagtcacccacccgtccaatccttcgtggttcgagtgaatccgtggggtcaactaccggccgctaccggcaaccctatcnaggcgatggggaaggcggaggcgaggtcaagggggcgcggcggcggcggcggcggcggcggcggatgatgaggctgacgccccaacggcaatccggggaagatcttcgtcggagggctcccgcgggacaccacggatgctacatttgtgaggcattttggacagtatggagaaatagttgattcggtgataatgaaggataggcacacatctcatccacggggttttggcttcattacatactccgaccctgctcgtgntgataaagtgatagacgacaatcatgttatcaat

SEQ ID NO: 297761 - DNA, 452 bp, Zea mays
ctcgattgaaatccatccatcctcggggggtgggttccttatgatctaagcctcgtggccaatatcaagatcgggatcaatgggttcggcaggatcggaaggctggtggccagggtggccctgcagagtgacgatgtcgagctcgtcgtcgtgaacgaccccttcatcaggaccgactacatgacctacatgttgaagtacgacactgtgcacggacagtggaagcaccatgaagtcaaggtgaaggactccaaaacccttctatttggtgagaaggaggttgctgtgtttggctgcaggaaccctgaggagatcccgaggggttcggtaggtgctgaatatgttgttgaggctactggtgttttcactggaccagagaaggctgcagcttacttgaagggtggtgccaagaaggttggtattttttgttctagcaaggaatcccccatgtt

SEQ ID NO: 297762 - DNA, 250 bp, Zea mays
  unsure (1)..(250): unsure at all n locations
ctcatttgctccaaagctctttaggcggcgattgcaagactctaatgttcgtgcagataagtccaagctctatggattcaggagaaactctcagttcactcaattttgccagtagagtccggactgtagaacatggccctgctcgtaagcaagtggatccagctgaaagtttgaagttcaaacagatgactgaaaaacttcggcacgaggaaaaaggaaatgcacagctgaaccanagcttgcagctgat

SEQ ID NO: 297763 - DNA, 310 bp, Zea mays
  unsure (1)..(310): unsure at all n locations
ccgttgccgtgtggaacccactgagcatgatcagctccgaggggaaagcggaggacgccatggtcgcgcgccttgagaagcacaccggaccggtgtgtggactggagttcagcgagctcacgccgaatcggctcgcttctggggctgagcagggggagctttgcatctgggatctcaagaatcccgttgagccaatcgtgtacccgccactcaagagtgttgngtcccatgcccaagctgaaatctcttgtttatcctggaatcccaagtttcaacatatagttgcctcaacttcgagtaatgggatgac

SEQ ID NO: 297764 - DNA, 360 bp, Zea mays
ctgacgcgtgggcggacgcatgggcggaggcgtggtcggcggcgaagaagcctgcacaggatgagcccgcgacagagaaggcggagaaagctccggcggggaagaagcccaaggccgtgaagcgcctcccggcggacaagtccgccggttaggagggcggcgagggcaagaaggggaaaaagaaagcgaagaagtccgtggagacctacaagatctacatcttcaaggtgctgaagcaggtgcaccccgacatcggcatctcgtgcaaggccatgtccatcatgaactccttcatcaacgacatcttcgagaagctcgcggccgagtccgccaagctggcgcgctataacatgaagccca

SEQ ID NO: 297765 - DNA, 364 bp, Zea mays
tctttcaagcaagtcggccaggaagggataaagacctaataccgagccgtgcgggggctccggacggtaacaggacatgaccccaaaatttcagatccttcctacccgcccacccgtgcccatcgacacatcattattgcctgtcgcaccccacctacgacctcttctgctgcagggtgatctgatacgccacatgctgcgcgatagaactgtgggtattccactacagctccctcatctagaaccccaagttctacttctacgacaaaatgctcggctacatcaatggctacatacgcacctttaatctcgcttgcattgaccacagaggcacaccataacatccggctaggacctgcacgct

SEQ ID NO: 297766 - DNA, 377 bp, Zea mays
  unsure (1)..(377): unsure at all n locations
cttcgctccaaaggcgccctcactgctagacgccatgtacacgtgggccggcctanccttttttctcttgcctctaggagctgcccacacccgacgggctggacttttctttgccgcgcttaagtacgaccctgccaaggtgactttttataactaccgggttctcgnccgcctggagcaaaaccctgagaaacctgccggcggcgagctgctaccaaaatctgctgttaagaacgagagatatctcacgggtgagattctatcgatcgaggctgaagtgagcgaaactgaagctggcaagaacgctctcttctcaaacatcaacgctcatgacgcggagcacaggacccccgacgagaaaaactgctactgcccag

SEQ ID NO: 297767 - DNA, 425 bp, Zea mays
atttttctatcccgttcaacatatcctggaggtcccacaaattaaggaagaatatacctcacctccaacttgaactagactctttcataatcaccttatgaccatactgcactccaaatagtcacaaacttccacattagatgcgttgttaatccattgatcatcatacactattcacaaataatgcaacaactaatctacgtgaggctgcccattgtcactcctaatcacactaaacctattaatgacatcacaaactacatcgttattaactacctcacatccagctacactaagaaccacaagctcttccatctttatctcactaacttctctgacaaaaatcattgttaatatgtctttgcaccacattgaaatcctattttaccacaggccaattttgacatgttctacattcaccccac

SEQ ID NO: 297768 - DNA, 408 bp, Zea mays
cagtcgacccactcactcgttaaatgtgtacatggcgaaactccccgagcgggcctacaggcacgaggaaatggtttattttatggagaacgtaacgaagactgacgactcgcacgagctcactgtggaggaacactaccttctgagtgctgcatacaagaacgtcattgccgtccgcagtgcgttatagcacatgatctccttcatcgagcagcacgatcagggtcaaggcgctgaggacactcgtcacactcttaagggccaatacctggatcgactgaaactgagctcaccaagatctgtgatggcgagatgaagcttgtctaatgtgagcttgtgccgtcttacatcgttcccgagatcaaggccttatatctcaagatgaaaggtgactactacagatacact

SEQ ID NO: 297769 - DNA, 246 bp, Zea mays
acgacccacgcttccggccgacgacgtgcacgaccaggactggcactccgtcaccagcgaggagaaggcccctaccaaagccatcgactgtatggctgattgaatcaaaggcatcggacgatgagaccacggaggataaggagctcgacctctcctccaacgacgttgtcaccaagtacaaggctgccgccgaaatcctcaacaacgctctgaagattgttgtgtctcagtgcaagccaaaagtca

SEQ ID NO: 297770 - DNA, 420 bp, Zea mays
aaaattgttgatgtggaagaggaacctgctaaaagaaggataattggtcctgcaatgccatctcgtgaattactggctgcagcagctgaaatgacagaggctcttaggtgccgggatgctgaactggaagccaatgatgatttgctcataggccctccaccgcctgccgtagttgctgaagctgcatctgcaaatgaagctgagcgatttgaagaggttactagaatattggtgggttgacacaaattcaccttatgaggttctgggggtaaattggaagatgtcaactgataacatgaagaaaaggtattggaagttgtctcttttagtgcacccggacaaatgtccacatccttccgcacaagaggcgttcgtgaaattaaataatgccttcaaagacttacaagaccctgataagag

SEQ ID NO: 297771 - DNA, 400 bp, Zea mays
gaacacagatctgctgtacggtcacattgtttctgaccattcacaacagttcaggcttcttgatgtccctcagcgatcaaatggtcaatctgctcgtcaaacagaagggacaaatggtctgtccctttatgatagccacaacattgaggatgccaatggctctcacaacttcatctgccgattatgtgggctcaaatatgatcatgggccatatctccccagacactatttcttgtatacaaggcgatatggtccttgcttctgctactcgcatgagttgccacgatatggtcttgaagtggtctgaccaactatgcagctgcctactgcactggccttctgttggctcgccgtgtgctcaagatccgtggtttggatcaggagtacgagggcaatgttg

SEQ ID NO: 297772 - DNA, 434 bp, Zea mays
cttctacaccgacgtcaagctcttcggcgaccagacccagtctgacgccgtcctcgacgacgtcttctgcatgctcggatgcaccaggtcctcgctccacgtcgtcgcctccgagaagggcgtcgtcgtcggacgccttgtcttcgccgacgacggggaccggatcgactgcacgcgcatgggcgtcggcggcaaggccattccgcccaacgtcgacagggtctcgggcatcgagagcgacgcgctcttcatcctcctggtggagaaggacgctgcattcatgcgactcgccgaggacaggttctacaaccgcttcccctgcatcattctgacggccaaggggcagccagatgtcgccacccggctgttcctgcggaggctcaaggttgagctgaagctgccagtgctcgccgctggggattctgatccatacg

SEQ ID NO: 297773 - DNA, 436 bp, Zea mays
gaggaatgctgtctacgacctccagtggccctcaaacaacaacaattatctgatcgctgaatttgtcgatccagaagaggcaatggctaaccaaactctagtacctccccatgttcctgctacttcgagaggtttattgcccactccagcacggtttgccaagctgcctcccacctctgaccctggaccagcaagggagagccttcctcctcctccactgagcctggaacctgccccgacactggatgagctcttcaagaagacacagacgtacccaaggatttactacaggccactgtcagaagaggaggtatctgctaaacgtgcagctcacgacaaaggtagaaggggatagtgggctttagtttgtcgctcaagctggtattttggaagtatcttgtacttgtcacagctgttttcagatgcaaccatactt

SEQ ID NO: 297774 - DNA, 312 bp, Zea mays
tctactcacgcgtcctttatccggcacgagtgcgcggccgcgggggattattgtagcgcgggggtgacacaccagtccgtgggcgaccgagtgaagctggagccggtcatcagctgctggcgctgccgccactgcaagggcgggcggtacaacctgtgcgaggacatgaaattcttcgtcaccccgccggtgcacagatcgctagccaaccaggaggtgcaccctgccgacctttgcttcaagctcccctacagagtgagcctgcaagagggcgccatgtgctagccgctgagcgtgggctttcacgcgtgc

SEQ ID NO: 297775 - DNA, 318 bp, Zea mays
gcccccatatttattgttgatgacaatgatgacaaatacacctcccattttaacattgtttccaatgctatctgcaccacatactaccttgctccactcgctaaagtcattcatgacaactttgtcattattgagggcttgaaaacaactgttcatgccatcactcacaccctaaaaactgttaatttacccttcaccaaagactgtatacatggcaaggctgacatctttaacataattcccagcaacacctgtgcttccaaagctctcaaaaaacatcttcctgaattgaataacaacctcacttgcatgtccttt

SEQ ID NO: 297776 - DNA, 229 bp, Zea mays
tctactcacgcgtttgtttacgcgaccgccgccgtaatggggaggggaggtaagggaggctgggatgggaacaagttccacatgtcactggagctaccggtggtggacacggtgaactgcgcggacaacaaggacgccaagaacctctacataatctacgttaagggcatcaaggagtcgctaaaccgcctcccgtccgactgtgtcagagacatggtcatggccaccg

SEQ ID NO: 297777 - DNA, 440 bp, Zea mays
tcgttacatgcctactcctgtgctgcccaaggcgtggcacggcaacggcataccgatcaccacaaccagatacaaggaggaccagaaggtacgctggcacgcgacgacgttctaggagaggctgatgaaggttcagtctgacgagacgcctctgcatgaaaggatgatcagcgggaagcttatccacctcgaggaaaacgccgagtagagaatagagagagaggggccgtttgcgccccttgttatgcaagctggaatctgccccgcagtcctgtgccgtctaaagaatggtggtcatcagcccaccatatgaactccacttttcagccgcatgatcactgtagatagagcatctttcgctgagttatgctctgcactctgcagagctgactgctgcgtggaatattacatgcatatgtgatgacgggtcaataaaagga

SEQ ID NO: 297778 - DNA, 435 bp, Zea mays
  unsure (1)..(435): unsure at all n locations
tgtgttttcctactcgcctatctacgtgacgcgaaccgttccccgtgggccgattcttatctcattgctcaccaccggcgccggtaccccctttcgacaacaccatgagggagtgcatctcgatccacatcggccaggccggtatccaggtcggaaacgcgtgctgggagctgtactgcctcgagcatggcattcaggctgatggtcagatgcccggtgacaagaccatngtgggaggtgatgatgctttaacaccttcttagtgagactggcgctgggaagcacgtcccccgtgctgtttttgttgaccttgagcccactgtcatcgatgaggtgaggactggcacctatcgtcagctcttccatcctgagcagctcatcagtggcaaggaggatgcagccaacaacttcgctcgtggtcactacaccattggg

SEQ ID NO: 297779 - DNA, 383 bp, Zea mays
  unsure (1)..(383): unsure at all n locations
tttcttcaaaacggcagggcgtacagagggtggactaacagaacagcgtgaggatggtcatcgttgtcatggtgtgcctggatctaccagctgccatcccctctgcaatagcataagccctgcccctacgcggggctgcatggcttgaacagaactaacgccggcctgacgactatgataggcgccgtgcggctgaacccctacgctgattacctgatgcacacgcactgcatcctgctgccagagttgccctactactccggctgtgcacagacaagcgccgtgtaccanccgctccggcatcagtgctcccagcaccacatgaggatgatggacaggcagaacggcacgcagcacttgctgatcatgatacatgttgaaca

SEQ ID NO: 297780 - DNA, 234 bp, Zea mays
  unsure (1)..(234): unsure at all n locations
agcaaggatccannananacaattcatccacccgtttatttccaccccagagagcaaaacaaggcgagctacaccaagagggggtgggtcgtaaccctcactttcctggatctccctgagaacgccaccttcacgcatacaagccgcgggagcggctgacaaccaccgccgtcggttcatttaccgacaacgatgcatatgccacctacagtttacctgccacctcccgagcat

SEQ ID NO: 297781 - DNA, 303 bp, Zea mays
  unsure (1)..(303): unsure at all n locations
tctactcacgcgtttgatctctaccgnctccccaaacaccgtcgaacctattattaaggtgggatgccgggaccacaccctcnatgttttgaaccttacccacttcaaacttagcttcacttttgattgacaccggggctatattaactccttcgctgtgaaccccaaaaaatcacttttcgcctcctgcaggaaggacagcgttactcttctgttggatttggcttaagggaagaagctgtactctcttgacacgggctccatcatccactctttcttttttttacccaaccgctactggct

SEQ ID NO: 297782 - DNA, 406 bp, Zea mays
ttcggtccggatcctacatcccgatcgctcgcctccagatgtacagcagctcgaatcgtctcatacctcggcgaaaatgagatagatcttgcacatacagggagggcaatgcggtaaccagatcgacgccaacctttgggagggagtgtgtgaacaacactgcctagacactacatgtcagtccactgacagttctgacctttagtgacagcgcgtcaatgaccactacagtgaagcatattgtggacggtttgtgactagatctctactaatggacctaggacctgcgacaatatacagtgctgcgactgaaccctataggcagatctttcgcactaacaacgtctggtataggaaatctcttgctggtaacaactgggacaccggggattatactgagggctct

SEQ ID NO: 297783 - DNA, 400 bp, Zea mays
tttcacccgcctcccacatccccatggggggcctccagatggccagccggtcgaatctactcattcctcggctaaaatgagatagatttagcacatacagggagggcaagacggtaaccagatcgatgccaacctctgggaggcagtctgtgaagaacactgactagacactacatgtcagcccacagacgcttctgacctttagttacagcgcgtcaatgactactacaatgaggcatattgtggaccggtctgagactagctctctacaaatggacctaggacctgagacaatatacagtgttcgcactgaaccctataggcagatctttcgcactaacaactctgtgtataggaactctcgtgctggtaacaactgggacaacgggcattatactga

SEQ ID NO: 297784 - DNA, 298 bp, Zea mays
  unsure (1)..(298): unsure at all n locations
acacacacacacacacatactacnggnnttcattgccaaccgngngnacnagcaaccagcngagctcttacaaaagcgggcagccatcataacnnnangaaaancaccaccacttcttcaaccaccacaagaaagacgaggagcagcccgccggcgagtacggttactcctaaaccgaggtggtcaccgccaccggcgaaggcgagtacgagaagtacaagaaggaggagaaagagcacaagcacaagcaacacctcggcgaggccggcgccatctccgtcggcgccttcgcactcta

SEQ ID NO: 297785 - DNA, 319 bp, Zea mays
ctaatctgcccttgccgccggcactgcgcgatccaggtgtgcagactgctcccttctcctctccgctccgaatggcccgcacgaagcagacggcgcgcaagtcgaccggcggcaaggcgccgcggaagcagctggccaccaatgcggcgcgcaagtcggccccggccacgggcggcgtgaagaagccgcaccgctttcgccccggcaccgtcgcgctccgcgagatccgcatgtaccagaagaacacggagctgcttatccgcaagctcccctcccagcgcctcgtccgcgagatcgcgcaggacttcaagacggacct

SEQ ID NO: 297786 - DNA, 214 bp, Zea mays
tcgatcctctcgtccttttgtatgccccaagggaaggggtccgtgcgtcctcagactttatgttcagggcaaggaagtcaatggcgctggcatcaactctagcttagctgtgcaccaggatactgatggaagggcaactgatgttactttagcatggacagtggcacttggtgcccccttcacgtttgctactacttctgaacacgtgtacaag

SEQ ID NO: 297787 - DNA, 363 bp, Zea mays
ataccattagctttatatactccagagcggagaaaaacccgatcgacgccatgagggtgttgctcgttgacctagatctactggctctcgctgcgagcgccacctccacacatacaagcggcggatgcagctgacaaccaccgacgtcggttcatgtaccgtcgacggtgcatttgccacctacgggtcacctgccacctccagagcatcttccaccgcccttccacctgccgacgtcagtgcacctaacgccgtcggtccatgtgccgtcaccggttcatttgacgacgccaccatgacactaccctactcaaccgtcccggcctcagtctcatccatagacacacccatgcccgtgccaac

SEQ ID NO: 297788 - DNA, 420 bp, Zea mays
  unsure (1)..(420): unsure at all n locations
gtcacttccccggcccctcccgctcctgctcgccggaggccgggccggcggcgatggggcacggcgctagctgcggccgaccaagcgaggaggtagacttcttcggcgcggcgcagtccggggacatggcccgcctcgccgccgctcttcgctcccgccccaccttgctcagccgcaccacgctcttcgaccgcctctccgcgctccacatcgccgccgcacacggccacctncaggtggtctccctggcattggatctttgcgtgcaccccgacgtcgttaaccgccacaagcagacggcgttgatgctctcggcgatgcacgggaagaccgactgcgtccgccggctgctcgacgccggcgccaatatcgtgatgttcgattcctcgcacgggcggacgtgcctgcactacgcggcgt

SEQ ID NO: 297789 - DNA, 280 bp, Zea mays
tatgggaagtggaccaccactggccacctgatctacaagcttggaggtattgacaagcgagtgattgagaagttcgagaaaaaagcttgccaaaatgaacaagcggtcataaaattatgaggggtgggttcacaatttaagcgttaaccgtaataaaggttttaaaattgattttgccctgtggaagtttgagaccaccaagtactactgcactgttattgatgccccgggacaccaacaacactctggtaatatgatcactggcacttcccaagctgac

SEQ ID NO: 297790 - DNA, 321 bp, Zea mays
gtgctgggaagcacgtcccccgtgcgtgggttgttgaccttgagcccactgtcatcgatgaggtgaggactggcacctatcgccagctcttccatcctgagcagctcatcagtggcaaggaggatgcagccaacaacttcgctcgtggtcactacaccattggcaaggagattgttgacctgtgccttgaccgcatcaggaagcttgcagataattgcactggtctccagggcttcctcgtcttcaacgctgttggtggaggaaacggctctgggcttggttctctcctcctggagcgcctgtctgttgactatggcaaga

SEQ ID NO: 297791 - DNA, 323 bp, Zea mays
cgacgggatcgtcaacatcaccgtgttccgggacggccgcgtggcggcgttcacgccgtcgggcccctccaacaggttgccgaccgccttctatcaacgatccatcaaggaacaaccgtactacatcgccgtcctgcaggtgagggacctgatctggtctccggcgccggcggacggggtgcaggctccaccgcccgcgccgcagcccgacgcggcgccggggttgacggatctgctgtccaagaacggctgcggtggcttcgccagcctcctcgccgcgacggccgacgcagtcaccaagtacgacagcagcgccgccgggc

SEQ ID NO: 297792 - DNA, 290 bp, Zea mays
tcttcccacgcgttctctacggcagcgtgaacatcaccgtctggcgctactttttaaagggggcgggggcgccctcaaaccctttcaacaggttgccgaccgacttctatcaacgatccatcaaggaacaaccgtactacatcgccgtgctgcatgtgagggacctgatctggtctccagcgccgacggacggggtgcaggctccaccgcccgcgccgtatcccgactcggtgccgtagttgacggatctgcggtccaataacagtctgcgggggcttcatccagccttc

SEQ ID NO: 297793 - DNA, 361 bp, Zea mays
tagttttcccacgcgtgtttatagaaggcgtcttcgtactcgccgacgtccgttttcaaaggtttcgggcctctcccaattcccgccgccgctccatcccgtaacgcgacaccatgagggagtgcatttcgatccacatcggccaggccggtatccaggtcggaaacgcgtgctgggagctgtactgccttgagcatggcattcaggctgacggtcagatgcccggtgacaagaccattgggggaggtgatgatgctttcaacaccttcttcagtgagactggtgctgggaagcacgtgccccgtgctgtttttgttgccttgaacccactgtcatcgatgaggtgagaactggcacctta

SEQ ID NO: 297794 - DNA, 267 bp, Zea mays
ggttaggccagcatggtgagggtctatgtgctcaacgatgcgctcaagtccatgtacaacgctgagaagattggccagaggcatgtcatgatcaagccggcatccaatggcatcatcaagtttctgacgggcatgcagcgccatgtgttcattggagagttcgagtaccttgattgaccaccgatcgggcaagattgtggtcaaactcaacgggtggctgaacaagtgcgggcgtaataagccctcgctttgatttatggcgttgaa

SEQ ID NO: 297795 - DNA, 319 bp, Zea mays
tctcccacgcgtttttcattagctttatctactccagagcgcagaagatctttatcgacaccatgacggtgttgctcgttgccctcgctctcctggctctcgctgcgagcgccacctacacgcatacaagcggcggctgcggctgccaaccaccgccgccggttcatctaccgccgccggtgcatttgccacctccggttcacctgccacctccggtgcattttccaccgacggtccacctgacgacgccgtgccacctgccaccgacagtacatgtgccgccgccggttcatctgacgtcggcaccatgacactaacc

SEQ ID NO: 297796 - DNA, 381 bp, Zea mays
  unsure (1)..(381): unsure at all n locations
tcgacccaagccttcgtttcattgaccaacaagaaccccaaggtttagggccagtaaatccttgaggacggcaatttggacggccctgacgttgttatggccgccgccggggacgacgcggcgaagcttcaggagcttgacgagatgaagcgcaagctgaaggagatggaggaggaggccgccgccctccgcgatatgcaggccaaggtcgccaaggagatgcaaggaggtgaccctagtatatctacagctgaggcgaaggagcaggtggatgcccggtctgtgtatgtnggaaatgttgattatgcttgcaccccagaagaagtgcagcagcatttccaagcttgtggaactgtcaacagggtgacaatcttgactgac

SEQ ID NO: 297797 - DNA, 285 bp, Zea mays
tctacccacgcgtttttcgtccatcccatcccactaccacccagggggtctttcgtcgagtcgatccggttcttccaacccaggggctgtgatggcgacaaaaaggagcgtgggcaccctcggcgaggcggatctgaaggggaagaatgtgttacgtgctcgccaacctcaacgtaccgctcaacgatgcccagattatcaccgacgacacccgcatacgctcctccgtacctaccatctaattcctcctaaagaagggcgccaagagtattctcgacagccacc

SEQ ID NO: 297798 - DNA, 322 bp, Zea mays
gtaaactataaaaggatgcttccgaccgcgcggccggtgatttcagacgagtgggtcaatctactccagatcgcacaaaaagccgataaaaaccctgaggataataatccttccgctgactataatgcctataactccaagcgccagatgaagccatacgaccagaagctgctgctcgcatccacttcctcccgcatgaactaccgccagaagaacgtgtagaagaatgccatcaacagcgtggtgacgtacatgatctacatcttgaacgtgctgaagcaggtgcacacctacatccgcatatccatgaaggccatgtcca

SEQ ID NO: 297799 - DNA, 193 bp, Zea mays
ttacatcacctcgcctacgatctccatggggtgcatcgattcgagcatcggtcacgtcgccctactgcagaaagttcaacgatcagctaatcaagaatgctagctacatatgcacacctagcaaggctacacttgctgcatatgagttcactggcaccataagcaagcgcctttccagcatcaatgtcaagaa

SEQ ID NO: 297800 - DNA, 343 bp, Zea mays
ttgtcatcgtctacacctacatcggccgggggtctcttcacgagcctgcggtgcaatccgaggatctgcggtggtagacagccgtcagccggcgattacgcgcctcgtggacaactagtacgactacctagacaagaatcgactcatcgacgactgcctcgtcagcgagactaacatggctcccaggtggacccgcaacgagccatgactcgagttcaagtacagcatcggtctaaagatcgccacccagaccctccagatgcaaaggtaaaccatccaaggtcaaatatgggattctgcggagcaagagaggtacagtgcaattccaagttcttactacaga

SEQ ID NO: 297801 - DNA, 268 bp, Zea mays
gtagcagcacgcccacgcctctcccaggggcggcatcccatttagtgcttgcaaccatggctatgcgatcgaacaaccactctaagaggctcaatagcgcataagcattggatgctccgataaagctagccaagctctcattgccaagccatgtcatgtacctcactcatctagtgagtgacttgctcaagctctgatgatcacgaacagctctaagtatgctgaaaactaccgtgaggtcatatttatccagatgcaacggcatcta

SEQ ID NO: 297802 - DNA, 235 bp, Zea mays
gtctacacacggatcaataacactaactgggggcccggtcattctccgggtggggcgtactactacctttttcaggcattctgaccaaccaacttctcgtgactgccatggctctgctctccgacctgatgaacctcaacttttcgggccggaccgggaagatcatcacctagtccatttggcttgccgtttccggcttggacacaaggagcaaagcatggaccctctccggact

SEQ ID NO: 297803 - DNA, 143 bp, Zea mays
  unsure (1)..(143): unsure at all n locations
tcgacttcactcgtccggtcatctccagctcggccacgttcccgcgaaagatgtctcgcaagcagatgcaggtgggcgcttttttcttttattatttttaccagaacgaactncacgctatctacagcatcctcaagaaggag

SEQ ID NO: 297804 - DNA, 435 bp, Zea mays
tcgtctccacgcgtttgtgtaagagagcaccatccccatcaggacgagtgtctagaaacaagggggatgaggaaactgacgagaactgggtatggttcttgtctgagctgcatgagttgctggagaagaacacagagaacatgccaaggctgaccatcttgtccgatagacggaagggcattactgatggagttgaattcaacttcccaactgcattccacgggttctgcatgcgccatgtttatgaaacccctcaaaaaggagttcaacaatcctgtgcttgccaaccttctctgggaagctgctcatgcgctgactgtgattgagtttgaaactaagctgctggagatagaggacgcttcaccagaagctgttgtttggataaagcacctaccttcacgtctttgtgccacggcttactttgaggggacaagg

SEQ ID NO: 297805 - DNA, 179 bp, Zea mays
  unsure (1)..(179): unsure at all n locations
tctattcacgcgtttgttcttagagagaaggaaaaatatccccgaaccttttctaacgatcgggagggcnaaccctcgcgtcttcttcgacatgaccgtcggcggcgccccggcgggccggatcgtgatggagctgtacgccaacgatgtgcccaagaccgcggaaaactttcgcgcgc

SEQ ID NO: 297806 - DNA, 376 bp, Zea mays
  unsure (1)..(376): unsure at all n locations
gaagcggggatcctctaaagactactttcgcgtctttttttaatacggcaaaggaaantgtggaggactgttttaaaggttgaggtgaaatcctaacattccacccaaggatgatggttcaatagctttttaaaatgactttttcaaacgtcaagcttttttgacactttctttaccacttttatgtttaatacatatctaaatgcctttaaaatacgtttatacctttttaccaacattcctttcatataacttacatacttcacgacattttttatattttttgatggttgaacccaaaatcacattttcaatctttcatgataacattaactttttcttaaaaaaatttacattatctttttttatttttttt

SEQ ID NO: 297807 - DNA, 366 bp, Zea mays
aaagcctcaatacgcaaatagcaccgccgttcataacaccatgaaaatgctcatcgtgctggtcttttacctggctcggtcggctgccaacacctctgcaatgcaaatgccctgcccctgcgcggggctgcagggcttgtacggcgctggcgccggcctgacgactatgatgggcgccggcgggctgtacccctacgcggagtacctgaggcagccgcagtgcagcccgctggcggcggcgccctactacgcccggttgtggccacacaagcgccatgtaccagccgctccggcaacagtgctgccagcagcagatgaggatgatggacgtgcagtccgtcgcgcagcagctgcagatgatgatgc

SEQ ID NO: 297808 - DNA, 461 bp, Zea mays
tcgactccacgcgtccggcaagtcaatatgcggacacctgtggggaggtttctagtacagatgcgtggcgcacagtcaaaataatacactgaaatctagacaagcaaagccaccacaacttcatacagcaatcacagctcgaccaccaagtgttaaaagttttcaggaacttgaactggaggagctggacaaggcccccaagttcaaggccaagccattaaacaaaaggattcttgagagcaagggagacattggtgtatttttccatccaaagcctcaggtcacatctcccaaagaattccatttttctaccgatgttcgcttgggccctccatcagttgctgacttatttgacaagctctctcttcactctgaatgttcttcaaacagcaacagacaagatgtgcccagacgcaccataccaaaccctttcaatctacaaacagaggaaagaggtcatt

SEQ ID NO: 297809 - DNA, 438 bp, Zea mays
acacactcgcgaactccatttcgatccggggtgaaatcaacccatcctcgtgttcctccgtctagcagcctctcaccctcatggccaagatcaagatcgggatcaatgggttcggcaggatccgaaggctggtggccagggtggccctgcagagcgaccacctcgagcttgtcgcccgggaccaccccttcattagcaccgattcattaacctacatgttcaagtatgaccactttccacgacagtgaacgcaccatgaggtcaaggtgaaggactccaagacccttctctttggtgagaaggaggttgctgtgtttggctgcaggaaccctgaggagatcccatggggttccgttggcgctgaatatgttgttgagtctactggtgttttcactgaccaagagaaggctgcagctcacttgaagggtggtgccaaga

SEQ ID NO: 297810 - DNA, 225 bp, Zea mays
  unsure (1)..(225): unsure at all n locations
accactgctacccagaagacggtttataagccgtgggcgggggactgaaagacagcatngtctgctacactcaacatcataaccagcagcactgtatctgataatgctgaaggcaaagtgctttctatccttaaccgaaagttgactggaaagtcattccttgtaccaaccgaccatgtttctgttgttgatttgactaataagcttgagaagactgcaacctat

SEQ ID NO: 297811 - DNA, 399 bp, Zea mays
  unsure (1)..(399): unsure at all n locations
gaggaagcccggagcctctagagtcgacctactcgtccgcagctactgacggcgatgtgcggcctgcagcatgtttctacatgcgcggaggcggncaccaaccgagtcccccacttaagaaactatgtgctgtagtatagccgctgactagctagctagtcgagtcatttaacgtctatgatttgataaaaaatgtgtaacgcatcactatggttggcactttcattatgagcaatgacctgaatgaacaactgaaatgaaaagaaaaaagtcttgttccaatcaattaatcatacttatttagttctaaaacttataaagtataacatcatcaaattaaatggtttttttttttttttttttttttaccgattcctgcaggcgtaccacgcgtcctta

SEQ ID NO: 297812 - DNA, 422 bp, Zea mays
aatcataggaccttaccccataaagggcctgctacttattaaaacgtatgcacgctccaactacacctcacgatcatgaatttccccatataatcaactgctacaccatgtaacctaaaggttttgtaaccaccaattttcttcgcttatcgtcaccaacaaatatttgaaactgtcgtgatcgtgatgtccaatatccatatgatctgttaaagtaagcttagtattcccggatgtaacctttaagtccaatgtactgtttgcccagcacttagaatgttaccgcatgttctatatttgaagaatataattcatttttcactgattaaaaaaaaatcatcatctaacataaatctatttcatctaatcttttatttcaacctcctttctttttttattttctataaatttattatttattt

SEQ ID NO: 297813 - DNA, 315 bp, Zea mays
  unsure (1)..(315): unsure at all n locations
atcaagtgccagcgccctctcgcagatcgtcgttttttagagcgggggcggcatgatcaagcctgacggccttcacaggggcctcattggagagatcatcacccgtttcgagaagaagggcttctacctcaatgcctttaaactttgaaacctggagagggngattgcttgaattctctacgccagatcacgcctccaagccgcgactgcagggcctcgtggactacatcatctcaggccctgtggtggccatggtccgggaggacaagagcgttggcacaactgacctaaagatcatcggcgccaccaacccgc

SEQ ID NO: 297814 - DNA, 387 bp, Zea mays
actaactgagacatcgacaatgcaggggggggctttgcaaccgctgagtgtgaacacaagccggacggcatggccaatggcctcactatcgacatcaatctccgctcgacgtactcttgcttctgcctgtcgctactttaccgtggtggagaacattagcaactaccatggcaaccgcaccacacttttatacggcgactgcatctactcttatctctttatctgataagcggccattaaccaggcggccatgaaccccaacaacaccgtcttttatgccaagcgtcttatcagcatgaggtccagtgatgcgtctgcccagagtgatatcaagctgtggcccttcaaggccataccagagccctgggagaagccaatgattgttgt

SEQ ID NO: 297815 - DNA, 314 bp, Zea mays
tcgactccacgcgtccgttgtggtctcccgcccctactaaaccgggggagtctgtggtggcgcaccggggtgaggtgaactgcctggcttttaacccgttcaacgaatgggttgttgcaactggttctactgacaagactgtcaaattattttatcttaggaagattgatacttctttgctcacctttgactgtcataaagaggtagtttttttatttttatatatttttatataatttatcttaatctcttttttttatgttttatttacatattgatttatttttttttttatttatttaagtttttatttt

SEQ ID NO: 297816 - DNA, 420 bp, Zea mays
tcgactccacgcgtccgttgaccgcagctcaggttgcctccggcggcctctcattcctttggtgcggcactcaccaccccgccccttcctccatcttcctcgggacaacctctgttctacccgtctcccttcgggccgctggcacaggtggcccacggctcgcctaccgactccggggccgccgcgtcggtgccgccgtctcccagctccccaccacccatccagaggtagtttcttgcgagaagaagatctcaaatgtcattaaggcctgtgcggactttgcgatggcagagctggaggccccgaagatgaggtaccctacgacaggcacttatgggctcctcatgggcattctagttcaaggaactagtgctgcatcaaaacttctgcgggctaattgaattacacttttcaaagtgc

SEQ ID NO: 297817 - DNA, 209 bp, Zea mays
tttgaggcgcatcatacgacgcgttcgggcagccaggttacctgccggtgatcctgttccttccagcctttgaagtcctttaaaagattgcctaacttttcctccccgaatgccttttggtcacttcaatgaaggaccggattaaccctatcccataccagtacgttattgctcgacaagggaatgagaagattgatagtattctaggc

SEQ ID NO: 297818 - DNA, 258 bp, Zea mays
atcccactggaaatgaacccatccgcgcgtcctccgtctagcaaagtctcaccctcatggccaagatcaagatcgggatcaatgggttcggctggatcggacggctggtggccagggtggccctacacagcgactacgcttagctcgtctccgtatacgacccctgcatgagcaccgattacatgacctacatgttcaagtatgacactgcgcacggacagcggaagcaccatgaggtcaaggtgaacgactccaaga

SEQ ID NO: 297819 - DNA, 320 bp, Zea mays
ccgtcatcgatctcgtttcaaatccatcgatcgtcgtttcctccgtcccgcagcatctcaaccccatggccaagatcaagatcgggatcaatgggttcggcaggatcggaaggctggtggccagggtggccctgcatagtgacgatgtcgagctcgtcgccgtgaacgaccccttcatcagcaccgactacatgacctacatgttcaagtacgacaactgtgcacggaccggtgtaagcaccatgaagtcaaggtgaaggactccaaaacccttctctttggtgagaaggagggtgctgggtttggctgcaagaaccctg

SEQ ID NO: 297820 - DNA, 204 bp, Zea mays
  unsure (1)..(204): unsure at all n locations
tagtcactcactcgtccgttagttagcgccaccaccggccggaagaagagttctacacgatgctgcgagtggcggntagaatgctctcgtcttccctctcctagtcgccacgccgcggcggtagccagtggttccaaagccttcgctggctttaattaaaatttgcgacctctccttagctaaagtgggtcttgatctattttt

SEQ ID NO: 297821 - DNA, 365 bp, Zea mays
ttagatacccttattatctcacataatgggctagtggagactacccggactgtacagacttggcctaccataatgcaattgatgatggtgcagacatcattgactgtcctattcaagtgacaaatgatggagttcttatgtgcatgagttccactaacctgcttgacactacgaatgttcagagaacaacttacaactctctggtttctgttgttccagatattcagcctcaaccaggaatcctcacattcaacctcacttggtccgacattaacagtaatgttttaaaacctaaaatatcttctccagagagaggttatttccttgttaggaacccaagatacacatatcaagggaagtttttg

SEQ ID NO: 297822 - DNA, 221 bp, Zea mays
tcgtctccacgcgtccgattcctcccaacaccacctctcctgcaatgaccgtttcctacatcgcgtggagcatccatcatgtctgcctactgcggaaagtacatggtttagctcatcaagaatgctgcctacattggcaccccctacaaggttatccttgccgctgattactacaccgccaccatcctcaagctcctcttcagcctccttttcgtgaactt

SEQ ID NO: 297823 - DNA, 423 bp, Zea mays
actcgaattcattccacccccgtctgctagaatcggactgaccaccgggcgagcatcggtgcggatcgcgtcagcagccatggtgaaagcctaccccacggtgaacgaggactacctcaaggcggtcgacaaggccaagcgtaagctccgcggcctcatcgccgagaagaattgcgccccgctcatgctccgcctcgcatggcactccgcgggcaccttcgatgtgtccaccaaatccgggggcccctttcgcaccatgtataacccctccgtgcaggcgcactggatccaccgccggactgtaaattgccatcaggctgctagtgcccatcatggtgcagttccccattctattctactcttacttcttccttcttgctttagtcgtttccattctagttactgtcttatcttttttttttt

SEQ ID NO: 297824 - DNA, 403 bp, Zea mays
  unsure (1)..(403): unsure at all n locations
ttaaaggcgacccaagccttccggccaaggcggttgctgccggcgctcgccataggcgtcgtggccgccgcgctcgcgtgcggcgcggccccgcagctctcggcggggttctactcgtcgagctgccccgccgtgcacagcatcgtgcgccaggccatgtcgcaagccggcacgaacaacacgcgcagcgccgncgncgtgctccgcgtcttcttccacgactgcttcgtcaatggctgcgacgcgtcgctgctgctggacgacacgcccacgacgcccggcgagaagggcgccggccccaacgccggcggctccaccgtcggcttcgacctcatcgacaccatcaaggcgcaggtcgaggccgnctgccccgccaccgtcttctgcgccgacatcctggcgc

SEQ ID NO: 297825 - DNA, 411 bp, Zea mays
  unsure (1)..(411): unsure at all n locations
ttaaaggccacccaagccttccgccgtatttgatctcgtttcaaatccatccatcctggtttcctccgtcccgcagcatctcaaccccatggccaagatcaagatcgggatcaatgggttcggcaggatcggaaggctggtggccagggtggccctgcagagtgacgatgtcgagctcgtcgccgtgaacgaccccttcatcagcaccgactacatgacctacatgttcaagtacgacactgtgcacggacagtggaagcaccatgaagtcaaggtgaaggactccaaaaccccttctctttggtgagaaaggaggttgctgtgtttggctgcaggaacccctgaggagatccccgtgnggttcgggtggtgctgaaatatgttgttgagtcttactggtgttttcactga

SEQ ID NO: 297826 - DNA, 335 bp, Zea mays
gctggaagcgcgacacactgagggacctggatgagacccttgccattacgcagagtgtaatctttgtcaacaccctccatcaggaggactggctcactgacgggatgacgaccgagtaccacacactctctgagactcatggtgacatggaccaaatcactaaagacatcatcacgagggaggatgggcctggctatatcggtatgctcatcactactgacctgcctgctactggtatggatgtgcacccagtgttcctggacattaactatgatcttgccaccgatccctagaactgcctggatcgtattgctcgacttggaacttatgggcgg

SEQ ID NO: 297827 - DNA, 379 bp, Zea mays
caagatcgaggctgaactgagcaatatcttgccacgatattccgtgatgagggactgcaaattatgaaaactgaactgtaagacggcatcaacagagctttaccgagaggaaaatgtgtacatggcagaagctcgccgaacaagcgaagaggtacgaggagatggatgagttcatgtaaaaggtaaccaatactgtatactggtaggaactaactgtggaggagcgaaacctcctgtactgagcatacaagaacgtgattggagcccgacgcgcctcatggcgcataatatactccatagagcagaaagaagaaggccgaagcaatgaggaccgagtaacactcatcaaggattatcgtggcaagactgagactgagct

SEQ ID NO: 297828 - DNA, 420 bp, Zea mays
  unsure (1)..(420): unsure at all n locations
gcgaaccaagccttccggaaaattttcccaaaccctaacctcccgacggggatggcaaaccttccagtttttttgaaaatgaccgacggcggcgccccgcagggccgtatcgtgatggagctgtacgccaacgaggtgcccaagaccgtggagaacttgcgagcgctgtgcacggactagaagggcgtgggcaagtccgggaagccgttccactacaagggctccatcttccaccgcgtcatccccgagttcatgtgccagggctgatactacaccctcgagaacagcaccggcggacagtccatgtacggcgagaagtttcgcgacgagaagttcgngcgcaagcactccgaccccggagtgctctggatggccaacgccgggcccaacatcaacggctaccaggtattcatctgcacc

SEQ ID NO: 297829 - DNA, 367 bp, Zea mays
ttaaagtcgacccaagccttccgttaaattgtgagcggccgccctaagttttggggaataactttttcacgtatcagctaactttgaaataaattgagttactgtgtggcaatcaatacacactcggagattcttcatcacacgaatttttgttccagcaggcgtgcttatatatccaaacactatagcacgtttctcactgtgaccacataacacatatgactggtgctcttcttcaatatcctggaaaacatcctctgtattgggtacatggccttcgcgtgccatctgctctgagaaagcattcagtgcatcaataatcctgtcataccaagggtgggacctatcatgagctacaaagacatgc

SEQ ID NO: 297830 - DNA, 388 bp, Zea mays
gaagaatgcctgagcaggtttcttcaaaacaggaggttgttgatgctcttgttaaaggacaattttctatggacgttgcacggtgggtggctacaaatctacgtcgaaccagtccattgggtcagcgaccatcttcaagcttctcatggacttttgatctaaatggcatctctgagatgtacaagtcttatgaggatactaacttatggaggattgtagagaatgtaccaaggggtgttcatattaattttctaaaagctgaacgaagtttgcatagatgggctctcgaagacctccaaagaatttatactgcggaggaattagctgcagatgaggggtggaggagttgaattcacgtgcttgaagatgcttgacaactgggtccatg

SEQ ID NO: 297831 - DNA, 380 bp, Zea mays
gtttattgtttctcccaaataccgccgccggtccattccgtaacgcgacaccatgagggagtgcatttcgatccacatctgccaggccggtatccaggtcggaaacgcgtgctgggagctgtactgacttgagcatggcattcatgctgacggccagatgcacggtgacaagaccattgggggaggtgatgatgcttacaacaccttcttcagtgagactggtgctggcaagcacgtgccccgtgctgattatgtagaccttgaacccactgtcatcgacgaggtgagaactggcacctagcgacagctctgccaccctgagcagttcatcagtgggaaggaggatgcagccaacaactttgcctcggggcactacacca

SEQ ID NO: 297832 - DNA, 363 bp, Zea mays
ggctgaatggcggcttctggtgagggcgcgtaactcccgactacgacgggcggcgaggatgcccaccgaccgagattgagctatttatacaagccaccgatcgtaaactactactacagccaaggatacccgatgaagcccgaactgatacaaatggatcactcaatagtcgtctaatacgaccttcagcgactacataagctctaacgatcgtacccgaactctgaggcctacattcgacgattacactccgacgactacgtctcctttgttgcgtacgccaccggaaacgcaggtgtgctcgacccacgcgccaataaccactttaacgtccgtgaggactgcaccatgttcgacggactc

SEQ ID NO: 297833 - DNA, 408 bp, Zea mays
gcagtccccaactacccccagcctcggaaggaaccttccagaagcgcaagactgtaaaggccgtcgccttcccattcttcctcgccgcgggggtcgcctgagatcacataaacaatggtgaaggctgttgctgtgcttggtagcagcgatggtgtcaagggcaccatctttttcacccaagagggagatggaccacactacaatcctgcgagcaaggagcatggggcaccagaagatgagaaccgccatgctggtgatcttggaaacgtgacagctggagcagatggtgttgctaatatcaatgtcaccgacagccagatcccactgactgggccaaactcaatcattggcagagctgttgttgttcacgctgatcctgatgatcttggaaagggtgggcacgagctc

SEQ ID NO: 297834 - DNA, 376 bp, Zea mays
ccaatttgacctcccacgcgtcctttttattgtgtagatgatgatccttcatgtgtgttcatcactgtcaacgaaacttgtgaattggctaacatcaattcctgcgaacgcagtgacggcaagcacactaacaactcaaaggtggctactgatccagcttgtcttgagattcctcaccacacctttgcgctataccaggaccctgtgcatgaatctcaggggcacgatcatgccatcttggatatttcatggtcaaaaaaatatagaattgctttctgggtctaaagacaaaactgttcgattatggaaagatcggtgcgatagctgtcataaggtttctcttgataataactatgtgacatgtgtacgagctaaa

SEQ ID NO: 297835 - DNA, 401 bp, Zea mays
tcctttaaagtcgaccaacccgtccgctggtttttcctacggctattaccaattcctgtttgggttagggttacttagggttttgtggaggggccatggcagcggctgacgtggagtaccggcgcttggtcagcgggcttgcctgagccaccaccaactagtcgctggaaaatgccttcggctcctacggcgagatcctcgactacaaggtcatcaccgaccggaagaccgggaggggtacctacttcaggttgtataccttgtactacaagaactccatgctcgacgctatcctgaacatgaaccgcctggagctcgacggccaggacatcaccgttaacgcaggtccagagatgtgcctgcgaagctgctgtggtagctactgtagatgtcgcggctgc

SEQ ID NO: 297836 - DNA, 392 bp, Zea mays
gcggcgtggcggtcggcgtggcgctgcacgccgtgacgcacctcacgtgcgacttcccgcgtctgctgcacgccagcgccgccgcgtacgagcccatgaaggcgtacttcggccagcgccggatccccaactactggtggttcctcaggggcgtggaggggatcaccggcgtcatcatggtcgtgctcatggccgtcgcctacacgctggcgcacccgtggttccgccgggggaagctcagcgagggcaacccgctgcgccggctcagcggcttcaacatgttctggtactcgcaccacctcttcgtcattgtctacgtcgccttcatcgtccacggcgtctgcctctacatcaacaggacgtggtacaagcagacgacatggatgtacctc

SEQ ID NO: 297837 - DNA, 322 bp, Zea mays
gcgttccacactccgctgctccgccatggcgaaccgctccaaggtctggatcgcgctgctgctcgcgctgaccgaagctctctccgcccggacggaagatgaacccgccaccgcggcagaaggcgaggccgtgctaaccttggacgtaaacaggttaaactaggacgctaccacacacagcttaatagtagctgagttcaacaccacatcgtgtggccactgcaagaaacttgctacatagtatgagactgcggtcaaggcacttatcacgcatgaccgaacgatagctctggctaaggtcgatgctaacgagaagaagaac

SEQ ID NO: 297838 - DNA, 267 bp, Zea mays
gcctttcccagcagctattgtggtcgtgcgtcagccgcgtggcaccgtatcgcattctacgattcgaagctctctgtgctcgcagccatggcgaagaattacccaaccgtgagcgcccagtacagcgaggccgtagagaaggccaggcgcaagctccgtgccctcattgacgaaaagagctgtgcgcccctcatgcttcgacttgagtggcactccgcggggacgttcgacgtgtcgtcgaggatcggcggtcccttcggtcctatg

SEQ ID NO: 297839 - DNA, 290 bp, Zea mays
gccgtcgacaacgctgtgtaccgtgcgagagcccaagcaccagcgcggtggccgatgcagaggcggaggctaccatggctgacggaaagaacacgaggatctccaacggaaagaagggtggcaagaaaaagaccgagcaccctatctctaagaaggattggaatgacatcaaggcactgtaggtgttcaatgtgcgcaacatcaggacgactcatcgatgcactacacaaggaaccaggattgattatgagggtgtgaatcacagagactttgacgattgactagctgat

SEQ ID NO: 297840 - DNA, 397 bp, Zea mays
gtgttcattgcgggaaaatggtggcgggggcagcacttgcagaaagaccaaggaccataagcttctatagcttcctttcttaccgcatacctgtgaccagcggtgtctgcagtatgtgaaaacccaattcttacaaccctacgggatccaacaggcaatcgcatgcacgcatcttacctttatcacccttggtactacaacaaccgctagccctattacagcaggtacctttggtgcatttgttggcacaaaacataaaggcacaacaactacaacaacttgtgctaggaaaccttgctgcctactatcagcaacagcagtttcttccattcaaccaactggctgcattgaactctgctgcttatttgcaacaacaactaccatgcagtgagctagc

SEQ ID NO: 297841 - DNA, 373 bp, Zea mays
gcgtgacgagcgtgaggaggcgggtgtcgtactgaatcgaaaaggcgtaaactcagtctctcgagtttcctcggaccggaagccatggctgccaatgaagcgaaaggcttgctcgccgcgaaaactacagcagccaaatccgaccacaaggacaaggtgaataaggtcccaatctcacgctcctacggcgcccgactacagttacctgttcggcgtatccaccgtcagctgaaacaacagactcatgcaaatgctcgcgttcgagctacctgaaccgtctactgagctcccattctctaatacttgactgccgacgttctggaacttgctgcgaacgctagtaaggatctgaaagtgaagcgtatcactcctc

SEQ ID NO: 297842 - DNA, 361 bp, Zea mays
tcttttaaagtcaaccaatccttccgcgatttttgcgagcgaaaaagaaaccaaatggggccacccatagagaaagaggctaaatgggaggcgcgagtgtcgtcatggcttccattgtcgctatcacaagggccgatcctatacttcaatctatgcagaaattcatcttagatagcttcgctatacgtactgactgcggcctcaggcctgtggcaagctccaacggtctactcagatacaacaccggcgctacgctctgacaatactaggaggccgtgtcgcaagactgatatcaatacacgagtacaataggcgggacgagcggccgtaactactctgcgcgcactctgtactcagatat

SEQ ID NO: 297843 - DNA, 292 bp, Zea mays
ggtggagcacgtaaaggtggacgacaggtgggagcacagcatctacaaactgatggtgagctcggagctggcattctgtgcacacaagataggttgggacgctggaccgccagtgcgagcgccttgccagtgtcatggccaataacatggcgaccagtgacatcagtgtgatcactaacgcggatgggaggaagagcatgctgaagctggccaagaggatgatgatgagcttctgaagcggagtgactgcatgtgcgacgcaccaaacgactacactgaccagcacaggctc

SEQ ID NO: 297844 - DNA, 389 bp, Zea mays
atcttcttgtcccgctaggattatatccgagccttcccgcaaaacctcagagcggagacgagcgcacgatgttcggtttcgggcaccacggtcaccacggccagaacccgtcggtgcacggacgagtgcaccaacccaccttataagatcttctgcaaggccgacgaggggtactgtcttaccgtgcgggacggaaacgtggtgctggcccccgacaccctgtcgacgagcaccagcactgttacaaggacatgcactttaacactcacgtcaaggacgaggagggcaaccctgcattcgctctggtcatcaaggccactgggctcgacatcaatcactacctcggcctagaccacccggggaatgtggtgccgatcaatccggaatac

SEQ ID NO: 297845 - DNA, 399 bp, Zea mays
gggatttgtttcctctaccttcatctacatatgctccaatccccctcaatccacccctaaccgaacaagccttaagtggtacattaatcctgatgttcctgaagcaggtgccctcatggctagtgcgacgaaagcacatagtcccattaagtggaacgaagttctatcttcgaatcagcctatgtctcatgttcctgaggaacagaaaatcgcttatatcagagatctgcacccatttgagaataaggatagggaattcttggtgacagtcactgtaaaaagattggtgataggtggtggtacaatgcatgcaaaaaatgcacccgcacagctgtggctcatggggattcctacaagtgcagcgatcaagtttgcgctaacattggcacgcctagccag

SEQ ID NO: 297846 - DNA, 143 bp, Zea mays
cggcatgggctggaagggcctgtgcaagggcggagcgaagcgccaccggaaggtgctccgcgacaacatacagtggatcacgatgccggcgatacgactgctggcgcgcagggtctgtgtgaatcgcatcgtacagctcatct

SEQ ID NO: 297847 - DNA, 406 bp, Zea mays
ctcgtctgctcgcatttcctcccaatccagcccgcctccaaacccgaactccaagtcgccccgcatcgatggcgcccaaggccgagaagaagcccgcggcgaagaagccggcggaggaggagcccgctgccgagaaggcgccggccgggaagaagcccaaggcggagaagcgtgtcccagcaggcaagtccgccggcaaggagggcggcgagggaaagaggggccggaagaagggcaagaagagcgtggagacctacaagatctacatcttcaaggtgctgaagcaggtgcacccggacatcggcatctcctctaaggccatgtccatcatgaactccttcatcaacgacatcttcgagaagctcgccgccgaggccgccaagctcgcgcggtacaacaagaagcc

SEQ ID NO: 297848 - DNA, 369 bp, Zea mays
tctgacggcactatttgttggccatccaattcgaacggtttctggttgtctgaattggtttgaacaaaattgcagaggttggtagagcgagcgagaagaaggcaatggcggcggagagcttcctgttcacctcggagtccgtgaacgaggggcacccagacaagctgtgcgaccaggtgtcggacgcggtgctggacgcctgcctggcgcaggaccccgacagcaaggtggcctgcgagacctgcaccaagacgaacatggtgatggtgttcggcgagatcaccaccaaggcgagcgtggactacgagaagatcgtgcgcgacacctggcgcgagatcgggttcacctccgaacacgtggggctcgacg

SEQ ID NO: 297849 - DNA, 383 bp, Zea mays
  unsure (1)..(383): unsure at all n locations
agcccccaaaccccaatcaccctccggagcgtcgcagcgatcccacccctccttctccccttcacccatccatggcggagcgcggcggcgagcgtggcggcgagcgcggcgggtttggtcgtggcttcgggcgtggcgggcgcggcgaccgtggcgggcgccgaggcggccgtcgcggcccgcgtcaggaggaagagaagtgggtccccgttacgaagctcggccgcctcgtcaaggagaacaggatcaccaagatcgaggagatctacctccactcgctccccgtcaaggagcaccagatcgtcgagaccctcgtgccggggctcaaggacgaggtgatgaagatcacgcncgttcagaagcagacccgcgccggacagcgc

SEQ ID NO: 297850 - DNA, 339 bp, Zea mays
ctagccttctacccttcatccacccggcgagcttcgagcactcatgtgccgagcctgctgaggctcatgagagatgtcacgcttctgtcgatccggcccgtcttctacgatccgctacacgtactgactactcgtgctctacatgacgttgcgtacatctgctgatgacctcttgcctctcttatacacgtacagatagattgtcgacatctacataccaagggaccgccggactggtgactcgcgcggattcgcgttcgtgaggtacaagtacaaagacgaggcacataacgcagttgtaaggctcagatggagattggtagacgggagggagatcat

SEQ ID NO: 297851 - DNA, 311 bp, Zea mays
gtcgaagcgaggtaggggaggttcggctgggaacaagttccgcatgtcactgggtctaccggtggcggccacggtgaactgcgcggacaacacgggcgccaagaacctctacatcatctccgtcaagggcatcaagggccgcctcaaccgcctcccgtccgcctgtgtcggcgacatggtcatggccaccgtaaagaagggaaagcccgacctcaggaagaaagtgatgcccgccgtcatcgtccgccagcgcaagccgtggcgtcgcaaggacggtgtctacatgtacttcgaagataatgctggagtga

SEQ ID NO: 297852 - DNA, 432 bp, Zea mays
cttaaaatccgacccacccttccgccgtcttttatctcgtttcaaatccatccatgcgcgtttcctccgtcccgcagcatctcaaccccatggccaagatcaagatcgggatcaatgggttcggcaggatcggaaggctggtggccagggtggccctgcagagtgacgatgtcgagctcgtcgccgtgaacgaccccttcatcagcaccgactacatgacctacatgttcaagtacgacactgtgcacggacagtggaagcaccatgaagtcaaggtgaaggactccaaaacccttctctttggtgagaaggaggttgctgtgtttggctgcaggaaccctgaggagatcccgtggggttcggttggtgctgaatatgttgttgagtctactggtgttttcactgaccaggagaaggctgcagctcatttga

SEQ ID NO: 297853 - DNA, 308 bp, Zea mays
  unsure (1)..(308): unsure at all n locations
gcgcggcgttaatatctcccctcccttccctcttctggtctccgccccgctccttgcctccgatccccaattcctccttcggatctcgcattcagcgcagcgcangtgtgaaggaagggggacgcggaggaagatggggctcgcgttcgggaagctcttcagccggctcttcgccaagaaagagatgcggatcctcatggtcggcctcgacgccgccggtaaaaccaccatcctctacaagctcaagcctcgcgatgatcgtcaccaccatccccaccatcggtttcaatgtttgaaactgttgagta

SEQ ID NO: 297854 - DNA, 447 bp, Zea mays
tgggatcctttagagtcgacccacccgtccgtttaatttccccagcaatccctagaaaaagcgggcgatcctcattcgctcgagggcccggacgaagcaaacgcggaggagttcctccggcggcatggtgccgaggaagcatttgccaactaaggcggcccgcatgtctgcccctgcgaccggcggagttaaaaagccccaccgttttagcctcgataccgtcgcgctccgggagatcctgaggtaccaaaagagcccggagctgctgatccgcatgctgccgatccagcgcctgttgcgggagatcgcgcatgacttcaagaccgacctacgctttcagagctccgctgtctccgcgctgcacgaggcggctgaagcctacactggcggtctatacgaggacaccaacctgtgcgtcattcacgccaagcgcgttaccatcatgcc

SEQ ID NO: 297855 - DNA, 431 bp, Zea mays
  unsure (1)..(431): unsure at all n locations
accctggaaccctataaagtcaacccacccttccgttcgttttaaatccatccatcctggtttccgcgggcccgcagcatctcaaccccatggccaagatcaagatcgggatcaatgggttcggcaggatcggaaggctggtggccagggtggccctgcaaagtgacgatgtcaagctcgtcgccgtgaacgaccccttcatcagcaccgactacatgacctacatgttcaagtacgacactgtgcacggacagtggaagcaccatgaagtcaaggtgaaggactccaaaacccttctctttggtgagaaggaggttgctgtgtttggctgcaggaaccctgaggagatcccgtggggttcggttggtgctgaatatgtngttgagtctactggtgttttcactgaccaggagaaggctgcagctcacttg

SEQ ID NO: 297856 - DNA, 236 bp, Zea mays
  unsure (1)..(236): unsure at all n locations
aacatattttccggctaccaagttttatccaaaaatagagggactagtttttatatggtcgtttcaaattatatatagcctgtttgttcaatctaaatattttcctgtcgtttcatggctactagaatagatgctggacgcatatacatctaggatagtcagatatgtaaatcgttaaagcttgtgctagtctaatctngatctgtggtccttttagtcatgatgttatgccgata

SEQ ID NO: 297857 - DNA, 384 bp, Zea mays
gcggttgtctcaaccgcaggcgagctcggatcatgtcacccgtggatccacgcaaccatgtgtaggaggaagaccagcgagcccaaggaggagaacgttacccttgaacccattgtatgtgaaggacagtttgactttagggttgctcatatctgtgtatacatcaatgacaccttcattcatgtcactgatatttatgggagggaaacttacgtacgcatcactggaggcatgaacgtttacgctgatcgtgatgagtcgtcttcttatgctgctatgcttgctgctcaagatgttgcatcatgatgcaaagagcttggtatcaccgatctgcacattaatcttcttgctaatggaggcagcaagaccaataccgatggacct

SEQ ID NO: 297858 - DNA, 367 bp, Zea mays
tcgttccatgcgtccgttagttaactagaaaaggctcctccgggccggatcgcccctcatctccctcgaccccgacatccccgacccgatggcgcccaaggcggagaagaagccagcggagaagaagccggcggccgaggagaaggcggagaagactaccgcagggaagaagcccaaggccgagaagcggctgcccgcgtccaagtcctacggcaaggagggcggcgagaagaacgggaagaagaacgccaagaagagcgtggagacctacaagatctacatcttcaaggtgctgaagcaggtgcacccctacatcggcatatcctccaaggccatgttcatcatgaacttcttcaataacgacatc

SEQ ID NO: 297859 - DNA, 405 bp, Zea mays
  unsure (1)..(405): unsure at all n locations
ggcggcggnggncttcgaggcggacggttccgtaattcggcacaagagtaacaaggctttcgtcagcgtgcttacggcgtttttgacctcaaataaatttgccaaggttaagaagccaggcaagggtggtaatcgattttggaagagcattgtccttggtttcaagactcttagggaagcaattgaagggacctacattgacaagaaatgttcattcactggaaaccgttctatcagaggcagaattattgttggaacatgccacagtgctaagatgaacagaaccatcattgttcgcaggaactatctccactttgttaagaaataccagaagtatgaaaagaggcaattcaacattccaactcacattttcccatgcttccgtgtgaaggaaggtgattattt

SEQ ID NO: 297860 - DNA, 376 bp, Zea mays
taagacaatcacccttgaagtggagtgttcgcacaccattgataatgtcaaggctaaaatccaggacaaggagggcatccctcctgaccagcagcggcttatcttcgccggcaagcagcttgaggacggacacacacttgctgactacaacatccagaaggagtcaaccctccacttggtgctgcgccttaagggaggcatgcagatctttgtcaagaccttgactggcaagacaatcacccttgaagtggagtcctcaaacaccattgacaatgtcaaggcaaaaatccaagacaaggaaggcatgccacctgaccagcaacgtatcatctttgccggcaagcaattggatgatgggaggacccttgctgactac

SEQ ID NO: 297861 - DNA, 330 bp, Zea mays
  unsure (1)..(330): unsure at all n locations
gcaccgcgcaggcgctggccacgcggcggggggtcggggacgtgcttgtcacggaggcccgcgcccgccccggcggcaacattaccaccgtcgagcgccccgacgaagggtacctctgggaggagggtcccaacagcttccagccctccgaccccgttctcaccatggccgtacgctcctcgctggcgccgcagcgtcttcttctcagactcatgcggagccatggaattgagatgctgaatggattttatgcgcgcgcgcangtggacagcggactgaaggatgacttggtttttggggacccaaacgcgccgcgtttcgtgctgtggg

SEQ ID NO: 297862 - DNA, 368 bp, Zea mays
tcgagcgacatcaccctcaaggactccaagagtgttgttttatgccagaagccggtcaccgtctctggcatcaggaaccccaaggagatcccgtggggtgaggctggtgctgagtatgtccaggagtccaccggtgtgttcactgacaaggacaaggctgctgcacatctgaagggtggtgccaagaacgttgttatctctgccctaagccaagatgcacccatgtttgttgtcggtgttaatgaggacaaatacacatgctctgttaacattctttccaaagctagctgcactacaaactgacttgcttcccttgctaaggtcattcatgacaacttaggcattatttagggcttgataacaactgt

SEQ ID NO: 297863 - DNA, 258 bp, Zea mays
  unsure (1)..(258): unsure at all n locations
ttaagagcataatgcatgaggagggcgtctgtccaccttcacctcatcctcgcanccttcttccttctctccgtactcacggctgccagctccatcatcgggacctactgcgtgccaaattggtccattccgcacaacccgctccctaccttcctctacttcattacccgcctgacctttttcatcatgccgcgcctccccctccccaatctcaataggagatactgcctccatctcccccacatcctcttttactaa

SEQ ID NO: 297864 - DNA, 340 bp, Zea mays
gtggattcttcatccgtggtcatgcctggactatggatacaatttcttttgcagtgcatttctggtcaaaaggagaggcacaagctatgtttctgcgccatgagggctttctaggagctcttggtgcatttatgagttatgagaagcatggtcttgatgacttaagggtacatcatttggttgaacgcttcccaatgggtgctccatatgttggtggaaagattcacgggccacctcttggagatctcaatgagaagatatcatggatggagaagtttgtgcaaaagggtactcagattatagcccctgtacctatgggagttccagctacgacaggtat

SEQ ID NO: 297865 - DNA, 287 bp, Zea mays
tcgaagacaattaccctttacgctgagtctgcagacaccattcataatggcaatgctaatatacaggacaaggagggtatccctcctaaccagcagggggttatctatgccgccctgcatcttgaggacggacacacactcgctgactacaacatacaaaaggagtcaaccctacaattgcttctccgccttaggggaggcatccagatatttgtcaaaacctagactggaaaaacaatcacccttgaggaggattcctcagacaccattgacaatgtcaaggcaaa

SEQ ID NO: 297866 - DNA, 369 bp, Zea mays
  unsure (1)..(369): unsure at all n locations
caaaatcgcagcgcgcgaaaacgcatgagcaacccgtccactcgccaccaccggccgcgcgcacggcggcgaccgatggccccgctcgtgccgatgtcgcanccatgggtggagaaatacctgccgatgcaagtcaaggatgtggctcaccatgaggaggtgattcgcgtgctcaccaacaccctacataccgccgacctggcgtacatgctattctacggcccggcggggacgggaaagaccaccaccgcactagccatcgcctaccagctctatggtgcagagctgtataagtcaatggttttggagctcaatgctagtgatgatcgtggaattaatgtggtgaggacgaaaatcaagaactttgct

SEQ ID NO: 297867 - DNA, 381 bp, Zea mays
cggacgcgtgggcggacgcgtgggcggacgcgtgggctcactacccagtacccaccagtccaccacccacccagcaccactgttacatcgtgtgctccgaatgcgacgatggcggcgagctccaccagcgcgcccacgatgccggcgacggtcacgcctctgccgggctacggctaccagggctctgccgcgggcgcgggcgcgggcggcgagcctctgtacagctcctcggggtcgtcgtccatgggcaccttcttcggggtgctcgtcgcggtcgtggtgctcaccctgctgtcctgcgtcttcggccgggtgtgcgcgggccacgccgaggggcccgacgagcggtacgactgcacgaggctggccccgcggtggtgg

SEQ ID NO: 297868 - DNA, 372 bp, Zea mays
ctgctgaccggaccatctctgaaacggtggcaggaagagggggccccaagaagagcaggcggtcggcgctggtgggctggttcggggagaaggacgtgaaggcggagcgggtggtgtacaccgccgacttcaccgtcgacgggtccttcggcgagccgggcgcggtcgccgtgctcaaccggcaccagcgcgagttcttcgtcgagagcatcgtggtggagggctttccctccggccccgcgcacttcacctgcaactcgtgggtgcagcccacgcgcgtgcaccgcgacccgcgcgtgttcttcaccaacaagccgtacctgccggcgcagacgccgccggggctgcgggagctccgccgcctggagctca

SEQ ID NO: 297869 - DNA, 142 bp, Zea mays
taaggcttcattttgggctgatcccagcgatttccaagacatatttgacgtggactacttcatagcgtcgctgagagacgaggtccggatcctgaggcagctgccgccgaggctcaagagaagagtggagaatggatccctt

SEQ ID NO: 297870 - DNA, 348 bp, Zea mays
atatctcctcgcattttacttgcaaccgattgcctatccccctcccaaccaaagaccgatggcgcccaaggccgagaagaagcccgcggcgaagaatccggtggaggaggagcccgcggccgagaagacgaccgccgggaagaagcccatggcggagaagcgggtacccgctggcaagtccgccggcaaggagggctgcgagggcaagcgtggcaagaagaagggcaagaagagcgtggagacgtacaagatctacatcttcaaggtgctgaagcaggtgcacccggacattggcatctcctccaaggccatgtccatcatgaactacttgatcaacgacatcttcga

SEQ ID NO: 297871 - DNA, 324 bp, Zea mays
gaaggcttcaatgccataaccactgctttggttaaacatgccacgaacagacccattatcggggggcctttcttgatgcagcctgcacgcctgctccagttcatatagatttctatgcccgataagccttacaggctttacatgacaccagcctgcctcatgtagtacaccggagctaaggaccatccctcgcgcgcttttgtcatagacacccagtgcttgatgctaactgatatctcccagaactgacagcgtgcgtgcctgtatcacatctatgagaacatatgcaaggtcatctaacttgtgaagcacctgaaagacaac

SEQ ID NO: 297872 - DNA, 382 bp, Zea mays
gcgagcagccgccgccgggcaagaaggcgggcggcgggggcggcggcagcgatagcggcggcggtggcagcacgagcaagtcgcgcgccattggcaagatgttcttcaagaccaagctctgctgcaagttccgggccgggacctgtccctacgtcaccaactgcaacttcgcgcatggcatggaggagctccggaagccaccgcccaactggcaggagatcgtggccgcccacgaggaggccacggagcagcgggaggagcaccagatccccatcatgacatctggaagtgttgtagctggagacggcggcggtggcagtggtggcggctcgcaagggggcagggcattcaagggccgtcactgcaagaagttctacactga

SEQ ID NO: 297873 - DNA, 318 bp, Zea mays
tttgcttacacggtctacctctttctgtcagtaatacaatgagagtgtggcaaccagtgtgacacaaggagaaatggcgaacgtagcgcatgggagcgatgcacctgcggcggcctgcgaggtggaggacaacatggcggaataagtgcttgccaagaacaccctcaagatcatgcccttcaagctcccgcacgtcagcctttatgatgtcctcgtgcgcatgatcgcagtggagatctgcggtagcgatgtgcactacctaacggagatgcgcatcgcgcacttcacagtgaaggaaccgatggtgatcgggcacga

SEQ ID NO: 297874 - DNA, 399 bp, Zea mays
ccgaattgctttaattatccgagcccttttattttctctatatattttacacacagagtgtacgtactagcacataatagcatctcataccaaacgcattgagccattgacgcgttgacttcgcaccgccaccaatttgcatcaccatcatcagcccccgtacttagccttggagtcctgccacagctgctgcacggtcttgcccaggatctgggcgaagaagtcgtcggtgtagccgtccttcatcttggcgttgagcagcgcgacgaagcccggcttgagcgagtcgcagtagtccaggaacctcgccgtgacgtcgtacccctggtcccaccggtccccctgccccggctgcacccagtggcccggcgcgtaccccgccttcagccggacgtagtc

SEQ ID NO: 297875 - DNA, 296 bp, Zea mays
aaaaccaccatgtaattgtttgggaagaaaaaccttgattgtttttactcgcacatgggaaaaacaattcgacccaaaaaaaaaatttaaaatccaccaaatgcaaaaacttgacaaaactttccgaaaacatggccaccatggatcgggggcagtttaggccacccagattgcttgttttgaaaaaagaaaattaagcaaaagttcttgcttacccgagggcgaaaacaaaaaggttccaccccacccaaaaaaaaacaaccacggggactttctatacgaggaccaagtaagca

SEQ ID NO: 297876 - DNA, 299 bp, Zea mays
cgcgaggcgaaccaaaccaacccactctccccaatcccgcgcgcccaggccgccagccctaccaaccatcggcgtcggcaatggcggacatggcgaccaatgccgccgcgggcaccgtgtcgctggacctcgccgcgccgtcgcgccggcatgatggaacaaggtctgggcggctggacttccggtccgtccctcatggtctgcgggctgctgggcgcaccgtgatcgacgaggccactgatgatgccacagatgatgacgcctaacatgatgtcaccattgatgatgtcgagcatgat

SEQ ID NO: 297877 - DNA, 366 bp, Zea mays
cttccttagcttggattcttttaaagtgaaccaacgcgtccgcttttcttaattttggccgccgccgtttcccttgcgccccgagccaaaatgaatgttgaaaagctcaaaaagatggcaggtgctgtgcgcactggggggaagggtagcatgcgcaggaagaagaaggcagtccacaagactacgaccacagatgataaaaggcttcagagcaccctgaaaagaataggagtgaacaccattcctggtattgaagaggtcaacatctttaaggatgatgttgttattcagtttgtgaatcctaaagtgcaagcttcaattggtgctaatacatgggtggtcagtggaactccacagacaaagaag

SEQ ID NO: 297878 - DNA, 341 bp, Zea mays
accttagcttggaatcttttaaagtcaaccaacccttccggaaatggcggtaacaatcacgtgggtgaaggcgaggcagatcttcgacagccgcgggaaccccaccgtcgaggtggacgtgggccttagcgacggcagctacgcgaggggggccgtacccagcggcgcatccactggaatatatgaggccttggagttgagggatggaggatctgattatcttggcaagggtgttcttaaggctgtcagcaatgtaaataacattattggaccagcaattgttggaaaggaccccactgagcaggttgagaatgacaacttcatggtccaacagcttgatg

SEQ ID NO: 297879 - DNA, 302 bp, Zea mays
  unsure (1)..(302): unsure at all n locations
tcgttttagtaacgcgctaggtttcttcccgcagagccttgggtgcgccccgtgcccctatacaaaagcccaccaaatcctaacccttgttgcagtgacactaccggacgattgccccgtattcggagaggaagccgannnaacaagatccaccgccttgctcgctactacaagcgcaccaagaagctcccacccacctggaagtacgagtcaaccacggccagcactttggtggcctaaggaaaatcctctgatggcttggtctttagcacctatgagcttgttctagaatatgaatttat

SEQ ID NO: 297880 - DNA, 199 bp, Zea mays
tcgacacgctcggggagaaaaatggaaccgcgaaggtgcgtgtcggactagggaccgtagagtaagcgacagcgaaggagggagagggggatggccgggatcgggccgatcaggcaggactgggagccggtggttgtgcggaagaaagcacccaccgccgctgccaaaaaagatgagaaagccgtcaacgccgcgcgcc

SEQ ID NO: 297881 - DNA, 353 bp, Zea mays
caaggcgtccgcctggttcatttcttaagccgccgccaaccctttccggggctccgaacccgctggggggaaaaaaaaaaagggccggaaggggcaatggcccgctattgggcatcgaactcggacgacgtactcttggcgcgggggggggaacaccaaccgggtgagatcattgcccacgaccaggggtaaccgaccacgccctcgtacgtcgccttcaccgactccgagcgcctcatcggagatgcggccaagaaccaggtcgccatgaaccccatcaacaccgtctttgatgccaagcgtctcatcggcaggaggttcagtgatgcgtctgtccagagtgatatcaagct

SEQ ID NO: 297882 - DNA, 351 bp, Zea mays
cttgattgcaaaactaggtggaattctacatataagatgcttagtgtagctttaccttatatggctgtttttaaccgggcagcacgtgtagagaagctatatgattgtgctccaagtaaggaagagtgggcctttgctagagaggtgattgataggctaaagatgtttgatgacattactgttttattttctggaaccaaatatgtgactgccaatgtgcaacttctcaaaatttgaggctaagacaaaaatgaggcagtggggtacatgtgggatccatattatagaagagatgacagctagaatgattgagaaatttgataagtactggaaggctattcaaggaccaat

SEQ ID NO: 297883 - DNA, 270 bp, Zea mays
gcacaatatacctccctagttgatgcggggatgtcgacagatatatgcgttagaatatttacggttgcacatcttgaatagatatggaaggataattggggtggtgaaatggtaccttgggctgttctgctgtgaacattgaacgggtgttggtattagatcagtgctgttggggatggtaaatcgttgacgtgtctactgaatgcaagtacaggtgaactgaatgatagaaagaatgttacactcgaaagacaacaccatcatcttcgt

SEQ ID NO: 297884 - DNA, 289 bp, Zea mays
  unsure (1)..(289): unsure at all n locations
cccacgcgtacgcccacgcgtncgcccacgcgtacgcccacgcgtccggtcgcttccagccgccgtcgagttcgcctcggcaagcgcagcagccgccgcagcacatcgctctcttgatctcagccatggcggaggtggagcagcaacaggacacgccgaagctcttcaaccgctggaccttcgatgatgtccaggtgaacgacatctcgctgaacgactacctcgctgtgaacgcgacgaagcacgcgatgtacctgccgcacaccgcggggcgctactacaagaagcg

SEQ ID NO: 297885 - DNA, 220 bp, Zea mays
cttagatatatatacagaaaatagcttcactatctagattccatggcatcaaggatgggaatggtggctattgtgtcactatttgtttgtgctcttgctgcttcaacatcagttaatgctaatgtgtggcagactgatgatataccagttgttaatagcaacatggtgaggcatagcaacatggagaggcaacaacaacaaggtggatttattggccatc

SEQ ID NO: 297886 - DNA, 405 bp, Zea mays
  unsure (1)..(405): unsure at all n locations
gccaacagaagtcacgtcgacaccaggcagccggccggactgcagctcgtcgtcttcgatgacggccgggaccatgcgtgtgctaggcggggaggtcagcccgttcacggcgcgggcgcgtctggcgctggatctgcgcggcgtggcgtacgagctcctcgacgagccgctggggcccaagaaaagcgacagactcctcgctgccaaccccgtctacgggaagatccccgtgctgctcctccccgacggccgcgccatatgcgagtccgcagtcatcatccagtacatcgaggacgtggcgcgtggaagcggcggcgccgaggctagcagcctgctgctgccggacgacccctacgagcgcgccatgcaccgnttctggaccgtcttcatcgacgacaagtttgg

SEQ ID NO: 297887 - DNA, 353 bp, Zea mays
ttatagtcaacccacgcatgcgaaaaatatccccaaaccctagctcccgagcgggagggagaacccttgcgtcttcttcgacatgaccgtaggcggagccccggcgggccggatcgtgatggagctgttcgccaacgaggtgcccaagaccgcggtgaacttacactcgctgtgcacgggcaaaaaaggcgtgtgctagtcctggaagccgctccactacaagggctccaccttgcaccgccttatccgctagtacatgtgccagggcggcgacttcacccgcggcaacggtaacggcggggagtccatctacggcgagaagatccccgacgagaagttcgagcgctagcaca

SEQ ID NO: 297888 - DNA, 376 bp, Zea mays
ctatatctgtagccaacacacacataggtactcttcattccattccattccatctcaaaggatagaataatgtgcggcctctccaccaagctgttcgtggaccatcttctgctcgtttgttacaccgtgacgcacggtgggcccgagactattgtgtctgggaagaagtgcgagtagaacagcttgcacttcaagggaccttggtcgagggacgccaactgcgcagacccttgtctgaccgaaggtttcacccacggactgtgcaatggcctacgccaccgctgcttatgaaccaatgactggtaacactgcctcgcctcgcgttctgcgttggcatatatagcacccacggatcacctaaacatgcatgcctgcg

SEQ ID NO: 297889 - DNA, 338 bp, Zea mays
ccctacgctcacttcattgcggaaaaggccgctgcgatgaaagaaacccttgagaacgacacaaactacattactgacctcatctgcacgcgaccaggatcttggatacaactgatagtggtataccttataccaccaaggcgcggcttgatgatcataccacaggctcataaactcatcgctgcattgaatgaaattgtagcacatgatgctgttgatgaggcagccgcctgtaaaatcaagcttgcggcttaatcaagggagctgctcgaacttttgcccaaaactatataggagcaacttatgcttgaaagagatccccatggcaatgatcaagc

SEQ ID NO: 297890 - DNA, 274 bp, Zea mays
gtgcttcctgtccttaaccgaaagtggagtggaatgtgtttaacagtcccaaccttggatgtttctgcagttgatttgactggcaggcttgagaagtcagcaacctatgatgagaccaagggtggagcaaatgccgatgcataaggtagcctcaagggcatatctgtgttacgatgaggaggaccttgcttccaccgattcacatggtgacagatggtctagcatctcttatgctaaggctggcattgacttgaacagcaacttgatgaagctc

SEQ ID NO: 297891 - DNA, 396 bp, Zea mays
tcttcatcaatatccccgtgtagcattgatcatgaatactgaaaggtatccttcctgatcactatttgaccttccaaactaacatcctcttcctcatgcgtagtagtgctgaagtctcatctcatatagctattggtctactaaatctaaaacctttgtactttagcgtctcctgccacaactccagttttctatttactccttcctgactttgatcaactagcactacatcatccgcaaaaaaatacaccaagggatatctcctatatgtcccttatgacctcatccatcaccaaggcaaaaaggtaagggctcagagcttattcttgctgtagtactattctaatcaggaagttatctgtgtctccatcacttgttcgaacactagttataata

SEQ ID NO: 297892 - DNA, 311 bp, Zea mays
ggacttgtacagactggtgtcagggagcctcgcatggttgttacttttgggcctactggtcttactactgatgctaattccgttgaaatgcaccatgaggctctccaggacgtccttcccggtgacaatgttggcttcaacgtgaagaatgttgctgtgaaggatctgaaccgtgggtatgtggccttcaactccaaggatgaccctgccaacgaggctgctcgcttcaccttccacgtcatcatcatgaaccaccctggtcagattggtaatggctatgccccagttatagactgccacacctcacacat

SEQ ID NO: 297893 - DNA, 346 bp, Zea mays
cattagacccacgcagccgtgcgttttgtgcgcacacatgggctacctagctcgctctgataacctaccgtggctgacgaccaccagaaaccccacggcgaagaaacccggggtagggggagcccccgcccgaaaaaacaaccgcacggcgaggcgcaacagcagcagaagcagggcgccatgatgacggcgctcaaggccgcgacggacgcgaccttcggcgggtcgatgctggtgctgaccgggctgatcctggccggcaccgtgatcgcgctcacggtggccacccccgtgctggtgatcttcagcccggtgcctggggcgccgccatcgcgctggcgctcat

SEQ ID NO: 297894 - DNA, 373 bp, Zea mays
acggaaaaatatcctcaaaccctagcttttgatcttgatggcgaaccctcgagtgttcttcgacatgactcgtcggcggctgctccggcgcggcaggatcgtgatggagcgtgtacgccaacgaagagcctaagaccgcggagaacttgcgcgcgctgtgcacgggcaagaagggcgtgggcaagtacagtaagccggtgcactacaagggcttcatcttacaccgagtcatccgcgagttcatgtgccatggcggagacttcacccgcgcgaacggcaccggcggcgagttcatctacggcgagaagtttcctcacgagaagttcgagcgcaagcacaccgtcccccgtgtgctcttcatggtcaacgacgg

SEQ ID NO: 297895 - DNA, 379 bp, Zea mays
tcccatttgaaatcaacccatcctcgtttcctccgtctagcagcctctcaccctcatggccaagatcaagatcgggatcaatgggttcggcaggatcggaaggctggtggccagggtggccctgcagagcgacgacgtcgagctcgtcgccgtgaacgaccccttcatcagcaccgattacatgacctacatgttcaagtatgacactgtgcacggacagtggaagcaccatgaggtcaaggtgaaggactccaagacccttctctttggtgagaaggaggttgctgtgtttggctgcaggaaccctgaggagatcccatggggttccgttggcgctgaatatgttgttgagtctactggtgttttcactgaccaagag

SEQ ID NO: 297896 - DNA, 312 bp, Zea mays
gggtaggaggggggggaagcggcggaagggggggggtgagagcaagggggggggcgcgaagacggcgaggggagcaatcgaagggacctacagggacaagaaaggccgcaggagtggaactgtttgtatcggaggcggagtgatcgcggggacatgcgacagcgggaagatgaagagaacgatcatggttggcaggaactaggtgcgcgctgtggagaggtaccagagggatgagaagaggcacaccaacattgctggtcacatcgcccaatgcttcggggtgaaggaaggtgagcatgtcatcattgggca

SEQ ID NO: 297897 - DNA, 393 bp, Zea mays
tatgacggagcatgcacgcgtacgaaacatgggatccgcgagagccgacaagcgggaaactagagctggctaaccctcggatcgcgaatggtccacagagaggcaaacggcaagactcgctgaaagctcctgatctcgcgcagggggggtcgcctgagatcacagagacaatggtgaaagcaggtgctggcctcgccggcactgatgacaagggcaccatctgattttcacaggaaggggatggtgcgaccaccgggactggaagtatctgtggcctcaagccaggctctcatgggttccatgtacacgcgctaggcgacaccaccaacggctgcatgtcgactgggccacactataatcctggtggcaaggagcagggagcaccggaagaag

SEQ ID NO: 297898 - DNA, 320 bp, Zea mays
cgattcgaggcggttctttcaacccaggggcagtgatggtgacgaaaaggaacgttggcaaccctttgtaaggcggattttgaaggtaaaaaagtgtttgtgcgcgccgacctcaacgtcccgctcgacgatgcccagaagatcaccgacgacacccgcattcgcgccttcgtccccaccatcaagttcctcctcgagaagggcgccaaggtcattctcgcgacaccaccaacggctgcatgtcgactgggccacactttaatcctgttggcaaagagcatggtgcaccggaagatgaggaccgccatgcccgtgatctg

SEQ ID NO: 297899 - DNA, 433 bp, Zea mays
tgacggcgcatgcatacagacggacgcacgcgtccggaggaactaccgagctcgaggagatcgggacgatgatgggagggcgcgctctgctgctgctcctggtctaggcgctgctcgctcacatccgcacctatgaccacctacaggaccatccgccgatgaggacgcggatcgtagatggatcaacgccaacaaggacgaataccaaggcgtatggatgcatgccaagagagaaggacatgaggactatggactcgttgctagtgacacagcatggagatactccataagaaaggagcttgaggagtcctttacagtaaatgatgggacagtggtcctgcagtttgaagtgagacttcagaatggccttgaatgtggggtgcctacattaagtacatccgccctcaagatgctggatgggatgccaaggagt

SEQ ID NO: 297900 - DNA, 376 bp, Zea mays
atcaagatgataatgcttggaatatttctatgagtggtggaacatgccttggactcatttctagaactgttggtgatgcagttgtccctcttgtgatgccatttgtcgagaccaacatcacaaagcctgattggcattgtcgtgaggcagctacctttgcatttggttctatccttgaaagcccctctgttgggaaacttgctccacttgtccaggctggtcttgatttcttgctcaacacgatgaatgatgcaaatagccaggtaaaagatactactgcttggactcttgggagagtatttgagctcttgcattctccagctggtataaactcaatcataaatggttcaaacctttcccgtatcatgtctgtatt

SEQ ID NO: 297901 - DNA, 153 bp, Zea mays
acccagctcttaactgcgtgcagaaggggccccccaactctatatacagaatgagagcactcttcaccatgctctccgcctgagggctggcatgcacatctttgtcaagaccctcactggaaagactatcacccttgaggggggattcttctg

SEQ ID NO: 297902 - DNA, 242 bp, Zea mays
caggcgacccacgcgttcggtgccggacagcacctgcactgaaggagtcggatggtccaggactcgtgacaacaaaaaatgctggggatgcaataacccgtttgcagcctgtatctggacccactagagacagcagccagatagtggtaacaggtggcataggacatcgagctgatggtgaagcaagagtgcaagaacggagacatacaacacgggccatactaggatctgctcaagggaac

SEQ ID NO: 297903 - DNA, 177 bp, Zea mays
aacaatatgtgccaatgcaatcatgcatgcgggaactactgtagatacctttctaagaaagaacctggagtggttaagcaaggcaaccaattgggcaaaattcaatgcaactgctggactaagtgtcattcatagaagtcatcttcaacaaaggcgggctttgatggccccctacct

SEQ ID NO: 297904 - DNA, 263 bp, Zea mays
gccggcatcgatctcgcttgaaaatcatccatcctcgtttgctgcgtgccgcaccatctgaacctcatggcgcaagatcaagatcgggatcaatgggttctgctggatccgatggctggtggccagggtggccctacagagcgacgatgtctagctcgtctgcgtgaacgaccgattcatcagcaccgactacatgacctacatgttgaagtacggacactgtgcacggacagtggaagcaccatgaagtcaaggtgaacgac

SEQ ID NO: 297905 - DNA, 256 bp, Zea mays
  unsure (1)..(256): unsure at all n locations
tcgggactcttgtnctaccacccgcgaccgcagggagagaaaggggaagcccggcgtcgacccgggccccagcaaccagcaaatcgggacctatgatctgggcaatccatccatggcggaggaatcaagccgacccttgccaaagtttggtgaatgggatgtaaacgatccggcttccgtagacggatttactgtgatattccacaaacgcccgagatgagaagaaaggtgggaatggtcaagacacacacttacc

SEQ ID NO: 297906 - DNA, 269 bp, Zea mays
tcgggacaggggacacacgcgcgaagggcgattggaacccacaggcgaagcacccatcccaatagcgtgcgagtagcaagcttgaccctcacgggcacgagcaaggatcgggagcgacgggggcggccggataggaatgcaggcggccaaggcggccgaggggagcgacggcatgcaggggggggctaagaacgaaccctacatgaacacagatgacatgagctacatgtacgagtttgagactgagaacgggcagtggaagcaccatg

SEQ ID NO: 297907 - DNA, 371 bp, Zea mays
gcgggttcgtactcgcctacctgcgcgggtcaaacctttcgcggttctcccaatttccgccgccggtccatcccgtaacgcgacaccatgagggagtgcatttacatccacattggccaggccgctatccaggtccaaaacccatgctgggagctagactgccttgagcatggacattcaagctgacggacagatgcccagtgacaagaccattgacggaggtgatgatgctttcaacaccttcatcagtgagactggtgctgggaagcacgtaccccatgctggcattgacgaccttggacccactggcatcgatgatgagagaactggcgcctaccgccagctcttccaccctgagcagctcatcagtg

SEQ ID NO: 297908 - DNA, 270 bp, Zea mays
gggcgggcggccttttttttttttttttttttttttttttttaaaaattcttcttcttttttcacataaaattcgagtcgggatccttaacaaccagggggggggaaaaaaaaaattacaaacaaacagtttttacgctcaacacggctattggcagagcaccaccaaaattagtaataagaattgtccgccgctaaacacccatacaaaatttggcttggctcccgacacttcacgttaccaccaccatcgtccatttacaaccatcta

SEQ ID NO: 297909 - DNA, 192 bp, Zea mays
ggaacaatactttttttttttcaatccaaaacttcatacaaaggattgcttacactgacactggggcccatgtttatccactacacattattactcaatcatagccgataaatgactcaactacctagctagccagcgactatactacaccacatattttcttcattcccgtacaccaacaccaccaacctt

SEQ ID NO: 297910 - DNA, 446 bp, Zea mays
tcctttaaagtcgaccaacgcgtccttattcaccgcctccccgatctcgtcgagaggaggcccattcccgaaaccgtggccgtattccaatggcgcccaaggccgagaagaagcccgccgccaagaagcctgcggaggaggagccggcggcggagaaggccacggcggggaagaagcccaagggccgagaagcggctccccgcgggcaagtccgcaggcaaggagggtggcgagaagaaggggaagaagaaggcaaagaagtcggtggagacgtacaagatctacatctttaaggtgctgaagcaggtgcacccggacattggcatctcgtccaaggccatgtccatcatgaactccttcatcaacgacatcttcgagaagctggcggcggaggcggccaagctgtcgcggtacaacaagaagcctaccattacgtcccgcgagat

SEQ ID NO: 297911 - DNA, 411 bp, Zea mays
tctcagcttctgctcatcgtcaggttaggtacggtccttcgttcgttccggagctagctagggtggtggaccaagatgagcttcttctccggcggcggcagcaagaaccaccagaggaccttcagggcgaagaagagcctgtcgtcgcccgggaacaagggtacgcaactgaggaggcacattgacgccactctcggcagcggcaacctgcgagaggctgtccgtctacccgtcggggaggacctcaacgagtggctggctgtcaacactgttgacttcttcaaccacataaacgttctgtacagcacgctggcggagttctgcactccacatacctgcccggtcatggcagccggaccaaagtacgagtacaggtgggccgacggagccaaagtcaaggtgcccatcaag

SEQ ID NO: 297912 - DNA, 365 bp, Zea mays
  unsure (1)..(365): unsure at all n locations
tagtcgacccaacgtccgtcctctctttcccgctccntgcccaaagcaggctctactttttgagggggcaatccanaccatgctaaccaacccactgtccttcataagctaggtggccagttccacctgagctccatcttctttgaaggtgtactttcccgtaacatctgcctttctttctcatcttattaaaggagatttgtcactaggaactacattacccatatccttttgtgcccttcaatgtctgttagcggttgcatcaattttccattgattcccactccgttttttgccaattctccaacccttaaatactgctcaaactttattaattattttcattattttcctttattttcaac

SEQ ID NO: 297913 - DNA, 230 bp, Zea mays
  unsure (1)..(230): unsure at all n locations
gccggccgcccttttttttttttttttttttttttnngggcaaacagatttaaattctttttttcaacaaaatacatctgacgttcaaacaatctggaactgcgggccgacattcttccaatcacaccaatatgtccaagaaaatccaatggccaatggagatacagggaatgttacttaatactacctccgttctcaaatatttgtcgcccgctagttcatttttgaac

SEQ ID NO: 297914 - DNA, 246 bp, Zea mays
gataaaaggaaattattgcttaatgtttaccaaacaccaggccagtacatgtggggagttagaagttattcaggtgggataggtgtataaacactcactacttttgcatgaactagtatctatctggtaatggtggagggcctatcgatttggacggaccaggagatgttatagttctatcatcttcataaagagcttggacatatgatggtggatgatgaggggtatgcgatgggatgttgtttt

SEQ ID NO: 297915 - DNA, 391 bp, Zea mays
  unsure (1)..(391): unsure at all n locations
cgaattcccggtgcggccgcgggcgctgacctctaaggcctcctccacttcccgttgcaattaacttaancggtggttatataaccgtttagacggacactttccctgtgcgggaggggtctatacacagcgcccatgttccctttccccaacacacccacaccatttacatttccctccccccccccccctaaagcgacagttttatctttttgtggcccatccaaaccagacacactttcccgccgtcccgtttcctctccagccccgtaaacattttttttctaaacccggcacatccaagtttgacttatattcccaaccctatgccctcccatatgctctccacctttcccgccattccctccgcgcgtggaaacacccacacggc

SEQ ID NO: 297916 - DNA, 463 bp, Zea mays
tgcagccggcctttttttttttttttgacaacatcttggctgcacattgttatagctcgacgagcagaggaaattataagcgggggttcataggaccgtaggcacaagtgaggaaactactgcggtgtgatgcgtccatatacatacgcagcaaacttcttcgtactaccagataaacaaatacacggtaacagaggagaggatcccttcgcttcgcctgtatcagtagaaccttttttttttgtttgccagcctacggaagaacggtcctcacctccttcctgtctacaccaaacgactccaaaccgcagtcattaacataaacatttgtgaagagctcatatggatcaggcagtggacactccttcgctttagcaatggcagcgtcgacttgctttctgaactccttctccatgttctttagctcttgggccgttgcgaactcatggaccaacatgagctt

SEQ ID NO: 297917 - DNA, 198 bp, Zea mays
cctttttttttttttttttttttttttatttaattaagaggttaaaaaagtgaactgatttgattaaaagggggacttttttcacatgggcgcgacaaaatttcacccattaatgctcaaccaaccactagtatacacccaacatatcttcatacattcctatggaaaaaaatttattctttaaagcacttttcttcg

SEQ ID NO: 297918 - DNA, 269 bp, Zea mays
  unsure (1)..(269): unsure at all n locations
atgcaccaaaatccttaaatatctttgaaagtccaatccaaagcaagagaaggggctactactccntaagaaattattactattcttatggcccacaactttcttaaacctttaacccacgggtgttcctccttccactatccttctcgaacttccttcccttggagcgcacatattgccttggtgtggctttgcngcactccaagaacctttccgaattgccttaccgccttacgtgcattcttgttacccctcaaaaaaactttttt

SEQ ID NO: 297919 - DNA, 390 bp, Zea mays
  unsure (1)..(390): unsure at all n locations
cggacctgaattcccggggcggccgcctttttttttttttaacacaagaacatactgcagccttaagtatcatagatttactcntttcanttgcatagggcatcagagtctagggagaacgaacaaagggtcccacaattcaagcctaagggctcaacattgacaaatttattacgagaaagacaatacgacaatctgcttgttcacattgactccagatgcaaaagaccacatgcagcagaatgtatcactccaggatagggtctatttaagcatcagcaaaccccagttcggagagcttgaggtgggcctctttgtagtcatcaaagaaagcctttttaatcgcaggatatttcttgacaagagggccgaaaacaaggtcactcaaca

SEQ ID NO: 297920 - DNA, 321 bp, Zea mays
gcggccgccctttttttttttttttttttttttatctttttttttttttttccaaaaacatcttaaatattttgcattggttcatggtcttaagaggagggtttatctttctacaaaaatcataaagaagcaaatggccttgaatctaaaaataaccccacttatattggctaacgggacaaatcacaccatggcatatctacaaaattacctcgcttggagtctgggttcccgcacaatttgcctgcgccttatgaatactacatgtttctggctagagagcgaaaacctattgaaggaaaacaaaaaggcttttccacc

SEQ ID NO: 297921 - DNA, 294 bp, Zea mays
  unsure (1)..(294): unsure at all n locations
gcgggcgcgacgtcgcgcacgtccaccatgttcctcgtcttctcctcggtgttttctcctttcaggtacgtcacgaagcgcatgctggtggcgttgagccggggctgcagcancggccccagaacccacggcgggcagacggtgaccacgtccatcgtcccagtcctctcgccgtacgccagcgcctcgcgttcggccaccgtcttggaaacgcagtaccagttcttagtggttctgcagtagtcctcgtccgaccagcagtcttcgtcgacgacggcgccgtcggggatgctg

SEQ ID NO: 297922 - DNA, 538 bp, Zea mays
gcctgcacgaccgtcccgattctcggggcgccgccctttttttttttttttttttttttcattcttcacacaccacgagtaaccttaaacacttgttacaagataggttttaattttaagagtgggtggaggacaaaattttagggccagacgaaaacacatagccaagacaactttataagttcacgtaataagcaacctcatgtccagactcgcctagaaatagaactagcaaacaaactactcggtagcagcatccttctgcccagcctaatttcccttgacaggcctctcaagtttcacaccaacattctttttgtagtcgccgtgaaccttcatgagcttcccaagatcgaacttgggggccttaagtattcttaccttgcggatgaaaacctttttaaattggaagtatcctggaggtaaacttttaaatcttctataccaataacttttgggaatgaactttataacaaggtttttaagtctacctttaaaaccctgtttaattataatcttacctcttttacggtggatc

SEQ ID NO: 297923 - DNA, 424 bp, Zea mays
cgggcgcgcttttttttttttttttttttatataatcgataattgattatgtattgaagaacagagttttgaaccatggagcagtttggaaggggtacgggggtggggaaaaaaaggacatgggattgtatcttttatgagcacttctactagtaatgttcacatagcatggctctgtaataatactgtttatcactacattcaccattagcatgcaattcgtttgccaaagtagaaggcagtcttatacaagtacctgagctgcagttatgctattaattgtaaccttgaaaggtgagcatgaaacgtaattcattctagttcttcgtgaagaaggtctcattattatggttttcaactcttttttttcacaaattgcctattcttaatgtatagccttatatttattttacttatattttat

SEQ ID NO: 297924 - DNA, 416 bp, Zea mays
attaccggggccggccgccttttttttttttttttttttttgtcccggctgcagagaattttttctaaaaaattatggagtccttacaggtgttccccaaaaaaaatggggtcaggattatgtctaagtcatattggtcttgaaagtattcaataaaattgtacatgacagttagaacatgcgtctccggtttggaacaatctcaggggtgttgttcctcatcatggcaacaaactcctggtaattaattcttccatcatgatctgtatctacttcagcaatgatttcttttattgttttatcatctcccatatcatacttcttcagagcttcttccaactcatctactgttatgtacccgctatggtccttatcaaaatattcaaaagctttgagtatatggtcttcccttttca

SEQ ID NO: 297925 - DNA, 269 bp, Zea mays
  unsure (1)..(269): unsure at all n locations
tttttnttttttaacaacaganactagtagttaaattactaatctaaagagaaccatcatggacagaggaattatgggggggggagggcccaatataaaacctctaacaagcaaacaacactcagcaacctactcgcaggcaggagatccaaaacaacgggatcgcaaagagaatcaactcagtacttgtagtccttgacgtgaaggctctcggcgtcggtggcaacatcacccttgtaggtgccgagggttgccttggagtccccccc

SEQ ID NO: 297926 - DNA, 441 bp, Zea mays
  unsure (1)..(441): unsure at all n locations
gcgggcgcgccttttttttttttttntntnnnnntntatattttcnngcttttattgtataaaacaacatattaaacctggggggcgttaaaaaatggggcggggcgggaccatgtccatacaaaattgcaacaattactcataagtttaagtagggagggtcgactgatgcaacacagccagggcagcataaggtacttataagctgtaacaaaataggccttgaaaacatctcaaagcactgatcattcttaggcagaggtggcagcagaagccttggcggcggcagaaagcttagacctcctcttggccaagctcttactgcggcgtgccctttgttctttcagcctttgggcaagaagcttttggtctcaatactcttagaattttttttaacgatccttttttttttgtaagaatatttagcactctttcttttgg

SEQ ID NO: 297927 - DNA, 358 bp, Zea mays
gcgggcgcgcctttttttttttttttttttttatttgcgaacaaatacctttttcattcttctctcgtctcttttgatagggttagcaaccaagggggacagcatatataccaacacctaatccaaatgtataacggacactaacatggtgtcagaagctatctttaacacgattctatagatagataatataacttggtctaagccagtatgggtctactcattataatattcatctctttctttcttcttcttatttctgttattattatcttttttacacatttgtctttattcttcttagttttattattctttttctatatttttagttcttacttgattaatttttcttttt

SEQ ID NO: 297928 - DNA, 271 bp, Zea mays
ttgtggacgcgtggatcaaggccacccgcgggacgttctacacgcacgtgggggagcgcgacatggtcgagaccttagagcgccccttcgagatgtgcattcgggacggcgacgccagctgcgtcatgtgctcctacaaccgaatcaacgggatacccgcctgcgccgacgcgcgcctgctgtcagagaccgcccggagccagtggcagctacacgggtacatctgctctgactgcgactccgtacgcgtcatggtccggtacgccaagtg

SEQ ID NO: 297929 - DNA, 283 bp, Zea mays
  unsure (1)..(283): unsure at all n locations
cactcgcgaactccatttcgatcccatttgaggtcaacccatcctcgtttgctgcgtctagcagcctctcaccctcatggccaagatcaagatcgggatcaatgggttcggcaggatcggaaggctggtggccagggtggccctgcagagcgacgacgtcnagctnnnnnncgtgaacgacccctttatcagcaccgattacatgacctacatgttcaagtatgacactgtgcaccgacagtggaagcaccatgaggtcaaggtgaacgacttcaagaccctt

SEQ ID NO: 297930 - DNA, 179 bp, Zea mays
  unsure (1)..(179): unsure at all n locations
tttgcagcgtcccggcgcgcggccggccattgttccctaaggacccatcgagcgaccgatctttcccttggaccgcgacctcaggtcagtctgtactacccactgtgtttaagcatataaataagcgcatgagaagaaacttacnaggttttccctagtaacaaccgagctaacctgtt

SEQ ID NO: 297931 - DNA, 367 bp, Zea mays
  unsure (1)..(367): unsure at all n locations
ttggatgggtacccagcgttcgcgctggtnaacgatntcaccgtcgaagccgggaagcactctctgggacagagccacccggtacgccttgtgccctacaaccccgagtacgttgacgagtcggtgctgtggacggagagcctcgacttttggcacggctttcgctgcgtgcgcatggtgaacaacatctacctcaacatggacgcctttcacggcgacaaggaccacttttgttttcacgacggcaccactcttgtgcttttggagtgtgccatggggtttctctatcgctttatgatcctttctttgttattcttggtcgttctatatgtatnctttgtatccttttttatnttttttcgttttt

SEQ ID NO: 297932 - DNA, 431 bp, Zea mays
cgtccggaatcccgggcggccgccctttttttttttttttttttttttttttttttttttttttttttttttttttttccagcaaaacaaacgggaggcacaagattggtttaggcatatttgacaaacaggcagcaacgtagcacatgagttatgagttgatatccggtttttaagaactttgtttaacagcctgagcctttgcgggggccatgggatctttttttttctcgccttccctttaaggggccagtttctccctgggcagtttttttgctgcctgcatcgttgcacggggctctgcctgcagccgctgaatctccttttcctgctgttgcctttaaaaccaagtgtccgaatcggcccagattggttgggcagcccatccttgctcccctcctttgttgcgctcggggaaggcgtttttgacg

SEQ ID NO: 297933 - DNA, 397 bp, Zea mays
ggcggccgccctttttttttttttttttttttttttttttttttttttttttttttttttttttttttttttaagggggggccaaaactcagaacggggggtgccttacattccattttccataaaaaaaattaaatcttaatagcatcaccgtttcaaccaaagttattattctttattacccggcaaacattgccatcataaattacttgttcaccccacaacttctaggttttcaacaagaccagatattttaagcttccacgaggtaaccaacaagcaatcccatctccacccatattgatcatttttttttggtagtagtctttgttaccaaccaaatatatcattttttttttacagcaacctttttcaccttggctccaattgggtcctt

SEQ ID NO: 297934 - DNA, 390 bp, Zea mays
  unsure (1)..(390): unsure at all n locations
ccggccttttttttttttttttttttgatcaaaattttcctcaattgcttttaaaggcgccaacagantacatgggtgttccattcagagagcagggaggcacactcacatagacagagaggggggagctttattttgtttcggtctacacaatggtactcaaccactgtaacagttcagtcactgtactcatccatgaacgcctcatggaaagccttgaagcgtttgatcaccgcggtgattttgtcttccttctgcaggatctgtcatctttcttgccatgttcctagaacttacccaatatcagattcagtaaccacatcagtgtcagttgtttcacggtaattgttcccactttaatgcatcaggttgctctttttttcatctttt

SEQ ID NO: 297935 - DNA, 458 bp, Zea mays
gcgggcgccctttttttttttttttttcatcaaataaaattactcttatttgtttcaaaaaacaaattgcactatacagtgtggcaaggttccatagctagaggattatcctagggcaaaacataatttcaggaaactgtcccaacagaaacccttcatcaagacagtttgaacaagaacaaacactagtacatctgagatttgtcgatagatatgtagcttatcgctttttggagacaccaacagtttttccacgcctgccagtgttcttggtgtgctggccacggacacggaggccccagtagtgacgcggaccacgttggttcctgatctttttgagcctctcgaggtcgtcctttagctttatgccgagggcgttggtaaccacctgttagaacctttcgtccttgttattttcttttctgttgtagaacctctttctgctccctttatttttc

SEQ ID NO: 297936 - DNA, 279 bp, Zea mays
ttcttttccgccgcagccaaaccctccccagcagccgtcgtcgccaccgctgcagcgcggaggcgaccccccatcgccgccaagatgcagatcttcgtgaagaccctgacggggaaaaccatcacgttggaggtggagtcctcggacaccattgacaacgtgaaggccaagatacaggacatggagggttttccgctctgtatcatctattgttttatttttctcctgataagtatttttttggatcttttatataccttttatctcttacaattatat

SEQ ID NO: 297937 - DNA, 337 bp, Zea mays
ttgcttattgacttctggcagtggtggacgcaggatgaaattctaggtggggccaatccgtaatggagaaatcacaagaaaaaaatgctaaactataaatggtttcttggtaatagcatgaaattaagttgtaatatcatgactattataaaaaaatgtggatatcaaaaatccttttagcgacaccaaatcatcgatagaaaattcaatctacaattagaagaaaaaagtattagtaagcttcaatataagtaaataaacaatactatatagataaaacatcgaaaacaccatttaaccatcaatcttgtggttgtggcagcttgcactctatttt

SEQ ID NO: 297938 - DNA, 168 bp, Zea mays
  unsure (1)..(168): unsure at all n locations
atatacaatttacccgccctgtttatttacccacancggccaaaccagaacgcaggtttttaacgcgagctgggagctccactacctcnagcatggcattcaagctgatggtcagatgcccggagacaagaccattgggggtggtgatgacgcttacaacaccttctt

SEQ ID NO: 297939 - DNA, 472 bp, Zea mays
cggccgcccttttttttttttttttttttttttttttttttttttttttttttttttttttttttttttttttttttttttttttttacccaaaaaagcaaccaccggggctgaaaacacatgggacgaaacaactggttgcaaaaaaattgagtcaagggtgacaaaaaattcggccatccattgttttaaacaaaatcctaacaaaaagaaaaggggctcccatagccaggaaagcctttgtttttatactaatgaacccccacaacagcccggggcctagggagttacaaaatttcccaaaacatggcataaaaaaaaatcggattttgcccgaaacccccactttaacataaaaaccccaccgcccttattactcctcccccacaatatttgggaaaaaccaagccttaccaaatcacccccaccaccggttttttagttctgttttttttaaaaatgatcacaaaag

SEQ ID NO: 297940 - DNA, 214 bp, Zea mays
cgggcgccgcccttttttttttttttttaaacaaaaactctatgcttaatggtcatcttgaaggtcttatatatataaagagggcgactctattgagatgcatgggctctccatcatcgattaaagtatcagaaccttattgtagcatgcatgcatgcatctgccggttctggaagaaggtttttcccctattttctcccctacttcaagcttc

SEQ ID NO: 297941 - DNA, 286 bp, Zea mays
ttccccggcggccgcccttttttttttttttttttttagcggacaaaaacacagatttgtatcaacaacaacgaacacgaaacgaggacgatacggacacgagacgaccgcggacgaagataaaccccctctagactagggtgaacacggtagcagaagcgaacaagataactaggcctcagcggaccccaccgctcagttccttcagttcccgtcgttgttgccgtagccgccgccgtggtttgcaccaccgtatactctaccgtcgtcgtatcctctacgacca

SEQ ID NO: 297942 - DNA, 260 bp, Zea mays
  unsure (1)..(260): unsure at all n locations
gcggccgcccttttttttttttttttttaaatacgacccacttctccgtttttttttagcccnccaaccccaagctccgaacgccgtatttaaaacgcggcccgcctctttaaaacctatatggcacttcccaatcaggggaccgttgattaccccatctttaagctctgtatcgtaagcgatggtggaactttttaaactacatttctgaacaggcatcttactgtatagtttgagaagaaatatgaaccacccatttt

SEQ ID NO: 297943 - DNA, 371 bp, Zea mays
  unsure (1)..(371): unsure at all n locations
gccgcccttttttttttttttttttggagacaacccacccgtccattttttaaaaaaaccaaccagatgcaccacgggggcgggttatcaaccgaagtggcgcggccatntttcacaaaaacttacaggcaacactcctggttttccctattcaggaacgatcatctgcgtcgacatattttattactgcagaattgatcccagcagcactaccggtagttacggtagacaaggaatgtacatgcagctctgtgcatattttaccaggtcccttgggggaggcaaacgggtcgccaaaccgagttcataagcttttgcagccacggctgcggcaatgccacacaagaaccaaggtggccttgttggccttt

SEQ ID NO: 297944 - DNA, 352 bp, Zea mays
cggacgcgtgggctccaaccccggcacatcacaggaggaggaggacgacgcgcccaccatggccatggcgacggccctccgcaagctctccgccaacgctctgcgccgccagccgctctcccgcatcacgccgctctactacatggcgtcccttccggcgacggaggagagatccggaatcacctggactaagcagttgaacgcgccgctggaagaggtcgaccccgagattgctgacatcatcgagcacgagaaggcccgccaatggaagggttctggagctcatcccgtccggaaatatttacgttaggttttatgttttgcaagctagatttgtttctgtcttagtcca

SEQ ID NO: 297945 - DNA, 345 bp, Zea mays
tctgtctcgtgggtcaagatcgggatcaatgggttcggcaggatcggaaggctggtggccagggtggccctgcagagcgacgacgtctagctcgtcgccgtgtacgacccttttattatcaccgattacatgacctacatgttcaagttttacactgtgcacggacagtggtagttccattatgtcttggtttatgacttcattacccttctctttgttgagatagttgttgcttgtttttttttgtttttcctttcttgtaattccctttattttttcttttctttttttttatttttttttttcatttttctttattttgttctttatgtctttttatttatt

SEQ ID NO: 297946 - DNA, 353 bp, Zea mays
tttgtctcagacaccccttatcctcatccaggatggtgactccaagaagttcttgaaggttcacgttgaggctgaccagatcgtctcttggttgaaggagtactttgacggcaaattgactccgttcaggaagtctgagcctattcctgaggtcaacattgagcctgttaaggtggttgatgttgtcatcttttcaattttttatttttattttttgtctaatatgttctttatttatttctttttttctatttatcctttttctttttttatgttttttcctttatattgtttcttttttttccattctttgctttttttattatatgatttttttttattatagtgtattt

SEQ ID NO: 297947 - DNA, 376 bp, Zea mays
tctctctctgtcggtgcggatcaagctgtccgagggcgccgtcaagttcaaggtgcgctgctccaggtacctttacaccctctgcgtacacgactccgacaaggccaacaagctcaagcagtcttcttccattagtttctgactttgtctagtagttttaaaggtttaaatgtcctaatcatctcttatttttagtatttttatattttaagtattctaattttttttttaatgattatatttctttatttttattattatttttttcttttttattaatcttggttttttgtgttctttattctattttattttttttaatttctattttataatttatttattttttcattttataattatttttttctttatt

SEQ ID NO: 297948 - DNA, 191 bp, Zea mays
tctctaacgtcctcgtctctggactccagggactaggcgctgagatcgcagaaaaccttgtcctcgcgggtgtcaagtctgtaaccttgcatgatgatggcaaagtcgagctatgggacttgtcatgcaatttctttctctcagagaaggatattgggcttaaccgttctaatcttgtgtaccaaagctac

SEQ ID NO: 297949 - DNA, 271 bp, Zea mays
ttttctttttacccgagcgggggcattaaggaggcggggatgctttgcgaatgtttgggggtctgagctcgttgagacactggccggcttgcccatcccaagttggttgtgtctggcggggctttagcgtctctgcagacctgtggtgtcaggaatggcgtgaggctggctttacagagcagcgaacactgtccactttcaacggtgggaggtttaacaagagccgttgctttttgaacccaacacatgcctcagaatcttacttaaataa

SEQ ID NO: 297950 - DNA, 407 bp, Zea mays
tgcggccgccctttttttttttttttttttttttttttttttttttttttttttttttttttttttttttttttttttttgggccgtcaactttttaagggatgaaaaaaaggttcacattcagtctcccaaaattgcaactcaaaccacattcattttcatttcctggcatttcggctaccctgtccctcactgctccttttcgatgacccccttgtccctcacattaatcccccccaaaaactttgggatttccttttttttcacatggcattttttgtttattagggccgccgaaccagataccagctccaccttttttccctcaaggatgaactcatccttgacccttttggacccgaggattgtcaccccatcaaacatttccaccttccttaccttttttt

SEQ ID NO: 297951 - DNA, 335 bp, Zea mays
  unsure (1)..(335): unsure at all n locations
ccgtcctgnattcccgggcggccgcccttttttttttttttttttttattttttttttnggattgtacaaaaaaagggggctgctcgattcggcatcggcaggaccaacttacacggaatttaacagcaaagagactaattaacatacaaatttaaagataaccatcatcccacataggaagcatgttttttggatgtccgaaaataagctctaacgagcaaaccacactccgcaacctagctcgtaggcaggagttccaaaacgggcacgcaaagagaagcaactcagtacttgtagtccttgacgtggaggctctcggtgtcggcggcagcat

SEQ ID NO: 297952 - DNA, 380 bp, Zea mays
  unsure (1)..(380): unsure at all n locations
gcggccgcccttnntttttttttttttttttttttttttttttttttttttttttggaatacccaaattcagttaataagactaaatttcgtttgaacccacgaacactggcagtcaactttttaaggaatgagaaaaaggttcacattcagtctcgcaaaattgcaactcaaacgacattcatattcatttcctggcatttcggctacactgtcgctcactgctccttttcgatgacccccttgtcgctcacatagataccgcccaaaaactttcggatatccttctttttcacatggcatttttggttgatgagggcggcggagcgagatacgagctcgacgtcgtttccgtcaaggatgagctcatccttgaccttt

SEQ ID NO: 297953 - DNA, 437 bp, Zea mays
  unsure (1)..(437): unsure at all n locations
cccggggcggccgcccttttttttttttttttttttnaaagacaatgaggccagtttccaaacagaaataaaaccaaagataatcgtcatagttttacaacctcataaggacatatttctaaccatcgaagttttatacctcataaatactaatctagattcctccctctatggtagaagttgagctcataatagtccaaaagatcttcagtcccttctgaggtagattgcttcaatgatttgcaaagactgtatcatttcgccttggaggtcgatcaggaatcgagcctggcttaaattttgatgcctcatgccttgcaagttcaggtggcacaggactgttgctctgtataagcatctgtttcagatcaaagaaaatatcagtgttctctaaaggtaaaaatgaagttgccacccccttcttttcagcacgacct

SEQ ID NO: 297954 - DNA, 377 bp, Zea mays
ggcggccgccctttttttttttttttttttttttttttttttttttttttttttttttttttttttttttttttttttggggggtttttaaaccatgagcggggtttgtttaatttttacagtctacgagttctttttcaggcagatcactttggggttgggcctactgttgggcgctgccagcttgacctttttggtagctgcccctgcccgcaggggtaaacacagccagcttatgcttcctaccgtttttgagctttgaagcttcctccatggagatgggatacaagctggcgatgacgggggccggaaattctcttaagacggattttttcccggggacatgggttaccattgtgtcagggttcctctctaag

SEQ ID NO: 297955 - DNA, 470 bp, Zea mays
ccggggcggccgccctttttttttttttttggcgtcgcgaacgaattttattgtttcgggaaaaaatgttgcaaaaatttgtaacagaactcaattggaagcaagtgaaattgcagacattatcatcgtaggataaagattggcagcttccctcagcagggatgtagttctgctcgacgaagacggacaaactgagtaactgactgaaaacgagtaaacgacccgaaaaaatttcagggcagacagacgcagacgcaggcgccattgcaggaacgctcgagaccgatcgacgggctcatcactgggggttgggcggcctgctgttggcggcggagaccctggacccccactcgaggagctccttgctcgtgtcgtccttgtgcacgattacctcgatgaagcagaggcagtctttcttgtcgcccgtcgccatggcgatcgcctccttgagctgctccttcgttcgaacc

SEQ ID NO: 297956 - DNA, 187 bp, Zea mays
ttttcttttcgtacggccgcggatagagaaggaaaaatttccccaaaccctagcttcggatctcgatggcgaacccccgcgttttctttgacatgaccgtcggcggtgccccagccggccggatcgtgatggagctgtacgccaacgaggtgcccattaccgcggatgactttcgcgcgcttggcac

SEQ ID NO: 297957 - DNA, 151 bp, Zea mays
  unsure (1)..(151): unsure at all n locations
acgacccattctttcgtttgactccattactaangatgggagttaaggtcttcgtcgcggggccgtcgaaacctggcgcttagtttcctaatgccgcccgttggtacgagaccgtcttttcggcttgagcctcaaaattccctggtaaggc

SEQ ID NO: 297958 - DNA, 361 bp, Zea mays
atttcagattgataggggaagaagaccaggaattccacacccaacttgtcaatgggttccagtcactcaccgctgagctatctcactatatccctgctatactctccgagctatgatagaactgtagcaagccagaaattaggtagcatgtgaatggttgttcattcattcagttgcaggttcccaccaaatgtccatatttccattagctttggttgtatagttctaggaaccggaaattaactagtcttcgaagttctgtaccgtattgcagaaccgattcctgatttttaactgtgcataacagataacactaggtattatacagactttacactccaaaatcaagaatcggttctgc

SEQ ID NO: 297959 - DNA, 330 bp, Zea mays
atcactctagaccacgacccacttttttttttttcacaggcactctacctaacgagcttctttccttgtagaacgcgcatgatttccaacctttcaaccatggtcacacctgacccataccttgcacgattgtccacctttcgatactgtacaatcttgttctgaccaacaattctgtatctggagagatcccaaaggtctttggcagccttaaaaaactgacacagttggacctttcagataaccatcttagtgggaacatttctgaggagcttgtggagattgtctagattaacacgcttgatctgtcacacaatgagctttctggtc

SEQ ID NO: 297960 - DNA, 368 bp, Zea mays
tcgatccacgcgtgcggtcagccctcgcccggcgctgctgtactaggttacctacttcgccgaggtgtaccaaatcataccatggcgttggagaagaagcagtcatacccgatgcgggagacgaacgttcagaacctcgtgctcaacatctctggcagctagagcgcagatcgcctgacccgagccgccaaggtactggagcagatgagcggccaggcatcctctttgtcacaaggcaaggtacactgagaggacgttcgcgatccgaaccactgagaacatcgcatgctatgtgacggctcggcgtgagtacgcaatgcagatgctagagagtggctcgaatgtaaaggattactacctgatgatga

SEQ ID NO: 297961 - DNA, 215 bp, Zea mays
  unsure (1)..(215): unsure at all n locations
aattaagaacaatactttttttttttcatttcaattgttcattcanggaaaggctctcactgacactaagaagaatctttattctttacacattattactcaatcatctccaataaatgactcaactaactagctagccagtggctatactacaacacatattttcttcagtgttatacaccccctacagcacttgtacgttcatttattcatct

SEQ ID NO: 297962 - DNA, 296 bp, Zea mays
  unsure (1)..(296): unsure at all n locations
anacctgttccatcattttttttttaggcaaacnacatttcaacgaggggattcctccactcgaaagaaggtttatatattcaaataaaaacanttcttttctgcttttaatgcttccactacaaaatcaccttagtagctctctagcaaacaccaccattcatttattgctaccgtacaaacatttttacaaaatgcatcatcgagcttgtatatcttcacatgaaaacattcccatcctctttctttcttaataagtcttcactgattcccttatcttttctcccacttatacc

SEQ ID NO: 297963 - DNA, 451 bp, Zea mays
aaccttcctcacccccgcattcttccaactttttttttttatagtggggccacataaaattagggggctggccgttgtacaacaacgtgactactaaaaccacgctgtcaccacacttattaatcttgttgcacatcatccttttttcagctggtgtcataacaacgaggagggcaccaatgatcgttcttaacaactgctgagcctgcttggtgaataatacgccccgtgctgcagcgcatcattaaccgcggctgttgtagttactcccagcatgaccactactcttgtcagcagcctactacccgctgcttctgctgctttccctcccttctttgtcacgacggtcggcttttctccccatgatgttattaatgggctgcttcctggagggcgacttagtagtgctctacagctcctccaccacaaactagttgaggaggatgatgga

SEQ ID NO: 297964 - DNA, 372 bp, Zea mays
  unsure (1)..(372): unsure at all n locations
ctacccaccncaattcccaaaccaaaggggttttcttttaggcaaggaaggtttaaaaaaacaccccatctttcccaataaacaaacaaagttttttcaacaccccaccctgctcgacagccaaacatattaatgcccgcatatcactttccctctcctcgtaaacatcatcactgncggcctctacgacgacctccatagaatccttctccagggcagacaagtcctcccctgcctcaaagaacttccccttctccattccctcgccaacgtaccagtgcactaacgcgcacttgtcgttcatgaggtcaaactttctgttgatgcagaaaaacaccttgtccacgcttgtggacttttaaatcatgcaca

SEQ ID NO: 297965 - DNA, 399 bp, Zea mays
cctgcaggtaccgtccgtattcccgagcagccgccctttttttttttttttgaaagaaacaagaacgttgcatcttatcttaggtatggttaactcaaatactggcaacaaaacagcataaaggggcaatgcttagctttgaattcttgagctggaatggaacaaaacaaaatgtcttgggcatttaacttgttcaaaacaagtagaaaagctgaatggacattgccaacggactcttgggagactacagagacgggtaacagctcatttcagaggaataaaccgcgaggagtgggtggctccgatacctggcctgccatgcttgaccggcttatatgagtttgataactcatgaaggcatttatctttcatctcatgctaaatctcaaccctgtttaa

SEQ ID NO: 297966 - DNA, 289 bp, Zea mays
  unsure (1)..(289): unsure at all n locations
tctccttantcatcctccaccaggtacaaagggtgtggtcatctcttctccggggaggaacccctattctcccaccanatcacttgtttaactttgttgaggggtgatggcgttttttttcgcaaaccttaacacctagtcagttcttaaaaagcttgatgagtaccttcttactctcagctacatcactgtctaccaagcttccaaggatgacttggctgactacacttcgttttcgtctgctccctcatccaagtatattatacttatcacgtgttgtttaatctca

SEQ ID NO: 297967 - DNA, 158 bp, Zea mays
tcgacccacgcgcctcggtaaaaatatccccaaaccctatctgggggtctttatggcgaacccgggggtcttcttctacatgaccgttggcggcgcccctgcggtccggatcgtgattgagcttttctccaacgtggtgcccaattccgtggagaact

SEQ ID NO: 297968 - DNA, 250 bp, Zea mays
  unsure (1)..(250): unsure at all n locations
gttgacttatcctccccctccggatcgagttcgagttcgtgagggtctccaanattcggtttcgtggctcagcggatcgagatagccgcgtccgatgttgagtaccgctagcttcgtcggcaggctctcctgggccacggacgaccactacctccacaacgccttcagcacctacggcgaggtcctcgagtccaagatcatcctcgatcaccagacccagagctcccacatgttctgcttcatcaccttc

SEQ ID NO: 297969 - DNA, 370 bp, Zea mays
tgaattgtgcgcctccatttaggaggaggcgcattgcaaggagagagtggggtacaaccattggtgaagagaagtcccacataaacattgaggtggttgaccatgtagacctgtaacgagacgaccaccacaagacaccttatctacaagctaggaagcaccgactaacatgcgatcgtacatgcagtgatggaggctcctgaaatgaacaagcgatagttgaaatactcctatgtgctcaacaagctcaatgctgagcacgagagaggtataaccaatgatatcactctgcataagtctaagaccaccaagtactactgcacggccatagataccactagacaccgcgacttcatcaagaacatgatca

SEQ ID NO: 297970 - DNA, 311 bp, Zea mays
tttttctttttttcaaatccatccatcctggggtagttctttccgaaggatgtcaggcccatttccattatcatgatcgggatcaatgggttctgcaggatcggaaggctgtttgccattgttttcctgcagagtgacgatgtcgagctcttcgccgtgaactaccccttcatcttcaccttctacatgacctacatgttcaatttcgacactgtgcactttcagttttagcaccatgaagtcaatgtgtaagactccataacccttctttttggtgagaatgatgttgctgtttttgtcttctgtaaccc

SEQ ID NO: 297971 - DNA, 234 bp, Zea mays
tcgacccactcttttttcctcgctagcctcgcggagccggcgcgcccatcgaccctgcgaagtctaaccctagatccggaccggccatggcgtcccgccgggtcgtctcctcgctccttcgttccgtcttccgcctccgtgccgtctcttccgccgatccgtgccttctcggtgctccgttccgtccgtcctcggttcgttacttattcaattatgccttcgccaactcttcac

SEQ ID NO: 297972 - DNA, 278 bp, Zea mays
ctctagttttggcgcccacaggcaaattctcgtgcactcaatcgcgagcataggcagcactgcatgcatggacgccagcggagccggtagcatggcgattaacggggcggctgggcgcaaggctggcggccccatggaagaagtcggcgtcgcggtccagcaaaggccggtctggagttccccgtgagccggatcgggcgctacctgatgaaggggcggggcgcgcagcgcgtgggcaccgtcgcccgcgtgtatctaggcgacgtgcttgagtacct

SEQ ID NO: 297973 - DNA, 320 bp, Zea mays
tcgacccactcgtcctctcaagcgcgcacccatcttctggccttttctgccgtcatgccttgtagaagcttcaagagctcgattcgatcggaaccctcgccatggccgacgaggcgaaggctaagggtaacgcggcgttctcggccggccgcttcgaggaggcggctcgggacttgacggacgctatcgcgcttgccccagacatccacgtcctctactccaaccggtcggaggcgctcgactcgttccaccgatacttcgatgctctacgcgacgcgcaaaatatcgtcgggctgaagcccgactgggccaaggactac

SEQ ID NO: 297974 - DNA, 382 bp, Zea mays
  unsure (1)..(382): unsure at all n locations
agcgaaacagcctctggccgctgcccgagcccgactccagctggccaggggttggcccgcnacaagcactccaccagacgagaggggattcccagatgcccaggggcaccagcgacgcgaagatcctgatccagaccctctgcaaggggtacgctgtcacaccaacaaatttcaaaattattgacctctacgcgggggttgcgagggccaccagccccattcaagatgcttacaagggaatggggggggggggtgtccttcaacaacttcctttcaggagagccttcatgcataggaactacagttcttgctgtttgcctccgcattcaattgaacaaagacaacaaagaattcatggacgcttcccccagaaagggccttt

SEQ ID NO: 297975 - DNA, 400 bp, Zea mays
aatcaagctgaagacggagacgtaggcggcgacgatgaagacgttctgtgtcagcacctactggtcgctgcagacagatacaacttggagaggctgaaatcgctatgtgaaaagaagctgtctgagtgcatccatgtgggcacggtagcaatcatcctgacgctagctgagcaacaccgctgccctggactgaagaagttgtgcctccattttctcagatctcctgcaaatttgagggcagtcgtagccagcgacgcctttaagcatctgagcagcagctgcccctctgttatggggggagttggttgccatgcttggcaactcagcgtagacctccatctaagcaggaaactgcacttggtgtttttttctggatcgacttgtattatcaagcggtctt

SEQ ID NO: 297976 - DNA, 395 bp, Zea mays
tcgacccactcgttctgccttctgcgcctccatttcgggctctgtcccttgcacgtgcaaggtgagctccaaccatgggtaaagagaagccccacatcaacattgaggttattaggccacgttgactctggcaagtcgaccaccacaggacacctgatctacaagctcggaggcatcgacaagcgtgtgatcgagaggtttgaagaagacgctgctgaaatgaacaagcggcccttcaagtacgcatggttgctcgacaagctcaaggcttaccgtgagagacgtatcaccattgatatcgctctgcggaagtttgcgaccaccaaagactactgcacggtcattgatgcccctagacaccgagtcttcatcaagaacatgatcactggtacctt

SEQ ID NO: 297977 - DNA, 256 bp, Zea mays
tcgacccactcgtccttggtttttgtgtactaacatgttgggcggagtgttagaatgagaggaagggcaattgaaaaagagtggctcgtagcaaccaagactctgctcagtctgggtgcaccggactgtccggtggtgcaccgtactgcgtccggtgcgcccacctgtaaacgcttacctagctattctacggactttctcccaatcttacgtattacattcaccttgctgtccgttagatcaccgcactttccat

SEQ ID NO: 297978 - DNA, 327 bp, Zea mays
tcgacccactcttctttttagagtggctaatcataaagaagagcttcttacttgagttaagagaagtcctggtcatcttgttaactacttcctctttattagccgaagaggatcgagctgcatcaacccagctgggttatgagaaatttaatcacatcattggacgaacagatttgcttaaaccaaaacacatctcatcagtgaaaacgcatcacattcatcttatatacctactatcaaatgctatatttcctgaatggatcagatcccaaattaggagccaggaccgtcacactaattaccctcttctttatatagacaatactt

SEQ ID NO: 297979 - DNA, 368 bp, Zea mays
gcggccgcccttttttttttttttttttttttttttttttttttttttttccaaaaccaccaaatagtttttatggcgagaaagactgagtacatgagaggtccatagatcacaatgaaccaggttaaaagcctgttcagcccgagatgaggaagtggtgaatgggagacgagtttgccggcctagttgtcaagcatgacagaggccctaaaaatgtcccctactacatgaaggatctaggctactggtaatcttggacatgacgtcaggtcctgtatgtccgatacgattatgccaagtggtggaggagaccagggcaggaggcggagacgcgccgtaggttgatggccttagcgttttaaggggcc

SEQ ID NO: 297980 - DNA, 458 bp, Zea mays
cggggcggccgccctttttttttttttttagcatcaaaaggctagtaatatgttttattttagagagcggactgctacatacaggggttggtttagaaagatactggcttaaattgtcaaatcccaatttcaaaattgcgaccctgaagcacgaacagacacatttcatccttgaacgctcaaattctgaccatccatgactcataggtgggataatctaccaaccacaaccgatcatgcgggaacccatgtatattactctgaaaccctgtgatgaatctattatgtataacgacacgctctcgccttatctgcttgacccagctattattgtcgaaatataggccttcctttggctattcacactgaggcaggaggtaaacatcaacctgtccggacgtattgcacaaagcccatgtgaatgccggctgatgatttcactatatttgctttgacca

SEQ ID NO: 297981 - DNA, 292 bp, Zea mays
  unsure (1)..(292): unsure at all n locations
tcnacccacgcttttgtgtttaccgacaccaagcctgcctccacgcncttcttatgccgttccgggcgcgattacaacaacaggtatgaggacgatatcaccgacctctcctgcgctccttacccgcccgtcacgcactccgatagagcactcttggaccttctgcttctacaacctgtatagcaagttcaaacaagccgtctttgggagctctattccccccatacacacctatatcaccgtataggaattcttgggactttacaataacatcaatcacccctaccaaatc

SEQ ID NO: 297982 - DNA, 326 bp, Zea mays
tctgcgctccgtcgacgttgcttaccgcctatctgggcaagcaccgccgcatgagcgaaggatcgtaaagatggcggtgccgctgatgacgcataagatcgagaagaagagggtcacgcatttcaagaggccctattttgaccggtacaagtgccttaagccaagctggctcaagcccaacggtattgactccggagtgaggcgtcagttcaagggatgcacctggatgcccaacactggatatggctgcgacatgaagaccaggcactaccttgctaacaagttcaaaaagttcagttgtttacaatggattctaactggagctt

SEQ ID NO: 297983 - DNA, 178 bp, Zea mays
tctgtatcctaaggatcaacagtatatgaagatgaccttgtaccagctgcttggcgagttggatggttttaagcagaaccaggggataattgtcattgctgcaaccaactttcctgagtacactagataaagccctaattagacctgtgcgttttgaccgccatattgttgtttccat

SEQ ID NO: 297984 - DNA, 257 bp, Zea mays
acgacccacgcgtcttttatctcgccttccgaggaaactcagcggggtaccacagacccgagcggaggaagccatgtccggtcgcggtaagggtggcatggggctcggcaagggcggcgcgaagcgttatcggaaggtgctgcgcgacaacatttatggctttatcaagccgtctattcttcttttgtctatgaggtgtggtgttaagcgcatttcggtgctcatttacgaggagacccgtggcgtgctcaagatct

SEQ ID NO: 297985 - DNA, 398 bp, Zea mays
tgagaaggagaacctcttcttccttgagacctccgcgctgcaggcgaccaatgtagaaaatgccttccagaccgtcttgacagagatctttaagatccacagcaagaagaacatggcagcggacccaagggccaatggggccgcaccatcgctggcagggaagaaggtcatcgtcccaggcccagctcaggagatccctaagagcaagtgctgcagttccatgtgacatgttgcctgaattttatttgggtttgttcgtgtccgaggtattctcagcatctttgtggatgtatatctatactggaataggcttagatttgaattgctggttaacttgatgtgcggttttgaagggaccgatttcgtaatttagatttgtcacccgacttcaagattac

SEQ ID NO: 297986 - DNA, 358 bp, Zea mays
gtcttttgttcgttcctcgcgctcggcaccaggcaccaccacacacattccaatctcgcgagggcaagcagcaggggtctgcggcggaagtcaggctggcttaagaagtactgcgtctgctaccagggaggggcaggatgctccatcaactgtaaatgcgatgattgtagaaacccatttgggagaaaagtcggcgttattttggacggtaaaagcagtcttactgcacctatactgcacgaaagaaacgggactgaagttgactcaagcgactaggaagacgacttttacatgaaatcgacagcttttcccaataccttcgtcttcggtgtttagggagtctttgttccaacaggag

SEQ ID NO: 297987 - DNA, 295 bp, Zea mays
gaagcaaggatcctttatagtcgacccacacgtctttattcttttacactccccccacccaaagcccgccattttataaaaggcgggggggacaacacacttcaataataaccttattaagcgcggccacgtgtccgccggtcactgccgtatcttcttgcacaggaagcaccctgtaggtctcggtaacacctgtggcattcaccaccaccgtattctcttttacaagtaccatccattctacttcatcaaggttggtatgcgttacttccataagctccgcaacaagtactac

SEQ ID NO: 297988 - DNA, 285 bp, Zea mays
gcggccgccctttttttttttttttttttttttttttttacaagggtattacaaaactcataaccatgtatgccttacagtcgatgttccataaaaaaagtgtagtcttaataacatcacgggttcaaccaaagtaataattccttaatgcccagccaaacattgccttattaaattacttgttcacccaccacctgcagggttgtcaacaagacaagattttttaagcttccacaaggtacccaccaagcaagcccagacccagccaaatggatcttttttttt

SEQ ID NO: 297989 - DNA, 408 bp, Zea mays
  unsure (1)..(408): unsure at all n locations
ccaaaaccaattnaatcntctttttcaactttcaaaatataaaaatcatcccgtaatattatacaaacagtgttcgccaataatatcatccnaaatcnacaaaacttcantaaatgtnaaaactctnttnctacttntaaacatgtctaacctctnncctttaacatttccttctctaaaaaatatttcccttaaccttttttaaaattacaccctcttactttaccttaaaccatttcataacatcctcctttntcaccctatacttaatcccaacactttacttccaccttctccctttatctacacttttcccaactccctcaataaccactttaaaatccattccctatatacccctttaaacatcatacctcatcccaaaatcaattttctcctttattccca

SEQ ID NO: 297990 - DNA, 387 bp, Zea mays
  unsure (1)..(387): unsure at all n locations
cggaanttgaataaccggggcgggcgcccttttttttttttttttcggcacaaaaaaggggtacataagcaccattattgatacgtccagaggtaaacgagtattagcaagctcaggctgggagttgggggcaggcaaaacagtctctgctcctgcgcaaaagctactagcttacatagcacagttgagcaaaaaaaaagtatgttcgtcttcagcgtaacatcttaagcggacttcacggtggccgcgttgatgatgtcgatgaactcaggcttcaaagaagctccaccgacaagaaacccatcgacatcaggctgtgctgctagctctttgcagttcgcggcagttacagagcctccgtaaatgatcctagtagattcagcaacc

SEQ ID NO: 297991 - DNA, 471 bp, Zea mays
acggaatttccggggcggccgcccttttttttttttttttgcataataaaaaactatgtatataggttttatttttattttttacattttagaatgggcggtgtatcacccgcctggggggggatcctagttattcgctagaaggtcggcagccggcagccatagcacatagttccacggcatgaagtggcagatctcctcgccgcgcgtcgcgttcaacatctggaagtagcggtcgtcccagctcatggtgttggcgtggcacatggcgatcgcgatggtcgcgccgtcgtctccgagcccagtcagctcaacgcggagcgcctccacgtccgtcggccggtggcagtaatggaccatgtacgggtacggcatcgggtggcacggcaccgcggtcgcggcccccgccgccttgccgatgcgtgtgacgccgtccggcgccaccacgtacctagtggcgttcttcccccc

SEQ ID NO: 297992 - DNA, 418 bp, Zea mays
tgcgggcgcccttttttttttttttttttttttaaagaagaacaactcatataatgaccaaatgtatagagataaatgtgacaaaaattattacattggggggatgtcttacatgaataaatgataacaataaagcgaactaataattattcctttgcgccataacgctgactgggagacgccacctagattagctcgtactcgttgtagacctcctcctgggctacctgctcttcaccttcaacgagctcctactcagtattatccatctgctgagtactgggtccgcagttgcttgctcgtcagggattgtgcaacgagtgggcctggccgtggccgctggattccacaaaggcgagagcaagtcccgcgagcgaatccccatgctttaaccacccttcatgctaggcttttgttt

SEQ ID NO: 297993 - DNA, 426 bp, Zea mays
cggccgccctttttttttttttttttttttttttttttttttttttttttttttttttttttttttttttttcccaggaatgatttaaattatcgaacggggggattggattacattcaaaacaacttaaaaaatactactaacaatagtccaacacgtcacaaacaaggaactaaacaaaataaccctaacaacaaacaggcttccacaacagcaaggaaaaaaggcatccaccctaccctccaaacccgaaaagggttcggccctggcccttgaacccgtaaacaacctccatggcggaaacaattttgcggggtgcgttctcggtgtaggtaacggcctcccggataactttttcaaagaaaatcttgaggacccccggggtttccttgtaaataaaccccgaaatgctcttaaacccccccc

SEQ ID NO: 297994 - DNA, 378 bp, Zea mays
gcggccgccctttttttttttttttttttttttttttttttttgcagcttaattgagtcaaggatgacaaataggtcgggcatacatagggtgggggggggggctaacaaaaagaaaaaggactcccatagccagcaaagccttcgtcttcatactaatgaaccaccacaacagcacgaggcctaggcagctacaaaatttcccaaaacatggcataaagaaaaatcgcatattgcccgagaccacgactttaacatagaaaccccaccgaccttatcactcctcccccacaatatttcggcaaaaccaagccttaccagatcacccccaccaccggtcttttagttctgtttttctttaaaatgatcacagaaggtc

SEQ ID NO: 297995 - DNA, 359 bp, Zea mays
  unsure (1)..(359): unsure at all n locations
attcccgggcgggcgcgcatctgtccctacaacnccaancatactggttctatgattgtatttatatgatccactcacgcatcatataatgtcggcaaccattggagggacgtgtggagagcctaaaaaaactatcanctacatggcacatacatttgtggtaactgcatcattcttaatcgttttccacgcaaaatgtctgtagactgatgatactgttgctatcaacaaatttttgcactacaagctctacaagaacatgtagcttctaatcatgcgatccatatatcactataattctctctccttcaatcattatttattatccaccacaatcaacatatgaactttctcttaac

SEQ ID NO: 297996 - DNA, 346 bp, Zea mays
  unsure (1)..(346): unsure at all n locations
ccggaaccaaattcccgggtgcggccgcccttttttttttttttttttttttttttttttttttttttttttttttttttttttttttttatcaggctggaaaaaaaaaattgggggttgtcacatncacacaaacataacaaaataaaggtgcccaacaacaaaaaaagaggatccacaaataaccaactacctggattcaataaacatttttacttttccatcaaataacaatttctaccggaggaaaccaaacacaacaacacctaactacaacaagacacccaaacatactagtgaaccctccaagcggagcccacccatcctaaaacaaagtaaacttttt

SEQ ID NO: 297997 - DNA, 428 bp, Zea mays
  unsure (1)..(428): unsure at all n locations
ccggaccaaattcccggggcggccgcccttttttttttttttttttaatcaacaacttaaacattttttattattttcaataaccctttatcggtgcggttaaattaacaactcggccggcatcannnnttctaaaccacacaatacttcaaaacaaacacacataacacnataccaaaaccaactctcggcaaatcaccttataatttcancacactccccttattcttcttcatcancaaacttttctattactcttcaccctcttcaccatcctctccctcatcnaactcaacaccaacctcctcttattccttctcaacctccaccacttcctcacnttcctcaaaaaactcaccttcctccatacccttaccnacttaccaattcacttaagcactctttncntacattaagtctaacttttt

SEQ ID NO: 297998 - DNA, 263 bp, Zea mays
gtccctccttgagtcgcgtggcgttgcaatcggacgatccaaagctgtgtgtgcgcgcacgttggagccatggtgaagaactacccgaccagtggcgccgagttcagcgtggctgtatacagggccaggctcaagctccgagccctcatatccgagaagagctgtgcacctctgatgctccgcctcgcgtgggactccgcggggacgttcgacgtgggccacaggtaccggcgggcaccctggacgacgacacatgagcatga

SEQ ID NO: 297999 - DNA, 360 bp, Zea mays
tttctcacactcacaaccagatctcccccaagtgcggcctttataacctcagcttgaagatgcatatctttgtgaaaaccctgaccgtcaagactataaccatcgaggctgagtcgtatgacaccattgacaacgttaaggtcaacatccaggacacggaggtcatccccccagaccagcagcgggtcatcttcctttgcaaacagtttgatgacgggcgcacgcttgctgactacaacatccagaatgagagcaccctccaccttgtgctccgcctcatgggaggcatgcagatctttgtgaaaaccctgaccggcaagactattcaccctcgaggtggagtcctctgacaccatttac

SEQ ID NO: 298000 - DNA, 168 bp, Zea mays
tctacccacgctttcttttaatcctccgcaactcgcctccggcgggagtcctttaccgaccgacgccgtgcctatcgatcgatgatgtcttacgcctacctcttcaagtacatcatcatcttcgacacaagcgttgtgaagtcgtgcctgcttctgtatttcacaaac

SEQ ID NO: 298001 - DNA, 200 bp, Zea mays
caatcctctgctctcccgaccggagtgaggcggtgcatctatcgaccacggatcgttgacagactcgacgtcttctactttctccatcatggacgaggaccacaccctcgccaactccgccagattcgtcctcaaccagtacccaaaggtagcattttttggatataccattcctcattcttctgagaagaaagtgaaca

SEQ ID NO: 298002 - DNA, 349 bp, Zea mays
cggccgccctttttttttttttttttttttttttttttttttttttttttttttttttttttttttttttttgggccgaaatcaaaaacaaataggggggggtaaacaaccatccataacaacttttttaataacccattggaaaagcggggcggacataaccaaaaagttttacaacataatgggtttaaaaccacatcgggtacaaaagtagtacataacccttactattacctaattatttttcttttagattttataaccattataatttttttcatcttaataaaatatatcaccaaccttctttttttttttttaagcgcttccatatcttaaaggatttaaa

SEQ ID NO: 298003 - DNA, 241 bp, Zea mays
aaaattcatacaacatttattcatgaataaaccatatgcggtttcacaatagttgggcgtaactataacacaacttatccattaaaccacctcattcaccacttacgacacaaaccatacaaattcttttaaagacatcaccatccattgtctaattcatatacactagataacccatttacacacagtatcttcaactactgatgtcttaataaccacctttaatacttatcaccaagtt

SEQ ID NO: 298004 - DNA, 268 bp, Zea mays
cggccgccctttttttttttttttttttttttttttttttttttttttttttttttttttttttttttttttggttggtttttcagagatcaagaaaacattacccccaaatttaataacccagtaccaaagggggggaataaagttttacaacgtaggttgtaaaccacacaccgccagttagttaaaacccgacagaaacataacacgttgggagccattcagggcaaatcacaggatagcaggggcacaaaagcccgacaacccc

SEQ ID NO: 298005 - DNA, 160 bp, Zea mays
ttgtttttcaagatgtacaccgcgaggaagaagagccagaatgagaagggtggtgagccctcctagttcgaggactccgttgcccaggctttctttgatctggagaacgggaaccaggagctcaagagcgacctcaatgacctgttcatcaacaatgcta

SEQ ID NO: 298006 - DNA, 377 bp, Zea mays
tcgacccactcttttctttctctcacagcatccatttctggggcagaggagtccctctctggggagggcacgattcccgtccacaactgccaggttactgcattcgcgaccccgatcgacaactcgccgatcatcgtctcctcctcccgcgacatgttcctgctggtgtgggacctgaccaacccgttccactccacctcggtatcctacgccaccagtcgactacttgatacccttccgccgtctaaccgttcactccctacttattcaatacttctttctatagtccgtcagtctttttacccttttcagcttctaatatttatagctatttctttattacttatttattttattaactattttacttttttttt

SEQ ID NO: 298007 - DNA, 268 bp, Zea mays
gtcatcgatctcgtttcaaatccatgcaggctcgtttcctccgtccggcagcatctcaaccccatggccaagatcaagatcgggatcaatgggttcggcaggatcggaaggctggtggccagggtggccctgcagagggccaatgcctagctcgccgccgggaccaacccttcatcagcaccgactacatgacctacatgttcaagttcgacactgtgcacgggcaggggaagcaccatgaagtcaaagggaaggactccaaaaccct

SEQ ID NO: 298008 - DNA, 304 bp, Zea mays
tcgacccactcttcctttcgccctcaaattcgttccgtccaggcggggttgatatcgagcagggaaggagaggtgaagatggctcgtacgaagcataccgcccgcaagtccaccggaggcaaggccccgcgcaagcagctcgccaccaaggcggtgaggaagtcggcgccgactaccggcggcgtgaagaatccccacaggtacaggccctgcaccgtggcgctgttcgagatccgcaagttccagaagagcacggtgctgctcattcggaagttgcccttttcagtgcctggttcgtgagatc

SEQ ID NO: 298009 - DNA, 352 bp, Zea mays
  unsure (1)..(352): unsure at all n locations
tcgacccactcttcctttctccctagcaatctctatcatcagataggagttctttgcaaagcggtagacttcctactctcccnatgtcccgcacgaagcatactgcgaggaagtccactggcgacaaggcgcctatgaagcatctgtccacgaaggcagttcgcaagtctgccccggctaccgtcggagtgaataagccccaccgtttccgccccgtcaccgtcgcgctccgttagatccgcaagttccatgaatagcacggagctgcttatccacatgcttccgttccagcgcctggtgcttgagatctgcccatgattttcaagaccgaccttctcttccagagctcctt

SEQ ID NO: 298010 - DNA, 441 bp, Zea mays
ggaatctttaaaagtgaaccaacgcgtccgctttgcttgcaatctccgaagcctccgtcggggggagcatcgatcatgtcggcctactgcgaaaagtacaaggatgagctcatcaagaatgctgcctacattggcacccctggcaagggtatccttgctgctgatgagtccactggcaccattggcaagcgcctttccagcatcaatgtcgagaacgttgaggagaaccgccgtgcctctcgtgagctcctattctgctgccctggtgctctccagaacatcatcgttgtgatcctcttctaggtgatccctgttctataagaccaagaattgctagtcttttcttatattatacataaggacgttgttatttattctattttatttatttctatctttttttatcctttctatctattttacttatatctttccaaattt

SEQ ID NO: 298011 - DNA, 468 bp, Zea mays
tcttttaaagtggaccaacgcgtccgtctaccgtcaagaagggtaagcccgacctcaggaagaaggtcatgcccgccgtcatcgtccgccagcgcaagctgtggcgccgcaaggacggagtctacatgtacttcgaagataatgctggagtcattgtgaaccccaagggcgagatgaaaggatctgctatcactggacctattggcaaggagtgcgctgacctttggcctaggattgctagtgcagcaaatgctattgtctgataccaccggttgggaggctagttgaaaggatctgctatcactggacctattggcaaggagtgcgctgacctttggcctaggattgctagtgcagcaaatgctattgtctgataccaccggttgggaggctagttgagatagttttcttgtgatccattttaaccttttctgtacttaaacatctgtggaaatttacttgattaat

SEQ ID NO: 298012 - DNA, 314 bp, Zea mays
ttgtcgaggcaaaagcattgcgaccacagacagcgcgcgcttcaaggcctttttttttgagataacaaggaggagaggaggagatggcggtcacgatcacgtgggtgaaggcgaggcagatcttcgacagccgcggcaaccccaccgtcgaggtggacgtgggccttagcgacagcagttacgcaaggggggctcgtacccagtgggccatgcacttggaatatatgatgccttggagttgagggatgttttacttcttttttgacaactgaattttttagggcgaccgggtttgtttttttattatgtgtgct

SEQ ID NO: 298013 - DNA, 349 bp, Zea mays
ctgctctccgaccccgagctccgaaggccgcagcatcaggcgcggcccccctcgcgtgtgaccgagatggcgctgccgaatcaggggaccgttgattaccccagcttcaagctcgtcatcgtcggcgatggtggaactggtaaaactacatttgtgaagaggcatctcactggagagtttgagaagaaatatgaaccaaccattggtgtaggaaggtcattcgttggatttcaccactaactgtggtaagttctgtttctactgctgtttatactgtagggcaggtgttgttagttgttcttttttttgattattatatttatggttatgttttattttatttcttttt

SEQ ID NO: 298014 - DNA, 423 bp, Zea mays
tttgcaggcacccatgtgcacagtccattcttttccacacaacattgaccattgcttgacatgggcccgttcagagtttgagggtttgctagagaaaacaccaaatgaagtaaactcttttctgtctaatcctgctcaatatgctgctgtcatgaggaaggcaggtgatgcccaagcaagggaattacttgaacgtgtctccgaatgtcttgacaaggagcgatgcaatacatttgaggactgtataacttgggctcgattgagatttgaggattatttttcaaactcgcgtaagcagtttacattcacttttcctgaagatgctttttactagcacaggcattttttttttggtatgcttctaattgtttttccctctctttgttattttttaatcctgatttatcttatattaattttttt

SEQ ID NO: 298015 - DNA, 203 bp, Zea mays
ttgtcaacagcactacgtctatttactctagagggcagaacaacaggaatgagatcatgagggcggggcggggcccaataggcttacggcgattggcacagacgccgatgcagagccatatacgccagcctttagtggctgcccccaccggcgacgggtcatctaccggcgccggtgcatctgccacatccggtttacctggc

SEQ ID NO: 298016 - DNA, 412 bp, Zea mays
gcactatgcaatgcagaaaagacaacagaggctattgatctactgcatatgatgcctgaaaaggggattactacagatgttggaatgtataatatgatattttctgctcttgggaagctgaagcaggtgtctttcatgagcagcctctatgatacgatgagagccaatggtgttgttcctgatgttttcacgtacaatattatgatttcaagttttggtagggttggcttagttgataaggcatctgaactttttgaggaaatggaggatggcagttgcaagcctgatgtcttcacctataatataatgataattgtcttgataaaaatggagatttctatgaagctcacatgtttttaaagatatgtatgataaaggatatgatcctgatgttttacttaaagtatattgt

SEQ ID NO: 298017 - DNA, 249 bp, Zea mays
tctgtactatgcaatgcacaaaatacaacagagactattgatctactggatagggggcctgaaaaggggattactacagatgttggaatgtataatatgatattttttgctcttgggaagctgaagcagttgtctttcatgagcagcctttatgatacgatgagagacaatgaggatgtttctgattttttcatatacatttttatgattctaagttttggtaggttttgtttttatttatgtgtaggg

SEQ ID NO: 298018 - DNA, 438 bp, Zea mays
cgaatctcagagcaagcatggtgagcacaattcttccagttcagattcgagccaatcaccttagtggtgattgccattacaaacgtgaattgttgcgtggtttcatgaagataaagggtcatgagcctgaatgtgtcaaaaggcgggctctgatgtctgtgaaaaacaacccatactgctcagagggtgctgcaaaagatgcaattgatgctgtatgggatatatgctacaatgacacacgcccatttgatagagccccatgaaatcttttcagaacctgggatacattagctattttgtgcacacctgcattgatgttctgatcccttcagaaacttgtacttcagcaacctttgtcagcaaagtacagaaattttctgctgtagccaaggcgtgctgcatggcgcgatgagtctgcacacactgtaacgatttaat

SEQ ID NO: 298019 - DNA, 307 bp, Zea mays
gttaaaggatgggtacaggagctcatctgggcaggcagtgaactagtgcattgactcaggttcaagacactttcttcttatacacggggctgttgcgacataagggaagatcatgcttgactggaacccgaatggcgacaggggaccgatcactgctgtttccaacctagtgaccatgcacaccccaagagaggatgacgagccgctcacttctgtcttagcacctgctgaggttgaaggaacaaactgcagtccttgaatgaggaggtgatcatggactacataggcttgtatggtacgatcatga

SEQ ID NO: 298020 - DNA, 302 bp, Zea mays
tatttttatcccatttgaaatcaacccatggggggtttcttcgtctagcagggtctgaccctcatggccaagatcaagatcgggatcaatgggttcggcaggatcggaaagctggtggccagggtggccctgcatagcgactacgttgatcttgacgtcgtgaacgacccctttatcagcaccgatttcatgacctacatgttcaaattttacactgtgcacggacagtggaagcaccattaggtttaagtgaaagatttttaaaacctcttttttttgtgtaaaaagtagattcttggttt

SEQ ID NO: 298021 - DNA, 311 bp, Zea mays
tctttataatgtacgtcaaagagtaaacgtgggggtgatccctagaatagatctacgagctttaactagtaaacttgaaggggagtctgtaaagaagaaagcatttgtcccaccaccacgattcttcaatatcgatgaggcgagggagatgcatattcgtgtggaacggaggcgagataaagaatctggggagtactttgagtgggttgataatttgaagttcaaagatggtttcttgtacaaatctgtcttcactaaatcgatccacacaaacaatattcaagcgagtggagactaacttgagaagttta

SEQ ID NO: 298022 - DNA, 148 bp, Zea mays
tcttccacgcgtccgcgcacacacacacaagcgcggatctcccccaaatgcaccgctgcggcacctccgcttcaagatgcatatctttgtgaaaaccctgaccggcaagactatcaccctctaggtggaggccttttgaccaccattt

SEQ ID NO: 298023 - DNA, 411 bp, Zea mays
ggctggaatcctttagagtggacccacgcgtccgtttcattgtccctttacttttgatgaactctgggaacacccatgatgacacacagaagattgttgagaagtattccaactccaacatcgaaattcatactttcaatcagagccagtatcctcgcattgttaccgaggacttcttgccacttcccagcaaagggaaatctgggaaggatggctggtatcctcctggtcatggtgatgtgtttccctctttgaataacagcggaaaacttgacatcttattggctcagggcaaggagtatgtctttgttgcaaactcagacaacttgggtgctatagtcgacatcaagatcctaaaccatctgatcaataaccagaacgagttctgcatggaggttactccaaagacgc

SEQ ID NO: 298024 - DNA, 358 bp, Zea mays
tttaaatcctttttcattatgaggttaccaggcttaagttatttgttgcaaaatttatgagccttgatcaaaatgtataatgcttccccctttatgtccttaaaaatgaatgcatcgaaatcatttctttaaattacttgatgcatatctttagggggagtccattattatattttgattatgttgagactattgctttatcttagtaatttcatatagtctcttgcatgagaataatgtttctcatatagtatgctgcttcacatcaatcaaacttgttaaagtaatatcgcttttgtcaaggattgttgcttttatttctaaaagtagcatgcttattggattcttctatttttaa

SEQ ID NO: 298025 - DNA, 418 bp, Zea mays
tcgacccacgccttcggtttgatcgggccccgcttccagaacttcaaggaggttgtggtaccatggggctgaccttaacaaactttttaagccggttcttttccaagaaggagataaggtccctaatggtgggtctcgatgcacttgtaaaaaccacaatcctttacaagctcaagctccggagaaatcgtgaccacccatccttacaatcggggttaaatggggagactgttgaatacaagaacattaacttcactgtctgggatgttggaggtcaggacaagatcaggccattgtggaggcactattttcagaacacccaaggccttatctttgttgttgatagcaatgacagagatcgtgttgttgaagcaaaggatgagcttcacaggttgctggacgaggatgaattgaggga

SEQ ID NO: 298026 - DNA, 364 bp, Zea mays
tcctttaaagtggaccaacccgtccgtctttttcctccccttttaaccaagacctcttggggttagggttacttaggggggtgtggagggtccattgcaacaattgatgtggagtaccgttgcttctcggcaggcttgtctgggccaccagcaacgagtcgctggagaatgcctttgcctaatacggcgagatcctcgacttcatggtcattaccaaccgggggacggggaggtttggttgctaccgcttcttgaccttgtccaacaagacttcatgctttaaggttctctgagcttaaactgctaggagctcgcctgtcgtgacatcacctgtatccaatgcacttagccatgcatttatcac

SEQ ID NO: 298027 - DNA, 389 bp, Zea mays
agcacgacgatgcacgcacgcgtacagcaggcgatgcgctctagagagagaccgcacccacgcgtccgacatcctccaaagccactcccaaacccccgcttgcagaaccttctcgaagctccccgccgcctcctccactcgcaccgatggcgaaggaaccaatgcgcgtgctcgtcactggcgccgcaggacaaattggatatgccctggttcccatgattgctaggggtgttatgcttggtgcagaccagcctgttattctgcacatgcttgacattccgccagcagctgaagcccttaatggtgttaagatggagttggttgatgctgcgtttcctcttttgaagggagttgttgctacaactgatgttgtggaagcctgcactggg

SEQ ID NO: 298028 - DNA, 215 bp, Zea mays
tttttgttgagaagaatataactctcattagtgcggtttttatacagtgaccgggggtgatctacactcaccaccaattacaagtaacatataccgtgaacttcacactgtattcaaaatcctccaccgatgcatatgcattggtactcttgacgcttacaaatgatctaattcatggactttatcctgaggctctcacaatgtataaaaatttt

SEQ ID NO: 298029 - DNA, 397 bp, Zea mays
ttttccaataaataaactatacccctggctggcggcctaaatacagaggggacggggaacacccaaaagcgctagcgtctccaagatagtgctgcaaaacgacattgacttactcaatttaccgtcataacttgagatgctaacccccaagaagaagcggctagtccagtcccccaactccttcttcatggatgtcaagtgccaaaactgtttcagcataaccactgagattagccactcccagactgtggttgtgtgcccatactgccaaactattctgtgccaacctacacatggtaaggccaggctcacctaagggtgctccttccttcaaaaagtcgattaggtcctgcttcccttaacctgagaagagataaacttggcgctttgcaacttt

SEQ ID NO: 298030 - DNA, 317 bp, Zea mays
tcttttattccctagccgcctcctgcaagtttgggagggtatgaatatgcgccagggcgagtgagacggacacctttgtatttcaggctgtgatcaaccagctgctctcactcatcatcaacaccttttactccaacaaggagatctttctccgctagcttatctccaactcttctcgatgcgctgtacaagatcaggtttgagagtttcactgacatgagcaatgctcgatgcgcaaactgttcttttaattcaccttgtcccacacatggccacgatcacgctctttaccattgatagcggctttggaatgatca

SEQ ID NO: 298031 - DNA, 369 bp, Zea mays
tcgacccactttttctttgaatccctcgcatctcattcgggggcttggttttataacaccagggcgagacctcaccattcttattcattgcgcccaaggcgtataatattccctctgctaataacccatcggaggatgagccccctgtcgctattgccccggctgtgaagaagcccaattcctaaaagctccttccttttgtctattctttctgtaaagaatgactcgacaatatgggctataataaggctaataagtaactgttgaccttcatgatctacatatttaaggtgcttatatatttccactccttcatttccttattttccaaggtcatgtccatcatgaactacttcattaactacatct

SEQ ID NO: 298032 - DNA, 323 bp, Zea mays
tttgtttctcaaaagatgctgataagatcagaacgaaaatggctgttgcctagggagtatgacgtgtctgggttggacaaaacagtcttatgtctactcctgctgtatctgctgtcatgcgcgagagaattggcgcgaatggatacaacgggtactggtgcctctatgttcacagcgagccatctcccatgtggtcctacggaggactataggctgcaatgctatatgactaataggggacctgaccgtgaatgcgggaccgacgagactatgtctaatacaacgactatctctgaatacctcatctctgaagacctttccag

SEQ ID NO: 298033 - DNA, 397 bp, Zea mays
ccacgcgctcactattttcctcacccgtcccaacaatttcggacgggtacctgcaagcctaccaggtgttcactctccaaaattccatgtgtccagaacaaggctaatcatctacattttgcctaagactatgaccattaatgacgtaaagaagctttcagagaagcagtcatttttcgtgctacaaaacaaaatcctgtcatccggaaggtgaatatcctgaagaatgaaaagaaaggcatacataagcattcacgcggtgtagcctttgttgattttcaagaacatgaacactctcttgttgctctaagggttctaaacaacaaccctgaaacttttgtttcataacgtcgcccaattgtagagtttgcgcttgaggatgttgaaaaggtgaggc

SEQ ID NO: 298034 - DNA, 328 bp, Zea mays
ttttgttttctccccaacctagccacccagggggagagaggccataagtagggggagagtcacttcatggcttacattgacgcttacagtagggccgctactatagttcgcgctcttgagaagcttatcgcatccacctcctttctcggaactggctccgccttcaggcccgacgcaacattccgtggcctccgatgttacaacacccacgctcatctccgactctacgaggaggccctgtcggaagacgattgactacccgagtacgataggcggtacggaggccacaactaccctgtgcccatgctgtttttaaaatatttttcgt

SEQ ID NO: 298035 - DNA, 386 bp, Zea mays
  unsure (1)..(386): unsure at all n locations
tcgacccacgcttctgtttaaaagcatngcgaccacatacaggggtgtctacttttgcctttggggtggggataacaatgacgatagtatgagatggcggtcacgatcacgtgggtgaaggcgaggcatatcttctacagccgttgcaaccccaccgtcttggtggacgtgtgccttatctacggcagctactctaggggggtcttacccattggcgcattcactggaatatatgatgccttgcagttgagggattgaggatctgattatcttggcacgggtgttcttaaggctgtcagcaatgtaaattacatttttggaccatcaattgttgtaaaggacctcactgagcaggttgagatttacaacttcatggtccatcatct

SEQ ID NO: 298036 - DNA, 308 bp, Zea mays
ttcgaggcaaaagcattgcgaccacatacagggcgcgcttcaaggcctttgtgtttttgagataacaaggaggagaggaggagatggcggtcactatcacgtgggtgaaggcgaggcatatctttgacagccgtggcaaccccaccgtctaggtggacgtggtccttagttactgtagctactcgaggggtgccttacctatcgttcattcactggaatatattaggccttgtttttgttggataggtggatcttattttcttttcattgttatttttattgtgggatttatttgataattaattttt

SEQ ID NO: 298037 - DNA, 417 bp, Zea mays
tttacccgcagctcgctcccaccaaacccacagccgaacaatggcgtcggcgtccaaggaggatgttatcgggaagctcaacgtccgcgtggtgcggggcaacaacctggtcatcgccgacccgctcacccacaccagcgacccctacgtcgtcctccagtacggcgctcagaaggtgaagactagtgtccagaagaagaactccaatccagtgtggaacgaagtactgcagctctcagtaacacatcctacgaagccagtgcaccttaaatatggatggtatggaaccatgtctgccattggtccgctgatatcgccgtcacaaatacgaacaaattgaccgcatgtatttctaactacgaaacaaccaggaaaaccgactcttgatttctgaattgctccgctaatgccacacag

SEQ ID NO: 298038 - DNA, 425 bp, Zea mays
gaaaaatatccccaaaccctagctcccgatctcgatggcgaaccctcgcgtgttcttcgacatgaccgtcggcggcgccccggcgggccggatcgtgatggagctgtacgccaacgaggtgcccaagaccgcggagaactttcgcgcgctgtgcacgggcgagaagggcgtgggcaagtccgggaagccgctccactacatgggctccaccttccaccgcgtcatccccgagttcatgtgccagggcggcgacttcacccgcggcaacggcaccggcggcgagtccatctacggcgagaagttccccgacgagaagttcgtgcgcaagcacaccgcccccggtgtgctctccatggccaacgccgggcccaacaccaacggtctccagttcttcatcttgcaccgtcgcgaccccttggctcgac

SEQ ID NO: 298039 - DNA, 198 bp, Zea mays
tcgtcttcgatctcgtttcaaatccatccaggctggtttcctccgtcccgcgaggatgtcaaccccatggccaagatcaagatcggtatcaatgggttcggcaggatcggatggctggtggccagggtggccctgcatagtgacgatgtctagctcgtcgccgtgaacgaccccttctttctgcaccgacttcatgtc

SEQ ID NO: 298040 - DNA, 336 bp, Zea mays
cccgatcgacaccatgagggtgttgctcggggccctcgctctcctggctctcgctgcgagcgccacctccacgcatacaagcggcggctgcggctgccagccaccgccgtcggttcatctaccgccgccggtgcatctgccacctccggttcacctgccaccttcggtgcatctcccaccgccgttccacctgccgacgccggttcacctgccaccgccttgtcatgtgccgtcacctgttcatatgtcttcgtcaccatgccattactcttctataccgacgtgggcttaacctcattcttagtcacacccaagcctcgtgccaacagactaatt

SEQ ID NO: 298041 - DNA, 284 bp, Zea mays
  unsure (1)..(284): unsure at all n locations
tcgacccactcgttcgtccacgcgttcgcccacgcntccggttagctgtggtatttctaccggggttggtgcatcaattaatgttgcaaaacctccgaagggttcgacagtggctgttttcggtttaggagccgttggtcttgccgcttcataaggagcaaggattgctgtatcgtcaaggatcattgttgttgaccttgaaccttaacagatattatatagtttggaagtattaattttttatttattgtttttacattatttttacattcttattctttttt

SEQ ID NO: 298042 - DNA, 341 bp, Zea mays
acttgttacccggagtggcggccgcagtcgcaagcgcggacgcatggaggccaaagtcgagcgaaaccaacttgcggctgggattgaagcaatgtcgtcggacgacgaggtcagggaggagaaggagctcgacctctccttcaacgatgtcgtcaccaagtacaagactgtcgccgaaatcctgaacaacgctctgaagctggttgtgtctgagtgcaagccaaatgcaaagattgttgtcctttgtgagaagggtgactctttcataagagagcaaactgggaatgtcttacaagaatgcaaagaggaagtttgtaaggggcattgattttccatcctgt

SEQ ID NO: 298043 - DNA, 238 bp, Zea mays
ctatccagtcgacccactcttcctttaactccacggctcgacgagatggacacgatgatcttagggcgggctccgcttctgctcctggtctcggcactactcgttcagatccgagcctacgacccgttgctataccagccgtttgatgatgacttcaagggtagatcgatcgtctgcaagaacgatgaataccaaggtgtatggaagcatgccaagagtgatggacatgatgactatg

SEQ ID NO: 298044 - DNA, 215 bp, Zea mays
ttattcattttcctcagccgatgaatacatgcggaaggttccattttttgacgaggattgggcaagatagaggaaaaatgctgaatctgccggagaagttctgcggtatgttggagtggtggatgtggtcagtaagaaggagcaggtggagctgttagcctacacgagggaccacccgttcgtgctattatctggttccgacaacatcatagcct

SEQ ID NO: 298045 - DNA, 245 bp, Zea mays
ctgaaatgccatgggcgcctccaaaccgggggcggacgatggccacacgccggggatcaataaagctctcgcttactaccacactatgccacttcgcgaagctaagagcgcgagtgtcatgcacgagatccggctgaccgaagccagccgtacccgcgccaagaagaacagcgccctcaccctcagactggatgactgggtactttgccgactgtacaacaagaacaaccagtgggagaagatgc

SEQ ID NO: 298046 - DNA, 428 bp, Zea mays
  unsure (1)..(428): unsure at all n locations
agagcatcgtgctcccgagcgcctacatctgcaccgtcacgctggtgctgcacgtggtactcagctgggtcgtcgtctacaaggtcggcatgggcctgctgggggcctccctgctgctcagcctcagctggtgggtcatcgtcgccgcccagttcgcgtacatcgtgatgagccccaggtgccgccacacctggaccgggttcacctggcaggcattctcgggcctgtggggcttcttcaagctctccgccgcgtccgcggtcatgctttgccttgagacctggtactaccaggtcctggtgctcattgccgggttgctccccaaccctgagcttgcattggatgccttgtccgtatgcatgactgtcnaatgcgtggtgttcatgatcgcaangggattcaatgctgncgctagtgtgagagtgagc

SEQ ID NO: 298047 - DNA, 330 bp, Zea mays
tctggcttctcctccccctcttaccaagtcgtcttcgggttagggttacttagggttttgtggaggggcgatggcggcggctgatgtggagtaccgttgcttcgtcggcgggcttgcctgggccaccagcaacgagtcgctggagaatgccttcgcctcctacggcgagatcctcgacttcaaggtcatcaccgaccgggagacggggaggtcttgcggtttttgctttgttaccttcttctccgagaactccatgcttgacgctttctagaacatgaacggctaggtgcttcgacggtcgtaacattacctgctaacccaggccctagt

SEQ ID NO: 298048 - DNA, 361 bp, Zea mays
gaaaccttcccccaccacacaacaaatgactgttcagcagcaaaaggagtgaggttgccaagcccgatggacgacaaaatgagatgccaaaaatccctagaaaaactgcaggtgcagaggatatgctggacggtttcctgttcctgatcacataggggacaacacaccgggtattgcaaccctctcctttgaagtctgtccgcagtccaacatttattccttatagccaaccaaaggaaaaacttgcatttaggcggagcccaagtcttccacaatcgtttccacggctcaaaggagatggaccccaagaagaaggcattataacaggactttgaggataacttgccagaaaccatgtgcc

SEQ ID NO: 298049 - DNA, 395 bp, Zea mays
tcgacccactcttcctttccttctgccttctgcgcctccagttcgtcctctgtctccttgcgggttcaggctcccctccaaccatgggtaaagagaagtcccacatcaacattttggttattggccatgtcgactctggcaagtccaccaccacaggacaccttatctacaagcttggaggcattgacatgcgtttgatcgagaggtttgagaaggatgctgctgaaatgaacaagcggtccttcaagtacgcctgggtgctcgacaagctcaaggctgagctttagagaggtatcaccattgatattgctttgtggtagtttgagaccaccaagtactactgcacgtgctttgatgcccctggacaccgggaacttatcaagaacatgatcact

SEQ ID NO: 298050 - DNA, 341 bp, Zea mays
ttgctttttctccccctcttaccaagtcctgggcgggttagggttacttaggggtttgtggaggggctattgcggcggctgatgtggagtaccgttgcttcgtcggcgggcttgcctgggccaccagcaacgagtcgctggagaatgccttcgcctcctacggcgagatcctcgactccaaggtcatcaccgaccgggagacggggaggtctcgcggcttcggcttcgttaccttctcctccgagaactccatgctcgacgctatcgagaacatgaacggcaaggagctcgactgccgtaacaataaccgtaaccaggcccagtcccctggcggtggtggt

SEQ ID NO: 298051 - DNA, 287 bp, Zea mays
tcgacccactcttccttcttcactgcctcgtgtggccgtcgtctcgcgttcttaacaccaagcccgggctcctactaaatggcccccaagcgaggtggcagggcgccggtgccggccaataagaatactgataatgtgactaaccctttattttagaagaggccgtagcatttcggctatctgcggcgcgttgccgtccaagaaggacctgcaccggttttgtcaagtggtccaaggtcttgcgtattcagcggtagtttcttattctttagcaatgccttatggta

SEQ ID NO: 298052 - DNA, 355 bp, Zea mays
ttgatttcgttactgaagttctgatcttgagcagtgtgcaccacccgaatgggtgggaagctcgttggacattgcactagtcatgatcagaggattttagtttatgagtatatgcctttgggttcgctaaacagtcacatccatgatcttccccctggccagcagcctcttgactggagtacaagaattaagatactgcttggtgctgctaaaggtcttgagcatttgcatcacaatctcaaccctcctgtcatcaatcgtgatgtgaaatgtgcaaacattttgctcggatcggtgtaccacccgaagctgtctgactttggcttggcaaagctaggtccaactttttacaaca

SEQ ID NO: 298053 - DNA, 414 bp, Zea mays
tccacacagaaaaccctagccgccgccaccgaagcggcctcccaggtaagcaggatcgtccagcccgccgccgccatgaagcgcaatccccgcgtcacgagctcccgccggaagtgccgcaaggcgcactttacggccccgtcctccgtccgccgcgttctcatgtccgcggggctgtcgacggagctccgtcacaagtacaacgtgcgcttcatcccgatccgtaaggacgacgaggtgcaagtcgtgcgcggcacctactttggccgttaggggaaggtgtttaatttttacttttatatttttcttattttctttatattttatttatatttattcttttatcttttcttcttttatctctattagtttttatattcatttataaatgtataatttgattatatttttttt

SEQ ID NO: 298054 - DNA, 134 bp, Zea mays
tcttctacacagaaaaccttagccgccggcgcggaatcgttctctcaggggagcaggatcttccagcccgccgcctccatgaatctcaatctctgtgttacgagctccctccggaagtgcctcatggtgcactt

SEQ ID NO: 298055 - DNA, 103 bp, Zea mays
tttttatacatcatacccagcatcactgtagcgggtgatgcttttggcaaagtgctgtctgtcctcaatggaaagtttactggaatgtctttccgtgtcccaa

SEQ ID NO: 298056 - DNA, 364 bp, Zea mays
tgtaagcaagaaaactagaaaaggctcctgcgggccgcaacgccccgcatgggggtcgaccccgacatccccgacccgatggcgcccaaggcggagaagaagccagcggagaagaagccggcggccgaggagaaggcggagaagacgaccgcagggaagaagcccaaggccgagaagcggctgcccgcgtccaagtcctccggcaaggagggcggcgagaagaaggggaagaagaaggccaagaagagctgggagacctacaagatctacatcttcaaggtgctgtagggaggtgcaccccgtcatcttgtatattctccaaggtcatgtccattattgacttcctttatcaactaactttttt

SEQ ID NO: 298057 - DNA, 384 bp, Zea mays
tcgacccacgcttcctgatttctacccaaaacacattctgcgatcctagaatcctccgccgagcatggatcatgtccgcctatctgccaaagaactcggttaagctcataaagaatgctgactacataaccgcccctggcatgggtatacttgctgctgatgagtcaaccggcacgataagcatgcgcctttacagaacaaacgttttgtactcaaaggagaaccgcactgctctgcttaagctgcagtattgatcatctggggcgctacatttcaccaagctcggggtcactataaaagtgattccttagcatgtgtctcgtaaagaggatgttttttcatttgagaaattacaagggtgcgacattctttttgttccagaga

SEQ ID NO: 298058 - DNA, 311 bp, Zea mays
tcggcggcggcggcggcggcgaccatggctgtcgaaaagaacaagaggatcttcaagggaaagaagggcggcaagatatagaccgcaaatcctatgtttaccaatgacaaggatgacattaagtgtacctcccaggtcatgatcatgaaccacccttgccagattggtaatagctttgccccagttatggactgccacaccttacacattgctgtcaagtttgctgttctctttaccaaaattgatatgcgatcccgcaaggagcttgtgaaaaagcccccatttttcaaaaacagagattctggtatggt

SEQ ID NO: 298059 - DNA, 237 bp, Zea mays
ttaaatgcgacccacccgtccgtgtttactttaaggccaaaatccaggacagggggggcattcccccagaccaggagtggtttatttttgttggaaaacagtttgtggacggtcgcacgcttgctgacttcaacatccagaaggggagcaccctccaccttgttctccgcctaaggggaggcatgcaaatcttggggaaaacccttaccggcaaaactataaccctggaggtggagt

SEQ ID NO: 298060 - DNA, 450 bp, Zea mays
tgtcgacccacgccgtccgtgtcattcgatctcgttctcaaatccatcccatcgctcgtgttccttcccgtcccgcgaggatcgtcataccccatgtgccaagtatcatagatctgggatcacatggtgttcggctaggatccggaagggctggtggccacgggtggtccctgcagtagtgaccgatgttcgagactcgtctgccgtgaacggaccccttcatcagcatccgactacatgacctacatgttcaagtacgacactgtgcacggacagtggaagcaccatgaagtcaaggtgaaggactccaaaacccttctctttggtgagaaggaggttgctgtgtttggctgcaggaaccctgaggagatcccgtggggttcggttggtgctgaatatgttgttgagtctactggtgttttcactgaccaggagaaggctgcagctcac

SEQ ID NO: 298061 - DNA, 398 bp, Zea mays
ttaatggtttaaaagcatccaccaagcctaagactacgaagggccagaaatctggtcctcagacccctttgggttttggttctccgggcaatccttctactcctgttggtggctgccgctatgatagctccctcgggctcttgacaaagaagttcctgaacttgctaaaaggtgcacctggtggcattgttgatctgaataatgctgcagaaactctagaggtacagaaaaggcgtatatatgacatcactaatgttcttgaagggataggactgatagaaaaaaagcttaagaacaacatccgttggaaaggagttgatgactctcgacccggagaagttagtgatgatatgtccattttacaggcagatattgatgctcttacactgcaagagcgc

SEQ ID NO: 298062 - DNA, 403 bp, Zea mays
tcgacccactctttttttttcacgcttgataggagaggaagagcgcgcttatagtgagagcgggggggaagcatcttctgtgggcaagattgtgcagcggctcacctaccggaagcggcatagctactccaccaaatcgtacctgacccgcttcgtcaagacacctgttgggaaacttgtgtaccagttcaccaagaatcgcgcgagcggtccgaagtgcccagacaccgggaagaatatccaaggaattccactcctgatacctgcttgtttacaataggtccatgttggctaggaaccatatgactgtgtatcgtccatatggtggtgttttgtctggtactgtagttaggtataggatattccgtgcctttttggtcgagtaacataattatagtgaatt

SEQ ID NO: 298063 - DNA, 285 bp, Zea mays
gcggccgcccttttttttttttttttttttttttttttttttttttttttttttttttttttttttataaaccgaggggcactttttaataaagaccataatgggaaatgaaacttaaagcattcctcggtacagggggtaaacaaaacctgctctttaaagcgtggccttcctacaaattattttgcataaagggtaaacttttcccaaggaaaaaaaagacctatttcgcctttttaaagagttcctttcatcaaaagggtgacggttcaaaattttccggtt

SEQ ID NO: 298064 - DNA, 327 bp, Zea mays
gcggccgccctttttttttttttttgtttggatcatcacaaataacacactgactagcaatttcggatttaaagatcgcatgcagatgtgtgaacaaaactatggcaaactcacctgctggttcatatcaacatgaggcctgctatggcttgtgtgagcgctacaggtgtacgaagcaccaccaggcacatagctccaaaacccatgcagcgatgtaagaactcacctactgtttattctccttgaagagggcgaggagggaaacgccagagaccttgaccaccttgaaacggacaccaggcatatctttgacatggaggcccttac

SEQ ID NO: 298065 - DNA, 238 bp, Zea mays
gcggccgccctttttttttttttttttttattcacaaaaacatcacaagtataatatcactcacatctatatcatttacagatagcttgcttgattattcacaaaagctccagagatgatcagccacaataagttctagtttacaatgaacaatttaaaattaaacatcattctaatagtattgtctcagcaattcattgtactccccagtttgctggcttgtgctcaaatttccatc

SEQ ID NO: 298066 - DNA, 406 bp, Zea mays
gcggccgccctttttttttttttttttttcttttttgcagcattctcttgggtgggagattaattacctgccaatcctttgtgtgcacactcggagaaagtgccgtccttgggctgggactcccaacccttggcgttggggaacacggtctcgcctccctcgcggacggtggacaggtacatgagcacggtggcgtagcggtggccgccccgggcctggttgaccctgtcgtggaagtagtcgaagtgcggctcgtacttctgccccggctcgtagcgcagcacctgcatgttttcggcgttctcttgaggaagaaacgtccatgccgcgaccctctcctcgatccgactcaccaccgggtcctggcgcttgtcgaggaacatgccggagctggtgcgcacctcgc

SEQ ID NO: 298067 - DNA, 284 bp, Zea mays
gcggccgccctttttttttttttttttttttttttacaacagaaactactgcgaatgagcttgtattattcaaaattcaggtacaatcactgtgtctaccagaaattcaatcacccacagtcacaacattcgttgcatgctttcgagcgctttattgcataagcgatggattacacggctattgctgctatttttccactgattgtctttctcagagtcatgtcccctaaccagtccccgacttttaagaggcgcctagcctagccttcgaagccgtaaagggt

SEQ ID NO: 298068 - DNA, 358 bp, Zea mays
gcggccgccctttttttttttttttttttttttttttttttttttttttttttttttttttttttttttttttttttttttttaaaaccaaacggttttgttgggtaaacagaataaacccgggggacacaacacaggttcttaaaatttaaggggatattattggcgattacacacgataatttgtctgctaaaaaatataggaaacagcccttgttgatgataaaaaagccaaaacttgcagcattttgacgaaaacaggaactttagtcttcaaaaagggtgaagcccattttcctcgtccgatttttttttagggtccttatccttttttttttttttgggagcaagtttaagc

SEQ ID NO: 298069 - DNA, 400 bp, Zea mays
tgtcgttgtgggcgacaaggaggcgtccggatctggcgacaaggcggcgtccggatctggcgacaaggcggtggccacgggaaacctgccgtgcatggatcgcctccgggaggagctctcttgcgctatttgcctggagatctgctttgagccgaccaccacgtcttgtgggcacagcttctgcatgaaatgcttaatacatgctgcatccaagtgtggaaaacggtgtccaaaatgcaggcaattcatcagcaactcaagatcgtgcaccatcaacacagtgctctggaacaccattcagctgttgtttcccggtgaagttgaggcaagaaagaattcgaccttaccatgcgatatggacgcgagccggagcccactcatagcttataggctatcacaa

SEQ ID NO: 298070 - DNA, 349 bp, Zea mays
cggacgcgtgggcctgctccattctcagccgccgccaatcccttcccgtgctccgcaaccgctgagtgagaagaagagatggccggcaagggcgatggcccggctatcggcatcgatctcggcacgacgtactcttgcgtcggcgtgtggcagcacgaccgcgtcgagatcattgccaacgaccagggtaaccgcaccacgccctcgtacgtcgccttcaccgactccgagcgcctcatcggagatgcggccaagaaccaggtcgccatgaaccccatcaacaccgtctttgatgccaagcgtctcatcggcaggaggttcagtgatgcgtctgtccaaaagggatatc

SEQ ID NO: 298071 - DNA, 371 bp, Zea mays
attctcgaattacgattcccaatccagcaaaccctaccagccttttgcaaactcagagagggacccgatggcacccaaggcggagaagaagccggcggcgaagaagcccgcagaggaggagcccgcggccccggcggagaaggcccccgctgggaagaagccgaaggcggagaagcggctcccggcgggaaaatccgccggcaaggaaggcggtgttgacaagaaggggcggaagaaggccaagaagagcgtggagacgtacaagatctacatcttcaaggtgctgaagcaggtgcacccggacatcggcatctcctccaaggccatgtccatcatgaactccttcatcaacgacatcttcgagaagctcg

SEQ ID NO: 298072 - DNA, 379 bp, Zea mays
tctcgtagagagaaggaaaaatatccccaaaccctagctcccgatctcgatggcgaaccctcgcgtcttcttcgacatgaccgtcggcggcgccccggcgggccggatcgtgatggagctgtacgccaacgaggtgcccaagaccgcggagaacttccgcgcgctgtgcacgggcgagaagggcgtgggcaagtccgggaagccgctccactacaagggctccaccttccaccgtgtcattcccgagttcatgtgccagggcggcgaactcacccgcggcaacggctcctgcggcgagttcatctacggtgagaagtttccctgccatgtgtttttgcgcaagcactccatcctctgtttgtttttcatggtctatttt

SEQ ID NO: 298073 - DNA, 336 bp, Zea mays
gcggccgcccttttttttttttttttttttttttttttttttttttttttttttttttttttttaaaacacaacgaaaagagcttgaaaattgaaataggcaaatttagtaattacatggaacatgcaacctaacaaattgagctccggataggcaaatggaacattgattaacttggactcaaaatattggatttttttcatttgagacaaacacacgatccggaaacaccacattaaactccaaattttcttgtccatccgtttccaggtcacgtacgcttcacgacatttgtacctttttggccaaaaacattgatctattaacctttttttt

SEQ ID NO: 298074 - DNA, 326 bp, Zea mays
gcggccgccctttttttttttttttttttttttttttggattcaactcaactctcgcctttatcctgcagatgtgcctttttcaccatgtcattcaatgtgatacacgggttcgttctgtatagcatcgagatatatttattctaccgaaacagacaaattttcgtcttgccagtttacagcttggagggggattggtaccatccccacggctcatcagagatgtactccgtgacttgcttgacgctcaggtagttatcaatgcccccttctccaagctcacgtccaaatccactgcgcttgttcccgccccagggagcttggcag

SEQ ID NO: 298075 - DNA, 134 bp, Zea mays
ttcttttgctcttcaccaggaaccccaacaccggagagaataagctgtataaagaattcctggtgaacgctcatggtgaggatgtggttctcttaatacaatccccataagaccttgactccattataacctta

SEQ ID NO: 298076 - DNA, 299 bp, Zea mays
  unsure (1)..(299): unsure at all n locations
ccccaagaacgaagaaacatttcaaaacgaaagaacgcccccaaagccctcnccnncgnagcagctatgnnagccacaggccctcatgctgatggatactgtgataattacctccaaagcctgataagtgactgcaaaacatacgtgatgttcccagctaatccaaatgtccctccttccgatgcttgcttcggtgtcataaaaaagcaaactgttcttgcttgtgctccattgtcacctaaaaaacttataaagttgttgtcattgtaaatagttcctaatttactttatcctattat

SEQ ID NO: 298077 - DNA, 366 bp, Zea mays
ctctctttggatcgattggtttcgtaactggtgagggactgagggtctgggagtggattgatttgggattctgttcgaagatttgcggaggggggcaatggcgaccgcggggaaggtgatcaagtgcaaagctgcggtggcatgggaggccggcaagccactgtcgatcgaggaggtggtggttgcgcctccgttggccatggagggtctcgtaagatcctctttacctttctctgactaaccgtcttctacttttgtgtatccaaggtgcttacttcctttttccctagtttctttggtctcaaagttgtgagttttctttagagtgtttcatgatttttttattatacttaattttttttttct

SEQ ID NO: 298078 - DNA, 151 bp, Zea mays
gcggccgcccttttttttttttttttatttatttataaaaaacaagcagaggctccatggtgttcacagatccacacctaaaccgttaaattaaactgttagcgattcttaataaattaatatccacctcttaaattatccaccatcttat

SEQ ID NO: 298079 - DNA, 354 bp, Zea mays
tctttatgatgaaaaatattaaaaatatgtgtgctagatgcctaatttttcctgtgtgaggtaaaacaaagcaccctggcactgctcttaaaggaactgccattttttcttcttttcgcagctggttgaccagtagtactattatttagtggctcaatctagcaaaataagagaatttcacctcacatttaacatattgcttgtgagcttgtctactagaagagccaacactttatcaagatcttgaagcaagtattcaaacattttctcacattcagaccctgcatacaacacctaccttgtctagaaagattccagaacatttttcaggagggactttttacagttttgttt

SEQ ID NO: 298080 - DNA, 349 bp, Zea mays
acaacatagaagagactatgacggcacacgcacgcatacgtagagatcctatagagtagagccacgcgacctcttcaacatcaacgccggcatcgttaaggggctctgcactgccatcgccagagcactgccccaacgctcttgtcaatatgatcagcaaccctgttaactccactgtcccgattgcggcggaggttttcaagaaggctggtacttatgatgcgaagaagctgtttggtgtgactactcttgatgttgttcgtgctaaaactttttatgcttgaaaagcgggtgtgccagttactgaagtgaacgtatctgttgttggaggccatgccggtattactat

SEQ ID NO: 298081 - DNA, 215 bp, Zea mays
tttatacatccatccaggactccacatccgggggtgagccatacaacagaggaccgtccacccactattttctggcgcacacttatttcgctgtcctgcttgactattaaaccatccataacatccgttctcgttttccagacattgagcgcccaacctacaccaacctctacaggcttttgttccattttatctcatccctgactgtttttctt

SEQ ID NO: 298082 - DNA, 202 bp, Zea mays
tttttatataaaaccacgtgtacacatccgggggggggtcatacaacagagggctggccacccactatcttctggcacacactgatgttcctctcctgctctacaattaggccatacatcacatgtgtcgactttctcttgtcatatatagacctacttacaccaacctcaacaagcttttgtaccatgtgatcttatacct

SEQ ID NO: 298083 - DNA, 263 bp, Zea mays
gtaaacataaatgcaggtgtcggcatacgtgggtgggccatacaacagaggactgtccacccactatcttctggcactcactgatgtcgctgtcctgcttaacaattaaaccatacatcacatgtgtcggctgtctctagacatagatagactaacctacactaacctcaataggattttgtaccaggtgatctcatacctaactgatttcatgaggatctattggcctcattaacatacatgtgaactaaaaccagaccaac

SEQ ID NO: 298084 - DNA, 282 bp, Zea mays
ttttctgatgctaccagccaagccctaataagtccatgttcgagcgaccatggtgctgcctctccagggcggaatggttctggccaaaggcgccgccaagcgtggccaccaaggttcgtaacatgacagcagtcccgggatgaccaagcctgggatgctgaggctgacgagggggggcggcgtgaagcgcatctcggggctcatctacgaggagacccgcggcgtgcttaagatctttctcgagaactttattcgtgacgccgtcacctacacgttgcacgc

SEQ ID NO: 298085 - DNA, 203 bp, Zea mays
ctttcgtccccaaaacgaccgagcgaatggacgacagcttctcaccaccggtaccttcaatggcacccaaggcggacaagaagccggcggcgaagaagcctgcagaggaggagcccgcgacagagaaggcggagaaggctccggcggggaagaagcccaaggccgagaagcgccttccggcggtcaagtccgtctgtaaggag

SEQ ID NO: 298086 - DNA, 352 bp, Zea mays
gctgttattaggaggggctggtacctcacgtgaactttgcatctggacactgttgtttctgaggtgtggaactattgttagtggagatagtaccgggagtgtacagttttgggatagccgccatggaacacttctgcaagctcactcctatcataaaggcgacgtgaatgcactaacaactgtgcctggtgagaacagggtatttttcgcagggtccgatggccaggtaattttatacaaaatatcaaaagatgaatttggtgctactaaaaatgtgggcaaagagcaagttcacatatgggtctatgtgggatatgtgagagctcacactcatgatgttagggcactgacc

SEQ ID NO: 298087 - DNA, 247 bp, Zea mays
ctgccttctgcgcctccatttcggcctctgtcccttgcaagttcaatctcacctccaaccatgggtaaagagaagtcccacatcaacattgtggttattggccatgtcgactctggcaagtcgaccaccacaggacaccttatctacaagcttggaggcattgacaagcgtgtgatctataggttcgagaaggaggctgctgtaatgaacaagcggtccttcaagtacgcgtgggtgctcgacaagc

SEQ ID NO: 298088 - DNA, 365 bp, Zea mays
gcggccgccctttttttttttttttgatcatcgggaggaatcatgttaaccaacgcatgcaaccgattttatagctcatcttttacagcgaatgccaaaaagttttggttccccagtcttacatccaagcattcaaccaaccttcatagaatcacacttcggtgcaatatcaatcaagcggctctctatgaatagcacgggcgtcctattatgaagagactaaacagtatttgcaactggagcgtcatgattggcgccccattcggtccacgatccggcataaattgcgacatctgttttgccaattcaatgaaggcccaaggctaatacacatgctgtcacaccagtgtcacaagaggtaacaa

SEQ ID NO: 298089 - DNA, 343 bp, Zea mays
  unsure (1)..(343): unsure at all n locations
gcggccgccctttttttttttttttttttttttttttttttttggcaagattttaaaagcgcgacttcttttttcacataaaattcgaatccgaatcctgaacaaccaaggaagtagaagaaaaaaaattacaaacaaacagtttctacgctcagcacggctattggcagagcagcaccaagattagtaataagtattgtccgccgctaaacaccgttacaaaatttggctcggctcccggcactccacgtnaccaccaccatcgtccatctacaaccatctacagctcgtcgtggtcgtcgtcaacaccgccgtcagcgtcaccgccaggggccgccgccga

SEQ ID NO: 298090 - DNA, 284 bp, Zea mays
gcggccgccctttttttttttttttttttttttttttttttgatcaacaacaaagtgttgatgattcacaaataaacaagtccttgctgggttacatgacgcagttcctacagaagcagagcagcgccgacagagaaaccagcaacatttaactacaacacaaggcgaacatcaacacaagagaagcctacaaagggcgagcgtgcaagcctaggaggaggtgaacttggtgacggccttggtgccctcagagactgcgtgcttggcgagctcgccggggagca

SEQ ID NO: 298091 - DNA, 335 bp, Zea mays
gcggccgcggagagcgcgagcgtgagctcgcgggcgttcgccgcgaccagcaggcgccggccctcggcggggtcccgccgcacgccgtagccgtcctggaggaagtgcccgagctcgcggagcgcgtcgacgtggcccagcgaggccgcgcgcgcgcacagcgcagcccccgcgcgcaggtcgcggtccgacttggccccgccgctgccgttgaactggatgaccgccagcgagtagagcgccgacgcgtgcccgccgacggccgaccgagccagcagcgccgcgccgacgttgtgggtgcccaggcagtataagcggatcattgccaggtttgt

SEQ ID NO: 298092 - DNA, 356 bp, Zea mays
gcggccgccctttttttttttttttttttttttttttttttttttttttccgaactattccgaaggacccattttattccggaaacagatgcccaggctttctccgggtcctctgatagaagcaaacataggttcacagttcaaacttgacttacaaacagtcgcacaaaacatacagcactctgttctaactcgggacacgaaatcctctctttctctctccctctccctctccgctcactgcctaaatctaggaagactgccggagctccgggcgcacaaagtcggcgttggcaggcacagaaatgtcgacggggggccttagctcggcgcaaacctcaatggcaccatggaca

SEQ ID NO: 298093 - DNA, 401 bp, Zea mays
gcggccgcccttttttttttttttttttttttttttttttttttttttttttttttttttcagaaaaatgcacttttttccataaagcagcagagggcacaagtcccattaccagggaaatgtacattactcagggaaacagcagctgagttcgagatatgaggagatggcaagcataaaccccaattaaaatccgttcccaacattggcaccaacccaacgcgaagataaattattcactggatgcaatacgccaagcacatgcacaagcccacatattacagaaccaaatgaggggcaaacttaagggcccaatgaccaaaattggattttgacaaacttaaaacccctgtttgatcaggtaattgccgagccttttcaccaccatattgcattgccct

SEQ ID NO: 298094 - DNA, 301 bp, Zea mays
gcggccgccctttttttttttttttttttttttttttttttttatttttgttttttttttttttttttttttttttttttttaaccgaaaagaaaaattaccgttttacttaaggtttgccagtagccgcgataacatggaacccaccgatttttacggggttcaaaaaaaatatccaccacaaaagtgcccgcccaccataaataaagttttaggtggcacatctgactgaccgatatcaattattcttgggagggactgggcccaccctaaattgtagtacgcttaaaaatgataaaaa

SEQ ID NO: 298095 - DNA, 336 bp, Zea mays
gcggccgctcgcgatcttgaaagggtgccaaagaactcaacaagtgcctggggctcaatggcatgagtatttacaatgacacgcttgatatcaggcaactctgaataatgctggagggcacgcaagtataatccagccttttcacagagctgagcaatacgaggacgatcataatgactgaacatgccatttgcaagaatggtatttgcaacatttgggtaagtcactaagttgatctccaaaactctggtttgtatataatcatgatcctttcttgtattgtcttcttaacttcttgctgtaattgtattttttctctccattatatttattatt

SEQ ID NO: 298096 - DNA, 351 bp, Zea mays
  unsure (1)..(351): unsure at all n locations
tcgtcccacgcgtcttcctacgcgtccgctcagctcccatatcgtgtggcctacctctccagcaggggcggtctccgtcgtctcgnctccgctcctcacctcgccagccatgggcaagatcaagatcggaatcaacggtttcggaaggatcggcaggctcgtggccagggtcgccctgcagagcgaggatgtcgagctcgtcgccgtcaacgaccccttcatcaccacggattacatgacctacatgttcaagtacgacaccgttgcacggccaattgaagcacagcgacatcaccctcaaggacttcaagacgcttctcttcggcgagaagcctgtcaccgtctttggca

SEQ ID NO: 298097 - DNA, 412 bp, Zea mays
  unsure (1)..(412): unsure at all n locations
tgctcctaccgcagctctccctcaggtttagtgttcgcaatggcggcctggaacaagcttggtggccttctaaggcacagtgctctggtgagcggtatcactggtggctcttctcctgcagtgttcaatgctgcacggctcatgtctaccaagctatttattggtggtcttgactggggtgtttatgacncgtaacttttagaagcatttatctgctttggagagcttttttaacactgtttttttttacattatgtttttctggatgaacttgttttttccttcctttttttttccatcaattatttattgtctcccgtcttttgtttttatccaactatatgattttttttctcatttttattttttttattcaaaattattttttctttctatctcctctttttttttt

SEQ ID NO: 298098 - DNA, 269 bp, Zea mays
acgacccacgcgtctttattgttttttgctgctctccgaccccgagctggcgaatcctcatcatcaggcgaggccctccttgcgagtgaccgagatggcgctgccgtatcaggggaccgttgatgaccccagcttcaagctcgtcatcgacggtgatggtggaactggtaaaactacatttgcgaagaggcatctcactggagagtttgagaagaaatatgaaccaaccattgttgtggaagttcattcgttggatttcaccactaact

SEQ ID NO: 298099 - DNA, 220 bp, Zea mays
  unsure (1)..(220): unsure at all n locations
tcgatctacgcgtcttttttccaaagctcgccccgctcccagctaggggggcctctttccatccacaggggccgtgtcgcctccnactaggacagcgccgacacgatgttggagatgagtttggtgcaagggagccttcttaagaaggtcttggaggcgattctcgtgagctgtacacggacaccttctttttactgttccgggaccggtattcttgttg

SEQ ID NO: 298100 - DNA, 394 bp, Zea mays
  unsure (1)..(394): unsure at all n locations
cccacgcgtccgctctcagaggcgacgcctcgggcgctcctaccctgccccgtctccggtccccccgcgccgtcggcgaggcagccggccgtcacagaagcccgatccggaccccgcgagaaatccttgttatacctgatggctatgattgatgagcctctttatccaattgctgtactgattgacgagctcaagaatgaagacatccagttgcgtctaaacttcattagaagacttttatcaattgcacggtctttttgagaagaaagaaccagatattttctttttcttttttttagtgaaaacaaactttttgaagatgtgttttttttggttattattgttttatttgtttgttattataannntttaatattttttacccatttttttt

SEQ ID NO: 298101 - DNA, 223 bp, Zea mays
  unsure (1)..(223): unsure at all n locations
ccacccgtccgaaagctggaatcctttaaagtcgaccaacccgtccgaacatttcttctctttctgctcctccgggtccggctgatccatccaagagggggatcgccatgtcggactcggaggagcaccacttcgaatcgaaggccgacgctggggcttccnnnanttagccgcaacaggctggcacccgccgtaagaacggcttcatcgtcatgaagaaccg

SEQ ID NO: 298102 - DNA, 142 bp, Zea mays
caaaccattagctttatctactccagagcgcattgcaacccgggcgacaccataaggcagctgctccgtgccctagctatcctggctctcgctgggagcgccacctgcacgcatacacgctgacattgtaccatgcagtcac

SEQ ID NO: 298103 - DNA, 411 bp, Zea mays
  unsure (1)..(411): unsure at all n locations
ttttcgatcccatttgaaatcaacccatcgtcgtttcctccgtctagcatgctctcaccctcatggccaagatcaagatcgggatcaatgggttcggcaggatcggaaggctggtggccagggtggccctgcagagcgacgacgtctagctcttntccgtgaacgaccccttcatcagcaccgattacatgacctacatgttcaagtattacacattgcacggacagtggtagcaccatgaggtcaaggtgatttgactccaataccctttctcttttgtgagaattgagttttttttttttttttttcgtaatcctctaaagagatctctttgggttattatttaattattaatattttattatacttttcttntaatactattctttatatgttaagtttattaattat

SEQ ID NO: 298104 - DNA, 200 bp, Zea mays
aaaccgaaccagaataccgtttgttttttatcgcgtgccacgaaaatattggggaccatcaaaaggtgctaacgcgggtacaccagtacgactactataaattgagcagctactgggccagccagtcactgcagcatacacacgagactgacacaatccgtttagtccaccttctctatcttggtgcctgggccaccttt

SEQ ID NO: 298105 - DNA, 104 bp, Zea mays
cgcctgcagtacggtccggaatcccgggcggccgcacatcatcctcgccatctaagctcgtcgtgctgcttctcattatcagaatccttgctatcctggcatca

SEQ ID NO: 298106 - DNA, 408 bp, Zea mays
gcggccgcccttttttttttttttttttttttaggaacgaaaacttttttttttctgagaagttcaacacaggccgtaggtattgctaccacttcgtaggagcacttatttcacaaacaaccttcagagttcaggcacttgacacctaaccaaaccaaacctcgaacactaaccaatttaatccacctcctctatcttgggaccagcacctttcccaccagacggtgcatccttattcatgccagcagcagcgcccatgcccgcgccctcgccctggtacatcttcgcgatgatggggttgcagatcccctcaagctccttcattttgtcttcgaactccttcaccttagccagctggttgctgtccagccagctgatggccccgtcaccggcattttcgatcttttt

SEQ ID NO: 298107 - DNA, 250 bp, Zea mays
cggcgccttttttttttttttttttgttttaataatttttttttttttttttggaacaatacttttttcttttcatttaaaatggtcattcagggcattggtcacactgacactgccacccatggtgatgcgggacacattattactcaattattgccgtttaatgacctaactagcttgctagccaggggcttttctacagcacatagttttttcagtgggggacaaccccggcagcaacgtatgggca

SEQ ID NO: 298108 - DNA, 388 bp, Zea mays
gcggccgccctttttttttttttattttcttattgggttaacatatagcttttatctgcattcttgtatggcagaaggtggaacggcatgaatgttccaaattaagtggatataagttcacatgctaacatagtcttaacagtttacacaattacagctacgaccactaacaaaacttgtaatgatgaaaactaggttttgcttaagcatgcgcaggatcgcatcatttcttcttggtagcagccttgttcaccttggctccggttggttactttcttttcacactcttgttatcttcaacatgctacctgttgcctcatgtcacggtcagcaaacctaccaaggggaggatactgctgagaatgtttgcactaccttgggcttggtt

SEQ ID NO: 298109 - DNA, 280 bp, Zea mays
tgcggccgcccttttttttttttatttttttttttttaccacacaagcgatcttgtgttatttggaatttgtatcttacgtgcataccatgtagagccaaaaggggatggttcataccatataattaccgacacgggaagctaccctactgcttggcaaaagccaaactgatcgcgacacacaagcgcggtccatcgccagcgtgtatgtaccttctcatcgaaagggcaggctagctttgccttttttattaaccccaagcccaggccagattacaaac

SEQ ID NO: 298110 - DNA, 421 bp, Zea mays
  unsure (1)..(421): unsure at all n locations
tccaggggcggccgcccttttttttttttttttttttttatgttttttttattttttttttttttttttttttttnaagggcaagaccaggaagtttccccgttccattaaaatcagtttaggcaaacgacttttcaacgggggcggaccacccctcggcagaatctagagagatggaaaaaaaaacaggtcttttctgcttttggagctcccacaacaaaatcacctgggttgcttttgggcaaacacgaccattcattttttgggaccggtcaaacattggaacaaaaggggggagggagcttgttttgctccacaagaaaacattcccatccttttccttttttaataaggcttcaatggtgccctgaactttgcttcggggtaaaccggggtattaccgagctttttcttgaacctg

SEQ ID NO: 298111 - DNA, 422 bp, Zea mays
cggccgcccttttttttttttttttttttttttggcatcaaatctttttacagtctagcataatgcagcaaggtttataccacaacaagtcccgattgcccatctcgccctaatgagctgatcaaatgcactgaatcactaatcatctagttctaaaccatgccagagctaagcagcgcaagcaaatccaccacctttattattggcaggcactctcaataagcgaatttccaggccctcctactttgcagccttcccaccggcggcctccttctggctgaccttgtatttgtcaagggctgcgccggcgagccggcatatgcgccactgcggaagcacatctgcgcccattccctcgtataagtcgatggcgttcttgttccattcgagcacgcaccatttcacccggcccattccgagct

SEQ ID NO: 298112 - DNA, 489 bp, Zea mays
gtacgccagcagtaccagtcagtatttcccggggcggccgcccttttttttttttttttatcattatctgtttattattttttttttgtcatatttttcattatcttcagactgtttcatgttgccatttggggggatttcctgtcacgctcattctgttacagataaaaccattcgtctgaaactactctcattcactatggcctggggacgaccgataaactttttttgcttggcccccacgttcagctgctgaagaccaagcagaagggccctggaatcaaggaacaccctgttgctggaggccgccatggtgtgggagatctccctggcagattcaatctgtctcagagccaggaaggcggggttgctgtctatgactttgccaatcaacctatttgcccttagaccaaccccccgccctgttatctgtacaggggtaggcccgctctgtctttttaacaatgaacttagcacgctcagtttttt

SEQ ID NO: 298113 - DNA, 462 bp, Zea mays
gcggccgccctttttttttttttttgaacaacaactcacatccagcatttttatttagtcagataacatatataattgtagccaaaaacatgttgcatacagccaaatactcgcaaggagactatcctctatttacagaggggttaacctcaagatagggaacctcatttttccaagggattttcattttcccaaactagctctaaaaaacattatgtccaccttaaagtccatagatgtttgttatagcacaaggaaatagatagatactcaccagccatgcccaccctaagtattgctgggcccagatcgacatttagcatggacaataggtcccaaccgtgacctttccagaccatcaatattaccgtctggtgcattcatgtagaccgcacctctatacatccactcatcagtctcatcactgtagaaatcttcaaatggctcttgacataatgcaca

SEQ ID NO: 298114 - DNA, 284 bp, Zea mays
ttcaatccttagccctattctgccagtgtgggagctcaggaatctgcgccagggccagtgatacagagaccttcgcatttcatgctgagatcaaccagctggtctgactcatcatcaacaccttctacttcaacaaggagatcttcctccgcgagcttatctccaactgtttcgatgcgctggacaagatcaagttcgagagtctcactgacaagagcaagctcgatgcgcaacctgagcttttcattcaccttggtccagacaagggcacgaacacgcttttc

SEQ ID NO: 298115 - DNA, 324 bp, Zea mays
tcgtggcagagaggagaccgaagatcaaggaggcgtctcatgagtgggcatcggttaacaagctaaagcccatattgatgacgaagccagaagaaatcacaaaagaagaatatgctgacttctataagagcttgacaaatgactgggaagagcatctcgctgtgaagcactgttatgtgtggggtcaactgtgggtgaaggctgttatatttgttgctaagagggcactgtttgattttctttgacaccaagctgaagcgccacatcatttagctctatgtgcacagcgcggtcataatggacaactgctaagagctgatccct

SEQ ID NO: 298116 - DNA, 375 bp, Zea mays
tcgacccacgctttcttaactctacgcgctgctccacctctggccggacgcctccagcgagggagtgcgcatggcgtaccgccagtttgcgcaaatctaccaccccgataaataccaggacccgcagatgaaggatgtagcaactgaaaactttcaacgaatatgtgaagcttatgagatactatcagatgagaacaaaagacaggtgtatgacatctatggtatggaaggtttaaattctggcctggaacatggtcccaagctaactaaaccagaagaaatcaatgtacagttagaacgactgcggctgcgcaaggaggaagaaaaactttttaaagctgctctacccaatggcttaattattgcttattttta

SEQ ID NO: 298117 - DNA, 369 bp, Zea mays
tcgacccacgcgacctttttcttttcccgccgcaaggagaggtaagtgcaggttacatattatagaagcgggagacgcctcctaaagctactcctgccaagaaaggtgatgccaatacccatgccttgaaggatgccaaggttttgaagtctgttgctttctagattaagaccaagaagatccgcatcgttgtgacatattaccttcccactaccctgtataatgcttgtgaccccaagtaccctccaattaactctaccgtgaggaacaagcttgatcagtaccaaatttctaagaacccctttaccacagaatcaatcgatgaagaagattgttgttaacaacactctgggctttattgttgacctt

SEQ ID NO: 298118 - DNA, 136 bp, Zea mays
  unsure (1)..(136): unsure at all n locations
ttcatatcggactcgagacggggaaaaccagggcgcagttatctggatctctgaaggtttgtttaatgtaaagaaatggtggtccatcatctactcaaatttttttctctttnaaaaaaaattaggggtatcaaat

SEQ ID NO: 298119 - DNA, 299 bp, Zea mays
  unsure (1)..(299): unsure at all n locations
aagctaaatcctctnagtcgactcactcgtcgtctttattcgccgccgctcgcctctccgagcgggtttataatacaaatcaggagggtccaaaaaatcggccccgtggccctggtgaactacagcaaagactatggccgcctcgtcgtcatcgtcgatgtggtcgaccagaacatggcacttgtggacgcccctgatatggtcaggtgccagattaacttcaaacggctcttacttactgacattaagattgacattaaacgcgttcccaaaaagacaacccttatcaatgcttattt

SEQ ID NO: 298120 - DNA, 389 bp, Zea mays
gtccgtattcccggtgcgccgccctttttttttttttttttttctttagtggggaacatcaacctttgttcactctttcataaagaccataatgtgaaatgtaactttaagcattgctgggtacaggaggtgaacaaaacctgcgctctagagcgttgccgtcctacaaattattatgcatcaagcgttaacttttcccagcgcaaaaaaagacctatttcgcctgtctaatgagttcctctcatcataaggatgtcggtcattttttccgttaagatttaaaaagattcgggtacttatttctcgtccgtgtgttacattttcacttctccaattttttatcttagtgtactcatataattattatttatcactgggctttatattta

SEQ ID NO: 298121 - DNA, 351 bp, Zea mays
tgcggccgccctttttttttattttgttttctttagtatattcaatctttcttgtttttgggggcagccaaaattaatgggactgcatttgcttatttggggggagagtgtttgaacaacaaagtgaaaaacaagcatttcatcaggagatggaccttcaacttgtgctgcctaactgcgaaaaagcataaacaatcgcttaaatccaaaaatggaacttgattcgtacaggactcaacaagcaagaagccgccttatgaatcatacttcttgtcgattttctcggtcttagcaaagactttcttaatgcctccaaccatgtataatgtctgctcatggaggtattcatac

SEQ ID NO: 298122 - DNA, 348 bp, Zea mays
  unsure (1)..(348): unsure at all n locations
gtacgcctgcacgtaccggtccgtattcccgtgcggccgccctttttttttttctttttttctttatttgttccatttttttttaggcctacgaaaagatatcagctttttcgaggcttaatttgaggggggcgctcaataggctcaatgtgcaacaattgccctaacaactacatgcacatttcaaaccaaataaaccctcagttttaagcattaacagcttgtaaggtttacatttnttagaaaatatatagaacttctacctttatgagcgctgcttctaatactcttcacagagcatattgctctgtcacattagctttattaattaccttattcaccaacagc

SEQ ID NO: 298123 - DNA, 250 bp, Zea mays
accgtccgaattcccgggcggccgccctttttttttttttttttttttttttttttttttttttttttttttttttttttttttttttttttggtggttttttaaaaacgccaagcggggggcacattaactaaaactggatcacgtttgggtccatgtccgaaacatgttacatgttggatattattgctaaaatctacccagggccctccaagggtaaaatctccaggttgcattaaacagttttaca

SEQ ID NO: 298124 - DNA, 445 bp, Zea mays
  unsure (1)..(445): unsure at all n locations
tccgccctttttttnttttttntnnnntttaaacagtacggccattcttttttagttaaangcacatcgccccaaggaggcattattacttcacatgatcgagtaccagggtaatgtacattacttagttaaacagcagctgtgtttcgatacgacgcgatttctatcataatcctcaattcaatatacggtcccaacactgcccccaacaaacaaacccaagctaaattattcactgcatgcaatacgccaaggacatgcacgagctcacggattacagaaccaaatgaggcgcaaactttggtgcccaaatgaccaaatcagaacatgacgaacttttagaagccctgctcgaacaggaaatcgtcgagcctctccaccaccatggtgcattgccctgaaaaaaaggttcgtctaaacaccaataataaggaatgccggtttt

SEQ ID NO: 298125 - DNA, 458 bp, Zea mays
  unsure (1)..(458): unsure at all n locations
gcggccgcccttttttttttttttttttttttttttggattttcaatcattttttttgaacaaaagcctgagttctctgcatggggtaatggtatctagcatgtcagaacaagtatgtttataccgactactgcatatattatacggccagtgcccaactcaaaccatgttaagtcacactacaaaacattattgagcgcggaaacatgacatggtgccaggtcacaaggaattcttatgcttctgtgcctgcttctgcactgtcatcctgcaggctctccacctcgtactgggccttcggctccaaatcgatnaactgttttgagntgttggccatatgtgatatgctcactctaccttgctttctgatgtactctgcaactgacttaattttnttagtggagatgtagaataactaactacggttattcattacaccagataacctatctatgctt

SEQ ID NO: 298126 - DNA, 389 bp, Zea mays
gccgtttatagagaaggaaaatttcactaacatcgtagcttctgttaaagatgggggacccccgcccgttcttctacatgtccgtctgcggtgcccaaggccaatcgttctgaagtggaaatggcggaccacggtaaccaaccgacctggcttaataagctcgcggtgcagatgcacctgaactcgatcatctctgaaggtgagcgggtccagtaacatatgcccatctgtctaatgttaagaaaggagattaggcacaaggaactacatgacacacagcctttcgggaccttcaatgagtgtatgcactggcataaatgtcccagcgaggcagacccccgtatgtgctaatgctcctggtgagaaaggatgcaagaacttgatgattg

SEQ ID NO: 298127 - DNA, 378 bp, Zea mays
  unsure (1)..(378): unsure at all n locations
agcagcttctgcttgctctggggggaaggagagagagagagagcgagagagagatctagtagagaggctagtaggtggtcctcgaacgaagatgttggcggtgttcagcgggcaggtggtggaggtgccggcggagctggtggcggcgggcagccggacgccgtcgcccaagacgaaggcgtcgcagctggtggggcgcttcctggccgcgtccgagccggccgtgtccgtgcagctcggcgaccacggncanntgaaagctaccaagaacagcccagtgtttgttggggctctaccagaacaagagcacgttattgcactgtgtcacagtgctggcctctatatccttgggactacatgctatatgaaatgcacatt

SEQ ID NO: 298128 - DNA, 278 bp, Zea mays
  unsure (1)..(278): unsure at all n locations
gctcacctcggcgatggcatccgcggcggccgnggagtgggaggcggcggcgcggaaagggctggtggcgcgcaagccctgcttcgggctacctaccggctggccaacctggctccccgggctcctctaccttcgcatggggcaaggtcccttcgacattcacgtcgacaccttctttcccgatgccgaacacataccatatggtgaaattggggattgggtgggtttcaacaacgagaaaaggggcgtgaatgagtatctcaagggtgagaaaaatg

SEQ ID NO: 298129 - DNA, 396 bp, Zea mays
gtcttattgaaggactttttgcggaggcggttgacctagtgagtggggtgcactccaaatatctcaataacgagaaacaaaaacttgaagcaacaggtattattgctaatggaatgggagaagacactagctaaccataaatccaagaaactgcagatggcaatctgcatatcaaggaaaaaactgcatatctcagggatctctgggaggaaacgagcttccagcttgaggagttacaacgactgaaatcttgtgtcaaacttgagaaagaaggattaaaatgcagaacatcgacatcgtggtctctgtcttttactcccaaattcacagatgagaaactgttgattgcttcctcgaaaccaaaggtcgctatcattcgtgaagaagggagcaatg

SEQ ID NO: 298130 - DNA, 391 bp, Zea mays
tgtcagttcgcttcgtgagttatctttatctcctctcgatcgatcgcttcctgcatcgaggcggtaaagcgccgcccagatcgccggaagcaagcggcgacctcaccagctccgagcagcagcagggaggctcgtggaaccattagtcgttttctggcagcggcatggaggggctgagctggagaacggtgtgttgtttatcggtgctctgggccgtgccgcttttccctcagctcctggagaagcgcatcgttgaggatctaatcctctccgttggatctgatggtggctctgctccagatgctgattccgccccagctgggggtgctgaaacttctgatgcccctgctgcagaggagaagaaggaagagcccaacgaggagtctgatga

SEQ ID NO: 298131 - DNA, 357 bp, Zea mays
tcgttccacgcgtcttttcggttcagctatcaaggaaaggaaggggggcgtgctcatggcaccgggcgccactaacatcagcctcgttgtgggcctcaacaagcgcattgtgagcaccaagctccagctggctccccggccgggccaccgcaaggtgaaactaacgaagagcgtgtatatggacaccggcctggacatagactctgttgggaccgctgcttataacaagcgaatcagtgtgcttgtgatgggtgccaaggacaagcatgacctgaagcttgtttagataaagcctgatactcacaaaatggcaaataataatagagaggagatggcgggcgttctcacgaagatgat

SEQ ID NO: 298132 - DNA, 332 bp, Zea mays
actacgccgacgatatcgtgatccgacgccccggaccccgcggcggcaatggacattgacgacgcggaacactaccacaccgcctacatgtccacagacgatatcatccaagcctcccgccttcaagacaacaacgaaccgacactaaaggactagcgccaacggaccaacctgcagttggaaaccctcaaggacaagatgaatgaaaaccaagagaaaatcaagctcaacaagcagcttgccctacctcgcccccaacatcggtgagatctcacaaatgaaccctgaagatgaagctgacgatgaagccgctaacactgatatagactcac

SEQ ID NO: 298133 - DNA, 309 bp, Zea mays
ttcacaacgatactatcatgctactccgggcgcttaaatatggggtgaggggatgtcatactacaacatgggcggcaaggtgctgtataagggcggaaccaaacgccacctcaaggttctgcgctacatcatacaaaagatgacgaatgcgtggatccgctgtctagccatgaagcactgagataatcgcatttatgatctcatatactaggagacccgtgacgggctcaagatctttcctgagaacgtcatacgcgactccgatacctacactaagcacggacgcaagatgaccgttaccgccatgga

SEQ ID NO: 298134 - DNA, 351 bp, Zea mays
gagggacacggcctgtagtcccgtctttgagacgcaacttccatcggtgtgaagctatacattcaggggcgcaatgtccgccaacgtcaccgaggtaaacctcaaccccaaggtcttaaaacgtgagtatgcagaccgtggggagatggtgattcatgctcagagcctgcaacaacatctacagacacaaccaggggcggtaactttggatgagatgctgtcttgacatgttgtgcatgcccaacttcttgaacaataacctgtgacactggtgagggcggttcatgctcttagagatcatacgcgcccatcagagaacgagggaaccatatcagtgttcagtgcggaagc

SEQ ID NO: 298135 - DNA, 349 bp, Zea mays
ggaatttctgaaaagcattgaacatattcttgagcgggagaaaaattgggtttggtggaagcgagatgggtgtctcgcatttgaaaagccgccctttgaaaagaaaccaggtcaggctggtgccagaaaacggaagccaaggtggagacttggaagcaaagagctcagccaactttggaaatgggcagaacaaaaccccaatgtcttgactgatcctgaccgtgtccgcatgccatcaattacagaatattggaaaccacttgcagaagatatggatccatctgctggaattgaagaggagtatcaccacaaaagtaatcgggtgtactgttggaaaggactacggttt

SEQ ID NO: 298136 - DNA, 374 bp, Zea mays
tcgacccacgcttcctacatattcaccaatcgacgttcctcgtgcggtgtgttatagaaggaggcgggcccgaaaagtaatacaaccttctactctgggtgaacatggggaaaacgccgatgcggatgaaggcggtcgtgtactctctgtatctcttccagcaaaaggtaatgccgagtctgaggaaggacatcaccaccaagatccatcacatggtcaccaagaactggatctccgttcacgctcctcctcacctacgtcgttcgcacctaccaatactccatttagtacaaggagcaggagaagcttttcaacagatattaaatgcgctgcccttgacagacaacactctgagtttttatgatggctttcat

SEQ ID NO: 298137 - DNA, 320 bp, Zea mays
  unsure (1)..(320): unsure at all n locations
gcggccgcccttttttttttttttttttttttttttttttttttgggattggccatgcatatttatgtctggnaggaatttataacgtccgagctcgcaacttcatggtgttcaacaatggcgccaacagatcactccatttttcttagacaggcaccgatagctcattgacaaccatcaacgcacaggatgaaaccaaaaaaacaaattagaacaaagcagacctaggacatggcgagaacatagcctaaacatctacagtagtgacaatcaaccgtaaacgcctaagcgcgctccccgcggatgcggcgggcgagctg

SEQ ID NO: 298138 - DNA, 375 bp, Zea mays
agcggccgccctattttttttttttttttgttttttgaacctatccaactttaactagataaacgcacagtaacacaagaacatactgcagcctgaagatcatagatttactcgtttcagttgcatacagcatcagagtctaggaaaacgaacaaagggttccacaattcaagcctaagggctcaacattgacaaatttattacgagaaagacaattcgacaatctgcttggtcacattgactccagatgcaaaagaccacatgcagcagaatgtatcactccaggatagggtctatttaagcattagcaaaccccagttcggagagcttgaggtgggcctttttgtagtcattaaagaaagccttcttatccgc

SEQ ID NO: 298139 - DNA, 358 bp, Zea mays
  unsure (1)..(358): unsure at all n locations
gcggccgccctttttttntntttttttttttttntttttttttttttttttttggtttttnttttttttttttttttttttttttggcaagaaattcaacacctaaatttaaaagggaaaggcatgatcattgtaccaagataacacaaatgttaattcaaccattaacaaatttgaacgaaatttcccacatgggaaaaacccttgggagaaaacaaacgggtttttccattgattcaacgaggggaacaagggggaccaaatgcagtcaggcttcaacacttgacttgcttcttccattaagagggggacttggtttaaaacaggcacattattttaattggccaatattaccttt

SEQ ID NO: 298140 - DNA, 260 bp, Zea mays
tatatgtcttgccactacacatattttgggagcgcattgcattccatctgaggtcatactattctaatttgtgaccaccgtccaccatactctctttggacatcaccatgatggagtgcatcaccgtccacataggccaggccgggattctggtctgaaacgcgtactgcgagctgtactgcctccagcatagcattcatgctgttggtcacatgcccggtgacaagaccattgtgggaggtgatgttactttcaacatc

SEQ ID NO: 298141 - DNA, 372 bp, Zea mays
  unsure (1)..(372): unsure at all n locations
tctacccactcttcttatttcttctctctctcctcctccgactaaggacttatccatccaagacaaagctccccatcccctactctcaaaatcaccacttcgaatcgaataccaacgcttctacattcaaaacctaccctcaacatacttccaccattcctaataacccctttatctacatcaaaaaccattcctcaatagttttaaataattttaccctcaatacttttaatcattaccatcccatattccactttttcttcatttacattttcaatggcaaaaagcttgaagatttntctccttcattacacaaattttacattccccattttaaccctactcaatattatcctgacttatattttttac

SEQ ID NO: 298142 - DNA, 262 bp, Zea mays
tcaacccactcttttcttctcaggagatacggagtatggcgagcgcgtatttgagcaagcggtgggcgctcctaatcataagtggacgtctgaagaggaggatgcgctccgccgtggcgttcgcaagcacggcgccggcaaatggcggaccatccagaaagacccccagttcagcccgatcctcttcttccgctccaatatcgaccttaaggacaaatggaggaatttaagtttcaatgcaagtggactgggatcgagttaa

SEQ ID NO: 298143 - DNA, 431 bp, Zea mays
  unsure (1)..(431): unsure at all n locations
gtaagcttgattcctttaaagtcgaccaacccgtccgttttttaccattcctccccaaaacacatccggggatcctcgaagcctccgcggggcttcattcttgtcggcctactgcggcaagtccccggatgacctcatcaagaatgctgcctacatcggcacccctggcaagggtatccttgctgctgatgagtcaactggcaccattggcaagcgccctttccagcatcaatgtcgagaacgtggaggagaaccggcggggctctccgtgagctcctgttctgctgncctggtgccctccagtacatcagcggtgtgatcctcttcgaggagaccctctaccagaagaccaaggatggcaagccttttgtcgatgtcctcaaggagggaggcgtcctcccttgcatcaaggtcgacaagggcaccattga

SEQ ID NO: 298144 - DNA, 234 bp, Zea mays
  unsure (1)..(234): unsure at all n locations
tctttttttgaagcttccaatgaatacttaggaaagattccatataaggtagaaggtgttcctaacanctaaagcctttaagcccttgatgaccggttcaaggtctctggtatcccacacctcgtcatccctgatgcaaaaactggtgaagtttacactacacatggtgctcaatctctaaatgaatatatcatttatgcttaccctatcacaccatatccgttcaatgaactc

SEQ ID NO: 298145 - DNA, 236 bp, Zea mays
  unsure (1)..(236): unsure at all n locations
ttactctcggcagccgcaaacaccttcgaggaagagttcctatcatgcgagcgagcgacncnacccctggacctggagagagaagtcggcatggctgccgcggtggtcgactactctttgatggacgccgtccaaaatcgcctcatgttcgaagacgaatgcattttggtggacgagcaagacaatgttgttggccatgagtcaaaatacaactgccatttgatggaaaagattga

SEQ ID NO: 298146 - DNA, 314 bp, Zea mays
  unsure (1)..(314): unsure at all n locations
gctcgttagagcttattttcggacatccgaaaaacatgcttcctatgtgggatgatggttatctttatatttgtatgttaattagtctctttgctgttaaatttcgtgtaagttggtcctgccgatggagaatcgagcagccccctttttttgttctatcaactatgctgtaatgctggctatgtatcggcaaaaacaattctataaaaaaaaaaaaaaaaaaaaaaaaaaaaaaaantaaataaaataatttatatattttattaagggggggggtggggtaaaattaataaataaattaaaatattaagggg

SEQ ID NO: 298147 - DNA, 255 bp, Zea mays
  unsure (1)..(255): unsure at all n locations
tcnacccacccgtcttttttctttgagattactggcttccntgggcaagtgtgttttcaggtgtagaagggggctccactnaacctttgctccaatatcactggtcaaatccttgcgagcctcgtcatgaatccaccaaaggttggggacgaatcatatgctttctacaaggctgagaaagatggaatcctttagtctttagctcgccgtgcaaaggcactggaagatgcattcaacacgcttgagggactttta

SEQ ID NO: 298148 - DNA, 386 bp, Zea mays
cggccgccctattttttttttttttttttttttttttttttttttttttttggggaaagcatatgaacatttcacccaatataaagataaataaactcaactctcttgagatggaactcaaaacccacaaacaactctgaaagaaaatgcaaaattaaccgaggtactacaaaagtggcgttggtgcaacaaggtgggctatggaggagcaattgcaaggtcaaggaacgacacttaggttctttcagcgcttgccaccgccaccacccaacttggggcccttggaacccttttggaccgctcccttcgtctgtgccttctgggacttggtcaccttagcctttttcgcctttttttcatccttggtcttcttgatgcgctccttg

SEQ ID NO: 298149 - DNA, 353 bp, Zea mays
cggcgcagggattcccggtgcggccgccctttttttttttttttttttttttgggataacgcgttcggagaaacttaggtttgcacctaaaatgggaaatctttcaacaggaacacacaacaggttcatactactgctcagagtgagcaaagttgcacgcactagagtaacacagatgtagaactgggtactgcaggtagatggaccaaacaacctagtatccacccttgagatcattgaccacatcatatgggatgggagttacggtctcaatggtggtgccctcgaccatgaagccgggcttgggacccaatggctgcctcttggtgctgataacctcgccgcactttttg

SEQ ID NO: 298150 - DNA, 226 bp, Zea mays
  unsure (1)..(226): unsure at all n locations
aagtcgacccacccgtctatatattatggggatcttttcttgtnnagcgatacgatttaataatattgcctgttgggacaataaatatactntctcaataaatgtatggtcttttttcctcgagagctactcatgtgattttgtcgtgtgatcaccaaaatcataaaataactttttttttttaaaaaattaaatttttcttaataactattatttttatatttta

SEQ ID NO: 298151 - DNA, 349 bp, Zea mays
  unsure (1)..(349): unsure at all n locations
tcnacccactctttctgtttcggcgcgggcgnacaaatagcangggtaaaattaatagtgcgaagcgacaataaatatctcacntnactccattcacaaactcctagccaccctttgaaagcataatgcctgtaggaagaagctaaagtattatctttgtctccagccaaccaacaccaatttttcaatcaataagacagttatgattgtccgtgtttctgtaggtaattttaaatgtaagtcttttcatcttgatactggtaactactcattnngaattgatgcttttacccgcaagacctcttttctctactttttctacaatgtatcaaacaattatctttttatg

SEQ ID NO: 298152 - DNA, 343 bp, Zea mays
  unsure (1)..(343): unsure at all n locations
tccttagagtcacccacctccttttttctatctctattcccntgggccgttcctcttcgggcgcgcgggccatcacaccancttgtccgcctcctctggatcgccgctggactcgcttccctgacccagaagctacgatgaattacatcatctgcgcattcaagccgccctgcgacatcttcgtcacattcgccgatgagagaacccggaagcaggtccagatcaagaaggacaacgggaagactgtcatggtgcctgccttccagacccttgtgaccgtagccggagaggtgtctatcgctccattcccaggttaaaggcttgaacacactgttgttaagat

SEQ ID NO: 298153 - DNA, 401 bp, Zea mays
gtttttgccaagccgcgcgcctcctgtgcgctgtatccctgcgggacggcgagacaccaagatgacggcgcagaccgcggaggagctcgccacccagatcgagcagcagaagctcgaggagcagaagaccgaggcagaggaagttgtggtggaggatgaggaggaggaagatgaggacgatgacgatgatgacaaggatgatgatgaactcgatggggatgccagtggcaagtcaaagcaaagcaggagtgagaagaagagccgcaaggccatgctgaagcttggcatgaagcccatcactggtgtcagccgcgtcactgtaaagaaaagcaagaatatactctttgtcatctccaaaccagatgtgttcaagagcccgaattccgacacgtatgtcatat

SEQ ID NO: 298154 - DNA, 397 bp, Zea mays
  unsure (1)..(397): unsure at all n locations
ttctggaattaccataaagctcnaaatgacgccataattgttgatagggttgaggtcaatacaagtccacattggtgtgcccagtttgtaacaaaatctctgttacctttgatccatttatgtatttgtcgctaccattgccatcaacagttactcggatgattactgtaactgtattcagtggtacgggagatgttcttccaatgccttacactgtgactgtacagaaaaatggaaactgccgtgatcttactaaagcccttgctgatgtctgctgcttaaaaaattctgagacattgttgcttgcaaaggtatacgaacgtcggatctaccctttcctaacaaattcaatctagggacttcatattataaaagattaacattttcttttttcata

SEQ ID NO: 298155 - DNA, 414 bp, Zea mays
tcgacccactcgttcttatcaccctagacgtgcactcttgcgacaccattcataatgtcagggctgcgatccataacaaggagggcatccctcctgaccagcaacgacttatcttctccggcaagcagctataggacgtacgcacacttgctgactacaacatccagaaggagttcaccatccactttgtactgctccttaagtgaggcatgcaaatctttgtcatgaccttgactgtcaagacaatcacccttggggtggactcctcatacaccattgacaatgtgaaggcacagatccaggacaaggaggacataccacctgaccagcaacgtctcatcttttccggcaagcatttaaaggatgcgaggacccttgctgactacaacaatccagaggagagcaccctccact

SEQ ID NO: 298156 - DNA, 274 bp, Zea mays
  unsure (1)..(274): unsure at all n locations
tctatcccacgctttcttgcattccgctgccgcaaactnntggtaggctttattccaaagaccgggtggtcanatcaacaacaatcatataccacaccactctacttactcccgacaagcagtctaacattttccttcaaccattgataattataatactcacattaacattgcgatcatttcccatgtctactctttcaaagtttaccaccaacttccacctttatctacaacctttttaatttatttaccaaacctattttatttcattata

SEQ ID NO: 298157 - DNA, 447 bp, Zea mays
cgaattcccgggcggccgcccttttttttttttttttagatctatcatcacactcattacttattcgtatgaaggacatgggtttttattggtgattactcgacaaactttggtggagtggaaacactagtttgaatgaacatagataaggtcggtacagacccacaaaacgaaactattaacagcccatataccagctattgcttggaattctcctgctcttcctggctgccttcgctgctcgttccaacaaacccccgcctctcattggcagacgctgttatgaccggcatacagatatcagatgtgctgctcagaagagacttcacctctggatctgaggccatggcagatgatattatattgtcgacgttatcaagccttgatgacagctttgttcaactctgtaggaatttactagctctgtcgggatggattagcgggctg

SEQ ID NO: 298158 - DNA, 224 bp, Zea mays
  unsure (1)..(224): unsure at all n locations
cgaattcccggggcgccgcccttttttttttttttttttaatttggaacaatacttttttttttttatttcaatagancattcaagggaggggctcacacttacactgccagccatgtttatacttgacacattattactcaatcattgtctcttaattactcaactagctagctagccagcgactattctacagcacataattttttttagtggttgacaccc

SEQ ID NO: 298159 - DNA, 321 bp, Zea mays
  unsure (1)..(321): unsure at all n locations
ggccgccctttttttttttttttttttnttnanntttttttctnnttttttttttttttttttttttttttcctttggtggttttnnnnaaggcaaaagggggaacttattttattaaaagttttacggggacacataaacctgccaaaatatgagccattaatgctcaaccaaccacttggattcccccaacatagtttcaaacattcccatggaaaaaaatttattttcggaagcactttttttcgggggggaagaaaacaactccctcgtataaccaaaccttgagttcttcattttaattggggcttctaatttggc

SEQ ID NO: 298160 - DNA, 331 bp, Zea mays
acctcggcgcggaaggcgtaggggtcggccttgacccgcactacttcgtcggcgcccagcacctcgaacttgtagagatcgccctcgccgacctgcggcacgaagatctcccacagcccgcactcatggcggcggcgcatcaggtggcgccggccgtcccactggttgaagctgccgaccaccgagacgcggcgcgcgctcggcgcccagaccacgaagcgggtgccgccggtgccctcgtggatctgcggatgcgcgcccattcactcgtagggccggtggtgcgtgcccttggacagcagatagagatcggtgtcgcggatcagcggct

SEQ ID NO: 298161 - DNA, 441 bp, Zea mays
cggccgccctttttttttttttttttttttttttttaaagagaagcaccaggcttttgaattatgatgactacctagtgagtgtttcttaacttctgttgcactttcacaatttgctgagcaaaatgagcccgatgaatcaaggaatggatttagaattctgatacacaccgtcaggagataccacaaagacacagaatagacagtcatcttgcgctacttgagctgccattccgaccaagtgaacccttgccattgctgctggtacgcagtttgtgcttttcagccagctcaggatggtagtattcaagataccaccgcacaaacttcttgagccctgtttgcagatctgtggatggccggtaaccaagctcccgctgcgcaaggcttacattggcatgcgtgtatggcacatcttcattccttggcatcttaacaacct

SEQ ID NO: 298162 - DNA, 225 bp, Zea mays
ccacgcgtccttgtcttgagcattgccaagaactggcgggcttacacccacgaaggggtactaccatcatgggcggggcgactctgctgctgatatcgagaaggctgggctggactacaagatgagccacatttcgaccagcaggggcgcgagcttgaaactcttggaaggcaagactctacctggtgtccttgccctcgatgacgcctagatccagtgctgctg

SEQ ID NO: 298163 - DNA, 388 bp, Zea mays
ttcgccacccacccacccactcgcttcagccgccttctcctcgcgtaccaagcaggtggagacaggatgccggctggccactgcctgcgctcgcggacgctcgacctcttcgcgcgccccttacgcaagaagggctacattccgttaaccacctaccttcgtacctacaagatcggcgatttcgtcgatgtcaaggtgaacggcgccatccacatggggatgccgcacaagttctaccacgggcgctccggtcgcgtttgtaacgtcagcaagcgcgcgacttgcgttcatgtcatcatgcttgtaaatggtctcatattctgtaagtttttcatgttattttcggagtatttttttgcattttcttattatgtattaaataattctt

SEQ ID NO: 298164 - DNA, 175 bp, Zea mays
  unsure (1)..(175): unsure at all n locations
tctgtagggcaatgtctcagcgaggattgggtggctgttgcttttgactagtagggtctctcaanctntnccatacttggaggatgcactggagaggatgaaggacagccttcctccgaagcattattgattttgacatgtgtataacaactcgcgtaaatgattacatggcata

SEQ ID NO: 298165 - DNA, 393 bp, Zea mays
  unsure (1)..(393): unsure at all n locations
tgtctttgccgccgccactgcccnatccaggtgggcatactaatccctcctcgtctccgctccaaatggcccgcacgaagcatactgcgcgcaagtcgaccggcggcaaggcgccgcggaagcagctggccaccaaggcggcgcgcaagtcggccccggccactggcggcgtgaaaaagccgcaccgcttccgccccggcaccgtcgcgctccgcgagatccgcaagtaccagaagagcacggagctgctcatccgcaagctcccctcccagcgcctcgtccgcgagatcgcgcaagactttaagacagacctgcggttccagtcctctgccgtggcggcgcttcatgaggccgctgaagcgtacctggtggggctcttcgaggacaccaacc

SEQ ID NO: 298166 - DNA, 397 bp, Zea mays
tctttttcgttcatcacctcctttatctcggggggctttttatataccgggcagggcaaccaatcctcaaattcaaagacctcaatgagattctcaacatggcaaacaccacccagtatagattgaccaccctcgtattcaccaacagcctcaacactgacaacaccctgactctctcgctcaactcctataccatttgtctaaactacttccacctcttctatgcttccattcaccttggtgatgtacaacactcatcctatctactagagagaaggactttgacatcctgaataactacctacacgtaaaggctgtcccaaccccaatcaataacccctcattgttgtaaacacttcaattgttgtcttatgcactataaccacatattattatt

SEQ ID NO: 298167 - DNA, 400 bp, Zea mays
gctttatctactccagagcgcagaagaacccggtcgacaccatgagggtgggggtcgttgccctcactctcctggctctctctgcgagcgccacctacacgcatacaagcggcggctgcggctgccagccaccgacggcggttcatctaccgtcgccggtgcatctgccacctacggttcacctgccacctgcggtgcatgtcccaccgacggtccacctgccgtcgccagtccacctgccaccgccggtccatgtgccgtcgtcggttcatctgccgacgacaccatgccactaccctactcaaccgcccctggcttagcctcattcgcagccacacccatgcccgtgccaacagccgcatccaagcccgtgccagctgcaaggaacctgcggcgttgg

SEQ ID NO: 298168 - DNA, 252 bp, Zea mays
ttcaaagcggcagtgcgtacagaggatcgcggaacagaacagcatgaagagggtcatcggtctcgtcgtgtgcctggctctgtcagctgccagcgcctttgcaatgcacatgccctgcccctgcgcggggctgcatggcttgtacggcgctggccccggcctgacgacgatgatgggcgccggcctgctgtacccctacccacagtacctgaggcagccgcagttgcacccgttcgcggtggcgccctacta

SEQ ID NO: 298169 - DNA, 207 bp, Zea mays
gcgccggccgcttcgcttgaaagtttttagtgaatattttttgaatcttttttgattttgctgaagacggaactcgggcgcgttatgttcataaaatctatgcgtgcaaaggcatcccatttattcatgctgattctcacgttttctctttttgccaactctaaatgcaagcgctattttcacaaccgcctgaagcctgcaaagctt

SEQ ID NO: 298170 - DNA, 383 bp, Zea mays
  unsure (1)..(383): unsure at all n locations
cccggngcggccgccctttttttttttttttttttttagacttttccgggttgcagtagaataagagtcaaggatgacacaaatgaataccaccattcggtcatacatagttttaaacaaaatactaataaagagaaagactcagcgccagcagcgtcttcctcttcatactaatgaacccccacagcagcacattaccacaaggcctaggcagctacaaaaatttcaaaacatggcttaaaggagaaaaaatcacaaattgtccatgaccacgactttaacatagaaaccccaccgtccttattacccccttttccacgggattttgacaaaaccaagccttaccaggtttctcaccacccttttttgttttggtttttttt

SEQ ID NO: 298171 - DNA, 409 bp, Zea mays
  unsure (1)..(409): unsure at all n locations
tcnaccctttcttcctcccgcagcagccaaaacctacctagccggggtccattcaaaccggcgtgggctccaaaatncatatctttgttaagactctgactgtgaataccatcactttggatgttgagtcctcctacaccattgacaatgttaattccaagatccattacaaggattgcatcccccctgaccatcatcttctcatcttctccgtcaagcatctctaggactgtcgcaccctctccgactacaacattcagaagtagtccaccctccacctgttgctccgcctccccggtttctccaataaacttaataagaatacttacaccaagcccaagaatatcaagcacaatcacaaaaaggttaatctcttccttctgcatttctatattttggaccactccac

SEQ ID NO: 298172 - DNA, 187 bp, Zea mays
gttggcggtggaatcaatgttccagtgagggcggctccgatttttgccagtgctgcagccgtcaaaggtggcaaaaactacatgattgatttcatgatgggcggtgcatcagatgctgttcacaagactgcaggtgatcccattgcacgagtgaagctgcttattcagaatcaagatgagatgatca

SEQ ID NO: 298173 - DNA, 358 bp, Zea mays
ttttgatccagctctcaaccttcatccgagcaagttccacaccaacgtggtgccctaccctaggatccacttcatgctttggtgctacgctccacctatctctgctgataaggcctaccacgagcagctagtcgtgagcgaaatcaccaacagcgtcttcgagccatccttcatgattgccaagtgcgacccccgccatggcaagtacatggcatgctgactcatgtaccgtggtgatgtggttcccaaatgacgaaacgctgatgtggtcacaatcaagaccaagcgcaccatccagttcgtggactggtgcccgactggcttcaagtgcggaagtaactaccagtcttccagcgtc

SEQ ID NO: 298174 - DNA, 342 bp, Zea mays
tcatgtctcatgcccgtgctatcggggccgatgctggagccgaacctgtgggtggcgatgccgagctcgtcgctggagctggcagtaggcggcctccgtggcctagggtctatccattccttggacgagtttgctggcggtgtgtctagcaccgtgggcacggagatcacgcctgcacgggcgaccggatctgctccgacgcctatggtgggcgtcgacaggaccatgctgctggagcttgcgatcagcgccatggatgaactagttaagctggcacaggttgacgagcccttgtggcttcccagcctcagtggctctcccgacaagaagctgctcaacttt

SEQ ID NO: 298175 - DNA, 406 bp, Zea mays
  unsure (1)..(406): unsure at all n locations
tcgacccactcgttctgtttggnaatagaaaaaaacatagacagggtacaaaagcaaacatggctggatacctgcaagcatctaaaatagttgcattgtatgttgtagctcacatggtgttttctgcccaggcattctgggattattcagaaaaaaaattggtagcgaaaacaaaggcagaatgttctgtcacaagtgaatggtcccctgatggtcgtcattttatgactgctacaacagctccgaggctncaaatagacaattgtataaaaatatttgaccacaacggatctctgcagtttaagaagatgtttgaaaggctgtatcaagctgattggaaacctgaagcacctgaaaagatcactgacattgctgacccgacaacattcttgagtaccctaaaaga

SEQ ID NO: 298176 - DNA, 354 bp, Zea mays
tccacaccgctagctcagcaaaaaccaagccccgattcagcggctgcgggggctggcccacgactcttgtataacccacgcatccaccacactatgctgtgctgccactactccaaccaaatgctacactctcgcccttccgctatcaaagatggtgaaagacggcaggggccgcggcgcccatggaggtcatgcgtctcacgctcggcgacgccgacgatgactacaccgacagggtctgcgaggtctacgccattcccaagagcgcgactgctaacagcgaagaggccgactaccacgtcatccagacaaacatgcttgacatgctcaagcagaccgggaggccacaaatgg

SEQ ID NO: 298177 - DNA, 339 bp, Zea mays
cagctcccatatcctttcccctacctctccagcatctcccgtctgcgtcgtctcgtctccgctcctcacctcgccagccatgggcaagatcaagatcggaatcaacggtttcggaaggatcggcaggctcgaggccagggtcgccctgcagagcgaggatgtcgagctcgtcgccgtcaacgacccgttcatcaccacggattacatgacctacatgctgaaggacgacaccgtgcacggccaatggaagcacatggacataaccctcaaggactccaagacgctagtcttcggccagaatccgggcaccggctttggcatcatgaaccccgaggagat

SEQ ID NO: 298178 - DNA, 408 bp, Zea mays
tctcggcatccagcagacccatgcatgaaccagcatgcactgcggatcgatgggtcgccgatacccccgtcaggctttattctaagttaaatcctaaggaaaaaaatggcgcttattggcgctcgcgacttgacaaggccttccatcgtctcatgatcccgcccaaagaatcctaatagtgtggtaacgttacagccacagtccagaagagccgcatacagctgcattcccagcactctcaggtggcatcataagcggcttcagctgcacgaaatgatgaattcaaacgtcaggatctgacactgctgcacggagccacttccgccaggcacaaatacaataagtggagatcgttaaaggaacaaacgaatgatccttccgcttatgaggacgatgatctatggatat

SEQ ID NO: 298179 - DNA, 425 bp, Zea mays
gcgcgcgcacgcgagcgtaagactccgcataccgctagagccacacccacctttctttttcctggtctcctgcgcccgatggctgcgttccctacatatgcgggtgggacaccttcaaacccaagaccgcaaatgataaccacatacatgatgataggaaagagatggggctgacgttcaccaagctgatcagacgactgttcgccaagaaggagatgcggatcctgatggagtgactgtgcgccaccggaaagaccaccatcctctacaagctgaagctcggttagatcgtcaccaccatgcccaccataagattaaatgtacaaactgtggagatcaaaaacatcatactgactgactgggatgttggtggccacgacaagatcatgccactgtggaggcattactttcagaacacccagggt

SEQ ID NO: 298180 - DNA, 365 bp, Zea mays
tttcttttttccgggctactccaacctttggctcggtcccctgcatctgcggctgggacaccaccaagcccaacaccgcgaatccgtatccgaaccacaaggaacagatggtgaatgagataggggcgtcacgatgaactcaagctcactacgacgcctggtgcccaagaaggagattccgaccctgaggcagggactagacgccccccgaaagaccaccatcctctacaagctgaagctcggcgagatcgtcaccaccatcctgaacatgctattcaatgttctaactgtggaggacaagaacatcagctccactgtctcagatgactgaggccaggacaagatcacgccactgtgtgaggcat

SEQ ID NO: 298181 - DNA, 363 bp, Zea mays
tttgcttattgtcgtacttgaacatgtaggtgatgtattcgttgctgatgaggtgaaggttaaggactccaaaacccttctctttggtgagaaggaggttgctgtgttaggcatgcaggaaccctgaggagatcccgtgtggttcggttggtgccgcataagttgttgaggctactggtgctttcactgaccaggagaaggctgcagctcacttgtagggtggtgccaacaaggatgttatctatgctcctagcaaggatgcccccatgtttgacgatggtgtcaccgaaaacgattacaagtctgacattaacattgatttcaatgctagctgcacaaccaactgacttgctcttttgctaa

SEQ ID NO: 298182 - DNA, 347 bp, Zea mays
tttgtttattgttgtacttgaacatctacgggagggtatcaatactggggaggcgagggtgaaggactacacaacccttctctttgttgagaaggaggttgctgtgtttggctccaggaaccctgaggagatcccaggacgatcggttgtgtgctgaatttgttgccgagtctactgcagtattcactgaccaggagaaggctgcacctcacttgaagggtggcgtcaacaatgatgtcatctcttctcctagcacggatgcccccaagtaggcaggaggcggcaactaaaaagattacaattctgacattaacattgtcttcaatgctagctgcacaaaccaactg

SEQ ID NO: 298183 - DNA, 273 bp, Zea mays
cggcgtaaacttaaattctctatagtctacccacgcctattttctattctcagcttgccctccactagggggctgttgcatacctgggtggcctgtgtaaagacaccaacctgttcgccatccatgctaagcgtgtgtccattattccaaaggacattcagctggcaaggttgatctcttctcttgagggccctaatcgccacctcattcatttttactaaaacattaagtcctgcttttattgttaatctgttgccattgtaaggacatatt

SEQ ID NO: 298184 - DNA, 301 bp, Zea mays
ctcaacacagcacaggcagttcgagagagagagagagagagagagagatagaagatgtcgtggttcgggcaccaccaccacaaccagcctttttccccggcgtcgggccccaaccaggtgttcaagatcttctgccgcgccaacgagaactactgcctggccgtccgcgacggcgccgtcgtgctggccccggtcaaccccaaggacgacacaccagctctggcacaggcacatgctctagaacaccggtcaaaggcacgaaaaacatatccgcgttttcgctcttcaacaaaggcacagg

SEQ ID NO: 298185 - DNA, 359 bp, Zea mays
tttttgaagcaccagaaccttgcaagacaggggaacttgagataaagggggcgaggaaagagttgatgagaaacagagtagcaaatgcagaagaaactcctggtttcacagtatatctgaatcgaaggccagcaagcttggttgaggccatgaaggacatcgactgtcagttctcggggatatgtgacgctgctcgggaaatctcagtaatgttggaggcaagtagagctcagtactcaacctcaaacgatctttctgcgaagatgctgaacccagttgcacttttgcgttctgcgtcatcccgttcatcattatctcgttttccttttgcttcctctagcttaatagatgatctcttt

SEQ ID NO: 298186 - DNA, 398 bp, Zea mays
ctccgccaccgacctggccgcgcccaccggtgcctggtcgcttgccttggtaggcacccccggcgccgcgtcctactcctggccgcccacacccacccaggccaggctccgcgtccaggagaacgtccgccggtacgcgcgcaactacgccgcgctcaccatcctcgtcttcgcgtgctgcctgtaccggatgccgatggcgctgttggggatgctggtcagcctcgccgtctgggagggcgtgcgctactgccgggaccattggggtcttaccaccagggctccaggggttgcccaggctctgctgcactgtgcgcagattgctaccgccatactcctgtacgtctgcaacctacagtttgctctcgtgtacgccatcggattgagctatgcgttga

SEQ ID NO: 298187 - DNA, 242 bp, Zea mays
tctacccacgctttttttttctaggaggcgctgcacctgagggggggcatgtcaggcctggggagggagcacgtcaaggtgtgttcttatcataacatcctggtgatcaagggcgagggctagaaggatgatagcgaggactaggccgtcctgtctcctagatacagcgttctcatctagctcgcgccagaggtttacaggatggacaagatcaaggcgtatattaagaacggtgttcttca

SEQ ID NO: 298188 - DNA, 284 bp, Zea mays
  unsure (1)..(284): unsure at all n locations
tctttttcttgttccgaccgcgtccgcatccgcggcggctttttgaacgcgggggcgcgtcacggatccactgggcgtgcgcgttaccggcgggaggcgagggcaggcggtggtcgcgatggcgttcgccgacgctcgcttggcggagattgccttctccatcnnnnttattctcgtcttttccaagccagggatcaagttccaggacattacgacactgttgctcgaccccaaggtgtaccgtgacaccatcgacctctttgttgagcggtacaaggaccaat

SEQ ID NO: 298189 - DNA, 271 bp, Zea mays
tcgacccactcttccttctcttcacctcaacccaggaacagagcgaggcgtctccttggcacgtgtggtcgtctaatggtaatggctaccgttccaggggatctgatctggcaggttgtgaggaagaacaactcctttcttgtgaagcattttgtcaacggcaatgccaaggtgcatttcaccaaggatccgaacatcctttacatcatccactccttcaaacactcgtgttttgcgaacaagaagactttgactatccagtcagctgcaa

SEQ ID NO: 298190 - DNA, 384 bp, Zea mays
aattcttcccacacttccgtcgttttgcctctgataattcacaacaggagccgttttatccaaacagggccgccactcccttctcttcttaaacttatcccatcttccgttggataccatccaacccttgccactgatcttggacgactgcaattccttttcactacatcaaatatactttcttttacctttctccagcctatattatatccttctgatcactttacacatccttctcacactacctaccttagcccaacttgatactacaactttatctatccccttccaactcctaaacttgttatatatccagatgttcatccacctcattccacataaactaattctttccccccacatacctccttattatcatttaca

SEQ ID NO: 298191 - DNA, 256 bp, Zea mays
tcgacccacgcgacttttttcattttcctttcaaaaaccatcccggattatctggtaaacatggcagaactttggaacctcatcttatccctctcctttttatcatctatgtttgccataggctctcatgctgatggagactgcgagaatgacctccaaagcctgataattgactgctagacatacatgatgttcccagctaatccaaaggttcctccttcagatgcttgctgtggtgtcattaataaagcaaact

SEQ ID NO: 298192 - DNA, 401 bp, Zea mays
gatttccttccccacccgctgtcagtctgactcccgccgcgcgcgctctgtctttcctcgccttcgccgccggcgacgagcttgagctcgagctggttcctcgtatagaagacgacggccgcggtatggagcccatgaacgtagacaacggcggctgcggaggccttgacgcgcagatcgaacagctgatgcagtgccgcccgctcgccgagcaagaggttaaggcactgtgcgagaaggccaaggagatattgatggaggaaagcaacgttcagcctgtcaagagtccagtgacaatatgtggtgatatacatggacaattccatgatcttgtagagctttttcgaattggcgggaagtgtccagacaccaattacttatttatgggagattatgtagat

SEQ ID NO: 298193 - DNA, 230 bp, Zea mays
tctacctattcgtctgttcctgcagctcatgccacggggacccgtggatctagcacaggtggctggtcctacctaacttactgttagaccatctgtatgtcttcaacacagcgacagatccaagtgcaccatccttgcataaggtgtctaaatctgaggacattacttaaattactgttctagccttttcttacacgaattatttccattacctttacaacataatgatt

SEQ ID NO: 298194 - DNA, 375 bp, Zea mays
  unsure (1)..(375): unsure at all n locations
ncgacccacgcgtttttggtctttagaccattagctttatctacgccanagggcaaaataacccgggcgacacgatnagggtgttgctcgttgccctcgctctcctggctctcgctgcgagcgccacctccacgcatacaagcggcggctgcggctgccagccaccgccgccggttcatctaccgccgccggtgcatctgccacctccggttcacctgccacctccggtgcatctcccaccgccggtccacctgccgccgccggtccacctgccaccgccggtccatgtgccgtcgccggttcatcttcctgcgccaccattccactaccctactcaaccgccccggccttagtcttattcccagccacacccat

SEQ ID NO: 298195 - DNA, 252 bp, Zea mays
  unsure (1)..(252): unsure at all n locations
cctctagagtcttcccacgcttcttgcttattgtagangaagaaaannacaaagaancttgtgactcttcatatgaagtctgacacactccaggaatcattaatgagatccatcagataattgatgatgactctgctgaagtcaattcatcatcagaagatttctttattttagtagctgctttaaaggagtttattttcaatgagggtaatggtgagctacctctggagggaacaataccttatatgactt

SEQ ID NO: 298196 - DNA, 433 bp, Zea mays
ggcgccgccctttttttttttttttttttttttgagcaaatgacatcttttttttttattgtattgtcttgcaaattacgcagcgtgtttacaaaatagccgggggatctcacaacatgctacagccaatccgggtaggttcacatccaggaattacaaaacttcacttactgctgagtgcggaacaaaacctaacacgaccataattatgacattgcaactagacgaccacccagagttcaggacagtaatacagaaatataaatgactgtttacttcttcttggcgtcaccagccttggtcttcttgacaccacggatcttcttggccctgttcttccgctctttcatttgcttgcggtacttttcaaccttattagcaagaccattcctgttgaggcggtatttgtgcttgaacttcttggcagactcga

SEQ ID NO: 298197 - DNA, 416 bp, Zea mays
gcggccgccctttttttttttttttttttttttggatctagaatagcgcagttcaattatgcagttccaaagggtacacaaggatgattcaggtaaatgactactctgtgcacatacgcaggagatgatgatatacaaacgatgcactggagctagaataccaaaacgagatggtaaaatggcaatagctttaaaagatcaacagcattcagtacgacaagcatccaggtgcattgaaagtcaaaacactaggcagatgaagacttgacagtggcagacttgatgatgtccacgaattcaggcttcaatgaggctccaccaacaaggaatccatcaacatctggttgagctgcaagttctttgcagttagctccatttacagaccctccataaattatccttgtcaattcagcaac

SEQ ID NO: 298198 - DNA, 338 bp, Zea mays
  unsure (1)..(338): unsure at all n locations
accgtccgnattcccggagcgccgccctttttttttttttttttttttttttttttttttttttttttttttttttttttttttttttttttttggggacaaaagattggacttggggaaaatggaaacaatttccaaaccatattcgaaaggcacaagcctataaggcagtttttttaacaaaaaaagacattactatttaaactactcatggaacataatcttaaactcaagctgcggggaaagccttttttcctgcagcaacaaatccaactggaattacttttacaacaattaacctctacaaattttgatagggtccttcacttggccaaata

SEQ ID NO: 298199 - DNA, 412 bp, Zea mays
cggccgccgcacccgcctccaccgccggaagtcgcggctgcggtacacgtacgccacgccgcggggcgacgaccccgccgcgctgccgacgagcagccggcactgctcggggccggggccgcgccaggccgtggtcgggtcgcggaactgcgtcgcgttgatgccgccctcggggacgatgacggggttgtgcgagggcttcacccactcccggagcagcgggtccgacacgttcttcgggtacgccacgttctggacctggtagttgatgtccgggtggtccacgcccgtgtacatgatcaccgggccgccgtcgacgggcagcaccgttgtcgacccggaccagcatccgtacctgtcgcccgggatgcttggtctgagcgccggctctagcgccacccaatttatgagg

SEQ ID NO: 298200 - DNA, 337 bp, Zea mays
ctcgatccagccgctttacagtgctggcgttggcctcttcgaccggctcgagaatgccattcaagaggtacgtggagatcggtcacgtggacctggagaactacgggaaacactatggccgactcctcgctaatcacgatgttgtcgaccaaaacagggcactagtggacccccctgatatgggcaggcgccacattaacttcaaacgggtttaacttactgacatcaagattgacatcaaacgcgttcccaagaagtcaaccgtgatcaaggctatggtggaagctgatgagaagactaactgggaaaacagttcatggggcatgaagctgattgt

SEQ ID NO: 298201 - DNA, 317 bp, Zea mays
  unsure (1)..(317): unsure at all n locations
ccctntcaccctcatngccaagatcaagatcgggatcaatgggttcggcaggatcggtaggctggtggccagggtggccctgcagagcgacgacgtcgagcttttcgccttgaacgaccctttcatcagtaccgattacatgacctacatgttcatagttgacactgtgcacggacagtggaagcaccattatgtcaaggtgaaggactccaagacccttctctttggtgagaaggatgttgctttgtttggcttcaagaactctgatgtgattccatttggttcccttttgcgctgaatatgttgttgagtttact

SEQ ID NO: 298202 - DNA, 250 bp, Zea mays
ccgtccggattcccgggcggccgccctttttttttttttttttttttaattttttttatttttaatagcgtaaatgggtgggtcagatagatggaggatataatgcctactgatgccatatgtacaaaaaccacacggtacatttttagattgcatagtgaaaatgcggagtgcgaggtccattttcttcaccagtcattataaagctggagagctcattggttagctaacctatctcacctgaatagct

SEQ ID NO: 298203 - DNA, 463 bp, Zea mays
cggccgccctttttttttttttttttttttttttttttttttttttttttttgaccaagggggggcacaaggctaccggggcccaaagggccaaaatttttagtctcaccctaggcatggggggacgcaattacatacaccaaacccatggttcagatgacggatccaccgtaattcggcacaaaaaaggggtccataagcaccattattgatacgtccagaggtaaacattattagcaggctcaagctaaaagttgggggcaggcaaaacagtctctgctcctgcgcaaaagctactagcttacatagcacagttgagcaaaaaaaaagtatgttcgttttcagcgtaacattttaagcggacttcacggtggccgcgttgattatgtcgatgaactcaggctttaaagaagctccaccgacaagaaacccattgacattaggctgtgctgctagctttttg

SEQ ID NO: 298204 - DNA, 451 bp, Zea mays
gcggccgccctttttttttttttttttttttttttttttttttttttttatatcaagcaggcatccaatcaccatactgggctcccttttgcccgcacatgttcagaaaaagaaaaaggctcccttttttttgcagagagtacttgaacctggatgaaccagggcgagacggcgtgaccctaaacggggcattcacgtacattcccaccacccctaacacgcgctttataacgacgactagtagcagtaatcacggtataatagtacggcggaacagggccttgagagctctggctttttttcgccgcgccactcgcggcctgagctcacagtcagaccctgaagtttttgccctcgaaggtttggccgaagcgccagtcccgcggggcggcgttccaggaggtggaggggcggcggtcgctgccgttgacgcggaaggagagcgcctggc

SEQ ID NO: 298205 - DNA, 467 bp, Zea mays
gcggccgcccttttttttttttttttttttgcagtgaatattattcaacttttttactgcatcccaatggatgaacaacgttgcttgctgtttacatcataaagtttgccaaggcctcgcttgttatccagatgtcataatacgcggtcaagacgctcttacaacgcatacgccttcactacatatgaggccttctgcacctattataacactagtataattatcagggctgcacaggttgcattctccattcctgctccacttgcaaggatttttgaaacttcttcagctgggaaataaaccccccattaggagccacttgaggtcgtttacttctaactagtgacaaggcactttcgaggctcatttgatgcttcttcatgagatatgcaacaacgattgtcacactgaacattttgacaaagataattcagcaggaaaaaataataatgctatgcaatgacttc

SEQ ID NO: 298206 - DNA, 415 bp, Zea mays
ccgggccgaattcccgggcggccgccctttttttttttttttttctactgtcacttgtgatttttaatttaaaaacacccaccgaccgcggtgtaagggtgtacataacctcaatgggatacacagacatgccgccgcagagcaaaacacgtcgcagatcccctctctctctaactccgtccctctctctctctccctctggtcccgcaaaaactaggcgttggaggcacgttagcgccaggttttcctcccatgcttacgcagccacagccgtccacaccttggatgctcacagctcgtccttgacgggctcggcggcggctgccttctcggatgccggtggcgcctgggtggtggtggtggtggcgaatccttctgtcttcttgctctttttgatgaagttgacgattttatt

SEQ ID NO: 298207 - DNA, 336 bp, Zea mays
  unsure (1)..(336): unsure at all n locations
ccgtccggattcccgggcggccgcccttttttttttttttttttttttttttnatttacctttttttttttttntgcgggaaaagccaaaggcaagaggcatccctcgatgttttggggagtttgagcaacgcgcttgcaaacataaattattgaatggccattctcagaactacatataaccaaaattggacacaggtggccagtgtttagttgtcagccacttcaaagagggtttgctcgtagtcagcaggagcctcaaaaccgtggggggtcattacgggtgcggctacactggctagcccaggggttttgatttccatccggaattttactc

SEQ ID NO: 298208 - DNA, 466 bp, Zea mays
gcggcctcccttttttttttttttttaacacaactagaatgcaattttttttgatatggcactacgtttttcagtcatctgataagttcagtatgatccctgttttccatgtaggcgtgatatttctcatacaacaatatgagcttaatcaattctaaggatttaaatggggcctagtaaagttccaagattgcgatcaaaagctgcatctgcaagtgctgtaggacaaagtattaacccgactagaatgttcacttcttgatatggcactcaacgtttttcagccatctgatcagttcagtgtgctccttgttttccatgtaggcgtgcaaaaatgcagcaaggtcatcattcactccaattttctccaggtagtcttgtacggcactttgcatttcctcatccaactcactgaattggcggccgacgtactgctgcactggggcaggcccgccgcggcggacgg

SEQ ID NO: 298209 - DNA, 409 bp, Zea mays
  unsure (1)..(409): unsure at all n locations
cggccgccctttttttttttttttttttttaaattttttngnnttttcttgcggcaacccagngcaacaaacaaagggggagttcataatcgggctttttagtcgcctaacccaccccggtcacacctttgttcgggccgcaaaatggaatctgatgataaacatgtaaaagcgcagctcgatggcattcgctgcatcgcgctgagcctgcttcgaaatagacctgtctcctgatacaccccacctgaggcgtgcagctatctaagcagccctagttcgtcttcgccttgggggccttctttttgccgccctgccgcttcgggatggagttcttcatgcccagaaagaagagcagagcttcgatcagcgccaaatcctgggtgaactttgcaaagaggcctgcaaattc

SEQ ID NO: 298210 - DNA, 405 bp, Zea mays
tgcggccgcccttttttttttttttttttttttttttttttttgggatacaatggtcaatcagccatccacactctaatggagccaatttgcaaatcgttctggcccaaaatccatgcaattcctgactcaatttattccggcccacgcatgacaaaaatagttttttctcctcgtcactctaacgtgcctgttccatgcctagtaaaattgtttttcactagaaagtattattacatggtgaaagaaccctatggtgccgctgcagcagctgctgctggagccttcttgggcttctccacaacgattgcctgggtaggcagcaccattccagccacggaggcggcgttctgcagggcgcaccttgtcactttggcaggggcgatcacaccaaccttcaccaggt

SEQ ID NO: 298211 - DNA, 331 bp, Zea mays
gattcccgggtcgccgccctttttttttttttttttttttttttttggggatcggattaaatcctacacaattggattccaaattctgggtgcatgatgcattcctacattcatatacagaaagcaaagatatgtcacactttggtccgaagtagaaaacagcaggaagcaagcggagtcctggccacacggaaacagaacagggcgtcatgtggaggaacagaatcggaacggtgcccagctcctggcgcgtccgggcggaacttaagcgttgctccggtaggacccgagcttggtggcgctggccctcatcacgtactggtgggaggcg

SEQ ID NO: 298212 - DNA, 467 bp, Zea mays
accgtccgtattcccgggcggccgccctttttttttttttttttgtttttttttccccaatgtttatcattgttttttcctcttcatacccctgcatgatactgtcatgatatgatgatcatcgttcacgtgacgaaataccaaccagaacaaataacaaggcaaaaaaatcgctgggctgagcaagcgccccggcaagggccctacttgatgtattgggagacccacttgaaaccatcgccgtagcccatcttgcgaacaacactgcacatgaaaacctcaagtggccggacattggagtcgccaaggttgaccttgcccttcccggttgtgaagttgctaaggcctaggtgataccgcagctcctcttcagaggcagcatacgggatatcaatcttgttgccaaggatgagaaatggaacatttgccaaggaatcatctgacaagagagcgtccagctccttttt

SEQ ID NO: 298213 - DNA, 313 bp, Zea mays
cgcccttaccttccgtacagccgcatcaacacacaagacctcatcctattcgatccatgttccaacaaaagcgggggtctttatgcggttctggtcacctcctacaggaaaacaaacggagagactttgcacatcctgacctaaatcaaccatggagcacggaaaataaaaatcaaacacagtccctccccgcacgcaccaacatgagtgattactcggcaccatggcatactggcatatgcaaacaagaggcccagttcaaatctcggaagggtggcgcaaacacgaaccacttggaagaggaaaagaacca

SEQ ID NO: 298214 - DNA, 306 bp, Zea mays
  unsure (1)..(306): unsure at all n locations
atgcgaccaacaccatctatgggagagggtcacctaaaaacaatttatctcaccgccgaaccacaacannnncaactgggaaaacactcacggctcccaagagacataccgcaggtgatacccctggagtgggaccaactctccctgtacccaccaaaccagctctaatcagaaagtcatcttctgcctcatccatttcgtcgcggaccatttctctcctttcagaacagggcacccgctgtggatactgtttgggtctgtgttaccatccaatcccatgctccagaagagaacagcgtccccttt

SEQ ID NO: 298215 - DNA, 264 bp, Zea mays
  unsure (1)..(264): unsure at all n locations
ggcggccgtccttttttttttttttttttttttnttttttttaaattttttttttannnannnnnnnnnnnaaaagaaagaaactacgggggaatttattgcccaacctaaaacaaagctaaatgatattcaaatcgagtaaccaacaggtgaatgctttataggtaggcgggtgaaacaaaacggcgcatgggaataccccttctgattggaaaagaaggggaggccgcacttgccgaataaggggcggtagaaatggatgac

SEQ ID NO: 298216 - DNA, 338 bp, Zea mays
  unsure (1)..(338): unsure at all n locations
tgcggccgcccttttttttttttttttttttttttttttttattttnntttttttttttaaaagcannagagnccacaagggccattaccagggaaatgtacattactcagcgaaacagcagctgagtttcgatacgacgcgaggccaagcataaaccccaatccaaatccggccccaacactgcccccaacaaacaaacccaagctaaattattcactggatgcaatacgccaaggacatgcacgagctcacggattacagaaccaaatgaggcgcaaactttggtgcccaaatgaccaaaacagaacatgacgaacttttagaagccctgctcgat

SEQ ID NO: 298217 - DNA, 307 bp, Zea mays
  unsure (1)..(307): unsure at all n locations
agcggccgccctttntttnaaannnnanannncggcacaaaaaagggggattttttttccatnatnganacgnccagagggaaacattattagcaagcttattctaaaagttgggggcaggcaaaacagtctctgctcctgcgcaaaagctactagcttacatagcacagttgagcaaaaaaaaagtatgttcgtcttcagcgtaacatcttaagcggacttcacggtggccgcgttgatgatgtcnatgaactcaggcgttaaagaagctccaccgacaagaaacctatcgacatcaggctgtgct

SEQ ID NO: 298218 - DNA, 249 bp, Zea mays
  unsure (1)..(249): unsure at all n locations
gcggccgcccttttttttttttttttttttaaacgtcaagcatggattattttaactaaaacnggancacgnnnggggacatgnnccgaacaagttacatgncggatannacngcnaaaancaacccagggcactccaagagnaaaancngcaggacgcagaaaacaganncacaggacnngagcagacaaaaaagcacangcancccgcccggaaaggagggcaccacaggngcacggaaaanggcac

SEQ ID NO: 298219 - DNA, 487 bp, Zea mays
ttcggccgccctttttttttttttttcaaaactctcgaacttgtgtgctttggtttaaatataaatggccacattttactgttcatgtaaaagctactagcagagggtacaatacaaaatttggaaaatatgtattgccagtttatcgctcttgtaccatttagaaactagtgagaaaaaaacattgagtttaatctttctgcaacttggctggcgctgtcctctccttatgggatgctgcatatctccttttcttgttagctcttcttctcttgcgctcagcctgtgtaagttccccctcttccttaacatcaccttttccttcaaatatctcttcaggggcaagcattgcagcatccgaaacagctacaggtgcaatctcttccatggctaaagcaggcacatttgcttgcacagacatatcctcaatgactggttttggagcaaagtggaaatgtgatagcgcatccaatttcaaacatatcct

SEQ ID NO: 298220 - DNA, 366 bp, Zea mays
  unsure (1)..(366): unsure at all n locations
taccggtccgtattcccgtgcggccgcccttttttttttttttttttttttattttcttattttttnctcttttnnannaannnananaaagggaagggtttgctacaaaaacatatttttccaacccaaaactaaaagaaccacccaattgctaaccaacacaccaattatacacccaaaaaaaacagcgccactgggattacaccttaaaaatacagtgaaacaacattctgccttaaccacagcaaaaccaaaacaagttaaataattgctctacccaaccttaacacggaatggataaaccctaggacatacaccctgcctaacgcccacacccaaatttatcaaccataccaccacgcccc

SEQ ID NO: 298221 - DNA, 421 bp, Zea mays
cggccgccctttttttttttttttttttttttttttaaggagacgacatcatttatcttccaaaattcaaaccaggacaacaaattgtgctactaatctcggtacagagtgatgactaattactgtcgactgatcaaacacaacggttgcactatgctgatggcaacacggagggccacaatttgttttaaaccttgaatccacgggtgttcctcctgccacgagccttctcgaacttccttcccttggagcgcacatacggcttggtgtggctgtgcggcactccaggagccttgccaaagtgcctcactgcctcacgggcattcttggggcccctcaagaggaccgtgttctcgccaagtggagcacgaagagcaagctggtcaaatgtgaggcactcgccaccagcattgacaatcct

SEQ ID NO: 298222 - DNA, 419 bp, Zea mays
  unsure (1)..(419): unsure at all n locations
cggccgccctttttttttttttttttttttttttttttttttttttttttttttttttttttttaaataaaaaacctgctcggatggattttattgttggataaaaaaaanagaaaaataaaccatgacaacatacacactacattttaaggtgagttaataacattttcgttcaagagaaaagcagacaacaaaaacacaaggccggccggggacagccaccacacttttttggttcgttacgcctaagaaaatcccaattttgaaagcttaaggggggccttggcgtagccagaaaaaaaagcgtcctcgtccgctgcgttttttgaaacaagggggcggaaggatggatcaaaaaggagggctttgccacttggtagctgaaaaaggccttccttttttccgctcaaaagcttctt

SEQ ID NO: 298223 - DNA, 405 bp, Zea mays
  unsure (1)..(405): unsure at all n locations
ttcccgggcggccgccctttttttttttttttttttttttnnnnnnnnnnnnnnttttattcaaacaaggggctgnctccaactcagcagatttgaatttttgccgactccaactcagcatatagaattgtttttgccgatacatagccagcattacagcatagttgatagaacaaaaaaagggggctgctcgattctccatcggcaggaccaacttacacgaaatttaacagcaaagagactaattaacatacaaatataaagattaccatcatcccacataggaagcatgttttttggatgtccgaaaataagctttaacgagcaaaccacactccgcaacctagcttgtaggcaggagttccaaaacgggcacgcaaagagaagcaactcagtacttgtagt

SEQ ID NO: 298224 - DNA, 386 bp, Zea mays
taccgtcctgattcccgggcggccgcccttttttttttttttttttttttttaaccacaaacatttgtctcttcaatttctccatggtacactgataacagagttcaaggagcttgtaacatgggtagcaaaatttaacgatgcaacaaaaataccaaatactatcagagcatgcatgaggtaggttccacagtagcagaacatcaagttgtatgtgctcaacggtagcggcggagggaaagggtctggttgcgcttccaggtggccctcctcgacggcctattcttgtggtgagtgtggcccttgccacgcaggccacggaacttcttgcctgcggaggtgagaccacggagctcccggtgcttgtgcacaagattggatagcca

SEQ ID NO: 298225 - DNA, 411 bp, Zea mays
  unsure (1)..(411): unsure at all n locations
tcnacccacgcttcctttctcattgactagcatactacaccgttgcactaacataaagggggagtgccacaaaacaaanaatttttctttcaatacctttattctacttatgcttatcatatgccttaaaaaatcattgcctagcaaataatgttcttgtactttctttctgaattcaaatcatttatattctgtcattgttatcatataaaaccttatccattctctttgatttactttttgtttatgacattttcttgttgttcttcactccaattatggtcagtgttgctaaatcttttcattctcctataaaacttctttttcctactgcttatgatacactaccattctccatgcttttcctttcttacattttaaaaccttacattnttttttcactttcctttc

SEQ ID NO: 298226 - DNA, 268 bp, Zea mays
gagcactcgccgtcactcaccagcaaattgccgagccgccccttacggatgtgctttcgcgacccatttgatcgattcctgatggcgcccaacgccgagaagaagcccgcggagaaaaagctcccggaggaaaaggccgaaaagaaaccaagggcggaggaagcgcgtgcctagcaaggagggcggcgagaagaaaggaaagaagaaagcgaagaagaagcgtccagacgtacaaagatctacatcttcaaagtgctcaagcaagtgc

SEQ ID NO: 298227 - DNA, 390 bp, Zea mays
tatcttttcatgccacacagaatacaacccgggagcctctctcggtgggcaggcgccttctcctccaacaccgtacgctccacgcctcctccaataaagcgagagcttcttcataagaacaacaaatcaaaagcgcgatcaactcactgccaacaaaacctcaacaaccaatactcatatctgatctcgaccaacagcttccatcttcctttgatccgtatgctcaggcaaatgctgtagactatcttgctcaccctggaacgaatgattatctgcatgtacgcatccagcagcacagacctagacagactctcactaacactcaacgtctgaagaaagagttcagctataacaagatcctcaaggatctgaagaaggaattctcctgca

SEQ ID NO: 298228 - DNA, 285 bp, Zea mays
cacaacgcaacctgacacactgccttcgtggctagaactgtggcgtgcaacacacatctttaccacttgcgctaaccacattcttgctcgtatcaatgaatgtaacctcatttgcacccattgcgagaccaaaccagctgctgattagaactatggcaccacaagcgatcattccacccaccgagtaatccagatcatgcgtacataccaccatgacgttgtgaggctctactatattgacgatatgctcgatatcacagaagtgcagacatatcttatcaatag

SEQ ID NO: 298229 - DNA, 344 bp, Zea mays
cgccgcacgtaccgtccggattcccgggcggccgcccatttttttttttttttttttttttttttttttttttaaaccgaaccagaataccgtattacttaaaacgcgtgccacgataatattggtcacgcaacaaaaggttctaacgcggatacaccgcgacgacgacgataaatcgagcagcgactgggccagccagccactgcagcagacacacgagactgacacaatccgcttagtccacctcctcgatcttggggccagggccaccgctttcagccggagcgttctcgttcatgccgccggcgccacccatgtggggacccgcgccctggtacattttg

SEQ ID NO: 298230 - DNA, 415 bp, Zea mays
tcgcctgcacgtaccgtccgtattcccgggcggccgccctttttttttttttttttttttttttttttttttttttttttttttttttttttttttttttttttggtggggaaaaacattgttttggtaaaaacatgcggtccaggtcacaaatcactcggcttccaatttgctaaacaaacaacaacctttgcatagagaatctcatgatgatcccccccttaaaaagatccagagttttttgaaacaacagatcccattaagaccccccgtctagttgtcccccatttacttaggtgttgccctgaacttttggtagcccttgatgacctttttgacagcatccaaaaaatccttttgtgtccccgttttcctgtgggcccaaatggggtacattccggcttttgggcaaacc

SEQ ID NO: 298231 - DNA, 296 bp, Zea mays
accgtccggattcccgtgcggccgccctttttttttttttttttaccgaaaagaagaattaccgtatttcttaaggtttgccagtagccgcgataacatggaaccgaccgactatcacgaggtgcaaaaaaaataaccaccacaaaagtaccagcccaccacaaataaagtttaagcggacacaccgcaccgaccgacgacgataactcgcggcagcgactgggccagccagcaactgcagcacgctcaagactgacaacaaaccgcttagtccacctcctcgatcttggggccag

SEQ ID NO: 298232 - DNA, 412 bp, Zea mays
tcgcctgcaggtaccgtccggtatcccgggcggccgcccttttttttttttttttttttttttttttttttttttttttttttttttttttttttttaggggggcacaaataaattccaccattggggggtacatagttttaaacaaaattcttattaagagaaagactcaacgccagcagcgtcttcctttttatactaatgaacccccacaggagcacattaccacaagggctaggcaggtacaaaaattccaaaacatgggataaaggggaaaaaatcacaaattgtccatgaccacgactttaacataaaaaccccaccgttcttattacccccttttccacgggattttgacaaaaccaaaccttaccaggttccttaccacccttttttggtttggtttttcttga

SEQ ID NO: 298233 - DNA, 359 bp, Zea mays
  unsure (1)..(359): unsure at all n locations
cctgcacgtaccggtccgtattcccgtgcggccgcccttttttttttttttttttttttttttttttttattttttttttttttttttttnntttctcaaacttcgaaatgcacattcagagttttcacatgcacacaaacattacgagataaaggtggccaacaacaaagagaggggttccacaaataagcaacttgctggattcaataagcattgttactgttccatcaaataacagttgctaccgggggagaccagacacaggagcacctaactacagcaagacacgcgaacatacgagggaagcctgcaagcggaggccacccaccctatgacgaggtgaacttggtgaccgcct

SEQ ID NO: 298234 - DNA, 387 bp, Zea mays
tcttttttagtcgtcctcgctcctcatagcgcgggcgtcgagaagacgcgtggggacaaggacatgatcttaaggacccgttttaaggactacacacggatgccggccttaacgctcgtcaacatgaccatggcgctaaacatctatgcacttgtgactcacattactcacgatgacattaaggttttcaccccggagccggaggaccctgtcgctctgttgactaataccaaccacttgtacaagaccttctgttgcattcgaatgctaaaaatcactggtctgaattttgacgcctatcatggctacaagaacacactgctgcgggcactactgctccggatgaggcctatgatggtgatgacctggctataaccagagatgaaa

SEQ ID NO: 298235 - DNA, 470 bp, Zea mays
gagcttgacgcgatgcacgcgtcgaagcttggattcctttaaagtcgtctcacccgtcttgcaaagcggcagtgcgtagagaggatcggcgaacagaacagcatgaagatggtcatcgttctcgtcgtgtgcctggctctgtcagctgccagcgcctctgcaatgcagatgccctgcccctgcgcggggctgcagggcttgtacggcgctggcgccggcctgacgacgatgatgggcgccggcgggctgtacccctacgcggagtacctgaggcagccgcagtgcagcccgctggcggcggcgccctactacgccgggtgtgggcagacgagcgccatgtaccagccgctccggcaacagtgctgccagcagcagatgaggatgatggacgtgcagtccgtcgcgcagcagctgcagatgatgatgcagcttgagcgtgccgctgccgccagcagcagcctgtacgagcc

SEQ ID NO: 298236 - DNA, 316 bp, Zea mays
  unsure (1)..(316): unsure at all n locations
tcgtcccacgcgttcttttctatccgcagngcataaacaggatcggcgcgcatatcaacatgaagaggcggcacccttctcatcttatgcctgnctctgtcaactgccagcgcctctgcaatgcagatgccctgcccctgcgcggggctgcagggcttgtacggcgctggcgcccgcctgactacgatgatgggcgccggcgggctgtacccctacgcggagtacctgaggcaaccgcaatgcaacccgctgtcggcagcgccctactactcctattgtgggcagacgagcgccaggtaccagccgtttctgcaac

SEQ ID NO: 298237 - DNA, 396 bp, Zea mays
tgatggctggtgaatcatggacggtgccgactccagtgaaagaactgggcggcctcgtggacgagccgccgagccggttcgtgcagcgggaggagcaccgccctggcagcctaatgctcgcggctgacatgccggatcccctccctatcgtcgacctcaacaagctgtcgaccgccgacgaggcagccaagctccgctcggcgctacagacctgggggctttttctggctaccaaccacggcatagacgcgtctctgatggaggatgtggtggaagcgtcacgggagttcttccaccagccgctccaggagaggcagaagtacagcaacctgagggaaggcacgcgcttccagctcgaaaggtacggcagtgatccagtggtggcgcaggatcata

SEQ ID NO: 298238 - DNA, 376 bp, Zea mays
  unsure (1)..(376): unsure at all n locations
tcgacccacccgttctttttactcaacacagcacanncanttccgcgcgcgttttttatatcgcgccgcgcgaacatttcatttttccnncaccaccaccacaaccagccgnctccccccgcgtctgtccccaaccaggtgttcaaaatcttctgccgtgccaactagaactactgcctggccgtccgcgacggcaccgtcttgctgtccccgctcaaccccaacgaccaccaccatcacttttacaacgacattcgcttcatcacccgggtcaaggactaggaaggcatgccggcggtcgcgcttgtcaacaaagccacgtntcttgccatcaagcacttcctcttccagtcccacccgatcaaactcccgcctt

SEQ ID NO: 298239 - DNA, 213 bp, Zea mays
tgttattttacgtctggatattaatggccgggacctcacagactggctaatgaaaaatatcactaagaggggttaattttggagaaactgcggtcagcgatgtattcttcgggacattgaggagacatttgagtatctcgctttcgactaccagcaagagttcgagactgagaaggacaggtcctcagagggaatgagctcagagctacctga

SEQ ID NO: 298240 - DNA, 405 bp, Zea mays
  unsure (1)..(405): unsure at all n locations
tcgatccacgcgnctgtccttctgcgcctccatttcggcctcggcgccttttatagaacaagcggggctccaaccattggtaaagagaagtcccacatcaacattgtggttattggccacgttgactctggcaagtcgaccaccacaggacacctgatctacaagcttggatgtatttacaagcgtgcgatccagaggtttgagaaggatgctgctgaaatgaacaagcggtccttcaagtacgcatgggtgctcgacaagctcaaggctgatcgttagagaggtatcaccattgatatcgctctgttgaattttgacaccaccaagtactactgcacgagtattgatgcccctggacaccgtgacttcatcaagaacatgatcactggtaccttccatcctgac

SEQ ID NO: 298241 - DNA, 479 bp, Zea mays
gcggccgcccttttttttttttttttttttttttttttttttttttttttttttttttttttttttttttttttgttttttttttaaaacccgggcaaccgggggagttgaaaaaaaaaaatttcaaacaaacagtttttacccttagcacggtttttgggagggcagccccaaaatttgtaataagttttggccgccgttaaacaccgttacaaaatttggtttggtttccgggacttcacgttaccaccaccattgtccatttacaaccatttacaggttgtggggggcgtggtaaacaccgccgttagggttaccgccaggggccccccccgaccgtttggacacggccgacacgatggggttgcacacggcctccaccttcttgggctttttcttgaaggcctccttttgggccgactggttgtcgcccagccactccagcgccttcttgggggccttctccacctttttttttt

SEQ ID NO: 298242 - DNA, 451 bp, Zea mays
cggccgcccttttttttttttttttttttttttttttttttttttttttttttttttttttttttttttttttttttgttttttttttttttttttaaacaacttaggaaaccaaatgctttaaaaaataatcccaaacctccggaaagaaaaacaaattttttccatacccatttaggtggaaacataaaaactggttgcttttttatgggcgatccaactttttaatttaaaaaaggggccgcccaagaaggtattttaagcacagggttcttttaatgggcttggtcgggaacctaattcatccttttgaggagctcattgggggagttctcgggggtaccgggattgcccccctccaaaaagggggtccttttttttttaaggcctcccaggggggccttaaaatttaatggccaaaggaagttgttggccctcttgaggggggggc

SEQ ID NO: 298243 - DNA, 469 bp, Zea mays
  unsure (1)..(469): unsure at all n locations
ngcggccgccctttttttttttttttttttttttttttttttttttttttttttttttttttttttttttttacaccggaacacgggattttattcctaatgataagggtgacatccaaactagacatatggggcttgctgtacatccgcctttccgatcaaagggggacgcatccagaatatagtactgcactgaactgcatgcccccagacacaggcttgcccacacaaagcacaacacataaccgcctggctggggctatcggggggaccgaaactttacggaagggtacgtagcaacagccaccgcctttaagggccatatgccgccgccccggcaggggttaaaggaggacccccgcgcggtccgctcgggtgttttttttttaaagacccctgcgcctggtaaatgcggggctgggcatgatccttgatgtcgggggccttggacgccagccttgccttgggg

SEQ ID NO: 298244 - DNA, 464 bp, Zea mays
cggccgccctttttttttttttttttttttttttttttttttttttttttttttttttttttttttttttttttttgggaaaactggggaacgggttttgttttttttaacatgcccggaaaggtgggtccttattggggtacaaacaaacaaggcaaagagcaggggccccccaagggaatttggtcctggtgctccaacaggcgaaacggggacgggtggccaaaacaatgcagccaaatgatcataggaatctacagttttttcggggggggtacgagggtccctacatttccgagctcctaatttttttgctcacgggcgagccgaacgacggccccccctttttgtaagacaccaggtactccaccgggtacccctttagcttctgaggcatgatgcttaggtctttaaaagtgaaagcatttttcgattcgaggttgtccacagcaaatgcgttgatt

SEQ ID NO: 298245 - DNA, 295 bp, Zea mays
cggccgccctttttttttttttttttttttttttttttttttgaaaatttaattttttttaattttaaggacctttaaagtgggactttttcatccgcggcggggcacccttttaggttttagacaatcagaaaagaaaaatttattttcggaagcacttccggggaagaaacacaaactttctttgcatgctttaatcactctttgcatgctttcatcagttggttcatttacttggtgctgttcatgtggcggatcaggtcgaccactcgggtgctgtatccccactcgttgt

SEQ ID NO: 298246 - DNA, 494 bp, Zea mays
ccggattcccgggcggccgccctttttttttttttttttttcacgcgcaggatgacttcttttactgcaccggagggagtatatatatatatatatatttagacgacgatttccaacatcggaacttatcttcctactaatatccttcctagaatctcgatttccaacatcggaacttatcttcctactaatatcctttctagaatcttgccaagtgcctggaatcgtaacggccgctccttccgtagggggtcgaaggaccaattccatgcctatttgcaccgtccgctttcctcatctttcgatgtttcgatgagctactgtccaggtccagattcactttaggagggttcttgaaacagaaggatgcagcaactttcttgagatcaagttggtggacatcaaaaatgtctttcatagaatgcgagttgtacgacaaaaggtaggacctgtaggcttccttcgctgactggtttaagaagtagttcccaccg

SEQ ID NO: 298247 - DNA, 391 bp, Zea mays
  unsure (1)..(391): unsure at all n locations
cggccgcggtcaggagcagcatcgacagcgccagctccttcttgtatatccggttgtgcttctccttcttcttcttcacggtggtggcggcggcggcggcgtccttcctcgacgccnncnncaggtgcttctncttggcgacggcgtccaaggtcggcgcggaacccgtcctcgtcgcgtgaagcttcacgggctccttgggcggtgccagcgcgatgaggtcgccctccgacgagcggcccgacatattggtcaccacccactcgtacgcgctccccagatggaacagcccggaaatcatcgcgttgaacttggtcacggacatggtgttttcgaatagcaagtactggatgatgaaagagaacgacttgggggactgcatgatggtcag

SEQ ID NO: 298248 - DNA, 439 bp, Zea mays
cggccgccctttttttttttttttttttttttttttttttttttttttttttttttttttttttttttttttttttttttacccggtccatcaaaaacaggttaggcaaacgacattacaacgggggcagaccaccacttgttagaatttagaggggttgaaaaaaaaaaaacagtttttttttgtttttggggctcccacgacaaaatcacctgggtagcttttgggcaaacaccaccattcatttattgggacccgccaaacattgtaacaaaagggagcagcgggctttttttgctccacaagaaaacatccccatccttttccttttttaggagggctccactggggccctgaactttgttccggggtaaaccgggggattaccgagcttttccttgatcctgagcagttggttttttttggcccggcccttaaa

SEQ ID NO: 298249 - DNA, 230 bp, Zea mays
gcggccgcccttttttttttttttttgcaggtaaaaagtcatcgttaatttctgacgagaaatggcattccattttccattcagtgaaccaacacgtccgaaatagccaaataggcacggcatagaaagcacccaccaccatctacttcagacattacaacgacgaacagcagcagcgcgacagctcaagccctctcgcccctgatgcggcgggcgagctggatgtcctt

SEQ ID NO: 298250 - DNA, 479 bp, Zea mays
cggccgcccttttttttttttttttttttttttttttttttccggatgatgactatgtcttcaattgctcgcagataataagatgtatcaagaaaaaaaaaaccgcaaaaaattgggataactcgtggtaacaaggatgaaagcatgactggtcatgatctagttcttttatttcttctactgggcagtacacatactttaggctttactgaaactctgaagtctgtatttctcatggagacctgaatgcctcccctgcatagcgcacgttgccaagctcctcttcaatccgcagaagctgattgtatttggccagcctctcgctgcggcatggagccccggttttaatctgcccacttgctaagccaacagccaaatctgcgatgaagttgtcttcggtttcaccacttctgtggctgaccatcacaccccaaccagcagtttttgaatcgagagcagcttgaattgattcagtgaca

SEQ ID NO: 298251 - DNA, 450 bp, Zea mays
gcggccgcccttttttttttttttttttttttttttttttttttttttttttttttttttttttttttttggaagtaaccatgagaggacagatctagaatagcgcagttcaattatgcagttccaaagggtacacaagggtgattcaggtaaatgactactttgtgcacatacccaggagatgatgatttacaaacgatgcactggagctagaataccaaaacgggatggtaaaatggcaatagctttaaaagatcaacagctttcagtacgacaagcattcaggtgcattgaaagtcaaaacacttggcagatgaagacttgacaggggcagacttgatgatgtccacgaattcaggcttaaatgaggctccaccaacaaggaatccatcaacatttggttgagctgcaagttttttgcagttagctccatttacagaccctccataa

SEQ ID NO: 298252 - DNA, 415 bp, Zea mays
gcggccgcccttttttttttttttttttttttttttttttttttttttttttttttttttttttttttgatataggacccctcacaataaacaggggtggaaaggggaaaatgcaagtgacaaccgtttaaagggcttcccaacccaaccagaccgggcttcagcgccccccgacacaaaagaggtgggacacccgggccttgcccgggagaatttaatacggggggcccccaaattttactgtcgacagtcataacaagggtcgcccccaagaaaccaggttccaaaacacattgcataggggcatttcacagggggaaacactagctactagttttttgggacataaagccggttttactgcccctcactcgagtcgggcttgggggcctccctaatctttttaacagggttc

SEQ ID NO: 298253 - DNA, 342 bp, Zea mays
ccgccgccctttttttttttttttttttttttgttttattttttttttttttttttgaccagtaagattacctgtttcatcaaaatcaatttaggccaaggaggttacaacgagggctgaccaccactcataaaaatttagagagtttgaaaaaaaaacaattattttctgatttaggtgcttccacgacaaaatcacctgagttgctcttgagcaaacacctccatacatttattgggaccggacaaacattggtacaaaaggcagcagcccgcttgtgttgtttcacaagaaaacattcccatcctttttcttttttagtagggcttcactggtgccctg

SEQ ID NO: 298254 - DNA, 462 bp, Zea mays
gcggccgcccttttttttttttttttttttttttttttttttttttttttttttttttttttttttttttttttttttgaacccgaaaaaacaaattttgttgataaacaaaaggggttcacaaatttttttccatacccccctgctcattgggggaaaccccactgcccccctaaagctggattcttacttatttaaactgatcccacatggggcaacgtcggaagttcacatgcttaccaaccacaaatttttataacaatagcttggcttgggtggttcccagaattacccaacgcccccccccaaattgggaccattttaaataaacaacttaaaagcaaattgcccccaaaagcccggtttacttataaagcactcccgcctttttctccatgggatccggtttctcctcccaacataaaaaaatagcccggttggagtcctttttcataggagggg

SEQ ID NO: 298255 - DNA, 408 bp, Zea mays
gcggccgccctttttttttttttttgcttgaatgcttgatcaatgttcattgctccggtccattttagggcttgttcggttattcccaaaacacatggattgatgaaattggaaaaaattgagaagacgtttgacttgtttgggattcaaacacatccaatcccactcaatccacatggattgagagctaaccgaacaagcccttactactcctgtgcatcgacaagatcgactaatcgactgacaacggcattactgtgagagttgagaattgagatgcatggagctagtaggtctcctggttttgcagcagggagatgatgtcgagggcgatggtgcacaggcgccgcagcgccttctccctcttggccagctccgccgggtacgcagtcctactcgccccacgct

SEQ ID NO: 298256 - DNA, 128 bp, Zea mays
gcggccgccgtcactagtgagctcttcgactctagagcacccaagctaacttacttttgcatgcgacggcatagctattgtatcggcgtacctaaatacaattggggtggccgtcacttacaccacca

SEQ ID NO: 298257 - DNA, 403 bp, Zea mays
cggccgccctttttttacttgtgtgtctttttttcttcttttgatccaatttttttttctctttcttgctttgttttttttgaccgggcaatgattctcaaaacaggccatacaattttttttcgaaatggtggaataattaactttagcatttcgcagggggttattcacctgttcaaaaactggttgtgggaggcttgcaaaaacatgaacttcatcctttggttccaaaaatgggcttggttttttcacaaacaaggtcaaacctttagaaaacatgcttgccccacatttttactcccatttcataaaaaggcctccctccggttttttttatttggcacgttttatttcaaaaatgaactagcgggcgataaattttcgagaacggatggggaatttt

SEQ ID NO: 298258 - DNA, 423 bp, Zea mays
  unsure (1)..(423): unsure at all n locations
aggcgggccgcccttttttttttttttttttttttaaaaatttttaaaaattttttaataaaattnnnannaaaaaatttttgggggtttttttggggaaaatggaaaatttttgaaaaaaaaggaccggtaaaaggttaacggtaacaaccacttcgatacacccgtttttggttttaaacaatcaaataaaaaaaatttttttttggaagcactttcggggaaaaaaaaaaactttttttggatggtttaaaaaatttttggagggtttaaaaaagttgtgaatttacttgggggtggtaatgggggggataaaggggaacactcggggggtgtatccccacttgggggggtaccaagaaaaaagttttaaaaaattggcgtttaagggaaagccaacctttataataaaaatgttaaaac

SEQ ID NO: 298259 - DNA, 352 bp, Zea mays
tgcggccgccctttttttttttttttttttttttttaaggacaccaaaatttttgtttgggctctatttccattaccgcaaaaaaacatagaacaagcactttaagtagtagcattcactaatgactgaatagaacaaaacagggtactatcttcaaccgcttcacttcttatcttccttctctgcctcagctgccttcttctggcgggcaccaagatgtttcttggtcatccgctcaaggcggagcttgccataggcagcaaatgacttcatctcatctgtgaccttcacaacctcaactgaacgtttctcaccacgagtaaatggcatgtagtcaccctggacctgggta

SEQ ID NO: 298260 - DNA, 474 bp, Zea mays
cacggaccggtacttactggcgcggccgccctttttttttttttttgaaagaaatttggtccattgaaattttgttccaagatacagatcataatcttttcgaaaacattgctaaagcacaaatggtgacatgcttcctctggctctcaaggtttgatgtgaaactttccatgtttacttctcgtagatccaggggtgctggctgctctgccaatcagcagggccctcggggaaccacagggcaatctccttattagcactctcaatgctgtcacttccatgaatgacattcctgccaatgtcgacagcaaagtcgccacggatggtgccgggctcagaagccagggggttggtggcgccaatgatcttgcggccagttgtgacgacgctcttgccctcccagaccatggccaccacagggccagagatgatgtagtccacgaggccctggaagaagggcttggaggcgagatc

SEQ ID NO: 298261 - DNA, 267 bp, Zea mays
ccgcccttctttttttttttttttttttttttttttatgagaatcctcttcatatcaaattttcacataaactggaacaggttgcttggaacaattaccaagagttcttcagaggcacagacaggacagcaaaattaactacggcaacaggaccaaaccaccacttctgagatccagatgacacacacaactctagtcgaacagggagaatcccatgtcggcggcgctcttttccttctcctcttccttcttttcctccttgggagc

SEQ ID NO: 298262 - DNA, 459 bp, Zea mays
cgccgcacgtaccgtccgtattcccgagcggccgccctttttttttttttttttttttttttagtaccaccttttctatacatagtagcgccaggacgaaatataggatcgtccaaaaacatatccttaacaagagtttaattcaataaaacctcggtgccagaacctagcagacttcacaaaagagcatacttagaacaccctgtatggcttccccatggtgctcttgacgtagaggcatctcacattctgccagttcttcttcagaagggaaacaaggaagttcacgctcatctggatgttctgctggatctgcttctcctccatcgccaagttgccgacggcgacgcccatgcaaaggaccttcttgagctggaacttgacggttgccttagtctcgttcaccttggattcgagggattcctggagagtaaccagggtcgggaacttggctgcctt

SEQ ID NO: 298263 - DNA, 416 bp, Zea mays
tgcggccgccctttttttttttttttttttttttttttttttttttttttttttttttttttttttttttttttttttttttttttttttgggggagggggcagatcacatccattgcattttttcagaaccgctaatcataatcctccggtaacatcagcccatagcaagaagccttcttttgaaaacaacccacaccttttacacaaccatgacgggcttaactaaacacctccagcagtagggagcaggccccgaaaccgaacccccttaggcccctccccccggattccgcccccaagctggatttccttgggcattatggtgacccccttggcgtggatggcacaaaggttggggtcctcgaaaaggcccaccaggtaggccttgggggccttctgcaacgcggttaccgg

SEQ ID NO: 298264 - DNA, 233 bp, Zea mays
gcaggagcgggcggcgccgttttttttttttttttttttactgtgaataggagtttaactctttacccgggaaaaagaaagaccgaggagtgttttacgatttcaattctcttctttcacccgtggtagggtttagacaatctaattagaaaaatttactctcggaagaacttccggggaaaaaacacaactcttttttgaatgcaactcatcactctttgcatgcattcatc

SEQ ID NO: 298265 - DNA, 423 bp, Zea mays
  unsure (1)..(423): unsure at all n locations
tgcggccgccctttttttttttttttttttttttttnttttttgggcatctgcattgttgttattgcgcccatcgttattgatcacattattacacttatgaaatattggtctgattgatctcacgtgaaataatacatccgcaaggctgccattgcaacacgaaactacattctcctgacggtagtcgcacccattcatcattacaagatttttttcttcatggcaaatataaatctcatgttggatattcagcatttatttcaacatatttgtagctcagatcacagccccatgcctttccatttccttcttcactcccaactgatatatcaatgtttactgtaccatgggcatctccagcatctttgagatacttgctagcggccaatctgtcaaaggggagggggtggccattttttat

SEQ ID NO: 298266 - DNA, 354 bp, Zea mays
cggattcccgggcggccgcccttttttttttttttttttttttgaagtacacaaaccatttcctttgtttgctacatcgaacgcatagcccgtctctaaacaaaatatggtttggcctacttccaccgacactctttggagactctcgcttaccctcctatcccatgtttagcattggtagttgactctattggacctgcgactcacttgcccccatgcttcgccttcgagtgagcctgaagtgccgtctcactgatgaatgacttgctgcacgatttgcaagggacaccagatttttgcgcaaattttggagacttgaccgattcgccattgtttacaatggccttgcctttt

SEQ ID NO: 298267 - DNA, 301 bp, Zea mays
  unsure (1)..(301): unsure at all n locations
ttcccgggcggccgcccttttttttttttttttctttcaacaatatatagaaagtcgatttaaatcattacagctagctgcaaacgcggntcaggaaccaaaagcaacaaaacatgatgataaaacgncttgggaaggaagctctatatccttgcagataaaaataaaactagacatagcaaaaagctccaagcagcacattcagagaacttatgccttggcagcagcctgggcagcaaagacgcgcctccactgatcctagaagaagccgagcttgataccctagccctaggggcaggct

SEQ ID NO: 298268 - DNA, 282 bp, Zea mays
  unsure (1)..(282): unsure at all n locations
cggcccggagttccggggcggccgccctttttttttttttttttttttnnnnnnnttnnnnnnnaattttatgttttgccagcggctaatttgcgggcaggaggggcaaaaaaacgagacaagtctgatacaaacactttatccaacggggagaggtaacaagcaaaaaaaactatggaacaagaggccgaaaagaaagtttgtaaaggccccttaacacattctaaaacactcttcaaaagtctatgaaaaaacggtggggggggcccatccaactgaaag

SEQ ID NO: 298269 - DNA, 282 bp, Zea mays
attgtataaacctattaaaaggttataacgtttaatttggaacaatacttttttggtttcagttcaattgtttattcatgttattgctcacacagacactgtcacccatggagatgcgtgacacattattactcattcatcgccgctaaatgactcaactagctagctagccagcggctttactacagcacatagttttttcagtgggggacaaccttcggctgttgcagtaagggtttggagacttctgcttttatgcctatattggctcttgtatcattt

SEQ ID NO: 298270 - DNA, 446 bp, Zea mays
gccgcactaccgtccggattcccgggcggccgcccttttttttttttttttttttttaacaatagcatttgatttttggcacagtatgatttcattgggccatctgcccatttaggtttcacataatccagccctaaatcgctaagcaagtcctatgatgtggcaccatagggaaaaactgctcatttgtaaagaaagctataggaatatacatagagccaacaaattccggcctcggcaaaatatgccctaaacgtccagctcaatgatcttcacaaccgatgaatctcccaccttctggcaaacgacaacacggtcatgggacttgatcacaccacatgccttgccatggtctagagcaaccttcagaactgactcatttgtattactggttgattcggctggatgccgaggatctgcaagcatcggaaagaggcctttaacta

SEQ ID NO: 298271 - DNA, 371 bp, Zea mays
cggccgcccttttttttttttttttttttttttttttttttgtttttatattttttttttttgggccagagatacaaatttattaaaatacaaccagaaaattacatgatttttgacaaccgtaccagttccacaatttataattaaaatgggcaaattaggaagtggaaacttaacggtgaaaacatatcaaaatcacttgtcgggtgttgaattcaactcgcatttgtttaaccaatgtctccaaagatcacagaacagcccttcctgggtaccttgggaagggtataacatctctgatgttctccattccggttgcaaatagaatcattcttttaaaacccaacccaaaaccactgtgctttacagat

SEQ ID NO: 298272 - DNA, 330 bp, Zea mays
  unsure (1)..(330): unsure at all n locations
ggaacaaatattcccgttgtaataacccccancaagccaaagcgggggactttcactgccacctttttttatcccaaacacaccannacncaaacaacgccgntaaatgactcaactagctagctagccagcggctatactacaacacatagttccttcagtgggacacaccgccaacaaaaccggaggcgcaaggagtccaaacaagcaggccgcacatcgccgtcagttgctacgctatctgcgccaccaaccaacccctagacctggccacattacagatactctgcaagaatgactggaggaccaaaccaaccatccccaaattcc

SEQ ID NO: 298273 - DNA, 423 bp, Zea mays
gcggccgcgtcgaacgcggcgcgcgcggcctggatggccccgcggtagacgtggaggttggacgcgccgctgccgacgtggaaggagacgccggccacgccgacccccgcgcgctgggcggcgcgcaggagcggcacgacctcgtcggggtgcgcgccgtacttggtccccaggtcgacccggacgtcgccgccgtcggggcccttgaggcggagcaggagctcgcagccggggtggcagcgcctgaccttggccacctcctcctcggagtcgtaggggggggaagtgcgcccacctccgcgggtactcgggtgcgcctcgggcttgcaggggtgcgtagacgatgtccccgggccggcgccgagcgcgagcacggcctcatctcggcgcggtggcgcgtcaagcccgcccagcgcgggagcg

SEQ ID NO: 298274 - DNA, 299 bp, Zea mays
  unsure (1)..(299): unsure at all n locations
ggccgcctttttttttttttttttttgttttttattttttcacaatttttttttatngnctctattaacttaacatttgtggggtcaattccctttggggaagggggaaagaaccaccctgtttatgacaactgggaattcataaaggtgatggtgaataaataacactttctttcaaaaaagagctttttttttggggccaagcaggacccaatcatacttgcttttacacttcagtgcccaagagaaggcacaattagttggccttgtcatttcccgaggcaggggttgaaggggtc

SEQ ID NO: 298275 - DNA, 374 bp, Zea mays
taccgtccggattcccgggcggccgcccttttttttttttttttttcgaacaaaacattttatactctaaaacgaacaaataggattgaagttttcacgggcattcttttacgtttgcgacacgcagcagatgattccacagtctaattaagcgcgcctggacacggacacgcctaggcgtcttgccaatgggtctagtcggagccggagccggagccggagcgctggccgcaggaccagtccggaaacgcggcgctcaagtggttggacacgacgcgggagtccaggagctcgattatgggcgggaacgtaacgcacggcaccaccttgaactggttgatccacgcgccgcaagagatggcctactccatgag

SEQ ID NO: 298276 - DNA, 249 bp, Zea mays
  unsure (1)..(249): unsure at all n locations
ccgggcggccgcccttttttttttttttagaaacttacaaataatattataattantaagacaanaaacaaaaggggaggggcaatttaaatgtggttttgaccacccaacaccaagggaaaaaaacaatcgaagcataaagccgtaaacaatgcacgacaagaggcacacgatcgccagcgccgcgccaatagcccaagacacaacgtaccgtgctgcataaaaggtttcaaataaaagcacctggtc

SEQ ID NO: 298277 - DNA, 376 bp, Zea mays
  unsure (1)..(376): unsure at all n locations
gccgccctttttttttttttttttttttaaaaatttaaaaaaaagttttatgttttctcacaanaaacagcgagggaaaaggtgaaaagcaagtgacaacagtttaaagggcttcccaacccaaccagaccgggcttcagcgccccccgccacaaacgaggtgggacaccgaggccttgcccggcagcattttatacggggagcccccaaattttactgacgacagtgataacaagcgttgcacccaagaaaccaggttccagatcacattgcatagtggcattcgacagcaggaaacactagctactagtttctaggcacataaagccgggtttactgcccctcactcgaggcgcgcttgggtgcctccctaatt

SEQ ID NO: 298278 - DNA, 364 bp, Zea mays
ggccgcgcggcgccttttttttttttttttttaaggttaacgttctacttttactcttacactcaagcagaattttggcatatgaaaaggctttataagcatagaaacgggccagaagaacatcaatctcagtaacattttcaacaccagcagagcacaatcaaaactacccaacattttactcgcccttttggctgcggagcctggcaagcttgttggtgaccacgatgtccatttgcgcagcacgcttgacaattttcttgcgcttgcgggtggacacattgtgggcaatctcaacgcagtaagttctgttgtgcattaacaaaaatttcagctcggagacattgggaacaacaaacttttt

SEQ ID NO: 298279 - DNA, 434 bp, Zea mays
  unsure (1)..(434): unsure at all n locations
accggtcggattccggcgcggccgcncttttttttttttttttttttttttttttttctctttcttatttttttttttttttttttttttgggtggttttttgcccctaagggtaacattcaaccaaggaccccggaaaaagcacactgggagggggggaacccaaaggacggacaggacaaacaattaacatggggataaaaattattaggggcccattcaacttaaaaattttggaaaaggcacacttggacataaaaggcagaatagcataaggccggtgtagcttttgacaattttatttgggggaaaccagggaattttgggggaccattcgggggaaaaactgtaaacgggcaggggggttttaatcgaacaaggggaaacccaaatttttaaaaaactttttttttttttaaaacctttcttccttt

SEQ ID NO: 298280 - DNA, 305 bp, Zea mays
tcgtcagaaacacaccaagcgaagcacattagcaacaacctaacaacaatggctaccaagagattaggccttcttgcgcttcttgcgctttttgcgagcgcaacaaatgcgttcattattccacaatgctcacttgctacaagtttcattattacacagggacttccaccagtttctttaatgggctttgaacacccagttgtgcaagcctataagcttcaacaagcaattgcggcgagccgtttaaaacaaccaattttccagttgcaacaacaaaccttgggacatttaacaaatcaaaccat

SEQ ID NO: 298281 - DNA, 327 bp, Zea mays
ggtcttcagaccattagctttatctactccagagcgcagaagaaccccatcgacaccatgagggtgttgctcgctgccctcgctctcctggctctcgctgcgagcgccacctccacgcatacaagcggcggctgcggctgccagccaccgccgaccgatcatctaccgccgtcggtgcatatgccaccttccggtcacctgccacctccggtgcatattccacctccggtccacctgccgacgtcggtccacctgctaccgcctgtccatgtgcaaccgactggtacatttgtcgtcggtaccatgccattaccctactcaaccgcc

SEQ ID NO: 298282 - DNA, 438 bp, Zea mays
tcgacctcgagcgcacaatattgtaccaacaatggcagccaaaatatagggcctccttatgctccgtgggctttctgcaagtgctgctactgcgaccattttcccaaaatgctcgcaagctcctatagcttcccttcttcccccgtacctctcaccagcggtgtcttcggtatgtgaaaacccaattcttcaaccttacaggatccaacaggcaatcacagctggcatcttacctttatcacccttgttcctccaacaatcatcagtcctattacatcagttacctttggtgcatttattggcacaaaacatcatgggacaacaactacaacaacttgtgctagtcaaccttgctgcctactcttaacaacagcatgttctttcaatcaaccaactagcttcattgaactctgcttctaattgctacaacaacacttc

SEQ ID NO: 298283 - DNA, 456 bp, Zea mays
ggtcgagccactcagcagcatcaatagagcaacaatggccgagaagatatttcccatccttatgctccttgctctttctgcatgtgttgctaacgcgaccatttttcctcaatactcacaagctcctatagctgtccttcttcccccataccttccatcaatgaccgatccactatgtgaaaacccagcccttcaaccctacaggctccaacaagcaatcgaaacacgcaactcacctttatcacccctgttctatcaacaatcgccagccctatctttggtgcagtcattggtacaaaccatgagggcacaacagctgcagaaactcgtgctaccagtgatcaaccacagagctcttgcaaacctttatccctactctcaacaacaacaatttcttccattcaaccaaactgtctacactgaaccctgctgcttatttgcagcaacaacaactac

SEQ ID NO: 298284 - DNA, 358 bp, Zea mays
agaccattagctttatctacttcagagcgcattagaaccccatcgacaccatgagggtgttgggggttgccctcgctgtgctggctctcgctgcgagcgccacctccacgcatacaagcggcggctgcggctgccagccaccgccgccggtttatctaccgccgccggtgcatctgccacctccggttcacctgccaccttcggtgcatcttccaccgccggtccacctgccgtcgccggttcacctgtcaccgccggtccatgtgccgtcgtccgttcatctgacggcgtcaccatgccactaccctactttaacggcccgggcttagtcttatcctcagtcacacctatgtccgtg

SEQ ID NO: 298285 - DNA, 226 bp, Zea mays
tagcaacatacaaagcacaatagtgtaccaacaatggcagccaaaatattttgcctccttatgctccttgttctttttgtacgtgctgctactgcaaccatttttccgaaatgcttgcaagctcatatagcatcccttcttatagcataccttttaccagcattgccttcattattgaacgattcaatttttgaacacttaacgcttcaacactacatgatacaac

SEQ ID NO: 298286 - DNA, 451 bp, Zea mays
cacgcgaacgcgcagatggcatcttacctttatgactctcgttcctccaacaatcatgagacctattacagcaggtacctttggtgcagtgattgtcacaaaacatcagggcacaacaactacaacaacttgtgctggtaaaccttgctgtctactcttagcaacaacagatatttccattcaaccaactagctgcattgaactctgcttcttatttgcaacaacaacaactaccattcagccagctatctgttgcctacccccagcaattactttcattcaaccaactgacagctttgaactctgctgcttatttacagtagcaacaactactaccattcagccagctagctggtgtgagccctgctaccttcttgacacaaccacaattgtaggcgttttaccagcacgctgcgcctaacgctggcaccctcttacaactgtaacaatt

SEQ ID NO: 298287 - DNA, 353 bp, Zea mays
cgtcagcctagcaagtagctcatagactccagattggagaactcgacaccatgaaggtgctgagcgttgccctcgctctgctggcgctcgctgcgagcgccgactccagtacaagcggcagctgtggctggcagacaccaccgttttaatctaccgtcttcgcactatatgccgccttcggtctatctgacgccgcatgagcagccgtagccatggcactaccccactcaaccacgcgagttaagcccgcgccagcagatcggatcctgcagcgtctgcagcatctgacgaccgatactgggccagcgcgtcaagttcctgaggcaccagtgcagctcggcggcgacgcccta

SEQ ID NO: 298288 - DNA, 355 bp, Zea mays
agaccattagctttatctactccagagcgcagaagaacccgatcgacaccatgagggtgttggtcgttgccctcgctctcctggctctcgctgcgagcgccacctacacgcatacaagcggcggctgcggctgccagccaccgtcgccggttcatctaccgccgccggtgcatctgccaccttcggttcacctgccacctccggtgcatctcccaccgccggtccacctgccgtcgacggtccacctgacaccgacggtccatgtgccgtcagcggttcatctgccgacggcaccatgccactaccctactcaaccgacacggccttagccttatacccagtcacacccatgccc

SEQ ID NO: 298289 - DNA, 213 bp, Zea mays
gcgcttgagaagagaaacgcaacacagaacgtggaattcagtagcaacagtggagcaacaatggagaccaagatatttttcctccttatgctccttgctctttatacatgtcgttgctagacgcgagcaatttttccttaatgctcacaagctcctatagcttccctttttcccccatacctttcatcaattatagcttcagtatgtgaaaac

SEQ ID NO: 298290 - DNA, 340 bp, Zea mays
accagctccctgatgaccattgagagcgcagaacttttcttgtcggcaccacaagcgggctgctcgtcgcactcttcgcgaacgccttggtgccaccttctcctcccatcccaatcaactgagagcactcttttgcaggtctccgcacccgggcaagggaatgcttcagcgccatcagctgcttgcggagtatgatgccctgtttgatcgtgacacggagacgtatgcaccctttgaagacattcttcgtgctgctcaggaagcaattgtgctccccccatgggttgcacttgctatcaggccaaggcctggtgtatgggattacattcaggtgaatgta

SEQ ID NO: 298291 - DNA, 289 bp, Zea mays
tttcaggattcataaacagaccaagcgaagcgcactagcgacaacctaacaacaatggctacgaagatattaggccttcttgcgctgcttgcccttttagagagcgcaacaaatgcgttcattagttcacagagctcacttgcttctagcgccattattacacaggtcctcccaccagttacttcaatgggctttgaacatccagacgagcaagcctacaggctacaactagcgcttgcggcgagcgtcttacaacaaccaattgtccaattgcaacaacaatccttgg

SEQ ID NO: 298292 - DNA, 330 bp, Zea mays
ggcagaccaggtgagcagccacaggaaccctagcaccgacgcatccgccgccatgggcatagacctgggtgtcggcgggaggaacaagaagaccaaccgcacaacgccgcgctccgacgatgattatgtcaagctgcttgtcaagctctacggattgttgttcaggaggaccattaacaagttcaatgctgtctttattgagaggctcttcatgagcataaccatgcgcgcaccaaattgcatgcgccgccttgtgcagtgcatggtcagaaaggagaagagcattgctgtgatcgttggcgcaatcgcagatgacatgacgattcacga

SEQ ID NO: 298293 - DNA, 343 bp, Zea mays
  unsure (1)..(343): unsure at all n locations
cacgcgtacggttntagatcgcgagcggtcgctctatatgatttaatcttacatactcttgcatgcgacctggggggtattttatagtgggacctaaaaacaaatcattggtcgcctgctttcaatgccatcacattaaaatcattcattatttcccatcgttcacttcttccatgcaacattattacacacagttttcgatcaattactttaataaccatctaacacccaactttgcaatcctataggctacaacaagcaattgctgccagcgtgttacaacaaccaagtccctacttgcagcaacaattcttggcacatctatcagtacaaaccattgtaa

SEQ ID NO: 298294 - DNA, 345 bp, Zea mays
gggtcttcagaccattagctttatctactccagagcgcagaagaacccgatcgacaccatgagggtgttgctcgttgccctcgctctcctggctctcgctgcgagcgccacctccacgcatacaagcggcggctgcggctgccagccaccgccgccggttcatctaccgccgccggtgcatctgccaccttcggttcacctgccacctccggtgcattttccaccgccggtccacctgccgtcgtcggttcaccttgccaccgtctgtccatgtgccgtctgcggtttatttgtctgcctcaccatgccacttcccttattaaccgtcccggtcttagtctttat

SEQ ID NO: 298295 - DNA, 423 bp, Zea mays
gggtcttcagaccattagctttatctactctataccgccgaagaacgcgatcgacaccatgtgggtgttgctcgttgcccttgctctcctggctctcgctgttagcgccacctccacgcatacaaaccgcggctgttcctaacatacaccgcctgcggttcatttaccgtcgccggtgcatttgccaactacgaatgacctgccaccttctgttcatctaacacctgtcggaccacctgtctgcgacgggccaccctccaccgccggtccatattacgccggcggttcatttgccttccccaccatgccactaccctatttaaccgctcctgccccagcctcaattttagttacacccattccctttccaacagtctcattcaatttccctgccaaattctaaataaacctgctgcctttttt

SEQ ID NO: 298296 - DNA, 455 bp, Zea mays
cacggaccgggccagacctacgggtggacccaatactactctcacgggcgtatgccatgtccgatcaacaaccacatctcctattgggggagcatttctcagtgcagctacctttgccgagaatcgtaccacaccacctccatcagcatttgctcggaacatgtaattaagtcgtcacaccaatcctttattcttacgtacaggaacaacaatttatctcattcaaacaactagccgtggtgaaccttgctgcttactttcaagcacatccccttctaccattcaaccaacttgttaggagccctgctgccttgttactggagcaacagttgctggcatttcatgtacaagacgtggcaaacattgcttgttttttgtaacaacaacaattggtgccactttatccacaggattgtggaaacagttacgccttcttgcaacaacaacaggttgct

SEQ ID NO: 298297 - DNA, 214 bp, Zea mays
  unsure (1)..(214): unsure at all n locations
ggaaggnccggaacgaccgaggcgacccacgcgtcccgacacaaacaagtactttactctactgcgcagcgcagaacaacccgctcgacaccgggagggcgctgctcgttgcccttgctctcctggctttcagatagcaacgccaactcataccatacaagcatggggttgcgatgcacagcaaccgcgtcatctactgtaaccggggcatgtg

SEQ ID NO: 298298 - DNA, 273 bp, Zea mays
gggcgaccacgcgtccggctttggatcgattgttttcgtaactcgtgagggactgagggtctcctattgacaggggttgtgggattctgttcgaagattttcgcacggtatcaatggcgaccgccgggaatgtgatcaagtgcaaagcttctgtggcatgcgaggccggcaagccaccgtcgatcgaggaggttgaggtagcgccttcttaagccatggaggtgcgcgtcaagatcctcttcacctcgctctgccacaccgacttttactttt

SEQ ID NO: 298299 - DNA, 237 bp, Zea mays
ccattagctttatctactccagagcgcattagaacccgatcgacaccattacggggttggtcgttgccctggctctcctggctcttccttccagcgccacctacacgcatacaagcggcggctgcggctgccacccaccgtcgccggttcatttaccgttcccggtgcatctgccaccttcttttcacctgccaccttccgggcattttctaccgtccgttccaccttgccgcctcc

SEQ ID NO: 298300 - DNA, 252 bp, Zea mays
agcctagcaattagctcatcgactccagattggagaactcgacaccatgaaggtgctgatcgttgcccttgctgtcctggcgctcgctgcgagcgccgcctccagtacaagcggcggctgtggctgccagacaccaccgtttcatctaccgcctccgttctatatgccgactacgttctatctgtcgacgcagcagctgccgtagacacggcaataccctactcaaccaccgcagttaagcccgtgccagca

SEQ ID NO: 298301 - DNA, 348 bp, Zea mays
atgcgtcttcagaccattagctctatctactccagagcgcaaaagaacccgatcgacaccaggaaggtggggttgcgtgccctggctctcctggctctcgctacgatgcgccacatacacgcatacaagcgacttgctgcggatgccatccaccgacgaagggtcatctaccgtcgccggagcatctgtcaactacggatctacggacaccttcagggcatatcacaacgtcggggcatctgtcgacgaacgaccaactgacaacgtgggaccatgtgccgtcgcccgtttatctgtagacgccatcatgacactacagtactaaaccgggccggccgcagtgtcata

SEQ ID NO: 298302 - DNA, 326 bp, Zea mays
atagctctagatcgatagcgtccaccctgttttttaacccgttcgacacaatgtagaaatggactgtcttatttgttctacggcacatacatgagagcaaaaactttatgcttacactatgactcataagatatctaacagaggggaccaccaatgtagcggctgcgggcgaatgctcattgctttgtaaaagcaagctgcgtgaaagtgaccacctgctgcacatgtaagagggtgccagcatttggcacagcgtgctgatataacggcaacaactgatgtggcgtcaagaacatggcactactctaatcaactagctgggtgta

SEQ ID NO: 298303 - DNA, 374 bp, Zea mays
agaccattagctttatctactccagagcgcagaaaaacccgatcgacaccatgagggcgtggctcgctggcctcgctctcctggctctcggtgagagcgccaccttcacgcatacaagcggcggctgcggatgccagccaccgtcgccggttcatctaccgacggcggtgcatctgccaccgtacgattcacctgccaactccgaagcatctaccaccgccggtgcacctggcgtctgaggtccatctgccaccgtcggtccatatgccgccgccggatcatatgacgacgccaccatgccactaccgtactaaaacgtcacggcctaagacttataacaagtcacactcatgcacgtgccaacagacgcatac

SEQ ID NO: 298304 - DNA, 294 bp, Zea mays
cccacacgtgcgaaacgcccgcgcaaactctcgaccgagcccgacagatcttgaattccccattccgccgcaccgatcgaccttcacgccagtctcggcctcttccgaacgcatacagcgcggttgtttgagtggagaggacgaagatgcgggactgcatctgcggccacatatgtgacgccggcatccaagttggcaacgcgtgctgagaactttactgcctcgaacacggcatccaacctgaaggtcacatgcctggagattagaccgcgggacattacgatgatgccttca

SEQ ID NO: 298305 - DNA, 418 bp, Zea mays
ctgcgcatgacatgttcggtgcgggcactgtcacgtcatccttggtcctagagctcgccatggccgagctgatgcgcaacccaaagcagatggccaagctacaagctcaagttcggaggcacacaccggaggggcaggaaacggtggaggaagagaacctatccgacatgccctacctgtgagagccgtggtgaaggagacgctgaggctgcacccacctgccccgctcctcgtccctcacctgtctctggcggactgcgtcgtcgatggctaccacgtcccctctggcacccgggtcatcgtcaacgcctgggctcttggcagagacccgggctcgtgggagaagccagaggagttcctgccggagaggttcatggacagcggcagcgctgctggcgtcgacatcaaagggaaccac

SEQ ID NO: 298306 - DNA, 390 bp, Zea mays
ctgggtcttaaaaccattagctttatctactccagagcgcagaagaacccgagcgacaccatgagggtgttgctcgctgccctcactatactggctctcgctgcgagcgccacctgcacgcatacaagcgggggctgcagatgccagccaccgacaacggatcatataccgccgacgtggcatatgccacctgcaggtcacctgccacctgcagtgcatttcccacctcctggccacttacctgcgtctggccaactgccaccgccatggcatgtaccgccgctgtgtcatctgccgcatccaccatgccagtactctactcaaacaccccggcctgaggctgatagccagacacacccatgcccgtgacaacagtcgcatgcaagcccg

SEQ ID NO: 298307 - DNA, 430 bp, Zea mays
cgcgtgacggatcagtactacagaaaatggcactactgattataaaacttatcacctcttctaaatagatgattcatggggcgtgcctaacgactataaactcccacactcatactgaatgcaaacgcgctgcatcaccttctgacttaccaaaaagatcacttcttaagcctcttccatgctatcgatggactatcagcgactatttgactcctggaccctctcctacacaaattcctttcaaaaaggaacatctaggaaatcttgcctcaactgtgttcttagacacgtagccaaccacgacgatgccctctcacggatcgaaaaacttttggaagtaaaccccatgctttgcttccatagctgcaggcgtgtcaaccaactgtctacattgaaccgagctgcttatttgcagcaacatctattacca

SEQ ID NO: 298308 - DNA, 445 bp, Zea mays
ctgattcatgatatttggtggaaaaaccttttttcgacttaacaacaatggctaccaagatggtaaccggtggttgcgcttcttgccctttttgtgagcgcaacaaatgcgttcattattccacaatgctcacttgctcctagtgccattataccacaggtcctccgaccagttacttcaatgggcttagaacacctagctgtgcaagcctacatgctacaacaagcgcttgcggcgagcgtcttacaacaaccaattaaccaattgcaacaacaatccttggcacatctaaccatacaaaccatcgcaacacaacagcaacaacagttcctaccagcactgagccaactagatgtggtgaaccctgtcgcctacttgcaacagcaggtgcttgcatacaaccgacttgctctggcaaacgtagcttgataccaacaacaacatc

SEQ ID NO: 298309 - DNA, 381 bp, Zea mays
  unsure (1)..(381): unsure at all n locations
catgagctagatctacagcagagcgcagaagtaccggagcgacaccatgagggcgctggtgggcgacgtgcgctcttctggctttggctgagagcaccaccttcacgcatacaagcggcgaatgcgggtgacagccaccaccgtggggtcatctaccgccgacggcgcatatgacacctccggttcacctgccaccttcggagcatataggaccgccgggacacctgtcgccgacggttcacctgccaccaccggtacatgtgccggcgccggatcatctgacgacgccacgatgccactacgctactgaaccgcgccggccgcacactnatccgcagccacacccatgcccgtgccaacagccgcattcaagcccgtgcc

SEQ ID NO: 298310 - DNA, 427 bp, Zea mays
actagatcccgagcgcaccaccttttttttttttttgtaccaacacttgcaggcaaaatgggtagtttccttaatctactagggctcacaccaaacatgctaccgcaaccattttcccaccatgctcacaaactcctatagcttcccttcttcccccatacctctcaccatcggtgacttcaatgtgtgaaaacccaattgatcaaccctacagcatccaacaggcaatcacaacaagcatcttaccattatgacccttgctgctccaacaaccgtcagccctattacatgccgtacctttgcgccatttggtggcacaaaacatcagggcacaacaactacaacaactagtgctatcaaaccttgctgcatactctcaaaaacatcagtttctgccattcaaccaactggctgcattgaactctgc

SEQ ID NO: 298311 - DNA, 364 bp, Zea mays
ggaagaaccaagcggacgcaagcattcagaaacacacacaagctaatctcattaccaacaacctaacaacaacggctacgaagacattaggggggtttgcgctgcttgcgcttttttcgagctcaacaaaagcggccattattccacaaagctcactggctggaagtgtcataattacacagcgggctatcaacaaatacttgaatggtgcttcaacacccaggtgttcacacctatagggtacaacaaaccaaaggggcaagcgtcttacaacaaccaactttccacgtgcaacaacaatcctgggcacatttaactatacaaaccatcgcaacgcaacaacaacaacaatgcctaccagcac

SEQ ID NO: 298312 - DNA, 428 bp, Zea mays
ggcagtcccacaagatcacagcacatacgcttactccattccactcggccgcgaccgcgaccgcgacggcgagcgaggggccgtggtgggacgccgcgccgcttctgcagaaagaaaaaggccaggactcttgatttgctcctcgcgggggttcggtcccatggcggcagctgcgctggcaatggcagatcaggtggtggccgagctccgagtgaggtgtgagacgccgccgtcgatgctgcgcgaggtggccgtggagatggcccgcgagatgggcgcggcgctggagaaggacggcgggagcagggtcaagatgctactctactacgtcgataagctccccacagggagagaggaaggattattctatggattggacctaggaggaacgaatttccgcgtcttgaaagtgcaactaggtgggaatg

SEQ ID NO: 298313 - DNA, 351 bp, Zea mays
gtaatagttgaatggaagaaattgatccaaatactactaccatttagccagctagctacagcaagccgtgcttccttcttgacacaacaacagttgctgccgttctaccagcagtttgcggctaaccctgcaaccctcttacaactacaacaattgttgccctttgtccaacttgctttgacaaacccagcagcctgctaccaacaacacatcattggtggtgccctcttttagattgcttattagatggaattcaataataaagttttttggatgatgtatgtggccaaccagcaataaaaagttacatttgcagattctatactacgtcgataagctccccacatggag

SEQ ID NO: 298314 - DNA, 358 bp, Zea mays
gggaaaaccacgcgtggccccacctagcaacatagaacgtggaatgcagtatcaacaatcgaccaacaatggcggacaagatattttgcatccttatgctgcttgctctttatgcatgtgttgctaacgcgaccatttttactcaatactgacaagctactatagctgctcttcttgccccataccttacatcaatgaccgcttcagtatgtgaaaacccagcacttcaaccctacaggctagaacaagcaatcgcaacaagcaacttacctttatcacccctgttattataacaatcgccagtcctatctttggcgcaggcattggtacaaaccatcaaggcacaagagctgcaaca

SEQ ID NO: 298315 - DNA, 349 bp, Zea mays
gttctagatcgcggcggccgcccttttctttttttttgtgccttttattctctggtgttctgggggcatggatcgatgttgctcggttttgtctgtaccatggcggcgacgggggctgtgtcgacgctggtgacgaggagcatggagagctggtcgtcattgcaggtcccggcggtggcattcccttggaagccacgaggtggcacgaccggcggcctcgagttccctcgccgggcgatggtcgccagcgtcggcctcaacgtgtgcccgggcgtcccagcggggcgcggcccgcgggagcccgatcccaacgtccggcgggcgggccgcaaactgcgacatcgccgcg

SEQ ID NO: 298316 - DNA, 366 bp, Zea mays
tcagaaacacaccaagccaagcgcactttctacgacctaagctcgaacggctaccaataggtgtacccgtccttgcgctggttgcccttcttgagagcgcaacaaatgcgttcattattccacaatgctcacttgctcctagtgccattattccacagttcctcccaccagttacttcaatgggcttcgaacacctagctgtgcaagccaacatgcaacaacaagcgcttgcggcgagcgtcttacaacaaccaattgcccaattgcaacaacaatccttgccacatctaacaatacaagccatcacaacgcaacagcaacaacagttcctaccagcactgagccacctagccatggtgaaccctg

SEQ ID NO: 298317 - DNA, 294 bp, Zea mays
gcgcactacctgaaggcgatgtgccgcctgtagctgtagtagacaccttcctgcccttgcggcgcagctgtccgcggggtgtactactgagaaaactatgtcctcgaacactaatgtaatggaggcagtgactagctacctatcttgctcgtggactcatgtatcggagatcagtaacgtatcgtgacccatcaccatcggtggcaatgtgagcaatcaccagtctgaacccttgaagtgggccggatttttatttacgaaaaaaagatgattccaggttaaatctcccatggc

SEQ ID NO: 298318 - DNA, 314 bp, Zea mays
acaaataaacacatcaagcgaagcgcactatcggcaacctaccagcaatggctacgaagagtttgtataatacttgcgctccttgcgcttattgtgagcgcaacaaatgcgatcattattccacaatgttcaattgctccttactacattatcccacagtttctattatccgttactcaaaaggcgttcgaacacagacctgtgtaagcctataggctacaataagcgattgcggcgagcgtctgaaacctccaattgcacaatagtaacaacattccttggcacatttaacaatacatatcatctgcacgcag

SEQ ID NO: 298319 - DNA, 247 bp, Zea mays
caaccttcccgtccctgccacgcgatagcgtttctatagtgtcgcctaaactcaattcactggacggggcgttacaacacaacgactgggaaaacactgccgtgacccaacttaattgacttgccgtgcatcccattttcgtcagctggggtgatatcgaagaggacaggaccgatcggacttcccaacagatgagcagcccgaacggcgaatgggacgcgacctgcaccggagcattaaactcagc

SEQ ID NO: 298320 - DNA, 397 bp, Zea mays
gacttcataccattaactttatctactttagagcgcataagaacccgatcgacaccatgggggtgttgctcgttgccctcgctctcctggatctcgctgttagcgccacctacacgcatacaagcggcggctgcggctgccagccaccgccgccggttcatctaccgccgtcggtgcatctgccacctccagatcacctgccaccttcggtgcatctcccaccgtcggtacacctgccgacggctgtccacctgccaccgacgatccatgtgccgccgtcggttcatctgtcgccgccaccatgccactaccctactcaaccgccccggcctcaggctcattcccagccacacccatgcccgtgccaacagtcttatacaagcccgtgccaactgca

SEQ ID NO: 298321 - DNA, 432 bp, Zea mays
gcagcagcagcctctcttttcttcatctggggattggaccttcgggtttgtggttgggttaagcaattcgccaaaatccaaaacgaaaagggtcaaaacatggatctttatatccccagaaaatgttcggccactaataggctgatcacctcgaaggatcatgcttctgtccagattaatgttgggcatttggatgagcttggcagatacactggaactttctccacttttgctctttgtggctttgtccgtgcccagggtgatgctgacagtgcacttgacaggctttggcagaagaagaaagctgaagtccgacagcagtagtgggaggtggattgctttttactaattgcttggtctctgaattttggagggaaaatggtgtttttttttaatcaatgacccttaaggtctagctttggtttttaaaat

SEQ ID NO: 298322 - DNA, 253 bp, Zea mays
gaccattagctttatctactccagagcgcaaaaaaacccgatcgacaccatgaggggggggctcggtggccttgctcttctgggttttggttggagcgccaacttcacccataccaacggggggtggcggttgcaaccaaccgccgccggttaattttaccgccgccggggcattggcaacttcgggttaaccggcaacttcggggcattttccaccggcggtgcaactggcggcggcgggtcaactggcaac

SEQ ID NO: 298323 - DNA, 355 bp, Zea mays
cccacacatacactccacaggggtctggtttatgaacttcaggccccaatctgcttcgcagtccttattaagccacctgcgtatcaaatcattcttatgaccactacatcaactctgtttatcaccagccctctactaagccttactctgaccttaattccacctatcctgcatcttcagaacattataaccaagtagcatattctcatctcaatctatcctacccattaaagaggatacactatgacactgcaggctttgaggatgtcgaatattcgatggatatggaaattgattttgtccaatctaggaacctgtaatacaaatgtttgcagcacctgttttatttgaataa

SEQ ID NO: 298324 - DNA, 341 bp, Zea mays
cggcttgcgacaacccaagtatacaaccgtacaggctccggcaggtaatagaagctggcatcttacgtttatcgcccttgctgctagagctgttatggggactattacagcacatagcttaggagcatctattggtacaatacatcaggggacaatatcaacaacagcgtgtgctagctgagatagctgactactttaagcatccgcgattcattacattcaaccaactagctgcatagaactatgattcttatttgtaacaccatcatctaccatacagccagctatatgttggctacattcagcgattcataacattcaggcacatgacagactagaac

SEQ ID NO: 298325 - DNA, 440 bp, Zea mays
ccggaacggaaggcccggcgccgaccgacgcgttcggacgggggaggcacatcgaaagccgattgccatgctgctcatgcgagaagcggtcgggaagagcaccttgtccgtgcttctggtccttcactgggccctattgaatcataacacgacagttttgcatcaatgctcacaagctcctatagctgaccttgttcctgcataccttccatcaatgatagctgcagtatgtgagaacccagctattcaaccctataggctccaacaagcaatcgcagcaagcaacatgcctttatcacccttggttgaacaatcgccagccctatctttggagcagtcattggtacaaaccatcacggcacagcagctgcaacaactcgtgctacctgtgatcaaccaagaagctctggcaaacctttctccctactctcagcaacaac

SEQ ID NO: 298326 - DNA, 312 bp, Zea mays
ggggctctataccattaactttatctactccagagcgcaaaacaacccgatcgacaccatgagggtgttgctcgttgccctagctctcctggctctcgctgcgagcgccacctccactcatacaagcggaggctgacgatgacagccaccgccggctggtgatataccggcgacggtgcatatgccacctccggttcagctgccatatccggagcatgtgccaccggcggtccacctgtcaccgccggtacacctgccaccgtcggaccatgtgccgtcgacggatcatgtgacgtcgtaaccatgccacta

SEQ ID NO: 298327 - DNA, 233 bp, Zea mays
acaaaattttaagcaagaattccttatttctccgatgtccatcttcgaatgcgagcggagtgccctaatagccatggaagccaaaacctgcttcgccattgccagcgaccgaaacctcggggttcaactccaaacaatcgccaccgatttccaaaggatttataaagtccacgatggctttttcctgggtctttccggcttggcaaccgatgctaaaaccttggttcaaaggc

SEQ ID NO: 298328 - DNA, 435 bp, Zea mays
cccacgcgtccgaaattttatagcaagacttcttatttctccgatgtcgatcttcgaatgggacgggagtgccctaataaccctgggagggaaagaactggtctaaacattgtcagcgatcggagactcctagatcagctgcaaactattgccagaaaagcattgggttaggctttaagacacccagagaggccattgaaggaacatatattgataagaaatgcccatttactggcactgttgctattagaggccgtatccttgccggtacttgccatagtgcagaaatggtaaggactattatcgctcgaaggaactaccttcactacatcaagaaatacgcaagattcgagaaatggcacagcagtatcccagctcatatatccccctgctttcgtgtaaaagagggagatcatgttataatcgggcaatgca

SEQ ID NO: 298329 - DNA, 409 bp, Zea mays
catcaagcaacatataaagcggaatacagtatcaacaatagagccacactggcggccaagatattgggcatccttatgctccttgctctgtctgcatgtgttgctaacgcgaccatttttcctcaatgcttccaagcttcttatgcctgccttcttcccccaatcctttccatcatggccccttcaagatggggaaaaccaatccttttaccctataagctccaacaagcaatcgcaacaagcaacttacctttatcacccttggtttttcaacaatcaccacccttatttttgggcaatcattggtacaaaccataagggagcaacatttgaaaaaacttatgttcccagtgaataaacaaattgttttggaaaacctttttccctacttttcaacaacaaccatttt

SEQ ID NO: 298330 - DNA, 388 bp, Zea mays
gctgtgtctttgcagagtatcgggtagtcctttcaatcctcagccatggcggaacagacggagaaagcatttctcaaacaacccaaggtgtttttaagctctaaaaaaaatgggaaaggaaagagacctggaaagggcgggaatcgcttctggaaaagcattgggttaggctttaagacacccagagaggccattgaaggaacatatattgataagaaatgcccatttactggcactgtttctattagaggccgtatccttgccggtacttgccatagtgcaaaaatggtaaggactattatcgtccgaaggaactaccttcactacatcaagaaataccaaagatacgagaaaaggcacagcaatatcccagctcatatatccccct

SEQ ID NO: 298331 - DNA, 260 bp, Zea mays
tcgatccaagtcacatactaagagtgccaagctatccgcgaaattccaagctggaaagaaatgggagaaagcttcccaggatccaaacaagccaaaaagaccccctagagccttctttgctttcatagaagagttccgtgagcaatacaagaaggatcaccctaaaaacaaatcccctgcgggtgtcggaaaagcttgtggagattaattgaagagcttgtcttaaactaaaaaagcaccttatgtatctaaagcataaa

SEQ ID NO: 298332 - DNA, 336 bp, Zea mays
gcggagaccaacatgcatcatagaaagtggaatccagtagcaacaatagagcaacaatggagaccaagatattttccctccttatgctccttgctctttctacatgtgctgctaacgcgacaattttccctcaatgctcacaagctcctatagcttccctatttcccccataccttacatcaattatagctgcagtatgtgaaaacccagctcttaagccatataggcttcaacaagcaatcgcagcacgcatcatacctttatcgcacttgttgcgacaacatatcttagccctatctttggtgcagacattggtgcaaaccatcatggcacaac

SEQ ID NO: 298333 - DNA, 402 bp, Zea mays
ataagatgtatctccagttctacataaatgagaatggtgacaaagtttacaccactaagggggaatcaccacatgggctgcctactcagtctgctcatccagctcgtttctcccccgatgacaaatactcaagacaaagagttcttttgaagaagcgtttcggattattgcctacccagcagtcgccactaaaatactgaaacatttcatgtaatgcatgctgtacttttatatagcatacttggtgtctttgtatgtgtaatgaagttcctcttcggctcatatctgagtccctttatgatgacgatggtgatttaaaattacaaacagctaagtaactttagtattttgtttgttccaaaaaaaaaaaaaataaaattaaatttttatttataatttatt

SEQ ID NO: 298334 - DNA, 377 bp, Zea mays
gagtcttcagaccattagcttgatctactccagagcgccgaagaaccccatcgacaccatgaggctgatgctcgttgccctcgctctcctggctctcgctgcgagcgccacctccacgcatacaagcggcggctgcggttgccatccaccgccgtcggttcatctaccgccgtcggtgcatctgccacctcccggttcacctgccacctccggtgcatctcccaccgccggtccacctgccgacgccggtccacctgccaccgccggtacatgtgccgccgtcggttcatctgccatgtgccaccatgccactaccctactcaaccgccccggcctcagcctcatcctgagtcacacccatgcccgtgccaacagac

SEQ ID NO: 298335 - DNA, 340 bp, Zea mays
  unsure (1)..(340): unsure at all n locations
aaccaacacaaattggacgcaagaaatccgatcagaggcccaccaccggggaattaatggcggcctggagtagcacgagtccatcgccgtattatgctggcaggcgtcgccctgctttaagagattatgggtggcagcatcagcgccgggaccttctgtgtgccggggagggacatgccacacaagccgcttaatagctgcacgcttgaccatgccagccggacctgcnggatgcgccacccctacgagcgacggagctgaaagaagatgctgtcgggcgctggcggacatcccggcgtactgacggggcgcggggcttagaatactcatggacagggcg

SEQ ID NO: 298336 - DNA, 250 bp, Zea mays
tgctgcttatttgcagcaacaactattaccatttagccagctagctactgcctactctgggcacaacaacttcttccatttaacccattgggcgcactggacccttggtggttatttgcagcaacaactattaccatttagccaggtagctactggctactctcaacaacaacaacttctttcatttaaccaattggccggactggaccccggtggttatttgcaggagccaatactactaccatttaag

SEQ ID NO: 298337 - DNA, 439 bp, Zea mays
ccaaatccataatctctgagtcctgtgtttcagttggaaaataccatgtgaaagaaagcatctcctcaactctacagtcaattttcgataaatatggagacatagcagctaactgtcagttggaatcgtcttccatgcgtgcatattatttagagtgcttgtgtgctgtggttcaagagttgcaatccactccattcaatgaactgaccaaatcaaaagtaaaagaaattttttctgttcttaaggatgtagaatctgcaaacattgatgttagttggctgcgtgctctgctcaatgaaatctcagaagccatcaatcttgctagtcaacgacaaacttttgaagccaaaaaagttaagtatgaaggtccgttagagtctgtaaagaacgaactggaatctcgaatggaaaatctatctcagaaagaaaaggaggctgg

SEQ ID NO: 298338 - DNA, 314 bp, Zea mays
tcgattgttactgaattccttcaacgtgggagtttgttccgattgctccagaggaatcctgcggaattagagaggaaacggcgtgttcatatggctctggatattgcacgaggcatgaattatcttcaccattgcaatccgactattcgtcatggggacctgaagtcttcaaatttcctagttgataaaaatgggactgggaaggttggcgattttggtttgccacgtttaaagcatgcaacgtttttaactactaaaactgggaaaggaacccctaaatggatgggcccggaagttttttccaatgaaccctc

SEQ ID NO: 298339 - DNA, 350 bp, Zea mays
acccaagcaacatataaagtggaatccaggctcaacaatagaccaacaatggcgaccgagattggggccgtccttatgcttgttggtctttccgcatgtgatggtaacgccacaattttgccatcaatgctgacaagctcactataggattccctcttaccccatacctttcattaaagatagcttcagtatgtgaaaacccagctcttcaacgctataggcttcaacaaggcattcgagtaaggcacatagctttatgacccttggttcaacaattgccaagcctatctttggtgcagtcattggtacaaaccatcagggcacagcagcttgagcaactcgtgctacct

SEQ ID NO: 298340 - DNA, 329 bp, Zea mays
  unsure (1)..(329): unsure at all n locations
cagcanncagaaacacaccaagcgaagcgcactagcaacaaccgaacaacaagggcnaccaagagaggagcccccccggcgcccacagccacgacagagagcgcaacaaaggcgagcaacangccacagagcacactagcncccagagccaagaaaccacagaagcacccaccagacacancaaggggcagggaacaaccagccgggcaagccnacaggccacaacaagcgcaggcggcgagcgacaaacaacaaccaanggcccaagggcaacaacaanccggggcacaagaaaaccgacaaaccancggaacgcaacagcaacaaca

SEQ ID NO: 298341 - DNA, 318 bp, Zea mays
gggtcttcataccattagctttatctactccagagcgcacaagaacccgatcgacaccatgagggtgttgctcgttgccgtcgctctcctggctctcgctgcgagcgccaccttcacgcatacaagcaggggctgcggctgccatccacctccggcagttcatctaccggcgtcagtgcatctaccacctgctgttcacctgccacctgcggtgcatctggcacctacggtccacctgccgtcgccggtccatctgccaccgtcggtccatgtgccgtcgccggttcatatgccgtcgacaccatgccactaccctac

SEQ ID NO: 298342 - DNA, 383 bp, Zea mays
cattagctttatctacatgagagcgcagaaaaacccgatcgacaccaggcgggagggggtaggtgccctcgctctcctggctgtcgctgcgagcgcgacctacacgcatacaagcggagggtgcggctgacagccaccggcgtcagatcatataccgccgcccgtgcatataccacctacggttcacctgccacctacggtgcatgtatcaccgacggtccacctgccgacgacggtccaactgccaccgacggtccatgtgccggcggcaggtcatatgtcggcggcaccatgccactaccctacttaaccgacccggcctcagcctcattcacagccacacacatgcccgtgccaacagacgcattcaatcccgtgccagc

SEQ ID NO: 298343 - DNA, 382 bp, Zea mays
  unsure (1)..(382): unsure at all n locations
acgcgtnggcccacgcgtgncgggcaccaacaagcgacatagaatgtggaatgcagaagcaacaatagagcaacagtggataccaagatattttgcctccttatgctccttgctctttctacatgtgtggctaacgcgacaattttccctcaatgctgacaagctcctatagcttccctttttcccccataccttacatcaattatagcttcagtatgtgaaaacccagctcttcaaccatataggcttcaacaagcaatcgcagcaagcaacatacctttatcgcccttgttgtgtcaacaatcgccagccctatctttggtgcagtcattggtacaaaccatcatggcacaacagctgcagcaactcgtgctacctgtga

SEQ ID NO: 298344 - DNA, 362 bp, Zea mays
gccacgcgttcatcctacgtccagccactcgtatgctcgttctggcacccgaatacatgcgaagtctttgtttgataaacctcatgagcttgctttgctagttctcatggatgtggcttatagtcattcatgcattaatactgtggatgggttgaatggtattgatggtacaaatacacattactgtcacagaggtgcaccagcacatcactcgatgtgagactctcgactatttacatatggaatctggctagtttctagatttcatctttcaaatgctacatggtagctggcggattataagtctgatggctgcgcatatagtgctgtgactgacatgattttgcctcatgaaggattac

SEQ ID NO: 298345 - DNA, 242 bp, Zea mays
tgcgtcctggccttatgtgcactcccggataatatctagcctacacatctatcatgcaactctgggggggttgtggagcacattggaggctctctactatacctctctgctcatcttcctgtctgttctgacgatctggttgcacaaatactgcatgagccagattgaaccacctctaagatagtttcccactgaggaagcaactgcgtatgacaccatggagcacgcttagatgcctaacc

SEQ ID NO: 298346 - DNA, 433 bp, Zea mays
gtcagcctagcaattagctcatcgactccagattggagaactcgacaccatgaaggtgctgatcgttgcccttgctcttctggcgctcgctgcgagcggcccgctcagtacagccgggggtggggcttgcaaacaccaccggttcatctaccgcctccgttctatatgccgcctccgttctatctgccgccgcagcagcagccgcagccatggcaataccccactcaaccaccgcagctaagcccgtgccagcagttcggatcctgcggcgtcggcagcgtcggcagcccgttcctgggccagtgcgtcgagttcctgaggcaccagtgcagcccggcggcgacgccctacggctcgccacagtgccaggcgctgcagcagcagtgctgccaccagatcaggcaggtggagccgctgcaccggtaccaggcga

SEQ ID NO: 298347 - DNA, 394 bp, Zea mays
gcggcggcttttcttgctcatgtccgccccaaaacatcatgtggagaccgtgtcatacaccgaagaccggtgggctggggtgctcggtggaaaaaaagaaagagctcctaccgagactatctgggaacaatgctcacaagccattattgcttgtgtccctggaggtaaatattaccgccggggtctttggcctgtgaaaagcaactccatcaacggtactggatccaacaggctaaaacaggtgtcgtgttacctccatcacctttgttactccaacaatcattatggcctattacagcagctacctgaggtgcattgatcggcacaaaacataacggcacttcaactacaacaacttgtgctagcaaacggttgctgcctactctcagcaaca

SEQ ID NO: 298348 - DNA, 424 bp, Zea mays
  unsure (1)..(424): unsure at all n locations
cgcccgcaggccngngcacnncnccancaccaccacggggncnncagaccaggagccnnagggacnccagagcgcagaagaacccgancgacaccaggagggngnngcncgnagcccncgcncnccaggcncncgcngcgagcgccaccnccacgcanacaagcggcggcggcggcggccagccaccgccggcggaacaacaaccgccgccggagcancngccaccnccggancaccggccaccnccggagcancncccaccggcggnccaccagccgacgacgggccaccggccaccgccggnccaagagccgccgccggnncaanngccgccgncaccangccacnacccnacncaaccgccccggccncagccccaaccccagccacacccangcccgngccaacagccgcagccaagccc

SEQ ID NO: 298349 - DNA, 408 bp, Zea mays
gctccgaactagcacatacaaagcacagtgtgtccaaccatggcaggcaacatattttgttgcctagctagtggctgtctgtttgtgctggtccgtaaccattctctacaatgctacaagctcgtatgctacctttcttcctcatacctgtaccagcggagtcttagtatgtgaaaacccaattcttaatccctacatgatccaacaagcaatcgcagccggcatcttacctttatcacactagctccttcaacaaccgacagtcctattacagtagacacctttggtgcattggttgtgcacaaaacataaaagctcatcaactaccacaacttgcgctaggaaaccttgctgcctactctcatcaacaacaatttcttgcattcaaccaactggctgcattgaact

SEQ ID NO: 298350 - DNA, 356 bp, Zea mays
gcagtattcatcaacaaatcgctgaatcgaagtatgtattatttgtagagcgccactacaactcggcagatacctgctgcctacgccgagcatatttaatcaaccaactgtggcattgaactgtctgattattacagcagcatcaactactatcattcaccagtagctaggtgagcaagtgctacgtttagatcaaccacagatgatgacgttctaccatgacgctgcgccttacgctggcacactcttacaactgctacaattgctgcgattcaaccaacttgctttgacgaacccagcagcgttctaccaacaacctatcattggtggtgccctgctttagatttctaatgagt

SEQ ID NO: 298351 - DNA, 355 bp, Zea mays
agaccactagctttgtctactccagagcgcacaataacccgaccgacaccacgagggtgttgctcgttgccatgcctctcctggctctagctgcgagcgccacctccacgcatacaagcggtggctgcaggtgtcatacaccttcgctcgtttcatctacacgccgccatgagcatattgccaccttcgtgtcacctgccacctcttgtacattttacacctccagtacaactgccatcatgcgtcctactgccatcgccgttgcatgttccaccatcggttcatctatcttcggcaccatgcctgtaccatactataccggcccagcctcatcctcatccccatgcacactgat

SEQ ID NO: 298352 - DNA, 390 bp, Zea mays
gcgcgtgcgactatgcacactatagaaataaaaaaaggaaagaaagagcaaatgcgctagtaaagaaacacgctggtctaccaaccagccagctaactaaagactacaaaaaaaaattggcttcattcaaacagcaggcagcaaaaaacgcttttgattatccacagccgcaacaactactaccattcagccagctagctggtgtgagccctgggaccttcttgatacaaccacaattgttgccgctctaccatcacgctgcgcataacgctggcaccctcttacaactgcaacaattggtgccattcaaccaacttgctgtgacaaaaaaagcagggttgtaccaacaaaacatcattggtggagccctcttttagatcccttatgagt

SEQ ID NO: 298353 - DNA, 338 bp, Zea mays
acggaccaactagcaacatagaaagcacactattgtaccaatactggcacgcaacgtgttggggacgactatgctgctcggtctttctgcaagtgctgctacagcgagcattttcccgcaatgctcacaagctgctatagcttgcatctttcccgcatacctatcaccagcgatgtcttcagtatgtgacaatccaactcttctacactacacgatccaacaggcactcacagcaggcatcttacctttatcaccctggatcctacaacaatcatcatccctattacagcagttacctttggtgcatttatcgccacaaaacatcatggcgcaacaac

SEQ ID NO: 298354 - DNA, 351 bp, Zea mays
cacaccattatctttatgtactccagagcgcacaagaacccgatcgacaccatgagggtgttgctcgttgccctcgctcttctggctctcgctgcgagcgccacctccacacatacaacaagcggttgttgctgtcagccaccgccgccgtctcatataccagccgcggtgcatctaccacctactgctcatctgccacctccgttgcatctaccaccaacggtccacctgctgtcgcctgtataactaccaccgccggtccatgtgccggccccagtacatctgtcgccgtcaccatgcctgtaccctacttaaccgaccgggcctcagcctcatccacagccacaccca

SEQ ID NO: 298355 - DNA, 438 bp, Zea mays
cgcgcgaatgcagatgcaacacacaatcgccaatggcaacgaccatataatccactggtacgctcgttgctctttcaggacgagttgctaacgcgacaattacacctcaatgctcacaagctcctatagctcaccttctggccccatacctcccatcaatgatagcttcagtatgtgaaaacccagctattcaaccctataggctccaacaagcaatcgcagcaagcaacatacctatatcacccttgtttgaacaatcgccagccatatctttggtgcagacattggtacaaaccatcagggcacagcagctgcagcaactcgtgctacctgtgatcaaccaagtagctctggcaaacctgtctccctactctcagccacaacaatttcttccattcaaccaactgtctacattgaaccgtgctgcttatttgcagc

SEQ ID NO: 298356 - DNA, 326 bp, Zea mays
cccgcctagggattcctaccgagggaggccgcacgcacccacggatgccctgcaagggtcaaagcgtccttaaccacagtggccgtcgtccacgctctgctccctgtaccattatgccgcacctctctcatgcttctatacatgaagcccaatgggctgctcgtatcaccagaactgtatgaagtttgtacttgccgaatagaagcaccttactggttccgtcaggcagttgaagttggctttttacacttatcactctggatcgtgcaacactcatcagccacatatcaactgttaccgtcggtgcacttattgtgacaaaacat

SEQ ID NO: 298357 - DNA, 348 bp, Zea mays
ctcataaagttcttctattaacatttcatattttttacttacatctttattctgcctttacctatttgcttaaacaaaaactaaccctcactttatcaatagttcctcaacaatagacacttacttcctgacatctatgaattttacttggagcctagccattctaagatttttttgcggagcaacttcctcctcataaatgttttgcgaatagtcactatacaagcttttccgtgaaaaaacttgcctcgaggaataaaggaaagatatcacaccttatacatcctgccttgcaagtttgctgcaaagattttccaatacctccactataaaacacaataaactatt

SEQ ID NO: 298358 - DNA, 388 bp, Zea mays
cggattcccgcccgacgcacgcgtccgcaactatcaacataatatgctcaacagtgtaccaatcatggcttccaaaatattgcgccggcctatgctccaaggtctttctgcactattctacctactgcttccattttcccgaaatgcccgctagctcatatagcttccattatttccccctacctatcacaaactgtgtcttcagtgtgagtaaacccaattctacaaccctacatgatccaacactcaatcgcaactagcatattacgattatcaccctcgatgattcaacatgtcattagccctattacaacagctacctctggagaacatattgccacaaaacatcacgacgctacaaccacctcatcttgtgctaactaacctt

SEQ ID NO: 298359 - DNA, 295 bp, Zea mays
ccggggggggactccacgcgtgagggaaaatgccggaggtcaagcgttcactggaaagcaacgggcacttgacttggttccaactaagatacatgataggtcaccaatatttcttggcagctatgatgatattgaagaaattaaagcactctatgctgctgaagggaaaaaggaatgagtgtacaattctcattcttctcccactctatctttactggattcaggtttcaatcatcaaagtatataattcatttcaaagcttattctgtgatgcgatactatatctatattgaac

SEQ ID NO: 298360 - DNA, 385 bp, Zea mays
gggtcttcagaccattagctttatctactccagagcgcagaagaacccgatcgacaccatgagggtgttgctcgttgccctcgctctcctggctctcgctgcgagcgccacctccacgcatacaagcggcggctgcggctgccagccaccgccgccggttcatctaccgccgccggtgcatctgccacctccggttcacctgccacctccggtgcatcttccaccgccggtccacctgccgccgccggtccacctgcaaccgccggtccatgtgccgccgccggttaatttgcggccgcaacattgcaattaccctaataaaccgcccgggcttaagcttattcccaagcacaaccattgccgtggcaacaagcggattcaaacc

SEQ ID NO: 298361 - DNA, 370 bp, Zea mays
  unsure (1)..(370): unsure at all n locations
gcaaagcggcagtgcgtaaagaggatcgtcgaacagaacagcatgaagatggtcatcgttctcgtcgtgtgcctggctctgtcagctgccagcgcctctgcaatgcatatgccctgcccctgcgcggggctgcagggcttgtacggcgctggcgccggcctgactacgatgatgggcgccggcgggctgtacccctacgcggagtacctgaggcagtcgcagtgcatcccgctggcggcggcgccctactacgccgggtgtgggcagactagcgccatgtaccagccgcttcggcaacagtgctgccagcagcagatgaggatgatggacgtgcagtncgtcgcgcagcagctgcagatgatgatgcagc

SEQ ID NO: 298362 - DNA, 376 bp, Zea mays
atcgcatcaagcatctcacctttatcacccttgttcctccaacatcccgtcggggtattagagcattttccttcggcgcattctttttcacaaaacatcaaggcccaacacctactacaacttgtgctaggaaaccttgctgcctactctcagcaacagcagtttcttccattcaaccaactggctgcattgaactcaccttcttattcttcaacaacaactaccatctcagccatctagctgctgactacactcaacaatttttttcattcaaccaactgacattattgaactctgatgattatttacaacagtacacagctaccaccattcatccagctaggttatgtgagacctgctgccttcttgacacaac

SEQ ID NO: 298363 - DNA, 336 bp, Zea mays
tcaaattgcacctagaaatccatctagaggccgtcgacaggggaattaatggcggggtgggttagcagcagtcaccgccgcctcatcctcgcagccgccgtcctgctctccgtgctcgcggctgccatcgccagcgccgggacctcctgcgtgccggggtgggccatcccgcacatcccgctccctagctgccgttggtacgtgaccagcctgacctgcggtatttggcctcgcctcccgtggccggtgctgaagaggagatgctgccggtagctggcggacatcccggtgtactgccggtgcacggtgctgtgcatcctcatggactgcgcgatc

SEQ ID NO: 298364 - DNA, 385 bp, Zea mays
gcaacatataaagcacattagtgtaccaactatggcagccaaaatattttgcggccttatgctccttggtctttctgcatgtgctgctactgcgaccattttcccgcaatgctcgcaagctcctatagcttcccttcttcccgcgtacctctcaccagcggtgtcttccgtttgtgaaaacccaattcttcaaccctacaggatccaacatgcaatctcagctggcatcttacctttatcacccttgttcctcctacaatcatcagccctattacaacagttacctttgttgcatttatcggcacaaaacatcatggcacaacaactacaacaacttgtgctagcaaaccttgcttgctactcttatcaacagcagtttcttcca

SEQ ID NO: 298365 - DNA, 342 bp, Zea mays
gttctagatcgcgagcggccgccctttttttttttttttttttttttttttgggtttttgggtttttttttttttttgtttttttctttttgggaaaaataacctcttatttcttgggggccccattcattagcccaaaaacttcttttttgaatgccccctactttgcattcttaaaaagggccccccccattatcttttgttggtaaaaagctgctgggtttgtcaaaacaagtttgaccaagggcaccaacttgttcattttgtaaagggttgcggggtttgccccaaactgcttgttgaaccgaagcatttttttttttttcataaaagaaccggggc

SEQ ID NO: 298366 - DNA, 279 bp, Zea mays
gggaagtgagatgtggagaagtaaaacgaacgattacaagcctgccaagtctagacgtctggctcacaaagaagagaagcttcgcaagtctaatgatgaacagacaaccaaacctgggacagccacggaatttcataacatccagaccggcgcgggtgagctccttgttacatacgagggatccaggctagctattaaagacctaaggaggcttatggatacatgccacaaagaagacatgactggtgcatcggaggccacttttctgtatagtgaaaa

SEQ ID NO: 298367 - DNA, 445 bp, Zea mays
ctgggtcttcagaccattagctttatgtactccagagcgcagaagaacccgatcgacaccatgagggtgttgctcgttgccctcgctctcctggctctcgctgcgagcgccacctgcacgcatacaagcggcgggtgcagctgccagccaccgccgccggttcatctaccgccgtcggtgcatgtgccacctccggttcacctgccacctccggtgcatcttccaccgtcggtccagctgccgccgccggtccaactgccaccgccggttcatgtgccgacgccggttcatctgccgtcgtcaacatgccactaccctacataaccgcccaggacttagactcattcccagccacacccatgcccgtgccaacagccgcatacaatcccgtgccagctgcagggaacctgcggcgttggcagcaccccgatcctgggccagtgcg

SEQ ID NO: 298368 - DNA, 405 bp, Zea mays
cttccattcaaccaactgtctacattgaaccgtgctgcttatttgcagcaacaacgattagcattcagccagctagctactggctactctcagcaacaacaacttcttccatttaaccaattggccgcactgaaccccgctgcttatttgcagcagctaatactactaccatttatccagctagctgcagcaagccgtgcttccttcttgacacagcaacagttgctgcctttctaccagcagtttgcggctaaccccgcaaccctctttacatctacaacaattgttgccctttgtccaacttgcttagacaaacccagcagtctcctaccaacaacacatcattggtggcgcccttctttagattgcttattaattgtaattcaattataaaagtttttggat

SEQ ID NO: 298369 - DNA, 325 bp, Zea mays
tctgatcttcataccattatctgtttctactccagagcgcacaagaacccgatcagcaccattagggtgtggctcgtggccctcgctctcctggctctcgctgcgagcgccacctccacgcatacaagcggcggttgttgctgccagccaccgccgccggttcatctaccgtcgtcggtgcatctggcacctccggttcacctgccaccttcggtgcatattccaccgccggtccacctgctcgcgccggttcaactgccaccgtcggtccatgtgccggcggctgttcatatgtcggcgccaccatgccactaccctactcaac

SEQ ID NO: 298370 - DNA, 221 bp, Zea mays
atctcattgacttcatattggagaactcgtctccataaatgtgctgatcgttgccggtggtgtcctggcgctcgctgtgtgcgccttcttcattacatgccgctgctgaggctgacaaacaccttcgttatatctaccgcctccgctctatatgccgtcctccgtctatctgtcgtcgcatcatcagtcctattcatggcaataccgcactcatccacctc

SEQ ID NO: 298371 - DNA, 292 bp, Zea mays
ggttgctaccgtgcagcgcctatcacttcctggttctttaagagtcggtcgtgaatttctggcatggcactatcacgagcgcactatttacattccataaccaacctggggtaatcaccccaaagtgttgaccctatctggctcgaacgttaggagctaccgttattatgatcctgcatcatgcagccttcacttagaaggaatcctggaagaccttggttctgctccttcaagttcaattgtactgctacatgccattgctcacaaccctactggagtagatcataccatc

SEQ ID NO: 298372 - DNA, 370 bp, Zea mays
gcgaatcgcactatcatcaacctaacaacaatggctaccaagatattatccctacttgcgcgtcttgcactctttgcgagcgcaacaaatgcgctcattattccacaatgctcactcgctgctaattccattatttcacagttcctcccaccagatacttcaatggccttggaacaccaatctgtgcaagcctatatgctacaacatgcgattgccgccagcgtcttacaacaaccaattgaccaatttcaacatcaatccttggcacatctaacaatacataacatcatatcgcatcagcaactacagttgctaccaacactgagccacctaaccatggtgaaccctgtctcctactcgcaacagcata

SEQ ID NO: 298373 - DNA, 453 bp, Zea mays
acgtccacgcgttcgattgacaccaactagcaacatataaagcacaatagtgtaccaacgatggcagccaaaatattttgcctccttatgctccttggtctttctgcaagcgctgctacggcgaccattttcccgcaatgctcgcaagctcctatagcttcccttcttcccccgtacctctcaccagcggtgtgttctgtatgtagaaaacccaattcttcaaccctacaggatccaacaggcaatcgcagctggcatcttacctttatcacccttgttcctccaacaatcatcagccctattacaacagataccttcggtgcatttattggcacaaaacatcatggcacatctactacaacaacttgtgctaaccatccctgctgtctactcttagcaacagcagtttcttccattcaaccatctaagttcattgaactctgcttcttattt

SEQ ID NO: 298374 - DNA, 429 bp, Zea mays
atctataccaactagcaacatacatagcacattattgtaccaacacctaaaaacaacggggacggcgttcttatacctggcgatatcacttaacatgtgcctaccgataccattttcataccttgctcacaagctgctataatgcactgatcgccgaacctctcaccacaatatcttccaatctgaaaacccaattgtcaaccatacgattccaacaacaactcgaacacggctattacaatgttcaccgcagaacgtacagcatccttttaacataaacaggcgctgccatttaaacaactaactgcattgaactctgctgcttatttgcagcaacaacaactactaccattcatgcagctagctgctgcctacccccggcaatttctttcattcaaccaactggcagcattgaactctcatgcttat

SEQ ID NO: 298375 - DNA, 326 bp, Zea mays
gcatagcggcaacacttagagaggatcgttgcacttaacagtatgaagatggtcatcgggctcggcgagtgtctggctctgtcagctgccatcttctatgtaatgctgatgccttgcccctgcgcggtgatgcatggattggacggatctgtaaccggtctgaccactataatgggcgccggcgggctgaacccctacacggagaacctgatggagacgtaaagcaacccgatggaggaggaaacctactacgccgggtgtgggcggacgagctccatgtacgagccgctccagtaactgtgttgccatcagcagatcaggatgat

SEQ ID NO: 298376 - DNA, 453 bp, Zea mays
  unsure (1)..(453): unsure at all n locations
cgnntccgctcaantcgactcctagattggggagaactnnncgactaccatgaagggtgccctgatcgttgccgcttgcggcgtcctggcgcctacgctgcgagcccgccgcctccagtacaagnncggcggctgtggcttgccagacanccaccgtttcatctaccgcctccgttctatatgccgcctccgttctatctgccgccgcagcagcagccgcagccatggcaataccccactcaaccaccgcagctaagcccgtgccagcagttcggatcctgcggcgtcggcagcgtcggcagcccgttcctgggccagtgcgtcgagttcctgaggcaccagtgcagcccggcggcgacgccctacggctcgccacagtgccaggcgctgcagcagcagtgctgccaccagatcangcaggtggagccgctgcaccggtaccaggcgacatac

SEQ ID NO: 298377 - DNA, 437 bp, Zea mays
gcagcagctgccctgcgtctcgtcgccgcgccctctgctcgccgtgcccgcgggccgggggcgcgccggcgtgcggggccggcccaatgtggcgggactggggcgggggcggctgtctctccacgccgccgccgcgcggcccgtggccgaggcggtgcaggcggaggaggacgacgacgacgacgacgaggaggtggccgaggagaggttcgcgctgggcggcgcgtgccgggtgctcgcgggaatgcccgcgccgttcggcgccaccgcgctccgcggcggtgtcaacttcgccgtctactccagcggtgcctccgccgcgtcgctgtgcctcttcgctcccggcgacctcaatgcggatagggtgaccgaggaggtgcccctcgatcccctgctcaaccgaacgggaaacgtgtggcacgtgttcattcacgggg

SEQ ID NO: 298378 - DNA, 338 bp, Zea mays
gacaaacacaccaagcgaaacgcgctatccacattctaccatcaatggccaccaacatagtaggcgttcttgcgctttatgccctttgattgttctcaacatatgcgttaatcatcacacagtgctcactggctactagcgccaatatttcacattttctcccaacacctactataatgggctgcgaacatacatgcaagcaagcctacaggatactactagctctagcaagcagcgtcttacagcaacaaaccgccataacgctagaacaatcattggcacatcctatcctacataccatcattgctccacaccatcaagagacagtggcatcactg

SEQ ID NO: 298379 - DNA, 364 bp, Zea mays
taacaacatagaacgcacagtagtgtgccaacaatggccgtcaaaatattttggtttcttatgctccttggacttactgcaagtgctgttaccgcaaccattatccaacaatgatcacaagctcctatagctatcttttttgccccatacctctcaccagcggagtattgagtatgtgaaaacccaattgttcaaccctacaggatccaacacgcaatcgtagcacgcatgttacctttatcacccttgatcctgcaacaagccgaagccctattacagcagttacctttggtgcatatcgttgcacaaaacatcaatgtagaacaactacgacaacttgtgctaggaaaccttgatgactact

SEQ ID NO: 298380 - DNA, 257 bp, Zea mays
cgttcaaaaagatactactactccagggctatgtggacgctgaagacaaagccggagggggatagtatgactagaaaaaggatgaatgatcaaaattcttggtcttgaccgttgcacctgacgtgaaacgtacgtgaactggggacggatggacaagtatatccagagttagatgcgctgttatccgatcgcgtatttgttttatatgaaaaacatacactattttgattgcaagttaattaaaattacatttgtgt

SEQ ID NO: 298381 - DNA, 313 bp, Zea mays
atagctcatggactccagattggagaactcgacaccatgaacgtgctgatcgatgcccttgctctcctggcgctcgctgagagcgccggcttcagaacaagcgagagctgtggctgccacacaccacacgattcatgtaccgcctacgctctatgccgactccgatctatctgccgccgcagcatcaaaccgagtcatggcaataccccactcaaccaccgcagataagcccgtgccaccagttaggatcctgcggggtgggcagcgtcagcagcccgttcctgggccaaagcgtcagtttctgacgcaccag

SEQ ID NO: 298382 - DNA, 388 bp, Zea mays
ctcacgcgtccgactgtggcggagcacggatgcaaaggacgaggaacagcaacagacggcggggcggaggagcgggatgccactcattgcttgcaaccatggttaggggattgaagaagcactagaagaggctgaatgcgctcaagaattggatgctcgacaagatttgacggagcttttgctatccaagccattttctggacctcacaagctcagggagtgccttactgtgatcctcatcatcaggaacaggctcaagtatgctctgaactaccgtgaggtcatttgtatactgatgcaacgccatgtacttgttgattgctaagtcaggactgacaaaacctactctgctgggatcatggatgtcatttccatacctaatacaatg

SEQ ID NO: 298383 - DNA, 310 bp, Zea mays
  unsure (1)..(310): unsure at all n locations
gccgcatatgaagtgaaaggcacttncaacaatttatcatcaatggcggccaagatattgtccagggttatgctccttgctctttctgcacctgttgctaacacgaccattgtccctcaatactcacaagctgctatgtctgcccttgttcccccataccttccatcgatgaccgcttcagtctttgaaaacccagcccttcaaccctagcagctccaacaagcaatcgtagcaggcaacctacctttctcaccccttgtgcattcacaatcgacatccctatctttggtgcaatcattgtgacaaacca

SEQ ID NO: 298384 - DNA, 379 bp, Zea mays
cacaccaagcggaagcgcactgatcaacaacgctatttttctatcggctacacaagtattattattccctatctggtcgtcttcttgcagcctttcttcgtagcacatcaacatcgcgcttcattatatgcacattcgcttacctcgctcccagttctcaatatgccagaactgctctcaccacttacttaaatcgactatgaacacccatctgctctagcctatcggctactacatgctactgccgcaagcgacttacatcaaccaagtgccctactactacaactatgcgcagaccatctatctataccaaccattgctactaaacagctaccacaattacatccagcttttagacacccatccctggtgaaccctg

SEQ ID NO: 298385 - DNA, 364 bp, Zea mays
aagcacaatagtgtaccaacaatggcagccaaaatatattgcctccttatgctccttggtctttctgcaagtgctgctacggcgaccattttcccgcaatgctcgcaagctcctatagcttcccttcttaccccgtacctctaaccagcggagtcttccgtatgtgaaaacccaattcttcaaccctacaggatccaacaggcaatcgcagctggcatcttacctttatcacccttgatgctgcaacaatcattagccatattacaacagttacctttgatgcatttattggcacagaacatcatggcacatacaactacaacaacttgtgctagcaaacattgctgtctactctcagcaacag

SEQ ID NO: 298386 - DNA, 329 bp, Zea mays
acgattttgagcattcacaaacacaccaagcgacgcgcactagcaacaacctaacagcaatgggtaccaagatattatccctccttgcgcttcttgcactttctgcgagcgcaacaaatgcgtccattattccacaatgctcacttgctcctagttccattattccacaggtcctaccaccagttacttcaatggccttcgaacactcagctgtgcaagcctataggctacaacaagcgattgcggtgagcgtgttacaacaaccaattgcccaattgttacaacaattctttggtacatttaacaatacaaaccattgcatcgcaaca

SEQ ID NO: 298387 - DNA, 376 bp, Zea mays
  unsure (1)..(376): unsure at all n locations
ctgggtcttcagaccatttgctttatctactccagagcgcagaagaaccggatcgacagcatgagggtgttgctcgttgccctcnctctcctggctctcgctgcgagcgccacctccacgcatacaagcggcggctgcggctgccagccaccgccgccggttcatctaccgccgccggtgcatctgccacctccggttcacctgccacctccggtgcatctcccaccgccggtccacctgccgccgccggtccacctgccaccgccggtccatgtgccgccggcggttcatttgccgccgncaccatgccactaccttattaaaccgccccggcctcagcctaatcccaagccacaccaatccccttgcaaacagc

SEQ ID NO: 298388 - DNA, 479 bp, Zea mays
  unsure (1)..(479): unsure at all n locations
ccagagctacttggttgatcacaggtagctctggtaaacctttctccctactctcagcaacaacagggtgttccattcaaccaactgtctacattgaaccgtgctgcttatttgcagcaacaactattaccattcagccagctagctactgcctactctcagcaacaacaacttcttccatttaaccaattggccgcactgaaccccgctgcttatttgcagcagcaaatactactaccatttagccagctagctgcagcaagccgtgcttccttcttgacacagcaacagttgctgcctttctaccagcagtttgcggctaaccccgcaacccttttacaactaccacaattggtggcctttggcccacttgctttgacaaacaccagaagnctctaacaacaacacaataatggtggggccctcttttagaatgcttattaattggaaatcaataataaaggtttttggatgatgta

SEQ ID NO: 298389 - DNA, 450 bp, Zea mays
gccaccatgccactaccctactcaaccgccccggtctcagcctcatccccagccacacccatgccggggccaacagccgcatccaagcccgtgccagctgcagggaacctgcggcgttggcagcaccccgatcctgggccagtgcgtcgagtttctgaggcatcagtgcagcccgacggcgacgccctactgctcgcctcagtgccagtcgttgcggcagcagtgttgccagcagctcaggcaggtggagccgcagcaccggtaccaggcgatcttcggcttggtcctccagtccatcctgcagcagcagccgcaaagcggccaggtcgcggggctgttggcggcgcagatagcgcagcaactgacggcgatgtgcggcctgcagcagccgactccatgcccctacgctgctgccggcggtgtcccccaactgagaaactatgtgctgta

SEQ ID NO: 298390 - DNA, 394 bp, Zea mays
caacaactaccattcagtcagctagctgctgcctacccccagcaatttcttccattcaaccaactgggagcattgaactctgctgcttatttacaacagcaacagctaccaccattcagccagctagctgatgtgagccctgttgccttcttgacacaacaacagttgttgccgttctacctgcacgctgcgcctaacgctggcaccctcttacaactgcaacaattgctgccattcaaccaacttgctttgacaaacccaacagcgttctaccaacaacccatcattgggggtgccctcttttaaaatgcttatgagttatagttcaataatgaagttttttggatgaagtttggggcttcccagaaataagaaagtacatttctagattctt

SEQ ID NO: 298391 - DNA, 399 bp, Zea mays
gagcatcataaaaagtggattccagtattaacaatcgatcaacaacggcgaccaaaaggttttccttgggtatgctccttgctctttctgcatgtgttgctaacgcgacaattttccctcaatgctcacaagctcctatatctacccttcttcccccataccttccatcaatgatagctttagtatgtgaaaacccaactcttcaaccctataggctctaacaagcaatcgcaacatgcaacatacctttatcacccttgtttcaacaatcgccagccctatctttggtgcagtcattggtacaaaccattacggcacataagctgcagcaactcatgctatctgtgatcaaccaagtagctctggcaaacctttcttctactctcagcaacaacaatt

SEQ ID NO: 298392 - DNA, 298 bp, Zea mays
cttgtgccatcaattattcataccatgttcttgcaagcaagttaactgggggatgacagtgtaactgcagataaataaagaagttcaggagcttttaaggcttacgttaagcaaggcccgagtcaagctgaccgaaaataccatttttaaacgaatcattatggacactaacagcacagatccatttaatggtctctatgtgggagcatttagtccatatggaccagaaattgtgcagctacgtctgaagttcggccactgtaacagtactgatgacgttgagtttttcgagtatgtc

SEQ ID NO: 298393 - DNA, 289 bp, Zea mays
gaccacgcctccgccagcagcaacatgtaaagtaacattcttcagcaacattaaatcaacaatggcctaccgagatattttgcatgcttatactcctcactctttccacacgccctgctaacactaccatttatgataacttctcacaaccacctataccttcacttcttccacaataccttccatcaaccacctatcaacactctgaaaacccacccacttaaccatacaatctcaaacacgcaaacggatcaaacaacttacctttatcaccccttatctctaaaca

SEQ ID NO: 298394 - DNA, 333 bp, Zea mays
ccggcccgacgcacgcgtccgattagctttatctactctttagcgcattttaacccgatcgacaccatgggggtgttgcgcgatgctcctactctcctggctctctctgcaaccgccacctacacgcatacaagcggctgctgcggctgccagccaccgccgccggttcatctaccgccgacggtgcatctgccacctacgtttcacctgccacctccagtgcatctcccaccgccagtccacatgccaactcctgtccacctgccaccgacgatacatgtgccaacaacggttcatctgacgccgtcaccatgccactaccctactcaaccg

SEQ ID NO: 298395 - DNA, 471 bp, Zea mays
caatagtgtaccaacaatggcagctaaaatattttgcctccttatgctccttggtctttctgcaagtgctgctacggcgaccattttcccacaatgctcacaagctcctatagcttcccttcttcccccgtacctctcaccaacggtgtcttcggtatgtgaaaacccaattcttcaaccctacaggatccaacaggcaaatcgcagctggcatcttacctttatcacccttgttcctccaacaatcatcagccctattacagcagttacctttggtgcatttattggcacaaaacatcagggcacaacaactacaacaacttgtgctagcaaaccttgctgcctactctcaacaaccagaagttctttcattcaacccactaacttcattggacttttgttcttatttggaacaaccaccactaccattcaacccgctatctgctggctaaccccaacaatttctttcat

SEQ ID NO: 298396 - DNA, 373 bp, Zea mays
caaaaaatcgatagtgagtaaagaggatcgtatattaaaacagtatgaaaatagtgatcgtcgggggggtgtgattctctcagtcagctaccagcgcttcttacttgcagatgccatgcccagtgtcgggactacatgcacttgtacagtgatggcgcccgcacaaccagcatgataggcgccatttgtctgtgaccctacggacattacctatggaaaaccctgttcactctgctgagctaaacacgctactatgcctggtgctgtcagacatgcgcaatgtacgaacctacttggcaatacagatgctagaagaagatgaggatgatggaagtccagtcgctcaggcagaaggttcacaagatgatccagc

SEQ ID NO: 298397 - DNA, 144 bp, Zea mays
ctaacaccccctacagaacaagcggctcctgtggctcccacacaccaccgtttcatctaccgcctccgtcctatacgccgcctactttctatctgccaccacaccatcatccgcagccatgtcaataccccactcaaccacctc

SEQ ID NO: 298398 - DNA, 395 bp, Zea mays
caaagcggcagtgcgtagagaggatcgtcgaacagaacagcatgaagatggtcatcgttctcgtcgtgtgcctggctctgtcagctgccagcgcctctgcaatgcagatgccctgcccctgcgcggggctgcaaggcttgtacggcgctggcgccggcctgacgacgatgatgggcgccggcgggctgtacccctacgcggagtacctgaggcagccgcagtgcagcccgctggcggcggcgccctactacgccgggtgtgggcagacgagcgccatgtaccagccgctccggcaacagtgctgccagcagcagatgaggatgatggacgtgcagtccgtcgcgcagcagctggagaataagatgcagcttgagcgtggccgtgacggcagcaac

SEQ ID NO: 298399 - DNA, 254 bp, Zea mays
caacaagcaacatagaaagtggaatccagtagcatttattgagccaccatggagacccagaattgggggttcttatgctccttgctctttctacatgtggtgctaaccccacaatttttccttaatgctcacaagcttctattgctttccttttttccccatacctttcattaattattgcttcagtattgtaaaacccaacttttcaaccatattggcgttaacaagccattgcagcaaggcacataccttta

SEQ ID NO: 298400 - DNA, 427 bp, Zea mays
gcattcaactcatcactccgatttataactccacaccatcaacgttctctaccaggatattattcttccttgcgcttcttgcactttttgcgagcgcaacaaatgcgttcattattccacaatgctcacttgctccaagttccattattacacagttcctcccaccagttacttcaatgggcttcgaacacccagctgtgcaagcctatatgctacaacaagcaattgcggcgagcgtcttacaacaaccaatttcccagttgcaacaacaatccttggcacatctaacaatacataccatcgcaacgcatcagcaacaacaattcctaccagcactgaaccacctagccatggtgaaccctgccggctacttgcaacagcagttgcttgcatcaaacccacttgctctgtcaaaccgtattgcaaa

SEQ ID NO: 298401 - DNA, 320 bp, Zea mays
agggaggcgcacaccattaactccatctacttcacaactcttaacaacccaaccaacaccaggagggtgtgaggtttttccctggctctcctgcctctcgctactagcgccacctccacacatacaagctgcgactgcgggtgccagccaccaccgccagttcatctaccacctaccgtgcatctgccacctacggttcacctgccacctgcggtgcatctcccaccgccaatccacctgccgcctcctgtccacctgccaccgcccgtccatgtgccaccgccagttcatctgccatctgcaccatgccactaccctac

SEQ ID NO: 298402 - DNA, 426 bp, Zea mays
atcgttgcccttgctctcctggcgctctctgcgagcgccgcctccagggcaagcgggggctgtgtctgccagacaccaccgtttcatctaccgcctccgttctatatgccgcctccgttctatctgccgccgcagcagcagccgcagccatggcaataccccactcaaccaccgcagctaagcccgtgccagcagttcggatcctgcggcgtcagcagcgtcagcagcccgttcctgggccagtgcgtcgagttcctgaggcaccagtgcagcccggcggcgacgccctacggctcgccacagtgccaagcgctgcagcagcagtgctgccaccacatcaggcacgtggagccgatgcaccggtaccaggcgacatacggtgtggtcctgcagtccttcctgcagcagcagccgcacggcgagctc

SEQ ID NO: 298403 - DNA, 286 bp, Zea mays
cacgcattcgcaggatataaagcacaatgatctaccaacaatgcacgctaaaataggggccttctgggctgcttgtgctttttgcaggtgctactacctctaccatgcacatacactgctcacacgctgctatagctgcctttactgcgcttacctctcaccaacgacgattatgggctccgaaaacccaatcccttaaccctacaagatccagcaggcaatcgcagctggcatgttacctttatcatactacgctccttcaacaacaaacaagcgctatacacca

SEQ ID NO: 298404 - DNA, 478 bp, Zea mays
actgataccaactaccaacatacaaagcacagttttttaccaacaacggcatccaaaatattatgcgtccttatgctccttggtctttgtgcaattgctgctactgcgaccattttaccgcattgctctcaagctcctataacttctcttattgccccgtacctctcaccagcactgtcatcggtatgtgaaaacctcaattcttaaccctacacgatccaacaggcaatcgcagctggcatgttacatttatcatacttcgttccttcaacaaacatcagtcctattacaacaatcacttttggagcatttattgacacaaaacattatgatcacatcaactacaacaacttgtgctaacaaaccttgctgcctacttttagcaacatgcagtttcttccattcaaccaactaggctaattgaactctgtttcttatttgcaacaacaacaactaccaatgagtcaaaatacctttt

SEQ ID NO: 298405 - DNA, 336 bp, Zea mays
caacgtacaaagctcaatcatctaccaacaatggcatccaaagtattctgactccttatgctccttgggatttttgtaagtgctgctacagcgaccaattttgcgcactgcttacaagctcttatagctttccttcttacctcgtacctatcaccagcggtgtctttggtatctgaaaactcaattcttaaaccctacaagatgcaacaggcaatcgcatctgacatttaacatttatgacccttgatccttcaacaatcatatgacctattacagctgttacccatggagcgtttattggcacaaaacatcagggcccaccaactactacgactt

SEQ ID NO: 298406 - DNA, 240 bp, Zea mays
tcttcccttaatcctcacaagctactatctctactataataacctcgtacctctcaccatcaatgtcttctctataaaaaaacccaattcttcaaccctacaacatacaacatgcaatcacatctcgcatcttacctttatcacccttcttcctgcaacaatcatcacccctattacatcagttacatttgatgcatttattctcacaaaacataagagcacaacaactacaacaacttc

SEQ ID NO: 298407 - DNA, 440 bp, Zea mays
cgacccacgcgtgcgccacgcctacacgagaccaacaaacatctttcaaagcgtattacaacaccaacaatagagggcaattggggccaatatattgtccatccttatgctccttgctctttctccatgtgttgctaacgcgaccatttttcctcaatactcacaagctcctatagctgcccttcttcccccatacctttcatcaatgaccgcttcagtatatgaaaacccagtccttcaaccctacacgctccaacaagcactcgcaacaagcaacttacctttatcacccctgctctttcaacaatcgccagccctatctttggtgcagtcattggtacaaaccatcacggcacaacagctgcagcaactcgtgctaccagcgatcagccaagtacctctggcaaacctttctccctactctcagcaacaacaatttc

SEQ ID NO: 298408 - DNA, 385 bp, Zea mays
cacctagcaccatataaagcacaatactgtaccaacaatggccgccacaatattgtgcctgcttatgcgccttggtctttctgcatgtgctgctacgcgcgaccattttcccgacatgctcgcaagctcctatagcttcccttcttcccccgtacctatcaccagcggtgtattcggtatgtgaaaacccaattcttcaaccctacaagatccaacaggcaatcacagctggcatgttacctttattaccattgttcctccaacaatcatcagccctattacatcagttaccttcggtgcatttattgacacaaaacatcagggctcagcaactacaacaacttgtgctatgcaaccttgatggctactatcaaaaacagcactt

SEQ ID NO: 298409 - DNA, 410 bp, Zea mays
  unsure (1)..(410): unsure at all n locations
cgaccacacgcctccgccagcaatcaacatttaaaatnaaatactctancaacttataaaacaacaatcccaccgggatattttgcatacttatactcctttctctttcttcatgtatttctaacactaccatttctactcaatactcacaacctcctataacttcccttcttacaccataccttccatcaattaccacttcaatatctaaaaacccatcccttcaaccatacaagctccaacaagcaaacacatcaatcaacttacctttatcaccccccttctatcaacaatctccaaacctatcttttttacattcattcctacaaaccatcaaaacacaacatcttcagcaacttgctctaccaataatcaaccaaactaactcttcaaaccttactccctactat

SEQ ID NO: 298410 - DNA, 296 bp, Zea mays
aaagcggtactgcgttaacaggatcgttttacagaacttcatgacgatggccatcgcgcgcgtcttgggcctttctctatcatctgccagcacctctgcaatgcacatgccctcccactgcgcggggctgcacggctcgtacggcgctggcccctgtctgactactatactagacgccggcggcctatacccttacgcgcatgacctcaggcacccgcactgcagccagctggcagcgtggctctactacgcacggagtgtacatactagcaccatataccatccgctccagcaac

SEQ ID NO: 298411 - DNA, 409 bp, Zea mays
  unsure (1)..(409): unsure at all n locations
cacaccaagtttaccacttttacaacctttcaacaaacgctaccaanatagtaaccttggttgcgcttatcgcccttatagtcaccccaacacaagcgttcattattccacagtgctcacttgctactagtgccattactccacagatcctcccaccagttacttcaatgccctgctaacatccagccgagcaagcctacatgctacaactaccgcttgcttcgagcgtctcacaacaaccaattgcccaattgcaacaacaatccttgtcacatctaaacctacaaaccatcgcaacgcaacagcaacaacacattctgccatcactgagccacctaaaccaggtgaaccctgtcgcctacttgcaacagcagctacttgcatccaacccacttgctctggcgaacgt

SEQ ID NO: 298412 - DNA, 462 bp, Zea mays
cgacccacgcctgcggcagcatataaagcacaataatcgtacctttaatcacagtcaaaatattccccttccttaggctccttggtatttctgcaagcgctcctacctcaaccattttcccacaatgctcacaagctcctatagcttcctttcttcccccatacctctcaccaccggtatctacagtatgtgaaaacccaattcttcaaccctacactatccaacacgcaatctcagcaagcatcttacctttatcacccttgttcctccaacaaccgtcagccctattacagcacttaccttatgtgcatttgttggcacaaaacatcaatgcacaacaactacaacaacttgtgctaggaaaccttgctgcctactctcagcaacagcagtatcttacattcaaccaactggctgcattgaactctgctgcttatttgcaacaacaactaccattcagtc

SEQ ID NO: 298413 - DNA, 233 bp, Zea mays
ccaccccttcatctaccgcctccgttctatataccgcctccgttctatctgccgccacaacaacaaccacaaccatggcaataccccactcaaccaccccagctaaacccgtgccaacagttcagatcctgccgcgtcaacaacctcagcaaccccttcctgggccattgcacccacttcctgaagcaccaatgcaaccccgctgtgacaccctacagctcaccacaatgcca

SEQ ID NO: 298414 - DNA, 378 bp, Zea mays
  unsure (1)..(378): unsure at all n locations
gacttcatgaaggtgctgatcggggcccttgctgtcctgtcgctcgctgcgagcgccncctccattacaagcggcggctgaggctgccagacaccaccgattcatctaccgcctccgttctatatgccgcctacgttctatctgccgccgcagcagcagccgcagacatggcaataccctactcaaccaccgcagataagcccgtgccagcagttcggatcctgcagcgtctgcagcattggcagcccgttcctgggccactgcgtcgagttcctgaggcaccactgcaacccggcggcgactccctacggctcgtcacagtgccaggcgctgcagcaacagtgctgccaccagatcaggcaggtggagccgctgcac

SEQ ID NO: 298415 - DNA, 340 bp, Zea mays
ccggcacgacccacgcctccagcaccaacactcaacatataaagctttttgcactagcaacaatacatcaacaatggggaccaggtattatacctccttatgctccttgtatctgacagcatgtgttgctaacgccacaatgtaattcttaatagctcacaagctactatagctccccttcttccccaatacctttcatcaattatagtttcactaagaaaaaacacaactcttcaaccctataagctccaacaagcaatctcatcatgcaacatacctatatcactctagattcaacaatcgccagccatatctttggtgcattcattggtacaaacca

SEQ ID NO: 298416 - DNA, 159 bp, Zea mays
gccgatcaattatctcatctactccagattttacaactcgacaccattaacgcgctgaagattgcctttgctctcctggcgctcgctcccagctccatctccaatacaagctactgctgtggctgtcaaacaccaccacatcatttaccgtctccgttc

SEQ ID NO: 298417 - DNA, 246 bp, Zea mays
gccagtgccaacacccacatccaaatttgcgttagataccaggaacctgcgcgttagggagcggctcgattctgtgccagtgcgtgcagttcctgaagcatcaacgcagccccatagcaacgccctactgctcgcctcagtaccagtcgtcgcttcatcaatgttgccagcagctcatgcaagttgagtctcaccttccataccaggcgatctttcgattgttcgtccagttcatgctgcaggatc

SEQ ID NO: 298418 - DNA, 401 bp, Zea mays
ggccgccgtacccagaccggatcgaccaacaatacaggaccgagagaggtatacgggtcgtcgggtgcatggctgtcgcaggtgccagactgtatggaggggagattgcctatgtctgcaatgtgctatagagctaatgcaacgctgcctgactgctcgagacgattatgaacgaagcgggtctgtaccgttgattttattacatgaggaaggctccggatataacgataacattatctaattactactattctattgtacatactatatcataaaaccacaacataactgaaacataatggctgcagtatatgaggatgatggacttgcaccaaacactatataacttgcatatgactatgccgctcgagcgtgccgctgccgccagcagcagcctgtac

SEQ ID NO: 298419 - DNA, 405 bp, Zea mays
cttgctttgacaaacctagcagtgttcttctcaacaacccatcattggtggtgccctcttgtagatttcttatgagttatagttcaataataaagttttttgtctgatgtttgtggcttcccagaaataagaaagtacatttctaaaaaaaaaaaaaaaaaaaaaaaaaaaaaaaaaaaaaaaaaaaaaaaaaaaaaaaaaaaaaaaaaaaaaaaaaataaaaaaaaaaaaaatggggggtcaatataaataattcaacttttgtttaccaagcataaacaaataaaaaccctttaatatattgggcggggcccttttaaatggcccacttttttaaacccgtgggattgagaaaacaactgttttttaaccggtcaatatttttttactaccggcgcccctttt

SEQ ID NO: 298420 - DNA, 324 bp, Zea mays
gatcgtgagcggccgcccttttatttttttttttttagataaaacccaatcaatatattgattgtttgtgggaaacacatgcggtcttgagggcaccattgttgactacatctcatatgtaatctaaaagatggcaccttcaaagaagggttgctgcaaggaagggttcatcaaagagaactggctgtatggcagcaattggtgctgctggatgaagttagcacaccaatgggataggcactgctagtggattaaagaactgttgtcgctgttgccggtacacaataaattgccacacaccctgttggttgaatggaatcaact

SEQ ID NO: 298421 - DNA, 346 bp, Zea mays
aaaaagcacaccaagcgaagcacattttcaacttcctaacaacaatggctaccaagagattatggttccttgcgcttcttgcgctttatgcgagcgcaacaaatgcgtacattattccacaatgctcacttgctccaagttccattattacacagtttcttccaccagttactacaatgggcttcgaacacccagctgcgcaagcctatatgctacaacaagcaattgctgctagcgttttacaacaaccaatttgccagttgcaacaacaatgcttggcacatctaacaatacagaccatagcatcgcagcagcaacaacaattcctaccaggactgagccacct

SEQ ID NO: 298422 - DNA, 272 bp, Zea mays
cgcacataccctacctacctcgccgtcgccgtttcattttccatgggggcgtacaaatacgtgggggaggtattgataaagaagcaatccgacgtgattccgttcgttcaacgcgtgcgctgttgggagtacaggcagcaaccgggcattgtgcgccttacaagggccacccgccccgacaaggactgtcggctcggcttcaaggacaagcaggggtgtgttttttacacgcgtacgcgtgaggcgtaggggctggaacaggcctgtgccca

SEQ ID NO: 298423 - DNA, 179 bp, Zea mays
atccagatcaacacagcggcagtgctttaagtttatcggcaaacagaacagcatgaggatggtcattgctctcgttgagtgcctggctctgtcaactgccaccgcctcttcaatgcacctgcaccaaccatgcgcggtgctacaagacttgtaccgagctggcaccggccttactacaa

SEQ ID NO: 298424 - DNA, 328 bp, Zea mays
atcacggacccacctatccttggtgaaccctgtcgactacttgcaacaaagaatactttaatacaacccactcgctctctccaacgtacctgcataccaccaacaacaacgtctagcgacagcttatgccagcgctcagtcaactagccatggtgaaccctgtcgcctacctacaacaacaacaattgctttcatctagcccgctcgctgtgggcaatgcacctacgtacctacaacaacagttgctgcaacagattgtaccagctctgactcagttagctgtggccaaccctactgcctacaagcaacaggtgctaacatacaacca

SEQ ID NO: 298425 - DNA, 362 bp, Zea mays
tcgggtcttcagaccattagctttatctactacagagcgcagaagaacccgatcgacaccgtgagggtgttgctcgttgccctcgctctcctggctctcgctgcgagcgccacctgcacgcatacaatcggcggctgcggctgccagccaccgccgccggttcatctaccggcgccggtgcatctgccagctacggttcacctgtcacctacggtgcatctaccaccgccggtccacctgcctgcgacggtccacctgtcagcgccggtccatgtacctgcggcggttcatatgccgccgccaccatgccactaccctacttaaccgtcatggcctgagactcatatgcaggcacacacatg

SEQ ID NO: 298426 - DNA, 405 bp, Zea mays
aacatgcaacatataaagtggaatccagtatcaacaattgagcaacaatggcgaccaagatgtggtgcgtccttatgctccttgctctttctgcatgtgttgctaacgcgacaattttccctcaatgctcacaagctcctatagcttcccttcttcccccataccttgcatcaatgatagcttcagtatgtgaaaacccagctcttcaaccctataggctccaacaagcaatcgcagcaagcaacatacctttatgacccttgtttcaacaatcgtcagccctatctttggtgcagtcattggtacaaaccatcagggcacagcaactgcagcaactcgtgctacctgtgatcaaccaagtaagctctgcaaaacctttgtccctactctgagcaacaacaattt

SEQ ID NO: 298427 - DNA, 226 bp, Zea mays
cagaggattatctatatgctactccagagttctaacaacccgaccgacaccatgagggaggtgttctctgccgtcgctctgctggctctcgctgcgagcgccacctccacgcatacaaacaggcgctgatgatgtcactcaccgccgcctacctatctacagccgtgggtgcaatgggcaaaaaccgcaaagctgaaacctacagggcacaacacaccgtcggtac

SEQ ID NO: 298428 - DNA, 379 bp, Zea mays
agcaaagcggcagtgcgtacagaggatcgtctaacagaacagcatgaagatggtcatcgtgcgcgtcgtgtgcctggctctgtcagctgccagcgcctctgcaatgcagatgccctgcccctgcgcggggctgcatggcttgtacggcgctggcgccggcctgacgacaatgatgggcgccgggctgctgtacccctacgcgaagtacctgaggcaggcgcagtgcagcccgctggcggcggcgccctactacgcacggtgtggtcagacgagcgccatgtaccaaccgctccggctacagtgctgccagcagcagatgaagatgatggacgtgcagtccgtcgcgcagcagctgcagatgatgatgcagcttgagcgt

SEQ ID NO: 298429 - DNA, 296 bp, Zea mays
acccatctataccatcctatttgtttcaactagcgatcgcggcaagcgtcttagggcaacgaattggtcaattgctacaacaatccttctcgcatcctaacaatacaaaccatctcaacgcaaccaaaccaacagttcctatcagcacttaaccacctagttattgtaaaccctgtgacccatttgccacatcaggttcttgtatcacaatccacttcctctagcacacgtagttgcattaccgctacaacaacaactgccacagtttctgccatgcttaatcaaataacatggtg

SEQ ID NO: 298430 - DNA, 332 bp, Zea mays
cggacgcgtggggcgttcagaccattgggctgatgtgcgcccaaacagcgcagaacctgagggagatgttcaggctgcagctcgctactccatgtctctacgctgttgccggcagcgccccccactgaagaaactatgtgctgtagtatatccacccgctagctacctagcatagacattcagcggcgattattgcatcataatgtgacacgcctcatcatgggcgtctgcgtcagcgtgagcaactacctgaatgaacacatcgtgataaaaagaaaacatgtgtcgtcccggttcatctagcccgctcgcccatccactaccctactaac

SEQ ID NO: 298431 - DNA, 341 bp, Zea mays
cccacgcgtcctcccactcgtccgcatcatgtcacaacagctgcagcaactcgtgctaccgatgatcagccaagtagctctggcaaacctttctccctactctcagcaacaacaatttcttccattcaaccaactgtctacactgaaccctgctgcttatttgcagcaacaacaactactaccattcagccagctagctactgcctactctcagcagcaacaatttcttcattttaaccattccgccgaactgaacccctttgttaatttccagcaccaaatacctactaccatttggtccagctagctacaacaaagcccccgctttccttctttgacac

SEQ ID NO: 298432 - DNA, 327 bp, Zea mays
gcgacaagttccttatgcatcactgcacgctgacggacacgccctactgctcgcctgagtggcagtctttcctgtatctacggtgtctgcatctcaggccggtgtagccgcataaccggtgccagtctttgtggcagcctcgttgccagcatctcatgcaggtggagccgcatctccgattccaggctaacttgggctttggtctgcattccataccgcaggaacaaccgcagagcgggcaagtcctgatactgtcggcggatcaaatagcgcaggatcttacggcgatgtgcggactgcattcatccctactcatgccctacctgt

SEQ ID NO: 298433 - DNA, 299 bp, Zea mays
aatctagcatcatataaagcacaactctcgctctcaacatatgtgctcgccaaaatatcggagccgggcgtatgctcccttggtctctcgcgcaaatacatactacacgcaaccagttttcccacaggtgctcacaggactactataacattcccttccttccccacaacactatgaccaacttgcgtcttctgtatgtgaaaacactattcttcaaccctataccattcaacaggaactcgcaggtgccatcttacctttatgacccagcttcctccaacaataataacctctattac

SEQ ID NO: 298434 - DNA, 316 bp, Zea mays
aaaaccggcccgaccgacgcgtccggccgccaccacccagcgtcccccaaagcttaaccctcaatccatacccaccatggcgtaagacctttcaaatcctcgctcctccgctccgcgtgccgcctgcgggccgcctcacccgctgcgccacgcccacacgcgccaccttaccgcccgtccccggccagatacctcatcaaccacgctgccagctacgcctatcccacctctgcccacgcatgacctgccaccccccctccgggcacccagaataccgttgtcagcatgatcaccgaacagttcacccccacttgcg

SEQ ID NO: 298435 - DNA, 236 bp, Zea mays
gtcagcctagcaattagctcatcgtctccatattggagaactcgacaccatgaaggtgcggatcgttgcccttgctctcctggcgctcgctgcgagcgccgccttcagtacaagcggcggctgtggctgtcagacaccaccgtttcatctaccgcctccgttctatatgccgccttcgttctatctgtcgccgcagcagcagccgcagccatggcaataccccactcaaccaccgc

SEQ ID NO: 298436 - DNA, 370 bp, Zea mays
gtatagaggatcgtctatacagaacagcatgaatatggtcatcgaagtcgtcttttgcctggctctggcagctgccatcgcctctgcaatgcatatgccctgcccctgcgcggggctgcagggcttgtacggcgctggcgccggcctgacgacgatgatgggcgccggcgggctgtacccctacgcggagtacctgaggcagccgcattgcagcccgctggcggcggctccctactacgccgggtgtgggcagacgagcgccatgtaccatccgctccggcaacagtgctgccagcagcagatgaggatgatggacgtgcagtccgtcgcgcatcagctgcagatgatgatgcaacttggagcgtgccgc

SEQ ID NO: 298437 - DNA, 295 bp, Zea mays
acagaccaagcgtagcgcactagcaacgacctaactgcactggctaccaagatattagccgtccgtgcgcttattgcccttggtgtgagcgcaacagatgcgtccattattacacaatgctcactcgctcatagtgccattattccacagtttctcccaccagtttcttcaatgggcttttaacacctagctgtgcaagccatcatgcaacaacaagcgcttgcggcgagcgtattacaacaaccaattgtacaattgcaacaacaataattgccacatgtaacaatacaagcca

SEQ ID NO: 298438 - DNA, 372 bp, Zea mays
cccacgcatcctcagacgcgtgcgttgactctaactaccaacatacatagcacaatagaagaccaactattgcacccacaatatcttgcttacttatgctccttgttattcccgcaagtgttgctaccacaaccatttccccacacttctcacaacctcctatacattctcttattgccccatacctttcaccatacctgtctccaatgtctgataacccaattgaacaaccctacatgatacatcacgcaaatcaaacaaccatcttaccattatcaccctcattactacaacaaccgccacacctattacaacacttacctctggaccatcttgtggcacataacatgacggcacaccaactacaacaac

SEQ ID NO: 298439 - DNA, 388 bp, Zea mays
gggtcttcagaccattagctttatctactccagagcgcagaagaacccgatcgacaccatgagggtgttgctcgttgccctcgctctcctggctctcgctgcgagcgccacctccacgcatacaagcggcggctgcggctgccagccaccgccgccggttcatctaccgtcgccggtgcatctgccacctccggttcacctgccacctccggtgcatctcccaccgccggtccacctgccgtcgccggtccacctgccaccgccggtccatgtgccgtcgccggttcatcttgcgccgccacccattgccactaccctactaaccgcccggctagcctatcccagcaaccatgccgtgcaacagcgatcagccgtgcactgaggacct

SEQ ID NO: 298440 - DNA, 270 bp, Zea mays
  unsure (1)..(270): unsure at all n locations
gacgatagnctaacattaatctaatcgcctctaaatgggtaactccacaccatgaaagtgctgagtcgtgcccttgttctgctggcgctcgctgccagcgccgcctccagtacaagcggcggctgtggctgccagacaccaccgtttcatctaccgcctccgttctatatgccgcctccgttctatctgccgccgcatcagcagcctcagccatggcaataccacactcaaccaccggagctaatgccgtgccagcagtatggatcctgc

SEQ ID NO: 298441 - DNA, 206 bp, Zea mays
atgcgtacacacttataatgcatacaatccagatcgcagtttaaacccaccgacaccatgagggcgcggggggcaggttccctctcctggctcttgctgccagcgccaccatgaagcatacatgcggcggctgcgactgacagccaccgaccacgatccatctaccgtcgcccgtgcatctgcgacctccggttcacctggcacct

SEQ ID NO: 298442 - DNA, 308 bp, Zea mays
caacaagcaacatataaagtgcaatccagttctgacaatagagcaacaatggcgaccaagacatgtgcccctccggacgctccttgctctttctgcatgtgttgctaacgcgacaagtttccctgaatgcttacaagctactatagcttgccttctttccccataccttacatcaatgatagcttcaggatgtgaaaacccagctgtataaccctattggctacaacaagcaatcgcagcacgcaacatacctctatcacccttgtgtcaacaatcgtcagccctatgtttggtgcagtcattggtac

SEQ ID NO: 298443 - DNA, 265 bp, Zea mays
aaggcgaccaactttcagcatataaagcacattaatgatccatctatggccgccaacatattgggccttcttgggctccttgatctttctccaagtgctgctacctcgacccttttgccacattgctcgcaaactcctatacctttccttgttaccctttacctttcaccaacagagtcttctgtattatacaacccaattcttgaacctttcatgatacaacatgtaataccatctggcctcttacctttatcacccttatttt

SEQ ID NO: 298444 - DNA, 319 bp, Zea mays
agcaaagcggcattgcgtatataggatcgtctttcagaacagcatgaagatgggcatccttgggggcgtgtgcctggctctgtcagctgccagcacctctgcaatgcatatgccctgcccctgcgcggggctgcagggcttgtacggcgctggcaccggcctgactaccatgatgggcgccatcgggctgtacccctacgcggactacctgaggcattcgcagtgcattccgctggcggcggcgctctactacgccgggtgtgggcatacgagcgccatgtaccattcgctccggcaacagagctgccagcagcatatg

SEQ ID NO: 298445 - DNA, 363 bp, Zea mays
tcgatcgacaccatgagggtgttgctcgatgccctttctctcctggctctagatgggagcgccacgtgcacgcatacaagctgcggctgcggctgacagccaccgccgccggttcatctaccgccgccggtgcatttgccacctccggttcacctgccacctccggtgcattttccaccgtcggtccacctgccgacgccggtacacctgccaccgccagtccatgtgccgtcgccggatcatctgtcgtcgccaccatgccactaccctactcaaccgtccctgcctcagccttattctcagccacacccatgcccgtgccaacaaccacatacaagcccttgccaactgcaaggaacctgc

SEQ ID NO: 298446 - DNA, 186 bp, Zea mays
tcctggctctcgctccgagccccaccttcacgcatacaagctgtgcgtgcggctgccagcaaccgacgccccctcatctactccagcccgtgcttctcccaccttccgttcacctgccaactacggagcatctcccaccgcccgtccatctacccgcgctggtgcaccctccactggtgctccatt

SEQ ID NO: 298447 - DNA, 248 bp, Zea mays
ccagaaataagaaagtacatttctgggaagctactaaacatcagacaaaaaactgtattattgagctataactcataagaaatctaaaagagggcaccaccaatgatgggttgttggtagaacactgctaggtttgtcaaagcaagttggtggcttcccagaaataagaaagtacatttcttaaaaaaaaaaaaataaaaaaaattaaaaaaattttaaaaaaaccaatttataaaaaaaatttaaag

SEQ ID NO: 298448 - DNA, 448 bp, Zea mays
  unsure (1)..(448): unsure at all n locations
cgcggggctagatcgcgagcgccctcccttaattttttttaactctttacccttttctattaaaccagacttcctaagaaaattttcaaatcttttttcactctaccaacnggcttcattgaactcttctgcatattttcaacaacaactaccattcattcatttaactgctacctacccccaacaattttttccattcaaccaactttcatcatttaactcttcttcttatttacaacaacaacatctaccaccattcactcatctatcttaatttaaccctatttccttttttacacaacaacaatttgtttcctttctaacttcacactactcctaactctatcacccttttacaactgtttcaaattacttccattcaaccaactttcttttacaaacccaacatcgttctaccaacaacccatcatttgtaatgccctctttt

SEQ ID NO: 298449 - DNA, 363 bp, Zea mays
cgggcgacccacgcgtccgcgataggggacagcgtgtttctgcaaccacatatccatgagccacaacactccttggctcaggtacctatactgaccattttaacgcagcgacccacaacaatatgtactgcactgagccagctagctatggtgaaccctggcgcactacttgcgccatcattgactatgtatcgaacccagtatctccgtcgaacgtagttgcaaaccgagcacagaaacaaatgcaccagtgtctggcagcgcttactcaacttgccatggtgaaccctgccggctacctacaacagcaacaactgctttaatctagcccgctcgctgtggccaatgcacctacatacctgc

SEQ ID NO: 298450 - DNA, 459 bp, Zea mays
cacatagaaagttgaatacagtaacttcaatacttcaacaatggcggccaagatatgttccattgttatgctcctagctctctctgcatgtgttgctaacgcgaccattcttcctcaatactcacaagctcctatagctgcccttcttccctcataccttccatcaatgaccgcttcattatgtgaaaacccagcccttcaaccctacatgctccaacaagcaatcgcaacatgcaacttacctttatcacccctgttctttcaacaatcgccagccctatctttggtgcagtcattggtacaaaccatcacggcacaacagcttcagcaactcatgctaccaatgatcagacaagtagcttttgcaaaactatctccctactctcatcaacaacaatttctttcattcaaaccaatgtctacacttaaccctgcttgttattttcaacaacaacaact

SEQ ID NO: 298451 - DNA, 289 bp, Zea mays
caacaatagaccaacaactgtgactttataaattttcccaccaaaacctccttccccgtgctgtgtgtgtttttaaccctacattttctcctcattctcacaaactcctataacttacattcttatcccatacctttcataaatgatagcttcagtttataaaaacccagctattcaatcctaatgctccaacactcaatcgctgcaagcaacatacatctatcatccttctgtcaacaatcgtcaaccctatatttacagcagatatatctacacaccatcatctcac

SEQ ID NO: 298452 - DNA, 455 bp, Zea mays
ccaactagcaccatacaaagcacaatagtgtactcaacaacggcagccaaaatattgtgcctcggtgatgctccttggtatttctgcaaatgcctctaccgccaacattttcccgcaatgctcacaagcttctatatactttccttttttccccgcacctcttaacacccgtgtgttttgtgtgtgaaaaacccccttttttaacctccatgatatccacacgcgatttcaggtgtgggatttttctttttaacccactttttctctcacaaaaaaaatatccttttttaaaaaatatccttcttttgggtttttttgggcacaaaaaaaagggggaccacaacaaccaacaacattttgtgctaaacaattttttgtttttttttttaaaaaaaagtatttttttttatacaaaccaattagctggataaaactttttttttttatttggaaaa

SEQ ID NO: 298453 - DNA, 448 bp, Zea mays
gcgcccacgcgtccgagaccaactagcatcatataatgcacaatattgtaccaataatggcagccaaaatattttgcctcattatgctccttggtctttctgcaagtgctgctacggcgagcattttcccgcaatgctcacaagctcctatatcttcccttcttcccccatacctctcaccaacgatgtcttcagcatgtgaaaatccaattcttctaccctacacgatccaacaggcaatcgcagcgaggcatcttacctttatcacccttgttcctccaacaatcatcaggcctattacagcagttaccttttgtgcatttattagcacaaaacaatcaggcacaacaacttccaaaacctgtgccaacaaaactttattgctaatattaacaacaaccgttaccttaagtgcatttgatggcacaaaacattaaggcgcaacaac

SEQ ID NO: 298454 - DNA, 343 bp, Zea mays
atccaatccatatcagaacaacggtagcgcgatgagaggatcgcagaacacaacgggatgaagagggtcattgttctccttgggcgcctggctatgccagatgccaacgccaatgcgctgcagaggccctgcgcttgcacggggctgcagggcttgtacggctgtggagccagagtgactaaaatgatgggcagccactggatgtacccctacgcggcagaactgagggacacacagcggataccaggtgcggaggggccctactaccccagctgtggacagaccaacgtcatgtaccatccgctcaggtacagggctgacacagcagatgaggatgatggac

SEQ ID NO: 298455 - DNA, 474 bp, Zea mays
gcatttattggcacaaaacatcagggcacaactactacaacaacttgtgctagcaaaccttggggcctactctcagcaacagcagtttcttccattcaaccaactagctgcattgaactctgcttcttatttgcaacaacaacaactaccattcagccagctacctgctggctacccacagcaatttcttccattcaaccaactggcagcattgaactctagtgcttatttacagcttcaacaactactaccattcagccagctagctggtgtgagccctgctaccttcttgatacaaccacagttgatgccgttctaccagcacgctgcgcctaacgctggcaccctcttacaactgcaacaattgctgccattcaaccaacttgctttgacaaacccagcagcgttctaccaacaacccatcattggtggcgccctcttttagatttcttatgagttatagctcaataataa

SEQ ID NO: 298456 - DNA, 147 bp, Zea mays
  unsure (1)..(147): unsure at all n locations
atccaatccagatcagcaaagcggcagtgcgttnagaggatcgtcgaacagaacaggatgaagaggggcatcgttctcgtcgtgtgcgtgtgtctgtgagatgtgacagcgtctgtgatgtgcatatgcttgccttgcgcgggctga

SEQ ID NO: 298457 - DNA, 455 bp, Zea mays
attgagaccaacaaacaacatagatagtgcaattcaaggacaacaatacagcaccgggggcgacggggattttttccctccttatgctcctcgctctttctgcatgtgttgctaacgcgacaattttccctcaatgctcacaagctcctatagctttccttctttccccataccttccatcaatgatagcttcagtatgtgaaaacccagctcttcaaccctataggctacaacaagcaatcgcagcaagcaacatacctttatcacccttgtttcaacaatcaccagccctatctttggtgcagtcattggtacaaaccatcacggcacagcagctgtagcaactcgcgctacctgtgatcaaccaagtatctctggcaaacctttgtgcctactctcagcaacaacaattttcttcattcaaccaactgtctacattgaaccgtgctgcttat

SEQ ID NO: 298458 - DNA, 336 bp, Zea mays
ttcagcattcacaaacacaccaatcgaagcgcactaacaacaacctaacaacagtggctaccgagatattagccctccttgcgcttcttgcccttttagtgagcgcaacaaatgccaacattattccacagtgtgtacttgctcctagtgccattattacacaattcttttcatcattaacttaatgggctttgaatattcagccgtataaaactacatgctacaactagcgtttgcgggtagcgttttacaacaaccaatttatcaattgcaggaacaatccttggcacatctaaacctactaaccatctcaacgcaacagcaacaacagttttt

SEQ ID NO: 298459 - DNA, 165 bp, Zea mays
aacatgcaacatagaaagcggactccataaattaccaaagagcaacaacgccgggggacatgtgggacccttcttatgctccttgctctttctgcatgtgttgcgtcacgcgacaatcatccctaaatagctgacaaaaccctgatagctcccatttttacccca

SEQ ID NO: 298460 - DNA, 351 bp, Zea mays
gtcagcctagcaattagctcatcgactccagattggagaactcgacaccatgaaggtgctgatcgttgcccttgctctcctggcgctcgctgcgagcgccgcctccagtacaagcggcggctgtggctgccagacaccaccgtttcatctaccgcctccgttctatatgccgcctccgttctatctgccgacgcagcagcagccgtagccatggcaataccccactcaaccaccgcagctaatcccgtgccagcagttcggatcctgcggcgtcggcagcgtcggcagcccgttcctgggccagtgcgtcgagttcctgaggcaccagtgcagcccggcggcgacgcccta

SEQ ID NO: 298461 - DNA, 450 bp, Zea mays
  unsure (1)..(450): unsure at all n locations
cgctcgcatgcctgtgcacttcttcatcaccatcactgggtcttcagaccattagctttatctgctccagagcgcagaagaacccgatcgacaccatgagggtgttgctcgttgccctcgctctcctggctcttgctgcgagcgccacctccacgcatacaagcggaggttgcggttgccatccaccgccgccggtatatctaccgcctgcggtgcatctgccaccttctggttacctgccacctccggtgcatctcccaccgccggtccacctgccgccgccggtccacctgccaccgccggtccatgtgccgccgccggttcatctgccgncgccaccatgccactaccctactcaaccgncccggcctcagcctcattcccagccacacccatgcccgtgccaacagtcgcatgcaagcccgtgccagcttcagggaacctgcggcg

SEQ ID NO: 298462 - DNA, 316 bp, Zea mays
ccacgcgtccgttaaacacaccaagcgactctttttaaccattttctaacaacaattcataccaggagattagtgcccctttcacatcttgcccttttaattattctcctcacatacaccacaatattccacactggtgactttctcctaatgccattattccacaagtgctcccaccacacactcaaatgggctttgaacacctaactatgcaagccatcatgcaacaactagcgctcgaggacagcatcttacaaaacccaattgtccaactgcaacacaacttcttgacccatataacaatacacgccatcac

SEQ ID NO: 298463 - DNA, 366 bp, Zea mays
aagcgcgctagcatcgacctaacatcaatggctaccaatatattaaccctccttgctcttcttgctctttttgtgagcgcatcaaatgcgttcattattccacaatgctcacttgctcctagtgccatttttccacagttctttccaccagtttcttcaatgggcttcgaatacttatctgtgcttgcctacatgcaacaacatatgctttctgctagtgttttacatcaaccaattgcctaatttcaacaacaatccttgccacatataacaatacaagccatcacaacgcaacagcaacaacagttcctaccatcactgtaccacctagccattgagaaccctgccgcctactttcaagatcag

SEQ ID NO: 298464 - DNA, 154 bp, Zea mays
atttagaccaactagcaacatattaagcacattattgtaccaacaatggcaacggaaatatttggcctccttatgctccttggcatttctgcaagtgctgctacggcgaccattattcctaagtgctcacaagcatttatagattaacttcttc

SEQ ID NO: 298465 - DNA, 446 bp, Zea mays
tttatctactccatagcgcatttaacccgatcgacaccatgagggtgttacgcgttgtcctcactctcctggctctcactacaagcgccacctccactcatacaagcggcggctgcggctgccagccaccgccgtcggttcatctaccgccgacggtgcatctgccacctccggttcacctgccacctccggtgcatctcccaccgccggtccacctgccgccgccggtccacctgccaccgccggtccatgtgccgccgccggttcatctgccgccgccaccatgccactaccctactcaaccaccccggcctcagcctcatccccagccacacccatgcccgtgccaacagccgcatccaagcccgtgccagctgcagggaacctgcagcgttggcagcacccctatcctgggccagtgcgtctagtttctgaagcatcagtgc

SEQ ID NO: 298466 - DNA, 337 bp, Zea mays
accaactagcaacatagaaagcacaatagcgttccaacaatggcagctaaaatggggtgcctcgtcatgcttcttggtcttcatgcaagtgctactacagcgaccattttcccacaatacaaacaagctattaatgtcttctttcttcccacgtacctctcactaacattttcatttttgataataaaacccaattttacaactctacattatacaaccaattgtcgcaagtgatattttaccttcatcacccttgttcctacaacaatcatcactattattacagcagttacctttgctgaatatattggcacaacacatgagggcacaacaactg

SEQ ID NO: 298467 - DNA, 453 bp, Zea mays
  unsure (1)..(453): unsure at all n locations
atccaggacaaggagggcatcccttcggaccatcagcggctcatttttgccggggggcatctggaggacggtcgcacgctggccgactacaacacncagaatgagagcaccctccacttgacgccgcgnccaaagggaggcatgcagatcttcgtgaagacactgactggcaagacgaacacacttgaggtggaattctcatacaccatatataacgttaaggtcaatatccatgacaaggagggcattccaccggaccagcagcggctgatcttcgccggcaagcagctggaggatggtcgcaccttggctgactacaacatccagaaggagagcaccctccacctggtgctccgtctcaggggtggtatgcagatttttgcgaagacattgactgtcaagaccatcaccttggaggtggagtcgtctgacacaatcgataatgtcaaagcc

SEQ ID NO: 298468 - DNA, 472 bp, Zea mays
agaccattaactttatctactccagagcgcattataacccgatcgacaccatgagggtgttgggcgttgccctcgatctcctggctctcgctgcgagcgccacctacactcatacaagcggaagctgcggctaacagccaccgactccggttcatctaccgcttccttatcatatatcacatacagttcacctgacacatcaggtgcatctttgaccaatttttcaaattccaagatcggtacacctgccaccgtcggtccatgtgccaacgccggttcatctgccgcctacaccatgccactaccctactcaaccgccccggcctcagcctgatccccagccacacccatgctcgtgccaacagccgtattcaagctcgtgccaactgcagggaacctgcggcgttggcagcaccccgatcctgggccagtgcgtctagttcctgaggcatcagtgcaacccgacggcgac

SEQ ID NO: 298469 - DNA, 463 bp, Zea mays
gtcgatacaccattacctcaatctactcgagagcgcataacaacacgatcgacaccatgagggtgttgatcgttgccctcgctgtcctggctgttgttgcaagcagccacctccacgcatacaatcagtggatagtgctgacagccaccgccgtctgctgatatagcggcggcagtgcatttgccacctatccattacctgacagctcaggaggatatcccaccgacggtccaactgccatcaccagtacacctgccaccgccatatcatgtatcgccacaggcatatttagcgcctccaccatgccaatgaattactgaaccgcaactacctcagcattatctacagacacacaaatgcgcgtgcgaacagaagcatgcaagctcagcgccagctgcaagaaacctgtggattcaacagaacccatagcctgaaccatgctatctagttgctgacgcatcag

SEQ ID NO: 298470 - DNA, 422 bp, Zea mays
gtacgtcaacctagcaattagctcatcgacttcatattggagaactcgacaccgggaaggtggggatcgttgcccttgctctcctggcgctcgctgcgagcgccgcctccagtacaagctaagggtgtggctagatatacaccaacgtttcatctaacgccttagtaaataatatcgattacaaattgtctgccgtagaaacatactgccagattcatgctaattatctattaaattaactcacttaatgccgtgccagcaattcagatcctgatccgacacaagcgtcagcataccgttcctcggccaaaacgtaaagttgctgaagcaccactgcattccgacggcaacaccctactgatcgccacagtgccaaacgctgcagcagcactgctgacaccagatcacgcaggtggagccgc

SEQ ID NO: 298471 - DNA, 360 bp, Zea mays
  unsure (1)..(360): unsure at all n locations
ngcngctgnnaaaaagcagcaacaaccactaccatncagccagctagctggtgtgagccctggtaccttcttgacacaaccacagttgttgccgttctaccagcacgctgcgcctaacgctggcaccctcttacaactgcaacaattgctgccattcaaccaactggctttgacaaacccagcagcattctaccaacaacccaacattggagggggcctcttttaaaattcttatgaaataaaagtcaaaaaataaagtttttggccggaggttgggggtttccaaaaaaaagaaagagccattctataatcttaaaaanaaaaaaaaannnnnnaaaanaanaaaaaaaaaaagaaaaa

SEQ ID NO: 298472 - DNA, 473 bp, Zea mays
cggctgcgagaagacgacagaagggatcaaagacacatgtcaaaaatggaacttcatgtgaaataaactatggaactggatcaatatctggtttcttcagtcaagataatgttaaagttggcagtgctgttgtcaagcatcaggatttcattgaggctacccactaaggaagtcttacctttctgtcagcaaagttcgatggaatactgggacttggatttcaggagatctcagttgaaaatgctgagcccgtatggttcaaaatggtggagcaaaaacttatcaatgagaaggtgttctctttttgacttaatggggatccgaatgcgaaaaaaggtggtgaattagcttttggtggtgttgacccagagcacttaaaaggaaaccacacttatgatccaattactgaaaaacgttactgacatattgaaatgggagattttctcgctggaggcgtttcaacaggtgtttgt

SEQ ID NO: 298473 - DNA, 479 bp, Zea mays
  unsure (1)..(479): unsure at all n locations
gacggtatcgataagcttgatgggataaaacattttcaacaatcaaattcgatcactggagataaaacatgcttttaagagaatttacttatagataaaataatcttataactctatttgaattgtcctaaaattatatccaaagtattatctaaaaaactctttaaacatctgtttaaacgtgaaaatgaacaaatggttgaaagagttgaagcttttgtgatctgtgaagatatgacatttttctctgtacagatggtgtccccagatctttcaagaaaatacaatggctgcaagctctaaatcatgagccgagtagtttttctcgtgcagtttcaactgttgggacgcataagctaccactttaccttcttgcatcaaaacacagcccaaaccatttaatgaagcattgatataaatcacaaattctttactggactatgattgaaccaacatanggctcttgtcaataatgcttt

SEQ ID NO: 298474 - DNA, 417 bp, Zea mays
gcgcccacgcgtccgcccacgcgtccgttctacttatccaacttgttgctgctgatcaactggtgacaagtgccatcaaacgcaagggaactgcccccactgcgaaaattgactgcggtggagcttgagcggctaggagccgattattatagacgccacacctacgcaagagggcttacgggacatgttgctcacgcggtaactgtattccaccgaggacagtctctaaccaagaaacagtgcccttgctatgatatcttgaccaccgacgctagaacacgtacgtgctcttgattgataatcgacaatcggaacaaatatttctattttaacggtcttccgcaattgataaacacacacatggtttactttaaagagggataaatcgaagcattggacttaattacttgcattttt

SEQ ID NO: 298475 - DNA, 491 bp, Zea mays
tcgacaagctgtagagactgtgtacggcctgatgccccatagctggaaattattggccaccgcctggagctaaccatcgcaggtgttgtctgcacatcatactgctcatgaaagccaaacaatgcacccattctaaggatgatggttggaacctttgaaacaactggaattgaaagtgtttgccccagcgtaagcatagagagtaggtggtagtttcttatgccaatttttaccagtctcggtcatcttctgtaatttgttttttcttctgtttcttttcttttggcaacctttgttgtactgtggtatggcgcattatctttgaaaagactgcaaacttttggcattgtgcaattatatataatctttttttttttgaaatggatgacttttgactttgtaatattggcatatgaagctatcttccccttttaatggagtagttgacgtccacaaaaataagtcattgtcagcttgaaacttttgacgag

SEQ ID NO: 298476 - DNA, 466 bp, Zea mays
tcgacggtatcgataagcttcttgttatccttgataatcaatattaattcactaatagttcgactatgtggttgaccaggcactggatcaagtggcttctactgatctgaaacaggtcatgcttgttaaggcattattaaatgctcgtgacacactgcttgcggagctgcaaaaacttagtgctgccattaaccatgctgttcatttgactgaatttacctccaaaatgaacgatatgaagttatttgattcctttctgcaagaaccggttgctgctgatgctgaagattcagcacaaggcaagccacaaaatggtcttgaggtccttgctttatgttattgaacagtgtactcttattcttatttttgtgttttaatatattaaaatgataacacctttgtctcttaacagagagtaaatggcagattagagtttcaaagtgatagattgctccataatttatcg

SEQ ID NO: 298477 - DNA, 465 bp, Zea mays
aggtcgacggtatcgataagctttgcaagcgatcgtcggaatgtaaggcttaggctagtagctaacgactttaacccttttaaaatcatgagtacttcgtacaatacttggcttgtagtgcttgttctttacaatttgcctccatggatttgcatgaagcaatcttcttttatattatctatgattatccctggagagaaaggtcccggaaatgatgttgacatttatttgcagccacttattgaagagttaaaatagttatggtcgggtgttgagacatatgatgtattgagaaaggagaacttcaatttacgtgcagctttgttgtggacaattaatgatttcccgacttatgccaatttatttggttggagtaccaaaggacgttatgcttgtgcttattgtgctgcgcaaacatgtttgaaatggttatataatgggaagaagttctcttatatgggggca

SEQ ID NO: 298478 - DNA, 495 bp, Zea mays
gaggtcgacggtatcgataagcttgaaaattgaagaaaccctagctatggaggagagcaaatttcggcagcaactagtgaagatgatgaccaattgggtgttatttttcccattttatttcatttaatatacaaacccttactactaaactttccaaaaattccctccatgtccaacttttgtccataacttaggaatgggtcaaattgctatttaagacctcctagttaatatcccaaagcaatttcatactaaaaacttctaaaacacgagttttacaatttattcggtttagtccctaatctcaacttaagcactcaatgtatagaatttcataacgaaattttcacgaaatcatgaaatcatatcataaaccccaaaataattataaaacaattatgtctatcgccgatttgtggtcacaaaaccactattctgattaggccctaattcgggttgtcacaattcttccccctttagaagattttcgccccg

SEQ ID NO: 298479 - DNA, 466 bp, Zea mays
cctcaggtcacggtatcgataagctttctgggattagctggctattatcaacgctttgtaaaaggattctcgatgatttctacaccgaggactcattttctatagaaagatgtgaagttcgaatggtctaagaaatgtcaatagagttttgaacaactgaaagcattgttaactaaagcaccagttttagttcagcttgaatttggtaaagagtttgtgatcttcagcgacatgtcattgaacaatttgggatgtgttttgatgcaagaaggcaaggtgatagcttatgctactaaacagttgaaactgcatgaaaagaattatccgatgcacgacttagaattggtcgctattgtatttgcattaaaaatttggcgacatcatttatttggtgaaaagtgccacatcattactaacaacaagagtttgaagtatttaatgactcaaaagatttgaatttgcaaca

SEQ ID NO: 298480 - DNA, 448 bp, Zea mays
gtcgaggtatcgataagctttatgggtttagtcggttactaccaaagattgtaaaaggattctccatgatagtgactccaatgtcaaggttgctacagaaagacattaagtttgaatggacagaaaagtgtcagcaaagtttcgacaagttaaagacattactgactgaagctcctgttttagtattgcctgaaccgggaaaagagtttgtggtctatagtgatgcatccttaaatggattgggttgtgtacttatgcaagatggcaaggtgatagactatgcttcacaacagttgaagccacacgagaagaactatccgacgcgcgatctagagcttgccgccattgtttttgccttgaaaatttggaggcattatttatatggtgaaacttgttgtatatttacgaccacaaaagtttgaagtatttgatgactcaaaaagaattg

SEQ ID NO: 298481 - DNA, 434 bp, Zea mays
  unsure (1)..(434): unsure at all n locations
gacggnnatcgataagcttccatcatcatacanaacttagatgagcanaacatttgccttcaanctccgccacagtctcttcgacttaacgcatcagccacgacatttgcttttcctagatggtacttgatcgaacagtcatagtcctttaacaactctatccaccttcgctgtctaagattcatctccttttgagtcagcaagtacttaagactcttgtaatccgtatagatgatacatttctccccatacaagtaatgcctccatatcttaagtgcgaaaatcaccgctaccaactccaagtcatgcgtaggatagttcccctcgtgaggcttgagctgttgagaagcataagcgaccactttacccttttgcatcaacgcgcagcccaaacctacaagtgacgcatcgctgaacacagtgaaatccttacc

SEQ ID NO: 298482 - DNA, 291 bp, Zea mays
cccttcgcttgggctgttaataacgacagaagggtgcaccgcttgaggatagttttcaacatcacatagcgccttactgtctgttcaagctaccatctctctctctctttcttagtgcctccttgccagaaattaaaatggcccaagaaactttcctattcacatctgaatcagtgaacgaagggcacccttacaagctctgtgaccagatctccgatgctgtgctcgatgcatgctttaagcaagaccctgacagcaaggttgcctgttaaacctgcaccaataccaaca

SEQ ID NO: 298483 - DNA, 453 bp, Zea mays
ataagcttatcaaaggaataatctgtacgaaccggaatgaaatgattcgatttagtcaatctgtccacagtaaccgggattgcatctttcttacttggtgacagaggtaaacctgatacaaaatccatcgtgattttgtcctattttcactcaagaatcataatcggttgaagtaacccagacgaaacttgatgttcagctttaacttgctaacaaattaagcattttataacaaatttcgagataggtagttccataccacgccaccaataaagttgtttcagatcattatacattttagtactacccagatgaacaggtaactaactgctatgagcttcatttaaaatcatctgaaataactctgaatttctcggaacacatattcgatctctaaatatcaaacaaccttcaccatcaatcaaaattctgaatcagtatttagatcacact

SEQ ID NO: 298484 - DNA, 471 bp, Zea mays
tacggctggagaagacgacagaaggggacccttttgctttctttatccaataataataaccccggttttccctctccatacccttttgcttttctttatccaataataagaacttcccacgagtggctttaactggtctggtctggtctggtcggacacacaaaaatattagtatggagaaggtgagttttgtgaagaatggagagcttagattgcctccggggtttcgtttccacccgactgatgaggagccggttttgcagtacttgaagcgcaaggtcttctcctgccctctgccagcctctatcattcctgaggttgatgtttgcaagtctgatccttgggatttgccaagtgatttggagcaagagagatacttctttagcaccaaagaggccaaatatcccaacggaaatcgctctaacagagccacaaattcgggttattggaaggcaactggcttggacaaac

SEQ ID NO: 298485 - DNA, 345 bp, Zea mays
ctcgtacatcgctctcgctctctctcctgctgtccacgaccgaccaaaggcgccgggcacagactcttcgtcggatccaagagaagctcgcgccctccccgaccatggtctcggcggataccatccgtacggctatcggcgtcatcggcaatggcaccgcccttgtgctcttcctctccccggtgcccaccttcgtgggcatctggaagaagcgtgcggtggagcagtactcgccgatcccgtacgtggcgacgctgctgaactgcatgatgtgggtgctgtacgggctgccgctggtgcacccgcacagcatgctggtggtgaccatcaacggcaccggcatgc

SEQ ID NO: 298486 - DNA, 351 bp, Zea mays
gaaaaaagggacccgcacgcgtgcgattattgaaacctaatagcaacatatcatgcattttcaagcaccaacaatcacaaccgggatattgtgcttttttatactgctgtggcgtctcccaaatctcgctaccacaaccatcagcccacaatgctcacaagctcctatatcttcccttcttcccccttacctctcaacaacggtgtcttcggaatttgaaaacccaattcttcaaccctacaggatccaacagctaatcgcagctcgaatcttacctttatcacccttgttccttcaacaatcattagacttatttcaacatatacctttgctgcatttattggcacaaaa

SEQ ID NO: 298487 - DNA, 422 bp, Zea mays
  unsure (1)..(422): unsure at all n locations
ctgtgtcgttgcgcgtacgcgtacacagccccgttccgaatcgacctcctcgcgagcctggccgagtcctcactccccttgccttgcttcaagatgcaaatctttgtgaagaccctcaccggcaagactatcaccctcgaggtggagtcttatgacaccattgacaatgtcaaggctaagatccaggacaaggagggcatccctcctgaccagcagcggcttatcttcgccggtgagcatcttgaggaccgccgcacacttgctgactacaacatccagaaggagtcaacccttcatttggtgctgcgccttaggggaggcatgcagatctttgtcaagaccttgactggcaagacaatcaccctngaggtggagtcttcagacaccatcgataatgtcaaggctaagatccangacaagga

SEQ ID NO: 298488 - DNA, 432 bp, Zea mays
  unsure (1)..(432): unsure at all n locations
aagtcgagcggctccgctttgagagtttcgattttcagaacaccatcatnatagncgggggtctgtgctattgcctgactatgtcagatgccaatgcctgtgcaatgaaaatgccctgactgtgagaagcgctgcaaggcttgtactgctctggctccagcctgaccactatgatgtacgtcgctgacatgtaaacatacacgtactaactgacgcagccagatatgcaccagcttgaattgtgacactactacgccctgtgtgggcacactagcgccatgtactatactctctagtaacagcgctgccagtagcatatgaagatgattgacgtgcagtccttnacgcagcatcatgtagatgattatgcaggttgagcgtgcacgctgccgacagcagtaaactgtacgatccatatatgatgcagcatca

SEQ ID NO: 298489 - DNA, 398 bp, Zea mays
gcaacatagaacgtggaatccaatatcaacaatttagcatttatgacgaccaacatattttcccgccatatgctccttgctctttctgcatgtcttcctcacactacaattcttcctcaatgctcacaagctcctatagcttaccttcttcccccataccttccatcaatgatagcatcagtatgtgaaaacccagctcttcaaccctatacgctccaacaagcaatcgcagcaagcaacatacctttatcacccttgtttcaacaatcgccagccctatcttttgtgcaatcattggtacaaaccatcacggcacagcaacttgagcaactcgtgctacctgtgatcaaccaaataactttgtgcaacctttcttcctactctcaacaacaacaatt

SEQ ID NO: 298490 - DNA, 239 bp, Zea mays
gcaactgacggggacgtgcggcctgcacacaacgactccatgcccctacacagcggccggcggtgtcccccactgaaaaaacaatgtgctgtagaatagccgctggctagctagctagacgagtcattgagcggcgaagaatgaataataatgcgccacgcatcaccatgggtggcaaagccagtgtgagcaatgaccagaatgaacaattgaaaagaaaagaaaaaaggagtgtccgc

SEQ ID NO: 298491 - DNA, 255 bp, Zea mays
cgcgggcgaacaaagacaccaagcgaagcgcactagcaacattctaacaacaacggccaccaaaagggaccccgcggggcacaaaatgccccttgagcgatcacaacaaaggcgtgcatcaggccacagcgctcaccagcaccgagggccacaatcacacagatgctgccaccagatacgtgaatgggcgacgaacatccagccgtgcaagcatacaggctacaacgagcgctcgcggagagacggttacaacaa

SEQ ID NO: 298492 - DNA, 190 bp, Zea mays
acgatcgacaccatgagggtgtcgctcgctgctttcgctctactggctctcggtgtcagcgccagggttacgcatacaagcggtggttgccgctgccaaccaccgtcaccggctcatctaccgtcgccggtgcatctgtcaccttcagctcaggtgccacctgcagggcatatcccacacgctggtacac

SEQ ID NO: 298493 - DNA, 404 bp, Zea mays
cacccacgcgtccgaaaatactgatctaactgcaccagaattgatatttttaaggcacgcccgcccaacgtcgtggagtgcgcaatgatgactctcggcctatcactcctctgcgctgaccgcggccctgccgtcgagcagaactgcggctgcacagccaaacgtatgctgcagcaagtatggctactgcagcacgaccgacaagtactgcggcaaccggtgccagtcaggcccatgccgctcgggcggcggctgcagcaatcgcggcagaggtgcgaacgtggctagcgtcgcaaccggctccttctttaacggccataaaaaccatgcctggagccggtgcgaaggcaataacttctacacccggagcgcgtttctgagcgccgtcaaagcgtacccaagct

SEQ ID NO: 298494 - DNA, 333 bp, Zea mays
ccgcatgcaagcccgtgccagctgcagggaacttgcggtgttggcagcaccccgatcctgggccggtgcgtggagtttctgaggcatcagtgcagcccgacggcgacgccctactgctcgcctcagtgccagtcgttgcggcagcagtgttgccagcagctcaggcaggtggagccgcagcaccggtaccaggcgatcttcggcttggtcctccagtccatcctgcagcagcagccgcaaagcggccaggtcgcggggctgttggcggcgcagatagcgcagcaactgacggcgatgtgcggcctgcagcagccgacttcatgcccctacgct

SEQ ID NO: 298495 - DNA, 279 bp, Zea mays
cccacgcgtccggacaaactctcaaattccaatgcacttttccattttaacaacgggggctaaaaaccatgggtttgggctactccttagcgtttatgaacccgatccaaaccataacgtttttgcacaatgctcacaactctcctatctctcgctttgatccccaatatctctcatacaagctgtctttaatgtgtgaaaacacaatcgttcaatcatacacgatccaacaggcatttgcaacatgcatcttaccatgataatccttgttacttcaac

SEQ ID NO: 298496 - DNA, 343 bp, Zea mays
gtgtgtcttgcgcgtcgcgtcacagccccgatccgaatcgactcctcgaagcctcgccgagcccggctcccctcccctcgctgcaagcgcacatctggtgaagaccctcacggcgagactatcaccctcgagggggtcttctgacaccattgacaatgtcaggctagatccaggacaaggagggcatcctcctgaccagcagcggtttatcttggcggcagcagctcgggacggacgacacttgctgactacaacatccagaacgagtcaaccctccatttggtgctgcgccttaggggaggcatgcagatctatgacaagaccttgactggcaagacaatca

SEQ ID NO: 298497 - DNA, 373 bp, Zea mays
  unsure (1)..(373): unsure at all n locations
ntccgctggacgtcagctctagcacattagcctcatncgacttctcagattgtgagaaaactcgnnacaccatgaagggtgcgtgatcggtgtgcccttgggctctcctggcgccgtcgctgcgagccgccgcctccagtacanagcggcgtgctgtggctgccagacacgcaccgtttcatctactcgcctccgttctatatgccgcctccgttctatctgccgccgcagcagcagccgcagccatggcaataccccactcaaccaccgcagctaagcccgtgccagcagttcggatcctgcggcgtcggcagcgtcggcagcccgttcctgggccagtgcgtcgagttcctgaagcaccagtgcagcccgg

SEQ ID NO: 298498 - DNA, 381 bp, Zea mays
gtctgcatgtactgctaactcgaccatttttctttaatactcacaaactcctataactgggctgggttccccataccttccatcaatgaccgcttcagaacgcgaaaacccagcccttcaaccctacatgctccaacacgcaatcgcaacaagcaacttacctttatcacccctgttctttcaacaatcgccagcactatctttggcgcactcattggtacaaaccatcagggcacaacaactgcatcaactagcgctaccagtgatcagccaaatagctctggcaaacctttatacttactctcagcaacaacaatttttttcattcaaccaactgtctacactgaaccctgctgctgattagcagcaacaacaactact

SEQ ID NO: 298499 - DNA, 369 bp, Zea mays
  unsure (1)..(369): unsure at all n locations
gccacgcgtacgttatcagcattcattttcactttaagccaaccacattancaacaaccgaactgctttgtcttccaagatattatccctccttgctcttcttgcacttattgcgagcgcaacaaatgcgttcattataccacaatgctcacttgcttcacgttccattattacacagctactcccaccagttacttcaatgggcttctaacacccagctctacaagcctataggctacaacaagcaattgcggcgatcgtcttacaacaaccaatttctcatgtgcaacaacaatccttgtcacatctaacaatacaaaccatctgaacgcaacagcatcaacaatttctaccatcactgatccacct

SEQ ID NO: 298500 - DNA, 475 bp, Zea mays
agcatagagaccaactaacaacatatttagcacttttttggaccaacaatggcagccggggtatgtgtgcatcttatgctgcctgatatttctacacgagctgctacggtgaccattttcccgcaatgctcacaagctcctatagctatccttgttgccccgtacctctcaccagcggcgtcttcggtatgtgaaaacccaattcatcaaccctacatgatccaacaggcaatcgcagctggcatcttacctttatcacacttggtccttcaacaatcatgacccctattacagcatgtacctctggtgcatttattggcacaaaacatgatggcacaacaactacaacaacttgcgctatcaaaccttgctgcctactcttagcaacagcagtttcttacattcaaccaactaactgcattgaactctgcttcttatttgcaagaacaacaactaccattcaggcagctacctg

SEQ ID NO: 298501 - DNA, 499 bp, Zea mays
  unsure (1)..(499): unsure at all n locations
gggaccacccacgcgtcgcgtttcagcattcaaaaaacacaccaagctatagcgctttattcaacaacactaacaacaattggcgtaccatggtattagctcctccttgcgccttcttcgcccttttaagtgagcgcaactaaatgctgttcatttattccacagangctcaacttgctcctagttgcctatttattccacagttcctcccaaccagttactttctaatgggctgtcgaacaatcctagccgtgcaagctctacagtgctacaactatgcgcttgcggcgagctgtcttacaaccaaccaattgtccaattgcaacaacaattcttggcacatctaaacctacaaaccatcgcaacgcaacagcaacaacagtttctgccatcactgaaccacctagccgtggtgaaccctgtcgcctacttgcaacaacagctacttgcatccaacccacttgctcttgcgaacgtagcttcataccaacaacaacaa

SEQ ID NO: 298502 - DNA, 264 bp, Zea mays
accgacccatcgcgtccggcggcagtgcgtacagaggatcgtctaacataacagcatgaagatggtcatcgctggcgtcgtgtgcctggctctgtcagctgccatcgcctctgcaatgcagatgccctgcccctgcgcgactctgaaaaaacatgtacgtacgctagctccatcctgacgacgatgatgggcgcctgccggctgtacccctacgcggagtacccgaagcagtcgagcttcacccggtggcggcggccccctact

SEQ ID NO: 298503 - DNA, 133 bp, Zea mays
gtagttctaaacatcaaccttaccttctactttatccaaacttacctactcgtgcatgcgagggcgtagctcttctatattgtcacccaaactcaatccactggccctagctttacacatacatgcatcggct

SEQ ID NO: 298504 - DNA, 421 bp, Zea mays
gtccataaacacactattctatccacatacttttttaacctaacaacaatggctaccaagaggatgctcctttcttgcgcattcttgcgctctttgcaagcgcaacaaatgcgttcattattccacaatgctcacttgctccaaccttccattattacacatttcccaccccccgttacttcaatgggcctttgaacacccagctgtgcaagcctatttgctacaacaagcaattgcggcgagcgttttacaacaaccaatttcccagtttcaacaacaattcttgtaacatctaacaatacaaaccatttcaacgcatcatcaacaacatttcctaccattacttgatccacctagccattgtgaacacctgcccctacttacaacatcttttgcttatcattaaaccccactttctttt

SEQ ID NO: 298505 - DNA, 349 bp, Zea mays
gacccacgcgttcggccacgcgttcagactagtgggcggtctactgctggactggagcgtttgcgatggcgagcggcgtcatcagaaggaagaacctttttgccggtggcggtgacagtggcgggaactccgacgagcttagcgtggaagtgttctgcccggtgttcggctcaccggagcagccgtcaaaggacgacgtcgatggctccgccgtctccaacattggactatggggtgggccgggaggatcggcacatgacatcacgacgacagatgcaccaaagcgtctgaacagcgtctacattcgcgcccgtattgccgtcgactcgatcgagttcacttacacttg

SEQ ID NO: 298506 - DNA, 249 bp, Zea mays
  unsure (1)..(249): unsure at all n locations
attttgagcattcaaaaacacacnaagcgatgcggacttacaaccaccttacaaccatgggttacaagaattttacccttcctgtgctctttggccttttgtgagagcgcaacatacgcgtcattattccacaatgctcacttgctcctagagccattattccacacatcctcccaccagatactctaatgggcttcgaacacctatctgtgcaagccaacatgcaacaacaagcgcttgcggcgagcg

SEQ ID NO: 298507 - DNA, 435 bp, Zea mays
gccggtccacctgccgccgccggtccacctgccaccgccggtccatgtgccgccgccggttcatctgccgccgccaccatgccactaccctactcaaccgccccggcctcagcctcatccccagccacacccatgcccgtgccaacagccgcatccaagcccgtgccagctgcagggaacctgcggcgttggcagcaccccgatcctgggccagtgcgtcgagttcctgaggcatcagtgcagcccgacggcgacgccctactgctcgcctcagtgccagtcgttgcggcagcagtgttgccagcagctcaggcaggtggagccgcagcaccggtaccaggcgatcttcggcttggtcctccagtccatcctgcagcagcagccgcaaagcggccaggtcgcggtgctgttggcggcgcatatagcgcagcaact

SEQ ID NO: 298508 - DNA, 413 bp, Zea mays
cgacccacgcatgcgaaagattttccttctcttctacaaagatctttttttaccaaccgacaccatataatatatggctgagattcctctcatctcctttctctcgctcctaaccccatcttcacacatacaatcttcgattgcttcttccaaccacactccaaccttcatatacctacgcacctgcattttccacctcaagttcaccagacacctccttatcactttccaccagcttctcaccttcctactacactccaccttccaccaccgatccattttcctgcgcacacttctcttcaatcgtcaccatcccaataccctactctaccgccccgatctcagcctcatcctcatccacacccatgcccattccaacagactaattcataccctttccaaataaaagcaac

SEQ ID NO: 298509 - DNA, 322 bp, Zea mays
caatgctcacttcctactatttacataactacacagtttcccacaagagtgactttatttggcctttaacacccatctgtgcacgcctataatccacaacaaacaattgaatgcagcgtcttacaacaaccaattttccaattgcaacaacaatccttggcacatctaacaatacaaaccatagcaacgcaacacctacaacattttctaccagcactgagccacctattcatagtaaacccttgaccctacttacaacaacagttgcttgcatcaaacccacttgctcttgcaaacataattgcaaaccaaccacaacaac

SEQ ID NO: 298510 - DNA, 351 bp, Zea mays
tccacgcgtacgcccacgcgtacgcccactcgtccgaccacgcgttcgcccacgcgtgcgaccacgcgtacgcttttttttttttttttctggaaatgtaactttttataactggttggccacatacatcattcaaaaaactctattattgaattacatctaaaaagcaatctaaaagagggcaccaacaatgaagagtggccgacaggacgctgttgccaacatcaaagcaagctgaacaaagaacaacactcgccctatatctaagacataagcgcggttagccgtatactgacgctcaaacggaaccatacactggtgagtgaactaggaaccactgctttctgtttc

SEQ ID NO: 298511 - DNA, 299 bp, Zea mays
acgcagaccattagctctatctactccatatctcacaagaacccgatcgacaccatgagggtggtgctcgtcgccctcgatatacctgctctaactgcgagcgccacctctacgcatacaagcggaggatgcggttcccatccaccgccgccacctcatctaccgcatcctgtgcatctgcctgctccggtctcacctaccacctccagtgcatctacaaccgccggtccacctgcacccgccagtccacctgccacagccattacatatgccgtcatcggatcacatgtcgatgccac

SEQ ID NO: 298512 - DNA, 384 bp, Zea mays
atgtctatcattcacaaacacaccaagcgaaacgcactagcaacaacctaccatcaggggctaccaagatattacccctgcttgcgcttcttgcccttttagtgagcgcaacaaatgcgttgattattccacagagctcacttgctcctagtgccattatgccacagttgctaacaccagatacgttaatgggctataaacatccagccactgcaagcctacatgctaacaatatcgcttgcggtgagcgtattacaacaaccaatggtccaactgcaacaacaatacttggcacatataatcctacaaaccatcacagcgcagcatgcacaacagtttctgacatcactgacccacctagccatggtgaaccctgtcatctac

SEQ ID NO: 298513 - DNA, 389 bp, Zea mays
  unsure (1)..(389): unsure at all n locations
tcgaccacgcgtgcgattagctttatctactccagagcgcanaatatcttgatcgacacccatgagggtgttgctgggggggctctctctcctggctctcgctgcgaacgccacctccactcatacaagcggcggctgctgctgccagccaccgccgccggttcatctaccgccgccggtgcatctgccacctccggttcacctgccacctccggtgcatcttccaccgccggtccacctgccgccgccggtccacctgccaccgccggtccatgtgccaccgccggttcatctgccggcgtcaccatgccactaccctaactaaccgtcccggtctcagccttattcccagccacacccatgcccgtgccaacaaccgcattcaagcc

SEQ ID NO: 298514 - DNA, 436 bp, Zea mays
gtcagcctagcaattagctcatcgactccatattggagaactcgacaccatggaagggcgggtcggtggccttggttctgggggctggttgaaggccccccttcaagacaaacggggggttgtggtgccagacaccaccgtttcatctaccgccttcgttctatatggcggcttcgttctatctgccgccgcagcagcagccgcagccatggcaataccccactcaaccaccgcagctaagcccgtgccagcagttcggatcctgcggcgtcggcagcgtcggcagcccgttcctgggccagtgcgtcgagttcctgaagcaccagtgcagcccggcggcgacgccctacggctcgccacagtgccaggcgctgcagcagcagtgctgccaccagatcaagcaggtggagccgctgcaaccgtaccaggcgacata

SEQ ID NO: 298515 - DNA, 231 bp, Zea mays
  unsure (1)..(231): unsure at all n locations
ctagaagcgcccctctccctctctctctctctcttcgccgnccgaagctccgcaccccaaggtaatcgacacctcgccgagatgggccggaaggtctttgtccgtgggcactgggaatgccatggaaccacagatcaagtcgagaagattgtcaaaaccctgaatgaaggacagggtcccccttcagaagttgtggaggtcgttgtcagccctccttatgtcttccttcct

SEQ ID NO: 298516 - DNA, 353 bp, Zea mays
tacctaacatcgacttaacaacattgggtgccaagatatttgccctccttgcgcttgttgccctttttgtgagcgcaacaaatgcgtgcattatgccacaatgctcacttgctcctagtgccattataccacagttcctgccaccagttacttcaatgggctccgaacacctagctgcgcaagcctacaggctacaacaagcgcttgcggcagagcgttttacaacaaccaattaaccaattgcaacagcaatccttggcacatctaaccatacaatccatggcagcacagcagcaacaacagttgctaccatgactgagccaactacatgtggtgaaccctggcgcctactt

SEQ ID NO: 298517 - DNA, 309 bp, Zea mays
acaatggcgaccaagatattgtgcctaggatatgctccctgctctgcccgcatgtgctgctaacgcgacaatactacctcaatgctcacaagctcctatagctttcctccttccgccatacctcccatcaatgatagcccaagtatgtgaaaacccagctcttccaccctataggctgcatcaagcaatcgcagaacgctacatacctgcatcaccctagatccaacaatcgactgccatatccttggtgcagccattgttacaaaccattatgtcacagcacatgaagaaactcgtgctatctgtgat

SEQ ID NO: 298518 - DNA, 384 bp, Zea mays
gaccattagctctatctactccagagcgcattagaacccgatcgacaccatgagggtgtggctcgttgccctcgctctcctggctctcgctgcgagcgccacctccacgcatacaaacggcggctgtggctgcacagccaccgccgccggttcatctaccgccgacggagcatctgccacctccggttcacctgccacctccggagcatatcccaccgacggtacacctgccgacgccggtacacctgccaccgccgagacatgtgccgccgccggttcatctgccgacgccaccatgccactaccctactcaaccgccccgggctcagactcatacacagccacacacatgcgcgtgccaacagccgcatgcaagcccgtgcc

SEQ ID NO: 298519 - DNA, 439 bp, Zea mays
acatgagctatatttactccacagcgcaatttaacccgatcgacaccatgagggcagcagggggtagccctacatcttctggctcttgccgtgagcgccaccttcacacctacaacacaggcgctgatgatgccacacacctcactcgcttcatgtaccgtcatcacagcatctgtcacatcaggtacaccagtgaccttcgagcatctaccagcgcaagcctatatgctacaacaagcacacctggcaagcgtggtacatgtgccaacttcgcatcatcatcagccatcctcgtgacatttaactattcaaacgatcgggacgcagcatcatcaacaattcctaccatgactgagccaactagccattgcgaaccctggcgactacttgcgacaccagttgcttgcatcaaacccactcgctgtggcaaacgtagttg

SEQ ID NO: 298520 - DNA, 380 bp, Zea mays
ggccttcaaatttttcgcttccttattgcggctgggtctttttgcaatgtgctggtatcgcaaccatcttcccacactgctgacaggctcgtatcgctcgctttcttgctccatacctctcaccagcggtgtcttcagcatgtgaaaacccacttcttcaaccctacagagatccaacatgcattcgcagcacgcatctcacctttatcacccttgttccttcaacaaccgtcagccctattacagcagtttcctttggtgcatttgttggcacaaaacatcaatgcactacaactacaacaacttgcgctaggaaaccttgctgcctactctcagcaacagcagtttcttccattcaaccaactggctgcattgaactc

SEQ ID NO: 298521 - DNA, 390 bp, Zea mays
gcactagcaacaacctaacagcgtgggggcatgatattatccctccttgcgcttcttgcgctttttgcgagcgcaacatatgcgtccattataccacaatgctcacttgctcctaggtccattattccacagttgctctctctagtgacttcaaaggcctccgaacacccagctgtgccagcttatacgccgcaactagcgattgtggcgagcgtcttacaacaaccaattgcccaattgcgacaaccatccttggcacatttaacaatacaaaccatggcatcgcagcagcgacaagggagcctaccagcactgatccacctagccatggtgaaccctgtcggctacttgcaacagaagctgcttgcatgcaacccacttgccctagca

SEQ ID NO: 298522 - DNA, 359 bp, Zea mays
atgtgtagcattcataaacacaccatgcgttgcgcactatcaacaccctaacaacactgggtgcgaggatattagccctccttgcgcttttggcccttgtagtgagcgcaacatatgcctatattattccacagtgctcacttgctcctagtgccattattcaacaattgctcccactcacatacttcaatgggcttcaaacatccagtcgtgcaagtctacaagctacaactagcgtttgcggcgagcgtcttacaacaaccaattgcccaattgcaacaacaattcatgtcacatctaaaccttaaaactatcgtaatgcatcagccacaacagattctgacatcactgaaccacct

SEQ ID NO: 298523 - DNA, 290 bp, Zea mays
  unsure (1)..(290): unsure at all n locations
ggccganggacgcgnncggggtgttcaaaccattatctttatctactttatagcgtttaagaacccgatagacaccgggagggtgtggctcgttgccctcgctctcctggctctcgctgcgagcgccaccttcacgcatacaagcggcggctgctgttgccagccaccgccgccggttcatctaccgtcgccggtgcatctgccaccttcggttcacctgccacctccggtgcatcttccaccgtcggttcacctgccgccgtcggtccatcttgccatcgacggtccat

SEQ ID NO: 298524 - DNA, 312 bp, Zea mays
cccccaccacgaccaaaaaaaatccggtcgccgatgccgtctgctgcctgacatcggtcagccagggtagatcgcgcaggcaggcaggcagccccacacacatacgaaacccaatcctgcttcgatcccgtcggccggcgatggagggccggcggccgggcgcgcccgtggcgggcctgcccatcggcttccgcttccgccccaccgacgaggagctgctgctgcactacctccgccgcaaggcgctggcctgcccgctccccgccggcgtcatcttcgacgccgacctcgcgcgcctgcacccgtgggacc

SEQ ID NO: 298525 - DNA, 298 bp, Zea mays
gaacagcatgaagatggtagtgttcgggtggtgtgcctggctctgtcagctgccagcgcctctgcaatgcacatgccctgcccctgcgcggggctgcacggcttgtacggcgctatcgcccgcctgacgacgatgatgggcgcccgcgggctgtacccctacgcggagtacctgaggcagccgcaatgcagcccgctggcggcggctccctactacgccgggtgtgggcagaccagcgccatgtaccagccgatcctgcaacagtgctgccagaaccagatgaggataatggacttgc

SEQ ID NO: 298526 - DNA, 385 bp, Zea mays
ccatgagggtgctgctcgtggggctggctctcctggctctcggtgcgagcgccacctgcacgcatacatgcggcggctgcgggtgtcagccaccgacggcggttcatgtaccgccggcggtgcatgtgccacctacggttcacctgccacctccggtgcatctccgaccgccggtccacctgccgtcgacggtccacctggcaccgacggtccatgtgccgccgtcggttgatctgccgcggccaccatgccactaccctactcaaccgtcccggccttagactcattgccaggcacactcatgcccgtgccgacagtcgcatccaagcccgtgccaactgcatggaacctgccgcgttggcagcaccgcgatccttggccaatg

SEQ ID NO: 298527 - DNA, 428 bp, Zea mays
  unsure (1)..(428): unsure at all n locations
ggccgaccacgcgtccgatgtancattcaaaacacaccaagcgtgcgcactatcaacaacctaacaacaatggctaccaggatattagccctccttgcgcttcttgcccttttagtgagcgcaacaaatgccttcattattccacagtgctcacttgctcctagtgccattattccacagttcctcccaccagttacttcaatgggcttcaaacattcagccgtgcaagcctacaagctacaactaacgcttgcggcgagcgtcttacaacaaccaattgcccaattgcaacaacaattcttggcacatctaaacctacaaaccatcgtaacgcaacaacaacaacagtttctgacatcactgaaccacctagccgtggcgaacccttgtctcctaattcaacagaatttacttgcatccaaaccact

SEQ ID NO: 298528 - DNA, 317 bp, Zea mays
gatggcatcgtcgggagtgtgcctggctctgtctgctgccagcgcctctgcaatgcatatgccctgcccctgcgcggggctgcagggcttgtacggcgctggcgccggcctgacgacaatgatgggcgccggcgggctgtacccctacgcagagtacctgaggcagccgcagtgcacacagctggcggcggcgccctactacgccgggtgtgggcagacgagcgccatgtaccagccgcttcggcaacagtgctgccagcagcagatgagtatgatggacgtgcagtccgcctcgcagcagctgcagatgatgatgc

SEQ ID NO: 298529 - DNA, 264 bp, Zea mays
gtgcttgggaacaacactttttttttttcatttaaattggtcattcaggggattggtgacactgacactgccacccatggggatgcgtgacacattattactcaatcatcgccgcttaaagacccaactagctagctagccagcggcttttctacaacaatgttgcccacttctcaggcagggggagccctacttcccgcaccaagcaattcttagcttggtaccccaacacattctgcaatagctaccagaaatgggccacct

SEQ ID NO: 298530 - DNA, 312 bp, Zea mays
tttgcccttcttgcgcgtggtgccctttttagagctcagaaatgcgtgcattatgccacaatgctcacttgctcctagtgccattataccacagttcctccgaccagttacttcaatgggctccgaacacctagctgcgcaagcctacaggctacaacaagcgcttgcggagagcgttttacaacaaccaattaaccaattggaacagcagtccttggcacatctaaccatacaatccatggcagcacaggagcaacaacagctcctaccatctctgagccaactacatgtggggaaccctggcgcctactt

SEQ ID NO: 298531 - DNA, 276 bp, Zea mays
tatggataccaactagcttcatacatagtgtagtattctttaaacaacttaacaccaatggcagcctttatttttgcccttctttccctccttgctctttcaacaagcgcttctacctctactgttatttcacaatgctttacaacaatacctttttttggcgacagccgcgagatttcaatacccaactatacaaccctacatgctacaagaggccatttcatcaagcattttaccgacattaacatttacccttcaacaaccatattccctatt

SEQ ID NO: 298532 - DNA, 345 bp, Zea mays
  unsure (1)..(345): unsure at all n locations
ggccggccgcacgcgtgcggagcgcanattaacccgatcgactttatgtttgtgttgcncgcagccctcgctcggctggcgctcgctgttagcgccacctccacccatacaatctgttgctgatgctgccagccaccgccaccggttcatctaccgtcgccggtgcatctgccacctacggttcacctgccacctccggtgcatatcccaccgccggtccacctgccgccgccggtccacctgccaccgtcggtccatgtgccatcgccggttcatctgccgtcgacaccatgccactaccctactcaaccgcccctgtcttagcctcattcccagccacaccca

SEQ ID NO: 298533 - DNA, 334 bp, Zea mays
tcaaaacattttaaattttgcaacccacgacctagggaatgggtccataatacagaaccccaaatcttcttgccctttttgtgagcgcaacaaatgcttcattatttattttgccgaccggccccaacttcatcattttatatttaatgggaacagatactccaaagggcttccaacacctatctgtgcaagccaacacgcaacaacaagcgcttgccgcgagcttcttacaacaaccaattgcccaattgcaacaacaatccttgccacatctaacaatacaagccatcacaacgcaacagcaacaacagttcctaccatcactgatccacct

SEQ ID NO: 298534 - DNA, 399 bp, Zea mays
gcgacgtcagcctatcatataacgcacattcttgtgccagcagtggcagcaaaaatattgtgcttgctcatgctccttggtctttgtgcacgtgtggctaccgcaaccattttcccacaatgctcacaagctcctatagcttcccttcttcccccatacctctcaccagcggtgtcttcaatgtgtgaaaacccaattgttcaaccctacaggatccaacaggcaatcgcaacaggcatcttaccattatcacccttgttcctccaacaaccgtcagccctattacagcagttacctttggtccatttggtggcacaaaacatcagggcacaacaactacaacaacttgtgctagcaaaccttgctgcatactctcagcaacatcagtttcttccattc

SEQ ID NO: 298535 - DNA, 266 bp, Zea mays
cccttgctatcctggagctcgttcggagacccgctcaaggacacctcgggaccttgcgttaacatactcaacaagttaatgtaccggcttcgttctatatgccgcctttgttctatctgccgccggagcagaagtcgcagccatggtaataccccactcaaccaccgcatctaaacccgtgccaccagttcggatcctgcggcgtctgtagcgattgcagcccgttcctgggccagagaaatgagttcctgaggcaccagtgcaaa

SEQ ID NO: 298536 - DNA, 457 bp, Zea mays
  unsure (1)..(457): unsure at all n locations
ggaannncccgggnccgacccaacgcgtnnccgggtcttcagaaccattanngctttatctatctccagtagcgcattatagaacccccgatcgatcaccatgagtgggtgttggctcgttggccctcgctttctcctggtgctctcgctgcgagccgccatcctccatcgcatacaatgcggctggctggcggtctgtccatccatccgccgctcggttcaatctatccgtccgtccgtgttcattctgccatcctctcgtgttcatcctgtccatcctctcgtgtgcattctctccaacccgccggtccaacctgtccgccgtccggtccaacctgccatccgccggtccaatgtgccgccgccggttcaatctgccgccgccaccatgccactaccctactcaaccgccccggcctcagcctcatccccagccacacccatgcccgtgccaaca

SEQ ID NO: 298537 - DNA, 325 bp, Zea mays
ctgtctctcattaccattagcattatctacttcatagcgcaaaagaaccccaagggcaccgggagggttttgctcgttgccctctctctcctggctcttactgcgagcgccatctcacacgcactcaaacgagtgttgctgttgccagacaccggcggcatttcatctaccaactacacgacactacacacctcatgatgacctgccacctaccatgcatctgccaccagcagtccacctgccaccaccattccacctatcaccacaggcacacgtaccgccgccggatcatctaacaacggcaccataccaactacataatcaa

SEQ ID NO: 298538 - DNA, 355 bp, Zea mays
ggccgacccacgcgtgcggatcagcaaatctgcagctcgtttataggactgtctaacagaacagcatgaagagggtcatcggtctcgtcgtgtgcctggctctgtcagctgccagcgcctctgcaatgcatatgccctgcccctgcgcggggctgcagggcttgtaccggcgctggcgccggcctgacgacgatgatgggcgccggcgggctgtacccctacgctgagtacctgaggcagccgcagtgcatcccgctggcggctgcgccctactactccgggtgtgggcagacgaacgccatgtaccatccgctccggcaacagttctgccagctgcagatgatgatgatggacg

SEQ ID NO: 298539 - DNA, 240 bp, Zea mays
gttccatcctgcaacgcgacaccatgagggagtgcatttcgatccacatcggccagtccggtatccatggtcggaaacgcttgctgggagctgtactgccatgagcatggcattcaggctgacggtcaaatgcccggtgacaagaccattgggggaggtgaagatgctttcaacaccatcttcagagagactggtgcttgtaaacacgtgccccgcgcttgttttgttgaccttgaaccc

SEQ ID NO: 298540 - DNA, 351 bp, Zea mays
  unsure (1)..(351): unsure at all n locations
ggccgacccacgcgtacagcctttattgacccaattagcattttcctatttacaacaacaacnagngctagcggaccttgttgccttctttgagcaacagcagtttcttccattcaaccaactagctgcattgaactctgcttcttatttgcaacaacaacaactaccattcagccagctatctgctgcctacccccagcaatttcttccattcaaccaactgacagcattgaactctcctgcttatttacagcaacaacaactactaccattcatccagctagctggtgtgagcccttctacctttttgacacaaccacagttgttgccgttctaccagcacgcttttcc

SEQ ID NO: 298541 - DNA, 332 bp, Zea mays
ggccgaccacgcgtgcgtccagacatcaaacctcattttaaaattgatcccacaacagaacaccaggaatatgggcgtctttctcttcgtgtgccttgccctcgcagctgtcaacagcctctgtattgctcatgccctacccccgcgcagagctaccgggctcgttctatactcccgccccgctctctacgacgacggaggcacaaccgctgtacccctacgcggagtacctgaggcagcccatatgcacacccgctggcgtgctgagccctactacgccggatgtgggcagactatctccatgtaccatcacgtccggcaccaatgctgcc

SEQ ID NO: 298542 - DNA, 154 bp, Zea mays
  unsure (1)..(154): unsure at all n locations
cgggccgacccacgcgttcgatccagatcaatnaaantgtnagtgcgtagagaggatcgtcgtcctgaacatgatgaaaatgggcatcgttctcgtcgggtgtgttatctatgtaagctgccagcgcctctgctatgcagatgccctgcccctg

SEQ ID NO: 298543 - DNA, 254 bp, Zea mays
cgtgcggagcctatcaattagctcatcgactccagattgttagaattctacaccatgaatgtgctgatcgttgccggggctctcctggcgctcgctgcgagcgccgactccagtacaagcggcggctgtggctgccagacaccaccgtttcatctaccgccttcgttctatatgccgcctccgttctatctgccgccgcagtatcagccgcaaccatggcaataccccacttaaccaccgtagcttagcccgtg

SEQ ID NO: 298544 - DNA, 206 bp, Zea mays
atcgttgccctagctctcctggcactcgctgcaagcgccgtctccagtacaagcggcagctgaggctgccatacaccaccgtttcatctaccgcctccgatctatatgccgcctccgatctatctgccaccacagcatcagccgcagccatggcaataccccactcaaccaccgtaactaagcccgtgccagcatttcagatcctg

SEQ ID NO: 298545 - DNA, 290 bp, Zea mays
  unsure (1)..(290): unsure at all n locations
cgggcgagggacgcacacaccgaccgacccacgaacttcgatccttttgacaatccaaagccnggcggggcttgtggtgatgctgatctcagcaaagaccctcactggaaagactatcacactcgatgtggaggcttctgacaccatggacatcgtcacggccaatatccaggactaggagggcatacctgcggaccagtacaggctcaaatatgctggcaagcagatcgaggacaggcgcacacttgccgactacaacatccagaaggagagcaccctacaccttgttc

SEQ ID NO: 298546 - DNA, 264 bp, Zea mays
  unsure (1)..(264): unsure at all n locations
ggccgacccacgcgttcggcaaatggcaccaagaaatccatttataggttttcttcaggggaanaaacggcggggncgtgtagcatttgccaccgccgcctcatcctctcaaccgacgtcctgctctccgtgctcgcggctgacagcgccagcgccaggacctcctgcatgccatagtggaccattctgcacaacccaatcccaagctgcctatggttctagaccagcctgacctgctgtatatggccattcctcccctgtcct

SEQ ID NO: 298547 - DNA, 237 bp, Zea mays
attacctctatcacccatgatctttcgacatttatcagccctactacaacagttacctttggtgcatttattggcacaaaacatcagggcacaacagctacaacaacttgtgctagcaaaccttgctgactactctcagtaacagcagtttcttccattcaaccaactaggttcatggaactctggttcgtattcgcaacaacaacaacttccatgcagccagctgcctgctgacta

SEQ ID NO: 298548 - DNA, 338 bp, Zea mays
cccggcctcatcctcatacacagttacacccttgctcgtgccaacagccgcatgcaagcccgtgccatgctgctgggaacctgcggcgttggcatcaccccgatcctgggccaacgcgtccagttcctgaggcatcaatgcagcccgacggctacaccctactgcttgcctcaaggccagtcgctgcggcagcagtgttgccagcagctcatagcaggtggagcctgagcaccggaaccagacgatcttcggcttggaccttcagtccatcctgcagcagcagccgcaaagcggccatgtcgcggggctggtggctgctcacatagcgcagcaactga

SEQ ID NO: 298549 - DNA, 416 bp, Zea mays
gagaccaacaagcagcatacaaagtggaatccagtagcaacaatagaccaacaatggagaccaagatattttccctccttatgctccttgctctttctacatgtgttgctaacgcgacaattttccctcaatgctcacaagctcctatagcttccctttttcccccataccttccatcaattatagctccagtatgtgaaaacccacctcttcaaccatataggcttcaacaagcaatcgcagcaagcaacatacctttatcgcccttgttgtgtcaacaatcgccagccctatctttggtgcactcattggtacaaaccatcacggcacaacaactgcagcaacttgtgctacctgtgatcaaccaagtagctctggcaaacctttttccctactatccgcaacaacaatttctt

SEQ ID NO: 298550 - DNA, 314 bp, Zea mays
gggtcttaaaacaattaccttaatttactccaaagcgcaaaaaaacccgatcgacaccatgagggtgttgctcgttgccctggttttcctggttttggttggaagcgcaacctcaacccatacaaccgggggttgcggttgcaacccaccgccgccggttaatttaccgccgccggtgcatttgccacctccggttaacctgcaacctccggtgcatttccaaccgccggtcaacttgccgccgccggtccacctgcaaccgccggtcaatgtgccgccgccggttaatttgccgccgccacaatgccattacc

SEQ ID NO: 298551 - DNA, 412 bp, Zea mays
  unsure (1)..(412): unsure at all n locations
gagaccaacaagctacttagaaagtggtaacagtagcaacaatagagcaacaatggctgccaagatattttccatccttatgctccttgctcttnctgcatgtgttgctaacgcgaccatttttcctcaatactcacaagctnntatagctgcccttcttcccccatacttngnatcaatgnntgtgataatattttatatataattattttaatcttacaggctacaacaatcattcacttcaaggaaaatannnttatcacccctgttctttcaacattcgccagccctatctttggtgcattcattgttacaaaccatcaaggcacaacaactgcagcaacttgtgctaccagtgatcagccaagtagctctggcaaacctttctccctactctcagcaacaacaattc

SEQ ID NO: 298552 - DNA, 393 bp, Zea mays
  unsure (1)..(393): unsure at all n locations
tctagatcgcgagcgggcgccctttttttttttntttttttttctttttttttttgcgccaaatgttccagtatcatatatgcatagacaggtacagtgtctagcagccacaaaggtggtcagcagcagggccaacaaatgaaaaaataaactacaacattgcaggatcatctgcgtcgacatattttattactgcagaattgatcccagcagcactaccggtagttacggtagacaggagtgtacatgcagctctgtgcatatttcaccaggtcccttgggggaggcagacgggtcgccaaaccgagttcataagcttttgcagccacggctgcggcaatgcgcgcaaagatctttctaatgttggtgaagggcgggaagattgatcccttg

SEQ ID NO: 298553 - DNA, 439 bp, Zea mays
  unsure (1)..(439): unsure at all n locations
cagcctagcaattagctcatcgactccagtattggagaactcgacaccatgaaggtgctgatcgttgcccttgctctcctggcgctcgctgcgagcgccgtctncagtacaagcggcggctgtggctgccagacaccaccgtttcatctaccgcctccgttctatatgccgcctncgttctatnnnnncnnnnntnnatnnnttttntnnntttcaataccccactcaaccaccgnanctaagcccgtgccagcagttcggatcctgcggcgtcggcagcgtcggcagcccgttcctgggccagtgcgtcgagttcctgaggcaccagtgcagcccggcggcgacgccctacggctcgccacagtgccaggcgctgcaacagcagtgctgccaccagatcaggcaagtggagccgctgcaccggtaccaggcgacatac

SEQ ID NO: 298554 - DNA, 321 bp, Zea mays
  unsure (1)..(321): unsure at all n locations
ctactccagagcgcagaaggaacgcggtcgacagcaagagggcgatggtcgttgacctctttctgctggctctcactgcgagcgccacctccacgcatacaatcggcggttgctagttgtcagccagcgctttcgactcatgtaacttcgtcggtgcatctggcagctccggtccacctgagannnttngtgcatcttgacacgactgataagctggtagccgcggtcacagctgcatcggcagtccatgtcccggtnacggttcatcatgacgacgaaggatgtcactatgctaatgaaccgatcactgcacatactcat

SEQ ID NO: 298555 - DNA, 418 bp, Zea mays
  unsure (1)..(418): unsure at all n locations
cagaccattagctttatctactccagagcgcataagaacccgatcgacaccatgagggtgtcgctcgttgccctcgctctcctggctctcgctgcgagcgccacctgcacgcatacaagcggcggctgcggctgccagccaccgtcgccggttcatctaccgccgcctgtgcatctgccacctncggttcacctgccaccttcggtgcatctcccaccgccggtccacctgacgacgccagtccatctgccaccgccggtccatgtgccgccgtcggttcatctgccgtcgacaccatnnnnctaccctactcaaccgccccggccgtaagcttatacgcagccacacccatgcacgtgccaacagtctgattcaaacccgtgccacctgcaaggaacctggcgcgttagcagcaccc

SEQ ID NO: 298556 - DNA, 431 bp, Zea mays
  unsure (1)..(431): unsure at all n locations
acagaccgagctgccgcccgctgctctctccacccctcctctcctcgcggagcaggcaggcagggattccccgtccgcggggggaggtggcattcgccgctagggcaggacggggaaggctggcgtccggcatggcgaccgaggaggtactccataaggtccagagtctnnnnnngngctgccttnatatgtacatggaccanaaagaagtggtcgatgccctctcccaccactcgaagatagagccctgcattactgaacttgtttggcgacaacttgagcatcaaaatcctctgtttttcaaggcgtattatatgaggctaatgcttaagactcaaataatggtcttcaacaagcttcttcaggatcagtttgaggttatcaataaagaattttcttcagggatcccttctatgtcgcttcctaatggc

SEQ ID NO: 298557 - DNA, 309 bp, Zea mays
  unsure (1)..(309): unsure at all n locations
gacgtgatctatatatagtgaaaatcggtttacgcgcccttactaggcctatgcctgagaggctaccacatatttacagaactctggaagagaacttcactgatagagtcccgcctttaataatacatgaaacactgaatgatgctgctgctcaatttaatgctagctagannnnnnnaccnanagacactgtcagttggtananntgggacatactgactgagagggcttgactctcaaacattagatgctgatgacatgtacatcacaagacctgagctgtgggaaggagtctacatcatgccattg

SEQ ID NO: 298558 - DNA, 389 bp, Zea mays
  unsure (1)..(389): unsure at all n locations
cacaaacacaccaagcgaatcgcactatcttttacctaacaacaagggttaccaagatatgtagcacctgcttgcgcttgtagcccttntagngagcgcaacagatgcgtccattattccacaatgctcactagctactagtgccattattncacagttcctgccaccagtttnnnntnagtgattanatttnntatcttatcaagnnnnnttgcaacaacaagcgcttgcggagagcgtcttacatcaaccaattgcccaactgcaacaacaatcctagncacatntgaaattacaagccatcacaacgaaacagtaacgacagtttctaccaacactgatgcacctagccatggtgaaccctgtcagctacttgcaagaacagctgc

SEQ ID NO: 298559 - DNA, 433 bp, Zea mays
  unsure (1)..(433): unsure at all n locations
gatcgatcgccacagccaacaccacccttcgaggcgacgcgacagccgccaggaggaaggaataaactcactgccagccagtgaagggggagaagtgtactgctccgtcgaccagtgcgcgcaccgcccggcagggctgctcatctngtcgacgaccagtggattaatnnnnnngttcntttttttcttttgctccttatattgcttttggagcaagaccggcggcctcggcgacgtcctctgcggtctgnctcctgccatggccgcgaacgggcaccgtgtcatggtcgtctctccccgctacgaccagtacaaggacgcctgggacaccagcgtcgtgtccgagatcaagatgggagacgggtacgagacggtcaggttcttccactgctacaagcgcggagtggaccgcgtgttcgttgaccacccactg

SEQ ID NO: 298560 - DNA, 355 bp, Zea mays
caagcgacatttaaagagcactacaggcgcttcactctagcaacaatggcggacaagagggggcccatacttatgctccttgctctctctgcatgcgttgctaacgcgaccatttttcctcaatactcacaagctgctatagctgtcctatttcccccataccttacatcaatgaaccgtttaactatgtgattattcattccttcaaccctacaggctccaacacgcaatcgcaacaagcaacttacctttatcacccctgttctttcaacaatcgccagccctatctttggtgcagtcattggtacagacctatcaggcacaccagctgcagcaactcgtgctaccagtgatc

SEQ ID NO: 298561 - DNA, 336 bp, Zea mays
acgccgcagcgtacaaagaggaatacagtcagtccgatagagcaacaatggagggcaagatagtgtacatgcttatgctgcttgctcattctggaagagtggctcacgcgactcattgctcgtcaatactaacaagctcgtatagacgtcctgcttgcccgataccttccatcaatgacagctgcagtatgtgaaaagccagtccttcaacagtacaagctgcaacatgcaatcgcaccaagcatcttacgttgatcaccacatgactttcaacaatcgtcgcgcctatctttggtgctgtcatgtgtacaaaccatcacggcacaacagctggag

SEQ ID NO: 298562 - DNA, 309 bp, Zea mays
ctacaatcacaaacacacctatttaagcgtttttgcaacaacctaacaacagggggtaggaagatattaaccctccttgcgcatcttgcccttttagtgagcgcaacaaacgcggacattagttgataccacacactagctcctaatgccattattccacattatctaccaccagttacttaaatggactttgaacattcagccgtgcaagcctactagctacaactatcgcttgccgagagcgtcttacaacaaccaattgctcatttgcatcaacaattcttggcacatataaacctacaaaccatc

SEQ ID NO: 298563 - DNA, 377 bp, Zea mays
  unsure (1)..(377): unsure at all n locations
agaccattagctttatctactccagagcgcagaagaacccgatcgacaccatgagggtgtggctcgttgccctcgctctcctggctctcgctgcgagcgccacctccacgcatacaagcggcggctgcggctgccagccaccgccaccggttcatctaccgccgccggtgcatctgccacctccggttcatctgccagctncggtgcatctaccaccgccagtacacctgccgccaccagtccacctgccaccgccagtacatgtgccgcctgacgttcatctgccgccgccaccatgccactaccctactcaaccgacccggcctcagcctcatccccagccacacccatgcgcgtgccaacagccgcatccaaac

SEQ ID NO: 298564 - DNA, 300 bp, Zea mays
agacaacaacatttgttgccattttacccacaggttgtgggaaacattaatgccttcttgcaacagcaacaattgctaccattctacccacagaatgtggcaaacattgttgccttcttacaacaacaacaattgttgccatttagccaacatgctttgacgaatcctaccaccttattgcaaccgcccaccattggtggtgccatcttctagattttttatgatttatactgtaataataaagttctcatgctgatatgtgcgacctctcagtaataaagtattagagatctatatttt

SEQ ID NO: 298565 - DNA, 391 bp, Zea mays
ggaagtttcagtcgaatgactgcgaaggttcttcaatcccaaataggcagaaatgtattaacttatgttgatgacatcattgtcaaaagcacgaagcaggagaatcatattgctgatctgcaggagaccttcgccagtttcaggcaagctggcttaaagttaaatccagaaaaatgtgtcttcggagtgaagaaggggaaatttcttggatgcttggtttcaacaaaggggattgaagctaatccaagtaaaattgaagctatacttcggatggagccaccaactacgaagaagggagctcaaagattgacaggaagattggcatctctcaatagattcatatccagatcagcagagagaaatttaccattcttcgaagtgctgaagtcag

SEQ ID NO: 298566 - DNA, 364 bp, Zea mays
  unsure (1)..(364): unsure at all n locations
ggcaccaactactgcgatgacctgtgctcgtcaaccacggtgtctagtccgaggaacactagatgcctccattcaaccaagtggctggattggactcaaatcttgatgtgcagcgaccacaactaccaataatccacgtacctgatgactaccctcaaaaattacttgcgaccaaccaacagtggatagtgaattctactgcttatctacagaagcaactactactacgatacaaaccactggctggggtgagcccagctacctttttgatgcaaccacagatggcgacattataccaccacgatgttcataacgctgtcacccgntcacatatgccacatgagctgtcattcaaccaaattga

SEQ ID NO: 298567 - DNA, 310 bp, Zea mays
accatcatcatcgagaaacaaattaagccttttacatgacctacaacctaccagcaatgggtgccaatacattatgcgtccttgcccttattgcgcttcttgcgagagcaacaaaagcattcattattgaacaatgctcactagctacacgttctaccattacacaggtgccaccactagtaacttcaacgggttgagaacaaccacctgttcatgattataggctacaacatgcaatacgagcgagcgtgttacaataactaatttcgcaactgcatcaacaactgcttgtagaactaaaattacaaac

SEQ ID NO: 298568 - DNA, 261 bp, Zea mays
agcgcgacgcgtagggtggatgcttactgagagaatgcaatttcaagcatgctgtgattggagtggggtcgcgtgtcaccctctggatgtgaacctcaagactccgcgatgatggtagcggacacctattgaactgcagaagaagcttgcaagctactgttagctgggatggtaccagttgtgataggaaggagcacaaagataaagaacttggtcactgacatgaaagctaggagatggaagaacgtggtgatcacaaac

SEQ ID NO: 298569 - DNA, 343 bp, Zea mays
attgataccaacaagcaacatatatagcgttatccagtcccatcaatacagcaacagtggagaccaagatattttccctccttatgctccgttgtatgcgtacatttcatgcatacacgacaatgttgcatctgtgatcacacgctcctatagcttccatttttccccgataccttgcatcaactatagcatcaggatgtgaaaacccatctcttacaaccatataagcttcaacaagcaatcgcaccaagcaacatacctttattgcccttggtgggtcatcaatcgccagcactatctttggtgcattctttaggacataccactagggctcatcagctgc

SEQ ID NO: 298570 - DNA, 383 bp, Zea mays
actatgagcatcgagaaacaaatcaagccagggacatgacctacaacctaacagcaatggctgccaatatattatacgtcgttgcgcttattgggcttcgtgcgagagcaagaaaagcattcattattgaacaatgctcactagctacaagttctattattacacatgggctacgactagtaacttcaatgggtgtagaacaacctgctgctcatgattataggctacaacatgcaatagcagcgagcgtgttacgataactatgacggcaactggctgatgaactgttgggagatctaaaaatacagagcattggagctgaacaacatcaacaattactaccaggactgagacacctagtgaaagggaaccctgtcttctac

SEQ ID NO: 298571 - DNA, 348 bp, Zea mays
caacaagcaacatatatagtggaatccagtttcaacaatagagcaacaatggcgaccaagatattgttcctccttatgctccttgctctttttgcatgtgttgctaacgccacaatatcccctcaatgctcacaagctcctatagcttccgttcatctaccataccttgcatcaatgacagcttcagtttagcaaaacccacctgttcatatctatacgctggaacaagtgactccagcagtgcacataccatcatcacccatgttgcacaatcgccaatcctatctttgcagcagtcattgtaccatactcatacggcacagcttatgctgatactcatgctaactg

SEQ ID NO: 298572 - DNA, 294 bp, Zea mays
tcggttggcaccaccccgatcctggttcagcttttcgagcccctgaggcatcagggcggcctgtcgaccactccctactgctcgcctcactcccagactacgcgaccatagtgtttccagcatctcaggcatgtatagccgcagcacctgcaccatacgattttctgcttggtccttcagtccatcctgaagcagtattctcaaatctgtcatttcaagaatgctgatggcaccgcatatagcccattaactgacgtctatgttccacctgcatcagacgaccttattctccta

SEQ ID NO: 298573 - DNA, 232 bp, Zea mays
cagaccattagctctatgtactccagagcgcagaagaacccgatcgacaccatgagggtgacgctcgttgaccatattctcctggatatcgctgagagcgccacctacactcatacaataggcgggtgctgctgccaccaccgacagaactttatataccactgactgtgcattggccacatccagttaacctgccagcatccatacatttctcaacgactgaacacctgcc

SEQ ID NO: 298574 - DNA, 230 bp, Zea mays
gttctagatcgccgagcggccgccctttttttttttttttttttttcaaacggggaacaagacttttttctttgactttcaattgtacattcaggtcagtgctcacactgacactgccagccatggagatgcgtgacacattactactgaatcatggccgctaaatgacttaacgagctagctagctagcgggtatactacagcacatacgttctttacaggaggacacc

SEQ ID NO: 298575 - DNA, 362 bp, Zea mays
cgcgttcttcagaccattagctgtatctactccagagctcagaagaacccgatcgacaccatgagggtgttgctcgttgccctcgctctcctggctctcgctgcgagcgccacctccacgcatacaagcggcggctgagggtgccaaccaccgccgcctgttcatctaccaccgccggagcatctgccaccttctgtttatctgtcacctccggagcatctcccaccaccggtccacctgccgtcgccggtccacctgccaccgccggtacatgtgccaccgacggttcatctgccgccgccaccatgccactaccctactcaaccgccccggcctcagcctcatccccagccacacccatg

SEQ ID NO: 298576 - DNA, 387 bp, Zea mays
cttcaagaggggatcatcagattgggcttattattccttactactgcatgcagaggccggtgtttgtgtaaaccctgagcggcaagactatcaccctcgaggtggagtcgtctgacaccattgacaacgttaaggccaagatccaggacaaggagggcatccccccagaccagcagcggctcatcttcactggcaaacagcttgaggacggtcgcacgcttgctgactacaacatccagaaggagagcaccctccaccttgtgctccgtctcaggggaggcatgcacatctttgtgaaaaccctgaccggcaagactatcaccctcgaggtggagtcctctgacaccattgacaacgtcaaggccaatatccatgacaaggagggca

SEQ ID NO: 298577 - DNA, 408 bp, Zea mays
  unsure (1)..(408): unsure at all n locations
ccggnccgggacgacccaggcgtaccgcacgcgtccggactaaccatcttgatagatcgctcagggatgcaccaacgcagccaaccaagcgagcttgcctccttacgctccgcggcctgtctgcaagtgctgctgcggcgaccattctcccgtaatgctcgcaagctcatatagctttacttcttccctcgtacctatcaccagcggattctatggttgtgtgacaacatgcttctaccaccctacatgacccaacgagcaatcgcatggagcttcttaccttgaccacccttgctccctcaatgatcatcacgactaccacaacagtgatgtttgcatcatttattggcacaaaacatcagggcacaacaactacaacgacttgtgctagcaaaccttgctgtctac

SEQ ID NO: 298578 - DNA, 330 bp, Zea mays
  unsure (1)..(330): unsure at all n locations
attttgagcattcagaaacacaccaagcgattcgcactatcaacgacctaacaacaatggggaccaagatattagcccttcttgcgcttcttgccctttttgtgagcgcttcttatgcgtccattattccacaatgctcacttgctcctagtgccattattccacagatcctcccaccagttacttcaatgttttttttactcctagctgngcaagccaacatgcaacaacaagcgcttgctgcgagcgtcttacaacaaccaattgcccaattgcaacaacaattcttgccacatctaacaatacaagccatcacaacgcaacagcaac

SEQ ID NO: 298579 - DNA, 191 bp, Zea mays
ggagcgcacacacacacaggcagatctacctcgaacttattattccttactactgcattcaaagatcggtgttgctctaaaccgactgaaccatgactgtgacaatggcagtgacgacgattgtgaccatgagcaaggagagctgctcgttattgcacgtgcaggccgtggcattccattagaagccacta

SEQ ID NO: 298580 - DNA, 399 bp, Zea mays
  unsure (1)..(399): unsure at all n locations
ggccgaccacgcgtgcgagaccaactagcaacatanaaagcacaattttgtaccttcaatggcagccaaaatataagacctccttaggctactcggtctgtccgcaagtgctgctacggtacaccaaccatcctaaaagctcgcaagcaaccatatatatccttctttcttcgtacctatcaccaacgaagtcttccgtatgtgaaaacccaattcttcaaccctacatgatccaacaggcaatcacagctagcatcttacctttatcacccttgctcctccaacaatcatcagccctattacatcaagtaccttttgtgcatgtattggcacaaaacatcatggcacaacaactacaacaacttgtgctagcaaaccatgctgcctactattatcaac

SEQ ID NO: 298581 - DNA, 354 bp, Zea mays
ggagaccaacaagcggcatacacagcgttatgcacttgcaccaataaagcaccaatggggaccaagagatttacactctttacgctgcttgctatctgtgcatgtgttgctaacgcgacaataatcactgaatgctcacaagctgctatagctgcccttcttcccccataaattccatcaatgatagcttgaatgtgtgaaaacccagctctttaaccctataggctccaacaagcaatcagcacaagcaacataccattatcatccttgcttcaacaatcgccagccctatctatgctgcaaccattggtacaaaccatcagggcacactaggtgcagaaagtcgtgctatct

SEQ ID NO: 298582 - DNA, 248 bp, Zea mays
acaaactcctagggcttatgtatataccccataccatctcaccagctcagtcttcaatatttaaaaacccaattattcaaccctacaggatccaacatgcaatcacaacatgcatctcaccattatcacccttgttactccaacaaccgtgagccctattacagcaattaccttttatacatttagtttcacccatcatcagggcgcaacaactaccacaacttgttctaacaaacctagctgtatac

SEQ ID NO: 298583 - DNA, 365 bp, Zea mays
acccacgcgtgcgtatgtgtcagcattcagaaacacaccaagttaagcgcattatcaacaacctaacaacaatggctaccaagagatttgccctccttgctctttttgcccttttagtgagcgcaacacatgcgttcattattccacagtgctcacttgctactagtgccattattccacagtttctcccaccaattacttctacggtctttcaacatccagccgtgcaagcctacacgctacaactagcgcttgcagcgagcgtcttacaacaaccaattgcccaatagcctcaacaatccttggcacatctaaacctacaaaccatcgcaacgcaacagtaacaacagattctgccatcactg

SEQ ID NO: 298584 - DNA, 368 bp, Zea mays
ctagttatagatcgccagcagccgaccttttctatctttcacctaccaccaatgtcttgcgaaaatggacccttttttgcgcttctaagcctcctacttcacgcaacaaactccattattgttccatagctcatattcgctcctaacgacggcaccacctattaccggctgccagttacacctttgagcttctaacacaccaacctgctagcatccaacctacaactaccgctggcagagagcgtctttcatcagcgcatctcccactttcaacagcaacaattgattcatctcaacctacgcaccatttctcccaaacaataactgcataatctgtcataactgttgctcctacacatcatgcaccc

SEQ ID NO: 298585 - DNA, 396 bp, Zea mays
tctgcagaccattagctttatctactcctgagcgcagtagaacccgatcgacaccatgagggtgttgcgcgttgccctcgctctcctggctctcgctgcgagcgccacctccacgcatacaagcggcggctgcggctgccaaccaccgcccgcggttcatttaccggcggcggtgcatctgccaacctccggttacccggccacctccgtggcatttcccaccgccggtcaacttgcggccgccggtccacctgccaccgccggtccatgtgccgccgccggttaatctgccgccgccaccatgccactaccttactaaaccgccccggcctaagcctcatccccagccacacccatgcccgtgccaacagccgcatccaagcccgtgccagctgc

SEQ ID NO: 298586 - DNA, 304 bp, Zea mays
  unsure (1)..(304): unsure at all n locations
gcggaaccacgcgtgcgantgggancattcagaaacacaccaaattaaacactttttcaacgacctaacaacaatggctacttgcatattatccctacttacacttctatacctttttaagagcacaacaaattccttcattattacacaaagctcactttctcctacttccattattccacacttacaaacaccaattaattacaatagcttcaaacacctatctttgcaacccaacatgcaacaacaaacaatttccccgagctttttacatcaaccaaatgccaaattacaaccacaatcc

SEQ ID NO: 298587 - DNA, 277 bp, Zea mays
aaattttaaacctccctctactaactcttattaagaacgcaacctacacgcacattatcacacaatgcttaattttatccatactcctcattattcaacaactttctatcaaccaaatactctaattgaccttcaaacacctaattttgcaaaccaacatgcaacaacaaacccttgctccgaacttcatacaacaaccaatttccaaatttcaacaacaattcatgccacatctaaaaatacaaaccatcataactcaacagcaacaacatatcct

SEQ ID NO: 298588 - DNA, 323 bp, Zea mays
cccacccgacccacgcgtacccagaccattaccactaatattacacattcacaacaacccaaccgccacggggagggggatgttattcgccctcgctctcctggctctcgctgcgagcgccacctacacgcatacaaacgcacaatgctgatgtcatccatagtcgacgattcatctaccgccgccaccacatatgtcaactgcgcttcaaacaccaacttcggcgcatctataacctacaacacacctgtccgcgtagcgccatataacaacgaatttccatatgccgacaacgattcatgtcacatcgaaaacatgacact

SEQ ID NO: 298589 - DNA, 376 bp, Zea mays
attgataccaactagcaacatagatagcacaatattgtaccaataatggcagccaaggaggtttgtctcattatgctccctggtctttctgcaagtgctgctacggcgagcattttcccgcaatgctcacaagctcctatagcttcccttcttcccccatacctttcaccagcgatgtcttcagtatgtgaaaatccaattcttctaccctacaggatccaacaggcaatcgcagcatgcatcttacctttatcaaccttgttccttcaacaataatcaaccctattacagcaattacctttggtgcatttattggcacaaatcatcaaggcacaacaactacaacaacttcgtgctaccaaaccttgctttctac

SEQ ID NO: 298590 - DNA, 361 bp, Zea mays
gcaacatagaaagcacaatggtgtaccaactatggccgacaaaatattaagcctgcttacgctccatggtctttctgctagttctgctaccgcgaccattttccagaaatgctcgcaagctcctatagcttatatttttcccccgtacctctcaccagtgatgtgctgggtatgcgaaaacccaattcttcatccctacaggatacaacaggcaataacagctggcatcttacatttatcacccttgttcctggaacattcatcaatcctattacatattacacctttggcgcatgtatcgtcacaaaacacaaaggctcaacaactacaaccacctgcgctagcgaaccttgctgcctac

SEQ ID NO: 298591 - DNA, 364 bp, Zea mays
tgcttatttgcaacaacaactaccattcagtcagctagctgctgcctacccccagcaatttgttacattcaaccaactggcagcattgaactctgctgcttatttacaacagcaacagctaccaccattcagacagctagctgatgtgagtcctgttgccttcttgacacaacaacagttgttgccgttctacctgcacgctgcgcctaacgctggcaccctcttacaactgcaacaattgctggcattcaaccaacttgctttgacaaacccaacagcgctctaccaacaaccgattattggtggtgccctcttttagattgcttatgagctatagctcaataatgaagctttttggatgatg

SEQ ID NO: 298592 - DNA, 438 bp, Zea mays
ccaactagcaacatagaaagcacaatagtgtaccaacaatggctaccaagatattagccctccttgcgctcctttccctttcagtgagcgcaacaactgcattcattattccacaatgctcacttgctcctaatgccattattccacagttcctcccatcagttacatcaaaggggcatcgaacaccctattgtgcaagcctataggctacaacaagcgcttgcggcgagcgtcttacaacaaccgtttgcccaattacaacaacaatccttggcacatctaaccatacaaaccatcgcaacacaactagagcaacagtttgtgcccgcattgagccaactagccgcagtgaaccctgtctcctacttgcaacagcaactgcttgcatccaacccacttgctctggcgaacacagccgcataccagcaacaactacag

SEQ ID NO: 298593 - DNA, 242 bp, Zea mays
tcttatgctacttgctcttactgcatgtgtttctaacgcgtcaattattcctcatatgctcacaagctcctatagcttcctttttttcttcattacctttcatcaatgaaagttttaacttgagaaaacccatatctataatcttataagcttccaacaagctatctctttaagcaatatatcttatattaccctagtttcaacaatttccagctcttatatttgtctctattattgataca

SEQ ID NO: 298594 - DNA, 451 bp, Zea mays
ggaattccggccgacccagcgttcgcaacaagcaacatataaagtggaatacagtagcaacaattgagcaacaatggcggggaagatattttccatccttatgctccttgctctttctgcatgtgttgctaacgcgaccatttttcctcaatactcacaagctcctatagctgcccttcttcccccataccttccatcaatgaccgcttcagtatgtgaaaacccagcccttcaaccctacaggctccaacaagcaatcgctacaagcaacttacctttatcacccctgttctttcaacaatcgccagccctatctttggtgcaatcattggtacaaaccatcagggcacaacagctgcagcaactcgtgctaccagtgatcagccaagtagctctggcaaacctttctccctactctcagcaacaacaatttcttccattcaaacaactg

SEQ ID NO: 298595 - DNA, 373 bp, Zea mays
cccactcgtacagttttcaactattcattaaacacactcattctaatcgcactatcaacaacctaacaacaggggggttcctaaatattagccctccttgcgcttcttgcccttttagttagcgcaacaaatgcgttcattattccaaagtgctcatcttttcctattgccattattccacattttctcccaccagttacttcaatggtctacaaacattcatcacttcaagcctacaggctacaactaacgcttgccgtaagcgtcttacaacacccaatttcccaatttcaacaacaatccttgtcacatttaaaactacaaaccatttcaacccaacatcaacaaacatttttgccattacttaaccacc

SEQ ID NO: 298596 - DNA, 386 bp, Zea mays
  unsure (1)..(386): unsure at all n locations
attagctatatctactccacagcgcagaagaacccgaccgacaccctcagggtgtcgatcgttgccctcgctcttctggctatcgctgcgagcgccacctgcacgcatacaagcggggggtgacggtgacaaccaccgccgtcggttcatctaccgccgtcggtgcatttgccacctccggatcacctgccacctccagtgcatctcccaccgacggtccatctgacgacggcggtccacctgatcaccgaacggtacatgtgcctgcagncggttcatctagcgccgccaccatgccactaacctacataaccgccgctgccttagcctgatccctagccacacccatgcccgtgccaacagccgcattcaatcccgcgccagct

SEQ ID NO: 298597 - DNA, 350 bp, Zea mays
atttagaccaactagcaacatataaagcacaattgtgttccaactatggcagccaacatgttgtgcctgcttatgctccttggtatttatgcaagtgctgctaccgataccattttcccgcactgctcacaagctcctatagcttaccttcttacaacatacctgtcaccagccgtgtattccgtgtgcgaaaacacaattcttcatccctacaggatccaacaggcaatcgctgctggcatcttacctttatgacccttgtttcttcaacaatcatcagccctattacattcattacctttggtgcattcatcggcacaaaacatcttggctcaacaactacaacaact

SEQ ID NO: 298598 - DNA, 314 bp, Zea mays
  unsure (1)..(314): unsure at all n locations
attgagaccattagctatatctactccagagcgcagaagaacccgatcgacaccatgagggtgttgctcgttgccctcgctctcctggctctggatgcgagcgccatctgcacacatacaagcggacggtgcggctggcagccaccgtcgtcggttcatctaccgacgacggtgcatgtgccacctgcggatcacctgccacctccgatgcatctcccaccggcggtccacctgccgtcgccggtccacctgccaccgccggtccatgtgccggcggcggttcatctgccgccgncaccatgccactaccctac

SEQ ID NO: 298599 - DNA, 189 bp, Zea mays
gcactattgtgcccccactgtcgcccaaaatattttgctgcggggggctccttgggctctctgcaagagctcttaccccgaccacattcccacacagcgcacaagctcctatatctttctttttttccccatacctctcacaacaggtgtgtttagtatgtgaaaacacaattttttaaccctacatga

SEQ ID NO: 298600 - DNA, 189 bp, Zea mays
attttgagcattcataaacacaccaagcgaagcgtggtccagtgcgtctagcatctaaggcagcgaagaaattatacgtccttgcgcttcttgcgcttttagcgagcgcaacaaatgcgtccatgttgccagcagctcatgcaggtggagccgcaacatcggtaccaggccgatctttcgggtttggtt

SEQ ID NO: 298601 - DNA, 362 bp, Zea mays
cgtccgtttcagctttcataaacacaccaagcgaagcgcactagcaacaacctaacagcaatggctacggggagattatccctgcttgcgcttttcgccctactagtgagcgcaacaaatgcgtccattattccacagcgctcactcactcgtagtacgataagtgaacaggcccttcgaccaggaacttcaatgggcttctaacatgcatccgtgcaagcctacacgctacaactagcgcttgcagctagcgtcttacaacaaccaattgcccacttgtaacatcaatccttggcacatctaatcctacaatccatcgcaacgcaacagcaataacagtttctgacatcaatgagccacct

SEQ ID NO: 298602 - DNA, 388 bp, Zea mays
ttcatttgcgtacacggcctccctcttcctgtcacttttacagcgagattgcggcagtgagtgggagacaaggtgaaatggttgaagggagcgcacgtatccatgcggcgccggcggccggcataggtggacgataacatgtcggcttggctggttgtcaagaacaccctcaagatcatgcctcttcaagctcccgtccgtacgcccttatgatgtccgctttcgcatgaaggcagcggtgatttgcagcatctatctgcactacctaagggagatgcgcctcccgcacttggtgcatatagaaccgatggcgatcgggcacgactgcgccggcgttgtctacgaggtctgcgccagctagacacacctgtccgtgggcgatcctttg

SEQ ID NO: 298603 - DNA, 396 bp, Zea mays
gtatccacctgattgattgctgattgctgaactcgacacccggagggcaatgactagcgaactcgctctcctgcatgtccgatgaagagtactcttccaagcaggcggacgatgacccttccacacagcagcggtgcatggagcgcttttgtgctatgtggcgtgtctggtctatcggtggcggcaccacgaggcacaacacatggtgataccccactcaaccagacgcagctaagcgaagcgccagcgcgcaggaatactgcggcgcggagctttaacgccgcacaggtcatgcgccactgcgtcgagaacctgaagcaccactgcagcccggttgggacgcgatactgctcgccacagagccaggcgctgcagcagcagtcctatcaccagatc

SEQ ID NO: 298604 - DNA, 425 bp, Zea mays
gggtcttcagaccataagctctatctacgtcagagcgcacaagaacccgatcgacaccatgagggtgttgctcgtggccctcgctctcctggctctcgctgcgagcgccacctccacacatacaagcggggggtgtggctgtcagccaccgccgccggatcatataccgccgccggtgcatatgccacctccggttcacctgccacctccggtgcatatcccaccgccggtgcacatgtcgccgccggtccacctgtcaccgccggtacatgtgccgccgccggttcatatgtcgccgccaccatgcgactacactactcaaccgccccggcctcagactcatatccagacacacacatgtgcgtgccaacagacgcatacaagcccgtgccaactgcagagaacctgcggcgttggcagcaccc

SEQ ID NO: 298605 - DNA, 365 bp, Zea mays
cgcaggaagaaaggattaacttaattgccggcaatgaaaggggaaaagtgtacttgttcgttgaacaatgcgcgcaccggccgggaaggctgtttatattgtggacaaccagtggattaatcggcatgtggggtctgtgcacatgtcagatcttgtcaacgcccgccgggctgtgcgtgtcggacgcgtgtacatttcgccgcggcgccgcgcacgggctgtggggggcccgggcgtctgcggcggcggacacactcagcatgcggaccagcgcgcgcgcggcgcccaggcaccagcagcaggcgcgccgcgggggcaggttcccgtcgctcgtcgtgtgcgccagcgccggcatgaacgtcgtc

SEQ ID NO: 298606 - DNA, 448 bp, Zea mays
ccgggccgagccgacgcgtccggctttatctactccagagcgcacaagaactttatcgacaccatgagggtgttgctcgtgtggctcgctctcctggctctcgctgcgagcgccacctccacgcatacaagcggcggctgctgctgccagccaccgccgccggttcatctaccgccgtcggtgcatctgccacctccggttcacctgccacctccggtgcatctcccaccgccggtccacctgccgccgccggtccacctgccaccgacggtccatgtgccgccgccggttcatctgccgccgccaccatgccactaccctactcaaccgccccggcctcagcctcatccccagccacacccatgcccgtgccaacagccgcatacaagcccgtgccaactgctaggaacctgctgcgtttgcagcacccccatccttggccagtgcg

SEQ ID NO: 298607 - DNA, 431 bp, Zea mays
  unsure (1)..(431): unsure at all n locations
ctgggtcttcagaccattagctttatctactccagagcgcagaagaacccgatcgacaccgggagggtgttgctcgttgccctcgctctcctggctctcgctgcgagcgccacctccacgcatacaagcggaggctgctgttgccatccaccgatcactgcacatctaccgccaccagtgcatttgacagcttcggaacacctaccagctccagcgcatatgctaccaccagtccatctggcgacgccggtacaactaccaactgcccaacatgaaccaccatccgttgatcatctaacaataccataccactacactacttaaccgncccggcctcagcctcattcccagccacacccatgcccgtgccaacagccgcattcaagcccgagccagctgcaaggaacctgccgcgttggcagcaccccgat

SEQ ID NO: 298608 - DNA, 423 bp, Zea mays
  unsure (1)..(423): unsure at all n locations
cggnccgaattaccggggcgacggcgcgtccggcgagcgccacctncacgcatacaagcggccgatgagggtgccagccaccgtcgccggttcagatgccgccggcggtgcatgtgccacctgctgctcacctgccatctccagagcgtttaccagcgtcggtagacttgccttcttccgtcgaccttttaacaacgggngcattgggcatgtgaaaacccaattcttcaaccctacaggattcaacatggtaatcgagctggcatcttacctttatcacccttgttccttcaacaatcatcaagcctattacagcagttaccctttgtgcatttactggcgcaaaacatcagggcacaacaactaccacaacttgtgcttgcaaacctttgtggctactctcaggaacagcagtttttttca

SEQ ID NO: 298609 - DNA, 428 bp, Zea mays
  unsure (1)..(428): unsure at all n locations
nccacgccgtccggtgagccctgctaccttcttcaattcaaccaacgacaactttgaacggtcgtgcttatttacagcagcaacaactactaccattcagccagctagctggtgtgagccctgctaccttcttgacacaaccacaattgttgccgttctaccagcacgctgcgcctaacgctggcaccctcttacaactgcaacaattgctgccattcaaccaacttgctttgacaaacccaacagcattctaccaacaacccatcattggtggtgccctcttttagatttcttatgagttatagttcaataataaagttttttgtctgatgtttgtggcttcccagaaataagaaagtacatttctagaanaaaaaaantatttaaaaaaataataaattaaaatattaaaatattaaatcccctat

SEQ ID NO: 298610 - DNA, 334 bp, Zea mays
caactagcaacatagaaggcccaatagtgtaccaacaatggcagccaaaatattttgcttccttatgctccttggtctttctgcaagtgttgctaccgcaaccattttcccacaatgctcacaagctcctatagcttgccttcttcccccatacctctaaccagcggtgtcttcaatgtgtgaaaacccaattgttcaaccctacaggatccaacaagcaatcgcaacaagcattttaccattatcacccttggtccttcaacaacacgtaaccctattacaacaattacctttggtccatttggtggcacaaaacattagggcacaacaacta

SEQ ID NO: 298611 - DNA, 443 bp, Zea mays
attgagaccaacaagcaacatagaatgtggaatccaatagcaacaatagaacaacaatgacgaccaagatattttccctccttatgctccatgctctttctgcatgtgttgctaatgcgaccattttccctcaacgctcacaagctcctatagctgcccttcttcacccatacctcccatcaatgatagattcagtatgtgaaaacccagctcttcaaccctataggctccaacaagcaaatgcagcaagcaacttacctttatcaccctcgttgtttcaacaatcgccatccctatctttggtgcagtcattggtacaaaccatcggggcacaacagctgcagcaactcttgctacttgtgatcaaccaagtagctctggcaaacctttctccctactctcagcaacaacagtttcttccattcaaccaactgcctacactg

SEQ ID NO: 298612 - DNA, 421 bp, Zea mays
ttgataccaacaagcaacatataatgtgttttccaatagcaacattataacaacaatgacgaccaatatatattgcggccttatgctccatgctctttctgcatgtgttgctaatgcaaccattttccctcaacgctcacaagctactataacttgcctaattcaccaataccttccatcaatgatagattcagcatgcgaaaacccaactcttcaaccctatatgctccaacaagcaaatgcatcaagcaacttacctttatcaccctcgttgtttcaacaatcgccatccctatctttggtgcattcattggtacaaaccatctttgcacaacagctgctataactcttgctacttgtgatcaaccaagtagctctgtcaaaccttttttcctactcttaacaacaacagtttctttca

SEQ ID NO: 298613 - DNA, 333 bp, Zea mays
agcattcataaacacaccaggtttatcgcactaccaacaacctaacaccaatgggtaccaagatattatccctccttgcgcttcttgcccttttagtgagcgcaacaaatgcgctcattattccacagtgctcacttgctcctaatgccattatttcacaaatactcccaccagatacttcaatgggcttcgaacatacaaccgtgcaagcctacacgataccaattagggctggcggaaagggtttaaaacaaccaaatgcccaatttgaacaacaattcctggcccaatttaaacttcaaaccattggcaccccaccaggaccacaatttt

SEQ ID NO: 298614 - DNA, 387 bp, Zea mays
aatgaagaatcatacatagtggtatccactttcttcatattactacaatggcgaccagggagctgtcctctcttatgctccttgctcattgctgcatgtcttgcttacgcgacacttttaccttaatgctgacaagctcatatagcttgaatgcttgacccataccctccatcaatgatagctactgtctgcgaaaacccagctattgaaccctataggctacaacaagcaatctgatgaagcagacatacatttatcacccttgtttcaacaatagacatgccctatctttggagcacacattggtacataccatcatggcacatgactttcagcatctcgtgctacctgagatcaaccctgttgctgtggcaaaaccttctgcct

SEQ ID NO: 298615 - DNA, 219 bp, Zea mays
attcttcttgctcttcctgcatgtactggctactcctcaaaactccctcaatgctcacaaactcgtattgtttgccttcttcccccatacctcccatcaattatagcttccgtatgttaaaacccatctcttcaaccatatacgctcgaacaagcaatcacagcaagccacataccttcatcactcctccttcaacactcggcagccgtatcttctgtg

SEQ ID NO: 298616 - DNA, 242 bp, Zea mays
gcgacgcgtttttgcaacattaactttttctgctattctacccacaagatgcggatgagaatggggactttttacaacaacaacaattgctgccatttatctcaacttgatttgacaaatcctaccaccttattacagcatgccaccattggtggcgccatcttctaaattattttatgctttatactgtgataataaagttctcataccgatatgtgcgcatataaaaaaaactgtaaacg

SEQ ID NO: 298617 - DNA, 438 bp, Zea mays
  unsure (1)..(438): unsure at all n locations
caacaacaactaccattcagccagctacctgttgcctacccccagcaatttcttccattcagccaactggcagcattgaactctcctgcttatttacagcagcaacaactactaccattcagccagctagctggtgtgagccctgctaccttcttgacacaaccacagttgttgccgttctaccagcacgcttggcctaaagcttggacccttttacaactgcaacaattggtggcattcaaccaacttggtttgacaaaactaacaatggtctaacaacaacccatcattggtgggggcctcttttaaaattcttatgaagtataagtcaataataaaagtttttggctgatggttggggcttcccaaaaataagaaaggacatttctagatttaaaaaaaaaaaanaaaaaaaaaaaaaaaaaannnnnnnccccc

SEQ ID NO: 298618 - DNA, 441 bp, Zea mays
attttcagcattcagaaacacacttagcgaatcgcactagcaacaacctaacaagaatggggaccaagatattagccctccttgcgcttcttgcccttttagtgagcgcaacaaatgcgttcattattccacagtgctcacttgctcctagtgccattattccacagttcctcccaccagttacttcaatgggcttcgaacatccagccgtgcaagcctacaggctacaactagcgcttgcggcgagcgtcttacaacaaccaattgcccaattgcaacaacaatccttggcacatctaaacctacaaaccatcgcaacgcaacagcaacaacagtttctgccatcactgagccacctagccgtggtgaaccctgtcgcctacttgcaacaacagctactttgattcaacccacttgctcttgcgaacgtagctgcatacc

SEQ ID NO: 298619 - DNA, 349 bp, Zea mays
gaccaggcgtccgaaaaaacattaacaaataattttcatttttaccaacaatcaatcccaggggcgagcaagatattttccgtccttatgctccacgctacatctgcatgtgaagctaacccaacaattatagctcaatgctcacaagcttatatagaatcccttattcccccataccttgcatcaacgattgcttcaccctatgaaaacccacctcttaaaccctataggctccaacaagcaataccatcaggcaacatacctccatcaccttcgataaacaatcatcagtcctatccatcttgcaaccatagctacaaaacatcatggcacaacaaatgcaccaact

SEQ ID NO: 298620 - DNA, 277 bp, Zea mays
  unsure (1)..(277): unsure at all n locations
tctagatcgcgagcggccgccctttttttttttttttttttttnannnnaccagcgttggggaacaatacttttttcttttcatttcaattgtccattcacggcattgctcacactgacactgccacccatggtgatgcctgacacattattactcaatcatcgccgcttaatgactcaactagcttgctagccagcggctatactacagcaccccgatcctgggccaatgcgtctagtttctgaggcatcaatgcaacccgacggccacaccctac

SEQ ID NO: 298621 - DNA, 309 bp, Zea mays
  unsure (1)..(309): unsure at all n locations
acagaacancatgaagagtgtcagtgttctcttcttgtgcctggctctttcaactgccagcgcctttgaaatgcatatgccctgcccctgcgcggttctgcaaggcttttacagagctggcccctgcctttctacgattatgggcgcctgcgatctatacccctacgctgagtacctgaaacagtcgcattacactcaagtggcatatgacccctactactccgggtgttttcagactagcgccatgtaccatacgctcctactacactgctgacatgttcacaccatgatgatagactttcattcctt

SEQ ID NO: 298622 - DNA, 427 bp, Zea mays
cagaaacacaccaagcgaagcgctctaccttctaacctaacaacaatggcttcggggatatgatcccttcttgcgctattcgcccttttattgatcgcagcatatgcatccattatttcacagcgctcacttgctactagtgcctttattccacagttcctccctccatttacttaattgggctttgaacatgcaaacacgcaagccttcaagcttcaactatcgctcgcggcgagcgtcttacaacaaccaattgaccaaccgcgacatcaatactttggacatctatacctacaaaccatcgattcgcaccaacaacaacagcttatgacatgactgatccacctatacgaggtgtaccctgtcgcctacttgcaaaagctgctacttgcattcaacacaatcgctctggcgaacgtaactgaat

SEQ ID NO: 298623 - DNA, 457 bp, Zea mays
aatacccgggccagacccacggcgtccgacgagttgcctgcaatctgctgcgctatcctgttatcaaccaagtacgatatggcaaagggtttggccctactctcatcaacatcaattctttccattcaaccaactgcttacatcgtaccatgctgcttatttgctgcaacaactattaccatgcagacatatcgctaccggctactctgacaaacaacaactacttgcattctaccaatcgtccgcaatcaaccgtgctgctgatttgcaggatccaactctactaccatgtacacatgtcgccgccggatgatgtgcttccttcttgacacaactacagtagttgcctttctaccactcattctcatctcaacccacaaccttgttacaactacaacaattgttgcacttcgtgcaacttgctttgacaaagccagcatggtcctaccaacaacac

SEQ ID NO: 298624 - DNA, 357 bp, Zea mays
acgacccacgcgtcgcgaacacctttcaccatatgtacgtccatatcgttgaacaacactggtcgacacaatgggggtggcgctctttgccctttgtctcctgtctattgattccagcgccaactattctcatacaatcggccggtgctgctgctagccaccgtcgtcggatcatataccgacgacagtgcatcttccacctccgaattacctgccacatacggcgcatatgacaccgccggtcacacactgccgtcgtctgacatttaacaccgtcgttccatgtacagtcaccagttcatctgcaaccgtcaccattccactatcctactcaacaacacatgcctgagcctcatc

SEQ ID NO: 298625 - DNA, 218 bp, Zea mays
cgtgcggttcgattattccacagtttcttttaccagtctcttcaatgggcttccaacagctatcttgtcgattcttacatgctacaacaagcgcttgcttcgagcgtcttacaacatccaattaaccaattgcaacaacaatccttggcacatctaaccatacaaaccatcgcaacacaacagcaacaacagttcctaccagcactgatccaactaga

SEQ ID NO: 298626 - DNA, 342 bp, Zea mays
gtgagaccaactagcaacataaaacgcactgtagtgtaccaacaatggcaacaaaaatggggtgcgtgccttatgctccttggtctttctgcaattgctgctagcgccaccattgcccagcaatgctcacaatgtgctattgcttctcttgccacaatgtacctatcaccagcggcgtcttcgtcatgggaaaacacacttctacctccgtacatgatccaacaagcactcgcaggtggcgtcagagctttataacacctgatcgtccaacagtcatcactattattacaacagctacctttggagcatatattagcacaaaacatcgggcagcaactacta

SEQ ID NO: 298627 - DNA, 333 bp, Zea mays
ctcacttgctcctacagccattatttcactttttctccgaccagttacttcatggggctgggaacacctagctgtgcatgcctacaggctacaacaagcgcttgcggagagcgtcttacaacaaccaattaaccaattgctactacaatccttggctcatctaaccattcataccatctcaacacaacatcaacaacagttcctaccagcactgatccaactagatgtggtgaaccctgtctcctacttgcaacagcatgtgcttgcatccaacccacttgctctggcaaacgtagctgctataccaacaacaacaacaattgcaacagtttc

SEQ ID NO: 298628 - DNA, 426 bp, Zea mays
cagaaacacaccaagcgaagcgcactaacttcaacctaacaacaatggctaccaagatattagccctgcttgcgcttcttgcccttttagtgagcgcaacaaatgcgttcattattccacagtgctcacttgctcctagtgccattattccacagttcctcccaccagctacttcaatgggcttcgaacatccagccgcgcaagcctacaggctacaactagcgcttgctgcgagcgtcttacatcatccaattgcccaattgcgacaacaatccttggcacatcttaacctacaaaacatttgaacgcaacagcaacaacagtttctgccattactgagccacctatgccgggtgaaccctgtcgactacttgcaacaacaggtacttgcatccaacccaatttctctggcgaacgtagctgcat

SEQ ID NO: 298629 - DNA, 341 bp, Zea mays
tccccctcccccctctttctgcgaaaaccaaccccaccaatccactcactgcttactacccccaaccacctcctccattcaatctaccgccaccattgcattttgctgcttctttacaacagccacctctaccactattcatccaactagccaactgagccctgcttccatcttcccacaacaccaccttgttgcccgccccacctgcactcttcgcctaacgctgccaccctcttacaactgcaacacctgctgacattcatcccaaatcccttccacaaacccaacaacgttctaccaacaacccatcatcggttgagccctcttttagattgcttatg

SEQ ID NO: 298630 - DNA, 228 bp, Zea mays
ggacgaccgacgcgtccgacaaggcatatcagcaaagcggcagggcgtttagaggatcgtcgaacagaacagcatgaaggtggtcagcgttctcgtcatgtgcctggctctgtcagctgccatcgcctctgcaatgcagatgccctgcccctgcgcggtgctgcagggcttgtacggcgctggcgcctgcctgactacaatgatgggcgccggcagactgtaccccta

SEQ ID NO: 298631 - DNA, 410 bp, Zea mays
atagagaccaactagcaacatattaagcactattgtgcaccaacaatggcagggaaaagggtttgcttccttatgctccttggtctttctgcaagtgttgctaccgcaaccattttaccacaatgctcacaagctcctatagcttctcttcttcccccatacctatcaccagcggtgtcttaaatgtgtgaaaacccaattgttcaaccctacaggatccaacaggcaatcgcaacaggcatattaccattatcaccctcgttacttcaacaacacgaagccctattacagcagctacctctggtccatttggttgcacaaaacatcatggctcaacaactacaacaacttgttctaacaaaacttgctgcatactatgaacaacatcagtttctttcattcaaccaact

SEQ ID NO: 298632 - DNA, 297 bp, Zea mays
aagaagacagctgataacccatatgtccgcgatgctgctagataatctgctcttcatgagatcaatgagcgcatcaagaagaccaaggatgagaagaaagcgaataatgcggaggtgagcaagtcccagatgacgcagacaaagggtgcggtccacaagggttccaagggccccaaattgggcggctgtggttttaaacgctgaaagaacttattgttccttctcgacatttcagtctttccttatccaaaaccactttcctataacctgtgttgaattttcaagacttattaaagc

SEQ ID NO: 298633 - DNA, 263 bp, Zea mays
actgaaacaaacatcaaaggatctttttcttttgctgccaccaaagaataaggggggggagctatttgtctacacagatctcttaactacgaccacctccatcacgctcgccatacgcatggacatcctgtacctcgtgggcttcaagaccccacgcggggtgtggtgggagttcgaaaacgacggtgacacccacctcctgatccacaaccccatgtggctcggcttctgacgttggtaccaggacctcatccaccacaaag

SEQ ID NO: 298634 - DNA, 130 bp, Zea mays
ctctgaatgcatatgccatgcccctgcgcagggctgaagggcttgtactgcgctggcgcccgactgaccacgatgatgggcgacgacgggctgttcccatacgctgagtacctgatgcagccagaatgca

SEQ ID NO: 298635 - DNA, 304 bp, Zea mays
tgaacgaccggggcgaccgacgcgttcagaccattagcgttccggtaacagttatggcattagaacacgatgatgatggtcgtgcagttggtcgcgcaccatctgtatactatgattcagtttgagcgtgccgttgacgccagcaacaggctgttcgagccagctctgatgcagcagcagcagcagttgctggcagcccaaggtctcaaccccatggccatgatgatggcgcagaacatgccggccatgggtggactctaccagtaccagtaccagtttgccagctaccgcaccaacccctgtg

SEQ ID NO: 298636 - DNA, 413 bp, Zea mays
ctgggtcttcagaccattatctttatctacttcagagcgcagaagaacccgatcgacaccgtgagggtggtgctcgttgccctcgctctcctggctctctctgcgagcgccaccttcacgcatacaagcggcggctgcggctgccagccaccgccgccggttcatctaccgccggcggtgcatctgccacctgcggttcacctgccacctccggtgcatctcccaccgccggtacacctgccgccgccggtccacctgccaccgccggtccatgtgccgccgccggttcatttgccgccgccaccatgccactaccttactaaaccgccccggcctaagcctcatcccaagccacacccatgccctggccaacagccgattccaacccctggcaagttgaaggaaacctgcgg

SEQ ID NO: 298637 - DNA, 418 bp, Zea mays
atccttccactccctcgccgaccctcccccctcgcccgccatggacacggcgatcggctcgggcccgggagcctccgacgcggcgcgtcacccagcgccgtccgcgtccgccccgcgcgacgcgacgctgggccggcacctagcgcggcgcctggcggaggtgggcgcccgggacgtgttcacggtgccgggggacttcaacctcacgctcctcgacgagctggaggccgagccgggcggcgtccgcctcgtcggctgctgcaacgagctcaacgcggcgtacgcggccgacgggtacgcccgcgcgcgcgccggcggggtcggcgcctgcgccgtcaccttcaccgtcggcggcctcagcgccatcaacggcgtcgccggcgccttcagcgagaacctccccgtcgtgtgcatcgtc

SEQ ID NO: 298638 - DNA, 333 bp, Zea mays
acaaagcacaaagctgtcccaacaatggctttcaaaatattttgcctccttatgctccttagagttggtgtatgtgctgatacggcgaccattttcccgaaatgctcgcacgctcctataactgacattattccgccgtacctctcaccaacggtgtcttcggtctgtgaaaacccaattgttgaaccctacaggatccaacaggcaatcacagctggtatcttacctttatcacccttgatgctccaacaatcatcacccctattacatcaattacctttggtgcatgtattggcacaaaacatcatggcccatcaactacaacaacttgtg

SEQ ID NO: 298639 - DNA, 278 bp, Zea mays
gacccacgcgtagctaattatctaactaaccataacaccttaaaatttcatgcttacttatgctccgtgagagcgggtctaatgcttctaccgcatccattttcccacaattcttacaagctcctatatcttccattcttacccaattcctctcaccaacggagccttcagtatatgaaaacctaattcttcaaccctacaagatccaacacgcaatcacatcatgctttttacctttatcacccttgtaattccaacaaccagtaaccctattacag

SEQ ID NO: 298640 - DNA, 313 bp, Zea mays
  unsure (1)..(313): unsure at all n locations
acaccattaactatatctactccagagcgcacacaaacccgatcgacaccatgaggggggtgctagttgccctcgctctcctggctctcgctgctagcgccaccttcacgcatacaagctgcgggtgcggatgccatccaccgccgccggttcatctaccancgccggtgcatctgccacctgcagatcacctgccacctccgtagcatatcccaccggcggtccacctgccgacgtcagttcaactaccaccgtcggtccatgtgccatcagcggtatatctgccgtcaccaccatgccactaccctactca

SEQ ID NO: 298641 - DNA, 185 bp, Zea mays
ctaggtcttcataccattagctctatctacttcagagcgcagaagaacccaatcgggaccatgagggtgtcgttcgttgccctccctttcctggctctcgctgctagcgccacctccacgcatactagcggtggctgccgctgccagccaccgacgtcggttcatctaccgacgtcggtgcatct

SEQ ID NO: 298642 - DNA, 254 bp, Zea mays
attgggtctatctactacaaaacgcagaacttcccggtctacaccatgagggtgtagctcgggggcctggctctcctggctctcgctgcgagcgccaccttcacgcatacaatcggcggactgcggctgacagccaccgatgccggttcatctaccgccatacggtgcatctagccagctcctggataagctggcacatccagtgcatctaccatcgacgatccaccaggcgacggcagcacacatgtcaccat

SEQ ID NO: 298643 - DNA, 451 bp, Zea mays
  unsure (1)..(451): unsure at all n locations
ttcccgggttcgaacccacgccgtcacgcagtatcangtcaaagtcggcatgtggcgtagaagagggtatcgtctgaaccagaacccagcatgaagaatgggtcaggngtgtcgtcgtcgtgtgccctggtctctgtnncagctgccatgcgcctctgcaatggcagatgtcacctagcccctgcgcggtgtgctgcatgggcttgtaccgggcgctggctgccggccctgacgaacgatgtatgtggctgccgtgcgggtctgtatcccctacgcggagtatcctgagggcagccgcagtgcatgcccgctggcggctggctgccctatctacgccgggtggtgggcagacgagcgccatgtaccagcccgctccggcaacagtgctgccagcagcagatgaggatgatggacgtgcagtccgtcgcgcagcagctgcagatgatgatgc

SEQ ID NO: 298644 - DNA, 279 bp, Zea mays
ccgagcaacatataaagcactttaccgtaccatcattggcttttaaaataaaatgcctccttgggctcctgtgtatttttgcaagtgctgctacacctaccattttcccacaatgctcacaagctcctatatcttcccttctttccccgaaccttttaccaacgttgtcttcacaatgctaaaacccaattcttcaaccctacaagatccaacatgctatctcagctatcatcttacctttatcacccttgctcctccaacaatcatattacctatttc

SEQ ID NO: 298645 - DNA, 446 bp, Zea mays
atcaccctcgaggtggagtcttcagacaccatcgacaacgtcaaggccaagatccatgacgaggagggcattccaccggaccagcatcgtttgatcttcgctggcaagcagctggaggatggccgcacccttgcggattacaacatccagaaggagagcaccctccacctggtgctccgtctcaggggtggcatgcatatctttgtgaagacactcactggcaagacaatcacccttgaggtggagtcttccgataccattgacaatgtcaaggccaaaatccaagacaaggagggcatcccaccggaccatcagcgcctcatattcgccggcaagcagctggaagatggccgcaccctgtcggactacaacatccagaaggagagcaccctccacctggtgctccgcctcacgggtggcatgcaaatttttgtgaagacattgac

SEQ ID NO: 298646 - DNA, 317 bp, Zea mays
cgacccacgacgtacgcgtacgctctcactaaactatccatgtcgattactcttacatacgtacatcatcaacatccgcctgagtcctattcgctatctacgcacaatgcacccacataccttctacaacaaccagttctaaccatagcctacccagaggacacctaacctgctgtggcaaaccctgtcggctacttataacagatgcttccattctactaagcctctctgtccaaccctggtgcgcacctaccacaggcacaacagttacttaattcactggtattacataaaaaattccctgccaacactactac

SEQ ID NO: 298647 - DNA, 351 bp, Zea mays
ggacgacccacgcgtgcggtggcgaatgtctcacatcacacaacaccttttgttttacaactatacatggcacatctagcgaggcgtacgatcgcaacgcaacatctacaccaatagctaccagcacgtgagccacctatgcctggtgaaccctgccgactactttccacagcagttgcttggatgaaacccacttgctctggcaaacgtaggtggaaaccaaccacaacatcagctcggacactttgtgtcaccgctgacctaactaggcatggtgaacactgccggatacctacaacagcaacaactgcttacatctagacagctcgctgtttgaaatgcacctacata

SEQ ID NO: 298648 - DNA, 335 bp, Zea mays
gccgaccgacgcgtccgatcttcataattcataaacacacctttcttttctcactcaccacaacctaccaacgatggcgtccaatttattagccctccttgctctacaagcccttataacgagcccatcatacgctattattatcacacagcgctcacttgcttctagcgccattatttcacatatcctcccaccagttacttaaataaccttctaacatccacccattcaagcctacatgctacaactagcacctgcctaccacgatttacaacaaccaattgcccaactgcaacaacatttcttgacccatctaaacctacaaaccatcggaa

SEQ ID NO: 298649 - DNA, 332 bp, Zea mays
ggacgcgtcttattaccatcaactatatctactccataccgtttaaaaacccaaccgacaccatgggggtaggtgtctttttaactcgctctcctgcctctcaatgcaatcgccacctacacacatacaaacaatggttacaactaccaaccaccgtcttcggttcatctaccgtctcacccgcatctatccacctccagttaacctaccaccttcaatgcatcttccaccgtctgtacacctgccgccaccagttcacctgccaccgcctgtccatgtgacgactccgtttcatctgtcaacaacaccatgccactaccctactcaaccac

SEQ ID NO: 298650 - DNA, 411 bp, Zea mays
ccgctccggcaacagttctgcctttagcagatgatgatgatggacgggcagtgggtcgctcaccatctgtctactgatgattcactttgagcgctaccttgacgcatacaagcggctgttgcagctacctgtcacccacgacgattaatctaccgccgccggtgcatctgccacctccggttcacctgccacctccggtgcatctcccaccgccggtccacctgccgacgccggtccacctgtcaccacctgtccatgtgccgccgtcggttcatctgccgccgtcaccatgccactaccctactaaaccgtcccggactcatcctcatccccagccacacccatgctcgtgccaacagccgcatccaagcccgtgccatctgcagggaacctgcggcgttggcagcaccc

SEQ ID NO: 298651 - DNA, 234 bp, Zea mays
gtcgagggcacgacgtacgcgtctagatagcgagcggctttacactatcactgttttactactgctgcattcgctgccatggatccgacttgctgtgacatactcaacagtgatctaccaacaacccatcattggtggtgcgctatttcagagtgcttatgaatcatagttgaatagtgaagcattctggatgatgctggtggcgtcctagagataagaaagtacatgtttgga

SEQ ID NO: 298652 - DNA, 362 bp, Zea mays
gagcatcaaaaccagcacatttatgtaccttctatcgcatacaaaccatttcgacaccatgagcgtcgtgggtctttgtcatgtgcctgctacctatccattttacacaatgttcacaatacaatatagctgtctttcttgcaccaacctctcaccattcatgtacctcactacgtgaaatcccacatcttcaaccatacaggatccaacaggcatttgcaaccggcatttcacctttatcacccttgttacttcaacaaccgtgatcattattacaacagctatcatctgtgcatttgatcatacaaataatctactcacaacaactacaacaacttttattacgaaacacagctatctac

SEQ ID NO: 298653 - DNA, 392 bp, Zea mays
atgtgtctacacaccattagctttatatactatcagagcgcaaaaaaacccgcgcgacacggtgagggtgttgctcggcgccctctctcttctgtctctctgtgagagcgccacctacacacacacaagcggcggtgtgtgctgacacacaccgccgtcgttttatataccggcggcggcgcatgtgacacctgcggtacacctgacatctgcggagtatctcacaccgggtgtacatctgccggcgcgtgtacatctgccaccgggggcatatgtgccgccgcctttttatgtgccggcgacactatgcctatactatattaaaccgccggggtctgattcttatccagacacacacatatgcgtgtcaaaacagacatataaaaccccgc

SEQ ID NO: 298654 - DNA, 332 bp, Zea mays
cacgcgtacgggtctagatcgcgagcgtcttactcttactttctctttcaactgcaacaattgctgcccttggaaccgatttgctttgacaaactcatcagccacctaccaacatcccatcatgggtggtgccctctttaacatagcttatgagttatagtccaataacgaagtttttcggatgatgatcgtggcgtaccagaaataagaaaggacatctctggaggtgctaaatcaaaggactatgtgcacgtgcatattcaccagctcaacggtaggaatagtctgacaactgttcagggcttgaagaaagagtacagctacaacaagat

SEQ ID NO: 298655 - DNA, 460 bp, Zea mays
gaattacagcccgacctacgcgtccacttcgtccgcgtcttactctgacgttctcttacatctccaacaattgctcccactgccacagttatacttttacaatactactacatccaacttaccaacatctcatcatgaccaatcacactcattaactaagcttaatatctaatctccactaacaaatttcatctgattatgatccgtgcgcacaagcaattactaaggacttctctgctggtgctggatcaaaagactatgtgcacgtgcgtattcatcagctcaacgaaaggaagagtctgacaactgttcagggcttgaagaaagagtacagctacaacaagatcctcaaagatctcaaaaaagagttctgctgcaatggtactgtagtccaggatccatagataggccaagtcattcaactgcaaagtgatcagcgtaaaaatgtctatacttttct

SEQ ID NO: 298656 - DNA, 428 bp, Zea mays
tagaaagcacactagtgttccaacaatgttagccaaaatattatgcttcggtatgctcgttggtctttctgcacgtgctgctaccgcaaccattttcccacaatgctcacaagctcctatagcttcctttcttcccccatacctctcaccagcggtgtcttcagtatgtgaaaacccaattcttcaaccctacacgatccaacaggcaatcgcagcaggcatcttacctttatcacccttgttcctccaacaaccgtcagccctattacagcagatacctttggtgcatttgttggcacaaaacatcaaggcacaacaactacaacaacttgtgctaggaaaccttgctgactactctcagcaacagcattttctttcattcaaccaactggctgcattgaactctggtgtttatttgcaacaaccac

SEQ ID NO: 298657 - DNA, 417 bp, Zea mays
  unsure (1)..(417): unsure at all n locations
gcggcgactccacggcgtcgacgccagcgcgctccgcgggacgccgtggcgcagtaaacacgaccaagctgaagcacacttagcaaccaaccgaacaacaatggcgtacgcaagatattatcacctccttggcgcttcttgncgctttttagcgagcgcaacaaatggcgttcattacttccacaatggctcacttgctccaagttccattattacacagttcctcccaccagttacttcaatgggcttcgaacacccagctgtgcaagcctataggctacaacaagcaattgcggcgagcgtcttacaacaaccaatttcccagttgcaacaacaatccttggcacatctaacaatacaaaccatcgcaacgcaacagcaacaacaattcctaccagcactgagccacctagccat

SEQ ID NO: 298658 - DNA, 420 bp, Zea mays
gaaatacaggcgcgacccacgcgtcacaccatgagcatctatctacttcaaagcgtatagctaccgcgaacgaagccggcgaaccaggagcacctacacctccatctgctgcttctaactctcagcgccatctccacgcatacaaccggcggctagctacaacaacacaacctgctcgcatcaagcacgctcgctgtgggaaatgcaactacatacctacatcaacacttgttggaacataccaccccagctctaactgaactagctggggcaaatcctatcgcctactcataacaggtgcttccattataccaagtgactatgatgcaactagcttactcaactacaacagcgatcacacttactcaaaccacagccattggctaaccaacaggccgatgccatcctacagcaactaca

SEQ ID NO: 298659 - DNA, 360 bp, Zea mays
cgagcgccacaaccaacatcacccgcctttgcgacacgacagccgacagggggaaggggtaaacttactgccagccagtgaacggggagaagtgtactgctccgtcgaccagtgcgcgcaccggccggcaaggctgctcatttcttcgacgaccattgcattaatcggcatggcggctctggccacgtcacatctcgacgcatcgcccatcggcctgggcgtcccagacgcgttcacatttcgacgaggcgccgtgcaaggactgaggtgggccctatcatatgaggtacgctgacacgctcataatgcggaccagcatgcgcgcacagcacatacaccaacatcaggcacgccacgttg

SEQ ID NO: 298660 - DNA, 359 bp, Zea mays
gaaaagcggccatgcatatagcggatctttacccacaacagcatgaagagggtcatggctctttatgcgtgccgggctctgtcagctgccagctcctgtgacctgcatatgccatgcctctgcgcgtggtatcgatgctcgtactgccctgacgcctgactgacgacgattatgggctccgaaagcctaaacccctacccctactacctgcagcaggcgcagtgcagctcagatggcagctgtatcatactacgtcctgcgacgacaaacaagcgtcttgcaccagccacttcggcaacattgctggcagcagcacatgaggatgaaggacctacaacaccttgtgcataaaaacctta

SEQ ID NO: 298661 - DNA, 432 bp, Zea mays
  unsure (1)..(432): unsure at all n locations
aaaaacaggccggagccaagcatccaantgcttaaccctattttatccaacattcttacgaacccnacatacaagatgaattagccgcttttctacaacaaccttcacccctattacagcagctacctatggagcattaaatcgcacataacatcaaggcacaccaactacaacatcatgtgctaggaaaccttgctgtctactctcagcaacaccagccacttccattcaaccaactacctgcattgaactctgctgcttatttgcaacaacaactaccattcaatcagctagcttctgcctacccccagcaattactttcattcaaccaatcttcagcattgaactctgctgcttatttacaacaacaccagctaccatcatttatccagctatctaatgtgagccctgtttccttttttacacaacaac

SEQ ID NO: 298662 - DNA, 395 bp, Zea mays
gaaatacaggcccgacccacgcgtacggctatatatcgctagcgttcggtctattttaaccacgcatacttacgcagacatgcttgggaattactatcccatatatacacctaactaaaattaactgaccgaccgtctacaaccacaaaactgtcaaaacactccccttacccaacttaattaacttgcatcacatacatctttctttagctggcttaataactaaaaagaacgcacttaccgaccttcccaacaaataaatagccagaatgactaacgatacgcaccctctataaacgcattaattacggccggtgcgcgcagtacgaacactaaaactgatacattcataagccacctaccttacgctcgcttcccttactttctttcctttc

SEQ ID NO: 298663 - DNA, 240 bp, Zea mays
cgacccacgcgtacgcagaaacacaccaatcgatcgcactattctcaacctaacaacaatggctgccaaaattgttacccttcttgcgcttcttgcccttttagtgagcgcaacaaatgcgttcattattccacaaagctcacctgcttccaaagccatatttccacacatccttccaccaattactttaatgggctttgaacatacaaccctgcaaaactacacgcttcaactatagct

SEQ ID NO: 298664 - DNA, 322 bp, Zea mays
caacaactacaacaactgtagttaccaacactcaatcacgtaattgcaacgaaccttgctgcttaccttcaccaacaacatgcttgttccattcaatcaactacatggcgcgaaccctgctatctacttgcaggcacaacacactactaccatttaaccaacttgccgggagcccttatgcctttttactgcaacaacaacttctaccatttcatctgcaagctgtggcaaacattgctgctttcttgatacaacaacatttgcatgcattttacccacaggatgtgggaaacattaatgccttcttgcatcatcaacaatt

SEQ ID NO: 298665 - DNA, 252 bp, Zea mays
gaagaacccgatcgacaccatgagggtgccgctcggtgcacctgctctaacagctctcgctgccatcgcacaccttcacacatacagaacgctgctgtgtatgtcaaccaccaacagctactaatataccgccaactgggcatgagccaccatgcgttcacactgcaactacagtgcatatcataccatctgtacacctggcgacacatggccacctgccagagacagcacatgtgcgcggcgactgtacat

SEQ ID NO: 298666 - DNA, 428 bp, Zea mays
cttaaaaccataacctttatctactacaaagcgcacaaaaacccgatcgacagcatgagggtgttgctcgtagacctcgatctactggctatcgatgggagcgccacctacacgcatacaaccggcagatgcgggtgccaaccaccgtcaacggtttatctaccgacgccggtgcatctgccacctgcggttcacctgacacctgcggcgcatctcccaccgacggtccacctgacgccgacggtccacctgccaccgccctgccatgtgccatcaacggctcatgtggcggcggcaacatgcaactacactactaaaccggccagggctcaagctcatgctcagtcacacccatgcccgtgccaacaggcgaattcaagcccgtgccagctgcaaggaacctagggcgggggcagcacacggatcct

SEQ ID NO: 298667 - DNA, 309 bp, Zea mays
attttgagcattcagaaacacaccaagcgaattacattagcatcaacctaacaacaatggctaccaagatatgatacctccttgcgcttattgtgcttgatgcgagcgcaacaaatgcgtggattattacacaatgctcacttgctccaagatccattattacacagattctaccaccaactacttgaatgggctgcgaacacccagatgtgcaagcctatacgctacaacaagcaattgcggcgagcggcttactacaaccaatttcctaagtgcaacaactatccttggcacattgaacaatacaaa

SEQ ID NO: 298668 - DNA, 437 bp, Zea mays
cctacaggctacaactagcgcttgcggcttagcgtcttacaacaaccaattgcccaattgcaacaacaatccttggcacatctaaacctacaaaccatcgcaacgcaacagcaacaacagtttctgccatcactgagccacctagccgtggtgaaccctgtcgcctacttgcaacagcagctacttgcatccaacccacttgctctggcgaacgtagctgcataccagcaacaacaacgtctgcaacagtttatgccagcgctcagtcaactagccatggtgaaccctgtcgcctacctacaacagcaacaattgctttcatctagcccgctcgctgtgggcaatgcacctacgtacctacaacaacagttgctgcaacagattgtaccagctctgactcagctagctgtggcaaaccctactgcctacttgcaaca

SEQ ID NO: 298669 - DNA, 394 bp, Zea mays
attacatcataaacggcacactaagaacaaacaaaggcacgcaacatacttgcgaactggaggtccttgatctttgtgcggagatgcaaccgcaaccattggcccaaatgctcaaagctgctatagctatacttctatccacatacatctcaccagcggagaatcaaatgtgtgaaaacccagttgttgaaacatagaagatgcaacaggcaatcgcaacaagcatcataccattatcacccatggtgattcaacaaccgtcagccctataacagcagttaccgttggtgcattgggtagcacaaaagataaaggtacaacagctacaacaactggtgctagcaaattttgctgtatacttttagcaacatcagttgttttcattcaaccaact

SEQ ID NO: 298670 - DNA, 381 bp, Zea mays
ccgatgataccaactatcacatacatagttatttacagtagcaacatctcatcaccaatggcggcctatatatttgcgctgcttgccctccttgatttttcatcaagttttgcttccctgactattattccacaatgctcacaacattacctctctccagtgacagtcgctatatttgaatacccaactatacaatcctacaagctacaatataccatcacaacaatcattttacggtcttcatcattgactgtacaacaaccatatgccctatcgcaacaaccatccttagttaatttatatcttcaaagaatcactacacatcaacttacacatctttagctttcaacaatcaattttgtattttcatctaaccttttc

SEQ ID NO: 298671 - DNA, 412 bp, Zea mays
attcgctctatctactccagagcgcacaataacccgatcgacaccatgagggtgatgcgggtggccctcgctctactggctctcgctgcgagcgccaccttcactcatacaaccggttgctgtagctgccagccaccgccatcggttcatctaccgccgccggcgcatctgccaccttcggttcacctgccacctaacgtacatcttccaccgtctgtccacctgccagcgccggtccacctgccactaccggtacatgtgccgcctcctcatcatctaccgctatcaccattccactaccttactcaaccgctccggcctcagcctcatccccagccacacccatgctcgtgccaacagcctcattcaagcccgtgccagctgctagtaacctgccgacatatgcagtacc

SEQ ID NO: 298672 - DNA, 369 bp, Zea mays
tagctggttccattggttgaggaataaggctcgcgaggggcaggtgcagggctgtcctgccggtaattgatagaaggtgggggtggacgtttcggagatcctggagctggtggaggaccgggaggcgttcggtatgctcgtggacaccaagtttcggcagctcgactccgacggcgactgcttgctctccttgggggacctgctccctcacttggcagacatctttttcgctctcggactgcttgcttagggtgctgtcttcaactccgaccatgtcttctcatatgtggtgagcgagttgactcatgggacattccatggcgaggtgagcaatgtcgatttccaatatgccctttttgacatactttt

SEQ ID NO: 298673 - DNA, 419 bp, Zea mays
ccagatccctgttcgtcttcggccccttcggagggaacgactacaatgccatgctcttcgtcgggctcaccatggatcaggcaaggaactacacgcccaagatcgtcgacaccgtcgccagcggcgtcgagcaactcatccagctgggcgcagtggacatcgtcgtcccgggagcgctgcccgtggggtgcttcgccatctacctcacgtttctcccgagcgacgacccggccgactacgacgggcacgggtgcctgagggcgctcaacgagctgtccgtctaccagaactccctgctccagagcaggctcgccgccctccaggcaaggtatccctcggcgaggatcgtgtacgccgactactacacccacatcgaccggctggtgcgcagcccggcgcgcttcggcttcacaactggc

SEQ ID NO: 298674 - DNA, 430 bp, Zea mays
  unsure (1)..(430): unsure at all n locations
gagcattcanaaacacaccaagcgaagcgcactatcaccgacctagcaacactggctaccgagggattagccctccttgcgcttgttgccctttttgcgagcgcaacatatgcgttcattattccacactgctgacttgctcctagtgccattattacacagttcctacgaccagatacttcaatgggcttcgaacacctagctgtgcaggccaacatgcaacaacaagcgctcgcagagagcgtattacaacatccaattgagcaattgccacaacaatccttgccacatataacaatacaagccatcacatcgcaccatccacaacagttcctaccagcactgagccacctaggcatggtgaaccctgccgcctacttgcaagagcagctgcttgcattcaacccacttgctgtggcgaacgtagctg

SEQ ID NO: 298675 - DNA, 248 bp, Zea mays
ctgccacctacatttcatctcccaccgcctgtccacctgcctcctccggtccacctggccgttcttccattgccgccgccgttcatctgcctcctcctccatgccactaccctactcaaccgtcccggcctcatccttatccccagccacacccatgcccgtgccaacagccgcatccaagcccttgccatctgcatgtaacctgccgcgtttgcacacaccccgatcctgggccattgcgtctagtt

SEQ ID NO: 298676 - DNA, 391 bp, Zea mays
  unsure (1)..(391): unsure at all n locations
ggacgacacaccannagccanancaaccccagagcgcagaagaacccgaccgacaccggnagggngnngcacggagcccgcgcgcaccaggcacncgcagcgagcgccaccaccacgcanacaagcggcggcagcggcagccagccaccgccgccggggcaacaaccgccgccggagcaacngccaccaccggaacaccagccaccaccggcgcagcncccaccgccggaccaccggccgccgccggaccaccggccaccgccggaccaagagccgccgccggagcanccgccgccgccaccaggccacgacccgacgcaaccgccccgggcacagccgcagccgcaggcacacccaggcccgagccaacagccgcaaccaagcccgagcc

SEQ ID NO: 298677 - DNA, 448 bp, Zea mays
cctactatcaacatataaagctcaatattgttccaacaatggcagccaaaatattttggcgccttattctccttggtctgtctgcaatttctgctacttctaccattttccctaaatgctctcaagctcctatatcttcccttcttcccccgtaccttttaccagctgtgtcttttgtatgtgaaaacccaattcttcaatcctacacgatccaacattcaatcacagctggcatcttatctttattacccttgttcctccatcattcatcaatcctattacatcatttacctttgatgcatatattttctcatatcattatgttcacaacaactacaacatctagtgctttcatatcttgctgcctactctcatcaacatcagttcttttttttcaactaactatctgctatgatttctgcttcctattttactcatcattctaact

SEQ ID NO: 298678 - DNA, 341 bp, Zea mays
catacaatacacactactcacccatccgttatcatccaaatatttggcttccttaggcgcgttggttttcctgcaagggcgtggtacagcaaccattttcccacaatgctcacaagctcctatagcttcctttcttccaccatacctctcaccagcggtgtcttcagaatgtgaaaacccaattcttcaaccctacaggatccaacaggcaatagcatcatgcatcttacctttatcacccttgtatccttcaacaaccgtcagccctattacaatcagctacctattgtgcattttgttggcacaaaaacatcaatggcacatcaactactaacaacttg

SEQ ID NO: 298679 - DNA, 452 bp, Zea mays
attagctcatctactccagattggagaactcgacaccatgaaggtgctgatcgttgcccttggtctcctggcgctcgctgcgagcgccgcctccagtacaagcggcggctgtggctgccagacaccaccgtttcatctaccgcctccgttctatatgccgcctccgttctatctgccgccgcagcagcagccgcagccatggcaataccccactcaaccaccgcagctaagcccgtgccagcagttcggatcctgcggcgtcggcagcgtcggcagcccgttcctgggccagtgcgtcgagttcctgaggcaccagtgcagcccggcggcgacgccctacggctcgccacagtgccaggcgctgcagcagcagtgctgtcaccagatcacgcaggtggagctcgttcaccggtaccaagcgacatacggtgtggtcctgcagtccttcctgc

SEQ ID NO: 298680 - DNA, 396 bp, Zea mays
gcaaaactggcaatcaaaatattttgcctccttatgctccttgctctttctgcaagtgctgctaacgcgaccaatttggtgcaatgctcacaagatccaattgcttcccttcttcccgtacctctcaccagcggtgtctttggtatgtgaaaacccaattctttaaccctactggatccaacagacaatcacagctggcatcttacctttatcacccttgtttcttcaacaatcattagccctattacatcagttacctttggtgcatttattggcacaaaacatcatgtcacaacaactacaacaacttgtgctagcaaaccttgctgcctactcttatcaacagcattttctttcattcaaccaactagctgcatttgaactctgcttcttatt

SEQ ID NO: 298681 - DNA, 439 bp, Zea mays
  unsure (1)..(439): unsure at all n locations
gncagcctagcaannagcncatcgactccagaggggagaactcgacaccatgaaggggctgatgggngccctngctcggctggcgctcgctgcgagcgccgcctccagtacaagcggcggctgtggctgccagacaccaccgtttcatctaccgcctccgagctatatgccgcctccgttctatctgccgccgcagcagcagccgcagccatggcaataccccactcaaccaccgcagctaagcccgtgccagcagttcggatcctgcggcgtcggcagcgtcggcagcccgttcctgggccagtgcgtcgagttcctgaggcaccagtgcagcccggcggcgacgccctacggctcgccacaatgccaggcgctgcagcagcagggctggcaccagaacaggcagggggagccggtgcaccgggaccaggcgacaaac

SEQ ID NO: 298682 - DNA, 363 bp, Zea mays
cggaatgggagcaggccagcggcggcaggagggacgaggatctccgcccgctctcacctgctgcgcgacgctggtgacgaggctgcgatgcgtgagcatgacgcccttgggcatcccggtggtgccggaggagtagggcagcgcgacgacgtcgtcggggccgacctcctcgtcggcggcgagcggctcggcggcgtccaccagggcccggagctccaggcacccgtcgaaggcgccgtcgacggtgaccaccggcacgccgcgctcggcggcgaacccgcgcaccttgtcgacggcgcatgcctcggtgacgaccaccctgacccccgccgcggccgcctggcggtggatctcgtgcggggt

SEQ ID NO: 298683 - DNA, 392 bp, Zea mays
ctaaatctcgagcagcacaccatgcgtttttcactagcaacaacctaacaacaatggctgccaacatattaaccctccttgcgcttcttgccctttgaatgagcgcaacaaatgcgtccattattccacaccgctcacttgctgctagtgccattatgccacagttcctgccaccacatacttcaatgggcttcgaacatgcagccgtgcaagcctacatgctacaactagcgcttgcggcgagcgtattacaacaaccaattgcccaattgcaacaacaatgcttggcacatataaacctacaaaccatcgcaacgcaacagcaacaacagtttctgccatcactgagccacctagccgtggtgaacccctgtccctacttgcaacagcag

SEQ ID NO: 298684 - DNA, 247 bp, Zea mays
ctagcaacatagaaagcacaatagtgtaccaacaatggcagccaaaatattttgccttcttatgctccttggtctttctgcaagtgctgctacggcgaccattttcccacaatgctcacaagcttctatagcttcccttcatcccgcgtacctatcaccagcggcgtgtgctgtctgtgaatactcaatactctaaccctatacgatccatcacgcactcgcaactggcatcatacctctatgatcc

SEQ ID NO: 298685 - DNA, 231 bp, Zea mays
gtcgagtttctgaggcatcagtgcagaccgactgcgacgccctactgctcgactaagtggcagtcgttgccgcagcagtgtttccagcagatcaggcacgtggagccgaagcaccggtaccaggcgatcttctgcttggtcctgcagtccatcctgcatcagcagccgcaaagcgtccaagtcgcagcgctgttggcggcacaaatagcgcatcaactgacggcgatgtgc

SEQ ID NO: 298686 - DNA, 246 bp, Zea mays
gcgtacgaccccgattctgggccagtgcgtcaagtttctgaagcatcagtgcagcccgacggcgacgccctactgatgcgctcaggtccagtcgcatgtgctgctagggtgaccatagttcaggcatgctgacgacctgctatagctccaggcgatcttcggcttggttctccagtccatcctgcagcatcagacgacaaacggccaggtcgctgcgctgttggccgcgcaaatagcgcagcaact

SEQ ID NO: 298687 - DNA, 355 bp, Zea mays
ccccgtcatcgatctcgtttcaaattcatccatcctagcgtactcagccccgcaccatctcaaccggatggccaagatcaagatcggtatcaatgctctcggcaggatcggaaggctggtggtcacagtggccctgcagagtgaccatctccagctcgtggtcattaaccaccccttgatcatcacccactacatgacctacatgttcaagtacgacactgtgcacggacagtgcaagcaccatgaagtcaaggtgaaggactccaaaacccttttctttggtgagaaggaggttgctgggtttggctgcaggaaccttgatgagatcccgtggggttcggttggtgctgaatat

SEQ ID NO: 298688 - DNA, 353 bp, Zea mays
aagcaacataaaacggggcctacacgtgcagcaattgagcaacaatggcggccaagatatgacccatctcttatgctccttgctctctctgcatgcgtggctaacgcgaccattttttctcactactcacaggctactatagctgccattctatcttcatcccttccatcaatgaccgcttgagtatgcgaaaacccagccctcaaaccctacaggctccaacaggccatagcaacaagcaactgacctttatcacccgtgtgctttcaacaattgccagccctatctctggtgcaggcattggtacaaactatcaaggcacaacagctgcagctactcgtgctaccagtgat

SEQ ID NO: 298689 - DNA, 401 bp, Zea mays
caacaagcaacacaaaaagagctatccaaccgcatcaatacaccaacaccggccactcacgatcaccctcctccttatgcttcttgctcttcctacatgtgttgctaacgcgacaatcgcccctcaatgctcacaagctgctattgcttgcctttttccccgataccttgcatcaattatagcctcagtatgcgataacccagctcttcaaccctataggctgcaacaagctaccgcaccaagcaacatacctgcatcgaccttggtgcgtcaacaatcgccagccctatcttgcgcgcaggcattggtacaaaccatcatgccacaacagctgcagcaactcgtgctacctgtgatcaatcaagtaggtctggcaaacccttatccctactctgcgcaac

SEQ ID NO: 298690 - DNA, 381 bp, Zea mays
cagcaagcaacacaaaaagaggtatccaaccgcatcaatacagcaacacaggagatcgagagcactttcctccgtatgcttcttgctgtgtgtacatgtgttgctaacgcgacaatcgctgcttcaatgctcacaagctggctactgcttgcgtttttccacgataccttgcatcaattatagcttcagtatgtgaaaacccagctcttcaacgcatataggctgcaacaggcaattgcagcaagcaacatacactcatcgaccttggccgtcgacaatctccagccctatctttggtgcaggcattgctacaagccataatggcgcaacagctgcagcaactcgtgctacctgtgatcaatcaagtgggtctggcaaacc

SEQ ID NO: 298691 - DNA, 421 bp, Zea mays
ggaaggaatgggtggaccgacgcgtgcgtacgcacaccaagcgaagcgcactagcatcgacctaacaacattggctaccaagatattcgccgtgcttgcgcttcttgccctttttgggagcgcaacgaatgcgttcattattccacaatgctcacttgcgtcctagtgccattattgcacagattctcccaccagtatacttcaatgggcttagaacacctagctgagcaagccaacatgcaacaacaagcgcttgcagcgagcgtcttacaacaaccacatgcccaaatggaacaacaatccttgccacatttaacacttctagccatcacaacgcttcagacacaacagtttctaccagcactgacctaactaaccatggtgaaccctgccaactacttgcaagagcagctgcttgcat

SEQ ID NO: 298692 - DNA, 337 bp, Zea mays
cacaaacggacgcgcaaactctggcacgagcccagcgggagttaaactccccatgggggccaccgatcgaccttcaagccagccttgggctattacgaaggcgtcgcgcgcggttgtttgagaggaaacgtggaagatgagggagtgcatatccgcacacataagaccaggccgtatacaattccgcaacgcgtgctggaaaatttactggctcgaacacaggaattagggatatgccccagcgacttgcactacctacgggagacgcgcatagggcactttgaggacaatgatcagacggagatgtgccacgaatgaccatgcgtgtgcaatgatg

SEQ ID NO: 298693 - DNA, 322 bp, Zea mays
cggacgcatgggcggacgcgtgggcggacgcgtgggtgagaccaactagcaacatagaaggcacagtactgtacgaacaatgggagacaaaatattatgcctccttatgctcccagggctttctggatgcgctggtacggcgaccatattccctaaatgctcgcaagctcctatagcttccattcttacctcgtacactctcaccagcagcgtcttccgcatgcgaaaacccaatttttcaaccctacaggatccaacaggcaatcacagctggcatattacctttatcacgcttgttcctcccacaatcatcagccctatt

SEQ ID NO: 298694 - DNA, 447 bp, Zea mays
ggaagaacggccgacgacgcgtccgaccaagcagcatagcaaagcggaatccagttttatcaatagaacacaccggagaccaagatgttgtccctccttatgcaccttgctcttattacatgtgatgataacgcgacacatacccgtgaatgctgacaagctcgtatagcttacctctttccccgataccttccatcaattatagcttaactatgtgaaaacccacatcatcaaccatatctgcttgaacacgcaataggcgcaagcaacatacattaatcgcactcgttgcgtcaacaatcgccagccctatttttggtgcagtcatgggtacaaaccatcatggcacaccagctgcatgaactcgtgctacctgtgatcaaccaagtagctatagcaacctctatccctactctgcgaacaacaatttctttcattcaaccaact

SEQ ID NO: 298695 - DNA, 375 bp, Zea mays
cattatctatatctactccagagcgcagtacaacccgatcgacaccacgagggtggggctcgtggccctcgctctcctggctcttgctgcgagcgccacctccacgcatacaagcggccgttgcagctgccagtcaccgtcgccggctcatctaccggctcctgtgcatctgccacctcctgttcacctgccacctccggtgcatcttccaccgcctgtccaactgccggcgccggtgcacctgccaccgccggtccatgtgccggcgcctgttcatctgccggcgcctccatgccactaccctactcaaccgccccggcctcagcctcatcctcagccacacccatgcccgtgccaacagccgtatccaaaccc

SEQ ID NO: 298696 - DNA, 308 bp, Zea mays
ggactataaaccataaccactatatactgcagaacaaaccaaaacacaccctgaggggggaggttgttgctctctgtcttctgtctcttggttctagctccaactgcaagcatacaacatgcaagtgggggttgcagccaccaccgaccgttcatctaccatcgaccgtgcatgtgccatctgcgatttacctgtcacctgcgatgcatcttgcatcgccgatccacctgccaccggcggtccacctgccacctgcgatccatgtgccatctgccggttatctgtcatcggcaccatgccactaccct

SEQ ID NO: 298697 - DNA, 482 bp, Zea mays
  unsure (1)..(482): unsure at all n locations
cggccggaatcccggtcgaccacgcgncgaaggatcgccaacaaaacaacatggagatgggcattggtctcgtcgtgtgcctggctctgtcagctgccagcgcctctgcaatgcagatgccctgcccctgcgcggggctgcagggcttgtacggcgctggcgccggcctgacgacgatgatgggcgccggcgggctgtacccctacgcggagtacctgaggcagccgcagtgcagcccgctggcggcggcgccctactacgccgggtgtgggcagacgagcgccatgtaccagccgctccggcaacagtgctgccagcagcagatgaggatgatggacgtgcagtccgtcgcgcagcagctgcagatgatgatgcagcttgagcgtgccgctgccgccagcagcagcctgtacgagccagctctgatgcagcagcagcagcagctgctgggcagcccaggtctcaaccccatggccatgatg

SEQ ID NO: 298698 - DNA, 429 bp, Zea mays
  unsure (1)..(429): unsure at all n locations
accgggaaggaanggcgggaccgacgcatgcgttcgggtggtaatacaatcaacttattttatttaaagcggaggaaaaaccactccgtccggtgggggttgttgttggttgcctccctctccttgctctctctgggagcgcgacctacacgcatacatacaggcggtgggtgtggcagccaccgaccgcggttcatttactcgccgccgggcatctgtcacctacggttcacctgccacctgcggtgcatgtatcaccgaccgtccatctgtcggcggcggtccacctaccaccgaccgtccatgtgccggcgccggttgatgtatcgtcggcaccatgccactaccctactcaaccggcccggcctgagtcttatacacagccacacccatgcccgtgccaacagacggattcattcacgtgccagc

SEQ ID NO: 298699 - DNA, 331 bp, Zea mays
  unsure (1)..(331): unsure at all n locations
gggaagaancgccgggaccgacgcctcctgcccaactactcacctagagaactccactgtctacaaccaatcagcactgactaccaagagtgtagctactccttgctcttcttgctgttttagtgagcgcagcaaatgttttcacatatagacagcgctcacttgttgctagcaccattattccataatttctaccaccagttacttcaatgagctacgaacatcctgccgtgccagcctacatgctacaactagtgcttgcggcgagcgtattacaacaaccaattgcccaacatcaacaaccatccttgtcacatctaaacccacaaac

SEQ ID NO: 298700 - DNA, 295 bp, Zea mays
gaccaactagcaacatagaaagcacaatagcgtaccaacaatggcacgccaagcatatcaggcctccttatcgctccttgctctttgtgcaagtgctgctgccgggaccattttccaacaatgctcacagcctactatcgcttacctttttcctccgtacctctcaccagtgacgtgttgggtatgtgaaaaccgaatacttaaaccttatacgatacaacaggcaaccggcgatggcatcttacctttatcacccttgaccctccaacattcatcaatcatattacataataca

SEQ ID NO: 298701 - DNA, 392 bp, Zea mays
gcgagcggccgcacttttttagttaaatgcttcaatgcggaaaaatacttgatgattgccatgataattgttcattacggccattgttgacactgacacagccaaccatggggatgcctcacacattcttactcaactgttgccgttgaatgactcaactagatatgttgccagcggctctactacagcatataatttacttccattcaaccggcgtgctgcattgaacttctgatgcttattagcaacaacaataaccattcatgcaggatagttgctgcctacccccaataatgtcttccattcaatcaaatagcaataatgaactctgctgcttatttacagaagcaacaactactaccattcaggcagctagctgatgtgagccctgc

SEQ ID NO: 298702 - DNA, 352 bp, Zea mays
aacccgccccgcgctgccctcgtcccgatctctgacccaaatacccgatccaccatggccggaataaggcttacgctcgaggaacccgagatgcccgttggcacgccaccttgtcctcagctcccacactttgtcgtcgctgcaggcggtggtcaatacctttcattaatgaccgtttcagcatgtgaatacatagcccttgaaccctacaggcttcaacatgtaatcgcaacaagcaacttacctttatcacccatgttctttcaacaatagtaagccatatctttggtgcagtcattgttacacaccataatggcacaccagctgcagcaactcgtgctaccagtgatca

SEQ ID NO: 298703 - DNA, 306 bp, Zea mays
cagcattcaaaaacacaccaagcgaagatcactatcaacaacctaacaacaacggctgcgggaatattatttccttcttgcgctttttgccctattagtgagcgcaacaaatgcgttcattattccacagagctcacttgctccaagtgccattatttcacagttactcccacctgttactttaatgggcttagaacatacaaccgtgcaatcgtacattgctactaatagcgcttgctgactgcgtaatagaacaaccacttgctcaattgcatcatcaatcccggtgacttttgtacctacaaa

SEQ ID NO: 298704 - DNA, 357 bp, Zea mays
atgcggggtcttaaaaccaacagctttatctactgaattacgcacacgaacccgcgcgaccccaggagggtgtttcttatagcgctacctaacctgactctagctgccagcgccatctacacgcatgcaagcggaagctgtggctgtcagccacctaatcccgttgatgtacatacccctgtgcatatgtcacctactatccaacaggcacctaccgagcgtccttcaccaccggtgcacatgccgcatggggaaagggacgcgccctcgttcatggcattaaccgcggtgattgtgctgggtacccacaccattaccctactaaatcgccgcggcctaaggctcattcctagccat

SEQ ID NO: 298705 - DNA, 396 bp, Zea mays
gatcgacaccatgagggtgttgctcgtagccctcgctctcctggatctcgctgcgagcgccacctgcacgcatacaagcggtggctgtggctgccatccatcgccgccggttcatctaccgtcgacggtgcatctgccacctccggctcacctgccaccttcggtgcatgtcccaccgacggtccacctgtcgccgtcagtccacctgccaccggcggttcatgtgccgtcgccggttgatctgtcgtcgccaccatgccactaccctacttaaccgccccggccttagtctgatccccagacacacccatgcccgtgccaacagccgcatgcaagcccgtgccagctgcagggaacctgcggcgttggcagcaccgcgatcctgcgccagcgcgt

SEQ ID NO: 298706 - DNA, 366 bp, Zea mays
gacagcacaatagcgtaccaaccacggtagtctacctactttggctgcctatgcttggtggcctctctgcctgcgctgctactgcgaccattctgccacagtgctcacaagctcctatagcttacattcttccacagtacctcttaccagcggtgtcttctgaatgtgaaaacccaattcttgaaccctataagatccaacacgctatcggagctggcatgttacctttatcacccttgtaccttcaacactcatgagccctataacagcatttaccttttacgcatttatccgcacaaaacatctagtgacaacaactacaacaacttgtgctcgccaacctcgctggctactatcacaacaaca

SEQ ID NO: 298707 - DNA, 317 bp, Zea mays
gcgctgagaccatagacctatatctactatcatactgcagagcgaacacgaacgacaccaggagggtgagggtggtggtcctcgctctcctctctctggctgtgagcgccacctccacccatacaaacagaagctgcggctgccagccaccgccaccggctcatgtacagccaccggcgcatgtgccacctccagctcacctgccacctccagcgcatgtgcaaccgccagtgcaggtgccgccgccggtccaggtgccaccgccagtgcatgtgcatgcgccggttcatgtgcctgcgccaccatgccaataccct

SEQ ID NO: 298708 - DNA, 380 bp, Zea mays
acactaacaacctacaaacaacgagaaatccactaccaacaatacaacaacattggcgcgaagatatttttcctgcttggcgggctgctcttactgcatgtgttgctaacccaacaatacaccctcaaagctcacacgctcctatagcataccttctacccccataccttccatcaatgatagcttcagtatgtgaaaactcagctcttcaaccatatatgctccaacaagcaatcccagcaagcaacatacctttatcacccttgtttcaacaatcaccagccctatctttggtgcattcattggtacaaaccatcatggcacagcagctgcaacaactcgtgctacctgagatcaaccaagacgctctggcacacctt

SEQ ID NO: 298709 - DNA, 321 bp, Zea mays
aacaccaacaaacaacataaaaagtatcatccaataccaccacttgaacaacaatgtgtcagctatatattttccttgcttatgctccttgctctttctgtatctattacaaaccctacaattttccctcaatgctcacaatctactatagcttcccttcttccaccatacactatatcaatcatagctctattatgttaaaacccatctcttcaaccctataagctccaacaagtaatcgcagcacgctacatacctttatcacccttgattcaacaattgtcacacctatttttggtgcagtcattgctacagaccatc

SEQ ID NO: 298710 - DNA, 411 bp, Zea mays
  unsure (1)..(411): unsure at all n locations
aaggaannccccggccgacccacacatccttcaaaaacacaccaacctactctctctattttcaaccaaacaacaatgcctaccaacgggcgtatttcctactttctcttcctccccttttacagatcacaacaaattcgttcattattccacagacctcactaactcctacttccattattccacaattcctcccaccaattactttaatgctcttttaacatacatccaagcaagcctacatgctacaactagcacttgcgtctaccttcttacaacaaccaattacccaatttcaacaacaatactaagcacatctaaacctacaaaccatcgcaactcaacatcaacaacagtttattccattactgaaccacctatcctattttaaccctttcttctactttcaac

SEQ ID NO: 298711 - DNA, 340 bp, Zea mays
  unsure (1)..(340): unsure at all n locations
gacccacgcgaacacaggcaatcncacacgcatcttacctttattacccttgttcctccaacaaccatcacgcctattacatcaaatacctttcgcgcatttattaacacaaaacatcaatgcacaacaactacaacaacttgtgctaggaaaccttgctgcctactctcaccaacagcactttcttccattcaaccaactggctacattgaacactcctgcttatatccaacaacaactaccattcacacacttaattgctacctacactcaccaattacttccattcaaccaacttccagtattgaactctctttcttatttacaacaacaacagcta

SEQ ID NO: 298712 - DNA, 415 bp, Zea mays
ccgacgcgtacggacaccaactacaacatacaaagcacaatattttaccaacaatcgcagccaaaatattctgctcgacttatactcctggggcgttctgcaaatattgctaccgcaaccattttcccacaatgctcacaaactcctataacttcccttcttcccccatacctctcaccaacggtgtcttcaatgtgtgaaaacccaattattcaaccctacaagatccaacatgcaatctcaacaagcatcttaccattattacccttgttccttcaacaaccgtcagccctattacagcacttaccttttgtccatttggtggcacaaaacatcagtgcacaacaactacaacaacttgtgctaacaaacctttcttcatactctcatcaacataattttttttcattcaacc

SEQ ID NO: 298713 - DNA, 354 bp, Zea mays
gacaccaactaaccacataaaaagaccaacaatgtccccccaatggcagccccaacatagggtcggcttattctccgcgggcgctgctacagcaaccataccgcacccatgctcccacactgctaacaatctcctatatctcccctacttcccacatacctcttactagcggtgtgatcaccgagtgaaaacaccatacatcaaccatccagcatccaccacgcgcttctaacatgcatcataccattatcaccaacgatcatccaacatctgacatccctattacagcagtcacctattgtcccttaagaggcacacaacataacgacacaacaactacaacaacttgtgcta

SEQ ID NO: 298714 - DNA, 351 bp, Zea mays
  unsure (1)..(351): unsure at all n locations
ggaaggcncggccgcgcgtgcggcccatacaaagcacaatattgtaccaacaatttcatccaaactatttagcctccttatcgtcggtgatctttctgcaagtgctgctactgccaccatcttcccgaaatgctcacacgctcctatagcttccctacttcccccgtaccatatcaccagctgtgtcttccatatgtgaaaacccaattcttcaaccctacaggatccaacaggcaatcacagttagcattttacctttatcacccttgttcctacaacaatcattaaccctattacatcaattacctttcgtgcatttattggcacaaaacattatggcacaacatctac

SEQ ID NO: 298715 - DNA, 427 bp, Zea mays
  unsure (1)..(427): unsure at all n locations
acggcaacatacaaaccacaataatctaccaacttnttcacccaaaatattttccctggtgatgctttttttactctctgcacgcgctactacaacaaccattttccaaaaatgctcacaagctcctataactttccttcttcccccatacctctcaccaacattctattatgtatgtgaaaacccaatacttcaaccctacacgatccaacaagcaatcacagctggcatcttacctttatcaccctttttcctccaacattcatcatacctattacatcaattacctttatttcatttatttacacacaacatcatgtcacaacaactacaacaactttttctaacaaaccattctccctacatctagcaacatcattttcttccatccaaccaactaccttcatataacttttactttatattt

SEQ ID NO: 298716 - DNA, 277 bp, Zea mays
caaatacttctacctttaccattttccaacaattcttacaagctcctataacttcccttcttccccacaacctctcaccatcttaatcttcactatatcaaaacccaattcttcaaccctaaaccatccaacattcaatcccatatttcatcttacctttatcacccttgttcctccaacaatcatcatccctaatacatctcttacctctcgttcatttattttcacaaaacattaatgtacaacaactacaccaactatttgctaacaaaccctt

SEQ ID NO: 298717 - DNA, 238 bp, Zea mays
cgggcttgaaaccattagctttatctactccatatctcagaagaacccgatcgacaccactgtccgtttttatatcgagggcgtcggtctcctgcctctccatgcgaacgccaccttcacgcatacaatcggcggctgcggctgccagccaccttcgccggttcatctaccgacaccggtgcatctgccacctccagttcacctgccacctccagtgcatctaccaccgccagtccac

SEQ ID NO: 298718 - DNA, 329 bp, Zea mays
cagcgcaacaaacgcgtccataatttcacaatgctcactcagctcctagttccattattccacagttcctcccaccaattactttcaatggccttcaaacacccagctgagcaagcctatatgcttcaacaagctattgcggctagcgtcttacaacaaccaattgcccaattgcaacaaccaatccttggcacatctaacaatacaaaccatcgcaacgcaacatcaacaacagttactaccatcactgaaccacttatccattgtaaaccctgtctcctaccatcaacatcagcttcttgcatacaatccacttgctctatcaaacc

SEQ ID NO: 298719 - DNA, 448 bp, Zea mays
gcaacatacaaagtggaatccagtttcagctatagagcaacaatggagaccacgaggtctggcctacttatgctccttgctctttctacatgtgctgctaacgcgacaattttacctcaatgctcacaagctcctatagcttccctttttcccccataccttccatcaattatagcttcagtatgtgaaaacccagctcttcaaccatataggcttcaacatgcaatcgcagcaagcaacatacctttatcgcccttgttgtgtcaacaatcgccagccctatctttggtgcagtcattgctacataccatcagggcacaacagctgcaacaactcttgctacctgtgatcaaccaagtaactctggcaaacctttcatactactctgcgtaacaacaatttctttcattcaaccaactgtctacactgaaccctgctgcttatttgc

SEQ ID NO: 298720 - DNA, 365 bp, Zea mays
  unsure (1)..(365): unsure at all n locations
ggggtcttcanacnatnatctnnatntactttatagcttttaagaacccgatcgacaccatgagggtggtgctcgttgccctcgctctgctggctctcgctgcgagcgccacctccacgcatacaagcggcggctgcggctgccagccaccgccgccggttcatctaccgtcgacggtgcatctgccacctgcgggtcacctggcaactccggagcataatccaccgacggatcacctgccagcagctgggcacctgccaccgtcggagcatgtgccgcccgttgctgatccagcgccgtcagtttctgaggcaccaatgcagcccggcggcgacaccctacggctcgacacagtgccaggcgct

SEQ ID NO: 298721 - DNA, 397 bp, Zea mays
cttcataattcacctagcgttcaatttaacaacaaccgaacaacaatggggaccgggatattatcaatccttgcgcttcttgcgctttttgcgagcgcaacaaatgcgtttattattccacaatgctcacttgctccaagttccattattacacagttcctcccaccagttacttcaatgggcttagaacacccagctgcgcaagcctataggctacaacaagcaattgcggtgagcgttttacaacaaccaattttccagttgcaacaacaatccttggcacatctaacaatacaaaccatcgcaacgcaacagcaacaacaattcctaccaacactgatccacctaaccatggtgaacccttgacactacttgcaacagcatttgcttgcatcaa

SEQ ID NO: 298722 - DNA, 451 bp, Zea mays
  unsure (1)..(451): unsure at all n locations
gcgtccggcaacataaaaagcacattagngtaccaactttggctttcaaaatattttgcctccttatgctccttggtctttctgcaagtgctgctacagagaccattttcccgcaatgctcgcaagctcctatagcttgccttcttaccgcgtacctctcaccaacggagtcttcggtatgtgaaaacccaattcttcaaccctacaggatccaacaagcaatcgcagcttgcatcttacctgtatcacaccttgttcctccaacaatcattaaccgtatgacaacagctaccttccacgcatatattggcacaaaacatcagggcacaacaactacaacaactngtgctagcaaaccttgctgcctactctcagcaacagcagtttcttccattcaaccaactaggttcattgaactctgcttcttatttgcaacaacaacaactaccat

SEQ ID NO: 298723 - DNA, 421 bp, Zea mays
  unsure (1)..(421): unsure at all n locations
ggcccgacccacgcgtctcgtaacattgcaacattanaaagtgggaattttagttttctcacaatcgagcaacacatggcgacggcgagaggtgtttccctcccttatgcgtccttgcgtctttctgcactgtgttgcgtaacagccacacattttctccttaatgcgtcacaagactcctatacgcttcccttcttcccccataccttccatcaatgatagcttcagtatgtgaaaacccagctcttcaaccctataggctacaacaaggcaatcgcagaaggcaccatacctttatcacccttgtttaaacatcgccagccctatctttggtgcacacattggtacaaaccatcagggcacagaagctgtagcaacttcgtgctacctgtgatcaaccaagaagctcttggaaaacctt

SEQ ID NO: 298724 - DNA, 364 bp, Zea mays
  unsure (1)..(364): unsure at all n locations
agaccattagctttatctactccagagcgcagaagaacccgatcgacaccatgagggtgttgctcgttgccctcgctctcctggctctcgctgcgagcgccacctccacgcatacaagcggcggctgcggctgccagccaccgccgccggttcatctaccgccgccggtgcatctgccacctccggttcacctgccacctccggtgcatctcccaccgccggtccacctgccgccgccggtccacctgccaccgccgtccatggtgccgcgggggtcatctgcgcgcacatgcactacctactcaccgccnnggctagctatccagcaaccatgccggcacagcgatcaacccggcagtgagga

SEQ ID NO: 298725 - DNA, 240 bp, Zea mays
cagaccattagctttatctactctagagcgtataagaacccgatcgacaccatgagggtggggctcgttgccctcgctctcctggctctcgctgcgagcgccacctccacgcatacaagcggcggctgcggctgccagccaccgccgccggttcatctaccgccgacggtgcatatggcaactacgggacacctggcacgttccgtgcatctatcacggacgagcaacctggaagcggcc

SEQ ID NO: 298726 - DNA, 326 bp, Zea mays
agacagtgaacttcatttacatcaatacaccaacaatcgcgaccaacacctttaccctccggatggtccttgctctttgtgggtgtgttgctaacaccacaatctccactcaatgctcacaagcttgtatagcgttacctccttcccccataccatccatcaatcatcgctgcatgtgtgcgaaaaccgatcatcttcaaccttataggcatcaacaagcagacgtaccaatcaacatacctgtataacccttgttacaacaatctgcaggcctatctttggagcagtcattggtacaaaccatcatcgctcatcaactgcaccaa

SEQ ID NO: 298727 - DNA, 185 bp, Zea mays
gtacagacacccataactatatcacggttgcccaatggatgcttcaaactcctgcagcaacgagtggcatgtgatgcattggagcggacaaattatcacacgaaatgaagaaaaacgctcaagctgcaggagctactgctcattactacgaggatgagactgcttctactggcacatgtactgta

SEQ ID NO: 298728 - DNA, 537 bp, Zea mays
  unsure (1)..(537): unsure at all n locations
aattcaccgggctcgagcccagcgcgtcgcgatacttttgagccattcagtaaacactacctaagcgaagctacattagcaacaactctaacaacaatgggctggcaagnatattatcgcctccttgcgccttcttgcgcatttttgcgaagcgcaagcaaatgcgttcattanttccacaatggctttcacttgctccaagttccattattacacgagttcctcccaccaagtatacattcaatgggtcttcgaacaagcccagctgtgcaagcactatanggctacatacaagcaattgcggctgagcgtcttacaacaaccaatttcccagttgcaacaacaatccttggcacatctaacaatacaaaccatcgcaacgcaacagcaacaacaattcctaccagcactgagccacctagccatggtgaaccctgccgcctacttgcaacagcagttgcttgcatcanacccacttgctctggcaaacgtagttgcaaaccagccacaacaacagctgcacagtttttgcagcgc

SEQ ID NO: 298729 - DNA, 419 bp, Zea mays
attttgaacactcaaaatcacaccattcgaaccacatatgctacaacctatcaacactgggtgcgaggatattatccctccgtgcgcttattgcgctttttgcaagcgcaacaaatgcgtacattattccacaatgcttacttgctccaagttccattattacacagctcctccaaccagttacttcaatgggcttcgaacacccacctgtgcaagtctataagctacaacaagcaattgcggcgatgcgcttacaacaaccaatttcccagttgcaacaacaattattggcacatctaacaatacaaaccattgcatcgcaacagcatcaactatttctaccaacactgagccatctagccatggtgaaaactgccgcctacttgcaacagcaagttgcttgcatcaaacccacttgc

SEQ ID NO: 298730 - DNA, 369 bp, Zea mays
atttagtgcattcagaaccacgcgaagcgaagcacattcactgcaacctaactgcattggagtgcggagatattatcctgcgttgcgcttcttgcgctttttgcgagcgcaacaaatgcgtacattataccacactgctgattcgctccaagttacatcattacacagatcctcccaccagttactgcaatgggcttctaacaccgagctgtgctagcgtatacgctacaacaagcaattgcgcggagcgtattacaacaaccaatttccgagatgcaacaactagtcttggcacatctaacaatacataccatcgcaacgcaacagcaacaacatttcctaccagaactgagccacctagccatggcg

SEQ ID NO: 298731 - DNA, 386 bp, Zea mays
attttgatcattcagaagcacgccatgcgaagcacattaacaacaacctagcaacagtgggtacgcggacatgatcgcgccgtgcgctacttgcgcgttttgcgagcgcaacaaatgcgttcattattccacactgctgactcgctccaagttccatcattacacagatcctcccaccagttactgcgttgagcttctaacacccagctgtgcaagcgtatacgctacaacaagcaattgtgcttagcgtaatacaacaaccaatttccgagatgcaacaacaattcttggcacatgtaacaatacaaaccattgcaacgcaacagcaacgacaattttctaccatcattgagccacctaaccatggtgaaccctgccggctactt

SEQ ID NO: 298732 - DNA, 239 bp, Zea mays
atgtttatcattcacaaacacaccatgcgatgcacactaccaacaagctaacaacagtggcgtccaagatatgagccctccttgcgcttcttgccgcttcagtgagcgcaacaaatgcattcattattccacagggcgcacttgcttctagtgccattatttcacaattccttccaccagttacttaaatgcgctttgaacatgcatctctgctagcctacacgctacaactagcgctt

SEQ ID NO: 298733 - DNA, 167 bp, Zea mays
attctgaacattcagaaacacaccaagcgaagcacattatccacagcctaacaacattggcggccgagatattatccctgcttgcgctgcttgcgctatttgcgagcgcatcaaatgcgtatcattattacacaatgctaacttgcttcaagttccattattacaca

SEQ ID NO: 298734 - DNA, 326 bp, Zea mays
agcaacatagaaaggggaatccactagcaacaataaaccaacaatggagaccaagagatgggccctccttatgctccgtgctgtttctacatgtgttgctaacgcgacaatataccctcaatgctcacaagctcctatagcttccctttttcccccataccttccatcaattatagctacagtatgtgaaaacccaactcttcaaccatataggcttcaacaggcatttgcagcaagcagcatacctttatcgcccttgttgtgtcaacaatccccagccctatctttggtgcagtcatcggtacaaaccaaaagggcacaacagc

SEQ ID NO: 298735 - DNA, 340 bp, Zea mays
gccgaaagatgtaccaacggcagcacatcagccgccgtcgccatcccaataccctactcagccgggcccgcctcagcctcaggctgagtgcaaccacgccagtgccaacaaacgcatcacaagcccgtactagctgcacggaacctgcagacctggcagcaatcatagcctgagccagtgcaaacagatcctgacgcatcaatgcactccgacagggacgccctacaagcaacataactttatcacccttggttcaacaatcgccaggcctatctttggtgcagacattggtgcaaaccatcagggcacagcagctgcagcaactcgtgctatctgtgat

SEQ ID NO: 298736 - DNA, 145 bp, Zea mays
accattatatctatctactccagagcgcataataacccgatcgacaccatgagggtggtggtcgttgccctcgctctgctggctctctatatgagctccacctccacacatacaacctgcgggtgcggctgccagtcaccgtcgc

SEQ ID NO: 298737 - DNA, 257 bp, Zea mays
caccggagttaagcctgtgccagcagttcggatcctgcagcgtcagcagcgtacggagaccggtcctgggccactgcgtcgagttcctgaggcaccagtgcagcccggcggggacgccctacgggtcaccacagtggcaggcgcttcagcagcagtgctgccaccaaatcacgcacgtggaacccctgaaccggttccatgcgacatacagcgtggtcctgcagtacttcctgcagcaacagccagaaggcgagctc

SEQ ID NO: 298738 - DNA, 304 bp, Zea mays
  unsure (1)..(304): unsure at all n locations
gcagcattcaaaaacacaccaagcgtagcgcactagcaacaacctaacaacaaaggctaccaagatattagctccttcgtgctgcttttgcccttttagggagcgcaacacatgcgtacatatatcacacagtgcttacttgttcctagcgccattattgcacaattactcccacccggtacttcaatgggcttcgaacatncagccgtgcaagcgtacatgctacaactagcgcttgcggcgagcgtggtacaacatccaattgcccaatatgtacaacaatccttggatcatctaaacctac

SEQ ID NO: 298739 - DNA, 404 bp, Zea mays
gccgtaccggtcccgattcgacgccacgcctccggcgtacagcggcagtgcgtaaagaggatcgtcgaccagaacaagctgaagatggtcatcgggctcggggtgtgcctggctctgtcagctgccatcgcctctgcaatgcaaatgccctgtccatgcgcggggctggagggcttgtacggcgctggcgccggcctgacgacgatgatgggcgccggcgggctgtacccctacgcagagtacctgatgcagcacgcagtgcaccccggtggcggcggcgccctactacaccgggtgtgcgcagacgagcgccatgtaccatgcggtccggcaacagtgctgacagcagtaaatgaggatgatggacgtgtcatccgtggcgcagcagatgcagatgatgatgc

SEQ ID NO: 298740 - DNA, 388 bp, Zea mays
gaccgtcacaccattagctttatttactccagagcgcagaacaacccaatcgacacgacgaggttgttgctcgtttcgctcgctctcctggctctggttgcgagcgccacgtccactcatacaatccgaggctgcggttgccatccaccgccgccgggtcatctaccgtcgccggtgcatctgacatctccggttcagctgacacgtccggtgcatatcatatcgccggtccagttgacgtcgccggtccagctgacatcgcaggttcatgtgccgtccccggttcatttgatgtcgcgaccatgccattacactactcaactgaaccgccctgagcttaatcccatcccaaaccaatcccagtgccatcagacgaatccaagccagt

SEQ ID NO: 298741 - DNA, 406 bp, Zea mays
gcgcacaataacccgatagacaccatgagggtgttgctcgtagccctcgctatcctggctgtcgctgtgagcgccaccttcacgcatacaagcggcgggtgtggctgtcagccaccgacgtcggttcatctaccgccgccggggcatttgccacctccggttcacctgcaacctccggtgcatgtcccaccgccggtccagctgacgtcgccggtccagctgatatcgccggtccatgtgccgtcgccgggtcatttgacgtcgccaccatgccactaccgtactcaaccggtcatgtctcagcctcatcatgagacacacctatgcccgtgccaacagccgcatccaagcccgagccagctgcatggaacctgcggcgttggcagcacccccatcctgggccagt

SEQ ID NO: 298742 - DNA, 333 bp, Zea mays
cgcaacatcaacaacagttcctacttgcactgagccacctagacaaggcgaaccgtgacgggtacttgctacaacaggtgcttgcattcaacccacttgctctagcaaacgtagttgcaaaccaccaacaacaacatctggatcaatttctgccagcgcttattaaaataggcatggggaaccctgccacctacctacaacaagaacaactggtttcatctataacgctcggtgtagccaatgcacctacatacctgtaacaagaattgttgaaacagattgtaccatctattactcagctagctgtggcaaaacctgatgcctacttgcaac

SEQ ID NO: 298743 - DNA, 255 bp, Zea mays
  unsure (1)..(255): unsure at all n locations
caacaagcaacatataaagtggaattcagcagcaacaatagagcaacaatggagacgaagatattttccctccttatgcgccttggcttttctacatgtgttgctaaccccacaattttccctcaatgctcacaagctcctatagctntcctttttcccccataccttacagtaattatagcttcagtatgggaaaacccagctctctaaccatataggcttcaacaagcaatcgcagcaagcaacataccttta

SEQ ID NO: 298744 - DNA, 431 bp, Zea mays
  unsure (1)..(431): unsure at all n locations
gggatcagcgtgaacgagacatacgggacgtacgtgcgagggatgcagcaggacgtgttcctgaagcggaacggcaccaactacctcggcaaggtgtggcccgggtacgtctacttcccggacttcctcaacccgcgcgccgccgagttctgggcgcgcgagatcgccctgttccggcggacgctccccgtcgacggcctctggatcgacatgaacgaggtctccaacttcgtcgacccggcgcccctcaacgcgctggacgacccgccgtaccgcatcaacaactccggcgtgcanccgcccatcaacaacaagaccacgccggcgtccgcgtgcactacggcggcgtgcgcgactacgacgcacacaacctttacggtttcttggaggcgcgagccacgcacggagcgctgttcgccgacaccggccgc

SEQ ID NO: 298745 - DNA, 188 bp, Zea mays
ccgactagcaacatagagagcacagtagtgtaccaacactggcagccaaaatatttagcttgcatgtgctcacttgggcttctgcatgtgctgctaccgcagccatcttgcgacaatgctcagcagcacctatggcttcattttttcgcccatacctgtcaccagcggtgtcgtcagtacgagaaaac

SEQ ID NO: 298746 - DNA, 315 bp, Zea mays
cggggtcgagggacgcgtcacgcgtacggccacgcgtgcgagtataggactgtagaaacacaccaagcgaagatgactagcgaggaccgtgacgacaagtgctaccgagatatgatacctcctttgccatgttgcggctttggcgagcgccacaaatgcgtgcattattccacaatgctcacttgctcgtagttacattattccacaggtactccgaccagttactttaatggccttaggacacccaagtgtgcaagcctataggctacaaccagctattgcggcgagcgtcttacaaccaccaagtgcccaatt

SEQ ID NO: 298747 - DNA, 286 bp, Zea mays
cccacgcgtccgaccacgcgtacggttatagatcgcgagcggacgcccttttttttttttttgttggaacaataattattatattatatttaaatgggctattcaagccattgctgagactgacactgccacccatggtgatgcgtgatacattattactaaatcattgccgctaaatgaattaactagcgatactagacagcggctgtaataaagcacataagctagtctatggggtacaccaactgaatgaagtgagctatgtacaacatctaaaacaacaaca

SEQ ID NO: 298748 - DNA, 239 bp, Zea mays
caccttgcaacacacaccgtgggattcgctctcaacactacctcaccactggggacgccaagattttacctcctcatgcgcctcgctccctcttcatgagctgctcacacgacaatattatttcacagctcacaagctcctatagctgccttatttcacacataccttccctcaattattgcttgggcttgtgacaacccagctttccaaccatctaggcttaaacaagccatggcggc

SEQ ID NO: 298749 - DNA, 351 bp, Zea mays
gataatctgagcattcacaaacacacccagccaagctcactaccatcagcctcacgacattggctaccatgatgctatgcgtgcttgcgcttctcgcgctttacgcgagcgcaacacatgcgtgcattattgctccatgctcacttgctccaagttccattattacacacgccctactaccagttgctcgaatgggcttgcaacacccaggtgtgcaagcctctatgctacaacaggcctttgaggatagcgtttcacatcagccaattttccagttgcgacatctatccttgcaacatataacaacacaacaccatacgcaacgctactgctagcacagttcctaccagc

SEQ ID NO: 298750 - DNA, 206 bp, Zea mays
cgggacgaccgcacgcgtgcgcccacgcgtacggcggcagtgcgtatagaggtatcgttaacagaacagcatgaaaatggtcagcgttgtcttcatgtgcctggctctgtcaactgccaacgcctctgcaatgcatatgccctgcccctgcacggggctgcagggcttgtactgtgctggctccggactgacgactatgatgggcg

SEQ ID NO: 298751 - DNA, 219 bp, Zea mays
gacgaacatagatcatataaagcgggataccttattgacactacaacaacaatggagacggggacattttgcctcgctatgcgctgtgctctttctacaagtgtggctaacgcgacaattttacctctatgctcacacactcctatatatgttctttttacaccatacctttcatgaagtatagagttagaatgtgaaaaaccacctctttaaccatat

SEQ ID NO: 298752 - DNA, 441 bp, Zea mays
ccaacaagcaacatagaacgtggaatgcacaatcaacaatcgagcatcaatggcgaccaagatattctccctacgcatgctccttgctctttctgcatgtgttgctaacgcgacaattttccctgaacgctcacaagcttctatagctttccttcttcccacataccttccatcaatgatagcttcagtatgtgaaaacccacctattcatccctataggctccaacaagcaatcgcagcaagcaacataccttaatcacccttgtttcaacaatcgccagccctatctttggtgcactcattgggacataccatgagggcacaatagctgcagcaactcgtgctacctgtgatcaaccaagtagctctggctaactctttatgctactgtcagcatcaacaatttctttcattcaaccgactgtctacattgaaccgcgc

SEQ ID NO: 298753 - DNA, 353 bp, Zea mays
tcgattgagaccaactagcaacatagaaagcacaatagtgtaccaacaatggcagccaggggattttgcttccttatgctccttggtctttctgcaagtgttgctaccgcaaccattttcccacaatgctcacaagctcctatagcttcctttcttctcccatacctctcaccagcggtgtgttcaaggagaaacaacccaattgttataccctaaacgaaccaacaaggcaatccaacaagcatcttaccattatcacgctggttccttcaacaacacgccagcctattaacagaattacctttggtccatttgggggcacaaaaaatcaaggcacaacaactacaacaact

SEQ ID NO: 298754 - DNA, 438 bp, Zea mays
attgagaccaactagcaacatagaaagcacaatagtgtaccaacaatggcagccaaaatatggtgcttccttatgctccttggtctttctgcaagtgttgctaccgcaaccattttcccacaatgctcacaagctcctatagcttcccttcttcccccatacctctcaccagcggtgtcttcaatgtgtgaaaacccaattgttaaaccttacaggatcaaccaggcattcgcaccaggattttaacaatattaaccttggttcttccaccaccggcaagccttatacaacaagtacctttggtccatttgggggcacaaaaaattaaggcacaacaactaccacaacttgggcttacaaaacttggttgataattttaacaacattaagttctttcattcaaacaactggcttgattgaactttgctggttatttgc

SEQ ID NO: 298755 - DNA, 376 bp, Zea mays
agcaaagcggcagtgcgtagagaggatcgtcgaacagaacagcatgaagatggtcgtcgttctcgtcgtgtgcctggctctgtcagctgccagcgcctctgcaatgcacatgccctgcccctgcgcggggctgcatggcttgtacggcgctggcgccggcctgacaactatgatgggcgccggcggtctgtacccctacgcggagtacctgaggcagccgcatggcagcccgctggcagcggcaccctactacgctgtgtgtggggaaaacaaatccattgtcccaaccgttccggaaccatgcttgccagcaccgaatgaggatattggccgggcataccgcaggccagagctggaaattaatattcaacctggg

SEQ ID NO: 298756 - DNA, 348 bp, Zea mays
  unsure (1)..(348): unsure at all n locations
gagcaatgacctgaatgaacaattgaaatgaaaagaaaaaagtattgttccaaaaaaaaaaaaaaagggcggcccgacggcgacgccctactgctcgcctcagtgccagtcgttgcggcagcagtgttgccagcagctcangcaggtggagccgcagcaccggtaccaggcgatcttcggcttggtcctccagtccatcctgcagcagcagccgcaaagcggccaggtcgcggggctgttggcggcgcanatagcgcagcaactgacggcgatgtgcggcctgcagcagccgactccatgcccctacgctgctgccggcggtgtcccccactgaaaaaactatgtgct

SEQ ID NO: 298757 - DNA, 240 bp, Zea mays
aaatactgatctcactgatccagtatggctatagcatttgctgtcacaccaagggtatggggggcccacctggtgactctctgtctatcactcctatgcgctgtcgtcggcccggacgtcgtgcaaaactgttgctgccagccaaacgtatgctgcagcaaggttggctactgcggtacgaccgacgagtactgcggcgacagatgccaatagggcccgtgccgctcggtctgtggcggc

SEQ ID NO: 298758 - DNA, 450 bp, Zea mays
caactagcaacatagaaagcacaatagtgtaccaacaatggcagctaaaatattttgcctccttatgctccttggtctttctgcaagtgctgctacggcgaccattttcccacaatgctcacaagctcctatagcttcccttcttcccccgtacctctcaccaacggtgtcttcggtatgtgaaaacccaattcttcaaccctacaggatccaacaggcaatcgcagctggcatcttacctttatcacccttgttcctccaccattaataagccttattacagcagttaccttgggggcattaattggcccaaaaaataagggcccaccacttccaacaactggggttagcaaacttggttgcttattttaacaacaacaagttttttcatttaacccactaactggattggactctgcttcttatttggaacaacaacaactaccattt

SEQ ID NO: 298759 - DNA, 395 bp, Zea mays
caacaagcatcatataatgtggaatacagtttcaacaatttatcaacaatggcggccaaggaggttgggcatccttatgctccttgctctttctccatgtgttgctaacgcaaccatttttcctcaatactcacaagctcctatagctgcccttctttctccatacctttcattaatgaccacttcagtatgttaaaacccatcccttctaccctacatgctcctacaagcaatggcaacaagcaactaacctttatcacccctgttttttcaacaattgtcagccctttatttggtgcagtcatcggctcaaaccatcacggcacaaacagctgcatatactcgttctaccattgaatagccaattatcttttggcaaacctttttccctactc

SEQ ID NO: 298760 - DNA, 233 bp, Zea mays
aaaacggcagtgcgtagagaggatcgtcgaacataacagcatgaagatggtcatcggtctcgtcccgtgcctggctttgtcagctgccaacccctctgcaatgcagatgccctgcccctgcgcggggctgcagggcttgtacggcgctggcgccagcctgactacgatgatgggcgacggcgggctgtacccctacgcggagtacctgatgcacccgcacggcagcccgctgg

SEQ ID NO: 298761 - DNA, 386 bp, Zea mays
aatattttgagcattcataaacacaccaagcgaagcgcactaccaacaacctatcaacaatggagaccattatattatgcgtgcttgcgcttcttgcgctttttgcgagcacaacaaatgcgtccattattgcacaatgctcacttgctcctagttccattattccacagttcctcccaccagttacttcaatggccttcaaacacccatctgtgcaagcctataagctacaacaagcgattgcagatagcgtcttacaacaaccaattgcccaattgcaacaacaatccttggcacatctaacaatacaaaccatagcaacgcaacagcaacaacagttcctaccagcactgagccacctatacatggtgaaccctgtcgcctac

SEQ ID NO: 298762 - DNA, 342 bp, Zea mays
aggactcgtgggtgggtcttcagaccattatctttatctactccacagcgcagaataaggggatctacaccatgagggggctgctcgccgccctcgctatccagactctcgctgcgatcaccacctacacgcatacaagcggcagctgcagttgtcaaccaccgccgccagttcatataccaacggcggtgcatctgccacctgcggttcacctgccacctccggagcatattccagcgacggtcctactaccaccgactgtccacctgccaccaccagtccatgtgccatcaacaattcatatgacggcgacaccatgacaataccctactcaaccgaccc

SEQ ID NO: 298763 - DNA, 326 bp, Zea mays
acgattgataccaactagcatcatacatagtgtagtacaatagcaacatcttaccaccaaagagagcctttattataagggtgggtaccctccctactctttctgcaagtgttgctaccgcgactattatcccactatgctcacaacaacacctaattattgagacagccgctatattaaaatacccatctacacaatcctactagctacaagtggccatcacaacaatcatcttacagccgctagcattgtctgaccaacaaccacattctctattgcaacaaccattcttaacgaatctatatctacaaagaatcgcagctcaa

SEQ ID NO: 298764 - DNA, 446 bp, Zea mays
gcgagccgcgcgcattccccgtcccgtgccaccggaccaggggaaggaggacacacatgtcgtcgtctctctctccagcggcggcagccgcgcccctggatctggacggcaactccgtcgcgcccctcaccatctgcatgattggcgccggcggcttcatcggctcccacctctgcgagaagctcatggccgagacgcgccatgtcgtcctcgccgtcgacgtatactgcgataagatccgccacctcgtcgaccccgcgccgccgcacctcgcggagcgcatctccttccaccgcctcaacataagaatgactcagctcgaggcctataagatgcgactgcataactgcggtttgacgcgggatcaaccccctacacattcagactatatgctcaggcagctgtcagaagaggtatccttcctcagcatgagacatggtctccaa

SEQ ID NO: 298765 - DNA, 407 bp, Zea mays
acggaaacacaccaagcgaatcgcactagcaacatcctaacaacaccggctaccacgatattaaacctcctttcactccttgcccttttacctagcgcaacaaatgccttcattattccacagtgctcacttgctcctagtgccattattccacatttcctcccaccttttacttcaataggcttcaaacatccaaccgtgcatgcctacaagctacaactaacgcttgccgcaagcgtcttacaacaaccaattgcccaatttcaacaacaatccttggcacatctaaacctacaaaccatcgcaacacaacaaaaacaacagtttatgccatcactgaaccacctaaccgctatgaaccctgtcacctacttgcaacagcagctacttgcatccaacccacttgc

SEQ ID NO: 298766 - DNA, 377 bp, Zea mays
cgcgtacgagacgattatctttatctactccacagcgcatttataacccgatcgacaccatgaaggagaggatcgtttccctcgctgggcgggctctcgctgcgagcgccaccttcacgcatacaagcggcggctgctgctgccatccaccgtcgccggttcatctaccgccgtcggtgcatctgccacctccggttcacctgccaccttctgtgcatctcccaccgccgatccacctgtcgtcgccaggtccatctgccaccgtcggttcatgtgccgtcgcctgttcatctgccgtcgtcaccatgccactaccctactcaaccgccccggcctcagtcttattcccagccacacccatgcccgagccaacagtc

SEQ ID NO: 298767 - DNA, 477 bp, Zea mays
attcataaacacaccaagcgaatcacattatctacaacctaacaacaatggctaccaagaggtgatccctccttgcgctgcttgcgctttttgcgagcgcaacaaatgcgttcattattccacaatgctcacttgctccaagttccattattacacagttcctcccaccagttacttcaatgggcttcgaacacccagctgtgcaagcctattagctacaacaagcaattgcggcgagcgtcttacaacaaccaatttcccagttgcaacaacaatccttggcacatctaacaatacaaaccatcgctgcgcatcagctacatcaattcctaccagcactgagccacctagccatggtgaaccctgccgcctacttgcaacagcaattgcttgcatcaaacccacttgctctggcaaacgtatttgcaaaccatgcacaacaacagctgcaacagtttctgtcaacgcttagtcaac

SEQ ID NO: 298768 - DNA, 278 bp, Zea mays
acgcatcaagtaacccattacgcacatcagattacagcactcgacaccatgaaggtgccgatcgatgcgctcgctctcctggctctcgctgcgagcgccacctccatgcacacacacagctgatgaagctgtaaaccaccgttgcatgcacagacaccgtactatatgccgcctccactatatgttgacccgccacatcagccgcaaccatgagaatacctcaatcaaccaccgcagctaaacccgtgacagcagttccgatcctgcggcgatggcag

SEQ ID NO: 298769 - DNA, 387 bp, Zea mays
  unsure (1)..(387): unsure at all n locations
cccacgcgtccggctttatctactacagagcgcagaagaacccgatcgacaccatgagggtgttgctcgttgccctcgctctcctggctctcgctgcgagcgccacctncacacatacaagcggcggctgcggctgccagccaccgccgccggttcatctaccgccgccagtgcatctgccacctccggttcacctgccacctccggtgcatctcccaccgccggtccacctgccgccgacggtccacctgtcaccgtcggtccatgtgccgccgtcggttcatatgccgccgccaccatgccactaccctactcaaccgaccctgactcagtctcatcctcagncacacgcatgcccgtgccaacagccgcattcaagcccgtgcc

SEQ ID NO: 298770 - DNA, 311 bp, Zea mays
ggtcttcagaccattagctttatctactccagagcgcagaagaacccgatcgacaccatgagggtgttgctcgttgccctccctctcctgggtctcggtgcgagcgccacctccacgcatacaagcggcgggtgccgctgacaaccaccggcgaccgttcatctaccggccgcggagcatctgccacctcccgttcacctgccacctccggtgcatttcccacccgcggtgcacctgccctcgacgggccacctgccaccgccgagccatgtgtcgtcgccagatcatgtgccggcggcctcatggcacta

SEQ ID NO: 298771 - DNA, 251 bp, Zea mays
  unsure (1)..(251): unsure at all n locations
cctgcaggtaccggccgaattccggtcgaccagcgtcgccaccgtncggcgtgcaggatctcgtttcgcgcactcacaagcccggagacccatctcgaggacgtgctacaaagatccaccccgtgaggcaacctcgggtcggcgcctaccggaccgaggaagggaagcccctagtgctgaacgtggtcaggcgcgccgagcaaatgttgatcaataatccgtcacgtgtcaaggagtacctaccaatcacc

SEQ ID NO: 298772 - DNA, 350 bp, Zea mays
atattgatcattaaaaaacacaccaagcgaagcggactagcaacaacctaacaacagagggtaccaacatattagccctccttgaacttgtagaactgttctggagcgcaacacatgggtcgattattccacaatggttacttacttctactaccatcattgcacaaattctcccagcagttacttccatgggctacgtacatgcagccgcgcaaggcttcaggctacaactagcgctcgcggtgagcgtctgacaacaaccaattgtccaattgcaacaacaatccttggcacatgtaaacctacaaaccatcgcaacgcaacagcgacgacagtttctgccatcactg

SEQ ID NO: 298773 - DNA, 338 bp, Zea mays
gatgtacaacatctagagctagctgaccttgctggctactcttagcaacagcagtgtcttcgattcaaccaactacgctgcacttgaactcgtggttccttattggcaacaacaacaactaccatttagccaactacctggatggtaccctcagcattattttgcattgaaccaactggaataattgaactctcctgattatttacagcagcaagaactactagcattcagccagctagcttgggcgggctctgctacctgcctgatacagccacgagaggtgccgatctaccagctctctgctactaacgctggcaccttcttacaactgcaacaat

SEQ ID NO: 298774 - DNA, 279 bp, Zea mays
ctcgcaacatagaaagcacaatagtgtaccaacaatggtagtcaaaacatctagcctgcgtaagcttcttggtcattctgcaagtgctgctacggcgaccattatcccgcaatgctcgcaagctcctatagcttcccttgttgccccgtacctctaaacagcggtgacctccgtatgtcgaaaacccaaacgttcaaccctacaggatccaacacgaccatcgagacagcatctcaactttatgacccttgatcctgcaccaatgattagagctcttac

SEQ ID NO: 298775 - DNA, 441 bp, Zea mays
cttcacgactccggtcggccgtcagctcgattcgccttcccccccacctcccccgccctccgatgacggggcgtccgtgggcgggcgcgccgccgccgcctcttcctctcgccgtcgccgtgggcgtcgcggcgctgctgtcctgctgctgctgctgctgctgccagggcgcgtcggcgacggcggcggcgtcgttcggcgacaacttcgagatcacgggcgccgaggaccacgtgaagacctccgccgacgggcagacctggtacctatacctcgacaacaagacaggcgtcgggttccagacgaagcagcgctacctgttcggctggttcagcatgaagctgaagctggtgggcaacgactccgcgggcgtcgtcaccgcctactacatgtgctccgacctggacgcggcgcccctgcgcgacgagctggacttcgagt

SEQ ID NO: 298776 - DNA, 363 bp, Zea mays
gaccaacaagcaacatagaaagtggaatccagtaccaacaatagagcaacactggcgaccaagatattttcccttcttatgctcgttgctctttatgcatgtgatgctaacccaacaattttccctcaatgctcacaagctcgtatagattacattctttccccgtacattccattaatgatagctgcagtaagtgaaaacacacctctccaccctataagctccaacgggcggctcgcagaatggacaatacctttctcactcttgcttcaacaatacgtcagtcctatatttggtgcactcataggtacaaaccatcaggggacagacgactgagcaactggtgctacctgtgatcaacca

SEQ ID NO: 298777 - DNA, 188 bp, Zea mays
  unsure (1)..(188): unsure at all n locations
gtgggaaccaccaggcacataaaaaggggggaatccagtngccaccaataaaaccaccaattggggaaccaagatatttttcccctccttatgctccttgccttttcaaaaggggtggctaacccgaaatttttccctcaatgctaacaagctcctttagcttccctttttcccccataccttccata

SEQ ID NO: 298778 - DNA, 230 bp, Zea mays
cccacgcgttcgaagtgattctagttcagagaaagaaagaagctgacaatgagaagcatgtgaggcgcgtttgctgtgaagtggttcttgtgaggcttaggaattcacccttattttcttccccttatagaaatggagatggtcctactgtcttagagtcctatctggcttgggagtgggccggcgctcattttttcacccaccggcgatggcggatgaagcgggcctta

SEQ ID NO: 298779 - DNA, 344 bp, Zea mays
  unsure (1)..(344): unsure at all n locations
gggtcttcagaccattagctttatctactccagagcgcagaagaacccgatcgacaccatgagggtgttgctcgttgccctcgctctcctggctctcgctgcgagcgccacctccacgcatacaagcggcggctgcggctgccagccaccgccgccgggtaatctaccgccgacggtgcatctgccacctgcggttcacctgccacctccggtgcatctcccaccgccagtccacctgccgccgcgggccacctgccaccgccgtccatgtgccgccgcggtcatntgccgccgcacatgcactacctactaaacgcccggcctagcccatcccagcacaccat

SEQ ID NO: 298780 - DNA, 326 bp, Zea mays
  unsure (1)..(326): unsure at all n locations
tcgttctagatcgcgagcggccgccctttttttttttttttttttttcatcatttttttttttgatggtttttttttttgtgggggggcgcgttttgcgagcgctacaaatgcgcgcacaatatacaaaacttatttgctcctaggtccattatttcnaatatttacaaacaattacttgaaggggcttataacacccctcttggctagcctataagctacaacaaccgattgcggcgagggggttacaacaactaattgtccaattgtaacaacaattcttggcacatcttacaatacaaaccatcgtaacaaaacaggaacaac

SEQ ID NO: 298781 - DNA, 204 bp, Zea mays
tccagatcagcaaaaccgcagtgcgtaaaaaggatcgtcgaacaaaacaacatgaaaatgggcatcggtctcgtcgtgtgcctggctcttgtaactggcaacgccttttgaatgcaaatgccctggccctgcgccgggctttaaggcttgtaccgggcttgggcccggcttaacaccattattggggcccgcgggctttacccc

SEQ ID NO: 298782 - DNA, 207 bp, Zea mays
  unsure (1)..(207): unsure at all n locations
aagcgaaacacattagcaacagcctaccaacaatggctaccaagatatgatccctccgtgcgcatcttgcgctntatgcgagcgcaacacatgcgtntattattccacaatgctcactggctccaagttccaatattacacagcttgtcgcatcagctacttcaatgggctttgaacacccagctgtgcaagcctataagctacaac

SEQ ID NO: 298783 - DNA, 348 bp, Zea mays
gcgccggcgggctgtacccctacgcggagtacctgaggcagccgcagtgcagcccgctggcggcggcgccctactacgccgggtgtgggcagacgagcgccatgtaccagccgctccggcaacagtgctgccagcagcagatgaggatgatggacgtgcagtccgtcgcgcagcagctgcagatgatgatgcagcttgagcgtgccgctgccgccagcagcagcctgtacgagccagctctgatgcagcagcagcagcagctgctggcagcccagggtctcaaccccatggccatgatgatggcgcagaacatgccggccatgggtggactctaccagtaccagtacc

SEQ ID NO: 298784 - DNA, 396 bp, Zea mays
tttagatcgcgagcggccgcccttttttttttttttttttttttttttttttttttttttttgtttttttttttttttttttttttttttttttttttttttttggaaaaaaacttttttttttttatttaaaatggtcattaagggaattgtttaaactgaaactgccacccatggggatgcgggacaaatttttacttaattatcgccgttaaaagacttaaatagcttgctagccagcggtttttctaaaacaaattttttttttaaggggggaaaccccccgcaacaacttaagggcatggaattggttttttaaagccaaaaattgcccgaagttgttgtgcttttttggccgcaaaaaaccccggaaactgggcctttttagggtttttt

SEQ ID NO: 298785 - DNA, 365 bp, Zea mays
attttgagcattcagaaacacaccaggcgaacggcactaccaccgacctaacaccaatggctaccaaaatattacccttccttgcgctttttgcctttttgtgagcccacaaaagccttcattattcacatggctactgctcctaggcatattcacagtcctccacagtactcatggcttgacacctactggcagccactgacacaggctgcggaggttacacaccatgccaatgacacatctgccattacatcagcatacacgacacacacagtctacacctggcactacctgggaactgcgctatgagacagtgtgctcaccactgttgggacgagtgaacacacacacgtcaaatttgcacc

SEQ ID NO: 298786 - DNA, 360 bp, Zea mays
agaccattaacttaatctactacagagcgcacaataacccgatcgacaccaacaagagcggtggggttgcccacgctcgtggggctctagatacgagcgccacctccacgcatacaaccggagggtgcagatgccagcaaacgacgccggcgcatttatcaccgatgtcgcaccagccatctctaggtgacctgccacatcccgtgcatcttccaccgccggaccaactgccgccggcggtcaacatgctataaccgtgccatgtgccgacggcggatcatctgatgacgacaccatgccactaccccattaaagcgcacaagactcaggagcataaccagtcacacatattcccgaacc

SEQ ID NO: 298787 - DNA, 340 bp, Zea mays
tccttggcacgttccatgcggtggtgtgtgctacggagatggaaatttggtgttcattgccaatgattggcacactgcactcctgcctgtttatctgaaggcatattacagagaccatgggttaatgcagtacactcgctccgttctcgtcatacataacatcgcccaccagggccgtggtcctgtagatgaattcccgtacatggacttgcctgaacactaccttcaacatttcgagctgtacgatcccgtcggtggcgagcacgccaacatctttgccgcgggtctgaagatggcagaccgggtggtgactgtcagccgcggctacctgtgggagctg

SEQ ID NO: 298788 - DNA, 330 bp, Zea mays
  unsure (1)..(330): unsure at all n locations
cagcgctcagtcaactagccatggtgaaccctgtcgcctaccaacaacaacaaccatgtgagttatgtggatctcaacaagctactcaaagtgcggtggcaatcttgacagcagcacaatacctaccatcaatgtgcggcttgtaccactcatactaccaaaatattccatgcagcagaaaggacattaggggggtttgcaatggaagaatggtgtctacctagccgttttcttcctataccggggttaagcattaaaggcccttcctttaaaaaattgccggggtctgaagatgngccaccgggtggtgactgtcaattcccagggggg

SEQ ID NO: 298789 - DNA, 344 bp, Zea mays
ctagttctagatcgtgagcgggcgcccttttttcttggtgcggacgattagatcaagatccagctctatgaatatattgactatttttgggaaacacaggccgagctgagggcgccatacactgagacatctcatatgtaatctaaaacacggcacctgcaacgacgggttggtgaatggctaggctcatcaaagagagctggctggatggcaccatttggtgctgctgcttgatgctagcgaccaatgggttaacctccgctcctggagtacatacctgttgctggtagtgcaggtcctcagcagagtttggcacggccgattggttgaatggaaacaactgc

SEQ ID NO: 298790 - DNA, 356 bp, Zea mays
ctactccagagcgcataagaacccgatcgacaccatgagggtgttgctcgttgccctcgctgtcctggctctcgctgcgagcgccacctccacgcatacaagcggggggtgaggctgccagccaccggcggcggttcatctaccggcgccggtgcatctgccacctgcggttcacctgccacctacggtgcatgtgccaccgacggtccacctgtcgacgccggtccacctgccaccggcggaccatgtgccgccgccggttgatctgacgccggcaccatgccactaccctactgaaccgacgcaggctgaggctgatccccaggcacacccatgcccgagccaacagacgcatg

SEQ ID NO: 298791 - DNA, 345 bp, Zea mays
gccattgacgtaccaagtgagtttgacggctaatgctaccagatcttgttcttggtgacgccgtgcggtaatgtgacatgctactacagacgcaggacggcggactacatcttctacttgatgaagatgatgctggagaccgtatgcgccggcaccaccaccaccatgcaggcgccaccgctatacaagaaggcagtcgaccacaaccccctcatggacgagctgttatcatccaaggagaggacgggtgtggctgtgtaagcatgggacgaaaacctgtcactaacgtgcctccaacgcctagtttttgcggtaccagacggaaagaaagagagggactgagtt

SEQ ID NO: 298792 - DNA, 212 bp, Zea mays
atgggattaattttgtccagagggcaaaaaaacccgatcgacaccatgagggggttgctggccgtggttgatctcctgcgtgtcgctacgagaggcacctgcacgcatacaaaccgccgatgcgggtgccagccaccggcggcggttcatctaccgccgacggaggatgtgacaactacggttcacctggcacctacggtgcatatcccacc

SEQ ID NO: 298793 - DNA, 381 bp, Zea mays
ctgggtcttcagaccattagctttatctactccagagcgcataagaacccgcatcgacaccatgagggtgttgctcggtgccctcgctctcctggctctcgctgcgagcgccaccttcacgcatacaagcggcggctgcggctgccagccaccgccggcggttcatctaccgccgccatgtgcatctgccacctgcatgttcacctgccacctacggtgcatctcccaccgccggtccacctgccgccggcggtccacctgccatccgctgtccatgtgccgccgtcggttcatgtgccgtcgccaccatgccactaccctactcaaccgcccatgtctcagcctcatccccagccacacacatgcccgtgccaacaagcc

SEQ ID NO: 298794 - DNA, 304 bp, Zea mays
atattcagaaacacaacacacgacaagcgatacccactacctaccacctatcgacaccgggatcctatacattattgctctttttgctctttgtgctatcacagcacacgacaacatcattcatcattgctcactggttactagctccaatatccaacatttcataccacctgctactaaaatgttcaatgaacacccaacagtgaaagcctctaggctacaacatacaactaccgctagcgtctaacagcatacaactgcccaatggccacatcaatcatcgatacatgtcacatttcaaacc

SEQ ID NO: 298795 - DNA, 409 bp, Zea mays
ccaacaagcaacatataaagtaggaatccagttgcaacaatagagcaacaatggagaccaagatatgtgccctgcttatgctccttgctctttgtacatgtgttgctaacgcgacaatatcacctgaatgctcacaagctcctatagcttccctttttcccccataccttccatcaattatagcttcaggatgcgaaaacccagctcttcaaccatataggcttcaacatgcaatcgcagcaagcaacatacctttatcgcccttgttgtgtcaacaatcgacagccctatctttggtgcagtcattggtacaaaccatcaaggcacaacagctgcagcaacttgtgctacctgtgatcaaccaagtagctgtggcaaacctttatccctactctgcgcaacaacaatt

SEQ ID NO: 298796 - DNA, 357 bp, Zea mays
  unsure (1)..(357): unsure at all n locations
cagcattcagaaacacaccaagcgaagcgcactagcaacaacctaacagcaatggctaccaagatgttatccctgcttgcgctgcttgcgctaccagtgagcgcaacagatgcgatgattatatcacagtgctcacttgctcctagcgccattattccacagtttctgccaccagttacttcaatgggcttcgaacatccagccgtgcaagcctacaagctacaactagcgcttgcggcgagcgttttacaacaaccaattgcccaattgcaacaacaatccttgggacatctaaacctacaaaccatnngaacgcaacagcaacaacagattctggcatcacttgaccacctagcc

SEQ ID NO: 298797 - DNA, 380 bp, Zea mays
cgcagcggaccatcttcgacaacctccacgacgccggcctctccttcggcgtctacttccaggacgtgccggcggtgctcttctacaggaacctccgcaagctcaagtaccttctggacttccacccgctgcgcccctccttcgccgaccacgcccgccgcgggacgctccccaactacgccgtcatcgagcagcactacctggactccaagctggacccggccaacgacgaccacccgtcgcacgacgtgtaccagggccagatgctcgtcaagtacgtctacgagacgctgcgcgccagcccgcagtggaaccagacgctgctcgtcatcacctacgacgagcacggcggcttcttcgaccacgtgcccacgcccgtc

SEQ ID NO: 298798 - DNA, 358 bp, Zea mays
gaaggaaacagagcacaatagctgtaccaacatatggtgggccaaaagcagtttagcttcctgatgcgtcattgttctttctagcaggagctgctaccgaaccattattccacagtgctcacaagctcctattgctagcttgtttcgcccatacgtgtcaccagcggtgtctagagtatgtgaaaactcaattcttcaaccatacatgatccaacaggcaatagcagcaagcatcttacctttatcacccttgatactgcaacaaccagtagggctattacagggagtacatatggcgcatttgttggcacaaaatcataaggcacaacaactacaacaacttgcgctaggaaacctt

SEQ ID NO: 298799 - DNA, 212 bp, Zea mays
  unsure (1)..(212): unsure at all n locations
cagcctagcaattagctcatcgactccagattggagaactcgacaccatgnaagtgctgatcgttgcccttgctctcctggcgctcgctgcgagccgccgctcaacaagcngggctgggctgcagacaccccgttatcaccgctcgttattccgctcgttatctgcgcgacacagcgagctggatcccctaccccgagtacccgccacagtc

SEQ ID NO: 298800 - DNA, 278 bp, Zea mays
cgccgccggtgcatctgccaccttaggttcacctgccacctaaggtgcatgtcccaccgccggtgcacctgccgacgccggttcacctgccaccggcggtccatgtgccgtcgacggttcatatgccgccgtcaccatgccactaccctactcaaccgcactggcctgagcctcatgcctagccacacccatgcccgtgccaacagtccgatgcaagcccgtgccagctgcaaggaacctgcggcgttggcagcaccccgatcctgggtcatgtgcgt

SEQ ID NO: 298801 - DNA, 291 bp, Zea mays
caacaaacaacataaactgtataaactacttttaacaatagaaccccatcgacaaccaaggtgtttttcttacttatgctccttgctctttctatatgtgttagctaacacctacaatcatacataaatgctcataagcttctataccttccctttttaccacataaccttccatcaattatagcttcattatgttaaaacccacatcttcaccatttatgcttcaacaatcaatctgagcaagcaacataactttatacccctttgtcatgtaacaactcccagtcatat

SEQ ID NO: 298802 - DNA, 171 bp, Zea mays
gaacgcaggaaaaagctcctacaaataggcgctatggacgagaacatgctgcacctacacaatgtattggtacgttacattcttgtcctgaaactgcagattctgatacacaactctttaagcagaattgtgctgatgcagaccgtgtatctactctaagcttgggcggac

SEQ ID NO: 298803 - DNA, 326 bp, Zea mays
tctatacagatcacggacgctgtagagcatacaaaggaacgtacaacagaacaccacgaagatggtcatctatctcgtcacgtgcctggatttgacaggtggcagcgccactacaatgcaaatgccatgaccctgcgcggagctaaatgaattgtacggcgctagatcccgcctgacgacgatgatgggcgcccgaagactgcaccactactcggcgttcctaacacatgcgcagtgtaaatggctaacgggacgcgccttctacccccgcattaagcacacgagctcgatggactacccgctgcgggaacagtgctctcggcagc

SEQ ID NO: 298804 - DNA, 325 bp, Zea mays
tcggcaggagacaacttcggcaccttcacccttgaattgtttcccaccattgggtcgcaaggattcttcgttttttccgcactttagcagggccccgaggaacccattctttgagagaccgcgggcttcaacaaagataccaaccccgtggaaaggaaactttggggtggggccttaccgaaccaaggaagggaaccccttatgctttaaccgggtcagggcgcccaaccaaattttgatcaataatccggaccggtgaaaggggtacctaccaataaccgggttggttgaattaaataagctggcgcctaaacttttttttggg

SEQ ID NO: 298805 - DNA, 388 bp, Zea mays
ggacgtcagcctagcaattagctgatcgactccagataggagaactcgacaccatgaaggtgctgatcgttgcccttgctctcctggcgctcgctgcgagcgccggctccagtacaagcggcgggtgtggctgccacacaccaccggttcatctaccgacttcgttctatatgccgcctacgttctatctggcgtcgcagcaacagctcgagccatggcaataccccactcaaccaccgtaactaagcccgtgccaggagttcggatcctgcggcgtcggcagcgtccgcagcccgttcctgggacagtgcgtcgagttactgatgcaccagtgcacgccggcggcgacgccctacggctcgccacaaggacatgcgctgcatcatca

SEQ ID NO: 298806 - DNA, 186 bp, Zea mays
tcggagaccttagaccattaactttatttaatctacaacggcgaaaaaccccgaacgaaccgtgggggggctgcgcgtctggctcgctcttccggcttttgctgggagcgccacctccacccatacaatctgcgggtgtggctgtcaggcaccgccggcggttgatctaccggcgacggggcatat

SEQ ID NO: 298807 - DNA, 316 bp, Zea mays
  unsure (1)..(316): unsure at all n locations
ctnccgaccattaactttattttattccaaacggcaaaaaaccccgatcgacaccttgagggtgttgctggttgacctcgctctcctggctcttgctgggaacgccaacttcacgcatacaagcggcggctgcggctgccagccacccggcgccggttcatctaccgccgccggtgcatctgccaccttcggttcactgccacctcgggcattccaccgcgccactgcgcgcgtcactgcacgcgtctggcgcgcgtattgcgcgacatgcatctataacgccgctagctatccagccacctgcggcaagcgatca

SEQ ID NO: 298808 - DNA, 350 bp, Zea mays
  unsure (1)..(350): unsure at all n locations
cttccaccacctactaccattcagccagctagctggtgtgagccctgctaccttcttgacacaaccacagttgttgccgttctaccagcacgctgcgcctaacgctggcaccctcttacaactgcaacaattgctgccattcaaccaacttgctttgacaaacctagcagtgttctaccaacaacccatcattggtggtgccctcttttagatttcttatgagttatagttcaataataaaagtttttgtctgatgtttggggcttcccaaaaataagaaagtacatttcttgaaaaaaaaanggnaacccacaaaaagaccaaaacactagccaacaccataacacaag

SEQ ID NO: 298809 - DNA, 211 bp, Zea mays
attgagaccaacttgcgacatagaaagcacaatattgtacccataatggcagccaaaatattttgcctcaatatgctccctgggctttctgcaaatgctgctacagcgagcatttttccgcaatgctcacaaactcctatagctttccttttttccccatacctctcaccagcgatgtgtttagtatgtgaaaatacaattcttttaccct

SEQ ID NO: 298810 - DNA, 134 bp, Zea mays
tcggagaccattaactttatctacttcagaacgcaaaaaaacccgatcgacaccattagggggttggtcggtggccttgctcttctgggtcttgctgggagcgccaccttcacgcatacaaacggggggtgggg

SEQ ID NO: 298811 - DNA, 297 bp, Zea mays
gttctagatcgcgagcgggcgcccttttttttttttttttttaaacgggaatttcaggtctcatagcattatcatgaatcttagaacataacaggtggaacacgaattaaaccgaagcgccctggggttcacaaatccacacctaaaccgcttaattaaactgcgagcgatacatgataaacttagaccaccacttaaattaccaccattttgtttttaaaccaatgaacttatttactgcgaagcgcaaaaaaacccgaaggagacccttagggggcttgtttttgcccctttttt

SEQ ID NO: 298812 - DNA, 244 bp, Zea mays
cttgtgctaacaaaccttgctggctactcttaacaacagcaggttctttcattcaacccactagctggattggactctggtttttatttggaacaacaacaactaccattcagccaggtacctggtggctacccccagcaatttctttcattcaacccactggcagcattgaactctcctgcttatttacagcagcaacaactactaccattcaaacagctagctggtgtgagccctgctacct

SEQ ID NO: 298813 - DNA, 258 bp, Zea mays
tggcaacatacatagggaagtacaggagccacatcttaacaccaatggcagccgacaattttgcccttcttgcccttcttgctctttcaacaaggggtgctaccgcgactattattacaaatgctacaacaatacctctctcccgtgacagccgcgagatttgaatacccaactatacaattctacaagctacaagaaggcattacagcaagcattttacggtcgttagcattgactgtccaacaaccatatgcccta

SEQ ID NO: 298814 - DNA, 369 bp, Zea mays
tcgaattagaaacacaccgagcgaagcgcactatcaacaaactaacaacaatggctaccaagatattagcccttcttgcgcttcttggccttttaatgagcgcaacaaatgggtttattatttcacagtgctcacttgcttctaaagccattatttcacaagtccttccaccaagtactttaatgggctttgaacattcaaccgggcaagcctacaggctacaactagcgctttgggggagcgttttacaacaaccaattggccaattggcacaacaattcttggcacatgtaaacctaacaaccatcgaacgcaacagaacaacaggtgtgcatgatgacccctaccgggtgacctgtgctactgcac

SEQ ID NO: 298815 - DNA, 492 bp, Zea mays
cccggcgtacccacacgcgtccgccatcataaaacgcacattactccaccatctttgccacccaacatattctgcctccttattgtccatgttcaatctgcaagaggctctctgctaaccatttacccacaatgctcacaagctcctatagctttcctacccaccccgcacctgtcaccaacggcgtctacggtcatgtgaaaacccaattcttcaaccctacaggatccaacaggcaatcgcagctggcatcttacctttatcaccattgatcctccaacaatcatcagccctatcacagctgttacactttgtgcatttattggcacaaaacatcacggcacaacaactacaacaacttgtgctagcacaccttggtgactactctcagcaacaacagctacttccatttaaccaactaactgcattgaacttctgcatattatttgcaacaacaacaactaccattcagccaactatctgctgcctacc

SEQ ID NO: 298816 - DNA, 380 bp, Zea mays
gatcaacaaaaccggaagtgcgtaaaaaggaatcgtcgaccaaaacagattgaaaagggtcatcgttctcgtcgtgtgcctggctcttgtcagcttgccaacgcctttggaatggaaaatgccctggccctgggcggggctgcaaggcttggacggcgcttgcgcccggcttgcaacaataatggcccccggcgggctgaacccctacccggagtccttgagcagccgcagtgcaaccccgctggcggcggcgccctactacgccgggtgtgggcagacgagcgccatgtaccagccgctccggcaacagtgctgccagcagcagatgaggatgatggacgtgcagtccgtcgcgcagcagctgcagatgatgatgcaac

SEQ ID NO: 298817 - DNA, 353 bp, Zea mays
tcggccacgccttccggaacataaaaaggaccattggtggacccaccatgggcggccaaatattttgctttcttatgctccttgggctttctgcaagggcttggtccgcaaccattttcccacaatgctcacaagcttctatagcttcctttcttaccccatacctctcaccagcggggtcttcagtatgtgaaaacccaattcttcaaccctacaggatccaacaggcaatcgcagcaagcatcttacctttatcacccttgttcctccaacaaccggcaggcctattacagcagttacctttggtgcatttgttggcacaaaacattaaggcacaacaactacaacaactt

SEQ ID NO: 298818 - DNA, 258 bp, Zea mays
gcaacaactactaccattcaaccagctagctggtgtgagccctgctaccttcttgacacaaccacaggtgttgccggtctaccaacacgttgcgcctaacctggaccctttacaacggaaattgtgcattaaccaacttgctttgacaacccagcagggctacaacaacccatatgggggccctttttgatttttagaggatagtcaatataagtttttattgagttgggcttccaaaataaaaaggcatttctgtaa

SEQ ID NO: 298819 - DNA, 194 bp, Zea mays
tcgcagaaacacaccaagcggagcacattaaccaccacctaaccaccatgggttacaaaatattatcccttcctgggcttttgcgcttttgcgagcgcaacaaatgcgttcattattccacaatgctcacttgctccaagttccattattacacaggtcctcccaccaagtactttaatgggctttgaacaccc

SEQ ID NO: 298820 - DNA, 384 bp, Zea mays
gcaacatagaaagcacaagattgttccaataatggcagccaaaatattatgcctgatgtatgcttcttggactttttggaagcgctgctactgcgagcattttgccgcaatgctcacaagctcctatagcttacattcttccatcatacctcttaccagcgatgacttcagaatgagaaaatccaattcttgtaccctacaagatccaacacgctatcggagcaagcatgttacctttatcacccttgttccttcaacaatcatgagccctattacagcagctacctttggtgcattgattggcacaaaacataagggcacaacacctacaacaactcgtgctaagctaccttggtgcctactatcagcaacagcaaatacctt

SEQ ID NO: 298821 - DNA, 413 bp, Zea mays
attccaaataacaaaaccggaagggcgtattaaggttcgtcaaccaaaccacattgaaaagggccatcgttttcgtcgggtgcctggttttgtaagttgccaccgcctttgcaatgccaatgccctgcccctgcccggggctgcagggcttgtacggcgctggcgccggcctgacgacgatgaatgggcgccgggggggctgtactccctacgcgggagtactctgagggcagccgcaagtgcaactccggctggcggcgggccgccctacttacgcccgggtggtgggcacgacgaagcgcccatgtaaccagccgcgtccggcaacaagtggctgccagcagcaggatgaacgatgatggacgtgcaatccgtcgcgcagcagctgcagatgatgatgcagcttgagcgtg

SEQ ID NO: 298822 - DNA, 403 bp, Zea mays
tcgcaaccgtccacgcgagcaaagagccctcgttccccttccgctcgagtccatcgccgtcgcagaccgcggaggagctcgccacccagatcgagcagcagacgctcgatgagcagaagaccgagaatgctttggagcagttggcatccattgatctcatcgagctatgaaaggaggccagaattgagcgttgtcgtgcaactagagacttgagtagctgtggtcgctatgtgcaccatgtgcttaactcatgtggccatgcctcattatgtgctgagtgcagccaaagatgtgacgtctgcccaatctgcaggagtccaatatcggacaatggaaatagggttcacctatgtctttactacaagtgcctggaagcgggccttatttctaagcagcacgatga

SEQ ID NO: 298823 - DNA, 362 bp, Zea mays
tgttgctgcaacaacttcttccattaaaccaattggccgaactgaaccccgctggttattggcaggagcaaatactactaccatttagccagatagctgcagcaagccgtgctttcttcttgacacagcaacagttgctgcctttctaccagcagtttgcggctaaccccgcaaccctgttacaactacaacaattgttgccctttgtacaacttgctttgacaaacccagcagcctgctaccaacaacacattattggtggtgccctcttttagattgcttattaattgtaattcaataataaagttttttggatgatgtatgtggccaaccagaaataagaagtgacattgccagattct

SEQ ID NO: 298824 - DNA, 308 bp, Zea mays
gactaattggcacaaaacatcggggaacactatctacaccatctagcgctagcggacatcgctaggtactctcagcatcagcagcttgttccatttaaccgactagctgaatcgaactttgcttcttattggtaacaacatcatctaccattcattctgctatcagctgtctaatcacagatagttcttgcatgcgaccaaccgactgtatagaactatacggtttatctacagcatggacaacgtctaccatttatacaactcgctggtgagagatctgctaccttattgacacaaccacaattggt

SEQ ID NO: 298825 - DNA, 369 bp, Zea mays
attgtgtgtattaacaaacacaccaagcgtatcgcactagcaacaacctaacgacagtggctaccgcgatattatggctacttgcgctccttgcgctttttgcgagcgcaacaaatgcgtccattattccacaatgcgtgacttgcttctagttccattattccacaggtcctcccaccagttacgttaatggccttagaacacacacctgtgcaagcctatccgctacaacaagcgattgcggcgagcgttttacaacaaccaattgcccaattgcaacaacaatccttggcacatgtaacaatacaaaccatcggaacgcaacagtaacaacaggtcctaccagcactgaaccacctaatcatggag

SEQ ID NO: 298826 - DNA, 412 bp, Zea mays
ggcacccagccggtgtgcagtgggctggctgttggcctcctttcctcgccgcgctttggagcccacctcggtctcggtgcagtgtctcgctcgcgcgtgccggcgtgcgtgccctggtggcccatggggaggaggataatgaagagtgggcgacgcacgacgatgcagccgcggccggcgcttcttctcctcgtcctcgtcctcggcgtgtcgctgcgtggatgcattgcgcaaggcgggggcggaggaggagggctcacgcgggggagcttccccaagggcttcgtcttcggcaccgccgccgccgcttaccagtacgagggagccgtgaagacggatggcagagggcaaacgatctgggacacgtttgcacacacttttggcaagatttcaaacttcagcaacgcggatg

SEQ ID NO: 298827 - DNA, 339 bp, Zea mays
gaccataaaaaggggaatccatagccaccattgaaccaccattgggacccaaaaattttgccttcctatgcctcctgctctttttccatgggtgctaaccgccattttccttatgctacaaactctatagctttccttttttccccatacctttcataattatagcttcagtatgtgaaaacccagcttttaaccatatatgcttcaacaagcaatcgcagcaagcaacatacctttatcgcccttgttgtgtcaacaatcgccagccctatctttggtgcagtcattggtacaaaccatgagggcacaacagctgcagcaactcgtgctacctgtgat

SEQ ID NO: 298828 - DNA, 369 bp, Zea mays
atttctaaaaaaaaaaactttattattgaactataactcataagcaatctaaaagagggcaccaccaatgatgggttgttgatctgtcgccgtctcgccaacagcaccaaccgcctcctagaactcgaccgccatggcgagccaaggcgagccgtcttcctccgatccgaaggggaagaaggattactcgacggcgatcctggagaggaagaagtcgccgaaccggctggtggtcgacgaggccaccaatgatgacaactccgtcgtcgctctgcacccggacaccatggagaggctgcagctctttcgcggtgacacggtcctgctcaagggtaagaagagaaaggacactatctgcattgtgctcgc

SEQ ID NO: 298829 - DNA, 267 bp, Zea mays
ccgggggaggatcgagagaggccaggaccagccagcttagccatggacggcggcggcgacgcgggcgagacgaggatgaagacggtgtgcgtgacgggcgccgggggcttcgtcgcctcgtggctcgtgcaactcctcctctccagaggcgactacctcgtgcgtggcactgttcgcgaccccggtgaccccaagaacgcgcacctggcggcgctgggcggcgccagcgagcggctgcggctgttcaaggcggacctgctggaccct

SEQ ID NO: 298830 - DNA, 397 bp, Zea mays
ctcactcattaccgtgtcagtatatggttctgaaaacttcagtgctctgcgatgcagaacaacccggatagagtatgctttgtcaatgcaattgtttttcttcttctttggtcatgtcatcctccttaagtccccctctaattattcaaggtacattcggcgaggacaaccggatgctggtttccctctttttgagtccgagtccttgaaatggcctggatttgtagagtttgatgatgtcaatggaaaggttttgacttactctgctcaagacagcacttacaaggtgtttgatttgaaaaactacacattactgtattcggtgtcagataaaaatgttcaagaaataaagatcagccctgggataatgctattgatttatacaagaacaaatagc

SEQ ID NO: 298831 - DNA, 332 bp, Zea mays
acatcctatcatcattggcgggcaagatattatccctccttgcgcttcttgcgctttttgcgagcgcaacaaatgcgttcattattgcagatggcaaccaccgtcgacggttcatctatacacagtttctcccaccagttactttaatgggcttcgaacacccagctgtgcaagcctataggctacaacaagcaattgctgcgagcgtcttacaacaaccaatttcccagtttgcaacaacaattcttggctcatctaacaattcaaaccatcgcatctcaacagctacaacaatttctaccagcactgaaccacctagccatggtgaaccc

SEQ ID NO: 298832 - DNA, 385 bp, Zea mays
cccgttccgtcgccgccgcgcgcctcggagaaagagaatagaggcggccgctgcatcgaccccgcgccacctccgcctgcctcccccggcaccgatcgggtttgatcgatggcgtcgaagaggatcctgaaggagttgaaggacctgcagaaggacccgcccacctcctgcagcgcaggtcctgttggtgaggacatgttccattggcaagcgaccatcatggggccttcggacagcccatttgcaggtggggtattcttggtgaacattcacttcccaccggattaccctttcaagccaccaaaggtattccacccgaacatcaacagcaacggcagcatttgccttgacattcttaaagaacagtggagtcctgctttaacta

SEQ ID NO: 298833 - DNA, 173 bp, Zea mays
  unsure (1)..(173): unsure at all n locations
caataccgtctgtccggtgacagccgcgagatgtgcatacgcaactatacaatcatacaggctacaagaggccattacagccagcatnttacgggcggtagcatggactgctcaacaaccatgtgcattatcgcaacaacgatccttagtgaatgtatatatgcaaagaatct

SEQ ID NO: 298834 - DNA, 359 bp, Zea mays
gtcggcagcgtcggcagcccgttcttgggccagggcgtcaagttcctgaggcaccagggcagcccggcggcaaccccctacggttcgccacagtgccaggcgctgcagcagcagtgctgccaccaaatcaggcaggtggagccgctgcaccggtaccaggcgacatacggtgtggtcctgcagtccttcctgcagcagcagccgcagggcgagctcgcggcgctgatggcggcccaggtagcgcagcagctgacggcgatgtgcggcctgcagctgcagcagccaggtccctgcccttgcaacgcagctgccggcggtgtctactactgaggaaactatgtactgtagaataatgaatg

SEQ ID NO: 298835 - DNA, 450 bp, Zea mays
agaccaacaagcaacatagaaagtggaatccagtagcaacaatagagcaacaatggcgaccaagatattttccctccttatgctccttgctctttctgcatgtgttgctaacgcgacaattttccctcaatgctcacaagctcctatagcttcccttcttcccccataccttccatcaatgatagcttcagtatgtgaaaacccagctcttcaaccctataggctccaacaagctgtctgagctcaagttctttgaccgggcagctgccggcggtggcgcctacacggggccagaggattccttcttcgaaatggtcacactgcagcctggtggcgtgtacaccaagtcgcagctgttgaaggagcttgaaacactcgtttcctgtggcatgttcgagcgggttgatctggaggtgaagcccaagccagataacacaattgggctcacag

SEQ ID NO: 298836 - DNA, 274 bp, Zea mays
gagtcttaagaccattagctctatctactccaaagcgcagaagaacccgatcgacaccatgagggtgatgctcgttgccctctctctcctgactgtagctgcaagcgccacctctactgatacaatcagtggctgcggctgccagacaccggcggcgactcatttaccgacgtcgatgcatatgacacctacgattcaactgtcagctccggtgcatattccatcgtcggtccacctgccgacagcggtccacctgccaccgccggtccatgtg

SEQ ID NO: 298837 - DNA, 236 bp, Zea mays
agtaagcacagatctctaccaacactgtctagacgaaccatgctgcacttcctctgctccgcgacctttctagcatgtgctatatacggacactcattttaccgcactgctcgcaagctcccatcgttatccttcttaccccgtacctctcaccaaccgtgacttcggtatgtgaaatcccaattctccaaccctacaggatccaacaagacgtcgcacctgacatcttaccttta

SEQ ID NO: 298838 - DNA, 315 bp, Zea mays
tcgccgaaacaaagcaatcacccgagcaaaggagtgcggggcgaccatccaacgggatttcgcattcgacgaacgaagcgccgccatctgatcccgcacgcaacgcaatgggggggggactgaagaggccgtcgttcgggacgcgggcgtggcggctgctgcggctggcggtgctgtgggcgcagaaaggcggggcggagcacaggcaaacccagcttctgaaccctataggctgcaacaagcgatcggagcaaggaccatacctttatcacccttgttttaacaatcggcaggcctatctttggtgcagtcatt

SEQ ID NO: 298839 - DNA, 380 bp, Zea mays
agaccaccagctatagctactgcacagcgcaagatagcccaagcgacaccatgagggagtggctcgttgccctagaatctacaggctctcgctgcgagcgccacctacacgcatacaagcggcggatgcagctgacagccaccgccggcggttcatctaccgccgccggtgcatctgccacctgcggttcatctgccacctacggtgcatctcccaccgacggtccacctgacgtcgtcggtgcacctgccaccgtcggtccatgtgccgtcgtcggttcatgtggcgacggcaccatgccaataccctactgaaccagcccggtctcagcctcatccccagccacacccatgcccgtgccaacagacgcatgcaagccc

SEQ ID NO: 298840 - DNA, 435 bp, Zea mays
ctaccattagacctttatcaccctttttgtttcaacactcatcagccctaatgcaggagttacctatggcggatttattgccacaaaacattatgacacatcaactacaacatcctatgctagcaaaccttgttgcctactctcagcaacatcagtttctgtcattcaaccaactagctgcattgaactctgcttcttatttgcaacaacaacaactaccattcagccagatacctgctgtctacccccaacaattccttccattcaaccaactgtcagcattgaactctcctgcttatttacagcagcaacaactactaccattcagccagctagctggtgtgagccctgctaccttcttgatacaaccacagtttttgtcgttctaccagcacgcttttgcctaacgctggcaccctcttacaactgcaacaa

SEQ ID NO: 298841 - DNA, 348 bp, Zea mays
tacgatccactgcactctcttcttcatttgtttcaacaacagctgccattctgttagcttcctgaggagtgcgcagggcatttactttcattcaaccaaccgtcacgtttgaactctcctgcttattgacagtagtttcatcttctacgacctaagccagatggctgcagtgagctcagctacctcctcgatacatccacaggtggtgccgttctaccagtacgctgtgcctaacgttagcaccctcattacaactgcaacattcgctgcacattcaacctacttgttttgtcatacccagcatggttctaccaacaacccatcattggaggtgccctctttacagat

SEQ ID NO: 298842 - DNA, 280 bp, Zea mays
aacacatcattggtggtgccctcttttagattgctgattagatgaaactcaataatacagttggttggatgatgtatgcggccaaccagaaataaaaagttacatttccagattctaaaatacaaaagaaagtgtgctggtgacaagcacggatgacggatcatttaccgtagatggtgcaactgccaacatacgttgctactgccaactatgaagcatgttcaaaccgacgaaacaactgaaaacgacgaaacaacttaaatcgggggggccgttttaa

SEQ ID NO: 298843 - DNA, 394 bp, Zea mays
gcaacatataaagagctagacagattcaacgatcgagcatcaaccgcggccgggagataagatatcctgattctccatgctccttgggcttgctgcacgagctcctaccgcaaccattattccacagtggtcacaagctcctatcgcttttcttcttaccccataccaatgaccagcggagtcttgaatgactgaaaacccaattgtttaaccctacaggatccaacatgcaatcgcaacaggcatattaccattatgagccttgttcctgcaacaaccgtcagccctattacagcagttacctttggttcatttggtggctcagaacatcatgttacaacaactacaacaacttgtgctagcaaaccttgctgaatactgtcagcatcatcag

SEQ ID NO: 298844 - DNA, 359 bp, Zea mays
gttgcagccaactagcagcagaacctgtacatttgcgttccaacaatggcagccaaaatatgtcgcttgcttatgctcattggtctgtctgcaagtgttgctaccgcagccatgttcccacaatgcttacaagcttccatagctttccttctaccgccatacctgtcaccagcggtgtcttcaatgtgtgaaaacgcacatgttcatccctacaggatccaacaagcaatctgaacaggcatattaccattctcacccgtggtcctccaacatccgacagtcctattacagcagttacctccggtccatttggtggcacaaaacatgagggcacaccaacttcaacagactgtgctagc

SEQ ID NO: 298845 - DNA, 343 bp, Zea mays
atcacaccaagcgaagcgcactagcaacgccctaacatcaatggctaccaagatattaggccttcttgcgctttttgccctttttgcgagcgcaacatatgcgttcattattccacaatgctcacttgcttctagtgccattattccacagtttctcccaccagttactttaatgggcttcgaacaccttgctgtgcaagccaacatgcaacaacatgcgcttgcggcgagctgtttacaacaaccaattgtccaatttgcacaacaatccttgccacatttaacaattcaagccattacaacgcaacaacaacaacagttccttccagcactgagccaccta

SEQ ID NO: 298846 - DNA, 372 bp, Zea mays
cagaccattagctttatctactccagagcgcacaagaacccgatcgacaccatgagggtgttgctcgttgccctggctctcctggctctcgctgcgagcgccacctccacgcatacaagcggctggtgcggctgtcagccaccgccgccggttcatgtaccgtcagcagtgcatctgtcaccttcagataacctgccacccttggtggatcttccaccgccggtacacctggcgccggcagttcacatgtcatcggcggttcaagtgccgccaggggttcttctgtcgccgcctccattccattattcttcattaacaccaccaggagggcattctcatcatcatcctcatcgttgcccattgccaacataa

SEQ ID NO: 298847 - DNA, 220 bp, Zea mays
ctgggtcttaagaacattagctccatgtactgcagagcgcaaaaaaacccactcgacaccatgagggtgttgctcgctgccctggctctcctggctctcggtgagagcgccacctccacgcatacaagcgagcgggtgcagttgccagccaccgccttctgttcatgtaccgccgacggtgcatttgacagctccggttcacactgccacctccggtgca

SEQ ID NO: 298848 - DNA, 219 bp, Zea mays
gataaggccaaaagctttggtttatttgattattggttatgcactccaaagccattcagattacttgtaaaataaaaaaacagggggggactaccggtttcaacaacaataccagcttccaggttatttgtgctttttttcaaaaagaacagcgcttaattaatttctgctgaaccctccaaaacttgacatggaaaccagcctcctcgctggtgtttt

SEQ ID NO: 298849 - DNA, 339 bp, Zea mays
gttctgggaaactagaaacacaactagtgcatcagcgttgaaacaccctatggtcagtgtgctcgtggttctttttgcttcttgatcttcttgcgctttgagcgggcgcaaaatatgcggacatggtgccacagtgttcattttatcatcgttccattcttccacggtgtcttccagtagttacttgaatggacttcaaacaggcaggtgcgcaagggtattggctacagcaagggatcgttgatagcgttttgtaccaacccattgatcaattgtaccaccaatgcttggtacagttaacatttcaaaccatcgcatcgtaacacaaccaccacttcc

SEQ ID NO: 298850 - DNA, 274 bp, Zea mays
gttttgggcatctagttaacacaccatgttgagcgcactttcatcaagggaagatcaatggctatcatgttatttttccaccttgcgcttcttgcgcttttttcgagcgcaacatatgcgttcattattccacaatgcttacttgctcctagtttcattatttcacaatttctcccaccatttacttgaatggacctcgaacacccaattgttcatgcctattcgctacaacaagctattgatggtagcgttttacaccaaccaattgtccaat

SEQ ID NO: 298851 - DNA, 392 bp, Zea mays
ggaccattaacctaatctcctacagagcgcagaagaacccgatcgacaccatgggggtgttgctcgttgccctctctctcctggctctcgctgcgagcgccacctccacgcatacaaacggctgatgagagtgtcagccaccgccgcccggtcatctaccgccgccggtgcatctgccaactccgggttaactgacacctacggtgcatctaccaccgccggaccacatgccagcgccggaccaccctgtctcgtacgaccatgtgccgacgacggcaatctgccgtcgcaccatgccactaccctactaaacgcgaccaggactaaggccactcccaggcacaaccatgcccgtgccaacagtcgcatacaagcccgtgccagctgcaggg

SEQ ID NO: 298852 - DNA, 323 bp, Zea mays
actatgtgctgtagtatagccggtggctagctagctagttgagtcatttagcggggatgattgagtaataatgtgtcacgcatcaccatgggtggcagtgtcagtgtgagcaatgacctgtatgaacaattgtaatgaaatgaaataagtattgttccatccctataccatttcatcatatgttccgattcagtctgtgaaaacccagccctcttatccctaatggctccaacaagcattataaacatgcttcttaccttttatatccctgttttttaaacaatggacagccctatcttttgtgcatttattggtacaaacca

SEQ ID NO: 298853 - DNA, 389 bp, Zea mays
gaccaacacgcagcatttgaagtgtgatgcaggtggagcaattcttgggcaatggttaccaccacatgattgctccttatacaccttgctctttatacatgagttgctcacgcgacaattatgcctcaatgctcacatgctcctatagcttccctttttgccccatacctgctattaatcataggtccacaatatgtaaacccaggtctgcatccatataggctctaacaagcaatgagagtaaggagcatacctctatcgcccttgatgtgtcaacaatcggcagccttatctttggtgcagtcattgttacacaccatcagggcacaacaaatgaagtaactcgtgctacctgcgatcaagcaagtagatctggagaacctttcttc

SEQ ID NO: 298854 - DNA, 349 bp, Zea mays
gtcgaaccaaactaagaacatgcatattccaacaccgacaacaaaattctagggctttcttatgcttgtccttctttctgcatgtgctactaacgataccatggccccacaatgataacagtctcatatcactatccttcttcttccatacctctcaccatcaatgaccgaaatttgtgaatacgcaattgaacaacactaaacgattcaaaatgcaatggaaataaaaagactaccatcatcagccttgctgctgcaacacccgcgagacttattacaataattccacttgctttatgtgctggcacatgatattaaggtacaagaacaacaactacttgaactcagc

SEQ ID NO: 298855 - DNA, 185 bp, Zea mays
taagaaagtactttcttagttctgggacacaaacttcattattgaactatcactaatatggaaccgtaacaggcatgctaccattatcagccttgttccttcaacaaccgtgtgccctattacagcagttaccttttgtccatttggtggcacaatacatttgggggcaacaaataccacagctt

SEQ ID NO: 298856 - DNA, 119 bp, Zea mays
gatcgatcgccacagccaacaccactctccaaggcgacccgacattcgtcaggaggaaggaataaactcactgcctgccagcgaagggtgagaagtgttctgctccgtttaccagtgct

SEQ ID NO: 298857 - DNA, 208 bp, Zea mays
gttcttcagaccattagctttatctactccagtgcgcagaagaacccgatcgtcaccatgagggtgttgcttgtcgtcctctctatcctggatctagctgtgagtgccatcttcacgcttacaagcggtggctgtggttgacagccaccgttgtctttcattttaccgccgttgtagcatatgtcaacttcggttcatcttgccatct

SEQ ID NO: 298858 - DNA, 354 bp, Zea mays
ctcgcgcgatcggaagatcataacatgtacatcaccgtcagcacccttgttgcgccaacatccgctagtcctattacatgagtgagcttttgccgatacgatggcacaacacttctggggagatcatctacatctccttgtgctagcatacctttctgcatactcgtagcaacattgggatcttccatttgaccaactgtatgcattgcactctgctgctgacttgcaacaacaaccaccattcagcttgctagttcctgcctacccccagctatttcttccattcaaccaactagaagtgttggaccatgatgtttatttacagcagcaacaactactaccattcagccagct

SEQ ID NO: 298859 - DNA, 399 bp, Zea mays
agcgaagcgcactagcaacaacctaacaacaacggctaccaagatattatccctccttgcgcttcttgcgctttttgcgagcgcaacaaatgcgtccattatttcacaacgctgacttgctgctagttccattattccacagttcctaccaccagttacttcaatggccttcgaacacccagctgcgcaagcctataggctacaacaagcgattgcggtgagcgcattacaacaaccaattgcccaattgcaacaacaactacttggcacatctaacactacaaaccattgcaacgcatcagcagcaacagttcctaccagcactgagccaactagccatggtgaaccctgtcgtctacttgtaacagcagctgcttgcattcaacccacttgctctag

SEQ ID NO: 298860 - DNA, 363 bp, Zea mays
agaccattagctttatctactccagagcgcagaagaacccgatcgacaccatgagggtgttgctcgttgccctcgctctcctggctctcgctgcgagcgccacctccacgcatacaagcggcggctgcgggtgtcagccaccgccgccggttcatctaccgccgccggtgcatctgccaccttcggttcacctgccacctccggtgcatataccaccgccggtgcacctggcggcggcggtccacctttcatcgccggtgcatgtgacgccgtcggctcattttgcgccgacaccatgccactaccctactaaaccgcaccggtctcagactcatcccagccacacccatgcccgtgccaaca

SEQ ID NO: 298861 - DNA, 355 bp, Zea mays
  unsure (1)..(355): unsure at all n locations
atcgagaccaacatgcaacattgaaagtggagtacattcgnaacaatagagcaacaatggcggccaagatattttccattcttatgctccttgctctttctgcatgcgctgctaacgcgaccatttttcctcaatactcacaagctcctatagctgaccttcttcccccataccttgcattaatgaccgcttcagtatgtgaaaacccagcccttcaaccctacaggctccaacaagcaatcgcatcaagcaacttacctttatcacccctgttctttcaacaatcgccagccctatgtttggtgcagtcattgttacaaaccattagggcacaacagctgcagcaactcgtgct

SEQ ID NO: 298862 - DNA, 219 bp, Zea mays
  unsure (1)..(219): unsure at all n locations
acgattgagaccaacaagcaacatataaagtggattccagtatcaacaatagagcaacaggggagtccaagatatttttcctccttatgctccttgctctttatacatgtgttgttatcgcgacaatttttccttaatgtttatatgctcctatagcttctctttnttgtnctataccttttcataaattattgctttaatctgtgaaaacccaatttt

SEQ ID NO: 298863 - DNA, 335 bp, Zea mays
ccatcgagcaacatagaacgcacaattgtgtgccaacaacggccgacataatatcacgccttactatgctccttggtctttctgcaagtgctgctacagctaccagcgcaccaaattgctcgaatgctcctataggttcacttgctccacggtacattataccagcggtgctcttcaccatgtgctaaaccgagttttgaacactacaggatccaacagtctatgctagatcacgtattagctgtatgagtcttataacatccacaatcataagcgctacaacattagttgccacagttgactatactgacactagaaatgaagcagcaacaact

SEQ ID NO: 298864 - DNA, 273 bp, Zea mays
tcgggacgtcaggctagcaattagctcatatactccagattggggaactcgacaccatgaaggtgctgatcggtgcccttgctctcctggcgctcgctgcgagcgccgcctccagtacaagcggggggtgtgggtgacagacaccaccgcttcatataccgccttcgttctatatgccgccttcgttctatctggcgccgcagcagcagccgcagccatgggaataccccactcaaccaccgcagctaatcccgtgccagcagttcggattct

SEQ ID NO: 298865 - DNA, 380 bp, Zea mays
aaggggactacagagccacctatagagcaccattggcggccaacatatgcagcatacttatgctgcttgctcatgctgcatgtgttgctaacgcgaccagttatcgtgactactcacacgctccgatagctggcttttatagctcatacctttcatcaatgactgttacagtatgtgaatacccagtgcgttaaccctacaggctacaactagcagttgcaacaggcaactgaccttgatcactcatgttcattcaacaagcgccagccatatctatgatgcagatatcggcacaaaccatcggggcacatcatgtgacacaacatgagctaccagtgattacaacagcttgtgttagcaaactttgttgcttattttaa

SEQ ID NO: 298866 - DNA, 343 bp, Zea mays
cggacgcgtgggcggacgcgtggctgagcctatccataaactcgtgactaggggcaatcgcgacgaaccactcttcagcttttattccccggcgctaactgtgacaagaattgcatgatctcggcaaaaatgctggtacctcacttgcgcctgacaacaccaatgatttctcagtccttgaaggaatgatagccttagtattcgaaaaccctgctcttcaaaactatatgctgaaacaagcagcagcagcaaggaacatacctttataccccttgctgtcacatcaatcgccagccgtatgtttggtgcagccagttgttcaaaccatcacggcacaacagat

SEQ ID NO: 298867 - DNA, 396 bp, Zea mays
cgcacgcttccttagcaacgtactaggtggacactagtcgcaacaatagagctacaatggttaccaagagatttaacttccttatgctattagctgtgtctgcatgtgttagctaacgtagacagatgaatggctgaatgctgacatgcatcctatagctatgcgtcattgcccacatgcattgcataagggctagtttgatgatgaggaaacgcaaagtagttaactcctataagcattgaacaggcgatcacagcaagcaacatacatttatcacacttgtttaaacaatggctagccatatgttgggtgtaatgattggtgcagactattaaggctcagcagctgcagcgactatggctacctgagatcaaccaagtacgatgtgcaaacctt

SEQ ID NO: 298868 - DNA, 360 bp, Zea mays
ccaactagcatcatagaaagctcaataacgttccaacaatggctgctaaaatattttgactacttatgcttctaggtctttctgcaacgtctgctaccgctaccattttcccacaaggctcacaagcattctatagcttccattcttcccccgtacctatcaccaacagtgtgtatggtatgtgaaaacccaattctttaaccctacaggatccaacaggcaatcgcagctggcatcttacctttatcacccttggtcctccaacaatcatcagccctattacagcagttacctttggtgcatttattggcacaaaacatgagggcacaacaactacaacaacttgtgctagcaaacctt

SEQ ID NO: 298869 - DNA, 103 bp, Zea mays
ggtacggaattggagtttcggcctagacgtacgcgaccgcagtcgtagtcacttagcatcatcgactgcagattggagaactcgccaccatgaaggtgctgat

SEQ ID NO: 298870 - DNA, 392 bp, Zea mays
  unsure (1)..(392): unsure at all n locations
ggtcttcagaccattagctttatctactccagagcgcagaagaacccgatcgacaccatgagggtgttgctcgttgccctcgctctcctggctctcgctgcgagcgccacctgcacgcatacaagcggcggctgcggttgacagccaccgccgtcggttcatctaccgccgtcggtgcatctgccacctccggttcacctgccaccttcggtgcatctaccaccgccggtacacctgccgccgccggtccacctgtcaccggcggtccatgtgccgacgccggttcatctgccgncggcaccatgccactaccctactcaaccgccccgggcttagccttatcctcagccacacccatgcccgtgccaacagccgtatccaagcccgtgcca

SEQ ID NO: 298871 - DNA, 413 bp, Zea mays
aaaccagatacaggggtttgcagtagattcatgagagcaacaatggaatccgaaatattagccatcgtcatgctaattgttctttatacatgagttgctaacacgacaatgttcgctcaatgattacacgctgagataggctttcctattttcgccataccttccatcaattatagctacagtatgggaaaacccagctctccaaccatataggctgtaacaagcaatcgctaaaagcaacatacctgtatcgaccttgttgtgtaaacaatcgccagccctatctttggtgcagtcattggtacaaaccatcagggcacaacagctgcagcaactcgtgctacctgagatcaaccaagtagctatggcaaacctttctccctactctccgcaacaacaatttcttccattca

SEQ ID NO: 298872 - DNA, 408 bp, Zea mays
gaccattagctttatctactctagagcgcagaagaacccgatcgacaccatgagggtgttgctcgctgccttcgctttctatggctctcgttgatgagcgccacctgcacgcatacaagcatgtacctgcgcgcgtgccagccagcgcccgagggggaggtaggatgctgggcgcccagaggaggcagcttggatacgggcccatgctgggacaggttttgcgaaggctccgcccggcggcggcggctgaggtggcgaggggctacttcgttgcggcgaaggagatgactgtccgtgatgcattgaactctgcactggatgaagagatgtctgctgatcctttagtttttctgatgggagaagaggttggagagtatcaaggtgcatacaagatttctaagggcttgc

SEQ ID NO: 298873 - DNA, 412 bp, Zea mays
agaccattagctttatctactacagagcgcataagaacccgatcgacaccatgagggtgttgctcgttgcccttgctctcctggctctcgctgggagcgccacctccacgaatacaagcgagggcttaggggtgagcgtattacaacagtctaatgtacaatcgtaacaagcatatgttgacacatgtaaaaatacaagccatcagagcgcatcagtaacaacagctgctaccagcagtgagccaactagccatggggaaccatggcgactacttgtaagagcaggtgcttgcatgcaacacacttgctgtggcgaacgtagttgtataccagtatcaacaacagcttcaacagtttatggtaacatttaggaaactagccatggaaaaccctgtcaactacgtacaataac

SEQ ID NO: 298874 - DNA, 283 bp, Zea mays
atcgaccgatcgatcgctactttcattactacccgtcgaggcgacgcgacagctcgtcaggaggaaggaataaactcactgccagccagtgaagggggagaagtgtactgttccgttgaccagtgcgcgcaccgtccggcagggctgttcatcttgtcgacgaccagtggattaatcggcatggtgtttttggtcacgtcttagttcgttccattcttttattctctgtgcgtttttttttctttttttttaacaatagtttatttatatgttttttattttt

SEQ ID NO: 298875 - DNA, 329 bp, Zea mays
ggtacggattcgagatttcggcccagacctacgcgtgcgaagaggagctattacacggacggggttgagatggcagcaaatgtggagcacgggccaccactgtatctgacgcactagctgttctggcgcatgaagtgcgtgttcaagaccgacaagtgcttcatccttattgaccagctggttttggaaagggaactcagtctcctattatcaaggatgaatattgcttgtgccatttagccactggtgacatgctgagggctgttgtggcggccaagacacctttaggtatcaaagctaaagaagctatgaataagggagagctcgtt

SEQ ID NO: 298876 - DNA, 196 bp, Zea mays
tagcaattagctcatcgactccagattggagaactcgacaccatgaaggtgctgatcgttgcccttgctctcctggcgctcgctgcgagcgccgtctccagtacaagcggcggctgtggctgccatacaccaccgtttcatctaccgccttcgttctatatgccgccttcgatctatctgtcgcagcagaagcagc

SEQ ID NO: 298877 - DNA, 277 bp, Zea mays
tagaaagcacaatagggtaccaacaatggcagccaaaatatttggcttccttatgctcctgggtctttctgcaggggctgttaccgaaaccattttccaacaatgctaacaggctctaatagcttccttttttccccaatacctttaaccagcggggttttaaggatgtgaaaacccaatgcttaaaccttacaggatccaacaggcaatcgcagaaggcatttaacattaataaccctggttcttccaacaacgcgaagccttattacagcagtta

SEQ ID NO: 298878 - DNA, 401 bp, Zea mays
gttatagttcaataataaagttttttgtctgatgtttgtggcttcccagaaataagaaagtacatttctaaaaaaaaaaaaaaaaaaaaaaaaaaaaataaaaaaaaaaaaaaaaaaaaaaaaaaaaaaaaaaaaaataaaaaaaaaaaaaaatttaaaacaaaaaaaaaaaaaaaagggaaaaaaaaagaattcaaaaaaaaaaaaaaaaaataaaaaaaaagggggcgcccttttaaaggaacaaaagtttaataacccttgattgaaaaaaaaaaatttttaaaaggggccccaaaaataaaaacaagggaccggggttaaaaaacgtggagccggaaaaaccccgggcgatccaaaaataaactctttgaaacaaaacccctttattccaaggtgcg

SEQ ID NO: 298879 - DNA, 355 bp, Zea mays
agaccattagctttatgtactacagagcgcagaagaacccgatcgacaccatgagggtgttgctggatgccatctgtctcctggctctcgctgcgagcgccacctacacgcatacaagcggggggtgtgggtgccagccaccggcgacggtttatttatcgcctgaggggcatctgccacctacggatcacctgccacctctgatgcatgtggcaccgccggaccacctgccggcgacggtccacttggcactgccggtccatgtgccgccgccggctcatatggcgccggcaccatgccagtaccctactcaaacggcgcggcctcagactgatacgcagccacatgcatgccc

SEQ ID NO: 298880 - DNA, 242 bp, Zea mays
aattcttcaaccctacaggatccaacaggcaatcgcagcaggcatattacctgtatcacccttgttcctccaacaaccgtcagccctattacagcagttacctttggtgcattagatggcacaaaacatcatggcacaacaactacaacaactagtgctaggaaaccttgctgtcgactcttagcaacagcagtgctcatttcatttaaatatctggccgcattgaactctgctgtctattt

SEQ ID NO: 298881 - DNA, 196 bp, Zea mays
gttctagatcgcgagggccgcccttttttttttatagcgcataagaacccgcacgacaccatgaggttgatgttagttgcccttgctcttctggttttagatgcgagcggcacctacacgcatacaagcggcgtatgaggatgtaatccaccgccgtcaatatatctaccggctacagcgcatttgtcatctccag

SEQ ID NO: 298882 - DNA, 346 bp, Zea mays
aaggaaagcacaatagcgtaccgagaatggcagacaaaaacatcaggctgattatgatcgttggtgtttctggacgggctgttacagctaccattttctctgaaaggtagaaagcttgtataggttccgttcttcaggcgtagctctgaccagcggcgtgtttggcatgtgaaaacccaattcttcaaccctacaggatccaacaggcaatcacagctggcatcttacctttatcacccttgttcctccaacaatcatcagccctattacatcagttacctttggtgcatttattggcacaaaacatcagggcacaacaactacaacaacttgtgctagcaaacct

SEQ ID NO: 298883 - DNA, 417 bp, Zea mays
atgaacaattgaaatgaaaagaaaaaagtattgttcattgaacgcgtagaccaacgatgctgggccaatatattatagtgttcttacacattaccgctgtctctggatgtcttgcttactgctataattatccctcattgctgacacgcttctattgccagcattttaggcagatacgatcccataaatgttagacctacggatttcaaaactcgagttcttcaatccctatttgcttcaacaagcaatggcagccagacacataccttgattatcctagcattaacaatcgccagtcctatttttgcagcacatattggtacaaactatacagcaacatgagctggagaaccttgttctctctgttaacaaccaagaagctcttgcatacatttatctatattcttagaaccatca

SEQ ID NO: 298884 - DNA, 311 bp, Zea mays
ggaacatagaaagcacaatcgtgtaccaacaatggcagccaaaatattttgctgccttatgctccttggcctatctgcaagtgctgctaccgtaaccatctttgcacactgcttacaagctcctatagctttctttcttcccccatacctctcaccagcggtgtatttagtatgtgaaaacccaattcttcaaccctacaggatccaacaggcaatcgcagcaggcatctaacctttatgacccttgctccttcaacaaccgtacgacatattacagcagttacctttggtgcatttgttggcacaaaaca

SEQ ID NO: 298885 - DNA, 278 bp, Zea mays
  unsure (1)..(278): unsure at all n locations
ctgggtcttcagaccattagctttatctactccagagcgcagaagaacccgatcgacaccatgagggtgttgctcgttgccctcgctctcctggctctcgctgcgagcgccacctacacgcatacaagcggcggctgcggatgacagccaccgacgccggttcatgtaccgccggcggtgcatttgccacctccggttcacctgccacctccggtgcatctaccaccgtcggtccagctgtcgtcgncggtccacctgccaccgacggttcatgtgcc

SEQ ID NO: 298886 - DNA, 222 bp, Zea mays
ccacgcgtccggcaccaagaaatccatcgttaggccttcgacagggggaattaatggcgtggtcgggtagcagcagccaccgtcgcctcatcctcgcagccgtcgtcctgctctccgtgctcgcggatgccagcgccagcgccgggacctcctgcgtgccggggtgggccattccgcacaacccgctcccgagctgtcgctggtacgagaccaggcggacct

SEQ ID NO: 298887 - DNA, 263 bp, Zea mays
ctgggtcttcagaccattagctttatctactccagagcgcagaagaacccgatcgacaccatgagggtgttgttcgttgccctcgctctcctggctctcggtgagagcgccacctgcacgcatacaagcggagggtgcagttgctagtcaccgcatactgttaaagtaccgccgacgaggcatttgacagctccgtgtacactcacatctgcgaggctattgctacaacatgcgattgtcgggagcgttttacatcaaccaat

SEQ ID NO: 298888 - DNA, 355 bp, Zea mays
atttttcgtgcattcagaaacacaccgcgtgaagcacattcgcaacatcctaacaacagtggctaccaagatattatcccttcttgcgcttctcgcgctttcagagagcgcaacaaatgctcttattattccacaatgctcacttgctccaagttacattattacacagcttctcacaccagctactttagtggcattgatacaccctgttgagcgagctattaatactcaacaagcatttgcagtgagctgttttacaacaacctattttgcagctgactccacgatgctgggcatatcatacaatacataacatggcaacgtaacagagacaacaattgctaccagctctgtg

SEQ ID NO: 298889 - DNA, 381 bp, Zea mays
  unsure (1)..(381): unsure at all n locations
agaccattagctttatctactccagagcgcagaagaacccgatcgacaccatgagggtgttgctcgttgccctcgctctactggctctcgctgcgagcgccacctccacgcatacaagcggaggctgcggctgccagccaccgccgccggttcatctaccgccgccggtgcatgtgccacctacggttcacctgccaccttcggtgcatctaccaccgccggtccacctgccgccgncggtccacctggcaccggcggtccatgtgccgacgccggttcatctgtcgtcgccaccatgccactaccctactgaaccgncccggcctcaggcttatccccagncacacccatgcccgtgccaacagccgtatacaagcccgt

SEQ ID NO: 298890 - DNA, 211 bp, Zea mays
cttcagaccattagctttatctactccagagtcgcataataacccgatcgacaccatgagggtgttgctggttgccctttgtttgctggctctagtttcctgcgtctccttcatacatacaagtgctggcattcaatgtcaggctgcggttgtcatccaccgacgtctgttcatctaccgtcttcggtgcattctgtcaccttcttttcat

SEQ ID NO: 298891 - DNA, 417 bp, Zea mays
gtcagacaaacttatcaacattcctagggactgatgaatctgactgaccgaccgtgcaggagcacactaagtgaggtacattatcaacaacgtaacaccattggctaccaagataatatccatccttgcgcttgttgcgctttatgtgagcgcaacaaatacgtccattattgcacaatgctcactcgctccaagcgtcattattacacagatcctcccaccagttactctaatgggcttcaaacagccacctgtgcaagcctataggctacaacaagtaattgcgactagcgttttacaacaaccaatttaccagttgcaacaacagtccttggcacatctaacaattcaaaccatcgtaacgcaacaataacaacaatgtctaccagtactgagccacctagccatggtgaaccc

SEQ ID NO: 298892 - DNA, 223 bp, Zea mays
tgctttgacaaaccgcagcagcgttctaccaacaacccatcattggtggtgccctcttttagatttcttatgagttatagttcaataataaagttctttatctgatgttcgcggcttcccagaaataagaaagtacatttctaaaccacacatgcaccaatttaaactatgatacttcgagatactaaaatgtgcttttcaagattcaaccaaacaatgtctc

SEQ ID NO: 298893 - DNA, 390 bp, Zea mays
gttctagatcgcgagcggccgcccttttttttttttttttttttttttttttttttttttgttttattggttttttttttttttgttgactccaccactacaggtccatttatttactcgcaatataaaattaccgatcggttcttaactacacacgcaagcaatttgttcatgcgcttatttaggtgggccactggcccccacttcacttcatttaccttggacaaggaggcggtttcacatacttgtccatattacataaacgaaacaggattttttagaagatgttccaacatttttttcccacccgcgagattaggggccctttaagccgaaatttttagggggggggcaagtttttttggggaggggggggattttttttttttt

SEQ ID NO: 298894 - DNA, 297 bp, Zea mays
ggtttggagaagtattagctgcacattagagttcagataatccaaactggtttcaggatactgtagatgctgtaaggcagtacttgtggttgaatcaggagcataatgttatggaatttctaattatagatggagagcacctgtaccgtatggactatgaatagtttatttaagcacacatagttaacataaacagatgttaccgatgttttttttataatcttactagaaaagggcaacttgaatttgtttttaataaaaaaatttttatgaggggaggataattttgtttttttt

SEQ ID NO: 298895 - DNA, 273 bp, Zea mays
  unsure (1)..(273): unsure at all n locations
gaccacgcgtccgctggtcttcagaccattagctntatctactccagagcgcagaagaacccgatcgacaccatgagggtgttgctcgttgccctcgctctcctggctctcgctgcgagcgccacctgcacgcatacaagcggcggctgcggctgccagccaccgccgccggtcattaccgccgcggtgcattgcacctcggtcactgcactcgggcattcacagtcactgcgcgcgtcactgacgcgtcatggcgcgcgtattgcgcgacat

SEQ ID NO: 298896 - DNA, 331 bp, Zea mays
  unsure (1)..(331): unsure at all n locations
accattagctgtatctactccagagcgcagaagaacccgatcgacaccatgagggtgttgctcgttgccctcgctctcctggctctcgctgcgagcgccacctgcaggcgtcaagcggcggctgcggctgccagccaccgccgccggttcatctaccgccgccggtgcatctgccacctncggttcacctgccacctncggtgcatctnccaccgccggtccctggccgcgccggtcacctgcaccgcggccatgtgccgcgcgtcattgcgcgcacatgactacctactaccgccngctagctatncagcaaccatgcggcacagcgatc

SEQ ID NO: 298897 - DNA, 318 bp, Zea mays
attctgagcattcagaaacacaccaagcgaagcgcactagcaacaacctaacaacaatggctaccaagatattatccctccttgcgcttcttgcagcttttgcgagcgcgacatatgcgtccattattccacaatgctcactactcctagtccattattcacagtctccaccagtacttaatggcttgaacaccactgcagcttttaaaaaggatgcgaggctaaaacaatgcaatgacacatctgccattacataacatgacgacagacaagtcacagatacactactggactgcctatgaagagtgtgtcacatgt

SEQ ID NO: 298898 - DNA, 344 bp, Zea mays
  unsure (1)..(344): unsure at all n locations
ttcagaaacacaccaagcgaagcgcactagcaacgacctaacaacaatggctaccaagatattagccctccttgcgcttcttgcccttttgtgagcgctcatatgcgtcattattcacaatgctacttgctctaggcattattcacagtctccacagtacttaatggcttnaacactactgtgcagccactcacacaagctggggaggctacacaacaatgcaatgacacatctgcaattacatcaagcataacgacagacacagtctcaactgcactactggactgcgtatgagaagtgtgatcacatgttgcacgatgacagacaaagtcaagttgacgtag

SEQ ID NO: 298899 - DNA, 326 bp, Zea mays
  unsure (1)..(326): unsure at all n locations
ctagcaacatagaggcacatagtgtaccaacaatggcagccaaaatatttgcctccttatgctccttggtctttctgcaagtgctgctacggcgaccattttgccgaatgctcgcngctcctatagcttccttcttcccgacctctcaccagcgggtctcggatgtgaaaaccatcttaacctcggatcacagatccatggattacttatacctgtctccatatagctatccatcttggctatgaaaatagcaactcaactggtaaatgtgattaaaggttatacatgttgatgttatgaaaatctacatcttgtacaattataca

SEQ ID NO: 298900 - DNA, 383 bp, Zea mays
  unsure (1)..(383): unsure at all n locations
tagtgtaccaacaatggcagccaaaaatatttgcttccttatgctcctaggtctttctgcaagtgttgctaccgcaaccattttcccacaatgctcacaagctcctatagctgcccttcttccnccatacctctcaccagcggtgtcttcaatgtgtgaaaacccaattgttcaaccctacaggatccaacaggcaatcgcaacaggcatcttaccatttcaccctttcctcaacaaccgcagcctatacagagtacctttgtcattgtggacaaacataggacaaaatcacaactggtagaaacttgtgatacttagacatagtcttcatcaacactgctgatgacttgtgtattgacacaatacatcagcagtagtgtgct

SEQ ID NO: 298901 - DNA, 334 bp, Zea mays
atccaacccacttgctctggcgaacgtagctgcataccatcaacaacaacgtctgcaacagtttatgctagcgctcagtcaactagccatggtgaaggcctgtcgcctaggtacaacagcaacaattgctttcatctagcccgctcgctgtgggcaatgcacctacgtacctacaacaacagttgctgcaacagattgtaccagctctgactcagctagctgtggcaaaccctactgcctacttgcaacagttgcttccattcaaccaactggctgtgtcgaactctgctgtgtacctacaacagcgacaacagttacttaatccactagcagt

SEQ ID NO: 298902 - DNA, 315 bp, Zea mays
  unsure (1)..(315): unsure at all n locations
cccncactcagataacccagccgccgccgcatcggcctcccaggtaagcagtagcgtccaccccatccgccgccatgaagcgcaacccccgcgtcacgagctcccggcggaagtgtcgtaagggcacttacggccccgtcctcgccgcgcggctatgtcggggcttcgacgactcgccagtcaagggtcatcgtcagcacaggangggggacaagcggggagggggcgggtgaagaggacagagagagaggtactagagcagaggaggagcagggggtagaggtgatcttgggtgttataacatgttttttatat

SEQ ID NO: 298903 - DNA, 265 bp, Zea mays
  unsure (1)..(265): unsure at all n locations
accattagcttatctactccagagcgcagaagaacccgatcgacaccatgagggtgttgctcgttgccctcgctctcctggctctcgtgcgagcgccacctcacgcatacaacggcggctgcggtgcagccaccgcgcggttattaccgccgcgggcattgcacctcgtacctgcactcgtgcattcacgcnncctgcgcgcggcactgacgcgcatgtgcggcgtattgcggacatcatctatacgccgctagctatcagcaca

SEQ ID NO: 298904 - DNA, 254 bp, Zea mays
  unsure (1)..(254): unsure at all n locations
cgcgtccgcactagcaacatagatagcactatagtgtaccaacaatggcagccaaaantatttgcctccttatgctctctaggtatttctgcaagtgctgctacggcgaccatttgggccagtgctcacaagctcctatagcttcccttcttcccccgtacctctcaccagcggtgtcttcggatgtgaaacccaatctcaacccacggtccacaggcttcctagcattaccttataccctgcctcacaatata

SEQ ID NO: 298905 - DNA, 270 bp, Zea mays
  unsure (1)..(270): unsure at all n locations
cgctctgctggctctcgctgcgagcgccacctccacgcatacaagcggcggctgcggctgccagccaccgccgccggttcatctaccgccgccggtgcatctgccacctgcggttcacctgccacctccggtgcatctnccaccgncggtccacctgccgccgccggccacctgccaccgcggccatagtgccgcgcggttattttgcgcgcaccatcactaccctactcaaccgcccgggctcagctcatncncagcacacccatgccc

SEQ ID NO: 298906 - DNA, 148 bp, Zea mays
  unsure (1)..(148): unsure at all n locations
gtcgcacatatctactatactatactctaggaagcaaggacaccacctccatggcagccatgatgctagcattgttcgctctcctagctctntgtgcaagcgcgggtggtgcgacctatattccagggcacttgccaccttcacgcca

SEQ ID NO: 298907 - DNA, 319 bp, Zea mays
  unsure (1)..(319): unsure at all n locations
gggtcttcataccattaacttttttttctccagagcgcanaataacccgagcgactccattaaggtgcgggtcgttgccctctctctcctgactctcgctggcagctcctcctcctcgcatactagctgcagctgctgctgccatccacccccgcctgttcatctaccgtcgtcagtgcatctgccatcttcgattcatccaccacctacaatgcatttgccaactgcggtgcacctgccgtcaacaggccacctgccaccgactgtccatgtgccggcgtctgttcatgtggcgtcttcaacatgccacttccctact

SEQ ID NO: 298908 - DNA, 319 bp, Zea mays
agttcaggttcggaatggccgggccaaccgtcgcagctcatataaaggacaatagtgttccctcaatggcagcccaaatattttggttccctatgctccctggtccttctgcaagagttggttccgcaaccatttttccacaatgctctcaaactcctattgttttccttttttccccatacctctcaccagcggggtgttctatgtgtgtaaacccaattgttctacccctcaagctccaacaagcaatcgctgcaagcaacattcccttatctcccctgttgtaacaatcgccagccccatctttggtgcagtcatt

SEQ ID NO: 298909 - DNA, 373 bp, Zea mays
ggaagctataggagcttgtgagcattgaagcttcaacaagcaatcgcagctagcaacatacctttatcgcccttgttgtgtcaacaatcgccagccctatctttggtgcagtcattggtacataccattaaggcacatcagctgctgcaactcgtgctacctgtgatcaaccaagtagctctggcaaacctttctccctactctccgcaacaacaatttcttccattcaaccaactgtctacactgaaccctgctgcttatttgcagctacaactattaccatttagccagctagctactggctactctcaacaacaacaacttcttccattttaccaattggccgcactgtaccccgctgcttatttgcagc

SEQ ID NO: 298910 - DNA, 383 bp, Zea mays
caacaagcaacatagaaagtggtatccagtagcaacaattgagcttcaatggcgaccatgatattttccctccttatgctccttgctctttctgcatgtgttgctaacgcgacaattttccctcaatgctcacaagctcctattgcttcccttcttcccccataccttccatcaatgatagcttcagcatgtgaaaacccagctcttcaaccctattagctccaacatgcaatcgcagcaagcatcattcctttatcacccttgtttcaactatcgccagccctatctttggtgcagtcattggttcaaaccatcatggcacagcatctgctgctactcgtgctacctgtgatcaaccaagttgctctggcaaacctttctcc

SEQ ID NO: 298911 - DNA, 305 bp, Zea mays
ttgcttcattgatagcacatttgtgttccttctatggctgccaaattatttagcctccttatgctccttggtctgtctgcatgtgctgcttcggcgtccattttcccactatgctcacaagctcctatagcttacgttcttaccccgtacctctcaccagcggagtcttcgagtttgtgattacccaattctccatccctattggttccatctggcattcgctgctggcttcttacctttatcacccttgctgctccaacaatcttctgccctattacagctgcttcctttggggcattttttgg

SEQ ID NO: 298912 - DNA, 362 bp, Zea mays
ctgaaacacaccaagcgaatctcattttcttcatcctttcaacaatgggtaccaagatattatccctccttgcgcttcttgcgctttttgcgtgcgctactaatgcgttcattattccacaatgctcacttgctccatgttccattattacacagtttcttccaccagttacttcaatgggcttcgaacacccatctgtgcatgcctataagcttcatcaagcaattgcggcgagcgtctttaaacatccaatttcccaactgctacaacaatcgctggcacatcttacaattcataccatcgctacgcatctgctacaacaattcctaccatcactgagccacctagccatggtgaaccct

SEQ ID NO: 298913 - DNA, 319 bp, Zea mays
tctagatcgcgagcggccgccctttttttttttttttttttggaacaagggcgggttcttttcatttggggggggcattcaaggcattgctcacaccgacactgccacccatggggatgcgtgacacattttttctctatcatcgccgcttaatgtcccaactttcttgcttgccagggggttttcttcagcacattgtttcttcaaagggggacaccgcccgctgcaacgtttgggcatggagtcggctgcttctagccgctcatcgccgtcagttgctgcgcttcctgcggcgttggcagcaccccaatcctgggcc

SEQ ID NO: 298914 - DNA, 375 bp, Zea mays
tccactcgtccgcctactagcttcttttttagctcaatagtgtaccaacaatggcagcctttatattttgcttggttatgctccttggtctttctgcaagtgttgctaccgcttccattttccctcaatgctcacatgctcctatagcttcccttcttcccccatacctctcaccagcggtgtcttcaatgtgtgaaaacccaattgttcaaccctactagatccatctggctttcgcatcaagcatcttaccattatcacccttgttcctccaacaaccgtctgccctattactgctgttacctttggtccatttggtggcacataacatcagggcacaacttctacatcatcttgtgctagcaaaccttgctg

SEQ ID NO: 298915 - DNA, 333 bp, Zea mays
tcgtccgtgccgatctgtgcgcatccctattctgtgctgggatggcggtcgcgtatctgctgctgctgctgctgccacagctagcggctgcggctgccaccggcgtgtggatgacagtcttgcccttcgttttcagcggggcctctgggatgctcgcgacctgcgtcatccatcctatcgtcatggtcatagtgaggatccatttgggtgtaggctctgctggtcaagtcacaaagaacatgcttgcatatgaaggtgtccgttctttcttcaaaggtttgtccgccggtttgctgtagcttgcgtcgttcacgtctgctcgtcttggatcct

SEQ ID NO: 298916 - DNA, 369 bp, Zea mays
ggtcttcagaccattagctttttcttctccagagcgcagtagaatcccgagcgagaccattaaggtgttgctcgttgccctcactctcctggctctcgctgagagcgccacctccacgcatacaagcggcggctgcggctgccagccaccgtcgccggttcatctaccgccgccggtgcatctgccaccttcggttcacctgccacctccggtgcatctcccaccgccggtccacctgccgccgccggtccacctgccaccgccggtccatgtgccgccgtcggttcatctgccgtcgtcaccatgccacttccctactctaccgccccggcctcagccctattcccagccacacccatgcccgtgcca

SEQ ID NO: 298917 - DNA, 386 bp, Zea mays
tccctcgcgtccggagcctccgttcgctcctcttttctttcctcattccagttcctctcctggggaggtgccgttcgtcgtctccgattctccgtctgtccgtcctcttagtcttgtgcgggatccacagaaggatgagtgaagaggatatgactgctgcttctgctgtgctgccgttgtgggcccctatgctcaatgaaaggatcctctcttctctgtccaggaagtccgttgctgctcatccgtggcatgatcttgagatcggtcctgatgctcctgctgttttcaatgttgttgttgagatcacaaagggaagcaatgtttaatatgagcttgacaagaaaactggactgattaaagttgatcgagtcctatactcatcagtt

SEQ ID NO: 298918 - DNA, 371 bp, Zea mays
gttcggatcgctctctctctcttcctgttctcccccttatcctcccgtcggctgctccgcttcaagatgcagatctttgtgatatccctgtccggcttgactatcaccctcgaggtggtgtcgtctgacaccattgtcttcgttttggccatgatccaggtcttggtgggcttccccccagtcctgctgcggctcatcttcgctggcatactgcttgaggacgggcgctcgcttgctgtcttcatcatcctgttagtgtgctccctccaccttgtgctccgcctcaagggtggcatgcagatctttgtgtaaaccctgtccggcttgactatcaccctcgatgtggagtcctctgacaccattgtcaacgt

SEQ ID NO: 298919 - DNA, 362 bp, Zea mays
aggcaatcgctgctggcatctttcctttatcacccttgttcctccatcagggaggtgccctattacaacaggtgcctttggtgcatttattggcacataacatctgggctcttcttcttcttcttcttgtgcttgcaatccttgctgcctactctcagcatctgctgtttcttccattcaaccaactaagttcattgaactctgcttcttatttgcaacaacaacatcttccattctgccagcttcctgctgcctacccccagcaatttcttccattcaaccaacttgcagcattgaactctcctgcttatttacagctgcaactacttcttccattcagccagcttgctggtgtgagccct

SEQ ID NO: 298920 - DNA, 253 bp, Zea mays
tgctacccatatccaggcacttgtaccactactgatgccattggcttcatgaatcctggatgcagttctgcatgaaacaacaaggggttgcaacttgtatgcgtggcgccctgatgctgacaactgtggccttaccgttatccgtgcctgatgcaatgatgatgccaagtttgatgccaccgatgacaatgatgccgatgccgtaatgatgccatcgatatggtgccgctatgatgtcaccaataacgatagc

SEQ ID NO: 298921 - DNA, 360 bp, Zea mays
gaccaacaagcaacatagatagtggtttccagttgctacaattgagctacaatggcgaccatgatattttccctccttatgctccttgctctttctgcatgtggtgcttacgcgacatttttccctcaatgctcacaagctcctatatgattcacttttgccccattccttccatcaatgagtagctcattatgtgaaaacccagctcctctaccctattagctcctacaagcaatcgcagcaagcaacatacctctatcacccttgttgtaactatcgccagccctatctttggtgcagtcattggtacataccatcatggcacatctgctgcagcaactcgtgctacctgtgatcaac

SEQ ID NO: 298922 - DNA, 361 bp, Zea mays
agaccaacttgcatcatagatagctctatagtgttccaacaatggcagccaaaatattttgctttcttatgctccttggtctttctgcaagtgttgctaccgcaaccattttcccacaatagctcacaagctcctattgcttcccttcttcccccattcctctcaccagcggtgtcttctatgtgtgaaaacccaattgttcatcccttcaggatccaacaagcaatcgcaactggcatcttaccattatctcccttgttcctccaacatccgtctgccctattactgcagttacctttggtccatttggtggcacatttcatctgggctcatcaacttcatcatcttgtgcttgcatacc

SEQ ID NO: 298923 - DNA, 375 bp, Zea mays
attttcagcattcagaaactctcttttcgtagcgcacttgcttcttccgggcaggttttgcttccttgagatgagccctccttgcgcttcttgccctttttgtgtgcgcaacatatgcgttcattattccacagtgctctcttgctcctagtgccattattccacagtttcttccaccagtttcttcaatgggcttcgtacatccttccgtgcatgccttcatgcttcaacttgcgcttgcggggagcgtctttcatcaaccaattgcccaattgctactacaatccttggcacatcttaacctacataccatcgcatcgcaacagctacaacagtttctggcatcactgatccacctagccgtggtgaaccctg

SEQ ID NO: 298924 - DNA, 347 bp, Zea mays
ctacttgctacattgttagcacatttgtgttcctactttggctgccattattttgagcctccttatgctccttggtctttctgcaagtgctgctacagcgaccattttcccgtaatgctcgcaagctcctatatgcttcctttttcccccgttcctctcaccagcggtgtcttcggtatgtgtaaacccaattcttctacccttcaagatccaacatgcattcacagctggcatcttacctttatcacccttgttcctccaacattcatcagccctattacatcagtttcctttggtgcatctattggcacattacatcatggcacaacatcttctacaacttgtgc

SEQ ID NO: 298925 - DNA, 351 bp, Zea mays
tatatattcaaccacaagactttttttctgaaatcctaccaagagctgtacgaggtcattgtgtacatgcatgcatctttacaggctattgggaggatgctggtactatcaattcattctttgatgcaaacttgggcctgattgtgctgccttccaaggtggatcattatgaacaaaaaactcctttattgactgtaccacgttacctgcctgacacgcagtttgactactgccctacgatagacgcatctatatatgagaggctgccactgactgaatgccacatcgagcttcctgcgattggaggctgctaacatgccaactgtcgatgcgatcccaacgactccgtta

SEQ ID NO: 298926 - DNA, 374 bp, Zea mays
gcggcagagcgtagagaggatcgtcttacagaacagcatgaagatggtcatcgggctcgtcgtgtgcctggctctgtcagctgccagcgcctctgcaatgcagatgccctgcccctgcgcggggctgctaggcttgttcggcgctggcgccggcctgacgacgatgatgggcgccggcgggctgttcccctacgcggagttcctgaagctgccgctgtgctgcccgctggcggcggcgccctacttcgccgggtgtgggctgacgtgcgccatgttccagccgctccggcaacagtgctgccagcagcagatgaagatgatggacgtgcagtccgtcgcgcagcagctgcagatgatgatgcatcttgagcgtg

SEQ ID NO: 298927 - DNA, 318 bp, Zea mays
tctctgctttcataaacacaccttgcgtttctctcttgctacaacctttcttctatgaggtccttgatattagccctggttgcgcttctttcccttttattgagcgcaacaaatgcgttcattattccacagtgctcacttgctgctagtgccattattccacatttactcccaccagttacttcaatgggcttcgaacatccatccgtgcatgcctacaagcttcaacttgcgcttgcggcgtgcgtctttcaacatccaattgcccaattgcaacatcaatccttggcacatcttaaccttcaaaccatcggaacg

SEQ ID NO: 298928 - DNA, 362 bp, Zea mays
ctttttgtgagcgcaacaaatgcgttcattattccacaatgctcacttgctcctagtgccattattccacagttcctccgaccagttacttcaatgggcttcgaacaccttgctgtgcatgccttctggcttcatcatgcgcttgcggcgtgcgtctttcatcatccaattttccaattgcatcaacaatccttggctcatctttccattcaatccatcgcttcacatctgcttcatcagttccttccagctctgatccatcttgatgtggtgaaccctgtcgcctacttgcaacaacaggtgcttgcattcaacccacttgctctggcaaacgttgctgcattccaacaacaacaacaatt

SEQ ID NO: 298929 - DNA, 180 bp, Zea mays
ctttttgtgagcgctacatacgcgttttttattccacattgctcactcgctcggggtgccattattccactgttgctccgaccaggctctttaatgggcttggatcacctagatgtgcttgcctactagcctcttcttgcgcttgccgagtgcgtgtttctactaccattctaccaattg

SEQ ID NO: 298930 - DNA, 412 bp, Zea mays
  unsure (1)..(412): unsure at all n locations
gtgtactcaacgagcaacatataaagtggaatccagtatcaacaatagagcatcaatggagactatgtatatttccctccttatgctccttgctctntctacatgtgttgcgggcgcgtcttttttccctcaatgctcacaagctccatagcctnccttttccccataccttcataatatagcttagttgtgaaaccactttaacattagctaacagcatccgagacatcttatgctgtggtcatgcagccattgtcatatgcaaatagcccattttactgttttataattttgaattttcatttaacattttattttttctttgttttttctttttttttttgttttttttttatttttttttttttttattttattttttttttttatttttttttgttttttatttttt

SEQ ID NO: 298931 - DNA, 214 bp, Zea mays
  unsure (1)..(214): unsure at all n locations
cccacgcgaccgccagcgagcggcagagaaagcacaatagtgtactcaacaagtcatattacatatttcgccttcttatgctcctnggtatttctgcaagtgctgctacggcgacggggggggcgaatgttcacaagctcctatagcttcccttctccaccgaccattacagcgggtctcggatgtgaacccaatctcaaccacagaccacagc

SEQ ID NO: 298932 - DNA, 367 bp, Zea mays
  unsure (1)..(367): unsure at all n locations
ccaactagcaacatagaaagcacaatagtgtaccaacaatggcagccaaaatantttgcctccttatgctccttggtatttctgcaagtgctgctacggcgaccattttcccgcaatgctcacaagctcctatagcttcccttcttcccccgtacctctcaccagcggtgtcttcggtatgtgaaaacccaattcttaaccctacggatcaacagcatccactggctttacttataccttgtctcacatatagccattagagtacttgtcttatggcaaaataggccactcaactgctgaactgtctttaacgattttatacatgtatgatgttatgacacaatctacgtcttctccgattctacat

SEQ ID NO: 298933 - DNA, 258 bp, Zea mays
atcgttctcgtcgtgtgcctggctctgtcatctgccagcgcctcttcaatgcagatgccctaccccttctcggggcggcattgcttgtacaactctaatgacttttttacatttattattgagattggatcccaattttatatcattttaaaactaattttttattaaaaaaatttttttttattttcttgtaagggtttaaatttgtacccggatttgcccctgttttttataatattctatttttaaaaatacatt

SEQ ID NO: 298934 - DNA, 388 bp, Zea mays
cacgcgtccgaatattttgagcattcaaaaacacatttttcgaagcacattaccaacaaccggagggcagtttctaccaagagatggtccctacttgcgcttattgcgctttttgcgagcgcaacaaatgccgccattattccacaatgctcacttgctccaagatccattattacacaggtactgccaccatgtacttcaatgagcttggaacacccacctgtgcaagcctatatgctacaacaagcaattgcggggagcgggttacaacaaccaatttgccagttgcaacaacaatccttggcacatctaacaatacaaaccatcgcaacgcaacagcaaccacaattcctaccaacactgaaccacctaaccatggtgaaccctg

SEQ ID NO: 298935 - DNA, 315 bp, Zea mays
  unsure (1)..(315): unsure at all n locations
cttcagaccattagctttatctatttctgagcgcagaagaaccccatcgacgggaggatggtgttgctcgttgccgtccttcttctggttgttgttgctagcaccacctccacgcatactaccagcggctgctgctgctagccaccgccgccggttgatctaccgccgccggcgcatcagccacctcctgttgatctgccgcctcctgcgcatcttctaccgccggtgcacctgctgccgccggtggacctgctaccgccggtccatgatgcgccgccggttgatcatgtgccgncaccatgatactactactac

SEQ ID NO: 298936 - DNA, 367 bp, Zea mays
agaccattagctttatctactccatttcgcagaagaacccgatcgacaccgtgggggtgttgctcgttggcctggctctcctggctctcgctgcgagcgccacctccacgcatacaagcggcggctgcggctgccagccaccgccggcggttcatctaccgccgtcggtgcatctgccacctgcggttcacctgccacctccagggcaatgtccaccggccgtccacctgccgccgccagtgcacctgccaccggcagtccatggtgccccgactgttcatatgtcgtcgacaccatgccactaccctacttaaccgacccggccttagcctgatccccaggcacacccatgcccgtgccaacaggc

SEQ ID NO: 298937 - DNA, 349 bp, Zea mays
aagaaccccatcgacaccgtccgccgttttgcaaaaatgacgcgggctctccaaactatagctgcgagcaccacctccactcatacaaacagctgctgcggctgccatccaccgcctccggttcatctaccgccgacagtgcatctgccaccttcggatcacctgccacctccagtgcatatcccaccaacaagccacctgacgacgccagaccacctgacaccgcctgtccatgtgccaacgccgattcatatgtcggcggcaccatgccactaccctactcaaccgcccccgcctgagcctaattctcagccacacccatgcccctgccaacagccgcatacaaacc

SEQ ID NO: 298938 - DNA, 312 bp, Zea mays
taacaacgacctaacagcgccggttatcaagatatcaggggttcttacgcttcttgccctttttggcaacccaacaaatgcattcattattccacaatgctcacttactcctagtgccattattacacagttcctcccaccacttacttcaatgtacttaccacacctagctgcccaagccaacatgcaacaacaagcgcttgcggcgaacgtcttacaacaaccaattgccccattgcaacaacataccttgccacatctaatactacaagccatcacaccgcaccaacctcaacacatcctaccaacact

SEQ ID NO: 298939 - DNA, 173 bp, Zea mays
gggtttttgattttagccgccgccttggttcatctcacatccctcgagaagacgggtgcttctagccgatcgaggccatggccaaattctccgacctccacaccgccgacggcctcaagtccctcgaagctcacctcgccggcaaaacctatgtgtctggggactccattact

SEQ ID NO: 298940 - DNA, 347 bp, Zea mays
gcaattagctcatctactccattgtgtagaactcgacaccatgaacgtgcggggcgtttttcttgctctcctggctctcactacgagcgcctcctccagtacaagcggcggctgtggctgccagacaccaccgtttcatctaccgcctccgttctatatgccgcctccgatctatctgccgccgcagcagcagccgcagccatggcaataccccactcaaccaccgcagctaagcccgtgccagcagttcggatcctgctgcgtctgcagcgtaagcagcccgttcctaggccagtgcgtacagtttctgaggcaacaatacagcccggcggcgactccctacagct

SEQ ID NO: 298941 - DNA, 384 bp, Zea mays
  unsure (1)..(384): unsure at all n locations
tcaacaagcaacatttaaagcggtattctttagcaacaatagagcaacaatggcgcccattttataatccatccgggatgctccaaaactctntctgcatgtgttgctaacactaccatttttcctcaatactcacaagctcctatagctgcccttcttcccccataccttccatcaatgaccgcttcagtatgtgaaaacccagcccttcaaccctacaggctccaacaagcaatcgcaacaagcaacttacctttatcacccctcatctttcaacaatcgccagccctatctttggtgcagtcattgctacaaaccatcagggcacaacagctgcaacaactcctgctaccagtgatcagccaagtagctcttgcaaacctt

SEQ ID NO: 298942 - DNA, 266 bp, Zea mays
gctagctggtgtgagccctgcttttttcttgatacaaccacagttgttgccgggctaccagcacgctgcgcctaacgctggcaccctcttacaactgcaacaattgctgccattcaaccaacttgctttgacaaacccagcagcgttctaccaacaacccatcattggtggtgccctcttttagatttcttatgagttatagttcaataataaagttttttgtctgatgtttgtggcttcccagaaataagaaagtacatttctag

SEQ ID NO: 298943 - DNA, 152 bp, Zea mays
ccccgtcatcgatctcgtttctaatctatccatcctcgtttcctccgtccgcgagcattttaaccccatgggcgggatcaaaatcgggatcaatgggttcggcaggatcggaaggctggtggccagggtggcccttcagagtgaccatgtct

SEQ ID NO: 298944 - DNA, 401 bp, Zea mays
ccggggcggcccacgcatcctcaactagcaacatataaagcacagtagtttaccaacaatggcaaccaaaatgcgccgctttctaaagctccggggtctttctaaaaatgctgctacggcgaccattttcccacaatgctcacaagctcctatagcttcccttcttcccccgtacctctcaccagccgtgtattcggtatgtgaaaacccaattcttcaaccctatacgatccaacaggcaatcgcagctggcatcttacctttatcacccttgttcctccaacaatcatcagccctattacagcagttacctttggtgcatttattggcacaaaacatcagggcacaacaactacaacaacttgtgctagcaaaccttgctgcctactctcagcaacaac

SEQ ID NO: 298945 - DNA, 270 bp, Zea mays
ccctttcctccgccacagcatattccaggtcggttggttttggcacttcgcaccggcgaccatggcttccaacggcatcagccccacatatgtatgtgttgctcgggttgcacgcacccctatgggcgctttcctaggcgcctagactcccttgcctgctacaaaaccagcctctatactaattcaatctgctcttcaaagaacaaacctcgatccaatccctcaacatgacgtctactttggaaacctatcgagtgctaatattccaca

SEQ ID NO: 298946 - DNA, 361 bp, Zea mays
  unsure (1)..(361): unsure at all n locations
acaataaccttatttaactcaattttgtaaaaaaacccgaccgacaccatgggggggttgctcgaagccctcggtctcctggctctcgctgcgagcgccacctccacgcatacaagcggcggctgcggctgccagccaccgccgccggttcatctaccgccgccggtgcatctgccaccttcggttcacctgccacctccggtgcatctnccaccgccggtccacctgccgacgccggtgcacctgccaccgncggtccatgtgccgccgacggttcatatgccgccgccaccatgccactaccctactcaaccgccccggcctcagactcatacccagccacacccatgcccgtgccaac

SEQ ID NO: 298947 - DNA, 369 bp, Zea mays
  unsure (1)..(369): unsure at all n locations
cccccttccaaataggaacctcctgtttccaaaaattgcaaaagtaacgggccctttaaaaagatgggggacatcaccacanccgccgtggcggcatgcggctctgtgcttcccggccctggtggccagggccgtctgccaaggctaggtcgagcggcacacgctcacggacctgcaatgcttgcaggaggtccaggagagcccgctcgacacgtgcctccacgtcctcaaccggcagctaaccggcagctgcctctgccgccctttccgggtgaacacccggctccccattctgtgctgccagcatctccacaacctaagaccggactgcccctgctccaacatccgctacatggtcacaacctacta

SEQ ID NO: 298948 - DNA, 339 bp, Zea mays
aagcaacataaatagtgcaattctttatcctcaatagagcatcaatctcaggggggatattttacatacttatgctcaacgctctctctgcatactggtgctaacacgaccatttttcctcaatactcacaaactactatagctgcccttcttacaccataccttccatcaatgaccgcttcaatatgagaaaacccatcccttcaaccctacaggctccaacaagcaatcgcaacacgcaacttacctttatcacccctgttctttcaacaatcgccagccctatctttagtgcagtcagtggtacaaaaccatcatgcacaacagctgcagcaactc

SEQ ID NO: 298949 - DNA, 376 bp, Zea mays
cagaccgtccgaatccggggcgaccaccgtcgcatacttatctactcatttttaaaacccatcaaccagagggggtgatataagcctcgggtactgactctctctgcgagcgccacctacacgcatacaaactgtggctgcggctgccaaccaccgccgccggttcatctaccgccgcacaagcatctgccacctacggttcacctgccacctacggtgcatttcccaccgccagtccacctgccgccgccggtccacctgccaccgccggttcatgtgccgccgacggatcatcttgcccctccaccatgccaataccctaattaaacagccccgcctcaggctcattcgcagccacacccatgcccgtgccaac

SEQ ID NO: 298950 - DNA, 363 bp, Zea mays
  unsure (1)..(363): unsure at all n locations
attcggggggcgacccactcctgctatataaaaacaaactacccctctattttataccaacctcctaacaacaatcagggggcatatattaaccctcctggcgctacctaaacttaattcactcgcccaaatgcatacattattccactgtgctaacctcctcctaacccaattataccacaggtcctcccaccatctacttcaatgngctacgtacaaccaacagtgcatgtctaaacgctacttctagtgcttgcggcgagccacttacaacaaccaattcatcaatcgcaacaacattatctgccacatgtaacattacaatacattactaaaccacaccaacatcagtttcatccataa

SEQ ID NO: 298951 - DNA, 310 bp, Zea mays
gccgtcgtcttctgcggttcttctcttctactcctccaatttgacctcggggcggggcatgtttaagcttcaccttcaaccatgggtaaggagaagtcccacatcaacattgtggtcattggccacgtctactctggcaagtcgacctccacctgccacctgatctacaagcttggaggcattgacaagcgtgtaatagagaggtttgagaaggatgctgcttatatgaacaagcggtccttcaagtatgcttggttgctcgacttgctcaaggctcaccgtgacaggggtatcaccaattgatttcttc

SEQ ID NO: 298952 - DNA, 275 bp, Zea mays
tcgcgccagccgcacgggctggctttctttggcgccaaccaggtgctccccgggggggttggctacaaaacggtgggggaccgctcgccctacccgggcagtttcatgctcgaccagctcaccggcttctacgccttcgttgtttttaacaagcatcaacaacaacctgctagtcgcatttgaccccaatggccgggtgccattcttccgggggatcacccgcgacagctgcatcgccttcttcgacgacattgacatgctcaaaggctcatgcg

SEQ ID NO: 298953 - DNA, 349 bp, Zea mays
attgagaccaactagcaacatagattgctctttcgtgtaccaacaatggccggggagagattttgcttccttatgctccttggtctttctgcaagtgctggtaccgcaaccatttttccacaatgctcacaagcttctatagcttcctttcttgccccatacctgtcaccagcggcgtcttcagcatgtgaaaacccaattcttcaaccgtacatgatccaacaggcaatcgtagcaggcatgttacatctatcaccctcggtccttctacaaccgtcagccctattacagcagttacctttggtgcatttttttgcacaaaacatgaatgcgcatcatctacaaccac

SEQ ID NO: 298954 - DNA, 358 bp, Zea mays
cctgggtcgggccacgcgtccggctggatcaaccaatgggagttcatttgtttttatgtccaaaggaactccttaggcggagttatcatacaaggtgagcgaatctttcccttacaaggggatcaataaaaagtggaaagaatggttccatgtaacatctattgccactgctgtaaacccctgacgcgtaattatgtcaaggaactcatgggtttatactcatgttgtagagtaggacttcctgcaccctatcgaaggcatccatctacaattggagactgggtacatgataacttccacagccgccaccaatgaccaacctgctttcatcttgagcatgcctaaccgcaagccgatt

SEQ ID NO: 298955 - DNA, 343 bp, Zea mays
cttgcgcgtacgcgtacacttttcttctccgaatcgtcctcctatcgagcctgggtgatcccacactccggtggcctcgcttcaagatgcagatctttgtgaagaccctcaccggcaagactatcaccctcgaggtggagtcttctgacaccattgacaatgtcaaggctaagatccaggacaaggagggcatccctcctgaccagcagcggcttatcttcgccggcaagcagcttgaggacggccgcacacttgctgactacaacatccagaaggagtcaacccttcatttggtgctgcgccttaggggaggcatgcagatctttgtcaagaccttgactgg

SEQ ID NO: 298956 - DNA, 272 bp, Zea mays
gcaacatataaagcacaatagtgtttctctatggcagccaaaatattttgccggcggatgctccttggtctatctggacacgctactaccgccaccattttgccacaatgctcacaagctactatagcttaccttgttcccccgtacctttcaccagcggtgtcttctgacatatgaaaacccaattcttcaaccctataggatccaacaggcaactcgtaggttgcatctcacctttattacacttgttcctccaacaatcatcaccccta

SEQ ID NO: 298957 - DNA, 317 bp, Zea mays
gccaagcggacaagtgcaacttattttcaacatcgaacgcacacttgaggagggagatcagcaactcaaatatcgcgcccccttatgctccctgtgccttcttcaagggctacctcgggcagcatttccccacacagctcacaatctaatatagggtcccttatttcgcagaccctattaccaacgggtgctatagaggatgtgaaaacccaatttttcaaccctacaggatccaacaggcaatcgcatctagcattctacctttatcacccttgttcgtcctactactcatcatgcctattacaagaaataccgtt

SEQ ID NO: 298958 - DNA, 350 bp, Zea mays
attttgagcattcataaacactcctttcgaagcacattagcaacaacctggcagcaatggctaccaagatattatccctccttgcgcttcttgcgctttttgcgagcgcaacaaatgcgttcattattccacaatgctcacttgctccaagttccattattacacattttctcccaccagttacttgaatgggcttcgaacacccagctgtgctagcctatatgctacaacaagcaattgcatgcagcgtcttacaacaaccaatttcccagtttcaacaacaattcttgtgccatttaacaatacaaaccatcgcaacgcaacagctacaacaattcctaccagcactg

SEQ ID NO: 298959 - DNA, 342 bp, Zea mays
attgagaccaactatcaacatatatttctcaattgtgcaccaacaacgggaggggaaatattttgactcattatgctcctttgactttctgcaagtgctgatactggaaccatttacccgaattgctctcaagctcatataggttcagttcttccccggctcctctaaagagcgggtgcactactatgtgaaaacccaactcttgaagcctaccacctccaacaggcactcacaggtcgtcttttaccttaataaccctcaatcactcaacatatattgagcctattacatcagctacatgcgggacatctatactgacaaaacattatggcacagcaacta

SEQ ID NO: 298960 - DNA, 337 bp, Zea mays
attcggcaaagcggcatgcgtagagaggatcgtttttcagaacagcatgaagatggtcatggttctcgtcgtgtgcctgggtgtgtcagctgccaacgcctttgcaatgcagatgccctgcccctgcgcggggctgcaaggcttgtacggcgctggcgccggcctgacgacgattatgggcgcctgggggcatgtacccctacgcggagtacctgaagcagtcgcagtgcattccgttggcggcggcgccctactacgccgggtgtgggcagacgagcgccatgtaccagccgctccggcaacagtgctgcccgcagcagatgaggatgaatggacg

SEQ ID NO: 298961 - DNA, 256 bp, Zea mays
  unsure (1)..(256): unsure at all n locations
gcagaccanagcnnnancacaccagagcgcagaagaacccgancgacaccangagggngnggcncggggcccncgcncnccgggcncgcgcngcgagcgccaccnccacgcanacaagcggcggcggcggcggccagccaccgccgccggnacaacaaccgccggcggngcaacagccaccnccggggcaccagccaccnccggggcaacaaccaccgccgggccaccagccgccgccgggccaccngccaccggc

SEQ ID NO: 298962 - DNA, 123 bp, Zea mays
gcaaagcggcagtgcgtagaaggatcggtgtttttattatcatgaagatggtcatcgttctcggcgtgtgcctggttctgtcagctgccagctccttagcaatgcaaattccctgcccctgct

SEQ ID NO: 298963 - DNA, 333 bp, Zea mays
aacaattcctacagcactgagccttctagttatggtgaaccctgccgcctacttgcaacaggagttgcttgcatcaaacccacttgctctggcaaacgtagttgcaaaccagccacaacaacagctgcaacagtttttgccagcgctcagtcaactagccatggtgaaccctgccgcctacctacaacagcaacaactggttttatctagcccgctcgctgtggccaatgcacctacatacctgcaacaacaattgttggaacagattggaccagctctgactcactaggtgtgggaaaaccctgtgcctactttgcaacagctggtttcatt

SEQ ID NO: 298964 - DNA, 230 bp, Zea mays
gtcatacactattcgagagggatcatcacattgggcttattatggcttattgctacgagggcggatcggacctggtttgactaggctgaaccatggaagctacaatggcggagactactatcgtgactaggaacaagggcagctgatcgtaattgctaggactgactgaggcattacattggaagccacaaggtggcgagaccggaggcctcgagttccctcgcccggcg

SEQ ID NO: 298965 - DNA, 107 bp, Zea mays
gccattccctcttcaagagggatcatcagattgtgcttattattccttattaccccaagcaaggatcggtgttgctcttaattgactgaaccatcgctgctacaatt

SEQ ID NO: 298966 - DNA, 362 bp, Zea mays
gggtcttcagacattagctttatctactctttatcgcagaagaacccgatcgacaccatgagggtgttgctcgttgccctcgctctcctggctctcgctgcgagcgccaccttcacgcatacaagcggcggctgcggctgccagccaccgccgccggttcatctaccgccgccggtgcatctgccaccttcggttcacctgccaccttcggagcatctcccaccgccggtccacctgccgtcgccggtccacctgccatcgtcggtccatgtgccgtcgccggttcatctgtcgccgtcaccatgccactaccctactcaaccgccccggcctcaagcttatccccagccacacccatgccc

SEQ ID NO: 298967 - DNA, 255 bp, Zea mays
  unsure (1)..(255): unsure at all n locations
gggtgcctgattacatnccaggagggacctttctgtttgtcacatagcacccctgaggaagctccacgatgactccgacaaaataggcttgtgaaatgtacaacttcggggacttggaaaggggacgttccgcgttggaaatggtcgctgcattctaaaaggcttctgggaagaaaacccctttggtgttgcgtgggcgaagacccgcacacgcatagatcgtatacgctgtaactgtgcaagcagagaaagagc

SEQ ID NO: 298968 - DNA, 195 bp, Zea mays
tggacgtcagcctagcaattactcatcgactttagattggagaactcgacaccatgaagggggtgatcgttgcccttgctctcctggcgctcgctgcgagcgccccctccaatacaagcggcgggtgtggctgccaaacaccaccggttcatctaccggctccgctctatatgccgccttcgttctatctgccgc

SEQ ID NO: 298969 - DNA, 406 bp, Zea mays
tcgcaactagcaacaagaaagacacaatttttttttttataatggcaagccaaaatatttcgcctcatgatgctccttggtctggctgcaagtcctcgctactgcaagccatttcacccaatgctcacaagctctctataactttccttcttaccccatacctctcaccatcgatgtcttcagtatgtgaaaatccaattcttctaccctacaggatccaacaggcaatcgcagcaggcatcttacctttatcacccttgttccttcaacaatcatcatccctattacaagagctacctttgcggcatttattggcacaaaacattagggcacaacaactacaacaactcgtgcttgctaaccttgctgcctactctcaacaacaagcagttacctttggggcatt

SEQ ID NO: 298970 - DNA, 350 bp, Zea mays
caactgtctacatgtgaaccgctgcttatttgcagcttcaactattaccattcagccagctggttgaatggaagaaatcggacgcgtgggcggacgcgtgggcggacgcgtgggcggacgcgtgggcggacgcgtgggttcagaaacacaccaagcgaagcacattagcaacaacctaacaacaatggctaccaagatattatccctccttgcgcttcttgcgctttttgcgagcgcaacaaatgcgttcattattccacaatgctcacttgcttcaagttccattattacacaggttcctgccaccagttactttaatggggcttcgaacactcaggtgtggcagccta

SEQ ID NO: 298971 - DNA, 365 bp, Zea mays
cttaccatacaaaccattcggctcgacatcttcattttttcctaccagcactgagccaactggatgtggtgaaccctgtcgcgtacttgcaacagcaggtgcttgcatccaacccacttgctctggcaaacgtagctgcataccaacaacaacaacaattgcaacagcttctgccagcgctcagtcaactagccatggtgaaccctgtcgcctacctacaacagcaacaactgctttcatctagccctctccgtgtgggtaatgcacctacatacctgcaacaacaattgctgcaacagaatgtaccagctctgaactagctagctgtggcaaaccctgctggctacttggaacagctgttttca

SEQ ID NO: 298972 - DNA, 265 bp, Zea mays
ccgacctgctggaacagatcataaagaacgtgctctttctattacaacccaggacagaggaagcccagtgagaatttttgggaagagagatgatctcaccctagagggtataaagcagttatatgagacactggacgaggtgaacacatacctaaagccactgaactgcactacctatatggtcacgctcgcggagacgattccttaacccatgggagccggcactatgcgcacagtgactgagccacacttgccggtgaccctg

SEQ ID NO: 298973 - DNA, 194 bp, Zea mays
gcgacccacgcgttcgctcgccgacgtctctgcggtacctgtcgtcttttcctccaatacggcctttttcccttgcgagggtaagctcaatcgtcaaccatgggtaacgagaaatcccacatcaacattgcgtgaattggccacgtcgactctggcaagtcgaccaccaccggccacctgatctacaagcttgg

SEQ ID NO: 298974 - DNA, 318 bp, Zea mays
cagaccattagcgatatatctacaaaggggttgataattcgattgacactacgagggtgttgtgcgagggccaccttctcctggatatgggtgggatggcgatgtcaacccatacaagcggttgatgtagctgccacccaccatctgccatttatgtatcacctgcgacgtatgtggcatcttccaccgacctgccacctgccgtggattgtccacctgccatcgacctgccatgagccgtccacctgtcatctgccggccatgtgatgccactagtttaattaaccggcccagcatgagactaaactacaaaaacac

SEQ ID NO: 298975 - DNA, 296 bp, Zea mays
ctaccaacatacaaagcgcattaagtaccttcatgctcagacggaatattctgcatggcttatgcgacctggtctttctgccaggaggctaccgcaaccattgttctcacaatgctcatcagctacgatagcttgcctacttgccccatacctctcaccatcggtgtcgtccatgagtgaaaacccagtcgcgtaaccctacaggatccaacaggtctagcgcaacacgcgtcttaccattgtgacccttagtgctacaacaacccatactcctatgacaccagatacctttggtc

SEQ ID NO: 298976 - DNA, 322 bp, Zea mays
  unsure (1)..(322): unsure at all n locations
ggtaatccggggccaaccacccagccgagccgnaagcaaaccggcagtgcgtatttagtttcgtctaacagaacaccatgaatagggggggcgttctcgtcgtgtgcctggctctgtcagctgccagcgcctctgcaatgcagatgccctgcccttgcgcggggctgcagggcttgtacggcgctggcgccggcctgacgactatgatgggcgccggcaggctgtacccctacgcgtagtacctgaggcagcctcattgcaccccgctggctgcagttccctactactccttttgcgtgccgcaactaactctcattgtacc

SEQ ID NO: 298977 - DNA, 413 bp, Zea mays
  unsure (1)..(413): unsure at all n locations
nnnncctcaacatacaaagtggaattctttttctacaatcgagcaacaatggcgaccaagagatattccctccttatgctccttgctctctctgcatgtgatgctaacgcgacaatttttccttaatgctcacaagctcctatagcttccctttttcccccataccttccatcaatgatagcttcagtatgtgaaaacccaactctttaaccctataggctccaacaagcaatcggagcaagcaacatacctttatcacccttgtttcaacaatcgccagccctatctttggtgcagacattggaacataccatcacggcacagccagctgagcaactcgggctagctgcgaccaaccaagtagctttggcgaacctttttgcctactctcaggacaacaatatcttacattc

SEQ ID NO: 298978 - DNA, 173 bp, Zea mays
tccatcctgaaatcaaggtttttttttacagcgacgtcgggaactccgagcgcaagttttggccgaaggacaggatgaagccgatcatcttttcgataggcgcgtcttgaccgcgggtagaacatgacaggcctggtggagatgtacggcatgaacgcgcgcctgagggagct

SEQ ID NO: 298979 - DNA, 427 bp, Zea mays
tttctccctactctccgtaacattcaatttcttccattcaaccaactgtctacactgaaccctgctgcttatttgcagcaacaactattaccatttagccagctagctactgcctactctcaacaacaacaacttcttccatttaaccaattggccgcactgaaccccgctgcttatttgcagcagcaaatactactaccatttagccagctagctacagcaagccgtgcttccttcttgacacaacaacagttgctgccgttctaccagcagtttgcggctaaccccgcaaccctcttacaactacaacaattgttgccctttgtccaacttgctttgacaaacccagcagcctcctaccaacaacacattattggtggtgcccttctttagattgcttattagatgtaattcaataataaaggtt

SEQ ID NO: 298980 - DNA, 269 bp, Zea mays
  unsure (1)..(269): unsure at all n locations
actantnttgatcgcgagcgccgccctttttttttttttttttttttaaattttttttgtgctttaaaaccaaaactttattatgatgcatatattattgggcataccacacatgataatgtgtgtcgtcttactgcattattacatatatagaaagagaggggtggactctaccagttccagtaccagttgtccagctaccgcaccaacccctgtggcgttatcgctgccattccgccctactactgatttatgatatttgggaaaat

SEQ ID NO: 298981 - DNA, 408 bp, Zea mays
  unsure (1)..(408): unsure at all n locations
ncccacncctcgcccacgcgtccgctggcttttcttcgttaacgtgatcgcgacgcgcgtccgagaagcatccgccttccgtccgcagaccgcaaccatggtgacaccagcctccaccgcccctgcgtccaccgcttccgccgcagcggcgaccggctccggccgcgaagtagtccgcctcctccgctatcccgcccgctgcctccttcctttggctgcggcgcccaggacaggcacgcggctgaccaccgtgctccgcgcaagaacccagccggcggagcccgagctggtggagcagtcggtgaacactatccggttcctggccgtcgacgccgtggagaaggcgcattctggccatccaggcctccccatgggctgcgcgccgctgggacacgttctgttcgacga

SEQ ID NO: 298982 - DNA, 356 bp, Zea mays
aagcacaatagtgtttcatttctggcagccaaaatattctgcttgcttatgctccttggtatttctgcaagtgctgctaccgtaaccattttcccacaatgcttacaagcttctatagattcctttcttgcggcatacctctcaccagcggagtctttagtgtgcgaaaactcaatatcttcaaccgctacaggatgcaacaggccaatcgcagcatgcatgttacctttatcacccttgttcctcgcaacaaccgtcagccctatgtacaggagttacctttgcggcatttgttggcacacatcatcagggcacaacaactacaacaacttgtgctcggagaccttgctggctac

SEQ ID NO: 298983 - DNA, 421 bp, Zea mays
  unsure (1)..(421): unsure at all n locations
gnnnnacttccactccccacgttccccgtttgcttcctccaggccccggccagatccgcgcgcccgcggggaagagggcctcctctcctccctcctcccttggctcgcgctctggtcgaggaggcggaggccggtgccggcgggcgggcggggaggtaggtagcagcttgcggttgcgggagggaagctgcgcgcgctaggctgccatggcggtggagaagacgctgcccggcgcgagtgcggggaggaccgtgctggtcacgggcggggcgggctacatcggtagccacgccgtgctgcagctcctcctcgcgggcttccgcgccgtcgtcatcgacaacctcaacagctctaacagttttaggaaatgactatgccacaagagacgggactggggtccgagaatacatccatgtgggtg

SEQ ID NO: 298984 - DNA, 175 bp, Zea mays
  unsure (1)..(175): unsure at all n locations
nnnnnaaatcggaggatgttggcttactctactgttggtacacctgattacattgcacccgaggtggtcacttggtgcaataatgttcgaaatgcttgtggggtatccgccattttattctgaagacccaatgtcaacatgtaagaagatagtgaattggagaagtcatctaaaa

SEQ ID NO: 298985 - DNA, 396 bp, Zea mays
gtcctcgcaggttcaatctcacctttcttcatgggtcaagagaaaccccacattaacatggggggtattggccatgtcgactctggcaagtcgaccaccacaggacaccttatctacaagcttggaggcattgacacgcgtgtgatcgagaggctcgagaaggaggctgctgaaatgaacaagcgggccttcaagcacgcgaggccgctcagacaagctcaacgctgagcgtgagagaggtatcaccacatgatatacctctgcggaagtttgagaccaccaagtgctactgcaccgacattgatgcccgctggacaccgtgacttcatcaagaacatgatcactggctcctcccaggctgactgggctgtacttatcactgactacaccactgga

SEQ ID NO: 298986 - DNA, 269 bp, Zea mays
  unsure (1)..(269): unsure at all n locations
natttcgcagccaacaccacccgttgtgtttacgcgacagccgccaggaggaaggaatgaacttactgtcagccagtgaagggggagaagtgtactgctccgtagaccagtgcgcgcaccgtccggtatggttgctcatttcgacgacgaccagtggattaatccgtatggcagttattgccacggtgtatctatacgcaacgcctgtcggcctgagggtacatggacgcattcacggtgcgcgtctgacatcaacctatttttcaggt

SEQ ID NO: 298987 - DNA, 346 bp, Zea mays
tcgttttatttcagaaacacaccaatttaattacattagcaacaacctaacaacaatggctgccaagatattatccctgcttgcgcttcttgcgctatttgcgagcgcaacaaatgcgttcattattccacaatgctcacttgctccaagtttcattattacacagctcctctcaccagttacttcaatgggcttctaacacccagctgaacaagcctataggctacaacaagcaattgcggcgagcgttttactatcaacaatttctcaagttgtaacaacaaatccttgggcacattttacaataacataaccaatcgtaacgggacacagcaatctaccaatt

SEQ ID NO: 298988 - DNA, 307 bp, Zea mays
  unsure (1)..(307): unsure at all n locations
ganntcaacagcacaagagggatccagttacggcaatcgagctacaatggctaccaaggcatcttgccttcttatgctgcgtggtctctctgcccgtgttgctaacgcgacaacatgcccttattgctcacatgcttctatagttcctcttattaccccataccttacatcaatgatagctactggatgtgacatcccagatctctcacgctataggctccaacatgctatcgctatcagcctcgtacctttatcaaccttgtgtcatctaacagcagccccatttttggcgcatggaggggcacaa

SEQ ID NO: 298989 - DNA, 208 bp, Zea mays
cgtccgagctgcagtgcgtatagaggatcgtcgaattttatagtatgaagatggccatcgctctcgtcgcgtgcctggctctgtcagcagccagcgcctctgcaatgcacatgctctgcccctgcaccgctccgcatgatttgcaacagccacgactaccattcaacgcagctatcttgctgcctacccccagcaatttcttttcatt

SEQ ID NO: 298990 - DNA, 337 bp, Zea mays
gactagttctagatcgcgagcggccgctcttttttttttttttttttagacaaaaaactttattattgaactataactcataagaaatctaaaagagggcaccaccaatgatgggttgttggtagaatgctgttgggtttgtcaaagcaagttggttgaatggcagcaattgttgcagttgtaagagggtgccagcgttaggcgcagcgtgctggtagaacggcaacaattgtggttgtgtcaagaaggtagcagggctcacaccagctatctgctggctacccccagcaatttgtttcatttaaccaactgacagctttgaactcttctgtttatt

SEQ ID NO: 298991 - DNA, 253 bp, Zea mays
aacaaagtgaccgtgcgtacagaggatcgttttacacaacagcatgaacactgtcatcgatgttgaaacatgcctggctctgtgaaatgccagcgcctttgcaatgcagatgccctgcccctgcgccgtgctgcagggctagtacggtgctggcgcccgtctgacaacatgatgggcacctgccatgtgtacccctacgccactacctgaggaacctatgcacccagttctgggtccctactacgcggtgtgg

SEQ ID NO: 298992 - DNA, 280 bp, Zea mays
ggacgtcagcctagcaattagctcatttttttcagattggagaactcgacaccatgaaggtgctgatcgttgcccttgctctcctggcgctcgctgcgagcgccgactgcagtacaagcggcggctgtggctgccagacaccaccgtttcatctaccgcctccgttctatatgccgcctccgctctatctgccgtcggatcagcagccgcggacatggcaataccccactaaaccaccgaacctaaccccgtgccagcagcctggatcctgcggcgtcgc

SEQ ID NO: 298993 - DNA, 362 bp, Zea mays
gctgtgggacatcacacgcaccgctacgatttctttctgcgagcgagatcttaccaccgcagcggcgccgtggccatggcgggaaggtatcaccaggatcagggcggggacgggggcgcgtccatggaggtagtcagcacgccgaaccaggagctggcccttaccaactgcgcatacgtctctcccgctgacctccgccgcttccccaacgggctcgccctcgttgccgacgcctgggtcttcaccctacgtgaccacaatgctgttgcaagtggacgcattgccttgaatgctattcagcgtcggcaggcaaaggtttcagctggggattctgttactggtagcagttttgtccccctgat

SEQ ID NO: 298994 - DNA, 389 bp, Zea mays
ggacgtcagcctagcaattagctcatcgatttcagattggagaactcgacaccatgaaggtgctgatcgttgcccttgctctcctggcgctcgctgcgagcgccgcctccagtacaagcggcggctgtggctgccagacaccaccgtttcatctaccgcctccgttctatatgccgcctccgttctatctgccgccgcagcagcagccgcagccatggcaataccccactcaaccaccgcagctaagcccgtgccagcagttcggatcctgcggcgtcggcagcgtcggcagcccgttcctgggccagtgcgtcgagttcctgaggcaccagtgcagcccggcggcgacgccctacggcttgccacagtgccaggcgctgcaacagcag

SEQ ID NO: 298995 - DNA, 266 bp, Zea mays
attagctttatctactccagagcgcacaacaacccgatcgacaccatgagggcgttgctcgttgccggcgctctcctggctctcgctgagagcgccacctccacgcatacaagcggcggctgcggctgtcagccaccgccgtcggttcatataccgccgccagtgcatatgtcacctgggtgttagctgccaccttcggtgcatctcccaccgccggtccacctgtcgacgccggtacacctggcaccgacggtccatgtgccggc

SEQ ID NO: 298996 - DNA, 250 bp, Zea mays
acgaaccatgctaagcggaatggcggcttctggtgagggcgcgtcgctgccgtctcctgcgggcggcgaggatgctcaccgccgtcgcatcagctatttttactagccgtctatcggaaactactactacgggcaaggctacccaatgaagccccaccgcatcctgatggcgcactcactggcggtccactacggccttcaccgacttctctagctctaacgcccctacccagtctctgaagccgacatt

SEQ ID NO: 298997 - DNA, 319 bp, Zea mays
tcgacggacgcgccacgcgtgcccataaacacaccaagcgaaacgctctatcatcaacctaacaacaatggctaccaggatatgattccttcttgcgcttcttgcgctttttgcgagcgcaacaaatgcgtccattatttcacaatgctcacttgctcctagttccattattccacagttcctcccaccagttactttaatggccttcgaacacccacctgtgcaagcctatatgctacaacaagcgattgcggcgagcgtcttacaacaaccaattgcccaattgcaacaacaatccttggcacatctaacaatacaa

SEQ ID NO: 298998 - DNA, 421 bp, Zea mays
catacacatacacacccaacatataacattttctacaatctcaccactatagcaacaattgggaccaatgtattttcccttcttatgctccttgctctttctacatatgttgctaacgcgacaattttccctcaatgctcacaagctcctatagcttccctttttcccccataccttccatcaattatagctttagtatttgaaaacccatctcttcaaccatataggcttcaacaagcaatctcagcaagcaacatacctttatcgcccttgttgttgtaacaatcgccagccctatcttttttgcagtcattggtacaaaccatcatggcacaacatcttcagcaacttctgctacctttgatcaaccaagtaactctggcaaacctttttcctactcttcgcaacaacaattttttca

SEQ ID NO: 298999 - DNA, 432 bp, Zea mays
cacgcgttcgcaatggacttacaacacacacctgtgcaagctctatacgctacaacaagcaattgctgcgagcgtcttacaacaaccaattttccagttgcaacaacaatccttggcacatctaacaatacaaaccatcgtaacgcatcagcaacaacaattcctaccagcactgagccacctagccatggtgaaccctgccgcctacttgcaacagcagttgcttgcatcatacccacttgctctggcaaacgtagttgcaaaccagccacaacaacagctgcaacagtttctgtcagcgctcagtcaactagccatggtgaaccctgccgcctacctacaacagcaacaactgctttcatctatcccgctcgctgtggccaatgcacctacatacctgcaacaacaattgttgcaacagattgttccagc

SEQ ID NO: 299000 - DNA, 279 bp, Zea mays
cacaatatttcacactggcgaccaagatacttcccctggttatggtccttgctctttctgcatgtgttgctaacgcgacaatattccctcaatgctcacaagctactatagcttgccttctttctccataccttccatcaatgatagcttcactatgtgaaaacccaactctttaaccctatatgctccaacaagcaatcgcattaagcaacataccttcatcacccttgcttcaacaatcgacagccctatcttttttgcagtcattggtacaaacca

SEQ ID NO: 299001 - DNA, 276 bp, Zea mays
attgataccaactagcagcatacatagcgtagtacactaacaacatcttaccaccaatggcggccgggatttttgccctacttgccctccttgctctttcagcaagcgctgctaccgcgactattatatgacaatgctcacaacaatacctctctcccgcgacagcccagagattagaataccctactatacaatcctacaggctacaagaggccatcacatgaggcatcttacgggcgctagcattgactgtccaacgaccatatgccctattgc

SEQ ID NO: 299002 - DNA, 379 bp, Zea mays
  unsure (1)..(379): unsure at all n locations
cctctctttntatgtaatgcacctacatactttcaacatcaattgctgcaacatatattacgagctctggctcatctatctgtggcaaaccctacttcctacttgcaacagctgcttccattcaaccaactgactgtttctaactctgctgcttacctacaacagctacaacagttacttaatccactatcaattctctaacccatttttcactgccttcctacatcatcaacaattgctaccatacaaccagttctcttttattaaccctgtcttgtcaaatcatcaacccatccattatatgttccatcttttaaattacttattaaatgtaatctattattgtgccctctataccccttgttttttctaaaaataa

SEQ ID NO: 299003 - DNA, 284 bp, Zea mays
gtgtccacctactagcatcataagaagaacaatattgtaccaacaatggccgacaaaatatgctgcgttcttatgctccttggtattgcaggaagtgctgctgcagccaccattttaccgtgatgataagaagctattattgcttttcttacttcatcgctcctatcaccagcggcgtcttatgtatgagaaaaaccaattcttcaacactacatgatacaacaggcaatagcaggcagcatactaccattatcatccttgctgctacaacaatcatcagtact

SEQ ID NO: 299004 - DNA, 232 bp, Zea mays
  unsure (1)..(232): unsure at all n locations
gacccacacgttcgttgcatttataaacacaccaaccttatctctctatcaactacctaacaacaaagggataccgagatattatacctccttgcacttcttacccactntttgagcgcaacaaatgccttcattattccacaattctcactttctcctattgccattatttcacagttcctcccaccatttacttttatgggctaccaacacctatcttttcatgccaaca

SEQ ID NO: 299005 - DNA, 269 bp, Zea mays
gccacgcgtgcggtcagcctagcaattagctcatcgactccagattggagaactcgacaccatgaaggtgctgatcgttgcccttgctctcctggcgctcgctacgagcgcccgctccattacaagctgcggctgcagactgcagacaccaccggttcatctaccgtctgcgtgctatatgccggctccgctctatctgccgccgcagcaacatctcgcactcatgggaataccccactcaaccaccgtagataagtccgtgccagcag

SEQ ID NO: 299006 - DNA, 218 bp, Zea mays
gagcattcataaacacaccaagcgaagcgctctagcaacgacctatcaacaattgctaccgggatatgagctctacttgcgcttcttgcccttgttgtctagcacatcacatgccttcattattgcacattgcttacttgctcctagagccattattctagaaacgctcctaccccttactgcacgctgctatgtacaccgagctgttgaagcaaaca

SEQ ID NO: 299007 - DNA, 264 bp, Zea mays
tccaatccagatcagcaaagcggcagtgcgtagagaggatcgttgaactgaacagcatgaagatggtcatcgttctcgtcgtgtgcctggctctgacagctgccaacgcctctgtaatgcaaatgccctgcccctgcgcgggtctgcagggctagtacggcgctggctcctgtctgacgactatgatgggcgccggccgactgaaaatctactcctagtaggcgtagcaggcgcaactcatgccgatggctgcagagccctact

SEQ ID NO: 299008 - DNA, 304 bp, Zea mays
  unsure (1)..(304): unsure at all n locations
aagcatacataaacacaccaaacaaagcttcttatcaactactcaacaacaatctctaccagtatatttgccatacttgaacttcttncccttccttttaactcaacaaattctttcattattccacaattctcacttactcctaattccattataccacatttccttcaaccacttactttaattttctttttacacctatctgttcaagcctacattctacatcaatctctttcaattaacttttacaacaaccaattaaccatattcaacaacaatttcttttctcatttaaccatacaaa

SEQ ID NO: 299009 - DNA, 336 bp, Zea mays
agcacatataaaccccactagcgtaccacctttgccacacaaaatctacaacctccatatggtcattgtgctttcttcaactgcttctacttcaaccattttccccaaatgctcccatgctcctataacttcccttcttcccccgtacctcttaccaacagtgtcttccatatgttaaaacccaattcttcaaccctacatgatccaacacgcaatcacagctggcatcttacctttatcacccttgttcctccaacaatcatcatccctattacattacttacctttgttgcattaattgacacaaaacatcatgtcacatcaactacaacaact

SEQ ID NO: 299010 - DNA, 273 bp, Zea mays
cccacgcgtccggggaagctataggagcttgtgagcattgaggcttcaacaagcaatcggagcaagcaacatacctttatcgcccttgttgtgtcaacaatcgccagccctatctttggtgcagtcattggtacaaaccatcaaggcacaacagctgcagcaactcgtgctacctgtgatcaaacaagtaactcttgcaaaactttcttcctacttttcggaacaaccatttctttcatttaaaccaattgtttaacttaaaccttgttgtta

SEQ ID NO: 299011 - DNA, 337 bp, Zea mays
attctgaccatcatgaaatagcaccatgcgaaccgcaactagaacgtcttaagaggcaaagggtaccaataaatcacctctccttgcccttctagccctttttttgatcgcaacaaatgcgttcattattccacaatgctcacttgctcctagtgccattattccacagttcctccaaacagttacttcaatgggcttggaacacctacctgtgcaagccaacatgcaacaacaagcacttgcgacgagcgtcttacaacaaccaattgcccaattgcaacaacaatccttgccacatctaacaatacaaaccattacaacgcaacatcaacaacag

SEQ ID NO: 299012 - DNA, 372 bp, Zea mays
acacaacataaattcgacctcttcatctaccaaacatacaaacccatcacaaaattgaatatacaacacacaacaagccaacaagatagcctcaaaataaattggagccatagtgcaatgctaccttcttgacacaaccacaattgttgccgttctaccagcacgctgcgcctaacgctggcaccctcttacaactgcaacaattgctgccattcaaccaacttgctttgacaaacccaacagcattctaccaacaacccatcattggtggtgccctcttttagatttcttatgagttatagttcaataataaagttttttgtctgatgtttgtggcttcccagaaataagaaagtacatttctagattctt

SEQ ID NO: 299013 - DNA, 374 bp, Zea mays
ccaagacccactgaaccctcgccgtttcgtcgcacccaccaacacgagagatgagctccggcggcgcggacaagcccggcagtggcggcggcgcggtgaatacgccgtcggacttcctcaagtccatcaggggccgccccgtattcgtaaagctcaactccggcgtcgactacagaggtatattggcttgtctggatggttatatgaacatcgcaatggagcagaccgaggtgtacgtgaatggccagttgaagaacaagtatggcgatgccttcataaggggcatcaacggtacgacctggattttcaaatccaatccttctgttccctgagaactgctttatcggcttaattttgttttctttgttgtgaga

SEQ ID NO: 299014 - DNA, 265 bp, Zea mays
  unsure (1)..(265): unsure at all n locations
tgagcattcataaacacaccatgctaagctcattatcaacaacctaacaacaggtgctaggaagatattatccgttcttgcgcttcttgcgctntttgcgagcgcaacaaatgcgttcattattccacattgctcacttgctccaagttccattattacacagtttctcccaccagttacttcaatggtctttgatcacccagctgtgcaagcctattggctacaacatgcatttgcggctagcgttttactacatccaatttcc

SEQ ID NO: 299015 - DNA, 186 bp, Zea mays
acagttcctactaccagatacatcaatgggcttttaacacctatctgtgcaaggggacaggctacaacaatcagcttgcagcgagcgtctcacaacaaccaattaaccaatttgaacatcaatgcttggcacatctaaccatacaatccatcgcaacacatcagtaacaactttttctaccagcac

SEQ ID NO: 299016 - DNA, 394 bp, Zea mays
ggcgctggcgccggcctgacgacgatgatgggcgccggcgggctgtacccctacgcggagtacctgaggcagccgcagtgcagcccgctggcggcggcgccctactacgccgggtgtgggcagacgagcgccatgtaccagccgctccggcaacagtgctgccagcagcagatgaggatgatggacgtgcagtccgtcgcgcagcagctgcagatgatgatgcagcttgagcgtgccgctgccgccagcagcagcctgtacgagccagctctgatgcagcagcagcagcagctgctggcagcccagggtctcaaccccatggccatgatgatggcgcagaacatgccggccatgggtggactctaccagtaccagtaccagcttgccagctacc

SEQ ID NO: 299017 - DNA, 178 bp, Zea mays
tcgagaaagtggaatccagtatcaacaatagagcatcactggcgaccaatatatttggcctcgtgaggctccttgctgttgcttgcatgtgttgcgaacgcgacaattttccttcaatgctcacaggctactatagcgctttcttcttttttcatacctttcatcaatgaattgcttt

SEQ ID NO: 299018 - DNA, 349 bp, Zea mays
agcaacatagaaagcacaactatgtaccaacaatggcagtcaaaatatttcgcctgcgtatgctccttggactttctgcaagtgctgctacggcgaccattttcccgcactgctcgcaagctcctatagcttactttcattccccgaacctctcaccagcgtggtctttagtatgtgaaaacccacttcttcaaccctacatgatccaacaggcaatctcagctggcatcttaccttaatgaccctaggttctgcaacaatcatcatgcctattacaacagttacatttggcgcatctactggcacaaaacatcatgtcacaacaactacaacaacttgagctagcaaa

SEQ ID NO: 299019 - DNA, 186 bp, Zea mays
ggcagtctagcaataagctcatcgactccatattggagaactcgacaccatgaaggtgcggatcgttgcccttgctcttctggcgctcgttgctagcgcctccttcagtacaagcggctgttgtggttgtcaaacaccaccgtttcatctaccgtcttcgttctatatgctctctttctttctatc

SEQ ID NO: 299020 - DNA, 404 bp, Zea mays
ggggacccacacgtccaaacaacatataaattcgaatttaatttcaacaacagagcaacaattgccagcagcatattttccctccttatgctccttacactttctgcatgtattgctaactctacatttttccctcaatactcacaaactcctatagcttcccttcttcccccataccttccattaattatttctttattatgtgaaaacccatctcttcaaccctatattctccaacaagcaattctatcaagcaacatacctttatcaccctttttacaacaatctccatccctatctttgatgcattcatttctacaaaccatcatttcacactaactatatcaactcttgctactcttgatcaaccaaatatctttgacaaactctttcttctctacttt

SEQ ID NO: 299021 - DNA, 355 bp, Zea mays
gcaacatattaagcacaatattttttcttcaatggcagtcaaaatattttggcgggttattctccttggtctttctgcaagtgttgctactgcgaccattttcccgatatgctcgcaagctcctatagcttccctttttttctcgttcctttcaccagatatgttttctgaatttgtatacccaattttttaaccttacaggatccaacaggcttttacagttggtatttcacctttatcacccttgattctccaacaatcatcagccctattacattagttacccttggtgccattattggcacaaaacatcaagtcacaacaacttcaacaactcgtgcttgcaaatctttgc

SEQ ID NO: 299022 - DNA, 327 bp, Zea mays
tttcttagaccaacaagcatcatattttgttgtatccagcagcaacaatagagcagcaggggcgatcaatatatttaccctccttatgctccatgctctttttgcatgtgttgctaactcgacaatatttcctcaatgctcacaagctcctatagctttccttctttccccataccttccattaatgatagcttcagtatgcgaaaacccagctctttaactcttataggctccaacatagcaatctcataatgcaacatacctttttcacccttgtttcaacaattgtcagccctatttttggtgcattcattgttacataccatt

SEQ ID NO: 299023 - DNA, 328 bp, Zea mays
cccaccaatggcggccaaaatatgtgggttccttaggctcctgggcctttttgcaagggctgttaccgaaaccattttccaacaatgctaacaggctcctatagcttccttttttcccccatacctttcaccagcggggttttcagtatgtgaaaacccaatttttcaaccctacaggatccaacaggcaatcgcagcaggcatcttacctttatcacccttgttcctccaacaaccgtaagccctattacaggcagtacctttggtgcatttgttggcacaaaacataaaggcacaacaactacaacaacttgtgctaggaaacctt

SEQ ID NO: 299024 - DNA, 363 bp, Zea mays
tcgattgagaccaacaagcaacattttttgtggaatccagttgcaacaatagagcagcaatggctatcaagatatttttcctccttatgctccttgctctttctgcatgtgttgctaacgcgacaattttcccttaatgcttacaagctcctatagctccccttcttcccccataccttccatcaatgatagtttcagtatgtgaaaacccatcttttcaaccctataggctcctacaagcaattctattatgcaacatacctttatcacccttgtttcatcaatcgctagccctatcattggtgcatgtcattggtactaatcatcaggtgttcatcatttgtagcaacttgtgctacctgt

SEQ ID NO: 299025 - DNA, 310 bp, Zea mays
atccttagtgaatctatatctccattttttgcagcacaacaactacaacagggggtgctttcaacaatcaatcaagtagttgcagcgaaccttgctgcttacctccagcaacaacaatttcttccattcaatcaactagctggggtgaaccttgctgctttacttgcaggcacaacatcttctaccattcaaccaacttgtcatgagccctgctgccttctttctgcatcaacagttgctgtctttccatcttacaagttgtggtaattcattgcttcttttttgtaacaacatcaattgttttccattt

SEQ ID NO: 299026 - DNA, 343 bp, Zea mays
aagcaacatagaaagtggaattttttttcaacaatagagcaacaatggcgaccgggatatttttcctccttatgctccttgctcttactgcatgtgtttgctaacgctacaattttccctcaatgcttacaagctcctatagcttcccttcttcccccataccttccatcaatgattgcttcagtatgtgaaaacccagctttttaaccctataggctccaacaagcaatctcatcaagcaacatacttttatcacccttgtattaacaatctccagtcctatttttggtgcttatcaatgttacacactcttattgcacatcatcttcttcaacttgtgctt

SEQ ID NO: 299027 - DNA, 271 bp, Zea mays
acttaatgtgtaatcctcaaacattttttttatcaacattggagaccaagatagtggggcttttcttatgcttctggctctttctacatgcgttgctaacgctacaatttttcctcaatcgctcacaagcttctatagcttaccttctaactacataccattcatcaaattttgctacattacgttaaaaccctactctttaaccatatttgcttcatcatgttatcgctatacgcaacatacctttaatgcccttgttgagttaaacaat

SEQ ID NO: 299028 - DNA, 442 bp, Zea mays
  unsure (1)..(442): unsure at all n locations
cgggtcggacccacgccgtccggcacaatatgtgtacccaaccaatggcttctcttaatanttttgcctaccttatgctcctgggggctttctgcaagttgctgcatacgcgcgacccattttcccgcaatggctcgcaagactcctatagcattcccttcttccccccgtaccctctcaccagctggtgtctttcggtatgtgaaatacccaattcttcaaccctacaggatccaacaggcaatcgcagctggcatcttacctttatcacccttgttcctccaacaatcatcagccctattacaacagttacctttggtgcatttattggcacaaaacatcagggcacaacaactacaacaacttgtgctagcaaaccttgctgcctactctcagcaacagcagtttcttccattcaaccaactaggttcattgaactctg

SEQ ID NO: 299029 - DNA, 281 bp, Zea mays
tccacgcgtacgcaactagttttttttaaagcacaatagtgtaccaacaatggcggccaatatatttggcttccttatgctcctaggtctttttgtaagtgctgcttcctcaaccattttcccacattgctcacaagcttctattgctttctttctttccccatacctcttaccagcggtgttttcagtctgttaaaacccaattctacaaccttacaggatccaacaggtaatcgcagtatgcattctacctctatcacccttgtttcctccaacattcc

SEQ ID NO: 299030 - DNA, 349 bp, Zea mays
attagctttatctactccagtttttataagaacccgatcgacaccatgagggtgttgctcgttgccctcgctctcctggctctcgctgcgagcgccacctccacgcatacaagcggcggctgctgctgccagccaccgccgccggttcatctaccgccgccggtgcatttgccacctccggtttacctgccaccatcggtgcatcttccaccgtcggtccatgtgccttctccggtttatttgccgtcgtcaccatgccactaccctatctatcctcccccggcttagtctcatcctcagtcacacccatgcccgtgccaaccagtcgtattcaatcccgttgtcattt

SEQ ID NO: 299031 - DNA, 376 bp, Zea mays
attagctttatctactccagagcgctataagaacccgatcgacaccatgagggtgttgctcgttgccctcgctctcctggctctcgctgcgagcgccacctccacgcatacaagcggcggctgcggctgccagccaccgccgccggttcatctaccgccgccggtgcatctgccacctccggttcacctgccacctccggtgcatctcccaccgccggtccacctgccgccgccggtccacctgccaccgtcggtccatgtgccgtcgtcggttcatctgccgcctgcaccatgccactaccctactgaaccgacccggtctcagtcttattcccagccacacccatgcccgtgccaacagtcgtttacaagccct

SEQ ID NO: 299032 - DNA, 380 bp, Zea mays
ttattgagaccaactagctttatataaagcacaatagtgtaccaacgatgtcggtcaaaatattttgcctccttatgctccttggtctttctgcaagtgctgctacggcgaccattttcccgcaatgctcacaagctcctatagcttcccttctttccccgtacctttcaccagcggtgtcttctgtatgtgaaaacccaattcttcaaccctataggatccaacaggcaatcgcagctggcatcttacctttatcaccctttgtccttcaacaatcatcagcccttattcagcagttacctttggtgcatttattggcacaaaaacatcatggtacaacaacttctaccacttgtgctagcaaaccttggtggctactc

SEQ ID NO: 299033 - DNA, 423 bp, Zea mays
  unsure (1)..(423): unsure at all n locations
cgaaaggcggcagtgcgtagaggaggatcgtcttatacagaaccagcatgaagatggtcatgcgttctcgtcgtgtggcctggctctgtcagctttgccagcgcctctgcaatgcagatgnccctgcccctgcgcggggnctgcagnggcttgtacccggcgctggcgccggccctgacgacccgatgatgggcgccggcgggctgtacccctacgcggagtacctgaggcagccgcagtgcagcccgctggcggcggcgccctactacgccgggtgtgggcagacgagcgccatgtaccagccgctccggcaacagtgctgccagcagcagatgaggatgatggacgtgcagtccgtcgcgcagcagctgcagatgatgatgcagcttgagcgtgccgctgccgccagcagcagcctgtacg

SEQ ID NO: 299034 - DNA, 271 bp, Zea mays
cagaccattagctttatctttttttgtgcgcagaagaacccgatcgacaccaggagggtgttgctcgttgccctcgctctcctggctctcgctgctagcgccacctcctcgcatacaagcggcggctgcggttgtcagccaccgtcgccggatcatctaccgtcgtcggtgctattgccacctccggttcacctgccaccttcggtgcatttaccaccgccggaccacctgccgacgtcggtccatctgtcaccgtctggtcatgtgccgt

SEQ ID NO: 299035 - DNA, 324 bp, Zea mays
ctcattcgaattcccaggcaggcatgtcgttgaggagggcaggaagaccgaagaccgagccgtgcgggggctcgggacgggaacgggacaggaccccaaaatatgagattctttctgtccgaccgaccgtgcccgtcgacgcgttgttcttgccgggcgagccctacctacggcctgttttactgcagggggatcggatacgccacatgctgcgcgatggtgctttgggtttttggctaccgcttccttatatggaaccccggctttggcttctacgacaaaatcctaggttttatcaagggctacaagcgcacctttaatctc

SEQ ID NO: 299036 - DNA, 499 bp, Zea mays
  unsure (1)..(499): unsure at all n locations
taccggaatcggccgggtccgagcccacgcccgtccgtcccacgcccgtccgtattgggagaccaacttatgcatcttatagaaagggcacaatnnagtgtacccagaccaatgtgcatgtccccaaaatnaattttggcccttcccttatngncctccttgnnngtctttcnntgcaagtgcctgctttacggcngnnaccaattttcnnccgcaatggctttcgcaaggctctctattagctnnntcccttctnnntcccccgtacccttctcactcanngcggtgtcttttcggtatttgtgaataacctnncaattcttcaaaccctacatggtatctcaacaggcaattcgcagcttggcatttcttacctttatcancccttgttctctccaactnaatcatcagccctattacaacagttactctatggtgcatttattggcacaaaacatcagggcacaacaactacaacaacttgtgctagcaaaccttg

SEQ ID NO: 299037 - DNA, 354 bp, Zea mays
cgcctacgcttactccaggacacggagggcatccttaccttgaccgagcacgcctcatcttcgcgggcaagcatctggaggatggccgcaccctggcggactacaacatccagaaggagagcaccctccacctggtgctccgcctcaggggtggcatgcatatttttgtgaagacattgactggcaagaccatcaccttggaggtggagagctctgacaccattgacaatgtgaaggccaagatccaggacaaggagggcattcccccagaccagcagcgtctgatctttgctgtcaagcagctggtggatggtcgcaccctcacggactacaacagtccagatggagagtacc

SEQ ID NO: 299038 - DNA, 346 bp, Zea mays
  unsure (1)..(346): unsure at all n locations
agactggagaactcgacaccggggggggtgctttatcgggcccgggctctcctggcgctcgctgcgagcgccgtcttcagtacaagcggcggctgtggctgccagacaccaccgnttcatctaccgccttcgttctatatgccgcctccgttctatctgccgccgcagcagcagccgcagccatggcaataccccactcaaccaccgcagctaagcccgtgccagcagttcggatcctgcggcgtcggcagcgtcggcagcccgttcctgggccagtgcgtcgagttcctgaggcaccagtgcagcccggcggcgacgccctacgggtcgccacagagccaggcgc

SEQ ID NO: 299039 - DNA, 308 bp, Zea mays
taattgcccaatttcaacattttttttaggcacaactaaacctacaaacggtgggatcgtatcagcaacaacaggtcttgccatcactgagccacctagccgtggtgaaccctgtctcctacttgcaacagcagcttacttgcatccaacccacttgctctggcgaacgtagctgcataccatcaacatcaacttttgcaacagtttatgccagcgctcattcaactagccatggtgatccctgtcgcctacctacatcagcaacaattgctttcatctagcccgctcgcttgtgggcattgcaccta

SEQ ID NO: 299040 - DNA, 393 bp, Zea mays
ggcaataccccactcaaccaccgcagctattcccgtgccagcagttcggatcctgcggcgtcggtagcgtcggcagcccgttcctgggccagtgcgtcgagttcctgaggcaccagtgcagcccggcggcgacgccctacggctcgccacagtgccaggcgctgcagcagcagtgctgccaccagatcaggcaggtggagccgctgcaccggtaccaggcgacatacggtgtggtcctgcagtccttcctgcagcagcagccgcagggcgagctcgcggcgctgatggcggcccaggtagcgcagcagctgacggcgatgtgcggcctgcagctgcagcagccaggtccctgcccttgcaacgcaacttgcggcggtgtctactactgaggaa

SEQ ID NO: 299041 - DNA, 355 bp, Zea mays
gacacacataaagcacaacactgttcccatattggcagccaagatagccaggcttcttgtgctccttggccttcctgcatgtgctgctaccgctaccatcttgcctaaaagctcacaaggttctatagattacctttttcccgcgaccgtctcaccagttgagtatccagcttttcaaaactccatggttcaagcgtacatgcaccaacgcgtattaacagcttgcgtattaactctataacaaccgtatgctctacagtcacaagccttattacagcatttgcctctgcagcgtatattggcacaacaactacagggcacagcagctaccaacactagagctagcagaccttgc

SEQ ID NO: 299042 - DNA, 324 bp, Zea mays
atgtaatggagcccggcggttacgtcctacggctcgccacagtgccaggcgctggagcagtagtgctgccaccagatcaggcaggtggagccgctgcaccggtaccaggcgacatacggtgtggtcctgcagtcctttctgcagcagcagccgtagggcgagctcgcggcgctgatggcggtccaggtagcgcagcagctgacggcgatgtgcggcctgcagctgtatgagccaggtccctgtccttgcaacgcatattgtcggcggtgtctacttctgtggaaactatgtactgtagtaataatgtattggagccgctgtcta

SEQ ID NO: 299043 - DNA, 301 bp, Zea mays
taaacttttctagtgaagcgcacaagcatcaaccgatcagctttgtttaccaagatattagccctccttacgctacttgctctattagtgagcgcaacaaatgcgttcataattccacagagcttacttgctcctagtgccattattccacagctcctcccaccagttacttcaatgggctttgaacattcagccgtgcaagcctacaggttacaacttagcgcttgcggtcagcgttttacaacaaccaattgcccaattgcaacaacaatccttggcacatctaaacctacaaaccatt

SEQ ID NO: 299044 - DNA, 389 bp, Zea mays
tcggagcattcataaacacacctttcgtattgcactagcaacaacctaacaacaaggggtactatgatattatccctgcttgcgcttcttgcgcattttgctagcgcaacaaatgcttccattattccacaatgctcacttgctcctagttccattattccacagttccttccaccagttactttaatggccttcgaacacccagctgtgcaagcctataggctacaacaagcgattgctgtgagcgtcttacaacaaccaattgtccatttgtaacaacatttcttggcacatttaacaattcaaaccatcgctacgtaacagtaacaacagttcctaccatcactgatccacctatccatggtgaaccctgttccctactttgcaac

SEQ ID NO: 299045 - DNA, 359 bp, Zea mays
  unsure (1)..(359): unsure at all n locations
tgaagatgnngtcatcgtnntcttcgtcgtggtggcctnggggctctgtacagctttgccanngcgcctnnctgcaatgggcagatgccctnngcccctgcgcggnnggctgcaggtgcttgtaccggctngctggcgccggccctgaccgaccgatgatgggctngccggcgggctgtaccccctacgcgtgagtaccctgagggcagccgcagtgcagtcccgctggtcggcgggcgctcctactacgccggggtgtgggcagaccgagcgccatgtacctagccgctccggcaacagtgctgccagcagcagatgaggatgatggacgtgcagtccgtcgcgcagcagctgcagat

SEQ ID NO: 299046 - DNA, 377 bp, Zea mays
gtcagcctagcaattagctcatcttcttttgattggagaactcgacaccatgaaggtgctgatcgttgcccttgctctcctggcgctcgctgcgagcgccgcctccagtacaagcggcggctgtggctgccagacaccaccgtttcatctaccgcctccgttctatatgccgcctccgttctatctgccgccgcagcagcagccgcagccatggcaataccccactcaaccaccgcagctaagcccgtgccagcagttcggatcctgcggcgtcggcagcgtctgcagcccgttcctgggccagtgcgtcgagttcctgaggcaccagtgcaacccggcgggtacgccctacggctcgtcacagtgccaggcgctgc

SEQ ID NO: 299047 - DNA, 203 bp, Zea mays
tcgcccataccttccatcaatgatatagttatgttgcttgctgcgattgcttgttggagcctatagggttgaagagctgggttttcacatactgaagctatcattgatggaaggtatgggggaagaagggaagctatatgagcttgtgagcattgatggtaatatgttttgtttgcaacactttgctaaatcatcattccttt

SEQ ID NO: 299048 - DNA, 262 bp, Zea mays
ttgcaagagctgctaccgcgaccatttttccgcaatgcgtcacaagcgcctatagatttccttttttccccgtacctcttaccagcggtgtgtttggtatgtgaaaacccaattctttaaccctacacgatccaacacgcaatcgcagctggcatcttacctttatcacccttgttgctccaacaatcatcagccctattacagcagttacctttggtgcatttattggcgcaaaacattaaggcacaacaactacaacaac

SEQ ID NO: 299049 - DNA, 374 bp, Zea mays
ggcaatcgcagctggcatcttactctatatcaccctcgttcctccaacagggatgagccctattacagcagttacctttggtgcatttattggcacaaaacatcatggcacaacaactacaacaacttgtgctagcaaaccttgctgtctactcttagcaacagcagtatcttccattcaaccaattagctgcattgaactctgctttttatttgtaacaacaactacttccattcagccagctattttctggctacctccagcaatctcttttcattcaactaactgtcagcattgaactcttctgcttatttacagcatcaacaactactaccattctattctgttagctgttgtgagccctgcttctcttt

SEQ ID NO: 299050 - DNA, 396 bp, Zea mays
attgtactgcttgctccctttttatctttgggtatcctgaaccatcgagcgcgggctgtcaagctgactcgccttcacagtctacgcgaacgccttggtgccaccttcttctcccatctcaatgaactgatagcactctctttcaggtatgttcaccatggcaagggaatgcttcagcgccattagctgcttgcggagtttgatgccctgtttgattgtgatcaaggataataatgtaccttttgaagacattttttttgctgctcattattttaattctctccctctcatgggttttactttgctattcttgtcatggtcttggtatattgtttattacattttttatagtttatttctttctttttatctttttctatgtatctttattgtttt

SEQ ID NO: 299051 - DNA, 363 bp, Zea mays
cagaaacacaccaagcgaagttctctagcaacaacctaacaacaatggctaccgaggatattagccctccttgcgcttcttgcccttttagtgagcgcaacaaatgcgttcattattccacagtgctcacttgctcctagtgccattattccacagatcctcccaccagttactttaatgggcttcgaacattcagtcgtgcaagcctacaggctacaactagcgcttgctgcgagcgttttacaacaacccaatttcccaattgcaacaaccaaatcttggcacatttaaacctacaaaccattgtaacgcaacagcaacaacagtttttgccatcactgtgccacctagccgtggtgaacc

SEQ ID NO: 299052 - DNA, 364 bp, Zea mays
tcgttcataaacacaccaagcgttttttcttagcaacgacttaacaacaatggctgccaagatattagccctccttgcgcttcttgccctttttgtgagcgcaacaaatgcgttcattattccacaatgctcacttgctcctagtgccattataccacagttccttcgaccagttactttaatgggcttcgaacacctagctgtgcaagcctacaggcttcaacaagcgcttgcggcgagcgtcttacaacaaccaattaaccaattgcaacaacaattcttggcactttaaccatacaaaccattgcaacacaacaactacaacagtttctaccactactgagcctactagatgtggtgaacc

SEQ ID NO: 299053 - DNA, 135 bp, Zea mays
ctcattgactccagattgtataactcttcaccatgaaggcgctgatcggggcggctgctttcctggcgctcgcttctagcgccgccttcagtacaagcaagcggtatgaggctgccagaacaccaccgatttatt

SEQ ID NO: 299054 - DNA, 359 bp, Zea mays
attttcatcattcacaaacacacctagtttagcgcactagcaacaacctaacaggcagtggctaccaagatattagccctccttgcgcttcttgcccttttagtgagcgcaacaaatgcgttcattattccacagtgctcactagctcctagtgccattatttcacagaatcctcccaccagttaccttacatgggctttgaacattcagccgtgcaagcctacaggctacaactagtgcttgctgcgagcgttttacaacaaccaattgcccaattgtaacaacattccttggcacatctaaacctacaaaccaatgctattgcaacatggacatcagtttctgtcatcactgatcca

SEQ ID NO: 299055 - DNA, 284 bp, Zea mays
gggggcccacgcttctataaacacaccaagcattttttttcaacaacctaacaacaatgggtcggagatattatccctccttgcgcttcttgcgctttttgcgagcgcaacaaatgcgttcattatttcacaatgctcacttgctcctagttccattatttcacagttcctcccaccagttacttcaatggccttcgaacacccagctgtgcaagcctattggttacaacaagcgattgctgctagtcgtttacaacaactcaattcccaattgcaacatcaat

SEQ ID NO: 299056 - DNA, 350 bp, Zea mays
  unsure (1)..(350): unsure at all n locations
cgaccctataaatcaccattcctaacatcattttttttttatgtacataacaaaaatgggggccggtggttttttcttttagatgactcattctttacatgactttggatctgaaatcctcccaagagctgtactagatcatagtgtgcaggcatgcatttttacgggctattgngagtgtgataacactaactaatacattcttttgatgcaaacttggccctcactgatcagcctttcaagtttgttttttatgatccaaaaacacctttcttcactgcaccccgatgcttgccttattnttacattttacttgtcttttacttatacaatttatttttttttttata

SEQ ID NO: 299057 - DNA, 249 bp, Zea mays
actagttctagatcgcgagcggccttcttttctttagattggagaactcgacggcatgatggtgctgatctgtgccctagctctactggcgctcgctgcgagcgcattcttcagtacaagctgaggctgtggatgtcagacactacctttttatttaccgactccgttctatatgccgacttcggtctatctgcctccgtatcatcatccgtagccatggtaataccccattcaaccactctagctaat

SEQ ID NO: 299058 - DNA, 271 bp, Zea mays
cattagctttatctactccagagcttagaagaacccgatcgacaccatgagggggttgcttactttcctaactctcctggctctcgctgctagcgccacctacacgcatacaagctaagatttctgctttaatatcaccgtctatccatgaattactaccgcctttacatatgatttcttcacattttcatctatcctttgttgtaaatttaaccatttattgcttcatctttcatattttattattattttttattaataattacattta

SEQ ID NO: 299059 - DNA, 420 bp, Zea mays
  unsure (1)..(420): unsure at all n locations
gacccacgcgatccgagacccatatagctttatctacctccagtagcgcagaangaaccccgatcgacaccatgagggngtgttgctcgttgnccctcgcttctcctggactctcgctgcgaggccgccacctccacgacatacannagcggcggctgcggctgccagcccaccgccgccggttcatctacacgccgccggtgcatctgccacctccggttcacctgccacctccggtgcatctcccaccgccggtccacctgccgccgccggtccacctgccaccgccggtccatgtgccgccgccggttcatctgccgccgccaccatgccactaccctactcaaccgccccggcctcagcctcatccccagccacacccatgcccgtgccaacagccgtattcagcccgtgccagct

SEQ ID NO: 299060 - DNA, 244 bp, Zea mays
gcggcagtgcgtatagaggattttttttacagaacagcatgaagatggtcatgcggggtcgtcttgtgcctggctctgtcagctgccagcgcctctgcaatgcagatgccctgcccctgcgcggggctgcagggcttgtacggtgctggcgccggcctgacttctatgatgggcgccggctggctgtacccctactcgtagtacctgtggcagcctcagtgcactccgctggcggcggcgccct

SEQ ID NO: 299061 - DNA, 300 bp, Zea mays
  unsure (1)..(300): unsure at all n locations
cccacgcgtgcgattttgnncattcagaaacacaccaagcgaagcacattagcaacaacctaacaacaatggctaccaagatattattcctccttgcgcttgttgcgctttttgcgagcgcaacaaatgccttcattattccacaatgctcacttgctctaagtttcattgttacacaggtccttccaccagttacttgaatgggctttgaacacccagttgtgcgagcttataggcttcaacaagcggttgtaacaagcatcttacaacaaccaatttcccagttgcnccaacaattct

SEQ ID NO: 299062 - DNA, 337 bp, Zea mays
agcaaagcggcagtgcgtagagaggatcgtcgaacagaacagcatgaagatggtgagggttctcgtcgtgtgcctggctctgtcagctgccagcgcctctgcaatgcagatgccctgcccctgcgcggggctgcagggcttgtacggcgctggcgccggcctgacgacgatgatgggcgccggcgggctgtacccctacgcggagtacctgaggcagccgcagtgcagcccgctggcggcggcgccctactacgccgggtgtgggcagactagcgccatgtaccagccgctccggtaacagtgctgccagcagcagatgaggatgatggacgtgcat

SEQ ID NO: 299063 - DNA, 295 bp, Zea mays
tgggtcttcagaccattagctttatctactccagagcgcagaagaacccgatcgacaccatgagggtgttgctcgttgccctcgctctcctggctctcgctgcgagcgccaccttcacgcatacaagcggcggctgcggctgccagccaccgccgccggttcatctaccgtcgtcggtgcatttgccaccttcggttcacctgccaccttcggtgcatcttccaccgccggttcacctgccttcgtcggttcatctgtcaccgtctgtccatgtgccttcgtctgttcatttgtc

SEQ ID NO: 299064 - DNA, 257 bp, Zea mays
aactgttactgccatcactgttctttttagccgtggtgaaccttgtcgtcggggtgtaacagcagctacttgcatccaacccactagctatggctaactgttgctgcattaccagtatcaacaactgtttgcaacattttatgccagcgctcagtcaactagccatggagaaccctgtctcctacctacaacagctacaattgcttttatttagcccgatctcctgtgtgcattgcactaacgtacctactataaca

SEQ ID NO: 299065 - DNA, 373 bp, Zea mays
attttgagcattcagaaacacaccattctaagcacattagcaacaacctaacaacaatggctaccaagatattatccctccttgcgcttcttgcgctttttgcgagcgcaacaaatgcgttcattattccacaatgctcacttgctccaagctccattattacacagttcctaccaccagatacttcaatgggcttagaacacccagctgtgcaagcctataggctacaacacgcaattgtggcgagcgttttacaacaaccaatttcccagttgctacaacaatcctttgtacatctaaccatacaaaccattccaacgcaacagcatcatcaattcctaccagtactgagccacctaaccatggtgaaccc

SEQ ID NO: 299066 - DNA, 283 bp, Zea mays
caagatggtcctaaccacagagggctactggccgaccaagagcccgatccacactccgctggctgacggagctcgagccggatgcaggtgaagcttgcgcacctaccctatggcgctgatcacgagcagggataccatcgagaaggacgtattccacaacatcaggcacgcgttcgaggagagcctacgcgacgagggcccgctacagctgccccgagggctgacacccaggctgatcggcgtggtgacgcacgcggcctgaacctcctacagctacaagaca

SEQ ID NO: 299067 - DNA, 360 bp, Zea mays
aacaattgttgccctttgtccaacttgttttgacaaacccagcagcctcctaccaacgacacatcattggtggtgccctcttttagattgcttattagttgtaattcaataataaagtttttttggatgatgtatgtggccaaccagaaataagaagttacatttccagattctaaaaaaaaaaaaaaaaaaaaaaaaaaaaaaaaaaaaaaaaaaaaaaaaaaaaaaaaaaaaaaataaaaaaaaaaaaaataaaataataaaaaataaaataaataaataaaaaaaaataaaattagggggcggccgttttaaaggatcacaacttacttccccgtgtttgcaacttattattttttt

SEQ ID NO: 299068 - DNA, 305 bp, Zea mays
tggacgcgtgggcggacgcgtggtttagttttctgaaacacaccaagcgaagcgcactagcaacgacctaacaacaatggctaccaagatattagccctccttgcgcttcttgccctttttgtgagcgcaacaaatgcgttcataattccacaatgctcacttgctcctagtgccattatttcacagttccttccactagtaacttcaatgggcttttaacacctatctgtgcaagccaacatgcaacaacatgcgcttgctgtgtgcgtctaacaacaaccaaattcccaattgcaacaacaaa

SEQ ID NO: 299069 - DNA, 378 bp, Zea mays
  unsure (1)..(378): unsure at all n locations
gggggagcgacgcgnncggaaagcacaatattttacctttaattgcagccaaaatattttgcttcctggttcgtccttttctttcttcaagtgtttctaccacaaccattttcccacaatgctcacaagctcctatagcttccctttttcccccatacctctcaccatcagtgtcttcaatgtgtgaaaacccaattgttcaaccctacaggatccaacatgcaattctcaacaggcatcttaccattatcacccttgttcctccaacaaccgtcatccctatttacatcaattacctttggtccattttgttgtcacaaaacaatttgtcacaacaacttcaacaacttttgctttcaaacctttctttatactctt

SEQ ID NO: 299070 - DNA, 349 bp, Zea mays
  unsure (1)..(349): unsure at all n locations
gaaagcgcaatatagaacgaacaatggaattcaaactattgagcctcattatgcaccaagatatttttgcaagtgatgctactgggaccatttacatggaaatgctaacacngctactatagcttcaatgcttacaagcgtaccatatgaccagctgtgtcttccatatgtgaaaacaaaatagtctaaccctacaggaaacaacacgctataaccatataggttttacctttatcacccttgttgctacaacaatcatcagccctattacatcagttacctttggtgcatttattggcacaaaacatcagggcacaacaactacaacaacttgtgctagcaaaccttg

SEQ ID NO: 299071 - DNA, 358 bp, Zea mays
ggaagctataggagctagccttcttctcccgaacctcccaccagcgggggcgggggtatgtgaaaacccaatgttctaaccctacatgatccaacaggcaatcacagctggcatcttacctgtatcacccttgttcttgcaacaattatcagccctattacatcatctaccttaggtgcatttattggcacaaaacatcatggcacatcaactacaacacttgttgccctttgtccaacttgctttgacaaacccaggatttctctaccaacaacacattattggtggtgcccttttttacatagcttatgagatgtaattgattaactaagttttttgcatgatgtttgttgccaac

SEQ ID NO: 299072 - DNA, 477 bp, Zea mays
  unsure (1)..(477): unsure at all n locations
gaannncccgggntcgaccccacgcccgtccggcaacccatagaaaggcacccaatattgtactcaataatcggcacgccannaaatattttgccctcatgtatgcctccnnttggtctttnnctgcaagtgccctgctacccggcgaggcccattttcnnccgcaatggcttcaacannagctcnnctatagcnnttccctntnncttcccccaatacccnntctcaccanngcgatgtnncttcacgtatcgtgaaannatccaattnncttctaccctacannggatccaacaggcnnaatcgcagcaggccatcttaacctttatcancccttgnttcctccaaccaatcatcnagccctattacacgcagttaccctttggtgcatttattggcacaaaacatcagggcacaacaactacaacaactcgtgctagcaaaccttgctgcctactctcagcaacagcagttacc

SEQ ID NO: 299073 - DNA, 274 bp, Zea mays
ccaacaaccaaacaacaaggcgtaccattatattatccctccgtcctactaaaagcgctcatagagagcgcaacaaatgctttcattattccacaatgctcacttgctccaagttctattattacacagtccctcccaccacttactccaaaggctttttaacacccatctcgtcaagcctatcttctacaacatgcaattgctgccagcgtctcacatcaaccaattacccaatttcaacatcaaatacttggctcatttaacaatttcaaat

SEQ ID NO: 299074 - DNA, 381 bp, Zea mays
ccaacaagcaacatacaacgtttttttctagtagcatcaatagagcaacaatggcggccaatatattttccatccttatgctccttgctctttctgcatgtgttgctaacgcgaccatttgacctcaatactcacaagctcctatagctgcccttcttccaccataccttccatcaatgaccgcttcaatatgtgaaaacccagcccttcaacccttcaggctccaacacgcattcgtgaccagcaacttacctttatcactcctgttcttttaacaatagccaggagtatctttgttgcactcattggtacaaaccatacaagctacacagctgcatctactcgagctactcagtgatcagccaagtaattttaccacac

SEQ ID NO: 299075 - DNA, 360 bp, Zea mays
ccggtcgcccaccgtcgattttgagcttcagaaacacaccaagctaacacattacacaacctaacaacaatggctaccaagatattatccctccttgcgcttttgcgctttttgcgagcgcaacaaatgcgttcattattccacaatgctacttgctcaagttccattattacacagttcctcccccagttacttaatgggcttcgaacacccagctgtgcaagcctataggctaaacaagcaattgcgcgagcgtttacaacaaccaatttccaagtgaacaacaatccttggcacattaacaatacaaaccatcgcaacgcaacagcaacaacaatttctaccagcactgagccacct

SEQ ID NO: 299076 - DNA, 388 bp, Zea mays
gaccacgcgtccggcaagaggtgcgtcttcgatggttgtagttaaggcgcagagggtagcacacctctgtgcaaagcacatggtggcgggaagcggtgcatgtttgaaggaggtggtgtctgtgcaaaaagtgtgcacggggctactgaatattgcgtggcgcatggaggaggaaagcgctgttccgtgcccggctgcaccaagagtgctcgtggccgcactgactgctgtgtgaagcacggtggcggcaagcggtgcacatggggcacaggctgtgaaaagttctcccgtggcaagagtggcttctgtgcggcacatggtaccttgatggccaggcagcgagaacaagaggcggcgaagaatgtaggaagcatgattggaccaggtc

SEQ ID NO: 299077 - DNA, 410 bp, Zea mays
cggacggaatcggagggtcggcccagacctacgcgcacgcatcatacggtaacgaccgttcacctgccgacgccggtccacctgccaccgccggtccatgtgccgccgccggttcatctgccgccgccaccatgccactaccctactcaaccgccccggcctcagcctcatccccagccacacccatgcccgtgccaacagccgcatccaagcccgtgccagctgcagggaacctgcggcgttggcagcaccccgatcctgggccagtgcgtcgagttcctgaggcatcagtgcagcccgacggcgacgccctactgctcgcctcagtgccagtcgttgcggcagcagtgttgccagcagctcaagcaggtggagccgcagcaccggtaccaggcgatcttcggcttggt

SEQ ID NO: 299078 - DNA, 371 bp, Zea mays
gaaacacaccaagcgaaacgcacttttcacaacctaacaacaatggctaccaaggtgttattcctgcttgcgctgcttgcccttttagtgagcgcatcatatgccttcattatttcacagtgctcacttgcttctagtgccattattccacagttccttccatcagttacttcaatgggcttcgaacatccagtcgtgcaagcctacaggctacaactagcgcttgccgccagcgtattacaacaaccaattgcccaattgcaacaacaatacttggcacatctaaacctacaaaccatcgtaacgcaacagtaacaacagtttctgacatcactgagccacctagtcgtggtgaaccctgtcagctactt

SEQ ID NO: 299079 - DNA, 280 bp, Zea mays
gacccacacgtccggcacaaaactgtactcaaccattgcttccaaaacacacagccaccatacgggccggagtatttcaaaaagtgctgctcccccaaccatcaacccgcaatgcacacaagctactatagcttcccttcttcccccatacctctcaccaacggagtcttctgaatgcagaaaacccaattattcaaccctacaagatccaacaagcaatcacatctggcatcttacctttaacacccatgtacctccaacaatcatcaatcctattaca

SEQ ID NO: 299080 - DNA, 352 bp, Zea mays
caatccagatcagcaaagcggcagttcgtagagaggatcgtcgaacagaacagcatgaagatggtcatcgttctcgtcgtgtgcctggctctgtcagctgccagcgcctttgcaatgcagatgccctgcccctgcgcggggctgcagggcttgtacggcgctggcgcccgccttaccaccattattggcgcccgcgggctgtacccctacgcggagtacctgaggcagccgcagtgcaacccgcttgcgggggggccctacttcccccggtgtgggcagacaagcgccatgtaccaaccgcttcggcaacaatgctttgcccaaccaattagggttattggcctgcaattcc

SEQ ID NO: 299081 - DNA, 312 bp, Zea mays
gcattcacaaacacaccaatttttttttcacaagcaacaacctaacaacaggggcggccaatatattagtccgttcgggctctatatgcctcttttagtgagcgcaacaaatgctttcattattccacagtgctcacttgcttctagtgcctatattacacagttcctttcaccagtttacttgaatgggcttcgaacatcctgccttgcaagtttacaggctacaactagcgcttgcggagagcgttttacaattaccaattgcccaattgcaatcacaatactttggtacatttaaacctacaaaccatc

SEQ ID NO: 299082 - DNA, 353 bp, Zea mays
aacacacggagcgatgcgctctctttactagatcacacactggggaccaagaagttttgccttcctagggcccttggtctttctggatggggcgacaacggcacacattatcctacaagggtcacatgctcctatagctccccttcttccgccatacctttcatcaatgatagcttcagtatgtgaaaacccagctcttgaaccctataggctccaacaagcaagtcgcaggaagcaacatacctttatcacccttgtttcaacaatcgccagccgtatctacggtgctgggatcggttcacaccatcaaggcacagcagctgcagcaactcgtgctacctgtgatcaaccaa

SEQ ID NO: 299083 - DNA, 334 bp, Zea mays
caacatagaaagcacaataggtggccgacattgtcatccaaaatattttgcctacttatgctccttggtctttctgcaagtgttgctaccgcaaccattttcccacaatgctcacaagctcctatagcttcccttcttcccccatacctttcaccagcggtgtcttcaatgtgtgaaaacccaattgttcaaccctacactatccaacaagcaatcctaacatgcatcttaccattatcacccatgtttcttcaacaaccttcagccctattacagcatatacctttggtccatttggtggcacaaaacattatggcacaacaacttcaacaac

SEQ ID NO: 299084 - DNA, 370 bp, Zea mays
cgccagagcaagtgggttggatgcaagtagctgctgttgcaagtaggcgacagtttatgccagcgctcagtcaactagccatggtgaaccctgtcgcctacctacaacagcaacaattgctttcatctagcccgctcgctgtgggcaatgcacctacgtacctacaacaacagttgctgcaacagattgtaccagctctgactcagctagctgtggcaaaccctactgcctacttgcaacagttgcttccattcaaccaactggctgtgtcgaactctgctgtgtacctacaacagcgacaacagttacttaatccactagcagtggctaacccattggtcgctaacttcctgcagcagcaacaattgct

SEQ ID NO: 299085 - DNA, 301 bp, Zea mays
aactagcaacatagaaagctttttgtggttccaacaatggcagccaaagtatgcggcttgcttatgctccatgggctttctgcaagggctgctaccgtaaccattttcccacaatgctcacatgctgctatagctgcctttcttcccccatacctttcaccagtgtagtcttcagtatgtgaaaacccaatgcttctaccctacttgatccaactggtcattgcagcaggcatcttaccttcttcaccctttggcttccaacaaccgtcagacctattacagcagtttcctttggtgcatt

SEQ ID NO: 299086 - DNA, 330 bp, Zea mays
aggacgcgtgggaagcaacttttttctcttattaacaacaacttcttacattaaattaattggccgcactgatccccgctgcttattagcagcagcgaatactactaccatttagccagctagctgcagcaagccgtgcttccttcttgtcacatctacagttgctgtctttataccagcagcttgaggttatccccgcaaccctcttacaactactgcaattgatgtcgttttgtcaacttgttttgacaaacctatgtgactccttccaacaacacaatcatggaggtgcccctctttttgactgcttaattagttgtaatttcaatc

SEQ ID NO: 299087 - DNA, 437 bp, Zea mays
  unsure (1)..(437): unsure at all n locations
cggaannncccgggnntcgacccacnngcgtccgnnagccaactagnanntgtggtgaacaccttgtcgtttctatcttgcaacagacaggtgggcttggcatccaactctcactttgctctggcgaannacgtagctgcatacccaaccaacanatcaacaattgcaacctagtttctgcctagcgctcagtcaactatgccattggtgaaccctgccgcctacctacaacagcaacaactgctttcatctagccctctcgttgtgggtaatgcacctacatacctgcaacaacaattgctgcaacagattgtaccagctctgactcagctagctgtggcaaaccctgctgcctacttgcaacagctgcttccattcaaccaactgactgtgtcgaactctgctgcgtacctacaacagcgacaacagttacttaa

SEQ ID NO: 299088 - DNA, 400 bp, Zea mays
gaaaggaaggaccgggacgacccacgcagacggaagaaatagtcaggagcctttgtgttttttttactgaaactacagatgcggccgttccatttacaagtagtggcaaacattgctgattactcgcaacaacaacaattgctgacattttacccaaatgttgtgggaaacattaacgcctttttgcaacatcaacagaagctgccattctacccacaggatgtggtaaacaatgtcgtctttttacaacaacaacaattgctcgcatttagcctaactagcttttgactaatcctaccaccttataacagcagtccaccattggtggagctcatttatagatttgtttatgcttaatactgttataataatattattattactgatatgtgcaactttt

SEQ ID NO: 299089 - DNA, 370 bp, Zea mays
  unsure (1)..(370): unsure at all n locations
gggngacccacgcgnncggcattcaaaaacacaccaagcgatgtgtattatctacaacctaacaacaatgggggccgggatattagccctccgtgcgcttcttgcccttaaagtgagcgcaacaaatgcgttcattattccacagggctcacttgctcctagtgccattattccacagttcctcccaccagttacttcaatgggcttcgaacatccagccgtgcaagcctacaggctacaactagcgcttgcggcgagcgtcttacaacaaccaattgcccaattgcaacaacaattcttggcacatttaaacctacaaaaccatcgtaatgcaacatcaacaaccagttttgtcattactgattcacct

SEQ ID NO: 299090 - DNA, 349 bp, Zea mays
gcaagcgatgatcgagcagttcgtttacttcgtcatccggccgcctcgtgcagagtacaatccagatcagtatttatgggagccagagttcactcttgccggaaggaagtataaaaggctagatttggagcttacgaatgaaagaagtcagaccttaaagtgcagccactatgttcctgctgtcatcccagaaaacacttcccttccatgtgtagtctactgccatgggaatagtggatgcagagcagatgcaaatgaagccgctgtcatacttcttccttcaaatatcaccctttttacacttgactttgcgggatcagggctatcaagtggagattatgtcagcctt

SEQ ID NO: 299091 - DNA, 358 bp, Zea mays
agcattcttaaacacactttgttttgctcactagcaacaacctaacaggaatggttaccaagatattatccctccttgcgcttcttgcgctttttgcgagcgcaacaaatgcgtccattattccacaatgctcacttgctcctagttccattattccacagttcctcccaccagttacttcaatggcctttgaacacccagctgtgcaagcctatatgctacaacaagcgattgcggcgagcgtcttacaacaaccaattggccaattgcaacaacaatccttggcacatctaacaatacaaaccattgcaacgcaacagcaacaacagtttctaccagcacttagccacctagccat

SEQ ID NO: 299092 - DNA, 271 bp, Zea mays
acgcaaaaacacaccttgctattcgcattatcaacgacctaacaacattggctacggagatatttgccctccttgcgcttattgccctttttgtgagcgcaacaaatgcgttcattattccacattgctcacttgctcctagtgccattattccacagtatctcccaccagatacttcaatgggctttcgaacacctatctgagcaagctaacatgctactacaagcgttttgctgtgaactttttacaacaaccaattgccaattgtaac

SEQ ID NO: 299093 - DNA, 285 bp, Zea mays
  unsure (1)..(285): unsure at all n locations
caacatacatagtgaatatcactttttacancnnagcaccaatgggagccaagatttttgccctccttgccctccttgctctttcagcaagcgctgctacctttacttttattccacaatgctcacaacaatacctttctccggctactgccgtttgatttcaatacccaactatacaatccttcatggatcaagacgccatccattcactcattttacggttcattagaattaacccttcaacatccatatgctctattgtaactgtcatccttagtgcatttt

SEQ ID NO: 299094 - DNA, 288 bp, Zea mays
cgtgagtaaaatgtgtactatgcttagctcgccgagcaggcggagagggtcgaggagatggttgagttcatggagaaggtattcaagactgttgacttggaggagctcactgtggaggagcgaaaccttcttgttgttgcatacaataactttattggagcccgccgctccttatggcgcatcattttcttcatcgagcataaggaggatggccaaggtcttgatgtcctagtttcactcattaaggattattttggcaagattgatactgagctgatcatagatctg

SEQ ID NO: 299095 - DNA, 377 bp, Zea mays
atttgcaacaacaacatttaccattcagccagctacctgttgcctacgcccagcaatttcttccattcaaccaactggcagcattgaactctcctgcttatttacagcagcaacaactactaccattcagccagctagctggtgtgagccctgctaccttcttgacacaaccacagttgttgccgttctaccagcacgctgcgcctaacgctggcacccttttacaactgcaacaaattgctgccattcaacccaacttgttttgaccaaaccctagcagtgtttctacccaacaacccattcaattgggtgggtggccctttttttaaggattttcttaatggaggttattgggtcaaataattaaaaagtttttt

SEQ ID NO: 299096 - DNA, 337 bp, Zea mays
  unsure (1)..(337): unsure at all n locations
attttgagcattcagaaacacacttttcgattttcatnagcaacaacctaacagcgaatggctaccaagatattatccctccttgcgcttcttgcgctttttgcgagcgcaacaaatgcgttcattattccacaatgctcacttgctccaagtttcattattacacagcttctcccaccagttacttcaatgggctttgaacacccagctgtgcaagcctataggctacatcaagcaattgcggctagcgttttacaacaaccaattttccagttgcatcaactatccttggctacattttatcattcaaaccattttaattcatttataacaacaa

SEQ ID NO: 299097 - DNA, 231 bp, Zea mays
  unsure (1)..(231): unsure at all n locations
aaaannggaaaanccggacgacccacgcatccggagcattcataaacacatttagcgtatcgcactagcaacgacctaacgacaagggttaccaatatattagccctccttgctcttcttgccctttttgagagctcatcaaattgcttcattcttacacaatgctcacttgctccttatgccattatttcacattttctcctaccaagatacttttaatggcttttgaac

SEQ ID NO: 299098 - DNA, 255 bp, Zea mays
atttcgggaattcaatagcaactttttattatcaatggagaccaagatatggtcgctccttatgctctttgctctttctacatgtgttgctaacgcgatcaatttccctcaatgcttacatgctcctatagctccccttcatcctccataccttccatcaattatagcctcagtttgtgaaaacccagcatcttaaccatatatgctataacatgcatccgcatcaagcaacatacttttatcgcccttgttgtg

SEQ ID NO: 299099 - DNA, 363 bp, Zea mays
ggtgcatgagggggggcaaaacatctaggcacaccaactacaacaactagaggaagcaaacttagctgaatactgtcaacaccattagattcatccattcaaccaactgggtgcagtgaactgtgatggttattggcaacaacagtgaccattcagccagatgggcgctggctacccccagcaataacttccatgaaaccaactatgcaggatagaactatgctgctcattcacagctgctacaactactaccattgatccaggtagctgatgtgagccctgctgtcttctcgacacaacaacaggcggtggcgggctacctgcacgctatgcctaacgctggaactctcttacaacagcaac

SEQ ID NO: 299100 - DNA, 340 bp, Zea mays
cagcattcaaaaacacaccatgcgtagtgcactagcaacaacctaacaacagggggtaccaatatattagccctccttgcgcttcttgcccttttagtgagcgcaacaaatgcgttcattatttcacagtgctcacttgctcctagtgccattatttctctgtttcttccaccagttactttaatgggcttcgaacattcaaacgtgcaagcctacatgttacaacttgtgcttgcggcgagcgttttacaacaaccatattgtctaattgcaacaacatttcttggcacatttatatccttccaaaccttttttactccttcatacaacatctgttttt

SEQ ID NO: 299101 - DNA, 187 bp, Zea mays
tcggtaacattcatagagaagttctattatctacatctaagcaccaagggcagtcgagagttttgcccttcttgcgctccccgctcattcagcaagtgttgctaccgggacaattattccacattgctcacaacaatacctctctccaaagacagctgcaagaactgaataccctactatacaatat

SEQ ID NO: 299102 - DNA, 324 bp, Zea mays
tcggcaacatacctttatcaccctttgttcatcaatcgccagccctatctttggtgcagtcattggtacaaaccatcaaggcacattatctgcagcaactcgtgctacctgcgatcaatcaagttgcacaggcaaaccttgctttctactttttttttactacatttttttttatttaaccaactgtttacattgaaccgtgctgcttatttgcaagtacaactattaccattttttctgctagcaactgtctactcttagtatcatcaactttattcattttaccaattggtcgcattgtactcccgtgttttatttgtagca

SEQ ID NO: 299103 - DNA, 315 bp, Zea mays
gaactagcaacatagaaagcacacttgtgtattaacactggcagccaaaatatggcggtgccttatgctccttggtcgtgctgcaagtgttgctaccgcaaccattttcccacaatgctcacaagctcctaaagcttcccttcttcccccatacctctcaccagcggtgtcttcaatgtgtgaaaacccaattgttcaaccctacacgatccaacaggcaatcgcaacaggcatcttaccactatcacccttggtcctacaacatctcgtagccctattacagcagctaccttgggtctcatttggtggcacaaa

SEQ ID NO: 299104 - DNA, 232 bp, Zea mays
tcgagcagccgcagccatggcaattccttttcaaccaccgtactaagcccgtgccagcagtttggatcctgcgggggcggcagcgtcgtagcccgttcctgggccagtgcgtctagtttctgaggcaccagtgcagcggcggtgactccctacggtcgcacagtgccaggcgctgtatgatagtgctgtcaccagatcaggcaggtggagccgttgcaccggttccagtcga

SEQ ID NO: 299105 - DNA, 297 bp, Zea mays
accgattttgagcattcaaaaacactccttgttaagcgcactagcaacaacctagcgggagatgtttaccaatatattagccctccttgcgcttcttgccttatttgtgagcgcaacatatgcgatcataatatccacattgctcacttgcttctagtgccaaaaaatcacattatcttccaccatttttttcaaagatgattttaacacccaactgtttataaacaaaatactataactagcgcattgtgtaagcgttttacaacaaccaatttcccaatttgcatcaacaatcct

SEQ ID NO: 299106 - DNA, 416 bp, Zea mays
  unsure (1)..(416): unsure at all n locations
attgaggaccaacagagcaacattagaaagtgtgtaatccaggtagcaacaaataggagcaaccaatggcggaaccaagaataatttttccctcctttatggctcccttgctcttttcttgcaatgtgtttgctaaacgcggacaaattttnccctcaaatggctcacaaagctccctataagcttccccttcttccccccataccttccatcaatgatagcttcagtatgtgaaaacccagctcttcaaccctataggctccaacaagcaatcgcagcaagcaacatacctttatcacccttgtttcaacaatcgccagccctatctttggtgcagtcattggtacaaaccatcagggcacagcagctgcagcaactcgtgctacctgtgatcaaccaagtagctctggcaaacc

SEQ ID NO: 299107 - DNA, 333 bp, Zea mays
caacaatggcagccaaaataacctgcgtccttattcgcctgggaaatcccacaaggggggaccctataagacccaaccggccatctcagacgagcatcttacctttatcacccttgctcctacaacaaataattagccttattacagaaattacattttgctgcatttattggcacaaaacatcatggcacaacaacttcaacaacttgagctaccaaaccaagctgtctacttttagaaacaatactttcctcgattcaactaacaagctgtatcttactccgcctcttttttacaacaacaaacaactatctattcaaaacagcttttttc

SEQ ID NO: 299108 - DNA, 371 bp, Zea mays
ctccaccctcgagtaatagattagattgctcgcatctttttcttgttcgttcttcgattgcgcacaggaaacgatcttcgtgatcaggccgatctcgcatcagcaaggtcggtaaccacagggagttggttcagcaattgcattggcgcctcgggcttgctcgtcgtagtcggatcgcaagggtcaacttccgccaaatcggaattatctctactcgccgaaagatcgggcacctcagctacatcaattggtatcagatttccaggttgatcggtgagtttatcgagtgtttttttttcctacagtccacaaaaccacataaaaattcaggttagaccttatcccagcacccttttgagcctcacactttc

SEQ ID NO: 299109 - DNA, 371 bp, Zea mays
gaaagaccggggcggaccacacccttcgggcccaactagcaacatacaaggcacattattgtaccaacaatggcagctaaaatattttgcctccttatgctccttggtctttctgcaagtgctgctacagcgaccattttcccacaatgctcacaagctcctatagcttcccttcttcccccgtacctctcaccaacggtgtcttcggtatgtgaaaacccaattctataactcctacaggatccaacaggcaatctcagatggcattttacctttatcaccctagaaccatctactatcatgaaacctattaccgtagttgcttttggtgcatctatgggcacagaacatcaacgcccaacaccttcgat

SEQ ID NO: 299110 - DNA, 378 bp, Zea mays
  unsure (1)..(378): unsure at all n locations
aaccaattggccgcactgaaccccgctgcttatttgcagcagcaaatactactaccatttagccagctagctgcagcaagccgtgcttccttcttgacgcagcaactgttgctgtcttantaccancattttgcgggtaaccccgcaacccttttacaactacaacaattgttgccctttgtccaacttgctttgacaaacccagcagtcttctaccaacaacacatcattggtggtgcccttttttagattgcttattagttgtaattcaataataaagtgttttggatgatgtatgtggccaaccataaatatgaagttacattttcaatattataaataaaaaaaattttagggctgtcgttttaaaagatccaa

SEQ ID NO: 299111 - DNA, 455 bp, Zea mays
  unsure (1)..(455): unsure at all n locations
gaacggaannncccggagtcgacccacgccgtccgcaaagtaggcanngtgcgtagagatggatctgtcgaacacgaacccagcatgaagatgggtcgatgcgttctctgtcgtgtggcctgnngctctgtcagctgcnncagcgcctctgcaatgctagatgcccctgcctcctgcgccggggnctgacagggacttgtaccgtgcgcttggcgctcggcctgacgaccgatgattgggctgtccggcgggctgtaccccctactgcggagtactctgaggggcagccgcagtgcagcccgctggcggcggcgccctactacgccgggtgtgggcagacgagcgccatgtaccagccgctccggcaacagtgctgccagcagcagatgaggatgatggacgtgcagtccgtcgcgcaacagctgcaaatgatgatgcagcttgagcgtgccgct

SEQ ID NO: 299112 - DNA, 279 bp, Zea mays
agctcttgtcccctattaccttgatgaaaaaactgggtggggtttggagatctgtgatcttaagaaacaactcgaagatgctcggtcaaaaggcattgatgttagggccttggtggttatcaattcaggaaatcctactgggcatgttttttctttttacaaccaatttttttttagtgtatttctgtaaaaatccaggttctagaacctttactcttgtatcatgatttctattgagaattttttttattttctttcattatattttttttttttttt

SEQ ID NO: 299113 - DNA, 390 bp, Zea mays
attttgagcattcaaaaacacacaaagggaagtgcactagcaacttcctaacaacaatggctaccaagatattagccctccttgcgctcctttccctttcagtgagcgcaacaactgcattcattattccacaatgctcacttgctcctaatgccattattccacagttcctcccatcagttacatcaatgggcatcgaacaccctattgtgcaagcctataggctacaacaagcgcttgcggcgagcgtcttacaacaaccgtttgcccaattacaacaacaatccttggcacatctaaccatacaaaccatcgcaacacaactagagcaacagtttgtgcccgcattgagccaactagccgcagtgaaccctgtctcctacttgcaac

SEQ ID NO: 299114 - DNA, 236 bp, Zea mays
  unsure (1)..(236): unsure at all n locations
gcgcaacaaangcgttcattattcttcaatgctcacaatcttctagtggggtgtgtttcatttcctctcaccatctacttcaatgcgctttgatcacctatctgtgctagccaacttgttacaacaagctcttgcgtctatcgttcttacaacaaccaatttcccaattgcatcatcattcctagccacatctaacaatacaatccttttcatctcaacaactacatcagttccta

SEQ ID NO: 299115 - DNA, 263 bp, Zea mays
gcgtccgttatccgcactgtaaactaagtttcggtctgcagtcccggcttttaggcgggggttccatctgagcgaatctatccattcttgttctgtatggccgccagcgtcaccgtggaaaacctcatccccaaggtcttaaaatgtgagtatgcattccgtggggagattgtcattcatgctcagcgtctgcatcgacatctacaaacacaaccagggtctcttacttttgatgagatcctctatagcaatattgtgaatac

SEQ ID NO: 299116 - DNA, 292 bp, Zea mays
  unsure (1)..(292): unsure at all n locations
ggcgcccacgcgttcgaccaagctaagctcactattactttctacaacaaggctaccaagggatggctcttttttcacttttctctttttgctaacgcaacatattctttcatnatttcacaatgctcactagctcctagttccattatccacatttcctcctaccattacttaatgttctttaacacccactttgcaatcctatatgctacaacaagcgattgcacgagcgttttcatcaaccaattcctcaattgttcaacaatccttggcacatttaacaatacaaacc

SEQ ID NO: 299117 - DNA, 392 bp, Zea mays
gcaacagctcagtgagattgagaataaattagttgcatcaagtgaagaaatagagttgctgaaagagcgtattcaacaagaagctgctgtatcagcagaaagaggaatgcagcttgaagaaacaatgaccagtgcagagggatacaaagaaaaaattaacgagctacaatgctccctagattcctcgatgtctaaaaaccagctacttgaacaagaagttaaggagctgactgataaatgttcagagcatcaagaacaagcgcattcagttcagcaaagaagtctggagctggaagatctgcttcacacatcaaagactcatgctgaaggtgcatactctcggacacaggagctggagcaggagctgaacagcacatatgaaaagctcaagg

SEQ ID NO: 299118 - DNA, 387 bp, Zea mays
attatgcgcattcagaaacacacttagcgacgcacattgccaacaacctgacagcgaatggttaccaagatattatccctccttgcgcttcttgcgcgtcttgcgagcgcaacaaaggcgttcattattgcacaatgctcacttgctccaagattcattattacacagatccttccaccagttacttcaatgggctctgaacacccagctgtgcatgcctataggctacaacacgcaattgcggtgggcgtcgtacaacaaccaatttaccagctgcaacaacaatcgttggcacatttaacagtacataccatcgtaacgcaacagctacaacaattgctaccagcactgatccaactagccatggagaaccctgccgtctacttg

SEQ ID NO: 299119 - DNA, 382 bp, Zea mays
  unsure (1)..(382): unsure at all n locations
cggacgctttgtctacctattcttttttttttatanaaagcacaataanttaccggcaggggtagtcaaaatattttgcctccttatgcttcttggtatttctgcaagatctgctacttctaccaattttccgcaatgctcacaagcttctataactttctttttttccttttaccttttaccatttttttcttttttttgtgaaaacccaattttttaaccctacagtatccaacatgcaattgcatcttttaatattacctttattatctttgttccttcaacaattattagtcctattacattatttactcttttttcttttatttttacaaaacattattttacaacatctataacaacttttgcttttaaatttttt

SEQ ID NO: 299120 - DNA, 335 bp, Zea mays
  unsure (1)..(335): unsure at all n locations
antcaaaaacacaccaagctaagctttttagcaacaacctaacaacaatggctgggaatatatttttctttcttgctcttcttgcgctttttgcgagctcaacaaattctttcattatttcacaatgctcacttgcttcaagtttcattattacacagttcttcctaccagttactttaatgggcttttaacacccagctgtgcaagcctatatgctacaacaagcaattgctgctagcgtcttacaacaaccaatttttcatttgcaacaacaatcctttgcacatttaacattacataccatagtatctcatcttttactacaatttctacca

SEQ ID NO: 299121 - DNA, 377 bp, Zea mays
ccacgcgtccggctttatctactccagagcgcagaataaccttatcgacaccatgagggtgttgcgtcgggccctcgctctcctggctctcgctgcgagcgccacctccacgcatacaagcggcggctgcggctgccagccaccgccgccggttcatctaccgccgccggtgcatctgccacctccggttcacctgccacctccggtgcatctcccaccgccggtccacctgccgccgccggtccacctgccaccgccggtccatgtgccggcgcctggttcatttgtcgtcgtcaccatgccactaccctacttaaccggctcggcctcagcctaattcttagccacattcatgcccgggccaacagccgtattct

SEQ ID NO: 299122 - DNA, 356 bp, Zea mays
  unsure (1)..(356): unsure at all n locations
cgtcgacaggggaattaatggcgtcgtcttctagcagcagccaccgccgcctgatccgcgcagccgccgtcctgctctccgtgctcgctgctgccagcgccagcgccgggaccttctgcgtgccggggtgggccattctgcactacctgttcccgagctgtctcttttttccttacgcgagttgcctttttcggatcctctttcttcttactgaattttgagggtcatggtttttttgtgaggtatttttttttctttttctcgcagtatctttttctttttctctattcttttttttttgtttatatttttttcgctcttttttcttcttttttttttctttgctttantttttt

SEQ ID NO: 299123 - DNA, 374 bp, Zea mays
attgagaccaacaagcaacatatattgtggaatccagtagcaacaatagagcagcaatggctaccaagatattttccctccttatgctccttgctctttctgcatgtgttgctaacgcgacaattttccctcaatgctcacaagctcctatagcttcccttcttcccccataccttccatcaatgatagcttcagtatgtgaaaacccagctcttcaaccctataggctccaacaagcaatcgcagcaagcaacatacctttatcacccttgttttaacaatcgccaggcctatcttttgtgcagtcatttttatataccatttatgcacagcatctgcagcaaacttttgctacctgtgatcaaccaagtatc

SEQ ID NO: 299124 - DNA, 373 bp, Zea mays
cagcctcatccccagccacacccatgcccgtgccaacagccgcatccaagcccgtgccagctgcagggaacctgcggcgttggcagcaccccgatcctgggccagtgcgtcgagttcctgaggcatcagtgcagcccgacggcgacgccctactgctcgcctcagtgccagtcgttgcggcagcagtgttgccagcagctcaggcaggtggagccgcagcaccggtaccaggcgatcttcggcttggtccctccagtccatcctgcagcagcagccgcaaagcggccaggtcgcggggctgttggcggcgcagatagcgcagcaactgacggcgatgtgcggcctgcagcagccgactccatgcccctacgct

SEQ ID NO: 299125 - DNA, 232 bp, Zea mays
  unsure (1)..(232): unsure at all n locations
taacaaatgcgttcattatttttttttgctcacttgctcctagagccaagggagcatatttcctcccaccatttacttcaangatcttctaacatccatccgtgcattcctacatgctacaactagctcttgcagctatcgttttacaacaaccaatttcccaattgcaacatcaatccttggcacatcttaacctacaaaccatcttatcgcaacatcatcatcatattct

SEQ ID NO: 299126 - DNA, 355 bp, Zea mays
ggcggacccacgcgtccgaaagacctaccagtacctaatcggttctggaatggatcccggaccggacaacaagggggacctgggcttcgtgtacacaagcttccaggagcgcgcgacggacgtctagcacggcaacaccgcgcggctcgtcagggcgccgaggacagggccaagaaggacgagcccaggacggtcaagttcagctggatctttgatagggaagccgttgtttaggcacttgttgctgactgtgatatgtgctcagatcatgtcgctagctgtcagtgtctttgtcacaatgtgtttatgtgtttgaaatacagtaagagtgtttttttcctgcttaatttaaaaa

SEQ ID NO: 299127 - DNA, 380 bp, Zea mays
ctcacacctgaacaacaagcatcttttaaagcggaacccagccacaacaatggggcgacattggccaccaacatatttcccctccttatgctcctcgctctatctgcatgtgttgctaacgcgacattctactctcaatgctcacaagctcctatagtttcccttcttacccaattccttacatcaatgattgcttcagtctttcaaaacccacctctgcaaccctataggctccaacaagcaatcgcagcaagcacacatacctttatcacccttgtttcaacaaatctccagccctatcttttgtgcagtcattggtacaaaccattaggtcacatcagctgcagcaactcttgctacctgtgatcaaccaagtagct

SEQ ID NO: 299128 - DNA, 383 bp, Zea mays
attcaaaaacacaccaagcttatttttctagcaacaacctaacaacaatggggggcaagatattatccctccttgcgcttcttgcgctttttgcgagcgcaacatatgcgtccattattccacaatgctcacttgctcctagtttcattattccacagttttttcccaccagttactttaatgtccttcgaacacttatctgtgcaagcctataggctacaacttgcgattgctgcgagcgtctttcaacaaccaatttcctaattgcaacaacaattcttggctcatttaataattctaactattgcttcgctacattttaactttctttactatctctgatttacttagccttgtttaactctttctttctactttcttca

SEQ ID NO: 299129 - DNA, 178 bp, Zea mays
cctccccactgcctcgtgtggccgtcgtctcccgttcggaacgccaagcccccgcgtggggcgaaatggcccccaagcgaggtggcagggcgccggtgccggccaagaagaagacggataaagtgacgaaccctctattcgagaagaggccgaagcagttcggcatcggcggctcgtt

SEQ ID NO: 299130 - DNA, 390 bp, Zea mays
aagcaacacaaaaagctgcatccattttcttcagcccagcaacaatggcgcccggggtgattttgcctccttatgctccatgctctttctcgcatgtagggctaacgcgacaatcttccctcaatgctcacaagctcctatagcttcccttcttcccccataccttccatcaatgatagcttcagtatgtgaaaacccagctcttcaaccctataggctccaacaagcaatcattgcaggcagcagtctacaacaacccatggcccaattgcaaccacccttctcggcgcatctaacattgcaacaaaccataacgccacagcatctgcagtaactactgctacctgtgatcctagccatggtgaaccctgtcgcctacttgcaacagca

SEQ ID NO: 299131 - DNA, 368 bp, Zea mays
  unsure (1)..(368): unsure at all n locations
caacaagcaacatataaagtgttatccattagcaacaatagagcaacaatggaggccaatatattttccctccttatgctccttgctctttctacatgtgttgctaacgcgacaattttccctcaatgctcacaagctcctatagcttccctttttcccccataccttccatcaattatagcttcagtttgtgaaaacccagctcttcaaccatataggctttaacaagcaatcttatcaagcaacatacctttatcgcccttgttgtgtcaacaatcgccagtccttatcttnggtgcatttattgttacaaaccatcatggcacaacaactttatcaactcgtgcttcctgttatcaaccaatttt

SEQ ID NO: 299132 - DNA, 186 bp, Zea mays
gcggaccgtgggcggaccgtgggtctgaccgtgggcaaagcggcagtgcgtagagaggatcgcaacaaacagcatgaagatggtcatcgtctcgcggtgcctgctctgtcagctgccacgcctctgcaatcagatgccctgcccctgcgcgggctgcagcttgtacggcctgcgccgcctgacaca

SEQ ID NO: 299133 - DNA, 381 bp, Zea mays
  unsure (1)..(381): unsure at all n locations
gagcattcataaacacaccattcttttctacctaccaacgacttaacaacaatggcttccatgatattagcccttcttgcgcttcttgccctttttgtgagcgcaacaaatgcgttcattattccacaatgctcacttgctcctagtgccattataccacatntcctccgaccagttacttcaatgggcttcgaacacctagctgtgcaagcctacaggctacaacaagcgcttgctgcgagcgtcttacaacaaccaattaaccaattgcaacaacaatccttggcacatttaaccatacaaaccatttcatcacaacatcatcaactttttctaccatcactgaaccaactagatttggtgaaccctgtcttctacttg

SEQ ID NO: 299134 - DNA, 260 bp, Zea mays
aataccaacatgcaacatcaaacgttttttacaacatcaacaacaacctaacaacgagggctactatatttttcttcctcactccccttgctgcgcttacatctatcgcaacaactacatttattattcaacaatgataacctgctataacttccattattacacaataccttccattaattatttcaatagtctgtgaacacccagctctgcaatcatataggctacaacaagcaatcgcatcaagcaacatacaacaa

SEQ ID NO: 299135 - DNA, 291 bp, Zea mays
caactagcaacatagaaagcacaatagtgtaccaacaatggccgccaaaatattgggccttcttatgctcctcgctctttgcgcaagtgctgataccgacacaatctttcatgaatgcatacaggtcactatatctatgttccattattacacacctttcaccaaccagtgtacttcaatgtggcttagaacacccatctaagcaagcctatatgctacaacaagcaatagctgcgtgcgtcttacaacaaccaatttcccagttgcaacaacaatccttagtcacatcta

SEQ ID NO: 299136 - DNA, 379 bp, Zea mays
atctaaacctacaaaccatcgcatctctatcagcaacaacagtttctgccaggacgtagcctcctagcctttgtgaaccctgccgcctacttgcaacagcagctacttgcattcaacccacttgctctggcgaacgtagctgcataccagcaacaacaacgtctgcaacattttatgccagcgctcattcaactagccatggtgaaccttgtcgcctacctactacatcaacaattgcttttatctaacccgttcgctttgggcaatgcacttacttacctacaacaacagtttgctgcatcatattcgttccatctcttacttaactagcttttgcaaaccctactgcctactttcaacatatgctttctttcaacca

SEQ ID NO: 299137 - DNA, 377 bp, Zea mays
gttgctcgaatggaaaaaatttttttcacttaaccctgatccttatttgggcgaacagctactactaccattcagccagctagcttctgtctactgtcagtagctacaagctcttccatttaaccaactagccgcacttaacccttctacttatctccagcagtaaatactactaccattttgccagttagctacaacatgcacctcttacttcttgacacaacaacaattgcttccgttctaccagctgtttgtggctaaccccgtaaccctattacaactgcaacagttgttgtcctttgtccaacttgctttgacatacccagctgccttgtactaacaacacattattaggcagagccatcttttagattgct

SEQ ID NO: 299138 - DNA, 332 bp, Zea mays
  unsure (1)..(332): unsure at all n locations
aagacggattcttgcacgatccatctgtataattgctccgtacggccttgttcgtttccgtcggattgcaaccgcccaccattggtggtgccatcttctagattttttatgatttatactgtaataataaagttctcatgctgatatgtgcgacctctcagtaataaagtattagagatctatattttaaaaaaaaaaaaaaaaaaaaaaaaaaaaaacccaaaaaaaaaaaaaaggacaaacaattttaaggatccaaaaataatttaannnttnnntncnacgttatagcttttcttatttggtcacctaaattaaattttatatggcct

SEQ ID NO: 299139 - DNA, 346 bp, Zea mays
attgataccaacaagcaacatattttgtttaatccagtagcaacaatagagcagcagtgtcgaccaatatattttccctccttatgctccttgctctttctgcatgtgttgctaacgcgacaattttccctcaatgctcacaagctcctatagcttcccttcttccccataccttccatcaatgatagcttcagtatgtgaaaacccagctcttcaaccctatatgctccaacaagcaatcgcagcaagcaacatacctttattacccttgttttaacaatctgcaaccctatctttggtgcattcattggtacaataccataaggcacatcaactgcaacaactt

SEQ ID NO: 299140 - DNA, 366 bp, Zea mays
gcaattagctcatcgactccagattgtagaactcgacaccatgaaggtgcgtgggcgttgcccttgctctcctggcgctcgctgctagcgccgcctccagtacaagcggcggctgtggctgccagacaccaccgtttcatctaccgcctccgttctatatgccgcctccgttctatctgccgccgcagcagcagccgcagccatggcaataccccactcaaccaccgtagctaagcccgtgccagcagttcggatcctgcggcgtcagcagcgtcggcagcccgttcctgggccagtgcgtcgagttcctgaggcaccagtgcagcccggcggcgacgccctacggctcgtcacagtgccaggcgc

SEQ ID NO: 299141 - DNA, 277 bp, Zea mays
ggcgacccacgcgtcctttttaatacattatctacaattttttatcaatggctgccaagatatatgcgaagcgtattctccttgctctttctacattttttgctaactcaaccatttttcctcatttctcacaaactcctatatctgtccttctttccccatacctttcatcaatgtaccgttcattatgataaaacccatccctttaaccctacattgctccaacaagcaatctcaacaagcatcttacctttatcacctcttgtttttcaacaat

SEQ ID NO: 299142 - DNA, 376 bp, Zea mays
ttcgtctcaatgcaacttacatcattctttttttttatgaatagaagcaaactggcggggggggtgagctcttttatattcttccccctaagctaattatggacccatatgctaataatcctgaggactgttatgacaaggaatacattcctgaccctgatgacaagaagccagagggctatgattatattcccaaggaaattcctgaccctgatgctaataagtctgatgacttgatatgacttggaatatggtgaatggactgcccctaccattcccaacccataattcaaaggaccatgtatacaaaataaaattattaaccctaactaccattgtaaatggaaagcacctatgattgacaacccatatttta

SEQ ID NO: 299143 - DNA, 286 bp, Zea mays
gaaagcacattagtgtaccaacaatggcagccaaaatattttgcctccttatgctccttggtctttctgcaagtgctgctacggcgaccattttcccgaaatgctcgcaagctcctatagcttcccttttcccccgacctctaccagcgggtttcgttgtgaacccattttacctacagccacagcatcagtgcattacttatacctgtctcacatatagctatcatagtccttgggcttatgccaaacatagccacactcacacttggcacaaacctgtgctact

SEQ ID NO: 299144 - DNA, 373 bp, Zea mays
cgttccgcatctagcaacatataatgcacatttttttttccaacaatggcagccaaaatatggtaggctcttatgcttccttgtatatcctacaagtctgctacggcatccatttttccgcattgctcacaagctcctatagcttcccttcttcctccgtacctctcaccagcgttgtctttctgttgtgaaatcccaattcttcaaccctactggatccaacatgcaatcgcatctggctatctacctttataaccctttgtcctccaacaaatattttccctatatcagctattgttcctttggtgcatttatttgcactaatacattttgtctctacaactatcacaacttgtgctatctaaccttttct

SEQ ID NO: 299145 - DNA, 300 bp, Zea mays
  unsure (1)..(300): unsure at all n locations
ggaanncccgggcgagcacgcgtccgtggtcgcgtgggcttactcttttttttctcgttgtcccactcctggggggaggcgtagtctttcgcgtattgtacctcgtgttcgttataccacccacttgttctggagagggtttggtgaaagaccgaggataagatctacgtgcctgtctctttaacttactacaggtacatccagctgcggttcagtctgctattgcctggcatgacttgaagcttcaaggattctgaacctcaacaactaccaatactttttcggaccatactgagagga

SEQ ID NO: 299146 - DNA, 404 bp, Zea mays
cgggtcgacccaagcgatccgtacgagcctcgttcctacaacaatcttctattcctattacataagtcacctttggggcgggtattgtcacaaaacatcagggcacaacaactacaacaacttgtgctagcaaaccttgctgcctactctcagcaacagcagtttcttccattcaaccaactagctgcattgaactctgcttcttatttgcaacaacaacaactaccattcagccagctacctgctgcctacccccagcaatttcttccatacaaccaactggcagcattgaactctcctgcttatttacagcagcaacaactactaccattcagccagctagctggtgtgagccctgctaccttcttgatacaaccacagttgttgccgttctaccagcacgc

SEQ ID NO: 299147 - DNA, 303 bp, Zea mays
ttctcaccaatgcagaaactttttttgtaaaacccactacctcaaccctgggagctctaatctccaatttcatcacccatcttacctttatcacccttgttcctacaacaaccgttacccctattacagcacataccttagttgcatttatttgcacaaaacatcaattcacaacaacaacaacatctattgctaggaaacaccgctgcctactctcagcaacagcactttctgccattcaaccaactgtctgtattcaactcattttcttatttgtaacaccagcttccattcatttaacta

SEQ ID NO: 299148 - DNA, 370 bp, Zea mays
ctggtgtcatcaagcctggtatggtagtcacctttggtccaactggcctgactactggggggaagtctggtgggatgcaccatggggggcttcaagggggcttttccggcgacaatgttggcttcaaacgggaaaacggtgctgtcaaggatctaaggcggggttcgggggctccaactccaaagatgaccctgccaaggaggctgccagctttaccttccaggtcatcatcatgaaccaccctgggcagattggcaacggctatgccccagtgctggactgccacaccttccacaatgccgtcaagtttgctgagctcattaccaagatcgacaggcgatctggcaaggagctcgagaaggagcccaag

SEQ ID NO: 299149 - DNA, 228 bp, Zea mays
cgttcgttttacttaactttcccggtttttttctcatccccagccacacccatgcagggggcatctttctcattcaatcccttgccaacttaatgtaaccttcaatttaggcagtacccttatacaaatccagggcgttttgtttctgaggcatcagtgcatcccgactgcgacgccctactgctcgcctcagtgccagtctttgcggcagcagtattgtcagcatct

SEQ ID NO: 299150 - DNA, 359 bp, Zea mays
cgttttcagcattcagaaacacaccaagcgaagcgcactagcaacaacctaacaacatgggctaccaagatataagccctgcttgcgcttctagcccttttagtgagcgcaacacatccgtacattattccacagcgctaactcgctcatagtgccattattccacaggtgctaccaccagttacttaaatgggattagaacatacagacgtgcaagcctacaggctacaactagagcttgcggcgagcgtcttacaacaaccaatttgccaaatgcaacaacaatgcttggcacatctaaacctacaaaccatcagaacgcaacagcaacaacagttggtgacatcactgagccacct

SEQ ID NO: 299151 - DNA, 364 bp, Zea mays
  unsure (1)..(364): unsure at all n locations
cccacgcgtgcgcccacgcgtgcgtccacgcgtacgcccacgcgtncgcaaacaagtagcgacagctcgacaaagatttgtgagagtgatccggcgctgagaagagatggctaagatcgccgcagccgccgcggcggcggcggcgctgtgcttcgcggccctggtggccgtggccgtctgccaaggcgaggtcgagcggcagaggctcaaggacctgcagtgctggcaggaggtccaggagagcccgctcgacgcgtgccgccaggtcctcgaccggcagctaaccggcggcggcgtcggcggcccgttccggtggggcaccgggctccggatgcggtgctgccagcagctccaggacgtgagc

SEQ ID NO: 299152 - DNA, 371 bp, Zea mays
  unsure (1)..(371): unsure at all n locations
ctcatttcctctcggttctgctcggtggcaacccagcgcgtagatcttgttcttggacgagaattctnctcaagttctcggatttctgtttttgtgccgcttagcaattcaaccccgaaattgttttgcggcgcagtcttcacccgaatcttgggtcgtagccaagaagatgaacaaggataaggctccgatgccgggagacggcgaccccagcgacggcttgccgccgcagtccacgcgccgtgccggggcgccgccctcgtcgtctaccccgccgcgggagtacgacatcagccgcatgccggactttcctacccggagcaccggccaccggcgtgcgcactccgagatcctgggcctncccgacgacc

SEQ ID NO: 299153 - DNA, 338 bp, Zea mays
cgccagccctatctttggtggggacgttggttcaaactatccatccacaacatctgcagcaacttgtgctacctgtgatcaaccaagtagctctggcaaacctttctccctactctccgcaacaacaatttcttccattcaaccaactgtctacactgaaccctgctgcttatttgcagcaacaactattaccatttatccagctagcttctgtctactttcaacaacaacaacttctttcatttaaccaattggccgcacttgaacccttctacttatttgcaacagcaaatactactaccatttattcagctagcttcatcaagctcgacttttct

SEQ ID NO: 299154 - DNA, 351 bp, Zea mays
atttttctagcattgagaaacacattaagttaatcgcactagcaacaacctagcagcggtggctactaagatattatccctccttgcgcttcttgcgctttttgcgagcgcaacaaatgcgttcattattccacaatgctcacttgctcctagttccattattccacagattcttccaccagttacttgaatggccttcgaacacccagctgtgcaagcctataggctacaacaagcgattgctgcgagcgtcttacaacaaccaattgtccaattgcaacaacaatgcgtggcacatgtaacaatacataccatcgcaacgcatcagcaacaacagtttctaccagcact

SEQ ID NO: 299155 - DNA, 177 bp, Zea mays
cccacgccttccgtgcacctttttttttacgccttactgctagccttaggggcggtctttttggcagcagttttgccagcagcttacgcaggtccagccccagcacctcttctagtcgatcttccactcgatcctgcagtacatcctgcaaaagcagccgcaaagcgggcaggtcgc

SEQ ID NO: 299156 - DNA, 292 bp, Zea mays
  unsure (1)..(292): unsure at all n locations
attatttagaccaactagctttttttaaagcacaatagngtaccaacactgccggttaaaatattttgcctccttatgctccttggtatttctgcaagtgctgctacggcgaccattttccctcaatgctcacaagctcctatagcttcccttctttccccgtacctcttaccagctgtgttttctttatgttaaaacccaattctttaaccctacatgatctaactgtcatatcgtaattggcatattacctttatcacccttgttccttcaacaatcattatccctatta

SEQ ID NO: 299157 - DNA, 263 bp, Zea mays
gctcatcgactccagattgtttattttgacaccatgaaggtgctgaacctcgcccttgctctcctggcgctcgctgcgagcgccgcctccagtacaagcggtggctgtggctgccagacaccaccgtttcatctaccgcctccgttctatatgccgcctccggtctatctgccgccgcatcagcatccgcatccatggcaataccccactcaaccacctcagctaagcccgtgccagcatttccgatcctgcgtttattgcat

SEQ ID NO: 299158 - DNA, 253 bp, Zea mays
gactttagcctagcaattagcttagctactccagattggagaactcgacgccgtgaatgttctgatcgttgcccttgctctcctggcgctcgctgcgagcgccgtcttcagtacaagcggcggctgtggctgtcagacaccaccgtttcatctaccgccttcgttctatatgccgtcttctttctatctgccgccgcatcatcatccgtagcctatttatttccccactcaaccaccgtatttaatccctttt

SEQ ID NO: 299159 - DNA, 258 bp, Zea mays
cgcaaattgcaccaagaaatttattgagaggccgtcgacaggggaattggtcgcgtcgtcgtctagcagcagccaccgccgcctcatcctcgcagccgccgtcctgctctccgtgctcgcggctgccagcgccagcgccgggacctcctgcgtgccggggtgcaccattcctcacaacccgttcccgagctggctgttggtccccgaccagtctaaccttataggctacaactcgcatttcctgttcgtggcttacat

SEQ ID NO: 299160 - DNA, 299 bp, Zea mays
ctattctctaggaagcaaggtttttcttatcgacatggcagccaagaggtgtggagtgtttgcgctcctagctcttccttcaaccgccactagtgctacccatattccagggcacttgacaccactactgatgccattggctaccatgaacccatggattgcagtattgtatgaagcaacagggggttgccaacttgctagcgtggccgtccctgatgctgcatcaactgttggccttaccgctttagccgtgccagatgccaatgatgatgccaggtatgatgccaccgattacaatt

SEQ ID NO: 299161 - DNA, 326 bp, Zea mays
cccagcagcattctaccaacaacccatcattggtggtgccctcttttagatgtgttattgaactataactcataagaaatgtcagagggggccccccctgcgatgcagaggcggtggcccgccgcggggcggccgcgcgggtacggcgggggcgcccggcccgcgaccagcaggcgcgccggcgggctgtaccgcgaggcggagtacctgaggcagccgcagtgcaacccgctggcggcggcgccctactacgccgggtgtgggcagacgagcgccatgtaccagccgctccggcaacagtgctgccagcagcagatgaggatgat

SEQ ID NO: 299162 - DNA, 362 bp, Zea mays
gaaagcacaatatttgtaccaatattgttcttccaaaatattttgcctcattatgctgcgttggtctttctgcaagtgctgctacggcgagcattttcccgcaatgctcacaagctcctatagcttcccttcttcccccatacctctcaccagcgatgtcttcagtatgtgaaaatccaattcttctaccctacaggatccaacaggcaatcgcagcaggcatcttacctttatcacccttgttcctccaacaatcatcagccctattacagcagttacctttggtgcatttattggcacaaaacatcagggcacaacaactacaacaaacttgtgctagcaaatcctgctgtctactctta

SEQ ID NO: 299163 - DNA, 375 bp, Zea mays
acccccggggcgacgccacgcgttctgccattattctacagatctcttctttagttactacaatgggctaagagcggcgggtcttgcaagcctacaggctacaactagcgctagcggcgagcgtcttacaacaaccaattgcccaattgcaacaactatccttggcacatctaaacctacaaaccatcttaacgcaacagcaacaacagtttctgccatcactgagccacctagccgtggtgaaccctgtcgcctacttgcaacatcagctacttgcatccaacccacttgctctggcgaacgtagctgtataccagcaacaacaacgtctgcaacatgttatgcctgcgctcattcaactagccatggtgaacc

SEQ ID NO: 299164 - DNA, 218 bp, Zea mays
  unsure (1)..(218): unsure at all n locations
acccacgcgtacgttatactatactctaagatgttagtataccaccaacatggcagccaagtgccgtgcttttttcactctcctagctctttcnacaaacaccactattgctacccatattccattgcactagccaccattcatgccattgtgtaccatgaacccatgcattcactactccatgattcaacatgcgcttgccaacttgatggcttttc

SEQ ID NO: 299165 - DNA, 366 bp, Zea mays
  unsure (1)..(366): unsure at all n locations
cccacgcgtncggtngagaccaactatcaacatatttttttttttattgtaccaacaaatgcagccgactgtttttttcctacttatgctccttggtctatctgcaagtgctgctacggcgaccattttcccgcaatgctcgcaagctcctataacttcccttcttcccccgtacctctcaccagctgtgtctactgtatgtgaaaacccaattctttaaccctacatgatccaacaagcaatcgcagctggcatattacctttatcacccttgttccttcaacaatcatcaaccctattacaacatttacctttggttcatttatttgcacaaaacaataatgtacaacaacatcaacaactttt

SEQ ID NO: 299166 - DNA, 362 bp, Zea mays
  unsure (1)..(362): unsure at all n locations
cggacgcgtgggtgagctcaggcgtactagctcattgcttctgtgtacctctgtatcccccgcagatctcgcgagggctatggtggcggtggacccggaccatccgaccgggaccgaggggcgcgacccccgcggcatgagcgtgcttcagcagcacgtggctttcttcgaccgcgacggcgacggcgtcgtctacccctgggagactttcaaaggcatgcgagcaatagggtgtgggttctttacatccctcgtcctctcgttcctcatcaacctcgtcatgagttatcccactcagccgggatggctaccctcccttttgctctccgntcatgtaaagaacattcataaggctaaacacg

SEQ ID NO: 299167 - DNA, 361 bp, Zea mays
gacccacgcgtacgaataaagtaccaacaatatttttttttatattaagcctacttatactcgccgggttttttcaagtgctgctacccctaccattttctcacaatgctcacaagcttctatatctttccttttttctccttacctttcaccatcattttcttttatatcttaaaacccaattctttaaccctatattatccaacattcaatctcatctttcattttacctttatcaccctttttcctccaacaatcattacccctattacagcaattacctttttttcatttattttcacaaaacattattttcacaacaactacaacaacttgtgctagcaaaccttgtttactactc

SEQ ID NO: 299168 - DNA, 354 bp, Zea mays
  unsure (1)..(354): unsure at all n locations
nggactcgttggttagctcatgctttcttttttactgctaccagtgtacctctggtgtgcttcgtacaacccagcgagggctatggtggcggtcgacccggaccatccgaccgcgacctatgacaaccacctgcgcggcatgagcgtgcttcagcagcacgtggctttcttcgaccgcgacggcgacggcgtcgtctacccttgggagactttcaaaggcatgcgagcaataggacgcgggttctttacatcaatagcactttcttgcattaaaacaacttgctttagtaaacctagttagaaaccatggacaacatcaactgngctcttcgttcatgtaaagaacattcataa

SEQ ID NO: 299169 - DNA, 173 bp, Zea mays
cgacaatgtaaaggcaaaaattcttttaaggagggcatacaccctgacgggcggcgtcttatctactccggcaaacacctggatgattgcctcaccttatcacactacaacatccaaaacgagagcaccctacaccttgtgcttcttctccatggacgacactaaatcatgcg

SEQ ID NO: 299170 - DNA, 392 bp, Zea mays
  unsure (1)..(392): unsure at all n locations
cagncccttcaagccctacagtgctccaacaagcaantcgcaacaaggcaacttagccgttatcacgccctgttgctttcaacaantcgccagcgcctatnnctttggtgcagtcatntggtacanaaccatcagggcacaaccagctgcagcaacctcgtgctaccagtgatcagccaagtagctctggcaaacctttctccctactctcagcaacaacaatttcttccattcaaccaactgtctacactgaaccctgctgcttatttgcagcaacaacaactactaccattcagccagctagctactgcctactctcagcagcaacaatttcttccatttaaccaattcgccgcactgaacccctctgcttatttccagcagcaaatact

SEQ ID NO: 299171 - DNA, 341 bp, Zea mays
gcctaagctagcaggcgctagatacattctatacaacaacccacagatctgcgccagtccggccacaggagataccgcatctgcctctctggtctggacacaggagcgtccgtgacctagtacaatggcgaggtgagatctacgatgcgtactattccatgtatgggcatgtggggaaactagctgacgagatcaagaaaggagccttatctggtgctggagcagagggtcagatatggcaagggcctgaaattttatgtgtacacgtgcttggtaagatgggcgcgccccctaagccctgcgtgccagacataacacaccatgaacttgcggaggctgac

SEQ ID NO: 299172 - DNA, 375 bp, Zea mays
cccactcgtacggaaagttttattttttatcaacaatagatcaacagtggcgggcaagatattttccatccttatgctccttgctctttctgcatgtgttgctaacgcgaccattttttctcaatactcacaagctcctatagctgcccttctttccccatacctaccatcaatgaccgctttagtatgtgaaaacccagccctttcaaccctacaggctccaacaagcaattgcaacatgcaacttacctttatcacccctgatctttcaacaatcgccagccctatctttggtgcagtcattggtacaaaccatcattgcacaacagcttcagctactcgtgcttccagtgatcagcccagttgcttcttgca

SEQ ID NO: 299173 - DNA, 376 bp, Zea mays
caacaagcaacatagaaagtggaatccagtagcaacaatagagcaacaatggggcccaggaattttcccttcttatgcttcttggtctttctacatgtggtggtaacgcgacaattttccctcaatgctcacaagctcctataggttccttttttccccatacctttcataaattagagctagagtgtgagaaaacccatctttaaaactatatgggtttaaacacgcattcgcagcgggcaacatacctttatcgcccttgttgtgtcaacaatcgccagccctatctttggtgcagtcattggtacaaaccatcagggcacaacagctgcagcaactcgggctacctgtgatcaaccaaagtgctctggcaaac

SEQ ID NO: 299174 - DNA, 267 bp, Zea mays
tcgcaaaaacgagggctcgatttcgtttctgggtgccgctgatgctcatgggccgggtcgccagcatacccgtgtgccaactctcggtgcataccgaccgtgacggcacgtaccactacaacctcggtaaggcgctggctcccttgcgggtggaaggcatcctcatttcttggttccggtagagccacacacaacctgcgcaagattagaccgtgcaactgcgcccgtgccgcatagggttttcaagtttgacacctggattaagga

SEQ ID NO: 299175 - DNA, 163 bp, Zea mays
tcctaacaacaatcggctacgcggattttatccctcctcgctctcattgcgctatttgcgagcgcaacaaatgcgttcattttcccacactgctcactcgcttcaagttccattatttcacagttcctcccactcagttactttaatgggtttcgaacaccca

SEQ ID NO: 299176 - DNA, 292 bp, Zea mays
gcgggacgctgtgatcgccgtgccgtcctactttgggcaggccgagcgccgggcgttgacgcaggccgcgcagctggctggaatcagcgtgcttgctctcatcaacgagcacgctggggccgcgcttcagtacgggattgacaaggacttctccaatgcgtcgcggcatgtcatcttttacgacatgggcgctggtagcacctatgccgcattagtgtactactcggcatacaacgccaaggagttcggaaagacaggcttcgttaaccagttccaggttgtcgctcaacaa

SEQ ID NO: 299177 - DNA, 376 bp, Zea mays
  unsure (1)..(376): unsure at all n locations
cttcgggctttttaaaaaccacaccactttttgcgcacnaccaacatcttaacaacgagggggttccaaaatattatccctccttgcgctttttgcgctttttgcgagcgcaacaaatgcgtccattattccacaatgctcactagctcctagttccattattccaaagttcctcccaccagttactttaatggcctttgaacacccagctgtgcaagcctataggctacaacaagcgattgctgcgagcgttttacaacaaccaattgcccaattgcaacaacaatccttggcacatctaacaatacaaaccatcgcaacgcaacagcaacaacagtttctaccagcactgagccacctagccatggtgaaccct

SEQ ID NO: 299178 - DNA, 184 bp, Zea mays
gagaccaatagctttatctacttcttagcgcaaaagaacccgatcgacatcatgagggtgatgctcgttgtcttttctgtacgggcgtctgctgcaagcagtaccgacaatgtacaaaggtgtattggttatttttccgcatacattatcagggtgcttcagaatggaaactcaattttaattc

SEQ ID NO: 299179 - DNA, 368 bp, Zea mays
acctgccaccgccggtccatgtgccgccgccggttcatctgccgccgccaccatgccactaccctactcaaccgccccggcctcagcctcatccccagccacacccatgcccgtgccaacagccgcatccaagcccgtgccagctgcagggaacctgcggcgttggcagcaccccgatcctgggccagtgcgtcgagtttctgaggcatcagtgcagcccgacggcgacgccctactgctcgcctcagtgccagtcgttgcggcagcagtgttgccagcagctcaggcaggtggagccgcagcaccggtaccaggcgatctttggcttggtccttcagtccattctgcaatagcagtcgtaaagcggt

SEQ ID NO: 299180 - DNA, 369 bp, Zea mays
cccacgcgttcgggcatttgtatttttcatctaacctttatcaccgggggtcctccaacatttatcagccctattacagcagttacctttggtgcatttattggcacaaaacatcagggcacaacaactacaacaacttgtgctagcaaaccttgctgcctacttttagcaacagcagtttcttccattcaaccaactagctgtattgaacttttgcttcttatttgcaacaacaacaactaccatacagtcagctatttgttgtctaccctcagcaattttttttatttaatcaactgacagcatttgacttttctgttttttttcagtaggtaacatttcttttcattagtcagctagctggtgtga

SEQ ID NO: 299181 - DNA, 242 bp, Zea mays
ctcggcacgcaggctagctgcacagcagcagccagagccatcccctctcctcgctacgcttcgcttcctcggcgccgattcctcctcctcctcctccaccctcgtccgtccccttccggcgcacgagctcgcccgagatggcgaacgcgagatcgggtgtcgctgtgaacgatgagtgcatgctgtagtttggcgagctgcatgtcgagaggcttgaccgcttcataactttcaaggtggac

SEQ ID NO: 299182 - DNA, 343 bp, Zea mays
caacccgtccgaagaaacaaacaacgcaaaaggcgttgtcaattacctaccacctaacgccaccgggtactaagatattatcgcgccttgcgctctttgccctagcggagcgcacaacaaaagcgttcattattgcacactgcttacttgctcctagtgccaatatttcacagcacctttcaccagttacttcaatggactccgaacacctagctgtgcaagccaacatgcaacaacaagcgcttgcggcgagcgtcttacaacaaccaattgtccaattgcaacaacaatccttgtcacatttaacaatacaagccatcacaacgtaacagcaacaacagtt

SEQ ID NO: 299183 - DNA, 241 bp, Zea mays
  unsure (1)..(241): unsure at all n locations
agcagcagangaggagganggacgggcgggccgncgcgcagcagcagcagaagaagacgcagccggagcgagccgccgccgccagcagcagaccagacgagccagcacagaagcagcagcagcagcagcggcgggcagcccagggacgcaaccccaaggccaggaggagggcgcagaacaagccggccaagggaggacgcaaccagaaccaggaccaggggcccagcgaccgcaccaaccc

SEQ ID NO: 299184 - DNA, 154 bp, Zea mays
gacagactagcaacaaactaagcgcctccagattgcagaactggacaccatgaaagtgcggatcataggcctcgctctcctggcgctcgctgtgagcgccgcctccagtacaagcgagtgctcgcaggtgtcagacaccacccgttcatctacc

SEQ ID NO: 299185 - DNA, 320 bp, Zea mays
agaaagtggtatacagctgcaacattatatcatcaatggcggccaagatatgttccatgcttatgctccttgctctttctgcatgtagcgctaacgcgaccatttttcctcaatactcacaagctcctatagctgcccttcttcccccatacctttcatcaatgaccgcttcagtatgtgaaaacccagcccttcaaccctacaggctccaacaagcaattcgcacaagcaacttacctttattacccctgttttttcaaccaatggcagccctatctttggtgcattcattggtaccaaccattagggcacaacaggtg

SEQ ID NO: 299186 - DNA, 310 bp, Zea mays
atagaaagtggaatccagtagcaacaatttagcaacaatggcgaccaagatattgggcctccttatgctccttgctctttctgcatgtgttgctaacgcgacaattttcccttaatgctcacaagctcctatagctttccttcttgccccataccttccatcaatgatagcttctgtatgtgaaaacccagcttctcaaccctataggcttcaaccaggaatcgcgagaagcaacaaacctttattacccttgttttaacaatctccagcccctttcttttggtccaattatttggttcaaaaccaatta

SEQ ID NO: 299187 - DNA, 229 bp, Zea mays
attgatacacactcccatcatattttgctaacaacaacctaacaacaatgggtaccaagatattattccttcttgcgcttcttgcgctttttgcgagcagcaacaaacgcggctattattacacacagttcactagcttctaatcaatttatatcaagatcaccgctccagatacttcaatggcctttgaacacctccttcgtggagccgatgcgcttcaacaagcgat

SEQ ID NO: 299188 - DNA, 287 bp, Zea mays
gcaacatagaaagtggaatacagtagcaacaatagagcaacaatggcggccaagatattttccatccttatgctccttgctctttctgcatgtgttgctaacgcgaccatttttcctcaatactcacaagctcctatagctgcccttctttccccataccttccatcaatgaccggttcagtatgtgaaaacccaacccttcaaccctaccggctccaacaaggcaatcgcacaaggcacttacctttattacccctggtctttcaacaatcgccaggcctatcttt

SEQ ID NO: 299189 - DNA, 309 bp, Zea mays
agaaggcccattatggtcccaccattggcggccaaaatttttggcctcctaaggctcctgggcctttttgcaggggctgttccggcgcccattttcccgaatggttggcaggctccattggcttccttttttccccggaccctttaaccagcggggttttgggtttgggaaaccccaatttttaaaccttccaggtcccaccaggcaatcccagttggcatttaacctttatcacccttgttcctccaacattaatcagccctattacaccagttaccttgggggctttaattggcccaaaacattagg

SEQ ID NO: 299190 - DNA, 256 bp, Zea mays
gtccggcgctcgctgctagcgcctcctcttgttctatttgcggctgaggctgccagacaccaggggttttatttaccgcctccgtactatatgccgcctccgttctatctgccgccgtagttagcagcctcagttcatggcaataccccacttaaccacccgtagtatacctttgccatctagttcgtatccttcggcttttgcagcttctagtagactgttcctggttcagtgctgtccagtctcttgtggtacc

SEQ ID NO: 299191 - DNA, 318 bp, Zea mays
acccacgcgtccgcggacgcgtggaattaagagcatttagatttacaccaagcgaagcgcactagcaacgggctaacatcaatggctaccaagattttatccctccttgcgctacttgccctttttgtgagcgcaacaaatgctttcatttttccacaatgctcacttgctcctagtgccattattccacagtttctcctaccatgtacttcaatgggcttcgaacacttatctgtgcaagccaacatgcaacaacaagtgcattgcctgatgagcgtttttacaacaaaccaatttgctccatattgctatcaaaca

SEQ ID NO: 299192 - DNA, 378 bp, Zea mays
gcgagcggccgccctttttttttttttttggaacaatacttttttcttttcatttcaattgttcattcaggtcattgctcacactgacactgccacccatggtgatgcgtgacacattatttctctactattgtcgttaaattgactcatctagctagttagccagcggttttactacatcacatagtttctttagttgttgtctcctttatcttttagtttttttttgttgtcattttatttttttctatttaatctttattttattttttattttttccttttttttttatttcttctttttttttttttttttttattatatttcttttttttttttatttactttttattctttaattatttttttttttttta

SEQ ID NO: 299193 - DNA, 393 bp, Zea mays
tcgatttttagcatttagaaatttattttgcgaagcgcactagcaacaaccgaacgagcaatggctaccaagatattagccctccttgcgctacttgcccttttagtgagcgcaacaaatgcgttcattattccacagtgctcacttgctcctagtgccattatttcacagattcttccaccagttacttcaatgggcttcgaacatccagacgtgcaagcctacaggctacaactagcgcttgctgagagcgtcttacaacaaccaattgctcaatagctacatcaatttcttggcacatttaaacctacaaaccattgtaacgcaacagcaacatcagcttctgtcatcactgatccacctagctttggtgaactctgtcgactacttgaa

SEQ ID NO: 299194 - DNA, 362 bp, Zea mays
acaattcttaaaccctacaggttccaacatgcaatcgcagcaggcatcttacctttatgacccttgttccttcaacaaccgtcaggcgtattacagaagttacctttggtgcatacgatggtacatagcatcaagggacaacatctacaacaacttgtgctaggaaaccttgctggctactgtaagcaacagtagtttattccattcaaccaactgggtgcattgaactctggtgcttatttgcaacaacaactaccatgtaagtagatagctgctgcctaccaccagccatttcttccattcaacccactggcagcattgcactctgctgcttatttacaacagcatcagctaccaccatt

SEQ ID NO: 299195 - DNA, 252 bp, Zea mays
accacgcgtcctatattgagcattcagaattatttttgcgaagcgcactagcaacaacctgaggcaatggctaccaagatatcatcctttcttgcgctttttgcgctatatgcgagcgcatcaaatgcttccattattccacattgctcacttgctcctagttccatttattccacagttcctcccaccatgttctttaatggctcttgaacacccagttgttcatgcctatatgctacaacaatgcgattg

SEQ ID NO: 299196 - DNA, 383 bp, Zea mays
  unsure (1)..(383): unsure at all n locations
nncggcggcagtgtcgtatagaggaatcgtttaacttaacagcangaagaaggtcatggggctggttttgtgcctggctctcgtagttgccagcgcctttgcaatgcagatgccctgcccctgcgcggggctgcagggcttgtacggcgctggcgccggcctgacgactatgatgggcgccggcgggctgtacccctacgcggagtacctgaggcagccgtagtgcagcccgctggcggcggcgccctactacgccgggtgtgggcagacgagcgccattgtaccagccgcttccggcaacagtgctgccagcagtagatgaggatgatggacgtgcagtccgtcgcgcattagctgcagatgatgatgctacttgagcgtgc

SEQ ID NO: 299197 - DNA, 334 bp, Zea mays
aacatggaaggtggattgaggaaccaccattggagaaccaagggggacaaagatattttccttccttatgctcctggctctttctacatgggtggctaacgcgaaaattttccctaaatgctcacaaagcgtcctataggcttccttttttccccaaaccttcataaatatagcttcaggatgtgaaaaacccagctctttaaaccatataggcttcaacaagcaatcgcagcaagcaacatacctttatcgcccttgttgtgtcaacaatcgccagccctatctttggtgcagtcattggtacaaaccatcagggcacaacagctgcagcaac

SEQ ID NO: 299198 - DNA, 381 bp, Zea mays
tttcccggtcgaccgaccatgcgttcgcaactagcaacgtacaaagcacaattttgtaccaacaatggcagccaaaagattttgcctccttatgctccttggtctttctgcaagtgctgctacggcgaccattttcccgcaatgctcgcaagctcctatagcttcccttcttcccccgtacctctcaccagcggtgtcttcggtatgtgaaaacccaattcttcaaccctacaggatccaacaggcaatcgcagctggcatcttacctttatcacccttgttcctactacaatcatgagccctattacatcagttacctttggtgcatttattggcacaaaacatcagggcacaacatctactacatcttgtgctagcaaa

SEQ ID NO: 299199 - DNA, 439 bp, Zea mays
gaagactccatgcaagcagatcttactcaccaacgcaaattgcaccaagaagtccatcgagaggccgtcgacaggtgaatcaatggcgtcgtcgtttagcagcatccaccgtcctcttatacttcgcagtccccccgttctgtctcttcctgtcttggcagttttgcctatttctctttttctcgttttcccttttctgtattttccccatttgtttttactctattttcttgtcatattctctcgtttcctttttttgttctttcccctctttttttatcctttttacttctgcttcttgcttccttctttgtttttattttcttttctcgtttcatcatcctttttttttttaagattttcttgtcttttcttttttttatttcttctttttcttttcttttcccctctcctttacttatttcttctttgtttttct

SEQ ID NO: 299200 - DNA, 280 bp, Zea mays
  unsure (1)..(280): unsure at all n locations
tcgcggacgcgtgggcaacaagcatcanttaaagtggaatacagtagcaacaatggggcaacattggcggtcaagatattttccatccttatgctccttgctctttctgcatgtgttgctaacgcgaccatttttcctcaatactcacaagcttctatagctgtccttttttccccatacctttcatcaatgaccgcttcagtatgtgaaatcccatccctttaacccctcaggcttcaacaagcaatcgcaacatgtaacttacctttatcaccccttt

SEQ ID NO: 299201 - DNA, 380 bp, Zea mays
tcccggtcggaccaacccgtccgccaacccgtccgttggacgtaagcctatcatttagctcatcgactccagattggggaactcgacaccatgaaggtgctgatcgttgcccttgctctcctggcgctcgctgcgagcgccgcctccagtacaagcggcggctgtggctgccagacaccaccgtttcatctaccgtctccgttctatatgccgcctccgttctatctgccgccgcagcagcagccgcagccatggcaataccccactcaaccaccgcagctaagcccgtgccagcagttcggatcctgcggcgtcggcagcgtcggcagcccgttcctgggccagtgcgtcgagttcctgaggcaccagtgcagcccggc

SEQ ID NO: 299202 - DNA, 308 bp, Zea mays
  unsure (1)..(308): unsure at all n locations
gattgagaccaacaagcaacatagattgttttatccagtagcaacaatagatcaacagagggagaccaagatattttccctccttatgctccttgctctttctacatgtgttgctaacgcgacaatttttcctcaatgctnanaagcttctatagcttcccttttttccccatacctttcatcaattatagcttcagtatgtgaaaacccagcttttcaaccatataggctttatcatgcatttcgaacatgctacatacctttatcgtccttgttgtgttaactgtttgcattcctttcttttttta

SEQ ID NO: 299203 - DNA, 264 bp, Zea mays
ctttcatctagcccgctcgctgtgttcaatgcacctacgtacctacaacagcgggggctgtaacagattgtaccagctctgactcatctagctgtggcataccctactgcctacttgcaacagttgctttcatttaaccaactggctgtgtcgaactctgctttgtacctacaacatcgacaacagttacttaatccactagcattggcttacccattgggcgctaactttcttgtatatcaacatattgctgccatacaacca

SEQ ID NO: 299204 - DNA, 350 bp, Zea mays
ctcatggcaagtgcttagctcactttataatttttcacatttttcaacttctaaagcataagcatttttaactttaacatgctttttgttttccttgattaggaagtcctcttgggagtccaagagattatccttctcatggatggcgctaattaattcatttaatttctctttttgttgcatgtttaagttggcaaaaagagtacgtaaattgtcttcctcatcactagtattatcatcactagaggactcatatctagtggaggatttagatttaaccttcttctttttgtcgtcctttgccatgaggcacttgtggccgacgttggggaagagaaggcccttggtga

SEQ ID NO: 299205 - DNA, 362 bp, Zea mays
cccatgcgtccgtaactagcacctttgaatgcccactagggcaccaacaatggcgggcaaaatattgcgcctggttatgctcctaggtgctgctgcaggggctgttacggcgaccagcttgcaggattgcttacatgctcctattgcttccctcctttcaccatacctgtcaccagcgggggattacgcatgtgaaaacccattccttataccccacgcgatcccacatgcaatcacagctggcataccacctttattacccctgttactacaacaatcaccagacctaccacatgagcatcctttggcgcatttattggcgcaaaacattatggcacaacatctgctacaacttgtggttg

SEQ ID NO: 299206 - DNA, 246 bp, Zea mays
caaccaattgcccaattgcaacatctttccttggcacatctaaacctacaaacgcatcgcatcgcaacagcagcaacagtttctgccatcagtgagccagctagccgaggagaaccatggggcctacttgcaacatgcgctgggtgggtacatgccatgtgccatcggttgattaagtgtagccctagagtgggcacgtctgcaacagtttatgtcagcgctcagtcaactagccatggggaaccc

SEQ ID NO: 299207 - DNA, 354 bp, Zea mays
tccgggtcggcccaagccttccgttggcattaagttaatcgcctccagtttgaagacctcgccacaattgaagggcctgacggtggccttggttttcttgggcctggttggaggggccgcctcaagtccaggcggcggttgtggctgccaaccaccaccgtttattttaccgcctccgttctatttgccgcctcggttctttctgccgccgaagaacaagccgcagccatggcattacccaactcaaccaccgtagctaagcccgtgccagcagttcggatcctgcggcgtcggcagcgtcggcagcccgttcctgggccagtgcgtcgagttcctgaggcaccagtgcagccc

SEQ ID NO: 299208 - DNA, 295 bp, Zea mays
gcaaatggccccaagaaatccatctagaggccgccgccaggggaattaatggcgtcgtcgtctagcagcagccaccgccgcctcatcctcgcagccgccgtcctgctctccgtgctcgcggctgccagcgccagcgccgtgacctcctgcgtgccggggagggccattccgcacaacccgttcccgagctgtcgctggtacgtgaccagccggacctgcggctttgggccgtgccttccgtggtcggagctgtagaggcgatgctgccgggagctggcagccattccagcgttct

SEQ ID NO: 299209 - DNA, 360 bp, Zea mays
cgcagccacctttttttttgttctgttgtgtatctagtagttggaggagatatgcagtttgcacttgcattggacacgaactcaggtcctcaccagataagatcttgtgagggtgatgggattgacaggttggaaaaattaagtattgtgggcagaaagcatgagaaagctttgagaaataggcgctttggtggaagagtttatgctactacacgctgttttattacgtaacatgcttgtattgaaactgttttattctataacacagccctttttggaagctgatactgttgcaaaccatttattttgctatatttttaagaagtagcgctatctgtgatctatcttagtttgtctagc

SEQ ID NO: 299210 - DNA, 370 bp, Zea mays
  unsure (1)..(370): unsure at all n locations
gcggaanaatcggccaaaatagtttctttaatgaaaaacacacaaagggaagtgcggtagcaacttgctaacaacaaaagtgccgaagatattagcccttcttgagctcgtttacctttcagtgtaggctacatctttacccagtacctctcaacaacggcgtgttccgaatgccattattccacagttcctcccatcaggtacatcaatgggcatcgaacaccctattgtgcaagcctataggctacaacaagcgcttgcggagagcgttttacaacaaccgtttgcccaattacaacaacaatgcttggcacatgtaaccatacaaaccatcgtagcacaactagcgcaacagtttgtgcccgcattg

SEQ ID NO: 299211 - DNA, 354 bp, Zea mays
tagcattcataaacacaccaagcgatgtgcgctagcatcaacctaacaacaagggctaccaagatattcgccctccttgcgctacttgcccttttagtgagcgcaccaaacgcgttgattaccacacagagctgacttgcccctagcgccatcatggcacagccactcccaccaggtacttcaatgggcttataacattcatccgtgcctgcctacaggctacaactcgcgcttgctgatagcgtctcacaactaccaattgccctattgcaacatcaatactgggcacatctcaacctacaatccattgtaacagcacatcaacaacagtttctgccatcactgtagccacct

SEQ ID NO: 299212 - DNA, 372 bp, Zea mays
ttttatttcctataaacacccctttttttttgctctacctacaacctaccaacagggggttcctagatattagcccttacttgcgctactagacctcttagtgtgctcaacaaatgctttcatcattccacatagctcacttgctcctaatgccactatcccacatgtcctcccaccagctactagaatcgggtgcgaacatgctgccatgcaagcctacacgctacaactagcgcttgcagggagcgtcttacaacaaccaattgcccaattgcaacaacactccttggcacatttaaacctacaaaccatctcatcgcaacatctacaactagcttctgccttctctgatccacctagccgtggtgtacc

SEQ ID NO: 299213 - DNA, 212 bp, Zea mays
caactagcaacatagaaagcatttttttgtaccaacaatgtcatacaaaggggggtgccttctaatgctccttggtacttctgcatgtgctgttacggctaccattatccctaaatgctcacaagctcctatagcttcctttattttcacgaaccttttaccagttgtttttttacattgtgtaaacccaattcttaaacctttcaggatcc

SEQ ID NO: 299214 - DNA, 345 bp, Zea mays
tttaacctcaccaggcgaagcgcactaccaacttcctaacagcaatggttaccaagaattagccctcttagcgctccttgccactatatgtgagcgcaacaaatgcgttcattattccacaatgatcacgtgctcctagtgccgtaattccacagtgtgctccacctgtttcttaaaagggctttgaacaccgtgctgtgcatgccttcatgcaacaacaagcgcctgcggtgtgcgtgtttcaacaaccaagtgcccatactgcgacatcaagacatgccacttcttacaatacaagccataacaacgcatcagcaacaacagctactaccatcactgctccac

SEQ ID NO: 299215 - DNA, 396 bp, Zea mays
tttcccgggtggcccaactcgtccgtgagcatttagaaacacaccatgcgaactgcactagcaacaacctaacaacatcggctgccaagatattatccctagcttgcgcttcttgcgctccttgcgagcgcaacacatgcgtacattattgcacagtgctcacttgctcctagttccatatatatcacagttcctcccaccatgttctgtaatggccttcgaacacccaattgtgcaagcctatacgctacaacaagcgatttgctgtagcgatttacaacaaccaattgcccattcgccacaacaatccttggcacatctaacaatacataccatcgcaacgcagcagctacaacagcatctaccaacactgagtcatctagccatggtgaaccc

SEQ ID NO: 299216 - DNA, 371 bp, Zea mays
tggcatcttataaagcccactattgtgccaacaatggcggccaaaattttttgcctccttatgctccttggactttctgcaagcgctgttaccgggaccattttcccgaaatgctcgcaagctcctatagctatccttctttcgccgcacctctcaccagcggtagtcttctgaatgtgaaaacccaattcttcaaccctacaggatccaacaggcaatcacagatggcattttacctttatcacccttcgtgctgcaacaatcatcagccctattacatcagttacctttggtgcatttattggcacaaaacatcagggcacaacaactacaacaacttgtgctagcaaaccttgctgactactctcagc

SEQ ID NO: 299217 - DNA, 332 bp, Zea mays
gaccaactagcaacatagaaagcacaatagtgtaccaacaatggcagccaaaatattttgcctccttatgctccttggtctttctgcaagtgctgctacggcgaccattttcccgaaatgctcgcaagctcctatagcttcccttcttcccccgtacctctcaccagcggtgtcttcggtgtgtgaaaacccaattcttaaaccctacgggatccaacaggcaatcacagctggtctacctttataccaccgttgctccaacaacaatcatccctcttacatcagttacctttggtgcatttattggcgcaaaacattatgggacaaacaac

SEQ ID NO: 299218 - DNA, 343 bp, Zea mays
attttgagcattcagaaacacaccttgttaagcgcactagcaacgacctaacaacaatggctaccaagatattagccctccttgcgcttcttgccctttttgtgagcgcaacaaatgcgttcattattccacaatgctcacttgctcctagtgccattattccacagttcctcccaccagttacttcaatgggcttcgaacacctagctgtgcaagccaacatgcaacaacaagcgcttgcggcgagcgttttacaacatccaatagcccaattgcaacaacattccttgccacatttaacaatacaagccattacaacgcatcagttacaacagtttctacc

SEQ ID NO: 299219 - DNA, 348 bp, Zea mays
agctaatctacctagctacgacttatcaacaatggctaccaagatattagccgaacttgctcttattgccctttttgtgagcgcatcaaatgcgttcattattccacaatgctcacttgctcctagtgccattataccacagtttctgcgaccagttacttcaatgggctttgaacacctagctgtgcaagcctacatgctacaacaagcgcttgcggcgagcgtcttacaacaaccaattaaccaatttcaacaacaatcctcgtcacatctaaccatacaaaccattgcaacacaacagctacaacagttgctaccatcactgagccaactagttttggtgtaccc

SEQ ID NO: 299220 - DNA, 334 bp, Zea mays
agcattcataaacacaccaagcgaatcgcactagcaacaacctaacaacaatggctaccaagatattagccctccttgcgcttcttgcccttttagtgagcgcaacaaatgcgttcattattccacagtgctcacttgctcctagtgccattatttcacagatccttccaccagttacttaaatgggctttgaacattcagccgtgcaagcctacatgctacaactagcgctagctgatagcgtcttacaacaaccaattgcccaattgcaacaacagtactagtcgcatataaacctacagaccatcgcaacgcagcagcaacaacagtttgt

SEQ ID NO: 299221 - DNA, 364 bp, Zea mays
ggaatacccggcctcttttagatttcttatgagttatagttcaataataaagttttttatctgatgtttgtggcttcccagaaataagaaagtacatttctaaaaaaaaaaatcacccttgaaactacaacaatcaaaaaccctaatacaaaaaaaaacctaaaaagcaaaaaataaacacaaaacaaaggggaaacaacaactacaacaaaaaagaaaaaaaaaacaataaaaaaaaaaaaaggggccccccctttaaaaggccccaaactaacgaccccgccttggacccttaatttttttttttaggggcacctaaatctaattcaaccgcccctttctgactacccccagcaatggaaaa

SEQ ID NO: 299222 - DNA, 352 bp, Zea mays
attcagaaacacaccaagcgaagcgcactagcaacgacctaaccacaatgggtaccaaaaatttaagcccttcttgggccttttggcctttttggggagcgcaccaaatgcgtcaattattcaacaatgttaactggctcctagtgccataattcaacagttcctcccaccagttacttcaatgggcttcgaacacctagctgtgcaagccaacatgcaacaacaagcgcttgcggcgagcgtcttacaacaaccaattgcccaattgcaacaacaatccttgccacatctaacaatacaagccatcacaacgcaacagcaacaacagttcctaccagcactgagccaccta

SEQ ID NO: 299223 - DNA, 377 bp, Zea mays
  unsure (1)..(377): unsure at all n locations
acccacgcgtccgcttttatcagcaccattaatcatctttttcctaaccagnaaaagctccaaatcaagggggctttatcaattatctaactccaaaaaccatgaagctggtgcttgcagtgcttgatagtaccgctgctttgtcgggaggctcgcctgggccaccgacgaccactacctgcacaacgcctttagcacctacggcgaggtcctcgagtccaagatcatcctcgatcgggcgacgccaaagtcccgcggcttcaggttcgtcaccttctccacggaggaggcgatgcggaacgccatcgagggcatgaacggcaaggagctggacggccgtaacatcaccgtcaacgaggcccagtcccgcggcggcc

SEQ ID NO: 299224 - DNA, 224 bp, Zea mays
atacatagtgaagtacactagcaacattttagcaccaatgggagccaagatttgtgccctccttgccctccttgctctttcagcaagcgctgctacctcgactttaattccacaaggctaacaaaattacctctttccggcaccagccgtgggttttaattcccaaccattccattccacatgggtcaagaagcccttccagcaagccttttaccgtcctttac

SEQ ID NO: 299225 - DNA, 364 bp, Zea mays
ttgagaccaacaagcaacatataatgtggaatccagtagcaacaatagagcagcagtggtgaccaagatattttccctccttatgctccttgctctttctacatgtgttgctaacgcgacaattttccctcaatgctcacaagctgctatagcttacctttttcccccatacctttcatcaattatagcttcagtatgtgaaaacccagctcttcaaccatataggcttcaacaagcaatcgcagcaagcaacatacctttatcgaccttgttgggtcaacaatagccagccctatctttggtgcagtcattggtacaaaccatcaaggcacaacagctgcagcaactcgtgctacctgtgatc

SEQ ID NO: 299226 - DNA, 353 bp, Zea mays
agaccattagcttaaactgctccttagcgcagcacaacccgcacgacaccatgagggtgttgctagttgccctcgctctcctggctctcgctgcgagcgccacctccacgcatacaagccgcgaggtgccgatgccagccaccgtcgtccggtcatttaccgccgccggggcatctgccagctacggctcacctgccaactcccacacatgctacaccgccggttcaactgccagcttccgttcacctgccatcgtcagtccatgtgccgccggcggcttatatgccgtcgccaccatgccactaccatactcaaccgtcacggcctaagactgattctcagccacacccatg

SEQ ID NO: 299227 - DNA, 364 bp, Zea mays
caggtattagcggctacacaaatgcctgaagagccagctggatggttccagggtacagtcacaaatccattgacaacattgtaatcttgagtggcgatcagctttatcggatgaattacatggaacttgtgcagaaacatgtcgaggacgatgctgatatcactatatcatgtgctcctgttgatgagagccgagcttctaaaaatgggctagtgaagattgatcatactggacgtgtacttcaattctttgaaaaaccaaagggtgctgatttgaattctatgagagttgagaccaacttcctgagctatgctatagatgatgcacagaaatatccataccttgcatcaatgggcatttatgt

SEQ ID NO: 299228 - DNA, 374 bp, Zea mays
tcggagggccttaaaaccattagcttaatctactccagagcgcagaagaacccgatcgacaccatgagggtgttgctcgttgccctcgctctcctggctctcgctgcgagcgccacctgcacgcatacaagcggcggctgcggctgccagccaccgccgccggttcatctaccgccgccggtgcatctgccaccttcggttcacctgccacctgcggtgcatttgccaccgccggtccacctgccagcgacggtccacctgccaccggcggtccatgtgccgtcgccggttcatatgccgtcggcaccatgccactaccctactcaaccgccccggactcagccttatccccagccacacccatgcccgtgcca

SEQ ID NO: 299229 - DNA, 373 bp, Zea mays
agctaagcgctctagcaacaattgttctacaatgcataccaaggcatttgcgcggccttgcgcttcttgcccttttagtgagcgcaacaaatgcgttcattattccacagtgctcacttgctcctagtgccattattccacagtgcctcccaccagttacttcaatgggctttgaacatccagccgtgcaagcctacaggctacaactagcgcttgcggcgagcgttttacaacaaccaattgcccaattgctacaacaatccttgtcacatctaaacactacaaaccatcgcatcggatcagcatcaacagtttctgagctcaccgagccacctagccgtggtgaaccctgacgcctacttgcaacagcagc

SEQ ID NO: 299230 - DNA, 371 bp, Zea mays
cccacgcgtccgcagagttctccaaagcgcgaagctccaggcagccgtcaccgtcaccgtcagggaacgcgcgcagcaatggccttttactacggcgtgggcggacagtcgtcggcgtgggcggcgccggtccatgtgccgccgccggttcatctgtcgccgccaccatgccactaccctactcaaccgccccggcctcagcctcatccccagccacacccatgcccgtgccaacagccgcatccaagcccgtgccagctgcagggaacctgcggcgttggcagcaccccgatcctgggccagtgcgtcgagttcctgaggcatcagtgcagcccgacggcgacgccctactgctcgcctcagtgccagtc

SEQ ID NO: 299231 - DNA, 240 bp, Zea mays
  unsure (1)..(240): unsure at all n locations
cttggtgctgcgtctcaggggtggcatgcagatcttcgtgaagacacttactggcaagacgatcacccttgaggtggagtccttagacaccattgacaacgtcaaggccaagatccaggacaaggagggcattccaccggaccagctgcggctgatcttnnccggcaagcagctggaggatggtcgcaccttgtctgactacaacatgcagaaggagaggacccttcacctggtgctccg

SEQ ID NO: 299232 - DNA, 326 bp, Zea mays
tgcaacataaaaagcacaatatttgtttctacaatggcagcctatatattatggcgggttatgctcctaggtatctcttcaagtgctgctactgcgaccattttcacgcattgcccacaagctccaatagcttcccttctttccccgtaacctcttaccatcgatgtcttcgtgatgtgaaaacccaattcttcaaccctacaggatccaacaagctatcactactggcatcttaccttttttacccatgtgcttcaacaatcattatccctatttcatcagttacctttggtgcatttattggatcaaatcattatggcacaaca

SEQ ID NO: 299233 - DNA, 351 bp, Zea mays
attttgagcattcagaaacacaccttgcgaagctacctagcaacgacttaacagcaatggcttccaagatattagccctccttgcgctttttgccctttttgtgagcgcaacaaatgcgttcattatttcacaatgctcacttgctcctagtgccattataccacagtttcctccgaccagttacttcaatgggctttgaacacctatctgagcaagccttcaggctacaacaagcgcttgcggcgagcgtcttacaacaaccaatttaccaattgctacatcaatccttggcacatctaaccatacaaaccatcgctacacatcagcaacaacagttcctaccagcactg

SEQ ID NO: 299234 - DNA, 357 bp, Zea mays
ataatgcacattattgtaccaacaatggcagccaaattattttgactccttatgctccttggtctttctgcaagtgctgcttcgggcaccatgttcccacagtgctcacaagctactatagctttccttcttcccgcgtacctgttaccagcggcgtctttacgctgtgaaaaccacacattttcaaccctatgggatccaacaggcaatcggcgctggcatatgacctttatcacccttgttgctacaacattaatacaccctattacagcagtgtccttcggtgcattgattggcacaaaacatcaaggcacaacaactacaacaacttgtgctagctaaccttgctgactactc

SEQ ID NO: 299235 - DNA, 206 bp, Zea mays
cgacccactcgttcgatgtcttgagaggtgtatgatttgttttagcctccgggcgcatgtgaaagggggggttcttttaacgttattttacttattctcgtgggtcggatagcggtgcaccgcccctccttttggcttcaaggccctgtctttccgggccgatccggtcggaagacattgtcaggtggtgagtttggctggtgctg

SEQ ID NO: 299236 - DNA, 342 bp, Zea mays
gagcattcagaaacacaccaagcgaatcgcactagcaacgacctaacaacaatggctaccaagatattagccctccttgcgcttcttgccctttttgtgagcgcaacaaatgcgttcattattccacaatgctcacttgctcctagtgccatcattacacaacacctcccaccagttacttcaatgggcttcgaacacctagctgctgtgcaagccatcatgcaacaaccagctcttgcgggcagcgtattacaacaacctattgcccaactgcaacaacacttgccgccacatacaacaatacacgtcattacaacgcatcagcaacaactgttcctacca

SEQ ID NO: 299237 - DNA, 418 bp, Zea mays
cttcagtatgtgaaaacccagctcttcaaccatataggcttcaacaagcaatcgcagcaagcaacatacctttatcgcccttgttgtgtcaacaatcgccagccctatctttggtgcagtcattggtacaaaccatcagggcacaacagctgcagcaactcgtgctacttggttgatcacagcggacgcgtgggtgcgagctgcgcgctcgccgacgtcaactacctcgagcgccctctgctcatccccaaggaggagctccttccgcgccctccccccgaggagaagctcgaggacctcgtcctcatggcacaggtgaccaagttcgcctgcggcgggttcgcggtcgggatctgcttcagccacctggtgttcgacgggcagggtgcggggcagttcctcaaggcggccggcgaga

SEQ ID NO: 299238 - DNA, 386 bp, Zea mays
gctcatcgactccagattggagaactttacaccatgaaggtgctgatcgtgcccttgcgtcctggcgctcgctgcgagcgccgcctccagtacaagcggcggctgtggctgccagacaccaccgtttcatctaccgcctccgttctatatgccgcctccgttctatctgccgccgcagcagcagccgcagccatggcaataccccactcaaccaccgcagctaagcccgtgccagcagttcggatcctgcggcgtcggcagcgtcggcagcccgttcctggccagtgcgtcgagttcctgaggcaccagtgcagcccggcggcgacgccctacggctcgccacagtgccaggcgcttgaacagcagtgctgccaccagatcaggca

SEQ ID NO: 299239 - DNA, 404 bp, Zea mays
aatgatagcttcagtatgtgaaaacccagctcttcaaccctataggctccaacaagcaatcgcagcaagcaacatacctttatcacccttgtttcaacaatcgccagccctatctttggtgcagtcattggtacaaaccatcagggcacagcagctgcagcaactcgtgctacctgtgatcaaccaagtagcttttgcaaacctttttcctactttcagcaacaacaatttcttccattcaaccaactgtctacattgaaccgtgctgcttattgcagcaacaactattaccattcagccagctagctactggctactcttagcaacaacaacttttttcatttaaccaaattgccgcactgaaccccgctgcttatttgcaggaacaaatactactaccattt

SEQ ID NO: 299240 - DNA, 171 bp, Zea mays
gttctagatcggccgccctttttttttttattttttttttttatcttttttagaatctggaaatgtaacttcttatttctggttggccacatacattattcaaaaaactttatttttgaattacaactaattagcaatttaaaatagggttccaccaatgattttgttgtt

SEQ ID NO: 299241 - DNA, 342 bp, Zea mays
caaagcggcagtgcgtagagaggatcgtcgaacagaacagcatgaagatggtcatcgttctcgtcgtgtgcctggctctgtcagctgccagcgcctctgcaatgcagatgccctgcccctgcgcggggctgcagggcttgtacggcgctggcgccggcctgacgacgatgatgggcgccggcgggctgacccctacgcggagtacctgaggcagcgagtgcagccgtggcggggcccctactcccggtgtggcagacagcgcatgaccagccgtccggcacaggctgcagcagagatgggatgatggcgtgcagccgtcctcagcagctgagatgatgatgc

SEQ ID NO: 299242 - DNA, 404 bp, Zea mays
aatagctcatcgactccagattggagaactcgacatcatgaaggtgctgatcgttgcccgtgctgtcctggcgctcgctgcgagcgccgcctccagtacaagcggcggctgtggctgccagacaccaccgtttcatctaccgcctccgttctatatgccgcctccgttctatctgccgccgcagcagcagccgcagccatggcaataccccactcaaccaccgcagctaagcccgtgccagcagttcggatcctgcggcgtcggcagcgtcggcagcccgttcctgggccagtgcgtcgagttcctgaggcaccagtgcagcccggcggcgacgccctacggctcgccacagtgccaggcgctgcagcagcagtgctgccaccagatcagggaggtggagccgt

SEQ ID NO: 299243 - DNA, 213 bp, Zea mays
aaagcggaggttgggttgccagaaccaccgttaatctaccgtctccgatctatatgccgcctccgatctatctgccgtcgcagcagcagccgcagccatggcaataccccactcaaccaccgcagctaagcccgtgccagcagttcggatcctgcggtgttggcagtgtctgcaagtccgttcctgggccagtgcgttgagttcctgaggcac

SEQ ID NO: 299244 - DNA, 379 bp, Zea mays
cgacaagagaaaggattagaaaaaggaattattcatggacatgatctccggcagcactgcagcaacatcaacaccccacaacaaccaacaggcggtgatgttgtcatcctccattataaaggaggaagctaggggaccaaaagaaaccacaaccattgcccaaattaggtgccattgggaacctaagcccaagcccgaactacctgaggcgctcaagtgcccacgctgcgacttcaacaacaccaagttttgctactacaacaattattgcatgttacaaccacgctacttttgcaaggcttgtcggcgctattggacacatggtggtacccttcgcaatgttcccaatggtggtgggtgtcgcaagaacacacatgcc

SEQ ID NO: 299245 - DNA, 220 bp, Zea mays
gcaacatagaaaaggtggaatccagtagcaacaatagttcaacaatggagaccaaggatattttccctccttatgctccttgctctttctacatgtgttgctaacgcgacaattttccttaagctacagctctatgcttccttttcccaaccttcataattagctcagatggaaccagtttacataagctacagcatgagagaaactatgctgtggacat

SEQ ID NO: 299246 - DNA, 270 bp, Zea mays
cggacgcgtgggtttcagcattcagaaacacattaagcgaagcgcactagcaacaacctaacaacaatggctaccaagatattagccctccttgcgcttcttgcccttttagtgagcgcaacaaatgcgttcattattccacagtgctcacttgctcctagtgccattattccacagttcctcccaccagttacttcaatgggcttcgaacatccagccgggcaagcctacaggctacaactagcgcttgcggtgagctgtttacaacaa

SEQ ID NO: 299247 - DNA, 343 bp, Zea mays
  unsure (1)..(343): unsure at all n locations
gcaacattagaaaggtggaatacttagtagcaaccaatttgagtcatctaatggcgnngccaagatatttggccagtgccttatgtctccttgctctttcntgcatcgtgttgctaacccgcgaccatttttcctcaatacctcacnnaagctcctatagctgcccttcttcccccataccttccatcaatgaccgcttcagtatgtgaaaacccagcccttcaaccctacaggctccaacaagcaatcgcaacaagcaacttacctttatcacccctgttctttcaacaatcgccagccctatctttggggcagtcattggtacaaaccatcaaggcacaac

SEQ ID NO: 299248 - DNA, 460 bp, Zea mays
  unsure (1)..(460): unsure at all n locations
cggcncgaccccacgcgtnccgcttggctcctagnntgccattattccactagttcctttttttcatgttacttcaatgggncttcgaggggggcagtccgtgcaagctctacagtgctactaactagcgctttgctgcgaagcgtcttacaacaacccaattgcccaattgcaacaacaatctcttggcacatctaaacctacaaaccatcgcaacgcaacagcaacaacagtttctgccatcactgagccacctagccgtggtgaaccctgtcgcctacttgcaacagcagctacttgcatccaacccacttgctctggcgaacgtagctgcataccagcaacaacaacgtctgcaacagtttatgccagcgctcagtcaactagccatggtgaaccctgtcgcctacctacaacagcaacaattgctttcatctagcccgctcgctgtgggcaatgc

SEQ ID NO: 299249 - DNA, 363 bp, Zea mays
  unsure (1)..(363): unsure at all n locations
gggcccgaccaacgcttccgnagaccaacaagcaaaaaataaagtggaatctaatactatcaattgagcaacaatggcgacgaagatattttccttccttatgctccttgctattactgcatgtgttgctaacacgacaattatactctcaatgctcacaagctcctatagcttcccttcttcccccataccttccatcaatgatagcttcagtatgtgaaaacccagctcttcaaccctataggctccaacaagcaatctcagcaagcaacatacctttatcacccttgttttaacaattgccagccctatcttttggtgcagacattggtacaaaccatcagggcacagtagctgcatcat

SEQ ID NO: 299250 - DNA, 402 bp, Zea mays
tgccactaccctactcaaccgccccggcctcagtctcatccccagccacacccatgcccgtgccaacagccgcatccaagcccgtgccagctgcagggaacctgcggcgttggcagcaccccgatcctgggccagtgcgtcgagtttctgaggcatcagtgcagcccgacggcgacgccctactgctcgcctcagtgccagtcgttgcggcagcagtgttgccagcagctcaggcaggtggagccgcagcaccggtaccaggcgatcttcggcttggtcctccagtccatcctgcagcagcagccgcaaagcggccaggtcgcggggctgttggcggcgcagatagcgcagcaactgacggcgatgtgcggcctgcagcagccgactccatgcccctacgct

SEQ ID NO: 299251 - DNA, 289 bp, Zea mays
aattagctcatcgactccagattggagaactcttcaccatgaaggtgctgatcgttgcccttgctctcctggcgctcgctgcgagcgcctcctacagtacaagcggcggctgtgtcttgtcattcactaccgtttcatctaccgccttcgttctatttgccgcctccgaactatctgccgccgtattagcattctcatcctttttaattacctctctttaccatcttattttaattctttgtctgtatatctatttctttatcgttctttgtgttttcatacttttttt

SEQ ID NO: 299252 - DNA, 261 bp, Zea mays
ccaactagcatcatataaggcacattactgttttttctattggcagccaaaatattttgccgggcgatgctccttggactatctgcaagtgctgctacggtgaccattttcccgaaatgctcgcaagctcctaaagctttccttctttcctcgtacctatcaccagcggtgtcttatgtatgtgaaaacctatttcttcaaccttacatgattcaacagtcaatcacatatttctattttacttttattcacccttgtttc

SEQ ID NO: 299253 - DNA, 393 bp, Zea mays
ccaacaagcaacatagaaagtggaatacatttttatacaatagagcaacaatggcggccgggatattttccatccttatgctccttgctctttctgcatgtgttgctaacgcgaccatttttcctcaatactcacaagctcctatagctgcccttctttcctcatacctttcatcaatgaccgcttcagtatgtgaaaacccagtccttcaaccctacaggctccaacaagcaatcgcatcaagcaacatatccttatcgcccttgttgtgttaacaaatctccagccctttttttggtgcattcatttggtactaaccatctaggcacaactaatttattattctgggcctctgtgtgattaatctaatagtatttgcttgcttttatttcc

SEQ ID NO: 299254 - DNA, 319 bp, Zea mays
cggacgcgtgggcggacgcgtgggctggactacatgcctagcaattagctcatcgactgcggattggagaactcgacaccatgaaggtgctgatcgttgcccttgctctcctggcgctcgctgcgagcgccgcctccagtacaagcggcggctgtggctgccagacaccaccgtttcatctaccgcctccgttctatatgccgcctccgttctatctgccgtcgcagcagcatccgcagccatggcattacctcactcaaccaccgcagctaatcccgtgccagcagttcggatcctgcggtttttgcagctgtcttta

SEQ ID NO: 299255 - DNA, 335 bp, Zea mays
gcgaagcacattagcaacaacctaacaacttttgctaccaagatattatccctccttgcgcttcttgcgctttttgcgagcgcaacaaatgcgttcattattccacaatgcttacttgcttcaagttccattattacacaggttcttccaccagttactttaatgggctttgaacacccatctgtgcatgcctattggcttcaacaagcaattgcggtgagcgtttttcaacaaccaatattccatttgcaacaacaatccttgttcacatttaacaattcataccattgcaactcaacagcatcactattttctactactactgagccacctat

SEQ ID NO: 299256 - DNA, 259 bp, Zea mays
attcagaaacacaccaagcgaagcacatttttttctaacctaacaacaatggctaccaagagattattcctccttgcgcttcttgcgctttttgcgagcgcaacaaatgcgttcattattccacaatgctcacttgctccaagtttcattattacacagttccttccaccagttactttaatgggcttctaacacccagttgtgcaagcctataggcttcaacatgcatttgctgctagctgattacaacaactaatat

SEQ ID NO: 299257 - DNA, 310 bp, Zea mays
attcagaaacacaccaagcgaagcgcactattttctacctaacaacaatggctaccaaggggtttgcctttcttgcgcttcttgccctttttgtgagcgcaacaaatgcgttcattattccacaatgctcacttgttcctagtgccattatttcacagttccttccaccagttactataatgggtctttaacacctagctgtgcatgccatcatgctacaacaagcgcttgctttgtgcttttttcatcatccaatttttctattgcatcaacaatttcatgtcacatttatcattacaagtctttatat

SEQ ID NO: 299258 - DNA, 350 bp, Zea mays
ggaagtcgggcacctcagggcgatcaagctgatgttgaggggcttcccgaggccgttgctggacatcagcgcggccaacttcggcaagatcatcgagcaagcgctgaacgcgacgctggacccgcccttcgacccctacgagaacagtctcaacttccttgtcgccttctacatcatcctctacgtcggactcaccggttacgtcggcgccaaccccaggctacttacctcttatgccagaaagctgttggtgtagctgcttgtggtggagtctggtcttgattcggggatatgaactctattttttttgctcttgtcgcggcgtgttctttgtttcttctacttgattg

SEQ ID NO: 299259 - DNA, 378 bp, Zea mays
attttcagcattcagaaacacaccaagcgaagcgcactagcaacaacctaacaacaatggctaccaagatattagccctccttgcgcttcttgcccttttagtgagcgcaacaaatgcgttcattattccacagtgctcacttgctcctagtgccattattccacagttcctcccaccagttactttaatgggctacgaacatccagccgtgcaagcctacaggctacaactagcgcttgcggcgagcgtattacaacaaccaattgccctaatgctacaacaattccttggcacatctaaacctacaaaccattgttacgtaacagcatcaacagtttctgtcatcacttgaccatctagtcgttgtgttcctcttt

SEQ ID NO: 299260 - DNA, 190 bp, Zea mays
  unsure (1)..(190): unsure at all n locations
aancncggcgcncgcaccgacgaagaacgaagttaaangcgacacccggagcgaaaagcagaagcccgcgaaccaccgaggagacgaacgcaaggggcgcccgaagccaacaggcggagggcacgacggccagggcgacacgccaaaagacacacccaacacccccccgcggggcgagggacgaggagaa

SEQ ID NO: 299261 - DNA, 421 bp, Zea mays
  unsure (1)..(421): unsure at all n locations
attttgagcattcaaaaacacacaaagggaagtgtactagcaccttcctaacaacaatggctaccaagatattagccctccttgcgctcctttccctttcagtgagcgcaacaactgcattcattattccacaatgctcacttgctcctaatgccattattccacagttcctcccatcagttacatcaatgggcatcgaacaccctattgtgcaagcctataggctacaacaagcgcttgcggcgagcgtcttacaacaaccgtttgcccaattacaacaacaatccttggcacatctaaccatacaaaccatcgcaacacaactagagcaacagtttgtgcccgcattgagccaactagccgcagtgaaccctgtctcctactngcaacagcaactgcttgcatccaacccacttgctct

SEQ ID NO: 299262 - DNA, 406 bp, Zea mays
atttcgagcattgaaaaacacaccaagctttgtttcctatcaacaacttaacaacatggggtaccaagatattagccctgcttgcgctacttgcccttttagcgagcacaacaaatgcgttcattattccacaatgctcacttgctcctagtgacataataccacagttgcttctaccagctactttaatgagctttgaacactcaaccatgcaagcctacatgctacaacacgtgcttgaggctagcgtcttacaccaacaaaatgcctaattgcaacaacaatttctgggcacatttaaactctacaaaccattttaactcaacagcaacaacagtttctgccagcattgagccaactagttgtgttgaaccctgtcttctactatcaacagaagctacttgta

SEQ ID NO: 299263 - DNA, 312 bp, Zea mays
attgagaccaactagcaacatagaaagcacttattgtaccaataatggcagccaagggagtttgcctcattatgctccttggtctttctgcaagggctgctaccgggaggattttcccgcaatgctcacaagctcctatagctttccttcttcccccatacctctcaccagcgatgttttcagtatgtgaaaatccaattcttctaccctacaggatccaacaggcaatcgcagcaggcatcttacctttatcacccttggtccttcaacaattattagccctattacagctgtttcccttggtgcatttat

SEQ ID NO: 299264 - DNA, 206 bp, Zea mays
  unsure (1)..(206): unsure at all n locations
tttgcctccttntgctccttgntctttctncnggtgctgctncggcgnccnttttccccccctgctcncnngctcctntngcttcccttcttcccccgtccctctcnccnncggtgtcttcggtttgtgnnnccccnnttcttcnnccctcccggntccnncnggcnntcgcngctggcntcttncctttntcncccttgttcctc

SEQ ID NO: 299265 - DNA, 415 bp, Zea mays
attttgagcattcataaacacaccaagctttttttttctagcaacaacctaacaacaatgggtaccaagatattatccctccttgcgctacttgcgctttttgcgagcgcaacatatgcgttcattattccacaatgctcacttgctcctagttccattattccacagttcctcccaccagttactttaatggcctttgaacacccagctgtgcaagcctatatgctacaacatgcgattgcggcgagcgttttacaacaactaattgcccaattgcatcaacatttcttggcacatttaacaatacataccatcgcaacgcaacagcaacaacagttcctaccagcactgagccacctagtcatggtgaaccctgtcgcttacttgaacaatagctgcttgcatccaacccatt

SEQ ID NO: 299266 - DNA, 160 bp, Zea mays
cagaccattagctatatctactccagattttttttgaacccgaccgacaccatgagggggtggttcgttgccctcgttctcctggttctctctactagcgccacctttacgcatacaagctgcgtttgtggctgacagccactgtcgccgattttatcta

SEQ ID NO: 299267 - DNA, 280 bp, Zea mays
  unsure (1)..(280): unsure at all n locations
gccaagcgtncgggcgaatcaggacccggtattttttgctcaagcctatgaaaaaaacggtgcagtatgtcctaatgaaatgaccgatgaaaagaacttttacggaagggttgacaaactggaggctatacgccatggtggagttcagtgcccagtgttgagcaaagaggccatgattgatgcctgggcactgtactaaggaccggacaagggtgcagaaacaggtgctttaataactggtggattacccgaacgcgagatgaaaaacatgttgaaaatt

SEQ ID NO: 299268 - DNA, 153 bp, Zea mays
cttaccaggtccagacatagcaaggattgacagtactgtgagctctttcttgattctatgggtggaggatcttggcatagatctcgcaaaccagttaagtgaatgctcttaacttaactaaggtgaccaatatcactgatgccaatgctttat

SEQ ID NO: 299269 - DNA, 310 bp, Zea mays
gtacaacaactacaacaacttgagctaggaaactttgctgcctactctcagcaacaggagttgcttccattcaaccaactggctgcattgaactctgctgcttattagcaacaacaactaccattcagcagcttgctgctggctacccccagcaaattctttcattcaaccaactggcagcattgaactctgctgtttatttacaacaacaacaggttccaccattcagtcaggtagctgatgggagccctgatgccttcttggcacaactacaggtggtggccgtttatctggacgctgcgcctaacgc

SEQ ID NO: 299270 - DNA, 278 bp, Zea mays
attttgagcattcagaaacacaccaagcgaagcgcactagcaacaacctaacaacaatggctaccaagatattatccctccttgcgcttcttgcgctttttgcgagcgcaacaaatgcgtccattattccacaatgctcacttgctcctagttccattattccacaggtccttccaccaggtactttaatggccttcgaacacccaagtgggccaggcttttaggttccaccaggcgatggcgggaggcgtttaacaccacccaattgcccaattgca

SEQ ID NO: 299271 - DNA, 321 bp, Zea mays
gcaaattgcaccaagaaatccatcgagtgtccttcgacaggggaattaatggcgtcgggtgctagcatcatccacctccgcctcatcctcgcagccgccgtcctgctctccgtgctcgcgtctgccatcgcctgtcccattacctccttgtttccttcgttcttcattctctttaatcctttttttgctattacctattcttttcccttctcactcttcctctatttctttcacttgtgttctctcttttattactcttttttcctttcttcattttttattcttatatctttcttttacccattcgtttctatattattt

SEQ ID NO: 299272 - DNA, 438 bp, Zea mays
cggacgcgtggggcaacatataaagtggaatactttttcaacaatagagcaacaatggcgggcaagatattttccatccttatgctccttgctctttctgcatgtgttgctaacgcgaccatttttcctcaatactcacaagctcctatagctgcccttcttcccccataccttccatcaatgaccgcttcagtatgtgaaaacccagcccttcaaccctacaggctccaacaagcaatcgcaacaagcaacttacctttatcacccctgttctttcaacaatcgccagccctatctttggtgcagtcattggtacaaaccatcagggcacaacagctgcagcaactcgtgctaccagtgatcagtcaagtagctttggcaaccttttctcctactcttagcaacaacaatttctttcattcaaccaactgtttacac

SEQ ID NO: 299273 - DNA, 230 bp, Zea mays
tgagcattcagaaacacaccaagcgaagcacattagctttaacctaacaacaatggctaccaagaggttatccttccttgcgcttcttgcgctttttgcgagcgcaacataagcgttcattattccacaatgctcacttgctccaagttccattattacacagttccttccaccagttactttaatggtctttgaacacccagctgtgcaagcctatatgctacaacaag

SEQ ID NO: 299274 - DNA, 320 bp, Zea mays
attttgagcattcagaaacacaccaagctttatttctattatcatcatcctaacatcaatgggtgccaagatattatccctccttgcgcttcttgcgctttttgtgagcgcaacatatgcgttcattattttcacattgctcactttgctccaagtttcattattacacagacttcttctaccagttacttcaatgggcttcgaacacccagctttgcttgcctatatgcttcaacaagcaattgtggcgtgctgtttacaacaaccaatttcccatttgcaactaacattccttggcacatcttacatatcaaaccatc

SEQ ID NO: 299275 - DNA, 298 bp, Zea mays
agcattcagaaacacaccaagcgaagcgcactatcaacaacctaacaacaatggctaccaagatattatccctccttgcgcttcttgcgctttttgcgagcgcaacaaatgcgtccattattccacaatgctcacttgctcctagttccattattccacagttcctcccaccagttactttaatggccttcgaacacccagctgtgcatgcctataggcttcaacaagcgattgtggtgagctgtttaaaacaaccaattgctcaattgcatcaacaattccttggctcatttaacaa

SEQ ID NO: 299276 - DNA, 308 bp, Zea mays
tgccgttctacctgcacgctatgcttatcgctggcaccctcttacaactgcaacaattgctgccattcaaccaacttgctttgacaaactcaacagtgttctaccaacaacccatcattggtggtgccctcttttagattgcttatgagttatagttcaataatgaagttttttggatgatgtttgtggcgtcccagaaataagaaagtacatttctagattcttaaaaaaaaaatttgaagaaaaaaaaaataaaaaaattttaatgcttaacaaatgacaaaccgtatcttgggtgcattcattgg

SEQ ID NO: 299277 - DNA, 373 bp, Zea mays
cgtcagcctagcaattagcttatctactccagattggagaactcgacaccatgaaggtgctgatcgttgcccttgctctcctggcgctcgctgcgagcgccgcctacagtacaagcggcggctgtggctgccagacaccaccgtttcatctaccgcctccgttctatatgccgcctccggtctatctgccgccgcagcagcagccgcagccatggcaataccccactcaaccaccgcagctaagcccgtgccagcagttcggatcctgcggcgtcggcagcgtcagcagcccgttcctgggccagtgcgtccagttcctgaggcaccagtgcagcccggcggcgacgccctaccgctcgacacagtgccaggc

SEQ ID NO: 299278 - DNA, 355 bp, Zea mays
gggaggccggtcgccacgcgtccgatttggcatcaaacacaccagcgaagcgcctacacacctaacaacaatggtccaagatatatcctcttgcgcttttgcgcttttgcgagcgcacaagcgtcattattcacaagctcactgctctagtcatattcacagttcctccaccgtacttcaatggccttgaacacccactgtgcaagcctataggctacaacaagcgattgcggcgagcgtcttacaacaaccaattgccaattgcaacaacaatccttggcacatctaacaatacaaaccatcgaacgcacagcaacaacagtctaccacctgagccacctagccaggtgaacct

SEQ ID NO: 299279 - DNA, 379 bp, Zea mays
  unsure (1)..(379): unsure at all n locations
cggaangggcgganccacgcgtccggcggcgatgattgagtaataatgtgtcatgcatcaccatgggtggcagtgtcagtgtgagcaatgacctgaatgaacaattgaaatgaaaagaaaaaagtattgttccaaattaaaaaaaaaaaaaaaaaaaaaaaaaaaaaaaaaaaaaaaaaaaaaaaaaaaaaaataaaaaaaaaaaataaaaaaaataaaaaaaaaaaaaataaaaatacaaataaaaataaaaaaaaaattaaaaataattaaataaaaaagggggccccgtttttaagaaccaaatttttatgccgcggttttggaagataatagcttttttttaggggccccaaaataaaattaatgggcccttttt

SEQ ID NO: 299280 - DNA, 373 bp, Zea mays
tttgagcattcataaacacactaatcgtagcgcactagcaacgacctaacagcgggggttatccaagatattagccctccttgcgcttcttgccctttttgtgagcgcaacaaatgcgttcattattccacaatgctcacttgctcctagtgccattattccacagttcctcccaccagttacttcaatgggcttcgaacacctagctgtgcaagccaacatgcaacaacaagcgcttgcggcgagcgttttacaacaaccaattgcccaattgcaacaacaatccttgccacatttaacaatacaagccatcacaacgcatcagtaacaacagttcctaccattacccatgtatttagccatggtgaaccct

SEQ ID NO: 299281 - DNA, 359 bp, Zea mays
tttctccctcatagaaagaggcatttatagctaccatttagccccaataccggccatcaattatagcttcaggatgtgaaaacccagcttttcaaccatataggcttcaacaagcaatcgcagcaagcaacatacctttatcgcccttgttgtgtcaacaatcgccagccctatctttggtgcagtcattggtacaaaccatcagggcacaacagctgcagcaactcgtgctacctgtgatcaaccaagtagctctggcaaacctttctccctactctccgcaacaacaatttttttcattcaaccaactgtctacactgaaccctgctgcttatttgcagcaacaactattaccattt

SEQ ID NO: 299282 - DNA, 288 bp, Zea mays
cttccgtggggctctggcctgaggtcctcgatgtcctgcggtgggtggaggagtacatgggcgccgccctcggcgacccgcggcgcccgttcctgctctccgtccgttccggcgccgcggtgtccatgcccgggatgatggacacggtgctcaacctggggctcaacgaccaagtggccgccgggctggcggccaagagctgggaccgttttgcctacgactcctttcgtcgtttccttacttgttcggcactgtgtgattgacattccccacgcgctgttcgaagag

SEQ ID NO: 299283 - DNA, 304 bp, Zea mays
attcagaaacacaccaagcgtagttacctatcaacgactcaacaacaatggctgccaatatattagcccttcttgcgcttcttgccctttttgtgagcgcaacaaatgcgttcattattccacattgctcacttgctactagtgccattataccacagttcctccgaccagttactacaatgggctttgaacacctagctgtgcaagcctacatgctacaacaagcgcttgcggtgagcgtttgacgcatccaataaccaattgcaacatcaaacacatggttcttttaaccattcaatactat

SEQ ID NO: 299284 - DNA, 332 bp, Zea mays
  unsure (1)..(332): unsure at all n locations
acccacgcgnnccgaccgaattctcctgtctattacttttcctcattgcctcccctatncgacagcatacgggggcggcattttacgccgtcatggagccggttgttgctggcagcaacacggtagtagctgttgcccaagtcgagttgcaaacaatgaacgtgcagcagcccgttgatgttgccggacccagcgagggggtggcggcgatctccaaaggggggaaggtagggccgaaccggtgcatctcctgcaggaagagggttgtgctcacgggattcaactgccggtgtgggaacttgtactgcgcgctccaccgcttcttcgacaag

SEQ ID NO: 299285 - DNA, 345 bp, Zea mays
  unsure (1)..(345): unsure at all n locations
cgggncgaccacgcgttcttttaacacaccaagcgaagtgctagatctcaaccnacaacaatggcgggaggatattagtccttcttgcgcttcttgcccatttagtgagcgctacaaatgcgttcattattccacagtgctcacttgctcttagtgccattattccacaatatctcccaccagttacttcaatggtgcttgaacattcattcgtgcaagcctacaggcttcaactagcgcttgatttgagcgttttacaacaaccaattgcccaattgcaacaacaattcctggctcatctaaacctacaaaccatcttatcgcaacagcaacaacagttttctt

SEQ ID NO: 299286 - DNA, 187 bp, Zea mays
caacaacctagtaacaggggcgatgtttacattaaagccctacttgcgtaggatcgcgcaggttttcgcagatgggatgcgtcccttattccacaggtgcctccaacaatcaacagccctattacagcagttaccctaggtgcatttattggcacaaaacattaaggggcagcaactaccaaaactt

SEQ ID NO: 299287 - DNA, 195 bp, Zea mays
caccaagtaaaaaacaaggggtatttttatagcaacaatagaggaactttgggccctattattgagcgcatcaaaagcctccatgatttcacaacatgtggtggtaacgcgacaattttccctaaatgctcacaagctcttatagcttccctttttcccccataccttccatcaattatagcttcagtatgtgaa

SEQ ID NO: 299288 - DNA, 196 bp, Zea mays
tacatgtgttgttaacactacaatttatcctcaatgctcacaagcatctatagcttacctattacccccataccttccatcaatgatagcttcagaatgtataaaacccatctcttcaaccctataagctccaacattcaatctcagcacgcaacatacctttatcacccatatttcaacaatcaccagccctatc

SEQ ID NO: 299289 - DNA, 338 bp, Zea mays
caaaaacataccaagcgattttttgtattttcaaccaaacaacaatggggaccgggatattatccttccttgcgcttctaacccttactgcgagctcaacaaatgcattcataataccacaatgcccacttgctccaagtatcattattacacatttcctcccatcaataacttcaatgggcttctaacacctagctgcgcaagcctataggctacaacaagcaattgcggctagcgttttacaacaaccaatttctcaattacaacaacaatccttggcacatttaacaatacaaaccatcgcatcgcaacagcatcaacattttctaccatcactg

SEQ ID NO: 299290 - DNA, 378 bp, Zea mays
atgttcttggtaacattcttagtggtttcttcttgcaattttctaagccattctcagtgaacgactacataaaggcgggatcaatagaaggcaaggtggttgaaataggactcacttctacttcattgatcaatccagaaaagctccctgtcatagtacccaactctttgttctccagtcagatgatagttaacagatcacgagctaattggcgagctagtgtgacaaagattcctatacgaattgaggatattgagaaggttccttctgcatcagaggatataaagactatgttaaggtctaatcaaaatgtgtccttggatagtgatgttccttactgctatctctcgagattggaaagttcatatggagagctca

SEQ ID NO: 299291 - DNA, 392 bp, Zea mays
gggagcccacgcttccggaaacataaaagggggaatacagtttcctctttagaccaccaatggcggccaagatagggtccatccttacgctcctggctctttctgcatgtgtggctaacgcgaccatttttcctcaatactaacaagctcctatagctgcccttcttcccccataccttccatcaatgaccgcttcagtatgtgaaaacccagcccttcaaccctacaggctccaacaagcaatcgcaacaagcaacttacctttatcacccctgttctttcaacaatcgccagccctatctttggtgcagtcattggtacaaaccatcagggcacaacagctgcagcaactcgtgctaccagtgatcagccaagtagctctggcaaacctt

SEQ ID NO: 299292 - DNA, 369 bp, Zea mays
tgctcacttgctcctagagccattattacatagatcctcccaccagttacttcaatgggctttgaacacctatctgtgcacgccaacatgcaacaacaagcgcttgcggcgagcgtcttacaacaaccaattgcccaattgcaacaacaattcttgccacatttaacaatacatgccatcacaacgcaacagcaacaacagttgctaccagcactgagccacctagtcatggtgaaccctgtcgtctacttgcaagagcagctgcttgcatacaacccacttgctctggcgaacgtagttgcaaaccagcaacaacaacagctacaacagcttctgccaacgctcatgcaaatagtcatggagaaccct

SEQ ID NO: 299293 - DNA, 385 bp, Zea mays
  unsure (1)..(385): unsure at all n locations
cgtccccggtgaggctnnttggcgtctcgtgtatttttatatcgggagccctgtagagctgtagctaagcttagagtaaggtttagagcagcactccaaatggctgagcaaggtggntggaccttccggtcagaccacggtcaccaagctcctccgaggccatgcgggccgccatggccgccgccgacgtcgacgacgacgtcctgggcgcggacccgaccgcgcatcgcttcgaggcggagatggccgcggtcatgggcaaggaagccacgctgttcgtgccgtcgggcaccatgggcaacctcatctccgtcctcgtgcactgcgacgtcaggggcagcgaggccattcttggcgacaactcgcacatccacgtctacgagaa

SEQ ID NO: 299294 - DNA, 347 bp, Zea mays
ttccttttttgccttctccacttttttttcaacagactctcccacacgaggagggcagcaggaagggagagatggcggcggtggatcacgagactcctacctgttcaagatggcctatcggaacagcggcgcgcaagtccaatatctttctcgcttacgcgcaaccacttctcctcgctccaagtcaccatcggcgtcgagttcccaccaagtccctgcagatggacggcaaaacaataaaggctcagatctgggacacagctgggcaggaaaggtaccgtgcaattacaagtgcttactaccgtggagccgtgggagcactgcttgtgtacgacatcacaaagagg

SEQ ID NO: 299295 - DNA, 336 bp, Zea mays
gaaacacaccatgcgaagcgcacttttaattatctaacaacaatggctaccaagatattatcccttcttgcgcttcttgcgctttttgcgagcgcaacaaatgcgtccattattccacaatgctcacttgctcctagttccattattccacagttcctcccaccagttacttcaatggccttcgaacacccagctgtgcaagcctattggctacaacatgcgtttgcggctagcgtcttacaacaactcattgcccaatttcaacaacaattccttggcacattttatattatatatcttttgtttcttctttaatctctactattttttattttt

SEQ ID NO: 299296 - DNA, 340 bp, Zea mays
  unsure (1)..(340): unsure at all n locations
ccatgaaggggctgatcgtggccgtggttttcttggcgctcgttgcaagcgccgcctccagtacaagcggcggttgtggctgccagacaccaccgtttcatctaccgcctccgttctatatgccgcctccgttctatctgccgccgcagcagcagccgcagccatggcaataccccactcaaccaccgcagctaagcccgtgccagcagttcggatcctgcggcgtcggcagcgtcggcagcccgttcctgggccagtgcgtcgagttcctgaggcaccagtgcagnccggcggcgacgccctacggctcgccacagtgccaggcgctgcagcagcagtg

SEQ ID NO: 299297 - DNA, 373 bp, Zea mays
gatcatcgactccagattgttcaacttgacaccatgaaagtgctgatcgcagaccttgctctcttggcgctggatgacagcgccgtctcacagaacaagcggcggatgaggctgtcatacaccacacgtgcatctacacgccttaccactatatgccgcctgctgcctatctgtcgcaacaacaacagccgcagccatggaaatacccgactgaaccacagcaggtaagtcagtgccagcagctcagactctgacgagtcagccgggtaggtagaccaagcctggctcagtgcgtgacgcaacagcggcaccagtgcagctaccaggagacggcgtataactcggcacagtgccaacaactacaacaacagtg

SEQ ID NO: 299298 - DNA, 393 bp, Zea mays
  unsure (1)..(393): unsure at all n locations
agccttccgaatgggccttggaccacctagctttgcaagcctacaggctacaacaagcgcttgcggcgagcgttttacaacaaccaattaaccaattgcaacaacaatccttggcacatctaaccatacaaaccatcgcaacacaacagcaacaacagttcctaccagcactgagccaactagatgtggtgnaccctgtcgcctacttgcaacagcaggtgcttgcattcaacccacttgctctggcaaacgtagctgcataccaacaacaacaacaattgcaacagtttttgccagcgctcagtcaactagccatggtgaaccctgccgcctacctacaacagcaacaactgcttttatttagccctntngttgtgggtaatgcacctacat

SEQ ID NO: 299299 - DNA, 210 bp, Zea mays
attcagaaacacaccaagcgaagtgttctagcaacaacctaacaaccatgggtaccaagattttattccttcttgcgcttcttggcgctttttgcgagcgcaccaaatgcgtccattattccacaatgctcacttgctcctagttccattattccacagttcctcccaccagttacttcaatggccttcgaacacccagctgtgcaagcc

SEQ ID NO: 299300 - DNA, 331 bp, Zea mays
  unsure (1)..(331): unsure at all n locations
accatgaaggggctgagcgttgcccttgctctcctggcggctcgctgcgagcgccgnctccagtacaagcggcggctgtggctgccagacaccaccgtttcatctaccgcctccgttctatatgccgcctccgttctatctgccgccgcagcagcagccgcagccatggcaataccccactcaaccaccgcagctaagcccgtgccagcagttcggatcctgcggcgtcggcagcgtcggcagcccgttcctgggccagtgcgtatagttcctgaggcaccagtgcagtccggcggntacgccctacggnttggcacagtgccatgcgctt

SEQ ID NO: 299301 - DNA, 372 bp, Zea mays
gcttagttcatggtcgcgacgtcgttgcgagacctgcgccagaccctgagcgctgtataaatggctgatggagaggacatgcagcctattgtctgccacaatggcactgcaatggccaaggctgggtcagctgtcgactatgcaccaagggctcgcctacctatgattgttgtacgatctcgccacactggtgtcacagtagggatgggacagaaggatgcctatgtggtccacaaggcacagaccaagagaggtatactaacgctcaagtatcccatcaagcatggaattgtcagcaactgggatgacatggagaaaacatggcataacactttctacaacctgcttacagctggcccagaggagcaccct

SEQ ID NO: 299302 - DNA, 347 bp, Zea mays
ctttatattatgttttttctccatcctacattttcccccaaaaaacatttcctgcggaggctttttaaacttatggcaccccaaaaacaaccaccattttccctcaatgctctcaagcaccaatatctaccctcctctcccccaaacctatcaccatctgtatcttctctatgtgaaaacccaattcttcaaccctacacgatccaacaggcaatctcaactttcatcttacctctatcaccctagaaccttcaacaatcatcaatccctattacaacagatacctttgttgcattcatagacacaaaaaattaatgcacaacatccacaacaacattgttctattc

SEQ ID NO: 299303 - DNA, 377 bp, Zea mays
agccttccgagaaagcacactagagagccaactttgttacccaaaatatctggcctacttatgcgccttggtatgcctgcaagtgctgctacagggaccattaccccgaacagctcgcaagctcgtatagatgcccttattgctccgtacctttcaccagacgtgtcaccagtatgggaaaacccaagtgtaaaaccctacatgaaacaacacgcgatcgaacatggcatcttacctggattacccccgttactacaacagtcattagaactattacaacagctacctcagcagcatccattggcacaaaacatgagggcacaacaactgcaacaacttgtgctagcacaccttgctgcctactctgaggaacagca

SEQ ID NO: 299304 - DNA, 331 bp, Zea mays
ttccattatttccacaagtttcctcccaaccagttacccttcaatggccccttcgaacaaacccagctgtgcaaggcctatatggctacaacaaggcgattggcggcgagcgtcttacaacaacccaattgcccaattgcaacaacaatccttggcacatctaacaatacaaaccatcgcaacgcaacagcaacaacagttcctaccagcactgagccacctagccatggtgaaccctgtcgcctacttgcaacagcagctgcttgcatccaacccacttgctctagcaaacgtagttgcaaaccagcaacaacaacaactgcaacagttt

SEQ ID NO: 299305 - DNA, 381 bp, Zea mays
gcaaagcggcagtgcgtagagaggatcttcgaacagaacagcatgaagatggtcatcgttctcgtcgtgtgcctggctctgtcagctgccagcgcctctgcaatgcagatgccctgcccctgcgcggggctgcagggcttgtacggcgctggcgccggcctgacgacgatgatgggcgccggcgggctgtacccctacgcggtgtacctgaggctgtcgcagagtagcccgttggcggcagctccctactactccgcttgtggatataaaatcgtttagtactattctgtttatggttcataaatttctttattcgatcacttttttgggctcacactatctattttatcaagatttttgtttctatgctatttttttttt

SEQ ID NO: 299306 - DNA, 258 bp, Zea mays
gctgcaggatggactggaggaccaatccccatatcggctggtaccggtgctgcggctccacctgcctgagctgctgccggcggtgtcccccactgaagaaactatgtgctgtagtatagccgctggctagctagctagttgagtcatttagcggcgatgattgagtaataatgtgtcacgcatcaccatgggtggcagtgtcagtgtgagcaatgacctgaatgaacaattgaaatgaaaagaaaaaagtattgttcc

SEQ ID NO: 299307 - DNA, 369 bp, Zea mays
  unsure (1)..(369): unsure at all n locations
atttggctttttagtctacaacaagtccccgcttccttcttgacacaacaacaatnttcttccgttctaccagcagtttgtggctaaccccgcaacccttttacaactgcaacagttgctgccctttgtccaacttgctttgacaaacccagcagccttctaccaacaacacatcattggcggtgccctcttttagattgcttattagttgtcattcaataatgaagttttttggctgatgtatnnnnccnnctnnnaatataacttnttatttttaggatgccacaatccttatccaaaaaactatttttttttaattcacaatttttttccatttcttttttttttctcccccttttttattttttt

SEQ ID NO: 299308 - DNA, 289 bp, Zea mays
agcaaatactactaccatttggccagctagctacaacaagccccgcttccttcttgacacaacaacaattgcttccgttctaccagcagtttgtggctaaccccgcaacccttttacaactgcaacagttgctgccctttgtccaacttgctttgacaaacccagcagccttctaccaacaacacatcattggcggtgccctcttttagattgcttattagttgtcattcaataatgaagttttttggctgatgtatgtggcctcctagaaataagaagttatatttcc

SEQ ID NO: 299309 - DNA, 252 bp, Zea mays
cttcgatgaaccaactagcacatttttttttcaatatgcaccaataatggctgccaaatattttgcctattatgccccttttctttctgcaagtgctgcttcggctagcatttttcctaatgttcacaagctcctatagcttccctttatcccccattcctctcaccagcgattttttattatatgtgaaaaaccaattctttctactcctactagatccaactttcaatttgtaattatgcattttacctt

SEQ ID NO: 299310 - DNA, 237 bp, Zea mays
cttgcaacagctacaattgcttcttttctacccacagaatgtggcaaacattgttgccttcttacaacaacaacaattgttgccatttagccaacatgctttgacgaatcctaccaccttattgcaaccgcccaccattggtggtgccatcttctagattttttatgatttatactgtaataataaagttctcatgctgatatgtgcgacctctcagtaataaagtattagagatct

SEQ ID NO: 299311 - DNA, 327 bp, Zea mays
acctgggtcaattagtagctctggcaaaccttttccctactcttcgaacaacaatttttcattcaacactgtctacactgaaccctgctgttatttgcagacaactattaccatttagccagctagctactgcctctctaacaacaacaactttttcattaaccaattggcgactgaccccgttgttatttgcagcagcaaatactaccaccatttaccagctagctacagcaagccggcttcctcttgacacaacaacagtgctgcgttctaccagcagttgcggctaaccccgcaccctttacaactacaacattgtgccctttg

SEQ ID NO: 299312 - DNA, 219 bp, Zea mays
tgccgttctacctgcacgctatgccttacgctggcaccctcttacaactgcaacaattgctgccattcaaccaacttgatttgtgaaacttaactgtgttgtaccatcaacgcatgattggtggtgccctgtttgagattgcttatgagttatagttcaataatgaagttttttggatgatggttgtggcgtcccagaaataagaaagcacatttctag

SEQ ID NO: 299313 - DNA, 214 bp, Zea mays
ccacatagtacgaccacgccagttttataaacacactatgataggcgctcaagatacaccttcacaacatgggtcccgaatatattaccccccctggccctcttggcccttttagggagcgcaacaattgcgtccattattccacagggctcacttgctctcagggccattattccacagtttccccccaccaagttactttcaatggggcttt

SEQ ID NO: 299314 - DNA, 379 bp, Zea mays
tccggatcgtcggacaaaacaacatggaaattggtatcggtctcgtcgggtgcctggctctgtcagctgccaacgcctctgcaatgcaaatgccctgcccctgggcggggctgcagggcttgtaccgggcttgggcccggctgacgacaattatgggcgccggcgggctgtacccctacgcggagtacctgaggcagccgcagtgcaacccgcttgcggcggcgccctactacgccgggtgtgggcagacgagcgccatgtaccagccgctccggcaacagtgctgccagcagcagatgaggatgatggacgtgcagtccgtcgcgcagcagctgcagatgatgatgcagcttgagcgtgccgctgccgccagcagcag

SEQ ID NO: 299315 - DNA, 255 bp, Zea mays
  unsure (1)..(255): unsure at all n locations
gggagacccactcttcctaatcaactacaactactnagagcttttatataccttgcagactactcttagcaacgggggatttttttattcaaccaacctgcttgcattgaactttgctgcttatttgcaacaacaactaccattcattcagctagctgttgactacctccaactatttctttcattcaaccaattggaagtcatatacctattcatattattcacatcagctacagcttccaccattcagtcaga

SEQ ID NO: 299316 - DNA, 378 bp, Zea mays
gtcgcacatatctactatactatactctaggaagcaaggacaccaccgccatggcagccaagatgcttgcattgttcgctctcctagctctttgtgcaagcgccactagtgcgacccatattccagggcacttgccaccagtcatgccattgggtaccatgaacccatgcatgcagtactgcatgatgcaacaggggcttgccagcttgatggcgtgtccgtccctgatgctgcagcaactgttggccttaccgcttcagacgatgccagtgatgatgccacagatgatgacgcctaacatgatgtcaccattgatgatgccgagcatgatgtcaccaatggtcttgccgagcatgatgtcgcaaatgatgatgccac

SEQ ID NO: 299317 - DNA, 337 bp, Zea mays
cagcattcataaacacaccaagcttttcgcactagcaacaacctaacaacaatggcttccatgatattatcctttcttgcgcttcttgcccttttagtgagcgcaacaaatgctttcattattccacagtgcttacttgctcctagtgccattatttcacattttcttccacctgttactttattgggcctttgtacatctcagccttgcaagcctacaggcttcaactagcgcttgctgctagttttttacatcatctaattgcccaattgcatcattctatccttggctcatttaaacctactatccatcgtatctcaacatctatatcattttt

SEQ ID NO: 299318 - DNA, 115 bp, Zea mays
caacatctactatacttcaccctggtagcaagggcaccacccgccttggagccaagaagcttgcattggtcgctctcctaactctttgtgcaagcgccactagtgcgacccatat

SEQ ID NO: 299319 - DNA, 375 bp, Zea mays
cacacatccttattaacacaccattctaagcgcacatgttacaacctaacaacaatggctaccaggagattattccttcttgcgcttcttgcgcttattgcgagcgcaacaaatgcgttcattattccacaatgctcacttgctcctagttccattattccacagttcctcgtaccatgtactttcaatggcctacgaacacccagctgttcaagcctataggctacaacaagcgattgcagttagcgttttacaacaaccaattgcccaattgcaactacaattcttggcacatctaacattacaaaccattgtaacgcaacatcaacaacaagttctaccagcactgatccatcttatccatggtgaaccctg

SEQ ID NO: 299320 - DNA, 236 bp, Zea mays
atttacacctttatattaacaacccgatcgacaccatgggagcgttgttcgtagccctcggggtcctaactatcactgtgagcgccacctgcacgcatacaagcggaggctgaggttgcaatgctcagtcgccggtacatctaccgttgccggagcatatgccacctatggctcacttgccaactacggagcatatcccaccggcagatcacctgccttcgccggtccacccgcca

SEQ ID NO: 299321 - DNA, 365 bp, Zea mays
cttttagattacatatgagatgtactcaacaatggtgccctcataccggcatgtgtttcctagaaataatcaatatattgattgagatttatcttgataaaaaaaaaaaaaaaaaaaaaaaaaaaaaaaaaaaaaaaaaaaaaaaaaaaaaaaaaaaaaaataaaaaaaaaaaaaaaaaaaaaaaaaccaaaaaaaaaaaaaaaaaaaaaaaaaaaaaaaaaaaaaaaaaaaaaaaaataaaggggaaaaaaaaaaaaaaaaaataaaaaaaaaaaaataaaataaaaggggggcctctttaaaaagaaaaaattttttttcccggtattattccaatataattttttttattggggtcccaaaa

SEQ ID NO: 299322 - DNA, 284 bp, Zea mays
cccacgcgtccgcccacgcgtttgtctactcgttcgattgagaccaactagcaacatataaagcacaatagtgtaccaacaatggcagccaaaatattctgcttccttatgctccttggtctttctgcaagtgatgctaccgtaaccatttttccacaatgctcacaagctcctatagtttcccttcatctctcatacttctcatcagcggtgtctttaatgtgtgaaaactccaattgtcaaccctacaggatccaacaggcaattcgctccaggcattttac

SEQ ID NO: 299323 - DNA, 391 bp, Zea mays
gcaaggatctgggaaatcagctcattctatagggaaataatgtggggaagaatacaaagaagacggggcggatatactatactcaagtggccactacaccagaaggtgaaccggtgatgatgggtacgttcctcgtggccagtcaccctgtaattattctttttgattctggtgcttcacatacatttattagcaagacatttgtggagcaacatcacatttcatgtcatgaattcaaagaagggtttaaaattcattcacttgggggacacatttttactagagaagtggcctatcaagtgccagtaacaatggccgaacggaactttcctgctaacatgattgttctgaaaggccagggtatagatgtaattttgggtatgaattggtt

SEQ ID NO: 299324 - DNA, 365 bp, Zea mays
cggacgcgtgggcttgcatcctattttgttagtctaatggaccgacaatggcgggcaagaatattttgcttccttatgctccttaggctccctgcaagctgggctaccgcacccattgtcccacattgctcacaagcttctacattctcatttcgttgcgcatacttatactcagcggtgtacttaatgcactatagcccaagctcataactttacaagtttcatcaagccctaaggtcgtgcagcttacctttggtaatgctgtttctccaatcacgtttgatacaaccaaagtacttgacagttattgcagcagcaatgatgtcatgttcttaggcaaattgagccacaatacattcaccaaa

SEQ ID NO: 299325 - DNA, 136 bp, Zea mays
gaccaacttgcagcataggatgctcattagtgtaccaacaaaggcagtcaaaatatttagcctccttatgctggtcggtcttactgcaagtgctgataccgtgaccattttccggcaccgctagctagctcctata

SEQ ID NO: 299326 - DNA, 390 bp, Zea mays
gcgtgacaaagccgctgcaaatgattctatatacctcaatcctcaagctcatgagagagtacttggaatcattctgggaggcggggtttggactcgagcgctcctacctacacagaaatgccacaatgctcacaacaacatcctgtgtccaccgtcagccgatggatatcaatgcccaactatgcaatcctacatggcacatgaggccatacaagcaagcatcttacagtcattagcattaaccctccaacaaccatatgctctattgcaacagccatccttagtgcatctgtatcttcaaagaatcgcggcacaacaactacaacaacagttgctaccaacaatcaatcaaggtgttgcagcgaaccttgctggttaccttcagcaaca

SEQ ID NO: 299327 - DNA, 392 bp, Zea mays
ggacgtcagcctagcaattagctcatcgactccagattggagaactcgacaccatgaaggtgctgatcgttgcccttgctctcctggcgctcgctgcgagcgccgcctccagtacaagcggcggctgtggctgccagacaccaccgtttcatctaccgcctccgttctatatgccgcctccgttctatctgccgccgcagcagcagccgcagccatggcaataccccactcaaccaccgcagctaagcccgtgccagcagttcggatcctgcggcgtcggcagcgtcggcagcccgttcctgggccagtgcgtcgagttcctgaggcaccagtgcagcccggcggcgacgccctacggctcggcacagtgccaggcgcttcaacagcagtgc

SEQ ID NO: 299328 - DNA, 393 bp, Zea mays
attcaaaaacacacaaagggaagtgtactagcaacttcctaacaacaatggctaccaagatattagccctccttgcgctcctttccctttcagtgagcgcaacaactgcattcattattccacaatgctcacttgctcctaatgccattattccacagttcctcccatcagttacatcaatgggcatcgaacaccctattgtgcaagcctataggctacaacaagcgcttgcggcgagcgtcttacaacaaccgtttgcccaattacaacaacaatccttggcacatctaaccatacaaaccatcgcaacacaactagagcaacagtttgtgcccgcattgagccaactagccgcagtgaaccctgtctcctacttgcaacagcaactgcttg

SEQ ID NO: 299329 - DNA, 314 bp, Zea mays
  unsure (1)..(314): unsure at all n locations
aagcaacatagaaagtggaancctgnttcatcaatagagcaacaatggagaccaggatattttccctccttatgctccttgctctttctacatgtgttgctaacgcgacaattttccctcaatgctcacaagctcctatagcttccctttttcccccataccttccatcaatttatagcttcagtatgtgaaaacccagctcttcaaccatataggctttaacatgcaatctcattaagcaacatacctttatcgcccttgttgtgtcaacaatcgccagtcctatttttggtgcagttctttggttcaaacca

SEQ ID NO: 299330 - DNA, 160 bp, Zea mays
gcggctttgtcacgcttaggattatattgttcggactagataagacccctgggcgattaatcgtgccaagcctgcagcgccatcggtagccaactatagactgattgatattcctgtcagcaatagtctcaacagcaacatatccaagatctatgtgcta

SEQ ID NO: 299331 - DNA, 223 bp, Zea mays
tgccgttctatctgcacgctttgtttaacgctggcaccctcttacaactggggcaatttctgacattcaaccaacttgctttgacaaacccaacagcgttctaccaacaacccatcattggtggtgccctcttttagattgcttatgagttatagttcaataatgaagttttttggatgatgtttgcggcttcccagaaataagaaagtacatttctagattc

SEQ ID NO: 299332 - DNA, 336 bp, Zea mays
aatcagctcatcgaccacagtttgtttaactcgacaccatgaaggtgctgatcggtgcccttgctatactggcgctcgctgcgagcgccgcctccagtacaagcggcggctgtggctgccagacaccaccgtttcatctaccgcctccgttctatatgccgcctccgctctatctgccgccgcagcagcagccgcagccatggcaataccccactcaaccaccgcagctaaacccgtgccagcagttcagatcctgcggtgtatgcagctgtagcagaccgttcctgggccagtgcgtcgagttcctgaggcaccaacgcatactggcggcgacac

SEQ ID NO: 299333 - DNA, 432 bp, Zea mays
  unsure (1)..(432): unsure at all n locations
gtcgactcctacgccgtccgtcagctattcaagaaacccacaccaattttttttctgctactagcaacaactctaacaacgaagtggctactcaagatattagcgcctcctgtgcgccttcttggcccttttagttgagcgcaacaanatgctgttcattgattccacagatgcttcacttgctcctaggtgcctattattccacatgttcctcccaccagttacttcaatgggcttcgaacatccagccgggcaagcctacangctacaactagcgcttgcggcgagcgtcttacaacaaccaattgcccaattgcaacaacaatccttggnacatntaaacctacaaaccatcgcaacgcaacagcaacaacagtttctgccatcactgagccacctagccgtggtgaaccctgtcgcctacttgcaaca

SEQ ID NO: 299334 - DNA, 330 bp, Zea mays
  unsure (1)..(330): unsure at all n locations
ntccgggctttgcagcaccaattaacgtttattctacttccacgagcagcaggaaggaacaccgatacgacagccatgcaggagtgttcgctcggttgcctctcgcatgtgctggctactcgctgccgagcgccacctccacgcatacaagcggtagctgtggctgtcatccaccgccgccggatcatctaccgccgtcggtgcatgtgccacctacggttcaactgtcaacgacggagcatgtaacaccggcgggccacctgccgtcgtcagtccagctgctaccacaggtacatgtgctatcaccagatcatctgtcggcgccaccat

SEQ ID NO: 299335 - DNA, 321 bp, Zea mays
gtccgaatcccggtcgaccacgctccgcactggcacctaaaaggcccattagttcccacaatgcagccaaaatatttgcctcttatgctcctggcctttctgaagggctgttacgggaccattttcccgaaatgctccaggctctatagcttccctcttccccgaacctttaccagcggggcttgggatgggaaaccccaattctcaaccctaaggatccacaggcaatcacagctggcatcttaccttatcacccttgttcctccaccaatcatagccctattacatcagttaccttggtgccattattggcacaaaaca

SEQ ID NO: 299336 - DNA, 242 bp, Zea mays
cgtcggagaccagcttttaacatatatagttgttttttcgacaaaacaatagagcgggcgggggcttaccaagatattttccctatcttccttccttgctctatctacatgtgttgctaacacatctattcttaatgcttacaagacaagcttctatagctttcctttttcccccatacccttcatcaattatagcttcagtatgtgaaaacccagctcttcaaccatataggcttcaacaa

SEQ ID NO: 299337 - DNA, 374 bp, Zea mays
accacgcgtccgtccacgcgtccgattagctttatctacttcagagcgcagaagaacccgatcgacaccatgagggtgttgctcgttgccctcgctctcctggctctcgctgcgagcgccacctccacgcatacaagcggcggctgcggctgccagccaccgccgccggttcatctaccgccgccggtgcatttgccaccttcggttcacctgccaccttcggtgcattttccaacggcggtgcacctggcggcggcggtgcaactgtcaacggcggttcatagtgccccgccgggttatatgtcgccgccaccatgccactaccctactcaaccgccccgggcttagactcatatccagccacacccatgccc

SEQ ID NO: 299338 - DNA, 370 bp, Zea mays
ccaggcgaggctctttaccaccaccctaccaccattggttaccaggatttaatccttcctgggccttttgggccttttggcaggcgcaccaaatgcgtcaatatttcaacaatgctaactggctccaggtcccatattacccagtttcttccaccagttacttaaagggcttcgaacacccagctgtgcagcctataggctacaacaagcaattgcggcgagcgtcttacaacaaccaatttcccagttgcaacaacaatccttggcacatctaacaatacaaaccatcgcaacgcaacagcaacaacaattcctaccagcactgagccacctagccatggtgaaccctgccgcctacttgcaacagcag

SEQ ID NO: 299339 - DNA, 392 bp, Zea mays
cgtccggaatccagtggcaccattggggcacttttggcggccaaaatatgccccatccttaggcacctggctctttctgaatgtgatgctaacgcgaccatatgtccttaatactaacaagctcctatagctgcccttctgtacgcataccgtccatcaatgaccgcttcagtctgtgaaaacgcagcccgtcaacgctacatgctccaacaagcaatggcaacaagcaactgacctttataacccctgttctttcaacaatcgccagccctatctttggtgcagtcattggtacaaaccatgacggcacagacagctgcagtagactcgtgctaccagtgatcagccaagtagctctggcaaacctttctccctactctcagcaacaacaa

SEQ ID NO: 299340 - DNA, 452 bp, Zea mays
  unsure (1)..(452): unsure at all n locations
cggaatnntcccgggtcggacccanncgcgtccgctccgtacccttctcaaaccagcggttgtctttcttggtatgnntgaaaaccccannattcttcaacccctacagtgatnnccaacaggcnagatcacagctggcnnatcttacctttatcanncccttgttcctccaacannatcatcagccctattacatcagttancctttggtgcatttattggcacaaaacatcagggcacaacaactacaacaacttgtgctagcaaaccttgctgcctactctcagcaacagcagtttcttccattcaaccaactagctgcattgaatctgcttcttatttgcaacaacaacaactaccattcagccagctacctgctgcctacccccagcaatttcttccattcaaccaactggcagcattgaactctcctgcttatttacagcagcaac

SEQ ID NO: 299341 - DNA, 313 bp, Zea mays
  unsure (1)..(313): unsure at all n locations
caactagcaacatagaaagcacaatagtgtaccaacaatggcagccaaaatatttggcctccttatgctccttggtctttctgcaagtgctgctacggcgaccattttcccacaatgctcacaagctcctatagcttcccttcttccccgacctctaccacgggtctcggatggaaaccattttaactatagaccacagcaccagtggtctacttatacctgtctcacatataccatacagagtacttggcattatgccaaacataggcacactcacactgtctncaacctgtgctcttagacacagtctcat

SEQ ID NO: 299342 - DNA, 417 bp, Zea mays
  unsure (1)..(417): unsure at all n locations
tccgattttcagcattacagaaacacactcaagtcgtaagcgcacttagccaacacacctaacacacaatgggctacacaagatattaggccctccttgccgcttcttgccncttttagtggagcgcaacaaaatgcgttcatttattccaaacagtgctcacttgctcctagtgccattattccacagttcctcccaccagttacttcaatgggcttcgaacatccagccgtgcaagcctacaggctacaactagcgcttgcggcgagcgtcttacaacaaccaattgcccattgcaacaacaatccttggcacatctaaacctacaaaccatcgcaacgcaacagcaacaacagtttctgccatcactgagccacctagccgtggtgaaccctgtcgcctacttgcaacagcagc

SEQ ID NO: 299343 - DNA, 419 bp, Zea mays
cgcattcagaaaacacacgcaagccgaagttcatttatgcaacaaacctaacaacaatgggctacccaggatattaatcccttccttgcggcttcttgcgcctttttgcgagccgccaacaaatgcgttcaattattccacaaaatgctcacttgctccaagtttccattattacacacgttcctcccaccagttacccttcaatgggcttcgaacacccagctgtgcaagcctataggctacaacaagcaattgcggcgagcgtcttacaacaaccaatttcccagttgcaacacaatccttggcacatctaacaatacaaaccatcgcaacgcaacagcaacaacaattcctaccagcactgagccacctagccatggtgaaccctgccgcctacttgcaacagcagttgcttgcat

SEQ ID NO: 299344 - DNA, 210 bp, Zea mays
aagaatcttgaaatgtactttcttatttctgggaagccgcaaacatcagacaaaaaactttattattgaactataactcataagaaatctaaaagagggcaccctcttacaactgcaacaattgctgccattcaaccaacttgctttgacaaacctagcacagttcttcctacaacccaacattggtggtgccccgttctagattgctta

SEQ ID NO: 299345 - DNA, 394 bp, Zea mays
catacctctcaccagcgatgtatgggtggaagaagacaaccaatacgattaccgggagggtttcatcaggtgatcgcagcaggcatcttacctttatcacccttgttccttcaacaatcataagccctattacagcagttacctttggtgcattaattggcacaaaacatcatggcacaacaactacaacaactcgtgctagcaaaccttgctgcctactatcagcaacagcagttacctttggtgcatttgttggcacaaaacatcagggccaacaactacaacaactcgtgctagcaaaccttgctggcttactttaacaacaacagtttctgccattcaaccaactagattcattgaacctttgtgcttatttgcagcaaccacaacttct

SEQ ID NO: 299346 - DNA, 378 bp, Zea mays
cagactagcaattagctcatggactccagattggagaactccacaccatgaaggtgctgatcgatgcccttgctctcctggcgctcgctgcgagcgccgcctgcagtacaagcggcggatgtggctgtcagacaccaccggttcatctaccgtctccgttctatatgccgcctccgttctatctggcgtcgcagcagcagccgcagccatggtaatacctcactcaaccaccgcagctaagcccgtgccagcagaccggatcctgcggcgtcggcagagtcggcagccctatcctgggccagtgcgtcgagctcctgaggcaccagagcagaccggcagcaacgccctacggctgcgcacagtgccaggcgcttcagc

SEQ ID NO: 299347 - DNA, 429 bp, Zea mays
  unsure (1)..(429): unsure at all n locations
ggaatnncccgggntcggacccacgccgnntccgattttgagnccattcagaaaccacaccaagctgaagcttacctagcnaacgacttaacaacaagtggctactcaagatattagccctccttgcgcttcttgccctttttgtgagcgcaacaaatgcgttcattattccacaatgctcacttgctcctagtgccattataccacagttcctccgaccagttacttcaatgggcttcgaacacctagctgtgcaagcctacaggctacaacaagcgcttgcggcgagcgtcttacaacaaccaattaaccaattgcaacaacaatccttggcacatctaaccatacaaaccatcgcaacacaacagcaacaacagttcctaccagcactgagccaactagatgtggtgaaccctgtcgcctacttgc

SEQ ID NO: 299348 - DNA, 387 bp, Zea mays
  unsure (1)..(387): unsure at all n locations
aatggattcaatgacttcttgggtcactgtgaaaatatagatggttttttggaaggaaccttcaataaaaggcaaacatcgcggatggttagacctgtggaaaaagagagatacaaggagaacgagggggatagcgatcctgagaaagagagatacaaggaaagcaaaaattctgaaagagtattgaccttcaattctaaggaaggagcagctcatgaagctagtacattccctagcaaagagaagtataacttatgcaaaccaatatcagagcttgatctatcaaattgtcagcggtgcactccaagttaccgacttttgcctaaaaattatccagtaccttctgcaagcaacaggactgacactgaagcttncgtgctgaatgat

SEQ ID NO: 299349 - DNA, 385 bp, Zea mays
ttttgagcattcaaaaacacacaaagggaagtgcactagcaacttcctaacaacaatggctaccaagatattagccctccttgcgctcctttccctttcagtgagcgcaacaactgcattcattattccacaatgctcacttgctcctaatgccattattccacagttcctcccatcagttacatcaatgggcatcgaacaccctattgtgcaagcctataggctacaacaagcgcttgcggcgagcgtcttacaacaaccgtttgcccaattacaacaacaatccttggcacatctaaccatacaaaccatcgcaacacaactagagcaacagtttgtgcccgcattgagccaactagccgcagtgaaccctgtctcctacttg

SEQ ID NO: 299350 - DNA, 409 bp, Zea mays
ggaaggaccgggcggaccgacccatgcgttccaccgcctacctctgcctgtcatttttagagtgagagtgaggcaccgagtgggagacaaggggaaatggggaagggagcgcaagggagcgatgcggcggcggcgggcggcgaggtggacgagaacatggcggcgtggctggttgccaagaacaccctcaagatcatgcccttcaagctcccgcccgtcggcccttatgatgtccgcgtgcgcatgaaggcagtggggatttgcggcagcgatgtgcactacctaagggagatgcgcatcgcgcacttcgtggtgaaggagccgatggtgatcgggcacgagtgcgcgggcgtggtcgaggaggtgggcgccggcgtgacgcacctgtccgtgggcgaccgcgtggcgc

SEQ ID NO: 299351 - DNA, 351 bp, Zea mays
  unsure (1)..(351): unsure at all n locations
gcaaagcggcagngcgnagagaggttcgncgaacagaacagcangaagaggggcagcgnncncgncgngggccnggcncngncagctgccagcgccccngcaangcagangcccngccccngcgcggggcngcagggcnnggacggcgccggcgccggcccgacgacgangangggcgccggcgggcngnaccccnacgcggagnaccngaggcagccgcagngcaacccgcnggcggcggcgccccacnacgccgggnnggggcagacgagcgccangnaccagccgcnccggcaacagngcngccagcagcagangagganganggacgngcagnccgncgcgcagcag

SEQ ID NO: 299352 - DNA, 282 bp, Zea mays
  unsure (1)..(282): unsure at all n locations
ggggaatccagnagcaacattagatcaacaatggagaccaagatattttccctccttatgctccttgctctttctacatgtgttgctaacgcgacaattttccctcaatgctcacaagctcctatggctcccttttttccccaatcccttcaataaataatggcttaagattgggaaacccaagttttcaacccatttaggttcaaccaggcattggaagaaggcaccatcctttaatggccttggtggggcaaccaatcgccggccttattttgggggcag

SEQ ID NO: 299353 - DNA, 206 bp, Zea mays
gggcatgagccacctgggggggacctgccacctggggagcatctcccaccggcggtccacgtgccgacaccatgctactaccttacaaaaccgccccggtctgagcctaatccagagccacacctatgcccgtgccaacagccgaatacaagcccgtgccagatggagggaacctgcggggttggaagcacccagatcctgggcca

SEQ ID NO: 299354 - DNA, 377 bp, Zea mays
aagcaagttggacaaagggcattatttgttgtagttgtaagagggttgcggggttagccgcaaactgctggtagaaaggcagcaactcgtgctacctgtgatcaaccaagtagctctggcaaacctttctccctactctcagcaacaacaatttcttccattcaaccaactgtctacattgaaccgtgctgcttatttgcagcaacaactattaccattcagccagctagctactgcctactctcagcaacaacaacttcttccatttaaccaattggccgcactgaaccccgctgcttatttgcagcagcaaatactactaccatttagccagctagctgcagcaagccgtgcttcctttttgcacagcaacaatt

SEQ ID NO: 299355 - DNA, 349 bp, Zea mays
cacccatcaaccgccgcagccgcggtaatggcagcgccgacgacgctgcgctcggggggggagcgggcgctcgcgcgctgcaaggagctcgtgagagggcggtggccgcagcggcgtctggggacgacgtccgcggctgtgacagctagcaaaaagaataaggatgaggaggatgagggagccgcgttccacctgccgccgccggtccacctgccaccgccggtccatgtgacgtcgccggttcatttttcgtcgccaccatgccactaccctacttaaccggcccgggcttaggctcattcccagccacacccatgcccgtgccaacagccgcattcaagcccgtgcc

SEQ ID NO: 299356 - DNA, 404 bp, Zea mays
cggaacggaatggccggaccgacccacgcgtactagcgacaccaaatagcacaattttgtaccaataatggcagccaaaatattttgcctcattatgctccttggtctttctgcaagtgctgctacggcgagcattttcccgcaatgctcacaagctcctatagcttcccttcttcccccatacctctcaccagcgatgtcttcagtatgtgaaaatccaattcttctaccctacaggatccaacaggcaatcgcagcaggcatcttacctttatcacccttgttcctccaacaatcatcagccctattacagcagttacctttggtgcatttattggcacaaaacatcagggcacaacaactacaacaactcgtgctagcaaaccttgctgcctactctcagc

SEQ ID NO: 299357 - DNA, 371 bp, Zea mays
attcaaatctcgcggctgtcaccgtagagaggtattgttgtgagcattgtggaatacccaactatacaatcctacaggctacaagaggccatcacagcaagcatcttacggtcgttagcattgactgtccaacaaccatatgccctattgcaacaaccatccttagtgaatctatatctccaaagaatcgcagcacaacaactacaacagcagttgcttccaacaatcaatcaagtagttgcagcgaaccttgctgcttacctccagcaacaacaatttcttccattcaatcaactagctggggtgaaccttgctgcttacttgcaggcacaacagctactaccattcaaccaacttgtcaggagccctgc

SEQ ID NO: 299358 - DNA, 242 bp, Zea mays
gatcaacaaagcggcagagcgtattgaggctcgacaaacacaacagcatgcagatggttatcgctcttgatgcgcgcctgtctctgtacgctggcagctcctgtgacatgcatatgccaatgctcacaagctgctatagctgccttttctcccccatacgcttccattaactatagctccagtatgtgaaaacccagcttttcaaccatataggcttcaacaagcaatcgttgcaagcaaca

SEQ ID NO: 299359 - DNA, 373 bp, Zea mays
ggactcgtgagattttgagcatattattcacaccaagcgaaacacactagcggggacttatcaacaatggctgccaatataaaaaaagcactgccgcttattgacctttttgtaaggaaggatgacaaacaacaacaccacgggggggggacttgttaagagagacaaaatttaattgcggggtcgggcaaggtaaaaatttttttttgggggtggagaaaaacaaagaggaggagcgggtgaaacaacaagagcggaggaggaacaagggcgacgaccgcataaaagagggctcgaaagaggatgagcgcgagcgcgagcaggagaaggaggagaagcagaaggaccggcggtcgtacgtgttcgaccggcg

SEQ ID NO: 299360 - DNA, 113 bp, Zea mays
caacaactactaccatacagcctgttagctggtgtgagccctgctacctgggggacactaccacaattgtggccgttctaccatcacgctgcgcctaacgctggcaccctttt

SEQ ID NO: 299361 - DNA, 362 bp, Zea mays
gcaattagctaatcgactccagattggagatctcgacaccatgaaggtgctgatcgttgcccttgctctcctggcgctcgctgcgagcgccgcctccagtacaagcggcggctgtggctgccagacaccaccgtttcatctaccgcctccgttctatatgccggctccgttctatctgccgccgcagcagcagccgcaggcatggcaataccccactgaaccaccggagctaagcccgcgccagcagttcggatcctgcggccgtcgcagcgtgggcagtccgttcctgggccagtgcgtcgagttcctgaggcaccagtgcagcccggcggcgacgccctacggctcgccacagtgccagg

SEQ ID NO: 299362 - DNA, 349 bp, Zea mays
attttgagcattcagaaactactttttgaagcacatagcaacaacctaacagcaatggctaccaagatattatccctccttgcgcttcttgcgctttttgcgagcgcaacaaatgcgtcattattcacaatgctacttgctgaagttccatattacacagtcctcccaccagttacttaatgggcttcgaacacccagctggcaagcctatggctcaacaagcattgcgggagcgtcttacaacaaccaatttcccagctgaacatcaatccttggcacatctaacaatacaaaccatcgcaacgcatcagcatcaacaatttctaccagcactgagccacctagccat

SEQ ID NO: 299363 - DNA, 182 bp, Zea mays
ccccatacctctaccagcggtgtcttcaatgtgtgaagaagggaagctataggagcttgtgagcattgtgggaaaatgagcgcggtagcaacacttgcagcaagaccaaggagcataagctcatgtcgtttacctcctttaccattcctctcaccagaggtgtattgcatcaagaaaaaaca

SEQ ID NO: 299364 - DNA, 355 bp, Zea mays
gttccggatttcggttcgcgatttaattccgtttagtggtcgtgctcgtcgtgggttttcgatccgcgaagtggcccggcccagcccaacccaacccagctgcccagctaccgcaccaacccctgtggcgtctccgctgccattccgccctactactgattcatgatatttgggaaatctcctctatccatccctctctatctatatatgtaataatgcagtaagacgacacacattatcatgtgtggtatgaccaataatatatgcatcataataaagttttggttttaaaaaaaaaaaaaataaaataaataaataaatataatatataatatataatttattttaatttttt

SEQ ID NO: 299365 - DNA, 192 bp, Zea mays
tcaggcaacatagaaagcacaatagtgttctcaacattttcagctaaaaaaaaccgcctacatatgctccttggtctttatgcaagtgctgcttccgcgaccatttgccgacaatgctcacaagctactatagcttccattgcttactcgttccttttaccaacatgtgcttagtgctgtgaaaacccaatt

SEQ ID NO: 299366 - DNA, 309 bp, Zea mays
  unsure (1)..(309): unsure at all n locations
ccggccgtcgcgtaccgctcctccttggcagcggcgacggcgtcggcggtccacgagagagcagcgcccgcctcagcctccgtgctcccggacaccctcgaaaggggctccgacgcgtaccatcgcaacacggncgccgtcggcgggttgctctccgacctgcgcgcccgngtctcccaggtgctgcgcgggggaggcgccgaggctgtgaggcttaatgcggcgcgggttaagctgctccccctctaccgtattttcctactgttccacccttttgcattcttgctagtgatggtgcaaattgcaatt

SEQ ID NO: 299367 - DNA, 263 bp, Zea mays
gccacacgcaacagacaagagcggctttctattttagaactcgacaaccttaaggggccgatcgttgcccttgctttactggcgctcgctgcgagcgccggcttcagtacaagccgcagctgtggctgtgcacacacacgtttatataccgcctccgttctatatgccgcctacagtctatctgccgccgcatcagcacccgcagccatggcaataccccactcaaccaccgcagctaagcccgggccagcagtttggatcct

SEQ ID NO: 299368 - DNA, 356 bp, Zea mays
attatataaaccatctagctttaatgatagcacaacaggctaccaacaagggggggcaatatatattgcctacttatgctccttgctatttgtgctatgtgctgctactgcgaccatttacccgcaatgctcacaagctactatatcttatatttttccttcgtacctcataccatctatatctgacctttgtaaaaacccaaaacttaaaccttacagcatccaacaggcaacaacagatggcatcatacctttatcacccttgatccttcaacaatcatcagtcctattacatatgttacctttggtgaatgtaacgtaccaaaacatcacgtcacaatcacttacatcaactt

SEQ ID NO: 299369 - DNA, 385 bp, Zea mays
  unsure (1)..(385): unsure at all n locations
cccacgcgtccgcccacgcgtccgtccacgcgtccgcccacgcgtccgcaacaatacctctctccggcgacagccgtgggatttcaatacccaactatacaatcctacatggtacaagaggccatccaagcaagcatcttacggtcattagcattaaccctccaacaaccatatgctctattgcaacagccatccttagtgcatctgtatctccaaagaatcgcggcacaacaactacaacaacagttgctaccaacaatcaatcaagtagttgcagcgaaccttgctgcttacctccagcaacaacagttttttccattcaatcaactagatggngtgaaccctgctatctacttgcaggcacaacagctactaccatttaacc

SEQ ID NO: 299370 - DNA, 332 bp, Zea mays
aacaagcaacatataaagttgaatttagtagcaacaatagagcaacaatggcggccaatatattttccatccttatgctccttgctctttctgcatgtgttgctaacgcgaccattttttctcaatactcacaagctcctatagctgcccttcttcccccataccttccatcaatgaccgtttcagtatgtgaaaaccctatccttcaaccctacaggctccaacaagcaatcgcaacaagcaatttacctttatcacccctgtactattttcaattgccagtcctatctttggttcattcattggtacaaaccattattgtacaatatttt

SEQ ID NO: 299371 - DNA, 329 bp, Zea mays
cccagttgcaacaacaatccttggtatatctaacaatacaaaccatcgcaacggggcagtaacaacaattcctaccagcactgatccacctagccatggtgaaccctgccgcctacttgcaacagcagttgcttgcatcaaacccacttgctctggcaaacgtagtttgcaaaccagtcacaacaacagttgcatcatgtttttgccatcgctcattcaacttgccatggtgaaccctgccgcctacctacaatagtaacatctgtttttatctatcccgcttgctgtggccattgcacctacataccttgaacaacatttgttgcaac

SEQ ID NO: 299372 - DNA, 323 bp, Zea mays
  unsure (1)..(323): unsure at all n locations
gaccattagctctttctactccagagcgcagaagaacccgatcgacaccgtgagggcgttgtacagggcccaagctctcctgcctctcgatgcgagcgccacctncacgcatacaagcggcagatgcagctgacagccaccggcgtcagaacatctacagtcggcaagcatttgccacctccagttcacctgccacctacggagcatctcttaccgccggtgcacctgacgccaacaggccacctgccaccgccggtccaagcaccggcgcagatagcacagcaactgacagccatgtgcgggctgcagcataagactccatg

SEQ ID NO: 299373 - DNA, 267 bp, Zea mays
tcgagcattcagaaacacaccatttttttttttattatcatcaacctaacaacagggggtaccaagatattatccctccttgcgcttcttgcgctttttgcgagcgcaacatatgcgttcattattccacaatgctcacttgttccatgttcctattttacacagttacttttaccagattctttaatgggcttctaacacccagctgtgctagcttattggtttacaacatgcaattgcggcgagcgtttttacaacaaccaattt

SEQ ID NO: 299374 - DNA, 417 bp, Zea mays
  unsure (1)..(417): unsure at all n locations
caaacgcgtctcggcaacctatagaaaggcatccaatagtgtactcaactaanttggcagccannaaatattttnngcttccttagtgctcnncttggtctttctgcaagtgccctgctaccgcaacctattttcccacaantgctcacaagnctcctatnagcttcctttcttcccccatacctctcaccagcggtgtcttcagtatgtgaaaacccaattcttcaaccctacaggatccaacaggcaatcgcagcaggcatcttacctttatcacccttgttcctccaacaaccgtcagccctattacagcagttacctttggtgcatttgttggcacaaaacatcaaggcacaacaactacaacaacttgtgctaggaaaccttgctgcctactctcagcaacagcagtttctt

SEQ ID NO: 299375 - DNA, 439 bp, Zea mays
  unsure (1)..(439): unsure at all n locations
ggaatnncccgggntcggacccacgccccgtccgcggaccgnnngtgggattttgagggcatttagatatactacaccaagcgaagcacaattagtcaaccaactctaactaaccaatggctacnncaagatattatccctccttggcgcttcttggcgctttttggcgagcgcaacanaatgcgttcannttattcctacaatgctcacttgctccaagnttccattattacacnagttcctcccaccagttacttcaatgggcttcgaacacccagctgtgcaagcctataggctacaacaagcaattgcggcgagcgtcttacaacaaccaatttcccagttgcaacaacaatccttggcacatctaacaatacaaaccatcgcaacgcaacagcaacaacaattcctaccagcactgagccacctagccatggtg

SEQ ID NO: 299376 - DNA, 321 bp, Zea mays
ggaccatctagcgtcatatcaagttgcattcattgggcaccatagagcaacaatggcggccacgatattatgcctcctgatgctcctggatgtgtttgtatgtgttgctaacgcgacaattgctcctaaatgcttacaggctcctttagatgcccttatttccccataccttccatcaaagattgcttcaacacgtgaaaacccagctataaagccctacaggctacagcaagcagtcgcataaggcaacataccttgatcacacatgtttcaacactagccaggcctatgttaggggcacacatcgttacagaccatcag

SEQ ID NO: 299377 - DNA, 245 bp, Zea mays
atcagggcacagcagctgctttaatttttgctacctgtgaccaaccaagtggcgggggcaaacttttatccctactcgcagcaacaacattatctatcattcaaccaactgactacattgaaccgagctgcttattcgcattatacaactatttcctttcacccacctagctactgcctactattagcaacatcaacatcctaccagtaaccaattggctcgtacttcaccccgctgcttatctg

SEQ ID NO: 299378 - DNA, 140 bp, Zea mays
taactagaacatacatagtttttttcactagcaacatactatcaccaatgggagccaatattttagccctcctagccctcctagctcttttagcaagcgctgcttcctatacttttattatacaatgctaacaacaatac

SEQ ID NO: 299379 - DNA, 275 bp, Zea mays
caagcgtccgattttcagcattagaaacacacctttcgttgtgcactagcaacaacctaacaacaatggctaccaagatattaggcctccttgcgcttattggccttttagtgagcgcaacaaatgcgttcattatttcacagtgctcacttgctcctagtgccattattccacagttcctcccaccagttactttaatgggctttgaacatccagccgtgcaagccttctggctacaactagcgcttgcggggagcgtcttacaacaaccaatt

SEQ ID NO: 299380 - DNA, 384 bp, Zea mays
caacaactactacattcagccagcttgctggtgtgagccctgctaccttcttgacacaaccacagttgttgccgttctaccagcacgttgcgcctaacgctggcaccctcttacaactgcaacaattgctgccattcaaccaacttgctttgacaaacccagcagtgttctaccaacaacccatcattggtggtgccctcttttagatttcttatgagttatagttcaataataaaagctttttatctgatgatttgtggctttcctatgatataaaaaaagtttcagtttctaagattcaatatacatttattttttttgaacgatttttttatttatattattgttttatggaggttttcacataatttatatatatttttg

SEQ ID NO: 299381 - DNA, 159 bp, Zea mays
ctatacttactctaggaagtttggttcaccaccgccagggcagccatcatgcttgcattgttcgctatcttagcctcttgtgcatgcgccactagtgctaccctatattttcagggcactcgctaccatactttccaatgggtaccattaccccatgca

SEQ ID NO: 299382 - DNA, 231 bp, Zea mays
cggacgcggggttcagcattcagttacacaccaagcgaagcgcactagcaacaacctatcatcaatggctaccaagatattagccctccttgcgcttcttgcccttttagtgagcgcaacaaatgcgttcattattccacagtgctcacttgctcctagtgccattattccacagttactcccaccagttactttaatgggctttgaacatccattcgtgcaagcctacag

SEQ ID NO: 299383 - DNA, 222 bp, Zea mays
  unsure (1)..(222): unsure at all n locations
gaccaangcgttcgtttacaattatctaatctactccttttttttattaaaaacccgaacgacaccatgagggggttgctcgttgccctcgctctcctggctctcgctgcgagcgccacctccacgcatacaagtcggcggttgctggtgccagccaccgccgcccgttcattctaccgccgccagtgcatctgccacctccggttacctgccaccttcgga

SEQ ID NO: 299384 - DNA, 244 bp, Zea mays
attttgagcatcagaaacacacctttgctattcacattagcaacaacctaacaacaatggctaccaagatattatccctccttgcgcttcttgcgctttttgcgagcgcaacaaatgcgttcattattccacattgctcacttgctccaagttccattatttacacagttccttccaccaggtacttcaatgggcttctgaacacccatctgtgcaagcctatttgcttcatacaagcaaattg

SEQ ID NO: 299385 - DNA, 369 bp, Zea mays
tccgtgacaaagatcgagttgcctttaagaagagagatgaacgccgacttcggcgcgcccaaggagctcgcgggaggcctgcagcagcggcggagtacggtgacgcgaccacaaccatcgatcccacctgtgcccaagccgtcgcgcaggccttcccgcacacctttggccagccgctcgtcagcttcgtcgcgccggccgccggcgccggcgccgttgaggagcgccacccgatcagggtgggcgtggtgttctctgggaggcagtcgccgggagggcacaacgtcgtctggggcctccatgacgcacttaaagcctacaatcctcaaagcttgctctacgggattcgcggtggcacggagggactgt

SEQ ID NO: 299386 - DNA, 437 bp, Zea mays
gaccggggcgggacccaccgcgtccggcaaagcggcatggctgtaaagagggatctttctaactagacacagcttgtaagtatggtcatcggttcttctgtcgtgtgccctggctcatgtcagcatgcacagcgcctctgcaatgcattatgccctgcccctgtcgcggggcatgcagggactcgtacggtcgctggctgccggccctgacgacgatgatgtggcgccggcggtgctgtaccccctaccgcggagtaccttgaggcatgccgcagttgcatgcccgcttggcgggcggcgcctctactactgccgggttgtgtggcagacgatgcgccatgtaccatgccgctccggcaaccagtgctgtcagcaggcagatgaggatgatggacgtgcagtccgtcgcgcagcagctgcagatgatgatgcagctt

SEQ ID NO: 299387 - DNA, 298 bp, Zea mays
agaaaggattagaaaaaggaatgatccatggacatgatctccggcagcactgcagcaacattaacaccccacatcaaccaacaggcggtgatgttgtcattccccattataaaggaggaagctagggacccaaagcagacacgagccatgccccaaataggtggcagtggggagctgtagccgaggccgtatttacctgaggctgctcaagtgttcatgctgagactcctacaacaccaagtttagctactacaacaattatagcatgtttcacccacgctttcgtttttcaaggctt

SEQ ID NO: 299388 - DNA, 346 bp, Zea mays
agaccaactagcatcatacaaagcacaattgtgtgccaccaatggcagccaaaacatgaagcttccatatgctcctaggactatctgcaagcgctgctaccgtagccatattgccacaatgctcacaagctcctatagatagatttgttgctgcatacctgtgaccagccgagtctccagtctgtgaaaacccaattcttcaaccctacaggatccaacaggccatcgcagcaggcatcttacctttatgacgcttgttcctccaacacccgagagtcctattacagcacttacctttggcgcattcgttggcgcaatagcataaagcacaacaactacagcaact

SEQ ID NO: 299389 - DNA, 230 bp, Zea mays
  unsure (1)..(230): unsure at all n locations
tgagcattcanaatcacaccaagtttatttcactagcaacaacctaacaacaggggcggcttttatattatccctccttgctctacttgcgctttttgcgagcgcaacaaatgcgtacattatttcacaatgcttacttgttcctagttccattattctacagaatctccctccatttaacatattggttttctaacacttttctttgcatccctttttttctacaacca

SEQ ID NO: 299390 - DNA, 313 bp, Zea mays
atcgagaccaactagcaacatagttagcacaatacagtaccaccaatggcgggggaaatattttgcctccttatgctcctagctctttctgcaagtgctgctacagcgaccattttcccacaatgctcacaagctcctatatctttcctccttcccccgtacctctcaccagcggtgtacttccgtttgtgaaaacccaaatctttaaccctatatgatccatcaagcaatctcatcttgcatctaacctttatcacccatttttctccaacaaacatcagtcctataacagtatttccctttggagcattta

SEQ ID NO: 299391 - DNA, 179 bp, Zea mays
cggacgcgtgggtgggtcttcttatcattagctatatctactccagagcgcaggggaaccctatcgacaccatgagggtgttgctcgctgccctctctctcctggatctcgatttgagcgccacctacacgcatacaagcttttgttgcggctgccagctttcgtcgacagtttttttt

SEQ ID NO: 299392 - DNA, 393 bp, Zea mays
cccgggcggaccaaggcgtccggggcacaccacctgcagcaactcgtgcttcctgggatcaaccaagtagctctggcaggcctttctccctactctcagcaacaacaatttcttccattcaaccaactgtctacattgaaccgtgctgcttatttgcagcaacaactattaccattcagccagctagctactgcctactctcagcaacaacaacttcttccatttaaccaattggccgcactgaaccccgctgcttatttgcagcagcaaatactactaccatttagccagctagctgcagcaagccgtgcttccttcttgacacagcaacagttgctgcctttctaccagcagattgcggctaaccccgcaacccttttacaactacaacaa

SEQ ID NO: 299393 - DNA, 289 bp, Zea mays
  unsure (1)..(289): unsure at all n locations
cgtncggcacaatagtgtaccaacaacggcttcctaaatatancgcctccttatgctcggtggtctttcttcaagagctgctaccgcaaccattttcccgaaatgctcgcaagctcctatagcttcccgccttccaccgtacctctcaccagcggcgatttaggcatgtgaaaacccaattcttcaaccctacaggatccaacacgcaatcacagttggcatcttacctttatcatccttgttccttcaacaataatcagccctattacatcagttacctttggtgcat

SEQ ID NO: 299394 - DNA, 212 bp, Zea mays
ggcgtggcgtcctcctatctcgctcatagcgtcccctagcttccattcactggccgtacttttacatcgtcgtgcctgaaaaaacccactccccacctatctaaaccgccttgcctgacatacccctttcggcacctaacgtaattgccaagaggcccgtgaccgttttccttcccaacatttgttcagcctaaacggcgattgataccctc

SEQ ID NO: 299395 - DNA, 399 bp, Zea mays
  unsure (1)..(399): unsure at all n locations
ggtccgacccacgcgtnccgcaacctagcaacatacgaaagcacaatatttttaccaacaatgcgcagccaaaatatgtgtgcctccttatgctcgcttggtatttcntgcaagtgcctgctacgcgcgaccattnttcccgcaatgctcacaagctcctatagcttcccttcttcccccgtacctctcaccagcggtgtcttcggtatgtgaaaacccaattcttcaaccctacaggatccaacaggcaatcgcagctggcatcttacctttatcacccttgttcctccaacaatcatcagccctattacagcagttacctttggtgcatttattggcacaaaacatcagggcacaacaactacaacaacttgtgctagcaaaccttgctgcctactc

SEQ ID NO: 299396 - DNA, 312 bp, Zea mays
caaagcggcagtgcgtatagaggatcgttgatacagaacagcatgaagatggtcgtcggtctcgtcgtgtgcctggctctgtcagctgccagcgcctctgcaatgcagatgccctgcccctgcgcggggctgcagggctagtacggcgctggcgccggcctgacgacgatgatgggcgccggcgggctgtacccctacgcggagtacctgatgcaaccggattgcagcccgctggcggcggcgccctactacgccgggtgtgggcagacgagcgccatgtaccaaccgctccggcgacagtgctgccagcat

SEQ ID NO: 299397 - DNA, 324 bp, Zea mays
agctcatccactccagattggagaatgctacaccatgaacgagctgatcggtggccgtgctctcctggagctcgctgcgagcgccgcctccagttcaagcggcggctgcggctgccagacaccaccgtttcatctaccgcctccgttctatatgccgcctccgttctatctgccgccgcagcagcagccgaagccatggcaataccccactcaaccacccgcattgagcccgcgccagctgtttggatcctgcggcgtcggcagctgcagcagcccgctcctgggccactgcgtcgagttcctgaggcaccacgtgtcgcaacg

SEQ ID NO: 299398 - DNA, 270 bp, Zea mays
  unsure (1)..(270): unsure at all n locations
agcgcattcacaaacacacctttcttagcgcactaactacaacctaacagcggtggctaccaagatatcatccctccctgcgctctttgcgcattttgcgagcgcaacaaatgcgtccatcannacacaaagctcactagatcctagttccattattccacagcccctcccaccagatactttaatggcctgagaacacccatctgtgcatgtctataggttacaacaatcgattgcggcgagcctctcacaacaaccaattgcccaatt

SEQ ID NO: 299399 - DNA, 317 bp, Zea mays
aacgagctccataaaaagcgtttttcagtgccaacaatacagccacaatggagaccatgatattttcccttcttatgctccgtgctttgtctacatgtgttgctaacgcgacaattttaccttaatgctcacaagcttcgatagcttcccttttttccccatacctttcatcaattatagcttaagtgtgtgaaaacccagctctgtatccatataggctttaacaagcaatcttagcgggcaacatacctttatcgcccttgttgtgtcaacaatcgacagccctatctttggtgcatttattggcacaaaccatc

SEQ ID NO: 299400 - DNA, 271 bp, Zea mays
tctagatcgcgagcggccgccctttttttatttttttcatttcaatggttcattcaggccaatggtcatgacgattccacccatgttcttacagcaaccctttgttggtgctgcattctagatagaaatatttgtgtgtgtccgaataatgagttgacatgccatcgcgtgtgactcattattaacaataaaacaagtttcctcttattatcttctaaaggaaaaagaccatatttagaggctttgaaactgaagtagcttgggttactaa

SEQ ID NO: 299401 - DNA, 347 bp, Zea mays
ggaaggacaggccggaccgacgccacgcgatccggagaccaactagcagcatcgttaagtctcaatcatgttccaactgtggatggctctatgatgtgggcctggctgtgtcagctgccagcgcctctgcaatgcagatgccctgcccctgcgcggggctgcaaggcttgtacggcgctggcgcctgcctgacgacgatgatgggcgccggcgggctgtacccctacacagagtacctgaagcagccgcagtgcaacccggtggcggcggcgccctactacgccgggtgtgggcagacgagcgccatgtaccagccgctccggccacagtgctgccagcagcagatg

SEQ ID NO: 299402 - DNA, 348 bp, Zea mays
aggactcgtgggcaactagcaacatatattgcacaatagtgtaccaacaatggggggcgaaatattatggctccttatgctccttggtctttctgcaagtgctgctcgacgaccattatcccacaatgctgacaagctcctatagcttcccttcttcccccgtacctttcaccagcggtgcttcgttatgtgaaaacccaattcttcaaccctataggatccaacaggcaatcgcagctggcatcttacctttatcacccttgttcctccaacaatcatcagccctattacagcagttacctttggtgcatttattggcacaaaacatcagggtacaacaactacaac

SEQ ID NO: 299403 - DNA, 356 bp, Zea mays
acacgtccgcacattttgcaaatggaatggtattttttgtggcaaacattgctgctttcttgagcaacaacatttgttgccattttacccacaggttgtgggaaacattaagccttcttgcaacagcaacaattgctaccattctacccacagaatgtggcaaacattgttgccttcttacaacacaacaattgttgccatttagccaacatgctttgacgaatcctaccaccttattgcaaccgcccaccattggtggtgccatcttctagattttttatgatttatactgtaataataaagttctcatgctgatatgtgcgacctctcagtaataaagtattagagatctatat

SEQ ID NO: 299404 - DNA, 339 bp, Zea mays
aattagctcatcgactccagattggagaactcgacaccatgaaggtgctgatcggtggccttgctctcctggcgctcgctgcgagcgccgcctccagtacaagcgcggctgtggctgccagacaccaccgtttcatctaccgcctccgttctatatgccgcctccgttctatctgccgcgcagcagcagccgcagccatggcaataccccactcaaccaccgcagctaagcccgtgccagcagttcggatcctgcggcgtctgcagcgtctgcagcccgttcctgggccagtgcgttaagttcctgaggcaccagtgcagcccggcggtgacgccttac

SEQ ID NO: 299405 - DNA, 370 bp, Zea mays
taccgaacggaagggcgggccagagccaccggcggcagtgagtccagaggatcgtctaacataacagcatgaagatggtcatcggtctgggcgtgtgcctggctctgtcagctgccagcgcctctgcaatgcagatgcctgcccctgcgcggggctgcagggcttgtacggcgctggcgccggcctgacgacgatgatgggcgccggcgggtgtacccctacgcggagtacctgaggcagccgcagtgcagcccgctggcggaggcgccctactacgccgggtgtgggcagacgagcgccatgtaccagccgttccggcagcagagctgccagcattagatgcagttgaccaactagcagcattgaactc

SEQ ID NO: 299406 - DNA, 143 bp, Zea mays
gaacaagcaacatagaacgtggaatttagtagcaacaatagctcaacaaaggcggccaggatatattccctgcggatgctccttgctcgtgctgcatgcgatgctaacgcgacaatgatccctaaatgctaacaagcacctat

SEQ ID NO: 299407 - DNA, 360 bp, Zea mays
gttttgagcattcagaaacacacttttcgcagctacctaacaacgactgaacaggaatggctaccaagatattatccctccttgcgcttcttgccctttttgcgagcacaacatatgtcaacattattacacaatgctcacttgcttctagtgccattataccacatttactgcgaccagatacttcaatggccttcgaacacatagctgtgcaagcctacaggctacaacaagcgcttgcagagagtgttttacaacaaccaaataatcaattgcaccaacaatggcttggcacattgaaccatacaaaccatgcgcacacaacagcaacaacagttcctaccagcactgagccaacta

SEQ ID NO: 299408 - DNA, 274 bp, Zea mays
ggggcgcgccacgcgtacgcctacctacttacttacttacccgtcactgttcaacgcgagtgcggcgacaggggggggcacacttccactggcttgaccgctctcggccctcggccccgcacgcgtggccgcaaggcgaggaggcaaaggcggcggacgggaatggagccagcagggacaccaaggaggcctttgcgcggatctacaagacgctcaacgaggagctgctcaccgacccgagctttgagttcaccgcggagtgacgccacaggat

SEQ ID NO: 299409 - DNA, 316 bp, Zea mays
aaaaaacgggccgacccacacgtccgaaccaagcaacataaaacgtcaaatttattttcaccaatacaacaacaacgacggccaggatattaaccctcctgaagctcctcactatttctgcatgacaacactaacgcgacaattttccctaaatgctaacaagctcctatagcttccattattcccacataccttccatcaattatttctacagtatacgaaaacccagctcttcaaccctatacgctacaacacgcaatcgcaccaagcaacatacatttatcacccttgtttcaacaattgccagacctatctt

SEQ ID NO: 299410 - DNA, 390 bp, Zea mays
cacccgatcagcaacatggaaagcacaattttgtttcaacaaacacaacaaaaagaaggggctgatttatcttgcagggtgcctccctatcacatcttccagaacctttgcaatacaaatgccatacccctgcatagcgttctatgttttgtactacccttgaccacgcctgactacaataatggaaaccccaagtcttgacccctacacgatgcacctggcacaggcataacgcatcctacatttatgagcaccctacatcaaccaacctcaacttcaacaacctcagctacccaaaccttgctgaatactcttaacaacatcaagttcttccattcaaccaacttgctgtattgaactctgctgcttatttgcaacaacaattaccat

SEQ ID NO: 299411 - DNA, 446 bp, Zea mays
  unsure (1)..(446): unsure at all n locations
cgacgccacgaccgtccgcaaccaagggcaacgatatgaaagttggtaatctctatgtagcacacaaatatgacgcaaccaagtggcggagcgcaacgatattattcgcctgcgcttatcgcatccattcgcttcttttcatgcaatgatgttcgcttaacccgcgaccaannttttcccttcaatctgctcaccaacgcgtcctatacgcttaccctttacttccctccataccccttctcatcaatgatacgcttttcacgtatgtgaaaaaccccacgctctttcaacccctatatggctccaacccaagcaatcgcagcaatgcaaccaatacctttatcancccttgtttcaacacatctgccagctctatctttggtgcagtcattggtacaaaccatcagggcacaagagctgcagcaactcgtgctacctgtgatcaa

SEQ ID NO: 299412 - DNA, 255 bp, Zea mays
caacaagcaacataaaacgtccaatttattttcaacaatagaacaacaacggcggccaggatatattaccgcctgagcctccttcctctttccccatgcaacactaacgcgacaattctcactcaatgctaacaatctcctatagctcccattcttcccccataccttccatcaattattgcttcactatatgaaaacccagctctttaaccctatagccttcaacacgcaatttcaccaagcaacataccttta

SEQ ID NO: 299413 - DNA, 409 bp, Zea mays
aaagaaagggggggccagagcgaccggttcagacttcaaaaacacaccagttatattcactaccaacaacctaacaacgggcggggccaaaatattagggggactcgctctacttgaccttaaagtgagcgcaacaaattcgttcattattccacagggctcacttgctcctacagccattattccacaccatctaccaccagttacttgaatgtgctgacatcattcaaccgtgcaagcctacaggctacaactagcgcttgcggcgagcgtcttacaacaaccaattgcccaattgcaacaacaatccttggcacatctaaacctacaaaccatcgtaacgcaacagcaacaacagtgtctgccatcactgagccacctagccgtggtgaaccctgtcgcctacttg

SEQ ID NO: 299414 - DNA, 349 bp, Zea mays
  unsure (1)..(349): unsure at all n locations
gggaaaaaaccgggccgaccgcacccatccgaaccaagcaacatcaaacgtacaatttattttcaccaataaaccaccaacgccggcggggatattttaactcctgatgctcctnactctttctgcatgaaaccctaacgcgacaatttttactcaatgctcacaagctcctatagcttccctacttaccccataccttccatcaatgatagctacagtatgtgaaaacccagctcttcaaccctatatgctccaacaagcaatcgcagcaagcaacatacctttatcacccttgttacaacaatcgccagccctatctttggtgcatacatttctactcaccatcaac

SEQ ID NO: 299415 - DNA, 313 bp, Zea mays
  unsure (1)..(313): unsure at all n locations
agtaggaaaggttcgggcgacccacacgtccggcaacatagaaagcacaattttgtttcaacaatcgcaaccaaaanaagggggtggcttatattccggggtgtctctgcaagggctgctaccacaaccattttaccacaatgctcacaagcttctatagctttctttgttttgcaatacctttgaccagcgctgtctacaatatgtgaaaacccaattcttgaaccctacaggatgcaacaggcgaacgcagcatgcatcttacctttatcagccttgttcttccaacaaccgtgggcccacatacaccatg

SEQ ID NO: 299416 - DNA, 385 bp, Zea mays
ccgggggcgacccacgacgtccggaccggcgatgtcgccggcctgtatcatttcgacttccatgcaccctacgctgcggggcgggggtgttccccactggggaaactatgtgctgtagtatagccgctggctagctagctagttgagtcatttagcggcgatgattgagtaataatgtgtcacgcatcaccatgggtggcagtgtcagtgtgagcaatgacctgaatgaacaattgaaatgaaatgcaacaaaaaaaaatagaaaaaaacatactaataacaaccaatcgtctaacattaacaacacaccatttggggggctggacttagaaccacatccctttatgtcacaacaacaacacttaggggcggcccctttggggga

SEQ ID NO: 299417 - DNA, 389 bp, Zea mays
caacaagcaacataaaacgtggaattcagtttcaacaatagagcaacaacggcggccgggatatatttgcgtgtgatgctccttgctctttctgcatgtcattgctaacgcgacaatgtttcctcaatgctcacaagctcctatagcttcccttcttcccccataccttccatcaatgattgctacagtatgcgaaaacccagctctgcaaccctataggctccaacacgcaatctcagccagcaacataccgttatcacccttgttccaacaattgccagccctatctttggagcagtcattggttcaaaccatcatggcacagtagcatgagtaactcgtgctacctgtgatcaaccaagtagctatggcaaacctttctacctact

SEQ ID NO: 299418 - DNA, 238 bp, Zea mays
tttccctcaatcgctaacaagctccttatagattcccaattcttcccccataccttgccatcaatgaattgctacagtataacgaaaacccacctcttcaaccctatacgctacaacacgcaatcgcacccagcatcatacctttatcacccttgtttcaacaatacccaaccctatcttttgttcagacattggttcaaaccatcatggcacactatctttaccaactcttgctacc

SEQ ID NO: 299419 - DNA, 406 bp, Zea mays
aaaaaggggcgggccgagcggaccaaaacacaccaggcgaaccgcactattactatccaaccaccattggctaccaaggggtgatccttccttgcgctggtggccctttttgcgagcgcaacaaatgcgtccattattccacaatgctcacttgctcctagttccattattccacagttcctcccaccagttacttcaatggccttcgaacacccagctgtgcaagcctataggctacaacaagcgattgcggcgagcgtcttacaacaaccaattgcccaattgcaacaacaatccttggcacatctaacaatacaaaccatcgcaacgcaacagcaacaacagtttctaccagcactgagccacctagccatggtgaaccctgtcgcctacttgcaacagcagc

SEQ ID NO: 299420 - DNA, 338 bp, Zea mays
aaaaacggggcgacccacgcgtacgcaacaagcaacatcaaacgtacaatttattatcaacaataaaccaacaacaacggcggggatattataaatcctgatgctccttactcaatctgcatgcaacgctaaagctacaattattactcaatgctgacaacctcctatagcttacattatttcacaataccttccatcaatgactgctaaagtatacgaaaacccagctcttcaaccctatacgctacaacaagcaatctcagccagcaacatacatttatcacccttcgatcaacaatagccagccttatctttggtgccatcacagactcaaacca

SEQ ID NO: 299421 - DNA, 287 bp, Zea mays
catcaatcaacatcaaacgtttatttctatagcaacaacaaaccaacagcggcggctaatataaaagcccgcctcacccacctcaatctattttcatgaaacactaacaatacaattattattcaatactcacaacctcctataaattccattattacaccataccttccatcaattactgcaatagactatgaaaacccaccttttcaaccctataggctccaacatgcaatctcagaaagcatcatacaattaccacccttcgtaatacaataaccatccttatc

SEQ ID NO: 299422 - DNA, 425 bp, Zea mays
  unsure (1)..(425): unsure at all n locations
gaaanggaaggggccggggcgagcccacgcggtccgtgaacctctgctcgcttaatatttctgttttctaacaactacctaccatatcagcccggctagcgtgactgactacgccccggcaatcttcttccattcaaccaactcggcagcattgaacatctcatgcttatgtacaacaacaacaactactaccattcagccagctagctgctgtgagccctgctgccttcttgacacagcaacatttgttgccgttctacctgcacactgcgcctaacgttggcaccctcttacaactgcaacaattgctgccattcgaccaacttgctttgacaaacccagcaatgttctaccaacaacccatcattggtggtgccctcttttagattgcttatgagttatagttcaataataaaggttttttt

SEQ ID NO: 299423 - DNA, 292 bp, Zea mays
caacaagcaacataaaaagtggaatttagtttcaacaatagaacaacaacgggggccgggatatattcgctgcggatgctcctcgctctttctgcatgcaacgctaacgcgacaatgctccctcaacgctcacaagctcctataggttccattctttcctcgataccttccatcaacgattgcttaagtctgtgaaaacccacctctgcaaccctatacgctccaacacgcaatcgtagcaagcaacatacctttatcacccttgttgcaacaatcgccagccctatctttg

SEQ ID NO: 299424 - DNA, 415 bp, Zea mays
gaacggaaacgggcggggcgacccacacgtccgccagaaataagaaatgtccttttttttttgtggcaagccacaaaacatcgggggggaccaaatacaggggggggagctatcaaaccttgctgtctactctaagcaacaccagttacctatggggcatttgatgacacaaaacatcagggcacaccacctacaacaactggagctagcaaaccttgctgtctactctaacaaacaacagcatctgacattcaaccaactagctgcattgaactctgttgcttatttgcacaaccaacaactactaccattcaggcagctagctactgcctaccatcggtaatatcttacattcaaccaactggcaacattgaactttaatgcttatagccaccaacaccaactactaccattc

SEQ ID NO: 299425 - DNA, 206 bp, Zea mays
  unsure (1)..(206): unsure at all n locations
gaaaggacggggcgggccgacccatacgtagaccacaaggcattataaaaaggttttttccatngccaccaaagaagcaacaggggggaccaaaaaatttgcggtcctaatgctctttgttctttttacatgtgtggctaacgcgccaattttccttaaatgctcacacgctcctttagctcccatttttccccaataccttccat

SEQ ID NO: 299426 - DNA, 405 bp, Zea mays
  unsure (1)..(405): unsure at all n locations
gaaaaaccggggcggcccacacgtacggcggcagtgcgtatagaggatcgttttacttgaacagcatgaagatggncatcgtgcggcgtttgtgcctggcgtcggtcagctgccagcgcctctgcaatgcagatgccctgcccctgcgcggggctgcagggcttgtacggcgctggcgccggcctgacgacgatgatgggcgccggcgggctgtacccctacgcggagtacctgaggcagccgcagtgcagcccgctggcggcggcgccctactacgccgggtgtgggcagacgagcgccatgtaccagccgctccggcaacagtgctgccagcagcagatgaggacgatggacgtgcaatccgtcgcgcagcagctgcaaatgatgatgcagcttgagcgtgcc

SEQ ID NO: 299427 - DNA, 359 bp, Zea mays
attttcagcattcagaaacattccattcgaagcgcactagcaacaacctggcaggaatggataccaagatggtagccctacttgcgcttcttgcccttttagtgagcgcaacaaatgcgttcattattccacagtgctcacttgctcctagtgccattattccacagttcctcccaccagttacttcaatgggcttcgaacatccagccgtgcaagcctacaggctacaactagcgcttgcggcgagcgtcttacaacaaccaattgcccaattgcaacaacaatccttggcacatctaaacctacaaaccatcgtaacgcaacagcaacaacaggtttttgccataactgagccacct

SEQ ID NO: 299428 - DNA, 209 bp, Zea mays
  unsure (1)..(209): unsure at all n locations
gcattcataaacacaccaagctattctttttcaacaacttcacaacaatggctggaaaataaaaagctggttgcacttattacactttatgngagcgcaacaaatacattcattattccacaatgcttactttctcctaaatccattataacacagttccttccaccaattactttaattactttcaaacacttatctcatcaaaccta

SEQ ID NO: 299429 - DNA, 357 bp, Zea mays
ctcatcgactccagattggagaactttacaccatgaaggtgctgatcgatgcccgtgggctcctggcgctcgctgcgagcgccgcctccagtacaagcggcggctgtggctgccagacaccaccgtttcatctaccgcctccgttctatatgccgcctccgttctatctgccgccgcagcagcagccgcagccatggcaataccccactcaaccaccgcagctaagcccgtgccagcagttcggatcctgcggcgtcggcagcgtcggcagaccgttcctgggccagtgcgtcgagttcctgaggcaccagtgcagcccggcggcgacgccctacggctcgccacagtgccaggcgc

SEQ ID NO: 299430 - DNA, 292 bp, Zea mays
ggaaaaaacggggcgggccacacgtacgcaacaagcaacatagaaagtacaattttgttccaacaatagcacaacaaagacggcggggatatatacactccgtgcgctccccaatttttgttcatgtaacgcttacgccacaattatccctcaatgctaacacgctcctatatcttccattcttcccccataccttccatcaaatatatcttaaccctatgaatacccacctcttcatccctctcggcttcaacacgcaattcacgattccaacatacctttattaccctcc

SEQ ID NO: 299431 - DNA, 299 bp, Zea mays
ccacgcgtccggaccatgcaacatttaacgtgaaattttttttcaccaatagaccaccaacggcggcgaggatatttaccctgcggatgctcctcactctttctgcatgaaacgataacgcgacaatgatcactcaatgctgacaagctcctatagcttccattcttccaccataccttccatcaatgattgctacagtctgtgaaaacccagctcttcaaccctataggctacaacacgcaatcgcagcaagcaacatacctttatcacccttcgtttaacaatagccagccctatct

SEQ ID NO: 299432 - DNA, 311 bp, Zea mays
tttttaccaacaaccaaacaacaagggcgggcaaattataaagcctgcttgcccttcttgcgctttaagcgagcgcaacaaatacattcattattcacacaatgataacttgctacaagttccattattacacaatacctcccaccaattactgcaataggcttcgaacacccagctgtgcaagcctataggctacaacaagcaattgcggcgagcgtcatacaacaaccaactttcgagttgcaacaacaatccttgtcacatgtgacaatacaaaccctcgcaactcagcagcaacaacatgtcctacc

SEQ ID NO: 299433 - DNA, 252 bp, Zea mays
tgccttctgcgcctccatttttgcttctgtcccttgcaagttcaatctcgcctgcgaccatgggtaaagggaagtcccacatcaacattgtggttattggccatgtcgactctggcatgtcgaccaccacaggacaccttatctacaagctttgatgcattgacatgcgtgtgatcgtaatgttcttgtaggattttctttttatgaacttttttgtctataatatacttcttttttttatattttattttt

SEQ ID NO: 299434 - DNA, 334 bp, Zea mays
caactagcaacatagaaagcacaattttgttccaacaatggcagaccaaatatgggggggacttatgctcggcggacgctccgcaagtgttgttaccgcaaccattatcccacaatgctcacaagatgctatcaatttcctacttcccccatacctctcaccaaccttgcatcaaatgtgtgaaaaccctattgataaacccttctggatccatctggccttcaacacaccaatgaccattgcgacatatagttactacctaccctcaaacatttgttacatttaaccaactagcagcattgaactctgatgattatttacacaaagaacaact

SEQ ID NO: 299435 - DNA, 391 bp, Zea mays
gacccacgacgtcccggaacattgcaacatacacacgacagaatttttgtatttaaccaacagcactaacaacaatcggggacggacaaaatcaccgcctgcttcgtccttaatgttgttttaaccgcaacgctacaaaccacaatgattactccatactgataacttcctacatcttccattcttacaccataccttccatcaattacttcaaaaccctatgaacacccagttctgcaaccctataggctacaacacgcaattgccgctagcgacatacatttaccaacttcccagaaacaataacaatatttatctcatttgccattataaactctaaccatgattcaccatcaacactacttatcacatctaagctgcttacatcatg

SEQ ID NO: 299436 - DNA, 310 bp, Zea mays
gaccatacataaacacaccatgttttttacataagcaacatcctaacaacgggggctaccatacatattatcgcctcctcgcgcttactcctcttttctcgacacgcaacaaatgcgttcattattcacacaatgatcacttgctccatatccattattacacagacactctcaccagttacttcaacgcgctccaaacacccacctgcgcaagcctatagtttacatcaagcatttgcgcccagctttttacaacaaccaatttcccaggtgcaacaacaatgcttggcacatctaacaatacaaacca

SEQ ID NO: 299437 - DNA, 236 bp, Zea mays
gagcatccaaaaacacaccactcgatgtacattaccaacaacctaacaacggtggctaccaaaatattatggctcctaacactattgcgctatctccaaacacaacaaattcattcaatattccacaatgcttacttgcttcatttttcattattacacagtaccttccaccaaatactttaatatgctcctaacactcattttttgctaacctataagctttaactatctaattt

SEQ ID NO: 299438 - DNA, 198 bp, Zea mays
caactagcaacatagaaagcacaattgtgtaccaacaatggcagccaaaggatgttgcctcctaatgctcgtgggccttcctcaaagtcctgttccgccaccaattttccaccattcctaccagcttccatataccttcctttttaccccgtaccttttaccaaccgtgtgttttggatttgaaaacccaatttttta

SEQ ID NO: 299439 - DNA, 155 bp, Zea mays
gacggatgcatatactccagagcgcacaacaacccaatcgacaccatgagggagctgctcgcgggccactgtctgctggctcacgatgccagcaccaccaacacgcatacaagccgcagctgaagctgccagccaccgacgccggttcatctacc

SEQ ID NO: 299440 - DNA, 299 bp, Zea mays
ccatcgcacaaatcctcttcctcgagttctcctcaaccaaattcaaagtcacagcggcgagactctcggcgatgtctggccgcggcaagggcgggaagggtctgggcaagggcggcgccaagcgccaccgcaaggtgctgcgtgacaacatccagggcatcaccaagccggcgatccgcaggttggcgaggaggggcggcgtcaagcgcatctccgggctcatctacgaggagacccgcggcgtgctcaagatcttcctcgagaacgtcatccgcgacgccgtcacctacaccgagcac

SEQ ID NO: 299441 - DNA, 200 bp, Zea mays
gcgaggcaaaagcattgccaccacagacagcgcgcgcttcaaggccttttttttttgagaggacggggacgagaggaggagatggcggtcacgatcacgtgggtgaaggcgaggcagatcttcgacagccgcggctaccccaccgtcgaggtggacgtgggccttagcgacggcagctacgcgaggggggccgtacccag

SEQ ID NO: 299442 - DNA, 177 bp, Zea mays
ccaatctacaagcgcccctctccctctctctctctctcttcgccgtccgaagctcggccggccaatctaatcgacacctcgccgacatggtccgcaagttcttcgtcagtggcaactggaaatgcaatggaaccacaaatcaggtcgagaacattgtcaaaaccctgaatgaatgac

SEQ ID NO: 299443 - DNA, 176 bp, Zea mays
gatgaaaagtgcctgagggatgccaacatggacaacatcaccgaccatgacgttgtactggtggggggctccactaggatccccagtgtacatcaactgctccaggacttcttcaacggcaaggagctgtgcaagaacatcaaccccgatgaggctgtcgcctatggtgctgctgt

SEQ ID NO: 299444 - DNA, 151 bp, Zea mays
aattatttggccttcgtcagagaggggagaaagacccgttcgaggcggcagcaatgggggggcgcattaagggcggcaagggtctacgcaaggctggagccaatcgccaccggaaggtgctccgcgacaacatacagggcatcaccaagcc

SEQ ID NO: 299445 - DNA, 228 bp, Zea mays
gtcgcatcccatcccactaccacccatcttgtcgtccgccgattcgatccggttgtgcgggcctattggcagtgatggccacgaatacgatcgtgggcaccctcttcgaggcggatctgaaggggaagaatgtgttcgtgcgcgccgaccttaacgtcccgctcgacgatgcccagaagatcaccgacgacaccctcatccgcgcctacgtccccaccatcaagttcc

SEQ ID NO: 299446 - DNA, 407 bp, Zea mays
cgccctgccgacgcgtcagcccctagctacgagtagctcggtcacgcacctgcggcatgccagcgcatcctggacctctgtctgccgcgggccgcggcgtcatcgtcctccactccattggctgctgcttcacctggctagtagatagctagctgagctgacgacggccattatatatattgagcgcccgggaagcttcgtcgccgaacccatgtcgacgagcggcgcgaggtcgtggtcgccgccgccgcggccgagccggtacgagtcgcagaagcggcgggactggcagaccttcacgcggtacctgtgcgcgcaccgcccgccgctggagctgtgccgctgcagcggcgcgcacgtgctcgagttcctgcgctacctcgaccgcttcggcaagacgcgcgttc

SEQ ID NO: 299447 - DNA, 360 bp, Zea mays
aacttgcaacatacaaagcacaatagtgctccaacaatggcagctaaaatattatgcctccttatgcgtccttggtctacatgcaagtgctgctacagacaccatttttccacaatgctaacaagctcctatagcatcccttcttcccccgtacctctcaccaacagtgtcttcggtatgtgaaaacccaatatcttcaaccctacaggatccaacaagcgatcgcagctggcatcttacctatatcacccttgttcctccaacaatcatcagccctattacagcagttacctctggtgcatttattggcacaaaacatcagggcacaacaactacaacaacttgtgctagcaaaccttg

SEQ ID NO: 299448 - DNA, 231 bp, Zea mays
gaaagctttaaattttcctgcaaatgttttgagaattggttgttgggagtacatttctcactactaaggtgatttggtcgcaaagtgctactttgcaaagcataagcttgtttgggaggtcctacataatggtctcaagagtaagatagaaattcagcgctcggacattattgctttgaaggcaacctgcccagagaatgaacacgaaggggtcttagatctagtgttggc

SEQ ID NO: 299449 - DNA, 221 bp, Zea mays
gcgaggcaaaagcattgcgaccacagacagcgcgcgcttcaaggcctttttttttgagataacaaggaggagaggaggagatggcggtcacgatcacgtgggtgaaggcgaggcagatcttcgacagccgcggcaaccccaccgtcgaggtggacgtgggccttagcgacggcagctacgcgaggggggccgtacccagcggcgcatccactggaatatat

SEQ ID NO: 299450 - DNA, 308 bp, Zea mays
cgcgtcacgggctgggacgcgaagcgcgcggcgtggctgcggacacggggcctggacggcgcggcggtcgcggggcgggtggtgatggtgaccgggtcgcagccggagccatgcaaggggccggggggcgaccacgcgctgctgcggttcctcaagaacaagctggactactgccgcctccacgggatcgagctcctgtacaacaccgcgctgctggagccgtccatggtggcgtactgggccaagatccccagcgtgcgcgccgcgatgctggcgcacccggacgccgagtgggtgtggtgggtgga

SEQ ID NO: 299451 - DNA, 322 bp, Zea mays
aacacatccaaggaacacgaacagcgagaggaatccgacgatgagcgtggagatcctggacgggagcacggtgcggagcttcgtagaggacgagcgcgccttcaactcctcggtggacggccgcttcgccgcgctggacgccgaccacgacggcctgctcacctacgccgagatggccggggagctcatgagcctgcgggtgctggagaggcacttcggcgtggacgaggccgcggtggcgccggatgacctcggggcgctgtaccgcggcctgttcgcgcggttcgacagggacggcagcggcatggtggaccggcacgag

SEQ ID NO: 299452 - DNA, 237 bp, Zea mays
cggacgcgtgggcggacgcgtggggtttgatcgtgttctactggatgtacagaatccatttacctttccaccgtatcacaaagctgtgcgggaaccatttgactattacatgtttggtcagaactacattaggcctctggtagatttcaggaactcctatgttggcaacatttcccttttccatgacatggaagagaagctccaccagggccacaatgttgttttgatgtccaacca

SEQ ID NO: 299453 - DNA, 152 bp, Zea mays
ctacatcctgactatctcgtcccctggcagcgttcgcggtatgatggcggaatctacggcggggacggcgagggatgtcaacccgcacgatttcgttaaggcctactgcgcccacctcaagcgctccagcaagatggagcttcctgagtggg

SEQ ID NO: 299454 - DNA, 406 bp, Zea mays
caaacagctcgaaaactttttgatgcaactccatgcaaagaccagatcatgttatcttcaatgatatctggatatgctacaaatggttatagtgaggaggcactctcattgtttcagcttatgttggcagctggttttcatatagataggtttttatgctcatcaattattagcatatgtgctaacatggcaagaccattctgtggtaaattgttacatgggtatgcatccaaagtaggcatactgtctgatctatctgtgagcagttcacttgtgaagttatattccaaaagtggcaacctggatgattctcgtaaagtttttgatgaactagatgttccggatttagttacatggacagcgataattgatggatatgctcaacatggaagcagtcaggatgctt

SEQ ID NO: 299455 - DNA, 355 bp, Zea mays
ctagttgctacctagcctcgaccaggtggagcaatgggctccacggcggcggcgccctgccacatcgtggccgtgccgtacccgggccgtggtcacgtcaacgcgatgctgaacctatgccgcctcctggcagctcgagacggcgtcaccatcaccatcatcgtgaccgaggagtggctcagcctcctcggcgccccggcggcgctgccggacctcggcctgcgcgttcgctttgaggccattccaaacgtgatcccctccgagcacggccgcgccaacgacatggtcggcttcatggaggccgtgtacaccaagatggcgtcgccgttcgagcagcttctcgacaggctcgcgc

SEQ ID NO: 299456 - DNA, 346 bp, Zea mays
ctcctcgttcggttcggacttttgcttcggcgactttacgcggtaggccaccgtaaaccctagccccagaccgcgggtcatagccaacgagatgcagatcttcgtcttgacgctgacggggaagaccatcacgctcgacgtcgagagcagcgacaccatcgataatgtcaaggccaagatccaggacaaggagggcatttcgcctgaccagcagaggctgatttttgctggcaagcaattggaggatgggaggacattagctgattacaacattcagaaggagtcaacactccctttggtcttgaggctcaagggtggaactatgatcaaggtgaagacactaact

SEQ ID NO: 299457 - DNA, 268 bp, Zea mays
accaaaccctaacgccgaggtcgcttgacaggtgagccgccggcatggtctccggttgcggcgtatgcgccaagcgcatcgtggtggacacgcgccaccacatgctgggccgtctgtcatctattatcgtcaaggaactgcttaatgggcagaaggtggtggctgttcgctgtgaggagatctgtatgtggggtggactcgtacgccaaaagatgaagtacctgcgctttctccgcacgcggatgaacaccaaaccgtcccatgggcc

SEQ ID NO: 299458 - DNA, 400 bp, Zea mays
gcgcctccatttcgggctctgtcccttgcatgttcagtcttgcctccaaccatgggtaaagagaagttccacatcaacattgtggttattggccatgtcgactttggcaaggtgaccaccacaggacaccttatctacaagcttggaggcattgacaagcgtgtgatcgacaggtttgagaacgaggctgctgaaatgaacaagcggtccttcaagtacgcctgggtgctcgacaagctcaaggctgagcgtgagagaggtatcaccattgatattgctctgtggaagtttgagaccaccaagtactactgcacggacattgatccccctggacaccgtgactttatgaagaacatgatcactggtacctcccaggctgactgtgctgaacttatcattg

SEQ ID NO: 299459 - DNA, 405 bp, Zea mays
ggcgtacgacgcgttcccgcgcgcgtccagtgcgccgcagctgcacccgtaggctagcgccgtgcagtcggcgcgggagcacgcgtacgcgacgttgtccgggagccgtccgtccccggccatgctgatggggttcaggacgcaccaccgccggggcaggtactccacgccccgggccgggacgggcatcgccggccgcccgtcgccgcgcaggtccagcgggaacttgggccgcccgtcgaaggtgaagattccccagtggcgctcgaagttgcccggcgccacgctcttggcgtcctcgtccacgagcccgaacaggtgaaacaaccgcagctttagcaaagcagatcgtcgctgaagcattgattggcgggagcaataatggcggaggtttgggcaggggtg

SEQ ID NO: 299460 - DNA, 347 bp, Zea mays
cggacgcgtgggcggacgcgtgggcggacgcgtgggctaggaagagcgcatcatgaagcgtgcgtcaactggcttgcgcgtcgattcttgtcttgaagttgaaatcttggcgcgagtgtcgacctttaatcaatcgggcgaagttttttgctcactgatcagcgacttctgttagattgaactttgaagtgcgcacgcactgccctgaagccttcgggtccgtgacgatgtctaggagagccgcagcagcgcttgcgctcgcgtgcctcgccgtgctggcggcggcactggcggacggcgcgctgctcccgtggttcggcgaaaggaggcgcgggggcgacaaggcc

SEQ ID NO: 299461 - DNA, 450 bp, Zea mays
  unsure (1)..(450): unsure at all n locations
cccacatcaacatcgttgtcattgggcacgtagattcagggaagtctaccacgactggccatctgatctacaaatgtggcgggatcgacaagagaacaattgaaaagttcgagaaggaggctgccgagatgggaaagggctccttcaaatatgcctgggtcttggacaaacttaaagctgaacgtgagcgtggtatcaccattgatatctccctgtggaaatttgagaccagcaagtactatgttaccatcattgatgccccaagacacagagacttcatcaaaaacatgattacaggcacatcccangctgactgtgctgtcctgatcgttgctgctggtgttggtgaatttgaagccggtatctccaaaaacgggcagacccgtgaacatgcccttttgcttacacccttggtgtgaaacaactaattgttggcgttaacaaaatgga

SEQ ID NO: 299462 - DNA, 289 bp, Zea mays
aaaatatcaaaagtgcaggagcacaggtactggtctagaccctcaagactcagctaaaatgggtggaactaggtcggttttttatctgaaaaacatgtatacctttgtgacatacgcttcataaacggtttgagttggggtgttgtttttttttttccccctccttcatactcctgtcccgcccctgtccttttgcttaacctcctgcaaatatttattttcataaagaaacaaaaatggtgacccataagtgctgggccctgggcttctaccctgaagagattaaaag

SEQ ID NO: 299463 - DNA, 458 bp, Zea mays
caaaaagccgcactacttgctctacatctggcagggcagccaggccagtcaggatgaaatcagagcctctgcctatcaagccgtcatcttggaccaggagtacaacaatgaaccggtccagatccgggtcccgatgggcaaggagccacctcacctcatgtccatcttcaagggatgcatggtggtctaccagggaggcacatcccgggccaacagcgtggagcctgtgccctccacccggctattccaggtccgaggaaccagcgccaacaacaccaaggcctttgaggtctcaccccgggccgcctccctcaactccaacgacgtcttcatcctcaagactcagtcctgctgctacttgtggtgtgggaagggttgcagtggagatgagcgggagatggccaagatgggtgctgacactgtctcccggactgagaaacaagtggtggtggaagggc

SEQ ID NO: 299464 - DNA, 394 bp, Zea mays
gaagactttgacgaacgttcagaagctcccgcaggcccagtcgcaagggcctgcggaatgggggagataagccattggctgctctgttggcccgtgttggtgggaatattgaagttcttggttttaatgctcgtcagcgaaaagcctttcttaatgcaattatgcgctatgggatgccccctcaggatgctttttaccacccacaggcttttgcataacctgttttgccatatatacaaggggggcctggcattttcatggacttttttgcgggcatatttgtttcacccccaaaaatgccactcggggtcaaaaacagccttacttaaaaagcaacgaattccaggctttagggcagacactcacacgtacctgggcaggacctttgggagca

SEQ ID NO: 299465 - DNA, 201 bp, Zea mays
cctgaaccattgcctgagcaatagaataactgtgcttttgaagtaatgtctgactctgaaggcagcacctgaccgctcccccgcgtgctgggctggtcgtgccgatactctgggctcccaattgctgcttctcaaatatacctcttgcccgactgccgccttctcaatccaccttattcactcaaccatgccccacaaaca

SEQ ID NO: 299466 - DNA, 453 bp, Zea mays
  unsure (1)..(453): unsure at all n locations
tgttgactgtaacgtggcgtgctcannatccaccacgttgaagaaacangnngccaagacnnatttttggagaaaagtttaacgtcgatgaagctccgaagacgcnttgtcttaatcanannagttcaacttttgcttctnnttggaattatttaacacncnnaatattacgcgatnnngagaattgtccgaaaagatggaatggaagntncagagccaaattggtcttgccttttaaatgaagaaaacagtcccggatgggccgaaaacttactcacgtcgaagaaattcagaatctcacactcaagcgtcaattgaaggcccttcagcataacgggacctcagcgctctcggcagagaaaagcaaacgattgaacacgattctaaataaaatgagcaccatctacagtactgggaaagttttggacccaaatacacaagagtgcttaacac

SEQ ID NO: 299467 - DNA, 146 bp, Zea mays
ccgtccaaactgcccgaaccttgcctgctgcctgcctgcctgccactgagggttcccagcaccatgggggcctggatcttctttctcctttgcctggccgggagggccttggcagcccctcaacaggaagccttgcctgatgagac

SEQ ID NO: 299468 - DNA, 452 bp, Zea mays
gctggtcaagacgtctttggaaatttcctgaagtctgagttcagtgaggagaatattgaggggtggctggcttgtgaagactataaaaaaacaaagtctgatcttttgcattgcaaagcggagaaaatctataaggcatttgtgcagtcagatgctgccaaacaaatcaatattgacttccgcactcgagaatctacagcaaagaagattaaagcaccaacacccacatcttttgacgaagcccaaaaaatcatatatactcttatggaaaaggactcatatcccaggttcctcaagtcaaatatatacttaaatcttctgaatgaccttcaagctaatagtctaaagtgactggctcctggctggaaggaattagtgatggcatcaagtacacaaggaaggcgcgagagtggctccctgggggaacactttggcctttttggacaactcac

SEQ ID NO: 299469 - DNA, 385 bp, Zea mays
ccgggagactgccagcgaggagtcaaacgtgctctgcctatccaagtcccccaacaagcacggtaggctttatatgaaggcgcggcccttccctgacggcctggctgacgacatcgacaagggcgaggtgttcgcccgccaggagctcaagcagcgggcccgctacctggctgagaagtacgagtgggatgtggccgaggcccgtaagatctggtgcttcggccctgatggcacgggccccaacatcctcacggacatcaccaaaggtgtgcaatacctcaatgaaatcaacgacagtgtggtagctggcttccagtgggccaccaaagagggggcactgtgcgaggagaacatgctgggcgtgcgctttgacatccatgatgtg

SEQ ID NO: 299470 - DNA, 425 bp, Zea mays
atgtgattgttaggaatccatctgtggaggctatcttttcctcagaagaggggaagataggggggtcttcccaaatggggggggtaagagaagccactactttctcacgaatgtttaaagtgagagattccaggagttaccagttgaattcccttctcgttataggaaatacccagaataaagtgaaactttcccattcccccatcccctcgtatggaaatctcagatctgttctccttaccaacagggaaggtttaaagaaagaggaaatgatcgcagggaaaagctccagtctttggattctccagaaaggaaacgcattaaatactccagggaaactggcaggtaaattagaaactgttggctcagcctacacctttctccgacttgctgcctttttctgatctcagatggagggtattggg

SEQ ID NO: 299471 - DNA, 233 bp, Zea mays
accattgcctgtacccttttgctcctcaccctgatacatctcttcgcggaatccttaacccaggctgtgctaactcaaacattctcactatcctgctccctatgccataagatctccatcactctctcttgaagcatcaacaatatctttaattatcgtgtgcacttgtaccaacaagtcccatgatcggtcctcaaaaccatcatctatactactaacaatcgacccttttt

SEQ ID NO: 299472 - DNA, 459 bp, Zea mays
tccgccgaacctgtttccaaccggaaccaatggggggttcggccagtcgcctatccaaggagctgggggccgagtaccaggacttgacgttcctgaccaaacaggagatccttctgtaagtgctgtttcgaacctcacctccgggatgctctcggaacggcttcgggaacggggaggctccgtcttactgatgggcaaaccgaggtcccgccagcgggaggggcaggggcctgcatgaagccagcagctgagccggaactgggggccggagccccgggccctcggctgtgccctcttgccggcacgccctcccgtctcgcgccggcggcccccagcggtgcaccgcggagcagcctccagccagagttgggtgctctttgaccccgctcccctggcttctgcaaaacggaacttcctgccccagtccggccgagactgctgtagttctgggctgctttg

SEQ ID NO: 299473 - DNA, 381 bp, Zea mays
actatctaatcatcacttggacagtcagtctcgatggagcaaagtaaaagacagggtagaaagtgatccaggttacaaagcagtggatagttcatccatgagagaagacctcttcaaacagtacattgaaaaaatagccaagaatttagactcagaaaaagaaaaggagcttgaaaggcaagcccgcattgaggcaagccttcgagaacgagagagagaggttcagaaggctcgttcagaacaaacaaaagaaatagatcgagagagagaacagcacaaacgagaagaagctatccagaatttcaaggctcttctgtctgatatggtacgttcttcagatgtgtcctggtctgatactcggagaactctactggaagatca

SEQ ID NO: 299474 - DNA, 453 bp, Zea mays
gttttcccaaacatgaaggcaataactttactcttcttggtgggatttataggagagtttcaggttttttcaagtgcctgctcgccaatcaactgccaatggggttcttatgctccttggtcagaatgcaatggttgtaccaagactcagactcgcaggcggtcaattgctgtttatggacaatacggcggccattcctgtgtgggaagtgcttttgaaacacaaccatgtcaacctactcgaggatgtccaacagaagacggatgtggagaacgtttcaggtgtttctcaagtcagtgcatcagcaaatctttagtttgcaatggggattctgactgtgaagaggacggtgctgatgaagacagatgcgaggatgcaaaaagcagacctgcctgtgacaaggataaacctcctccaaacatagagcttaccggacgtggttacaatgcacta

SEQ ID NO: 299475 - DNA, 439 bp, Zea mays
gccacccctgaggaggcgggcgccgccgcttctcattcattgtcttgacaagagcatcctgcgcggacggtctcaggctccgccggctccttcctcctcctcctcctcgccctcctccgtctggggggtcgctcatctctcagccgcaggatgagccggcaggtggtccgttccagcaagttccgccacgtgtttggacagccggccaaggctgaccagtgctatgaggatgtgcgcgtctcacagaacacctgggatagtggcttctgtgctgtcaaccccaaattcgtggccctgatctgtgaggccagtgggggaggggccttcctggtgctgcccctgggcaagactggccgtgtagacaagaatgtgcctatggtctgtggccacacggccccggtgctggacatcgcctggtgcccacacaatgataacgtca

SEQ ID NO: 299476 - DNA, 280 bp, Zea mays
cggaaggttatgctgagtctttgaggaactacctggagggcacgtgcgtggagtggctccggagatacctggagaacgggaaggacacgctgctgcgcgcaaacccttcaaaagcacatgtgacccatcactccatctctggtcgtgaagtcaccctgaagtgctgggccctgggcttctaccctgaagagatctcactgacctggcagcgcaagggggaggaccagacccaggaaatggagcttgtggagaccaagcctttaagggacggaaactttca

SEQ ID NO: 299477 - DNA, 428 bp, Zea mays
  unsure (1)..(428): unsure at all n locations
cgactttgcatttccattgttgttctacccagggaggattcctgttcaggtagcgatgctggttctgcaggaggaagcatctatgagccattccccatgcggttggaggccttgcaggtgttggctcatctggcaaggggctacttttcgatgacacaggtctacttgatggagcttggagaggtgatttgcaagtgcctgggggaggcagatccatctatccagcttcatggagcaaagcttctggaagaactgggtaccagcttaatacaccagtataaaccagattcttccgtagcacctgatcagagagttccagtccccttggtggtgacgttctggaccgcgatgctcaacggtcctttacccagagccctgcagaacgcagagcatccgacgctgcangccagcgcctgtgacgccctgtc

SEQ ID NO: 299478 - DNA, 454 bp, Zea mays
cttccggttgggcccaaatttgagtttgcctgagttaggctcttttaaaaactacaaacagtatggctttggaaatatttttaacgtgtttgtgtttatttttttagtgctcggcaaaaacccagaactaattatttagaggatcgaaaaaatggatctaagctgattgtttttgtgattggagggattacatactctgaaatgcgttgtgcttatgaagtttctcaggcacataagtcctgtgaagttattattggtaagacttgtgttttccttttgtctatttttttaaaacaaactcttagatgcaaaaatatatatgtaaaactttatcttgtaatttacatttagaactaaattgttgagtgtaaaaaaatattttttgaatcagtgtgttttatctgatgtaccagttttttcctggttgaccttttgatgattttttaaaaataca

SEQ ID NO: 299479 - DNA, 413 bp, Zea mays
  unsure (1)..(413): unsure at all n locations
caactaatgcatgctatggaggcacggccgctgtctttaatgctgttaactggattgagtggagctcttgggatggacggtatgccctggtagttgcaggggatattgctgtatatgccacaggaaatgccagacctacaggtggagttggagccgttgctatgctaattgggcctaatgcacctttaatttttgaacgaggacttcgtgggacacatatgcaacatgcctatgacttttacaagcctgatatgctttctgaatatcctatagtagatggaaaactgtccatacagtgctacctcagtgcattagaccgctgctattctgtctaccgcaagaagatccgtgcccggtggcagaaagaaggaaatgatagagatntcaccttgaatggatttggtttcatgata

SEQ ID NO: 299480 - DNA, 449 bp, Zea mays
ggctttcccatctctacaaacagctatttcagcaggagccaactctctcctttgtacacagagactatgctagtatttttcttgtaaaatttctccaagttattcatttattggctcaactaatttatcttaccccctcactctgtctttttagctggtcaagacgtctttggaaatttcctgaagtctgagttcagtgaggagaatattgagttctggctggcttgtgaagactataaaaaaacaaagtctgatcttttgcattgcaaagcggagaaaatctataaggcatttgtgcagtcagatgctgccaaacaagtgagtttattaccatcagcttatatgtaaaggaatttagatataggataacattcaacatagttgcaagatgaaatcctttctgagcatcatgattttcactggtggataatctaagtggatttctatag

SEQ ID NO: 299481 - DNA, 451 bp, Zea mays
ggattccctaaaaaagatagaaatctggaagctgccacctgtgcttttagtgcatctgaaacgtgtttcctatgatggcaggtggaaacaaaaattacagacatctgtggactttccattagaaaatcttgacttgtcgcagtatgttattggcccaaagaacaatctgaagaaatacaacttgttttctgtttcaaatcactacggtgggctggacggtggccactacactgcctattgtaaaaatgcagcaagacagcggtggtttaaatttgacgatcatgaggtttctgatatttccatttcttcggtgaaatcttcagcagcttatatcctcttttatacgtcactgggaccacgaataactgatgtagccacgtaaggagaagttggttttaagctagttatcttttaacaggctgagcaacacaactcttgaatggcttgtaaa

SEQ ID NO: 299482 - DNA, 457 bp, Zea mays
gtccggccggcggcagggctgaggcaacggtgcccaccctccggctctttctctgcttttctgcgccgccgctccgctctccgcccgccgccatgacggaacaggccatctccttcgccaaggatttcctggccgggggcatcgccgccgccatctccaagactgccgttgccccgatcgagcgcgtcaagctcctgctgcaggtgcagcacgcaagcaagcagatcgcggccgacaagcagtacaagggcatcgtggactgcatcgtgcgtatccccaaggagcagggcgtgctgtccttctggcggggcaacctggccaacgtcatccgctatttccccacgcaagcgctcaacttcgctttcaaagacaagtacaagcagatcttcctggggggcgtggacaagcgcacgcagttctggaggtactttgcgggcaacctggcctccggcggggc

SEQ ID NO: 299483 - DNA, 450 bp, Zea mays
cttgggttcaaggccggcctccaccaaaaatgggaaaacctggactgacctaagtttacgggagtttcaaaggcctgcgcatcatagacagtggatcaatatcacctataatcaattagtaacacaaacattcccaacctcatgtaatttccaggggattcccttcctacctgatcttctgtctctggttttattgctcctataacttcgcagatggctctctcctgtctgattatcctctccttgtaccccaacaggagagcaaaactctgactggggaggacagcggtaggatgagtaactttccttaacaagtgatctgcagagcccaggggacagagaaccacactaggttaaatccatggttgccgaggaccagccccggctgatccagggtattcgaaggggagacggcgtcggcgactatttatttatttatcaaagatataa

SEQ ID NO: 299484 - DNA, 452 bp, Zea mays
aaaccagatttgctatccaacccgcgtgtgtctgaaagtaaataacatattttgaagtgcgcgtgtatactttttcataaggtgtttgggaattttttttcctaaaataatttattccatatctacatcactgagagctgtttgcctatcctgaagtccatctgtaaaagaaagttagcttttgtcctgaatttgctttccatgcttttattaatctagtttaatctcattgttggaaaaagggatagtgcattttaaattgaccttcatatgcttttaaaaataagacaaatctacttgataatgtactttttatttgatctcaagttgtataaaaccaataaattttgtgttactgttactgcagtagtaatcttatgcacacagtgattccatgttaaatgcaaagtagttaggcaactgttttcttacaggagtttccaagctttact

SEQ ID NO: 299485 - DNA, 459 bp, Zea mays
cttcgcgaccagggttgaaggctgggcccgccaggctccaggaaaggcgctggagtggctcggaagtataggaggtagtggaaccacaggctataatccaggcctgaaatcccggctcagcatcaccaaggacgactccaagagccaagtgtctctgtcagtgagcagcatgacaacggacgactcggccagatactattgtaccgttgtccaccaagaaaccagacgtgattgtcctgatggattcgtggcttgttggcagtgtggtaggattaatgatggttgtaggcgttatggttgttgttgtcggggcgaatgtcatgaacgagatacgtacgctgcatttggcttcacttatgcctacgactttcacgtcgatgcctggggccagggactcctggtcaccgtctcctcggagagtgaaaccagccccagcatcttcccgctgagccttgggaa

SEQ ID NO: 299486 - DNA, 450 bp, Zea mays
gttacaggggccggaaggtcagctagtcttggacaacaaaggcgtttcatcccctcgtgcgactgtctttcagcaaccacacaggacggtggctggcggcagagacccgcgggagcccccagcgatgtcgcgcctgttcctcgcctgcctgctggccatcttcccagtggtctccatgaagagtcccatcttcggtcccgaggaggtgagcagcgtggaaggccgctcagtgtccatcaagtgctactacccgcccacctccgtcaaccggcacacgcgcaagtactggtgccggcagggagcccagggccgctgcacgaccctcatctcctcggagggctacgtctccgacgactacgtgggcagagccaacctcaccaacttcccggagagcggcacgtttgtggtggacatcagccgtctcacccataaagactcggggcactacaa

SEQ ID NO: 299487 - DNA, 376 bp, Zea mays
  unsure (1)..(376): unsure at all n locations
tcgcccgggtctctgttcccagccactcaccccatggccgcgcgcacccaaaacccgcaggggaagaaactgaaaacatggtacgagcagcacggctcttacctcaacttgcgccgccttttcgaaggagacagggaccgctttaaccgctttatcttgaaccttaacaccaaccatgggcatattctggtggactactccaagaacctgttgacggagactgtgatgcatattctggtggacgtggctaattccatgggtgtggaggccgcccgggagcgcatgtntactgttgagaagatcaacttcactgaagatcgtgctgtgctgcacgtggctccttctgaaccgatcaaacacacccattttggtggat

SEQ ID NO: 299488 - DNA, 453 bp, Zea mays
ctccatcacctgctctggaagcagcagcaatgttggaaatggatatgtgagctggtaccaggtgatcccaggatcgggcgcccagaaccctcatctatgatgacaccagtcgagcctcgggggtccccgaccgattctccggctccaggtctgggaacacagccaccctgaccatcagctcgctccaggctgaggacgaggcagattatttttgtgcatctgctgaggatagtagcagtaatgctgttttcggcagcgggaccacactgaccgtcctgggtcagcccaagtccccaccctcggtcaccctgttcccgccctccacggaggagctcaacggcaacaaggccaccctggtgtgtctcatcagcgacttctacccgggtagcgtgaccgtggtctggaaggcagacggcagcaccatcacccgcaacgtggagaccacccgggcct

SEQ ID NO: 299489 - DNA, 452 bp, Zea mays
  unsure (1)..(452): unsure at all n locations
gcaaattaaagaggaaaaacaagaatctgaatttctaccagcagctggaggaacatttaacatctctgtcagtggggatattgatggcttaattactcaggctttgctaacgggtaacttcgagagtgctgttgacctctgtttacatgataaccgcatggctgatgccattatattggccatagcgggtggacaagaactcttagctcgaacccagaagaaatactttgcaaaatcccaaagcaaaattaccaggctaatcactgcagtagtgatgaagaactggagagagattgttgagtcttgtgatcttaaaaattggagagaggcgttagctgcagtgttgacttacgctaaatcagatgaattttccgccctttgtgatcttctgggaaccagacttgaaagtgacggcgatagcctcctgcagactcangcctgtctctgctaca

SEQ ID NO: 299490 - DNA, 456 bp, Zea mays
  unsure (1)..(456): unsure at all n locations
gaaccatgtttggctcctcaggcccacaggctcagcgtggcccttgcccgttcgcgttgctggtgctactcctgctgggccccagctcggtcctcgccatctccttccaccttcccgttaactcccgcaagtgcctccgcgaggagatccacaaggacctgctggtgacgggcgcgtacgagatcaccgaccagtctgggggcgccggcggcctgcgcacccatctcaagattacagattctgctggccatattctgtactccaaggaggatgcgaccaaggggaagtttgcctttaccactgaagattatgacatgtttgaagtgtgttttgagagcaagggaacagggcggatacctgaccaactcgtgatcctagacatgaagcatggagtggaagcgaaaaattacgaagagattgcanaagttgagaagctcaaacctttggaggtggagc

SEQ ID NO: 299491 - DNA, 454 bp, Zea mays
ggaaaaccatgatcagtcagcagatcaggaagagagttataaccaaaatctgggattacaggagcaagagaaaactgaaagtgacttaactgagaatttggagtattcaccaactgaaggcacattggagctaaaagaagacatgagtgaacctcaaaaggagaaacttccagagagcttccttgctcatgatgttagttccattgtagattctaaccaacaagaaagcatcacaaagacagaggaaaaccaaaaacaacctgtagatgactcccatcctcagttgaacagtcaagacctacgtgatcaaggaaaccaagatcaggacacaaatggagaagaggaaggagagaaagagccaggtgaagtgggtacccacaatgatgaataaaaacgggagacagaactttccaatgagccttctaacaacaagcaggaagaagacaagtcccaa

SEQ ID NO: 299492 - DNA, 451 bp, Zea mays
ggccgcgaaccctcctcctgctactctcgggggtcctggtcctgaccgagacccgggcaggtgagttccgggtcgggagggaacgacctctgcggtgagaggcgaggggatctcccgggagtctggggacaggaccccagggaacgagcgaccccgacgcccctgcccagacccgccccctccccctggtcccgtcctgtccctcccttgcatctcgacccctcttttcttccccctccggagttcgggccggtcttcgacctcttccatctcacgtgcccctagccccctccggcctcccggccccatcacctcggacccgggacccgatcccgcgccgagaggaggtcgggccaagtctcacccctccccgcccccaggctcccactccctgaagtatttcagcaccgccgtgtcccggcccgggcttgaggaaccccgtttatcatcg

SEQ ID NO: 299493 - DNA, 398 bp, Zea mays
acgggtgccccgagtcacaggctgctttgggtctgccacagtgggcaaggaaatggaatcaggagacagggaccctccattccccatatccaggaaaatgtgatgagctacaggtttcagcttctagatcaccacttaacgttctagctacaagtggaaaatccaagggcagcaaggtccatcagaaggatgtctgaagaaatggcagaccaaagagaagaagctggggaaaaagaggcatgcagagaccagatcaaagaatccgacaaagaagaggaaccaccagctgcttcgtcccatggccaggagtggcgtccaggtggcaaagcacctaagaacccaaagcctgaacccggggccagaccccctgcactccccgttatggtcaatgacccacc

SEQ ID NO: 299494 - DNA, 450 bp, Zea mays
gacctgttaccagaggctgaagatgagatgcatggaggaggagaaggtcatcccactggagtggggggatgctattcaccacctgtacgaggagtggctcatcaaagggagccttttccccgtggcagcccccgttctggtgatcgaggccgaccacaacatgcagaaaatgttagaactctttgaacaaaaccggcaccgaatcctaactctggagaatcggaagcttggtccataggataggaaagatcatgcccgagaaatgcctgctgctgccaagctagcttttaggagcagtttggaaagctccactctcaggagggctttgtgtctgcccacagttgtcttccttctggccttctctcctttcccagtgtcttcatcctgggatcctgggcctcgtgggtaaatgggaccagtgggtttgccatgccctctggtggcacagcc

SEQ ID NO: 299495 - DNA, 317 bp, Zea mays
ccacagcaggctgacacggaactccaagatcatggaagtggtgggcaggtgcagggagaagggacggcactgtcccaagtcccaggacggacacctctgctgtcccctcccctccaggcctcagttttccagccctttaactgggggcatgagccaccctttccctctccccggcatcatacacccaagaagaacgagctcccccaaactgcagcccctcccctcactttctgccaccccctagttccctctgcacagccaagcttgtcatcagccctccagccacggctcctgtgagaataaaaggtagtgagtgg

SEQ ID NO: 299496 - DNA, 462 bp, Zea mays
tccgttgcttaacctgtccaaaaaatgtgacactacaaaagtggagctggaaaatcaagtagtcacgggcagccaaagcaatatctgtgatagtgacgctgagacctgttacacctatgacagaaacaagtgctacacaaacagggtcaaacttagttaccgtggtcagaccaaaatggtggagacagctctgaccccggattcctgctatcctgactaacgcaagtcatgctggctgcacaactgcttatcttgaagggctctccattttgattgcaggtagttaatgtatttactcctgatgaatttgaaaccatgattttttttgggtggggataatataaaattaactaccccacccctaccactggcaaataattgaaatagtaacactgttaatgtttttaaggtaaatttctagcatttaaaaaaatagatgaggggagaaaataaaattcaaaa

SEQ ID NO: 299497 - DNA, 457 bp, Zea mays
gcccagttcaaacccacggggctgccctcccctgcgctctcccctcgctgcccgggcccggagcgcagcgcggccgcgcagattcacgatgttgaaagcccttttcctaactatgctgactctggcgttggtcaagtcacaggacactgaagaaaccatcacgtacacgcaatgcacagatggatatgagtgggatcctgtaagacagcagtgcaaagatattgatgaatgtgacattgtcccagatgcttgcaaaggtggaatgaaatgtgtcaaccactatggaggatacctctgccttcctaaaacagcccagattattgtcaacaatgagcaacctcagcaagaaacaccagcagccgaaggtgcgggtgcagctgcaaatgcagccgcgacctctagtacaggcactgggggtgtagcagccactggcgtcgctgccagtggagtggtgcct

SEQ ID NO: 299498 - DNA, 373 bp, Zea mays
aaggaaagaccgggcccttcaaccctcccggtccacgtggcttcccggttccgcccggccccgacggcatgacggaaaccattgctgtcccgggcaccccatcagtcgatcacggcttccttgtaacccggcactgtcagacaacatacgacccccagtgcccttctgcgaccaaaatactagtccccggaaactttatgctctacgttcaatggaaccagcgggctcacggccatgacttgggcactgtgggcaactgtctgcggaagttcattctccatgcccttactcttctgtaacatcaacaatgtcttgaatttcatgttcttcaacgactacttctactagctgcacacctccggagcccatgccc

SEQ ID NO: 299499 - DNA, 457 bp, Zea mays
cgcgatgtctgggctgtctcgcccgctgcttttggccgtcggctgcctggccgcgctctgcgtaatcacagcggctgggaacaccaccctggccccgaacgtgactacagcctcgtctccaccgcccaccaccacgacagtcccggtgtcaccgacgactctctcgccgctgccggtcaccactccagcaccagatatctgtggaagccgaaacagttgtgtttcctgtgttgatggtaatgctacctgcttttggatagaatgtaaaggtaaaagctactgttcagataattcaacagctggtgattgcaaggtggtgaacaccacaggattctgttctgtgcccactaccacaccaacgccaaccaattctacagctaaaaccacaactctgccttccactactacaacttccaccacagctactacatcaggtacaactaataccactctatct

SEQ ID NO: 299500 - DNA, 455 bp, Zea mays
cggacgcgtgggtgggtccaagcttccccagaagttctactactggttcttccagacagtgcggggtatgacaggggtgctcctgctcctggttcttgccatcatgtatgtctttgcttcccaccacttccgacgccgcagcttccggggcttctggttgacccaccacctctacatcctgctctatgtgctgctgccccgtttccacatctacttcctggtcccagcacttatctacatgggggacaagctggtgagcctgagccggaagaaggtggagatcggcgtggtgaaggcgcatctgctgccttcacgagtgacccacctggagttccagcggccccaaggctttgagtacaagtcaggacagtgggtgcggattgcctgcctggctctggggaccaacgaataccaccccttcacgctgacgtcagcgccccatgaagagacgctta

SEQ ID NO: 299501 - DNA, 317 bp, Zea mays
cggggagatgcgtgacgaatgcggcgcgtgacggagaagcggttagccgacgctgcggcggcagtccgtgtaaacaaggcctcgcgccgctgctggtcctgcgactgcttctcgctggctttgctttcaccaaacccaaggaggtgacaggaggagtccccatacaggacttaaggatgctgtgaccagaagatgggatcacggaatagtagcagcgcaggaactgggtctggagacccctccgagggcttgccccgaagaggggctggcctgcgtaggagtgaggaagaggaagaggaggatgaagatgtggatct

SEQ ID NO: 299502 - DNA, 194 bp, Zea mays
gtccgaaaaaccttgctgtcctgccaccatggggctcgtcgctctcgtcctgacctccctcgccatttcgacggcttgggggctgccaccctcaccgcctattgtggacaccgctcagggcagagtcctgggaaaatatgtcagcttaaaaggatttgcacagcctgtgggcgttttcctgggaatttcttttg

SEQ ID NO: 299503 - DNA, 453 bp, Zea mays
ctccctcccgttttccttgggacgctacctggtgactgtggctcccgcgaccagcaaggaggcggtggcggaggacactcgttatggccgcctctaagcctgtggaggcggcaatggtctcagcggctggacccggttccgggagtgggatgggcggcggcagtgcgacttcgggcccgggcaccgggagcctgccgagatggcagctggcgctggcggtcggggcgcccctgctgctaggagcgggtgctctgtacctatggagccggcagcggcggcgccgggagaccggggcccgaggcgactccggcggcctgaagcgcaacagtgaacggaagaccccggagggcagggccagtccggccccgggcagcggacaccccgatggccccggtactcacctggaaatgaactcgcttgatagagcccaagcagccaagaacaaaggcaaca

SEQ ID NO: 299504 - DNA, 444 bp, Zea mays
cgtcgcgtcagtctggtgcgacctctgcccgccgggagggtcgtcctgtctgcgcccgagtcacagccatggcggcctcgcttctgctgcggcaaggacgagccggggcgctgaagactgtgcttctggaagcaggcgtgtttcgaggagttgctcctgcagtttctctctctgcagaatcaggaaagaatgaaaagggattaccaccgaaccccaagaagcagagcccaccaaagaatgtagtggaaccaaaggagaggggccagcagctcgcccccccaacagcagatgcagtgtccaaaaccttatctgcacccacttcctccccatcagttgtgagccaaagcaggacgctagcgagccctaaccccgatgccagtgtgctgcacacagaccaaaggcttccgaagcttttgtcaagaaagactttggtagagtttcctc

SEQ ID NO: 299505 - DNA, 450 bp, Zea mays
  unsure (1)..(450): unsure at all n locations
ccaactagcaacgtagaaagcacaatcgtgtaccaacaatggcagccaaaatattctgacgccttatgctccttgggcattctgcaagtgctgctacagcgaccatttttgcgcaatgctcgcaagctcctatagctttccttcttacctcgtacctctcaccagcggtgtcttcggtatgtgaaaactcaattcttcaaccctacaggatgcaacaggcaatcgcagctggcatcttacctttatgacccttgttccttcaacaatcatcagacctattacaacagttacctatggtgcatttattggcacaaaacatcanggcacaacaactacaacaacttgtgctagcaaaccttgctgtctactctcagcaacagctagttcttacattcaaccaactaggttcattggactctgcttgttatatgcaacaacaacaactaccat

SEQ ID NO: 299506 - DNA, 326 bp, Zea mays
aacagcgtcagtgcatcgagaggatcttcagaggaaacaccatgaaaacagccataggacgggcagcgtgcttggctctggcaggtgtcagcgactttgcaatgcatatgcaatgcacatgccctgcgcttgagcggttgtacagggcttgcaccgggctgacgacgatcataggaccatgatgggtgcacccctactctaagtatatgaggcatacctaatgcagcccgattgcagccgggtcgtagtacgcccgtagtacgcagactatcggcatataacagccatttacgaaacagtgctgccacaatgctatcaggatgata

SEQ ID NO: 299507 - DNA, 350 bp, Zea mays
cgtttagaaacacaccaagcgaagcgcactatcaacaccctatcaacactggctaccaagatattagccctccttgcgctctttgcgcttttagagagcgcaacacatgcgttcattatttcacagagctcacttgctcttagagccattatttcacagatcctctcaccagatactttaatgggctttgaacatatagacgcgcaagcgtacaggctataactagcgcttgcggcgagcgtgttacaacaaccaattgtgcaattgcgacaacaatacttggggcatatatacctacaaaccatatcaacgcaacagcaacaacagtttctgtcatcactgtgacacct

SEQ ID NO: 299508 - DNA, 350 bp, Zea mays
attttcagccttaacaaacacaccaagctaagcgcactatcaacaccctaactacaatggctaccaagatattagcccttcttgcgcttttagcccttttagtgagcgcaacaaatgcgttaattatttcacagggctcaattgctactagtgcaaatattctacaactacttacaccaattactttaatgggtttagaacatccagcctagcaagtatacatgctacaactagcgcttgcggtaagcgtattacaacaaccaattgcacaactgcaacagcaatatttggcacatctaaacctacaaaccataccaacgcaacagcaactacagtttctgacatcactg

SEQ ID NO: 299509 - DNA, 388 bp, Zea mays
ccaacatgcaacgtggaatgcggtatccactatcaacaatcaatcaccaccggggaccgagatattcttattctttatgctccttgctcttgctgcatgagctgctcacgcgacaattattgctcacagcttacaagctcctatagctttccttcatacctcatacctatgatcaatgatagctgtaaaatccgaaaactcaaatcttatacgctataagctgcaacaagcaatcgcagcatgcaacatacatttatgaccctagaatcaacaatcgtctgtcctatgtttggagcagtcctagccacaaaccatcagggcacagcagctgtagcgcttcgtgctatctgtgatcaaccatatagctatggcaaaccttactctctac

SEQ ID NO: 299510 - DNA, 391 bp, Zea mays
gtccaactactcaacatataaacgcccactaattctaccaacaatcgccagccaaaacattgagggtgcggtgatgctcctcgttgctttctgcaagtgctgctacggcgaccatcttcaccacaacgctcacaagctcctatatcttaccttcttcccccgtacctcttaccagcggcgtctactgtgtgtgaaaacccaatttttcaaccctatatgatccaacaggcaatcgcaacttgcatcttacctttatcacccttgttcctccaacaatcatcagccctattacagcagctacctctgcagcatttattggcacaaaacatcagggcacaacaactacaacaacttgtgctagcaaaccttgctgcctactcttagcaacaac

SEQ ID NO: 299511 - DNA, 205 bp, Zea mays
atgcgaggtggtatatcttttatattgtgacataaattcaatttactgtgcgcggttttacaccgcgttgactgtgaaaacactgtcgttacacaacttaatctccttgcagaacatatccctttctccagatgtcgtaatatcgaaaaggcgcgcaccgatcgcgcttttcaacagatgcgcacactgtatgtcgaatgtgaca

SEQ ID NO: 299512 - DNA, 284 bp, Zea mays
taaacattaaaaaacacaccaagtctaacctcattaacaacaacctaacaacaagggctacggagatattatccatacttgcgcttctggcgctcctttctagcgcatcaaagcttacttactcttccatacagcttaatagctctaatttccattatcacacattaaattcaatggcctactttaaacaacttcgaacatggaaaaaccctggcctatccgatataactcgcttttgaggacatcctcttttaacaacctgttttaaaattgaaaaggccctc

SEQ ID NO: 299513 - DNA, 400 bp, Zea mays
cacaccattagctatatctactccagagcgcaaaagaacccgatcgacaccatgggggtggtgctcgttgccctcgctctcctggctctcgctgcgagcgccacctacacgcatacaagcggcgggtgcgggtgacagccaccgccgccggttcatataccgccgccggtgcatctgccacctccggttcacctgccacctgcggtgcatctcacaccgccggtacacctgccggcgccggtacacctgacaccggcggtacatgtgccgccgccggtttatgtgccggcgacaccatgccactactctactaaaccgccccggtctgagtcttatccacagacacacccatgcccgtgccaacagccgtatacaagcccgtgccatctgcagggaacct

SEQ ID NO: 299514 - DNA, 364 bp, Zea mays
atgcttacaaaaaaaaaccaagcgaagcgttttgttttcaccctaacataattgcatgggaggcgatgagctttccttgccttgctcgccttgccattgagcgcagcacatccgttgattatttcatagcgctgagttgattttatcgcaatgatttcatagcacatcccatcagatactttactgggctgggatcatacaatcgagcaagcctacaggatacaattcgcgctggccgtgagcgtagcacatcaccccatcgaacagttgcaacaacactactaggcacatctcatcttacaaaacataccatcgcaacagaaccaacagattcttgtcatgacttaaccaactaacctaggcg

SEQ ID NO: 299515 - DNA, 402 bp, Zea mays
tttgagcattcaaaaacacaccacgctttttacattaccaacaacctaacaacagtgggtgccaagatattattgctccttgcgctctttgcgctatctgcgagcgcaacaaatgcgttcattattgcacaatgcttacttgctccaagttccattattacacagttcctcccaccagatacttcaatgggcttcgaacacccagctgtgcaagcctataggctacaacaagcaattgcggctagcgtcttacaacaaccaatttgccagatgcaacaacaatccttgtcacatttaacaatacaaaccatcagaacgcaccagcaacaacaattgctaccagcactgaaccacctatccatggtgaaccctgccggctacttgcaacagcagttgcttgca

SEQ ID NO: 299516 - DNA, 382 bp, Zea mays
ggggccgaccacgcgtcggaagaaccttaaaagggggattccattgccttaatttggccaccaagggcacccaccatgtgtggggtccttatcctcctggctcttgtggcttgcgtggctaacgcgccaatttgccctcaaggctcacaagctcctatagtttccctttttcccccatacctgccatcaatgatagctgaagactgtgaaaacccaccttttcagctctatcggctccaacaagcaatcgcagcacgcaacatacctttatcacactagtttcaacaattgtcagccctatctttggtgcagccattggtacagaccatcagggcacagcagctgcagcaacttgtgctacctgtgatcaaccaagtagatc

SEQ ID NO: 299517 - DNA, 384 bp, Zea mays
  unsure (1)..(384): unsure at all n locations
caaccatggccttcaaaatattttggcctcctaatcctcctgggccgttttgcaagtcctgttacggcacccattttcccgcattgctcgcaggctccaatagcttccttttttcccccgtacctttaaccagcggtgtcttcggtttgtgaaaacccaattcttcaaccctacaggatccaacaggcaatcgcagctggcatcttacccttatcacncttgttctncaacaatcatcagccctattacaacagttacctttggtgcatttattggcacanaacatcagggcacaacaactacaacaacttgtgctagcaaaccttgctgcctactctcagcaacagcagtttcttccattcaaccaactaagttcattgaact

SEQ ID NO: 299518 - DNA, 281 bp, Zea mays
gccattatctcatttacttcatattggacaaattgacaccatgaacgcgctgaacgtgggcctggttttcctggcgctcgttgcgagcgccgcctacactacaagcagtagatgtggctgctatacaccaccgatacatctaccgcatccactctatatgccgtatacgctctatctgccgtatcagcagcagcagcagccatggcaatactcgacttaaccacactaactaaacccgttccaacagttccaatccttccgattcctgcagcgtcggcagc

SEQ ID NO: 299519 - DNA, 392 bp, Zea mays
ccctcttttagatttcttatgagttatagttcaataataaagttttttgtctgatgtttgtggcttcccagaaataagaaagtacatttctaaaaaaaaaaaaaaaaaaaaaaaaaaaaaaaaaaaaaaaaaaaaaaaaaaaaaaaaaaaaaaaattaaaaaaaaaaaaaaaaaaaaaaaaaaaaaaaaaaaaaaaaaaaaaaaaaaaaaaaagggggcgcccgttttaaaaaatcaaagtttacttacccgtccttccaaagtaatattttttttatagggccaccaaaatcaaattcactgcccgcgttttaaaaacgtgggaactggaaaaaccttggcgtaaccaaattaaatcgctttgaaaaaaatccccttttcccaagttggct

SEQ ID NO: 299520 - DNA, 436 bp, Zea mays
  unsure (1)..(436): unsure at all n locations
ccgtccgccaactttagcaacatagaaagcaccaatagtgtaccaacaattggcagcccaaaatattttgcgcggcttatgctaccttggntctttctgcaagtgcctgctaccggcgacccattttcccgaaatgctcgcaagctcctatagcttcccttcttcccccgtacctctcaccagcggtgtcttcggtatgtgaaaacccaattcttcaaccctacaggatccaacaggcaatcacagctggcatcttacctttatcacccttgttcctccaacaatcatcagccctattacatcagttacctttggtgcatttattggcacaaaacatcagggcacaacaactacaacaacttgtgctagcaaaccttgctgcatactctcagcaacatcagtttcttccattcaaccaactggctgcattgaactc

SEQ ID NO: 299521 - DNA, 227 bp, Zea mays
gcggcagtacgttttgaggatcgtctaacagtacagggggaagatggtcatcgttctcgtcttgtgcctggctctgtcagctgccagcgcctctgcaatgcatatgccctgcccctgcgcggggcttcagggcttgtacagcgctggcaccggcctgactacgatgatgggcgcctgctggctgtacccctactcggagtacctgaggcagccgcagtgcatcccgc

SEQ ID NO: 299522 - DNA, 398 bp, Zea mays
atccagatcaacaaagcgtcagtgcgtagatcggatcgaagaacagaacagcatgaagggggtgattggttttgtcaggtgcctggctctgtcaaatgccaacgcctttgcaatgcacatgccttgcccctgcgcgcggctgtagggcttgtactggcgatgacgacggcctgacgacgattatgggcgcacgcggactgcaccactacgccgaatacctgacgcatgcgcagtgcaccctactagccgcggtgccctactacgaccgctgtgtacaaaccagcgccatgtaccagccgctacgacaacattactatcatcaacatatgatgatgatggacgtacatgccgatgatcatcaacttcaaacgatgatgcagcttgagcatgccgctgtc

SEQ ID NO: 299523 - DNA, 397 bp, Zea mays
caacaagcaatagcagcaggcaacatacctttatcaccctggttacaacaatcgacagcggtatctttggtgcagacattggtacaaaccatcacggcacaggatctgcagaaactcgtgctacctgggatcaaccaagtaactgtggcaaacctttctccatactctcaacaacaacaatttcttgcatgcaaccaactgtctacatagaaccgtgctgtttatttggagcaacaactatgaccattcagccagctagctactgtctactattagcaacaacaacttcttgcatttaaccaattggacacactgaacccagatgcttatttgcagcagcaaatactactaccatataaacagctagctgcaacaagccgtgcttacttcttgacac

SEQ ID NO: 299524 - DNA, 364 bp, Zea mays
aaaaaaaaaaaaaaaaaaaaaggggcggccgctcgcgatctagaacctctcagcaacatcggtttcttccattcaaccaactggctgcattgaactctgctgcttatttgcaacaacaattaccattcagccagctatttgctgcctacccccagcaattttttccattcaaccaactgacagctttgaactctcctgcttatttacagcagcaacaactactaccattcatccagctagctggtgtgagccctgctaccttcttgacacaaccacaaatgttgggggtctaccagcacgctgcgcctaacgctggcaccctcttacaaatgaaacaatagatgtcattcaaccaacctgcttt

SEQ ID NO: 299525 - DNA, 253 bp, Zea mays
agaccattaactttatctactccagagcgcagaagaacccgatcgacaccatgagggtgttgctcgttgccctctctcttctggctctcgcttctagcgccacctgcacgcatacaagctgcagctgcggctggcagccaccaccgacggttcatctaccgtctacggtgcatctgccatctgcgattcacctgccacctgcgatgcatcttgcatcgccggtccacctgccacctgcggtccaccttccacc

SEQ ID NO: 299526 - DNA, 405 bp, Zea mays
aactgctcatcgcctcatcgacatataccttgctcgcaccacacgcgaaaccgaacaagcgagtgcaggcattgacgatactcacgccggcgaccgatgggatcggagggtgagatcaccggcccgctcctcgcgtcgggcagccggcgccccggcgccggatgcggtgcccccgcggcgggagcaggtgactgctcggtggctggcggacagcgccgctctgggggtgctcttttgcctcattacacacaagctcaacctcaccgtcgggatcattccctcgctcaacgtacccgcggggctgatcggctacttactggtccgaacctggacggaggcgctcgataagttcggcgtcgacttcaagcccttcaccaagcatgacaacaccgacattcagacatg

SEQ ID NO: 299527 - DNA, 418 bp, Zea mays
gctagctgcagcaagccgtgcttccttcttgacacagcaacagttgctgcctttctaccggcagtttgcggctaaccccgcaaccctcttacaactacaacaattgttgccctttgtccaacttgctttgacaaacccagcagcctcctaccaacaacacatcattggtggtgccctcttttagattgcttattagttgtaattcaataataaagttttttggatgatgtatgtggccaaccagaaataagaagttacatttccagattctaatgtgaaaaaaaaaaaaaaaaaaaaaaaaaaaaaaaaaaaaaaaaaaaaaaaaaaaaaaaaaaaaaaaaaaaaaaaaaaaaatttaaaaaagggggggagggtttaaaagatcaaaagttaaaaaacgggggcttgcaaaataaaa

SEQ ID NO: 299528 - DNA, 294 bp, Zea mays
ctaattctagatcgtgaacagccggtgtagacgatctaaactaaccaacgcgaccatgcggggcattagatgttatatagcgtcaattaaattaaataaactgaatcgagtgttacaacgtttacactgggaaaactgtgaaaatactgaacttaatcaacttaaacgacatgcaccttatgccagttggcgtaattgccaaaatgcccaaaacgatcgcacttatcaacatttgcacaagctgaatggccaatgtgacgcacgctacacccgctcattaagcgcattaagcgc

SEQ ID NO: 299529 - DNA, 185 bp, Zea mays
caacaattgttgccctttgtccaacttgcttttacaaacccagcagcctcctgacgcgacaacacatcattggtggcgccctcttttagattgcttattagctgcaattcaataataaagtttcttggatgatgtatgtggccaaccagaaataagaagttacatttccagattcagattacaaa

SEQ ID NO: 299530 - DNA, 313 bp, Zea mays
attcaaccaactatctacattgaactctacttctaatttacaacaccaacaactacaattcagccacctaccaaaccctaccctcaccaatctcaatcatccaaccaactatccccatttaactatcctgcttattaacaaaaacaacaactactaccattcatccaactagctgctctaagcccatctacctttttgatacaccctcaactgttgcacttctaccaacactcttcgcctaacgctgccaccctacttacaacttcaacaattgctttcattcaaccaactttcttttacaaacccaacattt

SEQ ID NO: 299531 - DNA, 375 bp, Zea mays
  unsure (1)..(375): unsure at all n locations
gggagacccaggcggacgcagcattcatgatcagcatagcggcacttcttcaaaggatcgtcatcaattacataacgacgaaagtcatcgttctcgtgctgggcctggctttgtcagttgccagcgcctctgcaatgcagatgcnctgcccctgcgcggggctgcagggcttgtacagggctggacccggctgacacgatgatgggcgccggcggctgtaccctacgcgagtacctgaggcagcgagtgcacccgtgcggcgggccctatacccggtgtggcagagagcccatgtacaccgttcggacaggctgcagcacaataggatgatgacgtcagtcgtccgcacagctgagatatgatgcactgagcgtg

SEQ ID NO: 299532 - DNA, 359 bp, Zea mays
caacaagcaacatacaaagtggactccagtgccaccaatggagcaacaatggcgaccatgatattgctcctcgttatgctcgttggtcttgctgcatgtgctgctaacgcgacaagcttacatgaatgcttacatgctcctattgcttccctccttccatcataccttgcatcaatgatagcataagcatgtgaaaacccatctatgcaaccctataggctccaacaagcaatcatagcatgcaacatacctttatcacccttgtttgaacaatcgccagccctatctttggtgcagacattggtacaaaccatcagggcacagcatctgctgcaactggtgctacctgtgatcaacca

SEQ ID NO: 299533 - DNA, 346 bp, Zea mays
cttcgccaagccatttcctcttcaagaggggatcattccaattggcttatttattccatatcgctcaagacccggatcgacactattatggagttgcttgaaccctctcgctctcctgtgtctcggtcgacgatggtgactaggagcaaggagagctggtcgtcattgcaagtcccggcggtggcattcccttggaagccacgaggtggcaagaccggcggcctcgagttccctcgccgggcgatgttcgccagcgtcggacttaacgtgtgcccgggcgttccagcggggcgcgacccgcgggagcccgatcccaatgtcgtccgggcggtcgacaactgctaca

SEQ ID NO: 299534 - DNA, 419 bp, Zea mays
agccttccgaaacccaccaggcaccttttaaagtggattttatgttcaacaatcgagcatcaatggcgacgagagatattttccctccatatgctcctagctctctctgcatgtgttgctaacgcgacaattttccctcaatgctcacaagctcctatagcttcccttcttcccccataccttccatcaatgatagcttcagtatgtgaaaacccaactcttcaaccctataagctccaacaagcaatcgcagcaagcaacatacctttatcacccttgttataacaatcgccagccctatctgtggtgcactcattggtacataccatcagggcacagcaactgcagcaactcgtgctacctgtgatcaaccaagtagctctggcagactcttcttcctactatcagcaacaacaaat

SEQ ID NO: 299535 - DNA, 369 bp, Zea mays
ccacccgtccgattgagaccaacaagcatcattcaaagtgttttttagtaccaacaatcgagcatcagtggcgggcaatatattttcccttcttatgctccacgctctttccgcatgtgttgctaacgcgacaattttccctcaatgctcacaagctcctatagcttcccttcttcccacataccttccatcaatgatagcttcagtatgtgaaaacccagctcttcaaccctataggcttcaacaagcaattgcagcatgcaacatacctttatcacccttggttgaacaatctgcagccctatctttggtgcagtcattggtacaaaccatcacgtcacagtagctgcagcaactcttgctacctgt

SEQ ID NO: 299536 - DNA, 289 bp, Zea mays
aatcagcaaagcgccagtccgtacagaggtttgtcgagcataacagcatgaagatggtcatcgatctcgtcgtgtgcctggctctgtcagctgccagcgcctgtgcaatgcagatgccctgcccctgcgcggcgctgcagggcttgtacggcgctggccccggcctgaccacgattatcggcgccgacgggctgtacccctacgcggagtacctgaggcagcctgagtgcagcccgctggcggcggctccctactacgcctgatgagggcagacgagcgccatgtacca

SEQ ID NO: 299537 - DNA, 351 bp, Zea mays
agccttccgattgaaaccacctaccaccattcaaagccgttttgtgaaccaacaatcgccgtcaggctgttgggcctttttatgctttttggtcgctctgcaagtgctgctacggtcaccattgctccgaaatgctcgcaagctcctatagcttctctatttccgccggacctatcaccagcggtgtcttccgtatgtgaaaacccacttctacaacccttcaggatccaacaggcaattacagctggcgtgttacttttatcacccttgttcctacaacaatcatcagccctgttacatcacttaccttcggagcatttattggcacaaaagactacggctcatcaccta

SEQ ID NO: 299538 - DNA, 312 bp, Zea mays
cagaccattaactctatctactccacagcgcagacaaacccgatcgacaccatgagggggttgctcgttgccctcgctctcctggctctcggtgagagcgccacctgcacgcatacaagcggcgggtgcagctgccagccaccgccgtctgttcatctaccgtcgacggtgcatttgacagctccggttaacctgcacacctccagtgcatatacgcaacgacaggcaactgccgccggcggttcacctgacaccatcggtccatgtgccgacgacggttcatctgatcgagccaccatgccaataccatac

SEQ ID NO: 299539 - DNA, 316 bp, Zea mays
attcaaaataacaccaagcgaagctcactgtatacaacctaacaacactggctggggggagattatctctccttgcgcttcttgcgcttttcgcgagcgcagcaaatgcaacaatcataccagaatgttaagttgattctaattccattatttcacagttccttccaccagacatttcaatggtctgggaacacccaactgagcaagcctatctgctacaacaagcgattgccgcgagcgttgtacaataacaaatcgctctatgtcaacaccaattctaagctgatctaacaatacagaccatggcatcgtaaca

SEQ ID NO: 299540 - DNA, 320 bp, Zea mays
gcggaggttgtggctgccagacagcaccgtttgatataccgactgcgctgtatatgccgcctgcgttctatctgccggcgcagagcccgccgtagacatggcaataccgcattcaaccaccagaactaagcccgcgccagcagttccgatcctgcggccgcggtagcgtcagaaggccgttcctgggccagtgcgtaaagttgctgaggcaccagcgcagcccggaggtgacaccctacgactcgccacagtgccaggcgctgtgatagcagtgctgccaccagatcaagcaggtggagccgatgcacaggtaccaggcg

SEQ ID NO: 299541 - DNA, 309 bp, Zea mays
cttcggagaccattaaccttatttacttcctaacgcaaaagaacccggaacaccccctgaagggtgtgggtggttgccctcgctctcctggctctggctgcgagcgccaactccacgcatccaacctgcagctgcggctggcagccaccaccgacggttcatctaccatcgacggtgcatctgccatctgcggtttacctgtcacctgcggtgcatcttgcatcgccggtccacctgccacctgcggtccacctgccaccggcggtccatgtgccatcggcggttcatctgtcatctgcaccatgccac

SEQ ID NO: 299542 - DNA, 353 bp, Zea mays
gtcagactaacaattagctcatcgactccagattggacaactcgacaccatggaggtgctgatcgctgtccttgctctgctggcgctcgctagcagcgcctcctgcacaacaagcggctgctgttgctaccaaacaccaccgtatcatctaccgcctccgtattatatgccgcctccgtattatctgccgccgcagcagcagccgcaatcatggtaataccctaatcaaccaccgctaataagcccctaccagcagttatgatcctgcggcgtcagcagcgtcagcagcccgttcctgcaccactgcgtgtagttgctgaagcaccactgcaccccggcggcgacgtactact

SEQ ID NO: 299543 - DNA, 246 bp, Zea mays
cttcttcccatcatttttggtgccctcttttagattccagatgagttatagttcaatactaaaattttctgtctgctgtctgcggcttcccataaattaaatagccttgttcccacttcaaaataactagagaaaccctgttcaaaaacaaatttatgaactttcaacaacaacattttttctctaattaggatattttctaataatctctaaaacaatttttgagggccgcccctttaaaaagtt

SEQ ID NO: 299544 - DNA, 379 bp, Zea mays
  unsure (1)..(379): unsure at all n locations
acgcgtccgaactagcaacatagaaagcacaatagtgtaccaacaatgcagccaanatatttgcctcttatgctcttgtcttctgaaggctgtacgggacatttcgactgctaaactctatgctcctcttcccgccttacacgggttcggtggaaccatctcaccttagaccacagcatgagtgcattacttatcacctgtctcacaatatagctatcagagtacttgggcttatcgacaacataggccacacacacaactggttcaacctgtgcacctagacacagtctcatcacaatagtgatgacttgtctattgacacacacacatcagcagtactgtgctcncagattctcatcacactgcagttacttctgta

SEQ ID NO: 299545 - DNA, 394 bp, Zea mays
  unsure (1)..(394): unsure at all n locations
cgtncgatggagaccaactagcaacatagaaagcacaatagtgtaccaaccaatggcagccaaaatatttgcctccttatgctccttggtctttctgcaagtgctgctacggcgaccattttcccgaaatgctcgcangctcctatagcttcccttcttcccccgtacctctcaccagcggtgtcttcggatgtgaaacccaattttaaccctcaggaccacaggaatacagtgcattaccttatacctgtctcacaatatagctatcatagtccttgtgctatgccaacataggcacactcacactggctcactgtctcttagacaggtctcatacactgtgtgattgttatgaacacacacatacagtctgtctccagatttcatacatgaa

SEQ ID NO: 299546 - DNA, 324 bp, Zea mays
  unsure (1)..(324): unsure at all n locations
gagaccaactagcaacatagaaagcacaatagngnaccaacacaggcagccaaaatattttgcctccttatgctccttggtctttctgcaagtgctgctacggcgaccatgttcccgaaatgctcgcaagctcctatagcttcccttcttcccccgtacctctcaccagcggtgtcttcggtattgaaaacccaattttcaccctaaggatcaacagcatacagtggatttacttataccctgtctcacatatagctatacatagtcttgggctatgccaacatagaacactcaactggagaactgtgtcttaacagattcata

SEQ ID NO: 299547 - DNA, 417 bp, Zea mays
  unsure (1)..(417): unsure at all n locations
ttattccacaatgctcactcgctccaagttccattattacacagttcctcccaccagttacttcaatgggcttcgaacacccagctgtgcaagcctataggctacaacaagcaattgctgcgagcgtcttacaacaaccaatttctcagttgcaacaacaatccttggacatctacaatactaccatcgaacgcacagcacaacaattctaccagactgaccacctagcatggtgaccctgccgctacttgaacagcagtgcttgataaacccacttgctctggcaacgagttgaaaccagcacacaacagctgaacagttctgcagcgctagcaactagcctggtgaccctgccgctacctacacagcaacaactgctttaattagcccgctcgctgnggcaatgcacctacatac

SEQ ID NO: 299548 - DNA, 462 bp, Zea mays
  unsure (1)..(462): unsure at all n locations
tgagcattcagaaacacaccaagcgaagctacctagcaacgacttaacaacaatggctaccaagatattagccctccttgcgcttcttgcccttnttgtgagcgcaacagatgcgttcattattccacaatgctcacttgctcctagtgccattataccacagttcctccgaccagttacttcaatgggcttcgaacacctagctgtgaagcctaaggctcaaaagcgctggggaggctacacaccataacaatgaacacaatctggcattacatcaacatgacacacagacacagtcacacatgacatgagggactgcctatgacaaggtgtcacatgttgaagctgtcacacacacatgaagttgaggtatatactggactcctacaaaacactgtattacttgtggatgctctctacacatggcatgcattgtatgtggaactgtcatgaatgtataca

SEQ ID NO: 299549 - DNA, 437 bp, Zea mays
  unsure (1)..(437): unsure at all n locations
attgagtaccaactagtcaacattagaaagcacaatagntgtactcaacaagtggcnnagctaaaatatttttgctctcncnnntatgctccttcggtncatttctgcaaangtgcctgcgtacgnngcgactcatttttctccaccaatggcttcacatagctctctattagcttccacttcttcccccgtacctctcaccaacggtgtcttcggtatgtgaaaacccaatcttaaccctacggaccaacggaatcgactggctttacttatacctgtctccatataccataacagtcttggatatgcaaatagcacatcaatgtgacttctataaagttatacatttatttttaaaatctacttttctcaattatacatatattttagaattctcattgacttcttaacattctcctcatgctataatttaatta

SEQ ID NO: 299550 - DNA, 366 bp, Zea mays
  unsure (1)..(366): unsure at all n locations
cagcattcagaaacacaccaagcgaagcgcactagcaacaacctaacaacaatggctaccaagatattagccctccttgcgcttcttgcccttttagtgagcgcaacanatgcgttcattattccacagtgctcacttgctcctagtgccattattccacagttcctcccaccagttacttcaatgggcttcgaacatccagccgtcaagcctcaggctcaacagcgctgggcagcgttacacaccaatgcaatgacacaatctgccattactaaacatgaccacacacacagttgctatacacaccgggactgcctatgacacactatgatcacatgttgcacggtgtcacacacacgtgaatat

SEQ ID NO: 299551 - DNA, 389 bp, Zea mays
  unsure (1)..(389): unsure at all n locations
agcaacatagaaagcacaatagngnnaccaacaaggcagnccaaaaatnnngcctccnnangctcctnggncnnnctgcaagtgctgctacggcgaccattttcccgaaatgctcgcaagctcctatagcttcccttcttcccccgtacctctcaccagcggtgtcttcggtatgtgaaaacccaattcttcaaccctacggatcaacaggcaatacagctggcatttacttataccctngttctcaaaatatcagctatacatattacttgtgattatgcacaaaatcaggaacactcacactggtacaactgtgctattagacaagtctcatacacactatgattgttatgaacaataatacatcttgtccaattatacatgatatt

SEQ ID NO: 299552 - DNA, 396 bp, Zea mays
gctttatctactccagagcgcagaagtacccgatcgacaccatgagggtgttgctggttgccctcgctctcctggctctcgctgcgagcgccacctccacgcatacaagcggcggctgcggctgccagccaccgccgccggttcatctaccgccgccggtgcatctgccacctccggttcacctgccacctccggtgcatctcccaccgccggtccacctgccggggccggttcagcggccaccgccggtccatgtgcctcctccgggtcatctgccgccgccaccaggccactaccctactcaacctccccttcctcatcctcattcccagccacacccatgctcgtgccaacagccgtattcaagcctttgccagctgcagggaacctgctgcg

SEQ ID NO: 299553 - DNA, 231 bp, Zea mays
tcgggcacatttttaactttctgaagcctagggagccagggcaccgccggcaagggagccgaaatggttgcattggtagctcttctagctatttgcgcaagcgccactcatgtgacccatattttagggcccttgccaccaattgtgcccatgggtaccatgaaaccatgcctgcaggactgacaggggccacacgggcttgtcagctttatggcccttacgctcctgaaa

SEQ ID NO: 299554 - DNA, 413 bp, Zea mays
gcaacatacaaagcacaatactgtaccaacaatggcagccaaaatattgcgcctgcttatgctccttgggctctctgcaagcgctgctacagcgaccattttgccgcaatgctcgcaagctgctatagctttccttcttccaccgtacctctcaccagcggtgtcttcggtatgtgaaaacccaattcttcaaccctacaagatccaacaggcaatcgcagctggcatcttacctttatcacccttgttcctgcaacaatcatcagccctattacaacagttacctttggtgcatttattggcacaaaacatcagggcacaacaactacaacaacttgtgctagcaaaccttgctgcctactctcagcaacagcagtttcttgcattcaaccaactaagttcatcgaactctg

SEQ ID NO: 299555 - DNA, 380 bp, Zea mays
tgagaccaactatcaacagaaaaagcacattccagcaccgacaatggcagccaagagatttcgtatgcttatgctccttggtctatgtgcaagtgctgctaccgtgaccattaaacgcaaatgcgctcaagctgctatagtttttcttctttacctgtaactatcagcagctgtgtcttgtgaatgcgaaaacctaaaactttaaccgtacaagatcgaacaggcaattacagttggaattttatcattatcactcttgctactataacaatcattattactattacatcatttacctcatgtacatttatagacactaaagatacaggcacaacaactactagagctagcgctagcagatgttgatgcttactatcagc

SEQ ID NO: 299556 - DNA, 287 bp, Zea mays
  unsure (1)..(287): unsure at all n locations
gtggacctaagactaacaatatgctcatcaactcgagaaaggagaactcgacaccgtgcaggtgctgatcgttgctcttgctgtgctggctctcagtgccagctccagctcaagtacaagctgtggctgtcactgacaaacaccacatttacatctaccgccttatatgtatatgccgncttatctgtatctgccgccgcagcagcagccatagccatagcaatatcaaactcaaccactgaagctaagcccgtaccagcaattctgatcctgcggcatcggcagca

SEQ ID NO: 299557 - DNA, 268 bp, Zea mays
catcctatcatttagctcatagtctacaaataggaggactggacaccctgaaagtgctcatcgctgcccttgctctcctggcgatcgctgcgagcaccacctgcagtacaagcggctgctatagatgacagacacaaccaccgcatctaccgtatatgctgtatatgccgtatctgtcctatctgccgccgcagcagcaatcgcaatcatggaattaccccactcaaccaccgcagctcaaccagtgccaatacttcggatcctgcag

SEQ ID NO: 299558 - DNA, 184 bp, Zea mays
gatctagatctctagcatgaaccctggcttgtccaggctgccacccatctgcgggggtggcattttttatattacatatgaaacgtaatcgattatggtgccctcataccgacatgtgtttgactgaaataatcaatatattgcttgacatatatctctatcaacacatacccctttcgccagc

SEQ ID NO: 299559 - DNA, 358 bp, Zea mays
attcataaacacaccaagcggagcgcactagtaacgacctaacaacaacggctgcgaagaggttagccctccttgcggtgcttgccgtttttgtgagcggcacaaatgcggtgattattatacaatgctgacttgttgctagtggcgttattacacaactgctcccaccagctacttcaatggggtgcgaacacctagctgttgaagccgacatgctgcaacaagcggttgttgcgagcggcttacaacaaccacattgcgaattgttgcaacaatccttgtcgcatcttacaatactagccgtcataacgcagcagcagcaacagttgctaccagcactgatgcacctagtcatggt

SEQ ID NO: 299560 - DNA, 340 bp, Zea mays
ggacgtcagcctagcaattagctcatcgacttcagatcggacaactccacaccatggaggtgctgatcgttgccctggctctcctggcgctcgctgagagcgccgcctccaagacaagcggcggctgtggctgccagacaccaccgatttatctaccgtctccgtactatatgccgcctccagtctatctgacgccgcagcagcagccgcagacatggcaataccacactcaaccaccgcagataagcccttgccagcagttcggatcctgccgagtcggcagcgtcggcagcccgttcctgggccagtgcgtcgagttcctgaggcaccagtgcagccc

SEQ ID NO: 299561 - DNA, 369 bp, Zea mays
cagcaaagcggcagtgcgtagagaggatcgtcgaacagaacagcatgaagatggtcatcgttctcgtcgtgtgcctggctctgtcagctgccagcgcctctgcaatgcagatgccctgcccctgcgcggggctgcagggcttgtacggcgctggcgccggcctgacgacgatgatgggcgccggcgggctgtacccctacgcggagtacctgaagcagccgcagtgcagcccgctggcggcggcgccctactacgccgggtgtgggcagacgagcgccatgtaccagccggtccggcaacagtgctgccagcagcaaatgaggatgatggacgtgcagtccgtcgcgcaacagctgcagatgatgatgc

SEQ ID NO: 299562 - DNA, 334 bp, Zea mays
ctgcgtacacggcaccgcttttcctgtcatttctaaagtgagagtgaagcaacgagggggagacaaggcgaaatggggaagggaacgcaacgcaacgaagcgacggcggcgggcggcgaggtggaggagaacataacagcgtggctggtttccaagaacaccccccagatcatgcccttcaagctaccgtccggcgggccttatgatgtccgcgtgcgcatgacagcaatgcggatttgctgcagcgatgtgcactacccaacggagatgcgcatcgcacacttcactgtgaaggaaccgatggtgatcggacacgactgcactgccctggcct

SEQ ID NO: 299563 - DNA, 406 bp, Zea mays
caacaagcaacatagaatgtggaatccagttgcaacaatagagcaacaatggcgaccaagagattttcccttcttatgctccgtgctatttctgcatgtgttgctaacgcgacaatttttcctcaatgctcacaaggctctatagcttaccttcttcccccataccttccaataatgatagcttcagtatgtgaaaacccagctcttgaaccctataggctccaacaagcaatcgcagcaagcaacatacctttatcaccctggtttcaacaatcgccagacctatctgtggtgcaactcattgtacaaaccatcagggcacatcagctgcagcaactcgtgctacctgtgatcaaccaagtagcgtatgcagacctttcttcctactatcagcaacaacaatttc

SEQ ID NO: 299564 - DNA, 266 bp, Zea mays
catccatcgaccgatcgatcgccacagacaacaccacccggcgaggcgacacgacagccgagggggggaaggaataaactcactgccagccagggaagggggagaactgtactgctccgtagaccagtgcgcgcaccgcccggcagggctgctcatctcgtacacgaccagtggattaattggcatggctgctctggccacatctcagctcgacgcaacgcccgccgggctgggcgtacccgacgccttcacgttccggcgccgcg

SEQ ID NO: 299565 - DNA, 318 bp, Zea mays
attagaaggggagcggccagacgagacgatccaagcttcccgtccctgccatgcgacagggtaggtattgtgtcacgtaacctcaattcaatggactgggcgttgcaacacaacgactggactgacaaaaccgtgacccaactcaattgaatcgcattgcatcacattctcctctgctcaggtggcatcatagaggacaggaccgaaccgactgcccaacacaacagcagcccaaactgaatatggaatgggacgcgcactggagcatgaaattcagcgcgtgtggtgtggacgttacgcgcaacctgaacactacac

SEQ ID NO: 299566 - DNA, 242 bp, Zea mays
aagcaacatactaaggggaattcagaagcggcattggggcgccactggcgggcaacatatgctccatacatatgctccatgctcatgctgcatgcgttgcttacgcgaccattttacccgaacactcacaagctactataacaggcctttatacccgatacctttcatcaatgaccgctataaatggcgaaaacacaatgctaaaaccctacaggctacaacaagcagttgcaacaagcaac

SEQ ID NO: 299567 - DNA, 315 bp, Zea mays
gttgtagatcatcagcagccgctcttctagatgctacaagactaccgcctccatgctacgacgtagttgttctattatggcgcctaaaaacaataaactagtcgccgttgtacaacaacgtgactactaaaaaaacgctgtcaccaaacaaaataatcttgtagcacatcatccttttttcagctggtgtaataataaagaagagggcaccgatcatcgttcttaacaagagttgagcctgcatgatgaataatacgaccccccctgtagcgcattaatcaccgcgggtgttgtggttactacccgcatgatcac

SEQ ID NO: 299568 - DNA, 383 bp, Zea mays
caacaagcaacatagaaagtggaatacagtatcaacaatcgagcaacaatggcggcgaaggtattttgcatccttatgctcctcgctctttctgcatgtgttgctaacgcgaccattttttctcaatactcacaagcttctatagctgcccttattaccccataccttacatcaatgaccgcttcagtatgtgaaaacccagctcttcaaccctacaggctccaacaagcaatcgcaacaagcaacttacctttatcacccctgttctttcaacaatcgccagccctatctttggtgcagtcattggtacaaaccatcacggcacaacagctgcagcaactcgtgctaccagtgatcagacaagtagctctggcaaacctttc

SEQ ID NO: 299569 - DNA, 259 bp, Zea mays
ctcaccagcggtttgttaggtctgtgaaaacccaacgctggaaccctacatgatccaacaggctatgccagctggcatttcaccttgatcagcctcggtgacccaacaatcataatgcctattagatcatatacctttggtgcatttattggaacaaaaaataacggcacatcaactacgacaactcgtgctagcaaaactttgctggtactatcaggaacagaaagttgttacattaaaccaactagctgcattgaac

SEQ ID NO: 299570 - DNA, 245 bp, Zea mays
gcaacatagaaagcacaatagtgtaccaacaatggcagccaaaatattttgcttccttatgctccttggtctttctgcaagtgctgctaccgcaaccattttccaacatgctcacagctctatgcttctttttcccatccttaccacgggctagttgtgaaccattttacctcagatcacaggcatcgagattactttacctgtctcacacgcagccataagagacttgtgattgtgacaacata

SEQ ID NO: 299571 - DNA, 317 bp, Zea mays
cagcattcagaaacacaccacgcgaagcgcactgtcctcaacctaacatcactggcttgcggggggtgagccctgcttgcgctgctcgccctgttagtgagcgcaacacatgcgatgattatatcacagcgctgagttgattctagtgtcattatatcacagttccttccaccagatactttaatgggcttggaacatacaatcgagccaggctagaggctacaactagagcttgccgtgagcgtattacaacaacccattgcacaattgcaacaacaatacttggcacatctcaacctacaaaacatagcaacgca

SEQ ID NO: 299572 - DNA, 273 bp, Zea mays
  unsure (1)..(273): unsure at all n locations
gcagcgcgtaatgaggatcgccgaacagaacagcaggaagatggccatcggtctcgtggcgtgcctggctctgtcagctgccatcgcctatgtaatgcagatgccctgcccctgctcggggctgcatggcttgtactgcgctggctcccgcctgacgacgatgatgggcgcccgctgactgtacccctacgcggagtacctgacgcagacccactgcagcccgctggctgcagcgccctactacgccnggtgtggtcagacgagcgccatgta

SEQ ID NO: 299573 - DNA, 169 bp, Zea mays
gtcagcctaacaattaggctcatcgactccagattgggagaactcgacaccatgaaggtgctgatcgttgcccttgctctcctggcgctcgctgcaagcgccggctccaaacaagcagggtgggctgcagacaccacgtgtattacgctcgtcattccgctcggaatct

SEQ ID NO: 299574 - DNA, 427 bp, Zea mays
ctcacaaaatactctacatgttaagaggctgtgccagagtccaagtggtgaaccacggcggcgacgcagtgttcgacgataacgtggagcaaggtcagctcctgacggtgccacagaactttgcgttcatgaaacaagcaggaaacgaaggagccgaatggatttccttcttcaccaatagcgaagccaccaacaccccaatggctggaagtgtctccttcatgcgagcactgccggaggaagtggtggcagcgtcgtatcaggtgtcaagagaagatgcaaggcggattaagttcaacaacaaaaacacctttttcttcactccttcacagtccgagaggagggccgatgcttaaactccagccgatgccaatgcaatcaaaatcagggggatctttgtagggtaacgtaagtaggaagtaataaa

SEQ ID NO: 299575 - DNA, 219 bp, Zea mays
cggacgcttccttctacacttccgattctaaatgctcgaagatattcgattccctgaggtagggtttataacgaacatggacccttcaatattccatttgtattaaaatcatatgactagcttcacttcattatctaaacttatcttttaatgcattaaataatgtacatttcccttgtaattgtacttgtggactctgatgctttaataaaatacaaa

SEQ ID NO: 299576 - DNA, 368 bp, Zea mays
atttcaaaaagccctgggctcacgatcatgaaccaatcaagaaacttgtcgatgctcgtaatggaatcaaaccaacagtgctgattggaacatcaggagtaggaaggacatttactaaagaagtggttgaggcaatggctgcgttgaatgaaaaacctattatattctccctttctaatccaacttcacaatctgaatgtactgctgaagacgcatatacatggagtcagggccgagccatttttgccagtggaagcccatttgatcctgtagaatacaagggaagggttttcgttcctgggcaggcaaataatgcatacatcattccctggcctttgtgttggggttaatttatgtttggttgcatt

SEQ ID NO: 299577 - DNA, 233 bp, Zea mays
cggaattaccgggtggacccacgcgtccgaccaaaaaactaaaaaaacaatacatcaataatgctatccaaatcgtatgtaccggtagctggattgctgttgtcatccacgtcccataccacctgctcaaggtctttatgaagatccatgtcacactcgtcagggagcttgagaaaaaattcagcggcaaggatgtgagccattgctgctacaaggaggattgtgaggccacc

SEQ ID NO: 299578 - DNA, 425 bp, Zea mays
aacaaatcttgtgtatttcatccacgatgaatcccttcaaaaccttgccaaccctgggtttcctcttcttaacccttttcagcttagcccatgcagccacatttgatataagaaacaactgcccttacaccgtttgggctgccgcatctccgggtggtggcaagagacttgaccaaggtcaagcatggcaaatcactgcagcctctggaaccacacaagcccgaatttgggctcgaaccaaatgcaatttcgatgcctccgggaaaggctcatgcgagacaggcgactgcggtggagtcctcgaatgcaagggatacggtaaagctcccaacacactagccgaatacgcaatcgaccaatttgagcaccaagacttcattgacatctccaacatcgatggctttaatgttcctatggagtttagc

SEQ ID NO: 299579 - DNA, 401 bp, Zea mays
gcacaacagatgcgttagctcaccgcccccacctgcgtttctccaatttcagtattgggcatctccctgccgattaatttcctttcagaaaaccctaattccacactctctctttttttttacattacatcaaaagcagagaaaagcaaagtggaggaggaaagatgttagcaatagcaaggcaaaggatgttggggcaatcatttaagaagattctgcctgcagtgtcagtcttgagaagttactcatctgctgcaaaacaggttggagaatatcaaggtgcatacaagataaccaagggacttttggagaagtatggacctgaaagggttcttgatactccaattactgaggctggttttactgggattggggttggtgctgcttactatggtctgaag

SEQ ID NO: 299580 - DNA, 327 bp, Zea mays
cacgaggcaatgcttgttcaaccgcactttaaaaatccctaatcctatggattgagtgcttagtccctagaacatagggaaagacaatttatgtgtgcagaaataataatgcctcgtgattgctgcgcagattagaatcgtggtgccaaggataagagatctgagggttaaggggccagtgagaatgcccaccaaggttcttcacatcacaacaaggaagtctccctgtggtgaatgaacaaacacatgggatagatttgtgctccgtgttcacaagcgagctattgatctttttagctgtcctgatgtggacatgttgttcacatc

SEQ ID NO: 299581 - DNA, 384 bp, Zea mays
tattgaatgatttcatgaagaatgataatctaatgcatctgcttaatctctaagattatgttccaacctattaacacaaagatccagattgcattcttgattgtgatcacccttgcgagatgcttattgaatcatgtaaaaagctgcacatcatgaaatgtaccgaagccattgaactatcaccaagagctatggacaaatgcaacattagaatctccagttgatatcttttaataaggtccacaatattactatgttgatagcatagccagcatccgatggttatttagcacgtttactttgttactactttattatcactggtatttaaaatcatatattgtcctttttttattcattttaggaacaaaaaaataaactttt

SEQ ID NO: 299582 - DNA, 439 bp, Zea mays
cacgcggccgcggacgcgtccgcgaggtgtcagaatttcattacaggaaaaaaacctcagctcgcgagacgcttttcttctgatacgccgaacactaatcttactcatccaaccctttaacactcgacacccggtaccgcgagctaccattccataggtgacaacagcgatatcagggcgcatgctgaaccactgctgaagtgcatgcggcaagttatgccgagctagcaattaaagatgctgctccgcttaataactttcaagacggacgacacgtgtaaggacatagttgtggaccaggtcagggatcgcgctaccagctacgatgacttgacaaacagccttcctgagaatgactgccgatacgcgatctatgatttcgactttgttactgcaaaggatgttcagaagagcaggatcttctatatcctatggtccc

SEQ ID NO: 299583 - DNA, 435 bp, Zea mays
gggaaatctcgtaggtttgccagtaattgttgttccaactgggttcaaaaacataccgagtccacctccaactggtactcggagacgaaccacagtcaacacgggcatatatgctcctcctaaccatgatcacatcgcattagccttagcaatggcttaccagtctgcaacaaatcatcataagcagcggccccccatagatgatctgggaccaaacgacacaatacccaatccccctaccgttcccatccctcctagacgcttgcatatgtaacagagtttgtaagaaaccttttagtgcctcacaattgtcaaagcctgctccagactgtaacctgtacctaagaacaatatcatcattcaaaatggcaagatttgatggataccccgttaggtttttttttccttcttgtttctttcgccatatcacgattc

SEQ ID NO: 299584 - DNA, 355 bp, Zea mays
cggtccggaattcccgcgttcatatacaaaaatgtctcttcactcttctctcaccatgtcattgctgtctttctcctttttgttgctgcggacttttagtgccaaagctattgttcctccatctgaaacttttaggtttgtcaacgacggagaatttgggccgtatgttgttgaatatggtgcaaattaccgcgtcataagcatagctaatgcccccttccagcttgcgttttataacaccacctgtaatgccttcacccttgcgttacgcatggctacaacgcgttccgagtcgctcttccgatggtattgggaggccaacaggggcaaccccgttcgcgagaatgccacgttc

SEQ ID NO: 299585 - DNA, 364 bp, Zea mays
cccacgcgtccgcccacgcgtccgcccacgcgtccgcccacgcgtccgggggaaagcgtcggctgagataagagatcctcacaaaggtgtccgagtctggctcggtacatacaacacggctgaagaagcggctcgagcctacgatgaagccgccaagcgcatccgtggggagaaagccaagctcaacttccctcaaactccacacctaactcagcctcctgctaagaaaaggtgtatgatggctcctgagttgactccgccgagttctgaaacaaagagcccaccaaccccacaactttttatgggttttggttacgagaatggcgtttacagaccgagtgaagcaatggaaagcgagatggag

SEQ ID NO: 299586 - DNA, 402 bp, Zea mays
ccgaaagctgcaagaactcgttccaaatatggacaagcaaaccaacacatctgacatgctggatttggctgtcgactacatcaaggatcttcagaagcaagttaaggtgctaaaggagagccaagatcattgcacctgctcagcaagcaagaaccagcagcacttctgctgaaacacgtaatgctcactgtacatgacctctaaagcatgtccactagggaaagaaaaagatgtaagacagctctcatgcatgttgtttcatgaggttttgaactgcagcagttgagaggctttatctaccaagcactgtatcttctgtatgatccaagagggatggagcaattgcatcaccaagcattcaagtgattgggaaaagggtaaaaaaaattggggagagaattt

SEQ ID NO: 299587 - DNA, 275 bp, Zea mays
atgattgataaacgcccaacgcttcaaccctgcttcgtttttctgcacgtggagcgtttggggcatgttttctggtagaggaatgtaccttgatactctctgcccgatcttatcttgtgtactgcctgttggggttgggccgtacgattttaggctattctcaacgggaatgaatttcgtttcactctttttaactctaccacattatcaaaagagctataaaactataaaggagaaaaaaaaaaaataacctaaaaaaaaagaaacttatttgt

SEQ ID NO: 299588 - DNA, 435 bp, Zea mays
gacagatcctcctggacctcaattttgataacaagatcaccaaggacctctccgaggagggggtcattaccctgcgtaaggaggatgccaagtacatgattgacggagaccttaaacgtttcaaccgtgtggcgattgagaggctgaaggagattatgtgctacaagggcatccggcacaagcttggactcccagttcgtggccagaggacaaagaacaactgccggacacttaagggaaagagggcttcacttgccaagaagaagtcacccgactcccaagatgaataaatcgtattgccatgtattgaacctctctctctctctctatatgcgtgagattgtgagcgtgtgtgtgtttaacgctactactgctgggtgctttgtttcagcttttatgctgccattgacaaatcatggggtagtcatcaactgc

SEQ ID NO: 299589 - DNA, 275 bp, Zea mays
ctcacgcgtgcgcccacgcgtccgagcgaccttttctagatagtatgggtgctaaggcctctggataaaggagcttgcctttgtcaaaagacgccaacttttgtctgctttggatgagtggtaaggtccggggtctgttcgaatcgtggcgaaggatgcgttttaaagttattttgtcatatgctacgtgttcgtattcttgtagagagttggctacgacccgctgctgtgctatgtgggtgctgagacactcctgaagtattttcaccttagct

SEQ ID NO: 299590 - DNA, 392 bp, Zea mays
ccgggccggaaacccgggcgcccacgcgtccagaagagcccagaaccgtccatcccctactggatccgatgcgcactgggataccatgagtacaacgccaacgcaggcactggcgccgcaccaagctcggcttctgagcgtcgggattggccggctgctgcatcggaaggctagggtctaagagctatcttccttctgttttataaatgtgtgactttttctgtaagctagcacgtgttgctatgacgcttttattaagattctggtgagcggtgatgttaagagaaaattggcactactgcggtgtaccccaagattccttgcaatattactatgctaagaaaagaaccttatatcttattatatatgtagtgctgcattgattgacgttc

SEQ ID NO: 299591 - DNA, 348 bp, Zea mays
gcttcgtgaggttctccgggtttcggtttcgtgggtgagcggatcgagatggcggcgtcgggtgttgagtaccgctgcttcgtcagcggcctctcctgtgccacggacgaccactccctccacaacgccttcatcacctacggcgaggtcctcgagtccaagattatgctccatcgggagacgcatacgtcccgcggcttcagcttcgtcaccttcttcacggaggaggcgatgcggaacgccatctagggcatgaacagcaaggagcttgacggcccgaacatcaccgtcaacaaggcccagtccctcggcggccgtggaggcggcggcagcggctactgtggtggt

SEQ ID NO: 299592 - DNA, 456 bp, Zea mays
  unsure (1)..(456): unsure at all n locations
ccgaaagctgctcgaactccttccaaatatggacaatcataccaacacatgtcacatgctggatttggctgtcgactacatcaatgatcttcacaatcaggctaaggtgctaaaggacagccatgataattgcacctgctcagcatgcatgaaccagcagcacttctgttgaaaccgncatgctgactgtacatgacctctgaagcatgttcacttgggacacaaaaacatgtaagacagctctcatgcatgtcgcttcatgaggttttgaactgcaggagttgcgaggctctatataccaagcactgtggcttttgtatgatcaaagacggatggagccatggcatcaccaagcatatgaatgattggtagaagaggaaaaataagtggggagagatatatatgtaggagaaacaactgtatagtttggctgcagctattctatatatacacaca

SEQ ID NO: 299593 - DNA, 379 bp, Zea mays
  unsure (1)..(379): unsure at all n locations
cgaggccgccaagaaggagatcaaggacatctttacccgctacgatcgcaccctcctcgtcgctgacccccggcgctgcgagccgaagaagttcggcggacgtggtgcccgcgccaggttccagaagtcgtaccgttgagcggctgcctgctccatctcgatttttcagatcgttgtgggtgttcttcgctttatttcctatcaatggatctgcttatctggttctatatctagctgctgctttaccataatgtttagactttaatgcctagcctgaaaccttgtttgcaatgtgaaattaatgtgagagattatgaagactttnctaaaanacagatggaacgactgctcttgggaccgactgttagaacttatgtgc

SEQ ID NO: 299594 - DNA, 333 bp, Zea mays
  unsure (1)..(333): unsure at all n locations
cgaggccgtcaagaaggagatcaaggacanttttacccgctacgatcgcaccctcctcgtggctgacccccggcgctgcgggccgaagaagttcggcggacgtggtgcccgcgccaggttccagaagtcgtaccgttgagcggatgcctgctccatctcgatttttcagatcgttgtggntggagggagaggattgtatttncttgtaantgggtgtggtnnttntgggtgtatatctagctggtgctttaccataatgtttagactttaatgcctagcctgaaaccttgtttgcaatgtgaaattaatgtgagagattatgaagactatatc

SEQ ID NO: 299595 - DNA, 233 bp, Zea mays
  unsure (1)..(233): unsure at all n locations
gaattcccgggncgacccacgcgtacggctgaacgacattgggctcaccggcctctttggggtgtacgccaacatgtgcctcctaggggtcgcggtcctgttcgtcacggtgcccgaaaccaaaggcatgcctcttgaggtcatcaccgagttcttctccgttggggcaaaacatgccaaggaagaggaggatgaggatgccaaagaaagttgatcacccgtacggtcggccc

SEQ ID NO: 299596 - DNA, 382 bp, Zea mays
cggaaaacccggcgcgacgcacgcatccgcggactcttggtcggactcttgggcggactcgtgggcggacgcgtgggcgcccgcgccgcggaccttcatgaccagtgtggtacctacgcatgatcactacttgcatgtctactactactactgaataaaaaacctctccgcgcacgtcgtccttgtgtttgtgtgtgtgtgatagagaggagactgttagccggccatgtccttttggctgtttggtttatttttgagttcatgcggactttatttatttccatgtacccactttgaaccatgcatgttccttatgatacactcacctctttttgtttataaagcaatttaattttttttttacttttttttctcatttctt

SEQ ID NO: 299597 - DNA, 252 bp, Zea mays
tttgccggctgtacaacaagaaaaacggccgccagaatacacagcagcggcaggagaacaatcagaatcagaagcaaatggagtctgaggcctcgctctcgcactcccactcagacacgcggacgccggagtcggagatcgacgacgacccgttcccggagctggcctcgctgccggcactcgacgacatgatgggcccagcagcagcagcgcctgccggcgccattttgcccaatgaggaggtggaagact

SEQ ID NO: 299598 - DNA, 362 bp, Zea mays
  unsure (1)..(362): unsure at all n locations
ccggnccggaattcccggtcgacccacgcgttccccgacgccttggccgaccccttggaacttgttaatgggcgtccatggcgctgggctcacggactgcgtgttccttccgcacggcgccacactgatccagattgtaccttggggcgccctagatgggatatgcaggatcgattttggctacccagcagaacagatgggcctgaggtaccagcactacagcatcggcatgcacgagagcagcctcacggagcagtaccctctggaccacgagatcttcagaaacccgcttgcgttccacaagaacgggttcgagttcgtcaggcagaccttcatggatacacagaatgtaaggcttgact

SEQ ID NO: 299599 - DNA, 375 bp, Zea mays
gcaaccgcagaaaagcccaccccatgttctgcaaacccggcgtaacggggaccgtcacggccaccaacttctgcccgcccaacctggcgctgcccgagggcggctggtgcaatcagcagcgcccgcacttcgacatggcgcagccggcctgggagaagatcggcgtctacggcggtggcatcattccggtcatgtaccagagggttccttgcgtgaagcgaggtggagtcaggttcaccatcaacgggcacgactacttcaacctcgtgctcgtgaccaacgtcgcggctgctggctccatcagatccatggacgtcaagacctccaactccactggctggacccggatggcacgaaactggggcgcgaactggc

SEQ ID NO: 299600 - DNA, 247 bp, Zea mays
gagacgggcacgggatgaaaaaaatctaaccctagcatccgcatccctaggcttcggcgaccgactcctgtctggtgccggccccatggcgacaaggccctatagatactctcgactaatcaagaacaagccataccccaagtccaggtactgccgtcatgtccctgacctccctaataagagctacgattttggcatgaaaagaaaggctcctgatgaataacactactgattgcgccttggctct

SEQ ID NO: 299601 - DNA, 422 bp, Zea mays
accggatgtaaaaaaaaacacgaagcagagagcattatactgcttgcttctattgagagcgatgcaatatgttgttacaataaatgttcttcatgacgccttctcatcttttggatttgtacaaaacattgctatttttgagaagaatggcttttaagcattgatccaatgtccatacattcaaactgcgtatgcagcaaaagaagcactataagggcacaccatctatgaaggtggctactgctaaccgaacctcacattttcactccatactgaacttaatgtataggttaacaatgagcgatgtagagattattccaatgggaatgccactccaagcagtgatcaacctttctttcttggggcctaaccaataccaagcgttggtgctgctatttcaccaccacatggtagatttcttc

SEQ ID NO: 299602 - DNA, 388 bp, Zea mays
cggacgcgtgggcggacgcgtgggcggacgcgtgggatcttctggcgcagtccgctgtggtcgtcctgaccgagaagagggtgccgcatcggctgcttgagatcgccggtgtcgccgcgttctgggcttggtacccgttgctggtggcgtgcctgccgaattggtgggagagggtggcgttcgtgcttcttagctttaccatctgcgggatccaacacgtccaattcttcctgaaccacttttcgtccgatgtgtacgtctggccacccaagggcaacgactggttcgagaagcagacggcaggcacgctcgacatcctgtgccctccttggatggattggtttcatggcggcctgcagttccagattgagcaccatcttgttccccg

SEQ ID NO: 299603 - DNA, 363 bp, Zea mays
ttcagtaacaactataaattattcacgaccaccactcatagacatgcggggaatatataattatagtgcggcgcccatatcctcctttgtaccaatacaagccaacactagtagatgtattattatttatattaatacgctttcacatacatgtacctctgctacctgaaaaaggatgtgattcgagttatcaaattaaaacacctgccacaaaaaactatatatttttcattaaaaaaaataaataaaaaatggccgcctttctatatgatccaaacttactatctcgtgccttctatatcataaattattttatatatctaacctaaaatccaaatttacttatccgatctttttaacaac

SEQ ID NO: 299604 - DNA, 314 bp, Zea mays
gatgtggctgcagaaccaatccaagcgcgtggacagggcaaagacaccctggcttatggctggcatgcattcctccatgtacaacatcatcaccgcacatcacatggctggtgagagaatgagggctgctttcgacaaacggtttgggaagtacaaagccgactcggtgcttgcaaggcacgttcatgcttatgagagatcataccgcattcctaatgcccactacaacataacgtccggaaatcggcatgcagcgcccgacaaattaggttccgtatacaataaccgtcagcgatggaagcaaccagaaggga

SEQ ID NO: 299605 - DNA, 432 bp, Zea mays
  unsure (1)..(432): unsure at all n locations
ggaanncccgggtcgacgcacgcgtccgcggacgcgtgggcggacgcgtgggcgacaaggaggcgaaccagtggaaagaacgtggcgcaggcactgtgaagctgcttaagcacaaggagaccgccaaggtccgcctcgtcatgcgtcaggcgaagacgcttaagatctgtgctaaccatcttgtggtggcgacgactaagatgcaggagcacgcagggagcgacaagtcgtgcgtgtggcacgcgctggacttcgcggacggtgagctcaaggaggagatgtttgctatccgttttggatctgtcgagaattgcaagaagttcaaggacactgttgaagagatagctgaagagcaaggaaagaccgaggtgaaagaaaacgaagaagtcttcattgccgccgcatatttggtacagaagttaacagtgacag

SEQ ID NO: 299606 - DNA, 421 bp, Zea mays
  unsure (1)..(421): unsure at all n locations
gaanncccgggcggacccacgcgttcgttcttttctcaatctcctcgaaaccttatgatcgtgcttgatcggcaattaccagatggggcatatagatgcgttaacaatcccatcaaagcttgctcatgttcacccccatcaagcacccacccatgcagacaaggattatgacctccccatcaagatcctgcagttccttgtgcccattatgatcctgggccttgcattttgtatacggcagtacaccaaattcatatatattactattcttagaggcttgccttttgagcctgtattatggtaatggttctaataaaaacagctcaataattttgcattttatttttcatgtggatatttcctcattagtcacaatctacttttttttattgacatacattttgaaatgtgctcttttttt

SEQ ID NO: 299607 - DNA, 380 bp, Zea mays
cgcgtccggggcaagcgcttaaccttaacctgatggtcgatcctgtcctggtggcaatagaccccgggtgtccttcaagacggtcttttgtttcttgattactcctcattctcccaatccgtttttccacgccgtgattaccttctactggaggcccttcttcaccgaccgctccttgttgaggctcctcggattcgttctgaccactaacatcatcaacggcggtctaaagtgcgtctagtacctctccaccttcttctccatatccttcattgaccgtgtcttcttctacaataggtactgctttttgctcaaattgttgtactttgacaactttgtatgcatgatccataatccttttggatgatgattactctatt

SEQ ID NO: 299608 - DNA, 374 bp, Zea mays
ctttggggtcctgcagacttgtggcgctccttatctgactggagatacaacaagagggggactgtagctgcacatctactaccccactaactcccaacatcaaccaatggtcatccttcacatgtgcctcactcttctggacactaagaaagctatagtcttcttctagactaacgctgatggcaacacatcatctcccaaggaaatgactatgctcttttgtatctctgaaattatacctgagatagagaactgcgattttgacttccaaccctgccattacttcatgaatgcaatccatggctctcctttctccaccatccatgtgacaccagatgatagtgtcagatacaccagtgatcaggatatggtct

SEQ ID NO: 299609 - DNA, 421 bp, Zea mays
tacaaaaaacttaaacaaaaaagacaaaaaacataccaaaaaaaaacaacttaaaaaaaggggcgggtgacaatacacaagacagaagtttaaagccaaaccaacagaagcgtacaaaaaacccgtggtacagacccaaccgaatagctgtacctgagcccactgtccagcaaagcctccgaactacctaacagacgagggggcgcggtctactacggctgggacaccgtggcgctgtttgcagacccatagacttttttcaagaacccctaactggaggtgatccactcccgctttaccatgctgggcgcgctaaactgcgtctttccccaacttattgcccttaacggcattaagtttttcgaggccgtgtggtttaaggaaagatcccagatcttcagctatggcaaactggactacc

SEQ ID NO: 299610 - DNA, 268 bp, Zea mays
  unsure (1)..(268): unsure at all n locations
tggtgaatgatcaagttggaagcttttagtctatctttgntnananaaaatnatnnnntggtagcggttttttatttttttttcttaaattaaaaaaaaaaaaaaaattaaacaaaaaaaaaaaaaaggggccgcccttttaaaaaatccaaacttacgacccccgccattcaacataatatcttttttttattgtcacctaaatttaattcacttcccccctttttacaacctttttacttgtaaaaacccttcttttacccaactt

SEQ ID NO: 299611 - DNA, 399 bp, Zea mays
  unsure (1)..(399): unsure at all n locations
gaagaagccgagggaccacatgatcccactcaagtcaattattattgatggaaattgcagagtggaggatagagggcttaaaacacatcatggtcaaatgatttatctgctatgcatttacaacaagaaagaaaaggagaaccaaatcacgatgggtggatatgatattgaagatgccctagcctggaagaggaagatagagcttctgattgatcagcaacaggatactacgacagctaaaaaccataaagcttttgcttcgttggactttgatatagatcttggaggaccattttcgttctctgaccatgacagcggacccgaagaggaagaagagnccccgcccaccttgcttcgcaggacaactatagggaatggccctccttgatctgtacttga

SEQ ID NO: 299612 - DNA, 350 bp, Zea mays
atagagccaagagacccatcaagaggccgcctacaggttaatcaatggcgacggcggctagatgctgtcaccggcggctcatcctcgcgagcgccggcctgctatccgtgctcgcggctgctagcgccagcgccgggacctcctgcgtgccagggtgggccataccggacaacccgctccggagctgccgatggtgcgtgaccagccggacctgcggcatcgggcccagcctaccgtggcctgagctgagcaggagatgctgccggtagctggccgacataccggcgtactgacggtgcacggcagctgagattcctcatggacggggcgatcctgtcgagcccggactc

SEQ ID NO: 299613 - DNA, 365 bp, Zea mays
gaaaaatattcccaaaccctatcttccgattttgattggcaaaccttggggtttttttcaacatgaccgtcggcggggcaccggggggccggatcgtgatggagctgtccgccaacgaggtgcccaagaccgcggaaaacttccgcccgctgtgcacgggcaaaaagggcgttggcaagtccgggaagccgttccactacaagggctccaccttccaccgcgtaatccccgagttcatgtgccagggcggtgacttaacccgcggcaacggcaccggcggcgagtccatctacggcgagaagttccccgacgagaagttcgtgcgcaagcacaccgccccccgtgtgctctccatggccaacgcc

SEQ ID NO: 299614 - DNA, 186 bp, Zea mays
ccccgtcatcgatctcgtttcaaatacatccatcctcgtttcctccgtcccgcagcatctcaaccccatggccaagatcaagatcgggatcaatgggttcggcaggatccgaaggctggtggccaaggtggcccttcaaaatgacgatgtcgagctcatcaccatgaacgaccccttcatcaacac

SEQ ID NO: 299615 - DNA, 349 bp, Zea mays
attttgagcattcagaaacacaccaagcgaaacgcacttaccaccaacttaccaccatgggttgcgaaaaatttacccttccttgccctcttggcccttttgggaaccgcaccaaatgcgtccattattcaacaatgctaactggctcctagggccataattccaaagttcctccaaccagttacttcaatgggcttggaacacctagctgggcaagccaacatgcaacaacaagcgctggcgggagggggttacaacaaccaattgcccaatggcaacaacaatccttgccacatctaacaatacaagccatcacaacgcaacagcaacaacagttcctaccagcact

SEQ ID NO: 299616 - DNA, 413 bp, Zea mays
aagggcaagagcaatgtagcaacttcaaaataccaggatacaagcaggaccaaccactattctgcccaagataatgatgactttatctcttcagaatcagataggcagcttctactcatgaggcagcaggatgaagaacttgacgagctcaatgaaagtgttcaaaggattggtggcgtaagactaaccatacacgaagagctggctggacaggaaaggatcctaaacgacttaagcttggagatggagactacttccaacaagacttgattcgtgcaaaaagagtggcctggtgatgaagaggcggcatcagggtcaacatgctgacggtcccggtgtctgtcatcatctttgtttgggtcctgcataccaaggcccaggcctcgattctcctcctttgtggctcctctaga

SEQ ID NO: 299617 - DNA, 322 bp, Zea mays
cttcttcccactggtactggtactgaactttttgctcactggacgactactggtgaggaaaggtgtggccgttggctgcgggtggcaagctatggttgcctacattaactttttgatgctactactttatcggcataccccttggcgtgctcctctgattcaagttcggtttctggatcaagggactgtggtgaggcatgattgggggtacccttattcaaacacttgctttgatctggatcacgttaatgactgtctggaacattgaggttcaggaatctctgatatagattggataagtgtgacgacacaaggcattctt

SEQ ID NO: 299618 - DNA, 343 bp, Zea mays
ctgagcaacgccgtacatgtgtactaccatcagatccatccattcgttcgtccgtccggggagtgaacagtgtggtcttctctgtactctacttgttcagatcgtaggcgtgtagtagttgcaccagccggcgtatgctcatgatcgatgtgtgctcatcaatcaatgtcaatggctgcctgctgtaagcggtcgatgtaaactaagcacagacgcatgtatcgtcatcagtggatgaatcaatctatcgatggcctgtgccattcatttttgaatcataaaataaaaaatattaaaataattattttaaaaataaaaaagggcggtcgtcgtaccccttgcc

SEQ ID NO: 299619 - DNA, 417 bp, Zea mays
  unsure (1)..(417): unsure at all n locations
cacgcgaacaggtgcggcagttacgcttgtttttatgccagtttatctccgcaaagctatttgntgtcggaggccctatcttaaacgagcgctacctctcctcagtgctctttcaatccatcaagaaagaaactgagaacatagtgttccaaccctatagcacacaaatctgggcttcttgcaaactatttcctgaaacgttcatcattttcatcacagaaaaataaagctcgggtgccttctgttgatttctacatacatttccctttctattgtgttaaatctagcccactgtttttctctttaaaacactttgttaatagacttgtgatgttttactactagtttgacactcaaagtatttctgtatattccgtcaaattttaaataaaaaacaaacaattttttttcttacat

SEQ ID NO: 299620 - DNA, 302 bp, Zea mays
atttcattgtctgttatgaaagttttttttttgtggctaacaacatttggaagatggtcaaaattctggctgggcaaaagaaatatttttgccacaaaaaaacaatccggccaaatgctaaacagctctatcccttattcatgaagaagggaaatatgtcatgggatgcatttgcctcacaggtgcgaacaatccataaaggatatattggagagcccatggaaatcacaccatgaagaggcgaattttatgcaaaccctgccgcctgtatatgtgaaaagacccacagaaactcagcaata

SEQ ID NO: 299621 - DNA, 248 bp, Zea mays
  unsure (1)..(248): unsure at all n locations
cctgcatcntatcgctcttattggactttttttcatcaaaggcgttaccatcaagctggtttccatttacgacgaacgtattctaattgacattcataacttctacaacatcctcattgatgaactcccttccaatgtagctaaccttctcttatcaattttaataaaaaacaaaaccaaaaatgttgtttgtgtaatttcttaaggcctttttttatcaaaatacccctctataaattgttataatt

SEQ ID NO: 299622 - DNA, 471 bp, Zea mays
gggtccacccacgcgtccggttaattcccctgcattgctaccgagttattgataataattatggctgttaaaaaaaaaaaaaaagagggaaaataaaaaaaaagaaggaaaaaaaaaaaaaaaaaaaaaaaaaaaaaaaaaaaaaaaaaaaaaaaaaaaaaaaaaaaaaaaaaaaaaagggccggcccttttaaaaaatccaagtttacttccccgtccttccaacgtaatattttttttatagggccccctaaattaaattcactgcccgtcttttaacaacgtcttaactggaaaaaccctggcttaaccaaattaaatccctttgaaaaaaatccccttttccccagttggctaaataacaaaaaggccccaaccaatcccctttccaaacatttgcccaccctaaatggcaaatggaaccccccctttaccggcccattaaccccggcggttgtggtggttaccccc

SEQ ID NO: 299623 - DNA, 307 bp, Zea mays
  unsure (1)..(307): unsure at all n locations
ttacaaacttcatttttttcgcagttattctcacgtctgactaccactttggcgacacttttcataccaacgaccgtcccacataatnatncatcaccttaacttccacttatcatgctgcttaacccatttgattagcttgttgttgacaacaattatttttatctcactccactgatcaactttattgatgctatcaccatccctatagttgacactttttacaagaacccttacaaccacccatacctcatgaaattcttacaaagctcatcccccaaagctatactctttttaaacttcttca

SEQ ID NO: 299624 - DNA, 349 bp, Zea mays
  unsure (1)..(349): unsure at all n locations
aaatgcgcaaggctacttcgctggttctcttataaaacagctttgagtccctcacctncttcaccgaacgttatgacattgtctacgtctaccgcaacaataactgcacgcgctacatgaaggagtcttccaatttttttaaacatttcaactccacaaaaaatcccaacaagaatattcttactccaccttataaattcttggccttatgatgtgggtgcaccccataaaaaactggtttttaatttgcaacctaaaattttctctgtttttaccccaccatatgatcttcattcatactctccatcaccgtttttaataactcattgttccaattcaatcttttctt

SEQ ID NO: 299625 - DNA, 213 bp, Zea mays
  unsure (1)..(213): unsure at all n locations
ggacgggtggtcaaattcatggttcctcccacattttactactatgacggcntnaggcgnncganccttttatatactcacgggggcacacataaattattgccataagctatgggtgctggtggatagggatgaccaaagcgttctgctccaaatcttcaccaagccagtgtgggacaggccaacgctgttcttggagaacatccaaaggat

SEQ ID NO: 299626 - DNA, 485 bp, Zea mays
  unsure (1)..(485): unsure at all n locations
gaccccgcgtccgcgcgcttaacgtgcctgacaaataataccattgccagaaggggacggatctacctcccgcaggacgagctgaaaatggcggggctctccgaccccgacgtcctgaacggccgcgtaaccgacgagtggaggggcttcatgaggggccagatcgcgagggccagagccttcttcatgcangcggangaaggcgccaccgagctcaaccaggagagccgatggccggtgtggtcttctctgctcctgtaccggcagatcctcgacgagatcgaggccaacgactacgacaacttcacccggagggcctacgttcccaagacgaagaagctgatggcgctgcccaaagcgtacctgagatcactggtggtgccctcctcctcttctcangctgagagccggagacgctattccaccctaacataagaccgtctctctctcactgtcggtacataagaacaacagcagtgaatgat

SEQ ID NO: 299627 - DNA, 424 bp, Zea mays
  unsure (1)..(424): unsure at all n locations
gccgaccacgcgtccgcccacgcgtccgcccacgcgtccgggccaagttgcggttcctcttcgaggtggcgcccctgggcttcttgatggagaaggccggcgggtacagcancgacggcaagcagtcggtgctggacagggtgatcaacgagctcgacgagcggacccaggtggcctacgggtccaagaacgagatcatccggttcgaggagaccctctacggctcgtccaggctcgccgccagcgccaccgncactcgccgcgcccttatctgaattactagaatccgggctcgtagatgctggagtacacagtacagggaaattgcccacttttttcatcaacttaagtttttagattaaacttttttgaaacaatcagacaggagatctgtcttatatattgatgaggaagaaggatgccc

SEQ ID NO: 299628 - DNA, 457 bp, Zea mays
  unsure (1)..(457): unsure at all n locations
aaaccgggccgacccacgcgtacgcaagaccgcgccgggacgcggaggctttattatagacaccgngatctcagatgtccgggggggagatgtcgacgtcgccgtcgcattcaccggtgactggccaagccacccagatgaccagttcgacccggccgccctcccggtggtcagccacatcaccctgaagaacatgactggaacaagaatctcggtcgctggcgttttgtcaggaatcgccggcgacccgttcaccgacatctgcctctccaacatcaacttctcactggccgattcggccagtcccacctcccactggtcttgctccaatgtctccggatactccgagctggtcttccctgagccttgcctggatctgcagacccaatcctcagacgccttcgtctgctccaccatccctagctttcaccccggcggcattgcagcagcgtaaatg

SEQ ID NO: 299629 - DNA, 483 bp, Zea mays
acggggcgacgacgcgtacgggacgcgtgggccgcgctcgacgtttacgtatacggagggctgtcccgcgccgagggccggtgcacactcgagtcctgtcgcctcctcgacggcggcggcttcgggtccgtccagccggcgccgctccccgccgaggtcgccgcgctctacgacgccgtcttcgagcagttcgacgccgaccacagcggcgccgtcgaccgcgccgagttccacgacgagatgcgccgcatcatgctcgccgtcgccgacgggctcggctcccagccgctccaggtcgccgtggacgacgagggcgggagcttcctgctcgaggcagccgagcacgagggcgctgggatcgccgccaagatcgaagccaaccgcaaggccgaagcggaggcggtcaagtgacgacgtgtccctcgtgcgggccctgcgcttgattttctgggtgattgctactacggactagtactacttacg

SEQ ID NO: 299630 - DNA, 390 bp, Zea mays
  unsure (1)..(390): unsure at all n locations
agaaanggggggaccgacgcctcctcccgacttccgacctaatattaactcattttcatgctccgcccacctctctagtagccgacgagccattcatggtggaacaaactgataaggctattctcaatcatcctaacctgttcctcaactcacaaaaaactggcatgggtaataaaccacgcattgatgacgatcaatctttcaagaacatcttccatcgtttcatgactcccgctgttgcaattgaagaatcctacattgtcaacaaatgtccattctctgcaacaatttctatcagatgcaaacatattgctaagacatcctacaccactaatattaacagaaccatcattgttcgcacgaactatcttcactttttttaaaaatacc

SEQ ID NO: 299631 - DNA, 383 bp, Zea mays
  unsure (1)..(383): unsure at all n locations
gaagaacnggggcgaccgcacgcgtcctctcgacttctactctactattagcccctattatcaccccgccatcctccctataacccgagggctctttcatggtgtatcctactccccaggccatccttaaaaatccccacgtgatcctcatctcaaataaatctggcacgggtaagtaatgccaggcatattgggctttcaataatgcaagagcattttccttactttcaatacatcccactgattcacttgaagggacctacattgacaagaaatgttcattcactggaacacgttctatcagaggcagaattattgctcgtacatgctccagcgctaatatgaacagaaccatcattgttcgcaagaactaatttcacttt

SEQ ID NO: 299632 - DNA, 401 bp, Zea mays
tattaattggtccacgatgatatgatttgatactatatatatatactaaaaccggacttattataatacttgtagtaaaaaaaaaaaaaaaaaaaaaaaaaaaaaaaaaaaaaaaaaaaaaaaaaaaaaaaaaaaaaaaaaaaaaaaaaaaaaaaaaaaaaaaaaaaaaaaaaaaaaaaaaaaaaaaaaaaaaaaaaaaaaaaaaaaaaaaagggggggctctttaaaagaataaaaattaactaccggtggatggaaaaaaaaaatttttttaaaagggcaacaaaaataaaatcacgggcccgggtttaaaaaacttgagaatggaaaaaaccttggttaaacaaaattaaatggtttggaaaaaaatccctttttggaaagtgggttaaaaagaaaaa

SEQ ID NO: 299633 - DNA, 433 bp, Zea mays
gtccgcccacgcgttcgaccacgcgtgcgaagaaatttgccataaatgtggtatactctttggtgagcaagaattgcagggaacctgatgtggtattgaatgtgcctcatacttctttgctagaagtaggtatgatctatcatgtctaactctaactccatttatctcaatcataagagaaatgtaaattatacaaagggaaatagggtcccttaaatttacatatgatgtgtatacaaagagacggggcacaaaataacttccaatttaacaggaggctgtcctacacgttaagaaccacttgacatgaaaatcccttcaatggttttttattttcttgctatgttagcaatgatctgatatcatcatattccaaatcaaaatcacaaggtgaatatatatatatatatacatgtctactagtttcggtgtg

SEQ ID NO: 299634 - DNA, 386 bp, Zea mays
  unsure (1)..(386): unsure at all n locations
gaagaacnggggggacgcacgcgtccgcaaagacggcgggctatttaagaagatactgactggaggagagaagtgggagaatcccaagtggcctgatgaagtgtgagttcactatgaagctcagcttgaggatggaacagtggttgcaaaagctgatggcaaggagttcactgttatggagggtcatttctgtcctgctttggctaacgctgttaagacaatgaagaaaggggagaaagtactttttacagtgaagccgctatatggctttggtgagaaggggaagccagcagcttgtgctgaaggtgcagtgcctgcaaatgccacactccagaacacctttgtagatgtttcatggaaaactgtgtctgaggtcacagattaca

SEQ ID NO: 299635 - DNA, 238 bp, Zea mays
cctggagcggcatcccgtggttcgaggcctgcgccgacccgggcgccatcgcgcccttgggcgtctgctcgctgctgggcacgcagctgctgctcatggggtgggtggagtctaagcggtgggtggacttcttcaaccccgactcgcagtccgatgagtgggccacgccatggtcccgcactgccgacaactttgcccacttcatctgcgaaccaagcttccccggcggcaaggtttt

SEQ ID NO: 299636 - DNA, 466 bp, Zea mays
  unsure (1)..(466): unsure at all n locations
accgggncggaaataccggggcggaccaacccgtccggcctgccaggtcgtgctcatgggcgccatcgaggggtaccgcgtcgccggcggcccgctcggagaggtcgtcgacccgctctaccccggcggcagcttcgacccgctcggcctcgccgacgaccccgaggccttcgcggagctcaaggtgaaggagctcaagaacggccgcctcgccatgttctccatgttcgggttcttcgtccaggccatcgtcaccggcaagggcccgctcgagaacctcgccgaccacctcgccgaccccgtcaacaacaacgcatgggcctacgccaccaacttcgtgcccggcaagtgagggggtcggaggcgccaccgaccaccgtcaccggncaccgntgccgatatctaagtgttcggatgcacgtgagcgcgcactgggtccagtttgtaccatgatgtaaaaatacta

SEQ ID NO: 299637 - DNA, 407 bp, Zea mays
cgggccggaaatcccggggccaaccaacgcgtccgaaaaaaaaaaaaaaaaaaaaaaaaaaaaaaataaaaaaaaaaaaaaaaaaaaaaaaaaaagagaaaaaaaaaaaaaaaaaaaaaaaaaaaaaaaaaaaaaaaaaaaaaaaaaaaaaaaaaaagggggcggccgttttaaaggatcaaagtttacttacccgtgcttgcaacgtaaaaatttttttataggggcaccaaaattaaattaacgggccggggtttaaaaacgtgggaactggaaaaacccgggggtaaccaaattaaatcgccttgaaaaaaatccccttttcaccagttggcgtaataccaaaaaggccccaaccaatcgcctttccaaacaattgccaaacctaaatggcaaatggaaccccc

SEQ ID NO: 299638 - DNA, 245 bp, Zea mays
  unsure (1)..(245): unsure at all n locations
ggaaaacccggctggacgccacgcgtccgctcaatcatangatagcgaagcttgctgtcggtgttgctgtcattcaagtgggagctgtaacattatactgaactaaaagagaaaaacttgagagttgaggatgccctaaatgcaactaaggctgccgttgaggaaggtattgttgttggtggagggtgcactcttttgcggtttgcacataaagaagacgccattaaggcttcactggagaacca

SEQ ID NO: 299639 - DNA, 340 bp, Zea mays
gaaaaaagggtgcgacccacgcgtacggttgaatccaaaatatccaccgacctgtattatgggaagacaacaaacctacaattgggggattcttatgaacaagaacgcttaacgaccattatatgcagatactaccgaggagctcatggcattattaatgtgtaagatataacagaccaggatagctgtcacaaagacaatcaatggacaaatgaaaacgaattgaatgcctgcgaaaatgacaacaacattattgtgatgaacacatatgaccaggatcagaacatattaatttcttacaaagcttgaaacgtcattgctgatgacatcggaatactat

SEQ ID NO: 299640 - DNA, 290 bp, Zea mays
gaaaacccggcgcgacccacgcgtacggctgtagacaagaatttgggcagccggtttgattattacaccaaggagcacatcggcgtggcctttaacgatggatccaagcagctccaagacatacgccggggccacaggggcaactcgttggtgctcatgggcaagaacacgctcatcaggcgctgcatcaacgacaacgcctggaagaccggcgaccacaccttagacccgctcatggacctgatagtcggcaacgtcggcctcatctataccaacggagacctcaagga

SEQ ID NO: 299641 - DNA, 466 bp, Zea mays
  unsure (1)..(466): unsure at all n locations
cggnccggaattcccgggtcgacccaacccttccggttaaccagaaaggctccttctttacaaattcaaactggttcacatttgatggagagagaggcattgatgaccgatcatctgcctctgttccttcatcatcccccaattctgaggagacatcactaaagactgaggaagctgatgatggtaaagtcattggcactgaggatgaaatggaaacagtgtatcttggaaatggtagtgttgaggaggtaaaagatgtagcagaatgtactgaacagccaaattgttgtactgaggaagagcgattgaaaaatgaagaagggatggaatggcatccaaatgcttcaaataacgataccgangctgangctgccgcagagtcttcagccccatcaataaaagaagtggcagacattgattgaagcccatgttgatgtcaagacaaccgacaactacatgctgcgtt

SEQ ID NO: 299642 - DNA, 360 bp, Zea mays
  unsure (1)..(360): unsure at all n locations
ggaccggaanacccgggtcgacccacgcgtacggtcttacgtatgtcagaagtcgcagaaccttacatacgccgaagagctgtcagacatttggagaaaggaagagttgtcatatttgctgctggaacagggaacccattcttcacgactgatacagctgctgctctccgttgagccgaaatcaatgcataggtagtgctgaacgcaacaaatgttgatggtgtgtatgatgcggaccccatgcagaatacaaatgcccgccttctggagactgtgagctatcatgaagttacgacaagagatctctcagtaatggatatgactgctatgacactatgccaagacaacaacattcccatt

SEQ ID NO: 299643 - DNA, 289 bp, Zea mays
accggacgcgacccacgcgtaagcacagatctattaaagctgcaatggtttttttcagcttcactgtaaaaatagtcgggggggtacatacctatatacctatttacaaggtgacatacacaaggaacaagggtaaagtcactgacaggatttgggcaaagcttttgtcgttcaccaaccaaccaagtttcctgaaacaaaaggatatccacgaaacgtgtgacgccgatagacttgcaaacacgccaccattgacaacgggtaccaactctagcgtggagaaatcttt

SEQ ID NO: 299644 - DNA, 332 bp, Zea mays
ggaataaccgggtgcgacccacgcgtacgctggaagcagtcacacaggccgcctcgcttttattcatatggaacaagctggagtcaggggctgctgtgccactcactgactaccttaagattattacctgtgttgttgtcctttgctccctagggctgataacataatgactcattagaaaatcatgcctcgatcttattgaggaacaacaaaaactgactccagcttgttccatataaaaaacggcgggcggtcgttctagaggatccaaacttacctacgcgtgcatgccacgtaataactgttctataccgtcacctaaaatcaaattt

SEQ ID NO: 299645 - DNA, 307 bp, Zea mays
cggaaaacccgggtcgacccacgcgtacgcggacgctgggctgttccgaatctttataacaaaatctgtacccctgaatgctgttgatgcctgaaatgctttcttgccatgtaaatggtaatagagtgtacattgtgacttggctccttttgtatccattatgaaacatcagtgaaagggcacgagagactggatgtggattctggctgagctgtttgtgaataatacatattgtgaatacagagaagatagggctgccaaagacaatctacatcatttgacttgatataggcaaagagcctttctt

SEQ ID NO: 299646 - DNA, 259 bp, Zea mays
acggggcgacccacgcgtacggccgagagagtcagagccggcgcccctgtttatctcgctgccgtgctcgagtaaatagctgatggggttcttgagctggacaacaatgccgtacgtgacaacaagaagacccgcatagatccgcgcctcatacaaatagccgaccgaatcgacaaacagatgttccgattgctgggcacggtgaccatcactagcggcggtgtaatgcccaacattcataacctttcgctcccttaga

SEQ ID NO: 299647 - DNA, 353 bp, Zea mays
gaatacccgggtgcgacccacgcgtacgcgccaaacggcggaacgagcaggcagctttgccccagggcattgtccccttcgtcttcgcaaaggagtacaacgtgcaccctgacattctcagcaccgcagacatttttggcatgctcatcgccctgccgatcacgctcgtctactacatactgctcggcctgtgaccgacccgtgggtgatggcatcgctgaaactgtaaagaccgctgctgacactttccgatcaagggaagcacgtgaagagactgtctgctacgacatttgcttggcgcttgaaaaatgagtggcttgcgtctctctctatctctgtctctctattctatc

SEQ ID NO: 299648 - DNA, 270 bp, Zea mays
gaatagccgggtgcgacccacgcgtacgctgacacgtggtttagccgccgccgtcttttttttgctgccgacgacatggggagaaggcctgcgatatgctatcgccaaatcaagaacatgccataccccacgtacaggtactgacggggtgtccctgaccacaagattaggatctacgacattggcatgaagagaaaggttgtggataagttcccctactgcgtgcaccttgtttatgggaataagaaaatggcttcaaggaagcctttg

SEQ ID NO: 299649 - DNA, 250 bp, Zea mays
gaaaaaaggggcgaccacgcgtacggaaacgtcaggtcatgatcacgccgtcatttattgtgatcatcaagttcctgacggacgggcgggcgctatggctacatcggggagtacgagtacgtggatgaacacaaagctgggaagatcgcggtggaactgaacggaaaactgtataaatgtggtgttaacagctcacgtgttgataaaagcgcataggaaatcgaaggatggacggcgatgctacttacat

SEQ ID NO: 299650 - DNA, 306 bp, Zea mays
accggagcgcgacccacacgtacggatgaatcctatctatcagacgacgttttttttttattttacaatgcaatgattgggctgtgtgtcattaccctgatcacatcactactatcaaagtttgttgtgagcacaattgaagcaacattgaaatcttggtagctatttcacaagaccattagcgcaatctagactccaattatccgttatgcagcagaacatactcgtgcaacactatttgcttttaaaaacaacatcaacatcaccctcggagtatctttggtgtccgctacacaaaacttcatg

SEQ ID NO: 299651 - DNA, 345 bp, Zea mays
ggttagacagtttcacccagtgtctcacacccttattccatcagggcatgtgttcgaaccccacctttaaaaaaaaaaaaaaaaaaaaaaaaaaaaaaaaaaaaaaaaaaaaaaaaaaaaaaaaaaaaaaaaaaaaaaaaaagggcggggggttcatagaatacaagctaacgtacgctgccctgcgacgcgataacttatatatagtgtaacgaaagttaaattcaatggacgggcatttaaaatacatggatagaaaaaacaaaaccgtgacctaactaaattgacttgaaggacataacattttcgttaggtggggtaatataaaagaggaaaggcccgatc

SEQ ID NO: 299652 - DNA, 390 bp, Zea mays
aaagcatatagtttcaaatgcttctgttccatcatctcctgtcagcaagagtcaaaatggtaccatagaagtgcaccattatcaagaagcattgaactggttcaaccagggggagctttttgttaaaggatcaagtagatcagaccttaagaatctttggtctgattgttttgatcaatcttcagagtaccatccaacattaagttggggctcttttgcaacgtgtggtcgaagggaaaccatggaagacacccattttgtacttccccatgtgagcgaagaaaatgatgtttttgcctttggcatttttgatggccatagaggttcagcagccgctgaattttctgtccgagcagttcctggatttctcaagcaatttggtcagggtgc

SEQ ID NO: 299653 - DNA, 350 bp, Zea mays
ctgggacgaccaatggatcttctgggtgggcccactgattggcgccgccatcgccgccgcctaccaccagtacgtgctgagggccagcgccaccaagctcgggtcctaccggagcaacgcctaagttcccgccggccgcccggacgcgccaggatctgggcaccgttccaattctgttcctccacatgacgccctgttctgtttccgtgtggccaggactccgcttgctcgctgctgttttctacttcggaccaaagtgtgatatatctttgctttctggatatgtatgtaggaatgcatcatgtaaggagaaattggaatacaattgcgggagtttttatccgatcacg

SEQ ID NO: 299654 - DNA, 320 bp, Zea mays
acccacgcgtccggtacctgcacgagtacgcgcgcccggcgtgggtgctcatggacgtcagcagcggcagaggcagcttgccggagacgggccccgcgccaagctccagagcttcggcgccgcgagggccatcacgggcgccaccgccggagtcgacgagtattagggcgccgaggaagcgctattcacgatgacgagccgcatagaggggacgcgcgggtacatctctccggagtccctggagcacggcgtggtgtcgcctaaggccaacgtcttctcgctcggcgtcgtgctcctggagctcgttactggcatggaca

SEQ ID NO: 299655 - DNA, 253 bp, Zea mays
aatgatcaatgccatgactgctgaagaaagggagaagccagagttactggctgaatcacgtgagaagaggataagagtggctgaagagtctggaaagactgaacaagaggtgagtcaattggttgcccagcttttccaaatgcgtgctcagatgcagaagttgatgggtatggtgcaaggacaagaagctatagctggcatgggagatctcaaggactcgcttatacctgaaaagaaagcaccttctggcacc

SEQ ID NO: 299656 - DNA, 267 bp, Zea mays
gtagcatcactgacaaatattctccacattttgcaagcaaaatgatggggaatgttcacgtggatttgcaaaaggaccctcccacctcatgcagtgcagggcctgctggagaggatctatcccactgtcaggcctcaatcatgggtcctagtgacagcccttatacaagctgggttttcttaattaatatccattttccttctgactacccctttaagccttcaaaagagaacttccaaacaaatagtttatcaccctaacatctac

SEQ ID NO: 299657 - DNA, 341 bp, Zea mays
cttttaagacaaattttagacgtaaaagtcgatttaatacatagaaacgaaaggactagatggcagagtgatctaacaatcaatctaaaccagctggtaactaacaatgatagatcactctgccatgtaggcctttcgtatctatgtgtcaatgccaccattacgtccaaaatgaggcttatacgcggccgcgtgtgtcgtcccgggaattccggtccggtgccagcaggcgttccagctttccctattatgaggcggttttatgttttaaatccactcttaaaatcaatgttagacgtggaaaaaaaaaaaaagggcgggcgttctataggatccaagct

SEQ ID NO: 299658 - DNA, 294 bp, Zea mays
  unsure (1)..(294): unsure at all n locations
gtggtggttgaacaataataagcgaggctgtgctggctgccatacataggtattgtgtggtgtgtgtgagagagagagaaacagagttcttcagtttgctatctctctctgcatgtttggcgtcagtctttgtgctcatgtacgtacgtgtgtctacctgcatgttggttgatccgattgcatctgctgtaaccatatattaattggtccacgatgatatgatttgatactttnttaaaaaaaaaaaaaaaataaaaaaaaaaaaaaaaataaaaaataaaaataataaaatcc

SEQ ID NO: 299659 - DNA, 372 bp, Zea mays
gggacgcgtgggcggactcgcgggcgaaggctcataccttcgttgacgcatctatcgtggagttcatgaaaggtccacggatccctgagatctaccccgacgatcctatcatgaacgacctgaacgctgcttgcaaaagcgagcctgcaagttctgaacccaagagggcggctgagttgatatacaaggctgccctgatctacagtggggatactcctgacagtccaacgtagctgagatgcaagatctacgatatgatgaccatggccctcagcgggagatcggggatgttgcagacagatgaggctgaaggcatcgccagcatggactacgctgactcttctggaggtgccacgaccactaccacgacgg

SEQ ID NO: 299660 - DNA, 186 bp, Zea mays
gttgtcttctcctccccctccggttcggtttcaggttcgtgaggttctcctgggttcaggtccctcggtgagcggatcgagacagccacgcccctatgtttaatacccctgcttcttccgctgtctcccctcttccacggtctaccactccctccacatctccttcattaccttctgtgaggtcct

SEQ ID NO: 299661 - DNA, 400 bp, Zea mays
  unsure (1)..(400): unsure at all n locations
cgaccgcacgcgtccggcgttccttgacaccatttacgccttcgttgatctgtacaaggaccaacggatcaccccggcggctggttttgaagctagagggttcatttatcgncctcctatcgctctagccatcactgctaaatttgtacctttgacgaagcctattaagttgccacgcgatgtgatctccgaagaatattctctggaatacggaactgacaagatatacatgcatgttggagctgtacatgccaactatcgggctcttgtaatcgatgatcttattcccaccggtagaacactctgtccacctgtcaaacttattgaacgtgtttcatcaaaggtcgttaagtagtcttgcttcatttaattgtcataactgaacggcccatacaaactt

SEQ ID NO: 299662 - DNA, 409 bp, Zea mays
cggaattcccgggtcgaccgacgcgtccgagccaagccaggctattgttatgaaaatttgtcgtctgtaagcatgtgaacttccgatgtggcgacatgctggatcagtctgaataagtaagtatgcagctctaggtggtcagctgcgtctaccacaatgagcatgtacgtatggagaaatatctgtgaacccattttgtttatgaataagatttgttttttttcgaacaaaaatacgcatacatgcaacgaaatatctattctatagagacactaaaaaaaaattaactggctcgagtataacaacgaataaaattggaaaaacccctgggggcgcccgttttaaaggatccaagctaccttccccttgcttgcaacgttataacttttttatagggccccctaaatta

SEQ ID NO: 299663 - DNA, 340 bp, Zea mays
gcgcgacgtcgcgctggaacctgcgtacctcttgagccgtcacctcacggttgtggtcgtgtgtggtggcacggggtttaccacgctctgtattctcaatcacgttaaccctgagaacgtcacgctgatctaccagtccgagaaggagatcgacatggcccggttttaggtggcacttaaaggggtcaccatcatggatggcgactcctaagacctctcgttcctcaccgactttttttaccgatacatatctcacagcatgatgttgtactggccttacccacagcgcgggatcaaggaagcctacagggtcctgagatttgatgggcttgcttttgtg

SEQ ID NO: 299664 - DNA, 448 bp, Zea mays
ccgaaccctcgccgactacaacatccagaaggagtcgacgctgcacctggtgctccgactcaggggaggcgccaagaagcgcatgaagaagacgtacaccaagcccaagaagatcaagcacaagcacaagaaggtgaagctcgccgtgctccagttctacaaggttgacgactccaccggcaaggtcacccgcctacgcaaggagtgccccaacgccgagtgctgctcgggggtcttcatggccaaccacttcgaccgccactactgcggtaagtgtggcctcacctacgtctacaaccagcaagcgtaagatgcccagtcttgctaggagataaccctctatgctttgatatgttttgttgcaatggtagtagtttcttggaacagaacaactgcatctataatggagacgcttaatttgtttttaattatatcatgtagttatggg

SEQ ID NO: 299665 - DNA, 308 bp, Zea mays
gccgagcgacgcgcccaagctggttttgttgttttttgcatgtatttcaaagctcatcgggttgaagggggtgggggggtttaattggaacacaaagtggcgcactaatggaccccgttgcgtcaaacaattgttgcttattcaaagacagacagtccagttggttcgaaaagaaagacatcatttattgttgaaaaaggaatacctgcatgtaccactgctcagaaattggacaaacttgggatgcttggaagtgatacatctgagcttgtttctttcaattgctttattccacaaaaaaatatttt

SEQ ID NO: 299666 - DNA, 445 bp, Zea mays
gtttgtattcgttgtgcgccgcgaataaactgcgatccatttctgagcttcgatgaatcgacggtcaagcttgggcgaccaaatgacccagttcttcgagttctacaaaattgaagaccctgagcatctgtttggtgaaggtcacatggcaaccatacaacgcacctgagttggatgggatgatctttagctcagtatgaaacatcgacgaggaaatcaataggatgcaatgtcctatgatatgtttctagtgtgttgagtggcacctaccgcacagggttgagaagcagtttggtaggaaccagatatggctagttgaagatattccaacttctatagagctgcacacggtcttctaggggcaaaggtgtgggaaatgagagacgaaaggatggagggaagttacctccaatgtgtttcgaaggccctattggtccagattttt

SEQ ID NO: 299667 - DNA, 384 bp, Zea mays
gcctgggccaccagcaacgagtcgctggtgaatgccttcgcctcctacggggagatcctcgactccaaggtcatcaccgaccgggagacggggaggtcccgcggcttcggcttcgttaccttctcctgcgagaactccatgctcgacgctatctagaacatgaacggcatggagctcgacggccgtaacatcaccgctaaccatgcccagtcccgttgcggcggctgtggcggcggtggctactgcggccgtcgcggcggcggctgcggatatggtggcgggcgccgtgacggcggatatggcggcggtggctgctactgcggtctgcgcgacagtggccgcggcggctacggaggcggtggccgctacagctgtcggcgcgag

SEQ ID NO: 299668 - DNA, 469 bp, Zea mays
aagggccgacccaggcgacccgaacaaagcaccattaccgccgtcaggtgcattaggaaagcaagcagtggcactgaggatatgaggagatgcagcagcctttatcggttgcaagtttattggagcacaagatactctttacgatcacattggcaggcactacttcaaacgctgctacatccaagggtcagtagatttcatattcggaaatgggctttccctctataaacactgccacttgcatgccgtaaccaacagctatggagccttgacagcccagaaaagggaaagcatgcttgaggaaacaggcttcttcttcgttaaatgcaaggtcacggggtcgggcgccctctacctcagtcgggcttggggcgttttctctagggtggtctttgtttatacttacatggacaagatcatcacccctataggatggtatgattggggagacaaaaatagagaaatgact

SEQ ID NO: 299669 - DNA, 330 bp, Zea mays
  unsure (1)..(330): unsure at all n locations
ggaannnccgggccgacccacgcgtacgggctaaccagtacaccgctgcactgtaccttatactgttacaggcactcataaggaggaggcttggaggatccaccgaccagaaagttgtggatgagaaccttgcgatgctgaagaacgtgctagaggtgtacgaggcgcgcctgatcaagtgcaagatccttgttggagacttcctcagcctagtcgacgtgaaccatgtgtctgtcactgtttgacagtctgctactatctacgcgtatatgctgaacgcctaccctcatgtgaaggctatgtaggatggtatgatggagaggccgattg

SEQ ID NO: 299670 - DNA, 239 bp, Zea mays
ccgttccaacggcaccgggccgggttaccgaagggggaggatgttgtcgtcttccttgccggggggcacccgcctggatctggatgggaaccccattgcttccctcaccatctgcattatcggcgccggcgggttcattggctcccacctctgcgagaagcttatgggcgagacacaccacaccgttctctctgttgacgcctactgtgacaaagatacccaccttgtggaacccccgc

SEQ ID NO: 299671 - DNA, 286 bp, Zea mays
gggacgcctgggcgggactacccgcttgttctaagcatataaataagcggaggtgaggagacttactaagatatctggagtcacggcaagcgaacacagtgcattcctgctagagaatagggcgaccttgccggcctaattgtacactggtgaggagtacttctggactgaccccgactaagttgtccgtaaagggacgcctgagaaggttagaacctcttgcggcccgtaccctgttgcaccactaggcgccgacaacaagtcgggttgtttgggaatgcatccc

SEQ ID NO: 299672 - DNA, 201 bp, Zea mays
tccgacccacgcgttcggctgcgtgttcccggagctgctcgttcgtttctgcgtcaagttcggcgaggccgggtggggaaggccgagtcgcatatcttcaaccagggtggactggactacctcggcaacccgagcctgatccacgcgcagagcatgctcgccatctgggcctgccatgtcgagctcatggtcgccatcgat

SEQ ID NO: 299673 - DNA, 365 bp, Zea mays
gggattcgacccacgcgccacgcctacccgtccgtaatactctaccaatgaatctgatatagtctatggaaaccgaagtagctcctggaatgacggactattggtagagggcagactttgcattccagatgcttctcatgctcgctcatcttggaattgcaagcttcaataccaacgataatggatgcaacgctctcatcatcactacgatggctatcacaaatgcagagatcgctacacaccatccaagtttgtctacattcttatcgacgcattctgtaagcatcactcactattgcatcatgtgcgtcagaggcacagaaacagaagtgcatgccctttttaacgcagatgatgacgatagc

SEQ ID NO: 299674 - DNA, 348 bp, Zea mays
gtcaagtacatggcctgctgcctcatttactttggtgatgcggcccccaaggatgggaatgcggctgtgtccaccatcaagaccaaacgcaccatccagttcgtggattggtgcccgactggcttcaagtgcggcatcaactaccagcctactagcgttgtgcctggtggcgacctggccaaagtgcaacgcgccgcgcgcatgatcttcaactacaccaacgttgtggaagtgttcttccgcatataccacaagttctacctcatgtacgccaagcgtgccttcgtacactgatacgtcagtgatggtatggaagaaggtgagttctcttttgcccgtgaggacctg

SEQ ID NO: 299675 - DNA, 324 bp, Zea mays
gtcgacgccacgcgtacggcggcatgaaaactgatgacaaacattctctattcttaccgaggaatgggactttcggttggagggatgactgctggatgggatgaaacggaccctggactatactatgtagacagtgaagggggaaggttaaaaggaatgcgtttctctgttggatctggttcaccatatgcttatggtgtgctggataatggctatcggtatgatatgtctgttgaagaggctgcacagttggccagaagagctatttatcatgcgcacattacgagatggagacagtggtggtgatgccagcgttgactacgt

SEQ ID NO: 299676 - DNA, 427 bp, Zea mays
ggaagaacgggcccgacgcacgcgtacgcatgcaaatacaaaacaggatgattatatttatagaaaagcgctgcatccatgatgcagggtgtgtgtgcaggaaacttattcctcacaattctattgtctatggtaggggcttaagctatcatatcttgcttctattgttttggaggcagcctctgatcaatatccacgagttgagctttatgcaaaccgagcatttgatgatgctttagactaaatacaaaaggccctggctgaatatagcgaactccaacccattgatacactataagaagagtattctcatcttattcacgacaataattcacactatggcattgactgcaatgatgatgccactaatcatatgcaggagcaagacttttttgtttcacttatcgggtagcagcaacaaatctta

SEQ ID NO: 299677 - DNA, 351 bp, Zea mays
gaagcttactgggaataccgacttaagccatgggatatggctgctggcgtcctgatagtagaggaagctggtggggtggtaactcgcatggacggtggagagtttacggtcttcgatcgctctgttcttgtttccaacggacttgttcatggacagcttttggatcggatcggccctcctactgaagaccttaagaagaaagggatcgacttctcgttgtggttcaagcctgacaagtacccgaccgacttttgagctgcatcaagggcaccaccagcagccatgggccaccataataaagcagccatcattttttttggtgggggggttctgatagaaaatgtgttttac

SEQ ID NO: 299678 - DNA, 275 bp, Zea mays
tccaggccgaccacgcgtccgcgacgattacggctcacatcttcttagtcttaatctgaggcaacgagcacccaaagatggtggtgcttcaaccagatctggccctgagcgagctgacgagcatgtactagcggagcacggagaatggctccgtctgggtcacgatgaagcgatcaactctcatgggcaaggcacatgtgcggtagatggataataaggggcaggatgtagagcacatgtgcctggtacgcgcctccaatggcgagaagaacatc

SEQ ID NO: 299679 - DNA, 294 bp, Zea mays
acgcgccacgcgagccagaacatggcaaggatcaaggcgcacgagttaacgggccaaccaaagacagagctggggggtgaactcaaggatctaaaagccgaaccttctctccttggacacgccaaggggactggcggtgcccccaataagctctgccagactaaagcggagaggctatccattggtcaagtattcaccgtgagatacaaaaaacataaggctgctctgagggaagcttatacggggaagacgtttttgacgcttgatctccgcccccagaagaccacaactatt

SEQ ID NO: 299680 - DNA, 454 bp, Zea mays
ggcacgacccacgcgttcgttaaaatttaaatcatgatgagatagattttgagttcttgggcaacagaacagggcaacgatacattttttacaccaatgtgtatactggtggcaaaggagacagataacaaatgatttacctttggtttgacccaaccaaagaataccactactactctgtcctctggaacaagtatcatatagtgtgagtgctctttttctttttttaagtatttcaactgaaatgcacttgttatttagcgattctgattaagcttttgaaaaaaaaaataaagggggtgcaggttctttgtggaccacataccaatcagagtgttcaaaaactgcaaagaattgtgagtgaggctgccattcaaccaaccaatgaagatatactccagcttatggaacgccgatgactgggccacaaagagtggtcttgaaaagaccgact

SEQ ID NO: 299681 - DNA, 217 bp, Zea mays
aacaaaatctataaggctcattcttttttcatatcacacaaataactcaggctcagatgatgcataatggtcgaaaggaaaaagaaactaatgatatctaacagggtatcagcaaggtgatcaaggatgatgaaacaaaagcatttagatgatctaatgactcagttgactcatgtgcagaaacaataccttgagatcatcacaaacttaaacttta

SEQ ID NO: 299682 - DNA, 347 bp, Zea mays
gccggttgtggccaaatgggtatcgaaatattgtgcctaagcttgatctaccttctacttgggcgcgtgctcaccaggagctacgccgtctatccatcgtcgcccgccgtgtcctcatcggcggaaatccatctttcatcggggccatggcagctgccgctgatctgcagccaacactacctcctgctgtcacggttcagcgacctgcctcaccgggcgctgcgcgagatgtccggaacatacggaccgctcatgctgctccgcctcggctccgtgcccacgcttgtggcctccttcgccgaggccgctagggaggtgatgcgcattcacgacgtggccttctgcag

SEQ ID NO: 299683 - DNA, 378 bp, Zea mays
cttgctgaacgccgagaactaccattggcaatggacgtcgttttcttctgcagcctcaagcgctctgtacgtgtatctgtactccatctactactaccatgtgaagacacagatgtcaggcttcttccacacaagtttctatttcagctacacgctgatgttctgtcttggcctaggcatactttgtggagctattggctatctaaggtcaaccctttttgtaaggggaaatcaacaggaatattaaatggggataaaaccctggtggtttagctagcctcaaaaaaaataatttttttttccaggagcgtgggctaaaaaaaaggattttaattgtgaaacctggattttgaaccgctgaagactttcttccctttt

SEQ ID NO: 299684 - DNA, 238 bp, Zea mays
gtgcactctagggcgaggggcctgtcaggcgctggtgcactcaccagggggacccgggtcagcgctaaggctattcaatccgagaaggcaacactaccatgtggtgcaaaccatcaacggggaccgagctcattggcagcctggagacgccgggcacctgcagcctgcttgtggggtggtacctctccaacctgcggggctaccgcaccaccttgagcccgctagctgcgtgtgtcta

SEQ ID NO: 299685 - DNA, 185 bp, Zea mays
atgcgttggacttctttcataattgttatctatgtcaaaaatatgagcccgtcagcttagttgaacaagttacttttctaatgcaattttccttccatatgcatccactctggcatgtttcaagaagaaaggtttactcgctacaaaggttttcaaggataggtgccttaaaaaaaatttctttt

SEQ ID NO: 299686 - DNA, 249 bp, Zea mays
gtggtccctgtctttttccttcggccgagccctccaggcgagcaccctcaaggcctgcgctggcatggtggagaacttctataaggctagagctgtcttcctcatcttgtgcacggccaactctgaggctaccctcgacacctacaagggtgatgctatcgccgacaccgacagcctacacgttattgactacaagtactgagatgcttctcttagcttgccccatttggaactgctgcctactaccta

SEQ ID NO: 299687 - DNA, 397 bp, Zea mays
cgagtccaaggaggggatcgatggcgagttccaggagaagaaggctgatctccagcccaaggtcgtcgagatctacgagtctgcccctgcaccactcaaggtcctgatcaaggagaggagcaaggtgtccgggatcaagaagaactccgccgcaatcaccaagttcttcgaggagctggccaagatcggtgagtagatcgatgtagtactaggccacacagtgacagtgccagacagacagcaaattaataaatacacatccgcatatctcatcaatgaacaaattccctggagccaagcaagtgagcgacggcatctccaaggccggcccggccctgctgtccggccccatcttcgccacgttcgagaaggtctccacgctgctccctgtcgtcgc

SEQ ID NO: 299688 - DNA, 368 bp, Zea mays
gcaagagcgacagagagagaccgacgcgccggcagatcccaagctcaccggagagggggaagagggcgaccgaaggcggcgatgggtttcatcatggacttcgcggagaatctgatcctccgtctgatggaggacccggacaagcgcgaccaggttcggcgggagcatgtctacaagatgaaggagcggtgcgagcgcactaaggcggggtggagccttcctctgcgcccctaccgctttttgacctttcacccgtttaacctgcaacttttcttggatccccaaaataaccaagcccgccgcccgcgggaccccttccaacaccttattggccggcacttttgcttggcggcgtctttcttaacacc

SEQ ID NO: 299689 - DNA, 255 bp, Zea mays
gggggatcaagaagcctcgtggcctatgccagtggcccgcattgcacatggtgggtgcggtggcttaccatctccccaagtgggagagtggacgtcataatttgtggtagagggggtacgcgttcgcgcggcccctgccaaatcttataaattttatttaagtcccctttagagaagggcttgaaatgtaatctttgttattagttcccttcaatgaaaagcttggaaagggaacctttgttccccccattttat

SEQ ID NO: 299690 - DNA, 296 bp, Zea mays
caagacccagtaggctagtagagagatagatttctgcctccctatcgtgggtcgtccccgatggcctttggtcgcagaccatctttgctgcttgtctatgctgagaataaatgtgaacggtgcccctggacgctggatccatgctggttttggacacgctgtctttttgtgtttaacttatctgctgccgtcctgtaacgaattcgcaaggtttagttcttttgggctttgttaaaccaaaaaaaaacattaggaataacaaaaaaaaaagggggggcgcttttaagggtcccaac

SEQ ID NO: 299691 - DNA, 241 bp, Zea mays
catcttcaaccaggctcaaattgattttttcaggtacaaagatgcatcggtcgccatgatcgcagatttgctgcactagcaattttatctctcaatggcagacaactgtttggccagccgattaaagtcaattgggcatatacaagtcctccgagggagggcacatcaggtcattttaatatttttgttggggatctttgcccggaagccactgatgctactttgtttgcatttttctctg

SEQ ID NO: 299692 - DNA, 365 bp, Zea mays
ccagttcgagggccagatcccggacacgctgtgggcgtcgcccgccacggtcatcacgctggccaacaaccacttcaccggcgccgtcccggcggcctacgagttcggcgccggcgccggcgccggggccggtggccgggtccgcgaggtgctgttcctgaacaacaacctgaccggctgcgtgcccgaggcgctgggcttcctccccagcatgcaggtgctggacctcagctacaacgcgctgtcgggacacctcccggggacgctctcgtgcctgtcggggatcgaggtgctcaacctcgcgcacaaccagctcacgggcgagctcccggacctgctgtgcgacctgcgccggatcaccaacc

SEQ ID NO: 299693 - DNA, 144 bp, Zea mays
  unsure (1)..(144): unsure at all n locations
gacgagattgagcatatacttgtccataagnttacaagattcttgacgcaacgtgcggagtccttcttcattctgcggaggaaacctatcaagggctatgacatttctttcctgataacaaacttccacaccgaagaaatgctg

SEQ ID NO: 299694 - DNA, 296 bp, Zea mays
gaattcccgggtcgaaccacgccttccgctggcccgaccggacttgaccgcccttaagtccaggggctgtgctggcgcgtcaaagccgtagtgttcagtgttccatagataataagataaatccatgaataagtgtccctacccttgatcatgtgacagggacagggacagtttcctgtacttgtggggtgaatttgtacgtgtgatacggtaactgggtccgtgtactgtttatgctacgttttccttcctaaaagtacgtatatatatacagcacttgcgagtggctttacttg

SEQ ID NO: 299695 - DNA, 424 bp, Zea mays
  unsure (1)..(424): unsure at all n locations
ccggnccggaattcccgggtcgacccaagccgtccgttccaattgaccaaaaatgcactaaccttttgataattccatctgaatgcagtgcaagatctgcatgcagaccttcatctgcaccacctccgaggccaagtgcaaagaacatgcggaggcgaggcatcccaagaacgacctctaccagtgcttcccccacctcaagaactagtaagcagcagaagcatatgctctgctcagctaaaagacaagtactacatatatatatatacgctgtgtgtcaattaatgggttctaggctgctgctgatgcagctgcttcattcgtgttgccccgtctgattatgtactgtaacccttggctgtcagcctgctgtgctaaaaaccattggttctgtgtggattcatgctnaccaaaaaaacaaatt

SEQ ID NO: 299696 - DNA, 367 bp, Zea mays
gtccgaaaaaaaaaaaaggaaaaaagataaaacttttttgatattgccgaggccattacgatagtcgggggggtctatagataagctgtaaaagaacattgtcctaaatgactcgctgtccgatatgctgactgacattttgacatcttcgccgcctccaaggccacggagtcgatatacgtgcaggccgccgagatcaggtcgcggttggccgatgccgtgcgtgggatactctcggagttcgagaacgccgtgctccgcgacccatccaagactccagtgcccggcggcaccatccacccgctcactcgctatgttatgaattacatcagccttatttcggactacaaggccaccctttttgagc

SEQ ID NO: 299697 - DNA, 308 bp, Zea mays
aaaaataacctaaaggactgccttggtaccattgctcagagtggcacctaaaaatttttgaaggccctaaaggaaaacaaagaccttggggcggacaatggtctaattggtcagtttggtgttggattttactcagctttttttgttgacaagaaagttgtggtgtccaccatgagcccaaaatcagataaacagtatgtgtgggaagctgtggctgacagtagctcttatgtcataaacgaagagactgatcctgagacaatgcttactcgtggaactcaaattaccctgtttttaaacctgatgat

SEQ ID NO: 299698 - DNA, 418 bp, Zea mays
cggacgcgtgggcggcgctgcagctcttcggatttgccgaggccatcagcatcggccgccgctccacggagaagctgttcaagatcattgacctccacgacgcgctctccgatatgctgcctgacatctccgacatcttcgccgcctccaaggccacggagtcgatatacgtgcaggccgccgagatcaggtcgcggttggccgatgccgtgcgtgggatactctcggagttcgagaacgccgtgctccgcgacccatccaagactccagtgcccggcggcaccatccacccgctcactcgctatgttatgaattacatcagcctcatttcggactacaaggccaccctctctgagctggtcatctcgcggccatcagctagctcccggactgctgctgagggcaatgaggctacacc

SEQ ID NO: 299699 - DNA, 377 bp, Zea mays
ggcggcgtccgttcttttccttgtcacgctctcggcgcgtggcggtgaagaagtagaaggccggtcgccgaggggggccaccacgcatcggatgcctgcgcttttgaccgttgtcatgtgctgtggttgtggggccaggacgccgcggcctgcgtcaagaggaacggatcaaggcccatcatgcgcttctaggcccacacaatgttgtaactcacaaagaagcttgtgtatatagagcacatccatgttaagtaaccctagttagggttatgtgggcaaatacctgctttatccttagaagtatcacatctatatataagtaatttgtacaccccctcataatacagagaagagaaagagtcgagaggtccaaccct

SEQ ID NO: 299700 - DNA, 265 bp, Zea mays
agcccattgaagatgtgcttaaaattttgatcgagtgacatgtatggaaacttagggggtgtttgggaacaaagtttttctgcagttttggaagaatactgcagtattctcaaatactgcagtattatatacataatggtgtttggcaagctgggtaaaatctctgttttcaaaaaaaaaaaaaaaaaaaaaaaaaaaaaaaaaaaaatatatataaaataaaaaattaatataaatcaattaaaaagtaataaattaatttatt

SEQ ID NO: 299701 - DNA, 372 bp, Zea mays
gtacgccgacaggaaccccagcttcgtcggctgcgccgagcacgccctcggcatccgcgggtggctcgagtcgcagggccaccagtacgtcgtcaccgacgacaaggacggccccaactgcgagctggagaagcacatcgcggacgcgcacgtgctcatcaccacgccgttccacccggcgtacgtgaccgcggaccgcatcgcgcgggccaagaacctggagctgctcctcacggcggggatcggctccgaccacgtggacctggccgccgccgccgccgcggggctcacggtcgccgaggtcacgggcagcaacacggtgtctgtggcggaagaccagctcatgcgcgttctcgttctcacgcgcaactt

SEQ ID NO: 299702 - DNA, 334 bp, Zea mays
ggccgaccacgcgtccggaattattttacaaggccagttcctgcttaatctggattccacttcttcagtcgttttgtgtgtccaaaattcagaatagattatgatcccgtttgtggcagtgcacattttgatctaacaccttactgttgtgggaagcttgggaaacacaaactgatatcctttcaagcatacaataacattggaatactcttcctggagttagaagctacacgcatgataatgcgaatttatggataagcggtcagtgtgatgactggcaccctcttagcataacccatggtcaatgaacatactatgtctctactttagtttg

SEQ ID NO: 299703 - DNA, 310 bp, Zea mays
cggacgcgtgggtggatttgcaggccatggatcgatgccaccggatcgggcaaacacgcccagtgcatgtgtataggctggctacgtcacactccgttgaggggcggatgatcaagagagcctttgggaagctgaagctggagcacgtggtgatcggcaagggacagttcgagcaagacagagctaagccgagcgccttagatgaaggtgagctgctggcgcttctcaaggacgagcacaccgaggaggacaggatcgttcataccgacatcagcgacgaggacctccaaaggctgatggaccggagcga

SEQ ID NO: 299704 - DNA, 395 bp, Zea mays
gttaacgaggcccagtcccgcggcggccgtggaggcggcggtggcggatacggtggcgggcgccgtgatggaggcggctacggcggtggcggtggaggctacggcggtggtcgtggaggctacggcggcggtgggggatacggtggtgcaaaccgcggcggcggctacggcaacaacgacgggaactggaggaactgagcggtggggtccgctgaggcctagttatcttgttcgcttctgctaccgtgttcaccctagtctagagggggtttatcttcgtctgtggtcgtctcgtgtccgtatgtttcgtttcgtgttcgttgttgttgttgcccatctgtgtttttgtaaaaaaaaaattttttttaaatatattaatttaaataattttaata

SEQ ID NO: 299705 - DNA, 256 bp, Zea mays
caagacccagtaggggtttttcccccctgcttctcatggatggttgctgcttgtgtatgccgagaataaatgtggatggcgcgtgcctctgggtcgccaggttcatgctgagtctggacatgttttgcacttttgtttcccttcctgctaccatctgtgacagatccgctcgctaatatgggacctgagattagctttttaaaaaaaaaataataatatatatttaataattaaattatatgttattttattaaaa

SEQ ID NO: 299706 - DNA, 240 bp, Zea mays
ggaccggtccggactgacccgggccgaccgcacgcgtcgggatggctacttatccgactacgtgatcggagtccgagccgcgaggttctccggggttcggtttcgtgggtgagcggatcgagatggcggggtcggacgttgatataccattcattcttacgtaggctcgcatgcgccacggacgaccactatatgacaacgaatttaaaacctacggcgaggtgcttaaaaccaagatta

SEQ ID NO: 299707 - DNA, 324 bp, Zea mays
cacggacacgagcgcgcagcagctcgcctacgcgacgcgcagcagcaacacccgctacgtgcacaccccagcggacctgcccctggaggggatccacgccaccgtggccccgccggcctccgtcgacctcgtcaccgtcgcgcaggccttccactggctgaacttcccggcctttaacccccaggccccttccgtgctgggccccggcaacggggtgctcgccgcctggtgctacaccgagccacgcgtcgacgccgccgtcgacgccgtgttctggcgcctgtaccacgggtcccagggattctgggcgcccaaccgccggat

SEQ ID NO: 299708 - DNA, 233 bp, Zea mays
cggacgcgtgggcggacgcgtgggcgtatctcttttatgtaccttttcaggctggtaccgataccgtggatctggatttgctatgttttgtactgtgctcgagtgtaaggtcagttcgtaatacaatcaatctgcgtggaacaatttaaaaaataaaaataaaaaactaaaacaaacaaaaaaaaaaaaatactaaaacccagacaaagaatagctaaacaactggagctaca

SEQ ID NO: 299709 - DNA, 343 bp, Zea mays
  unsure (1)..(343): unsure at all n locations
gcgnncggaaaatgtattgaatgctctagtttaatttttcgaaaattaaaaaaaaaaaaaaaaaaaaaggaaaaaattaaaaaaaaaaaaaaaaaaaaaaaaaaaaaaagggggggccgttctaaaggttccaaggtggcgtcgcttgcatgcaacaaaataactctcttttaaaggcacttaaaacctactgagtgggcgtcgattaacacattatcctggatcgaaacacgcagaggtcccacggattcagcttggtcaccttctccacggaggaggcgatgcagaacgccattgagggcatgaacggcaaggagctggacggccgcaacatcaccgttaa

SEQ ID NO: 299710 - DNA, 390 bp, Zea mays
agaaggaatttgatgaagcaaagcttcgatttgctgctgctgagggagatcatgtaacattcctgaatatctacaaaggatttcaccagtctggaaaatctagccaatggtgttacaagaactttttgaattaccaagcactgaagaaagttgtcgacattaggggacaacttctcaggatagtgaagagttttggtatacaactgaaatcatgtgacagagatatgcaggcagttagaaaggccattattgctggttcatttactaatgcatgtcatctggaggataaacgatgctccataaatcatgaagcagatgcccccgccacctaaagatttggagattgctatagtgtaagtagagtgcaatgatcaagtagagtgtagtgat

SEQ ID NO: 299711 - DNA, 361 bp, Zea mays
gcgacccacgcgaccgacgacacctgggcggactcgtgggcggacgcttgggcatttatttgtgttggatggagacttggatctttgaacactcgtaactatcctactaggtggtgacatcagtccctaaaaacgtttatggtcatagagtctgcccttcgtttgtcagtcgggcaattattcttgcatacaatgccttcggttaagtatcaaattaataatataaatttgtctgcatctcttgtttttttttcttcttttgtaaaaatcactattaaatagggggcggtcgctttataggaaccatgtttacttccgcgtgcatgcaaaggattaccttttcttttgggttacctaaaat

SEQ ID NO: 299712 - DNA, 289 bp, Zea mays
gaaaacgggattccggcttggactatttttattcccataaagaaacagcgtcggcgaattcttcgttacagtattattcaggtacactcgaccgcagtttatggcctatggatttgagtctggccaacaaacaagaacgaaacagcggagccattcactttcaaaaaatttatggtggccgccaaaggaatggcttacgcccaccttacttttgcaagaacagtggggccattttacgcaacattctccatcaactgcaggagatgggcattattgatgtggatcccaa

SEQ ID NO: 299713 - DNA, 432 bp, Zea mays
cctgggcattccatcagaagtcgtctccagcatgcggaccaagatgatcgagggctcgtcgggcagcccgtcggcgcacgacgacatcaactcgttcctgctagacgatgacttcagcataccgttctccgtggatgacttcacgaagctgatagtgcacgtcgacgtagcggacatggacctgccaccgctcattcaggagagcggcggcggcggcggcggcggctccaaactgggacattgaggagtgacaatatgcacgccttttttttgtgtgtgtgttgcggtgatgtgcatagtgcgtgtgacatatttctctgagaccagggttttgtttttttctttgttgactggtcttccatttttctcccacgagtgagcgcctgtttgggtttgcgtgtgtatgattgtacagaactgagctgtggcata

SEQ ID NO: 299714 - DNA, 393 bp, Zea mays
  unsure (1)..(393): unsure at all n locations
caataggcaaattctgcaaaacgagttcgccaatatgaacaataaataaagaacgctgtgataaaataaaagcagattttctggtgcnnaaaaaaaaaaaaaaaaaaaaaaaaaaaaaaaaaaaaaaaaaaaaaaaaaaaaaaaaaaaaaaaaaaaaaaaaaaaaaaaaaaaaaaaaaaaagggggcggccgttttaaaggatcaaagcttacatacgcgtgcttgcaacgtaatagcttttttatagggtcaccaaaattaaattaactggccgtggttttaaaacgtcggaactggaaaaaccttggggttaccaaattaaatcgctttgaaaaaaatccccttttcgccagttggggtaatacaaaaaaggcccccacatatcccttttc

SEQ ID NO: 299715 - DNA, 231 bp, Zea mays
  unsure (1)..(231): unsure at all n locations
cacgcgnncgcccacgcgtccgcccacgcgtccgcccacgcgtccggtcgttgtttatctgtctactgtgctttagattgttaaaggacatgtgtttcagaacggatgtgttgttgcctcgtactatggtgaaacattgtctcagtttttgtggtcgctgccaggattttgcattatgcctaaagatgtttactttggatatttttgtgttaaaatggtactgtattggat

SEQ ID NO: 299716 - DNA, 379 bp, Zea mays
  unsure (1)..(379): unsure at all n locations
atactcctgtctgcgacggaggccgcagagatgatcatcagggtcgatgagatcataagctgtgccccgcgcagaagagaggataggatgtgattagaaaccctgtttctcggtgtagtggggatgcttgttaccctagttttgatggtggttctggggcgtccaagttggtcacatttcaggtgttttttttggctcctaagaacctagtaattgttatttcgttgaaacaaccaaccataggcttttttttctagattctcatgatgtaccactgggtgagtgactgtgcgttgcaacgggaatatataacaatataataatttatatacaaaatgtgtcttatattgtttnaaaaaaaaaaaaataaataataaaa

SEQ ID NO: 299717 - DNA, 267 bp, Zea mays
ggaagggccggcccgacccacgcgttcgttgtaaacaaaaacggacgaaggaacgaatttaaaaatatgtaaaaagggaacatgttaagggtcatttcaactgcttaaactgtcgtgcttaaggttgggcttgaccaccttgccgatgaagagtgcgttaagcttctgggtccatgccggaaggcgattccttcatcgaagggcggggggaaaattattatcggtgatattattattgaccactctgggcttattgttgaaacttac

SEQ ID NO: 299718 - DNA, 403 bp, Zea mays
gcagggcgagctacttcaagggggtgcatgtggttgacagcagcaacaacctcggggcgcccaggggcggcctgggcaccttcacggagcagtccagctgctacgacgtgcagagcggcagcaacgccgactggggcacctacttctactacggcgggcccgggaggagctccagctgccagtaactggtgggctctctagctaggtagtgatgtgcgtgctgctggcttcacctttgtttgtggtagtttcttcttcttcttccgattagtcattagtgccgccgtgccgggatggcttctgaagagaagcatggcatgtggtggtggtggtgccctaccctacccttgttggtggggcctgccttcttttcctatatgggagattcacttgttcgtcctac

SEQ ID NO: 299719 - DNA, 99 bp, Zea mays
agcggctgaacacacggtggtgtaatctgttactggtaaggtgcattgttgtatgaattgtttctcacccggaagaaccagaccatcggggattctagc

SEQ ID NO: 299720 - DNA, 370 bp, Zea mays
  unsure (1)..(370): unsure at all n locations
ggcaatcttgttgccgttggagggagagtccttggcttcactgccaagggcaaggacatcgaggaagcaagggcaagagcgtacggtgcggtagacgctatcgagtgggcagaagggttctgcaggcgtgacattggttggagagcactgaggcagaagcaagtggctaaccagtaaccagtagctattccatgaccatgagatttccctagagaaccgcaactacggtgagcctgtactgtttacaagtaataaaaagggaaacggtgcaacacccattgtttttggttgtggaaagacaagtattgctgatcaaacagtagttaacacctgttgatttcngcnntnnaaaaaataaataaataatata

SEQ ID NO: 299721 - DNA, 162 bp, Zea mays
  unsure (1)..(162): unsure at all n locations
gcggacgcgngggccagcggccacggacctggngaagccggccgaccaggacggcgggacgccggacanggaggcgnnggncgngggccaccncgacacgacggagaggagacccagacacccanacacgggggcgcacagncncaagccaggggacgacgc

SEQ ID NO: 299722 - DNA, 418 bp, Zea mays
cggacgcgtgggctaggaagctacatgaaaattgatttaaagctccagcaaattgagcagtgtggatgttgcatttctcagttcattttttcccagttttcaacaaagtatagatgacagccatatcccctcgcggcatatgccttttcattattccaataaagctagcggctggttcgatgagcacgatttgtgatcgagtatcccgtttaataagtacggtgtttgctttttttcaaaaaaaaaaaaaaaaaaaaaaaaaaaaaaaaaaaaaaaaaaaaaaaaaaaaaaaataaataaaaaataaataaataaattaaaaaataaaaataatggggcggccgttttaaaggatccaagtttacttacccgggcatgcgacgtaatagtttttttattgggccaccaaaattaaatt

SEQ ID NO: 299723 - DNA, 262 bp, Zea mays
ggtcgaccacacgcgtccggtttaatatttcttaaattactaggtaagtgcccgtgcgttgcaacggaataatataataccacgataacttatgaaaaaaaaaaaaaaagaaaaaaaaaataaaaaaaaaaaaattaaaaaaaaaaaaaatggggcggcctatctagatttaaaacgttggcataattgatttttcttgcggggagggtaaatggagggcacctggaaagccctttattaaaaaaaattaaatatccttgag

SEQ ID NO: 299724 - DNA, 313 bp, Zea mays
cgccaagcgtgccttcgtgcactggtacgtttgtgagggtatggaggaaggtgagttctcggaggcttgtgaggacctggcgccgctcgagaaggactacaaggaggtttttgctgatttctgatacaagctcatgatgccgaccaatccgctcgactacataaatcttttcttcaacaccattatcagcctttgtagggtcactgaactgtgctcttagatggagatggtcatttttttagctttcttccgtgactttattgccgtctttatggtgtttcatttttattgtctgtgtattattatgagattt

SEQ ID NO: 299725 - DNA, 316 bp, Zea mays
aagccaagtgtgtgtactagcaactttctttttcgggcggcagcaggcagccatcgggtgggttgataagcaccaccacttcttcaaccaccacaagaaggacgaggagcagcccgccggcgagtacgggtactccgagaccgaggtggtcactgccaccggctaggccgagtactagaggtacaagaaggaggagaaggagcacaagtacaatcattacctcttctaggccggcgccatcgccgtctgcgccttctcactctacgagaagcacgaggcgaagaaggactcctagcactctcacaggcacaagatc

SEQ ID NO: 299726 - DNA, 392 bp, Zea mays
aaaaaaaaaagacagcacaccaaaagaaaacattaacgcacaataggaaaaaagcgccgacgggcgcaaacaacgacgaagccgcaacaatgcaaaaagcacaggaccttccggatcaagaagaaactggcgaataagatgcgccagaaccgacccatctccctactggatccgcatgcgcactgacaatagccatcaggtacaaaaccaagcgcatgcacaggcgccgcaccaagctcagcttatgagcgtcggaataggcccgctgctgcgtaggaaggctaatgtctaagagctatcttccttctgccttatcaatgagtcacttattctgtaagctaaaaagtgccgctatgacgcttttattaaaattctggcgagcggtgatgtta

SEQ ID NO: 299727 - DNA, 408 bp, Zea mays
ctacacataaaggtggctcaagtacatgctgtaacaaatatgctttcggatgcactttcggattatcaatctgcactaagaataaacccacaaaatgaagctgcaaagaatggattggagcgcttggagaaacaaatgaagggagtggacccagatgctccagaagacgatgaagagaacgaggaggaggacgtcgatgttgatcgagatgactttatttgaagctggctcattacaggtctcttatacctgtggaagctggcgctgattgatcacgaccatctttgtatagcggtggtagcagtggttttgtgctatttgtgactgaatagcaagtgttctagcagaaccccaattgttttaacttgtaaaaatgccgcccgaaacgaatattgcacgtgttgtatg

SEQ ID NO: 299728 - DNA, 323 bp, Zea mays
taaaaaaaaagaaaaaaaaaaaaaaaaaaataatataaaaaaaaatatatatataggtactaaaaagaaaataacgacatgaggtgtaaattagcagagaatctgcctgttctgttccactaccagccagcgtatacggccgtgcgcatgtgacttcgtttcttgcacccggttccaacgtgcgatgatataataacactgctgttgggaagcctaatttaatcacaaataatttgctttgggcggccgctctataggatccaagctctcgtacgcgtgcatgccacgtcatatctgctctatagtgccacctaaattcattt

SEQ ID NO: 299729 - DNA, 302 bp, Zea mays
aaaaaaaaaaataaaaaaaaaacatttatttaaaaaaaaacaaactaatataaaaggtaaaaaaaaaaaaaaaacaaaactaccaaaaaaaaaaaaaaaaataaccaatggggcgcccgttctaaaggatccaagcttacttccccgtgcatgcaacgtaatatcttttttttagggacacctaaattaaattcactgcccgcggttttaaaacgtcgtaactgaaaaaacccttgcattccccaatttaattgccttgcacaatatccccttttcaccagttggcgtaataacaaaaaggc

SEQ ID NO: 299730 - DNA, 323 bp, Zea mays
cttgagttctacatgtagaagctacagttttgaagggcaagagcgctgtatcttatagcggtctcatggattgtcttgcaccgaaatgtgtgtcctgatgagtacacttttttttggttagtcgtcttaagtacagagcgttatgccatgttttcagacctgaatagtacactgttttctaaatgcgattgagctctagtccaatgtattgataaataaatttaataactatttttttttttgtttttattaataacttatataataattcgggcggcctttttataggatccatgcttactttacgctgcatgctacttaat

SEQ ID NO: 299731 - DNA, 307 bp, Zea mays
  unsure (1)..(307): unsure at all n locations
ccggnccggaattcccgggtcgaccacgcgtccgcttgcatgtctactactactactgaataaataacctctccgcgcacgtcgtccttgtgtctgtgtgtgtgtgagagagagaggagagccggccatgtccttttggctgtttggtttatttttgagttcatgcggtctttatttatttccatgtacccagtacccaccttgtaccatgcatgttccttatgatacactcacctctttttgttaaaaaaaaaataataaaattttatttatatataaatttatattatttttttataatatttat

SEQ ID NO: 299732 - DNA, 359 bp, Zea mays
gggagaacgtggacagtgctcatgctgctttcaataaggactacaagctagctaatcttatcttgtcggaagaaggatccgattccatggaagaaaatgccaaaggtcttggtttataaaaaaggcttctgggggcgactagcttatgagttggttattttatatcgtcccaatttcgcggatcgcgcttgcgtattctgtgaatcaatcaacccaagctattgttatgaaaatgtgcgcgatgttagcatgtgaacttgcgaaaaaacacatgctggatcagtctgaataagtgagtatgccgctctatgtggtcatgtgcgactaccacaatgagcatgtacgtatggtgaaatatc

SEQ ID NO: 299733 - DNA, 391 bp, Zea mays
cacctacccctttccctgctcccgccggacgtgtccggctaccgcgtcgtgtacctgtgccggcatcccaaggacgccttcgtctcgtggtggttcttcgcgaacggcatgctgcgcagaggctcctcctcctcctccgtggacctcgacgacgcgttgagcatgttctgcgaggggttctcgccgttgggccccttctgggagcactacctcgagtactggaaggcgagcttggagaggcctcagcatatcctgttcttgaggtacgaagagatcgtggcagacccggtgaaggttgtcaagacgcttgccggcttcttctctgacccgttcactgaggcggaagagagaggaagagtccccgagcaggtggcgaggctgtgcagcttcg

SEQ ID NO: 299734 - DNA, 404 bp, Zea mays
tgttggtgtgctgcttgtgattgttgttttttcgtttgtatcacgtgctactgggatatcttatatattacacgccacttgttagtatatgtttgtataagctctaaaaaaaaaaaaaaaaaaaaaaaaaaaaaaaaaaaaaaaaaaaaaaaaaaaaaaaaaaaaaaaaaaaaaaaaccaaaaaaaaaaaaaagggggggccgttttaaaggatccaaatttacttccccgtgcatgcaaagtaaaagttttttaatagggtaaccaaaattaaattaactggccggggttttaaaacgtcggaactggaaaaaccctggcttaaccaaacttaatcgctttgaaaaaaaacccccttttgccagttggggtaaaaacaaaaaggcccgcaccaatcgcccttc

SEQ ID NO: 299735 - DNA, 233 bp, Zea mays
ctccaccttgagctcctcttgctaggttttttttatatcttagagaaaacctgggctggttagaccttaacccgggaagtcgaaagctcccacaccatcgacaacgtgaaggctaaaagcaacaacaaagagggcattcccccaaaccagcaacgtctgatctatcttcggccaagcagttggaggatggccgcaccctagcatactacaacattcagaatgagagcacttct

SEQ ID NO: 299736 - DNA, 420 bp, Zea mays
cggacgcgtgggggagaatggacggcttgttttatagtggagttaaaaaaaaaaaaaaaaaaggggaaaaaaaaaaaaaaaaaaaaaaaaaaaaaaaaaaaaaaaaaaaaaaaaaaaaaaaaaaaaaaaaaaaaaaaaaaaaaaaaaaaaaaaaaaaaaaaaaaaaaaaggggggggcccttttaaaagaaccaagtttatttcccggggcttgcaaagaaaaaattttttttttgggcccccaaaaaaaaattccagggcccgtgttttaaaacggtgggactggaaaaaccctggggttccccaaattaattgtcttgaaacaaaaccccttttctccaattgggttaaaaacaaaaaggccccaaccgaacgcccttccaaaaaattgcccccccttaaagggaaaagggccccccc

SEQ ID NO: 299737 - DNA, 411 bp, Zea mays
cggacgcgtgggcggacgcgtgggcggacgcgtgggtggcaaacgcttctctgcagtccttccttctcccgcacgaccattctttcgccggcgccggcggcagccgtgacggctccgcgtccgccgtgcacaagctctccaccaacaccagcggcagcatttccttcaggctctacaccaaaacctccccctcggtgacagcagcctcagccaccaattcgtcagctccgactccagttgccccggcatctgcaccagcggcaggggacgaagaagaagaagaaggcccctctctcgacctcctccgccgccagctcgccgcgggcgactaccggcaggcggacgagaccacgcgggcgctgatcatcgacctcgccggcgagcccgcgaggcgccgagggtacgtcttct

SEQ ID NO: 299738 - DNA, 306 bp, Zea mays
  unsure (1)..(306): unsure at all n locations
ggaancccgggncgacccacgcgnccgggagcaacgaccagaagaacgcgcccaagcaggcagccgacgacaagagcaagagcgaggacgccaacgacgcgggcgccagcgggcgggacgccaaccagcnagacgaggcggacgacgacgaagacaagaagaaggagcgggagagccaangcaaccccagcaccgccaagaagaaccaaggcgcgggggccgacaggggaggccccagcggaagggacgaggacgcaccggccggaagcggaggcccgggccccaagagcgaggaggcggacaaag

SEQ ID NO: 299739 - DNA, 127 bp, Zea mays
tggaatttttggtagatatatgcgataagtagtgcaccgtgattattcatgttattcgatgcgatgatttttagaatgttggattagagaaaagtatgacgaaaattagtagtcacacgttggtggt

SEQ ID NO: 299740 - DNA, 142 bp, Zea mays
gtcctgaagatgaataattggatgttattatttgatgcaactagttatcggtgatgggtggtatgtaaaaagaggtgtagcggtgtatgtaaaatattatattcgtcagatctttttataccaataatatttactcataaaa

SEQ ID NO: 299741 - DNA, 378 bp, Zea mays
gcactgcacaatgacctcaaggtgctgctactaagccacccaaagaaggacatcagggatacatcagaatatgaggttttcagaagggagagaaagaggcgatcattgaaggatcttgctgctgaagtccttggtgctaaaatacaacagaatgaacactgccccgtacgctctacattatatgcatgatttgtgttgtgttgttcttaatactttctgtactcttacagatcgaggatgcgagagctgcgatgctcatttacaacaagcacaagaaagcatgggagaagaacatgaaggaacagttcagattcaaaaagaagctcaagaagcgaggcaagaagaaaactactgagtccaatgggaatgatcccaatg

SEQ ID NO: 299742 - DNA, 167 bp, Zea mays
aggacctgttcgagctgggcggccttgcctatgtcgagaagaataacgcgcgcatggccggcgccctttacgacaccatcatcgcctgcggagggtactacgtctgccccgttgtcaagtacgagcgctctcacatgaacgtgccctttaccctggccaagggcctc

SEQ ID NO: 299743 - DNA, 426 bp, Zea mays
ggaatttaatggccggaccaacgcacccgtaaaaaaagcgcttcgaaataagaggaccaaaaaataaaaaaaaaaaaaaaaaaaaaaaaaaaaaaaaaaaaaaaaaaaaaaaaaaaaaaaaaaaaaaaaaaaaaggggggggccgtttaaaaaaaccaaagttaactaacccttgattgcaactaaatagtttttttatagggcaaccaaaataaaattaactggccgtcttttaaaaacgtcgaaactgaaaaaaccctggggtaaccaaactaaatcgctttgaaaaaaatccccttttcgcaagttggataaataaaaaaaaggcccgaaccaatcgcctttccaaaaatttgcccaccctgaatggcaaatggaaccccccctttagcggcccataaaccgcgggggttgtggtgttaaccc

SEQ ID NO: 299744 - DNA, 296 bp, Zea mays
gaatttccgggtcgacccacgcgtacgggttgtgtcaccctcctttgcttcctctactttacacccaaataagcaactgaagtgacgtcggctatgcctgctcccaaactacatgactgaagaaactagtggcctgtgaaacgcgaatgcatcataacgccaatgttgtggcttctgtgtgagtgaaatgatgggtcctccctgtacggttgagtggatgcattctggaggtatcttgttctgaactgaagctaacgattgcgcgggcaactgttcatgagtcattgtaaaggtta

SEQ ID NO: 299745 - DNA, 415 bp, Zea mays
cggacgcgtggggtcgtgcgcaaaagataatatgagattattgcctcttggctggatcacctgtggacgccaatgcacattataccactgctatagagcttgcaagattgactggtgatgttttctggcacgctggagcccttgagggtagtgtctgtgcattagtgcggcgaggttacgagtcacttgaagaccaagttggtacctgggaatcacgagtctaaggtcaagaactggtaccaccggatgaggcgcatgatggatgttgtgatgagttcgtgagaggtctagcccgtcgtctcctagtcaactttggttgtgggatcgttgtcttcgtatgatgtaattatttaactattttgtatagaacttcgttatatataaatgatgtgacattcgtttcaaaaaaaaataa

SEQ ID NO: 299746 - DNA, 323 bp, Zea mays
gcttcttctgctggttcagcgggcacttgtgagaagccaggtgacggaggcgatgtgattgacgcagattttactgacagctaatgagggggcatgctaggtattagatggaggcggctttgccgtacagggagataatttgttcccacaagattagctaagatgtggatcgatctacttttaggtagattggcacctaactggggaatgaatatacatatggtcctttgcttctgcttgcatagtgtgcattttgattcacgttgcattgcataggcaagtcgagatgatgagttggcgttgtacactatggggggccattt

SEQ ID NO: 299747 - DNA, 239 bp, Zea mays
cggacgcgtgggctgccgtcccggccgtctaatttactagcgcgttcgtcccatgtgtttagcaccaccagcaggagtatcgtgcgggtatgtaatggtattgcaactatatcggatgtaaacccatactaaatgagaagaaatatgcgtggtaggaaaatatgactgcctcgaataaagcatttaacatgttatacatgcggggcggccgtgttagagtttccaaacttacttaccct

SEQ ID NO: 299748 - DNA, 356 bp, Zea mays
caagctgatgggtacatacttgagggtaatgagcttgagttctacatgaagaagctacagaggaagaagggcaagagcgctgttgcttagagcattcttatggattgtcttgcaccgaaatgtgtgtcctgatgagtacacttttttttggttagtcctctcatgtacagagcgttatgccatgttttcagacctgattagtacactgttttcaaaaagcgattgaactctaattaaaaaaaataagcctttaacaaattggaataaaaaaaaaatgggcggtcgttttagaggatccaaacttacttacgcgtccatgcgacaaaatagtttttctattgtgtcacctaaataaa

SEQ ID NO: 299749 - DNA, 345 bp, Zea mays
cgatcttcttcccattgagaaagcccatctacgtgcccgaagggtctcctatagaagtgcacttctggcggtgctgtgcccccacgaaggtgtggtacgagtgggctgtgactacgccgaccccgtcgccgatccacaacagcaatggccggtcctattgggttggtctataataaggcatcaagatcatctttgtgttgtaacagagaggaaaaataacagagatgatatggtttagttctatctgagttgagcagtgtgcttagtgctactggtttctgcctggagagctgatcaaaggatatatgtagcgtgttgttatctgatctgaaaaggagtgcttga

SEQ ID NO: 299750 - DNA, 194 bp, Zea mays
gtaataaatgatgttctcgtctattttattttgctactgctaggtttaaaaaatactgcggatatataaaaattatattataaactcatttataaataatttataataaatgggcggccgttctaaaggatccaagcttacttacgcgtgcatgcaatattaaaactcttctatagtgttacctaaattcaatt

SEQ ID NO: 299751 - DNA, 324 bp, Zea mays
gcaagttcttgtgatcatttcgagaccatttgctaagatatttttatatgatgatgggagcatgcctcatacagccgtggtactgaaattccccttcgcctgggatgaggactgcttctatgcagcaaaagacgaactttatgttacaagatgtttaaacgcactgcatctgtttcatacatgatcctgctgtactactaaatctcacatgcactagccgaaataaagcctgtgcgcttttcatgtataaatctgtattgcggcttcgctaaaaataaaatttggcaacctgtttattaaaaaaaaaaaaaaaaaaggggcggc

SEQ ID NO: 299752 - DNA, 397 bp, Zea mays
  unsure (1)..(397): unsure at all n locations
gaattcccggccgacccacgcgtacgggcgaaanggtnaanctnnnntcttttttttttggctgcccaagaaaaagggaaccgagaggaggccgccaatggcaaaaaggctgttcccgtcgttgaaccgggtgctggtggaaaagctggtgcaccccaagaaaaccgccggcggattcctcttcccggaaacatccaaccagctgaatgctgctaaagtggtggctgttggccttggtgagcgcgactaggcaggcaatctgatcccagttgctctgaaggaaggcgacactgtttcttttgnccgagtatgggggatctgaagtcaagcttgcggctgataaagaatcgcgggcaaccgggtggtgagatgcgtangatttgaagctgggaacaaa

SEQ ID NO: 299753 - DNA, 437 bp, Zea mays
cccacgcgtccgcccacgcgtccgcggacgcgtgggcgcacgctcacctccgacctcctcttcaagggcgccgtgccggggctggcgcacatcgagcccaacaagctccggctctgcctcgagctcgtgcagtcggcggccatggtcatgtcccgcgaggacgcgcacacggcggtcaacgccgcgcccatgtacggcgagccttccggcggcggcgtgtacagtgcgagcggcaccagcagcacgagcttggtgaacctcaacctggacaacaggatggtgtacttgaacctagggatggacgcgcagttcggcaagatgggcgacggcgatgacggcgggggcagggggccgtcttctttgttctccccgcatggctaccattggacaagatggaaccggccggttgctgctctactatctccttgtaagcttaa

SEQ ID NO: 299754 - DNA, 410 bp, Zea mays
  unsure (1)..(410): unsure at all n locations
accgaaccggaggtcccggccaggcctacgcgtcccattaactggttgcggaagaacaagtttcaagtgggtgacaaggttcgttcaagaaagcttgaaatctcttgtcgtcctgatactatggaaatccctaatggaacagtagttggtgtcgacgatgacgaagggcgcgatgcgtacgttcttgtacgagtctatgggctgcataatgctttaaaggtccgctgctcgacggtggagaggggtatcatatggtcttgttgatggaaactgggtcactgcagctagaaaaccattgtgcctcaatttgaggagcttttccatctatattttttaccaggcacagngcctatttatctcttgtattcgaacacttttgcantaagcaataaaagaatactttcttcgat

SEQ ID NO: 299755 - DNA, 429 bp, Zea mays
  unsure (1)..(429): unsure at all n locations
atttccttcaacgaccaggacagggctgttcctcacttcgccaccgggctgatcggcagggacaacgccatagcaaggcacgggatccatgggctctactggctgtttaacatcgatgtggccagtgcttggcttgtgcaaggggtgaacaccatctacctgaagcagcccaggagccagagcccgtttcaggggttgatgtacgactacttgcgtttggagggaccatgcggcttctaatcgatttttgtgtgaaattgcgttgctagatgtgaaattacaactgcattcactgtgtaaacccaatgcatacgattgggggaaagatgttgcggtattataggcactggggttatgtaggtaatgttagtttaattttcgcatttataaccgtgcaagctatgctgattngtaactataatgatgtaa

SEQ ID NO: 299756 - DNA, 378 bp, Zea mays
cggacgcgtgggcggacgcgtgggcggacgcgtggggtaatgatgaatgcaattaacttgaagaagttgtgtaactcaattttttttctggacaaaaaaaaaaaaaaaaaaaaaaaaaaaaaaaaaaaaaaaaaaaaaaaaaaaaaaaaaaaaaaaaaaaaaaaaaaaaaaaaaaaaaaaaaaaaaaaaaaaaaaaaaaaggggggggccgttttaaaggatcaaagtttacttccccgtgcatgcaacgtaatagttttttttttgggccacctaaattaaattaacgggccgtgttttaaacaacgtgggattggaaaaaccttggggttaccaaattaattggttttgaaaaaaatccccttttcgccagttggc

SEQ ID NO: 299757 - DNA, 286 bp, Zea mays
gcaatgccatccaggccatcctcgcggagcgtgggacggtaacgaacaaggagctcgtgctgaaagcgcgcaagatgctgtcgaaacagggctacacccaacagcctgggctctactgcagcgatgagaatgccagtgcggcttttatatgctgatgatgattcattgggtttgtcctgtggattgcaatatttgtattttgtctctaagtgcatgtgagttggactggtggttatgttttttcgctgagatttgggaatgtatcgtttctttcgcaggatgacaa

SEQ ID NO: 299758 - DNA, 175 bp, Zea mays
agagaataacgcagagctctctgcttcctgtctgtcttctgccgacccggccgttggagtggactattgtgttcgtcctatatgtttagcagcagcaggtgtattgtgcgggtatgtaatggtattgcaactatattgggtgtaaaaccataataaatgtgggcaaatatgcatg

SEQ ID NO: 299759 - DNA, 236 bp, Zea mays
  unsure (1)..(236): unsure at all n locations
tcgctgggctgttctcttttcttctcttataaactgcccgtcggagcgtgtgagaagatgctcatcctatattgtaaagggcaaaaaagtggctcagtggcaccttctgtcttgtaatgttatcagttatatgaataataagtgttatgtaagctcctcacaaaaaaaacacggattggctatcggtgtccgacgcaagtgacgaggctagtgcgagagaggaagccctanggagc

SEQ ID NO: 299760 - DNA, 270 bp, Zea mays
ccaaggccgatatcaacactacctcgtcctaggttgcgcagcctccggttgcaggcttgtctcgtatgttcacgcgtcatgatgtaatcatagtgctgctgtgtctggtctccttctgtagcaactgttatctgatggaacagtaacaatgcttatttaatccagctagttgcttatttgtggatcctctctctttgttgttggccaccttttgaaaaaaaaaagagttaaaatagtaatgggggcggccgctttagaggatccaagctt

SEQ ID NO: 299761 - DNA, 212 bp, Zea mays
ccgggtcgacccacccgtccgcggaacgattctcctcctccgtccgcgtagctctcggtttcggcgatgtcggggcgcggcaagggcggcaaggggctgggcaagggcggcgccaagcgccaccgcaaggtgctgcgcgacaacatccagggcatcacgaagccggcgatcgaagctggccagagggcgggtaagccattctgggtattaca

SEQ ID NO: 299762 - DNA, 387 bp, Zea mays
actaggctccctactacgccaagatcttctatggagtcgagcacgggttcccctgctggggcaacaccaccgaccctttcgccgtcaagaccgtatagacggccctcgcctacatggtcagctggttcaacaagcacctcaactgaatgaagcctgcactgcacccaccatactgaatttaataaaccacagcactgctgtgatattttgtttctattcatggttccccagattgatttgtcatggctaagacctctactactgtaatttcccttattaaaaaatataaatattctaatattacggtcggtcgttctagatgatccaattttactttcgcgtatctgcgacgtcatagcttttctatagtgttacctaaattcaatt

SEQ ID NO: 299763 - DNA, 430 bp, Zea mays
gacggcgtcaagcacatggtcatgaccacaggcaccccgaacgcgaccgaccggggcgccgccgtcctctgcgcgagcgccttcgccgtcaaagccgcggtcgacctgccgatccaggcgcaatgcgagccgccggatgacgaccgctggttcgagcgcatgaaggcctcgggcatcgacgccctcggcatgcacctggaggccgtcacgcccgagatccgggcccggatcatgcccggcaaggcgagcgtgccactggagcggtactatacggccttcgaggcggccgttccggtcttcgggcggggccaggtctcgacctacatcctggccggcctcggcgacgcgccggaggcgatcctggagatggccgagcgcctcatcaagatgggcgtctacccgttcgtggtgccgttcgtgccgatctccg

SEQ ID NO: 299764 - DNA, 418 bp, Zea mays
gagttgccctgccatcgtctctctctctctccatctctactatttccaatgttgagttacgcttatttgtccagtaaccttgttttgccgaatataatgcatgggggtgttggcgctcaaaaaaaaaaaaaaaaaaaaaaaaaaaaaaaaaaaaaaaaagaaaataaaaaaaaaaaaaaaaaaaaaaaaaaaaaaaaaaaaaaaataaaaaaaaaaaaaaaaagggggcggccgttttaaagaatcaaagtttactttcccgtgcttgcaaaataaaaaattttttatagggaaaccaaaataaaattaattggccgccttttaaaaacgccggaattggaaaaaccttggggttaccaaattaaatcgctttgaaaaaaatcccctttttgcaagttggataaaaaacaaaaaggcc

SEQ ID NO: 299765 - DNA, 425 bp, Zea mays
cggacgcgtgggcggacgcgtgggcggacgcgtgggttatatttgaaattttaatgatcaataagaaatattcgtgttttttattttgagaaaaaaaaaaaaaaaaaaaaaaaaaaaaaaaaaaaaaaaaaaaaaaaaaaaaaaaaaaaaaaaaaaaaaaaaaaaaaaaaaaaaaaaaaaaaaaaaaaaaaaaaaaaaaaggggggggccctttaaaaggaccaaaattaactacccctggcttgcaacgaaaaattttttatatggggcccccaaaaaaaaataaacggcccgggttttaaaaacttcggaccgggaaaaaccctggggtacccaaattaaatccctttgaaaaaaatccctttttccccagtggggtaaaaagaaaaaaggcccgacccaatcccctttcaaaaaatttgccc

SEQ ID NO: 299766 - DNA, 358 bp, Zea mays
ggcacttgtggccgacgttggggaagagaagccccttggtgacggcgatgttggcggcgtcctcgtcggaggaggactcggtggagctctcgtcggagtcccacgcgcggcacacgtgggcatcgccgcccttcttcttgtgagtggactttagaagaatttgaagaattgattcacaaggcattcaaagatgttgtttcagttgaccttgcaatggcttcaaatcttgattcttcaaacaagaagaatatcaatcgaggctttggatttgtgagattttcttctcatgcagtatttgccaaatattattgcctcttcctacgcccccgcccgtcccggccttgcctgccgcttccgt

SEQ ID NO: 299767 - DNA, 312 bp, Zea mays
cggacgcgtggtctcatatctgacacaagactagttaccatttaataccaactggggatcggagaatgtaccatctaatcccagcttctccttcaccgcatctcgttacactgctattctgccaaccacccttgcccgtcttaaatcaaagaaaatggcaactgacaacacatttctcttcacctgggattcttcgaacgagggacacccagacaagctctgttaccagttcttagatgccgttattgacgcttgccttgctgaagaccctgacagcaaagatgcttgtgagacctgcaccaatacctacat

SEQ ID NO: 299768 - DNA, 358 bp, Zea mays
cccatccgcacctctcttcatctccctgctccttcgccttcttcttgatccagccaatccagggatcgcggtgtcggactcggaggagcaccacttctaatcgaaggccgacgcctgagcgttcaagacctatccgcatcatgctggcaccgtcctgaagaacggcttcatcgtcatcaataaccgcccctgcaaggttgaggaggtttctacctcaaagactggtaagcatggtcatgccaaatgccactttgtcgccatatatatatttaatgtgaaaaaactctaatattttttttcctttttctcacaacttttatattttctattttaacccgtcttgagtttcattttgatt

SEQ ID NO: 299769 - DNA, 176 bp, Zea mays
gtgcatatagccatctttgttttcaacaccgttcggtgcatgtgacaatgccaagaattacagggaggctgatgccagccatcacgccatgaccctcggtcccaatggttccgactgccacaaggccgcattgatcttagacaccattgttgaccctctgaaggacacctccggcc

SEQ ID NO: 299770 - DNA, 311 bp, Zea mays
cgaagtcgaaaggctactccaccttcctccatacacattcttcttcatccatgcgcatgcggaagatggatctcctcgtaccggacgagcttcctcggacccaccttccccatctccatgtaccttgcggacagcgcttctaagacctactgatctactcaatccaccgaacaaagctgcttacctagatttagcttctcacgcatatgatccagctgaagctgatccacttaaattcttgcattcttcttctgaaaatgatgattattctcaatggataactgctagtcaaaggagccttcttgaagtta

SEQ ID NO: 299771 - DNA, 286 bp, Zea mays
  unsure (1)..(286): unsure at all n locations
ccggnccggaattcccgggtcgaccgacgcgtccgcggagactttcgccaagaaccgcgagctggtggtgatccactgccgctgggccatgctggtgtcgctcgtatgcgtgttcccggagctgctctcccgcaacggcgtcaagttcggcgaggccgtgtggttcaaggccgggtcccagatcttcatctagggctggcttgactaccttggcaacccgagcctgatccacgcgcagagcattctgtccatttgggcgtgccatgtggagctcatgggcgccttc

SEQ ID NO: 299772 - DNA, 243 bp, Zea mays
gaagaatgttgctgtcaaggatttaaacctgggtttgggggcttcaacttcaaaggtgaaccttgccaaggaggttgccactttaacttccaaggtattaataataaacaaccttgggcaaatgggcaccggttttccccttgggttgaattgccaaacttccaaaatggttgtaaagttggttaacttaataacaaaaaccaacagggcttttgccaaggacttgaaaaaggacccaaagtt

SEQ ID NO: 299773 - DNA, 348 bp, Zea mays
ctgatttccagtacgaatacgaaccgtgaaagcgtggcctatcgatcctttagaccttcggagtttgaagctagagatgaggaagaagtcatggaaggtacagggatactttggtctgtgcttggagatgcagtgggagcagaagaacaactagagctgcgtagaagtgcaagggtaagagagctcaatgaagaagagtttgagtccgaagaagaagagtttgatgaagatgaggatgagtatgagatggatgaaacctaagtgtgaaccagcttcatgtcatgttttagcttttattatgcatccatgtatctttaacttgtgaacttagaactcctgttgtgcgct

SEQ ID NO: 299774 - DNA, 170 bp, Zea mays
catcgagatagctatgcgggagttaagggcctggttcgaggggttccagtccttgacctacggtggcggtaccttcggggatgacaagggtgccagggccattgtcaaagccttccaacccttaaaaggcactgggctggcccttcccaaaatcatggccaccaaaccgg

SEQ ID NO: 299775 - DNA, 384 bp, Zea mays
ctcgccacccgcctcctccccagggggttcatctggcccgtcgccgcctaccgcgagctgatcaacggggacctcgtcgtcgacgacaaggacatcggctactactagctgcgcttgttcacctgcttgcactgtgcatatatattgctgctgccgaggcaagaccggatcccatgctggctagcgactcacaagcttcattttttttactgctctggttttgcattgatggtaaccgatcatggaagatttagttaattaatgtgtgcctttgtggtcttttgcagctgggcgcttggatagtacgtggggaaacatggatggcttttggtgtaggagctgcatgctttgctagggctatcttgtcatgtaggaaatggaagc

SEQ ID NO: 299776 - DNA, 346 bp, Zea mays
gctttctgtatttgggagacttgccgctggtgcttgcgcgggcatgacatctacactggtgacttacccactggatgttctccggcttaggctagcagttcaatctggacacagcactttatctcaggatgaagaaatctgtaccagagaagtacaagaatagaccagaaacatctctagcaaccgctcttctttcagcaacatttgcaactttgatgtgttatccgctggacactgttaggagacagatgcagatgaaaggcacaccatacaatactgtttttgatgctattccaagcattgtggagcgtgacggtctaactggtctttatagaggttttgtgcc

SEQ ID NO: 299777 - DNA, 240 bp, Zea mays
  unsure (1)..(240): unsure at all n locations
agggtgaaactcctacctacatgaccgcatttgatataataatccttcaactggtggggggggcagttgtccctagtcaatcttgaccgacaaaaaagctggctagctagccgtctcgatcgtattatgtactgattaatctgcagattgaataaaaactacagtacgcatatgatgcgtacgtacgtgtgtttaaaanaaanaaanaaanaaaaaanaaaaaaanaaaaaaaaagggaa

SEQ ID NO: 299778 - DNA, 282 bp, Zea mays
cggggcggacccacccgtccgtccccaacgcgctttgggagctggtcgagccgttttcgagaatcgacagcgccagaggcacggggctcctcgcgcttgtcattctcgtcctttcgaacgtggcctccaatgtccccactgtcctcctgctgggctccagagtggcagcgtcagcggctgccatctccccggagtcgcagaagaaagcctggctcatactagcgtgggtcagcacggtgtccggcaatctcaccctcctgggctccgccgccaacctgatcg

SEQ ID NO: 299779 - DNA, 336 bp, Zea mays
gttttattatatctctaacaacacctcttatgtagcccaccctacttcaacgcacgggggacatgatctctttcgtatgggcctacctaaagaaactgcacttgccttagattctcaacctctgaactatcctaatcacaccgatacccaactgaatttactcgtaacacatgcacattatgacaattaccatcatgccattgcagcactgatccatgcgtcttacgctcatccaaccaaccttgaagttctttttgctcttcccgttaaccacacaaattaatcggagcatggtgaagcattaagacatctttataggtcgcttgacaatcaacc

SEQ ID NO: 299780 - DNA, 137 bp, Zea mays
ttagttatgaagggtgttgccatcaactttgtgacccgcgacgacttacgtatggggtgtgacatacataagttctacaacgtgctgattgatgagctgcctgccaatgttgctgaccttctgtgatcaatttgaat

SEQ ID NO: 299781 - DNA, 128 bp, Zea mays
cggaccctgggccggacccttggccggacccttggccggacccttggccgtggctaataacgcattgttccaattaagtctggcctggtcatgcatgcaataaataaagtgatgggtttccctgtttc

SEQ ID NO: 299782 - DNA, 281 bp, Zea mays
gtgcctcctccacgtactcagcgacaccttcatgtacaggcgtagacgcatgaacgccgccgaggacgcatcggtttatgacgatttaaagctcacaattgtgaaacactcggagtctgcaaacacgatgcttatcttcatatggtggattgaacattactattgcttgtctgcccgctgtaaacctttatcacatgatgctcctcatctctattgactgacaaatgacattctggcgcttgatatactctttgtgacattatatgttgccttggcttgtg

SEQ ID NO: 299783 - DNA, 409 bp, Zea mays
  unsure (1)..(409): unsure at all n locations
atgcagatctttgtgaagacactcactggcaagacaatcacccttgaggtggagtcttcggataccattgacaatgtcaaggccaagatccaggacaaggagggcatcccacccgaccagcagcgcctcatcttcgccggcaagcagctggaggatggccgcaccctggcggattacaacatccagaaggagagcactctccacctggtgctccgcctcaagggtggcatgcagaattttgtgaagacattgactggcaagaaccatcaccttgaggtggagagctctgacaccattgacaatgtgaaggccaagatccangacaaggaaggcattcccccagaccagcaacgtctgatctttgcgggcaagcagcttgaggatggccgcactctcgcggactacaaca

SEQ ID NO: 299784 - DNA, 165 bp, Zea mays
gtaatatcttgtttggagttgtaatatcttatcttgcttgtgaaatcgaataggcctatatatgttatgctgtacgagtatgtggctccaaatttgtgagcccttctgtctgttatgaatccaatttgtgagcacacatgaatcaatttcgagattcgacatgtc

SEQ ID NO: 299785 - DNA, 351 bp, Zea mays
  unsure (1)..(351): unsure at all n locations
cgatgctgtcgaaaagggtcacctgatgagactgctcagtggtgtaagcaagcaacgatggacagagatgtggagtaggctcagagaggtggacagacattttgaataccagtatccatcccagaaggatgatgcggtccagatgatctggcggtccttgtctagaaaggtgccgtcaattaagctgaaggttcatagatctggtagattttcaagacctggtaggggaaaataaaacaggaaggtgcgcgtgtctatcttgtctcttgtggccaatctaatgtaacacatttcactgacgcangctgtcatgttttctcagctgtacaaaatagatagaatgttatattc

SEQ ID NO: 299786 - DNA, 355 bp, Zea mays
  unsure (1)..(355): unsure at all n locations
accggaactggaaggccgactccaaccgacgcgtgcggttggccaggccccagagaataacatgatcctggagtacaagtgagcgaagtggcgtggcctgcagctagatatggaggaggctgcacgaaggggagggactagagaggcgagattagctgtggagttgtgttggcttctcgtgttttcttttgcgttcttttcctggtcttcgctgtggcgcttttgtattttaattgttggacccgtaactatcaaggctctgctattagcgcttgaaacctgtaatggcatcgtatgatataatgtgatcgagggtgctagttccccgcattaaanaanaaaaaaaanaannnna

SEQ ID NO: 299787 - DNA, 437 bp, Zea mays
ggataatcctttaaaaatatggacacctggattcacatttgagattgtttttgtgggatggatgctgttgctgtgatgttcgcttgtacttgtagacacttgttaggacctggaatgctttgaattttgtgcagcttagcttgacgaagcctctgtaaccacacacttgaatatgtccagtttgcaagtatattaggtggaaaactggaaatcctgtccatgaagctccattgaatatttttctaaaaaaaattgaatcgtatttgctaaaatggtgttatcatattaccattgcttcttattgcagcatgtcagccatagacttctattgttcagttgataaggttgaaggggccgacggaaaagatcgtgtggtggtcacatttgatgggaagtatctgccttacactgaacagaaatctgaacatatgatgtca

SEQ ID NO: 299788 - DNA, 302 bp, Zea mays
aaaaaaaaaaaaaaaaaaaaaaaaaaaaaatttttttaaaaaaaaaaaaaaaaaaaaaaaagggaagggtgaaaaataaaaaacataaaaaaaaaaaaaacaaaaacaggggcggccattttaaaggatcaaagcttacgtaccctagcttccaacgtcatagtttttatatagagtcacttaaataaaattcactgcccccagtttaacaacgtcggaactgaaaaaaccttggcgtaccccaatttaatcgcctagaagcaaatccacctttctccacatggggtaataacaaaaaggcc

SEQ ID NO: 299789 - DNA, 269 bp, Zea mays
cggacgcgtgggcctgagcatctgtttggtgaaggttgcctttggtgcaatctatcctcaggtaaagaagaaagcgtctaggcggatccccaggagtgccagcacttcggcgagttcgtggtttacgctagcgacctagcacagtcagctgcctgtggtgggtgtgcttacgttggctacgtttcgattctgtgtgctttgattgatattatgtaaatggctctagtctgtaatattatgacttactctgtattgctattcgaagcatt

SEQ ID NO: 299790 - DNA, 396 bp, Zea mays
  unsure (1)..(396): unsure at all n locations
ggcaacattgtcctcagtggtggatccaccatgttccctggcatcgccgaccgcatgagcaaggagatcactgcgctcgcgccaagcagcatgaagaacaaggtcgtcgctccaccagagaggaagtacagtgtctggatcggaggatcaatccttgcatccctgagcacatttcagcaggtaacaccaagttttccggcggctattctgtatctactatctgagtctattttgtgaagttctgacataagttcttgttttccctgtgcagatgtggatctcaagggctgagtatgaggagtctggtccagctattgtccacaggaagtgcttctagacgtcacctagccctaattctnctctggaaataccttcgtttgatgacatatctatggg

SEQ ID NO: 299791 - DNA, 249 bp, Zea mays
gcaaggatggcatctcttctgttagataatcaggagtatactgaagcccttaccctgggtacttgtcttatcaaggaagtccggatactagatgacttgctacttcttgtggacattgaccttatggaaagcaaacttcactccttccttaaaaatctgtcaaaggccaaagcctcttttaacactgctagaactgcagcaaatgccattaatgattccatctgctcaactaggcactattgacctcca

SEQ ID NO: 299792 - DNA, 254 bp, Zea mays
ctcgactccattgctactcagagaggaagcagtgttggtgacgccggttgtgctgctgagggggtgtttaaccagctgcttactgagatggatggcatgaatgccaagaagacggattttattatctgtgcaactaacagaccgggcattattgacccatccttgctgatgccagggctgtttatcagcttatttatatttctctggccgaagagcatgtcaggctttataatctataagtcttgtttaagaaa

SEQ ID NO: 299793 - DNA, 181 bp, Zea mays
cgggtcgcccacgcgtccgtttattccacctgctcaaactgtcgtgcttaagcttgtgctgcaccacctgacctatggggagggcgtcaagcacctggcccaatgcctgatggctattccttcactgtatgatggctggatagttattattttttgacattatgattgaccactctgggcc

SEQ ID NO: 299794 - DNA, 371 bp, Zea mays
gcgccggcgtggccagggcctcgtccactgcgccacgcttcgggagcgcaacctcctcggcgacgtgtgcgcgcacctggagcggcatcgcgaggcgggggcgcggcggcgcgacctcctccgcctggtagcctcgtcgctgcgcggcgcggggcacgacgcctccgtctgcgtctcccgctgggacaattcccgtcccacccggtcggcgagcacgcttacatcgacgtgctccttccggcggcctcagaccgcggcgcgcgcgagcgcgtcctggtggacgtggacttcctgtcggcgttcgaggtcgcgcgacccaccaaggcgttccgcgccctgctgcaacggctgccggctgtgttcgtgggcaa

SEQ ID NO: 299795 - DNA, 320 bp, Zea mays
gcatggatattccgcatggatgagattatgaaggctattgggaagaagctagaccgctacgggaacccatggttagagttgaaaattcagtacggccaaaataaagggaagttctataacgaggaatgtgaccgctttatgctttgcatggtgcacaaacttggatatggaaactgggatgtctgaaagctgtcttccgtatgtctcccttgtttcgatttgattggtttgtgaagtccagaactactccagatttgtctattcggtgtgattctcttttttctaacttgtttttagaaaagataatcatttatttttta

SEQ ID NO: 299796 - DNA, 301 bp, Zea mays
ctgtttaagattttcagaattttgggctttttaactaatgaaacatggccaggctttgcggtcgtttttgattacaagtgagctttcccaaattggccacctttggatcttgcaactgtggttcctacactctaacctgctgtaatcgatcttctatttaaaatgctttctctagatcccatcaagaggatcaccttccgcgctttccttttgcactactactttatggacctcttgcactccttgcattatatggattgattgataaaccatttttccttcccttcttcctctttaaatt

SEQ ID NO: 299797 - DNA, 427 bp, Zea mays
ggaccggagataccggcggtactgcgagcagatgcgggcgctggcgggcgggttcgaggcggtggccggggagcgcgcggcggcggcgtacacggcgctggcgtcgcgcaccatctcgcggcacttccggagcctccgggacggcgtggtggcgcagctgcaggcggcgcgcagggcgctcggggagaaggacgtggcggtgcccgggatgacgcgcggggacacgcccaggctcagggtgctcgaccagtgcatccgccagcacaaggcgctcacccaggccgccggcatgatggagagccacccgtggcgcccgcagcgcggactccccgagcgcgccgtcaccatcctccgggcgtggctcttcgagcacttcctgcacccgtatccaagcgacgtcgacaagcatatcctggctcgccagacg

SEQ ID NO: 299798 - DNA, 258 bp, Zea mays
cggtccggaattcccgggtcgacccaagccttccggttcctttcaattccacaaaccattacctggggtctgtgctggggcggtacgatgggaatgtgtacccagcgctgtaccaggaggcctggaaaggaccctctgaaacaaaacgtggtgcccgagggtaccacgagtacctcgcccctgcttaacgcagctaagctctcagcttatctgacgtacccctgaatttcatgggtgctttaaaattaccactcatga

SEQ ID NO: 299799 - DNA, 397 bp, Zea mays
caccagcgagcgctacaacggctatgtccatggagcataccttgcaggtatcgactccgcagacgtcctcatcaactacatcttcaagaacgaggagtacaaggtccgtggcaagtacgacgtcgacgacataatcgcacaggctagatgaagacgacgagtgcacacgccggatgccctgcgccacgagagagacagacagaataaactgccatggctttatttgccctgtggagcgatgcatgcttcccccttccctttcgagctagagcaaccccagcaggcgccctacaccgtctgtcgtctgctgttcatgtcctgtgtctctgtgtgtttttggattggatgccaatggaataagaacgtataggcttgagggcctctgttgactgttcac

SEQ ID NO: 299800 - DNA, 437 bp, Zea mays
gcagtaggaagggctgtagacctgacaaagcttagtggctacagcgatctttgccagaagcgggaggagatgtttgacatccagggggagctgggttccacactaaagaaatggcgggtcattttcactgatgatgaggatgacatgatgcttgttggagatgatccttgggagtaagaaccctttgtctctgtattaacgagtgcatgttttccattattggaagtcctaatccctgtgcaatgcatcttccttcagtgagttttgcaggatggtgaaaaggatttacatttacacatacgaggaggcaaagaagctgacatccaagtcaaagttaccggttagcagtgacagcagcaagctgagcgctgcgaactcactgtctgaatgactatgaacaaaaactgcagagtgctaacgtcccctctaaatttgta

SEQ ID NO: 299801 - DNA, 333 bp, Zea mays
tatatcacgcattcagctcctctgcttacggtgccagaccgaccgagcaagatccattgatcgatatggagctgcttcctctgctcacgtggctcctccttgcgcacgccatggcctacctggcctggatggccgccgcgcgccgccggcagtcgcggtgctacctcctggactacgtgtgccacaagccccgcgaagaccgcaagctgtccacggaggcggccggcgccgtgatccagcgcaacgcgcggctggggctgacagactaccgcttcctcctccgcgtcatcgtccgctccggcatcggcgaagagacctacgccccgcgcaaca

SEQ ID NO: 299802 - DNA, 390 bp, Zea mays
gctagatggcgggacccgagacggacgtcaacgacgcaatgacggcgatggcagcagtcgcatccgtagtggcctccatgcagtcggcgtcctagcgcgagagcgcatcagccatcgtgttgatgcatctgggccagtatttgactatgaagtcgtatccgaacaacatcgatatgatggagatgatccgaccatgaatcattgtagattagtatatcatcaatgaaaactagcatgaacctgtagagaaaggggcacagggcgtcgttcatgacgctttggaatgtcgctggtgcattggtgagcccgaacgccatcaaactcaaagtggctgtgatgagtgaggaacgccgtcttcttaatgcattcacatgcatgtggacctaatga

SEQ ID NO: 299803 - DNA, 377 bp, Zea mays
agaagattgagctgctagttgacaaaactgaaaacctgcgttcttaggcacaggattttagacagcatggcaccaacgtgcggcgaaagatgtggctccaaaacatgaagatcaagctgatcgtcctgggcatcatcatcgcgctgatcctcatcatcatcctgtcggtgtgccatggcttcaaatgcggcagcaacgtgaagatggggggcgtgacttacaaattgctggtgtgccctggcaccggcgaagagaaaaaccattgggagggagttttgctctgcggtccgcgtgttggtgacgcctgcgcttattattcttggtgatccgcagacggagttattgctgatgtcagtgttgattgctgttggatggga

SEQ ID NO: 299804 - DNA, 360 bp, Zea mays
gggaagaatggggggccgacccgccggcggacgacttgtttgattgattcttcaaaaaatcgagcttcttttgcaccacaaggtccacgatgttttgccgctacagctcaagcttcagatgatgctccagctgcttgagcggatacaactaccctgacctggaggacactagcaccgtcatgcagtccaacatcatacttggagtggccccgaggaagaaagccattcccaagtttgtaaacgactttgaccactctcgaaaaggcgatcaccggtgcactttcgagatcggtttggagttcgaccccttcaactgctgatcacatcgatccgacgaccatggatatgactatgatctat

SEQ ID NO: 299805 - DNA, 430 bp, Zea mays
  unsure (1)..(430): unsure at all n locations
ggggcggaattggccgggaccgaacccactcctccacgcgatccggccatgtatgtncgccatccaggcctcgtgctttccctgtacgccagtgggctgtacaacatggtatttgtgttcggacttctggtgatggntgtcacgcctacaccgtgcctaatctacgaagcgttantgcccttcctcatgccatcctgcgtcttgaccttgctgggcgtgacctgactgacagcctgatgaagatcctcaccgagagaggttactccttcaccaccacggccgaacgggaaatcgtacgggacatcaaggaaaagcttgcatacgtggctcttgactatgatcaggagctggagaacgccaagagcagctcatctgtggagaagagctacgagctgcctgatggccacgtgatcaccaattgggcggagag

SEQ ID NO: 299806 - DNA, 300 bp, Zea mays
cgacaagggccgtgtattcaaggaggagatcgagatgatggttcaggacgctgagaagtgcaagtctgaggatgaggagcacaagaagaaggtggaggccaagaacttgctggagaactacttctacaacatgcgcaacacgatcaatgacgagaagattgcgtccaagctgccggccgatgacaagaagaagatcgaggacgccatcgacgcggccatcagctggctggacgccaaccagctcgccgaggcggacgagttcgaggacaagatgaacgagctggagagcctctgcaaccc

SEQ ID NO: 299807 - DNA, 190 bp, Zea mays
gtgcttattacgactggaatgatattggcactacctcctgcgcccctgcggaaaaatcggcgagatctacaaggcgttccgacttatggccaaagaagacggcatccgctggctgattcggatggacaactacatttcgctgtctacattgtgatctggcctgagcttgggaggaataaaagaagcaaag

SEQ ID NO: 299808 - DNA, 253 bp, Zea mays
ctaacactcacgataacaaatattgcctttcactatggaaggcacccatacaaaaggcgggcttcactagaaaggtgcccatcgtaccacatgtcgctgcttctgacatcttctgagagaaagacatgacttatcatctcaattacatggaggacaacagcgagggctcaaacaaaatctacatgctacatcctgaatgacctgtgcacgtccttagtttctcgacaaccctatctagtcgaaacaaaatcca

SEQ ID NO: 299809 - DNA, 239 bp, Zea mays
attgacaagcacatgtttcatgacatgttctatgaagggcaaaggttacgccttcaagagcgagatgttgcttatggagagtatccacaaatccaatgctgataaggccagagagaagacactatcagaccagtttgatgccaagcgctccaagaccaatgctagccgttataggtatattgttatgatatgagaaaggttggcccaccgtccataataaataacaccatctttctcat

SEQ ID NO: 299810 - DNA, 384 bp, Zea mays
gtcagtttgtcaacctgctatagcagaagttgcttttcacatatcctctggtggggctaagatgtttggaagttctagcatgccagggagtgctgttgggattgatgttgttagcgactgttaaggggtagttcatttctggttatctatgaagctttcatcagaggaagctaatattgctttcaaagtattatctggatgcaaggtgaacacagtttgtacactggagtttgatgaaccttaatcagccgttaaagcttgtggcaaggcatcattaatcaacgatatcatgctcggcagcattgcactcttacattggaactattcataaacagatattttgcacataccttgcaacgattgattgtgcaacaatgtttggat

SEQ ID NO: 299811 - DNA, 344 bp, Zea mays
gtagaatagttctgcagattttatctctgtaaaaaaaaaaaaaaaaaaaaaaaaaaaaaggaaaaaaaaaaaaaaaaaaaaaaaaaaaaaaaaaaaaaaaaaaaaaaaaaaaaaaaaaaaaaaaaaaaaaaaaaaaaaaaaaaaaaaaaggggggggccgttttaaaggatcaaagtttacttccccgtgcttgcaaaaaaatagtttttttatagggtcacctaaataaaattaattggccggggtttaaaaacgtaggaattggaaaaaccttggggttaccaaatttaatccctttgcaaaaaatccccttttcgccacttggtgtaataccaaaaaggcc

SEQ ID NO: 299812 - DNA, 252 bp, Zea mays
atttgtaccgctgtgtctagctccttgagctagtgatctcttgacggtttatgctggctggtctttctggacagaacttgctcggataggaaacttaacatgtcgggggaaggaagggttgagtgaccatgctggctccaacaagaccctctcaagggtcccgtaccctaaatttagaggacgaggacgtactctacttcctccaacaacgtgctctcaacggttctttaaatttagagaacactgctggat

SEQ ID NO: 299813 - DNA, 238 bp, Zea mays
ctgagcactttctcctcgtcccatatcaagtcaatcgaagccgcgatacgaccatggactgcaccggtaccggagcaaggggttaggggaagaaaggagctgtccggcgcaaggtcggctggccaaagaataaatccgtgttgagggccgttaaagccaggtttcaatttccctgttggcgcatctggcgcttatttaagaaaggccccttcgctcaacgtgataggaactgcccccc

SEQ ID NO: 299814 - DNA, 405 bp, Zea mays
gataaaaaagataaaaaaaaaaaagaaaacaaaaaataaaaaaagaaaagaacaaaaaggggggtggttctacaacgaatcgtgaatacagagcgcggggtccctccctttaagcttggtcctcatgcggctgatttcaattagccggccaatccgatcaccttcctattccggttaaatcccagaacgatctgagctgactactatgttctggtgcctattttcatgcagataaaggaccagatcgtagcccaaggcctgcccatctgactaaaagtaatgaactctatgtgtgaaatgatagccgacctgtgaattctcctattctctatattagacgcttgctgcctgctttgtatccataccacttgctagccttctagccctacttcttgcactgttttt

SEQ ID NO: 299815 - DNA, 313 bp, Zea mays
ctggagacccatgagggcaggaaagtcgttcaggctctcaaggatgtgtatgctgagtgggttgccttggacaggatcctcacctcctacctgtgtttcggtgggcttttcaagctcgcctccaattcgttcttgtcacagaggatctgctctgtcaatgccatctccattctatgtgaggtaaccggagccaatgtttattatgtggtttacgccgtgggcattgacacgataattgttcctatagtccctaacaccagagttgtggtcggtggattatgctttcacaatgacatcctatacctggtgtaca

SEQ ID NO: 299816 - DNA, 228 bp, Zea mays
gggttgcaaactctcaccaacaacttgtgtttcacgtatgccaagtgcacacccccaatatcaatcggtcctcctgcatactattctcatcttgcagccttccgagctcggttttacattgggccagattcaaatgacaacggatctttggcgagcggggcttccacaaggcgtgggccttcaccgggggcacgccacaccaaggcttgtgcctccaatttttctttg

SEQ ID NO: 299817 - DNA, 321 bp, Zea mays
cttcaggaggctcttccgggtgacaatgttggcttcaacgtgaagaacgttgctgtcaaggatctcaagcgtgggtttgtggcctccaactccaaggatgaccctgccaaggaggctgccagcttcacctcccaggtcatcatcatgaaccaccctgggcagattggcaacggctatgccccagtgctggactgccacacctcccacattgctgtcaagtttgctgagctcattaccaagatcgacaggcggtctggcaaggagcttgagaaggagccaaagttcctgaagaacggtgatgctggtatggtgaagatgata

SEQ ID NO: 299818 - DNA, 206 bp, Zea mays
cctacacgacggggaagggcttcatccagccgcgtgcgagcctgaccgccagttagagatgagccgcaggctcagtattccggtgaagcttgtgcatgaggcggcgggccacattgtcacgggcgatctcaagaccggcgaggtctaccgcggcttcattgtcgagtgcgaggaccactggaactggcagcttggaaacattaact

SEQ ID NO: 299819 - DNA, 275 bp, Zea mays
cggacgcgtgggcggacacctgggccgacgtgtgccttgatgagaaggttgctgatttccactggcgcaagcgtggtgcccagctcaccaagctcacctagtctaacgccgactacatcaagccgccaatcgagggtacctacaagcctgaccactaccggtactaggcagcccgcacaccgatcgcaactcactcgggccgctgtgtgctatgaagctcgctacactggcctgtcagctatcttttgcatgcatatgcattatcatatacacat

SEQ ID NO: 299820 - DNA, 408 bp, Zea mays
gcggaaaggaccgaacggctcgggttgatccatcggatccgaaggggcatggctctggtcagattggcgtttcccgtgttcttcttcctcgcagcggcggagttcgcggcggggacgaggtcgccgtcggctttcgtacaaaacgccatctactccaaccgcatcaccatcttctccaagacttactgcccctactccatgcgtgctaagcacatatttcgagaccttaaggaagatccatatgttgttgaactagatacccgagtggatgggcgtgacattcaaagtgttctcctggacctagttgggcgtcgtactgtgccacagatacagtaaatgcgctttcaaatggacagctccagaaacttctcgggaagagtcagtcacaatgatgggtcgctggacaag

SEQ ID NO: 299821 - DNA, 251 bp, Zea mays
ggtcatcctgcagtacatcgacgaggtgtgggcggggacggggccggacgtgctttcggtcgacccctacaagcgcgcggtggctcggttctggggcgcgtacattgacgacaaggaggagactgcgtgtctggggatgctgttcaggtgcgctaacgaggaggaaagggctgccggtgtctctcgcgcccgtgaggcgcttgactcgctagatggctcgttcctggactgctccaaggggaggtccttct

SEQ ID NO: 299822 - DNA, 240 bp, Zea mays
tactgctgcgaggacaactgacgggggcgttttttctggttgatgccacgagtgaagagagctgtttatgagaccaatccgtcgccggcgactgaggcgccgtgttcgacggcgagtcagcgggaccagtggatggtacagacgcaggtgtttcagatttaccaactcttcgcctccattccgcgtaacgctcaaaagctgatgttggtgcttcttcgcgattatttcgtctacaaagat

SEQ ID NO: 299823 - DNA, 305 bp, Zea mays
tgtaaattaaggttcaagaagcaacaagtaatcactcataatacatatatataatggcggattggggtccagtggtgatagcagtggtgctgtttgtgttgcttagccctggtcttctgtttcaattgcctgggaggagcagagtggtagagtttgggaacatgcaaaccagtgcaatttctatcttggtccacacaatcatcttcttggtctcattaccatctttcttattgctattggtgtgcatatctacacttggctaggcttattctattctttttttggaaaggtttagaaaattttat

SEQ ID NO: 299824 - DNA, 220 bp, Zea mays
ttctgacacctgtcgtccagaccctaggagttcctaacgcataggcgttgttcatttggctctgcggcccaatctctgggctgcttgagcagcccattgtatggtacagcatcgaccgatgccgattccgctttggtcggcgacgtgccttgatctttgtttgaaccatactcgtaacaactgttgcgttcctgaacggctatgcagcctatttaggaca

SEQ ID NO: 299825 - DNA, 229 bp, Zea mays
ggcgcgtactccatcgaggccacgtgtcacgcgccgaagctggaggaagtgtacgccgaaatcttccgtgttctgaaaccgggggcgctctatgtttcctacgagtgggtgacgacggataagtaccgaggcgatgaccctgaacacgtggaggtcattcaggggattgagaggggggacgcgttgcctggccttagaaactacaccgacatagccgagacggcgcgta

SEQ ID NO: 299826 - DNA, 353 bp, Zea mays
ggactgagcaccgtccacgaatattgttgtgcccgtcatgtaccgggactcgtcgccgacaaggtacagcaccgtcgacgccaggtccttctccggatccagccatctccgcaggggcatcacctccgccgttgccttctccgccttctccttgcccacggacacggggaacttgtcttgcagatgcaggccgcggcaggcggcgttaacccttatcttgtgtttcccaagctccatcgcacacagctgaaacacaagaagaacttattagcaatcaaaagacgaaacgccaatgaacgatacagagatagttaaccctgggaaagacagtctaatgtctgggaaagcttttc

SEQ ID NO: 299827 - DNA, 300 bp, Zea mays
gtgcctccgacgatgacgtggcgctgcacgcgaagaagctcatcagagacctcaacttgttccccgacgctgacgtcaacatcgttcccgttgctaattgcaccctccaaccccgcaggatcgtcgagaagcgcctgaggttcccgaagctgctagcttcggattccgagccttcggttgaggatttgggtcaccacgctggctattaccccattcagcattcacatggccgcaggatgttctactttttcttcgaatcacgcaataggaaggaggatcctgtcgtatttggttgactgg

SEQ ID NO: 299828 - DNA, 324 bp, Zea mays
ttccgagagggctttttggacttcccaaactaacacaggttgagcttcaggataattatctctctggagagtttcctgaggtgggttctgttgctgttaatcttggtcagattactctctctaacaaccagctttctggggttctacctccctccattggtaacttctccagcgtgcagaagctccttcttgatggcaacatgttcacgggtcggatacctccccagattgggaggttgcaacagctttctaagattgattttagtggcaacaagttctcgggtcctattgtgcctgagatcagtcagtgtaagctgttaactt

SEQ ID NO: 299829 - DNA, 220 bp, Zea mays
aggctgccactgagggaaataatgatatgccgctcagtgtcaaaattcttcctgcagctgctctcaacaccttcgttcctccaggtcctctccagctcccatccaccccttcagctcctgggcctccgcaaccgtcaccacaccccttctcacacctatcttcccctgttcgaccccgtcaccaaatcatggatccacttcccccttgacttttctccct

SEQ ID NO: 299830 - DNA, 132 bp, Zea mays
gtaccagtgagcatggaggtttggttaggcttggtttccaacaacttcaagttggcgggggaggaagactcggcttgaaggccacccgcccggtggtgtgttccgtatggttatataaccccccccggttcc

SEQ ID NO: 299831 - DNA, 270 bp, Zea mays
ggatagaatacaaaactcagcttctaagtgttctcaaaattagcaaggagaaagtagatgagtgttataatgcaattctgcaactctcaaaggccaataaatatggtcataacaacatcaacaacactagcaagcgcaagtatgagcaaatcccaagcagcccaagtggcgtaattgatgctgcattttgctctgatggttccaacgattcgtgggcagtggggtcatcattgatatattcaccaccagagcctctcttcaagaagagca

SEQ ID NO: 299832 - DNA, 178 bp, Zea mays
tttgaggatacaatacaggggaaaacagtattcacttcctatggtactacgttgtatcagctatttcttttatttaccacatccaataatccagatgtttgggttcctgcatacaagtcgtcacgttggtattgcctgtttttcgtactctttgtgctggtgggagtttactttgtta

SEQ ID NO: 299833 - DNA, 266 bp, Zea mays
tatcaatcgttttccatggctcgtaccaagcaaaccgctcgcaaatccaccggtggaaaggctcctaggaagcaactcgccaccaaggctgcaaggaaatctgcaccgacaaccggtggagtcaagaagcctcatcgctatcgccctggaactgttgctcttcgtgagatccgcaaataccaaaagagcacagagcttctgatccgcaagctccccttccagcgtcttgttcgtgaaattgcgcaagacttcaagaccgatttgag

SEQ ID NO: 299834 - DNA, 262 bp, Zea mays
gcatttcccatgggtaaaattgatcagacccggatgtggaaggttggtgagcgtgtccgttctacaaggccagctggtgatctaggtccattatacccatttactgctggggtctacgtggcattgatgatggcccagattgagatcctgaggaagaaggggcattcttactctgaaattattaacgagagtgtcattgagtctgttgattctttgaatcctttcatgcatgctcgtggtgtttcattcatggttgataact

SEQ ID NO: 299835 - DNA, 253 bp, Zea mays
  unsure (1)..(253): unsure at all n locations
cgacgagaatcatgccatcgtttcgtcctcggtggggcccgagtactatgttggtattttgtctttcgttgataaggatcagctcgaacctggatgcgctattttgatgcataacaaggttctctctgttgttgggcttcttcaagatgcagttgatccaatggtctcttgtatgaaggtcgaaaaggcccctttggaatcatatgctgatattggtggtttagatgctcanatacaggaaattaaagaagca

SEQ ID NO: 299836 - DNA, 430 bp, Zea mays
accggtccggaatttccgggttcgaccaacccgtccgggagctcggaactgtcatgcgatcactgggtcagaacccaaccgaggctgagctccaggacatgatcaacgaggtcgatgcggacggcaacggcaccatcgacttcccggagttcctcaacctcatggcccgcaagatgaaggataccgactctgaggaggagctcaaggaggcgttcagggtgttcgacaaggaccagaacggcttcatctctgcggcggagctccgccacgtgatgaccaacctcggcgagaagctgaccgacgaggaggtcgatgagatgatccgcgaggccgacgtcgatggcgatggccagatcaactacgaggagttcgtcaaggtcatgatggccaagtgagtaaagcctgcggtaacggtatactaccccgcggg

SEQ ID NO: 299837 - DNA, 429 bp, Zea mays
accggtccggaatttccgggtcggcccaacccgtccgaggacttgaagatggctatcgcgtcgtcatcaatgacggcccaagtggatgtcaatctgtttaccacatccacgttcatctcctcggaggcaggcaaatgaactggcccccaggctaagaatatcttgtgattgatcagtgctaatgccaaggactgctactccatttctctagaataatccctgtaatttccataaaagctagtgcgcagtgcgctgaccttgtgctatatttgtggaattaccggaagcatgctgctgtgatctatgattggacacaagaaacttgtaactggtactcctatcatcgattgacttgtccttattgatcagctgatgggggttgcccactggccttgctgaaaaaaaaaaaaaaaaaaaaaaaaagggcgg

SEQ ID NO: 299838 - DNA, 422 bp, Zea mays
  unsure (1)..(422): unsure at all n locations
cggttcggaatttccgggttggacccacccttccgattactttttgcagaaacttttaattctgaagggcgacgatggctttcgaatgaatgatgttcttgtttctctatggtccattatgggcctttggccactagtctacagtttgttgctccttcctactggtagaagttccaaaagcaagattcctgtgtggccattcctggttctttcatgcatcggaggagcatatgctttgattccttactttgtcttatggaagcctnctncaccttccattgacgaagatgaaattggacaatggccattaaaatttctcgagtcaaagttaactgcaggactagtgtttgccctgggcattggactgatcatatatgctggcaaagctggtggcgacgattggaaggaattcattcgatact

SEQ ID NO: 299839 - DNA, 389 bp, Zea mays
ctcgagttcaacttccgctggacccgccgcagcctcgccgtcgtcggcctcttgggcctcgctgtccccatcctcgtctacaagggcatcgtccgcgaattccatatgcaggacgaggatgcaggtcggccatacaggaagttcctgtaagcggcgtccagggctgcagaatacgtcgattcctcgaccggggctgcgaggaggggagtttctattcagtttgtatcggtattgttttagtctgaatctgatgaagcaatttggaatgctgaattattgtgcctgatccaaatgaataaggtgtaatgactcgtcttttcaattgctggctcttacattccatgtatactctgcttcaacataatatgtagttgtgtctactggttttt

SEQ ID NO: 299840 - DNA, 289 bp, Zea mays
gtagtcggattataaaactaatttctcagccgaagattaaaaagtgagacgaatctagtccagttggttggatctatatttcatactcctatttgaaagtcaaacgattaatgtgacccgggctaaattttagtccacggaaccaaacaccccctaagcacgtttgttgagttgtaatggattcacattatgtgcattcgagacaggtcgaaggaattgtatctctagagtgaaaatttcctttttcaccggtatacacagaagctctataatagcggttgtgaaccta

SEQ ID NO: 299841 - DNA, 385 bp, Zea mays
ggatgcgacaaacgttggggatgaaggtggttttgcacctaacattcaggaaaacaaagaaggccttgaactattgaaggcagccatagaaaaggctggctacactggaaaggtggtcattggaatggatgttgctgcttctgagttcttcggtgagaaagacaagacttatgatcttaatttcaaggaggaggtaagaatcacaacttcttattatgtttttgtagttttatttacctagagctatagctattccttatgttattctataggggtatggtaatacatgaacatttgttttatattaacatgtactcactttcttggctagaacaacgatggctcaaacaaaatttcaggcgacagcctgaaagacctgtacaag

SEQ ID NO: 299842 - DNA, 228 bp, Zea mays
acccacgcgtccggagcattcataatcacaccaatcgaagcgcactaacatcaacctaacaacaatttctaccaagatattggccctccttgcgcttcttgctctttttgcaagcgcaacaaatgcgtacattattccataattctcacttgcttttacttccattatttcacagtttctaacaccacatactttaacggccttcgaacacacagctgttcaagccta

SEQ ID NO: 299843 - DNA, 373 bp, Zea mays
  unsure (1)..(373): unsure at all n locations
gacccaancgancggcaactaacaacatacaaaacacaatatttttccaacaatttcaaccaaaatatttatctggcttatacgccatagtctaatatcaaccttctctaccccaaccatttttctacaattctcacaatctcctataacttcccttcttcccccatacctttcaccanctatttcattaattatttaaaacccatatttttaaccctacatcatccaacaatctatctcaacattcatattaccattattacctttatatctccaacaaccttcatccctattacaacatttacctttattccattttttttcacaaaactattatctcaacaactacaacaactttttactaacaaacctt

SEQ ID NO: 299844 - DNA, 258 bp, Zea mays
gacccacacgtccgaatactcaactatgcaatactacataatacattaggccattcaaccaaacatcttacattggtaaccaggaaccattcaacaaccatatcctctatctctacacacatccttataacaccacaatattcaatcaatactcacacaacaccttcaacaacataatctaccaacaatcaatcaaatagttacagctaacctttctaaatacctccatcaacaacacatattttccattcaatcaac

SEQ ID NO: 299845 - DNA, 288 bp, Zea mays
acccacacgtccggcgacatacaaaatggtcctacagacctttctgcattatcagccgcaccacgagctcgcggggcttatggcggcctatgtagcgcatcagcttacggcgatttgcggcctgcagctgcagcattcatattcctacccttgcaacgcatatgccggcgttgtatactactgacgaaactatgtacttttgcaataatgtaatggagccgctgactagctacctacctctctagcttactcatttagcggcgattaaaaacttagtgtcacccatca

SEQ ID NO: 299846 - DNA, 320 bp, Zea mays
  unsure (1)..(320): unsure at all n locations
acccacacgtccggagcattcanaaacacaccacaccaagctgcctatcatctacttaacaacaatggctaccgggatattagccctccttgcgcttcttgcccttttccttatcgcaacacataccatcattattccacaatgcacacttgctcctagtgccattataccacaactcctccgaccacttactttaatgttctttgaacacctaactttgcaagcctacaggctacaacaaacactagccgttagcgtcttacatcaaccaattcaccaattgcaacatcaatccttggctcttttaaccttacaaacca

SEQ ID NO: 299847 - DNA, 429 bp, Zea mays
gcgaagcacaatcgcaacaacctaaccacaatttctacctacaaactacaacctctaccaggacattctgctttctttaacaactcatacgcctaccttattccacaaatcctactaacttctaataccattacttctttcctattaccactaactaacacaatctactttcaataaaaacccattccttcttacattcaacatccaacactcaattacagcttacaacatacctttataacctcttttcctccacaattcatcactcatataaacttacaaaccatctcatcatatattctaccacaactttttccatcactaatccacctaactctttctaaccaatcctttctactttcatcaacaactactttcatccaacccacttgctcttgctaacttagctgcataccatcaacaacaact

SEQ ID NO: 299848 - DNA, 236 bp, Zea mays
  unsure (1)..(236): unsure at all n locations
cggaanncccgggncgacccacgcgnccggcnnccgngcgangccgaacatacngangcnccgcccngcnganggcaacgagaccgccggagcagacaaaggcgcggacgncaacaggaagaggccgaccagccacgcgcncnccaggcaaaagcgcccacaccngccgggcaccncgaacgagggcgaggagaaggggcgggacaccancaccgacaacncgacgggcaacaagc

SEQ ID NO: 299849 - DNA, 258 bp, Zea mays
gaacctttttcaagtattctaggtgcacactcagtatcgagtgttcctcctgcatactatgctgacctgacaaccttccgagctcggttctacatggagccagattcgagtgacagtggatctatggcaagccgcggccctccaccatgggggcgcaacatcaacgctggttgtgttggaaatgatgctgagagagcattaccatccactgagagacatcctaagcggtgaaacctgtgactttctacacatgctata

SEQ ID NO: 299850 - DNA, 316 bp, Zea mays
cccatccgcacctctctccatctccctgctcctccgccttcttcttgatccagccaagccagggatcgccatgtcggactcggaggagcaccacttcgaatcgaaggccgacgccggagcgtccaagacctacccgcagcaggctggcaccgtccgtaagaacggcttcatcgtcatcaagaaccgcccctgcaaggttgtggaggtttctacctcaaagactggtaagcatggtcatgccaaatgccactttgttgccatagatatattcaacggggaaaaagctcgaagatattgttcccttcgtcacacaact

SEQ ID NO: 299851 - DNA, 391 bp, Zea mays
cggacgcgtgggtgaacgccggcagcgcccggatgacggcgtcctcgaggccgcgcggcgcggcgctggaggccggggtgccgccagtgctggtgcggacgcgggcgcgggcgcgctgggggcggcgggagacggcgtcggacgcgctacggtcgcggtgccaggtgaggcagcagcggatgacgaagacgtagtaggcaaggatgaggacgcaggcggcgaggatgcccagcaccgtgagcacgaggatcgggaagctggtgatggatggcgcgtggcgcgaggaggaggaggaggaaagggagagggaagaagatggcaatgccgccgccgccggcggcggcggggggaagagcatagctagcgccgggacctgcggcaccgggaagat

SEQ ID NO: 299852 - DNA, 433 bp, Zea mays
  unsure (1)..(433): unsure at all n locations
ggccgacccacgcnacttttacgctttgtcttttttttaaatctgccttttcattccgggattcttggtgtanttatcggactacttaaggactaattaaggtaaaacattcatacccttttggtgttgaccctgttttgcattgtatccgcatcgagcttccgtttctcaattcacttaaaattaagatttccattcttcttggagttgcacaaattaaccttgtgattttgatcaactacttcaatgcaaaattttttaagaacagtcttaatttgttgtaccacttcattccccaacttatcttttttaacaacttattttgttacccttcctttcttattattattaaattgtttcaccttgttaaaaacacatctataccattttattatctacattttccttatcccaacataataaaatttttaaa

SEQ ID NO: 299853 - DNA, 283 bp, Zea mays
gtggcttctcataaccatcttaccaagtcttcctccgattagggttccttacggtttagtggaggggcgatcgcgaccgctgatgtcacctaccgatacttcatcgtctgtcttgcctctgccatcagcaacgactcctttgagaataccttgtgctcctacagccatttctttgattgcaacttcatcacctaccggtagacgtataggttcctcttctatcactttcttacctactgcttcgagaactccatgctcgaagctatcgagaacatcaacggca

SEQ ID NO: 299854 - DNA, 373 bp, Zea mays
atcgagggcatgaacggcaaggagctggacggccgcaacatcaccgtcaacgaggccgagtcccgcggcggccgtggaggcggcggctgtgggtacggtggtggccgtggaggcggcggctacggcggtggctggcgccgtgatggcggtggcggctacggctgtggcggctgctacggtggcggcggcggctacggtggtggtggcggcggctacggcggtggcaaccgtggcggcggctacggcaactccgacgggaactggatgaactgagcggtggggcccgcgcggccaagttatcctgttcgctaccgtgatgtttaccctagtccagaaggtttatcttcgttcgggtcgggtttgttgttgccca

SEQ ID NO: 299855 - DNA, 213 bp, Zea mays
gacccacgcgtccgcggacgcgtgggccgccgcattccaaacagcccgacgagctagcagagcggggggcaggtccctcctcaaggaacatggcccgcatgcagaagttggcagtggcgacggcggccgtggtggccttggtgctgctggcggcggcggcgacctcggaggcggccatcagctgcgggcaggtggcgtcggccatcgcgccct

SEQ ID NO: 299856 - DNA, 261 bp, Zea mays
ggaagtactactctctgaatgcccaatgtcacggtcgaatcataatgcttttaatttgcgtgcatattatagcaggagccattttgttttcaatgattacatccatagcacatcatttgtggtccttgcatgtttgttagcttcactcattgaggttggtatgaccttggcaaatctcacttatttattccttggtgctgaagatgctggaacatgtttttcataactcaattcttcttaaaatttcaaaacattactttt

SEQ ID NO: 299857 - DNA, 397 bp, Zea mays
ctcccgcccaccgtcgtcgtcgcccaaccgcagtaaggaggaaggagcaggaatatgccggctgtgcacgggctgcggtctcggacccactacctgttcgcgcggcccttccgcatgaaggggtacatcctactcaccacgtacctgcgcacctacaagatcggcgactacgtctacgtcaaggttaacagcgccgtgcacaagggcatgccgcacaagttctaccacggccgcaccgggagcgtctggaacgtcaccaagcgcgccatcgtcgtcgagatcaacaagcaggtttatggccgcatcatcaggaagcggatccatgtccgcgttgagcatgtgcaagtcctaccattgcaacggttgtatttcatgttgttgaaagccaatattgacc

SEQ ID NO: 299858 - DNA, 389 bp, Zea mays
  unsure (1)..(389): unsure at all n locations
gtccggccgtgtgggacaccggtgcgtgctcgagctccaccagtcgccgccgccatgtcgctgattgcgggggaggactttcagcacatcctgcgtttgcttaacaccaacgtggatggcaagcagaagatcatgtttgccctcacctccatcaagggtgtcggccaccatttctccaacatcgtctgcaaaaaggccaacatcgacatgaacaagcaggctggtgagctatcctagatgagcttgagcgccttcatgactgtggttgccaaccctcgccagtttaaggtccttgactggttcctcaacaataagaaggactacaaagatggtaggttctctcaggttgtttccaatgccctcgacatgaagctcanggatgaccttga

SEQ ID NO: 299859 - DNA, 328 bp, Zea mays
gttccatttgtggttctattctattcttatagccagcgactttgaaaatacagggcgaggtgcactgcttgctgagggttgccgcggttcgttatcagagaaaataataaaaatcacaagctcagagagagagggcaagggcaacatcagacatatgctcttggaattaaggaggtttgggagattgaagaaggaaagcacaatccaggttctgttattcatactgttggatggcctttggatactaaaacatatggaggatcattcctgtaccaccttgatgatagacagttggcatttggtctggttgttgcgttgaattatcgaa

SEQ ID NO: 299860 - DNA, 394 bp, Zea mays
gcggagtctagactcgagagcaacctctatttcccggatctctctcccacccacgccgggtcggctccttcgtctgctgcagcgatggcctcccccgacctgctcttcaatctgcggaacctcttctacctgggcgcctaccaggcagccatcaacaacagcgacgtcctgggcctcgacgccgactccgccgctgagcgcgtcgccatcgtcttccgctcctacattgttcttggctcctaccagctggtgatctgtgagatctactcgtttgccgttacctcgcttgaggctcgtgaatctgtttgtgccttacttttactgtttgacactggaagtttcctattatttcagtttttatgggaaatgtgttttagttttattcattcaattt

SEQ ID NO: 299861 - DNA, 329 bp, Zea mays
tcccgagccgagccggcgagatggcggtgatgtctcgcgcgatccgcaacttcgccgcggcgttccgtcgaaccctgaccggtgcttcagggccggcgctgccgaaggaggcgcggcgcgggtgagggcggcggcgcccgggcgcatggggcgggatcaggaggacgggaggcgcgtgcagtgggtgtttctctgggtgccccggggtggggaagggcacctacgccagccgcctcttgcagctgttcggctgtccgcacatcgtcaccggcgaccttgtccgcgacgccctggtcacccctggcccccttttttcaacaagttttgct

SEQ ID NO: 299862 - DNA, 297 bp, Zea mays
  unsure (1)..(297): unsure at all n locations
ccggnccggaancccggggcgacgcacgcgttcgcacgcatactgcatacacaacacagagcatctgaaggagctacgatctgatcgacatggctgccgtcaccatggctatcacctcccgcgcgctcgtcggcaagccggcgctggcacgagggacgtcttcggcgagggccgcatcaccatgcgcaagaccgccgccaagcccaagccggcggctggcacgagggacgtcttcggcgagggccgcatcaccatgcgcaagaccgccgccaagcccaagccggctgccggaggccg

SEQ ID NO: 299863 - DNA, 435 bp, Zea mays
  unsure (1)..(435): unsure at all n locations
ggaanncccgggccgaccgcacgcgtccgcggacgcgtgggcgcggtggtgcagccgcataccttcccgcccttcgaccgcctcggcggcggctcgtccccggcgtgcggtggcctccccggcacctcgtcgggcggcagcagcattccagcgttcagcatgccgggcagcggcagcagcagcctccccggcgggtcgttcttgcccggcagcagcggcagcatcggcagcatgcccctcttcagcggcggctccccggccttcagcggcttccgcggcatgcccgggtcccccgccgccggctccgccgtccccgtgcacggtaactagccctgaaaattcgtccgtcgccggagcacattattgatccaacttgtgccctagtactcctttgtctgcattatattggagagttggtattgcgtttcttttggt

SEQ ID NO: 299864 - DNA, 324 bp, Zea mays
  unsure (1)..(324): unsure at all n locations
gaanncccggggcgacccacgcgtacgctgacactttttcagtcacagaggtacgaggaaatggttgacttcatggacatcgtagcgggagctgttgactctgaagagctcactgtcaaggatcgcatccttctgtacgatgcatacaagaacgttattgtaaccattcgtgcctcatgacgcatcatttccttcatcgatcacatggaggaggatcatgccaatgttgaccatgtaacactcatcaataactacctcccaactattgaatctgacctcaacacatatctattataacatcctcaatctatatgaataatatct

SEQ ID NO: 299865 - DNA, 337 bp, Zea mays
cgcgtccgggccccgcttcttgttcgcgggcggcgctttgtgccacggcgggctggactaggcctcgatcgtttcgctgccgagggaggaggctgcggcggcgggcggggactgcgccgtgtgcatcggcgagctggccgcgggggaggccgtgcgggtgctgccccgctgcggccacgcgttccacgtggagtgcgtcgacatgtggctgcgctcccactccacctgcccgctgtgccgccgccgcgcggtcgtcggcgacgactccttgccgtgggcgccctaggcggacccggacttgctcaactttcccaccaacgttctttttttttgtttc

SEQ ID NO: 299866 - DNA, 316 bp, Zea mays
cgggtcggcccacgcgtccgaggaaacatacacgtatttctgcccgccgttttggcaaggaagcggaagatgcatctggggtgccgatacatggaatggggggtgagaccgaagcagcttccatctcggcttaggcaaaaggtacgcaaatattatcgcgaacgctcggccgccactacgggatactatgagatggaaatgaacactgatctgcctcaaagactgatgcggcacataaatcgctacctctgacatcaactagttaagcaggttccactattacatggcatggacaattctgatcctgcataacatt

SEQ ID NO: 299867 - DNA, 317 bp, Zea mays
cgcaaacatacacgtatttctgcacgccgtcctggcaaggaagcggaagatgcaactgcggtgcccacacatgcaatggtggatgagacagccgcacgctgccttctcgcctgacgcaaacggtgcgcaaatatgagtcgcgaaccccttgccgccgtcacgggatactaagagatggagatgatcaacgatctgcctgaaggactgacgcgatacatcaagcgctacctctgcctcgagctggttaaacacgctccgctgttccatggcatgaacgatctgatcctggataacatctgcgaccggctgtggccact

SEQ ID NO: 299868 - DNA, 438 bp, Zea mays
  unsure (1)..(438): unsure at all n locations
ggaanncccggggcgaccgcacgcgtccgaaccccaccaccagcagcagacagcagatgcattgttagttccgaaagcacacgtctcgcattagctacttccagccttcgtccaggacacgagaggaaaccgcagccatggccaacaaccgcacctacgaggagcatacccccgccgtcgagtggagccgctccgccgccgaggccgacgccgtcaagatctcgctcccagggttcaagagggaggacctccgcgtgctggtggacaaccacggccacctgcggacgcgcggcgagcggcacctcaccggcaacaggtggatccgcttccagaacgacttcgagctttccgccaactgcaacgccgacggcatccgcgccaagttcgagaacgagacactcaccatcacgctcctcaagaagaccccctcgacgccca

SEQ ID NO: 299869 - DNA, 206 bp, Zea mays
  unsure (1)..(206): unsure at all n locations
ccggnccggaanncccgggtggaccgcacgcgtccgggaaaaatatccccaaaccctagctcccgatctcgatggcgaaccctcgcgttttcttgtacatgaccgtctgcggcgccccggctgtccggatcgtgattgagctgtactccaacgaggtgcccaagaccgcggagaactttcgtgcgctgtgcacgggctaaaaaggt

SEQ ID NO: 299870 - DNA, 340 bp, Zea mays
cgacgcacgcgtcctgacccaataactaagtcagaatgcatctcttgtttctactcgctggtaacccaacactaacggggggtactatttctggtagcgcagcaccgaatcacattcaaggattccagtcctatcctgccaatggagttattcttgatcttggttggcctccacttcacagtggtggtgtccgacacctccaccttgcacagtatactctttcacaagactgacgacgacaaaattttggtcctcgactcgcacacgctcttgggctcattatgggagcctggtgacctattgctgtttactgtgtctatacagaagaacctacacctgt

SEQ ID NO: 299871 - DNA, 204 bp, Zea mays
aactcgtatgaatagaaactagatctgaatgacaaagtaaacgttgacgctagcaaaatacgcgcgggggtcaggcccatattctgtatcataaaacatgctgaacccaaatggtggaagaaactcgttcgagatgatcaaaggacacctcactctgtgaaagctgatcgttacacatggaatgatcaagaagatgatcgtgct

SEQ ID NO: 299872 - DNA, 332 bp, Zea mays
gtcaggcatccggagtcaaatgggctcgttgaaagagccaatggcattataatgataggggtaatgaaattaatcttcaatcaacccaggggaaagtggccagatcagctaaccaaagtggtgtggagccacaacacaacaacatcaaggtctacaggctttactccattcaagttattattcggtgacgaagcaataactccggaggaagctaaaactggatcaataagagtagtagcttcggcagaatcaggttctgaagatgcttattctgtggaaaaagatgctttagaaaggatcaagctttaagcttgggagaatatcaataaata

SEQ ID NO: 299873 - DNA, 460 bp, Zea mays
gtccggcgggtcctcctggcgcacctcctccccttcccctccgccacctcctcacagcctcagctggcggcgtctgcgtgcgcggccggggatagcgccgcctaccagaggtcctcctccttcggggacgatgtcatcacataagcacattctagaaagcacaggattgtcttctgcccccatgggaattacttctgaaaatgttgcccatcgatatggtgtaaccagacaagagcaagatcaggccacctctgagtctcataggagagctgctgcagccacgacctctggaaaattcaaagatgaaatcgtcctcgtgccaacaaaagctagaatttctttctctctctttgcctaatccgtatttgataaaccaatcaaactgtgtaggcaaattcagtcaagtttagtgaatggtcctggagctgttcttctcatgaaaagatctggtgcttctaaa

SEQ ID NO: 299874 - DNA, 320 bp, Zea mays
ggggctagctgggtgcaccatggtaacatcgatgttgtccttagccatagggaaatctgtgaagaaagacttggcaatgactggtgaagtaactctaacaggacgaattcttccaatcggtggggtgcaccgatattttcagtcaaagaaaatgttgatttcatgattgtgcctgctcgccttcaggttctagacttcttaaatgagtgaaggagaaaaccatcgctgcaaggagaagcggggtaaaaaacaatcattatcccatcagcaaaccgaagggattttgatgagcttgcttctaattgaaaaaaaagtcttga

SEQ ID NO: 299875 - DNA, 255 bp, Zea mays
gcggaggagtttctgtgccaagccacaatgggtatttcccgtcagcttttttcacaagcgcggggccaccttttgaaagcataacgcctggaggaagaagcgaatgtatgagcttggtcgctagtcaaccaacaccaagttgtcaagcattaatacagtgatgagggtctctgtttctgaatgtaatgtgaaatggagggctctttctcttgatactggttactacttatggagaagtgaatcttttactctcaa

SEQ ID NO: 299876 - DNA, 399 bp, Zea mays
gaattcccgggtcgaccgacgcgtccgcgtgcaggttgcaatcaaaaggctcggccaatgttcaggacagggcgtggaggagttcaggagcgaagccgtcctgatcgcgaagctgcagcacaggaacctggtcaggcttcttggatgctgcatcgacggagacgagaagctgctagtctacgaatacttaccgaacagaagcctggactccattatttttgatgctgcaagtaaacacctccttgattggccaacacgtttcaagataatcagaggagtatgtcgagggctcctttatctccaccaggactcaaggctgactataatccacagagacctgaagacgagcaacatactgctggacgcagatatgagccccaagatatcggatttcggcat

SEQ ID NO: 299877 - DNA, 266 bp, Zea mays
gcaaccggtccagcactttcacgctcagctccagcaatggctgcctccaccatggcgacggtgctccacggcgatggccggcacccccatcaaggtgggctccttcggcgagggccgcattaccatgcgcaagaccgtgggcaagcccaaggtggcggcgttcggcagcccctggtacggccccgaccgcgtcaagtacctcggccccttctccggcgagcccccgagctaccttaccggcgagttccccggcgactacggctggg

SEQ ID NO: 299878 - DNA, 281 bp, Zea mays
  unsure (1)..(281): unsure at all n locations
ggggcactatacgttttcgcncgcggcgtggtcgtctcgtgccccgcccggtttttccaggccgaggccctccaccatgtccaacctctcgccctggatgctcacggttgccgccagcagcatcgaccgcgccttccacgcgccggtcaggctgggcaacggtgtgacggtcatgggtcaaaccgtgacaccgtaccagctccccggtgacaagccctatcctttggtttatgcggcagacgcagttgttcctgggactcccgctaatgttttcaaccaat

SEQ ID NO: 299879 - DNA, 470 bp, Zea mays
  unsure (1)..(470): unsure at all n locations
ccggccggattcccggtcgcccacgcgttcgcgtggacaccgggttcttggttaactgggttcaagggttccccttgcgtcgggtcgggccgccgccagtccggcccggtgttcaaccccaaggcgtccagctcctacgcctccgtgtcctgctccgcgcagcagtgcagcgacctcaccaccgncacgctcaaccccgccttctgctccacctncaacgtctgcatctaccaggccagctacggcgacagctccttctcggtcgggtatctgagcaaggacaccgtgtcgttcggctccaccagcgtgcccaacttctactacggctgcggacaagacaacgagggcctcttcgggcagtcggcggggctcatcggcctggcgcgtaacaagctgtcgctgctgtaccagctggcgccgagcatgggctactccttctnctactgccttccggacgtcgtcgtcgtcgt

SEQ ID NO: 299880 - DNA, 322 bp, Zea mays
gtgacaaaagcccacagatacttctccctactcctccagtccttcgtcatccgtttgccgcgctgcctccgccaccgtgcaaaaagctacctcctgcctgaaccgccccgacatggcgatgctatcccgcgcagcctcctccgcgggccggcgcccgctggtgccgccgtctatgcttttggcggtgagggcgaaggtcattgttctttttggccacatcgagcctgagcccaatgaccccatccttagcagtgaccaggcttttctcgccgaccccttcatcgacaaaaagaacgacgtgcgcggcgcctaccgggacgac

SEQ ID NO: 299881 - DNA, 265 bp, Zea mays
  unsure (1)..(265): unsure at all n locations
gacgtctttactttgatatttattattctctgaaaccaacgcttcttgttggtacccccgcngattactacatcggccagctccttcctcttatccagtataaccattagtgctggccttgtcttctaccccattaacactgctcgccttcgcatgatgattacatctggtgaagccctcaaatacaacaactacttttacgctttcaaacacattctttcaaatgaaggtaccaaatccctcttcaaaggtgctggctcaaaca

SEQ ID NO: 299882 - DNA, 326 bp, Zea mays
cccgggccgacccactcgtccgaagaaatgcacgccaaccctgttcctatcattggcaactacagcgatagcgagctactttgcgctctgctcgcgcgacatgttgggagtcactcattgtaccatccctcatgcctgcggagaaaaccaaataccccaactcggacatatactgggacaaattctacagccagaaccacttttcttgccagtgcacagctgaccttattgccatgaaccacaccgatttcatcatcagctgcacattccaagaaatcgcggaaagcatagacaccgcgaggcagtacgatgcccacatctaatac

SEQ ID NO: 299883 - DNA, 273 bp, Zea mays
catccctcctccctcaatgcccccaagcattggatgctggacaagctcggcggagcttttgctcccaagccatcttctggaccgcacaagtctagggagtgcctgccactgatcctcatcatcaggaacaggctcaaggatgctcttacataccgtgaggacagtgtcactctgatgcaacgccgatttctagatcttggcgatgcaggacagacatgacctaccctgctgggttcatggaagtcatttccatccccaagaccaatgataact

SEQ ID NO: 299884 - DNA, 385 bp, Zea mays
acgcgtcctgaataaagcactacatcaagagatggatagtttgctggctgaagctgaaagccagagtgatgatggcctaacacataaactccgatatgcacatctacacaaactaaaatcccttgaagcccagattctatacctaaataaaaagcactaaaaccaaactcaaattttgaaggaaaagcagaagagtgatgaaactgctaagaaactgcacgaagaaattcattttataaaagcgcataatgttcaactacaacacataatttaacaggaagcacatcagttcacgcaatggaaagctacccgcgagaaggaacttcttcagctacgcaaggagggacagtataatcaatatcaactccacattcttcatgcactt

SEQ ID NO: 299885 - DNA, 324 bp, Zea mays
cgaccgacgcgtccagggagattcaaccactctcaggatggttatttgatcaatgtacactgctgtgaggcttgtagaaatcttctatagttcaactgggcatccaattgtttcaattgagaggacggtcttctacagagagagggctgctgggatgtactctgcaatgccatatgccattgctcatgtaaagaaatatcatagtatacagaatacagtggtgactaaagtgctatcttctctccgcagtctctcagtttttatgctttgcaggttgtcatagagataccatatgtgtttgtccatacaacttattacaccctt

SEQ ID NO: 299886 - DNA, 303 bp, Zea mays
cgcgtccggaccagatgtactgcgaggaggtcgcgtacaactagtactacgaggcccagctccacgagcggcttaccgggtacgggagcgtgtctgagatttggttcgacggcgccaagggcaataacgcgaccaatatgacgtaccacttccaggagtggttccagacggtgaagcagctgcagcgctccatcaacatcttcttcgacaacaggcccgacgtccgctgggtcggcgacgagaagggctacgccggaaccacctgctggtccaccgtcaaccgatccatgatcaccattttga

SEQ ID NO: 299887 - DNA, 234 bp, Zea mays
ccgtccgggtgtgctctccttactttacacgcaaacatctacttttaggacattcaggcacaccagagattctgtgtaattcatgtgaatgaaccgccaatgtacactgaaaccgatatattgcgagtcatccaatgcctggaagcagccatcgaacgaaaggtatctgagggtgtgaagcttgagctgcgcaccaacgacaaggtcgggctgctatccgaggtcacccgcatc

SEQ ID NO: 299888 - DNA, 313 bp, Zea mays
  unsure (1)..(313): unsure at all n locations
ctgttnaaaagtgcctgaaggatgccaatatggacaagagcaccgtccatgacggaagacttgttggtagctccactaggatccccaaggtgcatcaactgctccaggacttcttcaacggcaaggagctgtgcaagaacatcaaccccgatgaggctgtctcctatagtgctactgtccaagctgccatctctgagcggtgagaggcaatgataaagtgcaggacctgtctttgctgagacgtcacccctctatccctgggtctgtatactgctttatgatttattacagtgcttattccgaagaacaccac

SEQ ID NO: 299889 - DNA, 393 bp, Zea mays
caaccgcccggcccgacattccctccaaccgccgctgcggctgcgccgcccaccgccggcaggcgacagcatcgacaggcgcagcagtcaacaggaaccgagccatggcgagcgcggatctgctgcggagggaggaggagttctactcctccctgtttgattccgccaaaggcgatggcgccaggtcgcgctcacagctgatcgagaggaagatcgaggccctggaggacatggccaccagggtcagtaaccggagatcgcggaagtggtttaacgaccgtttgctgattgaactcgtcccgcgtctttacgttgaagagatcaaaggcctattcgctcctccgccgtggggtgagcaagtgcccttgtcagcattctacaaggcaaatggtg

SEQ ID NO: 299890 - DNA, 433 bp, Zea mays
agaagtttcaactgctcaagctatacttgcaccaatatatactcaaagaagagagggagaggatcttggggtgcattattcaagaagcagcagcggaagattcaagtgaatggcataagcgacgatttgctcaaggaagctgcaaggaggatcgatggcttctctggcagggagattgcaaagcttgtggctagcgtgcaagctgctgtttatggccggcctggctgcacattggatccccagttattttcggaggtagttgactacaaagttactgagcatcaccaacgcatcatgcttgcttctgagggtatggcttgatcaataagaaatattttacctggaagccacaagtttcaagctatcaaaaaatcgggtttgtgatgaacgacaaaactgacaattaccttccactgacttgtaatcatgtttt

SEQ ID NO: 299891 - DNA, 255 bp, Zea mays
gtccacccacgcgtccgcatcgatctgcaagtctcgctacttagcagtgcatttaataaagcagccgcaatggcgagcggcggcatggccctctcctccacggccttcgccggcaaggccgtgaacgtgccgtcgtcgtccgccttcggcgaggcccgcgtgacgatgcgcaaacggcggcaaggccaagccacggcggtcggacccgggacgcccacctgcgacggcatgcgagcgcacacagcatcgcacacg

SEQ ID NO: 299892 - DNA, 443 bp, Zea mays
cgcagagataggcgtcttcgtactcgcctacctcctcgtctcaaacctttcccccttctccgaaggccttccgccgggcggcgctgcacccgtacgacgacaccatgagggagtgcatttcgatccacatcggccaggccggtatccaggtcggaaacgcgtgctgggagctgtactgccttgagcatggcattcaggctgacggtcagatgcccggtgacaagaccattgggggaggtgatgatgctttcaacaccttcttcagtgagactggtgctgggaagcacgtgccccgtgctgtttttgttgaccttgaacccactgtcatcgatgaggtgagaactggcacctaccgccagctcttccaccctgagcagctcatcagtgggaaggaggatgcagccaacaactttgcccgtggtcactacaccattggcaggaga

SEQ ID NO: 299893 - DNA, 405 bp, Zea mays
  unsure (1)..(405): unsure at all n locations
gcgaggtggtgtccaacgcggtttccgatctctgttctctgcttgccgtcacgctcgttcggggcggtatccaacctgtgctggcaggtgtcgccgttgggtgcgggtggcatcagttcgtggcctacgtgaacattggctgctactacatagtcggcgtccccctcggcgccgtgctcgggttcgtcttcaagctcggtgtgaagggcatttgggctgggatgatcggagggacctgcatgcagacggctattctagtgtggtcaccttgaaactactgaacaggaggtaagaacacagatatgtgccagtggagctacagacangaccctttgcgggtacatacaaaatactactgcccgtatcacatcacatatatcattcgctacatctatctatctatgt

SEQ ID NO: 299894 - DNA, 316 bp, Zea mays
cgacaatcaattatatcacccttccgtgacttcctttcaagaagttcaactctatggggcgcgttgaaatgatggacggcggcacaaaatatggccgaatcgtgatcgacctctatgcgatcgacctgaacaggacacttgttaacgcccctgctctgtccacttgccagattaacttcgaacggctctcacttactgacatctagattgacatcacactcgatcgcgtgatgtcaaccctgatcaacgctatggatgaagctgatctgaataccaattgcgaaaacagatcattctacaagaagctgattgtcca

SEQ ID NO: 299895 - DNA, 319 bp, Zea mays
  unsure (1)..(319): unsure at all n locations
cgtacgngagaggctgatagccnaaatgtctattactcattgctttctgccccccaatatcaacccgctgctgtttatcaaaaggacggcggacaaaacattcaatgtatcgaccaaggcctcaaagtcccccaacaacgccgccatgtcccccaagaacgcataaactgactgtatgaagagatctgatgtttaccaggaccttgataccattatgcgctgatgcgtatgctgtacatggatcaaatgtgctcgggcgtatatctgccctgcttcaagatgcccttctctatttaaaatggaataagaaatgccttgt

SEQ ID NO: 299896 - DNA, 300 bp, Zea mays
cgcagaggtcccgcggcttcctattcttcaccttttccaccgaggaggcgatgcccagggggatctatggcatgagcgggagggaactgcaccgacggaacatcaccgtgaaccaggcccagtcccgaagggggcgaagaggccgaagaaggggtaaactgactggctcgaggagagctgatgctacggcggaccttgacaccatgatgccgggatccgttacctgggtatcggtcgatactgctgctgcggctattaccgctgctgcagcttgccctacggtatttagaaccgaagaag

SEQ ID NO: 299897 - DNA, 373 bp, Zea mays
  unsure (1)..(373): unsure at all n locations
cccaccagggctgctttattaaaaaggcaggcccccacactcactgcncccaatcatttgatgctccactatcttttcgcatctcttgctcccaatccatcttttagacctcacaattctaatcagtgcctcccacttatcctcattatcattaacactcttaactatactcttacataccattaacccatttccatcctaatacaaccccatctacttcctcatatctattttaatacacacaaaacctaccctacttccttcatcaatatcatctccatgcccaataccaactacaactaccaacttctttattacactaaaatccgatttccccttcacccaatcatttatgaagatgctaatttcaaac

SEQ ID NO: 299898 - DNA, 419 bp, Zea mays
gcgtccgctatagcgaccggtccagcactttcacgctcagctctagttatggctgcctccaccatggcgagcggctccacggcgatggccggcacccccatcaaggtgggctccttcggcgagggccgcatcaccatgcgcaagaccgtgggcaagcccaaggtggcggcgtccggcagcccctggtacggccccgaccgcgtcaagtacctcggccccttctccggcgagcccccgagctacctcaccggcgagttccccggcgactacggctgggacaccgccgggctgtccgccgaccccgagaccttcgccaagaaccgcgagctggaggtgatccactcccgctgggccatgctcggcgcgctcggctgcgtcttccccgagctgctctcccgcaacggcgtcaagttcggcga

SEQ ID NO: 299899 - DNA, 316 bp, Zea mays
  unsure (1)..(316): unsure at all n locations
ccaaccagaatttcttgcacntactgacaatgtgtgagagagagaggattagggggggcatcggcagggctgctctcctactgaccctgctggccgagagcctggccgtggagatccaggccgaccccgggtacggatacaccccgactcacacgccggccaccccgaccccgaagccggagaagccacacaccaaggggcccaagcccgagaagccgccaaaggagcacaagctccccaaggagcactggcccaaacctgagaagccgcccaaggagcacaaaccgacgccgtccacgtacaccccgagccccaa

SEQ ID NO: 299900 - DNA, 428 bp, Zea mays
  unsure (1)..(428): unsure at all n locations
gcaaacatttttttgacctttatgtataatcattttttgnccattaangacataagcatattagctaagtttataaagcaagaacaccttgcccttcaaatgaaatggagggatgaaatatctaacattggtgtgacatgatttgaaaggcttggttgatgctgctgacaattatcataaggttcttgctgaaaatcaaaagctatttaatgaggtacaggaactaaaaggcaatatcagaatctattgccgtgtcagaccatttctttctggtcaaaacagaaaaacaaccattatttattatattggtgaaaatggtgatatttttataacaaattccttctaactatggaaagatgcttgcagaatgttcaattttaacaaaatttttaatacacctccctttcaagttgaagcattcttttata

SEQ ID NO: 299901 - DNA, 440 bp, Zea mays
gtgagctcgacaatgctacataaaaatgtgacttaagtcttaacagaacatatggcaagttgttgacaggcaccataggttcgttttctggagtggacagatgatttggagggttttgttctaaaaggctatggtgagtcaattaactacaggatgggactgccattgctcaaggatgttgtccagtcaatggaagaagcaatcatagctagagaagaaaaccgtgctgatggtacgtttgaaaaggcaaggctccgatttgcacatgcagaaactgttgttccttttagctgccttcttggtctttttcttgaaggtccagaaattgagaagatacagagagaggaagcattggacctaccccctttgccgtcacagggaagaaactggaagggcagtgttgttgcgccttttgctggtaacaatatgctggttttata

SEQ ID NO: 299902 - DNA, 449 bp, Zea mays
  unsure (1)..(449): unsure at all n locations
ggccgggcggggcgtncggncggttcacttctncttttttggnncgggtttttnctcntggcgccggggcnncctttggggggcctttttgttggcttcggcctcgctcatgtcttccccntgcgcgtgctgcctccccgcccgtgcctctcgccggggttttcnncgctgagggtgtctgtggtctggggcctgctcagagaggttgctgggtttgctccttatgagaagcgtatcactgagcttctgaaggttggcaaggacaagcgtgccctgaagcttgctaagagaaagcttggaactcacaagagggcaaagaataatagagaggagatggctgtcgtcctcaggaagatgaggtctgttgtctcgcacactggccagaagaaatagagagcattttaagtcattgagcctggcagatattatgttccagtgtctgattttca

SEQ ID NO: 299903 - DNA, 386 bp, Zea mays
gtcaggatgtgcttattgagaattgctacatatcggttggcgatgatgcaatagctataaagagtggttgggatcagtatggtattgcatacggtcgtccatcttctgacattttaattcgcaatgtaaccgcccgttctcttgtgaggtgagaattgagatatgttggctacattgtgtgtctacaataatctacttttgtgcatagtcctttgaagtcaaacctcaagagtagtaaattacgactatggtgtgtattgctgaacattatcaatcaggcttacactatctaccctatctttgtgcagtgctggaatttcaataggcagtgagatgtctggcggagttgcaaatgttactgtggagaatgtgcgcatctgggaatc

SEQ ID NO: 299904 - DNA, 463 bp, Zea mays
gcgggaataaaattctctgcatcggtgatgtacttcgtcacccttgcagcaccacttcggtgaagtacacgtgggtgtcttcacacggcaaagccgctcgtccagacgtcctggctctttgcctcaaggaacgactggctcgattagccgtgtcatcaatggttcgattagctagcatcattagctattgatttcggacgtgtgtcattcatcgatatagtgctgcacggatgatggcatgcattagtgctgcagagaattttattccgatgtacagtacagaggagagagaattgggggaactgcgaggagcgatgaacagtgtatagagtgaaaaataaaagtgcttcgtactaataatcactagaaaattatgcacatcttccacgcactaccggcacgactattgagtattttgtaaaataagatgtcacaagatatttattttctgtatgattacatc

SEQ ID NO: 299905 - DNA, 455 bp, Zea mays
gggccgaccgacgcgtgcgataacggaatgtaagaaggcctctgcgatttcacggatgagccgccgatcgactgccctcgagaactacggatgggagtggaccgacagccgcttcaacctgctatccacgcaccgggagtgactggtcggagacgagaggatcagatggtgcccagcatgacttcctcgttcattagagctgagaccgaactcactgcacattttggccacaccagtgaggacagtaggccacaagtgcctgcgtgaagaattggttgacctttaatgagccccagacatttacttcattttcctatggaaccggggtctttgccccacgacgatgctcaccgggactagactgtgccatcccaactgggaattcactcgtcgaaccttacattgctggccacaacattcttctagctcacgctgaggcttgtgatctttacaac

SEQ ID NO: 299906 - DNA, 377 bp, Zea mays
  unsure (1)..(377): unsure at all n locations
ggccgaccgcacgcgtgcgggcgctgntcaccggcgggggatcttgcatttgctttgagatcgccacccagctggcgcgggactgctcgcatgtggccatcatggtccacctccgggaggtcctcaacaaggccgtcgccgcgctccggtcccagggcctccgggaggacgcggccagagtgcttgctgcaacagttgcacattttggcaagctcgacattcttgtcaacggtgcagctggcaacttccttgcttccccggaggatttgacgcccaatggattcataactgttcttgagatcgacactttgggtacttacacaatgtgctatgaagccctcaagtatctgaaaaagggtgggccaagaaaaagccca

SEQ ID NO: 299907 - DNA, 412 bp, Zea mays
  unsure (1)..(412): unsure at all n locations
ttttatggtgcttnttttncagattttattataccgctaaatactggggaatacgatatattcaaaatagatctgagcatnccaatantggaatagttcatgtcacggaatggttatagtggtacagaaaaatttcaagactatgaaggaatcgttgacatcgaaaagtcgacatctgtttccaacgcgtcaaatcttgcagttgcaaagctgatcgatggatatcttgcctatatcgccaaagatcccaacctttctcttccaaaattgatcgcactctccgaaatgttgtcttctctaccccggccaacgcatgactggctctatcgtgccattgacatgtatttgaaggagcaccccaacctaccaaagagcgagaagaataaactgtgcgggctgattgactgcaatc

SEQ ID NO: 299908 - DNA, 395 bp, Zea mays
  unsure (1)..(395): unsure at all n locations
ggcgacccacgcgngcgcgcggacngtgtcatccagtcgtgcttcacccttggttccgtctccttcgagatcagcgctggatactggcgcgaccactggcggagagtggccgnggaggatgcgtcgcagcctcatggcatcagactcctcatcgaggactacccttacgcaaacgacgggctcctgctgtggtcggccattcgcagctgggtggagtcgtatgtgcagctctactacccggacgccggcaccgttcagtccgacgacgagctccaagggtggtaccacgaaacggtccacgtcgggcacgccgacatccggcacgcgccctggtggccctcgctcttcacgccgggggacctcgcgtccatcctgaccacgctcgtctggctcgc

SEQ ID NO: 299909 - DNA, 363 bp, Zea mays
  unsure (1)..(363): unsure at all n locations
gaccgacgcgtacgcctcgcgcctctgccgcatttcttttacaggttagaagganagaaagagggcgagagggttgtgcactttaacatggtccccaacggncacttcaagaagcactggcagaactatgtcaagacatggnncaaccagcccgcccgcaagcagatgcgccgcatttttctgtcattttttttttttatatanncttttacctactttttttttttttgtcccattgngcaattttttactctcaaattttttttttaggcaagggctgggagaggctttaccctttttttatttaaagctgcgggcattccaaaaaggcttgctccaaccattgtcatttctgtggatcac

SEQ ID NO: 299910 - DNA, 317 bp, Zea mays
  unsure (1)..(317): unsure at all n locations
gcgaacggaaggtactgtccacttgaccacgttgcaatggatcaaaatgaggagctatttgcggntggcaacagtgcacggggagagggagtagcccccgcgnnngaattgttttacttacacccgcagaacccnaanncannggnacttngggaagcacaangaggcgattttgccaatggtgcacaagtgaagaacgaccaattttcgagcagcggcgaggcaaaatggttgcggcaaaccgggcttgnngnnctgttgcctcaaggaaaagaaggccaaggncctgagcatcctagtgcccgctnggagcgcta

SEQ ID NO: 299911 - DNA, 274 bp, Zea mays
  unsure (1)..(274): unsure at all n locations
ccgggccgacccacgcgtacggttggttggaatctcttctggtgcatctgcttctgcggcagttaggcttgctaagaggccggaaaaccccgaaaggctatttggtttcnttttcccaacctccggcaacccctacctttaatcggggctgttccagtccatcaaaaaggaaccggaaagcttgttgttcaacccttaaaccacaaaattctggctctttgccaaactatttcctgaaacgttcaccatttccataacaaaaaaataaacctcg

SEQ ID NO: 299912 - DNA, 446 bp, Zea mays
cacccacccacccactcgcttcagccgccttcgccgcgcgtacaagcaggtggagacaggaggccgggtggccacggcctgcgctcgcggacgcgcgacctcttcgcgcgccccttccgcaagaagggctacatcccgctcaccacctacctccgcacctacaagatcggcgattacgtcgatgtcaaggtgaacggcgccgtccacaaggggatgccgcacaagttctaccacggccgcaccggtcgcgtctggaacgtcaccaagcgcgccatcggcgtcgaggtcaacaagcaggtagacaacgcggatccctttttcgcagaagcaattacgattagtgcgctggcgcatcttctgatcgtttcattctaagaaatgtaacgctttaatatagaatggcggctatttgctgacgtgttgtttgatttggatttatagaattt

SEQ ID NO: 299913 - DNA, 221 bp, Zea mays
  unsure (1)..(221): unsure at all n locations
cggaannnccgggtcgaccgacgcgtccgcttccttcctctcctctctgcaacgcgtcgggaagcagctgccagccatggcaatggcggcggggtcgagcgggctgaggagctgcagcgcattgggcgtgcccagcctgctggcgccgttgacgtcatcttcgtcccggtccggccgcctgccgttctgcgcccacgccaccaccttcgggcgtgttacca

SEQ ID NO: 299914 - DNA, 299 bp, Zea mays
gcgtccgatcaggttgtatgctcattgtgtggcactgaacaggaggtgtgtgaccgaacctttacggaggatcttttaccagacattataggtgtttcacctgtatcatcatggtttcttgtccgttggcaggtgcgacaagtatgtatcaattgcggtgtttgcatggggaaatacttttgtggtttgtgcaaactcttcgacgatgatgtctttaaacagcattatcactgtaactgatgtggaatatgttgaatcggtgggagggtgaaatttcttcactgtcaaaatgtggatgt

SEQ ID NO: 299915 - DNA, 209 bp, Zea mays
cttatcttaatgttaatgctaaagcaattggggtttctcttttagcttaccactaagagggtttatcaaacaagtgtgcatcctatgcttatagcaatattgtccctgccactgctatccctgattactggattggtcttgatgttggccctgataccaccaaaacattcgacgaatcattggacactcaccaatactgttatttggaa

SEQ ID NO: 299916 - DNA, 449 bp, Zea mays
tccggcctgatgaaggcgatggagggtagtgagtttggtgcaaactgtgcacccaccgtggtgacctatacgtgtttggtgaaatgcctctgcgggaaggggagggcggtcgaggctctcgctgtgctggataggatgacagagagacgggtgatgccaaaccgtgtttttatgcggacgctggttgaagggttttgcactgagcagagggttgtcgacgcgtatgatgtggtggagcgtgtaattggtgatgggagtgtttcgagtacacagtgctacaatgttctactcgtttccttgtggaaggttggcatgggagaagaagctgaaggactggcacggatgatgatgacgaaaggggtgcagctgaccccactcgctggcagttgtatggtgagggaactgtgcataaggaagagatcgttggatgcttgctactggctgggagt

SEQ ID NO: 299917 - DNA, 339 bp, Zea mays
cgagcaattcgctgatgaggataacaattccagaagaggagctccacctgcagcggcatgttccatcgaaaatctttcgtctgtggtcatctccaaaggctatgagataaacggtggtgtaacctgtccagtctgcaaagatgacatgcctatcaccactgtagcaaaacagctaccatgcatgcatctctatcattcatcttgcatcttgccatggcttaattctaggaacacatgcccagtttgtcgttacgagcttcctacagatgactcggaatatgagaggtccaagcatgccgcggtcaatgaaggaggtatccatggggtggagcgtaccca

SEQ ID NO: 299918 - DNA, 237 bp, Zea mays
gccgccgccgccggcggtaccaccaccactactaccgtcaagtgcctcgccgacgccggcgtcttcctcgacgccatcgacgtctccggcgggcgcagccttcggtcctactactccacatcgtggcatgcagggggtgggtccaaacctgccgccggcgtgcattgcccgttggacaccgcctggtgcttcttccttaagaacgtgatcgatggcgtaaccaccccaattttcttg

SEQ ID NO: 299919 - DNA, 425 bp, Zea mays
ccggccagtcttgttgaaccatccatttcatttgtttatgaggattgccatcttttgccttaccgaattttgtgcgtttctaacatttgtattgtccgttgcaaatcaaataatatggcagctgtcgacacattcctcttcacctcggagtctgtgaacgagggacaccctgacaagctctgtgaccaggtctcaaatgccgttcttgacgcttgccttgctgaggaccctgacagcaaggttgcttgtgagacctgcaccaagaccaacatggtcatggtctttggtgagatcaccaccaaagccaatgttgactacgagaagattgtcagggagacctgccgcaacattggttttgtgtcaaacgatgttgggcttgacgcccaccactgcaaggtgctcgtgaacattgagcaacattcccc

SEQ ID NO: 299920 - DNA, 502 bp, Zea mays
  unsure (1)..(502): unsure at all n locations
cgtccgaccaaagtgttgatttgattattccattacgagattgccaaancgatcgcagaaacttttgtccatcggtgctggacgcactaggacggtgctgggaaagcaggaactgcaatcttgatgtttaccagcagccagaaaaggacagttatgtcacttgagcgtgatgttggttgcaagtttgagtttataagccctccgtccatagaagaagtgctggagtcatctgctgagcatgtcattgctacattgcgaggggtgcacccagagtcaactcaatactttcttggagcagctgagaaattaacagaagaactaggacctcatgcccttgcttctgcactggcacatctgagtggattttctcagccaccttcttcacgttctctgatcagttatgagcaggtaagaagtgacacaacaaaattacatatgcattgttctatattatacctagcatagaggtctactttccacagttaagtaagcatactttaca

SEQ ID NO: 299921 - DNA, 407 bp, Zea mays
  unsure (1)..(407): unsure at all n locations
cgcgctcctctacccactataaaagctttctacnactctcttctctctctctccaggggcacctttaaactgatcgaagacccataactccaccgccgacgacttgaccgcggtggtggacgaggaggcgtgcatgtacaccatgcagctggcgtcgtcgtccatccttcccatgacgctgaagaacaccatcaagctgggcctgctggaagtgctgcacaaggaggccggcggcggcaaggcggctctatcacccgaggaggtggtggcgcggatgcccgcagcgcccgactaccccaccgccgctgcggccatggtggaccgcatgctccgcctgctcgcctcctactacgtcgtccgatgccagatggatgacctatacggccggtacgagcgcctctactcct

SEQ ID NO: 299922 - DNA, 216 bp, Zea mays
ccacgcgtacggaagacaatgatagacttcggagccgtattatcactccggcccggcgcagagtgtacagtgcgacatgatgcactgcatgggggtgcgggacctgatgcctaacacatatttgtgctagagctgggacctcatgaaaactaactgctgacttgcctcccaacggaacactttgaagtgcatcatccggagcctaacctatcctat

SEQ ID NO: 299923 - DNA, 437 bp, Zea mays
cgcgtacgacgcacgcatacacagttcagagcgaggttagtatccgaaaaaagcagggatctgaacgggagggtcgtcagggccatgggtctcacctccaccgcgctcatctgcaagcacggcgaccagtaccacacacgcgtagggcgatgggcggatcaccatgcgcaagactgttggctagcccaagccagcacgcgtccggcagacactggtacggagactaccgtgtactgtacctgggcccgatgttcgagcagcccccaagctacctgaccagcgagttccccggcaactacggatgggacaccggggggttgaccgccgacccggagacttatcccaagaaccgacagctggaggtgatccactgccgctgggccatgctgggcgcgctcgattgcgtgttcccggagctgctcacccgcaacggtgtc

SEQ ID NO: 299924 - DNA, 422 bp, Zea mays
  unsure (1)..(422): unsure at all n locations
cgggctcgacccacgcgtnncgcaagcagcgcagcgcgcgtcggcatggctcgcctgttctcggcgttaagccgccgcaggccgagcgacacgcgacaagggcgtacgatcaacaactcgggccatacgcacactgagcgacctcgctccacacgcaccatgcttgatacactgttcgcgagggtcctacttaagccacgccatttgctcgcgtcccgcttcatcgaaccgaggcggaaccgtgttctctggattaatcacactacgactctctatgagcactgtggacacgatcaaccatgtagtgcgcggtctccttctgcgatgagtgggagagagaggatggcaacatcaatcctttgttaatggcgatctccttaatcaagagagctaccgctcgcacttgcaggtctgtaatatat

SEQ ID NO: 299925 - DNA, 488 bp, Zea mays
tgatgattctggagcatcacaacatgaattttcaactactgagggtgccaaatcagcaaatattggttcatgtcattttgatacttactgtagttgtaaatttgtaatagagttggtagccattctgttctgatgaatctagttggaatgctggatttcaatattgatgagtttgcatgcaggctgttggtaaagttcttcctgatctgaatggcaagctcactggtatgtccttccgtgttcctactgtggatgtctcggttgttgacctcaccgtcagaatcgagaagggggcctcctatgaggatatcaagaaagctattaagtaagtgatcaacaatttattcttttaataaccactcaatttatttctaaaccaatgtctgaaggtaataaacactccttgttggattaatcgccactaccacatgttcagtgtctatgtttcactgcgtctatcttgatctatagtagttctctccatatat

SEQ ID NO: 299926 - DNA, 377 bp, Zea mays
cgcgtacgcgcggagatcctccgttgcagcagaggcgttgtccatggctcgccctgcacggatcgagggggacaagctgagcgtggagcagctcaccgggctcaaagagcagacggatctggaggtcaacctcctgcacgacagtctcaccatgatccgtaccgtcgccacccgacttgagaacgcctccggcgcgcttcatgacctatccctgcgcccccaatggaagaagatgctcgtgccgctcacggcgtccctctacgttaccacttcactgcacgacgcggacacggtccatatctatgtcggcaccgcttactacatctagaaaaccatggctcaagtaaaggatactgcgaacgaaaattcatttattg

SEQ ID NO: 299927 - DNA, 389 bp, Zea mays
agaaggtttagtgactttctgaatctatcttctgatcttaagagcgcatttcccagaaaagatgcgcggtcggctcctccgaagcatgctttcttaataataaatccaagcaggttgcttctagaagagagaaggcatgcattgtaggagcggatgcaaaagttactttctgacattgacttgtcaagaagtgctcctgttgctgctttttttgagcttgaagctgctgcacgttcatatttgcaagaacggaatgggcgttcttctgaagtatgttcttctacaaaaagcagtactgcctcttctacacatactgatggacctgcttctggttctcttgctgagtccaatcaaataaatcaaactcttactcgggcagcagtctgaca

SEQ ID NO: 299928 - DNA, 250 bp, Zea mays
caagtatctgatggaggcagatatcaatgcaaacaacctgagggagttctgcttaagtcttctggatggcacgctcccgccataccacaaatcataaccattgcctcaagagaagggacttattgaaaaggttgttggtcgtacatttgattcttctgtgctggaaagtcatcaaaacgtcttccttgaggttcatacaccttggtgtgttgactgttaatcgataagtataaatgttgagaagttggcg

SEQ ID NO: 299929 - DNA, 186 bp, Zea mays
ccgccaacccgcgcgacgtgcaccatcactggttcaaggacatgcgcttcatcacccaagtcaaggactaggagggcaaccctgctttcgccctgttcaacaagtgccactggactcgtcattaagcactcctttggccagtcccaccctttgaagctggtgccactaaacccgtagtaccatgac

SEQ ID NO: 299930 - DNA, 171 bp, Zea mays
cccacgcgttcgctcccgcattgaccacaagttcgacctcatgttctccaagcgcgccttcatacactggtacttcggggagggtttggtagaaggcctgttctcctaagctcactatgatctagtcagagcttgagaaagactactatgtggtctgcgctaattttgact

SEQ ID NO: 299931 - DNA, 163 bp, Zea mays
cttacctttcaagagatctctccaaacaaggacaccgttttccattactagtcacacattgcgttcacaatgccttgcctgtaccgcattttccaccgtatttatgtgttttacccctatttctacatcttgtcttctggcgcggacctttccatttattttt

SEQ ID NO: 299932 - DNA, 323 bp, Zea mays
cctttgtctggccgactaccccaaagccttctccgatctcaaggtgtaggagctcattaacggccgcctcgccatgtttttcatgttcggctttttcgtccaggccattgtcaccggcaaggtcccgctcttgtacctcgctgaccacattgttgaccctgtcaacaacaacgcatggtcctacgccaccatacttgttcccggcaactaaactcatcggttatgctatgcagcttcattgtctttcggatcggagagggtgtacttacgtggtttgattgatgctgctagatgcatgtgtgttttttgttttactttgcatt

SEQ ID NO: 299933 - DNA, 337 bp, Zea mays
  unsure (1)..(337): unsure at all n locations
cggtnctgaattccagggtcgacccacgcgtacgcgccgcagtatcatccatggacgtgagcggagcaagcggtttagcgtataatggcgcggcggggcgcttggcctgctggccgaccaataaatctgtgtcgcggtcctccaaggccgggctgtatttccccgtcagccgcgtctggcggtacctcaaaaagggccggttcgcgcagcgtgtttgcacgggtgcccccgtctacctcgccgccgtcctggagtacctcgcggccgaagtgctcgatctcgtctgctacgcggctaggtgacaacatgaagacgcgcatcattccgcgccacgtgc

SEQ ID NO: 299934 - DNA, 408 bp, Zea mays
cattcccacactgacaggaaatggcgaacactgaagtttcgtttctttgttactagagatatactattcatctttgctctagtccagactgtcatctctgcattggcatacttggtacattttcttgatgggtaccagcaatattggttgaggacagcctggggttttgataaccaagttagtttttattacatatgtggtgcattattattttttgctctattgggactatcaggttgcttcataacctgttatgaccgaagagtacgaaatgatttggctcagccttgtcgagaattatgtctttgttgctgtcaaccagagtatgcattagttagctcattcttcaactcatcaaagatgtgtgcagattgccatctaccctgcacgttatgcatgtggactgac

SEQ ID NO: 299935 - DNA, 434 bp, Zea mays
aaaaaaaaaaaaaaaaaaaattttaaaaaaaaaattttaaaaaaaaaaaaaaaaaaaaaaaaaaaagggggaatttttggggcggccgttttataggttccaaccttccttccccttgcttccaacgtaatagtttttttttagggtcccctaatttaaatttacgggccgcgtttttacaactccttgacgggaaaaaccctggctttcccaaatttatttgccttgcagcccatcccctttttcccagttggtttattaccaaaaaggcccccccctatctcccttccaacaatttgcccactctattttggatttggaacccccctttttcgggccatttaaggggggtggtttgggtgttccccccaatttaccctttcttttgcaagccccttagcccccgttcttttgattttttccctttctttttt

SEQ ID NO: 299936 - DNA, 298 bp, Zea mays
catatggaaagcatgttggcttttaaacagttgttatagtttggagataatagagcgttttctatcttgtcttttcagccgcttttattgcattctgttgggaggaatccttcttatgtatgaactgctcaatttcttacgcccacttcttctcctagatttactccttttgggtacctcaaattgtcacaaatgtcattagggattcaagaaaacctttgcacccacaatatattttatgcatgacagtttcacggcttgctaattcattgtatatattttgtttccctattatttt

SEQ ID NO: 299937 - DNA, 386 bp, Zea mays
  unsure (1)..(386): unsure at all n locations
gttcacagatgaagagattgaacaaagctatgaataattttatgaagatgtacatacagaatttctgaaatttggtgaacttgtgaatttcaaggtatgtagaaatgggtctttccatcttcgagggaatgtttatgtgcactataaatcgttggattcagctcttcttgcctacagcagcatgaatggacgctattttgctggaaaacagatggaaggcggccatatgcggtgagtacatgaggtcaagatacaagacatgttcacatggagttgcttgtaattttattcactgcttccgcaatcctggaggagattatgagtgggctgattgggacaatcatcctnctagatactggattaagaagatggttgctctttttggt

SEQ ID NO: 299938 - DNA, 387 bp, Zea mays
  unsure (1)..(387): unsure at all n locations
cccacgcgtccggccgctggcggcgctgctggtcgtgctgtggttccccgtgggcttcgcgctcgcctgcctgcgcatcgcggcgggggcgctgctgcccatgccgctggtgtactacgccttctgggcgctgggcgtgcgcgtgcacgtccggggcgccccgccgccgccgcgcgccgagcgcgccacgggccggaggggcgtcctcttcgcctgctcgcaccggacgctgctggaccccatcttcctgtccaccgcgctggggcgccccgtggcggcggtcacctactcgctctcgcgcctctccgagttcctctcgcccatccggacggtgcgcctcacgcgggaccgcgcctncgacgccgncatgatccgggacctgctggc

SEQ ID NO: 299939 - DNA, 323 bp, Zea mays
  unsure (1)..(323): unsure at all n locations
ccaggcgtncggaggaaggctcctgccaccacattttcttcagcgatttattttcgccgggatcgtcgcacgaggcggacgactatgcagggggggccaccatctcctgctactacgactttccaagaaacaacgagcacgcgctgctcatagcgctggcacatcagcccgtcagcatcaccatcgaggcctgcgccaagaactttcagctctacagcgaccgtgtattctatgggccctgactcacgcagctggaccactgggtaccagccgtaccctacgggacggcagccaaagcccattactacatcattgtcaacaac

SEQ ID NO: 299940 - DNA, 331 bp, Zea mays
gcaagatctatgcttacctgagcattttttcgagagggatcttgaagctacttgagggcggcctaatggcttcgtctactgctactaaatcagacgccttctacctcatgatgaagggcgactatcacaggtgtggctcatgcatttaatactggcagctgacaggaaggaatctgctgagagcacagtggtagcctatactgctgctcatgacattgctctctctgatccgtcacctacccatccgattaggctcggacttgctctgaatttttcagtgttctattatgagatcatgtactccccagacaaagcttgcaacctggcaaag

SEQ ID NO: 299941 - DNA, 348 bp, Zea mays
acttgatcttctattcaacaagctaattaaggccggtcatccctcttctagcggcgggcattatccaaggcggaggagaagcaccaccaccaccacctgttccaccacaagaaggacgaggagcagctcgccgccggcgggtacggcgagtccgccgagtacacggaggccacggtgacggacgtggtgtccacgggcgagaacgagtacgacgagtacaagaaggaggagaaggagcacaagcacaagcagcacctcagcgaggccggcgccatcgccgccggcgccttcgcactctacgagaagcacgaagcaaataaggacccggagcacgctcaccgtcacaag

SEQ ID NO: 299942 - DNA, 309 bp, Zea mays
  unsure (1)..(309): unsure at all n locations
gcgaacnacccattatctctctattcctccgcccttatttcagcaccctcccacgtcctcgcgtgcctgttctcccaacggcgggtgcgccccctaactcccccncncccactctggctaccgcgctggtctcctgcgctgctctgccgccgccggccacgcagacttcttcactcacctcgttcgcctcataaaagataatgccaatagcgacgtggagaatctcttctccggcttctccaagacccgcgagaacctctctgtcgtcgacgagctccttacttactgtaacctttccgacaccgaccg

SEQ ID NO: 299943 - DNA, 373 bp, Zea mays
  unsure (1)..(373): unsure at all n locations
aaacccgcggcgcccacgcgtccgagttgggcanggttgtggggttgcattattgctcacattggcacgctcagaggttgaggaggttcacgagacagctgcaggggcactatggaatcttgcattttattctggtaatgctctccgcatagtcgaagaaggcggcgttcctgttcttgtaaaaatttgctcatcatcacggtccaagatggcacgtttcatgtctgcactagcactagcatatatgtttgacggaaggtaccatttttgctattttttcttggttgcttaacatgtcttccatttgatattagaatatgttttttagttcttagttgagcaaggcctacaccagccagcactttagttttgt

SEQ ID NO: 299944 - DNA, 328 bp, Zea mays
  unsure (1)..(328): unsure at all n locations
ctacgactttttatatatcgcagggtgctagaacccatcgggggcgatataacgagaggcggctgcttgttgcccacggccatgacgagagcactgaccatggtggccatgatagtcactgatgccttgttcttcatggccgatagctcacagcaaagcggtacgcaggacggcggcgcgctctgccccaactgcctctgctgcagccagtagggctattgcagctccactccccactactgtacctacggcatgcacagccaccgcttnctacataggatgcatcggcagcggcagtacccctactacttccccgagcgggcctgtg

SEQ ID NO: 299945 - DNA, 280 bp, Zea mays
cacgcgtacgctgaactactcatttactggactatttttttcaacacggcagcagctataataacagtggtgtttattaggggactcaaggtggctattgggatactacctcacttttacaactttgttcacattggctgattcgcgacgtatttcctctcgggttttgctctgttgacatggcctcaatttagctgcttggcaaggcattcattgacacatactaactaacctaccaagtgcaaagcatacacaaatactatgcaggatttcccactct

SEQ ID NO: 299946 - DNA, 323 bp, Zea mays
actattatattcatgtcacacgtttgttttctacgacgtgcgccaagaaatgctattgggtggatattaccatggagcacgggacggaaataccagtataagttcaaaagctgatctcatgaatattgctatgactactcttagttcaaaaatactttcccaagacaaggagtactttgctgaacttgcggttgatgctgtcttgaggcttaagggtagcaccaacttggaatctattcaaattctgaagaaacgctgaagatctctcaaggattcatttttggacgaaagattcattcttgacaagaaaattggcattgggc

SEQ ID NO: 299947 - DNA, 379 bp, Zea mays
ccacgcgtccggatcgagtatcccaccaccccacccttctttgctaaccgacgcaatggcgactctgaggggtccttcctcagggccgggcggcgccaaggactgcgagcagctccacaaggctttcgaaggttggggcaccaacgagaagctgatcatcttcatcctggaccaccgcaacaccgcgcagcgccacgcgatccgccgcggctacgcctaggcgtacggtaaggagctgctgcgcgctctcagcgacaagatccacggcaagttccagaaggcggcgatcctgtggacgctggaccccgcggagagggacacggagctcgctaacgacgaggcgaagaagatccaccccggcggccgcacgctggtggag

SEQ ID NO: 299948 - DNA, 380 bp, Zea mays
cgtacgcggacgcgttgtctccgcctctcttcagctgcttcctgtagccaagcccaagcctgagcggagaccattctctaaaggttcgtgtcggcctctccaagctggccaactctatccatgccctccccgctgccgccaccacggccatctctcaagcgcccaggccccagcacatctcatctcctatattctccggccttggagcagcggctcgtgatttcagctcaagggctctatggaagggagcattcgtcgatgccttcctggctagaataaacaagaacagagaaaacatcaatgggaagaagatttggtctcgtaggtcttctattttgacggaatttgattgctccactgtgctcatttacaatgggaaa

SEQ ID NO: 299949 - DNA, 340 bp, Zea mays
  unsure (1)..(340): unsure at all n locations
cggaancccggtcgaccacgcgtcgaagcagatcgtcgacgagatcgtgccgacctcggacggcaacctgtgggactacctgccggtgctgcggtggctcgacgtgttcggcgtgaggaacaagatcacggccgctgtgggcaggagggacgcgttcctgcggcggctcatcgacgcggagcggcggaggctggacgacggcggcggcgacagcgacagcgacaagaagagcatgatagccgtgctgctctcgttgcagaagtcagagccggaggtgtacacggataccatgatcatggcactttgcgggaacttatttggcgccggaacggagaccacg

SEQ ID NO: 299950 - DNA, 156 bp, Zea mays
cggacgcgtggggcgtctcctccaggtctcctcggccgagccccgcaccccctcgcggcctagccgtggccggtcggcaccctaccgcgcccagctccgctggcgctgtggctgctgccggcgggttcggcggacgcaccacacggttgtgctccg

SEQ ID NO: 299951 - DNA, 255 bp, Zea mays
gttagtcagttgacacaggaatggttctaagatacaactcctctgaagtcatatcgggtcaagacctaacagtctatggtgccctttcctctcttgcttcttttgaccgttcatacctgaagagcactttcactgacaatatcaactttcgcaactatctgcatcttgtgcctgaagtacagcagctggttactgatctatatgcaactcgttatcgatcttgcctcgcatcatcttgaaaagctaaaacctaac

SEQ ID NO: 299952 - DNA, 359 bp, Zea mays
tcccgggcgccacgcgtcgatcgatctgaagtctcgctacgtacaggcaataaaaaaagcgccgcatggcagcagaccatggccctctcctccacggccttcgccggcaaggccgtgaacgtgccgtcgtcgtccgccttcggcgaggcccgcgtgacgatgcgcaagacggcggcgaaggccaagccagcggcggcgtccgggagcccgtggtacggccccgaccgcgtgctgtacctgggcccactgtccggcgagccgccgagctacctgacgggcgagttcccgggcgactacggctgggacaccgcggggctgtcggcggacccggagacgttcgccaagaaccgggaggctga

SEQ ID NO: 299953 - DNA, 233 bp, Zea mays
  unsure (1)..(233): unsure at all n locations
caacaagnatatcaggaaggtccggtatttaaaacgccctgctaatgcaccctacctgttacaaatttattattattcaaaaccaccgccatgtggacaccacgtcgatgcagccttttggccccatcaaccaagctggagcagatgagatccagttgagggacgcctcctcactcccccccaaagagggcacgcataatatcctcataatctctaattgatctttggccaca

SEQ ID NO: 299954 - DNA, 194 bp, Zea mays
  unsure (1)..(194): unsure at all n locations
gacgcgcatgcacgcgtantaagctggatcctctagagtcgacccacgcgttcgctagcggtagagcgtaaagaggggcgtggttcagaacagcatgacgatggtcatcgatctcctcgtgtgcctggctctgtcagttgacagcacctctccaatgcagatgccctgcccttgcgctatgctgcacgtcttgt

SEQ ID NO: 299955 - DNA, 452 bp, Zea mays
  unsure (1)..(452): unsure at all n locations
acgtngcgtgcacgcgtaccgaacttatccaccacctgaggttcttcttcctgtttcttttaacggttctgaccacctgagggaggttttttacaagcagatgggctcgaccaatcaggacattgtcgccctgtctggtgggcacaccttcgaaaggtgccacaaagagcaccctagggttctacggggcctcgactacataccctttgatctttgacaactcttacttcaacgaacttctgactggagataaagatggccttctttatatcacaagagacaaagccctgctgagagaccctgtatttcgccatcttgtcaagaaatatgctacggatgagaacgctttctttgatgactacaaagaggcccacctcatgctctcctaactgcggattgctgatgcttaactagaccctatcctggataatacattctgctgcatgtggtct

SEQ ID NO: 299956 - DNA, 303 bp, Zea mays
gcgtaacgcaaggagtcataggtgtaccactgccgctttgccatgctcgccgtccccgggatccgggggccggaagctatgggggtggggaactgaaagaaggcgcaagagtgggcggccgaccccggaggacaggccacgtacctgggcgccccggtgccgaggggcacgctgtcgaccatactggtgatcgagttcgtggtcatcaccttcgcacgagcaccaactcaccatggagaaggaccccgagaagaataagtaccccagaggtaccttccacccgatcggtttctccatagaccc

SEQ ID NO: 299957 - DNA, 415 bp, Zea mays
accatacgcacctctctccatctttctgctacttcttcttcttgttgatccagccaatcgagggatcttcatgttggactggggggagcaccatttcgaatcgaatgccgacgccgtagctttcaagacctaccctcagcaggctggcaccgtacgtactaaccgctttatcctcattaagaaccgtccatgtaaggctgagcaagtttctacctcacagactggtaagcatggtcatgcctaatgccactttgtctccatatatatattcaacggtaaaaagctccaagatattgttccttcgacacaaaaatgtgatattccggatgtgaactacactgagtatcagctgattgatatatcacaggatggattcgtgagcctttttactctagatggcaacactaaagatgat

SEQ ID NO: 299958 - DNA, 336 bp, Zea mays
cgcgtaacgcaaagaccactgtcaaggcaattttactacgtcgcttttatttgaccacttcctcgcttgctacatggcgtggtaaaaagaacatagcggtcggccacttctatttttgatgtgcaaggcgtgggtttcaagaccttctaaaactctgccagggtattaatcacactattacagaacatctacaacgataactacccacagacattgtcccatatgtatataattaatgcgggccactgcttcaagatcttatgcagcacaatcaaatcattccttgacccaaaaactgcttccaacactcatgttcttgagaatacgtatcaacat

SEQ ID NO: 299959 - DNA, 284 bp, Zea mays
cttgtacctcgccgacgagagctacaccggccactactcaccgcatctggaccacgccatactgcgccaccactgctccgccggcggaataccgttgcagaccatcaacctcagaggcatcatgatctgcaacgcggcgatcaactactatactgacactaatggcatgtaccacttgttatggacgcacgcgctcatctactacgcgacgggcgacgccatttgcaggcactgcaactatagcgccgccgacggcggcttcgatggctccatcgacaagtgct

SEQ ID NO: 299960 - DNA, 457 bp, Zea mays
gtggatcctctaaagtttactcacgcgtttcttttacccgtccgcccacgcgtccgtgggtctttatctgctggatgggcgagcaccactctcgccttccgtccctgcgcatccgccgtgcccatggacggcggctggtcgaacggcggcgccacctggtacggccccgccaagggcgctggatccgacggtggtgcgtgtgggtaccagggtgccgtcgaccaacctccgttctcgtcaatgatcaccgccggcagccaatccatcttccaggacggcaagggctgcggcacctgctaccaggtgaagtgcaccggacacgagtcgtgctccggcagcccggtgacagtggtcatcaccgacctgtgccccgacgctacgtgccaggtggagcccgtccacttcgacctgagcgggacggcgttcggtgccatggcgaagcccggccaggccgaca

SEQ ID NO: 299961 - DNA, 323 bp, Zea mays
  unsure (1)..(323): unsure at all n locations
cgacccacgcgtacggagggcctgatcattctacggtgctgggtttcattccactcggaactggctcacatggtggtcgtacattaagctggacacgcgatccccatcacncnattgatccaattgtgagaggagtaaaatcaaaactaaacataagcgtgatggacggtccaaacatataaccacacttctttgttaatgaccctgatatccatttgagtgctaacgcaggttatatcgcttctatgtataacagttttggtaacttatgctatgcatacggagctttaagagccttttggcgacataataatcaacatgtg

SEQ ID NO: 299962 - DNA, 292 bp, Zea mays
gacaaatggctcaaaagactagctaccgatgtctttggacaaccgttgtgttttgtttgaggtgagcgtctgctatgccagggtggtccgtatcaagatggagctgtccaccaaccatgtgcctaagaccgacataaactatcgcgcgatgtgcactgctgataatgtagcatgcaagtctggtaagccggtgaactacaatggctccaccttccaatgtaacatggtcgagatatgcgccaaggcggctgactgactcacggaaacgtgaccagtggctagtccatctacg

SEQ ID NO: 299963 - DNA, 381 bp, Zea mays
acgaaagccaaagaacattttacttcatatatatttgcacatttcattgacagactttcagttgtgtttctttacatcgcggcgtgcggcaaatgtttcttccacactatattgataagaagaaaaagaggaggaacagcattagtaatcccatattttttgctgaaccaattctatcatcaaattcttttgttggtacataggaatacatttcacctgatattattacccgagctggccatactagttctgtatattgttttgcgctaggaattcttttatatgagattttatattgttatacactcttcattgggaaaacaattcataagacatttactaatattttttacaaagatattatattttctgttagcattc

SEQ ID NO: 299964 - DNA, 320 bp, Zea mays
gaattctaaattaatgagtggtggggtgggactaatgtttcttttaccagaacctaaaccaggggttggattaaatgttgttgtaaaggatattaaatggcctaactacaccccggggtacgaaaccaaggatcctgattttttggcagctttcctggtaactcctaacttcggggttccgcctgaaaaaccaggacctgcagttcctgcggaatcttttactggtccatggccaactgtttggcctgttggacttaccagctttgatcgttccaaaggacaatgttataacatcgggcccgttcttggggacccaaatc

SEQ ID NO: 299965 - DNA, 283 bp, Zea mays
gttccgccatggttgccatccatccgtcaatcctttatcagtccttttactgcaagaggaagtcctttcccatccaggatgttccttgaacggggagggcttctcccggggccatcgcccccaagggaaccatggagcctttgtttttaatcggccagaatctgctcaccaggccatttgctagggggaccacttccccagggctgtcctagcccggcaaggtgtagggcccaaaaccacagtccttagctaactttgccaagcagttttttgccaggcccag

SEQ ID NO: 299966 - DNA, 339 bp, Zea mays
gccaaacccaggctccaaagcagttaccaattatccgggagagggggcgcacccattgggccattggccacggccggggggggggccggccttttaaagttgttgggcccgtggccaacccctttctggaaccgggtccccttggcgctgaacctaagggggctggagtccaagaccgtggaggaggacctaaccaacaggagcgacctgttcttggcttccaaccccgtcaacaagctggttcccgtcctcctccacggggacaggccaatttccaagtaactcgacatgggggagtaccttgacaacgctttccccggggttggccaggccgtcttt

SEQ ID NO: 299967 - DNA, 393 bp, Zea mays
acggcgaccctttaataggaagcttgaaaaccttttttatctttagcccgttcgggggggggaacctttcaaactttccggcctacggaacctccttaagccccttgttgtggggcgttaaggtcggccttgtccacggttacttcttgggggggccttttgggctaacgggcccgttccgaaaaacccccttgcacggccaggccggtccgcttggatcctccggcctgtttgcaatcctaagggtttgcttaacaattaacggggtcgcctttttaaacaagggggacccttcaacggggcctttgttaacgcttactcggtggaaaaaggaggccaacaagttgcaaacttccaacggttgggcaaagtttaccgggggatttttttttg

SEQ ID NO: 299968 - DNA, 375 bp, Zea mays
acagccgtccaagcggaaggtccaccttgggttccaagactttctttaaaacgctgggcaactccaagggaaggtggttcataatggaaaccaagggccctccatttaggaggtttgagatggagtcctaccccaggctggccaaagttggggggcaccatttcaacggaaccaatgttgttttgggaactgcttgcggaaggacctacagggggggctgcttaagattaatcgacccaggggactgggccataataagtcccacccttggcccccagtgggccagccccggaacccatggaagttgtttggcctttttaaagaagagatgagatgtaccgctccggccctttgcccgtttcctttttttatctt

SEQ ID NO: 299969 - DNA, 293 bp, Zea mays
gttttggaccgcgggcggccgttctttagtttccaggctaacgtccccgggcttgcgacggcatacttcttttttggggcggcctaaattaaatcaactggccgccgtttaccaccgtctggcctgggaaacccctggcgttccccacctaatttgcctggcagaaattccccctttcgccggttggcgtaataccaaaagggccggaaccgtttgcccttccaaacagtggcccaccctgaatggctattggaaccccccttgtaccggctctttaagcccgggggtggtgg

SEQ ID NO: 299970 - DNA, 236 bp, Zea mays
gttttggatcgtgggcggccgtcctggagtttctttgctaacgaccgcttgcttgcaacggatgggtttttttttggggtaaccggaatcaaattaattggccgcggtttaacaacttcgggcctgggaaaaccttgtcgtaacctaacttattcgctttgctttacatccccctttctctggtgggggaatttttgaaaaggcctttacctatcgcccttcttaacaattggcaa

SEQ ID NO: 299971 - DNA, 332 bp, Zea mays
aaggccagagaccatttaacttaatgtggtttggcccatttaatggccggacttggattggtttggttggccatccggccgaccccaagtgttttttcaacacgtttttgttaggaggaaaaggggggggaggggcgggagtaatcccatttttttggttgaaccaaggcgggcttaaaattttttggtgggtccagaggagtccattgcaccggagattattaccggggctggccatacaagggtctgaaatgggggggcgctaggattttttttttttgagatgttatatggttttccaccctccagagggaaaccatgccaaaggcctt

SEQ ID NO: 299972 - DNA, 389 bp, Zea mays
ccggcccggatttccggggtggaccacacccgtccggaacctttggttttgaccactgacggcctttattactggcgatataattttccgggggggccaaaaaaagatttggggactggactggccaccaattaaaagaatttaattttaaaagaaggcccagaaccaatggctgttttaattgttgaacctggaaggggggctgggggggtaatccttcctccaaggacttattttgccagggtccaggcaatcgcaaagaagtttgccatttttttaatagcaaatgaggtgatcactgctttgggaaggctgggaacattttttggaggcgattcctttaccataaagccggatttagtttaactggccaaggttttttcaaactc

SEQ ID NO: 299973 - DNA, 353 bp, Zea mays
cgggcccggatttccgggggggtggggtccttgggggggcagttttccggtttggcgtccactgctatttgttgggggcagtcttatgggtaagggggcgtaaggcctccaatcatttacggggacttgggccgccccaacccaatgaccgttttttggtcaaaaacggaccaaagcttgacgtttcgcccaatgaaggggatgctgactggcccagtaacaatcttaaactggtccttggtccggaatgaccagccgaggtttgagacttgttaccaaatcgtttttgcaaccaaaaaggaagtcgaggatcttgaggctgggggaattaaggttttccaaatcgacaaggt

SEQ ID NO: 299974 - DNA, 344 bp, Zea mays
cggaccacacccttccggaaggcaggtccattggtttcggcttaattttcaataccttcgagtttgccaagaggttggggcccaaatcccgcttgatagggaatggtttggttactaaggtggagaagtcccgcaggcaattgaaagagcggaggaccagggccaagaagatccgtggtgtcaagaaaaccaaggttggtgacgccaaaaagaagtaaacagccattattatttttgttttactgtcctgaactttggggggtcggttagttgcaaggtaataattttggcccggtaaggttttgttccgaacttatcattaaggggaagttttgaaattcctt

SEQ ID NO: 299975 - DNA, 249 bp, Zea mays
cggactggaatgccgggtccacccaacccgtccggggaataatagccgaaaccgtgtccgattttttttggccatggtggccaaaacgcccaagatgggttgttaatttataggctggccgttttttcctttccttgccccaaaactggaaataaatttatatccgttgaaataccgggggcatgccgaataagggagggggtgaatctaactaattaagtaaggcttaaataacacgtttaaaaggtc

SEQ ID NO: 299976 - DNA, 349 bp, Zea mays
gaggatgtttcttcaatcaccggtcggggtttattttccattggccgattcaagcgtggaaccgcgaaaattgttgccacagtggttatctttggaatccgggacacccggaactgaaccgtgactggcgttgagatgttccaaaaaaccatggacaatgccttggttggggacaatgtcggactgttgttcctgggtttgcaaaaggatgccatttgaaagaggcttggtgctggtaaagcccggtttttataaaccgaacaccaagtttggggctgttgggtttgtcctaaaaaaggaaaagggtggccgggactaacctttttttcctggttaccgcccgcagttt

SEQ ID NO: 299977 - DNA, 366 bp, Zea mays
aagcgctaatggttggtaagccatggccaccgccgccgggtttagcctcctaaggtcctctttggggggttcccggttccgggcggcaacccggacaaaaccggggtccttggggggggcaaccggcccgggcggggccggggcggggccaatttggccgtccatgtcaaggtcttcttcaaaccggccttacaaccggacttctttccggtcaagcccaataagggagtccatcgggtcccgggggaggacccgccgttccatgacggccatgataacttacgccaccaccaacgtgttaatggggggcgccggttccggggggttgtcctgggcgtacaagctttcaagggaccccgccgtggg

SEQ ID NO: 299978 - DNA, 406 bp, Zea mays
  unsure (1)..(406): unsure at all n locations
cggaangccggggcggcccaagccttcgggggttccattccggnccggcccttggntttttcggtttcggccggaccccgggggcgggggacaagaagccatgtggggctccaacctttcaaccgcctggtcctcctgggggctggccagaagggcctcaaccacccgtgggggctcccccccgggctcgggtttcctggggcggggttccctccgggggctccgaacccgaatcgactccgtaaggaacacccaaaaaatcacggaggccatgaagctggtggccgccgccaaggtccggcgcccgcaggaagccgtcgtctcctttcgccctttttcggaggcgctggtggaggtgctctacaacatgaaccaggagatccagactgaggacatcgacctgccc

SEQ ID NO: 299979 - DNA, 303 bp, Zea mays
aagacaacttgaatcattgattcttgaagatatcgagcttctttcgcaccacagggagggggaggtcttgcaactgcggatcaagcttcagctgctgctcaagctgcaagcgcggcccgaagtaccctcacctggaggtgactagcacctacaggcagtcctccgtcgtgctcacattctaccccaataagaaaggcacgcccggattcgttgaggcctgcaaagcgtttatgccgagctcctatttctggcagtgatgaagctgctgcaaaagatggcgacacggctgctgatcacatgaaa

SEQ ID NO: 299980 - DNA, 259 bp, Zea mays
  unsure (1)..(259): unsure at all n locations
actagaacgagagcgggcgcgccagaggaaccaagcccacgcacgcgggcgcgcgacggcaaagcccnagcaaagcgacaccgaaacccaaancaaaggccgnggncggacaacgacaagaccgggaaaacccaggcgcnacccaacccaaacgcaaggcagcacaagcacaaaccgccagcgggcagaagagcaaaaaggcccggaccgaccgcccncgccaacagnagcacaggcggaaaggcgaaggggacgcgcc

SEQ ID NO: 299981 - DNA, 242 bp, Zea mays
  unsure (1)..(242): unsure at all n locations
cagtaatgcgatggactaacgactggaatagaactttcttttggnggaaacacaanccactgcggtgagccacttttctacatccgccccttatccaacttcaagtatttctctttntancattcattattattctatttatttcgactctgatacctctttcgagatatttttacataggatgccactctttaaaattaaaaaaatgagtaaacatctttttcacgaaaaataacttatcc

SEQ ID NO: 299982 - DNA, 386 bp, Zea mays
  unsure (1)..(386): unsure at all n locations
ggggtctgaatcattgtttttggcaacaaaattagcacacaaacttttattggcacgtccattgccatagctggtggtgctatgtactcttacattgaggctaagattgaagaggagaaaaggaaaaagagcgcatgactgctgtgaataatattatcgagaccttcctcggacacaacatcgtcgacaatcacgacctacttctatatcttgttttgttttcatcttgagtcagtcggtccattgtttgttcccagtctggtgattaaaagtctgcaaattctgtttgtggaattggcagcgatacaaatttggcttctttaagtaaatccggttgccggtnnaaaaaaaaaaaaatatattaaatattctaaaaaaaaaaatat

SEQ ID NO: 299983 - DNA, 473 bp, Zea mays
gatttccgggtcggccccacccgtccgcgtttggccggggaagttgggggcgatggatatttgcaaaggccattgtgggaatggctgaatcagctggttggatttagcaccgttgaggggttaaaggggttggctgcaccaaatcgggctgtttttctggaccctgctttgatgagacctggtcgcttggcccgtaggatggagttccctaatccatcaaaggaggcaggggctggattcctgcaaatccactcggggaaattgattgtgattccagatgtcaactttgaagagtgggcccgtccaaccgatgtattaatgggccctcagttaagggctgtttgcgtaaaggctgccttgctcgttttacgccaggatgctccagaggttacccacgaggttttcaccggggggttcatccaagtgcaggcaaagaggaagtccagtttgatttactacccgtaaggggggga

SEQ ID NO: 299984 - DNA, 462 bp, Zea mays
aaccgaactttaccccttttttggggttgaaggattcaacctcggtttttataaattttggaaaccggttccttttaaaaaaaaaaaaaaaaaaaaaaaaaaaagggggcggccgttttaaaggaccaaagttaactaccccgtgcatgcaacgtaatagtttttttatagggcaacctaaatcaaatcaactggccgcggtttaaaaacgtcggaactggaaaaaccctggctttaccaaactaaatcgctttgaagaaaatccccttttggcaagttggcgtaataccaaaaaggcccgaaccaatcgcctttccaaacagttgcccaccctaaatggcaaatggaaccccccctgtaccggcccataaagcccgggggttgtggtggttacccccagggtgaccgttaaattggcaagggcctatacgcccgttcctttggttttcttcccttcctttt

SEQ ID NO: 299985 - DNA, 447 bp, Zea mays
aattccgggtcggcaccacacccttccgaagaattgcaccaggcaggattaacctgccctctgataatatggtaaacgggtccggcggttggggacaccttgacctcaacggattgcggcggcggcggcggcggccccaaaacttctgggcctgaggtggtcggcctgaccttgaaggaccccaagaaggtgatcctaagggccaggccggcccccgccttctggtggctgcccgtcggttccgggtggaccggggttaatggccttaaccgggtccgatttttggtggacatgttcgcccaaacccccaaaatgggttgttaatttataagctggccgttttttcctttccttgcccaagaactggaattaattttttttccgttgaattaccgcggccttgccgattaagggatgggggaattctaactaattaagtaatgctta

SEQ ID NO: 299986 - DNA, 398 bp, Zea mays
gggctccaatccggtccggcccttggttttttctgtttcggccggaccccgggcgccggggacaagaagccatgtgtggctccaacttttcaaccgcctggtcttcttgggggttggcaagaagggcttcaacaaccggtgggggttccccccggggctggggtttccgggggcggggttccttccgggggctcggaaccggaatggactcggtagggaacacgcaaaaaataacggaggccatgaagctgggggccgccgccaaggtccggcccgcgcaggaggccgtcgtttcttttggccttttttgggaggcgctggggggggggctttacaccatgaaccaggagatccagacgggggacatggacctgcccttaaccggaaccggcccggta

SEQ ID NO: 299987 - DNA, 424 bp, Zea mays
ccgaatttccgggttggaccaacccttccgttttttaaccttaaagtaatacctgccgtcttacacgccaaaggggctggaggacctgaggaagaaggacctgcaggccctgcccggcaacggcaacggcaggcgcagggggttcaagcgcgtttacaactccaacttgtccaacaacctgggcaacccggccaggaacccggccaacaagcggcccgtgctgggcggaaccaagcagtaccaatacccgggccgttgcctaaccggccgcccaaggaccaaaaaggaccccaggccggaaatccccaagggcaacaactccttgcccggggacaggcagttttggaaggtgaagcagttaacgttcggggccacaacgttgcgttccggcctgaacgcgctgttgccggcgctccgcccgttg

SEQ ID NO: 299988 - DNA, 409 bp, Zea mays
acccttccgaacaacctaagggcgggcccggaacaccggtacaccgtcccggcctaaacacttgaaaaagggaaaaccaccccaccggcttggccaccattcccgtattccttgcaacaatcctcgtcgccgttctcctggccgttggtagacctgcttgtttgggggccaccgcaaccgacaccaacaccgacggggccattcgtttcccaagaagttttgttcctgttggccaaccggggaagtgctgtaactatgtaaccaaggagccgttattaaggccgccccgttggccctgaaccaccttgttgaccaagtgctccgccaactgccaaaagtgcaagaagtccccggccggcaacggtttcttttgccgggactggatcttaagcctgttcaagcccccggt

SEQ ID NO: 299989 - DNA, 374 bp, Zea mays
aaagcccgccttaacaatcccggtaatggttatggcccgaatgggcaacttgttgaaggccaaaatcctgaaggccctgggcgtcaactacttggacaaaagcaaggtgttaaccccggccgacaacccgaacaaaataaacaagaacaacttccggttccctttggtttgcggttgccggaacctcggcaaggccctcccaaggttgcccaagggcccccccataatccgaacaaagggggaggccggaacgggcaacttcttcaaggccgtccgcaacttgcgctccgtaatgggcaacttccggccgctccgaatattggacaacaacaaggtttttgcttacgcaaagcgcatggccgggccctacaacc

SEQ ID NO: 299990 - DNA, 489 bp, Zea mays
ccgggcctggattaccgggtcggccccacccttccggccggagaaaaaaaactgaagccgcggggttattcttaagccgccgggacgggaccagaaaaggatggccgacggaagggcttccgcttaaccgctttcggtttttccgaaccagtccaaccgggacgccttaaagtcctaagggcgcattccagttgttaatagggggggggaccatgctttggcattagggagggaaggaagggaggcctggatgcgtgcaaggggggtttgccaggctcctttttttggcagggttgaggctgcaccaaaagagggggccatggttgtggttgaggagaaggcaaatctggagactggaacgactaaggctgtggaggagctgaaatctgtttttgaaagccagggaaaaggggcccagaataggaggacagaagggcttcgggctttaaggcgttggtggtcccagtctgaagtacctccagttgatgc

SEQ ID NO: 299991 - DNA, 397 bp, Zea mays
cccttccggcaaagaaaaaaaaattggacgcggcggggttatttttaaccccccggacggggaccaaaaaaggtggcccacgggaattccttccccttaaccgctttcgtgttttcggaccaattcccaccggacccccttaaatccctaagggcccattacagtggttattagggggagggaccttgcttttgcattgggaaaggaaagaggggaagccttgtaccgtgcaaagcgtgtttgccgagctcctcttcttggcattgatgaggctgcaccataaaaggggaccatggttgttgatgaggagaaagcaaatctggagactagaccgactaaggctgttgaggagctgaaatttgctttgtcaagccagggaaaaggtgcccagattagg

SEQ ID NO: 299992 - DNA, 449 bp, Zea mays
gatttccgggcctttagtttttagaattggaaaactgggcccccttctttttaaattccccgggccgtcctgttggccggtttttggttggcccttgattccgcccagggggggggacctaagggaatggattggtcaatccaagggaaggcaaccagactccaggagggggttaaaggccggggttttaaccggggaaatgttggccatggtggggctttcaaaacaagaagcccggaaaaagccaaaaagccttcccgttccgggatcccaattggtcctggggccggggcaagggccggaacggggggggccgaacaaggtggacctgggggacctcttaaggggggccgggccgttcaaaacgttcctggattacctgcagaagaccggggtaatgaaaaccttccaaagccaggcgaacgacacgaagcggggcggattaaccg

SEQ ID NO: 299993 - DNA, 405 bp, Zea mays
gtcggacgggccttccgttaacctattaaccaattttgaaccctgtttttttcctaaagagatcccactccctaaggagtttatttggattggcgacctttgggttaaactttatccaagtttggccgaaggagcacccctttttttaacctggattgggcccaattttgcggaatttttaagttttgggggaggactagatccaatacccggtggtttatggtggaccatttttgcccaccataattaacctatggcttttcttttccggaccgctggtcatatgtttaggaccaattggggtttgggtaatggcctaaaagatatttgggaggctaataagggcccattaacaggccagggccttaaaggtttttatgaaaccctaacaccgtaatggaatgc

SEQ ID NO: 299994 - DNA, 364 bp, Zea mays
agccttccgggccaggtaagttccccggcaagggccgggctgctttggccacaatgaaccaccgattggggcccttcttgttggtcgaagccacactgttggcgcaggccggggcctgcccttacggccggacgccgaagccgcggccgcttccgccgccgtggtggtggtcaacgcggtgccttccccggccttattggcggtggcggtcaacgcggccggttaagtgcccggtgaccacgctaaagctgttcgggtgcgtggccgcgctaaacggcttggggcacgccgtaatgggaaccaaggccagcgacacttgttgccggttgttttccgggttggccgacctggacgccgggctttg

SEQ ID NO: 299995 - DNA, 386 bp, Zea mays
gcccaagaaccaccgggcggagcagttggttaccgccgggaggaaggccggcccctgttccggcctaagggggaaagactacttgaggactgccctttctttccgtggccggttcaaccaactcgttggcttaaaagccaagggtttggggccggacttggggctttacggcctaaaggggaccaccagggtcttaaagggcggattaaacgcgacgccggtgatccatggcagaaggggccctttcgccaggtccttgctgttccagttttacttttgggcgggggggaacggaccgttaatggactgcccggggccgaagaagtccacctgttccagggggatccttttcaaccccttaaagaaggggttgcttaagcagcagt

SEQ ID NO: 299996 - DNA, 455 bp, Zea mays
aatttggaattattgcgtgggccgaccgccggaattggaccccgcccttgttggtttaacattccactgcctggttccactgggttccatccgccctttatccagctaagggattttctctttttcccatccataataatcctattaatccggccctccatccctggaccgagataggggccataggaggccactctttaaatggaaaaaagggggtattcagctgggccacgaaaaaaaccgaatcctttggtggctggtaatttatggccaaaaatcgaaagggccattttgaagggggggaaggaattattggtaccgtgtccccggccttttagcattttacccgcaatggtgggccatccaatcgcgattcatatgggaaaggaccatatccctattaacataccaaatcctatggtgggccgcaaatggggggaatcggggcctactcg

SEQ ID NO: 299997 - DNA, 478 bp, Zea mays
ccggttccggatttccgggttggaccacacccttccggttgttaagccctgaggggctggacctttcttaggaggacctgatggaaaggttggcaacgggtgtttcaatggtggcctccttgcaactggcaatctgttacccgaccttggttgttgggcccaacatgttaataatggggtccaagaatgtgctggttgttgttgccaagacagactactcgtcccaacatgctgccaggaccaaggggtccctaagggcccaaagcaggtttgttgttgccgccccggttgttgttggggactctggcgctgaagttgttccaaaggaagaaaagaaggctgcggaccctgaaaaggagtcggccaaggaattgggtttaagccttttcaacaactagagctgttgttttcggaaaacggctgcaagttttggcttttttttttataattaacaagtactgtttcctttattttttag

SEQ ID NO: 299998 - DNA, 377 bp, Zea mays
acccttcgggaaggttctttggcttggaaccttttggggtttggttggttttaattttcaagggcccaattccaacttggccgccgaagccatgggaataacagggccaactccggacatcttggggaggcgccagtccggccaggacgtccgaacgcagaacgtgttggctggcggggcggtggccaactatggaaattcctggttgggcccggttggtttggacaggatgctaggggacgatttggtggaggttccattcactatggttggagcacccatccttaagaggttggaggtggagcatccagccgccagggttctggtggggttggctgagctccaggaccggggggtaggagatggaactacttccg

SEQ ID NO: 299999 - DNA, 425 bp, Zea mays
tttccggaaggagggaactcctcctgggttggttgttgttagtagaagcttcgcccgcaacggttgatgacaactccggtttttactaccagttggttttaatgtggccggaaccttactggaggcagacaagcgctgggggctgaaggccgacaaccgggttttggccgggccgcgacttttacataacgggcttaaccgtccttaacgcaacaaccgaccctgaattgacggattgcagaaccaaagttctttacaaccttaacctgattaccggattcaaaggcctgaataagtcctggagcaacataaggtgcccaagcaccaacgggcaaagcagttggaaaaacgcctggagaaaggccggcgcctgttccggcctaagcaagaaggactacttgaggactgccctttctttccgtagc

SEQ ID NO: 300000 - DNA, 339 bp, Zea mays
gccttggccgcttcttttccggttccccctctatccgaagaagcaggggcaagactgaaattggccgcggggccttcttccttggggtcctccaatttttttggcttggccgacctccgccgggcgggggggccggccattccaaccgtccaaaagaagtttggggtgggttgttcgggccgccgggccaagggggtggtggccatggttggacccggcaggtttttcgtcggaggcaactggaagtgcaacggaccaaaggactccgttggcaagctggtctttgaactgaatgctgctaccctcgaaactgatgtaaatgttgggggggctcctcca

SEQ ID NO: 300001 - DNA, 435 bp, Zea mays
gtctcctgtcactcattctgtgggcaactgtgttaaacgtgttgtggtcattgtaacatcaggggggttcttcaggacacctgtttctcctatcaactctctcggtactgcgattgcacttgccggagttttcctgtactcacagctcaagcgacttaagcccaagccgaagacggtttaaatagggattgtattttccatctctttgtgttaatggagttaaacacttctatgtttcaggtgactgcattttaaaagatttgtgcttataacaacaacaaagtcttttagtctcaagcaagttagataggctagggttaaaaaccgaaacacctccccccaccccccaaattaaagatcagtcacatggataagtgttttccatgtacttctatttaagtctaaatctttagatatatatcatcattggaaacc

SEQ ID NO: 300002 - DNA, 416 bp, Zea mays
gagccgcaaaccctactacttatctccacctgtctgttttggtaacctcccgctcgtccacgagggccacctaatatgtgcgggtgtccctgccaagccgcctgccctaacactttcttccttcagttcccacgactccctgtcgattatcccacgccggtgatcctaaaggacaagccgtaccccgccatcggggtcctgcccgccgtctcctagttgacccctgatttatgccctaaccttgtcctaatcttcttcgacatcgattcccaaaccccctacatcggttgataatatataagctagccgttatttcctttctttgccccagaacttgaaataaatatatatactatgaaataacgctgccatgccgaataatggtattgtgaattctcactaattaagtaatgcat

SEQ ID NO: 300003 - DNA, 355 bp, Zea mays
agacaacttgttcaattgattctggaagagatcgatctacttttgcaccacagggtctaggatgtgttgcaactgcggatcaagctgcgattgctgctcaagctgcaagtgcgggaagaagtaccctaacctggaggagactagcaccgccgagcaggccaccgccgtcctcgtcctggcccgggagaagaaggccgagcccgaattcgtcaaggccgtggctgtttccggcaagggcccccacgcctgcttctgcggtagcagttgcaagtgctacccctgcaactgttgatcacattgatcgacggccatggatatggtttttatctatctagcttggggtggtgggtgaaca

SEQ ID NO: 300004 - DNA, 234 bp, Zea mays
  unsure (1)..(234): unsure at all n locations
ggtgggtggaatcttcctaaacgacttgttncattgattcttgtttagttttagcttcttttgcaccacaagggggggggtttttttcaactgcggatcaggcttcaaatgcggctcaagctgcaagtgcggcaagaagtaccctgacctgtaggagacaagcaccgccttgcaggccaccgtcttcctcggcttggccccggaaaagaaggccgctcccaatttcgacaaggc

SEQ ID NO: 300005 - DNA, 331 bp, Zea mays
ctcacacactcactatacactgctctgctgcatcttgagggaagaagctagcccctccctagctatggtcgtcagcactggccaccaccgcctggtccagcctcctaaagtccaaccttcgcgggctccctgttccgcttcggccactcgcaccaccacctctgagtccgtggccgtggccacccgccgcgcctgggggggcccaatccgcccgtccatctcctcctcacccaccccgccctacgacctgacgttcttccggtttagccctatcaaggtggccatcttgtccccaacgaggaccagtctctacatggcggacattactacc

SEQ ID NO: 300006 - DNA, 434 bp, Zea mays
  unsure (1)..(434): unsure at all n locations
gaannncggggggggtgcttccttggcacgtactctttgggctctttgcctacattttatcactggctaatgcaaaactcggctttgtggatatgctaactttcctggggagctcaagtctcgacaaatatggcacagaggcattcttagtgaacttcacagcattggttgtcgtgttatttggtgcctcttttgtggtggctgttatagctccagttcgcctttaataaccacatgtttatgatccatttccagaaaactagcgcaaatgaaatgtacagcgtatgcatttgccaagattggctttttccacatggagataagatattcaagttctctttattgaccaaaaaaggtgatggaaatcatcacaaataaaataagttcacctttaaatcgtgtgtatttaacatttctgtaaaccacttcaaaaa

SEQ ID NO: 300007 - DNA, 366 bp, Zea mays
cgaaaaaaagcagccgcattggctagcatcactttttttcttttcctccacggccttcgccgggaggggggttaacttgccgtgggggggggcctccggcaaggcccgcgtgacaatgctcaagacggcggcaaaggccaagccagcggcggcttccgggagcccgtggtacggcccctaccgcttgctgtacctgggcccattgtccggtgagccactgagcttacctgactggcgagttcccgggcgacttcggttggtacaccgtttggctgtttgctgacccggagactttcgccaagaaccgggagcttgaggttatccactcccgttgggccatgctgggcgcgcttggctgtttttttc

SEQ ID NO: 300008 - DNA, 322 bp, Zea mays
cggacgcgtgggcggactcgtggggaacggttcttgtttagcctgaccatggacgagatcatggacgagtgcatgacattcttcttcgcaggccacgagaccacgtcccatctgctcacctggacaatgttcttgctcagcgtgtacccggattggcagcaacggctaagggacgaggtcctgagagagtgcggacaggcaaaccctactgtagacacgcttaacaaattcaatgagatgacgatggtgctccttgagacactgagactttacggccctgccatgcttatgcttaggaagcctacctccgacacaaggctgg

SEQ ID NO: 300009 - DNA, 420 bp, Zea mays
gcgtccgcggacgcgtggtctaatattggccaaattgttttattaccaaaccacgcccccattaacagcgggggtagatatgggtccttggagagtacgcctcctgaacgaccaatggttaacggcggttctgtggagtggttttgcaagaatagttaataatgagatcatcattttaggaaatgatgcataactgggtagtgacattgatccagaagaagctcaacaggcacttgaaatagccgaagctaacttgagtaaagctgaaggtacaaaagaattgtttgaagcgaagctagctttcaaacaagctaggatactaatttaggctttcaattgttttcccccatccaattgaagacaattcaaagttttttttgtatcaaaaaaaaaaaaaaaagggctgtcgttttttaagtt

SEQ ID NO: 300010 - DNA, 428 bp, Zea mays
  unsure (1)..(428): unsure at all n locations
ggaaancccggggcctggccggcctcacaaaagaccaaccgaccaaccaaccaaggccatttttcttggcggcggttgtgtccttctcccgggggcgagctctcccgacggggtccagctccgtgtccggcgacgacaaccaccgttcctactccgnggcgctggccatgtcggtgtcggtgcggccccggtgtcgcgcgcggtcgccggcgcggatgatgggcaacgtgaacgccggcaaggggctgttcgcgccgctcgtggtggtggcgcgcaacatcatcggccgcaagcgcttcaaccagctcaaggggaaggcaatcgcgctgcactcgcaggtcatcaccgagttctgcaagaccatcggcgccgactccaagcagcggcagggcctcatccgcctcgccaagaagaaccgagagaagctc

SEQ ID NO: 300011 - DNA, 444 bp, Zea mays
  unsure (1)..(444): unsure at all n locations
ggaaannccggggnggacccgggcgtccgtattaaaggaaaataaaaaaatctttaaatttatttttttggctaaggggggacctcgtgggtgggggctttagggccaaaaggggaaaaaacctatataatgatggaaaataacctaatacccaccctatggtttcgtttggtcgagaccctacctaaaaaccagtccctatgggaataaatccatctatcaaaaaggggtagatctatcataatggttgaagcacctgcatttttttctctacaaaaaaaaccggtttctaggctgtgaagcaaaacctaaggggttgtggataaaagggagggttgatagattgaaggacgaagattaagaacgatttcgggttcccatatgtatggtctatgaattacatcttaaaaaaaaagggcattgtgttaaagcttcaatttaatt

SEQ ID NO: 300012 - DNA, 402 bp, Zea mays
ttcccctcaactacagggaaatcagccatgattgcgttgtcggcgaagccagccaccggcggcaagacgtcttggccggaggtggtcgggctgagcgtcgaggaagccaagaaggtgattctggcggacaagccgaacgccgacatcgtggtgctgcccaccaccacgcaggcggtgacctccgactttgggttcgaccgtgtccgcgtcttcgtcgggaccgtcgcccagacgccccatgttggctaggctagagcctcagcctagaggtcgtcggtaccgtcggccatgaccacctgctatatgtcactactagtaataaagtattaattacagggatggatgcatgctcatactttggaaatcacaaattactttccttttttttttcttttttctttt

SEQ ID NO: 300013 - DNA, 309 bp, Zea mays
gccaggccctcttggggcccaccgtgatcatttttttttagtccaccgccgccgctcctctccaggggctcaatgtcaccgccagcctgcccatcgcccgacgttcctccagaagccttggcaacttcagaatcggcggaaggatcctgtgcatgcacgagtggccggctctccgtaacaagaagttggagacgctgttttacctccctccgttgtctatagacggtctggtgcatcaggtcgactaccctgctgttaacggttggatactctacctacagttgagcatggtccgttttgtgctccgag

SEQ ID NO: 300014 - DNA, 281 bp, Zea mays
  unsure (1)..(281): unsure at all n locations
gcgtccggccgcggcccgttcggagaggttttcaccttngtaccctggcggcagcttcgacccgctcgggctcgccttccacccggaggcgttcccccagctcaaggcgaaggagactaagaaccgccccctcgctatgttcttcaagatcgggtttttcgtgcaagctattgtcaccggcaagggccccctcgagaaccttgccgaccacattcgtcgaccccttcaacaacaacagctgggcttaccccaccaacttcgtcccccactagtgagcaagg

SEQ ID NO: 300015 - DNA, 395 bp, Zea mays
ctacgcccaacgacgacccctacaaagtggtggagaggacccaagtccttcgtcgcaaactcctgccgcagagaggtgattgtgtgatgaaggagggcgggttggacgctatgtggacgatgtcgtcgacgtagagttagggtaacaggtattagtgctgcgtcggaggacgaatagggacatgtccgatttggccttgacgaaggccagcgataccaatttaggaagcgaagcgactgtaccaggtctgtggtgcctgcttgaggccatatagcgagtggttgagcttgcacactaaatgaggatgagtggagttgacgaagccagcaagctagctacaatacactgtttcgatgtgagtgccatggaagaacgcgttcttgatgtacaaccga

SEQ ID NO: 300016 - DNA, 318 bp, Zea mays
gtgtcattctcggaattggtgaagtttacaatggaagcaagcatagacgacagcatcatacctaatgctattccttcacgcagtgttggggggtatttttggagtggaaggaaatgtggttgttgaggtaactccttaaacacatgttttgcaaagacatggattgaagtttctggttcatcagcaaaggatgttgctaagcagctcaaggaacaacaaatggtgatgccaggccattgtgagtcaaacttgcagaaggaacttaaccgatacatccccactgccgctgcatttggggggtatgcattggcgcattga

SEQ ID NO: 300017 - DNA, 383 bp, Zea mays
gaatttttgtgatcaatttagcaaagcggtgtacaagactaattggccgaaaatcctttacctgatccgccccttcatgctttgggatcatggtgatgtacgcagtgtttagcttgctgaaattacagaattttctactccagaccgctgaaaccgcagccatcacatcatttttaataataccccagcaagatttgtaaaactgccctgtgaaaccatcgggccctaggaccttgtctgaaggcatatctctaatggtttcccatacttcttgctcagagaaaggaaagtccaatcagtcaggatgtccctaggaattgcaagggcctctaggtcaataaccctgtccctacctttgcactgaccaataaggttgtgataaa

SEQ ID NO: 300018 - DNA, 244 bp, Zea mays
tagatcgcgagcggccgcccttttttttttttttttttttttttttattattttacctttttctttttcttcctattgatatgatgttcggcgcaaggtttcaccgccgcacgggagcgtccctaggcgccagcaggcgaccggggcccgaggggagcaggtgcgtgtgcaagcgggtgatgcgctaccgctgccgatccggcacacgaaacctcatcttctcggcgctgttcgccgggtcaat

SEQ ID NO: 300019 - DNA, 378 bp, Zea mays
caacctgctcctgccccgttgcctcctctccgcccccaccaccatggctcgtgcttccgtctccggttccgctgcggtggccaaagcactgatccccttaaaccccgccagcggcggccgccttccttccctgcttcctgcgcgcctccatgtccccgggagcagccgcgtgctccgcggcgcctcgctccgctgctatgccgccgccgccgccgctgtggccgagcagagccgcatcaaggtgcagaaccccatcgtcgagatggacggggatgagatgacgcgggtcatctggaagatgataaaggataagctcatcttcccatacctggagttggatgtgaagtactacgatcttggaattctcaatcgcgatgc

SEQ ID NO: 300020 - DNA, 380 bp, Zea mays
ccctcatccgccatcaatctcaggggcgccccagccaccccgcccttcactcacctaaccatggcggagcgcggcggccagcgtggtggagagcgcggcgggttcggtcgtggcttcggtcgcggcgggcgcggtgaccagggtgggcgtcgcggcgggcgccgtggcccgcgccaagaggaagagaagtgggttcccgtgaccaagctcgggcgccttgtcagggagaacatgatcaccaagagcgaggagatctacctccactcgctccccggcaaggagcaccatatcgcatagaccctcgttccgaggctcaaggacgaggtcatgaagatcacccccgtccagtagcagacccaagcccggcagcgcactaagtt

SEQ ID NO: 300021 - DNA, 242 bp, Zea mays
tcggttacacttgcgaactccatttcgatcccatttgaaatcaacccatgctcggttccttcgtctagcaaccttttacccttatggccaagatcaagatcgggatcaatgggttcggcaggatcggaaggctggtggccagggtggccctgcagagcgacgaccttttgctctttgccctaaatttcctttttattatggccgatttcatgttttatctttttcaaatttgtatttttttt

SEQ ID NO: 300022 - DNA, 395 bp, Zea mays
ttgcactgattatgctgctttgctttctggcacaatgcggcggtatgggtatccagtagggatgctactcgatgtgctggctaagcacagggacaagtaccatgatttgctgcttgcagattgccgtaggcaggtggctgaggcactgacagcagataagtttgatcagatgcttatgagaaaggagtatgagtactcaatgaatgtccttgcatttggaattcaaagctcaaacattaccccagctttcccatatgttgcaccggtttcatgcaccgtcccagacatttgccggattggtcggtcggtcattgaagattctgtgagcttcatggcacatggggggaggggggatacctatgcagcaatggagaaagtccttggtcggatcctat

SEQ ID NO: 300023 - DNA, 391 bp, Zea mays
tcggttgggatttctcataagtatctatttgcaagggtttcgcggtgggctttccaggagatcaaaaaatgcttgtggccagcaagggtcatattcaaataaactgttctacactttaaacatgcccattattttttactctgcgctgattaccaaactctattttatattccagcttttctacagggaggacagggggaactttcttggtaaccttcttgggaagaggaaggaggctgaatactctggccattctatttctggtggtgggcttgcttactatgtaactgccccatcaaggttggctgatgttcttgcaaatacatttcatgcactggtttatgtgggcttcatgctggcagcctgtgctctgttcttaaagacatggatt

SEQ ID NO: 300024 - DNA, 318 bp, Zea mays
gtaaggagaagtcccacatcaacattgggggcattggccacgtcgactctggcaaggcgaccaccaccggccacctgatctacaagcttggaggcattgacaagcgtgtaataaagaggtttgagaaggaggctgctgagatgaacaagcggtccttcaagtatgcttgggtgctcgacaagctcaaggctgagcgtgagaggggtatcaccattgatattgctctggggaagtttgagaccaccaaggattactgcaccgtcattgatgcccctggacaccgggactttattaagaacatgatcactgggaccttcc

SEQ ID NO: 300025 - DNA, 251 bp, Zea mays
tcggctacaggcttcagtcccgtgacctcatcgctgacagcattgagaccggcatgggcgcgcaacactaccacgccaacattttcatacctgggtgcgacaaggacatgccaggtacaataatggcaatgggacggcttaatagacctagcattatgatatatgggggaactattaagcctggtcactttcagggtaattcctatgatataggatctggttttcagggctatggagaatatggtaggggg

SEQ ID NO: 300026 - DNA, 354 bp, Zea mays
  unsure (1)..(354): unsure at all n locations
tcgaggggagaggaaaaaaaaaatctaaccctagcattcgcagcgctagggttcgggggttgcgatggccgcggcggcgagacaacgggggaccgtgaagtggttcaacgacaccaagggctttgggttcattttccccgaggaccgcagcgaagatcttttcgtgcaccaatcgtcgatcaagtcggagggctttcgctcgctcgccgagggccaggaggtggagtttttcgtcttggagggtgacgaccggcgcacttaggccgtcgacgtgaccggccccgacggattcttctttaagggccgcggaagccgaagaagaagctgctgcngcttccgtttccgccgcggtgg

SEQ ID NO: 300027 - DNA, 370 bp, Zea mays
tttattgagaccaactagcaacataaaaaggacaattgtgtaccaacaatggcagccaaaatattttgccttcttatgctccttggtctttctgcaagggctgctacggcgaccattttcccgaaatgctcgcaagcttctatagcttcccttctttccccggaccttttaccagcgggggctttggtatgtggaaacccaattcttcaaccctacaggatccaacaggcaatcacagctggcattttacctttatcacccttggtccttcaacaatcattaggcctattacatcaggtacctttggtgcatttattggcacaaaacattaaggcacaacaactacaacaacttgggcttgcaaaccttg

SEQ ID NO: 300028 - DNA, 123 bp, Zea mays
tttgggttggcttcttctccccctccgggtcgggttcgggttcgtgagggtcttccgggttcagtttcatgggttaacggatcgagattgactgcgttcgaaagattgaaaatcttatgtttt

SEQ ID NO: 300029 - DNA, 345 bp, Zea mays
tcgagaccattagctttatttacttcagagcgcaaaagaacccgatcgacaccatgagggtgttgctcggtggccttgcttttctggcttttgctgggagcgccaccttcacgcattcaagcggggggtgcggctggcagccaccggcgcccgttcatttaccggcggcggtgcatttggcaccttcggtttacctggcatcctcggtgcattttccaccggcggtccaacttgcggcggcggttcaactttcaccggcggtccatgtgccgtcgccggtttatttttcgtcgtcaccattccactaccctacttaaccgtcccggacttagtcttattcccagg

SEQ ID NO: 300030 - DNA, 242 bp, Zea mays
ccagtcctgttggacgtcagcctagcaattagctcattgacttcagattggagaactcgacaccatgaaggtgcttatcgttgcccttgctctactggcgctcgctgcgagcgccggcttcagtacaagcggcggttgtggcttgcagacaccacccgttcatttaccgccttcgctctatatgccggcttcggtctatctggcttcgcaacaataatccgagccattgcaataccccaatt

SEQ ID NO: 300031 - DNA, 284 bp, Zea mays
tcggcgcacggggcaccggacaccttactggcggttccttcttggcttctgttcttttcttttctcggcggatccggcaccgacccaacggccctttggttggttctttcggcggaatcgctggtcctttctgtgctggcgatttgtgcggcgactggtagtttggttcgggcccattcttctggtgatcaatggctgacggggaggatattcagccacttgtgtgtgacaatggcactggaatggtcaaggctggctttgctggtgatgatgcgcccagagca

SEQ ID NO: 300032 - DNA, 308 bp, Zea mays
tcggttccctagagcagatccatatagactctagagtacattcgagggggaagcgagcagatcgatggcgatggcttagaaggtgaaggagaagattcttatgcttcgcaacagcgacaaccaggagttcgaggggaaggagtcggtggcgatgcaatcgatgacccttaagaaaatggtcgaggaccggttcgccgacaaaggcattccggttcccaacgttaccttccacattcttgtcaagggcattgagtattggaacaagcacgcccagcccaccgggccgggcgacgcggtcggcaccaaca

SEQ ID NO: 300033 - DNA, 345 bp, Zea mays
tcggttatgggtgcaggcactgaggaaggagcccttgaccgtttatggtgatggaaagcaaaccaggagtttccaatatgtttctgatctggcaaggctacctttacttaacatatattggaaaaaaaataagagacacttgattcaacatcactgccagagtaccagatttgattttttttccggtggcttaatggcctatccagcaagtgggatgcttgaactattcattacaagggaatctattattctttgcattcattggactgatttgtgggtcttcttccaagtcgagggtctgatgaagcttattgaaggcgagcatgttagaccatttaacctggg

SEQ ID NO: 300034 - DNA, 263 bp, Zea mays
  unsure (1)..(263): unsure at all n locations
tcggtcggttcaaatccattcatcctcgtttgcttcgtcccggaggattttaaccccatggccaagatcaagaacgggatcaatgggttcggcaggatcggaaggctggtggccagggtggcccttgagagggaccatttctagctcgtcnccccggaccaaccctttattagcaccgactacattacctacatggttcaggactgcactttgtacggaccggggaagcaccatgaaatccaggtggaaggcttcaaaaccct

SEQ ID NO: 300035 - DNA, 357 bp, Zea mays
tcggcacaatagtgtaccaacaatggcagctaaaatattttgcctccttatgctccttggtctttctgcaagtgctgctaccgcgaccattttcccacaatgctcacaagctcctatagcttcccttctttccccgtacctttcaccaacggggtcttcggtatgggaaaacccaattcttcaacccttcaggatccaaccggcaatcgcagcttgcattttacctttattacccttggtccttcaacaatcattaggcctattacagcaggtacctttggggcatttattggcacaaaacattaagggacaacaacttccacaacctgggcttgcaaaccctggttgcctacttta

SEQ ID NO: 300036 - DNA, 309 bp, Zea mays
gaagcccatactatgtccgatccagatcccccaattgatctactatgggtggcacaccatttcccctacttatggtgatcaatgtttcttaatttcatgataaccccaaaacctatgcttaatgcttaaaatgctatataaaattgagcttattcccacataccttgcatcaatgatacgcctaaccatgggaaaacccaagtcttccaccctatgatcttcaacacgcaaatggctcaagccacatacccttatcacccttgtttcaacaatgcccaaccctatctttggcgcattcattgttacaaa

SEQ ID NO: 300037 - DNA, 349 bp, Zea mays
cgggttatgatgggctcatcttcgatcaaggccgagctttttttcatgggaggcttgtaattcttaaacaagttggtcctttatatcaataagaagaccctcattttttccatggcgcttcctgaccctgttaagaacacgtcccgcccgggggtgaagtacggcaaggaccctcgccctacggaacttgttaaccttttggtcctaaacggtgaccaccgtcaggagtacaaggacaggtaggatcaagccgtgttcaataatatggacagtctcatcggccagttccaggtgaagggccatattccttggatccttgcgcaaatttaccgtgttcgaaaccgggagc

SEQ ID NO: 300038 - DNA, 347 bp, Zea mays
cgaagtaattaattggagctacattgagttgattggttaccaggatggtgcggatctcactgagaagaaacctggtggaattattgcccttctggacgaagcttgtatggttgccacatcgacacctggaacatttgctcacaagactggtcaaacttacaaaaatgaacagcgctttgctgaaccaaaattatctcggtcaggcttcaccatatcccagtaaggtggacatggcacctatcgaaccgcattatttctggacaaggaccaacattatggtggtggcgagcatcaaggcccgatgcgggggttaaaatgggcaattgacccaggcccttaccgttttc

SEQ ID NO: 300039 - DNA, 284 bp, Zea mays
tcggaggcctgctgccttcttgacacaacaacagttgttggcggtctacgcttgacgctattcctaacgctggcacccttttacaactgcaacaattggtggcattcaaccaacttggtttgacaaactcaacagtgttctaccaacaacccatcattggtggggccctcttttagaatggttatgaggtataggtcaataatggaggtttttggatgatgtttggggcgttccaaaaataagaaaggtcatttctaaaaaaaaaaaaaaaagggggggcggtt

SEQ ID NO: 300040 - DNA, 260 bp, Zea mays
tttccaacaagcaacatacaaaggggaatccattagcaacaatagagcaacaatggccaccaagatattttcccttcttatgctccctgctctttctgcatgggtttctaacgccacaattttgcctcaatgcttacaagcttctatagcttgccttctttccccattccgtacattaacgttagcgtaaatattgtaaaacccagctcttcaaccctatttgcttcaacaagcaatcgcatcaagcaacatacctttat

SEQ ID NO: 300041 - DNA, 342 bp, Zea mays
gtccttccccaccggttcgtgttcaggttctggttcctgggccaaaaggaagagattgcggcgtccgacctttaattcccgttgtttgtttgggggcctggcttgggccaccgacaaccactccttaaacaacgctttaagaccttccgggagggccctgaggtcgaaaaccatcctggaccgggagacccaaaggtcccggggtttcggtttcgtaaccttttcaacggaggacccattccccacggccatcaagggcttgaacggaaggagcttgaacggcccaacataaacggttacaagggccaatcccccggccgcccttgaagccgccgttgccga

SEQ ID NO: 300042 - DNA, 322 bp, Zea mays
tcttttttcgccacaggcaacaccacccgccgaggcgacccgacaggcgtcaggaggaaggaattaacttactgccagccagtgaagggggagaagtgtactgctccgtcatccattgcgcgcaccgaccggcagggcttgtcattttgtcgacgaccagtggattaattggcatggcgggttttgccacttcagaccttgtagcaacccccgtccgacttggcgttccggacgcgttctcattacgaccaagttgccaacttggacaacaatggtttggacattttaacctacaaaccattgttacgcaacaggaacaaca

SEQ ID NO: 300043 - DNA, 363 bp, Zea mays
tcggtcggagccaaacccttcccagcagccgtcgtcgccaccgctgcagcgcggaggcgaccccccatcggcggcaagatgcagatcttcgtgaagaccctgacggggaaaaccatcacgttggaggtggagtcctcggacaccatcgacaacgtgaaggccaagattcaggacaaggagggcattccgccggaccagcagcggctcatcttcgccggcaagcaactcgaggacgggcggacccttgccgactacaacattcagaaggagtccacccttcacctggtgcttcggcttcgaggtggcgccaagaagcgcaagaagaagacgttcaccaagcccaagaagatcaagcaccagccc

SEQ ID NO: 300044 - DNA, 333 bp, Zea mays
tcttctagatcgcgagcggccgcccttttttttttttttttttttttttactcgcaatataaaattaccgatcggttcttaacttcacacgcaagcaattagttcatgcgcttattaggttgtgccactggccaccacttcacttcatttcacttgcacaagcaagcagcttcacatacttgtccattttacattaacgaaacagcattttttagaagatgtcccaacatttttgcaccacgcgcgagatcaggggcccttcaagccgaactttttagggggcgggcacgttcttcttggcgaggggcgcgatcttcttggctttgacccctt

SEQ ID NO: 300045 - DNA, 378 bp, Zea mays
tcgagcatacctacttttacctgttgatccaggttgttcttttccaggcaacgcttacattatgctgtccataagggaattccattccacaaatgatgttaagcaaatattccatcatatgttagaatggctgaaacacatccccaaatttgattcttcattcgctcattatgatgttaaacctggtaatggtcctattacctggcgttaaagacaagcacctgttgcaactttaatggattttggaagggcaaagccctccaaaaaggaaattcggtctcgttttaaggaatacaagttcaagaattggccacttagcaattctctttttcttaacgggccccttaattattggacttgcccaagccttcccatttt

SEQ ID NO: 300046 - DNA, 280 bp, Zea mays
gggttttgctgctcttcgaccccgagcttcgaaggccgcaacatcaggcgagggccccctcgcgtgtgaccgagatggcgcttccgaatcaagggaccgttgattaccccagcttcaagctcgtcatcgtcggcgatggtggaactggtaaaactacatttgtgaagaggcatctcactggagaggttgagaagaaatatgaaccaaccattggtgtggaagttcattcgttggattttaacactaactgtggttagaacaggttttactgctgggatac

SEQ ID NO: 300047 - DNA, 295 bp, Zea mays
cagagataggcgtcttcgtactcgcctaccttcgcgggttaaaccttttccccttcttccaatttccggcggcggttcattccgtaacgcgacaccatgagggagtgcatttcgatccacattggccaggccggtattcaggtcggaaacgcgtgctgggagctgtactggcttgagcatggcattcaggctgacggtcagatgcccggtgacaagaccattgggggaggtgatggtgctttcaacacctttttcagtgagaccggggcttggaagcacgttccctgtgctgttt

SEQ ID NO: 300048 - DNA, 263 bp, Zea mays
ggctatcgcagcaggcattttacctttattacccttgttccttcaacaaccgggaggcctattacagcagttacctttggtgcatttgttgggacaaaacattaaggcacaacaactacaacaacttgtgcttggaaaccctggtggctacttttaacaacagcagtttctttcattcaaccaaatggctgcattggaccctgcttgttatttgcaacaacaacttccatttaacaaggaagctggtgactacccccagcaat

SEQ ID NO: 300049 - DNA, 202 bp, Zea mays
tcggttccttccgcggactaggtttttctgaagattcggtgatggcggccaccatccaatccgagaaggcgcgccagatctttgacaggcgcggcaaccctacagaccaggtcgacccggtttgcttagaccgaacctttgcaagggcagctgttcccagtggagccttaactggtgtatatgaagctcttgaggtgaggga

SEQ ID NO: 300050 - DNA, 204 bp, Zea mays
tcgggtctttagaccattagctttatttacttcagagcgcagaagaacccgatcgacaccattagggtggtggttggtggccttgcttttctgggttttggttggagggccaacttcaagcattccaagggggggttggggttgcaagcaaccgcggccggttaatttacggccgcgggggcatttgcaacttccggttaactt

SEQ ID NO: 300051 - DNA, 367 bp, Zea mays
tcgtcccggccgacacgccgggccggccgtgcgtttccttttgtcttcgcttgcttcctttcgaaaggccttgcgtcacactcggcgatcgatcgagtctttccggatttcagagaggcccaactggcgaagccatcaatcgccgccaccttttcgagcagaattgttgataaaggctgacgaggatatccagcctatcgtatgggacaatggcactggaatggtcaagggcggtttcgctggggatgacacgccaagagctgtcgtgcccagcaatgggggaagaccacgccacaccgaatttatggccggtatccgccaaaaggatgtctacgtcggtgaagaggctcaggccaagaaaggcaag

SEQ ID NO: 300052 - DNA, 459 bp, Zea mays
tcgtctttaacgactagattggctagagagatcgcgatcgtggtagctgctggcttgtgatcgagacgagcaatggcgttcaaggcgtttgcgctggtcctggccgtgaacctggtggtgctgggcgtagccagcgcctgcttgccctactggccgaccccgaccccgacccccttgacgccgacgacgcccacgcccacgcctgttttgtgtggctggtgcccccgtgacgcgctcaagcttggcgtgtgcgccaacctgctttgccttattaaggcgaaggtgggttttccttttctttatcattttattttactgttttctatattatcttacttctttattatatttttatattttatatctttttttctatcttttaatttaattcttttctatttttattaattttttatcttatttttactatttcatatatatataaatgttcttttttat

SEQ ID NO: 300053 - DNA, 220 bp, Zea mays
tcgggcacttattcccaggttcgcctacaggacccacgcctaccaagcgcgggagcagggggagcacgagagcctgcaccgggacatgatggtcggcttcggcaagtggagctggagcccgctggagctggaggacccggttcccgacggcgacggcaaggtgcacctgtggcaccgcgccgaggaccttattgtgcccgtggggctgtcgagggccctt

SEQ ID NO: 300054 - DNA, 469 bp, Zea mays
ctaaagtggaggaaggacgccggctggaccgccccggcagaattggcgggacccaccacgcctttctatcttacggttgtctgcccgggaaaggagccagaattcgttggggatgtttcctgtgggaacactggtgctatgggtgggctggatcagatcattaccaagaatgctacacttactaatgagaaggggactggcccttggccaattagagcaatgaaattcttccgcttttctggtgggcctggtgcttgtcaacgccagggtgccttttacccttccaagcttggcgaaaggttgaaacggtttaccaaagtccatcctattggtttcttggcaaaggaagaaatttgtgagcatattaatggttgagcttgggagccttaatttgagaattggctggaggaacttcaagagggcctcattggtggggcttaaaatattggtttcccacccggcggtttct

SEQ ID NO: 300055 - DNA, 203 bp, Zea mays
cattgcgaccacagacagtgcgcgctctaagggcttttttttttgagataacaaggaggagaggaggagattgccgtcactatcacctgggtgaaggctaggcaaatcttctacaggcggggcaaccccaccgtcgaggtggacgtgggccttaacgaccgcaggtaccccaggggggccgtacccagcggcgcattcactgg

SEQ ID NO: 300056 - DNA, 409 bp, Zea mays
tctatctgcgtacaccggcttcctttttctgtcagtagtagagtgagagtgaggcaaccagtgggacacaaggggaaattgggaagggagcccaagggaaccattctgccgcttgccggccgcaaagtggatgaaaacattgctgccttgcttgctgccaagaacacccttaagatcatgcccttcaagcttccgcccgtcggaccttattatgtcccctttcgcattaaagcaattcggatttgcggcagcgatgtgcactacctaatggagatgctcattgagcactctgttgtgaaagaaccgattgtgaaccggcacaatttcccgggcttttaataagacgttttccccctcttgtcggacctcaacctgtgctcacttgaagggattcaagccaacattagct

SEQ ID NO: 300057 - DNA, 358 bp, Zea mays
tcgagaccaacttgcaacatagaaagcacaatagtgtaccaacaatggcagccaaaatattttgccttcttatgctccttggtctttctgcaagggctggtaccgcgaccatttttccgaaatgctcgcaagcttctatagctttccttctttccccgtacctttcaccagcggggtcttcggtatgtgaaaacccaattctttaaccctacaggatccaacaggcaatcacaggtggcatcttacctttatcacccttggtccttcaacaatcatcaggcctattacatcaggtacctttggtgcatttattggcacaaaacattaaggcacaacaactacaacaacttgtgctagc

SEQ ID NO: 300058 - DNA, 284 bp, Zea mays
tcgaagcggcagtgcgtagagaggatcgtcgaacagaacagcatgaagatggtcatcggtctcgtcgtgtgcctggctctgtcagctggcagcgcctttgcaatgcaaatgccctgcccctgcgcggggctgcagggcttgtaccgcgcttgcgcccgcctgaccaccattattggcgcccgcgggctgtacccctaccccgaggtcctgaggcagtcccaatgcaacccgttggccgtgggtccctactactcctggtgttggtagaccagctccattgtcca

SEQ ID NO: 300059 - DNA, 307 bp, Zea mays
tcggccaagtgccacccccgccatggcaaggacatggcatgcttgcttatgtaccggggtgatgtggttcccaaggaccttaacccttctttggccacaatcaaaaccaaacccaccattcaattcggggactggtgcccgacttggttcaagtgcgggatcaactaccaggcttccaacgttgttcccggcggggaccttgccaaggtgcaacgttccctgttccttatcttcaacttcaccagtggtgtggagggttttttccgcattgaccacaagttcgacctcatgtaccccaagcgcgcct

SEQ ID NO: 300060 - DNA, 385 bp, Zea mays
tcggcaacttgcaacatagaaaggacaatagtgtaccaacaatggcagccaaaatattttgcctccttatgctccttgggctttctgcaagggctggtaccgcgaccatttttccacaatgctcacaagcttctatagctttccttctttccccggacctttcaccagcggggtcttcggtatgtgaaaacccaattcttcaaccctataggatccaacaggcaatcgcagctggcattttacctttatcacccttggtccttcaacaatcattagccctattacagcaggtacctttggtgcatttattggcacaaaacattagggcacaacaactacaacaacttgggctagcaaaccttggtggctacttttagcaacaaca

SEQ ID NO: 300061 - DNA, 388 bp, Zea mays
attagatccaacagataaaggacgatggctctccacaaggtaattcaaaatcataagacttcttaagcttcctagcctctctacaagagcttatttggcgaccagtttctggcaaggctccccaggtgggaacgcttccctttttgccccgcacctcttaccaattgtgtagccggcatgtgaaaacccaagtcttcaaccctattggctccaacaggccatcgcagcttgcatagtacctttatcacccttggtccttcaacaaccaatagccctattacagcagttacctttggtgcatttaatggcacaaaacatcttggcacaacaactaccacaacctgtgctaggaaaccttgctgtccacttttaacaacaacaggttctt

SEQ ID NO: 300062 - DNA, 415 bp, Zea mays
gtgccacttattttgctagctcagataattttccaagttcttcaaattggatgcaatttctggatggcttgggcagcaccaatatctgaaaatgtgaatcctccaatcagtagtttgcagatggtaaatgtgtactttgcattagcaattggtagctcattgtgatttttcattcgatcacatcttcttggcatgaacggatgtaagactgcttatattctatttgagaacatgcacaactgcattttccgagcaccaatgtctttctttgacttcacacctagtgggcgaatcttgaacagagctttcacagatcaaagcacagtggatacaagaatttttgacctgatgggctatcttctatttcctgctattgagattctaggaacaggtattctgatgtcacatgttgcat

SEQ ID NO: 300063 - DNA, 186 bp, Zea mays
tcgcgcgttggattcggttcacaggatcctctgcgccaccgcaaccgtgtgaccggccgtgccgccggcgattccgattcggcgacccgtgccaggcccggtcgcagacatgttgccgtcggagccgacccgggaggagagcgtgtacatgggcaagcttgcggagcaagcggagcggtaccagga

SEQ ID NO: 300064 - DNA, 324 bp, Zea mays
tcggtgacgcctgggttcaccctgttatttcaagcattacttgaagcttcaaggatccttaaccttaacaacaacccatactttttcggaccataccgggaggacgttggggtcttcttgaacgactggcacaccggccctttttcgtgctaccttaagagcaactaccagtaccaccggatttacagggacgcaaagaccccttttttcattcacaacattttctaccaggggcgggttggcctcttccactaccccgagctgaaccttccggagagattcaaggggttctttgatatcaaggtcctctacctaaaacccctt

SEQ ID NO: 300065 - DNA, 312 bp, Zea mays
atctagaagcgccccttttcctctctatctctatttttgacgggcgaagcttcggaccccaatctaatcgacaccttgccgagatggggccccaaggtcttcgtcgggggcaactgggaatgccatggaaccacagatcacgtcgaggagattggcaaaaccctggatggaggacagggttccccttcagatgttgtggagggcggtggcaggccttcctatggcttcctttccgtgggcaagagccagctgcgcccagaggttcatgttgcggctcaaaactggtgggttaagaagggaggggctttcacc

SEQ ID NO: 300066 - DNA, 363 bp, Zea mays
cacccaagcgttttgtcaagagttcttcttggtaggcaaggcaaaagcagaagcaaaaaaagaaaggccttgttgcccatggggagcttagggttcttgtggacgctttcggaccaccccaagcttcccaaggggaaacccgtggctttcgtcctgcttgaccgattgggccaggcccacccccaccagtacaactgcattcatgttgctcaaacttctgtcatggacttgcttaagaatggcgcttctgagaaatggagacttgtgaaggcttatggaacaactgtgggccttccatcttatgatgacatgggcaacaatgaagttggtcacaatgcacttggtgcttgtccaattttcgcc

SEQ ID NO: 300067 - DNA, 307 bp, Zea mays
  unsure (1)..(307): unsure at all n locations
tcgcagggacgtagtcaacgcgagctgatgactcgcgcttactaggcattcctcgttgaagaccaacaattgcaatgatctatccccatcacgatgaaatttcccaagattacccgggcctgtcggccaaggctatatactcgcccacgcgttcggtagcaggagcgcatccagcaagcttaggcccccaggcctactggcaccgngccgaacgccatggccgagccggcagagcaccgtccaacggatgaagaggaggccccggcggcccgcgaggattaagacaccggcgcccaggtcgcgccca

SEQ ID NO: 300068 - DNA, 278 bp, Zea mays
tcggcgagcgggcggcctttttttttttttttttgtgtttttttaaaggttgggggaaaaccaaaactttattatgatgcatttttttttgggcataccacacatgataatggggggcggcttactggatttttacattttttgattggggggggtgggttggggggatttcccaaattttatgaatcaatagtagggcggaatggcagcggaaaccccacaggggttggtgcgggtgcttggcaatcctgccccattttccaagcgttcccgcatcg

SEQ ID NO: 300069 - DNA, 239 bp, Zea mays
tcgaggaagtcggagcgcactgatgttgctatatgtagaggtgagcagctctggccgttcccctatgaccttattcaacgcgaggtggaaagatattcaaatgcccagaaccggtggtggccaaagggggccgttaacatgggagcattcaggttcattaacccgcggttggttaccgcgattaaaggtcttggcccgggtggcattgaagacattaagagccttgggagggccccgtt

SEQ ID NO: 300070 - DNA, 429 bp, Zea mays
tctttcggagcattcagaaacacaccaaggggagggctctttcaacaacctggcgaacaatggctaccaagatattatccctccttgcgcttcttgcgctttttgcgagcgcaacaaatgcgttcattatttcacaatgctcacttgctcctaggtccattattccacaagttcttccaccagttactttaatggccttcgaacacccagctgtgcaagcctataggcttcaacaagcgattgcggcgagcgtttttcaacaaccaattgggcaattgcaacaacaaaacttggcacatctaaccattcaaaccattggaacccatcagctacaacagttcctaacaacactgaagcacctatgcatggcgaaccctgtaaactaccttgcaacagcttctgcttggattcaacccacttttctttgcc

SEQ ID NO: 300071 - DNA, 376 bp, Zea mays
tcgttcagatgccctgcccctgcgcggggctgcagggcttgtaccgggctggcgccggcctgaccaccatgatgggcgccggcgggctgtacccctacgcggagtacctgaggcaggcgcaatgcaacccggttgcgggggcgccctactacgccgggtgtgggcagaccagcgccatgtaccaaccggttcggcaacagtgctgccagcaacagatgaggatgatggacgtgcaatccgtcgcgcaacaactgcagatgatgatgcaacttgagcgtgccggttgcggcagcaacaacctgtacgagccaacttttatgcagcaacaacaagagctgctggcagcccaaggtcttaaccccatggccatgatgat

SEQ ID NO: 300072 - DNA, 228 bp, Zea mays
tcgcgttgatgctggtcttgatttagcatcacatttcataactcgcttgcggggttatgcgagtttctgtcgaactctggcgagccatgtgggaccatcttctaccacaagcacttctagaaatatggttacaagtccaacaaacaggtcttcttcgccatcaaataatcaagggaatcaagggggatcaacatctgcaacagggaactcacaaatgcaagagtgggt

SEQ ID NO: 300073 - DNA, 368 bp, Zea mays
tcgtttttgaggatttaaaaacaaaaaaagtgaagcgcgctttcaacaaccctagagctatggttaccaagacattatccataggtgcgcctattgcggttcctatgaacggaacaaatgctggcagtattccacaatgatcacttggtcctagtttaattattgcacaagtcctcccaacaggtactgtaatgggcttccaacaacgagataggcatgacttttggccacaacaagcgactgcggcgcagcgtttacaacaaccgattgggcaaatgcaacaacaattcgtggcacatttaacaatacaaaccattggaacgctacagtcacaacagtttctaccaacactgtggcatctagtcatg

SEQ ID NO: 300074 - DNA, 352 bp, Zea mays
ttgtaggcttgcacttataaagttctccaaggggaagggcaccctcatcatcagaaaattcggagacctcgagccaggtaactactggtacaatgtctgcgagggtgaggcaaagcatttgctcagcccattgccctgggtgattcgctggacttcaagcttgatgcacattggtgatgatatcctctcaaggatgcaaccagactttgattcggtccatatcgatgccaaaggtgaggacctgagacagaaggtcgaggaagttcttggtggaaggccgcaagtgtatttttcaagggttggggtcaacaaggcattggttgagtcacttaaagaaaagtgcattgggcat

SEQ ID NO: 300075 - DNA, 238 bp, Zea mays
tcggcgaggcaaaagcattgggaccacagacagggcgcgcttcaagggctttttttttgagataacaagggggagaggaggcgaatgcggtcactatcacgtaagcaaaggcgaggcaaaaattcgacaggcggggcaaccccacccccaaggtggacctgggccttaactactgctgcgttcccgaggggggccttacccaacagaacattcaattgcatatatgaaggcctggaat

SEQ ID NO: 300076 - DNA, 331 bp, Zea mays
gttctagatcgggagcgggcggccttttttggtttttttagataagtaggtgattatcaaaatggcattattattaaggaaccggaattacatcacattacaaatgtaccttcagcttggaagggaatgaaaggacaagtgtgacgcacgagcaaatgccaaatcagcgtgaacaggacgggggtaccggtcacctatttataggcacaggacacaggctatgcaaaattacattcatgccctttacatttgataataattctataagaatctatcgagggctgaataggcctttcatctttaaggcggtttcaatttttggtaccacgcc

SEQ ID NO: 300077 - DNA, 269 bp, Zea mays
tatccgtgttccccccgggcgatcgatcgatcgcgggtaaccttgccggcggcccatcgaggcagccatggcggagatggccgaacggtccgtcgcgggcgagctgccggaggagccgcggccgccgcacggggaggaggacgacgaggaggaagaggagggggacgtgtgccggatctgccgtaaccgcggcgacgaggaccaccctgtgcgctacccgtgcgcctgcagcggaagcatcaaattcgtgcaccaggactggcttcttc

SEQ ID NO: 300078 - DNA, 247 bp, Zea mays
ttagggttaggaaagccggctcgccggcccgttccggtactgcagtgtcggcccacgcctccggctttcttcgcctctcgagtctcgtccacccgtcgtcctcctagctcctctactcgccagtcgccatgggcaagattaagatcggaatcaacggcttcggaaggatcggcaggctcgtgggcagggtcgcccttcagagcgaggatgtcgagctcgtcgccgtcaacgaccccttcattaccac

SEQ ID NO: 300079 - DNA, 346 bp, Zea mays
ggttcgcgtggggttctagatcgcgagcggccgcccttttttttttttttttaaaccaaaactctatggttaattttaaccttgaaagtattatatttataaggaggacaacgcatgtggcacagatgggcttttcagaactaattaaagtatcacaaccttattgaagcatgcatgcatgcatttgccagatttggaagaaggtttattcccacaccggcaaccccacacattcggtccaggaactaatacccaagttttacaagaccgttgtattcaccaaaaatgctttcattgatttttaaaacaagaaccaatatggactattatgaggcgaacattccgc

SEQ ID NO: 300080 - DNA, 200 bp, Zea mays
ttttcttttgcttcggctttcgagtcttgtggagccgtttttcttctagcttctgtactcaccagtcaccatgggcaacgatttagatcgctatcaacggcttcggaaggatcggcaggctcgtggccagggtcgcccttcaaatcgaggatgtggaacaccaaggcgggctttccccgatattaaaaacgcctaaaggg

SEQ ID NO: 300081 - DNA, 126 bp, Zea mays
cggtcgcgacttcaaggtcatcacccaccgggagacggggaggtctcgcggcttcgggttccttaccctcttcttcgagaacttcatgcttgaccctatcgagaacatgaaccgcaaggagctcga

SEQ ID NO: 300082 - DNA, 249 bp, Zea mays
tcgtcttctcaatgtctttggttttacagaacatgttccaagcaaccatcgagacatcattcctggtgcttgagtactccattagccagcttattaacaaccgccacgttctggccaaacttcaaaaagaggtgaggaccgcgacccccgaccgccgcattgtgattgaggaggaccttaacccgattccattccttgagggcaccattaaggagtccattcgcattcaaccggcggcgccgtttcttc

SEQ ID NO: 300083 - DNA, 246 bp, Zea mays
ttttattcagtcagtcagcagccgcaaccttgggcaatctccaaagcagcacacgggtccacaacagcaccccgcctttttttcttcacgtgcgttgcgtgccctgcccccatggagacccttctggcttgcaaccccgccaaccgcgtggcgaaaccgacgtgcaacggcgtcggcgcccttgccgtgggcaacttccacgccattattggcacgcccgcggcggcttcggcgacccttgccccg

SEQ ID NO: 300084 - DNA, 265 bp, Zea mays
cgtacgcgtgggtttccacgcttcaacgtgcgtcggttaggttcttgggaggtgggggtgtctccgggattccccgtggcattcacccgcgtcttcccccacccgcgcctagccgctaaggttcgcgcttaaaccaagagcttcggcggccaagaccaatcgaccattgctacccgtattcaatttgagaacaactgtgaaattggtggtttctccaagcttacaaatgcttactgtctggttgcgattggtgggtcagagaact

SEQ ID NO: 300085 - DNA, 308 bp, Zea mays
  unsure (1)..(308): unsure at all n locations
tcttattcccgattcgtcacgaagccccactgggagagagggacccggcccgttgtccccctcttgtacgcaatcctttcgtcgctgcgaaattgatcccttatgttccccattgcccccagcgttatcgttgaaaaccttaaccccaaagtcttgaaatgtgagtattcagtacctggcgagattgttattcatgcttaaagcttacatnaacatcttcaaacacaaccagggtctctttcttttgatgagatcctttttttgaacatttcgaatcctcaatccctttgtcaattaccttttaagtt

SEQ ID NO: 300086 - DNA, 339 bp, Zea mays
tcgggtgtagccatataatggttcagaactgactttgatcacgggtacacctctttctgctgcggagccagtgctgggagcggtggcgattggggcatctggtgctgatcttcaaatttggtggtcactttgatctcgaggagacgctcaacaggctggctgcagatgggacaccgagtggtttggtaccttaagaccttggcgcactcactggacatgcacatattcctacatgggagggcaggagtattccttggttctgagaggcaaataacacaatcttttcctggatcaattggattaacattaaccttcaaggagttccctatgccatatatt

SEQ ID NO: 300087 - DNA, 248 bp, Zea mays
cttctggctggttgtcctaccattttattggcagggcaattcaagatggattcccagatcccggaattttcattaaaatacctttattaagggccgcttacaaatagggagaggggtggttaaataccctgtgaaacccatttcaaagattcacctattggaccctatattttttaccaattggcacaatggccggaggcttataaggggggggcattttcatattaaaatattcattaaacgccatt

SEQ ID NO: 300088 - DNA, 288 bp, Zea mays
  unsure (1)..(288): unsure at all n locations
gattgatccctggtgggtggaccgcgtggcaaggtcaaccagtggctgggatggcctcntcngcgtccgcgccagcgttcacaggcccgcgcttcgccccggcggatccgacgctgtccaagccgtggagggggcttatccacggcaacaccgggtacctctacctctggaacccggagaccaaggtttcccaattcgagcgtcccgtcgcttccgtgcccgccccccaatcccagccggttgtctacttcaggccccatgattggccgataagccacgcacctggcc

SEQ ID NO: 300089 - DNA, 396 bp, Zea mays
tctggctccttccagttcccaccagaggggaaaggatcgctttctccaagataggcccggtgtcttccgttgcccctcttgggcttggcttggcactccaaggcacacccccgtcggccccggcgaacattgtgcctctattgaactccactggtgaggtcgcttgcttttcaaatgcgatccattaccgttttttgttatgggggccccttttttggaagctatatttttgattttgggtgattttacatctttatcccccttttaaaaggttggatgggaggccaatcctgtcccccacgtttggcatcttattgttccattcggtggcctcaaattttttgcttccttgggttccgattggatcttttcttgcaaaggattttggtccctttt

SEQ ID NO: 300090 - DNA, 355 bp, Zea mays
tttttggaatgcaatttctagcactaaaggtggtaccttcttttaatccaggggatttgaagttgatgttttggatgtcgacccaaacgggttacaaattccacaaaaaattagcacatacacaattggccctttccaaaccttcaaaggagagaagggcaaactgaaagtgaaagtgcgtttcaacattcatgggaccggtacaggtgattcaacaattatgctggaggatgatggggaaggtccaggttcatttgaaatgaagcttcaaatgatactatgaagatggacacaaatgatgcaccaagtgatcctggtgttggatttgatgtgaatattgcagagccttaaagcg

SEQ ID NO: 300091 - DNA, 370 bp, Zea mays
ttagttctagatcgcgagcgggcggcctttttttttttttttttttttttaaaagggtaaaacgtttaatttggaacaatacttttttcttttcatttcaaatggtcattcaaggcattggttacactgacactggcacccatggggatgcgtgacacattattactcaattattggcggttaatgacttaactagcttgcttgccagcgggtatactacaacacataatttgattaatggaggccgacggcgaaccctactggttgccttaaaggcagtcgttgcggcactaattttgccagaaagttaagcaggtggagccgcaacaccggtaccaagcgatttttggtttgggccttcaatccattc

SEQ ID NO: 300092 - DNA, 313 bp, Zea mays
tcggcggcagggcgtaaagaggatcgccgaacagaacaacatgaagatggtcatcggtctcgtcgtgtgcctggctttgtcagctggcagcgcctttgcaatgcaaatgccctgcccctgcgcggggctgcaaggcttggaccgcgcttgcgccggcctgaccaccatgatgggcgccggcaggctgtacccctacgcggagtacctgaggcatgcccaaagcaacccggttgcggcggcgccctactacgcccgtgaaggcagacgagcgccatgtaccaaccccttcggcaacaatgctgccagcagcaca

SEQ ID NO: 300093 - DNA, 382 bp, Zea mays
cagaccattagctttatctactccagagcgcagaagaacccgatcgacaccatgagggtgttgcttggtgcccttgctcttctggcttttgctgcgagcgccaccttcacgcatacaagcggggggtgggggtgccagccaccggcggcggttcatctaccggcggcggtgcatttgccaccttcggttcacctgccaccttcggtgcattttccaccggcggtccacctggcggcggcggtccaactggcaccgcggtccatgtgccgccgccggttcatttgccgccggcaccatgccactaccctacttaaacggcccgggcttagccttattcccaggcacacccatgcccgtgccaacaggcgcattcaagcccgtg

SEQ ID NO: 300094 - DNA, 416 bp, Zea mays
gacccccggcctttacttctagccgtttacccgaaggcgccgggggggctttatttaccatgatcatgtgcaagaaaaaccggcgcgaggactggaagtacatttttcatgagggggttgtatatgccaagaaggactacaacctggccaagcaccccaaacttgacctggccaacctggaggggattaaacttattccaaggtttaaattcaaagaggattttaaggagacccttttcttgcaggactatacttgtaacttaacaaccattggatttagcaccttcggaactttcttaaacttgcgttagaaggtgggcccaacaaccttaaaaaattcttcaaagccccgttccgttccttttgcttttggccaaccggtggaccgcccaagggttcccctttcttttggggaa

SEQ ID NO: 300095 - DNA, 348 bp, Zea mays
ggggccaaggtgtctttaaacgggagaaaggttgtttgaaaggacttaaaccgggggatttgggcctccaactccaaggttgcccctgccaaggggggtgtttgtttaacctcccaggtaataataatgaacccccctggccgaattgccaatggttttgcccaagttttggactgcccaacttaaacaattgttgtaaagtttgttgacctggttcccaaaattgttggcgatccggcaaggacctggaaaaggagcccaaatttttaaagaacggggatgctggattggggaaaatggttccaactaagcccatggggggggagaccttttttaagatcctccttt

SEQ ID NO: 300096 - DNA, 340 bp, Zea mays
gttagcggaaaaaatttcaaggtttcttgaaagggcttatataccgctaaatgcttggtttcaatgggtcaacagtacacaatcaggtgagtatgaaagcaccctctattggcattggagagacaacattacgaccaaagggttggacccaaagactttgacatttggattggatgactattcttgggcattttattctaatgattaaaaaccccattgtgaccttcggtggtggatgcttctaacttccaaatgattttgttcattggaaaagttcttaaaaaggattgggcttttgagaaaggatactattaaatggtaaattaaactttccaatttt

SEQ ID NO: 300097 - DNA, 273 bp, Zea mays
cccttttataacgaaaggggtgaaagcccggtgccgggaatttagtttaagcacgcggggcacgggttccttgggtttctttccaggaagggcttctcccggcaccgcgggaaggggaaatgaattcccagggatgaccccaaaaagccctggcattttacttgctttcttgggtaccagggttggatgacttacaatggccgcgagggtgtgaaacccggatccaaacttcataaaaaggaaacttgtgagggtggtaccatattgaaaccc

SEQ ID NO: 300098 - DNA, 210 bp, Zea mays
tcgggttcagggaggcaaaccctaccgggccgggacgtttgacgccgacggggggaggttgataatccaagtggaactgcaacacgcctttcaccaagggaaattctttgcgggcattggcaagaaacttaaggggtctgattgatctgcacatacccctcttggaaatattatatttacagacttgcaatgcccggcaatatgatgggc

SEQ ID NO: 300099 - DNA, 305 bp, Zea mays
ctacaactttgttggtcgtttattggggccgcgaggtaactccctgaaaagggttgaagcttcaacccaatgtagagtttacattcgaggacggggttctgtgaaagactctgttaaggaagacaagctgagggataaacctgggtatgaacaccttaatgaacaactgcatgtgcttgtggaagcagagtttccagcagatatggttgatgtgcgtcttaatcaagctgtgtccattctagaggatcttcttaaaccaattgacgagtccatggactactacaagaagcagcaactgagggagc

SEQ ID NO: 300100 - DNA, 350 bp, Zea mays
caagaatgctgcctacattggcacccctggcaagggtatccttgctgctgatgagtccactggcaccattggcaagcgcctttccagcatcaatgtcgagaacgttgaggagaaccgccgtgcccttccggaggctctattcttgtggcctggggctctccagtacaatcagcgggggaatcctcttcgaggagaccctgtaccagaagaccaaggatggcaagccttttgttgatgtcctcaaggagggaggcgtcctccctggcatcaaggttgacaagggcaccattgaggttgttggcactgataaggagaccaccacccaaggccatgacgaccttggcaagcgc

SEQ ID NO: 300101 - DNA, 310 bp, Zea mays
atgtttttttttttaggctctgcagaagaacctagctgctagagaattgctgtgcgagcatcaacataataaaaggatgagctgtcccgtcctggcacagctactgtccaatgcgctggactacaagcgattcttcccatattacgccttcaatgtgctcggtgggcttgacagcgaggggaaaggaccactttttcacctatgatgcaggatgttcctatgagagaacccggtacagaggtcaccgatctagatgtaccatgattacgccagcgctggtccatctacttaaatcaccaattgtgccatt

SEQ ID NO: 300102 - DNA, 376 bp, Zea mays
tttttatcgtgcacctgtggagccctactaaacgggcgggatgcaagtgcttttatgtctgcacaagtcctgtgaaactgtttactgcgacctgcagattttactcttggagtgccctgagtagattttagcaataatatccaacatgtaacatgttacggacatgtacccaaacgtgatccagttttagttaagaaacaccaacaccaaagacgaacgctgtttaatatagatatagaaattacaaggtcttagaaattacaaaaagattaccgggcgggcggcattttaggggccactgtttacttacttgggctttcaaggaaaattttttttttttagggggacctctatttcatttaattggccgtccttt

SEQ ID NO: 300103 - DNA, 333 bp, Zea mays
gaaaaagacaagaaccatgggggtggtcttattcccgagggtcttgtcgagagaattcctttaccatatgctctgcttcaagaaatccaaggccttcatggcaaaggtgcctttgctgatgatatctattattaagttttaaccttggcacatgaacttttttaggtttttcccccttttaataagaagcagctacttttccatccctgaactgatgattcaactcaactttctcagattgagacagagaagcttctagcccaattagtttaaactgagaagaacaaaccttttaaggagggcacttacaaaggaaagaagtttaatgcaatc

SEQ ID NO: 300104 - DNA, 343 bp, Zea mays
  unsure (1)..(343): unsure at all n locations
ggggaccacaccacgcctccgggcagaactccgcgccggcggcgccgccgggggccgtggggcagcaggcggtggcgctgcggctgtccggcgacaagaccatgctgtacaggtgtaggatcctggggacgcaggacacgctgttcgacaacatggtgcgccagtttctttacaactgggacatgcaaggctccatcgacttcattttcgggaacgcgaggtccctgtaccaggtacgcaaataacgtagcagaaatgaattctataattttcttttcttttttttctttttacaactgacgtgttagagcatcttcgaggagactnctcatttttttttttt

SEQ ID NO: 300105 - DNA, 256 bp, Zea mays
tcgctagttctagatcgcgagcggccgccctttttttttttttttttatgcgggaacagactctgaaaagtaggataatttaccaaccaaaaaccggaactttatgttctgatggatccgcgtcacacaggccacaagtttcttcagttcatgtaactttggtgcagccaaaattaatgtcactgcagttgcttatttgggtgtaaagggtttgaacaacaaagagaaaaacaagcatctcaacaggagatggacc

SEQ ID NO: 300106 - DNA, 352 bp, Zea mays
tttcttatgagttatagttcaataataaatctaaaagagggcaccaccaatgatgggttgttggtagaacactgataggtttgtcaattcaagatgtttgttggcatccgtaacaacatagaagagcccagagctgaacgttgtctctgtttgtgttactttatttttttttttgatttttgtttttgtttttttttctttttattttttattttttttttatttttttattttttttttttctattttatattctattattttttgttttctttttgtttttttattaattttattttttcttttttgtttattttttttttgttttatttttttatttatatttttttat

SEQ ID NO: 300107 - DNA, 251 bp, Zea mays
agcttctgtcacgcgtccgggagaaggtggctaagactgtatatgtggaagagcggacgtgttgttgagcgtaaccttctgtctgttgcatacaagaatgtgattggggctcgtcgcgcttcatggcgcattagtttcttccattgtacaaaaggaggtgtcctgttagaacgttgagcatgtgtaccttatcaaggaatatcttggcatgatcgtagtttgtacctgtctatatatgatataggcaattt

SEQ ID NO: 300108 - DNA, 264 bp, Zea mays
tttgtcgatttaaaagcattgcgaccacagacagggcgcgcttcaaggcctttggggtttgagataacaaggaggagaggtggagatggcggtcacgatcacgtgggtgaaggcgaggcaaaacttcgacagtcgcggcaaccccaccgtcgaggtggacttgggcctttgcaacaggagtttctccaggtgggccgtactcagcttcacattcacatgaataaattgggacttgagatttttgtgatagtggatccttctttt

SEQ ID NO: 300109 - DNA, 427 bp, Zea mays
atttctctctttcttgcagcttgacctgcttgcgatggttctactataaaggagtggggctgtactctacaggcccgctatacgcccaattgtccagaatcccagatccttagcctctgatgtactaagtctgcttcacttcccaagttctaccttccctggctaattcccataggatacggaggactgttctcatgaatgtagcgtttagtctacataaacgacgagtcttatcagaacgactactgtgataaccgagtttctaatacaaagcataccttattgaactttgtgccaaaaaacctatgggaacagttcaggcgcttcatgaatcaatatttcttgttgatagcttgtctgcaactatggtcacttatcactcctgttaatcctgcaagtacctggggcccacttatatttatctttg

SEQ ID NO: 300110 - DNA, 203 bp, Zea mays
ttcgtagttttatatcgcgagcggccacccttggtatttttttttacaagagaagaaagactttataatttcatacaatatgcttctcacgaaagtactactacataccatataacttgagctaatacaacaagcaaaccataatcaatccccggtatgaaaggtaacaaggttacaaatgtggcaataaccaaaccaccctt

SEQ ID NO: 300111 - DNA, 191 bp, Zea mays
ttcctatccagatcagcaaagcggcagtgcgtatagaggatcgtcgaagaggacagcatcaagatggtcatcgctctcgtcgtgtgcctggctctgtcagctgccagcgcctctgcaatgcagatgccctgcccctgcgcggggctagaaggcttgtactgggctagcgccggtctgacgtccatgttggg

SEQ ID NO: 300112 - DNA, 243 bp, Zea mays
tcgcagaccattagctttatctactccagagcgcagaagaacccgatcgacaccatgagggtgttgctcgttgccctcgctcttctggctctcggtgggagcgccaccttcacgcatacaagcggcggctggggctggcagccaccggcggcggttcatttatcggcggcggtgcatctggcaccttcggttcacctgccaacttcggtgcatcttccacacgcggtccacctggcggcggcg

SEQ ID NO: 300113 - DNA, 352 bp, Zea mays
  unsure (1)..(352): unsure at all n locations
tcggcagggacataattttttattatatggaagatattgtgcttcaaatttgngctaatgactataataactgtngttgagtacttgaatgtacaagctcgcgagccgagcgagccggctcgcgagcctatatcgagccgagcctctttaccgagctcgcgaagtgactgggccgagcctggctcgtttccagccctagtaagaaagataatctgatggataagcagttcttgaaagatccaagtgaaatcacatgggatattggtgataagaaactcaaggagattgtagcatcaaggggaaagaaaggtcctggaaggttcaagcgtgttgaacaattaacatttttgac

SEQ ID NO: 300114 - DNA, 274 bp, Zea mays
  unsure (1)..(274): unsure at all n locations
acccacccgnccgtgcggtataatctaggcactgaacagcggtgcatgctttgctttgccgagctaanagcgccccctccatgtggccgancgtcgcagagggtgttccactncggcaagggcaagagcgtgggccacaagaacatgaaggagctgctgggccgcaagggcccgaacctggcggagatggcctgcatcgcgctgtccgtgccgccggggttcacggtgtcgacggaggcgtgccatcagtaccaggaggccagtcgcgccctcc

SEQ ID NO: 300115 - DNA, 404 bp, Zea mays
  unsure (1)..(404): unsure at all n locations
tcgtacaggaattggtgctagagcaagaagaaggccttcagcaagtatgtcctcaaatatgacattggcgcaggcaagaaagaaatccagttgcagcttgngaagatgaagaagtncgcttcagttatccgcgtcatcacccacactcagatcagaaagatgaagggtttgaggcagaagaaggctcaccttatggagatccagaggtcaatggtggcactatatagtggacaaggtggactggactacggctacaagttcttcgagaaggaggtccctgttgatgcgctgtgttccagaaggatgagatgattgacatcattggagtcaccaagggtaaggggtacgaaggcgtggtcactcgctgggggttacccggcttcacctaaagactcacaggggtc

SEQ ID NO: 300116 - DNA, 343 bp, Zea mays
gaaaaaaaaatctaaccctagcatccgcagcgctagggttcgggggttgcgatggcggcggctgcgagacatcgggggacggtgaagtggctcaacgacaccaagggctttgggttcatatacccctaggacggcagcgaagatctatttgtgcaccagtcgttgatcaagtcggagggcttacgctcgctcgcggagggcgaggaggtgcagttttccaactttgatggagactacggcccgtctaaaggcggtcctaccaatcaccgctctggctgcattcaataaggtcggcgcttagcttatatttggcgctgacagccctgctattcaggagaatagg

SEQ ID NO: 300117 - DNA, 410 bp, Zea mays
atcgggttctcccttcctcttcctgtttccgcgcgcgagatcgccgccccgggtgggctctagatcccgatggcctcgcgccgccgcaccctgctcaaggtcatcatcctcggcgacagcggggttgggaagacgtctttgatgaaccaatatgtgaacaagaagttcagcaaccagtacaaggctacgattggggcggatttcctcaccaaggaggtgcagttcgaggacaggctcttcactctgcaagaaaggtttcagagtcttggcgttgcattctaccggggagcagaattgtgtgtcctagtctatgatgttaattctatgaaatcgtttgataatcttcacaacctggcggtgagaggttctaattcaggcgagccccatcagatcctgacaattttcccttt

SEQ ID NO: 300118 - DNA, 390 bp, Zea mays
  unsure (1)..(390): unsure at all n locations
tgagttactaaacaagtactactaccttaacggaccggacctaataagcaaccattcctcaagcgccgttccactcactacgggatacactcctagagtagttggagcatatccctccgttgcattccactattgattacgatttccatacctgtccgggaggtgaagcagaggaagggcacccctcgtctatacgatagggaatatatcgatagaaatatcgggaatagctcagttagggtatgtgcggagggagggcattcaattctatgtgcaacggaaagggatgtatttacctgttcataacagcaatggaatacctattcaatatagttatatatatctacttatntatatctacttatttatatctattgattaatatctact

SEQ ID NO: 300119 - DNA, 308 bp, Zea mays
  unsure (1)..(308): unsure at all n locations
gtttcaccagcgacaacaagggcacatgcaaggcacagaaacatcagcggctgctgtgttgtttatgttaaaaagcnaccaccacaacggagggcgccatcaaagcggcaacaacagcaccaacaccaacaagaaggggggggccaacagcaacatgaccaacaatcacaagggcatgggcaacaacacgaacagagccatgagcaacaccaaggacagagccctgaacaacaactacaacaacttgtgctagcaaaccttgctgcctactctcaggaagcagnaggttctttgcattcaaccaacta

SEQ ID NO: 300120 - DNA, 359 bp, Zea mays
gtactttgctggtgacactcatgaagatggttcatttggcaattcatttgagttcacaaaaaacaatatatatggcacccacgttcttcttgaggcttgcaaggtcactggccagatcaggaggtttattcatgtcaggactgatgaggtctatggagaaactgatgaagatgctgaggttggtgatcattacgcctgacagttggttccaacaaattcgcatttagcttcaaaagccggggctgaaatgctttgcatggcatatgggagatcttatggacattctgagataaccactcagtgcaacaacgtgtattggccaaatgagtcccatgagaaacttaatcccaaactcattc

SEQ ID NO: 300121 - DNA, 381 bp, Zea mays
ttgtggtgaccaagtgaatgctgctattcggcgccctaataatttaactccttgctattccttttcaaaccaagcacccaaaccttcagtgggtctctcaaatgatattgttagtatgtacaccgcaagggaaaagggaaaggtgatcgtcacaaatagtggttcagaagcaaatgactcacaggttaaactagtgaggtattataagaatgcactgagaacgccagacattaagaaatgtattggtggctcaaaatcctactatggatcaaccttgattgcagttagtttatcaggtctgccagctctttatcagaagtttgatttaatcatatcttttgtttctgacacagactgaccttactactggtgattcttttt

SEQ ID NO: 300122 - DNA, 440 bp, Zea mays
  unsure (1)..(440): unsure at all n locations
tcaacgcgtctcgctcaacaaggcanatcatagaaagggtggaatccagtgagcaacctaatagagcaaccaagtgtgcgaccacagatattttcccttccttatgcgtccttgctcttntctgcatgtgtgtgctaaccgcgacaanttttccctcaatgtgtcacaagcgtcctatagcgttcccttcttcccccataccttccatcaatgatagcttcagtatgtgaaaacccagctcttcaaccctataggctccaacaagcaatcgcagcaagcaacatacctttatcacccttgtttcaacaatcgccagccctatctttggtgcagtcattggtacaaaccatcagggcacagcagctgcagcaactcgtgctacctgtgatcaaccaagtagctctggcaaacctttctccctactcttagcaacaacaatt

SEQ ID NO: 300123 - DNA, 350 bp, Zea mays
tttctcctttcccggagagtggatccgccatgccaatctgcaccattctgagggaaacctagatccggactcctagccgtcggccatggccacgcgccgggccctctcgtccattctccgctccgcctctcgcattcgctccgcctcaccgtccccatgcccgcgtgcgccgctccaccaccgcccgtcccccgcgggcttcatactcaaccgtgtagccgcctacgccttcttcgccacggtccaggccgtgcccgcttcgccaccttctttaaccggcaagaaaaccggtggcggcaagatcaccgatgtgttcaccggcgctggctccatttgtcatgtgtgtcagg

SEQ ID NO: 300124 - DNA, 444 bp, Zea mays
tttctcttcgcgggccttccccggacgtcgagcaaccttctcaaaactggtgcggacaagaaaaatcctactgtttaattaaaacaaattattgcgactgttctttagtattcttactcaattttttttttgtccagtgttttttatgttaaattgttaaaatttaatcattctcgttttttctttctcattatctatttatttattaaattattcttattcattttttttttatcttttttatctatattaatatattatctttatttattattttcttcatttttatttatattattaacttattttttatttatcatttatttttatatttttttatctttttaaattctttattatttattttttatgtatttttatttctattttattttttctctattaattattttttatatatatatttatattttttttattaat

SEQ ID NO: 300125 - DNA, 395 bp, Zea mays
gtggcaccatcgctatggacggcacggaggggctcgtccgcggacagcgcgggctcaacactggctcccccatcaccgtgcctgttggcagggctacccttggacgcatcataaatgttattggtgaaccgattgatgagaagggtgacataaagacaaaccacttcctccctattcatcgtgaagcccctgcctttgttgagcaggccactgagcagcaaattcttgttactggaatcaaggtcgtggatcttcttgcaccctaccaaaggggtggaaagattggcctcttctgttggtcacgtgtgggtaatactttgcttaacattgaagttgatcaacattgtttcttatgtctctcgttgtttatattttattcttctacttctaatttg

SEQ ID NO: 300126 - DNA, 141 bp, Zea mays
tttttgggtcttcagaccaatagctttatctacgtcagagcgcaaaagaacccgggcgacaccattagggtgtttcatcttttcactatattcaatttaataaatttagattgttttgttcttaaatcatattaattcttt

SEQ ID NO: 300127 - DNA, 335 bp, Zea mays
ttctagatcgcgagcggccgccctttttgtgtttttttttttttttatccagatccttctccttggatttttccttttctccatccttccccttctctttatctctgtcttcactctctttcactagatcatctactttaacttctagttgacgttcagtggcagaagttggaacattgtcatgtagttcagtctcttgttctgaagtggactcaccagatagctcacggcccttaacatgttgctcatttgattttggttcaacctctcccagtaatacagctggcacaaatgctctgagatcaagtaaagattcataaaaagctttggtatct

SEQ ID NO: 300128 - DNA, 399 bp, Zea mays
ttggaccagaggatgtgcacctgagagccgtcaccaaggccgccgccgctttcggcggccctcgaacgcaccctgttcctatcatcacacgaaccaccatttataaatgcaagaacttctcggtacggggatacgatacgacgacgatccagctgtgaaacgcatgcgttaagttgctagcgtgtgatgtacgtacgatctggctgcaggtcgtggtgttcctgctgcccccaggcgcgaccatccctctgcacaaccacccggggatgacggtgttcagcaagcttctcctcggctcgctccgcgtcacgtcctacgactgggccgaggccgaccaacgtcccgtcgccgtcggcggcgatcgcccactgctgaggctggcgaagctggtgctggacg

SEQ ID NO: 300129 - DNA, 377 bp, Zea mays
  unsure (1)..(377): unsure at all n locations
ttttctgaaaaaagtgtatttgcagaacaaccaatttactggttatatcaatgtcttagccaatctcccccttgaaactttgaatgttgcgaacaaccatttcactggttggattcctagtcagcttaagaaagataacagtctacagactgatggaaattcttggagcacaggaccagcgccaccttcaccttcatacacagngccgncttctncaaaaccattggaatggcgcaggccagaaatgctgatgggtcatcaagttctggtgggagatcntggataggtgggtggagtgtagcangaatcattatatcgttggctgttggtggatcaggtgttgcattttttgtgatcaaaagaagaaaacgcaaagc

SEQ ID NO: 300130 - DNA, 372 bp, Zea mays
tctttgacgcgtgggcttgcgcgtacgcgtacacagtcccgatccgaatcgtcctcctcgcgagcctcgccgatcccccactcccctcccctcgcttcaagatgcagatctttgtgaagaccctcaccggcaagactatcaccctcgaggtggagtcttctgacaccattgacaatgtcaaggctaagatccaggacaaggagggcatccctcctgaccagcagcggcttatcttcgccggcaagcagcttgaggacggccgcacacttgctgactacaacatccagaaggagtcaacccttcatttggtgctgcgccttacgggaggcatgcagatctttgtcaagaccttgactggcaagacaatcaccc

SEQ ID NO: 300131 - DNA, 387 bp, Zea mays
ttgaataagttaagtgatgaagataggaagggtcagctgaaattacatggtggacaagcagttaaagaaaaggactatgccggtgctttaaaattgtacaccgaggcaatcatgttggaccctgccgatgccacactgtattcaaatcggagcttctgccatctgaaaattggcgcagccagggatgctctggttgatgctaatgcttgcataggcctgcagcctgactggccaaaagcttactaccgtaaaggagcttgcctcatgtcgcttaaggagtacaaagaagcacgggatgcattcatgggagggttgaaactggatccttcaaatttggacatacaaaatgcttaccgggaggcagaagaggcgatgatcaaaaatcat

SEQ ID NO: 300132 - DNA, 417 bp, Zea mays
tttaggatcaaacctatttcctctcacatctatctcaatctcagcttagaaggcttcttttcccactaggatgtattacaaaggatgaggttcgcagactggctactcaaatggcccttcctaaccaaggtaggaaagactcacaagggatatgctttcttggaaaggtcaagtttagtgagtttgttgaaagacatataggagaaaaggaaggaatcatactggaagctgagtccggagattacctagggatacaccgtgggttttggttttatacaattggtcagcggcaaggattacggcttcctggaggaccttggtacgttgtagagaaagatgttcaaaacaatgtggtttttgtatcaaggaattattattcattggataagcggaggcgcacatttcgtgttggatcac

SEQ ID NO: 300133 - DNA, 278 bp, Zea mays
tctgccgccgccgctgcagtgtccatagccaccgcaggagactgagatggggggttttgtcaagacccacaagagcaatgcgtacttcaagcgtttccaggtgaagttcaagagaaggctcgctggcaagacagactacatggccaggataaggcttattaaccaagacaaaaacaagtacaatacacccaaatacagaattgttgtgcgatataccaacatggacattacagtacaaatcatttttgcttgtatagcatgttatatggtttcttgct

SEQ ID NO: 300134 - DNA, 395 bp, Zea mays
gaaatctgacccgggccacactccgctgctccgccatggcgatccgctccaaggcctggatctcgctgctgctcgcgctgaccgtcgctctctccgcccgggcggaggaggagcccgccgccgcggcggagggcgaggccgtgctcaccctcgacgtcgacagcttcgacgaggccgtcgccaagcaccccttcatgggcgtcgagttctacgccccctggtgtgggcactgcaagaaacttgctccagagtatgagaatgcggccaaggcactttagcaagcatgacccaccgattgttctcgctaaggttggagcttacgaggtgaagaacagtcaagatgttgagacattccgacaatgcttaattgatgaggattttgctcttaagtgacc

SEQ ID NO: 300135 - DNA, 133 bp, Zea mays
cttcaagaggggatcatcagattgggcttattattccttattactccaggcaaggatcggactttcacttaaatgactgtacccagaaactcacaaagtgagagccggctatactgaatgatccattcctggg

SEQ ID NO: 300136 - DNA, 335 bp, Zea mays
gacaggccctgagaccctgtcagggatgtccggacgcacacgcgcgaaggcgattatacgcctctgtcccgttacaccgaaaaactttggtgaccacacggcgatccggcgcgttgagttcaccacttattctagtcagcacccgcttatgctttcttgcttgacccctatgagagtcgtgtgcccacaacaaggcgtaataatgggccttttggggccttgtttttctgtggtggagtgcatgacgaaagaggaactctttgtccccctcctctctctttgggaacaactgtaccgcgatgtttgcctcacggggacgaaaaaagaactggtgc

SEQ ID NO: 300137 - DNA, 200 bp, Zea mays
cgtacgcgtgggttatgatcgtcgtcaggtcatgctggataggcttatctggagtacacagtttgagaatttcttggcgaccaagtggacgactgcaaaacggtttggtcttgaaggcgctgagacttttgatcctggcatgaaggagatgtttggtagagccagctgatccttggttgtagagagtatttgatcattgg

SEQ ID NO: 300138 - DNA, 249 bp, Zea mays
tcgaaccgcgtggggccgttcaccgtgccggcggcgtccctctccaccttcgacgtcatcagcgtcatggtctgcatacccatctacgacaaagcgctggtgccgctggcccggcgcgccacgggcaaggagcggggcctgtcgcagctgcagcggctgggcgttggcctcgcgctgtccgtggtcggcatggtgtacgcggcgctgttcgaggccaggcggtctgtcgcttgttcaatctatttcttt

SEQ ID NO: 300139 - DNA, 408 bp, Zea mays
  unsure (1)..(408): unsure at all n locations
cggctcggcctgaccgtaccggaattgaattcccgacccaacccacgttattgctttaacacggatggctaacatggtggttgancttgacaagacggcgggctgctccaatcatatttgcagtaaaattttgactggattgagtgggacaccaaggccctaacgaagcgtgatgcattagaaaatgtttaccagtgggcatttggtcgaccaacattactacaggatcgtggtagggatagtgatgatgaacactttcgagatagggactatgatgtggatggacttgctaggaatttaaggccggcgtttaaatattgcatctactagtacgatgatattgaccaggctcaagcatcacttgagcgggatgatcaggatnnanattttgatgatgaatctgaacaa

SEQ ID NO: 300140 - DNA, 404 bp, Zea mays
  unsure (1)..(404): unsure at all n locations
tcttaactagcaacatagaaagcgcaatagggtaccaacaatggcaggcaaaatattttggctccttatgctccttgggctttttgcaagggctggtacggggaccatttttcccgaaaggttggaaggttctatagctttccttttttccccgtaccttttaacaacgggggctttgggattgggaaaacccaatttttaacccttcaggattcaacaagcaattacaggtggcattttacctttatcacccttgttccttcaacaatcatcagccctattacatcagntacctttggtgcatttattggcacaaaacattagggcacaacaactacaacaacttgtgctagcaaaccttgctgcctactctcagcaacagcagtttctttcattcaaccaac

SEQ ID NO: 300141 - DNA, 376 bp, Zea mays
tcggtgaaagcggtcagaattggagtgcactcgacgcgtcgagccgagcggtcgaagtcccattccgttcccggcccgagggccgagcctcgaattgagatatgatggggctgccaagcccgatgaatagtacaagataggggagactgtcactggtgcaacattggctgaagatgtcattgaaggtagagcaagcgtttaacaagctcacgagcacaaacaccagcccctgatatttggacctgcaagtattgttggtggtggtctaaccagtgaaagggaaagaatgacagctcaagttttttagcctagcttcaggatgccaacaatgagcattgaagaagctggattgcgcgagattaaaatgattgagaaa

SEQ ID NO: 300142 - DNA, 365 bp, Zea mays
tcggtcactcaacacagcacaggcagttcgagagagagagagagagagagagagataaatatgtcgtggttcgggcaccaccaccacaaccagccggctcccccggcgtcgggccccaaccaggtgttcaagatcttctgccgcgccaacgagaactactgcctggccgtacgcgacggctccgtcgtgctggccccggtcaaccccaaggacgaccaccaacactggttcaaggccatgcgctttaacaccctttttaaggtcccccttaggcatgccgtctttaaatgcttgtctacaaggccacgccactcgccatcaagcactccctctggctgtcccacccgggcaagctcgcgcctttc

SEQ ID NO: 300143 - DNA, 291 bp, Zea mays
atctaacaatacaagccatcacaacgcaacagcaacaacaggtcctaccagcactgagccacctagccatggtgaaccctgccggctacttgcaagagcagctgcttgcattcaacccacttgctctggcgaacgtaggtgcaaaccagcaacaacaacaggtacaacaggttctggcaacgctcaatcaactagccatggggaaccctggcggctacgtacaacaacaacaactggtttcatttagcccgctcgcttggggcaatgcgcctacatacctggaacaacaat

SEQ ID NO: 300144 - DNA, 386 bp, Zea mays
tctgcaataacggcgataacccagacctccacgggactggtcaccatgcttcggtccgctcctaaccaaaggctcccaaccattcttcgatggacctgacctcgccgtaacacgacttgatctactactcactaatggggcgccagctaagcgaagaacttgaccatatgcaggataggaacacgctacaacctgtctgctacctaattttcgtcacatcggagtgcactgcacggccagtatgccaccaaggccgtcgacaacagcgggactgttgttgggatcaagtgcaaagatggcattgtcctgggtgtcgagaagctgataacctcaaagatgatgctggaaggatcaaaccgaaagatccattcggtgcaccgtcactc

SEQ ID NO: 300145 - DNA, 371 bp, Zea mays
tttctcacacagaaaaccctatccggcggcaccgaagcggactaccaggtaagcaggatcggccagcccgccggcgtcatgaagcgcaatcacccgcgtcacgagcttccgccggaagtgccgcaaggcgcactttacggaccctgtactcacgacaccacgttctaatgtgcctgcagctgaataaatggcttcgtcacatgcccaacaagttcttcatccatttcccttatgacgaccaggtgcactatgaacgtattgtctttttattggccattttttgcactattttaggtatattttcttcctttatttttttatgaaattatacgttgatgattggttactaattaacttctttctttttttgt

SEQ ID NO: 300146 - DNA, 404 bp, Zea mays
tcgcttgcacccgtaaggggggaccaaatttgcggggccgaagcgccacaaaagccgggttgaattccaccggatttcaaacacccggggggaacccccaaccgggcaattcttcaaacgttattagttaaaggcttggattggattaataagcaataaccagaagggttaaaaaatgggggttttgcaacaatcaatcggttcaaaagtcgggaaaaggaactttgtttaaagacagtttgttgacatgtctcgcataagaattgaaggattacttgctgcgttcccgaaactggttggaactgggaagcagcacacttatgtcgaaactgaaaatgtgcgatatgtttatcaacctattgaaagtttatatcttctacttatcacaaacaagcagagcaata

SEQ ID NO: 300147 - DNA, 350 bp, Zea mays
gctggatatacctctgtatgtgagtgaggccaatgagagccctaggagggggggggttcccttcggcgggcttgctgctgctgttgcagctcgcaagagcgtcgcatgtcgcctacaaccacagggacctagaagcctacgctgctactagaacagaccaggtgccgacgtccatcctcaaccccctgctcaggacggtcttccactgacagcctccctagaactggatcaatgctcccaacgcgcccatggactacaaggcgtggtcccattttttgtaccagtacaaacccaagggcgccttatgtttctacatcattttggcccacataggagtagtttgaatcttt

SEQ ID NO: 300148 - DNA, 259 bp, Zea mays
gttggattctcctacagctgcagatatgcgtcacactggaaaggttgtaaactgaactgtaagatgggatgagcagatctttaccgtgaggaaaaatggtacatgccgatgcttgccgagcaggcatagatgtaccacgaaatggcagcttttatggagaaggcttcgaaaactgttgacatggctgagctcactgaggatgaccgcaacctacagtctgatgcatacaagaacgtcattggagcaccttctgcctgat

SEQ ID NO: 300149 - DNA, 275 bp, Zea mays
tgggctcaacgaccaaaagggcgacggggggggggtcaaaaggggggaccggttttcctacaaattctttcgccggtttctttacatgttcggcaacgttgtgatggacattccccacgcgctggttgaagagaaacttggaagcatgaaaaaaggcaagggggtgaaaaaacgaaacgaccttaccggcaccgggcttaaagaggttgggaggcaagaccagggcctttaccttggggcttaaggagaggcatttcccttagaacccaagaagc

SEQ ID NO: 300150 - DNA, 391 bp, Zea mays
ctaaaataagtcccatggaggcaaacttataaaaaaggtgggtcaaaatatggagggattgcttaaggcaggcattaataaaaaccggatgcactccatataaattatgcttcttcggagcaattactaatggttaaaaccaacaaataacatttcattttggtggtaggatgacaaatcattggtacttcattcaattcggcaaccttaaacaccatttaatccattgggccaatggggtcttaaaaacgatctaatgtttgcaagaaccaaaaacgtcgtgccgtgcttgggctgtagcctcaacccggaatggttggcccgcccgacacgattatttttttattttacaaaaaaacatatatacctatatacaatttatattcaatat

SEQ ID NO: 300151 - DNA, 233 bp, Zea mays
ccttgcaaggtcaatctcacctgcaaccatgggtaaaggggagggccacatcaacattgggggtattggccacggtgactctggcaagtagaccaccacagggcacctgagctacaagcttggaggcattaacaagcgtccgatcgagaggattatgaaagaaactactgaaatgaacaagcgggacttcaagttcgcaaggaagctaaagaaggttaaggctgagcttgaga

SEQ ID NO: 300152 - DNA, 398 bp, Zea mays
  unsure (1)..(398): unsure at all n locations
gatgacaccactcatcttcttctcccccgcctcgttttcatcgccaccacgcctttcttctgcggtccttccccgtnccacttccaccccctcgccttcgccttcactgcagctgccgccatgcagagcctcctcctgcccaccgctgccgtggccccggtggcggctccgtgcggaaggcggaatctcccgggacgcctctccgtccgcgccttcgcgacggcggtagcggcaccgcggcgggagacggatcccaagaagcgggtggtgatcacggggatggggctggtctccgttttcgggaacgatgtagacgcttactacgaccgcctgctagtcggggagagcggcatcgggctcatcgaccgcttcgacgcttctaaggtccccacccgctt

SEQ ID NO: 300153 - DNA, 362 bp, Zea mays
tttcttgtcctacggcttttccctccttgtccagccccgaaacactcactcagcccgggttcccaggcgcaaatgccgttcggtgatggggtccaccgcttggaagcggctgccttaggtgatggcgcagaccggtgacaagacctgcgtggactgagcgcagctgaacccgtagtgggcgagcgtctcctatggggtgttcatgtgcctcgagagctcatgcaagcacctgaggctcggggtgcacagtaacttcgtgcgctacgttacgatggcctaggggtactgggagcacctggggctgaccgtggactggggtgagcaccgagtctacgactttgtcacagatggtggaagtggta

SEQ ID NO: 300154 - DNA, 387 bp, Zea mays
gggtcttcagaccattagctttatttacttcagagcgcaaaaaaacccggtcggcaacattagggtggtggttggtggccttggttttcttggttttggttggaggcgcaacctcaagcattcaagcggcgggttgggctgccagccaccgtcgtcggttcatctaccgccgccggtgcatctgccaccttcggttcacctgccaccttcggtgcatcttccaccgccggtccacctgccgtcggcggtccacctgccaccgtcggtccatgtgccgtcgccggttcatctgtcgtcgccaccatgccactaccctacttaaccggtcccggtctcagccttatccccagccacacccatgcccgtgccaacagccgtattcaagcc

SEQ ID NO: 300155 - DNA, 280 bp, Zea mays
tatagttgtaggagctctgggcagcgtgcgcacacgttggttacctagcttgctgtgctagcctaccatggctgaccaccaccggggcgcgacggtaggtggcgggggctacggcgacctccagcgcggtggcggtatgcacggcgaggcgcagcatcagcagaagcagggcgccatgatgacggtggtcaagggcgcgacggtcgggaccttcggggggtggatgctggtggtgggcgggcttattctggcccggtccgcgaacgtgctgacgggggcc

SEQ ID NO: 300156 - DNA, 350 bp, Zea mays
gacagtggaggtggagtcatgcttcaacatctacaatttcaaggtctagatccaggtcatggtggtcatctttccagaccaaccgcagctaatctttgatagccagcagaatcgggacgggcgcacagtctgctggtacaaacagctgacggggagctccctgcaccttacgctacctctgaggcatggcatacaactagctggtgaaagacatactggaaagaatattacgcttgaggcggattatgctgaacacagataccacggagctggccagcatgaagtacatgcggcgatgccaaaagatcaacaagaattcatttttggcgatcatcaaccaccggtcggtg

SEQ ID NO: 300157 - DNA, 265 bp, Zea mays
ttatatttgtagtggtaccatcataacaagggaacatggtgaagttcacgggtgcacaactccgacacctcatggacaaaatgaacaacattcgtgatctgtctgttattgctcatgcggaccatgtcatgtctacacttacagatttcgttgcggcagttgctaggaccattgggccggaagttgctgacgatgttcgcccgaccccttcttggccgggtgaagtccagcccgcgctcgcgccgaaaggtacgggcgtctccct

SEQ ID NO: 300158 - DNA, 222 bp, Zea mays
tcgtcagtccctgtacctccgtataaaccctagtacctcttatccgttcgtgactccccaagcgtcacaccgaatcaccacagtcgagctcgagcaggaacaagccgtgagcgcctgcccccggtgctcaatatctattccacaccttatggcgccggcgctgagcaggaccctggggccgtcgtcggtggccgcgctgcgcccgagcccgtcgtgccgggg

SEQ ID NO: 300159 - DNA, 399 bp, Zea mays
tctagttctagatcgcgagcgggcccatttttttttttttttgggttcttagtggcgcgccgccaccccctacaggtaaggaagaggtgggcaggatgtcctaccgcaagttcgagcacccgagggacggcttcctcagcttcctttccaggaagcgctccttccgtcaccgcggcaaggggaagtcattccctagggatgaccccaagaagccttgccatctcactgccttacttggctacaagggtggcatgactcacattgtccgggaggatgagaagccaggatccaaactccataagaaggaaacttgtgaggctgttaccatcattgaaaccccttctcttgtcattgttgggctcgtggcatatgtgaagactcctcgtggcctccgcacac

SEQ ID NO: 300160 - DNA, 320 bp, Zea mays
tctaccacacctcctcgcttccactccggtgggctgacatctcgtcccgtcggttcgtttcgaagcctcgcgagccccgacgatggccaccgccgcggtgtcggtcgacgagaagctcgacaagcttcgcgccgaggtcgccaagctcgaccagatcagcgagaacgagaagtccgggttcatcagccttgtgtcacgctacctcagtggggaagcggagcagatcgagtggtgcaagattcagacccctacggatgaagtggttgattcttttgagggggggggggggtcttttcctatatctttttgtttattattat

SEQ ID NO: 300161 - DNA, 330 bp, Zea mays
tgcaggtctccttccgccggcgcggaccagctggagggagtttatcctggagccgtcttcctcctcgcctccttttgcgagcgcaggcgcggaggccggagtcgcttggaggcccaactgcgtcagtggtgatttagccttgtatatgttctggagccataatgaatacgaccggagtagagatcattcgcaacgaccagggtaaccagaccacaccctcgttcgtggccattaccgactccgagcgcctcatcggagatgcggccaagaaccaagtcgtcatgaaccccatcaacaccgtctttgatgccaagcgtctcattggcagga

SEQ ID NO: 300162 - DNA, 268 bp, Zea mays
tcgtaaagccatgccctctcaaagaagaggggatcaaatcgggcatagtttgaactattacttcaagcacagatcggtactacttgggattaacagaaccatggtagtcacaatgaaagtaacctattttgcacccagggtgagagcaaaccagctgctttctgtaactattgtcgttcaagtgatcattccacccaccgtgttatccatataaggcgttcatcgtaccatgacgttgtgagggtgtccgagattgaagattttcttg

SEQ ID NO: 300163 - DNA, 179 bp, Zea mays
tcgatcgcgagcggccgcccttttttttttgggtttctagaaaaggactttgggatttctgggaagccacaaacatcagacaaaaaactttattattgaactataactcataagaaatctaaaagagggcaccaccaatgatgggttgttggtagaacgctgctgggtttgtcaaagca

SEQ ID NO: 300164 - DNA, 352 bp, Zea mays
ttcgcccgtctcgatcccacaggatccgaagtacctcacaagccggcacgcgagttccccatcccatcgcggcgcctaccccacccgccctgctcccgcccggtagtagtagcagagcctcgccgccgctgccgagaatagatggggttcgtgtccttcgtcgggcgggtgctcttcatcgccgattttcttctctccgtctaccatgagtttaatgaatttggctctgatggtgggccagcagtttaggcccttcatcccaaattcaattggttaggggagggagtctctcacaatctcgatttttttttacttcaccttctttttttacacttgtttctttcttctttcc

SEQ ID NO: 300165 - DNA, 306 bp, Zea mays
tcgagttgcctgtgcagtggcaatagaagcgttgaaactttaccgcgaaagggatattcctggtcatgtcaagcaaatcgctccaaagttccaggacggaattagggcgttggcagacagcccaatcatcggggagatacgtggcttatggatgattatgggaaccgaattcaccaacaacaaatcaccgactgatctattccctgccgaatggggggttggttccatttttattatttatttccttaacttctttttttctatatatttttctttagggagggggggtttttttatctcttttcc

SEQ ID NO: 300166 - DNA, 225 bp, Zea mays
tcgggagagtgctcctactcctatgaagaggggctacaaactggctaagcttggatgctgggaggaggaagccgatgccatggaggagaaggccggagggcttgatgagtaagacgggcttccggggtcgattcgcttcttggtgccaaagaaaagactaacctagccgccgccgtcgctcgtctgcctgagaggcgccacgcaccgaggatttgggcgagttct

SEQ ID NO: 300167 - DNA, 235 bp, Zea mays
cccttctttgtccccttgggggggacccaccatgggggcatcctttcgcctgttggggcaaagcaagattcttccccttgaaccccttcttgtaaatagcctaattggaaaggccgatggttttgccgaagttttccttgaccccaagtccaaaaccgtaagaggactgcaggaaaaaaaccatttcgttggattaactgagaatggggccaacaatcccccggtttttaaaaag

SEQ ID NO: 300168 - DNA, 268 bp, Zea mays
  unsure (1)..(268): unsure at all n locations
agaaggccaagaagcctgcgccccccggggcgggtgcctcttctgacgacgagcgatggcnacnccgactacgaggaaggtggcgagctagcggagccgcagggcggcgccgtcaggaggtgcacgcattgccagatcgagaagacgccgcagtggcgcgcggggccgctggggcccaagacgctctgcaacgcctgcggcgtgcgctacaagtccggccgtctgttcccggagtaccgacccgcggcgagccccaacctttttgccg

SEQ ID NO: 300169 - DNA, 327 bp, Zea mays
gtgactgcttctcgcttgccatactttgatggagattattggccaggagctgcagaagatatgatcaatcaactccgacaagaagaagatgaccgtaaacttcagaaaaagagtaagacaaagaagattattacaaaaagagctcttaaagctgctggccacaccgatctcagcgggaatgcttccaaggatgctatgttgatgcaaaagcttggtgaaaccatatatcctatgaaggaagatttcattatggtccatttgcagtattcatgtagtcactgctgtacccttatggtgtctggaaaacattgggtttgtcatcaatgc

SEQ ID NO: 300170 - DNA, 311 bp, Zea mays
tctggggatgctgagcaccatcgccacggggctcgccatcgacgcctgcgggcccatcagcgacaacgccggcggcatcgcggagatggccggcatgccgcaccgggtccgggagcggacggacgcgctcgacgccgcgggcaacaccacggccgccatcggcaaaggcttcgccatcggctccgcggcgctggtgtcgctggcgctgttcggcgcgtacgtcagccgcgccgggatcacggcggtggacgtgcttagcccgagtgttcttgggggaggggggctcttatccatgctcccctactggttct

SEQ ID NO: 300171 - DNA, 443 bp, Zea mays
acccttctttttaccttagaaggaccattattgtcccaggcggtgccatcacaaaatattttgggctccttatgctcccttggtcttttctgcaagtggctgcttaccggcgacacattttcccgaaatgctcgcaagctcctatagcttccctttttcccccgtacctttaaccagcggtgtcttcggtatgtgaaaacccaattcttcaaccttacaggatccaacaggcaatcacagctgccatcttacctttatcaccctggttcctccaacaatcatcagccctattacatcagttacctttggtgcatttattggcacaaaacatcagggcacaacaactacaacaacttgtgctagcaaaccttgctgcctactctcagcaacagcagtttcttccattcaaccaactagctgcattgaactctgcttcttatttg

SEQ ID NO: 300172 - DNA, 183 bp, Zea mays
tctgtccattagctttatctactccagagcggagaagatcccgatcgacagcatgagggttttaatcgctgccctggctctcctggctctcgctgtgagcgccacctccacgcatacaagcggcggctgcggctgacagccaccgccgacggttgatttaccgtcaaccatgcatctgccacc

SEQ ID NO: 300173 - DNA, 379 bp, Zea mays
ttcaccacaagcgatcgaggtacccggtgcggaataagagagagggggcgtgtctctcctctcggcttccccgttccccaacctctcgtctgctgcctgcctgcctgccttcctgcaaaaaggagtttgtcatggcttttaatcgcatcctcaaggagctgaaggacctgcttaaagacccccccacatcatgcattgcatttccttctttttaggtcatttttcattgtctcgctacaattattggaccaccctacatcccctattcttgtggtgggggggtggggtaccctcattttctttccttcattactcccttctttcctccttattttttcttttcatttcctctatctctttcattcttcattcttcctat

SEQ ID NO: 300174 - DNA, 276 bp, Zea mays
  unsure (1)..(276): unsure at all n locations
tatagggaaagccggacgcctggggtacacgtcccgaatttcccggttcgccccacccttccgctgggttttcaaaccattagctttatctactggggacctcaaaagaacccgtgcgccaccattagggttttgctcnttgccctcnctctcctggctctcgctgcgagcgccacctccacgcatacaagcggcggctgctttttccatccaccgccgccgattcatctaccgccgccgttgcatttgccacctccggttcacctgccacctccg

SEQ ID NO: 300175 - DNA, 152 bp, Zea mays
  unsure (1)..(152): unsure at all n locations
tnctggaagcttttgtcctgatatttttgccaagcgctttctaaccattaaggggcgtaacgcaaagaaagcacattcccggtacgaaatgccatcatggagtcatagtgataatcctaggtgagggacacttggagagtattttattcatt

SEQ ID NO: 300176 - DNA, 232 bp, Zea mays
tgtctatttcccatatcctttcccctacctgggcagcttttcccgtctccgggggctcgtctcccctcctaacctcgccagccatgggcaagaccaagaacggaatcaacggtttcggaaggatccgcagcctcgtggactgggtcgccctgcaaagcgaggatgacaagctcgtccccgtaaacgacccctcattaccacggatacatgacccacatgttcaagaaccaca

SEQ ID NO: 300177 - DNA, 281 bp, Zea mays
tttccctcttcaagaggggatcatcagagggggcttattattccttattagctgaggcaaggatcggagttgctctgaattgactgaaccatggcggcgacaatggcagtgacgacgatggtgacgaggagcaaggagagctggtcgtcattgcaggtcccggcggtggcattcccttggaagccaccaggcggcatgaccggctgccttaattttcttcttcggtctattttcaactaaaatctgactttcatatttactcctttttttttaatgggggg

SEQ ID NO: 300178 - DNA, 421 bp, Zea mays
tcgggcgaggcaaaagcattgcgaccacagacagcgcgcgcttcaaggccttttttttttgagataacaaggaggagaggaggagatggcggtcacgatcacgtgggtgaaggcgaggcagatctttgacagccgtggtaaccccaccgtcgaggtggacgtgggtcttatcgacggcagctacacaaggggggccgtacctagttgtgcatacattggtatatatgtggccttgttgatgatgttcggatgattatatatttcttcgctaagtggggggggggggggggtgttttatatatacataatatttttttaattttcattacttatttattaccatttatttgttatttttttataaatttcttaaattttttatcactttcttctataaacttttttatcttttttttttctt

SEQ ID NO: 300179 - DNA, 211 bp, Zea mays
  unsure (1)..(211): unsure at all n locations
ttccaacaccacctcgcctgcgatctccggaggctgcgtcgcgtcgagcatggagcatgtctncctactgcggaaaggacaaggatgagctcatcaagaatgctgcctacattggcacccctggcaagggtatccttgctgctgatgagtccactggcaccattggcaagcgcctttccagtatcaattgtcgagaacgtttgaggagaac

SEQ ID NO: 300180 - DNA, 216 bp, Zea mays
tctttcgatttcgatctcgcaaccacctttggggtgttctgttgtggaggtaggggttcgaggagatatgcactttgcacttgcattggacacgaactcaagatcttatcatataagattttgagagtgtgatgtgttttataattctgcttggattataatattatttttaatatatcatatatcttttgtaatcatataaatttatttcttaaa

SEQ ID NO: 300181 - DNA, 235 bp, Zea mays
tgacagacagtgttaatggcgaaagatgtggtactaataactgtaggaatggccattctctagagaaactacggtcttgcatatctgaaggggctctcatagaggacagattactaatgggtgcggactactattagacacaaactgctaaaaaactaaatgcccaaaaaggtggcattcttattggtttagtgaaaaattcaagcataactagagcaactattcacaagaatgc

SEQ ID NO: 300182 - DNA, 338 bp, Zea mays
tcttttagcgcacacacacacaaacagatttgggcctaattcacccggcggggggtcccttttaagacacagatctttctgtaaaccctgacccgcaagactatcaccctggaggtggagtcttctgacattattgacaatgttaaggataaaatcctggacaaggtgggcattccgccataccatcagcgggtcaacttttatgtcaaacagcttgtggacggtcgcactcttgctgactacaacatccatatatgagagcacccttcatcttgtgcttcggcttaggggtgtgttgcatatcttacttaaaaccctttcctgcatgattatcactc

SEQ ID NO: 300183 - DNA, 404 bp, Zea mays
taccatagaggatcccagaacattgaacaagacgttgtatctgagacctccaggaaatgtcttctcaatgaatgaattggctgacctctgggagtcaaaactcaagaaatccctgaaaaggttatatgcaacagaagagcaacttcttaaagaaatccatggtaaattgaaactgctaaaggttaagtggtagttatatttgggttgcttttgttatagctctggtgtccattgtattttcttgaagttcaatcagttccttttcaatttaagctttaagctactggcgtcagatacaatgtagttcaagattgatgaagttaccgatgcaggtttatgatttgcgatttactgatactttattattttgtcaatccattttagttgttcatacgttcacctaa

SEQ ID NO: 300184 - DNA, 352 bp, Zea mays
tcggctcaaggtcctggctaacgccgggacggctgatgatgcattgacggcgcgaaacaatggggcacaaggaattggattatgccggacagagcacatgttctttgcttcagacgagaggattaaggctgtcaggcagatgattatggctcccacgcttgagctgaggcagcaggcgctcgaccgtcttttgccgtatcagaggtctgacttcgaaggcattttccgtgctatggatggactcccggtgaccattcgacttctggagggtgggggcgcgagttgctttcaaaaaggaacatctaggacattgtaagggaattatgtgctgagacgggagccaaccaagtgg

SEQ ID NO: 300185 - DNA, 221 bp, Zea mays
  unsure (1)..(221): unsure at all n locations
tcaacttttcaatgagcttcaaaaatactacctgcgaagacctcgaactggggcacgggcacncaaacaggaaaaaagagatttatttccaatgaatagagaaggctatcatgcaggttttcaggatttccagtatttgctaacaacgttcactcaatacaggcgactacttgtaattgcggaactaaaacatggagacttgtttaactttgccaatattt

SEQ ID NO: 300186 - DNA, 211 bp, Zea mays
tgcagaacgtggcgtacccgaagaacgtgtgcgaccctctgctccgggagtgggtcaaaccctcacacaaccccatcatcgttcccgagggcggcatcaacgcgactcaattccgcgacccgaccactgcctggcgcgttcccggccccgagcagtggcagctgtttttctgtaattacttaatcttattcatttttatttgttacatccc

SEQ ID NO: 300187 - DNA, 286 bp, Zea mays
tgatccagcccatttcgaactctcggtagaggcttcctcggactgtgtgtgggccacttccccgtaccgtactcctcttcgcgccgtagaaatggcgctgccgaatcagcagggcgtggattaccccagcttcaagctcgtcatcgttggcgacggtggaactggtaaaaccacatttgtgaaaaggcattttactggcgagtttgagaagaaatattatcccaccattggtgtagcagttctcatttctctaatttatctatatttggggggggggggggggggg

SEQ ID NO: 300188 - DNA, 197 bp, Zea mays
atcccccttgcaagtatagtctcgggggctctagaaaacgatgggcgggggcgacctgatccaaagcggcgcttgccgcggcgagttcgcttccaaggactacacggacccttccccggcgccgcttatcgaccctgcttaacttgggtcctggtcgctttaccccgccctgatcccccagttcatcgccacccttc

SEQ ID NO: 300189 - DNA, 269 bp, Zea mays
  unsure (1)..(269): unsure at all n locations
tcttcctttttccccgacctaattttttctggagatggggcaataaaaaagacggtccggtccntnaaagcacnccagatctttgacagccgcggcaaccctacagtcaaggtcaactttttttcttaaaatgaacctttttaaattccactttttccaattgaacattaacttgtgtatattaaactcttgaatttaaggattgtggctcttactattttgggaaaggtgtctccaaaagctcttaacaaattttaattttttttatt

SEQ ID NO: 300190 - DNA, 245 bp, Zea mays
  unsure (1)..(245): unsure at all n locations
tttgatttgtcagggaggacttgnaatgccgtcatgacataaagaactttccgctcgcacatntncctttaangttagcaaangccaaacaacttcttttgaccatcaaccacaacttctgaacgctcgccttttgccttctctactttgaccccctttgtgagaccaaataccttattgctcttaaaaatctttttgacaatgtcatctttcaaccttacccttccctgtgccattttagaagg

SEQ ID NO: 300191 - DNA, 215 bp, Zea mays
ttacacaagagagcacgctactactggtcagtcgacaacaagcagacctcgcccaagcgacactccatccactgactgaccgctcatggcgaaggtccacctctacgtcgccgcggcctgcgccgtagaactcgttcttttcaccccggccctcgccggaaaccccgacatgcttcaggacgtctgcccggatgactacccctccccgatgaaac

SEQ ID NO: 300192 - DNA, 402 bp, Zea mays
ttagatacacaccaagcgaagcacattagcggcaggctaacaacaatggcttcgaaggtattatccctccttgcgcttcttgcgctttttgcgagcgcaacaaatgcgttcattattccacaatgctcacttgctccaagttccattattacacagttcctcccaccagttacttcaatgggcttcgaacacccaactgtgcaagcctatatgctacaacaagcaattgcggcgagcgtcttacaacaaccaatttcccagttgcaacaacaattcttggcacatctaacaatacaaaccatcgcaacccaacagcaacaacaatttctaccagcacttagccacctatccatggtgaacccttccgcctacttgcaacacaagtgcttgcattaaacccac

SEQ ID NO: 300193 - DNA, 187 bp, Zea mays
tcggactatattttttctgaagattcaacgatggccgcgacaatacagaccgcgtctgcgcgccaaatctttgacacccccggcaaccctacaatcgaggtcgacgtgtttttctcagattgaacctttgcaagggcaactttttttattgcagcattaacttcaatatatgaagctcttgacttta

SEQ ID NO: 300194 - DNA, 409 bp, Zea mays
  unsure (1)..(409): unsure at all n locations
ttaagaacctacaatggtattgcatgggtggatcgtataaccttggtcgtcggggaaccaattgacaggaagtcgagcgttcgggcgcaagatgcgttgtctggcatgctgatccttgaccatttgtgctgatagtatttactgttataagctgccctaaaagatgcagcaaacctttttattaaccttcgcattttcattacctgctttggatcaactatatntganattcaatgtattactaaaaaaaaaaaataannnaacggggggggggggtggggggggaaaaattaataccacttaaaaaaatctataaaaaaaaaaaaatantacatttttaaattaaaatttcctaatatatactctgcctattttttaaaactctttcttatttatcattaatcttaat

SEQ ID NO: 300195 - DNA, 425 bp, Zea mays
  unsure (1)..(425): unsure at all n locations
actttctgtaacataaaaagtggaatccaacggccggcgtaaaacaacaatggcggccgtgatataaaacctccttatnctccttgctctttctacatgtgttgctaacgcgacaattttccctcaatgctcacaagctcctatattttccctttttcccccataccttccatcaattatagcttcactatgtgaaaacccacctcttcaaccatatacgcttcaacaagcaatctcagcaagcaacatacctttatccccctttttgtttcaacaatcgccagccctatctttggtgcaaacattggtacaaaccattaactcacatcaacttcaacaaactcttctacctgttatcaaccaaataactttttcaaacctttcttcctactcttcttaacaacaatttgttccattcaacccac

SEQ ID NO: 300196 - DNA, 348 bp, Zea mays
tttctttagtatgtgtcacggtaccaacgtggttgtgtaaaaaaaaagtacttgtctgggcataaacttgtgtgggaagttctggaaggtggccttaagagtaagatagagattcaatggtcagatattactgctttgtattttttttgccccgaaaatggccaacgaaccttgtacgtggtgtttgccataccaccttttttcttttaagagacagatccgctttcaataaaacacacacttttgcaggctaccttatatttcacttcttttcgcgcgcgtgttcgcgggcgtgattttcttcatatcccttcaactctttttaaccattatttttacaatcttatt

SEQ ID NO: 300197 - DNA, 260 bp, Zea mays
  unsure (1)..(260): unsure at all n locations
ctcccaaatcagcaccacccataggggccacgggcgcgcaatgccggcctgtgccggcgcaatgccggcccccggagacgccgcgtgcgccggcgacgtgcgcttgatctcctccaaggagctccgcgagcacgcgtncgccgtcgacctctggatctccatctcgggcgacgtgtacgacgtgacgccctggctttcccaccacccgggcggcgacctcccgctcatcaccttggcggggcaggacgccaccgacgcct

SEQ ID NO: 300198 - DNA, 298 bp, Zea mays
  unsure (1)..(298): unsure at all n locations
actttcttttacgacactcccctaccattcacgtgcacggacaaatacataccgggtctggccacctatactnagagcgagaagagattgcaggcaagggtgatgggccggcaatcggcatcgatctcggcacgacgtactctttcttctgcgtctggcagcacgaccgtgtcgagatcatcgccaacgaccagggtaaccgcaccacaccctcgtacgtcgccttcaccgactccgagcgcctcatcggagatgcggccaaaaaccatgtcgccatgaaccccatcaacaccgtctt

SEQ ID NO: 300199 - DNA, 333 bp, Zea mays
  unsure (1)..(333): unsure at all n locations
tttatttctaactctacctcactaaacttcggtccgaacataataaaatttgcttcgttcccattacatcttctgaacncatcaacataattcaaacctccaccaaccttctctattcctaacgctcaaccttcttttattctctttaccaaatcacctactccaaaaaaccttcaaacaatcccctctcattgcccatccaggatttttacatcatttgatgacttggaactcaaccaatttgtccacaatacacttttttcattaaaccttttcttctattcaccttatcttcaacttcactttcttcccttaataaatttttttatttcc

SEQ ID NO: 300200 - DNA, 427 bp, Zea mays
  unsure (1)..(427): unsure at all n locations
tttggtcttgacatcaaatcgattaagaccggtgtcaactttaatatggccggtganatnnatatgcatattcaccgaattggaagaactggtcgtgctggcgataaagatggcactgcatatactctgattacaccgtttacaccaccttttcctttgccacctttcttcccacctttcctggagtctcgttttgctcttaatcttccatccttcatagccagatccatgagttcattgggtacatcctggccagcagcaatcaaactgtgaaccaatttaccagcaaaatttgccttcttttttgtaatggtctaaattcgcagcggcccgcttttttttttttttttttatttaacaacttatttaacaccccattttacccttaaccaatcttttcttaaatattaccctctctccattcttt

SEQ ID NO: 300201 - DNA, 264 bp, Zea mays
ttattggccatgtcgacttttgcaaggggaccaccacaggacaccttatttacaaacttggaggcattgacaagcgtgtgatccagaggttcgagaaggaggctgcttaaattaacaaacggtccttcaagtacccgtgggtgctcgacaagctcaaagcttagcgggagagagggatcaccattgatatcgctctgtggaaggttgagaccaccaagttctactggacggtcattgattcccctggacaccgggactttatta

SEQ ID NO: 300202 - DNA, 161 bp, Zea mays
caaatgggggcagggatctcccacctgagatgttgtctgagctatatcactcaatcttgccaaatgggattaaaacaacacccgggccggggttgggatattttgaaaaggctcctaatcggtggatagatctaatgcgggaggcaaaatctacctcccca

SEQ ID NO: 300203 - DNA, 194 bp, Zea mays
  unsure (1)..(194): unsure at all n locations
ttcgtttttaaaatattgccagtcccgcaggcgagagggccctacgccggcgggtggggctcaccnacctagccctggcggaaaccacagccgcggccaactccggcttagcggactccaacccgatccgttccgtcaccgaccgcgcgggcttcgcgctagagtgcaccatctttgccgctgttggccgcacc

SEQ ID NO: 300204 - DNA, 207 bp, Zea mays
tcgaccagatactggtccaacatataaaaacagttttggcggggcttaagtcacgcataagcactcagttgactgctgttgctaaagagcttgctgtgtatggtgaacctcttgattcaaaagctggccaaagtgctaagcttttgaacatactatctaaaaactgtgaagcgttttcctcaatgggggggggagaaaatgaagata

SEQ ID NO: 300205 - DNA, 324 bp, Zea mays
tttatcgcaatcactgagttcgagctgatcggaatgcatcccggccggcgtgggctttaagatgcacaactttgtgaaaaccctgaccggcaagacttttaccctcgaggtggacttgtcttacaccattgacaacgttaaggcccacatccaggacaaggagggcattcccccagaccaggagcggattatctttgtttgcaaacagcttgaggacgggcgcacgcttgctgactacaacattcaaaaggggagcaccctccaccttttgctccgccttaggggaggcatgcaaatctttttgaaaaccctgaccggcaagac

SEQ ID NO: 300206 - DNA, 320 bp, Zea mays
gcctaaatgtcgtacaatttcctcatctgctagaaccaattcgagagggatgcctcctatgtcgccatggcgctctctgtggggaaaacctatgatggacgggattacatggtgaaggatctgttacaagcggacttatatcgcctcaagattgatctggccgaatgacaaatgcccggcctcatggcgtgccgggccctattgggaccgtacaagccgttaggcgggactaggatcttggaacatatttacatgaccatgcagaccgacgaactaataaagaccctgacctacctcgactattagggccaatggggcta

SEQ ID NO: 300207 - DNA, 181 bp, Zea mays
  unsure (1)..(181): unsure at all n locations
tcgcccacgcgtccgangaaaaaaaaaaaaagaaaaaaaaaaaaaaaagggcggccgctcgcgatctaaaacggagcaaggagagctggtcgtaattgcaggtcccggcgggggcattcccttggaagccacaaggtggcaagaccggcggcctaaagttcccttgccgggcgatgtttcc

SEQ ID NO: 300208 - DNA, 195 bp, Zea mays
gggcgacaacatgattgagagggccaccaaccttgactggtacaaaggcccaacccttcttgaggcttttgaccagatcaccgagcccaaaagggcttcaaacaaaccccttggtttggcccttcaagatgtgtaccaaaatggtgggattggaaccttacccggtggtccggtggagaccggtgtcattaaacc

SEQ ID NO: 300209 - DNA, 225 bp, Zea mays
gcggccgccctttttttttttttttaacgaaacctttttgttaaatggaccccttgaaggccttttatttttagaggggccaccccaccgggatgcttggcctttccagcttcgataaaagtatcagaacccttattgtagcatgcatgcatgcatttgccggttttggaagaaggtttttcctaacatggacagtcccacacatgccgggcggaaacaagtacc

SEQ ID NO: 300210 - DNA, 162 bp, Zea mays
tcggcatgctgtgcctgttccgaagtctgagtgcaccaagactacccaggtgggtattagctccgctggtggatgcctatgctatccctcgcagcctcctccgtggcccggcgcccgctcctgccgccgcctaggcttctggcggtgagggctatggcgtat

SEQ ID NO: 300211 - DNA, 420 bp, Zea mays
  unsure (1)..(420): unsure at all n locations
cggtcatcggggacggctgcctcatcgggcccgacgtcgcggtcgggccaggctgcttggtgnaggcctgtttgctcctgtcctgcttcaacgttattctcgccgtgcgctttaagcatcacgcttgccttttcagtatcattatttgttatcattatacagtttacaattgtttctgtttttatatcatctctatttctttttgatgtctataaacttatttttaatttattatatatttttatacatttctttctattttttatcatatttattaaaattttttaattttttttattatatatgtttttcatttatatatttatttattaaattttttttattttatatttttaatatttttacttatatttattcattaattattttaataatttctttctttttttaatttatatt

SEQ ID NO: 300212 - DNA, 443 bp, Zea mays
  unsure (1)..(443): unsure at all n locations
cgtctcgcttttctaagcagcttaacatnatattaactcagtgggtgctatagagatattgccgccgacgaccccatcatatcttatgggtccctccnccttgcanctgcatnctccttcaaattcctaggtgtttggcttctcccttccttggcacctttgcttggaacccattgattgatagttacttattattgggcatggagcacgtcatctcaatggaggagatcctcgggcccttctgggagctgctaccaccgccagcgccagagccagagccagagcgagagcagcctccggtaaccggcatcgtcgtcggcagtgtcatagacgttgctgctgctggtcacggtcatggtggcggcgacatgatggatcagcagcacgccacagagtggacctttgagaggttactggaagaggaggctctgacgacaagcaca

SEQ ID NO: 300213 - DNA, 346 bp, Zea mays
ggtcaaggcgctgcgagccacaacatcacggccatcctggcggcgtacccggagttcaccgacttcagcgctgccctggtcagcaccggcgccgcggcggagatcgaccgccgcagcaccgtcaccgtcctcgccgtcgacaacgccgtcatggcgcggctaaaggcgcagaagctgcagctcgacgacctgcagcgcgtgatctacctccacgtcctcctggactacttcgacgccgccaagctaggcagcatccagggcggtttcgcccaggccgctagcctttaccaggcctccggcaaggcgcaggggagcgacgggatcggtaacatcaccgtgttccccg

SEQ ID NO: 300214 - DNA, 267 bp, Zea mays
gaacggcgtgcacgacggcgccctggatttggaggaaggcagaggaggcggagtcgatggagcggggtgtgagagctcggagcaggacggagccggtcgtcgccccatgttctccgtgccgttcgtgcagaagatcctggcggaggcgttggggacctacttcctgatcttcgccgggtgcgcggcggtggcggtgaacctgcggacgggcggcacggtgacgttcccgggcatctgcgccgtgtggggcctggccgtgatggtgat

SEQ ID NO: 300215 - DNA, 337 bp, Zea mays
ggcttgggtcggattggtttcggaaagtttggtctccagtgacccgagcactggagatgccctgtttggagcaaattccgatggcgaccggcgagaccgccgtggatcgtcgcgaggaccaccgcgacatggatttgtcaggggaggagcacgtgcggcccaaggcgcgtaagccgtacacaatcacaaagcggcgggagaggtggacggaggactagcacggtcagtttctggaggccctggagctgtacggtcatgcctggcgccgaatacaattgcacataggttctaagactgccgtacaaatccggagccacgcgcagaagttcttcacgaa

SEQ ID NO: 300216 - DNA, 332 bp, Zea mays
ctgggaaagggagccatagagtatgaagagtttctgaaaactggtgacccggagttcagttggaagccaccgaaggatgaatggcagagcatcgccctaggctacacttctgggactacttccagcccaaagggcgtcgtgttgcatcaccgcggtgcttatctcatggcactcagcgttgccttcgtgtgggggattgcctaagggtttgtatacctttggactctaacttttgtttattatattgattttaatcttcatttttagctcgttgttttttttttttatattttactcttttttttactaaattctgtttatattttttttat

SEQ ID NO: 300217 - DNA, 165 bp, Zea mays
tcgtattccaggcaggcaggccgccgaggagggcaggaagaccgaggacggagccgttcttgctttcattattctacctccttgctatttgtgcaaacgccacaagagcgacccatttatcagggctcttgctaccattcatgcaatagggtaccatgaacccaa

SEQ ID NO: 300218 - DNA, 193 bp, Zea mays
tcgggggagtagtcgacgcgccgtcactgaatcctcaaatcacgggtaggcggaattacgccactctggtgacttccggggagcaggggaacattttcctttaaccatgggccaggggaaaactcacatcaacattgggggcattgggcatgtcgactctggcaagtcgaccaccactgggcacctgatctac

SEQ ID NO: 300219 - DNA, 212 bp, Zea mays
gcgccattggccagctagagccaaccagaagagcttgcagttactgagagtgtgtgtgagagagaggatgggtggcagcggcagggctgctctgctgctggccctggtggtggtggccgagagcctggccgtggtgatccaggccgacgccgggtacggttacggcggtgtgtacaccctgacgccgccgttgttcacccctaccggttccc

SEQ ID NO: 300220 - DNA, 208 bp, Zea mays
tttattttgccgatcagttcgcgccaaatgctaaacaaagttcaaaagcgctgtcttcattgcctaccaagatattatccctccttgcgcttcttgcgctttttttgagcccgaaagactaattgaatatgccctggttcccatgattgctaggggtgttttgcttggagcagaccagcctgttattttgcacatgcttgacattccg

SEQ ID NO: 300221 - DNA, 239 bp, Zea mays
  unsure (1)..(239): unsure at all n locations
gctggatcttgcttctggcctcggagggaagatcaacaaggtggaagtcaagtcgnccttctatgantatgagaaatatcatggatactatggagggatggaggaagccaggttgtccaacttttcttttttgttgttttaaatacttttgatcttgtcaattactttttatattttggtttggttatattttttcaatttttttattttctgttgtttttttgaatattctttatttt

SEQ ID NO: 300222 - DNA, 203 bp, Zea mays
tcgcgcctccgacgacttctacccgcgcgacccggcttcgcacaccgtccacgtcgcctccgtcgcgttcaacaccgtcttcctcggtgagttcatgcatcccgtttgggacttgttccatagcttgcttccggctgtttggttttccttctgttcgtgtgttgtcttatattctttttttttcttattttttatcatttttt

SEQ ID NO: 300223 - DNA, 176 bp, Zea mays
cccgtccggcctttgcgtcacccggcggtttataccctagtgcccatgcgatcttcttttccgctccgccgccgtcgatggagttctggggtctcgaggtcaaacctggatccactgtctagtgtgagcctggacatggctttttcctgcacgttttccattctgtccttgttgaa

SEQ ID NO: 300224 - DNA, 312 bp, Zea mays
tcggtctcctcctcctccgccgccgccgccgccgcttccctcgtctccgcccgccgaagccatgccgtcgcacaagaccttccggatcaagaagaagctggccaagaagatgcgccagaaccgccccatcccctactggatccgcatgcgcaccgacaacaccatcaggtacaacgccaagcgcaggcactggcgtcgcaccaaactcggattctgagcggtggaagaaattcttgttaaagactcctatatgttattgttctcttcatgtttataattttgtttaaaatattaatttaattatatatattt

SEQ ID NO: 300225 - DNA, 123 bp, Zea mays
  unsure (1)..(123): unsure at all n locations
tcgtcctccgccacctccaccctcgaatcgggccccaccatggcgtcgcaggggtcctccgttttggccgnacttgagcaggccccggaggaccccatcctgggaggaccgttgcctacacag

SEQ ID NO: 300226 - DNA, 149 bp, Zea mays
  unsure (1)..(149): unsure at all n locations
tcgattttctgatgatgtgccagttaggatactcaataactggacactgtacaatgcagattccaggcttatatctttggaattgatccctatgaaatcaggggcagaaaatgatgtggttgnntttggattttggttttatgataata

SEQ ID NO: 300227 - DNA, 167 bp, Zea mays
cggtgatggtcacgctgctgttcctgacgccgctgttccactacacgccgctggtggtgctgtcggcgatcatcgtctccgcgatgctgggcctggtcgacttgggggccgagctgtacttgtggttcgtttacaaggtggatctttttgtatcctgtgtctatctt

SEQ ID NO: 300228 - DNA, 202 bp, Zea mays
  unsure (1)..(202): unsure at all n locations
tcggtaagggcgcgaacctggcggagatggcgagcatcgggctgtcggtgccgccggggtttacggngttttctnttgttttnttttttttttngttttccttttctttttctttttttccccttgctcccgctttttcaagctcttcagcccgtacgcgcggcgccgcaccgctttaccccctggtacacccatcataccc

SEQ ID NO: 300229 - DNA, 245 bp, Zea mays
tcgctaatattcccctcacctatcggccgccctcgtttgactgcgtgggaggtgccaccaccgacgattctgcctatttttgtaaactgcaaggatcttacttattacaatggccaaatgctctcttttgatgttgttaaaatcgtgcaagcttttaaaaatgagattttgccacgacatggacttatcaaagtgtgtgaattcacattgtcagagtatggagcattttgtggtcccataggaca

SEQ ID NO: 300230 - DNA, 258 bp, Zea mays
tcgcttatgttccagacatctattggccccactggtattagcgtggggaatgtgtgaccagagaccagaacaggttttttttggaaactgcaaggatcagttctattacaacgaccaaaagctcttttttgtgggtgatcaaattggtcaagctatgacaaatgagaactcaggacgaaaaggactcctcagagtgagggaaatcacagtggcagagattgcgcattctgtggacccagaggacaaaggacatccaaa

SEQ ID NO: 300231 - DNA, 124 bp, Zea mays
ttatttgcgttcggctttgctacttggctgctagactataaaagaatgtgcgcggaagggaatagtctacgtgcccacggcccggggtagtttttcaatttctttatagggtgggatatttttt

SEQ ID NO: 300232 - DNA, 105 bp, Zea mays
  unsure (1)..(105): unsure at all n locations
tgcgttcggaactggctgtatggtagcaatggttggtgctgtangaaggcagggaccgatttnttaggcactgttagaggattaagtttctggtgtgttgttgta

SEQ ID NO: 300233 - DNA, 227 bp, Zea mays
gttaatcctttccgactcaggccttatcgatacactcctcaacaaaaaaatgagattgagaaacagattaaggaaatgttggaaggtggaattatccagcagagttccagtcccttcgcttcaccggtgctgttagtaaagaagaaggatggagagtggaggttatgcctggactacaggaaactcaatgcttatacggtgaagaataggttttccatgccagtttt

SEQ ID NO: 300234 - DNA, 140 bp, Zea mays
tctttacaagtctgacattaacattggctgcaatgctagctgcacaaccgacgaccttactcctcttcctaaggtcatcaatgacaatttcctttacattttttcatttacatactatctctacatttatatcctaatat

SEQ ID NO: 300235 - DNA, 216 bp, Zea mays
tcgcctgaatgaaggacaggttcccccttcagatgttgtggaggtcgttgtcagccctccttatgtcttccttcctgtggtcaagagccagctgcgccaagagttccatgttgcggctcataactgctgggttaaaaagggaggtgcttttacctgttaattcatagctatatgctttccaacctatttgattcttggttatttttattacactct

SEQ ID NO: 300236 - DNA, 210 bp, Zea mays
tcgggcgcagcgtgctggtagaacggcaacaactgcaacaattgctgccattcaaccaacttgctttgacaaacccagcagcgttctaccaacaacccatcattggtggtgccctcttttagatttcttatgagttatagttcaataataaaggtttttggctgatggttggggcttcccaaaaataagaaaagacatttctaggatttt

SEQ ID NO: 300237 - DNA, 370 bp, Zea mays
ctcgcccgcctgcaccgaccggtacttactggctggaccgacccatgcgtcttgtttgatacccacgtattcatttgatgctttcctcatatgcccatgcaatatctgctgagaaggcctaccatgagcagctttgtgtgcctgaaataaccaatgctgtatttgagccctcaagcatgatggccaagtgtgacccatggcacggaaagtacatggcttgctgcttgatgtaccggggtcatttgttcctaaggatgtcaacgctgcagttgcatccattaagaccaagagaactgtccagtttgtggactgatgccccactggattcaagtggtgcatcaactatcacccaccctctgttgcccctgga

SEQ ID NO: 300238 - DNA, 383 bp, Zea mays
aggaggacctttagcccttcaaactgcggaggccagcctccaacgtggcaacctcttacgaccgttttgaaggctcaaacaatcacactggaggttgcagcatcaggaataatccagtgcagaacaagctgatgaacggcgaaaatccaatcaacattaaccacgctcaaaccgcaggccttggcgtgaggcttgcactagctcttcctcgagagatccttcaccatcagacgaagacatggacggagaagtagagattctggggttcaagatgcctaccgaggaaagagtgaggaaaataaaggaatccaatagagaatcagccagacgctcgagatacaggaaagccgctcacctgaaagaactggaggaccaggtagcac

SEQ ID NO: 300239 - DNA, 437 bp, Zea mays
gtagagagaaggaaaaatatccccaaaccctagctcccgatctcgatggcgaaccctcgcgtcttcttcgacatgaccgtcggcggcgccccggcgggccggatcgtgatggagctgtacgccaacgaggtgcccaagaccgcggagaacttccgcgcgctgtgcacgggcgagaagggcgtgggcaagtccgggagccgttccactacaagggctccaccttccaccgcgtcatccccgagttcatgtgccagggcggcgacttcacccgcggcaacggcaccggcggcgagtccatctacggcgagaagttccccgacgagaagttcgtgcgcaagcacaccgcccccggtgtgctctccatggccaacgccgggcccaacaccaacggctcccagttcttcatctgcaccgtcgcgaccccttggctcgacggc

SEQ ID NO: 300240 - DNA, 330 bp, Zea mays
  unsure (1)..(330): unsure at all n locations
tcccgtttctacccacccgccctgatctagatcgcgagcagccccccttttgtttttttttttatgacagatagtactcctccatttaaatttcaacctcaaacagatctacattagatacatttnnnntaaccaacacctgcatgttccatacgttatttcaaataaagcaaatcggggcaagcaatatacctttatcgcccttttcgtgtcaacaatcccaaccctaactctactgcaatcattcatacaaaccatcttttcacaccatctccattaactcaggctacctaggatcaaccaagaacctatggcaaacctttttcctta

SEQ ID NO: 300241 - DNA, 310 bp, Zea mays
tcttctttccaagaaaccaccgccgagcccaagctgacaatcgcgcgaggcagagcagagagagaggcggttagcaaaacaatggaggggaaagaggaggacgtgcgcctggtcgccaacaagttctcggagcgccagcccatcggagacggtgacgcagtgacgcacctgacgacaaggactacatggatccccgaacagctccatgttatagcccgctgagctcaactaatgatcatctaccgctcggtcatcaccaagttaatgagcaccttgctgtgcgtggcataaccatgctaacggccatggt

SEQ ID NO: 300242 - DNA, 387 bp, Zea mays
ttctcccaaccctccctgggttttaaacccattacctttatctactgcagaccccaaaaaaacccgggggacaccataagggtgttgctcgttgccctcgctctcctggctctcgctgcgagcgccacctccacgcatacaagcggcggctgcgtctgccagccaccgccgccggttcatctaccgccgccggtgcatctgccacctccggttcactgccacctccggtgcatttcccaccgccggtccacctgccgccgccggtccaccttccaccgtcggtccatgtgccgccgccggttcatattgccccgccaccatgccactacccttcttaacctccccgttcttattcttatccccagccacaccaatgcccgtgccaac

SEQ ID NO: 300243 - DNA, 277 bp, Zea mays
acatcagtagttcaaaaaacccaacaaattattgcgggactgcaaataatgccggtgcgatcttggttttgggtagagatcttgtggttgcgccaaaactaatccatcctttgcccctggcaattacgtcacctgaggcgtcgccggatcatatggaggacacatggatgcaggagctatatgctaacagaccaccaacttcgaccagggggcgtccccaagcagtagctaatgacacgggttctcttgcctggatatagtagattgaccacacatt

SEQ ID NO: 300244 - DNA, 418 bp, Zea mays
ctcaaatggagtttttgaggtatctctgcgtaaccttcaagggaactcatggtggaaacgttttctgaatcactctttttttcattgtggaaacatcttctgaattacacactgttctgatttgattctatgtattgctactcaggtcaaagcaacaaatggtgatactttcttgggtggtgaagattttgataatacactattggagttcttggtgagtgatttcaagaaaactgagggcatagatctgtctaaagatagattggccctgcaaaggcttcgtgaagctgcttagaaggcaaaggttgaacttttcgtgactttttagacagaaatcaatctgccattcataacagctgatgcttcatgggcaaaacatttgaacatcacacttgcaaggtcaaaattttgaattttt

SEQ ID NO: 300245 - DNA, 346 bp, Zea mays
cttcactagttgagtgtttgataaacgagctatcctcatggaagctggggagttggaacgcctcacaggccagagccgtgtccgaccctgatcttctgtaacgggttcgagtttgagaacctctttggctacccgaaagatggaaaactttacctgagcgtgtcgaaatcagattaaactgtggtggaggttttaagcgatacttacttgcaaattgtttgactgacttgggtttaggggcaaatgactaatttaactatttattaactggttcctttggaggtttacctaaagatagctgaaactcacacgatttttatcgcttaaaagcaatgattagaggcat

SEQ ID NO: 300246 - DNA, 422 bp, Zea mays
acgatcctagtaagaacagcttggcgccgttagtccagtgcacctcacacatgtgcccggtaagggtgcactggcacgtcaaggtcagctacagggagtactggagggtgaagatcacggtcaccaacttcaactaccggacgaactactcgcagtggaacctggtcgcgcagcaccccaactttgacaaccttaccaccattttcagcttcaactacagacctttcaacccctacggagtgatcaacgacacggcgatgctctggggcatcaagtactacaacgatctgctcatgacggccgggccagacgggaacgtgcagtccgagcttttgtttcggaaggagccgtccacgttcaccttccacaaaggatgggcctttccgagaagaggttactttaacggagacaactgcgtgatg

SEQ ID NO: 300247 - DNA, 405 bp, Zea mays
attaaataccaaacgagtgtgcgagcgcgcaaagctaatgcaccaatgggggtgcgaatagaactctccggccaggtacggcctgtttcctacattctgccccagtcctactggctgctttatgtcttgtgcaactgggaaaaatgtgggcgttgaaacacggccgaacttgaaagcaagagcagctaaggagctgtacttaaacaaggatggctcagctatcaagaagctccagactggagtcaataagtttgcaaacctagtcggagttacacttggaccaaagggaaggaatgttggtttggaaagcaagaatggacctcttaaaattgttaacgatggtgtttcagtttccagatagtgttatcttaatatccttgtttagaaacattttgcttaaatttt

SEQ ID NO: 300248 - DNA, 411 bp, Zea mays
ggccacagacctgatcgatcgatgagcgagaggtagcactcgaagtgtcgggtcttttcctctcgccatttctttctttttttcccttcccgggggcgaaaaaaagagtctagtttccctaggctacaacacgtacgctgctgctctttgcttcaagagttaaatttacctacctcgtcacgggcttggtccatcattgatccggatgtcgcttttttagtcctcgcatggactgttagtagttcgcgtcgcgtcaagggagacctaccaatgacggggctggttgaattcaataagctgagcgctaagcttatctttggcgctgacagccctgctattcaggagaatagggttgctaccgtgcagggcctatcggttactggttctttaagagtcggagggtaatttttt

SEQ ID NO: 300249 - DNA, 400 bp, Zea mays
ccgaagtgcaaagccccgtagcctatccgtggtcgggaaggcaggcgaaaagcacgcaccaaaaaaaaagaaagctataattttctttttttcttttcttctttcgggtttgaaacccattatcaggcttttgcttttgatattctatatctatctaatattataaagctatttcactggtttgatttacatacctcagtcatgttatttgtctagccttcaatcagaatagcctctccaccggttccgaagattctttcggcatcaatgtgcttttggaatcttcctatgaaacaaataacattcaggaactgtttaggacagaacaggccgcagatcagtagaaagcgagcttttttcgcgtatagccaagccaacctcgaagcccaattagcgcacg

SEQ ID NO: 300250 - DNA, 247 bp, Zea mays
gttttagatgctatgccagaaggcatcaggcaaaatagggctcgaactatattacagcatcttagtgaggcatggcgttgctggaaggcaaatatcccatggaaagtccctggtctacctgtgcctattgagaacatgattcttcgttatgtgaagtcgaaggcagactggtggacaaacgtcgctcattacattcgtgagcgcatcaggcgttgagctacagtttacataattgttttatttaaca

SEQ ID NO: 300251 - DNA, 350 bp, Zea mays
gctgccgcctcggtcgcgattcctaaaggcggcgatggccatgacgcggcgttctgcttcccatctcctatccgccttccggcccttctccctcctcctccagccgcacctcgtcgactcttcgccggcggccgcgtcggcgaggcgggcgatgtcgtcggcgtcggccctgcgtgcacgggacgagaaggatgtggcgcggtggcggtagtctatgggccggatgcggaatatcggtatctccgcgcacatcgactccgggaagacgacgctcacagagcgagtcctttactacacgggtcggatccacgagatttacgaggttgccgtccgagacggcgttggttcta

SEQ ID NO: 300252 - DNA, 424 bp, Zea mays
tcgcccacgcgtacggtctacacaagcctttacaaattgtcctcttagctttactcttaatctaactatagccctagccaaatccaagactaatgccagccctagggacaccaaccagcttggcagcgaccatggggaacccggagaagctgttgaatcagatcttcaacctcaagttcacctacaagtcgctgcacaggcaggcgcgcaagtgcaagaaggaggagatggagcacaagctcacggtcaagaaggcgatcgtgaagggcaccatggtcggcgcccggatctacaccgagaacgccatccggaagctcacctagctcatgaactactttcgcctcgactctggcctggacgccgtcgtggcccggctcgacacgcaggccatgatgcaggtcatgggcaagatcatgcagtccat

SEQ ID NO: 300253 - DNA, 435 bp, Zea mays
tcttatcatagaaagttcaatagtgtaccaacaatggcagccaaaggattttgcttccttatgctggttggtctttctgcaagtgttgctaccgcaaccattttcccacaatgctcacaagctcctatagcttcccttttttccccatacctttcaccagcggtgtctttaatgtgtgaaaacccaattgttcaaccttacaggatccaacaggcaattgcaacaggcatcttaccattatcacccttgttcctccaacaaccgttagccctattacagcagttacctttggttcatttggtggcacaaaatattagggcacatcaactacaacaacttgtgctagcaaaccttgctgcatactctcagcaacatcagtttctttcattcaaccaactggctgcattgaactttgttgtttatttgcaacaacaa

SEQ ID NO: 300254 - DNA, 416 bp, Zea mays
gtcaggacggcggacgacatcgaacccttcatcaagaagagcaaggtgaccgattgtaccgtcaccaccaccaccacccatgcgccaccggcatcctagaaggcagccgccgccgagcccgtcaaggacgagctgtgagcatccaaggtgtggacggctgtggctgcgtaagcatgggaggaaaacctggcgctaacgtgcctccaacgcctagtttttgcggtaccagagggagagagagagagggacggttttagagagagaggggatctgcgacgtgttttgctctgcggcggcatttttgtgtttcccattgaggttatgtaccacaatttcaccgtcggttggtgtgttttatttatgtttatattcataagtgttctatttatggatcctttttgttttttaatttttct

SEQ ID NO: 300255 - DNA, 380 bp, Zea mays
gctgactactctcacaaacatcaggggggtctattcaaccaactaggggcatacaacgcccactagtgtaccaacaatggtatccaaagtattctgcctacatatgctccttgaactttctacaggggctgatacggctaccattttcccgaaatgctcgcaagctcctatagctaccattattgccccgtacctctcaccaccgttgtcttcggcatgtgaaaacctaattcttcaaccctacaggatccaacaggcaatcacagttggcgtgttacctttatcacccttgttcctccaacaatcatcagccctattacatcagttacctttggtgcatttaatggcacaaaacattaaggcacaacaactacaacaac

SEQ ID NO: 300256 - DNA, 256 bp, Zea mays
  unsure (1)..(256): unsure at all n locations
tcgttcgcaggccgcaatctcgcaaacacggaccgtctcggaatccgggtcgccagantcctcacggatggcctcgccagcgatggtcccgctgcggcagctcttcgtcgacggcgagtggcgcccgcccgcgcagggccgccacctccccgtggtgaaccccaccaccgaggatcacatttgctagatccctgcgggcacagtgaaggacttgcactcgtagattcatatttaaacgtattttttaaaataaatt

SEQ ID NO: 300257 - DNA, 375 bp, Zea mays
atttatagtagttacggacatttaaggggcacaagggagcaaccattggcacctaaaatattccacctatttatggtgattggcatatctgaaggtgctggtacggcaaccattattggacaatgctcacaaggtcctatagctacccttattgcatcgaacctatcaccaactgtgtcttcggtatgtgaaaacccaattcttgaaccatacaggattcaacagggaattgaagctggcattttacctttatcactcttgttattgcaacaatgatcagccctattacaggagttacctttggtgcatttattgggacaaaacatcagggcacatcaactacaacaacttgtgctagcaaaccttgctggctac

SEQ ID NO: 300258 - DNA, 415 bp, Zea mays
tctactacgactactatgggaaagctgcccctcacatacccgccccgaatttccggggtcgcaccaacccgtccgaccgacccgacccgatccggacctgggccggccagccatggcgactagggtttggctcaccaccctcctcctcgccttcctcctcgtcgccacccccttcaccgcccgagttgctagagctgattcggaggaagatgctgctgcagctgaggttgttgaaggggctgatctaggtattgtgggtgatgatacacaggtttccagtgacggacctttaagccctgctcctggtgtagagacagtagttgtattccccaaaaatgctggcaaaattgtactagcaggtgaagaaactgaattactagttggtctgcaaaatgagggggaatcgactttgaat

SEQ ID NO: 300259 - DNA, 407 bp, Zea mays
tctccgacctcggcgaagtagctcattgtttgccaaccagggatgaagatggaggcgctatctcctgtgccgcgccagaactcctcgtacatagtcgggtcgccatgatcgaggttgacaaacaatgagctacttctccgacctcggcggcatctgttggttcctggagcctggattcgagcgcgaggtgcggcgtctccaccggctcgtggggaatgccgttgtagacggataccatgtgctcgtcgggacaggctccactcagctctttcaggccgtgctgtacgcgctctcacctgcaactgacggcacacccatgaacgtcgtctcaccggcaccggactactcgtcttacccatctgtgaccaactatctaaactctgcgctctaccggtgggctggtgatg

SEQ ID NO: 300260 - DNA, 383 bp, Zea mays
aaatccgcccgcctgccgcagcccccattctcgcgccccgccttcttcctccagcagccccgctcgttcttccggcctcgcgttccgtctccgaagccgcaggcagccatggaaatcaacgaggaggcaatggcggcgcataagcgcgccttcctcgacttcctcgaccaagacgtcgggaagggggtttacatgcaggccgtccgcgacatggtccagaacaagcgccaccgcctcatcatcggcatggacgacctccggaatcacaatctcgatctcgcccgcagggtgatccggacccccggggagtatatgcagccggcgtcggacgcggtgtccgaggtggcgaggaacctggatcccaagtttttgaaggaagggga

SEQ ID NO: 300261 - DNA, 366 bp, Zea mays
gtccaccaacctggtcacctaaatgttcgacgcggagatcatccagatggtgtaacttgtgatcagcaccttgtagttgaacatggagatgaccgtgcgggcgatcatctgcaactacaaccagacggtggacaagatcaagatcgcgagtatcactaacaggagcatgctggatcggcaggctgagatcttgatccaccttgtgcgagacaaggccacgaacacgctgtccatgatcgacagcggcatcgggatgaccaagtccgaccttgtcaacaacctaggttccatactcaggtacgggacgaaggagttcatggaagccattgctgtcggcgctgatgtgtccatgattggccagttcgg

SEQ ID NO: 300262 - DNA, 339 bp, Zea mays
acagcacaggcagttcgagagagagagagagagagagagagataaagatgtcgtggttcgggcaccaccaccacaaccagccggctcccccggcgtcgggccccaaccaggtgttcaagatcttctgccgcgccaacgagaactactgcctggccgtccgcgacggcgccgtcgtgctggccccggtcaaccccaaggacgaccaccagcactggtacaaggacatgcgcttcagcacccgggtcaaggacgaggaaggcatgccggcgttcgcgctcgtcaacaaggccacggggctcgccatcaagcactccctcggccagtcccacccggtcaagc

SEQ ID NO: 300263 - DNA, 384 bp, Zea mays
tctcgtctctcctggaccagcttctccatcctgagggggagaacccgtcggcgggcaaggatcaagtcattgccactggtctgccagcctcacctggggctgctgtgggccaggttgtgttcactgctgaggatgctgaatcatggcattcccaagggaaagctgctattctggtaagggcagagaccagccctgaggacgttggtggcatgcacgcagctgtggggattcttacagagaggggtggcatgacttcccacgctgttgttgtcgcacgtgggtgggggaaatgcttcttctcgggttgcttatgcattttcgttaactatttcaaaaatttcttgtcaattcgttagtcttttactttctcaaatgttatttgct

SEQ ID NO: 300264 - DNA, 364 bp, Zea mays
ccgatcgttcctctccactttacacattccagttccattccaacttcgatgccgggcgacaactaccaaactacgacagttcgtccacatgaaggatgagcgaagaggataagactgatgcttctgctgagcagacggagagggcccctatgctaaatgaacggatcctcttttttctgcccaggaggagcgtacttgctcatccggggcatgatcttgagatcggtcctgatgctccggctgttttcaacgatggaggggcgaacacaaacggacgcaaaggtaaatatgagcttgacatgaaaactgtactgatgaaggttgatcgagcactatacttataagttttatacactcacaatta

SEQ ID NO: 300265 - DNA, 288 bp, Zea mays
gatcagcaaagcggcagtgcgtagagaggatcgtcgaacagaacagcatgaagatggtcatcgttctcgtcgtgtgcctggctctgtcagctgccagcgcctctgcaatgcagatgccctgcccctgcgcggggctgcagggcttgtacggcgctggcgccggcctgacgacgatgatgggcgccggcgggctgtacccctacgcggagtacctgaggcagcccgagtgcagcccgttggcggcggcgccctactactccggttgtgggcagacgagcgccatgttcc

SEQ ID NO: 300266 - DNA, 316 bp, Zea mays
tcggagcatggcgtctgcagtggtggtggacgccgacaacgcgccggagccgacttttcgtaaccttttggaccaggagtccttcaagtgggtcttcgtcggagggaagggcgacatcggtaagactacttgcaactccatcctttccgtcctcctcgccgggttccgcccgtccgtgctcgtcatatccaccgaccccgctcacaaccttatcgacgcctttcagcagtgcttcaccaagttccctactctcgtgcgcggatacaccaacctctacgccatggaaattgacccaaaggttgaaaatgatgattta

SEQ ID NO: 300267 - DNA, 180 bp, Zea mays
tgctctcggtttagcgccttctacggtcaagcggcggctgtgggtgccatacaccaccgttttatctaccgcctccggtctatatgccgcctccgttctatctgccgccgcagcagcagccgcagccatggcaataccccactcaaccaccgcagttaatcccgtgcccgcagtttggat

SEQ ID NO: 300268 - DNA, 379 bp, Zea mays
ttgattgcgagcgttccccttccgtccgctgcattcctgctctatggctcgccgggctctcagaccacagttgccgccgccgccgccctaagccagggtgctgaggctttcgttggcctcttcgccggcagcgagcacccaccagcagttctgtagaaatggctgatggtgaggacatccagcctcttgtctgcgacaatggcaccggaatggtcaaggctggttttgccggcgatgatgcaccaagggctgtattccctagcatcgttgggcgtcctcgtcacaccggtgtcatggtagggatgggtctatactgttgcatttgtttttgattagtcacattttaagataggtttcttatcgtcctattctctctttt

SEQ ID NO: 300269 - DNA, 368 bp, Zea mays
  unsure (1)..(368): unsure at all n locations
ttcaactgaagattataatgacattgggcgggttctatagaagatgcaggaggttctataggtaattttactgcccatgacacataaagaccggttccagaagttgggtattcgtcctccaaaaggggttctattgtacggaccaccaggaactggcaagacactcatggctcgtgcatgtgctgcacagacgaatgcaacgtttcttaaattatctgttccacaacttgtgcagatgtttattgcttattgatcaatttttttccttaatnnattttttggttcttaaaatttatattatttttataaaatttattatatagtttttgttccattttttttttctcctttttatttattatctcata

SEQ ID NO: 300270 - DNA, 394 bp, Zea mays
gttagatagatcagccctatctttgccgggggccggacgactcggcgcaggggcgcagctttctctcgatctttcgcgcttcctccttttgacgcttgctccgcatggggttcctggagatctttggggcggttcgctcctgacatggttcagccgcatcacgcgctgctgcgactcttaacagttcttccgatccgtccagcccagcacatggacggcccgccctgctatggtggacatactggagaaggctacagctgccttcctcgccaggggcaaggccaactataaggctaccctcgggacctacaagggtgatgcttccgcccacacccagagcctccacgttaaggactacaagtactgagttgcttttctttgctgcccgttttgg

SEQ ID NO: 300271 - DNA, 352 bp, Zea mays
tctagatcgcgagcggccgccctttttttttttttttttttgactagcgagtaactcatccatgcaacctcataacaatccgttcctttctactgacacttgcgataattaactaaaaaaacccccccacccccgcgaaatacccatcataaccttaatgggctacacatacatgccgacggagagcaaaacacacatgagatccaagtgctatataacgacgatcactaatcagtatcagtccaagccggcaaaaactagtattgacaggaacgttaacgccaggtattcctccaatgcttacgcagccacagccagccacaccttggatgctcacagctaggtcttgacg

SEQ ID NO: 300272 - DNA, 392 bp, Zea mays
aacacacggcttccacagcttgctctcgctgcactcgcaagcaatacatctcgtcgttccactaagatcgaggagcaaatggcggccaccttgaagctcaggatcctaatcgtggcggcggccgtcgccgagtacctggtcggcacggcctcaggggaagagggaccggtgcccgctccgacgtccgccggcgtgtacatggccgcacgggccggtgccgatgggttcttaaccgcgcttgaaccagttgcccatcatgaacggcgagaacattcacgccaacccagcgtagcccaacacgaacagcaggcctgaccagaactgagccaactagaggcggggtaccctgtctcgtactggcaacagcaggtacttgcatccaacccacttgc

SEQ ID NO: 300273 - DNA, 341 bp, Zea mays
ctccatttagatcccatgtggaatcaacccattcttgttttctccgggtagcagcctcttaccctcatggccaagatcaagatcgggatcaatgggttcggcaggatcggaaggctggtggccacggtggccctgcagagcgacgacgtcgagctcgtagccgtgaacgacccctttataaggaccgattacatagacctacatgttcaagtatgacactgtgcacggacagtggaagcaccatgaggtcaaggggtaggactccacaacccttctgtttgttgagaaggaggttgctgtgtttggctgtaggaaccctctggagatcccctggggttccc

SEQ ID NO: 300274 - DNA, 410 bp, Zea mays
tcgttcgttctgtacgtcctccccccatccacaggcattctgtgtgctcctactggtcctcgatttgatcaccgattaggggaggcggtttaccagcgagcacgcgcgagagataggataggaggaaagggaagctagcggcttcgttctcgcggcgcgatggctcaggcggtggaggagtgtaaccgcatgatgcccattataacgcgctcctacttgaccgcccatgttcaaacaacccaagcttgaaccctcaaaatcatttggtcggatcacctgtacgttaacccgaatctaggggagcattattacgcgatttggagcctttgaaccaactttttatactttcgtaagatggattgggattttatattccacatgttctttgtagctcgattctgcaagctttt

SEQ ID NO: 300275 - DNA, 433 bp, Zea mays
cgacgaagccaaagcaacacaccagcgcgcacgcacgcgcagtgttcggcgggcatcaccacctcctgtcctcctccctcctgccccgatccgccctccccgccgctcgccgaacccgatgtcggccgccgacccttccgcggttccggccgcggccgccgacccggacggccctgactccgtgcggctcacctggaatacctggccacggtcaaaggtcgaggccagccgctgcgtcgtgccgatcgccgccaccatcttgcccactcgcgtcccggatccctccgcggcatccccgccgtcgctcccttaccctccgttccgttgcaagcctccctgttccgcgctcctcaaccccttcgcgcgcgtagacttcgctgccaagatctggatctgcccgctctgcttcttccggaaccacttttccccgcac

SEQ ID NO: 300276 - DNA, 263 bp, Zea mays
gggagctaagctgaaggacattctaggggtccctgatacttatctggaagcaagatacatcactcttcatgtgtgcgaccttgtcccaaagagaggggcacgcctggctgatgctggtatatatggtattctgaagaagctgggcaaagacaaattgctggttgactttagccaacaaaggactgtatttgctattgacggtggcttatacaagcactacaagaaggtcagtgcctgcctaaaggcgacgctcacagacctgc

SEQ ID NO: 300277 - DNA, 388 bp, Zea mays
cttcagaccattagctttatctactccagagcgcagaagaacccgatcgacaccatgagggtgttgctcgttgccctcgctctcctggctctcgctgcgagcgccacctccacgcatacaagcggcggctgcggctgccagccaccgccgccggttcatctaccgccgccggtgcatttgccacctccggttcacctgccacctccggtgcatctcccaccgccggtccacctgccgtcgccggtccacctgccatcgccggtccttgtgccgtcggcgtgtcatctgccggcgtcaccatgccactaccctacttataccgccctgtcttagccttatccccatgccacacctatgcccgggccaacagtcgctttcaaactctgtg

SEQ ID NO: 300278 - DNA, 381 bp, Zea mays
tcgcacacacagccccatcccgccgccgcaggcgagaaccagcgccaccttaggttagggcggccgccgccggagaagtgcgcggttgccaagatgcagatcttcgtgaagaccctgacggggaagaccatcacgctggaggtggagtcctcggacaccatcgacaacgtgaaggccaagatccaggacaaggagggcattccgccggaccagcagcgccttatattcgccggcaagcagctcgaggatggccgcaccctttccgactacaacatccagaaggagtggacgctgcacctggtgctccgccttaagggaggcgccaagaagcgcatgaagataacgtacaccaagcctaagatgatcaagcacaagctcaag

SEQ ID NO: 300279 - DNA, 129 bp, Zea mays
tctttcggatcagcaaagcggcagtgcgtagagaggatcgtcgaacagaacagtatgaagatggtcatcgttctcgtcgtgtgcctgtctatgtcagctgccaacgcctttgcaatgcagatgccctgc

SEQ ID NO: 300280 - DNA, 305 bp, Zea mays
  unsure (1)..(305): unsure at all n locations
cccacgcgtccgcccacgcgtccacccacgcgtccggtgagagagagagagaggcgaangcaactcaggcgacgcgatggcgatggcggcgctgcgacgcgaggggaggcgcctcatcctctcctccaccgtccccaacccgtctctggcggccgcttcctctgcggggacgcgatcctccgccgtctcgcatccggagatggctccacttggtgcacggtctatttcaactcaaatcgtgaggaaccggatgaaaagtgtcaggattatccaaaatatcacaaaggctatgaaaatggttgcag

SEQ ID NO: 300281 - DNA, 307 bp, Zea mays
ttctttatctactccaaaccccaaaaaaaggcgggcgacaccatgagggtgggtctggttgccctcactctcctggctctcgctgcgagcgccacctccacccatacaagcggcggctgcggctgccagccaccgccgttctttcatctaccgccgccggtgcatctgccacctccggttcacctgccaccttccttgcatcttccaccgctcttccaccttccgccgcctttccacctgccaccgtctgtccatgttcccccctcgtttcatctgccgccgccaccattccactacactacttaac

SEQ ID NO: 300282 - DNA, 307 bp, Zea mays
  unsure (1)..(307): unsure at all n locations
ttgcgtagctcaagttcgcctccgccaaacgccttgacctacgaaccgtgccggctcctttgccggcgttncttccacttcttgccctttttacgagcgcaacaaattcctccattattccacaatgctcactcgctcctagttccattattccacagctcctcccaccagtaacttcaatggccttcgaacacccagctgtgcaagcctataggctacaacaagcgattgctgctagcgttttacaacaaccaattgcccaattgcaacaacaatccttggcacatttaacaatacaaaccatttt

SEQ ID NO: 300283 - DNA, 276 bp, Zea mays
ttgggtcttcagaccattagctttatctgctccagagcgcataagagacccgagcgacaccatgagggtgttgctcgttgccctcgttctcctggctctcgctgcgagcgccaccttcacgcatacaagcggcggttgcggctgccagccaccgccgccggttcatctaccgcctccggggcatctgccacctccgggtcacctgccacctccggtgcattttctaccgctggtccacctgccgattatcttccatttttcatcagctacctttgt

SEQ ID NO: 300284 - DNA, 140 bp, Zea mays
tcttcctttctatcgggagacgcacagttccggcgggttcttatataaagcctgctcgacgaattaaactattcttaacgccatctagggcatgaactgcaaggagctgtactgcctcaacatcaccgtcaactaggccc

SEQ ID NO: 300285 - DNA, 454 bp, Zea mays
tcttcctaccaactagcaccatacaaagcacaatagggtaccaacaaaggcagggaaagtattttacctccttatcctccttgctcttttttcaagtgcttctactgctaccattttcccacaatcctcacaacctcctatacctttccttattcccccgtacctatcaccagcgtattcttctttatgttaaaacccaattcttcaaccctatatgatccaacaagcaatcccagttggcatcttacctttatcacccttgttcctccaacaatcattatccctattacaacatttaccatttgtgcatttatttgcacaaaacattatggcacaacaacttcaacaacttgtgctatcaaaccctttcttccttacttttactatcaacatttttttcaattcaaccaactagcttcattgaactcttctttttatttgcaacaacaacaac

SEQ ID NO: 300286 - DNA, 447 bp, Zea mays
  unsure (1)..(447): unsure at all n locations
tcccacccgtccggttttagatcgcgagcggccggcctttttttttttgtgggttgggttaatatatnnnntnttnaaaaatgtcaatcaatatattgattatttttaggaaacacatgccggtatgagggcaccattatcgattacatctcatatgtaatcaaaaaaatggcaccttcaacaatgggttgtttccacaacaaggcaggtttcattaaaaataactgtctgttatttaacaatttttctttctttaaaaaggaattttccaattttttagacacttttattttataaaataactgttttttcattttttattaaccatttataatttttatactattaaatttttttaattataaataatttttatatatttatatatattttatttttttaaatttttttattttatttttattctaatttttataaatttatttt

SEQ ID NO: 300287 - DNA, 307 bp, Zea mays
accgtgccttttcttacctcggggtgctcgagttggatgttcggggacgcacgggggcatgcccgcggcggccgcggccaggaaggcggtcatggttcctgagggcgagaatgatggcctcgcatcaagggctgactcggctcaattccagtcggatgaactggaggtaccagacatttttgaagagacaacgtgcgctgcttgtttaggttaatgcttaagctttttaaaggagttctgagtggtcttctttacttattttattttacaaatatatttttcctgttttgtctctcgttttttttat

SEQ ID NO: 300288 - DNA, 520 bp, Zea mays
tatagggaaagctggtccgcctgcaggtcccgtcccgaatttcccggttcaaccaacccttcctaaaatccacccaaaccaatcctcactacgaacacgctaccaccaatggctgggaaggttttatccctccttgccctttttgccctttttgcaagcccaccaaatccatccataattccacattcctaacttgctcctagttccattattccaaacttcctcccaccagttccttcaatggccttctaacacccatctgtgcaagcctatatgctacaacaagcgattgcggcgagcgttttacaacaaccaattgcccaattgcaacaacaatccttggcacatttaacaatacaaaccatcgcaacgcatcagcaacaacagttcctaccagcactgagccacctagccatggtgaaccctgtcgcctacttgcaacagcagctgcttgcattccaacccacttgctctagcaaacgtagttgcaaaccagcaacaacaacaactgcaacagttt

SEQ ID NO: 300289 - DNA, 433 bp, Zea mays
tccgttacccggcggcttaaaccctaattcccattgcatcttcatttccggtcgccgcgcgtcaataaaattcttttttctccaggtcaaacctggatccactttcaaatgttaaccttgacatggctttattccttcacttttcccatgctgccctttgggaatcaaaaaaaaattacagttccttaatttttgtcaaaattgattacaaaaaacttgccattttaaccctctttatcgacaaatacccacagatacaattccatttggttttcaataaagagttttagctgtcacacacatctaaaactaccactgtttttttctctgtttacaaggttcagcatccaatttatgtaaataaaattgatttttattcttatgattaataatattaacttaacactttcataattaaagaatattctttttt

SEQ ID NO: 300290 - DNA, 421 bp, Zea mays
ttgaagggcgacaaccagcccaagacttcgggtggttacaaccgggggattgccgtcttcatcctggacgcgctcaccagacggccgtggtttcgggaggaagatttggctaaagcattgaagctccactcgaaacagttgtttcgcattctccgtttttttgaagaggataaactagtcacgagggatcatttaaaggtgtcagtaaaaaacgcaaaatcacataatgctgcatctgctaatgatggtcaaccaattgctattgatggataagtgaaagtaaagttgtacacacattcatactgtttcttggattatgctcatatcttagttgttttattgtacctttttcacctttttatgttatatttttatgtatatttggtatttttatatttattttactctattttttttcttt

SEQ ID NO: 300291 - DNA, 321 bp, Zea mays
ttttgataatgatcgtgttcgtgcgcacgcaaataaaactctacgggggatggttgaaaattataatttggatgttagttttaccccaaaccaaaatcttattttatgtgccatttatcaatcatggatagaacccataactacagcttttgcacaaactatcctgcttaaacctaatgatttccacccttttaatttaactgccatggcatgccctgccttgccactgtaccctttgtcacaaacataatctgaactgtggatcttacccattcttaaacaaattatatcattcttcaataaggttggtttcaatctttc

SEQ ID NO: 300292 - DNA, 218 bp, Zea mays
gctggcgaactccatttcgatcccatttgaaggcaacccatcctcggttccttcggctagcagcctctcacccttatggccaagatcaagatcgggatcaatgggttcggcaggatcggaaggctggtggccagggtggccctgcaaagcgacgacctcgagctcgtctccctgaaccaccccttcatcagcacccgttacatgacctacatgttcaa

SEQ ID NO: 300293 - DNA, 446 bp, Zea mays
  unsure (1)..(446): unsure at all n locations
tttnatggtccaactagaaacatagcaagcgcactggtgtaccaacaatggcaggcgagatatttagtcttcttatgcttcctggtctttctgcaagtgctgctactgagaccatttttccgaaatgctcgcatgcttctatagcttccctatttcccccgtacctttaaccagcggagtcattgtgttgtgaaaacccaattcttcaaccctacaggatccaacaggcaatcacagctggcatcttacctttatcacccttgttccttcaacaattattagtctctattacatcaggtacctttgttgcatttattggcacaaaacattagggcacaactaactacatcaacttgtgcttgcaaaccttacttcctactctcattaacatgtgtttcttccatttaaccaacttgctgaattgaacttttgtttttatttgcaat

SEQ ID NO: 300294 - DNA, 352 bp, Zea mays
tcggtttaaagctatgctttatgtccactccggatggtgaaaactgtggacttgtaaaaaatctagctgttactgctattgttagctcaagggtgatgcagcccttgattgagagcttcatttcttgtggaatgagtaagctgaatgacattcctactgaacacattcaaagaatggataagatctttttgaatggcaattgggtgggatcttgtgaaaattcagcttcatttgtatttcgattgaggtgcatgagacgcagcagtctgattgatcctcaggttgaaattaaaagggacaagcaccacaatgaggttcgcgtgtttactgatgcagggcgaattctcagacc

SEQ ID NO: 300295 - DNA, 293 bp, Zea mays
tcttttgtagtacgtgaccaagacctaaaggggctaccactgaccgggcacagggtggtactataacatttatgtcatgtatattgtgctgatgaactggtacaagacccttctcttacatgagtaagaggttgctgagtttgtctgcagcaaccctgaggagatccctttgcgtatctttggcactgaatattttgtctgagtctactggtgttttacactgaccaagagaaggttgcttcttacttgaagggtgctgccttgatagttgtcaattctgctcctagcaagga

SEQ ID NO: 300296 - DNA, 338 bp, Zea mays
aaagagggctaaatggtgaagcacaacaacgtcattttataattttttctttaagtagcattggttgtactatgtcaagacatgtttcaaccagcccgcccgcaagcagaggcgccgcattgtacgttaaaagaaggctgtgaagatatttccacgaccaactgctggccctcttcgtcccattgttcaatgccagactctcaagtacaacatgaagtcaagggctgggagaggctttacccttgaggagttgaaggctgcgggcattccaaaaaggcttgctccaaccattggcatttctgtggatcaccgccgcaagaacaaatcccttgaggggc

SEQ ID NO: 300297 - DNA, 247 bp, Zea mays
ttaccccttcttttattcaagtgccaccaatgagcaacaatggagaccaagatattttccctccttatgctccttgctctttctacatgtggtgctaacgcgacaattttccctcaatgctcacaagctcctatagcttcccttttttccccatacctttcatcaaatatagcttcaggatgtgaaaacccagctctttaaccatataggctttaacaaagcaatcgcagcaagcgacataccttta

SEQ ID NO: 300298 - DNA, 245 bp, Zea mays
actaaaccatctagcactgctctgctagagaggaggatatttcaccgtccttgcggagcaaaggctcaaaagtatcgtgtggagaacttgttcaagggaccccctgatgatgcgcattccaatgctctcagaaactgcgatccagagggtcctcttatgctgcatgtttcaaagacgaaacctgcatcttacaagggcaggttctttgccttctgtcgtggcttcttagggaaggttgctactgg

SEQ ID NO: 300299 - DNA, 267 bp, Zea mays
tttgatcgtttgaacaggctctaggactttctttgaatggcataattgaaataggctgttcaaaagatattaaagtccaaggtattattggaccatgcacatttttggagaagaaaggagccatgtgctttgacacagttgtcggtcaaggaaatacatcatcatggaaaatgtgtggtctcgatagaaatacttcttttacagtatttgttgatgtctcaccgagtgaactgatcgagccagccaggaaaccaaaatgcccatttt

SEQ ID NO: 300300 - DNA, 274 bp, Zea mays
  unsure (1)..(274): unsure at all n locations
tggagtaattttgtgncagcaggcgancgaaccacttgtctacagaaagagggactgggaagaatattgcgctgcaacaatcatcccgaaccagctggtaaatctggaaaggtaggttgaaaatgctgggacagcttttctagctcttcgaacaagaggtcaaccgagttatatcagttgaggagtaagcacaggaactaaatcttgtgccgacacaatacctccaatgtgtcaagactggatcaagaaaattgggtcggtaaagccttaaact

SEQ ID NO: 300301 - DNA, 240 bp, Zea mays
  unsure (1)..(240): unsure at all n locations
aataattctcgacccaaanccanccatccgcgggccctccgtacgggaggggggtcgccccatagccacaaacaagatcggtatcaatgggttcggcaggaacggaaggctggtggccagggtggccctgcagagtgaccatgtctagcatcgtcgcgggaacaaacccctcatcagaaccgactacatgacctacatgttcaagtaccacactggtcacggacagtggaagcaccatga

SEQ ID NO: 300302 - DNA, 307 bp, Zea mays
gggataaccacccctaagaagatttttccatatgacatggaggcacctgattcttgcaatgagctggcagccgttgaatatgttgagcacatttacagattctacaagagcactgagggcacctgccttcctctcagcagctacatgagctcacaggctgaaatcagtgaaagaatgagagctatccttatcgactggattattgagggacagtacaggcttactctaatgccagagacactttacttgacctgttacatcatcgaccagtactttatttatggagagtgttccaagtaaggagctt

SEQ ID NO: 300303 - DNA, 238 bp, Zea mays
tcgataatggtgttagcagaggttctggattggtggcttataaatctgctgaggatgctaaccgagctcttacggagatgaatggcaaaatggttgtaagcaagctttttattgtattctttttcacttcttatagaattcagaaatgcattattactggctcaattttcacaaattctttccgtttcatttggcgccttcagtaggtccttgattgctcaatttgttaatctgtttt

SEQ ID NO: 300304 - DNA, 338 bp, Zea mays
  unsure (1)..(338): unsure at all n locations
tttatgnttttatccatccatccacgntacctgcggccctcttcatctcaaccgcgtggccaatatcaagatcgggatcaatgggttcggcaggatcggaaggctggtggccagggtggccctgcagagtgacgatgtcgagctcgtcgccgtgaacgaccccttcatcagcaccgactacatgacctacatgttcaagtacgacactgtgcacggacagtggaagcaccatgaagtcaaggtgaaggacttcaaaacccttttcttttgtgagaaggaggttgctgtgtttggcttcaggaacccttaggagatcccgtgtggtcggttgattctta

SEQ ID NO: 300305 - DNA, 290 bp, Zea mays
  unsure (1)..(290): unsure at all n locations
atcaatatcggcagngcgnagagaggatcgtcggacagaacagcatgaagatgggcgatcgttctcgtcgtgtgcctggctctgtcagctgccagcgcctctgcaatgcagatgccctgcccctgcgcggggctgcagggcttgtacggcgctggcgccggcctgacgacgatgatgggcgccggcgggctgtacccctacgcggagtacctgaggcagccccagtgcaacccgctggcggcggcgccctactacgccgggtgtggtcagacgagcgccatgtaccagcc

SEQ ID NO: 300306 - DNA, 364 bp, Zea mays
ctcgtagagagaaggaaaaatatccccaaaccctagctcccgatctcgatggcgaaccctcgcgtcttcttcgacatgaccgtcggcggcgccccggcgggccggatcgtgatggagctgtacgccaacgaggtgcccaagaccgcggagaacttccgcgcgctgtgcacgggcgagaagggcgtgggcaagtccgggaagccgctccactacaagggctccaccttccaccgcgtcatcccgagtcatgtgcagggcgggacttacccgcggaacggaccgggggagtcattaggcagagtcccgcagagtcggccagccacgcccgtggttcatgcacgcgccacacacgtcagttattgac

SEQ ID NO: 300307 - DNA, 212 bp, Zea mays
atcgataagcctcactgtgagagagggacgcggcctgatctaccggatttgagaggcaacatccatcgctgcgaaattatccatccgcgtccttcatgggcagccgcggaaccggggaaggccggaagcacaagctctgaaaacgtcattaccaacgccaggatgagattgacaaacatgctgatcgcggagcccatccacttcgaccacat

SEQ ID NO: 300308 - DNA, 358 bp, Zea mays
tctttcgtagagagaaggaaaaatatccccaaaccctagcttccgatctcgatggggaacccttgcgttttctttgacatggcccgcgggggggcccccgggggcccgatcgtgatggagctttaccccaaccaggtgcccaagacccgggagaactttcgcgcgctgtgcaccggcgagaagggcgtgggcaagttcgggaaggcgctccactacaagggctccacctttcaccgcgttattcccgagtttatgggccagggcggggacttcacccgcggcaacggcaccggcggcgagttcatctacggcgagaagttccccgacgagaagttcgtgcgcaagcacaccgcccccg

SEQ ID NO: 300309 - DNA, 395 bp, Zea mays
tttctgtcccctctagccgccgcctaccgctcgcgctctcctcgcgttcgggaaggtcgtttcgccatggcctcggagacggagacgttcgccttccaggcggagatcaaccagctgctctcgctcatcatcaacaccttctccaagaacctcaagcttggcatccacgaggactccacgaacaggaccaagattgctgagctcctgaggtaccactcgaccaagagcggggatgagctgaccagcctcaaggattatgtgaccaggatgaaggagggccagaacgacatcttctacatcactggtgagagcaagaaggctgtggagaactccccgttccttgagaagctgaagaagaggggctatgaggtgctgttcatgggggatgccattga

SEQ ID NO: 300310 - DNA, 329 bp, Zea mays
ttttctttatggagcaagtacaggttgttggggttacttgcttgggaatgtatggtgctttattagcacataagaagtttgacacatgtatcatggatgaagctggacaaattacattgccggttttactgggacctttgatgcttgcaacaaagttaggactagtaggagaccattattaactttctccactggttcatagctctgaagctcgagaaaatgttatgggcatcagcttattttgcagattgacataagtacatttccaggcaatttcagtactgctatgcctctaccgtatgatatctggtatcatggagctcttaatt

SEQ ID NO: 300311 - DNA, 247 bp, Zea mays
tttttgagaaggaaatatctgatgatgaggacgaggaagataagaaggacggggggggcaaggaagaggatgttgatgagaaggaagaaaaggaaaagaagaagaagaagatcaaggaggcttctgatgagaggcaaaaggagaacaagcagaagcctataaggatgagaaagcctgaggagaataccaaagaagagaaagatgctaactacaagagcttgaacaacgactgggaggagcatatcgc

SEQ ID NO: 300312 - DNA, 412 bp, Zea mays
ttctgattatctcaaagctgtcaagagtgtgactgcaatttctacagacaatggagatgattatccaaaatctgagaaatgaacattcaatttattacatttttagcaatgagcacatcaacttcttggttacgtacccattcgattttcgaattgatgagatgttatcgtactacatatcttttctgcgggcgataagtgggaagttgaacaagaatacaatttctttgctcgtgaaaacgaaaaatgatgaggccacttcctttcctttatattttgaggcctttaagtttgcttttcactaggataagcatatttgagtttttatacgtacctttacactcaatgtttatcacgtttgaaataatttgtaacccattttttttccggacgcctatttaaaatatttttt

SEQ ID NO: 300313 - DNA, 187 bp, Zea mays
  unsure (1)..(187): unsure at all n locations
tgctatatctgttatnctccacaggcaaacctggggcatcttgacagatttgcaggtgtcttttacactgtatatcattctaagttgaaagaactattgttttagaccttattattcaaacaatcgactctgttattgtgtcccattacaacattgactagtatccattttgtctcttctctcttat

SEQ ID NO: 300314 - DNA, 421 bp, Zea mays
tgttctagatcgcgagcggccgccctttttttttttttttttttttttaaggaatgcatatccataactggaacaaaccattaccatattgttcatacatgttgctcatagtaaaaatctcctcatcttggttcataacaagatggtacagtgggtagtactattctctagtttggtcatggatggcagaatgacggtggctaaatgtacccctctcaacatcctaaccacttaacctgacgtggttcccttcaatgataagagtagcaaaagcaagtgtttcaccaactgtccaatcaatgccttttctagtctcaatcatttgacgcctttgataaaaaaattcacagccctgtgaggattgaaattttggcagagtagtcatggtttcttcaacacgttttagaatctctggcttgac

SEQ ID NO: 300315 - DNA, 355 bp, Zea mays
tttttgaccacagatctatccattctggcgttcacctttatgtagtatggagcgctgatgatcctgatcagacaccgtgaggattgtgttcgttcggatcggtaggctgggggccagtgtggccatgcactgtgaccatacaaagctcgtctgcgtgtacgacccattgatcagcaccgactacatgacctacatgttcaagtacgacactgtgcacggacagtggaagcaccatgtagtcaaggtgaaggactccataacccttctctttggtgagaaggaggttgcatgtgtttgcctgcacgaaccctgaggagatcccgtgggggtaggttggtgctgaatattgttgtga

SEQ ID NO: 300316 - DNA, 307 bp, Zea mays
  unsure (1)..(307): unsure at all n locations
acctgttacgaggtgggccgngctcgtaaccggagcgcttcggttatgggaactaccggcaccaggccgatgtgtgccatgcgtaccagatactgcagaagggaggagtaaagaaggagaacaatgaggagtcaaggacgacgaaattgcccacatacagcatgaaccctaaggcaggaggtagcatgaaccatcccaaaggagcaaacgtatatgagggagtgcaaaagaaaaacacaggtgaacaggacatcacgagaaaacataggtaaaagtacacatagggcaaacagaaagagataaccaa

SEQ ID NO: 300317 - DNA, 302 bp, Zea mays
  unsure (1)..(302): unsure at all n locations
ttgtactatacgcaaattgcaccaagaaatccatcgagaggccgtcgacaggggaattaatggcgttctcttttatcagcagccaccgccgccttattctcgtagtcgccgtcctgctcttcttgcttgttgttgatagngtttgtactctttccttctttgtgcttgttttttctcttcccgngagatccctctttttactttcttttttccctatttttatctaatttttttcttttttctatttttttatttttttcctttctcactttttctttcttttattatttattttttctttt

SEQ ID NO: 300318 - DNA, 259 bp, Zea mays
tcgttcatttgtctcttgcgcctccattgcggcctctgtcccttgcacggtcaatcttacctccaaccatgggtaaagagaagtcccacataaacattgtggttattggccacgcagactttgaaggtgacctccacctaagacagcttatcgtacacgcattggcagcagttgtcaagcgtacgcacgagtggaaggagtacgactatggtacaatgaacatccaggtcatggagtacgcgtgggtgcacgacccgct

SEQ ID NO: 300319 - DNA, 255 bp, Zea mays
tctaatacatccacgaaccaatttctcagtaaccagtacccactacctgtgaggggtctaaggaagtatcaatgttttttgttcctagagcactatataccgaaaccaaaggggccatccatcgccatcgacctgggaacagcctcctaaggtgagcatgtacgacattctcgatcgaggaccggtaagtgctaacgcccagccataccgtaccactcctaactaccctggcttcaccgacacctagcggttcat

SEQ ID NO: 300320 - DNA, 440 bp, Zea mays
tcgggccccggcagtctcccacagacggcgctcatcccccacatggattaggaaattagcaacattaggggaaaggccatcaaagatgcatctgttccggtgattccacaaaatccaagcgcccagcataatgagggagtttaggccatctctgaaggacccctgaatagcttcatttgcttgatgccaccactccataaaattaatattcgttggttggggggccaaaccctgcagcccgaattgccttagaaggaggaaccaacactctcttgagaaaacgcaattcacaagcagatggtcaattgtctccctttcctgctcacataaaggacatttttccggatgatccagcccccgcttctcaagtctatctgctgtccaacatttcttgtgagccaccagccacaagaagaatcgacatttgggcggagcccaag

SEQ ID NO: 300321 - DNA, 294 bp, Zea mays
  unsure (1)..(294): unsure at all n locations
attccgaggccacgacccacgcgttctttggacactacatccttaaagactgggtggcatatacccaaggcaaagccgtgcgcactctcactgacgacacatgcaccaccaacagaagcacggagcactcgagctctgtcggctttaagcttgcactagcaaagattttaccaaggttgattacaggcctgaaggagcangnnnccgattgcgaccaatacgagcaccttggcaaaacagaccccgttagagagagctgatcattgagtgacttgtacttggatcttttgcctt

SEQ ID NO: 300322 - DNA, 114 bp, Zea mays
tgtcttttcagaccattagttttatttactgcagggcgcataagaacccggtcgacaccatgagggttttgctagatggccttcttatcctgcatctcgttttatgctcattct

SEQ ID NO: 300323 - DNA, 285 bp, Zea mays
tcgccttctcgtcgaagccgttcgtggctgtgctggtggccttcttactggacaacgcgatccaggtgcgtgacagcggcgtgaggagggacaggggctaccactggtgggacaagttccggagcttcaagacggacagccgcagcgaggagttctactcgctgcccttcaacctcaacaaggttttcccttccgtctgatcctgcagggtctgcacactttttctcgcagtcgcagttgccctgactggagtcaggcaagaaatgatcctatgcaaatgatgct

SEQ ID NO: 300324 - DNA, 309 bp, Zea mays
tcgattttgatcggcgaacagatagagatttgggatatacatggacatgctattcaaattctagaaacggataatggattatgccacatgggaaaagtatctcaggggatcaatgtaacagaactttaccaacattagatggatatggatgcactttggcttaggctgctctataaaaaatgatgaacttggatcgtccaccggattggctcagtcaagggacctggtgatacatgcacagaggtgcatgtacactcctgtgtaccagaaactaccggtagagctgctgggatcaattttgcaccaata

SEQ ID NO: 300325 - DNA, 326 bp, Zea mays
tcgcacagccgcggatagagaaggaaaaatttccccaaaccctagctggggagctcgatggcgaacccccgcgtcttcttcgacatgaccgtcggcggtgccccagccggccggatcgtgatggagctgtacgccaacgaggtgcccaagaccgcggagaacttccgcgcgctgagcacgggcgagaagggcgtgtgcaagtccgtgaatgccgttccactacaagggctctaccttccaccgcgtcatcccccagttcatgtgccagggcggtgactggaccctctatttcggcaccggcggctagttcatctacggcgagatgt

SEQ ID NO: 300326 - DNA, 290 bp, Zea mays
tcgcccaggcggccaggccctggcccgcgggcgcaccgcaccgtagtttggggcttgcgcaaggaagcgagagaaaatcgagtgaaaaggaaggggaaataaggctgaatcacagtttctggatcggaggagcatccccgcctaggtctctgcagccatggttcgcggatcgctcggcaagcttgcatcgcgcgccctctccgtcgccgggagatggcagcaccagcagcttcgtcgtctcaacattcacgagtaccaggtcgcggagttgatgggtaatatacgggatc

SEQ ID NO: 300327 - DNA, 271 bp, Zea mays
atcgtccgacccgaaagacgaggtataggaggtggcgagctacagaggctgcggatggacacggctacactgagagaagggctgccgctcctcaaggctgagcatgcattctacttggactgggctgttcactccttcagaattaccaactgtgagattcatgacaccacccagatccacacccacatgttctactccatcttaaacgacatcattcactctatcatcgacatggacactaacgtgatcaccatttataactctcgtttct

SEQ ID NO: 300328 - DNA, 422 bp, Zea mays
tctccgatcgatcgccacagccaacaccacccgccgaggcgacgcgacaggcgccaggaggaaggaataaactcactgccagccagtgaagggggagaagtgtactgctccgtcgaccagtgcgcgcaccgtcctttatggctgttcatcttttttactatcctgtggattaattgttatggttgcttttttacattctatttatttgtttcatctttttttttttttttttttattttattatttttattttattattattatttttttattatgttttttttatttttatttttttattatttattttttttttttattatttattctatttgttctattttttatatttttttttatatttattaattattttttattttttttattttattttttatttgtttatttatttatttttt

SEQ ID NO: 300329 - DNA, 293 bp, Zea mays
tctcctagatccaggacaaggagggcatcccaccggaccagcagcgtttgatgttcggtggcaagcagctggaggatggccgcacccttgcggattacaacatccagaaggagagcaccctccacctggtgctccgtctcaggggtggcatgcagatctttgtgaagacactcactggcaagacaatcacccttgaggtggagtcttctgataccattgacaatgttaaggtcaagttccaggacaaggtgggcattccaccggaccagcatcgccttattttttccggctat

SEQ ID NO: 300330 - DNA, 383 bp, Zea mays
ctcattatattgctctatgtagtcatagtgtcgtagttctgctcttctggttggtaatgtagtatattatttagctagcagtcagctggtgcttaatgatttattggattttggcggcaggtacattcaaagcacttgtgctacaacgggtgagggattgtatgaaggcctggactggctgtccagcaacattgcaaccaagtcctaaattgtcaagcaaggtttggatcatctaggagcttttggatgatgatgatggtgctggatatttagggttgggttggttatttttgtttttacatactatattactttatttgtttattttatttattgattttatttattattgtttgttctactgtatttatatttttttattt

SEQ ID NO: 300331 - DNA, 231 bp, Zea mays
atttgtttgccttctgccttctgcgcctccatttcgggctctgttccttgcaagtgcaggtctctcctccaaccatggttaaagagaagtcccacatcaacattgcggttattggccatgttgactctgtcatgtctaccaccacaggacactttatctacatgcttgtaggcattgacaagcttgtgatcgagagtgttagagaaggaggctgttgaaatgaacaagctg

SEQ ID NO: 300332 - DNA, 179 bp, Zea mays
ttctttttttatggccagacccgtgaacatgctctcggggcgttcaccctgggagggagtcatattattctctcctgcaacaagatggatgcatccactccgaaatactccatggcacgttatgatgtgattgagaaggaagtctcatcctacctcatgaaagttggctactaccctta

SEQ ID NO: 300333 - DNA, 292 bp, Zea mays
tcgctgtgaaagggagccatagagtatgaagagtttctgaaaactggtgacccggagttcagttggaagccaccgaaggatgaatggcagagcatcgccctaggctacacttctgggactacttccagcccaaagggcgtcgtgttgcatcaccgcggtgcttatctcatggcactcatcgttgccatcgtgtgggggatgcctgatggagctgttttcttatggactttttccatttttatattgaatatgattttgttacactttatccttttgctatttatttgcttta

SEQ ID NO: 300334 - DNA, 232 bp, Zea mays
tcggcggagaccagccctgaggacgtcggcggcatgcacgcggctgccggagtcctcacagaaagaggtggcatgacctcccatgccgccgtggtggcacgcggttggggaaaatgctgtgtctcgggatgctctgggattcgtgtaaatgacgcagagaaggatgtggatatcgtaggcaactctcttcgccgaaggaactgtctttctatctatgtatcgacctccagtt

SEQ ID NO: 300335 - DNA, 284 bp, Zea mays
cccattcatttatattgtgcaatgtattgggtttagccagagctcctgttgataatggatgggacattgagcccatcacgactggacaagaggctactgtcagattgtattataacataaactcaagacctttagttcacagtactgagatatggatgcatggaggctataacaattggattgatggactctcttttgctgaaaggcttgttcatcatcatgacaaagattgtgattggtggtttgcagatgttgtcgtgcctgaaagaacatatgtattggac

SEQ ID NO: 300336 - DNA, 450 bp, Zea mays
tagggaagctggccgcctgcaccgccgcgcacattactggctcgaccgaacgcagtcctgtctttgtcaatcgcaaggtgaaccacttcgttcaagagttcaagcgcaagaataagaaggacataagcggcaacccccgtgcactgcgccggctgcgcacggtgtgcgagcgcgccaagcgcacgctgtcatcgactgcccagacgaccattgagatcgactccctgttcgagggcatcgatttctactccacgatcaccagggctcgcttcgaggagctcaatatggacttgttccggaagtgcatggaacctgtggagaagtgcttgcgcgacgccaagatggacaagagcagcgtgcacgacgtcgtgctcgtcggtggctccacccgcattcacaaagtgcagcagttgtctgaggacttttttaacgttaaggaactgttgcaag

SEQ ID NO: 300337 - DNA, 297 bp, Zea mays
tctgttaaatgatagacagcacatctaagggcatcaagggcactgatggagcagcggacaaggcaattgagaaggttgtggtcgattcatcaaaccttggtgattttgttgggaaacctgtgttccaggctgagcgtatatatgagcatactccagttggagtggtcatgggtttagctcggactgctatgggaggttctactttgtacttttaatcacattaaggttatgtatggtaagggattggatctttctttctttctagtcattttttttatttcatgttttgttattttt

SEQ ID NO: 300338 - DNA, 419 bp, Zea mays
tgctgaagctcgcgcaaaagctgaaagagaggcccgccagggttcacagggggctgctgtgcatagggctcaacaggaaggctctgagacgcctgctgtcgacgccaagctacgagcaggtaggccagctgctgacgcaaggctgagacgcgtttggctaggcacaacccaggcctgttcatctggctacatgtgactcagactcctgtgacggactcagtaaagaatggtgctcctgagaaatggagactagtgaatgctcatggaacagctgtgggtctcccatctgatgatgacatgtgcaacagtgaagttggtcacaatgcacttggtgctggtcggattttcgcccaaggtgctaagcttgttgatcaagcttttgcctcaggtaaaatttatgttgacaatggttcaactca

SEQ ID NO: 300339 - DNA, 407 bp, Zea mays
cctgtacagatgttgagactggatcgaaagtcagcgaagacactcaacgacaaccccttggtgaagatgtcggcgaaccgcagcgtggtggggacgctgtgaacccgaacgtcacaatcggcgacccgctcgcggacaaagtgcaggtggcaagtgcaacagcaacattcgtgatgatgttctcctcctccctctctgtggtggagttttacttcctgcacagattccccctgccttttgctggctacctcatcttcatttccatattggctggattctggggccagtgtttggttaggaagatcgtgcatgtgctcaagagagcatcgcttattgtcttcatcctctcctctgttatcttcgtcagtgctcttacgattggtgtcgttggaacccaaaagagcatt

SEQ ID NO: 300340 - DNA, 412 bp, Zea mays
tgttcattacaatgctattatggatgctgttcaagaagttctccctgaagttagacatcgcctttgcctgtatcgtattatgaaagatgtagcagagaacttgaaagaacatgcagagtttaaaacaataaataaagcactgaagaaagtaacatatggatctttgaagataccagagtttgaaatggagtggaagaagattatcgaagagcatggacttggaggaaacgagtgcctcagttccctttatgagcaccgccaactctgggcacctgcatatctgagagataaattctgggcagggatgtctatttcacagcgaggggagtctatttcctcgtactatgatgggtttgtgtacccaaaaacttctttgaagcaattttttagtaaatatgagatgatattagag

SEQ ID NO: 300341 - DNA, 420 bp, Zea mays
  unsure (1)..(420): unsure at all n locations
ggcccatcagcgacaacgccggcggcatcgcggagatggccggcatgccgcaccgggtccgggagcggacggacgcgctcgacgccgcgggcaacaccacggccgccatcggcaaaggcttcgccatcggctccgcggcgctggtgtcgctggcgctgttcggcgcgtacgtcagccgcgccgggatcacggcggtggacgtgctgagcccgcgtgtgttcgtgggactcctcctcggcgccatgctcccctactggttctcggcgatgaccatgcggagcgtcggaagcgcggcgctgaggatggtggagaggtgcgccgccagttcgacaccatcccgggcctcgccgagggcctcgccgtgccggactacgccacctgcgtcaggatctncaccgacgcctcgctcaagaagatgat

SEQ ID NO: 300342 - DNA, 422 bp, Zea mays
tctgctgttcgaaggtcagtggctgtcgctgaaggggtaagactagcgacgtgcaccatgttaagctatcagcaatcaaatcaaaggcacattgtctatttctagccacaagaatgtctggctgaatggacagaccaagatacagagagctaatggcgataactcgatcccagcaagcgaagactgatcatcgcacaagaacacaacgtgttggattatgactaacagagcacatgttctaagagttagacgagaggatcaaagtctggaaacagatgattatgtctcccacacttgagcggaggcaccatgcgctcgaccgtctcttgacgtatcagaggtctgacttttaaggcattttccgtgctatgtatggtctcccggtgaccatccgactactggcccttcccttcacgagtttc

SEQ ID NO: 300343 - DNA, 337 bp, Zea mays
tcgttgaaccaagcttggacactaccatctgcatttgacaacaaaggaaactacgtgatcagcttgagccaattggtgcgttggatggccacaaaagctgaagagttgggtgttgaagtgtatccaggttttgctgctagtgaggtatcatcattattcattttagaaacccttatgtggaaggactaatatctctctgaattcttctctaacagataatttatgatgaaaatcaaatagttacaggagtcgcatccaatgatgttggtattgctaaggatggtgccaaaagggaatcttttcatcctggtgttgaactaagaggcatgtaaacttt

SEQ ID NO: 300344 - DNA, 399 bp, Zea mays
atcccaccggaccagcagcgtttgatcttcgctggcaagcagctggaggatgggcgtacccttgctggctacactcatcacactaagtgagcacaccacaaccggtaccaatgggatcggcaggatcggaaggctggtggccagggtggccctgcagagcgacaacgtcgagctcgtcgccgtgaacgaccccttcatcagcaccgattacatgacctacatgttcaagtatgacactgtgcacggacagtggaagcaccatgaggtcaaggtgaaggactccaagacccttctcttttgtgagaaggaggatgctgtgtttggctgcaggaaccctgaggagatcccatggggttccgttggcgctgaatatgttgctgagtctactggtgttttcac

SEQ ID NO: 300345 - DNA, 414 bp, Zea mays
cttcctccttcgaggagggaatttagggatatctatgtgatctttgagttgatggagtcggatctccatcaagtaataaaagcaaacgatgatctcacagcagagcatcaccagttcttcttgtaccagctgctccgtgggatgaagtacatccatgcagcaagcgtcttccatcgggatcttaagcccaagaatattctagccaatgctgactgcaagctgaagatttgtgattttggccttgcccgcgtttcattcaatgacactccatcagccatattctggacggattacgtggccactagatggtatcgagctccagaattatgtggctcctttttttcaaagggaagaatgttgtgcatcagttggatcttatgactgatctacttggtacaccttcagcagagtcta

SEQ ID NO: 300346 - DNA, 351 bp, Zea mays
gttctagatcgcgagcggccgcccttttttttttttttcggcaaaaaaaaaaatccttcgacgccaacagcaatagccacatgagctcataccaccacaacagcaagaactagccaatgatcaaaaagattcagatacggttggcagctcgatagaaccgacgaagggacaaaaatcctgtatagccaccgtaccagagaccgttgcccacacaacaaggtaaaggaggacactgctcacgggcagcgcaagcaccctgaaatccaggtgagggaccccaagaccctcttctttggcgagaaagaagttgctgaacttggctgaaagaaccctgatgagtacccatggggt

SEQ ID NO: 300347 - DNA, 222 bp, Zea mays
tgtttttttttcctcctggaatccacgatcatggaacatgatgcgttcaagaacatccccattataatgatgtcatcgcatgactcagtaagcattgatttcaaatgcatgctaaagggtgcagcatattttcttgtttagccgataagaaagattgaattaaggaacttgtggcatctcgattggagaaaaacaacatgctaacggtagtcctaatgctta

SEQ ID NO: 300348 - DNA, 127 bp, Zea mays
gtggtgtggaccggaaggacttgaactcatatggtagccgtcggggtaatgatgaaataatggcaaggggaacgtcagcaaacaataagatcgcgaacaagactatttacggagaagtaggacccaa

SEQ ID NO: 300349 - DNA, 169 bp, Zea mays
tgcggtcgatctggacggccgactcgtttctgtgagctaccgttcttagatccagccgtgaggtagattctccacatccagggcggccagtgcggaaaccagatcggatctaagttctgtgaggacgtttgttttttgtgtggatttttgtcccaagtagaattgtttg

SEQ ID NO: 300350 - DNA, 328 bp, Zea mays
tttgtgtatagtagtttatgatggaaaggggctgttcagtgctgctcgtgtttggtggatgttccgtgtatttggacatgataaagtttgggtgttggatggaggtttgccccaatggcgcgcttctgggtatgatgtttaatcaagttcctatagtgatgccattttaaatgtcattgcttctgttgaagctatttataaagtttactttggtctattgtttggttttaccacttttgtagctttattttatttttattttttttgtatgtttgatcatttcaatttgtttatcattttctatttttataattttttattttttttt

SEQ ID NO: 300351 - DNA, 356 bp, Zea mays
tgtctgctgccaaaaagctagttccttctgttgcacactctaaaaagagtgaaactgatgatgagggtgccagtaatggacatgctaagaggcacaaaaagaaaggacctgtgaaagaggataactctaagagtggtagtgacctcagatcaccaatctgctgcatccttgggcacgtcgatactggaaagacaaagctactagattgtattaggcgcactaatgtccaagaaggcgaagctgggggtattacccaacagatcggagcaacatacttccctactgaaaacattagagagagaactagggagttgaaagctgatgctacactcaaggttccaggcctgcttgttatt

SEQ ID NO: 300352 - DNA, 443 bp, Zea mays
  unsure (1)..(443): unsure at all n locations
tcgcatccatccttgctttctccgttccggagcatctcaaccccatggacatgatcaagatcgggatcaatgggttcgtcaggatcggaaggctggtggccagggtggccctgcagagtgacgatgtcgagctcgtcgccgtgaacgacactcttatcagcaccgactacatgacctacatgttcaagttcgacactgtgcacggacagtggtagcaccatgatgtcaaggtgaaggtctccaaaacccttttctttggtgagaaggaggttgctttgtttggttgtaggtacctttttgagattcctttttttaatttgtttatttaattagtttttttattttatttgttttatgctttttttttttattggattgattatttatttatatttattttnggattttccccccccccccccccccccttcttttcccccccc

SEQ ID NO: 300353 - DNA, 387 bp, Zea mays
  unsure (1)..(387): unsure at all n locations
tcgtttcaggtccacagaatcacgaaagttaacagggacgaagttctctcgaaggcagaaaatgatcttgctgcagttgttaatcaatacattgcaaaactagtaaaagaattacaaggaactgacttctggaaactcagaagagcctacacctttggtgtacaagaatatgtggaaacttctacacttttgtaattttgcaagtatgtgtctttattaaagcttgcaaaaattaatgattctttaatagcactttattggttatattntctntcttttttaatttaatagtttttttaattattttttatatagatttttttgatacttttttttgtttaatttatttatattcttttcatttaattgattttttttttaatattt

SEQ ID NO: 300354 - DNA, 278 bp, Zea mays
  unsure (1)..(278): unsure at all n locations
accttagctccacaatcattgcgtcgcaagattcgaattaattggtcctgggcgatttctttgggggtctgatgaccactgtccatgccatcactgctacccagaagactgttgatgggccctcgtctaaggactggaggggtggaagggctgctagtttcaacatcattcccagcagcactggagctgctaaggctgttggcnnagtgcttcctgtccttaacggaaagttgactggaatgtgctttcgggtccccaccagttattgttttgttggt

SEQ ID NO: 300355 - DNA, 367 bp, Zea mays
gtggattaccattcacaccaagcgcagatcatgagctactagctaactacaacgggtaccaagattttatgcctacttgcgcttgttgcgctttgagctgatgcaacaaaggtcgctatatattgcacaatggtcagtggctccaagctgatgatgacacaactggctccaccagatagtgcattgggagcatgaacacccagatacgcaaggctatcgctacaactagcaattagctgcagcgtgttacaacaaccaatctccaatgcgcaacaacagtgcttggctcatctgacactacataccatcagaacgcagcaggcacgacatttgctaccagcactgaggcagctagccatggtgaacc

SEQ ID NO: 300356 - DNA, 261 bp, Zea mays
ttcttcttctcgtccacagaatggggggtttcgtggggactcataagaccaaggcggagttcaaacgtttccaagttaaattcaatagaaggctgtctgtcaagacagactacagggccagtataaggctgattaaccaagacaaaaacaagtacaacacacccaaatacatatttgtttcgcgatttaccaacaaggacatcacttcccaaattatatttgctagtatagcttttgatatggatcttgcttctgtctact

SEQ ID NO: 300357 - DNA, 394 bp, Zea mays
cctgcatgcaccgtcccggaattcctttctggaccgacccattcgttcaagcatttgattagcgcaagaaaattcatgtgattctggtccagccggggacaaaatatgaaaacctgcacctatggtcaagcgaatggcgagatgatgacataacgtgtcatcgtgaaacacttatgcggaggtaagcttaaaaaaacttaaaaaccgcaacttattcttaaacccacaaaatcgcttaacaagttaagggcacaaaattatctgatggaggaacaaaaaaggaacccaagaaacaatctggtggttcaaaagcgaagacagctgaggctattaccgttgcaaaattggatattagagtgggacttatcagaaaagcagagaagcattcagatgc

SEQ ID NO: 300358 - DNA, 392 bp, Zea mays
cagggaccttcggccttgggatgaaggtgtacacgatatgaaaggcgcgatctgggagaaggatgaaccagttccgaagctacgtaaggagaagctttggcttagcggtggaaaataaaaccgacttaaaggggaaaaggctgtctagtcctcgatagattatcccttagtcaatagtaaatgtcaagggtatggatgtaattttacataggatgcgtcatgtgcctataaatagatgaacaatagcatcgtactgttcacgctgatttgtattcactcgcacgtcacacttggattcataccttctgtcaagccgaaagtacaaatgtaatttaatatcgttactgcttattcgggattgttcaatgagaaattaaataatctaatgattt

SEQ ID NO: 300359 - DNA, 375 bp, Zea mays
  unsure (1)..(375): unsure at all n locations
ttctatcgcttcacaaccaaaggtggaggaaaaaaagcttacccaggctcctgaggtggaggccccaaagattgaataagcttcttaatctgaagatcgcatatttgccagccctcttgcccgtaaactgtctgaagataacagtgtcccactatcaagtgtgaaaggtactggtcctgatgggcgtatttttaaggcagncnttcaatattccttntccaagggtgnnnctnannttggctcnntgttctnnngcctttnngttccttnntgtttgagtgggggggtgcnnnattaattttttaannnttttaaatccttttttgggccgcangtttggttttgtcctttttttcttgtcttgagttaagtttt

SEQ ID NO: 300360 - DNA, 307 bp, Zea mays
  unsure (1)..(307): unsure at all n locations
cccggccattattcccgggtccacccccccctttttacaaagataggcttnnttttactcgcctacctccgcggatcaaacctttcccctttttcccaattcccgccgccgttccatcccgtaacgcgacaccatgagggagtgcatttcgatccacatcggccaagcccgtatccaagtcggaaacgcgtgctgggagctgtactgccttgagcatggcattcaagctgacggtcagatgcccggtgacaagaccattgggggaggtgatgatgctttcaacaccttcttcagtgagactggtgct

SEQ ID NO: 300361 - DNA, 361 bp, Zea mays
  unsure (1)..(361): unsure at all n locations
ttttnctgccttacgactaggacgacgcaagcaccgggcatcctacaacggagggggggtgcccaagtctctgtcgggccttgttcggcaacgagcaccctacagatggctgggaggcacaccattattgtgatgcagccatcttaaaatagggcttgtagaacatttatggaatacaataacattaatcatgcatcggatggaatctgtgtgctttatgaaaagaaaactaaggatatcaacccaaagatccgaaacataacttatgacatcaacgacctctataactacagtgatggcctaggccacattaacacgcatggttatgaaaactctattcagacattcctgccataaacat

SEQ ID NO: 300362 - DNA, 287 bp, Zea mays
gtccttctttttaatgtgctgacgtaatagctgatgtggtgcttggaatggtggaacaccaaatgatctttttcatactcaacctttttttgctggtgggttgagtgataggcttgccaaatttgtgcgatctgagggtgctcttgggctctacaagggaattgttcctctctggggtcgtcagattccttataccatgatgaagtttgcttcctaagttaatatgtgctgctgcatgggttgtgattttacctgtgacttacgcgtacacttgggagaatcctact

SEQ ID NO: 300363 - DNA, 416 bp, Zea mays
ttcgtttttattttccgtgctatggatggactccgggtgaccatgcgactgcgggacgctcccctacacgagttccttccagaatggaacatccaggtcatggtaagtgaatcacgtgctgagacgggagccaaccaggaagatgccctcgcgcgaatcgaaaagctctaagaagtaaacgcgaagctgggctacctggagagcatgctaggtatatcgcaccctgaattgtcagagatgcaagaccgagccattttggaagctgctatagcaatgaccaaccagagggatcaagtgttcgcagaaataatgcgccctatggctggaacaccacaggaactggggcattaagtgactattatccgccaagttgctcagaaagtagtcgccaaagtgggcaagactatcaggtacaa

SEQ ID NO: 300364 - DNA, 415 bp, Zea mays
tcgtcttaatattgtccttacaggccatgataattattgcttggaatggtggaacaccaagtgatatttttgatgctggagtatttaagaaggttttgagcatatttattactgctgcaattttgaagttgggtcaagcaatcctagacctcatatttggttggaaagcaagaagaaacatgtcatttgcagtcaagctgcgatatatcttgaagttaatatgtgctgctgcatgggttgtgattttacctgtgacttacgcgtacacttgggagaatcctactggacttgcaagaacaataaaaagttggcttggtgatggtcagaatcagccatctttgtacatattggccatagtgatatatatggcaccaaacatagttgcttctatgctatctcttttcccatttatgag

SEQ ID NO: 300365 - DNA, 426 bp, Zea mays
ttgctctttgacaggcctccctctccccggctctccgccttcctcttccagtgcccgcgcgcgagatcgccgccccgtgtgggccctagatcccgatggcctcgcgccgccgcaccctgctcaaggtcatcattctcggcgatagtggggttgggaagacttccttgatgaaccaatatgtgaacaagaagttcagcaatcagcacaaggctacgatcggcgcggatttcctaaccaaggaggtgcagtttgaggacaggctcttaactgtgtaaatatgggacactggtggccaggaaagggtttagagtttctggctttgctatctaactgagtagcatattggtgtgtcctatttctatgatgtttaatttctttttgaattcatttgactacgttgagataacttggggagtatgagttttt

SEQ ID NO: 300366 - DNA, 277 bp, Zea mays
tttgcgtttttcactccccctttcgttttcggcccagggctcaagcccgccggagaggagtacaggacccaaaccccaactccacaatgaggccgtcgctgatgagatccaccttccagctcctccgccgccggagctactcctccgcatccgggcagcccgagcggaaggtggccatcctcgggtcggcggggtgcatctggcagacgctttctcttttcatgaatctcaacccactggtctccttcctcttgctttacgatatatctggcacccc

SEQ ID NO: 300367 - DNA, 228 bp, Zea mays
tgactattttcttagatcgcgagccgccgcccttgtttttttctcgaggaggagggacgggaatttcctccccttgattatgcctcgagagaaaagaggccattttataaccatcacaagaaggctgttgccatgaaagcactgatacatatctcctctgtcttatcaaatgctccatacctattgaacttatactgtgatcactacattaacaatttcaagtccata

SEQ ID NO: 300368 - DNA, 201 bp, Zea mays
ttccctgttcaagtgcgatttctatctaggagacgcgctttattttgaagggggggcgatctaatacattaaggagatatgcagtttgcacttgcatagtacactaactcatgatctcaccagataagatcttgttagggtgataggaataacagttaggataaatcaataatagaatatctatttctctttaatattctt

SEQ ID NO: 300369 - DNA, 186 bp, Zea mays
tgttattgtaccgggagcgcacatcctcatggcatccaaaatgttggcatggtgtgcgctcctaactctttgtgcaacctacactagtgctacccatatcccagggcacttgtcaccactactgatgccattggctaccatgaacccaaggatgcagtactgcatgaagcaacatggggttgccaa

SEQ ID NO: 300370 - DNA, 401 bp, Zea mays
tttcaagtgatttgtatcactcgtcatgccatccagtaaacatgggagtgtgctcatcctacttgcagcattcgactcccttgaaagatagcaaagactgcagctgggctccaatttttgttaggcaatcaaacttcaaactgcctgctgatcctactgtgcccattataatgattggccctgggactggtctggcacctttcaggggcttcttacaggaacgactagctttaaaacaggcagaggtggaactgggccatgctgtcctcttctttgggtgcagaaatcggaagatggacttcatatatgaggatgagctcaataattttggtgatgccgggtgccctttctgagttgatcgtagccttttttcgtgagggtcctacaaaagagtttgttca

SEQ ID NO: 300371 - DNA, 302 bp, Zea mays
ggaagaaggattacaaggacggcaggttctcgcaggtcgtctccaacgcccttgatatgaagctcagggacgaccttgagaggctcaagaagatcaggaaccaccgtggtctgcgtcactactggggcctccgcgtccgtggccagcacaccaagactactggtaggcgtggaaagaccgttggtgtctccaagaagcgatgagctctatatcaccctgagaaatcttggccgcactaccgtgttggtttgttttttaactgtttatgatgtaggtttgtttttttatttcaatttttatta

SEQ ID NO: 300372 - DNA, 394 bp, Zea mays
cgcatgccaaggaagagtagtaacatggttgataataggtacttgtagctaaggaaggagtcagttcaagcatgtttggacgcatgccaaggaagagtagtaacaataccaagtattacgaggttcttggtgtgtctaagaccgcaagtcaggatgagcttaagaaagcatacagaaaagctgccataaaaaaccatcctgataagggtggagaccctgaaaagtttaaagagctgtctcaagcttatgatgttcttagtgacccggagaagagggagatctatgaccagtatggagaagatgcccttaaggaaggaatgggaggaggcagcagcagtgatttccatagccctttcgacatttttgagcaactttttccgggttctagcacctt

SEQ ID NO: 300373 - DNA, 248 bp, Zea mays
  unsure (1)..(248): unsure at all n locations
cttgtttctagacacacagacaaccggagcgggaatcggtactaccaaccgaggacaatgtcacactaacagcgcctggacccatgccaaagaagagtaaatacaataccaatcattacgaggttcttggtgtgactaacaccccatgtcangattagcttaaaaaagtatacacaaaagctgacattaaaaaccatcctgataaggatggttaccctataaagcttaaagagctgtcttaagcttat

SEQ ID NO: 300374 - DNA, 350 bp, Zea mays
ttcttataatgaagaaatgcgcaatcttcatcgtagggctcgtgaaaatgctttgcggattttccaagagaatgaaaacttgaggattgacttagaaagtaagaagagagaactgaacttgcgagctaaggagcttgacaaaatatcaactgagaatgctaacgacaggaagacacttgatgatgagaagcagaaggcaaaatacgataatagtgaacttgagctagcaagtatagagcagcagagggctgatgcagatgttctgaagctattggctgaccaggagagggaaaaggaagatgtacttgctagaatgcttcaacttgaaaaagagcttcatgagaagcagc

SEQ ID NO: 300375 - DNA, 296 bp, Zea mays
attcagaatccggacctcacatatgtgacaataattacaactgggcacaggctacattaaagacatgatacctaaccaaatattaggctgctcagaatggtaaggacgaaatcgtgcaggactggaactggaacgaggctcttacatactcacctgatgaccaagcagcatcccaaagagccagggacttccacattggctggtttgttgatccattgataaacggacactatccacagataatgcaagatctcgtgaaggagaggctgcccaggtttactcctgagcaggctaaa

SEQ ID NO: 300376 - DNA, 187 bp, Zea mays
gtctagtcttgcttcgccgaattccaaaccctagcctcgcctgttgcgggcgcggcggagatggcgaagactctgcgatccaagcgcgagaagcggatgtggacattgcgcccagagatagcggagccattgtacaacaagaaggaggccgccaagcttaccgcgcaggccgccgcgcttgctgatt

SEQ ID NO: 300377 - DNA, 377 bp, Zea mays
tctgtcccctgctccattctcagccgccgccaatcccttcccgtgctccgcaaccgctgagtgagaagaagagatggccggcaagggcgatggcccggctatcggcatcgatctcggcacgacgtactcttgcgtcggcgtgtggcagcacgaccgcgtcgagatcattgccaacgaccagggtaaccgcaccacgccctcgtacgtcgccttcaccgactccgagcgcctcatcggagatgcggccaagaaccaggtcgccatgaaccccatcaacaccgtctttgatgccaagcgtctcatcggcaggaggttcagtgatgcgtctgtccagagtgatatcaagctgtggcccttcaaggtcatttctgggcctg

SEQ ID NO: 300378 - DNA, 351 bp, Zea mays
  unsure (1)..(351): unsure at all n locations
atcgacaccatgagggagttgctagccgctctcgctcttcatgatgttgatgcgggtggcatcttcactcttactatatgatattgccgggaccccccacgtcccgggcgacatctaccacatcaactgcatcggcctggtgaaggggatcatggaggacgaccagatctgggaggcgctggagggctcccaccgtctgatcatctgcgacggggggcccatgaagccccgcatgactagggacgacctntataacatcaacgccgtacataataaggggctgttgactgtcattcccaagcactgtcataacgctcttgataatatgatcaaaaaccctgctaactccac

SEQ ID NO: 300379 - DNA, 126 bp, Zea mays
  unsure (1)..(126): unsure at all n locations
acgatttctagganncngactcagaggcggggagtcataatgccggcacacgggggctctccaccactggcttctcaaccaagcgcgatgaccaattgtgtgaatcaacggttcctctcgtactag

SEQ ID NO: 300380 - DNA, 196 bp, Zea mays
tctttctagtcatcagtgtgaggaaactgctgccggactaatcaaaaacacgacccgcctttgcaattgtattcggccaagctattgcaaggttagcaagagcttttatagctctctgctgtagatttggcaaacctgaagaaagaacttgaataagaggagtaatcgcctgctctgttattgtgtccttttggag

SEQ ID NO: 300381 - DNA, 159 bp, Zea mays
tcgaccgcgtgctcaaaccggggggactctacgtctcctactagtgggggaggaccccgttgtaccgagccgaggaccccgaccacgttgagtgcatacacggcatctagcgcggcgacgcgctccctgggctacaccgtcaggacgtgatcgcgacca

SEQ ID NO: 300382 - DNA, 384 bp, Zea mays
aattaactagtgcgtggtctggtctccatctcgatcagagagctccgtgcgtcactttcccctcgttccattcatggagaatatgctccacctagccccgtcgtcccaggcccaggcattggccttggaccgctcctccgtcttctcgcgtgagcacgtgccgccggccgtctccgctgtcacctccctgccagttatcgacatgtctcgcagccgcgacgaggtccgccgcgctatcctcgacgccggcatggagtttggctttttcctggaggtggagcacggtatactatagtaggttatttttcgtcatatttctattttttgatttgcttttcaacttttaatcttttagtatttctttcatttacttttttttctgat

SEQ ID NO: 300383 - DNA, 270 bp, Zea mays
tctatcaagatcgggatcaatgggttcggcaggatcggaaggctggtgggcagggtggccctgcagagtgactatgtctatctcttccccttgaacgaccctttcatcagcacttacttcattacctacattttctagtacatatcttttctctgacagtggtagctccattatatattggttaattactttaattcctgtttcttttgtttgatgattcttttcatttttttattaatttattttttgatttgatacttttcttttttt

SEQ ID NO: 300384 - DNA, 195 bp, Zea mays
tctcgttcaatgacggcgcctacaacgccctccaggtctcccccggccacttcgacgagcgcgtcttcaaggcgctggaccgggtggtcgtggaggccgggcggcacggggtgcggctgatcctgagcctggcgaacaacctggaggcgtacggtggcatgacgcagtacgtgcggtgggcgtgggaagagggcg

SEQ ID NO: 300385 - DNA, 294 bp, Zea mays
cgtttcgtcgccgccgcgcgcctcggagaagagatagaggcggccgctgggtcgaccccgcgccacctccgcctgcctcccccggcaccgatcgggtttgatcgatggcgtcgaagaggatcctgaaggagttgaaggacctgcagaaggacccgcccacctcctgcagcgcaggtcctgttggtgaggacattgtccattggcatgcgtccatcatggggccttctgtcagtccatttgctggtggggtttttttgttgaacatttcacttctctcccggattaccctttttc

SEQ ID NO: 300386 - DNA, 261 bp, Zea mays
  unsure (1)..(261): unsure at all n locations
cctttctctcgctcttgttgagacggncgattggcttgtacaaggtagcagccttgagatccagccaagatccagccatgagggagattctccacatccagggtggacagagcggcaaccagatcggttccaagttctgggaggtcagctgcgacgagcatggtattgtccccaccggacgctattgttgcaccttcgaactccagattgagcgcgtcaatgtctactacaacgagtgctcatgcggccgtttcttgcctt

SEQ ID NO: 300387 - DNA, 305 bp, Zea mays
tcggtgtttagaccattagctttatctactgcagagcgcataagaacccgggcgacaccatagggtgtgctcgttttcctcgctttcctggcttttgttgtgagcgtcatctctgcttactagcgtgttttttgcttactttcttcttcttcttttatttttctttgttttttgtttgttttttttcctttcttctgtttttcatttttcttttttttttctctggtttatatttttttttattgatctatttgttttttttctcttttttctttctttttttcgtatttacttctatttgcttt

SEQ ID NO: 300388 - DNA, 330 bp, Zea mays
tcaccgcgtgcgaaccaagcagaccacaacaagaagaagcgtagtcggggggggaaggaaaggcgcggagcaagatgtcttggcaggcgtacgtctacgagcacctgatgtgcgtgatcgaaggacagcttctcttctccgtcgtcttcgtcgttcacttatgcatcgtttgtttattttccatgtgtttcttctttttttttacttgttggattttgttgttattattaattttttttttttattctttattttcttttattatatcttttttttctatatttttgttttttgactctgttctttttttcttctttctcttttttcttt

SEQ ID NO: 300389 - DNA, 396 bp, Zea mays
tctttttgcaagcctgcatctacctcattggaagctcacgtggtgttcgatgaaaaggagcaaagctggaacttcattttcgcggagtacgctgcagcagctggacatcatcatctctcaattgtatggcaaatagcggaggattactcccattgcgaatttctgctccaactccccatatactgccccatgcctgctttccgtgctgtcacacaagttcagcaggatgctgttggacaaggacagtcggtgcctggggacaaagttctcaacaccctgtccatcaggtgtttgacgaattgctttagcatcatacattgtcgttttttgcactcgtgcaattgcagaacggttgcagtgcagcataagctatcatggcctccgcctgtacagtat

SEQ ID NO: 300390 - DNA, 313 bp, Zea mays
tcggagcaagcaggaacacctcaatggcgcggtgggcacccccacggttgggcaggaggaagagataatcgggccgggcccagcgccggcgaagcagcggcagaagcgccctctccagttcgagcaggcgttcctcgacgccctaccctccgccgccatgtacgagaagagctatatgcatcgggatgtcgtcacgcacgtcgccgtatctcctgctgaacttttcatcactgggagcgcagatgggcatctgaagttttggaagaagaaacctgttgggggtggaattgctaaacatttacggtcttatctt

SEQ ID NO: 300391 - DNA, 103 bp, Zea mays
tctatttgtcactgatcgttgatcagcctagctagctagcgctgttttcctgggggctaatgacacccgttcaatgtgcgcgttcgcagagggtgtttcaatt

SEQ ID NO: 300392 - DNA, 154 bp, Zea mays
  unsure (1)..(154): unsure at all n locations
tggcgccgcctccgagacagccgncggagcgcatggacaccaccgacggggcgggtaccgcactcactggcaccactaccgctgcgcccaaggcgaggcgccgggcgcacctcatgggcacccgacgagcccttgtctttcccataaggagctt

SEQ ID NO: 300393 - DNA, 240 bp, Zea mays
  unsure (1)..(240): unsure at all n locations
attccctttttacccactctgttttactccaccaccgccataccancgcgccgagctattaaaaagaggtcggcgggcnaaagagtantctcagacgagaagaggtgaatatgagttccggcggcggcaggggcaagcccaaggggtccaaggctgtgtctcggtcgaccaaagctgggctgcagttccccgtcggccgtatcgcgcgctacctcaaggccggcaagtactccgagcgcg

SEQ ID NO: 300394 - DNA, 347 bp, Zea mays
  unsure (1)..(347): unsure at all n locations
tttatttatctccacagccaacaccacccggcgaggctactctacaaacgccaggagtaaggaataaactcactgccanccagtgaaaacgcataagtgccaccttctcctcccatnnnaatgaactgatagcactcttttccttttattttcaccacggcaaaaaaattcttcannnccatcanctnctttctttattttattcccttttttatatttacaaggagaagtatgcaccctttgaagacattcttcgtgctgctcaagaagcaattgtgctccccccatgggttgcacttgctatcaggccaaggcctggtgtctgggattacattcgggtgaatgta

SEQ ID NO: 300395 - DNA, 358 bp, Zea mays
  unsure (1)..(358): unsure at all n locations
ttttctacccacttcttttctcgctgctcaagcacgcntcctgcgcggggtccatattattgcacgtgttggccaaaaangccnnttcagtgtacggtgcggacccggagccggagctgctgcggctcgcggtggcggcgtcgttcccgtctcttcttttcgagatctacccgttccacgccgaggccttggccgggctcatctcggcgtccgtgcgcgccgcgctcgaggcgccgctcaactactcgcggaaccacctatcgtacctgctcccgcgcttcgtgccgcgggcgatatacctcgactcctacttgctcgccgnctacgacgtgaggcggctttggtagactctcctccc

SEQ ID NO: 300396 - DNA, 395 bp, Zea mays
ctcgctgctcaagcacgcgtcctggggggggtccatcttcttccagggcggggccgcggaggccggggcagtggacggggcggacccggagccggagctgctgcggcgcgcggtggcggcgtcgttcccgtcgctgcggttcgagatctacccgttccgcgccgaggccgtggccgggctcatctcggcgtccgtgcgcgccgcgctcgaggcgccgctcaactacgcgcggaaccacctagcggacctgctcccgcgctgcgtgccgcgggcgatatacctcgactccgacgtgctcgccgccgacgacgtgaggcggctctgggagacgcgccttcccgccgccgtcgtggtggcggcgcccgagtactgccacgccaacttctcccgctact

SEQ ID NO: 300397 - DNA, 267 bp, Zea mays
  unsure (1)..(267): unsure at all n locations
ggaaagctggcacgcctgcatgtaccggtccttaattcccttttctacccactcttcctttccatttcgatctcncaaccaccttttggtttgttctaaaaagtatcgaatagctacaaaanatattcantttgcactttcattggacaccaactcaagtcctcaccaaataatatcttgtgagggtgatttttattttttttttgaaaaattaaaaataacacgcttaaagccctataaagcttttataaatatctgcttttctta

SEQ ID NO: 300398 - DNA, 305 bp, Zea mays
  unsure (1)..(305): unsure at all n locations
tactatatcggatccaattataacaacctcgttgattattttacataacgcagccgcgtaactattaaccgctncaattctctgaactccgctccgcacgtttagaactctaattatctcctcatcactgcaagcctttttatttatcttctcatgaaaaatattggcttcagaatgagccaaagatgtgttcacctctgggccatcatagcggtactcactaacaagaggcactaaaagctttctgaagtctccattgacattctcaacaacgtgggcctggagcgatcacttaaacctgtcat

SEQ ID NO: 300399 - DNA, 394 bp, Zea mays
  unsure (1)..(394): unsure at all n locations
tgtactcacaaacagcgcgcgcttaaaggcctttgttttttgagataacaaggaggagaggagganatggcggtcacgatcacgtgggtgaaggcgaggcagatcttcgacagccgcggcaaccccaccgtcgaggtggacgttggccttagcgacggcagctacgcgaggggggccgtacccagcggcgcatccactggaatatatgaggccttggagttgagggatggcggatctgtttttttcgtcttggatgtttattactttactggccggggggtgggtgggggggtgaaagctagctaggatctgaatgctaaacttctcaccccttgccatttttatctagtcattcttggagaccaggagctggacacccttatcaagggcacca

SEQ ID NO: 300400 - DNA, 403 bp, Zea mays
tctcccaccgtcggtacagcagcgctgccctcttgcgcggtgggtttaagaagcgcccggtgggatcactcctcttcttccccggtcgtcgtcctatgcttgtccctgtctcggcaattctgggatactaaagaggaatcggtgattgtccggtcttcgaacccccgagatttgcatgtgaatcttcctcttcttctctttcgcctacatggcgtctctcgctgcgagccactacatcaagcgagtctagctcgcgcgacacacaatcatcagccatattgcaggaggggaggtgcggcatttattgtcacaaaacatcacggcacaacaactacaacaacttgtgctagcaaaccttgctgactactcttatcatcaacagtttttttcattcaaccaacta

SEQ ID NO: 300401 - DNA, 425 bp, Zea mays
  unsure (1)..(425): unsure at all n locations
tnctgatcgtcagctcggccacattcccggtagaggtgtccagtaagcagatgcaggtggtccctgtgggcgggaggcaggtataccagatcgtactccacgctatctactgcatcctcaagaaggagggcgccggctgtctgtacctaggtctcggccctagctacatcaagctcatgcccgccgccgtcatcatcttcatgtgctacgaggcttgcaagaagatccttttttacaatgaggttgatttttattatttctttttaattttattgtggggggggttggtttatttttttctttttattcatattatttttttacatatttatatttattatattatatatataattttatttttattaatatttataattttttatttactaattttatttttataattcactttttctttttat

SEQ ID NO: 300402 - DNA, 322 bp, Zea mays
gccgcccgcagtcccgtccgatttcccggttcgacctacccgtcttttctttaagaccattagctttatctactggggagcgcaaaagaacccgttggacaccatgagggtgttgctcgttgccctcgctttcctggctttcgttgagagcgccacctccactcatacaagcggcgcctgaggctgccacccatcgccgtcggttgatgtaccgtcgccggtgcatctgactattgcggttcactttggacttgagcagcatgtgcatgagtcgctgcagcattctccacatttaagaactggtttccaccatatttaaaat

SEQ ID NO: 300403 - DNA, 304 bp, Zea mays
tcactcacacttgagccccacccgtgccgcgccgtgcccgcatccctgagcctgactctggcgccgccgccgcccatgtccgccgccccgccccgccgcgtggtcatctgcggcgagttcgttgacgccattgacatcgttattgtctcgtgccaggacaaggaaggcatgcccccagaccagcagcggctcatctttgcttggcaagcagcttgtggactgacgcacgctggctgactacatcattcagaaggagagcaccctccacttcgtgctggggggggggggaggcatgcatatcttt

SEQ ID NO: 300404 - DNA, 402 bp, Zea mays
tttcttaacgtacccttttccgcgccgccaggtgggggaggaagaagacgcgggggcccaaggaggagaacgtgacgcttggccccgctgtccgcgagggagaacacgtctttggcgttgcgcacattttcgcctccttcaacgacactttcatccatgtgacggatctgtctggaagggagacgctcgtgcgcatcactggcggcatgaaagttcaagctgatcgagatgagaactggccttatgctgctgtgctcgtctaacaggatgtggtgccacgatgcctggagcttgcacttgccgcattgctacatcagctcgactctgataaccctgacatgacccaaacccctggccctggtgctcagtctgctcttagagctcttgctcgatctggcatga

SEQ ID NO: 300405 - DNA, 322 bp, Zea mays
tgttggcttctcctcccccaccggttcgtagtcaggttctgattcgtgggcggtaggcaagagatggcggcgtctgacgttgagtaccgttgcttcgttgccggcctcccctgagccaccgaccaccactccctcaacatctccttcagcacctacggcgaggtcctcgagtcgaagatcatcctggatcgggagacgcagaggtcccgcggcttctgcttcttcaccttctccacggaggacgcgatgcgcagcgccatcgatggcatgaacggcaaggagctcgacggtcgcaacatcaccgttaactaggcccactccc

SEQ ID NO: 300406 - DNA, 370 bp, Zea mays
ttcttctcctgcttcgtctcttcactcgtgtggaagctatgatttagcccgcggcgcccatcctactttccttctcgtcatcgttctcatcttccccagccgccgccccgcctcagatggatccgtcgccggcgtggccgtcccggcggatccgccaggagatcttaaccttcttcgagtccaaggcacataccaggtggccgccgagtcccgtggtccccgtcaacaaccacacactgctgctcgccaacgctggaatgaaccagttcaagccggtcttactcggtacaatggcgccggactcgccgttagaacgtctgcaccgtgcctgtaacacccaaaagtgcaattcgtccggcgggaagcacaa

SEQ ID NO: 300407 - DNA, 309 bp, Zea mays
tcgcggacgcgtgggccgtcactcaacacagcacaggcagttcgagagagagagagagagagagagagataaagatgtcgtggttcgggcaccaccaccacaaccagccggctcccccggcgtcgggccccaaccaggtgttcaagatcttctgccgcgccaacgagaactactgcctggccgtccgcaacggcgccgtcgtgctggcccggtaaccccaaggacgaccaccagcactggtgcaaggacatgcgctctagcaccccggtcaaggacgaggaaggcatgccggcgttcgcgctcgtcaac

SEQ ID NO: 300408 - DNA, 250 bp, Zea mays
ttagtggccaaagttcttcggagtccgaagccggctggtttgatctgggcaggaagcgttactggaaagttgtgagtgtgggggcagcactgtttttgtttcatcatcttgcttttataaacgctgttgtatattactctacatcgtttttactgtttttcatttattgtattattttttatttttcattttgtatttctgttatttatttttcttatattttttttgattctaggtttatttttttttt

SEQ ID NO: 300409 - DNA, 336 bp, Zea mays
tcgatgaaggagatgtttgacagggcagctcatcttggtgtaaagaggatggggattgggattccacacaaaggccggttaaatgtcttgggaaatggtgggaggaaacccttgcgacaaatatttaacgagttcaatggtggcaccaaacccttcaattaaagccaagggtttttttccggggcttgtgatttcaaattccaattttgaaccttattttatatggccaccaaggttgggtaacatattcatttgttactgattgcaaacccgtgttatttggtaacattatattcccatattgtttgagaaaacaagtatcgtattcattttcct

SEQ ID NO: 300410 - DNA, 301 bp, Zea mays
gttggttcttgtaaacaacatgaattgattattcctgagcctaagaaaatggaatccatcatcagttacaatgaaatagatcaatctattgttggttctcacaaacaagacaaatctgttgttagtgtgcctgagcaaatccaatccattgttagtcacagcaaaccaaatcaatctactgttgattcttattgacaagctgaatcaattattggtgtgcctgagaaaggccaatccattaccagtttcgattaactatgaccaggccattggtgggttttttaaacaagatgagcctttt

SEQ ID NO: 300411 - DNA, 382 bp, Zea mays
  unsure (1)..(382): unsure at all n locations
gacgcggcctgttgtcccggcttttagacgcagcttccatcgctgcgaagctatgcattcgtgttcgtcatggccgccagcgtcaccgtggaaaacctcaaccccaaggtcttaaaatgtgagtatgcagtccgtggggagattgtcatccatgctcagcgcctgcagcaacaactacaaacacaaccagggtctcttccttttgatgagatcctctattgcaatattgggaatccccaatctcttggtcagcaacctgtgacattcttcagagaggttcttgctctttgtgatcatccgtgccttttggaaaaagaggnaaccccgtcctagattttcttttcatctaaaggtgggcgatgttgaaggcagaaccggccct

SEQ ID NO: 300412 - DNA, 275 bp, Zea mays
tcgttgactgctaataatattgagccaggttgctgtaccaagccgtgcttacttattaacacagtatcaggtgctgcctttctaccagccggttgaggataacccaccatccctgttacaactacaacaattgttgccatatgtgcaacttgctttgacatacccaggaggcttgtaccaacaacacatgaataggagcgccgctgtttagattgcttattggtgcgaattgaataatatattgttttggctgatgtatgtgggcagctcagaaa

SEQ ID NO: 300413 - DNA, 245 bp, Zea mays
tcgcaggctgcccgatggtcttgtcggtatttcactacggttccctcatctccgaccttgcttttgactgtccctacaaaattcttggccttatcaagggcttcaaccggacctttaatgtccattgtattgaccacagaggcacaacagagcatgcggcgaggacctgcacgctttaaaccgacggcgaagcgacgaccaggccatatgccatggtacaaggcctacaaggagaaagtttattc

SEQ ID NO: 300414 - DNA, 294 bp, Zea mays
actcgttgaccaccggcgatgcggagcgagagttaacaatgattcaatcaggaccgatcatgctgctagctgaccatgatgagttagtgtactgacaactgtcgtaatcatggcccactggggccactgtgtctatgcggaggagaccaagcttaaagatcaacccgattgtccccgtcgctcgattgtgaacaaccgaaccggatcgtaccctcaccagacgaaagagaaatggccttcgggcgcagagttaaagcggacttagtcaccaaggcgatggtggcactgccgcca

SEQ ID NO: 300415 - DNA, 216 bp, Zea mays
ctgtcgtatagccgctggctagctagctagttgagtcatttagcggcgatgattgagtaataatgtgtcacgcatcaccatgggtggcagcgtcagtgtgagcaatgacctgaatgaacaattgaaatgaaaagaaaaaagtattgtcaaaagaagaaaccaaatgtaaaaatactatagataaacaaacaaattgaaacgaaatttaagcctcac

SEQ ID NO: 300416 - DNA, 354 bp, Zea mays
ctactataggcagagcagacccggccgcaaccaccgttaaggaatttgcaggacatcccactctcgcgagctggagtaattacgaacaggcccggaccaatcgcgcttcaaaacagttgctcagactgaatggccaatggaacccgccctgtatcggtgcattaagcgctacgggtgccatggttacgcacagcttgaccgctactatagctagcgttctagcgcccgactcttttacctttgttgtcttcctttttcgaaaacttagttgtttaaccctacaaagctctacatgcaaggctacctttagggttaccattatgagctttactgctccaacaatcaaaaaaacta

SEQ ID NO: 300417 - DNA, 325 bp, Zea mays
tttttctcgtacgaagcatcatacaaagcggggggtatttgcaacaatagagcaacaatggataccaagatattttccctccttatgctccctgctctttctacatgtgttgctaacccgacaattttgccttaatgtttacaagcttctatagcttccctttttcccccatacctttcattaattatagcttcaggatgtgaaaacccaattctttaaccattttggcttcaacaaggattttcagtaagcaacataccttttatcgcccttgttgtgttaacaattgccagcccctatttttggtgcaatcattggttacaat

SEQ ID NO: 300418 - DNA, 330 bp, Zea mays
gatgcctactccgcccagaatgaggctattgacccgcggcagcgcctgcggctactggccctgtagaccattgaactcgacatggatccccattctatgcgcaaccacctcggcagttactagtgcaagctgtgcctgactctcaacaacatctaggggaactacctagcccacacgcatgggaagaggcaccagaccaacctgtccaagcgcgccgcccgagaggacaaggatgcgcccgcgcaggcccaagccaacaagcgcaagcttgccccccgcacgtctgttaagattggcagaccctggtataaagttaccaaacaatatgat

SEQ ID NO: 300419 - DNA, 190 bp, Zea mays
tcggaaactatgtgctgtactatacccgctggctagctagctagttgagtaatttagcggctattatcgagtcataatgagtcacgcatcaccctggttggcagatgaagggcgagcaatgacctggatgaacaattgaagtgaacagaaaaaaggattgactcaaaaaaaaaaaaaaaatggctggcga

SEQ ID NO: 300420 - DNA, 266 bp, Zea mays
tttttgacgcgtaagtcctttctgccagcgggctattcttaaccctggcaccctcttacaacttgaacaattgctgacattcaacacaactggctttgacaaacccagcagcatttctaccaacatccgatcattgctggtgccctcttttagatttcttattagttatagttcaataataaagtttcttgtcttatgtttgtggttactcagaaataagaaattacatttctctaaaaaaaaaaataaaaggtctgtccttctat

SEQ ID NO: 300421 - DNA, 337 bp, Zea mays
tcgctaaatggtagtagtatttagccagggggctgcagcaagccgtgcttccttcttgacacagcaacagttgctgcctttctaccagcagtttgcggctaaccccgcaaccctcttacaactacaacaattgttgccctttgtccaacttgctttgacaaacccagcagcctcctaccaacaacacatcattggtggtgccctcttttagattgcttattagttgtaattcaataataaagttttttggatgatgtatgtggccaaccagaaataagaagttacattttcagattctaaaaaaaaaaaaaaaaaaaagggctgccgctttagagga

SEQ ID NO: 300422 - DNA, 365 bp, Zea mays
gccgaagcgcttcagttcggtgcgcaggaacgcgtcgtccgacagctggccgtcggtgtactgcggcgcgtacttctggatcgcctgcgtgatcgtcaggcgatggaacggcttcgcgaggtcgagttcacggccttgatattgaatcgtcgcggtgccgagcgcgtcgatcgccgcctggcggatcagctgctcggtgaagtccatcagccagcggtagtcggtgtacgcggcgtagaactccatcatcgtgaattccgggttgtgacgcggcgacacgccttcgttccggaagttgcggttgatctcgaacacgcgctcgaagccgccgacgatcaggcgcttcaagtacagctccggcgcgg

SEQ ID NO: 300423 - DNA, 352 bp, Zea mays
tcgcgaaaacgaaaataccgagtcgagtcagcgatgaatcccttcgccaaaaaaccaacaccgcgagaggtgatgcggagcagcaagcgggacctgacgaatgctacgcgagggatcgagagggacattgcgtcattacagcaggaggagaagaaactcgttgctgaaattaaaaggacagcaaaaactggcaatgaggcagcaacgaaaattctagcccgtcagctgatcaggttaaggcagcagatttctaatttgcaaggtagccgagctcagattcgggggattgcgacacatactcaggtgaaattttctttttttttgctttattcaatgttgattgtcaggttat

SEQ ID NO: 300424 - DNA, 326 bp, Zea mays
ttttcatttttgctaaagcaaccttgctagggggggggggaccaccattgttagcaccactttctacatttatttaagctctacacatgttaaaattttttcaccacactgatacttgcttcatttctttgcctaaatgctttcaagctataattgctgcccaattattccctaacctgttcatccattattagcttattcatgcgtaaacccagcttcttaaccctatatgctccaacaagcaatcccaacaagcaacatacctttatcacccttgtttcaacattcgtcagccctatctttggtgcagtcattggtacaaacca

SEQ ID NO: 300425 - DNA, 332 bp, Zea mays
aaagcaggctgatacctgtccgctatttccgcgatgcaaattttactttgcccatgagctgattaaaatgggacgggcccaacctgtgcaggtgggagaagacaacaagccagatgtcttctgggaggccctgtgctttaaggctgtctaccgcacatccccacggttgaaggacaagaatatggatgcccatccttcttgcctcttttcctgcttcaacaagattggacgtatttgtgatcaaatatgtttctggtgagcttatgcatgaagacctgtctaccgattgatttcatgcttttgtacacattgatccattttcttttttttgt

SEQ ID NO: 300426 - DNA, 376 bp, Zea mays
tttcggtcagcctagcaataagctcatcgacgccagattggaaaactcgagaccatgaaggggctattcgtggccttggctctactggcgctcgatgcgagcgccggctacagcacaagcggtggctgttgatgccagacaccaccgagttatgtaccgagtccgtgctatatgcccactacgacttatctgccgacgtagcagaagccgaaaccatggcaatacctgactcaaccaccgaagctaatcgcgtgctagcagttcggatcctgcatcgtcggcagctgtctgcagtaccttcctgggccagtgcgtcgagtgcctgaggcaccagtgctagcccggcggcgactccctacagctagccacatgtgcc

SEQ ID NO: 300427 - DNA, 372 bp, Zea mays
atcctgcctcttatttcaagtcaatgcatgttactcatgcgcccagtatgtgtatgaagatatgggggagacaaatgaggagatggttcgaattatatgatttttgccacgttaccttgatgcaaatttgccaaatatgatactgcgaaaagatttgataacatttctaatgcctgactagaaagtcttaaaacatcattctttaaaaaaataatttaatatttttggttattccaatcttcactgttaacccaaacgattctgagataaaaattatgtgttatatgcacttcagtttacagacaaattagaactttgttttattttgagaagggggatgcattcatttggttttgatttttatttttgttt

SEQ ID NO: 300428 - DNA, 366 bp, Zea mays
gtaccgcgcctaattcccgaatatgacagctctttttcttttcggaacgttggcttacacaccggctggagtgaacaactattagggaccctacttaaaccacttgacagaaaaggcattgtaattatgtgagctgataaaaacacaccctaaccaaaaccaaccaacacacacttgtgtgaaaggtgctatataattgtcacgcattaaacatactatatattacgccatgataagaacagtttccctgcattgccaccaaaatgataaaatctcatgaaataaataaaaatttaggtgatgggcagatccttttctttaaaatagaaaaagttaaaactcttagtagtacataaatcagatctt

SEQ ID NO: 300429 - DNA, 481 bp, Zea mays
  unsure (1)..(481): unsure at all n locations
aaaaaattagggaacggttctgcaccctgatacccctccgcaattcccgcgatggctgttcaacttatccttctctccacagcaaacccgccatgctttaaagcatgagtgcttacgcacnaaaagcagacctttaccccaccacctcagcttcaacagcagcaggtgaaacaacccagccagcctccacctcatgaaccatttgttcccataaccaaggagccatgccacccaaaggttccacaacctggaaacacaaagattccagagccagattgcaccaaggtccctaagccaggctacaccaatgaccctgagccaggcagcaccaaggtccctgacaaaggctgcaccaaggtccctgagccaggtagcaccaaggtccctgacaaaggctgcaccaaggtccctgagccaagcagcaccaacgtccctgagccaagcagcaccaaggtccctgacaaaagctgcatcaactttt

SEQ ID NO: 300430 - DNA, 336 bp, Zea mays
aacaaaacagcaggctggtacccctcctcaattcccccgattccactttttttttttgacacaccctacacaaccagtcacaccgacatatataaatggcgttcggctaaaacaacaaccatttatccatgattatctttactatctacaaaactataatacaaacctaattcacttccattgtaaattatttcactacacttttaatcatcccaatcctcacgatatactcttaaaccaactattacacatacttcaatataaacaaaaattcaatccatatcttcaactacatcttaaccctcattttcaacccctatacatttcaacaatata

SEQ ID NO: 300431 - DNA, 336 bp, Zea mays
atccgccatttatttcgccagcggcagataatctacaacgggcagggtgcccagtctaccgagggtgaggtctctacatatgccatcctgactgctcagctggatgaggagctgggaggtacccctgttcacagccgtgtggtccaaggcaaggagcccgcacacctcatgagcctgtttggtgggaagcccatgatcatctacaagggcggcacctaccgcgagggtgggcatacagcccctgccagcacccgccttttacacgtccgcgccaacagtgctggagccacccatgctgttgtggtattgccttaacgctggtgcactgtactttta

SEQ ID NO: 300432 - DNA, 273 bp, Zea mays
aagagggaacgaaaaggcggctggggaccccgccgcaattcccccgatgcctcgacccttttgctttggctcatccatcgtaggcagtggcaggcgaggtgctttcagctgagtctcagcgactgaaggatctgaccgatgctcatctgggggctttggcagcaagagcctgtacaaccttggggtgaacacgagcatcttcatgagtgtggctgggtcacgacaaggcgcctgttatggaggtgctgaaggcttgagcactgatggctttga

SEQ ID NO: 300433 - DNA, 398 bp, Zea mays
  unsure (1)..(398): unsure at all n locations
agaangaacaaaaacgcaggctggtacccatccgcaattccccctattctcattctcttttttcgacncaccacctaaaaantctgctgtttaaaataaaactacgtttgtcctcanaattnnaattctaattcattttactctcatctatcaacctttatttattttctacaattaaaaaacactcacatttttttttattcttccttaaaccattttcatcatctacactctaaaattncctctttaccaaccatatttatacaaaatactcttaccatatatctataccatcctancctatatttttaaaccccatctctacctaattatcttacccttatcctcttctccttttatcccaattactttctactctttaccattaaaatctcttt

SEQ ID NO: 300434 - DNA, 393 bp, Zea mays
tcgaacacaccaagcgaagcgcactaacaacaacggtaacaacaatggctgcgcaagggattaaccctccttgcgcttgttgcccttttagtgagcgcaacaaatgcgttcattattacacagcgctcacttgctcctagtgccattattccacagtatctaccaccagttactgtaatgggcttcgaacattcagccgtgcaagcctacacgctacaactagcgcttgcggcgagcgtattacaacaaccaattgcccaattgcaacaacaatgcttggcacatataaacctacaaaccatggcaacgcaacagcaacaacagtttctgccatcactgagccaactagccgtggtgaaccctgtcgcctacttgcaacagcagctacttgca

SEQ ID NO: 300435 - DNA, 459 bp, Zea mays
gcaggctggtacccgtccgctattcccgcgatccggattgtatatatggctgtgcatgaacctcgtgaccatgtgtttgaagactcctagcgggagctgcatcgcaaatcccctgaagaaatgaagaatcgattgtatatagtgtttgaaggagaagaagggcaggatgctggcgggctcctgcgggagtggtacatgatcatctctcgggagatgtttaaccctatgtatgccttgttccgtacctcacctggtgatcgagtcacctacaccatcaatccatcttcccactgcaaccccaaccacctcagctacttcaagtttgtcggacgcattgtggccaaagctgtatatgacaaccgtcttctggagtgctactttactcgatccttctacaaacacatcttgggcaagtcagtctaatatacagatattgagagtgaagattaccacttctac

SEQ ID NO: 300436 - DNA, 359 bp, Zea mays
agctgtgacaccctgccggaaccgtgccgcatttacagggtcgacccatgctttcgttgaccataaccttaatctactccagagcgcagaagaacccgatcgacaccatgagggagactgatcactgccaccgatggtgtggctcgtcatatgagcactaaatcaacgcatacaaacggctgatctagctagctagccagcggctatactacagtacatagtttcttcagtgggggacaccggcggcagcagcgtaggggcatggagtcggatgctgcaggccgcacattgccgtcagttgctgcactatatgcgtcgtcaactagtctagtgaccttgtccgttttttaggttgtatt

SEQ ID NO: 300437 - DNA, 449 bp, Zea mays
aaagaggacaaaaaggggctgctaccggtccgtattcccgagattcgatctattttaatacactaataacccaatgccaagtgtaacttaacctggggtggcggataaaaaatcacacataacataacaatctattaacgtattggcatgacaacaacatttgctatgcaactctgaatggcctaactcatcactcaacaacaaattaacatggattttcacttcgatcaatatcccacataacaccacaaaaaaagctaacccatctaacgtcgcaacgtcaggtaaagttcatcaccagtctcaaatgcttctgactgaattaatcaaatccactaatgcatatgagcatgaaatctgcaacaagctctttatacaaaatactatctaatttttacagtaatatttacaatccatccacatatttcaccagacacactgaataattt

SEQ ID NO: 300438 - DNA, 290 bp, Zea mays
tcgtatcaactactaccattcatccagctagctgatgagagccctgctgtgttctagacacaacaacagatggtgccgaactacctgcacgctatgcctaacgctggcaccctcttacaactgcaacaagagctgccattcaaccaacttgctttgacaaactcaacagtgttctaccaacaacccatcattggtggcgccctcttttagattgcttatgaggtatagttcaataatgaagtgttttggatgatgtttgtggcgtcccagaaataagaaagtacatttct

SEQ ID NO: 300439 - DNA, 418 bp, Zea mays
aaaacaagagggaacggtgcggcgcctgcagacacctccccaaaattcccgattcgacccttgcttttgattcaactctactccttatttgcggctgaaacaactactaccgtgcagccaactaactcatttgagccctgctacctttttgatacaaccacagttgttgccgatctaccaccacgctacgcctaatactgacatcctattacaactgcaacaattgctgccattcaaccaacttgatttcacaaacccatcagttttctaccaacaacccattatttgtggtgccctctattagatatcttatgagttataattcaataataaagttttttgtctgatatttgtggcttcccataaataattaaatgtcatttttaaattaataaacattattattattaaattggtt

SEQ ID NO: 300440 - DNA, 287 bp, Zea mays
ccgatctcgattctattttttgtactcctcgtttctcttagccatcgtgtacaatcatattggctggggggacacacactctcaaccacaacatgactgagcaaattacccttcatggcaccctcaaagtccacaacgtgctcataacccatatcgctactaccccgcaattaccgcacatgatcctatcctcctttcaatataacaccatcatcatttgtaaactgaccagttatgaaaccaactattgaatttcacaactaattcttcatattcactcccacttt

SEQ ID NO: 300441 - DNA, 398 bp, Zea mays
acaagaaggaacaaaaaagcaggctgatacccctccgcaattcccccgatgcgattattttttttttaaccccttttcttacacctgggaggtgcaaaaatataccagtgtgccccaacaataatacaactttcacccatacacctattataagtccgttgacccctttaaaacatcctctaagacccccatctcaccttctaaatccctaatctcctttgatatcccacccacttctatctaatccaattcattttactgttatttcctaaacaattcctccatgaagaagaatacacccctaaatacggtcaaaaattcaccaaaactgtcttctctcttttatccacctttccatgaccccacctcaactgctacaccaaaaacactacctttta

SEQ ID NO: 300442 - DNA, 412 bp, Zea mays
tcgggcgaccctcgccggaaccaaagaggtgagccgtggctactatcgcgggcgtgatcacaacactgaacagcgtgcggatgctgtacatgggccaaggccaacataaaccccaccggccaggcgctcatagtatacacggtggctgggatggcctactctatctacagcgacaagaagaacctgtcgctggcgaagcactactcgttcgagcaagacgctgaccacctaaagaacaccttcttccaatgcacccatcgttcgcacccggctttgttgacgccgggagacgaggacttcggtcagagctatgctacctacctctatcagttagatcgtcgacagagaaagcaccaccaatgcctggataaatttaactacgaagctagctgctgaacatcgatctgctact

SEQ ID NO: 300443 - DNA, 303 bp, Zea mays
  unsure (1)..(303): unsure at all n locations
tcgatgccgcttttttttatttccccaacatcccacaattggctggggtctaaataccatgggcggggctaacttnccanatttacctcctgttgctgtcttgcccctgggtactaaaaataatctgtctcgatgcctaaaatcgtgatgattgatatgaatgacagaatctgtcaaagattctcaatgatttaaagacaagtaaacttgttcaatattatcgattctccctggaggtgatacccttaacaaacctaataaaatatattacccacttcccccttttaaaattcattaattaac

SEQ ID NO: 300444 - DNA, 351 bp, Zea mays
agggaaagcagggacgcctgcagttacctgtcctcctttccagcgtccaccttttcatctttcttcggaccctctaatatatggaaggtttctttcgcatgcatgcgaggtcatatctcttttataatgtcacctaaactcaattcactgtccatcattttacaactttcaaaactaataaaaccctcacttcacccaacttaatcaccttgcatcacattcccctttctccagctatcctaatacttaatattccctcacctatctcccttcccatcattttctcattcttaatatctaatcccacactccctttatcatttcattaagcacgcttttttcttttttatt

SEQ ID NO: 300445 - DNA, 282 bp, Zea mays
ttctagggcgtcgtcaccgcctactacgatggctccgacctggacgcggcggcgcctgctcgacgagctggacttcgagttcctgggcaaccgcagcggggagccctacatcatccagaccaacgtgtaccacagcggcgtcggcggccgggagatgcgccactcgctctggttcgaccccaccgccgacttccacacctacgccatcctctggaaccccaagcaagatctgtgttcttcgtggacaaggtggctttcctattgttccctaacgacgggtgc

SEQ ID NO: 300446 - DNA, 385 bp, Zea mays
gttaccgcaaccattttcccacattgctcacaagctcctatagctcaccttcttaccccatacctctcaccagcggtgccttcaatgtgtgtaaacccaggcgcccaaccctacaggatccaacaggcactctgaacaggcatcttaccattgtcacccttgtggctgcaacagccgccagccctattacagcacttaccttgggttcatttgctggcacaacacatccgggcgcagctgctacaacaactcgtgctagctaaccttgctgcatactctgagcaacatcagttgctgccattcaaccaactggctgcattgaactgtgctgcttatttgcaacaacaattaccattcagccagctagttgctgcctacccccagc

SEQ ID NO: 300447 - DNA, 225 bp, Zea mays
aaattaggaaaagctgtgaccccttaagtaacctttcatcatttacagagtcgacccattcttttttatacgacacacattatcatgtgtgatatgaccaataatatatgcatgatgataaagttttggttttaaagaaaaaaaataaaaaaaaattataaaaaaaataaaaaattaaaaattttataaatataattaatttttataaaaaaaaataataataaa

SEQ ID NO: 300448 - DNA, 313 bp, Zea mays
ctcccgcgtccaccctttctttcttcatcatacaaatcacaatacaggaagatcttttacatacaaaagatgggtccctccttattctcctttattctttcttcaattacttctacatccaccattttccttcaactctcacaagctactattacttcccttcttccccctttccttcaaccaccatatttttcttcattttttaacccatttctacaacccttcattaaccaacactcaatcacaactccctttttacctttatcaccctttttcctccaacaatcatcagacctattacatttcttacctt

SEQ ID NO: 300449 - DNA, 399 bp, Zea mays
agggaaagccgtgcggccggccgtaaccttgcatcctttacagcgtcggcccacgctttcttttcattgaactatgctgcttatttagaggggcaacacctactaccagagagccaactctctttagtgagccctgcttccttctagacacaaccacaggcgccgccgatctaccagcacgctgcgcctaactgctggcaccgtcttacaactgcaacaattagctgccattcaaccaacttgctttgacaaacccagcagcattctaccaacaacccatcattggtggcgccctgttttagatttcttatgagtgatagttcaataataaagtgctgggtctagatgtttgggcttcccagaaataagaaagtacatttctagaaaaaaaaaaaacaa

SEQ ID NO: 300450 - DNA, 451 bp, Zea mays
  unsure (1)..(451): unsure at all n locations
ggccggcccacgcaaccgatngataccaactagcaacatacatagtttatatcattagcaacatcttaccaccaaggagactcattatttatgttttttcttgccctccaagctctttcaacaagtgttgctaccgtaactattatattacaatgctcacaacaatactctctttcctgtgacagccgctagatttgaatacccaactataacaatcctacaggctacatgaggccatcacagcaagcatcttacggtcattagcattttactgtccaacatccatttgctctattgcaacaaccatccttagtgaatttatatcttcaaagaaatctctattcatcaactacaacatcatattgctttcaactaataatccaaattattttcatcgtaccatgctgctttaccttcaataataatcaaattcttttcattcataacaact

SEQ ID NO: 300451 - DNA, 261 bp, Zea mays
ctcctccagatcttcgtgtcctccatcttcggggcgacgctgaaccaggtgctgtacttcgtgggcctcaagtccaccagccccaccgtggcgtgcgcgctcaccaacacgctgccggcgctgacgttcgtgatggcggcggcgcttaagatggagtcggtgcggccgggcacgccggcggggcaggccaagctggtgggcacggcggtgtgcgtgggccgcttcatggtcatacccttctacaagggccccgggctgggg

SEQ ID NO: 300452 - DNA, 200 bp, Zea mays
  unsure (1)..(200): unsure at all n locations
gcaacatanaaagcacaatagtgttccatttatgtctgccaaaatattttgctccctgatagtcggttgttataacatgtttgtgtcgctacccgcaaccatttctccacaatgctcacaagctcctatagctttccttcttcccccatacctctcaccagcggtgtcttcaatgtgtgaaaactcaattgttcaaccct

SEQ ID NO: 300453 - DNA, 388 bp, Zea mays
  unsure (1)..(388): unsure at all n locations
ggctacccccaacaaatttttttattcaaccaacaggcagcatngaactcgccggtttatttacagcttcaacaactactaccattcacccagctagctggtttgagccctgctacctatttgatacaaccacaattgttgccgttctaccagtacgctgtgcctaacgctggcaccctcttacaactgcatcaatagctgtcattcaaccaacttgctttgacaaactcaacatcgttctacacaacaacccatcatagttggagccctattatagattatcatgaggggggagggaataataaaattttaaatctgatgtttgcgtcttcccaaatattttaaaacacatttttaaaaaataatatataattgggctgttctttct

SEQ ID NO: 300454 - DNA, 459 bp, Zea mays
tcgaacacaccaagcgaagctcactagcatcttctctaacaacaatggctaccaagatattagccctccttgcgcttcttgccctttttgtgagcgcaacaaatgcgttcattattccacaatgctcacttgctcctagtgccattattccacagttcctcccaccagttacttcaatgggcttcgaacacctagctgtgcaagcctacatgctacaacaagcgcttgcggcgagcgtcttacaacaaccaattgaccaattgcaacaacaatccttggcacatctaaccatacaaaccatcgcaacgcaacagcaacaacagttcctaccagcactgagccaactagctgtggtgaaccctatcgcctacttgcaatagcagatgcttgcatccaacccacttgctctggcaaacgtagcttcataccaacaacaacaattgcaacagttttttacca

SEQ ID NO: 300455 - DNA, 236 bp, Zea mays
aggaagcaggcgggcaccatggtgaaagttttctcgggacagcgcgacaggctctacgtgcggggtaccatccttggatacaagacgttcaagtcgaaccaatacgagaccacgttgctcgttcagatgttgggggtgaacaccaatgatgacctcgcgtggtacactggaaagcgcattgtgtacatttacaaagtttagaccaatatcatggttacccgttacaggtgcatctg

SEQ ID NO: 300456 - DNA, 384 bp, Zea mays
tcgattcagaaacacacaaagcgaagtgtacttgcatcgacctaacaacaatggctaccaagatattagccattcaagcgattgttggcctttttgcgagcgcaacaaatgcgaaaattattgcacaacgctaactagctgctagggccattattccacagttgctagcaccagttacttcaatgggcttcgaacacctagctgtgcaagccaacatgcaacaacaagcgcttgcggcgagcgtcttacaacaaccaattgcccaattgcaacaacaatccttgccacatctaacaatacaagccatcacaacgcaacagcaacaacagttcctaccagcactgagccacctagccatggtgaaccctgccgcctacttgcaag

SEQ ID NO: 300457 - DNA, 386 bp, Zea mays
tcgtctagatttcgagcgggctcccttcgggaacccgtaagccggctagaagatctttaataccaattgcgcgcaatgcctcactttcgacaagggcgccgttcacaagcaaggtccaaacttgaacggtttttttgtgagacagtcttttaccactgttatcttctccttcttttttggaaacaaaaacaaggctgtagtttgtgaagaagacacttttgttgagttcctgtttaaccctaaaaagtacattcctggaactaagatgtgcttcccttggcttatgaagtcgtatgtgcgtgtttatcttattttgtacctgttatgaatgcaatttgcattattttattgacatgctcttatgccatgtagagataaattttttt

SEQ ID NO: 300458 - DNA, 382 bp, Zea mays
cggacgcgtggggtatgtggcttcccagaaataagaaagtacatttctagattcttaaaaaaaaaaaaaaaaaaaaaaaaaaaaaaaaaaggaaagaaaaaaaaaaaaaaaaaaaaaaaaaaaaaaaaaaaaaaaaaagccgaggaaaaaaaaataaaaaaaaaaagaaaaaaaaaaaaaaaaaaaaaaagggggggccccttttaaagaaccaaagttaacaaccccggcaatgcaacgtaatagttttataataagataaacaaaaaaaaataaagggccgggggtttaaaaactgagctaagggaaaaaacttgtgtttccaaaattaaataggttggaaaaaattcccttttcaaacttgttcatggatatgtagtgc

SEQ ID NO: 300459 - DNA, 371 bp, Zea mays
gcggccgccctttttttttttttttttttttttgtttttttttttttttttttttttttttttttttttccaaataaaaaactttatttttgaactataccttataagaaatctaaaagggggcccccccaatgttggtttgttggttgaacactgttgggtttgtaaaaacaagttggttgaatggcatcaatttttgctatattaagagggtgccagcttttggcccaacttgctgttagaacggtaacaactgtggtagttttcaaaaatggtccatggtttacacctttttgttgttttaatggtataagttgttgctcttttaaataaactgggaattctctatgctttttgttgttttaatagaa

SEQ ID NO: 300460 - DNA, 350 bp, Zea mays
  unsure (1)..(350): unsure at all n locations
ngaaaacccagctcttcaaccctatatgcgctaacaagcaatcgcagcaagcaacatacctgtatcattcttgtttcaactatcgccagccctatctttggtgcagtcattggtacaaaccatcatgtcacagcatctgcagcaactcgtgctacctgtgatcaaccaagtagctctggctaacctttcttcctactttcagctacaacaatttctttcattcaactaactttctactattgtatcgtgtttttttattttttattaacaactttttaccttatcatttaatttttgctaactggtctgtcttgtctagtttatcaactattcttttctttcctatttaa

SEQ ID NO: 300461 - DNA, 473 bp, Zea mays
ggaaaacccggtccgacccacgcgtccgcctctccctccatccctcccgactccgtctttctacccttcccccctccgccgaggcgaccggccctgtcaatccgagactcccacgcaaaccctagccagctagctagccacaccggctgggtccaatggcggaggacggctgcgacagggaccagcagcagcagcagccggcggccgccgcggcgtcaggtggcgccggggtcgaggggcgcagcagggagagcgtcaagctcttcgtggggcaggtgcccaaacagatgtcggaggccgagctggtcgccatgttccgcggcgtcgccctcgtcgacgaggtcacggtcatccgcgacagggccaccagggtctcgcgaggctgctgcttcctgatatgtccatcaagggaggaggctgacaaggctgtgactgcataccacaacaagcgcacactacctggggcctcaagt

SEQ ID NO: 300462 - DNA, 312 bp, Zea mays
tcacaaaaacccacaaaggggggatattaaaacttttttcccccccacacccccaaaacagctcaacaccatctccccaagctcacaagccccataactactttcttccacaacctctcaccagcggtgctaccgatgtcaaaacccaatactcaaccctacaggatccaacacgcaatcgcagctggcatctcacccttatcacccttgcacctccaacaatcatcaaccctattacagcaggtaccctaggagcatttaaagtcacaaaacatcatctcacaacaactacaacaacctgggctaacaaac

SEQ ID NO: 300463 - DNA, 330 bp, Zea mays
tcgtgaaaacccagctcttcaaccctataggctccaacaagcaatcgcagctagcaacatacctttatcacccttgtttcaacaatcgccagccctatctttgtagcagtcattggttcaaaccatcagggcacagcagctgcagcaactcgtgctacctgttatcaaccaattagctcttgcaaacctttctccctacttctatctacaacattttctttcattcaaccaactttctacattgaaccgttcttctttattgcagctacaactatttccatttattcctttagctactgtctacttttattaacaacatcttttttcatt

SEQ ID NO: 300464 - DNA, 176 bp, Zea mays
tcgttttcccctaccaggtgctgcccaggtatgtcgtgtgctgctatgacaacgcgcttcatgaagtaccgtatgaagcgcggtctcgtgttcgacgggcacggtcgcatctgctagcacaggaagcacccgggaggtcgaggtatcgccgttggcttgcaccaccaccgtatttt

SEQ ID NO: 300465 - DNA, 428 bp, Zea mays
caacaagcaacatagaaagtggaatacagtatcaacaatagagcaacaatggcggccaagatattttccatccttatgctccttgctctttctgcatgtgttgctaacgcgaccatttttcctcaatactcacaagctcctatagctgcccttcttcccccataccttccatcaatgaccgcttcagtatgtgaaaaacccagcccttcaaccctacaggctccaacaagcaatcgcaacaagcaacttacctttatcacccctgttctttcaacattcgccagccctaattttggtgcagtcattgggacaaaaccattaaggcacaacagctgaagcaacttgtgctaccagtgaacagccaagtagctttggcaaaccttttttcctactcttagcaacaacaatttcttccattcaaccaactg

SEQ ID NO: 300466 - DNA, 405 bp, Zea mays
gttaaatagtcgattacttgaggaaattgaagaaagtaaagccttttttcaggtttatgaaggtgctgtttacatgcatcagggtgccaattacttggttgaggaacttgacttggcatcaaggacagccttctgtaggaaagccgatttgaaatattacacgaaaacacgagactacactgacatcaatgttctcggaggagaatttgcttatcttcctacaagtatatgtagaactaatcgggtgaagacaactgctcaagcaaatgactgcacggtgactactaaatggtttggtttttatcgcatatcaaaatctagcaatacaatatccgacagcttcgagcttaacctgcccccatacttctttacttcccaagctgtttgggtgcgaattccccactt

SEQ ID NO: 300467 - DNA, 458 bp, Zea mays
cacaaaaggcagaagttcaggtcgataggagaaaaatgaccatgcacgccgccgctacttccttctgaatcttgaccgatctgagctgcgggccgtcgtccaaggcgaaaggagggcagccggcggcggcgccgggctccggcggcgacaggcaggggaggggcaagatcgagatcaagcgcatcgagaacacgacgaaccggcaggtcaccttctgcaagcgccgcaacggcctgctcaagaaggcgtacgagctctcggtgctctgcgacgccgaggtcgcgctcgtcgtcttctccagccgcggccgcctctacgagtacgccaacaacagtgtgaagtccaccattgagaggtacaagaaggccaacagtgacacctccaactctggcacagttgcagaagtcaatgctcagcactaccagcaggagtcctccaagctgcgccaggcgatcgat

SEQ ID NO: 300468 - DNA, 427 bp, Zea mays
cggacgcgtggggggaggcattcatcagggttatatttggttgtcaaaaagtactgtacggaattcacatctttcacatttttcactagcaatagcagccccaaattgctttcctgactaggaacatattctttacagcttctccatcagactgatgatcccatattcagtgtgctgcaagtgatttgacatatgtggcttatccttcaggggagctgcctgatcatttatgtcagcagacagctacagaagaagttcctcctatggaatcattgcagaagggacattcccctgaacttcataagcgcatcacatgcttacggcctgccgataataatcatccgcgtggcgaattgaattggatccacatgcgacgggaggagcgagtgcgtaatagtagcacggctactccatcctactggcgttg

SEQ ID NO: 300469 - DNA, 446 bp, Zea mays
  unsure (1)..(446): unsure at all n locations
aaacccggccgaccacgcgnccgaacacaccaagcgaagcgcactagcttcaatttaacaacaatggctaccaagatggggggcgttcttgcgcttcttgcgctttccgcgagcgcaacaaatgcgttcattattccacaatgctcacttgctcctagttccattattccacagttccttccaccagttacttcaatggcctttgaacacccatttgtgcaagcctataggctacaacaagcgattgcggcgagcgtcttacaacaaccaattgcccaattgcaacaacaatccttggcacatctaacaatacaaaccatcgcaacgcaacagcaacatcagttcctaccagcactgagccacctagccatggtgaaccctgtcgcctacttgcaacagcagctgcttgcatccaacccacttgctctagcaaacgtatttgcaaa

SEQ ID NO: 300470 - DNA, 331 bp, Zea mays
  unsure (1)..(331): unsure at all n locations
cagcatacatactactaccattcatgccagctatgtttggtgtgtagccctgcatatccttcttgacacgaaccacatgtngttgccgttctaccagcaccgttgcagcctaactgctggcactcctcttacaacatgcaacaatttgctgccattcaaccaactntgctttgacaaacccagcagtgttctaccaacaacccatcattggtggtgccctcttttagatttcttatgagttatagttcaataataaagttctttatctgatgtttgtggcttcccagaaataagaaaagacgtccctaacgaaagaacttaccagcagtgg

SEQ ID NO: 300471 - DNA, 183 bp, Zea mays
gacctgctgtacaacggcggcatcggcacctacgtgaaagccgcgcgcgatacgcatctgcaagtgggcgaccgcgcgaacgacgcggtgcgcgtgaacggcgcggagctgcgctgcaaggtcgtcggcgaaggcggcaacctcggctgcacgcagttcggccgcatcgagttcgcgcagcgc

SEQ ID NO: 300472 - DNA, 297 bp, Zea mays
gttagcacactaaagtaccaacgggggcaggggtaattttttgcctacttatgctcattataatttctgcaagtgctactacagcgaccattttcccgaaatgctcgcacgctgctatagcgtttccttattacaccgaacctctgaccagcgaagtttatgatatttgtaaacccaattctttaatcttccatgatccaataagctatcacatcttccattttacctttatcaccctcgttcttcaacaatattcaatcctattacatttaggacctttgggtcatttattgacac

SEQ ID NO: 300473 - DNA, 250 bp, Zea mays
taacgaacgacctgactcatatgaccttgtttatcagcagggataatgtgggaaagtgcatgcccttttatcttgctcggggcatccttcaacatcaccccttctaggacctgtacctgatgctatttgtcattaccttattcatttccccaaaaaagaaatacaaaaccaaaaaaaaaaaagaaaaaatattaacgaaaactatattaatttttttttttttcttcattaatattccaccttatttttt

SEQ ID NO: 300474 - DNA, 427 bp, Zea mays
caacaagcaacatagaagagtggaatccagttgcatcatttgagcaccattggagaccaagatgttttccctccttatgctcctggctctttctacatgtgttgctaacgcgacaattttccctcaatgctcacaagctcctatagcttccctttttcccccataccttccatcaattatagcttcagtttgtgaaaacccaacttttcaaccatattggcttcaacaagcaatcgcagcaagcaacatacctttatcgcccttgttgtgtcaacaatcgccagccctatttttggtgcagtcattggttcaaaccataagggcacaacagctgcagaaactcttgctacccgtgatcaaccaagtagctttggcaaacctttttccctactctccgcaacaacaatttttttcattcaaccaactg

SEQ ID NO: 300475 - DNA, 462 bp, Zea mays
cggggccgacccaggcgtccgtcgcatggtaaaacgaccttttttaaccggtgtcctttaagtcacactaaaagaaggtgtggggacagtttgttagcttacgggcacagataactctagctggataaggagtaggaagttcaggcttggcttgaagcttgcctaaggattttgtgagggtgttcgcattcttgaagcaaaaacggaagcctccatggttaaggaccatataggagaatgtaagccccaaaaaattgttttggaatctcatattgacacatatttaaactattccagattcattgacccagggtacaagaagcactatccacctaaaaaaaatttataaataacatatatattttcatttaaatgtaattatccattatgcttatatatattatttttcttttatattctttcttttaaatgttttacaacttatcctcctttaatattttt

SEQ ID NO: 300476 - DNA, 430 bp, Zea mays
cgggcgacccaggcgtccgtctatacattaatgcctccttgcaacaccttttttttttcaaccaactgactatttcaaacggggcggcttacttacaacagcggcagacatttacttaatccactatcagttgctaacccatttgccgctgccttcctacagcagcaacaattgctgccatacaaccagttctctttgataaaccctttcttgtccaggcaccaacccacctttggaggtcccatcttttaaattacatattaaacgtactccattatgttgccctaattccatcatgtttttcctagaaaaaatcaatatattgattgagatgtattccaatttatttctcaaaaaaaaaaaaaaaaaaggcttcccttttatagtatccatgcttacttaccctttcattctacatattaactttttc

SEQ ID NO: 300477 - DNA, 228 bp, Zea mays
gcaagcctcgctacgtaccatttcaataaaatatatcttccgcaatggctagcatcaccatgggcgtgtctttaacggccttggggggcaagccctaaaacttgcctacttatacctccttcggctagtcccgcttgactattctcaaaactgcgtccaaggccaagccagtatcggcgtccggaagccctttgtaccgcccagaccgcttgctgtacctggtcccac

SEQ ID NO: 300478 - DNA, 317 bp, Zea mays
  unsure (1)..(317): unsure at all n locations
cggggccggcccacgcgtccgaggaacttccccgacaatggcatctttttttttttgagccacagcacgtacaactgggccgggtcgaaacggagcgcggggatgtgtgcctcttccgatncctggccgaaagaccccgcttcctataccatacacgttgcgtccgacgcttataacaccgcctttcttggggagtgtattgcatccatactgggacatgttccatactgttcatcccatggctgattaccattctgcgtctctgagcggttggtgtttgtcccatatatgtcatcaacaagcctggtatccataac

SEQ ID NO: 300479 - DNA, 320 bp, Zea mays
  unsure (1)..(320): unsure at all n locations
atacctttnatcaaccaantatctcttacaaacctttctccctactcttctcaacaacaatttcttccattttaccaactntctacactaaaccctactccttattttcattaacaactattaccatttatccatctacctacttcctactttcaacatctacaactttttttatttaaccaattaacctcacttaacccctcttcttattctccttcatatatactactaccatttatccatctatctacatctaactattctttcttttttcacaacaactattctttttcttctttcctaaattttatttttacttt

SEQ ID NO: 300480 - DNA, 351 bp, Zea mays
  unsure (1)..(351): unsure at all n locations
ccgtttcttttttatcccangnaaaagctncggggggccgtctcctgaatttcaactactttgagttgattctcgttggatttctcacgatgggagacagcgggaagcttgaggcaacgatagatcggcttctgaatgaagagaagcagatgagactcgccgaaaacgtagccggtacaaggaaagccgccactgagattcttcagctttgtttcgatgctaaggattggaaacttcttgaatgagcagattctcaatctctctaagaaacgtggtcagctaaaacaggctgggcattccatggtgcagcaggcattgcattatatcgatcagacaccagacattgaaact

SEQ ID NO: 300481 - DNA, 212 bp, Zea mays
ccaccgaaaaaactttacgttgaaattggggggaaatggggtatagtctttatagataagactcttcaacgattccactttatttttctttgggatcgttgcccgatgaaaaaaaaaaaattctttgtaattacccgtccaaatatgtacaaaaaaaattgcgttcttgaaaccgcaaaaaactgcaaattttgtgataaaaacaaaccttt

SEQ ID NO: 300482 - DNA, 335 bp, Zea mays
  unsure (1)..(335): unsure at all n locations
agcaccaagggggggggagtttgaagacaggcagggatcaagaaaggaagnangagacngagcctnctcaagaagggactactttgatggctaacaagaatgctgagtaacagcggttgactggtatttataagaatatactgagcaaagctaatgtcaagttgattgaaggccgtggaaaggttatagacccacacactgttgatgtagatgggaaaatctatactacgaggaatattctgattgcagttggtggaacgcctttcattcctgacattccaagaaaagagttagctattgattctgatgccgcgcttgatttgcctcccaagcct

SEQ ID NO: 300483 - DNA, 458 bp, Zea mays
  unsure (1)..(458): unsure at all n locations
cgtccggcggatagaggaggaatatttttccctgagtgagtcacgcgcccgnggngactncgggcggggattcgtttttggacttggaggtggccaagaccgngatcgtggtccaagaggccgtggaagacgtggaggccgtgcctcggaagaaacgaaatgggttccagtgaccaaactaggtcgtctagtggctgacaataaaataacgaagctagagcagatctatcttcattctctcccagtaaaggagtaccaaatcatagatcatcttgttggtcctacgttgaaagacgaggttattaagatcatgcttgttcagaaacaaaccagagctggtcaaaggactagattcaaggcctttgttgttgttggtgatggaaatggtcatgtaggtttgggtgtcaagttgtctaaggaagttgctactgccattagaggagctattatttttgcta

SEQ ID NO: 300484 - DNA, 320 bp, Zea mays
caccaaaacacatgggcgccaccaaaaacacgaccatcatcatcctccccaccccagcgacacgtgccgcaccccaaaccagagcagatcatctggaaagcacaacagccccaggaagacgaaaactccaccgactcccgccatcaggctcaaacactactagacagcgccagagctgatgggaccaaaaaaaaaccagcggatgcccccaacggggaagctgcaaacgggcatggaaagccaaagaagaacacaaacttcttgccatacaagggagatgggtccaaagtacaagttccaacaaaacgaaacccaagcaa

SEQ ID NO: 300485 - DNA, 437 bp, Zea mays
gggggctgaggccaagccatgggcttggaagtttcttcggcggcggcggcgacggcggcatgtcggagtcggtgatccgcagggtcctggtctcgtacatgtacgtggcggtgtggatcttcctctccttctccgtgatcgtctacaacaagtacatcctggaccccaagatgtacaactggcccttccccatctccctgatcatggtgcacatggccttctgctcctccctcgccgtggcgctcgtccgcgtcctccgcgtcgtggacctcccttcctcgcccgccatgacgtcgcagctctacctctcctccgtggtgcccatcggcgccctctactcgctctctctttggttctccaactccgcgtacatctacctctccgtctccttcatccagatgctcaaggcgctgatgcccgtcgccgtctactccatc

SEQ ID NO: 300486 - DNA, 265 bp, Zea mays
  unsure (1)..(265): unsure at all n locations
cctgnggtttaaatcacctatacgcaatgaganacggaaccattccagttgttcatggcactggaggactcagaaatacgtttgaaaaattcaacccttatgcagatggtgtagctggtactggaacatggtgggtcttcactcccttgtcgaaagaaaacaaggtctcgtccttgatgttggctgcatcaacttacaaagagtattaacagtcatggtaaggattgatgaaaaaagtaatgaccctaaactactcttgggaaaa

SEQ ID NO: 300487 - DNA, 262 bp, Zea mays
  unsure (1)..(262): unsure at all n locations
gccccanaagcgggggggggcatcagtgataaagtgcgggagggccaaaaannggctcgatcccaacgaaagctccgacatctccatggccaattcccgccaaaacatcaggaagctggggaaggacggtttcatcatcaggaagccaaccaagatccactctcgttccagagctcgcaaaatgaagattgccaagatgaagggtcgtcactctggaaacgggaagaggaagggtacccgtgaagctaggttgccaacaaag

SEQ ID NO: 300488 - DNA, 245 bp, Zea mays
  unsure (1)..(245): unsure at all n locations
caccaaagcaccccanggaagagggggtgaagaagacggaggcgcctacccaagaaaggaagctagagacagacgtggagatcaaggcttcggctgataagtttcaccacatgtccgctgggaaaccacaccatgtctccaaagcaagtccaggcaacattcagggatgtgacctgcacgaaggcgactggggcacagtcggctctatcgtcttctggaattacgtacatgatggggaggcaaag

SEQ ID NO: 300489 - DNA, 301 bp, Zea mays
gaacgaacgacctgccccatatgacctttgtttccagcagggatgatgtgggaaagtgcatggccttttattttgctcaggggatcctccaacatgaccccttcaaggtcctggaccaaaggggagtggccgacctgttaaattttgctacagaaaggggcctcaatgctagccctaacttgaaggtggccatttgtggaaaacacggtggaaagccttcctctgtggccttcttcacaaaggctgggctgaattacttatcttgcccccctttcagggttcctattgctaggctaacttc

SEQ ID NO: 300490 - DNA, 309 bp, Zea mays
agcagatcaaacaagtagcgtcagctcgacatttatttgtgagagtgatccggcccttagaggagatggttaaaatcgccgcagccgaccaggcggtggtctgtctatgctcagaggccctggtggccgcggccttttgccaaggcgaggtcgagcggcacaggctcagggacctgcattgcttgcaggaggtccaggaaagcccgctcgacgcgtgcttccaggtccttgaccggcaaataaccggcggcggcgtcgtcagaccgttccggtgggacaccggtctccggatgcggtgctgccagcagt

SEQ ID NO: 300491 - DNA, 279 bp, Zea mays
  unsure (1)..(279): unsure at all n locations
gaannccggggccgacccactcttcctctgacccgtgtccccaaatttcaccattaattctcatcaagaggccgccnacaggggagggagggtctttttcttttagggggagccacctcctcctaatcctcgcagccgccgtcctgctctccttgctcgcggttgccagccccagctccgggacctcctgcttgccgttgtgggccatcccgtacaacccgttcccaagctgccgtttgtacatgaccagcctaacctgcttgatttttccgcgccttc

SEQ ID NO: 300492 - DNA, 325 bp, Zea mays
cccaaggacgccttcgacgatcacaatttcttttcctaaggtcgcaacgtgttcgtgtgcccgtgttctttctgtccgggcggggctttgccccccgatcaaaaccgttgcgtcggcgaaaacgtgcttctggctcactttaattttaccaagtttgtttcaaggtggatcgcgtggtcaaggtccgagtgctttaaaaaccaaccggcactggaacagagtgttactctttatgtagactttgatacgcattggctttattcacttttggatgttgtgtactacttacttttattgaataattatgaccagccacctatttaaa

SEQ ID NO: 300493 - DNA, 283 bp, Zea mays
cctcatttgctcaaacctccattattacacatttcttcccaccaattactaaaatggccggggagcacccaactctgcaagcgggtgggctccaacaaccaatcccggccaccctcttacaacaaccaatttcctacttgcaacaacaatccttggcacatttaacaatacaacaccatggaactcaccaccaacaccaattcctaccacaactaacccacctagccatggttaaccctcccgtctactttcatcagcactcgcttgtataaaacccacttgc

SEQ ID NO: 300494 - DNA, 375 bp, Zea mays
taacaacttattaagcacaattgtgtaccaacatatgtcacccaaaatatttcgcttccttaggctggttgtcctttctctagggggggataccccaaccatttccccacaatgctcacaagctccaataccttccctcattccccaatacctctgacaagcccaatcttcaatgtgtgaaaaccaaattgttcaaccctacagaacccaacatgcaattggaccaagtatcttaccattatcacccttatttctccaacaaccttcagccctattacagcagttacacttggtccatttggtgggacaaaacatcattgcccaacaactacaacaatctgggctagcaaaccttgttgtatactcttagcaaca

SEQ ID NO: 300495 - DNA, 437 bp, Zea mays
  unsure (1)..(437): unsure at all n locations
ttggccaaaanncccgggccggcccacgcgtacagcaacataaaaagcacaattttgtccctacatttgcagccaaaatattttgcctcctgagcgtccttgttcttactgcagggggggctacaacaaccattttcccgcaatgctcgcaagctcctatagcttcccttcttcccccgtacctctcaccagcggtgtcttcgttttgtgaaaacccaattcttcaaccctacaggatccaacaggcaatcgcagctggcatcttacctttatcacccttgttcctccaacaatcatcagccctattacaacagttacctttggtgcatttattggcacaaaacattagggcacaacaactacaacaacttgtgctagcaaaccttgctgcctactctcagcaacagcaattttttccattcaaccaactaggttca

SEQ ID NO: 300496 - DNA, 419 bp, Zea mays
cccacgcttccgaaaaaaataaaaaaatttatttaaaaaaaaaaaaaaaaaaaaaaaaaggaagattaaaataaaaaaaagggggcggcccttttaaataatccaaccttacttccccttccatccaacgtaatacctcttttatagtgccacctaaattaaattaactgccctcctttttacaacgtcttaactggaaaaaccctgcctttccccaacttaatccccttgcacaaaatccccttttctccagttggcttattaccaaaaaggccctcaccattcgcctttccaaacattttcccaccctataatggcaaatggaaccccccctttatcgcccctttaaccccggcttgttttgtgtttacccccatttttaccgttacatttgccaactccctaacccccgttctttt

SEQ ID NO: 300497 - DNA, 232 bp, Zea mays
  unsure (1)..(232): unsure at all n locations
tttctcgttcgacaacggcacaaaaanaaggggcaggtttaaatacacatgcgggcggctccataaatattctatagnatcaccaaaatttaattcactctcctacgctttacaacttcaaaactggaaaaaccacgctcccacccaactttatctccttgcaacacatttccttttcaccagtttgcattataccaaacatccccctaacaatcacccatcccaacaaaat

SEQ ID NO: 300498 - DNA, 388 bp, Zea mays
tcgaattagctcatcgactccagattggagaacgcgacaccatgaaggtgctgatcgttgcccttgctctcctggcgctcgctgcgagcgccgccttcagtacaagcggcggctgtggctgccagacaccaccgtttcatctaccgcctccgttctatatgccgccttcgttctatctgccgccgcagcagcagccgcagccatggcaataccccactcaaccaccgcagctaagcccgtgccagcagttcggatcctgcggcgtcggcagcgtcggcagcccgttcctgggccagtgcgtcgagttcctgaggcaccagtgcagcccggcggcgacgccctacggctcgccacagtgccaggcgctgcagcagcagtgctggcacca

SEQ ID NO: 300499 - DNA, 326 bp, Zea mays
atagggaaaggtggtacccctggcgggaccgggcccgaatttccggggtggaccaacccttccgttgggttgggcccggttcctttttggttacaccaacatttgttgccgttctaccaacacgttgggcttaacgttgggaccctttaacaactgcaacagtggttgccattaaaccaacttgcttggacaaacccaggagtgtcctaccaacaacccattattggtggtgcccttttttagatttgttatgagttatagttgaataataaagttttttgtctgaagtttgtggcttcccagaattaagaatgtacatttctaat

SEQ ID NO: 300500 - DNA, 307 bp, Zea mays
gtaggattgcattgtcgtgtatagaaatgccacatcgtacaagaggccatgctagccagcattttacaggtattaacatttaccctgcaacaaccatatgctatattgcaacaggcatccttagtgcatgtgtatctacaaagaatcgctggacaacaactacaacaactgttgctgccaacaatcaatcaagctgtttgcgcgaaccttgctgcctacctccatgaacaacagttttttccattgaatcaactagatggtgtgtaccctgctatctactttgatgcacaacatctactaccattta

SEQ ID NO: 300501 - DNA, 401 bp, Zea mays
cgacttttgggaaaggtggtaccccttgcaggacccgtcccgaaattccgggttggcccaacccttccggaattttaacggcctattggggggatgttggaccaataaaatcattctttgatgcaaacttggccctcactgagcagccttccaagtttgatttttatgatccaaaaacacctttcttcactgcaccccgatgcttgcctccgacgcaattggacaagtgcaagatgaaagatgcattaatctcagatggttgcttactgagagaatgcaacatcgagcattctgtgattggagtctgctaacgtgtaagctctggatgtgaactcaaggactcaccgatgatgggagcggacacctatgaaactgaagaagaagcttcaaagctactgtta

SEQ ID NO: 300502 - DNA, 330 bp, Zea mays
gtcgcacatatctactatactatactctaggaagcaaggacaccaccgccatggcagccaagatgcttgcattgttcgctctcctagctctttgtgcaagcgccactagtgcgacccatattccagggcacttgccaccagtcatgccattgggtaccatgaacccatgcatgcagtactgcatgatgcaacaggggcttgccagcttgatggcgtgtccgtccctgatgctgcagcaactgttggccttaccgcttcagacgatgccagtgatgatgccacagatgatgacgcctaacatgatgtcaccattgatgatgccgagcatga

SEQ ID NO: 300503 - DNA, 330 bp, Zea mays
gtgatggctactggcagacacatcaggggctaccatatagccaacttggcaggggccctgatgcgttgttagtggaacaacatgttttaccattcgatctgcaagctgtggtaaacattgctgctttcttgagacaacagcacttgtggccattgtacgcacaggttgcgggaaacattaatgccttcttgcaacagcgacaattgctaccattctacccacagaatgtggcaaacattggtgacttcttacaacaacaacaattgctgccatttagccaacatgctttgacggatcctaccatactattgcaagcggccaccattggtg

SEQ ID NO: 300504 - DNA, 296 bp, Zea mays
gacgcgaggtatttctggaccatcgataaccagcctaacttcaagaaggtgattgctgtggtcaaccaagcagagtttgtacctcctattccgaaaaagggtgctccttctaaggagccaaacagcaacagactgcaagaaggacgcttcaaaggaggctaccaagacaaaggtggttgatgcacccacctaagaggatgcaccatatccgatgacaaacaatactctcgacttgctgccaccaagccagatggttcttgatgactgtgataggctatactcacacacacagacca

SEQ ID NO: 300505 - DNA, 291 bp, Zea mays
atttggtggcattttacccacagggtgggggaaacattaatggcttcttgcaacaacaacaattggttccattctacccacagaatgtggcaaacattggtggctttttaccacaaccaccattggtggcatttaacccacatgctttgaccaattcttacaacttattggaaccggccaccattggtgggggcattttcttgaatttttattaattataccggaataattaaggtcttatgcttgtttttgccaacttttaattattaaggatttgagatctattttttt

SEQ ID NO: 300506 - DNA, 330 bp, Zea mays
cacactcgcgaactccatttcgatcccatttgaaatcaacccatcctcgtttcctccgtctagcagcctctcaccctcatggccaagatcaagatcgggatcaatgggttcggcaggatcggaaggctggtggccagggtggccctgcagagcgacgacgtcgagctcgtcgccgtgaacgaccccttcatcagcaccgattacatgacctacatgttcaagtatgacactgtgcacggacagtggaagcaccatgaggtcaaggtgaaggactccaagacccttctctttggtgagaaggaggttgctgtgtttggctgcaggaaccct

SEQ ID NO: 300507 - DNA, 273 bp, Zea mays
ggcaacattaaaaggccaatgggggcccaacaatggcagccaaaatattttggctccttatgcttcttgggctttctggaagggctggttccgggaacatttttccacaatggttacaagcttctattggtttccttctttccccggaccttttaacaacgggggttttggtatttggaaacccaattctttaaccctattggatcccaccagcaattgcaggttggattttaactttattaaccttggttcttccaccattattaagccttt

SEQ ID NO: 300508 - DNA, 364 bp, Zea mays
tgcaacatataaagcacaatattgtaccaatattggcagccaaaatattttgcctcattatgctccttggtctttctgcaagtgctgctacggcgagcattttcccgcaatgctcacaagctcctatagcttcccttttttccccatacctctcaccagcgatgtcttcagtatgtgaaaatccaattcttttaccctacaggatccaacaggcaatcgcagcaggcatcttacctttatcacccttgttcctccaacaatcatcatacctattacagcagttaccttttgggcattttattgacacaaaacattatggcacatcaactacaacaacttgtgctagcaaaacttgctgtctact

SEQ ID NO: 300509 - DNA, 457 bp, Zea mays
ggccgacagtgtctacagtcaatgatcagtggcggtcgatatattttgcatccctaagcgtcctcgctcttcatgtatgcgttggtaacacaagcattttcacttaatactggccaactactatggctgcacttacatcaccgtacctttcatcaacgaccgctccaacctgggaaaacccagccgtataaccctacaggctccaacaagcaatacgaacaagcaacttacctttatcacccctgttcttgcaacaatcgccatccctacctttgttgcagccattggtacaaaccatcagggcacaacagctgcagcaactcgtgctaccagtgatcagccaagtagctctggcaaacctttctccctactctcagcaacaacaatttcttccattcaaccaactgtctacactgaaccctgctgcttatttgcagcaacaacaactactaccatt

SEQ ID NO: 300510 - DNA, 440 bp, Zea mays
ataccatgagcattctgtaacacaccaagcgaagcacattatccgcaaccttacagcagtggctaccaagatattattctctctcttgcgctttttgagctgtatgctgagcgcatcaaatgcgttgattattgcagactgctacacttgctccaagatccattattacacagtgcacttcaccagttacgttaatgtgccttctaacacgcatctgtgcaagcctataggctatcaacaagcaattgcagctagcgtcttacatcaacgtattttccagttgcaacaacaatccttggcacatctaacaatacaatcaatcgcaacggaacaagaacaacaattagtaccagcaatgagcgagctaaccatggtgtacaatgccgtgtactttcaacagaagctgcttgcatgaaagccacttgctcttgcaaacgtag

SEQ ID NO: 300511 - DNA, 438 bp, Zea mays
ccattagctttatctactccagagcgcagaagaacccgatcgacaccatgagggtgttgctcgttgccctcgctctcctggctctcgctgcgagcgccacctccacgcatacaagcggcgagacagcgggggacggtgaagtggttcaacgacaccaagggcttcgggttcatctcccccgaggacggcagcgaagatctcttcgtgcaccagtcgtcgatcaagtcggagggcttccgctcgctcgcggagggcgaggaggtggagttttccgtctcggagggtgacgacggccgcactaaggccgtctacgtgaccggccccgacggatccttcgtcaggggcggcggaagcggaggaggaggcggcggcggctacagctcccgcggcggtggcggatcttgcggcggcggtcgcagctacagtggtagcttgggc

SEQ ID NO: 300512 - DNA, 439 bp, Zea mays
gaaagcacaatattgttccatctatgggagccataatatcctgtcttgctatgctacctggtctttctgcaagtgctgttgcgagcgccattttcccacaatgctaagacgctcctatagacttacctttcttcccccgtacactctcaccagcggtgcttgtggtgtgggaaaacccgaccttttaaccctatatgatccaacaggcaatcgaagctggcatcttacctttatcacgcttgtttctccaacaatcatcagccgtattacagcaattacctctggtgcatgtattggcacaaaacatcaaggcgcaacaactacaacaacttgtgcttgcataccttgctgcctactctaagaaacaacagagtcttccattgaatcaacttgctgtattgaactctgcttcttatttgcaacaacagcaactaccatt

SEQ ID NO: 300513 - DNA, 348 bp, Zea mays
atgacgcttaggcggacgcgtgggcaaagcgagagtgcgtaaagaggatcgcctaacaaaacacaatgaagatggtcatcgctctcgtcttgtgcctggctctgtcagttgacagcacctgtgctatgcatatgccctgcccctgcgctgggctggaggtcttgtacggctctcgaccctgactgacgacgatgatgtgcgcccgttcgctgtacccctacgctgagtacctgaggcagccgtagtgcagtccgcttactacggcgccctactacaccggatgtggactgactagcgccatgttccacacgatccgtcaacagtgatgacagcaatagatgaggatta

SEQ ID NO: 300514 - DNA, 360 bp, Zea mays
attgtaaacaactagcagcatatatagcacattcaagctctcaacactggcacacacaatattatgcctccttatactcgttggcctatatgcatgtactggtacggcgaccacatcgccgcaacgctcgaaagctcctatagctctccatctttaccccgtagcctctcaccaccggtgtcttcaggtgtgtgaaatacccaattattcaaccctacatcatccatcacacaatcgcagcatgcatattacctttatgaaccctcgctgtacaacaataataagccctattacaacagttacctctggcgcatttattggcacaaaacataatggcacaacaactactacaacttgtgc

SEQ ID NO: 300515 - DNA, 309 bp, Zea mays
tttattcataaacacaccaatctaagcgcactatcaacaacctaacatcattggctaccaagatattatcccttcctgcgcttcttgcgcttattgcgagcgcaatatattcttccattattccacaatgctcactagctcctagttacataatattacagtatcgtcttccaattacttatatggccttagaacacccatgtatgcaagccttatatgcttcaacatgcaattgatgggagtgtcttacaacaaccaattgtttaattgcaacaactataccttgattcatcttaacaatacaaacca

SEQ ID NO: 300516 - DNA, 415 bp, Zea mays
atttgacctttacagggccttggaagaagaaatgccttgctgaatttgggatcgttacacagtgtgtggcaccaactagagtcaatgatcagtatcttacaaatgtcttgttaaagattaacgcaaagttgggtggcttgaattcgttgctccaaattgaaacatccccagcaattcctctcgtatccaaggtcccaactataatcttgggtatggacgtatcacacggatctcctggacattctgatataccgtctgttgctgctgtaagtatatttttgtctttttctgtgataaataataaatagtggctatgtgacagttttattttgttttcctcaggttgttagttctcgtgaatggcctcttatctcgaaatacagagcatctgtccgcacccaatcaccaaaaatgg

SEQ ID NO: 300517 - DNA, 307 bp, Zea mays
gcaacaacagatcataccagcactgaaagaactagatgaagtgaaccctgtatactacttgcaacagcaagtgcttgcatacaacaacactagtacaggcaaacgtagctgcaaaccaacaacaacaacaaatgcaacagtttcagatagtaacaagctaactaaacaaggtgaaccctagacgctaactacaacaacaacaaatgcttataactagccctaacatagtgggaaatgcacctaaatacaagcaacaacaaacgatgaaacagatagaacaactatgaataagatagatgtggaaaac

SEQ ID NO: 300518 - DNA, 335 bp, Zea mays
cggacgcgtgggttcagaaacacaccaagcgaagcgcactagcaacaacctaacaacaatggctaccaagatattatccctccttgcgcttcttgcgctttttgcgagcgcaacaaatgcgttcattatttcacaaagctcacttggtcctaggtccattatttcacaggttcttccaccagttacttcaaaggccttcgaacacccaactgggcaagcctataggctacaacaagcgattgcggggagcgttttacaacaaccaattggtcaattgcaacaacaatttctggtacatttaacaatacaaaaccattgtacgcaacaacaacaac

SEQ ID NO: 300519 - DNA, 350 bp, Zea mays
cgcagaagcaccgaaaggtgtcacctctgctcgccttcgccttcaccttcaccttcaccttcaaatgtgactcggcttggcgcaaggggaatgaactccaggagacaggagcagcaggctcggcggaccatcagagcgctgctggccaagaacggagcgctgtgcacaggtgtttggagatgcaggagcggaggcgcagatatagcctcgcgagccccgacgatggccaccgccgcggtgtcggtcgacgagaagctcgacaagcttcgcgccgaggtcgccaagctcgaccagatcagccagaacgagaagtccgggttcattagcctcgtgttacgctacctcagtgg

SEQ ID NO: 300520 - DNA, 311 bp, Zea mays
accaactcccatcattaaaagcacactagcgctccaacaatggccgctcaatagattgtgcctgcttatgctccttgggctttctgcaagagctgctacggccaccaatctgtcccacaagagctcacaagactcctatagcgtgcccttgtttccacccgtaccttctcaccagccggggtcataaggtatggtgaaaacccaaattgttcaagccctataggatccaacaggcaaatcgcagctggcatcttacctttatcacccttgttcctccaacaataatcagccctattacagcagttaccttt

SEQ ID NO: 300521 - DNA, 311 bp, Zea mays
gttttgagcttccataaacactccaagggacgagcactagcataagcctaacatcaatgtctaccaagatattatcactccttgcgctttttgtccttattgtgagcgcaacaaatgcgtttattattccacaatgctcacttgcttctagtgccatttttccacatttccttccaccagttacttcaatggtctgtttacatctagtcttgcatagctaacttgcttcatcatgctcttggtgtatgcggcttacaacaatccattatttccttagtgcatcatctatttcttgtcatattttacattac

SEQ ID NO: 300522 - DNA, 411 bp, Zea mays
gttatagataaagagcaatcgttctccaacaatgcaagttacaatcttgtgcctgcttatgcttattgtgttttattagaggagctgaactcaagaccatgttcgcacaatgataacaagctgctatggcttacctttttccccacgcacctctaaccaactgggtcttcagcatgctataacccaatggctgtaaccctacagaagccaacagggaacggcatttggaatgttaccttatatcagcctggttcctgcaacaagcattagacctattacagaagttaccttggagggatttattggcacaaaacatcagggcacaacaactacaacatcttgtgctagcaaaccttgctgccttactctcagcaacagcagtttcttccattctaccaactagctgcattg

SEQ ID NO: 300523 - DNA, 281 bp, Zea mays
gagaccaacaaggagcatagaaagtggaatacaggagcaacaatggagcaacaatggtgaccaatatatttgcccttcgtatgctccgtgctctttgtacacgcgacgctaacgcgacaatgttcactcaatgctaacaagctcctattgcttccattctttccatatacgttagattaattataggttcagcatgtgaaaacacagcttttgaaccatataggcttcaacaagcgatagctacatgcatcatacctgtatcgaccttggtgtgcaacaat

SEQ ID NO: 300524 - DNA, 291 bp, Zea mays
tgcagaatcccgcgaaccatcgagtttttgaacgcaagttgcgcccgaagccttctggcggagggcacgtttgcctgggcgtcacgccaaaagacacttccaacacccccccgcggggcgagggacgtggcgtctggccccccgcgccgcacggcgaggtgggccgaatcaggggctgccggcgaaccgtgcctagcgcaaaacgtggtgcgcaacatcaatttgatcgatttcgcacactgaaccgtgactgggacgcgcactctatcgtaacgtcacattcagcgaccg

SEQ ID NO: 300525 - DNA, 409 bp, Zea mays
caacaagcaacatagaaagtggaatccaggagcgacaatttagcaacaatggagaccaacaaattttcccttcttatgctccttgctctttctacatgtgttgcttacgcgacaatttttccttaatgctcacaagcttctatagcttccctttttcccccatacctttcattaattatagcttcagtatgtgaaaacccaggtcttgaaccatataggcttcaacaagcaattgcagcaagcaacatacctttatcgcccttgttgtgtcaacaaattggcaggcctatttttggtgcagacattggtacaaaccattagggcacaacagctgcaggaacttgtggtacctgtgatcaaccaaatagctttggcaaaacctttttcctattttcggaacaacaatttt

SEQ ID NO: 300526 - DNA, 399 bp, Zea mays
cggacgcgtggcttggtacaacgtcttcctcttcctgtcaataatagagggagagtgaggcacccagtgggagacaaggggaaatggggaaggtatgtcaagggaccgtattcccttgagtttgattccacagtggtaacaaaaatgcctatctccgtggacagacgaacaatctcaatacccaactattcaatcctacatggtacaagatgtcattcaagcaagcatattacgggcattagtatgaaccctgcaacaaccatatgctctattgtaacatacatccttagtgcatttttatcttcaaagaattggtgcacaacaactaccacaccagttgctatcaaccatctattaagtatcttgcagcgaaccttgtttgtttacctcagcaaacaa

SEQ ID NO: 300527 - DNA, 313 bp, Zea mays
gccatcatggacgccgacctaaacaagaatgtgccatgggacctgccgatcaaggagaaaaagggcgacaaagagtgctacttgttctaccagaacgaccccaagttcccgacggagctgagggcgaaccgcgccaactaggacgggtactggaaggagacgggcgaggacaacgaggtgtacaacgccgcggaacgggtggcggtactgatcaccatgaagatgaacctcggcttgtacacgggcggggataccacaagtgacaagatcaactgaggcatgctcgaatacaggctgtaaggcagcggcaggc

SEQ ID NO: 300528 - DNA, 376 bp, Zea mays
ctggcgcttgagaccataaactcaatatgctacagagagtagaaaaaacctaacgacaccgtgtggcaggatgttagccctccttgcgcttcttgccctttttgtgagcgcaacatatgcgcatattatttcacaatgctgacttgctcctagtgccattattccacagttgctgccaccagatacttcaatgggcttcgaacacctagctgtgcaagccaacatgcaacaacaagcgctttgtgagagcgtcttacaacaaccaattgcccaattgcaacaacaattcttgccacatctaacaatacaagccatcacaacgcaacagcaacaacagtttctaccagcactgaaccacctagccatggtgaaccct

SEQ ID NO: 300529 - DNA, 174 bp, Zea mays
gtgcagcccgacggctacaccctgactgatcgcctcagcgccagtgggcggggcagcagcgttgccagcatgtcacgcagggggagccgcagcaccggtaccaggcgatcttcgggttggccctccactccatcctgtagcaggagtcgcaaagcggtcaggtcgcggggctgt

SEQ ID NO: 300530 - DNA, 292 bp, Zea mays
atccgatccagccgccaccaggagcagagtttttcgtcatctcttctacggcgaacaacccccagacgcccaccagatcacttggtaaactttgatgacgggtgatggcggcttctatcgctaacctgaacagcgtggcagtgcttaaaaagcttgaggagctcgttatgaatcgcaggtacatgactggctaccaagctgtcaacgatgacttggctgtctacacttaggtttcgattgttccctcgtccaacaatatcaacgaaggaaggtggtttaatgacattgatgc

SEQ ID NO: 300531 - DNA, 350 bp, Zea mays
attttcagcattcagaaacacaccaagcgaagcgcactagcaacaacctaacaacaatggctaccaagatattagcccttcttgcgcttcttgcccttttagcgagcgcaacaaatgcgttcattattccacagtgctcacttgctcctagtgccattattccacagtttctcccaccagttacttcaatgggcttcgaacattcagccgtgcaagcctacaggttacaactagcgcttgcggcgagcgttttacaacaaccaattgcccaattgcaacaacaattcttggcacatttaaacctacaaaccattgcaaccgaacagttacaaccagttttttggcattac

SEQ ID NO: 300532 - DNA, 407 bp, Zea mays
catttattggcacaaaacatcagggcacaacaactacaacaacttgtgctagcaacctgctgcctacccccagcaatttcttccattcaaccaactagcagcattgaactctcctgcttatttacagcagcaacaactactaccattcagccagctagctggtgtgagccctgctaccttcttgacacaaccacagttgttgccgttctaccagcacgttgcgcctaacgctggcaccctcttacaactgcaacaattgctgccattcaaccaacttgctttgacaaacccagcagtgttctaccaacaacccatcattggtggcgccctcttttagatttcttatgagttatagttcaataataaagttttttatctgatgtttgcggcttcccagaaataagaaa

SEQ ID NO: 300533 - DNA, 359 bp, Zea mays
ctaactataaacatagaacgtacaatattagaccaataatggtagccaaaatattatgccacattatgctctttggtctttctgaactaactgctatggacatgcattttaccgcactgctcacaggctgctatagctttccttgttccccaatacctttgaccagcaatgcatttacgttgtgaaagatcaattcttataccctacaagagtccacagggaatttcagaaggcatgttacctttataaaccttaggcctcccacaatgatgcgtcctattacacgagttacctttggtgcatttattggcacaaaacattagggtacaacatctacaacaactcgtgctatgaaacct

SEQ ID NO: 300534 - DNA, 190 bp, Zea mays
  unsure (1)..(190): unsure at all n locations
acccacgcgttcgacatcaagaaacatanaaagtgggatacagtttcaacaatcgagcaacaatggcggacaaaatattttccatccttatgctttttggtctttatggagggggtgataacacgaccattttttctaaatactcacatgttcctattgctgttttttataccatataccttccattaat

SEQ ID NO: 300535 - DNA, 319 bp, Zea mays
acacgcttacatccaacgctataaatattttatacgttcatgtacttctagtcctttgagcgagcgcaacacaacgcgttcattattgcacaccgctcacttgctcatattgacattattgcacaacatctcccactagttacttgaatggacttcgaacatgcaggcatgcaaggctacaggctacaactagcgcttgtggatggcgtattacaacaaccatattgccaattgctaaaacaattgcttggcacatgtaaacctacaaaccattcgaaacgcaacaacaacaacagtttctgccattactgaaccacct

SEQ ID NO: 300536 - DNA, 354 bp, Zea mays
gacggcgcgcgctggagggaggtcatggaggcctgcttcgcccgcgtggacggtgaggtcgccgtcgtcgagggcgaggtgaacaacgccggccacacggtgggctccaccgccgtcgtggccgtcgtggggccccgtcacatcgtggtcgcgaactgcggcgactcccgcgccgtgctctcccgcggcggcgtccccgtgccgctgtcttccgaccacaagccagataggcctgatgagttggaaagggtagaatcagcgggcggcagggtcatcaactggaaggggtaccgtgtcctgggggtgcttgcgacggcaaggtcaattggcgactactacatgaagccattcata

SEQ ID NO: 300537 - DNA, 313 bp, Zea mays
ctgtactgtgggaaggcgggacgaggatggcatgacagaacagaatgtagaagggcatggtcttctaggtgtgtgtggaagtgccagttgtgagaccctttttacaggggactcgctaccagtgatggcatttggaaccatggacccatgcatgcagcactgtatgaagcaacatgggcttgccaggttgatggcgtgtccgttcctgatgctggagcaactgttggacttaccgttttagacgatgccagtgatgatgccacagattgatgacgcctaacatgatggtaccattgatgaatccgagcattga

SEQ ID NO: 300538 - DNA, 378 bp, Zea mays
agaaagtacaatagtgtaccaacaatggcagccaaaatattttgcctccttatgctccttggtctttctgcaagtgctgctactggtgaccattattcccacaatgctcacaagctcctatagctttccttattcccccgtacctcttaccagcggtgtcttctgtatgtgaaaacccaattttttaaccttatatgattcaataggcaatcacagctggcattttacctttatcactcttgttccttctacaatcatcagctccttatacaggactatacctttggggcatttattgtgacaaaacattatggcacaacaactacaacaacttgggctagcaaactttgctggctaccttcagaaacaacagttttt

SEQ ID NO: 300539 - DNA, 227 bp, Zea mays
aaacacaccaagcgaagcgcactagcaacgatctaacaacaattgctaccaagatattagctctccttgcgcttattgccctttttgtgagcgcatcaaatgcgtttattatttcacaatgtttacttgctcctagtgccattattctcacaatctctcaaccagttacttcaatgggctatttacacctagctgtgtaagctaacatgcaacaatcaagtgcttgt

SEQ ID NO: 300540 - DNA, 390 bp, Zea mays
attagctttatctactccagagcgcagaagaacccgatcgacaccatgagggtgttgctcgttgccctcgctctcctggctctcgctgcgagcgccacctccacgcatacaagcggcggctgcggctgccagccaccgccgccggttcatctaccgccgccggtgcatctgccacctccggttcacctgccacctccggtgcatctcccaccgccggtccacctgccgccgtcggtccacctgccaccgtcggtccatgtgccgtcgttggttcatttgccgccgccaccatgccactaccctacttaaccgtcccggcctcagcctcatttccagccatacccatgcccgtgccaacagacgtattctaatcccgtgccagttgctttg

SEQ ID NO: 300541 - DNA, 144 bp, Zea mays
atttataatcacaccaagcgaagtgcactaacaacaacctaacatcatgggctaccaagatattagcccttcttgcgcttcttgcccttctagcgagagcaacaaatgcgatcataatttcacagtgcttaattgcatctagtg

SEQ ID NO: 300542 - DNA, 308 bp, Zea mays
tcgaccgatcgatcgccacagccaacaccacccgccgaggcgacgcgacagccgccaggaggaaggaataaactcactgccagccagtgaaggggtagaagtttactgtttctttgatcagtgtgtgtaccgtctgttagttttgctcatctttttttcttttatttgttattttctttattttgtgttttttttattttttatttttgtatattttggttctttttttttttttttttttataatatttttttttattctttttttatattttatctttttttaatttcttgttttttttatgtttt

SEQ ID NO: 300543 - DNA, 386 bp, Zea mays
gagcattcagaaacacaccaagcgaagcacattagcaacaacctaacaacaatggctaccaagatattatccctccttgcgcttcttgcgctttttgcgagcgcaacaaatgcgttcattattccacaatgctcacttgctccaagttccattattacacagttccttccaccaggtacttcaaaggccctatgaacacccagctgtgcaagcctataggctacaacaagcaattgcggtgagcgtcttacaacaaccaaattctcagttgcatcaacaatctttggcacatttaacattactaaccatcgtaacgtattagcaacatcattttctaccagcactgagtcacctagccatggggaacccttccgcttactttcaac

SEQ ID NO: 300544 - DNA, 411 bp, Zea mays
ttattgagaccaactagcaacatagaaagcacaatagtgtaccaacaatggcagccaaaatattttgcttccttatgctccttggtctttctgcaagtgttgctaccgcaaccatttttccacaatgctcacaagctcctatagctttccttttttccccataccttttaccagcggtgtcttcaatgtgtgaaaacccaattgtttaaccctacaggatccaacaggcaatcgtaacaggcattttaccattatcacccttgtttcttcaacaaccgttagccctattacagcagatacctttggtccatttggtggtacaaaacattatggctcaacaactacaataacttgggcttgttaactttgctgcattctttcaactccatagtttcttcattcaaccaactg

SEQ ID NO: 300545 - DNA, 394 bp, Zea mays
caggcgcccatatatgctatactatactctaggaagcgaggaccccagcggcacggcagtcaagacgctcgtatgcgttcgcgctcttagcgtctgggcgcgcgcgcctcgagcgacccatattgcagacaagttgctatcagtcatgtcattgcgtaccacgaaccatatagcaggcagctctgcattgtgcaaccagagctcgtcagctttatgggcgtcgaacgcgcctgacgctgcaagcaccatacctctatacacccttggatcaacaacgggcaggcgtatctatggtgggtcattagcacgaaccatcagtggacagcagctgcagtgactcgcgctacctgtgagcaaccaaggagctctggcagacctttctccctactcttaa

SEQ ID NO: 300546 - DNA, 419 bp, Zea mays
gtcacccattaccatgcacggcagggggagcacagtcctaacagactcacagcaatggctagcaatatattatacctacatgcgcttattgcgctttttgcgagcgcaacaaatgcgttcattattccacaatgctcacttgctccggggtccattattacacagcaagtttaaccagttacttaaatgagctttgaacacccagttgtgcaagcctataggctacaacaggccattgctgtacagcgtcttacacacaaccaaactcccaggtgcaacaacataatcttggtacatctaacactacataccatcgcatcgcaacaaaaacaacaattcctaccagaactgagtcacctagacatggtgaaccctgtcggctacttgcaacagcagttgcttgcatcaaacccacttgc

SEQ ID NO: 300547 - DNA, 282 bp, Zea mays
agaccaactagcaacatagaaagcacaatagtgtaccaacaatggcagccaaaatattttgcctccttatgctccttggtctttctgcaagtgctgctacggcgaccatttttccgcattgctcgtaagcttctatagcttctctttttcccccgtacttctcacctgcgtcgtcttctgtatgtgaaaactcaattcttcaaccctacatgtttcttcatttaatcgtagctttgcaactttcctttattactcttggtcctccatcattcttcactccta

SEQ ID NO: 300548 - DNA, 319 bp, Zea mays
tcgtacagtttcttccaccaggtacttcaatgggcttcggggacccagctgtacaagcctataagctacaacaagctatttgtgcgagcgttttacaacaaccaattttccatgtgcaacagcaatccttgtctcatttaacaatacaaaccattgctatcgcaacagcaacaacaattccttaccagactgagccacctagccaaggtgaaccctgccgtctacttgcaacatcagatgcttgcttcaaacccaattgctctgtcaaacgttattgcaaaccatacattacatcaaatgcaacagtttctgccatctc

SEQ ID NO: 300549 - DNA, 229 bp, Zea mays
tttcggaccaactagcaacatagaaagcacaatagtgttcgggcaatggcagtcaaaatattttgcttccttatgctccttggtctttctgcaagtgctgctaccgcaaccatttttccacattgctcacaagctctatatagattcctttttttccccatacctttaaccagcggttgtttcagtgtgtgaaaaccctattcttctatcctacatgatccaacatgct

SEQ ID NO: 300550 - DNA, 433 bp, Zea mays
tctaactagcaacatagaaagcacaatagtgggccaacaatggcagccaaaatattttgcctccttatgctccttggtctttctgcaagtgctgctacggcgaccattttcccgaaatgctcgcaagctcctatagctttccttttttccccgtacctcttaccagcggtgtctttggtatttgaaaacccaattcttcaaccctacaggatccaacaggcaatcacagctggcatcttacctttatcacccttgtttctccaacaatcattagccctattacatcaattacctttggtgcatttattggcacataacattagggcacaacaactacaacaacttgttgtagcaaaccttggtggctacttttaacaacaggagtttctttcattctaccaactatgctgattgaacctcttgtttttatttg

SEQ ID NO: 300551 - DNA, 405 bp, Zea mays
tgcctgtgcacttctccatcaccaccactgggtcttgagaccattagctttatctactccagagcgcagaagaacccgatcgacaccatgagggtgttgctcgttgccctcgctctcctggctctcgctgcgagcgccaccttcacgcatacaagcggcggctgcggctgccagccaccgccgccggttcatctaccgccgccggtgcatctgccacctacgggtcacctgccaccttcggtgcatcttccaccggcggtccacctgccgtcgccggtccacctgccaccggcggtccatgtgccgtcggcggttcatttgccgtcgacaccatgccactaccctactcaaccgtcccgggcttagccttatcctcaggccaacccatgcccgtgccaacaggcg

SEQ ID NO: 300552 - DNA, 438 bp, Zea mays
ccaacatgcaacaacaagcgcttgcggcgagcgtcttacaacaaccaattgcccaattgcaacaacaatccttgccacatctaacaatataagccatcacaacgcaacagcaacaacagttcctaccagcactgagccacctagccatggtgaaccctgccgcctacttgcaagagcagctgcttgcatccaacccacttgctctggcgaacgtagttgcaaaccagcaacaacaacagctacaacagtttctgccaacgctcagtcaactagccatggtgaaccctgccgcctacgtacaacaacaacaactgctttcatctagcccgctcgctgtgggcaatgcacctacatacctgcaacaacaattgttgcaacagattgtaccagctctgactcaactagctgtggcaaaccctgttgcctacttgcaacagc

SEQ ID NO: 300553 - DNA, 315 bp, Zea mays
gggaaatctcctctatccatccctctctatctatatatgtaataatgcagtaagacgacacacattatcatgtgtggtatgaccaataatatatgcatcataataaagttttggttttaaaaaaaaaaaaaaaaaaaaaaaaaaaaaataaaaaaaaaaaaaaaaaaaaaaaaaaaaaaaaaaaaaaaaaataaaaaaaaaaaaaaataaaaaaaaaaaataattaaaaaaaatttattaagggggggcgcttttaagggatccaaatttattttcctgggtctggggagttttatatttttttttggtttccca

SEQ ID NO: 300554 - DNA, 422 bp, Zea mays
actagcgcttgcggcgagcgtcttacaacaaccaattgcccaattgcaacaacaatccttggcacatctaaacctacaaaccatcgcaacgcaacagcaacaacagtttctgccatcactgagccacctagccgtggtgaaccctgtcgcctacttgcaacagcagctacttgcatccaacccacttgctctggcgaacgtagctgcataccagcaacaacaacgtctgcaacagtttatgccagcgctcagtcaactagccatggtgaaccctgtcgcctacctacaacagcaacaattgctttcatctagcccgctcgctgtgggcaatgcacctacgtacctacaacaacagttgctgcaacagattgtaccagctctgactcaactagctgtgggaaaccctactgctacttgcaaca

SEQ ID NO: 300555 - DNA, 251 bp, Zea mays
caactagcaacatagaaagcacaatagtgtaccaacaatggcagccaaaatattttgctttccttatgctccttggtctttctgcaagggttgctaccgcaaccattttccaacaatgctcacaagctcctatagtttcccttcttcccccatacctttaaccagcggggtcttcaatgtgtgaaaacccaattgttcaaccttacaggatccaccaggcattcgcaccaggcattttaccattttaaccc

SEQ ID NO: 300556 - DNA, 339 bp, Zea mays
caattagctcatcgactccagattggagaactcgacaccatgaaggtgctgatcgttgcccttgctctcctggcgctcgctgcgagcgccgcctccagtacaagcggcggctgtggctgccagacaccaccgtttcatctaccgccttcgttctatatgccgcctccgttctatctgccgccgcaacagcagccgcagccatggcaataccccactcaaccaccgcagctaagcccgtgccagcagttcggatcctgcggcgtcggcagcgtcggcagcccgttcctgggccagtgcgtcgagttcctgaggcaccaatgcagcccggcgggacgccct

SEQ ID NO: 300557 - DNA, 167 bp, Zea mays
atgcaacgatatagctcttctattgtgtaacctatatttttgtgagcgcaacaaatgcgttcattattccacaacgcttacttgtttctagtgccaatattctacagttactctcatatctatttaatttggttctgaacatctagctatttatgctatcatgcact

SEQ ID NO: 300558 - DNA, 290 bp, Zea mays
gcaacatagaaagtggaatacagtagcaacaatagagcaacaatggcggccaagatattttccatccttatgctccttgctctttctgcatgtgatgctaacgcgaccatttttcctcaatactcacaagctcctatagctgccctacttcccccataccttccatcaatgaccgcttcattatgtgaaatacctagcccttcaaccttacaggcttccaacatgctattacaaacacgtatcttacctttatcacccttagtctatcaacaattgcctgccctattttt

SEQ ID NO: 300559 - DNA, 116 bp, Zea mays
gttttactatactctaagaagcaaggacaccaccgacatggcagtcatagatgcttgcatagttcgctctcctagctctttgagcaagcgccactagtgcgacccatattccaggg

SEQ ID NO: 300560 - DNA, 212 bp, Zea mays
aaagcggccaggtcgcggggctgttggcggcgcagatagcgcagcaactgacggcgatgtgcggcctgcagcagccgactccatgcccctacgctgctgccggcggtgtcccccactgaagaaactatgtgctgtggtatagccgttggctagctagctatgtgagtcatctagcgcagatgattgagtgataatgagatatgcatcaccat

SEQ ID NO: 300561 - DNA, 365 bp, Zea mays
  unsure (1)..(365): unsure at all n locations
taccaacataaaaagcncanttttatactaacagtgccatgcannatatggtgctgacttatgctccttgtcctttatgcaagtgctgcttcctcaaccattatctcacaatgctcacaagctcctatagcttccttacttccaccatacactttcaccaacgctgtcttcaaaatgtgaaaacccaattctttaaccctacaggatccaacaggcattcgcaccaggcatcttaccttaatcacccttgtttctacaacaaccgacagccctattacagcatttacctttgtagcatttgtcggcacaaaacattcaagcacagcaactacaacaacttgtgctaggaaacctagctgactact

SEQ ID NO: 300562 - DNA, 440 bp, Zea mays
  unsure (1)..(440): unsure at all n locations
gtcatcctagcaattagctcattgactggagagtggagaacnngactcggtgaaggtgctgatcgttgcccttgctctcctggcgctcnnnncgagcgccgcctccagtacaagcggcggctgtggctgccacacaccaccgtttcatctaccgcctccggtctatatgccgcctccgttctatctgccgccgcagcagcagccgcagccatggcaataccccactcaaccaccgcagctaagcccgtgccagcagttcggatcctgcggcgtctgcagcgtcggcagcccgttcctgggccagtgcgtcgagttcctgaggcaccagtgcagcccggcggcgacgccctactgctcgccacagtgccaggcgctgcagcagcagtgctgccaccagatcaagcaggtggagccgctgcaccggtaccaggcgacatacg

SEQ ID NO: 300563 - DNA, 301 bp, Zea mays
  unsure (1)..(301): unsure at all n locations
tcgattcttagtcntnnctaatacatgatgtgtanctangtnagggcgtcagaacaacacttgctaccaagcaattagctcctccttacgcttgtaccccttgtagtgagcgcaacagatgcacacattatttcacaccactcacttactcatatggccaacatttcacaggatctgccaccagcaactacaatgagcatcgaacatacaatcaagcaagcctacatgctacaactatcgctcgttatcagcgacacacaacaaccaactgcccatgcactacaaccatcctttgcacatc

SEQ ID NO: 300564 - DNA, 392 bp, Zea mays
  unsure (1)..(392): unsure at all n locations
tcgatatttataaatcnnaagcatttcgatatggagggnccaaacnnacgtatgcggtgcgtgcgataccataacatctatctatagcgtgaccttcattcacttcactgaccgcaacatacaacgtcattgactcacaaaactctctcgctactcaacttattattctacaagtacatccacctttcaccttaatgggctataaacaccaagctctgaccgactatactttacaacaagtgatcgcgctgaatgtctaataacacccaatttcccacgtggaactacattccttggctcatataacaatacacaccatcaccacgcaacattaacaacagttactaccagcactgaaccacctagccatagtgaaccctgtcacctactta

SEQ ID NO: 300565 - DNA, 428 bp, Zea mays
  unsure (1)..(428): unsure at all n locations
tcgctagcaacagnnanngctctttggtgtggctacattggcagccagtgtgggttgcttccttatgctccttggtctttctgcaagtgttactaccgcaaccattttcccacaatgctcacaagctcctatagcttcccttcttcccccatacctttcaccatcggcgtcttcaatgtgcgaaaacccaattgttcaaccctacaggatccaacaggcaatcgcaacaagcatcttaccattatcacccttgttcctccaacaaccgacagccctattacatcatttacctttggtccatgtggtggcacaaaacatcaaggcacaacaactacaacaacttgtgctaacaaaccttgctgcatactctcagcaacatcactttcttccattcaaccaactggcttcatttgaactcttgctgctta

SEQ ID NO: 300566 - DNA, 309 bp, Zea mays
  unsure (1)..(309): unsure at all n locations
tctttttttaatcgatnngnactatttttattttatggnctgnggntgctaagtcttgggcccttcctgcgctacttgctctttttgcgaccccnacacatgcatccatcactccacaatgctcacttgctcctattatcattatttcacagttcctcccaccatatactataatggcctccttacacccatttgtgctagcccatagactacaacaagccttctcgttgaacatattacaacaaccaattgccctatttcaacaacaattcttgccacatttaacaattctaaccattttaacgcaac

SEQ ID NO: 300567 - DNA, 394 bp, Zea mays
  unsure (1)..(394): unsure at all n locations
tctattttcaactttcaaatacacacgaagggatnctctctngcgacgagcctaacaacaatcgctaccaanatattatccctccttgctcttnttgcccttttagtgagcgcaacaaatgcgttcattattccacagcgctcacttgctcctagtgccattattccacagatcctcccaccagttacttcaatgggcttcaaacatccacccgtgcaagcctacaagctacaactagcgcttgccgcgagcgtcttacaacaaccaattgcccaattgcaacaacaatccttggcacaatctaaacctacaaaccatcgcaacgcaacaacaacaacatgttctgccctcactgaaccacctaatccaggagaaccctgtctcctacttacaa

SEQ ID NO: 300568 - DNA, 261 bp, Zea mays
  unsure (1)..(261): unsure at all n locations
tcgaattgctgccattcaatcaacttgctgtgatanacgcgacagtggtctgccaacaacccatcattggtggtgccctcttttataagncnnatgacttatagttcaataatgaagatctttggatgatgttcgtggcgtcccagaaataagaaagtacatttcttaaaatattaaaaaacccactttatcaacccttacaagaatccacacgtacattcctccagcatattatcaatattaaccttgattcttctacaa

SEQ ID NO: 300569 - DNA, 327 bp, Zea mays
aaaaaaaaacaaggcttttttttttccattctaaatagcaaaggacaacttgcagcaggacacatacccatacaagccctttcgtcccatttgcagcctacccataaccgtatactggaaacagggttctgttaaacataaaatcactccggacagtcagtttatgcctttttaggggacttggcggcctttttgggcgactttgcctccttgctccccccactggaccccttttccgccgtttttttgggcaacaaaacagggtttttattggggaccacaccgccgggggcgatggtcaccccccccaacagttttccaagcttc

SEQ ID NO: 300570 - DNA, 427 bp, Zea mays
cgtagcactgaaatccttcaagagtggcgccactcctatcttggtcgccaccgatgtagcttgaaggggtctcgatgtcccgaacgtggcccatgtcatcaattacgacctacccaagagcatcgacgattacgtccacaggatcggaagaactgggagagccggaaaggccgggaacgccaccgctttattcacagattcgaaccaccacctggcaaaggacctgctggagctgatgactggagcgaaacaggatgtgcctgagtggctcgtggactatgcaagcaggccgtgctccggagggtccagttatgccggtagaggccgaaagggtggcggaagttttggcggaagagactatcgcctcagcagtgattatggatacgggggcaacggtggtgtctattccagcagcggtagcagctac

SEQ ID NO: 300571 - DNA, 433 bp, Zea mays
ctcaagaaagaggtcttgtccgaggtttaattcctcatattatccaaaatggatgttgttgtcttcagtatgctgatgatactattttcttaattcaagattgtttggaaagtgctagaaaccttaaatttattctttgtctttttgagcacatgtctggtttgaaaattaaatttcacaaaagtgaaattttctgtttggggaaggctaaggatattgaagatttgtgtgctgatatttttacttgtcatattagtaatcttccgataaaatatcttggtgtgccaattgacaacaagaaaattaataaatctctctggtgccccatgttggaaaaaatgaagaaaaggcttgctggttggcaaggtagatttttgagcttggacggtagattgactttattaaatagttgtctttccaatggtcctcttta

SEQ ID NO: 300572 - DNA, 353 bp, Zea mays
cacgcacctccggcatcgaactatgacattggcggcgacattggatatggcggccaatactagaggacgtgcgcgactttggatctcgatgcaccgaattcgctgctgcacgctgaagtgcagatgcaagcccgacaggcacctcatgctcattggcccacctggctcttgaaagggttctcagactacccttatgaaggatgaatattgactgtgcctttgacgcactggtgatatgttgagggctgctgcggcagccaagacatctctgggtatcaaagctagacacgctatgagtacgggagagatcgtgtcagataactgggctgtgcggattattgatgaagctatga

SEQ ID NO: 300573 - DNA, 433 bp, Zea mays
cccacgcgtccgggatttcgagatgggtgtcttcaacaggacccctgagtgacttaagatgaacctagttgggaaggatcctgctctagacactcctgatggccctactatagagagtaatgctatcagcacgctatgttgctcgctcgaaggaacacacaccttgtcttcgggtctacccatattgaacaagcgcacgtcgagcaatggatggattttgccacaacacaagttgatcctgcagtcgcatggtacttgtatccaaggctcgtgtcccgctcttatgtgagcacaactgaggaaacagctatgtcttcattgaagaggtggctggatgctctgaacacacacctcgcctaaaacacatacgtggtggggcatgctgatactatacgtgacattggattgacatgcagcctctaccatggaattg

SEQ ID NO: 300574 - DNA, 363 bp, Zea mays
cggacgcgtggggcgttgccggcgatgggttgggcggcgcggtacggcattgcggtgggcacggcgcgggggctggagtacctgcacaaggggtgccggaggcggatcatccaccgcgacatcaaggcctccaacgtcctgctcaccgacgacctgcagccgcagatctccgactttggcctcgccaagtggctgccgtcggaatggacgcaccgcgccatcgcgcccatcgaaggcaccttcgggtgcctggcgccggagtactacacgcacggcatcgtggacgagaagacggacgtgttcgcgttcggcgtcttcctgctggagctcgtcaccgggcggaagccggtggacggcagacac

SEQ ID NO: 300575 - DNA, 403 bp, Zea mays
cgggctttcgtgcttaaccttgagagaacaaagttgcttgttggcgaagttcgcccaaccctattttttgcagaacgaggaggggagaacggtggcccctttcttcccagggagaggtttggcaccaacaggatcattactgtcaaggatcattcctctgtccagatcaacattggccacttggatgcgaatggcctgtacgatggtcacttcaccacgtttgctctctctgggtttgtccgtgctcagggtgatgctgacagctcgttggacaggctgtggcagaagaagaaggctgagatcaagcagtagatcttgcacgtagttccaccagtaatgcactctcgagggatactgctctagctatgctttagctagggggggatgattctgatgtttggct

SEQ ID NO: 300576 - DNA, 398 bp, Zea mays
  unsure (1)..(398): unsure at all n locations
cccacgcgtncgctttcacctcttgagatctcaatcatcttgtcatcatttgtgcccaatggttctggatgtttcattgactgatgttttacttttttcaagagctggtgcctggaggtgttaactcgccagtccgtgcctttaaatctgttggtgggcagccagtagtgttcgactctgtaaagggttctcgtatgtgggatgttgatgggaatgagtacattgattacgttggttcctggggtcctgcaatcatcggccatgcagatgataaggttaatgctgcattgattgaaactctgaagaaaggaactagctttggtgctccatgtttgctggagaacgtattggctgagatggtcatctctgccgtgccaagtatcgaaatggtccgcttt

SEQ ID NO: 300577 - DNA, 362 bp, Zea mays
atgggcattggttgatgatggcagattggcgtggaaatggacccagagagagggctaagatcgacaaaaacatggtgagtatcatcgtatatactttcatgaggagggcgtacaacgacacaagggtcatatattgtaattaccagacgggcttttgcctccttgaagtgagttaatccaggctgagcatcttgtgagacaaccagctctttactataatgaactgctggagcaacgtcatgctggtacatgaataatgcatccatatgtagcaaggactaaaggtccaagaaggctcgacctatttgagtctggggtgaatcatgcactggttgtcggcataggaatacagatactgcaac

SEQ ID NO: 300578 - DNA, 257 bp, Zea mays
ggcttcaagtgcggcatcaactaccaacctcctagcgttgtgcctggtggcgacctgcccaaggtgcacggtgccgtgtgcatgatctccaactccaccagtgttgtggaggtgttcttcctgatcgaccacaagttcgaccttatgtacgccaagcgtgccttggtgcactggtacgtcagtcagggtatggaggaaggtgagttctgtgaggcccttcaggacctggtggtgctcgagaaggactactaagaggg

SEQ ID NO: 300579 - DNA, 304 bp, Zea mays
ctttttctttcttgttccggtgctgttcttggcgcggattcgtccttgggctggagaggtagctgggttcgggggatgctgccgcgctccatgcgtgctgcatggcggtttctttcgtttccgtttgactaaaaatatatataaaaaagagaattttctctgtgcgtgctcgttgctgcggaatggagtgagctaacggacagcgcgtcgtgtttgttgggcgttccggcagatgatcctggccgcgatcgaagacctaggcgacaagagcgggtagaacaagtcggccatctgcagtcacatc

SEQ ID NO: 300580 - DNA, 336 bp, Zea mays
gcatttgctcgtgagatgcttcatcaacgcacaagaacattggcgccaccgaccccctggcgctgtcaaccgtgtggcatattccaaaccagctgatcctatcacttgtgcaacatttgctcaagatgtcattgaaggtcgagcaagcgttttacaagctcacgagcacaaacaccagtccctgatatttggacctgcaagtattgccggtggtggtttaaccagtgaacgggaaagaatgacagcgcatgtttttcagcctagctacaggatgccaacaatgagcattggaggagctggtttgcgcgagatgaaaatgttggagaaatggcaaga

SEQ ID NO: 300581 - DNA, 359 bp, Zea mays
cgcgtccaaccttcggtcattttttattattcgatccaaggtaggcacccaagacctttactcactggggatcgatatggctcagggacaaaaagaaatttatggtgaatacgaccgtgaacgaggagctcgccgacaagattgcgctcgtcaataagaagccgaaggcggaaaagcgggtctatgctggtaagtacgctaccaacgaatgcggctagggcaagaggggctagattaagggcaagaagagcgtcgagacttattagatctacatcttcaaggtgctgaagcaagtataccctgacattggcatctccttcaaggtcatgttcatcatgaactccttcattaacgatatc

SEQ ID NO: 300582 - DNA, 363 bp, Zea mays
cccacgcgtccggttgtcgtaaaaaataggatgttaatcaattgttcatatgtaagaaacgatgagatgtcgttcctattaccatcagccaatcaaggagtctgctctagggaacatcccgaccattgccttctgcgacactgactctccgatgcggtatgtcgatatcggcatccctgccaacaacaaggggaggaacaacattggatgcctgttctggcttttggccaggatggttctgcagatgaggggcactatcctctttgggcacaagggggaaggcatgggtgatctgttcttctacagagacccaaaggaagcaaaggagcatgaggaggaagctgttgccgcccctgagtttgc

SEQ ID NO: 300583 - DNA, 362 bp, Zea mays
cgcatgcgttccaacatctgagcaatctcttgtgcactcagacatgccaatagacgcggcaatacaaccatggactccaccatcacctgcacaggcactaaggcaaagaatgaggcgaacaagcgcacggtcggccgcacagggaagaagtcaaggtagaagtccgtgaaggcgggtgtgcaggtccctgtccagcgcatcgggcgctacatgaagaacgacctgtacacgcagcgttacgcgaacggtgtccgcacctacgtcgccgtttacctcgaatatgtcgtcgattacgttgtcgatctcgttgttgatgctgccagggacaacaagaaggacagcatgattactcgccttatgct

SEQ ID NO: 300584 - DNA, 374 bp, Zea mays
cggacgcgtgggtgcgccttcttcttcgacgcggagccgctgggcgagcccgggcggcacgcgctggacgcctgcgcgctctgcgccaagccgctcagccgcaacagcgacatcttcatgtacaagggcgacaccccgttctgcagcgaggactgccgctatgagcagatgcaccacgacgcggcgtacgcaaggcaggcggccagcagccggcggaagcagcagcagtcgcagcggagcagaggggcctcgtccgtgggcgccaaggcggacgtgtccgtggccagctagtcagtagtagtaaaagcaagcacagcgaggccgagaaaagaggaggaggagaagaagaaggccgtgctggttcaagcagcgct

SEQ ID NO: 300585 - DNA, 337 bp, Zea mays
gcggctggcagacattcaagtcgttcgataggaagaagggcagccaaggccctggacaggatgtttcggaccaagcagaccgaccgtaagtccaccggaggcaaggccccgcgcacgcagctcgccaccaaggcggcgaggaagtcggcgccaacgaccggcggcgtgaagaagccccacaggtacaggcccggcaccgtggcgctgcgcgagatccgcaagtaccagaagagcacggagctgctcatccggaagttgcccttccagcgcctggtccgtgagatcgctcaggacttcaagacggatctgcggttccagagccacgccgtcctggccc

SEQ ID NO: 300586 - DNA, 437 bp, Zea mays
aggcaccggtaccggcatgttccgggttctaccggctgcgacccgacgcgtctcgttccaaagggaccccaaaagaagtggccaccgaggttttgggtttgtcaccttcgctgatgagggtgtggcagaacgggtatctcgtagaagccatgaaattctgggccatgaggttgcaatagacacagctgcaccacttgagaatgattcagctggtggtggttatattgatcccatggatctttacggagcttatggttcaatgagatcttttggcaggttctgcggtggtctagattataattacggctatggccccagcagcggaagcagcagatcaaggtcggattggcgataccgaccttactgaacgtgttttagtttttacctctagggaaggaaactgaggagatggagaaaagaattacctgtctaagaat

SEQ ID NO: 300587 - DNA, 430 bp, Zea mays
tggacgcccgcagggaccgggccggaaatccacgggtggcccaagccttcggatgctttaaacaccttgtttaaagagacacgtgctcggaaaagcacgacccccgctctttttgttgaccttgaacccactgtcatcgatgaggggagaactggcgcctaccaccagctgttctaccctgagcagctcatcataggggaggaggatgcagccaacaacatttcccgcggtgactacaccattggcaaggagattgttgacctctgccttgatcgcatcaagaagattgtcgacaactgcactggtgttcaggggtttctcgtcttcaacaatgtttgtggaggaacgagctctctccttggttccctcctcctagagcgcctgtctgttgactactgcaagaaatacaagcttgggtgcactgagtgcc

SEQ ID NO: 300588 - DNA, 291 bp, Zea mays
atccggggcggcccaagccttccgtgcagccgtcccgctttacaaaagaggttcgcctggggaaaggcaaaaatggccaactggaggggggtggcaaaaaaggccgggagggttttaacaccaaaaaggcagccttgggttccaaagcccggtttattggtcaggggccccaccatggaaaccgaacctcccatccaatatgatgtgggcaaggatctcaaggggggatactaggtggttgggtccatttacctgcagaacccagttctacatttgtgttcttctagggcg

SEQ ID NO: 300589 - DNA, 338 bp, Zea mays
  unsure (1)..(338): unsure at all n locations
gggtggttttgcttcttacatccancataacaaggaaggacttgagctcttggacactcagagcaaaaacgctggattctccggcacggttgcgagagcgagagatggacggtgggatgttcggttatcgagaccccgccgatggcggcgctgcatcactttttggacgtgcccgacggtgactccagcgcagacggtgacaatggcgggcagagggggtaccactcgcacttacgtccgtgacgcgcgcgccatggtggacacccctgtcgacctcatggagctgtcgagtgcgttcacgttactggtggacatgccggggctgggcacggtcgaca

SEQ ID NO: 300590 - DNA, 399 bp, Zea mays
  unsure (1)..(399): unsure at all n locations
gtcaggcccgacggggtgacgttcgtggcgctgctgtcggcgtgcggccaggccggcctggtggtcgaggccagggagttcttcttccagatgctgccggtgttcggcctaccgccccagcccgagcactacggctgcatggtggacctcctgtgccgcgtgggccacgtggacgaggccgcgcggctcgtgcaggcgatgcccggccgccccaacgccaaggtgctcggagccctcctgctcgacgcccacgtcctgcancggtggcaagaggacggtgtgaggctgggctagtgggccgctcggcggatatcggagctggacctccacgacggcgcggcgtacagtctgtccaacgggtacgcgtcgctgcagcgatgggatcgcgttgaggaacac

SEQ ID NO: 300591 - DNA, 402 bp, Zea mays
caataatgaagttattttcaactatgcaaggatttgtttctgttagtgggagggaggaaagtgcttgcaataagatgcttccgtttacaatatggactgcgttctttgccaatgttctcactggttcagccttagttcaattcgagattttccttaatccaaaggagctaccttcaaaacttgcagttcttgtaccagcgcaggcctctttctttattgcatatgtggtcacatcgtggacaagcataacatctgaactcactcaaattactgctcttttctgtcatctggggggaaagtgtgcgaagtgttgcaagcgggattactccaaagctccatcaatgccttattatagggaaattccacggattctcttgtttgggcttattggactcgcatatt

SEQ ID NO: 300592 - DNA, 273 bp, Zea mays
  unsure (1)..(273): unsure at all n locations
tgcatgtggcacaggttctaagcctgtgctttatattaccctgtggtggggcggctaacggggcccttagttctctgccttgcantttgacactttggcttactggtctgaagtcacttttacggccccgtttggatccttggaatggaattccattttaataatagaaatttaggcgtgttaatttaactcaacacagttataagaaaaatatttgtatattattattagcaagatgtgtgagatatttatgtgctacatttttacataaag

SEQ ID NO: 300593 - DNA, 365 bp, Zea mays
cccacgcgtccgcccacgcgttcgatttgaacagggaccacaatatgtctgcgcaaaggtctggacctttgtttgtaccaattgcagtggatcacatcgggagtttacacatcgagtaaaatctgtttccatggccaaatttaccgcacaagaagttgctgcccttcaagaaggggggaatgagcgtgctagagaagtatttttcaaggaatgggatcctcaacgaaatggataccctgacagcaggggaccttttttattaatttatttttgtaaattgcaatgcttaaatctgtatggaaatatgacatgtttcttttggcctcagtaacgctgacaaattgagaaattttattaagcatgtg

SEQ ID NO: 300594 - DNA, 349 bp, Zea mays
cgcacatgttgttaactttgaaaaccttaacaccaataacgttgtgggcggggatgttgagggggacatcactaaggtggtctaccacttccagaataaccttggaaatattgttgatggaaatacccagattcagatcatacactgtgagctgaccaaacaacttaaacctgaccacatatttaacattggagcagggaaacaggctctgaataatataaatctaattgcttacttattcaatatacaagataatccacttccttattagacaaaggagcggggcatagttcttgaaattaatcttaatgatctggaacccaatttagcttgagtaagcacagaatgg

SEQ ID NO: 300595 - DNA, 378 bp, Zea mays
catgcctgatgttcctcgtcatcacggtcgtgtggagccggagcgtggcgctggcggcgctcttcacggcggggttcgggtccgtggagctgacgtacctgtcggcgtgcctcgccaaggtgccgcacggcgggtggctgccgctgctgctgtcgctgggcacgctgctggccatgtcgacgtggcactacggcacgaagaggaagcgggagcacgaggcgcagagcaaggtgcgcctggaccggttcctgggcctgagcgccggcatgggcctggtgcgcgtcccgggggtgggcttcgtctacgccggcagcgccgccgctggaggcggcgtcccccccgtgttcgcgcacttcgtcaccaacttccccggcgttc

SEQ ID NO: 300596 - DNA, 286 bp, Zea mays
cccacgcgtccgcccacgcgtccgctcatatccataaaaacaacggcaaagcaagtccagcaatctcgaaagcgaatatgtctttgagaaagtcaatagtgccaaagggcctctagacaagttggttagttggtttcagtagcactctttaggtcctggattcgactatctgtggaagcgaatttcatgttgtggttaaaaaattttctccgtatgtcccataccctgccctcggattaaagccgcagcgaacatggtgaatgaattggatgtctttattcagaac

SEQ ID NO: 300597 - DNA, 425 bp, Zea mays
gccgcaactccctgtcactacagtgttaggacttgaagaaggaaaggattgcataattggtggaactttatataagcacatgaagttgaagccttcaattcttgatgaatatgccaaagagaggtctgcaattccccttgtcaaaccacataatttcatgcatcctgatgatcatctcattctggaagatgaaagcggaagagttacacttgcaggagccatacctccagcagcattcgtgactggggttgtagtggctctccatgggaaggaaacaagtgctggcaattttcttgtggaagatgttcttgaggctggtcttccaccccaaactgcattgtctagcgcagaagaagacaagtatgtagtattcatatcagggctaagtgtaggaagtgacacattcaatcctctacagttccaac

SEQ ID NO: 300598 - DNA, 368 bp, Zea mays
gacacattgaggatgctctgaagcacttgtcacttgcaaccccgcagcctgacctcctagaattgcacaaattgcaaacagtggagaagcacttggggagatgtctggatgcgagaaaggctggggactggaagagtgtgctaagggaaagtgatgcagctattgcggctggagctgactcctcggctctgctcttggctgctagagcagaagcccttctccgtctcaatttacttgatgaggctgatcttgcaatctctagtgcctccaaattggattatacatcttcatgctcctcagacaccaaattttgtgggtttcttgccaacgcctacctgttttatgtacatgcccaaattgacatgtca

SEQ ID NO: 300599 - DNA, 201 bp, Zea mays
cccacgcgtccgcgcgcgtcgagcgctggctcctcggggaggaggtgaagaacatcgtggcctgcgacggcgcggaccggcgggagcggcacgagcgcctggaccgctgggcggcgcggatggagggcgccggcttcgcccgcgtaccgctcagctactacgcgctgttgcaggcccggcgggcggtacatgggctgggct

SEQ ID NO: 300600 - DNA, 265 bp, Zea mays
  unsure (1)..(265): unsure at all n locations
cctattcaatacttaagnatatcatttaatttataatcatgccangcntcatgggctggggctactttttcctcctccataatcacatattttctcccaaatatcaacccttttctgctgcccaaaaagacgtcttaaatggtgtccagtggcggtagcaaggaggcaaagtcgcccaaaaaggcctccaattcctctaaaactcattaaactgactgtccgtaataacctttttttctctttcccatttttttccatttttcat

SEQ ID NO: 300601 - DNA, 389 bp, Zea mays
ccctacctatctatcctacagcggctagtctactcaactctgctctgctcgcgcggcgatcgaggcaccgtcgtcgccaccatcagcggctagcaccgatcgagccaccggccgatcagatcggccggcccaacgaccatgctggcctcgctgcggtacctggccggcacggcggggccgagcggcttcggctcgcggacgaccgccgaggaggccgcggccggcgacctgcgccacgtcaccgccatcatcacgggcgccacgtcggggatcggcgcggagacggcgcgggtgctggccgggcgcggcgcgcggctggtgctgccggcgcggagcctcaaggccgccgagggggcccgcgcgcgggtgccccgccgagtgcccgggcg

SEQ ID NO: 300602 - DNA, 343 bp, Zea mays
cccacgcgtccgcccacgcgtccgcccacgtgtccgcccacgcgtccggagaggagcgacgtgtacagcttcgggatcctgatcatggagatcatctccggccgaagccccgtcgactacgccaggcctgccggagaggtaaaccttgtagagtggctcaagaacaaggtgaccaacagggactacgaggccatcgtggacccgaagctgccggagaagccgtcctccaaggctctcaagaaggcgctcctggtcgcgctgaggtgcgtggatcccgactcgcagaaacggcccaagatggggcacgtaatccacatgctcgaagtcgacgactttccgtatc

SEQ ID NO: 300603 - DNA, 451 bp, Zea mays
aacatttcatatctcagaagtagcaactatgttgaacgtaggcatgaccttgacactcaagtgttgctaattgggcacttattgtactcaggcaaaagtggagcatcataatctggctggggcttcttgtgggtcatcttcttcagtcttgtcgcaacaggaattacaggatatgcaccgtacaagtatagggcccggaggtacatggattcagagatatgtgccatcatggctcactacatgagctgtacaaccaaggagagatccaaatccattctcatcacattgagatgtgacgcagtaggacacagactttgacgaagggagactaggacttgatctatattaagtaatagatcacttacatcagttctattgtattctatttttatgtatgctttttcatacacactgtatgcttttcgtacgatgcaagtgcatcggtccctat

SEQ ID NO: 300604 - DNA, 413 bp, Zea mays
ccagccggagctggggccctggcaggccgcgctgcagggcggcctgctcgaggccggggtcgcgccggacaacggcttcacgttcgaccacttcgacgggaccaaggtcggcgggtccatcttcgacgccgacggccggcggcacacggccgcggacctgctgaggtacgcgcgcgccgaggggctcgacgtgctgctacgggccagagtggccaagatcctgttcttcaatgtcagagggaggagatcagggaggcggacagcggcacgcggcgtggtgttccacgactccgaggggcggatgcacaaggcgttcctcagcgcgggccgccggaacgagatcatcctctcggcaggcgccatgggcagcccgcagctactgatgctcagcggcgtcggcccagccgaccacc

SEQ ID NO: 300605 - DNA, 383 bp, Zea mays
aaagctgggcatgtactcctacaagaggcagtcggctccgtggtcagaagatgagctgggctctctttggatcggggttaggaggtaccgcatgaataactggaatgcaatgctgatggacagtcggctgcggttctcaatctcaaggatgcccgaggaccttgctaagcaatgggacaaggagcagaacaaacttgagggtcctgcgcaagctgactgctatcttggacgagctttttgctgtcgatgctcaaagtctggatgtggcgggggccaagcccaaacgggcctttcattgggcgaatattaccttggtagagcttcatgctcttgatgctacaagatcttagttcttggggcccagacagaccttttattgggcg

SEQ ID NO: 300606 - DNA, 349 bp, Zea mays
tgtatctctgctatgtgtattgcctgcttgttatatttaaccagcgacattgaaatttcttgggaactcttgtaatatttttttgtttctttcatttattttctaatattcttttattgtgcttacatgtgtcacctggaatatgtagttcttctgctcagaaatatttcaggagggcaacacgtttaaattggcctgaaggtgctgtttcaagagaaagcatcagagctgtgaagaaactggatcgactaaaggacttggtatcgaggaacgctggccattcgaaagccgagctggcagacttgctatacagtatcctacggttcgagccatcagaacgtctgacagc

SEQ ID NO: 300607 - DNA, 234 bp, Zea mays
cccacacatacacggacgcttgggccagtaactcgcatcttcctccgacatccaagcgcgtggcatcgcaacgcgttggaaaccacaatatgtcggcacacggcacgggcaccaagggtcttgacaaggtcatatccaagcgccaccgcaaggtcctgcgcgacaatatccagagcatcaccaaacctgcgatccggaagctgcctaagaggggctgcaaaaagcgcatctcct

SEQ ID NO: 300608 - DNA, 269 bp, Zea mays
cccacgcgtccgggacgcgtgggctccctggcagctactgggcagagcccctgaacgctgctacacatctcctcaaccgcctcccctcgaaggcggcgagccatctcaccgccacttcgccctgtatggcacaaccctctcctatgaccacatttgtgtgtttggttgggcgtactatcccaacacttgcgccaccgctccccataagccatctcctcgttccgcccggctcctcttaatcgggtactcccctgaccacaaggggtatc

SEQ ID NO: 300609 - DNA, 250 bp, Zea mays
gtccggctttttggtggttacatagctgatgttgtggcagctattgatcaggctgttcaggatggtgttgacattctcaacctttctgttgggcccaatagcccaccaacagctacacggactacttttttgaatccttttgacgctgcacttttttctgctgtgaaagctggggtatttgttgcccaagctgcaggaaatggtggaccatttccaaaaacactggtgtctttcagcccatggataacta

SEQ ID NO: 300610 - DNA, 256 bp, Zea mays
gaagccgccgccgcagcaatcacagcagcccggagaaagcccaggtccgacaagagggagatcttcgtgaagacgctgacagggaagaccatcaccctcgaggtcgagagcagcgacaccatcgacaatgtcaaggccaagatccaggacaaggaagggatcccgccggaccagcaacggctgatctttgccgggaagcagctggaggatgggcggacccttgcggactataacatccaaaagggggctacgcttc

SEQ ID NO: 300611 - DNA, 322 bp, Zea mays
gtgctcagcgccgtcaacgacctcgccatcttcaatggatgcacaacgaaggcaattgagcatgctgctgacaaccctgctgttgtggaagcaattggagtgcctatagtcagaggaccgtggtatgatgcttctcttgaggtgggccatcgacggcggtctgtgtcatgcacattccctgtatctgggccacatgggtcaggatttctccagattaaggcaacccgagatggaggtttgttttcagttttctcctttgctgtgccctgaatagtcacattatacaaaaacgatggtgttgtgtagaggatgggctgctttc

SEQ ID NO: 300612 - DNA, 262 bp, Zea mays
  unsure (1)..(262): unsure at all n locations
cccaggcggagtcgacggngccgcgtatggtggggtgcctggatcgccccccgtgtggggagaggccccagccgaagaatcattggtggaagatcaaaatcatactcaaggggtgagttcagatcaagaggcaaggtggaaccagcaagaagaaaaacgtttttgtcgagaatgacattacgagagaccattacacgatgagagaggaggtcaaggcagtggtaccccttttggttcggggagttacccaaggaaagggcac

SEQ ID NO: 300613 - DNA, 324 bp, Zea mays
  unsure (1)..(324): unsure at all n locations
gcggaagatgcatgacacgtacttaccatgtggtccctcggcttcttcttgtagtacgcgagcacgccgttgtcgaggacgaagtagcgcgtgtggaagaaggacctcccgatcttcctccggccgtggcgcaccatccatccctcgcaccgcaccgcgtcaggggccgtcgcggagggggcgcccttcggcagctccccgctccgcgccattcctgccaccgngtgtggccgagggagctccgggccgctccttgcggtgtgccttctggaccccgacgagctgagcatcttccagcttgggagacgcaagttcgaccgggcg

SEQ ID NO: 300614 - DNA, 318 bp, Zea mays
ggaggaggtcaatttcgaggggccattccctttcgcggagggcaggctctatggcctgactctcagtgctactctgaaggcttaccatgtgagcgtcgatgggcgacatgtcactctacttgcttaccgcactgcgtacgggtcggaggacgctacaggcctctctccgaatggggacctagatgtgcacccagagattgcaggatctttggccactacacacccaagttctgcgccacataatgatccgcagtattataatgagtggcatgctgctttgctggctgatgagccagctgagatgctcattgacattct

SEQ ID NO: 300615 - DNA, 340 bp, Zea mays
cacgcccctccgtgttgctcgccgcacccccacgccccgccgtgttgctcgccgccaccgccccgccggcagccaaaatgccgttcaagaggttcgtggagatcgggctagtggcccttgtgaactacggcatggtgtatggccgcctcgtcgtcatcgttgacgtcttctaccagaacagttctctagttgatgccccctacttgattcgttgcctaatgaactttaagctgctttttctgactgacttgaagatttacattataacgtgtgctagtgatgactacactgatctaggctagggtagatgctgacatttattgcatgtggttgaatatat

SEQ ID NO: 300616 - DNA, 497 bp, Zea mays
gtcggattccaggtcgacgccacgcgtacgcgcacgcgtacgacttggtcctgaggactactgccagatcctccgggggctcggcgacagggataaatctgcacttcgtgcattcgaggtgttctatgccgcactacccttagttgggggtggtgctgttgacaagggaaaacttctgactgccgccattggtgcacttggcaagatgggccggccagacctcgcgaggagggcttttgatactggcattgcagggagctatggcaatacggtgtttgcgcattctgcgcttatctcagcttatgccaggagtgggcttgcaactgaggccatgggggtgcttgagtcgatgaaaggtgcaggattgcggcctaccacggtatcatacaatgcagtgattgatgcatgtggaaaagggggtgttgaccttaggttcacacttgggtatttccgtcaaatgctagcagatgggctctgtccggaccgtaaaacattta

SEQ ID NO: 300617 - DNA, 388 bp, Zea mays
gatgaatacactgatttggcttcactgaagtttttaagtatcgaaagtggtggatctttatttctttatgcaagtacagatgattcaacagttccccaagacatataccgattgctaagtcgaccctatgcatttggttgtgttctaaggctgagaacatcttcagattttgagccgggcaattcttatgggcatttcttccctgaccctcaatatgaaaatgtgcaacacatcatctgctgtgattcatttgccacttatgcatatgactttgagtttgcccataacgacggtttctccaggcacacagatcctgctgttgtacagattgcttttcagtacagcgtgattgaacctgtcaaggaaacatcaggcaatggatcacaac

SEQ ID NO: 300618 - DNA, 277 bp, Zea mays
ggagattatgctgaagcttgtctagggtcgatatatagatcaggtgctcttggaattgaaagagtatgctacagaggtggatgttgactatgtgcggaaagcctttcctgctagtggaatatgtgctattaaattggatagagctgctgaaaggtgccttatcgttttgcttgagctgattaagataaaagtcaattattgttgtcacgaagctataatagttatcaaagacatcattagacgctaccctaacacgtatgatgtatattatcgttta

SEQ ID NO: 300619 - DNA, 419 bp, Zea mays
gcaaacactgcatcagaccctaacagctgtcgctgctaaaccagccttcactgcagaaggttcacatactttgactaatccttcaaagtttcttaataaaccacaatacaacgaatcatctttggtaggcaagacgagcacggattccgatcctaagaggtggccttctgcttctggcacaactgtatctcatgtgtctgatattgtagggccggatggtctggtctacgctgttgagttctctcacaggagtggaagagaccttgtcaacatggcaaagaagaggaccaatgtgatccctattattgaggatgccaggcatccggcaaggtaccggatgttggttggcatggttgatgttatcttctctgatgttgcacagccagaccaggctaggatcttagcacttaatgcttcat

SEQ ID NO: 300620 - DNA, 358 bp, Zea mays
  unsure (1)..(358): unsure at all n locations
cgaggggaacacatatcgatttaacattcctgtacatatacaagacttccttgactcgcattatggaaaaacttcgatgaactagatagttgtgcctaaggctattaagaatccatctactaaaaatccagccgaggaagagctccttttaaaatgtatataatgcactactaggcacaaggccgagaagcgccttccggcggccaagtcgttcggcaaagaaggcggcgacaagaagggtaagaagaaagcgaagaagtcggtggagacctacaagatctnnggggggggccgttctaaaggatccaagcttacttacgggtgcatgcaacataataatttttttatggggtccctt

SEQ ID NO: 300621 - DNA, 176 bp, Zea mays
cccacactttcaccactaccaacctagcgtctccaggctcctgctcaagaaggttagaagaggggagccttccttgtgaagtcgctggttgtttataatgtgcacatagatggctccctggaagatcgatatcaagcggatcgagaacttcaccaaccgccaggtgacctttttca

SEQ ID NO: 300622 - DNA, 340 bp, Zea mays
  unsure (1)..(340): unsure at all n locations
gggtcgaaactgctcacactgtctggaagaggtggaactggagatcagagggggacctcctgctgaacggcgcctacttcaccccctccggcgcgggcgcctcagccagctactcgcgcgcgtccagccttggcgccaagtcatcatctatggtcggcaccatcaccctggatgccggtgccctgtcgtgccacaagggcgcggcctgctagcgcagccgccgcataaggaaacaaacccacccccacgccaccttttcaacaacagaaaagaaacaagacaacagaaaactaagctacctcaacaccatggttacagtntccccccgtctctctctctc

SEQ ID NO: 300623 - DNA, 305 bp, Zea mays
cccacgcgtgcgtccagaccatcaaacaagtgccagcgcgctttggcagacgccgagagggagagcaccttcatcatgatcaagcctgacgagatccagaggcgcctcattggtgagatcatcagccgttgtgagaagaaggtcttgtacctaaaggactcgaaccttgctaacgtggagaggtcgttcgctgagaagcactactccgatctcgagtgcaagcccttcttccagggggtggtggactacatcatctctgaccctgtggaggtcatggtctgtgagggtaagagcaggatcacaac

SEQ ID NO: 300624 - DNA, 354 bp, Zea mays
tctcgaattacgattcccaatccagcaaaccctaccagccttttgcaaactcagagagggacccgatggcacccaaggcggagaagaagccggcggcgaagaagcccgcagaggaggagcccgcggccccggcggagaaggcccccgctgggaagaagccgaaggcggagaagcggctcccggcgggaaaatccgccggcaaggaaggcggtgttgacaagaaggggcggaagaaggccaagaagagcgtggagacgtacaagatctacatcttcaaagtgctgaagcaggtgcacccggacatcggcatctcctccaaggccatgtccatcatgaactccttcatcaacgaca

SEQ ID NO: 300625 - DNA, 333 bp, Zea mays
  unsure (1)..(333): unsure at all n locations
tcgaattcgagcacgcgtacgcgtacgcgtacgcggacgcgtgggccgtaccacagttcagctcccacccactcccaaaccctctcgccggagccccagcaacccgccagcaagcaagatggacggcagcaaggcgaagaaggtggcggcgaataagttcggcgggccgaggaagaagtcggtgaccaagtccatcaaggccgggctccagttccccgtcggccgcatcgggcgctacctcaagaagggccgctacgcccagcgcgtcggctccggcgcccccgtctacctcgccgncgtcctcgagtacctcgcagcagaagtgctggagct

SEQ ID NO: 300626 - DNA, 399 bp, Zea mays
cggacgcgtgggtttttatccgtcccgtccgaagccgaggaggacagggtagcagcgagatcgtgcgcgcctgcgagatctacacgaagttggggttacatggggctcaccttcacgaagctcttgagccggctcttctccaagaaagagatgaggatccttatgggtggtctcgatgcagctggtaagaccaccatgctctacaagctcaagctcgaagaaatggtgaccaccattcctacaatcgggtttaatgtggagactgttgaatacaataacattagcttcactgactgggatgttggaggtcaggacaagatcaggccatggtggaggcactatttccagaacacccaaggccttatctgtggtgttgatagcactgacagacatcgtgtt

SEQ ID NO: 300627 - DNA, 378 bp, Zea mays
cccacgcgtacgatcacatctatacgtatgagatggcttactaaccatggcaagacgagtggattctgcatataggatgagcaccgactccttgtttacgaattcatgccccggggggacattcgaaaacatctggttaggagaggttaatacttccaacctgtgtcttggaaccttaaaaagaaggttgcagtgggggccgcaaaaaggctaggttacctttttagggcggaggcaaaagatatttaccgagatgttaagaatttgaacatactgcctgacacatattatttttcgaagcatttataattttggattggctgaggatggttctttccgcgagaagagccatgttttcacaaaatttatgggaacata

SEQ ID NO: 300628 - DNA, 348 bp, Zea mays
aggacgcgtgggactagttttagatcgctgcgcatgtaaaactagggcatcggcgcaagccgttcggcttgcccttcacgaacgcttggtccttcttcttgtatgtccactgcgacctttacagatccgctcctccagctagggttagcggtcctctgaagcgatggcgatcaagccgaccatggcggttgaacaagatcgggtacgacaagaagctgcgcagtctgctcgatgagtacaccaaggtgctcatagccctcgccgacaacgttggatccaagcaggtccataacatccggccgggccttatggacgactcggtggtgctcatggggaagaacacgctca

SEQ ID NO: 300629 - DNA, 405 bp, Zea mays
ggcctggtagataaaccagcactactcatgcgtcaccccacacaagtgtcgggggcgccggcgtgctcgtgatctcaaccaacgcgtgtctccgctccggtcacccgacactccacgcaaacatgtcgaggaggaagaccagggagccaaaggaggagaacgtcacccttggacccactgtccgtgaaggagagtatgtctctggtgatactcacatctatgcatacttcaatgacactctcattcatattaacgatttgtctgggagggaaactctggttcggatcaccggtggcatgaacgtgaacgctgaccgagacgacgtcgcaccttacgctgctatgcttgctgctcaagacgtcgcacagcgcttcaaggagcttggcattactgcacttgacatta

SEQ ID NO: 300630 - DNA, 249 bp, Zea mays
aacacgccgaatggagcaggactgagggagcgtgatcgcacataaggagcagggtccatgtgggtcctgtattgactaagaaagaacccccgagttcaccatcaacctgcacaagcacgttcatgtatgcactctttataaaaacgcccacaatgctattaaagaaatgacgcagtttgcacagacggcaatgggcaccaactccatcaggtttgatgtgagactcaaccaacacatctggtgcagtgg

SEQ ID NO: 300631 - DNA, 297 bp, Zea mays
ctctcatttttttccattcgatccccccttggaaaccaaaaccacaacttggggcgcattggttgtgctcaaaaccaaaaaaaaacccgcggggaagaaaccaggggaagaagagcccgcggtcgaaaaagcgcccgccgggaagaagccgaatgcggaaaatcttgtccccgctggcaagttcgctgtctaagaaagcggcaagggcatgatgggcaataaaaaaggcaagaagagcgtggcgacctacaagatctacatcttcaatgcgctttattatgtgcaccctgacattgg

SEQ ID NO: 300632 - DNA, 260 bp, Zea mays
ctcgcatttcttcccatccgatccccccttcgcaaccaaaaccccaactcgggccgcatggatggcgcccaaggccgagaagaaacccgcggcgaaaaaaccggcggaggaagagcccgcggccgaaaaagcgcccgccgggaagaagccgaaggcggagaagcgggtccccgctggcaagtccgctgccaaagaaagcggcgagggcaagaagggcaagaagaatggcaagaagagcgtggagacctacaaaatctaca

SEQ ID NO: 300633 - DNA, 316 bp, Zea mays
cccggccttttgggactggacatgggaccagcttgctgactatgatcttcctgctgtgcttgagttcgtctataacagaacaggaggcatgaaagtccactacgttggtcactccctggggaccttgattattcttgcggccttctcggagaacaggttaacagacattgtgcgatcagccgcgttgctctgcccaatcgcttatctcaacagcatggaatcgaggctcatcctgcttgccactcgcatcttcctcgcagaaacgattcacatgctaggttatcacgaagtcaacccttgtgggccagtggcaaag

SEQ ID NO: 300634 - DNA, 243 bp, Zea mays
ctttccccttccctccctccctctccccgcgggccgccagaggcaatttcgccctcgattcgaccccgattcgtccgcccgcgaccgggattccctccgccaagcgcggatctgaacgctgcgctccgtgtcgtcgctcgaatccgccatgaagggggccaaatccaagggcgccggcaaggccgatgccaagctggcggtgaagagcaagggggcggagaagcccgccaagggcagggaagg

SEQ ID NO: 300635 - DNA, 411 bp, Zea mays
tacagaaccacaatctagccgcaagtatgggtatttccatctcgtaactctgcacgcacaaaggagcgagagggcaagtgtctccgaagcccttgccgttcgagaccttgcacggggaatcaataattagagagatgtcttcatctcatatggaatgacaagagaagttggacaaggatctggatcctcggagcgcatgggaggaggttttgctgctgtgttaaagcctgatccttttgatggtaaaaacttcttgatttggaaagctaagatggaattgtggcttactgcaatgtcttgttatcatgtcgctgagggcaagcctgccaacttaccttctgaggatgaggctaagtttgaggcggatgacaaccttttttgaggagctgtgattagtgcacttgatacaaa

SEQ ID NO: 300636 - DNA, 433 bp, Zea mays
cggacgcgtgggcggacgcgtgggcggttttccctgattctacgacacaggcagaagtctacagcacctcaacagcagaccttgtggagggtgttctgcaaggtaggaatgggacagtgttctgctatggagctacaggggctggcaagacctacaccatgcttgggacaatggaaaaccccggggtaatggtgcttgcaataaatgatttgttctccaaggtgacgcagaagaaccactcaattaagctgtcatacctcgagatatacaatgagacggtgagggatttgctgtctcctggtagcccccttaacctgagagaagataaacagggaattgttgctgctggtcttacccaaagaagtgtatactccacggacgaggtcatggagttacttcagaaaggcaacaagaatcgaacaactgaaccgac

SEQ ID NO: 300637 - DNA, 434 bp, Zea mays
cccacgcgtccgccaccgatcgatcgagctctaggctctagctagcgcgctgcatatgtgaggcaacttttcatttatctgacacacgtacttacggcccacgatggccgccgccgccggcctcccgtggtggctgctgctcctcgccgtggtcccggccgtcaccgctgcggccaccgccggcggagaggggagggcgccggcgctgttcgtgttcggcgactcgctcatcgacagcggcaacaacaacaaccttgcgtcgcttgccaaggccaactacttcccctacggcatcgacttcgccggcggccccaccggccgcttctgcaacggctacaccatcgtcgacgagctcgccgagctgcttggactgcccctggtgccaccctactctgaagcctcgtccgtgcagcatgttctacagggcgtcaact

SEQ ID NO: 300638 - DNA, 398 bp, Zea mays
gacttgtggtaggaggctcttcttttggcagggcgctggacgtgatgcaatatatatatcagctacaacaacggctggctgaattacaaacgtctttggggttgttcaagcataaagccatactggcaggagctactttacaaacactcaggctataatatatgtaagatgattcaagcgatacagaaaaggctagtaacagcaaaaagaagaattccatgccatccttgaggggggtgaacttaaaggggcacatgttcttgtgtatgcaaataagcaggatcttccatgtgcactggatgataatgccattacaggggcattagatctacacataattaagagccaaccatgggcgattctcaaaacatctgcattaaagggagaggggctctttg

SEQ ID NO: 300639 - DNA, 440 bp, Zea mays
cgagtctccagccaaccgcatccagtccaccccatccccctcgaccccgacaaccccgagtcccgacccgatggcgcccaaggccgagaagaagccagcggagaagaagccggcggccgaggagaaggcggagaagacgaccgcaggtaagaagcccaagtccgagaagcgcctgcccgcctcgaagtcctccggcaaggagggcggcgagaagaaggggaagaagaaggccaagaagagcgtggagacctacaaaatctacatcttcaaggtcctgaagcaggtgcaccccgacatcggcatctcctccaaggccatgtccatcatgaactccttcatcaacgacatcttcgagaagctcgccggcgaggccgctaagctcgcccggtacaacaagaagcccaccatcacctcccgcgagatccagacctccgtgcgcc

SEQ ID NO: 300640 - DNA, 387 bp, Zea mays
  unsure (1)..(387): unsure at all n locations
ctctgccaacaccagcataacaaaaggatgagctgccctgcnnnggccagctcctctccaataccctgtactacaagcgcttcttcccatattacgccttcaatgtgctcggtgggcttgacagcgagggtaaagtttgttgctttactttctcacatttattggtggaacactcaagtaagcatgttgtgcacctgcacagggaaagggtgtgttttcacctatgatgcagtaggttcctatgagagaactggttatagtgctcagggaacgggatctactttgattatgccagtcctggacaatcaactaaaatcaccaagtcctctattgctccctgccagggatgctgtcacaccattgtcggagtcagaggccatcgatcta

SEQ ID NO: 300641 - DNA, 295 bp, Zea mays
  unsure (1)..(295): unsure at all n locations
ggccggacggacagcccggagcgacccacgcgnccgcccacgcgaacgcccacgcgtacggccacgcggacgcccacgcgaacgctagnggnnncgnnaattgggggatgggggggaagaatccaatccggggagggggggcaaaactttgacaggcgggggaaccctacaattgggggagaagtggtttggtcagaaggaaactttggaagggcagctgtttccagtggagcattaaatggtggatatgaagctctggagttgagggatggtggctctgactatttggggaagg

SEQ ID NO: 300642 - DNA, 288 bp, Zea mays
ggcaggaacaagacacactaaggaaagaaacaccaaagggatgaaaagaggcactgcaacaggagagcgcacacatggccatgctggcgggggaaggaaggcgaccatgggagaagggggcagtgcaggagcgcatcaaaaactgcgagggtgaatgacgccaaaggcaggacagctggatctggggctgccggcaagaaggctttcaccgcaggcagagtataagactaagggccatgaggaggcgatatagcgacggcgttgagcggtaaaaaaacggccttctag

SEQ ID NO: 300643 - DNA, 378 bp, Zea mays
  unsure (1)..(378): unsure at all n locations
ccgcaagctgcccttccagcgcctgggccgcgagatcgcgccggactggaagaaagannanggttccagtcctccgccgtcgccgcgctgcaggaggccgccgaggcctacctcgtcggcctgttcgaggacaccaacctgtgcgccatccacgccaagcgcgtgaccatcatgcccaaggacattcagcttgcccggcgcattcgcggggagcgcgcctaaggggcccggcggataagccgtgggccggggggcaaggtctttttgggaggttggactacagggcggggccggggggaagagggggggtcttgtaaaaaagggtcaaaacaagggaaaatctttggtgggataaagggaaaagcgactttgtgtggt

SEQ ID NO: 300644 - DNA, 373 bp, Zea mays
  unsure (1)..(373): unsure at all n locations
gacccacgcggccgcaggatcctttacgccatccacaatcgagtgaccgttctttcttccaactacgcttttnnnggacccgttcgttccaccacaccccaccgacggtcgcagatatgtcgccgtcggagccgacgcgggaggagagcgtgtacatggccaagctggcagagcaggcggagcggtacgaggagatggtcgagtttatggagcgcgtcgcgcgctccgtcggcggcgccggcggaggggaggagctatccgtggaggagcggaaactggtgttcgttgcctacaagaacgtgatgggcgcaagaaagggcttgtggcggatcatatcctgcatcgagcagaaagaggagggacgtgggaacga

SEQ ID NO: 300645 - DNA, 428 bp, Zea mays
cttccccaacagtggcatcctcgctgaccaaggtgtcgccggcaaaggcgtccccatcggcggcatcgacggcctcagctcagaggcggcgatgttcgacgtggagtacgggcggtggcaggaggagcactaccggctgatgtacgagcttcgggcggcgctgcagcagcacctgccggagggggagctgcagatgtacgtggagagctgcctggcgcaccacgacgagatggtgggcatcaaggagggcgccatcaagggcgacgtcttccacctcatctccggcgtctggcggagccccgccgagcgctgcttcctctggctcggcggcttccgcccctccgaagtcatcaagatgctgctgagccacgtagagcccctgaccgaacagcagatcgtgggcgtgtacgggctgcagcagtcggcgc

SEQ ID NO: 300646 - DNA, 452 bp, Zea mays
cttgattggctactgtaaggacaaagaccatttcgcccttgtctacgagtacatgcctgaagggaacctgcaggatcatctgagactgagagacacttgcactcacagaccactcacttggcagcaacgccttcagatcgcccttgatgccgctcaaggtctggagtacctgcatgtggcatgcaaaccagcgctgatccacagagacgtgaagagcaggaacatcctcctgaccacgggccttggggctaagatcgccgactttggtctgaccaaggctttcagcgactcggagacacacatcaccactgaaccagctggaacaatgggctacttggatccagagtattaccgcagctaccgggccagcgagaagagcgacgtgtacagcttcggcgtcgtgctcctggagctggtgacaggccagtccccggtcgtccccgtggacgaca

SEQ ID NO: 300647 - DNA, 341 bp, Zea mays
gtcatgaagcctgagctagatggggtgaatgagcatgcgctcggagacaccaccaaaggataggtggcaactgaaccagactacaatcctgcgagcaaggaacatagagcaccactaagatgagaaccggcatgccggggaatttggaaaagggactactggtgcacagggtgatgcaaacatgaatgttaccaacagccagataccattgacagcaacaaactcaagcaaatgaagacgatgtacaagttcacgctcccaccaaatgatcaaagacagcgggggcacgagctcaccaagagcaaccgaaacgatgtcagacgcgatggttgacgaatcac

SEQ ID NO: 300648 - DNA, 465 bp, Zea mays
cggacgcgtgggctggcctgggcttggggttaataaaagaggcaatgctagcctgccctttcgatgaggaggtacatacacgctggcgatggaccgcgcttgtgtgtcgcgttcagtttggcttttgccaagcagtagggtagcttcccgtgtcggtaattatatggtatgaaccatcaccttttggctctacatggtatgaacgtaagatacaaattccaactacctctaaaaaaaaaaaaaaaaaaaaaaaaaaaaaaaaaaaaaaaaaaaaaaaaaaaaaaaaaaaaataaaaaaaaaaaaagaaaaaaataaaaaagaaaaaaattaaattaaatttatttaaaaaaaaaaaaattaaaaaaaaatattggggggggccgttttaaagggtacaagtttttatccccggggttgggagaaataatttttattttggggcacaaaaaaaaaataaagggggc

SEQ ID NO: 300649 - DNA, 330 bp, Zea mays
gtctggaagaatgatgaatcagttccgaagctatggatggagaagcttcggcttagcgcagagacggtgatggagaatgaaaccgacctaaaggggaaaagactgcttagtcctcgacagattactccttagtcaatagtaaatgtcaaggacatgaatgtaattttacccaggctgcgtcctgtgcctataaatagatgaacagtaacacaatattgttcacgctgatttgtaatcactcgcacgtcgctcttggattcttacattttgtcaagccgaaggtacaaatgtaattcaatattattaatgtttgttcatgatcatataatg

SEQ ID NO: 300650 - DNA, 360 bp, Zea mays
  unsure (1)..(360): unsure at all n locations
cggacgcgtgggcggacgcgtgggcggacgcgtgggcggacgcgtgggattcgtgcatgtcatcgaatcattggtttttgtgccgattatgattgggattctcttttttctatttgagttctatgatgatcaattgcttgcgtttcttgttttgactcttgtatggttatgcgagctattcacgatgatcagtgtgcggacatccatatcgatgcagttctttccacgcttcttcttgctgtattttttggttttccatatctacttcttctcatatacctatggcttctcatatctggctttctctgctacggcagcattcatgcagcacctgattntatatttttggaaccgttttga

SEQ ID NO: 300651 - DNA, 332 bp, Zea mays
gtagagtgcgactgaccagcggggccaggtcatggagcaggagtctgagcactcgatcgtccatgtgagcaaggtcagcgggcctgcacctaacaaggtttgcaagatcaatggggcgcgcacctgtatcgtgcgcgtgctcacagtgatctcctataatcagatgtccactttgacgcaggcgaacaaaacgaagaacctgctttcgatcggactcagctgtaagaagaccaagcgccattaccgccactgtgaccaagcagcacgttcttctgaagaccgagcgggactagaagtgcttgaagtactccctcatgtggaagcatgctatc

SEQ ID NO: 300652 - DNA, 466 bp, Zea mays
caaagcctcaacaaagctgatggactggacatatgtggcaaagtggttgtaccaagcacgagaggcttgtttgagaccatagtgggactttgtgagccgacaaacttagtcgaggtgagctggatcaacgaaacctgatggttgggagcagtacattgtctcagatacggtgccatgaagaatggcattcttcacatcaagtggatgaatgggccagtcttgtgagtgagccaatgagagtactgtgcgaattgtagctgacatcaccactaggctgactgtttcttcctccacgttgctgcataagcatcgtttcatcaggccttgtgacacgatttcacgatgaccttggagagtgagggtatttgctgggaatctctgttcaacaccagtctaagggtttacttttgccacaacgtctctatgcggacgccatacttcaccaggctagtataacaatgtgcaa

SEQ ID NO: 300653 - DNA, 447 bp, Zea mays
ctcgtagagagaaggaaaaatatccccaaaccctagctcccgatctcgatggcgaaccctcgcgtcttcttcgacatgaccgtcggcggcgccccggcgggccggatcgtgatggagctgtacgccaacgaggtgcccaagaccgcggagaacttccgcgcgctgtgcacgggcgagaagggcgtgggcaagtccgggaagccgctccactacaagggctccaccttccaccgcgtcatccccgagttcatgtgccagggcggcgacttcacccgcggcaacggcaccggcggcgagtccatctacggcgagaagttccccgacgagaagttcgtgcgcaagcacaccgccctcggtgtgctctccatggccaacgccgggcccaacaccaacggctcccagttcttcatctgcaccgtcgcgaccccttggctcgacggaagcacg

SEQ ID NO: 300654 - DNA, 408 bp, Zea mays
gcgcctcaacccttcctctcgggcggcggcgccggcaaggcggcagccaaccggagcgggagctgcgatgaagaagatcttcggcgccaagaaggacaaggggccgcccccctccatccaggacgccaccgagcgaataaacaagcggggtgagacggtggacgagaagatcaagaagctggacgaggagctagccaggtacaaggagcagatccgcatgacccgccccggcccgtcccatgaagccatcaaggcacgcgccatccgactcctcaagcacaagcgcatgtacgaggagcaacgcaacatgttgtacaaccaaacctacaatctcgaccaagttggctttgctgccgatggcctcaaggatgctcagcagactatgaatgctttgcttgccgcaaacaa

SEQ ID NO: 300655 - DNA, 428 bp, Zea mays
gcacgatctctactgcatgctgctggtgaaccattctgtatatctaatgctgtgttcgcaatcatcagaggtcataaacgtgcccttgatgttacttctgttgtgcagggaaaggcaaggttctttagtgtcctgatgcttacatggggtctggtggctgatgttgatattgaatctgagaagtataggcgggtgggaagtgctcgccttgatttttatcaccaggatacgaataagttggtgatccagtggaccaaactaccggttacgaaacaaacgggtttagcacgggatttcaagacgactgtagaacctgctgtaatggtgagacgtgtggctatctgggcccgtcggagatcaaagaagctggtcttagatggagatcactggatgggccattcgtttcactctggctcggcattgttcct

SEQ ID NO: 300656 - DNA, 419 bp, Zea mays
cccacgcgtccgctctgagaaaaatgcctgaacgaccttcaggtgatgttccttttgatgactctgaagtggatacatcaatcggaaagccaattatgggaccaaacgaagcttcatcttatccagaacaggctcaggcatgccttgctaatgatttcttgagaaggtttgatattgatgatagatcggtagtctcacatatatttcatcattggggcaagaagcaggcatttcaaaatccaaagagattacttgaaaagatcagttttgtaattgatgaacgcctacgtggtaaaggatacaagcgcaaggatgtcttgcgaaagctgaaatcgttcctaagcggtgatgaagcattgggctacgcacaatatgttatcaagtgggaacagattcctatagaaaagcggaatcatttg

SEQ ID NO: 300657 - DNA, 430 bp, Zea mays
cccacgcgtccgcccacgcgtccgcccacgcgtccggtacatccaaaggcgaggtggctgttttactgcaatagagttaaacctttaatgtaaagataaattgatgtaaaaattgagcagcttggacctaaattattgatctactgacttaaggatttattacaaaaggtcagaggtgaatttatgtgatgtgcttgtgcataccaatttatgttctctcaaaatttgttccttcagatctcccatatttttgtcaatttggaaatatagaagagataataatctaatgctcacaaacagaagttcatattatgcttctaagagttattatgttttaattttgtactcctaggttataatatgttttatcttgtgtttttttaccacttattgcttggaccatgtaactctctagcttaaggtcatgttt

SEQ ID NO: 300658 - DNA, 375 bp, Zea mays
ttatttgaagcatcacgagagtgtgtatggcttcgtaaaatggtaaaccatatactcacaacatgtggtattggttcaattgaatcactgaccattaataaacatattttttctaaactgttttatccccaggaacttcaggaaaatgcagataaaaacatcttacagacaaagtcttgtgataatcttgctgatttattcacaaaatctctaccatattctacgtttcagaaatatgttgaggggattggaatgagaagacttaaaggattgcaaggatcagggggagttattctccgtgatatttaacctgttttgggccataatattacactcttttctttgtatgagctttggcttgatgagttttctcat

SEQ ID NO: 300659 - DNA, 430 bp, Zea mays
gccgaggaagcagtgcgagaagcccttgcccaggaacccgagctgggacggcagggacagggcgcccctgccgaacccggcgatgccgatcggctccctgacggagctgcccacgcagccgaagcagaggccggggaaggccacggggagagggccgccggcgccgctgctcccgtgcagcgtcaccgagtccctggagagggagccgaggaccagcgcgccgccgccgtacgtgtaggagaagggagggcagggcctggggcacaggccgccggtgaaggccgtgatggcgcaccccgcagccgcgcacgggtcgaacctgttgtcggcgctgtggacgtccacgcagaagcggctcccgcagaggtccctcgcgttcgacgaggactcggacggcaggaacgtcgtggtcggcggctgcgtcacggat

SEQ ID NO: 300660 - DNA, 225 bp, Zea mays
cttgcacttacaatgaacattagctatcgatctcacctgctccgagtaagaagagatcaatggcgtgcgagcagggagtcgtgacctcgtgccagaggacggctgagtttgacgcacacatgaccaaggaccaggaagccggggggctggatgacattgacttcactgccgcctggtgcggcccatgccgtgccatcggcctactgttcgtaggacaccccacga

SEQ ID NO: 300661 - DNA, 181 bp, Zea mays
  unsure (1)..(181): unsure at all n locations
gcgcaagcttgcctngtgtagaggcaagaacctatctagatcaatatggtggtaaagatgacgtttggattggaaagacactctacaggatgcctcttgtgaataacgacacatatctagagttggcaataagggatttaaaccattgccaagctctgcatcagcttgagtgtaatgggct

SEQ ID NO: 300662 - DNA, 267 bp, Zea mays
  unsure (1)..(267): unsure at all n locations
ggaaggcatgtcgtgtttggccaggtcgtggaagggatggatattgtaaggctgatcgagtcacaggagactgacagaggtgaccgtccgaagaagaaagtagtcatcagcgagtgcggggagcttccagtggtctaagcgttactcatctgttgtccgtttcacttctgacggatgacgatatccccccccccccccancntnctcttgcaccttgtnnnttttatcccaaaaatttttcaacatttgtacctaatattttcaaca

SEQ ID NO: 300663 - DNA, 274 bp, Zea mays
ctatgctgggagaacaggtcgcggggccttcagggcagatgacgtggattcgcggcgggccgacatctctcgattcacgtaacatcgcagaggcaatcgatggcagtttgcgcaggctgggtgtggactacatcgacctctaccagatacactggccggatcggtatgttccaatgtttggggagacagagtatgatccgaactgccagtacacgtctgttccaatggaagagcaactggaggctctcggaagagcaatagatgctggcaaggt

SEQ ID NO: 300664 - DNA, 275 bp, Zea mays
cgaccccgtgcagcgcatggtgttcatcctgcagggcaagctccggagcacgcagccgctgaccaagggagtggtggcaacgtgcatgctaggggcgggcaacttcctaggcgacgagctgctgtcgtggtgcctgcgccgccccttcgtggaccggctccccgcgtcgtcggccacgttcgagtgcgtggaggcggcgcaggcgttctgcctcgacgcgccggacctgcggttcatcaccgagcacttccgctacaagttcgccaacgagaagc

SEQ ID NO: 300665 - DNA, 272 bp, Zea mays
cggacgcgtgggctggtgctccgcctcaggggtggtatgcagatttttgtgaagacattgactggcaagaccatcaccttgggaggggagtcgtctgccccaatcatattgcaaaacccaaaatccaggccagggagggctttcaaccgaaccagcagcgcctgttctttgtggcaagcaacttgaggatgggcgtacccttggcgacttccacattcaaaaggagagcacccttcacctggtgctccgcttgcgaggtggtatgcaaatct

SEQ ID NO: 300666 - DNA, 377 bp, Zea mays
gtgccgcgcacgctgccgcccgagagcagggagccgcgcctcgccacactccgccgctgcctcgacatcggcaccgcgcgctccgggagggccgcaccgcgctcgacgttgtcgagctcgtcgtgagggagctggaggactgcccgcacttcaacgccggccggggctccgtgctcacctccgccggcaccgtcgagatggaggcctgcgtcatggagggagccaccctgcactgcggcgcggtctccggactctccaccgtcgccaacgccgtctccctcgccagactcgtcatggagaagacgccgcacatctacctcgccttcgatggcgccgaggccttcgccagggaacagggggtggagactaaggatcca

SEQ ID NO: 300667 - DNA, 270 bp, Zea mays
ggggggaggagctagaaacactacgctgcgaggaaatgatcgccaccacaaacaccatcgccacaagagctggatgttccatgatgcacctagtactcgaccccaacatgcaagaacgcctttaccactaggtgaggagcaaggtcggcaagaccgaccgagtcactgaagacctcgtggaggtcatgccctaccttctagcggtggtgaaggagacgttaccacgagaccggccgggccactttgtgctgtcaaacgcggtgacgcgag

SEQ ID NO: 300668 - DNA, 386 bp, Zea mays
gtgttataccatatgaatatatatcatacaagactagaattttgatactcataggagtatggaactgagcagggtcagctgtgggaacaacggaggtggtggagcaaaaccttgtgcggcgccatggctctgcatgtaatggaacatctctgccatcctctgctgatttgccaagcgatccaaccgctccgcctcccgctccgccatcatcctcgcctccatctcctgctgttccctcatctcttcttctagctgggcatgtaacatttcatcccaatgctataataactcagagaaggtatataactcaaggaatgacaagttcagggccggtcgtgacatttgggggccctaagcgaaaatctatatggaggccctatacgaac

SEQ ID NO: 300669 - DNA, 165 bp, Zea mays
cccacgcgtccggagaagaataggaagttcactgagactgtggaacttcagattggtctgaagaattatgatccacagaaggcaagcgtttcagtggctctgttaagttgccccatatccctcgtcccaagatgaaggtgtgcatgcttggtgatgcccagcatg

SEQ ID NO: 300670 - DNA, 329 bp, Zea mays
attacaccttttgccgagggggccgtcccgagccctatagctcctatcgtgtcgggtgctgatgaaaaaccaccaccatgaagtcagcatggaaaacccgtgtacggactgccaaatgatgctggtgatcttggacgaccaagaactacctgccttatatgaccgaaggatctcccacgaggccagcggtgaggctctgggcgaggagtttaaaggttatgtctcaaggaaccgggaggatgggacaaacagggcgtaccaatgaagcatggaggattgacatctgtgtgtgctcagactctatcttaacagaggcgatgaatgattgc

SEQ ID NO: 300671 - DNA, 324 bp, Zea mays
gttggcttctactccccctccggttcgggttcgggttcgtgaggttctacggggttcggtttcgtgggtgagggatcgagatggcggcgtaggatgttgagtaccgctgcttcgtcgagcggactaacctgggccacggacgaccactccctacacaacgccttcagcacctacggcgaggtcctagagtacaagatcatactcgatcggaagacgcataggtcccgcggcttcggcttcaataccttctccaccaacgatgctatacttaacgccatggagggcatgaactgcaaggagctggacatgtccaacatcacagag

SEQ ID NO: 300672 - DNA, 373 bp, Zea mays
ctcacacgtacgcggacgcgtggccggacgcgtgccactgccgtggggggaacctaacatgatccacgtcactcctcgactgccaggctgccatggcacgagacgtgccgcttcgactgattactcctagagctcgacgacaccgtgtaccgacaacgacaccggcatcgtcactggacctgaggcgcaacatagacaagttccttcaggccaaactcgaaggatctgccgacgaggcctgaaacacgcgcgccaagctattacgcgcgcacggcagttacctaggcggactcatagagctaggatacgacgtgcacccggacgaataccacagctacatgcacggtaggctaccgtacgacatgatcgcgcg

SEQ ID NO: 300673 - DNA, 319 bp, Zea mays
cagccatggacttgagctgagcaggcggtaaggagaagaagggcacggacgggcgcaaggccggctggccgacaaaaactcggtgtcgcggtcctgcagggccgggctgcagttccccgttagacgtgttgggcggtacttcataatggggcgattcgcgtaccgtgtaggcactggtgcctacgtatacctcgccggcgtactgtagtacctagaaggcgacgtacttgatctcgacggctacgctgtaattgacaacgagaatacgcgcatgatcccgcgccacgtgctcttctccatccgcaacgacgaggagatc

SEQ ID NO: 300674 - DNA, 384 bp, Zea mays
cattagtgagatccaggcccagctgaagaataagaatgtcacagtggatgtcagggcaaattcagaggctaattctcaactacagtcactgttgaggaacttggtgtactaggcttgaaaaagataatcaccattccttatccacatccagcatttgggaggcttgaaatacagtacttgcatgattatgctggtatcaacgccagttctaccatgaacagaaaaccttcggttaacctttctgctgtatttggcaacaaagctattgctgctggtgctgatgttgtgtatgatggtgctactggggatttcactaagtacaatgctgggttgagttacaccaatgcagatctcaatgctgctgtgaccttgaacaacaaaggg

SEQ ID NO: 300675 - DNA, 349 bp, Zea mays
caaacctaacgtaccctcttccgcgccgacatgtctgggaggaagaagacgcgggagcccaaggaggaaacgtgacgcttggccccgctgtcttcgagggagaacacgtgtttggcgttgcgcacatctttgcctccttcaacgatactcttatccatgtgacggatctgtctggaagggagacttttgaccacatcaatgctggcatgaaggactacgatgatcgtggtgagcccttgttttatgctgatatgcaagtctgatatgatgatacgcagaggtgctgtgttaattaacgcattgatttagacttgattgtgcgatctgaagatggttagggatcaacatt

SEQ ID NO: 300676 - DNA, 331 bp, Zea mays
cccacgcgaccgatatgctcccaatgcatgctggctccaaacccaaactccgaggggacccacatcgacggcgcactacccgcatggaacaactcacacgggtaaccattgggctgaaacttttgtatttgagctaaatgacacggatgctgaagcactactgaagacaagacaagttccttctggtcttcctaggcaaatggcaattcagcaatatttgcgctctaaaaatcgtctgctcatattgggtttcaattcgacattgactgagccagtcgaatcctttgggagaaggggtggtgaccaaatcaatgaaatggaactcaagttg

SEQ ID NO: 300677 - DNA, 308 bp, Zea mays
gggttgccttatcctaccccacctgttcgtgttcaggttctgtttcttgggccagggggaagacataatctcttccgactttgagtccgttgcttcgttggcggactctcctgggccaccgacgaccactctcttaacaacgccttcagcacctacggtgagttccttgagtcgaagatcatcctggatcgggagacgcataggttccgcgttttcggcttaatcaccttctccactgaggacacgattcgcatttccatcgagggcattaacttctaggatcttgacggccgtaacattacccttaa

SEQ ID NO: 300678 - DNA, 366 bp, Zea mays
cccacgcgttcgcagtgacaggccatataatatcgtctactattgggggaaagaatggtgaaccaaagaggactatcttcatatggctgagcgagtggttggaactggatctttcggcgttgtttttcaggcaagatgcgttccgactggtgacactgtagaaggtaacagggctctaccggacagatgatacactaatggggagttacaaataatgcgatcgatcgaccatggcgatgtattttccgtgaggcatcggttattatataccacaagtagcgctgaacttgcacataacttacgcatgggcggtgatcgataagctctttatcacgacatggaacattgctactgcatcaaggacat

SEQ ID NO: 300679 - DNA, 400 bp, Zea mays
  unsure (1)..(400): unsure at all n locations
cggccatccaggagtccaacggcttcagcctctcccagctctgggtcctgtccggctccttcaacggctccgacctcaacagcatcgngcaggatggcaggtcagccctgagctgtacggggacagcaggccgaggctcttcacgtactggacaagcgacgcgtacgaggctactggttgctacaacgcgctgtgcccggggttcgtgcagacgagctcccgcatcgccatcggcgcgtccatctcgccggtgtcgtcggccggcggcgcgcagtacgacatgacgctgctggtgtggaaggacccgaagctgggcaactggtggctcagctacggggaccagctggtggggtactggccggcgcagctgttcacgcacctgtcggaccacgccaccatg

SEQ ID NO: 300680 - DNA, 361 bp, Zea mays
tgcttttactagaggatgtagagaggaggaacacgtcgtccgagaccatgaaaaggagcccacacactggggctgattctgtgcctaaagccgctctggtcatgggcgtgttaagcgctttaggtaaagaaaatgctctggctgagagcaagggcatttacatcaatccgtagcagatcaagtgctgcaccaactgcaacttttctttctcagggctctacaactgctacgacggctaaaaggactgtgactccgtgtgaaagaagtgtgggagttgccgcgcactcgtcgtactcggcgaagaacaagttgacgcgctgcgacaccttcatctagatgtgcggcccctagtgctagatca

SEQ ID NO: 300681 - DNA, 281 bp, Zea mays
ggcttctcctccccctcttaccaagtcctcttcgggttagggggacttagggttttgtggaggggcgatggcggcggctgattggagtaccgttgcttcgtcggcgggcttgtctgggccaccagcaacgagtcgctggagaatgccttcgccttctacggcgagatcctcgactccaaggtcatcaccgaccgtgagacggggaggtctctcggcttcggtttatttacctttttcttcgagaactccatgctcgactcttatttcaaacatgaaacggt

SEQ ID NO: 300682 - DNA, 385 bp, Zea mays
ctgtcctccaggctcggctccagctaaggtcgagcggcgaggcgacagccctagtgtagcgcggcgcggtaccatagatggggagacgaatggaggccccctcctcgccggcgtccctcgtcgtcgtcctcctcctcggctcgctgctcctgcaggcacgcgccgatgacccctacaggttctacacctggaacgtcacctttggcgacatctacccgctcggcgtcaagcaggaggggatactgatcaacggccagttcccggggccgcagatcgacgccgtcaccaacgacaacatcatcgtcaacgtcttcaacaacctgccggtccccttcctcctctcctggcagggaattcagcagcggaggagctcatggcaagacgg

SEQ ID NO: 300683 - DNA, 377 bp, Zea mays
gagatccggagcagccgcagtcccaccgaccccgccgccggtcgccctccatctcctcgccgctgcctctcgtttctcttttcaataatcaagatgagccgtggtggtagtgccggtggtggtcaaagttctctgggttatctctttggaagcggtgagccccccaaaccagcagtggcaccagctgcaagtgctccacctgttgagaaaccatctgctgcaaagactgatgcggccaaacaggttgctgctggggttaccagccaaaccaataactaccacagggctgatggtcagaacactggcaacttccttacggaccgtcctttaaccaaagtccacgctgctcctggcggtggctctttcctgggctacct

SEQ ID NO: 300684 - DNA, 280 bp, Zea mays
ggcggcgaccgtcggcgccgtccccgagaccaaggcaagaagagcgacggggggagtaaacccaccgtgttgtccgcgagcaaacccgccgtgttcttcatgatcaccgacgaggcggtcaccgacgattacgaccgttactgcaccaccggacactccttcgtggctgtggtgggacagtgctgcatatcaactgattgatatttctgaggatggatttgtgagccttcttacttgagatggcaacactaaggatgacattgttattttcattactgag

SEQ ID NO: 300685 - DNA, 377 bp, Zea mays
ctttgcttttcgtgggctgctcctagacacctcaaggcattatcttccagttgatgttattaagcaagtgatcgactctatgtcatttgctaagttgtagaacgtttttcattggcatatcatcgatgagcaatcctttccattggaggtgccaacatatccaaacctttggaaaggttcatactccaaatgggagcgctacaccgcggaagatgcacatgatattgtcaaaaattgacgtgcctggtcatgcagaatcatggggaaatggatacccaaagctttggccttcttccaattgtacagagccattagatgtctctagtgatctcacatttgaggtatttttggaatcttgtccgatatgaggaaaatct

SEQ ID NO: 300686 - DNA, 231 bp, Zea mays
ccaactcattaggtctaccattgacagctactgtgctctgcgctataggcactggagccaagatcctctacattattatgtgtcgacggaatcaagggctccttaacagagccgtgattctgacagggatgatgaccaagaagaatgggaagcctaaccttaggaaaacagtgatgcctgctgctcctacgaggtagcccaggccatggtgctgaacggatgacgtctaca

SEQ ID NO: 300687 - DNA, 387 bp, Zea mays
cgagcacttgcgggcactcatgagtggatgcccgagccgcccttttctgatctctttcgtgaccgattggatcgattcctgataggcacccaaggccgagaagaatcccgcgtgagaagaagccttctgaggagaaggccgagaagaagccaagggcggagaagcgcgtgccgagcaaggagggctgcgtgactaagggaacgaagactgctatgaagagcgtctagtcttacaagatctacattttcaaggagctcaagcaagtgcacccggtcattggcatctaagccaaggccatgttcattatgaactccttgatcaacgacatcttcgagaagctcgccttcgaggccgcgaagctcgcccgctacaacaaggagcccacca

SEQ ID NO: 300688 - DNA, 376 bp, Zea mays
cccacgcgtccgtgacatgagcccttttctatagataaataaatgttagctgccttttttattttctttttttaatatctccctcttacattttctccatataggtaatgtatgatgcatcaggaattagatggcacacaggccgccaagctgcgttgttaaatcaaatagtctgtgaattcccagcagaacatccaatcatttcaacctttaggccactacgggaacctcttggacacagcccacttcaggtttttgcaggagcacttgttggctgtgcagtcgcttatttcatgggaaagtctgtatgaggaatgagctaggatttgcattgtacacgaatcctattgaccttaatatataaatcttcttgtgt

SEQ ID NO: 300689 - DNA, 386 bp, Zea mays
cggacgcgtgggcggacgcgtgggcttgctcgagggtttagctagcttggaagccctccgcaaactcccatggcgtgcctcctcgtgctcgtcatcgctgccacagtactaacgggtccaccgggaaaactgacgcacgccgctcggacgtcgccggcggaggccttctggcatgcggccctccccggcgctcccatgcccgaggccatccgcgagctcgtgcgcccagctggtgctgccgggaccaacgctccagacgccgctaggtccaggcaccacgacgccgatccgccgccgatgaacttcaagtacgaagactacaggtcctcgcgtcggaacgaagccaccgtcaccttcgtcgaggccctggaccgcgctggcggcgc

SEQ ID NO: 300690 - DNA, 371 bp, Zea mays
attagattggtgacatgggctttgagaaatgttagctttctaatgataacggtcaaatgttctatctaattgcatccattttctccggttgctttttattttattttatttatttgaggggaaggataggcctgacacaatataccgagtaaaggccttgggttcgacgcagcttttctgcaaaaatgtagggatatggcgtgcctcggttattacttcatcggactccactcaagtgttcataagcaagatgtttgacttcgatggtgagctgaagagtccatgcaaaagttggttagttgtctacactgacaatgaaggcgatataatgctggttggtgatgacccctggaatgaattctgcgatatgg

SEQ ID NO: 300691 - DNA, 363 bp, Zea mays
ctcccggcaacctcgccgccggggccatggaccggtggaccggcgtgctctacgtcccactctccagaggcggcccctcttccgcgtcgctgcctcgctcctcctctcgccagccaaaacgctcgccactcgcctacggagcctgaactatcccgatggaagcaggttccacgagtcaacgcgatccttttcacgggggaccgcgtccgcggcacgggcgatccggtgatcgagcggctctctgacgccgcccacctggctggggtcctcgccgggaagctccctggggaggccaacgcgtgggtggtcgacgccgcgtgctttgctgggccgtttgcggtgtaccgagagctcgttccgacc

SEQ ID NO: 300692 - DNA, 307 bp, Zea mays
ggggcagacttgaaaatccatgcagagacccaaaaactggcacaagggtttaccatagtaccattcataccggaacacgtgcttttaaccattttattaattacaggcggggggtagataaaacaacaacaatactttaggtggtctttttagccttggaggctgtgggaagaacctgggctctgagcctttcagtccttttagacgcaataaaaccgaccttttggccagggggagcattgcgggggacagtaaaggcatgaccggtatgctggtggttaccttcttcggggggatgctccacggg

SEQ ID NO: 300693 - DNA, 313 bp, Zea mays
cccacgcgttcgcccacgcgtccggtccttacctagtttctggtcctgcaggcatggatgatgaagacgacagtccgcgacgattgaccaggtcctaaacgacacgaagagagtcggctacttcaaaggatacctcaattcggttgcgcaggcgatcaaggacggggctgatgtccgtgggtacttcgcgtggtcattcctggacaactttgagtgggctatgggctacaccaagaggttcgacatagtctacgtcgattacaaggacgggctcttcaggcaccccaaggcatcggtccttttggttcttcgc

SEQ ID NO: 300694 - DNA, 224 bp, Zea mays
tcgagactgcctaacattacaaagtttcaatgcctattatcgctcccacccctatcgttcagaaaatctgagcggattcgatgcgcccaagggctagaagaagccggcggcgaaaaaagtggcggaggaggagccctctgagaaggcggctccggcggagaaagcccccgcggggaagaagcccaaggcggagaagcggctacctgcgggcaagttcgccggca

SEQ ID NO: 300695 - DNA, 220 bp, Zea mays
tcggaaaaattccaataagaaacttatagtaatagatcggactgcagtgtgtggtggcagtggctacaatgaaagaacacggtctttcaattgaaaataccatggcaaaagcttgaataatgtaaacccttaaaatgttaacgtaacattcaagtagctgagcttaaaatcatgagctagtccataaaccaccaaaagttgaaacaccgaaaggggttta

SEQ ID NO: 300696 - DNA, 356 bp, Zea mays
gtggtcaccatggaccaaaccctacccatacccccggcggcggcgacggcaagcgggccaagctccacccgggggacgcggtggaggttttactacggctgacgggccgagagggaggaccagcatgagacctggcacgcaagagcggcccggtgcaactctatccgaagaagagcgtgcaagacatcggccaggagacgggcaaggactggaaggggctgcgcgtaacagtaaagctcacagttcagaaccgccaggccaaggactacgtcgtgcgctccgccgagcggctcgagatcaacgcgctcaaggagcccgagagggaccggaagaaggtcaagaacatcaagcacagc

SEQ ID NO: 300697 - DNA, 311 bp, Zea mays
cggacgcgtgggcggacgcgtgggcgttcccaagccagccattggttggtagcaagccaagctaatcaagttagctttagatacccgctcccgctcttcttccctccgacgaaggcagctgacgacacagcaggctagcttcggagttcggagcactcagccatggccattgccggcgctctcctcctcctgctcggactcctccccagcgacgacggcggctggtgcaacccgccgcgcccgcacttcgacatggccgagccggcctttctccgtatcgcgcagtaccgcgccggcatcgggcccgtcgc

SEQ ID NO: 300698 - DNA, 406 bp, Zea mays
gaaaaatatgcagcgacttcagttaacctataatataggttggcgcgagggagtcaaggcgaacaagggaattaagggtctgtttggttcgtggctaactatgccacactttgcctaaggttagtcgttcgaattgaagaactaaccttaggcagaaaagttaggcaaagtgtggcaagtgaggctgcgatccaaacatgccctaaacctcctattccatctttccaaaccccaccgtctctattcctcttctatagttctatttataatcttgaacaagaaactaggacaaaactcctgcacttcatgtgcatgtcatatataataaagagctaaaaacatcttgaacaaaaaacttttaaaagagatagatttaagtgcatgatttttgcttagcttctgccct

SEQ ID NO: 300699 - DNA, 414 bp, Zea mays
  unsure (1)..(414): unsure at all n locations
gacattgagcaagtaaaagctgatgctgagggcctggcaaagaaactggaagcacttgaagcttacaaaagaaaacttttgggtgagaggttggaagaatgctcctttgaagaactgcacagtttggaagtgaaactcgaaaagagccttcattgcatcaggggaagaaagactcagctgctggaggagcaactccataagctgaaggagaaggagatgaatctgcgcaagagcaacgaagatttacgtgaaaagtgcaagaagcagccgccgccgccgccgcctatgctgatggctcctccgccgcctccagcgccggcagccatcgatcacacggagccgaaggatgtcgggatggacgtggagacggagctgtacatnaggatgcccggcagagattaccgctcaaacaac

SEQ ID NO: 300700 - DNA, 403 bp, Zea mays
ctcacctccggtccaccaacctctgccggccatggcggctggggcggcgcaaaagctcctcgaggcgagcacgaagatcatcggcgtcgggcgcaactacatcgcccacgccgaggagctcggcgacccgatccgcaaggagccgagtactactcctgaagccgaccttaacgttcctccacgctggcgtggccaccgccgccgctaaaatcccgaagccgctcgaatcgctacaccacgaggtcttgctcgccgtcgtcatcttcaggcgtgggcgagacattcctgaagcgtactccatggacttcggcggaggctatgcacttgctttgagcttttcgctgacaaaacggtggtaaagaagctggtgcccaacagacagaactgcctagccgaggagagc

SEQ ID NO: 300701 - DNA, 406 bp, Zea mays
cccacgcgtccgccggattccagagtccttcgctgacatgccttccctcagtgttcttcgtcttgcctataatcgcctcgaaggacggttccccatgaggatcttccagaacagaaacttgacggttgttgatgtcagttataattctaaagtatccggtctactgcccaacttctcatctgccagtattatgacggaactgctttgtagcaacactaacttctctggtcccattcctagttcaataagtaatctcaaagccctcaagaaattaggtattgcagcagctgacgacctacaccaggagcacctccccacttcgatcggtgagctcagatcgttgacatcattacaggtttctggggctggtgtggtaggagaaataccatcttgggtcgcaaattta

SEQ ID NO: 300702 - DNA, 382 bp, Zea mays
gtcacgttcaccacgttcgcccgctcattcaccggcggcgtcgcccagctcggcctcccgccgcccacggaggccaggtccccgggccgcccgctcggtccgccacagaggcaaggaattggttcttttagtacttgacagaaataaatatattccaggcatggtggcgtctttagacaatgtgaggggcttgactttagccatgtcatctagtgcattcattggttctagctttgtgatcaagaaagttggattgaagaaggctggggataatggggtgcgtgcagcttctggaggcttctcatatctatatgagcccgtatggtggttgggaatgataactatgattctaggcgaggtagccaattttgcagcatatgca

SEQ ID NO: 300703 - DNA, 333 bp, Zea mays
ctttgctccaaaaaatgaccgcgccaccctgcttctcacctctatttggctacgcgctgcatgcttgcatgctgctctttttttgcatgcgcgctgcatgcttgcatgctctctgttttcttttctctagtttttttctttggttctagcaggtggccgccgggagctccatcagttcaaaaaaattgagcacggtgggcttcggccactcgaaagaaagggccccacagcgcctaccgccggcgagcgcatccccatggagcgggttaatcatagaacatgcatgtattaaatattcaacgttggtcaaataataactatgccatatccatg

SEQ ID NO: 300704 - DNA, 400 bp, Zea mays
catggcttctcccaagccgctcctcctgctcgccacctcgttcctgagctgcggcctcctggtggccgccgactacgccccaatgaccctgaccgtggtgaacaactgcccctacccggtgtggccgggcatccaggccaacttcgggcacgacgtgctggagggcggaggtttattacttcagccgatctggggcaacgcataatcaggcgccccccacccctggtccggccgcatatggtcgcgcacggactgcacaagcttggaaccggaaggtggcgagatgttaaacttctcgcgttagacaatgcgaagcaccgttcctatgttgatcttaaagacaaatggaagacgctggtgcacaccgggagcatctcgccgcagcagcggcgtggcgagc

SEQ ID NO: 300705 - DNA, 277 bp, Zea mays
  unsure (1)..(277): unsure at all n locations
cccacgcgtccgcggacgcgtgggcggacgcgtggttgccgtgcctgttgaaaatttcaaactgcttcgatccggagatgggnnctgtcgctcaacatatacagaatatataatatcaataaatcctggtgattcatctatgcgtacaagttacatcacatacattgtgaaattaaggtcaaattccctcggcacaaaatttgtaatattcattacttatccgccatacaatggaactagctaaacaggggtatcgaaaacaagttaaagattcaac

SEQ ID NO: 300706 - DNA, 303 bp, Zea mays
tacagattgacagcgtcatctatgccaagatcatggacccataccatgcttcctagggtgtggagaatccaataaatgctgtcctacaactcgcacaaaaaacaatgagaagtgaactcgggaagataaccttagataagcacttttgggggtagggaggcaatggaacaccttgtcgaaagaagattcacttatgcagccagagatcggggcctgaaaagaatccgctatgaaatcacgtacataaattctccagcacggattatgcaagctatggagatgcatgctgatgcaaaaaggaaa

SEQ ID NO: 300707 - DNA, 287 bp, Zea mays
  unsure (1)..(287): unsure at all n locations
ggcggtggatcggatggcgaaagagtagcatcagcatgcggcgcccagtagggggggccctcctngagcttgccaccatggctagaggatngaagaagcatttgaagaggctcaatgcgcccaaggcattggatgctggacaagcttgtcggttcttttgctcccaagatatattctggacctcacaagtttagggtgtgcctgccactgatccttttcattatgaacagtctcaagtatgctcttacataccgtgaggttatatcctacctgatgcaacaccttgt

SEQ ID NO: 300708 - DNA, 257 bp, Zea mays
  unsure (1)..(257): unsure at all n locations
gcctcattcatctccattagaaacaccgtcgcacccacactcttccttggggcgcagcccaaagccgcggaacgatgggtcgcgcgaagcatactgcgcgcaagtccacgggcggtaaggtccacaggaagcatattacgaccaaagaatggcgcaaaacggcccctgctaccggcggagagaaaaagccgcaccgcttccgcccgtncaccatggcgctgcgcgagatccgcatgtaccagaagagcacggagttt

SEQ ID NO: 300709 - DNA, 403 bp, Zea mays
ggatgctgatggtatgaacagggagtggagcatcaagagccgcgagctctctctccagctaaacagtgtcgttcttccacttggctcgcttcgggttgggctgtcgcggcacagatcactgctatttaaggtacttgctgaccgagttaacctaccatgtaagcttctgaaaggaatatgttataccgggacagatgaaggagctgttaacttggtcaaagttgattttgacagcatggaatatattattgatttgatgggagctccaggcaccttaatcccttcagacatttctgggagtcagtttcaggactccaacaatagccaattgagcagtgatgccattgaagagagtgtagcagaattgtgcttagcccttgagcagattaatggtggatatgag

SEQ ID NO: 300710 - DNA, 410 bp, Zea mays
gcagtcgcaagtcgccgagccgtcctaacacagcgagagggtttcgaattggcgccaagccgccaaccatttcccccaatcccgcctgccagccctagggtttctgctacgccatggcgggaaccgccgccgccgctcccatggacatcgacgcagccgcgccgcctcccccgccgcctggtgcggcggccaagggcaaggcgccgctctccgctggcggcagggcagcgccctgggtcgagaagtaccggccccagtccctcgccgacgtcgccgcccaccgcgatatcgtcgacacaattgacaggcttacaaacgagaatagacttccacacttgttgctatatgggccacctggcactgggaaaacatcaacgattctggctgttgcgaggaagctatatgggtct

SEQ ID NO: 300711 - DNA, 378 bp, Zea mays
cgtgcctcttatcggcagccatgatgctgcgcgcggcgggcaggggagtgctcggcgtaggaggcggcgatccagcgcccgcggtcgctgctgctgtggcggcgagcaggagcagaggataccacgagcgggtggtggaccactacaacaacccgcgcaacgtggggtccttggacaaggacgacacggacgtcggaacggggatcgtcggcgcgccggcgtgcggggacgtcatgaagctgcagatccgcgtcgacgaggggtccggcaggatcgtcgacgcgcgcttcaagaccttcggctgcggctccgacatcgcgttcttctccgttggtgagcagagccagatccttgtcgcgtcttgctcgcgttatgcaa

SEQ ID NO: 300712 - DNA, 412 bp, Zea mays
gccccttaaccctcgttcctctagccgtctcgcgcagccacagcctccatgggtcctccgacggcggtgcggctagctcaaccatggcggactccaaggccacctcggcggtcaccctccgcactcgcaagttcatgaccaaccgcctgctggcccgcaaacaatttgtgcttgaggttatccaccccggccgcgccaacgtctccaaggcggagttgaaggagaggcttgccaagatgtacgaggtgaaggaccccagcaccatcttaggtgttaacatacgcacccgcttcggggggcgccaccacaccggcagatggcaaacgagcattgaccgcgattttggaaacaagtatctgtacctcgggacttactggacgcaggaggaggcggcgatggcgtacgacatggc

SEQ ID NO: 300713 - DNA, 397 bp, Zea mays
cagctctggtatgtatccatcaatggcgtagcgtgttgctcaccatcgtctccctccatggtctccatgcaggcgcgtacgacgacgaggacgcagcggcgcgcgcgtatgacttggcggcattgaagtactggggccccgacaccatcctcaacttcccggcgtctgcatatgaagcggagttgaaagaaatggaggggcagtccagggaagagtatattgggtccttaaggaggaaaagcagtgggttctcgagaggtgtttccaaatatcgaggtgtcgcgaggcatcaccacaacgggagatgggaagcgaggattggtcgcgtctttggaaacaagtatctctacctcgggacttacgggacgcaggaggaggcggcgatggcgtacgacat

SEQ ID NO: 300714 - DNA, 410 bp, Zea mays
gggagatgagctacaacttgactcctttgagactaacttatttgtttgagtacacttgaagtagtctcgaaggacaattgaaagggaaagtgaacctggacgacaaaaagacttccactacactccgtgacatagccaagaaaagaggaaaagagatggagaaagaatggctcggttcagccaaaccagaaccagcttgtggcgtaccggactgtccggtgcccaggctggcccggcggcaaactggccgctctcgagaaaagtaaaaggcgttgcggctaaaaatcaccggactgttcggtggtgcaccggactgtccggtgagccaacaacgctcgtggccaacggtcggctgcgcaatcagcgggcgacgcgtggcccgcgccaacggtcggttgggcacaccggac

SEQ ID NO: 300715 - DNA, 413 bp, Zea mays
ggcaggatttgaaaatctcgcgagaggccttgtccttgtccacttcctcaaagcagcggaaggggagaggccagggtgcagcagcaggacccccaacggcaacctccgccacgcaccacggagcaaccaagcagcaggtaaggcaaggtaagtgacgagacaaagatggtgcaggaggagatgccgcaggcatggtggttcgacagccacaacctcgcgaggccgtcgccatggctgaacagcacgctctcagagctggatgacaagaccaagcaaatgctgaagctgatcgaccaagacgcggactcgttcgcccagcgcgccgaaatgtactacaagaagcggccggtgctggtggacatgctcggcgacctgtaccgcacgcaccgttcgctggcggagcagtacgacct

SEQ ID NO: 300716 - DNA, 431 bp, Zea mays
ccggggccaccacgcgtccgcgcaccgcgacgcgatggccgcgctccgcctcgcctccttcaccctccgccccgccgccgccgccgccgccttttccggcgcgactccatcggctccccggtccgcctctttctccagcgtggcgcgggggctcccctccctccgcctggccccgccccgccgccgccgcggggacctcgccaggccccgcgccgcggccgaggccgcggcggagagctacgcgtccgcgctgtcggaggtggccgtcgagaacggcaccctcgagcagacggtctccgacctcgagaagctggagaagatcttctccgacgaggccgtcgccgagttcttcgacaaccccaccgtcccgcgccaggagaaggccgagctcatcggcgagatcgccaagtcgtccgagcttcagccgcacg

SEQ ID NO: 300717 - DNA, 463 bp, Zea mays
cggtccggctattcgggtcgagccccgcgtccgcccaagagtccgagttgatctcagaacagagagttttttgacttgggaaagcctggagtcagtgcgtagaaacaaagttggcttgaaaggtcctatggctacacctattggaaagggtcatcgatctttgaatcttacattaaggaaagaacttgggctctatgccaatgtcaggccttgcaacagcctcccaggctacaagaccagatacgatgatgttaaccttgtgacaattcgtgaaaatactgaaggagaatatagtggtcttgagcatcacgttgtgagaggtgttgtagaaagtttgaaaattattacccgccaagcaagtttgagagtggcagaatatgccttttcattatgccaacgccaatggccgggaaagggtctctgcgattcacaaaggcaatattatgaggaagacagatggtcc

SEQ ID NO: 300718 - DNA, 159 bp, Zea mays
cgcaaggtcgcaaatatgtctaccgtgctccagcgcccgaaccccggcaaggtccaatgcttcggccgcaagaagaccgctgtagccgtcgtctacaacaagccagggcgccggctgatcaatgtgaatggcgtcccgattgagctcagcacgccggag

SEQ ID NO: 300719 - DNA, 449 bp, Zea mays
ggtcggggagccgggtcgagccccgcgtccgcccaagagtccgcggacgcgtgggcgaagcatggcgtccgtcaccgcccgcgccccggtcgcggcccttcgcccgtcgtcggccttccttggccactctagccgcctcggccgcaccgcgtcgcccacgaggcgcagcctcaaggcggaggccaagggcgagtggctccccggccttccctccccctcctacctcgacggcagcctggcgggtgacaatggcttcgacccgttgggcctggcggaggaccccgagaacctgcggtggttcgtgcaggcggagctggtgaacggccggtgggccatgcttggcgtggccgggatgctcatcccggaggtgctgaccaaagccgggctgatcaacgcgccgcagtggtacgaccccggcaagtcggagtacttcgcgtcgtcgtcaacgc

SEQ ID NO: 300720 - DNA, 376 bp, Zea mays
gcagtgtgtgggccactacaacgaggtgaaaagcgtcaccatcggcgagtacctgcccccccacctggtgatttacatcgatgtgcccgttccacaggtccagagggggggtcagaagaaaggacatccagattagctggggatcacctctgcctatctacaggacattgagaatgcctataagaaaacctttctccctgagatgactgaaaaatgtgaggttttacaacattctgcaagggaagctcaagattcagaaaaggtggtagacgacattgaatacctgaagttcgataaagggccgtggctcaagcaggacaatcgcactttataccacctgcgaatactggttcacgataagtttgatgtgcggaat

SEQ ID NO: 300721 - DNA, 154 bp, Zea mays
tttggggcttccaatctactcactaaacttatcgccaagggttttctttccgtcaattgtagcactagcgcggacgcctgcacgtcgaccatatgtgaaaactcccaactccttggatgcatggcttgactactctacactgtcacctaaaata

SEQ ID NO: 300722 - DNA, 417 bp, Zea mays
atcgacttcatcgagggattaccccgttctggacatgctaattgcatcttggtggttgtggataagttctccaaatatgggcacttcttgattttatcccatccattcactgctgctcgcgttgctcgggtgtttttggatcacatctataaattgcatggattacctaccaatattatttcagatcgtgatcgtatttttacgagtacgttctggcagaacttattccggctcaccgacaccaagctttgtatgtcatcagcttatcacccgtaatcggatggccaaaccgagagactcaatcagtgtcttgaaacctttttgcgctgtttcgtgcacacttgtccttccaagtggtcacaatggatttctgttgctgaatactggtataatactagttttcattctgccctcggt

SEQ ID NO: 300723 - DNA, 239 bp, Zea mays
agattgtatggtagaggacccaaatacgtttgaagacgacacgcaggacgattttgtgcaagagggtgatgttggagactttgatggagaatttatcgacgaagaattctaagtctaacgatgcgccggtcaacttcctgtggaagattgcccagttgtttatttccgctctactttgatgtgatacttgtttaagacactatgtctcagatgatgtaataaagttttatactcttttt

SEQ ID NO: 300724 - DNA, 429 bp, Zea mays
cggacgcgtgggcggacgcgtgggcggacgcgtggggtgtacttctgatggcggctattcgtaatgtccacattgcacgaccaaccatatatcaagttgtcaaggaaatgattgataaaatgggctatgaggtaaaacttgttcgggtaaacaaaagaattcaagaagcgtactgtgctgaactttgtctaacaaagaaacatccggcactgcagattgatgattctacagacagcatcaccttcgatcttcggccttcagatgccataaacattgctgttcgttgcaaggttcctgtacaagtccatagaagtcttgcatacagtgacggcatcagaccagtcgagccagcaagaatggcagtagcagctggcctatcagatgggttggtatttacagagcttgacagacccgatggacaggcatctg

SEQ ID NO: 300725 - DNA, 384 bp, Zea mays
acggccgacgcatctgccccgcgtacgatctcgccatgaagctggtcgccgccggcgtggcgaacctggtgcacgggttcgcgtggcggctgccggacggggtggcggcggaggacgtgagcatggaggagcatgtcgggctatccacgcgccggaaggtgccgctcttcgccgtggctgagcccaggctgccggtgcacctctacagcgcgaccgaatgaaaaccagggtctctatatacaaaactactggtattgtatatttgaaagtctacgttttgtatctcataatgttggagtactagtcaatccgtacattgccacagtttctatatattagatgagtaaactctattttaataagacataatagtatgtgtgtact

SEQ ID NO: 300726 - DNA, 415 bp, Zea mays
acttgttgcaacattcatctcctcaagcctggtgaaaagagttggaattctaaaggcgggagctgctggattgatatttcaagcttcactcttgtcaatcgcgctcacagtgtattgggctggttcaatttcgcaaacgacacctctacttatattcctagcatccattgcattgtcgcggttggggcacatgtcttatgatgttgtggggactcaaattgtccagacaggtgttcctgcttctaaagcaaatctaattggaggaatggaggtttcaattgcaagccttgcggagctagtcatgcttgctatggctataattgcgaatgatgtctcccatttcggcttcctggcgatcctgtctgtgtcatcagttgctggggcagcatggatgttctgtccgtggttaacaaat

SEQ ID NO: 300727 - DNA, 318 bp, Zea mays
cccacgcgtccgcccacgcgtccgcccacgcgtccgcggacgcgtggggatcgatcaaaattttctgtttgtctgggagaatatgctgttgccttaactcatccacctaccaggcgatttcgttttagggtttggaacattgagattgaggtaatgcgtcttgtccagcgttgttttggtctggactgtgaatcagaatagaaacgttgcatgatcgaattgcgccattagatctcataatcaaaaaacgtggatgattcgacaaaaggtatatttatctggatgtttcatgttaattcatgtcacatggattccttc

SEQ ID NO: 300728 - DNA, 480 bp, Zea mays
cgcctgcagttacgcctgctagtatcggtctagcaattcacgggtccaggcaatcgtatagacagccgtcctcttcttggctctcaacctcctgttcttcacggtggccaacgcctgcggcaactgcccgaccccaacgcccccggtcgagccaccgccgccgcctcctgctgctaccccacccccttcgtccagcggcaagtgcccgctgaacgcgctcaagttcggcgtgtgcgccgatgtgctcggcctcgtcaaaggcgaggttggcaaggtgcctgccgagccatgctgtaccctcatcaaaggccttgcggacttcgaggccgccgtctgcctctgcacggccatcaaggccaacgtgctcggcgtcgtcgtcgatgtccccatcaagctcagcgcgctcgtcaactactgtggcaagtgcgtgcccaagggctacatgtgcgcgtaagcagctccgggcggttacacgctcgt

SEQ ID NO: 300729 - DNA, 381 bp, Zea mays
atccacgacgtctgcccagcgcatcggaatgacgtgtgcatatgccaggacagagcagatgttcgcttgcttcagatgagaggataaatgctcttacgcacaacattatggctcttacacattatctgatagcatcaagctctcgagcgttccttgcacgtagtagatgtctgacatcgaactgcattttccgtgctatggatggactcccggtgaccatcttactccagcaggctctactccaagagttccttccacaatggaacatccaagacattgtacatcaagtatgtgcagagacaggagccatgtatcaggatactctcccgcgaagttataatcgttcagaactaacatcagacgcttggcttccatgggtgc

SEQ ID NO: 300730 - DNA, 437 bp, Zea mays
  unsure (1)..(437): unsure at all n locations
atcgtaccgccccgatccttgtgtacggttgtagtcacgatgcaggcgcagacggtggtgcctccggatttgcagtgcaaggacaagttcatggtgcagagcgtggtcatcagtgatagcttgtcagccaaggacataacctctcaaatgttcgcgaaagaggggggtaatgtgctccaggaggtaaaattgaaggttgcttatgtgatgccacctgaaccaccatcagagattgcagaggagcacgatggtttagatcgagttttagtgcctatgcagaggatcgtggataatgggaaaagtacttcagagctatcgagtggctccgtgtcattgaggtcagctgaggagtttggatcacctgttggtcgaattgtgaagagtgaggagtttctgaaggctgcanngactgctatggaaacaaanacatatgcagg

SEQ ID NO: 300731 - DNA, 362 bp, Zea mays
accacgcatccgctctctctacaattatcactacctgctgctccctcatgcaccgtgctcaaatctgaccaaagtgggttctgctgactgttttttgtttttttggggtctctcgatcttctctggatgcaggcaagattaagatcggaatcaacggcttcggaaggatcggcaggctcgtggccagggtcgccctccagagcgaggatgtcgagctcgtcgccgtcaacgaccccttcatcaccacggactacatgacctacatgttcaagtacgacaccgtccacggccactggaagcacagcgacatcacactcaaggactccaagacccttctcttcggtgacaagccggtcaccgtc

SEQ ID NO: 300732 - DNA, 359 bp, Zea mays
aacgtacatagcgtagatagatacttacaggaacacggcaaccatggttttccacagtcattatagtctcaacggtcagcgacctgcctccgttcgatagacacaatctataggtaacgtctgccacaagtatgggtccaccattggcctaccaaacggtctgtatgtcagcctgatcgacaacgtgaacgtcctacaagttctaaggaactggccacataggaacatgtcaaattatctgtgttactgatggtgagcgaatcttgggacttgtgagacatgggttgtcaaggaattggaaatcctgtatgcaaacctgcactatacactgctcttggcggaatatgaccatcactttg

SEQ ID NO: 300733 - DNA, 354 bp, Zea mays
accacgcatccgcatcgagcgacagcagcacatacgcagctagctacgcgcagcaccactgcagcggcgatggcggcctccatgatctcctcgtcagctctggcagtggagcgtcagggcctgccgcctctcggtcgccgcgcctcctccttctccgtcgtctgctccaagaacaacattacgacggacaacccctacgggattgtgggtggcctgaccgtccacgtcgacgccaacgggagaacgggcatcggcaacgtcgtgtatcagttcggcgagcaagtaagcgcgatcgtcgacggatagacgtcaatctacagcgaggatgactggtctcccacctgcgacgtctac

SEQ ID NO: 300734 - DNA, 298 bp, Zea mays
cacgcctccggaagcacggacgcgaatgaggaggagcagcagcagcaggcggcgccgaggagcggcatcccactcagtgcttgcaaccatgggtaggggattgaagaagcacttgaagaggctcaatgcgcccaagcattggatgctccacaagcttggcggagcttttgctcccaagccatcttctggaccccacaagtccacggagtgccttcctctgatcctcatcatcaagaacagggtcaactttgcgctgaagtaccgtgaagtcctttctatcctgatgccacgccatgta

SEQ ID NO: 300735 - DNA, 208 bp, Zea mays
ccgggtccaccacgcgtccgcgaccttcacgtctcgctacgtagcagtgcaataaccaaagcagccgcaatggcgagcagcactatgggcctcgcctccacggccttcgccggcaaggccgtgaacgtgccgtcgtcgtccgccttcggcgaggcgcgcgtgacgatgcgcaggacggcggggaagggccatcccgcggcggcgtccg

SEQ ID NO: 300736 - DNA, 416 bp, Zea mays
ctttccgagacaggcacgcacgacacgcgctcgcacgcagagcaactgcttcgatctctccgtgtccgtcctctactctctagctaaccgcggtcggcccggggaggtggcgatgggcagcgaggacatgctcgtcgagatccacccccgcgagctccgctttctcgttgaggtgaagaagcagagttcatgttgtatccatcttgttaataagtcagatcaatatatcgcattcaaggttaaaacaacttctccaaaaaaatattgtgttcgaccaaatataggagttattcttccattggcatcacgtgattttacagttactatgcaagcgctaaagaatgttccacctgatttgcaaacaaaagacaagtttcttgtgcagaccacagttgttccatttggtacagctgacg

SEQ ID NO: 300737 - DNA, 454 bp, Zea mays
  unsure (1)..(454): unsure at all n locations
gtcgatccaattgtcacttgctctccctccaacaagctaattaaggccggtcgtcatccctcttctagctcgttttattatccatggcggaggagaagcaccaccaccaccacctgttccaccataagaaggacgaggagcaggaggagcagctcgccggcggcgggtacggcgagtccgccgagtacacggatgccacggtgacggaggtggtgtccacgggcgagaacgagtacgacgagtacaaggaggagaagcagcataagcacaagcagcacctcggcgaggccggcgccatcgccgccggcgccttcgcactctacgagaagcacgaggcatagaaggacccggagcacgcgcaccgccacaagatcgangaggaggtcgcggcggcagcggccgtcggctccggcggcttcgccttccacgagcaccacgagaagaagaatgacca

SEQ ID NO: 300738 - DNA, 376 bp, Zea mays
gatgcagatctttgtgaagactctgacggggaagactatcactttggaggtggagtcctcggacaccatcgacaatgtgaaggccaagatccaggacaaggagggcatccccccggaccagcagcggctcatcttcgccggcaagcagctcgaggacggtcgcacccttgccgactacaacatccagaaggagtccaccctccacctggtgctccgcctccgcggcggcgccaagaagcgtaagaagaagacgtacaccaagcccaagaagatcaagcacaagcacaagaaggtgaagctctccgtgctgcagttctataacgtggacgacaccactagcaaggtgacccgcctccgcaaatgagtgccccaaact

SEQ ID NO: 300739 - DNA, 208 bp, Zea mays
ccaacatcgaccttcaagtctcgctacgtatcattgcaacaagaaaagcagccgcagtggcgagcagcaccatggccctctcctccacggccggtcgccggcaaggccgtgaacgtgccgtcgtcgtccgccttcggcgaggctcgcgtgacgatgcgcaggacggcggggaacgccaagcgggctgcggcgtccgggaggcccgtgg

SEQ ID NO: 300740 - DNA, 233 bp, Zea mays
cggacacgtgggcaacggcgaccccttcatcggcagcctggagacgccggtcaactccaacccgctcgtcacgtggtagctctgcaagctcccggcctagcgcaccgccgtgagcccgctgctgcggggcgtccaggtcggcctcgcgcacggcgacctcctgcgtggggccttgcgcgccaacggcccgctcctcagcaacgcccgtgcacggccaggccggcgcgctcggc

SEQ ID NO: 300741 - DNA, 259 bp, Zea mays
cgggctcgaccacgcgtccaggaactcaagaacggccgcctcgccatgttttccatgttcggcttcttcgtccaggccatcgtcaccggcaagggcccgctcgagaacctcgctgatcacatcgctgacccagtgcggaacaatgcatgggcctacgccaccaacttcgtctccggcaactaagctcaacggctatgctatgccacttcactgtctttcggatcggagacggtgtacgtacctgcattgactgatgctg

SEQ ID NO: 300742 - DNA, 340 bp, Zea mays
acgcgtccgctcatcgccatcacatagaaccagtgcaagcagaagcagcgcaatggcgagcagcaccatggccctctcctccacagccttctgcggcaaggcagtgaacgtgccgtcgtctctcttcggcgaggcccgcgtgacgatgcgcaagacggcggcgaaggcaaagccggcggcgagctccggcagcccgtggtacggccccgaccgcgtgctctagctgcgcgcgctgtccggcgcgcccccgagctacctgaggggcgagttcccgggtgactacggctgggagaccgctgggctgtcgggcgacccggaaacgttcgccaagaaccgggag

SEQ ID NO: 300743 - DNA, 443 bp, Zea mays
gcagtgggttatcaacctacccttagtacagaaatgggttctttgcaagaaagaattacttctaccaaaaagggatctataacttcgatccaagcagtttatgtacctgcagacgatttgaccgaccctgctcctgccacaacatttgcacatttggacgctactaccgtactttccagaggattagcttccaagggtatttatcccgcagtggatcctttagattcaacctcaactatgttacagcctcggattgttggcaacgaacattatgaaactgcgcaaagagttaaggaaactttacaacgttacaaagaacttcaggacattatcgcaattcttggattggatgaattatcggaggaggatcgtttaactgtagcaagagcacgaaaaatcgagcggttcttatcacaaccgttctttgtggcaaaagtttttac

SEQ ID NO: 300744 - DNA, 429 bp, Zea mays
cacacgcgtccgcggacgcgtgggcgcccgctcccggagagcatgtcggacttcctcatgggctccggcttcgagcggctgctggagcagctggcccagatggaggccggcggcggtctggcggcgcgcgcccgtgacgcgccgccggcgtccaaggccgccgtggactccatgcccgcgctccgcgtcggcgccgcccacgtcgcggccgacgcgcactgcgccgtctgcaaggaggccttcgagctgggcgccgaggccagggagatgccctgcgcccacatctaccatgccgactgcatcctgccctggctcgcgctccgcaactcctgccccgtctgccgccacgagatgcccgccgacaacgccgccccgcgcgctgccgccgccgccgccgctgacgaggacccagggtcggcctcaccatct

SEQ ID NO: 300745 - DNA, 208 bp, Zea mays
gtccgacaaaatagtgtagtggacaggaagaatagaactctattggacatgacaagaaccatgcttgatgaataccagactttggatcggttttaagccgaggcggtcaacaccgcttgccaggccatcaaccggttgtatctacaccgaatcctcaagaagacatcgtatgaactcctcaacggtaacaaacccagtatttcatagt

SEQ ID NO: 300746 - DNA, 420 bp, Zea mays
cacacgcgtccgattgaagattaattactatgtttagtatttgcttaacagactgtgcctgattgccacaatctgtacaagaattcattcacatatcacagtcttcaacgggacaggcctttggattttgatgaggcaaaccaatatctagagaaatgtgaaagagataaatcgcgtgttcttgttcattgcatgactggaaaaaacaggtctgctgctattgttgcagccttcttgatgaagtctagagggtggagacttgcacaatcttttcaatgggtgaaagatcgaagaccacaggttcaactgacagatggttagcttcataccctttgaagcttgttgactaattaagacaccgtctctactacattatgaatcattgggtccttgcctatcacatggttacattttttctca

SEQ ID NO: 300747 - DNA, 258 bp, Zea mays
agcaaattttttatcttatagatgctacttaagtacatatacaagatatgccatcaggaaaattttcataaaatgtgcagtaaacagcacttcgcaaggctgccgatcatataagccgccttcggcctttttattgtatctgggctccatttcgtgaattaaacctacgcaattcgccgctcttaactgctaaaaaagaaaaaagaaaaaaataaaatcaaaaaaaaatattaaaacaaaaaaaacatgaagccagac

SEQ ID NO: 300748 - DNA, 295 bp, Zea mays
attgattaggagttcggcagagagaattatattatacatatgtaaattatcacattttgttcgtctatatagccttggtgtgcatgcaagtcatcgaacatgcagcttcttggatgcaataattgttgtgaacctagttgtgtagaaccttgtggtttaggttgctaggtgcccacaagatatgtattattcgtcagataagagttttctagcatcaggttcattttgtatctggttattgtcatattgcagtttttggtgatgggatagtcaacacaggtgtattctcagtttg

SEQ ID NO: 300749 - DNA, 337 bp, Zea mays
tccgcggacgcaagtgttaccacaggctcattcagctagacgcagatcagacagacatgaaaagtagaaagaattttgatcaaatcaatagaacgaaggatcccttacctgatttgaatttcatcctcctttaaatatgatatgctctaagtcttcccatacattcctataatgactgctacgattttctccattttgcgaattcctagtttacttgaagtatattactatcatattcattatctaaatcgatccactttaaataaaataaaagcaatctacttgaactaaggtagaaagagtacatatacaacaagatattctgtttcagaattct

SEQ ID NO: 300750 - DNA, 445 bp, Zea mays
cccacgcgtccgggtgggttggcttctcctccccctccggttcgggttcgggttcgtgaggttctccggggttcggtttcgtgggtgggcggatcgagatggcggcgtcggatgttgagtaccgctgcttcgtcagcggcctcgcctgagccacggacgaccactccctccacaacgccttcagcacctacggcgacgtcctcgagtccaagatcatcctcgatcgggagacgcagaggtcacgcggcttcggcttcgtcaccttctccacggaagaggcgatgcggaacgctatcgacggcatgaactgcaaagagctggactgccgcaacatcaccgtcaacgatgcccattcccgcggaggccgtggaggcggctgctgaggctacggtggtggccgtggaggcggcggctacggcggtggcgggcgccgtgatggcggcgg

SEQ ID NO: 300751 - DNA, 333 bp, Zea mays
gtcggattctagggtcgactcacccatccgctctcctcagccgccgtcatcgccccttccttcgccgcacgagtgccaacccgcgacgtggtcactaggaggtccttcaacgtgcgcgcctctctccgcaaggacaacggcaacgtcgccatagcaatcgctgctacccgcgctggtgccggacgtgccatggcccaccaggtgcagatggccgcatgctacggccggctcgtcttcgagcccagccacttcaacgtcaaggccggcgacaccatcacattcaagaacaacgccagcttctcgcacaacgtcgtcttcgactaagacgatgtg

SEQ ID NO: 300752 - DNA, 448 bp, Zea mays
  unsure (1)..(448): unsure at all n locations
ggaaatgcttgtctataagtacatggcaaaaggtgacctcacaaccgcactgcacaagaagtcagtggaagttgaacaggggttgcgctcattggattggataacgaggctcaagattgcaataggtgtggctgaggccttgtgcttccttcatgacgaatgcaatcctccgttggtccacagagatatccaagccagcagtgtgcttcttgaggacaaatttgaagtgtgccttgggagtctgagtgaaatatgcactcaacaaagtgcaggaagccaaagtttcttctctcggattctaagatcatcgaagttccttgacaagaacataccaggtccaccagctagctgctcatacgacatttactgtttcgggaaggttctactanagctaatcactggaaacttcggtgcgagtggctcaaacaacgcagattcagaagagtgg

SEQ ID NO: 300753 - DNA, 443 bp, Zea mays
agcaaagaggaccagtgctgttgatctgctgaatgatcggtactttaccgaagagccattgccggcacctatagaaggattacatgtcccggcatcaaaggatgaggatgatgacagctcaacagaagaatggggtaattacagggatggtgtctctcggattgactttgatgagtttggtagtatggatgccaccaaaactgagaagggtttcagcatacagttttcgtgatgaacaaagacgtagacgtacggatcatgcgtgccatgttcacactaagatcatatcatggtatttatctacatgggatttgaattgctgtcaaaataaacgaccatccttaagcaataaaagattgtgcatggttcctttgggttaacaatttttttaagttccaatggaacttggtgatccttggtacggcagacccatttttttccct

SEQ ID NO: 300754 - DNA, 195 bp, Zea mays
aattagtaccactcccgatcgagagtccttcgtatctagaggcgtataacctacgcttgctgatccgcctcatgcatcttagtctacaagtgttcggaatgggtctgtgtagaatgctgctctagaggatggtaaagcctcaggcgtggtcacatcctacaaccgcgacttcacttgtcataaagtgggtgattc

SEQ ID NO: 300755 - DNA, 457 bp, Zea mays
  unsure (1)..(457): unsure at all n locations
gtggagctggtcatactcccgctgggcgtcctcaagtccaactctgtcgcgttctcgccccctttgcctgagcggaaacagacagccattcaccggctcgggttcggcaccatggtcaagattgtcctgtacttcccgacctgcttctggcccgaggacaagcacttcatcaactttttacccatacccaacagtatacccaatcctaaactctgtcgccacctcaacaggcgacagatggcggccttgaaaacatacatgaatgatctcgccaactatacgtcgctcatgcccatccacggggcacccattctgattgcatacgcagccaacgactcggccgaggtatttggaaagttgacggaccaggaggctatggaggtacttgtttgccagctgtcgcattattttgacgtccttgtcaagggagntggcgccacaaggcccactcgcacgt

SEQ ID NO: 300756 - DNA, 474 bp, Zea mays
cgtagtccgacccaagcctctacataaagtcgcttgaccaccgcttcacttccctccattccttcgccctatcactcaagctgtagccaattcaaacacctccaccccactctcattcctctctgtcatacccgcacgcactttcgcaaggaccttgacttctccttctgtacatattcttatttcctgtaaagcgtttaatcgcccgccatgtcgaccccctctcgccgccgtctgatgaaggacttcaagcgcctgcagagtgaccctccaggtggcatctctggtgctccttgctctgataatatcatgctgtggaatgcagtcatctttggtccaggtgatacgccctttgaagacggcacattcaagttgctgctccagtttgacgagacgtaccctaacaaaccaccgacggtcaagtttgtgtccaagatgtttcatccgaacgtgtatgccaacggcgagctgtgt

SEQ ID NO: 300757 - DNA, 466 bp, Zea mays
gtcgacccgcccgtccgatgatggtcagccacaagattgccaagaacggccccgctgatgagatcgagctctctgttgctcaggctctcttcgatttggcgaacaacgtcgctgacttgaagaaggagctcaagccccttcagatctccagcgccaaggaggttgagaccggcaacggcaagaaggccattgtcatcttcgtccccgttccccagctgaaggccttccacaagatccagcagagactcacgcgcgagctcgagaagaagttctctgaccgccacgtcgtctttgttgcccagcgtcgcagcatggctaagcccatccgcacctcccgtgccaagcagatgcgtctccgctcccgcaccctcacctcggttcacgagaagcttttggaggacttggtctaacccaccgagattaccggcaagcgtacccgtgtccagactgaacagaagcgcatcat

SEQ ID NO: 300758 - DNA, 375 bp, Zea mays
gtttactccgcgaaaaaaaaaaagcaccactgaccgagctcaccacagcacccacaacagcttatagctacagtatgcttgcctcacccaaccctgtcgcgaccaccgtcatgcccaagccggtccgctcccccctcgacccaagccaaatccaatacgcgtccaaaaagcagcagcaagctgtcgccgagattgttgagcagctgacagttgatgcgtcgacgctgaaggggatcaaggaccactttattcaatagatgagaaagggccttgccaaggatggcgagaccatagccatggtgccctcttacgtcctggatcgactgaacggtacggtgacaggttcttatctgacgctggatgtcgggggcacgt

SEQ ID NO: 300759 - DNA, 484 bp, Zea mays
  unsure (1)..(484): unsure at all n locations
cgcgggtcgacccaagcctctacactagagtcagtgagtagccagaaccctgttcgccacctcaacccgcgcactcttctcccgtccttcgctcattctccgccagcagtccacaaaagccatgtctgtccctactttgctctctgtcgctgacctcaagagcaagctcggtgggcccgtagtggtcgatggcagctggcacatgcccgccgccaacagagacccgtacaaggagtttaaaggaaacggccatatcccaggagcacgctactttgatattgagtccatcaaggacaagacgagcagccttccccacatgatgccgtctgcggagcaattcgcacagcaagtcggagagctaggcatctcgaacgatgatcatgttgtcgtatacgacactgtcggcttcttctctgcaccacgcgtatactggatgtttaaggcatttgggcacaagaaagtgtctgtnttggatggtggattc

SEQ ID NO: 300760 - DNA, 479 bp, Zea mays
tcgacccaggcctccaaattgtctcaaatgattactcctctcaagaagcacaccatcgtgaagaagcacaccgctaccttcaagcgtcaccagtctgaccgctacaagaccgtcaaggagtcatggagaaagcccaagggtattgataaccgcgttcgtcgccgtttcaagggccagattgccatgcccaagattggttacggtaacaacaagctcacccgccacttgatgccctctggcttcaagaagttcctcgtgtccaacattgccgagttgaacctcttgttgatgcacaaccgcacctttgctgccgagattgcccacaacgtctcgtcccgcaaccgcatcgccattgtcgagcgtgcccagcagctcaacatccgcgtcaccaacgccaacgcctcgtgtcagaacccgatgcttaaatatcttcgtctggaaccccgcccccccttcctccctcctacattttttttttg

SEQ ID NO: 300761 - DNA, 459 bp, Zea mays
  unsure (1)..(459): unsure at all n locations
tgcccgtctcgacgataaacatcctccgtggctcggcgccggatagccctaacaagagcggtgcgtcctcgagtgctaagcattcaatcgcatattgtttctggttactgtgggaacaaagcggcgacatttccgctgcagctgcttggattcgatgttgatgtcatgaacaccgtcagcttctccaatcacactggatatccgtcgtggacaggcgaaaaggcaacaggcgaacaacttaccaagctctttgaagggcttgaggcgaatggcctcgtagagtacacacacattttgactggttatattggtagtgcccagaatctgacagctgttacagagattatttcccagctgaaggcacagagcaatccgttctttgttctagatcctgtcatgggcgataacggacaactttatgttcaaccagatgtgattccaatttacanggagcttatg

SEQ ID NO: 300762 - DNA, 460 bp, Zea mays
cctcaccccacccttccctccgtcaccgcaccttcctcaccctctcctcctggtgcccaacctgtctccataaagagctcgttccgtatcctgaacagtctgttcaaccagaaagtgaccaagaaccaccgccatgtctgaaaagatcgaagacgcccagaccaagggtaagctcgaggtcgaagaggctgtccaccacgagcacgccgatgagatctcgcccgagctcgaggccctcctccagaccgaccccaagcagggtttgtccacggaggaggccgccaagcgtcttgcccagttcggccccaacgagctggctgaggtcaagcgcaaccccttcctcaagttcctgagctacttcactggagccatcgcctactttattgaggtcccctgcaccatttccgccgttgtcaacgactggctcgatttcggtattattctcgggctgttgcttgtc

SEQ ID NO: 300763 - DNA, 469 bp, Zea mays
aaccctctagagtaaatcgtacgatcacgcacatcaaatacaaccgcgagggagatttgctcttttccgtgtccaaggatcatgtcgtcaatgcctggttctcgcacaatggagagcgtctcggcacatacgagggacacattggtgctgtctggaccgtcgatgtcaactccacgacgacgctcttggtctctggttctgccgacaacactgccaagctctgggatgtttcgaacggaaagtgcttaaagtcatgggagttcaacactgccgtcagacgtgtgcagttctcagaggacgacaagatgatccttctcgtcactgagccccgtatgggtttcctcgccaccctccagatcttcaacgtcgagaacggcgccacggagaccgtctcctcggagcccttgaccgtcattcatcccgaacgtcccaagatcatcgtcgctgcatggggagctctcatcaaata

SEQ ID NO: 300764 - DNA, 469 bp, Zea mays
aagactctatagataactcgtattaagccatgttcgccgctctccgccaacctcttgcccgtgcctctgctgcaaagcctcttgctcgcgccttctctgcctacagccctgtccaaaatgctgtagcccccacaaagtcacctaaactcgagtacttgctgactgagacccgcggacgcgtcggtctcgtcaccctccaccgtcccaaggccttgaacgcgctctgcaacggtctctttgtggagttgaaccaggtcttgaaggagctcgatgacaacaaggagattggcgccattgtcatcactggaagcgagcgcgccttcgctgctggtgctgacatcaaggagatgaacgacatgaactttatcgagaactatgccgaagatttcctcgggcactggactcagatcatcaagattcgcaagcctatcatcgctgccgttaatggattcgctctcggcggtggatg

SEQ ID NO: 300765 - DNA, 466 bp, Zea mays
tcgaccaagcctctagagtgagtcatactacatccgatccacgaacacccaggactgcacgtattcggcccaacgtctgcacttctgaccgcgactgggcagatgtccaggctgtctgtcgacagatcgggatccctgcgaggcgtctcgacttttcacggcagtactggaaccaggtctttgaggtgatgttgcacgagtatgagcggggcaggacaccgaatccagatgtgacatgcaatcgcgaaatcaagtttggagagctgatcgagtggtgcaaccgcaacggcggactgggcaaggatcggttctcagacgcagacgggcgccgccaccagcacgatcgcctgttacctgaggatggcatgaacgatacgtctagctcagagcaggaaaaggatacgcctcttggatgggactaccttgcgacgggacattacgcgcgggtcgagcgtgatcccgagac

SEQ ID NO: 300766 - DNA, 455 bp, Zea mays
cccaaccacgctcgccccctcgccgcgtcatcctccttccaccatgtcgcgtctcgctcctgtcgtcatcgacaatggtacaggcttcacaaagatgggctttgccggaaacaatgacccttcgtttatccagcccactgtcatcgccaccagagaaggtgggtccggagcatcgggaggaccctctgttccctcaaagccctcgttcctgaactcgtccgcaagctcgaatatcgcctccaagcgcggcatcgaggatctcgacttttatatcggagacgaggctgtggccaactcgaagacctatgcgctcaactaccccattcgccacggccagatcgacaactgggaccacatggagcgttactgggagcagagcatcttcaagtaccttcgctgcgaaaccgaagatcactccttcctgctgacggagcctcactcaacctcccgagaac

SEQ ID NO: 300767 - DNA, 459 bp, Zea mays
  unsure (1)..(459): unsure at all n locations
cggacgcgagggacaatatgaagttgaacattgccaacccagccactggctgccagaagaccatcgacttcgatgatgagcgcaagacccgcatcttttacgacaagcgtatctccgctgaggttgccgtcgactctctcggtgacgagttcaagggctacgtcttccgcatcaccggaggtaacgacaagcagggtttccccatgaagcagggtgtcctcctcccttcccgtgtccgcctcttgttgtccaagggtcactcttgctaccgcccccgccgcaccggtgagcgcaagcgcaagtcggtccgcggatgcattgtcggttccgacatgtcggtcctctctgtcaccattgtcaagcagggtgagcaagacctcnccggtcttactgacaccactgtccccaagcgtctcggacccaagcgtgccaaccacatccgcaagttcttcaacttga

SEQ ID NO: 300768 - DNA, 434 bp, Zea mays
tagagtgattcatattatccaagaggactggggtgcatatcagcaggccaacacgctctttgcaaaggctatcacggagattgttcgcgatggcgatctggtctgggttcaggattaccacctcatgctgctgccccggcttttgcgggaagaggtccacaaccagcgtgagagcgatcagcctgtcaagaatatcaagattggattcttcttgcatacgccattccccagtagtgaggtctacaggattctgcctgtgcgcaaagagatcctgctcggggtcctgaactcggatctgattggcttccacacctacgactatgcgcgtcacttcctctcttcctgcactcgcatcctcggtctttccaccatgcccaacggcggtcgacttttaacgggtccctatgcccaagttcggcacccttccccattgg

SEQ ID NO: 300769 - DNA, 466 bp, Zea mays
  unsure (1)..(466): unsure at all n locations
ctgacattccaacgccatccctttccgctaacgccagatcactgtcgccatggaggttgcgcctcggcctagccatagccatggcagtaccaatggttacgtccgccgctgcagggatcccttcctacagttcgagcttgggctagtcaaccgcgtacgattccgcaaccagtttctcgctaagcgtattctcgacctcgctctcgatcccttgaccacaatccaaagggagcatgtaggggccgtcaacaccatcgatatcgaagaggcggaaggcagatatcttatatctggaggcggcgatggcaacgtccatgtgtacgatcttgacgactctgaacgggaagagcgccgcgtcatcaagagcatggtgaccacacaaggctctcaaggtcataaaggangaatctcgcgtgtgcgatggtaccctttcgacaacggaatgtttacgacatcctcgttcgac

SEQ ID NO: 300770 - DNA, 439 bp, Zea mays
catcccgcccacgctggcgagtgaccaagtggtgtcgagtcttggagccatgttctttttctgctccatgatggtcatctttatttgcgtgctcaaccagatcgtcaccgagaaggagctccacctccggcacagcatgcagatgatgggcctcaagacactcgtctactggttctcgtggtggctctcgaacgctgtcctggtcctgatcagcgcagtcgtcatttgcggctttggaatcgcgttcggctttagcgtgttcaagaacagcaactttttggctcttcttgtcacctttttcctctttggactgtccatggtgaccatggcgttctggatcaccaccatggtcaaggcaagcaggaccgccatcgtgatcggcatctttttgttcaccctcggaatgctccttgagagcatggtgttctcgaacagctac

SEQ ID NO: 300771 - DNA, 482 bp, Zea mays
gggactcgtggttcgtaccaagactctagagtaacgtcgtattaactcgccttttctcatctccctcaagacacacaaagcataccctacaatggccgtcactctccccacccctactcacgctgacacccaggtgctcagcaaggctgtccagtctaaggactcgacctacaaattcctgtactttggcctccacggccgtggcgagttcacacggaccctcctcaaatatggaggcgtcaaagttgaagagctgacagctgactggcccgctcaaaagtccctcgttccattcaggtgcctccctgttgtctatgagaccactacagacggcactgtgctcgagctcgcagagtcggcggccatcgagcgctatttgtccaagaagttcaacctcttgggacagaacgattacgagaacctcctgcttgatcagtacgtctcttccacggattctctcgcccagaccttcagcgtcaaga

SEQ ID NO: 300772 - DNA, 452 bp, Zea mays
tcgaccaagcctctaatcaaattcgaacaaattgaaaaggctttccagaagcagcatggtatcttccaaaacgccaaggttgctggcaagaagtccgtcaagaacaaccgctggtacaaggaggttggtctgggcttcaagacccccagggaggccattgagggacactacatcgacaagaagtgccccttcaccggtgatgtttccattcgtggccgcatcctcactggtgaggttatctccaccaagatgaagcgcaccatcgtcatccgtcgcgagtaccttcacttcatctccaagtacaaccgttacgagaagcgccacaagaacttggccgctcacttgtctccttgcttcattggagtccaacagggtgactctgtcactgttggtcagtgccgccccctttccaagactgtccgcttcaacgtcctcaatgtccagaagaagat

SEQ ID NO: 300773 - DNA, 470 bp, Zea mays
ctctgccatctcatcatcctcatcttcattcatcatgtcttggcaatcatacgttgacaccaacctcgtttccaccggcaaggtctccaaggcctccatctttggtctggacggttctctttgggccaccagccctgatttcaaaattggaggcgaggaagtcaagaagctgattgccgctttcaccgacatttccgatatcgctgctaatggtctctacttggagggtgccaaatacgtgttcttgagaaacccggacaatagcatttatgcccgcaacggtgccaccggtgtctgctgcaccaaaaccagccaagctatcattgttggctactacagcgagaacatgcagggcggcgattgcaaccaagtcgttgagactttggcccaatatcttgtgggcgctggttattaaacatgttcaggccccaagtcccagggtcgaacaggtccatgttctcaatcatata

SEQ ID NO: 300774 - DNA, 458 bp, Zea mays
gcaatggataacattcaagccaaagcccgctactacaatgcgcaactggacaaggagctgagcaaatacccgcaactgaatcagttccaggccgcgacgggtgttcccaaaacctacttggccttaggcgccggaacgttcatgactgcaatgatatttttcaactttgcgggaaagcttctctccaacgtcctcggttgggtctaccctgcctatcgctccttcaaggccctggaaacacctagcaaggatgatgataagcaatggctgacgtactgggccgtatatggattcgtctccattctcgagtcattcacggacgtccttctatactggttcccattctacttctttctcaagtctgtcttcttgctttggctcatggtaccctcatttaacggtgccgccacgatttaccttagaatccttcgtccgttcttggttcaacatcgtggcga

SEQ ID NO: 300775 - DNA, 495 bp, Zea mays
ctgggactcgtgggtcgacgcaagactctacactgagtcgtatgtacgcatcatgaccgacgtgaccattcctgaagactacctgcctattgtcgatggcctcctctggaagaagatcctcagggagggatcgggtgaatcgcccagcataaagtcgaatgtcaatgttcactatgtcggaacccttttcacaaccggagagaaattcgactcctctcgcgatcgctcctctcccttcaacttcaaacttggcgttggccaggtcatcaagggttgggacgaaggtgtcaagaccatgaagattggagagctggctgaactagtgtgcgcacctgaatatgcctacggagctcaaggaagccctcccaagatccccggcaactctactctcaagttcgaggttgagctgcttgacttccaggagtccgctgacaaacccactgccaagctggctttggcccagaagaagaacgatcaacgaaatgcatctttcaa

SEQ ID NO: 300776 - DNA, 282 bp, Zea mays
gggaatgaccagagactcgcgccacaagcgctccgcttctggagccaagcgcgcccaatagcgcacgaagacaaagttcgacttgggccgtcatgctgccaacaccaagctcggtgctcaccgcatccatgacgtccgcaccagtggcggtacccgcaagttcggtaccgtgcgtttggatgccgaaaacttctccagcggttccgatgccatctcccgcgagacccgtaacattgctgttgtctacgacgccgccaacatccacttcgtccttaccggtac

SEQ ID NO: 300777 - DNA, 458 bp, Zea mays
  unsure (1)..(458): unsure at all n locations
ctttatataaccatgctcagatctctcagccgcgctgcccgccccgctgccatcgccttggcccgcagctcccctgtggttcgcgccaacgttggtgccttctctgccatccgcaactacgccaccgccaagcccgccacctctgaggtcacctccatccttgaggaccgcatcagtggccttaactcgtccgttgacattcaggagactggtcgtgtcttgtccattggagacggtattgcccgtgtgtatggcttgaagaactgccaggccgaggagatggttgagttctccagcggagtcaagggtatggccatgaacttggaggccgataacgtcggtattgtcgtcttcggtaacgatcgtctcattcgtgagggtgataccgtcaagcgtaccggtaacattgtcgatctcnccgtcggcgaggctcttttgggccgtgtcatcgatgccct

SEQ ID NO: 300778 - DNA, 486 bp, Zea mays
gggactcgcggttcgacgcaagactctacactgacgtcgtattagtctttgatcggcctctatattctctctgaggaggaatgggcataccatgatgaagcccctgtcaagatcgacttttggatgaggaacctcaccagcttgaagcattcactagacaagttggccatacctttggtcgtcaagagggctgcttgcaaagcagaggtcgccggcattgtcgaggccgtcgttcgtgagatggagatcagtcatgtgttttggaatgcagagctgatgatagatgagcaaagacgcgacgcagccgtcaggaaagtgctctccaggctgtccaacgtgcatgtggaggagtgtgatgatcagtgtgtcgtaccacctatggatgtcaaaactaagacagggaacccgtatacagtcttcacgccattccacaacagctgggtgcaaactggtggaaacagagcctcattagccccaaactgtcag

SEQ ID NO: 300779 - DNA, 395 bp, Zea mays
tcgtcccaagcctctacagtgagtcgtactatcctcacgtagaagcttttttccctcctcccctttgtacctctcccctgccctcgttgactgacaagaaaaagttgagcaaccatggttaactttactattgaccaaatccgtgccttgatggacaaggttgcgaacgtccgcaacatgtccgtcattgcccacgtcgatcacggaaagtcgaccttgacagactccctggtgtcgatggctggtatcatctcccaagcccgtgccggtgaagcccgctttacggacacccgtcaggacgagcaggaccgtggtatcaccatcaagtcaacagccatctcgctgttcttcgagatgacagaagatgacctcaggggacgtcaagcaaaagaccg

SEQ ID NO: 300780 - DNA, 408 bp, Zea mays
tcgtcccgaccctctacagtgagtcatattagacgtcgagcatgcggcgttctcaccttcgcacatggtacccgggatcgacgtctcgaacgatcgcatgctccagggtcgtctgttctcctaccccgacacccaccgccacgcgtctcggcgccaactacctgcagctgcccatcaaccagccctaccgtgctcgcgtggcccatcaccaacgggacggtccatcgacgttctcacaaaactttaatgggtcccccaactatgagccccaatccgtggatccctcgggtccggtccagcagcttcaggatgtgacggccaagtactcgcccgtgagtctgaatgggaccacgggtcggtacccgcatcgcagatccgaggatgactttgtgcagcctggaaatttgt

SEQ ID NO: 300781 - DNA, 450 bp, Zea mays
tcacacaccccctcccctcccctcctaccctacacctaacacccttccgccgtcctcgtcgttgaccctcattcaccctccttggatccgattaccttacattgttcatttctctcgagccgtgatttccattaagcaccaacttacaccatggacaaatccgaggtgtttaacgaaaagactcttgcagaggagaaaaaagatatccatgatatcgagccccagatagatctcgatgaagaggatgactctcctattgaagaggtccgggtcaccgttacaaacacggacgatcctagcctgccctacaacaccttccgcatgtggttcctcggcctcaccttcacggctattatctcgttcgtgaacgagttcttctatcttcgtcaaacgaccgtctctatcggctattcagtcgttgctttgatctccctgcccatcggacacttc

SEQ ID NO: 300782 - DNA, 456 bp, Zea mays
cgacccaaccctctataaaggctcatgttgacatcttcacctgccccttggatgtcgcccaaaccgagaccaaacgaacagtcgtgatgcacaacgccaatgatatgcgtgattgcactaaaggagaggagaagcacatggagcagatgttgcaaggtatcgccgatgcatgtgtcaatgtcgtcgtcagtggcaatgatgtcggagagctcgcccttcactacttgaacagatttggcatcatggtcgtcaaagttctctcaaagtttgatctgaggagattgtgccgtgtcactggcgctaccgcgctggctcgtgttggtgcccctatggctgaagagatgggattcggcgacattgtcgagagtgttgaacacggaggtgaccgtgttactgtgttcagacatgatgatgagatttcatagactgccacgattgtcagtcgctgtgccaccc

SEQ ID NO: 300783 - DNA, 409 bp, Zea mays
cgacccaagactccacaaaaagtcagactaactttctatcattatttggagttaaaatgcgatgcattctaaaccaggaaacattcacgtagtccacatacaaaaagggctgttcatagagtaataattcctgcatcatgaacactaaatcataacgatgacatgaaacacagattcagtcactacgcagtaacttgagggcacctacggtcagcaagtaataggacacagggtcgacgtcccagtgactactgatgagacatcaacagtccatacatccatgtcattcatcatgcaacgtgtcactttcacatgtggctgcactcattcagcagcataaggcaatttacttcgacaaccagcatcaactttgcacacatgatcagggctatcacgagatggggacctc

SEQ ID NO: 300784 - DNA, 475 bp, Zea mays
  unsure (1)..(475): unsure at all n locations
cgggtcgaccacgcgtctatccaatgtcatactatgcttcccctccaactcccctctcctcttgcgcatctccattctttgcatataatataacccacactcccctctaccacccccactcttatctacaacacatcatggtcaaggagacaaagtactacgaggccctcgaggtcgaacccggctgctctgattccgagctcaagaaggcctacagaaagttggctctgaagtaccatcccgacaagactggaggcgctaccgctgaaaaattccaggagatcagccatgcatacgacattctctccgacgcacagaagcgtcaggtctatgatcagtatggagaggctggactctctggcgagggcggagccggtggcggaatgggtggcctctctcncgaggacctcttctcgcacttctttgggggtggtggtggcggcggacgtggaggccgtccctccggcccccgccg

SEQ ID NO: 300785 - DNA, 459 bp, Zea mays
cccaacatgaagctgaccatcacccccaggtcaccaaagtcgcgcaaattccccattactcttgacctgaatggcacccccgctgaggtcaaggttgaggctgtgcaggccgccatcgcgaagcagttccctgagttctaccctgaccgccagcgtttgaccgtcgagaagactgctctggagaccggcaagactctggctgaatatggactcaaggatggcgactcggttgccttcaaggaccttggccctcagattagctggcgcacagtcttcttgatcgaatatggaggcccactgttgatccaccccctgatttactacctcccgtccttgttctacggcaaggactttacacacagctggatgcaaactgtcgcctactggatggtcatgctccatttcttgaagcgtgaatacgaaaccgtgtttgtacaccgattttcacatggaacgatg

SEQ ID NO: 300786 - DNA, 458 bp, Zea mays
ctctctccataccaccacactgcctcccaaaacaaactcattcttattcatcaaacacacagcctacaccgccatgtccgaaatgcgctctgaagaaatcaaagaagccttcgctctcttcgacccccagaacacgggcagaattgagccgtctgcattccagaactttgttaataccttgggagacgaagagctgaagaggtcgatccgtatccctacgcacgccattgaccttcgtgagttcacagacttgatgaaccgctacaacaatgacacgaacaaggaccccgaggagccctaccgccgtgccttcgcctccatcaacaacgacggctctggccatgtgtctgcggaggagcttcgagccgccgtggggaagtttccttggaccaatacactctctgaggctgatatcgatgagatcatccacgagggcgacgtctcgggcgatggacgca

SEQ ID NO: 300787 - DNA, 388 bp, Zea mays
caacagcatggactggatgtacgccaactgctcgaccacagcccagcgtggtgctctcgactggtggaagaagttccatgatgcctccaagcccatctttgaggagctgtacgagtctgtcgccaacggcaccgagaccaggaggtcgctcaccaagaactcagcccccaactaccgtgctgagctcgaggctgagttggccgagatcgccaaccacgagatgtggcgcactggcaagtctgtccgcaagttgagacccgagaaccagtaaaacgcatgcccaggccgactatccatttctcctttctagactgttttcctcattatgcgctttgcaattgtaccataccacactgaagtcagagaataaatgcaccttctgaacccc

SEQ ID NO: 300788 - DNA, 462 bp, Zea mays
taaatttcatccatcaccatcgcgctactgcacgctaaaactcaacatcatgccaggcgaacacgaaaacatcaccatgttccagttctttgaatggtacactcctgcagacaggatgcattgggtccgcctcaaggaacaggctagcctgctgagctctctcggtctatcggctatttggatcccacctcccatgaaaggatgctccgaatgggatgtaggatacgctccctacgatctctgggactttggtgagttcgaccagaagggcatggtaccaacaaagtacggcaccaaagacgagctcaaggcagccattgacgagtgtcacaagtatggcatgaagatctaccttgacgccgtgctgaaccacaaggctggtggtgacgagaccgaggtcttcaaggctgtagctgtggctgacgatgaccgcaaccgcgagattgaagagcccatgacatc

SEQ ID NO: 300789 - DNA, 416 bp, Zea mays
tcagtctcctaacacgactctaccagaccggctcccccattctctccctctttcagcaccctcgctctccctctcaatcctttgcaaacatgcgtgaagttatttccatccacgtcggacaggccggtattcaaatcggtaacgcctgctgggagctctactgcttggagcacggcatctcgcctgacggtaccgttgcctctgacaagcagtcttctcagtttgactcctcctccagcaccttcttctcggagactggtgccggcaagcatgttccccgtgccatctttgtcgatcttgaggagaccgttgttgacgaggtcagacgcggcacctaccgcagccttttccaccctgagcagttgatcagcggaaaggaggatgctgccaacaactatgctcgtgggcactacacc

SEQ ID NO: 300790 - DNA, 452 bp, Zea mays
cattatcaccgagtggaacaagggagagctcgactcgtacctcattgagatcacccgcgacattctcaagtttaaggacactgatggctcgcctttggttgagcacatcaaggacacagctggccagaagggaaccggaaagtggactgtcgtctctgctctcgataacggcatgcccgttaccctgatcggtgaggccgtctttgcccgctgcctgtccgccatcaagaacgagcgcgtccgtgcttccaagatcctttccggccccaacggcaagttcactggtgacaagaagcagttcatccacgatgtctccaaggccctgtacgcctccaagatcatctcgtatgcccagggcttcatgctcatgcgcgaggctgccaaggagaaccgctggcacttgaacaacgccggtattgccctcatgtggcgcggcggctgcatcatccgct

SEQ ID NO: 300791 - DNA, 394 bp, Zea mays
ctttcaatatgagcagcaaaattcaggtttcggccgtccgcgagagcgttcgcaccgtcaagctccagtccgaggagaagaagcgtaactttgttgagaccgttgagctccagattggactcaagaactacgatccccagcgtgacaagcgtttctctggctcggtccgtctccccaacatcccccgccccaagatgtcggtctgcattctcggtgatgcccttcactgcgaccaggccaaggagatcggtatggagtaccagtccgttgatgacgtgaagaagctcaacaatgacaaggagcagattagaaagctccgcaagaagtacgatgccttcctccgctccgaaggcctggatcaagccaattcccccgtctcttggggacctggtct

SEQ ID NO: 300792 - DNA, 342 bp, Zea mays
cacacgcgtccgacgatacgcacccaccagaggaaaagggcaaaagccaaaaggcatcaccgccgcgacgacgatggcagcctcgctccaagccgcggccaccctgatgcagccggccaagatcggcggccgggcgccctttgcctcgctgccgtcccgcccgtcgtcgcaactcgcctgcagggcgttcggcgtcgacgccggcgccgccaggatcacgtgctccctgcaggacgtcgccagcaggtgcgtcgacgccgcgaagctcgccggcttcgcgctcgccacctccgcgctcctcgtctcgggcgcgagcgcggagggcacgcccaaagaggctga

SEQ ID NO: 300793 - DNA, 428 bp, Zea mays
caaaagggtcccaactctcaactcgcgctcaatgcatccgctatcgtctctcctcctgttccgttccgccgcgccgcccagcgcgctccccttgcggcggcggcggcggagtcacacgccagtgcgagcatcatggcaggagctgggggcgtgctggtgttttccgccatccccttcactgcagtcaaggccctcgccaacagtcccctgggtgcccgcctccgccgccgcctcgaggacaggaaggccgccgcagctgccgaggctgacgctctccgcgctgcctcgcgcggcgcccgtaacaacagcttttggtacggtggagatcggccacggtggcttggtcccgtgccttacgactaccctgagtatttgacaggagagtaccctggagattatgggttcgatattgcaggtctgggaaggga

SEQ ID NO: 300794 - DNA, 323 bp, Zea mays
cccacgcgtacgcccacgcgtccgcccacgcgtccgcccacgcgtctgccaatacagggatcgccatgtccgactcggatgagcaccacttcgaatccatggccgacgctggggcgtccaagagctacccgcaccatgctggcaccgtccgtatgaaccgcttcatcgacatcacgaaccgtccctgcaaggttgtagaggtttctacctccattactggtaagcatggccacgccagatgccactttgtcgccatagacatattaagtgggaaaaagcttgaagatattgttccttcatcagacaggctgtgacattccaca

SEQ ID NO: 300795 - DNA, 431 bp, Zea mays
aaaaaaaaaatcaaaaatagaaaaagtctcttgcccccgcggccgtgccgagccggcatcccctcccccagcaacgatcgcgacgacccaaaccggcaagggtgaccagcggctggccgccgccgcggcagacgagtcccatgggagacaacaagtctccgctgagcctgagcccgatgggcgggcgcgaccgggaccgggagctcctcatcccggtctccggcggcggctcggcgcccggcgtcgatgacgagggcgctgacagggcctcctccgcctccgcggcgctctcctcctccggccgcgaggctttccataaggtcgtccgcagttgggcttcaaagaagttcatgactggatgtgtaattctcttccccatagcaataacgttctacatcacctggtggttcattcattttgttgatggattc

SEQ ID NO: 300796 - DNA, 106 bp, Zea mays
gacgcattacgagccattgctaaaagtggtgtacggttaagttgtatacgcgatgtaacacctatgccgcataatggatgtcgacctcctaaaaaaagacgtctgt

SEQ ID NO: 300797 - DNA, 209 bp, Zea mays
gtggaagggccaggcacttccagctgtcctcgtcggtctgcatcgtctcgtcgacctccttggcagccatcgccttgaacctgctgttgctgctggagctcttgccatggtaagtcacggacgctgagacctgccgcttgttgagcttcttcccgatgaagctgctcctggtctgcgtggaggacggatctccgactgtggatgagaat

SEQ ID NO: 300798 - DNA, 214 bp, Zea mays
  unsure (1)..(214): unsure at all n locations
accactctagaatcacgtcgtattacttatcaagtcctcctcgggttanggttccttanggttttgtggacgggcgatggcagcggctgatgtggagtatcgttgcttcgtcggcggacttgcctgggccaccagcaacgagtcgctggagaatgccttcgcctcctacggcgagatcctcgactccaaggtcatcaccgaccgggagaccggg

SEQ ID NO: 300799 - DNA, 167 bp, Zea mays
  unsure (1)..(167): unsure at all n locations
ggcttctcctccgcctcttaccaagtcctcctcgggttacggttccttatggttttgtggangggcgatggcggcagctgatgtggagtaccgttgcttcgtcggcaggcttgcctgtgccaccaacatcgagtcgctggagaatgccttcgcctcctactgcgaga

SEQ ID NO: 300800 - DNA, 379 bp, Zea mays
agccgttcgtgcagcagacgatagccatggccagggccgtgcaccggcagcggtaccgcatgggatgcggctacaagctcacagacgatgggacaataaccgaggagtactgggagccggttgaggactctaacactgacgaggaaaacgaagtaccggcaaggaagccctaccggatcgagctcgttggtgtggtctgtgacgcatatctagcggttgtcaggggaatcaggagagctgtagtcactgggagagcagtgagggtgaagtcgcagctgcagtctcacaagcgatttgctacggctttcaacagctactgcagcctcgtcgacaacgccatgctctacagcagcaacaccttgggtgttcccaagctgat

SEQ ID NO: 300801 - DNA, 212 bp, Zea mays
cccacgcgtccgcccacgcgtccgcccacgcgtccgcccacgcgtccgaaaaaaaacaagcgccaggcaattcaaaaaaaacttcatacaggacaaacgggtgtcagagaagaaacctgtgaagaagcaagaacctggaaaaagcaaaaaaaaccccacgcgtccgcaatttcaaattcacggggggccgcccaaaaggttcaaaccttagt

SEQ ID NO: 300802 - DNA, 203 bp, Zea mays
ctcactatacactgctctgctgcagcaagaaggaagaagctagcgcctccctagctctcgttgtcagcaatggccaccaccgccgcgtccagcctcctcaagtcctccttcgcgggctccgggtcccttcgccagccacacaccgtctcgtggcgtgatcgccccgcggcatgctcattcctccaccctaatgatctcgtaca

SEQ ID NO: 300803 - DNA, 322 bp, Zea mays
cggacgcgtgggactagggctaaggcaattctaccggcccgccgactcctgcattatcataaatatatatactatactatactatactactacgtacctaccgatatgcacccgagcaatgtgaatgcgtcgagtactatctgttttctgcatctacatatatatatatataccggatcaatcgcccaatgtgaatgtaataagcaatataatttccacaacttttcattcctacgcctgaacttttaagttccaacaaacctaatatgtggattattattaggacggccttgtgattaaaaaaaaaaaaaaaagggggggc

SEQ ID NO: 300804 - DNA, 352 bp, Zea mays
  unsure (1)..(352): unsure at all n locations
cccacgcgtccgcgagagtagacgatcagaaccaccatatatgtcctcaccagcaagttgtgccaagaaatggaatagttgtaaaacgagtagatacaacgaaaattagtgatgtggtgtctgcaattggaccctccactagactggtttggctcgaaagtcccacgaaccctcgtcagcaaattactgacattaagacaatctcagagatagcgcattctcatggtgctcttgttttggttgacaacagcatcatgtctccagtgctctcncgtcctatagaactgggagctgatatcgtgatgcactcggctaccaaatttatagcgggacatagtgatcttatggctgg

SEQ ID NO: 300805 - DNA, 389 bp, Zea mays
ctctccagaaactgctttctcctcaacttcatctctctcgctttcccccaaaaaaaaagaccctttcagggatttgggggacacagcacccagatatccaactcacactcatttcacacaactcttccccaaatcttcgattagattctcgttgacaagaagactataaccgaacctgaccatgtcgctgatccgccgcagcaacgtgttcgatcccttctccctcgacctctgggacacctttgagggcgtctccttcggctccggcagcagcagcagtctcttctcctcgttctcgcggaccagctcggagaccgcggccttcgctggcgcgcggatcgactggaaggagactccacaggcgcacgttgtcaatgcagacgtaccgg

SEQ ID NO: 300806 - DNA, 434 bp, Zea mays
  unsure (1)..(434): unsure at all n locations
cccacgcgtccgcccacgcgtccgcccacgcgtccggtccggcgtcttgctccctgctgtgctcgccctggtcccgacgcgcgctcacctctgttcctgtcgggtccggccatggagttcgcagcgacgcccactgttctgcctacttgtgctcgccccagcacttgtgcttgccctcggctcgcattggcgctcgcgtgcctgctcatcgtcaccgctgcgcgttcgctcttcgtctatcgggtttcgtgcgtgctcgcatttgccatcgagccgtttgaaccgtttttccctgctcgacctcgtcgaacccgaatcccggacgttgggcanatgtaagcgaggtccgtgtgcatcgcttatcaagtgctcggtcaaagacttcaatcaaagttcgtcgttgtnccgtgcgtcatcaagaaatcccaagagtc

SEQ ID NO: 300807 - DNA, 431 bp, Zea mays
  unsure (1)..(431): unsure at all n locations
agggattatagtagctgggtttggtttgtggctggctggctggctggataccacaccggtaatagcggccgagagagcaaccacgtccacggccatttaactgtcatctctcctcctgatttccttctctcctttcctttttgctccgatccgatccgatcaatgaccaagtcgaagggtggttcggtggacgcgcgcacgctggtggcgcacgtcctggcagcgggcgccgtcgtgctggtgctcttgtggtgcatccacttccgcggcggcctcgccctccgctcccaggacaagccgctcatcttcaacgtccaccccgtgctcatggtcctcggccccatcgtcctcggcggagaagccatcctcagctaccgctctctcncgctcgcncgcgacgccaggaagaaggtgcacctggcgctgcacgc

SEQ ID NO: 300808 - DNA, 339 bp, Zea mays
acgcgtcagcgaacgcgtgggcggaagagtggggaaatggtggcgtatcgtcaaatggaatcaccttcgagaaaattcctcgctgcaccacgactagcgacgacgacgattagtgcagtggtgtcggccagtgcaccctcgactagactggcttggctcgaaagtcccaggaatcctcctcaggaccttactgagattaagacaatctcacacatagcgcattctcatggtgctcgtgttttggttgacaacagcatcatgtctccagtgctctcccgtcctatataactgggaagctgatatcgtgagtgcactcggctaccacatttatagccggga

SEQ ID NO: 300809 - DNA, 340 bp, Zea mays
atattaatcagttggtgtcggatacttggctggatgcttaacggtgttatgaatgctgtcttaatatttttcttcagcatcactacctttgatgaccaggtgttccgcacggatggtcaacttgcaggcttggttgctctaagcgtcgtcatgtacacttgtattgtatgggttgtcaactgtcatatggcactctctgtgcactaattcatcataatctagcacatattcatatggagcagcattgcagtatgggaacttcttcccatagcttatggttccatgaacccgtggttctcagctacacactacatagtcttcatcgatcaactggccccag

SEQ ID NO: 300810 - DNA, 430 bp, Zea mays
cgagagtgagtgaacaccagccgtattgtcccgaccccgaccgatcctcgcctgctgcagccatggcgaccgcacgctcgcgcaggggctcaagggtgaccccacgtacctggtggtggagcaggacaagacgctggccacctacgggatcaacgccgtgtgcactcacctcggctgcgtcgtgccgtggaacggcgccgagaacaagttcatctgcccatgccacggatcccagtacaacaaccagggcaaggtggtccgtggaccggcgcctctgtcgctggccctggttcacgccgacgtcgacgacggcaaggtcctcttcgtcccgtgggtggagaccgacttcaagaccggcgaggacccgtggtggaaagcatgacgatgatccgaaaccagcggtgctcagtgctcacacatgagacctacg

SEQ ID NO: 300811 - DNA, 203 bp, Zea mays
tccccaaaccctagctcccgatctccatggccaaccctcgccgtcttcgtcgagatgaccgtccgcggcgccccggcgggccggatcgtgatggagctgtcgccaacgacgtgcccacgaccgcggagaacttccgcgcgctgtgcatcggcgagaagggcctgggcacgtcccggaagccgcgcctgcgacaaggggtccag

SEQ ID NO: 300812 - DNA, 171 bp, Zea mays
ataggcgtccagtatgccgtctgcgatcttcggcggcagcatcggcgggctgctccgcccggcgcacgtggaggagttctacgtcgtcacgtaggcgttccccatcgaggaggtgttctaggtgcatatcggcggcggcgccagcatgcgggaggggcgcacgctcgtcga

SEQ ID NO: 300813 - DNA, 270 bp, Zea mays
cccacgcgtccgcccacgcgtccgcggacgcgtgggcggacgcgtgggcgagtcataagaaggtactgctgcaatcgacgtcacttgagaatgctgatgctccaatggaccacgcgagacattcaaaagcacaggggtccattgatccacagactcgtgggagtgatagtccagtgccctctaagagcacttaagcttttgcaatgttcgtgaaagcttgcaggtccatgcagtaaaggattgcttccactgtgttgaacaccttattac

SEQ ID NO: 300814 - DNA, 360 bp, Zea mays
ctctacagtgaatcgtattaagagatagagaagacagagataatagagagatagatcagaggagtgggagacccgcgagaggctgccgtgtacggaccgtacactcagcgtctgccaacgagggataacgggatcgccgggatccgaccgatcaagcatgactgggagccggtcgttgtgcggatgaatgcacccaccgccgccgccaacaaagatcagaaggccgtcaacgccgcacgccgcgcccgttcggacatccataccatgacgaactagcaacgctggtacgagataagcggcatccagcggtacaaccctcaatagcacacgcctctattacgacacctcctgacctccccc

SEQ ID NO: 300815 - DNA, 279 bp, Zea mays
cgtcaaccatcgcgtccgcccatgcgtccgcccacgcgtccggcaagctgcagccctggtgaccctgctggtcctcatgatcatcaaactcgcgatcggcatcctcgcgcacgtcgactccttcgcgcatatcggacggttccacagcggcttcctcctcgggtacgtcctcatcatctccctgcattacgggtggatgcagcgctaggccctgcccgtcgacgtcaacttcaacatcgacacgtagttggtctaccaatcggctctgctggccgtggc

SEQ ID NO: 300816 - DNA, 386 bp, Zea mays
gcgtcaaccaacgcgtccggtcagttgttgacctcacggtcagaatcgagaacggggcctcttacgaggaactcaagagagctattaaggctgcctctgagggcgcactcaagggtattacgggctacgtcgaggacgatctggttgccaccgacttcagcggtgacagcatgtctagcctctgcgatcccgggggcaggattgcgactgcaactaccagttcatcgcgctcgtcacgtggtaccaccactcagtggggccaccggagccccgtcatcgagctgatccgtcagtcgatctcgacttagtcaacacacagctgtctgcgtcacgaacgccggtcgtccacaaccggactgggtcccacaggaacaatgccacggatc

SEQ ID NO: 300817 - DNA, 148 bp, Zea mays
cacgcgtaagattttttttttttgtttttcgagcacaatctgctgttaggtacatatgatgcaaaggttgtcgattaagaagcgtatacagctggtgataacgttgcgacatccagacagcgtgtaggatgcctatcaggcgaaacat

SEQ ID NO: 300818 - DNA, 467 bp, Zea mays
tcgtggtacgacgcaagactctacagtgagtacttatatagatggctgtctcaatctccccaaaccatgaggttgcatccatcttcgcagcagctttcttttctctcttcaatctcttctcgggcttcttcattccgagaccgagaattcccggatggtggatctggtactactggatttgcccactggcatggacagtgtatgggctcatcgtgacacaatatggagacctagaagacctcatctcagtccctggagaaagtgagcagacgataagctactatgtaatacatcattttggataccacaaggattttctgccagtcattgcgccggttctggtactctttgcagcattcttcgcgttcttgtacgcggtctgcatcaagaagctgaactttcagcaacgataagaaaaagatatagcaacaaaagctcttgagatttttttggaaacacttcctttt

SEQ ID NO: 300819 - DNA, 269 bp, Zea mays
gatgcatcgagcttcgcaacagcgttcttttctctctcgtatctcttcacagtgcttcttcactccgagaccgggaattcacggatggtggatccggtactactgggtttgcccactggcttggacaatgtctgggctcatcgtgacacagtttggacacctataacaactcatcttactcggtgcagaaagtgagtacgacgagatgctgctatgtaatacatgattttggataccataacgattttctgccactcactccgccggtt

SEQ ID NO: 300820 - DNA, 454 bp, Zea mays
tcgcgggtcgacacaagcctctaatctgacttctcatagaaatctgccaatttgaacacaggtcttttccaatctgagaaggccgctactttgtcaaggcttcataaacttctatcagtctgctgaggatttcggtgcttcattaaggttctgggagtgagaagatgaggatcaactgctgcagcatctggcgcaacaaggcactgaggaggatgtgtttcagtgaaaggggtgctgtgagcagcacccagtgtgtgctcacatcagatgctggcccagacactcttatcgtccgaacatcctttcggaggaattatgctgatcctaacgaagtcactgctgtcattttgggtggtggtaccgagactcagcttctccctctcacaagcacaaaggctacccatgcctgtggaggctactggttggttctacggcacagcaagacgtcgttaaa

SEQ ID NO: 300821 - DNA, 165 bp, Zea mays
gtagaaaaatcagaacattgtccggatgattataatttggaaatgaagaggaaaagaaacgatgggacaaaagggacaattgttccaaataacgggtccaaagtagaaggaatgttaagtcctttgggacaagccaatcacagtggcaaggcacctgttccgaat

SEQ ID NO: 300822 - DNA, 399 bp, Zea mays
cgggtcgacgcaagactctatcaagtcgtacgtattcagctcatcttgctccgccttctgcttctgcgcatcctccaaggatcgtgatggccatggccacgcaagcctccgcggccacgcgccacctggtggccgccgccgcttccgcctgggcgccgtcggcgaagccgcggcagctaagctcacagctcgcgctgccgccgtcgtcctcccgcgcgccggccccgctccgcgcgaccgccggggaggcggtgaccgatgaggcggcccaacgggttcgtgggcccgcaggctggaccgcagtaggccgtctccgatcgtctgcggcagcacaggcgggctgctccgcaaggcgcaggtggaaggagttctacgtcatcacgttgggtgtcccccgaa

SEQ ID NO: 300823 - DNA, 383 bp, Zea mays
gtcgacacaagcctctacacagacttctgagtacagcctaaagcagtctgaggaatccttcaacgacctctgtccagcaagcgctacatgggcttgcatactgtgtgtatggcaaacctgacgtgcggcgtttgatgttcgacgtgtttgacttcgaacaggtccagcctaaagcagtctgaggatcttcgccattggtaccgatgctagagttgctgaatgctgaccaacacgaccccaatggcagtggtacaaatgctgtagattcttgaagtcgtccattcgacaggagatctttcgattctcaagcctgaagccctgaaccctgagctgggacagctgattagccactgggtcctgtctctcctgaaaccgtcactgtt

SEQ ID NO: 300824 - DNA, 429 bp, Zea mays
ctcgcgggtcgacgcaagcctctagactgactcgtactatacctgggcccgctgtccggctcgcccccgagctacctgaccggcgagttccccggcgactacgggtgggacaccgcggggctgtcggcggacccggagaccttcgccaagaaccgcgagctggaggtgatccactgccgctgggccatgctcggcgcgctcgggtgcgtgttcccggagctgctcgcccgcaacggcgtcaagttcggcgaggcggtgtggttcaaggcgggctcccagatcttcagcgatggcgggctggactacctcggcaacccgagcctggtccacgcgcagagcatcctggccatctgggcgtgccaggtggtgctcatgggcgccgtcgacgggtaccgcgtcgccggcggcccgctcggagacgtgggcgac

SEQ ID NO: 300825 - DNA, 423 bp, Zea mays
agggatgctaatatacttattgtgtgacatagatcccctcacaaaaagagcagctgcctgcctgtgtagggacaacagatcacggttctgagatatgaactgtgtggtctgcaacggcctgctcgtcctgcagaagaaacaaaaccgatcattgccttgatacttgactgataatccagtttcgattcgtgtggctaagacttcctctgtggtgtggacgcacgtacgcaggtgggtggctgcgcagagcgtgttctaccacctgtacaaccaggtgtcgtacatgtcgctggacgagatctcgccgctcacgttctccatcggcaacaccatgaagaggatctccgtcatcgtcgcctccatcatcatcttccagacgcccgtccagcccatcaacgcgctcggagccgccatcgccatcct

SEQ ID NO: 300826 - DNA, 341 bp, Zea mays
cgacgcaagcctctagcatgcgtcgtgatacgatggccgcgctccgcctcgcctccttcaccctccgccccgccgccgcctcttccggcgcgacctcatcggctccccggtccgcctccttctccagcgcggcgcgggggctcccctctctctgcctggccccgccccgccgccgccgcggggacctcgccaagccccgcgccgcggtcgaggccgcggcggagagctacgcatccgcgctggcggaggttgccgtcgagaacggcacgcctcgagcagacggtctctgacctccagaagctggtgaagatgttcgtcgaacgaggccgtcgccgagttct

SEQ ID NO: 300827 - DNA, 298 bp, Zea mays
gaaagaggttatggatttagatggctcaattgaagacaaccgatatagagatcagaaattaaggatgaagaaatgtgggctgaggaagttgatatatcttgttgaaggtgatctcaaccgtgcaccaaagagggttaaaacagcctgtttcaccactgagattctcgatggatttgatgttcagagaactactgggtttgccgatacccagaagaaatatgttgatcttacacgttcggtaaaaccatactatgatgcaagtttctcgatcgttggtaaagcttcccctgtttgccca

SEQ ID NO: 300828 - DNA, 244 bp, Zea mays
acagtgagtacgtatgagaatgccttcacggaaggtacggcacagcaaaatgcacatagtatttttgtgtcacttgctttaaaacttttggaatagcgagttcatgtcgcatgcaaagaaattattacgttggagaaacaggtgcttagtacacctctagataaaattaacatgaggttgacgtgatcgtacttgtcaacatcaaacggtggctgaagttattgcagagcaaacttcttgagga

SEQ ID NO: 300829 - DNA, 228 bp, Zea mays
cccacgcgtccgcccacgcgtccgcccacgcgtccgcggacgcgtgggtttagaccttccattctctttccttgtgttgctgagcttctatcatcgtgtcttattgtgaagagggaactcttcactaatgttttgttatgtacttgttgtgttcaaaagttcttgtactgtaggctactgttatgatgcgcctagctcaatttgtcgatgcaattcgaaattttgtct

SEQ ID NO: 300830 - DNA, 353 bp, Zea mays
ctgaatcctccgaggttttgaggccttacttttggctccaccccaacaaaggtggattgagatggatttgggtgtagccaaacaagaactgagacggatagtggattgcaaccaaacaagttcttggcatttttcggactaattttctttactccatgaggagttgtggttctcctgtcaatctgctcactgctcacggacccaaaccctgatgatcctcttgtccctgagattgctcacatgtacaagaccgacagggccaagtatgagtccaccgcacgctcctggacacagaagtatgccatgggctagaagcaaggctaaaagctggccaaactggtgaatgtgccgga

SEQ ID NO: 300831 - DNA, 418 bp, Zea mays
  unsure (1)..(418): unsure at all n locations
ccttgattccaaactgtacaggtacgtttacctcctacatgattgtgagtgccttcactctcgtgttcgtaatcgtttgggtgccagagacaaagggaagaaccctcgaagagatacaatggtcgttccgctgagcaccaacatcgtcaaaatgcgaaatggttcttcgagttttgtcgctttagatactcaaatcactcgacgaaggccacacattctttctgttcataaaaggtcttgtacatgagattgcatacaccgttgttataactttacccccaatagacttgtaaatgcttgtgcagtaactcttatattacttttgcttcaacattgtaagatanaagacttgccaaaataaaatctgaaccttggggtcaaaaaaaaaaagcgaaaaaaaaaaaaggggggccgctct

SEQ ID NO: 300832 - DNA, 318 bp, Zea mays
gctcgccatggcctccctctcctctgccgccgtcaccgccccttccttcgccgcaccagcgccagcccgcgccgtggtcagaaggaggtccttcaccgtgcgcgcctctctccgcaaggccaccggcaccgccgccgtggcaatggctgccagcgccctgcttgccggcggtgccatggcccaggaggtgctgctgggcgcatgcgacggcgggctcgtcttcgagcccagccagttcaccgtcaaggccggcgacaccatcagattcaggaagatcgccggcttcacgcacaacgtcggcttcgacgaagacgaggt

SEQ ID NO: 300833 - DNA, 377 bp, Zea mays
cccacgcgtccgcggacgcgtgggggcgaccataagcatggccgcgatcaggcaggccaactgcctccgacgggacggcgccggcgccggcgcgcgctgcgacgcgccagggaccgtgctcatgctggcgttcagcgtggtccaggtggtgctgtcccagttccctggcctggagcacatcacctggctgtccgtcgtcgcggcggccatgtcgttcgcctactccttcgccggcctcggcctctccgtagggcactgggtgtctcgtggcggcggcggcctcgggggcagtgttgcatgtgccgccgcgggatcctccaccaggaggctctggaacgtgcttctcgcgctggggagcattgccttcggcctagacg

SEQ ID NO: 300834 - DNA, 281 bp, Zea mays
acaggactaggactcgcgggtcgacgcaagcctctacacacgacgtcgtaatagcacgggcacggagaaccagtgcccgaccatccacggcagcgtggactcgttcccgttcaaggccggcaagtgccagaataagaaccatgtgccgggagccgacgtccttcaccgtcaacggggacggcagcaccaagaacgcaccgcccgagttccagaacaccaagctcatgaggcgccgcatttagacgctggactagatcgagggcccgctcgacgtcagctcc

SEQ ID NO: 300835 - DNA, 418 bp, Zea mays
cgtgggtcgacccaagcctctacagtgactcgtgctaacgcgtgggcggacgcgtggggcaaaagccaaaaggcatcaccgccgcgacgacgatggcagcctcgctccaagccgcggccaccctgatgcagccggccaagatcggcggccgggcgccctttgcctcgctgccgtcccgcccgtcgtcgcaactcgcctgcagggcgttcggcgtcgacgccggcgccgccaggatcacgtgctccctgcaggacgtcgccagcaggtgcgtcgacgccgcgaagctcgccggcttcgcgctcgccacctcggcgctcctcgtctcgggcgcgagcgcggagggcacgcccaagaggctgacctacgacgagatccagagcaaaacgtacatggaggtgaacggcacgggcacggggaa

SEQ ID NO: 300836 - DNA, 421 bp, Zea mays
ctcgtgggacgacgcaagcctctacactgagtcttacaatgcaataaaaaaagcagccgcaatggcgagcagcaccatggccctctcctccacggccttcgccggcaaggccgtgaacgtgccgtcgtcgtccgccttcggcgaggcccgcgtgacgatgcgcaagacggcggcgaaggccaagccagcggcggcgtccgggagcccgtggtacggccccgaccgcgtgctgtacctgggcccactgtcgggcgagccagcgagctacgtgacgggcgagttcccgggcgactacggctgggacaccgcggggctgtcggcggacccggagacgttcggcaagaaccggggagctggaggggatccagtccggctgggccatgctggggccgctcgggggcgtcctcccgagctgctcgcc

SEQ ID NO: 300837 - DNA, 334 bp, Zea mays
tcgtgggtcgtcgcaagactctaaactgacgtcgtattaagcgtccgaagaaggaagcggaaagcatggtggtcgagccctagagcacacagttctgggcttctggcaaactatttcctgagacgttcatcatttccatcacagaaaaataaagctcgggtgccttctgttgatttcgacgtacatttccctgccgatggtgtccagcccactgttgtcgctggagaacacgtcgtttttagacttgtgatgttttactactgttttgacactcgttgtatttctgtatatcgcgtcagactgtgaaataaaagcagtacagtgtgtttcttgc

SEQ ID NO: 300838 - DNA, 416 bp, Zea mays
  unsure (1)..(416): unsure at all n locations
tcgtgggtcgacgcaagcctctagagtgagtcgtactgaattgtcccgactcctgacccctaccgatcctcgcctgctgcagccatggcgacctccgcggcgctctccaccgccgccaatcccacccagctctaccggtcccgcgcttcgctgggcaagccggtgaaggggcttggcctgagcatgggccgcgagcgcgcccagcggagcattgtgtgccaggcggcgagcagcatctccgccgaccgcgtccccgacatggagaagcggaagctgatgaacctcctcctcctcggcgccatctcgttgcccaccgtcggcatggtcgtcncctacggcgccttcttcgtccctgccggctccgggaacgccggcggcgggaactacccgaaggacaagctgggcaaccacatcac

SEQ ID NO: 300839 - DNA, 429 bp, Zea mays
actagttcttagatcgcgagcggccgccctttttttttttttttttttttactagtttaattggtattaactcaaagtctcaaacgtgcctcttgttgcattgacacacatgtacaatacaatcgtacatatagtacgttttattcgacaagcagcctctgcatgcaataatagtacaacccccgatttaattaattggactaatgcatgctgaggatggatcagatggagatgctgctggggatgcccctcccggtgactcccggcttggagaagggcttgagcagctcgtacggcacgatcccggcgccgcagcggttcttgaggtccaggttgttgttgcactcgtcgatgaacccctcgatctccttcatcctgccgccgaacttctcgaacgccgccttcaccatgggctccgccagccacgac

SEQ ID NO: 300840 - DNA, 337 bp, Zea mays
gacgcaacactctagactgagtcgtagtacgcgttcgggattctctaatgccacatggtggatccgcggatggtgaagctcagtcaaaagttcgataccctccacatccttcgcgcgatactggactcttccacgggaacgttcatcattgccggccgcgacggcacggaggatgggaatcgcgcgatctccactgggtatacggatttggtcccgttcgggcgcgtgttcatggctaaccctgacctgccacggacgttccagctagacgctcaccttaacacgtactacagagacacgttttacatccctgatccggttattggatccctgacga

SEQ ID NO: 300841 - DNA, 400 bp, Zea mays
aacactctatagtgacgtcgtattacacgtccggcggcgccctcggcctcagcgagggagggccgctgttcgggttcaccaagtcgaacgagctgttcgtggggcggatggcgcagctgggcgtggccttctccatcatcggcgagatcatcacggggaagggcgcgctggcgcagctcaacatcgagacgggggtgcccatcaacgagatagagccgctcgtcatcttcaacgtcgtcttcttcgtcatcgccgccatcaaccccggcaatggcaggttcatcatcggcgaggaagacgaatatgctgctggctgctgctggctggcctcggacatgagtcgtgtgcgtttacttttacctgtgactgtgcgtctcggtgcgcgcgcgtaagtgctttg

SEQ ID NO: 300842 - DNA, 446 bp, Zea mays
tcgcgggtcgacgcacgcctctacagtcacttgtgctgacgcgtgggttcgcgtccaagcagtccctctcctacctcgatggcacgctgcccggcgactatggcttcgacccgctgggcctctcggacccggagggcaccgggggcttcatcgagcccaagtggctggcctatggcgaggtgatcaacggccgctacgccatgctgggcgcggtgggcgccatcgccccggagatcttcggcaagatgggcatcatccccccggagaccgcgctgccgtggttcaagacgggcgtcatcccgcccgcgggcacctacaactactgggccgactcctacacgctcttcgtcttcaacatggcgctcatgggcttcgccgagcaccgccgcctccaggactggtacaacccgggctccatgggcaagcagtacttcctcggcctcgag

SEQ ID NO: 300843 - DNA, 381 bp, Zea mays
aacacgcatccgctaacgcgtccgcccacgcgtccgccgtcactcaatacagcacaggcagctcgatagagagagagagacatagatgtcgtggttcgggcaccaccatcgcgagcagccggctcccccggcgtcgggccgcaagcaggtgttcaagatgttctgctgcgcgaacgagaactactgcctggccgtccgcgacggcgccgtcgtgctggccccggtcaataccaaggacgaccaggagcactggtataaggacatgcgcttcagcaatcgggtccaggacgacgaaggcataccggcgttcgcgctcgtctgcagtgccacggggctcgcactcaagcattccctcagccagtcccacgcggtcaagctcgc

SEQ ID NO: 300844 - DNA, 417 bp, Zea mays
tgcactgacgttgtgtcatagccgcacttaaaagccgagtactctaccattgagttagcaacccggataaaataggatctcttagatacgatcaaaatctagaaatcgatgaaattatacgacattgaattagcaagacatcaaaagaaagattttctaatccattaaaaagactcaaatacaaaaatgaacagatccggttaaatttcactaaggctaagggtaacaaaaaaaaagcagccccaatcacaatggcaaaattgtgatttttttggcaatttaaagaagtaaaataatcttgtatgtgtatgagagtacatgcaagaggggcaaccctatcatttgaatgaagtgtagacagaaatacctaatatggagtgacaataaagagagccatctatctacaaagtcgatttg

SEQ ID NO: 300845 - DNA, 426 bp, Zea mays
cggagacgttcgccaagaaccgggagctggaggtgatccactcccgctgggccatgctgggcgcgctcggctgcgtcttccccgagctgctcgcccgcaacggcgtcaagttcggcgaggccgtgtggttcaaggccggctcccagatcttcagcgagggcgggctggactacctcgggaacccgagcctcatccacgcgcagagcatccttgctatctgggcctgccaggtcgtgctcatgggcgccgtcgagggctaccgcatcgccggcggcccgctcggcgaggtcgtcgacccgctctaccccggcggcagcttcgacccgctcggcctcgccgacgaccccgaggccttcgccgagctcaaggtcaaggagctcaagaacggccgcctcgccatgttctccatgttcggattcttcgtcc

SEQ ID NO: 300846 - DNA, 391 bp, Zea mays
cgggtcgacgcaagcgtctagactgaatccatagaacgaactgaggtcgacgacgactgatcgagcagcgacgatggcggctgtgctgaacagcaggaagacgccgcatgtggttgccgtgctggtggcggcggcgctgctggcgtcgtccgcttcggcggcgatcacctgcgggcaggtggggtcgtcgctggctccgtgcatcccgtacgcgacggggagggccagcgcgctccccgcgtcgtgctgcagcggcgtcaagagcctcaacagcgcggcgcggaccagcgcggaccgccaggcggcgtgccgctgcctcaagagcctcgccaacagcgtcaagagcgtcaacatgggcaccgtcgccaccatccccggcaagtgcggcgtc

SEQ ID NO: 300847 - DNA, 320 bp, Zea mays
tgcagacacttggggtgcatgttttgaaggctatggtccttgacacaaagcttattcagaacatgcacacgttacaaggtgtagtagagaagggatagagcacagtgctagtagcgttttgatatgcgtggcatggagcacttctgcttcctgtcatggaggatccccaagatgacagcagctgtttcctcgatagcttttccagtgaccgcaatgactggccacgatggattctgagcaaagatttgattaagctttgtgtcaaggaccatagccttcatgtaatttttttttgttggaccaccttctatgtggtgccg

SEQ ID NO: 300848 - DNA, 341 bp, Zea mays
aatgcgtccgccattcgcgagtctccagccaacggcatccagtccactcccatccccctcgaacccgacaaacccgacccgattgcgcccaatggcgataagaagccagcgcgagaagaagccggcggccgaagataatgcggagaagacgaccgcaggttataagcccaagtctgagaagcgcctgccggcctctaagtcctccggcaaggatggcggcgagaagaatgggaagaagaaagccaagaagagcgtgtagacctacaaaatctacatcttcaaggtcctgaagcatgtgcaccccgacattcggatctcctccaagggcatttcaatcatga

SEQ ID NO: 300849 - DNA, 447 bp, Zea mays
ctcgcgggtcgacacaagcctctagaatgactcttcctactgctgaagaaatgcctgtgactgaatttgttgatgctgacccccatgggtgtacccaatccgctgctgatcccaatgtgggtgctccatctgttgctgatcccaatgggggtgctgcttgtgttgccaatgtagacgaggaggaggaggaagatgaagttcctttgactcggaaaaacagtcggcagttcatcgccagcggtgaaagtagtggagttccctctcctgctttgtctgctctcattggtctgcaagaactgtccctggccaactttgatcagactcttgaggacatggttccagaggacttgttacctgagccagtggatgatggtgtgatggacgtttgcgctgatgtgcttgatgctgggttgatgtcatcacgtccctcgtcgaccttagaacgcg

SEQ ID NO: 300850 - DNA, 390 bp, Zea mays
cggacgcgtgggcggacgcgtgggcggacgcgtgggcggacgcgtgggtgtgaggcaggagctggtccatgcgaatcaaatctttgctcagaatccatcgtggccagtcattgcggtcactggaaaagctatcgaggaaacagctgctgtcatcttggggatcctccatgacaggaagcagaagtgctccatgccacgcatatcaaaacgatactagtactgtgttctatcccttctctactacaccttgtaatctgtgcatgttttgaataagctttgtgtcaagcaccatagccttcatgtaatttttttttgttggaccaccttctaggtggtgccgtgtgtatcataaacataacttgaagtttagtgcaccagagacacatgtat

SEQ ID NO: 300851 - DNA, 248 bp, Zea mays
gtgggtcgacccaagactctacagctaagtcgtatcacctgcatgcaatggttccttttgcttccaacaattctcctgctgatgtatccagcatggcatcatccatctacaattacgtacgtagtgcaacgactgtcgattcgttgggtgaggaacatatatgtgaatgcaagctccggctaccatacatgtgtaatgtgtaatagatatatatacaaaactgccgaggcgccgacaatactttaaaa

SEQ ID NO: 300852 - DNA, 399 bp, Zea mays
acacacgcgtccgccaacgcgtccgacgagcaccgccgcgcaggccaccgtcgtcctcggcgtggccccggagaagaaggccgcgcccgagttcgtcgaggccgcggcggagtccggcgaggccgcccacggctgcagctgcggtggcaactgcaagtgcgacccctgcaactgctgatcacatcgatcgacgaccatggatatgattattatctatctagcttgtggtggtggttgaacaataataagcgaggccgagctggctgccatacataggtattgtgtggtgtgtgtgagagagagagaaacagagttcttcagtttgctatctctctctgcatgtttggcgtcagtctttgtgctcatgtacgtacgtgtgtccacctgcatggtggttga

SEQ ID NO: 300853 - DNA, 435 bp, Zea mays
  unsure (1)..(435): unsure at all n locations
actgggactcgtgggtcgacgcaagcctctagactgagtcctattaaaccctaaaccaaagaaaaagtctgcatccactggtcaagtggagacacatgctcctgcgggtggcccgacttcatatcaacaatacctctcttcgatgagcatgccagggccatcaccatcaggtggaactgattctgtagggtatggcgtcgaccaaagcgcaacacatccatctcagctgcagagttcatccaccaatgtccaggcaccatatgatgacacattttcgttcttaccacctaacatgctgacagggtctgcaaatgatgccatgggtctggaactgggccagttgcagcaagtaacttctcaaggccagacaattcagccagcanacgtgggatatggtgatttggccagaaaccgtgacagtcagtatcccgatga

SEQ ID NO: 300854 - DNA, 409 bp, Zea mays
tcgtgggtcgacgcaagcctctacagtgagtcagtacatacgagtacatacatactaggcagccaggcagccatggcgcccaccgtgatgatggcctcgtcggccaccgccgtcgctccgttccaggggctcaagtccaccgccagcctccccgtcgcccgccgctcctccagaagcctcggcaacgtcagcaacggcggaaggatccggtgcatgcaggtgtggccggcctacggcaacaagaagttcgagacgctgtcgtacctgccgccgctgtcgacggacgacctgctgaagcaggtggactacctgctgcgcaacggctggataccctgcctcgagttcagcaaggtcggcttcgtgtaccgcgagaactccacctccccgtgctactacgacgggcgctact

SEQ ID NO: 300855 - DNA, 437 bp, Zea mays
cacacgcgtccgcccacgcgtccgatctccgaccggatccgcccgccgtggccgctgccggagattctcaccttcgtcgcgcgcttcgcgcccacggcggccatcgtgcccaccgccgacctcatcgagaagtccgtcaaggtgcccgccaagcgcatcgttgcagcgcgcaaccctgtgcgctacaacggccgtcccaggctcggcaccgtcgtcgagctgttgcgtgccaccgacgagctggccaagcgcctcggcgaagtcagcatcccgttccttgtcgtgcacggcagcaccgacgaggttaccgacccggaagtcagccgcgccctgtacgccgccgccgccagcaaggataagactatcaagatatacgacgggatgctccactccttgctatttggggaaccggacgagaacatcgagcgtgtccgtgg

SEQ ID NO: 300856 - DNA, 295 bp, Zea mays
cagacgcgtgggtttttttttttttttttttttttttttttttttttttttttttttttttttttttttttttttttttttttttttttataataagaagtccggttttagtatatatatagtatcaaatcatatcatcgtggaccaattaatatatggttacagcagatgcaatcggattaaccaacatgcaggtagacacacgtacgtacatgagcacaaagactgacgccaaacatgcagagagagatagcaaactgaagaactctgtttctctctctctcacacacaccac

SEQ ID NO: 300857 - DNA, 291 bp, Zea mays
cacacgcgtacgcggacgcgtgggtggggaaatgcacctggtgcagcagctaatcgtgtggctttagaagcctgtgtacaagctcgtaacgaagggcgcgatcttgctcgtgaaggtaatgaaattatcaaagcagcttgcaaatggagtgctgaactagccgcagcttgtgaaatatggaaggagatcaaatttgatggtttcaaagcgatggataccatataaaataggcgtcgttttagaacgtcgtgacggggaaaacccggggcgttacgcagcttaatcgcgttg

SEQ ID NO: 300858 - DNA, 203 bp, Zea mays
gtggttcgtcacaacactctagagtgagtcgtaataatggacgcctcaagctataggtcctttttctgctgcctctctccctgctcttcatctgtatcattctctggttcttgaatgcttgagtgaatggtgaataccgcatacctgtatttcaggaatcatatttgattaaatggtgaatgcactgcataccggattcaagg

SEQ ID NO: 300859 - DNA, 397 bp, Zea mays
gcgggtcgacacaagcctctacattgactcgtaggacggagtcggcgacgagcacatggccggaggcggccccgccgcgtcggcgctttcaagcccctggagggctctgctccagcgagcgctggacgccaacgcccacctcacgcactccaactacttccaactcgccacggtgggcgccgccggcaagcccggcaaccgcaccgtcctgttcaagggttttcaagaaatctgtgataagattcagattaacaccgacgccccaaccaacaagattggtgagattaaagagctgccccctttggttagatttgttggtacttcacagaaaactgggaaccaatccgtatcagtggcaccatagatgttaatgatgcttctactacagaccctgcca

SEQ ID NO: 300860 - DNA, 423 bp, Zea mays
cggacgcgtgggcggacgcgtgggcggacgcgtgggcagtgacccgcaggcgcagctgccaattgcaagcatgtgcgggagtaagaaatccgtagcctacttcgcccacgaccgggcgcaccggctgctccccattgccggcggcgacgacttcacctgcggcgggtgcctggtcgctggcgccggcccgcggtaccggtgcgcccacccgggctgcagctttaccgtccacgaggcgtgcgcgcgccgctccccgaggacgctcaggtccgccgtgcacccgctgcacaggctgaggcggcgcgaggccgcgggagccgacggcagcggcggcggcggcgggtgcgaggtgtgcggcgaggccgtggagcgcgcgtgctacgcctgcgtcgcgtgcggggtcgccgttgcaccgctgtgcgc

SEQ ID NO: 300861 - DNA, 436 bp, Zea mays
cgcgggtcgacacacgcctctacactgcgtcgatagtgacccaccgaccgcacgctcgcgcaggggctcacgggtgactccacgtatttggtggtggagcacgacaagacgcggcacctacgggatcaacgccgtgtgcactcacctcggctgcgtcgtgccgtggaacggcgctgggaacacgttcacctgcccctgccacggatccgactacatcacccatggcaaggtggtccgtggaccggcgccactgtcgccggccctgattcacgccgacgtcgacgacggctaggtcctctgcgtcccgtgggtggagaccgacgtcaggaccggcgatgacccatggcggaaagcattatgatcatccggaaccaccagtgctcagtgctcacacatgagagctatgtatgcctccgttccttgtgatgacgcaata

SEQ ID NO: 300862 - DNA, 423 bp, Zea mays
aacacgcgtccgcccacgcgtccgcccacgcgtccgcccacgcgtccgcggcaatggcctagaggttactagcgctggtgcagggaatgacaagtgaacagagaccgtgatttgcagtctacttctgttttatcgtgcaatacctcagcaaaccctgcctacatgatgcgatcgaaaccggagacgttcctggtcaagcttcgttctgtaacataaataaatccgaagcacttcaaagctctacatactcgcccttgcttgtttgagacaagggcttgcgttcttgctgcatctcatccgagatgattgtaatccgaacaatgtctagttaataaagatgtcgctttgccctgaaaatgtttaacgctgtaaacatcgctctgtacgtgattggatttcctacatgacaattggctaatggag

SEQ ID NO: 300863 - DNA, 425 bp, Zea mays
aaagcgtgtccacatcgtctttgaagacgggaaagcttctcttcttccaccacgatactaaaaaggctgcataccttgccgtgatgcgatctgttagcagctcaagcagatacggttttgatgctcgccttataatctacagagaagcatctgaaccacacgagaaatcacgtgtctcatgatccctgactgcatcaccggatcacgacatcgttttggatgcaatgaagttgatgttgacggatgaggtgcggaatcacgattcattctacatccttggtggcattagcatagaaagacgagacattgcatggacctggttgaacgaaaactgcgatcacgtgttgaatacatggaactcgaattcactcatatcacacatcatcgagtcaagtgtcgcacggtttacctccgaagagaatgct

SEQ ID NO: 300864 - DNA, 401 bp, Zea mays
accacgcgtccgggaaccggtccatcactttcacgctcagctccatgcaatggctgcctccaccatggagatctcctccacggcgatggccggcacccccatcagcgtgggctccttcggcgacggccgcatcaccatgcgcaagaccgtgggcaagcccaatgtggcggtgtctggcagccgctggtacggccccgaccgcgtcaagtacctcgggcccttctccggcgagcccccgagctacctcaccggcgatttccccggcgactacggatgggacaccgcccggctgtccgccgacctcgagaccttcggcaagaaccgcgagctggatgtgatccactcccgctgtgccatgcacggcgcgctcggctgcgtcttacgcgagctgctctctcgca

SEQ ID NO: 300865 - DNA, 266 bp, Zea mays
gcaagactctaaagtgagtcttattaaactctatcaacgcggatggtactctgttgtttatagtccctgctgctaaccacccttgttgctggtgctgctggagaggcattgtacctgtccatgcatatatgatatatatgttgtaacgttgtgaaagcaaacaatcttgggtaccaatgtttgttaaaaaaaaaaaaagaatcaacaagactaaaataaagacaactaaataaaaacagaataaccacgaagcagatacacatcat

SEQ ID NO: 300866 - DNA, 415 bp, Zea mays
tcgcgggacgacacacgcgtccaaacacgacgtctgacccaacgcgtccggtgtgtttcgacatggacgcgaacggcatcctcaacgtgtcagcggaggacaagaccaccggacagaagaataagatcacgatcaccaacgataagggacggctaagtaaggaggagatcgagaagatggtgcaggaggcagagaagtacaaagccgaggacgaggaacaccagaagaaggtgaacgccaagaacacgctcgagaactatgcctacaatatgcgcaacaccatcagagacgacaagatcgcctccaagctaccggtggacgacaagaaaaagatcgatgacgccgtcgagggggccatcaattggctcgacaacaaccagctcgccgaggttgatgagtttgaggacaagatgaa

SEQ ID NO: 300867 - DNA, 403 bp, Zea mays
gattcatctggaaagaacacctaagcttcgaggcaaggttgtccttgtacagattgttaatcctgcaagaagcatcggaaaagacattgaggaagcgaaatatgaagctgaatctgtagctcaaaggataaatgataaatatggttctgctaattacaagcctgttgtcctcattgactactcaatacctttctatgaaaagatcgcattttatgctgcatctgactgctgtattgtaaatgctgtgagggatggcatgaatttgataccgtatgagtacaccgtatgcaggcagggaaatgaggagcttgataagctcagaggtcttaataagagctcatctcacacaagcacacttattgtgtctgaatttgtgggttgctctccatcacttagtggagca

SEQ ID NO: 300868 - DNA, 415 bp, Zea mays
gacttgtttcattgattcttgaagagatcgagcttcttttgcaccacaaggtcgaggatgtcttgcaactgcggatcaagctgcggctgcggctcaagctgcaagtgcggcaagaagtaccctgacctggaggagacgagcaccgccgcgcaggccaccgtcgtcctcggcgtggccccggagaagaaggccgcgcccgagttcgtcgaggccgcggcggagtccggcgaggccgcccacggctgcagctgcggtggcaactgcaagtgcgacccctgcaactgctgatcacatcgatcgacgaccatggatatgattattatctatctaccttgtggtggtggttgaacaataataagcgacgccgatctggctgccatacataggtattgtgtggtgtgtgtgagagagagag

SEQ ID NO: 300869 - DNA, 402 bp, Zea mays
cacacgcgtccgcggacgcgtgggcggacgcgtgggcggacgcgtgggcctatatagcccttgatccgagcttttactctagatcttcaggacagacatcatcatcagttccatccagggaacctaatactaatatagggtcaaaatatcctcaaaatgatattgggaatgaggagcttgatgagcgccagaacaagcctataagatactcagagatgaacttcaaccagtgaagcatcttgtaaggtgaactgcatctgaataagctggttatggtaatgcacggttttgccgcgtctggaaatgtcaaaattgttgccgcgtctcaagacctggaccggtgctgaagagagcttgataataatggttttcgttgggtgacaaagtttaagagtttttttt

SEQ ID NO: 300870 - DNA, 416 bp, Zea mays
gtcgaggccatctcggagggcgtgcccatggtctgctgcccgcggcacggggaccagttcggcaacatgaggtacgtgtgcgacgtgtggaaggtaggcacggagctcgtgggggaacagctggagagaggccaggtcaaggccgccatcgacaggctctttggcaccaaggaaggggaggagatcaaggagaggatgaaggaattcaagatcgctgcggccaaaggcatcggcatcggcgtcgacgtcgacgaaactgcgtcgccccgcacggatttaaccgatttggttgatctcataaaatccttctgagctcatgacgatcgatctgttgggtgatgcctactctgtccatcgtgatgtaccactgtctgtgctcacttccacgttcctgacggtgttgtgttctagtgtat

SEQ ID NO: 300871 - DNA, 374 bp, Zea mays
atcatttatttttgtcaggctagtcgatccaaataattccatactataacgtcttgtagtagttattttatgattgcttgtgccaaccttaaatttgctaacagtgccaaacttgacagagggcctatcgaagcatctcacaaactgtgttcactcaaaattgtctttcagccgattcctgcaatttcgggatccacgtgcccagaggcgacatccccttgttgatcccatggtcgtttcagagatccggcgatgcctcaacgaggggattgaattccaaggcgagctgctaaatttccggaaggatggcgctccactttacaacagattaagtctcattccaatgcacggggatgaaggctacgtgacacatg

SEQ ID NO: 300872 - DNA, 450 bp, Zea mays
tccacccgacccgtccggactcctgcctccgcggccgtgccgagccggcatccccttccgtcccccacccccagcagttgggcttcaaagaagttcatgactggatgtgtaattctcttccccatagcaataacgttctacatcacctggtggttcattcattttgttgatggattcttctctccaatctatgctcaactgggaatcaacatattcggtcttggctttgtcacatctgttactttcatatttttgatcggagtctttatgtcatcttggcttggggcatctgtccttagccttggcgagtggattattaagcgcatgcctcttgttcgtcatatctacaatgcatcgaagcaaattagtgctgcaatatcaccagatcagaacaaacaggcgttcaaggaagtggtcatcataaggcatcctcgtgttggagaatatgcg

SEQ ID NO: 300873 - DNA, 423 bp, Zea mays
accacgcgtccgggaaagtccaagcatcatagagttaccactgagcatggtgtcgaggcatcttccatgcatgacatcaaatctagtacttttggtggtactgacagtgggatggtctggcatataccaaaggctcatctaggtagtgtcacaaaggtaacgaccatcccaaataccagcttgttcttaaccggaagcaaagatggagatgtgaaactttgggatgctaaaaactcccagctagtctttcactgaaaaaaggtgtgccgttcatgcatctttgtccagtgaaagactagctggggctttggcggtgttgttagagctgctgtaacagatctccaggtgttgccaaaggtttcgtttcatgtggaggtgatggttctgtgaagcttgttcagataaaagatgatctcgctgcag

SEQ ID NO: 300874 - DNA, 422 bp, Zea mays
atcaacttcgcctcagcgcccaaccggcttggcaggaggctcgtggcccgggccgacaacgaggccgccgcagctgaggcggcggaaggggagggtgccgtggccaccaagcccaaggccgagaagccgccgccgatcgggcccaagaggggcgccaaggtgaagatccttaggagggagtcctactggtacaacgggatcggcaacgtcgtcaccgtcgatcaggatcccaacacccgctacccggtggttgtgcggttcaacaaggtgaactacgccggcgtgtccaccaacaactacgccttggacgaggtctcagaggtgaaatgagtggggccggccggctcaagggctccgcgctagctaccgtgtgattgatttgtagtagttgtgaaatgaggctgtgaagctgcatgctgtgc

SEQ ID NO: 300875 - DNA, 431 bp, Zea mays
aggacgcgtgggcggggtcgaagaggagcttggagcttggaccgacccgagccccaccgagcgagagagaggaaataatgggtgaagaggccagctgcaacgccgtcagcgcgatggaggccgccaccaacgccaggccggccaaggagaacggacgcgcgccggctgtggcggaggtagtggcccaggaggcggccactgacccccggctgcagggcatctccgacgccatccgcgtcgtgccgcacttccccaagcacggcatcatgttcaacgacatcaccacgctgctgctgcgccccagggtgttcaaggacgccgtcgacctgttcgtcgagcgctaccgcgggatgcgcatcgacgccgtcgccgggatcgaggccaggggcttcatatttggcccggcagtcgcattggctattggcgccaag

SEQ ID NO: 300876 - DNA, 419 bp, Zea mays
acaagactctaaggtgagtcgtatgacccgcggcttcggcttcgttaccttctcctccgagaactccatgctcgacgctatcgagaacatgaacggcaaggagctcgacggccgtaacatcaccgttaaccaggcccagtcccgtggcggcggcggcggcggcggcggcggtggctacggcggcagtcacggtggcggcggctatggtggctggcgccgtgacggcggttatggcggtggtggcagctactgcggtcggcgcgacggtggtggctgcggctacggaggcggtggcggctaccgcggtcggcgcgagggtggtggtggcggctactgcggcggcggcggccgctggagggactgatgtgtggccccatcctggcttccgccgagttatcttatcgatctatagtatcgtg

SEQ ID NO: 300877 - DNA, 429 bp, Zea mays
gcacaggtccaggactcgcgggtcaacacaagcctctacaggcattggtgatatcgacgccgcgctctgcctctgcaccaccatcaaggccaaggcgctcagcgtcagcctcgtgctccccgtcgccatctcggtgctcgttaacgagtgcggcaagcatgtgccctccagcttccagtgcccgtaatcacatcagctgcatatatgtgctactatgatgtatcaccaccactaatctatatccgcatgcatgcatcaatgcatgggtgattaagggtttatacgcggtcaaagttatacacgcatatatatgtagcttcatacatggagctgtgggttgtgcattcattttcaaatcatgtaccagtattatattgtagtatcataaaccagtgtgagagttgtggccttggtgggggtgcttgtaag

SEQ ID NO: 300878 - DNA, 385 bp, Zea mays
aaataactcaccacgggtcacacctcttgtgcttctgcgtcccaatgtgagtctcgtcaagaccatgcactctgtcactgtgtactcaccactgaccgctactcctgatgctgacgtagcactctcaatccgcagcgtactatctcgcgcgaggttcttacgaagttttgtgatggtacccatgatagtctcgggtttagggcgccaagccggaacgtacacttcgacacgaattaccttagtaagaccacgaacagtactacaggaatctgtactgaaaatgccgcgtgtaatagtagaggctcccatagtaatgacgtatttcggttcaggcatttgctcatataatcgcactaaagatggagctattttcattgttaccgta

SEQ ID NO: 300879 - DNA, 300 bp, Zea mays
cccacgcgtccgcgaccacgacgagctgtagatggtggtggggagcggtgacgtggagtgccgggaaccaagccaaattttgtaatggtgtttaggggggaaggtggtggacaaaaaaacaaatcttggtgctgctctgcaaataaacggcctgaccaaaaaactttttcccctccaactcccttgtaatggtcctttttataaaggatccccatgggaatgtaatgtaaaaaaaaaaagaaaaacccccttcaaaaactgtgtacaacatttaaaaagtgaaagggcacatcacagtat

SEQ ID NO: 300880 - DNA, 406 bp, Zea mays
atcctttgagcagtttgggcgctgagcaagtccagtgagagagggagagcggcgagaggatggctgggatggcgtccctgcaaggcgccatggcgtccccccccaaccccgccccaagccccgccaccgcgaacaacaacaacttccggggcaaccggctccccaactactccgcgccgcaacctggggtaaggtttaaggtcaagatatgcccaattgaaatgagacttaagagatgggagcgaaagaagtgtaaaccaaacagtcttcctgtgctgcacaagatgcatgttaggatcggggacacggtacaggttattgcaggccgtgagaaaagaaaggttggagaagtcacacgccttttcaagcacaacagcacggtgatcgtgaaagacctgaacttgaa

SEQ ID NO: 300881 - DNA, 256 bp, Zea mays
gatcagcacgaggtccttcaccgtgcgtgcctctctccgcaaggccactggcaccgccgccgtggccgttgccgccagcgtcctgcttgccggcggcggcgccatggcccaggaggtgctgctgggcgcaggcgacggcgggctcgtcttcgagcccagccagttcaccgtcaaggccggcgacaccatcaccttcaggaacaacgcctgcgtcccgcatatcgtcgtgttcgatgaagacgaggtgccgagcggc

SEQ ID NO: 300882 - DNA, 285 bp, Zea mays
cggacgcgtgggcggacgcgtgggcggacgcgtgggggctgacggctcctccttattaatgtgtactattagaacatcaccgtatcctttggcaattgttctcatctatctgggtctatctgttggctgcccggtgacggtatacggtgatgttctaatagtactcaattggtcttggagttcatgctacggctcctctgttatatattacacggctgacggctcctccttattaatgtgtactttgatgatgtcattaataatatgaatctgatgatattgaat

SEQ ID NO: 300883 - DNA, 377 bp, Zea mays
ggcatgcagccatgcaggcttagtagacgaagcactgcgttatttcgaggcaatgcacggagactacagcattaccgctgatgaggctcactatgcctgcatcgttgactgttttggcagagcaggtcagctccaacgggcttatgagttcatcagaggaatgccggtggttccaaatgcttgtgtgtggggtgccctacttagcagttgcaggatacacggaaatataggcctagcagaaattgccgcgaagaagctcgttgagctggaccctcagcattctggatactggatgctgctaaaggatatgtactcaaaagccaagagatggaatgatgtatcgcaacttcgagctgctatgagagataatggcgtta

SEQ ID NO: 300884 - DNA, 419 bp, Zea mays
cgttcgacatcgacaagatgctcttcatggactggcgcgactcgcacctccccgaagggtcggagatcagggagcgcaaccgccgcatccccaccttcctctacgccatgcccttcttcgacctggagccacactactggcatggtttcctgtcatccagactgttcctgccggagctcttgatgttcggcctcgcactgttcgggaacgcctccaactcgtcgaggctggagatcatggccaagggcaccgtgcctcttggcaagatgattggcaacttgatacaggacagagatgggtgaggagggtatgtatacctacatttttcacgtgaagatctgatctccattggatctctgattttggtatccatgattttcactgtatttacgatttgcaaagatggattcacaaaacac

SEQ ID NO: 300885 - DNA, 357 bp, Zea mays
cacgggcgttcagggcgccgtcaacgtgcagggcgaggaccagaagaagctcgatgtcgtctccaacgaggtgttctccaactgcctcaagtcgagcgggcgcaccggcgtgatcgcctcggaagaggaggaacttcccgtaaccgttgaacaaaactactcgggaaacaaaacctcctgttcaacctcctcaatggtccttcaaaaatcaaccccgccgtctcaactggctcaatcttcggaatctacaaccccaacaataattgcctcgccgacttcaacaaaattaaaacccttaatccgttgaaccaaagttcaaccttaaacttttgcaacccgggaaccaccctgctggcc

SEQ ID NO: 300886 - DNA, 384 bp, Zea mays
tttaatcgacaacatttgaataatatgtacataacattaaaaagcgtatacagctggtgataacgttgctacatccaaatagcgtgtagcatgcctagcaagccaaacatattaccttacagcaagcatcccattgccgcttcacacatctttgctgccttcgatcggacgcgtgggcaatcattgtttttggcaacaaaattagcacacaaactggaattggcacgtccattgccatagctggtgttgctatgtactcttacattaaggctaagattgaagaggagaaaaggaaaaagagcgcatgactgctgtgaataatattatcgagaccttcctcggacacaacatcgtcgacaatcacgacctacttctatatcttgt

SEQ ID NO: 300887 - DNA, 417 bp, Zea mays
  unsure (1)..(417): unsure at all n locations
acggacgcgtgggggcagctgcacgtgctttggcaatcctaggggagaatgagaacttacgtcgagcaataagaggaaggccagttgcaaagaagggtctacgcatcctatcaatggatggtggtggcatgaaaggccttgcaactgttcaaatgcttaaacagatagagcaaggaactgggaaacgcatacatgaaatgtttgacctcatatgtggtacatccactggtggcatgcttgcaatggctcttgggatcaagcagatgactttggatcagtgtgaagaaatatacacaaaacttggaaaacttgtatttactgaacctatcccaaaggatgaagctgctacgtggaaggagaagattgatcaacttttcanaagttcctcacaaagttttagagtgggtgtacatgggt

SEQ ID NO: 300888 - DNA, 356 bp, Zea mays
gctttgatcatgggggagttaagatcaagaggaatcttaaatagtcacactttggcgtaccaggtaaatgctattaaaatttggtaggtaattgtttcactaacaacggagttgtgcccttatgttttaatgatcaccttgtaagaacactaggaatggaaactgccaagttatataggcttcaggagttaccagttccttaattttccaggtcaccattaactagtgttaacatttattgtacacgcagagtcgggtggggccagttcaatggctgaagccatatactgatgaagttttagtagaacttggtcaaaagggtgttaagagcctcctggctgttccagtaagctttg

SEQ ID NO: 300889 - DNA, 397 bp, Zea mays
cggacgcgtgggcggacgcgtgggcggacgcgtgggcttcgccgcaccagcgccagcccgcgccgtggtcagaaggaggtccttcaccgtgcgcgcctctctccgcaaggccaccggcaccgccgccgtggcaatggctgccagcgccctgcttgccggcggtgccatggcccaggaggtgctgctgggcgcaggcgacggcgggctcgtcttcgagcccagccagttcaccgtcaaggccggcgacaccatcacattcaagaacaacgccggcttcccgcacaacgtcgtcttcgacgaagacgaggtgccgagcggcgtcgacgccaccaagatctcccaggaggagtacctcaacgcgccaggcgagacctactccgtcaccctcaccgtgccg

SEQ ID NO: 300890 - DNA, 410 bp, Zea mays
cccgggcttccccgacggcatcctcggcgccgacctcatggatcgctgccgcgcgcagtcgctcaggttcgggaccaagatcctcaccgagaccgtcaccaccgtggacttctccgcccgccccttccgtgtcgcctccgacgacaccgttgtgcacgccgactccgtcgtcgtcgccacgggcgccgtcgcgcgcaggctgcacttcgccggctccgacgccttctggaaccggggcatctccgcctgcgccgtctgcgacggggctgcgcctatcttccggaacaagcccatcgccgtcgtcggaggcggggactccgccatggaggaggctaacttcctcaccaagtacggctcgcaagtttacatcatccaccgccgcagcgacttccgggcgtccaagatcatgc

SEQ ID NO: 300891 - DNA, 416 bp, Zea mays
gcactccaaggtctgcggcacgcgcgagtaccgctgcgactgcggcacgctcttctcgcggagggatagcttcatcacccacagggctttctgcgacgccctcgcgcaggagagcgcccggctgccgcccccaggcctcaccgccagccacctctacggcgccaccaacgcggccaacatggggctcagcctctcgcaggtcggttctcacctcgcatccacactcggtgcggacgctcacggccaccatcaggacctcctccggctcggtggcagcaacgccgcgagccgctttgagcatcttctggggccgtccaatgcctccgcgttccgccccctgccgcctccaccatcgtcggcattcctcatgggcgctccgcaggagtttggcgcaggcgacggcagccggtcccacg

SEQ ID NO: 300892 - DNA, 412 bp, Zea mays
accacgcgtccggtctagcctcctcaagtcctccttcgcgggctcccggctcccggccggcaacccggacaaaacggggttcctccttggtggcaacgggcccccccggccccggcccggggccaacctgcccttcaagttcaagttcttcttcaaaccggccttacaacttgacttccttcgggttaaccccattcaaggattcaaccttttccggcaaaatgaccgttcgctacatgacggatatgttcactataccagacacggacttcgacatcgtgggcgccggctccgcggggctgtcgtgcgcgtacaatctctccagggaccccgctgtgcacatcgccatcgtggcacactctgtgtcgccgggcggcggcgcgtggctgggcgggcagctgttctcggccat

SEQ ID NO: 300893 - DNA, 396 bp, Zea mays
cggacgcgtgggcggacgcgtgggggcggcgaggcggcggcgatcaaggaggaggacgcgcgcggggcgctgcggctgaagctcgtcgcggtggcgtccatcctggcgtcgggcgcggcgggggtgctggtcccgctgctgggccgctccgcctcggcgctgcgccccgacggggacgtcttcttcgccgtcaaggcgttcgccgcgggggtcatcctcgccaccggcatggtgcacatcctgcccgcggccttcgacgcgctcgcgcccccctgcggcggcggcgccagggccggcgggttcccctacgcgggactcgtcgccatgtgctctgccatggccaccatgatggtcgactccgccgccgcgggctactaccagcgcgcgcacatccgc

SEQ ID NO: 300894 - DNA, 411 bp, Zea mays
  unsure (1)..(411): unsure at all n locations
gactacgtgtgggtgcagttctacaacaacccgccgtgccagtacagcgcgagcgccggcgtgggcagcctggcgaaagcgtgggcgcagtggacgtccatcagggcggggcgggtgttcctcggcctccccgccgcgccccaggccgctggcagcgggttcgtgccggcgagcgacctcgtggcgcaggtgctgccggtggtcaagaactccaccaagtacgggggcatcatgctctggtccaggtactacgacgggctcacggggtacagcgacgcggtcaagtcctacgtgtgagctagccagcctcgtgtcatgtcgggcgtgcaggagggagtangactgtangaggcacatgcttccatgtgcgtgcacgtgccgggcgttatcatacctatgggtatactgggt

SEQ ID NO: 300895 - DNA, 380 bp, Zea mays
tagtagaggcaagcaaaagggcagggatagagcgccgccgagatatctagctagaagagcctagaagccggtgtagaggatcaggaggatgtctgggtcgtccggctccggcgtgtgggtgttcaagaacggcgtgatgcagctggagcagccggccgcggcggcgagccggaaggcgctggtgtacgtgccgacgaacgaggtggtgcggtcggtggaggcgctggagcggcggctgggcacgctgggctgggagcgctactacgagaaccgcagcatcgtgcagctccacaagcgcgacggcggcgccgacctcatcaccatcccgcgcgacttcgcaagcctccgctccacccacatgtacgacgtcgtcgtcaaga

SEQ ID NO: 300896 - DNA, 416 bp, Zea mays
cccacgcgtccgcaaagacaacatctactgagcatgtgcagcctccaggacaaccagctgccaagagaagaaaaaggagcagagcctcaaacaaaaattcgacagatgagttctcacaaattcgtaaacgggttagatacattttgaaccgaatgaattatgagcaaagcctaattgaagcttatgctagtgaaggctggaaaaatcaaagtttggataagataagacctgagaaggagcttgaacgagccaaatcagaaatcttacgatgcaaattgagaatacgggaagtcttccaaaatattgattctcttctatccaaggggaaaattgacgaatctttatttgattctgaaggagaaatatcttgtgaagatatcttttgtgctacttgtggttcgaaaaatgctacattg

SEQ ID NO: 300897 - DNA, 342 bp, Zea mays
aggacgcgtgggcggacgcgtgggcggacgcgtgggcaggggattatgtgagtttgcaaaaagccaaaaaagtctatacgcgtatagaatttgcttgcttgcttgacagccagccaactgttgtcgaatgatagttctggcgttgctaactgtcaggcttttgaaagcgagtcaaagacggtccagctcgcgaaaggtaccggcctgcctgcgcagcagaacaaacctagctacgaggcattaattcgtttgatgtgcctttttggactcaaatcgattctctctctctttttagaatataaaaaacaagtaaaagatgaaaggtaaggataagatcaatca

SEQ ID NO: 300898 - DNA, 415 bp, Zea mays
cactagcaatagaagcatttggaaaggttggctccattgaccaggcagaaaagatatggatccatataaaatcaacaaagaagttaagccttacagaacagtttaattctatgttatcagtttactgcaggcacggtgttgtcgataaagcatcatctgtattcaaggaaatgagagcaaatggatgccagcctaatgctattacttatcgccacttagcattgggttgcttgaaatcaggtcttgttaaagaagctttgaacacaatagatatgggaaagaaggaagtcgtcactaaaaaggtgaggagttcaacaccatggttggagaccacacatctgttgcttgagaactttgcagaaattggagacttggaaaatgcaaagagactgtacagtgaactgaatgaatccaa

SEQ ID NO: 300899 - DNA, 411 bp, Zea mays
cccacgcgtccgcccacgcgtccgcccacgcgtccggaaagccctcgaagcagataaggcctaccggctgccgccgtgcccgtgccggtgcccgcgctcgaccaccgccggccatggtcggcgtcgccctcgcgccggcagtgtcccgcgtgccttgccttcccggcgcttccttccacgcctcgcgcccctcctcttcggcgcggctcccggccaggccgcgggcgcgggcgccgccggagaggctcgtggttgtcgcgcggtactcgtcctcgtacgaggtcgagggcgaggaggaggaggaagatgaggaagggctcgggggcggcggaggctgggggaggagggaccgcgggcccgaccccgactacgacccggcccttgacatcgaacgcatcgagtcctcgaccg

SEQ ID NO: 300900 - DNA, 178 bp, Zea mays
atgggatgtgtcacgtgcctataaataggtgaacagtacccccgtactgcgggggctgacttggcatttgctttagcgtcacgcttgtactttcgccttctttcaagccgaaggtacatttgtaatttgatattatttctaattttctataataataatacagaaacgagttgataat

SEQ ID NO: 300901 - DNA, 357 bp, Zea mays
accacgcgtccgcccacgcgtccgcccacgcgtccggatcttgaagcgcggcgaggaaccgcccgctccagctcccgcgccagcccctacgccggtgatagcagcgccccccgctgcgcaagccgcggcggttgaccagcgcgccctctgctccactggtcggatcgggccgcaggcgcccgccgtggtgccgacgaagaagatggtgtcgctccccgctgcatctccagccaacgcgcccgtgttcgcgcgccgggtgttttctgccgcggtgcccgccttggtgccgacgaggaggacggcaacggtcccggcccaatcttcagccaaagcccccgtgttacctggcctggcgtt

SEQ ID NO: 300902 - DNA, 331 bp, Zea mays
agaagcacaagcgtaaggtgttggcggggtagctagaaagaactgctgcaggttgttggcccctgctgtcgcggccgtgacatgggatgggaggaagcttcccttcggtgaggtaatcaagagacatgccattgaggagcattttacccggttcttgcattatgaattggatgcaattagaaaggcttttgcaaccttggaaaagggcaaccttccccaagttacatccatagtggtgcaaaagcgccatcacacagtgttttgccctagaattcatcgtacacacagacacccagatcgacgtggaaatattttgcagggatgatctata

SEQ ID NO: 300903 - DNA, 347 bp, Zea mays
attgctctgatagcttgctccaggacgtacgtacgtacgtagatcgatccatcgatcgctagctaacctgaacgaacaaggggttcctcccctccggcggcaataacggcccctcctttaagggcggccccggtcgcgcaattggcaacaagaagtccttcaacgttcgtggctctcttcggaagggcaatggcaacggcgccgttggcgtttgccgcaagcgtcgtgcttgccggcggcggcgccatggcccagaaggtgctgctgggcgcaggcgacggcgggctcgtcttcgagcacagccatttcaccgtcagcgccggagacaccatcactttcaagaacaa

SEQ ID NO: 300904 - DNA, 406 bp, Zea mays
acagtgggccttgtcgcctccaaggtcgatactggaggcgccgaaggtaaatacaatggacagagctcacatttctccaggcaccttccaatttctcttgactacaatgtgatgagggtgaaaggaggacgtatgggagccgtgaatggtatgcatccaaatgggaaggtagatgaaacctgtatgcagtcaagagaaatctggacaggagtaacacatagtttagcagcaacgatgctgctccatggaatggagcatcaggccttcactactgcagaaggcatttatactgcaggatggtctgaagagggctatgggtactggttccaaactccagaagcatggacaattgatggccattacaggtcactaatttatatgcgcccccttgcaatctgggcaatgc

SEQ ID NO: 300905 - DNA, 238 bp, Zea mays
ggaagagagaatcctaccaaacctagctaccaactcgatcgtcgtcatcacgctccaccgcggcaccgagtacgtgatcaacgcggcggcggaggccggcacggtgcggcgggtggtgttcacgtcgtccatcggcgccgtgaccatggaccccaagcgcgggcccgacgtcgtggtcgacgagtcgtgctggagcgacctcgagttctgcgagaaaaccaggaactggtactgctac

SEQ ID NO: 300906 - DNA, 313 bp, Zea mays
accacgcgtccgcccacgcgtccgagtggacaaggtggagaaattcttgacatcacacctacagagatccaccaaagagtgcctctgtacattgggagcgtggaggaagtggacaaggtggagaaattcctggcttgaatgtccctgcttcatgccagagctctctcatcagatggactccccaagacatcaagtttagggagggaatatgtactctctctttcccaccccaaataagtcttcttcgtctcatatttcgataaatcaaacaatctcaattttgatctaatatatacacacaacattaatattt

SEQ ID NO: 300907 - DNA, 394 bp, Zea mays
agtgtgttaagaaaaataaatcctgactggaagcttgatattgcagtccctgattatgtggaagggactgcaaatctagctaactctatgtacaaccaggctcttggagtgcccacagggtcccatggtgctttccgtgattatcaagttgatgcggtttctttagaattttcaccaacatttcatgtcaaaaatgagaatgctaaatctttgtttcttctgaagggtggaaggttaattgaaggagtggcacgttctgtgaacaatctgcttgagaagttccatcagtcctttttcctgtacttccttacaggtccaagcaagttcatttcggttggtgtgtatatgattccgtttgcattgcttttggcacctctcccaatagttgctgctg

SEQ ID NO: 300908 - DNA, 132 bp, Zea mays
aggacgcgtggggaaaatttaccgtaaggtgtgtaaaataacttctgcatactgatctgccccctctatcagttatatacccagctatagcaatgatctccatcctatccagtaatggatttggtatcgcga

SEQ ID NO: 300909 - DNA, 396 bp, Zea mays
agaggagggtgccaagctatatacctcattactcgaagagaagggtggtttgcagactctcttgaaatatattaaggagaataaccctgacaaactttctatagcacttgcttcatcacttgacactgttgctgaattggagctgttacaggctcctggtctgtcctttctcctgcctcaacagtatatagaatatccaaggctgacaggaagacgagttgttgaattcacagttgaaaaaggtgatggttcaacattctttccaactggtggtggtgaaccgaaaagtgttgctacaattcaggtcgttattgatgggtactctgccccactgactgctggaaactttgcaaaattggtcttggatggggtatatgacggggtaacacttaaatg

SEQ ID NO: 300910 - DNA, 421 bp, Zea mays
acaatccaatccaatccagtcctaccccgccccttccaagatcttcaatcgtccaacaaaagcaggagtcgcatcccagaccaccccccccgcatcagagacaggcagggagggaactgagatccgtccgtccgagtcgatggagtcaacggtggagcggataagctcgtcagtgcagtcctgggtgaaggaccacgagctcgcagccatcggaggcgtgtgggctgcggcggtgggcgcttcggtggcgtacaaccggaggaaggcgccgcagcactcccgcacagagccagcgcgggatccgcagcgggggcgagatccggggcggaggcgacggcggacggtgcctgtgcggtcgtgggggacgggcacggtgggggctggtgggctgcttccatgtgcgcccgtgggaaggtgcggg

SEQ ID NO: 300911 - DNA, 421 bp, Zea mays
ccgggtcgaacacgcgtccgaccacgcgtccgcccacgcgtccgcccacgcgtccgcaactccatggacatctgggagttgtagtcggcgatgagcttgtcgcgggccgacctctccatcatgtagatctccggctacaactccatggacatctgggacttcaacgagaagtacggcgagctctgggacttcaccgtcaacaccagggacgacatcgtcaagtcgacctagatgcattgcgtacaccgctcgctgcccttcagattgttgcctcacagcaaaaaaaaccctgtgaaaggaagctgtagctgctaggaaaatctcttgaataaaaacgaaagccatccttcctgtaagactggagagcctgaaaatctgttctatcctcgtgccatataatacacgacatgttctgcagact

SEQ ID NO: 300912 - DNA, 375 bp, Zea mays
caccatggagtttgtagtgtttggtttacaaggtaacttccgcgttcgagccccaccgtgacgatgaggtttgggatgaacttgggcggggaaacgagcaaaagaaaacagaatagaacaaacgaaccggcttcagcccatgcgaaccaggagaagcggtgggtgctgtctgatttcgaggttgggaaacctcttgggaggggcaagtttggccatgtttatcttgccagagaaaaaaggagtagtgagattgtggctttgaaagttcttttcaagagccagctcaagcaatcacaggttgagcatcagctgcgacgtgaagtggagattcagagtcatcttcgtcatcctaatattcttcgcctgtatgggtac

SEQ ID NO: 300913 - DNA, 411 bp, Zea mays
ggagtttgatccacaaacctgcacttggtctaccttgcgtacttatggaaggtcacctaattcacgtggtggtcagtcagtgacccttgttggagacactccagtggtctttggcggtgaaggtcatgggagatctcctccgaatgatctgcacaatcttgatcttgagaccatgacttgggatgaatttgagaccacagggactcccccttccccaaggtcagaacatgctgctgcttgctttgcaaaacggtatcctctgatatttggcggggggtctcattccacatgtttcactgacctacaactccttgacactcagacaatgggatggtcaagaccaaagcaacaaggtgttactccagaatcaagagcaggacatgcaggtgtaactattggggaatattggtt

SEQ ID NO: 300914 - DNA, 341 bp, Zea mays
aacccgtgggcggacgcgtgggacgcgccgtacgggcagggcttcgcgcggcacaaggccaccggccgattctccgacggcaagatcgtcaccgacatcaccgccgaaacgctcggcttcgagagctacgcgccgccgtacctcagcccgcaggcgtcggggaagaacctgctcaccggcgccaacttcgcctccgcggcgtccagctactacgacgacacggcggccatgtatgacgcgatcacgctgacccagcagctcaagtactacaaggagtaccagtcgaagctggcggcggtggccgggcgcgctatgggccgcgccatccttggcgacgcgct

SEQ ID NO: 300915 - DNA, 369 bp, Zea mays
ctcgtgtagcaatccagggccgatacacgcgtccacacaagcgtctgagactttgtcaaacttcctatgtgaaaaagttgctagaaaaggtcggactgagccagtgcaacccatgttcaactccaatggaagctaagctgaaactgtccaaggacagtgattcttctcgagttgattcatctgaatatacaagtttgattgggagtctgaggtatttgttgcacactaggcctgaactgaatttcagtgtcagttatctgagccgttttatggaggcaccaagtcaggatgaccttgcagcagttaaacatttacttcgatatgtagctgggacaatggagcttgggctgttttatcccagaagaacac

SEQ ID NO: 300916 - DNA, 293 bp, Zea mays
actcgtctagcactcgcgggtcgacacacgcctccatactaactcgtaccaacgcatcagcacgtcagggagtcataaatggagcatcctttgggtctgaactttggtaaacatcatctccctatccggagaaacatgtttgtgtggtcacaggacttccagccaaataccgtgatcccaatacaaggctgccttattcaactacggaagcatttaacataatccgggagagtttcctgaaagaggaggctgatagaaaccgtccgaaacatgtccactactggagagctttt

SEQ ID NO: 300917 - DNA, 292 bp, Zea mays
aatacgacagcggtcgcgtgggcccacgcgtccgccgacacctccactcggcttctgcttcgtcaccttctccacagaggactcgatgctcatcgccatcatgggcatgaaccgtaaggagcatcgacggccgcaccatcaccgttcacgaggcccattccctctgcggccgtggaggaggccgtggcggatactgtgacgggcgccgtgatggacgcggatactgcggtggcggtggaagctaccgcggtggtcgtggacgctaccgaggctgtgggggatacagtggtgc

SEQ ID NO: 300918 - DNA, 388 bp, Zea mays
cggacgcgtgggctcgccgtcgcttgtggcagaggagcagcttcacggttccaaagacaccttgaccttgaagggcgagaaggctttgctcgagttgcttctaggcatggctctggaccagcacgttgacggcaggaagctcattacccaacaggaggctgaggatagtgatttcgagagctatttgagagaagcaacaagccgagtgctttaccagccaacattcattgaagaggatgatgatgatgattctgtttcggagagctcttcagcatcattggccaaaccagctggaactttggatcttggcaagctgacagaggaaccacagcctcaccgcagtgtggatccaaaccattcgtatgatcaagtgtttattagatccact

SEQ ID NO: 300919 - DNA, 374 bp, Zea mays
gacgcaggcctctacacatgacgtcatattaacgcgtgggcgatcgaaacgtggtcttgaattaactatgatctctatgagcctggagatggatcaacccgtcgtgcgttgtttcattttgtgatgaatgggagagagggtatgggacaagattgatcaacccgtcgtgcttacgtctcgttaattaggagagctaccgctcggatttggtgatttgtaatacaacaaccagtgatgaacaacttcattcacatgtacacatccatcttgaggtgaccgaagatattagacgcaccaaggtgaggacgaacaatagacggttgacacgtcagtgcccagcgccaagctacctccaaacaaaaaggggggccgcc

SEQ ID NO: 300920 - DNA, 390 bp, Zea mays
aagatcaagctggagcctgatctgattcatgtttttttctagattaccacagttgatgaagcaaagaaattatacatgttatttgtcattgtagcccagaaaagataatggaaacattagccccaaggacaaataacatgtataatttctgggctacaatgaagtatttctcaaatttgcgcaagacattgggtcctggaattgatggctgggaaatatctttggaaggaatgatgagcatagtggtacttcttggacttgcatctattggggagtgagcaagtttgttttgaatgatccttcattgtcaaagtcttatcgtaagaagaaaaagatgtcgatccacccgtcaagaacaaggtgcagcggagatctttctcctcgtcgctg

SEQ ID NO: 300921 - DNA, 420 bp, Zea mays
gagtcacgacgtccgagaagcccttattcctccagcaggggctcgtgttatgtccctaactgatggtctctccaagatgtccaagtctgctccttcagaccagtctcgtattaaccttcttgacccaaaagatgtgattgcaaataagatcaagcgctgcaaaactgactcattcccaggtatggagtttgacaacccagagaggccggaatgcagaaatcttctctctatataccagattatcactgggaagactaaggaggaagttgttagtgagtgccaacacatgaactggggtacattcaagactattctcacggaagctctaattgatcatttgcagcctattcaggttcgttatgaggagataatgtctgatccagcctacttggataatgtccttttagaaggagcagtaaa

SEQ ID NO: 300922 - DNA, 305 bp, Zea mays
acttccacatcaaggcgttcgcggcgggggtcatcctgggctggccacggggttcatccacatcctccccgacgcgttcgagaagctcacgtcggactgcctctccggcgggccgtgggaagacttccccttcgcggggctcggcgccatggtgggcgccatcgggacgctcgtcgtcgagaccgtcgccactggctacttcacgcgcgtccacttcaaggagagcgccgccgccgccctgggcgccgccgccgtcgggcgacgacgagcagcagcaggcagcaggcggggtcggcgccgcacgt

SEQ ID NO: 300923 - DNA, 403 bp, Zea mays
cccacgcgtccgcccacgcgtccgcccacgcgtccgcccacgcgtccgcccacgcgtccggggctggctgctatgttcgaggcgcatctgaaggagctcgacgcgccgttccacgaggcacccgacaaggcaggctggttcttgacgacgaacgttgctgccaagcaatggctggagtcgaaggcggcatcagaactagtaactgtgtaaactggttactctggcgcgtacataggattatttttccgtgtaagctacatgtgttctccgatatatgcaggtgaagatgttgagttagcctatctccgaccttactcatccgtatacctatattcaaatttcactctacgatttataatgaaatttaaaatagatcttaaataagaaaaaaataggggcagat

SEQ ID NO: 300924 - DNA, 372 bp, Zea mays
cggacgcgtgggggcggcgctctcccgcgcgctcggcgtcttccccgcgctcgccggccgcctcgtcacgctccacgacgacagcatcgtgatacggtgcggcggcgacgacgccgccgtcgagttctaccacgcggtggcgccgtctctgtcgctcggcgacttcctggtgcccggcgccgacgtgccgacccgtttgacgaacggcctgttccccatggaccggacggtgagctacggcggccacggccgcccgctcacggcgttccagctcaccgtgctcggcgacggcgccgtgttcgtcggcttcgtcgccaaccacgccgtcgtggacggcacctccttctgggacttcttcaacacgttggccgg

SEQ ID NO: 300925 - DNA, 380 bp, Zea mays
gaaccaaggtttgcttcagtgtatgggagtcagccattcttctatagaaactgtgttgcggaccactctgaaatatagcttggtctcaaagctaactggagctggtggtggaggctgtgtgttgactctaataccgacgttatcgtccaatattgttctggagaaagtcaccagggagctcgaatctcatggttatcgctgcttcaaagttgaggttggtgggcgaggtctccaagtattccgaggataacataacactcaacctatttcaaggagatgttgtaccatacttttagaagatggcttacctgcactgaagctgtttagattctcttcttgagttattccaagatcatgataggatattcttctcctaagcc

SEQ ID NO: 300926 - DNA, 240 bp, Zea mays
gaagagggtatgaaaaatgctttacaatgtggagcagaaaatgattaagaagatgccgacggaaaaccggctttacattttgcatgtggctatgttgaagtgtgcataaaatctccttgaggcgggggccacaattgatgccctagataagaacatgaacactgcgttgcacgatgctgctgggtatggtcggaaggaatgtgtggatcatctgttgaactatggtgctgcagtcacgct

SEQ ID NO: 300927 - DNA, 367 bp, Zea mays
cccacgcgtccgcccacgcgtccgcccacgcgtccgcgctccatagatttcgccgcaaggggcaacggcacacccaccaactgacctgacccacgagggatccgcagatgaagatcattccggtcccttgcctggatgacaactatgcctacttgtacgaatcagcccgcaccgcttgttttcactactctttcagttgttcgtttcaaatcgttgaattcttgattgctatttgtttcttccgttcgaagaatcgtggacgagagcaccaagaaggcagcggccgttgaccctgtggaaccggagaaggttctcaaggcggccggcgaggtcggcgcctacgtcgactgcgttctcaccacccatc

SEQ ID NO: 300928 - DNA, 380 bp, Zea mays
gccgtgtaataatggggaacgtagaaatagttcaccctggatctaagcagtgccaacctagtaataagtattttgatagtggagtagacgaccttaaaaatccacggcattacgttgtgtgggatatgaatctgaatagtcatatctattctgagtttgtagtcactgtcaaattgccttctaaaaccaaagattcctttgtatcgcaagaaaactgtcagaattcgtctgatctatcactggtgttgaactctagttcacctgattgtatttcacagaagagttccactgttggagcagcaagagtgcagtaattcagattctgtgatttgactcaataattgacatgattgcattattgagattataacttggagctg

SEQ ID NO: 300929 - DNA, 382 bp, Zea mays
cccacgcgtccgcggacgcgtgggcggacgcgtgggcggacgcgtgggccccgacgacggcgcgcacgggctgtaccggctgtggacgtgccaggactgcgcgggcgacctgggcgagtttcccggcgacgaggctgccgcggccgacggcccttcggccgcgcgcgcggcccgctcgccgacgacgctgtcgcacgtcgtgttcggcatcggcgcgtcggcgcggacgtgggaccagcgccgcgggtacgcggagctgtggtggcgccccggccagatgcgcgggcacgtctggctcgaggagcagcccgcgagcccgtggcccgcggcgacgtgcccgccgtaccgcgtctcggcggacgcgtcccggttcggggaccgc

SEQ ID NO: 300930 - DNA, 387 bp, Zea mays
cccacacgcacggccgcaggcagcagcaccatgtggtcggcagcaacggcggcggcggcgcgcgcggtgtccgtgtccccagtcccggcgccttcgctcctcagcggccggcgcggcgggtcgcggggcggccgggggtcggtgtcggtgcgcagcacggtgtgggacttcgtgggcggcgacctggtgcggccggacctgggcaagtggctggacgacgtggagaagcacaaggcgctggccatctacccgccgcacgagggcggctacgagggccgctacctgaaccgcctccgttaccagggctactacttcctcgacctctccgcgcgggggctcggcgacccggagaccacgctcaccaaggtccaccccgtctgcccgcct

SEQ ID NO: 300931 - DNA, 379 bp, Zea mays
gcaggaggatccggtgaaccaataccaacaattgtgtatgacgatgaagactacaaggatgtttttgtgtcagaggcttgcttgctcactcgcgacgagaacgagtggtacagggaaccaatctcggccaatgccacgtctggcaaagaaggtttgcaagcctcggttgctgactgatttaagtcaggttctgtatcagttttgtgactattatacagatacaggatttgatcaacgcctcgacatggtaggaaagaacactacggtataggcggggattgttcacaagacaatctggttctggaatggaccattttcagtatagcaactattgatttgagcaacagtcagactaatggttccaggagaaatttatccc

SEQ ID NO: 300932 - DNA, 347 bp, Zea mays
  unsure (1)..(347): unsure at all n locations
caccaggccgtttccgccctcatggactccgccagctactggacggcgttctgggtgttcgccggctgcaacctgacgctcctgctgctggcgtcgtccatcacggcgttcttgtcgccggcggccggcgggtcgggaatcccggaggtcaaggcctacctcaacggcgtcgacgcgcccaacatcttctcgctgcggaccctcgctgtcaaggtgcgccgtgtgtgttccgttcccatcctcctgccctcgccgtcgctttcgcttgctgcagtgcacatgctcncctcagcatttcctgatgccagctgcgcaaatgggttaacatccacactaatataatgtac

SEQ ID NO: 300933 - DNA, 418 bp, Zea mays
gcgattcaatgttaaggaagctcactggcttggggagagaatcaaggaacggatattacaagcggagaagaataggataaataaagatggagagcttgttatatcttctacaaaaactagaacacagaagggcaatattgaagatgcattgcagaaaatacaggcaatcattgatgctgcatcatatgttcctccacccccaacagaagaccaaaagaaaaagattgaaaaaattgctgcagtcgctgaaaggaagagacttcagaataagaaggtgctttcacagaagaaggaatttagacggaacagaactagctgggattgatgcaagcttgttctcggggtagcaaaagcattcggctgatccttacagcagtggtgtacagagaccgacgaaaaacaggggtcagacttgctg

SEQ ID NO: 300934 - DNA, 411 bp, Zea mays
cggacgcgtgggcggacgcgtgggcggacgcgtggggagaccgcctcgttactcaccacaccgtgctcgggccggagcagagaaaggtaactcgcctcctccccttcgacgccacccccgcctccgtccccaccccctgctactccgcccccaccccctccgcctccggcctagccactgtttgcccagtccccgtcactctgaaaggagcagcagcctaaggcatcgctgccaagagtggataacaaatcaaaagggtgatcatctcggtgcccaccaaacctcaacaatcaagtttcatgtctaatctcgacgttcagcttccatctgctttgatttgtttgtcgaggcagatgctgaggctctggttttgctcctggaacgaaggattacgtgcatgttcgcatccta

SEQ ID NO: 300935 - DNA, 316 bp, Zea mays
gggagcgtgcggctgctgctgggcgttctcggcggtggcggcggtggaagggctgaacaagatccggacggggcggctggtgtcgctgtcggagcaggagctggtggactgtgacgtcagcggcgtggaccagggctgcgacggcggcctcatggacaacgccttccagttcgtcgcgcgccgcggcgggctggcctcggagtcgggctacccgtaccagggccgggacgggccctgccgctcgtccgccgccgccgcgcgggccgcgtccatccggggccacgaggacgtgccgcgcaacaacgaggccgcgctc

SEQ ID NO: 300936 - DNA, 416 bp, Zea mays
  unsure (1)..(416): unsure at all n locations
cggacgcgtgggcggacgcgtggggccgcggagcgtctgcgccggttcgaggtgtaccgccagaacatggagctcatcgaggccacgaaccgccgcgccgagctctcgtaccagctcggcgagaccccgttcaccgacctcaccagcgaggagttcctcgccacacacaccatgtccacgcgcctgcatgcgtccgaggccgcgcggcggcaccgggagctcatcacgacgcacgcaggccccgtcagcgacggcggtcgccagtggaaccggcggaactacacgacggacctcgacgtccccgaaagcgtggactggaggaccaagggcgcggtggcgccggtcaaggaccaaggagcttgtggcggttgttggtcattcgcgacggtggcggcgatcgaanggctgcacaagat

SEQ ID NO: 300937 - DNA, 394 bp, Zea mays
catcatcatctatctagactagagcaagctaagctcaagctcggctagcattccagaagctgcatctatcagctaccggcctctcgattcatcgcttgcgatcgaatggagaagatgaacgtggttgcgagcaggaagcagcccggcgactggagctgccggtcgtgccagtacgtgaacttctgcaagcgcgacgcgtgccagcgctgcggcgagggcaagctgggcgtggagcgcacggactacgcggcgctgggcggcgactgggacgtgaagcccggcgactggtactgctaccgctgcggcgtgaacaactacgcctcccgcgccagctgcttcaagtgcgccgccgccaagaacgagtccacgggcgccgtcgcgcagggctgggggt

SEQ ID NO: 300938 - DNA, 427 bp, Zea mays
cccacgcgtccgcgccacccgataataaaaacagagcgccacacgagcgggcgcaacgatgcttcaggttcgcgcgtcctcggccttcctcccctccacctcctccccctccccgccatcctcgtcgcaggcaccggcgccagcgccgttccggctctcggggaagagccagcggcgcggcgggctgatcgcggtgccgcaggcgagccgcgtggctaggcggtccgtgatggcagcggcgggggcagccgcagccgccccggcggcggccaagctcgaggacgccgacgcgctcatcgactctgtggagaccttcatcttcgactgcgacggtgtgatctggaagggcgacaagctgatcgacggcgtgctggagactctcgacctgctccgatcaaagggcaagcggctggtgttcgtgaccaac

SEQ ID NO: 300939 - DNA, 367 bp, Zea mays
  unsure (1)..(367): unsure at all n locations
cggacgcgtgggcggacgcgtggggctccccacggtggggtgcgaggccgacgccgccaccgtgcacacctcccaccagcgccacgcctcctccgccgccgccttcgcgtacgccgccgcggggtcctacgtcgccgcgtggcccaggggccccgcgctcgtgctcgaggtggagcactgcgtcgtgcgccccgacgcgcccgccgaggaggccggcagggtccgggtggtgcagaccgtggcgctgggcagggaggcgcggctccgcgggctcaaggtcttcgccgagcagtggtacggcccgttccgcgacggcgagcagctcggcggctgcgccgtcngggagaccccgttcggcgccggggag

SEQ ID NO: 300940 - DNA, 386 bp, Zea mays
cgcacgcgtccgcccacgcatcggcatgtgcttcccttcacgtgagcttatgaggccctgacgttgttgatggacgcctgttacctcctctaagggtgcttcttgccgatgatccatacgctgttcacaaccataacccgaataccatgtcgtcacatgttcatacaggacttttaggtcccactgttgaagcatcagcactctagagacttcttgcgctttgcgcgattgctcgccagcacgttcagagtctaataatggacgatcaatccattctaggaggtgggccgccacatatcactcaactggacgtccaattgagattgcagaagaagttcacgatagttgacatgatgcatcagatcaacaggagaatcatgatgtta

SEQ ID NO: 300941 - DNA, 366 bp, Zea mays
accacggctccggtacaacaaaaaaccacgtcacaacatgtttcggcttcgagaaaccttccagaggccgatccttagttctgagccccaaattgatgaacatcaaatacacccaaatgatcaatttgttatcttcgcttctgacggtcaatgggagcacctcagcaatcatgaagcacttgaccttgtccaaagtactcgacacaatggaattgctccgacacgaatgaaagcggccatgcacgaacctgccaagaagaaggagatgagatactcatacctcatcaagatcgatcgtcgtgtgagaaggcaattcgaagacgatatgacggtcctcatggtactccttgagtttaatgccatgac

SEQ ID NO: 300942 - DNA, 184 bp, Zea mays
cccacgcgtccgcccacgcgtccgcccacgcgtccgctagtgtattgaattacatatggtgtttttgttgttttatttatcacttctcctgtattcctatattttatatgtctaagtttttaaggtgatttcatgcaacccttgtacaagcaattgatacaaataaattgcaccttttatgatc

SEQ ID NO: 300943 - DNA, 391 bp, Zea mays
aagtcaactgctgaacatgcaatacaacatccattcttcaatgtgtgcaattgggtagcaaaagctgtacatgatgcttaccatacagaatcactccgccctaatgctgagccaagattggaactgaacctgtgggatctcagcacagaacctgatgattgtgtccctgatttatctctcagtctcaatccacgtttttctggaacagacattggtaagcatgttccacgacatacataagatgaattactcctgtacccgggatatgagaatacccccgtaaagtccggtttttggcctctggtgccatccgatcatcccgttggtgatattccggccataccatccttgcaacaggcctacatggctgacagcccaagggcatattctg

SEQ ID NO: 300944 - DNA, 327 bp, Zea mays
gggtcggtccacgcgtccgaccaagcgtccgcgaacgggatatgagctgtcagatatggatatactgtttgctgaggggattacatcctcagatggggtagcatcaactgacttctctttccctcagctgtcgttgggtggactgggtgttgatgacctcgatgcacaagacactttgctaaggtagcagttgatcaggatatacagtagaggtttgcatgggaactgcaaatgggtgcacatgttcgatgacgttaggcttgttagcttctgtgttgctgctagcgactacgatgagtactccgaagatgcaaacggtatcattgt

SEQ ID NO: 300945 - DNA, 370 bp, Zea mays
cccacgcgtccgctgcggcgtagccgtcgcttggacgcggtccagagcggttgcaccgcgctgtccatcgtcaagcagggggacctcatggtcgtcgccaacgtcggcgactcccgagccgtgctgggcaccacgtacggcgatggcaccatcgtggccgtccagctcaccgtcgacctgaagcccaatctgccacaggagaaggagcgtatccggcggtgcaacggccaggtgtactgcctcgccgatgagcccggggtgcaccgcgtgtggcagcccagccgggagtcgccggggctcgccatgtcacgcgcgttcggcgactactgcgtcaaggactgcggcgtcatctcgacgccggaagtgacgc

SEQ ID NO: 300946 - DNA, 247 bp, Zea mays
cacaactaccggtagtgctgcggggatcaattttgcagtaataaaaaatctactatcaacgcggatggtactctgttgtttatagtccctgctgctaaccacccttgttgctggtgctgctggagaggcattgtacctgtccatgcatatatgatatatatatgttgtaacgttgtgaaagcacacaatcttgggtaccaaaaaaaaatcatttaagatcaatattgacaaaataaccgtgcgagag

SEQ ID NO: 300947 - DNA, 400 bp, Zea mays
cggcggcccgcccagggtcaggctcaccggcctgggggcgtccatggaggcgctcgaggcgacggggaagcgcctctccgacttcgccgacacgctcggcctgcccttcgagttctgcgccgtcgacgagaaggtcggcaacgttgacccgcagaagctgggcgtcacgcggcgggaggccgtcgccgtccactggctgcaccactcgctttacgacgtgaccggctccgactccaacacgctccggctcatccaaaggctggcccccaaggtggtgacgatggtggagcaggacctgagccagtcggggtcgttcctggcgcgcttcgtggacgccatccactactactcggcgctgttcgactcgctggacgcgagctacggcgaggacagccccgag

SEQ ID NO: 300948 - DNA, 314 bp, Zea mays
acgctgtgcaatgcgtgcggcgtccgctacaagtcgggccggctcctgcccgagtaccgcccggcgtgcagccccaccttcgtgagcagcatccactccaactcccatcgcaaggtcctcgagatgcgccgcaagaaggcgggcgacatggtcgccaccgccgcgccggccgtggcgtcgttctgagctgcactcgctgtcagcaaggacgctggccacccagcggtggctgtacattttttttttcttgccataatggccctgtaccgtacctgaactctcctcccctcactcatcctagtgtggtcgttgta

SEQ ID NO: 300949 - DNA, 417 bp, Zea mays
accacgcgtccgcggacgcgtgggcacggttcaagcacatcgacacacacgagcacagaagagaaacgggcacacgcaactgatcaaggcaggcaaccaatattcaccgtcggcaatgggcgacctgatccctgggctgccggatgaagtggcgagggagtgcctcgtccgggtgggcttcgaccagctgccggtggtgcgccgcatctcgcgccagtggaagtcggcggctgggacccggagacgtgggcgccgacggacgcggtgctcgtctacgacttcctgtcgggcgcgtggcggcgcggcgcgcccatgcccggcccgcgcaggtccttcttcgcctgcgcggccgtgggcggcgccgtgtacgtggccggcggccacgacgccgagaagaacgcgctgcgctcggcgctg

SEQ ID NO: 300950 - DNA, 402 bp, Zea mays
accacgcgtccgcggacgcgtgggctgacgcgtgggcggacgcgtgggccgcggcggcggcggggccctctcactcgcggctttcaccagcgccaagtcccggactacgggctacaacccggccgtcatcaataagcaaaaggagttctacaataatgcgaaactaatcagcagatacaaaacgacaaggaagcagcaatgtcagtcaaacgaccatccacacattccaagccatgaggatggtggcgacaatgcccaacatgtaccgaaaccgcactaccacggcaagaagcgcaccgcgcatagtttgaacgaacagtactagaagaaacgcgcacaggatgagaaagctaacagagaccaggatgcaacaattcaggtgaagagggaacaccaggagaa

SEQ ID NO: 300951 - DNA, 414 bp, Zea mays
aacacgcgtccgcccacgcgtccgcccacgcgtccgcccacgcgtccggcggggcacagacaggaagagaagccaatggcgctgtccctctccctcgcgcgccccgcgcccctcgccgtttccgccggcgcaggagccaggaagctacccgcagccagcctcgcattcccggcgaaatccttcttcggcgcgccgctggccgccaccgcggactccgtcgcgtcgccgctcccgcgcaagccggccacctccaccacctcgctcgaggtcgtcgcgggggggaagaagggctacaagatgaagacgcacaatgcgtcggcgaagcggttccgggtgacggggacgggcaagatcgtgcggcggtgcgccgggaagcagcacttgctcgccaagaagaacaccaagcgcaagaag

SEQ ID NO: 300952 - DNA, 417 bp, Zea mays
gtctctactcctcttcctcctctctctactctccaagttctcttctccgtcgaccgctctacacgtctcttgtcgacctggacaccgaggtggaagaaggaagcagtcagcagatggatccatggatcagcagccagccttctctgagccttgacctgcgcgtcggcctgccgccgctcagcctccaccaccaggcgccggtggccgtcgccttgcccaggcccaagctgctcgtcgaggagaacttcctcctgccgcctccatagaacgaaccagaggtacgcatatatacactacactccgatcctatgtgcgacgcaagcatggcaccaccccacctggactggacggacacggcgggcgtgacgacgagcacagactctaacggactgtccccttgacttgatcccaagtcgc

SEQ ID NO: 300953 - DNA, 418 bp, Zea mays
atctgccaccgacgaacagcaccggttctacggggagtcgaagccgttcgggaacgactcgtacaggtcggccgagacgctgggctacctcacgtccacgcaggcgctggccgacttcgccgtcgtcatcaggggcctgaagcgggacctcggcgccgaggccgctcccgtcgtcgtcttcggcggctcctacggcggaatgctggcttcctggttcaggctcaagtacccccacgtcgccattggtgccctagcttcctccgcgccgatcctgcagttcgaccacataactccgtggagcagcttctacgacgccgtctcgcaggacttcaagtccgagagctccaactgcttcggtgtcatcagggcagcctgggacgtcctggatgagaggggggccacagacaaagggctcctg

SEQ ID NO: 300954 - DNA, 351 bp, Zea mays
agtccatccatcctccgaagctcctcggcagacaagcagcagcgagagaaagcaagcaaggcagaggcagttgtgttgctggtcggtccgtccatggggcccaagagagcaatgtcggcggcggcggcggcggagcagccgaggctgcgcggcgtgcggaagcggccgtggggccggtacgctgcggagatccgcgacccggtgcggaaggcgcgcgtgtggctgggcaccttcgacacgtcggagcatgcggcccgggcgtacgacgccgccgcgcgcaagctccgcgggcccggcgccgccaccaacgaccccgccccggagccgacggctgatgcgttggcggacgct

SEQ ID NO: 300955 - DNA, 413 bp, Zea mays
aagattctggagctagaagactcgatgaagaagcctggctatgtgccaaacactgttcagaagaggcttgcagaagaggtgacgcgatttgttcatggcgaggagggattggaggaggcattgaaggcaaccgaggccttgagacctggtgctcagacacaattggatgcacaaacaattgaggggatagcagatgatgtgccttcatgctctttagcttatgatcaagtgttcaagtctccacttattgatttggctgtttccacaggtttgctcactagtaagtcagcagttaagcggcttattaagcaaggtggtctgtacttgaataacgtgaggattgatagtgaggataagctggttgaggaaggtgatatagttgatgggaaggtgctcttgttgtctgctggaaa

SEQ ID NO: 300956 - DNA, 394 bp, Zea mays
ccatccgtttctccgcgatgggcgccggccgtgtctgtcgcggcggcccctcctccgtctcccccgccgcagggcggccgttctcgacgctcgccgcgtcgtcctccgcctccccttcctcggctccttcagagacggcgtccacgtcggtcaccaagacggtgaacggctcccaccacttcaaaatcgcgggctagtctctctccaagggaatcggggtggggaagttcatcgcttccgagtccttcaacgtggggggattcgactgggcgatctacttctaccccgacgggaagagcgccgaggacggcgctgcctacgtctcgctcttcatagccctcgccagcgagggtaccgatgtgcgcgcgctgttcgagctcacgctcgtcgacca

SEQ ID NO: 300957 - DNA, 410 bp, Zea mays
gcttgtgctttccattgtacattgatctttttgatgcctaatttatcaagtccctgaaagttcaggtgtaaaaaaaaaaaaaaaaaaaaaaaaaaaaaaaaaaaaaaaaaaaaaaaaaaaaaaaaaaaaaaaaaaaaaaaaaaaaaaaaaaaaaaaaaaaaaaaaaaaaagggggcagctcaaaaggatcaaagctaaattacgcttaaatgaaaattaaaatcccttcaaaagggtcacaaaaattaaattaacgggccgtcgtttaaaaacgtcataacgggaaaaaccctggggtaaccaaactaaaccgccttgaagaaaatccccctttcgaaagcaggcgtaaaaccaaaaaggcccgaaccgatagcccttccaaaaatttgccaaccctaaatggcaaatgg

SEQ ID NO: 300958 - DNA, 433 bp, Zea mays
gacagcgtcaccgtgggggacattgctactgtcattccacaatgcttgtggcatcggctccgacaagatccgcatggatccattgactcgggtttacttggcagtgataagttttatcaattctttagctaaattgttcttgatgtaactgttcctaagtcacaatctagctaaagactacacagagctgcttgacgcatctgcacagcatggatacgcatgaatccattgactcgagtttacttgatcagtgcaaaatgttatgaagtcgttagctatattgtacttgaagtaaatgtaccttactcacagtttttgtcgggaatgctcttgttctgttactttcatgatgttctgccgtctaatcacatctgaagcttgaattggtatcaagaaagccggggccctctggttgtagtaaattgagaacccc

SEQ ID NO: 300959 - DNA, 407 bp, Zea mays
aaccaacaaggcagcaacacaagcaagaaccacacctcctcccttcgcctgtgatcatgtcgtcttgctgcggcggcaagtgcgggtgcggctccagctgctcctgcggcagcggatgcaacggctgcggtatgtaccctgacgtggagaccgccgccaccagcagcgtcaagaccacggtcctcgccgcgccgaccaccaaggccagcgccggcggcttcgaggcggccaccgatggcggcggctgcgactgcaacacctgcaagtgcggcaccagctgcagctgctcctgctgcagctgcaactgagctggcccggcccggcgatggcgcacgagagtcgagaggaggatgacgacgaccaggcgtataaatataatagcggcgtccagtacataagattctgtc

SEQ ID NO: 300960 - DNA, 321 bp, Zea mays
acgcctcatcctctcagtcgccggcattgcggtagccgcgctcgtcgggcgccaccgccatgtggcgtccgggcacggtgccacgctcacagtgttcccgctcatgccataattcgtgctcgtcggtgcgggcgaggcattcatgtatatgggccaactcgccgtcttcctgcgcgagtgcgccaaggggatgaataccatgagcacgggccggttcctcaacaactgcacgctcaggttcttcttcagcaccctgctcgtcacaatcttgcacaacgtctcggcccacaccggacgtgactgttagctcgcctacaagct

SEQ ID NO: 300961 - DNA, 433 bp, Zea mays
  unsure (1)..(433): unsure at all n locations
cacaaacctgctatcagcattggaaagagtgtgaatcattttccattgtgggtgattgaaatatcagacaagcccaggcatagggaatctgaaccagcattcaagttcattggaaatgttcatggtgatgagcctgttggaagagaggttcttatgcatcttgcaaattggctgtgtgataactatctgaaagattcactggcaactctcattgttgagaacatgcaccttcatatacttccgacgatgaaccctgatgggtttgctcttagatggcgtggtaatgcaaacaatattgatctcaacagggattttcctgaccaattcttccccgttaacaacgatattgactacagacagcctgaaactagagccattatgaattgggtaaagcaagaacacttcacggcttctgctancttgcatggggggg

SEQ ID NO: 300962 - DNA, 432 bp, Zea mays
cgggtccactaagcgtccggactaccctagtgggcaaatgtgctcctccagatatgctgcagttgctaacgtacctcgccatgaagcacgacacacgagtgaagcgggttgacactgttaaagcttacagctttggagctctcgactttgtagaggttgacatcgaactagcggaagatatgcggctgagagaggcgcacgccatcggtgaatcgctgcaggagagaatcgacaagttgcctcaagtcgagcgggcgtttgttcatatcgatttcgagagcacgcataagcctgagcacaaagtcagggacaaactgccgtctactgatccctgacagatttccgaatgctcatgcatgtagtacattgttaagagatagtagctaataccccggcgttttcttcgaaggttacgagcaacgattcccttca

SEQ ID NO: 300963 - DNA, 431 bp, Zea mays
tcagcgtccaaattgtgcgggtgagattggtctttctgctctacagaaagttgttgctgctgttcgaatccttgcttacggtattccggctgatgccgttgacgaatacgtacgtattggggaatctactgctcatgaggcattgaaacacttttgcacggctgtccaaaccgcgtttgctccgtattatctccgtgcagcaaatgcagaagatatcgcacgccttctccaagttggcgagtcacgtgggtttcctggtatgcttggtagtgttgattgcatgcattgggagtggcgtaactgcccaagttcatggaaggggatgtttacagggcgtggtaaacatcctaccatgatcttggaagctgttgcgtcgtatgacctgtggatatggcatgcatattttggtctgccaggtagttgcaacgaca

SEQ ID NO: 300964 - DNA, 429 bp, Zea mays
atccatggggaaccaggtagcaagagagtatgcaggcaatcctcagcacatgacaccaagtattaccatgcaatgcgacacgagctcattgatccccggaggccagttcagtggtggttcctccgtgcagactcaaacttcacggagctccaacatgcttgcgctgcggccaacgcagcagcctcaaaacttggacttctctgggcttggtcagtccacacagccttcagggaccaaccctttcgccgactggtctcggttgcaggagagcagcgtcgatgagtacttgatggatgagataagggcgacgagccacgagctattggagaacgatgagatgcagcatatgctgcggttcctgagcgtgggcggggcgccgaccggcctgaacaacgttgacggctttccttcatacgcgtctcctgcccc

SEQ ID NO: 300965 - DNA, 431 bp, Zea mays
caggacgcgtgggcggacgcgtgggcggacgcgtgggcggacgcgtgggccgccatctctgccaacgtcggctactgcaaggcaccaaccctgagctggaagggaagcggagtaccaggccggattgtggtctccatgtccaccacccgaagaggcctcgtctccctaagacgacgatcccctcggtttcgcgtctacgcggcgaaggcggagacggtgagcaaagtgatggacatcgtgaagcagcagctggcgctggcggcggacgtggggctgacggcggagaccaagttcacggacctcggcgccgactcgctggacacggtggagatcgtcatgacgctggaggaggagttcaagatcaccgtcgaggaggacaatgcccagagcatcgccaccatccaggacgccgccgacctcatccacaagct

SEQ ID NO: 300966 - DNA, 390 bp, Zea mays
actagttctagatcgcgagcggccgcccgcgatcttaggaacgccgagggtcgccgccggtagaagaacagcttcggaagctggtcggtcgggacggtgcgtcgtcgcggtgtccgcgtcctcgtccccggccacggccgcggtggcgacggaggtgcccggggtgatgaaggcctgggtgtaccacgcgtacggggacgccggcgtgctcaagctcgacgaggccgcggctgtgccggccgtgggcgaggaccaggtgctcgtcaaggtcgtcgccgcggcgctcaaccccgtcgatgccaagcggcggggccgcaaagtccaggccaccgactcccctctcgcgaacgtgccggggtacgacttgtccggcgtcgtcgtcaaggtggg

SEQ ID NO: 300967 - DNA, 359 bp, Zea mays
gcctcacctcagatcacctcgccgactagggctgtgtaccgccgtggatcgcgccgtccccgccatggacgtctcacactcgggatcctcagtcgccggcgaggctccgacgacaggagagcaccaggtggggactaccatcgtcagggtctgctaccagggctgcgtcgtcctgcgcgccgaatccatgagcagactggaatgtatgtagccaaccgtgcttcacacaagattactcaactggcagagaacgtgtgattctgtcactctggatctgctgcggatacacatctcatttcggattatgtacgctatttcctcgaccaacacacaatccatcttggccaaccagctaccgt

SEQ ID NO: 300968 - DNA, 416 bp, Zea mays
actagttctagatcggcgagcggccggagtgggagcgcgcccgcgccagcgtgcggggctcggtgcacgtgccgctgttcgtgggggacgacgacatgggccccgtgacgctgctgaagaagtgggtccacttgggctacatcgggctctggaccggccaggccttcaccaagatgaacgagcgcttcgtcgacgacgtcgccgccgccgtcgacggcagcaaggacgccaagcttctcgtcgcttgtggcgaaggcctcaggtcgttgatcgcggtgaggatgctgcacgacgacgggtacaggaacctggcgtggctcgccggcgggttcagcaagtgcgcggacggcgatttcgcagatgtggagggggagagcaagctgcagtacgccaccatcgggggggcgtcctacatc

SEQ ID NO: 300969 - DNA, 248 bp, Zea mays
ctcccgggtacgacccacgggcccaattccccgctaacactgatcggatgagcaaggagatcacctcccttgcgccaagcagcatgaagatcaacgtcgtcgcgccacctgacaggaactacagtgtctggatatgaaggtcgatcctaacgctcgctcagcactttccaacagaggtagatatcaaagggggagtagcatggggtctggcccggcaatttgtcacaggaagtgcgtccaggtttcgg

SEQ ID NO: 300970 - DNA, 416 bp, Zea mays
aaacggacgccctttatttttttttttttttttttttttttttttttttttttttttttttttttttttacaaaaaaatgaaatctgatctggacaaaacttgctttgagatcgccaaataatggaaggcatggcactagtttctaccagcccaaaatgctcagaagaacaagattgaatcagaatgtgaccaatatacatgttaatttctgtagccaacaccaaagtgaaatctgcttgcttgcctatcattaaaggcgtactcaagccgtaaaggtcccagaggggagtccacgcggacgccaacaccatagccaaagccactccctggctttccacgagctccggctgggtcaccaggaactttacgaccagaaccaagatcactaccatagtctccaaagaccacgccttcc

SEQ ID NO: 300971 - DNA, 322 bp, Zea mays
ggcaagcacgttcacgctcagctccagcaatggctgcctccaccatggcgatctcctccactgcgatggccggcacccccatcaaggtgggctccttcggcgagggccgcatcaccatgcgcaagaccgtgggcaagcccaaggtggcggcgtccggcagcccctggtacggccccgaccgcgtcaagtacctcgggcccttctccggcgagcccccgagctacctcaccggcgagttccccggcgactacaggtgggagagcgtcgggctgtccgccgagcccgagaccttttccaagaaccgcgagctggggagtggtcg

SEQ ID NO: 300972 - DNA, 200 bp, Zea mays
gagcccgagtgaacgggcgaggtctggacgagatgcagagtcgtcgtgaactacgctgacagcggaagaccaccaccctcgatgtcgagagcagcgacaccatcgacaatgtcaaggccaacatccagtccagggaatggatcccgccggaccagcaaccgctggatcttggccggaagcaggtgcaggatcggcgcacc

SEQ ID NO: 300973 - DNA, 424 bp, Zea mays
ggccgcattcgacaacccgctggaccacctgccgctcttcccctacttcaccaactacctcctgctgagccagctggagcacggcctgctggcgcgccacgtcccgggcccgcccccctcccgcgtcgccttcgtcggctccggcccgctcccgctcagctccctcgtgctcgcctcgcgccacctccccgccgccgccttcgacaactacgacatctgcggggacgccaacgaccgcgcgcgccgcctcgtgcgcgccgacgccgcgctcgccgcgcgcatggcgttccgcacctccgacgtcgcccacgtcacccgggaactggccgcctacgacgtcgtcttcctggcggcgctcgtgggcatggccgccgaggagaaggcgcgcgtcgtcgagcacctcgggaggcacatggcgcccggg

SEQ ID NO: 300974 - DNA, 317 bp, Zea mays
ctcgtaggacgacgcaaaactctacaatgagtcgtcataaattaatcatcccggttcagccctctcctggcgcggcgtcgtcgtcggcctcggcctcggtgctcaacggcgccgtggactggtggcgcgaggtcaaggagtcacggctgtggcaggaccgcatcttcgagacgctcgccgtgctctacggcagcgtctccgccgtcgcgctggtccagttgatcagaatcgagtgcagggttccagagtatgcgtggaggaggcagaaagtgttcgatctcgtagccgtcctcgtgaagggcgtgaggtctgccgtg

SEQ ID NO: 300975 - DNA, 401 bp, Zea mays
tcgcgggacgacgcaagcctctaaagtgacgtcgtactaacgcgtgagtgaagtcgcatagttcactcttgcagcgggacgatagagacttcatacaccttaaggttcatacaacgagcaggtgtatgaagtctcatagtacactcttgccgcggtccgatagagagtccacttcacttaggttgatttaatttacgccggatgcagacctaagtcaaggtacgtcctccattgagagactttgggattgttcctacatagatcatgggatgagagggcaatcagaggacatggagccatctgaagatctttccctaacgagacagtatggcgagttagctgatcgttacattaggtgatgatagagccgaatgcagaaaaatgcatgttgggtctttgaa

SEQ ID NO: 300976 - DNA, 393 bp, Zea mays
agcttgtcacagcgcaaaacacacatgcttttgtcctggatggacgggttcacccggagcgaggcgtcgctggccaacgccgtggcggggcagcccgtggccgtgtccatcgaggccggcggcgacaacttccagcactacaagaagggagtgtacaacgggccctgcgggaccaacctcaaacacggcgtcaccgtcgtcggctacggccaggaggcggccggcggcgacaggtactgaatcgtcaagaactcgtgggggcacgggtggggcgacggcggatacatcatgatgaagaaagacgtcgccggcaagccggaggggctctgcggcatcgccatccgcccggcctatccactaatgtgacatggtggtgtgcaactgttttccgtt

SEQ ID NO: 300977 - DNA, 356 bp, Zea mays
gactcccgggtcgacgcacgactctaaagcgcgcctcacgaagatggggtcgcacatgaagaagaccatcttcgaggagcagacggccaaggcggtcatgaactggcgcaagacggccaaggataaggtgcggcagcgggaggcggcaggcttcctcgacgtgctgacgagcgccgacaccacgccgagccacagccgcgcgacgtcgccgagccggggcaactcgccggtgcacctgctccacaagtacaggggcacgtcggaggagccgcagagcgcgccggcgtcgccggggcgggagctcggggacatgtacccggtggccgaccaacatcgcctgcaacaggctggacccc

SEQ ID NO: 300978 - DNA, 407 bp, Zea mays
atctaaccccattgaaaaatgaaattggattttcgggagaattttggaataaaagataaataaagaattgaatttgaaaaaaaaaaaaaaaattctttctatttcggattcggattatttcttttttaataggatggatttcatcctctttttggagcaaattttaactcattgtattccatatggaataagaggagaagaaaagcattccacgacccccgaggggccccctcaaaaagggaactattcctaaaatttacttttttttatttatttttattcgttttttgaaccccaacaaaagtggattcaaagttacttcaattatccttttcttttaagttcttcttgtaaagttccatgcttgctgtttggtcaagaaaattagacctaatccaagaaagaag

SEQ ID NO: 300979 - DNA, 330 bp, Zea mays
cggacacttgggcggaagcgtgggctgccgcgcaacggctggatatcctgcgacgagttcagcaaggtcggcttcgtataccgcgagaactccagctccccgtgccactacgaatgccgctacaggaccatgttgaagctgccgatgttctgctgcatctacgccacccaggtgtcaacggatctgcacgatgccatcaaatcctacccggacgccttccacggcgtcagctgattctacaacatcaagcacacgcacttcgtcagcttcatcacctacaagccccctggcagctgactcatcgctcccggcgtgccgaccacgccggtt

SEQ ID NO: 300980 - DNA, 409 bp, Zea mays
cccacgcgtccgggaatggttaagggctatagcggtgttttccgacttggagaagccacatcaacctgggatgcagattcaccaattatccagagggaaccatgggaacacatcaaagatgaaaatattagaaaggcagcagcatcattcatgggttggcggtgaaaagatgtatgacaaagcaaggaagggtgaaacagtagagctttcaccaagacgtatatcgatataccaatttgatattgagcgcagtttggaagacagacagaatttgatatttcgagttacttgctcaaaaggaacatacattcggtccctatgtgcggacttgggtaaagcacttggaagctgtgctcatttaactgccttgcggagagactcgataggtgaatactcggtcaatgatgct

SEQ ID NO: 300981 - DNA, 417 bp, Zea mays
aggttctgagttcgtgggcgagagggaagagatggcggcgtcggacgttgagtaccgttgcttcgttggcggcctcgcctgggccaccgacgaccactccctcaacaacgccttcagcacctacggcgaggtcctcgagtcgaagatcatcctggatcgggagacgcagaggtcccgcggcttcggcttcgtcaccttctccacggaggacgcgatgcgcagcgccatcgaaggcatgaacggcaatgagctcgacgggcgcaacatcaccgttaacgagggccagtcgcgctgcggacgtggatgccgcggtggcggatacggtggcgggcgccgtgatggaggcggctacggcggtggcggtggatgctacggcggtggtcgttgaggctacggcggcggtgggggatacggtgg

SEQ ID NO: 300982 - DNA, 405 bp, Zea mays
aacacatgtccgaccacgcgtccggtttgacatagtttgtcagtgacctattcctggttggactgttctaacaacagtataaccagattgctacaaacaccttggcgcgagtggctcttctgacacatgcagtctgcaatgtgtagaaacgtgttcttgtcatcagattctcaatcatttgcttttggcaacagacttaacatacattgtggcattggcacctcgattgtcataactgatgtcgctacgtcctccttacattaacgctaagattgacgacgacacaaggaacaagagcgcattactgctgtgaatacaaatctcgagaccttccatggacagaatatcgtctactatcacgacctacgtctatagcttgtattgttctcaccttgaatcagtcag

SEQ ID NO: 300983 - DNA, 401 bp, Zea mays
tctcgggtcgacgcatacgtccgagatgatgcgccacacgcgtcgagcactcttaactcatgggacacgatcgccatggccgccacatcgaccgccgccgccgtactgtgccgaccgtcagtggccgggctccgccaggcgccgactcccgaacggacgcgcgtgtcgatccgcgcggcacctgcaccggcacggcggtccgtggcggcacacgcggagctcagcacggcactagcaatcatccagagacaaggcgtgtcgctcttcctgtgccgatgcgtcgcacttcaacatccagtcggagaacatggcgaagcaggtgcccgcgcacaacggcaggacacacgtcgagtccgatgacgagcgcgccaaggagttcgccgcactgcacaagtccaacg

SEQ ID NO: 300984 - DNA, 322 bp, Zea mays
gatatccggtagccgacattcattgcgcccccatgatgggcccgacgtttggcgccatgatgatctccggccacaatgctgcgcacctggcgctcaacgccctgtcgcatgcccaaaggtctcgtccggactatgtcgccgccattgcgcaaagagttgatgattgcgtacaatgacgacgacgtcttggacgcctgattgcagcatgcagagacgacgatcaaccccatcaccatcttaacgtaaatgccttgttcttcaatgatgaatcaatcgaattcccttgcgttaacattaacattgttattgttactactaattt

SEQ ID NO: 300985 - DNA, 428 bp, Zea mays
cgggtccacgcatacgtccgaccacatgtccgcaaatttccactggtacaattgtcaaaggttaatcctagctgtatggatcgcgatcagcggctagccttttggattaacttatacaatgctttgataatgcatgcgtatttggcatacggagtacctcgaaatgacatcaagcttttttctctgatgcaaaaggcttgttacacagttggcggccagtccttcagcgcagcagaaatagagtttgtgattcgaaagatgaagactccagttcatcggacccaactttctttgatgtcgactctgaataagttcaagattactgacgatcacaagaagtactcaatcgatgaattcgaaccccttcttttgttcggacttagctgtggaatgttctcttctcctgctgtacacatattctccgctgc

SEQ ID NO: 300986 - DNA, 423 bp, Zea mays
cgcgcgggtcgacgcatccctctacacgtgagtcgtgctagagcggaaaagcgtggacgagcctggggagccgccgggcgtggtcctaagcgcagccagatcggggtgggtgcccgtggctccggggaagctctgtcagcttcctccgtgacgagcagctgcgtgcggagtgggacatcctcagcaacggaggcccgatgcaagagatgggcaagatcgccaaggggcaggagcacgggaactcggtgtccctcctcagagcgagtgccatgagtgccaaccagagcagcatgctgatcctccaggagacttgcactgatgcatcaggctcgatggtcgtgtatgcgccagtggacatcccggggatgcagctcgtcatgaacggcggggactcgacctacgttgctctgctgccgtctgggt

SEQ ID NO: 300987 - DNA, 173 bp, Zea mays
tccgaggacgcatgggatccggaggaggttttctataacacagctcagtactatagggcataccatggacataaaacgggtcctcgtgcagtgttgattggtcgtcgtccaattgtttcagcatttcaatacattaagcagcgaacgaggtataaccaggccatgaaaaatgt

SEQ ID NO: 300988 - DNA, 416 bp, Zea mays
tccaaactcctcatgcatcctacctccctggtgcccgtcacgttcaccacgttcgcccgctcattcaccggcggcgtcgcccagctcggcctcccgccgcccacggcagccaggtccccgggccgcccgctcggtccgccaccgaagcaacgaattggttcttttagtacttgacagaaatacatatattccacgcatggtggcgtctttagacaatgtgacgggcttgactttagccatgtcatcgagtgcattcattggttcgagctttgtgatcaacaaagttgggttgaagaatgctggggataatggggtccgtacagcttccggaggcctctcaaatctatatgagcccttatggtggttgggaatgataactatgattctatgcgaggtaaccaattttgcaacatatg

SEQ ID NO: 300989 - DNA, 378 bp, Zea mays
aattcctctgggtggtgcgagctcctctcggcgacaacccggagagggagttcggcgacaaggctgacccggacctgcaggcgctcctgcccgaagggttcctggagaggaccagagggcgcggccttgtcgtcaagctatgggcgccgcacgtggcggtgctccggcacaaggcgacgggcgcgttcgtgacgcactgtgggtggaactctgtgctggagggggtcatggccggcgtgcccatgctctgctggccgttgtatgcggagcagaagatgaacaaggtgctcatggtggaggagctacggatcggcgtggagcttgctgggtggcaccagcatgggttggtgaaggccgagaaactggaggccaagggtg

SEQ ID NO: 300990 - DNA, 250 bp, Zea mays
tgggttccaaactcagggcttcccatggttgccatccacagtaaatggcacacatgggttctgttgcatcacttgcgatgtcagtcactataaacgaggatgaggaggaagatggggataccgggagtgatcaacaaccgaaaggcaggaagctgtgggggcttgtcgtctgccatcatacaagcccgaggttcgtccctttcccactaaggtatgcttgcgagtttctcttgcaagtatttggcagaca

SEQ ID NO: 300991 - DNA, 241 bp, Zea mays
atcccacatgagattgctaacatcgacaagagaggggcacggaaagacaaggagaacaagcctgagatcctggtgatccagggaccgaaacctgggaagccaacgggcatggcaccgatgccgcagatattgctgaagctgaaacacactcgcccaccacacaggaaaccaactccgccacctgccgcagctaccggaaacgatggagcaccaactgccgccggaaggatggagctaagcc

SEQ ID NO: 300992 - DNA, 264 bp, Zea mays
gtcgacggactcgtcggaccactagtccgcccacgcgtccgctttaacaagcttgtctctgaagtgaatgctgctaccctcgatactgatctaaatgttgtggtggctcctccattcatctatatcgattaggtcaacaattcactaacgggtcccattgaggtttctgctcacaatgtgtggattgggaaacgaggagcctacacccgatagatcagtgcagaacaactgggggacatcagttgtcaatgggttattcttgga

SEQ ID NO: 300993 - DNA, 321 bp, Zea mays
acgagctacaggatggcgacattatcaacatcgacgttactgtctacttaaacggataccatggggacacctcgaggacgtacctgtgcggagaagtcgacgacgcaactaaacaactcctgaagggcactgaaaagtgcatgatgcgcggcatatcagcctgcacgcacggcgccaatttcaaggaaatctgccaaagaataaatgagcacgcggagaaatatgggtacggcatcgaccccttcctgggggacggggttgggaggatgttccactgccagcccatcatatgggatagctaccattacgagccccggttca

SEQ ID NO: 300994 - DNA, 371 bp, Zea mays
  unsure (1)..(371): unsure at all n locations
acgcgtccggctaagctctacagctcgagtattgcttgctcaccagaagaaacaatgcagtgcaccaacaatggccgccgcctcctcgtcctcggtcctcctgctgctcctggccgccgccttggctggcatgagcgccattttggctaacttcatcatcagcaacaactgccggttcaccgtgtggctcgccgccactccggtgggcgggggcacacacctcaggatgggcgggacgtggaccttcaacgtgccggctgggaccatctccggccgcatgtggggccgcaccggctgctccgtcaacggcaagagcgggagctgccatacaggcgactgcngcagctcgctggactgcacgctgtcggggc

SEQ ID NO: 300995 - DNA, 421 bp, Zea mays
ctaattttggtttgagttttgtttgaattatttcaagtaaattctttttacccttttctggttaatttatttcaaagcacacattcttagtttagttttttttgtttctgacagatctctttcgatacacgttttaactacaatgcctatgtgaatatgcacccgtttcctattccgtttctagaattttcgcaggccgagaatgacttgcagccttggattgctagagacgacgaacaaggccagacgatgtggagagtcaaccaacgtatagtgaagcttatagcggagctcatgacgaaccatgacagccctgaagccttggtgatactcgctagtgcctctgaacttctacttcgtgctactgatggaatgcttgttgacggtgaagcttgtactttgccacagcttgagcttctcg

SEQ ID NO: 300996 - DNA, 361 bp, Zea mays
ggaagctcatgttaaagataaggtacttactgatctgaaagccataatctgtgctcatgacgcatcatattctgaagatattgaaggatgcatccgtaattcactcttgtggctgcttcatgaattacaaattcatccatgcacttacaagtgccgtcaagatgctgttgcagatttgctccagttgtatgcatatatatagtgctttttccgagtcagggattaccatacagtaacatctccatcagttcatatcactccgcttgacttacgccccacatatgcctaatatactgtgaacattcgtttcatgagtactgcatgacatactcataaaattactgcttagcccatcatatct

SEQ ID NO: 300997 - DNA, 397 bp, Zea mays
ctgacgcatactgcgacacttattgcaggacactgtagacaacatgataaccatccctttataatgcaaacagatatatgttgcagtaattgtgttctcgactaaatcttcaaacataccctgccttcatgactatggttaagccatgaccatttccatctgtgattcttgaattatctacactgatccatttcggtaaggttaaggtaagaactgttcgttggatagaatggattcgaaaaaagcgtacttttcttaatgattattctgagttctttcttttgttaatctagtcgaacaactatgagacttttagaactactcaaatgcgagcaatcttatcattgcgataccgtaaattgtctagatagttaaatgttattgtcacagcaaaata

SEQ ID NO: 300998 - DNA, 431 bp, Zea mays
ctcgcgggtcgacacaagcctctacagtgactcgtaggaatatgaaactaatatatatgaaaacagatcctcccctaaaagaattgaaggccctgatggaagaaatcttcagctccagttcagaagtcagttggctcttccaatcttcactggtggaaaagttgaaggtgagcagggagcagctatacatgttgtgctgttggatgcaaacactggatgtgttgttacttcaggacccgagtcatttgcaaaattggatatccttgtgcttgagggtgactttagtaaagaggaagatgaggattggacagaagaagagtttgaaagtaatattgtcaaggagcgtgaagggaagaggcctcttttgacaggcgacctgcaagtgactcttaaagaatgtgttgggaccataagggagcttacattcactg

SEQ ID NO: 300999 - DNA, 413 bp, Zea mays
cggacgcgtgggaaagaatggaggttattgtgcttatattgatgcagaaaatgccttcaacccttcatttgctgaatctattggcgtagacagtgaaaggctcttgatagcccaacctgattctgctgaaaattctctaagcattgtaaacactcttgttggtggttctgttgctgttgttgttgtggacagtgtggcagcacttattcccaaatgtgaaattgaaggtgaaatatacacaaattgtggagacatccaatcccatttgatgactcgggcccttagaaaaattcagtacactttatgtcgatctgaaacacttattatttttgtgaatcacgttagaacagagaggacatcaagtaatcctgggatctacaaagaggtgccttgcggtggtaatgcactaggat

SEQ ID NO: 301000 - DNA, 407 bp, Zea mays
cccacgcgtccgctctgtaagactagactatcagaatttgatttggcaaatcgttcgttgtaccaactagctagacgctagttagtgccactagtgcagtgcgctctgacgtgacgatttcagttcacgtgcagaagtcgggttccgccggccatggccatccccggattcggcagctgcgcggacggccggactgcagccggcaggcggaagtgatgggcagcaccgtcgacgacgacgaggcgtgcgagctggtgagcggctcggacctcgtcatcggcgagggagacgacagcgtcagcgcgtaccttttcaaggccgtcaagaacaacaatggcaccggcatcctcctgctctccgacatcttcggcttccaggactccgccacgcgggacttcgcctaccgc

SEQ ID NO: 301001 - DNA, 405 bp, Zea mays
ttttcccaactgctgcagatgattgaaggatgccttccttattatgataagaaaaatgatgaaattgagaaggcacataattctaaagaaaggcctccttttcgagctcctccaaagcattatgcacatgggttaagagagtaagcactcattgtttcccctgtatagtactccctccgttttttttatttgtcacgttttagtttaaaaataaactatcggacgacaaatatttaagaacagaggtagtagcaaacactcttgtgtcttgctatgcatttcaaacttttagcaaacaactttctgcaagtaatgctcaatttaactacttgtatttgtgaaaattaacgtgttgtatttcctccacataccattattgttagtgattttccctttggtaatttc

SEQ ID NO: 301002 - DNA, 406 bp, Zea mays
accacgcgtccggagttttggcttgtccggatggagaagcccggagttgaagttgtgacaaaggcccaaatggtggatcactacacccaaatccttatgaaagtgttggggaacgaacatgatgctcaggttactatatatcacgtttcatgggatagggattatggtttctgttgtcatattgatgaagaatgcgcaaaagagttagctgatgttcctggagtgttatccgttcaacccgatactaactttggatcagacaacaaaaattacaaaggtgatgatggcgtgaaatcatctgaagggactggatcggtcgatatcaaaactaaaagggtctttgttacaagcctttcattttagacatctgataaaaccctaccggcagcgtttgagcctttcggtg

SEQ ID NO: 301003 - DNA, 357 bp, Zea mays
gcccaggacgacacacgacgctaaacttagtcctagcaggagacagagagccgggaaacccgcgacaggctgccgtgctatggactacggaccgtcgagtccgccatagcgaacgacggagaaggggatggccgggatccggccgatcatacacgactgggagccggtggttgtgccaaagactgcagccaccgccgctgccaacaacgatgacaacgccgtcaacgccgcgcgccgctccggcgcggccatcgagaccatgaacaagtacaacgctggtccgaacaccgcggcctccatcggcacctccctcaacaccaagcaccccgaccatcagacagagagcttcgcccatcg

SEQ ID NO: 301004 - DNA, 188 bp, Zea mays
aacctcatatcatcgtggaccacttaatatatggttacagcagatgcaagcggatgaaccaagatgcacgtagacacacctacgtacatgagcacaacgactgacgccaagcttgcaaagagagatagcatcctggccagttcggtgtctctctctctcacacacactacacaagacttacgcccggc

SEQ ID NO: 301005 - DNA, 391 bp, Zea mays
  unsure (1)..(391): unsure at all n locations
ctcgttgttcaacacaatcctctataataagtcctattacggcaagcaaccacgggcggagctcggagcgtcctcctcctcccgtctataaattcccctccttttcttcctccatatataagggccatcagatccaagaagagggaagagcaccaatgatcttcggcgcccgttcaggatccacatcttcccgagcgaattcatggttgacctcttcctccttctgaccggcgggggggggcttggggatggcgggtgantctcaccaatcaaattttcatgtccgatctctacattcagatcccaactgccttcgatcccttcgatgacgccaatgcttgggactctggtgcagcaccagggtcaaacgactagcttcaaattcgcatcc

SEQ ID NO: 301006 - DNA, 289 bp, Zea mays
tgaagaagagagcagttgacgatggctcgtatcattcataccgccctcaagtccacgggaggcaaggtcccccagcaagcaactcgcacattttgcagtcatgaactcggcgccgacgaccggcggcgtcaagaatcctcatatgtacatgtccattgccctggcgctgcgcgagatgtgtacggtatacaatatcacggagctgcttattggcatgctgcccttccatcgcctgtttcccgagatctctcacgacttcatcacagacctctggttccatagtcacgcc

SEQ ID NO: 301007 - DNA, 371 bp, Zea mays
acgcatattgatggccagtatgctgtatttgggaaggtcactaaaggtgacgatacattgagtaagctagagaggcttccaacccggagagaaggcatttttgtaatgccgatcgagcgtatcaacatcctatcaacttactattatgatattgatctagagagctgtgaagcagaaaaatctattctccggaggagactttctgaatcagcatcagaagttgagcgatggagaagaaaatgctttgcgtaatggcggaataacgactgcatattccgtttcctgaggctggatatggacgacggtgtggaaatgtgtatgcccgtgttcttatcctatcactgtaatacttgagtagatgttagatgggt

SEQ ID NO: 301008 - DNA, 376 bp, Zea mays
gacaaacggccgaaatgtcgtacgtgtgatgccaatgctgaaagccattaagcaactgaacgttcatgatgtgccatccatattaccagttgttcttaaaagatttcagtcatgaaaacattgcaagatcatcatatgtgttactttccctgatatcttggtcatggatccatttgtgactaagtctggtgagaagccccatcttaaggtcatgtacgtcgtggctgtacatgtggtcacaaaaaatgtatcattctctgggcactagatatcatatgtcaaaaatacacacggtacaaggttgggaattgaggagtcaaaggtccatgcagttccagtgaaacatcttatgtcagaaggtgcatagatgcctttc

SEQ ID NO: 301009 - DNA, 393 bp, Zea mays
aagtagatggaagcaggcggcggcagaggaagcgtccacggccacgaccggcagcagcagcagacagcacagggtgaggatccgccgatctgaccagttacaaggcgcgcgcgagccgggagctctggagggcatggccatgggaaaggagccggtcgaagaggaagaggaagaggtggcgtgccactgctgcgggttcacggaggagtgcacggcgccgtacatcgcgggcgtgcgcgcgcggtatggcgggcggtggatctgcgggctgtgcggggacgcgactggcgaggagctcgggcgcacgtccccgcccatctccgccaccgaggcgctggaccagcacgcccgcgtctgtcgcggggcctccagccgccggcgtcacccccgggc

SEQ ID NO: 301010 - DNA, 369 bp, Zea mays
atcaaaattgttccccaaaaaagatgtagtgaacacattgaagaagatgtttatagggcaagcagtctatggaccaattattaactcagttttcttctcatacaatgcacgattacaacgcgacactgttgctgagattattgcaagattgaagagggatctaattcccaccatcaaaagcgggcttttatactggccaacttgtgatttcattactttcaagtttgttccagttcatttacagccgctagtgagcaattcattctcatttctgtggaccatctacataacatatatggccagcttaaagaaatcagatgtggacgtggaccccagtacctaagtgttgtcgagtgactcaacatggct

SEQ ID NO: 301011 - DNA, 333 bp, Zea mays
ccttcaatgaaatgcggagccccattagcggcaggggggttgctgttccctcagctctctcagcattcaccggtgcaggtgctgaagaacttctcccatgttcgcaatcttcaggtagagctcccctccggagatgttgcagtcgaggagggggttctgctgaagtggcgggctgaatatggcagcacacttcagagctgcgtgatcctgggtggaaccttggttgatcgcaaggccgctggcagtgggcatgagccatcaccgggtgacaagggaagcatgccagaatctttctataccaatggtgggctgaaactccgtgtcgtatggact

SEQ ID NO: 301012 - DNA, 393 bp, Zea mays
gctatttaagcaagcatacaaatcttcagtagacgctagtgagtatctagatcgctaccagatgtacaagcttcttaagggtccgtatgacaaggagggagcgtgcattattgttactgcagtatctaacggtgttacttctgagctgtgggcagagaaggtctttggcatgtatacaagttgggcacggaagcaacgttacaaggttggattgattgagaagatattttcaactagtggccatatccaatctgcaacaatggagattgaatcagagtacatgttcggcaccctttctggagaaaaagggatgcatcaaatgatatactcctccattgaaaattccgacattgatcacgcattatcagctagagtcgacaaaattcccctgtt

SEQ ID NO: 301013 - DNA, 370 bp, Zea mays
cgggtcaacccacggatcaagtgagatccgccgcttgggcggacgcatgggccgaggcccatggcgccgagaacgtcagagagagcgatgacatcggcggccgcggggctcgcgcgtggcgccggcccgcactacagacgcgtcaggaagcggccgtggggccggtacgccgcggagatccgcgacccggccaagaagagccgcgtgtggctcggcacgttcgacacgcccgaggacgccgcgcgggcctacgacgccgccgcgcgcgagtaccgcggcgccaacgccaagaccaacttctccttcccttcgtgcctgccgctcgccgccgcggacgtggccggcggctgccgggacgggaacagcagca

SEQ ID NO: 301014 - DNA, 347 bp, Zea mays
accaccatcgaccttcaagtctcgctacgtagcagtgcaataaaaaaagcagccgcaatggcgagcagcaccatggccctctcctccacggccttcgccggcaaggccgtgaacgtgccgtcgtcgtccgccttcggcgaggcccgcgtgacgatgcgcaagacggcggggaaggccaagccggcggcggcgtccgggagcccgtggtacggccccgaccgcgtgctgtacctgggcccactgtccggcgagccgccgagctacctgacgggcgagttcccgggcgactacggctgggacaccgccgggctgttagcggacgcggagaagttcgccaagaaccgggg

SEQ ID NO: 301015 - DNA, 368 bp, Zea mays
accacgcgtccgcccacgcgtccgcccacgcgtccgcccacgcgtccggtcgaggtacaaggtggtgaagttcgaccttagcaagacgattcagtccgagaagttcgaagataggcgtacctggggcatcttcgttgaaggtcggaacgcggtttcgattttggtggccattaacaatgtatccacattcattcatggccgtaatttagattggcgatgtgtggatacatttgatgagcaatacatgaaagataagatccgtagtttgatcacagataggcagcgactatcacagatacacaatgaagtacaaagtattcctggagatgacatgaaagcattttttgatgtgattaatagcattcgca

SEQ ID NO: 301016 - DNA, 411 bp, Zea mays
cttttgacagtcatgaggcggaggtgtttcaggttgaatggaatccaaatttggccactgtattagcttcatctgccgcagacaagagagtgatgatatgggatattaataggattggcgatgagcagtcagaggaagacgcagacgacggaccaccggagctgctgttcgttcatggaggccacacagacaagatatcagagctgtcgtggaatcctagcgagaaatgggccattgccagcgtgtctgaagacaacatcctgcagatatgggagatggcagagagcatatactgtgatgacctctccatgcaggttaactgactcgtgcctcgaagcataaaggtgagttacctgaccaatgatgcaagcgtatctggaggggttatatacctgtatgatttgagagatt

SEQ ID NO: 301017 - DNA, 302 bp, Zea mays
catcgcgtccgcggacgcgtgggcggacccgtggccgacgcgttggccagagcattgggccgtcaacaatggacgaggccgaggatgccatgaagcagctcgaggaggtcggcgccaaggtgtccagcgtttgacactaggtatactgacccctttttttttcctccttttttttttaaatttcgttctttgatctttgccccccaacctttggtgtatccccattgccctttataaggaattgcggtttgccgagaaagaatgacccgctaacgaggcgtcacaagatacgtgtaaacaaa

SEQ ID NO: 301018 - DNA, 329 bp, Zea mays
accacgcgtccgcggacgcgtgggcgcacgctcaactcaaacccccgtccctaacgcagaagaccggcggcagcggcgggggtgtgtgtgtgtggactggactgtaaccaattgccagcaatccagtcatccatccatccatccgccccgctgacggcgggaatggcccggctcgtgctctccgagtgctgcagcctcgcgccgctccgcggcctggtcgccgggcggggcgccattgcggcgccatcacgccccgcgctctccgctgcgccgcgccgtcgtcgcacgtccacctccatccaccgctactgggcgctccgcgtctccgc

SEQ ID NO: 301019 - DNA, 430 bp, Zea mays
cagacgcgtgggctcctatggcatctactcacgcaagcagtcctattcctgattccttgctcggcttgcgtggcccatggattcgatgtcatatcatgtgttgtttgctcacccgcctggtcgcagttcgtgtcggatggcgtgttcttcgcggagctgaatgagatgctcgcggaggacggctactccggcgtcgaggtccgcgtcacccccatgtgcatcgagatcatcatccgtgccacccgcgcccagaacatactcgcgagaagggccggaggatcagagagctggcttctgtgattcagaagcgctttaacttatcagagggtggcgttgagctctacgcagagaagctgaacaaccgcgggctctgcgacattgcccaggccgagtcgctccgctacaagcttctcggtgaactcgccgtgag

SEQ ID NO: 301020 - DNA, 392 bp, Zea mays
cacgcaggccagcggcggctacaaggtggccatccttggcgcggcgggaggggtcgggcagccgctgtccctgctggccaagatgtccccgctcgtctcggcgctgcacctgtacgacatcgccgccgacgtggagggcgtggccgccgacctgagccactgcaacaccccggcgcgggtctccggcttcacgggcgaagacgagctcgcggggtgcctgtcgggcgcggacgtcgtggtggtcgccgccggcgtgccgcggaagcccggcatgacgcgggaggacgaccggttcggcgccaacgcgggcgtggtgcgggagctcgtggcggcggtggcggaccacgcgccgccgggcgcgctggtgcacgtgatcagcgacgccgtggact

SEQ ID NO: 301021 - DNA, 425 bp, Zea mays
aagatgagaatggtgatgaggcgccatcgaaaaaggcccaaatggttgtccaagttgaggctgtccgggtgcaaaaggagcttgcagcgactgagattgatggttattgtgaaggcgaactaatcaaggttacactttctggaaaccagcaacctattagagttgaaatcacagaagctgcgatggagttgggtgctgaaaaactttccgggttggtcaacgatgcttacaaggatgcacaccaacggagcgtccaggccatgaaagagacgatggctgacttggcgcagaccctgggaatgcctgcggccctcggcatggtctccaattgatccgcaattcgggaaagctttcaattctcccttttcctcaattttgtatgccagccgtgtgaattctaagcaaaacccctccgcgacctctca

SEQ ID NO: 301022 - DNA, 413 bp, Zea mays
ggctcgattaaccacgagtctcagctcaactctgtacaatgatgaaacaaatgacaacactttcggggcgctaaggcctcctttggattaaaagataattcatgtgtttttgaaccatttcctgtgaaattcatataccatccccataaaattcctacattcgaaaggaagcctaaaactcggctgagccaggaactcggggaaatgggatggcgtctctgatgttgtctattccagtagcaaactgtacaagccgctcaaatccaagaccgaaaccggcgtggggaactgatccatatcgccgtaggtccagataccaccagtagctctccttgttcagattttgctcgtctagtcgggcttcaaggtaatcaagacgctcttccctctggcttcccccaataagctcacca

SEQ ID NO: 301023 - DNA, 369 bp, Zea mays
aggacgcgtgggccgactcgtatgggaatctgcagtcatcttccatgtgaccacgaaacacgggggcacattcgacaacatgtggaagctcacctagcaggcgcattgctcgaattgttgactgcatcttgccaccaggctgtttcaggccatcaatgaacagttacccatagtatcctacactgaattcttagaacttgctggagtcgtggtaatcgatgtaaccgggggatctgacgtacccttccaccccaggaggcaagatatccctgacgctccacctgaaggtggtcttcctgatgccacctaatgttctgattagctcaggcagtttttctcgacacagatgggtcttgtgaaccaggacat

SEQ ID NO: 301024 - DNA, 415 bp, Zea mays
aaataatgttcggaaagttatcgtggtttcatccacagctgctgtccattttaatccgagttggccccaaggtataatccaagacgagagttgctggtcagataaatttttttgcactaagagtgaggaatggtacattgctgccaagacaattgctgaatatacagcactggagtatggagagaagaatgggctactcgttgttacagtttgcccttgtgtcgttttaggtcgactcctgcagcctctaatcaacaccacgagtgaagtattcgtctacattataaaaggaggtcctagaacgatgagtaacatcacctggaacagcgttgatgtccgttatgtaaccgatgctttgcttttggtatatgggaaagtggaagcatctgggagagtcattttgggcagcaaatcg

SEQ ID NO: 301025 - DNA, 322 bp, Zea mays
gaggcgaacgacaagccagcggcggcgtccgggagcccgtggtacggccccgaccgcgtgctgtacctgggcccactgtccggcgagccaccgagctacctgacgggcgagttcccgggcgactacggctgggacaccgcggggctgtctgcggacccggagacgttcgccaagaaccgggagctggaggtgatccactcccgctgggccaagctgggcgcgctcgggtgcctcttccccgagctgctcgcccgcaacggcgtcaagttccggcaagccgtgtggttcaaaggccgctcccagattttcaaccaggggcggc

SEQ ID NO: 301026 - DNA, 100 bp, Zea mays
gttggtcctcacaattctctagactgagtcataggacccgttgagaacctcgccgaccacctcgctgaccctgtcaacaacaacgcctgggcctacgcta

SEQ ID NO: 301027 - DNA, 186 bp, Zea mays
tgctgtatcacggttgagccgtcatacccgttgatggagggcgccactccgccgaaccctggcgccagcccgccgtccccgactccggcgcccgccgtgtggcataactactactcgtgccctgacaggaacatctgctgccgcatttacgattacggtagctactgcttcgcctgaggctgtcgc

SEQ ID NO: 301028 - DNA, 376 bp, Zea mays
ccaactcgtccggccacgcgtcatggcatcgacaaggacactctggatcatgtggccgcgtatactctgcagcctccttcagcgcgggatctgctcctccatggccaggatcatgttctcctccagcagacagtcggaggtggaggccactcactgtatcaacccaaggcagcaggggcccaaccagtcggacctgtccgtctccaaagcacggtctctgcataagacctgcttacaaacctgaggcagctaaccggattctgtcaatgcggcttatgacccacagacgatgcacgccaaggccaactccctgacgcagctcagcatgtatacctcagatagataaggcacctatgccaaggatgcaatgtcagtc

SEQ ID NO: 301029 - DNA, 158 bp, Zea mays
gcgggtcgacgcaagactctaaaatcgagtcgtattacccagcagctgcatcgatggcacctaatgcggagaagaagccggctgcgaataagccatcgacggacgagcccgctgacgcgaaggccccggcagggaagaagcccaaggcggaggagcgc

SEQ ID NO: 301030 - DNA, 413 bp, Zea mays
cggtgagcaaagtgatggacatcgtctccgccttcgccgcgtagacgcgaaaccgagacggtgagcaaagtgatggacatcgtgaagcagcagctggcgctggcggcggacgtggggctgacggcggagaccaagttcacggacctcggcgccgactcgctggacacggtggagatcgtcatgacgctggaggaggagttcaagatcaccgtcgaggaggacaatgcccagagcatcgccaccatccaggacgccgccgacctcatcgacaagctcgtcgaccagaagccacgagacagcgactgattgtcgacgcgacgacacccaaatcctatccatcgatcgccgctcgtgcatgtgaatgctccgttaatgtactgtaattgagtagtttttttttttatctctagcta

SEQ ID NO: 301031 - DNA, 336 bp, Zea mays
aacgtttccccagatccagatcgcaggcgtgaagggcgactgttaccagattatgatccgttttcgagcttcgaggaatcgacggtcaagcttcggtgaccaagtgacctggttcttcgagttctggaaggttgaagaccctgagcatctatttggtgaaggttgtccacattgcaaccactgctcaggagaagacgaagtcgtggaaggagacttccaggagtttcaagactacgacgaattctaggtgtgggttggcggcaaaccccagtcagctggctgtgaaggccttatctttactgtgtttcgctaacactttgatttaactgtaagttg

SEQ ID NO: 301032 - DNA, 366 bp, Zea mays
agcgcttggcgagtcggatctcccgtacaccgtgcgtgtcgacccggccaccggcgaggtgaccacgcacggccggtgcgacttcggcggccgtctcttcatgggcatgaccgctcacccgaagaaagaccccgtcactggcgaggtctttgcgttccggtacggccccgtgccgccgttcgtcacctacttccggttcgacccggccgggaacaagggccctgacgtgcccatattctcagtgcggcagccgtcgttcctgcatgacttcgccgtcacggagaggtacgctatcttcccggagatacagatcgtcatgcagcccatgggcatggtgacgggcggcgcgcccgttgggtctgacgc

SEQ ID NO: 301033 - DNA, 215 bp, Zea mays
agttggaaaaagcacattctcagcccaactctcgtttgccctagctgaaatggaccatcatgttggccttcttgacatagatatatgtggccctaacaatcctaaaatggcaagcctttaaagaacaaaaaattatcaaaagaaaccttggtggtcacccgtttaagttgaattcaaacctggtgtgaaggtcaatggtttcaagctgcccaaat

SEQ ID NO: 301034 - DNA, 357 bp, Zea mays
ccaaatttgaggataagcacatcaagtgatgttacaggagtagaaatcgcaggtgccctgaagaacgttcttgcaatagctgcaggtatagtggaaggcatgagtctcgggaacaactgtatggctgcccttgttgcccaaggctgttcagagatacggtggttggcgacgaagatgggagcaaagccaaccactctttctggcttgtctgggtccggtgacatcatgctcacatgcttcgtcaacctttcgcggaatagaacagtgggactacgcctcggttctggtgaaaagcttgacagaatcatgggttctatgaatcaggttgctgaaggcgtatcaactgctggggctgtc

SEQ ID NO: 301035 - DNA, 292 bp, Zea mays
ccaccgaaagaaatcattcgcaagattgaggaacctgcaaaacctctacgatttggtgtccacacgaacaactacaacttgacgctagagaaagtaaaaccagggaggaagggaaacctgaatgttgctacggagatactacaggttgcgccctcccttcataaggtacaagtccggaaagcaaaaggcgacactctggaattccaaaagttctacaagaacctttccaagaccttaaaggaccttttccggaaatctcaagacctgcaaatgcgaccggcttcttaacatc

SEQ ID NO: 301036 - DNA, 368 bp, Zea mays
cgtccacccacacgtctgcccacgcgtccgcccacgcgtccggcaccgtcaggaacccagatgacccgaagaacgcgcacctcaaggcgctggacggcgccgccgagcggctgatcctctgcaaggccgatctgctggactacgacgccatctgccgcgccgtgcagggctgctagggcgtcttccacaccgcctcccccgtcaccgacgacccggagcaaatggtggagccggcggtgcgcggcaccgagtacgtgatcaacgcggcggcggaggccggcaccgtgcggccggtggtgttcacgtcgtccatcggcgccgtgaccatggaccccaagcgcggggccgacctcctggtcgacgagtcc

SEQ ID NO: 301037 - DNA, 199 bp, Zea mays
caaaaaacatacgtatgacctacagaccatcaaaaagattcagcagaaaagatctgtcgcaaaacgcatgggcttgaaggacctgaaaatgggatataacattgacatccattattacagcgtgaggcttaaagctgcacacaagtttcttaaagccaggggaccatgttaagataattgtgaacctgaaaggaccgga

SEQ ID NO: 301038 - DNA, 205 bp, Zea mays
cccgggccgacccacacgtccacccacgcgtccgcggacgcgtcggcgggcgcgtgggttttgccggctgggcagcaggacatgggctcatgcgcaagtcgttccactgcatgagcaatgggcatcacaccattgcggagtcttttcccattacaggatgcacaccatcggtggccttatacttcagcgggggcgtcggacctgt

SEQ ID NO: 301039 - DNA, 371 bp, Zea mays
acacgtccaaagtatgtcggaaagaagcacggtgacatggaattccatgatcttcgggctggcgaattccggtcactgccaagaagccatcggtctcttcaaccggatgctgtgcgacggagcaaggccggatcacctgacgttcaccgccgctctgacggtttgcagctacgccggcatggtggagctcgggaagggcctgtaccgcgccatgcacgaagaacacggcatcgagccgaggctggagcattgcgcatgcatggtgcatttgcttggccgacccggctggctcgccgagggcttatgacttcatcaaaggccatgccccctggagcctgactgccgtcctttggggggcgtttgcggggggc

SEQ ID NO: 301040 - DNA, 338 bp, Zea mays
tggaacagctgggtctaggggattaataggattggccaaactcgggaatacgtgctttatgaccagttcaattcaatgtttggctcacacagcaatccgtgatgaatacttccttggtgattatgcacaaattatatgccgggctactccattcggactgaatggtcgacttgccttgacgtttggagaactgttgaggagattaagcgataccgatcgggaaccagttccaccacagcagttcaaggaataacttgcacgttttgctccgcaacttggtggctttaatcaacacgattcatatgcacttcgtgcttttttaccggatggtctccaat

SEQ ID NO: 301041 - DNA, 338 bp, Zea mays
cccgggccgaatgatacatcgactcaccatatcacaggcagctcgagagagagagagagagaaagatgtcgtggttcgggcaccatcaccacacccagccggctcccccggcgtcaggccccaaccaggtgttcaagatcttctgccgcgccaacgagaactactgcctgaccgtccgcgacggcaccgtcgtgctggccccggtcaaccccaaggacgaccaccagcactggtacaaggacatgcgcttcagcacccgggtcaaggacgaggaaggcatgccggcgttcgcgctcgtcaagaaagccaccgggctcgcaatcaagcactcccgcggc

SEQ ID NO: 301042 - DNA, 362 bp, Zea mays
acgaaggtggggacctagactgtggtcaggtgcacgcgtattcaagcaggcgctcttgcttttcgtccacaacaagttctccatgtgccctgggcacgcgacacatgttcggggtggtgggcattaccgtcacctccctcacgtcccgtgccgccgcggccgaggtctgcttcctcgccttccgcaacgagcagtccgcggggtacgccgccgcctacgacttcctgacgggctccccgggcgccctcctcatcgtctccggcccaagatacatccacgggctcgccggcctctcccacgccaccgccaacgcctggtcgctccccatgagctccggattctgcgaccaggctgacgccggc

SEQ ID NO: 301043 - DNA, 214 bp, Zea mays
cccgggccgactcaaacgtcaactgctctctccctccgcatctctgctctgctctcggagcgttaccgctccagctccccctcgctccgttcccttacgctcagttcgctgggaacaccaccgccttcttcaagatcggcgggcgggcactcgccggcgatcacatcgatcgtcaccataaccctccgggtgcggggggctccccgtccgcccg

SEQ ID NO: 301044 - DNA, 357 bp, Zea mays
gtccaactcgtgcttcacgcactgtcagacccactcgagccactggtgacattcgcccacctccccgaggctcggtaatcagactgttgcagacgctgttggggactggtactttggtagaagacgggtagtgaagcaggtcgactgcgagtacccttgcaaccccacgtgtagcattcagtatgtgtgagctggcttctccttcgtgaccgccattgcaccgagctgaggttcatgggagtccttgtttcctccactcccgtacttgaggtgtccttggttacaaatcagttttattttaatccagagaacgatacctgaatgttaccgacaatacgtacaaggtgtgtgtaaacc

SEQ ID NO: 301045 - DNA, 424 bp, Zea mays
ggcatctatagcaaccggtccaacactttcacgctcaggcgctcagctctagcagtggctgcctccaccatggcgatctcctccacggcgatggccggtacccccatcaaggtgggctccttcggcgagggccgcatcaccatgcgcaagaccgtgggcaagcccaaggtggcggcgtccggcagcccctggtacggccccgaccgcgtcaagtacctcggccccttctccggcgagcccccgagctacctcaccggcgagttccccggcgactacggctgggacaccgccgggctgtccgccgaccccgagaccttcgccaagaaccgcgagctggaggtgatccactcccgctgggccatgctcggcgcgctcggctgcgttctccccgagctgcgctcccgcaaaggggtctaatttgggg

SEQ ID NO: 301046 - DNA, 323 bp, Zea mays
agcccacgcgtccgcccacgcgtccggtggtgtcggaggaagaggtcgtggctgccgccgaagcagccaacgcgcacgggttcatcgccgcgctgcccgacggctacgacaccgtcgtgggcgagagagggacccggctgtcgggcgggcagaagcagcgcgtcgccatcgcacgggccgtcgttaatgaccccaggctgctgctgctggacgaggccacgagcgcgctggacgtggagtcgggccgcgtggttcaggaggccctagaccgggtgatggttgggaggaccaccgtggtggtggcgcatcgcctgtccacgatc

SEQ ID NO: 301047 - DNA, 174 bp, Zea mays
aactcccgcatacaacctggacacgtgggactgagagatgtgcacactggtgaaaaagacatcatgatgcagagtatcgtcctggcagacaccctcaagtacctgtacgtacatttcccccgtccatcagtcatagccgtcgacgagtgggttttcaacgttgacgctcagcca

SEQ ID NO: 301048 - DNA, 436 bp, Zea mays
cccacggacgcgtgagcggacgcgtggggtggcattgccatagaaggcccagatttcagaaccaagagtgaagaagagcttactcaactgataccaaagatacaggtgagttcattagttgtagtactcatctttgcacgctttttttgtatcctggtaggtcattcatcagtgatcactgtgatttgctatggatgtggcaggtgatggcaagatcttcgccactggataagcatacccttgtcaagcatcttcgaactaaactctacgaagttgtggctgtgactggtgacgggacaaacgatgcacctgctcttcatgaagctgataatgggcttgcaatgggcattgctggaaccgaggttggcaaagagaatgctgacgtcatcattcttgatgacaacttctccaatattgtcactgttgcaaaatgggg

SEQ ID NO: 301049 - DNA, 315 bp, Zea mays
ttccggaccgacccacgcgctcacaagtgcgagtgctgcgggttcacggaggagtgcacgccggcgtacatcgcggcggtgcgcgcccagtacctgggccgctgggtctgcggcctctgcgccgaggcggtgggcgacgagatccggcgcgaggggaccatcaccacggccgacgcgctcgaccgccacgtcgcgttcgcgcgcgcgccgcgctcccggagggcgcccgcggaggacgacctcgtggcggccgtggcgcggctgctccgccgctgcctcgactcgccgcccgcgtcgcctgcgccgccgccacag

SEQ ID NO: 301050 - DNA, 312 bp, Zea mays
aacggacgcgtgggtttttttttttttgtataatttacaccatatttcactgataatgtctacaaggaccaaagcatgcatgcaaatacgtacactactggtacaatctctgagcccatgctcccttcttcacaaatactggtacatctcctgcagtagatatacgaatacgtacgtctacggtacatgcatacaagtacgtatacgccttcgctcacttgccggggacgaagttcgtaccgtacgctcacgcgttgttgttgacagggtcaccgatgtcgtcggcgaggttctcaacgggacccttgccgg

SEQ ID NO: 301051 - DNA, 374 bp, Zea mays
tgccggtcaatgggtcgcgggtccgagcaggcgggaaggcacgcgtccgcccacgcgtccggctgcgacccgctcggcctcgccgacgaccccgaggccttcgctgagctcaaggtgaaggagctcaagaacgggcgcctcgccatgttctccatgttcggattctgcgtccaggccatcgtcaccgggaagggcccgctcgagaacctcgctgaccacattgccgaccccgtcaacaacaacgcttgggcctacgccaccaacttcgtccccggcaagtgagggaggcgccgccggtgacctttaggtgtccggatgcaggtgagcgcacgctggttttcggtttgtaccatgatgtaaactaatgttcaatc

SEQ ID NO: 301052 - DNA, 306 bp, Zea mays
gcagagcatcctggccatctgggcggggcaggtggtgctcatgggcgccgtcgaggggtaccgcgtcgccggcggcccgctcggagaggtgggggacccgcggtaccctggcggcagcttcgacctgctcgggctcgccgacgacccggaggcgttcgccgagctcaaggtgagggacattaagaacgggcgcctcgctatgttctccatgttcggcttcggcgtgcaggctatcgtcaccggcaacggccggcgcgagaagctcggcgagcacatcggcggcgccgtcaataacaacgcctgggc

SEQ ID NO: 301053 - DNA, 324 bp, Zea mays
tgttgagaaatacgaaagtggaatgtgggtcgagtcttagtcggatatttcatatctcttctcttcttgtccaaacagatggaagaggagatgatttgtgctgaccggaaaatccatatctctcgtagccatttagagcatacggatcgatttataagaatcgaatgttgggtttttatgttattttgtgatagaatggaaagaattctagacagaaggggttgggaattatgcctacatcacgtattggtggagggttcagtgattggacggtcgcagattgtaccaatattttacttcaaataattccgacaagctccgggg

SEQ ID NO: 301054 - DNA, 329 bp, Zea mays
cacgcgtccgcccacgcgtccgccttgtcaaagccggcaatggtgttgccacccttggcctccctgactcccctggcttccccaacggggccacgtaccacactttgacggcaccctacaatgatgtgcaccgcagtgatcaaactgttcgaagacaaacccgtggagattgcgggcgtcctcctcgaaccagttgttggcaacgctcgtttcatccctccagagacatggtttccttaacgctctccgcgacttgaccaggcaggatggtgcgctccagggcgtcgatgaactgatgaccggcttccgtctgtcttacggtggacctc

SEQ ID NO: 301055 - DNA, 350 bp, Zea mays
gcgtccggcagcgtcagctggatcctaaggactaccaggagcagacggcgcagcaccaggagcagcagcagcaccaccatcacccccacctgcaaatccaaatcgaccagccgccgccgccgccgcaggacgggggcggcggagtgaaggagcagcagcagctgctgcaggtggtggcgcagccccgggatcggaggcagcaggcgctcgcccccaagcggagctccaacaaggaccgccacaccaaggtcgacggcaggggccgccggatccggatgccggcgctctgcgccgcgcggatcttccagctcacgcgggagctcggccacaagtccgacggcgagactgtg

SEQ ID NO: 301056 - DNA, 244 bp, Zea mays
cgtcgagtccattgccatagctggtgttgctaggtgctcttacattcgggctaagattgaagaggagaaaaggaaaaagagcgcatgactgctgtggagaagattatcgagaccttcctcggacacaacatcgtgcacaatcacgacctacttctatatcttgttttgttttcatcttggggcaatccgtccattgtttgttcccagtctggtgattaaaagtccgcagattctgtttgtggaa

SEQ ID NO: 301057 - DNA, 386 bp, Zea mays
acggacgcgtgggcggtgagcatcgccccgcgctggcaagggtgcaccctgtcccagaacgcgtgctggtcgcggttgctgcacaccgtggcgttgggcaggcagtccgcctcggcgccgaacctcccgcccccgcagcacgcgtcggcgacgtccgtgtaccccgacgcccccgggtcgtcgaaggtggccatcgacaggccgtagtagtcggcgagcgagtaggtgaagcccggcaggcgggaggcgaggctggcgagcaggaccgcgagggcgtcgtccaggcccgacgcgagctcgttcaggccgtccaagcacgcgcccgtcttcgtcccgccggacagccgcgccacggggacgcagccgagcagccccacgttgatgat

SEQ ID NO: 301058 - DNA, 342 bp, Zea mays
gaccaacattacaaatgctgtttatttttattttacacaaaattccacaacataacaaatatatcaacagttatatagcacaacatattttcacataaaacatctcacacacaatcacataacaatatttaaatttagagtctcatcaattacatcacaaaagtctcatccatagtcaatgaagggatatattagctccaagcaaattgtgttaccataaaattccatgtagagcaaacatcattagcataggatgttttaaacctcgatagatggcatagtcacggagatgtggagatctttgccatcatttatagcttccaacatggtgatgcactggga

SEQ ID NO: 301059 - DNA, 374 bp, Zea mays
agacggcaacgtcttcgtcgcggctaccgcggtggtggcgtgcacgggcgccggcgcgctggcgcgcgggagggaggtgcaccggtgggtggagcagagcgggatccagatggacgagaagctggccaccgcggtggtggacatgtactgcaagtgcggctgcgtcgaggaggcgtggcgtgtgttcgaggccctcccgctcgctgccaaggggctcacgacgtggaactgcatgatcggcgggttcgcggtgcacgggcgggggcaggacgctctgaagctgttcggacggatggagagggagggcgtggcgccggacgacgtcacgctggtgaacgtgctcactgcttgcgcgcacgcggggatgctcagcg

SEQ ID NO: 301060 - DNA, 351 bp, Zea mays
acccacgcgtccgtgtaaaggaatatattttgaaggctggttgtaacgtggacaagtcttcattccattcactgatggaagggatactgaaaaaagctggtgtggaaaaatcaatcgagtttgctgaaaacatagcatctacgggaattctgctgaatgatttctttttatgcccattgattagacacctctgcaagcacaagaaagctcttgaagcgcatcaactattcaataagtttaaaggtcttggagtttcactaaaaactggttcttataattctcttatccgtggccttgtggatgaaaacctgattgatatcgctgaagacttgttcactgaaatgaaaagac

SEQ ID NO: 301061 - DNA, 375 bp, Zea mays
gacagagacagggacagcgacgatcacatgctatttcaacgagaagtgataccgatagagtgggccctgtgatgcagcaggggttcgaccgtgcagaggctgtgttcacgctcatcagccgctgcatgtgccacacggtgactcagctgattgccgacctgagcgtaaatgcgatggtgcacgagctgggcagcgaccccaggggcaaggacatggtgcacgcgctgctcaatatgctgagatggaaggcgcccgccgtctccgccgtcatcagctgcgggaatctcatctgcggcaccagcaaagtcatgtctctccacctcgccggatagctcgtgcccatgctcacgaatgctagcgccctctgggtctaca

SEQ ID NO: 301062 - DNA, 391 bp, Zea mays
acgcccacgcgtccgcccacgcgtccgcccacgcgtccgagaaaaagagaagatgaggagttgcatgtggagcgtaaaaaggcacagttggttgataccaagaaaatttctattgacaatagtcatgcagctgctgtggatacctctgagctagtagttgaaatgatgcaagtgaaggaagacattgagaaccaagaattagttgtgcagaaaattaatttgaaacttacagatgctttgcaagaagagaataatagaagagcgtcttacaaggacttcattgagtctgtacatgctgaaatggggtctattagcgatgctgagcgtgaattgcagcttgttgaagaaaaaatacctgatgctgagcaagagaaggcccactatgaacgtg

SEQ ID NO: 301063 - DNA, 333 bp, Zea mays
acgcccacgcgtccgtcccgttcccgatcctcatcacctcaaccccgcgccgccccctccccaccaccctcgccatggtcagcgccgccgcctcgccgccgccgtccgggaagccgacgcaggacgagctgaagcgcttggcggcgcaccgcgcggtggagctcgtggagcccggcatgacgctgggcctgggcacgggctccacggcggcgcacgcgctggaccgcctgggcgacctcctccgcgcgggcgcgctgccgggggtggccggcgtgccgacctcgctcaagacggatgcgcaagcggcgcgcgtcggcatcccgctgctcccgc

SEQ ID NO: 301064 - DNA, 313 bp, Zea mays
acgcccacgagtccgcggacgcgtgggcggacgcgtgggccgacgcgtgggctgcatattagtgcataccgacaaggaaatgaaagaacactgactgggaaacatgacactgcgagcatcggaacgttctcatggggtgtggcaaaccgcggctgctctatccgtgtggggcgagataccgacgcaaaagggaaaggttacctgcaagaccgtcggccggcatcaaacatggacccgtacactgtgactgggctactggccgagaccacgatcctctggcagccatccctcgaagcggatgctcttgccgcca

SEQ ID NO: 301065 - DNA, 385 bp, Zea mays
acgatgagctcaagctcaaggagatcaagaacggcaggctcgccatgctcgccatcctcggttacttcatccaggggctcgtcaccggcgttggcccgttccagaacctgctcgaccacctcgccgaccccgtcaacaacaacgtgctcaccagcctcaagttccactagaacgttggtgcatcagcatacctgctgccgccgccgccagttgtttgctgtggaaagctagatgcatgcgtgttgtaaaggaacctgaagcgttgcatcggtcatgattcatgcatggccagcctgctgcctgtaacaacaaactagtattgatcttattgagaccgaaaaaaacagaagggggtatgcgcaccggcagaaaaaaagggcggccg

SEQ ID NO: 301066 - DNA, 299 bp, Zea mays
aggaggtcatgtggggttgaactgagccgagacacctacaacaccctgatagctgcgtacggacggtgtggctccaggactaatgccttcaagatgtacaacgagatgaccagcgctggattcaccccctgcatcaccacgtacaacgcgttgctgaacgtgctgtcgcggcagggcgactggtccaccgcccagtcgatcgtaagcaaaatgaggaccaaggggttcaagccgaacgagcagtcgtattcgctgctgctccagtgctacgctaaggggggcaacctggcagggatcac

SEQ ID NO: 301067 - DNA, 389 bp, Zea mays
acgcccacgcgtccgcccacgcgtccgcggacgcgtgggaggcgacatatcgagcaagtaaaggtggcactgcccgttgtacttaaagttatgcatgctactgtatcagaatgtgttgaggaacatggaagtgctgctgttgatcttttcaatgcagcacatggtgttggcaaggccattcaagaaatgtgcatatcaatggtttgttaatctaagtaactatgtgagctgtttaatgttgaaacttattttaccattttgtttatcatttctatgttctgattgattttgcattattgttctgtctactgaaagttcaacaaaaacaaagatctctgtgcaattcttggtttatactcccttcagaatatagctcttgtatcacgaag

SEQ ID NO: 301068 - DNA, 375 bp, Zea mays
agcaagctattgctgatcacttcaagatggcgctggactgcttcttcgctgtatggtttgttgtgggaaatgtgtgggtgtttggtggacattcttccgcccatgacgcacccaacctgtacaggttgtgcatagccttcctcactttcagctgcattggctatgcgatgcccttcatcctctgcgcgctgatatgctgctgcttaccctgcataatctccctgatgggcttccgggaagatctggacgaaaacagaggtgctacttcggatgcgatcaacgccctgggcacatacaggttcatgtcaaagaagcctcgtaacggggaggcaaaccaaagttgccgtggagtcctttgccctggaacggaaaagg

SEQ ID NO: 301069 - DNA, 349 bp, Zea mays
acggcgagcgagagcagcacacactgcacgcagctagctaggagcagcagcagcggcggcgatggcggcctccatgatctcctcgtcagctctggcggtggcgcctcagggcctgccgcccctcggccgccgcgcctcctccttcgccgtcgtctgctccaagaagaagatcaagaccgacaagccctacgggattgggggtggcctgaccgtcgacgtcgacgccaacgggagaaagggcaagggcaagggcgtgtaccagttcgtcgacggatacagcccaatctacaacgaggatgactggtctcccatcggcgacgtctacgtcggttgaaacaatgggcctctg

SEQ ID NO: 301070 - DNA, 370 bp, Zea mays
aattcaaggctcgaccgacccgtccgcggacgagtggggcatgttcttggcgggaaaagttgaagaaacacccagacctctgaaggatgtcatacttctttcatatgagatcatccacaaaaaggatcctgctgcagttcaacgaataaaacagaaggaagtatatgaacaacaaaaggaacttattttactcggggaacgtgttgtgcttgtgacacttggttttgatttgaatgtgaaccatccttacaagcccttggttgaagcaataaaaatattcaaggttgctcaaaatgcacttgctcaagttgcctggaattttgtcaatgatgggctccgcacttcactttgcctgcaatttaaaccgcac

SEQ ID NO: 301071 - DNA, 368 bp, Zea mays
  unsure (1)..(368): unsure at all n locations
tacgcggcgntagtacggtatggcattcccggctcgaaacacgcgtacgcccacgcgtccgcaacttcgccagcttcgtccggcagctcaacacctacgggttcaggaaggtggacacggaccggtgggagttcgcgcacgagtcgttcctgcggggccaggcgcgcctgctgccgctggtcgtgcgcaagaggaagaaggcgggcgccggcgccggcgccggcggccgggagctgtgcgaggccggggaggaggtgcgcgggaccatccgggccgtgcagcgcctgcgggagcagcagcgcggggtggaggacgagctgcgggccatggaccgccgcctgcgcgccgccgagagccggccggcccag

SEQ ID NO: 301072 - DNA, 343 bp, Zea mays
acgcccacgcgtccgcccacgcgtccgcgagaccttcctcggacacaacatcgtcgacaatattattcttcagcgcagcggctactcagtttatccttggacagcaagttcccttctctctgtggctttctcttgcccctgtggtcattggtgtttcaatggcatcccttactgagctttcattcaactggactggcttcatcaatgccatgatatcaaacatctcattcacttacaggagcatttattccaagaaagctatgactgacatggatagcaccaacgtgtatgcttacatctcaataatcgctctaattgtttgcattccacctgcattgatctt

SEQ ID NO: 301073 - DNA, 337 bp, Zea mays
aggtgatagttaacaccttccctgcaactgcctcatgtcatacccaaacgtttaaatgtttgggtgatatgatgcctgcacaattatgggacacaacaatggatcctgacatgcggctgttgaagcaacttacggttgaagatgctgccgaggccaattttgtgttcccctcacttatgggcacccgggttgatctattgcacgacctgatccacaccgctgctatcatgatcatcatacatcatcttgacatttgcatgcatcacgtactgccgtccattctctgtaccacatacattgtcagccatctgctgcatttcttgctactcgatcacga

SEQ ID NO: 301074 - DNA, 338 bp, Zea mays
acaggttcatggttttgggcctgcgcacgcaaccgctactgataatgctaattttgtggcggcttcgaccgtggttgctgaaaatgattcggatgattccatgtctaagttttttgagtctgatgattctgggagttcggttgtgtggacggaggagtcttcggatgaggacttggattattttgcggccttggatgtggctgcggcggaggcttctccgcgtgtgatggatgctgaagttcttcctggtccgagtgctgggcgtatgcggcgaagggaggtggcgaagcgtagagtgagtgaggtggagagtggtcatcttcgtgtggatggggctg

SEQ ID NO: 301075 - DNA, 175 bp, Zea mays
acggacgcgtgggcggacgcgtgggcggacgcgtgggctggagcctgatgtttacagtgttctagaacttaaatgcggtatcgtttggatgttcatgtatcgttgagtcggtgtgtcgtgaggtagtttagcctgtgggtgatacgtctgtatttccgcagctctggcgtgagag

SEQ ID NO: 301076 - DNA, 363 bp, Zea mays
acggacgcgtgggcggacgcgtgggcgccatgttactcggttttctccattagttatttccgctgcattaaaatttatgattattatttctgaaactccgataatgtaatcactaatgatacttattaaatttgtggtattatgttttattgtaaaaaaaaaaaaaaaaaaaaaaaaaaaaaaaaaaaaaaaaaaaaaaaaaaaaaaaaaaaaaaacaaaaaagggcggccgttcaaaaggtttcaaccttatttacgcttgcatgcaacttcataactcttcgacagtgtcacccattttcatttcaggggccgttcttttaaaacgtcttgattgggaaaacccgggggtttctcaattta

SEQ ID NO: 301077 - DNA, 385 bp, Zea mays
acgcgtcaacctaatcctaccgcagctctccctcaggtttagtgttcgcaatggcggccttcaacaagcttggtggccttctaaggcacagtgctctggtgagcggtatcactggtggctcttctcctgcagtgttcaatgctgcacggctcatgtctaccaagctatttattggtggtcttgactggggtgttgatgacgtgaaactaagacaagcatttaacagctttggagaggttactgaagcgacggtgattacagatagggagactggcaagttcacatgctttggctctgcagcctaatctttcagtgttacagtccaggcaacaattgctctatgctgctgctgctgctgaatacctgaaatttggtgttgttcgtt

SEQ ID NO: 301078 - DNA, 377 bp, Zea mays
acggacgcgtgggcggacgcgtgggttgacagatggaagatcacaataaaggacagtgactgcagcatgctctacatcttgcaagaacagtgactgcagcatgctctacatcttgcaaaactgttcttgacagatggaagatcacaataaaggacaaccaagggaaacttatgagaccaccaaaatttatgaacaactactttggggttggctgtgatgcaaaggttgccttagatatacacaacctgagggaagagaaccctgaacggttttatagccagtttatgaacaaggtgctgtatgcaagagagggagcaaagaacataatggataacacatttgattgttttccttgggatgtcaagcttgagatagat

SEQ ID NO: 301079 - DNA, 414 bp, Zea mays
acccacgcgtccgcccacgcgtccgcccacgcgtccgcggacgcgtgggggcagcgctcggaggtggccctctgtcgggtggactggtggacacatccgcgcccatggccaaccgcggtgccgcggccggcaagctcactgtcacggagaccttctccaacctcagggagcatggcaaggtgcgtgcgtttgacacctcacgtccgtgcttcgcttcgtcgttacccttgggggccaattcacgcgagcacccacatttctcttggtgttcctgattgagtggcatggttggattgctggcgccatggtggccgatacccaatgttggtcccggttggttgcagggaataccgaattttggtcacatttagttgcaaggaaatggattacgtctttggaacaatatgtgtattc

SEQ ID NO: 301080 - DNA, 424 bp, Zea mays
acccacgagtccacggacgcgtgggcggacgcgtgggggcgttcgtgatatggtccaccagggtctgcaccaggctactaggagagcttgcttccagcggagacgagcacaggggcctcatcgcttatgcgtgctggctcgtctacatgctcttctcattgctcgtcatcttctgataccgtttatggcatggaagactatgttcgcaatttgtttagcggatgatgtggacagtggactgccaccagtcactggagtgttttgctatgttgttgcagaactacatactatctggccactttggggaattgttctgtagtgatcgactagttccagtgggcatggttggtgttcggtgtaaatcttagtagaaataagaggaaatcgaggtccataaacagcaaatgtgcagtcatttggtttt

SEQ ID NO: 301081 - DNA, 330 bp, Zea mays
agcgagcgagatgaggtgcaactgcacgcatctatcgatgagcatcatcagcagcggcgatggcgggctccatgatctcctcgtcagctctggctgtggcgcctcagggcctgacgctcctcggctgccgcgcctcggtccttctccgtcgtctgctccaagaagaagatcaagaccgacaagccctacgggattgggggtggcctgaccgtcgacgtcgacgccaatgggagaaatggcaagggcaagggcgtgtaccatttcgtcgacaagtacgggtcgaacttctacggatacagcccaatctacaacgaagataactggtctccc

SEQ ID NO: 301082 - DNA, 232 bp, Zea mays
aagcaaccgcaatggcgagcagcaagttggtcctctcctccacggctttcgccggcaaggccgtgaaggtgctgtcgtcgtctgccttcggggacgcccgtttgactatgtgcaattcggcggcgaacgctaaggcggcggcggcgtcagggagctcgtcgtacgggaccgaacgaatgatgtagttgcggtcattgatgggccatctgacgtcctagctgtcgggcgactt

SEQ ID NO: 301083 - DNA, 200 bp, Zea mays
  unsure (1)..(200): unsure at all n locations
agaaggtcacagacaagcctattctgatatatcccaacagtggtgaaagatatgatggtgaaaaaaaggagtgggtggaatccactggtgtgtcagatggtgattttgtttcgtacgtaaatgaatggtgcaaagatgcagcagcccccgataagcgcanccccatctttgcaccacgcatttacgttcgaagatagggc

SEQ ID NO: 301084 - DNA, 402 bp, Zea mays
tctcaatcttcatatgatattttcagatggttctgtgtggaggctgggagctcttctagtcctaaagtgcttttaattcacggcttgccatcgcaggcatactcttaccgcaatgtgatgcctgtactggcggacaaatatcatgccattgcttttgattggctcgggtttggattttctgataagcctcaaccaaaatatggttttgactatacacttgatgagtatacttcatccttggaatttctagtcaatgctgttgctcctgataagctctctattgttgttcagggctactttgctccggttgcagtcaaatatgctagtgaacaccaagacaaattgaatcatcttgtactagtgaatccaccaataaccgataaacatttgaaccttccatcc

SEQ ID NO: 301085 - DNA, 190 bp, Zea mays
gcgtcaacggacacgtggggtggtcagctcctgcggccacgatcggcccgtcggcgccatcggattaaagaggcgccaaaacatgggaacgatcagcgccgtacccgagatcagggatcgccacatcactagcgacgacgacgatattttacgcaacaagctcgaggttctgcctcgcaagatcgtcagc

SEQ ID NO: 301086 - DNA, 381 bp, Zea mays
acccacgcgtcaacgggcccctgtgggaagcagcaccatggccctctcctccacggccttcgccggcaaggccgtgaacgtgccgtcgtcgtccgccttcggcgaggcccgcgtgacgaggcgcaagacggcggcgaaagcctaatcaggagcagtgtccggaatcccatagtatcgacacgggcgcctgctgtacctgaggtcactgtctgagctagtcgctttggcgacgcagtcgggctacttcacaggcgactcctattgggacacaaacgggctgatcgctgtgatctgggaggtcaccactcagcgggagcaggaggttatccattcccgctgggccatgctgggcgcgctcggctgcctcttcccggaactgct

SEQ ID NO: 301087 - DNA, 393 bp, Zea mays
acggacgcgtgggcgcgggtggaaggaccccttcgcgtccagcgcctggaccgtgcgccagaaggcctacgtggaggcgctccgcctcgacacgctcttcacgccgcaggtcgtcctgcagggccgcgcgcactgcgtcggcaccgaccaggacgcgctcgcgctggccgtccgcgacgccccgcgctaccccgcgcccgccatcaaggtcacgttccagcggccgagccccgcaacactgcaggcgtcgttcacgggcaccctgcgcagccgcgtggagggcccaggcggcgcgagcgtgctggtggcgctgtacgagagcgggctggtgaccgactgcgggcgcggcgagaacaagggcaagtcgctgctcaacgaccacgtggtgcgccg

SEQ ID NO: 301088 - DNA, 411 bp, Zea mays
acccaagcgtcaacggaccccaatggcgagcatcacgatggccctctcctccaccgccgtcggctcagatctctgcgtgcgggctagcgatggcgtcgttctcggaggctcccccagggaacccgaaggcgggcgagaagatcttcaagaccaagtgcgcgcagtgccacacagtcgagaagggcgccggccacaagcaaggtccaaacttgaatggtctttttgggaggcagtcgggtaccaccacaggctactcctattccgcgggaaacaaaaacaaggctgtgatctgggacgagaacactctgtatgactacctgcttaaccctaagaagtacattcctggaaccaagatggtcttccctgggctgaaaaagccgcatgaacgtgctgatttcattgcgtatctga

SEQ ID NO: 301089 - DNA, 385 bp, Zea mays
  unsure (1)..(385): unsure at all n locations
ggggagagcgcaagctctgggataagctgttggaggaagcaaaggtcaacgttaccccaggttcttcttgccattgcattgagcctggatggttcaggtgttgcttcacaacattgattgaggaggacattcctgtcttggtggaaaaactgaggagggtcacagatagcttcaaatccaaacgttgaaacgctagaatagtttattttttggaacccctgcggtatcgaaataaccatatctcaccaggtgctctatagtggattgcagggggcactcaggaaaaggttggacaatctatttattttagaccatanatattcaggggcttcttgctatacagctgcataacaattgctggaagcccctaagctggtggaaggat

SEQ ID NO: 301090 - DNA, 297 bp, Zea mays
cttaacggtcaaaatataggtattgtgaaatattttgctaatcttatagaagatgaaaaaatctcgttatttaaaaggatgactatatttaacagttgcctattttcttaatgtcagggtagatcttattttacagaacagtgggggaaatagaaacatgtgaaacgcataatgcaggctcctaaattaatgtcagtgaagttcagggtggacaaatgagtgtgtatgaggtatatagcatgctgatgacttctttaatgcttgaagtccgttcacaggtatctagccctagaatgc

SEQ ID NO: 301091 - DNA, 294 bp, Zea mays
atattctgctgccacaaatactgtaaagtgctcaatgtcaacagctgaggcaagccaagtgatcattagtagagcttttcgtggatccttcagtggtgttggtagtaaaatggaaggtgtcttgctgcaggtaactaatgaagaagtggtcaaccacagagtcttcaagaaataagaaattctgtaccatctgaaagtagttcttgttggtgccttcatttaaaaagcactctttaagataagagggcaatgttttctgataaaacaaacatttagttgaggttcgtgatataa

SEQ ID NO: 301092 - DNA, 288 bp, Zea mays
agtaagtccaagaagggtcagtatgaagggccagatatggacttagctgcaatgcttgaaagggatgttctggattctactccaggagtaagatgggatgatgttgccggacttagtgaggccaaacgactcctcgaggaagcagttgtgcttcctctctggatgcctgaatattttcagggtattcgtcgaccttggaaaggagttcttatgtttggtccaccaggcacgggaaagactcttttggcaaaggcagtggccaccgaatgtggaacaacattctttaat

SEQ ID NO: 301093 - DNA, 290 bp, Zea mays
aggcaggaccagccattcagctggagtgtagtcacatattccacttacagtgatgtctgcgagtattacgataatcgatgagcttgggctcaaggataacatttggagttatatcttgtcccatttgcaggagcactattgatcacatagtactacgagagctacttgatccgataacaggactctatgaggatgtcagacgagaagccttaatgagattgggatatgaaggtctgcataagagtgaagctatcacaactcctggtgtgaggtcttataatgacccagct

SEQ ID NO: 301094 - DNA, 309 bp, Zea mays
aaccagcaagccaatcatcagatggtctgcctgacatccgtcctgctttcagacatgaaatgagaacaatggtgaaagaacagcagaagagtagtcgcagatatggtgtgatcaagtgtgatccactggtccggcaaggcttggatagaacagcaaagcacatggtcattccgtacatgcctatgttgattcccccaatctgttggacaggatatgacaaaggagcacacctctttttaccatcatatgtaatgcgcacccatggtgctcggcaacagagggacgctgttaaaagagctccaagggaac

SEQ ID NO: 301095 - DNA, 299 bp, Zea mays
gtggtactgtcccaagtgccggggggagtacgagaagaccatggacaaagccctggagaaatccaaatttgagagggcttacaacatgcagtttgtggacaggcgcctagtgttaggaggacaaaataaaccgtgtatttattacattgcagcctttgttgaagtgcaaggagtgtaatatgtatatgtttaaagaatgttagaagaggaaccattcctttcatagggatggcagtgattctgattgccttttgtcttcattggtacacgtgtaacaagtacagggtctgtggatcagc

SEQ ID NO: 301096 - DNA, 139 bp, Zea mays
atttatcctttccgtaatctctttttaaccctgctgactattacagggcttgtttaatcacagtggcaagaattacatgtatcttacagtaaagaaacagaatactggaatcgttagagaaccctgatgtgttgacctg

SEQ ID NO: 301097 - DNA, 292 bp, Zea mays
agcgtggactactccctggcgcactgatccaggtgatcatcctgctcgccaccggggcaagaacggcggcggctacctggcgtccaagtacatggtgatcggcttccacgccgccatcctgctcagccacgccgtcatcaacagcctccccatcaccttcctctcctttttcggccagttcgccgcggcctggaacatgctaggtgtgtttgtcctgatggttgccgtgccgaccgttgccaccgagagggccagcgccgagttcgtgttcacccacttcaacaccgacaac

SEQ ID NO: 301098 - DNA, 100 bp, Zea mays
cccgccaacatgggccgcgttcgcaccaaaaccgtgaagaaggcggcccgggtcatcatagaggagtactacacgcgcctgggcaacgacttccacacga

SEQ ID NO: 301099 - DNA, 301 bp, Zea mays
gccagccacagacccctgggagcttccgctttgaaagaagcaagacacgtggcctcgtgacgggcaagctaggccccagaggcgctggaggtctccaggggcctgctgaaggagttgtagggggccctgctacctgttcttgggcctcaggctctgcacagtcaagcagcccttgctttcggagctcctgtccaaaagtagggatgcggatcctgctgaggccgccatggcctggctggtgggaaggccggcagcgggcggaggggatccagccacttcgccctcttcttctgaagatcag

SEQ ID NO: 301100 - DNA, 218 bp, Zea mays
caagggcacaacttgcctgcaatgagctcctgctcaactacttctacttgttgaagttcagtctccacagtgggttgctcgtctactcgcatcaacacaatacatacatagtatagccaaaatcaacatcacaccaaacagatgaatgaaatatacagtaaaaatctacacattaaaatgagagcataggaactggaatcactagatttggagttata

SEQ ID NO: 301101 - DNA, 323 bp, Zea mays
agtaccatggccttaaacaaccttcattccgaagtaatcgaactaaggaacgaaggtcttgagaaagataaaatattaaactcattgctaaataaaataacagaagacgaagctacttccaaagcccaagctgaagcccagaagtgcgaaattgaagatcttcagaaacagctagctgaagcgaagttaaagtgtgcaattgccgaagctgaccaagacgccagtaactattagaaaaattattgggagaagacagttgtagaactccggtcttcaaaagagacatgctacgaaaaatccatagaatgtgtgcaaaaaaataa

SEQ ID NO: 301102 - DNA, 169 bp, Zea mays
gcaggctgagttcttgaagaaagccccaggagttaagcatgttgagagagacatgaaggtacagaaattgactacacacacacctcaatttcttggattgccaactggggtatggtcaacaggaggtggacttgatagagctggtgaagatgttgtgatcggtatcgtg

SEQ ID NO: 301103 - DNA, 303 bp, Zea mays
cgatgatctcagattccttgatgggcgggagaagagatagctctcctccagggacttgatcttcatgtccttgaccaggcggcccagcttggtgatgggcatccactccttatcctcggccttgcctctgcaagctccgtggccttggtcccggctccggtgctgtccacggccgcgaccccagccccagatgccactgctgaaacctccgtggacggttactgtggttgcccatcccagggcctctgacacccccctccttggaaacccggttgaacggggttaatcggcaatccggggttt

SEQ ID NO: 301104 - DNA, 295 bp, Zea mays
gttgggcaagctgtgagaccaaagaccggagtagtagggaggcaggcacaaacaagactgatgttgtctgtggtccccaggatcggctgagagccctggtggtgatccgcatcatcttcgggatcctgtttgccatcctcttggtgctgatctttatcaaaaaggtggccaagaagccaaccaataaggcttccgaccccgagcaggaaccccaggagatcaattttcccgacgtatcttcctggactacaacactgctgctccagtgcaggagactatagctggatgctatcgg

SEQ ID NO: 301105 - DNA, 281 bp, Zea mays
gggaggggtgacacagtgttccctcctggcagcaattaagggtcttcaagttcgtatgttaggagaggccaaattgtctcctgtcattggcgtgcacacgtgtgtatgtatgtgtgtgcgtgtataaggtgtcttacaatcttaaatctatgtcagacaagtgctagaagactggcctgactatatgaaaactggtctgtgtaacatatcgtatatactctaaggagtttgaccgcacacttgtgcacagagataaaaagcaactgatttggggcatgagg

SEQ ID NO: 301106 - DNA, 306 bp, Zea mays
catcctttggagggaatcgggcgaacccggtcctgggcttggaaaagctgggaggcggcgtccctggcccgcgctgacctcttactcgcgcctgttgctgcaggaagcgtcccgtcgccgtcgggctcagtgccaggagccggcgctcctttcagaccgctgtttaacgactttggaccgccttccatgggctacgtgcaggcgatgaagccacccggcgcccagggctcccagagcaccgacacggacctgctgtcagtcatagacgagatgggcaaagagatccggcctacctatgctggcagc

SEQ ID NO: 301107 - DNA, 229 bp, Zea mays
tgaatatatgccagtcttggctgaaatggtttatataccatagttctatatctgtgtggtgttatgtaccggcacgttataaggtacgaaaactgctttgtaatgcagtatgtgacattaataatattgtaaagttacattttacaatagacaaaaaactgttctggactgcacatctgcacacactacgaacagttgcatttcagagagttctctcaatttgtaagtt

SEQ ID NO: 301108 - DNA, 224 bp, Zea mays
gttcggatcgctgcgacgtgggcggttcgccgcccgacgtaaccagaagtccattgaaccttactctttagaggaaggtgaacaggaagaacaagcagcagacggtcagcagcacaaaggccgtgtctagaaacggttggttttaacgcgttttatggccacattacaccggggccgccacattcagtatccggtcatgaaaaggataataatcagttgacgtg

SEQ ID NO: 301109 - DNA, 267 bp, Zea mays
  unsure (1)..(267): unsure at all n locations
aggtcttcccgccggatctagtctatctgtctgacatgctgtgactcttctctcaaccttggccttctcacctcttctgagctagttggttgaatgctgtctaatgcttaagatctgtctttatctttgcacatcatcatttactcgaagattccactgcacagcgtctccaaaatataaaccttccaaacaagagagaagctctgngagccccttcccccacaacaaatctaactctngttgttatatttatgcaaaatttgtagt

SEQ ID NO: 301110 - DNA, 294 bp, Zea mays
acgtttgtcaccaccttgataaaaacattccagaagatgtagcatttgccgagtctagaattcgagctgaaacaattgctgctgaggacatattgcatgacatgggagccataagtattatatcatctgattcacaggccatggggcgcgttggagaggtgataacccgaacatggcaaactgcaaacaagatgaaggtacaaagaggtagtttacctggatctggtgacgctaatgccgccccggacagtgacaacctccgtataagaagatacatagcaaaatacacaataa

SEQ ID NO: 301111 - DNA, 284 bp, Zea mays
atttatgcaaagaggcgtatatatgccggtgaggaaatcacatataattacaaatttccattggaggaaaaaaagataccgtgccattgtggttctcggaggtgtcgtggatcaatgaactaagaaggccatcttttgaggttgctgcaacacttaagattcttggctgtgtgcaactcatcaatcaggatttacatcaatatcaaaatatggagtgcacgaacatgctggacagcaagaacaaactgccgcattatacttatttaagctatattggtcagact

SEQ ID NO: 301112 - DNA, 267 bp, Zea mays
ccataccccactccccccgcaggaacagcgcgtcggcggcaaaggcaaaggcaaaggcaagatgttcgggcgcgcgccgaagaagagcgacaacaccaagtactcatgagatcctcggggtgcccaagtcggcgtcccaggacgacctcaagaaggcctaccgcaaggccgctatcaagaaccaccccgacaaaggcggtgaacccgagaagttcaaggagctcggacaaggctatgaagtttttgtgagacccagaaacgtcgaga

SEQ ID NO: 301113 - DNA, 287 bp, Zea mays
cgagagacagaaagaaagaaagggaaggcggggggaggccggccaaggcaccaccacaccaccacccgacgaattcaagcatgaggccgcagagcgcagagcagggctgccgccgctgccgctgaggagcggctacagagctgtatacctattacacagcggcaacaagcacgcacgccaccgctcccgatgttgcttcaattggtgaaacagcttgctcctaagattgttgtggctattgaccacggcagttaccggggtgacctcccggtttcgcagcacttcat

SEQ ID NO: 301114 - DNA, 301 bp, Zea mays
agtaaagcatttgctgagatgattttcaagcatggccttgttcattgtgatccccatgctgccaatatgatggtccgaccaatgccacaagacagcagaaaactttttggatggaaaaggccacagctggttcttcttgaccacggcctctacaaagagcttgattataatactaggataagctacgcttctctttggaaggcacttgtctttgctgatgcgaaagcgattaaggagaacagtgccaaactgggtgctggggaggatcttcatgcactctttgctaggggtctcactatga

SEQ ID NO: 301115 - DNA, 264 bp, Zea mays
gccagcaggagacaggaccctcgaagctgatgcctttggattgagcattaatcctgagtggctgggcacgctgccgccttcgccatcacggaggttccagactgtccactcgggggtggagtgagactgactgcaagccccatcctccttgagactggagctgtcgtctgcatacgagagacttggtttaactgtggttggtccgtgtctgctccctcgactagaccacacttttggacttggtatctggggctgaagttgctc

SEQ ID NO: 301116 - DNA, 286 bp, Zea mays
cggattcagacagtggacattgacacagaacttccagtgtattgtccattggaagtgacagttgctgaaacggattattatgatgagaccaactattgtgaggtgacaccttgtcttctgccagaacgctcagtgcttaaaagcattcgagtttgtgggcctagatattggcctcaggtgataaaacttgcacctgaagacaagccatggtggagatctggagacaagacaaatccattcaatgcgggagtactctacataaagcgaaaagttggatcttgctcct

SEQ ID NO: 301117 - DNA, 302 bp, Zea mays
cccaaggtcatcgagtccatccgccgcaataaggacttcctcaaaggcggcctcgctactcccgtatgctggtggctgtgctcctcgctcaactgtgcagctccggaacgactcgacctctacgacgcgctcgtcaactgtttcaacctccctggtatgcgctaccaggcacgacaacgtggacatcgtcgtcattcgggacaacagtgagcggcgagtactcgcgagctcgagcatgaggtcgttcctggcgtcgtagatactctcaaggtgatagcacgattctgctctgaaagcattgc

SEQ ID NO: 301118 - DNA, 302 bp, Zea mays
tacagctacatctcttggagctatatcctatcttggaaactatacaaaagtatctttggcctcgcctttgtaaactcgatcagcagacactgtatgagctgcattatcagatgattacatttggaaacgccttttgtaccaaaagacagccaaattgcaatgcatgcccaatgaggagtgagtgcaagcattttgcaagtgcatttgcaagtgcaaggcttgcacttcctgctccccaggaggaaagcttagtgaagttgagcaatccatttgctttccagaatagcagcatgcatgctatg

SEQ ID NO: 301119 - DNA, 116 bp, Zea mays
cgctgccttatgggacccaggccctgaagctgcacgcctgcgtttccggtgcttccgctatgaggaggctacagggacccaacaggcactggctcagctccgatagctctgtcgcc

SEQ ID NO: 301120 - DNA, 304 bp, Zea mays
cgccagttactgcctttggagatgaccttaaagctaggttggcaactgagacattatttactatagctaacagatatggggattatatacgcaccggctggaggaatgtattggattgcatcctgaggctgcataaacttgggcttctccctgcccgtgttgctagtgatgcagctgatgattccgaacttcctgctgaagcagtccaacgaaaggctgctcctagttcagttcccccatctcatattccagtgatgggcacacctcgcaaatcatccggactcatgggaagatttagtcagct

SEQ ID NO: 301121 - DNA, 294 bp, Zea mays
ctgtgcttctgagctatcctgtctatcctatttgctcatagattcgaagtctccacgactctgtttccacagtagcttctgaatgtagcattcactaagtcatccgcactgctcgctgcggtggagacggccttgagtctcggtgcgagtgtgcgtgagtgtgagccaccttggcaagtgcttgcgcagggcctggccgccctccatctgggcggggtgactgggcgccggctgtgtgcccgaggcctctccctgccctcgcctagtctggaagctccgagcgacatcacggag

SEQ ID NO: 301122 - DNA, 286 bp, Zea mays
gtcctctgttacttctccctccgccgccactcccctcccattcaccgccaccgccaattccataccgtcctccgccaaatctgctgagagcgagaagagatggcaggcaagggtgatgggccggcaatcggcatcgatctcggcacgacgtactcttgcgtcggcgtctggcagcacgaccgtgtcgagatcatcgccaacgaccagggtaaccgcaccacaccctcgtacgtcgccttcaccgactccgagcgcctcatcggagatgcggccaagaaccaggtcg

SEQ ID NO: 301123 - DNA, 237 bp, Zea mays
atctagttaaatatcacaaatttaactagatctgctaggggtaagtgggatggctgactcaggcctaaccaacgaaataagatagtcatcaaggtaaatttgtgatattttcgaacttgtcaattgttgggatgaatgtgagcttgatgtggaactctgttggcttttatcagatagcaaagtggtgcatgatacctgaatcatgtcttctggaggttgttttgatcatgtacatta

SEQ ID NO: 301124 - DNA, 304 bp, Zea mays
atgggatcacacctgagcatatgctaaaaggtgggatgactcagagctggggctggtcaccagacagactgaccatgtgattagaggctggaggctttgaggcagcctgacctacggggcgggggactggaggctgagtttaatcatctggccagtgctatactcagtacccccggagagcctaataaaaactctggacactaaagctcagcatagcctcctgggtggtgaagctgtggctatgccggcagggcagtgtgcgctaattccacgaagagggggcatgggagcactgtgctcaaga

SEQ ID NO: 301125 - DNA, 300 bp, Zea mays
caagaaagataaccctggagtgttaggaggagagtgaaggtagatgggtgaggaagggtaaggggcatggatggttgcagctggtggctctcaccagccttcctggcagcctctacaacagagcagcttgccagacttctccaggaacccagaaacgggatggttgtcggcaaaggttgggagtggcttttcctctggtagccacacacctgagcactactgacagggaggcaggtgccatcttgacacctctcttccatagcaatgggaaagttatgagtgcaggagtgctgaggagat

SEQ ID NO: 301126 - DNA, 301 bp, Zea mays
gtgattcacatgtctaactcccgaaaagaaggcagaaggtcctttttatagctttcctcagtctgatgtgtgcttccatccttcgctttcgaaatctcccttgtgtacaccattgcaccaccaccctttaatcctttactatccagtccgttattccgcgagtacgttgatgatccctccttacggcagtaaggattctgcaaaagtgtgcttcagctatgcagttcagcagcgtgcttcccctagagggaaaagcgtgtatgagcccagtgaggagaggcagtggaggttatgggagtga

SEQ ID NO: 301127 - DNA, 294 bp, Zea mays
ggcctacgcgcagaaccacctccaccgcgacgcggtcgaggtctacgtccgcatgcttaggtgcctcccgcacccttcgactgctggcttctccgtcggcgaccggttcacgtacccgttcctcctcaaggcctgcggcgcgctcgctgcttctcggctcggcaggcaggtgcacgcgcacgtggcaaggtccgggtgcgagtcacacgctgtcgtacagaactccctgatcgagatgtacacgcgctgcggggatctgtcgaccgcacgcaaggcgttcgatggaatgcggga

SEQ ID NO: 301128 - DNA, 232 bp, Zea mays
aacaatgcatcgtaaaaccttcagtaggaaatgataatgtttcgtgcttcactttggtgttcttgtttgcgtgtggcagttttaagtgattagttcttaaaatcagtacattttaatggaaacaacttgaccaaaaatttgtcacagaattttgagacccattaaaaaagttaaatgagaataagaaataaagtgagaatgtaagataatagtgttaaagggtgtttaacta

SEQ ID NO: 301129 - DNA, 215 bp, Zea mays
gcattctcgaattacgattcccaatccagcaaaccctaccagccttttgcaaactcagagagggacccgatggcacccaaggcggagaagaagccggctgcgaagaagcccgcagaggaggagccgcggcccggcgagaagccccgtgggaaacaccgaggagaacgctccggcggaaatcgcggaagagcgggtgacagaggggagaggcagag

SEQ ID NO: 301130 - DNA, 135 bp, Zea mays
gctccaggggagacaatgttgaacttgggatcgaaaaccgacaagagactcactgctcatccagatcgagagtcatctaaggacgtcagactcgcacactcggctagacagaaagcgtcactccgaggggccacg

SEQ ID NO: 301131 - DNA, 312 bp, Zea mays
  unsure (1)..(312): unsure at all n locations
gagcgctttgaggtacaagggctgcagcctaatggtgaggagatgaccctcaaacagttcctcgactattttagtacagagcacagattagagatcaccatgctgtcccagggcgtgtccatactctattccttcttcatgccagctgccaagctacaatgaacggttggatcagccgatgacagagattgtgagccgtatgtcgaagcgaaagctgggtcgccacgtgcgggcgctggtgcttgacttgtggtgtggtgaggagancggcgatgatgtcgatgttccctatatccgatacaccaggcgatg

SEQ ID NO: 301132 - DNA, 310 bp, Zea mays
tgcgggagtgatgtcgaccactttatgagctttcccccctgctattttggggtttatccctttagattcgctctagttatggcggatcttgacatggagcattaggaatttctttcgtcgaaggcggcgcggcgccaggtcgtggcatgcgcaccatttgccggtcgtggcgcgaggtcaccaaggaggtggtgaagacgctcgaggagtgtggcaggattaccttccccatatcccttaagcagccggggcctcgtgaaatgccggtccagtgttttgtgaggagagagagggcaacatccacatatct

SEQ ID NO: 301133 - DNA, 311 bp, Zea mays
atattgtacaccacatcttccttgtagcacaacattctgaaattatatggttattggaatgatgttgatcgggagttgagataatgcctgaagaatgagtacgtagataacatgaccaagagcagggagcatggcattgcattgcgaaagaaacttttcaatcctccagaggaattcgaaaaataaatagtatattcactcgatgccttggctgagagaagacctaaagactctgggtagatacctgaaagagtcctggcttatctagtctccataatcctttgaatggaaagtgacctgtgagagattga

SEQ ID NO: 301134 - DNA, 142 bp, Zea mays
acgccacctgctgcgccgatcacctgcactgctgaccgcaagacactgtgtgtgacgtgatccagagtacgtgcctctccaaggagaacgctaccacggacctcgtcactaagctgcgtgagcacacagtgggggatgggag

SEQ ID NO: 301135 - DNA, 293 bp, Zea mays
ctcgagccgggaaaaagtagagaaaactaatgaaacatagggttctcttgggaatccatcagtaaaattgatagacgactagcaagattgatttcatatatagtctgacatgacaaatcatcagtatctggaatgccacagggcatatcactccagcatccatttaacagtataataatggaatcttgtcaacaactgtatgtttatacatacggcaacatagggcaggtgtggtggctcatgcctgcaattcgaacacttggggaggccaaagggggtgtatcgctgaggtc

SEQ ID NO: 301136 - DNA, 270 bp, Zea mays
aatagctgctggatcttatgtagtggaagttgtatctccagcttacagatttgatcgcgaacgagtggatatcacgtacgaaggaaaaatgagagcaagatatgagagttacatcggtacatcagaggttgtcagactgccctatcctctccaaatgaaatcttcaggtccaacttcttacattataaaaagggaatcgaggggctggacagactttcaaatgaacccaatggtaaagatgatggatcttccttaatggatattggagca

SEQ ID NO: 301137 - DNA, 285 bp, Zea mays
tacgaacttatcactggctccgtgccttacagccacattggctgccgtgaccagattatcttcatggtgggccgtggctatctgtccccggacctcagcaaaatctccagcaactgccccaaggccatgcggcgcctgctgtctgactgcctcaagttccagcgggaggagcggcccctcttcccccagatcctggccacaattggagctgctgcaacggtcactccccaagattgagcggagtgcctcggaaccctgcttgcagcgaaggcaggccgattagtt

SEQ ID NO: 301138 - DNA, 280 bp, Zea mays
ttcgacaccaggactggaacgtgcactcagtagctgaacctgtctgaaccggtcacgttcttggatcctcagaactctttgctcttgtcgggataggggtgggaactcacgtggggagcggtggctaagaaaatgtaaggattctggaatacatattccatgggactttccttccctctcctgcttcctcttagtcctgctccctaacgtttcggcgaatggggcagcatcactgacgtgtctgggcggccagtgcaggtgccaggttccggtactaatg

SEQ ID NO: 301139 - DNA, 291 bp, Zea mays
  unsure (1)..(291): unsure at all n locations
cagatttctccctgttccacacaacatatcatcttctaaattcccgntttgtcactttttctgataaaagatggacatattaccacttttcggccccatgtatctcagtaccccatggagctgggctaagtaaataggaattggtttcacgcctgaggcaattagacactttggaagatggcataacctgtctcacctggacttaagcgtctggctctaattcacagtggctcttttctcctcactgtaatcaagttccctcccagaggggccacaagtctcatgggtggc

SEQ ID NO: 301140 - DNA, 235 bp, Zea mays
cggcacaatagatgttctcactgatcttcctcttactgacttaaatgtcgaaaacaaccaattcacaggttggatacgcgataaactaaagggaatcaataatctccagacaagtggaaactcgttaaacaatggccctgttccacaacttcccccatcatcatcatcaaccaccatcgacaattacccctcatccctctcggcagcatgctgttccaagtagcgctggtaaaat

SEQ ID NO: 301141 - DNA, 177 bp, Zea mays
  unsure (1)..(177): unsure at all n locations
ggtgagacacaggatactgatgggtgggagatcanccatgcgctgcccttgatgatcaaggttgaggcttaagtggatacaggaagcaagttctgggttgcatgcctttagagagcatgatgtcaggctctgtatccctcctttgactagctgatattctaactataagcgtttgtc

SEQ ID NO: 301142 - DNA, 272 bp, Zea mays
ctccgctgggccaccagctttgaccgccgcctcccttccgcctccgctactgcgacctctccacaccactcatccgcaggagcggcggcagcggcagcgacgaggtcgtagccgacatcgacgagctgccgcacaaccgcgaactcaaaggcaagatgctcgggcgcgctccgaagaatagcgacaacaccaagtactacgagatcctcagggtacccaagtctgcgtctcaagacgagcttacgaatgcctaacgcaaggctactatgcag

SEQ ID NO: 301143 - DNA, 314 bp, Zea mays
ctcccgtctccgtcgtctcgtctccgctcctcacctcgccagccatgggcaagatcaagatcggaatcaacggtttcggaaggatcggcaggctcgtggccagggtcgccctgcagagcgaggatgtcgagctcgtcgccgtaaacgaccccttcatcaccacggattacatgacgtacatgttcaattacgacaccgtacagggccaatggacgcacagcgatatcgctctaaaggactccaagacgcttctcttcggcgagaagccggtcaccgtctttggcatcaggaaccccgaggagatcccgtggggt

SEQ ID NO: 301144 - DNA, 309 bp, Zea mays
gttgccggttagtggcgcattccacccccccctcatgttgccagccgtggcagccctgacgcaagctttaaaggcagtcgacattaagaagcctctggtctctgtctactccagcgtccacgggcatagatacaggcatcccgggcacatccacaagctgctggcccagcagctggtctccccagtgaagtgggagcagacgatgcatgccatatacgaaaggtaaaagggcagggggttcccccaaactttcgaagtaggccctggcaggcagctgggagccatcctgaagagctgtaacatgcaggc

SEQ ID NO: 301145 - DNA, 310 bp, Zea mays
gggaaatttacaaggccaggacgtgtattaaggcctggagcaataaggatgaatgggaaatgtccactgactcctttggaggttggattaatgctgcgtggaatgggttttaacaataatactgcaatatatttagcttctggaaggatatataaagcagaaaagaacatgtctcctctccttgaaatgttccccctcttgcagacaaaagaaacattggcactggatgaagaacttgctccattcaagaacttctcctcaaggatggcagctattgactacagtgtctgtgttcatagtgaggtttttg

SEQ ID NO: 301146 - DNA, 267 bp, Zea mays
cgtccagctcctgtggagatctcctatgagaacatgcgttttctgataactcacaaccctaccaatgctactctcaagaatttcacagaggaacttaagaagtatggagtgacgactttggtacgagtttgtgatgctacatatgataaagctccagttgatcaagaatgaatccacgttctagattggccatttgatgatggagttcactccctaatcagatagtagatgattggttaaacctgtctaaaacccaatttcgtgaaa

SEQ ID NO: 301147 - DNA, 304 bp, Zea mays
  unsure (1)..(304): unsure at all n locations
tattcatacatcaggattcatgaacgtgcatctctgaggataactcaattcattttctcgcaccctcggctctcttgtttatagaataaacttttataaaggataaaaaaaagtcactctagttatggccatagctgagttataggtgaaatattcattggatcaggagttgaattaaagtacgtctctcnccagcagccaagccccctcttctctccaacccgccctggctcagctcccgcggccccgcccgtcccccctcccaggactggtctgtgantctttcatctgttcaagaggagat

SEQ ID NO: 301148 - DNA, 267 bp, Zea mays
ccaaacaccctagctaatagttcagctattagctatttttagtaaattagttaatagttaggtagctatttgttagctagctaattccactaacaatttttattcaactaactattagttctaatacattcaaacacccctttagactcacgtaccaagtcaataactgcttctaacgtagggaggtgttctgtctagtaactaatgtacactgatctaccggtgactgttagtgtatctgttctcaaggttttgctaccattgtat

SEQ ID NO: 301149 - DNA, 249 bp, Zea mays
cccagcacgacgagacagtcaccaacgacgagattgctgggtagagatgaggactgtgtgcacacggatgggaaccatggcgccaccctcatctctacccagcacgacgagacagtcaccaacgacgagattgctgctgacctgaaggagcacgtcatcaagccagtcatccccgagcagtacctcgacgagaagacaatcttccacctcaacccgtctggccgcttcgtcatcggcggacctcacggc

SEQ ID NO: 301150 - DNA, 297 bp, Zea mays
ccacaatatggcggataaggagaagaagcattatgtggagcagctgtggacttgtccaagtacatcgacaagacgatccgggtaaagttccagggaggccgcgaaccagtggaatcctgaagggcttcgacccactcctcaaccttgtgctggacggcaccattgagtacatgcgagaccctgacgaccagtacaagctcacggaggacacccggcagctgggcctcgtggtgtgccggggcacgtccgtggtgctaatctgcccgcagacggcatggaggcctcccccaccccttc

SEQ ID NO: 301151 - DNA, 221 bp, Zea mays
gcagatctgaggacatctctgtgccaggccagaacccgcccacctgcagttccctctccgggatggacgtcgggcccagctccctgcgccaccttgggctgaagctgctgctgctcctgctgctgctgcccctcaggggccaagccaacacaggctgctacgggatcccagggatgcccggcctgcctggggcaccagggaacgatgggtacgacggactg

SEQ ID NO: 301152 - DNA, 275 bp, Zea mays
attcatcctacttatggattgagcccttggctcatatcaggaattgggtggcaacgctatatggattgattgtttccttgctcgatttatggcgtttttttactacttcatgactgttgcgatgtacatgttgagcccacgaatggcatatcattctctgaatgtgtggagagacatgcgtactccacctatgataagttcctcaagctccatgaagaggaattgaaaacactaccagctccagaggcagcattgaactattacctgaatgagga

SEQ ID NO: 301153 - DNA, 132 bp, Zea mays
gagaaaacgtggcatgctgacttcgatgacgcgcagtcgccgacgtgggataacctgatgcacggacaggttgaacctgctgtacgccgtggcttgcaccatcagcttccgcgacgctgcgcgcggtcggac

SEQ ID NO: 301154 - DNA, 123 bp, Zea mays
aagagactgggacatcaagtgactcttatccgccgagttgcggataaagtgttgcgccaaggtgtgcaatactatcgggtacaaagtttggtctatgattgagctccccagggcaactctggt

SEQ ID NO: 301155 - DNA, 110 bp, Zea mays
tagcaatctgactgtactgttcgtatcattgactcaaccactggttgttttgatgccggtatcgccaaggatgtccatacccgtgatcattctctccgtgctgtcacact

SEQ ID NO: 301156 - DNA, 101 bp, Zea mays
ctttacattctactgagtggtgtgcctccagtttgggcagaaacacaacaagtaatatttgatgctgtattgaagggtgccattgatttggatgtctgatc

SEQ ID NO: 301157 - DNA, 288 bp, Zea mays
gcctgtgcgagatgagagaaattgccgccgggatccgccgccaatgatttgtgtgcccgtcgccgttcgggtgcgggagaatggagctaggtgttcgctgtgtagtgctgcgggtgatgatggactgttcgggcatggctatcaaccagggtcgtgggaattcgtcgccggtgttcgagatttccgctgtgacaccactgtggcatggtcagagtcacaatcatccagcaatgagcagtgatgtcacgaggatttgaagaatcaccctggtaactggaatctcaagtg

SEQ ID NO: 301158 - DNA, 217 bp, Zea mays
attggaatgaaagcatgccatgtgtttcaattcatccttgggcttgcctttgttctctcagtttggctcatgattatcccattcattacctattggatatggcggttaacattggtgagaagtattggtgaagcggaaaggctggtcctcaggcacatcagtgctcagttgattcttaagcgatgccttcatgggttccttgtctcagcgatcattg

SEQ ID NO: 301159 - DNA, 299 bp, Zea mays
aggttaggtacctatcctagccgtgtttgcaggcctttcagattgaaccgattacttcaacggtgtcatacatgattggtagggatgtgatggagggagggggcaatgcaggtgcagcataataccctggttgtatttggcttgggagtaagtggatgttagcaatagtggagcatgtgtgggaagcggaggccgatgacagctcttacgttatcaaggaacaaacttatcctgagaaagtgctcacacgtggaacacagactactctttatttgagagatgatgacaagtatgagttt

SEQ ID NO: 301160 - DNA, 295 bp, Zea mays
agtttttgaaagggaagtgactcaagaccaagtaattctgatggctgctagagcctcccgaatagaaaatcaagatgctattgatactgctatagttggcatgctagctgatccaaaagagcgccgtgctggtattcaagaggttcatttccttccatttaatcctacggacaaaagaactaccttgacatacattgatagtgatgggaagatgtaccgtgttagtaaaggtgcgccagagcagattctcaaactcgcctacaataagttggagatagaacgaagagttcatgct

SEQ ID NO: 301161 - DNA, 240 bp, Zea mays
cggatcagaggtagttatactcaccagcaacctgtggataagcagatggtagttttaactttatttttatgtgtttagctaaactttaagttggagcaatattttaccattgaccatttcattcttcactgtagctttgaagagggactgtaaatgacggtgctaacaagtcgaaatacgtgcctgcctcgtagtggaagtcgtagctctcaatactacgtatatgggagtcagttgtca

SEQ ID NO: 301162 - DNA, 296 bp, Zea mays
atcccaacacccatgtctgccacggaaaaattgtcgattcatgatggtactccacttggtccagaggatgtgaagacttataggagtattgttggtgctcttcagtacttatctcataccaggcctgatcttgcgttcgcaatcaacaaagcttgccaatatcttagcgctccttcaaccgtgcactggacagcagtcaaacgaattctgagatatgtcaaaggtacactccgcatgggtcttaaattttgtcgatcagcatctcttgttgttagtggcttctccgatgctgactg

SEQ ID NO: 301163 - DNA, 288 bp, Zea mays
cgtgataggggctactcccctaagaccaattcctcctgggaggccactcacaatctcacagcaggaggcagctaaacacaagatcaatattaatataaaatcaactgctatatttttaaagagtagtgtttggattacataagcaatcataaaactcccgttggctttagcaagaggtttagtcctgtaaactccaaaggtgttctgtgtgtgctgagcagacaagcatcctagcagagtaagccagaactttcctagccatcctagcatgtttgtgccttgtaagag

SEQ ID NO: 301164 - DNA, 282 bp, Zea mays
actctttgatctgcatattacttcatacttactgcaacatttgaaagatgcagatcaaagagcagtttaaaaaaaagcaaaaagaaggaaacaaacggtttagtcccctatgcagcaacgagcaatgtcgtgacacccagtagttgcagcttgtcccgagcaacgacattcattgtgaggaagcggtccacgtaggaaaccgcaaggaggagtgtttctgcgtgaagcttgaattctttagccacctccaccaaccagtcgacaaggacagccctcattttg

SEQ ID NO: 301165 - DNA, 276 bp, Zea mays
gaagagccgatcatggtgtcgcagttcatgatggagctgcaggggctcaagacggtggacggcgaggatccgcccaggattctccacttcaacccgcgcctccgcggcgactggagcggcaagccggtgatcgagcagaacacctgctatcgcatgcagtggggcactccgctccgctgcgaaggctggaggtcacgtgccgacgaggagactgtggatgggttggtgaagtgtgagaagtggattcgggatgatgaagggcggtctgaggagtca

SEQ ID NO: 301166 - DNA, 204 bp, Zea mays
ggagatttcagtacgaggatgaggttaggaagaatccactaaactacgactcatggtttgattatatcagcgctggaggagagtgttgggaataaggacaggatcagggaggtgtacgagagggccattgcaacgtgccccctgcagaggagaagcgatactggcagaggtacatatacctctggattaactatgcactctatg

SEQ ID NO: 301167 - DNA, 121 bp, Zea mays
ggatgatgtcttccttagtgttccttgcattttgggacagaatggaatctcagaccttgtgaaggtgactctgacttctgaggaagaggcccgtttgaagcagagtgcagatacactttgg

SEQ ID NO: 301168 - DNA, 126 bp, Zea mays
gttctaccctttctgccttctgtttgggacccagctggtgttctttggtttgctttcttcaggctctagggctgtgctatccaatacagtaaccacatgcggctgtttaaagttaagccaattaaa

SEQ ID NO: 301169 - DNA, 275 bp, Zea mays
tgcataagctcacaacagagctgcattcgagctactggatcaacctatttgcagacgaaagcgggtcatttcccgaggtgaaagcagactatatcgcatccacgtcatggcaaagggcactccaatacctgacgatgctgttaccttcgacgacaaggatcctcttgtagctagagtggtcagccagaaggaaaccagccagacacggactgtgtggagccctggttctgaattctctctttgcaattgctcgtggtcgatgcagggtaactatg

SEQ ID NO: 301170 - DNA, 284 bp, Zea mays
tgttaattagaacatggagcttaacttgagaaacacgtgccaccacaagggtggaatggaacgcccttgtctaactaattaggaaagtgtttggggccttcgtcttccgaaggtcctcaaaaacatgattaacaatgttttccaagtgaaatatatgtacaggaaccttcggacttggaacgaagctgtccataatatggaaagcatgattgggacgaagtcgaatcaattctgaagctatgcgcaaggtagcttcggctcagtagcagaaaaaggaaccgact

SEQ ID NO: 301171 - DNA, 115 bp, Zea mays
caacaagatcccgtgtctgtgtggcacagagagctgccggggctccctaaactgaggtggggcaggataggtgcccacacgcctatttattccccctggtgccctgagctcccag

SEQ ID NO: 301172 - DNA, 292 bp, Zea mays
ctcctcaccatggactggacctggaggatcctctttttgcgtggcagcagccacaggtgcccactcccaggtccaactggtgtagtctggagctgaggtgaagaagcctggggcctcagtgaaggtctcctgcaaggcttctggatacaccttcaccgactactttatgaactggatgcgcccagcccctggacaaaggcttgagtggatgggatggatcaacgctggcaatggtaacacaaaatattcacagaagctccagggcagagtcaccattaccagggacacatct

SEQ ID NO: 301173 - DNA, 250 bp, Zea mays
ccgtcatcgatctcgtttcacatccatccatcctcgtttcactccgtcccgcaacatctcaaccccatggcaaagatcaagatcgggatcaatgggtatcagcaggatcttaaggctgcttgccatcatagccctgcagtctgacgatgtctagctcgtcaccgtgaacgagcccttcatcagcaccgactacatgacctacatgttcaagtacgacactgtgcacggacaatagacagaccatgtagtc

SEQ ID NO: 301174 - DNA, 309 bp, Zea mays
ccaagctcaacaacagccagctcgcgaaaataatgaagagccgcagcatggcatcatcggccgcgctcttggtgctagccctcgcgctagtggcggccaccgccccacaggtagcggaggcaaagaagaagagagcggcggagagcggcgaggcggcggaggcgaagaagatccaggacgacttctgctcgacgctgtgcgagggcaagaaggggacggacctggtcgtgtgcaaggagtcctgagcgctctcccagcagtccaacctggtgctgtacggcaggatccagtgcaaggcaagtgcaccga

SEQ ID NO: 301175 - DNA, 117 bp, Zea mays
agtgtttgcagagctagtggatgtgtttgtatacaagtatgattgctgttacataacaccccagattgactcccagattagaacacagttgtgctgtcaatacctcatactgcgtga

SEQ ID NO: 301176 - DNA, 234 bp, Zea mays
gttaatttcttgcctaggccgggtgagcaaggaagacattgaacgtatggtccatgaagctgcgaagtacgaagctggaagatgagcagcagagggacaaggtgtcatccaagaattcacttgagtactatgccttcaacatgaacgcaactgttggagatgagagacttcaaggcaagattaacgatgacgacaaacagaatattctggacaagtgtaatgaaattatcaact

SEQ ID NO: 301177 - DNA, 203 bp, Zea mays
gaagtcaatagcagccagccgtgaagagagtgatgtatttgttacgaataataatgggaacatggccaaagttttagctggacggaggcgatacatgggccacaagagaactattcacccgaatgcacagaaactcaatgtactatttcaaacacggaatcaattgagctgggataccttttcacggaaggtacagagagtta

SEQ ID NO: 301178 - DNA, 196 bp, Zea mays
caaaaattatacacttgctggccagctctcaccgtgtcatcatcatcctcgtcttcagtgtctgagtaggtccaccattgttgccctctgccatttataattacgttcccttgcataaccattccatatagtttggtgaactcgagccactggagcaagcctgaaccccaggatttagcactggttggagctagga

SEQ ID NO: 301179 - DNA, 142 bp, Zea mays
tctaagctcctagtccatacgccatgggtcatttcacagaggaggacgaggctactatctctagcctgtcgtgcaaggtgactgtcgatgctgctgctaggagcaataccgggaccgctcctggttgcctacacatggaacc

SEQ ID NO: 301180 - DNA, 206 bp, Zea mays
cgtgtatagactatgcaatgagatccttgatcctttaagtgctcttctgtgtcgtgcatagtgagaaggcaaagtctttggacaacgatgcaaaatctaccgggtccggtgtgaccatcgacatcaccatgttgggcgcatttggcattggcaatacggatagcacgtatgctgtgcagtatgcgctggcatcagcgtgcggcggc

SEQ ID NO: 301181 - DNA, 282 bp, Zea mays
ggctttgttgcattgcatcacaagttcacagctcgcccggacccagagggagcttgtacttccaaagttccacagttccactgcacagatcgtcggcggcggcgcaggcaaggccacaatgtctccggcgcccagcagcggcaagcgcgggagggttcccgacccggaggaggacgtctacgtcgacaacctccactcccacaagcgctacctcaccgagataatggcatccagcatgaatggcttgtccgttggagattcagttcctgacaatatcatggg

SEQ ID NO: 301182 - DNA, 269 bp, Zea mays
cccatgttcctcctggtcctcttctgcatcgtgcatggtgagaaggaagagtcaaagggcatcgatgcgaaaggtccgggcctggtgggtccttcgacatcaccaagttgtggcgcctccggcaatggcaagacagaccgcacgaaggctcgtgcaggaggcatgggcatcggcgtgcggcggcactgggaagcagacaatcctcatacccaagggtgacttccttgtcggacaactcaacttcacaggcccttgcaagggcgacgtga

SEQ ID NO: 301183 - DNA, 214 bp, Zea mays
gcaagttactgtggaagcaattcaaatcagaaactgagttcaccattacacaagcagtatccacacagcaagctcacaggcgtggtaatagtaagctgcctcctccttgggcaattgtggccattgctattcttggtttcaatgagatcatgacgcttcttaggaatcccatttatgtgtttttgctatttgtgggctacttgatggtcaagct

SEQ ID NO: 301184 - DNA, 209 bp, Zea mays
aggaagtggtggaagcagcaggggaagaaggcataggaggggagaagatgtagttcacccacttaaagtttctctggaagatctttacaatggcacctcaaagatgctctctctttcgcgcatgtcatctgtccagtgcacgggaagggttcgagtctagtgcctcatgaggtcctggttaccaggctcaggcatgtagtcactattcg

SEQ ID NO: 301185 - DNA, 277 bp, Zea mays
ctccggcaaaaaagttgttgaagcaaccgtttttcaagcaagctcgttccactgatttcattgcacgaaagcttttagacggattacctggccttggttttagatatcaagctttaaaggtaaaggatcaagatttaatggctcaaaagaaaatgtccgatggaaagaaagaagaaatctcgcaggatgaatacacaaggggtatcagcagctggaactttgacatagatgacctgagatcccaagcttcactgggcacagaatgtgcaagacatat

SEQ ID NO: 301186 - DNA, 174 bp, Zea mays
cttggcgatatcgtccatgccgacgctcgtctcctcgatggagatgctctcaatgttgaccagtctgcgcttactgtagaatccctcccggttatcaagggcccaggggacgagtcttctcgggttccaattgcaaacagggttagatcgagaccgtggtcattgccaccggaa

SEQ ID NO: 301187 - DNA, 184 bp, Zea mays
cactgatatatgtctatatcgcgttggctgttggaagctccttctgcgtcctcctaagagcgatgtatcttgtaacagcctcatataagacagcgactctattattcgacaagatgcacatgtccatattcagagccgctatgtacttctttgattccaatcagagtggacgcgtcctgaacag

SEQ ID NO: 301188 - DNA, 270 bp, Zea mays
cggctcgagctttcaacgtataaaatagcagaacaagattttacttatttctaccctgatgatccacccacatttatcttcagtcctgctaacagacgaagagggagacctcacaaacgaatacatattagtcaagaggacaatgttgctaataaacagactcttgcaagttataggagcaaagctactaaagaaagcgataaacttatgaaccaagcagaaatgaagtcactggcttttgcaaaggctaaattgaaaagagaaaacgca

SEQ ID NO: 301189 - DNA, 296 bp, Zea mays
aacaagatacgagtgggactgtagctttcgtcacggtagtttagttgaagaggttgatggtcacactgcaatactatatcataggttgcagctgcactggtgcccaatgttagtttggcctcgggatctttgttatgctcgatattggcgtcgtaatgatgctggaagttaagttgtgctgttaccggtctatagaacatcctaattgtggtcggcaacgaggatttgtgagggcattcattgaaagtggaggtttcaagatttctcctctacagtgtcacaatggaagacctcgt

SEQ ID NO: 301190 - DNA, 232 bp, Zea mays
cctcgagcgaatcggctcacgcgacaataatgacgagccactgcatggcatcatcagccgcactcttggatgctcaccctcgcgctagtggcggccaccgccccacaggtagcggaggcaaagaagaagagcagcggcggagagcggcgaggcggcggcggcgaagaagatccaggacgacttctactcgacgctatacgaagggcaagaacgggacgaacctggtcgtgtg

SEQ ID NO: 301191 - DNA, 182 bp, Zea mays
aaccagacaagcaaggaatcccccgatggctcatcgcgttctcctcctactctctctcgcgtcgaccgccgcggttgccgccgccgtcaccgcggaggacccgatgacccggcaggtagttcccggtggagatgacaacgatctggagctgaacgcggagtccaacttcctgagcttcgtgc

SEQ ID NO: 301192 - DNA, 273 bp, Zea mays
cggggctatcgaggcaagatgtattctttacaggtcctgaaacgcgggctgcagcagatcaccggccacggtggtctccgtggctatctacgggtttttttcaggacaaatgatgcgaaggttggtacattagtgggggcagacaatatggacacaatactatgaagacaacaagccttttttggcatcttagcttcacagtatgacgatgatctccacaacataaccattactgctctaattctgtggacgacctgattcacgtgatggcac

SEQ ID NO: 301193 - DNA, 295 bp, Zea mays
gatcaatgaagtgcttgacagagcgaaagttgaagccggaaagttggatctggagtctgtaccatttgacctgagatccatccttgatgatgtcatctcattattttcttcaaagtcaagagagaagggaattgagcttgctgtatatgtctctgaaagagttcctgcactcttgttgggtgatcctggaaggtttcggcagataattacacatttagtgggcaactcaattaagttcacagaacggggacatattttgtacaagttcatctggcagatcactcaaatcttgcaa

SEQ ID NO: 301194 - DNA, 298 bp, Zea mays
gtacatccaggtggctttatttgggccagtgaaaaaacaggattcaggcatttatatgttcatggcaatgatggagcatgcttaggacctctcacacaaggtgattggatggttgagcacattgctggtatcaatgagagtaatggacttatatatttcactggaacattggatggaccattggagacaaatctctaccacaccaatctctttccagattggagccttcccttgcaaacccctaaaaggctgactcgtggaactggccggcattcagtaattctcgaccatcagttgc

SEQ ID NO: 301195 - DNA, 296 bp, Zea mays
ggcacgtccatgtcgtgcccgcacgtctccggcgtcgctggcctgatcaagaccctccacccggactggagccccgccgcgatcaagtcggcgatcatgacaagcgcgacggtgctggacgcggagatgaagccgatcctgaactcgtcctacgccccggcgacgccgttcagctacggcgccggccacgtgttcccgagccgcgcgctggacccagggctcgtgtacgacatgaccgtcgtggactacctcgacttcctctgcgcgctcgggtacaacgcgacggccatgaggac

SEQ ID NO: 301196 - DNA, 287 bp, Zea mays
gtgaaagttcaacaaattatagtcgatgctggaatttacttgtcagggaggaccaacttctttcgaggaacacagaaacgagcagctcctgaggcttttaagttctttacaggcatttcttgctctctgtgcttgctttgttttcattggtcttaataatttcctcaccaatttatctcctccgtaataggttctccatgggtcatattaaaccggcaatttatagagtactgcattcttgcttgggagaatctccctaggattcttctcatgtacttcaacaatgt

SEQ ID NO: 301197 - DNA, 262 bp, Zea mays
ggtgatttgataaagtgggataaagccaaggttggctactatgtaggggttgatattgctgaaggctcgataaaagattgcatgactcgctacaatggtgacacagatcaacaaagaaggaaaaggttcagtttccctgcacggcttatttgtactgattgctatgaggctcgtttggatgaatatttatatgaggatgctccgtttgatatatgtagctgtcagtttgctttacactattcatggtcaactgaagcacgcg

SEQ ID NO: 301198 - DNA, 286 bp, Zea mays
cgacaagatggcgtgcacaaacaatgcgatgagagccttgttcctcctggtcctcttctgcatcgtgcatggtgagaaggaagagtcaaagggcatcgatgcgaaagcgtccgggcctggtgggtccttcgacatcaccaagttgggcgcctccggcaatggcaagacagacagcacgaaggctgtgcaggaggcatgggcatcggcgtgcggcggcactgggaagcagacaatcctcatacccaagggtgacttccttgtcggacaactcaacttcacaggccct

SEQ ID NO: 301199 - DNA, 288 bp, Zea mays
tgatatacgagtacatggaaaatgggagccttgagatgtggctcaggaaccgggctgatgccatcgaaacacttggatggccagaccgcctgaagatatgtattggttctgcccgcggtctttcgttcctgcatcacggttttgtgccccatatcatccaccgtgacatgaagtcaagcaacattctattggacgagaactttgagccaagggtctctgattttggccttgcaaggataatcagtgcatgcgagactcatgtcagcactgacattgctggtacatttg

SEQ ID NO: 301200 - DNA, 285 bp, Zea mays
ccgcgccggcgtcctgctcaccaggaacgttggcatctccgacagcctgcgccccgccaacccgctaggctacttcaaggacgtgccgctacccgtctgcgccgcgctgctcaagcagctggactcggacgacgacgacgaccagtaaactataccacggcggcgtcgcggacatgctgcacaaaactacaacgatacagagcgaacgcatggcatggatagcagtatctacggccacggcacgctcgagcgcgccatcgacggggtcaccgagcgacgggacct

SEQ ID NO: 301201 - DNA, 233 bp, Zea mays
atctgcccttgcagccgccgccgacggatccaggtctgtagactgctcactcctctacgctccgctccgaatggcccgcacgaagcagacggcgcgcaagtcgaccggcggcaatgcgccgcggaagcagcgggccacgaattcggaacgcaagtcggccccggccacgggcggcgtgaagactatttcaactgtatagagcggcgccgtcgtgcgccgcgaaatgcacaagt

SEQ ID NO: 301202 - DNA, 214 bp, Zea mays
gggacaagaaggtcgaagcctgcaagccgccaaggcgcgcctcgaggagaggttcaagaccggcaagaacaggtggttctttaccaagctccgcttctaggcgccgggcaccccgcatagtgactactttagttgtcaatttgttgtatcggaaaccatttaagctatttctgttttggtattgcgcttgttatggatctcggagaagattttg

SEQ ID NO: 301203 - DNA, 275 bp, Zea mays
gccgcctcccccaatttccaactcgtgctctcacctcggatctctccatccctttcgtccaaaccaccgaccacaatcagaagtgttggcggcggcgcattccatggcgccgctggggtcaaagctggcgcactgcagtccacgtggccaagcacggatgctcgtaccacaagacgctcatggagaagaacaaacactatgtcgtcgaccctcccaccattgacaagtgcaaggacctctccaagcagctcttctacacccgactcgctagcctt

SEQ ID NO: 301204 - DNA, 258 bp, Zea mays
gcagaggtttaaggagtttcagactgaggtggaggcgattggcaaggtccggcattccaacattgttaccttgagggcttattattggtcttttgacgagaagctgctaatatatgattacattcctaatggcagcctctctgcagcaattcatggtaaacctgggttgatgacattcatcccgttgccatgggaagcccgaataaagatcatgaaaggagttgccaaggggatgtctgtcctgcatgaattcagccc

SEQ ID NO: 301205 - DNA, 243 bp, Zea mays
tcggctctcgcatcgatgaagaacgtagcaaaatgcgatacctggtgtgaattgcagaatcccgcgaaccatcgagtttttgaacgcaagttgcgcccgaagccttctggcggagggcacgtctgcctgggcgtcacgccaaaagaaaaaaaaaaaaaaaaaaactcgagcgtgaacccgccgccgacgcagcagcaggagacgcgccaaggagagcccgcaaggaggcgactatgagggcca

SEQ ID NO: 301206 - DNA, 223 bp, Zea mays
tcacagtcgtgaccagagcgcgagagctagctagagggccgtgaaaatgccgatcaataggatcgccctggggagccaccaggaggtgtaccacccgggcgccctcaaggcggcgttcgctgagttcatctccaccctcatcttcgtcttcgccggccagggctccggcatggccttcggccccgccctcgtcagctgggagtggggctaccagtgggtgtac

SEQ ID NO: 301207 - DNA, 186 bp, Zea mays
tgttcttcttcactttgagaatggtattgcagagattgcgagagcacaagttgtatgcaaagttgagcaagtgtgagttctggatcagtgaagtcctgttcttgggtcacataatcaacaaagaaggattggctgtggatccgaagaaagtggcagatattctgaactggaaagcgccaacggatg

SEQ ID NO: 301208 - DNA, 243 bp, Zea mays
gcaagggcaacatcccggcgttcggcgtggcgtcggggttcgccctcatcggcggcgtcgtgggcgtgttcctgctgcccaagatctccaagcgccagttccgcgccgtcagcacgggcggccactgatcgcagccgccgcgccggagcacggcacggcggcacagcccagccgtgctagagctgtatgttttgaaagttgaaacagaataagaagcgggcgaaacgagaaaaccatgcatgt

SEQ ID NO: 301209 - DNA, 224 bp, Zea mays
ggcgcgtgattgggtactcaccagaccagatgtttgctgttgtcgcgtcagtggacctctacgaggactttgtgccatggtgccagcggtccaggattattaggtgccatgaagatggctcatttgatgcagagctcgagattggattcaagttccttgttgaaagttatgtctcccgtgtggagatggagaagcccaggtatatcaagactacagcatctgaa

SEQ ID NO: 301210 - DNA, 225 bp, Zea mays
aattttctgctgaagctgttcgtatgagatgaccgaagttcctcttcgtgaagcttcggaatttataaaccgacataaaagtagaatgaccttttagtccatatatgtttgagtcaccgttgtaattccttatgaggggcataattataattcctcacaggccacgccctgtgcctataaataggtgaacagtacctctgtactgttcacgcaatcttgtaatca

SEQ ID NO: 301211 - DNA, 239 bp, Zea mays
gcgctgggggagcagcagcgtctcgcgttcgcccggctgttacttgctacacccactttggtcctgctggacgagtcgacaagcgcactcgatgaagcaaacgaggctcatctatacagtcagattgaagctgccggcattacctacgtaagcatcggccaccggaaaacacttcacaagttccacaacaaggcgctgtacatttccatgtctgattcgacggacaccaatccacgcaa

SEQ ID NO: 301212 - DNA, 210 bp, Zea mays
ttggagatatggagtcaaccttgttactcaggcttgttcatgtggacagtgggatgtaactggaaaaccatgcactcatgccatagcattcataacttctcaacgaaatttgagaatcgaggactatgttggagaatgttattcggttcaaaggtttaaagatgcataccaatttgaggtgtatccaatgggagacaggttacagtggcc

SEQ ID NO: 301213 - DNA, 211 bp, Zea mays
gtgagtctgtcggacagctggtttcatacttcaagataccactcaatcaattagttgtgatctacgatgatcttgatctaccctttgcgaaattgcgtctgctaccaaaggggggacatggtggccacaatgggatgaggagtattgttgaccatttgaatcagagccgtgattttggacgcctaaggattggtattggtactacaattat

SEQ ID NO: 301214 - DNA, 219 bp, Zea mays
ggagtctctcagataggcctgacagccgtagctgtcggctgccgggaactggagtacatagcggcatacgtatccgacatcacaaacggggcgctggagtccatcggcaccttctgcaagaacatgtacgacttccggctcgtcctactcgacaagcagaacaaaataacggatctgccgctggacaacggtgtccgagctctactgaggagctgtacc

SEQ ID NO: 301215 - DNA, 223 bp, Zea mays
gactgctgcgagttccggcccgagcggtggctccgggacgggcgcttcgtgcccgaaagcccgtacaggtaccccgtgttccaggccggcgcgcgcgtgtgcgtgggcaaggagctggccctgatggagatgaaggccgtgatcgtggccgtggtccggggcttcgacatcgaggcggtctgccggagctcccgccggcccaggttcgcgccggggctgaccg

SEQ ID NO: 301216 - DNA, 236 bp, Zea mays
cttcaagcggaagtgcctcctcctcgtcgtccggtcgtgataagatatggctggccgtggaaacgctatcggcgctggacgccgcgaagaaggcaatatcgaggagctccaaggccggactccagttccccgtcggcaggattgctaggttcctcaaggcgggcaagtacgctgagcgcgtcggcgccggcgcccccgtgtacatcgtcgccgtcatcgagtatctcacggctgag

SEQ ID NO: 301217 - DNA, 231 bp, Zea mays
ggcaaatgcttggcaaaaataaaccctggaaattcgtgcaagcaaaaggatccatgcaagcagaagaaagcatggaggttccagaatacagtctcggaggccctggaggacatcacagctctatactatgacgaagatcgtgacgagatctacactggcaaccggcatggccttgtccatgtgtggtcgaactgaaagccgaaatagtggcggctttcacccacagcatgg

SEQ ID NO: 301218 - DNA, 218 bp, Zea mays
atagagtgaggccttgttcggttattcccaatacatatggattggaaaaaattcttaagaagtttgacttgtttgggattcaaacccatccaatcccactcaatccacatggattgagagctaaccgaacaagccctgagttggtccgtgctgtcagtgtgctgcgcagatcgtgtaacattacttcgtgagttcgaaaggcgtgtgacaattttgtt

SEQ ID NO: 301219 - DNA, 212 bp, Zea mays
acggaaaggatgcacgccatcacagctcgcgttggcctgggttcaccaccaaggaaacgacgtttgccccatacctggcacaacaaaaatcgacaacttcaaccagaacgtgggggcactgtctgtgaagcttacaccggatgagatggctgaactcgagtcgtatgccgcggctggtgaagtcttgggtgaccggtatggcgatcaattgg

SEQ ID NO: 301220 - DNA, 226 bp, Zea mays
gacaaagtagcaattctagcagtcctgtcatcttgtagacatggtaggcttgtgcaggaggggatgaagatattcaaaaatttgaaagctgattattcaattgaagctgatatggagcattacatttgtgtggtggacatgctatgcaagtgtggttatttgaaggaagctgaggtcgtgattagaggcatgcctttccaaccaagcactgccatatgtcgcacat

SEQ ID NO: 301221 - DNA, 215 bp, Zea mays
atgctgaacttctactaaaagatgccagggagaagctgaatgagctcagcaagcactggactcggaaggacaggaacttgtgcttgaaagaagctgcaaaatgcttccagtacttgggaaagatggtccggttaattatcttgtgagccgttgtgtttgttggataaatcccagtttaagctcgcggcatgcattagagggacactagtatggct

SEQ ID NO: 301222 - DNA, 214 bp, Zea mays
aagcgcacagccgccgcagcacatcgctctctcgatctcagtcatggcggaggtggagcagcaacaggacacgccgaagctcttcaaccgctggaccttcgatgatgtccaggtgaacgacatctcgctgaacgactacctcgctgtgaacgcgacgaagcacgcgatgtacctgccgcacaccgcgggacgttactccaagaagcggttccgc

SEQ ID NO: 301223 - DNA, 225 bp, Zea mays
tcgtcaagcgctgccacaagccggaccgcaaggagttcaccaaggtcgccgcgcggactgcgatcggcttcgtcgtcatgggattcgtcggcttctttgtcaagctcatcttcatccctatcaacaacatcatcgtcggctccggctgattcgtaaacctcagttggcacagtggaaattttatatttgatatggtacagtgctagttttgcataatgttccctg

SEQ ID NO: 301224 - DNA, 236 bp, Zea mays
gcgggtacgacggcgccaaggcagacgtgtggtcgtgcggtgtcatcctctttgtgctcatggccggatatctccctttccatgacaaaaacatcatggccatgtacaagaagatttacaagggcgagttccgctgtgcgaggtggttctccaaagaccttaccagcttgctgatgcgcattcttcacactaatcccaacactcggatcactttgccggagatcatggagtcccgc

SEQ ID NO: 301225 - DNA, 215 bp, Zea mays
ctacgcgcgcatcggccaggtcggggctggcgctgaagcactccatcgacgtgggcgccggcgtgatcgacgcggactaccgaggccccgtcggcgtcatcctcttcaaccactccgacgccgacttcgccgtgaagcccggcgacaggatcgcgcagatgatcatcgaggtgatcgcgacgcccgaggtcgcggaggtggaggacctcgacgcc

SEQ ID NO: 301226 - DNA, 231 bp, Zea mays
ttgcctacacacccagagagtgtccctattaatgcattggttgctgtaaaaggaacacctctcgaggaccagaagcctgtagagatatgggaaatgatccgcatgatcgccactgctcggatcgtgatgccaagggcaatggtgaggctttcagcgggccgagtacggttctccatgccagagcaagctctctgcttccttgctggggccaactccatctttgccggcgag

SEQ ID NO: 301227 - DNA, 178 bp, Zea mays
atcgtcgaggagtccgtcggacgggtgctcaagctcgactccatcaccggcgacgcgtggatcggcgccgacgtcctcgtcttcaacacgtggcactggtggacgcacaccggcagggaccaaccgtgggactacgtccaagacggagggcaggtgatgaaggacatggaccggctca

SEQ ID NO: 301228 - DNA, 227 bp, Zea mays
gctcagcgacgacgacaccggctccaccaccatcacgctccagaccccgggcacgcattacttcatctgcaacgtccccggccactgcgccagcggcatgaagctagcggtcgccgtctccgcctcgccctcgggcacggccccttccgccggagccctgcaggttccggcgatggcctccgtcgtcgccgcggccgcgggcgctgccatcaagctcgcgctcttct

SEQ ID NO: 301229 - DNA, 228 bp, Zea mays
gatcgatggatgctgttacccccgtcaggctttattctaagttaatcttaaggaaaaaatggtgcttcttggtgctgcttccaaggaagaggtggcgagcaacaacatgatttttgccacgccaagtatacctggaggagccgtggtgttccaagtatgtctgagtgctgtcatggtaacgcgatgctggttccctggttgttgattggaacgaatcctaagcgtctg

SEQ ID NO: 301230 - DNA, 220 bp, Zea mays
gcctgatggccctcgtcctggacgccaagggtgactacgacggcgcccttgagcacctcgtgcttgtctccatgaccatggttgccaatggccgtgacattgaggttgccaccattgacgtcgccataggcaacacgtacctcgccctcgcccgcttcgacgaggccgtcttctcctaccagaaggcactgactgttctcaaatcggcccgtggcgacga

SEQ ID NO: 301231 - DNA, 209 bp, Zea mays
ggcaatggatgtcttgacctgggacaggttctacctcagtggtcggctgcagaaaccggtccatgttcttgttgacaactgggatataaggaaggtcaactcaattaacctagaaatggcaacttcagcttctctactccttttaccagcggagttcacggagtacgacctatatgctcaaatctgcagtctatcatatatgggtgatt

SEQ ID NO: 301232 - DNA, 232 bp, Zea mays
gtaagcagcagcaggaaccctagcaccgccgcatccgcagccatgggtatcgacctcgttgccggtgggaggaacaagaagaccaagcgcacagcgccgaagtccgacgatgtttatctcaagctccttgtcaagctctaccgtttcttggtcaggaggaccaagagcaacttcaatgctgtcattctcaagaggctcttcatgagcaaaaccaatcgcccaccaatctcca

SEQ ID NO: 301233 - DNA, 233 bp, Zea mays
cgtgacgatcatgatggtgaacgcggtggcggtagcgtggcgtcggcacgcacgctgtacagcgagttcccgcagtggagcaagctgcttggcggcgccttcttcagcttctgggtgctctgccacctctacccgttcgccaagggcctcctgggccgccgcggccgtgtgccgaccatcgtgttcgtctggtcggggctcatctccatgaccatctcgctgctgtgggtcta

SEQ ID NO: 301234 - DNA, 220 bp, Zea mays
gtgaaagagcttccacatataggaggtaaacttcgggctcctcacagaatgcgtgttccccgaaaatgtactgagcggtgttacttgaaccgtgttttgcctgcacttcttaagaaacatgttattcggttgacgaagtttgattatagattagcaaataggttgcaaactgacttgcaaaagttgagatgtagagttaactatcatgcattgagattta

SEQ ID NO: 301235 - DNA, 215 bp, Zea mays
gtggcctccagttcgtgccttcagaagaaatctggccacctctagcagagcatcccttgaacatcagaatgggaagaaggaagacaaacctgaacagaccacaaaaagagctccatttgtaaagatcaacatggacggcatccctattggtagaaaaatcgatctgagtgccctcggtagttacgatgagctgtctctgtctgtcgacaagctat

SEQ ID NO: 301236 - DNA, 241 bp, Zea mays
gtaggtgggctggcttctcctccccctcttaccaagtcctcttcgggttagtgttacttagggtttggtggatgggcgatggctgcggcttatgtggagtaccgtttcttcgtcggcgggcttgccttgtccaccagcaacgagtcgcttgagaatgccttctcctcctacggcgagatcctcgactccaaggtcatcaccgaccgggagacggggaggtctcgcggcttcggcttcgtta

SEQ ID NO: 301237 - DNA, 221 bp, Zea mays
gcaagaccggcgtgggcgtgttcaccacgtccaccagcggccgcgctttcgagtccatcgaggctgccggcgccgacggggctggcgctggcagtgtcagtggcaccacgcgcagggcgctgctggtgtgcagggtgatcgccggccgcgtgcacaagccgctggacaacctcaaggagttcgcggggcagacgatgggcttcgactcgctcgccggcaag

SEQ ID NO: 301238 - DNA, 211 bp, Zea mays
gtactccaacaattcagggtctatcagagatgcattgtgcttcttccaagacgaacagctaggtcaagatattgcttttgttcagtatcctcagaactttgaaaatgtggtgcaaaatgacatctatggcaatcccatcaacaccgtcaatgagttggaccatccttgcttggatggatggggtggaatgtgttactatggcacaggatgc

SEQ ID NO: 301239 - DNA, 237 bp, Zea mays
gccggaaggtgctgcgcgacaacatccaggggatcacgaagccggcgatccggaggctggcgaggaggggtggcgtgaagcgcatctccgggctgatctacgaggagacccgcggcgtgctcaagatctttctcgagaatgtcatccgcgacgctgtgacctacacggagcacgcccgtcgcaaaaccgtcaccgctatggacgtcgtgtacgccctcaaacgccagggccgcactc

SEQ ID NO: 301240 - DNA, 211 bp, Zea mays
gttagcaagtggttcagcggtgtctgttcatggaggaaccccattaccactgtgctagtgcacattctctttataatgctggtgtgctttcctgagctcatacttccaacagtgttcctgtacatgttccttatagggatttggaacttccgctatcgacctcgttatcctccacacatgaataccaagatctctcatgcggaggctgttc

SEQ ID NO: 301241 - DNA, 240 bp, Zea mays
ggcgacatacaaccccgaagctacggattcatatctgagtggtggactcgattcagtcctctgggagctcagcctcctagagaagcattatgacatctcagtttcctcgatggcttcgaatatcttgagtatggtaaacctgaatcccacccagaacccagttcctatcttgaacgtgaaccctcttgaagcgtacagagacctgtcattggaaagggaactatcaaaaccggctagcaa

SEQ ID NO: 301242 - DNA, 218 bp, Zea mays
cttgctgaagatggctcccactaaggaagaggagattaaactgagagaattcaaagaggagtcttctccagttaagcttaacccagctgagaagttcctcaaggcagtgctcgatgtgccttttgccttcaagagagtcgatgcgatgctttacatagcgaacttcgatgcagaggtcaattacctcaagaagtcgttcgagacccttgaggctgctt

SEQ ID NO: 301243 - DNA, 222 bp, Zea mays
atcgatccagcagcttgggaggacaagaagtgccccggcgagtcccgcttccctgctcaggtgagggttgcaacgcgcaagatctgttcgccgctggaggaggacgctttccgccccatcctccaccactacgacggccccaagttcaggctggagctcagtgtccctgaggcgctctcccttcttgatatatttgcggagaagatttttgacagacagaca

SEQ ID NO: 301244 - DNA, 224 bp, Zea mays
ggcgagcgaatgacggacggccgcgacgacagcctcttcgaccacttctcggcggtggcgcacgcgccgggcgtgtacacggcggcggactacggcgacatggtggagcacttcgtgcgcacgtagagggtggcggggctccaggggctgtctggcgaggggcgccgcgcgcaagactacgtgtgcgggctgccgcgcaagatccgcagcatggaggagctggc

SEQ ID NO: 301245 - DNA, 225 bp, Zea mays
agacgaggtgtgcccggccggatggaaaccaggggagaggtcgatgaagcccgaccccaagggaagcaaagagtacttcgcggccatctagattcgtcgtcattgagaagcaggtgcccgttaagtgctccagcagtaggttctcgtgttcagcggactcgcgttttgacaagtgtgttgtgctgatgtgcatcccgatttgagtgctgttctttgccaccttgt

SEQ ID NO: 301246 - DNA, 253 bp, Zea mays
gcaaacaccgcgaaccgcccccgctcccaaacccgaccgagcaaagcgcaaagccccccaaccgcggatcaatccgcagcatcgatggcgcccaaggcggagaaaaagccggcggcgaagaagcccgcggaggaggagcccgcgaccgagaaggcggagaaggctccggcagggaagaagccgaagggtacgaaacgcctccccgcgggcaagtccggcgccggcgagggcaagaagggcaagaagaaagcca

SEQ ID NO: 301247 - DNA, 244 bp, Zea mays
gcggagcaggtggcagagctccaggcccgcgcggccgccgtacccgacgacctcctcgtctgcctcgtgggcaacatggtcacggaggagggcctgcccacctacatgaccatgggcaaccgcgtgaccggcgccagcgacgccaccggctgcgacgaccatggctgggcgcgctggctgcgcggctggaccgctgaggagaaccgccacggcgacctgctcaaccgctacctctacctgtgcg

SEQ ID NO: 301248 - DNA, 231 bp, Zea mays
  unsure (1)..(231): unsure at all n locations
ttggttgatccggaccggacgacaagacaccgctaggtgttcgttgcagcgcacgancggcttctgcagcttctcaggccaagatgggactctggcagcacagttggtgaatttgatgggcactcaaagagggttctaagctgtgacttcaagccaacacgtccatttaccattgtgataggtggtgaagatattctagctaacttttatgaaggaccaccatctaaattc

SEQ ID NO: 301249 - DNA, 241 bp, Zea mays
gctccggagaggctggaaatgctgagacagatgtagccgtgggtggaagagcacgtgctaccgttggtcaagccggtggaggcgtcgtggcagccgtccgacctgctaccggacccggcgaatccgggcagcgacggcttccacgccgcgtgcctcgagctccgagcagccgcagcgggggtgccggacgacctcgtcgtctgcctcgtcgccaacatgatgacggaggaggcgctgccct

SEQ ID NO: 301250 - DNA, 233 bp, Zea mays
attggtcagacagtaggtgttccgcaacgagctatgggttggcaaggacccccacagagcccctcttcttatattgtcaagaagattttgcggttggaagtaccgacagaagcataccctaatttcaattttatcggccgtcttcttggaccaaggggaaactctttaaagaggattgaagcctccacaggctgtcgtgttttcatcagagggaaaggctcaattaaagattc

SEQ ID NO: 301251 - DNA, 237 bp, Zea mays
gggttcggcgcggggttgcccatctgtgtttttgattgcgaggtcgctctgtgtcagttgttagtgctgtgttcgtcctcggtttcggcgggcccgtgcgtcgggcggcgtgggctgcggatcgatggatgctgttgcccccgtcaggctttgttctgagttgatcttgagggaaaagtggtgcttcttggtgctgcgggagggggggggggggggggggggggggggctcgggggg

SEQ ID NO: 301252 - DNA, 212 bp, Zea mays
ggagactgagatggggggttttgtcaagacccgcgggaccgatgcgtacttcaagcgtttccaggtgaagttcaagagaaggcgcgctggcgagacagactgcagggccaggataaggctgattaaccaagacgggggcgagtgcaatacgcccggatgcagatttgttgtgcgatttaccagcaaggacatcgcagcgcaaatcatctctg

SEQ ID NO: 301253 - DNA, 220 bp, Zea mays
tccctcacccactccagtacaagatcattgttaggatccacacaacgagccagtcctccccgacgcaggcctacacccaggctatcaatgatctagacaaagagcttgagtaccttaagcaagcttttgagtggttctccatgcaagagggctgtgctgtacaggggaaagaaatgatttctggcgtgaaattaatattttgcatcgtcgctagctgcag

SEQ ID NO: 301254 - DNA, 270 bp, Zea mays
gccgcggtggcggccgctctggggctggtgggtcccccgggctgcgggtgatggtcccgagtgcgggcgttgcggtggtatcgaggggctcccgcctcgccgcttggctgagatcaggcgcttcttcgaggactgcgagaagaatgagagcgaggcggctgctgtgaatgactttctgccggcgagcgccgcttgtgaagccgtgcggcgctctgtgggcctgtgtgctgcgtgcgtcgttgagggcctgaggaggtaggattctgatgg

SEQ ID NO: 301255 - DNA, 245 bp, Zea mays
ggagttcaatatccctacagactggatgcttgataacaatcttattagcaagataaagtttgcttctgtgaaattagcgaagatgtacatgaaaagggttgcaatggagcttcagtacatgggtcctctgaacaaggatccagctctggagtacatgctgcttcaggctgtgagatttgccttcaggatgcatcagtttgctggaggtttcgatccggagaccatggatgcattcgaggagctga

SEQ ID NO: 301256 - DNA, 241 bp, Zea mays
aggcgtcggagctgtacaactccagggtctccaaggagatagagcgcctcaacgcggacgaagggattcaggctccaagttcgtctacgtcgacatatactacaacttgctcgacctcatccagaatccagcttcgtacggtttcaaggacgtgagcgagggttgctgcggcagcacggtgctgaacgccgccatcttcatcgcgtaccacagcgcgtgccccaacgcgcccgactacata

SEQ ID NO: 301257 - DNA, 221 bp, Zea mays
agaggaggtagtggatccaaacctcaatgttaagccaccaaaacgtgccctcaagcggacaatcctggttggtttcaagtgtgtcgatcctgacgctgacaagaggccaaagatgagtcacgttgtccagatgcttgaagcagttcagaatgcatatcatgaagatcaaagcaagctcagccaggtgggatcacagcagtcgttagaggagacctcaaaca

SEQ ID NO: 301258 - DNA, 198 bp, Zea mays
gcattcgctcttagggatgtggagattgaaatcattgatatattaatctccattcgctacgtcgcaatgacattgagattgatggaaggatttggtgtgaacgccgagcattctgataactgcgggggattctaaattacagtgcgtcggcgatacaagtcccctagaaatgcctatgttgaaagtgatgcctcaagc

SEQ ID NO: 301259 - DNA, 253 bp, Zea mays
gatggaattgggggcagatgtgcggggctacttcgcttggtctctggtggacaactttgaatggaccgcgggctacaccgaacgttacggcatagtctacgttgaccgtaatgacggctacaaacgctacatgaagaagtcagccaagtggttgaaagagttcaacactgagaaggctggcagcgcctaatgatgtgccatgcataaaagaccgggtctgtgtgatttgaattctatatttttatttgcacct

SEQ ID NO: 301260 - DNA, 234 bp, Zea mays
agacagaaaggctcaagggcgtgaacccattactgccaaacttgctgcaaatttacttactgaagctggtagtgaccgtgtcattgtatgtgatattcattctacgcaagcgttggggtacttcgatattcctgtggatcatatatatggacagcctgtgattctggattacctggccagcaagacgatatctgaagatcttgtggttgtttctcctgatgtgggtggcgttgt

SEQ ID NO: 301261 - DNA, 232 bp, Zea mays
gccaggcccggggacgccttccaccaggtgctcaacgggctggcgcggaagctgccgcacggcgagggcgtgttcctgcagcccggggagaaggcgctcgactgggacgccggactccagagcgacctcaagccctggtagtggactggactcgttgtacatctcttcgtgttcctttgtactctttcatttgacatgacatcgatggatggatggatcacgcattagtttt

SEQ ID NO: 301262 - DNA, 182 bp, Zea mays
caaggtgaaccgtgccgtgtgtatgatctccaactccaccagtgttgtggaggtcttctcccgcattgaccacaagttcgacctcatgtacgccaatcgcgccttcgttcactggtacgtcggtgagcgtatggaccatgacgatttctccaaggctcgtgaggatcaggcgccgcttgaaa

SEQ ID NO: 301263 - DNA, 230 bp, Zea mays
gaagtctggggcatggatgcagaggagtttaatccatcaaggtttgcagatggcagcagctatcacctaggtgcttacttcccctttgggatcggccctacaatctgcgttggccagaatcttgcaatggtcgaggccaaggtggcgcttgcaatgacccttcagcggtttgcgttcaccgtttcggcgtcttatgctcatgcaccgatgctggtgttcaccctccagcc

SEQ ID NO: 301264 - DNA, 229 bp, Zea mays
gcaaccggaggcacaaggtgtgcgaggcgcactccaaggcccccgtcgtgctcgtcgccggcctccgccagcgcttctgccagcaatgcagccggttccacgagctgtcggagttcgacgacgtcaagcgcactgccgcctgcgtctggccggccacaacgagcggcgccggaagagctcggccgacgcgcacgccggcggctgcaataatggattccgccaacacgcc

SEQ ID NO: 301265 - DNA, 235 bp, Zea mays
gttttgatgtatgttttaggcagaagaaggcttttgcaggtgaaacttcttcatcttaagaagttcatgctgctgtacgcaattggctgaagaccaacatatcacacgatgttgcttctagcactcgaataatctatggaggctctgttcaaggataagaagccagtcaaggtcatcaagaagaactcggctgcagtcaccaagttcctcgatgagctggctaagattggccgca

SEQ ID NO: 301266 - DNA, 221 bp, Zea mays
gctaaccacaccaaccagcacgcacgaattccccaaacctctcgtctccgcggcgaagatgtcggggcgaggcaagggctgcaagggcctgggcaagggtggagcgtagtgctccggaaggtgctgctcgataacatccaaaggatcacgaagccggcgatactgaggctgtcgtggcggcgccgcgtgaagcgcatctcagggctcatctacgacgagac

SEQ ID NO: 301267 - DNA, 234 bp, Zea mays
gtgaatgctgctgtggccaccatcaagaccaagcgcaccatccagtttgtggactggtgcccaactggctttaagtgcggcattaactaccagcctccaagtgtggtgcctggtggtgacctggccaaggtgcagcgcgctgtgtgcatgatctccaactccaccagtgttgtggaggtgttctcccgcatcgaccacaagttcgacctcatgtacgccaagcgtgccttcgtg

SEQ ID NO: 301268 - DNA, 228 bp, Zea mays
gtcggctcggcgtgaagatgggcgccgcggagatacagcagcaccccttctctgagggcgtcaactgggcgcttatccgctgcagcactccccccggcgtgccccgggccgtcgagcccgtggcgttggcgccgcccgcgccagctaagccagcgccggtggaaagagcggagatcagcagcagcagcaatagcaagatgatggagatcaacagcagcagcaacagcg

SEQ ID NO: 301269 - DNA, 233 bp, Zea mays
ggacagacagcaagtggttcttggagatgaagaggctcaatggtggcgttcctgtggaatttgatgggtacatgcgtgatgttgttgatagagaggtcttcctcaaggggaagaagaaggtggaggtgctccggtgatttggtttattctctttgattggttacatgcgtgatgttgttgatagagaggtcttcctcaaggggaagacgaaggtggaggtgctccggtgattt

SEQ ID NO: 301270 - DNA, 222 bp, Zea mays
atttaagctaagcaatgctctatctatatccaggttttcattttcacagtcacaggacatggtctggtcgggtcgcttacttgggcaccttgtactcagggtacagctcggcgaccttggccgcgaagtcgctccagtgggagatggactgggcgcagatgtgcctcccggacgctgccgggctctcgaacaccaggatatgcgccatggcggcgtcgtgca

SEQ ID NO: 301271 - DNA, 221 bp, Zea mays
atgtgaacgagttccagaccaacctggtgccctacccgaggatccacttcatgctttcgtcctacgctccagtcatttctgctgagaaggcctaccacgagcagctgtccgtggctgaaatcaccaacagcgccttcgagccatcctccatgatggccaagtgcgacccccgccatggcaagtacatggcatgctgcctcatgtaccgtggtgatgtggtt

SEQ ID NO: 301272 - DNA, 232 bp, Zea mays
ggaaacttacttgatgcttgcgtactggcttccaaatacaacacatacactaccagtaaacgcaaccctgcgtgttgctgttggagcttttataatgaatgacaaaagagaggtcttggttgtacaagaaaagagtggtgtacttcgaggcctaggtgtgtggaaatttccaactggcgtagttgaaccgggggaagatattaacgttggagccataagagaagtaaaagaa

SEQ ID NO: 301273 - DNA, 240 bp, Zea mays
gcaaactggcaacacactatattaacgttcactcaaggcaatgcatagatgaagctgaagtagtagagcaccttgttggcctgacgtctagtcttgcaaaatgcaaattcaggaaaccactgacatggttatctgtgcaagctaacggtgcagttatcccgaaaggttttgttcataaggacctggcgaagaaagacacctggttaaaagctttaatagcgatccctgacatccagccaa

SEQ ID NO: 301274 - DNA, 259 bp, Zea mays
gtttggtcgatgaccttcctttgtcaattgtcatacatttatttgatcataccatgttatcgctttaagatttttgtatgtagctgctgatcatccctttgaggctttgtttggtactctagtattgactctaatcctcaatacatgtggattttggtcaatactagagtacccaaactaggtctgatagagattccatggtgtttcctctcctgtttgtttgtctagacttggactggtgttgaatatatagattata

SEQ ID NO: 301275 - DNA, 237 bp, Zea mays
gctcacgctcttaacttgatctccagaaagggatacagcgaggctcaattgaaggaatgcttggaggaatacgcttccctgaatgtgtggcagatccatccaagcacatttgacatccacttcattgatgcctgatgcagaagccgatgccgatcacctaacatttcatcatgatccaaggatttgaagaccttcgactgaagcctaacaagatttaaaagttttctagtgatagtg

SEQ ID NO: 301276 - DNA, 239 bp, Zea mays
atctttttcagtagggcagcggcactcctatgccttgcccgagccatcctaaaatcatccaaggtgctttgtctagatgaatgcacagccaatgttgacaaccaaacagcctccctgttgcaaaatactatttctgctgaatgcaaaggcatgactgttctcaccatagcgcatcgtatttcaacagtgatgaagatggacaatattctagttcttgatcaaggaaaactggttgaaga

SEQ ID NO: 301277 - DNA, 100 bp, Zea mays
caaggcggcgcgcaagtcggcccctgcgaccagcggcgtgaagaagccgcaccgcttccgcccgggcaccgtggcgctgcgcgaggtgcgcaagtaccag

SEQ ID NO: 301278 - DNA, 226 bp, Zea mays
tcgagttttgattcttgtgacttttttttttttttttttaaagcttgactcgctgtctcataattttgaattgcacataacagaggcgcggcatattacacaattggtacagatgaattacaagtctgggttcggataaaagcagctccgaactttgaaagaggaatggaactccacgtaacatagtaggggatcatttgaaacagccacgaatccatcctttcaa

SEQ ID NO: 301279 - DNA, 237 bp, Zea mays
gagagcaagcctttcggcctcgcgtgatgcagcagcagcagccgtccgtccgcgccgtcaccatccccttcgccgaccttaaggatcggggcaaggacctgggcggcttcatcgaggaaggcttcgggcctcaggggctcggcatcgtctccatcgccggcgtacccggttacccagagctcaggaaaaggctgctgcgcttggcgccaaggatggtcagccttcctgatgatgtga

SEQ ID NO: 301280 - DNA, 216 bp, Zea mays
tgcgccgtggtggcggtggcggctacagcggtggcggcggctactgtggcggcggcgggtagggtggtggtggcggcggctacggcggtggcaagcgtggcggcggctacggcaactccgacgggaagtggaggaactgagctgtggggcccgcgcggccaagttatgctgttcgctaccgtggtgtttaccgtagtcgagagggtttatcgtcgg

SEQ ID NO: 301281 - DNA, 151 bp, Zea mays
ggtcggcgcagacagagtcgcgcatcgtgcgcgtctgccgcgtcttcggcggcaaggaccgccacagcaaggtgaagaccgtcaagggcctgcgcgaccggcgagtgcgggtctccgtgccgagggcgatgcaggtgtacgagctgcagga

SEQ ID NO: 301282 - DNA, 204 bp, Zea mays
gtaaaagcccgagtcgctcgtctcttcccagatcctccgagcacaacagctctccgtcgccgtcgccatgggtaaggttcacggatcgcttgcccgcgcggggaaggtgcgtgggcagacgcccaaggtggcgaacacggacaagaagaagaagccccgcggccgcgcgtacaagcgcatgcagtacaaccgccgcttcgtcac

SEQ ID NO: 301283 - DNA, 227 bp, Zea mays
gacaagtttctagtaaaggataaagtttgcttagagtgcagcaaatcattcaaggagaggaatctggttccattagagaaaggaggaactgggtttgcggcacatgatgaacgcttggaggcaagggatttcaagcatttgggcagcggttctgggttaggactagtgaagcctgcaccaaaagcttactagccttgaatacttgtagccgcttttatatatcgttt

SEQ ID NO: 301284 - DNA, 222 bp, Zea mays
gaaccaccctgggcagattggcaacggctatgcccctgtgctggactgccacacctcccacatcgctgtcaagtttgctgagctcattaccaagatcgacaggcgctctggcaaggagcttgagaaggagccaaagttcctgaagaacggtgatgctggtatggtgaagatgatacccaccaagcccatggtggtggagacattctcagcgtatcctcccct

SEQ ID NO: 301285 - DNA, 224 bp, Zea mays
tgacagggccagcttgcctgtgacctgtgggctttgcgcgcaggcaaacgagctgaacaaaaacggcgagctgtacgtcatcaggaagcccagcatgaggaccaagatcgtcgacgggacaagcctggccgccgccgccgtgctccacatgatccctgagggcaccgacgaggtgctcctcctgggagacgccggcggcaataagatggcgggcgcgctggctt

SEQ ID NO: 301286 - DNA, 221 bp, Zea mays
gttctcgcgcccagagccaaatttttctccactcaatcactgcagccatggacgccagcggagccggtagcaaggcgaagaccgcggcggctgggcgcaaggctggcggccccaggaagaagtcggtgtcgcggtccgtcaaggccgggctgcagttccccgtcggccggatcgggcgctacctcaagaagggccggtacgcgcagctgtgtggcaccggc

SEQ ID NO: 301287 - DNA, 262 bp, Zea mays
gcttccgtgagggtgtgaagtacggagctggcattggccctggtgtctacgacatccactctcctaggattccctccacagaggagatcgcagaccgcgtcgagaagatgctcgccgtgctcgacaccaacatcctctgggtgaaccctgactgtggtctcaagacacgcaagtacacggaggtcaagcccgccctgaccaacatggtctcggccaccaagctcatccgcacccagcttgccagcgcgaaatgaggtcgttt

SEQ ID NO: 301288 - DNA, 232 bp, Zea mays
ggcaagtacatggcatgctgcctcatgtaccgtggtgatgtggttcccaaggacgtgaacgctgctgtggccacaatcaagaccaagcgcaccatccagttcgtggactggtgcccgactggcttcaagtgcggaatcaactaccagcctcccagcgtcgtcccaggcggtgatctggccaaggtgcagcgtgccgtgtgtatgatctccaactccaccagtgttgtggagg

SEQ ID NO: 301289 - DNA, 250 bp, Zea mays
gcgcaccctcgccgactacaacatccagaaggagtcgacgctgcacctggtgctccgcctcaggggaggcgccaagaagcgcaagaagaagacgtacaccaagcccaagaagatcaagcacaagcacaagaaggtgaagctggccgtgctccagttctacaaggttgacgacgccaccggcaaggtcacccgcctccgcaaggagtgccccaacgccgagtgcggcgcgggggtcttcatggccaaccac

SEQ ID NO: 301290 - DNA, 219 bp, Zea mays
aagtcaaggtgctgagcatgagccggctaggtggtgccgctgccgtcgcgccgctggtggccgacatgtcctcggccggtcgaggcggcgtggcggtcgcggccgggagccatgatgggctggcggtgacggagcagcaggtggcgaacctgatggaggaggacatgggcaccgccatgcagtacctgcaagtgaagggcctgtgcctcatgccggtct

SEQ ID NO: 301291 - DNA, 229 bp, Zea mays
acagcaaccaattagcaagcagcaggagtccatctcctccgtcaccaagatcggactagtggccttctaaggcacagtgctctggtgaccggaatcactggtggctcttctcctgcagtgttcaatgctgcacggctcatgtctaccaagctatttattggtggtcttgactggggtgttgatgacgtgaaactaagagaagcatttagcagctttggagaggttactg

SEQ ID NO: 301292 - DNA, 243 bp, Zea mays
gcattcctcccatctcccaagacctcctcagacccgagaagcgcactgcggccatggacgccaccggcactggagctggagggaaggcgaagaagggagcggccggtcgcaaggccggcgggccgaggaagaagtcggtgacgaggtccgtgaaggccgggctccagttccccgtcggccgcatcgggcgctacctcaagaagggccgctacgcgcacggcgtcggcagcggtgcccccgtct

SEQ ID NO: 301293 - DNA, 204 bp, Zea mays
gcggcaagggcctgggcaagggcggcgcgaagtcgaccggaaggtgctgcgcgacaacatccaggggatcacgaagccggcgatccggaggctggcgcggcggggcggcgtgaagcgcatctcggggctcatctacgaggagacccgcggcgtgctcaagatcttcctggagagacgtcatccgcgacgcggtcacctacactg

SEQ ID NO: 301294 - DNA, 220 bp, Zea mays
aggccgtcctgagctggcgtgacccgaggacgacgctgctcttcgccgtcgcctgcgtcgctgccgcggtgatcgcgtattgcgttcccacgaaggtgatggttgggatgtggggcctctacgccatgcgtccgccgaggttcacgagcaggatgccttccccgctgatgaacttcttccgaaggcttccttccagggctgatatcctgctctgatcctt

SEQ ID NO: 301295 - DNA, 212 bp, Zea mays
gtcaagaaaaggagaaattgtgacaaatgtgttgggtgtttgtgcacctgacatgcagtttatatatgtcttacctggttgggagggttctgcacatgacgggcgtgtgcttcgagatgccatctcgaggccgaatggattacgtgtccctcaaggcgagttctgtcccttcatattgaaaaaacaattatttaggcatagttattggtatt

SEQ ID NO: 301296 - DNA, 244 bp, Zea mays
gtcggtttctcgtattctccgcgattccgcgaaacgtgcctctgtgaatcgtggatttgtactggttcctgttcgatccggtaggtggtttgctgaaaatcttggaatctttctgtaggggagttgatcgagaagcgttggtggacatgggtcagatccagtactccgagaagtacttcgacgacacctacgagtacaggcacgtcgtcctcccgcccgaggtcgccaagctcctccccaagaa

SEQ ID NO: 301297 - DNA, 227 bp, Zea mays
gatcacctcggccggcatgggttcgcccagcaggaattgctggaacacgaagagcgcctgctccgggcggtggtgcagcgggacctcgtgcccggcgccgcggacggtgaccaagcaggctcagcccttcgtcgtactccatgctccagccgccaacctcggtcgccacgacgatgtaccaggggtaccaactggtctttacgggaaggcccagggcagggcggcga

SEQ ID NO: 301298 - DNA, 222 bp, Zea mays
agaaggccggccgccccggcaaggcggccaagacgtcggccaaggccacgccagcgaagaaggcgccggtggccaagaagcccgcggccgccgccaacaacgcgccggtagccaacaaggccgctccggcgaacaaggcggctgccactgcccgaaaagcgccgtctcggaaggccaacaagtagaggacgggtaggcgtcggacaaatgtagggtttggtt

SEQ ID NO: 301299 - DNA, 235 bp, Zea mays
gtggaaaggtagtgtaatggattaattaatgtttttttttgcagaaccactgttttcagccactcccagactgttgttgtgtgccctggctgccaaactgtcctctgccaacccacaggaggaaaggcaaggctcactgagggctgctctttccgcaggaagggagactagagcggatgtggtcttcaagttttgctctatgccagatactagcgtcatgaactgcctttagcta

SEQ ID NO: 301300 - DNA, 236 bp, Zea mays
ggacaaccggcagctgcggcggcgcaactcgctgctgctgtcggagctggcgcacatgaagaagctctacaacgacatcatctacttcctgcagaaccacgtggccccggtgacgagcccctcgtcggcggcgcacgcgtccctgcccagcgccggcggcggcggcgccgcggcgtcctcctgcaggctaatggagctggacccggcggactccccatccccgccgcggcggccgg

SEQ ID NO: 301301 - DNA, 234 bp, Zea mays
gcgcggggccggggacgccgctctcgcgcgcatctgcggcaccgtcgccgccgacgagaagcggcacgaggcggcgtacacccgcgtcgtgggcaagttcttcgaggccgacccggacgccgccgtgcgcgccatggcgtacatgatgcggcgccggatcgacatgcccactgtgctcatcaacgacggccgccacagcagcggcgacttctacgctcgcttcgtcgccatcgc

SEQ ID NO: 301302 - DNA, 253 bp, Zea mays
gcgtgaacccgccgccgacgcagcagcaggagacgcgccaaggagagcccgcaaggaggcgactatgagggccaagtggaagaagaagcgcatgaggaggctgaagaggaagcgccgaaagatgaggcagagatccaagtaggctgatggggattgtggatggtggtgtcggcatagttgtgttacgtttcttcgatgcgtgagttcatggagagatgtcacatcctagttcgtcgtcaccgtttgccatggg

SEQ ID NO: 301303 - DNA, 270 bp, Zea mays
gtgagatcggtgaatttgtcgagtatgacctggacaatgaagatgaggagtggcttgaagaattcaataacgagcggaagaatataaaccctgaaaagttggaggtccttctattcaagttggaagttttggaccacaaagctcgtgaaagagcaggagccataacaccaactttcataggaccagtgccagtcctcttgcagctagatgctgctatagaggctttgcagtacttgtctgttcgatatgccattttccaagctgtatata

SEQ ID NO: 301304 - DNA, 219 bp, Zea mays
gtcgcctacgagtggcgctacgtcgtcgagaaccagtacgggaccaaggggatggtgaaggggacgtgccacaaccgcgccgagtcggccgccatgaacgacctgtcgaggtcgctggtgctcgtcaactacttcagggacctcccgaacctgccggcggcgtgcaaggacaactcggcgcagtgctggacatggtcaccgcctgccacgacaagtccg

SEQ ID NO: 301305 - DNA, 123 bp, Zea mays
atctaatgcccaccacatgagatccctaggtattttatcgtaggcctttttcaagttgataaaaaccatgtgcaagtccttctgctccttataccgcttcatgacctttcttattaagaaaat

SEQ ID NO: 301306 - DNA, 214 bp, Zea mays
aaaccttcagttctatggtcaaacctgctacagttcgaataatgctcactttggctcttcttaatagtggcccgcctattcatcagctagatgtcaagaacacctttcttcaccggaccctaacagagacaatttactgttgtcagcccactggttttgttgattctggcctgcttgatcatgtttgccacctcaacaagtctctctacggcct

SEQ ID NO: 301307 - DNA, 130 bp, Zea mays
gagatttgacttgtttgggattcaaacccatccaatcctactcaatccacatggattgagagctaaccgaacaagccctaagaattttttccaatctcatccaatccatatgtattgggaataaccgaac

SEQ ID NO: 301308 - DNA, 235 bp, Zea mays
gcccggggctcgccttcacggtgctgccgccgcgggccttctaccccgtgcactggagcaagatcggcgggctgttcgttgcacccaaggataggaaaggcgagaggtgcgtgaaggccaaggtggagaacatcaaaggccagagctttggcatccatctttggaacagggaaagcagtaggatggaaatggaggtggggagtgttattgaaacgctgatttcagacagttgcct

SEQ ID NO: 301309 - DNA, 225 bp, Zea mays
gtcgccgcgcgctaactccgccatcaacagacctccggagaagaggcaacgcgtgccgtcggcgtacaaccgcttcatcaaggacgagatccaacgcatcaaggctggcaatcccgacatctcgcacacggaggccttcagcgcggcggccaagaactgggcgcactttccacacatccactttggactcatgccagatcaccaggggcccaagatgacaagcct

SEQ ID NO: 301310 - DNA, 292 bp, Zea mays
atctggtgctggtcctggaacgaaggattatgtgcatgtgcgcatacagcagcgcaacggcagaaagagtctgactacagtccagggtctgaagaaagagttcagctataacaagatcctcaaggatctgaagaaggaattctgctgcaatggtactgtagttcaggacccagagctaggccaggtcattcagacctcaggtgatcagcgcaagaatgttgctactttcctagttcaggctggcgttgcgaagaaagagaacatcaagattcacgggttctaagggactgta

SEQ ID NO: 301311 - DNA, 275 bp, Zea mays
caagagttcagttcatcgagctgttgtcaatgctgagcatgcccgcttatcagtagcaacattttatgatccatcaaaatcaaggaaaatatgcagtgccccgcagcttgtgagtgagaatgaaccacaaaagtatcgggatgtaatttatggtgactatgtctcatcttggtatagcaaaggtccagagggcaagcgaaagatgggcgctctcgatcattgcggattagggccagggtgtggcttaaaacagggttggaccactcatctgtttt

SEQ ID NO: 301312 - DNA, 298 bp, Zea mays
cggcgaacctgacgctgggcgtgatgagtagcgagcagctgcgcaagtcgacgctgcagagggacgacgtggtggcagagtggaaggaaaccgccggggagatgacgctgcaggtgcattgcttcgtcagcggcgccaacctcctgcaggagctggccgcaggtttcagatactacgtcttctccaaggagctaccgctggtcctcaaggcggtggttcatggcgacgccgctctgttcgccgacagcgcggagctgatggaggccaaggtgtgggtgctattcaatccagtctcgca

SEQ ID NO: 301313 - DNA, 269 bp, Zea mays
ccttggacaggttgcccagctcccaagggctcacgttcttcctcctgccccttttgcacagttttccgacagctcaacacggccatcgccgtatcccagatgtcctcaggccagttctgcctggtccccctcatccaggttctccaggacttctgccacctctagcactacacggtcaagctcctgttcaagctacactcttgtgagtgcgccagggcaacccctggcccgcgaagctgtgtttatatggcttagacattcactgtcag

SEQ ID NO: 301314 - DNA, 275 bp, Zea mays
caggcgctggacgaggactggaggagcgccgagaaagacgttgacctgccgttgttcgatctggcggcggtcctggcagctacgggcagcttctccgcgagcaacaagatcggcgaaggcgggtttggtcctgtctacatgggaaagctggaggatgcagcagaactagccgtaagagctctcccggacgtggatgaagggggcggtggagttcaagaacgaggtgaactgatcgccaagctccagcaccggaacctctcaggtgctcggctgtg

SEQ ID NO: 301315 - DNA, 237 bp, Zea mays
cggctcgagaatcggctagggtttcggagatgttcggccgcgcgccgaagaagagcgacaacacccggtactacgagatcctgggggtttccaaggacgcgtcacaggatgacctcaagaaggcctaccgcaaggccgccatcaagaaccaccccgacaagggcggcgaccccgagaaggtgagcgcgcgagctggtcatttcgtctggctccgacctgtccgcggcggggagtagt

SEQ ID NO: 301316 - DNA, 163 bp, Zea mays
ccggccacccctcagcgtctacgctcccgaaacgtctgggccctcacctggtcgggggcgtcgtccccttccaggactccctggtttaacgcgcttccccccatgtcctagctgcactccctgtggcgtgagcttcggccaggtgtcccgctgcacttcctgg

SEQ ID NO: 301317 - DNA, 217 bp, Zea mays
actgaagctttctcagtgcactttgcctcagttgagcatctaggaagtattaaaactgtgaagctttctcagtgcactttgaacctggaaaacaatcccaacaggcccgtgggaccatgacttagggattcgggacccacccacccccatccaggaaccgtgacgtccaaggaaccaaacccagacgcagaacaataaaataaattccgtactcccc

SEQ ID NO: 301318 - DNA, 275 bp, Zea mays
ggcccgcagtggtacacgacgcggcggcgcatggcgcgcgcggaaggataccaggtttgaggtgccgtgaggtcggccgcagccatcatcagatcgcgcgccgtgaggtcgtctgcggccatcaacgatctgggcttcctcagctcgtccgccaagttggaggcgcagaactctgcgaaggccgtaaggaggaggtcgtgcgcgtcgtccgcagggatcggagcgagaggagatgcgccgagtagtaagcggaggcgagcttctcttcgctaacg

SEQ ID NO: 301319 - DNA, 158 bp, Zea mays
gggaaggtcacagcacaactaagtccaggacaggacattgtgaccatgacccagccacggtcaataccagaaagatgattcagagtctgaagtggtgccccaggtgccaacaggataacctctaacccccgactttgtctctggggtcctgttccttc

SEQ ID NO: 301320 - DNA, 262 bp, Zea mays
ataggattggtgatctaggatgcaagtcgttgtaaaagaataagaactatggaaagccatcgcatgcgtgtaggtgctcttgcatggagttctttgctttcttctagaagccgtgataggagcatcctccaccatgatatccgtgctcaagaagattatgttagcaagcttaccgggcacaaatctgaggactatggcgcatcacagtgtatgtctgcaattgctggctcctatggctatattgctccaggaatgcatatac

SEQ ID NO: 301321 - DNA, 268 bp, Zea mays
tctccttctgttttctgtacctagtccttctaacatcttggacttttgcagttttcatctttgctttaatgcacatgtatttgttacgtatttgtaaaattgtcatatggaaggccttgagggaaggtgatgagatgatgaatactggaaggcttaaacaagcattaccttattatgaaaaagtgatggacgctgtggactttaagactgaacttcatggaagggctgctctgcaatggtccatctgtcttgattcactttgcaggtc

SEQ ID NO: 301322 - DNA, 271 bp, Zea mays
cacacctcagactctcaagctcatacaagctcacaagcaatacatcccacagtggagtagggtattacgctccggcggcccgaactactctaaatccttgtgtgttcttgcgttcttcccgttcattccaacgatcaagcaaaacgcctaagcccctcctcatctcaggatttagggcgggtgcactccgccacccggccggagatttactctccgacagtatacaacacaaacggtggccgacatcgaagataaaagtcatgcaagttta

SEQ ID NO: 301323 - DNA, 150 bp, Zea mays
atggcgtcttcgggagctggtgaccctctggattctaagcgtggagaggccccgttcgctcagcgtatcgacccgactcgggagaagctgacacccgagcaactgcattccatgcggcaggcggagcttgcccactggcagaaggtccta

SEQ ID NO: 301324 - DNA, 262 bp, Zea mays
atggcgatggcgggccggcctgcgatccagttcatccagggcacggacgagcagacggtcccggacgtgcggctgaccaagtcccgcgacggcaccaacggcgtagccgacttcgcgttcgagcgtcagtcggtgttcgaatctccggcggactggcgctacatcacgggcttttacatggtcaacgacgaggacgtgctacaatccgtggacgtgagcgctaagttcgtgaacggaaaactgtcgcgtatcgaggccaatt

SEQ ID NO: 301325 - DNA, 131 bp, Zea mays
gctcggcctgcgctgcgccacgatgtccggggagtcagccaggagcttggggaagggaagcgcgctcccggggccggtcccggagggctcgatccgcatctacagcatgaggttctgcccgtttgctgaga

SEQ ID NO: 301326 - DNA, 183 bp, Zea mays
gagaatacatactggcagagcaaccctagaaatgggaaaaatttggcaaagccatgaatcggtcctcgcacctcaccacagataagataactcattggagagaaatcttacaagtatgaatactgtgccaaagcctaagaacttcctcaattcttaatagatataagattattcctactggag

SEQ ID NO: 301327 - DNA, 266 bp, Zea mays
ctagtctatgggaccgaggccatcttgcccacagacttagaatccggttccccgaggacgagggcctacgctgaccaaagcaaccaagctagtcgagaagactcgctggaccagctggaagaggctcgggacatggccttactacactcggcgcggtaccagcagtccctgcgacgctaccacgcccgaggggtccagtcccgagacctccaggtgggcgacctggtgcttcggctgcgacaagacgcccgagggtggcacaagct

SEQ ID NO: 301328 - DNA, 258 bp, Zea mays
gcggccgtgggaggcgcgtcgttcgacgtcgtcctcgacaacaacggcaaggacctcgacgccgtcaagccggtggcggactgggccaagacggccggcgtggggcagttcctgttcatcagcagcgcgggcatctataagccgacggaggagccgccgcacgtggagggggacgccgtgaaggagagcgccggccacgtgggcgtggagaagtacatcgcggagagttcggcagctgctgggcgtcgttccggccgc

SEQ ID NO: 301329 - DNA, 178 bp, Zea mays
cgtgaagctgacaccactgaagggagagtctagaggcagaaagagatcaagtccttggtgaaattgtttaagtacaggatcaagccttgcttgagattggccttacctctggactttttttgttatatgagctaataaattctgtttattgtttaaaaaaaaaaaaaaaggggggccg

SEQ ID NO: 301330 - DNA, 174 bp, Zea mays
cgtgaagctgtggtgctgctgcagctgccgggactgcaagctgctggtgtatgagtacatggcgaacggcagcctgggggacgtgctgcacagcagcaaggcggggttgctggactgggcgacgcggtacaaggttgcgctggatgcggcggaggggctgtcctacctccacca

SEQ ID NO: 301331 - DNA, 256 bp, Zea mays
gcctgtttcttggtccgcaaatggttggagaagcagtaaaaggaggtttgctcattgcggaagtcatgtcagccaagggatacaaagttgaaccacttccgagggttcctcgtcatgatattgtgcaggcagtggagcttggcagcagggaaagactcatagcattctgtgaagtagtgcaacaaacttgtccagtaggatctttcatcaaaccaactgctggggaaacgcctggctatgcttcagaggtcatttt

SEQ ID NO: 301332 - DNA, 124 bp, Zea mays
gcaagatgaagcccaacatcatctttgtactttccctgctcctcatcttggagaagcaagcagctgtgatgggacaaaaaggtggatcagaaggccgattaccaagtgaattttcccaatttcc

SEQ ID NO: 301333 - DNA, 251 bp, Zea mays
ctgtcctttgccctctaggtgtttagcagcattcctagcctctacccattacatgccagtaacatccacccccaaactatgcccaccaaaatgtctccaggtattgctgaaaatccctgggtggcacagtaccccacccccaccccagttgggaaccactgcagtttggcacatacaatggtgttgattttctttttgccacgtgggtttattattttgcacctattttcccagggatttggaattccctg

SEQ ID NO: 301334 - DNA, 258 bp, Zea mays
ccaacttctctccctctccctcgcctgcctgccgttccgcgtttgaccaactcccccgcaccgtaaccctagcagcagatcggccatggagagctgggcgacctgggtggggacaagcgtcacctccgccttcttcgcctccctcgagcgctgctcctgcatcaacctctccaccgacgacgacgacgacgacgaggaccacgacgaggccaaggaccggcccctcatcctcgccgccgccccacgccacgactccgc

SEQ ID NO: 301335 - DNA, 254 bp, Zea mays
ggaagacattggcctatgcagggcataactccatggtttatgtcatcgatgaagttgaatcttctcctgtggcccaaaacttgacgctgcgtgatctgcctctccgtgatgttctttttgtctctgagcgcacattggttggtgtcggatttgactgcaatcctatgatctttgctgctgatggaactgggctttggagtttcgtaagattcttggacgagatgaaagctgctccatcagcttcaaaagcctca

SEQ ID NO: 301336 - DNA, 145 bp, Zea mays
gcaatttcctggtgcattttcaggttacaagctggaggtcatggagtctcatcaatcaagaaaattggacatttctgggactgccaaggctgttatcgcttgttttcagaagttgggtgtatcgtttgacatgaatgagggaaat

SEQ ID NO: 301337 - DNA, 145 bp, Zea mays
caaacccacttctgactgaccactgtgccgcgccgtggtcaccggacggacacacaggacgacgatggccgcgtcggcgctgcaccagaccaccagcttcctcgggcaggcccgggtctcccgcgccgccggcgtcgatgccggc

SEQ ID NO: 301338 - DNA, 167 bp, Zea mays
ctgagaagccacagttgccttatttttgaggctgttctgcccagagctcggctgaaccagcctttagtgcctaccattatcttatccgtctcttcccgtccctgatgacaaagatcttgccttacagattttacaggcttggctttgagattctgtaactgcatcct

SEQ ID NO: 301339 - DNA, 118 bp, Zea mays
ctcaagcacaagcacaagacggtgaagctctccgtgctgcagttctataaggtggacgacgccacaggcaaggtgacccgcctccgcaaggtgtgccccaacacagagtgcggcgcgg

SEQ ID NO: 301340 - DNA, 130 bp, Zea mays
cgcgctcttcctgccggagaccaagaacgtgcccatcgaggagatggtgctcgtgtggaaggcgcactggtactggggccgcttcatccgcgacgaggacgtgcacgtcggcgccgacctcgagatgccc

SEQ ID NO: 301341 - DNA, 144 bp, Zea mays
cctgaggtgtacatagtccttcccggccatattaaccacacagcctgagcctggcccagcctcggctgccagagctgcctttgctaggcccggcgccgttgtcccgggccggccttgcactatgcatctcatcacaccccccgg

SEQ ID NO: 301342 - DNA, 228 bp, Zea mays
gacgagagggggaagaaggtggccatcgaggggctcaaggccaagaccaagtacgtcaggtgccagataggcaggaggatgaagcttcgcctcacgccggagataaggttcatcgaggatgagtctatggagcgtggaagcaggatccttgctatacttgacaaactaaaggaggaaagggagcaacaagaaggaaaagatggagaggcagatgatgattcatatata

SEQ ID NO: 301343 - DNA, 273 bp, Zea mays
atccgagttcgtctcaaaggcatcgcctttcttcctggcagcagagagagagatggcatcctcctcgaccacgaatacatcagatggtggtgcaaagtcatcgtcttgcccgagaggacaatggcgacccggcgaggacgagaagctgaagcagctcgtcgagaagtacgggccgcagaactggaactccattgcagaaaagctggaggggagatcaggcaaaagctgccggctccggtggttcaaccagcttgaccctcggatcaacaagcg

SEQ ID NO: 301344 - DNA, 260 bp, Zea mays
aaaagagccattgcactcctggttgtttaactcatatgtatccttttgcagggatttgccattggttcagctgctcttgtgtctctggcgctttttggtgccttcgtcagcagagctggagtgaaggttgtcgatgtcctctcccccaaggttttcattggtttgattgttggagccatgcttccctattggttctctgccatgaccatgaagagtgttggaagtgccgcactaaagatggtggatgaggtccgcagaca

SEQ ID NO: 301345 - DNA, 181 bp, Zea mays
tggacacaacatcgtcgacaatcacgacctacttctatagcttgttttcgtttcatcctgagtgcgtcggtctactctttgtcccagtctggtgattagaagtctgcaaattctgtctgtggaattgtcacctctccaactttggactctttaagtaaatgcggttggtcggtacacagcg

SEQ ID NO: 301346 - DNA, 181 bp, Zea mays
taagtgccagaaattgatccagaagcaatcaagttcaaggaaatccttgaggcccagaaagaggattccttggagaacgatagcctgttggtccaatgccacttccacgcgtagaagggcatattagttatggtggtgcacttaggcctggagaaggtgacgcaattgcacagtatgttca

SEQ ID NO: 301347 - DNA, 176 bp, Zea mays
ccatcatcctctttgtcctttccgagctccttatcttggagaagcaagcagctgtgatgggacaaaaaggtggatcaaaggccaattgccaagcggatacttcccaatttccacatggacaacaccctcagcacttctttggacaaaaagaccaataacatactaaatccaaaggc

SEQ ID NO: 301348 - DNA, 270 bp, Zea mays
tgggtgtaccgcacgggggtgttcctgctggtgtgcgtgctgttccgcctcacctgcaaactccagatcctgcgcttcgagggcatctaccgcatgttcgacgtcgaggcgcgccccaccgccgctgagatcttcgcggagcaccgccgcatccgcacgcagctgctcgccaccagcctttggtacagggtgttcatcctctgctgcctcgtcaccatcaccatcagccagctcggcgcgctcatcgtggtcctctcgtcaagggacgcc

SEQ ID NO: 301349 - DNA, 265 bp, Zea mays
ggaggtcgctgcggctgtgggaaatgctggcgcgcgctgcgcgacgcacttgggcccttttgctgaggggctctctactggcttctggccgcgctccgcgtcgcgcctcctctggattgccccgaaacaccgtggtactgttcgtgccgcagcaggaggcctgggtggtggagcgagtggtccgattccagcggatcctggatcctggtttgaacatgtcatccctgtgttagaccggatccgatatgttcagagtctcaaggaa

SEQ ID NO: 301350 - DNA, 247 bp, Zea mays
ccgatacaggaatctggccagaatcccctagtttcagtgaccacgggatgcctccggttcccaaaagatggagagggcaatgccaaggaggagacgccaactcaccgtcaaacttcacctgcaacaggaaggtaataggaggcagatattacctcagcggataccaaacagaagagggtggcgccatcaagttcgtatctccaagggacagctcggggcatggcagccacactgcctcgatagcggc

SEQ ID NO: 301351 - DNA, 281 bp, Zea mays
attggttaaccttagccaagaaaacaatgctgctcatctgcaggatcaaagtctatttgagacagggatgcagacaagatatcgcagtgttccatctgtttccactccaggtggtccttctgtccagatgcaggactcacaggagcatgaacttggatcagattgggaaaccacaaaggatgcaactatatcattagacatgagaacacctcttagccattttccacctttccgctttggggttgagttcgaggatgtgcacaggctgctgatggtcaggt

SEQ ID NO: 301352 - DNA, 271 bp, Zea mays
tacgattgttacactaggcttaactatacaaaaaagatatatagagacaattttaatggaaataactactgtagactattgaagaatgatctctttgtgatttacgaagtggctggattggaacttttaatatgcgaatgtggaaaattaattacctgtatgaaggtggttattacaaatgagcacactaacccctcggaagttgttttacctactttgaaaggtgtaatgggatgccacctgtgtaaactattcctaaatgtgtatgata

SEQ ID NO: 301353 - DNA, 115 bp, Zea mays
gcagcatcgacatggtagactcgccccagctcgccgcgctagctgacgaggtgtctgcctccctggccaagcagggtttgtgatcaggcccctgaggcggtcaataatcgtggag

SEQ ID NO: 301354 - DNA, 272 bp, Zea mays
aacgccgccatcgtcgtgcacctcgttggcgcgtaccaggtcttctgccagccgctcatcgccttcgtggagaagcgggcggcagcaaggtggccagacagccggttcatgacccgggagctgaggctggggcccttcgtgctcggcgtgttccgtctcacctggcggacggccttcgtctacctcaccaccgtcgtcgccatgatgctccctttcttcggcgacgtcgtggggctgctcggcgccgtctccttctggccgctcagcgtcta

SEQ ID NO: 301355 - DNA, 270 bp, Zea mays
gacaacatttgaagaaagtcggttaaatgaagcagatgtcggtgacaaacaaaaatggctgaaagaggggatggactgcaatttgttgtactggaatgggaagatcattgatttcgacctcccaatcactgtgaggctgactgtaactgatactgacccaggggcaagtgatagtgcgcaaggaggaacaaagcctgcaaccctggaaactggagctgttgtcactgtgccctcttttgtgaacgtaggcgatgatattctggtggattc

SEQ ID NO: 301356 - DNA, 300 bp, Zea mays
  unsure (1)..(300): unsure at all n locations
cgcggagagatcaagcagatcgccattggcaccgacgatgtctacaggaccgcggaggcggcgaactngtccggaggccaggtggtgcgggagccggggcccttgccagggatcaacaccaagatcacagccatcctggaccctgatggctggaaattggtcttcgtcgacaacatcgacttcgccaagaactggagtagccacgccaacgacctcagacaccctgcaacaggattaattctttttcgaaaacaagaacgggcattatatatacagattgaggcacctcctactgtgaaa

SEQ ID NO: 301357 - DNA, 299 bp, Zea mays
gttattgttttattacataaattcggtcaaacttgagatcctttgactctccaagaaagtttgaacaacctataatttgggactgagaatatatataggaactcaattgttggtagcataaacgaaatagttgcgattcataccgcaatgagcaagccatactccaccgatgaaaatatgactccaaaaatgctcccatgcatgctagaaagtccagtttgtcaactttccagataaggtaagccgattcatagtcaattaaaccaagcactgctgatatgatgatcgaggaaaggatg

SEQ ID NO: 301358 - DNA, 281 bp, Zea mays
ccctagcgcgcgccactctccctggcagccgccgccaggaagcctccactccttctccctcttctcacctccccttgctcttctctggccgacgccacttgcgtgtgcaggcaggcaggccctggcgtccgcgcatcctcttctggccaggagctcccccacgcagccgctgctctctcacgtcctctattccttcccatccccgatctcccccaatccgagcagaccggttgtcgcttgctcatggcgtcaggctggttgcttcctcaaagcgagcggcg

SEQ ID NO: 301359 - DNA, 100 bp, Zea mays
gaagaaggtccatcagagctctaccgtggtctgacaccaagtctgataggagtggtgccatatgccgcgactaattactacgcctatgacaccctaaaga

SEQ ID NO: 301360 - DNA, 279 bp, Zea mays
cgtttcctccctcaggcgcgttcgtcgtcaatggcgacatcgaggggcagccgccccagcgagtcaatttcaggttcacacgcgctgctctgagagggaacaactgggaggttccttttccgccgtttggaaaaggatggtttgacactgtctatttggatgatgacatacgggttgctaaggggataagaggagactatttagtggttgagcgtgctccagattcttgggatgtgtagtttctgaagtccaaaactggtcaaaggaacgtgtagagaa

SEQ ID NO: 301361 - DNA, 287 bp, Zea mays
tggagtgtgcagaaatgcccacacttgttagaacacgcagatcctttgtctacagagagaaaaattgccttcatcccccaagatgatgcggtgaagtttaaactctgctcaggataaggacgggaccattttgacatccatgaaaatgaaccattcacagtgcaagaaggataccaaataccatgtacataattcttgctatgaaaagtttccccattattttggtttatcttcttttgaacaaatgacatcaaacttgtgaggtgtttgcatgtggccattaccgt

SEQ ID NO: 301362 - DNA, 99 bp, Zea mays
gtcctaggggccaagggccatgctgttggtgagaatcgacctcactgtcagcgttcctccacctgaagtgatgatggatgagaataaacaccaccaaat

SEQ ID NO: 301363 - DNA, 264 bp, Zea mays
ctggactaataccttctctgccagaagcaacgataaaatccaacaatgaaactaaacatcttgaaggacatgtgaggccaaactttctaccaagaattacccttgctaatatatgggaacctgcaagcagagaatcttgcaataacaatatctgggagatggtgaaagcttcttttcgtattctgtttgggaggtctactcttcaggaaccagcattccaggagttaatactactttacactgatgaagttgttccaagtgaaa

SEQ ID NO: 301364 - DNA, 255 bp, Zea mays
cggctcgagagaacttgtggccaaggcccagctggtcggcaagctcctcgatatctagcgcctcgctcttgacatgccggttgggattggggtcactttccccatatccagctctgtcataatcaaggagaaacaggcgaggggaagtccttggtgctatcaaatgcgtgcactgtgatgatcttgtacctggccttgtctctctgtactccatcctctttgtacgcaaggtaccttccgtccctgagcttgatc

SEQ ID NO: 301365 - DNA, 255 bp, Zea mays
gctggaaacagtggcggcggtgccggggatggtgggcggcatgctgcttcacctgcgctcgctccgccgcttcgagcacagcggcggctggatccgggcgctgctggaggaggcggagaatgaacgcatgcacctcatgaccttcatggaggtggccaagcccaagtggtacgagcgcgcgcttgtcctcgccgtgcagggcgtcttcttcaacgcctacttcctcggctacctcatctcccccaagttcgcgca

SEQ ID NO: 301366 - DNA, 128 bp, Zea mays
agacccgctcggcctcgccggcaccgtcaaggacggcgtctacatccccgacgtcgacaagctacgtgcggctcaagctggccgagatcaagcacgcccgcatagcaatgcttgccatgctcgccttc

SEQ ID NO: 301367 - DNA, 284 bp, Zea mays
ccactatctggatgtcaggatgtgggaggattttgacaagggccatgtcgccggcgctcggaatgttccctactacctctccgtcactccgcatgggaaggagaagaatccccagtttgtggatcaggtttccgcgctctacgccaaggaccaaaacttgattgtgggttgccgctctggcatccggtccaaatacccccatgcagacctcctcacgcggtgatttatgccaattcccattggctccgtacatgggcggtgctacgattgttggtgcaagtggt

SEQ ID NO: 301368 - DNA, 273 bp, Zea mays
ataggctatcactgtggacaatggaacacagtttgactccgaagctttcagggatttctgtgaccaaattggtacgaagatccatttcgcatcagtcagagcacccggagtcaaatggactcgttgaaagagccaacggcattataatgacaggaataatgaagctaatcttcaatcaactcagaggaaaatggccagatcagctaaccaaactggtgtggagccacaacacgacaacatcaagatctacaggcttcactccattcaagttgt

SEQ ID NO: 301369 - DNA, 141 bp, Zea mays
attgtggccatgaaggcagtgtctctgggcttcgacctggaccggggcgacgtgggtacggtgccctcgccagtggagttcatgggctacctctacttcgtgggcaccatcgtcttcgggccctggatatccttccacaca

SEQ ID NO: 301370 - DNA, 190 bp, Zea mays
gcattaagaatttatgcatgagagataaaatagattttaagattcctacttaaacaaaaactttccatgacagtagcatactgatgagacaacacacacacacacaaaacaacagcaacaacaacagaacagcaacaaagcatgctcagtattgagacactgtacagattaagttataccagcaaaagtg

SEQ ID NO: 301371 - DNA, 268 bp, Zea mays
tcaagcagaggtccgacgcgtacaacgccgccagggggctcaaggacggcgagcccagggcaacctggatggccgacggcacccagtgggagggcacctgggtcgagccctccgagaaccaccgcaagggagaccacgccggcatcgtactggtgcttctgaaccacccgagccacagccgccagctcggcccgccggcgagcgctgacaacccgctggacttgagcatggtggacgtgcggctcccgatgctggtgtacgtgtcccg

SEQ ID NO: 301372 - DNA, 260 bp, Zea mays
ctgtgctcgagtgtaaggtcagttcgtaatacaatcaatctgcgtggaacaatttgatatccttagatatgttagtgagatcatttcgacaatgaaagttgagaacagaagttacaatgtcagtgcccatttttttttgttttgttattagatgctaacgccgtgccacaaatcagctcgtgaatttgaacccagattttcaaatacagaaatttaagtgattttgagaggaaaaaaaaaaaaaaaaaaaaaaaaaataa

SEQ ID NO: 301373 - DNA, 243 bp, Zea mays
ataaaagaggcctcaggcaggatctggcatagagctagtgatcagcaaatgtttgttgaaaaggtttgacaggtcagtcccttcccacccctcttgcttgtcttacttgtcttatttattctccaacagtgctccaggcagcccttgtccacgggctctccttgcatcagccaagcttcttgaaaggcctgtctacacttgctgtcttccttcctcacctccaatttcctcttcaacccactg

SEQ ID NO: 301374 - DNA, 171 bp, Zea mays
cggctaacaggggcccgagctatggcttaagccgagacgtgcaggagaagatcgagcagacgtatgatgcggccctggagaagaagctggtggactggatcatcctgcagtgcgccgaggacatagagcacccgccccccgagcagccccagtttcagaacatggttaatg

SEQ ID NO: 301375 - DNA, 261 bp, Zea mays
gttaaaggtctcccacaagactggttatctatttgcctgaagaaacaaggcattgaatctctaaaatgctgttctacaatcattgtcagagatgttttcaagttgaagtcagaagatctttcttaatagaaagtcagatgactatgatgtagaaaatagattccccttaagtataactaatttgaactgtggtaagagatatgctcattattaccacttagaagatgttgttaaaaacatgtgaaagataggtatggaaaa

SEQ ID NO: 301376 - DNA, 252 bp, Zea mays
taacgacctgcagccaaccatctaccagcgactcagcgagcgagatcagcacacactgcacgcagctagctaggagcagcagcagcggcggcgatggcggcctccatgatctcctcgtcagctctggcggtggcgcctcagggcctgccgcccctcggccgccgcgcctcctccttcgccgtcgtctgctccaaggcgaagatcaagaccgacaagccctacgggattgggggtcgcctgaccgtcgacgtc

SEQ ID NO: 301377 - DNA, 259 bp, Zea mays
gttccgatcctccacaccagacccccgccgccgccgcctcttcccttgcgcacctgctgctgtgcggatcggtgaagcggaggaataggatcgcgaacgcggccggagggaaacgagcgaagaaagggaattggtttaaggtatccaagctcaggccattgatggaagcgctggaccccacggccaaggaagtgaacaacttaaagctgcgtcgattcctgcgcacgcgcgaccacgacgtggtcaaggcctccgccat

SEQ ID NO: 301378 - DNA, 254 bp, Zea mays
cacagtggaacctttggctggcagtccatgggacaccctgttcttatccatggaggactccgacggttccaagtatactcttaagacccactctgtttaacaatatatattctatatatgcgtatatggcattgacatgtcattattgtcacctagaaagtgctttgaactattgatgtggggaggtttattgagcccaagatgtatttcagaccatgccccctcccacaaagaaattgataagtaaaagcttc

SEQ ID NO: 301379 - DNA, 276 bp, Zea mays
aacgttgtcccaatgctggatctccactggcatgttctacaagcacactactgaccaacagtgccctgccggacactactgacgtttggctcattcgatatactcacagatccacacctgactctgatgtgtcgatgcaggctgtgccttggtctgcactgtagcacctgtgtactttgagtgcatctcatgaatgtggtgacttcccagataccatctcatgcttaacctagcacatcctacttctttgcctctatgatatccaaattggactga

SEQ ID NO: 301380 - DNA, 257 bp, Zea mays
tagctctggcggaatgctgtgatgtaggccaatgcagtcctggattgggtctactgcatcatgcgatctggagtagacagccaaaggggactatcctctggaggctgcacggcatgagcagctgattgcgcgtgaggcagatgctgccatctaccacttgcaattatgtgatgaactccgccgcctggcctcgttaccagctaccccacagaagccaccgccgtgggttccgttgatgcctccttcaagttctgcag

SEQ ID NO: 301381 - DNA, 265 bp, Zea mays
cttagaagagggcttacccaattgtgtcctaaccggttacccagttgtggacttccgggcggtgctggatgatggctcatatctcgatcgcgattcaagtgtcgtagcattccaaattgcagccagaggatcattccgtgatggacatgaagaaaacgtggtccaaggcttctagagcctatgattctagtctaagtcataactcctgaacagtatctaggtgatgttattgatgatttcaactctaagaagaggacacgtcaac

SEQ ID NO: 301382 - DNA, 188 bp, Zea mays
attgtggccaaggcccagctggtcggcaagctactcgatatctagcgcctcgctcttgacatgccgattgggattggggtcactttccccatatccagctctgtcataagcaaggaggtaccttccgtccctgagcttgatcctgggagatgtcagaggagggccacctggggagccaacagactttg

SEQ ID NO: 301383 - DNA, 254 bp, Zea mays
cacagtggaatggagagctcggtctgaatctgcacaggagctgatgctgagtggtgtcgggggcttcatgctaggcctactcttccttggggccgagctgttcatctacttcaggaatcagaaaggacactctgaacttcagccaacaggattcctgagctgcaatgcagatgaccagattcatggaagaaccttctgtcgcagctttgcagactgttaagcgttcctgcttggacgttattcttccacaagag

SEQ ID NO: 301384 - DNA, 280 bp, Zea mays
ggcacagcgacgacgacctctcccggaagcaacatgctggagttctccaacaacagtagcagttcaccacatgaatgcatcaatacagtatctaaatcagctttcaagaaggctaggacccaagaaccctccccgactcagtctactatgaagatgaggacggcgcagctagaggatcgaataactactctccaccaacttatctccccatttagaaagccggaccacgcgtctgtactccttaaagccattgaatacatcagattcctccatagtcaaa

SEQ ID NO: 301385 - DNA, 284 bp, Zea mays
tggccgcgcacctatctggcaagcgacgccgcggcctcgatcggtgtcggaggcgaacacccccatagcggcggctggcggcggcgcaggagggacggtatccttcaagatcatcctcacctccgaccccaagctccctttcaaagtgttcagcgtacccgaggcggcgcccttcaccgcgatgctcaaatacgccgcggaggagttcaaggtcccgccccagaccaatgccatcatcaccaacgatggcattgagctcaacccccagcaaaatcaggcaacgt

SEQ ID NO: 301386 - DNA, 234 bp, Zea mays
cggggccctgactcacaagatcactcacctgtccacactacagataaaatctctaaacgtcaagtgcctgacgaccccgtagcacgcttcaaggcacatttattacttcgtagacgaacccgaagactcggagccccctgccatattcacaaatgacaccttgtttatagctaactacggagaattctataaaaagactacagataagatatgtaaagctctactaaaaatctt

SEQ ID NO: 301387 - DNA, 130 bp, Zea mays
agtaggcgcaatactctccagctccaccgttaccgctaatataagtaaagtttgtaaaattcatacttaataaacaatttaggacagtcatgtctgcttacaggtgttatttgtctgtataaactagtcc

SEQ ID NO: 301388 - DNA, 116 bp, Zea mays
agtggcatgggcgtctttcctctgcaagtcggaagccaccccggagaagtgagcccttccctgcacccccagaggacgacgcagccacagcaaaggaggcagcaaagcacagctct

SEQ ID NO: 301389 - DNA, 249 bp, Zea mays
tgtaggatattcctggactgactgatcctacagtgagtcgctgcctgggccacagaagagctagcagaatccgcaaacttttcaattgctctaaagaagatgatgtccgccagtatgttgtaaggaaggccttaaataaagatggtaagaaacctaggaagaaagcacccaagattcagcgtcttgttactccacgtgtcctggagcacaaacggcggcgtattgctctgatatgcgcgtaccaagatt

SEQ ID NO: 301390 - DNA, 271 bp, Zea mays
gtcggagatggcagaggtggaggagacactgaagcgactgcagagccagaagggagtgcagggaatcatcgtcgtgaacacagaaggcattcccatcaagagcaccatggacaaccccaccaccacccagtatgccagcctcatgcacagcttcatcctgaaggcacggagtcaccgtgcgtgacatcgacccccagaacgatctcaccttccttcgaattcgctccagaaaaatgaaattatggttgcaccagataaagactctttcctg

SEQ ID NO: 301391 - DNA, 264 bp, Zea mays
gtcgaccaactcgagaggggcttcctcgctactgacaacgtggtagacatgctgcagcttgccaggctgtgtgacgcgccccgcctcgcgctcgcctgtgcccggatggtcatcggggatttcaagaccatctctctgacggatgggtggaaagtgatgagacggaccaatccaagtatggaacaggagctgctcgagtctcttgtcgaagctgatacggaaggcaggaaagagctaaaaggatggaaaaaaagaaagtgtatc

SEQ ID NO: 301392 - DNA, 173 bp, Zea mays
ggtatcatgttcaaccaacatcattatgaaattaattagattcccatggccatacaatggccttgaagaatatatatatatttttaaagtagcttgagcagcaaattggcaggtcatatttcatacctagattacgactctgacttggattgtgcattataatgatatgcccc

SEQ ID NO: 301393 - DNA, 176 bp, Zea mays
ggccaagccttgttttctctgtgtggttcagctactttccatttggtattacacagtcaaatttacatttatctattcaaattgcattttattaaagattttcatgcacagtagattcaagttgctgtcgtgcactatctcctgtgcttttttgcattttgctgcctttaaaagga

SEQ ID NO: 301394 - DNA, 180 bp, Zea mays
ttgtagtcgcggagacggggtgctggtttgcgtcgtagtctcctgcagcgtctggggtttccgttgcagtcctcggaaccaggactcggcgtggctagcgagttatggcgacgaagccgtgtgcgtgctgaagggcgacggccagtgcagggcatcatcaatttcgagcagaaggaaagt

SEQ ID NO: 301395 - DNA, 170 bp, Zea mays
ggagtttcagaaggccgtggagctccagccaggctatgtgacagcttggaacaacctgggtgacgcatatgagcagcagtaggtactgacatcggctctcaaggccttcgaggaggtcctctctttgatccaacaataaggttgcaaggcacgcgtggatgacctcaggc

SEQ ID NO: 301396 - DNA, 281 bp, Zea mays
tgggtcctggatgttgatgtcctgcatctaacgcggtgtaacccccgaagccgagcgagctccggaggaatttcagtatctgctacggtaacttcatcagcccgccaagatggcgatgcaagctgccaagagggcgaacatgctacttccacctgaagtaaatcggatattgtatataagagattttccatacaaaatcacagctgaagacatgtatgatatatttgggagatatggacctattcgtcaaatcagagtggggaacacacctgatactagag

SEQ ID NO: 301397 - DNA, 274 bp, Zea mays
ccgcagccttcggtctgaacgtcgaggcgaactgacgccgaccacggacttcttcctggccacggggttcaacgtcgaagaagtcagcctcattgcgaacaggttcgggatcgatcacacgcttagcctggaggagaacctgctccccaagtacgagttcttcctggcgatggagtacccgaggtgcgagctcgtcaagttcccgcagtactttgggtacagcctggaccggcggatatagccacggtacacgaggatcactgggtgttaggtg

SEQ ID NO: 301398 - DNA, 270 bp, Zea mays
acggttggctgcttcgtctcgcactgcggctggaactccaccatagaggccatggcgtccggcggcgtgcccatagtcggcgtgccggactcgtttgaccagcccacgaacgcgtacttggtggaggaagagtggggggttgccatcagaacggggcgaaacagcgacggcgtgttgtcagggacagagttggcaagatgcattgagctcgtcatgggcgacggtgcaagagcagtggcgataagggagaggatgaagggcttgataacg

SEQ ID NO: 301399 - DNA, 111 bp, Zea mays
ccgaaaagagaagtgaagattcttaaagcacttaaaggacatcagaatattgttcacttctacaatgcatttcaggatgattcatacgtgtacatttttatggagctatgt

SEQ ID NO: 301400 - DNA, 269 bp, Zea mays
attaatgatcaacgacctttaagaccagacgaggcagagctttttgaaaagtcagcacaaaatgcttatgcattgtttcgtgataaagcagccatgtcgcgatcaatgagtgttgatcagatggagagtgttgctcaaggacgagtgtggagcggccatgatgcgttttcaagagggttggttgattcagtaggtggactctcacaagctcttgctattgcaaaacagaaagctaatatacccaaggataagaagatccagctagttgg

SEQ ID NO: 301401 - DNA, 130 bp, Zea mays
ctggggatgaaaaccttcctgctgtgatctgacaccttcggggacattgaccactcaaaactcagatcatctcgcccaccctggagagtgcagagctatctgtagacttaggaatacttgatgggcagcg

SEQ ID NO: 301402 - DNA, 230 bp, Zea mays
ggcccgaggacaagaggcaggagtggctgctgtcggatgtccagcttcaccagggagagcccgaacgtgaacacctggcgcaggaggtccaggaggctcccgtccgcgatggccttgtcgccgcagtcacacagtgatttgtagcacagctcaagtggctcaaggaactcttcgatactggtaaatgacgattccgctgaaatttcagaaactccagttctagatcgcga

SEQ ID NO: 301403 - DNA, 285 bp, Zea mays
cggagtcgatgcggctgtacccgccggtgccggtgaactcgctgctggcggagacggacgacgtcctgccggacggcacagccgtgcgtgcagggtggttcgtggcgtacaattcatatgggatggggcggatggagtcggtgtggggcgacgacgcgcgggaataccggccggagcggtggctgaaccccagcgacgggatgttccggccggacagccccttccggttcgtggcatttcacgcggggccgaggctttgtctgggcaaggagatggcgtacatcc

SEQ ID NO: 301404 - DNA, 281 bp, Zea mays
accctgggaactctggcaccttgggctgtggaacgctcttgaaagtccttcaaatctggagtctgtcatcctaagaaatctggccagtgccttagatactagaaaccttagtgccagagtgactggcagtgtccagggaagaagatatgttgtcctgacacttgtagcatcagatgcctcgatcctgttgacatcccagacccatcaaggaagaagcctgggaagtgtccagtgacttatggccaatggttgatgcttaagccccccaatttctgtgagat

SEQ ID NO: 301405 - DNA, 123 bp, Zea mays
cttatttaaggtgaatgataaatccgtgggtggctccttctacctgcagtcaaaggtggtccgcgcaaaggagcgcctggatgaggaactcaaaatccaggcccaggaggacagagaaaaagg

SEQ ID NO: 301406 - DNA, 277 bp, Zea mays
tggtgagcgacttcgaggccgggctggagtacgccgtggccgaggccgtgctcgacaagcggcaggcggcgacagcgacggcggaagtggaggacagctgggagtaccttgtcaaatgggtcgacattgaggaggccacgtgggagcccgccgagaacgtggacaccgagctcgtgcagaagttcgagcagcagcagtcggggtctgcaggcggtgattgatggcggcacactgcgccaccgtcgccgcagtgatagagttacttgatgaaggtgat

SEQ ID NO: 301407 - DNA, 187 bp, Zea mays
tggataatgataatagggataataattgaatcattttagaagtagctaatttcttttctcaaaagagtgtcccttcttcacacctactcactttacaactttgctcctaactgtgggttgaaaactctagctagagaatattatcaaatcttaacatgcattcctactattatgatagtttttaagg

SEQ ID NO: 301408 - DNA, 271 bp, Zea mays
cttcctttcgctcttcccgctgctccgcccctctctgtcttctcagcagtgggagcagctctcctgccacagctcctcacccccttgagatgttcgcctgctccaagtttgtctccactccctccttggtcaagagcacctcacagctgctgagccgtccgctcatctgcagtggtgctgaaacgaccggagatactgacagatgagagcctcagcagcttggcagtctcatgtccccttaactcattgtctctagccgcagcttcaaaac

SEQ ID NO: 301409 - DNA, 178 bp, Zea mays
atatgggtgtgccgcagcatcatcgttgctgaaagggttgtgctaaatttcatgcagcggatgagtggcattgcgaccctacaaaggctatgtctgatgctgcccgtccagcatgcatattggaaacaaggaaaactgctccaggtttacgtctgattgacaagtgggcagtactgat

SEQ ID NO: 301410 - DNA, 121 bp, Zea mays
cgagtgaatccagtggccccgtggcaccctcctttatgacatccatccatctgtggtgaaccaagtgaaggtggtgacttcggtgacatagtaataaagtgaagactcagaacccaccagc

SEQ ID NO: 301411 - DNA, 169 bp, Zea mays
gcataattgattttacacctcattactggtggataatttatgtgatgtggattgctggtgtccagcatgaccataaacaggtcagaagaatgatggaatgttttagaataaactcctgcttatagtatactatctctttcaaaagatgtttaaaatgcttttgtattta

SEQ ID NO: 301412 - DNA, 172 bp, Zea mays
agacgtggctctttattcgtgagttttccatttacctccgctgaacctagagcttcagacgccctatggccggcctcgacccaaccggcggccttgagcgctgagcaagcaaaggcctctcctcgcggaggtgatccaggcgttctccgccccggagaatgcagtgcgcatg

SEQ ID NO: 301413 - DNA, 166 bp, Zea mays
cagacgcagacagcggtgaccgagtgagaggaaggcggcggcggcggcggcggcggcggcgtgaagtcactgctgcctgggttcgggttggcgactgaaggcggtaccggcctcccggaacagcccgggggagggcttaggtgcagaagggcaggctggccgcggc

SEQ ID NO: 301414 - DNA, 193 bp, Zea mays
cctttgtcaacaacagcaacaacaacaaaaacaacaaagagacagcttttttccaggaaactcacatgtcctgggaggattacaggtgcagattcactttataggaacagcttcagcttcagtgatgaaaaactgaattctccaacagactctaccccagctcttctctctgccactaacacttctcagaaag

SEQ ID NO: 301415 - DNA, 192 bp, Zea mays
agtcacacgtccggagcctagccgtcgcgtacacaccatgccgcgtggaagccgaacccgcacctcccgcatggcccctccggccagccggacccctcagatgagagctgcacccaggccagcaccagtcgctcagccaccagcagcggcaccccaatctgcagttggctcttctgctgctgcgccccggca

SEQ ID NO: 301416 - DNA, 191 bp, Zea mays
aggctcttcgacttcatgcccacccgctggggctacttcgtcggcaacgtcagccccgccccggatggacttccgctggttcgcgctcggcaactgcgtcgccatcctcgcctcgctcgccacgcccgaccaggccgccgccatcatggacctcatcgaggagcgctgggaggacctcgtcggcgagatgc

SEQ ID NO: 301417 - DNA, 170 bp, Zea mays
acgggccaatgcactgaacctggactgagcgcagggcctccttgcccaggcaggaggctggggtgctgtgtgggggccaatgcactgaacctggacttgggggaaagagccgagtatcttccaaccgctgcctcctgactgtagacctattaaacttttttaaaaaacca

SEQ ID NO: 301418 - DNA, 286 bp, Zea mays
ctgctgtatcttggcagatagcttccgtagagtggtgcgtttgatctttgttgtgtcatcactcttttcaaatgtgataagcacactggctctacccatcattccgatttttgctgtgattttcttccacgacaagatggatggagtgaagattattgctatgttgatggccatctggggattcgtttcatatggatatcaattatatgtcagtgacaagaaggctaggaagacttcagtcagtgtggaggagaattcctaagtgcttgttggtggcctgttacat

SEQ ID NO: 301419 - DNA, 258 bp, Zea mays
gcacaggccccccaggcctaggttccccctgaggctgtggcaagtcgtcaatcctgtgtcccagaggtccctctgggccacaacccaacccttctcactctcctcagtgctagcactttgtattttttaatacttttatacttgtttctgcttttgctgctcttgatcccacctttgctcctgacaaccctcattcaataaagaccagtgaagaccaataaagtggtaataaagaaatgtatgaaaaatggggggggc

SEQ ID NO: 301420 - DNA, 251 bp, Zea mays
cgttgtggtccaggaaggtcaagtctccaacctagtgttgggttacgctcactgtggaatggttgtagcagctcgatggattgcaaaacaagccattctgtgcctgagtaaagcaatcgagcaattcccagaatagggggtgaagagcatgggacattcaatgggagctgggattgcaacaatagcaacatacatccttcgcgagaatgagaagctggcatcatccacttgtattgcatttgggcagctgc

SEQ ID NO: 301421 - DNA, 119 bp, Zea mays
catcgagggcacccagacagaggtggacagccacatcatgaaggtggtgcagcagatcgtgcaccaggctagcgccggccaccagatcatcgtgcagaacgtcaccatggacgaggaga

SEQ ID NO: 301422 - DNA, 275 bp, Zea mays
agcttgtaaagggggacagggatcctgagccattgccgtgctcaccgatggtgtactctgggcaggcgcacactaattcccagatgaacaagtttcttgagacaatggctgattggtacaggtatgcagataaccggaagaagattgtagggttctgtgcttatgtcataaggagctcactagcaaagctctacgcggcaaggtatagactgaagtctcgagctaaggtctacaagattgcttcacgggatcttagccgtcctttgagagaaagc

SEQ ID NO: 301423 - DNA, 99 bp, Zea mays
cgtggagtcatttgggcccgacaggcaggagttgagagctactcttccgtagttgggagaatggcagtcctcaatatgatatgatatccaggagaaata

SEQ ID NO: 301424 - DNA, 205 bp, Zea mays
cgacaaaactttaatcggagtggtttccctggtcttgacgaagagtttcaaatggctcaagactattttcaacccattgctggtggtatccttcttgatgtcagctgtggcagtggcttgtttactaggaagtttgcaaagtctgggacacactcagctgtgatcgctttggacttctctgagaatatgctccgccaatgctatg

SEQ ID NO: 301425 - DNA, 136 bp, Zea mays
cgtgggtcaaactagaattctggatgtcccctcactgcagatcaaatgtcaagcttccagttaaggagctacatgaggtcctcagctgactgaggaaccctgtacatccccttgcacagcgctattctaaatcgct

SEQ ID NO: 301426 - DNA, 261 bp, Zea mays
ctttctcccctcttccgcacccgcttctcgctccggattccctctgctgttttcctaatgttggttgctatggtggggcgaggtatcgcgattctctttcgcctcgtctatcctgccacgtccatgcgctccaaggctggcctccagttccccgtgggaaggatcgccaggttcctcgcggccggcaagtctgccgagagagtcggcgccggcgcccctgtctacctcgctgccgtgctcgagtctcttgctgctgaggtt

SEQ ID NO: 301427 - DNA, 260 bp, Zea mays
tgcgacgagatcttcaatctcctggacggcggcgcgcacatctacttctgcggtgtgaatgggatgatgcctgtagtccaggacacccttaagaaggtggcggacggagattcgatagtttggaccagaggcttgcccagctcaagaagaacaagcaatggcacgtcgatgtctactatggctcggattgctgttgttgcgacccttgatgctgccgtggcagcgtcatgatacaaacacatgattgacgattaatcgat

SEQ ID NO: 301428 - DNA, 165 bp, Zea mays
aggcgctgtcaatggtgcagcacaataaactcgtcaagtatatttgggcctacctagaagcagtcatagtggtcgtgacagagctactcgtggggggctcattacgcaagtatttggtcagtctacgacctatgagccttgagcctcgtgtagcagtggtgtttg

SEQ ID NO: 301429 - DNA, 290 bp, Zea mays
aagcaacctaacattttgttgccgaccttgtttatatttctttggcaagcaacaccgcagtcagattctgctatgtttttcttcatcacaaataagcttggattcactccggagtttctagggcgcgtgaagcttgtaacctcttttgcatccctgcttggtgttgggctctacaactattttctgtaggaagttgctctgaggaagatttttcttgtgacaaccattataggttcagctcttgggatgacacaggtgcttcttgtaactgggctaaatcggcagcttgg

SEQ ID NO: 301430 - DNA, 253 bp, Zea mays
aggtgaaggagctcaagaacggccgcctcgccatgttttccatgttcggcttcttcgtccaggccatcgtcaccggcaagggcccgctcgagaacctcgctgaccacatcgctgacccagtcaacaacaacgcatgggcctacgccaccaacttcgtccccggcaactaagctcaacggctatgctatgcgacttcattgtctttcggatcggagagggtgtacgtacgtggattgattgatgctgcgagatg

SEQ ID NO: 301431 - DNA, 106 bp, Zea mays
ggagacagtaagagggctatggaagagtacacctcagcgatcttcatgggcggacagagcaccatcgtgctgcacacaaactgagaggtctcgctcctcgacgcac

SEQ ID NO: 301432 - DNA, 107 bp, Zea mays
gtggacaatcttggcatcttctccatattgtgctcatcaacatcgtaccatctgcatgcggttttgtcctacgtaattgatatcacagcccattggatggacttgtt

SEQ ID NO: 301433 - DNA, 174 bp, Zea mays
gttcagctcgtcgtgggacatccgcgcgacaccgacgttcttcttcctcaagaacgagcagcaggtggacaagctggtcggcgccaacaagcctgcgctggagaagaaagtggccgccgtcgccgacgcggccggcagcaaggcagtgtagtgtagtgtagtttaggcaaagac

SEQ ID NO: 301434 - DNA, 124 bp, Zea mays
gcaagatgaagcccaacatcatctttgtactttccctgctcctcatcttggagaagcaagcagctgtgatgggacaaaaaggtggatcaaaaggccgattaccaagtgaattttcccaatttcc

SEQ ID NO: 301435 - DNA, 203 bp, Zea mays
cttatttcaatgattttggcctaaagatatgtttaaacaaaaatgtgttgtactacaaagttatagatctcttcgagctctacactttttataaactttattttcatccgatttcatatgtcaaagttataattttataactgttgggggccttcggcttacgaaggtcctcaaaaacaggatttaacagtatttctggagtt

SEQ ID NO: 301436 - DNA, 271 bp, Zea mays
cctcaaatcggcgctcatgacaactgcacttaccaccgacaacaacgggatcccgatacaagcagatggaaacccagtaaagatcgccgacgctttcgattacggagcagggtttgtcaacccaaccaaggctgacgatcccgtctcatatacgacatccaaccgtcagattacctcatcctcttctactgcacgggagggttgggtaccaacgacagctgcacgacacctagggcatctgttgtagacctcaaccttccgtcgatcgcaa

SEQ ID NO: 301437 - DNA, 114 bp, Zea mays
gaaccacacgcttttccacaatccccacgtcattcctttgcccatcggctacgagcagccttgaagactcagcagacgtactctttcacagtctccaaactgacctccatacgg

SEQ ID NO: 301438 - DNA, 105 bp, Zea mays
aaccctctcaatccatatggattggggtagaaccgaacatggccttaagcggctgagcagtccatttagtagaagaaattcaaatatttattactgttgtcgtcc

SEQ ID NO: 301439 - DNA, 185 bp, Zea mays
ctctcttctctccttcttcccgcctctctacgatcacagctccaatggccccctgaaagccagagcccaagaaggacgatgccacaaccgctgcccccaaagcagctccggcccctgcggctgcacctgccgctgcacgtgagcccgcacgcgctaaggacgcagcgtttgatgcctccaagatt

SEQ ID NO: 301440 - DNA, 272 bp, Zea mays
gtgaattccttaggtccggaccaaggccagaattgttgaaggagacgctggaaaactttattgccgagaagcagatcgactgcagcctgccgctgtcattcttggtacacgtggtagaggccttattcaaaggtacctgactcttttaaactccagatcattatatctccatttagcaatccaaccttcagaattaacattatatctacggtcgtttgacttagctttatatccagctaactttgcacgtggaaaaaaatcgtataaatcga

SEQ ID NO: 301441 - DNA, 122 bp, Zea mays
tctggtggccaaatcctccatcctcttggatgttaaaccttgggatgatgagacagacatggcccagctagagacttgtgtgcgttccatccaattggacggactggtttggggggcctcaa

SEQ ID NO: 301442 - DNA, 137 bp, Zea mays
gatgcggtggacgccttcttaaccgcagtggccaccaaccagccacccaagatctttgtggcacacagcaagtttgtcattcttagtgcacgtaagcttgtgttcattggggacacactgtcacggcaggcaaaggc

SEQ ID NO: 301443 - DNA, 281 bp, Zea mays
gccactgcatctacacctgcacctaccgtcgcatgctccgggcggcgtacgacctgccgccggagccgtgcgccgattgctgcgtccacatgtggtgcgggccatgcgccatctcccagatgtaccgggagctcaagaacagaggcgccgacccgaccatgggatgggaaacgctctcgaaacagacgactatggctcctgtaccaatgcaagacatgacgcgctgacgaaagcaactcgatctcctagcaaaccaggattacgtgttgcatatatgcaca

SEQ ID NO: 301444 - DNA, 283 bp, Zea mays
ccactggatcgaggagaggattgactttaggccatccttcagcatcaaattctacccaggtaagtttactaaagaaatgagaagcatcctccctgttggggatattacagaatgcattccagatgaagttgctgacgttgctgtattggaagagcccgagcatctaaattggtaccaccatgggcgaagatggaaaaataagttccgtcgagttataggaattgtccatacaaattatctagcatatgtaaggagagaaaagaatggtcaagttattgcttgt

SEQ ID NO: 301445 - DNA, 283 bp, Zea mays
cctccttaccgcggccgtgagggagaacgcggctcggccgtagcggagctgcgagttacagaatgtctgaaggggacaatgggggagaatccgtccatgggaaaccttcggtggtgtacagatttttcacaagacttggacagatttatcagtcctggctagacaagtccacaccctacacggctgtgcgatgggtcgtgacactgggcctgagctttgtctacatgattcgagtttacctgctgcagggttggtacattgtgacctatgccttggggatcta

SEQ ID NO: 301446 - DNA, 257 bp, Zea mays
atggcgaagacgctggaaaaaggccagtccatcgacgacatgatccctgcgcaaacgtaagcgccgcacagagcgcaccagtcagcggcttgcagctggtgcaccgccccctggaagtccaaccaaccgactttgccctctgggttctggccaatgagaacctgcctctccggggcaccgcccgcctgctggaactcctgcacttgggcgctacttccccacgccctaccttaaataaaagtccgtggtggtcttaa

SEQ ID NO: 301447 - DNA, 273 bp, Zea mays
cgcgctctctgcctcgtggcggcgacgacgccctcctccaggtggccaggccatcgtcggatcgtattcctcggccccttctccggtgatgagcacccagaataaaaggctcaaggatatggaggtcagtttcccaatcgtctacggaaccatttccttctggctcggcaaaaaggccagcgtgtctaactctcacaagtggactgtatatgtccgctccgcaaacaatgaggatctgagtgtcatagtcaagcgcgcggtgtttcagcttca

SEQ ID NO: 301448 - DNA, 262 bp, Zea mays
tcgtcaccggcaaggggcccctcgagaacctgctcgaccacctcgacgaccccgtcgccaacaacgcctgggtctacgccaccaagttcgcaccagggtcttaagctagctaccgggccgcggcgtgccaggacattgtgttgtacactactcgtttctgtcgtgatctgtaccatgaacgaatgcaaatattcttgtgctctcccaaaaaaaaaaaaaaaaaacccaaaaacaaaccaaaaaaaaaacaacaaaacaacac

SEQ ID NO: 301449 - DNA, 259 bp, Zea mays
gccggcatcatccgtctcgtctctcctctcctctcctttttccccctccctgcacagcgccgctcaccgtcaccggaccacagcagcgatcgatggctgaggtacacaatgagcggcccgtggggatggtgggcgacgtccgggacgcaccggtgggccgcgagaacgacctcgaggtgaaggaggccggcggcggcgaaaagaagctgtacgaggccaaggtgtgggagacggcgtgggagaacttcaagcagctgca

SEQ ID NO: 301450 - DNA, 104 bp, Zea mays
gtaggcgccgcacagagcgcaccagtcagcggcttgcagctggagccccgccccctggaagtccaaccaaccgactttgccctctgggttctggccaatgagaa

SEQ ID NO: 301451 - DNA, 131 bp, Zea mays
tgggccatccaatcgggatgtctggagctcggattgttgttcacttggctcatgccttgaagcacggagaattcggtctggctagtatttgcaatggtagaggaagggcttccgccgtgctgattgagaag

SEQ ID NO: 301452 - DNA, 220 bp, Zea mays
gttgatgagcttggcgagaggccggagttggagttgcgtccacaggactgcacggctgtcatgaaggtctgcataaggctccgacggtacgcagccgtggagagccttttcagctggttcaggggggccattgggagccccaccgtggtgatgtacacgacggtgatccacagccggtgccgtgacgggaggcaccgagaggcactgtccctggtgtggg

SEQ ID NO: 301453 - DNA, 103 bp, Zea mays
agtccgaggcgcggggcacgaggtccccctccaccgtccgccgcagggcctcaagctgttcgagcacttcctgcggggcgagcccatgcccaagcctgtcgag

SEQ ID NO: 301454 - DNA, 148 bp, Zea mays
attggcaacatgtcaggcgattaggcatgtgtgctatatggggctgagtgttggcctactaagagacgacatatccaacaactaagtgcttaccctaacttgcttgggactaaaagactatgttgatattgatgttgtgatggtgtgg

SEQ ID NO: 301455 - DNA, 255 bp, Zea mays
cggttctagatcgcgagcggccgcccgcgatctagaactagcgggagagagaagggcttctcccagtggcagcgcctcgcgatcggccaagccctgactattctgacaatggcgcttgctgcgctggtggagacaaggaggctggcgatcgcggaagccagcgggctgaggcaaagagaggtgccggtgcccatgagcatcctgtggcagggcccagttttctttgtgcatggtgccggcgcagtcttcggtgcc

SEQ ID NO: 301456 - DNA, 281 bp, Zea mays
  unsure (1)..(281): unsure at all n locations
cctgaaccggtgcaaggacgccggcgtggtgcacatcctcgggaacaccatcgtacgcgcgcggacggactcgggcgtcgtgaagaagctcgcagtcgactacatgtacgccttcatgaggaggatgtgcagggagaacagcgtcatcttcaacgtgcctcatgagagcctgctcaatgtcgggcagatatactacatctgaatgtctatctgatgggagatagtgaggggcttgtacttcttcttctnttaagatataaatccctagtcttttttgggta

SEQ ID NO: 301457 - DNA, 284 bp, Zea mays
gtaaaccaaatccatggcgtgcctgttgactgggcattgggtgctttcattgtgcagaagacgatgaacagaacagagtactcagattcatcagtttcatatctaaacagctatgactctcctggcttggttcctattctgttcattattgtggttgtatttacagcattgtccattctaaggtggagaaaacctcgtctgaagacgatctacgatatggagaaaggcaggtacatcataacaagggtcagccgatgagtcgcgcacatcagcgtctgggagtg

SEQ ID NO: 301458 - DNA, 283 bp, Zea mays
atttggttttagggactaaatagattctaaagtcattaaatacattgtccaaagactcaaatacccttagaatatactcataatattagttatctataaaaaggtaagggcaacatgataattatgagcttttagtctcttttagcacctatgtgaaggactaaagactaaatcattttagtccatattttagtcctagtgtttggcaaaaaagggactaaaagagactaaaaactagagactaatctttagttcctctaaccaaacacccccttagaaaccg

SEQ ID NO: 301459 - DNA, 111 bp, Zea mays
agcagattgatagatcaatgatggatgaattgaaagaagtgaagaaggctgttaatcctacagaagttctgcttgtcgttgatgccatgactggccaagaagcagcagcac

SEQ ID NO: 301460 - DNA, 149 bp, Zea mays
gcacatataaacagagctgtgaagaagttttctgacaattttgctattctgttattccactatgatggccgggtgagtgagtgggatgaatttgagtggtcccagcgagctatccatattagtgtcaggacacaaactaaatggtggta

SEQ ID NO: 301461 - DNA, 100 bp, Zea mays
cagataagcaggagaagacagaagtccctagagtgtggatttctccctgggaatgagaaagtcctgtccctgcttgccctggttaagccagaagtctgga

SEQ ID NO: 301462 - DNA, 267 bp, Zea mays
ggaaatagcatatgcagattactatgaaagggcattgataaatggtgttttaagcattcaacgggggacagatcctggtgttatgatttacatgctaccccaggcccctggacactcaaaggctgtgagttatcatggttggggaacaaagtacgattcattctggtgttgttatgggacaggtatagaaacagcttcaaaacttggtgattctatttactttgaggagaaaggagatccacctgcactcaatatcattcagtacat

SEQ ID NO: 301463 - DNA, 237 bp, Zea mays
gattgctgcggaagatacgccaggggtgcaactccagcagcaatagcagtgacggcgttggcggcgcggacgtggctgagcgtgtggggcgtgaggagcatgcaagcccgaggcttcggatcggatcagtccgagaatgtcgaccggggcgcgggctccatccgggaagtcggtggggccttcggaaacagagatcggctgaagaggaacgatatttccgagcactcagtagagaac

SEQ ID NO: 301464 - DNA, 255 bp, Zea mays
gacaggcaataatgagcagagtttacagctactttaataaaatgtgtcagtacttttaaggtttatagttccctcaacacaattgctaatgcagaatagtgtaaaatgcgcttcaagaatgttgatgatgatgatatagaattgtggctttagtagcacagaggatgccccaacaaactcatggcgttgaaaccacacagttctcattactgttattaaatagctgtagcattctcagtcacctctctctcctcc

SEQ ID NO: 301465 - DNA, 249 bp, Zea mays
ggggcacaaggaattggattatgccggacagagcacatgttctttgcttcagacgagaggattaaggctgtcaggcagatgattatggctcccacgcttgagctgaggcagcaggcgctcgaccgtctcttgccgtatcagaggtcctggaccagaggggagtgggcgagctggtgaagcttgctacagagaggggccgcaaagctaggcctaacttgaaggtgggcatttgtggagaacaggtggaga

SEQ ID NO: 301466 - DNA, 108 bp, Zea mays
gatagatcgccatcatgaacgacaccgtaactatccgcactagaaagttcatgaccaaccgactacttcagaggaagcaaatggtcattgatgtccttcaccccggga

SEQ ID NO: 301467 - DNA, 131 bp, Zea mays
gcaggttcttcctcggcgagcacttcccggcgccggtctacttctacctcctccccatcatcggcggatgcgcgcttcgcgccggtcacgagctcaacttcaaaatggtaggatacatagggggcaatgat

SEQ ID NO: 301468 - DNA, 210 bp, Zea mays
ggaaaaatacaccccatcgcccagcacccctgctgataccaccagacagagagagagagcacttgattcttcacgagatagccacctggaaacactaggtgcctgcccagggaggaacggaggaggactcgagagaaaactagacatcccagggacccagggaggcgatggccaccccagagtccacgctttgctccacggaggtgggag

SEQ ID NO: 301469 - DNA, 269 bp, Zea mays
gttgaactggcatcctgctttagcttgagacttgccataagacactgctgagtacttggcaaaccctttcatagttttgttctccatctgtttggtgtaggtgttgagcgaggcaaatggatctcgatatttcagatgggcttttgatgcactgttgccaaggaaggctttttctgattttttgacaaatgaatttttgcacactttcattggtgtctttcggcaacttacacacattgaaactgacctattgtacatatttttatatt

SEQ ID NO: 301470 - DNA, 273 bp, Zea mays
gctttatcgcggcttaggtctagtgggctgtacactttaagaaggccaatccgtcatggtcaggttcatgactgggatacaatggagagattttggcagcaatgtattttcaattatctacgttgcaatcccgaagagcattatttccttacttacagatagtcctgtcagtacacctgacagtcgtgaatgtacaggagaaataatgttcgaaaccttcaatgtccctggactatatatttccgttcaatctgttctcagcctttctgctgg

SEQ ID NO: 301471 - DNA, 269 bp, Zea mays
ggggcgacgatcccagatactggatctggcatcccgtcagagaaaccaatgacgccgagatcgtcgaggcagcgtcgctgcagaacgtgtgctggctggaggtgcacgggaggctggagctgtcgcacctcacgccggggtgcagctacgacgtggccttccaggtgatgctcacggagccggcgtacgggtggtcggtgccggtgaacctgcggctcaggttccccgacggcacggctcaggcgcggaaggagaagctgcaggggagg

SEQ ID NO: 301472 - DNA, 260 bp, Zea mays
tgttgatagagaatagagaggaggctgcggacccaatggaggtggattttgatgacaaaggcagctggtggtatttgttcaaggactattggttaaatttgaagaccaacttgtcgttgtcagttgaggaaatatcagcagccaaatctcgaaagagtggagagttacctgatactaatgatgaagttaattcagagagttcatcagggcgcaatctagaaagcaatacatcaaaaaaacaaaaaaaggggggccgcgga

SEQ ID NO: 301473 - DNA, 250 bp, Zea mays
gggggctgctgcagacaatatcatcaccacgactgtggcgaacgcggcatccatctcaggacatgttctgtctggtaggacggcccttcagatcggggacagcctgaacatcgataaagcgacactgattatcgtccacacagatgggagcatcgtggagagtatcgggctgaaaggcgcggtagctcacctcatgcaaggtcctcagtctcatccaacccctctggatctcgaccaagaaataggtggc

SEQ ID NO: 301474 - DNA, 284 bp, Zea mays
gatcaactgctaaaacaagacgtcttgtaaaactatcctgtccagatcatgcactattttccattctggtattgttttgttctgtcttgttttaacccatttatgctggaggttgcaactttttgtgtgctacaaacatcagcattttgagcgcatgacccttaaagacagtcagagatgtcaaatcaactgctcaccagcacttaagtacttcccactgagggcgaacggctaggccataaactaggttcaatgctgagtacaaagctattaaactgatttca

SEQ ID NO: 301475 - DNA, 209 bp, Zea mays
tgggaaaggtgttcagggcacttcttgtcctctctgtcccataaacctacctccacctacacactccccctagccagccaggcagcttctctgcctgggaggggagactggacccacctctttctccttggctgcagtggggcctttatccagtgccagggaggaacaacatagttaatttttttctaaccttgaccctttgagggaag

SEQ ID NO: 301476 - DNA, 274 bp, Zea mays
cgtttacaatgaatgcactgcataaaaactttgtagcttccttattgtaaaacatattcaagatcctacagtaagagtgaaacattcacaaagatttgcgttaatgaagactacacagaaaacctttctaaggctttgtgtggatcagatacatacttggcaaatttttgagttttacattctctacagaaaagtccatttaacagtgatcatttgtaagaccaaaatatacataaaaagtttcaaaaatctaaaaccaaaaaaaaaagggggg

SEQ ID NO: 301477 - DNA, 126 bp, Zea mays
aggtaccggactctgcagccgcagagatgttgatgcctaagaagaaccggattgcgatttatgagatcctttttaaggagtggttcatggtggccaagaaggatgtccacatgtctaagcacccgg

SEQ ID NO: 301478 - DNA, 281 bp, Zea mays
ttcacgctctgccggattctcatgaccggccggcaggggctcacgaacctggagaagatcggcatcggcctggtcctctccatcgtcggcatggccgccgatgccatatccgagaagaagcgcctcgccgtcgccgccacaagtggcgtagcagggcatgggtcgctgcccatcagcgtgttcatgctgacgccgcagttcctgctggtgggcgcaggcgaggcgttcatctacacggggcagctggacttcttcatcacgacgtcgcacaagagcatgaa

SEQ ID NO: 301479 - DNA, 103 bp, Zea mays
gtcatggacgtccggaccggcctgttcccagcgctcctgggcatagtcctcgccgcttggatccgcggctcgggtgcccagcagagtgccaccgtggccaacc

SEQ ID NO: 301480 - DNA, 275 bp, Zea mays
ttaaaaccttggggtaaggagcagtatcacaataattttggctgctacagtttcgtttctcggtccgggtcaagctgccccgtgccaacctttcggaaaagatggcccggcgactggatgacagaatggttttacgtgaagaatgatctaacagtacgagaagatatcaaaggtataattatgcgtcctatttggcaaagcttcgaccttcggaggccgaagttgaaatgtatgaagctgccgaagaatgtcagagggccttcggcgttatctgt

SEQ ID NO: 301481 - DNA, 206 bp, Zea mays
gtgttcttagattaattgactacgagctctatggagcctgggggtggatgcaccccggcgtgcgtagtctcgtttggtggtgagtgggagagagaggattacaagatcgatcctttggtaaatggagtctcgtttatcagggtagctaccgctgggacttggtgtggtgtaatatatgatccaaccagtgatgagtcaatgcatgc

SEQ ID NO: 301482 - DNA, 274 bp, Zea mays
tcggaccccacgtccccgcgctggccccgctgcccatcggcttcgccgtgttcctggtgcacctcgcaaccatccccatcaccggcaccggcatcaaccccgccaggagcctcggcgccgccatcatctacgacagtccgcacgggtggcacggtcacgtaagtttgtttgcacgacggtgcatgcacatcatatatacatttgccacgtaagtttattagcttctgccgaagattgcaattgacacgctggcattattggatggtgacagtgg

SEQ ID NO: 301483 - DNA, 273 bp, Zea mays
acccagccgcgcagaggtgtacgccacggtgctcggcgcgctgcaaggagccgctacgtccctcgtcgcgacgctgcaggcgccagtcacggatgttgttgctgtgcactccgcctacgtgcgcaagctcgaggaggaggctggagccgcctagtggtgttgcgaaatgggtgtcatttccctctcactccctatctgttgtttgtacaattctgtgtacctttactggcacccaatcacatttgaacgggtcaaatcacagtttcccatttt

SEQ ID NO: 301484 - DNA, 289 bp, Zea mays
agacaatggtgtccgagctttgttgagggtctgcaccaagcttcggaggtttgctctgtactctgagaccacgagggctctcagatgcacgtctcggctacattggacagtgcagcggtaacatccagtacatgcttctcggtaatgtttgggagactgatgatggattgatcagcttcgcattgggttgcgtaaacctgcgaaagctttaactcaggagttgctgcttcagcgatcgagcactcgcccttgcaatactacatatgtcttccctgaggcacgtatgggt

SEQ ID NO: 301485 - DNA, 277 bp, Zea mays
acagtagaaaccttcttcccaacaaaaataaatggaggtatccaccccaaaagaaaaaaaaataacgtaacctgagctgacagagtgacagtacaatatctttttcggacatggaagacttgattggaaattatgacaggtccctttgattttgtatgatcaggtgggcacttggagttttgatctatttcatgcttcagtcagacatgccattcgggtcctggagggagagcgagctggaacctattacaaaaattgccaaaggccaccttgttat

SEQ ID NO: 301486 - DNA, 271 bp, Zea mays
gagattccgagtgttgtgttggttgggtgatgatgatgaagcagaggtgatcaccacggccgagttccacccgtcgtcctgcagcatgctggcctacggcagctccagcggcctcgtcaggctggtcgatctgcggcgatcggcgctgtgcgaccacagcgtgagaatgttccaggaccgcgagaaccgccctcagcccagcacatttttcagtgagataatctcctgcatcaccgaccttaagttcacaggcgacggggaacaccttctg

SEQ ID NO: 301487 - DNA, 272 bp, Zea mays
tggccacgcagggggagagagcgcaggcgctgctgagctggagggacccgagggcgacggccatcttcatcatgctgtcgctggtggtggccgtggtgctgtacgtgacgcccttccaggtggtggccgtggtgctggggctgtacctgctgcgccatccgcgcttccggagcaagcagccgtcggtgccattcaacttctacaagaggcttccggccaagtccgacatgctgctctagctgcgctgctctgctctgcctgctggaattgga

SEQ ID NO: 301488 - DNA, 264 bp, Zea mays
gtggggcacctccccggcgtgctcccgctctcctccgccgccatcgccacctccctcgccaacgtctccgggttcagcctcctgatcggactggcaagtgcactggagacgctatgcggccaggcctacggtgcgaacagtcaccataagctcaggcctagacacctacagagcggtcgtcaccctcctggtggtctgcgtccccctctcgctcctctgggtgttcatggacccgctcctggtcctcatatgccaggaccctct

SEQ ID NO: 301489 - DNA, 167 bp, Zea mays
ctttatgtcagagcctttctcacgtgtgcttgatgtagatgccatggggagtttttactggctgttgaagcctgatgcaaaataaactatggaactaaggcattgtttgtttctctccatactccatgattatataatccagcttatagattatataagcacctaat

SEQ ID NO: 301490 - DNA, 109 bp, Zea mays
cgtaaactaagcacagacgcatgtatcgtcatcagtggatgaatcaatctatcgatggcctgtgccattcatttttgagtcgatcaacatcactccatcgatcgacaac

SEQ ID NO: 301491 - DNA, 176 bp, Zea mays
gtgggcataatgggatgagaagcatcgtcaaccatttgaaacagagccgtgattttccacgcctaagaattggcattggacgaccgcccgggaagatggatcctgccaatttcgttctccggccttttaacaagaaagagcagcaagagcttgatttgcgttgcataggggcttgg

SEQ ID NO: 301492 - DNA, 277 bp, Zea mays
gacgctttcactgaaacaatgcataaaagtgaattaagaggggattggtggtgctgcgagctctacattcccaagcaggcatacagattagactttgtattctttaatggtgacactgtctatgaaaacaacaatcacaatgattttttcctggaaatagaaagtggcatagatgaacactcatttgaggatttcttggttgaagaaaaacgaaaggaactcgagaggctagctgcagaagaagctgaaaggaaaatacaagctgaggaggagcgga

SEQ ID NO: 301493 - DNA, 263 bp, Zea mays
agctgaggaaggcggcgcatgctgggtcttggtgccagtgactttgagtttggagtagatcccagtgctgatcctgagatctcgctggcccttcgtgtctctatggaagagcagcggcagcggcaggaggaggaggcacgacgggctgctgcagcctctgcagctgacgctggaattgccttatctgggactgaaggtgaacgagactcagatgatgccctactgaagatgaccatcagccagcaggagtttggccgtgcggg

SEQ ID NO: 301494 - DNA, 183 bp, Zea mays
aggtaaattcttgatgtctacaatttgtaaatataactgcaaaggatagagatgttcaagtcttaatttagtacagacaccttggcagaagaattgcttgcttcagagtttacgaaattatcatatcagttatgtatccagaaacagctgtttataatagtcatcactcatgagtatagtatg

SEQ ID NO: 301495 - DNA, 174 bp, Zea mays
cagagattatcagtgggcggatgactttcgccctctgttgctattctctgacattcatgagatttgcctacaaggtacaaccccgaaactggcttctgtttgcgtgcatgttgtctataatccgctcagctcattccgggaggacgacttatcaacttcgagatgagtaagcgg

SEQ ID NO: 301496 - DNA, 167 bp, Zea mays
actcagctgtactctgccaatgaactgtataatcggggatggttttaccataaagaagtgcacttatggctcaccagaatttcaaatgtggaacctctagtaaaaactcacctctatgaacgtggatcttactattgctttgacccagaatcctgggacacaatacg

SEQ ID NO: 301497 - DNA, 264 bp, Zea mays
cgcatggtcaacaacatctacctcaacttcgacgccctccacggcgacaagtggcacggcggcgtccgtgacggcaccgacgtcgtgctctggaagtggtgcgagggcgacaaccagcgctggaagatccagccctactactgaaccaacggatgatatggccatcgcgcccatcgatcgtgcacatgcatgcatacgtactagcagaataacaggggtcttatctcccgaggcgtcttttgcatgcatgccagcagttgcata

SEQ ID NO: 301498 - DNA, 254 bp, Zea mays
cttcattctacaacccggccaacgaggccaccatctcgccggcggcggtgcaggccagcggcggcgacgcataccccaagtacgtgttcggcgactacatggacgtgtacgccaagcacaagttccaggccaaggagcccaggttcgaagccgtcaaggatgcagcgcccaagttctctccagcggcataaataaatggaggggaccaattattaaatgcattataatttatttgttgaataaaacagccggag

SEQ ID NO: 301499 - DNA, 279 bp, Zea mays
catttgtgcaaaaggtttgctttggaaatggtagagagaggcatcactccagatttgaggacatatactgcactaattgatagttttggacggtctggccatattactgaagccctggaaatgtttcacgagatgaaaaagttgcaccaaccttcagtttatgtctaccgtgcattgacaatcaacttgaaaaaggctggacattttgaactagcacaaaagctcaccgaggatatgaattcaagtgcttcagagttaataggcccagaagatttcaag

SEQ ID NO: 301500 - DNA, 273 bp, Zea mays
ctcgaccgagcaaatctcacgtacctcggcaactctatcgccggcgacggaatcattaaccttacaaatatgaatgacacctggagcaccggcggtgtggcctacccgccgccggtgcgcctgtgggatcaccgcaccggcaggagagcaagcttcaccaccaacttctcgttcgccatcagcggcgagcgtacctacaaccgtgcggatggcatggccttcttcatcgggtccttccgctcagccgtgccgctagactcaggcggtggtttt

SEQ ID NO: 301501 - DNA, 275 bp, Zea mays
gagcaacaagaatcattaagaaaccagaggaaattgcaggttggtactggtgcccgatccgagaagataaggacgtacaactacaaggataacagagtgacagaccatcgcttaaagatgaactttgagctgacaagcttacttttaggagacatcgaatcggctattcagtcttgtgctacgatggagcagcaggagctgttggaggaaatggccagttccgtgggcgcagtaaacgtatgattcaggcaaattcggcgttgaggccaggccat

SEQ ID NO: 301502 - DNA, 229 bp, Zea mays
gatccctggcgtggttcgcagaagaacgctgcggagggtcccggacgggcggtgctggctcgtggggcactgctgcgacgccgtcggtgccgccacaaggttcagcgagcggtggacgaccggcctggtggtcggggagcacgactgccgggactacaccaacggtaatctgtcagcactctcatagtcgtcgccattgcaaaatcgttgtgtagtgcgatacgtctca

SEQ ID NO: 301503 - DNA, 261 bp, Zea mays
gtacgatcaacgggtaccctgtgtgggggaaccccaatcaggtggagcccttcttgcaggagaatttgacgccaccgcctgcctgcccaagcatcgttaatgccaaacaaattggcctgccatcggcaaagctttaggagcgaacactgacaggctggtatctacatgttgaagatgtgtcgtcgtcgtctccaccacgcgcacatatatgtacatgcatgtggattgaggtcatgcatctgcagatcaggtagcacatat

SEQ ID NO: 301504 - DNA, 243 bp, Zea mays
ccaaaacagcactcagaaggttcaagaatggatgatggagtacaattctgtgattcctctgacagtgaggatgactgtccagtatgcctggaagaatatgattatgagaatccgaagattgcactgcaatgcaaacataatttccaccttagctgcatttacgagtggatggaaaggagccaggcttgcccggtctgtgcaaagactatgttgttcaacgaggatgaatgaccccgccgatgg

SEQ ID NO: 301505 - DNA, 263 bp, Zea mays
aaaatatcttgaatcaaaagtacatttaatatacctaacctgccaaacatcatagtttagtctcgactaccttaaatgtgctcggttgcattacattagactacaggtgggcaaaatcatctagcatcatagtgcactgtagagtattagttgtttacccttctgatcagtggctgactgggaactgaggctcactgatgctgcctagcagtgcaagagagtatcatactgcatatctctagcccaggaaaagatcaaagttc

SEQ ID NO: 301506 - DNA, 308 bp, Zea mays
  unsure (1)..(308): unsure at all n locations
naagaggagcgcactgatgttgctatatgtagagttgagcagctctgcccattcccctatgacctcatccagcgtgagttgaagagatatccaaggacactgaaaggcggatgtgcggattggcttatagagaaatgtattgaacttggagcttctagtgttacccctgtcctgacagaacaatgtcacacaatagcggaaaatcgggtggacaggctgcaacgccttgtgctggatgcagttaaacaatgtatggagtttgggtatcacctccgttcttggcctgttaaacatgtacggatttgggg

SEQ ID NO: 301507 - DNA, 287 bp, Zea mays
cgttattatccctcagatgtgcgtccttatattcgtcgggaacaacagcgccacgtacttcaacacggcgtcgctggtgacatgcgtccagaacttcccggcgagcaggggcccgatggtgggcatcctgaaggggttcctgggcctgacaagcgccatcctgacgcaagtctacgcggtgacgcgcgcgacagaccaggcctcgctcatcctgatcatcgccgtcggcccgtcgctggtcgccgttgccgtgatgctcgtcgtccggccggtcggaggccacctgc

SEQ ID NO: 301508 - DNA, 105 bp, Zea mays
gcccaacatcgtctttgtactttaccggctcctcatcttggagatgcaagcaactgggatgagacaacaaggtggatcaaaaggcggattaccaagtgaattttc

SEQ ID NO: 301509 - DNA, 284 bp, Zea mays
accggccgcaagatcatcatcgacacgtacggcggctggggagcccacggcggtggcgccttctccggcaaggaccccaccaaggtggaccgcagcggcgcctacgtggccaggcaggccgccaagagcatcgtggccagcggcctcgcccgccgctgcctcgtgcaggtgtcgtacgccatcggcgtgccggagcacctgtccgtgttcgtcaactcgtacggcaccggcacgatccccgacaaggagatcctcaagatcgtgaaggagaacttcgacttcag

SEQ ID NO: 301510 - DNA, 148 bp, Zea mays
cggatgcatccaccacgtgctcacctcgcagccgcaggccgccctacgtgacctggctcagaagcatggcccggtgatgtacctgaagctggggcaggtggacaccgtcgtcatctcctcgccgacggcgcgcaggaggcgctccggg

SEQ ID NO: 301511 - DNA, 291 bp, Zea mays
tgctacgacagggagcgctcctctcacggcggtgcagctgctgtgggtcaacatgatcatggacacgctgggagctctggctctagccacggagcctcccaacgacgacatgatgaagatgcacgcctgtcgggcgcggagagagcttcatcaccaaggtcatgtggcggaacatcgtcgggcagagcttgtaccagctggccgtgcttggagctctcatgtttggccgggaacgtctcctcaacattccatggcgcggactccaaacccgttgtcaatacgctcatattc

SEQ ID NO: 301512 - DNA, 289 bp, Zea mays
aggatgccgtgccacctgcaccccagcagtgcgctatatggccttggctacactcctgactatgtcgtctaccatgagcttgtcctgaccaccaaggagtacatgcagtgcgtcaccgcagttgatccacagtggctagcggagatggggcccatgttcttctctgtgaaggagacagacacctctcttcttgaccacaagaagaggcagaaggaagagaagacggcgatggaggaggagatggagaagctgaggcggcagcaagcagatgccgcgcgcatggagaagg

SEQ ID NO: 301513 - DNA, 134 bp, Zea mays
acacatggcagcaccccgctacgacatggaccgctttggcgtggtcttccgcgccagcacgcgccagttcgacgtcatgatcgtagccggcacactcaccaacaatatggccccagctcttcgcaaggtctacg

SEQ ID NO: 301514 - DNA, 132 bp, Zea mays
gtaacaaatatcctgcttggagaagggcgtggttttgagattgctcaaggaagacttggtcctggaaggttacatcattgcatgaggctagtaggagcagcagaacgtggcatgaatctgatggtagagagg

SEQ ID NO: 301515 - DNA, 278 bp, Zea mays
ctcgtacagagaaggaagaatatccccaaaccctagctcccgatctcgatggcgaaccctcgcgtcttcttcgacatgaccgtcggcggcgccccggcgggccggatcgtgatggagctgtacgccaacgaggtccccaagaccgcggacaacatacacgcgctgtgcacgggcgagaagggcttgggcaagtccgggaagccgctccactacaagggctccaccttccaccgcgtcatccacgagtcatgtgccatggctgcgacttcacccgcggc

SEQ ID NO: 301516 - DNA, 277 bp, Zea mays
caacttcctcctgagtcagaactttgatgagcgagtgatgccatgaagccacgccaccgaagcccccaccctacccttattccatgaaagttttataagagagagaatatatatatattcatgtttatttaagaaatggaaaaaaaaatcaaaaatcttattaaaacaagcatacagtcctacttcctgtcctcctaaagtggcccctgttcccatctcccgggccagacagctgtcgccccgtcctcctcgcgagcccagcctgctcagagaagtg

SEQ ID NO: 301517 - DNA, 121 bp, Zea mays
atcctgtcaccactctgaaggtccagacagaaggttttgacacattcttagcactgaactcctctgggatctaggatgatctgttccccctctgatgaacatcctctgatgatcaaggctc

SEQ ID NO: 301518 - DNA, 278 bp, Zea mays
ccagcctgggcaataagagcaaaactccgttaaagaaaaagaaaatttcatgcctggtgaagtactttgcacataggaggcatcttaaaaattggattcaagagcttcagaagctctcttccttggcactgcctgcagaggtggcaccatctcctacttggcatcatggctgccctcaaatcctttgtgaagcccaagatcatcaaaaagacaactaagaggtttatctggcaccatcaggccaatatgtcaaaatttagcttaactggcagaaacct

SEQ ID NO: 301519 - DNA, 168 bp, Zea mays
attattcgtggtaaaatcattttgttaattggaacatggagcgaccacccgagacaacagtgctaccataagggtggaatgcaacacacttgactgattaattagggatgctagtaagagattaccttacccgaaaggggcaagcaaaaaaaaaaaaaagaaagaaaa

SEQ ID NO: 301520 - DNA, 279 bp, Zea mays
gaaactgaaacctgatcctgactaccgacgagtgacgagccattgagctccgcgagctagtgcgtacaggtctccgcggcagaccgtcggctttagtgcctccccgcttggcaacgttttcggggacgtgccccgcgacacggctcgctccgccgtccgccgcgcgctcgacctcggcatcaacttcttcgatacctcgccgtactacggtggcacgatatcggagtcagtcctcggagattgcctccgccacgcgaccgttccgcaggacctagtcat

SEQ ID NO: 301521 - DNA, 268 bp, Zea mays
ggtggatccagactccccaagtccaagtaacccaacagatagagaatatcttcattggttggtgacagacatcccggaatcagcaaatgctagctatagtgggttcttccattctgtacttctcaatttaagtactccctatgtcccaaaataaaattcgttttaggtatttattggattcacacaatacttgatgtatgtattttatatatgtgtctagatgtacttcatctatttgaatataaacataaaagtcaagagctaaaac

SEQ ID NO: 301522 - DNA, 262 bp, Zea mays
cgcagtcgttgcccttccctgtccctctaaagcaataatggtcgcatccaggcagtcgggggctggcctaggcgatatctgggggaggcggcgacctctccaagggcttctgcaccctccagcctgtcccccagctctggtgagtcttggcggcagcagccatcataggaagggaccaaggcgaggcaggtgcctccaggtgtgcacgtggcatgtggcctgtggcctgtgtcccatgacccagccctgtgctccgtgcctc

SEQ ID NO: 301523 - DNA, 269 bp, Zea mays
caagaggttgcaggaggatcctccagccggagtcagcggggctccgaccgagaacaacatactggtgtggaacgcggtcattttcgggcctgaagggaccccgtttgaggatggcacatttaaacttacgatagaattcactgcagaatatccaaataaaccacctacagtgagatatgactctcgagatgttccatccaaatgtctatgcagctggtagtatctgactggacatacttcagaaccgatggagtccgacctctgatgtg

SEQ ID NO: 301524 - DNA, 305 bp, Zea mays
gactatacgataatattaaataacatatttatggcattttcttgaaacgtgtggttgaagaaataattctctcgtgtgtttcctggcttgggcactcaccaccactgctaaagggcagggcagcctgtgctcttccttcccaagggtgtacaggatttccaatctgccagttctgtgctcagaaaaagagagagggtcagacccttttccatcagcattcttctctgaacctttcctagagccttccgcatccagaagatgttggaacatttcttgcctgtaggccatgaagtgttctccacaga

SEQ ID NO: 301525 - DNA, 288 bp, Zea mays
agctcgaggttgtggtccggtgccgggaccggcccaagctgctgttcgacaccgtgtgcaccaacacggacatgaagtacgtggtgcaccacggcaccgtgagctcagtcccggcggcggcgcgtaccaggtgtactacatccgccacgtcgatggccacgccatccggtgcgatgtcgagcagcagcgcctcgtgcagtctctggctgccgccatcgagcgacgcaccgccgacggacttgagctggaggtgcggacgggagaccgcgcgggcctgctctcggacat

SEQ ID NO: 301526 - DNA, 285 bp, Zea mays
cttcggctcaatcttggcatttatcctgctgttgtcaccaagactggtttctgctttccggaacaccatgctttaggtggttaggtaggtaagcaaaaagggaatggtgtgataggtaattcttaaaaatttgagattaataatggaaaaactggagagagcttggtgatagtaactagagatcctttaggctttgtttgggtactctagtattgaccctaatccgtgtgttgagatagattgaggtgtaaattagtttaagttatacctcaattcagctcagta

SEQ ID NO: 301527 - DNA, 277 bp, Zea mays
attggacttgagaatggaaattacacggtcacacttcaatttgcagaggttgactttccagacatgcagtcttggagaagccgagggaggagggttttcgatatctatgtccagggagagcgcaaggagcagaactttgacattagaaaggcagctggagggaaatctttcactgctgttaagaagcagtatgttgttccagtaaccaaaaacttccttgagattcatctcttctgggctggcaagggcacttgttgcattccttataagggatact

SEQ ID NO: 301528 - DNA, 278 bp, Zea mays
ctacaaagaagaggctcaaactgaagttcattggaaaacggggataaacctcaccctgcggtggcagcaacacgatcctcctccttggcatcagaaggaagatccgcatgatagacaggataagtcaatacgacacccaggtgattcgacatgagccggaatggtcgagtgagaactgccttccccgatgctcttgacctcagaatgttctcacggtcctcctgcagcaccacagaaacgcaaccaggttcagaaccaacacctgcagagaataactg

SEQ ID NO: 301529 - DNA, 280 bp, Zea mays
caggaacaagccccccggacccgcgcgccgtccgcccagggtccctctggaccaagatgaatacgacggcggctatgatgaccgggaggaggggaggttcgctgggggcacccgggccgccgccatgcccaagccaccggccggcttcgtgctggatgaccagggcaggtgcatcgccgcagcatccaagcgcatcgtcaccatcatcgacgacaccaacaaccgccccttggagtgcataatcaggagagtattccggagctcgcaggaccacgactgc

SEQ ID NO: 301530 - DNA, 254 bp, Zea mays
gtcggataaggagaagaaggtctttgggatcgtgatccccatgcaggtcctggccatcgtggcctacatcatcatcgagtcccgcgtggaaggcgccacgactacgtgctgtggaaggagattttgttcctggtggacctcatctgctgtggtgccatcctgttccccgtagtctggtctatccgccatctccaggatgcgtctggcacagacgggaaggtggcagtgaacctggccaagctgaagctgttccg

SEQ ID NO: 301531 - DNA, 132 bp, Zea mays
gcaggacaggccgctaaagtgtgacgagcccatcctcagcaaccgatctggagaccaccgtggcaaattcaaggtggcgtccttccgtaaaaagtatgagctcagggccccggtggctggcacgtgttacca

SEQ ID NO: 301532 - DNA, 240 bp, Zea mays
acgccctcagccaattccttctccccgccttggccacgtgtagccccagctgtctgcaggcaccaggctgggatgagctgtgtgcttgcgggtgcgtgtgtgtgtacgtgtctccaggtggccgctggtctcccgctgtgttcaggaggccacatatacagcccctcccagccacacctgcccctgctctggggcctgctgagccggctgccctgggcacccggttccaggcagcacaga

SEQ ID NO: 301533 - DNA, 116 bp, Zea mays
actcttggcgggtgaaggtgtgtgtcagcttttgcgtcactcgagacctgggcgctagcttctaaaagagccgagcacgcgggtctgtcatcatgtcgcgttccgggcggtacgga

SEQ ID NO: 301534 - DNA, 116 bp, Zea mays
agcgagaaccaaccggttgcttgctgtcccagcggcgccccctcatcaccgtcgccatgtccggaggtctgcttctcggggacatggctcccaactttgaggccaatagcaccgtc

SEQ ID NO: 301535 - DNA, 277 bp, Zea mays
gcgccttcgggatgcacatgctcgcctgaagaagcggggggttccacttgctgcaaaccaggtgaactacagcctcatatatagaacccctgagttgaatggcgtgaaggcagcctgtgatgagctcggcatcaccttgattgcttattccccgatagcgcaaggtgttctgacaggtaagtacactccagaaaacccccctactggtcctcgagcaaacacatacacccctgagttcctcaccaagctccaaccacttatgaacaggattaaagag

SEQ ID NO: 301536 - DNA, 276 bp, Zea mays
caaggatcaggctgactacgaggacgtgatagagatcatctcagacggatcagtggaagacgagggcattgacgaaggcatccagcaatatgaggacatctatgaggaaggaaactatgaggcggaacgaagtgacagatgtctgggaagaaggggaagattcggacgactctgacctagacgctgtgcttcaggtcccaaacggttcggccaatccggggaagaacgggaaaaccggataagggttttccccttttggggatcacctctccgtat

SEQ ID NO: 301537 - DNA, 181 bp, Zea mays
gacgacatggtcaaggtcatctcctggtacgacaacgagtggggctaaacccaaagggtcgtcgacttcgctgacatctgggcaaccagtggaagtgaagcgttgcattgtaatagcactttgtaactcctcaccctccacagggctttgggattcaccccgaaatgactcactttcggtg

SEQ ID NO: 301538 - DNA, 190 bp, Zea mays
ccttcataccatgagaacatttctgttttggatgggcgatgacacccttgcggttcaacaaaaattgattcttggaactgtaaagattacaacccaaagtctcccaggaagctgtggggagaccagaggatcaagctgaagtgaagccagtgaagagcccacctgtggaaggacatggcggggcaaggca

SEQ ID NO: 301539 - DNA, 143 bp, Zea mays
actcccctcaacagtgagttagactcaagggtggtgacagaaccgagaagggtgtgacagtcctccatccacgtggcctctctctctctcctcaggaccctcagctctggcctttttctttaaggtcccccgagcaatcccca

SEQ ID NO: 301540 - DNA, 117 bp, Zea mays
agtcaagatccacctaacaagaaacctagagtgtagagattgccatttctatgtgtgacttttttatgtccttgcggggccccaggtcgtcgaccagcaaggcgaaaggaactggca

SEQ ID NO: 301541 - DNA, 201 bp, Zea mays
agtttgtcttgatagaattgctcaacagttattcgaacacattgggaagtcagtgacagacgatagttttaagcaatgggaagggctgctcgagctccttggttctgacattggtagtgcaagcggtcttgagttccttcacaggtaccgggatttcaagaggtctctgcaacaagctctagacagaaggtgtggtgaggc

SEQ ID NO: 301542 - DNA, 191 bp, Zea mays
caaagttctttcacatattatatgatcttcttgatgaaaaaaagtagatgctttattctgatatattcagtttcccactttaggcaaaagtggattaatagaatgatgaattcaaaggagatgaggaagatcaggcacagagaagtaaaggtagatacagacccaaattcacacaagataatgacatcacc

SEQ ID NO: 301543 - DNA, 106 bp, Zea mays
agccgagcaggacgcgccatcatgggagtggacatccgccataacaacgaccgaaaggttcggctcaaggagcccaagatccaggatatctgcctgaggctgttgg

SEQ ID NO: 301544 - DNA, 227 bp, Zea mays
agcgagtcatcgttgccacaagactgagaacaggcacacgcagtcctggacagcttgctacagccagtggacgagtcacaagatttctgcaagcggcaacagctgcgggaactggatatgctgaagtcaacactgagcgaaaacagtcctcatcctggaagcgtatcccccttcagtaacagcagcatgacgcacgcgaagccaagccagtagagggcagcttctgg

SEQ ID NO: 301545 - DNA, 263 bp, Zea mays
gcctggaggtgccactcaccatgggaatgatcaaggccgtcattctcgaccttttcggtgccggcagcgagacgtctgcaagtacactccaatgggccatgtcggagctcgtaagcaacccaagagtgatggaaagggcacaggccgaggtacgtgagaagctccaagggaagccaacggtgaccgaagatgacttggtcgacatgaggtacatgaagctcatcatcaaagagaccctaaggatgcatccggtggtgccattg

SEQ ID NO: 301546 - DNA, 262 bp, Zea mays
acagcatcttcgggccctcagcctaaagatgacgacgaaattaaaaagatggccgaagctatcatggatcaggttgtcgatcgactgctgaacgaagctgcagagatagtacttagggaagactaagtgctactgcaaaacacatttgatatatgatttgtgtaatattactgtaatcctgtatgtaatgtcattgttttatgattcaattctttacgatgcatgacactttaaacacgtaccatttttgagtcttcgacga

SEQ ID NO: 301547 - DNA, 248 bp, Zea mays
gcagtggcagctcggtacgctcagcatcaacatggactaaagcgtgtgatgataatagattttgatgttcaccatggcaatgggacgtcagattcattttatgatgatccagatatcttcttcttgtcaactcaccagcttggaagctaccctggtactggtaagatcaatgaagtcggacagggtgatggtgaaggcacgacactcaaccttcctctgcccggtggcgcaggtgactacgcaatgag

SEQ ID NO: 301548 - DNA, 275 bp, Zea mays
atcatccccattgaccacattggatttgagtttgaggtaggggtgctttgggttaggctcactcaaggggctgaccagagaaagcaatgttgccaatttccttatgagttcaaaaatgtggatgtgttaagacccaaatgcttctgaactggtacatatgaagcatttagcataatttacagtagcttaaaaagctactcctaaaatacttagaggattcccaatgctttgtctctgtgtatacaaaaaggtgatctttccagattccgtcagaa

SEQ ID NO: 301549 - DNA, 182 bp, Zea mays
tcggctcgagggacgcaattaagaacaccattgagatgcgaactgaaatgctcagttgtgcaagataaccgggagttaatttggcccatgtccacatgtggggcccagaggcttatacaaagcatatgtaacagcatgtgcaaaggccctgaggaatgtaaaggactagtcctttccaggaa

SEQ ID NO: 301550 - DNA, 160 bp, Zea mays
tgtctccagttgactctcaacagaatgcttcaagtgtttgtgaagaaaaacctatacctgctgaacgccaccgagggtcaagtcacagacaagaagctgtgcagtcaccagtgttttctcctgcccagaaacaaatccaccaaaaatcgctacctctgcc

SEQ ID NO: 301551 - DNA, 282 bp, Zea mays
tttccctcccctgtttctaacaaaggccgctgttctaactctggttcttgttcaggacacgatcaaggcaccgccaccgtcggagtccaaggtgatgcagaaggcgacgcgcctcagcgtggcgacgaccaccatcttctacatgctgtgcgggtgcatggggtacgcggcgttcggcgacaaggcgccggactacgttctcaccggcttcggcttcttcgagccgttctggctcatcgacatcgccaacgtcgccatcgtcggcaactggtcggcgcgtac

SEQ ID NO: 301552 - DNA, 144 bp, Zea mays
ctcggacataaataaatccgagaagaagaagatctgcagtctggtggatgtgaagacgctcagcacggacgcgtccatgcacgccacgcacaacgaccgcctgcctctccggttggtggttcaggtcctcttcttccagcagct

SEQ ID NO: 301553 - DNA, 127 bp, Zea mays
gtagagcaaaagagaggcaggattggggtcacagccgcttcttcagcatggaccaagtgggccttcgggattgcagggttctcgaagtggctgtaggactcgaatttacagaaagccccacaggtgc

SEQ ID NO: 301554 - DNA, 240 bp, Zea mays
ccaacacaccgccgccaccctcccccgggcatgggggtctcccctccgaccgcgttcgcgccgccacgtccctccacctcatccgccgccaacccgctccctttcatgtcgttcgatgtctcagctgccgcggcctcctcctcctctgcgccgcccctcttcgcggggcctctcggtgtcggcggttccggcgcatcctttgaggacgagccgccgctcctcgaggagctcggtatcaac

SEQ ID NO: 301555 - DNA, 234 bp, Zea mays
ggctgacagagcacaggcaagatccgaggttgagatgaagaaagagaaattgcgccagttgttgagttcagccagtagatatgctgctaacttatggtacatagaaccgaacacctacagaggaggggacagggttagattgtactatcacagaagctccagcccactactgcatgccactgcgatttggatgcatggaggttacaacaatggattgatggaatctcaatagct

SEQ ID NO: 301556 - DNA, 266 bp, Zea mays
ggacgccgtcgacctgttcgtcgagcggtaccgcgggatgggcatcgacgccgtcgccgggattgaggccaagggcttcgtgttcggcccggcgatcgcgctggctattggcgctaagttcatacctctgcgcaagccaaggaagctcccaggtgaggtgatctccgagaagtacgttctcgagtacgggactgattgcctggagatgcgtgtcggggccatcgagcgatccggcgagcgggtgctggtcatcgacgacctggttg

SEQ ID NO: 301557 - DNA, 270 bp, Zea mays
cgtagttcatcttcctgtagaaaaagtcgattctatcatatctgagtggatgggctattttactctgtttgagtctatgttagattctgtcctttatgcaaagaacaaatacttggcaaaaggaggctcggtctaccctgacatttgcactatcagccttgtagcagtgagtgatgtgaataaacatgctgatagaattgccttttgggatgatgtctatggtctcaagatgtcctgcatgaagaacgcgttattccagaagctgttgtg

SEQ ID NO: 301558 - DNA, 196 bp, Zea mays
gtctaatctatgaagttgagataggtctgcgggtgtaggtggatttgtagaggtttttcttcagttggttaggttcgctgttgcctacctcatttgcccctaatcatcatcgccgtaatttatttataataaaaaagatccagcttttcccccaaaaaaaaaaaaaaaaaaaaaaaaaaaaaaaaaaaacaacaga

SEQ ID NO: 301559 - DNA, 281 bp, Zea mays
cagaggtccttttatatgatgaacctacagctgggctcgacccgattgcatcaactgtcgtggaagaccttatacgttctgtgcatatgactggacgggatgcccttggcaagccaggaaaaatagcttcctatgttgttgtgacccatcagcatagcacaataagaagagctgttgataggttgctattttctcatgaggggaaggttgtttgggaaggaatgacacatgagttcacaacatcagctaatccaattgttcaacagtttgcatctggtagt

SEQ ID NO: 301560 - DNA, 272 bp, Zea mays
aaagagagatgtttatagacaaatataaatacaagtccttgtggctcaagtaccacagaacattgtacaaaggtaaggctcccaaggtgcaaacagaagcacaactaaaaagaagagaagcagcaatacgtttcaagaaatggattgggttgacatgagagcaagaagttcaactcaagctatatgaactgatcaggaattctttgattatctgctgtatggatggatctttacaaattctgtaaaatcgtagttgcgaagtttgttagaag

SEQ ID NO: 301561 - DNA, 243 bp, Zea mays
gacgacttgtttcattgattcttcaagcgatcgacttccctctcccccacacggtcgcggatgtcttgcagctgcggatcaagctgcggctgcggctcaagctgcaagtgcgacccgtgcaactgctgattacatcaatcgacgaccatggctatgattattgatctactagcttgtggtggtggctgaacaataatacccgatgccgcgctggctgccatccataggtcattgtgtggtgtg

SEQ ID NO: 301562 - DNA, 269 bp, Zea mays
tcgacaggctgaggagcctcggggcgcggatacaggagatggtcggcgacgttgcggcccacgccgagcgtgcgcggtgcgcgctgacgtggcgcgacccccgcgccacgggcatgtacctgctggcatgcctgttccttgcggtcaccaccctcctggcaccgttccaggcggtggcgctgctgacggggttctacgtgatgcggcacccgacgctccggcagaggctgcccgacgtgccggcgcaacttcttccggcgactgccatg

SEQ ID NO: 301563 - DNA, 258 bp, Zea mays
aggccccaactacccccagtctcggaagagaactatccagaagcgcaagactccaaagccgtcgccttcctatccatcccttcctcgccgcgggggtcgcctgagatcacataaacaatggtgaaggctgttgctgtgcttggtagcagcgagggtgtcaagggcaccatcttcttcacccaagagggagatggccctaccactgtcactggaagtgtctctggcctcaagcctggcctccatgggttccatgtgcat

SEQ ID NO: 301564 - DNA, 146 bp, Zea mays
cgctaacagagctcctccgatactacatgctctacattgaagctgctaaggatcgcttatacagacgcaccaaagccctcattgactatgagaactcaaacaaagctctggataaagcccggttaaagagcaaagacgtcaagttg

SEQ ID NO: 301565 - DNA, 99 bp, Zea mays
acgctcgagtatgcacccgagcaatgtgaatgcgtcgagtactatctgtttgctgcatctacatatagataccggatcaacaatcgcccaatgtgaatg

SEQ ID NO: 301566 - DNA, 271 bp, Zea mays
acagaaccgaccaggctggaagatattgatgtgttagaggaagaacgactgaacacagtaattcagtcagctagataccagcagaccttgaagcgctaccatgataaagccgtgcgacaccgatcctttgcagtgggagacttggtccttcgccgaattctaacgaacgagggacgacacaagctcgtcaccactatgggaaggaccattcatcgtatcagaggtcacacggccgggatcacatcgacttactcagatggacggcacagaa

SEQ ID NO: 301567 - DNA, 262 bp, Zea mays
  unsure (1)..(262): unsure at all n locations
cgcacatctcaccagagctgtggttagaacaattgctccagttcggttaaggtggcctggccggtatctcagttccaaagatctaccccgataagtagtactagtatagttgtaacctggcgtagtgctgaaatcccactgtcgtcaagacacactgcgaactccatgcaggctttgacaagacagagatcctnctgcattnctntnctattcaccctcaccaaacatgcctatgccattagttcccatttagttataagct

SEQ ID NO: 301568 - DNA, 259 bp, Zea mays
tcgctgaacgaccaaggcaacttcctgactgacgaccaaatccttccgttgttgctgggtatctgcagaggccttgaggccattcatgccaaaggttatgcacacatggtcctgaagcccaccaatattttgcttggtgacgaggggcagccggttttaatggacttgggttctatgcatcaagcatgattcccagtggagggatctcgccatgccctagctctacaggactgggcagcccagcggtgcaccatctcct

SEQ ID NO: 301569 - DNA, 269 bp, Zea mays
agaacttccagtacctgcgggagctgccctacggcatcggcctcctcgtctcgctccgggagctggacgtcagctacaactccatcgccgcgctcccggactccatgggctgcctcaccaagctcgccaggttcagcgccgcgggcaacccgctggtgtgcccgcccatggacgtcgtcgagcagagcctcgacgccatgcgcgcctacctcagcgcgcggatgaacggcaccgccaaggccaagaagaagagctgggtgcccaagctg

SEQ ID NO: 301570 - DNA, 176 bp, Zea mays
tgctgcaacatgattcaggaaggcatggttgagcagggatttaaaacagctgaaggggtctatcatgctgcctggtcaccaggaggacttggatactcattccaaacccctgaagcctggaacaacgacgacgagtacaggtccctgtgctacatgcgcccgctcgccatatgggc

SEQ ID NO: 301571 - DNA, 230 bp, Zea mays
tcctgaataacaagcaacagctcatgagagctcgagaagctgcaatttgggagctcgaagaacgacacttaacagagcaaacacgagttgctcacacagcagcttaaagatcagtatttcatgcaaagacatcagctacttaagcgccacgagaaggaaacagagcaaatgcagcgttacaatcaaagacttattgaggaattgaaaaacagacagactcaagacagagc

SEQ ID NO: 301572 - DNA, 253 bp, Zea mays
tatgtgcgccgcgccgaggagggagatcgaacggcgcaacgctgacactgtgccgccgcaaccggtgcggcgctggcgtgctgccgtacgagctcatggcgcccacatcggggccgggcatcacctgccgcggcgtccccaacagcgttaccatttagcctctcagtatggagcgacagccatgggcgcatgacagagatgatctgaaaggagattttttttccactcgttatagtctggtggggagacatct

SEQ ID NO: 301573 - DNA, 281 bp, Zea mays
aagaactacaaggacctgtcgactgcgcttgagaagatgttcagtggcttcagtactggcaaggatggcttatctgagtaccgcaaggatggtgaatatgttctgacttacgaggacaaggatggagattggatgcttgttggcgatgtaccatgggagatgttcgctgactcttgccgcaggctcaggatcatgaaaggatcagatgcaattggacttgaaaggagacataattcatggtccctgcatctgtggtggtagctctcttggctccaagggca

SEQ ID NO: 301574 - DNA, 268 bp, Zea mays
ggacttgagtgccagcaagccagaatggaggcacatcaacgtgagcgagtcctcctggtcgctggggccatactctgtcatgcctgaatggatcacggctgattctgtttggtggctgtggggggcagggtctgcttaatgacgtcttcattttggatcttgatgcacagcatccaacttggcgtgagattcctggccttgcaccccctgtaccacggtcatggcataggtcctgcactgttgatggaaccaagctggtggtttctgg

SEQ ID NO: 301575 - DNA, 269 bp, Zea mays
ggtgatgaatggctttcaaaaccgtaagcccatgaaggggaaagtgttccaggaacctctggttcatgaggtccccagatctgtggattggagagagaaaggctacgtgactcctgtgaagaatcagggtcagtgtggttcttgttgggcttttagtgctactggtgctcttgaaggacagatgctctagaaaactgggaggcttatctcactgagtgagcagaatctggtagactgctctgggcctcaaggcaatgaaggctgcaatg

SEQ ID NO: 301576 - DNA, 267 bp, Zea mays
acaggaagagctcgtcctccgttcatggaaagccatgaagagcgactctgagtcgactgctcttaagttcttcctcaggatctttgagatcgcgccgggtgccaagcagatgttctccttcctgcgcgacgccggcgacgcgccgctggagaaacaccccaagctcaaggcccacgccgtcaccgtcttcgttatggtcagccacctcgatctatctctgtactgtacgcatgtttctatcctcatctagctacctgctgctttgct

SEQ ID NO: 301577 - DNA, 270 bp, Zea mays
attctgcacatgtatcccagaacttaaagtataataataaaaaaaaaagcagcagctaatagaccacaccagccatgagaggaacccctgcctcctaaactcctcgagtgccaagcaccaggccagggctcttgtgtgtatccctccagtcaatgaacacacaattgccccctgaaaaccgcccctttgctctgcaaatattgacacgggaggtaacgggtagatcataactatttataagaaccatctgtgtttctaaacagtcattta

SEQ ID NO: 301578 - DNA, 264 bp, Zea mays
cagctttggtacgctgatgaccgcgacacttgactggaaaggcatacctgcatacgtgatcagtttggcgcggggcttcagcgccattgttgggatcggagcgaccctgctgtacccgctcgtgcactcccgggttaccacgctccggacggggctgtggtccatctggatgcagtggtgctgcctgctgctgtgcgtggcctccgtctgggcggccaccggcgtggcgtccgcctggatgctcatggccggcgtggcgacctc

SEQ ID NO: 301579 - DNA, 161 bp, Zea mays
ccgcgctcaggacgttccgggtccgcgccgagaagaagctcccgggcatcgtcgactacttcggctggtgcacctgggacgccttttaccaggacgtcacccaggagggcgtcgaggccgggctccgcagcctcatcgccggcggcgcgccgcccaatttt

SEQ ID NO: 301580 - DNA, 264 bp, Zea mays
aattgggctggaagggctacaaccttcaaagcaacagcagacatacttgctcctggcaatctcatatgggctgcatgggcgcctaatggaacagatgaatcaaactatgctggtgaaggatttgcaatggtttctggaactagcatggccacaccgcatttcgctggcattgcagcactaataaagcagaagaacccagagtggagcccctcagcaataaaatctgccatgatgacaacaaccaatacactggacaaagggagt

SEQ ID NO: 301581 - DNA, 211 bp, Zea mays
acgccgcttttgcatcaggcttctgcctgagctcggttagggcctcaccgaagtgcttccacccctcagggaggcatcagtgattcggccacagcctcagcctccgtcgctctgtgacctgcgggtattggatgattcgtagctaagactctacgacatccctgaagccgggaaatggtgtgtgttctcattgtacccaagatctttggcc

SEQ ID NO: 301582 - DNA, 273 bp, Zea mays
gttgaagctctttgaatccagggacttgaagaaagactaggtgtgtcccatccaagttgagcacgcgccttccccagcttgcagcagcacaccccaagcgctgtttttcacctgtacctttgttttattattattattattattgctgttgttgtcatcgttaactgtgggcatggaatgcgtgaggctggcttctaaatagtccacaccactctctgctgtgttgacttcctgttgtcttcatcaaagcttttttccgtggtattctaaaat

SEQ ID NO: 301583 - DNA, 290 bp, Zea mays
tagctccgcctcttcgccgctgcccgtttcttcgaaccactccgaagctgccccgccatggacagctccgccactgacggtcgcgatgctatcgccgccaagggccggtgagtcgcctctgcgtcaggtgctgcgagaggaaggccgcgcttaagcggcccaaaaccctataacagaattctctgtttaaagctggtgatcgtgtggcaatcggagcttctggtggtaaagattcaaccgtgcttgcatatgtgttatcggagttaaaccgtcagcacaactatggtctt

SEQ ID NO: 301584 - DNA, 178 bp, Zea mays
  unsure (1)..(178): unsure at all n locations
ggtgatggtctcccaccggcgacgtctacgcntggaacactgggattctgatctgggccgtcaccctcgtgggatcctcggcggcggcgccatcctcgtctacaacaccagcgccctctccggctaaggatatccaatgcatgcgcttcatgcgattcgtcatgtaaaatcagggtgt

SEQ ID NO: 301585 - DNA, 189 bp, Zea mays
aggcggtggaaaagttctgcgtgcatggcatcgggacaaagcttcagcggtacccaagaaatcttttcatgcctagatacagttataacaaatgctgttgtgattgattataccggaatatacaaggctgatatcggtataaaaggtggacttatagttgctattggaaaggctggaaaccctgatgtc

SEQ ID NO: 301586 - DNA, 175 bp, Zea mays
cttccatcatctcccacttcaatctggcatcccacgcgttgtcccctgcacttctggaaggcacagagtgtgtatgcctcctggtctttgcctttgctgggccttctgtgcaggacgatcagcctcagggctcagaaggtgccagtccggtcacaggtcgcttgtcccttccaca

SEQ ID NO: 301587 - DNA, 183 bp, Zea mays
aggagcgtcgcggtatgggatccgcaaggggtcttcgtacgccgtcgcggcatctgtctcgggctcgcctccgtagcagccgtcgcaggggaggtcttcttccaggagaagttcgaagatggctgggaaagtaggtgggtcaagtctgagtggaagaaggatgagaacatggctggtgaatgg

SEQ ID NO: 301588 - DNA, 182 bp, Zea mays
ctctgaactaaacatcacacactgagaatctcttcataatctaggcacagataatctttaacactaaactactgtgaaattctacagcattaagtactgtatatcgccctgtacttggataggctggctaactcgtaggaagagagcactgtatggtatccttttgctttattcaccagcat

SEQ ID NO: 301589 - DNA, 173 bp, Zea mays
ctgccttggagatgtaggtcatggtgccacctacgtgcatgagtttctgccacacagcctctgtgccatgcagtgtggctgtgggttctggctgctcgaatacttcagtatctagcctgtactggttgattgtgcatggaactgacatgttaacacctgatcactcccccatg

SEQ ID NO: 301590 - DNA, 176 bp, Zea mays
agcgaagagagttgttgtggtatcttcagtggcggctgtgttcaataatcctgactggcctaagggcgaggcctttactgaggatagctggtcagatggggaatattgcagaaaaaatgaggaatggtatttcctttctaaaacattggcagaacatgaggcttttgcttatgcag

SEQ ID NO: 301591 - DNA, 272 bp, Zea mays
tagcgtttgacaaacagatatatcattggtcagattgcgtatgcccgtatagagggggatatgatagtctgcgagctatgcacacgaactgccaaaatatggtgtgaaggttggcctgacaaattatgctgcagcatattgtactggcctgctgctggcccgcaggcttctcaataggtttggcatggacaagatctatgaaggccaagtggaggtgactggtgatgaatacgatgtgggaagcattgctggtcatccaagtgccttcacct

SEQ ID NO: 301592 - DNA, 267 bp, Zea mays
tcgttgatgggactcgcttctcttcatctcctcatgatcaacttgggaaaagcgactggaacctcaagagtttttcatggcgccccaattctcgtctaatacttcttcagacgccaattccagaagtgacatatccaatgctttatattgggatgctcttcagcatgtttgcgtggcacgtggagtatcattggatgtacagcatcaattaccatcactgtggggcctttaaaacatggtatgtgataccaggcgatgcggctcctg

SEQ ID NO: 301593 - DNA, 260 bp, Zea mays
accctgctgcttacttgcaggcacaacagctactaccattcaaccaacttgtcaggagccctgctgccttcttactgcagcaacagttgcttccattccatctacaagttgtggcaaacattgctgctttcttgcaacaacaacaacaattgctgccattttacccacaggttgtgggaaacattaacgccttcttgcaacagcaacagttgctaccattctacccacaggatgtggcaaacaatgtcgccttcttacaa

SEQ ID NO: 301594 - DNA, 244 bp, Zea mays
ttctcaggtagtcgtcatcttcgcttcatgccagacccatttgctttgctctctcaactctcaaatgagatggtggtgagactacatcgcttcgaaatggctgtgctgagtgctgacttcgtcttgttggtccctgtccagatattttccgtgatccgcttagtgcgccgcacagcattggccgcctgctgaaccttgtggacgacttggcggtggcggcgccaggtcgtgcggtgcgcgtggc

SEQ ID NO: 301595 - DNA, 244 bp, Zea mays
caagatgcttgcattgttcgctctcctagctctttgtgcaagcgccactagtgcgacccatattccagggcacttgccaccagtcatgccattgggtaccatgaacccatgcatgcagtactgcatgatgcaacaggggcttgccagcttgatggcgtgtccgtccctgatgctgcagcaactgttggccttaccgcttcagacgatgccagtgatgatgccacagatgatgacgcctaacatg

SEQ ID NO: 301596 - DNA, 244 bp, Zea mays
cccaggcaaggtgcgcgccgtggtcaagttcaacgcggcgctggcgcaccacatcatggccggcgccgacgtgctcgccgtcaccagccgcttcgagccctgcggcctcatccagctgcaggggatgcgatacggaacgccctgcgcctcagcgtcgactgtaacgtcgtggagccggcggacgtcaagaaggtggccaccacattgcagcgcgccatcaaggtggtcggcacgccggcgtacg

SEQ ID NO: 301597 - DNA, 234 bp, Zea mays
ctctcctgcttatttacagcacaacaactacaacaacttgtgctagcaaaccttgctgcctactctcagcaacaacagtgtcttccattcaaccaagtagctgcattgaactctgcttcttatttgctacaacaagaactaccattcatccagctatctgctgccgtatccgagcaatttcttccagtcgagcaactgacagctttgaaatctcctgctgtattacagcagcag

SEQ ID NO: 301598 - DNA, 252 bp, Zea mays
agaactcgacaccatgaaggtgctgatcgttgcccttgctctcctggagctcgctgcgattccgcctccagtacaagcggcggcagtggctgccagatatcaccgtttcatctaccgcctccgttctatatgccgcctccgttctagtctgccgccgcagcagcagccgcagccatggcaatactccactcaaccaccgcagctaagcccgtgccagcagttcggatcctgcggcgtcggcagcgtcggcag

SEQ ID NO: 301599 - DNA, 204 bp, Zea mays
actagttctagatcgcgagctgccgccctttttttttttttttcaattgttcattcaggtcattgctcacactatcactgccacccatgttcttacagcaaccctttgttggtgctgcattctagatagaaatatttgtgttgtatcgaataatgagttgacatgccatcgcgtgtgactcattattaacaataaaacaagttt

SEQ ID NO: 301600 - DNA, 259 bp, Zea mays
atatggacctgaggagctcaggagcatgaaacgaatgacggttgaattggagaaactacgcctgttgtgtgagagaataattaagagagagaaggtgaagagagagacggttatgtgtgatcatgatatacttgccaaaacaaaggacactgttattttctccaacaaccgtcagccctattacagcagttacctttggtgcatttgttggcacaaaacatcaaggcacaacaactacaacaacttgtgctaggaaacc

SEQ ID NO: 301601 - DNA, 165 bp, Zea mays
ccaccggcatccgagaaggcagccgccgccgagcccgtcaaggacgagctgtgagcatccaaggtgtggacggctgtggctgcgtaacactgggaggaaaacctggcgctaacgtgcctccaacgcctagtttttgcgggaccagagggagagagagagagggac

SEQ ID NO: 301602 - DNA, 261 bp, Zea mays
acaacaacagctacaacagtttctgccaacgctcagtcaactagccatggtgaaccctgccgcctacgtacaacaacaacaactgctttcatctagcccgctcgctgtgggcaatgcacctacatacctgcaacaacaattgttgcaacagattgtaccagctctgactcaactagctgtggcaaaccctgttgcctacttgcaacagctgcttccattcaaccaactgactctgtcgaactctgctgcgtacctacaaca

SEQ ID NO: 301603 - DNA, 240 bp, Zea mays
agcgacgccctactgctcgcctcagtgccagtcgttgcggcacagtgttgccagcagctcaggcaggtggagccgcagcaccggtaccaggcgatcttcggcttggtcctccagtccatcctgcagcagcagccgcaaagcggccaggtcgcggggctgttggcggcgcagatagcgcacaactgacggcgatgtgcggcctgcagcagccgactccatgcccctacgctgctgccggcg

SEQ ID NO: 301604 - DNA, 233 bp, Zea mays
acatttaaacccataactactaatttagcttagccgaggtacaaaggctaggaagtttacttccaatgagcactcaatgttccatggactgccatgtaacttctgatctaactaggtgagtacccgtgcgttgcaacgggaacatataataacataataacttatatataaaatgtgtcttatattgttataaaaaaatatttcataatccatttgtaatcctagccatacat

SEQ ID NO: 301605 - DNA, 236 bp, Zea mays
agcttgctgcgattgcttgttggagcctatagggctgaagagctgggttttcacatactgaagctatcattgatggaaggtatgatggaagaagggaagctataggagcttgtgagcaacatacctttatcacccttgttgtttcaacaatcgccagccctatctttggtgcagtcattggtacaaaccatcagggcacagcagctgcagcaactcgtgctacctgtgatcaacca

SEQ ID NO: 301606 - DNA, 206 bp, Zea mays
atgtctatgaattgtgttagttgtattaccagtgtgtagtgaacaaaaagggagccagcttatgaggtgttgagatttctgaccaagaggtcgatttgggatttatggtagtctttcaatgaacctcttctagttcggtacttcttgcccagggaattttacaataaatcatcaagcaaattgttctacgacgttctgcagaaaaa

SEQ ID NO: 301607 - DNA, 241 bp, Zea mays
aggaaaacggtggccgggagatggctcaagaaattatacggagaagcgagaatggtatacatgacgctagaaaagtagcagaggccgctgagaaaagtgtggatctcgaagggcgaataggtattaactagtaatttttggctttttgttgtaaccttttgattttgaacttgtttacactttgtaacatggtcgcaccttctcctccctcagagcctgccgagccatcgacagaccccca

SEQ ID NO: 301608 - DNA, 242 bp, Zea mays
atttcaccttaaagattatataatcttgattataatctgaattatataatctagattataatttatcgtatgcaactgtttggtagtgtagattatacaagtatataagggtggtatggatcgtgatctaaatatttctttacaatttgttgtatataagggtggtatggatcgtgatctaaatatttctttacaatttgttaggtctctatatttattttattttaaaaataaatataaat

SEQ ID NO: 301609 - DNA, 233 bp, Zea mays
gtgatctcgttttttgcaagggattataccggaatatgtggttgcatttttttacgcaatatggcacgctctcgctagatgcttgtcagttctctcctgataagtcaagtctacgtctacccaggatgagaaaatatccaaagttggttcagcgattgcattggcgcctcgggcttgctcgtcgtagtcggatcgcaagggtcatcttccgccaaatcgaaattatctctact

SEQ ID NO: 301610 - DNA, 118 bp, Zea mays
ccgcaccgggcgcagacgtgcgtgtgcgacatcaagttgttgttctcggtgcagcgtccctgcgcgcggacgtccattcggccctaaggacccatcgagcgaccgagcttgtcctctg

SEQ ID NO: 301611 - DNA, 246 bp, Zea mays
cctgcgcggggctgcagggcttgtacggcgctggcgcggcctgacgacgatgatgggcgccggcgggctgtacccctacgcggagtacctgaggcagccgcagtgcagcccgctggcggcggcgccctactacgccgggtgtgggcagacgagcgccatgtaccagccgctccggcagcccagggtctcaaccccatggccatgatgatggcgcagaacatgccggccatgggtggactctaccag

SEQ ID NO: 301612 - DNA, 220 bp, Zea mays
gggaaacattaacgccttcttgcaacagcaacagttgctaccattctacccacaggatgtggcaaacaatgtcgccttcttacaacaacaacaattgctgccatttaaccaacttgctttgacgaatcctaccaccttattgcagcagcccaccattggtggtgccatcttctagatttttttatgctttatactgtaataataaagttctcatactgat

SEQ ID NO: 301613 - DNA, 240 bp, Zea mays
ctatgattggagatattctatgtgacctttgcaggatgttggagctcagaaatgtcaatctagatcaagtcaagctgacttgatggtttatgagtccaacataaatctcaatcatgccaaatactaaagaagtgaaaatcaaagagaaggtatgtttcgagacttagtacattggtttttgtgtactaatatatttgtctaagtattagaaacagagaaaagaagaaaagagatacaaaa

SEQ ID NO: 301614 - DNA, 237 bp, Zea mays
attataagcgcaaggaaatacaaggaaataagagtacagagatgccaactggtaggctgagcggcaacatcacccaggactgggagccggtggttctgcgccgtacgaagccgaaggggtccgacctcaagtcgtcgaaggcggtgaaccaggcgctgcggtcgggcgcggccgtggagacggtgcgcaagtcagcggcgggcatgaacaagcactccacgacggtggcgcccgcgc

SEQ ID NO: 301615 - DNA, 275 bp, Zea mays
gcgcggacaacacgggcgccaagaacctctacatcatctccgtcaagggcatcaagggccgcctcaaccgcctcccgtccgcctgcgttggcgacatggtcatggccaccgtcaagaaggggaagcccgacctcaggaagaaggtgatgcccgccgtcatcgtccgccagcgcaagccgtggcgccgcaaggacggtgtctacatgtacttcgaagataatgctggagtgattgtgaatcccaagggtgagatgaaaggttccgctatcactgga

SEQ ID NO: 301616 - DNA, 262 bp, Zea mays
gtcaaacggatattatgaaaagattgcagatggggttagatgtttctaccttggagatctttggaattcattctatgagtggagcgcctgtggcgttggtacttcagtgtgcatcgctccgggtgagacagtggttcaatacttcgtgccatatctttcagcaattcagttgtacaccaacacgagaaatgctcctgtttcacaaagcatgatttatgatggaagattcgatcggaataaccattatagtgtcgggatgtac

SEQ ID NO: 301617 - DNA, 257 bp, Zea mays
cctgaagccgaagcctccgggcctgtgggagctgaccaacctggcggcccaggtcggcctcgacgccgggctcgtgtacctgtgcggctggaggtcgctggcctaccttgtcctctccacgttcgtcggcggcggcatgcaccccatggcgggccacttcatctcggagcactacgtgttcagccccgagcaggagacctactcgtactacgggcccctgaacctggtggcgtggcacgtggggtaccacaacgagc

SEQ ID NO: 301618 - DNA, 275 bp, Zea mays
cattcagccagctagctactgcctactctcagcagcaacaatttcttccatttaaccaattggccgcactgaacccctctgcttatttccagcagcaaatactactaccatttggccagctagctacaacaagccccacttcctttttgaaacaacaacaattgcttccgttctaccagcagtttgtggctaaccccgcaaccctcttacaactgcaacagttgctgccctttgtccaacttgctttgacaaacccagcagccttctaccaacaa

SEQ ID NO: 301619 - DNA, 254 bp, Zea mays
ccgtccttctggcgctgcagtaccgcggccgggagatcttcggcatcagcgagaaggccaacggcaccatgatcttcaacgccttcgtgctctgccaggtgttcaacgagttcaacgcgcgggagatcgagcgcaggaacgtcttcgccggcgtgctccggaacaagatgttcctgggcatcatcgccgtgacgatcgccatgcaggtgctgatggtggagctgctcacgaggtttgctggcacccagaggctt

SEQ ID NO: 301620 - DNA, 251 bp, Zea mays
caacaactgctttcatctagcccgctcgctgtgggcaatgcacctacatacctgcaacaacaattgttgcaacagattgtaccagctctgactcaactagctgtggcaaaccctgttgcctacttgcaacagctgcttccattcaaccaactgactctgtcgaactctgctgcgtacctacaacagcgacaacagttacttaatccattggtagtggctaacccattggtcgccgccttcctacagcagca

SEQ ID NO: 301621 - DNA, 197 bp, Zea mays
actagttctagatcgcgagcagccgccctttttttttttttttttatgaccatgcatatattattggtcataccacacatgataatgtgtgtcgtcttactgcattattacatatatagatagagagaaatggatgtctggagatctgaattattcgtatttgctgaaaccgttaatatggatatccgtatccttat

SEQ ID NO: 301622 - DNA, 261 bp, Zea mays
cgtcgagttcctgaggcatcagtgcagcccgacggcgacgccctactgctcgcctcagtgccagtcgttgcggcagcagtgttgccagcagctcaggcaggtggagccgcagcaccggtaccaggcgatcttcggcttggtcctccagtccatcctgcagcagcagccgcaaagcggccaggtcgcggggctgttggcggcgcagatagcgcacaactgacggcgatgtgcggcctgcagcagccgactccatgcccctac

SEQ ID NO: 301623 - DNA, 256 bp, Zea mays
gatacgacatggcctacatgtttgcatacagcatgagagagaagacccacgctcaccggaactacgaggacgatgtacccgaaggtgtgaaacagaggcggctcatggaactgatcaacactttccgcgagaccacgaagaagaactacgactctcaagtcggcacagtgcagctcgttctcgtggaggggcccaacaagcgtgctcccaaaacggaagtgatagggaagactgatcggggccacaaggtgtcgtt

SEQ ID NO: 301624 - DNA, 245 bp, Zea mays
ctcagaactttgattgaaactttgcatacatagctcatttatatatatttgatcatatctcttttaagtctatgactaatgtgttttcaagtttattaatatgctaagtcgtagattgaaagggaaatggagtcttcggtgaagacaaggcttccactccactctatcggtattatttacccttcgccgtcactccgcaccattctccactatgaccgatggtataaagaaaataacaagtatcc

SEQ ID NO: 301625 - DNA, 262 bp, Zea mays
ggcagcaccccgatcctgggccagtgcgtcgagtttctgaggcatcagtgcagcccgacggcgacgccctactgctcgcctcagtgccagtcgttgcggcacagtgttgccagcagctcaggcaggtggagccgcagcaccggtaccaggcgatcttcggcttggtcctccagtccatcctgcagcagcagccgcaaagcggccaggtcgcggggctgttggcggcgcagatagcgcacaactgacggcgatgtgcggcctg

SEQ ID NO: 301626 - DNA, 243 bp, Zea mays
ctgccgccgcagcagcagccgcagccatggcaataccccactgcaaccaccgcagctaagcccgtgccagcagttcggatcctgtggtgtcggcagtgtcggcagtccgttcctgggtcagtgcgtcgagttcctgaggcaccagtgcagtccggcggtgacgccctacggctcgccacagtgccaggcgctgtagcagcagtgctgccaccagatcaggcaggtggagccgctgcaccggta

SEQ ID NO: 301627 - DNA, 257 bp, Zea mays
gaagtcataagatcaaatttgtgttcccttgacaatttattacacatggcataacaactataaggaaaaccttatcgcaggtggaagcggaaggccaggttctcccagatggaactcttcttgtaggtggccagaaagttgctgtagtgtattttagagctggctatgcaccacatgattacccttcagaagcagaatggagtgcaagacttatgatggaacaatcatctgctgtgaagtgccttcaatatcatatc

SEQ ID NO: 301628 - DNA, 240 bp, Zea mays
atccaggacaaagagggcatccccccagaccagcagcgtctgatcttcgctggcaagcagctggaggatggccgcaccctagcagactacaacatccagaaggagagcactctccacctggtgctccgcctccgtggtggtcagtaagccatggttcatttaagctgctgctgtacctgggtatctgcgtcgtctggtgccctctggtgtacctctatatggatgtcgtcgtctaataaa

SEQ ID NO: 301629 - DNA, 271 bp, Zea mays
cgcaacaacaacaacaacaacagtttctgccatcactgagccacctagccgtggtgaaccctgtcacctacttgcaacagcagctgcttgtcatccaacccacttgctctggcgaacgtagctgcataccagcaactacaacagctgcaacagtttatgccagtgctcagtcagctagccatggcgaaccctgccgtctatctacaactactttcatctatcccgctcgcggtgggcaatgcacctacgtacctacgacaacagttgctgc

SEQ ID NO: 301630 - DNA, 260 bp, Zea mays
gttaccgctctcttggttttcgttttggtgatgtatgctatataagtgatgtcagtgatatacccgaagaaacatacaagcttctggaaaactgtgaacttcttataatggatgctctaagacctgatcgttcttcatcaacacacttcggactaccaagggctcttgaggaagttaggaaaatcaaaccaacgaaaacactgtttactggaatgatgcatttgatggaccatgagaaagtaaacagtgatcttgccagg

SEQ ID NO: 301631 - DNA, 258 bp, Zea mays
attaatcttaatatcgaggagttcacacaaaacttgaaggactatatgcaagcaaacaatgttgagattgaatatgctgacatgtcaaaggcattggttgccatcacgcctgatgctgcttccattccaactccaaagctcaagaatgtcaatcgtctgaggacagaacaccaagtttatgaactgccagattcacaccctcttctggaaggagtgaaactgcacaatcgatcgatgcccccaagacattctgtgatt

SEQ ID NO: 301632 - DNA, 268 bp, Zea mays
atctactatactatactctaggaagcaaggacaccaccgccatggcagccaagatgcttgcattgttcgctctcctagctctttgtgcaagcgccactagtgcgacccatattccagggcacttgccaccagtcatgccattgggtaccatgaacccatgcatgcagtactgcatgatgcaacaggggcttgccagcttgatggcgtgtccgtccctgatgctgcagcaactgttgggcttaccgcttcagacgatgccagtgatgat

SEQ ID NO: 301633 - DNA, 245 bp, Zea mays
ccagatttgagaactcgacaccatgtaggtgcttatcgttgcccttgctctccttgcgctcgctgcgagcgtcgcctccagtacaagcggcggctgtggctgctagacaccaccgtttcatctacctcctccgttctatatgtcgtctccgttctatctgtcgcttagcagcagtcgacgctatggcaataccccactcgatcaccgcatctatgcccgtgccagtagttctgatcctgctgcgt

SEQ ID NO: 301634 - DNA, 255 bp, Zea mays
atggaagaaggtttttccaacgcaaaccatataccgctacaagggtacacatgcattggaattataggtatcaaagatcctgtccgcccagtggtgaaggagtctgttgctacttgccgggctgctggaattatggtgagaatggtcacaggcgataacatatatacagcgaaggcaattgctcgtgaatgtggtatccttactgaagatggcatagctattgaaggaccagagttcagatagacaagcctagct

SEQ ID NO: 301635 - DNA, 249 bp, Zea mays
ccgagcgccatgttccagccgctccggcaacagtgctggaacatggcgctcggctgcccacacccggcgtagtagggcgccgccgccagcgggctgcactgcggctgcctcaacaactcagcgtaggggcagccgagcgccatgttccagccgctccggcaacagtgctgccagcagcagctgatgatgatgcacctgcagcccgtcgcgcacagctgcagatgatgatgcagcttgaacgtgccgctg

SEQ ID NO: 301636 - DNA, 255 bp, Zea mays
ccgccctccacacaacgaaaacacaaacgcacacaagcacacgacgcaagggtgacgactgacgagagggggagagagagaggcgaggaaggagggagagagcacgggggcttgatcgaagatggatgccggagcaaaggtggtgaagaaggccgcggcggggcgtcgcggcgggggcggccccaagaagaagccggtctctcgctccgtgaaggccggcctccagttccccgtaagccgtatcggccgctacct

SEQ ID NO: 301637 - DNA, 155 bp, Zea mays
agaagggtgttcccttcgtctggtccggcgattgtgagatcagttatcagtcattgaagagcaagttggtggacgcccctatcctagctttgcctgagagcggtaagcgtttcacagtttatacggatgcttcgcgtattggtcttggctgtgtg

SEQ ID NO: 301638 - DNA, 244 bp, Zea mays
aataaattttggttcaaaaatgaatagaattagagtccgatccttaaattttatagtgtaaaatttagagcccattgtcacctctaccaggaccagaagaaaggaatttaaactgttgctttctcattcttcttgtaattggttggttgagtggtctttagtttacaaacaatgaactttatatttggaaaaggtgtaactgatgttcagttacgtttctatatctagaaagtttcctactata

SEQ ID NO: 301639 - DNA, 258 bp, Zea mays
catgtggcaaacattgtcgccttcttacaacaacagcaattgctgccatttagccaactcgctttgacgaatcctaccaccttattgcatcagcccaccattggtggtgggaaacattaacgccttcttgcaacaacaacaattgctgccattctacccacaggatgtggcaaacattgtcgccttcttacaacaacagcaattgctgccatttagccaactcgctttgacgaatcctaccaccttattgcatcagcc

SEQ ID NO: 301640 - DNA, 243 bp, Zea mays
caaaattaggagaactcattctaggaagtctcactctggccctaaccatgcttttatgtataagggtgagacatctagctctaggcaatcaacccgtgctaaggtgcctagaaagaaaactcctattgcatcaaatgatcatagcatttcatttaaaacttttgatgcatcttatgttttgactaacaaatccggcaaggtagttgccaagtttgttgggggcaaacacaagggctctaagac

SEQ ID NO: 301641 - DNA, 238 bp, Zea mays
caaagaatcgcggcacaacaactacaacaacagttgctaccaacaatcaatcaagtagttgcagcgaaccttgctgcttacctccagcaacaacagtttcttccattcaatcaactagctggggtgaaccctgctatctacttgcaggcacaacagctactaccatttaaccaacttgtcgggagcccttatgccttcttactgcaacaacagcttctgccattccatctgcaagctg

SEQ ID NO: 301642 - DNA, 179 bp, Zea mays
gacaagacctaccctgctgggttcatggatgtcatttccatccctaagacaaacgagaactacaagctgcttccgtcttcacccaatcagttcaagctctgcaaggtgaggtctgttcagtttggccagaaaggcatcccctacctaaacacctatgacgaccgcaccatccgctaccc

SEQ ID NO: 301643 - DNA, 247 bp, Zea mays
atgcgattgagtaatcggaaaacctcatcggagaagaaactcctcgagcgaagatcttatctaaaagtagcgacggtgagcgccgaagctgctaccaagcggaggatgaaaagactatctagcccttagcgatttatgtcacattaatgagcaagtgttgaaggtcataaatgtaattttatctaggcttcgtcccgtgcctataaatagatgaacagtagcaccgtactgttcacgctgaattgta

SEQ ID NO: 301644 - DNA, 245 bp, Zea mays
aagatgcttgcattgttcgctctcctagctctttgtgcaagcgccactagtgcgacccatattccagggcacttgccaccagtcatgccattgggtaccatgaacccatgcatgcagtactgcatgatgcaacaggggcttgccagcttgatggcgtgtccgtccctgatgctgcagcaactgttggccttaccgcttcagacgatgccagtgatgatgccacagatgatgacgcctaacatgat

SEQ ID NO: 301645 - DNA, 254 bp, Zea mays
ggctgagcggaattactgcagagggccaaggtgtgaaggttgaatcctcagcagttccttcagccccaactccagatgttgctgaagcacaggccccagttgctgaggaggacgacgacgatgatgttgacctttttggtgaggagaccgaagatgagaagaaggctgctgaagagcgtgctgcagctgccaaggcttctggcaagaagaaagaatctgggaagtcatcagttttacttgatgtgaagccatgg

SEQ ID NO: 301646 - DNA, 249 bp, Zea mays
ccgtggacggcatcgtcgtgaacagcttcgaggagctggagcacggctcggtttcgcgcctcgcggcggccacgggcaaggccgtgctctccgtcggccccgtctcgctgtgcggcgccgccgcacctcctagcctcctcgactcgcgggccaactcggacgatgccaggctgtgcatggcgtggctggacgccaagagagccgactccgttctctacgtcagcttcggcagcgccgggcgcatgcctc

SEQ ID NO: 301647 - DNA, 250 bp, Zea mays
tacaacaggaacctcgcggcgcggatggctaagaacccgggcacgccggtgaggccgggcgcgaagatgccggtgttcgtgttctctctatacaacgaggacctcaagccagggccgggcaccgagcgacactggggactgtactacgccaacggcacggcagtctacgagatcgacctcaccggacggcggccactggggtcgtacccgcccctgccggcgccggagaacaacataccgtacaaaggac

SEQ ID NO: 301648 - DNA, 252 bp, Zea mays
gtggaagccgccgcggctttcttgaacaaagccgtcaagccagtgcttgtaggtgggccaaagatgagggtgtccaaagcatgcgaaccttggcagagctggcagatgcctgcggctatcccgtcgccgtgatgccttctgcgaaggggctagtgccagagcaccactctaggttcattggcacgtactggggtgcggtgagcactccattctgtgctgagatcgtcgagtctgccgatgcctacctatttg

SEQ ID NO: 301649 - DNA, 254 bp, Zea mays
cgaaagcccaattggatggatcagccacgaagctgaagcttttgaatagccgtggagacatatgtgccttctcgggtgccagggggattgccgctgttttggagaagaaaggttgcgatcacgtgaaatccctggcacagaccgaagccgttttatcctctgaagacataaaagacccttcggccgaggcgagtttggttggtgggaaatttttcaccgacatctgggaaaacggtggccgggagatggctcaa

SEQ ID NO: 301650 - DNA, 245 bp, Zea mays
cttgagagatagagagagagagatccgtttgttatttgtcgctcttgttgcttggttttcgcaatcgtgctttcttcttattctcaagtgacatgtaatcaaagcaagagacactaagtttgtagtggtccttgcagggtctaagtgacccgtttgattaaggtcggtctaggtgaccgtttaagagagggaaagggttgaaagagacccggtctttgtgaccacctcaacggggactaggttct

SEQ ID NO: 301651 - DNA, 247 bp, Zea mays
agctgctctcgtccctagaaataaagcagctcctccgcggggcggcgaactactacccatcgccaaaaccctagccccgatccggtcgaggagcactacttcttggcatggcgggcacccctagccaggcaagcctcctgctccagaagcagctcaaggtgatggaggctacttcaatgcaataatgaccttcccccagaactatcccaacagcccgccatcagtaagatttacttctgggatgtgg

SEQ ID NO: 301652 - DNA, 247 bp, Zea mays
ggattgcagatagatgcagctattaattcaggaaattcaggtggcccagcttttaatgataggggaaaatgtgtcggtatagcttttcagtctcttaaacatgaagatgcggagaacataggttatgtgataccgactccagttattacacatttcattgaggactacaaaaatctagagaatacacaggctgcaattgagtacattcattctttatcaagggcacagcctgctcattctctcaatg

SEQ ID NO: 301653 - DNA, 257 bp, Zea mays
acaaattgtaccagctctgactcagctagctgtggcaaaccctgctgcctacttgcaacaactacttccattcaaccaactgactgtgtcgaactctgctgcgtacctacaacagcgacaacagttacttaatccactagcggtggctaacccattggtcgctgccttcctacagcagcaacaattgctgccatacaaccagttctctttgatgaaccctgccttgtcgtggcagcaacccatcgttggtggtgcca

SEQ ID NO: 301654 - DNA, 244 bp, Zea mays
aaagtccgtgtctgggatgtttcggagaggcgagtagttgactgggctgatgcaaaggatatcataactgccgtgggttaccagccagatggacagggtcttattgtcggcatagctgcagggaggtgccggttctataaccatgcaggtgaaaacgtggaactggagaaagtactgaaggtaacgaagaagaaatctgctggtagacagatcaccagcctgcagttttcgtgcggcgatcctg

SEQ ID NO: 301655 - DNA, 269 bp, Zea mays
atctactatactatactctaggaagcaaggacaccaccgccatggcagccaagatgcttgcattgttcgctctcctagctctttgtgcaagcgccactagtgcgacccatattccagggcacttgccaccagtcatgccattgggtaccatgaacccatgcatgcagtactgcatgatgcaacaggggcttgccagcttgatggcgtgtccgtccctgatgctgcagcaactgttggccttaccgcttcagacgatgccagtgatgatg

SEQ ID NO: 301656 - DNA, 248 bp, Zea mays
gtaaaggaagaaaacatgttacttttgagccaggtgatatggtttggttgcacttgagaaaggatcggtttcctactttgcgtcgttctaaattaatgcctcgtgctgctggtccttttaaggtgctaacaaagattaatgataatgcttatatccttgacctgcctgcggaatttggtgtttccactagttttaatgttgcagatttgaaaccatatatggccgaggatgaggagttgtcgtcgagg

SEQ ID NO: 301657 - DNA, 246 bp, Zea mays
agttgtggttggaaaggatgaagtgcatgtgctgattcatactggtgattggttggcaggcacgtcctcttttcaacgacagaaggaagctccccaagatggccgacccaaggctggaagggcggtaccccatgcgcgggctgtaccaagccctggcggtggcttccatgtgcactcagtcggaggccgcttcgcggccactgatcgcggacgtcgtgaccgctctgtcctacctggcgtcccagc

SEQ ID NO: 301658 - DNA, 242 bp, Zea mays
aagacttatgagctggcatgcttctgatgagcacaaaaacgatgggaagcttcgacatccagccgatgggaagcagtggcaagatttcaatgacaaccaccgagactttgccgatgaaccgagaaatgttaggttcgcactgagtactgatggaatgaacccatttgctgagaggagcagcaagcatagcacatggccggtgatcctcaccatatacaaccttcctccatggttgatgcaga

SEQ ID NO: 301659 - DNA, 237 bp, Zea mays
cggcttggtcctccagtccatcctgcagcagcagccgcaaagcgccaggtcgcggggctgttggcggcgcagatagcgcacaactgacggcgatgtgcggcctgcagcagccgactccatgcccctacgctgctgccggcggtgtcccccactgaagaaactatgtgctgtagtatagccgctggctagctagctagttgagtcatttagcggcgatgattgagtaataatgtgtca

SEQ ID NO: 301660 - DNA, 247 bp, Zea mays
catgtgccaagattcatcatatgtgtgagatttggtctcagcacacctgataattatgttcacgcccgggctttggacccttaaaacccgggtgtgacactttgtttgtttaccggccacaacaaggtctgtaaactgataatggcggggaggaccgtatcgctgctgctactagatcgtatccgatccctccgctactaattacgttatggcccaaccaaacatagagtaatgagattggatggca

SEQ ID NO: 301661 - DNA, 259 bp, Zea mays
gccgccgcaccagcaatcacagcagcccggagaacgccctggtccaacaagatgcagatcttcgtgaagacgctgacagggaagaccatcaccctcgaggtcgagagcagcgacaccatcgacaatgtcaaggccaagatccaggacaaggaagggatcccgccggaccagcagcggctgatctttgccgggaagcagctggaggatggccgcacccttgcggactataacatccaaaaggagtctacgctccacctcg

SEQ ID NO: 301662 - DNA, 206 bp, Zea mays
tggctattagctcatcgactccagattggagaactcgacaccatgaaggtgctgatcgttgcccttgctctcctggcgttcgttgtgtgtgttgtctccagtacaagtggtggttgtggctgtcagacaccactgtttcatctaccgcctctgttctatatgtcgtctccgttctatctgtcgttgtagcagtagtcgcagtcatg

SEQ ID NO: 301663 - DNA, 229 bp, Zea mays
gccagcagcagatgaggatgatggacgtgcagtccgtcgcgcacagctgcagatgatgatgcagctttgagcgtgccgctgtcgccagcagcagcctgtatgagccagctctgatgcagcagcagcagcagctgctggcagcccagggtctcaaccccatggacatgatgatggcgcagaacatgccggccatgggtggactctaccagtaccagtaccagcggcccag

SEQ ID NO: 301664 - DNA, 311 bp, Zea mays
  unsure (1)..(311): unsure at all n locations
gtcagcctagcaattagctcatcgactccagattggagaactcgacaccatgaaggtgctgatcgttgcccttgctctcctggcgctcgctgcgagcgccgcctccagtacaagcggcggctgtggctgccagacaccaccgtttcatctaccgcctccgttctatatgccgcctccgttctatctgccgccgcagcagcagccgcagccatggcactacccnactcaaccaccgcagctaagcccgtgccagcagttcggatactgcggcgtcggcagcgtcggcagcccgttccctgggcagtgcgtcg

SEQ ID NO: 301665 - DNA, 328 bp, Zea mays
caatgggcttcgaacacccagctgtgcaagcctataggctacaacaagcgcttgcagcgagcgtcttagaacaaccaattgcccaattacaacaacaatccttggcacatctaaccatacaaaccatcgcaacgcagtagcaacaaagaaccgaggcaccctaaccgcgggtgaaacctaacgcctacttgcaacaacagctgcttgcatccaacccacttgctttggcaaacgtagctgcataccaacaacaacaacagttgcaacagtttctaccagcgctcagtcaactagccatggtgaaccctatcgcctacctacaacagca

SEQ ID NO: 301666 - DNA, 267 bp, Zea mays
gaagaagagcacaagtcatatgtgttatgtgttcacagtgagaaacttgctatagtgtttggtattataagcacgcctgctggaacaaaaattcgtgtgatgaagaatctccgagtctgtattgattgccacacagtaactaaatttatttcaaagttagctgatagggagattgtggtgcatgatgcaaactgtttccaccactttaaggatggaaacggttcctacaaggacttttggtgatcgggcaaccacttgggattatca

SEQ ID NO: 301667 - DNA, 269 bp, Zea mays
tgctactggcaaaggaaacatagcgcgcctgattaatcactcgtgtatgccaagctgctatgctaggatcgtgaccgtcagtggtgacaggagccagatcattcttattgcgaagagagacgtctctgccggagaagagctgacgtagttcctcagccctgccagtataactacctgtttgaccctgacgagtccgaagactgcaaggttccatgcctgtgcaaagctcctaactgccgtggatacatgaactagggtgctgctagaag

SEQ ID NO: 301668 - DNA, 270 bp, Zea mays
ctctactatactatactctaggaagcaaggacaccaccgccatggcagccaagatgcttgcattgttcgctctcctagctctttgtgcaagcgccactagtgcgacccatattccagggcacttgccaccagtcatgccattgggtaccatgaacccatgcatgcagtactgcatgatgcaacaggggcttgccagcttgatggcgtgtccgtccctgatgctgcagcaactgttggccttaccgcttcagacgatgccagtgatgatgc

SEQ ID NO: 301669 - DNA, 259 bp, Zea mays
ctattgggtacaagatcggaacgatgattgagattcccagggcagctctagtggctgacgagatcgcggacaggctgaattcttctcctttggaacgaacgacctcacgcagatgacctttggctacagcagggatgatgtggggaagttcatccccatttatctggctcagggcatcctccagcatgaccccttcgaggtaactgctgcagctcctctgtcaccctctctcatctgaggccatactcgcatctccatc

SEQ ID NO: 301670 - DNA, 267 bp, Zea mays
cgcacatatctactatactatactctaggaagcaaggacaccaccgccatggcagccaagatgcttgcattgttcgctctcctagctctttgtgcaagcgccactagtgcgacccatattccagggcacttgccaccagtcatgccattgggtaccatgaacccatgcatgcagtactgcatgatgcaacaggggcttgccagcttgatggcgtgtccgtccctgatgctgcagcaactgttggccttaccgcttcagacgatgcca

SEQ ID NO: 301671 - DNA, 259 bp, Zea mays
attctttctccccgcgtgctctctatctctcccctctttctctccctctgcccgacgactaggccgccgccgccacggccccgccgccgccgccgtgcccaggtctttgtcggtccttgtccggcaacgagcaccctacagatggaatctgtgggctttatgaaaggaaaattagggatatcaacccaatgatcccaaacataacttatgacatcagcgacctctataacttcattgatggcctagccgacattagtgc

SEQ ID NO: 301672 - DNA, 250 bp, Zea mays
gagacttggaagtttggacaaagctgaggtttatttccacgatataccagatgaggtcatcaagagcttgatcgatgagggagtagtatttagggtcgcaggtggtttgctgcttgaacatccattgacgctgccgtttgtcgaagcagtggttggttctagtgacagtgtcatggggctgtcaaaggaggttgcaaacaagttaattcacgacgcactgtctacttagcgtacaatttcagcactactg

SEQ ID NO: 301673 - DNA, 260 bp, Zea mays
agtgcgtcgagtttctgaggcatcagtgcagcccgacggcgacgccctactgctcgcctcagtgccagtcgttgcggcacagtgttgccagcagctcaggcaggtggagccgcagcaccggtaccaggcgatcttcggcttggtcctccagtccatcctgcagcagcagccgcaaagcggccaggtcgcggggctgttggcggcgcagatagcgcagaactgacggcgatgtgcggcctgcagcagccgactccatgccc

SEQ ID NO: 301674 - DNA, 246 bp, Zea mays
atgaagttaatcttcaatcagccaagaggaaaatggccagatgaattgatcaaagtggtgtggagccacaacacaacaatatcaaggtcaacaggctttacaccattcaaattactgtttggtgacgaagcaataaccccagaaaaagctaaagcaggatcaataagaacaatggcttcggcagaggacgaagctgattgttcggtggcaaaagatgctatagaagggattaggcttcagggagtg

SEQ ID NO: 301675 - DNA, 248 bp, Zea mays
aacacacctagcggacgcactagcaacgacctaacaacaatggcttccaagacattatccctccttgcgcttcttgcgctttttgtgagtgcaaccaatgcgttcattattccacaatgctcacttgctccgagtgccattattcgacagttcctccctccagttacttcaatgagcttcgaacactcagctgtgcaagcctataggctataacaagcgcttgctgctagcgtcttagaacaaccaat

SEQ ID NO: 301676 - DNA, 267 bp, Zea mays
tgaagtccacaaacttagagatttggtgagatcactgcaagaaagggagaagactctggagctacagcttctggagtgttacggtttgcaggagcaagatgctgcggtgagggagcttgagaatcagctgaagattaacaacgttgaatcaaagttgtacttgctgaagattgaatctttacagactgaaaaccagaggctgcaaacacagctctcagagaactcaaaaatattctctgagcttgaggcgacaagaacaaaatgcaa

SEQ ID NO: 301677 - DNA, 237 bp, Zea mays
gtgaggataaaaatttctgatgtttgtcaaaaacaagacatataccgtctcgtaaaagttattggaacacataaggttccagaaaagtatagtattggaaagaagatgacaaatgttgcacttgagagattgaatttaaacaaaaaggagattattacaatggatacaatatctaatcatgattttacagaggaggagtgcaaacgtttaaggcagagcatgaagtgtgatttaatt

SEQ ID NO: 301678 - DNA, 256 bp, Zea mays
gacaagaattgttccccaaatctagtgacctataacacattgatggatggattttatgagattggttctattgatacagcagcatctctttgggctgccattttagataatggtttgaaaccagatattgttacttacaatacaagaattaagggcctgtgctcttgtaataggacacctgaaggagtcctgttattgaatgaggtgcttgcaacaggtattatgccatctgtcattacctggagcatattagtaa

SEQ ID NO: 301679 - DNA, 263 bp, Zea mays
aaatcatgcaggaataggcacccggcggttaccaggcatcgaatgtgatccatctccaagtttcgagggatcgaagatcaagcttcgacgaccaagtgatctggctcttcgagttccacgaagttgaagaccctgaacatctgtttggcgaaggtggtggacttccggatcgtacttaaggctttgtccaaattcccggtgaagttatgccgcctcgtagggctcgtggcagcccgcatagtcctagtggggattctatgagt

SEQ ID NO: 301680 - DNA, 269 bp, Zea mays
gatcattgccgtgacccttaaacaaaacagaccgcgaacgagtcacccgtgccgccgggctccggcccggcacgctgcccccccgaacctcccgcggtgaaggggggtgccgcgaaaaagaacccacggcgccccgggcgccaaggaacaccagtactacctcctgccccgcggagctgtcggcccgccttccgctcccagggcagcggttacaccgtaatcgacacgactctcggcaacggatatctcggctctcgcatcgatgaaga

SEQ ID NO: 301681 - DNA, 264 bp, Zea mays
gcaggatgatgacggacaagttatcgaaccccactccatcagtgctgggctggattaccctggcgttggacccgagcacagtttcttgaaggacattggacgtgccgaatacgatagtgtgactgaccaggaggcactggatggtatgtctcgctctctttccattgtctgttattggttgaactatttttctttttgacgaattgatttccaatgaacctacaaaatgctgttagtgttggtatcagctttcaacatcttgac

SEQ ID NO: 301682 - DNA, 267 bp, Zea mays
cgcgcgtcacccgaaagggaatcgggttaagatttcccgagccgggacgtggcggcagacggcgacgttaggaagtccggcaagctctacgagtacgcctccaccagcatagaggatacatataaccgctatcagcaattttctggagaaggaaggaatataaatgacgatcgaaatagaaacgataacaaggatgaagcttcttcagatttgcagttgatgctgagcaagattgcgacctggtctccccagagcaatgctgacgaa

SEQ ID NO: 301683 - DNA, 255 bp, Zea mays
caaagcggcagtgcgtagagaggatcgtcgaacagaacagcatgaagatggtggacgtgcagtccgtcgcgcacagctgcagatgatgatgcagcttgagcgtgccgctgccgccagcagcagcctgtacgagccagctctgatgcagcagcagcagcagctgctggcagcccagggtctcaaccccatggccatgatgatggcgcagaacatgccggccatgggtggactctaccagtaccagctgcccagcta

SEQ ID NO: 301684 - DNA, 254 bp, Zea mays
gacggcaaaacgcttctgaaagacgaagcagagaaggtgatcaggtgcctggaagcagccatctccagaagagtatccgagggattcacgctggaggtgtgcggccgggaccgggtgggcttgctgtcggacgtgacgagggtgctccgggagcacgggctcacggtgagccgcgccgacgtgacgacggcgggcgggcaggccacaaacgtcttctacgtccggaacccctcgggccagccagtggacatgaa

SEQ ID NO: 301685 - DNA, 254 bp, Zea mays
gaactaataataccggggggaacaacatttcagctctctgaagcccttggaaagctatatggacaatcaaagcagggggctagtagcgacactgttgaaccatcgaaagctcgtggtggggcccatgagaattgcataacgtgtattgtacccttgagaaaaggaagcgatggtactatcaaacgattcagcacgtcaggtttatagctgagcgttccaattgcttccagctctattgttcgaacatgttttga

SEQ ID NO: 301686 - DNA, 245 bp, Zea mays
cagagtcatcattgttgaaagctattgatgtttcaaagaaatttggtggtacaatattctttgaccttaatcttccacttccactatggtcatccagcaaggaaaccaagtcactcattaagaaggcatgggaagctgccaatatcattgaagtcacaaaacaagaacttgagttcctttgcggcatcaaaccttctgagaaatttaacacaaatgataatgataagtccaaattcacacactat

SEQ ID NO: 301687 - DNA, 258 bp, Zea mays
tcgcccggcggcgatgcctacggctcgccacagtgccaggtgctgcagcagcagtgctgacaccagatcaggcaggtggagccgctgtaccggtaccaggtgacatacggtgtggtcctgcagtcgttcctgcagcagcagcagcagggcgtgctcgcggtgctgatggcggcccaggtagcgcacagctgacggcgatgtgcggtctgcagctgcagcagccaggtccctgcccttgcaacgcagttgccggtggtg

SEQ ID NO: 301688 - DNA, 257 bp, Zea mays
cgcacgcaacatagaaagtagaatccattagcgacaatagagcaacaatggcgagcaagatattttccctccttatgctcgttgctctttctacatgtgttgctaacgcgacaattttccctcaatgttcacaagctcctatagcttcccttcttcccccatacattccatcaattatagcttcagtatgtgtaaacccagctcttcaaccatataggcttcaacaagcaatcgcagcaagcaacatacctttatcg

SEQ ID NO: 301689 - DNA, 254 bp, Zea mays
attttgagcattctgagacacaccaagcgatgtcagtagcaatgatataacaacaatggctaccatgatattagccctcgttgcgctcagcaccctttttgtgagtgcaacagatgcgttcattattgcacaatgctcacttgctcctagtgccattagtgcacagttcctcctaccagttacttcaatgggcttggtacacctagctgtgtatgcctacatgctagaacaagcgcttgcggcgagcgtgttac

SEQ ID NO: 301690 - DNA, 247 bp, Zea mays
tagaaattgagaaatgtgaaaaattatctagtgagctaagcacttgccgtgagatgattgacaaccttaggaatgacaatgctagtttaaatgctaaggttgattcacatgtttgcaatgtttcaacttcaaatcctagagatgatcatgttgatttacttgctaggattgatgagttagatgcttccctagctagccttagaattgaaaatgagaaattgcttgttaaggctaaagattttgatgt

SEQ ID NO: 301691 - DNA, 250 bp, Zea mays
aaaaaatataggcccaaatgatcggctaattcatgtttatcacttcaagaaagatattaatcagactcagcagattcagaacttcggagaccctttcgttttggtcgttcatgaaggtgagactttagcagaagtcatgaagcgcatacagagtaaactgcaagtctctgctgatgaattttccaagtggaaatttgcatttatatcaatgaatcggccagactacctccaggattcagatgttgtacct

SEQ ID NO: 301692 - DNA, 257 bp, Zea mays
tatcattgtaaggccgaagtgcaagcgaaagaccccatataggggcatccgccgacgcccttggggaaaatgggctgctgaaatccgcgatcctacaaagggtgttcgtgtttggataggcacgtataaaacaccagaagatgcagctagagcatatgacgctgaggcccgcaagattaggggcaataaagcaaaggtgaatttccctaatgaaccaccaaacatggtgagcaatgcaccaaaactaattgttactg

SEQ ID NO: 301693 - DNA, 156 bp, Zea mays
cagaaacacacctagcgaagcgactagcaacgacctaacaacaatgggtaaccaggtattaaccctccttggggctccttccccttttgggagcggcaaaaaagcggtcaataattcaacaatgtcaattggtcccagtggcaataattcaaaggt

SEQ ID NO: 301694 - DNA, 245 bp, Zea mays
agttcaacgagtttattgtcttcctgtgccttgtttatcttctaaatgaccctgcagtgtctgaagcaagaaaaagaatggggttagggaaccttgaaccaacatttgaaacattggttgagtcatttgtcttcttggacaagaacaaagatggatatgtcagtaagagtgagatgatacaggcaataaatgagaccattggaggagagcgctcttcagggcgcataggcatgagaagatttgag

SEQ ID NO: 301695 - DNA, 238 bp, Zea mays
ggatgcgctgcaccggtaccaggcgacatacggtgtggtcctgcagtccttcctgcagcagcagccgcatggcgagctcgcggcgctgatggcggctcaggtagcgcagagctgacggcgatgtgctgcctgcagctgcagcagccaggtccctgcccttgcaacgcagctgccggcggtgtctactactgaggacactatgtactgtagtaataatgtaatggagccgctgactagc

SEQ ID NO: 301696 - DNA, 246 bp, Zea mays
attattgagaccaacaagcaacatagacagtggaatacagtagcaacaatagagcaacaatggcggcccagatattttccatccttaagctccttgctctttctgcatgtgttcgtaacgcgaccatttttcctcaatactcacaagctcctatagctgcgcttcttcccccataccttccatcaatgaccgcttcagtatgtgtaaacccagcccatcaaccctacaggctcctacaagcaatcg

SEQ ID NO: 301697 - DNA, 335 bp, Zea mays
cgacacaagacagttttatattgggactcgatcaacttggtgtttgggaaagatcatgcaaccggtgaagcggcaaagaccccagctgatggtgcgagagatatgagtaatgtagagggaaccggtaaagagcttacttcatcaacaacctcaggaagcttgaagaggcaacgttccagtgattccttcacctcaatgatggcggagaaattagacaagttcactgaagctattagggatgaagcaccaaaagggccgacatcaaaagagatttttagcacattggaggagatagatgggttagatgaagacacatttttagacttgtttgatat

SEQ ID NO: 301698 - DNA, 200 bp, Zea mays
tctacctgctcaacccgtccgtgctcggccgcatcgagctgaagccgacgtccatcgagaaggaggtgttcccgcgcgtcgggcggacggggccctcttcgccatggttctcccgggtttctggatggacatcgggcagccgagggactacatcacgggcctgcgtctgtacctggactcgctgcggaagaaggcgcccg

SEQ ID NO: 301699 - DNA, 272 bp, Zea mays
actatccttaattcgtttcctggtgttgatcccaatgatccatctgttaaagatttgctggcatcattgcacagccagaaagaggaagagaagaaggaagacaagtcagacaaaacagaagacgagaagaactgcttcaagctggagtgatgtcgctgtggtgcttttgtgactgatcatctctggagcttttgtgaatgatgtagctagctatctgtaattgatctagttgtgaatgatattataattgtgatacttttgtgaatatataa

SEQ ID NO: 301700 - DNA, 267 bp, Zea mays
  unsure (1)..(267): unsure at all n locations
atgcccggtgcaagtagagtctctctgctagcgacggacttcaagcgaggctcggcggctctagaagacgatgggcaaggacgacgtgatcgagagcagcgctggcggcggcgagttcgctgccaaggactacacggacgctcccccggcaccgctgatcgacgcggcggagctggggtcctngtcgctgtaccgcgccgtgatcgccgaggtcatcgccacgctgctgttcctgtacagcacggtggccaccgtgatggggtacaa

SEQ ID NO: 301701 - DNA, 284 bp, Zea mays
aatcctcttcctcgagttctcctcaaccaaattcaaggtcacagcggcgaacctctcggctatcatgtctgaccgcggcaagggcgggaagggtctgggcaagggcggcgccaagcgccaccgcaaggagctgcgcgacaacatccagggcatcaccaagccggcgattcgcaggttggcgaggaggggcggcgtcaagcgcatctccgggctcatctacgaggagacccgcggcgtgctcaagatcttcctcgagaacgtcatccgcgacgccgtcacctaca

SEQ ID NO: 301702 - DNA, 253 bp, Zea mays
ttccacccatcacccaagacctcctcagacccgagagacgactgcggccatggacgccaccggcactggagctggagggacggcgaagaagggaacggccggtcgcaaagccggcgggccggggaagaagtcggtgacgaggtccgtgaaggccgagcgccaattccccgtcggacacatacgggcgctacctcaagaaaggccgctacgcgcacgcgtacagcagcggtgcccccgtctacctcgcggccgt

SEQ ID NO: 301703 - DNA, 265 bp, Zea mays
tatgggtcttcagaccattaactttatctactccataacgcataagaacccgatcgacaccattatggtgttgctcgttgccctcgctctcctcgctctcgcttcgagcgccatctccacgcatacaatcggcggctgcggctgccaacgaccgccgccggttcgtctatggtcgccggtgcgtctgcgacctccggttcacctgcgacctccggtgcatctcccaccgtcggtccaccttcgctcgccggtccacctgtcggcg

SEQ ID NO: 301704 - DNA, 252 bp, Zea mays
tctcctcgcatttcttcccatccgatccccccttcgtaaccaaaaccccaactcgtcccgcatcgatggcgcccaaggccgagaagaaacccgcggcgaagaagccggcggatgatgagcccgcggccgagaaggcgcccgccgggaagaagctcgaagcgtagtagcgggtctccgctggcaagtccgctgccaatgaaggcggctatggcaatatgggcgagatcaagggcaagtcgatcgtggagacct

SEQ ID NO: 301705 - DNA, 272 bp, Zea mays
gaaaatcatggctgagcagtttccaggggccttttcaggttatcatttagaggttttagaatcccatcaagctggcaagctggatacatctggtacagctaaagacgtgattgcttgttttgagaaactaggtgtgtcatatgatatgaaccggatggttaagattagagatccagaacagcagcttgagatggtgggtgtccctgaagaacacatccaagggcatgcattccatctgtatcatctcacttctcctgatgacagtgtttcat

SEQ ID NO: 301706 - DNA, 261 bp, Zea mays
actagttctagatcgcgagcggcccgcccttttttttttttttttatctgccagtccagtcggaattaatgcaatgaaatcgatccatactatacattacatggtacatacatttgatacatacacagaaaagaaagaaagaaaaaaacagagaggaacaccccatctggttcacgcacgctaaaccaccaacacagacagtagattgctgctacgctcttctttcgcctccaatctgcgaggcaaggcgtctgatcccct

SEQ ID NO: 301707 - DNA, 260 bp, Zea mays
cacgcatactgcatacacaacacagagcatcagaaggagctacgatctgatcgacatggctgccgccaccatggctatcacctcccgcgcgctcgtcggcaagccggcggctggcacgagggacgtcttcggcgagggccgcatcaccatgcgcaagaccgccgccaagcccaagccggcggcgtccggcagcccatggtacggtgccgaccgcgtcctgtacctgggcccgctgtccggctcgcccccgagctacctga

SEQ ID NO: 301708 - DNA, 261 bp, Zea mays
cttcttgaagaagagcttggtcagccttggcaagcaatctactcagagttatccccctccccaatcgctgcagcatctctgggacaggtttataagggccgcttgaaagaaacgggagaactagtagctgtcaaagttcagaggccatttgtacttgagactgttaccatcgatttattcatcattagaaacttgggtttggtactcaggagatttccacaggtgtccatcgatgttgttggcctggtagatgagtgggct

SEQ ID NO: 301709 - DNA, 233 bp, Zea mays
gtgtagcagccggtccagcagtttcacgctgagctgccagcaatgggtggctccaccatggcgatgtcgtccacggcgatggccggcgaccgcgtcgaggtgggctccttcggcgaggggcgcatcaccatgcgcaagaccggtgggcagagcccaaggtggcggcgtccggcagcccctggtgacgccccgaccgcgtcaagtagctcgggcccttctgcggcgagccgccg

SEQ ID NO: 301710 - DNA, 274 bp, Zea mays
gcaaccggtccagcactttcacgctcaggttcagcaatggctgcctccaccatggcgatctcctccacgggcgatggccggcacccccatcaaggtgggttccttcggcgagggccgcatcagcatgcgcaagaccgtgggcgagcccaatgtggcggcgtccggcaacccctggtacggccccgaccgcgtcaagtacctcggccccttgtccggcgagcccgcgatgtacctcgaccggcgagttccccggcgactacggctgggacaccgc

SEQ ID NO: 301711 - DNA, 267 bp, Zea mays
cggcaagaagtccgtcaagaacagccccaacccaaggaactactaccggtgctccacggaagggtgcaacgtgaagaagcgggtggagcgggacagggacgaccccggctacgtggtcaccacgtacgaggggacgcacaaccacgccagccccagcacggtgtactacgccagccaggacgccgcctccggccgcttcttcgtcgccggcacgcagccgccggggccggggctgtaatgagatgtacagagtctgtcccaatggat

SEQ ID NO: 301712 - DNA, 272 bp, Zea mays
ctagcgcgcgcgatcgcaaagagagcggtgaaagatgaaggtgcagtgcgacgtgtgcgcggccgaggcagcagacaccgccgcctccgctctgcgacatctgccaggagaagcgcgggctcctgttctgcaaggaggaccgggcgatcctgtgccccgactgcgacgtgccggtgcacacggccagcgagctggccatgcgccacacccggttcctgctcacgggcgtgcgcctctccggctctccgcagagcccgccgcgcgcccgccgc

SEQ ID NO: 301713 - DNA, 267 bp, Zea mays
gcagaggcagcgacacgatcgcgagcgcacgcacgtaagcacgttgtcggaagctcaagttagaagaagcaccagtgcctgatcgatggcggcccaggctctcctctccggccggcagctgctgggccgccccgtgcagtcggccgtctctaggtcgtcggcgaggaaggcgcccttcgtcgtcagggccagctccagccctccagccaagcaaggtgccgacaggcagctgtggttcgcgtccaagcagtccctctcctacctcga

SEQ ID NO: 301714 - DNA, 250 bp, Zea mays
ggagaaggcggcagcatggccatggaggaagcggggaagatgacgtgcaggaagaagggtggtctgagaacaatgcccttcatcttcgccaacgaggtggcggagaagctcgccgtggtgggtttctcgaccaacatgctgacgtacctgaccactcagctgcacatgccgctagcgaaggccgccaccacgctcaccaacttcggcggcacctccgccgcgacgcccctcatcggtgccttcctcgccg

SEQ ID NO: 301715 - DNA, 281 bp, Zea mays
atcgcgagcgcaacacgtacgttgtcggaagctcaagttagaagaagcaccagtgcctgatcgatggcggcccaggctctcctctccggccggcagctgctgggccgccccgtgcagtcggccgtctctaggtcgtcggcgaggaaggcgcccttcgtcgtcagggccagctccagccctccagccaagcaaggtgccgacaggagctgtggttcgcgtccaagcagtccctctcctacctcgatggcacgctgcccggcgactatggcttcgacccgctg

SEQ ID NO: 301716 - DNA, 281 bp, Zea mays
  unsure (1)..(281): unsure at all n locations
aagatcgaagatgcatatggacttttaaagggccatcgaaaagattggactcaagcacggaccctctttaatcagctgggccgcatggattctccaacatcatctgcctttaacaatgctcttaccgatgtgctatggcgtttcggccagaagcaaggagctcagcaagttgtgcttgaaggggtaaaccgccgtgtttgggagaacacatggggtgacttcagcttggaaatgaacctcatgtcnagtggtgcagctcaagcaatggtgcatgcctggct

SEQ ID NO: 301717 - DNA, 270 bp, Zea mays
tctagatcgctagctgccgcccttttttttttttttttttttttttttttttttttgaaaattatcattaatttatgatgttcatgtaactatagtcataggataaggcaggtccggtttggtttcatcacgcggatgggagcaccttcttgacgatctcatcactgagcgaggcgatctgggcgtcgagcgccttaacagcctcctccttctgcgcctcgaggttggcgagcgcctctacgatctcggcctccacacggctgcgtccct

SEQ ID NO: 301718 - DNA, 265 bp, Zea mays
ctggcctgccgtcgtcggactggctgacgtacgtacgtacgtaccggtggactacggtggttgcaggtcgggaggccggtggtgttctccctggcggcggcgggcgaggccggcgtgtccaacgtcctgcgcatgctgcgggacgagttcgagctcaccatggcgctcagcggctgcacctccctcgccgaaatcacccgcaagcacatcatcaccgagtccgccaagctcagcgccatcccgtcgcgcttgtagatgaggcaaa

SEQ ID NO: 301719 - DNA, 281 bp, Zea mays
ggcctctgcactgcatgcacccgtacatgcattcatggctgcgatgtcgggactctgccggacatcacaccagcgagtaactgcttccagttcatcgcctacttcgccgtgtcgactaacctggttaactacctcaaggaccgcctgcatcagggcagcaaagccgccgcgaactgcgtcaccaactggatggtcacgatctccatcacgccgctcgtcgccgccttcctcgccgacgccttcctcggcagatacttgatcatcgcgctcttcctggtcat

SEQ ID NO: 301720 - DNA, 255 bp, Zea mays
gaagatgggcttggaggagtatatcaaggatgtatccactgatgatgcggctgaacaggcttccaatttaaggtctcagataaacattttatggggtatgctcctttatgaacgttcagttgtggaatttaaattaggtctcccaatgtgggaggattgtttgatggctgctattgaaaagttcaaacttcggggagcttctgccacagatattgctgtgctggtgaaaaaccactgtgccaatgaaactgctca

SEQ ID NO: 301721 - DNA, 278 bp, Zea mays
gttctagatcgccggcggccgctcgcgatctagatcaagtgactcttatccgccaagttgctgagaaagtgttcgccaatgtgggcaagactatcgggtacaaagttggaacaatgattgagatccccagggcagccctggtggctgatgagatagcggacaggctgaattcttctccttcggaacgaacgacctgacgcagatgacctttgggtacagcagggatgatgtgggaaagttcattcccgtctatcttgctcagggcatcctccaacatg

SEQ ID NO: 301722 - DNA, 265 bp, Zea mays
cacccagcagccagcaccgatcgagtcatccttaattaccgtatgtgctcttcctgctcttattagctgctacttatttctttgcagctttgctcttattagttacgaacatgccagtgaagaagtaaaccctgggcctgtttggttcagcttttttctgaccagtttttctgaagatctggctatgcggagaatctggctgtgggaaaaatctgagtatcattacgattacgtgtggaggaaaataaatttgttcatagggctc

SEQ ID NO: 301723 - DNA, 264 bp, Zea mays
ctgaagagtattttacaagtaagtcaatgtttgacgtgagggaactgaaggaaaatcacccagaatttgctttgttgttagaaacaagtggagaagaatctgtacagttttcaaatctaagttacaccaaggttcctgtgcacgatcttgatgtgggttctcatatcttggttagagctggcgaggctgtgcctgttgatggtgaagtctaccaaggttcatcaactgtcacaattgagcacctaactggtgaaacaaaacctt

SEQ ID NO: 301724 - DNA, 284 bp, Zea mays
aaatggtggaaggttcgacgcttagctgcttcgctggtacgcatgactacatggctcctgagcttgcgtattctctaaacgcgactgagaagagcgatgtttacaacttcggtgtcgtactgctagagttgcttacaggacatagcccaactgatcaacaatttggcggtgaaaaagacattgtgtcctgggtttcattccatttggcagagaaagaccctgctgctgttcttgacccgaaagtaagcaatgatgcatcggatcacaatcacatgatgaaggcg

SEQ ID NO: 301725 - DNA, 279 bp, Zea mays
tcttcagagcctgcaagaccgtgaagtacgcttattcaatccggaactggctgtggacagcattcacctacactgccatggtggactacccgaccccagccaacttcctggagaacctgcctgcctacccagtcaaggagatgtgcaagaccatcgacgcgttccccgcgggcgcagacgtcctggagaaggcgttcgcggcggcgagcctgtactacaactacacgggagaccagacctgcaacaagatagaggacggagacgacccgcacggcctcg

SEQ ID NO: 301726 - DNA, 270 bp, Zea mays
cggctcgaggggcggtgaccccgagaagttcaaggagctcgcacaagcctatgaggttttgagtgatccagagaaacgtgagatttatgatcagtatggtgaagatgcccttaaggaaggaatgggcggtggaggatcccatgttgatccatttgacatcttctcatcattttttggaccctcttttggaggaggtggtggaagcagcaggggaagaaggcaaaggaggggagaagatgtagttcacccacttaaagtttctctggaaga

SEQ ID NO: 301727 - DNA, 274 bp, Zea mays
atggaactggtattgcagaacttattgctcttgagatttcgcaacagacgaatgctcccattgcagagtgctgcacgaaggtctgcctggaggagtccatggacgtattcaatagactgtatcagctcaaggagcttagcaccgtggagaatgccggcctgctgtccaaagccgaagagctgtgcctgacgctctcctcgcttgagaagctgggcctgctctccaaggccgaggacctgggcctgctacacctcgtcgagaccgcagcggggac

SEQ ID NO: 301728 - DNA, 183 bp, Zea mays
ggcgagttcgcgggcaactactgctgtgataccactgtgctatctgcgtacccggagactttcgccaagaaacgggagctggagatcatccagtcccgctgggccatgatgtacgcgttgagctgcgtgttgccggagctgctcacacgcaacggcgtcaaattctggctaggcatgtggttc

SEQ ID NO: 301729 - DNA, 273 bp, Zea mays
gcacgatcaatgtacacgttgcccgtccgcgccaccacgtccagcatcgtcgccagcctctctttccccgctgcgtcctcctcctccggctccggctcctgccgccccaggcccaggctcatccggagctcccgcgtcttcggcgcccccgccgccgtcgtgggcatggacctcggcgtcgggcgcttgaagagcgggttccaggagttcgggaccggtgtctatgacaagaggccggagctgttcgagcctctcgagtccggccagagcccc

SEQ ID NO: 301730 - DNA, 262 bp, Zea mays
gcacaaactgcggtccggtgcgctctcctcggcggcggagttggagctgcagtgcaggggaagaaccgaagaagcgagctagagccgcaagactgataggcgccaaggccaacgccgccggcccgtgcccggagtatgcggaggtcgaccccaccggccggtacggacggttcagcgacgttcttggcaagggcgcgtccaagattgtgtaccgggcgttcgacgagtaccaggggatggaggtggcgtggaaccaggtgaa

SEQ ID NO: 301731 - DNA, 261 bp, Zea mays
gtgggattatgtgatgaccgacctggtttgggaaatatttgtgcagatcgagcagatttggaaggctgcagggagtgaagtgtgcgattgcaggaaggaacttgtacatgaggttcagctgcagcacaggggatgccatggggatgaacatggtctccaagggtgtgcagaacgtgctggactacctccaggccgacttccctgacatggatgtcatcagcatatcaggtaacttctgttctgacaagaagtcagctgctg

SEQ ID NO: 301732 - DNA, 261 bp, Zea mays
atgtccaacgtgcaagaaatgctaccccaacaagcaagattactgggatcttacagtgtcagttggttcgacagagtactccgagtccatgccagtggcaacagagttgtttaggactccactggtatcttttctttacgaaagaggatggcgccaaaatttcatatggggtggtttcccaggcctagaaagagagtttgaaatggcaaaaacttatttgaagccaacaattggagggactattgttgatgcaagttgtgg

SEQ ID NO: 301733 - DNA, 234 bp, Zea mays
gcgtcaagcttgcttagctagccgccatggcctccctcgccgccgtctccgtgaagcccgtggccatcaagggtctcgccggcagctctatctccggaaggaagctcgccgtcgccaggccgtcggcccgctccatccgcaggccccgcgcagcgccgtggtggccaagtacggcgacaagagcgtctacttcgacctcgacgacatcggcaacaccaccggacagtgggacct

SEQ ID NO: 301734 - DNA, 226 bp, Zea mays
tgcgctgctgctgcctggcttgctcgctcgctcgctcgtgcatcacatcaacaaccaggtcggcacgagcggcgggtcgcggcgggcgccgacggaggcgaactagaaggtggccatcaacgggttcggccgcatcgggcgcaacttcctgcggtgctggcacgggcgcggcgacgctcgcccctcgacgtaatcgccatcaacgacaccggcggtgtcaagcagg

SEQ ID NO: 301735 - DNA, 278 bp, Zea mays
cgtgagactggcggtggataacgcgtcatggaccgacgataagcagctccaggacatgtacctgatctgcaagtccgtcgcgatgcgacatcgacgcacctgggagcgggcatgagaggagaagctcaaggcgttcgagctcgcactggcgacggcagacgccacgttctagaacctcgactcgtcggagatctcactgacggacgtgagccactacttcgactcggacccgatcaagctcgtgcattggctgctcaaagacgggcgagcggcgtcct

SEQ ID NO: 301736 - DNA, 268 bp, Zea mays
ggagaagcgagagcagagagacatggcgccccagcaccagcagcgggcgctgctcctgttcccactcgtcttcctcctcctcgcttctagtcccgcccctcgccggcgcgtggggcaaggagggccacatcgtggtctgcaagatcgccgagaagtacctgtcggataaggcggcggcggcggttaaggcgctgctgccggagtcggcaggcggggagctgtcgacggtgtgcccgtcggcggaccgggtgcgctggcactaccactg

SEQ ID NO: 301737 - DNA, 218 bp, Zea mays
cgccgcgtttgaatgcgctagagctaatagtgactaaaattagttagacatccaaacaccttatctaatagtttaactattacctattttaaagtaaattagttaatagtaagctatctatttgttagctagctaattttactagtaattttttagctaactaactattagctctagtgcattcaaacaccctctaaactttttcatggctttaatcc

SEQ ID NO: 301738 - DNA, 225 bp, Zea mays
gttctagatcgccagccgccgccctttttttttttttttttttttctttttttttttttttttttttttttttttttttgcaatgaaatcgatccatactatacattacatgggacatacatttgatacatacacagaaaagaaagaaagaaaaaacagagagggacaccccatctggttcacgcacgctaaaccaccaacacagacagtagattgctgctacgc

SEQ ID NO: 301739 - DNA, 270 bp, Zea mays
tttttgacataaaaggccgttgatatttacaccatcgatcacagattcacactaacgaaactgttaccagtagtctctgcaactgcaggtaccgcacctgaaccggtggagccggttcctgtccctgatgacgatgtcccgcccgaagatctccgagatcagggcgctgtacgcgtggcattccttgctcatccggaggttggtcacgaccctcaccggcgccccctccggcgtgctgagcaggccgaacgccatggccagcttctggct

SEQ ID NO: 301740 - DNA, 269 bp, Zea mays
agatccctcacctcactcactcgtgaagaaccagagatcccacccaccctccttcatctcctacatccacatctatccaagaaggtccgttctctcctccccgctcccctcagcaataatctccgcacggcaacctcgctcctccgttttggttttcctctgccatgggcgacgccgtggagcacctcaagagcgggttccagaagttcaagaccgaggtgtatgacaagaagccggagctgttcgagcctctcaaggccggtcaggcc

SEQ ID NO: 301741 - DNA, 263 bp, Zea mays
ttggcgacttacatcggggcagtttgtcagcgcctgcaagtcttctttggaaagattacaacttgataggctcgggatagggcagctgcattggtctactgctaactatgcacccttgcaggagcgtgccctctgggatggactagttgaaatgtatgaaaagggccttgtaagtgctgtcggtgtcagcaattacgggccgaagcagcttctgaagatccacagctatctagcttctagaggagttcccttgagctcagctc

SEQ ID NO: 301742 - DNA, 274 bp, Zea mays
gagaaagagagagaaagtggaggggaaaagcttttgagagcactaaaagggaaaaggcctaatcacggttcggacatgtggataacttcttttcaagcacttctatccaaacacaactcctttgggatattccagtccttcaagtcccttttgattgcctcctcccatgtcaagtttggtcgccctctacctctcttcacattattgtcccgtcttatgatgcctctgtgcaccggtgcctctgagggtctccggtggacatgcctaaaccatc

SEQ ID NO: 301743 - DNA, 268 bp, Zea mays
ggctccctatgtagccaaggctaacaagctcaagctcgagtacaacaaggccatcgctgcctacaacaagggcgagagcactgcagctaagaaggctcctgccaaggaggaagaggaggaagatgaagaggagtctgacaagtccaagtcggaggtcaatgacgaggatgatgaagagggtagtgaggaggatgaagatgatgacgagtgatggagctcctcgagacaatggaccgtgcttcatccaacaatggagcggctacacaag

SEQ ID NO: 301744 - DNA, 280 bp, Zea mays
ctcttttgacgacatggttgagatgggcaaagatgctggccatgagctgaaggcaaaggctgggcctggcttctttgatagcttgcaatgaaaagaatgagcgaccatgagcaatttcaattgtcactcttttggttagaaacagagggcccaagtagagtgtggagaggtttgtttttgtttcttctttctcctgctaattctgctagagaagggtgtacctggtgtagtggtgagccgagtcatcaggtcgcgggttcgaagcatccagtctccgtat

SEQ ID NO: 301745 - DNA, 286 bp, Zea mays
gcagccggcaaggtcgtctccggctccgtggaccagtccgaccagagctacctcgacgacggccagatcgccgccggctgggtgctcacctgcgtggcgtaccccacctccgacgtcgtcatcgagacgcacaaggaggatgaccttatctcctaagcaaattaataaagcaccgccaattatcacgtcgacttgcaagcacaggagagtagaagatgtctcaatactggctgtgcatgtaatttttttgtccgtttcaaactgtattgtaaactattacctctgt

SEQ ID NO: 301746 - DNA, 116 bp, Zea mays
tgagaatcctaccatacctagctaccaactcgatcgttgtcatcactctcgatcgcacaactgctccgatgtgaggagatctaaaaactactacatcttttatagctacacatcta

SEQ ID NO: 301747 - DNA, 269 bp, Zea mays
aaccgatcgaacaacacagctactagctagctataggatccaacgtcgatcgatcgatcaatcgacatggacaggccaggccaccaccagcaccattttttcatgccgccgccgccgcagcagcagcagcagcagctttgcgtgccgatgatggacgacccgtcgtcgttcttggcggactagatgggcgtcggcggcggaggcggaggtgggccgtcgtcgtccgcgatgggggagaggaagcggcggttcacggaggagcagatacg

SEQ ID NO: 301748 - DNA, 264 bp, Zea mays
cagccggcagcacgagcagcacgccgtgccgctccaaccatctcgcttccgtgcttagcttcccgccgcgccatggcgtcgaccaaggctcccggccccggcgagaagcaggactccatggggggggagtggggggaggtggggcccaggcgagtctgcgggggggacaaggtggtcgagtaggggggggggggcgtggggcgcttcctcgagatccggcaggagctccacgggccggggcttcgcgaatttgtccaggagtgc

SEQ ID NO: 301749 - DNA, 254 bp, Zea mays
gatggcgtccccgagctccaggatcttgggggactcggtggcggtgcacgcgacggcgaagaccgccacgtgcctgcgcctcgccctcctactgctgctcctgtgggaacccagagcgagcagcccgcgcccgcggcgcagacgcctccgcggagggccctgccctcggcggggaagcgcaccatatgccgtcggagacgccgcggaacacctcatgaaggtcatgaaacgcggaggaccatatatgctccctc

SEQ ID NO: 301750 - DNA, 264 bp, Zea mays
cgccacctatgggcaagatcaagatcggcatcaacggattcggaaggatcggcaggctcgtggccagggtcgccctgcagagcgaggatgtcgagctcgtcgccgtcgacgaccccttcatcaccacggattagatgacgtacatgttcaagtacgacaccgtgcacggccaatggaagcacagcgacatcgcactcaaggactccaagacgcttctcttcggcgagaagccggtcaccgtctttggcatcaggaaccccgaag

SEQ ID NO: 301751 - DNA, 266 bp, Zea mays
ctcgggcgcaaccccgctgtgccggcagtgttcatcggcggcaggctcgtcggctccaccgacaaggtcatgtcgcttcacctgagcggcaacctcgttccgcttctgcgcaatgccggcgcgctctgggtgtagccgtgttgcatatatatgtagctagccgtgttccattccatatgcatgctatctatcaggagaggagacacacggagggaagtacgtagtaataattaattaagcaggcctttttatctgcaccgtaataa

SEQ ID NO: 301752 - DNA, 267 bp, Zea mays
ctttctttctccccctcccctcccctgcgggcttctctcacgagctcccccggcctcgccgccgccgcctgctccggcgggcgggacccagctcgcagcgtctcccctgcggcgaggtacacgatggagggagcgggaagagatgccaaccctttgagcggttacagaattggcaaaaccctgggaattgggtcgttcggcaaagtgaagatcgcggaacatatattaactggtcataaggtggcgatcaagattctcaatcgcaag

SEQ ID NO: 301753 - DNA, 258 bp, Zea mays
gcgttgtggccttacctccaagagtttgtcgatggagcccttgcgcatatcctgaacatgtccaaggctctgggagagcaggttggaaatgggaggccagtactgccttacgtgatacatgggcactatgccgatgctggagatgttgctgctctcctttctggtgcgctgaatgtgccaatggtgctcactggccactcacttgggaggaacaagctggaacaactgctgaagcaagggcgcatgtccaaggaggag

SEQ ID NO: 301754 - DNA, 266 bp, Zea mays
cagcgacacgatcgcgagcgcacgcacgtaagcacgttgtcggaagctcaagttagaagaagcaccagtgcctgatcgatggcggcccaggctctcctctccggccggcagctgctgggccgccccgtgcagtcggccgtctctaggtcgtcggcgaggaaggcgcccttcgtcgtcagggccagctccagccctccagccaagcaaggtgccgacaggcagctgtggttcgcgtccaagcagtccctctcctacctcgatggcac

SEQ ID NO: 301755 - DNA, 270 bp, Zea mays
ctagctcgatctactactactactactagctggtacacatactagccatcctgccagccagccagcttgccatggcgcccaccgtgatgatggcctcgtcggcaaccgccgtcgccccgttccagggtctcaagtccgccgccagcctccccgtcgcccgccgcagcaccaggagcctcggcaacgtcagcaacggcggaaggatccggtgcatgcaggtgtggccggcctacggcaacaagaagttcgagacgctgtcgtacctgccgc

SEQ ID NO: 301756 - DNA, 271 bp, Zea mays
cttatattctagatctgcggaataacccaggaggtttagtaaaagctggtcttgatgtggctcaaatttggttggatggagatgaaacccttgtcaacactattgatcgtgaagggaatgtgctaccaataaatatgatccaagggcattcattaacgcatgatccccttgttgtgcttgtcaatgaaggaagcgcaagtgcaagtgaaatcttggcaggggcattacatgacaatggacgagctattctggttggccatagaacctttgg

SEQ ID NO: 301757 - DNA, 273 bp, Zea mays
gagagtacgtggaggagcagccatggcttcatcggtggccgccgcggcgagcacattcctgggcacccgcctggcggacccggcgccacagaacgggcgcatcgtggcccggttcgggttcgggttgggcggcaaggcgaagctgctccgaagaaggtggcgaagacatcgacctcctctgaccggccgctgtggttccccggcgccgtggcgccgactacctggacggctcgctggtcggcgactacgggttcgacccgttcggtctcggga

SEQ ID NO: 301758 - DNA, 273 bp, Zea mays
aaggagagtacgtggaggagcagccatggcttcatcggtggccgccgcggcgagcacattcctgggcacccgcctggcggacccggcgccacagaacgggcgcatcgtggcccggttcgggttcgggttgggcggcaaggcgaagctgctccgaagaaggtggcgaagacatcgacctcctctgaccggccgctgtggttccccggcgccgtggcgcccgactacctggacggctcgctggtcggcgactacgggttcgacccgttcggtctc

SEQ ID NO: 301759 - DNA, 277 bp, Zea mays
cttgccacttctattgtcacagaatttacttcacttgctggaattatggcacgccattatgctttgagagacggcatccctgaagagattgcagaagcactatttgagataacactccctcggtcttcgggtgatgtgtttccaagaacagatgctggtatagttcttgcggttgctgataggtacttgtgcatgcaaatgtagcttactcaggccttgttcggttattcctatcctatgtggattgggatggattaagagagattttgacttgcta

SEQ ID NO: 301760 - DNA, 277 bp, Zea mays
cccaatcgcccaccacttcgatctactcgagcgagccctagccccgaatctccccggtgcatcaacaggctccgtctgcttctgctgattcccggatcgtctcccccgacgcggctgcgctcacggcttccgccacagccatggagccgcgcatcggcaacaggttccgcgtcggccgcaagctggggagcggctcctttggggagatctacctcggcacgaacgtgcagacaaacgaggaggtcgcaattaaactggaaaacgttaagacgaagca

SEQ ID NO: 301761 - DNA, 268 bp, Zea mays
caaggagagtacgtggaggagcagccatggcttcatcggtggccgccgcggcgagcacattcctgggcacccgcctggcggacccggcgccacagaacgggcgcatcgtggcccggttcgggttcgggttgggcggcaaggcgaagctgctccgaagaaggtggcgaagacatcgacctcctgtgaaggaccgctggtcggcaagtttaagaaactttatgacgaccttaccactgggttccgcaacctagaagatgaggcacggtga

SEQ ID NO: 301762 - DNA, 271 bp, Zea mays
tttgtgcacaaaggcatgattaagcaggggtctgtagaggttcgcaaggaagtagatgcttctgttgatgcaaaattgaggcagggggctaaggctcatcacactgcaacacatctactacaatctgctcttaaaagtgtagttggttcagaaacttcacaggctggttcccttgtggcgtttgaccatctccgatttgacttcaatttccatcgtccactttctgaagaggaattaacaacaattgaagcacttataaaccaatggattg

SEQ ID NO: 301763 - DNA, 267 bp, Zea mays
caagtccattttatatgacaccaagatctctagtgccattgcagcattcaccatcagtaactgaaggaaatatttgtacaccaattgctgacaagtcattttcatctgattcaaaatcacaccatgttgtaaatatggtagctgatggcttcaactggaggaaatatggtcagaagcaggtgaagagtagtgataattccaggagctactatagatgcacaaactctggttgtctcgctaaaaagaaggttgagcatttccctgatg

SEQ ID NO: 301764 - DNA, 271 bp, Zea mays
agaggagccaccgagctacctgacgggcgacttcccgggcgactacggctgaaacacgggagggctgtcggcggacccggagacgttcgccaagaaccgggagctggaggtgatccactcacgctgggccatgcagcgcgcgctctgctgcgtcttccccgagctgctcgcccgcaaccgcgtcacattcggcgacgccgtatggttcaaggccggctcccagatcttcagcgatggctagctggactacctcgggataccgatcctcatc

SEQ ID NO: 301765 - DNA, 250 bp, Zea mays
ccgcgtccccgtcccgagtcaccaccgacccaagcaaaaccgcacgcaccctgccagccgccccccaactcccaacccaacccctactccagctagctcgcggcggcggccagcggccatggccttccggctgagcgacaacctgatcggggtcctaaacttcgtcaccttcctgctctccgtcccgatcctgggcgcgggcatctggctgggccaccgcgccgacggcaccgagtgcgagcgctacctc

SEQ ID NO: 301766 - DNA, 272 bp, Zea mays
ggagagtacgtggaggagcagccatggcttcatcggtggccgccgcggcgagcacattcctgggcacccgcctggcggacccggcgccacagaacgggcgcatcgtggcccggttcgggttcgggttgggcggcaaggcgaactgactccgaagaaggtggcgaagacatcgacctcctctgaccggccgctgtggttccccggcgccgtggcgcccgactacctggacggctcgctggtcggcgactacgggttcgacccgttcggtctcg

SEQ ID NO: 301767 - DNA, 268 bp, Zea mays
caagagcggcaaggactggtctttcattctgaggcagattggcatgttctcctacaccggcttgaacaaagcgcagagtgacaacatgacggataaatggcatatttacatgaccaaggatgggcggatctcgttagctgggctgtccctggctaagtgtgattatcttgccgacgccatcatcgattccttccataatgtgaactaggctgagatatggagcaacaacgacggcggagaagctgttttgcgtccacgacacaagctg

SEQ ID NO: 301768 - DNA, 251 bp, Zea mays
gaacgagattcatgttctttgcttctcagctctagctgaagctctagctcagttcaaggtattgccattctcggttttgttgtcaagtctctgcccaccaggctgtgaaggttctttgttcgccttcttcacatctggactggtgctttcagcaatacttagtggagtattcggagttggattgtccaccctgatcggtgtgtcttctgtggactactccagcttgcctttgggtattttgctgcaaagtt

SEQ ID NO: 301769 - DNA, 270 bp, Zea mays
agcagaggcagcgacacgatcgcgagcgcacgcacgtaagcacgttgtcggaagctcaagttagaagaagcaccagtgcctgatcgatggcggcccaggctctcctctccggccggcagctgctgggccgccccgtgcagtcggccgtctctaggtcgtcggcgaggaaggcgcccttcgtcgtcagggccagctccagccctccagccaagcaaggtgccgacaggcagctgtggttcgcgtccaagcagtccctctcctacctcgatg

SEQ ID NO: 301770 - DNA, 271 bp, Zea mays
cgaggacctacgacctcatccatgctgataaagttttcagcagttaccaggacaggtgtgacataacgtacatcctactggagatggaccgaattctaaggcctgaggggactgtgatcatcagggacaacgtagaggtgttggtgaaggtacaagctatcactggaggcacgcgagactgacggctgatggaaccccatgagctgagagcacgcgcacgtcgaacatcgtctccccactcgacatcagttgctgtaatggttggtgaagt

SEQ ID NO: 301771 - DNA, 269 bp, Zea mays
ggcctccctctcctctgccgccgtcaccgccccttccttcgccgcacccgcaccagctcgcgccgtggtcagaaggaggtccttcaccgtgcgcgcctctctccgcaaggccaccggcaccgccgccgtggcaatggctgccagcgccctgcttgccggcggtgccatggcccaggaggttctgctgggcgcaggcgacggcgtgctcgtcttcgagctcagccagttcaccgtcaaggccggcgacaccatcatattcaagaacaacg

SEQ ID NO: 301772 - DNA, 260 bp, Zea mays
cgcaactggtatgcctggtctaggtccactacaaaaagtttgtgcggcattgcgggtactagcatatgggttaccttcagatgctgtagacgagtacattcaaataggggagtccacagctagggaatgccttcatcatttctgtcgaggtatcattgcatacttcagtggatggtacctacgaactcctaacgaagctgacataacacgcatcatgcaccatagcgaatcaaggggtttcccagggatgttgggttcta

SEQ ID NO: 301773 - DNA, 266 bp, Zea mays
gccatcgacacgatcgcgagcgcaacacgtacgttgtcggaagctcaagttagaagaagcaccagtgcctgatcgatggcggcccaggctctcctctccggccggcagctgctgggccgccccgtgcagtcggccgtctctaggtcgtcggcgaggaaggcgcccttcgtcgtcagggccagctccagccctccagccaagcaaggtgccgacaggcagctgtggttcgcgtccaagcagtccctctcctacctcgatggcacgct

SEQ ID NO: 301774 - DNA, 276 bp, Zea mays
attcgatttgatcgttccccttccccgcgcctcctcgttcccctgaccagtcgccccgattttttttctgttccaggtcgcttctctctgttccgcgtgcgatcgagtagatcaaaaggcggaggaggatggcgaggagttcgttcaagttggagcaccccttcgaaaggaggcaagctgaggctaaccgcatcagggagaaataccctgacagaatccctgtcattgttgagaaggccgagaggagtgacatcccagacattgacaagaaaaagt

SEQ ID NO: 301775 - DNA, 275 bp, Zea mays
gcacaccaaggagagtacgtggaggagcagccatggcttcatcggtggccgccgcggcgagcacattcctgggcacccgcctggcggacccggcgccacagaacgggcgcatcgtggcccggttcgggttcgggttgggcggcaaggcgaacatgctccgaagaaggtggcgaagacatcgacctcctctgaccggccgctgtggttccccggcgccgtggcgccgactacctggacggctcgctggtcggcgactacgggttcgacccgttcgg

SEQ ID NO: 301776 - DNA, 273 bp, Zea mays
gccatgtttaccactgggaccttggaacaaggaaatgcatccacaaggcaacagatgacggttccctggctggcctctcgctctgcacctcgcgggatagctctttgtttgccacaggctccagcagcggcatcgtgaatgtgtacaagagggacgattttctcggcgggaagaggaagccgatgaagactatcgagaacctgaccactgatatcggtgagatgaagttcaaccatgacgcccagatcctggcgatcagctcgaggaaagaga

SEQ ID NO: 301777 - DNA, 269 bp, Zea mays
gcggaggaacagccagcgcgctcctggcggccaaagggagggcggtgacccaggtcgctaagaagaacctgatccagatcgccgtcccgatcttcatcgagctgaagcggctgctggagagcaagaacagcccgctgatcgggtgcctgatggagtgcctgcgcgcgctgctcaaggactacaagaacgagatggaggagatcctggtggcggacaagcagctccagcgtgagctcctctacgacatgcacaagtacgaggcaggcaag

SEQ ID NO: 301778 - DNA, 266 bp, Zea mays
gttgctcagatcgagtacaccatcgagacgctgtactcgcacggggcccgcaagttctggatccacggcacgggcgcgctgggctgcctgccgcagaagctggccatcccgcgggacgccgacgacggcgaccagctggacgcccacggctgcctcgaggcctacaacaacgccgccaagcgcttcaacgcgctgctcggcgacgcctgcgtgcagctccggcgccggatggtggacgcggcgctcgtcttcgtcgacatgtacgc

SEQ ID NO: 301779 - DNA, 288 bp, Zea mays
tgtcggtgacttcatcttcagtatttgtgctggagctgtgttcctcttcatgctcgaccgctttttgaggttctggcaatcaagggccaaagtcgacatcatttcagccgcttgccgcccgtgtgggacggtggagctagtattctcaaaaccagcaagcctccactacaatgctttgagtttcatcttcattcaagtgcgcgagctatcgttcttgcagtggcacccgttcagtgtatcttcaagtcccatggatgggagataccacatgtcggttctcataaaagt

SEQ ID NO: 301780 - DNA, 259 bp, Zea mays
gccgcacccgcaccagcccgcgccgtggtcagaaggaggtccttcaccgtacgcgcctctctccgcaaggccaccggcaccgccgccgtggcaatggctgccagcgccctacttgccggcggtgcgatggcccaggaggtgctgctgggcgcaggcgacggcgggctcgtcttcggacccagccagttcaccgtcaaggccggcgacacgatcacgttcaagaacaacgggagcttcccgcacaacgtcgtcttcgacg

SEQ ID NO: 301781 - DNA, 262 bp, Zea mays
aattgcagttaaaaggcttgcttcgcattcaggacagggtttcacggagttcaggaatgaagttgaacttatagctaagctacaacacacaaatttggttaggctcttgggatgctgcattcaagccgaggaaaaaattttggtgtatgaatatttgccgaataaaagcctggacttctttatctttgatgaaagacaaagcagtttgcttaattggtataaacggcgtgccataattgaaggcgtacgcaacgtctcctgt

SEQ ID NO: 301782 - DNA, 265 bp, Zea mays
gcacaccaaggagagtacgtggaggagcagccatggcttcatcggtggccgccgcggcgagcacattcctgggcacccgcctggcggacccggcgccacagaacgggcgcatcgtggcccggttcgggttcgggttgggcggcaaggcgaacgtgctccgaagaaggtggcgaagacatcgacctcctctgaccggccgctgtggttccccggcgccgtggcgcccgactacctggacggctcgctggtcggcgactacgggttc

SEQ ID NO: 301783 - DNA, 271 bp, Zea mays
gaacggcacgctcgccatgctcgccatcctcggttacttcatccaggggctcgtcacccgcgtcggcccgttccagaacctgctcgaccacctcgccgaccccgtcaacaacaacgtgctcaccagcctcaagttccactagaacgtggtgcatcagcatacctgctgctgccgccgccgccgccagttgtttgctgtggaaagctagatgcatgcgtgttgtaaaggaacctgaagcgttgcatcggtcatgattcatgcatggccagcc

SEQ ID NO: 301784 - DNA, 260 bp, Zea mays
acgagctggtggacatctactcgtttggaatgtgcgtgctcgagatggtaacgtttgagtacccgtacagcgagtgtacacaccctgcgcagatctacaagaaagtgatctctggtactaagccagaatctctgtacaaggtgaaagatccaactggtgaggcacttcgtcgagaagtgcctagcaacggcatctcaaagactgtcagcaagagaactgcttgaggatcccttcctacaaagtgatgacgtggttgcttc

SEQ ID NO: 301785 - DNA, 220 bp, Zea mays
  unsure (1)..(220): unsure at all n locations
ccgagagcgcggacgggagggcacacatggacgtggagangcgtgccccggccgcgatggtcggggaggacaacgcggcggcgccgacccaaggctttgggctccccgctgagctgataggcgtgctgccatcggacccgttcgctcagctggacgtggcgcgcaaggtgacctccatcgcgctctcgcaccgcctcggtctcctcgaggccgaagcggc

SEQ ID NO: 301786 - DNA, 243 bp, Zea mays
ctcctgagccgttgcattggggagttcgcctttcgctctgatgtccgagctgtaaaattagcaaaggactacatcgtgattgtcctcgagcacaagatatttgtctacaacttcaccgatctgaagctgctctaccagattgacaccctgtcaaatcccaatggactttgctgcctctctcatcattccaatacttcagtgttggcctgccctgggttgcaccaggggcatgttcgcgtggag

SEQ ID NO: 301787 - DNA, 254 bp, Zea mays
ctggatagttcacatatgatgatgacagcgattgcttgcaaggagtctggccttcattttgcaggagttcatgactcattttgggtgcatgcgtgtgatgttgatcaaatgaaccagatattgagacaacaatttgtggagctttacagcatgccgattcttgaaaatctgctggaggagttccaaacgtcattccccacactagaatttccaccctgcccaccgcaaggtaactttgacgtgagggaagttct

SEQ ID NO: 301788 - DNA, 264 bp, Zea mays
cggtttgcaaaactgccgtcagcaagaattgaaatgcaaactccaggcacgctgtctgcatgcctaaggtgaaatcaatgtgaaattggcaaattatgttgtcgtgtacagcccgtcatatataatattagggggtgtttgggagtgaagttttttcacagttttggaagaatactgcagtattcttaaatactgcagtattatatacagaatggtgtttggcaagctggctaaaatctatgttttcaaaactgtagtattaca

SEQ ID NO: 301789 - DNA, 268 bp, Zea mays
caaggccggctaattgtcagagacaacattgaaacaacaagtgaggtggagaacattctgaaatctctccactgggaggaccgcatgtcttacttccaggagaaagaaggcttgctgttggtgcagaagacgacatggcggccaaatgaaactgaagctaagctatgatgcagagcccttgccccttggaaggaggaaaggaagatctagtgtttgcaaggtcctctacttttgtgaggcatcttttatttatgtagaatttgtagag

SEQ ID NO: 301790 - DNA, 267 bp, Zea mays
ctccggcgtgcggtcgagaggtggaacggcgagaggagcgtcaggttctgcatcaacttcggcgacatcgtagacggcttctgccccaaggacaggtcgctggccgccgtgcaggccgtggtgcgcgagttcgacggcttccgcggcgggccgacgtaccacatgctcggcaaccactgcctttacaacctaccccggagcgagctggtctccgtgctgcgcatgccgtcggcgtcgccgggacgcgcttactacgacttctcgcca

SEQ ID NO: 301791 - DNA, 255 bp, Zea mays
gcgagatcaatgccaaccagtggtgctcttgatcgtgttgccgagaaattgaatgttccattctttgaggttccaacaggctggaaattttttggcaacctaatggatgcaggaaaattgtctatttgtggagaggaaagttttgggactggatctgatcacatcagagagaaggatggcatctgggctgttctggcttggctttccatacttgcacaccggaacaaggataagaaggtcggagagagattagtg

SEQ ID NO: 301792 - DNA, 256 bp, Zea mays
aaaggctctcaaaccaggccatcacatgtgaccactatagtgctgacttccatcaaggatatatgggaaatggcacccttacatccgtattgacacggcttggtgagctggaggagaaggtacaagcacttgaagcaaagccaccccaagtgccatttgaaaaggaggaattgttacatactgctgtttaccgcgtggatgtgttggaagctgaactaatttctatgaagaaggccttgtatgagacattgattcg

SEQ ID NO: 301793 - DNA, 185 bp, Zea mays
gtccgtggggatggcgtcgtccatgctctccgctaggagcgtgccactccagcaggggggcggcgctgtccggtttctccgggctcaggagtccgcgtcgctgcgcatgcggcgggatcgcagtccggacgacttcatgtcgcgcgtctcgttcaggacgcacgcggtcgggacgagccgcgggt

SEQ ID NO: 301794 - DNA, 264 bp, Zea mays
gtgcaagcagaagcagcgcaatggcgagcagcaccatggccctctcctccacagccttcggcggcaaggcagtgaacgtgccgtcgtctctcttcggcgaggcccgcgtgacgatgcgcgagacggcggcgaaggcagagccggcggcgggctcgggcagcccgtggtacggccccgaccgcgtgctctacctgggcccgctgtccggcgcgcgcccgagctagctgacgggcgagttcccgggcgagtacggctgggacaccg

SEQ ID NO: 301795 - DNA, 256 bp, Zea mays
cacacacagacaagtggtttccaaagccaagtgtgtgtactagcaaccagctagctcgggcggcagccggcagccatcatgtcggaggagaagcaccactttcaaccaccacaagaaggacgaggagcagcccgccggcgagtacgggtactccgagaccgaggtggtcaccgccaccggcgagggcgagtacgagaggtacaagaaggaggagaaggagcacaagcacaagcagcacctcggcgaggccggcgcc

SEQ ID NO: 301796 - DNA, 248 bp, Zea mays
gtggaagggggtctgcacttggttcttcagttctcacctcatggaagccttgcttctgttctacatggtacaaaggagcccctgaagtggaaagtcaggttcaaaattgcacttggaattgctgaagggctgctttatctacatgaaggctgccatcgccgcataattcacagagacatcaaggcatctaatatccttctaactgaagactaccaacctcagatatcagattttggggttgcaaagtg

SEQ ID NO: 301797 - DNA, 259 bp, Zea mays
catcgatctgcaagtctcgctacgtagcagtgcaatacaaaaaaagcagccgcaatggcgagcagcaccgtggccctctcctccacggccttcgccggcaaggccgtgaacgtgccgtcgtcgtccgccttcggcgaggcccgcgtgacgatgcgcaagacggcggcgaaggccaagcctgcggcggcgtccgggagcccgtggtacggccccgaccgcgtgctgtacctgggcccactgtccggcgagccaccgagct

SEQ ID NO: 301798 - DNA, 226 bp, Zea mays
  unsure (1)..(226): unsure at all n locations
gaaaagggcaagagccaaaaggcatcaccgccgcgacgacgatngcagcctcgctccaagccgcggccaccgtgatgcagccggccaagatcggcggccgggcgccgtttgcctcgctgccgtcccgcccgtcgtcgcaactcgcctggcagggcgttcagcgtcgacgccggcgccgccaggatgacgtgctcgctgcaggacgtcgccaggaggtgcgtcgacg

SEQ ID NO: 301799 - DNA, 244 bp, Zea mays
aagcaagctagctcgatctactactactactactagctggtacacatactagccatcctgccagccagccagcttgccatggcgcccaccgtgatgatggcctcgtcggcaaccgccgtcgccccgttccagggtctcaagtccgccgccagcctccccgtcgcccgccgcagcaccaggagcctcggcaacgtcagcaacggcggaaggatccggtgcatgcaggtgtggccggcctacggca

SEQ ID NO: 301800 - DNA, 250 bp, Zea mays
gccgctctccccagccccactctctccatctagagctccctaactgcaccggccgccacaccaccgtaccccgacccctcgacaacaatggccaccgtcctaggcagcccccgcgcgccggccttcttcttctcgccgtcctccctccgtgccgcgccggcgcccaccgccgtggcgctgcctgcggccaaggtgggcatcatgggccgtagcgccagcagcaggggcaggctgcgcgcgcaggccacct

SEQ ID NO: 301801 - DNA, 277 bp, Zea mays
caaggatgccagcccacccccgagctctacaccgccttgatcggggcctactgccgaagcggcctactggacgaggcactccagctcctcaacgacatgaagagctcccctttatgccagcctgacgtctacacctacagcaccatcatcaaggcctgcattgacgctgccaggttcgacctcaccgacgccatgtacaaagacatggcggagcgctccatatcacccaacacggtcacacagaacatcgtcctcagcggctacgggaaggccgggc

SEQ ID NO: 301802 - DNA, 270 bp, Zea mays
ggctgctgttgacaatagggtgctaaaggcagatgtcgaaaccttaagagcaaaggtacactgctttgcctgtgctgtgtgagccctgcatctgttgaattaggcactttgggttgtttcaactgctagcactaggtgaatcaactcccacccctagatttcagagataatccatggccttccatacgtaactgggtgttcttggccattctgatggaacgtgggaatgcatcatgttttcaggtgaagatggcagaggactcagtgaag

SEQ ID NO: 301803 - DNA, 269 bp, Zea mays
gacaccagcaacccccaacagcgccactgtccagtgcgcgcgtcaagcttgcttagctagccgccatggcctccctcgccgccgtctccgtgaagcccgtggccatcaagggtctcgccggcagctctatctccggaaggaagctcgccgtcgccaggccgtcggcccgctccatccgcaggccccgcgcagcgccgtggtggccaagtacggcgacaagagcgtctacttcgacctcgacgacatcggcaacaccaccggacagtggg

SEQ ID NO: 301804 - DNA, 222 bp, Zea mays
cgtcaattgatccatcagaggttgaatggtcatacacttacaacagaaaaaagctcccatctgagaatggtatcgattcacattggaacggtgtcaggaagcaacctatggtccctagtgactggtgggttgaggacctttgtgagctcgaagtggatttgtacaagcgtgtgatcatgaccatcaaggcaaagggaagcacaccagctgctgtcattggag

SEQ ID NO: 301805 - DNA, 267 bp, Zea mays
gttcctgcacgtacgcacgcaccgggacaccagcaacccccaacagcgccactgtccagtgcgcgcgtcaagcttgcttagctagccgccatggcctccctcgccgccgtctccgtgaagcccgtggccatcaagggtctcgccggcagctctatctccggaaggaagctcgccgtcgccaggccgtcggcccgctccatccgcagccccgcgcaccgccgtggtggccaagtacggcgacaagagcgtctacttcgacctcgacga

SEQ ID NO: 301806 - DNA, 262 bp, Zea mays
cacaccaaggagagtacgtggaggagcagccatggcttcatcggtggccgccgcggcgagcacattcctgggcacccgcctggcggacccggcgccacagaacgggcgcatcgtggcccggttcgggttcgggttgggcggcaaggcgaagctgctccgaagaaggtggcgaagacatcgacctcctctgaccggccgctgtggttccccggcgccgtggcgcacgactacctggacggctcgctggtcggcgactacgggt

SEQ ID NO: 301807 - DNA, 250 bp, Zea mays
cttcccgaccgtgtatgacatcaagcacctcatgaagttctgcaacagcttgcacggcgggctcaacaagctcgctgagctacttgatgtggagcgcgttggggagtctcatcaggctgggtccgatagcctggtcacgtcctgtgcgttctggaagcttaaggattcgttctttgcgggctcaacagagaaatatgcaggtgtgctgtacgggctcaatgcagagaatggcgttagtgcacattgaggg

SEQ ID NO: 301808 - DNA, 281 bp, Zea mays
caaaacctcaacaaccaagtttcatgtctgatctcgacgtccagcttccatctgcctttgatccgtttgctgaggcaaatgctgaggactctggtgctggtcctggaacgaaggattatgtgcatgtgcgcatccagcagcgcaacggcagaaagagtctgactacagtccagggtctgaagaaagagttcagctataacaagatcctcaaggatctgaagaaggaattctgctgcaatggtactgtagttcaggacccagagctaggccaggtcattcag

SEQ ID NO: 301809 - DNA, 228 bp, Zea mays
cacgcatactgcatacacaacacagagcatcagaaggagctacgatctgatcgacatggctgcctgcaccatggctatcacctcccgcgcgctcgtcggcaagccggcggctggcacgagggacgtcttcggcgagggccgcatcaccatgcgcaagaccgccgccaagcccaagccggcgggctccggcagcccctggtaaggtgccgaccgcgtcctgtacctggg

SEQ ID NO: 301810 - DNA, 123 bp, Zea mays
ctcaccaccaacctcagcacatcgaggagaagaggagtggccaatggcttcgtcggtggccgccgcggcgagcacattcctgggcacccgcctggcggacccggtgccgcagaacgggcgcat

SEQ ID NO: 301811 - DNA, 268 bp, Zea mays
tcctcgccatcacataaaaccagtgcaggcagaagcagcgcagtggcgggcagcaccatggccctctcctccacagccttcgccggcaaggcagtgaacgtgccgtcgtctcacttcggcgaggcgcgcgtgacgatgcgcaagacggcggcgaaggcaaagccggcggcgagctccggcagcccgtggtacggccccgaccgcgtgctctacctgggcccgctgtccggcgcgcccccgatctacctgacggacgagttcccggacg

SEQ ID NO: 301812 - DNA, 301 bp, Zea mays
gtcatcttccacgtctccaagaccggcggccacctcgggtccagcctcggcgtggtggagctcaccgtcgcgctgcactacgtcttcaacgcgccgcaggaccgcatcctctgggacgtcggccaccagtcgtacccgcacaagatcctgacggggcggcgcgacaagatgccgacgatgcggcagaccaacggcctggcgggcttccccaagcgcgccgagagcgagtacgacagcttcggcacgggccacagctccaccaccatctccgcggcgctcgggatggcggtgggccgggacc

SEQ ID NO: 301813 - DNA, 243 bp, Zea mays
ggcgcatacggcatacacagcgcagggcatcagaagcaggtgggatctggatcgacatggctgccgccagcatgggtatcacgtcccgcgcgctcgtcggcaaggcggcggctggcacgagggacgtcttcggcgagggccgcatcaccatgcgcagtacgcgcgccaagcccaagccggcggcgtccggcagccgatggtacggtgccgaccgggtcgtgtagctggggccgctgtcgggct

SEQ ID NO: 301814 - DNA, 246 bp, Zea mays
cggctcgagcgagaagaagaagtaccccggcggcgccttcgacccgcgcggcttctccagggaccccgccaagctcgaggagtacaagctcaaggagatcaagaacggccgcctcgccatgctggccttcgtcggcttctgcgtccagcagtcggcgtacccgggcaccggtccgctcgagaaccttgccgcccacctcgccgacccctggcacaacaacatcggagacatcatcatccctagatc

SEQ ID NO: 301815 - DNA, 257 bp, Zea mays
  unsure (1)..(257): unsure at all n locations
gtcgggtgctctgccgtggcacctattccgggtgctggcacagagcttgaagcaagaccactatgtcagtgataccggagatgtggtctactaccaagctgagtcgaaaacgagcacctctgcactaaaatccgattgacagggagtatagagcgtactgngattcttcatttttctcggggaggggctgtgcctgaagacctgaccagcctccacctctgattagcgtgagtgggtacgtcgactgaagaatgtaa

SEQ ID NO: 301816 - DNA, 254 bp, Zea mays
gtcttgccatgcttccaaatgccattacatccagcttgggtagtaaagtcaaactatcatggaaactcacgagcattacgaaatcagatgacaagggatatgttttggagtatgaaacgccagaaggggttgtttcggtgcaggctaaaagtgttatcatgactattccatcatatgttgctagcaacattttacgtccactttcaagcgatgctgcagatgctctatcaagattctattatccaccggttgct

SEQ ID NO: 301817 - DNA, 277 bp, Zea mays
caaggagagtacgtggaggagcagccatggcttcatcggtggccgccgcggcgagcacattcctgggcacccgcctggcggacccggcgccacagaacgggcgcatcgtggcccggttcgggttcgggttgggcggcaaggcgaacctggtccgaagaaggtggcgaagacatcgacctcctctgaccggccgctgtggttccccggcgccgtggcgccgactacctggacggctcgctggtcggcgactacgggttcgacccgttcggtctcggga

SEQ ID NO: 301818 - DNA, 272 bp, Zea mays
ggaggacaaacttttcggttgggtgctggacgactgcggggattgctcagttgccgagggatgccttatggacacaaacaatgatcccatcgatgttgatgcacacatgtacaggtatcatctacatgttttacaatatatattttttaggagttacttttaaaaaatattagaaaaccccttctttgatattttcaatttttttggtggcttaaaaaaacaagaaagtaaattttacaaaccttagagatggtctaagtcgtccatgcata

SEQ ID NO: 301819 - DNA, 270 bp, Zea mays
gaccggcacaatggccgtggacgggaggctgccggaggtcctcctcgttaggaaggtccagctccttgagcagcaggaccggccggtggaggccctggcggaccggcggctggacggcaagtttgaccgtagggagctcgtgcggctggctcggctcggcatggcgtgcacccggtcagacccggcggcgcggccgagcatgaggaagatcgcgagcattctggacggcaacgaagacgtgctggacaagctggagcagaggaaggagag

SEQ ID NO: 301820 - DNA, 267 bp, Zea mays
cgacaacatgaacgccaagggcacgctgaacctcctcaccggcgccaccgccgccgccagcggtgggggcagtatcctcaggaagaaaaatacgcacgggatcctgaacgccgtgagctggggcctcctgctgcccatgggcgccaccttcgctcggtacctcaagacgttcaggtccgccgacccggcctggttctacctccacgtggcgtgccagctggccgggtacggcgtcggggtgtccggctgggccaccggcatccacct

SEQ ID NO: 301821 - DNA, 227 bp, Zea mays
cgccatcacataaaaccagtgcaagcagaagcatcgcaatggcgatcagcaccatggccctctcctccacagccttctccggtaatgcagtgaacgttccgttgtctcacttcggcgaggtccgcgtgacttttcgcaagacggcggctaaggcaaagccggcggcgagctccggcagcccgtggtatggccccgaccgcgagctctacctggggtcgctgtccggc

SEQ ID NO: 301822 - DNA, 247 bp, Zea mays
gactcctcgccatcacatgaaaccagtgcgagcagaagcagcgcagtggcgagcagcaccatggcgctctcctccacagccttcgccggcaaggcgatgaacgtgccgtcgtctctcttcggcgaggcccgcgtgacgatgcgcgatacggcagcgaaggcaaagccggcggcgagctccggcagcccgtggtacggccccgaccgcgtgctctacgtgggacccgctgtccggcgcgcacccgagc

SEQ ID NO: 301823 - DNA, 292 bp, Zea mays
agcaagcaagctcgatctactactactactagctggtacacatacgagccagcctgccagccagcttgccatggcgcccaccgtgatgatggcctcgtcggcaaccgccgtcgccccgttccagggtctcaagtccgccgccagcctccccgtcgcccgccgcagcaccaggagcctcggcaacgtcagcaacggcggaaggatccggtgcatgcaggtgtggccggcctacggcaacaagaagttcgagacgctgtcgtacctgccgccgctgtcgacggacgacctgctg

SEQ ID NO: 301824 - DNA, 287 bp, Zea mays
attttggactaagcgcccttccgcaaaaccaacgaaaagatggtttggtgcataccacatgtggcagccctaactacatagccccggagggagtcttccatttgacgaccaaaatatggttgtcctctatcagaagattctgaaagggaatgctcacattccaaagtggctctctcaaggtgcccaagatctactgcgaaagatcctggatcctaacccgatcacgcgcgtagatgtggatgggataagggcacacgattggttcaagcaaggctacgctccttctg

SEQ ID NO: 301825 - DNA, 260 bp, Zea mays
ctcgctccaagccgcggccaccctgatgcagccggccaagatcggcggccgggcgccctttgcctcgctgccgtcccgcccgtcgtcgcaactcgcctgcagggcgttcggcgtcgacgccggcgccgccaggatcacgtgctccctgcaggacgtcgccagcaggtgcgtcgacgccgcgaagtcgccggcttcgcgctcgccacctcggcgctcctcgtctcgggcgcgaggcggagggcacgcccaagaggctgacc

SEQ ID NO: 301826 - DNA, 282 bp, Zea mays
cattattcgacctcacctcaccttgccaccggccatggctgccgtgaccgccgcggccatctctctgtcctcctcctcctcctcctcccctgtggcacatggtcttcagcaccgaaggcgagatcccgtatagagaggggcagtccatcggcatcatcgctgatggcgaagacaagaacggcaagccgcacaagctcaggctatactccatcgccagcagcgccctcggagatttcggcgactccaagacggtatcgctttgcgtgaagaggctagtctaca

SEQ ID NO: 301827 - DNA, 284 bp, Zea mays
gacttaattactcctgcaacagtatcaattattttgttcacgcagccatcccgacctattctattacaggtggagaaaatcaaggcgttgatgctaatgggaattcactcgacttctcaacgaagctgctccacctcgcatggcacccgaccgagaattctattgcatgtgctgctgcaaatagcttgtatatgtattatgcgtagagaatgccctacagaaaatttgttttttttgtggcttgctctcggcgaaggcccagggcccttcaactgcaaccagag

SEQ ID NO: 301828 - DNA, 279 bp, Zea mays
gaagccgttcgcgcaggccgagctgcagctgcagagctttcccagcgtgctcctgttcccgggccgcaccgccaggcccatcaagtacccgtcggagaagagggacgtcgactcgctcctcgccttcgtcaacagcctccggtgagagacgacctccagtgagcgagaaccatcgttctctgtcagtctgtatgatcttatgttggtctttatgagtttatctaggttcgtagagaagggaggtggaggggactgggtttggtagtgacacaggaagga

SEQ ID NO: 301829 - DNA, 276 bp, Zea mays
aaggagagtacgtggaggagcagccatggcttcatcggtggccgccgcggcgagcacattcctgggcacccgcctggcggacccggcgccacagaacgggcgcatcgtggcccggttcgggttcgggttgggcggcaaggcgaacgtgctccgaagaaggtggcgaagacatcgacctcctctgaccggccgctgtggttccccggcgccgtggcgccgactacctggacggctcgctggtcggcgactacgggttcgacccgttcggtctcggga

SEQ ID NO: 301830 - DNA, 281 bp, Zea mays
ccccaccgctcagttcctccagttcccgtcggagttgccgtagccgccgccacggttgccaccgccgtagccaagttatcctgttcgctaccgtgatgtttaccctagtccagagggtttatcttcgttcgtctcgtttgttgttgcccatctgtgtttttgattgcaaggtcgctctgtgtcagttgttagtgctgtgttcatcctcggctccagcagacccatgcatcaaccagcatggactgtggatcgatggatgctgttactcctgtcaggatttg

SEQ ID NO: 301831 - DNA, 289 bp, Zea mays
gcaagctcgatctactactactactagctggtacacatactagccagcctgccagccagcttgccatggcgcccaccgtgatgatggcctcgtcggcaaccgccgtcgccccgttccagggtctcaagtccgccgccagcctccccgtcgcccgccgcagcaccaggagcctcggcaacgtcagcaacggcggaaggatccggtgcatgcagtgtggccggcctacggcaacaagaagttcgagacgctgtcgtacctgccgccgctgtcgacggacgacctgctgaag

SEQ ID NO: 301832 - DNA, 281 bp, Zea mays
ctcctcgccatcacataaaaccagtgcaagcagaagcagcgcgatggcgagcagcaccatggccctctcctccacagccttcgccggcaaggcagtgaacgtgccgtcgtctctcttcggcgaggcccgcgtgacgatgcgcaagacggcggcgaaggcaaagccggcggcgagctccggcagcccgtggtacggccccgaccgcgtgctctacctgggcccgctgtccggcgcgcccccgagctacctgacgggcgagttaccgggcgactacggctggg

SEQ ID NO: 301833 - DNA, 273 bp, Zea mays
gcttcccgtgcacagcgtgacgacgagacctgttgccccttgtcagagctccgcccttcgctgctggtgctccttcctctgcttccctgcagcgccgtccgccgtcgagccaatctcgacgccgttcttcccctctcctgatcgacattgctgtgagaagccgactgtgtggtagaggattcgaatacgttcgaagacgaaccacaggatatgtttgagcaagagggtgatgctggaaactttgatggagattttgacaacgaggaattctaa

SEQ ID NO: 301834 - DNA, 233 bp, Zea mays
gttcggccggcggtacgacctggagctggacccggccagggagagccccgagacgcgggatctgatgcgactcgtggacgaagggtacgacctgctgggccagatcaactggtccgaccacctccccggcctcgcgtgcctcgacctgcagagcacgacggccaggtgcgaccgcctcgtcccgctcgtgacccgcttcgtcggcggcatcgtcgacgagcatcgcgcccgga

SEQ ID NO: 301835 - DNA, 283 bp, Zea mays
agaaaagagatattattaggccaggtgtgacaagatttgcctccgcttttctcactttacaaagcttgtatgagaagaaagagcagctaaggatgatgtcccaaagtgaggaatggtgtaaaattagtcatgtgaagaaaagtgctaaaggtgtaacagccacagccacattggtgaagccaaccttttggaatggtgtttctctttgtttgagagtatttgagccattagttaaagttcttcgccttgttgatggagacattaaaccatcaatgccttgggt

SEQ ID NO: 301836 - DNA, 267 bp, Zea mays
gctgtacctcaagctcggcgcccgcggcgacgcgcggcgcggtcctcgaggagcgtacaaggcggcgtccggcgagggaggacgacgcggcggtccaggccaagcggcgagaggcgtacactaaggtgcgggagctccacgcgcagatccgtgcggcagggtacgtgccggacacgcgctacgtgctccacgacatcgacgaggacgccaaggcccgcgcgctcatgtaccacagcgagcgcctggccatcgccttcgggctggtga

SEQ ID NO: 301837 - DNA, 126 bp, Zea mays
gttctagatcgccagtctcttctcctccttagttttcctcttcagttctgcccatctgatggctctagtgcagagctgctccactctcttgtgcaatgcatgtgacttccctgtcctggggtcccg

SEQ ID NO: 301838 - DNA, 335 bp, Zea mays
cggctcgagggcacttgtccggcacctttcagcgtgtgagactatgggatctgccggaaccatctgcacggataaaacgggaactttgactactaaccatatggtggtcgacaagatatgggcatccgaggtctcaaaatcggttaccgatagcagtagtttggaagatctggcttctgccgtttctccagccacattgagcctgcttctgcaaggaatttttgagaacaccagcgcagaggtagtcaatgagaaggatggcaagcagactgtcttgggaactccgacagatgaggcaatatttgagtttggcttgaaactggaaggtcttggtg

SEQ ID NO: 301839 - DNA, 303 bp, Zea mays
gcttagcttgtatgtgctgagctttggctccccccggcgcaccgctgaagcctcgactcgcaggcagccatgccgatgataatcgagcgtgatctccacatggccacagggaacggacaaactagctacacaagaaattctaggattcaagagaaagctatgtttcagatgaagtcggtccttgaggaggccactagagcagtatgcacagctctcctcccacaaaccatggttgtggccgacttaggctgctcatccgggcctaacacactgcgcttcgtcactgaggtgactagaatcata

SEQ ID NO: 301840 - DNA, 292 bp, Zea mays
gccttttatttcactgacagggtaatgactgtgagtttccacaagtatggtgacctgttctttcgctggaacagtgatattaaagatataggagaaagggaaggaaaatattatgccatcaacattccacttaaagatgggatagatgacactagctttactcggctttttaaaacagtaagctcactgcactttatcccttgttattttgtcaattttttagtcctgccatgttatctgagtttgtcatgcagattattgccaaagttgttgagacatatctgcctggtgc

SEQ ID NO: 301841 - DNA, 337 bp, Zea mays
gacgacttgtttcattgattcttcaagagatcgagcttcttttgcaccacaaggtcgaggatgtcttgcagctgcggatcaagctgcggctgcggctcaagctgcaagtgcggcaagaagtaccctgacctggaggagacgagcaccgccgcgcacccaccgtcgtcctcggggtggccccggagaagaaggccgcgcccgagttcgtcgaggccgcggcggagtccggcgaagccgcccacggctgcagctgcggtagcggctgcaagtgcgacccctgcaactgctgatcacatcgatcgacgaccatggatatgattattatctatctagcttg

SEQ ID NO: 301842 - DNA, 271 bp, Zea mays
  unsure (1)..(271): unsure at all n locations
ccggatggaaagggctttattgttggcacgattgcaggcacatgtcgtttctatgatcaatcaggtgaaagcatccagctagagaaagaattgtttgtgcaagggaagaaaaagtcagctgcctgtcggatcaacagcctaaagctatgtgcaattggttccaacagggttataatcacatcaggagattccanaatccgagttgccaatggtgataccatccagaagtttgaagggccttggaagtcgaagctctgtcattaccgtctct

SEQ ID NO: 301843 - DNA, 301 bp, Zea mays
cgcctccgtgcccatgctgctcagccgctacgacaccaagcgcgtcgagggcgccttccgcgccgcccagaccgtgctcatcgtcgaggacctcgttaccagcggcgcctccgtgctcgagaccgtcgccccgctccgcgccgaggggctcgtggtcgccgacgccgtcgtcgtcatcgaccgcgagcaaggtgggcgcgagaacctcgccgctagcggggtcgcgctgcactcgctcatgaccctcacggagatgctcgccgtgctggcgaggcacgggaacgtcggcgatgagaagatc

SEQ ID NO: 301844 - DNA, 332 bp, Zea mays
  unsure (1)..(332): unsure at all n locations
gttcattgcccacttcacctcctacttctgcaacaagaagttaccttgagatgtctaaacagtggaaggcctcacccttgccaactgaacctgttgaactttttattgggatcctgtcatctgctaaccatttcgccgagcgtatggcagttcggaaatcatggatgatttctaccaggagatcatctgatgttgttgcgcgcttctttgttgctctgaatggaagaaacgaggtcaatgaagagctgaagaaggaagcagattactttggggacattgttatagttccattcatggataactatgaccttgttattctanaaactatcgcc

SEQ ID NO: 301845 - DNA, 315 bp, Zea mays
agactctgtctaacgaagctatccaatcttctcacttccaaacactaccactacctgccatacacacattcgagtaatacctcgccttcacaactgacaacatgcctttcactgctagcgatatctgcgagagcctccttgccatcatcctccctcccgtgggtgtcttcctcgagcgtggctgcggtgccgacttcttcatcaacatcctccttaccatcttgggttacatccccggtatcatccacgctctgtacatcattctgaagtactaagcctcttcgcacctcgctcctcagctcggcggcgctactc

SEQ ID NO: 301846 - DNA, 299 bp, Zea mays
  unsure (1)..(299): unsure at all n locations
cgagggcttccatccaaagctatcagacttcggtcttgctaagttgggtcctgttggtgacaagtctcatgtctcaacgcgtgttatgggaacatatggttattgtgctccagaatatgctatgacaggacaacttacagttaagtcagatgntttcataccntgnagtcgtttctctcgcgccgnatcttgncggtcatggcncncttcggtcgnacccggccgcgccaaacctttgtttggcacgcccttttcaatgacagcgcaactcccaaagtggctgaccgggctggagggca

SEQ ID NO: 301847 - DNA, 320 bp, Zea mays
tgctcgatgatgatgatgatgttcctcgaggaggaaatggttcacgggttggctattactaaaacttggcttccaataataataaatatctgaccaactaaaagcaactgcttgagcttaaccccacataaagctagtccacttcagccaaacatgacatttgctgagtacgttgatgtgtactcacccttgctttcacaaaacaccaggttgcctttggtgcaatctatgctcaggtaaagaaggcgtcgaggtggatctccaggagttccaggacgtcgacgagttcgaggattaggctagcgacctcccccagtcag

SEQ ID NO: 301848 - DNA, 300 bp, Zea mays
acgctatcctcactgatatcccctggttggacaacctcggtcgccagactcgttccaaggctgacactcccattgagaacatgattggccatctctccaagttggccatcgagcacgagcatgaccgtgctactggcgcatcccgcttcgtcatcggcactcgtgcccctgaggaagaggatgatgagtaaatgtattaatacccatttttcatttgccatacatctatgatttttggtcccgactcgagggactaagtcatgaggatacggagaacgaactgaatgtggtggagtcaat

SEQ ID NO: 301849 - DNA, 298 bp, Zea mays
cccagtaccctctcaccaccgacaacatcaaatccgtcctcatcgtaagcgctcctcacaatctctcaccttagatccacaaacgaaacagctctccacgttcactctgtttcttccacacactgcgcaggacatgtttggagcaagcagcgagacgtcggcgacgacgctgaagtggacaatggccgagctgatgcggaacccggcggtgatgcggaaggcgcaagatgaggtcaggggagcactcgccggccacgacgaggtggcggaggacagcctggtcaatctgcggtacctg

SEQ ID NO: 301850 - DNA, 299 bp, Zea mays
gctgtttcaagaagaacaactctatagaattgaccactatttaggaaaagagcttgtccaaaacttgcttgtgcttcgttttgcaaaccgcttatttttgcctctctggaaccgtgataacatagctaacgtacagatcgtatttaaggaggactttggaactgaaggacgtggaggatattttgatcaatatggtatcattcgtgatatcattcagaaccacttgttgcaggtaaatatatcttatgaacttcttttgtcgttggtttatgagtgattttccaaacacgtactttttg

SEQ ID NO: 301851 - DNA, 291 bp, Zea mays
tcccgtcctccctcgccttcgcctcgccggcaggagatttccaccaccaccgccggaccaccccgaccctccttccctctcgcgctatggcccaggcgtcgagtcctacgacgtagacatcatggaacagaaggtcaccgtgaagggcaatgtgacacctgacgccgtcctgcaaactgtttccaagactggcaagaagacttcgttctgggaggctgaggccgtgacaagtgaatccgccacacctgccggcgccaccgcctgacaggttcgatgatctggaagtgccca

SEQ ID NO: 301852 - DNA, 326 bp, Zea mays
gatcaatttcatcatttgatcggtttttatcacttttccatcgatttttcatcgactttcgatttatatcactttcttcatcatgactggacgcggcaaaggcggaaaaggcctcggcaaaggcggcgcaaagcgtcatcgtaagattttgcgcgacaacatccagggtatcaccaagcccgctattcgtcgtcttgcacgtcgtggtgaagaaagtgatataaatcgaaagtcgatgaaaaatctcctcttcgcacgagcgcaacaccatccacccaccagttcgaagcggaggcgaccggcaacctgcggcggagatgtcaggc

SEQ ID NO: 301853 - DNA, 331 bp, Zea mays
  unsure (1)..(331): unsure at all n locations
cacatcgacccttaccagggcgacaaggcgtcggccctgctcgtggacttcttcgacaagtgccagcgtatcgaggagaagtacacctggaagctgtactcggagaggctgatgaccctcaccggcgtgtacgggttctggaagtacgtgtccaacctggagaggcgcgagacccggcggtacctggagatgctgtacgcgctcaagtaccgcaccatggcgagcaccgtgccgctggccgtggagggagagccctccagcaagtgatgcgtgacggcggcnacagacctgatcgatcgatgagcgagatggagcactcggagtgtcgtgt

SEQ ID NO: 301854 - DNA, 282 bp, Zea mays
cttgactgacgccaataacagcgaaagatgtttgaataactttagaaagctgtctcctcagactgctggtagcatatatgccccctatgtttattgggatctcagcacatctagcattctcagcatggagtttatggatgccaaggatgtcactgatgttactggcattagatccattggagctcaccctgttgatgcttcagacctagtcagtctagcatttgctgcgatgattttgcagcatggctttgatcattgtgatcaccatgctgccaatatgat

SEQ ID NO: 301855 - DNA, 299 bp, Zea mays
gccgcctgaaaaacccttgcgtcggcgcgtcgctgagctgagtccctttcctttcccccggtcgccgccgggcaagcgccgtccaacctgtgcgtcaccgcctccgccttcagtttcgcctccagcaggggcgccgcgtggggtattcggttcgtcgtcgaggagagacagtcacttctgccgagggagcagggatgaagccggtcgtggggatcgtggtgtcaaacaagatgcagaagtcggtggtggttgcggtggaccgcctcttccactataagatgtacaaccgctatgtcaag

SEQ ID NO: 301856 - DNA, 334 bp, Zea mays
  unsure (1)..(334): unsure at all n locations
aanaaaaacaaaccgtagttttgcctcttcgtgaagccattgatgctgttatgatttctattcaatttgaaaacgtgattgaggacattttgcaggcatgtgaaaacaaaaacccacagataaaatcagaagtagtgcagtttattagtcggtatatttcgaattctcaactaaatttcttaagtaataagaaaaatttgaaattgctgaccaatgctctgattagaactttaaatgacaacgacggcagtgtgcgtgaattttcagccgaatctttaggaatattaatgaaagctgttggcganaaggcgatgacacctcttcttgctgaagt

SEQ ID NO: 301857 - DNA, 334 bp, Zea mays
cggctcgagatcttgttctgccaaacaaagatgaatcactatctgtggatgctcgccaagaaattgacttaaaggttggagtagcatttactcgatttcagacccgatatttccaaggaaaatatggaaaccttgattcaagagtgatttcgtatggtccatgccaaacacctacacttggattctgtgtacaacgccatcagcaaatcaccacatttaaaccagagaaattctggtccttgaaaacgtatattatcaaagatagtgatgaaatacagctagaatgggaccggaagaaactttttgattttgatgttactgtaatgtttcagaa

SEQ ID NO: 301858 - DNA, 332 bp, Zea mays
cagcaggctgcctccacttcgcgcgcaaagcagtaaatcggagtaaccatggacggcggatcctccacaccggcgagccccccaccgacggtatccgcgtcggcggcgaatatggaggagtaccggaactggaagaagaacgcggcggtgctttacgacctcgtcatctcccacccgctcgagtggccatcgctcaccgtgcagtggctcccatcggagtcctcggcccgcagccaccggctcgtcgtgggtacgcacacctccgacgaggcccccaacaacctcatggtcttggacgcggtgctaccgctcccacctcgcctcgctgcagc

SEQ ID NO: 301859 - DNA, 295 bp, Zea mays
catgcatcagctgcaaacaccagctgcgctgaggaactttgactcgactacagtataccttactgatgacttcgccgcaaaggtctcggatcttgaattttggaatgacgcaaagggacataattctactacaaacaatgaactggctttctccccagacatggaggacattgtgcgcaagtacggcatggtgttgttggagatattgaccggaagagttccttcctccgaggatgacggaccactggaaaattgggtgtctcgctattttgaaggcgggatgcgtcttgaggag

SEQ ID NO: 301860 - DNA, 291 bp, Zea mays
cagttcctaaaattttgtaatattattatttgtccattagtgccactgttttggcatgaaagacacattaaaatttatctattacttaatttaaatacataaaaccattggaaattcataactaaaaatccataactccaaaattaataatttctgttcatatgatctcattttaatgtgtatattattatcatgtattttgtttacatgtttggtgtgatgttaattttccctttatactatgtatgtttatattgatgcgagtagacgagcaagctactgtggatcctg

SEQ ID NO: 301861 - DNA, 292 bp, Zea mays
gcggcgatcctccacctaggaaacgtcaacttttccaaagggcaggagatcgactcgtccaagctgagagacgataaatcggtccatcacctgaaaacagttgcggaactgctaatgtgtgacgagaaggccctcgaagactccctctgccagcgtgttattgttacgcctgatgggaacatcacgaagccccttgatccaggctctgcggcgttaagccgagatgccttggcaaagacagtgtattcacgactgtttgactggatcgtagacaagatcaataactcgattg

SEQ ID NO: 301862 - DNA, 166 bp, Zea mays
  unsure (1)..(166): unsure at all n locations
ganagatcacaatgttgtacctcgtgggacttggtctctctgacgagacagatattactgtcaagggtcttgaggtcgttaagaaagcctccagggtctatctggaggcttatactagcattctgcttgtcgagcaatctgtcttggaatcgtactatggacgatc

SEQ ID NO: 301863 - DNA, 291 bp, Zea mays
  unsure (1)..(291): unsure at all n locations
gaagccatcacccagaaagtggatgcctacagcttcggaatggtgctgctggagatcgtgtcagggaggaggaactcgcctaaggtatacaccaccaacagctgccacgtttcttatttcccgttgcaggccatcacgacgatgctccacgacggagatgtgaatagcttggtagatccacagctgcacggcgagttcaacttggaagaggctttaaggctatgcanagttgcattttggtgtattcaggataacgagcttgaccggccaacaatgggtgaagtggttcag

SEQ ID NO: 301864 - DNA, 259 bp, Zea mays
tgtggtgccttcgactacaacctcaacttccacaaggtggtggtggtgggcatcgctgtctgtgccgggctgcacatcatctcccacctgacgtgcgacttcccgctgctgctccacgccacggacgccgagtacgcgccgctggggcagtacttcggggtgccccgcccgcccaactactggtggatcgtgcgctgcacggaggggtggacggtgctggtgatgctggtgctcatggccgtggcgttcaccctggcga

SEQ ID NO: 301865 - DNA, 165 bp, Zea mays
gtccaacggaagtgcgtcagacgtcatccgcgagaagctcgtcattattggagacggtgcctgcggcaagacaagtttactcagcgtcttcacacttggatatttccctacacattatatcccaaccgtcttcgaaaactacgtaaccgactgcagagtagatgg

SEQ ID NO: 301866 - DNA, 320 bp, Zea mays
caaaacacacgaatagccaaaatggtcaaggctgtcgctgtcctccgtggagactccaacatcaagggttccgtcacctttgagcaggccgacgagaactcccctaccaccatctcatggaacatcaccggccatgacgccaacgctgagcgtggcatgcacgtccaccagttcggtgacaacaccaacggctgcacatctgccggtcctcacttcaaccccttcggaaagacccacggtgccccctcgcgacgagaacgtcacgtcggtgacttgggtaacttcaagaccgatgctcagggcaatgctgtcggctccgt

SEQ ID NO: 301867 - DNA, 323 bp, Zea mays
ggcctctggagatctccaacgccgactcggcgacagatgacgaccggagccgggacctggaccgggcggcgctgatgcggcagctggacgagacgcagcagagctggctcctggccgggcccggcgaccaggcgggcaagaagaagaagaggtacgtcgacctgggctgcgtcgtcgtcgaccgcaagatcttcatgtggaccgtcggcaccatcctcggcctcggcgtcttcatcggcttcatcatgatgatcgtcaagctcgtcccgcacaagcgcccgccgccgccgccgcccgaccagtacacgcaggcgctgcacaag

SEQ ID NO: 301868 - DNA, 303 bp, Zea mays
gccgtacaaccttcgagttgctgctgtatatggtggtgtttccaagtttgaccagtttaaagaactgaaagcaggttgtgaagtagtcattgcaaccccagggagattaatagacttgctgaagatgaaggcattgaagatgtttagagcaacttatctggtccttgatgaagctgatcgaatgttcgatcttggatttgagcacaaatacgatcattgttggtcagttagaccagtcgacaacatactttttctgcacaatgcatacaagtagacgtttgcagagaatatgactgatctata

SEQ ID NO: 301869 - DNA, 190 bp, Zea mays
ggcgggcccgccggccgcttctgcgacggccgcctcgtcatcgacttcctcatggacgcaatggatatgccactcctcaacgcgtacctggagtctctaggcacgccaagctttcggaccggcgttaattttgctcaagctggatgttcgatcacaccagcaaagccgacatcagtcagcccattctcat

SEQ ID NO: 301870 - DNA, 315 bp, Zea mays
gcagttagtaagtttttaatattgtgtatagctcctgaaatctgaaaactcttgacgtctgtaatcatgtgaaaaattcgtacaggtaaaatatgttagtggctcctatgatagggtggaaggatttgagttattaaataaggcaatctctgagtatgaaacttcaaaaaacaatgactcgggaagctaccgcagattattttatttggcattgcctccatcagtctacccatcagtatgcaaaatgataagatcatattgcatgagtccatcttcacacaccggttggacaagggttattgttgaaaagccctt

SEQ ID NO: 301871 - DNA, 301 bp, Zea mays
cccttgcctccgatccccaattcctccttcggatctcgcattcagcgcacgcaggtgtgaaggaagggggacgcggaggaagatggggctcgcgttcgggaagctcttcagccggctcttcgccaagaaggagatgcggatcctcatggttggcctcgacgccgccggtaaaaccaccatcctctacaagctcaagctcggcgagatcgtcaccaccatccccaccatcggtttcaatgttgaaactgttgagtacaagaacattagcttcactgtctgggatgtcgggggtcaggacaaa

SEQ ID NO: 301872 - DNA, 283 bp, Zea mays
cggctcgagctcggctactcctccggcttcttctacggcgtcgacggctcgttcgcggacccatgtcacggcagagcctccagaagctctggcagaagtaccgggtggacctggcgttctacggccatgtccacaactacgagacgacatgcccggtctacgaggtacaatgcatgagctcggagaaatcccactactcgggcaccatcagcggcaacatccacgtcgtggtcgggggcggcgtcagcaccctcagcaccttccacgcccaggtccggccgtg

SEQ ID NO: 301873 - DNA, 289 bp, Zea mays
cacaacttcagcaacggcagcagcagcatccattttctcagatgcaacaaccccaagttggtattcctcggcagcctcaacttaggccaccactggcacagactggaatgcagttaggtggtcctgttaggtctcctatcgagagtgggatttgttctcgcaggatactgcagtatttatatcacaagcgtcatcgcccagagaataaccctataacatactggaggaagcttgttgaagagtacttcgcacctcgagcaagagaaagatggtgtgtctcttcttatga

SEQ ID NO: 301874 - DNA, 310 bp, Zea mays
tgcgatgccgaacagtgatttcatgttcgattcggtgtataattaatatctttcagtgtacataatgcaaactttagaactttatttcatccagtcggtctcaaccacctgttatttcatttgttctgctcatggcgaatactccctctgtccccaattaaaatttgctttacaattactgtatgtgttgtatatatatgtttagtttcataatcatccatatgaatatggatgtaaacatctagagctagtacgagtactatttttgggctagtttgagaacgtcatcttccaacgattttcattttct

SEQ ID NO: 301875 - DNA, 158 bp, Zea mays
  unsure (1)..(158): unsure at all n locations
gccattgctcaccgcacaagtgcacgctcacctggcacctcacacacgcagctaagtatctaactccggatgcagaacaaggaatatctcgacatggccgaggtagagaagcatggcctgcagctgctggacttctgngtgagcccattcgggcagcg

SEQ ID NO: 301876 - DNA, 313 bp, Zea mays
  unsure (1)..(313): unsure at all n locations
cttccacctattatatatgtgganagagcatttatggtcaatctgtgccttacaaatcaaacggacaacactgtgggcccttttgaagtatttctggctccaagcatgtcgggtgaagacagagctgttctagttaatgggccacagaagttgattttacctttggtggaggcttttgagtctatcaaatttgatctgagcatggtgaccacccagctaggagtgcaaaagatttccggaattacaatgtacgccgtgcaggaaaagaagtactatgaacctttgcgcgacatagagatttctgttgatgcag

SEQ ID NO: 301877 - DNA, 276 bp, Zea mays
cacttcggcctctgctccttgcacgttcaatctcacctcccaccatgcgtaaacagaagtaccacatcaagattgcgcttactggcgacgttcactctcggcagtcgacgagcagaggacacctgatctacaagcttggacgcattgacaagcgcgtgcttcagacgtctgagaacgaggctgctgcaatgcacaagcggtccttcaagtacgcgtgggtgctcgacaagctcaaggctcagcgtgagacacgtatcaccattgatatcgctctgt

SEQ ID NO: 301878 - DNA, 296 bp, Zea mays
tcttcttgttgtttatgcagaaccggcggcgtggagaactttttccactgtgataaatgtgggtgttgctacagcaatgtcttgaaggattcccaccactgcgtcgaaagagcaatgcatcacaactgccccgtctgcttcgaggtgagagacctccgtttcaacggaacattcactctgaatgttccaatctcttgatattgagaaggtttccctctgttttttttcacagtatctgttcgactccacgaaggacatcagcgtgctgcaatgtgggcataccatccatttggagt

SEQ ID NO: 301879 - DNA, 334 bp, Zea mays
gctcgggttcggccgaggggcgcggccgacggcgcatcacgcagatcgtgtacaagggcgcgcacaaccaccccaagccgctgtccacgcgccgcaactcatccggcggcggtgcggcggaggagctgcaggccggcaacagcagcctgtcggccgtagcggcggccggctgtactggaccggagcactccggcgccaccgccgagaactcgtctgtcaccttcggcgacgacgaggcagagaacgggtcgcagcggacgatcggcgacgagcccgacgccaagcgctgcaggaggacggcgagaacgagggcagctctgcaggcggcggcggc

SEQ ID NO: 301880 - DNA, 162 bp, Zea mays
caccaacgagatcctcgtgatgcggcggatcgtggaggccgtggcgccgcaccccaacgtcatcgcgctgcacgacgtgtacgaggacgcgcgcggcgtgcacctggtcctggagctctgctcgggcggcgagctgttcgaccggatcgtggggcgcgaccg

SEQ ID NO: 301881 - DNA, 283 bp, Zea mays
  unsure (1)..(283): unsure at all n locations
agttctccggggttcggtttcgtgggtgagcggatcgagatggcggcgtcggatgttgagtaccgctgcttcgtcggcagcctcgcanggaccacggacgaccactccctccacaacgcactcagcacctacggcgaggtcctcgagtccaagattatcctcgatagggagaagcagaggtcccgcagcttcggcttcgtcaccttctccacggaggaggcgatgcggaacccatcgagggcatgaacggcaaggagctggaaggcagcaacatcaccgtcaa

SEQ ID NO: 301882 - DNA, 267 bp, Zea mays
  unsure (1)..(267): unsure at all n locations
agtcgtcgtctacaacgccgcccgcactacccccatcgcgtacacactactcgcagaaacaccgatggctcctgccantgcccagcagcagccgcagtgcaactgatcggtgtcggtggtcgaaaggtggtggacgaggtttccggctggctgcgcgtgctggacgacggcagcgtggaccgcacgtggaccggaccgcccgaagacctcccgctgatggagccggtagcgccgtacgcgcgccacgagaagggcacacgctgcacg

SEQ ID NO: 301883 - DNA, 275 bp, Zea mays
aggcggcgacgtggtccacctggtgagatgggtgcagtcggttgtgcgggatgagtggaccgccgaggtgttcgacggcgagctgctgcggtaccccaacatcgatgaggagatggtagagatgctgcaggtcgcgatggcgtgcgtgtcgaggtcccccgagcggcgtcccaggatggccgacgtggtgaggaccatccaggaggtgcgtcggagcggcagcggcaccgccaccgggaccgggacgcggccgtccaccgatgcctccaccccgg

SEQ ID NO: 301884 - DNA, 250 bp, Zea mays
cggctcgagagctaactttgtttatgtcagtcctttttttgtttgtgatgttcgttcatctatttagtactacctccgttcttgaatatttgtcgctcgctagtttatttttaaactaaaacgcgacaaataaaaaagaacggatagagtactttatttcacatgcactacattatgatggacagtttctaatccaaacctatcatctcatccaatttgacagagctgggcttttgagaacatcggtttc

SEQ ID NO: 301885 - DNA, 232 bp, Zea mays
ctccaatggtcatttagtcacatcttgttttaagctacttgctgatctacttagaggattcaggatttcactttcagataatgagcttcagatgcttgttcatacccctatgtttgtagatcttcagacaaacccttcccctgttgccttatcgcttctcaaaacaatagtcaggctaaaattggtttctcacgacatttatgatatagttgttaagataggagagttgatg

SEQ ID NO: 301886 - DNA, 307 bp, Zea mays
  unsure (1)..(307): unsure at all n locations
tcgacgtcgtcgtctccttccgcggcacggtcaccggttccgagtgggtggccaacatgatgagctccctcgagcaggccaggttcgatccggcggacccgcgccccgacgtgaaggtcgagtcgggcttcctctccgtctacacctccgacgacgccacctgccgcttcacctacggcagctgccgaaaccagctgctttccgaggtcactcgcctcatcagcaaatacaaacacgaggagatgagcatcacgctggccggccacagcatgggcagctcnctcgccctcctcttgggctacgactt

SEQ ID NO: 301887 - DNA, 298 bp, Zea mays
ctgacggggaacaatgtggggagcatcgcgctgcccgcggtgtcgctggtgttccagggcggcgcgtgcctggacgtggacgcgtcggggatcctgtacgtggcggacgtgtcgcaggcgtgcctggcgttcgcgcccaacgctgacgacaccgacgtggccatcgtcgggaacacgcagcagaagacgcacggcgtgctgtacgacattggcaagaagatcgtcgggttcgccccgggagcttgctgatccggccatggtttgtgaaaaactccagatcatctgcatccaccaaagt

SEQ ID NO: 301888 - DNA, 300 bp, Zea mays
gaagctacaatcctaaaaccatctgcttcagccttcagctagccccaagtttagtcggccgatcgatcactgaagtagtaatggcctccgccaacagctggaccctcgagatcgcgtcgccggtgcgctccgcagcgcctgttccgcgccgccgtgatggactggcacaccctggcgcccaaggtcgcctcccacgtcgtcgccagcgtcgcagccgtgcgacggcgacggcggcgttggcagcgtcaggcagttcaacttcacctcagtcatgccgttcagcttcatgaaggagaggct

SEQ ID NO: 301889 - DNA, 278 bp, Zea mays
  unsure (1)..(278): unsure at all n locations
tccccaacctctctctctcccccctaggagttggagctcctggctccatctatccgcctgcagatatcacaagcttttcctgctgctgctgctgcagcagcacctgcagcttctccgtctgcagtgcgagcagctgctaaaaattcccccataagcctctggcttcctgcccccctcactttcttggaagcccagcacaacacgaggatcatattcactccctacagtggcgtactagaataccagttgtgcgcanacagcggcaactagcgtgatgt

SEQ ID NO: 301890 - DNA, 309 bp, Zea mays
  unsure (1)..(309): unsure at all n locations
ttcgattctaatgttccaatattaccaaatgaacccttaatttgggacgaaaaaagtagaagtanatagttctaacatcataaacatacatgttattatctttgaatccaaacaccaagaacccttttgttcatcatctatcaattaacttgatgaaatctatgccagagaactctacatgactggggtgacgatgagtgtgtcaagatattgaagaattgcaagcaagccatatctccacgggatgcaggtgggaaggtaataatcttggacgtggtagttggatataaacagtcaaacataaagcat

SEQ ID NO: 301891 - DNA, 300 bp, Zea mays
cggctcgagccctgttcctgtacgacgcgtacacgtccttctcgggccagcctctgtacaacgactgggcaatggcgagcttcaacgtcttcttcacgtcgctgcccgtggtcgccatgggcgtgttcgaccaagacgtgtctgctagattctgtctcaagttcccgatgctgtaccaggaggggcctcaggaccttctgttccagtggcgaaggatcatcgggtggatggtgaacggcgtggccagcgccgtgatcatcttcttcctgtgcacggcgtcgctgcagcaccaggcgttcc

SEQ ID NO: 301892 - DNA, 301 bp, Zea mays
ggacgacacaggcagagccgccggccctcgcttcttggtggggtctagtttctttctcgcctctgcctgtgcctgctggtggtaagtaataacagcgacacggtacccacgcgcggcggcggcggcgacgacgaagacgacatgaccgtcggcgacgacgcagcggcgccggggcgcgggcagacggtgtgcgtgaccggcgccggcggctacgtcgggtcgtggatcgtcaagctcctgctcgagcggggctacgccgtccgcggcaccgtgcgcaaccctggtaacgtcgtcgtagatc

SEQ ID NO: 301893 - DNA, 324 bp, Zea mays
  unsure (1)..(324): unsure at all n locations
tccccatcgatctgcgctcgcgttctatggttatcatctccccttgcgctggttgctgatccgtgctctgcttatcgaatctcctccttggccgcaggtccggcggcgaagggaaggcaagatgtacaccgcgnagaagaagatccagaaggagaagggccttgagccctccgagttcgaggactccgttgcccaggctttctttgatctggagaacgggaaccaggagctcaagagcgacctcaaggacctgtacatcaacaatgctatccagatggatgttaccgggagcaggaaggctgttgtcatccacgtcccataccg

SEQ ID NO: 301894 - DNA, 308 bp, Zea mays
  unsure (1)..(308): unsure at all n locations
tcggctcgagaagacgacttgtttcattgattcttgaagagatcgagcttcttttgcaccacaaggtcgaggatgtcttgcaactgcggatcaagctgcggctgcggctcaagctgcaagtgcggcaagaagtaccctgacctggaggagacgagcaccgccgcgcaggccaccgtcgtcctcggcgtggccccggagaagaaggccgcgcccgagttcgtcgangccgcggcggagtccggcgangccgcccacggctgcagctgcggtggcaactgcaagtgcgactcctgcaactgctgatcaca

SEQ ID NO: 301895 - DNA, 305 bp, Zea mays
ttcaactaatcgacatttatgcatggtattcggtgattagtagtattgtgatatgcacaggtcaaatttattattgggaatcatatacatctaaccagctttcaactcttctttcctccttataaggtacttgccttcaactaatatatatctatgatatcttcaagtttcttccgtcgaagattcaggtcagtgtgttctcagctaccccctgaggtccttgagatcacccatcagtttgagatgataagaggccctactacagatatagaaagaacagccgatccaatgctgacggtggctca

SEQ ID NO: 301896 - DNA, 229 bp, Zea mays
  unsure (1)..(229): unsure at all n locations
aagatggacttggaagaattctgtgcggcagaatcagcccgtatcatttatntcatcccagctttccaaagcctccagctggtacgggctgattgctttggaaagctgggaagaaatcgctggaacgcttttcagcacttcgaacaggagggcaaccgagttatatctgtggaggagttggcgcaggaactatccctcgccccgactcactactccatcgtgcaagact

SEQ ID NO: 301897 - DNA, 285 bp, Zea mays
tgccggaggagccacccagaactctatcagggttgcccaagtaagctctcaggcctcgtttggagacagtatttctggactaccggataaatactacacttttgcaaaatactctggttttcaaaagcttctgggtgtttggatacaagtggctttgtgttttctaaagccatagttttgttaaagctgtagtctttttcgagttctagaaactcctttcttgacctcttttgtctaaaacatggttttttgtatgtctttggattataaaaccacggtttcatg

SEQ ID NO: 301898 - DNA, 256 bp, Zea mays
tgtcgtgtcgcgcgtgaagctctccccggccgcgtccggcggcagcggcggcaaggccggctacgccgactccctcatcgaggaggaggaggggctcaacgaccacaacgtcgtcgtcaagtgcgccgagattcacaacgccatctccgaagaggaacatcggttcttttcaccgagtatcaatatgttgggatcttcatggcgatcttcgccggtgtgatcttcctcttccctgggtcgggtgagggagtcagca

SEQ ID NO: 301899 - DNA, 314 bp, Zea mays
tgttcctggttcatgattatattatcctatttcctctgtttttaactagcttggtggtctgaactcgttgctgcaagttgaagcatcttcgtcaataccacatgtgtcgcaagtacccaccatcatcttaggtatggatgtttcacatggtcatccaggacaagatagaccttcggttgcagcggtggttagttctcgtcaatggcctcttatctctagatatagagcatcagtgcacacccaatctgccagactagaaatgatgtcctcgttgtttaagccgcggggtactgatgatgatggcctcatccggg

SEQ ID NO: 301900 - DNA, 242 bp, Zea mays
caagagtccccgatggctcatcgcgttctcctcctcctctctctcgcggctgccgccgcggtagccgccgccgtcgacgcggaggacccgctgatccggcaggtggttcccggtggagatgacaacgatctggagctgaacgcggagtcccacttcctgagcttcgtgcagcggttcggcaagtcctacaaggacgccgacgagcacgcgtaccggctatccgttttcaaggccaacctgcg

SEQ ID NO: 301901 - DNA, 294 bp, Zea mays
gtggcgcgacgctcgacgccgcgctactgcacatgcgccatggcggcagggtcgccgcctgcgggatgatctcccagtataacctcggaggaacgggacggccatggcctacgcaatctgttctacatcatctcaaacgccatcagggtggaggggttcaccgcccttgactggttccacctgtacgcaaggtttgaggaggagatggccaggtacatcaaggaggggaaggtggtggtcgtggaggatgtggctgaggggatcgagagcgcgccggcggctctaatcgggttg

SEQ ID NO: 301902 - DNA, 318 bp, Zea mays
cgacgccaaaccggcgaattccgtggtgtacgtctccttcggcagtctgaccacggtggcgagagaacatctcgaggagctgctccggggccttgaggagagcggcaggccgtacctctgcgtcatccggaaggacaacaaggctgcactcgcggatgccgagacgaaggtagacgaggagctcaagaacggcatcgtagtggagtggtgcgaccaggtgcgggtgctgtcgcacgcggcggtcgggtgcttcgtgacgcactgtggctggaactcggatgctgagagcctggcggctggggtgccccatgtgtgcgt

SEQ ID NO: 301903 - DNA, 262 bp, Zea mays
cacaaaaaccctagcacgcaggcgcagcaggcctgcacccaaagcttccggagaattcctcccttgccccgccgtcgcatcctcttcgaagttcgaatcgaatcgcgccgcgatcacccacctcatggcggacaaggagcctgtcgtggagcggcagaagcggtgacgacgagagacgctcagtcgcgcgcgcgtggtagagagacacggcgccagtagtccatctgcgctgagagtagcgcacacccgagagacagactct

SEQ ID NO: 301904 - DNA, 291 bp, Zea mays
ctactctccaagttctcttctccgtcgaccgctctacacgtctcttgtcgacctggacaccgaggtggaagaaggaagcagtcagcagatggatccatggatcagcagccagccttctctgagcgcagaacgtggcgcagggcagaaggaggacaggcgccaacagcagacgccggtagccgtcgccttgcccaggcacaagctgctcgtcgaggagaacttcctcctgccgcctccaaagaaagaaccagaggtcgcggctctcgagacggagctgcagcggatgggcga

SEQ ID NO: 301905 - DNA, 305 bp, Zea mays
tgtcaggatgacgtcgtcctccgtcttcttcctcctgctcgcttgcttcgccacatgcgccggcgccgccacgttcacggtacgaaacaactgcgggttcacggtgtggccagcaggcatcccggtcggcggcggcaccagctgaagccgggctcgacgtggactgtcaacgtgcaggccgggaccagcggaggcaggatctggggccgcaccggctgctccttcagcggcggccgggggcgctgcgcgacgggcgactgctgaggcgcctactcctgcagcctgtccgggcagcccccggcgac

SEQ ID NO: 301906 - DNA, 310 bp, Zea mays
atcccaccccaattaacccggaagaagagctcgcaacgcccccggtgggatcgccggacacctacgcgggcctcgccttgaaatccctgttggaaaccgaggaggatcatgtcgcgggtgtcgtcgttgtcgccgtccttatcgggcgacgaggtggaggtggaggaggaagacgacgagggcgtcgacgggtaccgcaacggtggctaccacgccgtacgccccggggaccagttcgccgccggccgctacgtcgctcagcggaagctcggatggggcaacttctccaccgtctggctcgccgtcgacg

SEQ ID NO: 301907 - DNA, 298 bp, Zea mays
accggctgcagcacctgacggacaagagcgacgtgtacagcttcggcgtggtgctcctggagctgctctccgggtgcaaggtgatccagcggttcgagggcagctgcacgcccaagaacgtggtggacgtgaccgtgccgcacatcgaggcggaccgcgtgcaccgggtgctcgacgcgcggctcccgcttccgacgccggcggagatggaggcagtcgcctacgtcgggtacctggcctcggactgcgtgcggcccgcggggcgcgatcggctcatcatgagcgaggtggtcggcgt

SEQ ID NO: 301908 - DNA, 290 bp, Zea mays
tgccatttctggacagcacatgctagtgaaggctgctactggcactgggaaaactcttgcgtaccttgctccgattgttcacgttctccagatgagggagcctcgtgtggatagaactcatggaacttttgcgttggtacttgtgccaacgcgagagctatgcttacaggtttacgggattgcacaacagctggttcatcgttttcactggattgtccctgggtatgtcatgggtggggagaacagagcaaaagagatagcaagactgcggaaaggaatatcaattctca

SEQ ID NO: 301909 - DNA, 267 bp, Zea mays
  unsure (1)..(267): unsure at all n locations
gtgcagcggtgaaggcaggaggaggaggaggacataggaggggataggagccgccgcagacatggctggcggggtggccgttggggtcgtggcgctgttcttggctgcagcttcatttggggctaatgccaacaccgactcgaatgatgtgaatgccctcaatgtgttctacacaaccatgaattcgccgccgcagctgacgaactgggtgtcncaaaatggggatccctgtgggcagtcgtggctgggggtaactgctcgggttcc

SEQ ID NO: 301910 - DNA, 302 bp, Zea mays
ctgccggactacctgcgcgacaacgagttcatccacgcgcactaccgctgcgagtggtccgtccgcgacgcgctgcgcagcgccttcgcctggcacaacgagacgctcaacgtctggagccatctcggaggcttcttcctgtatctgtacctcgccgtcgccgagccaacggggacggtggccggcgccggagccggagtcggagccggagccgccccgagtatcgtgacgttcgtgctcgcgtcggccaacacctcatggtcttcgtgggaggccagcagtaactcgagcttgacggccag

SEQ ID NO: 301911 - DNA, 270 bp, Zea mays
ctttataactgggtatactgaaatgtcgcaggaccccactacacactgatgtctttggaggtttctatttgacatgtccaaaccatctcaaccgatattggacaagcttttcttcaattggtgctacctctatcctatcacgtcaatattctacaccgtacaacatagcagggctaacatcttcatcaatatacacgtctttgagcattgatcctaaataatgacagcatcgccaagaaggaaaagggagctcattcctaaagatgaagt

SEQ ID NO: 301912 - DNA, 294 bp, Zea mays
cgccaaacacctgcctggcaggaccgacaacgaggtcaagaaccactggaactcgtacctcaagaagagggtcgagggcaaggatggacccagcacgccgccgtccgattcagacgactcgcattgcgccaagcccgggggcggaagcacggcgcgggagacgggagacgaccgcccagcggactactccggctcgtcggagccgcgcgagccgtcgtcgtcgtcgtcgcccgacacgagctgcctgacgggcccgcccaaggtcatgttcgtggactggctcgacatggactg

SEQ ID NO: 301913 - DNA, 297 bp, Zea mays
tggagacatcttcgagaagctgaaatggctcctaaagaacatgagtcctctcaaaaggctgctcctgccaagaagggtgatgccaagacccaggccttgaaggttgccaaggctgtgaagtctggggcagccaagaagaagaccaagaagatccgcacgtctgtgacatttcaccgccccacgaccctgaagaaggctagggaccccaagtacccacgaatcagcactaccggaaggaacaagcttgatcagtaccaaattctcaagtacccccttaccacagaatcagcgatgaag

SEQ ID NO: 301914 - DNA, 285 bp, Zea mays
cggctcgaggctctaataccttattctggacagataagtgcgcttaatggatgctccatcagagaccttgctccagaagtggcgtccaaggtgtctaaacgagctctcacctcattgacagtgagtcaggctcttatgaacaggcaatggatagctcatatcaaaacccccctttccttgattggaattcaacaatttcttttcttatgggatactttaggggaagtgcagctttctcaggaggaagaccgccatgtttggaggcacgaggcatcagggctgttc

SEQ ID NO: 301915 - DNA, 282 bp, Zea mays
tgcttacagacattccctatggattcaagtcagatatatggtctcttggatgttgtatgtatgagatggctgctcatcgacctgctttcaaggcttttgatatggctggactgataagtaagataaatcgctcctccattggccctttgcctactttctattcttcatctatgaaaacacttatcaaaagcatgttgaggaagagtcctgaacatcgacctactgcatccgagattataaaaaatccatacctccaaccttatgtgaatcaataccgtccat

SEQ ID NO: 301916 - DNA, 194 bp, Zea mays
tcttcggagagtggttcaacgcggatccagagacaattgtcgcccaggcgcttcagactggagcaggcccaaacgtgtcggacgccttcaccatcaacgggctcccgggccctttgtacaactgctccagcaaagacacgttcaagctgaaggtgctgcccggcaaatggtacctgctccgtctcatcaacgcc

SEQ ID NO: 301917 - DNA, 302 bp, Zea mays
ggagaaagaaccaatgcttgcagccagaataaccgttgaagattctcttcgtcttcttctggttgttgatgatattgatcggtttttacagtctagccagccacaggacagcagtttccaactgaagcgaaggcgagaggtcctgcttgaaggcttagctacatcactccagcttgttgacccttttggccccaacaaacatggccattcgggtgggttggcccctaaggatgacctaatttttcttcgtattatttctctgcccaaaggacgtaagcttttggcacgctatcttcgacttc

SEQ ID NO: 301918 - DNA, 300 bp, Zea mays
caagaagggacataagaatgaagcattttagggtgtcattcatcgtcacggcgctgtgcctgctgggctcggcatggtggggctacgaacatgccggcgtggccgcgcgctgacggcgatgggtatcgccgcgattctcgcggtcatggaagtctcgttgtcgttcgacaacgcggtggtcaacgcctccgtgctgaagacgtgggacgagttctggaaaaagctgttcctgggcgtcggcatcatcatcgccgtgttcggcatgcgcctgctgttcccgctcgtgatcgtcgcggtggc

SEQ ID NO: 301919 - DNA, 238 bp, Zea mays
gtacttcagggacgagcaccccaagttccccagcggcgggctcatgacgcagcacctggcactcgctcccgctcggctcctgcatcgacgtcaagggcccgctcggccacgtcgagtacaccggtcgcggcggcttcgtgatcgacggcagggaccgctacgcgcgccgcctcgctatggtctgcggtgggagcgggatcacgtccatgtaccaggtcatccaggcggtgctgcgcga

SEQ ID NO: 301920 - DNA, 297 bp, Zea mays
cattgactaccgcgactatcttcgatggttgtctcgtggcaattccagatctcacaactcttcatggattgctttctgccgtctgtctcgtaccagaatcactggatacaagcgtaaggttctcggtgtcccatccgagaagctttcgggtgacgtcccacgtgcccgtatcaccaacatcttcttttcagagattcttggtcccctggtcttggttgcagtcacactcgttccttatctcttcatcaacgctcgtactggtgtaaccaggatggtcaaaaggcgacctacgccctt

SEQ ID NO: 301921 - DNA, 266 bp, Zea mays
  unsure (1)..(266): unsure at all n locations
gtagatagtgatgctattgttgcttttgtgaaagctctttgcaaagtttcaatgacagaggtgcagtctcctacagatcctcgtattttctgcctaacaaagattgttgagattgcgcattacaatatgaaccgtattcgtttggtntggcncgtatttggacagtctgtcagattctttgttctgttgggtgtcaagaacttcagtgcatattgtatggaccttaagcactagctagagttctgaagagagactgcaatatattc

SEQ ID NO: 301922 - DNA, 305 bp, Zea mays
catcattctccctattgtcggcaacgcgctgaacatgtcaccgccatcaaggtcgcatacaaaaaccatatggatctcgcgatcggtgttgctgtaggcagttccattcaaattgctctactccttacacccgtcatggttatcctcggatggattatggacaaagacatgtctctttactttacactatttgagactgtctgcctgttcgtttcggcgtttattgtcaactttcttgtccttgatggaagaagcaattatcttgaaggtgctctgctctgtgcggtgtacatcatcattgctgt

SEQ ID NO: 301923 - DNA, 127 bp, Zea mays
gatacttcatcattataaaccctagagtttggtggggattgttggatcttttatgggcttggcgcatttattgaataaactctatggtgtgtaatggtggagaataccaatagtaacacattggaag

SEQ ID NO: 301924 - DNA, 297 bp, Zea mays
cgatccccaattcctccttcggatctcgcattcagcgcagcaggtgtgaaggaacggggacgcggaggaagatggggctcgcgttcgggaagctcttcagccggctcttcgccaagaaggagatgcggatcctcatggtcggcctcgacgccgccggtaaaaccaccatcctctacaagctcaagctcggcgagatcgtcaccaccatccccaccatcggtttcaatgttgaaactgttgagtacaagaacattagcttcactgtctgggatgtcgggggtcaggacaagatcagac

SEQ ID NO: 301925 - DNA, 301 bp, Zea mays
  unsure (1)..(301): unsure at all n locations
gtcaggagctgttacgatgagggcaagcgtacagctgaaacgttgaccatggattaccaccgtggtgccaaccttgaggttaggatcgcacgtatcttcaatacatatggccctcgcatgtgcattgacgatggccgtgttgtcagtaactttgttgctcaggcactgaggaaggagcccttgacggtttatggtgatggacagcaaaccaggagtttccaatatgtttctgatctggtangtctatctctggccaacatatattgaanaaaaaaagaaacccttgatttggcttttcctg

SEQ ID NO: 301926 - DNA, 311 bp, Zea mays
gtcaactctcgacttggtgctgcgccttacgggaggcatgcagatctttgtcatgaccttgactggcgatacaatgacccttgaggtggagtcctcagacacgattgacaatgtcaatgcaaagatccatgacaaggatggcatcccacctgactagcaacgtctcatctttgccggtaatcagttggaggatgtgaggacccttgctgactacaacatccagaatgagcgcacctctcgattggtgctgcgtcttaggggtggtatgcagatctctgtgaatactcttactggtaataccatcactcttg

SEQ ID NO: 301927 - DNA, 261 bp, Zea mays
ctccagagctcatatttggtgccactgagtataccacagcgattgacatttggtctgctggttgcgttcttgctgagcttatgctagggcagcctttgtttccaggtgaaagtggagtggacaactcgtcggatcatcaaggtcctggtatccaaaaggaaggattaatgctgaccggttaccagagtttagtccacgatcaagctcacatggcacaagtattcacaaagatgcgcaaagtgtgatctgctctcggtatca

SEQ ID NO: 301928 - DNA, 300 bp, Zea mays
cggaaaccgagcacccgcacccgcacccgcccggggtggaattgggaactgagaaggaaaaaaaaacacccacacccacacccgctctgccccatccgcgcgcccctcctcctccaccgcccgtcccgccgccgcccggccgtctggtggcgatggcgtaccgggcggacgacgactacgactacctcttcaaggtggtgctcatcggcgactccggcgtcggcaagtcgaacctgctctcgcgcttcacgcgcaacgagttcagcctcgagtccaagtcgaccatcggcgtcgagttcg

SEQ ID NO: 301929 - DNA, 275 bp, Zea mays
tgtcatttcctatgtggtgccagtatacattgcagagatatctcctcataacatgagaggagcccttggcgctgtgaacccgttgtctgcaacctttggtgtcctgctttcctatgtgcttggcttgtttttcccttggaggcttcttccattaataggaaccctgccctgcttactgttggtggctggtctattcttcattccggagatctcaagatcggctggcgagatgaatatgaatgatgattgcgagacttctctacaagttctgaggg

SEQ ID NO: 301930 - DNA, 314 bp, Zea mays
gttctttgaacagaacacttgaggctacagcaccaaatttaacgccggttcgcagaactgttagagagcaaaagattattgtgcaggctggaaagatgagtgatggatacagatggcgtaagtatggacagagaattgtgaagggaaatccaaaccccaggagttattaccgctgcacgcacggtggatgccctgtccgtaagcatgtggagaaggcgccagatgatgttaacaatattgttgtaacgtatgagggcgaacacaaccacgacgaacctttcagaagcagcagcataccagtttctgtaatcagt

SEQ ID NO: 301931 - DNA, 270 bp, Zea mays
gcacaccctccatctggtgctccgcctgaggggcggtatgcagatctttgtgaagaccttgactggcaagaccataaccctggaggttgagagctctgacaccatcgacaacgtgaaggctaagatccaggacaaggaggggattcccccagaccagcagcgtctgatgttcgccggcaagcagctggaggatggtcgcacccttgcagactacaatatccagaaggagagcaccctccacctggtgctccgtcttcgcggtggttatta

SEQ ID NO: 301932 - DNA, 235 bp, Zea mays
cacttggcaaacgcaagtcagtttttttttggagggtccatctctgatggtcggcctcggccggatgggtgatgggtgcagctgggcatgggcagcgcggtggagacgctgtgcgggcaggcgtacggcgcgcacaagcaccgcatgctgggggtgtacctgcagcgctcgacggtgctgctcatggccaccgccgtgccgctgaccgtcgtctacgccttctcggagcgcatcc

SEQ ID NO: 301933 - DNA, 298 bp, Zea mays
  unsure (1)..(298): unsure at all n locations
cagcaaacaggagcacaaccaattctggtggcgttaccaactggtaacatggagaattggggagagtcagctatggctgatagccctatgactgacacatctacagatccagacactgatgagaggaaccagatgtttgaacaaggacttgttgctgtccccacagcatctgattctagtgacaaatcaagggacaaactagatcagaagacacttcggcgtcttgcccaaaatcgtgaagctgccaggtaaagccgtttacganaanaggcatacatccaaaaccttgagagtagca

SEQ ID NO: 301934 - DNA, 312 bp, Zea mays
cgactctgccatatttgaccttggcgtcccgattctgggcatttgctatggctgccaagagctcgcatggcagatcaactcggccaacgtcgcccgcggcgaggcccgcgagtacggccacgccgacgtgatcatccacaaggttgacaaccacgtcgaccgtctgtttgccggcctcggtgagaccatgcacgcctacatgtcccactttgacaagctggtgtcgctccccgagggctttgtcgtcgtcgccagcacctccaactccgagtttgctggtatcgccaacaagaccaagcgcatctttggtgt

SEQ ID NO: 301935 - DNA, 303 bp, Zea mays
cgcaggacggtgagctcgccggcgtcctcggaggcagcgggggcacgaacatcatcgccacggtggtccaggtgttcgtgaaccacttcatcgtcggcatggaccctctggcggccgtccagcatcccacggtgtaccacaagctgatcccgaacgtcgtgacgtacgagaaccagacagtgggcgacggcgaggtgatcgcgctgggcggcgcggcgagggcgttcctggaggagaggggccaccggcttcgcagcacggactcgggcgccgtgtgccagttcatcgtgcacgagctggcgg

SEQ ID NO: 301936 - DNA, 205 bp, Zea mays
tgtgaagccgccgccgctgcagtgtccatagccaccgcagagactgagatggggggttttgtcaatacccacaagaccaatgcgtacttcaagcgtttccaggtgaagttcaagagaaggcgcgctggcaagacagactacagggccaggataaggctgattaaccaagacaaaaacaagtacgatacacccaaatacagatttg

SEQ ID NO: 301937 - DNA, 147 bp, Zea mays
caacgccgaggcgttgtcgagggcgtacgcgaggtagtcgcggcggccggtggcccggtgcagccagagcgccgcccacagcagctcgtcctggtagccgctggaggacgggtagtagctcttgaccacgtcgacgctttcgtcgta

SEQ ID NO: 301938 - DNA, 283 bp, Zea mays
aaatcctgttttttagggaatgtataagtcctgtattgagcaacagtgtttattatcacgagcataacaactctagtatttgtttgcagactgttgcactcgttggagagagtggtagtggcaaatcaacggcaatttcattgctccagaggttctatgacccagatgtaggccatatactactagatggcgtggacatacagaagttccagcttaggtggttaaggcaacaaatgggcttggttagtcaagaaccagctttgtataatgacacaataagggc

SEQ ID NO: 301939 - DNA, 315 bp, Zea mays
acgagttggattgggttcaaagttgggcttttggacagctgtggtgtgcacggcagctctgtgacttgtacagaggaagggaggaagaaagcggatccatggcgtcgaagcggatcctcaaggagctcaaggacctgcagaaggatcctcccacctcttgcagcgcaggtgattcagattccgcccgcactgctacttcttttaattttccatgatgggatacgactttctcccgtgcgctcggctattagcggtgcgatgcgattcttagtgcggagttgctagatctgtgcgtatacatgtacaggggacgct

SEQ ID NO: 301940 - DNA, 309 bp, Zea mays
ctagttctagatcgcgagcagccccccatttttttttaaatttagtaactctgtgttgtaggcttccttatgctgtggtacatgatacattatatttattttctcaatgtgcgtagatgtatacatcgctcccgaggtctacaaaaacgaaccatttgacagaagtgtagatgtatttgcatttggtctcattctttatgagatgattgaaggagctcctgcttttcacccaaagccacaagaggaagcagctaagatgatttgcttagaggggctgagaccaccattcgagaataaaccgagatacta

SEQ ID NO: 301941 - DNA, 312 bp, Zea mays
cttattttcacgagttcaccacaagagaactagtgaaaatgagtgaaccaaacaagttagtaccacaaggacaagaagaatatgattcaaactgggatgaagtgatcgacaaattcgacgacatgaatctgagagaggagctgttgcgtggcatctacgcatatggtttcgagaagccctctttgattcaacaaagagccatcgttcccttggccagaagatacgacatcatcgcacaagctcaatccggaactggcaagaccgctacttttactattggtatcctcaacaaatcgatgtgactctccttga

SEQ ID NO: 301942 - DNA, 169 bp, Zea mays
tgtccagcttccttcggccttcctggcagcttcttgactctcgtgaacagcaatgagaccttgttccgaagtatcttcatgcatagatatgctggatgaagaatggcttcaaaggcattgagcgtccctcgacaatgatggcatgtatggatactcctatcacaatatc

SEQ ID NO: 301943 - DNA, 161 bp, Zea mays
gggaacttgcttttggattcttatcgaaagtgaatccctctaacacttcagttagtgttttatgataaaatctttgacacaacaagtgttaaaatcttagtcactaggcaagaatggaaagagcttctttacctgcttgagaggggagtcaaacagagtct

SEQ ID NO: 301944 - DNA, 164 bp, Zea mays
caaacgcccccactcttgcaatactttggcccattgctaactcgagggaagctcaacgcctttcagtctcttgagctatctcgacttgtcgtcaataagaacaaaaataatcttctgaaaaattggtttgcagaagataagctggagggaagcagtgcagaaga

SEQ ID NO: 301945 - DNA, 281 bp, Zea mays
gccggctgcgcgccgacgaggtcccggggatcgtcgacgacttcaggcgcgccgcgcgcaacgcgaccgaggccgggttcgacggcgtggagatccacggagcgcacgggttcctcctggagcagttcatgaaggacggcgccaacgaccgcgccgacgagtacggcggcagcgtcgagaaccggtgccgcttcgtggtcgaggtcgtggacgctctcgtccgtgaaatcggcgcgagcgggttggcatcaggctctccacgttcgcggactacttgaact

SEQ ID NO: 301946 - DNA, 318 bp, Zea mays
gacgacttgtttcattgattcttcaagagatcgagcttcttttgcaccacaaggtcgaggatgtcttgcagctgcggatcaagctgcggctgcggctcaagctgcaagtgcggcaagaagtaccctgacctggaggagacgagcaccgccgcgcacccaccgtcgtcctcggggtggccccggagaagaaggccgcgcccgagttcgtcgaggccgcggcggagtccggcgatgccgcccacggctgcagctgcggtagcggctgcaagtgcgacccctgcaactgctgatcacatcgatcgacgaccatggatatga

SEQ ID NO: 301947 - DNA, 317 bp, Zea mays
cagaaacacctggaattgttacctgaaaagttgcagttgatctgtttcttttctcagtatttattgtattcagttatactgaatctccgagtgcaaccgtttaacctcctcagtatatttaatttcagacaatgctagctaaagctgtggctactgagtgcaaaacaacttttttcaatatttctgcctcgtcgattgtaagcaagtggcgcggtgactcggagaaactagtgaaagtgttattcgaacttgcaaggcatcatgcaccatctactattttccttgatgagattgatgctatcattagtcaacgtggt

SEQ ID NO: 301948 - DNA, 304 bp, Zea mays
gacaaatttatgagctttattgctggccataagccagagaaatgtaaacttattgtttcttcacataattatgaatatactccatcatgtgaggaaattacaaatcttgtcgctagtatacaagcagttggagctgatatagtgaaagttgcaacaaccgccaacgacattgtcgatgtatcacggatgttccaagtgatggtacactgccaagtgcctatgattggactcgtaatgagtgacaaaggtttaatgtcaagagtgttagcgcccaagtttggtggatatcttacatttgggatac

SEQ ID NO: 301949 - DNA, 272 bp, Zea mays
gcttcgaaaaggttcttactatgcttcgttggaacttgttcaggctttatgtgatacatcttatggcctggtagacatatttcctattgaggatcgtaagattgccctccgggagtctcttacagagatcaatagccagattgcttctgctgaaaaaaatggaggagtatgctttccgatgggaaagggcatatatcgagtggttcatatacctgaagacgagtctgttcttctgaattctagggagaaagctccttaccttatatgagttg

SEQ ID NO: 301950 - DNA, 300 bp, Zea mays
cctacctctccagcgtcctcccgtctccgtcgtctcgtctccgctcctcacatcgccatccatgggcaatatcaagatgcggaatcaacggtttctgaaggatcggcaggctcgtggccagggtcgccctgcatagcgaggatgtcgagctcgtcggcgtcaacgaccccttcatcgccacggattacgtgacgtacatgttcaagtacgacaccgtgcacgcgccaatggtagcacagcgacatcgccctcaaggactccaagacgcttctcttcggcgataagccggtcaccgtcttt

SEQ ID NO: 301951 - DNA, 305 bp, Zea mays
cgatcatcgacatcttctcccacgccagctccgacatggtcgacatccatgctgccgtgctcttccaggccctccactgtgagaagaactaccttcgcattcaggtacagtgtatgtacaggatacatgaaaacatctaacatggacatactaaagcaaaaaacaaaaatgttcttcatataaaacggatgacgaccattgatggctgctattatattggacgcctgtgtgtgtaggatgatactctgattgggaacacatcatcagtggacatcgcgaccaaggagaacatggagtctctgatc

SEQ ID NO: 301952 - DNA, 309 bp, Zea mays
agactatggagcaccaagctgaatgctaatcttgtctgttacaaaggacacaactacccggtttgggatgtccaattcagtccagttggccattactttgctagtgcttcgcacgacaggactgctagaatttggtcaatggataagatccagcctttgcgaataatggctgggcatctttctgatgttgattgtgtccagtggcatgtaaactgtaactacattgccactggctctagcgacaaaactgtaaggctatgggatgttcagacgggtgaatgcatacggatgtttattggtcataggagt

SEQ ID NO: 301953 - DNA, 286 bp, Zea mays
gcgccaacgtgctaggcctcgtcaaggtcggcctgccccagcacgagcgatgctgcacactgcaggacgggctcgtggaactcgatgtcgcactgtgcctctgcaccgacatcaaggacagcgtcctcggcatcgagctccatatggcacttagcctacatctgatcctcaacgactgcggcaagatttgcgacgatgacttcagctagcccaactaattgagctgaatatgcagatagaaccagcatccgacgtatgtaccccttaatatacgatctcgcgcatc

SEQ ID NO: 301954 - DNA, 360 bp, Zea mays
ctttctcactattctcagtctactatagagatgagtgccatggcatggtagcctcaataacaacagatatagtttacttgtgataaactgaagagatagtcatgaacagcgtcctggaaaatcaccagatactgcccaatctgaatctatagagctaagggaattctgtctgtgttatgctcctctaagtgctgagcctcctgatctgatgttgccccgtgaactttgagttccaaaactacacaatcatcacaagcaagtgcaaagggccaaagtttccagccggcccatgctgtgccgcactcaatgagttcgcgtgcccttactatacgtacctcaatgacgagagcaacgactgtg

SEQ ID NO: 301955 - DNA, 285 bp, Zea mays
agctcccatatccgctcccctacctctccagcatcctcccgtctccgtcgtctcgtctccgctcctcacctcgccagccatgggcaagatcaagatcggaatcaacggtgagtctgtacccccaacacaaactcgttcttcctgctcggttcgttgggtctggactctggagtgatctgagtggggtccctgggcgctgcgtgctcaggtttcggaaggatcggcaggctcgtggccagggtcgccctgcagagcgaggatgtcgagctcgtcgccgtcaacgac

SEQ ID NO: 301956 - DNA, 285 bp, Zea mays
ggggcgcgggaagtccgtggtgtgcgaggccgtgatcggggaggaagtggtgaagaaggtcctgaagaccgacgtgcagtcgctggtcgagctgaacacgatcaagaacctcgccggctcggccgtcgccggcgcgctcggggggttcaacgcccacgcgagcaacatcgtgacggccatcttcatcgccaccggccaggaccccgcgcagaacgtggagagctcccactgcatcacgatgctggagcccgtcaacgcagggagagatctccacatttccgtcac

SEQ ID NO: 301957 - DNA, 275 bp, Zea mays
ccccgatcttgcgaacaacagacagtaaacgcccccagctcgtctgttcttgtcaactttattgttgttcttcaattaccagcaaatatggcggcaggcgcgcaggttatcgccaactctggccacgatgacatgattcacgatgcggtcctcgactactacggccggaggttagcaacctgctcctcggaccgcaccatcaagatctttgaggtggagggcgagacgcagcggctctcggaaacactcaagggacacgaacgcgccgtctggtg

SEQ ID NO: 301958 - DNA, 270 bp, Zea mays
ctctaatcagcttcttttcggattttctacagagaaaaaactgctatttcaaacatgtccattcaaaagatcttcgctcgtactatttttgacagccgaggtaatccaactgttgaagttgatttgaccaccagcaaaggattatttcgtgctgcagttccttctggagcttctaccggtatttatgaagcattagaacttcgtgatggagataaagctaattatcatggaaaatcagtaaacaaagctgtttcaaacgttaatgatatc

SEQ ID NO: 301959 - DNA, 256 bp, Zea mays
ggcggatgctgatggaaacgggtccttggattatggagaatttgttacactatctgtcatctaagaaattggaaatgatgagcatcttcataaggcatttgcatactttgaccggaaccagagtggttatattgaaatcgatgaactccgtgagtcattagctgatgaccttggacagaatcatgaagaggttatcaatgccattatccgtgacgtagacaccgataaggttcgtacttcttgatcaatcggtttt

SEQ ID NO: 301960 - DNA, 247 bp, Zea mays
acgccgtctacgcgtccagataagggattgaatactccgaatcataagcagaatggcgtctgtggcctgcgactcaatcattgaagtgtgtggtgactggtgatggtgctgtcggcaagacatgtctccttatatcatacaccaccaatgctttccctggcgaatacattccgaccgtctttgacaactactcggccagtgtcatggtcgacggccgaccgatcagccttggcctctgggatacagc

SEQ ID NO: 301961 - DNA, 291 bp, Zea mays
  unsure (1)..(291): unsure at all n locations
tactcactagcggtagtcacaatggcaggcacaaagctagtatcactggggctcattgttctcatgagcatggggttagcaaatgctgtgagggtggctagattctctactgctgatgggagtggacaaggggggggagngggtggcggttacgtgaatggtgcgggatcaggggtcgggtctggcaccggagtaggtgacagtagtccggagggtgtccatgcaagtgctggagggggtggcgcaggcggtggaactagccagtatggtggatctgcatatggtgtaggg

SEQ ID NO: 301962 - DNA, 214 bp, Zea mays
cttggaggacataagcttgtcactgttcaacatattcgtccgccagcactgggccacatacggtcgccactactacacacgctaccgccacgagaacgctgatgcacgggctgctaaggaccttacgcgcaaacctagtaaccgtgcagtcatcactttctgatgctaacaagctggtcaaggagatccggtctgatgtcttctgaagtacctg

SEQ ID NO: 301963 - DNA, 272 bp, Zea mays
tggtgaggataaatgctttggttgccaaggctcaaaagacacctgatgaaggctggatcatgcaagacggtacaccatggcctgggaacaatcctcgtgaccaccctggcatgatccaggttttcctgggtgagactggtgcacgggactttgatggaaatgaacttcctcggttagtgtatgtgtcaagagagaaaagaccaggctaccaacaccacaagaaggcaggggctatgaatgctctggtccgagtgtctgctgttctgacaaat

SEQ ID NO: 301964 - DNA, 275 bp, Zea mays
agcatttgcccgagtggtaatgctatatgtggatatggaggtcaatggtgtacctttgaaggcttttgttgacagcggacgcaatcgactatcatatcaaaaagttgcgctgaacgttgcgggttgctgaggcttcttgatcagcggttccgacggattgctgttggagtcggtcaatcagagatactaggaagaatacatgtagccccaatatagattgggaatatattctatccttgttctttcaccgtattggatgctcctaatatggaatt

SEQ ID NO: 301965 - DNA, 292 bp, Zea mays
gggagaatggcatcttcgattacaaggttcttcctcttcagggctcacaggagatttatgaccaagccaccggctccagctactgctataacccgcagacgagaaagctcgtttcttacgatacccctcacgctgccagagtcaaggctgattacgtcaagcagtggggtcttggcggcggcatgtggtgggagagcagcggtgacaaggagggccaagacagcttgattggaatcgttgtcaatgagtttggcggcccgcaagcgctccagaggaaggataactgcatcga

SEQ ID NO: 301966 - DNA, 278 bp, Zea mays
cggctcgagctcgcgcgcgcacgtaggggagcgcggtagcaagaggaaagccatggctacgccggcggcgttgatgaagttgtacgggtgggctatctcgccgttcgtgtcgcgggctctgctggccctggaggaggccggcgtcgactacgagctcgtccccatgagcccccaggccggcgaccatcggcgcccggagcacctcgccagggaccctttcgccatggtgccggtgctcgaggacggcgacctcacgctctttgaatcccgggcgatcg

SEQ ID NO: 301967 - DNA, 311 bp, Zea mays
agcacaatcgcctcgccttcccttccccaccagcccgtctctctcttctctctgactctctctctcgtagccgcgtccacctcgcagcagcaagcaagcgcgaccaaatggcgcctctaggagacggcggagctgctgccgcggcggcgtccaacaacctggtggtgtcgttcggcgagatgctgatcgacttcgtccccgacgtggccgggctgtcgctggccgagtcgggcggcttcgtcaaggcacccggcgacgacgagttcgggcacatgctggtgaacatcctgaagcagaacaacgtgaacgcg

SEQ ID NO: 301968 - DNA, 317 bp, Zea mays
caaaatcctttacctgcatcaccgtacaaattttacgttctagttgaaacaacaggaagtgatgaatcatctgacaagacaaaactggaagcttttttgttgcgttcaatggaagatggtttagtagctgatggagttatcgcacaggatatcagccaagcatcaaacttttggaggatccgtgaggcacaggtggatcatcaatcaaatgataagcaagaccatgacctcgcaaagcagtttctacacagaaggaccattcacgggaaaaaaccggcaatatccaaactgaccagatgagcaacttgatgcagaca

SEQ ID NO: 301969 - DNA, 292 bp, Zea mays
  unsure (1)..(292): unsure at all n locations
ganacagcaagcttacccagattctcagcgactcgctcggcgatggttcgaaagttgtaatggtggtgcacgtcagcctatccgaggacgacgtcggcgagacggtctgctcgctgaacctggcgaaacgagccagatcgatcgagtccaacagagaaatcccacaggatctgaaaacgctgaagcagaagaggctcgcggagctggacagggagatccgcgccgccgaggaagagctgaagcgtctcgacgaggagataaggagagcggaggagaaggagatctcactcga

SEQ ID NO: 301970 - DNA, 303 bp, Zea mays
ctagtcgacccggtgcaaaggaacactgtcggcgtgccggcagggggctgggtcgccatcaggttcttcgcggataatcccggtgtttggttcatgcattgccatctggaggtgcacacaagctgggggttgaagatggcatgggtggtcaacgatggcccgttgcctgagcagaagctgatgccgccgccggccgatcttcccaagtgctgaagatccaccgcgcgttgacattgtccaacattatatatgattcgtttctattgcataaacatatcaatggagatacacattgtcgtcgta

SEQ ID NO: 301971 - DNA, 271 bp, Zea mays
  unsure (1)..(271): unsure at all n locations
gggttttgctgctctccgaccccgagctccgaaagccgcagcatcaggcgcggcccccctcgcgtgtgaccgagatggcgctgccgaatcaggggaccgttgattaccccagcttcaagctcgtcatcgtcggcaatggtggaactggtaaaactacatttataaagaggcatctcactggagnatttgcaaagnaatatgaaccaaccattggtgtggaagtacatccgttggatttaaccactaactgtagtaagatacggttctactg

SEQ ID NO: 301972 - DNA, 308 bp, Zea mays
cacagagtcagcaacattcaagatatatgtttttgtaatcagtgcatatgtgggcattaagataattttcagcctacttatgagtgtcccatgttgccatggtttggctgaggcttgctatcgctggtctgctgtacgccttgttaagtggatgcatcaggagaataattatgttggaagaggcatgcatgagagtcaccttgactatatcaaatacgccactttctggattgcgaatcatggtgccaaattttcattacactattttcttcagataagcctcttgtagaaccgacaaggactataat

SEQ ID NO: 301973 - DNA, 303 bp, Zea mays
  unsure (1)..(303): unsure at all n locations
canaaaaataattttgtgcaacacttgcttgttaatggatgtggtggtgcctttttgcacccaacacatgttttcagaaactttgagaggttctctggaaccacctatgaatgcaaggcagcttatccatcctatgatgagtctactgggattgcattgggtaacatattgaagttccgcaaaaagaattggcagtttgacatcattggcggttttatatacttcattttggtgttttcaatgttcccacagtgtaatcttgttcgtatcttaaatgaagaaacttggtctgggcgtctgaaa

SEQ ID NO: 301974 - DNA, 301 bp, Zea mays
ccataatgcttttgatcttcttgcaagatatggcaccactcaccttgtattcaatgatgatattcagggaacagcttctgtggttcttgctgggcttattacagcacaaacattacttggtggttcattggcagatcacacttaccttttccttggtgctggagaggttattttctctgtgattcttttataggcatttattttcaaggtagtctttatatgctgatttctacggtattgttatctaataaaataccggacgtaatgtgctgatctacccctctttatttcaagcgtgtca

SEQ ID NO: 301975 - DNA, 304 bp, Zea mays
ttggaattctcactgagattggaaattgcaattgatgtggctcatgctattacatatcttcatacctattcagatcatccagtcatccacagagacatcaaatcctcaaacattcttctaatgaacaattgtcgagccaaggttgctgactttggattcgccaaactggctccaactgattctagtcatatatctactcaagtcaaaggaacagcaggctatctcgatccagaatatctcagaacataccagctcaatgagaagagtgatgtctactcctttggagtccttctggtggagttgg

SEQ ID NO: 301976 - DNA, 296 bp, Zea mays
tatccatcgcttccaagacctcaaaatgcatcagcaggctgcgaggtctgccctcgaaatacagcttctcagagagcacaagcctcccctcgctcctccgggcctcgtccgcaagtacctggaccatcgcgtccttctcctcccggatccacgggcggctcggatcacaccactgcctcggggtaccatggagggcgaacggaggctcttgtcgccggcgcgcacgacgtgctcgcgtatcctcccgatcaccgcgcggtcggccacgtacgctccggcgcggttgaggccggcgt

SEQ ID NO: 301977 - DNA, 249 bp, Zea mays
gtcctccagtactggaaggagagcgtgaggaggcctgacagggtgttgttccttcgttacgaggaggtgctgattgagcccgaggcgcacgtcagaaagctggccaatttcatgggctgtggattctccgaggaggaggaggagcgcggggtggtgagcaccatcgtggagctgtgtagcctgggcaagctgagggacatggaggtcaacagaaatggaagcactaggcttgggtacaagaacgaaagc

SEQ ID NO: 301978 - DNA, 249 bp, Zea mays
ccagaaggacccgttccgggtgcccaccaaggacaacatccggatggcgatgcagtggctggtgcaggggtgcagcagcggcgactccctggtgttccacttctctgggctgggcgcgaggtcgccgacgcggactgcgacgagcagacggtacgacgagcatctgcccgtggatcgttcaaaggccatctgagacgagtcacgagacacgccgcgtgtgcggcaatcagcgtgtcaggtgcaatatcg

SEQ ID NO: 301979 - DNA, 288 bp, Zea mays
cgcagatccgagctaaccaccatcgacgagcgccaccgccagcagccgagccggagcgaccttttcttttttcttttacacagcggcggctggagggactgatgtgtgggcccatcctggcttcggccgagttatcttatctatctatagtatcgtgttaccgttcgcttctgtcaccgtgttagtgtccgttctacctttggattaggtgttggtaccctgttgttcgctttggttgctcgcgctatgaaacgagacgagagaagaatgagcaaggtttttgttcgc

SEQ ID NO: 301980 - DNA, 295 bp, Zea mays
gttgtgtttatccaaggacacgctgaggtcgccgccgccggagagcgagacgatgaaaaaggcgacgagagcgagcatcgctatcaccaccctcttctacctctgctgcgggtgctttggctacgcgtcgttcggcgacggcaccccgggcaacctcctcaccggcttcggcttctacgagccctactggctcatcgacctcgccaacctcgccatcgttctccacctcctcggcggctaccaggtgtacacgcagccggtgttcgcgttcgcggaccgcaagttcggcggcggg

SEQ ID NO: 301981 - DNA, 273 bp, Zea mays
caaggagaaggagctcggtgggtctattttgacatagtattttccttgtataatgagtcgttcacattgcttatcgagacagactgtttcatttagcaatgtgaaggactcattatacaaggaaaatactatgtcaaaatagagccacaaggagaaggagctcggtggcgtcggacatttggagaggaaatatactcccctctgcttcttgctgtcacagagcacgatgcaggcaactgggcgaattcacatgttgcaaaattctctgcgatg

SEQ ID NO: 301982 - DNA, 222 bp, Zea mays
tgtccaacagcctcctcaccttccgcttcgtgtccgccgcggacgaggcctactacagctacggcgtggtagacagcgccgccgtgctcacgcgcttcgtcctcgactcgtcggggcagatccagcgcctcatgtggatcgacatgacccgctcctggagcctcttctggtcctacccgctcgacgagtgcgactgctaccgcgcctgcgggccctacggcg

SEQ ID NO: 301983 - DNA, 253 bp, Zea mays
  unsure (1)..(253): unsure at all n locations
gcggcatggttcgacatggagcacgcgaggtggcaggaggagcacggcaaggtgatgcgccacctgcgggcggcgctggaggcggagtacgccgcgacggcgacgacgccgccgagcgctgcttcctctggatcggcggcttccgcccttcagagctcatcaagatagcggcccggcacgcggagcccctgacggagcagcaggcgatgagcgtctgctgtgtgcagcagtgggcgagggacgcggangcggc

SEQ ID NO: 301984 - DNA, 287 bp, Zea mays
gtgctgcccttgagtatggtctaccaccaacaggtggttggggcttgggaattgatcgcctcacgatgttgcttacagattctcagaacattaaggaagttcttctatttccggctatgaagcctcaagagtagctatccgcatagccaaaagcaacaaaatggcctcagccaaaggccacaaaaggttcaaagcaaacataggcgctggagggtatatcttagctcttggatctgtattgaacgatacatccttttgcccctgtgctcgggagctttccatttttt

SEQ ID NO: 301985 - DNA, 296 bp, Zea mays
cagcgcccctcctcgccggcgggcttgctgggtctcgcgatcttcctcctcctcggctgtgccttctggggcggcggcggcgggaactaggtaatgggagggaacggaagggaaggggaggtttgaggtagagcggaccgccagcgggatgccgtcgcacgcggatctggaccaccagatctcgcagctgcgggattgcaagttcctgccggacgtggaggtcaagacgctatgcgagaaggcaaaggcgatcctcatggaggagtggaatgtacagcccgtgcgctgccccgtca

SEQ ID NO: 301986 - DNA, 279 bp, Zea mays
acgaggtgacgttcctgaaccagctccccgcagaggcgacgtgcgcggcggggaagagccccgttgatgtagccaactacgttcagcggatactcgctgccacgctcgggttcgagtgcaccaccctcacaaggaaggacaaatacacggtgctcgccggcaacgacggcgtcctgaacgccaagccggcggcggccgggaagccggcttggcagagccgcgtgaaggaagtcctcgggttcctgctccactaacaattacaccttgcccagatctgga

SEQ ID NO: 301987 - DNA, 271 bp, Zea mays
gcatcgagttcaccggcaactgctcgacccacccagatgacagcttcgatccgtccgacctcccggcgatcgaccatgtcaccatgaagaacatggccggcacgaacatctcggtcgccggagttttgtcgggaatcgaaggagccccattcacagccatctgcctttccaaccttaacttctctatggctgccggttctggtccgagttcctggtcttgctccgacgtttccggctactccgaggcggtctttcctgaaccctgcacaga

SEQ ID NO: 301988 - DNA, 240 bp, Zea mays
aggtgaagtactctttcctaatgaatcaatgccaatcattcttgctcgtatgattgggataattggtccaattgatatggaaatgcttgcatcaggacaggagacccagaagtacttcacagatgactatgaccttttccacacgaacgaggagacagatcagttggagtaattgatcccagagaaatcctccttgcgggcgcacttgcagtgcccagacaagaaatttggtgacctttt

SEQ ID NO: 301989 - DNA, 309 bp, Zea mays
cgactctccacgcaacctctaacctcttattacttcttgcctacccctcaataccgccaagatgggtttggtggtttcgaaattgctcgaccgactatggggtaagaaggagatgcgtattctgatggtcggtctcgatgctgccggaaagaccaccattctttataagttgaagctcggtgaaatcgtcaccacgattcctacgatcggattcaacgttgagactgtcgaatacaagaacatccaatttaccgtgtgggatgtcggtggtcagacaagatccgtcctttgtggcgacactattccaga

SEQ ID NO: 301990 - DNA, 305 bp, Zea mays
acgggggcggttccatcggcctcatggggctggtctcgcatgcagttcatgacggagggcgccatgtgattggggtcatcccgagatccttgatgcccagagaggtcactggcgagcctgttggggaagtaagggccgtctccggcatgcacgagaggaaggccgagatggcccgcttcgccgatgccttcatagcgttacctggtggctatggaactctggaagagctgctggaggtcatcacctgggcgcaactagggatccataagaagccggtcgggcttctgaacgtggacgggttctac

SEQ ID NO: 301991 - DNA, 263 bp, Zea mays
cgtgcttctgtttggcgccttggccacacgggaagagcttctaactgataggcttcttactgctacggtggcttggcctgctcctgcagtgatttacattggtattattctgtccaccttaggtgcagcactgcagagtttgactggggctccaaggttgcttgcagcaattgcgaatgatgacattcttcctgttcttaattacttcaaagtttctgagggatctgagccacatgcggccactttattcacagctttcatct

SEQ ID NO: 301992 - DNA, 233 bp, Zea mays
tctaagaggagacaggttccatgtgaactgcacttgcacatgggtaagccgatcctaagggacggtggaaccccggcagatagcgcgatcacgcgcgtcacccgacagagaatcgggttaagatttcccgagccgggacgttgcgccgtgctgcacggccgcatcccggtgtccatcatctggtacggccgcttcacgccggcgcagaaggccgtggtcaccgacttcctcgg

SEQ ID NO: 301993 - DNA, 325 bp, Zea mays
ggccttcggctcgagctcacgagtgatttccgcggcggcggcggaagtcagacgcgatggggcactccaacgtgtggcactcgcaccccaagacctacgggcccggctcccgcgtctgccgggtctgtgcgaaccctcatggactgatcaggaagtacgggctgatgtgctgcaggcagtgcttccgcagcaacgccaaggacattggcttcatcaagtaccgctgaagtcagctgggcgggctatctgactgccatctcttggacagtgtagtagaggcgatgccacaattttcattactgtcatttagatgttcccttcagaa

SEQ ID NO: 301994 - DNA, 295 bp, Zea mays
atcttcgtcaaagggaatgtttggagctgtcctgtctgtgctgcacgtggagttcgtggcggaggatgagattgtcgaaatcgtccccaacatccgcatggacgccctcaacatgatctgcggggatttcgggcccttcttcccccagattcccaccaaggtgcctctctggctcgctgtcgcgctcaagaagcgtacacagtgcaccatccgcaccccggactggatgactgttgaccgcttgacacaggtattggaagcggaaagagagtcgccacgagaattccagccatta

SEQ ID NO: 301995 - DNA, 314 bp, Zea mays
  unsure (1)..(314): unsure at all n locations
ggagtacgtgtgcgtcgctcgcttccacgccgccgtgccggacaccgcgcgcgtggcccgcgcgctagtatggcgctgacgggcgccgtgttccagcgcccgccgctcatctccgcggtgaagcggcagctcagggtgcggaccatctacgagagcaagctcctggagcacgaccctgagcgccacctcgcggtgttctggatctcctgcgaggcaggcacttatgtccgnactctgtgtgtgcaccttgggctgctccttggcgtcggcgcgcatatgcaggagctgcgccgtgtccggtcagggatcctcgg

SEQ ID NO: 301996 - DNA, 108 bp, Zea mays
gagttcagggagatggtggacgagttcttcgcgcttcacggtgcgtttaacattggggagtacataccctggctagattggctggacctgcagggctacgttgctagg

SEQ ID NO: 301997 - DNA, 266 bp, Zea mays
attgatcggaaatcaatacacctactctgcagggaactggaagaagagaggaatgcctcagccattgctgcaagtcaagctctggctatgatcaccaagttgcaggatgagaaggccgcaatgcagatggaagcttcgcattaccaaaggatgatggaagagcaagctgaatatgacagtgaagcggtaggcaagctaacgagttactcactgaaagagaacagctaattgaagaactggaagttgagctcgaaaactataggaga

SEQ ID NO: 301998 - DNA, 284 bp, Zea mays
cgcgatctcaacttcatcgaccacacgagtaacatctcctggaaagcgtttgcgagggcgatgccggtgatcatagacccggcgctgtacatgaagaaaaagggcgatctgttctgggtgccggagaggcggagcttgcccacggcattcaagctgttcactggtgcgtctactgctctctcactctccacccgtgattgttaacctgacattgacagagcacactcatttattcagtgctagcacccaactacagtactacccatcgcacggtagcagtgcct

SEQ ID NO: 301999 - DNA, 262 bp, Zea mays
gctgcttgttgatcactgctatatatacgggtgccaaggatccatgctcttctcatcctctagtcatcagctatctagtcttccctacagcgactgtctacatacaatacatccatcttcccgagctcgtcatcgatcaattcccaagtcatataataatattactacaatgttggttctcgtcatcgacttctccaatcagtacggcgctgataaggccgataccctggcgcagatcgccaatggctgcgaggagtgggga

SEQ ID NO: 302000 - DNA, 270 bp, Zea mays
tgacacggccatgttctacgggctcaagtacttcaacgaccacctgatgcaggcggggccgtacgggaacgtgcagtcggaggtgctcatgcgcaatgacgccagcaccttcaccttcaggcagggctgggccttcccgcgcaaggtctacttcaacggcgacgagtgccagatgccgccgccggacgcctacccctacttgcccaactccgcgccgccgacagccgcggcgtcgctgggcggcgcacggcagcggccgtcgtggtgctc

SEQ ID NO: 302001 - DNA, 272 bp, Zea mays
ctatgccgtcggtcgtcgtcctcgcggatgccgtctgcgtggcgtcgctcgcgcagcccgtcgcggccgacctgaagctggactagtacgcgagcacctgcccctacgctgaggccatcgtgcgcggcgtggtgcagcagcgactgcatgcaacaatgccggccgtcggctccaccgtccgcctcttcttccacgactgcttcgtcgagggttgcgtacgctctgtgctgatcgaatccacgcccggcaaccaggccgagaaggacgcctcc

SEQ ID NO: 302002 - DNA, 293 bp, Zea mays
catcgccaacctctacagcctgcactcctggctcgggatcgggaccatcggtctgtaaggcaattcattgggtgtccgggtccgtgactttcttcttccccggagcggcgcccgccgtaaggcgcggcgcctgccctggaaggcgctcttcggcctcttcgtcaacgttctggcgctggcaaccgcggatctcgggttcctggaaaagctgaccttcctggagagcggggggctcgacaagtacggcgccgacgcgttcctggtcaacttcacggctctcgtcgtcgtgctgc

SEQ ID NO: 302003 - DNA, 254 bp, Zea mays
ctgagatcgtccacggcgacaagacttacactattaccgacgccaccaccctcaccatcactgattgcccttgcactgtcaccaagcctgtcatcaccacctccgctgtcgtctgccacgactgccctgctcctcccgcccaccacggcaacaactccaccctggtccccgtttaccctaccggtaagcccggccacggtggtgagagcggcaagcctggctctcctgctggtcccggtgctacccccaccgct

SEQ ID NO: 302004 - DNA, 288 bp, Zea mays
gaggatagaggatttctggaggcccttaaggatttaatatctgacaataatcctatggttgttgcaaatgctgttgctgctctggcagagattcaagatagtagtgttcgtccaatctttgaaatcaccagccatacactgtcaaagcttctgacagctctgaatgaatgcacagagtggggtcaagttttcattttggattctttgtcaagatacaaagcagcagatgccagggaagctgaaaacatagtggaacgagttacaccccgtctccaacatgcaaattgt

SEQ ID NO: 302005 - DNA, 282 bp, Zea mays
gctctccatccaggaaatggtagaatgggagttcaagagcaaggaagacgggaagatgcatgcgtgcggccatgacgcccacgtggcgatgcttcttggagcagctaggttgcttcagtctcggagggacgatttaaagggtacagtgaagctcgtcttccagccagccgaggagggacacgccggcgcataccacgtcctcaaggaaggcgtcctggacaatgtgcaggccatcttcggcgtgcacgtggacacggcgttgccggtggggctcgtcgggtc

SEQ ID NO: 302006 - DNA, 281 bp, Zea mays
gcactacctgcacgccgcgctgaccgagacgctcaggctgtacccgtcggttcctctggataacaagcagtgcttcggagacgacgtcctgcctgacggttccagcgtcagaagggagacatcgtgttctacgtcccctacgccatgggccggatggagtacctctggggcaaggacgccgaggtgttccggccggagcggtggctggatcaggacggagagttccagcaggagagcccgttcaaattcagcgttccaggtacgacgatgacttgagtttc

SEQ ID NO: 302007 - DNA, 280 bp, Zea mays
  unsure (1)..(280): unsure at all n locations
gcatccgcaggctctcgagctctagtccatcccctcgatctcgtagcgcacagcagcagtcaggcggccatggacgccagcgcagcgatagccggcgggaaagcgaagaacggcgcggccgggcgcaaggccggcgggccgaggaagaagtcggtgacgaggtccgtcaaggccgggctgcagttcaacgtcggccgcatcgtgcggtacctgaagaacggccggtacgcgcagcgntcggcacaggcgcacccgtctacatggccgccgtcctcgagta

SEQ ID NO: 302008 - DNA, 309 bp, Zea mays
gttgtggggatgccacactagctcctcacacatggacgatgagtggaggccggtgatggccatgctcgtcttcaacctcatctctgctgtgatgacggcgctggtgaagaaggcgctccagcaagggctcaacgccctggtcctcatcactcttcgccagttggtggccactctcttcctagcaccaatagcctacttcaaagaacggaacacaaggcctaagctcacgctagagatctttgtgtaccacttcttcagtgcagcgcttggtgcttccctgtcgcagtacagcttcttctacgggctcaa

SEQ ID NO: 302009 - DNA, 314 bp, Zea mays
cggctcgagtggtatcgttgctgccgctcgcctttgggtcacgatcctctattctttttacaaattactttttggtagtgagtcatcacattaaattagcaaaaatgtcaaaccctgaaactgaagaggtagccgtacaatccaactcggtgtacacctttggcaaaaagaagaaggcaaccgctgttgccatttgcaaaccaggcaaaggtttgatcaaggtaaatggtcgcccacttgaatctgtgcaaccagaattattgcgattcaaaatttttgaaccaattttgaccttaggaaaagacaaattccga

SEQ ID NO: 302010 - DNA, 116 bp, Zea mays
tctcgatccgctcgagcctgtccgccatcgtcgccaggctgccctggcggacggacaactagatcatgaacgtctggcacacgcatctcaagaagcggctgtagcccaccacctag

SEQ ID NO: 302011 - DNA, 308 bp, Zea mays
  unsure (1)..(308): unsure at all n locations
gagaattcaagatgggtanagaaaaggttcacatgaatattgtcgntattggtcacgtagattctggtaaatctaccaccactggtcatcttatctacaaatgcggaggtatcgataaaagaaccatcgaaaaattcgaaaaggaagctcaagaaatgggtaaaggttctttcaaatacgcttgggtcttagacaaattgaaggctgaacgtgaaagaggtattaccattgatattgctctttggaagttcgaaaccgaaaagagacattacactattatcgatgctcctggtcacagagattttatt

SEQ ID NO: 302012 - DNA, 241 bp, Zea mays
agcacgccgagatgtacttccctctcagcagcagcggcgacggcgacaaatgcctcatcctgtgcttcgaggacgacgacgacgacgaggctgctcgcgtcataaagccgtggcggttccgctactcgtactggaccagcagctagagctacgtgctcaccaagggctggagccgctacgtcaaagagaagcagcttgacgccggcgacgtcgtgcgcttcgagatgatgcgtggtttcgg

SEQ ID NO: 302013 - DNA, 300 bp, Zea mays
tgtcaagaattaacttcattggatctccgcaacttgaataggctgcgtgactcagcactgtggcatcttcgtggttgtaggctactaaggaaactaaggcttcaaagaaacgcattcagtgatgaagctgtgtctcaatatttggaggaatctggaggaggcctgaccgagttaatgctaaacaatgttaagaaggttggagaccttactgctcttgcaatttctcgcaagtgttctgttctattgaatgccctggatctttccttctgccgtgaactgacagacgattctttggggctg

SEQ ID NO: 302014 - DNA, 324 bp, Zea mays
ctcgaactaacacataagcgatggctacaccacaacaacccgctaacggaattttatacgcttgcgttgctgaaggcaagactattgttgcccaacacggcgataaagatcaattcaagaaagtcgcaaaagtcattcttgagcgtattcccaacgaagatattaagaaatcatacgtgcatcaatcatatgccttcaattacattagtcaaaagggcagagtcttcctttgcgtgacctccacagatttccaaacccgtgtcgccttcgcttatttgcaaaaaatccaaggtgaatatagacccagtggtgatttggacttcg

SEQ ID NO: 302015 - DNA, 282 bp, Zea mays
gtgttgtggatcgctatgctccaaccacttcacccctgagcattgagaaggatatcaagaagctgcttgggagctcttaatcagtatctgggtgcaaagctgtagagaaacatgtatcaacaatgccctgagcgataaaatatatgataagttgtattaataaagtattgtcgtacttgagaggttgcagtatctgctctatttcccttgcatacactccgtacttgtatatccccttgtcaccaaatcagccctcgaatgaattccaatgctgtatcagtt

SEQ ID NO: 302016 - DNA, 288 bp, Zea mays
cgccggatctcgccgcctcttctcctaccccaccctccgtgctgctgcaatctcgggacccgccgtgctaccagatgcgcccgtggcggcgtcggtggcggcccagccgcccccgctggcctggacactctgggcgatgtccatggccaccttcacacgcacgaagccccatgtgaacgtcggcacccttgggcacgtcgatcacggcaaaaccagtctcactgccgctattaccaagggaatatcaactacaaggaatttgcttgcagatgatgctatggtgcctat

SEQ ID NO: 302017 - DNA, 292 bp, Zea mays
atggaacttgcgtgttcagaaccttgacacctggtacttgggtcaagaagtgtacataaatgtggttaacccagaggacagcagcaccactcttccggagaacgcaattttctgtggtgcactctcaagcctacagaaagaacaattacatagattccagtactcgaaagctgccccagttccacaatggggaggaacaatttctctcctgattttgttggcatgctttgccctttggtcgctatgattcaacccccacctaagggcttgttcggttattcccaatacacat

SEQ ID NO: 302018 - DNA, 310 bp, Zea mays
cctgccgggccgcacggacaacgaggtcaagaactactggaggacgcgggtgcagaagcacgccaagcagctgcactgcgacgtcggcagccgcaggttccacgacgccatgaggaacctctggatgccgcgcctgatcgagaggatccacgccgacgactcagccgccgtcgccgctaatgccaccggcgacgtctcccacttctactccgcgagcccatcgcatgagctgtcgtcgtcctcccagccggcgccggcgtaccgaaacgctgcgcccaacggcagctgcgcgcgtgcgccgtccccggac

SEQ ID NO: 302019 - DNA, 302 bp, Zea mays
ggcaaagctggccgtggaattggctctcatactgattatggtctgcttgtcatcgctgctcaggatgaggttggcggtctgtttattcggccaccatcggaagaggagcagactgccaattggcagacaagtgccgcagtttccgggaagatggtgaaggctgggtctatgttccaccggttccagatgtgttcactgtatttccaggtgatatgatgcatatatcacgaactccttccttccgtcaaccccgcacaaagtcggtctcaacacacgcgaacggtttgcattcgcttactttc

SEQ ID NO: 302020 - DNA, 314 bp, Zea mays
tatccagcacagctctacccaccaattctgattctggaagacagacagtagtcgatcgcatcgcatctcatggcgacgaggccggcatcggatgagaagccgtgggatctggctgcgcacccgcggctgcccaagggcaggactgtggctgtggtggtgctgtacggctggggcgattctgcgctcgaccccttcaactgcatccacgtcgccgacacgcccacgctcgacgccctcaagaaggcagctccttagagatggaggctcatcaaggctcactgtacggcggtggtgctgccgacggacgacgacat

SEQ ID NO: 302021 - DNA, 166 bp, Zea mays
  unsure (1)..(166): unsure at all n locations
cctcacgcgagcacaataggagtccgcggctgacaacgccgcgatgttggcacgctgcatcaaggacgtgccggcgaacgagaacgacctccagctccaggagctcgcgcgcttcgccgtcaatgagcacaaccantaggccaatgctcttctggggatcgagaag

SEQ ID NO: 302022 - DNA, 308 bp, Zea mays
  unsure (1)..(308): unsure at all n locations
tcncaacgcatccccgccgacctcaacgccgacggtcctttcctaacccgcagcccccggccacagtctctctcttccggtccagtgggggctgctagcttccaggaatattggagatgtgccttcaacactctagggctcgattgcctccagataagcaacttgctgcagaaaaaagtgttgccttgtattgcaagccagttgaattgtacaatattatccagaggcgagctattaagaatccaccttttgttcaaagatcccttctatataagatacaggcaaggagaaaaaagaggctccaaccg

SEQ ID NO: 302023 - DNA, 296 bp, Zea mays
gaatgtacgaagcggcacatgttagagtgaatggtgaagaaatacttgacaatattctcattcacaccaagagacagcttcaatgtattgtagacgatctcgaaccaacactgcaagaagaagtgagatatgcattggagacacctcttttcagaagactcaacagagtacaggccagacaattcatctcaacatacgagaaaagcactacgcgtaacaatatgctcctggagttctcaaagttagacttcaacatcttgctcaccctatactgtgaggagctaaaagatcttacg

SEQ ID NO: 302024 - DNA, 289 bp, Zea mays
gctataatgggtgaaagagtaattgttgaaggttcagtccaacacaaccccctgaatgagggttcaattctttggataacagaaagtaggatgccgcttggtatagttgatgagttgtttggacctgttaagaacccatactaccttgtgcggtacaactctgaggaagaggtacctgctgggatcagtgcaggaaccgatgtctgttttgtagcggagtttgcagaccacatcctgaatatgaaggagctctatgcaaaaggctatgatgaatctgattctgtagagg

SEQ ID NO: 302025 - DNA, 315 bp, Zea mays
  unsure (1)..(315): unsure at all n locations
caacgattgtatggacaaagtccaatcgtttttggatctttcccttctctacatgctgcttggccaattgctattacgatttttgcaccagattacaagatcgtaaagtttgttggtactttgtatgttgcaactgtttggtgggctgcaatgtatcttaatcatcactttttggtggatttgctcggtggagctatttttaccgcttttgcttactttgtttctacacaatttattgctctcatgactanatacctgaaacacaagatatattctcgtggttctttgaaatggattatcatgagtggagagaaa

SEQ ID NO: 302026 - DNA, 305 bp, Zea mays
aattcagctacgttgaacctgcggaacacaggcgcccacggcccacgagatctccgtaagaaggcggaacctgtagaagacatggccggcgagatgagctgggtgggcaagaagatccacctctacaacgtcaccatgggcctctacatgctcgattggtgggagcgctgcctattcagtatccttccgccgtgtcttgatccaattcagtttatgtattactgtcccctttgcagattccgaccttgcttttctcgacttcgtcatcaactaaggcttatgttagatccccgtctgattctggc

SEQ ID NO: 302027 - DNA, 212 bp, Zea mays
acacgacacgctgcagcagacgctacaagccatgatagagcgcgtcgacggacacctggacctacgccatcttctggcagtgctccgttgactccgccaccgcggcgtcgctgctcggctggggggacggctactacaagggctgcgacgaagacaagcgcaactagaagccgctcacgctctccggccaggccgagcaggagcaccgcaag

SEQ ID NO: 302028 - DNA, 325 bp, Zea mays
cgtggctgccgccttcaacaacaacagcggcatcgccgccggcctcatccgcctgcacttccatgactgcttcgtcaggtcgtgcgacggctcggtgctgatccactcgacggcgaacaacacggcggagaaggacgccgtcccgcacaaccccgacgctccgcgggctccgagcgtcccgacgccctctccaaccgcgcgcgcggccgcggcgccacaaggctgtctgtgccgacatcctggcgttcgctcgcgcggacagcatcgcgctggcggggaacaacctgacgtacaacgtccccgccgtgcggcgcgacgggcgggt

SEQ ID NO: 302029 - DNA, 327 bp, Zea mays
  unsure (1)..(327): unsure at all n locations
catgtttttaaaccaaattacaaatatccctacccctttctcaattaattataactgacacataggatctctattaggaataacattaagaattcaactaatttctggaattttaatttcaatgcattatacatcttctataagagaagcatttgatagtgtaattcatttaacacgagatgtacaaaatggttgattcatacgaagaattcatatcaacggagcttcattattttttgttttaatctacttacatattggacacgatatatttaactcttcatttancattancagtacatgaatatctggaatctctattctttt

SEQ ID NO: 302030 - DNA, 296 bp, Zea mays
  unsure (1)..(296): unsure at all n locations
cggcggcgggcgtgccactgtcccgtggtgaacggcgtccgccacgacggcgacggctacactgactgcacagctactgggccgggcacgtgcgctctcaacaacggcgggtgctggtcggcgacgcgaggtgcacacaccttctccgcctgcacggagaccgcgctgacagggtgccggtgcncgccgtggttccatggcgacggccacaaatgtgaacacctggacgagtgcagggagaagctggcgtgcacgtgcccggactgatagtgcaagaccacgtggggcaactacga

SEQ ID NO: 302031 - DNA, 313 bp, Zea mays
tcgacacgctcgacccgctcgaggctgtccctccctccctcgcctgtgcttctgccagctaggtgcctgccgaggagagctagggatacgatggccggccgtggcatcgtgaacacgggcggtggcaaggactaccccggcaagctcaccctcttcgtgttgctcacctgcatcgtcgccgccaccgggcgtctcatcttcggatatgacatcggtatctcaggtgcggtggcaaggactactgcttgctgttatgagttatgagttatgacttgatgatccattattcattcatgcaggcggcgtgacgtcc

SEQ ID NO: 302032 - DNA, 231 bp, Zea mays
cccacgcgtccgccgccgccaacatggtgggcgaaggcgggtacggcgtcgtgttcaggggcgtgctccgcgacggcaccgcgtcccatcaaaaacctccacaacaacaggggtcaggccgagaaagattttcgaatggaggttcagacgatcgggcgcgtccggcacaagaacctggtgagtttgctcggctactgcagcgagggagcttgcaggatgcttgtttacgag

SEQ ID NO: 302033 - DNA, 238 bp, Zea mays
ccgacgcgtggtttctatatcgccatggatttacggtagacgagttcatgtttcttgctaaaaagattgttactcccgttgctaaaaacatgaactcgtctaccataaatcccacgcgtccgggctgttccacgtcgaaagcctcgagaagaccgcccaggatgactttcagaagctcgcctctgccgtgtaccttcaactcagcacgatcagtcacccccttatcttcgtgacgcgg

SEQ ID NO: 302034 - DNA, 230 bp, Zea mays
  unsure (1)..(230): unsure at all n locations
cccacgcgtccgccctttgcaagtatagtctctctgctaagcgaacgnagcttcaagctagtctcggcggctctagaagacgatgggcaaggacgacgtgatcgagagcggcgctggcggcggcgagttcgctgccaaggactacacggaccctcccccggcgccgctgatcgacgcggcggagctggggtcctggtcgctgtaccgcgccgtgatcgccgagttcatcg

SEQ ID NO: 302035 - DNA, 240 bp, Zea mays
cggacggtgggcgagacgcgtgggcggacgcgtgggcggacgcgtggggccagatgtgacgtacaatgatgctggtggctgcacaggaacagattgagaaaatgcgtgcagttgttgaacttcctatgcttcacccagaaaagtttgttaagcttggtattgatcctccaaaaggcgtcctttgctatggcccacctggcactggcaagacacttcttgcaagagctgtagcaaatcgga

SEQ ID NO: 302036 - DNA, 234 bp, Zea mays
  unsure (1)..(234): unsure at all n locations
cggacggtggngcggacgcgtgggtttttttttttttttttttttagaaaacagtgtactaatcaggtctgataacatggcataacgctctgaacttgagacgattaaccaaaaaaagtgtactcatcaggacacacatttcggtgcaagacaatccatgagaatgctctaagctacagcgctcttgcccttcttcctctgtagcttcttcatgtagaactcaagctctttacc

SEQ ID NO: 302037 - DNA, 223 bp, Zea mays
acccacgcgtccacccacgcgtccgcacacgcgtccgcggacgcgtgggcgggtcctaggattacaattcctgcatgggaggaaatagaagctctcttaacaagccggaagcttacaacaattgtatttttcttggatgaaacatttgaagagatcacctatgacatggcaacaactgttgctgatgctgttgaggaacttgctggcattatcaaactttcag

SEQ ID NO: 302038 - DNA, 224 bp, Zea mays
gcgagcagccgccctttttttttttttttttttttttttcaagatgaaaccgttctcaagaattttcaagacgaaggtgaatacatcatacacaagagaggggtgaagtttcagttatacaagacttcttcatctagtttctttaagtacaacagaccacttccattccttcctgccgacccacccgatccacccggcgatgtagaggaagagcaggcccgggg

SEQ ID NO: 302039 - DNA, 300 bp, Zea mays
cgtccacggcgtcctgggccagacctaccgccctggctacgtcagcaagctcgacatcggcgccaagatgcccgtcatgggcggcgcgcccaagtacctgtccgccggtctcttctccacggactgcgccgtctcccggttccactctttcgcctccgcctaatactaagtcccaagcgcgaccgatcctattcctatccacggcgtgaaataagatttctgtatgtaggctcttatctcatctcatcgtatgaaaatgtacacgtgtgttgcattggaagtacgtattgttgcacgatc

SEQ ID NO: 302040 - DNA, 317 bp, Zea mays
ctctccaccacaaaaggttatagcttttaatttgatcaataatcctaagttcctaacctaacttctcccgtaactaaaacattttagtttctcctgctcaatatttggttataatcttcaatttatgaattttttactgactcctggtgaactttaattttagattagtggttgctccatcgacaatcccgtcaatggatcattttttgaatcctatgaaagtgcacactccatgcatgacttgactggctctattgcagagaaacttggtgtccaagctcctccagttagaatcgacagccaagcagaatatggtg

SEQ ID NO: 302041 - DNA, 319 bp, Zea mays
cggacggtgggcggacgcgtgggcgtacgcgtgggcggacgcgtgggccgggacctggtggcgtcgctgggccggagctggccgacgctgtcgtgcaagaaccggcgcagcttccagttctggagccacgagtggaagcagcacggcacctgctccaacctggacccgcacgactacttcgcgcgcgcgctgcagctcagggagcggcacgacctcgcggcggtcctcgcggacgccgggatcgtgccgtccgacaccgacacgtacccggtggaccgcgtcagggacgccatcgcgcaggggaccggcttcgtggcca

SEQ ID NO: 302042 - DNA, 305 bp, Zea mays
gacagttttccacaaaatcagacgtgttcagttttgggatccttgttatagagatcataacagggcggagaaacattgggcactacttctttgatgagcaaaatgaagatattataagcctcgtatggagacactggactgagggaacaattgtagagatgatagatgattctcttgggagaaattactcggagagcgaggtgctaaaatgcgttaacattggtttgttgtgccttcaacatagtccaatggatcgacctacgatgtccgatgtcatggtgatgcttaatggtgatgatactagt

SEQ ID NO: 302043 - DNA, 311 bp, Zea mays
  unsure (1)..(311): unsure at all n locations
cggacggtgggcggacgcgtgggatttctctcatggtcttaaggagatcaagtgctaggcttgcggcgagattagttacccatgttgggtactatctatgtacatctgttatatcctacaactatagttgtcctggttgaattgaactcaaaagggtttgtttgagaaaaatagaggaatgtcggattagtggcaccatccttgtaataggcgaataccacggacgcatcatccttcatgctctcaccaacaaaaaattgaaggtcctgggcaactggagactccagtcgtcanggatcagaagatactgc

SEQ ID NO: 302044 - DNA, 306 bp, Zea mays
ggcgggttggcttctcctcccccaccggttcgtgttcaggttctggttcgtgggcgagagggaagagatggcggcgtcggacgtacagtaccgttgcttcgttggcggcctcgcctgggccaccgacgaccactccctcaacaacgacttccccattcccgccccgcaacccgcaggctctgggctcggaggaaccgagggcgagggacctccgaccgggaccgggccgggcgacatgttgggcgacctcctctccaggatcctcctgctcctgttcggctacgccatgccggcgttcgagtgctt

SEQ ID NO: 302045 - DNA, 376 bp, Zea mays
  unsure (1)..(376): unsure at all n locations
aaagcctggtacgccatgcaggtacccggtcctggaattccnncgggttcgacaccactagcctcacgacccgaccgacgtccgcgtgacgcgtgggcgcacgcgtggacgtgacgcgtgggtaaggaatgagcaaagagccttaactcttgtatttgcttgacatctgatctttggacctcaaatcagaagttgggttatctttgcnttgacgcccactacattgatgcaaactttatcttgaaaaagaagactattgcattcaaagatgtcaaatatccacacacgggcctagcaatcgaagaagtaattacgaagtgtctcatagagtgggggataaaagagaaggtgtttactatcacattggataatgcct

SEQ ID NO: 302046 - DNA, 301 bp, Zea mays
tccacgcgtccgggtgggctggcttctcctctccctcttaccaagtcctcctcgggttagggttccttatggttttgtggaggtgcgatggcggctgctgatgtggagtaccgttgcttcgtcggctggctttcctggtccaccagcaacgagtcgctggagaattccttctcctcctacggcgagatcctcgactccaaggtcatcaccgaccggtagatggggatgtctcgcggcttcggcttcgttaccttctcctccgataactccatgctcgatgctatcgagaacatgaacggca

SEQ ID NO: 302047 - DNA, 302 bp, Zea mays
caacaccactccactccctccatttccctcacctcccgcagcagctagccgccagccaacaaccgaaccaaccaaccaacccacaggccacagcgagcgagtaaagcgtccaatggtagcgatggctgccgtgcagcagcagcagcagcagcagcgccgcgacgcggaggcggagctcaacctgcccccgggcttccggttccacccgacggacgaggagctggtggcgcactacctctgcgcgcgctccgctgggcgccgcccgccggtgtccatcatcgccgaggtcgacctgtaccgct

SEQ ID NO: 302048 - DNA, 290 bp, Zea mays
atcctggggccccgggaacaacagcttcatcgtctggaacacgcccgagttcgcccgggacctcctgcccaagtacttcaagcacagcaacttctactccttcgtcaggcagctcaacacctacgggtttagaaaggttgatccagacagatgggaatttgcaaatgagggttttctgagaggacagaagcatctgctgaagactatcaacagaaggaaaccatccttgcaggggaacagccaaccacagcaacctcagtcgcagaacgctcctgtgccttcctgtgtag

SEQ ID NO: 302049 - DNA, 279 bp, Zea mays
cgtccgcccacgcgtccgcccacgcgtccgcccacgcgtccgcttaaggaaaaattttcctctgctgacaacaaagagggtgttttggcgtggtgatgtcgaagaactcctttggttcatcagtggctcaacaaatgcaaaggttttgcaagaaaagggtattcatatctgggatggcaatgcttcaagagagtatcttgaccgtattggcttggcacacagggaggaaggtgatctaggtccagtttatggatttcaatggcgacactttggtgccga

SEQ ID NO: 302050 - DNA, 294 bp, Zea mays
ctaacatatgcccacctgcatgaggctaccaatggcttcagctcggaagctcttgttggcacaggaggattcggtgaggtttacaaggctaggctcatggatggcagcgttgtggctgtcaagaagctgatgcatttcacaggccagggcgaccgggagttcactgcagagatggagaccattggcaagatcaaacatcgcaaccttgtgccgttgctaggctactgcaaagttggcgacgaacgtctgcttgtgtacgagtacatgaataatggaagcctggatgtcttgctc

SEQ ID NO: 302051 - DNA, 279 bp, Zea mays
atgtccttcacctactccgccatcggcttgtccctcggcatcgcgcagactgttgcaaacggtgggttcaagggaagcctcaccggcatcagcatcggcgccgacgtcacctccacgcagaaagtgtggcacagcctgcaggccttcggcgacatcgcgttcgcctactccttctccaacatcctcatcgagatccaagacacgatcaaggcaccgccgccgtcggagtcgaaggtgatgcagaaggcgacgcggctgagcgtggcgacgacgaccatc

SEQ ID NO: 302052 - DNA, 277 bp, Zea mays
acgcgtccgggacggtgggccatagcgcccgatgcccaacgtcgacatgaggagagaaagggccgagaaagagtcctgccgaagtcatgctaagaaattgtgaaggttcctcggtcggcaacgcgtgttttcaaggaggagctgaggaaaggagtgaggtcacgagaatctgaagatcatcctggtacctggaatctcaagtctcagaatggctgacaacaactcaaacactccttatcgaccacctgctgccagccccaatacaggtaaccaaatt

SEQ ID NO: 302053 - DNA, 313 bp, Zea mays
agcagctcgaactagctttagctactacgtgtgcaagtgcaagcagcccgtgctgctcgctgctggacgggctcgtcgacctggaggccgccgtctgcctctgcaccgccgtcaaggccaacatcctcggcatcaaccttaacctccccatcgacctcagcctcatcctcaacaactgcggcaagaactgccccaacgacttccactgcgcgtagatgatcagtcagtcagttattgatcgtcgtccatcgccggccggccgtggttcatcgtcattattccgttttgcttaattgttgatcgatcgtcttct

SEQ ID NO: 302054 - DNA, 308 bp, Zea mays
ggctggcacaaagttagtatcacttggtctccttgttcttatgggcataggattagccaatgcagcgagggtggcgagatactctagtgctgatgggactggcaacggagagggacagggtagcggatatgtgaatggcgggggatcagggtctgggtccggtaccggatccggtgatagtagtccttatggtacccatgcaagtgctggagggggtggtgcaggtggtggagctagccaatacggtgggtctggatatggttcaggatcagggtctggttcagggtctagtacatatagtcaaggag

SEQ ID NO: 302055 - DNA, 313 bp, Zea mays
ctgcagttaatcatggggcggtcgacatggctgacgactgctgccttgctggtggcactcatcgccaccgcctcctcatccgtggcactcgcctcgccgcctgggaaacttgaggtcggtttctacgagcactcgtgccaacaggccgaggacatcgtgcgcaacgccgtccgccgcggcatcgcccgcgagcccggcgtaggcgcggggctcatccggatgcacttccacgactgcttcgtccggggctgcgacggctccatcctcatcaactccacgccgggcaacaaggccgagaaggattccgtggcca

SEQ ID NO: 302056 - DNA, 306 bp, Zea mays
gaagcatcggtttataacccggtgatcgagttcctgtgcagcaatggtagcaccgccaaggccgagacattcttcaggcagctgatgaagaaaggtgtggatgacaaggctgcattcaacagtctcatccgtggacatgcaaaagaaggtgtgccagaggcagctcaggagattctcgccatcatgacacgccgcgaggtcccaactgaccctgaatctcatgcactgctagttgatagcttcctgaagaatgagccggctgactcaaagacggcattagacagcatgatgcaacagggtcacttg

SEQ ID NO: 302057 - DNA, 315 bp, Zea mays
gacgacgctctcgtcggaacgacgacatacctgaaagccgtcataaaggagacgctgcgtctacacccgccggtgccgctcctcgtcccgcacctctcgcaggaggactgcgacgtcgacggctacacgatcccgtccggcatgccgctgctcgtcaacgcctgggcgatcggtcgggaccccaggctgtgggacgccgcggaggagttcgtgccggagaggttcgtccgcggcggcggcgttgacttcagagggatggacttcgagttcctgccgttcgggtctgggcgtaggatgtgcccaggggtcaatttt

SEQ ID NO: 302058 - DNA, 313 bp, Zea mays
gacgagtgcatcaagatattgaagaattgcaagcaagccatatctccacgggatgagggtgggaaggtgataatcatggacgtggtagtcgggtatgggcagtcaaacatgaagcgcctagagacacaagttatgtttgatttggttatgatggcggtcaatggagtcgagcgcgacgagcaagagtggaaggagatgttcattgaagctggattcaaagactacaaaatccgaccagtagctggcctcatgtcggtcatcgaggtctatccatgaattctttgtgaacaaaaggccggctgccataatataa

SEQ ID NO: 302059 - DNA, 320 bp, Zea mays
cgagaaccggtctgcgcatctcctcgcgatcaagtcggacgtggagaggcagggcgacttcatccggttcctgatcaaagaggtggagggcgcggcgttcgtggacatcgaggacgtcgtgagcttcgtcaagtggctggacgacgagctctcgcgcctggtggacgagcgcgcggtgctgaagcacttcgagtggccggagaacaaggcggacgcgctccgcgaggcggcgttcggccactgcgacctcaagaagctggagcgggaggcggcctccttccgcgacgacgcgcgccagccctgcgccgcggcgctcaaga

SEQ ID NO: 302060 - DNA, 312 bp, Zea mays
gaacgaggggcgctcgtggcacggcatcaaccaccaccacccggccacgttcgatacgctcgccatggacccggtgctcaagcagtccgtcgtcgacgacctcgacaggttcctgaagcgcagggactactaccgccgcatcggcaaggcgtggaagcgcggttacctgctctatggcccgcccggcaccggcaaatccagcctcgtcgccgccatggccaactacctccgcttcaacctctacgacctcgacctctcggaggtgcgcctcaactcggcgctgcagaagctgctcatccacatgcccaacaa

SEQ ID NO: 302061 - DNA, 313 bp, Zea mays
tgtcgactcatccaagcagacccgagatacccaaaccctcgcaccttctcggcggtggcggcggcggcgtacgggacggcagagatggccatggaggcggtggccacggtgagctccgccagttggctccttgctatgctgcaggagcctgcgccggagctgaagctgcacgcgctcgcccgcctcaactccgtcgtccacctcttctggcccgagatctccaccagcgttcccaccattgagagcttgtacgaagatgaggagtttgagcagaggcagcttgcagcacttgttgtttctaaggtattttact

SEQ ID NO: 302062 - DNA, 303 bp, Zea mays
actagttctagatcgccggcggccgctcgcgatctagaactagcggaccgtgggcggacgcgtgggcggacgcgtggggtttcgtgtcgaacgatgtcgggcttgacgctgaccactgcaaggtagttgtgaacattggcctgcagtcccctcatattgctcagcgtgtgcacggccacttcaccaagcgccccgaggagattggagctggtgaccaggggcacatgtttgggtatgcgactgacgagacccctgagctgatgcccgtcagccatgtccttgccaccaagcttggtgctcgtc

SEQ ID NO: 302063 - DNA, 153 bp, Zea mays
aaacacgcgtccaaacacgcgtccgcgtgaggtgggatcccattcccatggctaggctaattagagaaggagagagagaaaactgctattagttgtacttgaagtgatcgattttcatttggttgaatgattcatcaacaaaagtgttccagc

SEQ ID NO: 302064 - DNA, 183 bp, Zea mays
cggacgcggggcggacgcgtgggcggacgcgtgggcggacgcgtgggtagttactcagttttgtttactaataagttgagattgattggttacaaaagagccgagcaaaactagcttactatctcgagatgacctgaagagcgcatggtcattctccaaagtacaagcgtttcacccatgcct

SEQ ID NO: 302065 - DNA, 319 bp, Zea mays
cccacgcgtccggcggcggcgcggttcctggaggtgaaggacaggtacgacccggacggcatcttctccagcgagtggagcgaccaggtgctcggcatccggggcagccccaacgtggtcgacacggggtgcgccatcgaggggctctgtgtctgctccgacgacctccactgcgcgccggagcaggggtacttctgccgccccgggaaggtgtacacggacgccagggtatgcgccttggagcgacgacgcacacgcctcgtcgacgagctgtgacgaatctcggaaacaaccacattattgctagcttgtcttggat

SEQ ID NO: 302066 - DNA, 322 bp, Zea mays
cggacggtgggcgtgacgcgtgggcggacgcgtgggcggacgcgtgggtgagaggtccgcagcaaaggaaagcaaccagcaaaccatgtctgatcttgatgtgaccatggctgagaccaatacaagtatcccacggaacagtacaccaagtgccaatcctgcatactacagaaatgtaacatttgtggagggcttttccaaaacctctgttgtcaagcatgcatctgatgtcaaagggaattctataaaggttttgaactgccatgattctgttatctacatattagcaccgctgaagtatgctactgtgtacggttgttct

SEQ ID NO: 302067 - DNA, 293 bp, Zea mays
cggacgcgtgggcggacgcgtgggcggacgcgtgggcggacgcgtgggcggacgcgtggggcagggccagcttattatatataatatctgaggtggagcatatatatctggctgtgtactacaagcaagcctagtacgccgcctgcgcgttcctcctattacacataacacatatagccccctccctgcgtgtatgcttgttgccgtcgtgtcgaatcttgtactacgaggctccgtcgaacctcgatggcttgcttctttatcagaacatgtttgaataaacgctatttggt

SEQ ID NO: 302068 - DNA, 298 bp, Zea mays
ctcagctctcgatgagcttaaacagggacatacaatgatcttaataaatacagtctgttcaatttgatggacggacagagatcaatccttcgttccagcgacccaaattactacactactcagcaacttatacagagatatgatcttgacccagctgcaaaggcggcagcggcaacagttttggcatcaaagttgggtgcggattctggactgagagtctttttgggagatgaaacaagcagggatgcagcaataggtagaagtaatgataacaatcttggaccaactactggactta

SEQ ID NO: 302069 - DNA, 304 bp, Zea mays
gcggaacggccgggccaccagcgcgtgcgatttcagcggcgcggcctccatcgtctaccaggcaccagccgtcacttgcagcacgtcaaccaagctggtgcgtcgccaagccaggggccgggggcgcacagctgcagcaggcgctggactacgcgtgctgccacggcgcggactgcagcgccatccagtccggcggctcctgcttccagcccgacaccgtggccgcgcacgcctcgtacgcgttcaacagctactaccaccggaacggccgggctatagtggcgtgcgacttctccggcgccgg

SEQ ID NO: 302070 - DNA, 303 bp, Zea mays
cggacgcgtgggcggacgcgtgggcggctactgatcgcacaggccaaacaccagaatcccatgtactccactgaagcagaggacaccgaaatggtggactccatgatcatggacgtctccgccctacgggccgccacgggggatttcgacgagagcaacaagctcggcgaaggcggctttggcgccgtgtacaagggtgtcctcccggatggcgaggagatagcggtgaagcgtctgtccagtagctcgtcgcagggggtgcaggagctgaagaacgagctggcgctggtggccaagctgaag

SEQ ID NO: 302071 - DNA, 301 bp, Zea mays
cttttgttgtgctgcaagatgcgacaaatcactttgatgagcagatggtcattggagttggagactttgggaaggtctacaaagcagtgatgcaggatggaagcaaacttgcagtaaagcggggcaaccagaagtcccaccaagggctgagggagttccgtacagagattgaattgctgtcagggctgcgacaccgtcatctcgtgtcgctcgttggttactgtgatgaacacaaccagatgatcttggtgtatgaatacatggagaaaggaactctgaagagccatctttatggcggtga

SEQ ID NO: 302072 - DNA, 300 bp, Zea mays
gagatgagcagtagatcggtatccctggatttctatctcaacgttataacttgtgtcaaaccttagacactggggtagactgcttggtcctaatactggttttatcatgtgactgcgctcgctggggcaaaatcctacagaggctgagctccaggacatgatcaacgaggtcgatgctgatggcaacggcaccatcgatttcccagagtttctcaaccttatggctcgcaagatgaaggacaccgactctgaggaagagctcaaggaggccttccgtgtgtttgacaaggaccagaacgg

SEQ ID NO: 302073 - DNA, 313 bp, Zea mays
cggacggtggggaaaagacaaggctgttacttcctcgaaaccaaagcacagatcgactgcaaatcatgaagcgtgggagtgcggggggcatgtaagagcaatcacaatttcgatcagccaaatgaaggaaacaacattggagaacatacaaggtacacttatttacatgccatccaaagttttttttttgtttttcagtttttgtttaattgcaatttctgcaatggacattgtattgatgagctggactggcttcttccaaccaaattatatgcaatcgcaagcgtacaggatggcgaggtccagtggtagt

SEQ ID NO: 302074 - DNA, 310 bp, Zea mays
accggacgtgctgggaaatctggtcttgcgactgcattcttcaacgagagcaacactacgcttgcaaggccattgagtgatctctactacaagggcttcctcgccctgcaggcgcaccgcgcgcgcacgggctgtggtgcgaggaccgctccgcgccggccttcctcctccagagccgcgcgtccgaagtgttcggcgtcgacatccaccccggcgcgcgcattggctcggggatcctgttcgaccacgccacgggcatcgtcatcggcgagacggccgtcgttgggaacgacgtctccatcctgcacgg

SEQ ID NO: 302075 - DNA, 278 bp, Zea mays
cggacgcgtgggcggacgcgtgggcggacgcgtgggcggacgcgtgggcggacgcgtgggcggacgcgtgggcttccaaagtacaactctcctggactggccatggaaaggggatttacagacttctgtacgaaggaccatgctgtagtttctacgcctgacgtctcctatcaccacgtcacggagaaagacgaatttgtggtgctggctactgacggggtctgggacgtgctatcaaacgatgaggttgttagcactgtctgccgagccacatctca

SEQ ID NO: 302076 - DNA, 309 bp, Zea mays
gcaaagatgggcagtgctggtgatcctgctttagctgatgagcttggtgaaggaagcactgccacaagaaccttgcttgccagctattctcagactccaaggcttggtatgacaccattgcgaactccgcagcgaactccagactgggaagggtgatgcaatcatgatggaggcagaaaatcttgcacgtctcagagaatcacaaacacctctattaggaggtgataacccagagcttcatccatcagatttctctggtgttacaccacgcaagaaggagatacagactccaaatccaatggcaacacc

SEQ ID NO: 302077 - DNA, 301 bp, Zea mays
cggacgcgtgggggacgagttccacaagttactgaatgggaaccatgcggatcctactgatcggcgacacgggcacaggatgcagtgaagcctgatgattgcaatgaggatgcccccatggaaattgtggatgaggaagccaccaagcctgagggatggttggatgatgaacccgaggagattgatgatcctgaggcagccaagcccgaggactgggacgatgaagaggatggtgaatgggaggcaccaaagattgacaaccccaggtgtgaagaagcacctggatgtggcgagtggaaga

SEQ ID NO: 302078 - DNA, 297 bp, Zea mays
cacacgcgtccgcggacggtgggcagacattgaagcagcatataactgcctcaaggaaaaatatggtgtagcagatgaggatataatcttatatggtcagtctgttggaagtggaccaaccattggtcttgcttcgcggttgccagacttgcgagctgtggttttgcatagtcctattttatctggactaagagtaatatatccagtcaagcggacgttttggtttgacatttacaagaacatcgataaaattggcttggtaaattgtccggtgcttgtcattcatggtacatcaga

SEQ ID NO: 302079 - DNA, 327 bp, Zea mays
gtttcgatggcgctgctagtgcggagggcacggagggcggcgaccaaggccgcggtgtccctcgccggcagaaccggcagcgtggagcttgccatcccggcgcacttccggtgcccgatctcgctggacctcatgcgggaccccgtcacggcgccggcgggaatcacgtacgaccgcgagagcatcgaggcgtggctggacacgggccgcgccacctgccccgtcacccacgcgccgctccgccacgaggacctcgtccccaaccacgccatccgtcgcgtcatccaggactggtgacgtcgcaaccgctcccgcggcgtcgagcgc

SEQ ID NO: 302080 - DNA, 311 bp, Zea mays
cccacgcgtccgccgtttttcgctgctgccggtccaaccctctcctctcacccaaacacctttttttcccacgagaaaccccggaacatccgagtttatgtccatcgaaaatctcaagtccttcgaccccttcgccgaagccgacgacgacaccggtgataccaaaaaggtcgagaatcccatccaaattcgtattcaccagcgcaatggtcgcaagtctctgacaactgtaactggtcttcctgctaagttcgaccccggcaagattctgaccttcttaaggaaggaattcgcttgcaatggcaaaaagg

SEQ ID NO: 302081 - DNA, 312 bp, Zea mays
actagttctaggatcgcgagcagccgccctttttttttttttttttagtattcaatgcatgcgtcgttttatagataatatagcaaggataaccatgtctcaacaccaattccattttcaaccaggataaacaaaactgcaatcttatcaccaggcttactactctcaagacagggtcacagaagttcaaacatagcacaaattcgaagacaccaaagaccaaacaagagcccaccaagaacgctagggcttcagcgcagcctcctggcctccctctcggactcgagcagggtgaggatgtcaccctcgcgg

SEQ ID NO: 302082 - DNA, 310 bp, Zea mays
gtcctctgttacttctccctccgccgccactcccctcccattcaccgccaccgccaattccataccgtcctccgccacctctgctgagagcgagaagagatggcaggcaagggtgatgggccggcaatcggcatcgatctcggcacgacgtactcttgcgtcggcgtctggcagcacgaccgtgtcgagatcatcgccaacgaccagggtaaccgcaccacaccctcgtacgtcgccttcaccgactccgagcgcctcatcggagatgcggccaagaaccaggtcgccatgaaccccatcaacaccgtct

SEQ ID NO: 302083 - DNA, 303 bp, Zea mays
aacaagttcggccactacgagaagctcaagttgcgcaactccagaggatgctgcacaacggcctgggcagccacgagggcgacaagtgggccaagcaccgcaggatcatcaaccccgcgttccacctcgagaaactcaagcggatgttgccggccttcgccgcgtgctgcacggacctggtggagaggtgggaaggcctggtcgcggatgggcagcagccgtgcgaggtggacgtgtggcctgagatgcagaacctgacgggggacgtcatctctcgcgccgcgttcggcagcagctacctcg

SEQ ID NO: 302084 - DNA, 304 bp, Zea mays
caccacgcgtccgcggacggtgggcgacgcgtggggcccccggagccggagcaagagcgccgccaacagcccgctaccggcgccgtgtcatggcgggggcaggagacaaggtcgactacgtcttcaagaccgtgctgatcggcgactcggcggtgggcaagtcgcagatcctcgcgcgcttcgcccgcaacgagttcagcctcgactccaaggccaccatcggcgtcgagttccagacccgcaccctcgtcatcgaccacaggagcgtcaaggcccagatctgggacaccgccggccaggagag

SEQ ID NO: 302085 - DNA, 309 bp, Zea mays
  unsure (1)..(309): unsure at all n locations
gtcggacttcgggctcgccaagaacgggccctccgccgggcagtcgcacgtcacgacccggatcatcggcacctacggctacgcggcgccggagtacgtcgccaccgggcacctgtacgtgaagagcgacgtgtacggcttcggcgtggtgctgctggagctgctgacggggatgcccgcgnacgacccgaaccgccccagccaccagcacaacctggtggagtgggcgcggccctacctctccggcgccggcagcaagctcaagactctcatggaccagcggatcgacggccagtaccacaccaaggc

SEQ ID NO: 302086 - DNA, 315 bp, Zea mays
agagtccgcgcgacgcgtgggacggacgcgtgggcggacgcgtgggcggacgcgtgggcgtagcgtggggtgttctcaactgctgctgacaatcagacccaagtgggtatccgtgacctgcaacgtgaccgtgaaatggccgcagacaacaacgttcttggtgaatttgacctcgtgggcattccacctgctccaagaggcttgcctcagattgaggttacattcgacatcgatgccaatggaatcgtgactgttgctgccaaagacaaggctactgggaaggagcagaacatcaccatccgatcctcaggtggg

SEQ ID NO: 302087 - DNA, 318 bp, Zea mays
ccccacgcctccccccacgcctccgccgaccgtggggttcgatgaccgccgtgtcccctacaacataatgtccggcacctccatgtcgtgcccccacgtcgccggcatcgtcggcctcctccagacgaagtacccagcttggacccccgccatgatcaagtcggcaatcatgaccaccgcgaccaccacggccaacgacggcaacccgatccaagatgagaccggcgccgtcgccacgccgttcggctacgggtctgggcacgtggaccccgtgaaggcgctggacccggggctggtgtacgacaccacgctgctcga

SEQ ID NO: 302088 - DNA, 305 bp, Zea mays
cccacgcgtccgcatcttttctcgtttagaacctctaaaatttcccccactcgccagtcgcagcagcacctgtagcagccatggacgccagcggagcggtagcaaggggaagaagggggcggccgggcgcaaggcaggcggccccaggaagaagtcggtgacgcggtccgtcaaggccgggctgcagttccccgtcggccggatcgggcgctacctcaagaagggccggtacgcgcagacgtgaggcactggcgcccccgtctacctcgccgccgtcctggagtacctcgccgccgaggttctgg

SEQ ID NO: 302089 - DNA, 308 bp, Zea mays
gagctcgacgccgtcgtcggccgcgaccgcctcgtctccgagtcggacctcccgcgcctcacgtacctcacggcggtgatcaaggagacgttccgtctgcacccgtccacgccgctgtcgctgccccgcgtcgccgccgaggagtgcgaggtggacgggttccgcatccccgccggcaccacgctgctggtgaacgtgtgggcgatcgcccgaaacccggaggcgtggcccgagcctctcgagttccggcccggccgcttcctcccgggcggctcgcacgcgggagtcgatgtcaaatggagcgactt

SEQ ID NO: 302090 - DNA, 284 bp, Zea mays
aagatcaccatttcttggtggccttgcggcaatgcgtgattcagaagtagactacacaattgaagctattctagcaaacgctcagaatgaaagcccctggaggtacctcaagggtctatacaagggtgagaataacctgctaatagaggacgagcgcatctctggtgtttgtttcaaggtcctgaagaatgattggacttgtgtatttgctttgagtttgctgctcgatcttctctgcactggtttgcagccttcagatgaacttaggtccactcttgaaacaa

SEQ ID NO: 302091 - DNA, 309 bp, Zea mays
caagaacatcgtgaggctgataggctgttgcctagaagtcgacaagccaatgctcgtgtatgagttcctctccaaaggcagcctcgacgatgttcttcatggaagcagacgtgatccactgaacttgaaatgccgtctggacattgctgcagagtccgcagaaggcctagcctatctgcattcgaaaacaacaaacgtcatcttacacggcgatgtgaaaccagctaatatacctttggatgaagactggacaccaaagatctctgaccttgggtatatcgaggctgaatgttgaaaggtaacagcaca

SEQ ID NO: 302092 - DNA, 309 bp, Zea mays
gccgccagcaacccccctcccgctccccgcaaaaccctagcgctctctacctctgtctccctctgttcgtcggcgatggcggcggcggggggcgaggaggaggccggcgagaccgcaagcttttcgtgggcgggatcccggccggggcgcaggagcccgagctgcgagcccacttttcgcgctttggggaggtgcgctctgtcatcgtgatgcgcgacccacataccggccacggccgggggttcggtttcgtcgagtttcaggacgaggctgccgctggcaccgcgctcggcgacgctgagaagctca

SEQ ID NO: 302093 - DNA, 315 bp, Zea mays
cccacgcgtccgcccacgcgtccgcccacgcgtccgcccacgcgtccgcccacgcgtccgtcatggtcgagctggtcggcaccaaggccgtcgacggggaggcgccgcccaggatcctgcacttgaaccccaggatccgcggggactaaagccggaagcccgtcgtcgagatgaacagctgctaccggatgcagtggggacagtcgcagcgctgcgagggcttcgctcccgccccgccgacgacaccggtgagttgtcgtcaacctctccagcgacctccggatttgtcgggttcattttgatttgctattttga

SEQ ID NO: 302094 - DNA, 249 bp, Zea mays
tgataacggtgaaggcggaccatttgctctctattcgcttctttgcaggcatacaaaactcagcttgctgccaaatcaacaagcagctgatgaggaactatcttcatactacagaaatgggtttgcacctagcaatggatcttcaccttggttaagaaggtttctggagaagcacaaaaaaatgagagttgtgcttcttctcatagctctctgtggcgctacatggtgattggtgatggtgtcctcacc

SEQ ID NO: 302095 - DNA, 309 bp, Zea mays
ggaccgtggtgccaacgtgaagcaatggaggtcgggggcggcgagaagcacttcgtgctcggtgcacggcctctgcctcggcgcgtggagacggtacaaggttgccacggcgctggaatccgccgggcaccgcgtcacggcgctggacctggcggcgtcgggcgcgcacccggcgccctgcaggaggtgcgctcgttcgaggagtactcgctcccgctgctggacgcggtcgccgcggcgcccgacggcgacaggctggtcctcgtcggccacagccatggcggtgccagcctcgcactcgccatggag

SEQ ID NO: 302096 - DNA, 304 bp, Zea mays
cggacgcgtggcttggtcaccaacagatgctacagcaagtaaagttccatcttcagcgtgctcaggacagaatgaagaaacaggctgataagggtcgcgtggacgtacttatactgtgggcgatcaagtttttctgaaacttcagcccttctgtcaacgattagtggctgacagaccagtttctaaactggcatttcggttttttggtccctttgaggtgattaaacagatcaatcctgtggcctatgaactagcgttaccatctgggagtgctatccacccggtctttcatgtatcgcagtta

SEQ ID NO: 302097 - DNA, 267 bp, Zea mays
  unsure (1)..(267): unsure at all n locations
atacagacacaccacccacccaaccactcgattcagccgccaccgccgcgcgtacaagcaggtggagaaaagatgccggctagccacggcatgagcacgcggacgcgagacctcttcgagcgcaccttcagaaagnagagcaacatcccgctcaacaactacctccgcacctacaagatcggcgattacgtcgatgtaacagtgaacggcgccgtacaaaaggggatgccgcacgagttctacgacggacgcacggtacgcgtatag

SEQ ID NO: 302098 - DNA, 252 bp, Zea mays
caggcgcttcctggccgccgtgctgcccgaccgccagtcaggatcctcggcggcaggctcggcagcttcaacctcaacccggggcccttcaacgtcaaggagcacgtcatcatcaccatcttcggcaactggagcgtctcctaaggcggcggagacgcttactccatcggcgccatcaccgtcatgaagggctactacaagcagacgctcaagttcgcatgcgccctcctcatcgtccctcacacacagata

SEQ ID NO: 302099 - DNA, 275 bp, Zea mays
caccagcatcggctgcgctgccgtcgtctgcagcaacgaaggcggcgtcttcgccatctgcagctacaacccgccgggcaacctcgacggccagagtccgtactagcttggcgatcatcgatcatatacgcacgcagctgtggatgcttgcaatacctactacgtgtaagtgtcgtatgcatgagtacatgtatacacataccgtacgtgtgtgtcgacggatgacataaaactgggaaccgcatgccatatttaacacacaccaaaaccaaaaa

SEQ ID NO: 302100 - DNA, 301 bp, Zea mays
aaacaagccactgatcaagccttacaagttctccacacaacgactcaatgctctgggtatgaagttcactactttgaaagagagtttatacaacacagtggttagcctacaagagaatggtcatatcccagtactgctacataagtcgtctctatgaggaataaggatataaaaagatggatttccacaagatggtgtcaatgccttagttggtaaagttggactttgtatgaacatgaaaagatgattcttaaagtgaataaccactcaaattgtccaatgaataacataattcagagtt

SEQ ID NO: 302101 - DNA, 265 bp, Zea mays
gcaagttaatgagttgcatcgaagcagcccttttatggaaagggtggcattattacctgcattttgaccattttctgttgattgtataatatgatgttcaggttaatgcaagtggtcagttctgtggcgtggctgagatggttggtccagtagatttcaacaggaacatgaacttctggcaacaggacaagtggaatggtttcttctcggtaaaatggcacattatcaaggatgttcccaatccacaatttcgccatataatttt

SEQ ID NO: 302102 - DNA, 300 bp, Zea mays
aacacgcgtccgcggacgcgtggcgaccgtggtcgcgacgcgtgggcgcagctccaaagccactcccaaacccccgcttccagaaccttctcgaagctccccgcaggctccttcactcgcaccgatcgcgaaggaacacatgcgcgtgctcgtcactggcgccgcagaccaattggatatgcctggttcccatgattgctaggggtgttatgcttggtgcagaccagcctgttattctgcacatgcttgacattccgccagcagctgaagcccttaatggtgttaagatggagttggttg

SEQ ID NO: 302103 - DNA, 271 bp, Zea mays
cacagaggtcttggtggtgtgtccattacttcagattgcttctacaatggtggttggacagaagatgtccgagaggtcattacacacctgcatcacagatatccgaaaaccacactgttttgcattggtacaagcataggtgccaatattgtggtcaagtatcttggagaagaaggcgagaatactcctatagcgggtgcagtatctatttgttctccatgggatctgttgataggtgacagatttatttcccgcaagcttgtacagcgta

SEQ ID NO: 302104 - DNA, 264 bp, Zea mays
cccacgcgtccgcccacgcgtccgcttccacctcaacccgtctggccgcttcgtcatcggcggacctcacggcgacgctggcctcactggccggaagatcatcagtccaggtctcctacgccatcggcgtgccccgagcccctgtcggtgttcgtggacacgtacggcaccggcgcgatccccgacaaggagatcctgaagatcgtgaaggagaacttcgacttcaggcccggcatgatcatcatcaacctcgacctcaagaaa

SEQ ID NO: 302105 - DNA, 261 bp, Zea mays
cccacgcgtccgattcctaggagagacaccttctctaccagtgttgggttcacttgtccctattgttggcggagttgtattggcgtcgatgactgaagtttcattcaactggattggattctggagtgccatgacttcgaatcttatgaatcaatcgcggaacgtttacagcaagaaaattctcgctgataaagaggacagtttggatgacataaatctcttctcaataataactgtcatggcattcttgttatctgctcc

SEQ ID NO: 302106 - DNA, 289 bp, Zea mays
ctcaggttttgctgctctccgaccccgagctccgaagccgcagcatcaggcgcgccccccctcgcgtgtgaccgagatggcgctgccgaatcaggggaccgttgattaccccagcttcaagctcgtcatcgtcggcgatggtggaactggtaaaactacatttgtgaagaggcatctcactggagagtttgagaagaaatatgaaccaaccattggtgtggaagttcatccgttggatttcaccactaactgtggtaagatcaggttctactgctgggataccgcaggc

SEQ ID NO: 302107 - DNA, 304 bp, Zea mays
cataccttggctcttgatgtgcacttctaaatcacttggcacatatgaacttaaaacaatgtgttggccatctaatcacaaaaacatttatagaaatggctcaagggcacatttccctttcagaagtgtctaagggtctagctaacccaggcctaaccattcaccttggaagaatctatggttttggctaacccaggctaaaagggatacacgacctctgcaaagtgtaaaactggtatatcagtcgtgctcacagttaagagcgactcgggactctcacgtgattaatatatggaagtaaatt

SEQ ID NO: 302108 - DNA, 303 bp, Zea mays
gcagctttgctggccagggtgtggtctatgagacactccatctaagtgccctcccaaactacactactggtggaaccattcatattgttgtcaataaccaagttgcctttacgactgatccaagagctggcaggtcctcccagtactgcacagatgttgctaaagccctgaatgctcctatattccatgtaaatggcgacgatttagaggctgttgtttgtgtttgtgagcttgcagcggagtggcgccagacttttcactccgatgtggtggttgatctgatttgctaccgccgtttcgggc

SEQ ID NO: 302109 - DNA, 295 bp, Zea mays
ggcccactcctggcttccaccactcctgtcacctcttcccgcgccgacgcagccgccatggaccccgtctccacatgggggctaacccgctcgcaggcgccgacccggagatttacgacctcctggagcgcgagaagcggggccacgtcgcggcaatgaagtcatcggcttcgggaaatttaacttctttggcggaaatgaaggcgtagggttcggggctcataaaaagtaactccgagggaatgccgggcgcccgtaattaggggggaaaggagttaattgacgatttcgaaaa

SEQ ID NO: 302110 - DNA, 294 bp, Zea mays
taccacgcgtccgcccgcgcgtccacccacgcgtccgcccacgcgtcgtgccgcgcgtccgcggaccgtggcgtggggtccgctcttcggggaagctcttctgcgccttgtgggtgatggttgggtgtacgcgttcctcaagggtctcatgggtcggcagaaccgcacgccgaccatcgtggttgtctggtggatggtggtggcgtcgatgttctcgttgctgtgggttggcgtggatgcgttcaccacgcgcgtcagtggcccggatactcggacgtgtggcatgaactgcta

SEQ ID NO: 302111 - DNA, 263 bp, Zea mays
attgattttgttgctcatgattctctgccgtatgctgatgctagtggagctggtaacgatgtttatgaacatgtaaaaaagcttggtaagtttaaggagactcagcgcactgatgggatatcaacatcggatattataatgcggattgttaaagattataatgagtatgttatgcggaatctggccaggggctacactagaaaggatcttggtgttagttatgtcatggaaaaacgactgcgagtgaacatgggactcaaaaa

SEQ ID NO: 302112 - DNA, 262 bp, Zea mays
gaagagggttggaggggcttcatgcgaggcaacggaacaaactgtatacgcattgttccttattctgctgtgcaattcagcagttacaacttttacaaaaagagtatattcgaaccatatctaggaactgacctgactcccgtcgcccgcctgatttgcggtggactggcgggaataacatctgtcttcctgacctatcctctcgacatcgtccgaacacggctatccattcagtcagcgagctttgcagaattaggagcga

SEQ ID NO: 302113 - DNA, 280 bp, Zea mays
gcagccggactcctccccggggtccccatcctcgcgcgatggcggcaccaacgcgggcgactcggacattgagaacctcaccgaatccgtcatcgacttccacccccgcgagctcgccgccactggtggtgctgctcgcactggtcctgatgcatatgaagctgcattgaaattcgagcatcgtaatagtaaatgatgccattatggccccccatatgagtggcaagtttataacactctcaatggttgctattgcataccatcggtccactacaagggt

SEQ ID NO: 302114 - DNA, 305 bp, Zea mays
  unsure (1)..(305): unsure at all n locations
gagaaggaggcgtgcaggttcgcgggcgagcacggcatcagcctggtcaccgtctgccccgtcatcaccgtgggcgcggcgccggcgcccaacgtccgcacgagcatcatcgacagcctctccatgctgtccggcgacgagcgagggctcgccgtgctcaagggcatcgagaagacctccggcgcggtgcagctggtccacgtcgacgacctctgccgcgccgagctgttcctggcggaggcggcggcggccgacacgaggtacatctgctgcggcctcaacacgnacgatctcgagctcgcgcg

SEQ ID NO: 302115 - DNA, 300 bp, Zea mays
tatgataacggatgtttgtgtccctctatccagacttgctgaatgcatatctacatcaaagcgattgcttgatgcgtcgccattgacttgtctggttattgctcatgctggtgatggaaattttcacacaattatcctgtttgatccaagccaagaggaccaacgataggaagcggagagactaaaccatttcatggttcatacagctctgtctatggaaggtacatgcacaggagagcatggtgttggcacagggaaaatgaagtacctggagaaggagttgggcatcgagtcactcag

SEQ ID NO: 302116 - DNA, 295 bp, Zea mays
cagacaagcaaggaatcccccgatggctcatcgcgttctcctcctcctctctctcgcgtcggccgccgcggttgccgccgccgtcgacgcggaggacccgctgatccggcaggtggttcccggtggagatgacaacgatctggagctgaacgcggagtcccacttcctgagcttcgtgcagcggttcggcaagtcctacaaggacgccgacgagcacgcgtaccggctgtccgttttcaaggccaacctgcgccgcgcgcgccggcaccagctgctggacccgtcagcggacacg

SEQ ID NO: 302117 - DNA, 295 bp, Zea mays
cccacgcgtccgcccacgcgtccgcccacgcgtccgcccacgcgtccgcccacgcgtccgcggacggtgggttgtcaacatttgccacttcatgggtgtgatgcaccgtgacctgaaaccggagaacttcttgcttgcgagcaaggaggagaatgcaatgctcaaggccactgattttgggctttccgtcttcatcgaagaaggaaagatgtacagggacatcgttggaagtgcttattatgttgcgcctgaagtccttaagcggacctatggaaaagagatagatgtttggagc

SEQ ID NO: 302118 - DNA, 257 bp, Zea mays
cttgatccatttaaggccttgttcggttaattccgttacacatggattggatggtattggaaaaaattaagaagaagtttgacttccttgggatttaaaccacccaatcccactcaatccatatggattgagagataaccgaacaagctctaaacgcgcaacacttctcttttaggagctatatatactacgtcgatagaatgtatatataggtcctcaaataaaccagccaattaaccaacagaaccatagctcat

SEQ ID NO: 302119 - DNA, 288 bp, Zea mays
tcctggcgctcgccgcgctctacgccgcgcgctgcctgctccgcttccccgccgtgcgcgcagagttccggcaccacgtcgccatgaactacctgttcgcgccgtggatctcgtgcctactgctactggctctgatgaggaccactcatcctctccaactcgcagccatgatggtgacaaagcagctgcagatgatgatgacgatgatgtccagtggcagactgacacttcaattgacgctgcgaacggcgcatgcaagagcagctgagtgcagcaactgctgaaatg

SEQ ID NO: 302120 - DNA, 279 bp, Zea mays
gtgaggacatgacctccttgcctccgagtactgcagattttgcgctcccgtacagggtgaggagccagccttcgtcgagcccagtacgggatcacaaacagcttcttgacgcctcggaggaaacaagatacgccacggacaaagatgttgacctcccattgtttgagctggaggtgattctggccgccacggacaacttcgcgggccacaaaaggatcggagcaggcggatttggcccagtttatatgggagttcttgaggatggacagcaggtagcag

SEQ ID NO: 302121 - DNA, 332 bp, Zea mays
  unsure (1)..(332): unsure at all n locations
ctcgcatttcttcccatccgatccccccttcgcaaccaaaaccccaactcgccccgcatcgatggcgcccaaggccgagaagaaacccgcggcgaagaagccggcggaggaggagcccgcggccgagaacgcgcccgccgggaagaagccgaaggcnagaagcgggtccccgctggcaagtccgctgccaaggaaggcggcgagggcaagaggggcaagaagaagggcaagaagagcgtggagacctacaagatctacatcttcaaggtgctgaagcaggtgcacccggacattggcatctcctccaaggccatgtccatcatgaactcctt

SEQ ID NO: 302122 - DNA, 319 bp, Zea mays
ctaagtcctaactacctccacccccgcacgcacaactggccgcaccaaggcaaagctagaagaagacaacgcaaagggagaggacagaggaggagcagaggacgatgggcagcggcggcgctaacactgcccccctcatcaccccctacaagatgggaaaattcgatgtttcccacagggtagtcctcgcaccactgacgagacagcggtcctacggcgactaaaggaggtcttctgatagctgaggccacgggggtttcagacactgcccaagggtacaaggacactcctggcatttggacccatgagcaagtcgaag

SEQ ID NO: 302123 - DNA, 314 bp, Zea mays
cggacggtgggcggacgcgtgggctacgggaagctgagcgatggaaaggagatcgctgtgaaggtgcctagcaacgattcgtaccaggggaagaagcagttctcggacgaggtggtcatgctctcgaggatacaccataggaacctagtggcgtttctaggctactgccatgaggatgggagaaacattctggtctacgagttcatgcacaatggaacgctcaaagagcagctgcataggcgcgacaagcacatcagttggatcaagcggcttgagattgccgaggatgctgcgaaaggcatcgagtatcttca

SEQ ID NO: 302124 - DNA, 312 bp, Zea mays
cttgttcatgtgagtaggttttctgcatcttagctgttgtggggaaagtgggtagagatgttcgatgaatttggatctgatccatcatttaacttttcatgtaacgccactctggaatgcaggtgtcaacagctgttgtagagccatacaacagtgtcctctcgacccactccttgctcgagcacactgatgttgcagtcctcctggacaacgaggctatctatgacatatgcaggaggtcccttgacatcgaaaggccaacctataccaacttgaacaggctgatcttacagatcatatcatcacttacca

SEQ ID NO: 302125 - DNA, 313 bp, Zea mays
gagctatctggcagtgatttgattggtttgccactgaaatctcctcttgccttcaatgaaacaatatatgctcttccaatgctcactgtcttgactgacaaaggtactggcattgtgactagtgtccctagtgattcacctgatgatttcatggcactgcaagatttagtcacaaagccagcattgagagcaaagtatggagtgaaagatgagtgggttcttccttatgagattataccaataatccacattcctgaatttggagacaagtcagcagagaacgtttgccatgatcttaagattaaaagccaga

SEQ ID NO: 302126 - DNA, 298 bp, Zea mays
ctcccacctggaggacctggagaagctgggcctgggccccttggaggtctaccgcgccgacctcgccgaggaaggcagctacgacgaggccgtcgccggatgcgactacgccttcctgctcgccgcgccggtcaactacacgtccaagaaccctgagaaagagctgatggagctcggcgtccaaggcactctgaacgtgatgaggtcgtgcgtcaagtccggcacggtgaagcgcgtggtcctgacctcgtcgacggccgccgtctccagcaagccgctggaaaacgacgggcacggg

SEQ ID NO: 302127 - DNA, 315 bp, Zea mays
  unsure (1)..(315): unsure at all n locations
ggttttgctgctctccgaccccgagctccgaagccgcagcatcaggcgcggcccccctcgcgtgtgaccgagatggcgctgccgaatcaggggaccgttgattaccccagcttcaagctcgtcatcgtcggcgatggtggaactggtaaaactacatttgtgaagaggcatctcactggagagtttgagaagaaatatgaaccaaccattggtgtggaagttcatccgttggatttcaccactaactgtggtaagatcaggttctactgctgggataccgcaggncaagagaagtttggtggcctcagggatgga

SEQ ID NO: 302128 - DNA, 284 bp, Zea mays
ctccaaacaggactgggatggattgtttaagatggatcagctgaaaaaggaactaggtaaagggtgcacatttgatggttgggttgaagggcctatcaccttccccccaacgtataaatacgagtttaactcagaaaaatatgtaagtgacgcgacgaaatctgggagaagaacacccgcatggtgtgaccgcatcctctcgtatggggaggggacaaggctactttcatacaacagggcggacttatattatctgatcatcgaccggtgactgcagtttatat

SEQ ID NO: 302129 - DNA, 297 bp, Zea mays
acgggagcgcggacggtggcggacggtggcggaccgtgggcggaccgtgggcggaccgtgggcagcttttcacggagctctaccctgactcatggcatgcaaccaccagatgcaccatagccagaatggcgagcccttcttgatgagatggcagttgtggcaactgaggaatatcggtccattgtcttcaaagagccacgctttgtcgagtatttccgccttgcaacccctgatacagagtatggtaggatgaacataggaagcaggccatccaagagaaagccgagcggaggtatc

SEQ ID NO: 302130 - DNA, 298 bp, Zea mays
ggaccgtggggaaatcttcaccactgcccaaagcactgggatgatgcagaagttttcaatccagaaagatggccttagctatggaccaaatccaaacgagataaaccaaaatttcagttacttaccatttggtggcggaccaaggaaatgtgtgggtgacatgtttgctacttttgagactgtggtggcaacagcaatgcttgtcaagcgatttgactttcagatggctccaggagcacctccggttgacatgacaactggagcaacgattcacacgactgagggattaaaaatgact

SEQ ID NO: 302131 - DNA, 310 bp, Zea mays
ggcaggtggttcccggtggagatgacaacgatctggagctgaacgcggagtcccacttcctgagcttcgtgcagcggttcggcaagtcctacaaggacgccgacgagcacgcgtaccggctgtccgttttcaaggccaacctgcgccgcgccgccggcaccagctgctggacccgtcggcggacacggcgtcactaagttctccgacctcacgccggcagagttccgccggacctacctcggcctccgcaagtcccggcgcgctctcctcagagaactcggggagtcggcgcacgaagcgcccgtgctcc

SEQ ID NO: 302132 - DNA, 304 bp, Zea mays
cccacgcgtccgcccacgcgtccgcccacgcgtccgcccacgcgtccgcccacgcgtccgaaggcggcaagggtctgggcaagggtggagccaagcgccaccggaaggtgctccgcgacaacatccagggcatcaccaagccggcgatccggaggctggctcggaggggcggcgtgaagccatctcggggctcatctacgaggagacccgcggcgtgctcaagatcttcctcgagaacgtcatccgcgacgccgtcacctacaccgagcacgcgcgccgcaagaccgtcaccgccatggatgtc

SEQ ID NO: 302133 - DNA, 290 bp, Zea mays
cccacgcgtccggcggctacgcgtgcacgccaccgtccgtgacccgcgtgatcccaagaacgcccacctggggcagctggaatgggccgcggagaatctccggctgttcaaggccgacgtgctcgacagcgacgcgctggctgccgcagtctccgggtgccggggggtcttccatgttgcctgtccggtgcccacggatagggttcttgatccggagtcagaagtactggctcctgctgtgcaaggtaccttaaacattcttcaggcttgctcagctaataatattcaga

SEQ ID NO: 302134 - DNA, 302 bp, Zea mays
cagaaggcaaccacatgagtggacatgttgaaaccccaatgtcgtcaaacttctatgctggaattgggatggacagtggatatcagaagaaatctacgtccagttcatccagagtgcagattgatgaaagcagggaagcaagacagaaatactcaaaagcgaaatcaatttcttactctcagtttttaggtgatcaggccagtattgaaaaggacgctcaagtctcactccgaaagtattctggatcctctgcgatatcaagtgctgacctataaggccatacggcagacaattctagcgtg

SEQ ID NO: 302135 - DNA, 312 bp, Zea mays
gcctccctaacccctacactccctccctctccccgcgggccgctagaggcaatttcgccctcgattcgaccccgattcgtccgcccgcgaccgggattccctccgccaagcgcggatctgaacgctgcgctccgtgtcgccgctcgaatccgccatgaagggggccaaatccaagggcgccgccaaggccgatgccaagctggcggtgaagagcaagggggcggagaagcccgccaagggcaggaaagggaaggccggcaaggaccccaacaagcctaagagggctcccagcgctttcttcgtgttcatgga

SEQ ID NO: 302136 - DNA, 307 bp, Zea mays
aaaaaatcatgctattgctctcccggaaagagttaatccagccaatttgagtttgattcttgactactgtcgatttcatcagatcactgggcgttcaaacatggagcggaagtcctttgatgaaaagtttgttaggatagaaacagaaagactctgcgaattgacttctgcagccgacagtctacagttaaagccacttgttgatcttactggccgagcgcttgctcgaatcattgaaggaaagacacctgaggaaattcgtgacattttccatttaccagatgatttaacagaggaagagaaattg

SEQ ID NO: 302137 - DNA, 303 bp, Zea mays
caacctcatcctcaacaactgctgcaagatttgcccggaggacttcacttgccccaactaattgagctgaatatggagataaaaccagcatccaaggaatgtaccccttaatattcgatctcgcgattctgattgtgacttgatcatcatcactgtttatctatttttatattttatacttaattatcaataagaaaaatataaaaaaatagaaaataaactcactatacgaatgcccaaatggctgagatatggagatgcacaccctacaccatacactagtgactaaatacatgcacaaca

SEQ ID NO: 302138 - DNA, 327 bp, Zea mays
cggacgcgtgggcgagaaattggtaatttgtcaaaactcgttgtcttcaatatctcatctaatagactaggaggaaacataccactagagattttcatttgtacagtgttgcaacgcttgatctcagccagaatagctttgaaggttcgttgccaaatgaagttggtaggctgccacagctggagctgctatcttttgctgacaataggctaactggccagataccacccattcttggtgaactatcacatttaacagcactacagattggtggcaatcagttatctggtgaaataccaaaggagctgggtctgctgtcgagcttgc

SEQ ID NO: 302139 - DNA, 325 bp, Zea mays
cggacgcgtgggcggacgcgtgggcggacgcgtgggcggacggtggggttggtagcagcaaggatactagtgttgatggatttaaaagtctttagaatttttttaattctcgaattcctgaattcaaagttcaggtgataaatgttgatgtgtctgaggaaactgaattggctgcaaattcgtccgaagaatcagtgcaagacgatgtgaagagtactccagaaggctcattggaagagccaaccactgaggaacttgagcaggaggaggatgttccagaagaagatatggatgaagaaagtaaaagtacgaaagtgaagctttt

SEQ ID NO: 302140 - DNA, 328 bp, Zea mays
ctagttctagatcgccagccgccgctcgggccgctcgatctagaactagcccacgcgtccgcggacgcgtggcacgagcgcactatctacatcccacaaccaatcctggggaaatcacccaaaagtcttcacactatctggcttgaacgttaggagctaccgctattatgatcctgcaacatgcagccttcacttcgaaggactcctggaacacctcggttctgctccttcaggttcaattgtactgctgcatgcctgtgctcacaaccctactggagtagatcctaccatcgaacagtgggaacagattaggcagctgatgagatca

SEQ ID NO: 302141 - DNA, 331 bp, Zea mays
atcccagcctcggtcgtatcatcaactgcaagctccggcatccccaggatttgatcctatctcttctaaatagccgtgttcctccattttacgctcaccgatcatcaaattatctccaagccatcatgtcgaccttcggaacactctttcgcgttactacctacggtgaatctcactgtgcctcggtcggctgcattgtcgacggcgttcctccaggcctcaaactcactgctcctgacattcaagtgcagcttagccgtcgacgacctggtcagagcaatttgaccactccccgaaacgagaaggaccttgtcaacatccagtccggagt

SEQ ID NO: 302142 - DNA, 334 bp, Zea mays
cccacgcgtccgagcacggtggcgggcaacctgtcgctgctgggatcggcggcgaacctgatcgtgtgcgagcaggctcgacgggcgcacgcaacgcctacgacctcaccttctggaaccacatcgtcttcggcgtgccctccaaccctcatcgtcaccgccatcggcatccccctcatcggaaagatcaacatctgatcgtagctcatatatactacactacatgcataattgaggcactcacgttggcgtcgctcatcgatgacgagaagaagcttggcgactgtcagctcgacctctagaagcagtcctacgtggtcgcatgtgtcgctgt

SEQ ID NO: 302143 - DNA, 341 bp, Zea mays
gtcgggttattaatataaggccgcccagccagcctaatcactccgcataattcgtgcttgtgatcgagcagctgtcgctgtgtgtgtataatggcactggcaggcaaggcatcggtcgcgctgttcctcgccgtgaacctggcggtgttcatcgccatggccagcgcctgctgtggcaactgccccacgccgaccccgtccaccccgtcgacgccgaccccgacgccggcctcgttcggcaagtgcccccgcgacgcgctcaagctgggcgtgtgcgccaacgtgctgggactgatcaaggccaaggtgggcgtgccgccacggagccatgctgccggctg

SEQ ID NO: 302144 - DNA, 327 bp, Zea mays
agcctctcgctgtgcattgaccagcgcagagacaagtagagcagggagggaagcccatcgtgtgtttctcagtcccagtcagcagcatggctgccggcgtcgcaacggcggaggagatcaggaagaagagccactcgggcggtgtgcggcggtcgccggtggacaggccgccgttcacgctgggggacatcaagagggccatcccgccgcactgcttccagcgctcggcgctcaggtccttctcgtacctcctccacgacctcgccatcgcggccgggctcctgtacctggccgtggcgggcatcccggcgctcccgagcgccgcgc

SEQ ID NO: 302145 - DNA, 321 bp, Zea mays
cggacgcgtgggcggacgcgtgggctggcccgacagcgccttcatctcccaggagctccgcgtgggtcccttcgcggtcagcgtgttccgcctgacatggcgatcgtcgtacgactgcctcaccaccgtcgttgccatgctgcttgccgttcttcggcaacgtggtggggttcctcggcgccgtctccttctggccgctcaccgtctacttccccgtcgagatgtacatcaagcagcgccgcgtgccgcgcggcagcaccaagtggatctgtctccagacgctcagcgtcagctgtctcctcgtctccgtggcggccgctc

SEQ ID NO: 302146 - DNA, 309 bp, Zea mays
cccaggaggcagacgatgccaagatggcagctcatttggcacaagaagaactgagaaaggccaaggaagaagctgagcgaactaaggcttctgcgacaactgcagataccaggttgcgtgcagttctgaaagaaatagaggcgtctaaagcatccaaggggctagccatagcggcagttcaagcgatgcaagagagcaatgacgcaggaagcgctggtgcttctcctcgaggagtaacgcttcctataagcgagtaccatgctcttagcaagagggttcacgaagccgaggaacttgcgagcgagaggg

SEQ ID NO: 302147 - DNA, 327 bp, Zea mays
cgacgacgaggaaatggcgcaaggtgccgccggcgtagtagagacgaggaggcatggtggcaagccgcacgctgtggtggtggcgtacccgctgcagggccacgtcatccccgtggtgcacctggcgctgcggctcgcggcgcgggggctcggcggtcaccttcgttagcacggaggccgtgcacgacaccttcttcgtgtggcccgccactctggccaggcgcctcggcatcgcgtatgtgtcgttctggaccgagccggcgctcatcttcaacctctactaccacatcgacttgctcacccagaacggacactttagatgcaacg

SEQ ID NO: 302148 - DNA, 318 bp, Zea mays
gtgggatgggtccagattttcgtgttctggtgagaaaaaactgccttctattttagtggatgaaacatctgtgcaaaagattcaggcactaacaccaaatattggagttgtctatagtgggatgcgtccagattttcgtgttctggtgagaaaaagtcgaaagcaggcacaacagtattatcggttgtacaaggagcatatacctgtaacacagcttgtgcgggagactgctgctgtgatgcaggagttcacacagtcaggtggtgtaagaccatttggagtatcactgttgattgctgggtatgatgacaatggccc

SEQ ID NO: 302149 - DNA, 287 bp, Zea mays
cagaaagccttcgtgctcctctgtctctatctctcttcttctccaagtatcattttcagccaagtattttcctctcccgataccccaaccgctcttcttctggttctctcgatccccttcctagggactgctaacaccctacctcacccgcgaccaccgcgtggtgctctacgacctcgtctgcgccggcagcgtcaacccggagcacttcgacttccgccgctacgacacgctggactcgtacgtcgacgacctgctcgccatcctcgacgcgctccgcgtcccgc

SEQ ID NO: 302150 - DNA, 299 bp, Zea mays
  unsure (1)..(299): unsure at all n locations
cggacgcgtgggcggacgcgtgggcggacgcgtgggcggacgcgtgggtcaccatgtccatcacatccacagcagcggcaacaagctagtagcagatgttttcttgctccacgacgtgctacngccagggcccgaagtcacgccgatcatcccaccgaccaccaccctaccacctctgctgcctctccgcgaggccgacgcgctcccgttctccaccgggcggttcgccgacatcctcgccatgttcgcggcgacgacatccgacgccatgggcgaagagatacggtcgacggtcgaca

SEQ ID NO: 302151 - DNA, 345 bp, Zea mays
cggacggtgggcaggcactgtgcaaggttgttactaaatcagcggaggattttaaacaaagtattagaagagcacggcgacaagtccggcgaccacaagacgaagaaggacaagaagaagaaggataagaagaagcacggcgagggccacgaccacgacggcggccacagtagcagcagcagcgacagcgactgagatctggtgtcgcagcacaggtgcaacacaagtatgcttgctggatggaggattcataccagctgatgctgatgtagtgtttcactggtgtcatgcatgcatgtatcgtgctattataatcaaaaagaaaaaagaaataacagtcaggga

SEQ ID NO: 302152 - DNA, 346 bp, Zea mays
gctgtcctcccttcctttccctcttcttcggctccaaggaaaaggaggcggatgcgaatgggagtggctccaacaaggcaacacaatccaccggcaccaacccagcgcggcgccaccggcgacccgtacccccttccccggagagcgatggcgacggagctgacggcggcgcactgcgcgcgtacgacggcaccgacccgtccaagcccatctacgtctccgtccggggcaaggtctacgacgtcacctccggccgcggcttctacggccccggcggcgcctacgccgtcttcgcgggccgcgatgcaagccgcgccctcggcaagatgtccaaggacgaggccga

SEQ ID NO: 302153 - DNA, 341 bp, Zea mays
aagatatgcaagtatttactacaacaggccagaagtgcagatggcattgcatgcaaatacaactggaattcattacccttggcaaacatgcagcgatattgttggatcctactgggctgattccccaagatctatgcttccaatctaccaagaactgatagcagctggtatcaagatctgggttttcagtggggacacggatgctgtagttcctgtaactgcgacaaggtactcaatagatgctctcaagcttccaacactggtaaattggtacccttggtatgaccatgggaaggttggaggttggagccaagtttacaaaggactaacccttataacca

SEQ ID NO: 302154 - DNA, 305 bp, Zea mays
gcggaacggccgggctagagtggcgtgcgacttctccggcgccggctctattgtttaccagcaacccagcttctgcgccgcgacggcaagctggtgcgtggcgaacccgggtgtcggggacgcgcggctgcaaacggcgctggactacgcgtgcggccatggcgcggactgccgcgccatccagcccgggggagcgtgcttccagccggacaacaaggcctcccatgcctcgtacgcgttcaacggctactaccagcgcaacaaccgggctagagtggcgtgcgacttctccggcgccggctcta

SEQ ID NO: 302155 - DNA, 298 bp, Zea mays
attgtatgcaggcaaaacaaggtactggtgaaccagctgagtcaaccagaaccaggaacatcagatctttatttccctacagagtactcacaatccacagtaggacagttcaaagcctgcctctggaagcaatggctgacctattggcgcagccggattacaaccttgttagattttccttcactttgttagttgccttgctgctcggctccattttctggaggataggcaccaacatgtaaattttcttactttcttcgtgtttggtcgctggtgccaaccttccaaatctgaaagt

SEQ ID NO: 302156 - DNA, 310 bp, Zea mays
cccacgcgtccgcccacgcgtccgcccacgcgtccgcccacgcgtccgacgccatcaaggctaggctcgacgccgcctgccccggcgtcgtctcctgcgctgacacgctcgcgctcgccgcgcgtgactccgtcaggctgacgaaaggcccgttcatcccgctcccgacttgccggagggacggcaacaggtcggtggccgccgacgtcgccctgaactcgccgccgccggacgccaacatcaccgatatcatcgccctgtttgctaaaaagttcaacctcagcgccaaggacgtcgccgtcctctccgg

SEQ ID NO: 302157 - DNA, 304 bp, Zea mays
cttcccggcgctcgcgcgcttcgacctgcagggcatccggaagaagtccgacgcgctcaaggaacggttcaaccagatgttcgccaggatcatagagcagagggtccacgccgagcgggccggcggcgagcccccggcgcccgacttcttggagtacatgctcaagctcgagaaggaaggcggcgacgggaaggcgtccttcaccatgacaaacgtcaaggcactgctaatggacatggtggtcgggggcacggagacgacgtcgaacaccgtggagtgggccatggcggagctgatgcagaag

SEQ ID NO: 302158 - DNA, 305 bp, Zea mays
cggacgcgtggcgtgacgcgtgggcggacgcgtgggcacatttcctagcactagctcatccgttcacagctttaaccgtagctaagcttactctgtcagaagctatataagttagctggactgccatcgtcgattgtgtctgatcgggatcccatattcactagcaagttatggcaagaactgttcagattggctgggacaaagctgtgcatgagtagtgcctatcatccacagtctgatggtcagacagaaagggttaatcagtgtttggaagcttatctgagatgcttcgttcattcttgccc

SEQ ID NO: 302159 - DNA, 291 bp, Zea mays
cggacgcgtgggcggacgcgtgggcgccgagctcgagcgcgcgctcgctgtcgactccgccaccgcggcctccaacccggaccccgccggccccatggtctccggccacagcctccgcgcctacctccagatcgtcgacgtcgcctccatactcaggctcgacagggacatagcggatcacgctttcgagctcttcaaggattgctcgtccgcgacttgcctcaggaatcggagcgtcgaggcgctcgcgaccgccgcgctcgtgcaggctatccgcgaggcgcagaacca

SEQ ID NO: 302160 - DNA, 289 bp, Zea mays
gtctgctttgcttaatcaaatgttaggctacggatctgtttctctttctcatagagtcatatagtcttctcttgttgttgcgtgacgcttgcttgcagaggcgactcccaagggcattctgaagctgatgaacactgatggcctcacaatctaccacatcaagagccaccttcagaaataccgcatagccaagtacatgcccgtgtcatcgacgtccgaatggaaagaggagaaacgagctgctgccgccaatgacgtgcagaatctcgacctcggcaccgggatgaag

SEQ ID NO: 302161 - DNA, 288 bp, Zea mays
cagaagcaagcatgccttatgattctgcccggacgacgggaactttgcattgactgtatagccagtgtcccatagccttcttccattgcaaaggttcccctcctccgggcagactcagaagcaagcatgcattatgattcgcaatcttgttgcccgaaaccctgagaacaggaccgtcctgcttaatgatggtgcagaaaagcttattagaaaggccatggccctgcacggaagctgtaaagatgctacctcgtctgccttgagggacctgggcctcgacaactacaa

SEQ ID NO: 302162 - DNA, 269 bp, Zea mays
ggacatttaccaaggtgtacaaacgtggagctgtaggtcggtccattgacattagtcagttcagtggatacgatgagttgaagcatgctctggctcgcatgtttagtatggaagggcaacttgaagaacggcagagaataggctggaaacttgtctacaaggatcatgaggatgacatcctacttcttggtgatgacccttgggaggaatttgtcaactgtgtgaagtgcattaggatcctgtcgcctcaggaagtgcagcagattagc

SEQ ID NO: 302163 - DNA, 262 bp, Zea mays
atttgctgcttcatattctgcaccccctgatactagtgcagacgaacagctttcacagaaggaatcctgcttgcagtttacaagcctctcttgggctggaaatatagttggctttcaagacggtgagattgaagtcatttggggtgatggatcgatttctaaggttggtcctcatgaaatatatgttgttggtcgtgaagatgatggtgcctcactagatgatggaacagcctctgatggttctagctgggagactgttgat

SEQ ID NO: 302164 - DNA, 290 bp, Zea mays
accactttattttgtcccagtacagatctgtttactgataagcatattcttgtttgtggagccatacaaggaggaaagaaaaatgcttctctcttactgaaattaatgtcaagcatgagttgctagctttttgctaaagttttctcctaaataatttgtgatgcaggcatgactactacaacagtgccacagaagtggtcctcacaatatatgctaagggtgttcctgctgatagtgtagtcattgattttggtgaacagatgttaagtgtatccattgaagtacctggt

SEQ ID NO: 302165 - DNA, 278 bp, Zea mays
ggaaccctggctactgctgttaaatggctcaaccttcagtcattctagcaactgcaagttatgatcacacaatcagattttgggaagccaagagcggtcgctgttaccgcactattcagtatccagactctcaagttaatcgccttgagataacccctgacaagcggttcttagctgctgctggcaatcctcatatccgcctttttgacgtcaactcaaatagccctcagccggtaattagctatgattcacatactagcaatgtgatggctgtggga

SEQ ID NO: 302166 - DNA, 276 bp, Zea mays
gaactccctctccgggcccatcccgccgcagctcggccagctgcgcaactgcagacggtgctgctgtggcagaaccagctcgtcggcactatcccgccggagatcgccaactgcaaggacctcgtgctcatcgacctgtcgctcaactcgctcacggggcccatcccgagcagcttcggcacgctgccgaacctgcagcagctgcagctcagcaccaacaagctcaccggcgtcatcccgccggagctctccaactgcacgtcgctgaccgacgtc

SEQ ID NO: 302167 - DNA, 301 bp, Zea mays
aaaaaaaaatacatacacacaaaaaaaaaaatatggccgcagttcgtcctttagttaccatctttaatgctgatggcagcgtttcaggaaccaccaaccttcctgaagtcttctcagctcccatccgtaccgatattgttcgctttgttcacaccaacatcaacaagaaccaccgtcaagcttacgctgtttctcctactgctggtgagcaaacctctgctgagtcctggggtactggtcgtgcagtgtctcgtattccccgtgtcaagggtggtggaactcaccgctctggccaaggtgc

SEQ ID NO: 302168 - DNA, 295 bp, Zea mays
cccacgcgtccgcatttcttctctctctgctcctccgcctccgcctgatccatccaagacagggatcgccatgtcggactcggaggagcaccacttcgaatcgaaggccgacgctggggcgtccaagacctacccgcagcaggctggcaccgtccgtaagaacggcttcatcgtcatcaagaaccgtccctgcaaggttgtggaggtttctacctccaagactggtaagcatggccacgccaaatgccactttgtcgccatagacatattcaatgggaaaaagcttgaagatatt

SEQ ID NO: 302169 - DNA, 271 bp, Zea mays
cccacgcgtccgcccacgcgtccgcccacgcgtccgggagaaggaggtcaagaggcagacgctgctcgaactggtggactacatcacctccgccaccagcaagttcccggagcccgtcgtgcaggaggtcgtcaggatggtgtctgtgaatctgttcagggtgcccacccctgccccgagagagaacaaggcgctcgtgtcgttcgacatggaggaggaggagcccgtcatggaccccgcgtggtcgcacttgcagatcgtgtatgagctg

SEQ ID NO: 302170 - DNA, 289 bp, Zea mays
ctcagtggcggtggccccggacggcaccaaggttgacgccgtcgaggcgttcaggatcgccggcattgagcacgggttcttcgcgttgcagcccaaggaagggctcgccatcgtcaacggcacggccgtgggctccggtctcgcggcgatcgtgctcttcgaggcaaacattctcgccgtccttgttgaggtcctctcggcactgtactgcgaggtgatggctggcaatccggagtacaccgaccacctcatccacgcgctcaagcaccaccctggacagatcgaagct

SEQ ID NO: 302171 - DNA, 283 bp, Zea mays
tgcaaaccagttgaatatcttgaaactgcagaaaatgccgctaactttataaaggagaaactttatgatgcaagctcaaagaggctgcatcatagctatcgtaatgggccatcaaaagcaccaggatttttagatgattatgctttcctaatcagtggcttgctggatctctatgagtttggtggaaagatagagtggcttcattgggctgtccaactgcaagtcactcaggatgagttaaatttggataaacaaggaggtggctattttaatactcctggag

SEQ ID NO: 302172 - DNA, 232 bp, Zea mays
ttggcttctcgtccccctccggttcgggttggggttcgagaggttctcgggggttcggtttcgtgggtgagcggatagagatggcggcgacggatgttgagtaccgctgatacgtcaggagcgtcgcctgaaccacggacgcacagtccctccacaacgccttgagcagataccgcgaggtcgtccggtcgaaggtgatgctcggtgggtcgacacagaggtcccggggctt

SEQ ID NO: 302173 - DNA, 308 bp, Zea mays
cgagctggtcgaatccggcagccgagcgagatggagagctacctcaaggagaacttcgggggcgtgcaggccaagcactcgtcggacgaggcgctgagacgatggcgcaaggtcgtcggcctcgtcaagaaccccaagcgccgcttccgcttcacggccaacctcgacaagcgcaacgaggccaccgccatgaagcgaaataaccatgagaagctacgtgtcgccgtgcttgtttcaaaggctgcacttcagttcattcacagcgttgctccgtcgagtgagtacaaggtccctgccgatgtcaaggc

SEQ ID NO: 302174 - DNA, 303 bp, Zea mays
caaagctgctggctcatcaggaatcagtccactgtcaaggccacagactcaatcatcatttcttgggaggatggcattccgctcttcaaacatcacggctgatatggaccttgtgcgccaaatcgaggcgaagtatcctgcttttctttttaagcagcaacttacagcatttgtggatggcttatatggtatgatacgtgacaatgtgaagaatgatctgtcttcattgttggcatatgctattcaggtcccaagaactgtgatagctagtatggtgagaggccgttcttttgggtcatcaag

SEQ ID NO: 302175 - DNA, 315 bp, Zea mays
cgcagggcggcggcaacgacggcgggtactggctcgacctgccggcggacgggaaccagcgggagaaggtcaagaggggagacctcgccggcgcgaaggtgtacgtgcaggcgagcagatgctcggcgggacagtggccgacctcgcggtgtggatcttctacccgttcaacgggcaggcgcgcgccaaggtcggcctcatcccgtcgataccgctcggcgagatcggcgagcacgtcggcgactgggagcacgtaacgctgcgcgtcagcaacttctccggcgagctcatccggatgtacttctcgcagcacag

SEQ ID NO: 302176 - DNA, 310 bp, Zea mays
gggatatctcccccattctgctgcgccaccattgctgcaagggccaaggggagggggtgaacatatcaacataaactgcagggagaaatagctagtggcatatatatggacgcaggacatcacatggagatcaaggaggtagcagcagcggaggcgatgatgatgggcatgccgacggtgccctctcggttcaggaggatctgcgtcttctgcggaagcagccaggggaggaagaagagctaccaggatgctgccgtcgagctcggcgaggagctggtctcaaggaacatcgatctggtctatggcgggg

SEQ ID NO: 302177 - DNA, 308 bp, Zea mays
cacacgcgtccggcgtctgcatcagccatgacatcgagacgaacgagtgcctgcacaggaacggcgggtgctggcgcgacgaggccaccaacgtgacggcctgccaggacacgtaccggggccaggtgtgcgagtgccccgtggtgaacggcgtccgctacgagggcgacggctacactgactgcaaagctattgggccgggcaggtgcgctctcaacaacggcgggtgctggtcggcgacgcgagggcaccagaccttctccgcctgcacggagaccgcgctgacagggtgccggtgcccgccgggg

SEQ ID NO: 302178 - DNA, 311 bp, Zea mays
ctccacttctcgctactgccatgaccatgaaccacgctggccatccaggaccaaatcatgagactttctcacggcaccacctattttgttcaccacaaaacagtaagccaaggtgtaatcttagcttcaggccacgagccgaaagggtaagcggtcagaataatggaagccaagtgctgagcgcaccggcggggatgtccctcaaagaagcatgttcccccctgacttcgtctttggtgcctccacttcagcataccaaattgaaggtggatggaatgaagatggaaaggggccaagctcatgggattact

SEQ ID NO: 302179 - DNA, 297 bp, Zea mays
cccacgcgtccgcccacgcgtccgctctgaatgagctgaagaactgcaccaacaatttttcagacacccatgagataggctcaggaggctatggaaaggtgtacaagggaacactcgttgatggaacgcgggttgccataaagagagcagagcgcggatcaatgcaaggtgtggtggagttcaagaacgagatcgagctgctgtccagggttcatcacaggaacctggtgagcctgattggcttctgctacgaacaaggggagcagatgctggtgtacgagtacgtctccagcggaa

SEQ ID NO: 302180 - DNA, 273 bp, Zea mays
gtgggttggcttctcgtccccctccggttcgggttcgggttcgtgaggttctccggggttcggtttcgtgggtgggcggatcgagatggcggcgtcgggtgttgagtagcgctgcttcgtcgggaggctcgcctggaccacggacgaccactccgctccacaacgccttcagcacgtacggcgaggtcctcgagtccaaggtcatgctcgatctgaagacgcagaggtcccgcagcttgggcttggtcaccttctccacggagtaaggcgatg

SEQ ID NO: 302181 - DNA, 252 bp, Zea mays
cagccccgtctcccgagcgagggtggagggttgcattgttgtgaggtggtcgtgcgtggaggtggtgcgggccgtcgtcccggagaagcagagcgaggaggaggtcgcgcccggagcgacggccaggagcagcagcgccaccgccacgggcgggacgagggcgccacgtggtccaggggtggggcaagaggaagcggtggcggcggcagcggtcggaggaggagaacctcggggtgtgggtggtggtggtgt

SEQ ID NO: 302182 - DNA, 302 bp, Zea mays
cccactcgtccgcccacgcgtccggttaggctagggttcgaccagctagcggaaatggtggccttcaggttccatcagtaccaggtggtggggcgcgcgctgccgacgcccggcgatgagcaccccaagatctaccgcatgaagctctgggccaccaacgaggtccgcgccaagagcaagttctggtacttcttgaggaagttgaagaaggttaagaagagcaacggccaggtcctggccatcaacgagatctttgagcgtaacccgacgtcaatcaagaactacggcatctggctgcgcta

SEQ ID NO: 302183 - DNA, 288 bp, Zea mays
aggaactatccaaaatctttccaggaactccttcgcaagcagaatggtgaccgtgcaatctgggagtatccatttgctgtcgctggtgtaaatataaccttcatgctcattcagatgcttgatctccaatcagttaaaccgaggtcattgttcggagcagttttcctaaagcttctttcagaaaacgatcaagcttttgacattctctactgcataaccttcaagctgatggatcagcaatggcttgacatgcatgctacttacatggacttcaacacggtcatgaag

SEQ ID NO: 302184 - DNA, 300 bp, Zea mays
gttgatgggtaaaagatgaatgaacttagattggaagaacagcatcaagattgccattggctcagcaaaaggtctatcatacctccatgaacttgctgatccaccgatcatacacagagatatcagatcatgcagtatccttttggatggaaatctcgatgctaaggttgccggatatggtctttcaaaacttgtgtctgacacacaaaaggggcatgtttctataccagtgaagggaacattggggcaattggatcctgagtattacatgatcgcacagcactctgcgaagagtgatgt

SEQ ID NO: 302185 - DNA, 270 bp, Zea mays
  unsure (1)..(270): unsure at all n locations
cccacgcgtccggcttctcctccccctccggttcgggttcgggttcgtgaggttctccggggttcggtttcgtgggtgagcggatcgagatggcggcgtcggatgttgagtaccgctgcttcgtcggcggactcgcctggggcacggactaacagtccctccacaacggcttcagcagctacggcgaggtcctcgagtccaagatcatcctcggtcgggagacgcagangtcccgcagcttcggcatcgtcaacttctccacggaagaag

SEQ ID NO: 302186 - DNA, 287 bp, Zea mays
cccactcgtccgcccacgcgtccgctctttgtacatattgtcggtggaatttgaattaggcagtgcctgaactgcacagggagccagagtacatatccaaagagaaagcacgaatcgctgcatctcaggtgaatgggcctgtactggtggaggacacctgcctatgttttaatgcgctcaaaggcctaccaggtgatttacaataactcaatgagaagaagaacgcaaataaatcagttatgcagaatttgacatgcacatctttctgctgcaggaccctacatgta

SEQ ID NO: 302187 - DNA, 283 bp, Zea mays
gtcgcggcggaggccaagcggctgctgagcctggcggggccgttggtggccagctgcatcctgcagaacgtggtccagctggtttccgtgatgttcgtgggccacctcggcagactgcccctcgccggcgcgtccctggccagctcgctcgccaacgtcaccggcttcagcctcctcgtgggcatggcgagcgcgctggacacgctgtgcgggcaggccttcggagcgaggcagtacggcctgctcggcctctacaagcagcgggccatgctggtgctggcgc

SEQ ID NO: 302188 - DNA, 278 bp, Zea mays
gcactacccagttcactacgaccttgaaaggaagcatgggctacatggatcctgtatactttcacgaggggtgtctgtcgccgagaagcgatgtgtatagcttcggtatagtcctcttggagctactgactcggaagaggcgcaagtatggggacgtcaacctgatccctacgttcaacaaagcctgtgccaaggggaaagggctgagggagctgtttgatgcagcaatagctgagaaggacaacgtgaagatcctcaaagagtcgtggaagctagca

SEQ ID NO: 302189 - DNA, 281 bp, Zea mays
gcctctcgagtctcgtccacccgtcgtcctcctagctcctctactcgccagtcgccatgggcaagattaagatcggaatcaacggcttcggaaggatcggcaggctcgtggccagggtcgccctccagagcgaggatgtcgagctcgtcgccgtcaacgaccccttcatcaccacggactacatgacctacatgttcaagtacgacaccgtccacggccactggaagcacagcgacatcacactcaaggactccaagacccttctcttcggtgacaagccg

SEQ ID NO: 302190 - DNA, 314 bp, Zea mays
  unsure (1)..(314): unsure at all n locations
cggacgcgtggcggnacgcgtgggcggacgcgtgggcggacgcgtgggcacggagcaaagctcagctacttgcaacattcaatagctagcaggatcagtagactcatgcaatccacaaggatctgaaagctgaccccaaggatgagtttctttcaacactgcgggcgatcatccggtgcttcacctgccctgacagatacttcgagaaagtcattcgactggctcttggaggcatgggcactgatgaggatgacctcaccagggtcgtaactacgcgccgaggtcgacctgaagctgataaaggaggcttatca

SEQ ID NO: 302191 - DNA, 309 bp, Zea mays
gcgaccgctaccctcctcggataccgtccactgccctccccgcatcccggccggccgctgctctcccgtcgcaggctcccgtccggccgctgctctcccgtcgcaggctcccgttcgacggcccgtgctccccgcgaacggcggctggcagcaagccgctggcgacgcacggcatctccacgtccatgtggcacgacgcgcgtctccgcgacgtgctgctccgatgcggcgtcatgggtgccgcggacgacgtcaccaacatgtgatttgtgggcgccgaggacctccccgacggggtcggcgacaact

SEQ ID NO: 302192 - DNA, 302 bp, Zea mays
gaccgggacccagtatttacaagccagttttggaccactctctttaagcttgctggtaccgagctgcgcctgaattcagcatatcaccctcaatcagacggccagacggaacgtgttaatcaatgtcttgagaccttcttgggatgcttcgtcagtgcctgcccgaagaaatggtctgcttggctttccgcagcagaattttggtacaacacaagctgccattctgctcttggtcgttctccattcgaagtgttgtatgggcgcaaacctcattcgctggggttatccatgaatgctacagc

SEQ ID NO: 302193 - DNA, 300 bp, Zea mays
cccacgcgtccgcccacgcgtccgcccacgcgtccgcccacgcgtccgcagcttttgaacttgatgaagcaactgagaaagaactgcttgtgaagctggagaagcatggaaggagtgttgttgagtcaaaggcaaaagaagaagctggaagggttttgattcgcatgaaggacaggttttcaatgctgttcagccgagatgctgactctatgcccagggtgtggacaggaaaggaggacataaaagctataactaaaaccgctcgctcagcttccatgaagttgctttctacaatggctg

SEQ ID NO: 302194 - DNA, 302 bp, Zea mays
gggttctcgggcgaggagctggacgacgtgcactgctacgacccggccacccgggagtgggccgcggtccagaccacgggcgacaggcccagcccccggagcgtgttctgcgccgccgggttcgggaggcacgtggtactgttcggcggcgaggtggaccccagtgacctcggccacctcggcgccggcaagttctcggccgaggcgttcgcgctggacacggagaccggcgcgtggacgcggctggacgacagggcggaggccgagcaccacccggggcatcgcgggtggtgtgcgttcac

SEQ ID NO: 302195 - DNA, 269 bp, Zea mays
cccacgcgtccgttttttttttttttttttttttcaataacaatatttagctttaacaagcaatccaatcttggacagttttttcttaaaaaaaacctgagttcagttcaggcagggcagctatagttgtggctataacaatagaacatatatagtacccaacatgggtaactaatctagcacttgatctccttaagaccatgagagaaatagaggaatgtcggattagtggcaccatccttgtaataggcgaataccacggacgcttc

SEQ ID NO: 302196 - DNA, 302 bp, Zea mays
ccatcttcgtctactaccacgggggcggcttctgcctcggttccgctttcaaccccaccttccactcctacttcaacagcttcgcgggccttgccaacgttctcgtcgtctccgtcgagtaccgcctggcccccgagcaccccgtccccgccgtctacgccgattcctgggaagcgctagcctgggtcgtgtcccaccttgccgccgccggcgacaacgtccgggacccatggatcgcgggccacgccgacttctcccgcctctacctgggcggtgagagtgcgggctccaacatcgcgcac

SEQ ID NO: 302197 - DNA, 304 bp, Zea mays
ccagttccctccgtccacacccgcccttctccttcgttcccggctaagaggccaacggacgtgcgatccggcgcgcttcctcgccgtcgtcgatcggaggcagaggaatgtcaggggcggcatccgtggagcgcgtgaaggaccgggccaccggcctcgacaagttcgtgctccgcgaggcccgcggcagctccgtcgaggtatatttatacgggggccaagtgacattttggaaaaacaacttcggtcagcaactgctttttgtcagtaacaaggctacttttaaaccgcgaaaagcagttcg

SEQ ID NO: 302198 - DNA, 330 bp, Zea mays
cccacgcgtccgcccacgcgtccgcccacgcgtccgcccacgcgtccgagaaaatcgaccagcaccagactggccccaagttggcagggtggaccttaaagatttgaagattagatacagacgaagatgctcctcttgtattacatggaatcacctgcagtttccacggtggagataagatcggtatagttgggcgaacaggaagtggaaagacaactttaattggtgcactgtttcgtcttgttgagccaactggagggaaaataattatagactctatagacatcaccacaataggcttacatgacctgcgttcacgtttgggtatca

SEQ ID NO: 302199 - DNA, 286 bp, Zea mays
ggcgctgcagctgctcccaaggaagaagagaaggctgcggacctgaagaggagtcggacgaggaaatgggcttcagctcttcgacgactagagctgctgttttcgtcaaactgctgcaaattttggcttttttttatcatctacaagtactgtttcctatattttttagcagacaaattatcgtgtgtaatcgacaatgatatctccttaaattttaaaaaaaaaaaaaaaaacggacgcgtgggcggcttcgaaggattcggacaccactacagcagagcgtcca

SEQ ID NO: 302200 - DNA, 279 bp, Zea mays
cccacgcgtccgcccacgcgtccgcccacgcgtccgcggacgcgtggtctttgctacattcatggtgtcatccatgctgggtagctccatcgcgtcacgtctattagcccgaaagctcaaggttgaaggctatatgcagatcgtgttctcgatatcggctgtcacccttgtcctccctgtcgccaccaacatcttagtgccaacgtcttctgtgaaaggaggcagcgtatcaattggaggttctcttcagcttcttggtttctgcacctttgaggcatg

SEQ ID NO: 302201 - DNA, 275 bp, Zea mays
ctcacgcgtccgcggacgcgtgggcgaccgtggacgtgacgcgtgggcactgctctgttatctgaacccagaacttcgtgtactcctgtaccgagctgtgtgtatgttttttttacttccatcgtgtttgttgcaagtgaagagagatggaagattcagcagagaaactaggcgtgggcagacaatacattccccacatgtctcagcacacccgcggcagcttaagacctgctcttgaacgggatggccctgatgatcaccctagttctagatcg

SEQ ID NO: 302202 - DNA, 307 bp, Zea mays
gcagatcaacaaggaggtgaactcgattctgcgaggggtggtcgggaagaggatgcgggctatggctatgagagaaggcggcgaaagcaccaccggcgccgacgatctcctgggcctgctgctggagtccaacaacacgaggcacgaaggcgagaccggccacggccagcagtccgcccctgggatgacgatcgaagatgtcatcgaggagtgcaagctgttctacttcgcagggatggagacaacgtcggtgctgctgacatgggccatggtcctgctgagcatgcaacgcgagtggcaggaccgt

SEQ ID NO: 302203 - DNA, 125 bp, Zea mays
cggacgcgtgggcgctgaaggtgctgtacggcaaccacgacgacgcggtgcggcggcagatcacgcgcgagatcgccatcctccgcaccgccgagcacccggcagtggtgcggtgccacggcatg

SEQ ID NO: 302204 - DNA, 102 bp, Zea mays
  unsure (1)..(102): unsure at all n locations
ccccacgnctccgacgacggtggncgaaccagtgggcgcgcatctcgtcgctgctcgtccgcaagtccgccaagcagtgcaaggcccgctggtacgagtggc

SEQ ID NO: 302205 - DNA, 230 bp, Zea mays
acctgccatgtcatgtaagtccagacatccttgccttggctgttgaagatttctgttcttctcaatccatttaccaggacgaactacagaacatcattagttgggagacagagaataggatggaccagctacaatttgtgcggcaaaggctggcatattgctatctcgctgctgctaccaccatatcccctcacgaattgtctgatgctcgccttgcatgtgccaaaagc

SEQ ID NO: 302206 - DNA, 312 bp, Zea mays
catccacctccccatcaactacgtcctcgtcaccgtcctcggcctcggcatcagaggggtggcattcgcctccgtgctggcgaacctgaaccttctcctcttcctcgtcgcctacatcctcttcaagagcgtgcacaagcgcaccggcggtttcttgctctcccgcgagagcttccgcggctggggcgagctcgtaagcctcgcgctgccgagctgcgtcacgtctgcctcgagtggtggtggtacgagatcatgatctgctgtgcggcctgcactgaacccgagccacggtggcgtcatgggatcctgatc

SEQ ID NO: 302207 - DNA, 292 bp, Zea mays
cccacattctgggcaaaaacggaacagggtgttgctcaggcaatcattcgatctgtcattgatttcaagagatatccatggccaaaggtgtctgataatggcaaagagcttgtcagaggaatgctggatccggactcaaaacgacgactgacagctcaccaagtgcttggtcagccatggttgcagaacattaaggaggctccaaatgtcaatttgggtggaactgtataaggccagactccaacaattctctgagatgaacaagttcaagaagcatgcacttagggttata

SEQ ID NO: 302208 - DNA, 311 bp, Zea mays
actcgaaaccttttcttgtgctctgtctgtgtgtttccaaagcaaacgaaagaggtcgaggatgtcttgcagctgcggatcaagctgcaactgcggatcaagctgcaactgcggcaagatgtaccctgacctggaggagaagagcggcgggggcgctcaggccagcgccgccgccgtcgtcctcggcgttgcccctgagacgaagaaggcggcgcagttcgaggcggcgggcgagtctggcgaggccgcccacggctgcagctgcggtgacagctgcaagtgcagcccctgcaactgctgatcctgctgcg

SEQ ID NO: 302209 - DNA, 292 bp, Zea mays
cggacgcgtgggcggacgcgtgggcggacgcgtgggctggagggcggaggaatcgctctcagtaccccccagtagccgcccctatgcagctccggtccgcgtcccgccgtcgccacggctcagtcagctgaatcttctacagactagaacttggggattgtgctgctactcagctgaaagtttatagaaggtggagaagttgtggtgtttccctacctgttagtctgcacttctgtgttcctgatcaactgccccgacacgattgttgccttctcaacctctcttgtcaagc

SEQ ID NO: 302210 - DNA, 298 bp, Zea mays
aataccacaacctcttcaatttcatcaatggaaagaacattaaaataatgaaccttggaggagatggtcaaggtgcaagtggtgtagttacagatgttctacgagacactgatgatgatgctgttgatccacatctagagcgtattaagaatcaggccggggatgaggaaagcgatgaagaggatgaagattttgttgcagacaaggatgatagtggatctcctactgatgactcaggtgatgaggaatcagatgctagtgatagtggtggtgaaaaggagaaatcatccaagaagga

SEQ ID NO: 302211 - DNA, 292 bp, Zea mays
  unsure (1)..(292): unsure at all n locations
atcagaccagattttcccccgtgaggcatgaatccagtgttccaagctcccagcggaacaaacaaggaccaatccgtccagggatcggtggagcccgatccgttcgattcgtcgaccaagggagcggcgaagcagntgcttcatcgtcgtcgctgatcttccttggtacggggtgctccggctcgttgcccgacacacggtgcctcctcaagccgtcgacgccgccctgcggcgtctgttcgatgggcgtctcactccctccggagcggaaccccaactacaggctgaacac

SEQ ID NO: 302212 - DNA, 281 bp, Zea mays
cccacgcgtccgcccacgcgtccgcggacgcgtgggcggaccgtggtcaagatccaatctttgctgctgccactcggcgatccgatcgttctcgagcaagggttgtggccatggcacgctgccgacatcacctccacctcctttccgccttacttgccttggctgctgctgctgcgcggcaggcgcagagtcatggaaaagcctccgccgtcttcatcgatgcctcgtcgcaccgctaccttcgggaccagcaagccgaccaccaggacgcttcaatgtcg

SEQ ID NO: 302213 - DNA, 320 bp, Zea mays
ctccttcggcggcatgaagatcctgttcccgtcgctcgtcaagtggctgggccgcgccggcgggccgcgcacggccggctggcgacggaggtacgcgacgccgtgcgcgcgcacgcggcgaggtgactatgaaggcgctggcggagatgccgctggtgaagtcggccgtgtacgatgcgctgcgcatcgagccccccgtggcgatgcagtacggccgcgccaagcaggacatggtggtggagagccacgactatggcctcgaggtgcgcgagggggagatgctcttcggctaccagcccatggccaccaaggacccgcgc

SEQ ID NO: 302214 - DNA, 314 bp, Zea mays
ctattgcgcaagtgtgccctcgtcttctttgatgatatacttatttacagtgcaccttggaagaccatcttaaacatttacaacaagtgttcgagctgttgtccagagatgcctggaaggtgaagatgaacaagtgttcttttgcacaaaatcaggtttcttatttgggacatattgtgtctgctgctggtgtcgctacagatcctgccaaaatccaagctatagctgactggccaaaaccagcaaatgtcaaggaattacggagttttctgggccttgctggatactataggaagttcatccgtcactttggg

SEQ ID NO: 302215 - DNA, 308 bp, Zea mays
atacggacacgcgtccgcggacgcgtggcgaccgtggcggacgcgtgggatcttcgtttccgctccgccgccgtcgatggagttctggggtctcgaggtcaaacatggatccactgtcaagtgtgacagtggacatggctttatcctgcacgtttcccaggctgcccttggggaatcaaagaaaagtgacagtgccttaatgtatgtcaaagttgatgacaagaagcttgccattggaacgctctctatcgacaaatacccacagatacaattcgatttggttttcaataaagagtttgagctgtcac

SEQ ID NO: 302216 - DNA, 311 bp, Zea mays
caagctcaggggcaagacgtgcattgccagccaccatggcgctccactctgctgcagccgccgccgctctctcggccctcctgatgctctccttctcaggccttacgctctccgacacgacgccgtccacgccggtgtcaccgtcggccgcgtgcaacgccaccactgacccgaccttctgccggtccgtcctcccgccgcgcggcaagggggacctctacaagtacggccgcttctcggtggccgagtccctggcgggcgcgcgcatgttcgcggccctcgtcgaccgctacctcgcgcgccaccggcac

SEQ ID NO: 302217 - DNA, 315 bp, Zea mays
  unsure (1)..(315): unsure at all n locations
agcacacaagtccgatccacgacgtcgcgcgagacgcgtggggcgacgcgtggcggtggttcacgtgaaatcgaagagacgttgttggaacaccttggagttaaaccgaaaccaangtgaccaagttgatgggttttaaacttcctgtttgggactaaatgggnagtgcatggggttgctgtgtgaatgctcctatgattgctgtggctgactactcgaaaggctcagagggttacacatataactactatgaggacctcactccaaaacgagttgttgagattgttgagatgcttagaagaggtgaaacacccc

SEQ ID NO: 302218 - DNA, 288 bp, Zea mays
ggtcaataaaaatcatgaaatgtagcatgtgtgtagaagttcagtaacagttggttcatattatttacttaaccatcttgtcaactgtatgtgcctatgtagtttggattatcacctgctattgatccatcatttacaccaacaacatgaattcacatccattcaattgttggtgtaaatgatggatcaatagcaggtcataatctcgacaacatccgcaacttcgaccgtgtccaagaagttcctcatgaaggtccaatgtgtgatcttctgtggtctgattcagat

SEQ ID NO: 302219 - DNA, 292 bp, Zea mays
cggacgcgtgggtgttctcgtttagaacctctaaaatttcccccactcgccagtcgcagcagcacctgtagcagccatggacgccagcggaccggtagcaaggggaacaagggggcggccgggcgcaaggcaggcggccccaggaagaagtcggtgacgcggtccgtcaaggccgggctgcagttccccgtcggccggatcgggcgctacctcaagaagggccggtacgcgcacgcgtgggcactggcggccccgtctacctcgccgccgtcctggagttactcgccgccga

SEQ ID NO: 302220 - DNA, 284 bp, Zea mays
  unsure (1)..(284): unsure at all n locations
cccacgcgtccgcggacgcgtggcgacgtggncgtcgtcaacgacaccttctggcggaggccccgccgcggcggcggcggcggcgccgggccgctgttcgtgtatacgggcaacgcgggcgacatccagtggttcgccaccaacaccgggttcatgttcgacatcgcgcccaagttcggtgcccttctcgtctttatcgagcatcggttctacggcgagtcactgccgtttggggacgactcctacagctcagcggagacggagggttacttgacgtcgacgca

SEQ ID NO: 302221 - DNA, 286 bp, Zea mays
gggcagagagcatgattctcatcacgcagccagtcaaggacaggaacatggagatgtggcctacaaatccacccacgttcagggacgcgctcgacgtctactcggtagagatgatcggcctcgcaatgcggctcctggggttcatggcggccgacctcggggtggagccggagccctcgcaggacgccttcacggggaagcggcagagcatggcggtccaccactacccgccctgccgccagcgggagaaggtgatgggcatcacgccgcacacggacgggctggg

SEQ ID NO: 302222 - DNA, 288 bp, Zea mays
attcagcgtcttttctgtgtggtctgaaattagtgttgtgcattcaccgaccgatcacttttcaaaatggtagtttactctaagatcactaaggacgctctttttgagtgtgtcaactatgttgtcgaaaaatctcaagaaaaaaaacgtaactttgtagaaaccgttgaattgcaggtcggtttgaagaattacgatccacaacgtgataagcgtttctctggtactgttaaattacgtaatattcctcgaccacgtttcacagtctgcattcttggagatcaacag

SEQ ID NO: 302223 - DNA, 133 bp, Zea mays
cccacgcgtccggccaaagccaccagcgctcgtcacctccaatcaacaaattcccaatccgccgcttcccatcccgcgttcgccgctccatttgatcgaattcccgatggcgcccaaggccgagaagaagccc

SEQ ID NO: 302224 - DNA, 302 bp, Zea mays
gcgttcacgacctgctaccacttcttcttcaacctgggcatgttcatggcggacatggtgaactacggcaccaactccatcccgaggtggggctggcgcctctcgctcggagtcggcctcgtcccggccgccgtcgtcattgccggcgctgcggtcatccccgacacgcccagcagcctggtgctgcgtgggaggctcgacgacgcccgcgcttcgctgcggcgcatgcgcggggctggggcggcgtcggccgataccgatgcggagtcaaggacatcgtcgcgcagtgagcaagacgcaga

SEQ ID NO: 302225 - DNA, 301 bp, Zea mays
aaatcctgaagtcactgcttaatgctgatctcattggtttccaaacatttgactatgcccgccacttcctatcttgctgtagcagattgctaggcctgcattatgagtcaaaacgtggttacattggaatagagtattttggccgaacagtgagcctgaagatcctttccgtgggtgtccatattggtcggcttgaatctgtcttaaaattgcctgctacagttagtaaggttcaagaaattgaacaaaggtataagggcaagatactgatgttaggtgtagatgacatggacatcttcaa

SEQ ID NO: 302226 - DNA, 300 bp, Zea mays
cacacgcgtccgcacacgcgtccgcggacgcgtgtgtgaaaatttgctgggtgagggtggatttgggcatgtgtacaagggccagctcaaggatggtcaggtcattgcagccaaggtgcacaaagaagctagctcacagggttatactgaattcttctcggaagtgcaagttctcagttttgctcgacaccgacatattggcattctgcctcggtactgctgcaaaggaagctataacatcttggtgtatgagtatatatgcaacaattctctcgagtggcatttatttgacaagtcggc

SEQ ID NO: 302227 - DNA, 301 bp, Zea mays
cccacgcgtccgcccacgcgtccgacgagaacctgtcgggcttcgccgcgagctcggcgtgttcctccagttcgcggcgtacaacgtggacgccctggaccccgcggactggtggccatcaccagcggcgacgccgtggccgtccacctccccgtggggtcggcccacgtggccgcaatgccggccgtgctccgcctcgtgaagcggctcggcgccaaggtggtggtgtccgtggaccgcggctgcgaccgcacggagctgtcgttcagcacgcacctgttacaggcgttccagtcctgcg

SEQ ID NO: 302228 - DNA, 317 bp, Zea mays
cacgctcaagagctaccccgcggactgtcgctgacggcgctcatctgcctcatggggtcgctcatgagcggctccgtcgcgctcgtcgccgagcgccgcaacacccaggcctgggtcatcggcttcgacacgcgcctcttcaccgccgtctacgccggcatagtgtgctccggcgtggcatactacgtgcaaggcatcgtgtccaggcaacgaggcccggtgttcgtcacggccttcaaccctctctgcatgatcatcaccgccgtcatgggctccatcatactcaaagaagagatcactctcggaagcgtgattgg

SEQ ID NO: 302229 - DNA, 364 bp, Zea mays
aggatcccctcggggaattccaattccacattttcaagaattttttaggcaaaaatgttcatatatgaatgggaattattggttttcttattaggcctatcctgaagccaaaggaaatgagatcggaattcctcggggaattccaattccacattttcaagaaataaggaggcaaaaatgttcatatatgaatgggaattatttgtttttttattaggcctatcctgaacccaaaggaaatgagatcggaattcctcggggatttccatttccccattttcaagaaataaggaggcaaaaatgttcatttatgaattggaattatttgttttcttattaggcctatcctgaagccaaaggaaat

SEQ ID NO: 302230 - DNA, 263 bp, Zea mays
  unsure (1)..(263): unsure at all n locations
ggagaatgaaacacaaaataagtttaatttttacatngaaaaaggcctcccgtccaannccacaaatnnctcacagnaaagccggtaacaggaatcaagngccatgagataacaggtctgtgagagttttccatcaacaattggatattcgctagcaaggtttggcttgtaaaaatcatatgcatgagacatgtgactgcctctgagtttgctttcaaaagcaataggagcatctggccctacaagcatggcaattgcagcag

SEQ ID NO: 302231 - DNA, 506 bp, Zea mays
gcagttcttgataatttctgtaaaagctggagttccatagactgttagggcccttttgacagtctttgatatagcatccacatcagccggatccacagcatcacattcaacattgaaggcacccatctgaaatccagtgaagccttctttgacagtgtcaactaatccacctgttgaggcaacaattggtacagatccatagcgcatagcttgtaactgaatgagaccacaaggctcaaatctgctaggaaccaatataaaatcagctccagctattatcatgtgggctaggggaacattgaattttgccactcctctggccttatcagggtatgatatttcaagttcctcaagctgcttttccatttgtttttttcctgttcctagggctaccaactgaacattctgcttgataaattggggaatggcttctgcaagaatatcagaacctttttgctcttcaagcctaccaatgaaaccaatgagaggaatatttctgtcgactg

SEQ ID NO: 302232 - DNA, 511 bp, Zea mays
ttgattctttctgttggacttggttggtttcataatcatgtttttcatcagttggataggcatataatataccaaacttctgtccatgatttaatcctgggcagaaacccttgatcaaacctgaaacagcacttggctcaacagtagtgtagtccgaagaataagtaggtttagtccaactctcataaaatccagtatcattggattctttcttatctttgtcagactctggcacaaagtatgtttgtctcaaatcaccacttctacaataagccccatagtataaacaatgttccctcactaaggagatttgaggagtagcaggcagtaaatgaccttcagtgctaaatatgtacttgtaaggcccattttccacaagattgtcaggacccacagccaaatcaaacagaagccacagatacttgactgtctcagctaagaagaagctctccatgtgatcttcttgttggtgattctcaacatcagaaatgtgacaatatccacaagggca

SEQ ID NO: 302233 - DNA, 510 bp, Zea mays
ggagttgataaacatgaaagcaagataacttcaacagctggtggttttaccttgactcttgaatttggagttctaagccgattgacaaatgatcctatttttgaacaagttaccaagaatgcagtgcgtggactttgggcacggcgttcaaagcttaacctggtcggtgctcatattaatgtttttacaggatgctgggataggaactagtattgactctttttatgagtatctattgaaggcttatttattatttggagatgaggagtacttgtatatattccaagaagcttatgctgctgccatgcattatctttaccatgacccttggtatgtggaagtgaatatggattctgctgctattgtctggccattatttaacagcctgcaggcattttggcctggccttcagctggagatatcaatcccgcaattcgcacccatgctgccttcttgagtgtctggagaagatatggttttactcctgagggctttaatcttgctagtctc

SEQ ID NO: 302234 - DNA, 185 bp, Zea mays
aagagctagaattctaaccttgtgtcaggacctacgggttatgggacagtctcaggtagacagtttctatggggcgtaggcctcccaaaaggtaacggaggcgtgcaaaggtttcctcgggccggacggagattggccctcgagtgcaaaggcagaagggagcttgactgcaagacccacccgtc

SEQ ID NO: 302235 - DNA, 429 bp, Zea mays
caaaaattttccaggcagatcagactcaagttaatacaggaaggtagttgggacttatggttacatgtctccaggttatgttttgcgtggacagttctctgtgccctcagatgtgttcagctttggtgtcttagttttggagattgtgagtggcaagaagaacactgacttttatcaatcgaatcatgctgatgaccttttaagccatgcgtggaagaattggacactgcagacacctctggagttgctggatccaacactgagaggttcttattcaagaaatgaagtcaacagatgcatccatattggtttattgtgtgttcaagaaaatccatctgataggccttcgatggccactattgcacttatgctgaacagttattcagttaccatgtcaatgccacaacaaccagcatcttttctgcgtgg

SEQ ID NO: 302236 - DNA, 331 bp, Zea mays
tttttcacaggactctcaattaaaatcacgggggccggcaggattcttttgaagatgaaccctctcaaaatggcagttcagcatatactcctcaaaatgggggactaaatatacctcatacagtggtcaatcaaaccatgtctatcatacctatctctgcaggtggtgctcctggagctgttcctggtcccacgacaaacttaaatataggaatggattattggggtacaccaggttcatccaacattcctggacttggcagaaaggttccatctactgcagttgctggagggatggttactgttggatcacgggatagtgctcagtcaca

SEQ ID NO: 302237 - DNA, 335 bp, Zea mays
gtgtgaacagggtctgtggttctgatagggccacagctctacattgtgcggttgccgggggctctgaatcctcacttgagattgtcaggcacgtggttgatgctacatcatgagacgactgccttgatgccagtggcaacaagccggtcaatctgattgctcctgcctttgattctttgtcaaaatcgcgaaggaaggccatggagatgttcctcaggggtggtggggaaagagacgatgaactcatgagccaggagattcaagagagaaaagaagcaattagtgataataagaaaggataccctgttgatatatcacttgcagacataaacaac

SEQ ID NO: 302238 - DNA, 382 bp, Zea mays
aaggaaaaacatcaaattttataaggattcaagccatcctgctgcaaaaaagttttgggtacaacacagaggacccaacaggtccattaaaccaacgtagccacaaccccgatttatgacccacaaaccacagttgttttttagacgaccacctccatataggggcccaccagagggccccaaacgacgcaaatacccaggtacaggaggagcttaaatgaaccatggtttactgcccaccacggggggggagcaccagggggagagggctttccttctggatgttgtagtctgatagggggcggccatcctccaattggttgccagcgaaaaacaaaccctgttggtctggggggatgccctttttggcctggatttttgc

SEQ ID NO: 302239 - DNA, 337 bp, Zea mays
cccttcgttttttttttttttttttttttttttttttttttttttttttttttttttttttttttttttttttttgcttcctatgaaccaaatttaaacagacatgtcacgagcatgccattttaactggaagggtttttgggacccccgtacatggatttccaaaataatttgacgaccctggcaccctgcaactggtcactccgatgcaaaccttctgaacaattggaagaacccgaatggtggtgcattccccatggctggagcttccacatgggccacttggggtcccaaaacttgcaaacttgaccctgatgaagaccgggcctttttttgg

SEQ ID NO: 302240 - DNA, 474 bp, Zea mays
ccggctcagaggtggatcctccagctggagaagaagaagcagcaggaggaagcggaagtaatcgcttcttctgcgcgcgtggaggcaaatgcttcacatgttttcttgagctattaacagaggcccatggtaagaaaacaccagtaccaccaccggttcccatcacattgggacttggtaatatcattggttgaaccggtggtggtgccatcatgaccattggaggacgtaggactccaagttttggcatcatgtcaattgaatgatcataaccattgaggaatggagttggtgtcatttggtagggttgccacattgtcatgacaccgtcgttgcgaggactgttgggttgtgaatggttatgatatgtgtcaggtcgaatacgaaagaatgtgatgcttactcttttgttttgtgatggacacattacatgtcttgccatgtctgcactgtgccctctcatcaccaacaaag

SEQ ID NO: 302241 - DNA, 464 bp, Zea mays
tataggccactgttgtatcaagttcaatttccttggctaatccttttactagagatcgcgaacctattaatggaatcactgtatcttgatctccactgtatactccaaccttgatgccagacttaacaagtgaccctagaataggaattgttggtatttctagattctgatagtcataatgcagaactgagctgcaagttgaccatttggtgactccaacaagattagcatgtagagctttttggacttgttttctgttcaagtatgtggttgttttatcaccaatacaaacatctatcttctgtgtctcttgcagttgattcagcacataagcctgttgatttactgatgacaaacaaacatcgagagtgacatcatatttatctataaagttgctaatctcagtattcaatagcttatttgcttttacacaaacgcctctaagattcccattttggatttgt

SEQ ID NO: 302242 - DNA, 487 bp, Zea mays
attgttatgtcccaaagaacctccttcgccacaaggactgcaagtcgaacctatctgattttgatgatcttgcgggccaccctggattcgacaaacaggggacacgcttcaagcgtctcattaaggaccagaataatcacaaggacctcgaggagggaatcaaccgcctagttctttcttcatccagttcatagtacacctttccagagcaaagaaggaagtcggagcgcactgatgttgctatatgtagagttgagcagctctgcccgttcccctatgacctcatccagcgcgagttgaagagatatccaaatgccgagatcgtgtggtgccaagaggagccgatgaacatgggagcatacagctacatcaacccgcggttgctgacggcgatgaaggttctgggccggggtggcatcgaggacatcaagtacgtcggcagggccccgtcggctgctaccgcgacgggcttctactcggtgcacgt

SEQ ID NO: 302243 - DNA, 512 bp, Zea mays
ggcagtccaaaattcactgtggaaatagcattaagtcaaatgttaatttgcacagtctatatatgtggtttttcacatgcacacatacatattcacaatcaaatacaaaaagagcagggaccagaaaactacaatacaaacaattattgttggcccttgtataacaataatatatatctttttggagcataattgaatgaaccgtgtgtggcaatcagatcaaatctgttgattttcatttagatgccttgtggccctgtcctttgatctgactagcggctgcagacatcacacgcaagcggcgagcaatttcggtgaaggatggcctgactgctggattgggtgcccaacactgctccattagtgttttccagtcaagatcacaataactggggattgttggtcttaatgtgttattcacaatgcctcctatgattgcaccatagtgcatattagcatatggctcatcaccagtaagaatctcccataagacaatgccaaaagagaacaca

SEQ ID NO: 302244 - DNA, 311 bp, Zea mays
tcccctttttgtagagcgccatttgaaaatacaatctctaaatccaattattcagttttattaatgaaagtagaaggctggtatagacatgtgaaaatatctcgttatttataaacatctccaacttgaaaaagaaaaaaggaaaaaaactttttagccactaacttgatcttgaatctaggtgcttctacaccaggagtggtttcctctcggagattatatgtaaaaggactattatactaataaatatatactttttcaatagttttgaaagaaatacttgagatttatttgagaatttatatttgaac

SEQ ID NO: 302245 - DNA, 420 bp, Zea mays
atcttcatctttgtatggtattttgaagtattttagtgtccaaaatcagtacaaagagcaaatacataaaaaaatttcctcttggctgcagacacagacttaaatccaagtaaattttaaaaggacacagcaacatttcactgaagttacctctaagtcatcttgcatcagcagaggtaaaagagtctgcaaaaccagaaggcctggctgcaatactgcttctgctgttctcgagacaagaagcatagctaaactctccactttctgcttccttccaaatcttcaacatttgaggaagtggtcttgtgtagtcaatgccagagtagcaatctaattcatcatcaactggtttccatttttccactaatgctgccaagacattgactgcatgacccatatctggcctatgatgtgctttcc

SEQ ID NO: 302246 - DNA, 355 bp, Zea mays
aatctaggccaatgtatcccattgcggtgattcatttatttgcagggtctacatgaaccaaattaaaacatgaagcaaattaaaacaaagccttgatccaggacttcttcaagccatcatgcaatcctcatgtcctggataaccgcagtcactctaagtccggatgatctcacagtgccatcaaggttgtttcttgcaatatttagctcggtcaggttgccaacaacgacaagggagaggacttccaatggaaccgtgccggtcagcatattctcgttcaatttcaagaactgcaacgatttgatgtcgccaagggaggccggaatcgaaccgctcaacgaattcctgtggagct

SEQ ID NO: 302247 - DNA, 484 bp, Zea mays
gaaggatggaataaaacacccaaattggtgaaatttgcaatttaggtacacaattgttcaagtatccatcagacaagaggaggctgaaccagccacattattctatgagtcctattaaaattaagcacttgactaagataatgacaaaagaagcacagtgcatacaaaaaccaaggggtgaaatattgatcatgaaactaagcagtatgagaaggttggtgctcttcctggactacttcatgttgctcttgctcttgctgtggtttttctccttgccaggtccaaacaatgtccttaagcgctggtcttatatcctgtttaaaaagcttctggtactccatggggtcaccattggactttctaagttccaccatatggaagtgtggggtaatctcaaaaatctcagcatcaacacccaaagttcctttcctgccttccttggaaccttccaatttgagcaagcctccatctttcttctttactt

SEQ ID NO: 302248 - DNA, 444 bp, Zea mays
gggagaataaaaacatttaaactatttttatttcttactttttagccggcaaggaatctcgatccttcacatttataaaaataaatataaattaactgtaaaatggaaaagtccaatatggaaacagacagatatcctccaaatatagctctttggcttgcattctcagcatgaagtcatccctagctacctccaccacaagggtcctaaatcaatttgcaacagaacctccacaaagaatcaagctgaacttccaattgccatttggaattgctctggtacaccaagcaatggagcttgaatggtgccaggcttacccaattgaccacaggcagccatttgatcatcacctttactaaggcttaaaatgactaccaatcctgcaccagccaatgtattccggaattcaatcattctttcatctttggttggtttgaagaatga

SEQ ID NO: 302249 - DNA, 539 bp, Zea mays
atgaaagaatgtgataaaatttccttgactatggcaccatgttacaccaatagacaccaacccgtaaacagagatcaaaattaattaccaaagaaaaaagacgaacacataattaattacctaactacaatggtacataataatgacggaagtacagttacaaagaattttgagcagccaaaacccgaaaaatcatctataacaatcttgctggcgtcttaaccaatagcatactcgagtgtctccaattctttaggccgccacatggacttctggacacataaaaagcccaccttatctttagagtaagtcatgcgaaccttccactgcatggacttcaccatactttccatctcgttaatgatttcaacagtgtcccggacaataagctttccctctggcctaagaatccgatcaatctcagccactacagcttttaaactacacctgttcttaatatttgaaaatagattatctgcatgaagtagatcataggacctcggataggtgctaaatgattcacaccaatcatgatacat

SEQ ID NO: 302250 - DNA, 457 bp, Zea mays
gttcaagaattgaaatttgctttgattgaaatcaggttacaagtgtaaagttgtgcgtgatttggtgacaatgatagatgattagttccaaatccctcaatggtcagggataagagaaactagagaaagaaaaaaaaaagaaaaaagaaaaagaattacattccaccctcccagtatacacaaggaaatgacatcaatatctatgcagcaatagagggatggttttggtttttgtgctgtgagtgcatcatttaggagagacattatctccactctttgtcattgtcagtttcccttgcatccagcttcttagcatctcaagtgcagcttttggttgatccatagggaccatgtgaccagcctcgtataccttgaggaaagagagaggtccatggcttttcagcgttcctgcttctgcaccatcaactaaaaatgggactgtaccagacgccccaaa

SEQ ID NO: 302251 - DNA, 414 bp, Zea mays
acagataaagaacatatattaaattgaaatacaaattcctataacagtttcaaatacatgtccaatagctttataaaaacatacatcataggaaaatgaaaagtaaattttggttttcttacgaaaaaaggtagcagcctctcagcatattggtagaggagcacccttccactcttttagacagtccaacaaaggatcaattaacttcccttcacacaatgcagtaaataccttatcaaattcctcaccaggtgacttgactttctctcctgttagcaaagttgtacccaaattttctctaacaaacttatataatgggtaagatctgcattccttaattcggttaggaatggcaggatttccattctcaacttcaatcctagaactttccacctcttttggcaaaagggcatt

SEQ ID NO: 302252 - DNA, 488 bp, Zea mays
cacagaaataacgtatttttattcaatattggatgcacaatatcgatggtaatcagatacaatattcccaaaagtagtaattacattaataatcaaaataaggctgtaagccttgaatggtttattttctgatatatgttaagatataccgtatgaatgtatgatgtcatcatatggaaccatctatactgataaattagcaagtaagattgtcaccaggggaaacaccaagttgtgaacaatactgggtgtagtaattaacacgagcctgaacagtactagggtttgcaccatcacattcaagtcggccattgatagctctaatggttgcaccaaaaccctggttgatgacaggacgcacatgttccatccagtaccacaaggctgtcttgaaggacacaacagggtcattggccaccgtctctggagcgttcaatccatcaaatccgatgctctgccctgctggtccgtagttgaagttccatgat

SEQ ID NO: 302253 - DNA, 473 bp, Zea mays
attgcatgtgagactaaactgttttagttgactatattttcttggatgttcctaaaattacaaatctacttttgcttattagaaggaatcatcttcagaaaattgggaagtgttattgaagaaacatgtctgtctacgcacaagtagcttcaactgctaaactttttgccactcctctacaagggtttccgaatgtctcacttgatactccaacactacaactgcttgatccaatgcaggccttctgcacaatagaaagagccttgttgctgctgcagcgtccgtggtagaagttaccacaggttccaaggggtgttccatagctagcaaatttaatggaagagatgacttggttatcatgagggcaagtgagtgatagcacaggacctacttttcttcctgattctgtatctgagttccacaagtctacgggtggtgggtgagaatcggatacatgtgcacacaaactttct

SEQ ID NO: 302254 - DNA, 459 bp, Zea mays
  unsure (1)..(459): unsure at all n locations
gaacacagtattttttttctgtgggaccatggagaaagtaattgataattgataaattatacatccatatatcgtacactactaataagatttttcatgcatagggtaatatattgatgattgagatggaagttatacaaacgatggtagctgactaattaaagaccacacttcacatccaaacggacagagtgcttgtctttctctctctagctacgatttcaccattaaaaaaaatagtaataatgattaataacaacaacaagtggttgtaattaacttgtaactccaccaaaaatattcggggaggaaaaaaaatgaataaagttaattctgcatgcgttcacagttcacgtcacgacctggctatcgntcttcctgctcacggtggtcgcgagacgatagccggaaaacccaattggagagtgactttcttcttgaagaatttcctgaagactg

SEQ ID NO: 302255 - DNA, 369 bp, Zea mays
aagcccaatatggggggtaagcaatttacatttaaacattttattaaaacagttttcatgcccacccgaaattttttttttgaaaaggttttttcctggatggccttgattcaatctcactttataattaaaaacccatgctgaacactttaattcccttttttttattggaaaaaactttgggatcccttttttggactaattgcaataaccaaagggatttcaactccgaaaccaatttttccgcattaggtgcaaattttgaaagggttccctgagtccacctttttagcatttttaacgaaacctttgggtgatccatcggaaccatgtgacccgcataatggaccttaaggaaacttaaagggc

SEQ ID NO: 302256 - DNA, 493 bp, Zea mays
gtgcagaattgtagctaaaaattaaagagcaataataaccatagttaatatttacaagcataatgacttgatagtcattcgataacctccaaattcttacatgtattttcaaaggtcaagcatatttttatgacaatttattacagctgatggagactcgtcccactagagccacatgtgaagtctggctcatccactgtgtgcaccacaagttcggggtctggagattccaactctagtattaccaaaaagttatctccttgtttaaggagtggagcaggaacgtaaaggttgcactgtggtcctctcaacggccaatatcttcctatattgaagtcattaacaaacacaatgccttttccccaattgttgaatgatataaatgtatccttgacctgacttgatttatcaattaagaagtggcccgaataaaaagcaggttcttttgaagtattcccattcttataaatcaacttttttctgaatgatgata

SEQ ID NO: 302257 - DNA, 332 bp, Zea mays
aggatccccgtctttccttctcacagtaaagctgcaaagatcagcagatgaaaacaaaaggggaaataaacgattgtatcgacaaggaaatgtcacagccagctactaatgaagtgtgatcaaagccatctaaatgatctaaacaaaatagaacaagactgaaacctgaatagttccagagtcatccctgagagtcaagaatgcaagttttccagaggctctacgagcaacgactctaccagctatagaaacacgatcaatctcattgtcagattcttcaccgttagctaagtgcttatatatctcttgaagctgatttgcactgtgggatt

SEQ ID NO: 302258 - DNA, 446 bp, Zea mays
aaaaaaaacctcttctttctatgtaagttggtgacactaccgcactagcatcatgtacacacagacatgtcaatggactctgaaaatttacagcgagaaaaaccctccctctagtcagaaacaaaaacaacccaccatgttttgtttgcatgttttgtcgagtagctcagcttcacgtgatagcgagagagaaagagaagaggacagacactaaaccccagcaagtggacccaccctttctacacaaaagcggaaaataataagagaaccacgaggggcaaaaccgtcacgcaaaacttggacggccgagatggcgcgtggccgctctcgaactgaagcgaatcaacggccagcggcatgttctcttggtcaggactacacttggactcgtgagggtgcgcactgtacatcatcgcacgcagcactgccgaaacggtaggtatgta

SEQ ID NO: 302259 - DNA, 234 bp, Zea mays
ctcgctcaaaggaggcgattcggtgaagaactcctcgaattgttgagggttgaacgacgaggaaggaagggcagctaaacaatttcgcttctcttccaggacggtcttcaactcgtccctctctcgttcctcggagaagtcatcttcatgggtttgatctaaaaaggagagattgctctcgtactcctcgatgtttgattccagttcagttctaggcgtgtcggtttggataaa

SEQ ID NO: 302260 - DNA, 327 bp, Zea mays
gtaacggccgccagtgtgctctaaaggctgatcaagcaaggtttggtgacagttaacggacaagtggtgcgtgaactagcaaccactatcaagtcaggcgacaaggtcgaagttgaaggtcaacctatctacaacgaagaaaaggtctattatctgcttaacaaaccacgcggtgtcatttccagtgtaacagatgacaagggtcgcaagacggttgtcgacctcttgcccaatgtcaaagagcgcatttaccctgtgggttgtttggactgggatacatcaggagtcttgattttggccaatgatggggactttacagacgagatg

SEQ ID NO: 302261 - DNA, 509 bp, Zea mays
gccaccgcacccaccacgaacgctggcaagttaccacctccaaatagagcatcccatggtccacttatcacagacaccaccatctgtggtatgacaattgcaagattgagcactcccagagacaaaccttggcctgcccctgaggtgctggagaatattgatgctagagcaaagggtatgctgtaagtaatcgcgagtgggattccgaggagagagaagagagccaacgcgccggctttgacggcggcgggaggaggcaggggttcctggtgggcgttggggagtagggtgtattgtcgagaatgttgggccatcttagtaaccaaaaccgtcatggccaaacaaaccgcgagcaagaagttaacaatcccccacagcctcttgacgcccccaaccccacgcgccagcacttccactcccaacgacgtcgcaccaagcacaacagagttcaacatcagccccaacgcacccgcacggacacccctatcgtacgccttcccttcccctac

SEQ ID NO: 302262 - DNA, 503 bp, Zea mays
gcgttgagaaatgaagtaactttcagtccaacacaattccatacaaccaacaacattgcaatttcagcatatctaaagtacgctatgttattggggaagggaattactctccacacgatattatattaaaataataatagtaattgctctggtctctggtctgcataagtagctcaaaaaatgatccaaaaacaaggttctaacaaacaccattcatcttcttcctgtccatcacaaacttcttccaagctttagtgatttccctttgtgtttctatttcactcttcttggcaaacagcactttttcgtcattttcttcacctgcttctcctgtaaccattatggtgttggtgctgatcaccctagcaggaaggagatccagctcgtgcacaactttggtgacatcaatcactagacgctccgcgagggtgcgagaaaaatcctccctaatcacaacacgaagcactgtcacatgttgtgcatctgggggcattgtgtatgct

SEQ ID NO: 302263 - DNA, 337 bp, Zea mays
ggatcccccatccaattcttcaataacacaatcaaagttcaccatgtcaaaacctcaatgaagttaaataattgtgtatcattacttagtctcagaaagataagataccaaaagagaatcatctacgactattataacccaattacaacaagtatcttgataaccaaagacctttgagaggaccaaagacccatacaccaatatcaacacttggattaagacattaaaagaaccaaaataaacgtgtcaaaccttgatgaaactaaataccgataagataccaagagaagataccaagagaagagcatcttctccgacaacaacaaagctttgtgac

SEQ ID NO: 302264 - DNA, 487 bp, Zea mays
actgaaaattaaattactttgatacaacagaaccaatggctcttttaaacaatacaaattatctcaagtccttataaaggaatgtttagaaacaaaagcaagccatatactcactgctttgtgagtatttatatatatctctctctcttccctactcaatgtacaaaatgcttagtgctttgttaacctctcaaggacttcaaagtagtcaggaaatgtcttcctggtgcaaccaggatccttgatggttactggaacatccccacaagcagcaagagagaatgccatggccattctgtggtcatcatatgtgtctatagctgtgacattcaatttctcaggtggagtaatcacacagtaatcaggaccttcttcaactgttgctcctagctttctgagttctgtgcagattgctatcatcctctcagtctctttaactctccaacttgccacatctcttatagcagtgggaccattagcaaatagt

SEQ ID NO: 302265 - DNA, 344 bp, Zea mays
ccatacccaagaagtggaaccaagctccggtgttttaaactcctcatgctcacgatctcagcaacaaattgcttcataccgtgctcaccatcatgtgatactcgcttcactgctacttctctcagttctctgctccgagggagagttcctttgtagacttcaccaaaacctcctctcccaagaaattcactcctattgaatcctttggttgctttgtatagagatttgtaggaatacctaattggaccatactctttttcccattcctctcttacttcagagtacaagtttctcctatacaaataagctacaacaagaatccccaaaactatgaaagctattaa

SEQ ID NO: 302266 - DNA, 383 bp, Zea mays
gatgaggtaaaacttttttttttggagtatccaataaatttcagcaaataacaatgttatagtgtatgctgctagcatttatcataaataaagaatcttagtttacactagaatccatacatttcagcaagttcaaacaactttgaaaccagcagttgtcacatctttgcttctgacatactgctcactcaagtcttgtttattgctgtggcttgtgtcgttgagaaaactagaaaaccattgaacagaacgtttgggaatccgttcgagagtgtgtctatccacataataaagtccatatctcacgccatagccgcttgtccattcaaagttgtccatcaatgaccatatcatatatcctcttacattcgcgcctttcctta

SEQ ID NO: 302267 - DNA, 430 bp, Zea mays
gcaggtatattaaatgattataattttatgagacgaatcaaatgaatatttgtagttaagggatgtctacatatcattgctgttcatttatttatattgatcatacaagggtcttcattcttgtgagaaaaattgccaacccaaaatactggcacaagtacatatatatatattacgctgattatccacgagtaggaagatgttcttctgttaagaaagaatgaattagagagagagcctcactgggcttgttcagtggcaccaagtgacctgctcctctcactgtcacatatgtcagaccttcgtattcaactattcttcctccaacctgattatcatggtaccaagttcgccacctagacttgagaggtaatcccagagcctcaacgcaatatcgtgtccctatcaccggtattcttccatctgcatc

SEQ ID NO: 302268 - DNA, 362 bp, Zea mays
cccaaccacacacactcgcggctggcctcgtgcatcgccaatatctccgcctggttagaggaagtggccgcgatggtctgcttcattgatctccaggatattgcggttccaccatgagtaaacacataacctgtttgtgactttccattgtgtggatctgaaagatatcctgcatcagcaaaaccaactaaaccttctttgttatgggttagtaaatataaaccaaaatcaattgtctcttgtaggtatcgaagcaaatgcttgattccttcccagtgcctcttggtcggacaagaactgaatctagagaggaggtcacggcaaaacatatgtccggtctagtgtggctagacagggtacat

SEQ ID NO: 302269 - DNA, 413 bp, Zea mays
  unsure (1)..(413): unsure at all n locations
aatctgaaccccatgtttttatttggaatgtgtgttttattttaaaaagaaaatacaagacaaagcaggaactgatgatctcccactctttgcaacctgtgatgactctataaaagaatccttaattaccctttaaaatgcatttactcacacagctagagattaaaaatgtaggtcctcacgtatcacctagtttatgcatgaatcgtatcaataaccaattcaggaaaaatcagaatgcatagtttcaactaataagctgtcaaaaagttaccaatcatatgctctggtgttcttcccttggaaagctttgaacagtatctgaccatctaccaggggagtgatcactactgttagatgagacatgagccntccctcttgcatctcttatcatctttaaaacttctctcatt

SEQ ID NO: 302270 - DNA, 491 bp, Zea mays
aagcaaaatttagaagaggataattttttcatggagcagaaccattaggcacttactcaaacataaataatgaaatccacaaggtaacttaaggagaagaaataaaaaggaaatgtgaggactgaggatcaataaagataatcctcattccctatctcacctacaaagaaattcagaattgcagattgcaactatttggcttcctcaatggaactaacaaaattttaccattgaaaattaagctgtttttggctttgccttaatacgcttcacccttgaatagaggaaaactccagcaagagctatagcagtcccaaaagcattcacaggtgagacaggtgtttggaagaagatgacagagctcacaatgaccacaacccgcttcacacaattacccacagagtgggtaacaggtgataccctttgcaatatcatatacgaaacttgttgatacgcatggaaacagagagcagcaagaagagatctgatgt

SEQ ID NO: 302271 - DNA, 270 bp, Zea mays
agaggatcccccggagctcgtgtcgccggagcaaggagaaggtgcgcttttgaattccgtccctgagatcagtgaaagggggattcctgttgatgtcgtttcctcggtagatggaggaggataagaaaatgcagcttttaatattcagaagattgattctgttggcggtgaactgcggccgtggaggaggttcctctgaaatcgtcttcggtggttgaggaaggaagagaagaggaagctggggcttcaatcgtcaaagaagaggatttt

SEQ ID NO: 302272 - DNA, 434 bp, Zea mays
agtatcaactataaacgaaattttatttcgaatatcaaaaggtacgtaggtgtctccaaattagaaaatataaatgaaaagaaaaagatagtagtaatacaatcaagagagaaaccacgcggcgtccacgagcagccattccgccattattgagtttccgaaaccaaaagagagacaagttgataataaaataagtaagtacattgagcaagggatagtttgggatttgtattgattagaacatggtgtgttccgggctcgaacatgcaaggaatatggacttggctgaggagctaaacccattgaagttagtcccggacgacgtcgtataggcacccatgttcgggaacacaagccaatcgttcacttgcagttccgggagctggtaatccctcagaaccgtatcaatagaatcgcatgtgggtccaaacacg

SEQ ID NO: 302273 - DNA, 390 bp, Zea mays
aacagaaaggctactgaaaaccctgattttataaatggcttacaaatataaacataagccgaataagaagcgaaggtaaagggcattgaatacatggctcaacggaaaagattttcaaaattctgtatcacaattgaaatacaagaattaagccaagggcatgagtaagtcatcgaaatctccaaattgatatgactgctgaaaagtaatttttcattctagtttttcaagttcccccattctttcaatgatagccttcttgcttggttcttgcagttcacccgctagaatgaattcatcaagttttagatagaccttggggaagttaaaaaccaaatcgagctcacagacattgctgaaaaagggatccaatatttccacaaacaaatg

SEQ ID NO: 302274 - DNA, 403 bp, Zea mays
cagaaatcaattctgcatataaaaaagagttcatgtttgacaaagatactatgttgccatcactgttccagttgttaatgatcacaagacattcacatgacaccaaatggtcaaagattccattaaaacaataaagcaatggtaataagagcatcatcgcctttgatcatgtgtctggttaattaatcatcggccgtccacatgttgtcatcatctccgtcattgtaaatgctctcagccattgccagacatggaaagaattgtcctcagctacacttgagataacccatggctgatttctgttccatgaaaaatctgatattttccctttgtgacccccgtgagagaatagtagttcaggagggccaccttcaccatctccctctatctgctcaccaccaac

SEQ ID NO: 302275 - DNA, 305 bp, Zea mays
gaaaaaggcacggcttaaaattgaattgatgggtaaaactaccccaattcgaagcttttccaatcaagatccaaatcatgcaacaacaaaaaaaaaagcaactttttttttccttctctttctctcctcttatcgaaagcttaatcacaaaactaaaatcacggacattatttataaaactcaagtgcgacaaactccaaatgagaaagaaaaagccggttcctccatttctttatccaactctttatcctcagtttactcagcagcaaggggcacagactcagccaatttgcggtacttgagag

SEQ ID NO: 302276 - DNA, 444 bp, Zea mays
aataatccaagcattccattgacaaatagatctagttggttgacagttgttttatatacatgcaatttgttacaacaatgatacactaatattgaatgaagggcttttgttttgccctagactcaatttcttttggcaataatgctgctagtctgattttaggtgttgtcatgcagcctctcgtctgtcctttctccattcccatggcttctcaggattttttgaagcccataatccaacacgctttgctctggcttgtttttcccatgtttccagttccggtcgtttgtcatatgctacgtagtgccatgctaaacctttctttaacatcatttcctgtacaaaaatgccattacaatagatatcacctacagaacgaccataacgatcttcctcataaacaaggatcctcaaaggcttgccttgaacaatcttggtcagttc

SEQ ID NO: 302277 - DNA, 527 bp, Zea mays
gaatggaagaaggcatatctttaaattgaattgatggggtggaaaacccgaatttaaagatttccaatcatacacaatattgcaacaacaaaaagaattttaaaaaaaaagactttctttttttactttttttacccaaaacctaagcaaaatataaaaacaaacgacacttttttttagactctttaaatccaaaagctgatcacaatcaaaatcaatggcgttatttatgaaagctccataagacttcaaacgaccaaaagccggtttctccattgatgttctcttcaaacatgaatttactcttcaatagcaaggggcacagactcagccaatttgcggtacttgagagcatagaacatctcgaggtaacgtttgctctcacggcgttcaagattggtcacgtgcttccagaagccatacacaccagtgagtgtcaagagcctgtccgagtaaatttgccatgtgtacttctcatgaatacgcttgagtccaccctgggagattttgtcccagtgagatggatc

SEQ ID NO: 302278 - DNA, 412 bp, Zea mays
gagaaaagaggatctcattcagttaaaaccctgaacattcgacatagttgccccttaaatcctaattaattaacaaatgcacgcgaaaaaaagatgtttaaaatctatatattacacggtcaaccgctttgctggtcctttgctaatcctttaaccattttgatgggcattcattcaatcttggggaagttcttcagcaggtgggggagcaaacctgacattagcaggccgtgcaacaacaactgggtcatctgcaaatagtgctttgatgaatgatggtgtttttaggggcctacgacctgtcatccgaggataaacattttcaagaaaataatatgcatggccagcaatcattcccagtagatccacccaagcactagcaccaacgagtacagagaaccccaagagaacc

SEQ ID NO: 302279 - DNA, 474 bp, Zea mays
agggacaggaaaaccaaatacagaaacttattaatggaagtaagttatacagataaccatgaagcctcactattggcaggctgtcagaaatcatcaaagtagctctgcttagatcttacaatggccaaaagaaaatgactaggattaagaaagaaacaacatattcttatttcttcccccatcaattctgtctttcactaccaaggatcatttcattggtgaagaaatattttgaaccacaaagctgatcttttgcggtatcttttcagtccattcttgtaatccacatacacgagcccaaaccgaagactgtaccctgcattccattcaaaattgtccaacaatgaccatgcaaagtatcctttcaccctcactccattccttatggccctttgaagatacaaaagatggtgactgatataatcaatcctcgttctgtcattaagtaacattttcccatcattaacctcatca

SEQ ID NO: 302280 - DNA, 331 bp, Zea mays
aagacttgcaaggttaagaaggaaactcatggtgtagtccagattaaagggtatgagcaagttccttcaaatagtgaaaaggctctcctaaaagctgtggcacatcaaccagtgtcagcttatgttgaagctggaggatatgctttccaattttactcaagtgggatttttacccgcaagtgtggaactgatatagatcattctgttaccgtagttggttatggaaaagctcgtggtggcaataaatattggctggtaaagaattcatggggcactgaattgggtgagaaagggtatataaggatgaagagagatatacgtgccaaggaag

SEQ ID NO: 302281 - DNA, 462 bp, Zea mays
cggctcgagaaggaactgagcagggagttagggttagagccattgcaggttaagttttggtttcagaacaagcgtactcagatgaagacacagcacgagcggcatgagaatacaaatctcagaaccgaaaacgagaagcttcgagcagataatatgaggtatagggaggctcttagcaatgcttcgtgtcctaattgtggtggaccaaccgctataggagaaatgtcattcgatgaacatcacttgaggcttgaaaacgcaaggctaagagaagagattgatcgcatctcagcaattgctgcaaagtatgtagggaagccagtggtgaactattcaaatatttctccttctctccctcctcgtccgttagaactaggggttggcggtgctggttttggaggccaaccagggattggtgtggacatgtatggagccggggatcttcttaggtcaattagtgga

SEQ ID NO: 302282 - DNA, 408 bp, Zea mays
gttaaaaagttcaaacctgcatgattgcatttattattttggtttccattacacaaacatggtttattaatgacaaatacaagtacattcagccactccaaatacataacttaaacatacacaactgatgaaggaatcagattccttctatttcacatttatttaaagccagggacagtacttcagcaaccatagagcccttagatagagatactgttgggaattcctctgaaagtcaatccctcctcactagaaggatagagcaaagtgtaaggcattttagccggcccatagcggtttctcaatgtctcattattgttcttctctataagcttcttttcaatctcttcaagattctttccaaacctcttaaaggcctctaatggcccggcatcagaagtccagtag

SEQ ID NO: 302283 - DNA, 426 bp, Zea mays
cacagcctcacaagtaacaaacttataacacacactctctctctctctctctgcaatggctggaatggttcccctttgcattgcatcattggtcactctttttgttgcaacaagtgctagaattcctggggttttcaatggtggtgcatggcagggtgcccacgccactttctacggtggaaatgatgcctctggaacaatgggtggggcatgtgggtacgggaacctatacagccaagggtatggcgtgaacaccgcggccttgagcacggcgctgttcaacaacgggttgagctgcggcgcgtgcttcgagataaagtgcgaccaagatccgaggtggtgcaaccgggaacccttccatcgtcatcaccgccacgaatttttgcctcccaactttgcccttcccagcgacaacggcggctggtg

SEQ ID NO: 302284 - DNA, 531 bp, Zea mays
  unsure (1)..(531): unsure at all n locations
tatttttgttgccaatcctgccaaggtaagtattatttattctgttcatccataggatttatataagtattgttaagatattcaaaactaaagatgttcgtggtataaaatggccccagcgaaattcatacttcaccttaaaaatatcataatgaaatgttaggaagtgtcttcaaggtgaaattatcacatagttgagtttttcaatttgcaataaaaaattaataacatttgattacatgttattcgataattaattggaacaataatagtcctactcttaaatcatgtaataatttctaggtttgtttcttctatattgagaatctccttgtattttaaaacttactatttctcatcattgttaaagaggatcagcatctcggagataaaacagcacctttggtttaggaagaacctgccaagggagataattgaggctgaaagaaggggttacgaggaaacacanaaagaccaaccaagccaaagtgtggaagaaatcatgcggatcatacaagaagcaaggacaaa

SEQ ID NO: 302285 - DNA, 470 bp, Zea mays
aggaaacattgtatgtgcagttttcacattatcataagaacctggttcagtatcggcataacggtgttgaaatgattgcagggaaatatactttctggaacagaactggaggcgctgatcattttcttgttggttggcatgattgggcccctggagaaactaacgttgacatggctaattgcatacgatccctttgtaatgctgatgtgaaagaaggatttgtttttgggaaggatgcatctcttcccgagacgtatgtccgcgatgctaagatccccactaaggatctcagcgggaattcagcttcgaagaggacaacgcttgcattttttgcagggagcatgcatggttatgtgaggccaattttgttgcagcactgggaaaacaaagaccctgacatgaaaatctttgggagattgccaaagtccaagggcaacaggaactacatccaatacatgaagagcagcaag

SEQ ID NO: 302286 - DNA, 449 bp, Zea mays
attccggatggaagatatgataaacatgatcctcaccattctcctcaaacaactccagatcccctttccacccactcttcttcacagcttcatagtaccaaacccctctatcccttagtttatcctcgctagccacacacacaataatcttggaacaccccaattcagccaaactaggcgccccaggagccactgggttgaccatagggttatcaatgccaccgggtacagaagggtaaacaaaatcccaaaccacatagggtaaactctgttcatgccctgtaacaggttctgacccaattgggtatgagctgcagaagtaagggtgggcgaaaatagctcctagtaacttaacaccacaaggtaaaggctcagtgccagcacgcatggcaatgttgtgaacgatgttgccacctgcactgtcacctccaatgaaaactctttggaaa

SEQ ID NO: 302287 - DNA, 471 bp, Zea mays
cgttagagagcctctgaatggggaccgagttaagaagctcaagttcattgttgcccatctgctgcacttcctgaggggaaagtatcttgatataccctacactatttacaaattccggccacgggccatcaccaaggagcagaacgtcattctcttggtcaacgaatacaagctgccagcctgatctcacagggtcctccaactcaccttcaaggccaaacatacgagcaagctcgctgcgtagctcagggtagctggtgaatttagtgatgtccaaggatcttccaaaggaccctgacttgtaaaccttcacaaaggttttgttggatgggtttccttgccccccattttctggagtttgcaggaagcccgtttcaccaatattgtgtgtcattccaggattcaatgaggaatcaggtcctgtggtgttcaggtaattagaagattgcaaggtattgtgggtgagtcact

SEQ ID NO: 302288 - DNA, 498 bp, Zea mays
acggggccaaccgcagtggattcgagcgagattccagaagtgtgtaggaaagaggtaatggagtgggacaaggaggtggcgcgtgtggctcgtgtgttatacggtttactgagtgaagggctgggattgggtacggagaggctcacggagatgggtttggtggaagggagggttatggtggggcactattacccgttttgtcctcaacctgatctaacggtggggcttaactcgcatgcggatccaggggctcttacggtgttgctgcaggaccatattggggggttgcaggttgagactgaacagggttggatccatgtcaagcctcagcctaacgccttggttattaacattggagatttccttcagataatttctaatgaaacatacaagagtgctcatcatcgggtgttagccaattattctaacgagccacgagtctctattgccgttttcctcaacccaagtgatagggagaaacattttggaccattacca

SEQ ID NO: 302289 - DNA, 543 bp, Zea mays
cttcctctgaaattgaatccaaaagtttcaattccaaacaagatgtttccaaacaaagccagaacactccaattcttccaacttctccaccatcaatatcacctatagggggaagtgttaagaaccaatcaggattcagtttcatggggtcatcagaacttgatggaatcacacaaggaagtcctaaaaaaccaaggaaccatgaaattcttcactctccaaaccgtgtcccttcaatcaacatggatgtgaaagccaatgaaggaaacaatgagcaacaactctcaatggatcacgagaggcagaataatagggatagctactccttcatggggaaccaaacaaacttcattagtggctttggacaataccctattgaggaaattggtaggtttgatgctgagcaattcacaccaaggttttcaggtaagaatggagtttccctcactcttggtcttcctcattgtgacacattgtcaggaacacaccaaagttttctcccaaaccaaaacattcaacttggaagagggttggacattggtg

SEQ ID NO: 302290 - DNA, 411 bp, Zea mays
gtgaagtttgtttattctgagaaggaagagagaatagaacgccatggatgagatattgaacaaggtggggtcttactggttctccaagaaggccagcaaggaatttaactctgtcggcgatgatatcaactcactgtcaaccagtattgaagggggaaccaaatggttggtcaacaagttaaaaggaaagatgcaaaaggcattaacagagttgctaaaggagtatgatctacccataggaatctttcctcgcgatgcgacaaactacgaatttaacgaagagacaggaaagcttgttgtttacattcctcaagtgtgtgaggttggctacagggattcgtcagttctgcgtttctccaccagcgtgagtggctatttggagaaagggaagctagcagaaatagaaggaat

SEQ ID NO: 302291 - DNA, 339 bp, Zea mays
gtccatggagcgctggttgatgttcgccgagcccacgatgatgtactcatcgtccactatcatggtcttggcgtggacgtagatcatgaagcgcctggcctgctgcgccctctcgtagtcggtgttggggtccgggtgctccggcggcaacgtactcgccggggtctcgcgcctcgcggttgccgaggcagaagaaggtgaggtagtcctggggtcggcacggagccccctggcgcggatggccagcgtcacgtccttatacatcatctccatggtgcggcgctagcaatccaggatggcctgcacggagccgctctccggcacgccctccggccacag

SEQ ID NO: 302292 - DNA, 295 bp, Zea mays
accagattgcaaatatcacttgacgttctcagagtacatgttgcttctcagggttctacaacggtagaggttgttggaaccaacaatttggcttttattcactcgaatgaaccccccacccccccaaaaaaaaaaggcgtgacactaaaacgataagtacaacgtcatggaaatattctcgctggcacgttagtaggtgtagcccttctggaacatgcctttcttcgcctcgtcgctctcaccctcaccagtgtagcgacctagctgtgccagcgagttggcctttgcgcgcacc

SEQ ID NO: 302293 - DNA, 333 bp, Zea mays
gaccaattagctagcttcttttttttttagctaggctcgtctgctgcaagaaggtaacagtttcagtaggcatggaggggaaggaggaggacgtccgtctgggcgccaacaagttcttggagcgccagcccatcggcacggcggcgcagggcacggacgacaaggactacaaggagcccccgccggtgccgctcttcgagcccggggagctcaagtcctggtccttttaccgcgccggcatcgtcgagttcgtcgccaccttcctgttcctctacatctccatcctcaccgtcatgggcgtcttcaagtccaccttcaagtgcgccaccgtcg

SEQ ID NO: 302294 - DNA, 291 bp, Zea mays
gaggggcagtttcaacacatttaaaataaatttttaaacacacaacattggagtttgagaggccttatagcaattgcttccccaaattaaaagaatcaaactgggtgtccctacattacagtaaaactgaagctacacaatgttttttatttgccaaccattcagtacaggattttttgaagtcctccacttgggtctaaaagcctaaagataacaattgtaaaacaaaagatacccccccgagggaaattccccaaagcagaaaacattctttttttatgccaaccaatt

SEQ ID NO: 302295 - DNA, 400 bp, Zea mays
gcctagtaagcgcgagtcatcagctcgcgttgactacgtccctgccgctttgtacacacccgaagcccacacctcagcccaacccaacaccggaacccaccaaaccgaagcccacgccgcagcccgacccgaaaccaaagccacagccgcagccgatgccggagccccagcctggccccggcaaacccaagccgaagcccccggcgtactccccgggcacgcccggtccttgatcgtgtcgtactgtcgtgttcgtataaacacgcaggccgcatgagcttcgtataaataaataagcggccggcatgcatgcatgcacagttgcacacgatgctttgtttcttcatgcatgcacagttgcacttgcacacgatgcatgcacagttgcacacgatgcatg

SEQ ID NO: 302296 - DNA, 127 bp, Zea mays
ggaggtccgtagctgctcatccgtggcatgatcttgagatgggtcctgatgctcctgctgttttcagtgttgttgttgagatcacaaagggaaccaaagttagatgtggactcgacaagaaaactgg

SEQ ID NO: 302297 - DNA, 311 bp, Zea mays
gaatgattactttgaatgcagtgtcgatgttgtttttgttgttgttttggaagagttctggacacagccagccattattacaaccaagctagcagcctttatccggggcgaaaaaaaactaaactagggaaaggatcaggcggaaacgcgattcagtatgcgtgctagtctgctagagtaatttgtcttggttccatgcatatgagatgcatgagcgaagcagacagagagctccgtccgtcctcccccgcgcggcgcccttgtctggttgatcttacatgctcggcttggcgctgaggcggctcgcgagc

SEQ ID NO: 302298 - DNA, 559 bp, Zea mays
gcggctgaagcctaccttgtcgggctcttcgaggacaccaacctctgttccatccacgccaagcgcgtcaccatcatgcccaaagacatccagcttgcccgccgcatccgcggggagagggcctaagcgtcatattttctgtcatcagtgcccgatcagaagatgtagagatatgctgggttctgtagtttgggttactgtcgaatcatcgagtgttggctgttcactgctgtaacttaattatcatgatgcatatgaaatggcaatgaactctgttatcagttaaaaaaaaaaaaaaagggcggccgccctttttttttttttttcgaagataccaatttattgccttgcaacaattaacgaagctagagatgtcgagccttgagactcaattgtctgcacggttccttaagctaaatctgacatactaagaggatttgcagagtgaacttttgtatgacacgtgaagccagtggtcctcttgtctgcaattctctagctccttttcttggacagcatatgcttgaaccagaaagctgaatccttggggtacctcttc

SEQ ID NO: 302299 - DNA, 608 bp, Zea mays
gagttcaagttcctggtcgttttatgatcaatcagggcttcttcaatcacatcttgtcattgcacagcagcagggtgatgctaacaccacactggctgctgtcctcggtaatgatggtttgattaacttctatatgctccagagtgtgaatggcaagagtgctcttcctatcacagttccacaggactcgtgtgacatgcctgcccactgcaagccgtactccatttgcaacagcgggacagggtgccagtgtccttcagccctcagctcctatgcaaactgcgaccctggcgtcatatcaccatgcaactcgaagaacaagtttcagcttgttcaactggacagtgctgttgggtatgtcggcactagattcacactgcctgtgcccaagacaaacctcacaggatgcaggaatgcctgcatgggtaactgctcatgcattgctgtattcttcgaccagacttcaagaaattgcttccttttcgaccagataggaagcttgcaacagaaagatggaggtaagagtagccttgcatctttcattaaagtatcaagcagtaatggcgggtcaaggcaaggtggcagtagtgacaatggtagctcaccat

SEQ ID NO: 302300 - DNA, 254 bp, Zea mays
gggggaggaggagcccttttatacccacaataataaacgtaagaagtttgcaggcttgcaaaagtaaaaaaaaacacccccccccccccaaattaaaacacgattgccagactagtccacctccttcattttggtttcgccaggggcatccttcaaaggaggcatgttggggttggcctccggagcctcgtcctcgtcgatgctgaggcccaacttgaacatgcgggggatgcggctgccaaaggggttggggt

SEQ ID NO: 302301 - DNA, 346 bp, Zea mays
agatatgataaatcataactagtttttattaaattaatgttaaaatagaagaaaacattaagcatcgataactgaatgtataaatttagaaatgaaattagtcaaaaagaccgaatcccatatcatcatcttcttcctcttcttcttcaacagctggagcagcagctgaagatgcagctggagtagctgaagcaacaggggctgcagcagcaaatttagatggatccttcaagtattccttggccatttcggcttctttaaaggtaatttcagtttcaactgcaatagcaatcaaattcttcactccgttgacaatgctatgtggtacagaggccacagttggata

SEQ ID NO: 302302 - DNA, 245 bp, Zea mays
tctttaactctttgtataactccgggtataaattggcgagctcttcgtcgacatctttgtcgaggaccagagaaaacacgggtgcatttgtgtatacagtggcgtagccgaccattagccaattgataaaaaggcctttcgggtcgaaatgactggcaatactgtacatggtctgacatgcactgatgatcagacacggtgcatgatgaattgccctaatttggctgaccgcttgtaagagttac

SEQ ID NO: 302303 - DNA, 423 bp, Zea mays
ggaatgaagcgaatcgggaatttaggagtagacaggtagagtaatcaccagagttgatggacttctaactactcgctgcattttgcgcggtagtggacaagtggtgaatggtgacaagggagtggtttacacccacaaggatcttcctttgcaatgagggcaataaccttcgttgtggtcgtaacgaatggctggacttcccttttaagtaccattttctttattccatgctacaaagtttggtgtcgtaacaagcagaatgcctatttagtaggcaatgatgtaatcagaccattttgtcgtggtgttccttgtcgtataaaaacatccgagacatgtgtattagaggcgtggtagctagttgatacgcgattgttttggatgaaatttggatctgttccaatgcattgataatgcatgtgt

SEQ ID NO: 302304 - DNA, 388 bp, Zea mays
tggggctcgaaaatttttgggtctatgaatatttcccacacaaacgcttggacttcttaatctttaatgaaaccaggaactcgttactggattggaaaaagcgtctagcgttaattgaaggaatagcagaaggacttctctacctgcataagcactcccgtttgcatgtcattcatcgagatcttaaaccaagtaacattctcctggacagcggaatgaatcctaacctttcagactttgggttcgccaacctctttcgctcacctcgcatcgacggccgcactacccggcgagtggttggctcctctggttctctggctcccgagtctgcctctcacggcgtctcctctctcacctctgacgtcttccgctttggcgttctccttct

SEQ ID NO: 302305 - DNA, 243 bp, Zea mays
tcgcgatctagaacgaagccagtaggctgggagactcggtctgccattgcactctctgtagctcgtgctgttgccttcatccactcaaccaatgctgcagcttcccatggcaacatcagctcctccaacgttcttctcaccagtaactacgagggacttgtctcagaacacggcctcaaaactcttgtcagtacccaacgttacttgctgacaacaacattgcacaaaaggatgatgtgtaca

SEQ ID NO: 302306 - DNA, 323 bp, Zea mays
cctggagatcgtctgcggccgtcgcgtcttctgcagcaacccagccgggtgcagccagctgctggagtgggtgtggaggctccacggcgcgggccgtgtcctggaggccgtggacccgcggctcgccgccggcgagtacgacgaggaccaggccgagcggctgctgctgctggggctggcgtgcagccacccgaacccgcggcagcggcccaaggcgcaggccatcttgcagaacctgcagacgcggtccgtgccacccctcctcgtgcccgtgtccaagccggtgttcatgtggcctgtgccgctcgccgacggggaggagg

SEQ ID NO: 302307 - DNA, 348 bp, Zea mays
ggcaccacacctcttcttcttcttcctcctcctcctagcacagctagcgcctgctccccttcgcctgtgatcatgtcttgcagcagcggcaagtgcgactgtggctccagctgctcctgcggcagctcatgcaactgcatgtcccctaacgtggagaccgccgccgccagcagcatcaagaccacggtcctcgccgcgccgaccaccaaggccagcgccggcggcttcgaggcggccaccgagggcggcggctgcgactgcaacacctgcaactgcggcaccagctgcggctgctcctgctgcagctgcaactgagccggtcaggcgatggcgcacgagagtcgagag

SEQ ID NO: 302308 - DNA, 438 bp, Zea mays
tggcggggacgggaagaagcagagcagactgcagctgtgggcggcgtgcctcccgcggccggggtgcttcacggtgtccgccgccgacgagggcccgtcggctcacggcgccggccagggggagagcaagcccaagcccacgcatctggtcgtcacggtcaatgggatcgtcggaagtgcagaaaattggcgttttgcggcaaagcacttcatcaggaaacaccctgaagacgtggttgttcactgcagtgggtgcaactcagcagctcgaacctttgatggagttgatgtgatggggagaagattggcagacgaggtggcttctattgttgacagtagaccagagctttgcaagatttcctttgttgcgcattcattgggtggactaattgcaagatatgctattgcattattatatgagagcgagacacaaaaaga

SEQ ID NO: 302309 - DNA, 361 bp, Zea mays
cattgccaaggtataatctatagatgacttaaagccagagaacattttactggatagagatgggcacatttcattgacagactttgatttgtcttgcttgacatcctgccgaccacaagtgtttcttccacacgatattgataagaagaaaaagaggaggaagagcaggagtaatcccatattttttgctgaaccaatgcgagcatcaaattcttttgttggagattattaccggagctggccatacgagtgctgtagattggtgggcgctaggaattcttctatatgagatgttatatggttatacacccttcagagggaaaacaagacaaaggacatttgctaatattctgcacaagga

SEQ ID NO: 302310 - DNA, 405 bp, Zea mays
ctcaaacgtgcctcttgttgcattgacacacatgtacaatacaatcgtacatatagtacgttttattcgacaagcagcctctgcatgcaataatagtacaccccccgatttaattggactaatgcatgctgaggatggatcagatggagatgctgcttgaggaacttctccatctcctcgcccggcccgccctcctccaccggcatgttcttccggatggtggtcggccggttggggaagtagccggcgaagtggtactggccgaagttgacggccgagtggtggccggaggtgacccacatgatggtggtcagcgtctccaccaggctgtcgcgggtgtccagcacgggccaccacggctcgtccttcttgtcgccgtgcccacgttgcgcactcgtcccagaa

SEQ ID NO: 302311 - DNA, 296 bp, Zea mays
  unsure (1)..(296): unsure at all n locations
aagccgggttctatgacattggtgtttttttggactggagggtatgacagtagatcgngtgaataggcttcccaacattaacccaaaggtagagacctttgcagaagcccgggattgtcttcttccaatgggaatcacttctgagaatgtagcacaacgttatggtgtgacaaggctagagcaagatcaggctgctgttgagtctcacaagcgagctgcagctgcaacagcagctggcaagttcaaagaagaaatcattccagtttctacaaagttttgtggaccctaaaactgga

SEQ ID NO: 302312 - DNA, 176 bp, Zea mays
gttttgcttaaggagcatgattcaggggcttttttcgtggctgggtacgtaccttgttatagttatagggcgtgcattgtacttgcaaatttggattttacgagttctttaagaagtactattctgatattgctggcccagagtatgcaagcaagtacaagaccttgatctacctt

SEQ ID NO: 302313 - DNA, 377 bp, Zea mays
gtagatttgttgacaaatatgatgtgacccttgatgtttgtttatcttcagtgttctcacaaaccaaagtcctcaatccccagcaagtaactgaaaccatagatgtatgtgtggaagatgaaacagtcaattatctgaacaggaaagatgtgcagtcagctatgcatgcacatcttgttggagttcaaagatggtctgcttgcagcaatgtcctggattatgagctgcgtgacttggagataccaacaatcacggttgtggggaagctagtcaaggagggaataccagtattggtttacagtggtgatcaggattcagttatcccactgactggaagtagaacactagtacataaattggcaaaagaacttggattg

SEQ ID NO: 302314 - DNA, 486 bp, Zea mays
attccactaagttaccgattaacataattaagagcagacagttacgtctagttacataatgcagctttataaatagtaaaagtaaacaaggcactgacaaaaaaaaaaatacaacaaattccctcccttcttacttgagaactttacaaaattttctacacttgaaattgggcaccattgattaacagtgaaacgaattaaactacaatccaaaaatcacattttatcgacacaaccgacatatatatgcatatcaaaactcttgtggtagtggtcctccttctaagaaggacttgaacagcacaagtgatctctcaggctgtgaaaatggagcttcatgtgatgctcctctgatggtggcaaatgaaaggatgttaccataaacttgagtccacccacccacctgctgcttctcaaaccacaccctgtatggcacagtggtgttcaatccaagttcttttgccaatttatgtactagtgttctac

SEQ ID NO: 302315 - DNA, 474 bp, Zea mays
aaggttgctttagtctccgcaattttctgcttgcttcttcacttttttttttcctctgtctcctcctcaatcttcattgtcctgttctttcccttggtgacaaaccaagactaacacacacagaacatagcttgtgttggtgaggtgagaagataaagaaagaatggcatttgcaggaacaacacagaagtgtatggcctgtgacaaaaccgtttatctggttgataagttgaccgcggataaccgagttttccacaaagcttgcttcagatgccatcactgcaaaggaaccctcaagctgagcaactacaactcttttgagggagttctttattgtaagccacactttgaccaactgttcaaaagaacagggagccttgacaaaagctttgaaggaacaccaaaaattgccaagccagagaaaaatttggaagagaaacctgcagcagccaaagtctcaagtatgtttggagg

SEQ ID NO: 302316 - DNA, 499 bp, Zea mays
tacaaaccaaagatgtggacagaagcttggactggctggtttactgagtttggaggtgcagttcctcacagacctgctgaggatttggcattttcaattgcaaggtttatacagaaagggggatcatttgtcaattattatatgtatcatgggggaacaaattttggtcgaactgctggtggtccctttattgctacgagctatgattacgatgcgcctcttgatgaatatggattgcccagacagccaaagtggggtcatctgaaggatttacatagagcaataaaactctgtgaacctgctttagtatctggagatcctactgtacaacagcttggaaactacgaagaggctcatgtttttagatcaaagtctggggcttgtgctgcattccttgcgaactataacccacaatcttatgcaacagtggcatttggaaatcagcgttacaacttgcctccttggtctataagcattcttcctaactgcaagcacactg

SEQ ID NO: 302317 - DNA, 436 bp, Zea mays
agagactaaaaacataatttatcttttattatccaataaaggaatataagtatgtgctatttgtggcaagtctcaaagagcatgcaagaaggtatgctaataaattctctctgctgtagacacaggacgtaagaaaacaacgataactgtgatattatctttgctgcctcgttccactgcttcagtagctaacctcttggagcacattccaggctctttaacagtatcttttattatatttatgacctccatactgcttatggcatcccacaggccatcgctagccatgaccagaaattcatcctctgggcacaaggtactctcagttatctcaggttctgcagttacagcaggcttcaaatcatcatcaccaatagaacgagtaacctgaagtgcaggaagaccaaccctccaagtatcaacttgccaatgtact

SEQ ID NO: 302318 - DNA, 482 bp, Zea mays
ctcgagccgaatcggctcgagcacactacttactctttttctctctctgacggtttccgctgttctctttcaagttccaagaaatgtcaattataacacgcagaggcatccgttacatgccaagactagatgcagcaaaagtatctgctgctttgctagaaaaaggccaaaatcgtgtcatagatgcttcacttacacttattcgagaaagagcaaagcttaagggagaacttgtgcgtgctttgggaggtgctaaagcaacttcaactcttcttggagttcctttgggacataattcatcgttccttcaagggcctgcatttgcacctcctcgcattagggaggccatttggtgtggtagcaccaactcaacaactgaagaaggcaaggaattacaagatgcacgagtgctaactgatgttggtgatgttcctatccaggaaattcgagattgtggggtagatgatcacagattaatgaat

SEQ ID NO: 302319 - DNA, 463 bp, Zea mays
atcctaccaaacctagctaccaactcgatcgtcgtcattacgctcgaccgcacaactccaccgatgccggcgcccctgctgccgccgccaccgcggtaccggcggggaacgggcagaccgtgtgcgtgaccggcgcggccgggtacatcgcctcgtggttggtgaagctgctgctcgagaagggatacactgtgaagggcaccgtcaggaacccagatgacccgaagaacgcgcacctcaaggcgctggacggcgccgccgagcggctgatcctctgcaaggccgatctgctggactacgacgccatctgccgcgccgtgcagggctgccagggcgtctttcacaccgcctgccccgttaccgacgacccggagcaaatggtggagccggcggtgcgcggcaccgagtacgtgatcaacgcggcggcggaggccggcacggtgcggcgggtggtgttcacgtc

SEQ ID NO: 302320 - DNA, 399 bp, Zea mays
cgcagagataggcgtcttcgtactcgcctacctccgcggctcaaacctttcccccttctcccaattccctccgtcggccgccgctccatcccgtacgacgacaccatgagggagtgcatttcgatccacatcggccaggccggtatccaggtcggaaacgcgtgctgggagctgtactgctgggaagcacgtgccccgtgctgtttttgttgaccttgaacccactgtcatcgatgaggtgaggactggcacctaccgccagctcttccaccctgagcagctcatcagtgggaaggaggatgccgccaacaactttgcccgtggtcactacaccattggcaaggagattgttgacctgtgccttgatcgcatcaggaagcttgccgacaactgcactgg

SEQ ID NO: 302321 - DNA, 488 bp, Zea mays
gttgtttttttttttttaacaaacaagactactcagattatataatccaaattatataatccagattatataatctttcaaaaataatccagattatataatccattggggtaaacaaacaggcccaagtttatttggcatgactcacatttgtaataggctaatagctcttgaacactaacagaaagacgagagcatgtgcgcttgcacgctacttgaaggagctctcgatgtcgattacaaagcggtatttccactcgattaacaagcctcgcgagacctcgttgatataatctatcttaatgatctcaatctccggatagatattgttggctgcacagaagttaaccatttgttggatgtcttttatacctccaacaacactgccagacaaggtccgcgcaccaagtataaggcttgcaggatgcattttgatctcacttggaaacctaccaatgtcatcacaccaccaaccttaaggagagaga

SEQ ID NO: 302322 - DNA, 461 bp, Zea mays
gtcaaaggcaccgcactgaatcgaatctggtaaagcagaaaagcgtagttggtgaaattcctgggatcccccactggacggagtttttgttgctttttctttcattcatctcttacactctacgactactcttccattcccaaacgaaactcagcgtttcttctgatcatggcaagcacgttgcggttatacttgacctgcattcggaacacgctcgaggccgcaatgtgcctccagaactttccctgccaagaagtcgaaaggcataacaagcccgaggttgaactcaaaaccagccctgaactcctgctcaatccggttttgatatgccgaaatgaggccgaaaaatgcttaatagaaacatctatcaattcattgcggataagtctcaaggtgaagcaggctgatgaacttgaaaacatactgaccaaaaaatttctaagatttctgtccatgagagc

SEQ ID NO: 302323 - DNA, 426 bp, Zea mays
gcgctatctgctttttttctgagcttcattttctccgcggacatgcgtgtttgtcatatctttctttacatactgtactaaactacaaaatttattctgcacttctgttaaattttataaaaacacaaaccattgtctcaaaggaccaagcacttcataagtgaagtgaaaactaaacctgcaatagtacaatttacactgatatggaagttctaactagtctaaagcatcagataaactgcttcagaaattctgtagctacaagcctcccccttgtgttcaccgacattttgagctcacttatctctttatcaatgtcctccataaattgcacaataaagtcaataagtttgtgcttctgcatctcctcacagtggtaatttgttataaggaagctaatgtcatatccctgaacaagctttcttc

SEQ ID NO: 302324 - DNA, 459 bp, Zea mays
ggaaagtgctacctctatttttgaacatacaccacagtccagacaacttcaaggggccagaaaaatttgatccctcaagatttgaggtaattattgtgctgaaaccatgttttacctaccaacctcagttttgttgctattcatgtgtgataccaagtccaagaccttgacagattctgtttaattatttgccaggctgctccaaagcccaacacttttatgccatttggcagtgggatccacatgtgtccagggaatgaattagccaagttggagattttggtcctcctacatcatctgaccacaaagtacaggttggtaaaccttaatcatcagtaacaacagtgtctctcattgcaacaacccttttttagccataggctttgaatagagacattttccaaattagggggtttagaatgttgtttctaacgtagtgttgcttcttttcttttttct

SEQ ID NO: 302325 - DNA, 508 bp, Zea mays
gatgctgccccagcaaaaatttaagatgagcaagctgaaacaaaggaggaagaggaaaagaaggaggaagtgaaagaaacgaatgaagaagctgcggtggatgatgatggagcaaaaactgtggaggccattgaagagaccgttgttgctgtctcttctaccgttcagcctcaagctgaagagaaagcttcatcgccacttccacctgaagaggtttccatttgggggataccgctgcttgcagatgagaggagcgatgtgattctgctgaagtttctgcgcgcgagggagttcagggtgaaggaggcattcaccatgctgaagaacacgatccagtggaggaaggagtttgggatggaggagttgatggaggagaagctcggggatgagttggagaaggtggtgttcatgcatggctttgacaaggagggtcaccctgtgtgttacaacatctatggggagttccagaacaaggagttgtacaagaagactttttctgatgaggaga

SEQ ID NO: 302326 - DNA, 449 bp, Zea mays
cttcggcgctttctacgcctgttcaaacacgccgctgaaataatgattcctagagggatagggagcattgtgttcacgtctagcgctgtttcggtgactcatccgggttcgccgcacccatacacggcgtcgaagtacgcagtggtgggtctgatgaagaacttgtgcgtggaactggggaagcatggaatcagagttaactgcatttcaccctatgctgtggccactcctctgctgacacgtggaatgggaatggagaaggagatggtagaggaactgtttgcggaggcagggaacttgaagggtgtggttctcaaggaagaggatttggcagaagcagctttgtttcttgctagtgatgagtcaaagtacgtgagtggggtcaacctagttgtggacggaggttacagtgttaacaatactgcttcggctgaagtagctttaggaaa

SEQ ID NO: 302327 - DNA, 445 bp, Zea mays
ctcgagccgacaatttggttttaaccttaacccaatcccagaaaccaaaatcgggcttgcgattcgtcgaaaccgaggaagagaaatcgtgggcacctttcaaaatccgagatttccccgacaaaatgtcccaactgaagcaaatgtcgcacatagacagtgcccctccgaccccagggaagttcaagatggataaagcttcgtacttcaaccgcgtgcggtggcacacctcgctggcgaagctcgcagtgtggtccttcgtgttcctgggcgcgatcttgatctttttcctccgctcgccggcatcgtctccggtcccggcggacctctcccggcggtccctgcgaacctacaactggggcggacccgtttgggagaaacgggtccgggcatccgcccaggtccggtcccgaaacgggttcgccgtgttggtcaccggcgccgc

SEQ ID NO: 302328 - DNA, 454 bp, Zea mays
cacaacactacactagcaagttcacacctttagcacaatcaccaatggcttcttccgacagcaagcttcccctgaaacccatccctggaagctacgggcttcctttctttggacccatgagtgacagacatgactatttctacaaccaaggacgcgacaagttctttgccgaacgaattaaaaagtacaactctacggttatacgaaccaacatgccaccgggtcctttcatttcctctaatcctagagtcatcgctctcctcgacggtgtctccttccccattctattcgacaactccaaggtcgataagcgcgatgttctcgacggcaccttcatgccttccacctccttcaccggcggttaccgcgcgtgtgccttccaggacaccaccgaaccctcccacgcgctcctcaagcgcttctaccttaacttcctcgcctccaagcacgaaac

SEQ ID NO: 302329 - DNA, 494 bp, Zea mays
attcggtcaggcagaccctgatggagtgttaatgtttctgtggtctaaattttatgcatgggactctggtgtatgcagcgattgtgcagcatcttttgccaaggagcagcaaaaggaccgggttggtaggctcccaggtcaaggcttcaacatcagcttcgcacactatgctgggtacatcaccgtcaatgagaaagctgggagaacactcttctactggttcattgaggcacttgaagatcctcattctaagccccttgttttgtggctcaatggagggcctggatgttcgtccattgctttcggacagtcagaagaagttgggccttttcatataaattcagatagcaagaccctccatttcaatccctattcttggaaccgagttgccaacattctttttcttgacactcctgttggggttggattttcatattcgaataacaaatcccacatgctgatcaatggcgatgagaggacagctgaggacaatt

SEQ ID NO: 302330 - DNA, 453 bp, Zea mays
  unsure (1)..(453): unsure at all n locations
ttttgttttttttttttttttataacatattttcggnacatctaatattttgctgggtgcatagagaaaaaaacacaaattgagtaacgcgtaaaagaaatcaacattggattccccatgtgaaacagtcaaatccagtcaatttgaacttatttaaagggagaatattaacgtaaattcaggaggcaccgactagctcaagattgggcattgatgttcctgctaggaaggctttgaacagtgtcaaagcaagttttggtgaatgcaaaggaacttcgtgccccgcaccccttacaaccacaaacgtaaggccagcatattcttgagtccatgctcccacctccccatcatcataccatgctcgccaaggactcacagtaggaaggtcgagagcttttatgctatagcgagtagatgtcacgggtattaccacgtctgtattaccactgaaca

SEQ ID NO: 302331 - DNA, 382 bp, Zea mays
ttttgttttttttttttttttgtgctcagtttgcctttcatgtagctaactctctgggttttcgctctttactgaaatagtacacctcttgtccaaagaatcacagttcgttacatttggaagcagaattccgctttataccattggaaggattattcccctaactcgctccatggaaaagccttggccaccttacattttggaatggacggaacccagtcacacaacacacacaccaatcagaggtctcaggaggctggccaggtcttcaggcacagcccgcctgagaaaaatgaagaatacgctacgttctatagtctgcgtcaatcagatttttgtgcaaaggtgttcgttttcgagtcagtttggtagtacactacgt

SEQ ID NO: 302332 - DNA, 427 bp, Zea mays
tccggacgctccgtcatcggcgggccccacggtgacgccggcctcaccggccgcaagttcatcatcgacacgtacggcggctggggagcccacggcggtggcgccttctccggcaaggaccccaccaaggtggaccgcagcggcgcctacgtggccaggcaggccgccaagagcatcgtggccagcggcctcgcccgccgctgcctcgtgcaggtgtcgtacgccatcggcgtgccggagcccctgtccgtgttcgtcaactcgtacggcaccggcacgatccccgacaaggagatcctcaagatcgtgaaggagaacttcgacttcaggcccgggatgatcagcattaacctcgacctgaagaagggcggcaacaggttcatcaagaccgccgcctacggccacttcggccgtgacgacgccgact

SEQ ID NO: 302333 - DNA, 491 bp, Zea mays
cggcgtcgtcacggccgaagtggccgtaggcggcttttttgatgaacctgttgccgcccttcttcaggtcgaggttgatgctgatcatcccgggcctgaagtcgaagttctccttcacgatcttgaggatctccttgtcggggatcgtgccggtgccgtacgagttgacgaacacggacaggggctccggcacgccgatggcgtacgacacctgcacgaggcagcggctggcgaggccgctggccacgatgctcttggcggcctgcctggccacgtaggcgccgctgcggtccaccttggtggggtccttgccggagaaggcgccaccgccgtgggctccccagccgccgtacgtgtcgatgatgatcttgcggccggtgaggccggcgtcaccgtggggcccgccgatgacgaagcgcccggacgggttgaggtggaagatggtcttctcgtcgaggtacttctcagggatcacgggcttgatgacgtgc

SEQ ID NO: 302334 - DNA, 426 bp, Zea mays
ctcaaaccaccattgagatttattccttttatgagggtattgacttctacacagggatcaggggtgcccgtttcgaagagcttaacatggacctattcaggaagtgcatggagcccgtggagaagtgtttgcgggatgctaagatggacaagagcaccgtccatgatgttgttcttgtcggtggttctactaggattcccaaggttcaacagttgttgcaggacttcttcaacggaaaggagctttgcaagagcattaacccagatgaagctgttgcctatggtgcagcagtgcaggctgccattctcagtggcgagggtaatgagaaagtgcaggatcttctgttgatggatgttactcctctctcccttgggttggagaccgcgggaggagtcatgactgtgttgattcccagaaacacaacca

SEQ ID NO: 302335 - DNA, 445 bp, Zea mays
aataattaccattttcactatatcattgttaagttggacgggggaaagtacattaaaaaaacgagaaaagtaaaatccaaatccaaaacataatgacaagacagggtattatctaaacttcaaaagggtcttcgcaaaatcaagaacaacccatgacaattggtctgcttaatcgacttcctcaattttgggtccagcaccgcttccactgccagcagcaggaccatcctcatccatggctccacccgcatcaccaccagctccttggtacatctttgctatgatggggttacaaatgctctccaactccttcatcttgtcctcgaattcgtcagcttcagcaagttggtttccatcgagccattggatagcctgctcaattgcatcctcaattttcttcttatcatcagcagacagcttggaagcaatcttatcatctttaatt

SEQ ID NO: 302336 - DNA, 337 bp, Zea mays
cgcagagataggcgtcttctttctctcttacctccgcggctcaaacctttccgggttctgggaattccctccatcggccgccgctccatcccgtacgacgacaccatgagggagtgcattaccatccacattggacagaccgctatccaggtcggaaacgcgtgctgggagctgtactgctgggaagcacgtgccccgtgctgcttttgttgaccttgaacccactgtcatcgatgaagtgaggactggcacctaccgccagctctttcaccctgagcagatcatcattgggaaggaggataccgccaacaactttgaccgtggtcactacaccatt

SEQ ID NO: 302337 - DNA, 523 bp, Zea mays
tctcactgttgagcatgctatccaaaacaagaagttgttcatcttagatcaccatgactatctcattccatatttgaggaaaataaatgcaaataccacaaagacttatgctacaagaaccatatttttcttgaaaaatgatggaactttgacgccattggccattgagttaagtaagccacatcctcagggtgaagcatatggtcctgttagtgaagtctacgtgccttcgagtgaaggagttgaagcttacatttggttactggcaaaggcttacgttgttgtgaatgatgcttgctaccatcaaatcattagccattggctaaacactcatgcggttgtggagccattcgtcatagcgacaaacaggcatctgagcgtggttcaccctatttacaaacttctgtttcctcactatcgtgacaccatgaacattaattcacttgcccgcaaatccttggtcaatgccgacggtattatagagaaaacattcttgtggggtaggtactctttggaaatgtct

SEQ ID NO: 302338 - DNA, 380 bp, Zea mays
gcagaagtggcacgtctactatgccaccactgagcacccctaaggagcttgttgtgacacttgcactttactgccgtatatttgcaggcgagaatatattatcaactgtaactggaaggtcttctgtgacaattacctagatggtggatatcatgttccatacgcacatggggctcttgcatcgggtctgcagcttcaatcctatgaaacacttacatatgaaagagttagtgttcaaagatgtgaaagtgcaccagcagaaccagatgacttcgatcgcttagggacaaaagctctctatgcctttgtttatccaaactttatgatcaacagatatggtccatggatggacactaatctagctgtcccattagattcaa

SEQ ID NO: 302339 - DNA, 100 bp, Zea mays
gctattggccatgtccgacataagaattttgttcggctgatgggaggttgtgttaagggcgcaaacaggatgctagtatatgagttcgtgaacaatggta

SEQ ID NO: 302340 - DNA, 456 bp, Zea mays
atataataaaatctatctgcaatattatttttctgagtttgtgtctagttagtgtctgggtcctggtcctgccaattgtgtcaattaattgtattgaatcataaaagatggcttcctcaagtggaacatcttcagggtcatctctgcttcagaactctggttctgaggaggatttgcaggcggtgatggatcagagaaagaggaagagaatgatatcaaaccgcgaatctgcacggcgatctcgcatgaggaagcagaagcacttggacgatcttgtttcccaagtggctcagctcagaaaagagaaccaacaaatactcacaagcgtcaacatcaccacgcaacagtacctgagcgttgaggctgagaactcggtgcttatggctcaggtgggtgagcttagtcacaggttagagtctctgaatgagatcgttgacgtgttgaatgccaccactg

SEQ ID NO: 302341 - DNA, 391 bp, Zea mays
ctcctggagttctgcaaaatgagattgaccacgttgagggttttgctcctgaggttgcttgggtgacaaagtctggggaatccgaattagaaattcctatagctattcgtcctactagtgaaacagtgatgtatccctactactctaagtggataaggggacatcgtgacttgcctttgaaacttaatcagtggtgcaatgttgtaagatgggagttcagcaaccccactccattcatcaggagtcgcgagtttctttggcaagaagggcacactgcttttgcaacaaaggatgaagcagatgcagaggttcttgagattctggaattatataggcgtatatacgaagagtatttggcagttcctgtcataaagggtaagaaaagtgagct

SEQ ID NO: 302342 - DNA, 447 bp, Zea mays
aaaatcaaagtaaaactatcagttgaaaaatattcccaagagaagaaaactaatatctgtgtgatccacaaattcgtacaaggtaccattaaataccaaattaattccagaaaataccacaatcaacagccagtagcctagtaacttcttccccagtatgtccactttgttgcaggctttcctgatgcaaagcacttggtgccttctgggagttctggctgatcaaagggactgcaaagagtcttagctgctcccatctcaccctttgtcctcgctttgacatcagcctcaacctccgcctcgtcacaccaaggagctaagatgatttttgtttggttcaaagcttgcacaaattcatcccaagtgtgtatgatctgaatgcattcatctcgtttttgttttcaacatcaaacaggttctgttgaatagtatcgagcaactttttta

SEQ ID NO: 302343 - DNA, 465 bp, Zea mays
gaaaacaagagcagagagatgtcattagaattttcaggatcagctgaccttactttggaggggaaccaattaagtggaccagaatttccagttttcaattttagttgcatttctatagccacaaacaatttctctgaagaaaataagcttgggcaagggggttttggccctgtctacaagggaaagcttccaggcggagaacaaatagctgttaagaggctttcaagacggtctggccaaggcttagaggagttcaagaatgaaatgatgctgatagccaaactacaacacagaaatttagttagattaatgggttgctctattcaaggggaagagaagttgctggtatatgaatacatgccaaacaaaagcttggattgctttttatttgatccagtcaaacaaacacaactaccttggacaagacgttttgaaatcattgaaagcattgcgagagcattactt

SEQ ID NO: 302344 - DNA, 494 bp, Zea mays
gggatcgcaaaggagtgttttggttcgggttaaaatgcaacgataacggttgaaatagaaaaaagaaaaacagtgttttggtgaagctgagaaaacaaaggtttagatcacctctgaaattctgctatggcctcaaccagatcactcattctttgtctgttcattcaactgtgcttctaccttctacccctctcattcgctcaatcccccgccaccgggtctgccgaaggttacaccatttatggtcgagtgaagatccccagtgtgggaacaaaagattatattcttcctggaaaaatttcaaatgtcaaagtcatactcaatggtggtcaaagagttacttttctgaggcctgatggatatttcgcattccacaatgttcctgccgggacacatctaattgaagtggctgcaataggctatttcttttctccggtacgagttgatgtaagtgccagacaccatggcaaaattcaggcagcactgacagaaaa

SEQ ID NO: 302345 - DNA, 470 bp, Zea mays
tggaagcatcccaacaagtttgggttgttccccagcctcagtgataaacttagccaacaacaagttaagtggaagcatcccagcaagtttgggcttcatgggttctaaaataaaggagattctgttcctcaataaccagttaactggatgcattcctgagggagttggactattcacagagatgcaagttctggatgtgagcttcaactcactcatgggtcatttgccagacacactatcatgcctgcaagacatagaagttctcaatttggctcataacaagctctctggggagttatcagatgtggtgtgctctttgagaagccttgcaaatctaactgttgcttacaatttcttttctgggttcagccacgaatgctcaaggcttttctttaggaatgttggttttgatttctcactaaactgcattcctgatagggacatgcagagacctccacctgagtgctctg

SEQ ID NO: 302346 - DNA, 493 bp, Zea mays
ttctcttccaatggcgtcttctctttccaccaaaccattctcagccgacgctctctccgccttcgcttctctcaattccgatctcggatccctcccccccgcctacctccgactctcactccgtcctcgtcttcccaagagacttcacatacaggcggctgggagtacctatggaaatcactttcgtgttacaacatatggggaatcacatggaggaggtgttggttgtgttattgatggatgtcctcctcgccttcctctctctgaagctgatatgcaagtggatcttgacagaaggaggccaggtcagagccgaattacaactcctagaaaggagactgatacatgtaaaatattttcaggagtttccgaaggaatcactactggaactccaattcatgtatctgtacccaatactgatcaaagaggacatgactatagcgagatggcagtagcttataggccctcccatgcagatgctacctatgacatg

SEQ ID NO: 302347 - DNA, 388 bp, Zea mays
attcaatgcctttcaaaatccaacaaaatattgagcaatggtttttttaggacatcatttcaaaacaaaattgaaggatgatgtactagaagttactcaataagtagcccagaaacaaaagtttgaaggatgctgtttaacagcttatatgagtgagatttgtaagatgactttgatccaattaaaatataaaaaaaataacattcctcaaaaaagacaggttaattttgaggtaaccgagttggaagatcagccgggacgtctgcacttgcctgaaggtatcttgtcaacatagcagtagtactgaagttaaagccttgaaccggttctccttttgtgcgagatgcattaagttgctttctcacttgagaggctaatgacttcccaa

SEQ ID NO: 302348 - DNA, 306 bp, Zea mays
ggggggaatgctcccttaccatttcaaaacaagaagctaaaacagactgcttggggttaatttcatacacattaacttgcctggaagttgcaacaaaaaaaaaaagttccctataacatagtgcattcctgtttaaccgaacaattgggaataaatccattgtaaacaaaaatttttttcaactgggtcctcccaatttaaaacaaaatcttcctacccttccttttctattaaaatactttgagctttatggtggaaatacaaaaaggggagtgtcaacgcttacaaacttggcattttccgcaa

SEQ ID NO: 302349 - DNA, 413 bp, Zea mays
cttttcttctctttacccgttgaaacatccttagttttcagattctgaaatcttgattctgaattcatcacaatgaattcgtcaactacagtgaggaagttgcaggtggtgtcccctgttcctgcggacatagacattgcaaactccgttgaaccagttcatatctcccagattgccaaagagctcaaccttagtcccaatcactatgacctttacggtaaatacaaggctaaggttttgttgtcggttcttgatgagcttcaaggatcagaagatgggtattatgttgtggtcggaggcattactccgacgcctctcggggaaggcaaatctactactacagtgggactttgtcaagctttaggtgcttttcttgataaaaaggtagttacctgcctttgtcaaccatcgca

SEQ ID NO: 302350 - DNA, 456 bp, Zea mays
acttgcaagcctaaaaatcaatatagaaatttcataaagtgactacaaccagagaacctgaaaaaacaaacctttcatttttaattacaatggacctggtgttacaataaaagccaggacacttgaaagattcatgtgaatttgggtttaggcacggggccactattttggtgcaagggaccaagcttttgaatccaatgaagaagccctttcttatgatcccaacaaggatttggcaccaggctcagggttccatcactggcaagtgaagattcaaattgctctaatatcttaacaacctgccagaactcaggcctcttgtctggttgcaagctccaacattgctcaattagagctcgcattgcaggagggcagtttgatggaataatcggtcttgaattcttatttactactgcaaaagcagcctgtattggattcatatcctcatatggtatt

SEQ ID NO: 302351 - DNA, 301 bp, Zea mays
aaaacaactattttattccttatcttttaaagaagcggaaaggcaaaccccccactttgcaacaatggtggaatacaaaaaatttttgaaccttttgaaataaagggccaacaaaatcaaaggatgcatcctttttgggttcaatagttcctttaaaaaaccatttggaccattttgcaaatagctttgggtattttttcagctttggatcatccctatcaacatagtataggccgaagcttgatttgtttcccgcccgcaattcaaataaatccagaaaagaccatgcaaaatacccctt

SEQ ID NO: 302352 - DNA, 535 bp, Zea mays
aaaagaatgaaattggtatttctacaaaattgtcaatttctatacaattgtttttacagtgaatttactgctcagacaaataaattcatccttatcaccatctgcttcaagaggaaatagatgggataatacaactccaatgttgaaaggaaacatgtcaagaggatgccaccttgggtacctccaaccatttccacaccatcagcaaaccactctcatctccagtgaagaagaggccaccaggacctaactcaatcaatgccacatctttcttggcaaacaaacgtcccctctctgaaaatgatggcaattcatacatgtgaactgaattgtctctgcacgaggaaaataatattggctttccctctgcatcaggcatcccaaaaagtgaaacaacaccattttcttcggtgtgtgtatatatcacttccaaagatcctgcttcaatgcaagcccagactttaattgtgcggtcagatgaacttgacaacagatattgatcccaacagataagggatgtgactgcgtcagtatg

SEQ ID NO: 302353 - DNA, 482 bp, Zea mays
aaaagcatattccatagatattcttattgcatcatcatcaacactccaaataacaaaagaaagatacaaccacctgaatacgcccatagtggtgaaaaacacacaagcaaacaaaacaaaccacaccaataacaacaaagctctcacatctccctaacctccaatactaacacaaagtatcaatgttccctgaaaccgatcgatccagtcaccgccacgtgcacaagtcccttatttaattattatagcaacggcaacacgtgacctcgtccttccctaattacttattttatattttatattgcgagaaccaaaccggggacggatttcccgacccgaccggagacgctgctctcccagacgcagggcaaacggccggcgccggatctggccggaacaatctcgccggaatcgtggatgcgagtgacggtgagggcggtgttgaagtactctctgatttgagtgatcatcccatcagtgac

SEQ ID NO: 302354 - DNA, 357 bp, Zea mays
gcagaggggtgaggaagaggaagagagaaatgtccaatttgagatcacacacataccgatttcaagattgattctggtcccgtcagcttggtagttaatgcttgtgcaagcagggatcttcaagataacattgtgggagtttgttttgtggcacaaggtataactgctcagaaaacaatgatggaaaaattcccccgaattgaaggtgactacaaggcaattgtacagaacccaaacccattgatccctccattatttaacacagatgaatttggttggtgttgtgaatggaattcagctatggcaaaattaaccggatggaagcgagaggaggtgatggataaaatgcttttagga

SEQ ID NO: 302355 - DNA, 410 bp, Zea mays
aagcaagcaacattttgttggatgaaagcatgaatccaaaaatttcagactttggcttggccagaatatttgggggaaaccaaaatgaagccaacacaaacagagtggttggtacatatggttatatgtccccagaatatgcaatggaaggtctgttttcaattaaatctgacgtctatagttttggcgtattgctacttgagattatgagtggccgcaagaacactatctttcgtgacacagaagactcaagtcttataggatatgcctggcacctttggagtgagcatagagtaatggagcttgttgatccttccgttcgagattcaattccagagagtaaagcgttgaggttcatacacataggggatgtatgcgtgcaagattcagcatctcgtagaccaaacatg

SEQ ID NO: 302356 - DNA, 440 bp, Zea mays
cggtaaccacttatatattattttatatggtagcaatatattatttcacgaataacaagattcctgtcttgatcagcataggggtaactctgtttgtgtatcatggcacttcttgtgctccataatatatatttgttttatttgcctatgaaaaaaaaaaagtcacacaaaagtgacaaaatagggggaaaaaaacccgatacaaaatattgatagataatagtaatatcttaagaaggccaatcaagctcgtccagtgcgccttccaactttgagtgctaattcggtatcaattttgagggagatgtctagtgctttcacagaatgagtcaacgaaccactagaaatgtaggtcactccgctttgcccaattttatgtacagtatctagtgtgacattgcctgatgcctcagtctcatatctcccatttatcaactgca

SEQ ID NO: 302357 - DNA, 434 bp, Zea mays
gaatacacattattatccatattttaaacaagattattacacatgaaacagtcacggccattggtctaacatttatagaaagaggtcataggagcaaattgaacgaaaccagcttcagttaacatcaactcgaggaacctcaaactttagatttggaatcatagtttcaaatgcttcccatgaaccaggtcatgtcttaggagctaatagaatgaagccagtttaagttaacctcgactcgaggaacctctaacttcagatttggaagcatagcttcgaatgcttcccatgaagcagctgtctcttcatcacataccaccaccttcaaattctcaagattggttactgagtatggcaattcacaccttgcacagcttgtcatattgagattcctgagattacatagatcaccaatgtcctctggtaaacttgaa

SEQ ID NO: 302358 - DNA, 452 bp, Zea mays
tttgatacaatttgtaaggttaattctcagctcatcagcaatgtctgcactgatgctctctctgcagagaagtattattatttcatccgtcttatgggacgcaaggcatcacacgttgctttggaatgcaccctccagtcccatccaaatatggtaattcttggtgaggaggttgctgcatcaaagcttaccctttctgaaattgcaaaacagattactgatgcaattcaggctagagcagagcaagacaaataccatggagtcattctccttccagaagggctgatagagagtattcctgaagtgtatgccctcttgaaggaaattcatggtttactcagacaaggtgttgaagttgacaagatatcttctcagctaacaccatgggcatctgctttatttgaaattctgccaccctttattaggagacagttgctcctttaccctgaatc

SEQ ID NO: 302359 - DNA, 143 bp, Zea mays
ctagtaagtgaccacaacttggggggtggggatggggggcattgctaggtgtgcaaagccataaatattatctgtgttctcgcatgctctggtataagccgattgatgacatcagggggtacaccagaaagttcctgaggttt

SEQ ID NO: 302360 - DNA, 500 bp, Zea mays
ctcttcgagtacttgataaagaggcctctcaggctccttcctctgttgcttccggaggtcaataacatcaggtgtttccactccagtgggagtgcttgacagactatcaacagactgaataccagcttcaagttcctcctcctccatttcttcttcttcttcctcctcctcctcctcctcttcctcttcctcttcctcttccaagtctccccaatgcttggtcttatcaactggctcttcctcatagttaggctgatcttgttgttgaacaccaaaaacatctccatacagtggacgcccatattcatcaacaggaggcttgcccatccaccaggatgataaccaaagctagctccaggggggataggagcattcagtccagggattttcagatgaggatatgatggtggaggccatatctctgcatattaataagccaaggaggaggagaccttcaggcataccaagagcttctttcaattcatgtgatacatgccagg

SEQ ID NO: 302361 - DNA, 368 bp, Zea mays
tctaagttgaaattcctcaagaaacttcttctcgatggttgcttagagttcaaaatattcccagaaattgaggacacaatggaaaatctagctgtgctcaaattagacgcaacagcaatacaggccctaccttcatccttgtgccgtttggtagcgcttgaagaattgagcctgcactactgcgaaagacttgagactattccatcttccattggagatctcagcaaacgctgcaagttaggccttaccaaatgtgaatcacttgaaacttttccgagcagcattttcaaattgaagttgacaaaacttgattggtatggttgctcaaagctgaggaccttccctgagatcttggagcctgcacaaac

SEQ ID NO: 302362 - DNA, 315 bp, Zea mays
gttaaagaccggcaccatgaagaagtctaccttggaaacttgaagaggttccaattcagagaactccagattgctactaacaacttcagcagcaaaaacatactgggaaagggtggttttggaaatgtctacaaaggagttttccctgatggcactcttgtggctgtcaagaggcttaaagatggtaatgccattggaggagagattcaatttcagaccgaagttgaaatgatcagcctagcagtgcaccgaaacctcctcagactgtatggattttgcatgacaccaacggaaaggctcttggtttaccataca

SEQ ID NO: 302363 - DNA, 453 bp, Zea mays
ttcagttcttcttattctccactaatagcttcttcttcggctacttgagaccttgctgcaaaggttctctcttagcttagtaacaatgggtttgaaagcactttttgtttggtgcattatatggttaggtttagcacatttgtcccttggaggaagagtgaggcactacaagtttgatgtggagtacatgatcagaaagccagattgcttggaacacgttgtgatgggaatcaacggccagtttccaggcccaactattagggctgaagttggtgacattcttgacattgctctcaccaacaagcttttcactgagggaactgttattcactggcatggaatcagacaggttggaactccttgggctgatggaactgctgccatctcacagtgtgctataaacccaggagagacttttcattacaggtttacagttgacaggcctggtacata

SEQ ID NO: 302364 - DNA, 371 bp, Zea mays
cactgagagaagaaggaaaaactaaccaacaccacagcccctaatttcctttttctcacaatggcggcttcagtcgacaaccgtcaatacggcacccacataaacgccgtcgttcgcgcttgcggcccagacttcaatacccctctcccgtcggatttcgatctggactcatccagcgacgacgaagaccaaaacgacgacgcttcgtatctcaaggagttgatacaaaaagcgaacgcggaaaccgaggcgtcgctgttggacccgcgagacgagggaaccgcggaccagtggatcccgcggaacgcctccagtggtgcggctcagagggaagcaccccttcaacgcggaggcccactcccccgccttat

SEQ ID NO: 302365 - DNA, 385 bp, Zea mays
gaattgaagagagtagataggcatatataacattaatttatttacactaaagtagtaaaaaaatcttgacgtacctgtctacattaaagcgtgagaagggatgaagagttacttcccaacaatctcggttcatatacaatttttcacttctttttttacccttataaagaatgaaacaaacattaatactccaataacacccgatacacaaacagatacaatacacaacacaatctagcaatctagctacttcgccatgccctaaaacacaagcaaatcgttcttgatatcatatcccattttctccaaattaggctgcactgcaaactgaatcatgggtggtgcccacatgtcaaagccaaggaaccctcgacgcttttggaag

SEQ ID NO: 302366 - DNA, 450 bp, Zea mays
gagaaatggagcttggatcttatgcagaaactgcttccacgccatattgagataatagaaatgattgacgaggagctggttcggaccataattgcagaatatggcacagaaaattcagacttgctggagaaaaaattgaaggaaatgagaatactagaaaatgtcgaattgactgcagaatttgcagatatactggttaagtccaaagaggccattgatattcctagtgaggagcagcaaagttctgaacaagcagaagcagaagacgaaaaagatgatgatgaagtggaagcagttgctaaaaagaatggaacagatgaaagttccattgaggatgagaaagaagagttgcctgagccagtaccagaaccaccaaaattggttcgtatggcaaatttgtgtgttgtgggtggtcatgcagtgaatggggttgcagagatacatagtgaa

SEQ ID NO: 302367 - DNA, 349 bp, Zea mays
gccccgggcccgtgcgccgcggttctgtcatactcctgctcactccccaacaacaaaatccaagaccaattccctctgccacccagggctgcccacagtttggcgaaagaaaaaccaacatattccttcgccaccacaagtggacagtcctgtctctgtctcagtctcggtctcttcctcctacgacgacgaggactaggagatcgtgcaagccgtattgtcaggctccatcccgtcctactcactcgagtcgcggctcggtgacacccgtggggccgtcaccatccgccacgaggtggagcatagactgacttcccgatccctgacaggtttacctctggaaggtttc

SEQ ID NO: 302368 - DNA, 379 bp, Zea mays
ctcgtcattaatgtatctatctgatggtttgcttattagaatattagactctgacacaagtttaagagtactgtggccagttcattggacaattgtagatatatccctgctagatctgtagtattcaatgtggctcttaacaagttgtccagctgcaatagcagacatgagcgatagctccccggcgaggactgaaccggctacaatggtggccagtagcctagaatttgcacccgcgagattctttgttggcacccttgacaccaagtaaattaagacatgctgactgagaagcgagttgtgtgccacctccaacagtaccaacctaaatggagggcatggtcacggaaacatgaaggtccttgccatcattgatagc

SEQ ID NO: 302369 - DNA, 326 bp, Zea mays
ctctcatccagatcttgcaaaagaaaaaaaaacacaatggcagcgagcgctcccactccacgcgaagagttcgtgtacatggcgaagctggcggagcaggccgagcgctacgaggagatggtggagttcattgagaaggtctccgcctccgccgagagcgaggagctgaccgtggaggagcgcaacctcctctccgtcgcctacaagaacgtaatcggcgctcgccgcgcctcctggcgcatcatctcctccattgagcagaaggaggagagccgcggcaacgaggaccacgtcgccgtcatccgtgactaccgctccaagatcga

SEQ ID NO: 302370 - DNA, 514 bp, Zea mays
atatcttaatattctaaacagcattataatggaaatttcagtgtcattatgaaaataggcagttcagaaacgcgtactaatggaaggacaaactaaaatagcccagtacatccacaattcataacgaagaacatgaatgcccaaaatctcagtaacaccgagattagcattcaacaccttctccctttgaaaacattacacaagggaagttcaatcactaattagaagtatggtatgtttaattttgttccccgtcacctttgggtgcggcttctttaatttcatctgcaccatcatcctgcatgtcagaggtccagagggtaaggttatcacgaagaagttgcatgatcaaagtgctatccttgtatgattcctctcccaacgtatccaattcagcaatagcctcatcaaaagcctgttttgcaaggctgcatgcacgatcaggagagttaagaatctcatagtaaaacacagagaaattcagagcaagacccagcctgatagggtgagttgg

SEQ ID NO: 302371 - DNA, 426 bp, Zea mays
gttaccctagatgcaatcctttacaagttactgttatgatgaaaaatatcagaattagccactttgatgaacagcaatctggtgaatatccatgtccttcaacatcacagaacgcccacaggaatcacatggggcagtcctagaaccacaaatactctcatgctcagacaatcctcttaatctgtcacggacgtccatggcagacctcccagcttgaaccatatcaccacagaaccggcatgtaattagacgcagggggcaaagtgaagcttgatgctccaccatttgctctttctcaaggattattccacaagggcagtgaagtggctcgtgaaaaactttgatgtgcttttctaattctgcctgcgtggaaactctgaccacacctgtcacagtgaatgtggttcttggactcctcaatcctaa

SEQ ID NO: 302372 - DNA, 478 bp, Zea mays
gttagtacggacacaaactaagaagccatactcacatcacacaacacaaccatcctcaagccaacaacaccttctcagatcttacaatgatatttcaatcgtgttttatgatgactgcaactctgctattatttgttatagcacaatgtgttgtgggagttaattcactttcacaagctgataagataagcactttgccagggcagccaccagtcaaattccagcaatatgctggttacattacagtggacgacaagcagaagagagccttgttttactactttgttgaagctgaagtggaaccagcttcaaagccactagttctatggttaaatggagggcctggttgttcttctgttggagctggagcttttgttgagcatggccctttcaaaccaagtgaaaatggtcttttgaagaatgaacatagttggaacaaagaggcaaatatggttgacttggaatcacagctggtgtt

SEQ ID NO: 302373 - DNA, 466 bp, Zea mays
cgaggcacagaaccaacgaattagttattagtaagtacatttggaagatcactttgttttggtgaactatataataatgtcaatgccagtacatgtaacattcactcagtgctcaaaaagaaaaaaaaaaaataatgtagggaaagatagaaggaatgcttataacaattgaaaagtgatccattaggaataatcagtttatgtgaggggtttgaatgggtgtatttttactgtgctaggaacaacccctctgttatctatttccatttttaaaggaatggttctggaagtggctttccttccaaaaatgcttttagcagcaccagtgacctctctggttgggaaaatggagcttcatgagcagctcctcttatggtggcaaatgataagatgtctgcatatacttgtgtccaaccggccacctgtcttccctcaaaccatgctctataggacactgttgtgttga

SEQ ID NO: 302374 - DNA, 330 bp, Zea mays
ggttggagcatccatttgtggatgtgaaggaataggaggttgttttcgggtgaaatgagggatgctatcaaggttgatggactttctgactgcctgctggcggcgaagatccttctccgacggcaagggtggttccgaggttacggggcggaaggaagggctgctgtggtacaaggatgcggggcagcacttgtttggtgaatactcaatggctgttgtccaggccaacaacctgctcgaggaccagagccagattgagtctggtcctctcagcctgcttgacactggcccttatgggacctttgttggtgtatatgatggacacggtgg

SEQ ID NO: 302375 - DNA, 425 bp, Zea mays
cggctcgaggtgcagcctggtaatacgctgttatgcacgagggttaaggcccaattaaatgaggtaaacactctcttcccttcacttctacattatgtctttcgtatctaagtttgttcttaaatgtgaatttggtgaagagggcaacttagagggaaaattgtggatttataatcattgattggaaaattaacaattgagactttgatacatttggactctgtttggataaacttcttcatacgtacttatagagaagaaaatgaacttagcttatcctgtaagctaaaatcaactctgcaatctaatttctccaaaacctgagatgcataagttgattttagtttaatccattttacctttttaatttcttcctcaagtgtttttgaagaagttcatccaaacatcactagaatgtgtaaact

SEQ ID NO: 302376 - DNA, 256 bp, Zea mays
gttcattatgggtgtgctccttttttagctgatccaattgggcactgagaccttccaggtgctgctgtttcctcatcctcgatctacgtgccgattccctattggatagcattctcttcctcgtcctctgttccatgatgtctctgtctccctcagaaccagagttttgaagagaacttgaaccagatgaataggtcccacttccaccaggagaagccatgtactagtatgctattgaatttgtgcaatgataata

SEQ ID NO: 302377 - DNA, 349 bp, Zea mays
tctggatccttgaatgatgcaataaccaaatggacaaacctcaggtacttgtctcttgctcagaacaagttcagtggaaatctgcctagttggttgttcacatttaacgcaatagaaatgatggatttctcgcataacaagtttactggcttcatacctgatattaattttaagggtagcttaatatttaacaccaggaatgtcactgttaaagagccattggttgcagcaagaaaggttcaactgagagtttcggcggttgtttctgatagcaatcagctcagtttcacttatgatctttcctcaatggttggaattgatctagccagcaattcgcttcatggggaaa

SEQ ID NO: 302378 - DNA, 183 bp, Zea mays
gtgagataccccccaggttgtagcaattcccccacaatcctgtatggttcttgcttcaggaaggaaggcgagtgcatgttattgaaagggacttgactgaaccagacaggattgtgggggaattgctacaacctggggggtatcttaagttaattgaattgggtctccaagattgtgtgggtg

SEQ ID NO: 302379 - DNA, 301 bp, Zea mays
gtcattcagtgaaagctcatagaccaaatactctgtctgcactccagtgcttttacaatcatggaaaatcatggtgcagtgtctgaaaccaagtgtacgtttgatgttttccttagttttaggggtgaagatacccgtcacacatttacttgtaaactctatgatgctttgtggctgaagggaattgacacctttatggataataaagagctgaagaatggagacaaaattggccctactcttcataaagccattgaagaagcaaggatttcagttgttgtcttgtctgaaaattatgcag

SEQ ID NO: 302380 - DNA, 272 bp, Zea mays
ctcgagccgaatcggctcgaggctagccaatcctaattcctattcctatccttattactacataactctaaagtaagtaagaaaaatagagcaatttcacaacacaacacaactcttataattgtgtgagttattaattgagtatgggaaggtccccttgctgtgagaaagctcacacatacaaaggtgcatggactatagaagaagatgacagactcatatcttatattcgagctcacggcgaaggctgctggcgttcactccccaaagcc

SEQ ID NO: 302381 - DNA, 240 bp, Zea mays
aaacagagaatgcccctaatctatgtgaaattatatacatatcaaatctttaggggactggcgtatatccatactgtaccaggaatctgccatagggatttgaagcctcaaaatcttttggttgatcgactcacacaccaagtcaagctctgtgattttgggagtgcaaaagttctggtggagggtgaatcaaacatttcatacatatgttcacggtactatcgtgccccagagctaata

SEQ ID NO: 302382 - DNA, 402 bp, Zea mays
agaatgaaatattagacattagacataatctacatttccgggttacactgagttttccagcacatgtatacatcttcacaagggggagaaaaactgcatatttgggcctaacccctgttctattgaccacaagcaagctctcatgtatttcacactaatccactagaacagttcactctatgttttactatctctttacatttgggtttgccgcctgacatgctctgggatgagcttaggaagcagttcagggggcgctccatctaattcctgtttaaagttgaaaagtggaggcagtggacgaccattaggtagccgggcattgggctcgcgaacgtcgtcaaagaaaggatgtgccattgcttccactgcactgtaacgaagttttggggaatattggag

SEQ ID NO: 302383 - DNA, 341 bp, Zea mays
gctctggcacggttactgtgtacaagcaatcttcttcataccctataacagctccttcacctctatctggccttccagaattctctcacttgggttggggtcactggtttacccttgagggatcttgaacttgctacgaaccgtttttccaaagaaaatgtcctcggtgaaggcggctatggagtggtttataggggacagttgatcaatggaactccagtggcagttaaaaagatacttaataacacaggtcaagcagagaaagaatttatagtagaagttgaagctattggccatgttcgacacaaaaacttggttcgacttttggggtactgcattga

SEQ ID NO: 302384 - DNA, 466 bp, Zea mays
caaattgcaggtcctctcttctttcttcctcctttggttttttgtatgtatattacaggaaatcttgaatcagtatttccagaagaacatcgcaaagaaattcttcgttacacatattatcaccagaatgaagacggaggatggggactacacatagagggtcatagcactatgttttgtactgcactgaactatatatgcatgcgaatgcttggagaaggacctaatggaggtcatgacaatgcttgtgctagagcaagaaagtggattcgagatcatggtggtgtacacatataccttcatggggaaaaacttggctttcgatactcggtgtatttgattggtgcggaacaacccaatgccccagagttttggatcttccatcttttctcctatgcaccagctaagatgtggtgttactgcgattggtaacatgcctatgtctacttatatgggagaggtttgt

SEQ ID NO: 302385 - DNA, 428 bp, Zea mays
cttcacagccctctaatgttacgtgcgtagtattttactagacttatctttgtatcgtaacacgaacattaagaacatctatacaagccgacatgaaataatttttctaccaatatatgtaggaaataaacataggaatatgaaaaaattgattaagcttgattacacacaacttatttgctttatttgcctcaatcttaatgaaaatgcctttgccttttcgtgctcaaaccattctaaattaaacttcagtggaaggcaatggaacccgccttcgatattcagctagagcccacattggataaatatctctgtacattggataatgcaacatgcaatttttcatgaatactcccgtgatttcctgttggggccaatcaccctcttccaactgagaattaatgagcaactttgcagcaaggtgaaga

SEQ ID NO: 302386 - DNA, 366 bp, Zea mays
ctggccttttgttctcgtgtcaatttctaaatccaccaccacaccctctcttctattctctattattattatctccacacccttcactctctctcactcttctctcgaatcttccaccgcaatggccaccgctgccgagaaactctccgctctcaaatccgccgtcgccggattgaacgaaatcagtgagaatgagaagaacggattcatcagcctcgtcggccgctatctcagtggcgaacgcagcatgtggaatggagcaagatccagacgcctacggacgaagtggttgtgccttacgacactttggcgccaactcctgaaggttcttcggaggtgaagaatctattggacaagcttgtggtg

SEQ ID NO: 302387 - DNA, 390 bp, Zea mays
tgggcgcctccaccacctgatccacctctgtttcttcttcctttcatccgttcatacgggggttagatgatggagtcctgtgattgtatagatacgcagtatccgccggatgaacttcttgtgaagtatcagtatatctcggatgtgctaattgctcttgcgtatttttcgattccggtggagctcatctattttgttcagaagtctgctttctttccgtatagatgggtgcttatgcagtttggtgcctttattgttctctgtggagcaactcatttcataaacctgtggacattctctccgcactctaagtctgttgctgttgtcatgacgattgccaaagtttcgtgtgctattgggtcatgtgcgacggcactgatgcttgtacac

SEQ ID NO: 302388 - DNA, 419 bp, Zea mays
ggcagaagtgatgagactgtttctatgatagaatcctacttacgagccaataagatgtttgtggattacagcgagccccaagtggagagagtgtactcatcgtatttggaactcaatcttgaggatgtagaaccctgtgtctcaggtccaaaaaggcctcatgaccgtgtccctttgagagaaatgaaggtagactggcatgcctgcctcaacaataaagttggattcaagggttttgctgtaccaaaagaatctcagaataaggttgcagagttcacattccaagggacaccagcacatcttaggcacggtgatgttgttatagctgctatcaccagttgtacaaatacttcaaatcctagcgtaatgcttggagctgcattggttgcaaagagagcatgtgaattgggattgcaggt

SEQ ID NO: 302389 - DNA, 422 bp, Zea mays
atgtatatgttatacacatccaaagggatctttcggagacgacgcgcgcgcgcggttaccgcatatattgataaatacggtaacgtcgtcgacaataggtcgatgatctaccttcgtagctatagtctgatacaaacagagaggatggtgatggctcatatatcgcaaaccaatcctcattattgcagcctttgtattgggtcccatatccaagccatgcacaaggactgctgcaataaccacgatccggttcatagatgcacacaactctactccttcaatatcttctgcgacagaaactaggaagatgggcgtggctaaaagcttagcccatcgatttgccacttacttatctttcctatacccaattgttgcttcactgaactcttcgacagcaatctcgtttgcaatgttagcaccca

SEQ ID NO: 302390 - DNA, 280 bp, Zea mays
acggcctgtgcatcagtccatgttgcctttaggctggggcaaataacttcgggaattggtggttttggtagagcttgtgcaaatagagttgcagaaatccgaacaccaggagagaaacaaaagcctctagagaaggatgctggtcagagaacaattgcgtggttggacaaattgagaaattcaaatggctcattgccaacttcacaaattcggttgaatatgcaacgagtaatgcaaaacaatgctgctgtgtttcgtacacaagaaacattacaagaag

SEQ ID NO: 302391 - DNA, 518 bp, Zea mays
ctttcagatcaattctaggaaactcctacaatattattacatcataccaaggcgtgttctagctacaaaaggatacgacaagtgcgatgaaaagggaaaagttgcttttgtttcagcatatgggattcaccagctccatatattcatctttgtgctggccatttttcatattctacaatgcattgtaacactggctttgggaagaactaagatgagaaagtggagagcatgggaaaatgaaaccaagactattgaatatcaattttataacgatcctgagaggttcaggtttgcaagggacacaacatttggaagaaggcacttgaactcttggagccagtcaacaatttcgttatccatagttagcttcttccgacaattctttggatctgtcaacaaagttgactatttaacattacgacatggattcatcacggcgcatctggcaccgggaagtcatgcaagatttgatttccaaaagtacatcgaaagatcacttgaggaggattttaaagttg

SEQ ID NO: 302392 - DNA, 502 bp, Zea mays
ccaccattatatgcttgatggctgctacccctcttcatcgacgtgccaaggtgttacgtatggttgttagtacctatcaggctgctagtggtgcgggtgctgctgcaatggaagagcttcagctgcaaactcgtgaggtgttggaaggaaaaccgcccacttgtaaaatatttaaccgacagtatgcttttaatctattctcgcataatgcgtctgttctttcaaatggatataatgaagaagaaatgaaaatggtcaaggagaccaggaaaatctggaataataaggacgttaaagtaactgccacatgcatacgagttcctgtcatgcgagctcatgctgagagtgtgaatcttcaatttgaaacaccccttgatgaggacactgcaagagatattctgaagaatgctccaggtgtagtggttattgatgatcgtgaatccaatcattttcctactccattggaagtttcaaacaaggatgatgttgctgttggtaggat

SEQ ID NO: 302393 - DNA, 535 bp, Zea mays
gatgggaaatcttcggatcattctgctgcgattaaggatctggtgggagggtactatgttgcttgggatgctatcaagtttaactttcctgcttcgttttccattactatgttgagttggagtgtgattgagtacagtgcaaagtatgaggctgctggggagcttgatcatgtgaaggagattatcaagtggggtactgattattttctcaagagttttaatagcactgctgataccatcaccacccttgctgctcaggttgggcttggagatacttctggtggtgacagtccgaatgatcactattgctggatgcgtccggaggacatggactatgaccgccctgtgactgaatgccacagttgttccgatctcgcggctgagatggctgctgccttggcttctgcttccattgttttcaaggacaacaaggcctattccaagaaactggtgcatggtgcgaccacgctgttcaagttttccagggatcagagaggcaggtacagtgctgggagttcagaggcttcaatatttt

SEQ ID NO: 302394 - DNA, 521 bp, Zea mays
gggagcttagagaaccatctatttagaagaggaccacaaccgctgtcttggtcggtgaggatgaaagtggtttttgttgctgccagaggactctcctttcttcataacgccaaatcacaagtcatataccgtgattttaaagcttctaacatcctgctggatgctgagtttaattcgaaactttctgactttggtttagctaaggcgggtcctactggcgatagaactcatgtgtccactcaagtaatgggtactcaaggatatgcagcacctgaatatgttgcaactggtcgtttgacggccaaaagtgatgtctacagctttggagttgtgttgcttgaacttctatccggaagacgcgctgttgataaaaccataaccggcatggagcaaaatctggtggactgggcaaaaccatatttgagcgataaacgaagactgttccggattatggataccaagttggagggccagtacccacaaaagggggccttcacggctgccacacttgctctacaatg

SEQ ID NO: 302395 - DNA, 352 bp, Zea mays
cgcggtccaaacacaacctgataaatttaaggaatttacatgcatgcagatgctctatgttcatatgcttagtgaacacgaggcgattgccggtgagctgggagaggggacgcagtaggagttagatttaacggtgaccggtttcgtgcaggagactttctcacaggagtctgaactctatggtgttctgaatgggagtttctgcctgcagttttgggggcctctatctgttccagagttgctaaaacctctgtcattggaggccttgccttggcctcactgttaaggcattgtagagcaagtgtggcagccgtgaaggcccccttttgtgggtactggcccttcaacttgg

SEQ ID NO: 302396 - DNA, 405 bp, Zea mays
ttggctcaaatccttcttttcataaggatctcttgttcattgtaaaatcctggccatctgtaatttattctgcattacctgtaatttcagccattgaacctcagctaaatacttcatccatgactgaatcacttaaggaggcattagcagagttgtatgtaatcgatgagcaatatgagaaagccttcttgttgtatgctgcacttatggagccagaagtatttgattttattgataaacataacctacacgatgcaattcgtggaaaggttgtccaactaatgaggctagactgcaagcgtgcagttcctttgttaatccagaataaggacttaataagtccacctgaagttgtgaagcaacttctaaatgcggatgataagagtgattgtagatattttttac

SEQ ID NO: 302397 - DNA, 390 bp, Zea mays
cacacacgccatccaatttctgtctttgatatttttaattagagagagaaaaagaaaaagaaaaaacaaagagagaaagagagaagagagagggtgtgtttctgggttttggaaatttcagccaatatcgaaaaacaagaagccccatcaataataatcatcgaaggaatttgaaaggtcgaaacttgagcatctgggatcgcgaaattggggtttttggttaaaagggtattatcttcggaactgattgatggcaaacctgtacgtgaaggcggtgccaccggcggatctgaacaggaacacggagtggttcacgtaccctggcgtttggaccacatacatcctcatccttttcttttcttggatcctcgtactctccgtcttcggttg

SEQ ID NO: 302398 - DNA, 455 bp, Zea mays
gatggcacaagttgttaagccacatgaacctaagacacagtcatttaaacttttgagtggtcataccataccggctgttggattgggcacatggaagtctggttcacaagctgccaattctgtgatcaccgccattgttgaggctggttacagacacatagacactgcttcgcagtatggagttcaagaggaagttggacatgcactccaatctgccatgcaagcaggagtggaaaggaatgatctatttgtcacctccaaactttggtgcacagacttgacccctgaaagagttagacctgctatcaacaatactcttcaagaactccaacttgactaccttgatctttacttgattcattggccatttagattgaaagatggtgccagcagacccccgcaaagaaggagaagtgttggagcttgacatggaaggggtgtggagagaaatggag

SEQ ID NO: 302399 - DNA, 378 bp, Zea mays
attctgcccttcccgtcgcgtttcaacacggataacccgcaaaaatctccattgatctgcgcctcctgttccatggcaaagctgcctgtggaatacaacggcgactgcgccaccaccgcctcagcatccgcctccgcagccgcggagtctcagagatccattcccacgccgtttctcaccaaaacctttcaactcgtcgacgaccaatccatcgacgatgttatttcctggaacgacgacggatcaacgtttatcgtctggaaccctaccgtcttcgccagagacttgcttcctaaatatttcaaacacaacaattgctctagcttcgttcgccagctcaacacttacggattcagaaaagttgtacctgatcggtgg

SEQ ID NO: 302400 - DNA, 381 bp, Zea mays
ccaaaatgttcctgcttccgctgggggtgagaccagggttgaagagaagaaaccaacacgtgaggatgtcacagatgagaggaaatcagaatcaacttctgctataattaatgcatcagaacttccacctcatgtccttcttgaaatgccagctttgtcaccgacaatgaaccaaggaaacattgctaaatggaggaaacaagaaggagacaagattgaagtgggcgatatattatgtgagatcgagacagacaaagctacacttgaatttgaaactcttgaagaggggtacctggctaagatacttgctccagaaggttcaaaagaagtggcagttggacatcctattgcaataagagttgaagatgcaagtgatattga

SEQ ID NO: 302401 - DNA, 458 bp, Zea mays
agggaatcaatgttttttgttattcctgcttttggtggcattgtttcctgggagggagaaggggcaccttttggggaatctgaccagagcatttctcatcagattgttgacagggaagcacaaggacatcggttcctctcaagagaatatgttcaaccacagtgggtatatgactgtgtgaatgcacggattattttgccaactgagaattatttggtgggaaggactcctccaccacacttgtcaccttttattaactacgatgaagaaggagcatacattcctgattatgcaaagaccattaaacacttgcaagctgctgccagaaaggaaatccttccacttcctggtgttgggaaggaagatctggaagatcctcaaaatcttctggttgaaggtatcattgatcgagcagaggctaatgatgcagctcagagaaagcagaagatgatgatttt

SEQ ID NO: 302402 - DNA, 308 bp, Zea mays
ccgctcgagccgcgagtagtggtggctctgtggagttgggtgctgtggcggctattcgcatgccgttacttcatgtgtcaaatttcaaaggagggacgccggagttggttgagacgtgttatgctatacttgttttggttctgccaagttcaagcactagggtttggacctaccatgagatggagatagttgaagtggttgctgatcaggtggctgttgccctgtctcatgcatctgttcttgaagagtctcagctgatgagacagaagctggaagagcggaaccgagcactgcaacaggctaaaaag

SEQ ID NO: 302403 - DNA, 314 bp, Zea mays
gactttttgtgaatttagtgttcattccagatgattttgatggagaactgttcccccgatacttaagctttgtcaaaggtgttgctgactcaaatgactctttcacttaacgcggcacgtgaaattcttcaagagagccgtatagttcggatcatgaggaaacgtctagttcggaaagcttttgacatgattctgggaatatccatgagtgagaacaaagaggactactagaagttctgggagaacttcggcaaacacttgaaattggggtgcattgaataccgtgagaatcacaaacgtattgctcccttgct

SEQ ID NO: 302404 - DNA, 325 bp, Zea mays
tagattgccttggatgttgccagagggatggagtatctccatactctggctcaccaaagcttcattcacagagatcttaagccgtcaaatatcttgcttgctgatgatttcaaagcaaaagtctccgatttagggttagtaaaacttactcctgaaggggaaaaagcatctttagtgacccggcttgcagggacgtttggatatttggcgccagaatatgcagtgacaggaaaaatcactaccaaagcagatgttttcagttttagggttgtgctaatggagttgttaactggattaatggcacttgatgaggatagacctgagg

SEQ ID NO: 302405 - DNA, 410 bp, Zea mays
ggcgcaatatctacaaccattaacacttaaatgtcctggtggaaaatacaaagcatgcaactgagatttcaagtgcatgtgaaatccctttactcaaacactattataacactggcactagacactttgccaattaagacagacagaaagaaaagagcatgctatctatctacatctattggaaaatcaaaaggaaaaggggtacaccaaacaatttgtttcaccggccatcagcagaagtaaaagaatctgcaaatccagtaggccttgcagggatactactcttactgtcttcaaggtccatataacttaagtcctttccttctgcctcttgccatcccttcaccatctggttaaggggaaggctataatcaatgccggaatactcctcggtgtcatcatcaaagggt

SEQ ID NO: 302406 - DNA, 278 bp, Zea mays
ctctctctctaacccaagacagtctctttctcttcgaagcaagacggtagctttccgacccggaaaacgccctctcctcctgggactcctctgccgccaacccatgccggtggcgcggcgtcacctgtgaccctctcaccgccaccattactgccgtgagcctcccctccgcctccctctccggcccctttcccgccatcctctgccgcatcgtctccctaaccaccctcaatctcaccaccaacctcatcagctccaccctctccgccgtcgttgct

SEQ ID NO: 302407 - DNA, 528 bp, Zea mays
tacaaagaaagaaattcgttttatatacattcgaaccaatgttggtcatatttctttttatcgagaaatcgaagaagctatacaaggtttttgccgggcctattcatatgatatctaatcatatgatatctaatcatatagatcatatagatggttggtatctaagataagaaaatttatgataccgatgtaaattcaggtcttcatggtttaacgaaaatcatagtttttcaatttctacgcaaatcaagataaagaaaaggcagttttccaatcattgactcaaacccattgttgaaccgaatcccactgagtggaatatggaggtacttatggcagaacgggccaatctagtctttcacaataaagtgataggtggaactgccattaaacgacttattagcagattaatagatcactttggaatggcatatacatcacatatcctggatcaagtaaagactctgggattccgtcaagctacggatacatccatttcattaggaattgatgaccttttaacaatac

SEQ ID NO: 302408 - DNA, 344 bp, Zea mays
tttcaggaagaaagaagtgcaatggacatcggaacctatggctatcctacaccagcagtgaaaaagattgagtcttactatgatgtgccagagggagtggatattcggggaagatatgatgcagagtttgcaaaaatcctcacaaaagatgctttgaaattcgttgctgacttgcaacgtgagttcaggaaccatatcaagtatgcattagagtgcagaagagaagcaaagaagaagtacaatgaaggggctcttccagagtttgatcctgccacaaggtacatcagagagcaagagtgggtgtgtgcactgttccaccagcagttgctgatagataagttgaa

SEQ ID NO: 302409 - DNA, 447 bp, Zea mays
gtcggatgagaagggtgatggactggtgtttggaagcactgaggctgccaataagttcctggaggatttggaattacatcaatcgcgtgatgctgagaggattgttactgactcggacgaagaagaggagtctgacgatgaaggagaaggcaaggagctgtttgatactgctacattggcagctcttttgaaagcggcatcgggtgcggaccaagatggcggcagcatcacaataacctctcaagatgggtccaggcttttctctgttgagcgccctgctggcttgggatcaccgctccagtcaggtaaacctgccgtgaggaaactcgtccgagtctttttactccttccatgagtagacctagtgccatttctgatagcaatttgaccaagaggagaaaaataaactggagaaattgcatgagattaggggcaaatacttgagac

SEQ ID NO: 302410 - DNA, 364 bp, Zea mays
aaaaaaaaactcattatttaagacagtcatgaaaagaagcaacacgatatgataaactcgtagtctacttttccttgctagcaacgcaaacaaaagacacaatctagtagatagaataattctcactagccccaggccagaagtttttgtagatagccttggcaatcggaaggatagcaacaagggcaatctgaagctggtctgagctacttgttctcacagtgatctgtccactgagcttgttgttcaatccagcacgaacagccaccttataacctcgtccaacagaaatttgggactgaagattggcccctaaagcaaggtctccctccacttcacaagagaaaggctcagtgaagactgg

SEQ ID NO: 302411 - DNA, 282 bp, Zea mays
tagagttaagaattggatgacgtttaacgaacctcgtgtggtggctgctcttggctatgataatggtttctttgcccctggaagatgctcaaaagaatatgggaattgtactgctggcaactcaggcactgagccttacattgttgcccacaatttgatattgtcgcatgcagcagctgttcaaagataccgagcgaagtaccaagaaaagcaaaagggaaggattgggatcctcttggattttgtttggtatgagcctcttacaagatcaaaggctgacaa

SEQ ID NO: 302412 - DNA, 405 bp, Zea mays
gccatgaaagatcattttattctaagacttgcattaagcaagtcacataattacagttacagaagcacgttaaactcaaccaaaaccattaaaacatgattctctgaagcaactagaagcttagaaaatagatgttcagcccagctattaatacttctttttggtaatgagttgcttgaaccagtatgccgacatcttggggtatctcttgagggttttaaaatcaacatagacaatgccaaaccttgatgtgtaacccaacctccattcaaagttatccagcaatgaccatgcaaagtacccaaccacatttgctccatcatcaactgctttgtttagttgagtcaaatagcctttgtaatagtttatccttgtggtgtcatgcaaagccttgggaagagtcac

SEQ ID NO: 302413 - DNA, 328 bp, Zea mays
atttgaaagaaattttcagtaactttggtgaggttataagtgtggagttggcaatggatcgaactgtcaatcttccaaaagggtatggatatgtgcagttcaagacaagaggggaggctgaaaaagcattattgtacatggatggtgcccaaatagatggcaatgtcatcaaggcaagatttactctacctccaaggcagaaagtttcaccacccccaaagacttctgctgttgctccaaagagagagatccccaggactgataatgctagcgcagatgttgacaaggatggaccaaaacggcaaagagaatcttctcctcgtagaaa

SEQ ID NO: 302414 - DNA, 402 bp, Zea mays
gaatgaatgtgaaagatgatttggtggtgttgcttgatcatattcagtatgcttgcaagaaaattgcagcacttgtggcttctcctttcaattacagccttggcaaacaaactgctcttggttctgttggttctgatagggatgctccaaagcctcttgatattgtctcgaatgaaattatcttgtcatcactccgaaaatccggaagagttgctgtcatggcttcagaagaaaatgacgcaccgacttggataagtgacgatggtccatatgtggttgtaacagatcccctagatggttctcgaaatattgatgcatccattccaacaggcacgattgttggtatttataagcgccttgaggaactagatgatctacccacagaggacaaagctatgctga

SEQ ID NO: 302415 - DNA, 403 bp, Zea mays
tttggacagcgtgacggcggggaacgcggtgaaccggaaaaaggcgatgaacgcggcgatggctgcgctgaagagcgcgggggtggagggggtgatgatggacgtgtggtggggtttggtggagagagagaagcctggggagtataattggggagggtacgtggaactcatggaaatggcgaagaagcatggcctcaaggtgcaggctgttatgtcatttcaccaatgtggcggtaacgtcggagactcttgcactattcctttgcccaaatgggttgtggaggagattgataatgaccacgatcttgcatatactgatcaatggggaagaagaaactatgaatatatatcacttggatgtgatactttgccggtgctcaagggacgatcccagttcaatgtt

SEQ ID NO: 302416 - DNA, 223 bp, Zea mays
cggctcgagcggctcgagcggctcgagcggctcgagcggctcgagcggctcgagagatgatcagaggcttcttgtttacgagtttatgacccgtggaagtctagaaaatcatctattcagaagaactgtacctcttccgtggtccaacaggattaagattgcccttggtgcagcaaaaggattggccttcctccataatggtcccgaaccagtcatttataga

SEQ ID NO: 302417 - DNA, 399 bp, Zea mays
atatgaacgtgtatattgctaatgtagcgtagctagagggcactgtacgtacctttgtacatccgttttgtacttttatttattcctacaatacatatctggcttcaccacactgatggagtatatatcatcagcatcaagggttcatagccagcattttattccatccacgtacatcttatagccagtagtttcgtgaagaaagatttacacacgaatctcttcattcaccgatggattaaagtggccggttgaggatccaacggctgaacatggcgaaacacctctccggctcgtactcaagtgctgtatgcccggcgcccttgatcgtcgcgaatgtcatgttgtttgagtaagttattgtaaatccagctgactggccaccgagatgccacgccc

SEQ ID NO: 302418 - DNA, 110 bp, Zea mays
gaaaatctctgggccaaggtttctgattttggcctctaaaaggtggggcctgaattcgaccatacgcatgtgaccacagcagtgaaggggagcttcggttaccttgatcc

SEQ ID NO: 302419 - DNA, 126 bp, Zea mays
cctgactccaaaacactaactgataagtgtgtattttgcatgttttgagcatccatttgtcagcactttagcatcatatcatcactgttttataccatttcacatcatttgtcatgactttgcatg

SEQ ID NO: 302420 - DNA, 333 bp, Zea mays
ccgacgagctcgtgtaaagttgtggaattcgttaaggagctgttgctttgttagtgtagaaacacttgtgtagaattggggattgttttttttggagtgatttaggggagggtcgaatcttagcgacaaagggctgaatctcagtggatcgttgcagcaatgccactctgccacttacaataccccgtcgcgtatttaagtcgtctgcaaaggattctacccgccgctcggtggtaattataattcaaggcggtccgaacgacgcttccgccgaacggacttagccaacgacacgtgcctttgggagccgaagctcctactgagggtcggcaa

SEQ ID NO: 302421 - DNA, 378 bp, Zea mays
ggcctataccacgaccccgccgactttttctttcttcagcacctataacatcctggagtggcggtaagtcagcgacttcctcatcgcccctatctacttctccatcccactcgagctgctctacttcgccacctgctccgacctcttccccctcaaatggatcgcgctgcacatcggctccttcatcgtgctctgcagcctcacgcacctcatcactgtgttcacctactaaccgcactccttccacctggtactcccccttaccgtcaccaagttcctgacggcactggtctccttcgcaacagccatcaccctgctgacgctaataccacagctcctgagggtgaaggtcagggaaaacttcctgatgaacaacgc

SEQ ID NO: 302422 - DNA, 340 bp, Zea mays
atcttttacacgacttcttttttttataatactctttgaatgaacagcatgggtgtggggtgtgtttcaaagatcaaccctcaggctccccttgataaagtttgcgtccttagctgtggtatttctaccggtcttggtgcattaattaatgttgcaaaacctccgaagggttcgacagtggctgttttcggtttaggagccgttggtcttgccgctgcagaaggtgcaaggattgctggagcgtcaaggatcattggtgtctacctgaaccccatcagattcgaagaagctaggaagttccgttgcactgaatttgtgaacccaaaagaccacaacaagc

SEQ ID NO: 302423 - DNA, 427 bp, Zea mays
aaaagatgaatatataaaaatgggggaggggtacattatgaagatagggtgaacagaacctgggttaagtgaatttttgacaacggaaaccaaaataataaaataaaaaaaaaaaagaaaaaagctatggaaaacttgcgtgtccccaaagctatggtttgtagtctgatgcatagctgctgagataaggatcatcaaatcgaatatcttcctccatactgccttcttctttgactatatggattccaatttgctttaatgactgagctctttaactctaacacaccttcttctctctcttcttcttcatcgtataacacaccttcttcactctcttcttcttcatcgtctaacacaccttcttcactcttttcttcttcatcgtctaacacactttgatatgtaaccttcacatggttccattcct

SEQ ID NO: 302424 - DNA, 382 bp, Zea mays
tgattatgaggaggatttaaaacttatgaagaatctttcaaagcaggagttggggcacatggttcgccgtcacagtaccggtttctcaaggggcagttcgaaataccggggagtgacacttcacaaatgtggccgttgggaagctcgaatgggacaattccttggcaagaagtatatatatcttgggctattcgacagcgaagtagaagctgcaagggcttatgacaaggcagctatcaagtgcaatagaagagaggctgtcactaactttgagccaagtatatatgagagcgagatgaaacctgaagctattaatgaaggtggcagtcacgaccttgacctcaatctgggcatagcaaccccaggacatggtcccaaagaa

SEQ ID NO: 302425 - DNA, 399 bp, Zea mays
ctcgagccgagtttggtgattttgttaatggtgctcatgtcatatttgacagtggtcttggcttctggtgaggctaagtggctccgtcagactggtcttgttgtgttacttcctcatggttatgatggccagggcccagagcattcaagtgcaagattggaacgctttcttcagatggctgatgacaaccctcatgttatccctgagatggatccaactcttcggaagcagattcaggagtgtaatttgcagattgtgaatgttacaactcctgctaattttttccatgttctaaggaggcaggtacatagagaattccgcaagcctctcattgtaatgtcccctaagaacctgcttcgtagcaaggcttgcagatcaaatttatctgagtttgatgat

SEQ ID NO: 302426 - DNA, 500 bp, Zea mays
gtactcaaattttcattcaaccaatagggtagggtcagaatttgaaagaaatcatttggcaaaaccccaaatcatatgatattaccgttaatgcagaatgaggggtaaataaaacaaagaaaaccaagaaacaaaatccatctgaagttgatagcaagcaagtccaacgcgaaaggaaaaggatgaagacatatatataaagaaaaccaaaagctactagcattaaatttctatgcctctttgatcaggttgagggcatcagcctctgtgggaagagcaggaattgctccctttttagtagttgtaattgctccacacgcatttgcaaacttgagtacttcccttaaccttgcttcatcttcaagtacggattgatcatcgacaatcttgcttaatagagcaccaacaaaggaatcaccagcgccagttgtgtcgaccgtgctgacatgaaaagcctccactgatccatggaaattcttggtatagtatctagagccatg

SEQ ID NO: 302427 - DNA, 291 bp, Zea mays
gtgctcgatgctcttaagatcccgttcgtcacaacctcaagctggcatccgaatgagacgacgaaggcgccgggcacaggctgcacccggatccagtcgcccctgtaggcgacctcgaggccaggtaccatgctggggaggagcaaggtgaggaggttgcggacacggcgcagcgtgcggccgagcgtgacggatccgtcgaacgagggggcgacgagcgcgtcggcctggatcccggcgagcgtgatgaactgccagacgtagccgaggcgcgcgacgctcgggatgaag

SEQ ID NO: 302428 - DNA, 395 bp, Zea mays
aaataatcttgcattagcatttggaggggtttgttcactgaccccgtctgaacaacttgattctgaacatgtaatattaacatctattcatctataatggaacaaagttaacttaaaatacaaacggaagtaattagattttatctattcagctagctaagcctgatcacaaaattgcagggaaaaaatttagtattttatcagtcaatgaactgaatctgacaccgaactaagagagacctgtacagtacgcagctgaatttgaaccttctgaactgaaacagattccagatgaattgaatgctgataacggcaaccaagagcaaaaggacaaatgaaatgaaaaatatgtatttgactgcaaacttccatcaagctcaaatcattcggtgacc

SEQ ID NO: 302429 - DNA, 433 bp, Zea mays
ggaggttgcaaaaaatttggattatttggtattggttatgggtttggatcaggggcaagagggggagtcacatgatagagagtacttagggttgccagggaagcaagaagagcttattaagagtgtagctagggctgctaagagacctgttgttgtggtgcttttgtgtggaggcccggttgatattacttcggctaagtttgatgataaggttggaggaatcttgtgggctgggtacccgggggaacttggaggagtggccctggcccaggttgtatttggtgatcataacccaggtggaaaactaccaattacttggtacccaaaagatttcatcaaagtaccaatgacagatatgagaatgagagcagatccagcatcaggctaccctgggagaacctacagattctacactggtccaaaggtctatgaa

SEQ ID NO: 302430 - DNA, 427 bp, Zea mays
gcaagctgtttgttatttagagattaaagagagaaaaagaaaaatcaaaggacggtggtgggggctgcttctgcttcatcatcatcagagaagaatggcggctactgtgtcttctgcgtggtcaaagcccggcgcgtgggctctcgattccgaggaacacgaagccgaactccttcaacagaacaacgacaagccactcgccgacttcccctccctcgccgccgccgctgccaagcccaagaagaagaaggcccagacctactccctcgccgaattcaccgccaaacccgacacctcctttgccgaccaagatcccgtcgtcctccccaccggcccccgccagcgcaccgccgaggagctcgaccgcacccgcctcggtggcggcttccgcaactacggcgaccgccccaacaggaacaactccggc

SEQ ID NO: 302431 - DNA, 378 bp, Zea mays
ctcgaagccaacctcgccgaagctttcaaagccagcttcggcgacgccaacgaccaagccggcttcaagttcttggcacgctccctcttcaactccaaccccgccgacaccaaacttggccgcgacggccctaaaatcgttcagaaatgggtcctatttcagctcggcccaatcctccgcttgggcctccctcaattcttggaagaatcaacaatccggagcttccgcctaccgttctctctgatccaaaaagattaccagagactctacgatttcttctaccagtcttctggttctgtgctagacgaagcggagcgattggggatcacgcgcgatgaggcttgccataatttgttattcgccacgtgcttcaactcc

SEQ ID NO: 302432 - DNA, 513 bp, Zea mays
attcttgagttcatggtatgggaaattcagatcttgttattggaaattacactgggggaaatggggtagcatcactaatggctagaaaacttgggataactcagggaactatagcacatgctttagagaagaccaagtatgaagactcagatgtcaagtggaaagagttggaccccaagtaccacttctcgtgtcaattcatggcggatacagtggcaatgaatgcatctgatttcatcataaccagcacataccaggaaattgctggaagcaaagatagacctggacaatatgaaagtcatgctgcatttaccctcccagggctgtgtagggttgtttcagggataaacgtgtttgatccgaagttcaacatagtcgcaccaggagctgaccagtctgtgtatttcccttacacagagaaagaaaaaaggctctctcaatttcaccctgccattgaggaccttctctttagtaaagtggataacattgagcatattggatatctagctgata

SEQ ID NO: 302433 - DNA, 458 bp, Zea mays
ctcgagccgctcgcattatcgcggttttacattctatcgcagaaccggaagaggggaatgggacatttgggactgtgggaaacaagtgtacttgggtggatttgacacagcgcatgctgcggcaagggcttatgatcgagctgcgatcaagttccgtggcgttgatgcggatatcaatttcaacgttagcgattacgatgaagatataaagcagatgagtaacttcacgaaggaggagtttgtgcatattttgcggcgacagagcactggtttttcaaggggaagctccaaatacaggggagttactctgcacaagtgcgggcgatgggaggctcgtatggggcagtttcttggtaaaaagtatatatatcttgggctattcgacagtgaattagaggctgcaagagcgtatgataaggctgctataaaatgcaatggaagggaagcagttacaaact

SEQ ID NO: 302434 - DNA, 107 bp, Zea mays
actcccaaacacgctcccgcaacttcttaatctccgctacctcgacctcaccggcaacaacttctccggccccatccctgactcattcggaacattccagaacctgg

SEQ ID NO: 302435 - DNA, 354 bp, Zea mays
tccaaagggtggcttttttgagcttgtgatttgcccccactacttctttgagattactgtgttttatgggatcttcttcatttctcagacattatattcattcgctttcgctgtaggcactactatgtacttggtgggtaggagttactcaactaggaaatggtatctttctaagtttgaagatttccctaagcatgttaaggctgtcatcccatttgtcttctaaatgttgtaatgaacatctaattctacttgagttgtaagtgtgctgctagattgtgtttattggaattgcagctctccaacatccaagtttgagtgatttaataaactattttttaactttggttgatt

SEQ ID NO: 302436 - DNA, 498 bp, Zea mays
gagtcccttgggtatctcaggtttttctcatttgtttggcatcttagccttcatcgtcttgctcgtttggttgttgcattaccgtgaaggaattgactatgattcagacaatggatttcgcgtcttcaatgctcaccctttattgatgtactcgtgcttcattttccttgctggagaagtggctttttggtttcgttgtgttcatgcttcaaggagcttcagctacaacaagagctaaagtgctaccatggcacaaagttggtggtagagcactgttgttcatggcagtgtgtgctgctgaaacaggattgatggagaagtctagtttcttaacaaatttaaaattgttacacgagagagaatccaatttaatcaacttcacgggtcttgcgattctcttgtttggagtttttgtaaacttttctgttggtttctcttagtttgccataaaattactctcattcgtgcacttgattccacatcataaattggattgat

SEQ ID NO: 302437 - DNA, 496 bp, Zea mays
attttcatttgcacaaggaagcgtcgcagaaggggtattatgttaaggatgccagtgggaatgactttgatggctggtgctggccaggttcttcgtcgtatccggatactttgaacccagaaattatgtcctggtgggctgataagtctgcttaccagaattatgagggttcaacgccttcgctttacatatggaatgacatgaatgaaccttccgtcttcaatgggccagaggtgacaatgcctagagatgttatacactatggaggcgtggaacatcgggagttgcacaatgcctatggatattacttccacatggcgacagctaatgggctactgaagcggggtgaggggaatgacaggccatttgttttatcaagagcattatttgctggaagtcaaaggtatggagcagtatggactggggataacactgctgattgggatcacctaagagtttctatcccaatggttctgacccttggtcttactgggat

SEQ ID NO: 302438 - DNA, 386 bp, Zea mays
agtacgaaacgaagaaacttttattcaattgaataatgaactttacagcgtgattgctcatagcgggccttctctcccgctataatttacaagccactgcccaaaaataaatatcatgaaacacaaaagcctatcttagacgaggaagcatagcttgataaactctccagcggtggtaatgagctttgcagtcaccattaggatttggggtacaagaaattttttggggtggtggtggtgtttagatgactgttccactaggaattaaagcatccttgattactgtgacaatcccactttttatgaaatacccatctgtttcccttgcagcttcttggacattgtcactgttaataatcttgacattttccccaattcgagcattc

SEQ ID NO: 302439 - DNA, 461 bp, Zea mays
cctcggcgtgctctcaacccttttaccctcaaaacgtcccagtccaaccactcctacatccaaaatgagcgccggtttcgacccagcaaaactagccaagcttcaagctaacaatgcaaagctcgccggtgcccctcgaaagaaggtcgtccgaaaacctggtgccgctcagggagatgaccgtaaactacaaacggcgctgaagaagctgaacgtccagccgatcaccggcgtggaggaggttaacatgttcaaggaggatggaaacgtactgcacttcaacgcaccgaaggtccacgccgctctcccttccaacaccctcgccatctacggcgccggcgccgacaaagacctaaccgagctcatccccggcatcctgaaccaactcggtcccgacaatctcgcctctctccgaaaactagcagaatcttatcaaaccttgactcaacgtaacaaaggcg

SEQ ID NO: 302440 - DNA, 495 bp, Zea mays
aaattgcactaggagctgctaagggtcttgcttttcttcatgaagaagctgaacgaccagtaatatatagggattttaaaacttcaaacatattactggatgcagagtacaatgccaagctctcagattttggtcttgccaaagatggtccagaaggtgataaaacccatgtgtctactcgagtgatgggaacctatggttatgcagcaccagaatatgtcatgacgggtcatcttacatcaaaaagtgatgtgtacagtttcggagtggtactacttgagatgttgaccggcagaagatccatggacaaacaccgacccaacggtgagcataaccttgtggaatgggctcggccacatctaggagagagaagaaggttctacaggttgatagaccctcgcttggaaggccatttttcggtaaaaggagctcagaaagctgccctactggctgctcactgccttagtagagatccaaaagccagacccctaatga

SEQ ID NO: 302441 - DNA, 470 bp, Zea mays
gaaataataataagtattatcttagtttgggtgctctcatatataattgcatattaataattaatggtgagggagcaccagaactactgagagatgctatgcatagtttaattacttgttttggtactcacgttgtgtgcagatccaagtgctgaagttattgctttatcaccgaccacactaatggctacgaacaggttcatatgtgaaatctgcaacaaaggatttcaaagagaccaaaaccttcagttgcaccggcgaggccacaacttgccatggaagctcaagcagagaaccagcacagaaattcgaaagagggtttacgtgtgtccagaaccttcgtgcgttcaccacaacccagtaagagcactcggtgatctcactggtatcaaaaagcacttctgcagaaagcacggcgagaagaagtggaaatgtgataagtgctcaaagaaatacgctgttcagtctga

SEQ ID NO: 302442 - DNA, 334 bp, Zea mays
gttacaaattcatacaacttcattaattcaactcatccttcaatgtaagtggttcctctgacaatcatatgcaagaacaatctaatcttccttattgtggctaaagtgatatctcaaaaaacaagtcatgtaacagtaacccaaagccacaagtgaaaaccacaagttctagatgagataaaagaaactcaacaaatatatctacgaaagttctttggcagcagcaataacagcttccttggtgataccaaactccttgtatatttttccagctggagcacttgctccaaatcgatcaatgcctatggcctttcctttgcttccaacaatcttg

SEQ ID NO: 302443 - DNA, 242 bp, Zea mays
gcgccttgttccagttggtcttggagatgatgaccaatgcattgaggatgacttcaactcatggtatatattctggcttcttttgagcgcgcgcgctctctctctctctctctgcatttgactgcttcagtgttactagctgagtgcccgtgcgttgcaacggtaatatataataccagtatactacgataacttatatataaaatgtgtgttatattattatgagaaaatgtttcataatc

SEQ ID NO: 302444 - DNA, 234 bp, Zea mays
attgagccaaaccctaggccgtgtgaggctgacggagggcgcggcgagcgggagctccactatcgatagcatgcgtggcgggtactctggccgctgtggcttcgctggcggccggcatagcagcagccgcagcaacgatggcaggggataccacgggaacccttgcttgacgatgcaccaaccgtgggcgtccctgctggtgcacggcatcaagcgtgtcgagggccgctcatg

SEQ ID NO: 302445 - DNA, 235 bp, Zea mays
gctcaacggatctaaggcttcagtctgtaatcatgtgaggcaagtatatcatttctgctattcttggatcatttgcagttgcatgggcttgtgattattatgtttcagacaaaaagctatttggaggttctacccctggaactattacaaacaatgagtgggcagaagagactgacaaaaaattgcaggcatggcctcgtactgccggtccaccagtggtcatgaatcccataag

SEQ ID NO: 302446 - DNA, 234 bp, Zea mays
gagcaaacaagggcggacgcggagccggcggcggagccgagatggcggtgaagaagcgtgtagccggcactcgcaaggatgaagtggcgacacgcgagtacaccatcaacctgcacaaacgcctacacggatgcaccttcaagaagaaggcaccaaatgccatcaaggagatcaggaagttcgctcagaaggccatgggtactactgatgtccggattgacgtgaagctcaaca

SEQ ID NO: 302447 - DNA, 240 bp, Zea mays
cagtaagagagtatgtgactccccaaaagttccaattttggaaggagtatggagaatcggtgggtttccgatatgttgctagcggacccttggttcggtcttcctaccgtgcaggagagctatttgtccaaaatttagtcagaaataacaaaactgagtcgtccatggatccgtacgcagaaataacaaaatctaactaaatatcttgtgccagagcaatccatgggatcagtacacact

SEQ ID NO: 302448 - DNA, 124 bp, Zea mays
gtgctcgcgtacgtcagcttatcgttcgcctcgatgtgcagagcgcttcgcaagcacagtgattggttaccaaatcctgacagtcttaagctctctcagtctcagcatttcagttcccagattc

SEQ ID NO: 302449 - DNA, 236 bp, Zea mays
attaccacagcttattaccgcggtgccatgggcatattgcttgtttatgatgatactgtttaagcatctctcaacaatattaggaattggattcgcaacattgaacaacatgcttctgacaatgtatacaagatacttgtgggtaacaaggctgatatggatgaaagtaaaagggctgtgcctacctccaaaggtcaagcccttgctgatgagtatggtatcaagttttttgaaac

SEQ ID NO: 302450 - DNA, 263 bp, Zea mays
  unsure (1)..(263): unsure at all n locations
tgcgcactatctcgacacagcctagctccaatggacacaacatacgagctgacgtgagagatatgtaccccaatagctgaccctatggcctatgcgcgactagcattaacaatctgggatcttgtgcaacaagctgccgactactagcatctaaaaaagggtgcttatgaagcgactaagacactgaacagaggcatttctgaggtcgttgngatgaccgcagacactgacctcttgagattcttctcatcttactctccttg

SEQ ID NO: 302451 - DNA, 228 bp, Zea mays
ggtttcgcgctcaccacctacgtcgcgctgccgctgctctactggacggacacctactacgccaggcgcttcccgctcatctcgccgcacgtctacgacgacgccggaaggccctacgacactggccgcgtcctcaaccgcgacaccttcacgctcaacctcggcggctacgacgcctacagccgcatcaacgtcagcgtgctcttcgctgtcaactacggcatcggc

SEQ ID NO: 302452 - DNA, 232 bp, Zea mays
cgatgtcgtcctgttggcacttattagtgtacttataccaggcgatagctcaagtcccaagtctgagcactcgttggctcgatgggctacacctgaacttcatgatatcgatgctctgcctaatatggttggacctcgcttggaaggactataccctgagaagtccctttctcgacttgcggatgatattgctctatgcgttcatgccgagccggaattccgaccagctatg

SEQ ID NO: 302453 - DNA, 246 bp, Zea mays
gctgcatagctgcagcattagggtttttcatctgcttcaatggggaagtgaacagggagatttggtaagagaaggcacaagactcacactctctgtgtgaggtgtggccgccgcagctttcatctccagaagagtcgttgcgccgcttgtgctttccccgccgcacgcactaggaaatataactggagcgtcaaggcaatccgcagaaagaccaccggaactggcaggatgaggtacttgcgtaac

SEQ ID NO: 302454 - DNA, 222 bp, Zea mays
ccacagacaatcagaaacaggaacgccatagtgcattcgtcagtagcatcctgacggccaatctctttcaccatttgactggccttcttcagtgagaagtgaacagaatctaactcattgccgattctcttcatttgctctgatcgatgtgacagagttgcagcattctgagctcgaacttcaacagtttgtgctacaaccatctttgagcgctcaatggct

SEQ ID NO: 302455 - DNA, 263 bp, Zea mays
aaagaggcgatgagcacagcctcttggattgtttacctgaaggggtcatgggaggactagagggatggcgttggcggctcagtcttgggcgccacaaacagctatacttggccaaccttccattggcagcttcgtcacgcattgcgggtggtactcggacctagagagtgtgatcaacggtgctcctatgggtgcttggccactctacgccgagcagaacatgaatgctgcgatgatggagcgccaggttggtgtggcattgc

SEQ ID NO: 302456 - DNA, 250 bp, Zea mays
ccggctcagtcgtcttcaccgtcgcatctgatgagcacaggctgctcaccggagtctactacatccccgcgtcgaggaactctatcattagcttgggacagctgaatgagaacggttcgcgcgtggaggtcgagcacggagtcatgaggatctgggacccctctcgtcgccttcttgccaaggtacgcaggggtccaaatcggctatacatcctcaatgtgaaggtggcacaaccttgctgctcgtcgag

SEQ ID NO: 302457 - DNA, 243 bp, Zea mays
ctcgcatgctgtgtctaagagttcgcctcgaggaagaagcttccaacttcagatctaactttggctacaacattccactaaaacatcttgcatacagagtgctcatgtatgtgcatgcatatacactctacagagctgctagaccttttggctgctggttcatgttagggccttacagtgtgaatgacggagcgcaactctacatgattgacccatcaggagtttcatacggatattgtggct

SEQ ID NO: 302458 - DNA, 252 bp, Zea mays
gtagtacatatgttccatatcgagatagttaaatgaccagaatccttcaagattcattagttggcaactgtagaaccactattgtaatttgctgctctccatcatcatacaatgagtctgaaacaaaatctacactcttatttggccaaagggcctaaacaattaagaacacagtttgtgtcaatgtggagctaactgcagaacagtggaaaaagaagtatgacatagaaatagataaacataagatcctgc

SEQ ID NO: 302459 - DNA, 267 bp, Zea mays
gaactctactccgtgtctccgtaccttcaacgtacgctccccggactatttgtacttaatgaacgagttgtacttttgggtcgctggcgctggggtttcttcagttatatacctgttggagcaaccaacgttggctctatcaaactaaacttcgacgctgaactgcggacgaacagtcttacgacagatacagctgcggatagagcagctgccgaagcggccaaacgcggcgaagcctataccggatttgcagaagccacttattac

SEQ ID NO: 302460 - DNA, 270 bp, Zea mays
  unsure (1)..(270): unsure at all n locations
tcctcggctgctgcctcgaggtggaaggccccattctcgtctacgagttcgtaccgaacgtcacgctgttcgacctcatccacggcgaccacggccagcgcgtctcgctggacacccgcctcaggatcgcctacgagtccgccgaggcgctggcctacctccactcgtgcgcgtacccgccgatcctccacggcgacgtcaagaccactcacatctgngtactactgagactacgcggtcaaggtctccgacttcggcgcgtcattctgc

SEQ ID NO: 302461 - DNA, 261 bp, Zea mays
gtatcgtcatatatataggggtcagcctcgtaggcatctcttgactactgggtggagctcatttgtcaacaaatagaaactgggttcaggcgatgctgcgtcatttctccgaggtgatgacggtgaactaaggctgcgtgtgcggagggctattcagcttaaaaatgaggccctttttgaagatttcaatagtgacagcacaaagcggcattctttgacgtgtgtagctgattccttgaagaacagaagtgtttttcacat

SEQ ID NO: 302462 - DNA, 229 bp, Zea mays
gaaataagagcagcatcctagtgcttcactttgcagctgtaactggtgtttgcctcaggatttttgctcctccctgctatggattgagcttaaaattctctataataaccttacagataaagctttatcaaaaaaaaaaaaaaggggcgcccgcgaactagggagctcttaaacccggaaataaattccggacgggaccctgcaggcgaaccagtttcccttatggggg

SEQ ID NO: 302463 - DNA, 262 bp, Zea mays
cagagaccggctcagcctcgctacgacgccgccggcgaccatgtccctggcggctatctatcggcatctcctcgtgtccgcactgcagctgctcgaccgctacctcgacctcgacagatagagcggaggacttagtgatgagctgatcagagtgcggctagagatcgagcaacttctcgaggaggctgatcagtggtcaacgaccgccacatttgcacaagctgctaaactcacgcgcctggctgctgcaaggagaaggact

SEQ ID NO: 302464 - DNA, 286 bp, Zea mays
ggaactgagctccgactcgctttccaggcgtgtctcaaggtggaagaattcgtggatctcatccttaaagccactgagccccagatgggtctcttcaacctgtatgacgactggctcatagactatgtcatcttacacggccttttcccgtctgatccttattctgcgtgccctatatgggaacaacgatcgggcaacacagactcgcactgtcaacaagcattgcgatgagatcatgacctgcaccaccagcaactatgagacccagactttctcatccgagact

SEQ ID NO: 302465 - DNA, 130 bp, Zea mays
gctcacctacgggctatactccttccaccggggcaacagccagcgctctcagctcatgatgcgcacccggatcgccgcccagggtttcacggtcgcagccatcttgctgggtctggctgtcactgctatg

SEQ ID NO: 302466 - DNA, 225 bp, Zea mays
gctcgagcagcatcctgcagcgcgaggacccgcttggtgaccctcttccggtattcccgcgcgccgctcaccgcatcgagccgcagcagcatcttcatcagcgcctccccgacgccgcgggacggatcggggtgctggtaccggtaataggggtagacgtagtggtacggtgaggtgtagtagtagtcgtaggggtcgtcgtagaagaaacggcgagacgccatt

SEQ ID NO: 302467 - DNA, 234 bp, Zea mays
ggacgaggacttgacgccagtgtcacgaacgatacacaactctgcggtgatataccttgtaggcataactgaggcgcctgcattcaacaccatgtacgagctttacgacccttccaccggacatgtctgcttcaggaactagcacatcatgattgatctcggaaccggaacatcaacaagatcaactggacttcaaggacaagcaggattcatcgacatggtgagaccgctatc

SEQ ID NO: 302468 - DNA, 231 bp, Zea mays
gttctagatcgcgaggacggcacgccatggtcccagacaaagctcaaggtactcatgctgatgctgtaaccatgagccagtccaactgagcactgggactcatgctcatgtccggataaacgagatctagcctgagagcagagactagaaaagcttggcaaaggagcgacaagaagctgaagaggccaaggaggccttgctgcaggcctcccgggaccagaaaaagactca

SEQ ID NO: 302469 - DNA, 255 bp, Zea mays
attttgttggatgagaactggaatgctaaactgtcagactttgggttggctaggcatggaccagcagaaggtctgacccatgtctccacagcggtggtcgggactctaggctacgcagctccagagtacatgcagactgggcgcctgaccgcgaagagcgacatatggagctacggcgtcctcctgtacgagctgatcaccggccgccgccccatcgaccggaaccgcccaaagagcgagcagaagctcctggac

SEQ ID NO: 302470 - DNA, 271 bp, Zea mays
cgctgggacacaaggtgctggcgagggctgcgatgccagggaagccctgaggttctggcatagctgagcagtgtacgagcactgtgtcgtgcgcgtctgtagtgtgaggtcaccctcaaactgcaccgccggccagataccctcctgaccccgaggacttggtctggtctctctggtggctacaaccccagagtgttaaggacttggaaaggaaagcactatcagagaagataacagcccgcgaacgatcaggagtggcctgcacatggac

SEQ ID NO: 302471 - DNA, 278 bp, Zea mays
ataatgtaacgtaggtgatgattcccaaatgcatttggatgtacagatcgactacagagttcttttttcttatgacgattggtgtagaaatgcgtgatttgggtgggcttttacatcttgcctaccattgcatgaaacattggggtttcttctaaatgtgtgtgtcatacttcttttgggaggggggctgttttcttctgtttattttctgagactcctacaggatccaaatgtgtaatctagatgcactcaatgttggtaatcctgtctggggcact

SEQ ID NO: 302472 - DNA, 254 bp, Zea mays
gcacaggcagctaccggctgcatcatcgaccctgaggagaaccggaagctgaccgcagaggaggcgttcaaagcaggaatgttcgggaaagaaacctacgtgaagctgctgacggccgagcgcgccgtcaccggctacaccgacccctataccgggcagcagatcttcctcttccaggccatgcagaaggacctcatcgtacgcgagcactggatccgcctgctggaggccagatcgcacgggcggatcatcga

SEQ ID NO: 302473 - DNA, 270 bp, Zea mays
agcaaagtttgttctataaactaaaaataaaatcctaagtcccccaactgactaaatggaccccccgttggccaacgagacccctcgttggccagacggaccctaggcaaaccttataaactgagtcccaggccaagaaggaacgagaggccagacaagcctcattatattcccacccctttgcaatttagacaaaactgaccaacattaatgatatcacagagatcataagactgacggacagactcttatggcatgggacccacctat

SEQ ID NO: 302474 - DNA, 256 bp, Zea mays
acagctcgccggctttcccctccctgccatcgagcaccacctgagcaaacagagcaaggaaatagtttaagaatggctgcgcggagcatgtctatggttgccgaggatgactacgagacggatcagaagaagcaagctgctgcagatgttctttttcactattcacaatttgttatcggttgcattggtgaggatgttcgccctactgatctcaggttacatcttatgaaggaagttcaggaatgccacttctctg

SEQ ID NO: 302475 - DNA, 265 bp, Zea mays
agcggcttccactgtagatccgagccggcgtgatcataccaaatcttacacgcatcatactagcatgcttgaaaacattgagcacctggggttctgtatttatcgactgggtcatgacatggatacttacaaactgcaacgcagagaaactattaaaggtattcagaaacgtgaagccagcaattgtttcgcaattcggcattttgaaaacaaatttgccgaggaaactttaatttgatcttgaacagtcaagaaaaacattatt

SEQ ID NO: 302476 - DNA, 259 bp, Zea mays
cgcgcctataattgtttccttcattgtcttgactgtgatgagcgtctggcactatggaacagctaagaagtacgaattcgatgtggaaaacaaggtctcaataagttggcttctgaatttaggctcttcgttggtattgttcgggtcagaggcattggcctgatacatacagagcttgtgtctgggattcctgccattttctcccactttgtcaccaacctccctgcatttcatcaggttctggtcttcctatgcatca

SEQ ID NO: 302477 - DNA, 256 bp, Zea mays
tgctcattccgttgagcttccacacaacatacgagcaggcgatatgaagatggactgcgatggacaggatgaatgcattggcagcaaccagcaggaacttcaagcaggcagctaagctgctgggcctcgactccaagctggagaagagcttgctcattccattcagggagatcaaggttgaatgcacaatcccaaaagatgatggaactttggcatcctatgttggatttagggttcaacatgataatgctagggg

SEQ ID NO: 302478 - DNA, 254 bp, Zea mays
caggcagccccaggcagcgcctgttgcggtggatgagcatgacgctactgcgcctggcctggatcccgaccggtagtataagatgaacctctacgggcttcgtggcaggcagcgtgtgctgccctgagctgtggcggccaagactgctcctcaggaggatgtggacgagacccccagccccacagaactgggcacggaggctccggagtcccccgaggagccgctcctggtggagctgacagtgacaggatcct

SEQ ID NO: 302479 - DNA, 184 bp, Zea mays
ggatggcactgaacatacacacagaggaatttatttcatgtcctccagctcgcttgcatttcacagattctatttatcttgcatctcatagactttattccttactgaagactatcagtggcataactctgccttgctaggaagcactttttgaacctgttatggatatatattgccactgaaa

SEQ ID NO: 302480 - DNA, 276 bp, Zea mays
gaggaatcgagaaggggaagtttacatgttgcctgctgacttgatgagagcagtagtccctgtttttcctccatcagagtccacggtagttcgtgaaggaagattaaggggggagcggagccctggagaattgcactgtgctccatcagagttctttatgcagttcgacacaaataatgatggcctcatctcctttgctgagtaagtggaaagaaaaatgatggcccaattcaggatcttgaactagggattcatacgtctgcatactactcatca

SEQ ID NO: 302481 - DNA, 283 bp, Zea mays
ctgactgatcatgattgcagcattcacttagttgctgccaattaagatggctctgctatagaagctctgggatgatgttgtggctggccctcaacctgagcgtggccttggcaagctcagaaaactcaccacgctcaaaactattgatgaaggagaaagtagcaagctgcagaagacgttgtcgatgccgtcgacaccaacaaccccgatgactccgacgactccaacgacaccgggatcggcccgtatagctgacaacgtttggaggagcgtcttccatcct

SEQ ID NO: 302482 - DNA, 252 bp, Zea mays
tataatcggcatgcatgagcggctgctgctgtcggcgctgccccatcacgttgccatgtatatgaaagaagacatcaatgagcactccttcaacaatttccagatgaagattgggctgaacatgggcccagtcgtggcatgtgtcatcggggctcggaagccacagtatgacatctggcggacacagtgaatgtctctagtcgtatggacagcacgggtgtccccgaccgattccagggaccacggacctgt

SEQ ID NO: 302483 - DNA, 235 bp, Zea mays
atccactatagcgccatgcagtccatagactggctatacatgtcagatgcccatctacccactgggatcttcaatgacagctgcatttggcttgcttacaatacctgttgccttctcctcacagcgtttttaggctgactttacaccttcatattggtttcaaacttggaattcatagacactctggctctagagtacttaaggggcaatccaaaggatgactttatttcacatt

SEQ ID NO: 302484 - DNA, 301 bp, Zea mays
agcttggtagtcgtctcgtgcagattgactacggagtactttattcttaatgatgaatggacgtagaaagggagatacgggtgtgctttgacatcttgcctaccattgcatgaaacattgaggattcttcaaaatgtgtgtggcatacttcttttgggagaggagttgggtgtcttctgtgtattttctgagactcctactggagccaaatttgtaattttaggagacactttaattgtcgtttaattcctagtctggggacacttaagtgacatctaaagcattattgctttagaatgtt

SEQ ID NO: 302485 - DNA, 267 bp, Zea mays
tcgagagctgcaacctgcatcgactgaagagcattcagctgaccaagctattatatagctcatgctagcatgccatgcatcgtatgcagattactagcagacctactcttacctggcagcttactgaacttactgcggtgagtcctaaacttagaggtgttaatgcttatatataatctaaccaaagagttacccagtatggatgtagctattgaacttttattttcttgatgattataaatcctgattttggaatctattgcgcaa

SEQ ID NO: 302486 - DNA, 266 bp, Zea mays
  unsure (1)..(266): unsure at all n locations
cgctgtacccgtacctgcccgtgtgggtcatagacaagctggcgctgctcatgtgcgccgtggtgttcggcgacacgtcccggcacggcctccgccgccccgccatcgggcccttcaccatgaagctcaccaccccgggctaccccgtcgtggacgtcggcacctacgccaagatcaggagcggcgagatccgggtgctccccgccgccgtcaagagcgtccgcgggaacgtcgtcgagttcggngactgcagccgccaccctttc

SEQ ID NO: 302487 - DNA, 302 bp, Zea mays
gctcgaattcgctcgagacaagttggcgctgtaccgttctaaagtaaatgtcaatggactcgcgaacgcccttgtacaccctctggtggcaacaggtgcccgatgggtggctactctactaaatgaaatgaagcgtcagtacgagagactgcagatgctgatgtacgtcaccatgtgtatcaggtctggaatggaggcagcaatagacaaactgagaggcgaaggcctcattcagttcagacagatcaatgtcgcgaatgtgaagggctgcagacttcacagcagcagtgatggccacagca

SEQ ID NO: 302488 - DNA, 275 bp, Zea mays
gatgagttcgctcgggcttcggctccggcttcggcgacctggagcgaggagttcggagatgcagtcttccagcgctcaagcagttttcgacttcgtctcaccgcttcccgcaggattcatcaatgcgagtaccggcagaacagtttcttacacttaggccacttggtgctccaccgatcatagtgccgcttgcggcttagggtgcatttcgtggattccgggatacaatgacaccattgtatgctgtgtgtatgtctttgccacttcattttgac

SEQ ID NO: 302489 - DNA, 271 bp, Zea mays
gctaagatcaagtgtagtatctgttcttatcagtttaatatctgatatgtgggtcatgtgcctacttcgatattaaacttattgtttgtgggagagggtccattactaatggcttgccattaggggccctcacgcgtcgtccagctgttgcactgctggccggacgtggcgcaccccaaccaagacaaattgcaatttctctgtttgggaactcttcggtgccatgaggctggtctcggcgaattaaagcaactggagtggttctggttct

SEQ ID NO: 302490 - DNA, 277 bp, Zea mays
ggacctgaaaagggccacagtagaactacggaattgaattctcaggacttgctggagcaattgccagcactgcagcaattgttatatcgacttattggctgtcgagcagaaggagctgcaaaaaacaattatctggtgcaatatgctctagcccaggttcttaaagaaagcttcaaaatttattgtgcaataaatgatggaattatcaaccttattgacaagttctttgagatgccaaagcatgaagcactaaaagcccttgacgtttacaagaggg

SEQ ID NO: 302491 - DNA, 238 bp, Zea mays
gagctccactacggacctggtatagagaatggtctctgctgaaatagggcagagtctccctaacaaagaagctatcccaggacccctcattccttcaacttgtgcctggtacagagtcgtgttcgaacgcagccacactcttctatgaccaagcatgagataccgctataggactgagagacattgaagtcctggcattagcttgcggccagagaaggcactggaactggagaggaga

SEQ ID NO: 302492 - DNA, 264 bp, Zea mays
cgtagctcgaattcgctcgagtgctatagacataagacaagacatactggaaagatatggcgaatgtgaacatgagaagttacagttgagaaaaggctccgcaagtgtagatgagcataaggcgcgcaaagaaggatataatgagctaaaccagtggttgacaactacgcagagcaaaatattgccatgtgataaatatgtgaaagtctttcataaacttttaactgcatatagacatatgacatgacatactggaaagaaacc

SEQ ID NO: 302493 - DNA, 238 bp, Zea mays
caagcttcccttgacgctgttgctgaggaaaagcctcatgtgctacgctatatgtctaagaccattcgcgatttagaagttgtggagggaagtgctgctagatttgactgcacgattgaaggatacccagactctggagatagctagctcagagatgaccaagcaatcagggagtcccggcacttgcagattgactacgatgaggacgggaactgctctgtaattattagcgatgttt

SEQ ID NO: 302494 - DNA, 250 bp, Zea mays
cgctacgaagctcgaattcgctcgaggtattcacaggatgcagcctctcttgcaatatccatcatggaaaagagactacggagcagcatctatgcgggttgtgacaacgagcctctgtccaggctagagatcatggaccgtagcaacataagcagtaaatgtgacacacagtttcatggcttcactgggactgatggtccgctggggaagaggatggacaactccaaaaactcggcaaagcttggatggc

SEQ ID NO: 302495 - DNA, 164 bp, Zea mays
ttcatactggagagagaccctatgattgtgaagaatatggcacatgctttaactagtggtcagttcttaacacacatacgagaattcctactgcagataaactctactaaccagttggatgtgacaatgcttctgacaacatctcaaacctttctaatcataaa

SEQ ID NO: 302496 - DNA, 297 bp, Zea mays
caagcaattactctgcttcaagtaattgtagtcattggcgcttttcagaaacaatttttttttgagaaggggaggagctccagagcacagttgatagaaaatgtggtaagatctctctccttgtgccctttggaccaccctcgacttctcaagcaggaaggtctggattttagcaccacacattttaccagattcagagaagtgtatttcaataagcttgccaaatcggcttgagttatggtttcgtgatgattttgcattccccaatgcttccaggataacattggcttgaagacc

SEQ ID NO: 302497 - DNA, 256 bp, Zea mays
cgtcaccatgacttttaagcgcaggaatggaggtcgcaacaaacacggtcggggccacgtcaagttcattcgatgctccaactgcggcaaatgctgtcctaaggacaaggctatcaagaggtttctggtgaggaacattgttgaacaggctgcagtcagagatgttcaggaggcttgtgtctatgaacaatacacgcttccgaagctttatgtgaagatgcagtattgctgttcctgtgctatccactctcaatgt

SEQ ID NO: 302498 - DNA, 272 bp, Zea mays
aattgcacgagcagctcgaggttcagaagaagctgcagatgcggatcgaggcgcaaggcaaatacttgcagacgatactcgagaaggcccagagcaacctctcgtaccacgcgactggagccgcaaacctagaagcaaccaggtcgcagctgacggacttcaacctcgcgctctcaggcttcatggacaacgtgacccaggcgtgcgagcagaacaacggcgagctggtgaaagccatgtccgaggacggtctcagagcgaacaatctagac

SEQ ID NO: 302499 - DNA, 273 bp, Zea mays
tgccactgcactgcagcctgctctacagaacagaactctgtgccataataagaaatattgtatcagcagatagagtagatatctggtaccataggtcagattggatgaggtgcagatgattgaaagttggcaactggggcacctaagaaaacataatcatttgaaatgatgtcaaggatgcgcacatcatccaatgtggctaagtcatctttttaagatggtggatggcatgtgatagttagaaatctactgcaaagcgtataaaattgctca

SEQ ID NO: 302500 - DNA, 266 bp, Zea mays
cttgcagcaacaatggcagccatggctgcgcttcagagctcaatggacggtctctccctatcctccaactctttcttaggccaacgcctttctcccatcaccctcccctctcttctaccgggtaagtcaacagagaagcaatgtcctattgtaatgaggcttaaacgatgggaacggaaggagtgtaaaccaaacagccttcctatcttgcacaaaatgcatgttaaacttggagatacggggcaagtcatatctggacgtgaaag

SEQ ID NO: 302501 - DNA, 255 bp, Zea mays
cacaagcacaagcacaagcacaagcactctagcaatggcttctgaggttgccgccctagcgacgccgagctactgcaggcacaagccgacatatggcggctcagcctctcctacctgacgcccctgtcactgaagtgcgccgtggtgcttggcatccctagggcgatctaccgccattgcggggctgcctcagccgctgagctgatcacggcgctggctctcccctccgctaagctaccggtcctccgccgctgc

SEQ ID NO: 302502 - DNA, 238 bp, Zea mays
gctgggtccgtcagagaagaacctagcggagagtaagcagtaacatggatcccatgcttcttgcatgcctcaaagatcctgtcgttcttccacccagggtgcatttccatctggcacactgccggtggaacattcgctgaccgcatgacacgcttatgctgagcaacgacagctcgagcgattctaatccgatggccgctacgctgatgcttcgaggccgagagatcggatccagcaa

SEQ ID NO: 302503 - DNA, 260 bp, Zea mays
ctcacactctccaaaccctatcgggactacacactagctctatcgctatctccccaagattgtcgagcgccgatcccgagcacagagaagaggaggaggctcccgccgttgcgacgacgaggacaccggagctcacgccgctccaatcgtcaagctcgaggagtgtgctgtcaccaccggcgaggaggacgaagatgcaatcctggatctcaaatcgaagctttaccagttcgacaaggactggaaccagtggaaggagc

SEQ ID NO: 302504 - DNA, 272 bp, Zea mays
atactcctgacatcagaaaaagatgaaagaaaaaaatgtctctagtgactgctgagatcatagccaaagctgaggcgcatcactggagatgaactctgccaagagaagtcaaaggtgctgctaaaggagggagggctacctaatgggcttttgccattgaaggacattgaggaatgtggggatgagagggatagtgggtttgtgtggctgaagcagaagaagagcacataccacaagtttgagaagattgggaatgctggttcctatgctcc

SEQ ID NO: 302505 - DNA, 256 bp, Zea mays
ataactagtagcattattcttccattcataatgggtgctttcacattcgaggacgaaatctactcccctgtggctcctgctactctttacatggccctagtttcagatgccgacaacgtcatcccaaaggctcttgagtccttcaagagtgttgaaaacgttgagggaaatggtggcccaggaaccatcaagacgatcactttcgttgaggatggagaaaccaaggttgtgctgcacaaaatagaaagcattgatg

SEQ ID NO: 302506 - DNA, 237 bp, Zea mays
gtttttccttttagattgtgattactgctagtataagtggctacttggaaatgatagctactcaaattgctaggttctgcggagcacacttttacccagtcattggtgcagtgggttttatgatccaaaggttggatatcccaagtgaagtagatcctcagtggaaatcaattatcctgagctgctgggaaagcgacccgcagcaacggccgtcgttccaggagcttcttgagaggc

SEQ ID NO: 302507 - DNA, 259 bp, Zea mays
attgtttaccatggaccagattttgttaggaagatctgatgttgctggttggggtgcattcattaaggtcagataaccgatcaaaatacctctgagtgcgatacttcctttcttgttctggctaattttccttgcaatatgtagaatcctgtaaataaaaatgagtatcttggagaatatactggtgaattgatctctcacaaggaagcagacaaacgcggcaaaatttatgaccgggcaaactcatctgttctgttcg

SEQ ID NO: 302508 - DNA, 269 bp, Zea mays
acttcagaaaaattaagccttcacaatggtgaaccccttgggcctgatgattcaacacggtatagaagcatagtaggtgccctacaatatttaactttgactcgtccggatctcagttttgcagtgaacaaagtgtgccaatatttgcattcacctacaacagatcactggacagcagtcaagcgtatcttaaggtaccttcgatacactcttcaccatgtgttgaagatttcaaagtcaccttctctgctggtcagtgccttcactgg

SEQ ID NO: 302509 - DNA, 266 bp, Zea mays
gagacatccgataaaattggaacgatacagagaagattagcatggcccctgcgcaaggatgacacgcacaaatcgagaaatggtccaaatttttatgggggattgacgtttgtactcttaacttgcaatacaaccagtgctgttaaattttgatatttgaatgtagtcgccttcgtctgctgctttattcagataagtttctttatatgcctccatttgattacatctggtgttctttttcgctcttcagaccggtgtcattttta

SEQ ID NO: 302510 - DNA, 252 bp, Zea mays
cagcagagaatctctcatcattcttcgattgtctaatattcgccttctctcaattgtataaatgacgctcggagaaactgctagctcatacgcaggtatcatccttcatgaagatggcatcagtgtgactgccgacaagatcagcaccttgttggaaactgcacaggttcaagtagatacctatgggccaaccttatttgctaaacttgctgagaagaaagatcttgtcgatttgatagccaatgcagcagg

SEQ ID NO: 302511 - DNA, 262 bp, Zea mays
ggcggttcggcaaagggcaagggacggcgaccgcccaccggaggcggagacagatcgagatcggcgggggatggcggcgcgggaacgggacggtgaagggaggcgggcgcacttgacgatggctggcgtgcagctcgtctacgccgggtaccacgtcatcgctaagcaggcgctcaatgttggggtcaaccgcgtcgtcttctgcgtcttccgggacctcctcgccctctccgtcctcgcgccgctcgccttcttccagcac

SEQ ID NO: 302512 - DNA, 265 bp, Zea mays
accgcggccaccgacagtatcttatgacccagtgacatccaattctttcgggttatccctattctcaatcttgaatgccctcgggataatagcgtttgccttcagagggcacaatcttgctctggaaatacaggcaacaatgccatcgactttcaaacatccagcacatgtgccaatgtggcgtggggccaaagtagcgtatctcctgattgcaatgtgcctcttccccgttgcagttggaggctactgggcctacggaaacatg

SEQ ID NO: 302513 - DNA, 240 bp, Zea mays
tctaaatctgagttgatgtacagaaaagaaaagcattgttctatgtgtctttggttttcaggtctcttcatctggaacatttcttggctgctttctgactggactatcattctattttaaggcacaaggactgtgcacacagctggttcctactttggctctttgtggcatactggtatactatgcggcgtactcagttggaatgggcccagttccttgggttatcatgtcagaggtaag

SEQ ID NO: 302514 - DNA, 266 bp, Zea mays
gttgtgttgcatgatggagtgattagagaaaaacctagcacactataagaggcacggaaattcatcaaagggtactctgaaagccatgctgcgacgattggatctgtgcttgttacaaatgtgaagactggagctagaagggaaggatgggataaagcagaagtttatttccacaaaattcctgacgaagttgtggagagtttgatcgaggagggcgatgtgttctatgtcgctggtggtctccttgtggagcaccccttaacttc

SEQ ID NO: 302515 - DNA, 246 bp, Zea mays
caccaccttctagctgggcgaaagagcatacgcggagcagaggcgcacccccgcggagcatatgagaagaaggcgatgcatgacgagaggggattccaagatgccgagggccaccagcgacgcgaagctcctgatccagtccctcggcaaggcgtacgctgccacaccaacaaatctcaagattattgacctctacgtgggatttgcggttgccactgcccttattcaggttgcttacatgggatt

SEQ ID NO: 302516 - DNA, 245 bp, Zea mays
cacaagcacacgctcaagcacaatcactctagcaatgccttctgatgctgtccagcctagtgacgcctagctactgcaggcacaatccgacatatgacggatcactctctcctacctcacgcccttgtcactgaagtgcgccgtggtgcttggcatccctagggcgatctaccgccatggcggtgctgcctcagccgctgagctgatcacggcgctgtctctccactccgcttagctaccgttcc

SEQ ID NO: 302517 - DNA, 264 bp, Zea mays
gtagcaacaatgtcgaagcgaggtcgcggaggatcggcgggaaacaagttccgcatgtcgctgggtctgccggtggcggtgacggtgaactgcgccgacaacaccggcgcgaagaacctttacatcatatcagtgaaggggatcaagggtaggctgaaccggttgccgtcagcttgcgtcggagacatggttatggccaccgtcaagaagggaaagcccgatctccgtaagaaggtgctgcccgccgtcatcgtccgccagcgc

SEQ ID NO: 302518 - DNA, 252 bp, Zea mays
cacaaacgcacactgaattcaaaaacatcgaaagatacaggcatggccgagcaaaccttcatcatgatcaagccagatggcgttcaaagaggccttattggcgagattattagcagatttgagaggaagggtttttacttgaaagggttgaaactcgttactgtggaccgtccttttgctgagaagcactatgctgatttgtctgcaaagcctttctttagtggtttggcggattacattgtctctggccct

SEQ ID NO: 302519 - DNA, 284 bp, Zea mays
gtgcaggctgcggttggcgacctggcgactcaaggcgagagagcccatgctttgctgatctggagggaccctcgggccatcgccatcttcatttgcttatccctggtggtcgccgttgcgctgtacgtgacgccggtccaggttttgatggtcatagccatgctttacctgctgcgacatccccggttccgcagcaggatgccctcagtgcctttcaacttctacaggagactgcctgccaagtctgatatgctcctttaagatccagtatccaccataagaga

SEQ ID NO: 302520 - DNA, 262 bp, Zea mays
  unsure (1)..(262): unsure at all n locations
gagcgttataacctaaacctatctgactactatctctgtgagatctcatcagcggcaatctgatgcagccttgtacacttcaaggactgtgacggatgtttcacctcatgaggtcgatatggctaactcctctcacctcaagcgatccggcatgatggagctgccagagtggactgagattgtgaaaactgcaagatttaaggagtgctntccttatgatcctgactggtactatgtcaaagctgcttccatggcaagaaag

SEQ ID NO: 302521 - DNA, 256 bp, Zea mays
gcagttatttctgatccaagcctggtgtatggaggctgtcgaagctcatggagcatatgtacagttactgaagttgaggaactgaaaatacttatccgcttgctcccaatatgggtgactggaatattctttgctgctgcgatctcgcaaatgcacaccacttttattcagcagggaactgtgatggacaccaagatcggttccctgtccattccaccagcatccttatactcatttgaagtgatatgtgtcacgc

SEQ ID NO: 302522 - DNA, 270 bp, Zea mays
gttgaccaagaagatgggaaaggatgtgaaggcagcagaggcaaagaggtcagcattggacgagctgatgaaggaggagtagaaggccaaggagaggagcaataggaaggactactggctgtgccctgggattgtggtcaaagtgatgagcaagtcattggcagagaaggggtactacaagcagaaaggggtggtgaagaaagttattgataaatatgttggggagattgagatgttggagagcaagcatgttctcagggtcgaccaaga

SEQ ID NO: 302523 - DNA, 260 bp, Zea mays
gagagttgggcgcagagaatctccaagcaaacaaactgggtagattgagacgagaggatatgagaggagaggttgcgtctgggacaccatggctccgatgaagctgtacggggcggagatgtcgtggaacgtgacgaggtgcgcaacggcgctggaggaggctggctccgactacgagatcgtgcccatcaacttcgccaccgccgagcacaagagccccgagcacctcgtccgcaacccgtttggtcaggttccagctc

SEQ ID NO: 302524 - DNA, 256 bp, Zea mays
aaataaagctttagaatgactctggctggcggttgctagacccgtgcagcgcgtagatttgcccccgcgtgaattctttgtccttcagctgagattgtcgcttcggtcgtgcagaacggcgtgaggggtctgatgctggacatgtacgacttccgcaacgacgtctggctctgccactcctacggcggcatctgccagaacttcaccgcgtttcaaccggcggtgaacgtgctccgcgaggtggagcgcttcctgt

SEQ ID NO: 302525 - DNA, 246 bp, Zea mays
ggctaagatcaagtgtagtatctggtcttatcaatttaatatctgatatgtggactatgtgttcactttgatattaaatttattttctgtggcggagagtccaccaccgtggcttgccactggtccccttgagcgtcgctcggactgggccccttgagcgtcgctcggccgttgcactactggctgagcctggcgcaccccaaccaatccaattcgagattttttccccaaccaatctaatttgag

SEQ ID NO: 302526 - DNA, 249 bp, Zea mays
cgaggggaacgacatcaccatgctcaccaaaatggagctggtggagggcgagctcggaaggtttgcaatgataagaggagaggagccaacccaaacatacaaccggctcaagacccttatcaacaaaataaggagctacggaagcacgcgatggacggatcacgacgtcgtccgcctaatgctaaggtcatttaccgtttttgatcctcatctcgtgaacaatattcgtgagaatcccaggtacacgaa

SEQ ID NO: 302527 - DNA, 243 bp, Zea mays
  unsure (1)..(243): unsure at all n locations
cgaaggcgagccacgatgtcaggaagaggaaagtgcggcaagggtttgggaaaggcaggagcgaagaggcaccgtaagcttctgagggacatcatccagcggatcaccaagcgtgcgattcggtgcttggcgaggcgtggcgacgtcatgcgtatcagctgttaaatctacgaagagacacgtggcgttctcaagatcttcctcgaaagngaattcgcgacgctgtacttacaccgagcacgc

SEQ ID NO: 302528 - DNA, 253 bp, Zea mays
caacaacccatacaaaatgtgcgacgacgaagttcaagccttggttattgacaacggatccggcatgtgcaaggccggtttcgccggagacgacgcccccagagctgtcttcccttccatcgttggaagacccagacacactggtgtcatggtcggtatgggacaaaaggactcctatgttggtgatgaggcccaaagcaagagaggtatcctcaccctcaagtaccccattgagcacggaatcgtcaccaac

SEQ ID NO: 302529 - DNA, 269 bp, Zea mays
catttatcatcgatccttcgctgtgctcttacgtcggaccctgcataatcaatgtcttcagagaagaaactatcgaacccaatgagggctatacaggcgcagaaactcgtgctcaatatctcctatggtgagactggagatcgtctcaccagagccgccaaggtgctggaacagcttagtggccaaaccccagtgttttccaaagcaagggacactgcgacggagcttttgtgcatagaagaaatgagaagattgcatgctatgtcact

SEQ ID NO: 302530 - DNA, 265 bp, Zea mays
cgcctcggacatcaccaccaccgtacgtgccaccctacgtgcccccgacgcctgggtcatcaccaccctacgtgccagcgtacgttcacgccgacgccgccggcgacgcgaactttcccagtcgacacgctgaagctgaacgcgtgcgtatgcgagctgagcaggctgatccacctggggatcgatcaggaggccaggccaagagctgccctctgctgcattgggtgtcggacctggacgcggcgctgtgcctctgcaccaccat

SEQ ID NO: 302531 - DNA, 189 bp, Zea mays
cttgttatcactttcttgctttatcttgcttggtgacccatccaatgactctgcgctcaacttaagttgccttacaatgtatcgagtcttgcctgtcttctatgctttgtcccatataatcgtgtgactgatgatatatctgtgtctcacttcatcaataatgaattataataaagaagagcaatcatt

SEQ ID NO: 302532 - DNA, 244 bp, Zea mays
tgccttgcaatgcagtatccatagacttgaaaaggcgttctggtcctgatgataagatgagctatcgttacatcttcgtcactgatgaatggaatgctgtttataaacataaagtgggtataaatttcaaagtgaaagctggttatgattctgaggtgcgagttggatgggcttctctgtgcgttggagaagaagggggcaaggcgaagactgcgccaatgaaaacaaaacttcagcttatgct

SEQ ID NO: 302533 - DNA, 255 bp, Zea mays
agtgcaggaggctcccacatgagtggggtctggtgggagggataaactgaggcaagccttctacctgcaaatgcggagaggctgcttcaaatccatgacatgtcatcctttggattcattgactaccatgatcgcagatatgctgcactagcaattttatctctcaatggcagacaactgtatggtcagccgattaaagtcaattgggcatatacaagtactccgagggaggcacatcaggtcattttaatattt

SEQ ID NO: 302534 - DNA, 264 bp, Zea mays
gttttatacaattttaaaacatctagatcgcaagttcgtgatcatgtttcgtgagcatggtttgcggaaattccaatctgtttatgaaataggtcgtaacttgtgctaaataacatgaataccatttttgcattcgcggtttttcatttttcaagtgacttgcagttcaaatctgaattatccgaagaaattcaattaaacgaactaaatctaatagttaaagcaaacactttgataaatgtgccaaaattgaacatgtatgtc

SEQ ID NO: 302535 - DNA, 255 bp, Zea mays
tagggctcgaggcccggtgcacggactaggggagatctgcctctcaaattcctgcagagcctctagagcccactcgaagttgcaactgaagtggcagaagaagctgatgaatacaatggctttaacctcatactagctgatctaacaacaaatatcatgggttatgtgtcaaaccggcctaagggtcagcctgcaacaattcaactcgtgtcaccaggactccatgtgctgtccaatgcaaggctagatagccct

SEQ ID NO: 302536 - DNA, 244 bp, Zea mays
gttgcgtctcagttcctgggtgtgttgttgtaagctcacaggcttcttctcttcgcgtgagctagctagagtgggatcgcgaggaagaaggatgtcgtgctgcggaggcaactgcgagcgcggtagcggatgcaagtgcggcagcggctgctgagtgtgcaagatgtactcggacatggctgagcaggtgaccaccaccaccactactcagactctcatcatgggagttgcgccattcacgggc

SEQ ID NO: 302537 - DNA, 249 bp, Zea mays
cagagattgaggcagtggattttacaggggaagaaacacgccttgtgtgaatgctagcagtaaagaagggtgacagactggagaaatgataacggccattttggaagcccacagggaagtggtcttgggatacctgaagacactgggatattcagaaggccaaggggatccagcttatcctgttgcacatggcgctggtagtgaaggcaggtaagccatgtcaagggcctgggaagcaaggtgaatact

SEQ ID NO: 302538 - DNA, 237 bp, Zea mays
gccagccagcaaaaatattcctaaggttctagactcagtagagctaaaactgaatacatgagatgtgacttcggcactactacatatgaggaaggagatgttaatttagaaggtcaagtagtgcctagaaagaatacatttcagtatttaggatcaatgatctagagagatggggatattaaagatgatagccatagaatcaaagcatgatggaggaagcggtgccaagcatctggc

SEQ ID NO: 302539 - DNA, 206 bp, Zea mays
catcgatcgacgaccatggatatgattattatctatctagcttgcggagatggctgaacaataataagcgaggccgagctgtctgtcatgcatagggattgggtcgtgtgcgtgtgcagacacacagacacagagctgttcaggctgctatctatgtatgcatgtatggcggcaggctttgagctcatgtacacgggtctacatgc

SEQ ID NO: 302540 - DNA, 293 bp, Zea mays
ctttccacttcggagtgctggccgacgtggtgcttctgtcctctcgtctccacagtccacactgcatacgagcatgcgaaggagtggctgcctgtatgttccgaggaagagctctgcaacaatgaggatcatcactgccaaggaccatgcctctgtccagatcaacattggccacttggatgcgaatggcctgtatgaggttcacttcacaacatttgctctctctggggtttgtccgtgctcagggcgatgcagacagctccttggacaggctgtggcagaagaagaaggct

SEQ ID NO: 302541 - DNA, 257 bp, Zea mays
gatgattccatgaatctcagataaggtcggggtcaaggaccttatgggactgcaatcgtgcctgccaattggggaaggacgcgggcctggcaaccgctcggctctagtaagggaaacaggcatgtctcacatcattgctcgaagactggaaaaacagcaagttagctcagttgggtagagtgctggtctgtcacgctagaagcgcggggtcgaactccgtttccccgcacgatctgaaactatagatagaggggcat

SEQ ID NO: 302542 - DNA, 272 bp, Zea mays
taggacgccgtgagcgatggaggcgatgcacactgtggcgctcgagatcaggctaatcgccgataaggcagataggtagcttgcgacgaatggtaagaaccctgacaagcttcaggcggctgggtcttttctgatgaaggtttttggtacactagcggtgaaagggcctaagcgtattggggcactctatgttacctgccagctattcaaaatttacttcaggcttggaacagtaaacctttgccgtagtgtcataagaagtatcgaaactg

SEQ ID NO: 302543 - DNA, 261 bp, Zea mays
  unsure (1)..(261): unsure at all n locations
ctagataaggtgaaaaaatgttttcttcccaagtgagatgcattgttcttcagatgttgaaatgaaagcaaaacataccttctaacttaagacagaatttttaacaaaatgagcagtaaaagtcacatgaaccactccaaaaatcagtgcattttgcatatntgtaaacgaagacagcttgttgaatactgagaagaggagtcaaggagtaggtctgtactaacagagccaaattcctcaagctcttactgggactcagtc

SEQ ID NO: 302544 - DNA, 219 bp, Zea mays
gagtttagctctaataatgctttatatatgaagtgaacttgttggcagtgcagttttataactaaactcttcatatataaagcattattgttactctattgaggcgaatataatttatattacaatgtaaaagcttctttaatactaaggatttttcgaggcttcaccaagtatcaaagtaataacacaaatgaagtgtcattattcaaaatagtcccc

SEQ ID NO: 302545 - DNA, 297 bp, Zea mays
ctcgagcttgcttcacccatgcatacaccgtcatccatggacccaagacatccaaagcagggcccatggtgcttcagcaaggagctgtacaaaggttcataagcaaggagtcgcacttggcaggtcggtggacctctctaaattcaccgactacggcgaactccaagcagagctggacaagatgtttgacttcgagggtgaattggtatctggtagccaaaactggcagatcgtctataccgacgacgagtgcgatatgatgcttgtgggagacgacccgtgtgaagagttctgcag

SEQ ID NO: 302546 - DNA, 278 bp, Zea mays
cagatcaccaacatacttccgtactgcgatatacgttgcactggtggtcgacatttatccgggcgcgactctattgtcgtctatctcgagatcatctgcaaacgagataatgtgttagctcgtccattttggaccgtagaatttgcgggtttagtgtagaggataaaaagtgtggcattgctggtaatattactagcaaattttgtagagttttctccattggtctatcaaagtttatggaagttaaggctgtcatacccgcctgtgggtccttaaag

SEQ ID NO: 302547 - DNA, 256 bp, Zea mays
gacacggcaggaggaagaaatgccggccaaggaggatgaactgcagaagaccaatgagcgtcagcagaaggcagacaaaggcagtgccagggtcatgcagctcaagaggcatctggaggaggctgaggaggagtcccagcgcatcaacgccaatccgaggaagctgcagctcgagctgtatgatgccacggagaaagccgaagcgatacctcggcgaggagctggacgccctaaagacagatctgggagacacact

SEQ ID NO: 302548 - DNA, 242 bp, Zea mays
aaagatttcactgagacaagctgtggaagtaacgactgcagatgctcaccggcctaaatttaatgaaggcttggttgagtttacctctcatggtgacttaaagaatgctatcgaaaaactttctggaaaggaaataaatgggagaaaaatgaaattaattgaaggcagctaaaggcacagtaggtcaagatgcaggtctcgatcccggaccagaaggtcctctaggtctcatagccgatccc

SEQ ID NO: 302549 - DNA, 244 bp, Zea mays
cgtccccgaggtgacggggactcataaggttactgtgctctttgctggaagctcatcggcaaagatccccttcgaggcgtacgtggattagtcacacagtgacgccagcaaagtgactgcccatggtcccgggctggagcccagtggcaacatcgcgcatcaagaccacctactgtgagatctttatcgagctggagctggcacggacgaagtcgacgctgtgatccaggaccccatgggacag

SEQ ID NO: 302550 - DNA, 254 bp, Zea mays
caattggcggaagtttactaggtgcgtgttggatgagcggagctgaggttttcttgctcctgtggaagtataggaagtcaaaggtcctgcccagccatgcgggtccctcagtcaactctgtttcggagacataacgatttggactgctaacaagtcatgaaatgttcaagtccttggatgtagggaaaagaaagagagatcagactgtcactgtgtctatgtcgaaagtgaagacataagagactctattttga

SEQ ID NO: 302551 - DNA, 201 bp, Zea mays
ttcggctcgaggaaatgcgccctgtgaacgccgctcgcactgctcgggtctctctgtattcctaccctatgaagcaatgtgctgccagcaggctaccgtggaccgtgcattgctgccccttcagctgaggcttgagcgctatgactgtcgccactgggaccctgctgacaatgaccgcgatcagccacgataggcacaacc

SEQ ID NO: 302552 - DNA, 244 bp, Zea mays
tggtcttcactccttgctgcgagccctgaggaggccttctttccccagacatggtcaacatgggtccttcctatggcatgagccgggaagtgcagcccaaaatcgagaagaagtgtgacgagcagctgtaggagcggctggtggtgtggatcatagtgcagtgtggccctgatgtgtgctgcccagaccgtggtcgcttgggcttccaggcctggctgaagaatggcgtgattctgagcaagct

SEQ ID NO: 302553 - DNA, 268 bp, Zea mays
ctcatcgtgtttagtgggccatgagctcagcctctctactggaaatgctggtggaagactggcatgtggcatgttcatttggctatatttatggtgaaccgttgaatgtgactgtgggataatgatgttagaaaaggcattgaaacttgtcatcggtgcccatccagttaatttctacgaccgtaaaaaaataagccactgcaactgttttacaagaagtattcatgtgcattccaaagtgttttatggctttcacctagtaatcatt

SEQ ID NO: 302554 - DNA, 185 bp, Zea mays
accacacggaatatgcagccttacgcgtccttgcccagggcctttctgaattttagaagctgccaccagcccagggcaggatcagggaggcagggattgggggggcagggggaggtgtggggagaccccggacaccttgccatctggggttttccagcccgaggattttttttcccctaaggggg

SEQ ID NO: 302555 - DNA, 265 bp, Zea mays
ggacaaattgtagtcggtccttcctgcagtgcctgcgggccgggggactagcaggacctacagcaccacgtcctcgaattctcagacgacacctggagactgtcccgacacagcgacgctcccctgagagcttctggggcccgctgcgtgccatcactcaaccataacacttgatgccgtttctttcaatatttatttccagagtccggaggcagcagacacgccctcttagtagggacttaatgggccggtcggtgagggggag

SEQ ID NO: 302556 - DNA, 255 bp, Zea mays
agagaatccccaagcaaacaaacagggtatagggagacgagactagaggagaggagagtatgggtctgggacaccatggctccgatgaagctgtacgatgcgatgatgtcgtggaacgtgacgaggtgcgcaacggcgctggaggaggctggctccgactacgagatcgtgcccatcaacttcgccaccgccgagcacaagagccccgagcacctcgtccgcaacccgtttggtcaggttccagctctgcaggat

SEQ ID NO: 302557 - DNA, 271 bp, Zea mays
cacgtaccaaatggtagctcttgttgcctttatcaacagggaaactgtcaggtctcaagagcttcaagacagcactgagatgaatgacaaggaactgacaaaatcaatcaaatcattacttgatgtgaaaatgattaaccatgattcagaaaaggaagatattgatgcagaatcttcattttcattaaatatgaactttagcagtaaaagaacaaaatttaaaattactacatcaatgcagaaagacacaccacatgaaatgtacaagggc

SEQ ID NO: 302558 - DNA, 197 bp, Zea mays
ctttggcagtgagtaaatagcatattttgaagtagagttcgatactttttcataagaggttggggaagaatgctcctgaagtaataatgtattccacatctacatcagtgaaagctatctacctatcctgagtctatcttaaaggaatgcaagataataaccttatctcttgcccttattatgaatcttccactctt

SEQ ID NO: 302559 - DNA, 256 bp, Zea mays
cgcgtacgtgcagctaagagttcgcctcgaggaggaatggatgggttattctgataactcttgaagagtccagtatgaaaatgagtatgcccgcctagttacctaccggagagttatcctgataaattaacctctcacagttagtgatcctgtccttttaacaccttttttgtggggttctctctgacctttcatcgtaaagtgctggggaccttaagtgagtggcctgtaattttggatgatataaaaaggggta

SEQ ID NO: 302560 - DNA, 175 bp, Zea mays
gagaatatgatgccatgcctatgaccacttggctttgatgatggaaactcttggtaagatgcctcggaagattgctagctcaggaactcgttccaaggattactttgatcggtatggagatttgaaaagggtcaggagactgaagttctggcccctagaccgtgtgctcgtagaa

SEQ ID NO: 302561 - DNA, 236 bp, Zea mays
aagaaccttaagctcatcgatgttgatgttccagatgctgatggccatgctggaatcacatttctgccactgttatcgatgaccaggccatctgtcaccttcacagatgagggaactgatgagctgacaaagaggatacagaatgccgtgacagaggtggtggatgccaaggctggtgctgggtctgctaccctgtccatggcctatgccgctgccagattcgttgagtcttctct

SEQ ID NO: 302562 - DNA, 274 bp, Zea mays
ctcgcggagaccgagcccagtccagcgatgccgtcggcgccgcagtcgaacgggtggaagttgaccccgaacctggcgatggacgccgaggccacgcgcatgctcaagctcacagtccttcagtgcctcgaccccgccgtcgaggacatcctcataaccgccgcgcacgtgactctctacgacttcaacatcgacctcaaccaggggagcctcaaggccgtgaaagggccgctgttcgtctgcatgaggaactcccagccgaggttccaattca

SEQ ID NO: 302563 - DNA, 222 bp, Zea mays
gcgtacgtctgctcgttattctcgtcgagtgaagcctgatctggtcttgccattaattggggacttgcccattgtacaactggcatctcatcgtccggagggtgcctcatggagtcctggtgagatgcttgagcttgtccagagcccttctttgcgccagctactagattcgttcacccacgttctgcgaactgtgcataaagatgttgctcagttgggagg

SEQ ID NO: 302564 - DNA, 254 bp, Zea mays
agaacacaggctatggaactcagtcaactccccagggatatggctcgactggcggctatagcagtagccagagctcccaatcggcttacgggcagcagtccttctatcctggctatggccagctgccagctcccagcagcacctcgtgaagctacggtagcagttctcagagcagcagctatggacagccccagagtgggagctacagccagcagcctagctatggtggacagcagcaaagctatggacagcag

SEQ ID NO: 302565 - DNA, 290 bp, Zea mays
cccgcctccacaaatccaggagcaattgctgagatcaattggcatggaagatccaaaggtgaagacgcagatctgcagagattttacacgtgggaagtgttcaagatcagctaatgagtgccgattcttgcaccattcatctgttgaagatgctgcaattgtttgccaagattttttgcgtggacaatgcaatctcatagcatgatgcataccagctgatgctgatggagtgtttcactggtgtcatgcatggatgtatcgtgctattataatcaaaaagaaaaagaaat

SEQ ID NO: 302566 - DNA, 238 bp, Zea mays
cagggaagcaagcagaggtatgaaaagctttctatgttgcagccactgacaggcacaataacgaagttgcgacccaaataggaaaaggggcttgaaccagattgtgtacgagcttccatcagaacatccactagctgaaacaagaccgctgcgagagctgctagggcacacacctccacaggtatttgctggcggagtgcttggatttgcagtagccacatttacagcgatgatcgct

SEQ ID NO: 302567 - DNA, 265 bp, Zea mays
cacaaactcgttgagagcgcctcaaaaccaccagaaaaattccccagatcgtccccagcacgaaaaagcgcagatggagcattccggcgccaagaagtcgaacaagatcaccgaggtcgtgcggatgcagcagatgctgaagaagtggcgcaagctctcggtcacccccaaggagccaagctcgcccacctccggcggcggcggaggcaatgccggcgagagcaagaccaggaagttcctgaagcgtacgctctccttcacggac

SEQ ID NO: 302568 - DNA, 276 bp, Zea mays
ggaccatattccttgtttgccgcgagtgatgcaacccgggccctggcattgatgtcatttgacccaaacgacctcaccgtggatctgtacggcctaagcgccgatgagctggaggtgttgcaagattgggaggaaaaattcaaggagaggtatccgagggtgggccaccttgcctgtcaagacgcgacagacagtggtcagaccaccgctgggcttcatcacgaggaaggggacgcctaaaactccactggtttgcctcgtcgtcctctcctctgt

SEQ ID NO: 302569 - DNA, 232 bp, Zea mays
gatcaaaccaatttctagtggaattgaagggatcagtatagattctagtggcattggagagattaactttaaattgaactaacgacgttagcttcgaactaatagtaatgtcattcaagggattaaaatttaaatttgatagcattgaagggaagctataaattctgatggcattgaaaggattagtataaatttgaatggcattgaagagattttctctttgctcaattgg

SEQ ID NO: 302570 - DNA, 270 bp, Zea mays
cgttctactgctagcaccagaccgctggcttcttgagcacattgaggtcttcggatttcttcgggggtggtcgcgcgcagcaccggcaatgtcgtcatgcaagcggtacttgccgagcttgatattgttgttgctgcacggaggacgaggtgcggtggccgcgaaggtgtcggcaatcgtcgtgttcggcgactcttccgtggacacggggaacaacaatttcatcccgaccatcgcgcggagcaacttctggccgtacggccgcgacta

SEQ ID NO: 302571 - DNA, 241 bp, Zea mays
gttccagatggcatagtttgcttttttgtcagttattcctatatggatggcattgtcaacagctggcacgaaatgggaattctgcaggacatcatgcaacataaattagtgtttatcgaaacaccagatgtcgttgagacaacattggctcttgataactacagaaaggcatgtgattgtggaagaggtgccattttcttctctgttggcaggggcaaagttgctgaaggatttgattttg

SEQ ID NO: 302572 - DNA, 267 bp, Zea mays
ctgacatcttggatatcaccaacaaattcagcatcagcttgttgctgttactgagtggaccggtggcctttacgtttctcccacaattgctggaagcaggccaggtggattgatagcggtagcttggcctgctatgatgtctctcggactgaacggtgacaaacttattctgaaattccatcagtgtgtagtgatggcttagaaccaaatagtacttgtgatgtataccatcgcttttcttgcttccaggctattggacagtacaag

SEQ ID NO: 302573 - DNA, 270 bp, Zea mays
gggatttggccatttggggacttttctgtcgattccttctctgtcggtcaggcattcgagaagcacagtatggagaaggacatcgcggagtacataaagaaggagttcgacaagaaccacggccccacctggcactgcatcgtcggccgcaacttcggttcttacgtgacgcacgagacaaactactttgtatatttctacatcgactctaaagctgtcttgctattcaagtctgggtgattgtcgcagccaatacagtcaaccttgcat

SEQ ID NO: 302574 - DNA, 223 bp, Zea mays
ccgctacgaagctcggattcgctcgagcgaaaactgaacgtcactgttgaaactcagaagagctctactacaggcaaccagccatgcactatgaagtcagacaaagctggggaaaagcctgctggagttctgctcaacggactgcaaggaagcaggcctgtcactctagtcgagttctcgctgggggctcgtgtgggtttcaagtgcctgcaggagttagcgc

SEQ ID NO: 302575 - DNA, 226 bp, Zea mays
tgctgaaaacctttacagatctatttgattacttgcccttgtacgctgtcaaagactctgatgagtctagggcctcatcagttgccgatcatcaatcatgcacgcagaagattactgacttgaccaatgcaggcaattggaagtaatcaaatagatctgtaaaggttttccagacatttgcatttccatacttgcttaagcattcgtcatagaaccgatacacttg

SEQ ID NO: 302576 - DNA, 262 bp, Zea mays
acttgcgtacatatgctgtgaacgacccatagacgcctactgtgatgatatcgaccaccattaatatagaggaaggagaggcccctgatatgccacttggcattactgacattgctagaatgaaacagttcagggcattgaacaagctcaagaaagttgcattgaaggttgtggctgagaacttatcagatgaagagattatgggcctaaaagaaatgttgagattcctggatacagatgacagtgggacgattactcttga

SEQ ID NO: 302577 - DNA, 203 bp, Zea mays
tgacgagaagagattgtgtggagttaccacccttgatgtcgttagggctaaaactgactatgctgtgaaagcctatgttccaggtgctgggggtaacgtacctgatgtgggcggccatgcaggcattactattctgcgactatattctcaagccgcaccaaaagccaatcttgatgatgacgtcattaaggctcttacaaaga

SEQ ID NO: 302578 - DNA, 205 bp, Zea mays
cggcgtcgtatgtagcgtcgttctcaaccccatgtgagctcggttcaagtcacctgacgatccacgcaactatgtcgagtaggaagaccagggagcccatggaggagaacgatacccttggacccactgtctgtgaaggagtagtagtctttggtgctgctcacatctttgcattcttcaatgacacctttattcatgtcactga

SEQ ID NO: 302579 - DNA, 205 bp, Zea mays
  unsure (1)..(205): unsure at all n locations
ttacaggaagcgaacagtggaaagcgcatacaggaccgtaaacagaatcctcactatggatgggctcattgaggacattaagcatcggcggtattatgagaagccatgccgccagcgacagaggtaaagctatgaaaggtgccgtcggatctacaacatggaaatggctcgcatgatcaacttctngatgcgaaagaatcgggca

SEQ ID NO: 302580 - DNA, 178 bp, Zea mays
ctacgatgcgaagctgtgcagctgaccagcctgtggaccagtcgaccatcagcctgcacatgagcaccaactaaggagccagccaggctggcgatgactgctccagggaccaagcggcagatcactgagccgaggctgggcatggagcactgctgacacgctcaatgtcagcctgcag

SEQ ID NO: 302581 - DNA, 294 bp, Zea mays
gttcgataagcagcatatcaaggggctgtatttcaaccaaactccttccaaggatatggcactagcagcggcgtccatgaggcctatccctctagccccaatcatggagaagctctccctcaccccggagaactacggctccgtccgtcgctacttcatccaggcactcgacgaccacatgctgtcgccggacgcccaggagaagctggtccgcgagaaccctcccgacggcatcttcaagatcaagggcggcgaccactgccccttcttctcgaagccgcagtccctcaacaa

SEQ ID NO: 302582 - DNA, 233 bp, Zea mays
caacacgtgtatcgcatgcatggctgcacagtctacgaccttagctgtgcctctgagttgaagatgcttgacgagtaccttctaccacgcagctacatcaccgggtaccaagctacataggatgatcttactgtttatgcagctttgccaactgctccatgagatgaatatggtaatgtttccaggtggcacaagcacattgatgctttgctgagaatctctgtggtttctgg

SEQ ID NO: 302583 - DNA, 271 bp, Zea mays
ggggtcgacgggggatcaagaagcctcatggcctaggccagtggctcgcattgcacatggtgggtgcgctggcttaccatctccccaagtgggagagtgtacgtcataatttgtggtagagggggtacgcgttcgcgcggtccctgccaaatcttataaattttatttaagtcccctttagagatagagaagggcttgaaatgtaatctttgttattagtccccttcagtgaaaggcttgaaatggtaactttgtttcgcccggatttata

SEQ ID NO: 302584 - DNA, 270 bp, Zea mays
tgtctggaaaacctttacagatctatttgagaacttgccctggtacgcggtcaaagatgctgatgttgacgagtgtctcaatggatgtcgataatccaccatgcaagcaaaatatttctgactcgaccaatgcaggcaatgggaagtaatcaaatagatctgtaaaggttttccagacatttgcatttatatacttccttaagcattcggcatagaacccatacacttgagtaatctgtgggctttcatggtttcctctgagaatggtga

SEQ ID NO: 302585 - DNA, 215 bp, Zea mays
ctcagcagctaaatatagaagcctgcgaagcttcaccagacaattctagcactttggctaggatggacacgtttttcagaaatgcatgccagtcttcttgtgagggtataatgttaaagactttggatgtcgatgctggatactctgcttccaaacgctgtgattcatggttaaaggtcaagcgtgactatgtgcaaggcttaggtgatagcctt

SEQ ID NO: 302586 - DNA, 272 bp, Zea mays
gtcgtcgtgagttcgtgacgcgctgtccctccactgctccacaggaccacaggccatggctcgtcggctccttcggtccctcccagccggccagcctccacagtctagctccaccacatgccgccgtcctccactgctgctcggctgctccacaggccacagctccctctgtccctcgcggtcgcagcaccagcacgacattcttgagatgcctccggttggaaataatcctcgctcaggctcagccatcagattggtccctctagttactg

SEQ ID NO: 302587 - DNA, 218 bp, Zea mays
ccccaccttccctacaccgccgccgccgtcgcacgcagccgcatccgccatgggggcgtacaagtatgtctcggagttatggaggaggaagcaatccgacgtgatgcggttcgtgcagcgcgtgcgctgctgggagtacaggcagcagccggccatcgtccgcctcacaaggcccacccgccccgacaaggcccgccgcctcggctacaaggccaagc

SEQ ID NO: 302588 - DNA, 265 bp, Zea mays
gcggcggtggcgtgcccgctggccgcgctcctcggctggacccggaccgccttcaggtccgaggccaacaggctccacaagctcaagctcgagacgtgggtcgttccaagatacacctctcagtacctgtccaagcaaggcctgtacgcagtggggcgtgtggtggagaaggcggtggcggacgcggaggcgagtggcgcgagagtactcacgctgggtctactgaaccaggcaaacgagctgaacaaaaacggcgagctgtacg

SEQ ID NO: 302589 - DNA, 297 bp, Zea mays
atcggtcgtgcccgcagtcgactcgccgcccacttctgtagctgtagactgtagttctgttactccccactcactcctgcgcttcctcgccgcgcggatccttctccctgatcctcctttggcttcgcgggtcatggcgatgtggagggccgccgctaggcagctggtcgaccgggcgctcggctcaagggccgcgcacacgtctacaggcagcaaaaagatagtcggtgtgttctacaaggccggtgagtatgccgacaagaaccccaacttcgtctgctgcgtcgagggtcactc

SEQ ID NO: 302590 - DNA, 294 bp, Zea mays
aaatatatatcgaagaacttttaacgacttttagtagtttccaccaaacgatgtttagctttgtaacggctcacagcctacagcagctcatttcatagctcataacaactttgttcacagaccaaacagacccatagatttgttcgtcacatcacgttcgtgtatggctggccctggccgtttcatgaccgctcgtttcctccgccagcgcagtagcgccgctattgttttttttaaaaaaaacgtgctgcctcgcccactgccagtttcgcaccatgtttgttgtgactttta

SEQ ID NO: 302591 - DNA, 296 bp, Zea mays
ctcacatttaattacgaacaaagatccttccttttatatatatatacctgtctgtcagtcttgacttgatcagggaaaagcacgctcgcgtgcgcgctgagccgcgagctgcacggcagaggccacctcacgtacgtcctcgacggcgacaacctcaggcacgggctgaacagggacctcagcttcggagcagaggaccgcgccgagaacatccgcagagtaggtaggccggccgccgtacgctccagcgccagcgccatgcatgtgcagttctgctgatccgttctcgctcgcaa

SEQ ID NO: 302592 - DNA, 243 bp, Zea mays
gttggaaagggtctctccaaggacgagaaggcccagaaacttgcgctgcagcactggctcgaggcgattgaccctcggcatcggtatggccacaacctgcacttctactaccaccgctggctccactgccagagcaagcagccattcttctattggctggatgtaggagaagggaaagatgtcaacttagaggagcattgccctagattcaagtacacaagcaatgatcaagaacttggccct

SEQ ID NO: 302593 - DNA, 305 bp, Zea mays
agaaatgctgctcacaactcaatgtggccaaggctttcgattgacaagattagttaccatcaattatctgttgggaaacttgcgaaagacttatgcagacacagttggagtagtggatcttggtggtggatctgtccaaatggcatatgctattgcagagaaggatgcagaaaaggctccttaaaccatccgagggggaagatgcatatgtgaagaaattgttcctcaaaggaaccacatatgatctgtatgttcatagttatgtgcattaatgggttgcttgcagctagagcggaggcttaaaa

SEQ ID NO: 302594 - DNA, 290 bp, Zea mays
caaaggcacatctcatatacttggtactacaattagtgaggatggatatgtaagcttgtgaggccaggtatttgggatcgatgctacaaagagacggtgatattgatcaagatgctagtcataggatcaaagcagggtggataaaatggcgtcaagcatcgggagtcctatgcgacaagagagtgccacagaagttgaaagacaagttctataggacaacaattagggctgctatgttatatggtgctgagtgttggcctactaagagacgacatatccaacaactaagt

SEQ ID NO: 302595 - DNA, 284 bp, Zea mays
  unsure (1)..(284): unsure at all n locations
gcttgaacggctctcaatcccaaccctaacagcaccgtctctcggatctgatctgatctgatcctccaattcgttcgtccacgtctcgccatggaggacgaggaacttgttgatcagaagaaatatcttgaggaacgatgcaagccgcaatgtgtaaaatcactttacgaatatgagaaatgcgtcaagagagttgagaatgatgatactggtcacaaacactgcactnggcaatactttgattactggcatgcatcgacatatgtgtagcatcaaagctcttt

SEQ ID NO: 302596 - DNA, 282 bp, Zea mays
cgaggacctggtatctctccgcttatttctctgatgtaagaccaagtgctacagcttacaatgtacaacatcctagcttgcttgcttggatcagcacatgcagaaaatgttctaacagacattaaattaggtaaataccggattgtatacgtaactccagaatactgcacaggtaacatgtgcctgctatagcaacttgaggctgatattggtatcacgctcattgctgtgtatgaggctcactgtatttctgagtggcgcatgattttagtgattcattca

SEQ ID NO: 302597 - DNA, 290 bp, Zea mays
cgcctggttcttctgtcttctgatggctccgtcgtccgctccggggtacctggatccgctcatagctcgtgtgctgatgctgtcacaggctctactcgttctcgctagaagcatgccttatagaacagtactaccgagttaaacatttactgtctctcttgcctttaaaatgtgcaggctttgctgtttaaagcgtgtgtgcacatgagtactggtgctgtgcttgacattaggaatttctctaagaaaactagcgccctgcaacttggagctgtggagtatctagcctt

SEQ ID NO: 302598 - DNA, 242 bp, Zea mays
cgagaccttactctactctctcgcactattctggacgggcgactcgcttctgtgagctaccgtgcttagatccagccatgaggtacagtctccacattcaggttgtgcagtgcggcaaccagatcggtacaaaattctgggatggcgtctgctactagcatggcatcgatcccaccggactctatgtcggcacctgcgacctccagctcgagcgcgtcaatatctactacatcgatgactat

SEQ ID NO: 302599 - DNA, 280 bp, Zea mays
cagatcgactacagagtacttttttcttatgatgactggcgtagaaatgtgtgatttgtgtgggcttttacatcttgcctaccattgcatgaaacattggagtttcttcaaaatgtgtgtgcatacttcttttgggaggtgggttgttttcttctggctattttctgagactcctacaggagccaaatttgtaatttagagacacttaattttgttaatcctgtctgggacacttaagtaacatctaaagcattattgctttagaatgttcacataaaat

SEQ ID NO: 302600 - DNA, 244 bp, Zea mays
ttcgctcagcagaaatagtgcgtaaacaaataatcgaagtagaaatgcccacatccacacttagcttgttgggctatgctttcacagtctctcttccttctgactagaagtatgtataatagaacaatactacctagctaaacatttactttctcttttgcctctaaaatgtgcagactttgctgtctaaagtgtgagtcacatgagtactggggctatgtttgatattcggaatttctctaag

SEQ ID NO: 302601 - DNA, 286 bp, Zea mays
agctcgaattcggtcgagcttcttgcttgctgctgcagtgctgcccagacctcgccatacccctctcccagcagcaggcagcagccatgccaggggaccacgggtccaaggccgacattttcttcgacggacgctactaggacagcgccatcggagcatgcttcgcagacatatggaccatcccgctcgacacgtccaaggtcaggctccagctgcagaagaacgacgtcgccgacgccagctccggagacgctgcgccagcgctccccaagtactcgcgggctgc

SEQ ID NO: 302602 - DNA, 288 bp, Zea mays
caccaccgaccctttcgccgtcaagaccgcagagacggccctcgcctacatggacagctggttcaacaagcacctcaactgaatgaagcctgcacctgcacccaccagtcaccagactgaattcaataaaccacagcagtgctgtgatattctgattcgattcgtggctccccagattgatttatcatggctacgacctcttctactactgtaatttccctcattttttccccgaccttttttgctcttaaactctctgtattcttttttgttttttatgatcgctat

SEQ ID NO: 302603 - DNA, 286 bp, Zea mays
ctgctacagctgaggcaagaacatgacatgttatcgagtacccgtcaaatcgcccaaagcagtctgacccttcttttcttcgctagcggtggttcacggattcctaagggacagctggggacccaggcgcacgcagcctagctccagaaacgctgtacgcagttctccgctcatcctaccatcttctcttcctagacctgctggtgatgccgctgcaccctgaagttgctccttccttctgtccctcccttcctcccattctttctttcgttgcttccttcctccc

SEQ ID NO: 302604 - DNA, 145 bp, Zea mays
cttactctagagtaagtcgactaatctctagagtacgcagatccatctctaaagacttatctacttactctagactacagactacgtagatttttcataaacatctaccccaatccatctcacaatatcacgatcaatctctatt

SEQ ID NO: 302605 - DNA, 232 bp, Zea mays
agctctgcgccctcatcgctgagtaagagctgcgcgcccctcatgctccgcctcgcgagtactccgcggctacgatcgacgcgtcgacgaggaccgactggcacctttctggactatgaagtgcctcggcggaactggctcatggcgccaacgcgtggctggacatcgcggtgcggatgctcgagcctatcaagtaggagttccccaccctctctatgcccgatttctacca

SEQ ID NO: 302606 - DNA, 258 bp, Zea mays
agctattcgactgctcagctcttatctcctcagtgcctgtacctgacatatgctactctatgggcctcgcactcgcaaccgcacatagaaagcctaggagtctctctacctagcgtagcttgagtactctctcagccccgtatcgggacccctgctctgcgcaatccatccatggcgtaggaatcaggctgccccttgccaaagtatgtcgattggtatgttaatgatccagctttgcagacggattcactgtcatat

SEQ ID NO: 302607 - DNA, 297 bp, Zea mays
cgtagctcgaattcgctcgagacgataccaactggtgaatagcagctcacccaggacctacacaagcggctgtatgtttcttcgaagcaaaaattgaaggtaaaagtgtgatggctgaaaccccacacttaaatgtggatcctgttgtcgtcacatcattggccatcctgtccctgcagcagcttatttctagagaagatgatcctcttcacagccaagtggtctcggttacctatgtgaaagctggaaaagcccttgatgctacccctaaccttgttgaatttggaggtactttga

SEQ ID NO: 302608 - DNA, 279 bp, Zea mays
acgattcgtctcaatgctgttcgaggaaggatgcaaatggtccgaagacaactggatacaaaggaaaacggcccctgaaccgctctatgtgtcttagcaaaaccagtaactagtgccgtaaaacaatagagattcccagcaagtgatttgtggatcgcttctctgcacaataaaatgggggaatcaagctgcgccatgctgagtccgtttcacctgtgaacatatgagggcttgttcggttatttccaatacacatggattggatgagattgagaaaaa

SEQ ID NO: 302609 - DNA, 262 bp, Zea mays
aaacaaaaaccactcatcaggcgagacgcgagaagatcaatgcgaggatggagctgctcaaggagctggtccccggctgcagtaaggcatcaggaacagcgttggcgctagatgagatcatcaatcatgttcagtctctccaaagtacttgtcaatgaggcttgcaactgtaaacccgaggggcgattttggtgggctagatagctttctgaccacggagataaatgtatcattagagtatcatggctggcccacatattac

SEQ ID NO: 302610 - DNA, 225 bp, Zea mays
tgaacttttccttaacttagtcatggagtttgtttcagaacgcgataaagtgactctggaacaaactccatgactcacttgaggaaaagttcatccctacttgtggtagagaagaaacaatgcttcagggaaatgacattgcaatggtcaattgatcgcattatgtgtaactccctatcctggatctttgccctgtagaaccttcttaatgaacagttcaccagt

SEQ ID NO: 302611 - DNA, 239 bp, Zea mays
tgatgtcactatcaaggagctcgtcgaactagtcaaggaggggtgcggcttccatgggaacctggagtggtactccagctagccggacggcacacccaggaagctcatggatagctccaagatacaggggatggggtggaagcccaagatcgccctcaaggaaggcctcgtggaaacctacaaatggtacgtcgatgaatgtcatctcgaacatgacgtagggccgagacatgccagtg

SEQ ID NO: 302612 - DNA, 227 bp, Zea mays
caggtgtatcaactattcactgattaccaaattaaagatgggcatgttattctgcaactgaatgcgaatccctccagtgatttgctctgtgtacgaatccggatatttgaactctttgaagattggtttctcagtcctgccactttcacagtgtacgaataccgcagaccagataaacagtgtaccatgctttatagcacttccaatatcaacaatcagaaagtctg

SEQ ID NO: 302613 - DNA, 105 bp, Zea mays
ctctgtctctcactgctgtcttctcaggcacctacaacagacgacaatccataaatgatcatgagatggctgctccatctatgattacaggaacgaatgagtacc

SEQ ID NO: 302614 - DNA, 294 bp, Zea mays
  unsure (1)..(294): unsure at all n locations
gctcgaattcgctcgagttccttgaaccacagatacatgccggcataaatcgcttccaaatcgatatggnacgtaacgtttcatctgctattccatgtagaacaaaatggatattggattgagagtgggccacggtcacccaatttattcagaaactagcttcaataagttcttgctttcttgcagtcgatgtacccaatcttggagaggctccatgatgcatacatgcaaattcccgcattccaagccgcgcttcctaaaaatcaaccagacgcaccttcatcataatcatca

SEQ ID NO: 302615 - DNA, 231 bp, Zea mays
ctatttacaccggtcacgcttttgacgcgcgcgtatcttactctattatattgcacgatggtacaacactacatatgtacacagctcgatcgcctgatgtcgagttacacacactgacacgttctgagccgtcacattgacacgacggtacttcgcaggctacctacatggacgtaggtaaagcgtgcgctgaggtacagagctagctagcgaactaaaaacaaatgacga

SEQ ID NO: 302616 - DNA, 224 bp, Zea mays
gaaacagaaggtcatcaatgagtgctctgaagtagagaactggttgagagagacgaagcagcagcaggacgccctacctaagcacaccgatcctgtgctgctcgtatcagatctgaagaagactgctgaagcacttgacaggttctgcaaaccgatcatgactaaaccaaagccagctccgaagccacagactccgccaccacatactccacctccacagcctg

SEQ ID NO: 302617 - DNA, 253 bp, Zea mays
gttgtggcttcgcagaaataagaaagtacatttctactaagaaaggatgcatgtcgctctctggacagtggtctcatatggaggactcgaagggactctggttctcgaatcggctaatacactgaatgaagggcctgtgtcaactggctccatatatggcagacggtgtaatgtggaagcgacagactcggaggggtcaatggatggaagatgattactcagaatgatggagtctatgtattgattacatatt

SEQ ID NO: 302618 - DNA, 224 bp, Zea mays
gaagtttctgcaggacctagtgccaggatgcaacaaggtggttggcaaggcactcatgctcgatgagatcataaactacgtccagtcgctgcagcagcaagtcgagttcctgtccatgaagctcgccactgtgaccccacagcttgacttcagcaacctgtcgacactcctacacagagacatgtaccaccatgtggcctcttcgcaaattcggtctttccact

SEQ ID NO: 302619 - DNA, 185 bp, Zea mays
aattcatgatctgtaattttcaaacattctcaaaaggctagatcttcagagataagctctgaaaatatagatccatacatataagatatctatgaaattcttttaaaaactattggctaactacaaaaataatggcgtatacatgcataaaccatctgtaattagaaaatttagtaacattcata

SEQ ID NO: 302620 - DNA, 127 bp, Zea mays
tagagataatccccaagctaacaaacagggtatagggagaggagactagaggagaggagagtttgggtctgggacaccatggctccgatgaagctgtacggttcgttgatgtcgtgaaacgtgacga

SEQ ID NO: 302621 - DNA, 239 bp, Zea mays
tctgatgtgtgttcgtctcgactgtggaaaacctcggatgattcagaatggcttcattaaaggtgaaaactttgaagtagggtccatggttcagtttttctgtaatgagggctatgagcttgttggtgacagttcttggacatgtcagaaatctggcaaatggaataagatggcaaatccaaagtgcatgcctgccaagtgcccagaggcgcctttttaggaaaccagctagtattaaa

SEQ ID NO: 302622 - DNA, 131 bp, Zea mays
aagcaccacaagcacatggagcagctcggtcagctcggcgccatcgacgccggcgcgtactctctgcacgagaagcacatggccaagaaggacccggataactagcacggccaccgggtcaaggaggaggt

SEQ ID NO: 302623 - DNA, 192 bp, Zea mays
aaggaatcaaacctgttacctttgaacttggaggacgatctgcactcatcatcttcacagactgtgatatgaacaatgctgtaaagtgggcgctgatggccatacttcctgacacaaggccaggtttgctggaatggcacaagagtatttgtgcagaacgaaattcttgatagattacagaggaagtggtga

SEQ ID NO: 302624 - DNA, 297 bp, Zea mays
ggactaccggcaggatgagtcctacaattttgagggggacatcgccctgctggatctggaaaatagcgtcaccctgagcccaacctcctctccatctgcctcgctgacaacgataccttctacgacctggacttgatgggctatgtcactggcttcggggtcatggaggagaagattgctcatgacctcaggtttggccgtctgcccgtagctaatccacaggcctgtgagaactgctccgggggaagaataggatggatgtgttctctcataacatgttctgtctggacacccatc

SEQ ID NO: 302625 - DNA, 315 bp, Zea mays
atgatggagcttctgatgatgaacaaaagaaacttgttgaagttctcatgatcagctcccaaagtggaccgggtcttctattttcaaagggaggctgggagaatgatgaaactgttgaagaggcagctgcaagggaagctatcgaagaagctggagtgcgaggagatttagtgcaactgctggggttctacgatttcaagagcaagcagcccgaagcaacgtgcagagccgcaatcttcgccctgcacgtgaaggaagagctagcctcctggccagaacagagcacccggcagaggagctggtcaccgttcccga

SEQ ID NO: 302626 - DNA, 309 bp, Zea mays
  unsure (1)..(309): unsure at all n locations
tagggaggtcgcggatcttgaggctgctgcgattcaggcgatccggattgatgaggcagatctaagggagcggttgccactgcgcaagtcatagcatgcattctacctgcactgcgctgtcctctctttcagaatcacctactgcagattccaatacactaaccagatccacacacatagtngctagtgaaactataacgacattatattggtaatcatcgacatggacgcagatgtgatcaccatcgagaactcccggtccgacgagaagctacttcccttgtccgcgaaggtgtgaagtacgagctg

SEQ ID NO: 302627 - DNA, 226 bp, Zea mays
aagcagtatctaagtcatattaaaaggactatttctctaaaactcaaataggattcaatatcgcgaaacgctaaacgccctcaggggcagagccggaagtaatgcccttcgggctgagctactaaaaaacggcagttgctccaaaagcgttattggatgggctctaacgtaggtaatggggacctttagaaaactgtgcgggcaaggtctaatttgggaaatgacc

SEQ ID NO: 302628 - DNA, 153 bp, Zea mays
atgcgacatcatagctctcctatagtgccaccaaacgctatagcactaccataagttaccaactgtgatgcgctcccttggccagaaccccactgaagcagatctgcagacatgatcaacgagtgtgatgctgatggcaatggtaccattgac

SEQ ID NO: 302629 - DNA, 269 bp, Zea mays
tgaacttcgtcaagctaagatagctgctgcgtattctcgaacttggagaggtcatcttcagaatctacttggatatgctttatcagactattgtgtttataagatgctcaagtccttgcagagtgtagtctttaaggagtcaggctctgttgatcctgtaacaatgtcaataacgattttcctgagacattttgacattggcattgatgttgcactgttatctcagtacatatctttgatgttcatcgggatgttggttgtcatatctg

SEQ ID NO: 302630 - DNA, 278 bp, Zea mays
ggaaggcaccccaaatcacaagaagcacggaaaatggctgatgaagtgatcgatcaactaaagcttgatgggtatatccctgatacctcacatgtgattcatgtcgaaatgggtgaagaggagaaggcggtaagcctaaaataccatagtgagaagctggcaattgcttttgggcttctaaatactgctccaggggctacactgcgtgttgtcaagaatctccgcgtatgcccagattgccactcgatggcaaagtttgtctcaatggtcttcaatag

SEQ ID NO: 302631 - DNA, 269 bp, Zea mays
tagcacccgcctacactctccccttctaggtgctgcctaggtaagtcggcggcggcgatgacaacgcgcttcaagaagaaccgcaagaagcgcggtccgtgttcgccgggcacggacgatctgctgcacaggaagcacccggaggtcgcgtaacgccggtgcatgcaccaccaccgtatcctcttcgacaagtaccatccgtctacttcggcaaggatgcatgcgtacttcataagctccgaacaagtctactgcccgcgacaacatcg

SEQ ID NO: 302632 - DNA, 271 bp, Zea mays
gtgcagggtgccactccggtggcccattatctgttcacagacctatggtgagggtcgaagcactgataaccccaacacctttgctcttcaagtaggggaaaagcattacgaagctagctatgcagtacagcttaatgaacaatgaaatctcgacagttcttgttggaatgaactctttggaacaggtggaggagaatgtggcggctgcactggagttgtcaacatcaggcatcgatgatgaacttctgcgtgaagttgaacaattcttgag

SEQ ID NO: 302633 - DNA, 272 bp, Zea mays
cgaagctcggaatcggctgaggaaacataatgtttatggaataacaccaacgagtggctctgctctgtagcatgtcgcagtagataatgagcagaaccaatccgttggtgttattccataaacattatgtgtccataaagcctttaacccatagtcaatggcacctacacgagcacaagcctcaggtactttactgcagagatgctcattgaagtttgcactgatgcgaagatttgatatgctaaatactctgaggttctagatcgcgagct

SEQ ID NO: 302634 - DNA, 286 bp, Zea mays
  unsure (1)..(286): unsure at all n locations
ccgtcgtccatgccgccctctccgacaagtcctacaccgccgtcgcctccctctgcgacgagctcctcctacaggccgcgtccaagggaaccaataccgacgaatggccctactctgtccacctcctggcccacctctacatcaatgacctgaacagcgcgcggntcttctggaaatcgctgccgcaggaggtgaaggacacgcggccggagctcgccgcggtctggaggattgagagctacagacaaaggatattcaaactgttgacttctgcatattcgacaat

SEQ ID NO: 302635 - DNA, 247 bp, Zea mays
ataatacaactattcttgtcggttatttggatcctaacggcacgggtgaccatttgagacaaggttatggtcattatgcagaattagttcatgtgaagattccagctggcaagcgatgctgatttgtccaatttgcggaccggagctgtgcggaagaggccctgcgggttttgaatggcacacttcgtagcggacaaaatgttaggctttcatgggggcaagtctttcaacaaacagctcaacagat

SEQ ID NO: 302636 - DNA, 256 bp, Zea mays
gatatggtcgtgccattccatatttctcggggatcgctgtactgatacgtctatatacacgcctttccattggctttttttgcagcgagattgcgaagcacctggctcttccaccagtgaagctccactgcagcatgctcgctgaggacgcaatcaaggccgccgtgaaggattacgaggcaaagaaagggaagaagatgccaaggcagaggagcaggacacctcatgcccgtaagagcgacagttagatactgaa

SEQ ID NO: 302637 - DNA, 235 bp, Zea mays
gctttgagaaggtagcgagcgctgaggatgatggcgctcgcgttcaggtaagctcttcagctcgggtctttcgccaacgacggagatgcgcattcttatggtcggtctcgacgccgccgagctaaccaccatcctctacaagctcaagctcggcgagatcgtcacaaccatccccaccatcggcttcaatgttgaaactgttgagtacaagaacattagcttcacggtctgggat

SEQ ID NO: 302638 - DNA, 207 bp, Zea mays
catggacgaggtgctgcgcgctgtcgactcgctgctcaccgccgccaagcatggcgggaaggtggccacgcccgccaactggaagcccggggagtgcgccgtcatcgcgcccggcgtctccgatgaggaggccaggaagatgttcccgcaggggttcgagaccgccgacctgccctccaagaagggttacctccgtttcaccaaggt

SEQ ID NO: 302639 - DNA, 243 bp, Zea mays
  unsure (1)..(243): unsure at all n locations
ggacgcctgggagggtgagagccccgtccggcccggaccctgtcgcaccacgaggcgccgtcaacgagtcgggttgtttgggaatgcagccctcccatgtcacgtcccagccaagcccctgcctcgatccctgtccgggcctggcggntgcgctgctctggtgcccaggttctagcgcgctcgtcatcagctcgacatctcctcgagctcgcccctgtcttcctgctcggcgcctaaattcct

SEQ ID NO: 302640 - DNA, 276 bp, Zea mays
  unsure (1)..(276): unsure at all n locations
ctatctctcctttggcaaataaaatacgagtgaagattataccaaaaatggagagatgcttggagcgatggcgaaggatgagttatggagtggagtggaagcctttgttttcgtcgaagactccaattccctttcaatacacctatgactcgggttgaaattcacttgaatacacattagtcatagcatataaaagagatatgatcaaaggtatatttatgagctatgtatgcaagacatcaaaaganattcctagaatcaagaatatttagctca

SEQ ID NO: 302641 - DNA, 200 bp, Zea mays
cttttcgaggtcctgttccggacagcccagcctagctcattgtctcagtgctggtgcagttgacatttgacagtgtgcgaggcctcgtaccagccaggatcccaagcgtcccgtcccttggaaagttcagccagaatcttcgtcctgcccccgacagcccagcctagcccacttgtcatccataaagcaagctcaacctt

SEQ ID NO: 302642 - DNA, 263 bp, Zea mays
cgaatacttcaaaatgactggcggatacgcacccaagcacggaagctggcagcaaggctggaggggacacattggccgccctgagaagcgaggtaccacctatacccttgccgcgaaccgtcagcgtctcttccctaacttctggcacaccgcgatcttcaatactttccgccgattccgacaccaagtcctctacgttgctcgcccattcattgtggcgtatacattgatggactgggccgctgagcgcaacgatacttgac

SEQ ID NO: 302643 - DNA, 157 bp, Zea mays
ccacgggtgacggtcctgttcttgaattcacctgcactgcctatcctgacgaggtcatcatcgactccatgtctgtgacacaacaatcaggtgatgatgaacgtgacatgattgcatatgagggtcctgatttcaatgaccttgatgagaacctgca

SEQ ID NO: 302644 - DNA, 266 bp, Zea mays
cttttggaatggaatatctccatgggaagaatatagggcatgtcgacttgaacagtgacaatctgcttgacaacctaagggcggcgatttgggactatcaaaggtcaaatgccagacacttatctctggtggagtgagaggaacactaccttggatggtccctgagttgttgaatggcagcagcagcctcgtctctgaaaaggttggcttccggcgcacccttttgcctaacctgtgctgtgcacctccttattctatgacctgcg

SEQ ID NO: 302645 - DNA, 254 bp, Zea mays
  unsure (1)..(254): unsure at all n locations
attgagcgcttgttgacaagtgatcatgccatcaatgccacccagaagactggtgctggaccctcagctatggactgcagaagtgccagggctgccagctgatacatcattcgcagcagtaccgtagctgctgcggctgtcggcaaggttcttcctgaattgaatggctagctcactgatatgtacttccgngttcccaccgtgatgagtcagttgacgacctcatgtcagaatcgagtgggggcctcttacga

SEQ ID NO: 302646 - DNA, 221 bp, Zea mays
caagaaaggccaccacgtcatatggttcccaggatgagaagggatcaaggaaggtcataatgtcatatgggtctaatggtgaggatgatccaagaaaggccaccacatcatatggaatacaagataaagagtatcccaggaaggccaccacatcttatggagttcaaggggacatccatcaccatgaccatgctgccgttgcacagccacatcgcggcaac

SEQ ID NO: 302647 - DNA, 290 bp, Zea mays
gccttctgcaaacaaaagaagatacataaagcaatggaatttgtggaactaatggtgtccaggggttgttacccagacatcgtttcatacaacactctacttacagcactctgccgcaatggggaagttgatgttgctattgaattgcttcatcaactcaaggacaaaggctgtagcccggtcttgattagttataacacggtcattgatggccttactaaggctggcaaaacaaaggaagcgttagaactgttggatgagatgaccagtaaagggctccaaccagatat

SEQ ID NO: 302648 - DNA, 287 bp, Zea mays
gcagtgttgaagcattttgattggcctgagagaaaggcggacactctacgagaggcagcttttggctaccaggacctgaagaagctggagtcggaagtttcaaactacaaagatgatccacgcctgccctgtgaaatcgcactgaagaaaatggttgcattatctgaaaagaccgagagaggtgtctacagccttctaaggacaagagatgctatgatgaggcagtgcaaggagttcaatatccctacagactggatgcttgataacaatcttattagcaagataaa

SEQ ID NO: 302649 - DNA, 276 bp, Zea mays
gaagcaagatttccaattcctgatataatcctaagaacagttactggaagtatgtttcctgttattgatccagggcaagtaatctccattcaggaacatgagtatgtttattgcctggcaatcgtcaagagcatgaagctcaacattattggacaaaatttcatgactggtcttcgtgttgtgttcgatcgggaaaggaaaattcttggatggaagaaatttaattgttatgatactgatagttccaatcctctctccatcaactcccggaattca

SEQ ID NO: 302650 - DNA, 281 bp, Zea mays
gtccacctcaacaaaccttcgtccacgcttcgactcctgcagggagtgagggagagtgatggagaggtgcgggagctgggactgcgacgcggcggcagcgcagaaggcggtaccggcgccgttcctgaccaagacgtaccagctggtggacgacccggccacggaccacatcgtctcctggggggacgaccgggtctccaccttcgtggtctggcgcccgccggagttcgcgcgcgacatcctccccaactacttcaagcacaacaacttctcctccttcg

SEQ ID NO: 302651 - DNA, 205 bp, Zea mays
atgactttgcagaagataaccttttgggagaaggtggatttgggtgtgtgttcaagggcattttgccggatggtcgccctgtcgccgtcaagaagctcaagattgggaatgggcaaggcgagcgtgagttcaaggctgaggtcgatactatcagcagagtacatcataggcatttggtttctctagtaggctattgcactgcgga

SEQ ID NO: 302652 - DNA, 220 bp, Zea mays
gatgaccattggcattgcgctcatgttggctaggtcttccatacaccttcagcatttataactttggagcccagaagacagtgcatagctggtacatgctaacaaaatttgattgaccattgaagattttagcataaagttaacattacaatctttctttgcgttaaattcatcaagcaactgttcttatgtgttgcagctgatatttatgctgggctaa

SEQ ID NO: 302653 - DNA, 274 bp, Zea mays
acggcggcgacatgaagtacatcttccatggggccgccgctggacatacggctggtggaagccggcgccttcgacgcgctcatggacctgttggtcagccagggcggctccatcaaccagtacgagacgccacggtgcatcgagccgggcggcgccgcgctggagctgctcgactccaaggccaccgcctcgttcatcagcccgtgccccgtgtaagctttcgggcttctggtgactgaggttgttccgagctcgatctgctactctaaagcta

SEQ ID NO: 302654 - DNA, 248 bp, Zea mays
atcgaggatcgagatgcctactcatcaagatatattagtgaatatggtggtacctacaatatgaaccctaagatatcagattttggtatcgcaagagggaaccaacaggaagcaaacactaaccgagttgctgggacgtatggctacatgtttcctgaatatgcaatcaatggacctttttcagtcatgtatgatacatatggccttggagttattgggttggagatcatatgtggtctgcaaatcac

SEQ ID NO: 302655 - DNA, 275 bp, Zea mays
  unsure (1)..(275): unsure at all n locations
ctgtatcctagtgacatgcatccagttcaaccctgttgatgatagatacttcattagtggttcactggatgaaaaagtccgcatatggagcattcaaaaccgtgaaattgttgattggaaagatttgcatgaaatggtcactgctgcttgctataccccagatggacaggttttaatcatctatacataattctttgatttaatatcttcttcatgttacgatctgacacatctctntctttctttctcgaagagtgcactaattggttcccata

SEQ ID NO: 302656 - DNA, 233 bp, Zea mays
cgtagctcgaattcggtcgaggccgcgcaggaagtaccgtgagaagaagaaggcccacaccgcgtcgctggaggaggaggaggtacatctgagggcgctcaaccagcggctcgtgaagaagctccagagccacgcggcgctctaggcgcaggtggccagcttccgatgcctgcttcgtcaaattaaggggcaggatccagggggagattggcccgtttccgaaccaaaggccg

SEQ ID NO: 302657 - DNA, 323 bp, Zea mays
tttgaagtggaaactgatgcatgtgctactggaattggggcagttttgatgcaacatcataagcctattgcatatctcagtaaatccttaagctccaagaatcagttgctttccatttatgagaaagagtttttggctctattgttggcagtcactaaatggaggcagtatttgcagcatactgaatttattattagaactgatcataaggctctgagttttttggaggatcaagtcctccattcggagtggcagaaaaaggcgatgaccaagcttatgggtttgcagtttcgagtggtgtatagagaagggaaggagaatgt

SEQ ID NO: 302658 - DNA, 314 bp, Zea mays
cccacgcgtccgcccacgcgtccgcccacgcgtccgcggacggtgggtcactgtacaaacagtatgctgagaagcttttggactctggtgcggtttaccgctgcttttgctccagcgaggaactcgagcaaatgaaggaagtcgctaagcagagacaacttcctcctgtgtatatggggaagtgggcaagtgcttcagatgcagaagtacaacaggagttagagaaagggacaccttacacttaccgcttccgtgtgccaaaggaagggtctttgaaaattagtgacttaattcgtggtgaggtcagttggaac

SEQ ID NO: 302659 - DNA, 308 bp, Zea mays
agcaccgattacatgacctacatgttcaagtatgacactgtgcacggacagtggaagcaccatgaggtcaaggtgaaggactccaagacccttctctttggtgagaaggaggttgctgtgtttggctgcaggaaccctgaggagatcccatggggttcggttggcgctgaatatgttgttgagtctactggtgttttcactgaccaggagaaggctgcagctcacttgaagggtggtgccaagaaggttgtcatttctgctcctagcaaggatgcccccatgttcgttgctggtgtcaacgagaagga

SEQ ID NO: 302660 - DNA, 273 bp, Zea mays
agctcgatctactactactactagctggtacacatactagccagcctgccagccagcttgccatggcgcccaccgtgatgatggcctcgtcggcaaccgccgtcgccccgttccagggtctcaagtccgccgccagcctccccgtcgcccgccgcagcaccaggagcctcggcaacgtcagcaacggcggaaggatccggtgcatgcaggtgtggccggcctacggcaacaagaagttcgagacgctgtcgtacctgccgccgctgtcgacgg

SEQ ID NO: 302661 - DNA, 306 bp, Zea mays
ggaatgcttggagagcatggctttcaatggcattgccacaaacctagttgtgtatctccgttcagttctccatgggggtattgcttccagtgcagcaactgtatctctttggtacgggacaagcttctttgtgccaattcttggagccgccatagcagatacttgcttgggaaattataagaccatcttgatctcccttattatgtacctatttggaatggtactaattacagttgcaacattcatgccttctacttcagtcttgtgcgacgtcagttcatgcttgtcatcaaatggaactcaaac

SEQ ID NO: 302662 - DNA, 292 bp, Zea mays
cacagtaagaaaagatggcgctgccatccatgagtcttgtggcaaagggtgtgcttcccttctcagcacgtacctcgagtggtgtcacacaaaggccggtgtcagtgactgcttccttggagcacaaaaccagcgatgccagagttcgtgaccttttcaagaaggccaaggagaatgctccttgcatagtgtttgttgatgaaattgatgctgttggaaggcaaagaggtacaggtattggtggtggaaatgatgaaagggagcagactctcaatcaactactaactgagat

SEQ ID NO: 302663 - DNA, 108 bp, Zea mays
ggaccgacgagcgacgaatcgcgcagaaagagaagaacgtcggaggtgggatggcacaagccatggcgtcggtgagcggcgtctcacagggcgtcgtggccagcaggc

SEQ ID NO: 302664 - DNA, 288 bp, Zea mays
ggagaagatcgccaagtggcaggcgcaggtcgaggagcggctcagagtgcttggtcagagaagtgctgaaggtgccactgctgcaatagtgcctaagaaggttgtcatggtgcaatggtctacttgttaggctatgttgaggtgggggagctactaataaacctcaagagttggatgatgctgttcttcgaagactggtgaaaagaatatatgtgccactacctggtccaaacgtacggaggctacttctggaaaatcagctcaaaggacaagcattcgaattgtcga

SEQ ID NO: 302665 - DNA, 317 bp, Zea mays
ccccaacagcaatggacgccgcccagcgccgcgtcggtacccacctccagcgcccgccgccgcccgccgggggctacggcctcaccgtcaaccccaccgcggccgagtacgtccacgcgcagggctacagtgtcctcctccctgagaaattgcaaaccggcacgtggaacgtgtaccgatccgcgcgttcaccgttaaggctgataagtagataccctgataccccagacattggaacgctgcatgataatttcacgtatgcagttgagacatttacagactgtaagtacctgggaacaagaatcagagcagatgga

SEQ ID NO: 302666 - DNA, 308 bp, Zea mays
cagtgcctgatcgatggcggcccaggctctcctctccggccggcagctgctgggccgccccgtgcagtcggccgtctctaggtcgtcggcgaggaaggcgcccttcgtcgtcagggccagctccagccctccagccaagcaaggtgccgacaggcagctgtggttcgcgtccaagcagtccctctcctacctcgatggcacgctgcccggcgactatggcttcgacccgctgggcctctcggacccggaggcaccgggggcttcatcgagcccaagtggctggcctacggcgaggtgatcaacggccg

SEQ ID NO: 302667 - DNA, 309 bp, Zea mays
gccatcgacacgatcgcgagcgcaacacgtacgttgtcggaagctcaagttagaagaagcaccagtgcctgatcgatggcggcccaggctctcctctccggccggcagctgctgggccgccccgtgcagtcggccgtctctaggtcgtcggcgaggaaggcgcccttcgtcgtcagggccagctccagccctccagccaagcaaggtgccgacaggtagctgtggttcgcgtccaagcagtccctctcctacctcgatggcacgctgcccggcgactatggcttcgacccgctgggcctctcggacccg

SEQ ID NO: 302668 - DNA, 308 bp, Zea mays
agttaccttaatgatgctgaagcccaagacctacttgctaagctatctattgacccgttggcggtgccacactttacactgaaggatgggctactacgctacaaaacacgcatttggctgggggccgatgcacagcttcaccatcggattttgtcagccttgcactgttctgctatgggggggcattctggcgtgccagtcacttatagtcgggtgaaaggcatatttgcatggaagaatttgaagtcttctgtccaacagtttgttgagcagtgtcaagtgtgccttcaagctaaacctgatcgctc

SEQ ID NO: 302669 - DNA, 306 bp, Zea mays
agaacaggttgagaaggccttcagggaaggtacggcacagcaaaatgcacatagtatttttgtgtcccttgctctaaaacttttggaacagcgagttcatgtcgcatgcaaagaaattattacgttggaaaaacagaacaaacttcttgaggaagaggagaaagaaaagcgtgaagaacaagagcgcaggttgaagaggagaacaagagagagagaaaagaagaacaggagaaaagaaaggctgaaagaaaaggagaataataaagggaaaaaactagttgagtcaaagtcacgaaatgatattcc

SEQ ID NO: 302670 - DNA, 309 bp, Zea mays
caagcaagcaagcagcgagtacatacatactaggcagccaggcagccatggcgcccaccgtgatgatggcctcgtcggccaccgccgtcgctccgttccaggggctcaagtccaccgccagcctccccgtcgcccgccgctcctccagaagcctcggcaacgtcagcaacggcggaaggatccggtgcatgcaggtgtggccggcctacggcaacaagaagttcgagacgctgtcgtacctgccgccgctgtcgacggacgacctgctgaagcaggtggactacctgctgcgcaacggctggataccct

SEQ ID NO: 302671 - DNA, 302 bp, Zea mays
ggcaagttcttccgagtttctggttgatttgatctgccacgcgctgcaaaacaccgtctcagctcgtaataatttaatctatgcagaatccccagagggcaggagaaattcctctgcatcgttgatctcaagggctgggggtactcaaactgtgacgtccgggcatacattgccgctatagagatcttgcaggtatacgttcatgttcatccatcacttactactaggtcctcttgaattttttacaattccagaaacttatctatcaaagtgaaataatatgatactcctatcatctcatt

SEQ ID NO: 302672 - DNA, 304 bp, Zea mays
cccacgcgtccgcccacgcgtccgcccacgcgtccgcccacgcgtccgagcccggcaagtaccagatgaagaagctgtgcctggagccgacgtccttcaccgtcaaggcggagggcatcgccaagaacgcgccgcccgagttccagaagaccaagctcatgacccgcctcacctacacgctggacgagatcgagggcccgctcgaggtcgcctccgacggcaccctcaagttcgaggagaaggacggcatcgactacgccgccgtcaccgtgcagctcccgggcggcgagcgcgtgcccttcct

SEQ ID NO: 302673 - DNA, 300 bp, Zea mays
tcatcaaaaggttttaggttctctacgtattctcactggtggatcaaacaagcaatgcgtaaatctgtctcagagcaatcccaaatatttcgcttgcctgctcacatggttgaagcaagctaccgtgtaaaggagtgtacaaaacgacttcgccgtaagcttagaagacgacccaccaatgaagaaattgcagtggacactggtattccaattaaacgagttgaggcagcagtaaacctcccaaaatatagtgtgtcccttgatagcaaaattggttccaccgacatgacatatcaggag

SEQ ID NO: 302674 - DNA, 301 bp, Zea mays
ttcagctacaaattgtctcgtgggctacgggctacattccatctagccagcccaatccacatcaccagcccacctcgtcgaactcgtcgtcttccgtccatccatcgtcgtcggcggcggcggagagagagcagatgacgtcctcggggacggtcgcgcagagctgccgcggacggaggcgcggtcgctgtcgggtcacgagggagcggtgttggccgtgcggttcaaccgggacggcaattactgcctgagttgcggcaaggaccgcactctccgcctctggaatcctcacacaggcgcc

SEQ ID NO: 302675 - DNA, 329 bp, Zea mays
ggcagcgacacgatcgcgagcgcacgcacgtaagcacgttgtcggaagctcaagttagaagaagcaccagtgcctgatcgatggcggcccaggctctcctctccggccggcagctgctgggccgccccgtgcagtcggccgtctctaggtcgtcggcgaggaaggcgcccttcgtcgtcagggccagctccagccctccagccaagcaaggtgccgacaggatgctgtggttcgcgtccaagcagtccctctcctacctcgatggcacgctgcccggcgactatggcttcgacccgctgggcctctcggacccggaggcaccgggggct

SEQ ID NO: 302676 - DNA, 324 bp, Zea mays
cggacggtgggttttttttttttttttttgaagaggaaacagatatgcacttctatattgattactgaatgaagaacttgtatgtttgtttcaattctagagttgactaataattgaaatccaatggaaacatttggccggtatattcggacgacctcgccgaaacgggtgaatttcaccgaaagtgagtcatttcggggtgaatcccaaagcccggtggagggtgaggagttacaaagtgctattacaatgcaacgcttcacttccactggttggcgcagatgtcagcgaggtcgacgaccctctgcgagtagccccactcgt

SEQ ID NO: 302677 - DNA, 308 bp, Zea mays
accacggctggtgcttcgacggcgccggcgcctgcaagttcatcccccaggcacccgccctcggcccgccggtgcacacgagcagcagggcgtgcgtggcgtcgtacccctgcgtggtgcagaacaacatcctgtggttctacccgagggctgaccccgagcatagcgacgtgctgcagaggaagcgcccgccgctcatccctgagattgacgacccggacttcgtcaccgtctatggcatcagagacctcccttacgggtatgatattttggttgagaacctcatggaccctgctcatgtcccgtat

SEQ ID NO: 302678 - DNA, 312 bp, Zea mays
atttttccaattggtttagagaacatatcatgcagaaggaggaaaatgatggtagtgacaacatcgacgaggatattagatggttggctcgaggaccactagagattgcacgaaggcatagagcctttaacattcgtgggttcagatttcgtgccaaacggtttgataaggcgactcaaaatagcggagttgttgttactgcaaagacatctagttattcatcggcaggtgatagcaaccccatacttggagatattatgtactatggtaggattattgatatcatagagttagactactacgggagatttt

SEQ ID NO: 302679 - DNA, 301 bp, Zea mays
cggacggtgggcggactcgtgggtggacgcgtgggatcgacctttaagtctctctacgtagcagtgcaataaaaaaagcagtcgtaatggcgagctacaccatggccctctccttcatggccttctccggcacggccgtgaacgtgctgtcgtcgtccgccttcggcgatgcccgcgtgacgatgcgcaagacggcggtgataggctaagccggctgcggtgatcgtgagcccgttgtacggctccgaccgcgtgctgtacctgtggccactgtccgtctgatcgccgagctacctgacgg

SEQ ID NO: 302680 - DNA, 308 bp, Zea mays
gccagtcattgctactcttttgcgtgaagttttgcaagctcttgtctacctacattctcaaggacatattcacagagatgtcaaggctggaaacatcttaatagatacaaatggggctgttaagctaggagactttggtgtgtcagcctgtatgttcgatactggaaataggcaaagagcaagaaatacatttgtagggacgccttgctggatggctcctgaagtcatgcaacaactgcatggttatgattacaaagctgacatttggtcctttggaataacggcattagaactagcacatggtcatg

SEQ ID NO: 302681 - DNA, 308 bp, Zea mays
ctctgccttgttacgatttgcaaagctgactaatatcccagtactcttgactggacatgttacgaaaactggcgatattgctggtcctcgcctcttggagcacatagtggatgttgttctgtatatggagggagagaggtgctcatcccatcgattgttgcggtcagtgaagaaccgttttggttcagctgatgagcttggtgcatttgagatggctgaatttggtctgcaagctgttctgaatccaagccagatgttcttaactgagcatgactctgattctgaaattatggctggtcttgctgtag

SEQ ID NO: 302682 - DNA, 303 bp, Zea mays
gaagacttcggaaggcgggtggggcctccacgacatcataaaccagaacgactggaagctgcagggcatcgtgaacggcatcgacatgagcgagtggaaccccgctgtggacgtgcacctccactccgacgactacaccaactacacgttcgagacgctggacaccggcaagcggcagtgcaaggccgccctgcagcggcagctgggcctgcaggtccgcgacgacgtgccactgatcgggttcatcgggcggctggaccaccagaagggcgtggacatcatcgccgacgcgatccactggat

SEQ ID NO: 302683 - DNA, 301 bp, Zea mays
cccacgcgtccgccttcccctgcagataaagcggctggttgccctggaagccttgcggtggagacggtctcggtctcgaatccaggggagacacgcggatttgctgccatggtgaggtggggcgagatggtggaggaggaggaggacgacgagtacgctaagctggtcaggaggatgaatccaccgagagtggtcatcgacaacgactcgtgtggcaacgcaactgtcatccgggttgatagggtcaataagcatggcattttactggaagcagttcaggtccttgtcgatctcaacctcg

SEQ ID NO: 302684 - DNA, 299 bp, Zea mays
gatcaaagcagagttgatgctgatgggcttcatctcgctgctcctcgccgtggggcagacgcccatctccaagatatgcatcccggccaaggctggcagcatcatgctgccgtgcaagccgccgaaagccgccgccgccgacgacgacgacaagagcgacggccgccggagactcctctggtacccgccgtaccctggatacgatgagcccggccaccaccgccgtttcctcgccggcgcggctccggacgacaactactgcagtgaccaaggcaaggtgtccctcatctcctcggccg

SEQ ID NO: 302685 - DNA, 136 bp, Zea mays
cacttctgactgaccactgtgccgcgccgtggtcaccggacggacacacagaacgacgatggccgcgtcggcgctgcaccagaccaccagcttcctcgggcaggccctggtctcccgcggcgccggcgtcgatgcc

SEQ ID NO: 302686 - DNA, 254 bp, Zea mays
atttgaccagctgaagtcaacaggcatgccgaacggtggcggcaagaggtggctgctgctgctgccgctgtcgcggtacgtggaggtggacgagcagcaaggtgtgcagctcttctactacttcgtgcgctcggagcgcgacccctacgaggacccgctgctgctgtggctgtccggcggcccaggctgctccggcatctccggccttgcctacgagataggacccttaaaatttgatgcccgagggcaaggtg

SEQ ID NO: 302687 - DNA, 325 bp, Zea mays
cccacgcgtccggaccatgactccgtctcgctgcactccatctcacaaacttctggtggcaccttctcattcatcgagacagaggccgctatccaagatgcatttgctcagtgcattggtggacttttgagtgtggttgcacaaggtctgcatgtaaaggtggagagcctccaccccgacgtgcactttggctccatcagatcaggcagctattctagcagggtttcagatgataagaggaatgggtccatagatgttggggacctgtatgctgaagaagaaagggattttcttgtgtctgtaaacgtcccaccaggctacgggg

SEQ ID NO: 302688 - DNA, 320 bp, Zea mays
aaaaaatggtagatccagtgccgtagtaccacatgagagcttgtaccatataagagcttgttcggttaggagtggattgaaggagattggaggggattaaatccattcctagtcaaaattgaataagaggggatttaatcccctcaatccactccgatcctcatgcaaccaaacaagacctgagtggggtctgagaaatgaataaaccgagacaatcccacatgagtggggtctagggaagggataaatcgagataggccttcttagatgcggagagacagctctcaccgctacaccatgcttttccttactttattatt

SEQ ID NO: 302689 - DNA, 305 bp, Zea mays
ccgcctcctcgtcctccaccaccgccgtcacggcgctccccaggaatgggcagcgggcgtcgtcctccttcctcggcggcaagacgctgctgagacaggccgaggcggcccggccgtcgttcgccgtgcgcgccagggcggaccccaacaggccgatctggttccccggcagcacccctccgccgtggatcgacggcagccttcccggcgacttcggctttgatccctggggcctcggatctgacatcatcaagcccggaagcgtcaacaccgaccccatcttccccagcaacaagctcaccggc

SEQ ID NO: 302690 - DNA, 128 bp, Zea mays
cccacgcgtccgagcgcttcgcctaagactccttccggcggttcctcgacatgttcggcaacgtcgtcatggacatcccccggtcactgttcgaagagaagcctgagcacatgaagggatccaaaggg

SEQ ID NO: 302691 - DNA, 308 bp, Zea mays
cctccctctctgcctgaccagctaggatcagcggaagcagcaatggtgatggcgtcgtcgagcgggctgaggagctgcagcgccgtgggcgtgcccagcctgctggctccgtcgtcccggtccggccgcctggcgccgttctgcgccatggtcagctgtggtggggaggtgtgtgcgtccgccgtcgggtgtgggtgcggtcatccacgccctgcccacctcgacggctcctctcccggggacttcggcttcgatccgctgggactcgcgaccgtgccggagaacttcgagcggtttaaggagtcaga

SEQ ID NO: 302692 - DNA, 295 bp, Zea mays
cccacgcgtccgggaatcccccgatggctcatcgcgttctcctcctcctctctctcgcgtcggccgccgcggttgccgccgccgtcgacgcggaggacccgctgatccggcaggtggttcccggtggagatgacaacgatctggagctgaacgcggagtggcacaacccgagacactgcaacgggtcggcaagtcctaaaagacgccgacgagcacgcgtaacggctgtccgttttcaaggccaacctgcgccgcgcgtgccggcaccagctgctggacccgtcagcggacacgg

SEQ ID NO: 302693 - DNA, 299 bp, Zea mays
cccacgcgtccgactagttctagatcgccagccgccgcccttttttttttttttttttttttttcacaatcagaatgaaaaggtcctgatcaccacctctcagaatcatcacactacagaacgtagttttccaaagatttcacattttgtagctggtagatacaaagtagcaatatctgaatctgaaagtctgaacccaaagctcatggatgatgtgtgtcacctgaacgcatgcagaccggcgcgctgctcctggacggcaacaccctcaactacttcggcaacagcatccccatcaa

SEQ ID NO: 302694 - DNA, 289 bp, Zea mays
acattaacgtatttgatgttgttactgatatagatatcctgaaacaatgttctcaaatgcaccaatcaggctcatcggcggcgatgtggcgcccgaggattggcaaggaggcgatggcgcggtggcctataggtttgggcctggcccggcagtgctcaatctgacctacacagggaatgagacgatggttactattcagaatgtcatttcggtgattgaagggggagaagaacctgaacggtatgtaatccttggaaatcaccgtgatgcatggacatttggggcagtt

SEQ ID NO: 302695 - DNA, 287 bp, Zea mays
cccacgcgtccgcccacgcgtccgcccacgcgtccggttcgcgtccaagcagtccctctcctacctcgatggcacgctgcccggcgactatggcttcgacccgctgggcctctcggacccggacgcaccgggggcttcatcgagcccaagtggctggcctatggcgaggtgatcaacggccgctacgccatgctgggcgcggtgggcgccatcgccccggagatcttcggcaagatgggcatcatccccccggagaccgcgctgccgtggttcaagacgggcgtcat

SEQ ID NO: 302696 - DNA, 311 bp, Zea mays
ctgcaattgcgatattctcgtgatcttatctatacaaaggcaggacctgttctgattgctgtcaatccattaaaagaagttgctctctatgggaagtcttcaatcatgcaatacaagcaaaaggccaacgatgacccacatgtgtatgcagttgctgatttggcatttaacgagatgctgcaagatggcataaaccaatctataataataagtggtgaaagtggatcaggaaaaaccgagacagctaaaattgcaatgcaatatttgtctgatcttgggggtgctagtggtacggagtctgaggttcttca

SEQ ID NO: 302697 - DNA, 321 bp, Zea mays
gcggcgtcgccgtcgtcgtcgtcttgactgccagggacgaggcgaggggagcagctgccgtcgggaagctcagaggcctggggctctccaacgtcttcttccaccagctggacatcacggacgccccgagcatcgctcggctggccgatttcttgaagtcccggtttgggaagctggatatcctggtgaataacgccgggtttgttggccttgagtacatccaagatcgtatagatggcacttcaacgacgagcgaggagttttgtggcatggacatggacaagaggctggagctgctgctgaaatggtgcctccgggaga

SEQ ID NO: 302698 - DNA, 303 bp, Zea mays
cttcaagtctcgctacgtagcagtgcaataaaaaaagcagccgcaatggcgagcagcaccatggatctctcctccacgcgccttcggaggtctggccgtatacgtgtcgtcatcgtccagcttctgtgagtgaagcttatcattgacaccatgggcgccctagcgctggcgagcgagggcgtccgggagcccgtggtacggccccgaccgcgtgctgtacctgggcccactgtccggcgagccaccgagctacctgacgggcgagttcccgtgcgactacggctgggacaccgcggggctgtc

SEQ ID NO: 302699 - DNA, 298 bp, Zea mays
gagaaatggcaaccgcagaactgggtttcaaaaagcaattaactaaggaggagaagtttgaaaagaggaagcagagacttgctacaatcggagaggatcttttggcgattgctgctgatcaaccatttcgcttccctgccacatttacatttgtggtcagagcattctcagttctagatggtactgggaaaggccttcatcctagaaatgccaaggaattgctaagatttaatgacgctggtgttgaaatagttgtgaaggtgtgtggagagacatgtgtattcctcctatgacgaat

SEQ ID NO: 302700 - DNA, 260 bp, Zea mays
ccagcgtccgcggaccgtgtggtgagcgtgacggaaggatatggatgtggcacaggtgcctcaagtgcaaacctaaggatggtgttccacctgccacacggcggataatcatgtcagatgctgtctggtggctgtcgcttgggaaattcctagagctaagtttctcaaaccatgcttctgccaaccgagtttcaagctgtggacattcactccagagggactgccttcgtttttatgggtatggacacatggtggcattc

SEQ ID NO: 302701 - DNA, 331 bp, Zea mays
cgtcgtgctcaagttgctgcgcaagaagcggctctggagtgagaccgaggcgctatgggccgagatgctgcgggacggcgtgcagcccgacaacgccaccttctcgaccgtcatcagctgcgcgcgcgcctgcggcctacacagcaaggccgtcgagtggttcgacaagatgccggagttcggctgctcgccggacatgctcacatactctgcggtgatcgacgcgtacggccacgctgggaactccgaggcggccctccgcttgtacgatcgcgctcgcgccgagaaatggcagctggaccctgtgatctgctctacagtgatcaaggta

SEQ ID NO: 302702 - DNA, 315 bp, Zea mays
gcctcaagagcttggctgacggcggcacgcccgcggttcctgatcatcgacgacgggtggcagcagatcggcagcgagaacaaggaggagtccgccaacgccgtcgtccaggaaggggcgcagttcgccagtaggctgacggggatcaaggagaacgccaagttccagaagaagacgaagacgaaggagagcggcggcggcggcggcggcgagcagcaggcgcaaacgccgggcctgaagctgctggtggaggaggcgaacgcgagcacggcgtcaggtacgtgtacgtgtggcacgccatggcggggtactggg

SEQ ID NO: 302703 - DNA, 326 bp, Zea mays
cggacgcgtgggcggacgcgtgggcacatttgaaggctatggcggcaaaagctttgtggaagcttgctcataaccatttgggtgtgtgcaagagcattacagactcacgtgcgccactgtgctttgctgtgctccttgaaaagggtgatggcgatatgggcactaatgtgcagtacttctcagcaatggccatcatggagattgcccgtgtcgctgaacacagcctcgtgctgcgccaatcagcattctaacccagttccccagcagccaaggctgttgttgatcagctgcttcgtgttgtccgcacgggtgaatacgatgcattg

SEQ ID NO: 302704 - DNA, 318 bp, Zea mays
attcctctcggttcttgcagcttgcagtcatgctggtttggttgatgaagggcagaaatattttgctagcatgaagaaggactatgggcttgaacctggaatggagcactacggtaccatggtggatctacttggacgagctgggaagctagacgaagcttggtctttcatcaaaaacatgcctatagaacctggcattagtgtttatggtgcaatgttaggtgcttgcaagttgcacaagaatgttgaattggctgaagaatcagcacagataatctttgagctgggcccagaggagggggtgtatcatgtcctttt

SEQ ID NO: 302705 - DNA, 311 bp, Zea mays
cccacgcgtccgtataagtctaagtaacccttctatacttcttattgaggatgatcccttgagctagcatatatattttaaacttatacttttgtaatcacttcgataaactaatgtaaaatttattttaacctgtaaaatttggtagaaagatttccgctgcaacaatattggtgtgtgtgatttgtgttacttaatcccgcgattctggttgtaagtggtttatccgatgtccttagggcaatcggacggatcctgttaagttatctggtgcacatgcatagcagtctgaggtctttgagacaaggaca

SEQ ID NO: 302706 - DNA, 314 bp, Zea mays
ggtccactgactcctgaacaggagaaagagtacgaccatgccaatactatgttcacgggagtcgttcttagcgcccttgttgaccgtctggttgatgcgaatatgcaatacacagacgggaaagagttgtgggatgcacttactactaagtatggtgcatcagatgctggcagtgacctgtatatcatggagagctttcatgattataagatggttgataatcgctctattgtagagcaagctcatgaaatacagtgtatagccaaggagctcgaccaccttaagatagtccttcctgactgatttgtggctgg

SEQ ID NO: 302707 - DNA, 333 bp, Zea mays
tgcgcgtacgcgtacacagccccgatccgaatcgtcctcctcgcgagcctcgccgatcccccactcccctcccctcgcttcaagatgcagatctttgtgaagaccctcaccggcaagactatcaccctcgaggtggagtcttctgacaccattgacaatgtcaaggctaagatccaggacaagcgagggcatccctcctgaccagcagcgccttatcttcgccggcaagcagcttgaggacggccgcacacttgctgactacaacatccagaaggagtcaacccttcatttggtgctgcgccttaggggaggcatgcagatctttgtcaagac

SEQ ID NO: 302708 - DNA, 315 bp, Zea mays
caagcaagcaagcagcgagtacatacatactaggcagccaggcagccatggcgcccaccgtgatgatggcctcgtcggccaccgccgtcgctccgttccaggggctcaagtccaccgccagcctccccgtcgcccgccgctcctccagaagcctcggcaacgtcagcaacggcggaaggatccggtgcatgcaggtgtggccggcctacggcaacaagaagttcgagacgctgtcgtacctgccgccgctgtcgacggacgacctgctgaagcaggtggactacctgctgcgcaacggctggataccctgcctcg

SEQ ID NO: 302709 - DNA, 317 bp, Zea mays
cggacgcgtgggcgagacgcgtgggcgacgagcaactgctggcgtactctgagctgcccatacatggccgcgacatggcggaggtgttcgccgtgcgcatcccggccatcgccggaagagacccgccgccccgtggcatcatctctttctacggcggccactgctgcagcgatttcatttacagctggaactcactggaagaggaagaagacacctcgaagcaaacctgcgacaccagcccgcaagccggagaagccgctgaggacgacgaggacatcgggaggataatctgcgactgcatcggcgacgacttctcc

SEQ ID NO: 302710 - DNA, 122 bp, Zea mays
cccacgcgtccggcttcaatcggtggtgggtcaccattgaggaaaattactgatgagcaggcaaatgctttgaagattgctctggaaaagaaaaaattgaacgcaaatatatatgttgggat

SEQ ID NO: 302711 - DNA, 317 bp, Zea mays
  unsure (1)..(317): unsure at all n locations
ggcagagaagaagtcgccgtgctcaaggctcagccgcagttcctcaatgactggaaggccaagctctggtcacggttcttctgcctctcggtacatggtcacatacaccgagacgcagaagaaccgtgaccagagcttggccttctgcctctcggtgtatgtgaccatgtacctgaatgactgccaacgcactgcattctatgagggaattggtctggacatcaaagaattcgacatgcatgtgatcatcgagaccaaccgcacaacggcgaggatcttccctgctgtcctagaccccgaganacccgagttcaaga

SEQ ID NO: 302712 - DNA, 269 bp, Zea mays
ggctctcttgagcgttataaggtcacttgatcacccgtggcttccagcaggaacattattgtgactacgatgatacttttgcgatgttgctcaaatgaccactgttcacactcttcttgatgtgacctctgttcgtgagtggtctatctctaaacttgatgtcaataatgtcttccttaatggtgaactgcatgaagaggtctacatgcatccaccacctggttattatgtcactgtgggcatggtttgtcgcctatgatgctcccttt

SEQ ID NO: 302713 - DNA, 99 bp, Zea mays
gacattttcattacagacggagcaaatcctggggtccacatgatgatgcaattactgattaggaatgagaaagatggcattctgtgcccaattcctcag

SEQ ID NO: 302714 - DNA, 332 bp, Zea mays
gtactatttgctctgaaatgctgaatgcctctgatgtgcatcgccaccctgtcttggatgttgttgtttgtggatcatgcagatttcttgtgatagagaagaatcgccttgaggatcctgtatctggtagttattgcacttggtgtgcacaaagtgaactgattcaaagttgtagttcttgtaagcttcttttctgtacaaattgcttgtcaaggaatttaggtgaagaatgcttatcagaagctaaagccactggttggcagtgttgctgctgtgtacccagtcaactagagctcttaatttctgaatgtgacaaggccctcagtggtgtg

SEQ ID NO: 302715 - DNA, 327 bp, Zea mays
agcaatagcctgcaaagctctgtcagtaacagcctttgaacctaggctggtgtgatgatgttacagataagggagtgaccagcttagcgtcaggatgccctgatctcagagccgtagacttgtgcggttgtgttcttataacagatgagagtgtggttgctcttgccaacggatgtccgcacctgcgctcgctgggcctctacttctgccagaacatcacggaccgcgccatgtactccctcgcaaacagccgcgtgaagagcaagcgtgggaggtgggatgcagtgaaagacgggctcgcgaacctcaacatcagccagtgcaccg

SEQ ID NO: 302716 - DNA, 318 bp, Zea mays
gccatcgacacgatcgcgagcgcaacacgtacgttgtcggaagctcaagttagaagaagcaccagtgcctgatcgatggcggcccaggctctcctctccggccggcagctgctgggccgccccgtgcagtcggccgtctctaggtcgtcggcgaggaaggcgcccttcgtcgtcagggccagctccagccctccagccaagcaaggtgccgacaggcagctgtggttcgcgtccaagcagtccctctcctacctcgatggcacgctgcccggcgactatggcttcgacccgctgggcctctcggacccggagggcacc

SEQ ID NO: 302717 - DNA, 266 bp, Zea mays
cccgcctcctagccgctcaggttctgttcgtggacgggaagttggacgaggcgatcgcagcattcgaggagcttgcgcgggaggaccccgccgactatcgccctctgttctgccagggcgtgctgtacctcgcccttggaagggaggcggaatcagagtccatgctcgagcgactgcgcgaggtcggcggcgacgcgctaatcgtagatccgtcactgatgataacgccgaccgtggagacggaattcgatggggagacaccggag

SEQ ID NO: 302718 - DNA, 251 bp, Zea mays
ataattttgaatgtaatatataagctgtttataattcaactctttacgatgcatgaaactttacgtacataccgttttttagccttcggcgaaaaccttccctatttttcatgcttcgtgaagaatatccaaattccgtaaaaatatacagtttccgaaaaaacattatgctttgtgaacaatggatctccttttcatatcagagtgacgaagctgtatttcttgaaaacttattttgtgccttggcactt

SEQ ID NO: 302719 - DNA, 333 bp, Zea mays
ctcgcctcgggcatcaccgttggagtcatgcttgtgccccaggcaatgtcatatgcaaagctggctgggctgcacccaatttatgggctctacacaagctttgtcccgttatttatatatgcaatatttggctcgtcacgacaactagcagtaggtccagtggcacttgtttctcttcttgtatccaatgttcttgggggtatagttaattcatctagtaagctgtacacagaattagccatattactggcattcatggttgggatattggagtgcttgatgggactgctaaggcttggttggctcattcgtttcattagccattctgtaata

SEQ ID NO: 302720 - DNA, 267 bp, Zea mays
  unsure (1)..(267): unsure at all n locations
tccactcgtcctactccctcctctcctctcccgtcctatccatcctgcacgctcagcatccatccactcctcccctgctccggctcctgctcctgctccgccattggcctttcaacagtttactccccgtccggaccgctcctcgttccggcccctctcggccgctgccgctctgcccagccccgctgcccgctccgagccccgctcgctaccgtccggagctccgtcgacgccaccaagcaggctcatgatgtcgnggcgactgcg

SEQ ID NO: 302721 - DNA, 308 bp, Zea mays
cgccgtgtgccgtgcagcagcttcttgagcgcctgctcccgctgcaggaaggagctcagcggcaaggacgacgtgttcatgtacagaggcgaccaggggttctgcagcgaggagtgccggtgtgagcagatcttggtagacgaggcgagggagcgtgaagccatgttcggcgggaagcagcgcatgcgccgtgggttgcctcgccgtctccaccacgggccacggtcggcgatgggggcgatcggcggtggtgcgtcgaggaggctagttgcgacagcctactaggatctagcatctgtctgtcgtct

SEQ ID NO: 302722 - DNA, 308 bp, Zea mays
cactcctaaacccagaacccagcccgccgcaaccctagccgccgccgcgcgcaggttgcagcaggcggtcggggcgggcgcgggtggcgccgcgagggaggagctgcggcaggcggtggtgaacacgctggagcggaagctgttctacataccttccttcaagatctaccgcggtgtcgcggggctctacgactacgggccgcccgggtgccgcgttaaggccaacgtgctttccttctggcgccacactttgttttggaagagaacatgttggaggttgactgcccctgtgtgacgcctgaggttgt

SEQ ID NO: 302723 - DNA, 304 bp, Zea mays
agaaaaaaatgtggcaggattttaactacggcgtcgagtttatgctgctggtgtctttcttgaagactgcgtctagagaggcaacggaggacgcattagcgtctcttgacaagttgatcagccaatgcagcggcttctattgtgcaggcaacatgtggctgctgtttggatcgtccggataacgagtacagtcatgctgcagtaatccgtttcccatcatggagagcgaggagtacaaggatatgtgggcgtccaagttccgcccgatcgtggagagatccctgcacctgcacttcaccgttga

SEQ ID NO: 302724 - DNA, 303 bp, Zea mays
  unsure (1)..(303): unsure at all n locations
ctcctatgaagagcttctcgccaactggcacactactaaccatgtcctccaggccttcccagaactccctctttgagttctcattaaggcctacttgaggagcatacgcgctgataacattgagaaccaagtccccaatgaccagctttttctgctgtaatacacgcatgttccattacaagctttagaagcacatttctatcttcatttgatttaaagtaacatgggtcaaatcctgcgtactnagctgttctagatttagccctcttattgatcatctgttctagcttgttcactgttctt

SEQ ID NO: 302725 - DNA, 298 bp, Zea mays
cttgcaggaacacagttgctaagcaccacagtgggcgtgaaagagtatgtgcaaagcgaatttgatagtgttcaagcagagatcataagcacaaataaggacctgttcccaggtagcataacatttgatgatttcctatgggcatttggaatgctcagatcaagggtgtttccagagctccgcggagataagcttgctctcataccatttgctgatttggtaatatgcaatacatattggcgttttccagattctaatcccacttgctacgattcttcttattgttgttaaatggtcc

SEQ ID NO: 302726 - DNA, 288 bp, Zea mays
tatcagcctcatccccttgcccacttctacagctcctcttctgcagcaagatggatagatgctagctcttatagcttgttagccatggccacctctgcctcgtctagcctcctcaagtcctccttcgctggctccctgctcccggccgccacgctgactacaccggcttcccccgttgtggccacctgctcgcgctgcgccggcgtggggcccatctgctcgtccatgtccatgtcctcctccaacccgccctacgacctgactgccttccggttcagccccatcaag

SEQ ID NO: 302727 - DNA, 300 bp, Zea mays
cgcaagacactgccgtttggcatctgcacctgccgcctcgtctctgggccacggcctacttcgaggggacgaggtacggtcatctgacggcgagcatcacggagtcgctgagctcttggatattggacgccgctggcctccctgtgacccagatgatggagtgcatcctgcgccagcagatgacctggttcaacgagctgcgtgatgcgagcatgcagtggagcacgatcctggtgcccgccgccgagcgccgcgttcaggaggccatcgagcgcgcgcgctggtaccatgtggcccggg

SEQ ID NO: 302728 - DNA, 296 bp, Zea mays
cggacgcgtgggcgtgacgcgtgggccccacgcccccacggaagtttcggcggcgccggcgtgctcgtgatctcaaccaaggcgtgcctccgctccggtcacccgtctccacgcaaccatgtcgagaaggaagaccagggagcccaaggaggagaacgtcactcttggacccactgtccgtgaaggagagtatgtctttggtgtcgctcacatctttgcatccttcaatgacaccttcattcatatcactgatttgtctgggagggaaactctggttcggatcaccggtggcatga

SEQ ID NO: 302729 - DNA, 313 bp, Zea mays
cccacgcgtccgagcacaacgaacaaccatattatcagctagcttgacgtcaatcctcacagtccaacagctctcaactggaattacagggattgatagtttggtttcaagttctttacctattggataccaggctggaaaatttaccaaaagatacctgactgaaaacttcaatgttcctctctctcgactggtaccgctgaattcgatccaggaatatgctgatgcccttaaccgcggaccaaaaaatggcggtgttgctgcaattgttgatgagaagccatacattgatatcttcctgtcaaactactgc

SEQ ID NO: 302730 - DNA, 331 bp, Zea mays
atctcgtggaaggggtatccaagttgagccacctcagcaaacttgctcgtgacaacaacacggcaagcaggacagttgaagcagatcgcttgcatacgatgctcctcgcaatggcggatgcgcgcgctgttctaataaagcttgcggatcggctgcataacatggagaccttagaagctttgccttgtgccaaacaagaaagattcgccaaggaaacaatggagattttcgtgcctctagctaaccggctaggggttgctagctggaaagaccagctggagaatctctgtttcaagtatctgaatccggaagagcacgaggagttgtcgtc

SEQ ID NO: 302731 - DNA, 303 bp, Zea mays
ccacgcgtccgactagttctagatcgccaccagactgccttctttttttttttttttttgttttttttttttttttaagaccagcaagatttcctgttccatcaaaatcagtttaggcaaacgacattacgacgagtgcagaccaccactcgtcagaatctagagagattgaaaaaaaagggttcttttctgcttttggtgctcccacgacaaaatcacctgagtagctctcgagcaaacacgaccatacatttattgcgaccgtacaaacattgtaacaaaaggcagcagcgagctagtata

SEQ ID NO: 302732 - DNA, 316 bp, Zea mays
atggggccggaaatgatagagcaggatggatggtaggaaaaggaaggggaaattcaggaattctctcaggcgtatggctatggagtgcctgtgctctggtgagcagttgaaggcgtcagatgagaccatgcggtcatctgattctacgatcacaaaggatttctcggccagtgggtactcttctcggaatggagagattgagcagtaccttgataatggcaacatagaggaagccgagttgtcgctccgggagggcatttgcctaaattatgaggaagcaagggcattgctaggaaggctagaatatcaacggggg

SEQ ID NO: 302733 - DNA, 303 bp, Zea mays
cccacgcgtccgtgaagaaaggggacaagatatgttttatggccaatggaaaggaatatgttgctgaagaaattggtgtactatccccaaatcagatgcaagtttctgaactatatgctggcgaggttggttatctctctgcttctataagatcagtagcagatgccagggttggtgatactattacacattattcaaaaaaagcacatcatgctttaccaggatattctgaagccactccaatggttttttgtggcttgttccctatagatgctgatcagtttgaggagttgcgggaagcgc

SEQ ID NO: 302734 - DNA, 297 bp, Zea mays
atcaatttggcacagacagttttacatctatgtcctctccatgccatctcactagttcgttcctagagcagtctgaagttaccattccatctaactacgaccctctttttttgttatgtttcattttgaacaggtggttggaactctaggctacacagctccagaatacatgcagactggacacctcacggcgaagagcgacatatggagctacggagtcgtcctgtacgagctcatcacaggccgccgccccatcgaccagaaccgtccaaagagcgagcagaagcttctggactg

SEQ ID NO: 302735 - DNA, 290 bp, Zea mays
cccacgcgtccggcgacgctgtcgtccgctgatcgacctagtccgcagcaccggcgccacccacctctttttcaaccgactctacgacccgctatcgctggtccgggaccaccgcgtgaaggagcagctgtcggcggagggcatcactgtgcagtccttcaacgccgatctgctgtacgagccgtgggaggtcctcgacgacgacggcttccccttcaccatgttcgcgccattctggaacaggtgcctgtgcatgccggaccctgccgcaccactgctgccgcccaaga

SEQ ID NO: 302736 - DNA, 316 bp, Zea mays
tccacgcgtccgcccacgcgtccgcacacgcgtccgcggacgcgtgggtgaaaatcttactctgctagatctcagccagaataatctgaccggtgctattccagataacttcacgagtctctccaagcttgagactttgctcctttctggcaacaaattgattggggaaataccatcgagtctgtctaatgtgacaacactgtctaggtttgcagctaaccagaacggtttaactggacccatccatagctggattaccaagcatatagggatgttggatttgagttacaacaagctgaatgggacaatcccctca

SEQ ID NO: 302737 - DNA, 305 bp, Zea mays
atcaaagaaggaattacagagtgtctcaaagagtgggggataaaagagaagatgtttactatcacattagataatgtttctaacaatctgtcagtgcgtgaccttcttctagaaagtgggcgttcgaacatgttatttggaggcgagcatcttcatgtccaatgttgtgcacacatattgattctcttagttcaagatggaatggcaattgctcatggagcaatatataagattcgtgagctggtcagacatataaattcctcaccctcctgcatacaagcttttaatgggattgctgagaagtc

SEQ ID NO: 302738 - DNA, 307 bp, Zea mays
cccacgcgtccgcccacgcgtccgccaatggtggcgcgtggttggcgactgctgttctagtgacaaacatgaggaacttcccagtcagcagaggtgctgttgctggcattctgaaagggtactcgggtttaagtgctgctgtttacaccgaaatatacactggagtgctccgtgattcacccatcaaccttttgctctttcttactctcggaattcctgctgtgtgccttctggcaatgtactttgttcagccttgtgaaccctctctggtggagacgaatgcagagcaagtccattttatgtttgc

SEQ ID NO: 302739 - DNA, 310 bp, Zea mays
cctttgggtgcttatgaagaggataaccttatctatcctcatgtctccaaaaaaactcatagagaggaagtgctggtacaaccacgtgcatttgttcttgaaataggaacagaagagttgccaccccgtgacgtcgtagaagcaactgaacagcttgagaaatctctagttaatacattggagaaacgtagattgacccatgggaaagtgcacacttacgggacaccaaggagattggcgattgttgttgaaaatcttagtatgaagcaaacagaggtagaggtggaactacgtggcccaccagttgcga

SEQ ID NO: 302740 - DNA, 310 bp, Zea mays
atccgcccacgcgtccggaacgccgacggcccggcagtggcgcccgtggtggtgttcgtcaactcgcgcactgcgggcgccacgggcccgagctcaaggtgcggctgcacgagctcatcaccgaggagcaggtctttgatgttagcgttgtaaagccttcagattttgttcaccatggtttgagttgtttggagaggttagctgaccaaggcgataaccgtgcgaaggctgttcgtgagaagatgaggattgtggttgctgggggtgatggtacagttggttgggtgcttggatgtctctcagatcttta

SEQ ID NO: 302741 - DNA, 311 bp, Zea mays
ggaggagatcgtgcgcggcgccgaggccgtcgggttcgaggcggtggtgtcggaggggacgcacgacgtggcgcccttcgcggagctggccaacggctgcgacgccatcatgggcgtgcacggcgccgggctgaccaacatggtgttcctgcccacgggcggggtggtcatccaggtggtgccgctgggagggctggagttcgtggccggatacttccgaggcccgtccgtggacatggggctgcgctacctcgagtaccggatcgagccggaggagagcacgctggtggaccagtacccgcgcgaccacc

SEQ ID NO: 302742 - DNA, 310 bp, Zea mays
cggacgcgtgggtattgctagcattgttgattattatcaatggaaaagggtgactgctatattcgttgatgatgattatgggcgaggtggtgtagaagccctcggatgatgcgcttgcattaaagagggcaaagatttcatataaagcagctattcctccaaattcaaatacagacgtgatcaacgatgtactatttaaagcaaatatgatggaatcaagggtcatgattgtgcatgtcaatcctgacacagggatgaggattttttctgtagctaagaacctccaaatgatggccagtggctatgtctg

SEQ ID NO: 302743 - DNA, 309 bp, Zea mays
gacacgatcgcgagcgcacgcacgtaagcacgttgtcggaagctcaagttagaagaagcaccagtgcctgatcgatggcggcccaggctctcctctccggccggcagctgctgggccgccccgtgcagtcggccgtctctaggtcgtcggcgaggaagggcgccttcgtcgtcagggccagctccagccctccagccaagcaaggtgccgacaggcagctgtggttcgcgtccaagcagtccctctcctacctcgatggcacgctgcccggcgactatggcttcgacccgctgggcctctcggacccgg

SEQ ID NO: 302744 - DNA, 325 bp, Zea mays
cggacggtgggcggacgcgtgggttttttttttttttttttttgtttttttttttgtgtattttttttgttttttcgcttccagtgtctcattatcagcatcttatttgttactcagagggaggatagggtagccgctgcaaactagaccttgtgaacacacgctattgacctctaaaccaccttaacagaatctcaaaattcacgcctgggctttgattctgcaaccgtgactcgggtctgtctaccatccaggtctatgccatcaaggtttgatatggcattgttgacctcctcggcagagccataggtgacgaaaccaaacc

SEQ ID NO: 302745 - DNA, 316 bp, Zea mays
gcgagccatcgacacgatcgcgagcgcaacacgtacgttgtcggaagctcaagttagaagaagcaccagtgcctgatcgatggcggcccaggctctcctctccggccggcagctgctgggccgccccgtgcagtcggccgtctctaggtcgtcggcgaggaaggcgcccttcgtcgtcagggccagctccagccctccagccaagcaaggtgccgacaggcagctgtggttcgcgtccaagcagtccctctcctacctcgatggcacgctgcccggcgactatggcttcgacccgctgggcctctcggacccggag

SEQ ID NO: 302746 - DNA, 307 bp, Zea mays
cacacgcgtccgcccacgcgtccgcccacgcgtccgcacacctcacctacagactgctgtgtctcttgtgttgtgcatcgacactattattcagggttaggacatggcaatactggtcattaccatggtgcacgtgccgtgctgcaactgcagagccagcatcagccaagatcctggaaagccacaaagaggagttttgcatggagaagattgaattcgaggagaaggtcaacaaggtgattgtacgcgggcagttcgacggcgagaagctccagaaggcggtactagacaagggcggcgagaccgt

SEQ ID NO: 302747 - DNA, 332 bp, Zea mays
ggaatctcctcccccgcagccgccgcccgaccgtgcgccaacgatacatccttctccctcctccgatccggcctttttgatccccggatcccgtacaatatgcttcccctctcgctcctcaagaccgcccaggggcaccccatgctcgtggagctgaagaatggtgagacatacaacgggcatctggtcaattgcgacacgtggatgaacatccatcttagggaggttatttgcacctcaaaggtgaaaaatctggtgcccttgattcacattgtgaaaggctctagttagcaaaagattagttaagtgcactgtctgatttttgggtgaat

SEQ ID NO: 302748 - DNA, 319 bp, Zea mays
gccaaaccatcctcctctccgccgcccgccgcagcagcacccaccgggcaagatgaagacgatcctggcgtcggagacgatggacatcccggagggcgtcatggtcacggtggccgccaagctggtcacggtggagggcccccgcggcaagctcacccgcaacttcaagcacctcaacctcgacttccagctgcaggaggccggccgcaagctcaaggtggacgcctggttcggcacccgccgcaccatggccgccatccgcaccgccatctcccacgtccagaacctcatcaagggggtcaccaagggctaccgctac

SEQ ID NO: 302749 - DNA, 152 bp, Zea mays
ggcggtttttcaagccaaccgccagtgaactatgtgttataaataccactctttctcccccgacaggagctatacgctcgcagccaacttccattggaggcgattttggaggtccagatttcacaaaatacaagggagaggttttggtcttc

SEQ ID NO: 302750 - DNA, 314 bp, Zea mays
cttaaagtgcaaaacatgtttcctctaccaatcgacgacaagctactcccacagcttttggtggccagaagctgccagaagccgaaacaaacagcccctatgcatgcaatcacgtcaccaacatgtaatgtgcagggtgtttatctctgtgggtataattctgaagactcatatggggcaacatcgtacctggtaattcatccacaaggaaacatactgattgacagcccaaggtatactccaaagctggccaacaatattgaaaagcttggtggagcgcgctacatgtttttgacccacattgatgacgtagc

SEQ ID NO: 302751 - DNA, 307 bp, Zea mays
cgaccgtcgctcaccgggaagctacgctacgacgaagcatggcgtccgtcaccgcccgcgccccggtcgcggccctgcgcccgtcggcgtctctcaagtcgtcgtcgtcgtcggcggcggccttccttggccgggatgctgatcccggaggtgctgaccaaggccgggctgatcaacgcgccgcagtggtacgacgccggcaagtcggagtacttcgcgtcgtcgtcgacgctgttcgtgatcgagttcatcctgtttcactacgtggagatccggcggtggcaggacatcaagaaccccggcagcg

SEQ ID NO: 302752 - DNA, 317 bp, Zea mays
ctcgactccatccaggtccatctcgccaacgtggagtccaagttcgccggagccctgtccgacgcgggccacatctgcgtggagggcaaggtcagggacggcggcgcgtcgcacctcacgctcgtcgggtccttgagcgtcgacgttagccttgagggcaacctgatactgtgcggccagctcgaccacccgggcatcattgggagagtggggtcgatcctgggaaagatgaacgtgaacgtgagctttatgagcgtcagtaggactgctcccgggaagcaggcgataatggccattggagtcgacgaggagcctgg

SEQ ID NO: 302753 - DNA, 317 bp, Zea mays
agcaagcaagcaagcagcgagtacatacatactaggcagccaggcagccatggcgcccaccgtgatgatggcctcgtcggccaccgccgtcgctccgttccaggggctcaagtccaccgccagcctccccgtcgcccgccgctcctccagaagcctcggcaacgtcagcaacggcggaaggatccggtgcatgcaggtgtggccggcctacggcaacaagaagttcgagacgctgtcgtacctgccgccgctgtcgacggacgacctgctgaagcaggtggactacctgctgcgcaacggctggataccctgcctcg

SEQ ID NO: 302754 - DNA, 303 bp, Zea mays
gtggttttgcagcttccagagcttgagattgagaccagcgcggcagttctttcttggtcgatggcgctgaggaggatcatcaaggagctcaaggacctgcagagggatccacccacgtcctgcagcgcaggcctgtgtccgacgacatgttccactggcaagcgacgatcatggggcccagcgacagccctactcggggggcgtgttcctggtcgccatccacttccctccggactacccgttcaagcctcccaaggtgcgtgcgcctgcctgcctgatactctcatctcatggctcgctcga

SEQ ID NO: 302755 - DNA, 303 bp, Zea mays
cgaagattcgttctacttcttcaatgagatgcagaaggaccacgtccagcctagcgtggttaccatgtctgtgttgctgcgggcttgcgcagggctggctttgctggcgaaagggaaggagctgcattgcttcgcactgcgaagaagagcgtatgaccacgacatggttgttgcaacagccctaatcgacatgtactccaagtcaggaaacctggcaagtgcaacgcggatattcgaaaggattcaggaggagaagaatttggtgtcctggaatgcgatgctcaccgggctggcagcacatgg

SEQ ID NO: 302756 - DNA, 312 bp, Zea mays
ggagatcaaatactcgaagtctcaaggaaatggcattgcttttacgtggtggttcacagttaatttggattgcaccgagtggtggtagagaccgcccaaatccctcatcaggagaatggtacccggcaccattcgattcatctgcagtggacaatatgaggaggcttctggagcatgctggtgttcctgggcacatatatccactatcattgctgtgctatgaggttatgcctccaccacaacaggttgagaaggagattggtgagcagagggtgatatccttccatggagcaggcttgtcagtaactgaag

SEQ ID NO: 302757 - DNA, 325 bp, Zea mays
tgggcaagacccatgctggcgacgagccatggaggaggaactgcgcgccatagaggacaaccacacctggacactcactgagttgccatctgggcagcgagccatttggctcaagtgggtattcaaagtcaagaaggatgaacacggtgccgtggtacggcacaaggcacggctcgtcgcaaaaggctacgctcagcgccaaggaatcgactacgacgaggtgtttgcaccggtcgctcgcttggaagcggtacggctgctgctggcgttggcggcgcaggagggatggcaagtccatcacatggacgtcaagacagcgttcttg

SEQ ID NO: 302758 - DNA, 325 bp, Zea mays
cagctattaaatcagtatttggacaagaggtccaacagcaggatgcagcgaacaaattagagcaactcagagaaaggatggtcaaagtaagagagcttttccgcgacacggaatcaacagagtttataatcgtgacaatcccaacggtgatggcaatcagtgagtcatcaagactgcattcttcgttgcaaaaggaaagtgttcctgtaaggagactcattgtgaaccaagttctgccaccttcaacatcggactgtaaattctgttctataaaaagaaaggatcaaacgcgtgcattggatatgatacggactgacccagagtt

SEQ ID NO: 302759 - DNA, 313 bp, Zea mays
cgacacgatcgcgagcgcacgcacgtaagcacgttgtcggaagctcaagttagaagaagcaccagtgcctgatcgatggcggcccaggctctcctctccggccggcagctgctggggccgccccgtgcagtcggccgtctctaggtcgtcggcgaggaaggcgcccttcgtcgtcagggccagctccagccctccagccaagcaaggtgccgacaggcagctgtggttcgcgtccaagcagtccctctcctacctcgatggcacgctgcccggcgactatggcttcgacccgctgggcctctcggacccggag

SEQ ID NO: 302760 - DNA, 318 bp, Zea mays
cccacgcgtccggctgatcccacactgcaacaagactgacaaagcatctatactagacgagacgattgagtacctgaagtccctccaaatgcaagttcagatcatgtggatgacttctgggatggtgccaatggtgtttcctggtgctcaccaatacatgccaccaatggctctaggcatgaattcaggttgcatccctgcagcacaaggcctaagtcagatgcgaagattaccatacatgaaccaccccatgccaaatcatatccctctgaactcgtctccagctatgaatccaatgaatccactgaacactgtgaa

SEQ ID NO: 302761 - DNA, 306 bp, Zea mays
tggtgctagcgcgcaacgtgcgctcccgcctccgcccaccgctcgccgcctccgcgggtgtctcgtcggccgcggcgcaggcggagagggcgatacgggacgggccgcggaacgagtggagcaggcccggggtggaggccgtctacgactcaccggtggtcgaggtggtgtttgacggggctcaggtgcacagaagtgtccatagattcagagaagtgcaacaatggagagttgtttgagtcaagagtggtggatgcagtggagattgttgttagtgtcgtgagtcatgaagatacaacagtggat

SEQ ID NO: 302762 - DNA, 318 bp, Zea mays
ggcagcgacacgatcgcgagcgcacgcacgtaagcacgttgtcggaagctcaagttagaagaagcaccagtgcctgatcgatggcggcccaggctctcctctccggccggcagctgctgggccgccccgtgcagtcggccgtctctaggtcgtcggcgaggaaggcgcccttcgtcgtcagggccagctccagccctccagccaagcaaggtgccgacaggacgctgtggttcgcgtccaagcagtccctctcctacctcgatggcacgctgcccggcgactatggcttcgacccgctgggcctctcggacccggagg

SEQ ID NO: 302763 - DNA, 323 bp, Zea mays
cccacgcgtccgaggacgcacacgagctcctcctcccggccttcgcagagttctgcttctccaacttcgcagacaagctgaggcagcacaggtcggtcatggccgcggccgacctcacggccccgcacacctggtaccccttcgcgcgcgctatggccgccgtatcgtgtaccactgcgggcccacgaacagcggcaagacgcacaacgcgctcacccgctttgccgcagccaagtctggggtctactgcagcccgctccgtctcctcgccatggagatcttcgacaaggtcaatgcgctcggtgtctactgcagcctgcgca

SEQ ID NO: 302764 - DNA, 309 bp, Zea mays
gcagctccaagtgccagacgaagctatatcaatgttaatggatatgggctatgaagcacggtctgcaaaaagggcattgaagatgactggctatgatattcaatcatcagtcgaactgttatgtgaggagcgtgaaaagaaacttcgtagaagagaggaggatcgagtgatgcaaagagagattctgaaacaaatggcatatggtaaaactcccatgaacaaggcagttgacatgcagaagctgaaaggcttgactgctatcggatttgagaagtatcttgctgcagaagcactgcgcataaatgaaaa

SEQ ID NO: 302765 - DNA, 302 bp, Zea mays
cttcacactcctcgccatcacataaaaccagtgcaagcagaagcagcgcaatggcgagcagcaccatggccgtgtggttcaaggccgggtcgcagatcttcagcgagggtgggctggactacctcggcaacccgagcctgatccacgcgcagagcatcctcgccatctgggcctgccaggtcgtgctcatgggcgccatcgaggggtaccgcgtcgccggcggcccgctcggagaggtcgtcgacccgctctaccccggcggcagcttcgacccgctcggcctcgccgacgaccccgaggcc

SEQ ID NO: 302766 - DNA, 299 bp, Zea mays
gtctccgagacgcgtacgagcgcctcaggaagaggggggtcccgctcgcctccaaccaggtgaactacagcctgatataccggaacccggaggagaacggggtgaaggcggcctgcgacgagctcggcgtcactctgatcgcgtactccccgatcgcccaaggtgctctgacgggaaagtacacgccggagagtcctcctaaaggccctcgaggacggatatacacgccggagttcctgacgaagctccagccacttatcaaccggatcaaggagatcggaggaagctacgggaggact

SEQ ID NO: 302767 - DNA, 292 bp, Zea mays
cccacgcgtccgcccacgcgtccgcccacgcgtccggccatgcacaggccaagtgtagctccctcgttgcagttgcagctccgcccgtgcccgagatggccgcaccggaagcactgcccaccgtcctccgtggcaagccggagggttgcttgctcggcctcggcggccgacgccgacgtggtcgacctcttcgacgccgctaagctaactgcggacaagttcgtgacgagcggcatggtggtggggctcgggtccggccctgcgtccgccctggccatccagtacctcggca

SEQ ID NO: 302768 - DNA, 307 bp, Zea mays
gcgagccatcgacacgatcgcgagcgcaacacgtacgttgtcggaagctcaagttagaagaagcaccagtgcctgatcgatggcggcccaggctctcctctccggccggcagctgctgggccgccccgtgcagtcggccgtctctaggtcgtcggcgaggaaggcgcccttcgtcgtcagggccagctccagccctccagccaagcaaggtgccgacaggcagctgtggttcgcgtccaagcagtccctctcctacctcgatggcacgctgcccggcgactatggcttcgacccgctgggcctctcg

SEQ ID NO: 302769 - DNA, 306 bp, Zea mays
ggatgaaatggctgcgccccagcacgtccgcgccgctcccctcgcacgcgcgctccggcgtaccgccaccgccaccgccaccgccaccgcctccgtccccgtacccgttcccgtccccgccggcatcaagtctcaggggacttcccgccgcgcactgctcggcctatcggagcctcagctccgccagcttgccatcgatctcggccagcaaagctaccggggcaagcagctgcacgacctcctctacaaatcaagagccaagcaaatccaagaattcaaccacgtgcccaaggcgttccgggaggc

SEQ ID NO: 302770 - DNA, 303 bp, Zea mays
ctttttcttccttaattgtaagaccacatgatctataaaggtcatatttacatgtgttgtttagataaatggatatgttctacttgtaaatatgacctttatagatcatgtggtcttaccgacaaggacgtcaggaacttccaggtcctcaaagagatgtacaacgagtggccattcttcagggtcaccctggacctgctggagatggttttcgccaagggagaccccggcattgccggcttgtatgacgagctgcttgtggcggaagaactcaagccctttgggaagcagctcagggacaaa

SEQ ID NO: 302771 - DNA, 299 bp, Zea mays
ggccgtggaagtgagcgaggaggcccgatgcttcatggctatggcggaggagacgatggagctcacgctgacggtgtgggacttcctgccgccactggcgcggtggctggacgtcgacgcggtgggccgccggttgcagcgactgcaagcaaacaggacggagtttttgcagaggttgatcgaggaacacaaggagatggagaagggcggtcaagtcacacgcaggacgttggtcggggtgatgctggagctgcaggacaaggatcccgaagcctacacggatcagctcatccgctcca

SEQ ID NO: 302772 - DNA, 308 bp, Zea mays
cacttatcggcgccaccatcgttactacattctccgggccattatcagactcgattggccgacgccctatgcttattctctcctcaattctgtagttcttcagcggcctcatcatgctatggtctcctaatgtctatgtcctgctgttggcacgcttcgtagatggatttggtattggcttggctgtcacgcttgtgcctttgtacatttcagaaatagccccttcggagattagaggtttgctgaatacactaccacgattcagtggatcaggaggaatgttcttgtcatactgcatggtgtttggg

SEQ ID NO: 302773 - DNA, 309 bp, Zea mays
ggccgccctgttcttttttttttttttttttttttttttttttttagtttctctaaaaggtcttccatccatttaaatactttaaataactagtttaacaaaactaaaatatgtacaatatatttgagagtatgacaaatacatatgtacaaaaaaataaaaaatgtctttaatataggtattttcatatagaggacgtgatttagaggacgttatgctgcagacaacgtcaacctccttcggtcgtgcccttcgttggcccagtattgcgagccccactggcctgctgcggcccagcgccctgcacgt

SEQ ID NO: 302774 - DNA, 311 bp, Zea mays
cccacgcgtccgcccacgcgtccgcccacgcgtccgcccacgcgtccgctcgtctccatcagcatcctcgtaaggaaaatagacctcttgaacaaataatagatgcaagcacacaaaggaaacacgagtctccaacactgcaacatgaaaatccaatgttgccgcacctgcatagtcatcatccacctccaatacccctgcttgacccatacagaagtggacctcagtatcctgttagtgaaactgaagagttttctatcaggatcctatgtgcttctgagctcattggttcagttattgggaaaagtggg

SEQ ID NO: 302775 - DNA, 304 bp, Zea mays
  unsure (1)..(304): unsure at all n locations
atcagcagcgcgcgtccactgccaccgcctgcctgccgccgccgaatacctcccatggcgccgccaccaggctgtacgtcagcggtctttcgttccgcacaaccgaacggagcctccgggacgcgttcgagaagtttggtgaccttacggaagtttgtctcgtgatggatagagtagcgaacangccgagaggtttcgctttcctttcttacaccggggaggaggaagccaggggcgccatggaagggatgcacgggaagttcctggatggcagagtgatctttgtcgaggttgcgaaaacgag

SEQ ID NO: 302776 - DNA, 148 bp, Zea mays
gtctaagtgctggaaacaatacattagtctctaaaacaatgtactaagtctgagacacaatacattagtctctaaaacaatgtactaagtctgagaaacatacctttattcttgatttgtactttgtcttagagactaatgtattgtg

SEQ ID NO: 302777 - DNA, 325 bp, Zea mays
gcgccctcgccatggaaagggagctcgcgtccatgtgggtgctcagcttcgtcgtgccgccggaccatgaaacactggacttcaagttcttgctgaagcccaaagacgctgaaaccccgtgcatcatcgaggaaggacccacacggctcctcaccggaggcatgctagagggtgatgtgagggttgcactgttcaagctcaatggagatgatgaggtgctcgagtttggggtggtcaacaaggcggaccttgtatcaccgcttgaacttgctgcaagctggagggtgtacaaggagaactttcagccttccaaagttcgggggat

SEQ ID NO: 302778 - DNA, 321 bp, Zea mays
gattgccgctgaggagctcccgaaggactttactgccttggcgttcgattgaccatggaatggttcaagaatcctgaccttcagaggaagttttcagataggagcccagcagcgcagagcaatctaagggataacggcctttatcatttctgtgtcttctcagacaacatccttgctgtttcagttgttgttaattctacggctataaactcgaggcaccctgacaaggttgtttttcacctagtgactgatgatttgaactatgctccgatgaaggcgtggtttgccatgaataactacagaggggtcactgtggagata

SEQ ID NO: 302779 - DNA, 276 bp, Zea mays
cccacgcgtccgcgcacgcgtccgcccacgcgtccgcccacgcgtccgggacgtgggtgcgtcgtgacaatgcatcatcttctaattcgtcattgcatgtttcacagacttcaggattaccccctaaactgccattaaaaaagaacagcaaaagtcaaaactcttatatccgcaagggtaatgccctcattagaaatccagccaatggaaataatcagcgtcattcgtcttccagtctagattctcaaaataagttgagtaagccggttatgagga

SEQ ID NO: 302780 - DNA, 315 bp, Zea mays
gccgccctttttttttttttttttctttttttctttttttttttttttttttttttttttttttttttttttttttgggaagcaaaacaaataaggccttgttcgcttattcccaatacacatggattgaatgggtttggaaaaaattatgaagaagtttgacttgcgtgggattcaaacccatccaatcccactcaatccacatggattgaaggctaaccaaacaagccctaagcagatcctcctgacaacggatctctacataggttcatttgccaacaaaagaattccagcaatgtctgaggccttcttcat

SEQ ID NO: 302781 - DNA, 271 bp, Zea mays
cccacgcgtccgtgctgggcacgtattcggcgggggcggtcgcgacgatggggaggccacgcggaagaagtacgcagacaccgtggcgcgtatcaactccatggagcccgaggtctccgcgctctcagacgctgatttgcgtgcacgcaccgctgcgctccaggaccgtgctcgctccggggaatccctggattcccttctccccgaagcatttgctgttgtgagggaggcttccaagagagttctaggcctccggccgtttgatgtgcag

SEQ ID NO: 302782 - DNA, 105 bp, Zea mays
agccgacgatataataaagcgcgcgcgtgcacggtgacatgctcgtagactgattgagatggcacaagccatggcgtccatgaccggcctctcgcagggcgttct

SEQ ID NO: 302783 - DNA, 264 bp, Zea mays
atacagcgtccgggacgtggaacagactcagaaatatggtggatgttcgtgatgttgctgatgctcttgttctggcttacgaagatccagaagcatctggacgatacatctgcagctcgcatccattaaaagtttctgatatgataaacatattgaagaccttatatccatcttacccttatcctaaacactttgtggaaacggatggcaacatcacctgcagttctgagaaacttcagaagctagggtggaccttcagggcta

SEQ ID NO: 302784 - DNA, 265 bp, Zea mays
cccacgcgtccgcccacgcgtccgcccacgcgtccgcccacgcgtccgcgcctgctgcacccgcacttccgctacaccatggagatcaacgcgctggccagggaggcgctcatcaacgccgacggcatcatcgaggagtccttctggccgggcaagtacgccgtcgagctcagctccgtggcgtacggcgcgacgtggcagttcgacacggaggcgctgcccaacgacctcatcaagcgcgggctggccgtgctcggggaggacg

SEQ ID NO: 302785 - DNA, 263 bp, Zea mays
gccaaaaggcatcaccgccgcgacgacgacggcagcctcgctccaagccgcggccaccctgatgcagccggccaagatcggcggccgggcgccctttgcctcgctgccgtcccgcccgtcgtcgcaactcgcctgcagggcgttcggcgtcgacgccggcgccgccagcatcacgtgctccctgcaggacgtcgccaccaggtgcgtcgacgccgcgaagtcgccggcttcgcgctcgccacctcggcgctcctcgtctcggg

SEQ ID NO: 302786 - DNA, 295 bp, Zea mays
ctctcctctgccgccatcaccgccccttccttcacggccgcgcccgctcgcgcagtggtcagcaggaggtccttcaccgtgcgtgcctctctccgcaaggccactgccaccgccgccgtggccgttgccgccagcgtcctgcttgccggcggcggcgccatggcccaggaggtgctgctgggcgcaggcgacggcgggctcgtcttcgagcccagccagttcaccgtcaaggccggcgacaccatcaccttcaagaacaacgccggcttcccgcacaacgtcgtgttcgacgaag

SEQ ID NO: 302787 - DNA, 308 bp, Zea mays
tgaacattgatacaggaatgggccttgagcgtatggcacgcattcttcaaaaggttccaaacaactatgagacagacttgattttcccaattatagaaaaggcagctagcatggcgttggtgtcctatgcaaaagctgatgatgccacaaagataaatctcaagataattggagatcacatgagagcagttgtttatctcatatcagatggggtaattccctcaaatatcgggagaggatatgttgttcgaaggctaataagaagagtagttcggatgggtagattgataggaataagaggcgacggg

SEQ ID NO: 302788 - DNA, 310 bp, Zea mays
ctcatcacctacaacagcctgatggacatgtacgccaagtgcagcgagtcgtgggaggccgagaagatactgaaccagctcaagtgctcccagacgatgaagcccgacgtggtgtcctacaacacggtcataaacgggttctgcaagcaggggctggtgaaagatgcccagagggtcctctcggagatggtcgccgacggcatggccccctgcgccgtgacctaccacacgctcgtcgggggttactccagcctggagatgttcagcgaggccagggaggtcatcggctacatggtccagcacggcctca

SEQ ID NO: 302789 - DNA, 302 bp, Zea mays
agaatgcccgcctttcccgtccgcgcctccgcttcgtccagcgtcgtcggtagcctcaccggtacccgccgccccaggctcatcaagaacaccaccgtcatcttcgccaccgccccctccaccctcgtggccatgggcgacgccgtggagcacctcaagagcgggttccagaagttcaagaccgaggtgtatgacaagaagccggagctgttcgagcctctcaaggccggtcaggctcccaagtacatggtgttcgcctgctccgactcccgcgtgtgcccgtcggtgaccctgggcctgca

SEQ ID NO: 302790 - DNA, 274 bp, Zea mays
gtccttaaagagtttcacctaggtgtcgacatgcgtggagtagggtttacagtcggacatgtcagcctgctccagaatgtcgaggacatactagcgctggtgaaggaagaggccttggggctgacgctccatgttgatctcgaggaagtggtggagaggggctaggtccctcatcgcgaactcgcgctgaagggcgacgatcttgtgctgaaggagggaaacactggacggcgtgaccacgatgtcgtaaacgtagagtaggaggtagatgata

SEQ ID NO: 302791 - DNA, 322 bp, Zea mays
atcccgtcgcatcccatcccactaccacccatctcgtcgtccgccgattcgatccggttcttccaacccagggtgagtctccggatccgtcgccgtctggtatccgtgtgctctcgtcgccgtcgccgtcgccgccgtctgactgcccccctcgcctcccgcggcgtcgggtctctggtgctgctgctgctgctgctgctgctgcgtgcagggcagtgatggcgacgaagaggagcgtgggcaccctcggcgaggcggatctgaaggggaagaaggtgttcgtgcgcgccgacctcaacgtcccgctcgacgatgcccagaa

SEQ ID NO: 302792 - DNA, 324 bp, Zea mays
gccgccctttttttttttttttttttttttttttttttttatgtatgcatgtcctcgttcagctgcaattatatattacaaaactatccaagtaatatatatattcacctcctcgatcctatgccggcctcgcgcctagctagcaataacaaagagttgctttctacttgaagaaggagccagtcttcatggcgtcctcgttggcttcaccaagagcagcctcgttgaggtacttgtcagcaagctgcacacgcttgacgttctcctgctccgccaccagcatgtgtccgtactccaagagcttctcgatcgttatcttgggct

SEQ ID NO: 302793 - DNA, 292 bp, Zea mays
cggacgcgtggccggacgcgtgggcggaccgtgggcggaccgtgggtgatgaggtgcggaatcaagattcattttacatcctagttggcattagactagaaggacgacaaattgcatggacctggttgaaggaaaactgggatcacgtgttgaagacatggaaatcgagttcactcatatcagacttcattgagtccattgtcccacggtttacctccgacgagaaagctgtcgaggttaccgagttctttgctggccaagttaagccatcattcgagagagcactgaagca

SEQ ID NO: 302794 - DNA, 291 bp, Zea mays
cgccgaccccgagaccttcgccaagaaccgcgagctggaggtgatccactcccgctgggccatgctcggcgcgctcggctgcgtcttccccgagctgctctcccgcaacggcgtcaagttcggcgaggccgtctggttcaaggccggctcccagatcttcagcgagggcgggctggactacctcggcaaccccagcctgatccacgcgcagagcatcctcgccatctgggcctgccaggtcgtgctcatgggtgccgtcgagggctaccgcattgccggcgggccgctcgg

SEQ ID NO: 302795 - DNA, 280 bp, Zea mays
cccacgcgtccgcccacgcgtccgcccacgcgtccgcgtgaatctgaggctgtaattgaattgattctgggtatttcaagaaaactgcaacttgaacgaaggcatcttgttggaaaatgggctacagatctatgtagaaagaaaaccatgcaaagtcctagaatggcacgagagatgttaaaactagctatacatcttacaccagctccagatgacatgattcttgtttatgaggtgtctactgagttgatgaatttaatgacctctggagatgatggag

SEQ ID NO: 302796 - DNA, 298 bp, Zea mays
cccacgcgtccggtggctgcacactaatccacatggatggattggagtgcagccaaacaagttttctttttacctcaatggctactaacgagctactgatattctcccttcagtcttgcacactccgagttgtccactgtaatctacgataaagtactactgatggcatgggggtttaacaatgtcatcatccttattattggcatcatcgtcttcatatttgccacggttggtgtcctgcttgttatggagaccctgagtgcattccttcacgcactgaggcttcactgggtggagt

SEQ ID NO: 302797 - DNA, 305 bp, Zea mays
caccaacaaaatggggatatcgagatagcttatgttagcaccaaagaacaattaaccgacatctttatcaagtctttagatgagaaaacctttagcaaacttaggaatgagctaaatattcatgattcttggaactttgattgaaacattgcacacatagctcatttatatacctttgatcatatctctttcatgactacgactaatgtaagggaaatggagtttttcggcgaagacaaggcttccactccactctatcggtatcatttaaccttcgccgtcactccacatcactctcacattgg

SEQ ID NO: 302798 - DNA, 294 bp, Zea mays
cccacgcgtccggaggaataatctagcagcttctgttgcatccaaattgtccggagaaaggagttgaagcagtgtgagagggccctgagacgatggcgaacctgttcctcaagcaggcaaagcagtacgtggcgacgcggccggtctacccgccggagctcttcgacttcatcgcctccaagacccctcgccgcgacatggcctgggatgtcggcaccggcaacggccaggccgcagcgtcgctggcgaacatgtacaagcacgtggtgggcacggacactagcgcgcacagct

SEQ ID NO: 302799 - DNA, 306 bp, Zea mays
atgtccgcggtacggtggtcggtacgcgtgggctggacgcgtgggcggacgcgtgggcgacgtcaagatcgtggacgacacgaccatcagcgtcgacggcagtcccatcacggacgtctccagcaaggacccgctcaagctcccatggggtgagctcggcattgacatcgtcatcgagggcaccggagtcttcgtcgacggccccggcgccggcaagcacatccaggccggcgcgaagaaggtgatcatcacggctcccgccaagggcgccgacatcccgacctatgtcgtcggcgtcaacgaggg

SEQ ID NO: 302800 - DNA, 288 bp, Zea mays
agccagtagaatttgatggctacatgaggattgcagttgacactgaggtattcttgagggggaagaggcatgtggagacattcaacgagcttacacgtgattgcacggatggcgtgaataaatgttcaggaagaagctgagcatgtattcacgccatccttgcaatcacgtgtaagcttcttcctgaacatttggtgggctaaggtgagctgatactatgaaatattatgcttcagaggatattttcgactgtgttattggtgtctcttatgccacgcctagtcttgt

SEQ ID NO: 302801 - DNA, 291 bp, Zea mays
ggaccgtggtttttccatggatgtgacttgtgagtcattttcgtaaaccaacaccaaagatgagtccatgtttcttacttagtcacctcgaacaaacaccactggcaagaggtactcgcgttggcgtcgctcatcgacgacgagaagaagcttggcgactgtcagttcgacttcttgaagcaatcctacgtggccgcatgcgccgctatgttcggcaagctccgacgcagccgccgcttggacgcggtccagagcggctgcaccgcgctatccatcttcaaacaaggggac

SEQ ID NO: 302802 - DNA, 233 bp, Zea mays
cgaccttcaagtctcgctacgtagcagtgcaataaaaaaagcagccgcaatggcgagctgcaccatggccctctcctccacggccttcgccggcaaggccgtgaacgtgccgtcgtcgtccgccttcggcgaggtccgcttgacgatgcgcaagatggcggggattgccaagccgtctgcggcgtccggtgacccgtggtacggccccgaccgcgtgctgtatctgggcccac

SEQ ID NO: 302803 - DNA, 316 bp, Zea mays
cggcggcggtttccagggccatctgcgtccagaaaccgggctccaaatgcagcagggacagggaagcgacctccttcgcccgccgaacggtcgcggcgccgaggcccccgcgcgccaaagccgccggcgtcatccgctccgactccggcgcgggacggggccagcagtgctcgccgctgagggccgtcgttgacgccgcgtcgatacagacgaccaaaaaggctgcagcagctgccacccccgcgccacatggacgcacggtggacggtgctctgcctctcccgcgaacgccgtgaccgggtactagctagcttag

SEQ ID NO: 302804 - DNA, 289 bp, Zea mays
cccggagctgctcgcccgcaacggcgtcaagttcggcgaggcggtgtggttcaaggcgggctcccagatcttcagcgagggcgggctggactacctcggcaacccgagcctggtccacgcgcagagcatcctggccatctgggcgtgccaggtggtgctcatgggcgccgtcgaggggtaccgcgtcgccggcggcccgctcggagaggtggtcgacccgctgtaccctggcggcagcttcgacccgctcgggctcgccgacgacccggaggcgttcgccgagctcaag

SEQ ID NO: 302805 - DNA, 286 bp, Zea mays
cccacgcgtccgcccacgcgtccggatctccatctcgaccgtcgctcaccgggaagctacgctacgacgaagcatggcgtccgtcaccgcccgctccccggtcgcggccctgcgcccgtcggcgtctctcaagtcgtcgtcgtcgtcggcggcggccttccttggccactctagccgcctcggccgcactgctaccgcgtcgccgacgaggcgcagcctaaaggcggaggccaagggcgagtggctcccgggccttccctcccccgcctacctcgacggcagcctg

SEQ ID NO: 302806 - DNA, 315 bp, Zea mays
cccacgcgtccgccaccatcgaccttcaagtctcgctacgtagcagtgcaataaaaaaagcagccgcaatggcgagcagcaccatggccctctcctccacggccttcgccggcaaggccgtgaacgtgccgtcgtcgtccgccttcggcgaggcccgcgtgacgatgcgcaagacggcggcgaaggccaagccagctgcggcgtccgggagcccgtggtacggccccgaccgcgtgctgtacctgggcccactgtccggcgagccaccgagctacctgacgggcgagttcccgggcgactacggctgggacaccg

SEQ ID NO: 302807 - DNA, 303 bp, Zea mays
gcgaccgtggcgcgacgcgtgggcgagacgcgtgggcgagacgcgatgggcgacacgcgtcgactcccgccgccggagtgcgggtgagctgctcgcctagtgcgtgcgggcggacctccagcatggccccgaagaaggagaaggccccgccgccatcgtccaagccggccaagtccggaggcgggaagcagaagaagaagaagtggagcaagggtaagcagaaggagaaggtcaacaacgctgtgctcttcgaccaggccacctacgataagctgctctccgaggtgcccaagtacaagcagg

SEQ ID NO: 302808 - DNA, 311 bp, Zea mays
cccacgcgtccgcctgattggtctcagttccaggcatactataatgctgctgggacagctccagtgaccccacctttttttcatccatctgtagctccaagccatcaggggcacccatatatgtggggtccacagggccagggtattaccccatgacctggtgaaagggaccactgagccgtaatgcaaccattgtaactctggagataatccgtcatctaacatttgattattcaactggatagatgatgtctccttatgggacaccaccgccatatgcagcaatgtatgcacaaggtacaccatatcag

SEQ ID NO: 302809 - DNA, 311 bp, Zea mays
tgcgatctgatcgacatggctgctgccaccatggctatcacctcccgctcgctcatcggcaagccggctgctggcacgatggacgtcttctgcgaggtccgcatcaccatgcgcaagaccgctgccaagcccaagccggctgcgttcggcagcccctggtacggtgccgaccgcgtcctgtacctgggcccgctgtccggctcgcccccgatctacctgaccggcgagttccccggcgactacgggtgggacaccgcggggctgtcggcggacccggagaccttcgccaagaaccgcgtgctggaggtgat

SEQ ID NO: 302810 - DNA, 311 bp, Zea mays
cttaattaattattaagggagagccatctcgaaacatgcatatatagaaattatttttcctcagatctcgccgtcaagcatacatgcattcggacgagaggcttttctacaagcttttaattgataatgtggtggagctgcttccttttgtttacacaccaactgtaggtgaggcctgccagaagtatgggtccatctttggacgaccacagggtctgtatgtcagcctgaaggacaaggggaaggtcctagaagttctaaggaactggccacataggaacattcaagttatctgtgttactgatggtgag

SEQ ID NO: 302811 - DNA, 309 bp, Zea mays
aatatttcccccatcattgtttgatgttatgctccacttgtcggtacatttacctgatgaggcaatacttagaggaccagtccaatatggatggatgtaccctgtagaaagaaggttatacactttgaaacattctgtgaggaacatggcacgacctgagggttcaattgcagaagcatatgttgctaatgaatgtttgcatacatgttcgaggtattttgacgatcttgagacaagacacaattacgagggaaggaatagagagcatgttgatatgagtaagggtgacttatctgttttccagcatgg

SEQ ID NO: 302812 - DNA, 307 bp, Zea mays
cggacgcgtgggcggacgcgtgggttctagatcgcgagcggccgccctttttttttttttttggtacccaagattgtttgctttcacaacgttacaacatatatatatcatatagtcatggacaggtacaatgcctctccagcagcaccagcaacaagggtggttagcagcagggactataaacaacagagtaccatccgcgttgatagtagattttttattactgcaaaattgatccccgcagcactaccggtagttgcggtagacgggagtgtacatgcagttctctgcatatttcaccaggtcg

SEQ ID NO: 302813 - DNA, 306 bp, Zea mays
gttatgcttcgacaaagaattgaagcctcgtgattgccttaccacttgcaaacaatttgtcgtgatcccccaaaagcatgtttgatggtatcgatgacatcgctcatgcttttgggggatcaccacaaattgtctgcaagaggggttcaatcgaagaacttaggttatgcttcgacaaagaattgaagcctcgtgattgccttaccacttctttggcgaatggaagtgtatcaaaaagcaagcactgcccgcggtacatcaccttgccaacgtatgatccccttgtgcttgccaactcaactgtag

SEQ ID NO: 302814 - DNA, 295 bp, Zea mays
ggagagctgggtgcttccacgcccacgggcacgctgatccctgcaacagctccagcaccccgtacatgatcctcttcggcgtcgtgcagatcctcttctcgcagatacccgacttcgaccagatttggtggctctccattgtcgccgccgtcatgtccttcagttagtcttccatcgggctctccctcggcatcgcacagaccatctccaatggtgggttcatgggcagtctcactggcatcagcatcggcgccggtgtcacctccacgcagaagatctggcatacgcttcaggc

SEQ ID NO: 302815 - DNA, 234 bp, Zea mays
gcaaaagccaggacgcgtcaccgccgcgacgacgatggcagcctcgctccaagccgcggccaccctgatgcagccggccaagatcggcggccgggcgccgtttgcctggctgccgtcgcggccgtcgtcgcgactcgcgtgcagggcgttcagcgtcgacgccggcgccgccaggatgacgtggtccgtgcaggacgtcgcgagcaggtgcgtcgacgccgcgaactcggcggg

SEQ ID NO: 302816 - DNA, 273 bp, Zea mays
acaaaaagcagccgcaatggcgagcagcaccatgggcctctcctccacgggcttcgccggcaaagccgtgaacgtgacgtcgtcgtccggcttcggcgaggcccgcgtgacgatgcgcaacacggcggcagagccaagccagcggcggcgtccgggaggccgtggtacggccccgaccgcgtggtgtacctggggccactgtgcggcgagccaccgagctacctgacgggcgagttcgccggcgactacgggtgggacaacgcggggctgtcg

SEQ ID NO: 302817 - DNA, 307 bp, Zea mays
cgtcaacctcgagcagatccgatgcgtcattacagccgacgaggtcctcctgctcaactccctcgacagctacgtcctccagtacgccgccgagctccagcgccgcctcctccagcgcgctgagggcgaccagctaccattcgaattccgggcgctcgagctcgccctcgaggccgcatgctccttcctcgatgcacaggcagcggaactggaaattgaagcatatccattattggatgagctgacatccaaaatcagtactctcaatttggaacgtgtccggcggttagaaagtagactaattgca

SEQ ID NO: 302818 - DNA, 308 bp, Zea mays
gggaagcagtgttagctacatttctgcccgaggagcacggaagcttcaaaaaattcacagaattggttggcaggatgaatattactgaatttaaatacagatatgattttaatgcaaaggatgcccttgttctttacagtgttggcatttacactgacaatgagcttggagcaatggtggatcgcatggaattggcgaaactgaagactgttaatctaactgataatgatttagcaaaggaccaccttagatactttaaaggcctggtgcccttatgaaatttttggatgcattcagccctcgttgga

SEQ ID NO: 302819 - DNA, 303 bp, Zea mays
aagaatcccccgatggctcatcgcgttctcctcctcctctctctcgcgtcggccgccgcggttgccgccgccgtcgacgcggaggacccgctgatccggcaggtggttcccggtggagatgacaacgatctggagctgaacgcggagtcccacttcctgagcttcgtgcagcggttcggcaagtcctacaaggacgccgacgagcacgcgtaccggctgtccgctttcaaggccaacctgcgccgcgcgcgccggcaccagctgctggacccgtcggcggacacggcgtcactaagttctccg

SEQ ID NO: 302820 - DNA, 284 bp, Zea mays
cccacgcgtccgcccacgcgtccgggctgacattgccccctcagtgtctgattcacgttttttttcctggtgggcacgctctgtcaagctggtgcccaaaatagtccggaaggggtttaacactctctgtattttagatgtctgggcaatctagaaattcagaaacctgtgtgtttgagggcacccagccaaatgttcaactccttctccataggatatgaagtgagggtctcctttggtgtgccgctggagcttctaagttgcatgagcttcttagtaggttg

SEQ ID NO: 302821 - DNA, 174 bp, Zea mays
gccacggcgtcgccatgaatgcgctcgtcgtcaccgccttggtggacatgtactgcaagtgcggctccgtagacgatgcccgccaggtgttcgatgccgcaaggtcgcaaggcttggccaagctatcgtcttggaactccatgatgcaggggttagcggtgcacgggcagtggc

SEQ ID NO: 302822 - DNA, 306 bp, Zea mays
atgcaacggcagtaaagcatggcttagatgcaaatgtttttgtgggcagttcactcatcaacctgtatgtgaaacatggctgcatctctgatgcaaagaaggtgtttgacttctccactgaaaagaacattgtgatgtggaatgctatcctttatgggtttgttcaaaatgagctccaagaagagaccattcagatgtttcagtatatgaggagagctgatcttgaggctgatgattttacatttgtgagtgtccttggcgcgtgcattaacttgtattcacttgatttaggtaggcaggtacact

SEQ ID NO: 302823 - DNA, 304 bp, Zea mays
gcagaatctcagcttgctgcagttaccacaaggataatgcaggccctacagaataacctagatgggaaatctaaacaatataaggatcctgcattgacacacttgtttcttatgaacaacatccactatatggttagatctgttcgcagatcagaagcaaaagatatacttggtgatgactggattcagaggcatcgcaggattgtgcagcaaaatgccaatcaatataaacgtgttgcttgggcaaagattcttcagacactttctgttcaaggtgcgggcagcggtggtgaccttaccagca

SEQ ID NO: 302824 - DNA, 304 bp, Zea mays
cttcagatagagtgaagacgcgagtgcattttccagggatggaaagaaggcatgatttattttcctccgacatataaatactcattcaactcggatcgttactctggtgtgcggcccaaataaaatcggaggacacatgcttggtgcgatcacattccgtggcctcttgcagtcgtcctacatccgcggagagtctcgcttctttgaccacggaccagtgtacaatcttttcatggctaaggttgggagtgtccaccacagaagatcgaacttaaccttgatcatgatctctagcgctgaggga

SEQ ID NO: 302825 - DNA, 183 bp, Zea mays
cgttgctggagacgatgataaaaaattgtggggacgttgtgcatatggttgttgctgagagagacatacttcatgagatggtcaagatagtaaagaaaaggcatgattatcatgttaaagagaagattctcacgctgatagatacttggcaagaagtttttggtggtgcacgtgcaagatatc

SEQ ID NO: 302826 - DNA, 153 bp, Zea mays
cacacattttggaaggagagagagagatgcagagggagagattggagggaggcccctgcccaaggcaagagaaaccgcggcgcgcggagatggaggaagggcagacgcagacgcagacgggcgaacaagatgagggggatcatcagcatccac

SEQ ID NO: 302827 - DNA, 299 bp, Zea mays
agacggtcaagcgcctgcactcgtgcccactttcggagaaggcgttcagggcagagatgggtcggatggggcagctgcggacatcctaacatcgtgccactgctgggcttctgtgttgtcgaggacgagaggctgctggtgtataagcatatggagagtggggctctttcatcggtgatgaagaagccaggggaagcgccgctggattgggcaacgcgacttaggatcgccgtgggggcagcaagggggcttgcgtggctgcaccatgggttccaggttccgcagattcaccagaattt

SEQ ID NO: 302828 - DNA, 301 bp, Zea mays
atcctcctcctcctcctacctcctccaaggaagacgaccggccccaggcgttggaggtggtcaccctagcgtgcgggctcgtcggcggcgacagcatccagacgtacctgtggggcagctacgccgcgatcgtcgcgccgctgacggggcaggcggtcagtcacaacgccctcctcttcttgcaggcgctgctgggctccgtgccgctggtgcacgtggaggacgtctgcgaggcccacgtcttctgcatggagcaggagtccatggccggccgcttcctctgcgccgacgggtaccccaa

SEQ ID NO: 302829 - DNA, 294 bp, Zea mays
agcagtgtcttccgcccgggctaccaccatgccgaagcagatccacgagatcaaggacttcctgctgactgcgcggcggaaggacgcacggtcggtgcggatcaagcgggccaaggacgccgtcaagttcaaggtgcgctgctccaggtacctctacaccctctgcgtccacgacgccgacaaggccaacaagctcatgcagtcgctcccgccaggtctgactgtccaggagatttaagtttgtaggtgggctccattgctgtgtttgaatgaattatgaagtttgagtttggg

SEQ ID NO: 302830 - DNA, 126 bp, Zea mays
gtatacacatgcatatatttactaatcctatctgccaaaatggcttagacacaaaaacacctcagcagaaatgaatatacctagcactcagatcttcgtgtctaatatagtttgccactaaaagga

SEQ ID NO: 302831 - DNA, 144 bp, Zea mays
cgagcggcgcaagggcgtgccgtggacggaagaggagcacaggttgttcttgttggatctggacaagttctgcaagggcgactggcggacgatctcgcgcaacttcgtcatctcgcggacgccgacgcaggtggcgagccacgc

SEQ ID NO: 302832 - DNA, 276 bp, Zea mays
aacaatgttgagtgttggtctcactccaaatatagtaacctacaattctcttatatatggtctctgcaagtctggggagttatccagggctgtcagtctttttaagaagttgtggacaaagggtatatcccctaatgctatcacatataatacattaattgataagcattgcaaggatggttacataaccgagggctttaaaataaagcaaaggatgattgagggaagtaatccacctaatcgtttccaccaatccaaaactgattattggccccg

SEQ ID NO: 302833 - DNA, 257 bp, Zea mays
  unsure (1)..(257): unsure at all n locations
gttgccactttgcacagtgccgatcgagctcgcagccactatatagcacgcaccctgctcaagcatcttttccttacccagaaagatcgcactacccggcgctcgcgcggctttctttcccaactccgacgaaggctagctacaccacctggtgcgggctcgtctccatcgcccgccacncgctccgtcgtcgtcgtccccgccgcgccgatcccgaaatcgaatgggagcctggcgtccgaaaagaaagtggtcgg

SEQ ID NO: 302834 - DNA, 254 bp, Zea mays
tttgaggataatccgacatttaaacaacaacccaccaaagatcaccataacaatgtcggacggagaagagactatttccaacccccctgtcgctgaggccgaggatgtcgaggtccccgccgagtccagcggtggacagatgtcggtcaacgatgcgctcaagggcgtcctcaagatcgccttgatctacgacggtcttgcccgtggtctccgcgaggcctccaaggctctcgaccgtcgtcaggctcacatgt

SEQ ID NO: 302835 - DNA, 257 bp, Zea mays
cgcggtttcttccaacttgccgcacgtttagctcgtatcactggcgataacaaatatctcgactgggctcttaaaatctgggactggtcttgggaagtaggcttcatcgatcaccgcaattatcacgtctatgacggagccagtgtagaagacaactgccagaagacaacataccattcttttccctacaccagcggtatatatctttacggcgcggcagctctcgcccattacacggagaagccagaattggtcga

SEQ ID NO: 302836 - DNA, 249 bp, Zea mays
ccaggtcgaatgtgcgctatcaatgcggaaactaaaaaacccacgtgtatttgtgtaacggaatgttctaaaaataacgatctgcgacgtaaagtatgctcaaactacaacactacctggcagtcggattgtcatttacacaagcatcgatgcttatgcgaagaaaatttgtcagaagattgcactgaacagcacaagcacatgcatattgattactatggagaatgtacagaagacatcaaatgcaaa

SEQ ID NO: 302837 - DNA, 250 bp, Zea mays
ctcaacaccgctcgccgaatgggtagacaccgtcgtttgggtcagcgtaagggtaccaaggacgctcgtatgccaagccaagttctctggatgcgtcgtcagcgtgttctccgccgtctcctcgtcaagtaccgtgcctccggcaagatcgacaagcacctctaccacgagctctaccacttgagcaagggtaacaccttcaagcacaagcgtgctctcgttgaacacatccacaaggccaaggccgaga

SEQ ID NO: 302838 - DNA, 267 bp, Zea mays
ccgcgacaacaaagagggctgtacagacatttggcaagaagaaaacggcaatcgcggttgcctacgtaactgatggcaaaggaatgattagagtaaatggccaaccactcaactcgtcaaacctgagatcctacaattaaagctttgggaaccagttttgcttctcggtaaagacgctttttccaacatcgatattagagtacgcgtgaagggaggaggttacacttctcaagtgtatgctatcagacaatccattgcaaaggcatt

SEQ ID NO: 302839 - DNA, 265 bp, Zea mays
accaccgttgtgacctcttggctcgatggcaagcacgtcgtctttggcgaggttgctgacgaggcctcaatgcaggttgtcaaggagctcgaggctctcggctcctcctccgctccgtccgctccgctaccaagcccaccatcgtcaactgcggtggtgattaaatgagttgagttttggcggcagagtccctctttgaagcgtgggttcttcctctgcaaaaatagtgggttgcacggcggattggccgttctaggtggcgttg

SEQ ID NO: 302840 - DNA, 266 bp, Zea mays
atcagcgcggtgtttccgtacaagcgtctactcttggttctcttgaagccttgcttgagttccttagggtttccaagattcccgtgtctaacatttctatcggacccgtgtcaagcgtgatgtcatgctggcgggtaccatgttagagaagggtctcaaggagtacgcggtcatgctctgttttgacgtcaaggttgataaagaagcacaagcatacgcagatgatgtgggcgtcaagattttcacagctgatatcatctatcatc

SEQ ID NO: 302841 - DNA, 257 bp, Zea mays
cctgggtcaatccttgtttcaacatctaccatctcactgatttctgcccattcttatgggacgagatgggcttcccttctgatgcgctcggtcctaatgattatttaaccagtctgatgtgcaggctgcactacacgctcccccgactgattactccgtctgcggcgaacaaatatcttccccaatggcgacggctctgcccccagcgctctgggccccttgcctggtgttattgaagctaccaacaacgtgctcat

SEQ ID NO: 302842 - DNA, 289 bp, Zea mays
cgaggtggttctcctacgacgagctgaagaggagcaccaacaacttcgccgaggcgaacgagctcggctacggagggtacggcaaggtttacaggggcatgctgccgacggggcagttcatcgccatcaagagggcgcacaggggtccatgcagggcgggcacgagttcaagacggagatcgagcctctctcgcgcgtgcaccacaagaacctcgtcggcctcctcggcttctgcttcgagcagggggagcagatgctcgtctacgagttcatgtcagcgggcacgctg

SEQ ID NO: 302843 - DNA, 240 bp, Zea mays
gtgtagcaaagattcgataccttctgaccgaatggttttgattaaaagttactctgaaacagaaggttttaaattttatacaaattttaatagtcgaaaagggaaagagctagaagaaaatccgaatgccgcaatgttatttttttgggacgaacttaaacgacaaattcgaatagaaggcaaagtcttaaagcttagtgaagaagagtcaagcgtttattttaaatctggaccgttaaa

SEQ ID NO: 302844 - DNA, 283 bp, Zea mays
ggagaagtcagctggagagcatggacgatgccaggagagaaggaggccggcttcaggagcttcttggctgcgaggagagagactatgtcatcactgcagatgacataaagattcctatagctgaccttgctggcaagacagtcggcctgtacttcggagcacactggtgcccaccttgccatgtcttcaccaaacagctcaaggaggtgtataacgagctgaaaatcttgagaccgggaagcttcgaggtcatcttcgtttcgatagaccgcagcaaggggga

SEQ ID NO: 302845 - DNA, 282 bp, Zea mays
atgaaatgttccccaaacacttacacatatagtattcttataaatggactttgccgcgtacagaagtacaataaggcttttgtgttctggcaagaaatgcagaaacagggattggtccctaatgttgtgacttacacaaccatgatttctgggctcgcaaaggtagggaacataaccgatgcttgcagtctctttgagaggtttaaagccaacggtggaatccctgacgctgcaagtttcaatgctcttatagaggggatgagccatgcaaatagagctatt

SEQ ID NO: 302846 - DNA, 284 bp, Zea mays
gtgatgtgctatgcccgctgtcaagccagcccctaatagcttcaccctcataagtgaatccatccgctgcaactacgatgggatgcaagtctcatctgatggagctgtgcatgaaagtggtcgtgctgtcattgaagctgccttcattagtggctcaaccactttccacacatccactgttagatctggccttcgtctcctacttaactcagcacatctcaaggcaatatgcgcaagttggttggcctgtatgaaaggccaacttccagcagtgctatcgatga

SEQ ID NO: 302847 - DNA, 268 bp, Zea mays
aatcctccaaaaataatccagattatataatctattggggtaaacaaacaggcccttagccattttttctgttagactgcagatagttcttagccttttgattgccattattttttaatagctttgtgccccgtaaattacaggctttacatacttggcgtgccacataatataatatccatttacattttcatgataagacattaatatatgatagtatgatgtatcttaggttcctggaagtaccatgagagactcttttttggtg

SEQ ID NO: 302848 - DNA, 271 bp, Zea mays
ctcttctcgtgcagacttgacatcttcccatatccgcacagacaaatctcacacaatgtctaccgccgagctcgcttcttcctacgcggccctgatccttgccgacgatggcattgagatcaccgccgacaagctccagaccctgatctccgccgccaaggtcgaggttgagcccatctggacctccatcttcgccaaggctctggagggcaaggacatcaaggacctcctggtcaacgtcggctctggtggcggtgctgctgccgctcct

SEQ ID NO: 302849 - DNA, 271 bp, Zea mays
tctcgggcttcgcgttcaacagctccattctgtgggatcccgagcggtgggggcggccggcgtcgtcgttgccggacacttcacaggactccatcaagttcgtgcaggaagtggtgctggaagaccgagctaagctgaggggaatcccctccggctgctcccaggtcatggtgtggcagtacagcgacatgcccagctcgtaacagtagatggcagccggatgtgaggcgtcgcagcctcctggccggacggggaaggggaggactggacc

SEQ ID NO: 302850 - DNA, 270 bp, Zea mays
gcagaagcgaccgactgcactgatggtgattatttcgaagaagtgtatcagtattatgcgcatggagatgcttggcgattgcctactggagcagacgcagcactgcgtgagctgaaggatgctggagttaagctcgctgttgtatctaacttcgataccaggctacggaaattgcttaaagaccttaatgtctccgagatgtttgatcgcattgtggtgtcatccgaggtcggatatgagaaaccttccccagagatcttcaatatagca

SEQ ID NO: 302851 - DNA, 261 bp, Zea mays
gtttggtttgtggctaaatgtgccacactttgactaaggttagtcgttcgaattgaataactaaccttaggcagaaaagttaggcaaagtgtggtcactgaggtagtgaaccaaacaggcccagcaactgaggttaggagtgagtacggcgcaatggccagtggagtacataaattaaatacgtgctcccgctcaatggggtatcgccaatatatagggttttttttgctgtgtactatgcttgatcataataaatagtaa

SEQ ID NO: 302852 - DNA, 258 bp, Zea mays
cggctcgagaacaaatttataaaaatgcccaagctactactgtcttgctagtgtcacttcgcaaggattagtacaataaagtgagtggcttggacaatgcaaagcaaatctgggataccgtcaagatatcacatgagggtaacaacgccaccatgatcaccaagatggaactggtggaaggctcactggggaggttcgcgatgataaggggagaggagccaacacagacctacaacaggctcaaaaccctggtcaaca

SEQ ID NO: 302853 - DNA, 262 bp, Zea mays
aaaacccggaacattcgcagaaactgggattggaagtcaagatttcaaaccgtcaagatggtccacgccgacgcctccaccttttcctcgggcgtcaccaaggaggaggcctataaacaggtactgatgctagccgaggggctgttttatgagcagcggaattgggtgtgcaacctctccaccaccgccgccctcctctggcacgcgtacaaatccctcccgtcgccaagcagcgaggtgaactgggctggattctacaccc

SEQ ID NO: 302854 - DNA, 264 bp, Zea mays
tcgggactcctcgtctctggtctgtctctgctccaccacctgctgctcgtgccatggccatgggtagtctcgccttcgccacggcgctcgtcttcgtcttcgtcttcgccatcgccgtgccggcccccgccccggcgcccaccagcgacgggacgtcgattgaccagggcatcgcgtacctgctgatgatcatggcgctggtgctcacctacctcatccaccctctggacgcctccgccccgtacaagctcttctgagcgagca

SEQ ID NO: 302855 - DNA, 262 bp, Zea mays
gcgacctctcgctcaagtttgccatgccccccgttgctcagccctcatcatggcttcgcgctgccaccgatgaccgatcaaaccccaactgccccattaagatcgcccacggaaccaccacgctcgctttccgtttccagggcggcatcatcgttgcgaccgattcccgagccaccgctggcaactgcgatcgcctcgcaaaccgtaaagaaggtcattgagatcaacagcgtcctgctaggaaccatggccggtggtgctg

SEQ ID NO: 302856 - DNA, 260 bp, Zea mays
ccagtttagagaagagtgaatcatatgaagtctaaaaatgaagttacatacttcaagataatagttcttggagatattgatgtgggcaaaacgtcgttattagttcgttatgttgataaaacttttgatagtaaaacgattagtactgtatcatttgattataaagaacctgatgtgcaaattaataatgctcccgtgaaagttcgcctttgggatacagctggacaagaaagatttcgaacaattactacaagttttta

SEQ ID NO: 302857 - DNA, 256 bp, Zea mays
catgacggagctccaggccgtgctgcagccccagatcatcgacgcgaacctgggggccatcgtcgaggactgcatgcggcactacgacgagctgttccacctgagggccatgctcgcaagatccgacgtgttccacctgatgaccggcctgtgggcgaccacggccgagcgatgcgtcctctggatgggcgggttccgtccttctgaaatcctcaagatgctgataccgcagctcgaccctctcgcggagccgcag

SEQ ID NO: 302858 - DNA, 267 bp, Zea mays
gttaaattcaacagcaaggatagttttgttgaaagatacaaaaatttgagttccttcaatgaaaccgagcttgcgaatctgcataaggaattgaggcctcatattctaaggcgggttataaaagatgtcgagaagtctttacctcctaaaattgaacggattctacgtgtcgagatgtcaccccttcagaaacaatactacaagtggattttagagcggaatttccagaatctaaataaaggagtccgtgggaatcaggtatcactt

SEQ ID NO: 302859 - DNA, 267 bp, Zea mays
cggacgcgcgccgcccgtccccgccgtcttcatcggcggcaacctcgtcggctccaccgacaagatcatgtccctgcacctcgccggcaagctcgtgcccatgctcaagggcgccggcgccatatggctctgaattcgcgattattcgctggatcgaacgtaaacccccggaattttgcacctatatctatatattcccatgcatgcaactaattaaatactcctaatggggggtcttaatataacttattaagagctatatgtacg

SEQ ID NO: 302860 - DNA, 268 bp, Zea mays
cgcctacggcggtgcggaaggcggcccgctagccggcgtcaaggtcaaggacgtcgtcaccggtgaggtctctgatctccaggtggccggtctcttctttgccatcggtcacgagccggcgacaaaatttcttggagggcagctcgagctcgactctgatgggtatgtggtgaccaagcccggttccacgcacaccagtgtgaagggggtctttgcagctggggatgtccaggacaagaagtaccgccaggccattactgcagctgga

SEQ ID NO: 302861 - DNA, 169 bp, Zea mays
cgaaaagaatgttgctgaacttaagtcagtaaaagaggcagtggcgtcagtacatgaacagtatgctgccttggtagatgaaagagacacagcaatcaaaagagcagaagaggtcatatctgctgggaaggacattgagaagcgagtggaacaactgacattagaactg

SEQ ID NO: 302862 - DNA, 170 bp, Zea mays
ccggcgctgttcttattcatcccttcaatagtaaatacactatcagtggtcagggtacagtatcccttgaacttttggagcaagtccctgaaattgacacaataattgttcccattagtggtggtggtttaatttctggtgtggcccttgctgcaaaggccataaaccct

SEQ ID NO: 302863 - DNA, 185 bp, Zea mays
ggcgattctcctgctattatgttcaaagggatggaaggttccaccttaggtgtttggagtgctcatggtgagggaagagcttttttcccagatgaaaatgttctagctactgttgtgaagtcaaatctggctcctgtgcggtattgtgatgattctaacaatattactgagacctatcccttcaa

SEQ ID NO: 302864 - DNA, 186 bp, Zea mays
cggctcgcccacacccgaggggttactacaaatgcagcagcgtcaggggctgcccagcaaggaagcacgtcgagcgatgtgtagacgacccggcgatgctaatcgtgacatacgaaggcgagcacagccacacccagctgccagcacagcctgctcagctctcgaagatcagtaaatcgtcgctcc

SEQ ID NO: 302865 - DNA, 273 bp, Zea mays
agacagactccccacttgccgcagatatgtcgaccgccatccttcagctttcagagagtggacagcttcagagcatccatgacgagtggttcacacagccaagctgcgccaccaatgatgagagcaatgtgggtgcaaccaggcttggcctcggaagcttctgggggcttttcctcatctgtgccctgatctgtctcttcgctgtggtggtgttcttcatacgagtctgctggcagtacaagcagtactccaattctgaagatgctgacgagt

SEQ ID NO: 302866 - DNA, 272 bp, Zea mays
tggacagctacgggaacggcgactgccgcgcgcgctacgacaggttcttcgccgagcgcaccaacatcacgatcgagcactggcgcaagggcgcgcagtggttcgagatggaccgggccctggcgctcgaggtcgtcgccgacgagccatacatccagatgttccgcgacttctgcgtcgggcggtggcgctgcctcaccgacgagcactacctgccgacgctgctcaacctgctggggtgggcgcgcaacgccaaccggagcctcacgtac

SEQ ID NO: 302867 - DNA, 293 bp, Zea mays
cgctcggtattcggctcgagctaataataatgacgagacgaagaaggacctgaggagccgggggctgtgcctcgtcccggtgtcatgcacgtcgcacttcggaggggacaacgccgctgactactgggctccggcgccgctcggtgggatcctccgctagagcgagcgcgccattgaagcatgcatatgcgttttctcgtccagacgtggcgagctagctgctgttcgttccgtacaagtatatgttcgtcaggctgctgcagggtagctagctagagagagctgtgtctaat

SEQ ID NO: 302868 - DNA, 270 bp, Zea mays
ctgcggtcaaaaaggcactggatgcattggctgacagtggacagatctccttcaaggagtatggcaagcagaaaatttacattgctcggcaagatcaatttgacattccaaatggtgaagaactcgaggagatgaagaaaacaaatgccaagttacaggaagaacttgtggatcaaaagacagcaatttgtgaggttgaatctgaggtacgaggtctgcagtcaaacttgacactcacagagatcacgtcaaagaagagtgaattgcaaa

SEQ ID NO: 302869 - DNA, 265 bp, Zea mays
cccggctggtttggacgccgcagctgcacaagcggttcgtggacgtggtggcgcacctggggatcaagaaggcggtgcccaagaccatcatggagctgatgaacgtggaaggtctgacgcgggagaacgtggccagccacctgcagaagtaccggttgtacgtgaagcggatgcgggggcagggtctgtccccgtccgaccacatcttcgcacccacaccggtgcacggcgtcgccgtcggcatggtgcccatggtcagcggcca

SEQ ID NO: 302870 - DNA, 264 bp, Zea mays
gtttgcgaagtaattcgtcgagaagcagaacactgcgattgtctacaaggtttccaacttactcactcacttggaggcggcactggttctggcatgggaactttacttgtatcaaaaatgcgtgaagaattccctgatcgtatcatggtaacttactcaattattccatcaccatcagtgtcggatactgttgtagaaccatacaatgctacactttctgttcatcagttagttgaaaatactgatcaaactttttgtattgac

SEQ ID NO: 302871 - DNA, 258 bp, Zea mays
ctcgttttacaatggctttggaattgttctacttcaatggacgggggcgcgcggaattgagcagactgatttgtgctgaagggaaaatcgagtacaaggacactcgtcttgctggcgctgaatgggctgcctttaaaccacaaactcccaacggacaaatgccagcactgaaggtcggagacaatgtctatgctcaaagccatgctattgaacgattcttggcacgcaaggcgcacctttaccctgccgacgggactg

SEQ ID NO: 302872 - DNA, 275 bp, Zea mays
cggcgaggttaataagctgctgccagttgtggccctcctgctcctcctcgcagcatgtagctcaccggtggtggtggctcagctggtcgccggctactacagcaaaacatgcccggacgtcgaggagatcgtccgcgacgagatggagaagatcatctcggctgcacccagccttgctggcccgctcctcaggctgcatttccacgactgcttcgtagccggctgtgacgcctctgtgctgctcaactctacggagggcaacctggcggagaggg

SEQ ID NO: 302873 - DNA, 272 bp, Zea mays
ctatacgatacctctaccggaacagccctcagatggacctggagctgagctatcggttcatggattggttttcccaccatctcagtaactttggcttcacctggaaatgggccgaatgggtcgatgatgcgcaactgccaaatgcccatcccagcaagtggttcttgaagggcgccctggatacgaatcagagattgagttttgcccagagaattcagaagaccctccctgaaccctacctacccttggtaggccccgagaaagagaaagat

SEQ ID NO: 302874 - DNA, 264 bp, Zea mays
ttgcgttatgatcatcaggagaggcttactgcgcttgaagctatgacgcacccgtacttccaacaagtgagagccgctgagaacagcaggacgcgagcctgacaggcaaagagcggagaccatctgctcctttatcagtcagtcaggttgtatgagctgattagccgttgggtcacttggcagagcagcaacaacagcggtagagcctgtactgtactgtacgtaacgtaacctcctctcctcgagaaggggttgtgaagtttg

SEQ ID NO: 302875 - DNA, 253 bp, Zea mays
tacaacgtggtgctcgagatccaggccaccatcccgtccactcccgagaagccgcccaagaagcccatgtggaagggcgtcgtcgtcgcctacctcgttgtcgcgctctgctacttccccgtctcgttcgtcggctactgggccttcggcgacagcgtcgacggcgacatcctcgtcacccttaacagacccaggtggctcatcgccctcgccaacatgatggtcgtcatccatgtcattggcagctaccaga

SEQ ID NO: 302876 - DNA, 263 bp, Zea mays
gatatcttgttcacattctcaaagaatatttgtcattgttagatgttgaatttatttcatgattatcaaagcaagaaatacttttaatcaacggatagaaaactagatggtatcctgctcctggaggtcaatagattacttagagctggaggctactttgcttgggcagcacaacctgtttataagcatgaacaggcccaacaagaggcatggaaagagatggaggacctcactacccgactttgttgggagcttgtgaagaa

SEQ ID NO: 302877 - DNA, 248 bp, Zea mays
ggggccaacaatgccacagaaggcgagggaaatcaagcactcagtaagaaaaatgcccaggaaatacctacaccacaatttgatggtgttgacacatatgaaagggactatactcgtacctttgcacaaccgacatcttatatacgtggaagaggagccagggctgagatcagtgaatttgtcgagttcgaccttgacaatgaagacgaggactggcttgaagaattcaatagcgagcggaagaatat

SEQ ID NO: 302878 - DNA, 252 bp, Zea mays
gtcttccgcctctacaaccagtctggatccggccgccccgacccgcacatggacaccgcctaccgccgctcgctcgacgcactctgccccaagggcggcgacgaggaggtcacgggaggcctggacgccaccccacgcgtcttcgacaaccagtacttcgaggacctcgtcgcgctccggaatcttctcaactccgaccagacgctcttctctgacaacaccaggacccgtcgcgtcgtcgagcggctcagc

SEQ ID NO: 302879 - DNA, 148 bp, Zea mays
gtttgttctcctcaggattcatctgcgcccaagaagaggaaatctggtaacacatcggctgaaggtgagccgtctctagctactgttgtgcgatatgctgcggttgagtcaccatatcccgctaaaggaaggtctgcctcaaagcttc

SEQ ID NO: 302880 - DNA, 245 bp, Zea mays
tgatcatcataatcccaattcgaatatgaaattatttattggtcttgtacttttattttttgtatgttcatctttcgcaggagatgttctcgaattaactcctgaaaactttgataccgtccttgatggatccagaccagcattggttgaactctctgctccatggtgtggacattgctatgttgttgttcctgaatatgaaaaattggtaactgcattcaaaaaagcaggagataaagtggtca

SEQ ID NO: 302881 - DNA, 253 bp, Zea mays
cgctgctgctagtgctgaccctgacagcgattccgtatgctacaaaattggcaggtggcatgcgcatgccttcgtggttcgacatccacgacgcgcccattacttcaagatccgtgaggggtgaggaggatgtgctgagagctgtccagatcgtgcacaccatgatcgacaggcaaatcgcgtccgggacaggcccggaggacgtgttcgtgtttgggctcagccaaggaggtgccctgagcatagcaagcgt

SEQ ID NO: 302882 - DNA, 265 bp, Zea mays
cacacctaaaccccctaagcttttggaggagcaaactgtctgccaattaaccaagtgcatcttttttgcctgtgaaccaccttgccaaagaagattttttctgaataaatccaattttctagtaaccgatttaggagccggataaatcgataacatgtacagaggtacattagaaagcgaactgttcaaaagggataatctgcctcccagactcaagaacctccctttccaaccagccagccttttgtccattttttccaacata

SEQ ID NO: 302883 - DNA, 230 bp, Zea mays
catttatttacttatctatggcctttgatactagaaacaatgcaacatatatcgactaacagaataaagcacaccatagcagatctatgttgcattgtttctagtttcaaagcccatttatttacttatctatgatttctacacacggcctaataatcttgctaaggccctgattgaatggaaaatcttcctctgggagctttaggaaaaaaaaaaaaaaaaaggggggc

SEQ ID NO: 302884 - DNA, 251 bp, Zea mays
ctcgacgcgccgcccaaagtcagggagaccgtcaagacctacgcggagaagatgcacgacgtgatcgtcggcgtcgccggcgagctggccaccagcctggggctgggcctggaggagcactcgttccaggactggccgtgccagttccgcatcaacaggtacctctacacgcaggagacggtgggctcctccggcgtgcagacccacacggactaagaattcaacaccgtgctccagctcgacgagtgcgt

SEQ ID NO: 302885 - DNA, 257 bp, Zea mays
gatgcatcaagactcttagcatgaactccaagtatctggtctcaggagggactgatgaggccttgcgtttttacaatcttgaaaccaagaaggaggaaggaatgttattacatcacgaaggttctattacttgcagtgctttgcacgagaacaagtacattttttctggtggtgatgatgggacagttgcaatttggcgcacctatgatatggaacttgtgggtacgctgggtggacacagtttagcaattaacagc

SEQ ID NO: 302886 - DNA, 266 bp, Zea mays
cgtcaatcctcgaacgaaaaatcgacggcaattaaggcgcgatgggtcactcttacggaaagcgagcgggcactcgatatgccttcagcagggactttcgccagaagggcatgatcgccctgaacacctacctgaaggtgtaccacgtcggtgatatcgtcgacatcaaggtcaacggtgctctccagaagggcatgcccttcaaggtctaccacggcaagactggtgtcatctacaacgtcaccaagagctctgtcggcgtcatt

SEQ ID NO: 302887 - DNA, 260 bp, Zea mays
ctgcagtgcttcaaatggatcaaggagcgcttcgacggtccaaacgtccgcttctgtgcaatcggtgatggccacgaggagtgcagtgctgcgcaggtcatgaaatggccattcatcaagatcgagttccgccctgaagcccatcacaggttccctggcctagacttgcccacagtgcagacctacattcatgtgatatacgagtcatccagcaaagatggttgaccgacgattgatgtcgattctgttttctcctctga

SEQ ID NO: 302888 - DNA, 254 bp, Zea mays
gccgcgctgtacttacagctgttcgagttcgccgacaagtaccggggcaagtacgacagcagcatcgcggaggtgaagagctactacgcctccgtcagcggctaccacgacgagctcctctgggccgcgctctggctccaccgcgccaccggacgcgccgagtacctggactacgtcgtcgacaacgccgacgacttcggcggcaccggctgggccatcaccgagttcagctgggacgtcaagtacgccggcgt

SEQ ID NO: 302889 - DNA, 256 bp, Zea mays
cctgaggttgtcaatccaaagaagacgtatggacctgcagctgacatatggagtcttggttgcactgtcctagagatgttgacgcgccaaataccctatcctggcctcgaatggacacaagctctatacaggattggtaagggggaatcgccagcaattccaagttctctttcgaatcaaactcgtgattttataagtcagtgcgtaaaacccaatccagaagacagaccatcagcaatcaaactgttggagcatc

SEQ ID NO: 302890 - DNA, 259 bp, Zea mays
aaaatctattggagagattgtcatgatgataagtcagcaagcattagggggcgtttggttttagacactaatttttagtccctccaatttattccactttagtcactaaattgtcaaatatagaaactaaaatagagttatagtttccatattttgtaatttatagactaaaatggaataaaatggagggactaaaaattagtccctagtaaccaaacactaccttagtctaaagtaaaatggaggagtttccattgtg

SEQ ID NO: 302891 - DNA, 258 bp, Zea mays
ctcaaaacaacttggttgtcactaatatcgatatccaatctgttgaacctgttgactctcgtacccgagatgcccttcaaaagtctgtgcaattagccattgagattaccactaagtcgcaggaggcttctgccagacacgaagctgagcgaagagaacaagtcgccagaggtaagctcgaacgccaaaagatcatgcacgaagctgctgctgaagaacaaagaaaggagctccttcaattacaagctgcttcggcag

SEQ ID NO: 302892 - DNA, 265 bp, Zea mays
cctgattgtgcggtatatcattcctaaactgagattggcgttgcaagactttcagatcaacccagcaaaccagaagctcgatcagttcaactgggtgatgttgtggacatctgcaatcccagtacagctcatggtccatatgttggaagtcgatttcttcagcaagtggcagcaggttctttaccacttgttgtgctcaccaaatcctgatttcaatgagataatgaactggtataagggatggaagggccttttcccaccagag

SEQ ID NO: 302893 - DNA, 254 bp, Zea mays
gtgcaagtcctgcagacagaggctacgacactctcagcacagttgacaatgctgcagagggactcagctggactggctactcagaacaacgagttgaaaattaggctgcaagccatggagcaacaagcacagctgagagatgccctgaatgaagcgttaacgggcgaggtccagcgtctgaaactcgcaactggggagatgaccgatgggcctatgccgaagggcctgcagcagcagatgaactcccagatgct

SEQ ID NO: 302894 - DNA, 270 bp, Zea mays
cggcgaggcaggatggacaggcacatcgagatgtcctactgccgcttcccggccttcaaggtgctcgccaagaactacctggacgtcgaggagcacgagctattcgaccagatagggcagctgctcgaggagaccgacatgtcgccggcagatgtggcagagaacctgatgtccatgtccaagaagaagagcgagggggccaacgcgtgcttggagagtcttgtgaaggctctgaagcaggccaaggaggaggcggccaaggcgaaggtg

SEQ ID NO: 302895 - DNA, 228 bp, Zea mays
tggatatgaactaaagaaactagagcttagatctcatgctttcattgttttgggcacgatgctttgcctggaattgagcaagggctcctttttagatgagagttatgcacagtttttcagttgggaagctaatttgtcatagttcagttttttcccagttatctgttggacgatttgaacattgtaaggccctgtttggaaacaaagtttttgaaaaccacagttttt

SEQ ID NO: 302896 - DNA, 260 bp, Zea mays
gcctgcagagagaggagtggaggtgactgacggcgccattgaggctcccaactcaatcgtgttcccccaggctgagaacagaatgcacgctcagaacgccatcatgcttcacgtgctcggtgcttaactctcctattgcacaccagtgacacgctcctcttagattattgggcattcctgtcttgctgaagcattgaggctgttttggctttagggcatatatgagagcttagttcagacgaactgtttagtaaggtgat

SEQ ID NO: 302897 - DNA, 272 bp, Zea mays
gtttatgttgattctgaatggtttttgcccccaaagaattttatagaagctgactgaaaaactgagcgtttggcagttcacaacaacttttggtggccagaaactgacggaagctgaaacaaacaggccctgtcaatcctagctaggcgcctccacaagagggggtgcgctttgtttctcctcctgcctgcaagggtaagtgcacaagaggatagtgctccacaagtagtagtagtatgtgtgtgcattttcaacatgctgtatgcaaccat

SEQ ID NO: 302898 - DNA, 265 bp, Zea mays
  unsure (1)..(265): unsure at all n locations
ccaaattccagtcgctcaaattcttcttaccagaagtgatattgcagatcgcacatcatacataaacgcccaaaataacttttccgagctgctagacatgggagtactacccgttgtcaatgagaacgacactctggctgttgcggaaatcaaatttggagacaacgataccctatcagctataacagcagctatggtaaaagcggactatctctatctatcgnatgacgtggattgtttatacactgcgaatccgagacacgat

SEQ ID NO: 302899 - DNA, 161 bp, Zea mays
gctcgccatgctcgaaccggtgctggaccagaacctctactacatgggggcgaacctgacctcggccggcttcgcgtcggcgctcataaacatcctcccggccgtcacgttcgtcatggccctggtcctgcgcatggagaaggtgcggctgcggagcgtgc

SEQ ID NO: 302900 - DNA, 163 bp, Zea mays
ccggaattccgtcaagctcgttggatggtgccaccaggacggcgtgctgctgctggtgtacgactacatgccacacggcagcctggacaggcacctcttcggcggcaaggatgcgccggcgctggactggaggcagcgctacaacgtggtagccgacgtggcg

SEQ ID NO: 302901 - DNA, 158 bp, Zea mays
ggtaagactacttcacttgggcttgatttgcagtctgtcggcagggatatggcatacacaatccgtggcgaatcgagatttaagaacttcaggcgcaacaatacatctgctgggatatctgctacgcttcttggggattcagtatcagctggtatgaa

SEQ ID NO: 302902 - DNA, 134 bp, Zea mays
tttggatacggaacctgtttctcaaacaagtttcaacgagttaagaagatatgagttggtttcagttggatcttagtcctggttgctcgtaatacagcaatctagatagctcaattgaatatgaaatttgatgg

SEQ ID NO: 302903 - DNA, 157 bp, Zea mays
tgctggataacgatatatcgggcgggattcttgagcagactttctcgaccgaagacgagagatttggagtgatgactactgaggatctcatccctgatggccgcaatattgatgtcaccaatgaaaacaagaaggagtacgttgatctcatggtcaa

SEQ ID NO: 302904 - DNA, 150 bp, Zea mays
gtagaacggcatcagttacactagtagtgctcatctcgctggtactgctgagctgaccaccgccgatccttccaagatggcgaggcagggtgtcgtcgcttccatgcatgcgctggcattgcttctcggagcattcgcagccattcctac

SEQ ID NO: 302905 - DNA, 271 bp, Zea mays
agctcgtgctctctgctctgcactatctactaccaaagaaagatgaaggacttggcggggctggggcactgttcgtggtgtccttcctgttccacttcgcctccttcatggtgatcccggcggtcacttccgtcaccatggaggccgcctgccccggccgcgacgagtgctccgtcgccatctacctcagcggcttccagaacgcagtcaccgggatgggggcgctcgtcgtcacccccatcgtcgggaacctgtcggacaggtacggccg

SEQ ID NO: 302906 - DNA, 268 bp, Zea mays
ctttttctgaatacctcacagatccaaaaatgtcttccgaacagagtttcattgccatcaagcccgatggtgtccagcgtggcctcgttggacccatcatctctcgcttcgagtcccgtggcttcaagctcgccgctttgaagttggtctctccgcctcgtgagctcctcgagaagcaatatgccgacctctccgagaagcctttcttccccggtctcgttacatacatgttgagcggccccatcgttgccatggtctgggagggccg

SEQ ID NO: 302907 - DNA, 270 bp, Zea mays
ggcaattttacggactattttcctcatctttaacctcaactaaacttcgactttcggtcaacaatttaccgttcaacaggtgtaattgatattttgttttagacatttcaaaacaaacatttaaacatgggaaacgtgttttccaacttattcaaaggccttttcggcaaaaaagaaatgagaatcttgatggttggtttggatgctgccggtaaaactactatcttgtataaattgaaattaggagaaattgttaccactattccaact

SEQ ID NO: 302908 - DNA, 260 bp, Zea mays
aaaatatatgataagttgtattaataaagtattgtcgtacttgagaggttgcagtatctgctctatttcccttgcatacactccgtacttgtatatccccttcggagctgatttggtgacccgggatcccaggaggatcggaggggattgagaaggaaattagttgatttcccccttaatccccttcaatcctcccgggatccccttgtcaccaaatcagccctcgaatgaattccaatgctgtatcagtttgctacccc

SEQ ID NO: 302909 - DNA, 263 bp, Zea mays
agcaaggccaagaagccgccaaaccggatcttcaagaaggagctcgcgcttgcgtgcctcctcctcacggccgccacgcggagcctgctctccaagcaggggctgcacttctacttcctgctcttccagggcgtcacgttcctcgccgtcggcctcgacctcatcggcgagcaggtcagctagccggccgccgccacagaagaataaacttaaattagcggccggctcggcatgcacggcctgcaagccacatgcacagggca

SEQ ID NO: 302910 - DNA, 259 bp, Zea mays
tcgagcaatatttagatcacactgttgtcccaattttattatctggcttggcaaccgtagcaaaagttcgtccggagcaacctatcgaatatcttgcccaatatttacttgacaacaaatacaaatatgataataaccaagaaaactcttcaattaatggtaatcaataaaatttgattactatttaaatcatttagaactattattcaatttttacttgtgtttttatacatttcatttaaattcgcatataatttag

SEQ ID NO: 302911 - DNA, 253 bp, Zea mays
aatccacctcaatacatcttaatacacccaaaatgccgcgccaattcttcgtcggaggcaacttcaagatgaatggagtcactgactctatcaagtccatcgtctctaacatcaacaactccaagcgtgacccgtccaccgaagtcgtcatcgcccctcccgccatctatctcgcgctcacccgcgcacttgccgacccctcagtcggtgtctcggcccagaacgtctatgacaagcctagcggtgcttatac

SEQ ID NO: 302912 - DNA, 244 bp, Zea mays
ggcggcaccagggaccacccggtggcgaacccgttcgggccggacagccctgaactgggctcggtggacttcccgccggtcctcgtggacgtggccggcctcgacctgctgcgcgaccgagccgtcgactacgccgagcggttggcagcggcgggtaaacccgtggagctcgccgagttcgccgccgcggcccatggcttttacctgcacgagccgggctccgaggcgaccggcgagctgatac

SEQ ID NO: 302913 - DNA, 216 bp, Zea mays
gaaaatcgtccgagagatgactaggatgaaggatgagaggcataggctgaggatgatcatggcacagtacttggtgtggcttcattcttcatgcaagatctgagcaaccttgagtagcaaatcgaggggaagggtacgagcagcttcggcaagcgccggaacaagacgcacacgctctgcatccgctgcagcagccgtagcttccacctccagaag

SEQ ID NO: 302914 - DNA, 248 bp, Zea mays
tcgagcgaactaccattgcgtgcgactgagatactctccgccttctcgctggctaggaagactacggtagctcacgatgactatcaatcccacatatctcgcgcacggacgcgcacttctgtcaactgggcagatgctaaagccagagttcgcaagtcgtaccgagaatggctccgagcgtctcccgaaatccaaacaatgtactctcttaatgtccctgtatccgccatccgtaccaagatccgtca

SEQ ID NO: 302915 - DNA, 252 bp, Zea mays
gccgtctgttttcatatgctgtatcgtgttttagctagttgaaggtcgcggcggcgcgggcgtcgacggcgaggctggtgctgaggttgagtcggtgcatgtactcctgtggcccgtccatgaactggctgacgatgatgcggttggccttctccgtggggtggaagttgtcccacaaggcgtagactctgcggtccgggcagacgctggacgccgcggtgcagagccccacgccgttgtatggtccctggc

SEQ ID NO: 302916 - DNA, 253 bp, Zea mays
ctgcgatccctctcccctcgcctcctcgtgtccccctaggggatactcggagaggaatcgcaaagagggccgtctcatccgagttaaggaagccatggagcacaaggaggctgggtgccaggcccccgagggacccatcctctgcatcaataactgtggcttcttcggcagcgcggcgaccatgaacatgtgctccaagtgccacaaggagatgataacgaagcaggatcaggccaagctggctgcctcctct

SEQ ID NO: 302917 - DNA, 248 bp, Zea mays
cgacctcaccggccacgagacggtgcggataccgtcggtggcgctggtgttcgccgacggcgccaccgtgcacctacaccccagcggcgtgctgtatacctggagcaatgtctaccagacgtgcctcgcgttcctgcccaaccccgacgacacgtccttgaccgtacttgggaacacgcagcagaggacgctcgccgtcatctacgacgtggacaaccagaaggtcgggttcggcgccaatggctgcg

SEQ ID NO: 302918 - DNA, 271 bp, Zea mays
cggctcgaggagcacggacgtccactctatggagacgtttttggtgttctgcagcaggacgaacctaactacgataacttgttttcttcaaccttgcaggatgaacctgttgatcgcagcaaacactggggagatttgaggaagaggaggaggaagaagaggaagaggaggaagaggaagaaccaatggcagacgaggaaatggaagatggaattcagtctgtcgataccatctcaagtactccaactggtgttgaaacacctgatgttat

SEQ ID NO: 302919 - DNA, 275 bp, Zea mays
cacttcccactcatctcgtcctcatcctccgcctccccacccacccccacccccacccccaccccacagatctcgccgcggccaccgcttcctctatggccgcgccagcccgccgccttctcctgctcgtcgtcaccgtactggagccctggcgctccccgtggcggcccagatcaaggaggagtccttcaaggaggacccgcgctcgtccatcatgttcgaaaaatccggcctcacgggccgccacgagaccgccgacatcaacaccttcaaat

SEQ ID NO: 302920 - DNA, 266 bp, Zea mays
gttcggcgacgcgtgcccgacggtgggcaagtccggcaacttcaagcagttcaactgccccaccggctactacaacgacctggcgtcgctgatccacgccaccaacgtggacgccacgcgcaacatcttctccacgggcaccgccggcgaattcaggctcgactcgctgctcatcttcttcggcatctactgcgtgctggggctcttcaccttcggcatcgctgtgccgtcggggctcttcctgcccatcatcctcatgggctccg

SEQ ID NO: 302921 - DNA, 276 bp, Zea mays
caactgaaaccaccactgcatctgcacctaaagagactacccagagttctctttccaacagctttattatctataccccctttttcaaggaagttctcagcaaaggcagagtttatgtccatcgaaaacctcaagacctcgaccccttcgccgaagccgacgaagataccggtgagactaaacagtctcagaattacattcatatacgaattcaacagcgcaatggtcgtaagacattgatcaccgttcagggtcttcctaagaagtttgatcaga

SEQ ID NO: 302922 - DNA, 178 bp, Zea mays
aatggagttgcccctgaagaagatgacttggtgaggctgcaactggaggctctgcttgcagagaagtcgcgtctggcgcaagagaacgccaacctgacgagagagaaccagggcctgatgcagctggttgagtatcaccagttggcatcccaggatctggatgagtcctatgaggatg

SEQ ID NO: 302923 - DNA, 265 bp, Zea mays
gtctgttttttttccccattaattgtcaatctacaattcaaatcacattcacaatgggtagcgtcaccacaagacaggaactttcctgttcacctccgagtccgtaggtgaaggtcaccctgacaagatcgctgatcaggtctctgacgccgttctcgatgcctgcttggccgaggaccctctctccaaagtcgcttgcgagactgctaccaagaccggtatgatcatggtcttcggtgaaatcaccaccaaagccaagctcgat

SEQ ID NO: 302924 - DNA, 252 bp, Zea mays
gtgggcggagaactgataacattgaggaatcctgtgcagtctttacttcgcgtgcattaggattggaaacgccattgctgacgactcaccagattgacaactgctctgaagtgtggtactatctaaaacgaaagagttctgctctgttttccatggactgataagggagaaacagagtgtaaaactctatcttgcacttattacagcacctgtgtcaacaggaacgattacccattatatgcgcccagttaa

SEQ ID NO: 302925 - DNA, 249 bp, Zea mays
gaaaaactctccgtcagaggataaagaagtaagttgctaaagttttggactgtcttctttcatttttcgtctcacctattctatttctttcaggaatcagaaaagcatatggaggaactatgctccaaaatcaaggtgggtgatagatgtgaagttgagcctggtgccaagaggggcactgtaatatttgttggtagagctgaagcccttggacgtggattctgggttggagtgcaatatgatgagcca

SEQ ID NO: 302926 - DNA, 265 bp, Zea mays
cggctcgaggcggccctagagttgtatatatatagtactgcgataacaccatgagtgcatcagcaaacaataacgctaacaagacagcaaagcgcaatccgatcgtgttttttgatgtgaagatcggcagtcaagacattggtcgaattaaaatagaattatttgctaatgtagtgccaaagactaccgataatttcagacagttctgcacgggcgagcacaaagtgaataacaagcccgtgggctacaaagagagtcagttcca

SEQ ID NO: 302927 - DNA, 267 bp, Zea mays
cgcggatctacaccacgctgtcccgaaaggagaaggaggaggacttcatggccatgaaaggcaccaagctgccgcagcgccccaagcggcggccaaagatcatcgagaagaccgtcagtgcgatctgtcccggggtgtggctgacggatgcgaccaggagcaggtacgaggtgcgcgagaagaagtgccccaagaagcaacagaagcaccggggcctcaagggcatggagagcatcgacagcgactccgactgaccaccgaccgacg

SEQ ID NO: 302928 - DNA, 266 bp, Zea mays
cgacaacatcacaatcatccctcaataatggctaagagagttctcatcactggtgcggccgggcagatcgcctactccctcgtcttcgctattgcccgtggtgacttgttggggcccaaccagccagtcatcctccacctcctcgatatcccccagatgattgagggccttaacggagtggtgttggagttggaggattgtgctttccccctcatcgcaggaattgttgccaccactgatgtgaaggaggcattcactggcgtgga

SEQ ID NO: 302929 - DNA, 259 bp, Zea mays
gggaagcatgttttggtcggaaaccgttctttgatgactgaaaacggtgtgaccattcccccagaagcagaaactttcttgatagacctggaatcgaatgcaaaaacaggcatacttgtggcatatgatggcgattttgtgggtttgatgggcataaccgaccccctgaaacgggaggctgttgttatagtggaaggactaaaaaagttgggtgtccatccagtgatgctcacaggagataattggaggaccgcgcaac

SEQ ID NO: 302930 - DNA, 266 bp, Zea mays
cggctccaggctcgtcttcgcgattcacatccctggctccgtggacttgcacccgcacatcaggaaggttttgaggaaactacgactgacgaaggtcctcactggggtgttcctcagggccaccgagttgacgctgaagaggctgcttgtggtcgaaccctttgtcacatacgggtttccgaacttaaagagtgtgaaagagcttatctacaagaagggccgcgggttctttgacatggaacctttccctcttaccagcaacgatc

SEQ ID NO: 302931 - DNA, 252 bp, Zea mays
ggctgatggcgagaacgaccgcactgtcaagtccattactcagctccttttcgagacatctctcttggtctctggattcaccatcgaggagcctgctagcttcgctgagcgcatccacaagcttgtttctctcggcctgaacgtcgatgaggacgctgagaccgctgaggagaaggcggccgaagaagctcccgctgccgaagccaccggcgagagcgctatggaggaggtcgactaaatttctgtagcaaa

SEQ ID NO: 302932 - DNA, 266 bp, Zea mays
gccgaggagggcgcggcgaagccggtgcctccctgcagcaggacgcgccgctgtacaagcgagtccgagtgcagcttcctcacggagcaggtcacctgcacgcgcaacggccgccgcgacgacgactaccagaagtggcgctggcagcccgacggctgcgacctccccagatttgaggctaagttgcttctggagaagctaaggaacaaaaggctgatgtttgtgggcgattctctgaatcggaaccagtgggagtccatggtgtg

SEQ ID NO: 302933 - DNA, 263 bp, Zea mays
aaaacgtagcctcggttttccctggatccacgatttggctagcagggcattcactaggcgctggcctggccatccttacgggaagaaacatggttaagaagggtgtgcttttagaaagctttctcttcaacccaccgttcgttgctgctccagttgaaaggatcagggacgaaagggtaaagcacggatttcgtattgcaagaagcgtgattactgctggattgactattgccatgaaagctaaaactgagggtagcagtcag

SEQ ID NO: 302934 - DNA, 183 bp, Zea mays
ctcctccagccgagaacaagacgatgaagaaggcgacgctgatgggcgtgacgaccaccacggcgttctacatgcttgctggctgcctcgggtactcggcattcgggaacgcggcgccagggaacatcctgaccgggttcggcttctacgagccctactggctgatcgacttcgccaacgtct

SEQ ID NO: 302935 - DNA, 276 bp, Zea mays
tgggaagggatattaggctgaagtatgctgcatcatttgagacatgctattcattccgtcttctctactacactggttcattctatcctattatgggagctttaaggatggcttatccaaataaatatgagatttatcgaagggttgacactctcaatggaaaagagaactatattcttatagctcaattcacgaacaagccaactcctgatgagatcaccagtgctttcaaaggacaaaaaagggaagaaaaggcatcttctggattctggggtt

SEQ ID NO: 302936 - DNA, 278 bp, Zea mays
aaaaaaaatggtgaagcacggtggtctcggacgagctggaaaagtaaagcgtcaaactcccaaagtacaaaaggaagagaaattgaagcaggctaccggtcgtgccaagaagagagcgcaattcaatcgacgcatgaatctcggaaagaagaagggacttaactctcaagccgcgtagggatgaattcgattactggtcccctgttttgtttgtgcttcaataacgaggaataaaactacgtttatgtcgtaaaaaaaaaaaaaaaaccaaaaaagaa

SEQ ID NO: 302937 - DNA, 264 bp, Zea mays
gcggcggcgacgcgacgacaggccgcgcgactccgtgaccctgtccggcctgctcaacttcatcgacgggctctggtcggcgtgcacgggcgagcggatcgtcgtcttcaccaccaaccacgtcgagaggctggacccggcgctgatccggcgcggcaggatggacatgcacatcgagatgtcctactacaggttcgaggcgttccagacgctcgccaagaactacctggacatcgacgaccacgacctgttcgccgccgtcgg

SEQ ID NO: 302938 - DNA, 269 bp, Zea mays
aacaacaaaggtttgctaaagagactatggaaatatttgtgccattggccaaccgattaggaattgctagctggaaagaccacttggagaatatttgcttcaaacacttgaacccagaggagcacaaggagctttcctctagacttctgatgtcttttgatgaagcacttcttacatctacgcttcataacttggataaaagccttagagatgaaggcatttcatatcgcagtctgtctggaaggcacaagagtttgtaacagtattac

SEQ ID NO: 302939 - DNA, 278 bp, Zea mays
ctcctagctaataaacaaactcacggggacaccggacgcggaagccgcctccgtctcctagtcctaacccaccaccaacgcaatactctacagcagcggaggaaagcactacagctcttggtcgagcagtagcaacaatggcgccgccgatgaaggtgtacgggtgggccgtgtcgccgtggatggcgcgcgcgctggtgtgtctggaggaggccggcgccgactacgagatcgtccccatgagcaggtgtggcggcgaccaccgccggccggagcac

SEQ ID NO: 302940 - DNA, 212 bp, Zea mays
cagagttcattcaccgccgtctccttcatagttcattcccgaggcagagattttttttggggggtgaagcaccgcgcaactccttctcagttctcagcggcagtcatgcagcggaacaactcgttcgggacgtcgtgggcggaccagtgggactacggcggcgacccgagcccgagggcgccgcgcgacggcggcgtgggggagaagaccaa

SEQ ID NO: 302941 - DNA, 268 bp, Zea mays
aacagacccatttctttccggacacgttcttcgtcatacaacgggcaaatatgtcggacgctcagacgaagaagtttggaaagggcgagcggacgatccctcaccacagccagaaggctcagaagtggtatcccgtggacgatgagtcgcaacccaagacactccgcaagaccgtccgccccgccaagcctcgtgagagcctccagcctggtaccatcctgatcctcctcgctggtcgtttccgtggcaagcgcgttgttctcctcaa

SEQ ID NO: 302942 - DNA, 232 bp, Zea mays
cggcgtcaatctcgggctaaagctgaatcagaacgaaagcttatcaaggggcgtaagcctgatctccatgagtcacgtcatcagcatgccttgaaaagggccaggggagctggaggtcggtttctcaactcaaagtcagatgacaaggaagagaactccgactcgagtcacaaagagaatcagaacgtgattgcgccccacaggagcggccaacggtcaacccttcggtttc

SEQ ID NO: 302943 - DNA, 250 bp, Zea mays
  unsure (1)..(250): unsure at all n locations
tagctcggcgggatggggtgcagcgccggcctcatcgccgtcgacctcgccaaggacatgctccaggcgaaccccggatcgtacgccgtggtgctcagcaccgagaacatcaccctcaactggtacttcggcaacgaccgctccatgctcctctccaactgcatctcccgcatgggcgtgngcgagccgctgctgtccaacaggcgcgcggacgccgggcgcgccaagtacggctgctccacacaacata

SEQ ID NO: 302944 - DNA, 258 bp, Zea mays
gcacctctgagttcggcaaggctctcggcggcgctcagtacggcggtatctcctcccgaagcgagtgtgatagtttccccgaacttctcaaggacggctgccactggcgattcgactggttcgagaacgccgacaccctgacttcaccttcgagcaggtccagtgccccaaggctctcctcgacatccgtggatgcaagcgtgacgacgactccagcttccctgccttcaagggtgatacctcggccagcaagcccca

SEQ ID NO: 302945 - DNA, 257 bp, Zea mays
cttcgccatcctcacagaaatccgtcaagatgaccaagcgcaccaagaaggtcggcgtgaccggtaaatatggtacccgttacggtgcctccctgcgaaagcaggtgaagaagatggaaatcacccagcacgcaagtacacctgcactttctgcggtaaggttaccgtccgaagaaagtccaccggtatctggaactgccgctcctgcaagcgaaccattgctggcggtgactacactgttgccacccccgctgccg

SEQ ID NO: 302946 - DNA, 268 bp, Zea mays
ctgccatcgttcatcaggagagagttgatcctgcatcaggaatctgataactcagcgcagtatctcagatcgataccgagcagctcttggctcatttggtagaagcagaaatgaacaagagaacaaaagaaggaaagtacaagggaagaaaattcagctccgtgtgccacttcttcggttctcaggcccgaggatcgctgccatccaacttcgattgcaactatgcttatgtccttggccatatctgtgtgcagataatggcggctgg

SEQ ID NO: 302947 - DNA, 271 bp, Zea mays
ccccattcagtcaccatggccttcactgctagcgatatctgcaagatcatcttcgccgtccttctcccccctcttggtgtcttcctcgagcgcgggtgcggcggtgacctctgcatcaacatcctcctgaccatcctgggttacattcccggcatcatccacgccctctacatcattctcaaatactaagtcagtcgtcatgagggaccaaccatcccgctgagcggaatggaggtgggacgacgaactggtgacgaagggaccgattcat

SEQ ID NO: 302948 - DNA, 278 bp, Zea mays
ctgatactcttggacacggtacccatgttgctggcactattgcaggctcaacctacggtgttgcgaagaaggcaaacattgtttctgtcaaggtcttccagggagcagagggaactgattccggtgttctcgccggtttcaactgggctgtcaacgatatcacctccaagggtcgcgccggcaaggccgttattaacctttctcttggtggtgacgcatcccaggcttgggtaactgctattgacgctgcgtacaactcaggtgtgctctctgttgtc

SEQ ID NO: 302949 - DNA, 268 bp, Zea mays
gccagagtccagaaacaaaagcccagaggagatgagggacctgatacctaagatccaggttatggctcgttctctgccgcttgacaagcatacccttgtgaaaatcctgcgaggtatgttcagggaggtggttgctgtgacaggcgatggtactaatgacgctccagcattgcatgaagcagatatttcggcttgcaatgggcatagcaggaacagaggtagccaaggagagtgccgatgtgatagtgctggacgacaacttcacaac

SEQ ID NO: 302950 - DNA, 265 bp, Zea mays
tgtgaatctctcgactcatttgttacggccattgaagatgccaaagctgtttttgagatgggaaaaaatttaggctttgacatgcatatacttgatttaggcggtggatatcctggcacatctgatgcgaaaataccatttgaaccgattgcagaaattattcaagaaacacttgatccttgcttcctacctgttgatgggctagaaataattgcagaaccaggtcgatattttgctgcttctgcgttcactttggtgactcagg

SEQ ID NO: 302951 - DNA, 287 bp, Zea mays
gagcagcatggcacaagaaaaggcccacgttcctacccaatgctccgcacttcgcaaaggaggcttcgtaatgctcaaagaacacccctgcaagatcgtcgacatgtccacttccaaaaccggaaaacacggcggtgctaaagtacatcttgtaggcgtagatatctttaccgagaaaaaagttgaagatatttgcgtctccactcacaacatggacgtacctgttgtagagcgcaaggactatcaattaattgatatcgatggtgatgacgtaacttatttggatg

SEQ ID NO: 302952 - DNA, 284 bp, Zea mays
cttgcgctgatccacctctaccggcagtacgtgttccggcactctccaagcatggagtcccctttggagtttcagttcggtgttgtgctcaacttcaaacatggagtgaagcttcagtccatcaagaggcacaaatgttagatcggcgcggtggtgttgattattctgatccttgatctatctttgtgtcaataaaggtgcaacgtatacggtcatacatgcacattttgcaaaaggaaacaatatgggggtgattggtctcaacttaacctgtattatgcaac

SEQ ID NO: 302953 - DNA, 285 bp, Zea mays
cttctcctcgacccatcgcactttctattctcatccagctcaccagttcttcaggtcgcaacaatggacgcctccaagcagcccgtcaagctcgtcaaggtcacccgagttctcggccgaaccggttctcgtggtggtgtcacccaggtccgcgtcgagttcatggacgaccagacccgatcgatcatccgaaacgtcaagggcccagtccgtgaggacgacatcctctgccttctcgaatccgagcgtgaggcccgaagactacgataaatgtgcattctgggg

SEQ ID NO: 302954 - DNA, 280 bp, Zea mays
attttggatggttttttttcaaaagattcttatagaagctggctgaaaagctggggcgtttggcgatctgcagcagcttttggtggccaaaagctggaaaaagcctaaacaaacagggcgtgcttgcatgcgtcttgaggcgtgcaagcagttcaggttcctccgttcctgtagttggttatttgtacatctgtgagttatttgcacgacgagtcaatttatgctaccccgtcacaactcacaagttagttatttccttgtctgcctgaggtccaaagtc

SEQ ID NO: 302955 - DNA, 271 bp, Zea mays
gttctccaccctggccatccccaaggccgtcggcggcggcgggcggaagaaggtgcacatcgtggtctacggcgagcactactacgggctccagtggccgtcgttgctgggctactggggtagcctggaggctgggccgcccgacgtgaggatcaccgccatcgacttccccgagcccggcttccggccggatgctcggctccaggcgaccgggcggcggctcacatgcttcgctcggcggcatggcgtccccttgaggttccacggcatc

SEQ ID NO: 302956 - DNA, 277 bp, Zea mays
ggacgttggctttgatgaaaatcacttttctcgctatttgcttgtttctcttaatttccatcgatgtgttggctgtccacagacaatactatgaccttttgggtgttgagccaagcgcctcacaaaacgacattaagaaggcctatagaaaactttctatgcaataccatcctgacgttaatccatctgctgaggcccacgaaaaattcacaaagatcaacaacgcttatgaggtcctttctgatcctgaaaccagaagaaaatacgatcaattagg

SEQ ID NO: 302957 - DNA, 269 bp, Zea mays
aagacctccagctggccgtcgaggaggcagcgaactcctggacgcggagaagctggagatcgtcgatttcaccagcttcgtggagaagtcaagcgaccccggccactacgtcatcttctgggagctgagctccgacgcgagcgaggacgtcctgcgaggctgcgcgaactgcctggacctagcctatcgtcgatgctgggtatgtgggctcgaggaagatcagagccatcggcccgctggagctgcggattctgaagaggggaacttca

SEQ ID NO: 302958 - DNA, 270 bp, Zea mays
gtaactttactcaaggaacaattaaagatagcaaacctggagaaggaagaaatttcgttgaagtttgataagttgtctgccatttgctcctctcagaggcgagagatacaagagcttaagcaagctttggctgcagcttatgttacgccaccagctaaacagttcagagaaaattcaagtgttgatgtcaccccacccagcaaaagcctcgacactccgccgagggagaagattgaaggaacccctccagagctccggcaaggcctgttt

SEQ ID NO: 302959 - DNA, 268 bp, Zea mays
ataatgtgccaatgctccaattagatatagtatggtgttattttgtgcttcgtgatgtatcgtgcttagaggtcgcaggggcccgcctagaaaaagcacggttaggttttgagcgttctcatgggaaagattccacccgcttcagaatactccaggctggccggcaagctgatcttgctatttctcgtaaggctggagcttttggaaggagtggtggcataccataatggtcatgttgaaaaggcgcgtgaatctctcacttctgccc

SEQ ID NO: 302960 - DNA, 278 bp, Zea mays
atcccgtcgccatggccgaaaaaacattcacctacgccgaagtctcggcccacaccaccaagaaggacctgcacatggtcattcacgacaaggtctacgatgtcacttccttcgtcgacgagcacccaggtggtgaggaagtcctcctcgatgtcggcggtcaggatgccaccgaggcattctaggatgtcggccacagcgacgaggcccgcgaaattctcgagggattgaagatcggtgtcctcaagcgccacccggcgacccggcccccaagacca

SEQ ID NO: 302961 - DNA, 140 bp, Zea mays
agccctggcgcaccgacctcggcggtcgcaccgtcggtgatcgcgagtactgccacgccatatttaccaagtacttcaccagccggttctggtcggaccagcggtttgccgggacgttcgtggtgcggcggccgtgctac

SEQ ID NO: 302962 - DNA, 284 bp, Zea mays
cggctcgagcgcgcgctcgtgctcgccgcgcagggcgtctacttcaacgcctacttcgtcgcctacctcgcctcgcccaagttcgcccaccgcttcgtcggctacctcgaggaggaggccgtgcactcctacacggagtacctcaaggacctcgaggccggcatcatcgacaacacgccggcgccggccatcgctatcgactattggcgcctccccgccgatgccaggctcaaggacgtcgtcgccgtcgtgcgcgccgacgagggcaccaccgcgatgtcaat

SEQ ID NO: 302963 - DNA, 288 bp, Zea mays
tatctgctccatgggcagatggaacaggtctggaggacccactggttttggaaaaggattgtagacgaagatgcggctgggtgtgcgtcatgacgctcttcgtgtatttcttcctgccggagaccaagcagctgcccatggagcagatggaacaggtctggaggacccactggttttggaaaaggattgtagacgaagatgcagcaggggagtcaccgagagacgctctcgcaggaaccatagctctgtcgtccacgtccaccacaacatagtcatcatcagcaatac

SEQ ID NO: 302964 - DNA, 130 bp, Zea mays
cttccagcagcagcgttggctgttgcctgttggcctgtaaattcgcgtggctgaaactgggaaagccgggaactgaaaggcttaccgcttccgctttgttagtgatgctggtgatgttctaagagctttt

SEQ ID NO: 302965 - DNA, 282 bp, Zea mays
atttcgctcatcatcaggtggtgtgagggtggtggtgacgagagaagactcagaagcaacggaaggatcgggttcagaacgaggtcagaggtggagatcttggacgacggattcaagtggaggaagtacgggaagaaggccgtcaagaacagcccaaatccaaggaactactaccgctgctcatacgagggctgcggcgtgaagaagcgggtggagagggaccgcgacgacccccgctacgtcatcaccacctacgacggcgtccacaaccacgccagcccc

SEQ ID NO: 302966 - DNA, 280 bp, Zea mays
ctcggcgcgtgtagagccatgctgggcgcgcgtgtgcagctgaaggggtggcaacaggcagctgttgcatttggttctgcgtttggggccttgcttgaccctaggagggctgatcttatagctgctcttggagagactactgggaaaccagcgtttgagcgtgtgctgcaacgaatgaagaactgtgcagatggcagggaagttctctcggagcgtccccgcgtggtatcctcgcaggtttcccatgcctgggacctgcctcagaacacatttggcgcgg

SEQ ID NO: 302967 - DNA, 291 bp, Zea mays
ggcggacgacagccgtcggcactctagttgccggcatcgcatcagagggcaacgggagtggagatggcacgagcgacagcggaaaagggaacgccgccaacggcgagaacggcggtggtggcagcctgcaggtgacggcgcagcaggtggccaggttgatggaggaggacatgggcaccgccatgcagtacctgcagggcaaggggctctgcctgatgcccatctctctcgcctccgccatctcctccgccacgtggccgtccctcctatcccgcccctccatgggcgcaa

SEQ ID NO: 302968 - DNA, 290 bp, Zea mays
aaagattgcggattgtgcatacaattgagtttaacgaaggaggagctaacatacaaattgtaagggttgctgtgtatgaagaaaaatgggccagcccagcaaatatccatgttgaagatgatacacttgttgaccttaaaccattctctcaaagaagccggaccaaaccgtcagaactgacaggctcctggaaagtatacgaagtcagtgcaacgccaattttcagtgataaagtgcaagaactagagggcggttctccattggtctacttgtgcatggagacggtgaag

SEQ ID NO: 302969 - DNA, 286 bp, Zea mays
cggcacgacgtcttcgttcatggtcctcttctgtccgtccatgtccatggtccagttcatcctgctgggcgtggaaggcgtcggacaggcctgcgtttacgccggggtatgcttcgctggctcggtcgcgggggtcgtcgtgatcgagcgagccgtcaggaagtctggccgggtctcgctcatcgtgtccctcgtcaccgccatcatggcgctcagcgctgtcatcgtcacctgcttcggagcgttagacgtctggatgcagtacaccaccggggaatacatgggc

SEQ ID NO: 302970 - DNA, 278 bp, Zea mays
gctggccacgcacctcccctactccctgctgcccggcagcatcaccggggacggagagcactcggggtgccgcatcgtgtacgtctgccgggaacccaaggacacgctggtctcctactggatgttcacgaggaaggcagcgcccgcttgtggggttgacgcccggtcgttcacgatccaggaggccttggagctgttctgtgatggccgctgtcccggcggcccacagtggaaccacgtcctccagtactggaaggagagcgtgaggaggcctgaca

SEQ ID NO: 302971 - DNA, 280 bp, Zea mays
cgtctccggagtctcctacgccggcatccggggcacctacgacccgcgcaccccgcccatccacttcgggtgcagcgacgccgtgccgtacaccaacatcacgctctccgacgtcgagctgctccccgcgtccggcgagaccatcgacgaccccttctgctggaacgtgtacggcagcaccgccacgcctacggtgccgccggtgccgtgcctcatagaaggcgtgcccaggaacctcgacgataacagcagcctcaaatgctactagcagcctcaaatg

SEQ ID NO: 302972 - DNA, 277 bp, Zea mays
aggccgggtggcctcatcggctacgacaacatgctgtggaacggctccatcgtgctcctggacgacgcgcccatgcgcaagtacatccgcttctaccgcgacttcgtgctcgccctcaacatcgcgctcgccgccgacgagcgcgccgagatctgccagctccctcgttcatgtggtgctgtgtatcggaagaaaatgcgacgagaggcgcgcgcgcggcgagctcggccgtggcactgggcttcagcggggaggcggagaagccccgcgaggaggg

SEQ ID NO: 302973 - DNA, 265 bp, Zea mays
cgacgactgggtaggctgccgccgccgccctacgccaggtcccgaggaccaaggcattcgtattcgtcagtctcttcgccgggcgacgccaggtttcggaatgatttgtgcaacaattgtaagcgtcctgggcattttgctagagagtgtcctagcgtggctgtctgtcataccttctggcttcctgggcacattgcagctgaatgttcttccaaaggtacctgctggaactgcaaagagcctggccacatggctaacagctgcc

SEQ ID NO: 302974 - DNA, 243 bp, Zea mays
ccagaagaccgggccggtgttcgcgtcggcgttcagccccctcatgatgatcatcgtcgccgtcatgggctcgttcatcctctccgagaagatctacctcggggccgtcctcggcgccgtgatcatcgtggctgggctctactccgtcctctggggcaaggagaaggagacgcgggagaaggaggcggacgccaagacggcgctgccgatggcagtggtggcgtcgtcgtcgtcttccgacga

SEQ ID NO: 302975 - DNA, 288 bp, Zea mays
cagaattcggtcgagcagacgtgctgcggactctttgaggagatgcgtgaaagcaattgcccaccagtcacaaccacatacaacatcatgacaaatttactcggagagcaagaacactgggagggtgtggaagcaatgctatcagagatgaaggagcagggactggtacccaacattatcacatatactactctcgtggatgtgtatggaaggtccggtaggtacaaggaggcaattgattgcattgaagcaatgaaagctgatggtgggcgaccggcatccatctcg

SEQ ID NO: 302976 - DNA, 271 bp, Zea mays
aaacagtcccctttcccttctccacgatgtcttctgatttgatctggcaagtaattcgtaataataactcctttctcgttaaacgtgatggagttcaactttcagctgaaaagaataatttaactaataaacattcatttaaatattctggtttagctaatacaaagacagttggagttaacttatcataagataagaaaattactcttgctatcaaacgtaccaagacatctgcctgacgaactacatttacatgggcgacttcgtcgat

SEQ ID NO: 302977 - DNA, 266 bp, Zea mays
atcaagccgcaaaaatcaacatgggaaatcctgaagagtgggttgagatcctcaagcagtgcaagtacctgcctgagcaggacctcaaggagctgtgcgagatggtgaaggagctccttctcgaggagtccaacgtccagcctgttgcggctcccgtcaccatctgcggtgacatccacggtcatatctacgacttgctggagctcttcaggattggtggtgagatccccctgaccaactacattttcatgggcgacttcgtcgat

SEQ ID NO: 302978 - DNA, 267 bp, Zea mays
cgaaacgcagctagaagagcttggcaacgggctgtacagttctggcaaaccattcatttgggttgtgaggtcgaatgaagaacacaagctgtccgatgagcttcgcgacaagtgcaaggagcgcggccttgttgtctcttggtgcccacagctcgaagttctagcacataaagctacaggttgtttctacacgcactgtggatggaactcgacactggaagcgattgttaatggcgtgccaatggtggcagtaccacactgggctga

SEQ ID NO: 302979 - DNA, 230 bp, Zea mays
cggctcgagatacaacaacacatccatcacttttttatttgttttttcttttcattttaaaaaacttcaaaacaaacaactcaaaatgtcagctggaaagtgtgctgcttgtggcaagactgcctacccattggaaagtgtcaccgctttggaacaaaccttccacaagatttgcttcaagtgtgatgtctgcaagggaacactcaacttgaagaactacaagggtgtta

SEQ ID NO: 302980 - DNA, 273 bp, Zea mays
ggaacacagctctctggaggacaaaaaaacgggttgctattgcaagggccatcttgaaggacccaaaaatacttctactcgacgaggcaacaagtgctctggatgctgaaggagagcacattgttcaagatgcactggaccaagtgatggttagcaggaccaccattgttgtggcgcaccgactgtccacaattaaaggggcagatatgatcgtagtcatgaaagatggtgaagttgctgagaaggggaagcatgaataccttgtggaaaggg

SEQ ID NO: 302981 - DNA, 275 bp, Zea mays
ctccaggaaggtctccccgaaggtgccgaccccggccggtgccggtggtggcagctacagcatagcccaggtgacgtacgagctgaacgtgctgagcacgagaggccccaggcggatgcactgcgtcatgcgctccataccggcgtccgcggtggagccgggcggcacggtccccggacagctcgagcggatcctgccccgggcgctgctggaggagtaggacgaccccgaggattcgtcgtcgttccgccgcaccggcaccggcacacctcctt

SEQ ID NO: 302982 - DNA, 257 bp, Zea mays
ccagatttctatttggtgatgccaagcttcagtggaatattcgagcccagcttgctcttggggtggcaagggggctgctatacttacatgaggcatgcagcacacagattatccactgtgacataaagtcccagaacatccttctcgatggcaacttcacagcaaagatctctgacttcggaataactaaactgctccgaaccaaccagacacaaacaaatacaggtattcggggtacacgaggatatgttgctcct

SEQ ID NO: 302983 - DNA, 255 bp, Zea mays
ggaaaacgtccaagctacctggtgctacaatatttaagactcagctgacatacaaaaggcgacgcagacagacatttgaggattttccacaatcagcgctgaacatgatcgagatactacttgcaattaatccagcagatcggttaacagcgacttctgcattaagaagcgatttctttacacctgaaccttttgcatgtgaaccatcgagtcttccaaaatatcctccaagcaaagaaatagatgtgaaaagaa

SEQ ID NO: 302984 - DNA, 260 bp, Zea mays
tgaagcgtaaaggatcgcaatcaggaaataagacaaacttcaagaagcccaaaccaactcaatctgaacaattgaaagagaagaagcttattgttgttttagatcgtgcttttctggaaactgtatacacgaaggaaaaatatgaactactgaattgtgacgaccaccaaaggattataaaacaaaattacagagacatatcggatgttaggcctgacattctacaccagtgtctcctaatgttaatggacagtccgctg

SEQ ID NO: 302985 - DNA, 265 bp, Zea mays
cgttctttcagcgtcgccaattttcattccatcaacgtccaatcacccagacaatagtcatcgctgattgcattgaaaattcgtcaagatggttctcgcggtcgatctcctcaaccctactcctcagtctgaggctcgcaagcacaagctcaagacccttgtgcctgctcctcgctccttcttcatggacgtcaagtgcccaggctgcttcacaatcaccaccgtcttttcacacgcccagaccgtcgtcatttgcgccggctgc

SEQ ID NO: 302986 - DNA, 250 bp, Zea mays
gcagccacctgacttcaagacaaggaaggtgatgagttacataggaactccgatgtgctagaaatcctcatgaataccaggtttctaatggtctatgtgcagtatgagcgttcactagaaacaatcataggacacgatcaaatcatctggctcgggggcctaaattaccgaatcatgctttcccattcgttcgtgaaggcccttgtcgagatgcgcaattctagagaaagattaggtgagagcttggtaa

SEQ ID NO: 302987 - DNA, 255 bp, Zea mays
ctttaccagatggtgtatggcaagacaccatttgcagactacaagactttctgggacaaatataaaggagtgactgataggaaccacaagatcatgtatgaaccagttgacaacccatggctcattgatttgatgcaaaggtgtctcgcctgggaccgaaatgaacgatggagaacacctcagtatcttaagcacccttttctcaatcctccagttccaagggatttacctccctctgacgatgatccatatagg

SEQ ID NO: 302988 - DNA, 248 bp, Zea mays
gtccacacttcgcaacaacagaaaaaaatcctttttttaattgaattttttatcaatcaaaatgactgaaacaagagagatcaacgttttcacggccaagctcgctgagcaggctgaacgttacgatgagatggttgaagccatgaagaacgttgctgatttgggacaagaactcacccttgaagagcgtaaccttctctccgttgcctacaagaacgtcattggtgcccgtagagcttcatggagaa

SEQ ID NO: 302989 - DNA, 264 bp, Zea mays
  unsure (1)..(264): unsure at all n locations
gcttctcaattcggacgaggttctgtggacaggaagagaccccgaaattgcaggcctagtcaagagttatgccgaagacgaggcgctgttctttgagcactacgtgagttcagtaaccaaaatggggaacataaatcccctcacgggtcacgacggagaaatccgcaagaactgccgtaaggtcaatcaagagatctagtcgtcgaaaggcttcagtttcagtcnaggttcttttgcttatgacgggaaattgattcacacgat

SEQ ID NO: 302990 - DNA, 265 bp, Zea mays
gcagttatgagatgctcttcgagttcttcaactgcctggagagctctacccgactgctccgtatgaaggggtccaaggccacgttccccaacatctgttctagcattcagaatttgaccgagcggagatttacccacagccatcttgcacagctcaagtacataatgccagaggcgatcgtcatcaacttactccttttgcgtgacgacacgacatgctgcatgtaccctgatcttcaggtgaacctcctagttggtgctgttga

SEQ ID NO: 302991 - DNA, 288 bp, Zea mays
tagaagaacgcccaacaagccaagctcgaagtcgaagcaatggaggcactgtagggtcacgaaaatgttgtcaagcttattgaagccgtgaagctcgaagagtcttatattatcatcatggagtactgctcgaagggcgacttattgcaccacgctcaaaccaagctgagactctctgaagcagaagctttgcctttcttccaccaaatggtcaacgcactcgaccacacgcacgaaaagggatacattcacagagatatcaagctggaaaatatgttccttgacgac

SEQ ID NO: 302992 - DNA, 261 bp, Zea mays
gacgtccaggccaacacttacgcgtttggcgtgatcctgctggagctggtcagtggcagagcctcggtttccaaagatacaggaggcttggtggattgggcacgaaagcacctggagcagcccgaggaattcggcaagctggtggacccgaggctgcagagcgtgaaccaggagagcctgggcatcgtctcaaacgtggcgaacctgtgcgccgacctggagccgtcgcggcggccgtccatgagcatgatcgcggccatc

SEQ ID NO: 302993 - DNA, 234 bp, Zea mays
ccgatcgagtgatcaggaggagtatcgatggggcgacgctgctgcatgtcactcgggtctggatcgctgaggcgctcttcgtctatttctacagcgtctcggggggcatgtatgggattatcatgctaacggtcatgtgcgtcacagtgcgagcggctcacaattcgatagagtacaaacgcctaaagtcagggatgcagttgggggctgaggggtttactgtcgggttcttgt

SEQ ID NO: 302994 - DNA, 253 bp, Zea mays
cggctcgaggcctggccatctgcacgctcaacacggcctccttcctggtcaacgcgctctcgccgtcgccgcacctgcacctccccggcgtcacggccgaatacgtcgccgacgtcatggagaggggcttcctgctcagcctcgccggcaaccggctcttcttcgccggcgcgcccctcctgctctggatctccgggcccgtgttcccctgcgtatgctccatggccatgatctctgtactctacaacatgga

SEQ ID NO: 302995 - DNA, 269 bp, Zea mays
tcacaaggtcgatgtgaacggcgaggacgctgcgcccatctacaagtttctgaaatccagcaagaccggccccatgggcgaagacatcaagtggaacttcgccaagttcttggtggacagacaggggcatgtcgccgagcggtatgctccgaccacctacccactcagcatccagaaggacatcaagaagctgctcggcgggagctattgaattgaatatccggagacaatagatagatgcatgcactgccacttgaaacgcctgaaat

SEQ ID NO: 302996 - DNA, 291 bp, Zea mays
acggcgctctcgaagcggacggacggcggcagggcacggtggcaacggcggttgtcctgtccgtctctgtgatggccaccgctgccgccgctccaacgtctgtggcgccgtcccctgcgccaaggccaacgacagcagaaaggcggtggtgcccgtggacgcgtcggagctggagaagctcgtgctggcggtggcttataactccgtggaccgcgccgtgatcgccaggatcctgcgcggctccaggtacagggtgaccgccgtagagtcggcgacgcgcgtgctggagtt

SEQ ID NO: 302997 - DNA, 276 bp, Zea mays
gaatcgaagagctcggtctaagctgctgcgatatggtgacagacagaggacttggtttccttgcggcgggatgccctaatctcaagaaactcgacttattgcaatgcacccggctgaccgatcaaggtctcatcaatcttgcaagtggctgtcacaaactcgaagaggtcattctttacgagtgcgaagaagtcggtgatgagggtttaatggctctctgtgagaactgcccaaatctcaaagctcttatgctttcaaacacttcgattagggaca

SEQ ID NO: 302998 - DNA, 274 bp, Zea mays
ctcaagaccgaccgataggcagtgccgtttgacactgtaagcaacagctgcttcctccggctgcaggtgtctatcctccgaccataacctttgtggtttggtctgggatggagcacccatctgtggttcttggattctggctgtggtgtgtgatttaaatcgggtctctgagggattagagcaactattcaatacctttcagtttgtgaactgtaatgaaatggaatttgggcctgatgccacgtctctgttaaccacggcattgaccagagat

SEQ ID NO: 302999 - DNA, 276 bp, Zea mays
ggattgtgtgagattgaactttagccacggaactcaagaagaccaccgcaagttgttccatcttgtgaagtccctttccgttaagtaccaacatcaagtctctatcatgtgtgatattcaaggccctaagatcagaactggtcgcatggagaaacctttcgaaattcgcgctggcgagaaatgtcctgttacgcccaattatgtactcggaacacctcaactcatccaaatcaagtacgccacgatgttgaaagatctcgacgcaggcgacgttat

SEQ ID NO: 303000 - DNA, 265 bp, Zea mays
ggtggattggatctccaagttcccagagtgcaacacctctctggagtcgcttgtcttcgactgtgtcagcgtcccgttcaactttgaggccctggaggcacttgtcgcacgctcaccggctctgcgccagttgcgtgtgaaccaccatgtgtcagtagagcagctgcgccgtctcatggcaagagcaccccagctcacgcactttggaaccggtgcattccgatctgagggcgcccctggtgggggtttggccgtgactgaagct

SEQ ID NO: 303001 - DNA, 260 bp, Zea mays
cagggatcaaattacttggagatcgaccttgatgtacaccgctttagcttcatctcgaggaaagggctcgaagcattccgagaaagattgaaacatgggatgattgatctcggtctaaccatacaggtaggttgatggttctttctgccttctttattaatctttgtgacacaaaagaaatgccattcgctagttcaatatcagcctgaaagttgttaagaatatctgaagataaaactgacctagagaagcttgggctg

SEQ ID NO: 303002 - DNA, 258 bp, Zea mays
ccgggcagcccagaaccagaggagggagccgccattgctgcagatccccaggagcttcttgagggttagagaggggaggatgacagttagagtagtgatgaggtaccttgttaacaagctgggccttgacgacgattcacagttagagattacctgtcgagggcaacaccttcaaccgacaatgacgctgcagcaggtccgtgacaccatttggcggccagtgccggctgaggctgcagcggttttgccggcccccgg

SEQ ID NO: 303003 - DNA, 263 bp, Zea mays
cttcggaaccacagtcttcgcttccactggcctcaaggacagctacgtcactcagctcattcttggctcagtcaactgtgcttgcacattcggcggtctctatgtcgtccagaagtgtggtcgcagaaagtctctgatgatcggtgccgtctggatgatgatgtgtttcttcgtctacgccttcattggacacttcgctcttgaccgaaaggaccctctatccactcccgctgccggtgccgtccttgtcaccttctcttgct

SEQ ID NO: 303004 - DNA, 258 bp, Zea mays
gcgcgcaggggcacaaggagtggctggctgaggtgttcttcctcgggcaactgaggcacaagaacctggtgaagctcatcggctactgctacgaggccgagcaccggatgctggtgtacgagttcatgagcttcgggagcctggagaaccacctgttcaaaagtaccaacggcgccctcccatggatgacgaggatgaagatcgccgtcggcgcggccaagggcctcgccttcctccacgacgctgacccgcaggtga

SEQ ID NO: 303005 - DNA, 262 bp, Zea mays
cgaggatgctgggaaagagggtacatgctggccaagagaatggcttgcggcagattttcctcaagcacgtttttttacggtcaaatacaagacaaatttgacccaatggactggagccagcttgcctcttcaggaggtgagctctatgctgctgaggaagttggtggctgctgggattggtagtcggcctgtcattttcgtgacacataggttttctatagttgtccgcattttggcagtaaacttgcagacatgccatggc

SEQ ID NO: 303006 - DNA, 279 bp, Zea mays
tgctgctatggaggctttgcagtacttatctgttcgaaatgccgtttaccaagctgtatacaactactggaaatcaaagagggagcgatggcaaaagcctattcttcggcgtttgcagccgcctccaccagtgaatgatacaaatccatacaatgtcttcagaccaagagaaaaggctcatcgtctttatacaagaaggtcgcaaagaagggaaaacaatatccaatcattcgaaaaactccgcttggtgcgacgcaacttggagcaagcaaaagcact

SEQ ID NO: 303007 - DNA, 277 bp, Zea mays
ggtcaatcccttccacgacttgatccctaacccacaatgtctcctcccgctgctatctacgagcctactgttgcccctaccggcatcaagggcaaggtggtcgtccccgagacggtctccactaccttgaccggccagggccagagcaagctcctggagcagttcggcggcaagtgggatgagttcaagttcgtccctatccgcgagagccaggtctctcgcgccatgacccggcgctacttccaggatctggacaactatgccgagagcgatgttg

SEQ ID NO: 303008 - DNA, 286 bp, Zea mays
cggcacgaggctgctcaagatcctgataccgcagctggacccgctgacggagcagcagctgctggggatctgcaatctgcagcagtcgtcggagcaagcggaggaagctctcgcccagggcctgcaccagctgcaccagtccacggccgacacagtcgccgcgggcacgctcaacgacggcgccgccgcccccaagcgcatgaacatcatggccgtcgcacttgagaagctcgccagcctcgaaaatttctatcaacaggccgacaatctaaggcaccagacgttg

SEQ ID NO: 303009 - DNA, 276 bp, Zea mays
cgcctccgcctcagacgcagcagtacgcgacaccaccgcagcattacgcccctctgccgcagcagcagtacgctcctccaccgcagcagcagtacgctccttcgccatatggtaccacgccgggaagcggtgaagtcaggacgctgtggatcggagatcttcagcactggatggacgagaactacctccactacaacgcctttgcggccgtggcccagcagattgcttctgtgaaaattatacggaacaagcaaactgggcactcagaaggctatg

SEQ ID NO: 303010 - DNA, 269 bp, Zea mays
tgctgtggtaacttcacaactacttgtcagtttatatagtgctgcaggtaagaaggcgaagcggcggaattgttacaccaggcgcgcagtaacttgtacccgctgcgcagtggaccgcaaggatcaaacagtaactctgcaaggtgggatcgacacgcgctcggaagtcggatcgtttctccgcaacgagctcagggaaggtgttttttggaccttcggcttcccgaagctgaagaggcttttttcacgggtcaagctcgttacgaaga

SEQ ID NO: 303011 - DNA, 266 bp, Zea mays
cgaaacacatataagtcagccaccatgggtcgtatgcacagcagcggaaagggtatttcgggatcagctctcccataccgtcgtaccccaccttcatggttgaaggtcacttcatctgatgtctcagagctcatttgcaagctcgccaagaagggtcttaccccatcccaaattggtgtgattctcagagattctcacggtgttgcccaggtcaagaacgtcactggtaacaagctcctccgtatcctcaaggccaacggacttgc

SEQ ID NO: 303012 - DNA, 266 bp, Zea mays
caagcacacacacaatgggaaaggtccacggaggtctcgctcgcgccggtaaggtgcgcaacaacacgcccaaggtcgccaaggccgagaacaagccgaagcctaaggtcggccgctcgcagaagcgcctcctgtacagccgccgcttcctcagcaaggtcgagaccaccggccgcggtggccccaacagccagaagcgcaagagcgaggaggccaaggcctaagcagctcgcctactttgagcactattcaggcatgcctgcacg

SEQ ID NO: 303013 - DNA, 264 bp, Zea mays
atggatttggggatgatcaaaatccttatactgaatctgtggatctattggaagatttagtgattcaatatattactgaaataacatataaggcaatggaagttggtaaaacaggtcgagtgacagttgaagatatcatgtatttaatgaaaaatgaccctcgcaaatatactcatgtcaaagaattgcttctaatgaatgaggaactgaaaaaagcaagaaaagcttttgatgaagtgaaatatgctgcgctttaattttgtt

SEQ ID NO: 303014 - DNA, 112 bp, Zea mays
cgaaagttgagtgcctatgtgtgagcatgcttgcttgtaacgagaccttgaattgttcggaaatgagcattcctgtgctcttctttaaaataaaccttgccttaggttcctc

SEQ ID NO: 303015 - DNA, 273 bp, Zea mays
gccaaactaaactgccagacgcacagccgcggagcgccagagacagacgctgccgccgtcggccgtcctccgccctccagttgagcggttcaagcagagctgatggctacatcagagccagtacaagagagtttggtggtgcactactcacaacctagtaggccccgggtcctccttgctgcttcaggaagtgtagccgctataaaatttgagagcctttgccgtagcttctctgagtgggcggatgtccgagctgtggccaccacgtcatcc

SEQ ID NO: 303016 - DNA, 288 bp, Zea mays
caatcacgacctcctagatctctggtatattcaccccagtactgtgtgacccttagctcaaaatttgcggtccgaaagctatatccaagaagacattatgaccggtcgcggaaacccaggaggccgaaagacactccttgcgcccatccactttattttcaagctgttgcaacaacgctccacggtgtcgatttggctatatgagcagctctctttccgcatagagggaaagattcgaggattcgacgagtttatgaatcttgttgtggatgatgctgtcgaggtccg

SEQ ID NO: 303017 - DNA, 273 bp, Zea mays
cgtgaatgcgcgcgtgtggacaggtgacgaaccacggcatcccggcggcggtcgtggagggcatgctgcgcgtggcgcgggagttcttccacctgccggagtcggagcggctcaagtgctactccgacgaccccaacaaggcgatccggctgtccaccagcttcaacgtgcgcacggagaaggtcagtcactggcgcgacttcctgcgcctgcattgctaccccctccagagcttcgtcgaccagtggccgtcaaacccgccgtccttcaggt

SEQ ID NO: 303018 - DNA, 273 bp, Zea mays
gaacgagatacccatcgcctctctaccttcagtataatagcaaccatgcgatccaagttcaaagacgagcaccccttcgagaagcgcaaggccgaagccgagcgtatccgccagaaatatgctgaccgcatcccggttatttgcgaaaaggtcgagaaatccgacatcgcaaccatcgataagaacaaatacctcgtccccgcagacctcactgtcggccagttcgtgtacgtaatccgcaagcgcatcaagctgtcgcccgaaaaggcgatc

SEQ ID NO: 303019 - DNA, 231 bp, Zea mays
gacgaggagaagctcatcatccacctccactccctcctcggcaacaagtggtccgccatcgccaccaagctgcccggccggaccgacaacgagatcaagaactactggaacacgcacctccgcaagaagctgctcgccatggggatcgaccccgtcacgcaccagcgccgcaccgacctcaaccttctcgcggccggcggcttcaccaacctcctcgccgccgccaacctc

SEQ ID NO: 303020 - DNA, 263 bp, Zea mays
  unsure (1)..(263): unsure at all n locations
cggctcgagattctgaagaaggcgaccaagttggcgagcgaaggcnaggcccgtcgctttaaagcaaggctagttgcaaaaggttttagtcagattccatgaattgattactctgatgtctattctcctgttgtcaagcatagttcaattcgtacctttcttagtcttgttgctgtacatgactatgagcttgaacagttagatgtgaaaactgctttcttacatggtgatttggaggaggacatttatatggaccagccaga

SEQ ID NO: 303021 - DNA, 269 bp, Zea mays
ctgcggagcattggatgaggacgccatggagtgcaggtgcaaggagtttgaggagaagaaggtcgtggagatcagcaaggacttcgagctcgaggagagcgagcgaggaggaaggaaggcccgtgaggaggaggagaaggagtaggagaaggttgggcaaggctctcaagaacgtcgtcggcgagaaggtcgagaaggttgttgtcagctagaagctcggcctctccccctgggccatccgtagcggcaattcggttggtctggcaaga

SEQ ID NO: 303022 - DNA, 201 bp, Zea mays
tcttcagataatcgttcttggcacgggaaagaagaagatggaggaggaattaatggagctggaagtgaaatatccaaagattgctagaggcatagcgaaattgcaatgtgtccattgggcacatatgatgtttgctaggtctgacttcagtattgtcccaagtaggtttgaggcatgtggtctcattcagttgcaagggat

SEQ ID NO: 303023 - DNA, 265 bp, Zea mays
gtttatctcagcaactaattacgtgtgaattgactgcattcatcatggctaccaaagaagaagctagcgctgtccccgccgccagtaaaacttcatggagtagcttcctgaagtccatcgcatccttcaacggcgacctctgctctctcaccgcaccgccgttcatcctctcaacaacctctcgcaccgagtattctgcgtactggtgcgaacatcctgcactcttcgttgcccccgcacgtgagcccgatcctgcgaagagagc

SEQ ID NO: 303024 - DNA, 261 bp, Zea mays
taagaagttaaagaacggagaaacagtcgatgccagcgcttacattgatgccgtcgtggagacaattgagaccactaacattgttgcccagaccgcagaaggggatcccaacaactgcgtcatgctgggtggtcatagtgacagtgttgcagagggccctggcatcaacgatgatggatctggttctctgactctccttgaagtcgctactcaactcacacactaccacgtcaacaattgcgttcgttttgcttggtgggc

SEQ ID NO: 303025 - DNA, 250 bp, Zea mays
acaagcatttccgaacgggtggaagggtgagaagggcctgtactcggttgggttcacccggcgtggactgatgggcacctcggtcgatgccaggagggttgcccacgacgtcgagcagcaatggcggaaggccaaagggacgcatcgggacggcgttcctctacctctggtcgctgttgtttaccatggtgatgggttgtgattgtgagttgccaaagggtgtatgtacgtacgcatgcattctgctgct

SEQ ID NO: 303026 - DNA, 247 bp, Zea mays
tcgagcttcgataaagatgactgggagcactcaaaaaaattgaccactctagatctgtgccaggttgcaggggatgacttgttgatgtctgatcctgaacgcattaagcgggcagttaatgagtacacttgcaacgctcttgttctcaaggcaaatcaagtgggcactgtcactgaggacctagaggttgtcaagcaggcaaaggatgctcattggggtgtgatggtgtcacataggtcgggagaca

SEQ ID NO: 303027 - DNA, 250 bp, Zea mays
agaaaaaccaaaggcatactatagatttggcgacacaatgaaccccgatgtgtggtttgagccatcagaggtctgggaggtcaaagctgccgatctaagcataagccctgtacatcgtgctgccaatggtatagtcgatccaaataagggtatctctctaagattccctcgcctattgagattatctgccgctaaaagcccagaacaagccaccacgtctgaccaagtcgctgacatgtaccggtctcaa

SEQ ID NO: 303028 - DNA, 249 bp, Zea mays
aaaacacaccagatcaattaaaaatggcagacgaatcagctaagacatttaccttgagggtacgaaaatttatgactaatcgcttactcaatcgtaaacagatggtcattgatgtatatcatccaggccgtcctacaatcccaaaaaaagatttaagtcaagttttggcaaagaagtttaaaactactcatgacgctgtgttttgctttggattgaaaacacatttcggtggtggtaagactactggat

SEQ ID NO: 303029 - DNA, 247 bp, Zea mays
gagacttccgtcctgtcaatatgcgtcaacaccgctattctgctgtacatggtaccgctgggccttggcacatctgcaaggtgttcgaccatcagggctgaacagaagattggatgtggcaaacagaagattggagcacgcgtaaacctcggcgccttttacatggttggcattccaacagggctgttgcttgcgtttgtgttcaacctaaatggaatgggtctttggcttggcattgtgtgcggga

SEQ ID NO: 303030 - DNA, 259 bp, Zea mays
acgatacagagaagattagcatggcccctgcgcaaggatgacacgcacaaatcgagaaatggtccaaatttttttgcggattcgcacatatgccctcggagatcgcattttgatccttctgcgccagttttcattaacaattcagtcctcgccaattcttgccggctctgtaccagaaccttttgttcgctgtttgccgattggcccttgcccttgcaaacatgggatttcgcgcactgtccctcttattatcattttc

SEQ ID NO: 303031 - DNA, 248 bp, Zea mays
ctgcaagggtataagcagggagcaggtattgtctgcaattgttgcaatcaagaggtttccccttcggaatttgaaaaacacgctggcatggggaaaagacgacaaccgtatcaaaacatttatacatcacaaggattaacactccatgatgttgctctgcaactgcatcatttgaatttgaattcaaatggatttagcaatgctagtgtttccagcttcagtgactacccaaaccttacttcttcagg

SEQ ID NO: 303032 - DNA, 264 bp, Zea mays
tattaagataaccaacaggcgtgtaaatgccattgaacatgtcatcattccccggattgaacgtactcttgcttatatcatcacagagctggatgagagagagcgagaagagttctataggttaaagaaaatacaagagaagagaaagattctaaaggaaaaatctgagaaggacttggagcttttgagagcagctggagaggtgttggagcctgctaatcttactggctgtgagaggacgaggaccttctatttgaataatct

SEQ ID NO: 303033 - DNA, 267 bp, Zea mays
  unsure (1)..(267): unsure at all n locations
ggaaacataatcccccaattttgctctgatacaggccctgaccgattatcctcattgaaaagttcaaagatgtaggtgcttggctgattattcggttggctgggagtaccagaattgttcagtacatgatgtatgaggtttgtattataggccaaagcattatcaacagtagcagccttctcacttggcccaacacgccatggcccatcagaagctgtgactataacaggaatgccgtaaaattcatgcttngattgagttgtagta

SEQ ID NO: 303034 - DNA, 286 bp, Zea mays
  unsure (1)..(286): unsure at all n locations
cacaaatatacttctttactacggcttgcttgattaacgttggtgtcgcaaagctgacccgatacaatacacaaaatgagcgaaatcactcggctaaaaagcaccatctatgtgggcggcctcgatcaagctgtaacaacgcaaactctcacagaagccttcctgccctttggcgaaattgtcgatgtgtcgttaccanagccagacctgccatcgtcaaccgataaccaccgagggttcggatatgtcgaatttgaagtccggcaagacgcaaaggaactatcga

SEQ ID NO: 303035 - DNA, 257 bp, Zea mays
cgcgccgcttcccaagccgccccagcagcagcgcgacggggagaaggcacaggaggaggaggaaccgatgcctttcgtgtatccggaccccgtggaggtgggcgagctcacgctcgagcagctcagtgcgtacgacggcaaggacccagccaagcagatcctcattgccatccggggccaggtctacgacgtctcccgcgggaggctcttttatggccctcagggaccatattccttgtttgccgggagggatgcaa

SEQ ID NO: 303036 - DNA, 292 bp, Zea mays
gtcgtcggcctctgcacccagcgcagcatctccccctggatcgtcaccagcaagttcaacatcctcaccgtcctatacgccggcatcgtcggctgcggcgtctcgttcgtgctggtgacatggtgcatcgagaagagaggagccgtgttcgtggccgccttcataccggtggtgcagatcatcgtctctgtcatcgacttctccatcctgcacgagcagctctacctcggaagcgtgctgggatcaatgctagtgataggtggcctttacttctgctgtgggggcagaggca

SEQ ID NO: 303037 - DNA, 278 bp, Zea mays
cggctcgagcgggcgtggcctttgagagctccggtaagagacggccgcgttccgtcgtggcaggagctggcggctgatgtagcttcgacttccagtggagttccgtgtatgagcgatgaggttgcgacagcgtggctaaacaacaatagcgtcagatccgctatccatgccgaaccagtcagttcaataccaccctgggaattatgcacggataaactggattttgatcatgacgccggcagcatgatcatctatcacaagaacctcacgagtcaggg

SEQ ID NO: 303038 - DNA, 271 bp, Zea mays
ggagtataataatgagattgcaggaagcgatgatgaagatgatttatcgaagatggatatgggtggacgggcaaagggccgtcttcacaggtgggactttgagactgaagaggagtgggccaagtacaacgaccagaaagaagccatgccataggctgccttccagtttggggtgaagatgcaggatggacagaagacgaggaagcagaacaaggaccagaagctcactaatgacctccacaagatcaacaagatcctggctaggaagaag

SEQ ID NO: 303039 - DNA, 272 bp, Zea mays
gacaaatcatattctgctctcatatatggcacatctgctcttgttgcaatttggatatcatcaattgtggtttctgcacttgattcagtccctttggttcctcaagtgatggaagttgttggtcttggcttcacaatttggttcacatcgagatacctgatatttaaggtgttgctaggtacaggcataggcgtccaagcgccaaaagttcctgggcgctgctgccttggccttgttgcttagggcgcccgccttggcgcattaggcgttga

SEQ ID NO: 303040 - DNA, 285 bp, Zea mays
gatcgggattcaggtcgagaaacaacaatagtgtacaggcttgacatgagatataggtctttcaacagtacctacagtcggttttaatgtcgagaaggttcagtataagaatgtggcattcactgtgtgggatgtgggtgggcaagaaaaactcaggtcactgtggaagatgtacctgagtaattctgatgaaatgatttagtataattgtagatctatgtggttgattctatggacagagagaggatcagagacgcgaggtaagagttccaggatctgagagga

SEQ ID NO: 303041 - DNA, 265 bp, Zea mays
gaacggttgatgatcgcttcaaggatccttcgagtttggagtgtgtaaggtttgtgaatcaaatagctgtagagaactggcaaaggtttacagcagaagaaatgagtacgttacaagggcacctcctcaagtacccagttaaggttgaggctgatggtaagatcagcccactgtcagaccatgccggctacactgatgttgggggcaagattctgggagctccaacttcacttcctgattcactgactatgtagtgttattacat

SEQ ID NO: 303042 - DNA, 275 bp, Zea mays
aagggttctccgcggcgccacaggcgcacgaggatcgcgcacggcctggagcgtacgggccaccgcttcctctgggtgctgcgcggcccaccggcacccggcgagcggcacccgtcggacgcgaacctctccgagctgctccccgatggattcctcgaaaggaccaagggcagaggcctggtgtggccgacgaaggcgccgcagaaagagatactagcccacgccgccgttggtggtttcgtgacacacggcggctggaactcggtgctcgagag

SEQ ID NO: 303043 - DNA, 265 bp, Zea mays
aaacaacaatactgtacaggcttcacatgggagatgttctttcaacagtccctacagtcggttataatgtcgagaaggttcagtataagaatgtggcatccactgtgtgggatgtgggtgggcaagaaaaactcaggtcactgtggaagatgtacctgagtaattctgatgcactgcttacataatattgcagatctatgtcgttgattctctggacagagaaaggatcagagacgcgaggcaagagttccaggacctgagaggc

SEQ ID NO: 303044 - DNA, 146 bp, Zea mays
tgtggcacttggtattagggacctattgggacttttccgaacactgggggaagattttaggctttcttgcttgtttaagtgccaggaagcactggaagtctacagaaaactccctgagtcgcagtttaacactggatgggttctat

SEQ ID NO: 303045 - DNA, 246 bp, Zea mays
tggacaccttcaactacgcgcccatcgcgctcggcgtctgcctcggcctcatcatgctctggtggctgctcgacgcgcgcaagtggttcaagggccccgtcaggaacatcgacgaccacaacaacggcaaggtctgaacacctacgcacgcacgtcaagccaagcttcgactagaggtcacatcaagcttttgactttcaaataggagtatgcaatatagacccaaccaactatactagattcgtc

SEQ ID NO: 303046 - DNA, 260 bp, Zea mays
  unsure (1)..(260): unsure at all n locations
cttcgacgagatcctcaaggacacggagcaccacgcctgcacgcacacccacacctgcaacccgccggtgcacgacctatcgcacacccacacctgcgtccacgtccacaccaagatcgtcgcggcctcgcccggcgacgacacttccgactcgccgtccgataacaacaccaactgcagctgcggactcagcagtaacgcccnctccaagaagcgcccctcggggaaccgcgccgccgtcaggaagtaccgggagaaga

SEQ ID NO: 303047 - DNA, 246 bp, Zea mays
agctggccctggccatcgaggccggcaagatcagccctcgtgatgatttcaaggctcgtgcccgtgtcctggctgacgacttcggctgggatgtcactgacgcccgtaagatctggaccttcggtcccgatggcactggtgccaacttgctggttgaccagaccaaggccgtccagtacctcatcgaaatcaaggactccgtcgtctctggtttccagtgggcttcccgcgagggtcccattgctg

SEQ ID NO: 303048 - DNA, 245 bp, Zea mays
gcagcaactgacccctgctcattgttttggtttatttttcatctaaattaagatctattaatttataccaacataatggataaggttactcttgcccgcgttactaaagttcttggtcgcaccggttccactggtcaatgtacccaagttaaagtagaattcattggagaaaataacagatctttgatccgtaacgtcaaaggaccagtccgtgaaggagatgttcatcatttgttggaatgtga

SEQ ID NO: 303049 - DNA, 272 bp, Zea mays
gcttcttccaacatgcacaattccaatgccgtgttttgttttttgtgtgccaggttctcagaatgcgcagaactccagcacgtttgctggctggaaatccgcggcaagataccctgcgacatgctgtcccggaacaccacttacgccgcctacatggtgttcaagatgtccgacgaatcctatgggctggcctatccgcgccaggaggctgaagttagcatcggggcaaccaggtccactcgtcgggactgcctagggtacgtcgacgacga

SEQ ID NO: 303050 - DNA, 269 bp, Zea mays
ggtgctcggtgaccaccagcgagggcattggcaacaccaaggatggctaccaccctgtgcagcagcgcctctccggcttccacgcctcccagtgcggtttctgcacgcccggcatgtgcatgtccatcttctctgcgcttgtcaaagccgacaaggcggccaaccggccagccccaccggccggcttctccaagctcacttcctcggaggctgagaaggctgtcttggcaacctgtgccgctgcacagggtacaggcccatcgtcgacg

SEQ ID NO: 303051 - DNA, 278 bp, Zea mays
ctttcacgaagtaacgccacactaacccttcagacaaaatggccaagatctcccgtggtgcccctggtggcaagctcaagatgaccctgggtttctctgtcggagctgtgatgaactgcgccgacaactcaggtgcccgaaacctctacatcatcgccgtcaagggtatcggtgcccgcctgaactgattgccctccggtggtgtcggtgacatggtcatggccaccgtcaagaagggaaagcctgagctccgaaagaaggtccacaccgccgtcatc

SEQ ID NO: 303052 - DNA, 280 bp, Zea mays
atccgatcctttttcacttccgcaacaagactcagtcccgaagcaaaaatggccaacgtcaaggaagtccagcgcatcatcaacggcaacaacgtcgtggtcttctccaagacgtggtgcccctactgcaaggccgccaaggccgccctcaacgagagcaaggccaactacgaagtcgtcgagcttgacaaccgaaacgacggtgacgacctccaggacgccctcctcgagatctccggccagcgatccgtccccaacatcttcttcgcccagcagcacg

SEQ ID NO: 303053 - DNA, 286 bp, Zea mays
gtacaaactgcgagttcttgcacaaaattatcctgatacacctggactggctatcaaagatttttggcaggtcgatgagcgtactattgtttttgttgctgatccaacctttggtaacataataaattttaacattggtccattagttgatttagacgtccctcggagcttttggagtcaggtttcagggaagtatgggaacatgttctactggaaagaaaagggagaggacgcctcaattgaagctgctgtgacgtcaatatctcgttgtctaaggaaccccgcc

SEQ ID NO: 303054 - DNA, 281 bp, Zea mays
tgaaaataagccggtactttatggatattttaaatcctctgctacatggagggttaggattgctttagaattgaaaggtgtagattatgaacaaagatttatcaatttattaaagaaggaacagctttctgaagaatacaagaaagtgaaccctactcaaaaggtaccttcttttataacaaaagaaggtaaattgttaactcaaagtcaagccattattgaatatcttgataaggcttatccaaatgaacctttccttccaaaggatcccactgaagaag

SEQ ID NO: 303055 - DNA, 274 bp, Zea mays
cggcgaccgaacctctctcccaccacacccaagtcgatcatctgcgaaaatggattcctccaaggcccccgtcaagctcgtcaaggtcacccgtgtcctgggcagaaccggttctcgtggtggtgtcacccaggtgcgcgtcgagttcatggacgacaccactcgctccatcatccggatcgtcaagggccctgtccgtgaggaggacatcctggttctcctcgagtccgagcgcgaggcccgccgcctgagataaagaaggggttgttggggg

SEQ ID NO: 303056 - DNA, 266 bp, Zea mays
gtacctcacaatggcagacaaaaagctaataccgttggggctcattatcctcatgagcataggattagccaatgctgttagggtggttagatactctaatgccgatggtactggcacaggacagggagaaggtggtggatatgtgaatggcggaggatcaggatctagtacatatagtcaaggaaggtattctggttatggagaatcttctagtgctggtggtaccggtgggggtggagctggaggacaagctggaggcgcatgga

SEQ ID NO: 303057 - DNA, 267 bp, Zea mays
tcgtcattctgctcgagggatcttatgcatcttcgaaggacaaagtagcttcggattgcgctaaaatctttatatgctcacagccctttctctccaaaatggtggcaatccccctggcacccgaaaaagcgcatatgtctccgcggctatgtaaaatttcctcaaaagcctcagcttcatgattaatccattcgatgggaccttcggggttgcctcttgaaaagttttcttcgctcgataatgcgccaacgctggcgaactagcttt

SEQ ID NO: 303058 - DNA, 261 bp, Zea mays
cccatctctctatttcatgtccttcatcctccgtagacttttctctaccacatctcccacaatgagcgagaccgcccagaagaaggttcagcaactgattgatgacaacggtgtcgtcgtcttcagcaagagctactgcccgtactgcaacaacacgaagcggctcctcgacggctacggtgcaaagtatgccacgtacgaactgaaccaggagagcgacggcgacgacctccagcaggcgttgctcaagatcacgggcca

SEQ ID NO: 303059 - DNA, 256 bp, Zea mays
gctcagtccatctgaccaacgctacgaatgactgtttcgccttcattgttcagacgacgaacccgaagcagtactgcataccgccggacagaggcgtcgttccaccacgatctgagtgccgtgttgccatcgtattatcgcaagaaccgacgcataataagcgatgcagcatggaggacgagctaagcgtgcagagcaccagagtggatgagggtgtgacagctgcggatgtgagtgaagcgttgttcactggaaa

SEQ ID NO: 303060 - DNA, 252 bp, Zea mays
gactagttcttccagcggggatctgagactggatgttgcagccaattgccagatccccgtgccaatccacaacagataatgcaacagtggaaagcatccgcccaatcgggtaatctttgtctctcatcgttgcttcaaggcggcctccataggccatgtctcccctcccactcatggccccgctgtctatccaggaccctaagctgcttgttcactatcagtttgtcctcaatcttcataccagctgatact

SEQ ID NO: 303061 - DNA, 257 bp, Zea mays
agaacctgtgccgcgacccgcgacgcgagccatggactctggtccggtgcccacgcgcccaacaggtggttccgcagcggtggctccgtcgtcttcatcactcatctttctgggcaccggctgctccggcgcgctccccgacgcgcgatgcctcatccagccgtcggagcctccgtgcaccgtctgctccacggccctctccctgccgccggaccggaaccccaactacaggtgcaacacctccctcctggtagact

SEQ ID NO: 303062 - DNA, 279 bp, Zea mays
ccgacagcaagatggagtatacaagactgggcaagtcaggtctgaagatctcaaaagtacttctggggggaatgtcctatggctcctccgagtggcggaaatgggttctcgacgaagaagactccctcccgctcatcaagcacgccttcgatcctggcataaacacgtgggatgtagctgacacttattccgacggcgcctctgagagaatcgtaggcaaggctctcaaacaatacaacatcccccgcaaccgcgtcgtgatcctgacaaaatgcttct

SEQ ID NO: 303063 - DNA, 268 bp, Zea mays
gcggcggaaaagctggaggttcttgggactccagcgctcaagggtctggtagtggcgtcggttctggttctgcctattctaacaggtatccgtacgggccaagatatgcaggtgcaactgctaatggcaacggtggcggcacggggaacagccagaatggcggtgctggcggcggtaaaggttctggatctgggttcggcgatgccattccctgatttctgtatcgagtgaatctaaagctggagcccatcgccctttcttgttttgg

SEQ ID NO: 303064 - DNA, 275 bp, Zea mays
cggctcgagcaagaatcgccaccgactacttaaagggaagagttgtcgaaacctcctatgctgaatagagcgacaaccaagacagctggagaaagatcaagctctccatcgaagatatccaaggaagagcctgcatgaccaacttccacgctatggatatgaccagagacagactctgccaattcatcagtaaatggacaaccttgatcgacgctaactgcgagccaagaccaatgatggttatgttttgagagtcttcgttactgctttcaccg

SEQ ID NO: 303065 - DNA, 273 bp, Zea mays
aaacgatcagcctatatcctgaacgagaatgttgttggagggcagctttggtggcctcgtaaagcaggaaaaatgcaggtcaacaatgtggatgcctttggtatctctgtcgagacttgcctaactgctgtggtgaataacccaaattttacaggcctagcaattgtgcgcacatggttacctgatcattatgaaggcggagcatggaacaccggtggatcatgcaccggaaaggtcaagaccttgaatgaagtggtgaggaacggatttacc

SEQ ID NO: 303066 - DNA, 207 bp, Zea mays
tacgcgtgcgcggaattcggatcgagggaggtctgtgattcaatcgtggccaagtgcctcactggccgaccaaagactgtcgagaaagctcaagctgcattcctcctatgggtggaactggaggcatcagaggtcttccttgaagctatggagaaggctgtgaagaacaaagtggctaaagcagttgtgactgctattgatgtgatg

SEQ ID NO: 303067 - DNA, 255 bp, Zea mays
cgaggtttaataatggtcggtgatggtataaatgatgcaccagcccttgcagccgcaacagttggaatggttctagcccaacgtgccagtgcaactgcagtggctgttgcagatgttctgctgttgcaggataatatttgtggggtgccattctgcattgctaaggctcgtcaaacaacttcattggtcaaacaaagtgtagctctggccttaacttgtattgtgtgtgctgcgcttccctctgtcatgggattt

SEQ ID NO: 303068 - DNA, 273 bp, Zea mays
gcgctatctcccttcctcgcaacacaagggtacatcttactcaaaactacaataacacaaggctcagtgccgttgtggtcggtgctttagcagaattgccgtggttaccggcgcgaacagaggtatcgggctagaggtgtgccggcagctggctggcaatggcgtcaccgtcgtcttgacagcagtggacgaggagctaggcgcgaaagccgtcggcaatctccaagggctagctctctccgatgttctttctcaccagctggatatcacgga

SEQ ID NO: 303069 - DNA, 266 bp, Zea mays
aaacaagtacatggtagagctgttaagacagggcacacctctgaaactgaagttgccaatgctttgatttcactatatggaaagtgtggcagtattgaagatgccaagatgatcttttctgaaatgtcactgaggaatgaggtttcatggaatactatcataacaagttgttcacagcatggactaggactagaagctttggatttatttgatcagatgaagcaagaaggtctgaaaccaaatgatgtcaccttcataggtgtttt

SEQ ID NO: 303070 - DNA, 127 bp, Zea mays
aagagcttcccaagcggccattcttcgtggtccttcgctggcctaggcttcctgtcgtggtacctggcgggcaaggtcaaggcgttcgaccggcgcggccacgtggccaagctctgcgtcgtgctcc

SEQ ID NO: 303071 - DNA, 246 bp, Zea mays
gtacattgctccctaggatgaactacttattggagatgggtttgtctaagaaagatctgtgctcaatgatctttagattttccccacttctaggttacagtattgaacttgttatgaaaccaaagcttgagtttctgctaagaaccatgaagaagccacttaaagcagttgtagaatacccaaggtacttcagttattcactcgaggggaagatcaaaccgcggttctgggtattgcagagtagaa

SEQ ID NO: 303072 - DNA, 140 bp, Zea mays
ctcgtggccattggcttcctggatcctagcaacttggaaaccgacatgcaagctggggctgacttcaagtaccagcttctgtgggtgattttagtcgggatggtcttcgcgcttctgatccaaacactggccgccaacct

SEQ ID NO: 303073 - DNA, 250 bp, Zea mays
taggtgggagatcatgtgtatctcaaggtctcacccacaaaaggtgttcaaagatttgggattaagggaaaattagcccctcgctatattgggccctatgagaccaaggagacttgtggacctatagcataccaattgaagctaccacctcatatgtctgcaattcatgatgtgttccatgtgtctcagctaaataaatgtgttcgcttaccaacagaagtgctgtcagaatcggagttggagatagaac

SEQ ID NO: 303074 - DNA, 293 bp, Zea mays
aggtgacttaggtcaagtcgttggtgttcctgtatctcttgacgacgaagcctccctcgatgccgctatctctcgctccaacgttgtcataaaccttcttggacgcttttggaaaacgaagaatttctcaatcaatgaagctaatattgaaaccgcttctataatcgctaaggcagcaaagagagttggcgttgagcgattgattcacgtttcttctgtaagcgctgcaccaggtgctccatcagagttttcaagagcaaaatacttgtcggaactagcagtgtcaagagaat

SEQ ID NO: 303075 - DNA, 279 bp, Zea mays
ggagatggggtcgcagatcatcaggaggcgtggacacaaggcactgaacggaagaatgtggactacggcggaccgaccaagtgcagcaatacattgctggccaccggctcacctatccattttcttttactggtaggtctagtttgggtactctagttttgatctcaatccacttgtattgaggtggattagggtgtaacttcaactaatttacaccctaatccaccttaacacatgtggattgggcctaataatagagtacccaaacaaagctaattg

SEQ ID NO: 303076 - DNA, 268 bp, Zea mays
gaaggaaccacggcggcatgggccaacgcgtcacgaaactcctccagcttcatcgagttcgtcacgtcgccgaacaaccccgacgccctgctccgcgcgcccgttctgcgcggctccgcggtgatcgccgaccacgcgtactactggcctcatttcacgcacatcgcggcaccggccgacgaggacgtcatgctgttcaccatgtccaagccatctgggcatgccggcagcagactcgggtgcgttgctacttgctagacgcgaatcg

SEQ ID NO: 303077 - DNA, 263 bp, Zea mays
attatgtatttttgggtgattatgtagacagaggatattactccatcgaaacagtgtctttgatcatggccttgaaggttcgttaccctggaagaatacatatattacgtggaaaccacgagtctcgccaaatccacaagtatatggtttctacgaccagtgtctaaagtattatggaactccaaacgtttggaagtatttcaccgatttgttcgattttttgcctttgagcatagtggtagacaacaaagtcttttgcgttc

SEQ ID NO: 303078 - DNA, 257 bp, Zea mays
cggctcgagcggcgtcccaaagaccatcgataatgacatcgcggtgatcgacaagtcgttcggatttgacactgccgtggaggaggcccagagggcatcaacgctgctcatgtcgaggctgagagtgcagagacggcatcggtgtcgtgaagctgatgggtcgcaacagcggatcatttcaagaataagccccgtttcccgataactctcaagtacatcgacccgacttacatgatccgcgcacgtcagttcaaacg

SEQ ID NO: 303079 - DNA, 286 bp, Zea mays
ctcaaaccaaccaagacagcagcaagttcctatcgagaacaagacgacagatcaatatgaccaatttatctaaggtgaatacgtgaaaaagtgttgcttagctcagtgaaatggaataaggaagagaaagtgtagtgtgataagggaagaatttttaggttttcaagcagatagatatacaaacaggaagaatttggatcagaaccctttcctgcttcccttttttacccatcggactcacattttgatctcctacgcttgctttcacagtccccctacgagcagc

SEQ ID NO: 303080 - DNA, 278 bp, Zea mays
ggagaatcaaattctccgtttccgatacacatcggacatgggtgaacaacacccggccgagcacaaggtggttgtggaactgagttccaaggatcttgtaccgaaacatttgaccgagcagcagcgtctgacttttctcaaacttgtcggaccacgctacaaccccgatacagacattgtgcgcatgtcctgcgagaaattctccgctcgagctcagaacaaacgttatctcggtgacaccatcagaaacttaatcaaagaggccaaagaaggcgact

SEQ ID NO: 303081 - DNA, 280 bp, Zea mays
ctgtcccaagaggacgagatgctcatggccaagtttggctatagagcctacatgccgcagatcaggcaacagggggagcacgagtgcctgcaccgggacatgatggtcgggttcggcaagtggagctggagcccgctgcagctggagaacccgttcgccgacgccgacgccgacgatggccagggggcggggaaggtgcacctgtggcacggcgccgaggacctcatcgtgccggtcagcctgtccaggtacatcagccagaagctgccgtgggtcgtct

SEQ ID NO: 303082 - DNA, 255 bp, Zea mays
ttcgtcaccatggttcgcgtcagtgctcttaatgatgctttaaatgctctcaccaatgctgaacgcagaggaaagcgccaagccttgatccgacccagttccaaggtaatcgtaaagttcttgaccgtcatgcaacgacatggttacattggtgaatttgagatcgttgatgaccacagatccggatagacagttgttaatctccttggacgcttgaacaagactggctgcatcagtcctcgttttgatgtgagt

SEQ ID NO: 303083 - DNA, 188 bp, Zea mays
ggagtccacggccgcggcgctggagtggaccatggccaaccttgtcaaaagccccgacctgcagcaaaagcttcggctcgaagccaacgccatggcctgcggcaagcgagtcatcgaggaggaggacctggcgcgcatgccgtacctcagggccgtcgtgctagagagcctccgtcgccacccgcctg

SEQ ID NO: 303084 - DNA, 178 bp, Zea mays
cttagatggagatcactgaatgggccattcgtttcagtctggctcggcaatgttcctttcgctagcgaagatgccatggcagcaccaaaagctgagtttgcggatggctacttggatgctgctataatcaaggattgtcctcggtgggatgtcctcgggctcgtgttccagatgaagg

SEQ ID NO: 303085 - DNA, 247 bp, Zea mays
cacgcacgaagagatcgaggacatgaccaacagctaccgcatcaagatcggcgccggcgggttcggcgccgtgtacaagggcgagctcccgagcggctcgcaggtggccgtgaagaagatcgagggcgtcgggatgcagggcaagcgcgagttctgcaccgaaatcgccgtcattggcaacatccaccacgtcaacctcgtccggctccgcggcttctgcaccgagggccagcgccgcctcctcgtg

SEQ ID NO: 303086 - DNA, 251 bp, Zea mays
aagagagctccacgcgccgtcaaggccatcaaggagttcgctcaaaagatcacacacaccgatgatgtgagaatcgatgcttctttgaacaagttcatgtggtccagaggcgtcagaaacgtccccaagcgcgttcgtgttttgatcaagagagtcagaaatgacgacgaagacgccaaggataagatgtacaccctcgtatcccacgtcccaacaactagcttcactggtctccacacaaagaaggtaga

SEQ ID NO: 303087 - DNA, 149 bp, Zea mays
ccccggaccccaaagactttgatttctcataaggtgccagcggggtcctattagtaacacccgctgatccctggtcggcatcggttatggttgagactaggacggtatctggtcgtcttcgagcgaccaactttcgtacttgattagtg

SEQ ID NO: 303088 - DNA, 154 bp, Zea mays
gcgacaaggctcctgtgcagatccgcactagaaaattcatcagaaacgtccttctgggcagaagacaatgcatcgttgatgtgatccaccctggtcgcgccaacgtcagcagaagcgagctgcaagagaagcttggccagctgttcaaggtcag

SEQ ID NO: 303089 - DNA, 148 bp, Zea mays
ggcgatctcgtgggacgacgagctgcggtcggggagccggcgcttcgagcacaagtgctacaacctcttcacctgcaacagccactcgttcgtggccgactgcctcaaccggctggcttacggcggctccgttgggtggaacgtgctg

SEQ ID NO: 303090 - DNA, 144 bp, Zea mays
ggcgggcctgtttgcgtttgacacggaggaggaggtggtgaggctggcgaacgcgacggaggttgggctggcggggtatttcttctcgagggacttgcaccgggtgtaccgcgtggcggagcatctcgaggttgggatggtggg

SEQ ID NO: 303091 - DNA, 155 bp, Zea mays
tcgagaggcgcgcatccgagggcgtgaggctggagctgcgcatcaccgaccgccgcgggctgctcgcctacgtcacgcgcgtgttcagagagaacagcctctcggtgacgcacgccgagatcaccaacaggggcgacatggccatgaacgtgttc

SEQ ID NO: 303092 - DNA, 143 bp, Zea mays
gggcctcgccgggagcgacctcttcaccaaccgagggttctacctcaaggtgtcggactcgtcccacgcgacctacgtctccctgccagaggagcagcacgatctcatcctgagcgacaggatccagctgggccagttcgtcc

SEQ ID NO: 303093 - DNA, 145 bp, Zea mays
gggaaaaatcaccttgcctcattcgcaggcaatttctgtatcaaaactgcttagacacattgcagaaccttgaaatgccgatattggataaccgtactccatggtgaacaagtctttggcgatctttgcgaattggagaatcacc

SEQ ID NO: 303094 - DNA, 267 bp, Zea mays
ggtttccaatgggccactaaagaatctgtactttgcgaagaaaacatgcgtggtgtgcgtatcaatattcacgatgttacactgcacgctgatgctatccatcgtggtggtggacaaattattccaactgctcgtcgttgtttctatgcttgtttattgaccgctgctccacgtttgcttgagccagtctacttggtcgaaattcaatgcccagacagtgctaatggtggaatttacggtgtacttaatcgtcgtcgtggacacgtt

SEQ ID NO: 303095 - DNA, 261 bp, Zea mays
ggttgctgctgctcccctcgccactaaagctaagactgccaccaaggaggttgctaaccctctcttcgaaaagcgtcctcgcaactttgccattggtaacgacgtccagcccaagcgtgacttgactcgctacgttaagtggcctttctatgtccgtctccagcgccagcgtgccatcctcaagatgcgcttgaaggtccctcccgccgtccaccagttcacccgtaccctcgacaagaatactgccacccaggcccttcg

SEQ ID NO: 303096 - DNA, 274 bp, Zea mays
ggcacatgggtaaattctccactgccgttaacctctgggccgtgatctggaccacattcgcttctgttatcttcttcttccctacgtcccgacctgtgactggtgagaccatgaactatgcaattgtgttcatggcatttatcatgttgtgtgccatggtgtattggtatgtgcgagggaagaagttctatgctggtccactcaaggagactaccattcagggcgaaaataccggtggtatttgggagtcggttcctgtcgagacggaaaagac

SEQ ID NO: 303097 - DNA, 100 bp, Zea mays
caaccaaggataaaggcttttgttgtcattggagtcaacactgcattcagcagccgcaagcgccgtgattctgtccgggagacatggatgcctcaaggag

SEQ ID NO: 303098 - DNA, 112 bp, Zea mays
cgggttcgcggcgcactggaggtacaaggagggcacctgcaggcactcgtttgtgctccggatggtggagtgggcaaggtgggtgctcacatggcagtgcgaggcgatggac

SEQ ID NO: 303099 - DNA, 254 bp, Zea mays
cttcaagaactagctttcctgaaggtggaggatgcggtactttttgcccttgcccaacaccatcgtactaatgttgctggagcagctgatccagatattaaatcatctggggatgaaaaattcactgaggcatttgacctaagcaaggaggaggaagaagatgtacagttcaagcaggcttggctcatatatttctggaggagggctaagaccaacaacgtggaagaagatattgccgaggagcgattgcacat

SEQ ID NO: 303100 - DNA, 253 bp, Zea mays
cccttgcagggtggacgcggacgcgacggcaggatgtctgcggagcacgtcagacagaccatcacgcagagggcgtccgagaacaagctgtcgaagatcacacagcaggcggaggagttcgcccggctgatcatggaggagctggacccggacaaactcggctacatcgaggtgcgcaacctggagaggtctgctggaggaccccagccagtcggtgagcatcggcaccggcaaggacatgagccagatgctg

SEQ ID NO: 303101 - DNA, 234 bp, Zea mays
gtgtgtgttataaaaatgaatctaatcaagttacgattcttcgttacgcaactgatttgcaatcgttcgggttctttcaaagacgaagtgtggaagaatttatgaagtttactagtaaaatggtgattgaacgatctgaactagcttctcgatgctctgttaaagagcaagaatattcatgtcatgtttacaatcgtagcgaccgattatgttccgttttgatttctgatcatg

SEQ ID NO: 303102 - DNA, 238 bp, Zea mays
ctgctcgagggacggccacccctcggcctacagccgcggacacacgggcaacgattgcagccactggtgcctcgccggcgtgccggacatctggaaccagatcctcgacgcgtctcttctcctggcataggaccggggagagaaaaaaggtagactgtagagcaattggcgcaggtcagaggcatttcggatctaaaaattggtgattcgattatttcctttttttcttcttggaaaa

SEQ ID NO: 303103 - DNA, 271 bp, Zea mays
tcttttgacgaaccaccgaaagaagcttccttcaaatcaaaagcaatgccctctgcctccctgaaagatatcgttcacactctgctcaagggttaccaaacagaaaccccaatcctccagaagatcatcgatgtcttcttaatctatattcttattaccgggatcgttcaattcatttacgttgtcctcgttggaacgtttcccttcaattcttttctgtctggtttcatctcgaccgtaggatgtttcgttttgactgtttctcttcgta

SEQ ID NO: 303104 - DNA, 277 bp, Zea mays
ctcgacgcaaatcgtgaaacagtttagaatttccaacgaaagtcctacgagcctgcgagtgctaaactgctaactgctaagactgcaatggcggccggagggagctgcagctgctgagctcatggtacagcccctacgtgatccgcgccaaggtggcgctggggctgaaggggctcatctacgagttcatcgaggaggacctcttcagcaagagcgacctgctgctgaagctcaacccggtgcacaagaaggtgcccgtcctggtccacggcggccg

SEQ ID NO: 303105 - DNA, 275 bp, Zea mays
atttgtcaaccccttcacgccctattgaggataggtgcactgtttttgtgggcggaggaccattctacagcctttcagacactaaaacaggccctaatgttagccccggttcttgcccttccagatttctccactcagtttactattgagactgatgccagctctattggtgtgggtgttgtccttatgcagaaaggtcaccctttggcctttttaagcaaagcattaggccctaaatcctgtggcttgtcagcttatgagaaggagtttatggc

SEQ ID NO: 303106 - DNA, 284 bp, Zea mays
cgccagtcttttgagatggtgcgagttattcgagataagattctgaaccacttgggtgccgatgaggtaccactggttgtggtgggaaacaagagcgacctgaagggtgaccaacgacaagtgacgctcgacgagggccgacaacttgcggaagagttccattgtgcctttaccgaggccagtgtcctccttcacttcaatgttgccaaggcgttcgatttgattattggagagattgaaaagtctcagaaaccatcacagcccgctgggaacaacaagtgtgg

SEQ ID NO: 303107 - DNA, 270 bp, Zea mays
gcaactttgaaaggctcaagtctagtggtgaccatgttgctactcaaattcagaagagcttaaggctaattgttgctggtggtgacggtacagcaagttggctgcttggagtagttagtgacctgaaactatcacatccacctcctgttgctaccgtacctcttgggactggaaacaacctccctttttcatttggatgggggaaaaagaatcccgctactgaccaggcagcagtgaaatcattcctggatcaagtaaaaggagcaagag

SEQ ID NO: 303108 - DNA, 289 bp, Zea mays
tgcacgctcagatgtaaacttacgtgtagaacaccttcttagggagatcaagaaggtatattttttggtgtctattacatgtggggccagtggcatacaaatggttatcatcctggctttacaggttacagacaaaccggtagctgttggttgcggtgtatcgactccagagcatgtgaaacagatcgtgggctgttgagcggacggtgtgattgttggcagtgcgattgtgatgcagttgtgtgaggctgctactcctgaagagggtctggacaggctcgaggagtac

SEQ ID NO: 303109 - DNA, 288 bp, Zea mays
gcacgtgtggcggcggaaggcgagccagaggtcaccctggatcgcggtcaaggacctgatggagtccgacaagaacgtgatgctggcgagacgcgccgaggacgtgctgctctgcctcaagcagcggttccccggcctctcgcagaccacgctcgacgccagcaagatccagtacaacaaggatgttgggcaagcaatactacagagctattcgagggtgctggagagcctagcgtacaacatcgtaacatgtgtagatgacgttctcttcgcagatgaagccgccag

SEQ ID NO: 303110 - DNA, 266 bp, Zea mays
gaatattctgtttggcagtcaaatggatagacaacgtgacaagagagtcattgcagcttgctgtcttaagaaagatcttgagctgctccagtacggagatcagactgttattggtgatagaggcattaatttgagtggaggtcagaaacaaagagttcagcttgctagagcactctaccaagatgctgatatttatttgcttgatgatcccttcagtgctgttgatgctcatactgggagcgaactgtttaaggagtatatattga

SEQ ID NO: 303111 - DNA, 260 bp, Zea mays
  unsure (1)..(260): unsure at all n locations
gaccactggattttctgggtgggcccgctcctgggcgctgccatcgcggccttctaccaccagtacatcctccgggcgggcgccatcaaggctctcggctccttcaggagcaacggcgatcgatcgatctagcgtggggagaggcggataggcgggcgcgcgagggaggagaataagttccagncggtggcccggtctcgtcggtcgcttttgttccagcatgcagctgcgtcgcgttcgtgtgcgtgcgtgggggtctc

SEQ ID NO: 303112 - DNA, 261 bp, Zea mays
ccacaactgatcaatttcatcatttgatcggtttttatcacttttccatcgatttttcatcgactttcgatttatatcactttcttcatcatgaccggacgcggcaaaggcggaaaaggcctcggcaaaggcggcgcaaagcgtcatcgtaagattttgcgcgacaacatccagggtatcaccaagcccgctattcagcgtctcgcacgtcgtggtggtgtcaagcgtatttctgctatgatctacgaagagacccgtggc

SEQ ID NO: 303113 - DNA, 263 bp, Zea mays
cggctcgagctccgacatcgtcatccgcaccgacgccgatggccgccaggtccgcgtgggcgacgtcgcccgggtcgagctgggcgcgcaggattatggcgtcaacacctatctgtcgaacaagcccaccgtcgtcatcgcaacgatgcagcgccccggctccaacgcgctcgacgcggcgccgaaggtgaaggcggagatggaacaactgtccaagcgcttccccaaggggctggaatatagcgtcatctacaacccgaccg

SEQ ID NO: 303114 - DNA, 271 bp, Zea mays
tccagctcatctcttcgttctgtttgtccagtatcttgcttgtcattcatattaacaatttaaaatggccaacaaattatatacttatccggaaaatttccgtgcttataaggcacttttggctgcccaatacagtggtgttcaacttgatgtctgacgtactttcaagtatggtgtgaccaacaaaaccgaagagtttcaaagcaaattcccattgggaaaattgccattgctggaaaccgcagatggacagcgtttatttgaagtaatg

SEQ ID NO: 303115 - DNA, 274 bp, Zea mays
gagaagtgcgcagtcaacctacaacgccaaatcttctacaaaatggccaaattattcatcggtggcctagcatggcacaccacagacgagactctgcgttcgggattcgaaaagtttggtaccatcgaagaagccatcgttatcaaagatagggataccaaccgcagccgtggattcggatttgtgcgcttctcaactgacgctgaagccgacgctgcaattgaaggcatgaacaaccaggacttcgatggtcgtgtcattcgatcgaccgagc

SEQ ID NO: 303116 - DNA, 261 bp, Zea mays
gtagactacctgatcaaaatgtctcttttgttgcctgataaattccagcacattttgcgtcttgccaacacaaacattgaaggcaagcgcaaaatcatgtttgctcttacttcaatcaaaggtgtgggcagacgtttttcaaatttaatttgcaaaaaggccgatattgatttggaaaagcgtgctggtgaattaagtgaagaagaaatcgaacgagtgatgactattttgaacaatcctcgccaatacaaatcccagact

SEQ ID NO: 303117 - DNA, 266 bp, Zea mays
actctttccacaatcccagtaggttttattcgagagttcagcaacatcatctttagacagctactcacgacatgacggccatttgttgcagatataactgatgctatgggcaacgagatatctaaggtaatatttctgcaagccactacggcatttcttcagcatcgaaaactgactatccactgctgcgttcaggttcgccggccactttggtggctcaacagctcaattgatgtagaactctatgataaggagataggttagtc

SEQ ID NO: 303118 - DNA, 260 bp, Zea mays
acgctttgcggcaatccagccgctccgtggccgctgtctccgtctctggcagactcgcttcggctcgcgttgctgctccctctcccttcgctgccggtgccaaacaggtccgctcatacgccgccgaggccaaggcctctcctactgaggtctcctcgatcctcgagcagagaattcgtggtgttcaggaggaagctggtcttgccgagactggacgtgtcctttccgtcggtgacggtattgcccgtgtccacggtttg

SEQ ID NO: 303119 - DNA, 249 bp, Zea mays
cggctcgagccttcccctccgttgttgtcttgtcaagttgcggttgtctccctcctccggcgctcccttccgcccctcccttcccgccgcctcgccatggactacgtcgacgtcgtctactgccaccgccccgacgcgtccacgcccgtcgaggagacggtgcgcgccatgaactgggtcatcgaccagggctgggccttctactggggcacctccgagtggtccgcgcacagatcaccgaggcctggg

SEQ ID NO: 303120 - DNA, 244 bp, Zea mays
cagagaggatgttggcagatgggaaacgatccatgcagaagcttgaggatgacaattcaagattgcgaagagcgctagaacaaagcatgacaactgtgaataggatgtcactagattcagataactccgttgacaggcgcattgtgataaaactgctagtcacctacttccaacgaaatcacagcaaagaggttctggatctcatggtgcgcatgcttggcttctccgaggaagacaagcaaag

SEQ ID NO: 303121 - DNA, 267 bp, Zea mays
gaagcactgtaattgcaaaaactcacaatgtttaaagctgtattgtgagtgttttgcagcaggtgattactgtgacggttgcaattgtaaacaatgtggaaacactgttgagaacgaaaagggtaggcaggaggctattaacaacacaaagctaagaaatccaaacgcctttcaacctaagattgaaaatggcccaattccttctagtgtttggaaggatgctggagcactaccttcacatccaaagcataataaaggttgtcactg

SEQ ID NO: 303122 - DNA, 261 bp, Zea mays
gctgagtgaagatggaaaacactatattgttaacggcgagaagaagtggattaccaacggcatctggtctgattatttcactgtcgcggttcgtaccggtggagagggtatgaatggtattagcgtgctgctcattgaacgagagaatggcggtgtcagcactcgtcgtatggactgccagggtgttttgagcagtggtactacttatatcactttcgaggacacgaaggtgcccgttgagaatttgattggaaaggaaaa

SEQ ID NO: 303123 - DNA, 269 bp, Zea mays
cggctcgaggcagcagcagcataaccagaggggagtacatcaagccgtttcgagagagttttagtgtctgtttgtttacccccatggattatataatctagattatttttggaggattatataatctggattatataatctggattatataatctgagtagtcctgtttgtttacccagattatttcagttgttaataggattcttttgtatgaggaagacaagaatgccctctatatttgtactaggttgaaactcatatatatataa

SEQ ID NO: 303124 - DNA, 259 bp, Zea mays
gccgcatcgacgtccaatggagcacggaggtcgctgctcggcttcgtggaggcgcaggggaacgcttcctaccactgcacgctctccggtccctgcgttccctgccagtattctgagaagaacgatgaaaagtatagctgcagcgaaactggctatcgcctgcccttgaaatgtgtacaggtccaaaatgctacaaaagaaggaaacatgagcaagcagaggaagatattggatgatgcatccacatcaggtggcacaa

SEQ ID NO: 303125 - DNA, 261 bp, Zea mays
gttggccacatcgctcctgagtacctctccgctggccagtcatctgagaaaacagatgtctttggcttaggaatcctgctgctggagctgatcaccggtcagactgcactggcgtttgggaagtcgtcaaatcagaagggaaccatgttagactgggtgatcaagatgcacgaagaaaagtagctggatacacttgtggacaagggcctggagagccaatatgaccgtattgagctgaaggagatggagcaagtggcactg

SEQ ID NO: 303126 - DNA, 261 bp, Zea mays
ggaagatggacggcggtattggtccattatgcaaaatttgggaattaaaccttcaatggagaattatggctgcatggttgatctcctgtgtcgatctggccttctggatgatgcttactcctttgttattggcatgcctgtctcaccgaattcagtaatctggaggacacttctcgtggcttgtaaaagctcgaacaggattgacatagcagaatcagcaacaaagaggctccttgagttagaacctcacaatccagagaa

SEQ ID NO: 303127 - DNA, 258 bp, Zea mays
agccaatgtctcccgaggaagttataggaaaatttgtgagctttgagctaatgattaaaggctcaaagaaaatcatcgagcaaggcacctcctccacacccgaagcacaaccggtcgcatttaaggcgacggaggagaagaaggaggagtctacatcgagtagacaacccatcgacgcttccaagctcgacaacgaggagatgacgctcatcatcaagagcttccgtcaaatcctcaaacaaaggagggggaaggact

SEQ ID NO: 303128 - DNA, 250 bp, Zea mays
cctggatcttgtacccatccttgcacatcagtatttttcagagaggcttccagtgtcattacatggtgcccaagcagctgttttgttttgtctaggcctgcaggacaaagacataggcactgtgaaggaagagctcgggatagaaagggaacaggttctatcgaacttcataaagacaatgaagaagcagtatggttaccttcataacattgcagggaaaaaaatcgaaacaaccttacctcgactgaaa

SEQ ID NO: 303129 - DNA, 254 bp, Zea mays
cagaatttgttaagctttccatttttggtacagttttcgaagtgacaacaagatatgttgatctacaacctgttggaatgggtgctttcggcttagtatgttcggctaaagatcaattgacggggatgaatgtcgcaataaaaaagattatgaaacctttctctgctcctgtattagccaaaagaacatatcgtgaactcaaattattaaaagccctgatgcatgaaaatatcatttgcctgagtgacatattt

SEQ ID NO: 303130 - DNA, 249 bp, Zea mays
gtcaactgattcaccggcgggtatctgacatacgtgagtctcaatatgagaagagtgggattggaagcagttacctctttcgcttggatgatgattttgtggtcgatgccactaagcgtggtgggttagcaaggttcataaatcattcttgtgagccaaattgctacacaaaggtgatcactgttgatggacagaagaagattttcatttatgcaaagaggcgtatatatgccggtgaggaaatcacat

SEQ ID NO: 303131 - DNA, 248 bp, Zea mays
gctccctttagtttggctgtacagctacgtgcaaaattggtacctgacagcctctcgagagttgaaacgaatggattccatctcgcgatctccgatctacgctcaattcggagagactctgaatggtgtctccaccattcgagcctatgccgctggagaacggttcatcgccaccaacaactacaaacttgatctcaatcaagccgcttacttcgctaccatcgctgctaatcgatggttggcggttc

SEQ ID NO: 303132 - DNA, 292 bp, Zea mays
caacggatcaacgctgcccgggccttgcgacaccctgcactggtacgattcttcttgagcaacgacgtgacggtgcgcggcctgcggatcgagaacagcccgcagttccatctcaagttcgacgactgcgagagggtgcgcgtggatggcctcttcgtcagctcgccggcgttcagccccaacactgcaggcgtccacgtcgagaacaccacgtccgtccagatcctcaattccaggatctacaacggcgacgactgtgtctccatcggcgccggctgctccgacgtccgca

SEQ ID NO: 303133 - DNA, 266 bp, Zea mays
cggatctgcaaccacaatgccgaaagcgacgaagcaatggaagtacgatgtactaggatgcttctttagagtatattttagagttgataagactgcttcaacgcttaaagacgcgatctacaacttgtatgaaaagatgatcccgccagatctgcggttggcaagaaatgccatgttccgttacatgtggaaatacttcaggaacagtcaaataactctatttcaaaaagattacagggattatgtgcgcgggatgaggctgatgg

SEQ ID NO: 303134 - DNA, 262 bp, Zea mays
cacgccccgactgttccaagggcgcagagggaagcacggcgttctgcaaagcgcacgggggcggcaagcgatgctcggctgacgggtgcacgaagagcgtgcatggtgggacccagttctgcgtcgcgcatggaggcgggaagaggtgcgtggtggaaggatgcaggaagagcgcgagaggccggagcgaccgctgcgtcgggaacggcgggggcaagcggtgccactccgctggctgtgggaagagcgcacagggaagcac

SEQ ID NO: 303135 - DNA, 262 bp, Zea mays
cctcggatctgatctgggagatcgtccgtgacaacaactgcttctccgccaagagcaagaagaacggcggtgttcagttctcccgagacccccttaacctgaccaacaagacttcccgcaagcacgctggtttcgtcaacgacaaggctctcggtatctcctctggcgagaagggtgctattgttgtcacctccacgaaggctctgcccaacaagcccgcccagaaccttgtcaagacctcttacagcggatccaagagcaa

SEQ ID NO: 303136 - DNA, 270 bp, Zea mays
atcgcaagcttcgagctgctactggtgaaaccgaccacgtcacagagcaggaactcgatcttcgacctcactctgagcgtctccgcatcttcctcattcgtcctttccagcttctcttcggcgagctcatcgtcttccttatctccgtgtacatgagtgtcctctacggtcttctgtacatgttcttcgaagcattccctatcatttaccagaagggcaagggttactctgctggaaagactggtctcatgttcattcctgtcgctgtcg

SEQ ID NO: 303137 - DNA, 256 bp, Zea mays
cgcgccgctcacggccctgccggcgtcggtgcgggagtccgggtgccgcgtcgtctacctgtgccgagaccccaaggacgctttcgtctcgctccgccactacctcgacgagatcaagcctaagggtgctgccatgacgccgttcgccgaggcgttcgacctgttctgcgacggcgtgtcaccgttcggaccggtgtgggacaacatggccgagtactggaacgagagcgtggcgcggccggaggaggtgatgttc

SEQ ID NO: 303138 - DNA, 264 bp, Zea mays
  unsure (1)..(264): unsure at all n locations
tactcattacggtcctgtanaacctgaagaaggagactgccacacaatctaacatagaataagggtggcggtctccttcttcaggttttacagtgccaggctgagtgcgtcctccaacaaaaaccacctcaaaaaaggtgtcaccgtaacgtgagaagttgaggtacggaagactcaatcacttttggcgacgagttcctggtaacaaaaaattgagaatggcataaaactgcatcaatgaaacaagtaaaagaaaaatatcaa

SEQ ID NO: 303139 - DNA, 259 bp, Zea mays
caataacacgcctgtcttcttcctgcgcgatcctaccaaattccccgtctttatccacacgcaaaagaggattccgcagacgaacttgaaagatgcaactatgttctgggattatctctccacgcatcaagagtctgcgcaccaggtcatgcatttgttaatcgtccgaggatctccgtattcctaccgtcacatgaacggatactcaggccacacattcaaatggatcaagcccgacggcactttcaattatgtccaa

SEQ ID NO: 303140 - DNA, 139 bp, Zea mays
caagcgtattcttttaatgactccagtagaattaagcatcaagtagacaaaagtggaaaagaacctacacttttaacttgtctcactagtgcctaaatgtagtttaaaggctgcttaaattttgtgtgtagttggattt

SEQ ID NO: 303141 - DNA, 197 bp, Zea mays
gccgcagccaaaccctctccagcagccgtcgtcgccaccgctgcagcgcggaggcgacccccatcgccgccaagatgcagatcttcgtgaagaccctgacggggaaaaccatcacgttggaggtggagtcctcggacaacatcgacaacgtgaaggccaagatacaggacaaggagggcatcccgccggaccagcag

SEQ ID NO: 303142 - DNA, 113 bp, Zea mays
gtggtcattgtgctgactggatggcgccctggctctggcttcaccaagaccatgcgtgtagtgcctggaccatgatgatcctctggagcttctcttctagcccctgtcccttc

SEQ ID NO: 303143 - DNA, 147 bp, Zea mays
ccgcctctctcaatctgataccgcagatccgtcgtccggtgagtggaagccgcacgaacccatggcctccggcgagcttgcctgcacctacgccgctctcatcctcagcgacgatggcatcgccatcaccgccgagaagatcgccac

SEQ ID NO: 303144 - DNA, 185 bp, Zea mays
gtcccttatttctgctgctaagccatcacattcaggtagtcttgctaagcaagcactgtcttctattgctaagtgtgttgctgttctatgcttagcagctggtgaccagaagtgtgcatctacaattgaaatgcttaaaggcattttgaaagacgacagcactactaactctgctaaacaacaca

SEQ ID NO: 303145 - DNA, 166 bp, Zea mays
ggaaacctctcaaaccctagccgcctcctgcaagtttcagagctcaggaatctgcgccatggcgagtgagacggagaccttcgcatttcaggctgagatcaaccagctgctctcactcatcatcaacaccttctactccaacaaggagatcttcctccgcgagctt

SEQ ID NO: 303146 - DNA, 147 bp, Zea mays
gtctcaccaatatgttagtcaccgtgaatatagattagagattctacaatgtcttgtcaaaatatatcagacattgccaaatccagattatttaagcatttgccagtgtcttatgttcttgggtgagcctgaaagtgttgcgagcat

SEQ ID NO: 303147 - DNA, 121 bp, Zea mays
cttcccttgtgagtcaggattatgtcaatgggactgatcaggaagaaattcgaactggtgttgatcagtgtatccagaagtttttggacattgcaagacagacagaatgctttttcttaca

SEQ ID NO: 303148 - DNA, 199 bp, Zea mays
gaaattgcttagaggaaaccgaagcccagccttgaagaagcttcggaagatcactacttcattttcctcgggagtaggacaagtcttctctccttcatcagccctcacaatagacaaatcccaaaaatatctacctctcatattggcaagatggctttgtttaatggttgattttccaaaaactgcatggcttggccgc

SEQ ID NO: 303149 - DNA, 299 bp, Zea mays
ccgcacaacggcacgattctcctcctccggccgcgtagtgctcgggttcggcgatatcggagcgcggcaagggcggcagggggctagaccaggacggcgccaagcgccaccgcaaggtgctgcgcgacaacatccagggcatcacgaagccggcgatccgtaggctggccaagaggggcggcgtcaagcgcatttctgggctcatctacgaggagacccgcggcgtgctcaagatcttcctcgagaacgtcatccgcgacgccgtgcactacaccgagcacgctcgccgcaagaacgtc

SEQ ID NO: 303150 - DNA, 346 bp, Zea mays
ccgcgttctacgccgtcatggcgccctacaccaaggtggaggagagcttcaacgtgcaggccatgcatgatattctgtatcacactgaatcacatcgagatgtatgtcatttagaatttcctagagttgttcttcgaacattcataggtaaaattcatgttgtcatgaaacccacccttaatttgtgcagcatgaaacagtattttctcaatggtaaattgttggactaatgatgcttatagccttccatctatgctttaagctctaagaccaaacatgatttcttatgtgtattttttaaattttgcagaccttgtaatcttgatgtgacattatggcagtaaca

SEQ ID NO: 303151 - DNA, 274 bp, Zea mays
gctcggatgcgctcgaggaatgtaatccagggacaaggagagagtaccacacagaaaaactggtcacttctaaaggagctgaagagctcaggacaggtaaagagaaggtcacctctgttagcacaaccaccacgcgtcgttcatgctctaaaaccgttactaagactgttattggtcctgatggtcacgaagaagttaccaaagaagtggtgacctccgaagatggttctgactatctcgaggcaatagatttaggcacattgtctggcatagg

SEQ ID NO: 303152 - DNA, 124 bp, Zea mays
ctccgcacaaggcaacagaacattgctgagataactgaaatgattcatgtcgcaagccttctgcatgatgatgttcttgatgatgctgatactaggcgtggtgtcagttcattgaatctcatca

SEQ ID NO: 303153 - DNA, 139 bp, Zea mays
gcgtagtaatcggaatcggtcgaggaaactctcaacccgtagcgctcctgcaagtttcagagctcaggaatctgcgccatggcgagtgagacggagaccttcgcaattcaggctgagatcaaccagctgctctcactca

SEQ ID NO: 303154 - DNA, 265 bp, Zea mays
tgaataatactccctgtctgcttccaacctggatctccaaggcttctgccagacaaagacgaggacgagctggccgagtccaaccaggggagtgctaccatctttatccacgatgtgtatatgatgcatttgctgactaccagttaccagaacttcttagaactcctctccagtccctctgtttgcaaataaaaagcttgaggctgggacgtatatcagaattttaatccagagttttacaatcacgtgaatctctatgagtaca

SEQ ID NO: 303155 - DNA, 258 bp, Zea mays
attgagaccaacaagcaacatcgaaagtggaatccagtagcaacaatagagcaacaatggcgaccaagatattttccctccttatgctccttgctctttctacatgtgttgctaacgcgacaattttccctcaatgctcacaagctcctatagcttcccttcttctcccatacctatccatcaattatagcttcaatatgtgacaacccagctcttcaaccatatacgcttcaacaagccatcgcagcaagcgacata

SEQ ID NO: 303156 - DNA, 348 bp, Zea mays
  unsure (1)..(348): unsure at all n locations
ctgtattattacatggaaggttccagactcagaccangtgggtgcacagtggctctggttacctctgggaacggctggctgtcttacaccatctgtccccaggtcgtgaggtgagcccagcacatcagtacgccctggctggtggtgtctctttccctttctgctggctggccggtgctggctccgctgtcttctaggtcctaggtgagtacagggtctgtgtagggagaggctgggagccaggtgagcgagcctgtcctgaagcacctgtcctcctacttcctacaggagtcaccctggtacttataggctctcacgctgccttccaccagatagagcctgcagatg

SEQ ID NO: 303157 - DNA, 320 bp, Zea mays
ccttgaagaggtgacaattacttttattagacattgctatggacaagtgcagttcgtggaggagtttgccaggtgccatgctacaagcctgacaaagttagggcatctttggttcgtggctaactgtgccacactttgcctaaggttagtcgttcacattgaagaactaaccttaggcagacaagttcaggcaagtgtggcaagttaggtagcgaaccatacaggcccgtagtcgtcaactcagcaaccagagggctacaagagatggtcggcggattgtttgatccggatgtcactgtcaaatgcaatgttatctagcg

SEQ ID NO: 303158 - DNA, 197 bp, Zea mays
cggctcgagcagatacacaccaagcgaccacaattagcaaccacctaacaaccatggctatcacgatattatccctccttgcgctctctgcgctttttgcgagcgcaacaaatgcgttacttattccacaatgctcactcgctgccagatccattattacacagttcctcacatgagctacttccatgagcttcgaa

SEQ ID NO: 303159 - DNA, 291 bp, Zea mays
tggccatcaggcgcaagaccactggtacgggaaggatgaggtacatgcgacacgtgcctcgccgtttcaagagcaacttcagagaaggtacctttcttgtgccgttgatgatcctgcaatttgttaatctgaattctcatgttcgtgtcaaacataagtgacttaatttggttggttttcttaacctccacccagggactgaggctgccccaaagaagagtgctgctgctgccaactaagtgtggatgttgccatcaagaaccgcagaagctagacgttggatctttttga

SEQ ID NO: 303160 - DNA, 350 bp, Zea mays
  unsure (1)..(350): unsure at all n locations
atctaacaatacaagccatcacaacgcaacagcaacaacagttcctaccagcactgagccacctagccatggtgaaccctgccgcctacttgcaagagcagctgcttgcatccaacccacttgctctggcgaacgtagttgcaaaccagcaacaacaacagctacaacagtttctgccaacgctcagtcaactagccatggtgaaccctgccgcctacgtacaacaacaacaactgctttcatctagcccgctcgctgtgggcaatgcacctacatacctgcaacaacaattgttgcaacagattgtaccagctctgactcaactagctgtggcaaaccctnngtgctac

SEQ ID NO: 303161 - DNA, 103 bp, Zea mays
agacgccaccgacgtacaccccttcccccaagcctccgacacctaagccgaccccgcctacgtagacttcaagccctaagccaccggctaccaagcctcccac

SEQ ID NO: 303162 - DNA, 310 bp, Zea mays
aaatattattgcttttggactcctggcaagaggcatttggaggacctggaagtaaatacccacaatatcattgggcataccttgaagtaaagacgacaggtgtggtgttcccaaaacgtcctatggatgccccaccaatatttactcctccagctacacataattctgagacctatggttcacccagatattctgcgggaagtctaagtgacagaatgtcctcagatgttgagactcctgagttaggagatttgataagatcgaaatgtgacagactactgaatgataggtgttgctttaaccatctgat

SEQ ID NO: 303163 - DNA, 242 bp, Zea mays
attgattaagatcgacatcataagaggcacaaatctagctatccgtgatgtcatgtcgagtgatccttacgttatcattaacctaggacaccagacaatgaaaacgaaagtggtaaagagcagtctaaatcctgtaggaatgaaaggctcatgctttcgatacccgacccagtgccgctgcttaaactgcaagtctacgacaaggacacgttcaccactgacgaccggatgggggaggccga

SEQ ID NO: 303164 - DNA, 328 bp, Zea mays
aagagccttccgaaatgccttgcgagaaagaagagttgcttaacgccgctgtgcgtcgtgtcgatgcattggaagccgaactaattgtaacaaagaaggctttgcacgaggctcttatcaggcaagaggaactgctgcgtacatcgaccgcaaagagattgccaaggctcagagaaagaagaaagcaatgctttgctactaggacaaggagggagatacttctgcttcctcagaggagatgccaaagatggcgcctgagatgtaaccagcgatccccttcattttcctaacacttgtgaatcttctacaagtttcggttgtaaatcga

SEQ ID NO: 303165 - DNA, 226 bp, Zea mays
cctctcgtcgccgtcctctcccgttcgcaacgccacgctccccaccgccgaaatggccccgaagtgaggtggcagggcaccggtgccggccaagaagaagacggataaagtgacgaaccctctgttcgagaaaagccgaagcagttcggcatcggcggcgcgttgcctcccaagaaggacctgcaccgattcgtcaagtggcccaaggtcgtgcgcatccagcgcc

SEQ ID NO: 303166 - DNA, 333 bp, Zea mays
gcagttgcgaaggaacacgctgcctatggtgatactgtagaatcagtggctggtcagggagtcaaactgctgaatatattgagaaaatattgtgaagccttttcttccatggtggaaggcaaaaacagggtgctacagataaactttctggtggagcaaggatacactacatttttcagtcaatatttgtcaagagtctggaggaaattgacccttgcaagagtactagtgatgaagatatccgcacgaccatccagaattctgggggtccaaaaggggctatgtttctgctcgaggtaccatttgagattcttgtgcggaacagataggtcg

SEQ ID NO: 303167 - DNA, 324 bp, Zea mays
gctcagggtcatggtcgtcggccgtggacccgacacggagctcctcgtcgccaacccggtcgaggcctccgggaagggacggccgcgcgtgttctacgacgccactcttgctctgaaggcgcttggatctgcatcttctctgtaagaactgcttcttctgtttgttcgcatttcaggcttagtatttcactccactgggtcttcttcttctgctccgtttcaggctgagatcgggaggcatacggcgtccgagcgcaactgggaggtgtacaggttcctcctggatgacagctaagagttcccttgggaagcagctcgctaaca

SEQ ID NO: 303168 - DNA, 270 bp, Zea mays
aaggatctgaagcgtgggtatgtggcctccaactccaaggatgaccctgccaaggaggctgctagcttcacctcccaggtcatgatcatgaaccaccctggccagattggcaatggctatgcgcagtctggactgccacacctcacacattgctgtcaagtttgctgagctcgttaccaagattgataggcgatccggcaaggagctggagaaggagccgaaatttctcaagaacggtgatgctggtatggcgaagatggttcccactaa

SEQ ID NO: 303169 - DNA, 137 bp, Zea mays
  unsure (1)..(137): unsure at all n locations
cgctanatcaaggctgcctagcgcctgtgaagatcctcattcctaaaggctcantcctctcgccaagtgacaaggctgctgttgttggtggtttcgtgctaacgactcagagagtgaccgatgtaatcctaatggcg

SEQ ID NO: 303170 - DNA, 320 bp, Zea mays
gagcattcagaaacacaccaagcgaacacattagcaacaacctatacaacaatggctaccaagatattatccctccttgcgcttcttgcgctttttgcgagcgcaacaaatgcgttcattattccacaatgctcacttgctacaagttccattattacacagttcctcccaccagttacttcaatgggcttggaaccccagctgtgaagcctataggctacacaagcattacggcgacgtcttacaacaccaatgtccagttgcacaacaatcctggcaatctaacagtacaacatcgcacgcacagcacaacaattcta

SEQ ID NO: 303171 - DNA, 139 bp, Zea mays
cggagagctgagagttggggtaaggaggctcatgaggcaactagataacatgccatcttcggttatctcatgccacatcatgcatcttggagtcctagcaactgcatctcatgccatctccacaggtactctcttttct

SEQ ID NO: 303172 - DNA, 240 bp, Zea mays
gtcttgacaagaaggccaccagctccggcgagaagaacgtgctcatcttcgaccttggtggtggcacgtctgatgtgtcgctcctcaccatcgaggagggcatcttcgaggtgaaggccactgcgggcgacactcaccttggcggcgatgacttcgacaatcgcatggtgaaccacttccgtctaggagttcaagcgcaagaattatgacggacataagcggcaaaccaccgtgcactgc

SEQ ID NO: 303173 - DNA, 329 bp, Zea mays
ctcgagggagttgaacggcgagcacaaaatcgggcaagcttcgggctagtcggactccgagattttcatttgcagcgaaggaatgccggtgttgagctgagactacgtacctgcgcacgcaggtgcgtcgagcggcatcgggctggagacggcgcgtgtcctggcgttgcgcggcttgcacgtcgtcatggccgtacgcaacgtctacgacgggctaaaggccagggaggccatcgtggctaagatccccgtcgcacggattgacgtacttgagctggactcagctcatagcttcgtaagagattcgctcattgtgatctctaattgct

SEQ ID NO: 303174 - DNA, 315 bp, Zea mays
  unsure (1)..(315): unsure at all n locations
ggcccgtggtgcctcgtcgtgggctcgaagatccgggccagggtcgngcccgagctgcagctcaaggccttccccgcgcagccgggtggatttcgtcgccgacggcgtatgcggccctcaagttcctccactccgacggcttcggcgacttctgcgcgaacaccacagctgtatgtttgagaacagctacggcgtcgccgccacggacgagggccgcgccaaagtattcgggaaggacttcgcggcgtgggcgcgcccggacgacggcgacgagtcgatattggaggacgcgacgacggcttctccccgggcaca

SEQ ID NO: 303175 - DNA, 184 bp, Zea mays
ctacatcatcaacagtgtcatgcacgtgcacgcggacatcggtatatcgtccaacgacatgtccatcatgaactccttcatcaacgacatctacgagaagctggctgtcgaggccgacatactcgcccgctacaacaagatgctcaccataacctcccgggagatccagacttcggtgcgcctc

SEQ ID NO: 303176 - DNA, 282 bp, Zea mays
  unsure (1)..(282): unsure at all n locations
gtgctgatcttgctgccctttgtactgaagctgctcttcaatgcattcgtgagaagatggatattatagatcttgaggatgagacaatagatgctgagatactgaactctatggctgtctcaaatgatcatttcaagactgcacttgggacaagcaacccatctgctctgcgtgaaactgttgttgaagtgccaaactttctcttggaagactcttgaggccctgaaaattattagagggagcaataggagacntatcaanatccagaggagcaccagagaa

SEQ ID NO: 303177 - DNA, 155 bp, Zea mays
gcagattttcgagataacccttaagctgaagacaatcatcctcggggttgaagactcgtatacgattgtaatgtgaaggcgcagatccatgataaggaatgaattcctcctgatcagcggagactgatctttgctggcaagcagctggaagatgg

SEQ ID NO: 303178 - DNA, 123 bp, Zea mays
cgggcacgtgacacggagtggcttgagcttctgaggatgcatgtccaccgagcccctgacgcctgtctgtcgccgctcctctaacacgagcgggtgctcatctgacaggcgtccgtgcaggcg

SEQ ID NO: 303179 - DNA, 147 bp, Zea mays
tcggaatcggctcgagcatcgaagtgtccaccatccagataggtgctgcctgactggcacaactgcatccaacaatgacttggcgagtcttattgagtgtacagtctgctttgactatgtgttaccgcccattcttcaatgtcagag

SEQ ID NO: 303180 - DNA, 153 bp, Zea mays
gaggattatatccatataagaattcaacagcccaacggcaggaagacccttacaactgtccaagggatcgctgatgattacgataaaaagaaactagtgaaggcgtttaagaagaaatccccctgcaagggtactgtaattgaccacccagag

SEQ ID NO: 303181 - DNA, 276 bp, Zea mays
cgcttccagccgccgccgcgtccgcctcgccaagcgcacagcgcgccgcagcacatcgctctcttgatctcagccatggcggaggtggagcagcaacaggacacgccgaagctcttcaaccgctggaccttcgatgatgtccaggtgaacgacatctcgctgaacgactacctcgctgtgaacgcgacgaagcacgcgatgtacctgccgcacaccgctgggcgctactccaagaagcggttccgcaaggcgcagtgcgcgatcgttgagcgcctt

SEQ ID NO: 303182 - DNA, 142 bp, Zea mays
ggagaagcggaaggtggagccgccctttaagcccaaagtgaaatccccttcagactacagcaactttgacccagagttcctgaatgagaaaccccaactttccttcagtgacaagaacctcatcgactctatggaccagaca

SEQ ID NO: 303183 - DNA, 333 bp, Zea mays
tggttggcagtaagatgaagagttcatcagaccttttgatcatcgtcggatcaatgtattttgctgttgcatttgttggctttgaaaactgtaactctgctcaacctgttattgccgtggaaaggacagtcttttacagagagcgtgcagctggaatgtactcggctataccctatgctttctcgcaggttgttgctgagataccatatgtgttcgtcgagagtgtcatatacactgttatcgtgtacccgatgatgtctttccagtggactcgtacgaaattcttctggttcttctacatttcgttcctctcgtttctctacttcacttact

SEQ ID NO: 303184 - DNA, 329 bp, Zea mays
gtttcagcaagagcagcaggaggaggtccaggcgagcggcgagctcgtacggcttaaggcgaagacgcgctcgtcggcgccggcgcgagggtgctgttctacccgacgctgctctacaacgtcttgcgcaaccggttcgaggcggacttccggtggtgggatcgcgtcgaccagtttattttgctgggcgctgttcctttcccaagtgatgttccacggttgaagcagcgtggagttcaaggggttgtaacgttgaatgaaccttatgaaactcgtgtcccaacatctttataccaggctaatgagattgagcacctggtaattccaac

SEQ ID NO: 303185 - DNA, 290 bp, Zea mays
  unsure (1)..(290): unsure at all n locations
cctgactacagggaaagaaggctcattggaaagtgccctttaactccagaagaggtaggtcttattctacgtgctacgggatttgataactcaacatggatttaccttgctcctggcaagctctttggtgggaaacacttcatgaagccattcaaggctatgtttccacgtcttaaaaaccatagtatgatcagaagtggaagctggaagcaatatccggggcagcagggtcagcagtgattcatggtctgccctgtcggcatnttatatatgatggtcgagcacttcgc

SEQ ID NO: 303186 - DNA, 244 bp, Zea mays
agcaccgctcgctgatgatgctgatgaggatgactttctgttcgaagaccggttcagcattgtctacaaccttgaccgtgaattcggcccgaggtttaatgatcatatgcagtattgtgttaatcatctagaggaaatttacaagctctccaaggtgaaagtccacctatcggctgtctaagggatcatgatggacatcattgataagatattggtacgcggtgagtagatagagcgtttggtg

SEQ ID NO: 303187 - DNA, 188 bp, Zea mays
cgcgagagtgcgcccgggtgggctctagatcccgatggcctcgcgccgccgcaccctgctcaaggtcatcatcctcggcgacagcggggttgggaagacgtctttgacgaaccaatatgtgaacaagaagttcagcaaccagtacaaggctacgattggggcggatttcctcaccaaggaggtgcagt

SEQ ID NO: 303188 - DNA, 182 bp, Zea mays
atcagcatcaatggacagtcagtggtctccgacaatgatgtcagcgacgtcattaaaagggaaagcactctgaacatggtggtccgcaggggtaatgaagatatcatgatcacagtgattcccgaagaaattgacccataggcagaggcatgagctggacttcatgtctcactcaaagactc

SEQ ID NO: 303189 - DNA, 303 bp, Zea mays
gaaacaactaattccaagatttctgctattaaagaggagaaagatatgctgtcaaagttccttgaggaacaaaagaaaagtacggttgaagctcaggaaaacatggaggatgctcagaataccataaaaaggcttgggactgagagggagagttttgaagtaaggtctaagaaacttgaagaagagttggccacagcgaaaggtgagatattgcgtttgaggagacatattagtacaggtgggtctccgaacacccaagttctttcggaagcaggtgcagcgccaattagcagtcgagcactg

SEQ ID NO: 303190 - DNA, 118 bp, Zea mays
gcggaaccatggacagcccgctgcgctccttggtgctactgctggccgtcctggacgtaggctaggcctgcacctccaggtcaacctcgcgattgttaggagctccgcagagggcaga

SEQ ID NO: 303191 - DNA, 123 bp, Zea mays
gtggtctataatgcatcaaacaatgagcttgtgaggactcagactcttgtgaagagcgccattgtacaagttgatgctgctccattcaagcagtggtacctcactcactatggagtggacatc

SEQ ID NO: 303192 - DNA, 324 bp, Zea mays
tgtcatttgagcaccggaacatctatggtctaaatagatctattgttggttctgtcacttccagcaacctgctgaaccctcaggaagttgagtcctgtctttgttgctggtcccaacatggatgaggctccacctgtttggatcgatagagttggatttaaagccaacataactgagagcttcacacggcaaagcaaattcacatatggcctcgtggttgaagagattacaacacgtgatgaaactaatactatctgtacccatggttcacgagcaatgcctagcggcggtttgagcatggacggacctcccacaacactcagt

SEQ ID NO: 303193 - DNA, 339 bp, Zea mays
caatcagtgggcagcggtcccactttggatttagcatcccgattagctcgtttgagagcggttgttctacatagcccaattttgtctggcttaagggtgatgtatcctgtaaaacatacatactggtttgacatatacaagaacatcgacaaaattccattagtcaggtgtcccgtgctagtgatacatggcacagccgacgaggttgtcgactgctcccacgggcggtcgctgtgggagctggcggacgtgaagtacgagccgctgtggatcaagggcgggaaccactgcaacctagagctgtacccggagtacatcaagcacctgaagaagttcgtc

SEQ ID NO: 303194 - DNA, 294 bp, Zea mays
gtcgcctccctttccccttccctccctccctctccccgcgggccgccagaggcaatttcgccctcgattcgaccccgattcgtccgcccgcgaccgggattccctccgccaagcgcggatctgaacgctgcgctccgtgtcgccgctcgaatccgccatgaagggggccaaatccaagggcgacgccaaggccgatgccaagctggcggtgaagagcaagggggcggagaagcccgccaagggcaggaaagggaaggccggcaaggaccccaacaagcctaagagggctcccag

SEQ ID NO: 303195 - DNA, 179 bp, Zea mays
gaatgttccggattctacctatgatatgattggaggccttgaccagcaaattaaagagatcaaagaggtcattgagcttccaatcaaacatccggaactgtttgagagccttggaattgcacaaccaaaggtttgtttacttttttgaagaccatcttaactttggaactttacatgta

SEQ ID NO: 303196 - DNA, 293 bp, Zea mays
ctgccacgtccaagcaaaccgggaaaggagaggatcccggagccgcgtgatggccagaggcctggtcgcccctcactgggtggccgtgggactgctgtcctggcatagcttggggcttctggtggctggactcgggggtcatgacgacctgcacgacgactgcaagaggacttccatggccacagccacaggcactcacatgaagatttccaccatggccacagccatgcccatggccatggccacactcacgagagcatctggcatggacatacccacgatcacgaccatgg

SEQ ID NO: 303197 - DNA, 356 bp, Zea mays
tgatcttctcaactaccaggtgaaagcatacctcgatcgcaagtcactggcaaattctctgaacgacataaagaccgtagttatgcaacttcacgacctcatcagtgttatagacttatagtcatcattgttacactactatttatgggcattgcgacaaccaagattcttgttgtcatctcgtcccagcttctggttgcgggattcatatttgggaatgcatgcaagactgtatttgaggcccttatatttgtattcatcatgcatccatttgaggttgctaaccgctgtgttatcgacgaaacagatgatcgtcgaggaaattaatatattaaccactgttctcttcaagaatg

SEQ ID NO: 303198 - DNA, 263 bp, Zea mays
tgttcatccggaacaataattaaaggggatccggatttgttcttgtgatataattaacgattcctgttatacttggaagtacaagaatgcttgttgcacgagtggcagactcgaactggaacttatacacaaagttcagacacagtgctatgaggatgctaagctgatgaagctgtttccggaaatcataagaacactgtatgaccaagatgtcctagctgaagatactatagtcctttggttccgtaaaggttcaaacccga

SEQ ID NO: 303199 - DNA, 215 bp, Zea mays
cggaatcggtcgaagagcgcgagtggaactgtggaagcgtcgagcttttttcttctttgtcttgctgcgcaagaagaagggatacgagaggagggcggcgatggcgaagaggctgctctcgtcgctgaaccgggtgctggtggagaagctggtgcagcgctagaagaccgccggcagcatcctcctcccggtaacatccaagcagctgaatgctg

SEQ ID NO: 303200 - DNA, 329 bp, Zea mays
  unsure (1)..(329): unsure at all n locations
cattattactaccaggaaagtcttatttatattgcctgaagttggcttagagacagtctcatgacgggatnggatgggctgcgcttctcaatgaactccggaaactggatatctggccttgaatctgtggatacttacacctgtgactaataatgtgcacaatgatatcactattgtataagggttaatgatagcttcaaacatctgtggtgtaatgatctatgttatacatatattctgtanagtgccatagtctgttactatgtgtagcatatgtcataatatatgtatcttatacatacacaagtgtgtgtgacagatgtgcatac

SEQ ID NO: 303201 - DNA, 310 bp, Zea mays
  unsure (1)..(310): unsure at all n locations
gtcacgtttaagcatgatgacaagttaccatcacagntntgccggaatcaatcgctggaagatcaatgtcagtcggaacacgcttgcagaaattgatcttccagcgattgattccgacaaaactgtgatggtcacgtctaagcatgatgacaagttaccagaaaatgtggaatgtggcttccagtgtgcacttctctatactactgtatatcgccttaggagaatccgagtcataaacctctcactttcatgtacaaatttgcttgccaatcttttccggtatgctgatctggagacacagtatgcatgc

SEQ ID NO: 303202 - DNA, 303 bp, Zea mays
  unsure (1)..(303): unsure at all n locations
tagacccgtcatcgatctcgtttcaaatccatccatcctcgtttcctccgtcccgcagcatctcaaccccatggccaagatcaagatcgggatcaatgggttcggcaggatcggaaggctggtcggcaaggtggccctgcagagtgacgatgtcgagctcgtcgccgtgaacgaccccttcatcagcaccgactacatgacctacatgttcaagtacgacactgtgcacggacagtggaagcaccatgaagtcaaggctgaagactccanaacgcttctctgtggtgagaaggaggtgctgtg

SEQ ID NO: 303203 - DNA, 348 bp, Zea mays
cgcacagaaggccagtgctaatggtgggtgccatgaggatgatgatgattgtgtagttctagatggtgaccctgataaggcgattacagttgctcgaagagggagcttgggagatggcagttcggatgaattgcagatagtggcggagaaacgcccggtagcatgcagggacttccctcattcacggcattcatgctcaaacttgcctttcagcactacttctcacgtaaagcactgttccatgtgccactgttttgtatgtgacgcacagctccttgcaaatattggggtacagtacatcagctgatgatcattgccatgctacagacaaggattcaaaatggacat

SEQ ID NO: 303204 - DNA, 123 bp, Zea mays
catcttagtgcagggacatactgttgcagccatgggcaactataggggaaggggactgaaacaagtgagaaggattgtagaggattgcatgaagaatgtacagcatccagtgtaccacatcaa

SEQ ID NO: 303205 - DNA, 269 bp, Zea mays
  unsure (1)..(269): unsure at all n locations
gtgcctgtgcatggatttggttttggaatagaccatgattcagatgctttgcattcgatcgcagaggcctctggtggcacattctcctttatcgaggatgaaggtgtgatccaggatgcatttgctcagtgtataggtgggcttctcagcgtggttgttcaaaatgtgcaagtacatgtggagtgttccatctgggtgtcaagtccgtgcatcaaaatctggtagttacctgagtaaggtgtctgcagatangcagaatggttcagttg

SEQ ID NO: 303206 - DNA, 128 bp, Zea mays
tatcgaagcgaggtaggggaggttcggctgggaacaagttccgcatgtcactggtcctaccggtggctgccacggtgaactgcgcggacaacacgggcgccaagaacctctacatcatctccgtcaag

SEQ ID NO: 303207 - DNA, 132 bp, Zea mays
ctcagccgctgcagccaatcgctcgccagcagccgtcgtcgccaccgctgcagcgcggaggcgaccccgcatcgccgcgaagatgcagatctccgtgaagaccctgacggggaaaacgatcacgttggaggt

SEQ ID NO: 303208 - DNA, 164 bp, Zea mays
gttctatctgtatcagcatattatctatgctgtccagctcaccagcaaagcaacgcccagccgataacgatcgctatgtcaggaactgtcggaattgggaggtcaccataaggagaccacgtggtggttccatgacgacactgtgtgatgggtctttccggctg

SEQ ID NO: 303209 - DNA, 119 bp, Zea mays
caaatacagtagataaggatagtgagagagctgtgacaaaaaacgagcggattgcatttgctagggaatacggttgtttgcctctagaatgcagtgcgagaacaaaagtacatgtagaa

SEQ ID NO: 303210 - DNA, 165 bp, Zea mays
ctgggacgtttggccaatcaagatcaggatcaggaggtaaaagaatgcgccatatcttgcatgagtttggtggtctctacttttggtgatggtcttaaagagaataccagcatgcttccatatcgtgacagatggtatgaatacagcttacattcaggattcata

SEQ ID NO: 303211 - DNA, 281 bp, Zea mays
cgaaacccagctcttcaaccatataggcttcaacaagcaatcgcagcaagcaacatacctttatcgcccttgttgtttcaacaatcgccagcctaccttggagaagcattggtcaaccatcgggacacagctgagactcgtgtactctgtaccaagtatctggaacttctcctatctcagacacattctccatcacactgctaatgactgtgtattgagacatatacattagcactagtatgctattagacacattctcattacattgcgatgaccgtgta

SEQ ID NO: 303212 - DNA, 257 bp, Zea mays
  unsure (1)..(257): unsure at all n locations
aaagcctccgacncncttcctctctccctccgccgccgctgcgcacgcagggaacaagcgacatgggcgtctacacctttgtgtgccgaacaacggcggcgagtggaccgccaagagcactccgggagatcgaggctccgcgctacccaacgactgagcgcgctcgtcgctgcgctcgcgcgacttgctaaggtcagtgtctctcatgtacccagtcgcgtgtcagtgacgcgtgtgcgtgtgtgatatgtacgagt

SEQ ID NO: 303213 - DNA, 221 bp, Zea mays
agaagaacgaacctgagtctgctaagaagctagcatctgttgctgacctttatgtcaatgatgcttttggcacggcacacagagctcatgcttcaccgaagagttacaagtattgaagctgctgttgctggctctcatgcagaagaacttgactacctgtggagctgtgccaaccaagaagcatgcgtatgtgtgaccagccagagatggcatgagcgtct

SEQ ID NO: 303214 - DNA, 157 bp, Zea mays
aggcgcctgccagaccgcctcctcttccccgcctccgtgtgcccaaggccaggccaacagtttttaggtggaattggtacatgctaacaaccactgccttatagctagtggcagtcacgagtcactcctgaatgtaggccgaaattgctctttacta

SEQ ID NO: 303215 - DNA, 150 bp, Zea mays
aggctcgagcagaaacacaccagtgcgaagactattagcaacaacctaacaacaatggctaccaagatattatcctccttgcgttcgtgcgttttgcgaggcacaatggtcatatcatatgctatgtcagtcatattaagtctccacagt

SEQ ID NO: 303216 - DNA, 260 bp, Zea mays
gccgccaccaggtgcagagtctttcgtcatctcttctccggcgaagaacccccagtcgcccaccagatcacttgttaaactttgttgaggggtgatggcgggttctttcgcaaacttcagctccgaggcagggcttataagcttgatgagtaccttctcactcgcagctacatcactggctacaagctcaaggatgacttgcgtctacacttcgttcgtctctcctcgtccagattcacgtagcaagtgttaataatgat

SEQ ID NO: 303217 - DNA, 314 bp, Zea mays
cacacattaagcattgctgctaacttaagcatcttatccaccttcgaagcatcaagtgctatggttggagaagaaaagtttttttttattaagcatctccattgtacatgctctaaatctgcataggattattcctttcaattacaatatatttgcagtcttgtcaattaagtgctatgttctgcctgctgaatatgttctttatgcagccagctatatatgtcaccagccttgcagcagtagaggtactacgtgcacgcgatggcaggcaagatgtgattaactctgtagatgttacatgtggtctcagtttg

SEQ ID NO: 303218 - DNA, 266 bp, Zea mays
  unsure (1)..(266): unsure at all n locations
ggattgtgganatgaattgctataaggatattgacatgaaacaaatagcaagtgactgatgtaagatattgacgtactctcaattgtgtatttaggtattaacaagtagctatctcaaatatctgtgaactcaagcgactgtccagtttgatagctattactgattcttttgatgtgttgtttgtttgatagctagattaaaataacaaaatttttgtatggctaggttcacaaatggattacgaaatcttttgtcataacaatat

SEQ ID NO: 303219 - DNA, 342 bp, Zea mays
caactgacaacaagaccaagcatcagactatcagagttctagtgccattcatgtaaattaattaatctggtccgtttctggatatcacacagcatcaagaagggtggcccaaacccttcatccaacacaactttatcagctatactagagaaagcaagggaacttgatgtccctagagaaattttggagcgcaacatcaaaagggcatcagaaaagggacaagatacttacacagaaaaggtttatgagatgtcagacaagctcgagtggtgaacataaaagttactgatgcagataaggaccaactgctcaccgttgcgttagatgctggtgctgatgacg

SEQ ID NO: 303220 - DNA, 108 bp, Zea mays
tgcctttctggaatgttcagagatgatgtgtcatggaaccttcaaacaagtctcttgttcggatgataatatctagtgtccttatagcatgctggttgatctttcata

SEQ ID NO: 303221 - DNA, 359 bp, Zea mays
cataagcaggaaattaatggctggggatggggagctgaagctgctgggcatgtgggcgagcccgttcgtccttcgtgcgagactcgcgctcagcttcaaggggcctcaagtatgagtacgtcgaggaggagatctttggaaacaagagcgagctcctcctcgagtccaacccggtgcacaagaaggtacccgtgctcatccacaacggcaaggctatctgcgagtcacagatcatcgtgcagtacatcagtgaggtctacgacggcacaggcccttctctcctccccgtcggcgcctacgaccgtgctgtggctcgcttttgggccgcctacgttgacgaaaaggtcttcagctcgttc

SEQ ID NO: 303222 - DNA, 205 bp, Zea mays
ctttgtacacaggctgcaacaacagtaatgatgaaaaagagaaacggaaaaattatcaacattgcatctgtagttggtcttactggccatgtttgcccaagctattattacgccaccaaggctggagtgattggtttcacaaaaacagttgccagggagtatgcaagcagaaatatcaatgtgaatgctattgcaccagggttca

SEQ ID NO: 303223 - DNA, 101 bp, Zea mays
tggacggagagccgcgacgtcggccacggcttccgctgcgtcggcatggtgaacaagatctacctcaacttcgatgcgtgccacggcgacaaggacacagc

SEQ ID NO: 303224 - DNA, 187 bp, Zea mays
ctcggcagtcggcacgcaggctagcagcacagcagcagccagagctatcgcctctcctcgctacggttcggttcctcggcgccgattcctgcgtgtcgtcgtccaacctcgtccgtaccgttccggcgcgcgagtcggtcgagatggcgaacgcgagatcgagtgtcgctgtgaacgatgagtgcat

SEQ ID NO: 303225 - DNA, 334 bp, Zea mays
ctggcttctcctccccctcttaccaagtcctcctcgggttagggttccttagggttttgtggaggggcgatggcggttgctgatgtggagtaccgttgcttcgtcggcgggcttgcctgggccaccagcaacgagtcgctggagaatgccttcgcctcctacggcgagatcctcgctccaaggtcatcaccgaccgggagacggggaagtctcgcggcttcggcttcgttaccttctcctccgagcactccatgctcgacgctatcgagtacatgaacggcaaggagctcgacggccgtaacatcaccgttaaccaggcccagtcgcgtggcgg

SEQ ID NO: 303226 - DNA, 166 bp, Zea mays
tatccagttggctctgatttgtggaacatactattctacagagcgattcaatattccttatcgatgctggagaatgccatcatggtatgtcactttggcaatgtgttgcgccgtgcagtcatcgaggatacctggcactatctcctgcacagactcctgcaccaca

SEQ ID NO: 303227 - DNA, 153 bp, Zea mays
cgccggattgctgacgcaatcgacgtacacgactgctcgtcttggatccgctatggttctaactaacgaagcatgttgaaggagtgaagggaagccattgccgctatgtcagtaagctttcatgagtctgactgctggtgcaattggtgcttg

SEQ ID NO: 303228 - DNA, 292 bp, Zea mays
aaaccagaccaccaaacaagtgccagcgccctctcgcagtcgccgcaatggagagcaccttcatcatgatcaagcctgacggcgtccagaggggcctcattggtgagatcatcagccgttttgagaagaagggcttctacctcaaggccttgaagcttgtcaacgtggagagtcgttgccgaaagcatacgcgatctcgctcaagcctcttccaggctcgtgatacacattctgcctgtggtgcatgtctggaggcaaacgcgtcaaatggcgcagacatggcgcataccct

SEQ ID NO: 303229 - DNA, 152 bp, Zea mays
cgggtggttaagcgcgataatggcggacttgtggacagactatgctgacttctgctctaagatctacggcgatcgcgtagagcactagtatacattcaatgagccaacgatagtatcgctactttgctatgacacagggtcacatcctcctc

SEQ ID NO: 303230 - DNA, 347 bp, Zea mays
gtgaacgaagagatgattgagacgttgttcgtctcaaattcgacatggagatcctccaagagtggaatcaaggcgccaaattccagttcgtgcagccaggagaacacggtcctcgacccgaagaaatcacaaaacatcgcgataatgctgagggcgctcaatgcgaccaaggaagaagtgtgcagagcactcctagatgggcaggcagagagccttggatctgagctcttggagatgctgctgaagatggcgcctagcagggaagaggagatcaagttgaaagaatgcagggaggacgctgtgtcaaagcttagccctgctgaaacttcctcaaggcggtgctcgcg

SEQ ID NO: 303231 - DNA, 191 bp, Zea mays
  unsure (1)..(191): unsure at all n locations
cggctcgagagtnggaacatatgatagagacctactgaatgatgaattctacattggcttaaagcaaagaagatcaactgagccatggatatacgtctgatattgctcggagtgagttgataggccgcggttaggcagagctatggacaaaaagttcttgtccagtgtgaggagcttcgctaaccacaatg

SEQ ID NO: 303232 - DNA, 305 bp, Zea mays
tcgatcggtcgagataacaattgaaacaccgagctttttatgtactggggagaggtctaattaggaagttgaacaaaagcatgttccatgtatcaggtagccctggtaggcaccagtggctgcagtcactgtatgtgagtggttgttgccgttgctctttgctaagtggttttccttcgtgagtgatggtgtaaattgatgggtgtgcatcaattcggagttctgagaggcgagtgatgttcatatatacaataggcgttttcatcctcttgatgtttttctcgatgatgtctatcaaactttgt

SEQ ID NO: 303233 - DNA, 270 bp, Zea mays
gtcatcaattattagatcaagaggcgagtaccatatgtgtaacacgtacttctttagcagactagaagccatagcaacaaagaaggacaagatcactgatgttctgaaattgagaagatggtggaagggtgtagatatatttcgaacggcatatatattgatgcctgtgcatgcagaaacacattggagcctcatcataatatgcatgccaacaaaagaagatcacatcggtcccatcatacttcagttggactcactgaagtttcatag

SEQ ID NO: 303234 - DNA, 147 bp, Zea mays
ccgagatcaaggacttcattgtgatcgtgaggatgaaggatgcccgatcagtgaagatcaagaggagcaaggatgtggtcaaattcaatgtctgctgatccaagtatttgtacaccctctacgtctttgatgctgtgaaaacaaaca

SEQ ID NO: 303235 - DNA, 256 bp, Zea mays
cggaattcggtcgaggttgtcgatgacaagctgggggcgctctgcatgcaatggttgcgagacgaggtctgttcaatcagagatgctgccgctaacaactcgaagcgcctggcagaagagtttggtccagagtgggcaatgcagcatatagtccctaaggcgatggagttgctcagcatcccactactatcatagcgcatgatcgatctgcaggcaatctgcttgctagctcctgtcatgggtgcagagatcacct

SEQ ID NO: 303236 - DNA, 272 bp, Zea mays
  unsure (1)..(272): unsure at all n locations
gctcgagcgccatggcagccaagatgcttgcattgttcgctctcctagctctttgtgcaagcgccactagtgcgacgcatattccagtgcacttgccaccagtcatngcattgggtaccatgaacgcatgcatgcagtactgcatgatgcaacaggggcttgcagcttgatggcgtgtccgtccctgatgctgcagcaactgttggccttaccgcttcagacgatgccagtgatgatgcacagatgatgacgcctaacatgatgtcaccatt

SEQ ID NO: 303237 - DNA, 185 bp, Zea mays
cgacccgcgccaccccgtctgcctcccccggcaccgatcggggttgatcgatggcgtcgaagatgatcctgaaggagttgaaggactgcagaaggacccgccacctcctgcagcgcatgtcctgttcgtgaggacatgttccattggcaagcgaccatcatggggccttcggacagcccatttgc

SEQ ID NO: 303238 - DNA, 168 bp, Zea mays
agcacagcagcctccttcctcctctactctcgctcgtgtggtcgctcctcgttcgcatccgatccaaagagggggggaaggaagatatacgcgagagcttccgcgtctagagctcccacgtgcggtacagcccgatgaagatcgagtcggagtaccggtacgacacga

SEQ ID NO: 303239 - DNA, 292 bp, Zea mays
atgattacttcgagtattttggaccagacttcagactgcatattagtcgctcaaacatgacaagccagaacactccagaatatatggaggagataaacagcgtttatttgaaatctgcgatgttacacatgcgctggtgttcaatgaagctatccgaagatgctgtcatgaagcagtggtatgggatgggaagacctacagagattctatcggcacaacaacggtactttgagaaatccagatctgagagagtgagagctagatgcgtgcaagaagacaaaacggatagagc

SEQ ID NO: 303240 - DNA, 184 bp, Zea mays
  unsure (1)..(184): unsure at all n locations
tacgttaggccacggaagtttgatgctcgtgatgacctggcggcgctcgagaaggactacgcagaggtcggcgctgagttcgatgagggcgangatcgcgacgacggtgacgagtactagagaagtttgctgatgacgcagcatcagggccagtgtgctgcacttatcccgtgatctgccgtga

SEQ ID NO: 303241 - DNA, 213 bp, Zea mays
ccatcatgcccaaggacatccagctcgcgcgccgcatccgcggggagcgcgcataggcggcccccggataggccggtggccgttgcgcatctcttctcggaagtttgtactagtggtcgggacgtgtggaaggagtggtgtactgatctgcaatgtctcaaaccatgtcaacctctttgttgtcatcaatggaaatcgctacttatgtgtgct

SEQ ID NO: 303242 - DNA, 246 bp, Zea mays
  unsure (1)..(246): unsure at all n locations
cggcgagcaaggtggtggaactcatatacagtgtcgggtggccgaatcccgnagccgcgctggaccgcgtcgagcgagtcgtcaaggtccaaagcatggaacagcgggtggaccggttcaaggagtacatggaggaggtgaagggcagggcggcgaggctgcccaacaagcacccccgctgcgtcgccgacggcaacgagctgctccagttccacggcaccacggtctcgtgctccctcggaagcg

SEQ ID NO: 303243 - DNA, 318 bp, Zea mays
gtcgcgcgcaaggccggcatcgacctcaacaagaagtgagaacagccaaactatggtgtggtggcacactggcatcgaccccagtttgaattgtgtaccataccaatcagtgtaggcagatcgaggttgcacatgctgtgggtctgtttagttcagcttttttctgaccaacttttctgaaaatctggatacgaggagaatctagctgtggggagaacctgagtatcattacgattacgtgtgaagaaggataaagttgttcatagggctcaagatctagaaattgacggattcctactattacaacaactcaaccga

SEQ ID NO: 303244 - DNA, 204 bp, Zea mays
caccatttaaaagaacagtagaggattcagaatttaaggttgaactgacccaacgaatccacctgacgggaaaacccaactgattgagtatagcaataatgacactatgctccactgtattaaaagctttatcaaaatgtgagaacaaccacttcctttctagaaagatggcactgatgtaagtattcatcgcaccaagcaaga

SEQ ID NO: 303245 - DNA, 128 bp, Zea mays
  unsure (1)..(128): unsure at all n locations
ctttcacttactaggatactcacttgctccgtccatttatggccatctatggataaagaaggcagtagtactattgatgcttngttggtgttgcaacgagtctaaacaatggaactcacttgagagga

SEQ ID NO: 303246 - DNA, 248 bp, Zea mays
cataacgtttgagtatagtagacacaaactccttggttttgaagtacttggatgatgattcagaatgggtcttgatgacatgcgatgcagatctacaggagtgcctacatgtatactaactagcaggaatccatacaatcatgatttcagttcatttagctgttagtccacctacaagggtgactactggtcacactggtttgtcatgacaacagtatgaacctcaccacgttgtgaggtgtaatcag

SEQ ID NO: 303247 - DNA, 160 bp, Zea mays
cgtcgtaactcggaatcggtcgagcaagtccacggcgaactctcggctatcatgtctagccgcgagcaaggcgggaatgatctggagcatggcggcgccaagcggcaccagcaggtgctacgcgacaacatccagggcatcaccaagccggcgattcgca

SEQ ID NO: 303248 - DNA, 230 bp, Zea mays
  unsure (1)..(230): unsure at all n locations
agcaacataganagcacaatagtgtaccaacaatggcagccagaatattttgcctccttatgctccttggtctttctgcaagtgttgctacggcgaccattttcccgcaatgctcgcaagctcctatagcttcgcttcttcccgcgtacctctcatcagcggtgtcttcggtatgtgaagacccattcttcaacgctacaggatccaacaggcatcacagctggcatctt

SEQ ID NO: 303249 - DNA, 254 bp, Zea mays
cttgtctcaggcttcgtggtggcatcatcgagccttcgctcatggctttggctcgcatatacaaccaggacaagaagatttgccgcaaatgctatgctcgtctgcaccctagggctgtgaactgccgtaagaagaagtgcggtcatagtaaccagttgaggcctaagaagaagatcaagtaaattcctgggtgggatattgttggtctctactttcgttgtgttgtcttagaacagtgacttgttggtattatc

SEQ ID NO: 303250 - DNA, 304 bp, Zea mays
  unsure (1)..(304): unsure at all n locations
cgtagtaagtcggaatcggctcgacggatgagggagggcgacacactgctttcttctctaactacaaacctcagtgtcactngaggactgctgatgtcactggaaaagtagagttgcccgaaaatgttaacatggttatgcctggagacaatgttactgccgtgtgtgaactgatttcagcagttccacttgaagcaggacaaagatgtgcctcgagagaaggtggaagaacagttggtgccggtgtggtgtcaaaagtactgagctagtgcatttgccatgattcaaagtttagtctacccat

SEQ ID NO: 303251 - DNA, 103 bp, Zea mays
caaatcggggaaacatggaccagaacttccttcaattcgacacggcacctcggcaaattgagccagacacaactcggaaaaccccagactactttttgtaatt

SEQ ID NO: 303252 - DNA, 115 bp, Zea mays
cggttggaccgcaaacatggacaggataatgaacgcccaatctctaagggacaacagcatggcagggtacatgtcaagcaacaagaccacagagatcaaccctgagaacccaatc

SEQ ID NO: 303253 - DNA, 273 bp, Zea mays
gcaagtgcaccttccaagttagcattgcttaaatttgcctttgtcacatttgccatggaatacatcttttgatggatcaaatattacaggcgctgacttcacggatgtaccactaagagaagatcaacgtgaatacctctgcaaagttgctgatggagtgaacccaacaactggaaatgctacgcgtgatacattgttctgcaattagtattccattgctgaatactcactccaagaccttcaaatgtttgcgtagaatggtttcatagctaa

SEQ ID NO: 303254 - DNA, 99 bp, Zea mays
attagatgaagaaatgtcggcagacccttctgttttcttgatgggagaagaggttggcgagtaccaaggtgcatacaagatatccaagggtttgcttga

SEQ ID NO: 303255 - DNA, 348 bp, Zea mays
ataacacatggtgggagtggggtaccagatgcattactgaaccagatgtttggaaacaacgggctagaatccgaggagggtattagcctactgatcagcagaaagctgctgaagctgatgaatggagatgttcgctatctaagggaagcaggcaaatcagcttttatcctctctgctgaacttgcagcagcccataatttgaacagttaaaagtgttggaaaaaagaatataagatgatgcaaccagcaaaacacaatctgttttgtacatcataaagagaacggagctagacattaattgcatccaatgtaactctaatgtgttcccacgtttcttattaactgctc

SEQ ID NO: 303256 - DNA, 135 bp, Zea mays
gcaattgattttgggccgtttgcactttgttaggttcattagggttattgtacgttgcaattgtccagttatctttgtatggatttgtactttatgtctgagaaaattagtgattgtgcttttatgccggacttg

SEQ ID NO: 303257 - DNA, 308 bp, Zea mays
ctccaaatttcataaacaagacagtcgatggaaaactactagagccttatgagatagctgctgttgaagtcccagaggagtccatgggatcagttgttgagcttttagggaaaaggcgtggacagatggttgacatggaagctaacgggacggagggaacaacattgctgaaatagaagattcctagcagaggccttattggacttcggcctccaatgcttacagcttctcgtggcagagctatattgaatacaatctttgacagtgatggctcatgggctggagtcttagctcacgtgatcagggat

SEQ ID NO: 303258 - DNA, 338 bp, Zea mays
cgctctcgttctggtttatagatctttgcgaaggaactttacagcgctcaaccaaagatgcacaacgaggaaggacagatcactgagctttacattcctaggaagtgctccgacacaaacagattgattaccgctaaggaccatgcttcggttcagatcaacattgggcatgtggatgagaatggcgtctacaatggccatttctccacttttgccctctgcggattcatccgtgctcagggtgatgctgacagtgctctagaccgcttgtggcagaagaagaaagttgaagttaagcaacagtagacacccatgatagtttgttacttcgttatgta

SEQ ID NO: 303259 - DNA, 312 bp, Zea mays
cgtggttcacgtgaaatcgaagagacgttgttggagcaccttggagttaaacgaaatgaggtgaccagtgatggtttattttctgttggagaaatggagtgcatgggttgctgtgtgaatgctcctatgattgctgtggctgactactcgaaaggctcagagggttacacatataactactatgaggacctcactccaaaacgagttgttgagattgttgagatgcttagagaggtgaacacccctcgaggacaagcaccagagcgaaaacttggcctgcggggggacacacttgcacgagagcgaactcct

SEQ ID NO: 303260 - DNA, 317 bp, Zea mays
caactacaaaggttgctgtaggagataagatattgaagtagtgctaagtgcctaacacctgcagtgaacaatggcctctgcatcagcatctctgcccaagtctgcacttgttcttgacaagtctgattgggtgaagggacaaacacttcgtcaaccttctgctgcatcagttgtgagatgcaaccccaccaccccatcaggcctcaccatcagagctggttcctatgctgatcgactcgttaagaccgcgataacagtggcttcatcagggagtggtatgttggcatggatgagtccaatgtacctgtgggaagcgt

SEQ ID NO: 303261 - DNA, 183 bp, Zea mays
gccacagggtggtcgatttggcacacctagtagcaagcaagtgaccacgggcagctacagcagggagtggagacccattggaggaattctgcgagacatagcttgcctgatgagcatgcaaagtatatgactagaggagagcgccttttgctgatttgatgattaccattaccagcagcaaac

SEQ ID NO: 303262 - DNA, 334 bp, Zea mays
ccaagcacctccctaatccagattgagaatgtaactctaaggaagaagttgcgtggtactgtgggaagcgcatggcttacatctacaaagcgaaggtaaagaagaacggaagccactatcgctgcatttggggtaaggtcaccaggcctcatggtaacagtggtatagttcgagctaagttcaagtccaatctgccacctaggtcaatgggtgcaagggttagagtattcatgtatccaagcaatatatgagatattaagtgtaaaacctttctgcttgagcctactcctttatccgtggagatatgctccaatattccaggattcgtgtgtcg

SEQ ID NO: 303263 - DNA, 330 bp, Zea mays
  unsure (1)..(330): unsure at all n locations
cgtgagtaacagcagagcagaacaccgataaatcctatgactgctcagactcaagaggagcttcttgcggccgaccttgagcaacaagagatccatgatgatgangctgtagttgaggatgatgatgaggatgacgaagatgacgacgataaagatgacgacaatgttgaaggtgatgcatctggtaggtccaagcagaccagaagcgaaaagaagagtcgcaaggcaatgctcaaacttggaatgaaacctgtcacaggtgtcagtcgtgtgactgttaagaagagcaaaaatatccttgttgttatatcgaaaccagatgtttcagag

SEQ ID NO: 303264 - DNA, 334 bp, Zea mays
ggactaattggtatataccatgattggtgtgatcatttggcacttatccaagaacatatgaccttttgcatgctgatcatttgttctcacggctcaaaaacaggtgcaagcagcctgtgaccattgttgtcgagatggaccgtatattacggccaggaggttggataattatacgtgacaaagttgaaattctaaatccgttggaggaaatattgaaaagtatgcagtgggagattagaatgacttttgctcaagacaaggagggtatcttgtgtgcacggacaactatgtggaggccttgagtctctattatatgcaattcctcttgtataac

SEQ ID NO: 303265 - DNA, 188 bp, Zea mays
  unsure (1)..(188): unsure at all n locations
caaccctgagagagctgttgaatatttgtattccggcataccagagcaagctgaagctccacctgttacccgagagcctgcaagtgctcaacctgcanatcctccagctgctgctccacaggcagcacaaccagcatctgttccctctagtggacctaatgccaatcctttagatctccttccccagg

SEQ ID NO: 303266 - DNA, 230 bp, Zea mays
aagaaatccaccgccaaactccaagactccacgtcggtgaggaagatagtgaatctggacgaccacattgcgctggcctgcgcggggctgaagtgcgacgcacgcgtgctcataaacagggcacgtgtggagtgccagagtcacaggctcaccgtggaggatcccgtcacggttgagtacataacgcggtacattgcggggctccagcagaagtacacgcagagcggcgg

SEQ ID NO: 303267 - DNA, 164 bp, Zea mays
agaaagctttgacgtaatcaattcagatcagagcctctcgctgcatatatatttacaaataccaagaagcttaaggagcaatttgttatgactatgtcagctggcggtttggttgttaatgacactactccacatcttgcagttcatacttgaccatttggggg

SEQ ID NO: 303268 - DNA, 136 bp, Zea mays
ctaagagtgtcttggacattcaaaattgagggagcgtaagatagagtatgacttgaagacagcaatatctttggttaaagaaacagctaaaaccaagtttgtagaaacagtagaagcccatttccacacaacatac

SEQ ID NO: 303269 - DNA, 204 bp, Zea mays
gacaggggtggtggctgcttcgagagttaataatttgtttatgtccagaacatcatagattggcgcagcagcagactagcaaattactcatatcatataagaagatggcccgttctctctcgcaagccagacgtattggtgtccttgttgctcaatctatctccctaattcacgttcatcggcgaggttacgcagtggcatccg

SEQ ID NO: 303270 - DNA, 160 bp, Zea mays
ctgcaaggcccgagagatactagctcagtggctcagtcagcatccgaagcttcggatcccacaccgaggaaattaaaggagaagagagggtcggaataatggcggccgaggagggtgcggtgatcgcgtgccacaccaaggacgagttcgacgcccgcat

SEQ ID NO: 303271 - DNA, 296 bp, Zea mays
  unsure (1)..(296): unsure at all n locations
gtactgaaacaacgtcttgctccttggggcatcagaacctgagagaaggcactgttattgtcgaatcctggaagtccttgtaaatgtctgggcttatcacagtggaaggaagatggtctaccttaaccctttcactggggataccagtgagcagcatctgctcgataagagaaatgggatgtgggtaaagttcttcaatttcacccttctgaagagcatggatgaggatctggcagaagaagctgatgatggcatgcatcctggganagagcagtggctgtggccattgactggtc

SEQ ID NO: 303272 - DNA, 100 bp, Zea mays
cgaccattttcccgcaatgctcgcaagctcctatagcttggcttcttcgcccgtacctctcacgagcggtgtcttcggtatgtgagtacccaattcttca

SEQ ID NO: 303273 - DNA, 330 bp, Zea mays
attcggctcgagtgagaatctgcagaagtccttccataagtatttagaaatcagaggaatcaagcctaggacaaccaatttcttgcatgagtacatgatcaacaaggacagtaaagagtacttggtatggttgaacaagctcaagagcttcgtgcaagcatgagccttcacgtctcttttatgtgcttactgtcgtcatttgaagaaaagcatgaatgttgctgagtttttgtttaatcacatgctgtacattcgaaggaaaagataccaaggagattttactggtttagctgtagctcctattggttatggaaggtagattatgcctga

SEQ ID NO: 303274 - DNA, 310 bp, Zea mays
gcgtggggaagccttgacgccctgatcgggcgactacgggcggcttacgaggaaaacggaggccgccctgagtctaacccgttcggcgccagggccgtcagagtttacctcaaggaggtaagagaaggtcatgctaaagcaagagggatcccttatgagtagaagaagcggaataggaccatcgtggtgatggtgagtagtggtggtggtggtagtagcggtgcagttgcctctccgagtggcggtggtgataccgctattggtggtggagtcggttctagtgctagtataactcttcagcaatgccaca

SEQ ID NO: 303275 - DNA, 329 bp, Zea mays
  unsure (1)..(329): unsure at all n locations
canatattcattttctttgaaggcatatatggtggagctttatcaagataatcttgtggacctgttattgcccagaaatgcaaagcagctgaatgtagagataaaaaaagattccaagggtgttgttaccgttgaaaatgtaacagttgtgagcatttcaagtattgaggaactgagggctataatctcaagaggttctgagaggaggcacactgctggaacgaatatgaatgatgagagttcaaggtctcatttaattctttcaatcattattgaaagtacaaatctccanactcaatcatatgcaagaggcaagctaagttttgtgg

SEQ ID NO: 303276 - DNA, 285 bp, Zea mays
  unsure (1)..(285): unsure at all n locations
tagcaacatagaaagcacaatagtgtaccaacaatggcagccaaaatattttgcctccttatgctccttggtatttctgcaagtgctgctacggcgaccattttcccgcaatgctcacaagctcctatagcttcgcttcttcccccgtacctctcaccagctgtgtcttcggtatgtgacaacncaattcatcaacctacaggatctacaggcaatgcagctggcacttacattatcaccttgttctcgacatcatcagcctatacagcagtactatgtgattat

SEQ ID NO: 303277 - DNA, 321 bp, Zea mays
agcacactctgcttcttcggattccgatcgcacgcgccgtcaccatggtgaacgttccgacaacatagaagacatactgcaagagtaaggagtgcaggaagcacacgctgcacaaggttacccaatacaagaagggtaacgatagcatagctgcccaaggaaaacgccgttatgatcgcaaacaatccggttatggtggacaaactaagcccgtcttccacaagaaggctaaaaccaccaagaagattgttctgaggttgcaatgccagggttgcaagcatgtctcccaacacagctataagaggtgcaacactttgagat

SEQ ID NO: 303278 - DNA, 342 bp, Zea mays
atcgccggtggcatcggcgccgccgtgcggcgaagtcgccgacgtggacatcgtccgaatgcaggcagacgggcgcctccctctcacacagcggcgcaactacaagtccgtcgtggaaacatcacgcgaatggcgaacaagaaggcgtcactagcctttggagaggctcatcgcttaccgtgagcgggcgatgctcgtgacggcgtcgcagctcgcgtcgtacgacaagttcaaagcaacgatcttggagaccggcatgatgcgcggcgggctcgggacccatgtcacggcgagcttcgccggcgggttcgtcgcggcagtagcgtcgaaccccgtcgacgt

SEQ ID NO: 303279 - DNA, 344 bp, Zea mays
  unsure (1)..(344): unsure at all n locations
gctcgagcgccgtcgtgcgatcgctacgcctctctatcgacgtctttgccggcgaagagcggccagtcggccaacatgatgaagtttgttgctggctatctgcttgctgtcctcgctgggaaatccagnctctcgggcgatgacttgacatccattctggagtcagttggctgtgaagttgacaatgaaagatggaactccttctgtcccagctgagcggtaaggacattaccgagctcattgccgccggcaaggagaagtttgcttcagtcgcatgtggcggtggcggtgtggctgtcgcggcagctgccctgctagtaaaaaggcggagtactgcagctgag

SEQ ID NO: 303280 - DNA, 199 bp, Zea mays
agaagttaaggttgtctccgacatgcacgagaggaaagctgagatggcacggcaagctgatgccttcatagctcttcctggagggtacagaacaatggaagaactgttagagatgataacgtggtcacagctcggaattcatgacaaaccagtcggtttgctgaacgttgatggctactacgacccgctgctcatgctg

SEQ ID NO: 303281 - DNA, 252 bp, Zea mays
gtagtgctgtcatcgatgatgggctgattaacaaggaggagtttcagttggcactatttaagaccagcaagaaggagagcctgttcgcagaccgcgtatttgatttgtttgacacaaagccaatggaattttaggatttgaagaatttgctcgtgctctctcagtatttcatcctaatgctccccttgatgagaaaattgacttttcattccggctgtatgatctcaagcagcaaggctacattgagagaca

SEQ ID NO: 303282 - DNA, 123 bp, Zea mays
caaccaatatctgtaccccagacaatgcactccctaataatgcaggtggatgatgcagacctcctctgcaccactgcgacctttcccagactattttccgacaaattgctcaatacaaaggtg

SEQ ID NO: 303283 - DNA, 291 bp, Zea mays
cttgacatagactttgggattgccgatgtgtagatttcatcgctgtttcatttgtcaagtctgcagaagtaattaggcacttgaaaagctacatagctgcaaggagccgtggaagtgacatggcagtcattgcgaacatcgagagcatcgactctctaaagaactgggagagatcatcgagcgtcagaggcgccatgtagccaaggacatggggcgcagatccctggagcagtccctcgatcagcaagatcgtcagtctcagcactgacaagcgtcatgcgctccagtctc

SEQ ID NO: 303284 - DNA, 336 bp, Zea mays
  unsure (1)..(336): unsure at all n locations
gtcggaatcggtcgagggcactgtgtggataccttggatgagattatggaatctcagaatttaggagccagtattgangtccgcctactactttggtgctcagggtgttgtgtcgtgtgctaagaactctgctacattaagtggagtagtgagcacagctagtgcaggttcactcgagttgattgagctactctcctgcagacacatgatgcagttcttgtcttcgtcagctgataatagttagcgagtcttggtggtaccttgctaacaaactgtactctctctcagtggattaggggtgcactatcttgtgatggtatgaggcactgattagac

SEQ ID NO: 303285 - DNA, 205 bp, Zea mays
caattatttagtagagctcatgtgaagctaatcatacaatcatacatatcaaggtcgtcaaacatattgccatgaaagggcggcaaaggtctaagcaagggcggcgccaatctccaccgcaacgtcctgcgcgacaacatccagggcatcacctagccggcgatccggatgctcgctaggatgagcgacgtaattgtatcgtcgc

SEQ ID NO: 303286 - DNA, 172 bp, Zea mays
gaccaaacgatccgggttccagcggcggcttcagcggcgaagatgatcataccggtgctctgcttcactggcagcaaggtgatttggaacaagtgggaactctaccttgacctcctccaggccgactactcggaaggtgatgctctggatgcttagaattgttccgctactg

SEQ ID NO: 303287 - DNA, 354 bp, Zea mays
ggaacaaacaactaaaatcccagcctgttcttgcgtgggtgtaacgtcgaggtcggcgcggttctcatccgcatcgaactcgatggtgcaagcgccgggagtaagatctgcaacgccaggctggttcttcttggagatgtggacgctggcaaatctagcttggttcttcggtatgttaagggacagtttgttgaattccaggaatcaacaattggagcagccttctattcccagaccttagcggtcaatgatgagactgttaagtttgaaatctgggatactgccgggcaggagaggtatcatagcttggctcccaggtactatagtggttcagctgctgccattgttgtctat

SEQ ID NO: 303288 - DNA, 382 bp, Zea mays
gcagaacgatcggatctagcagaattctctcaacctcatcggcggcggcgaagagcgtgcggatcggagatggagacaagcgggtagaagaggatagctgcagcagcggccttctggaagccccgccacggtgtacctgtggctcgcgctcgccgaagcagcactgacgctcgcccaggctaagaaggacctaacggaggttacccacaaggtctacttcgatgtcgagattgacggcaagcccgcaggtcggattgtcatggggcttgttgggaagactgttcctaagacagcagagaacttccgagctctttgcacaggagagaaaggaattggcaagagtggcaaagctctccactacaaggggagtacattccacaga

SEQ ID NO: 303289 - DNA, 362 bp, Zea mays
caatgatcaattgttctttccaggagttccaactgaagattataatacgcctggagaatctgctgagtatcgagctcctacacctgctggtgggacaaccagatccaggaatggatgctgaagatgttaatgatggtgacggatgatgatgatgaacttcgtcttaatgaagacgacgacgacgacgatgatttagatgaccttgaggaaggggaggatgaacctaacacacaacatcttgtacttgcacaatttgacaaagtgacgaggaccaagaatcgttggaagtgcactttgaacgatggaatcatgcatttgaatggtagggatgttctatttaacaaggcgacaggcgagtatga

SEQ ID NO: 303290 - DNA, 296 bp, Zea mays
gctttcgaatgtgttcatgatggctggggtgttgctgtgctggtgggtgtgccacataaggacgctgagttcaagacccaccgatgaacttctgaacgatagacgctgaaggacctcttggcactacagcacgactgatctgcaatgtgtgactgacatgaaagactgagtgagagtcatcagacacgccgtcgcggatacaagctcgcctatgcatgtgaggatcgtgatatcgatgagactaatcgcgctattgtactgctggtgggtataaaagatctactgcttcgtagaga

SEQ ID NO: 303291 - DNA, 350 bp, Zea mays
taactcggaatctggtcgaccttcggatctcgcattcagcgcacgcacggtgtgaaggaagggggacgcggaggaagatggggctcgcgttcgggaagctcttcagccggctcttcgccaagacagagatgcggatcctcatggtcggcctcgacggcggcggtacaaatcacaatctctaatagttaaagctcgggagatcgtcacaccatccacacatcggttcaatgttgaactgtgagtcaagacattagcttcatgtctggatgtcggggtcagacagatcgactcttggagcatactccagaaaccaggtctacttgtgtggcacatgactgacgtttgtaagc

SEQ ID NO: 303292 - DNA, 129 bp, Zea mays
  unsure (1)..(129): unsure at all n locations
tgcaagcccgtgccatctttgaagctgctatagcgatgaccaaccaaaggcgtcaagtcgttccagagataatggttcgctctggtggaacaccgcaggagattgggacatcangtgggcgctatccgt

SEQ ID NO: 303293 - DNA, 198 bp, Zea mays
tttcctccgtcacgcagcatctcaacccatggccaagatcaagatcgggatctttcggttcggcaggatacggaagcttgtggccaaggtggccctgcagagtgacgatgtccagctcgtcgccgtggacgaccctctcatagcacgactacatgaccttcatgttcaatacgacactgtgcacggacagtggaagca

SEQ ID NO: 303294 - DNA, 304 bp, Zea mays
tgtgaatactcgacctgacttggcatattcagttggatatgtgagtagatttatggaggagccccatatggatcatcttgcagctgtgaagcagatcctgaggtacatagcagggacaagagattggggcctgttctattcaaggagaaatggagggagtgatgagctcttgggctatagtgacatgatatggctggcgacttggatggcagatagagcacatctgggatccttttctttcttgggaggagtcgaatcactggcaatcactaacttattgtggtgcgctatcagttgtgagcga

SEQ ID NO: 303295 - DNA, 313 bp, Zea mays
acttggagtaccagtcttggaatggccatctagggttaaaattgcggctggttcagcacgcggaatagcctatcttcatgaagattgtaatgacatttttcattctttcacctgtttttgtgatgattttcactactctcagtctcatgcttttttgtttaattcttttccttggcaggtcacccagaataatccacagagatataaagtcgtctaatattttgctggataataacttcgatgcattggtaagaatgctttctacataatttcagtaacatcttataatggagtcatcagtcattgcattggt

SEQ ID NO: 303296 - DNA, 348 bp, Zea mays
  unsure (1)..(348): unsure at all n locations
tctctctctctttctgttttttttatttcttgttcttgaatatggcgctatttccccgccttgcgcgggcaggtcttttccttcaccagagttggtcggccgattatggggcccgtctttaacctttcgaaactcggacctagtccccatttactcgaatcccttattgtgtgtgaatgaatgtacgagatggatctaatgtaatattcgggatcgagttatgagctgataaaacgtagatccgagaccttgcgttatttctgttattttctgtgatgattttctgtaccatttctaatctgttcatctaggccacggatttanaataccccgagccactgtgatcta

SEQ ID NO: 303297 - DNA, 307 bp, Zea mays
gtacaatccttgattttgaaattggaggagggaggcgaatatcagaatttagtactgtaaggatgatgtataacataggaattcagggcgtatcttggaagtttgagttacatcgtgctggtcaaaagttaatcatcccagtcttgctttcaactgatttaaatccattatttgttaccagtgcatttgctattccttcaacactgtattttctacttcagacatatgttgtaaagccttactaccttaagcgagaaaagcagacaacactagaaaagatggaaggcttatctacacagctaactga

SEQ ID NO: 303298 - DNA, 301 bp, Zea mays
gagatcgcaagaagggttgctgatgaagttcttgaggattgatcctcaagactcagcttcatatgttctacttgccaacatctattcttcagctaacagatggcaaaatgtctctgaggtgaggagagccatgacagacaagatggtgaagaaagcaccaggcataagttgggtagaagtaaagaatcaggttcatcagtttcatatgggtgatgaatgacacccaaaacacgtggagattaatcagtatctggaagaattaacttcagaaatcaagacgcagggctatgtacctgatact

SEQ ID NO: 303299 - DNA, 268 bp, Zea mays
caacaatatgggttttgttaagttgattaagactaaggcatacttcaagcgctaccaagtcaagttccgccgcaggagagagggcaaaactgactacagacaacgtacaagacttatcacccaagataagaacaagtacaacactccaaagtacagactcgttgtcagaaagaccaacaagaacatcatcgcccaaatcatctacgctaccgttcaaggcgatcgtgttgtgaacgctgcctactcctctgagctcccaaagttcgga

SEQ ID NO: 303300 - DNA, 268 bp, Zea mays
atccgttctccggcgattttgggctctcgggaacagacaggaggatccgcgggaaggattcggctgcgtcctagtgtagtgtcgacatggctgggcgcaaggagaccgcactcgacctggcgaagttcgtcgacaagggcgtccaggtgaagctcaccggcggccgccaagtgacaggaactttaaagggatatgaccagctactcaacctagtgctagatgaagcagttgaatatgaaagagagcaagatgacccattgaagctatc

SEQ ID NO: 303301 - DNA, 254 bp, Zea mays
ctcatatacgcaggcatctagctcaagaagctcgaggctgcacctgattgatactttggctggactgtgaccgagaaggagaaaacatatgctatgaagttatcgattgcactgggattcctgaaaatgaggctggcagaagaatttttcgtgctagattttcatctgttactgagaaggacatatcgagcgccatggataatcttgttctgccaaacaaagatgaatcactatctgtggatgctcgccaagaa

SEQ ID NO: 303302 - DNA, 270 bp, Zea mays
ctgacttctttatcgcacttgcatacttctcgatccctttggagctgatatactttgttcagaagtcagctttcttcccctaccgatgggtactcatacagtttggtgcgttcatcgttctgtgtggggcaacccaccttataaacatgtggactttcactacgcataccaagtccatagctgtggtgctgacagtggcaaaagtggcgacaccgttgtgtcatgcataacagctctgatgcttgttcatataatccctgatctgctgag

SEQ ID NO: 303303 - DNA, 272 bp, Zea mays
aagacaccaaacatgctggtcgaccggaactggtctgtgaaggtaggtgactttggcctgtccagatttaaggcaaacaccttcatatcatccaaatcagttgctggaacaccagaatggatggcgcctgagtttctgcgcggcgagccatcgaacgagaagtgcgatgtttacagcttcggcgtcatcttgtgggagctcctgacgatgcagcaaccatggagtggcctaggccctgcgcaggtagtaggagctgtagcgttccagaacag

SEQ ID NO: 303304 - DNA, 286 bp, Zea mays
ctgttccaacagccagggcagaagtggttgattggactaagaacaatactacaattcagtcagtagaatccccacctaagtacatgtcagaggagagtccaacacttctgcaatctagccagaccacaacagtcttctctaaccaaattaacggcaatagtgatgggacctaccacttgtcattctcaagtggtaatgtgacagacagtctaccagattggcctgtggatgagttcttcagtaactcagaatatgttccaaacttaggcttctccgagcatggttc

SEQ ID NO: 303305 - DNA, 283 bp, Zea mays
gtgaacttgccttggcgtttggagaactgttgaggagcttatggaccactgacggaaaaccagttccacctcattatttcaatgaaaaaattgcatgttttgctcctcagtttggtggctttaatcagcatgattcacaggaacttcttgcttttttactggatggtctccatgaagatcttaaccaggttaaatgtaaaccgtatgaagaagcaaaggatgcaagtggccgtcctgacgaagaagtagcagatgagtactggagcaaccatttagctcgaaa

SEQ ID NO: 303306 - DNA, 274 bp, Zea mays
ctcggggggaggagatagtctcggctctctgctgtgcggcgctggcggaagaggggttttgatcgcttccttcgtctctctgtcgtgaagtggacgacggaccgagtacctacaccaacttaaacttggatatcaatggagggcggtgtgactgtagcggacaaggcagaattcaaggagtgtctgcggctgtcctggacacagccttacatccttcaacttgtcctgtctgctggcattggcggtcttcttttcggatatgatacaggtgtca

SEQ ID NO: 303307 - DNA, 275 bp, Zea mays
gtccctcgtgctcctattgatcttatcgccatcccacattctgaaataatgaattttgatgcttctcgtcgtgctgaactgattataaagctgcatgaacaaactaaagcaaatattaaagccatgaatgctaagtatgaagaagcaggtagcaagggtagaaagcatattacctttcaacctggtgatttagtatgggtgcatttaaggaaagatagattccctgatatgcgcaaatctaaattacaaccaagagctgctggacccttcaaagt

SEQ ID NO: 303308 - DNA, 289 bp, Zea mays
taaagcggacatcaagaaatcctgggatctacaaggaggtgccttgcggtggtaatgccctaggattctatgctgcagtcagaatgaggacttcaaggagagaactgcgctatagtgaagatgaggctaccggcgtaggtatatcagtgcagatcatcaagaacaaattggctccagcgaacctgaagaaggaagccggcatcgacatcacattcggtaaggggatctgccacgagtcggagatcctggagacggcttcctccgtcggagtgatcctgaaagacgggtg

SEQ ID NO: 303309 - DNA, 282 bp, Zea mays
tgtgatctgccagcccctgacagcactgttggaaaagggcgctctgtacgttttgacagatgatcatgataatgcattctgcactctcaaacaagcgatgtcatcggctccggtgttggctctaccagattttaatgtcatatttcagattgaaactgatgccagcgccaatggtgtaggggctgttctttcacagcaaggtcaccctctgggcattcatgagtaaggcccctggagttaagtctcgtggtctcaccgattcatgaaaaagagtatctagct

SEQ ID NO: 303310 - DNA, 271 bp, Zea mays
cagctcgacgcaagacgtgccttccaagctttgaaggggacaattcctcctgatgaaagtagcttcaacacattggttcatggctggtgcaaagcaaggatgctgaaggaggctcgcgaaacaatgaaggagatggagcggcatggtttcagtccttcagtaacgacttacacctgcctgatagaagcgtactgcatggagaaagattttcagacggttgatggtatcttggatgagatgcacacaaatagatgcactccaaatattatca

SEQ ID NO: 303311 - DNA, 227 bp, Zea mays
cggcacgcagttgtgggtctcgaggagcaactgcgcgacggcgtcctgctcggcctgcgggatgtcgtcgcgcaggcagccgatgtagatgaactccatcaggggggacgacgagtggtggaggtggcggaggagggagtcctcgtcccactcgaaggaccagggctcctccggcgactcacgacagtgggatcggatcgggagctggttggccacgatgatggtgc

SEQ ID NO: 303312 - DNA, 255 bp, Zea mays
tgtttctgcagtcaatgcattttatgaactgctgagccagggaagcctaagcgtgatgcatccagaaaccaagaaggctgttgctcctgttgagctatgcccaatactcaaaacactatacaaaattttgatcaagaggttggaaacttgtactggtgcacttagactcattgagtcgctattgggctaattgtttaacttttacctgcagggagcttacgaccaattccatcctccaggcaatacgtgatgaat

SEQ ID NO: 303313 - DNA, 172 bp, Zea mays
cccatgccagcgcagtctacgtcgcgctaagttcaagtcctggccgccaaagatcttgagcgcagacagtggggcttcaccaagttcagccgcgctgactaactgcagtacaagagcgaagagcgaattgttcctcatggtgtcaacgcacaactgctcggcaagcacggca

SEQ ID NO: 303314 - DNA, 280 bp, Zea mays
cgcgaagtgcatcgacacggtcggcacccgagaactacctcatccccgtggactccaggggcaccttctgcttcgcgttcgcgggcaccgacggcggcgtgtccatcatcggcaacatccagcagcaggggttccgcgtggtgttcgacggcgacggacagcgcgtggggttcgcgcccaaaggctgctgaggccccaggccggagtggtgaaaccgtcctctctcgagcgaggagagagcgaattcattagcgagtgattagctggtacatcaagtgag

SEQ ID NO: 303315 - DNA, 276 bp, Zea mays
aacaacaaaagtatgacaaaatcagtgcgaagcacatgctgacctcaattgacgccctgtgtaaatcttatccatcagaatttgttacatatttccattattgccgctctttgcaatttgaagataagccagactacagctatttgaagaaaaattttcgggatttattcatccgtgaaggttgccagcctgattatgtattcgattgggactgtatcaggcaagctgcggaccataacaagttgcgagtatgtctgctccttttctggaaattac

SEQ ID NO: 303316 - DNA, 262 bp, Zea mays
atatcttgcagggagcagtggttggaaccattactggaaattgtcgattttatgatgcatcagataatctcctgaggtttgaaacacaagttgcagtcagtggcaagaaaaagtcttctcttaaaagaatcactgctttcgagttctcaccaagcaacccaagtaaattaatggttacctctgctgactcgaagatcaaaattcttgaaggaaccactgtgactcagaattatagcggactccgtactgggtcttgccagtc

SEQ ID NO: 303317 - DNA, 114 bp, Zea mays
gtcaccgcttaacagcaaatcaaaaggtaaaggggttgcataccaacgtgcacgggctttgtagtttgatagcctgtttcacgactcctcaataatcaaatagtgtaatgaaag

SEQ ID NO: 303318 - DNA, 240 bp, Zea mays
gtcaccggcaagaacgcccgtcggggcggagctcggggacaaggacctggtgcggtgggtgcacaccggcatcgagaaggatggcgtggactcggtgctggacccgaggctcgacggcgagtccagcagggacgacatggtcagggcgctccacgtcgcgcttctctgcacgtccagcctgccgatcaaccgcccgtccatgaggatcgtcgtgaagctgctgctcgaggctgcgccgcg

SEQ ID NO: 303319 - DNA, 261 bp, Zea mays
caatttcacactgaacaacgacttgcggtatgtggtgtgggacgatccacctcagatggagccccatctcctaagcgttacacattatgatgagctagtagagactggggttccttttgcccggaagtttaaggaggatgaacccctgttggacatgattgatgataaagtgcttcgacgctggcgtcacaggcctgttcctggcgcatggtgcacaggcaaaaggaggtggttcagtgatccttgctcccagtggagcaa

SEQ ID NO: 303320 - DNA, 259 bp, Zea mays
cggcgttcgcggagctggtgaacacgtgcgacgcggtggtgggcgtgcacggagcggggctgaccaacatggtgttcctgcccccgggcggggtggtcatccaggtgctgccgctgggcccgctggagttcgtggccagctacttccggggcccggccagggacatggggctcagctacctcgagtaccgcatctcgccggaggagagcacgctgctggaccagtacccgcgggaccaccccgtgctcacggatcacat

SEQ ID NO: 303321 - DNA, 239 bp, Zea mays
gatctattctactgagagaaacaggggtacataccttcattgttgtttatcgcagcagccatggcggcggcgtcttgcagcgaagacccgcctcctccttcgcctccctgcgtgttccggcgaggagactggttcccgtcgctggtcggcggtggatcggctcctccagtggcacctgcaggggagggtcggatccggttggggagatcaccggatcagacgccatagatcgcagtctc

SEQ ID NO: 303322 - DNA, 260 bp, Zea mays
ggcaataatcgaggatgatgcaaagcttcgagcactcaaagaagaacatggagaagaaatctatgcaatggtgacaaaggcgctgcttgaaaccaacgagtacaaatcaaaaggcagctaccctgtgggggagctatggaacttcaaagaaaaccggaaggtgactctgaaggaagctgtccagtttgtcctgagacagtggcgaacaaacaggaggaagcgataagctctcggccacccaatgctcttggctttttttc

SEQ ID NO: 303323 - DNA, 263 bp, Zea mays
cccgtgtaaaatgagcgcagtcgccaagcgtgtatctaagaagaggaagttcgtagcagatggcgttttctatgctgaactcaacaagtttctcgtgaacgagctttctgctgatggctatgccggtgttgaagtccgaaccacaccccaaaagactgacattatcatccgtgctactcatactcaacgtgttctcggaaaagagcggtagacgtatcagagagcttacccaggctgtcagcaagcgttacggcttcaaggat

SEQ ID NO: 303324 - DNA, 253 bp, Zea mays
gggctgtattcgagcttcgtgccgccgatggtgtacgcggtgctggggagctcccgtgacctggcggtgggcccggtgtcgatctcgtcgctgatcatggggtccatgctgcggcaggccgtgagccccaccgcggagccgacgctgttcctgcagctggccttcacctccaccctgttcgcggggctggtgcaggcctccctgggcatcctcaggctcggcttcgtcatcgacttcctgtccaaggcgacgc

SEQ ID NO: 303325 - DNA, 253 bp, Zea mays
cgcaggcggagttttctggcctgttttcttagtggcgaatctggctgcactaattgccagtaggacaatgacggttgctatattccagtgcctaaagcagtctatagcacttggttgttttccccggctcaaaattgtagcatacatctcgaaaatttatggctaagatatacattcccgttgtaaactggtttctattggtttcctgcttgggctttatcattctgttcagatacgtatatatgttggcaat

SEQ ID NO: 303326 - DNA, 128 bp, Zea mays
cgctttggttaacaaacaaaacttcatgcattggatgcacttcaatccctgaagtttttttttttaaccaaagctcgtgagacatgaaagcctagaaaatccagggtccagaatgtacccccagataa

SEQ ID NO: 303327 - DNA, 157 bp, Zea mays
tagagcatatcaccttcggcatcatgggcgatctgttcacccttcacgtccgggagaagatggtctcggcgatactgcggtacgagatcggctgattcggtgatgccagcgacactagcgccatgctgtactcgcggctcgagtctgacgcgacgct

SEQ ID NO: 303328 - DNA, 264 bp, Zea mays
ggaggccatcaccctcgcgctcccagtcctcatcggtgagcctggtgtcgataagaagaccgtcgtggacggacacgcgtagcgcatcattcgcgtcaacaaaaacgtgcccaacaacctcctcgacatccgcctcatcgcgctcgacattgatacgcagcggggggaagagatggcctttgctttgccgggggaagtgatcagtgttgcatggagccgaaaggtcccctttggtgcttcagcgacaactgttttggagcagaa

SEQ ID NO: 303329 - DNA, 264 bp, Zea mays
ttccatggtcaggaaagagctgatggaacacaatgatccacaacggtgctcgcgagagcttgtccacgaagcgcttaggcgcgactgctgtgataacctaaccgtagttgttgtgtgcttctcagcggacccaccccctcaaatcgagatcccaagattcctagtacgaagaagcatctcaatggaagggcttcataggctgaggggtgctcttgacagtaatatctgaagcttaaaagtgtcccttcggctgtaacttctgtc

SEQ ID NO: 303330 - DNA, 262 bp, Zea mays
gagcaggagacactcgtgaagctgtctaatcagtataacatcatgctcaaatgtttttaatattgaatataaattatatatatgtatatatgttttttctaaaataaaaaaatataatcgtgtcgggtcaggccagcactacgggccgaggctacggtccaagcatgtcacgacattcttggctcttgcgaacattaggtcgtatttgagaccacattggcacaatggactccatggtgtttgaggttgctgaattggatgg

SEQ ID NO: 303331 - DNA, 260 bp, Zea mays
cagtcaccgatatccgtggggactggctaattgatattactcagatcatagtaatgtggcgcaatatcaattagccacattactatgatctgagcaatttcccgtcatgtgaggccaagcgtgttcttgagaggctgtataacaagcgagagagggaaagagctgcaaatagaggctgaggttgatacttccacaaacctggtgctctgtaattccaccgcagtctatccagagcccgtatacgagctttggttatcaca

SEQ ID NO: 303332 - DNA, 282 bp, Zea mays
ggtggctcaggtgctcctgaccctgccctactcgttctcgcaactggggatgctgagcggcatactgttccagctcctgtacgggctgatgggcagctggacggcgtacctcatcagcgttctctacgtggagtaccgggccaggaaggagagggagaaggcggacttcaggaaccatgtcatccagtggttcgaggtgctggacgacctgctcgggaggcactggaggaacgtcggcctggccttcaactgcacgttcctgctcttcggctcggtcatcca

SEQ ID NO: 303333 - DNA, 279 bp, Zea mays
cggtcatcttcgccgtttaaggaagcaaatcgtgcaccggacagtgtccggtgtgcaccggactgtccggtgcccccgacgacagaaggcaaggatggccttccggatttgccctcaacggctcctagctgccttggggctataacaggagcccctaggcgcataccggagatacacaagcaacctttgagcattcttgatcatccacactaagtctctgcgcattcgtttgtgtttctcagtgattcgagctctgttctaagtgagaactctgagata

SEQ ID NO: 303334 - DNA, 138 bp, Zea mays
agaggaccaagctcagcccagaggagacttctaaggccgaagctgctggaaaagcgttgtacaagagcatgctctcagaccgcgactacacagagtttgagaacttcaccaagtggcttggtgtcacacagtgattgt

SEQ ID NO: 303335 - DNA, 260 bp, Zea mays
ggcaatgtcaaagctatattctgtgatgaagacgatgttgcaacgtatacaatgaagtctgttgatgatcctcgcgcattgaacaagacactatacataagaccaccagaaaacgtcttgactcaaaacgatgttatctcgaagtgggaaaagctttccggaaacgttctggagaaaatccacattcctgcagatgaattcttggcttcaatgaaaggtactgacctggccaatcaagccggagtgggacactattacca

SEQ ID NO: 303336 - DNA, 246 bp, Zea mays
cttcgtctggctgtgacctacctcctctgtttcgagacgccagagctagagcaggtcgaggcggcgctgcgtgagtcagaagtggacatgtcagcgtttcagtatgtgaagaggatcaaatcgctgaacacgcagtttagtgcctcgtcgtcaagcagtgcaacgaggagcaacattgttgattgggcagagaagctgtatgggcagtccattagcgcagtgacagcaggggtgaagaatctcttt

SEQ ID NO: 303337 - DNA, 261 bp, Zea mays
ggaggaatatgttgttcctgttgcatgggtgaccttcatattctttggatgtaggttgacgtcttctcgtttggcattgtgatgtgggagctacttacaggtgaagagccttacgccgagctgcactatggggccattataggtggaatcgtgaataacacgctgcgacctccggtgcccgagtcctgtgatccccagtggaggtcactgatggagcggtgctggtcagccgaaccgtcagagaggccgagcttcaccgag

SEQ ID NO: 303338 - DNA, 266 bp, Zea mays
gaacaagagtattgatcatcctcctccagtgacccagcctgtgatgtcttctcgtggtcattctcaagctggctgaagttccccttctccttgatcagctggatgtggtggtgcttgcagtacagcttcccctcgtgcgcaatgtagttagaagggctgatggtgcaccctccatggcagcacttgaagcagctcttgtggtacatagtgttattaacagtgacctggatgcttaaccggtgagttgcaatcagcatactgatatt

SEQ ID NO: 303339 - DNA, 264 bp, Zea mays
cgcagtttcaaacggagcccgcggctactgcaagctactccgtctccgtagctccaggagaggtaggtttttatttggcgacgacatgagcacgggcgtgcgaccggggcggcggttcacggtggggcgtgacgaggacgccacgcacccggacaccatccgcgccgccatctccgagttcatcgccaccgccatcttcgtcttcgccgccgagggatccgtcctctcgctcggcaagatgtaccacgacatgagcacggcggg

SEQ ID NO: 303340 - DNA, 246 bp, Zea mays
aatgaagtgttttcttactacaagttatgtatccatcatgaacagatagccctacaaaattcttctcgttggtatgaccattcagagtcaggcggcaagaatcggtagataatccactgcaattagtctggttaagatcccatatcttcaatgtgttggctcaggcacaacccccacgcaccgccgccgctcgcctggcctcacctggccggagaagagttataagacaggagaaccccgtccccg

SEQ ID NO: 303341 - DNA, 243 bp, Zea mays
cgggttgagaacccctgaacacattccaatcgaaccaattaatttatttattatttctaccctattagtagatgtagcgtagttctagttatatctttccgcatatcaatcttcaccgcctattcgactctatgtcgtctagatctatcttaggtggcctgccgaccctaattcgaccgtaggatattactcctcccggagggcaagatctaattatctgttccagatactctaccttgattg

SEQ ID NO: 303342 - DNA, 275 bp, Zea mays
gcggcggataggaagacaacctcgctgaagcagttgcagggccacatctggaggactgggttcgagtgccaagaaatcaagggggtggtgttcgacgacgtgccgccggctctcgagaggtggcacgccgcggcattaagacgtacatttattcaagtggcagcagggaagcccagaggctcatcttcgggaacactacctacggcgaccttagaaggcacctgtgcggattttttgacgcaacaattgggaccaagagagacgctcgcagctac

SEQ ID NO: 303343 - DNA, 258 bp, Zea mays
ggaggaactgaaggccataggactatctagccgtgatgattctccacggaatgatgtgatggttccagtagcacactgcaaccgcagcccagttttactcctgatgggtggtgggatggagctggcaagagcactgtacttaaagatatccttaaggaggaaaatgaatgttgttagaatgaagtgagaaggaaaaaaacaacaatcctgaagacagagcacatcttatacaatactatcagtatctggatataggta

SEQ ID NO: 303344 - DNA, 117 bp, Zea mays
tggcgctaaaatatacccttccccagaccccgcacagtgcgggaggcctacggcactgggtacgccctatgtagtcagttggaagccactgctaattggttgtaatgcttaattttc

SEQ ID NO: 303345 - DNA, 280 bp, Zea mays
cacagagtaactgaggagagaccaggctggtgcactgatccacatctaccaccatgtgcagcatttgttgaaattatggcaacggtgttctctagaaatgcatggcgctgtgtatggcatatgattcaggtgaacgcaatatgtaatgcattagtttgtctaaagtgtagtatgcttttttactgcttcatgcagaatgacttggtccatggatggggtcttgactttgctcttaggaaatgtgtggagccggctcatgagaagattggagttgttgatg

SEQ ID NO: 303346 - DNA, 280 bp, Zea mays
aattctagatcgcgggcggccgctcgcgatctagaactagctcaagatcacgcagatgagcgacctgacatccccactgtcatccttatgctacgcaacgacagctcgagccttcctaatccgaggccgcctacgctgatgcttcgaggccgtgagatcgaatccagcaagtcaagcgagaaggaccggagccactccattggcactgtgacaatgacacagttgcatggaagatgaagtataacacgaaaaatatactgaatttgtgatatatttggtt

SEQ ID NO: 303347 - DNA, 276 bp, Zea mays
gtaatagtttagttttaggatgattattataactgttgcacgtcacaggacgaacttaggaaggcaaagaagaaaatgggggagcaaaatatacaaaaggctgtgaagtccgcaatggatgctgcagaagctgctctttcaggaaataaaccgttttgtgttactcatgtggatgtgggtcttgataccacggctgtccgtgaggcggttatcaaagtcatggaccagaagggtttgcctataatgttattcagcaccgatgaggcatcaaacaaa

SEQ ID NO: 303348 - DNA, 270 bp, Zea mays
gcctgcacctgcacccatagttaaaaccattggatacaagatctccagtgttaggtacactgcctattattcaaatatattcaggcaactcccatatatatcaatactggcatcatttagacggtgttcacgggagcactcgttgatggaacgcgggttgccataaagagagcagagcgcggatcaatgcaaggtgtggtggagttcaagcacgagatcgagctgctgtccagggttcatcacaggcacctggtgagcctgattggcttc

SEQ ID NO: 303349 - DNA, 269 bp, Zea mays
agccgttctatctccagtagagaagtcattcggacatgtgggccacatctccaccgccgctcccactccagctccggcgaccgccgcatcctcgcttcatcgcccgccgccgtaacaagcggctggcggacgtctgcctcttcacgacgctcatccgattcgatctcgtctacaacacgctgttcaggtgcaccaggcggaagctggccgagtaccctagcctccatgcctacacgcgcgacatctaccagatgcccaaggtcgccgag

SEQ ID NO: 303350 - DNA, 268 bp, Zea mays
ctgcaccagagctgccgcgagtgcatcatccactgcgacatcaaaccggagaacatcctcctcgacgcgtccttcgcgcccaagatcgcggacttcgggatggcggcgttcgtcggccgagacttcagccgggtcctgaccacgttccgagggacagcagggtacctcgccccggagtggctgagcggggtccccatcacgcccaaggtggacgtctacagcttcggcatggtggtcctggagatcgtgtccgggcagaggaacacgc

SEQ ID NO: 303351 - DNA, 268 bp, Zea mays
ccggcaaggaagttctccctgctttagctcaggttgctgaacgacaaggcaagtacctggcaagcctgctcaaccatgtcatgaaagctggaggagggcatgcaaactctgagactgaagcagatctgggtcgtccaccctttgtgtacaagcatctaggcagcatggcaactgtagtagagatacaaagctctagtcgatctgaggcaaagcaaggagtcaagagggatatctcttgcaggatttgtgagctggttcatctggcgct

SEQ ID NO: 303352 - DNA, 265 bp, Zea mays
gctagagcttgtaaccgagcgggggcattaaggtggctagaatgctttgcgatggtttctgggcctgggctcgatgtgacactggccggcttgcccatcccaagttggtagtgtctggtgggggctctagcgaaagcttgggtctctgcagacctggagcggcaggaatggcgtaaggctggcttcacagagcagcgatcactgcccactttcaacggtgggaggataacaagccgctgcactttgagcccaactcagcccagaa

SEQ ID NO: 303353 - DNA, 260 bp, Zea mays
cacacacacatcgcttctccacacgacctcgcagtcacggaagacccgcgcacacacgccacttgtgcaccatggcgccccaggtggcgtacaagtcgccattgccgctggccaccggcctgaagcttggcgttggcggaggagtcggaggcatgggcttgggtccacactaccgaggcgtgaggaagcggccgtggggacgctacgccgcggagatccgcgacccagccaagaagagtcgcgtgtggctgggacgtacg

SEQ ID NO: 303354 - DNA, 282 bp, Zea mays
gcagtcatgtcttgtggtgccacatgagctgcattttcatacggttcatcacctgcttcgagagcatattgatcgtgaagttgattacaaggttattgttttctgcacgacagccatggtgactgagtttatgtatatcatgcttcgagatttgaagttaaatgtcagggaaattcactcgaggaaacctcagctctatagaactcgcatatctgaagagttccggggctctaaccgcatagtcctcgtaacgtcagatgtttctactcggggggtgaacta

SEQ ID NO: 303355 - DNA, 265 bp, Zea mays
aagattttcgccctttggcatattttttcggcattgaatgtcagcacaccacgcatgggctcatcctgtctcagaacaaatatattcatgatcttctcactcggaccaacatgctgacatccaagccggttgctacgccaatgctaccagctgataaattgcaaatccagggtggcgcaccactctctgctgaagacgcaaccagatatcggagtgccattgaggccctgcagtatcttcttctcactcggccagatattgcttt

SEQ ID NO: 303356 - DNA, 264 bp, Zea mays
gcagtagctgcccataagcatcataggagcatctatgaagagggtgatgcaatcaaacggcggaagcgatatgctcgtcctttggttgatcttcagatgaaattatactattatgaggggatggagccttggagcccaaagaaaaagatgcctagtgatgtgccggagggagcagtgctgatccgggaacatacgacgatgaccgatctcttcagctgcctctggttcaacgaggtcaatcttttcacgccgcgtgatcagatc

SEQ ID NO: 303357 - DNA, 257 bp, Zea mays
tccgtgctcatgaccttcatggtccgccacctcgccggcgatcccgcgaccctcgccgccatggttcaagagcacgacgagattgccaagaacaaggcccacggcgaggcgctgacctgggaggacctgcaccgcatgaggttccatggcgcgtggccctggagacgctgcgaatgatccctcccatcttcggcagcttccggcgggcgctggaggacatcgagttcgacggctactgcatccccaaggggtggcag

SEQ ID NO: 303358 - DNA, 253 bp, Zea mays
cgtgataccaaccttattcttcgggaattcgagaaatgtggagtaatattgagacatcactctggtccaagagatggaaattggatccacatattgtaccaggtaattatacatttatctactgttgtgcttccgtattctgttgtactatttactttaattttctctaactatgtttcacaaagtagtcatattagcttaggctgctctgtagctaaccagcgagattagttgccagtgaactgaaacaact

SEQ ID NO: 303359 - DNA, 255 bp, Zea mays
cgcggacacagccccgatccgaatcgtcgtccttgcgagcctcgacgatcccgcactcacctcgccgcgcttcaagatgcagatctttgtgaacaccctcaccggcaagactatcaccctcgaggtggagtcttctgacacattgacaatgtcaaggctaagatccacgacaaggagggcatccctcctgaccagcagcggctcatcttcgccggcaagcagcttgaggacggacgcacactcgctgactacaac

SEQ ID NO: 303360 - DNA, 228 bp, Zea mays
gaccgattgacgcaggccaaaccttacctgagcgacggcgtggtgcaagggctcgtggacccgcggctcggcgacggctacgacggcgggcagctgaggcggctcatgttcgtcgcgtccctctgcgtcagggccgccgccgtgtggcgcccgaccatgacacaggtggtggagctactggagtccggcgagatttctcaagcgcagtggcagatgcccgagaaggag

SEQ ID NO: 303361 - DNA, 229 bp, Zea mays
ggagagtaacaagcagaactcgcaggggaaaattgttgctcgaatgcctttctgtatagtgttaggagatgttgctccaagcatatgacctctagctcgagaactgcaatctcctttattagctcctcagtcggctttggaatgcagttctcacttgatgcatggctagcacaaggcttgtgacctagagctttctcaagagcacggcgcatgacgaattgatcattca

SEQ ID NO: 303362 - DNA, 220 bp, Zea mays
cgcccggtacacgcgcaacgagacgtacgcccagtgggccgaaaagacgttccagtggctctgggacgtgcagtacattgaccacgaggactggcgagtctacgacggcgcccacatccagagcaactgcaccgatatccacaaggcccagttcagctacaacgccggcctgctgcttcacggcgccgccttcatgtacaattacaccgagtcggacgtg

SEQ ID NO: 303363 - DNA, 278 bp, Zea mays
ccggtgtccattgctgatctgggcggcacggagatcgacctgcgcttcgcaaaccccaaggaaggccggctgttcgtcatcgtggccccagttcgccggttcgcagatgacctggacgacgcgaccatcgagaagatcggcagcccggagaaggtgatcaccgccttcggtccggaggtcatcggagagaacgtggaagggaaggtcctgtcctcggagacggcggcgcattcgggaagaacttactaccagttcgagctggagccgccccatgtgtt

SEQ ID NO: 303364 - DNA, 273 bp, Zea mays
tgtcaatacagattgtttttacatgcatggtgtatccagcattgatccttgcatacatgggacaagctgcttatctgtgtaagcatcatatcatggaaagtgactacaggatcagattctatgtgtctatgccagcagttgtgggaagccaagccgtcatcactggtacattctcaatgatcaagcagtgcgcttctctgggctgctttcctcgggtgaagataatccatacatctgccaaagcacacgggcaaatatacatccctgagatca

SEQ ID NO: 303365 - DNA, 282 bp, Zea mays
gaggccaaccgagagcaggataataaaacaccgatcctgaataaaacgaaatcgtataccaagaaatttacatcctcttcggtaaatatgaattcaccagatggtgcccagagttctggattattactacaagatgagaaggacgatgaggtcgagtgccaactggaacattactataaagatttcagtgatttagatccaaagaggcactatgctattcgtatattcaatactgatgacacttttacgactctctcatgtactccagcgactaccgtcgaa

SEQ ID NO: 303366 - DNA, 272 bp, Zea mays
tgaagaacctggaatcaggacgaacactacaattcttcttggcaatattgcaagctacatgaatgatgggactaggaagagagtactgatcaatgcattcacagttcgtgcactacgtgataccttccctccggccagagcagctggaatcatggcactgagtgtcactggttcatactacgaaatgacagagattgcaactcgcatcctgcctaacattgttgtcctcacatttgacccagataggtttttatggcgctagaccaggcgta

SEQ ID NO: 303367 - DNA, 283 bp, Zea mays
attggttgagcttttagtggaacaaggagcggcggttaatatgcaaaatttcgttggagagacggcactctttattgcttcttctttgggattaaatttgatttgcctcttcttgcttgagaatggaggtgacacaagaatatctaccttagaaggatcatcacctcttcacgctgcatcagcatgtggtcatctttctgtcattaaatcccttgtttcacatggtgcctttgtgaattctacggacgaagaaggagatacgcctcttcattatgctgttaga

SEQ ID NO: 303368 - DNA, 270 bp, Zea mays
gccgaactgtggagcaatttggtacccaaggatttatgaagttcttcccaaaacttggatacgaactgaggtccacgatccgacactatggtctttggaataccatgcaaactgagaatacggctgatatataatgctgcataagtggctactgtatatttggcccttacgggtaagaagttggcaatctttgtgagtcgatcaacgataacccaaatagaatcataccctttgaccgtcctgggcagtcccacaataaagtccatactg

SEQ ID NO: 303369 - DNA, 271 bp, Zea mays
gagacagcctcggcgtcgcagcgaccggcgagatacccacggcctccctcagcctggcggcgacctccctcatgctcggccttcgcctcgggtcgctctgcatgcaggcccggatcacctcgccgatgaccgctagctcgtcttccctgtggtctccacccagcgttggatcaagcaacgaggctacgctccggtcgtcgttggttacgcgctccaccagagcctaggaagaagaagaaacataacgtcaccatttggtgttcttcttctg

SEQ ID NO: 303370 - DNA, 268 bp, Zea mays
gcatcatcgagtgccaaaaagtaaaaacgaagaagctccaaagacgttcctaagggaatgcatagcttataccgcctaagtaaaaggcgaagaagctccaaagacgttcctaagggaatgtagagcttataccgcctaagtaaaaggcgaagaagctccaaagacgttcctaagggaatgcagagcttataccgcctaagtaaaaggcgaagaagctccaaagacgttcctaagggaatgcagagcttacagcgaaaagtcaacgccg

SEQ ID NO: 303371 - DNA, 256 bp, Zea mays
gtccaagatcgccgacgcgtccgggatggagtggttctccatcatcaccaccccgaacccggtgttcagccacctggcggggaagacgtcggtgtggaaggccatctcgccggatgtgctgcaggcgtccttcaacaccactccggagatggagaagctgttccgctccaagaggctcgactcggagatctttttcgcgcctcccagctccaactgaagcaccagctctccaagacgggggagaggagatcgttct

SEQ ID NO: 303372 - DNA, 247 bp, Zea mays
  unsure (1)..(247): unsure at all n locations
tggctcgagctcgagccgtcgctgactaattaggaaagctagtgaaggactaccttacacaaaaggggcaagggtagtagaggagttgtcgatatagggaggttctcgggtcgatcatgctgcgatggcttgtcggacggggaattcctatattgcgctccctagaaactgtagaattaatnctgaacgtagtggaaatttttaaaggcctcgtagtgcatccctagtcattcacctcagaagtgtc

SEQ ID NO: 303373 - DNA, 270 bp, Zea mays
tcggatccagttcgatgcacgcttactacttagactacaaggatgataagctaacatatgtcacaaactttatggaccatcttgtctcttggcatactgtcactctacgcatgatgcgtgcagagtcttttgtgaaccttggtgagccaaatatcccagaggcttgagctacagatacaccctagttatcatcgtgaggcattcttcggatacatcggatcaaatcctgctggaggaaccagagagttggaaaactcatgtctcacaaga

SEQ ID NO: 303374 - DNA, 248 bp, Zea mays
cttagtgaaccacctgcatgcgtgctcacatagcctgtggtggcgcgcgatgctcagcctgtgtagcagggatagtgtcaagggcaccatcttcttcacccaagagggagatggccctaccactgtcaccggaagtgtctctggcctcaagcctggcctccatgggttccatgtgcatgcacttggtgacaccaccaatggctgcatgtcaactggtacacactacaatcctgcgagtcaaggacatg

SEQ ID NO: 303375 - DNA, 268 bp, Zea mays
acggcgtgcagattgccatgtctggatgttatgcaggacctatgtttaatacacttgctggtttgggtatatcaatgctgcttggagcttggtcaacggcacccaattcggatgttcttccgcaagaccactctcttatttacacaatgagctttcttgttgctggattgatctgggctcttgttatgctgcctagaggtgacatgcggcctaacaagatacttggagttggcctcatttctctttactcagtttttctttttattag

SEQ ID NO: 303376 - DNA, 276 bp, Zea mays
ccagattcgcttaaggctgaaaggcggatggaagctctcatatagtcggtgaagacaaagaacgttgcacaataaggtatcagaccagggctgtgaacagcgatgccattcgaaatggcacccatagcatgctctcgcacaccgaagcgaatgtttctctcttcaggagtatccctctggatttctccaaacttcttaagcagtgtcatgtttgacgttgcgagatccgaactacctccaagaaatccaggtattactttggcaagtgcattcaag

SEQ ID NO: 303377 - DNA, 279 bp, Zea mays
gcgccttcctcagcgactcctactggggccgatacgttacgtgcgccgtcttccagatcatctacgtgacgggcctggtggtcctgtcgctcgcgtcatggctcttgctggtgaagccgtccggctgcggcggcgtcaaggcgcactgcgacgggccgtcggcgcccggcgtcgcgctgttctaacggtccacctacatgatcgcgttcggcaacggagggtaccagccttccatcgcgacgttcgggtcggaccagttcgacgagacggacgccgagg

SEQ ID NO: 303378 - DNA, 270 bp, Zea mays
ggcggactaagttcaggatggccatgaataaagctgataatgcttctagtacggtggcagttgactctcttctcaattatgagactgtgaaatacttcaacaatgaacaatttgaagttgagaagtacgacaaatatttaaggaattatgaggatgctgcattgaagatccaaagtagtcttgcctacctgaactttggccaaaatgttatctttagctcggctttatctacagcaatggttttgagctcatatggaataatgagtggtg

SEQ ID NO: 303379 - DNA, 272 bp, Zea mays
gattatatagaatcagttcgtcgattgcctaaggccaggattcaagatttatttcagagaaaaaatatgtatgcagtcacggtgggtgttggcctgatgatttttcagcaactgggaggaattaatgccttaggtttctatacaagctatattttttcctctgcaggtatccaagctagataaattttgtcctcttaaaaaacgaggtatctacagctctttctaaaaacttcaggattttctggaaaacgtggaccaccttgattggcgtt

SEQ ID NO: 303380 - DNA, 262 bp, Zea mays
gtttcatatgcccgcattcattgagattaatattggattaagtcatgcttctatctaggatggggttgttcttggggcagacacaagggcaactgagggccccatagttgctgataagaactgtgagaaaatccactttatggcaccgaatatatactgctgtggagcaggaactgctgcggacacggaggccgttacagatatggtgagctcccagctacagcttcaccgttatgcaacgggcgcgaatcaagagttgtaa

SEQ ID NO: 303381 - DNA, 268 bp, Zea mays
caaaggctgccatgcacgggttgcctgttattgcaacaaaaaatggggctcctgttgaaattgatcaggttcatgaatcacattgtaccatttgatgagttaatagagtattgacttacatatgtaatagattggatcctttctggtggatgttgatacaggttctggaaaatggtctccttgttgatccccattatcagcatgcaattgcagatgccctctataagatgctttctgaaaagcagttttggtcaagatgtcgagaaaa

SEQ ID NO: 303382 - DNA, 265 bp, Zea mays
caaccccaacaatgatgtatcgccattgctatgataatgttagtccaatgatgtctcaggtgagcataatcatataaggtcccgtttgtttccttttatttcgagaaattgagatcttactaatggaataagctatttttttagaatgtgatattccaccacttttcaaagttatcatataaggctatctcaaattcatggggcgagagatgaaaattgattatacagatttacatgctatttttccgatgtacaatttataaca

SEQ ID NO: 303383 - DNA, 259 bp, Zea mays
gcggacatggctcatgctctgcacccgaactatgccgaaaagcatgaagagtgccacagaccagaactacagaagggacttgtcatcaagcacaatgctaaccaacgttatgcctccagtgctgttacagctttcctcttcaaagaaatagcaaggattcataatcttcccattcaggaatttgttgtgaggaatgatatgggatgtggctccactattggacccatacttgcttctggtgttggcatacggatgtaga

SEQ ID NO: 303384 - DNA, 253 bp, Zea mays
cattcccaacccgcaaatccatccacgatcatcacaactttggggtttcccatcttacaacaacactttcccatcaaccactactcctcttcatcaagatgactggacgcggaaagggcggcaagggcctcggcaagggcggtgccaagcgtcatcgcaagattcttcgcgacaacatccagggtatcaccaagcccgctatccgccgtctggcgcgtcgtggcggtgtcaaacgtatctctgctatgatcta

SEQ ID NO: 303385 - DNA, 287 bp, Zea mays
ccaccaccaccaccaccgcacacccgccggcgccaatgacagcaagaagcccaccccgcccgccgccctgcgcgacctcttccgcttcgccgacggcctcgactgcgcgctcatgctcatcggcaccctcggcgcgctcgtccacggctgctcgctccccgtcttcctccgcttcttcgccgccgcctgtgcagttcagttcagttcagttgtcctgtgggtcggaccgttcaccgcttcatccacgggatcaggcacagtgatcagtgccgtgctagctgtgtgga

SEQ ID NO: 303386 - DNA, 272 bp, Zea mays
gacgaggacaaggccacgctcggcgacgtcctggcggtacgagtcacgaacacgacgtgccatcgttttcgtttcgtgccgctgctgctatatatctgacagtgcgtgttggtggtgcaacagagcagagatcttttgactatttgttctttgtcgtacgtgcagaacgcgacggcgaggttggtggcggacaagccggtggagagcgccgatgcgttgggggtggctggcgccacaaccgcaacaggaacgacgggacggcgaggcccgga

SEQ ID NO: 303387 - DNA, 264 bp, Zea mays
gttctagatcgcgagcggcgcccttttttttttttttaaaagtactactacatcatacccatcatagcatgttcgaatacaacaaccaaacctaagctccagcttgaaagaaagccaggtctcagagacggtacaatatgcagcagggtccaagatcaccttactcgtcatggacctcctcctcgtcctcgaactcctcctcatcggcagtggcatcctggtactgctggtactcagacaccagatcgttcatgtggctctcag

SEQ ID NO: 303388 - DNA, 255 bp, Zea mays
gttctagatctctggcatgggcccgagtgattggcccttgatgtggaggtgctgctggtgtagtcatactcatagtgatgtcctcatcactagcaccgcttaatttttcactgaaataagcaaccggtttccttcttgtaacaaaaaaaaaaaaaataaaaaagtaaaaaaaaaaaaaagggggggcccccgattatccaattcgtcacccgggactttatttcgggccgggaacctgaaggggtaccatttttc

SEQ ID NO: 303389 - DNA, 256 bp, Zea mays
tgggaacaaggtatcatttgctagctttttcatttctgccaggggtttaatatatactctctccgcttctttttagttgtcgctggatagttcaattttgcactatcaagcgataactaaaacgaaacggagggagtagcgtctacaccaaacttcgcatgtgcactgtaacttttttcccctactatcatggatccatatcaatcagtatgtctctgcatcagacaagcttctgcttcgtttgcacccacttaac

SEQ ID NO: 303390 - DNA, 260 bp, Zea mays
agcaagcagaccagacgacagacgtccagagcagcagaccatgtgataactttaactgcgtctgcgtgcgtgcagggcatttggagcggcatggtcatcgggggaaccatgatgcagacgctcatcctgctctgggtcaccttcagaacagactggaccaaggaggtggagaacgccagggcgaggctggacaagtgggacgacaagaagcagcccctcctagcctagaagaagactgattgaaggtcactgtagcgcgc

SEQ ID NO: 303391 - DNA, 252 bp, Zea mays
acgtcattgagatctcgcagttgagggcgagccccagcttcacggcgcactcgaccaccttctcattcagaaccggcagcgtccccgggtggcccatgcaggtggggcagatagtgctgttgggctgggaaccatagctgtaagggcaggagcagaacgccttcgtgacggtcgagagctggacatgggtctcaatcccgatgatggcttcgaagccttgtgttttctgctcagccgcctccttggtcgcca

SEQ ID NO: 303392 - DNA, 267 bp, Zea mays
  unsure (1)..(267): unsure at all n locations
aactcggctcgagcagcagcactgccctttggcactatctgtatcattgtgctcatctggaccttggtcacatttacataacatgtataagaaggtattacaggcaaaaacagcaaaagtttattccaagcatcttgcagtaccacaaaataccccagggagattcctccacttccgtggtaccggagaactattccacagatggctatggccgggtttttgccattcagtagtatatacatcnatctgtactacatctttgctagt

SEQ ID NO: 303393 - DNA, 252 bp, Zea mays
ggaaaatacgtagttcacgcccgcgtcatgagcaacatcttgttagatgggccagttggcagcttcatgacattgaatccctatccaagatggtggacccacctatacgtggacaatgttctgagaaagcattgtcacattttgctgacataatcagccgctgtatccagcggcagccagagttcaggccaccaatgtctgatattgtacaagacctaactagacttgtaaatgctactggtgaggaatcag

SEQ ID NO: 303394 - DNA, 260 bp, Zea mays
gtttcagcaataaaaggtggctacagaacatgctctgtcgatctctcatcatatttaccataccattgactaggaaatacttgattttctcagttacccattcccaagacccgaaaaccagtcccccacaagcaccacattctgattctgcccgagatgatgtaaagcgaagaggagtggttgcaggcattgcagcactttccatagctgctgcggtgatatcttcatctgttgtctacctttggtggaaatgggtttca

SEQ ID NO: 303395 - DNA, 271 bp, Zea mays
  unsure (1)..(271): unsure at all n locations
gtgaaccttatgatttggcactgcaccatcccggcaagcaagggacagattgggaaggtggatacttccctctcacccttcatttcagtgaggattaccctagcaagcctcccaagtgcaagttccctcagggttttttccacccaaatggttggagaccagctattactgttaagcagattctcgtcgggatcgtgngattgtagatcagccaaatcctgctgatcctgctgaaacggatggctatcacctttttatccaggatcctaca

SEQ ID NO: 303396 - DNA, 261 bp, Zea mays
cttgccgccgtcgagtcgtcgatgacgatgacccggcggaacggctgtacgatctacgtgggcaacctccccggcgacatccgcgagagggaagtggatgatctcttctacaagggaaggcaatgtggattgcgaatgtatggacgtatagtggaaattgacttgaaaattccaccaaggcctcctggttttgctttgttgagtttgaggacgcacgtgatgctgaagatgcaatatatggccgtgatggatacaactttg

SEQ ID NO: 303397 - DNA, 271 bp, Zea mays
cagatggtcgccacggcgacgcgtctactggtccgccgtcgtcgtggctgcacgagttgatggtactgtacaagagggcgtggaaggtggtgtacaggagcaagcagctgcttctcaccaacttcctagaggccgtgctcgtgggcacgctgctgggcacgatctacatccacgctggctacggcgaggccggggcgcacaagcggctgggtctgttcgccttcacgctgaccttcctgctgacttcgacgaccgagacgctgccgacgtt

SEQ ID NO: 303398 - DNA, 279 bp, Zea mays
  unsure (1)..(279): unsure at all n locations
gcttgccgcctagtcctccatcttctctaccttcctcaagacctccgcttcnctgtcggctattgccttggcctcctcgtcggtgaacggcggtggcagtgtgcataggtcgaagcctgcaacgtgactctccatggaatccatcatgcagtcccggtgcaggctctgggcagggcaggccacggactccgtgcatatctccacggccttctccggcacggcgggcttgtaccggagcagtccggcgtactcggtgagcaggtgcatcatgtagtcgta

SEQ ID NO: 303399 - DNA, 267 bp, Zea mays
gagactacccggcgacgatgcgggctcgggttggagagaggctgcccaagttcaccgcagacgaggctgcccttgtcaagggggccctggacttcatgggcataaaccactacaccactttctacacgaggcataacgccaccaacatcatcggacggctgctgaacgacactttggcggacaccggaaccatcagcctgcgtgagtcctcgtcgtgtgtgtttgcaagttcatttcaactgaaaaaacgaaaccttgaaggctgct

SEQ ID NO: 303400 - DNA, 142 bp, Zea mays
agatagtggagtacagtagcaacaatagagcaacaatggcgggcaagatattttccatccggatgctccttgctcattctgcatgtgctgctagcgcgagcattggtcctcagtactcacaagctccgatagctgcccgtct

SEQ ID NO: 303401 - DNA, 299 bp, Zea mays
cactatgttgctgactatatatgtgctgtgtttatattttgcatatttattatgtatttgcgtctgagcttatggtatcatagagagtgttggagagggtgtgactgacgtagctccgggcgaccatgtccttcctgtgttcactggggactgcaaggagtgtgcccactgcaagtcggcagagagcaacatgtgtgatctgctcaggatcaacaccgaccgcggtgtgcatgagtgccgatggcaagtcgcggttttcaatcaatgggaagcctatctaccactttgttgggacttcc

SEQ ID NO: 303402 - DNA, 285 bp, Zea mays
ggtacgtaggtgcattgcccaccgcgagcgggctagatgaaagtagttgtggcaaaccctgctgcctacttacaacagttgcttccattcaaccaactggctgtgtcaaactctgctgcgtacctacaacagcgacaacagttacttaatccattggcagtggctaacccattggtcgctaccttcctgcagcagcaacaacaattgctgccatacaaccagttctctttgatgaaccctgccttgcagcaacccatcgttggaggtgccatcttttagattaca

SEQ ID NO: 303403 - DNA, 271 bp, Zea mays
cgacaactagcaacatagtcagcacaatactgtagcatcaatggcagccataatattttgcttccttatgctccttggtctttctgcaagtattgctaccgcaaccattttctcacaatgctcataagctcctatagcttcccttcttcccccatacctctcaccagcggtgtcttcaatgtgtgagaacccattcgttcaaccctacaggatccaacaggtaatcgcaacaggcatcttaccattatcacccttgtacctcaaacaaccg

SEQ ID NO: 303404 - DNA, 280 bp, Zea mays
gatccatccagcaaagaggacaaccctaaatggtcaatggtggatgtacagtttgttcggatgatgaagcgcttcatctccctggatgagctgaaaacctatcaccaagcccacaaagcaactggtggtcccttaaaaagcatgactctcttcacccgccagagactttcagttcagcctctgactcaagaagaatttgattatattttgagcctggaggaagcagaaccaagttaatcagaaggctctactaatggatggagtgacgcaccgagatttt

SEQ ID NO: 303405 - DNA, 274 bp, Zea mays
agtccagtaagcaacatagcaagtggaatccagtatcaacaacagatcaatgatggcgaccaagatattatccctccttatgatccttgctctttctgcatgtgttgctaacgctacaactttcccattatgctcactagctcctatagcttcccttcttcccccatagcttccatcaatgatagcttcagtatgtgtagacccagctcttcagcgctataggctccaacaagcaatcgcagcaatcaacatacctgtatcaccctgttgtttc

SEQ ID NO: 303406 - DNA, 275 bp, Zea mays
ggagcacggaggcgaaggaggaggagcagcagcagcaggcggcgccgaggagcggcatcccactcagtgcttgcaaccatggctaggggattgaagaagcacttgaagaggctcaatgcgcccaagcattggatgctcgacaagcttggcggagcttttgctcccaagccatcttctggacctcacaagtccagggagtgccttcctctgatcctcatcatcaggaacaggctcaagtatgctctgaactaccgtgaggtcatttctatcctgat

SEQ ID NO: 303407 - DNA, 273 bp, Zea mays
tcttgcctgtgctgcttccaatattgctgtggataatattgttgagcgacttgcacgatacagaacaaaattggtgaggttagggcaccctgctcgtttactgcctcaagtgctcgacagcgctcttgatgcacaggttttacgagctgataatagtagcttggcaggagacattcgcaaggaaatgaaggtgctcaatagcaaattgctgaaggctaaagataggaacactaaacgggacatcaggaaagagctcaaaacgcttgcaaaaga

SEQ ID NO: 303408 - DNA, 272 bp, Zea mays
agcacggaggcgaaggaggaggagcagcagcagcaggcagcgccgaggagcggcatcccactcagtgcttgcaaccatggctaggggattgaagaagcacttgaagaggctcaatgcgcccaagcattggatgctcgacaagcttggcggagcttttgctcccaagccatcttctggacctcacaagtccagggagtgccttcctctgatcctcatcatcaggaacaggctcaagtatgctctgaacgaccgtggagtcatttctatcctga

SEQ ID NO: 303409 - DNA, 271 bp, Zea mays
ctcgttattttgctcgatctgatatctccacatttttttggtatctccgggttctgatttgggaagttagctatggcgccgagttcacccccgatgcggagtgtgggtacaccgtcattttacagatgacaaggtaggtgcctgctaacgaggtaccgatcatgaagggtagcttcatggcaggctagctcggcaaacttgttctaactgttaacaaccctgcatccaagatgaagacgctcctttacagatcgaaggggaagagcaccag

SEQ ID NO: 303410 - DNA, 296 bp, Zea mays
cgggcttgtaacccaggtgggggcattaaggtggtgcggatgtttggtaccgagtcttggtctgggcacatgctgttccttggttggcctgcccgttccaagttggtagtggccgttggaggcttgggcgaaggccctgggcttccttggacctagagtggcaggaacggcgtgaggctgtcttcacagagcagcgatcactgctcgctattaacggtgggaggataacaggccactgcagcatgggctcgcttaaggcccagactcatactaaatagaccaccattttttaaaaa

SEQ ID NO: 303411 - DNA, 283 bp, Zea mays
ttcattttcatccgcgtggggctccatatcttctaacagcagaggttaataatatagaatctgcagactcaccgctgactctggcaagatcctctggatatctaaattacccatcggccctgctggtgacaaacactaattctagattctgtacacttcctgagtccaatgtggtgtcaccttgcttactgtggcctgcatacctcagagatggtggaattttacatgtgctcggcaatgacagtagttcaaccattgtgcagcagagatcatcattagttca

SEQ ID NO: 303412 - DNA, 297 bp, Zea mays
tgattgttgagccgttcacagctcattatgtgtttgcactgggtgttgcaaggtttcttagctgtgcacattgggtccttcaggttcttttttttttgtctcccttcctgttttatttaccattaaaagaactaccatgctagttcatactttctggaacaaagtgtcaattggtcatatattatattgccctaatgttagtagagtattaaaaaatgtcttccccgttagttagactatggaccaaatcattgcaaaggtcttgactcccaagatatcttagtctgaaaagacagg

SEQ ID NO: 303413 - DNA, 343 bp, Zea mays
gccaaccgcatccagtccacccccatccccctcgaccccgacaaacccgacacgatggcgcccaaggccgagaagaagccagcggagaagaagccggcggccgaggagaaggcggagaagacgaccgcaggtaagaagcccaagtccgagaagcgcctgccggcatcgaagtcctccggcaaggagggcggcgaaaagaaggggaagaagaaggccaagaagagcgtggagacctacagaatctacatcttcagagtcctgacagcggtgcaccccgacatcggactcctccaaggccatgtccatcatgaactcttcatcaacgacatatcgagagctcgcg

SEQ ID NO: 303414 - DNA, 321 bp, Zea mays
  unsure (1)..(321): unsure at all n locations
gttcnagatcgcgagcggccgctcggatctagaacgccaatcatcctgcacccaaactctcaccccgcagcatcctcacgccaccagacctcgtcgcgtcgcgtcgtcaccggcgtgaagatggtcgggccaggcctctacaccgagatcggcaagaagaccagggatctactgtacaaggactaccagactgaccacaagttgcacctcactgactacacctccaatggcgtcgctgtaactgcttctagcacaaagaaagctgacctgatccttggcgagatccatcacagataaagaacaggacatgacatagatgtg

SEQ ID NO: 303415 - DNA, 304 bp, Zea mays
tcggattcggactcgatgtggcgatccatctctcagcatgtcgtcagagaaggatgcggcgctcgacgcgtagctcgatgacagcccaaccgtatgtgacaagatcatcaaaaatgagataccgtctactgtagtatatgaggacgagacaggtactgtctttcagggtcatacaccctcaagctgcaatacacattctcatcatccccaaagtgcaggatggactaactggtctggcagaagctgaagagaggccatagaaatattagctatctcctctatgttgccaagttgtgcgacagga

SEQ ID NO: 303416 - DNA, 318 bp, Zea mays
gtcaaaagaaacggtgaaaatctcagctatgagcacatctgtgtctctggacgcgaagcactatgtagcgttccaatgtagttctatacacatctgagagcaatcaggcaactgtctgcatcagatgcagacacctagtgaaagttgttaaacctgcccaattcgaggcgattaatgatgacgaggtgcccatttaccagaagcctttcatggaaggggaagctgtacatccatttgccggtggaatacctgactcgttagcaccagaacagtgcaagctctcgagacagtcttccaccaggacttcatccagctgac

SEQ ID NO: 303417 - DNA, 298 bp, Zea mays
gtagacaggtcaagatctctgaggtgtgtcatcattataaacattttggcaagagtcctggtatgggcctgctcttcgtgctgttgcttcaatgagcaaggctgagttgggcagcaaaactgtaagcattggaatgatgcattcgtttgtacactgcagcattactacgtagggacaaaactactctaggcagatgttaggatctcatcaagattgctggtgaaactgtgctggtgggaagagctatcaagagagagaggcacagtgacacgcacaacagcaatatcttcagctggtc

SEQ ID NO: 303418 - DNA, 288 bp, Zea mays
  unsure (1)..(288): unsure at all n locations
cgaatactaccgagctatagatggcgcgatcttacgatacatctgtggagaatcgacgtgcaattggattagcaataactacttagctgtggtgacagagaaatttggtgctgcattggtttctcctgagcatcgatactatggcaagagttctccttttaacaagttgacaatanggaatctacagttcttatcatcaaagcaggctttatttgatcttactattgtccgccaatattatcaggaaactgaaataccagtataccgctctggggcaacagttctggt

SEQ ID NO: 303419 - DNA, 172 bp, Zea mays
cttgtttgggtaagaagggattgaagtggattaaagtgtattctagggattgacagggacattagttcatattacacttcaatacaccttataccacctcaatccactccaatccaggattacccaaacatgccctgagcgggtttcggatctgcagagccgaatcagtact

SEQ ID NO: 303420 - DNA, 344 bp, Zea mays
caggacaccatcacagccctggaaatgggcgcggtagagatcctgatcgtgtgggaaaaccttgatgtcaggcgttatgagctcaagaacagtgccacaggagagacagtcgtgaagtacctgaacccagctcaggaggctgaccagagcaacttcactgacgaggcgacatccggagatctggaggtcattgacaacacgcagctgctggagtggttcgcggagaactaccaccagttcggctgcacgctggagttcgtcacgaacaagtcacaggaagggtctcagtactgccggggattacggcggattggtaggatcttcgctaccagcgacgtcagtgc

SEQ ID NO: 303421 - DNA, 181 bp, Zea mays
cagggacatcgtgtaggaggagatcaagctcattagcatgactggtcgtcatcgaggggacttccatcgggcttagcacctgccgttctcacccatggctcacccatgcctgtagctgggatgcaatgtaggctgagggaaagacgtcaggttcctgtaatcacagtcactgtatgtttac

SEQ ID NO: 303422 - DNA, 333 bp, Zea mays
ctggagcacggcgagcttcaccttcttgtgcttgtgcttgatcttcttgggcttggtgtacgtcttcttcttgcgcttcttggcgcctcccctgaggcggagcaccaggtgcagcgtcgactccttctggatgttgtagtcggcgagggtgcggccatcctcgagctgcttgccggcgaagatgaggcgctgctggtccggcgggatgccctccttgtcctggatcttggccttcacgttgtcgatggtgtccgaggactccacctccagcgtgatggtcttcctcgtcaaggtcttcacgaagatctgcatcttggcaaccgcgcacttctc

SEQ ID NO: 303423 - DNA, 329 bp, Zea mays
tgctactattgtgtgttttgctagttaagtcccaatgtgtcaacgacaatgaggagggtttcttcagtgcccgtggtcatcgacccctttacaatatgatcagaagagtctctcagcctgatgcctgccccaccgcccatcagtggaggtggctatcgggctcgtccagccaaagcagctgccactcaaaagaaagtaggaaagaagagcccctgatgctggaggctgtcttcacgctgtcccagacctttgtgtgttgtgtcctacaggatgtcagttgcaagaggctttgctacaacaggaaaggccaatcagatatagtgttgatg

SEQ ID NO: 303424 - DNA, 324 bp, Zea mays
ggcttctcctccccctccggttcgggttcgggttcgtgaggttctccgaggtcctcgagtccaagatcatcctcgatcgggagacgcggtcgccggagccgctggatttcttcatctggactgtgcaggatgtagggttatggttggaggaaataaatcttggaagctaccgccaggcttttgaagaaaatggtgtcaatggagagtatctagaaagcctgtcggtgttcaccactgagcagattcttcgctttataagacgatgccatatgaaatggggagattttatcaccctctgtaaagagttgagacgcatcaaagttg

SEQ ID NO: 303425 - DNA, 324 bp, Zea mays
gattgataagaccctcaaggatggagtggtggacgtcaaaaggcagggagataggattatcctagtcaaactagttttggggatgtagtcttgaacattataagtgcatatgcccctcaagttggtctcagtgagagcaagaagaggaagttctgggaacttagatggcatggttcgagcggtacccaccaatgagaagcttttcataggaggagatctcaatggtcatgcaggttcaacaaatttaggttatgagctggctcatggaggtttcgggtatggtagcaggaatcaagaaggagaagatattttggattttgttgt

SEQ ID NO: 303426 - DNA, 279 bp, Zea mays
ctggcatctcctcgccctcttacgaagtcctcctcgggttagggttccttagggatttgtggaagggcgatagcggcggctgatgtggagtaccggggctgcgtcggcgggcttgcctgggccgccagcaacgagtcgcgggagaatgccttcgcctcctgcggcgagatcctcgactccaaggtcatcgccgaccgggagacggagagggctcgcggctgcggcttcgttaccgtctccgccgagaactccatgctcgacgctatgcgaggacatgaa

SEQ ID NO: 303427 - DNA, 202 bp, Zea mays
catgaagcaaatactagttgttctgtacgaggccaacgcaatcttggtttacagtttgtgtgtacccaaataagcctgatgcctgcatattatgtggcatccttgattcttagggcctgtttgtttacccccatggattatataatctggattatttttggaggagtagtcctgtttgtttacccagattatttgagttgtt

SEQ ID NO: 303428 - DNA, 331 bp, Zea mays
ctcgaattacgattcccaatccagcaaaccctaccagccttttgcaaactcagagagggacccgatggcacccaaggcggagaagaagccggcggcgaagaagcccgcagaggaggagcccgcggccccggcggagaaggcccccgctgggaagaagccgaaggcgaagaagcggctcccggcgggaaaatccgccggcaaggaaggcggtgttgacaagaaggggcggaagaaggccaagaagagcgtggagacgtacaagatctacatcttcaaggtgctgaagcaggtgcacccggacatcggcatctccccaaggccatgtccatca

SEQ ID NO: 303429 - DNA, 201 bp, Zea mays
agcaactgttaatcttattgagggcgctttgaatgccatgaattacttctctcttgctgctttcaagattatctttgtcttgtgacattttgattattatgtgtctacttggaattcactgagtttcttggatgtgtggattaatattttgcatcaaatttgcgaagctttgagccattatttcttcaggtactcttgctg

SEQ ID NO: 303430 - DNA, 334 bp, Zea mays
gaaatatatgaagaagggcctatccgtttggttagatgtgcccttggatgctcttgctaggcgcattgctaaagtgggaaccgcttctcgtcctcttctggaccaaccgtccggtgatccatacacaatggtagctacttattctttcaatattctttcatgctcgtgaaacggaattgtttcttttttctatttggacaaagaactgctcatagatccacttgagccttgaagccctatcctggattccagtcctttacttgtggtagcaaatgctcagacttcttatgctagttctaatatggatcactcactgggttccttattgttatag

SEQ ID NO: 303431 - DNA, 323 bp, Zea mays
atttatgctccttcatcaattacatttgtgatgacatcgaaaaagtgatcttgtgcatatgctttgacaatttcgttggtgaaggagcggcaatatataaccagggcaagttttcgatgtcatcacaaatgtaattggcctggttgctgcactacttgccaattacattgagggctggatcgatccgcttggtgcaatcgttctggcgatctacacgtacaggacatggtcgatgacggtgctggagaacgtgcactccctggtggggcagtcggcctcgccggagtacctccagaaactgacttacctgtgctggaacacca

SEQ ID NO: 303432 - DNA, 328 bp, Zea mays
  unsure (1)..(328): unsure at all n locations
gcggttacccctaactcgcagctccctcgttcaggcgcgctctctctagccggcgacgattgggcgagcggcgccactcaacgccaggtcttcgtgaanaccatcgccggcgatgagtttcaaccagtctactgtcaaggggtaggccaggatggagaggcctagggctcgccctcatggcctgacgcagcagaggaggcaggaaataaaggaagcctttgatctgtttgatacagataactctggtactcaatttnttttggggggtgggatgggtttcgtctattccaattttttgctttcctcatgtcggaactttgatatctta

SEQ ID NO: 303433 - DNA, 188 bp, Zea mays
ctcaactcacgaaaaggagcgtctgaagatgcgtactaaaatagagcaaatggagaaagctaatcttgaacccagcacgtggaccatgcagggagaggttactgcttctaggaggcccaaaaacagtgccctagaagtggaccttgattttgagcacaatgtaagccctgcccctgtaatgagcgagg

SEQ ID NO: 303434 - DNA, 327 bp, Zea mays
tattctcatcactctgtaaggttctggagagagtagattgagcataaactgacccagatcctgtgctcaccaagcttatagtcttgtgggtgcagacagacattaatcaaatgagcacactaatataaatatagaattgttgcctttcttagggctatcaaagagaagcatataataaaaaattgatgtagctagaaagattagaaaaagtaaaatgaagaaaggtgaggctgttcaatacagaggaaacataaggtatggaaaagttcaaatgggaggcagtggtcgggcatagtggctcacgcttgtaatcccagcattttggga

SEQ ID NO: 303435 - DNA, 282 bp, Zea mays
cgagctccgatagccgcagcatcaggcgcggcccccctcgcgtgtgaccgagatggcgctcgccgaatcaggggacgttgattacccagcttcaagatcgtcatcgtcggcgatggtggaactggtaaaactacatttgtgaagaggcatctcactggagagtttgagaagaaatatgaaccaaccattggtgtggaagttcatccgtggaattcaccctctatctggggtaagctcaggctctactgctgataccgcacggcaagagaagtttggtggcct

SEQ ID NO: 303436 - DNA, 328 bp, Zea mays
gtctcgccaagtcgccatgatgcagcagcccccgccgcagccgccgcagcagccgcccccgctgcggcggacgaggtcaggacgctctggatcggggacctgcaatactggatggacgagaactacgtcttcgggtgcttttcgaacactggggaggttcaaaatgtgaagctcatccgtgacaagaattcagggcagcttcaaggttatggttttgttgagtttacaagccgtgcagctgcagaacgagttcttcagacatacaatggacaaatgatgccaaatgttgacttgacatttcggctgaattgggccagtgctggtgaaa

SEQ ID NO: 303437 - DNA, 286 bp, Zea mays
cggctcgagggccatgcagcagcagcatgaagctgagcttgcagctgccgctgcgcaaccactccctgatgacgatgatgacctgatcgaatagatgttccatggcccttgttgatgcgagggggagagcttttattacaaatccgtggtggttcagttcttgtcaggcctagccgtacgtgatttttctgttatgtaacctgctgttgacgagggtttttggtgatccttgattttggtaatacatcgctattgtcaggcaaaacataatgaaaaaaaaaaatga

SEQ ID NO: 303438 - DNA, 326 bp, Zea mays
ctgctacccacttacacctgatgttttgatttcttctcagagataatggacgccggcgccgccgctgctgccactgccatctaccctctgcaccgatgcaaaaccatacacctggtgaggcatgcccaaggtgtccacaacgtggaaggcgacacggatcacagcgcctacatgaaacccgacttcttcgacgcgcgcatcactcccttgggctggaaccaggttgacctcctgcgagagcatgtgaaggaatctgggcttgcggaaaagattgagctggttatttgttctcctttgtcgaggaccatgcagactgcagtgggagt

SEQ ID NO: 303439 - DNA, 297 bp, Zea mays
  unsure (1)..(297): unsure at all n locations
gtcgatataagaaactgaaagggcatgtgcgctttaatgagatgcttgatatacaaccattcatggacccaaggtgtaaggtgaacaactccagcacttatcgtctagttggcgttgtcgagcacttgggaaccatgacgtcaggtcattatattgcatacgcgagagcttgcaagattggaggtcggcagcagcagagcagtggctcaaagtcttggttttacgcaagcgatgggcaagtcagagaagcctctctggaggaggtgctanactgcgaggcctacattctcttttacg

SEQ ID NO: 303440 - DNA, 319 bp, Zea mays
gatctccgatcccctcgtcgatccaaagatgcagatcttcgtcaagaccctcactggaaagactatcaccctcgaggtggagtcttctgacaccattgacaacgtcaaggccaagatccaggacaaggagggcatccccccggaccagcagcggctcatctttgctggcaagcagctcgaggagggcgcacacttgccgactacaacttccgaacgggagagcacactccaccctgttctccgcctcaggggaggcatgcagatcttcgtcaagaccctcactggaagactaatcacctcgaggtggagtcttctgaca

SEQ ID NO: 303441 - DNA, 325 bp, Zea mays
caccaccgcacgcctcccactcgccgtctccgctcgcctcccaaacccaagcagagaacactagcgttccctcaccagggcgtccatcccagcagccatggcgatggcgtacaagatggcgacggaggggatgaacgtgaaggaggagtgccagcgctggttcatggagatgaagtgaagaaggtgcaccgcttcgtggtgtacaagatcgacgagcggtcgcgcgccgtgctggtggacaaggtgggcggccccggggaagggtacgaggagctcgtggccgcgctgcccggcgacgactgccgctacgccgtcttcgacttcg

SEQ ID NO: 303442 - DNA, 324 bp, Zea mays
cgagcgatcatcaaggctcgtggcctaggccaatggcccacattgcacttggtgggtgcgttggcttaccatctccccaagtgggagagtggacgtcataatttgtgatagagggggtatgcgttcgcgcggccctgccaaatctaaaaatattaattttggtccttgggccggttgctgtgcgcatgatgtcgcgcggccccttacaaatcggaaaatattacttttggtccttgggtgcgcaggttgctatgctatgcgtgtgtttcgaaggaaatacttgtaatcgaaattttcataagcgtttacttttggtaccctgtt

SEQ ID NO: 303443 - DNA, 156 bp, Zea mays
tagcgtcttcgtactcgcctatctacgcggcgcagagcgttcctccttcgtccattcttctctcatttctcaccatcggcggcgctacgctctttcgacaacaccatgaggtagtgcatctcaatccacatcggccaggtcggtatccaggtcgga

SEQ ID NO: 303444 - DNA, 172 bp, Zea mays
ctcgcttcaagctcatcatctcgcacagtggcagtcgcctgagatcacagcgacaatagtgaaggcagtagctgtcctcgccggcactgatgtcaagggcaccatcttcttttcacatgaggaggatggtccgaccaccgtgactggaagtatctctgacctcaagccaggg

SEQ ID NO: 303445 - DNA, 155 bp, Zea mays
catgaatggtgacattcgtcacctcagggacactggcatgtcaaccttcattctcactacgtaacttgatgctgctcctgcagcagttagacgatgagggcacgtacacaagtgtcacatgcgttctcagagtgcattcggaaagccacggtggt

SEQ ID NO: 303446 - DNA, 331 bp, Zea mays
tcctcgccgaggggagcaccacaagaaggacggcggggagcacaaggaaggcatcgtggagaagatcaaggacaagatcaccggcgagcacggcgacaagtccggcgaccacaaggagaagaaggacaagaagaagaaggataagaagaagcacggcgagggccacgaccacgacggcgccacagtagcagcagcagcgacagcgactgagatctggtgtcgcagcacaggtgcaacacaagtatgcttgctggatggaggattcataccagctgatgctgatgtagtgtttcactggtgtcatgcatgcatgtatcgtgctattataatc

SEQ ID NO: 303447 - DNA, 340 bp, Zea mays
gataaaattggaacgatacagagaagattagcatggcccctgcgcaaggatgacacgcacaaatcgagaaatggtccaaatttttgtcaaggggactcaatttgatcttgtggaatatctacaacgagaaaggcaagggtctgctcgtctagagaattttgcttctgcactcgaactgattgacaaaagctccaaatggatacactgcaaagtcgacttgatgcagagttccttctagctcatatgtgttcagtcaagtttaaggaatggatcgtggtgctagctactttattgcggcgtgcagaggttttggtggatctctttaggcatgatttgcgat

SEQ ID NO: 303448 - DNA, 336 bp, Zea mays
attatcacagctactattgttgccgaatccaccattcaagccaatttactatacactggttatcattgatctttgcaaggcattaccaagtgcattcccttcagttgtggtaggagcagtgcatgctctttttgacagaattagtaacatggatatggagtgccgcaccagacttatactatttttcacaccacttgtcaaactttcaattcatttggccttggcaggagtggtcttatgtcaaggacctcccataatgggctccacaacgggttattgtccaggaagtacttgatagggagttcgcttgtcgtacttgaaaaaatcaagcagagt

SEQ ID NO: 303449 - DNA, 351 bp, Zea mays
  unsure (1)..(351): unsure at all n locations
tcggaatcggctcgagtcgagcgctcgagccgctcgagccgctcgagccgctcgagcagctcacatccagccaggnaatcgcgcagcaatggacctacgccaaggacaaggagatcgttgcagccgctcacctcgtcgtcttcagcaaaacttcctgccctttctgcgtccgtgtgaagcagttgttcgagaagcggagcaagctacaaggccatcgagttggataaggaaagtgatggagctgagctccagaatgccctgaaggagtggactggacagaggactgtcgcaaatgtcttcatcaatgggaagcatattggcggtgtaatgatactatggcactgacaatga

SEQ ID NO: 303450 - DNA, 161 bp, Zea mays
ctggtgtgattatagcaagggtgagctcccatacggtcatcgctcagcaactgtgggaaataatgtgtatgagctcacttacggtcggagctcatgtgcagtgtaaggctgatcaacaaatgatggctaaggctgagcatcgcttgtaataagttggtcaa

SEQ ID NO: 303451 - DNA, 333 bp, Zea mays
agataataaggcataaatacaactgtgaacgggttgctggtcttgataaacacgatggaatatttttaattggagaactttgcttatacattattgagaacttctacattgatgattccaattgcatttgcgaaaagggcagtgaagatgagctctctgtcattgatcaagctttaggtgtgaacaaggatataatgggaggcagtgaatctcagttaaagtcacctaccacttggggtgggacagcaaaggtcttgcttggtggcagatcatgggcatataatggaggtgcttggggtaaggagaactttgcaacagtagcaactgcctcat

SEQ ID NO: 303452 - DNA, 328 bp, Zea mays
  unsure (1)..(328): unsure at all n locations
tctcgattctatatgctttaatgaacttggtgacccagatgctatttcaagagttcctagggatgatagtttgagcaatctcaaaaactgggctgagaatgaaaatcttcatcttctgaatcttaagtatgatatcaccccttccgattatgtttcaatgctcataacagattatggaatgctcccacctactagtgtaccagtcattgtaagagagtaccggagggagcacgtttggatatagaagccaccgttttcctttctggtgttgtttgagctccagcggaacagttntcgtcagcgatctacctcatgtcatctggtgatg

SEQ ID NO: 303453 - DNA, 326 bp, Zea mays
ggctaggcaaccggatttttgtcttcatgattggtggagccactagatctgaactgcgcacggtgcacaagcttacaatgaaaatgaagcgcgaaatcgtcttgggctcttctagcatcgatgatcctccgcagtttatttcgaagctgaagtcgataggtagtgctaccaagacctagcttgtatgccgagcgataaaatgaattctcaccttatagtactcagtataagcttacacattatacatacttcaccaatgaacagctctacattttactaggatgtagtcggctgtcaccagcgaccaattgattatcgtcgaactg

SEQ ID NO: 303454 - DNA, 221 bp, Zea mays
gttttctgccggtctgtcggcagccgctttctcctattcatcaagactgtaatgtctattgttgctacctaatgcttctcacttagtcattttggacacatgttcgacctattcaattttaatgagatgcctgatgaggctacttgcaaaaaaaaatcaaaaaaaaaaaaaaaaaaaaaaaaaaaaaaaaaaaaaaagaaaaaaaaagaaagaaggggaac

SEQ ID NO: 303455 - DNA, 325 bp, Zea mays
ctaagatcaagtgtagtatctgttcttatcagtttaatatctgatatgtggaccatgtgttcactttgatattaaatttattttttgtgggggagggctcgctacagtggcttgctactggggccctcaagcgtcgctcggccgttgcactataggctgagcctggcgcgccgcaaccaatgcaatttcagctttaagtatgtctttagactatacgaaatgtatggttccatatcaataaatttggtcgtaagtactgaagaagctaatatcgcccatatttagtcatcaagcagcatgccggtctagcagcatgtccctgtgc

SEQ ID NO: 303456 - DNA, 320 bp, Zea mays
gagaaagggtggaagatccacaaggatataagctgcagaagtgtgcactggacggtttcagatattgctctctcacctgaccaacgattccttgcctatgcaagtctgacacctattgttcacattgtgaatgttcagaatgctggaaagtcatcacatgctaatattactgaaattcatgagggattggatttaaccggtggtgatgaggatgaggactttggaatattttctgttaaattctccaaagatggtaaagaagttgttgttgggaacaatgaaaagtcaatatatgtttatgacctttcagcaaataaagt

SEQ ID NO: 303457 - DNA, 328 bp, Zea mays
  unsure (1)..(328): unsure at all n locations
tgatgcagcagccaaaacctacctagccgccgccgcatgcncccccatcgctgccaagatgcagatctttgtgaagactctgacggggaagaccatcactttagaggtggagtcctcggaaaccattgacaatgtgaaggccaagatccaggacaaggagggcatccccccggaccagcagggctcacctaaaccggcaagcagctcgaggacggtcgcaccctcgccgactacaacattcagaaggagtccaccctccacctggtgctccgcctccgcggtggcgcaagaagcgtaagaagaagacgtacaccaagccaaagaagat

SEQ ID NO: 303458 - DNA, 371 bp, Zea mays
  unsure (1)..(371): unsure at all n locations
cggaatcggctcgagacggcggaaagtcctaatcagcgactactgtaagaatccttcacatacaagacaagcctgctctgttcagaagcttcttcaaatggctaaagcccggcggcaaagtcctaatcagcgactactgtaagaatcctggaaaaccatcagaagaatttgctgcgtacattaagcagagaggctatgaccttcacgacgtgaaggcttatggacagatgctgaaggatgctggttttcataatgtcatcgcggaagatcgcactgagcagttcttgaatgttctacagagggagatagggtgagttgaanagaacaaagacgctttccctggcagacttcacccaggaggactatgacga

SEQ ID NO: 303459 - DNA, 331 bp, Zea mays
tcgatcgggtccagatggccaccatatcgctattgggctcaactcatccgatatccagctctgggacaccagctccaaccgactgttgatgggaccactgtcctcgtgaatggtcacaagctcagacgtggatccactggaggcatcccacaggtataccgtgtcgcccagagcaatggatagcacgttgttgctcccccagtcaagcaggttgaggtagtagtcgtcaacaagctctggtgcgtccagaatcctctctgcagactggggaatatgtcgacactgcttgaccagcttggcatgcggctcgagcggctcgagtagatcgcga

SEQ ID NO: 303460 - DNA, 349 bp, Zea mays
tgcaaggcagatctagggcgatcatggcttacgtcgagagaggtgttggaaggtctcgtttatctgcatgaacaaggtgtcattcatagagatatcaagggcgcaaatatactgagtaccaaagagggtcttggcaaacttgctgattttggagttgccactaaattgactgaagctgacatcaacactcattttgtggtcggcactccatactggatggcgcctgaggtcggctattgactaaccatttgttgaatatgatgtttctactgcagagaatgtaccatgaatcacatgaatttggtggtcatatgttcaacactctcctagagggtgttctcgacaaaga

SEQ ID NO: 303461 - DNA, 230 bp, Zea mays
  unsure (1)..(230): unsure at all n locations
ttatgacacacaggagcgtgatccaattgaaagggttaggaagctcatgttggtccatgagttcgcaacggcccaagagctaaaggacatggagaaggagatcaggaagcaagtcgagctgccattgctaaagcgaggagtgtcactcctgatccactgagtctcacaatgttagttatgactcgttgatcgttgtgagcangagagtagacgtctcgagctgcacaaaa

SEQ ID NO: 303462 - DNA, 251 bp, Zea mays
cgtgaacccgccgccgacgcagcagcaggagacgcgccaaggagagcccgcaaggaggcgactatgagggccaagtggaagaagaagcgcatgaggaggctgaagaggaagcgccgaaagatgaggcagagatccaagtaggctgatggggattgtggatggtggtgtcggcatagttgtgttacgtttcttcgatgcgtgagttcatggagagatgtcacatcctagttcgtcgtaaccgtttgcaatgg

SEQ ID NO: 303463 - DNA, 285 bp, Zea mays
caatcctcttcaccgagttctcctcaaccaaattcaaggtcacagcggcgaacctctcggctatcatgtctggccgcggcaagggcgggaagggtctgggcaagggcggcgccaagcgccaccgcaaggtgctgcgcgacaacatccaggcatcacaagccggcgattccagttggcgagagggcgcgtcacgcatctccggtcatctacagaaccgggcgtccagactcctcgaacgtcatcgcgagcgtactaacgacagccgcgcagctgcacgcaggagtg

SEQ ID NO: 303464 - DNA, 341 bp, Zea mays
ctcgcttgcattgacattgacatgagaggagcacagaggtgggctgattccgttgctggtttggccctcgagagggagacaaaaacaaatttcagccgatttcaggagtggttggaagcaaataaagactaccaagtaatagtcgatggtgcgaatattgcactatatcaacaaaattttgcggagggcggtttcagtttgacccaagggggatagcgttataacagagcttcgggatagatatcatggaaaatggccacttgtcatactacacaataagcgaatttccaagcttatggaacatggtctaataggcatttgattgagaccctggagaacaa

SEQ ID NO: 303465 - DNA, 351 bp, Zea mays
gtcccatgacctatccaatcggtgaccccgaggcaccacacctcagctcccgctgctgccctcttaatttcttccttcggcttcgccatgcgtccgttcagacgttcagtctttattggccgacaccaacatcttgctgcaggtagagctgctcgctccggccgtgacgggcaccaagaacgtcctgaaggcgtgctcggaggccaaggtgaagagggtcgtcgtggtgtcgtcggtggccgccgtgatggtgaaccctggctggccccagaacgaggccatggacgaggcttgttggtccgacgtcgaattctgcagaaccactcagaactggtactgtctctccaagac

SEQ ID NO: 303466 - DNA, 335 bp, Zea mays
atcggttacctgaagaaaggcctgaatccaccgtcggtgacaagcctgcaattctcaccgctgctactgatgctcgcgctcaagactgggatcatcaccggcgtcattgccctcgccgaagcatcgccgtggggaggagcttcgccatgttcaagaactaccacatcgacggcaacaaggagatgatcgcgatcgggacgatgaacgtcctgggctcgctcacgtcgtactacctgaccacggggcccttctcgcgctccgccgtgaactacaacgccgggtgcaggacggccatgtcgaacgtggtcatgtcgctggcggtgatggtcacgctg

SEQ ID NO: 303467 - DNA, 179 bp, Zea mays
gtttggctagggatagcacgccgaggaaggtcgacatgtgtctccgccgccgccggtgaagctgatcggcttcttcggcagcccgtacgcgttccgcgcggaggcggcgagatgcctgaaaggcgtgccgtacgagctgatcctggaggacctgttcggcagcaagagcgagctcctgc

SEQ ID NO: 303468 - DNA, 276 bp, Zea mays
acaaacctcacacatgatgctagaaacggatagagccaatgtacatttcatgggttactcgcatagaagataggggtccaatagagcatggcatgaagatacctactgcaagtggctgatactcgcgcaggagatgatgactgatggtccaacattactccgttccacggactggggtctttgcccacacgtcgagtgctcacctggactagactgtgcctactcaactgggaattcactcgtcgaaccttacactgctggccatatcattctcct

SEQ ID NO: 303469 - DNA, 290 bp, Zea mays
  unsure (1)..(290): unsure at all n locations
gtggccttttagatacacagtttagggagagcatggacattacatggcataaaaaatcaacaattagtctatgcacgatctcctccccactatcaagaattccgagtccctttgcatcttcctattacgagaagcacaggttgcccttgtcactggtgacgcatttggggatgacaagtgcattcgtatttcatatgctgcatccctaactacacttcagactgcgatgtgcaaattanaggaagctgttgctctgctgcagccctgtgttgctgcgtagcangatcact

SEQ ID NO: 303470 - DNA, 275 bp, Zea mays
atcgagaaggccaatcccgagcagtggtgcgaacctcgagcgctcgcgccggtgaccataacaaagaggaagccgcggtagcactggtagcggcacagtaagggggagatgtcgtcggcgttcagcggcgatgagaccgccccttcttcggcttcttggcgcctccgctgcgctcacttctcaacatgggggcggcgtagggacaccaagagtgctcggcgggcgtcatggtgtcatcgccaactctcagaatcatgtgcgtgtcaggtgtgtgc

SEQ ID NO: 303471 - DNA, 326 bp, Zea mays
  unsure (1)..(326): unsure at all n locations
ttctattctgggattggagaagttcaagacaagttgcatgcttagaggaatcccacatggatgatgtgacacaagtccaattcacaccagatcagcanagtaaactcatttctgcagcagttgatggattaatgtgtgtttttgacactgatggtgatattgacgatgacaatcatctgttatctgttatgaatgcggaaacatctgttgccaaggtggggttttttgggaacaagtataagaagctttggtgtttaacccatattgagacattaagtgtctgggattggaatgatggggctagagagttgaatatagaggatgct

SEQ ID NO: 303472 - DNA, 328 bp, Zea mays
tgtcatactgccaggactcgttggtagcacattttgagtaccacaagaaagcaattacatccatcgagtggagcccacacgaagcatcatcattagctgtaacatctgaagaccaccagctcacaatctgggacctttcattggaacgggacaccgaggaggaggctgagttcagagcgaagatgaaagagcaggcaaacgcccctgacgatttgccgcctcagcttctctttgctcatcagggtcagagagacttgaaagaagtgcactggcacccacagataccgtcgatgatcatatcgacggcaatcgacggcttcaacgtgtt

SEQ ID NO: 303473 - DNA, 326 bp, Zea mays
ggatagtccaaagcgcatctctttcttgctcaattcgtccaggcgagacctgcaagatcacctacggctccggctcgatcgccgggttcttcagcgacgacgacgtgctggtcggggacctgaccgtcaaaaaccagaagttcatcgagacaacgcgcgaaagcagcgtaacgttcataatcggcaagttcgacggcatcctcggtctcggataccccgagatctccgtcggcaaggctcctccgatctggtaggtatatatatctcattgctcttgcaccgcgccggcggccggcccatcacatgtaggttgccaggcagagcat

SEQ ID NO: 303474 - DNA, 238 bp, Zea mays
cgagtatatagccttggccgacaggcccgggtaatcttgggaaatttcatcgtgatgaggataggatcggaagaagctggtggtcgtgttcttctccctttttgggcgcgcgtgttgtgtgctgctgtgtctgtgtactccagctgtagctgctgctgtgcttagctgattgaagtttgaactgtagtgggtccacagtattatgcatgttttgtttggtgagacgtcagaacccatc

SEQ ID NO: 303475 - DNA, 344 bp, Zea mays
attcatcgaggccaagtcggacacatccatgttcatccaatggtgggacgacgacaccgtctaactcctttttcggccctctccgacttctgagctagatgtctacaccaacaccgactaggctagctgcgtcaacatgtgccggtcaacatctgactacattgtgtttttgggcactagactcatctcatggtactcaaagcggtagcccgtggtctcccactccaacacggaggccaagtatcgagatatggccaatgacgtggtcgggacgtccttgctctgttaacttcttcatgagctccacagccccatcgcccgcgccaccctcgtctcctgcgaca

SEQ ID NO: 303476 - DNA, 249 bp, Zea mays
cgatgctttagataggtatgcccaattttttatcaagccattgatgtcccagatgctacacttagggaaataaaagctgttgactctgaacatcagaaaaacctcttgtacaatccttggcgaatgagtcagcttcagaagcatctttgtgcagagaatcatccttatcataagtttagcactggaaattggaacacacttgaagttaaagcaaaggagaaaggattggacacaaggcttgagcttatt

SEQ ID NO: 303477 - DNA, 289 bp, Zea mays
acgaggtcctccgcaagcagaggctgctgaccaacccgtcgctgaagcaggcgatgctgttcccgcagcccgcggagccgagggacgccttccaccaggtcctcaacgggcgggcgcgcaactgccccacgccaaggaggtcttcgtcaagcgcgcgcagaaggcggtcgactggaccgagggcaccaggatgacctcaagccgtcgtaggccgtcgtggctgctgcctcttcgtacacgtcacaggcagatcgatgatggtgatcctgatgagtgagccagacaccac

SEQ ID NO: 303478 - DNA, 328 bp, Zea mays
agaaaaccttgtgccagaaatattctttggctaatttcgtaacgatgctttactatttatttccatgtgttccattgcagttgtcagttatattacataattaattacgatataggcaagcaagttgagtgtatatgcagagtaataaaatagaagtgcgtacccagttaaccaggatctgttcacttgctggcctggaggtatccactgctcttcttcctgtgatcaactccagtaggaaaaccccaaaactgtacacgtcggtcttgacagttagctggcctgttcttatgtattccggagcgcagtacccatacgttcccatcac

SEQ ID NO: 303479 - DNA, 324 bp, Zea mays
acatgctagtcaggtaccgtggagctgcgacctctcaattttcatggttttggcagaagatatcactgcttggtggtctaagcttttgacatttgcttgtgagattatcattctatacgacagaggaagaattcaaagatattttttcaccatttggcaccgtagaggaagctcgacttatgagagaccaccaaactggaaggatgaagggatttggttttgtcaaatattcatcgcaagcagaggcagagaaagctgtcaaggcaatggatggcaggattctacgtggaagattgatctttgtggagatggcaaaggacacga

SEQ ID NO: 303480 - DNA, 333 bp, Zea mays
  unsure (1)..(333): unsure at all n locations
gcaagtcatacaattgcaagggttctctctgcagtatcttgatgtttgcctatagctggccccggatgatttgttctttcagccatcacgtttcaatccatgaacaaaccatcttcagtgttagttgtcattcaaacttgtgcgatctttctgtanagccaatcattcacgattgctaacgtatgtgctttctgtaaccaaattgaaatcagttctatggtattcatttgttcaaaatgtatatatatgcttctctgcaaccctatcgctacgatgaaatctggtggtgcttatagcaacaacctgaggcatagatctttgctgacaactccc

SEQ ID NO: 303481 - DNA, 301 bp, Zea mays
gggcattccaccggaccagcagcgcctgatctttgctggcaagcagctggaggatggccgtaccctcgccgactacaacatccagaaggagagcaccctccacctggtgctccgcttgcgaggtggtatgcagatctttgtgaagaccttgactggcaagaccataaccctggagttgagagctccgacaccatcgacaacgtgaaggcaaagatccaggacaaagagggcatccccccagaccagcagcgtctgatcttcgctggcaagcagctggaggatggccgcaccctagcagact

SEQ ID NO: 303482 - DNA, 185 bp, Zea mays
gtgtctcactgttttatgtatcattatacttcagatattgttggtgtggttcagatcgtatctccgacactcactgattagggggagattgacaacgagacaataccaaagcgtgacattgttgtagcagatgactcttaagtatcacttgatcttttaccctgtcgaagcttagaatacaatca

SEQ ID NO: 303483 - DNA, 266 bp, Zea mays
accgccgccaccatcacagctgatcaccggcgcggacttccaacatattctgcgtctgctgaacaccaacgtagatcggatgcacacgctcatcgtcgccatgacctccataaacggtgttaggcgccgcttctccaacatcgtctgcatgccagccgtcatcgacatgaacaagacggtcggtgagctgacacctgtagagctggagcgcctgatgacggtcgttgccaaccctatgcagttcaaggtgccgtactggttcctca

SEQ ID NO: 303484 - DNA, 323 bp, Zea mays
ggttacacagcttagaattagcagttagaatttgaatccacacctaagctctttcaactatgccatgactagctcatatttgccagatatgtgtctaattgattggtgaatctaatttattttctaattaaacagtcaaatgttgtcttagtccattttatgttgctataacagaataccacagactggttaatttatacagagaagtcatttattagttttggaggctgggaagtccaatgtcaagagagctgcatctagtataagatggcttacaagcattcacagatagcctctgatgcaagcactctactgcatcatct

SEQ ID NO: 303485 - DNA, 339 bp, Zea mays
ataaaattggaacgatacagagaagattagcatggcccctgcgcaaggatgacacgcacaaatcgagaaatggtccaaatttttgtcagcatgaaggattattcgcttctttttgcggtacatttattacatttcagtaaggtgttgttcgttttggtgataatccacatggattgggtgggattgagccggtttaaatccataacaagtcaaaatccaccccaatcccacccaatacacttcaatacacatgtaatatcaataaccgaacaaggcctaagtggggtcgattgtgatccagcttatgttttccttgtcgcagagagatagctagcgata

SEQ ID NO: 303486 - DNA, 239 bp, Zea mays
agcgaaaattctaggtttctgttgtgtcatgtcatgctctgcataccctgtgtgaactatcgaataatgttggcaaccgcaccgcaccgcacttggcttcccatgaccgggaggatcagtgtgtcgatccagaaattgttcactggctcctggctcgctaaaaaaaaaaaaaaaaaaaaaaaaaaaaaaaaaaaaaaaaaacaaaaaaaaaaaaacagaaaaaaaaaaaaagagggggg

SEQ ID NO: 303487 - DNA, 329 bp, Zea mays
ctatattggatttaagggctggtttccaccaaattcttttgcaacagggtgaagaatacaagacggcattccaaacatatctgggccactatgagttccgagttatggctttcggccttacgggtgctcctggcacatttcaaaaggccatgaatcatacattagctccaatgctccgtaaatgcgctcttgtgttctttgatgacatattagtgtacaatgtatccttggagagtaaccttcaccatttgcagcaggtgtttgagctgttagccagagaacaatggacaattaagctatccaagtcgtcctttgctcaggatcagttt

SEQ ID NO: 303488 - DNA, 297 bp, Zea mays
gcgcactctagcaatggcttctgaggttgtccgccctagcgacgccgagctactaaaggcacaagccgacatatggcgggtcagcctctcctacctcacgcccctgtcactgaggtgcgccgtggagcttggcatccccacggcgatctaccgccatggcgggctgcctcagccgctgagctggtcacggcgctgtctctccctcactagctgcgtcctcgcgctgtacggtctcgcggtcggcggttcacgtcgaaacagacaggagagacggtacactagccgttctactctgtg

SEQ ID NO: 303489 - DNA, 244 bp, Zea mays
aatggagtagcaaatgtttttaataataaaacgctcttgcattgttaaatgagcagaaaggcgctagtttgtctctgataccttagtgtagagaggtaatcattcttgatgcttactagaataaatagttgagatataatcttctcttcagtgtcagatttttaactggacactccagaaatggtgggacagacccactatatgtagctggaaatgcagccgatcctgacactactttggttgt

SEQ ID NO: 303490 - DNA, 275 bp, Zea mays
gatgatgacctgattgccagactgttgaagctcgggtgttgcaaaaataaggaaatagctgttaagacagtcaaaaccatcaagttcttgggactacatgaagagactcaatacataagggttgttcgagccatttaatgtgattgccaggatggaacagaggatggctatggcaaatagcagacatggtatgtccacagagtcgagtgataccggaggcaaccgcgaaagcacagcgagctatggagtcggaggtgaaatgcagtcacatgcat

SEQ ID NO: 303491 - DNA, 317 bp, Zea mays
gtcggcggcgcccggcgggccggatcgtgatggagctgtacgccaacgaggtgcccaagaccgcggacaacgtccacgcgctgtgcacgggcgagaacggcgtgggcaagtccgggaagccgctccactacaaaggctccaccttccaccgcgtcatccccgagttcatgtgccaaggcggcgacttcacccgcggcaacggcaccggcggcgagtccatctacggcgagaagttccccgacgagaagttcgtgcgcaacacaccgcccccggtgtgctctccatggccaacgtcgggcacaacaccaacggctccc

SEQ ID NO: 303492 - DNA, 308 bp, Zea mays
agtgtgcgacccccgcctctttcatctcggtcaagctgcgcgacatgatgggcttgtactaggagaggagcaccacggtcttatagtgcctgatctcccgtacgtggccgcgcactcgctgtggagtgaagccaagaataacaacctggagctggtggtgctgacaacaccggccataccagaagacaggatgaaggagctcaccaaggcttcagaaggcttacgtctacctggtgagcgtgaacggagtaccaggtcctcgcgcaaacgtgaacccacgagtggagtcactcatccaggaggttaag

SEQ ID NO: 303493 - DNA, 288 bp, Zea mays
cagatccagagacatccgcatccctctctcctcggtatcctctgccatgagcaaatgccaaatcgcatcgatctccagcgcaaggctatctgggattccgagcgacaaagtcaggcgtagaggctccaggaggaggagggaggcgcacatgtgcgagtgggggagatgtaccgctaggactggttctacggggtgctggcctccctcggtctgtggcagaaggaggccaagatcctcttccgggacctcgagaacgccggcaagaccatctgctccacatgctcaagg

SEQ ID NO: 303494 - DNA, 196 bp, Zea mays
gagcaagtacctgggcaagctgttccagatcaaggagttcccgggcaacaccaacgacgccaggatggccatcggcctccagggccacttctccgtgcccagcatcccctacatccgcgccgcgctcgacaccatgtccagggccaacgcgcccatctggctcaccgaggtcgacgtcgcgcccggggcccaacca

SEQ ID NO: 303495 - DNA, 324 bp, Zea mays
  unsure (1)..(324): unsure at all n locations
gacttggcagactccttcatgtagcgcgtgcagttattgttgcggtcgacgtagacaatgccataacgttcggtgaagccggcgaactgttgcttgaggccattccgcgaaccacaactcttacaatatgcatgcgccggccgacgacgacgcgcgctgcctctcgtgagcttctgttcaagtgatgcatgtttcaaggcatccatggatgctttacgtatatgcgtattaattagccgtgtcagggaaccggacagaagggggtgttgttttatatttacgtcttctggtgatcanataaagggganatatatgttggatgtg

SEQ ID NO: 303496 - DNA, 253 bp, Zea mays
cagagcgtgtatgggataccatcaagcgagacttagcatgcatcgtcagcaatcacaagctcgtcgtcttcgccaatccctaccgcgatgataccggtaaggcgcttagcgactgggacctgtggcgtcacttcttctacatcgtcttcgtagggatcacgctctcctggtcggcttccgtgaagaagtctgaaatattcgctatcacatacgcggtcatggcagctagttctataattctgaactttaatgt

SEQ ID NO: 303497 - DNA, 330 bp, Zea mays
gcgtgctgtggccaaagatacaactagagattatgaggatattatgcttgcaacattcaatagctacaaggatcagttcactcatgcaatcaacaaggatctgaaagctgaccccaaggatgagtttctttcaacactgcgggcgatcatccggtgcttcacctgccctgacagatacttcgagaaagtcattcgactggctcttggaggcatgggcactgatgaggatgacctcaccagggtcgtaactactcgcgccgaggtcgacctgaagctgataaaggaggcttatcagaagatgaacagtgtgccgctggagcgtgctgtggc

SEQ ID NO: 303498 - DNA, 185 bp, Zea mays
cgaatcgtctcgctcgtggctgctctactagtgctgcttgcactcgtcgccgtttcctccacgagcagcgcactatcaggagtccgtggctgactactcagggatgtaggcaggcggcatcaaggacgtgccggcgaacgagaacgacctcgagctccaggagctctcgtgcttcgccgtcaatg

SEQ ID NO: 303499 - DNA, 196 bp, Zea mays
tagggcctctgtaccttgcaagttcaatctcagctccaaccatgggtacatagaagtcccacatcaacgatttggttattggcgatgtcgattctgggagatcgacaacacaggaaaccttatctacagcttggaggcattgacaagcgtgtgatcaagatgtttgacaaggaggctgctgaaatgaataagcggt

SEQ ID NO: 303500 - DNA, 227 bp, Zea mays
ccatcttcccgtgggatcccagtcgccgccgcaagaagaagagctcggggacttccaggtctcgcgagaagatggtcctagtgttgccgacatcgctgacggacccagacaatgttattgtgctctggttttgtacaatctctgtccgaagcagatccacgagatcaaggatttccttctcaccgcgtagaggaaggatgcccggacagtgaagatcaagaggagca

SEQ ID NO: 303501 - DNA, 182 bp, Zea mays
tgcaattctacgacaatgccgaatcttagttcttgatgaggccacggcatgtatcgacaacgctattgatgctatcgttcagacgacgttcaggacagcgtttacacattgcactgtcatcactgtcgcacactcgaatacgccacgttatggaatgcgatatgggacttgcaataagtgac

SEQ ID NO: 303502 - DNA, 164 bp, Zea mays
gcgcctctacatttcttctctcgctgctcgtccgcctccgccagatccatccagtacagggatcgccatgtcggactctgaggagcaccacttcgaatcgaaggccgacgctggggcgtccaagagctacccgcagcaggctggcaccgaccgtaagaacggct

SEQ ID NO: 303503 - DNA, 352 bp, Zea mays
ccgaccattctgcctccagcttacggagacgtgcccctgctcaccaggatcttctcttccaagggcctcgccgtcaaggacctcgccgtcctctccggcgcccacacgctaggcacggcgcactgcccctcctacgccgaccgcctctacaacttcagcagcgcctacgactcggacccgtccctccacaccgcgtacgccgcgctcctcgccgacgccaccactagggagtacgtccaccgtattgccaccggcaagtttgacgacgtgttcttcaaggacttcgccgagtccatgaccaagatggccaacgtcgccgtgctcaccggtgccgagggggagatcaggaaga

SEQ ID NO: 303504 - DNA, 342 bp, Zea mays
  unsure (1)..(342): unsure at all n locations
taggctccgcaaccgctgagtgagacgaagagagggtcggcaatggcgatggaccggctagcggcatcgaatctctgcacggacgtaacncgttgcagttgtcgtgtggcagaactaccgcgtcgatgatcattggccaacgaccatggtaaccgcaccacgccctcgtacgtcgccttcaccgactccgagcgcctcatcggagatgcggtcaagaaccaggtcgccatgaaccccatgcaacaccgtctgtgatgccaagcgtctcatcggcatgaggttcagtgatgcgtctgtccagagtgatatcaagtgtgcaccttcaaggtcatttctgggctg

SEQ ID NO: 303505 - DNA, 303 bp, Zea mays
gtaccacttcgtagaggaatgagtcaaggtcggcgcaccggcgaagtccaaggtgttggacgacgacgcctcggcgcgtttcgaagacgcatgctccatcctggagaaggacgccgtcaacgtgtcccttgagaacctcaagtcctagccgttcgtcaaagaacgactggagaaagggacactcaagctggtcggtagccattacgagtacgtcaatggaaagttcgcgacatgggaaccctaagtggtcataggtacaaatacggctcatcggacttatttgccgagtagagagcttaatta

SEQ ID NO: 303506 - DNA, 337 bp, Zea mays
gatgccatcggggtgttccgcgaaatggtgtggagcggggagcggccgaatgagttcgggttctcgtgcgtggtgaacgcgtgcacgggatcgagggatttggaagctgggaggcaggtgcacggtgcagtggtgaggacgggatatgaaaaggatgtgttcacagcaaatgcgctggtcgacatgtactcaaagctgggagacatctgaatggcacagcggttttcgagaagatgcctgcggcggacgtcgtctcatggaatgctttcatttctggctgtgtaacccatgggcatgatcaccgtgcactggagctgctactacagatgaagtcttc

SEQ ID NO: 303507 - DNA, 146 bp, Zea mays
caaaagaacgcatggctattgtattattatctgcggttacatttattaaagatatcacaggcggtccatcgttgcgtgtgatatctttaataaatgtaaccgcagataataatgaaataaaaagaacgcatggctattgtattatt

SEQ ID NO: 303508 - DNA, 340 bp, Zea mays
cgaacggctagccgatcaggggagaattcttttgtaatggagccgctgcgaccacgcggcgattgttattgctcgcgcgtgctctcggtttgtctgctgctcctcgccgccctgccgtggaagcacgtctctgcggcggcgattaccagggatgatttcccggaggcgttcgtcttcggcgccggcgcatcggcttaccagatcgaaggcgcatgggcagatgacgggaagaagcccagcatctgggacacatacacgcacagtggtcagcgagcgagctagtagctcctcccatttctctcgctcagctccatatggtttcgatatccaagtcctgtat

SEQ ID NO: 303509 - DNA, 344 bp, Zea mays
ctgtcagctgcgcatcatcgacgccgacgccgacctctacctcgctgagatcgacggccaggtcatcgtgaagattggatcaagatacgactgcgggcacctcatcccagaagccttccaactcgcggcgcacggagacggctatgccgtctgggagacaaactgagccagatctgtgcctgatccgtccgtccggtccggcacgacgagttttagcggatttgacctgcattttccttagcttattattactccaaatacgggatatatatagcgacaacccgtattcgagatacatgcgtgcccccagggacgcggaatccagcagagatagcacgcgtgtc

SEQ ID NO: 303510 - DNA, 348 bp, Zea mays
gatgagctcgagcagatctttccttgagtctgagacagagtggtccagccatcaatttgtatcgccacaggctgtctttgtatttccatagggcgttactcaccagcagtggtatctgttcaatgactttcttattgaacctattgataaggttagttgcaacatgttctgtttcttctttcatttccccttttcctagcatccttatctttagggctctatagaatgccaggcagattcaacagggagggaggaaggaatcctcaggaataagaaccattagcacttaaaaatagcacctgaaaaaaaacaaaaactagcacctgagtcctggcctccgtctgaagt

SEQ ID NO: 303511 - DNA, 323 bp, Zea mays
agccccggtttccttcgtaagctcgtcgtcctccgtccgcgactctgcgcgagaagcgagagtatggacacccaagtgaagcttgctgttgtggtgaaggtgatgggaaggaccggctccaggggtcaggttacccaggtcagagtgaagttcttggatgtcatctaatttgctatgttcgtcagactttggtatgaccttcaaaacacctgccttgtatgattatttgtgagcctggtgataagattgcagtttggtttttatgatccggttgagggtatgtttggcaacagtatttatcaaaatcatagttttacaataaa

SEQ ID NO: 303512 - DNA, 238 bp, Zea mays
aaggcattgaatagatgatttaaacccatatgttgttccaatggctatgggcatttaacgtcaactagagagtcccttggatatgactacaagtactatcatcaggaggattgttgctaaccatgaagcttacctgtgtattgtcagctttcaaactcgatgaaccaactgagaaagtactgcttatgaagctagagaagcatggaaggagtgttgctgaatcaaaggcaaaagaaga

SEQ ID NO: 303513 - DNA, 261 bp, Zea mays
tgatgacggcagaaagataaactcattttatcattcctttgtggaggtattatgcttaattgttagggtccgtgcatgcacgcagagcgaaacaaagtgcattttggctcctactctcctagccctcttacgcagtgcttttatgcctatacaatgctgccagtggtaggcgcactgacaataccatcaggtacaacgccaagcgcaggcactggcgccgcaccaagctcggcttctgagcgtcgggattggccggctgct

SEQ ID NO: 303514 - DNA, 228 bp, Zea mays
gagagattggagggaggcccctgcacaaggcaagagcaaccgcggcgcgcggcagagagacgacgggcagacgcagacgggcgaacaagatgagggagatcatcagcatccacatcggccaggccgggatccaggatcggcaacgcctgctgggagctctactgcctcgagcacggcatcgagcacgatggcaccatgacacgatgattcctcggttggcgtcgcaca

SEQ ID NO: 303515 - DNA, 276 bp, Zea mays
ctcccggccttgggcttcttccacgccggggggcgcttctcggccttgggcttcttccccgccggggccgagaagcgcctcccggcggccaagccgtccggcaaagaaggcggcgacaagaagggtaagaagaaggcgaagaagtcggtggagacctacaagataagatcatcttcaaggtgctgaagcaggtccaccccgacatcggcatctcttccaaggccatgtccatcatgaactccttcatcaacgacatcttcgagaagctcgccggcg

SEQ ID NO: 303516 - DNA, 145 bp, Zea mays
agtgatgttgttatgcgggatagcgatggacattccaggtgttatggatttgtcaattttgagaatgcagatgctgctgctcaggctgttcaggagctgaatggcaagctattcaatgataaggcactgtatgtgggaagagcac

SEQ ID NO: 303517 - DNA, 269 bp, Zea mays
ggcacctcgaagtcaccggtccgcgcacccagctcacgatatgtatccataagctgcgtgcgcgtccgttcggcctccgcatgcatcgcggcctcggcccccttcgcgcggctctccagggcggtgagccgctcttgcagatgttcggcgagctccttggcaagattgccctccgcccgcgccagcttggcctccgcctgcgcacctgctccttggcgacggcctcgttggcttccctcctctccgccgccagttggcgccggaggtca

SEQ ID NO: 303518 - DNA, 257 bp, Zea mays
gtagtatcgctgaaattggtggagggtgataaagcatcaagaaactggtggcggaagttggagcttgtccgtgtgctcttgtctgaatatgttcaagatcagagtcacttggaggctcttacatattctgctatatatctaaagtggatatatactggtcaaataccatgctttgaggatggtggtcaccatcgacccaataaacatgctgagatatctaggcaaatttttggtgacattgaaaggatatactatgg

SEQ ID NO: 303519 - DNA, 284 bp, Zea mays
gctcgtcggcgtggtggtgagaacaaaggccataccaccaggatgtgccatgttaccatccaaaagcaaaaggaaatagccgaagctgcagcacaacaggctcagccgaagcaggtcatgcacactgcttcgtatcattcgccttacatcccagaatatgtaggcaatcaccctgcagtttctgttgcttcggcgagtcaacctcaagcttcctggcaacagcctcctcctccaccaccgctgcaacaaggccagcagccagaatggagccaatatgctccaca

SEQ ID NO: 303520 - DNA, 269 bp, Zea mays
gataacttaattagtgttcatgaatatgtctagccttactttagtggttctaaattgaaaagctttctagctggtcataatatcaccattactgatggtattgacaaaactagtgcaactttgcaatttagaaagttagcagattgcgattttctcaagagaaactttaagcagatgtctaatgttttgtgggtggctcctgaggactaggcgagtttatggtcacaacttcattatgtttcgtgtaataatctggaaatgcaagaagc

SEQ ID NO: 303521 - DNA, 197 bp, Zea mays
gaagcttgttaacaaggataaagacacacttgaacacactcaagaagtacacatacgggaagcacatagtagcgcgtgtagagaagcttgttgctgctggagagaagcgccttgggcttcaaccagcatgcaccgccgcctgaagggaaactctctaagttgtacagctaacagttgctaggtttgcctcatgttgt

SEQ ID NO: 303522 - DNA, 270 bp, Zea mays
tgaagcagatgtgttggtggtatggattgaagcgagatgtggctacacgtgtggctatgtgcgaggtgtgtcagaaatgttaaggccgaacaccaaagaccagctggactattatacccattaaagatacccgactggtagtgaaagagattagtatggactttattactggattgcctcgaacctcaaaaggataggattctatatgggttattgtggatagactgaccaaagtggctcatttgatttcggtcaagactacttataaag

SEQ ID NO: 303523 - DNA, 274 bp, Zea mays
caggaaaaagaaggattactatgcagttctcggagtagagagaagatgcactgtggaggaaattaggaaggcctacaggaggttatcactgaaggttcatcctgacaagaacaaggttcctggggcagaagatgctttcaagtggtaagcaaggctttcaagtgcctaagcaatgatcagtcgcggaggacttatgatcagacaggcaccattgaggaccatgaattcaatgagcaacatcccaatgtcatgatgcggggagctgctaggcgga

SEQ ID NO: 303524 - DNA, 163 bp, Zea mays
ggtctgcagcccccaactacccccagcctcggaaggaaccttccagaagcgcaagactctaaggccgacgccttcccattcttcctcgccgcgggggtctcctgacatcaataaacaatggcgccggctgttgctgtgctcggtagcatcgatggtgtctagg

SEQ ID NO: 303525 - DNA, 256 bp, Zea mays
gctctcaccagtcaccactcagctgacgacgagcgagcgagaggaacggggcgagggaagttaaacgcgcggcgatgccggagccgccgcccttcccgtccttcagttcgggatggctggcgcgatatatatcaaaggcattcctgtgacgaagtataagagatccgctgttaattccgaagaggagtggccctccaaacactctaaattctttgctgagcttgatgatggtttggagttctctttcactgataaa

SEQ ID NO: 303526 - DNA, 264 bp, Zea mays
tgaaggtaaaaggaatatatgccatttccttcatatcttcatccaaagggatatatgccatttccttgcatgggtcaaataaactgtactttgcactcttgctaggaaatggcatatatccctttggatgaagatatgaaggtaaaaggaaaggcagccattgatgttgtttgcaacccactgggcaagtcgggcggcgcacttatccaacagttcatgatcctgacgttcggtcccctggcaattcgactccataccttgggg

SEQ ID NO: 303527 - DNA, 265 bp, Zea mays
ccagctcagactgcgtgtagagatcacgcaacttctcaaggaggccagtgctttgtcaacgccctcgacgtttgcgcaagccgcaaaactgaagcggttggctggtgctaaagagaaggagctggcaaaaagtaagcgttgaattcctcagacattgcgtgggttcttgctgttcttgtttgggccgattcgggttgctggactcttacttttgtccattttatagtgcaagatgtggacattagagggatacagtctttatatg

SEQ ID NO: 303528 - DNA, 264 bp, Zea mays
ggagatctttgggaatcattcagggaatggagtgcttatggggccggtgttccacttgtgctaaatggcagtgactctgtgattcagtattatgtgccatatctttctgctatccaactatttgcagatccatcaagacctgcttcaagaaacagtgagagcagcattgagaatgacgttgagcggctaagagtctcatcatcactggaaggtaaacatcgactggaaaatggtggcatacgaagtgatgatggtgaaggcgat

SEQ ID NO: 303529 - DNA, 281 bp, Zea mays
ctacaccgagaagggcttgtgcacatcaggcaagactaggataggcgctgtagtcaacttctctttcagcgcttcaaaggcctcttcgcatttctgggtccacttgaactcaaccttgttgcctagcaatgctgtcattggcttcgcaatcttcgaaaacccttcaatgaatcgccgataatatccggccattccaatgaagctcttgattcctctagcatctgttggcgctttccagttcaaaatgtctgccactttcttcggatccacagccaatcctt

SEQ ID NO: 303530 - DNA, 282 bp, Zea mays
cggaggccagggcgctagagtagcagcaggcacgcggagccgaggtaccggctgtaccaccgcgagcttgccgccatggctagaggattgaagaagcatttctagaggctcaatgcgctcaagcattgtatgctggacaagcttggcggacttttactcccaagccatcttctggacctcacaagtctagggagtgcctgctactgatcctcatcatcaggaacaggctcaagtctgctcttacatatcgtgaggtcatatccatcctgatgcaacgccatg

SEQ ID NO: 303531 - DNA, 279 bp, Zea mays
accaattgaggcacggtacaaggagtcgacagaaaggggttcctctgtagatcaactggtctactgcatcaactgggtcaccaatcttcttaaggtcttccagtttagaagattggtgacccaattgaggcacggtacaaggacctcgacagaaaggggttcctctgtagatcaactggtctactgcatcaacagtttcagagaggctgctttgtccagtgaccaaaagtttggccatatcgacatatctgagaaacagaaggtcatcaatgagtgctc

SEQ ID NO: 303532 - DNA, 278 bp, Zea mays
ctcgagccgctcgagccgcgatagtgtaataactttttattgattcatgtgatcatgcattgatgacatcacttacatttgccctacttcttgcagccacttgtatctggtgcggcattaggcttagaagggcagttgactgtttatcatcataatggaagcccatgctatcggtgcctctttccaactccaccacctgtggcagcctgccagagatgctcagacagtggtgtccttggggttgttccgggagtgattggttgcttacaagctctgga

SEQ ID NO: 303533 - DNA, 204 bp, Zea mays
cttcgaccaaattcaaagtcatagcggcgaaactctcggcgatgtctggccgcggcaagggcgggaagggtctgggcaaggtcggagccaagcgccaccgcaaggtgctgcgtgacaacatccacggcatcaccaagccggcgatccgaggttagcgaggattggcggcgtcaagcgcatctccgggctcatctacgaggagac

SEQ ID NO: 303534 - DNA, 254 bp, Zea mays
atgttggtgaagctgcagctgtaacacaatatatccattctccttttggtgaaactgaagctgcaacaataggacaatggatatattgtgttggtgaagacatgaacatgtattgctttagctaccaatctggtaaactggatcatctgatgatggtgcatgagaacgatatcataggcattacgcaccatcctcacaggaacttagtagccaccattgctgaggcatgtatgatcgacgtatggaagccttga

SEQ ID NO: 303535 - DNA, 291 bp, Zea mays
actcaaccaaattcgcagtcacagcgggcgtaaactactcggacgatcgtctagagccgcgtgcacaggtgacggagacaagtgtgctgagagcaatcgtgtccgcgtcagagcgccatccgcaaggtgctgcgtgacaacatccaaggcatcaccaagccggcgatccgcaagttcggcgacgaggagcggcgtcaagcgcatctccgggctcatctacgatgagacccgtcgcgtgctcaatatcatactcgagtacgtcatccgcgaagccgtcaccttacaccgagc

SEQ ID NO: 303536 - DNA, 272 bp, Zea mays
taagcaggttaaaatgtggcccctgcttatcacagcctcctgagagaacagtcaacccatcatccttccaagccgagcacagcaccacgttgatcgtgcgaaatggagggttgactgtgttctcaggaggctgtgataagcaggttaaaatgtggcccctgctctcaggtgctcagcccacggttttctcaggccatgaggcacctattaaagaactcgcttcggtgccactgatgaatcttcttgtcagtgggagctgggacaagactttg

SEQ ID NO: 303537 - DNA, 217 bp, Zea mays
cagattaaaaatctcattgaggcaccggaccaggattttgaaagggaaagctccatgggggggtagcaaagcttgctggtggtgttgccgtccatccaggggggagcccaaccggaactggactaaaaggggaggagttaagaattgaagatgccctaaatgccacccaggctgctgttgaaggaggtattgttgttggtggaggatgcaccttttg

SEQ ID NO: 303538 - DNA, 266 bp, Zea mays
tcccatcccatatgatgtggtcaatgatctcaagggtggatactaggttgtttgggggatctacctgcagtacccagatctaagtctgtgttactctagtgcgtgcaactttgctcactctgagcagtagtatgaacctgttgtctgttcctgttgaaagatttcccattttaggtgcaaaaaaaaaaaaaaaaaaacaccgggggggccgccaataaggaagctcgtcacccggggatttattccgggccgggtccctggggggg

SEQ ID NO: 303539 - DNA, 266 bp, Zea mays
gtttcagaagatggtccagcagggtgtacggccaaatgttgtaacattttctgcgatcctgaatgcttgcagtcgctgtaatagttttgaagatgcagcccttttactggaacagcttcgcttatttgataactctgtctatggggttgcgtatgggcttttgatgggccatcgagaagcttggtctcaagcacggtccctctttaatcagctgggccgcatggattctccaacatcttctgccttttacaatgctcttaccgatg

SEQ ID NO: 303540 - DNA, 262 bp, Zea mays
atgagtccaaaatgtcagttcttcacttcagcataaagaaacacgactcttacgaagctcctatcaaatctaaggagcctttgattttcaatgttggattccgacaatttacggcaaggccactgttttcatccgacaacatcaactgcaataaacacaagatggagagatttctgcaccatggccgattttcggttgcatctgtatacgctccaatttccttccctccacttcctctaatagttttgaagaacagagatgg

SEQ ID NO: 303541 - DNA, 275 bp, Zea mays
caaataacgatggtatggctagttttcgtgcaagaagggcaatttcgtctcttcgtactagaacctatgaagaaggcactttggctgtggaggatatggattgggatgcactgacagtcaaaggaacatgtcaggaaattgagaaacgctatctacgacttacagaagcacctgatcctgccaagataaggccagaagatgttctggagaaggcccttgcaatggttgaaacatcagaaaagaattacctttacaagtgtgatcaactaaaatct

SEQ ID NO: 303542 - DNA, 260 bp, Zea mays
gtgatggcacttgctccacaggagaaggaacgaattgttgatatggcggctgctccaggtggtaagactacttacattggcgctcttatgaagaataccggaatcatctatgcaaatgagttcaatgagaaaaggttgcatggacttttgggaaatatccatcgcatgggtgtgacaaataccatagtttgtaactatgatggtaaagagctacccaaagttcttgggatgaattcggttgacagagtattgcttgatgc

SEQ ID NO: 303543 - DNA, 221 bp, Zea mays
cttcgactgcggatacaatgccatcatcggtaggcctggattggcgaagttcatggccattccacattatacgtacatgatattgaagatgccaggaccacaaggaatcataaatgtacgcgctgacttccaaggcgccgcagagtgtttccgagtggtcattcaggcggccctcaccaccaaaccatcagcgacttcttctacgcaggcgaattcaaagc

SEQ ID NO: 303544 - DNA, 271 bp, Zea mays
agaaactggagattgcagaggcaaactcgaaaatactgaaagaaaacgctgagatgattaatgagtacttctctattcacgttgatcacgatgggaacttgaccaggcttccagttgtacttgatcagtacacccctgatatggaccgtctcccaaattttgttttgactatggggcacaatgttacctgggatgatgagaaagagtgcttcagaacggcagcagctgctattgggaacttctacgcactccatcctcccatccttccaaa

SEQ ID NO: 303545 - DNA, 256 bp, Zea mays
cgggagcagtcaagaagcagcaggcaaaggagaagacacctaacagtagcagcaagagtaacaagcctagttcaaaagtgcagtcaagagcagagtctcgatcgaaggctaaggtccccaaagacgaagaagagagcggtgacgacgacggggacgaggaggcggaggagcacgacaacaccctgtgtggaacctgcgggaccaacgacggcaaggaccagttctggatctgctgcgataactgcgagaagtggta

SEQ ID NO: 303546 - DNA, 272 bp, Zea mays
cttccctttcttgtcgtcgtccctatcactgtcacttgtatatggacatttagcgataaagtgaccggacttaccacacctgtagcaaaccctcttaaagcgggcttcccctttctttgcttgaggatttaccagaagatcttgatgataagagtcatttcctcattatcaagcttggaggggttgattgggagtctacttggtgtagactcttccttcttctcttctgttgctttgaatgcaacgggttgcacctcaggtgtgaaggtggc

SEQ ID NO: 303547 - DNA, 274 bp, Zea mays
caatatcatgcaataaatctctgtgcgagtttacggaccagacccggaccatgagaggagggatatcgtttttcctctttagtgtgcagcagtgccatccctgacaacagattcggagaagaagggcccagtgataatggaaattccactggaccaaatccggaggccactgatgcgaacgcgggccaatgatccagtcaaggtgcaagaactcatggacagtatccgtgtcatcggcctccaagtacctattgatgtgttggaggtcgatggg

SEQ ID NO: 303548 - DNA, 273 bp, Zea mays
aggtttagtagggctactagaaagaggagcttgggacagagctagcaagatatgaaccacgagcagaggttgtcccttgaaagaagcaccgaccgaacaggtatcgagatatgcatctggataggttgttttagctagctaggcatttgcttgtgattaatacttcttttcttaaggttaaggtagttagctaagcaagtatgtattcacggagaagcaatggtataggttgaggtttagaaagctaagtaaagtatttcaagtatgcatgcg

SEQ ID NO: 303549 - DNA, 273 bp, Zea mays
gcgagaacagggctctcaagataatttccggtcttcagaactttgacaggagcagtgttgcatctgttgtcacagctgcagataagatgagactagcagagctactcgaagaggaaggagctgatataatccaaactgagggtgggaaatgttctagcccgacaaaacctggagtgcttggattgattgaaaaggcaacaccaacactcgccgcagcatactccatctctcgggctgttagtattccagtgatgtgctcgtcagggttaagct

SEQ ID NO: 303550 - DNA, 272 bp, Zea mays
atcttgtgctgctgctgttggacaagatatgataaattcactggctgctgatgatgataaggaaaagtatgggcgatatcttcgcagatcttacattgaggataatagaaagacaaaatggtgtcctgcgcctggatgtgaatacgcagtggaattcgtcatgggcagtggcagctatgatgttaattgcaactgttcatatgggttttgttggaattgcaccgaggaagctcatcgtccagtagactgtgccactgtttcgaagtggatcc

SEQ ID NO: 303551 - DNA, 271 bp, Zea mays
atgcagtccattgaaaacaaaagcgataggaggctctgtctcaccatttgcgttggttataagaggcggttgccatttcgatgacaaagttagaaatgcacagaatgctggattcaaggctgctgtagtatatgatactgaagacaacggtgtccttgtttcaatggctggaagctcgtctggagtccacatatatgcagtgtttgtctctaaagcgtcaggggaggagctgaagaaatattcaggccaaactgacgcagagttgtggata

SEQ ID NO: 303552 - DNA, 270 bp, Zea mays
catgtgcgtcgagcacagggctttcccgttaagaatcgtgcaggtcgtcgggtacttgtcggacaggtcctggaagatgaggcgcgcttcttggatcttggaaccaccctgaaaaacatgacaagtcatggtgtacagtactacttgaacaacaccaaaggttcttcggaaattcaagtgcctggactgaaggaaactctagaatttatagccaaggttgccactcatgccatttcttccagcagagatgtatgtgtgtgcctaccagca

SEQ ID NO: 303553 - DNA, 291 bp, Zea mays
cgcgcttcgcccccgacgagctcacgctctgctacaagacgctcaatgacgcctgcccctactccaagttcgcgcacctcaccgccaaccaggccatcctggaggctacgggcgcggcgaccaagattcacatcgttgacttcgggatcgtgcagggtatccaatgggcggcgctgctgcaggcactcgccactcgcccgggggagaagccatcccgggtacgtatctccggcgtgccttcgccgtacctggggccaaagcctgcggcgtccctcgccgcaaccagtgccc

SEQ ID NO: 303554 - DNA, 267 bp, Zea mays
agcagaatcttaaggaccatggtattactggtgtttttggtcctgtattagaactggttgattgtgaagagaagttctttacagctgttgaggtcactgctgcaaatagcttgttccatgtggttgtcgagaatgatgacatatcaacaaagatcattcaaatattaactagagaaaaaggtggaagggtgacatttataccattgaacagagtgaaagttccagatctcagctgtccgcaaagtcctgattttgttccattgttga

SEQ ID NO: 303555 - DNA, 242 bp, Zea mays
agaagctgatttccagtgggtatgattataaagctgttagaagatggacaacaaaaaggaagttagggtacagtctaattgattgtgacaagatatttgttcccatacacaaggaagtccattggtgtttagcagtcatcaacatcagggacaaaaagtttcagtatctagactcacttggtggcatggacatgaaggtcttgaatgtcttggccagtatattgtggatgagtcaaggccaa

SEQ ID NO: 303556 - DNA, 234 bp, Zea mays
tgcgtataagtcggtacaggcgtacagttcttaggaatgctgcttgtcaccttgctgtttgccatcctcagccacatttcacctgcgaatcgcggaaggctcatgacagcaatgctcctcctctgggtcttcatggggctgtttgcaaggtacgcctcatcgcggctttacaggatgttcaagggctcgcagtggaagaatgtcaccatcaagaccgcgctgatgttccctggc

SEQ ID NO: 303557 - DNA, 219 bp, Zea mays
atcagcttagcccgccggcgatcggcatcgcggtggagtgcgtgttcgcgccgttcctgggccgcgaatgataccagccggtggtggacgagaatgtggataagctcaagaaggtgctggaagtgtacgacgcgcgtgtcggcacgtgcacgtacctcgacggcgacttcctcagcctcgccgaactcagacgcttcacgatcatgcagtggctcatgg

SEQ ID NO: 303558 - DNA, 228 bp, Zea mays
gacatattgatatgcaattggtttggtatttgggctggaatgcaaaccgtgcagtacttcgatgggaggacatacgaatgggctggtttgagccgccaacccaacattatcagtaaggtaaaaaggatgctgggacagttcacaccagcacagtgggacaacgacgagtggcaacctacgctgggtccttggagattcatccaggtgctgagcccttgtgttgttttc

SEQ ID NO: 303559 - DNA, 183 bp, Zea mays
cgcgattctatttacgagcatgtcggcctcttccaatattagcgaataagtttgtcatttcaaattctctcgctgtaccattgacgattgtatttgtgtggagttatatttgaaattttaatgatcaaaaaaaaaaaaaaaaaaaaaaaaaaaaaaaaaaggcgaaaaaaaaaaaaaatcaaa

SEQ ID NO: 303560 - DNA, 241 bp, Zea mays
atcttttacagtacaggactattaagtttcctgatttcgtggatgcaaaatttggtgaggaagcttcagctttgcttccaggttgctgtgttgtagttttacgtgaagggcatcaggatataggatccatagctacagatccctcggccattgccattgtttgctggaaaggaaagaccaatttgtgcgtcatggtttctccgctagatggtaaagaattgcttgagaggatttctttgcg

SEQ ID NO: 303561 - DNA, 229 bp, Zea mays
gggaagaccatcaccctcgaggtcgagagcagcgacaccatcgacaatgtcaaggccaagatccaggacaaggaagggatcccgccggaccagcagcggctgatctttgccgggaagcagctggaggatggccgcacccttgcggactataacatccaaaaggagtctacgctccacctcgtgcttaggctccgcggtggaatcattgagccctctctgcaggcgctcg

SEQ ID NO: 303562 - DNA, 125 bp, Zea mays
cggcgaccagaggctgctggacgcgagccaccgcgacctgcgccgcgcccgcgccgccgcgctcaacatcgtgcccacgtccaccggtgccgccaaggccgtctcgctggtgctccccaacctta

SEQ ID NO: 303563 - DNA, 282 bp, Zea mays
gactagttctagatcgcgagcgccactgtccagtgcgcgcgtcaagcttgcttagctagccgccatggcctccctcgccgccgtctccgtgaagcccgtggccatcaagggtctcgccggcagctccatctccggaaggaagctcgccgtcgccaggccgtcggcccgctccatccgcatgccccgcgcaccgccgtggtggccaagtacggcgacaagagcgtctactttgacctcgacgacatcggcaacaccaccggacagtgggacctctacggctct

SEQ ID NO: 303564 - DNA, 258 bp, Zea mays
tgccgcttatcatggtggcgctgcaggaggaatcattgatgccgatcgtgcctggcgagggcccgtttgggatgatcatatgcccgtcgcgggaactggccaagcagacatatgatgtgattgagcagtttctcattccacttaaggaggctggttatccggagataaggcatttgctttgcattgggggtgtggatatgaggacacagctcgatgtgttgaagaagggcgtgcacattgtggtggcaacgcctggtc

SEQ ID NO: 303565 - DNA, 278 bp, Zea mays
catctagctccctaactgcaccggccgccacaccaccccgaccggaccctccacaacaatggccaccgtcctgggcagcccccgcgcgccggccttcttcttttcgtcgtcctccctccgcgccgcgccggcgcctaccgccgtggcgctgcctgcggccaaggtgggcatcatgggccgtagcgccacacgcaggcgcaggctgcgcgcgcaggccaccttcaacgtgaagctgattacgccgtatggggaggtggagctgcaggtgcccgacgacg

SEQ ID NO: 303566 - DNA, 287 bp, Zea mays
aagagaaccatggcccagagtatctgagcctgctaaagatcttgtcaggcggatgctggacccaaatccattgacacggtttactgcagcacaagtacttgagcatccatggttacatgactctaaaaagatgccagacatttctcttggtgatactgtccgagcaagactgcaacaatttgctgcgatgaacaagttaaagaagaaagcattaagggtgattgccgagcatctgtcagtggaggaagtagctgacataaggcaaatgtttgacaagatggacgtga

SEQ ID NO: 303567 - DNA, 266 bp, Zea mays
cggacgcgtggaagatgataggcatgtggctgtgaagaagctggagaatgtaaggcaagggaaggaagtgtttcaggctgagctaagtgtaattgcggacgctcaaccacatgaaccttgtgaggatatggggcttctgttcagagggatctcataggttgttggtctccgaatatgttgagaatggatcactggctaacattttgttcagtgaaggaggcaacatcttattggactgggagggaaggttcaacattgcgttaggt

SEQ ID NO: 303568 - DNA, 267 bp, Zea mays
cccacgcgtccgcccattccatgttgatgaccatgtctcctgaatggggcagctcaccctcccattttggaatatgatcaagaattagataaggagagcttaaatccaggagaacagatttacgagaagttaacgtcaggaatgtatttaggtgaaattgtaaggagggtgctccttaaaatatcattgcagtccgccatttttggtgatattgaccacactaagcttcaaacccatttccttctgcggactccacatatttcagca

SEQ ID NO: 303569 - DNA, 274 bp, Zea mays
gatctccctccgccactcccgtgcatctcctcgctcccagtcgcccggaaggtacgaagcgtggcgtccgtcaccgcccgctccccggtcgcggcgcttcgcccgtcgtcggccttccttggccgctctagccgcctcgggcgcaccgcgtcgcccacgatgcgcactcgaaggcggaggccaagggcgagtggctccccggccttgcctccggctcgtacgtcgacgggagcctggcgggtgacaatgggttcgacccgttgagcctggcgga

SEQ ID NO: 303570 - DNA, 292 bp, Zea mays
gcccggtgcatgttatgaccaagggtctgatttacttgggcatgaggctgctgaaattgcaccttcccgtgaaacttgtggacttcatcatcttgaccttggcaaacatccagttcggtgacctctcccgctacggcatagtcaggcccgacatgggcccgcttcttctcaaggccaagactggccggtcggcggtcctagacgttggcacaacccagttaataaagacgggcgatatcaaggtggttggggcgatatctcgcatcagaggaaacacgatggatttcgagga

SEQ ID NO: 303571 - DNA, 296 bp, Zea mays
gcggcagtgcgtagagaggatcgtcgaacagaacagcatgaagatggtcatcgttctcgtcgtgtgcctggctctgtcagctgccagcgcctctgcaatgcagatgccctgcccctgcgcggggctgcagggcttgtacggcgctggcgccggcctgacgacgatgatgggcgccggcgggctgtacccctacgcggagtacctgatgcagccgcagtgcagcccgctggcggcggcgccctactacgccgggtgtgggcagccgagcgccatgttccagccgctccggcaacagt

SEQ ID NO: 303572 - DNA, 275 bp, Zea mays
agccagcaagccagcgcacgtcggtaggcacgccaccatgccggggctcaccatcggcgacaccgtccccaacctggagctggactccacccacggcaagatccgcatccacgactacgtcggcgacggctacgccatcatcttctcccacccagccgacttcacgcccgtgtgcacaacggagatggcggcgatggcggggtacgccaaggagttcgagaagcgtggcgtgaagctgctgggcatctcgtgcgacgacgtggagtcgcacaggc

SEQ ID NO: 303573 - DNA, 287 bp, Zea mays
  unsure (1)..(287): unsure at all n locations
taatctcggctttcccggaggaaactccaccaagccccaccaacaagaccccgaagccggaaagaaagcccatgttccggggccgcggtaaagggtgggcaanggggctcggcaagggcggcgcgaacgtcaccggaaggtgctgcgcgacaacatccagggcatcaccaagccggcgatccggcggctggcgaggaggggcggcgtcaagcgcatctcggggctcatctacgaggagacccgcggcgtgctcaagatcttcctcgagaacgtcatccgcgacgccg

SEQ ID NO: 303574 - DNA, 264 bp, Zea mays
ctctgggcagcgtgcgcacgtggggtacctagctcgctctgctagcctaccatggctgatcaccaccggggtgcgacgcgaggtggcgggggctacggcgacctccagcgcgggggcggcatgcacggcgaggcgcacagcagcagaagcagggcgccatgatgacggcgctcaaggccgcgacggccgcgaccttcggcgggtcgatgctggtgctgtccgggctgatcctggccggcaccgtgatcgcgctcacggtggcca

SEQ ID NO: 303575 - DNA, 269 bp, Zea mays
ctgggagagacttcgattgcatcatcgatttcgtatcttgataatggtgttgtttacgttggttcacggtttggcgattcacagctggtgaagctgaacctccaagctgatgcaagtggttcatttgttgaaattcttgaacggtatgttaatcttggaccgattgtggacttctgcgtggttgaccttgataggcagggtcaaggtcaggtggtcacttgttctggggcgtttaaagatggttcccttcgggtggttgtaatggtata

SEQ ID NO: 303576 - DNA, 271 bp, Zea mays
cggctcgagtcaagttagaagaagcaccagtgcctgatcgatggcggcccaggctctcctctccggccggcagctgctgggccgccccgtgcagtcggccgtctctaggtcgtcggcgaggaaggcgcccttcgtcgtcagggccagctccagccctccagccaagcaaggtgccgacaggctgcggtggttcgcgtccaagcagtccctctcgtacctcgatggcacgctgcccggcgactatgggcttcgacccgctggcctctcggac

SEQ ID NO: 303577 - DNA, 262 bp, Zea mays
ctcagaggtgggttggcttctcctccgccactggttcgtgttcagggtctggttcgtgggcgagagggaacgagatggcggcgtccgacgttgagtaccgttgcttcgttggcggcctcgcctgggccaccgacgaccagtccctcaacaacgccttcagcacctacggcgaggtcctcgagtcgaagatcatcctggatcgggtgacgctgaggtcccgcagcttcggcttcgtcagcttctccacggaggacgcatgcgc

SEQ ID NO: 303578 - DNA, 259 bp, Zea mays
ggcgagtggaagaagaaaagctgccccactttgcttcgcttctccgctccctgccttctttctttcttccgcgattgtgctgtgtccaactcaaacaacaacagcaacaacaaagaaacctccccttcatcgtatccaaactccaccaccaccatcatcgaatcgaaaccgccatgaccaccagcatcgagtacgactatctcttcaagctgctcctcatcggcgactcctccgtcggcaagtcctgcctctcctcggt

SEQ ID NO: 303579 - DNA, 258 bp, Zea mays
atcgcctctcttccccttccctccctccctctccccgcggaccgccagaggcaatttcgccctcgattcgaccccgattcgtccgcccgcgaccgggattccctccgccaagcgcggatctgaacgctgcgctccgtgtcgccgctcgaatccgccatgaagggggccaaatccaagggcgccgccaaggccgatgccaagctggcggtgaagagcaagggggcggagaagcccgccaagggcaggaaaggaaggccg

SEQ ID NO: 303580 - DNA, 165 bp, Zea mays
acaagctcctgaggtaggatgatttctacctgcaagagtatttttattgggagcatggtgggatagttccatataatgcacattgaaagggaattaggcttacacctagttcctaaataattttggtataagttatacaggtgcaaaaggtacacacttacatca

SEQ ID NO: 303581 - DNA, 162 bp, Zea mays
aaggcctaatgaagatcctcacggaaaggggttattccttcaccacgacggcagaacgggagacataaaggagaagctggcctttgtcgccctagactacgagcaggagctggagaccgctactcacgatcggcgcggagaggttcagatgcccagattccc

SEQ ID NO: 303582 - DNA, 188 bp, Zea mays
ggcgacgcgacgccactcttggtcgtctcataggcgacgccatgcatgagaagtttcacgtaagccttcttctttccatcaggcctgatcagggtgttgaccttcttggcctgaatgtcatacatcttcttgacagcagccttgatcttctaatctgccttgaggtcgacaatgaagaccagagtgtt

SEQ ID NO: 303583 - DNA, 188 bp, Zea mays
cttttgacaaaattcgtgtgaacccaggaaattttgctgatcgtcgtgctcaaattgaaaaggctggaatatactgacgacgactaccaaaaagagctagagcatattgagaaggtgttttctccattagtcgagaaatgcaagcagtatggaagagcaatgcgaataggaacaaatcatggtagtct

SEQ ID NO: 303584 - DNA, 252 bp, Zea mays
aaaatcgattgttgagttcgaaaatgctcggattcttgtcactgatcagaagagatcatcgagaaaagaaattaggccgcggttggagcagacaacacagttaagagcaccagttctgataattgcagaggaggtcagtgtggaggcgctggcatcagtagtcataaacaagcttagaggaatgttaaatgttgctgcaatcatagctcctggttttggtgagatgcgtaaagctcttctgcaggacattgc

SEQ ID NO: 303585 - DNA, 250 bp, Zea mays
cctaaggttgatgcccttgggagactgccattttcttctgtacggagaccgcgtccactccttgacgttgagccagcttctgcaactgatgatgacaccgttatttcaaagcctcttgatcaggaacctctgctagctgctaggatcacgattgaggatggactctccctattacttgacatagacgatattgaccgcttgcttcagtgtagccagcagcaagatggtggttttgcacttaaaaatagaa

SEQ ID NO: 303586 - DNA, 272 bp, Zea mays
ctcgagccgctccaccatcacccgtgccaggtttgaggagctcaacatggacctgttcaggtagtgcatggagcctgttgagaagtgcctgagggatgccaagatggacaagagcaccgtccatgacgttgtacttgttggtggctccactaggatccccagggtgcagcaactgctccaggactgcttcaacggcaaggagctgtgcaagaacatcaaccccgatgaggctgtcgcctatggtgctgctgtccaggctgcatcctgagcgg

SEQ ID NO: 303587 - DNA, 173 bp, Zea mays
agagattcctgccaaaaattctatcaagcagaaatagaagaacacgactttatcagcgccgtagagaagtccagaaaacacataaacacctgggtagctgaaaagacagacggtagaattgcggagttgctctctccgggctcagtggatccattgacaaagctggttctggt

SEQ ID NO: 303588 - DNA, 266 bp, Zea mays
ctcgagccgctccaccatcacccgtgccaggtttgaggagctcaacatggacctgttcaggaagtgcatggagcctgttgagaagtgcctgagggatgccaagatggacaagagcaccgtccatgacgttgtacttgttggtggctccactaggatccccagggtgcagcaactgctccaggacttcttcaacggcaaggagctgtgcaagaacatcaaccccgatgaggctgtcgcctatggtgctgctgtccaggctgccatcc

SEQ ID NO: 303589 - DNA, 261 bp, Zea mays
agagtttcagtgattcagcaggactttcttgcttgaacatgaaatgttcagattctggcaaggatacctttctttatggtgataaatttgtgaaaccaaaagctggtacgggtgacagtgagtgcctgctcccgtttttcaagcgtcgcacgaagttgcctgatccagttgagaaggaaaaaagtgttagtctttggtcaatgatcaaggataatgtcggaagagatcttacacaagtatgtcttccagtttactttaacg

SEQ ID NO: 303590 - DNA, 261 bp, Zea mays
gcagccattgggcaccgattttccttctcctacaaggaatacgctggctccaatgcccgccctttcggtggctttaggggaagccttcttcacgcgatgaaattcaatgacttctatcatgacactgtacacagtttgcacctacatatcatgagtatgtgctgtacagtaacgagggggaggatgaaccaacaaaatacagccccagcactatggtgccaaccggagagcacatagtggagctggcggaagtcaccgttg

SEQ ID NO: 303591 - DNA, 266 bp, Zea mays
cgaccgcgacggcagcggcatgatcgacgacaaggagctgcagtccgcgctgtccgggtacaaccagagcttcagcctccgcaccgtccacctcctcatgtacctcttcaccaacaccaacgtccgcaagatcggacccaaggaatttacttctgtgttttacagtcttcagaactggagagcaatatttgagaggtttgatcgtgatcgaagtggcaggatcgacatgtcagaactgcgcgatgctcttctcagtctcggatatt

SEQ ID NO: 303592 - DNA, 121 bp, Zea mays
aagtaacaggtggaattgaggagagagtaggatgctgatttacctaaccgtagcccaggtctgtgccttccccatggcccagaatcttgtgacaaatgtcaatcaatctggacaccacgaa

SEQ ID NO: 303593 - DNA, 193 bp, Zea mays
gtgcatgccgcgtcgtcggcggcaaagcagaggcgacgacaggttcggagcctgctcaggcgtctcaacaagcccgctctcgcgaccatcgagagcccagatggagataccatagactgtgtgcacatctccaagcagcctgcgttcgaccatccttccctcaagaaccataccattcagctgatgccctcct

SEQ ID NO: 303594 - DNA, 266 bp, Zea mays
gtaagcaagtaaacttactgacgtgtcagtgcgtgataaacttgaaggcttccgtgataaaagtagcgaacttaaaaggtttgagtgttcctacaatttcatctgtgggatcaaatgcagcagctattcactatcgacctgaagcaaacacatgttcggacatggttgctgttaaaatatatcattgtgactctggggcatagtacctggatggtacaacagacattacgagagactgtagattttggtccaccctcggcatatga

SEQ ID NO: 303595 - DNA, 259 bp, Zea mays
  unsure (1)..(259): unsure at all n locations
cttagcataattttgttctggattcagtaaatcaagtcagattggatcattcaccttaacttttcctttagcagccatttccactagtttccattaactagtgttccataaactttgatccaaagcagaatcaatgtcttttccatctcgtgacttaaagttctgtgactgtgatgcatgtgagtgttccgacttcatctgttcctcttcaatacggtgcctgncttaccatggcattcataggatgaaatgaatgact

SEQ ID NO: 303596 - DNA, 261 bp, Zea mays
gaccatggaaaccatctgacatgcctggtttctctcttgatgcacctccaaacctaaggacatcgctaccagaaagaccaacctctgccactaggggcagacctggggcacctagttctagatcttgctctgttgagagtgggccagctggtcgaccaagacggcagtcttgctctccctccagaggaaggactttaagtggcagcgtgcttcagggagctccatgccagcagtgagaaggtcacatctcaatggaggtga

SEQ ID NO: 303597 - DNA, 260 bp, Zea mays
ctcaaggctaagatccaggacaaggatggcatccctcctgaccaacagcgccttatctacgccggcaagcagcttgaggacggccgcacacttgctgactacaacatccagacggagtcaccccttcatttggtgctgcgccttaggggaggcatgcagatctatgtcaagaccttgactggcaagacgatcacccttgacgtggagtcctcagacaccattgacactgtcaaggctaagatccatgacaaggagggcat

SEQ ID NO: 303598 - DNA, 157 bp, Zea mays
tgtatattaaggggaagcttttgccaagttgtggtcttcaaatttatgtttactcttcctattggcagaataggtgctatttaagagtaaaccaaaggataagcagagggagtccctataaccaaagatcaacagcatagccctggatagccagata

SEQ ID NO: 303599 - DNA, 269 bp, Zea mays
caaacttatagctaagctgcaacagtattgccatctgttggatgacttgacaccagaattgttggagggcaaaagctcaagctacgacgatttgcgggagtacctgcgtaacgagggcgtgaagcttacttccagaaaactgaaattgtggagaagcaagctcctggattgatgaaggaagctgagcggtttctaattctcagcaatattgataggctgtggaaagagcatctgcaggcactaaagtttgtccaacaagcgttggttta

SEQ ID NO: 303600 - DNA, 267 bp, Zea mays
tcaggaacttatgatatgggacaccaggtccaaattcatctccaagccgagtcacttggtggatgcgcacactgccgaagtcaactgcctctcattcaatccctacagcgaatttattctagccaccggctctgtggataagaccgtagctttatcgatctgcggtaatttaaaattaatactccataccttcgaatctcataaagatgaaattttccaggtccactggtctccacataatgttactattctggcttcagtggtact

SEQ ID NO: 303601 - DNA, 99 bp, Zea mays
gaattccttaatacctttatttaaaatggccccaatatggacaatattttagacatatgttctacacatctaagaaaacaagtagtttaagtgatctaa

SEQ ID NO: 303602 - DNA, 265 bp, Zea mays
cctcgagggcgtttcctcctccagaggcctgcacgcggggcgcgggccccgtaggctctccatcgaaggcaacattggcctgcactgcccaaagtcttgggcacttgctggatatgatgttccgggagtcagcacgatggtcctacacattccagacattttccttttcgagccgcctgaatgtttaactggagcccttccctgagaaactcttacaggccaggacgccagtacagatctttgagaggtctgtgtacgtgacagg

SEQ ID NO: 303603 - DNA, 249 bp, Zea mays
ctcagaccgtgctctgtcggaccgagacatttggacatcctggggagtgctcgcaaatctcagctgttgctgaggaatgggctgggaccccttcccatcccaaccttgagccccaggagataccgcgcccacacccaatcttgggacactccctatctggttggaagagagtaaccagtttccagagagccagagagtgagagagagaaagagagtgagacagatagagaaagagagagaaagatgctg

SEQ ID NO: 303604 - DNA, 252 bp, Zea mays
cagcaacccccaacagcgccactgtccagtgcgcgcgtcaagcttgcttagctagccgccatggcctccctcgccgccgtctccgtgaagcccgtggccatcaatggtctcgccggcagctccatctccggaaggaagctcgtcgtcgccaggccgtcggcccgctccatccgcaggccccgcgcaccgccgtggtggccaagtacggcgacaagagcgtctactttgacctcgacgacatcggcaacacca

SEQ ID NO: 303605 - DNA, 272 bp, Zea mays
agataataagggtgaagcaagaagcatttcatttgcacatctttcttggacgtgggatatacagttcaagtttattagcagcaactgctagggaaatgattttggtgttttgggttaattgcttctaagaaaagtttcatagtggactgtttagaagaagtgatgaaagatccagtttgggattatgaaataaaccacgaattaggatttatgtatttactagtccagatctgatttacaaatatggtcttagtattatatgattaatggtt

SEQ ID NO: 303606 - DNA, 268 bp, Zea mays
ggaaatcctgtgggcctttctgtcccacccctgtcagcactgtgctactgatgatacatcaccctggggaattcaaccctggtatatcccaactgaaggccacaaaaatgaactccatctacaagtgattacctagttgtgagctgttggcatgtggttagaagccatcagaggtgcaagggcttagaaaagaccctggccagaactgactccactcttaaacctgggtcttctccttggcggtgctgtcagcgcacagacccatgcg

SEQ ID NO: 303607 - DNA, 270 bp, Zea mays
tgctcgagcgactcggctgagcgggctcgagggcgactctggaccgtcgaccaccacaggacaccttatactacaagcttggaacgaatgcacggcacgtgatcgagaggttcgagaaggaggctgctgatatgaacaagcggtccttcaagtacgcgtgggtgctcgacaagctcaaggctgagcgtgagagaggtatcaccattgatatcgctctgtggaagtttgagaccaccaagtactactgcacggtcattgtgcccctggaca

SEQ ID NO: 303608 - DNA, 261 bp, Zea mays
cgacctgaccgaggacaacgtccgggtggccctagacgaagccaaatccgagctagggcagctgttcgacacgtcggtgggcatcacagggcaagttgacctcgcggagttggacgggccgttcgtgaagctccggctcaagggcaagttctggcacacccgcgccaccgtggtcgcaaggatcggaaactacctcaagaaccgcattccggaaattttggaggtggagatcgaggacgagaaacagctggatgatagtcc

SEQ ID NO: 303609 - DNA, 181 bp, Zea mays
acggaggtcttccatcccaggcctttgaatacatcatatacaatggtggccttgacactgaaggaatcttaccctgtaccaagtgtgtcagatggaattcttgccaagttgtagagaatgtgagaatgttcggagtccaaggttttggactcggttaacatcacccttggtgctgaggatg

SEQ ID NO: 303610 - DNA, 275 bp, Zea mays
ggctcgagctggcgaaaattggcaactcagtgaaggattttccagcatgtgcaaggtgaagaatatggggctgcgttttgctgatctcctggatcgattatctttggaatacccttagatgcgggtcaggtgtacctcaccacacccaaaggatttcccagatgagctactgtatttgatgcgggataggtataacatctgcaatcttattcacttaccagcacaaacaggcagtacagcggcgctggaacgaatgcggaggtgttacactcgag

SEQ ID NO: 303611 - DNA, 287 bp, Zea mays
acccatatccgctcccctacctcgcgagcatctcccgtctccttcgtctcgtctctgctcctcacctctccgcgagccatgggcgagatcaagatcggaatcaacggtttcggaaggatcggcaggctcgttgccagggtcgccctgcagagcgaggatgtcgagctcgtcgccgtcaacgaccccgtcatcaccacggattacatgacctacatgttcaagtacgacaccgtgcacggccaattgaagcacagcgacatcaccctcagaggactcaagacgcttct

SEQ ID NO: 303612 - DNA, 120 bp, Zea mays
tctggccctacctaccttatagggatggtgagatagcacagcagaaatattctgagctcacgaaaggaatgccgtcacttagatctgagaggtactatacccctttcaaagaagatccca

SEQ ID NO: 303613 - DNA, 99 bp, Zea mays
cttgatttggatgattgtgtgactattcatggctacctcagaaagatctgatgggccacaactgtcttagactgctagctttctccttaccgtcttgat

SEQ ID NO: 303614 - DNA, 251 bp, Zea mays
ctggaaatgtggctaaaaagaatactgtgaatggaacagggactcctgtacatattagcactttgcaggttggtgagaccagaagcaacagagcttgtacttctaagtctgatctgagatctaatgacttcagcattgttggaagactaccaagagattttgaactatccaattatgactgctatggataacccattgaagttaaccacggacttaggacatctcaggctaagaacagctagaagctcccc

SEQ ID NO: 303615 - DNA, 202 bp, Zea mays
gtacgcacttcgtgtttggttagacccagaaaaaatggcggctcaaaacctttcggcaacacaggtgatgtcagcattatcggcgaataacgttcaaacagcagcaggtaatgataatggctattttgtgacctataaaaacaaagtagaaactacgacaaaatcggttgaagaattaagcaacttaattgtgacatcaaac

SEQ ID NO: 303616 - DNA, 260 bp, Zea mays
tgaaaatgtctgtacagccaacggtttcccttgggggctttgaaataacaccaacagtggtcttaaggttgaagtgtggttcagggccagtgcatattagtggacagcacttagtagctgtggaggaagatgcagtgtcagaagatgaagaggaggaggatgtgaaactcttaagtatatctggaaagcggtctgcccctggaggtggtagcaaggttccacagaaaaaagtactaattgctgctgatgaagatgatgac

SEQ ID NO: 303617 - DNA, 117 bp, Zea mays
cggctcgagctggtgtagctagaatgatgaagctggtatctccaagaatgggcagacgcgagagcatgcccttctggcttacacactgggtgtgaaagaactaattgtcggtgttaa

SEQ ID NO: 303618 - DNA, 258 bp, Zea mays
gcttgatgtatcacgcatttggcaactgacagagaattcaatagttgtccggtgggagctgtggggcactccacgtgttccatgggaatcgtatggctgcttcagtgggacgtcgagatacaaggttgacaggaacgggaaaatttacgagcacaaagtcgacaacttggcattggacttcccacgatcagtagcgaaagtgggcagcattgctgacatggtagtcgccacaccgagccccaatttaacgttctggaa

SEQ ID NO: 303619 - DNA, 217 bp, Zea mays
ggaagctgccagcccagttcacccctaatgatggtgtgagatgtgccttctccttcaccaggatggactcttctcggctcaggctctgctggtggaaagcgattcactgtataaactttttcttatgaaaaatatggcatcaaccaccatggattactacaagatccatttgcgcttctgggagcagaacagccattgcggccccaggaggggaact

SEQ ID NO: 303620 - DNA, 271 bp, Zea mays
cgaacaactatagctgggcgatccggaaaggctattacttttgtcacacagtatgatgagtaactctaccagcgcatagaacacttaattgggaagcaactaccaggttatccaacacaggatgatgaggttatgatgctgacagatcgcgtcgctgaagcacaaatgtttgcccgaatggagttaagggagcatggagataagaagaaacgctcgcgaaaggaagctggcatataatgatgacacagagggtgctattggtgtcaggaac

SEQ ID NO: 303621 - DNA, 269 bp, Zea mays
gtcccggagcccacggtggtcatggcagccagagcgctctgcatgctggggctggtcctggccttgctgtcatccagctctgctgagcgagtacgtgggcctgtctgcaaaccagtgtgccgtgccagccaacgacagggtggactgcggctacccccatgtcacccccaacgactgcaacaaccggggctgctgctttgactccaggatccctggagtgcctaggtgtatcaagccccggcaggaagcagaatgcaccttctgatgca

SEQ ID NO: 303622 - DNA, 259 bp, Zea mays
cctgaaatggcaccagcagagagatcctggcagtaagaaagattattcccagtatgaggaaaacatcacacacctgcaggagcagatagtggatgacaagatgaccaatgctcagattattcttctcattgacaatgccaggatggcagtggatgacttcaacctcaagtatgaaaatgaacactcctttaagaaagacttggaaattgaagtcgagggcctccgaaggaccttagacaacctgaccattgtcacaaca

SEQ ID NO: 303623 - DNA, 265 bp, Zea mays
caatccccaaggaccttaaccggtgatggggaagatcccatttcaagtggacggtatctgatgcaggagctgatgggcacaggactatcagcgcagagtgtgccggaatggaagatgacatatgggaaggccggaacatatgggcagaagtcgaggctgtcgatccaggagcagagacaaagccttccaatattcaggctgaaaaaggagctgatcagtgctgttaatgacaaccaagttttggtggttatcggtgagactggct

SEQ ID NO: 303624 - DNA, 260 bp, Zea mays
agaatatactgaagttcataaccgaagattgccacttccccaacagcatcgagaaggcaatcagaagtgctttcgtaaaggctgaccatgcgattgcggattctcagtctcttgaccggaattctgggaccacggcgttgacggtccttatatctggcaggacactgcttgtcgcgaatgctggtgactgtagagccgtattaggaaagcgaggccgagcttttgaactctcgagagaccacaaacccagctgcagcgtt

SEQ ID NO: 303625 - DNA, 134 bp, Zea mays
ggacccgccagcatccaggtggccctgtcgaggttgtctccctaccttggctcggcccaccgggtcagcgggctcatgatggccaaccacaccagcatctcctcgctcttcgatagaacctgtcgccagtatga

SEQ ID NO: 303626 - DNA, 182 bp, Zea mays
tatgcatttgagctgtttagcagaatgcgcagtgaggctcaggtgatgcctgaccatattacttttgttggagtcctatctgcttgtaaccatggaggaatggtacaagaagcaaaagaagtatttgatctgatggtgactgtatattccatcaagccgacagtgcagcattacacctgcct

SEQ ID NO: 303627 - DNA, 286 bp, Zea mays
gcggtgaagctgggcatcgaggggcacgtctccatcgccaacgtgcttgtcgcgatgtactacaagtgcggcactcccggctgcgcccggaggctcttcgagttcatgggcgagcgcgacgtcgtctcatggaccacggtaatgtccatggacagggaggacgccgtctcgctgttcaacggcatgatgcgagatggggtggcgccgaacgaggtcacctttgtggccattctgtcggctatgccaggacactgcccggcaagggaagggcagatggtccacgcgg

SEQ ID NO: 303628 - DNA, 183 bp, Zea mays
catttctctagctcagcctcacaggccaaagcatcagcaccagaacgcatccccagcccaaccccaaagagatagaagagagcaaaaagctgcagccggtgcttgcacaccgccttgcacatagcagatgctccgggctcactccttcctggtggtaaaggaagatgcctgtactctccgtgg

SEQ ID NO: 303629 - DNA, 145 bp, Zea mays
aatacattagtggtagctggtttgagaagcaaagactgtaagcctgtgtgtgccactgtgtgcttcagcagtatatcctactaataagcctctctatttaatccagtgagttttaagtctggatctcattcccttcttctttccc

SEQ ID NO: 303630 - DNA, 219 bp, Zea mays
cgacagtctgcctgggccacagccctctcaccctggtactgcatgcacgcaattgtagctgcgcctctcgcgtcctgggcaccccgagtctcacccgaccccgggtcccaggtatgctcccacctccacctggtccactcaccacctctgctagttccagagtcctccacgcctacctggtcgtctcccatcgcccacaaaagggtgggcacgagggac

SEQ ID NO: 303631 - DNA, 265 bp, Zea mays
ggagcagctcttcacccttggtgattgggccaaacgcatcccccacttctcaggcctcaccttggaggagcaggtcattctgctccgggcagtgtggaatgaattgctgattgcactcttctcccaccgctcggtttctgtccaggatggcatcctgctggccacaggcctccacgtccacaggagtagcgctcacagcgcgggcgtcggctccatctttgacagagtcctcacagagctggtgtccaagatcaaggacatgcgg

SEQ ID NO: 303632 - DNA, 267 bp, Zea mays
ttttgctctaatgtatgttcatgcttcagtttggaaagagaaaaaagtcatactaatttgaatctttttcaatgtagtgcttgaattgagatatataaatttagcattttttataactatcactactatccacatcaagagaagaactatgacatcttttagaaaagggaacgaattgtcatttattggaaacattttagatccccagaggtataagtttcagaccagtctttagtgtttcaagttgttgatcagacccttctctta

SEQ ID NO: 303633 - DNA, 259 bp, Zea mays
ggctgtcaccctccaccgagccacgcagtgcctggagttgagctgactgagcaggctgttgggtgcagcactggactccggggccccactggcttgatgaagtggggtctggcctgttgatggtttacatggcgcctgcctcctggaggaccagattgctctgcctcaccttgccagggcagggtctgggctgggcacctgacttggctggggaggatcagggccctgggcagggcatggcagcctgtcacccgtgtga

SEQ ID NO: 303634 - DNA, 262 bp, Zea mays
  unsure (1)..(262): unsure at all n locations
gtgaggagttgtgcaaggtttggggaaaggaaggctggcttggcgagagggcaggtttgctggctatgcgaccctttcgcanagaccaacaaagagtccttccccaactcccaactcaaccccttttggaactatgtgtggtggttggaagcctgtggcgcatccttgtcgctcgtgtccttctcatgcccggcgacgcgtgtttgtggtaacgccctgctgccatctcttttcttctctctgcgaggatttggactggcag

SEQ ID NO: 303635 - DNA, 257 bp, Zea mays
gccgaacgtctggtaacaagattgtccgtgcttatgctaaggatcactatttcgatgttgtcacaaatgttgtgggtttggctgctgctgtccttggtgatagattctactggtggattgacccaattggtgcaattgttcttgcagtgtacacgatttcaaactggtctggaacagtgtgggagaatgcaggtttgtgttacttagggggtgtttgaatgcagctaatagttagttagctaaaaatatactattag

SEQ ID NO: 303636 - DNA, 261 bp, Zea mays
cggctcgaggccatccccttttgctgcaaatctttctctgaattgtgggtctccgacaatggcggcgctagctccatccaagattctgggcacccagctcaacttcgcgggctcctcccgctacgccaccgcagcgcccaccgcgggggctcagaagattgtctcccttttcagaaatatctgtccacaaacccagacccccgctgtatcgtcctccttctccagacatctgcgcacgaactcgccaagtggtatggtcct

SEQ ID NO: 303637 - DNA, 246 bp, Zea mays
ccggaaggcaaagcaggagcagaagcgctaccgcaacctgggcaacatcagccggggtggcagtggcggcagtggcaatggtgtggagaagcgcaacggccctgttccgcgcagccgcctggaccccgccaaggtgctgggcaagacgctgtgcccgcgcatccacgaggtgcccctgctgtagccccttctgtgcaagaagatcgcccaggagcggctcacagtcctcctgttcctggaggactg

SEQ ID NO: 303638 - DNA, 100 bp, Zea mays
gacgagatgaaggcgtctgaggacttaaagaagcatagcgccaccgtgctcaccgccctgggttgcatacttaagaagaaggggcatcatgaggctgaga

SEQ ID NO: 303639 - DNA, 253 bp, Zea mays
tgaggctgcagtcgcagaaggggtccctgggcagctgcccccaggcctgctcctgctgggccaaagcctcctcctcttcttcttcctcacctccttctagctccacctagggcttccctaactcctccccttgcccctaccaatgcccctttaagtgctgcaggggtctggggttggcaactcctgaggcctgcatgggtgacttcacattttcctacctctccttctaatctcttctagagcacctgctatc

SEQ ID NO: 303640 - DNA, 226 bp, Zea mays
ctatagcaaccggtccaacactttcacgctcaggcgctcagctctagcaatggctgcctccaccatggcgatctcctccacggcgatggccggtacccccatcaaggtgggctccttcggcgagggccgcatcaccatgcgcaagaccgtgggcaagctcaaggtggcggcttccggcagcccctggtagggcccagaccgggtcaagtacctcggcccttctccg

SEQ ID NO: 303641 - DNA, 258 bp, Zea mays
gcgggaggggagcacagctctgccaatggcgatggtgagcggggagggcccgttggctacctcgcctggaagatgatgatggatggagactatcgtaatgctgtcaaattggtcattgaatttaaggattccgggctcaaacctgaggtgtatagctatctcattggcttgactgccttggttaaagagcaaaaagaattctcaaaggctctgcgaagattaaatgcatcggtgaaggatggctcaatttctaaactg

SEQ ID NO: 303642 - DNA, 278 bp, Zea mays
ttgccaccttctgtgagccaaaactcagggatcatcgcaggtggccaaagtgcaactggcgctctgctcgattacattattgaaaaccatgtcgcttctcctcttctttctaaccatgctgcttctcaaagtatatccatatttgagctactgaacaagatgttgctttctatgtcacaagagcagaatagtccgtttctttctgcattaactcaagacacccatgtgcttccggattttcatggaaatcggtctcctgttcctgatccaaaatccaa

SEQ ID NO: 303643 - DNA, 265 bp, Zea mays
atcccaaatcctcagcacgatacgatccgccgaattaagttcctgcacgtacgcacgcaccgggacaccagcaacccccaacagcgccactgtccagtgcgcgcgtcaagcttgcttagctagccgccatggcctccctcgccgccgtctccgtgaagcccgtggccatcaagggtctcgccggcagctccatctccggaaggaagctcgccgtcgccaggccgtcggcccgctccatccgcaggccccgcgcagcgccgtggtg

SEQ ID NO: 303644 - DNA, 267 bp, Zea mays
atcccaaatcctcagcacgatacgatccgccgaattaagttcctgcacgtacgcacgcaccgggacaccagcaacccccaacagcgccactgtccagtgcgcgcgtcaagcttgcttagctagccgccatggcctccctcgccgccgtctccgtgaagcccgtggccatcaagggtctcgccggcagctccatctccggaaggaagctcgccgtcgccaggccgtcggcccgctccatccgcaggccccgcgcagcgccgtggtggc

SEQ ID NO: 303645 - DNA, 246 bp, Zea mays
cagacaagcaaggtatcccccgatggctcatcgcgttctcctcctcctctctctcgcgtcggccgccgcggttgccgccgccgtcgacgcggaggacccgctgatccggcaggtggttcccggtggagatgacaacgatctggagctgaacgcggagtcccacttcctgagcttcgtgcagcggttcggcaagtcctacaaggacgccgacgagcacgcgtaccggctgtccgttttcaaggccac

SEQ ID NO: 303646 - DNA, 266 bp, Zea mays
  unsure (1)..(266): unsure at all n locations
tcggcgtccaggctcgcgcggttcgccgacgtcctcaccggagccgccggccggaggagccgcatattccgccagttcgatcgtttcttcgattcggttatcgataagcacctcgagccggagaggctgcaggccggcgtgcaggaagacatggtcgacgcactcgacatcatgtgganggaggagcaggcggatggttatgaggctcctcatggattaacgcgtgatcatatcaagggaatcctcatgaacacatttgcaggtgg

SEQ ID NO: 303647 - DNA, 145 bp, Zea mays
cgaactgtcatgcgatcactgggtcagaacccaaccgaggctgagctccaggacatcatcaacgaggtcgatgcggatggtaacggcaccatcgacttcacggagttcctcaagctcattgcccgaaagatgaagtccaccgact

SEQ ID NO: 303648 - DNA, 275 bp, Zea mays
ggtttcttaggctggaccaggtaccattgctgaagccttgataaggggtcttcctataatccttaatgacttcatacctggacaggtttgtgttcctactattattctgcactcatgcagttttattgccataatgtgcatgtgaagtgtatgtctttttctgcatttctgatctccttaataaagggtcttagtgtgtaacgtgtttggatcatatgcgctacttatatatttgtattttgattgaatgcaatatatatgaattaaaggttatt

SEQ ID NO: 303649 - DNA, 269 bp, Zea mays
gcttaagaagtctcaagtgatcaggcaacaggagaggatcacgttcacttatgatgttgagtttgtcaagagcgacatcaggtggccatctaggtgggatgtctatctgaagatggaggctggcgccaaggtccactggttctctataatgaactccctcttggtgatcttgttcttggctggaattgtctttgttatattcctcagaactgttaggagggacctgactaggtatgaagagcttgacaaggagcgcaactcagatgatg

SEQ ID NO: 303650 - DNA, 180 bp, Zea mays
gcatcgacaaaggaaacctcatttacaagatcgatgtgtttctgacatcatgcgtatttcgtcactggaaggtctcgatcatagttttacagagcacaaagtcactgcaaccttggtgtgaaatatctgaaggtaatcaaccactgcattgactgtatcgcgtcgaaggtgtcaattgat

SEQ ID NO: 303651 - DNA, 173 bp, Zea mays
gacttgggaacaaaggtaaaaattgaaggtgacatcaatagatgtgtggcatattacaagatagctctatactacattggcactatgctgatgccatgtataatcttggcgttgcatatggtgaaatgttgaattttgagatggcaattgtcttttacgagcttgcgctgcac

SEQ ID NO: 303652 - DNA, 268 bp, Zea mays
cgatctccgatcccctcgtcgatccaagatgcagatcttcgtcaagaccctcacgggaaagactatcaccctcgaggtggagtcttctgacaccattgacaacgtcaaggccaagatccaggacaaggagggtcattcccccggaccagcagcggctcatcttcgctggcacgcagctcgaggatgggcgcactcttgccgactagaacatcccgcggagagcatcctccaccttgtgctccgcctcaggggggtatgccgatcttcg

SEQ ID NO: 303653 - DNA, 255 bp, Zea mays
agatcgccgaacagacccttgctctccttcaggcgtgtgcttcttcgaccacgttctcatgattttggccagattgctgaagcaaaccttaatattgatgcgctgtgtatggcattctatgcacgatctgaagaaactaggcagagtcattcagttcataagcttgctctgggcactcttgctttggaacacgctttatccagtggatcaccaatccgatcagaagtggagctattgcgtaaatctgttgaaggc

SEQ ID NO: 303654 - DNA, 277 bp, Zea mays
tatcatgccggggcagtgggagttccaggtcggaccgtccgtcggcatctcttcgggcgatcaggtgtgggttgctcgctacattcttgagaggatcaccgagatcgccaccgccgagaggttgattagagaagcacacaagaaaggtgcaaagattgtactcgttcaggaattgtttgaggggcactatttctgccaagctcaaagactggatttctttcggcgcgctaagccttacaaaggcaatccaactattataaggatgcaacagcttgca

SEQ ID NO: 303655 - DNA, 267 bp, Zea mays
aaaagttgcaattggggctgctaagggtttatcatttctgcatgatgctgagaaccaagtcatatatcgtgatttcaaggcatcaaacattctccttgactcggagttcaatgcaaagctttcagactttggcttggcaaaagcaggtccaactggggacaggacccatgtttctacacaggtcatgggcacaagaggttatgcagctccagaatatgttgcaacaggttaaaaactatctagattttgagtggacgtcatgaaaaa

SEQ ID NO: 303656 - DNA, 245 bp, Zea mays
tcggctggcttctcctccccctcttatcaagtcctcctcgggttagggttccttagggttttgtggaggggcgatggcggcggctgatgtggagtaccgttgcttcgtcggcggacttgcctgggccaccaacaacgagtcgtaggagaatgccttcgcctcctacggcgagatcctcaactccaaggtcatcaccgaccgggagacggggagttcccgttgcttcggagtccttacctgactcc

SEQ ID NO: 303657 - DNA, 217 bp, Zea mays
  unsure (1)..(217): unsure at all n locations
ctgacgcggtggtaccgcgcgcccgaactgctggtccaatccaacgactaatccgcgggcaacgacctcctgttcgactcgacccanctcattgaactcattggacggcggccggtcttccccggccgtgacacatgcaccagatgcgcctcataaacgaggtgatcggaacgcccacggacgacgagctcgggttcaccggaacgaggacgcgcgg

SEQ ID NO: 303658 - DNA, 155 bp, Zea mays
cacattgggcaccgacagcaaggaggaatacctccattttgacaaggaagatgctcctttcgaggttcatcgtattaatcgcggcggtgaagtgacgtaccatggccctggacagcttgttatgtacccgattatgaatctgcggtaccacaaag

SEQ ID NO: 303659 - DNA, 267 bp, Zea mays
ccatgagcgagctgatggattactccagcaccaggaatgatgtctcgatggctgcttcgaacatcattcctggtgctggagtactccatgagcgagctgctgaacaaccgccacgtcctggccaagctccagaaggaggtgaggacggcgacgcccaacggtcgcatggtgatggaggaggacctgagccggatgccatacctgaaggccaccatcaaggagtccatgcgcatccacccgccggcgccgttcctcctgccgcacttc

SEQ ID NO: 303660 - DNA, 263 bp, Zea mays
ctcgagccgctggcatccgcagagagcttgttccgtccaggcaaccaaaaagcaagttgctccgccgcgcagaggaagaagagagcagaggaggatggctcgtacgaagcagaccgcccgcaagtccacgggaggcaaggccccccgcaagcagctcgccaccaaggcggcgaggaagtcggcgccgacgaccggcggcgtgaagaagccccacaggtacaggcccggaaccgtggcgctgcgcgagatccgcaagtaccaga

SEQ ID NO: 303661 - DNA, 269 bp, Zea mays
atcttggataaagctgacccaatggatgatcctaacagcctttggaaccaagatgttgcaggtcagaccaggtcggccacaaatcaaaactgtgttcgaccatatcagtctaatcactcagcaactattttttgtgtgtgtattcagtgcagaagggtcaacaggcttcagagaaggttcagcgctagaatttcagaacaaggtcagaaaatattaccttctcagactgaagctaataagaaggaacatgaaattggagcaattagcca

SEQ ID NO: 303662 - DNA, 246 bp, Zea mays
catcagcccaaggtctatttaatgcctttatcctgtagcacatcttgtgctccatgcaggatgatgacataattgatctgatgttactgccttgatgatctctttattattgggacagttagatttataatttgaagctattctgtaattaaaatataacctgaattcagcttgcagaatggaagctgaatctgttcattgtattctattgattgtcaatttaattagctgttgcagaataagtaa

SEQ ID NO: 303663 - DNA, 249 bp, Zea mays
ctatcgggtacaaagttggaacaatgatgtgtgatccccatgggggttcttgtggctgattatatagcggacatgctgaattcttctccttcggaacgaacgaccttactcagatgatctttgggtacagcatggatgatgtgggaaagttcaatcccgtctatcatgctcagtggattcgccgaatggagccctttcaggtcttggtcagtagtggattggcgagctgttaagctttctacagatagg

SEQ ID NO: 303664 - DNA, 276 bp, Zea mays
ctccgctgccggcaacctcatgctgcagcggtacaaggaggagatggaaggccttccggagcaccgtggaatggacgagttcaatgagatacccgtggagggatttggcgcggctctccttgctggatacggctggacagaaggtaagggcattggtaggaacaataagacgggggataccaaagttcttgaatacgaccgccgtgctggcacacaggggttagggtacaacccctccgaagcagaccctaggaagactcgttctggcgactggat

SEQ ID NO: 303665 - DNA, 267 bp, Zea mays
ctccgacacgccggatgaggccgcggagatgctcgctgacatcaaggccggcgtggaagcccgcagagctcgacggggacgtggtggccgtgccaaagaagcgggacagcgatgaggcgcggatatggaaggagttcatcctgtccccgacacgggcaatgcgtcgcatccacctctcgggcatcggcatgcacttcttccatcaggggtccggcatcgacgccgtggtactgtacagcccgcgcgtgttcaaggccgccggcatca

SEQ ID NO: 303666 - DNA, 251 bp, Zea mays
gaggaatcgagcctggtgttctttatccagctgtctctgttgagcagtttcacgaaccccatgcttataagttgaatttcctatcaatcaaccggtttgagaggaaaaagaatcttgatcttgccatttcagcatttgctttgctccgttctgctgcttggactatacctggtgatgctctacaagaagcaacattaacagtggcaggtggctatgataagcgtctcaaggaaaatgttgaataccttgag

SEQ ID NO: 303667 - DNA, 150 bp, Zea mays
caaggtgggcatcgccccagtccagcagcgtctcatctttgctggcaaacagggggatgtctggcgcacgcgtgcagactacaacatccagaatgagatcaccctccaccttgtactccgtctccggtgtggtcagtacgtcatggagtc

SEQ ID NO: 303668 - DNA, 268 bp, Zea mays
gttccatctgaacggcacttgcacatgggtaagccgatcctaagggacggtggatacccggcagatagcgcgatcacgcgcgtcacccgaaatggtatcgggttaagatttcccgagccgggacgtggcggcagacggcgacgtaggatgtccgcgccgcgcgccttctaacaataacgacaacagcggggccgtggaggcgcccgaccgcctcgtggccgcggtcgcctacctatacccgttcctcgacggtgcgcactacgggcgc

SEQ ID NO: 303669 - DNA, 277 bp, Zea mays
tgatcctcaaggacaagccggacgccgacatcgtggcctgaggtggtcgggctgagcgtggaggacgccaagaaggtgatcctcaaggacaagccggacgccgacatcgtggtgctgcccgtcggctccgtggtgaccgcggttatcgccctaaccgtgtccgcatcttcgtcgacatcgtcgcccagacgccccacatcggctgataatatataagctagccgctatttcctttccttgccccagaacttgaaatagatatatatacgatgaaata

SEQ ID NO: 303670 - DNA, 253 bp, Zea mays
ccatatctggaggacattatccctctaagctttgcagaagaacaattgacatgacctacaatgctgagatacccaataaaccgaatgtgatgccactaaccatgttcagagaacaaaaactaagacatgagctaacggaagatcattttgttggttggttggacagcatggaatggagttggagaaagacagctggacaaaatccagaatatgatcaatacccatgtacataccagttattttacagagggaa

SEQ ID NO: 303671 - DNA, 162 bp, Zea mays
cgacatgtcggggatgaaggtgctgtcccacggcttcgatgcagacctcgggggcagggatttcgacgaggtgctgttcgagcatttcgccgaggagttcagggacaggtataggattgatgtcgtgacaaatgtgaaggccagtatgaggttgagggcagc

SEQ ID NO: 303672 - DNA, 210 bp, Zea mays
cagctggcgacacccatcttgggggtgaggactttgacaacaggatggtcaaccactttgtccaggagttcaagaggaagaacaagaaggatatcactggcaacccgagggctctccggaggctgaggacctcttgtgagagggccaagagaactctgtcttccactgcccagaccaccattgagattgactcgctgtacgagggcattg

SEQ ID NO: 303673 - DNA, 273 bp, Zea mays
cttattattcagacatttggaatcttatgtatcctttagttatgcccctttccattgtgcaggtttcggaatgatttgtgcaacaattgtaagcgtcctgggcattttgctagagagtgtcctagcgtggctgtctgtcatacctgcgggcttcctgggcacattgcagctgaatgttcttccaaaggtacctgctggaactgcaaagagcctggccacatggctaacagctgccgctctgaagggatatgccgtaactgtggcaagtccgga

SEQ ID NO: 303674 - DNA, 110 bp, Zea mays
gcccagctcttgtcatcagcgcctctcctacaccacgctcagcgacttagccctggcactgctctacggaactgtatttgagatcggacatgtgcttctggtgatccagc

SEQ ID NO: 303675 - DNA, 210 bp, Zea mays
aattatctcagcattttgaaagtataggcttagcatagaggttattgtgtcttggtatatataggtcagataatagatttcagcaactgccagctgtttagttggtgagcttccagagagctctggagacatggtgaggacagacagtattggaaactcttagaactcccagatttcaggcttatcctgtacttgttaactttgaggtga

SEQ ID NO: 303676 - DNA, 145 bp, Zea mays
cgacacgagtaattgttgagaagcccttcggccgagactcagaatcctctgctgcattaacaagcggtctgaagcagtaccttgtagaggaccaaattttcaggattgaccattatttcggataagaactggtggagaatttgtc

SEQ ID NO: 303677 - DNA, 253 bp, Zea mays
actgaggtacttttacgaaaccctagtacctctctacgctgcactctctgcttgtagggctttgtttatagactatagatgatgatacatatctctccttttccttttttttacagatgaatgtctattcgagcatattgttcatagctctatttgtctccatagtagctaccagcatcctagagatgcagtggggaggagtcggaatcgacgattggtggagaaacgagcagttctgggtcattggcggtgt

SEQ ID NO: 303678 - DNA, 305 bp, Zea mays
accggtcagattgcaggtgttgcgatggattgcggtccccccatcccccactagcataatagctagccaagtactgtactacggattgctgatttccctgccccgtcatgataccttgcagcatggagtactggcctgacccactgcgggggatagaggaagcatacagggtcttgaggctcgttgggctagctagcttacgtgattggcccaatgtacccagccttctggctatcccgcttcttcgccgacatgtgggcgctctttcccaaggaggaagagtacattgagtcgttgaagaaggc

SEQ ID NO: 303679 - DNA, 301 bp, Zea mays
acagtttcttttcgatgcaccggatagcctctcgctcgggtttgcttggtaggagatgttacagctctgccatgaaagggggcacttcgatcgccggagtaggcgacatcattgctgtcgcatcagggaaaggaggcgtaggcaaatccaccactcagttaacattgctgtagcacttgccaaggagtttaagcttcaggttggtttgctagatgctgacatatatgggccatccattcctacaatgatgaacctccatgctaagcctgaagtaaatgaagacatgaagatgattccagtt

SEQ ID NO: 303680 - DNA, 286 bp, Zea mays
cgtcggagaaagtgattccgtaattattataactcatgaaccaaactggctccttgattggtattggggtgatagcactggcacaaatgttgcatatttgatacgggagtaccttaggggaagatgcaaactgcggatggctggggacctgcaccattatatgcgacattcttgcattgagtcaaaagaaccagttcatgtacaacacttactcgtaaatggctgtggtggggcctttttgcatccaacacatgtcttcgaaaacttcagggtattttatgggaac

SEQ ID NO: 303681 - DNA, 291 bp, Zea mays
caaagttttgtctccaccctgctggggacactccttcctcatgccgcctgtttgatgccatagtcagtcattgtgttcctgtgatagtcagcagtcgaatcgagctcccttttgaagatgagattgattacagtgagttctcccttttcttctccgttgaagaggctctaagacctgattacttgctgaacgagctcagacaggtccccaaaaggaagtgggttgatatgtggttgaagcttaagaatgtctcccatcattatgaattccagtatccccccaggaagggcg

SEQ ID NO: 303682 - DNA, 284 bp, Zea mays
gtaggccgcacgcctgcagcagccgccgactcaggtcgaacgttgagagcaggacgaagaagagactgaagaagagcagagcgaagtgaggccgggggaagggatcaggccttgcgggattcgggagtccatcacgaggtaaatgcggcgctgaggagctgcagcgataggcgtcgctggtacccggcgtcctcctcaagctcctgcagcacatgaacatcgatgtcaaggtcgcgggcgagcaccggtcgtcgctgctccaggtcgtcagcatcgttcccgcg

SEQ ID NO: 303683 - DNA, 282 bp, Zea mays
atgagcttctgttgctgaagagaggaggtcgtgtcatatatgctggccagcttggtgttcagtctcgcgtactagttgaatatttcgaggcaattccaggtgttccaaaaatcacagaaggatacaatcccgcaacatggatgctggaagttagctctcctctagctgaggctcgcttggatgttgattttgctgaaatttatgcaaattctgccctgtaccggcacaatcaagaacttatcaaggagttgagcattccaccaccaggctaccaggatctct

SEQ ID NO: 303684 - DNA, 267 bp, Zea mays
tgaaacatagatcagatacaggctgtcataagtgatggaattatcgctcctttgttcacaaatgcttcaaggagcacagtttgatatcaataaagaggctgattggggcatctcaaacgcaacctctggtggttcccattagcaaatcatctaactggtgtctgaatgctgcatcgtgccgttgtgctacctacttgtgtgccctgatccgataattgtaacagtttgtctcgatggtcgtgagaatattctcaaagtaggtgagca

SEQ ID NO: 303685 - DNA, 311 bp, Zea mays
attgcggaaaccacctccccgagtccgcccccggggctggccgccgcgtcccctgccccgtcgacccctcccacacggtgctcgaggagaacctggaggcgcacgtctgcaagtgccccctgaagaagcaggtggccgcgctcaccgcgcagccgtactattccaagggcatcaactccggtacgcgtgatgcgggctgcggtgtgacgtcggcggagaagcgtgcggccgtgtacaggcttaccgaggaggagttccgccgtctgctcgggaagatccggtcggtgcacgcggaggtcgcagtgcagata

SEQ ID NO: 303686 - DNA, 244 bp, Zea mays
gagcaagtaaaaaaactaattgctaagatgataatagttcatgagtatccatttaggatggttgagcatacttggtttaacattgtcatgaggtatttgaatccttcatatgagtttattggtaggaagactataagagctgaatgtttaaagatctatgagtctgaaaaagaatcactagcaaaagtccttaaaggtgttgagtatatttccctaaaccactgatttgtggacatccaatcaa

SEQ ID NO: 303687 - DNA, 301 bp, Zea mays
gtgcctttgggccatttctaagtattttggtgatttagtgtccaacacaagtgcctaagtgttgatctatgcaaagtggtggacaaagagcaaatcaagtcaaaaggtatgtttctagacttagtacattgttttatggactgatgtattgtgtctaagtgctggaaacaggagaaatcaaattgaaaaagagatggctttattcagccaaagtcagctctgtctgggtgcaccggactgtccggtggcgcaccggacagtgtccggtgcgcagagctggctcaggcgaacttgctgctct

SEQ ID NO: 303688 - DNA, 279 bp, Zea mays
gcatccgccgcctcccgcagaacccgaagatggcgtcgtcggcgtcgaccctcgaaatcgaggcccgcgacgtggttaagatagtgctgcagttctgcaaggagaattcgctgcagcagacgttccagacgctgcaaaacgagtgccaggtctccctcaacactgttgacagcatcgacaccttcattgccgacatcaacgccgggcgttgggatgctgtgcttccccaggtcgcacagctcaagctgccacgcaagaagctcgaggacctctatgagc

SEQ ID NO: 303689 - DNA, 298 bp, Zea mays
gctcccctctccctccctccctctctctctctctcttcgccgtccgaagctccgcacccaatctaatcgacacctcaccgagatgggccgcaagttcttcgtcggtggcaactggaaatgcaatggaaccacagatcaggtcgagaagattgtcaaaaccctgaatgaaggacaggttcccccttcagatgttgttgaggtcgttgtcagccctccttatgtcttccttcctgtggtcaagagccagctgcgccaagagttccatgttgctgctcagaactgctgggtgaagaaggga

SEQ ID NO: 303690 - DNA, 144 bp, Zea mays
gggactgccaggaggtacattggcatcgtgaagcaggcaggcctggaaaggatgatgcctggtgcctacagcacaggctacgggggctacgaggagtacagtggcctcagtgatggctacggcttcaccaccgacctgttcggg

SEQ ID NO: 303691 - DNA, 288 bp, Zea mays
caaatattagcggtgggtactcactgaaggaaaatcttgaggttgacagaaattatttaccaatacactcaagacaagaaatggttttcggtgatgaatacaagccagttggcaagccgatcaagaaagtcggggcagagctccaagcttctggggaggctgtgtacgttgatgatatccctgttcccaagggttgcttgtatggagcatttatctacagcacacgccctcatgctcatgtgaagggcatcaacttcaaatcatctttggcttcacagaaggtcatca

SEQ ID NO: 303692 - DNA, 292 bp, Zea mays
cattgggaatcctcaatcccttggtcagcaacctgtgacgttcttcagggaggtatgcaactttacctgcagattccacctttgtttcttcgatatttacatggtaccttgcaggttcttgctctttgtgatcatccatgcctcttggaaaaagaggaaaccaaatcattgttcagtgctgatgctatttctcgagcaaagcagattcttgcaactattcctggacgggcaacaggtgcatatagtcacagtcagggtatcaaaggattgcgtgatgcaattgctgctggga

SEQ ID NO: 303693 - DNA, 310 bp, Zea mays
ctattcgtttggaattgtcatgtgggagttgcttactggggaagagcatactctggcatgcgtgctgctgaaattattgggggcattgtaaacgattccctacgtcctcaaattccttcatggtgtgatcctgagtggaagggattgatggaaagctgttggtccagtgatccagctgagagaccgtccttcacggatatatctcaaaggttgaggaaaatggccgccgcaatgaatgtgaagtaaaggtccggaagccatatttgtcttgtatgtgtgttccccgcatccaatattatagcgatataca

SEQ ID NO: 303694 - DNA, 103 bp, Zea mays
atagttagttgtctagtattaatatgtggactagagtcatcccactaaatttgatgaatggacccatgatgcaccccttcattttggataaagtgattcatta

SEQ ID NO: 303695 - DNA, 173 bp, Zea mays
cggactatgagactggacgggccatacccaataaccaggtgcttggcataatctagcgggacatttgcctcaagctccggggataggacattggaaagcccatctagaagggttctagggcgacatgaacacaaagcctcgaaatcagtgtatcccagctgatctcgttccgc

SEQ ID NO: 303696 - DNA, 126 bp, Zea mays
cggactatgagaacggacgggcgatactcaataaccaggtgcttggcaaaatcgagcgggacattggcatgaagctggggggaaaggacattggcaagcccatagagaatgtgcatagggcgatat

SEQ ID NO: 303697 - DNA, 107 bp, Zea mays
gattaacggagatatgaacttcaattggaaaacgctagtggaaaatgagactaaagagattgttagattaaatggtgtgtacgagaggatccttagcagtgccggtg

SEQ ID NO: 303698 - DNA, 305 bp, Zea mays
tccagaaggagagcgtgcgcccgtcctcaagctgcttcccagcaaagatgagccgctgctggtctggagggatgccctccctgaccggcaagactatcaccctcgaggtggagtcctctgacaccatcgacaatgtcaaggccaagatccaggacaaggagggcatccaccggaccagcagcgtttgatcttcgctggcaagcaactggaggatggccgcacccttgcggattacaacatccagaaggagagcaccctccacctggtgctccgtctcaggggtggtatctagatctttgtgaaga

SEQ ID NO: 303699 - DNA, 295 bp, Zea mays
attttcgtcgtggttacgacggtgacactaacaagcaacatgatgctactggtgtttatcccggaatagacattggtagagatcatgggactaccggtgtttatggcctaaacaccgacagacatcatggaacttctggggtgaatcccgggatagacacccataaccaacaacatgggactaccgttggttatgctggttacactggaaggcagcatgggaatacaggtggcctttactatggaaccgacaccgcggacacaggaaccggtcctagagtggaaacacggtggca

SEQ ID NO: 303700 - DNA, 293 bp, Zea mays
ctcgagcgtggagattctgccgtctgtcgcaagtcacacactaggtttctcgggcgctgacattgttggaagatgtggaggatcaagctcgcctgtttgcttcttatctttgtgcaagtgcaacgagtggtccttggaacacatgacgtgtacatcgtggtgatggaaggggatccggttgtgagctaccgaggtggcgttgacggatttccggcaactgctgtggatttggacgaggaaatggacgttaccagtgaagctgttacatcgtatgccctccactccgaagggca

SEQ ID NO: 303701 - DNA, 287 bp, Zea mays
gggatacaaaaagaaacactttctgctctgtttgagacttacttccgcattctgaagcatagtatggccgcttcaaattcaaggactaaggtgaataatgtttcccctggtggctcacacccacttctcactccatgcctggagggtttagggaaattttcacatttaattgatttggatttcatgggtgaacttatatcttgcctcaagaagctttctgggtatagtgaccgacaagacgaaattcccaatgataatgcactgtctgtctcagaacgtctgcagtg

SEQ ID NO: 303702 - DNA, 298 bp, Zea mays
cagggaacaaattctgcaagggtggtgactgtaatttctctgattccagtaactcctcatggacgtggatctctccttggcatctttcgaggagttactggaatcagagaaatcacaggagagatccacgtccatgaggaagcttataatcgcagtgatcctttgcatcatattcatgacggtggaagtggtcgggggcatcaaagcaaacagtcttgccatcttaactgatgcggcgcaccttctttctgatgtggcagcatttgccatatcgttattctctctctgggctgctgga

SEQ ID NO: 303703 - DNA, 295 bp, Zea mays
  unsure (1)..(295): unsure at all n locations
cttcatagttcagtgtgtcgcataaaaatgtcgcagttgctggataaagccaagaacttcgtgtcggagaaggtaaatgatatggccaagccgtagggatntgtcactgacgtggacttcaagcgcgtgagcaaagataatgtcgagtacttggccaaggtctctgttcgtaacccttattcaacttccatacccatttgtgagatcaactactctttcaaaagcgcatccagggagatagcatcagggaaaattccagacccaggatcgttgaaggcaaaggacacaacaatgg

SEQ ID NO: 303704 - DNA, 292 bp, Zea mays
ggtacttttgtttgtccatgcatatacacatgtgttaaccatggtcaactgaggttagtgatggacatgtctttatggtttatagatatgttggctatggcaaaaggtccattctacagaagataaaggatttcaaagatttttggacaatgtgcagtacaaagccagtggaatattacgttacgagcgcatttttggagaaggttatgtgagcactggtggagttgagactacaaaagaatttgtggacaagctggatctcaaacctggacataaggtgcttgatgttgga

SEQ ID NO: 303705 - DNA, 305 bp, Zea mays
  unsure (1)..(305): unsure at all n locations
ctcgagccgattcggctcgacttctcccgccgccgccaatccgctcccgttctccgccagcgccaatcccctcccgtgctccgccacctctgctgagagcgagaagagatggccggcaagggtgatgggccggcaatcggcatcgatctcggccggacctaccttgcgtcggtgtgtggcagcacgaccgtgtcgagatcatcgccaacgaccagggtaaccgcaccacaccctcgtacgtcgccttcaccgacatcgagcgcctcaatggagactcggccaagaaccaggncgccatgtaaccc

SEQ ID NO: 303706 - DNA, 190 bp, Zea mays
ccctcccgttctccgccaccgccaatcccctcccgtcctccgccacctctgctgagagcgagaagagatggccggcaagggtgatgggccggcaatcggcatcgatctcggcacgacctactcttgcggcggtgtgtggcagcacgaccgtgtcgagatatcgccacggtcgtgctgccacgaccgacgc

SEQ ID NO: 303707 - DNA, 288 bp, Zea mays
caaggcgttccacacaagatacgagcggcggaggaacgacgcacggagacaagggacctctatgatgctggggacgggaagaagggttggagcatggcgcctggcctcgagaggctgaacatccttcgtttcaaggtggctgcatatgagataaagcagaagagaatggatttcttcgatccatcaaggaaaggtgatttcctcttcatctctggcgcaaagatgcgcactcttgccaagaaccgcgagagtcccccggatggttttatgtgccgggcggctggaaag

SEQ ID NO: 303708 - DNA, 293 bp, Zea mays
atatcgcagtctggaaaacaaaggcaccatgttccatatcgtgattccaagcttacatttctattacaagaatcccttggaggcaatgccaaactggcaatgatttgtgctgtttcaccgtcccaaagctgtaagagtgaaacgttaagccacttaggtttgctcaacgtgcgaaagctataaaaaacaatgccgtagttaatgaagagaaaattgaagatgtaaatgcgttgcgtgagcaaatcaggcaattgaaggatgaacttcaccgaatgaaatctaatggaggcata

SEQ ID NO: 303709 - DNA, 296 bp, Zea mays
tggagtatgtcgtgccggaggagtatgtgcaaacaatgagggaatccatgctgaagaggtgcccggtctcatcgtacgagcatgtccgcggggtgtttaccaaggatctcggtgaatcgccagaaactgtttttgcagaatttgatcctgctccatttgcaagtgcttcccttgcacaagtccatgttgcccgaacgcacgatgggcaaaaagttgctgttaaggttcaacatgaccacctcacaaatactggtgttgtagatatagccactgtggatttgttagtgaatgctctg

SEQ ID NO: 303710 - DNA, 303 bp, Zea mays
gcagatgaagaggaggtgaggaagcaatataggaagctagctctgctgctgcacccagacaagaacaagtctgttggtgctgaggaggccttcaaactgatctctgaggcgtggagtgtgttgtcagatactagcaggaaggtagtttatgatgagaagcgaagaaatcattctgttgtcaatgtaaccaatggcatttatacctatgataagaaggcaaacaagagggctcgaaagaatgctgctgctgcagctgctgccgctgctgctgccgctgcagctgaggctactactcgtcctgtt

SEQ ID NO: 303711 - DNA, 288 bp, Zea mays
aacacacacatgaccagatctctctcaaatccacgcgtcggcacctccgtttcaggatgcagatctttgtgaaaaccctgactggcaagactatcaccctcgacgtggagtcgtctgacaccattgtccacgttaaggccaagatccaggacgatgtgggcgtactcccaggtcatcagcgcatgatctttgctggagagcagcttgaggactggcgaacgcttgctggctacaacgtccgcgaggagatcaacatccatcttgtgctccgtgtcggcggacgtctgc

SEQ ID NO: 303712 - DNA, 284 bp, Zea mays
aaatgataataagcctgtgacaaacagccgtgacacacaagaggttaagctggaacaaggtcttgactatgtgccacttaagtggaatggttgttttccactcaagtggcacatagtcaaggatgtgcccaacaacactttgaagcatattacactggataacaatgataataagcctgtgagaaacagccgtgacacacaagaggttaagctggaacaaggtcttgaaatgttgactgttttcaaagaacatgttactaaaacgtcaattttggatgattttg

SEQ ID NO: 303713 - DNA, 285 bp, Zea mays
  unsure (1)..(285): unsure at all n locations
agtgaagctgctgagaaattgctctctgattcaaaccgaacaagaacacatataatcaaagtgattgaagggtttgagactgttacgttcaagtcaaaatttaaggagtggccacagacacctgagttgaagttgtcatcgaggatggaagaggcatggttgcagctcttctcaaacgccagggcttaaatgttaagggtttgatgaaagctgctcctacacaagaagaacctcaatcctatattgattccactggcaatctgcaggtttggcgtgtanatgata

SEQ ID NO: 303714 - DNA, 283 bp, Zea mays
agccataacagctcactttattgatgaatcctggactcttagaaatattataatgaggtttatctatgttcctgctcctcatactgctgacgtcattggtgaagaattgtatgagtcattggttgaatggaatcttgatgagaaaatatcttggatgactcttgacaactgcacaactaatgatgcggtaatctcttctcttgtgaggaatattggaaagcacaaacttatgaatgatggaaaattgctacatatgagatgttctgcccatatccttaatttg

SEQ ID NO: 303715 - DNA, 281 bp, Zea mays
ggtacccagcagcgccaagatctgaaaatgaacatccccgcgctgcgcaatctctacgcgatgctcctcgaatacctcgacagcttcgagggcgagcaggagttctggtacgcgtcgagagatgcggacgaaccggggaagggcaacgtgccgatgcaggacgacagatggtggctcccgaccgtcagagtccctcccagtgagctgtcatacgcgtacaggaaatggcttcagaaccacaatgacctcgttgcgcaggtgctcaaggcagcgatggcgat

SEQ ID NO: 303716 - DNA, 124 bp, Zea mays
gctcaaatagtaatcgcagtcagccggcgacgcaagcacgatgtcacgctataactgcgcgatcaccgttttctctcccgacggccatctcttccaggtggagtaagctctcgaggctgttcgt

SEQ ID NO: 303717 - DNA, 195 bp, Zea mays
cgctcgcctcgggtcaaaccctaagcagggagttgatttatccgctgcagccatgagtaagttgcagtctgagtctgtcaaggatgccatctcccagattgttggggatgccaaggagaagaataggaagttcactgagactgtggaacttcagattggtctgaagaattatgatccacagaaggacaagcgttt

SEQ ID NO: 303718 - DNA, 144 bp, Zea mays
cggtgagaagaatgtcttcatcgacactggtagcgttcttgtcaagaccataggcgatagctgcagctgttggctatggtcttgacaagaaggctacagtgtggtgagaagaatgtcctcatctttgatcttggaggtggtacc

SEQ ID NO: 303719 - DNA, 217 bp, Zea mays
agcccaccgaattccctgcgtttcctctcccctcgcctcctcgtctccccctaggggatcatcggatgggaatcgcaaagagggccgtctcatccgagttaaggaagccatggagcacaaggaggctgggtgccaggcccccgagggacctatcctctgcatcaataactgtggcttcttcggcagcgcggcgaccatgaacatgtgctccaagtgc

SEQ ID NO: 303720 - DNA, 145 bp, Zea mays
aacagtaagcagactatcatcaaggcaattgggaggggtggtgccctctctgggctccatcggaatctagtcgtcctcctcgttggcaccagagcagtgcaaggctctcgagacagtacttccaccaaggccttcatccaagctg

SEQ ID NO: 303721 - DNA, 270 bp, Zea mays
cttagggactatcaaacgctacttcgtaactgggtagttataaagttagttttgggtttgttaggaagcatgctgtgaggcatggtcaagcaagatggaatttgtccctctcttcttgagagagatatctctaggcccctcgaatgattggatcaagaaatgcatggctgtgctagggttaagtgttaatcaataaaaggattcaaattcatagtatcgagaaagagagatcagcttagagccagaccaaatattgtgagacaaagggac

SEQ ID NO: 303722 - DNA, 209 bp, Zea mays
caaagtacttgtgcattgctttgagggaaaaagtcgaagtgcgactgttgttcttgcctacctgatgctgaggaaaaactgtactctcctggaagcatggaacatgctgaagaaggtgcaccgacgcgcgcatcccaatgatgggtttgctaagatcttgctggatcttgacaagaaactgcacgggaaaatctccatggaatggcaac

SEQ ID NO: 303723 - DNA, 142 bp, Zea mays
ccggtgtctatgatccggacttcatcgccgctaaccagggctctcgtgccaacaatgtcatcaagggcaccaagaaagaacaggtggagcagatcatcaaagatatcagggagtttaaggagaagaacaaagtggacaaggt

SEQ ID NO: 303724 - DNA, 261 bp, Zea mays
ctcatcgtgcagcacctcagatcctacagcgatccagctgaacagaagtggatcatagctgtgctgttcatggtgcctgtttatgcctgcgaatcgataatctcactgtggaactctaagctctctctggcctgtgatatattacggaattgttacgaagcctttgctctgtacgccttcggacgatacttggtggcttgccttggtatgtaaagcagctgcacagtaataatctgcatatatatatataatcacagcgta

SEQ ID NO: 303725 - DNA, 278 bp, Zea mays
tgaggcggcatgggtggcagctcccgtaccaccctctccaggtggtggccgtgtccgtcttcctggcgctggcgttcgcgttctacgtcttcttcgcacccttcgtcgggaggtaagttttccagtacgtggtcatggggctatacactccgctggtattatgtgtcttctttctatacatctggtgttccgctgcaaactcagctgttcctggggtcctcatatcacagatgtatctgagtttgtacggaagctgctgtctctagcatctgtaggaa

SEQ ID NO: 303726 - DNA, 140 bp, Zea mays
agcgccgccgcctcctactccgcgccggcaactctgatccggaccgagcgctggccatggcgctcgccttcgacgagttcgggcgccccttcattatcctgcgggagcatgatcaagaagacgcgctcttcgggggcttg

SEQ ID NO: 303727 - DNA, 281 bp, Zea mays
gtcatgtatggatatccaccacgccacttcggtatcaccactcaaacagctatctcagtacctgatctagcatcttggattcaggagcgcgagttgatgcaaaagctaatcaaacagcatctactccgggctcaagaccgcatgaagacccaggctgataagaatcgctcggagcgagtgtttgctgtcaacgattgggtattcttgaagctccaaccgtatgttcagacgtcagtggctacacgtgctcatcataattgtcattcaaatttttggaccta

SEQ ID NO: 303728 - DNA, 179 bp, Zea mays
ctggtcatgttcaggtgtgggacttgagctcattccttaattctttagctgagtcagggacagctgcacccaaagaagacgacataatccacaaacacttacccctgaaagtatttagtggtcataaagatgagggatatgccattgattggagtccacttgttatggaagacttgttt

SEQ ID NO: 303729 - DNA, 290 bp, Zea mays
gtctgtcgctctcgctctcagacgactgggccgccgccgcttggtgctgaggctttcgttggtctcttcggcggcgacgagcacccaccagcagttctgtagaaatggctgatggtgaggacatccagcctcttgtctgcgacaatggcaccggaaggtcaaggctggttttgctggggacgatgcaccaagggcggttttccctagcattgttggccgtcctcgccacactggtgtcatggtagggatgggacagaaggatgcatatgttggcgatgaggcacagtcca

SEQ ID NO: 303730 - DNA, 135 bp, Zea mays
ccatattacgttatggtggtatgtatgcattggtctctagcctacaggggaactgccaacaacaatgccatccaccagctgctgcattttgctgtatcagatgtcagtgatgatgttcggaggactgaagttatg

SEQ ID NO: 303731 - DNA, 144 bp, Zea mays
cgttctgcaaacgatccatgtgctatctctcttagggcttgttcggttattttcaatccatatggattggaggggattgatacagattggaggggattttgacttactagagattgaatctctcccaatctccctcaatccata

SEQ ID NO: 303732 - DNA, 260 bp, Zea mays
gggccatcaacattatggatgatatgcaacgtgccgctatacctcctagccgaactacgtataataatgttataaatgcatgtggagctgctggtaactggaagaaagctttagaactttgtaagaagatgactgaaaatggtgtatggccagatttgatcacacacaacattgttctgtctgcttttaagaatggagctcaatactcaaaagccatagcttactttgaattatgaatcctctaaagtgccccgatacat

SEQ ID NO: 303733 - DNA, 185 bp, Zea mays
cggaagtgttgggatagcatgcacagccgaacacgcagaatggggggtgggtggctcaccgccttcgatgggaggcggtttaggaggtgggtagcggtgtgcagggcctctgcccagtagctggcagggagagatgcctggaagagaaggcaatgaatcatattggtggtggtgcgaatcatacg

SEQ ID NO: 303734 - DNA, 277 bp, Zea mays
tgtggttattggccatgtcgactctggcaagtcaaccaccaccggccacctgatctacaagcttggaggcattgacaagcgtgtgattgagaggttcgagaaggaagccgctgaaatgaacaaacggtccttcaagtacgcttgggtgcttgacaagctcaaggctgagcgtgagagaggtatcaccattgatatcgctctgtggaagtttgagaccaccaagtactactgcactgtcattgatgcccctggacatcgcgacttcatcaagaacatg

SEQ ID NO: 303735 - DNA, 271 bp, Zea mays
ctagtcatcattgcagcatctgttttacttgattaacattttttaatagcatccttgctctgctgtctactgatgttcagtaacatgtcataactagtgacgtgaacatatcagattccatttcctttgttttgtcctgttgacatatttctttcctttttatgccagagaaagagaacttgtgcctttatggtttgccaaatgagacttgggaggttactcttccagctgaggaagtacctcctgagcttccagaaccagcactgggcat

SEQ ID NO: 303736 - DNA, 298 bp, Zea mays
tgatgatgtgaatgagtacttctggagccgcagagttttcaggcggctccagtggcccctgtcaccagcgaggagcttctttataaagccaggaaaccccgggcgtattggcaagactggttttgttgcagcagaggtcgttctggaatgtgtaccgcagctttgatcgggtattggtgatgctcattctgttctttcaagcagcaatgatcgttgcatgggatggccacactccgtggtttagcctactctaccgtgacatccagatccgggtgctgtctgtgttcatcacctgggc

SEQ ID NO: 303737 - DNA, 294 bp, Zea mays
ccaggaacaggaaagacacaaactattcttggactccttagtgccgttctccattctgctcctgcaagaatgcagatcaaaggaggatttgatgttctaaaacatgggccagaactggacattgatggcaagcgtgcacactggataaaggcatctccttggttacttggtgcaaatcctcgagatctgattatgcctgttgatggtgatgatggattttacccaacgggaaatgaactgaaacccgaaatctaccattccaatcgcaagtatcggcctcatgtgttggtgtgt

SEQ ID NO: 303738 - DNA, 294 bp, Zea mays
ggagggcctcaagctgcacgactaccgcgccatcatccggagccccatggatctcggcaccgtcaagcagaacctcaccgccggccggtacccctcgcacgaggcgttcgctggcgacgtccggctcaccttcaacaacgcgctgcggtactccccgcccgaccaccacgtgcacaggtacgccggcaacctcctcgcctcgttcgaggggatgtacaaggaggccgtctcgtggttcgagcagcagcgccagcagctcgagccaccaatgcagcccgatttgccgccgccgcc

SEQ ID NO: 303739 - DNA, 292 bp, Zea mays
atcaaaggtagtggattcatttgaaaatcaacggagtatgccaagcagttcaaggcaagtacgtggtgctaggcgtgttgcccataatccaagaaaaactcttcttgtgtctccacctagctactggccaccatgggataagtcaataacaatggatcttcttgagatgaagaatggtttgaattacttcaggtacacatatgacccttcagtcagccatgtgcaggaattatttgaagccgccaaagcagcaaatgatctcaatgctattgctactatattagggaaatat

SEQ ID NO: 303740 - DNA, 300 bp, Zea mays
agggattcggatgtactgaagcccattcctcctgttctttttgaagatgcaccttacttttattatcctggccaacgtgtgaggatagtcgatccgtcagtttccaagtcagcaacatggttatgtggatcattgaggcccagtagagattatggtattgtctctcatgtcgatgtagggctggtgcatgtgaactggatcacatctgtaaccaatgtttggggagataaatcatcaagtcctccaaacattcaggacccaaagaagctcaccttgctgtcatgtttcccttacgctaat

SEQ ID NO: 303741 - DNA, 229 bp, Zea mays
aactgatgataccatatctgagggaaggattgttcaagttactgttcgcaatatacaagataacaaaataatttgcacctttgattcgggtttgaaagccatagttatggcagacaactattctgatgagggttttgatccagaatcatcacagttacgtgaaggcgatgtattaactggcaatattcgaaacgtgaatactaatagattcatggtttacctaacatgc

SEQ ID NO: 303742 - DNA, 298 bp, Zea mays
ggcgcagaagcagaagtacttgccatcccttgctcaacttactactgttggctgttgggctttgacagagccaaactatggaagtgatgcgagctccttgagaactatagcgatcaaggcacctggtgggtggcacatagatggtaacaaacgctggatcggtaacagtactttcgccgatgtgctcgtcgtgttaggtaggaatgcagacacgcaacagctaaatgggttcattgtgcggaaaggagctcctggcctgaaagctacaaagatcgagaacaaaattggcctcaggatg

SEQ ID NO: 303743 - DNA, 182 bp, Zea mays
tgcggaagtctgttgttcggattacaaccgggagccaggcacttgatgagctgcttggcggggggattgaaacactttgcatcacagaggcattcggggagttccggtcagggaagacccagttggctcataccctatgtgtctccactcagcttccaatccacatgcatggggggaatgga

SEQ ID NO: 303744 - DNA, 288 bp, Zea mays
tgaatttgttatgtttgatcgttccaagctttcaagggttgattggaagtacattataattgatgaggcacagaggatgaaggacagagactccgtcttggcgcgtgatcttgatcgctatcgctgccagcggcgcctccttctcaccggtactcctctacagaatgatctcaaggagctttggtccctcttgaatttgttgcttccagaagtatttgacagtagcaaggcattttcagattggttctctaagccttttcagagggatggtcctacacaaatgaagaa

SEQ ID NO: 303745 - DNA, 108 bp, Zea mays
gatctacacgtacgaggccgcctggcacatctacgcgatgaactggagcgtgcggcgcgatatgtagtaccgccttgccatcgttagccttcttgagtatgtcaccaa

SEQ ID NO: 303746 - DNA, 286 bp, Zea mays
agcggcgacaggagtggccgcaaccccgccgccggagggggctccacgaccagatagaagagggagagaggatggggatcttcgagccgttccgtgcgatcggctacatcacggcgagcggcgtgcccttctccgtgcagcgcctcagcaccagaccttcgtcaccgtcagcgtcggcaaggctttccaagtctataactgtgctaagctgaatttggttcttgctggaccccaattgcccaagaagatccgtgctattgcatcctacaaggattatacatttgct

SEQ ID NO: 303747 - DNA, 284 bp, Zea mays
cgcagaggcgcagagacaggcgtcttcgtactcgcctatctccgcgactcaaagcttcacccatttcctaccgccgccgcagcagctccaccccattccgtcgacaccatgagggagtgcatctcgatccacatcggccaagccggtatcatgtcggaaacgcgtgctgggagctctactgcctcgagcatggcattcaggccgatggtcagatgcccggtgacaagaccattgggggtggtgatgatgctttcaacaccttcttcagtgagactggtgctggg

SEQ ID NO: 303748 - DNA, 281 bp, Zea mays
gaacattctatacatattggtggactggtgcgcctggacgtagaagagttaactgtaggatcgatctatgttacagtttgggcatcaccacttgtcccacttcacatgggaaagacagaaaacacgacaacattgataaaagaacacttggcttgcaattacagcctcccataggccaggagcgggtaaaggagcttggtaaatgggtgaggaaacagttcaaagtttctgggaacagttgggatacaaactctaaggatatagccatcgctggtcttggt

SEQ ID NO: 303749 - DNA, 282 bp, Zea mays
ctagttcaagacccccgagcgattttggtcggaagccgtgaacacggcttgccacgccataaaccaggtctaccttcatcgcctcctcaagaagacgtcatatgagcttctaaccggtaacaaacccaatgtgtcatattttcgtgttttggaagctaatgttatattctagtgaagaaaggtagaaattctaagtttgctcccaaagctgtagaagggtttttgttaggttatgattcaaatacaaaggcgtatagagtcttcaacaaatcatcgggtttg

SEQ ID NO: 303750 - DNA, 272 bp, Zea mays
cgcgcctctacatttcttctctctctgctcctccgcctccgcctgatccatccaagacagggatcgccatgtcggactcggaggagcaccacttcgaatcgcaggccgacgctggggcgtccaagacctatccgcagcaggctggcaccgtccgtaagaacggcttcatcgtcatcaagaaccgtccctgccaagttgtggaggtttctacctccaagactggtaagcatggccacgccaaatgtcactttgtcgccatagacatattcaat

SEQ ID NO: 303751 - DNA, 268 bp, Zea mays
gttcggagcgcacacacacacaaccagatctcccccaaatccacccgtcggcacctccgcttcaagatgcagatctttgtgaaaaccctgactggcaagactatcaccctcgaggtggagtcgtctgacaccattgacaacgttaaggccaagatccaggacaaggagggcatcccccagaccgcagcggctcatcttgctggcaacagcttgaggagggcgacgcttctgactacacatcagaagggagacctccactagtctcgtc

SEQ ID NO: 303752 - DNA, 286 bp, Zea mays
tggagaacggctttcatgaggttgaaggacttaaggaaccccaaagtgcacctcctgctattaaggaatatgggaacggtgatcctaagatgaaaaaatctattgttgacagacaacttgaaaacgtggatgcactcattgagtgtgtagggacaaaccttggatactgtgcagggaagccagttgctgctattaccatatacaaatgtcttcttcattggaaatcattcgaggcagataagactagtgtttttgaccgtctcattcagttaataggatctgctat

SEQ ID NO: 303753 - DNA, 279 bp, Zea mays
gggtaagccataccgtgtctgtgattcatgttacgtgaagctaagtaaagttttggattctggtgttagttatagcagaaatactatcccccgcttacctggtgatacaaaggccgagagaatagacacaaaggcaaccagagttgcacagtctaatagttcagatatgattaggaatttggatgtgaaggcagccaagcagacgaagaagtctgagtattcgtcgcaagttccagcgacgttgcagctgaaagacatccctttcatcagcgcacctga

SEQ ID NO: 303754 - DNA, 142 bp, Zea mays
ccagggcggacaaaaacgcaagagagtatttagggtggtgatcaaaattgcggcccgtgctgatctccatcatctggctatgtatctagcaagaaagcaagcagacgctcctcaagaagctcttgaagtgcttgacattgta

SEQ ID NO: 303755 - DNA, 282 bp, Zea mays
tgcagctggggcagggagctatatccggtggatgattcctgcgctatttgtgtatggtccactacagtgccatgtccggtttctgcaaacgcagaacatagtcctcccagtgatgctgagctcaggtgccacagcactgaaccatctgctggtgtgctgggtgctggtgtacaagattggtatgggcaacaagggtgctgcttgggcaatgccatctcatacttaccaatgtatcatcctggcacttacgtcaggctgcaccagctgtagaaacactggaga

SEQ ID NO: 303756 - DNA, 164 bp, Zea mays
atcgcaatggataaactgtgacattcggaacttcaggatggacatcttaggacaatttggagtaattatggctgaccccccttgggatattcatatggagctaccatatggcacaatggctgatgatgaaatgaggacgcttaatgttccaactctgcaaactg

SEQ ID NO: 303757 - DNA, 302 bp, Zea mays
acccgtgccaggtttgaggagctcaacatggacctgttcaggaagtgcatggagcctgttgagaaatgcctgagggatgccaagatggacaagagcagcgtccatgatgttgtccttgttggtggctccactaggatccccagggtgcagcagctgctccaggacttcttcaacggcaaggagctgtgcaagaacatcatcctgatgaggccgttgcctatggtgctgctgtccaggctgctatcctcagtggtgagggcaacgagaaggtgcaggacctgcttctgcttgacgtcactcct

SEQ ID NO: 303758 - DNA, 292 bp, Zea mays
gcaaaaggaagggttctggagaggacagttcatcactacgttctctaggtgaaaccagtgcattgcagcgagaagtcagcatggagtgtgctgatgagaaggcgggtgatgctagagccaagagagaggactacgtgcatgtccgggcaaagcgcggccaagccaccaacagccacagccttgcagaaagatttcgaagggaaaagataaatgaaaggatgaagcttcttcaagaccttgtcccaggttgcaactagattacaggcaaggccatgatgcttgatgagatcat

SEQ ID NO: 303759 - DNA, 289 bp, Zea mays
gggatgcattgatttgaggagagcaacaactcctgagatgtggggacaggacatcgaggttcccgaatcgatcttgaacttcacagatccaatggctgatgatatggcagcagcaggagtccatgctgccaaaatgttgacacctggagcagcaatgtctggctgcagaagaaggtgcagggttttttcagcctcccaactagaactggaggtttgatcaacactgtagaggtttgatcaactgtcgaactggaggtttttttttaccttcagaacagcgggggacaga

SEQ ID NO: 303760 - DNA, 276 bp, Zea mays
cgcgggagatgagctcgttggagaaggtgaggcccggcatgaggagctccactgtgatttcgcctgcactctctacgagcttctccgcaacaagctcgacgaggcccgcgtccgcgagatcgtcgcagacgctgtatgacatcgagcgcgagttcgtctgcgacgccctccctgtcgcgctcgtcggcatgaacggggatctcatgagccagtacatcgaattcgtagccgaccgcctgctcatggcgctcgggtgcaagaagatgtacaacgtga

SEQ ID NO: 303761 - DNA, 282 bp, Zea mays
ctgagttcttgcgttacctgggctcaaaaagtcgggcaggggttgtaaaagttgatgcagggactacattatctttggttccaccatcagatttcctaacaaatgtgttacaagttgatggtccagagcgcctttatggtgtggtattacacattccacagatctctgctgctgctgcactgaggccacagttaactgggaccgaacaacaaccttactatgatgaaaggggactctgcctacttcacaaagagagtatagtatcatttctccgtatgacag

SEQ ID NO: 303762 - DNA, 308 bp, Zea mays
  unsure (1)..(308): unsure at all n locations
gataatttaatngagatgaactcaagataaccaaactggcgctgtccatattgtaacacctcctcaagcttcactgacctacgtattgaccaaaagatgatgaagatactagaagagactggagatgatgtcactgatgtccttgtatttggtgatgatttatggaaagttgttccagctcaggatgaaaaatctgatagacatagaggtgacacaattcagcaggctggagatgctgtagaaactggttcacttctcgagatgtcatagatctgataaatggcaatgatgatggtagatatgaaatg

SEQ ID NO: 303763 - DNA, 303 bp, Zea mays
gccacagatcaccgtgtgctttgacatcgacgccaacggcatccgaacgtgtctgccgaggacaagacaacggggcagaagaacaagatcacaatcaccaacgacaagggccgtctctccaaggaggagatcgagaagatggttcaggacgctgagaagtacaagtctgaggatgaggagcacaagaagaaggtggaggccaagaactcgctggagaactactcctacaacatgcgcaacacgatcaaggacgagaagattgcgtccaagctgccggccgatgacaagaagaagatcgagacg

SEQ ID NO: 303764 - DNA, 307 bp, Zea mays
gatcgccggtcgccgcctcctctccaggctgcagcacctgacgccacttcatgagcttctcggcctgcaccttcggccagggcccggcggacgcgtccagcacgctgtgcacggcgtccatcttcaccgcctcgcgcgcctgctccgcgacgttgagatccaaacaccccgtgagcatctgcagaatcaccatgccgaacgcgtacacgtccgactccgttgtgagctcgccggtcatgaagatcacggggtccatgtaccccgccgtgcccatcgggttcgtgcggcggccgatgtctcctcctcc

SEQ ID NO: 303765 - DNA, 302 bp, Zea mays
gcagggtttcgcgtacctccccggcggtgtgtgcgtgtcgagcatggggcggccggtgtcgtacgagcaggccgtggcgtggaaggtcctgagcgacgacgacacgccgcactgcctcgccttcatgttcgtcaactggtccttcgtgtgagtgaggaccggccccctagcatttgcagctgttataccctgaactctgtatccaagtactggtcgctcttgcctttgcccaggcaaccctgtgaaacgcacctgccccccagttacatcacgtggctgaccacgacacaccttttgtagtt

SEQ ID NO: 303766 - DNA, 160 bp, Zea mays
gtcttcctctgccgctccccaccgctgggcgccgacgccttctctctcctcaagaagcgcatcgacgagatgtaccaggtcaacctcatcctagacaacctccccgccatccgctacaccaggaaggacgactacatcatgcgctggacggggtaccccg

SEQ ID NO: 303767 - DNA, 264 bp, Zea mays
atcccgatgagcgtgtagagtatggggccgggattctctccagtccagaagaacgctgagcatatgccttccccatcccgatgagcgtgtagagtatgagttctggacaaacagtaatgatgaatgtggtcctaaatgtgatatgcaaatggacttcgtgaggagctttagaggaactgcacaaattcttgagaaaaagggttacactcagtttactcctcattatatcacatggtattgtccagaagcttttgttgatagcaa

SEQ ID NO: 303768 - DNA, 257 bp, Zea mays
ctcgccgtctgccttctgcgtctccatctcggcctctgtcccttgcaagttcactctcatctccaaccatgggtaccgcgtagtcccacatcaacattgtggttattggccatatcgactctggcaagtcgaccaccacaggacaccttatctacaagcttggaggcattgacaagcgtgtgatcgagaggtttgagaaggaggctgctgaaatgaataagcggtccttcaagtacgcgtgggtgctcgacaagctc

SEQ ID NO: 303769 - DNA, 251 bp, Zea mays
tgaagatcaagctttcacaattttgtcatgttccgatctcaaatatagtgaacctccatgacgtgacaaacatttggcacatccccttgctgctaagggaccagaagacccatgaagctattctgaaagttttagatctcagtatgatggaaaagtacctcgggaacctgagttagggatgtggactaaaagagccaccaagttggacaaattgaagacttcggtcaagattgccatggttggtaaataca

SEQ ID NO: 303770 - DNA, 251 bp, Zea mays
atcgtggcgctcaagaaggtgcgcttcgacaacctcgagcccgagagcgtccgcttcatggcccgcgagatcctcatcctccgacgcctcgaccaccctaacgtcgtcaaactcgacggccttgtcacctcccgcatgcctgcagcctctacctcgtcttcgagtacatggagcacgacctcgctggcctcgccgccagtcccgaaattaagttcaccgaaccacaggttaagtgctatatgcatcagctg

SEQ ID NO: 303771 - DNA, 188 bp, Zea mays
  unsure (1)..(188): unsure at all n locations
tggagcatataacttcaaaggctgcagctcaaacatacccagttcaaacatattgttggattcatgcagaaggcatttagagaccatgaggcgctgacgtaccgatatttctactgcgtggaaaactgctgcctgggtgagggttccctatccgttccaatggggcnctccaacgttccatttcaaga

SEQ ID NO: 303772 - DNA, 150 bp, Zea mays
tgcattctgggttgtaggaatggactatggcgagtggactgagaatagccgtgggacttacaacaagtgggatggtgtttctcgttgcacgactcaggtgtttccgggagcatggactgctgtgatgctgtcacttgacagcccaggatt

SEQ ID NO: 303773 - DNA, 275 bp, Zea mays
gagacggggagaaacgtatgcactcctaatttttatggccaggtatgacgaattggctagcaagagcaatgttgaatacattgctggaggtaatgttagtgcaaatgcatggattactgcttcatgattcattctctctcttctactatttgtagtgtttcattctttcaggagccactcaaaactctatcagggttgcccaagtaagctctgaagaaaaaccacaataatattcaaagctattagcctatgaccagtcctgattggttacataa

SEQ ID NO: 303774 - DNA, 275 bp, Zea mays
atctcatcctccagcgcatatgatggttatctggaccattgcagggttgctggtgactccacgaacaccgctattttccagaaggtcatctcatcctccagcgcatatgatgatcagttcaagcagctcatttcgggcggaaatgacgcggagagtgcttactgcgaacttgttatacaggatatccaagacgcgtgcagtctttttgagcctatctacgatgagaccgatggggctgatgggtatgtctccgtggaggtgtctcctaggttggc

SEQ ID NO: 303775 - DNA, 285 bp, Zea mays
cgcagaggcgcagagacaggcgtcttcgtactcgcctatctccgcgactcaaagcttcttccatttcctaccgccgccgctgcagctccaccccattccgtcgacaccatgagggagtgcatctcgatccacatcggccaagccggtatccaggtcggaaacgcgttctgggagctctactgcctcgagcatggcattcaggccgatggtcagatgcccggtgacaagaccattgggggtggtgatgatgctttcaacaccttcttcagtgagactggtgctggg

SEQ ID NO: 303776 - DNA, 281 bp, Zea mays
ggagctcaacatggacctgttcaggaagtgcatggagcctgttgagaagtgcctgacggatgccaagatggacaagagcaccgtccatgacgttgtacttgttggtggctccattcggatccccagggtgcagcaactgctccaggacttcttcaacggcatgtagctgtgcaagaacatcaaccccgttgaggctgtcgcctatggtgctgctgtccaggctgccatcctgagcggtgagggcttcctgaaggtgcaggacctgcttctgctggacgtca

SEQ ID NO: 303777 - DNA, 146 bp, Zea mays
tcatctttgctgggaagcagcttcaggacaggagcacgcttgccgactacaacattcagtaaggagagcagcctacagttggtggtgcgctctcaggggtggcattcagatctttgtgaatacgctgatcggctagactatcatcc

SEQ ID NO: 303778 - DNA, 273 bp, Zea mays
atcgatggttcctcgtactacattgctgatggaatcgctggtcgcaaggcaagtgtgttgaattgcaaccatccagtgactcagaagctgattttggacagcctccgccattgggtgctcgacttccatgttgatgggttctgcttcatcaatgctcctttactcgtcagaggtccacgtggtgagggcctctcacggcctccacttctggaagccatagcatttgatcctgttctttcaaagactaagatcattgcagatccttggtctccg

SEQ ID NO: 303779 - DNA, 267 bp, Zea mays
gatgcgtatcatcaacgagcccactgctgctgctattgcctacggtcttgacaagaaggccaccagctccggcgagaagaacgtgctcatcttcgaccttggtggtggcacgtttgatgtgtcgctcctcaccatcgaggagggcatcttcgaggtgaaggccactgcgggcgacactcaccttggcggcgaggacttcgacaatcgcatggtgaaccacttcgtccaagagttcaagcgcaagaataagaaggacataagcggcaa

SEQ ID NO: 303780 - DNA, 266 bp, Zea mays
tgatgaacctgggattctcccaccctgtacggatggccattcctggaagcctggcggtcaaggtggaggagaacacaaggatcaccgtgagcggctatgacaatagcgcgatcggtcagtgtgctgctaccataacgaagtggaggccacctgagccatacaggggcaagggtgtcagatatatggatgaagttgtcctgcagaagggaggaaaagccggaaagatgacatggcgtgtgtcatggcgcgctctccttacttcattt

SEQ ID NO: 303781 - DNA, 241 bp, Zea mays
agctcaagtccggtgggctctgggtgcacgcgcccatcgcgcccacgaacaagtgcatccagatgctcaaggagctggacgcgccggtggagcatctcgtgctgccgcccttcgcatacgagcacaaaatcttcgtcgggcccttctccagcaagttccccaaggctcagatatgggtggcgcccaggcagtggagctggccaatcaacctgccgctcgagttcttcgggatcttccgggc

SEQ ID NO: 303782 - DNA, 266 bp, Zea mays
gtcgttccctgttctcttcgtcgggattcaaggatgcgacgagagggaaggcaacaatccatcatggttcaacaggattgaagttagtaaagtagtatctatcatcaggaacctgacaaggggtgaggatgttcatgaatctgatataggagtgatcactccatatcgtcagcaagttgccaagataaagaaagccctggaggcatttgaaatgcccagcttcaaagtcggaagcgtcgagcaattccagggccaagagagggagg

SEQ ID NO: 303783 - DNA, 260 bp, Zea mays
tgccattacactacaatactactgcgcggtaggctcgcactcgcaccacaccacgccaccgctgctgcctgctcctcacagtcctccccgcgctcgcattgcgattcgcgttccacaaatgggaggaaacaatgaggacaaagcagtggttatccagatgttgctgttcgttgcaggtatcaacaccctcctgcagagtttctttggtaccatgttgcctgcagtgatcggcgggtcatacacctttgttctgcctacca

SEQ ID NO: 303784 - DNA, 249 bp, Zea mays
gcagcttgttggcgggcctagtgcacgccacaccgcgcatgagatttcgctcagcgagtcccatacggcctcggactcacagatccgaatagagaacttagtgttcctagacaggcattcaggcaaaatgttcatcaaaagctggggcgccgagagcccgaatgacagccccgcccgaatggagatcgagtcggagtaccggtacgacacgacggaccccgtgcacgacgccaaggacggcgccccccg

SEQ ID NO: 303785 - DNA, 293 bp, Zea mays
aggtgatccactcccgctgggccatgctgggcgcgctcggctgcgtcttcccggagctgctcgcccgcaacggcgtcaagttcggcgaggccgtcgtggttcaaggccggctcccagatcttcagcgagggtggactggactacctcgggaaccgagcctcatccacgcgcagagcatcctcgccatctgggcctgccaggtcgtgctcgagaacctcgctgaccacattgccgaccccgtcaacaacaacgcttgggcctacgccaccaacttcgtccccggcaagtgaggg

SEQ ID NO: 303786 - DNA, 308 bp, Zea mays
gctcgttctgttcgagtgctcggaacgcacacaccggccggtctccgatctccgatccccgatcccctcgtcgatccaagatgcagatcttcgtcaagactctcactggaaagactatcaccctcgaggtggagtcctctgacaccattgacaacgtcaaggccaagatccaggtcaaggaaggcattcccccggaccagcagcggctgatcttcgctggcaagcagctggaggatgggcgcacactagcagactacaacatccagaaggagagcactctccacctggtgctccgcctccgcggtggt

SEQ ID NO: 303787 - DNA, 294 bp, Zea mays
ctaccccacacagaagcggcggcggcggagcaaacgcaggcgaaggcgagggtgtgagggaaggagcaccagccatggtgcacgtcaacttctaccgcaactatggtaagacgttcaagaaaccaaggcgtccttatgagaaggagcgtcttgatgctgaactgaagctggtcggtgagtatgggctgaggtgcaagcgtgagctttggagggtccagtatgcactgagcaggatccgtaatgctgcaaggcacttgctcacccttgacgagaagaaccccgtcgtatctttga

SEQ ID NO: 303788 - DNA, 283 bp, Zea mays
gcagaacaagatctgaaggtgatcaggaagaaccttgtgaagaagtgtgttgtagtcctccttgttctcagcaatctcaaagaagagctcaacacacttctttgagattgctgagaacaaggaggactacaacaagttttacgaggctttctccaagaacctcaagcttggcatccacgaggactcgcagaacaggaccaagatcgccgagcttctgagataccactccaccaacagtggtgatgagctgaccagcctcaaggactacgtgaccaggatgaag

SEQ ID NO: 303789 - DNA, 270 bp, Zea mays
agccgtgacatgcatgaccatgttgttggggtgtgctttgtagcccaggatatgactgttcacaagttggtcatggacaaatttacccgggttgagggggactacagggccatcattcacaacccgaacccgctcattcctcgatatttggtgccgaccagttcggatggtgctctgagtggaacgcagccatgaccaagcttactgggtggcacagagatgaggtgatcgacaggatgctccttggcgaggttttcgacagcagcaatg

SEQ ID NO: 303790 - DNA, 265 bp, Zea mays
tgtggcgattggccatgtcgactctggcaagtcaaccaccaccggccacctgatctacaagcttggaggcattgacaagcgtgtgattgagcaggttcgagaaggaagccgctgaaatgaacaaacggtcctacagtacgcttgggtgcttgattagctcaaggctgagcgtgagagaggtatcaccattgatatcgctctgtggaagtgtgagaccaccaagtactactgcactgtcattgatgctcctggacatcgcgacttc

SEQ ID NO: 303791 - DNA, 281 bp, Zea mays
ttcatctattaaaacaagtaagacaatagaaaggcttggaagcaatggtgttccacccaagaacaagccgattccaagtgaggcaacgagtcaggaagcgcaccatggtcggatgaacgaagaagaaaaatctgttgcatggaatggatgtatgttattagattaaaataacaaaatttatgtatggatagaatcacaaatgaattctgaaacattttctcataacagtaaaaaaacaaaatttatgtatggatagaatcacaaatgaattctgaaacatt

SEQ ID NO: 303792 - DNA, 287 bp, Zea mays
ccaaagttgagccggtggctaatgggatgaatggacatacagatgagaaaactgctgtagcaaccagtgtttctctcaacacactaagtggttttgaagctgctgatagccgaaatagttgggaaaacttcaagcttttgctttcttatgagaaaaatgagatgccctatgaaagtgtatctgataaagttactcttgtagtaagtgtggaagatacaggaataggtataccattggatgcacaagccaaggtgttcacacctttcatgcaggctgatagttcgact

SEQ ID NO: 303793 - DNA, 261 bp, Zea mays
cccaggcagattttgacctcggttgtgtatgctataatgaagggagattcgatcctggcatcgccagaactgatttcatcctcattgattctgcagaagtttcatgtactagtggtactagttggactgatgaagtgacattacttctttgagaaggtctggaaaattttcgtggactatgggctgagattgctgaacatgttgctactaagacaagatcacaatgcatgttggcactttcttcatatgcaaatcgtagac

SEQ ID NO: 303794 - DNA, 275 bp, Zea mays
ctcaacatggacctgttcaggaagtgcatggagcctgttgagaaatgcctgagggatgccaagatggacaagagcagcgtccatgatgttgtccttgttggtggctccactaggatccccagggtgcagcagctgctccaggacttcttcaacggcaaagagctgtgcaagaacatcaatcctgatgaggccgttgcctatggtgctgctgtccaggctgctatcctcagtggtgaaggcaacgagaaggtgcaggacctgcttctgcttgacgt

SEQ ID NO: 303795 - DNA, 266 bp, Zea mays
tgtagattgctcaaaacctttatgagggtatcaacctttcctcagaagaaacaactgggttaataacgtacataagaactgatgggttccatatttctgatggagctgtggaggacattcgttcactagttatagaaagatatggtcagaagtacgtttcggaggacattaggaagtatttaaagaaggtgaaaaatgctcaagaagcccatgaagccattaggcccaccagtataaggaggccgccatcatcattggttggaata

SEQ ID NO: 303796 - DNA, 286 bp, Zea mays
cattgccattgcaaaaacattgatacatgcagaagtggtttttgtttttgtttcagcttctggccactagaagctgctgcagactgccaagcgcacaacttttcagcccgattctataataatcaatttagtcaaaaccgttcaaaatcaacgtgaacacagaatcgaccgagtcgttgagaacttgcgatagtaggaaaccgtcactttctacatcctaaacatatagacttttttatcttcctccgcatgtagtctccacaatactcattctctccacagccag

SEQ ID NO: 303797 - DNA, 284 bp, Zea mays
cgggtcttctccagtctccaccggaggcgggaggcgtagggtttaggcgcggaatggcggcaggagcaggggggcgcggcgaatcctcgccggcgatcaagccaattagtaaggcggtagtgcaccgcatctgctctggccaggtcatcttcgacctttcctccgccgtcaaggagctcgtcgagaacagcctcgacgctggcgctacctccgtcgaggtcagcctcaaggcctacggcgaggagtggttcaaggtcgccgacaacggatgcggctcttgctct

SEQ ID NO: 303798 - DNA, 272 bp, Zea mays
  unsure (1)..(272): unsure at all n locations
ggctaggaagatcgagactagacagattgtggtcgaagagattagaaaggaggagcacatcgagaaggcactgaacgaagaggccaacatcgaggatgtcgatacagacgacgagttgaacgaagcagaggagtacgagtcgtggaaaaacaaagaaatagcaaggattaagagggacagggaggaaagagatgcgaggttgaaggagaaggaggagatcgaganaagtcaggaatatgaccgaggaggagcgtcgcgaatgggagcggaag

SEQ ID NO: 303799 - DNA, 287 bp, Zea mays
caagtatccagtgccaatttttgaccagttaattgatgagttggcccattctaaatggtttagtaagctcgatctccgagctggttatcaccaaatcctcttgaagcctggcgaagaatataaaacagcttttcaaactcatattggtcacttgagtttcgggtgatggcgtttgggttaactggtgctcccaatacatttttaagtgccatgaatgaaactctgaaaccggtgttgcgaaaatgtgccctggtattctttgatgatatactgatttacagtaagac

SEQ ID NO: 303800 - DNA, 274 bp, Zea mays
ctctgttacttctcccgccgccgcgaatcccctcccgttctccgccatcggcaatcccctcccgtcctccgcgacttctgctgagagcgagaagagatggccggctaaggtgatgggccggcaatcggcatcgatctcggtacacctactctcgcgtcggtgtgtggcagcacgaccgtgtcgagatcatcgcctaacgaccagggtaatcgcaccacaccctcgtacgtcgccttcaccgactccgagcgcctcatcggagatgcggccaaga

SEQ ID NO: 303801 - DNA, 234 bp, Zea mays
atctacaagcgtgtggctttattgttgatgctacatgttacagatttgactaatgggaatgctgagctaggaagctagctaacaagctcaatcattccccttagtcaaatctgtaacctgtagcatctacaagcgtgtggctttattgttgaaatcctgatgtttatcgttctctataaacacaaaactgaacaaataacctcgctgctatgaataaactcaggtgttcagtgt

SEQ ID NO: 303802 - DNA, 275 bp, Zea mays
tgaagttattataaacctccaatgtgggctaacatcacttcagaatcttcttacaagtaatccaggcttagctgctgtttttgctaccaaggagcgtctggttcctctgtttgaatgccttgcactccatgtttctcctgcaagcagtctcccacaaatctgtttaagtattctttctctgttgactaagcatgctccttgtttggtggctatggttgcagaaaggatgagcctcattttgctatttcagatactccactgcaatcctccttgca

SEQ ID NO: 303803 - DNA, 285 bp, Zea mays
ctttcatgcatacttgaagattatggtccagcttctgtgccaatatctcagggatggttagctcttgtcctttctgagattcttggggacaacaaggcccaaggttcaaaaggaacgacacagcctgaaccagagaaagtgaagaatccggttgattaccataatgcttcaactgcaactcaggtcctgaatcaattaggtagtgctgttgttaaattagcaagcacccaatcgaactgtgagcctgggtctgatgacaaagataaaggaccactttctgatttt

SEQ ID NO: 303804 - DNA, 288 bp, Zea mays
caaggacagcagcgggcagcatgtggacgtgagccccagcagccagcgcctgcagctcctggagccttttgacaagtgggatggcaatgacctggaggacctgcagatcctcatcaaggtcaaagggaagtgtaccactgaccacatctcagctgctggcccctggctcaagttccgtgggcacttggataacatctccaacaagctgctcattggtgccatcaacattgacaacggcaagggcaactccgtgcgcaatgccgtcactcaggagtttggccccgtccc

SEQ ID NO: 303805 - DNA, 226 bp, Zea mays
gccacctgaatggcggggaaaaggccaatggtgcgagggacaccagaattgggaaggtccgcatccgcctctcgacactcgaaactgatcgggtgtatacccactcataccctcttattgttctgacacctggtggtgttaagaagatgggtgaggtgcagctcgctgtccgtttcacgtgttcatcactgctgaacatgatgcatctgtactcacagcccttgct

SEQ ID NO: 303806 - DNA, 284 bp, Zea mays
ggggaatgggagccaatgggaggctgggacatggtggtgttgaagataagaaaaaaccaactcttgtggaagcattaaaagatcgtcacgttaaaagtatagcatgtggttctaatttcacgacctgcatttgtatacataagtgggtttcaggtgctgatcagtctgtctgctcaggttgtaggcaaccatttggcttcacaagaaagagacataattgttacaattgtgggcttgttcattgccatgcatgtagttcaaaaaaagttctgaaagctgctttg

SEQ ID NO: 303807 - DNA, 278 bp, Zea mays
gtcgaaaagctactctcgcgagctttaagaggtgaggaagacaaaaatgtggagataaagctgaagacatttgggtcagagcaatctaagggtgcaatatttgttattgtcaatgcttgttccagcagagattacacacaaaatattgttggtgtctgttttgttggacaagatgttacaggacaaaaggtggtcatggataaatttatcaacatacaaggggactacaaagctattgtacacaatcctaatcctctgctacccccaattttcgcatc

SEQ ID NO: 303808 - DNA, 281 bp, Zea mays
gaagccctagcaaacaggttttccttatatctactcgagcaggtaatttaggtgtaaaccttgttagtgctaaccgcgtggtgatatttgatccaagttggaaccctgcccaagacttgcaagcacaagacagatcatttcggtatggacagagacggcatgttacagtatttcgcctacttggtgccggttcacttgaagagctcatttattctaggcaaatatataaacagcagctttccaacattgcagtctctggaaaaatagagaggcgttacttt

SEQ ID NO: 303809 - DNA, 288 bp, Zea mays
ctgtggcagcctgccagagatgctcatacagtggtgttcttggggttgttccgggagtgattggctgcttacaagctctcgaggctataaaggttgcaactggtgttggttatacttcgtggagagtctccagattgcacgcattgtggcgagaactccgttttcacagacagggactttcagaagtttgactatgagagcttcagacagtcaccactgtctgctaaggcagcaccaagcgtgaacgtactcccagagagcgcgcggatcatttgcagcgcgtaggag

SEQ ID NO: 303810 - DNA, 100 bp, Zea mays
ggcatgccgacctgctcctatgcaggttacctggattggctaccccaacacaacatgtttgccaacaatagactaccgaatctcagactcattgactgat

SEQ ID NO: 303811 - DNA, 140 bp, Zea mays
gaggacagcaagagtcctaagggccgtcagaagttgttctcaaatgaggagaagattcttctgaacaagcgagtgcctgatctggaaacagctacttctagtaaatggcttccacttcacacccttgctgcatctggtga

SEQ ID NO: 303812 - DNA, 309 bp, Zea mays
ggaaagcttatgacaatggtgtccgagaaggtgcatttggtttgctattgaattcagttgtccttggcgttggttcattcctcgttgatccactatgccggatgattggtgcaagattagtttgggccattagcaacttcacggtgtttatgtgcatgatggctacaacgatactaagttggatctcttctgatctgtactcaagcaaacttcatcacatcatcggggcaaataaaacagtcaagatcacggcattggttgttttctctcttctcggattgccactctccatcacttacagcgttccgt

SEQ ID NO: 303813 - DNA, 175 bp, Zea mays
gagcaagatgatcctaggctttgctgaaggcttcccaacaatgctgaagggtgacattgctatgttcagaatgcagcctaaaattcactacgctgaggacgattgtccagttgcaactccagatggctttccgaaggatgatgaacttcactttgagattgaaatgtcggatttc

SEQ ID NO: 303814 - DNA, 311 bp, Zea mays
gctcgtcacatataaatggccaacatggttacacaagcagaaagagaagcaaaggattatatgggcatataagatcttatttctggatgtcatttttccactttcactgaggaaggtgatttttgttgatgctgatcaaattgtgagagcagacatgggagaattgtatgacatgaacctgaagggtcgcccgcttgcatatactccattctgtgataacaacaaggatatggatggttttcgattttggaagcaaggtttttggaaagatcatctgcgaggaagaccgtaccatatcagtgcgctttatg

SEQ ID NO: 303815 - DNA, 301 bp, Zea mays
  unsure (1)..(301): unsure at all n locations
gtctatgacaggaacaagggcaacaccaacacacacatcaaccttaaatgtttcatggtcggtaatccactaactgacgaatactacgactcaaaggggctggctgaatatgcttggagccactcagtagtgtcagacgaagtttacgagcgtaatnagaaggtctgcgacttcagggtctcaaactggaccgatgactgcgatacagcgatgagcgccgtgttcagccagtaccaggagatcgacatctacaacatctacgcgcccagatgcaacctccctccgtcgtcagctgcacttg

SEQ ID NO: 303816 - DNA, 291 bp, Zea mays
gctaccgcttcgctctaccgctccggacgtgccgtctgcgacgccgtggacgaggcagctcggcgcgggatcgtggcgtccacggatgaggtgttcgtgacgtccaagatgtggtgctcgcagtgccacccggatctcgtgctaccgtcgctctaggtgagcttgcagatccttcagatggattatgctgatttgggcctggttcattggccgatatctgcagagcccggccagccacagttcccgtttaaaacggatgacatcatgcccattgacctaatacgtgtatcg

SEQ ID NO: 303817 - DNA, 277 bp, Zea mays
  unsure (1)..(277): unsure at all n locations
gataccgcttcgctctaccgctccgaacgtgccgtcggcgacgccgtggccgaggcagcgcggcgcgggatcgtggcgtccagggaagangtgttcgtgacgaccaagatgtggtgctcgcagtgccacccggatctcgtgctaccttcactcggggtcagcttgcagaaccttcaaattggatatcgtgatttgtactggttcatggccgatactgcaagcctgctagcacattccgtttataggagactctgccatgactatagtgtatgcggca

SEQ ID NO: 303818 - DNA, 299 bp, Zea mays
atgtgacacacacacaagcagatctcccccaaatccacgcgtcggcacctccgcttcaagatgctgatctacgtgaaaccctgactggcaagactatcaccctcgaggtggagtcgtctagacaccatggacaacgtcaaggccaagatccaggacatggagggcatccccccaaagcagcagcggctgatctctgccggcaagcagcttgtggacggctgcacgctggctgactacaacatcgagaaggagagcacactccacctggtgctccgtctcagtggtggtatgtagatctt

SEQ ID NO: 303819 - DNA, 295 bp, Zea mays
acgtacttcacacttgtactgaaatataggtttatccaatataggtttcgcatgcgtcgccatgtgtttgagcgtccgttcttgctgtgcaacaagtggatccgtacttcgttcaacgtccaagctgtgcgggtgagctaggcctatctgcccttcagaaagttgttgctgccgtacgtatccttgcatacggtgttcctgcggatgccgttgacgagtacgtacgaattggagaatctacagcacatgaggctttgaaacacttttgcactgccatacaaactgcttttggggg

SEQ ID NO: 303820 - DNA, 243 bp, Zea mays
agcaacaacatccttgtgatgtacgactgctacacgccagccggcgagccaagcggcaccaactagaggcacaacgcgacaagagcatcagcagccctgaggtcaccgccgaggaaccgtgatatggcatcgagacacgacaacacccgcctccaatcacgcacgaactgggcctgtgggtggcgaagcggtagcatccccagacctcatgaggccttaccactgtggaagcagcgccgaaaa

SEQ ID NO: 303821 - DNA, 274 bp, Zea mays
acctagtcctctgttacttctcccgctgccgccaatcgcctcccgttctccgccaccgccaatccgctctcgtctccgccagctctgctgagagcgagaagagatggccggcaagggtgatgagccggcaatcggcatcgatctcggcacgagctactattgcgtcggtgtgtggcagcacgagcgtgtcgagatcatcggcaacgaccagggtaaccgcaccagaccctcatacgtcgccttcaccgactccgagcgcctcatcggagatgcg

SEQ ID NO: 303822 - DNA, 294 bp, Zea mays
gcgtttatatgagcaccttcagaagtttctgaaagctaatggtgccaagaaggtttctggtggtataatcacaccatataagttgcagttgaaatgccttcagcgggaattcaaggatgttatgaatactgaggaaggaaggatatctacatatatacagttgatgcttttcaaggccaggagcgtgatatcattattatgtcttgtgtccgtgcttcaaaccatggtgtaggttttgtcgctgatatacgtcgtatgaatgtagctctaactcgagcaaggagagctctatgg

SEQ ID NO: 303823 - DNA, 290 bp, Zea mays
cacaagcgagcgagggactcggggcggaagaagatagagaagaggtctctctcctctcggcgtccccgttccccaagctctcgtctgctgcctgcctgctctgcctgcgctgcaaaaaggagtttgtcatgcgtctaagcgcatcctcaaggagctgaaggacctgcagaaggacccccccacatcatgcagtgcaggtcctgctggtgaggacatgtttcattggcaagctacaattatgggaccacctgacagtccctatgctggtggtatttttttagtgaacattc

SEQ ID NO: 303824 - DNA, 267 bp, Zea mays
  unsure (1)..(267): unsure at all n locations
ctcgagccgattcggctcgaggccgcctcctactccgccccggccacctctgatccggaccgaccgtcggccatggcgctcgacttcgacgagttcgggcgggccttcattagccttctggagcaggagatagagacgctgcttcgggggcttgctgncgcagcgangcaacatcggctacggcaaggccgtcgcgaggatcctccgcacgtcgcttaggatcaagggcatggagaagatgctgcagtcccccgacggcgacgtcat

SEQ ID NO: 303825 - DNA, 155 bp, Zea mays
aaatccttggagtatggaagatgtggctgatgcattatacagtgtaacagacctgacacgatatgagaagaatctgcgccatgaaaagcactatcgctatgtcaggtctcatgatgttgcttactgggcacgcagctttgaccaggatctggata

SEQ ID NO: 303826 - DNA, 304 bp, Zea mays
ttcagaagaatgttacaccatcctgatgggatacatgctccaggagagattgctggtacaggcagtggtcatgagcacggccttttacctcaccagatgcgtggatcactatcgcagtacaacatattaaccctgttgggctattcctcgagtaattgcacggcatgctcccatgcggtattgtatcaatatcggaggagagggatggatttcgtgatgcaagtaatcaatgaaccaacctatttggaagacctgaccggcctcacggagttgatgaaatccgcgtcttgctcacaggtcgagt

SEQ ID NO: 303827 - DNA, 287 bp, Zea mays
  unsure (1)..(287): unsure at all n locations
cggcacgcggaaggccgtcatcgacatcgtcggctctgctactccacgttgtctgcgatcccgatcatggagngcgacagtaccaacctcgacgcggctatagagtcgctcctgaacgtggagacgcagatgaggctggcaggcgatgtcgccggcacgcagaagagagtcatcgacatcgtcgagctctgctacaagaccggcgcgtggaagacgctaaacgaccagatcgttctcctctccaagaggagaggccagcttaagcaggccattactgctatggttca

SEQ ID NO: 303828 - DNA, 298 bp, Zea mays
gcttggcccagggagttgcaacctgcagcagctgctccttattactttggtgagttggaggaggcccttatccatggcacccgtacatctgttgatcacggcatgatcggaagtgatgtggacacagagcgtaagacagctggataccttgcagctagggcccccacactggagatcttcccttcatggccaatgagtcatctacagcagccatacagtggtaactcgcactcagtagggagcaccatgagttcgagctcaggtcagaacagtatgccacagaccgagctgtgtcccc

SEQ ID NO: 303829 - DNA, 292 bp, Zea mays
gcttgtgtagattattgggctgttgtcttccactaattaagtcgcttaaaggttctccaataattgcttaccatgggaagatgaaacagagccttcgagagaaagctttggcatcattttctgctctttcaagtggcgttctagtctgcactgatgatgcagcaaggggtcttgacataccaagtgttgatctgattgtgcagtatgatccacctcaagatcccaacgttttcatacatagagctggccgtacagcacgctatgatcaagaaggggatgctttgtttttctc

SEQ ID NO: 303830 - DNA, 288 bp, Zea mays
gcaaacgcgaaaccctagcctgagctctatctccggtcacagctggtcagatgtggatgcggacgcggacgcagcgagggatgctttgctgattgattattgctttgtgggtaggttagcgacgaaggatgagcaggcgctggagccgcacgatctacgtcgggaacctccccggcgacatccgggagaaggaggtggacgatctgttctacaagtatggtaaaattgttgacattgacctgaaggtccccccaagaccacctggttatgcttttgtgagtttgaaga

SEQ ID NO: 303831 - DNA, 286 bp, Zea mays
ttcagaaatacaatgtttggccagaaggtcgtccacagcattgttgtgcttggcttggagccgcttgcagttttccagaatgttcttctgcaattattcctgaagaggttaacaaaattggcagagattctatctcgtatgtggagtcccttatcaagtctaccatgggtgggttggaaggtttgataaatattctagattcagaaggtggatttggctcattagagatgcaggaaattcaaacgacactgcgtgaggaaatcaaaagtgcttgcaataccgtcca

SEQ ID NO: 303832 - DNA, 218 bp, Zea mays
gtcctctgttactactcccgccgtcgacaataccctcccgttctccgcaaccgccaatccgctcccgtcctccgccacctctgctgagagcgataagagatggccggcaagggtgatgggccggcaatcggcatcgatctcggcacgaactactcttgcgtcggtgtgtggcagcacgaccgtgtcgagatcatcgccaacgaccagggtaaccgcac

SEQ ID NO: 303833 - DNA, 128 bp, Zea mays
ctggacatcgcgacttcatcaagaacatgatcacgggtacctcccaggctgactgtgctgtcctgatcattgactccactactggtggttttgaggccggtatctctaaggatggccagacccgtgag

SEQ ID NO: 303834 - DNA, 248 bp, Zea mays
gatcttcctatcgaatcgaaaatgctaacgagggctctagatgaagcgcacggtaaagttgagaattacttttttgacatcaggaagcagttgtttgagtatgatgaggtattgaatagccagagagatcgtgtatatgcggaaagaagacgtgctcttgcatctgacagtcttcaatcacttattgtggaatatgctgaattgacaatggacgacatattaggggctaacataggacctgatactcc

SEQ ID NO: 303835 - DNA, 311 bp, Zea mays
ccacctccaaggctcgtggtgtagcttgccactctcacaaatcaagcattcatgcactgatctcgacattcagatcccaactgccttcgatgccttcgctgaggccaatgctggggactcagctgcggcagaaggtcgaacgactacgatcacgagcgcatccagcagcgtaaaagtcgcaagagcctgactaccgtccacggattgaagaaggagttcagctacagcaagatcctcatcgatctcaagaaagagttctgctgcaatggtacagtcgtccacgacccagcacttggacaggtcattcagct

SEQ ID NO: 303836 - DNA, 299 bp, Zea mays
ctaattagaggctcctccgcgctctcggcgggggtttagctgccgtggcctgaggatttgtagaagacatggcctcgacgttcggtgccacttctacagttggccttatggctgctccaacggggaagaatgtgcgccttcagaggagggctaacttcagagtaaaaccggctaaggagctgtacttcaacaaggatgggtcagctatcaagaagctccagactggagtcaataagcttgcagacctagttggagttacactcggaccgaagggaaggaatgtcgttttggagagcaag

SEQ ID NO: 303837 - DNA, 305 bp, Zea mays
aaaaaatgcagttgttcctctggtgcagcttgctggtattggaatcttgagcttacaacaaactgcagttaaagcacttgaaaacatctcacagagttggcccaaggcagtagccgatgcaggtggaatttttgaactttcaaaggtaattgtccaggatgatcctcagccaagtcaagcattatgggaatctgcagcacttgtgttatgcaatgttctgcgttataattctgacaactatgtcaaagtctcaatggctgtacttgtgagattgctgaactccaccatggagagtaccgtcacga

SEQ ID NO: 303838 - DNA, 301 bp, Zea mays
ccttgacaatacccaaattgatgatttcaagcttaatattgatcttaatgttgaactacgaaggtatcagcaagaagggatcaactggcttgcattcctccgtcggtttaagttacatggaattttatgtgatgacatggggctcggtaagactctccaagcatctgctattgtagcaagtgacattgcagaagcacgtgcacggaatgatgaaaaaattctgacatctttgattatctgcccttctacattagtggcccactgggaatatgaaatagagaagtacatagacagctctatc

SEQ ID NO: 303839 - DNA, 300 bp, Zea mays
ctgcaattatttttgtttctctgttctacttcgtagtaaaatcatactgatctggttggttctggtgcagaccctcccgggcccggtgaccgatcccagcaagctgcccaagtggaactacgacggctccagcaccggccaggcccgcggcgaggacagcgaggtcatcctgtacccgcagccatcttcaaggacccattcaggaggggcaacaacatcctcgtcatgtgcgattgctacaccccagctggcgagccaattcccaccaacaagaggtatcgcgccgccaagatcttcagc

SEQ ID NO: 303840 - DNA, 157 bp, Zea mays
gctgcactcaggcttttgcagaggcttttggcattagatcccaacgataggccaactgctgcagaagcattagctgatccgtattttaaaggcatcgcagaagtagagagataaccatcatgccagcggataacaaaaatggaattcgagtttgagc

SEQ ID NO: 303841 - DNA, 284 bp, Zea mays
gaaagggaaccttgttaccattgctcaccggttgccttactcttcaattagtttctatgcctatgagagatacaagaatttgcttcagatgctaccgggtcttgagaagaatggtggatttggtgcagatgttggtgttagattgctaggtggtggtttatcaggaatcactgcagcttctgtgacgtatccactggacttggtgcggacacgtcttgctgcccagacaaatactgcctactacaggggcatatctcatgctctttatgcgatctgcagagatg

SEQ ID NO: 303842 - DNA, 293 bp, Zea mays
tcagctcaggccttctcaagagctggttgccaaggatttgcatggagccaagtggaaatttcgtcatatatataggggtcagcctcgtaggcatctcttgactactggatggagttcatttgtcaataaaaagaaactggtttctggggatgcggtcttatttctccgaggtgatgatggtgaactaaggctgggcgtacggagggccattcagcttaaaaatgaggccctttttgacgatttcagttgcgacagtacaaaacggcatacattgttggctgtagctgattcct

SEQ ID NO: 303843 - DNA, 231 bp, Zea mays
gagtggggctacagcaaccgcgtcgtcgacctgatccgccacatgttcaagacccagtagagagagatatttctgcctccctatcgagggtcgtccccgatggcctttggtcgcagacatctttgctgcttgtctatgctgagaataaatgtgatcggtgcccctggacgctggatccatgctggttttggaaaaaaaaaaaaaaaaaaaaaaaaaaaaaggggggccccc

SEQ ID NO: 303844 - DNA, 309 bp, Zea mays
gtaattcgtgagctcggcagaagctgtcagcaaatggttccacagcttggcttcggagggcccagatataaacattgagcctaacgatggcgttaggagtcaattgatgaaagtagataccaaacctccttagtatctccgcaacaatatcgtggagagggaatctaagcccagctttcaaaaaactcttgaaaataacaatctcatccttccttggcttcggggtggtttcttcttccccgaagcggagtagcttcttctggtcctcattgaaataactgctttcaccacttcgaaagtcacttttga

SEQ ID NO: 303845 - DNA, 302 bp, Zea mays
gttgaccatcctgttgaactcctggacgaagtggttgaccacttcttcctcttgaactcctggacgaagaacaagaaggatatcactggcaaccccagggctctccggatgctgaggaacgcttatgagaggcgcaagaggactctgtcttccactgctcagaccacgattgagcattgactcgctgtatgagggcatcgacttctactccatcatcacccgtgccaggtttgaggagctcaacatggacctgttcaggaagtgcatcgagcctgttgagaagtgcctgatggatgccaaga

SEQ ID NO: 303846 - DNA, 299 bp, Zea mays
  unsure (1)..(299): unsure at all n locations
gaggggtttggggacgccgcgggggaaggaggaggacccggcgcgatggagtacctgaccagcgtgctgtcatccaaggtgtacgacgtggcaatcgaatcaccgctgcagctcgcctccaagctctcccaccgcctcggggtcaacatctggatcaagcgcgaggacctgcagccggtgttctcattcaaattgcggggagcatacaacatgatggcanagctctcccgtgagcagttagagaggggcgtcatctgctcctctgctggaaaccatgcccagggcgttgctctttctgc

SEQ ID NO: 303847 - DNA, 301 bp, Zea mays
  unsure (1)..(301): unsure at all n locations
ggcatatataaaggtgaccttgctaaggttgttgatgttgacaatgtacgtcaaagagtagatgtgaagctgatccctagaatagatctacaagctttggctagtaaactggaagggagagacattgtaaagaagaaagcatttgtcccaccaccacggatcttcaatatcgatgaggcgagggagatgcatattcgttggaacggangcgcgataaagatctggggagtatttgatgggttgtaagttgatatgtttgagtttaaaggaagggtttcttgttacaaatcagtctcaacta

SEQ ID NO: 303848 - DNA, 294 bp, Zea mays
ggcattcaggctgatggccagatgcccggtgacaagaccattgggggaggtgatgatgctttcaacaccttcttcagtgagactggcgtgggaagcacgtcccccgtgctgtttttgttgaccttgagcccactgtcatcgatgaggtgaggactggcacctaccgccagctcttccatcctgagcagctcatcagtggcaaggaggatgcagccaacaacttcgctcgtggtcactacaccattggcaagggattgttagacctgtgccttgaccgcatcaggaagcttgcag

SEQ ID NO: 303849 - DNA, 275 bp, Zea mays
  unsure (1)..(275): unsure at all n locations
cacgtctgtcaatgaagtcatttgccatggaattccagatgccagataacttgaggatggtgacattgtaaatgctgatgtactgtatactataaatatgtctcatttaaatcaccatgaccacctttatagtacagagtcacctcacatttcaatgtgcgcanaccctcaagtctcctggtgatttaaatgagacatattttgttggaaatgtcgatgaagcttccaaacagcttgtacgttgtacctatgagtgcttggagaaagctattgca

SEQ ID NO: 303850 - DNA, 107 bp, Zea mays
ttcactgagactgtggacattcagattggtctgaagacttatgatccacaggaggacaagcgtttcagcggctctgtgacattgccgcatatcgctcgtctcaagat

SEQ ID NO: 303851 - DNA, 279 bp, Zea mays
ggcgaccgccgccgccgccggagatggagagacctgctgcttccggggcgctcatctacgccatggtggcgcggggacggtggcggtggcggagcacacgtcctacacgggcaacttccgggtcatcgccgcgcagtgcctgcacaagctgccggcggggaacaaccggttcacctacacctgcgacgcccacaccttcaacttcctcgtcagcgacggatacgcatactgcgtcgttgccacgagtcggctgggcggcagatcctatggccttctgga

SEQ ID NO: 303852 - DNA, 306 bp, Zea mays
catgggatgatgttggaggtcttgattcgttgaggaaagagttcaccgctacataagatgtattaagagccctgaagattgtgatgtatttggagtgagaatgcaagatggcttcctgctgtttggacctccgggttgtggcaaaacacatatagcaaaagcagtggcacatgaggcaggggctaattttattcatattaaggggcctgatatattgaacaagtatgttggcgagagtgaatcagaaattaggaaaatattcaaccgagcacgtattaatgccccatgcatagtattttttgatga

SEQ ID NO: 303853 - DNA, 291 bp, Zea mays
ggatgaatcaatgctattatgatgcatctctatagattagacaactacagagttggtgctgttttaatgcagtccgggcacccaatagcttatttgagcaaggctttgggaactaaatcttaagggttgttcacctatgagaaagaatataagacgattatggttgctgtagatcattggcgccattatttgcagttgaaggagtttcacatttacacggatcatcgcagcttggttcaattgtgatgaacaatgtttgcacactccatggcaacagaaaatgtttactcg

SEQ ID NO: 303854 - DNA, 223 bp, Zea mays
cgcagagctctgtgctcccggcctctgtcttctgccgtcccggccgtttaatttatagtctctactgtgtgttcgtcccatgtgtttagcagcagcagcaggtgtattgtgcgggtatgtaatggtattgcaactatattgggtgtaaaaccataatatatgtggaaaaaatgcaaggaaaaaaaataaaaaaaaaaaaaaaaaaaaaaaaaaaggggggggg

SEQ ID NO: 303855 - DNA, 295 bp, Zea mays
tgattgtgaaagtagtttttttccacttgatttacatcttttctagtctgttctcacctattagcacgttttctatctacagggaaggatgtactagccaaagcaaagacaggaactggaaaaactgtagctttcttgctaccagcaattgaagttgtttcgaaattgccacctgttgatcgtgatctaaagaaacctcccatcagtgttgtagtagtgtgccctacacgtgagcttgctgatcaggctgctgcagaagctaacaagcttcttaaatttcatccatcaattggag

SEQ ID NO: 303856 - DNA, 288 bp, Zea mays
  unsure (1)..(288): unsure at all n locations
gtaaataaggagtttgaattggagaagagatacgagagaaaagcattctgcgaatgcagacaatgctctctgacatgctattcaaggaatcatctcccttgagtatcgtatccgggagtccaaatatcatggacctcgttaagtgtgatggtgctgctcttttgtatggggacaaagtatggcggcttcaaacggctccaactgagtctcagatacgtgatattgccttctggctttcagaagttcatggggattcactggcttgagcactgatangctccaggatgc

SEQ ID NO: 303857 - DNA, 182 bp, Zea mays
gcagccgatagaagaggtgtgatacctgcttcaggcttttctctcagtgcactgcagatttgggaagtaatacgtgaaaataaggacctcaaccttcctgctcacgaggtcatggttgctactgttcgatgtgaagagattgcaaatgaaaacctcaaacagttttcgtctgatgagggttg

SEQ ID NO: 303858 - DNA, 292 bp, Zea mays
tgcagaggagcagggccaagatagtacttgttgcaattggatctggaggatatggcaaggcaaattgctacagccaatggccctactggctataatagggattacctgttctcaatggagaaggcattagccagcattagccacgaagatgattcgatcatagagcttgcaaacgaggtgaggaaggtgctcaacagaacaaaggagaccaagatcactggtgccaatgcttccatgaaatcacatgcccctcttgtgcacctgtccgcgcttccagaggcaccgttgtgga

SEQ ID NO: 303859 - DNA, 280 bp, Zea mays
agacaatatttgatattgatgtggaaactgcatttgaggagaagccatggaaattccctggtgctgatatttcagacttttttaactttggccttgatgaagagaagtggaaagatttttgcaagcagctggaccaacttcgactagaatccacaatgcaatctaggatacgggtgtacgaaagtggccgctctgaacaggattatgacccagatttgccacctgagcttgctgctgtgactggtcatccagacatctctgctgcagtcgcaataaaatg

SEQ ID NO: 303860 - DNA, 279 bp, Zea mays
tttcacccagcccttcattgagtcaggcctggttattttgcctccaataaaaaagcatataacaaattcttgggcattcttgcagccatttacattggggatgtggtgtgttacagggttgtcttttcttgttgtgggtgtggttatttggattcttgagcatcgaataaatgatgatttccgcggctcgccgcgacaacaaataataactattgtttggtaaggatctgaatcgcatcttttgcactcactatacacacatttattttcactttcaaa

SEQ ID NO: 303861 - DNA, 143 bp, Zea mays
gcgacagcgggtcggcgggccgcaggagtggggtcatgggtaaagactactaccagacgttgggcctggcccgcggcgcgtcggacgaggagatcaagcgggcctaccgccgccaggcgctgcgctaccacccggacaagaac

SEQ ID NO: 303862 - DNA, 111 bp, Zea mays
atcctgaagttacccagaaattgaaggtgcatacttccgtcctgtgctactactgccattggagcgaagtatgatcctgaagttacccagaaattgaaggtgcattttgag

SEQ ID NO: 303863 - DNA, 174 bp, Zea mays
cctcgtttgccttgtttaccattcctccccaaaacacatcctgcgatcctcgaagcctccgccgagcatcgatcatgtcggcctactgcggcaagtacgcggatgagctcatcaagaatgctgcctacatcggcacccctggcaagggtatccttgctgctgatgagtcaactg

SEQ ID NO: 303864 - DNA, 214 bp, Zea mays
ccactccctcgcgctctccgcctggaagtccgcgggcctctcaacctggtcgctccgcgttaaccccagcagcggcaacctgcaccccaccgaggcccacctggtcttcccgcatccgcgagaggtcgaccgcctcgccatcgcgcactacgcgccccgcgaccatctcctcgaggcccgcgctaccgcaccaattagggattgttccgcgatt

SEQ ID NO: 303865 - DNA, 166 bp, Zea mays
gcttacgttgatgaggataaggatgagtcgttctatactctaagctaggctcgtgaccatgttgatggctcaccactgctggtggcagcaggaagcaatgggatcattcgggtcatcaattgtgctacagaaaagttagctaagagctttgttggccatggcgact

SEQ ID NO: 303866 - DNA, 171 bp, Zea mays
atagtacttgattggtcccctttttcttcgaaggaagaacttctgcagcagtttcaggatgttggtagtcatggaactaaagtggtagtgtacaatttatggatgaatgatgatggccttttggaacttgactttgaggatgatgatgaggacatattacttagagatcag

SEQ ID NO: 303867 - DNA, 219 bp, Zea mays
ctgagaaggagatgatgtcacagtgtgtggctcttcttgggaagtttattgcagtccgggagccaaacattcggtacctcggtctggaaaacatgactaggatgctgttagtaacagatgtgcaggatatcattagaaggcaccaggcccagatcattacatctttgaaggatccagatatcagcattaggcggagggctcttgatttattatatggca

SEQ ID NO: 303868 - DNA, 101 bp, Zea mays
gctgccgccacagcatgacgattatcacatgatgttaagattcctaaaagcacggaaatttgatgttgagaaagctaagaatatgtggtcagagctgctta

SEQ ID NO: 303869 - DNA, 302 bp, Zea mays
atttcccgtcctgtccttccacccggcggcttaaaccctagttctcactcccatcgccgcttcagctccgccgctgcagatggagttctggggttacctccctttctctctctctctcgcaaactcaatttgccgcgatacctgctctgtgttcgttttgttgcgattcctttgtttgaatttatttggtggtttagccttttattagtgccctcgcaatcaagggccgggtttgattcgctaccattatacttatattcgaatgtttttaggtccatgcgaatcatgggtagtgttttgat

SEQ ID NO: 303870 - DNA, 295 bp, Zea mays
attgaggctccggtgaagacgaacaagatcccaagacaggtccctgagcaggcttggtacatgaaccctgccttcaccattctgattggtggcatacttccgttcggagcagtcttcatcgagctcttcttcattctgatttgtggcatacttccgttcggagcagtcttcatcgagctcttcttcatcctgacgtcgatctggcttcaccagttctactacatctttggcttcctgttcctggtgttcattatcctcatcatcacctgtgcggagatcacgatcgtgctgtgct

SEQ ID NO: 303871 - DNA, 276 bp, Zea mays
tgctgctgagctccaagatgtgcttatcaatcttaatggcactaaggaatcaataaagggagcgaagtcatggtttatgcaaagattgccgttcgcgccggctctggctgaagctcttaaggagagagtatttgtcttggaggattcggagcggcagctgcacataattttcctggtgaacgatattctttttgaaagcttacagagacgaactagtattcgggaccttgacaatgaggctattgctttcaaatccgtactgggtcccatgcttgc

SEQ ID NO: 303872 - DNA, 141 bp, Zea mays
cgcacagacatactttgaatctatgaaggagacgtttggaattgacaggactgcggaacattacgcatgcatgattgatattcttggtcgtgcagggaaactagaggatgctatggagcttgtcaacaactgccattccaa

SEQ ID NO: 303873 - DNA, 271 bp, Zea mays
ccggaatagttttcggctacggtttcggcttcctgatcatcatggtcggggcgaccatcggcatgtctataccttactggatcggcctactgttccgcgaccgcctaaacctctggctggagaagaatggccacggcagattgctctgatcaaactggtaggtcaagggagctggttccagcagttccgcgtggccgcgttgctcaggatctcgccgttcccatacgcgttgttcaactacgctgtaaccgtgacggagatgaagttcgtc

SEQ ID NO: 303874 - DNA, 275 bp, Zea mays
gccacaaacaactgctcctcctgcattccccctttccccttccgtccgctgcattcctgctctcttgctctcctcgctctcagaccacagttgctgccgccgccgccctaagccagggtgctgaggctttcgtggcctcttcgccggcagcgagcacccaccagcagttctgtagaaatggctgatggtgaggacatccagcctcttgtctgcgacaatggcaccggaatggtcaaggctggttttgccggcgatgatgcaccaagggctgtatt

SEQ ID NO: 303875 - DNA, 290 bp, Zea mays
taaatcttctaggcaaacaactgctagagactttgtgaaacactataatgggcgtgtagagaagttaattgaggtctttaaaactggggtatcctctgttgcccttacctctgacatttggtctggaaaggctaaagaggattacatttctgttgttgctcactttgtgaaccctaattgggagttagagaaaaggttgcttggtctaaggccaattgaagacgaccatactggtaagaacattgctgaacgtgtttccttggtggtagatgagtatggcttaactgata

SEQ ID NO: 303876 - DNA, 291 bp, Zea mays
cgatggtgtactgacgctggtgcgggaagagaccctgggactggcgttcggcaatgatgatgaggaagtgatggagaggccacatgtccttcatcgcaaactcccgctggagggcgatgatcgtgcgctgtaggagatcggtggtggatgccgttcgcacaatgtcggcgacgtagaggaggtaaacgatgtccacgccccgccggtagataaagagagatgtgtccgacttggcctcgacgaaaccgatggaggccaaataggtggcgaacggctgtaccaggccgcggc

SEQ ID NO: 303877 - DNA, 282 bp, Zea mays
ggcttcgttaccttctcctccgagaactccatgctcgacgctatcgagaacatgaacggcaaggagctcgacggccgtaacatcaccgttaaccaggcccagtcccgtggcggtggcggtggcggctgtggctacggcggctgatgtgtatgctgattttggctctgatcgcttctgcagctatatcttcgttatcgtgtgtaccttcgtgtccgtgttcgcgttcgtgatcgttatgagcttcgtgttggtggacgatcagtcgttatcgttgtggtcgct

SEQ ID NO: 303878 - DNA, 295 bp, Zea mays
tggagagcaagtgaccattgtccagctgcaaggatccacagagtcttggtcccagttcttcagtacaccttgtcaccggcttagaagcaccaagccagaacctttctggaattctctccccaagtatagggaatctgaccaaccttgagacagttctatgacagaacaacaacataaacgggttaatcccagcagagattggaaagctaagaaagctcaaaacgcttgatctgtccagcaaccacttctcggaaggaaatcccaagctctgtgggccaccttgaaagccttcagt

SEQ ID NO: 303879 - DNA, 111 bp, Zea mays
ggagaatactgatggttcacagaagatatctggcgatagtttatagaatgtgtacgaatcttttgtgagcgaatgacaccattggttcgattgaagatccctttgaccagg

SEQ ID NO: 303880 - DNA, 291 bp, Zea mays
ctgcatgttcagtgtacatctagtccatctgatgcccagcttactttgcagcaacgccaagagtttttggaagtcataaaatccaatttagctgcagctcagcaaaatgaagttttatgctgacaccaacagatcttttcgacaatttcagataggtgatatggtctatttgaagttataaccttttgctcagacttcagttgctcacagatcttgtgcaaagctgaccttcaagtattttggaccattcaaaatagttgacaagacaggatcgactgcatataaactgct

SEQ ID NO: 303881 - DNA, 217 bp, Zea mays
atgctccttattgtggcgttgtacttagcggaacttgttcactttgacagccgtgtctgtgcgaaccctcatggactgatcaggaagtacgggctgatgtgctgcaggcagtgcttccgcagcaatgccaaggacattggcttcatcaaggtatgcaatataagcttcaaactcctgtgtgaatgatgcttagcatcattaatgctttatgattttg

SEQ ID NO: 303882 - DNA, 278 bp, Zea mays
gcctggagaggcggcgccggccacaacggcagggagccgccaccgctgtccgtctccgggatcccaaaataccattacaaggatctgcagaaggctaccagcaactttaccacaattcttgggcaaggatcgttcggccctgtgtacaaagctgtaatggccactggtgaagtggtagctgtaaaggtgctcgcgagtgattcaagacaaggggaaagagagttccagactgaggtagcattgcttagcaggttgcatcataggaatcttgttaattt

SEQ ID NO: 303883 - DNA, 277 bp, Zea mays
gcagcaggagcgagcacgtcgacggtgtccgagagttcttctcccctgtgcagcagatggccaatggaggagggtctacgactattgggtatcgttacaggtcagatgaccacgaccgaaggagacagacaggttccagataaatctgcagagcttgaatacgagaagctctaattctcccagtaaccaagtcgacgcggagtggatagaacagtatgagccaggagtgtacctgactctagtttctcttcgtgatgggaccaaagagctgaaagcg

SEQ ID NO: 303884 - DNA, 307 bp, Zea mays
tccagaaccacatgatgtggggcggtacatccaagctgaagtcaaatctggtggccaaatctcagtcgcaaaaactgccggttcaatagatcctgctgcaggattggttgaatatgtagaaactctcgtgaggaatcctgaaactgattatgatgtagtcattattcaagtaaatggagttgctcaggctgcagactccgttcacgttctttgcatcgggagattgcggatgagacttgctaaagaaaagacggtcgttgcgaaggagttctattcctcgtcaatgcagttgtgtggcgttagagga

SEQ ID NO: 303885 - DNA, 304 bp, Zea mays
aaactcttgaagattatattcacaggataggtcgaactggccgtgctggtgctagcggaactgcattatctatacatggtgataaagctcaagctgaacgggactatgttcttgcagagtttaagagcggcaagagccccataatggctgagaaggatgtggcagcacgtggtcttgatgtgaaggacataaagtgtgtgataaattatgattttccaacaactcttgaagattatattcaaggggtaggtcgaactggccgtgctggtgctagcggaactgcattacttttttcacacacgca

SEQ ID NO: 303886 - DNA, 314 bp, Zea mays
  unsure (1)..(314): unsure at all n locations
gcaaatcatgcatatgcttgaccatcctaacatcatcggtcttaagcattacttcttttcaacaactgaaagggctgagctttatctcaaccttgttcttgagtttgttccagagacagtaaacaggattgcaaggcagtacaatcgaatgaatcagcggatgcccctcatttatgtcaaactgtacacgtatcaggtctgccttgactagatatgccgagcgcttgcttatatacataactgcattggcatctgccaccgtgatatcaaaccgcagaatgttcttgtgagatatgatttnctntcttttctat

SEQ ID NO: 303887 - DNA, 298 bp, Zea mays
aaaaagttaaagcactggagcagatgctgattaaggggaaacagatgcaggatgattgttctattattgtaaacaagcttcgagctatgcttcattcagcagaggagcagctgcatgcacacaaaaaacagactgtttttctgacacaacttgcagctaaaacccttcctaaaggtcttcactgcctccccctgagactagctaatgaatacttttcattggatcctgttcggcagcagttcccagaccaacaaaatctcattaaccctaaactgtatcattatgcgttgttctcgga

SEQ ID NO: 303888 - DNA, 290 bp, Zea mays
ctcgagcgccccttctcagtctctgaacatcccactatagctggaatagctgatgaagcagaaattcttaactcccttcagaaaccaaagaaggttgttttcctcggaagtgatggggttgaacgtccatttctttgcaaacctaaggatgatcttaggaaagacttacgcatgatggagttcaatgcaatgatcaaccgtctcctctccaaggtccctgagagccgcaggagaaagctctatattagaacttttgcagtggtaccacttacgaagattgtggaatggta

SEQ ID NO: 303889 - DNA, 283 bp, Zea mays
gtcgccatctacatcgaggtcggcaaggacttcgatctcaacgacatccagaggatcatcggcgaccggctcggcgtgtcatgggagaaccggacgctcaaggagcgcgccggtgtgctctacagagtgctcagcaagatgaacttcgtgctgctgctggacgacgtttgggagccactcaatttccggatgcttggcatcccggtgcccaagcacaactcccagagcaagatcgtcttgacgaccaggatcgaggatgtgtgcgccgcatggacgtccgccg

SEQ ID NO: 303890 - DNA, 115 bp, Zea mays
ctgacggctgccgtgatcctcaacgagatccccagcagcgtgagggaggtgttcctcaccggcgccacgttcaagctcggcagggccatcgcgctgtacctctgcaggaagagga

SEQ ID NO: 303891 - DNA, 271 bp, Zea mays
agtagttgttgcagtaccttgatacagcagaatttgcaatgcgtgaagagttgtctctgaaggcagctattcttgcagaaaaatttgctccgcaactattgtggtatgttgatgttattcttcaacttatagacaaagctggagattttgtaagtgctgatatatggtatcgagtggtacaatttgttacgaacaacgaagacctacagtcatacgctgcaactaaagcgagagaatatcttgacaagcctgctttactgagacgatggtc

SEQ ID NO: 303892 - DNA, 288 bp, Zea mays
ttttctcatgcgaacaggtgctccttaggatgcttccagcctactacaaacacgtccgctttttcgtaaacactctgatcactaaattcttcggcctgcactgcgtcaacgtcaagcttacaggagctatccagaaaaaggtccggtttgttataatggggaaccttttctgctccagctacgcgatccacaggcgcttcgacctgaaagggtcctcgcatggtcgcatgactgacaaacccatcgatcagatcagcgagcacacaacgttgaaggactcgatcttaa

SEQ ID NO: 303893 - DNA, 288 bp, Zea mays
gagcagccgcatccacaacctgcctctctcgtcccctggcggcgtccgcggcaggatggcggaatctacggcgaggacggtgaaggatgtcaacccgcacgagttcgtcaaggcctactccgcccacctcaagcgctccggcaaggtaacggtgctcgactcgcccccctttcccatctgattcgacgctgtaagcctacaacggatggtcgcacacgcagcaacacgcggagacgagccggttcgatctcatcagattgctgctgcccgatcagtatgagctgtttt

SEQ ID NO: 303894 - DNA, 275 bp, Zea mays
gtaggtggacatggaaaagttgtgccctcgcttcctcttcatctccttgctgtatgtttggagcttgggcaaggcccggacttgacctatgtgcttcgtggcatccgttttttgcatagtttgtctgatctagcatcccgccatactagactggagcaggttctccttgatgatgtcaaattatccgaacaagtcatggacctgatattctttctactttctattcttgctgaacagaaggtctcaatgggttaaaccaaaatgttttattcatt

SEQ ID NO: 303895 - DNA, 302 bp, Zea mays
ctagtcgcctgctccattctcagccgccgccaatcccttcccgtgctccgcaaccgctgagtgagaagaagagatggccggcaagggcgatggcccggcgatcggcatcgatctcggcacgacgtactcttgcgtcggcgtgtggcagcacgaccgcgtcgagatcattgccaacgagcagggtaaccgcaccacgccctcgtacgtcgccttcaccgactccgagcgcctcatcggagatgcggccaagaaccaggtcgccatgaaccccatcaacaccgtctttgatgccaagcgtctca

SEQ ID NO: 303896 - DNA, 303 bp, Zea mays
gatggatgccgctgacatcgataaaaacgggaccctagattacgaggaattcgtcaccgtgtctgttcatgtgagaaaaataggcaacgatgagcacatccaaaaggccttcacatacttcgaccggaataagagcgggtacatagagatcgaagagcttagagaggcactggctgatgaactggagggaaccgatgaagacatcatcaatggcatcatccgagacgtggacacagataaggacgggaaaataagctacgacgagttcgcggcgatgatgaaggccggcactgactggaggaa

SEQ ID NO: 303897 - DNA, 166 bp, Zea mays
gaatatcacagaatggtcctgcttgtacatcctgataaaaatatgggaaatcaattggcttgtgaatcattcaagaagcttcaaacagcttatgaggtcctctctgatttcacaaagaaaaacagctatgatgagcaactgaggaaagaagaatcacagaaaatgg

SEQ ID NO: 303898 - DNA, 290 bp, Zea mays
ccgagcttaggagaagaagaaagaattgttttatgatatctcatataaataaatcatattgtctcgagaaaacaacaaggtgctataaagctgcaacactggacatcactgtacccttagctgacgaggcaaaatcaaactcattagctgcagccaccaatgagttggacaggcttttcagtaaacatgattttcgagaaatggaggttgttggacaatttaatcttggttttatcattggaaagcttggccaggatctgtttattgtagatcagcatgcttctgatgag

SEQ ID NO: 303899 - DNA, 281 bp, Zea mays
atttctcagtgatgtcgatgtcctgtactcctgtatatttggattcaacaatatgccattagtatgctgtcaagcgtcctatttgcaagagataaatggcttacgcccgaggggcttattcttccttatcatgtgcattggtgcacaacactggatgagtataggaacgctatagtgaaggatcctgccttggaaagaaggtttcaaccagttaatgttccagcgcctactatggatgaaactgtacagatcttaagaggacttcgtgagagatatgaact

SEQ ID NO: 303900 - DNA, 113 bp, Zea mays
atcagtatcagcgcagaaactacatatagatcagtgtttgtcgaccagtcatcgaagtcgtgtgctctcaagtctgatgtgagatatacatatatcatgattgtaatgtgatt

SEQ ID NO: 303901 - DNA, 251 bp, Zea mays
  unsure (1)..(251): unsure at all n locations
aaccgaacacgcaggtgctaggtccaaagtctcaacagcaggacgtcttcaaccatgctgttgtgccacttgtcagtgaggttttggacggttataattgcacaatatttgcatatagccagactggaactggcaaaacatacacaatggacagacganggggcaaagcactagtgcagtttttattatatatattcacatgctacacatgtttctgaattctgatgcagttagtttgctgcttcaactga

SEQ ID NO: 303902 - DNA, 288 bp, Zea mays
ggaactcatctataaagtgcgtggtcttgaggcagctgagaattattttgctaaccttcctgatccagcgaaagatcatcgaacttacggctcccttcttagttgttattgctcagcaaaaatggaagagaaagcaacaaatctctaccgccagatggatgaacttggcatctggtccagtacactacccatcaacaatcttacgtccctttacatgaagttagaccagtataggaaggttgttagtctctttgaggagatgaaactgaagaatgttaaaccgaatag

SEQ ID NO: 303903 - DNA, 279 bp, Zea mays
cagaacatgtacagaagagcagctgaattctgggctgaactgcgccttgaacttttatcagcaagtgaattatttgctgagcgcaattcaaatcaaatatggcgattgtattgggccagccatcagcgtttcttcaggcacatgtgcatgtctgaacaggtacctgctgttgtgaggttagctaaagaggccttggcagagaacaaatgtgtggtgattggccttcagagcactggagaagctagaactgaagaagctgtcacaaaatatggagttgaa

SEQ ID NO: 303904 - DNA, 282 bp, Zea mays
ggctcgagccgaatcggctcgagctatcatatctgtcagtggttctggctgtggttcaggtaatttaaacccagaagatcaaacaaattgcagtgatctggacctaaataaggcttcatttttgttaaagaatgtccttggaaactggagctcaaagttgtttgcagttgctttgttggcatctggtcagagttctacaattacggggacatatgctggacaatatgtcatgcaggtttttggaacttataccttatttcagttctagttcgcaagttgaat

SEQ ID NO: 303905 - DNA, 278 bp, Zea mays
  unsure (1)..(278): unsure at all n locations
ttattaagtacatgactgatggaatgcttctaagggagttccgtggtgaaccagatttggctagctatagtgttgtcatggttgacgaggctcatgagcgtaccctctccactgatatcttatttggtctagtgaaggatatttctcgttttcgaccagatctgaagttgctcatttctagtgccacccttgatgcagaaaaatttagtgactactttgattcagctcctattttcaagntacctgggaggcgatacccggttgaaattcattataca

SEQ ID NO: 303906 - DNA, 308 bp, Zea mays
cgtaatcgtaatcatactcagattctccccacagccagattttcagaaaatctggtcagagaaaagctgaaccaaacaggccctttgaccctctgttgtttctgttttgcaggaactttactttagatcacaatcacaagaggatgagatcttagtggttcgcaataaaattgctgaggcttttctcaaggagctgagattactgggtgaaaaacatattctggaggagacgctcacaggcttgaggatggctgttgacgagaagcaggaagaagcgatatctggtgctttgcaacaattgaaccaga

SEQ ID NO: 303907 - DNA, 243 bp, Zea mays
aggtccactgctggcccaaccttgccacaggtagtgtaattattagggagcttgcaccagattgctcaacaataaggtttccggggaatgtatcgcggcctatccccagctattctcgcactcttgcctaactgggcggtttactttactgtgtatgagcagcttaaaagttttcgttcttccaacgatggaagccatcaactttctttaggggcaaatgttgttgctgcatcatgtgctgga

SEQ ID NO: 303908 - DNA, 283 bp, Zea mays
tgctaagagaaaaagaggacatcacaatggagagcaaaatgatgatttatctgactcctcagtggaatgcatacctaggggggagatctctccagatgacattgttgctggtattgggtccaaagcatgtctggagagcaagaagagctattcataatcagcagagggtttttgctgtccaagtgttcgagctgcataagctgataaaagtgcagagattaatcgcgggatctccacatctgcttattgaaggtgatcctgtccttgggaatgcattaacagg

SEQ ID NO: 303909 - DNA, 187 bp, Zea mays
ccttgccagactaccaaattcctggaaataagaagaatgcccattgaggaactttgtttgcaggtcaaactgcttgattcaaactgcagaatagcagactttctatagaaaaccttagaccctccaatcccagagactgtgagagatgctattgctgtgcttcaggatcttggtgctttaacacaag

SEQ ID NO: 303910 - DNA, 305 bp, Zea mays
atgaatcaacaatcagtcctcccaggaaaccaaaatacttctgaagcttcagctgacgcagatgaagatgctgaacctgagaagccaagcagcccttctgtaaagaaggcagaagagaagggggtagttgtcgttcatgaaaccaaatgcaaggtgtatgtcaagcatgatgatgccactaagggttggaaagacattggtgttggtcagctctctatcagaagtaaagaaggcacagagaaagcttccaaagaatccactcctaccattgttataagaaacgatgttggtaaaatcctcctgaa

SEQ ID NO: 303911 - DNA, 301 bp, Zea mays
cttcttgtaagggcttctatgtatatgatgataaacgcaaagcctctcgagatcctgattttgggaagtacattgaaaaatcaaggaacatggcaggtgttatgcaagatcctaagctgatgaaactaacagataatgacatcgtggagatgatcttctttcctgtggtgaatgaagcctgccgagtgcttgatgagggaattgctctcaaagcatctgaccttgatgtagcttccattatggggatgggtttcccttcttacaggggtggagtaatgttttgggctgactcgcttggtgc

SEQ ID NO: 303912 - DNA, 290 bp, Zea mays
gtgtatcaaaattgacggcaagacacctttaactacaagacaaaccttagtcacagatttccaaaacaatgatgacgtcaaggcagcagtgttatccatcaaagccggaggtaccgggataactttgacagcagcgagcacggtaatctttgccgagttatcatggactcctggggacatcattcaagctgaagatcgcgcgcacaggatcggtcaggtctcgtccgtgaacgtgtattatcttcctgcgaacggtactatagatgatcttatgtgggacgttgttcagg

SEQ ID NO: 303913 - DNA, 122 bp, Zea mays
cgcgtcattatgctgattgggctgataagatccatgggctcattctgccggctgatggcccacaggatgtacacaacgtgcatgtgccacttggtgtcgcaggtcagatcatcccatggaac

SEQ ID NO: 303914 - DNA, 305 bp, Zea mays
cctaaaaaaggtgggtcatcgatgtagcgggggcagcaggcacgctctacactggcgaaacctacaagttgcaggtggatttccccgagcattatccgatggaggcacctcaggttatatttctgcatccagcaccgatgcatccacacatttacagcaatggacacatctgtttagattggtccactggctatgccaagaaattcctagaaatattactaactaaccatgattccatgagatggcaactatcactggccccttaagatatactgtatgactcgtggtccccagcgatgactgtc

SEQ ID NO: 303915 - DNA, 181 bp, Zea mays
cggagcaagaggaggaggaggaacgcgaagaacgccacggcggccatggggagagggaacgccacggacgtgaggagcgggagaaagaggaggaggaacgcgaaggacgccacggccgcgggcgccgcgaggaggtggcggagacgctcatgagcctggtgaccgccaggatgtgaggggc

SEQ ID NO: 303916 - DNA, 119 bp, Zea mays
aggagaaagaaccttcatgactttgagagccttgcagtgttctttggagatagtgcatgtgaagcttctacatacagccttgtcaccatgttcgataaattggcctcctctccagaata

SEQ ID NO: 303917 - DNA, 298 bp, Zea mays
gccggatcgggcgctacctcaagaagggccggtacgcgcagccgtgggcactggcgcccccgtctacctcgccgccgttctggagtacctcgccgccgaggttctggagttggcagggaacgcggcgaaagacaacaagaagacgcgcatcatcccgcgccacggctcctggcgatccgcaacgacgaggagctcgggaagctgctggccggcgtcaccatcgcgcacggtggcgtcctccccaacatccactccgtgctcctgcccaagaaggcggcggagaaggcggccagcggcg

SEQ ID NO: 303918 - DNA, 286 bp, Zea mays
cattcagtgagcttgcatcctggcgcatccattgaacaccagatctctggactgaaaacttgtgagccggagtttcttattgctacccccgagaggcttcttgaacttgtttcgttaaaggcgattgacatatcaggtgtatcaatgttggtaagtgaacgtggtaatcggagtgaaaggcttgatgaactgtgtcattctgattgtgactatgaaagtggtgttctatgtaattgcacattgcaaaccgtgaatttgcaacaagttattcatcatggttcttagt

SEQ ID NO: 303919 - DNA, 286 bp, Zea mays
tgcaagggctgcaaatgtcttttcttgtgcatacttggttaacatgtctcggccagaacatcgccgtatacctgtaaaacatcaaaaagcactttggttcagtggtcttagaggggccatggcttttgcacttgctctccaatctgtgcatgaactcctgaaggacatggaaaaacgatattcatctccaacatgcatccatggttcaggcatagttctgtttgagcctccaatgagaagtaccgtcaaaacaacaatggcagtggtggtggtacttctcattgga

SEQ ID NO: 303920 - DNA, 261 bp, Zea mays
ctcccgctgctgccaatgtcctcccgttctctgataccggcaatgtacttgcgtgcttcgcaacctctgctgagagcgatgcgagatgggcggcaagggtgatgggtcgtgaatcggcatcgatctcggcacgaactagtcttgcgtcggtgtgtggtatccgatagtgtcgagatcatcgccaacgaccagggtaaccgcagcacaccctcgtacgtcgccttcaccgactccgagcgcctcatcggagatgcggccaag

SEQ ID NO: 303921 - DNA, 286 bp, Zea mays
ctccgctcggccaccagctttgaccgcctcccctcccctccgctcctgacactccataccccacacccccgcaggagcggcgcggcggcggcggcggcaaagccaaaggcaagatgttcgggcgcgcgccgaagaagagcgacaacaccaagtactacgagatcctcggggtgaccaagtcggcgtcccaggacgacctcaagaaggcctaccgctaagcagctatcaagaaccacaccgacaaggcgcggtgattccgagggtttttactacctctcggattcaa

SEQ ID NO: 303922 - DNA, 284 bp, Zea mays
ataaaatatgcaattaggtgatacccaggccatctgtgaatatctgcaaaggatgaaacgcgagaatccttcttgctattatgctattcaagtagatggagatgatatgtgtacaaatgtgttttgggctgatgctaaatcaataatggattataactactttggtgatgtagtgtgtgttgacacaagatattgcacaagtgactatgggagacctctactattatttactggtgttaaccatcacaatcagctgattatatgtggtacagcgttgatttatg

SEQ ID NO: 303923 - DNA, 283 bp, Zea mays
ctagtcctctgttacttctcccgccgccgccaatcccctcccgttctccgccaccgccaatcccctcccgtcctccgccacctctgctgagagcgagaagagatggccggcaagggtgatgggccggcaatcggcatcgatctcggcacgacctactcttgcgtcggtgtgtggcagcacgaccgtgtcgagatcatcgccaacgaccagggtaaccgcaccacaccctcgtacgtcggcttcaccgactccgagcggctcatcggagatgcggccaagaacc

SEQ ID NO: 303924 - DNA, 286 bp, Zea mays
tgtcccgttcgttttcccgcttccacccccgcgacgacgatgacagctctatgttcgatccaccggagccgccggtgaactggggcatgaacatagttccggagaagaaggctttcgtcgtggagaggttcgggaagtatctcaagaccctcgactccgggttccacctgctgatccccgccgtcgaccgtattgcctacgtgcactcgctcaaggaggagaccatccccattcccgaccagaacgcaatcaccaaggacaacgtcaccatacagatcgacagcgt

SEQ ID NO: 303925 - DNA, 288 bp, Zea mays
gaagaagcaaagccagaaagtccaatatctttatcatcaggactgcgaaggagatcaacagcccatgctgtggttggaacaagccatcaggaaaataaagaagatatcggagcaccgataaaattggatgcagaagctcaggctcacattgagaagcatggaagctcccagaagatttgactgatgaaatggtcgagttagcacgtcaactgaaggcaagtagcctaatgatgaaccaatccgtgcaggagacagagaagatccttgattctaccgagagggccgtgg

SEQ ID NO: 303926 - DNA, 275 bp, Zea mays
gaaggctatgctgtttttgaacttctccacgggacctttcgattctttcaagtctgcttactatgccaccgctgaggagttcaaggccaaggacatcacgttccttattggtgacattgaagccagccacggtgccttccagtactttggtccgccgaggaccagacaccccttatcctcattcaggctggtgcttccaagaagttcttgacggctcccatgacgctgacaggttgtctttggttgcaggcgtatttgcagggcaatgacgccgt

SEQ ID NO: 303927 - DNA, 268 bp, Zea mays
gccgaccaccaaggccagcgcggcgaggaccgtggtcttgatgctgctggcggcggcggtctccacgttaggggacatgcagttgcatgagctgccgcaggagcagctggagccacagtcgcacttgccgctgctgcaagacatgctcacggcgaaggggagcaggcggccaccgagggcggcggctgcgactgcaacacctgcaactgcggcaccagctgcggctgctcctgctgcagctgcaactgagccggtcaggcgatggcgc

SEQ ID NO: 303928 - DNA, 277 bp, Zea mays
agcagaaattcttcctgactctactgtttctcagccaaaaccgcagaagactttgtcaggccaatttaggataggggggatgacttgtgctgcatgtgtgaactcggttgaagggatcttaaaaaaattggcaggtgtaaaacgtgcagttgttgcattagcgacctcattgggtgaagttgaatatgatccttctgccattagcaaagatgaaattgttcagggcatcgaggatgctggttttgacgctgcactgttgcaaagtagtgaccaagac

SEQ ID NO: 303929 - DNA, 309 bp, Zea mays
agaaaatccagggtatctttgagcaatgcttagcagttcatgataaactggaggcctcattgcgggatttgtctaggacaggagacattcagtcttgcaaggcagctcgtaaagctgctgacacgcagtttaaggagctatcgaaagatctgaagccactgttggcgactctacagtcatctccccagtcttatcagatattgccaaaggttagctattattgttattgtccaaacactatctcatgtcaggcatatgaagaacacaaatggagagacgtgcagaactacttttctgcacttacattaa

SEQ ID NO: 303930 - DNA, 273 bp, Zea mays
ggtgactgatggaactgagaaccaccttgttctctgggatctccggccccttggcttgactggaaacaaggtcgaaaagctatgtgatctttgccacatcacattgaacaagaatggtgtcttcggtgacagcagtgcattgtctccgggtggtgtccgcattggttagtatcatttatttgttcatttcttctgttgtggtgcaagcttcaattaagtactaggtacgtgcccgtgcgttgctacggttttcatttattatataggtagacc

SEQ ID NO: 303931 - DNA, 255 bp, Zea mays
cccacgcgtccgaccacgcgtccgcggacgctggccccggcgatgatggacctctccagtgtccagctcggccatggcgttcaccgtctccttctcccccgccaacgttcagatgctccaggctaggagtggccacggccacgccacctttggaagctgttccgccgtgccaagagccgggccaaggctgcgctccacggccgtccgggtcagcagcaagcaaaaggcggcgacggacgtcaggcggcgtcccgg

SEQ ID NO: 303932 - DNA, 199 bp, Zea mays
gaacgaacggacaggttgttgcacagaagcgacatggctttcgcgcccaaaacgtcctcctcctcctcgctctcctcggcgttgcaggcagctcagtcgccgccgctgctcctgatgcggatgtcgtcgaccgcaacaccgagacggaggtacgacgcggccgtcgtcgtcactaccaccaccactgctagagctgctg

SEQ ID NO: 303933 - DNA, 172 bp, Zea mays
gacgttatgaccgcaaacagtctggatatggtggtcagacaaagcctgttttccacaagaaggcaaaaacaacaaagaagattgtgctgaagctgcagtgccagagctgcaagcactactctcaacaaccgatcaagaggtgcaagcactttgagatcggtggtgacaagaa

SEQ ID NO: 303934 - DNA, 299 bp, Zea mays
cggacgcgtggcgtgacgcgtgggctcggcacggtccctcggctagggctcgtcgacctctcgcgcaaccggctcaccggcgccgtgccggacacgcactccaacctcaatcagctccgcgagctcgtgctgagtcacaaccgcctctccggcgccataccgccgagccttgcgcgatgcgtggacctgcagaattttgatctctcgcacaacgctctgcagggcgagaatccggcggacttgtccgcgctcagtggcttgctctacatgaacctctccggcaaccaactggaagggac

SEQ ID NO: 303935 - DNA, 245 bp, Zea mays
agagagttgggcgcagagaatccccaagcaaacaaacagggtagaggtagatgtagatgagatgagacgcgatgtgatgtgaggttgggtctgggacaccatggctccgatgaagctgtacggggcggtgatgtcgtggaacgtgacgaggtgcgcaacggcgctggaggaggctggctccgactacgagatcgtgcccatcaacttcgccaccgccgagcacaagagccccgagcacctcgtcc

SEQ ID NO: 303936 - DNA, 281 bp, Zea mays
cggacgctggttgcttctgtgactatggaattttgtaaacagcttttaatgcatgttggagtatttattaattttgtatacttctttgaaaatgagcttggtgttgtatttgcaaatcatcagatggtgactatatgggaatgtatttggttacccaatgtggaatggtttattttcatgattttgtgttaacagaagttttaacctttaagggtctgtttggttgggctgtggctgtgaaaaaagttgctgtgggctgtgagctgtgaaaaaagctgctg

SEQ ID NO: 303937 - DNA, 277 bp, Zea mays
agcagcttctgcttgctctggggggaaggagagagagagagcgagagagagagagagatctagtagagaggctagtaggtggtcctcgaacgaagatgttgacggtgttcagcgggcaggtggtggaggtgccggcggactggtggcggcgggcaccggacgccgtcgcccaagacgaaggcgtcacagctcgtggggcgcttcctgaccgcgtccgagtcggccgtgtccgtgcatctcagcgaccacggccacctcgcctactcccacaccaacc

SEQ ID NO: 303938 - DNA, 281 bp, Zea mays
cggagggcgtagctccgatccactccgctgcgagctccggcaactctcaaatcgtcgtcatcctgcttgtgcgaagtgctgatgctaacctggttactgatggttgtcgaactgctcatcattatgttgcgagttaatggaggcataacatagctgacaaactaatagcccatggtgctaatgtcaatatgaaagacaagtttggctgtacacctttgcatagagctgctacactggaaacgcgtactgtgtgaattcctcattgaggtatgtgctgaagt

SEQ ID NO: 303939 - DNA, 281 bp, Zea mays
ggacctggcgcgacgactcgtaccagaagtggcggtggcagcctgcgggctcgacctgccgcggttcgacgcgcggctgctagctggagcggctgcggaacaagcggctgatgttcgtgggggactcgctgaaccggaaccagtgggagtcgatggtgtgcctggtgcagtcggtgatccccgacaggcggcagaagacgctgacaaagttcgtcaacggcgggtccagcaacgtgttctacgcgcacgagtacaacgcgacggtggagttctactgggcg

SEQ ID NO: 303940 - DNA, 288 bp, Zea mays
cccacgcgtccggtacaagttattcattactcctacctatttgacaatattacacatggcaaggttttgattgccagtttggctacaaagaatggagcattttcagcatcaagcttgatgaattttgttcccacatagggagagctgtggctgctgatccaggggctcaactgtacaccatactggacctctgccgtgcttttgaccgtgttttcaaggaacatcttgatggagggaggtcaggtggagatagaatatacggcgtgtttgaccataagctccctgctg

SEQ ID NO: 303941 - DNA, 282 bp, Zea mays
ataggataaagcttccaggaaatgcaatgctaggtgaaggaaaaccagagaaccagaaccatgccataattttcacacgaggaacattatatggaggagactttgaaaatgaggaatttgttgcaagagtttctgaagaaacatgatggtgtgagatatccatcaatacttggtgtaagagaacacatcttcaccggaagcgtgtcttctcttgcatggttcatgtcaaaccaagaaacaagttttgtgaccattggacaacgtgtacttgccaatcctttg

SEQ ID NO: 303942 - DNA, 127 bp, Zea mays
gccaagagaactctgtcttccactgcccagaccaccattgagattgactcgctgtacgagggcattgacttctactccaccatcacccgtgccaggtttgaggagctcaacatggacctgttcagga

SEQ ID NO: 303943 - DNA, 280 bp, Zea mays
ttcccgggtcgacccacgcgtccggtcatatttgatactgatgttgacaggtctgcggctgttgagtccccacggatgccgagcatctggggcgtggccgacctgtggcgcacacagcctctactacctgacatccatggcgctcaagtgcgcggtggagctccacatcccgaccgccatccacaacctaggcgggtctgccacgctgccggacctcgtggccgcgctgtccctgccagcgtgcaagctcccgttcctcgggcgcgtgatgcggctgctg

SEQ ID NO: 303944 - DNA, 243 bp, Zea mays
gggcgagcgggctaccacgcgtccggtgaatgagcgtgggctgcaccgccggctacgtggccgcagtggtgggagcgaggagtggtggatgtatcgcgatgcaggatgtcgtcgtcgtccatcgtgcccatgacgctgaagaacgccatcgagctggggctggtggaggtgctgcaggaggattccggctgcgcaaggcggccgtggcgcccatgaggtggtggcgcggatcccggtgcgccc

SEQ ID NO: 303945 - DNA, 209 bp, Zea mays
caaatccatccatcctcgtttcctccgtcccgcagcatctcaaccccatggccaagatcaagatcgggatcaatgggttcggcaggatcggaaggctggtggccagggtggcctgcagagtgacgatgtcgagctcacgccgtgaacgacccttcatcagaccgactacatgcctacattacaagtacgacactgtgcaggatagggag

SEQ ID NO: 303946 - DNA, 265 bp, Zea mays
gaagcagcaccagttggctcgggttcaggtcgagcgcgcgccaagcaagtcttgcggccggccgcgaagagcgcaatcaagcaaggcaagatggtgaagctcggcttcggaagcgtcggcgagtcgttgagcggcaggtgcatcaaggcgtacgtgggcgagttcatcgccacgctggtgttcgtgttcggcggcgtcggttgcggcatcggctacgggcaactgacgaatggcggcgcgctggacccggcgggcctggtggcga

SEQ ID NO: 303947 - DNA, 293 bp, Zea mays
ggcgttcgtcaccgaggtgcgccggctgcgggacctggagccccgggcgctgtgcggggtcgagctctacgacggcatcctcatgcggtacgtgaaggcgtccacggcgcacctgggcaagcccgcgccgcgcggagagccgtcgagagacatggtggacttcgacatcacctactaccgcagccgcgaccccgggcgggcgcgcctgttcgaggacgtgctggaggagatcgagcagatgggcatctttaagtacggcggcctgccgcactggggcaagaatcgcaacctcg

SEQ ID NO: 303948 - DNA, 289 bp, Zea mays
cggacggtgggacgccatcagcagctagcgcggtcgtcgagcccagcagagaaaggccccccgccctaacggtaatagccatggggtccaccgccggagacgaggccgcggtggtggacgaggaggcgtgcatgtaggggatgcagctggcgtcgtggtccatggtggccatgacgctgaagaacgccatggagctgggcgtgctggaggtgctggagaaggaggccggcagcgggaaggcggcgctggcggccgacgaggtggtggcgcggatggcgtgcgcgccgag

SEQ ID NO: 303949 - DNA, 285 bp, Zea mays
  unsure (1)..(285): unsure at all n locations
cgcagtacaactcccggctcagggagctggccgcgcagtacaactccctgagccggcagttgtactgcgcgcactggttggccagtacaactcccggctcagggagctcatcatcgacctcaacgccggcttccccggcggcaggttctgnctcgacaacgtctagcgnctngtcatggagctcatcancaagtaacccaactacgggttccagacggccagcgtggcgtgctgcggcaacgactggtcgtacgacggggtggtgccgtgcggggcgacgacgag

SEQ ID NO: 303950 - DNA, 238 bp, Zea mays
tccacgcgtccgcccacgcgtccgcccacgcgtccggaggtggtctgacactagacatccacaattcagcgccaggcctcagggagcgacccaccccaaggtccggagttcgttccttttccagtaacgaggagggcaaagtcatattccatcatgatggaagacgacatggaaaatggaaggtcgtatcaagaaagaccaagcgacccttcaacagtacgaagcaagtcatctatcc

SEQ ID NO: 303951 - DNA, 288 bp, Zea mays
gccaaccagaagagcttgcagttactgagagtgtgtgtgagagagaggatgggtggcagcggcagggctgctctgctgctggccctggtggtggtggccgtgagcctggccgtggagatccaggccgacgccgggtacggttacggcggcgggtacaccccgacgccgacgccggccacccctaccccgaagcccgataagccccccaccaaggggccgaagtcggacaagacttccaaggagcacgggcccaagccggagaatccgcccaaggagcacaagcctacg

SEQ ID NO: 303952 - DNA, 338 bp, Zea mays
accaagcgaccgcggacgctgggctaacgggcgcttactcgcatcgcaggctcgcagcgcactcgcgccacagtcggcatcacagaccagatccctgcgggtgcggcggccatggccgagaacttccaactccagggccggcacggaagtcccgcgtccgcgtctcccgcgtctggcgccgcccggccgcggcggggggcgacgtcatcgttgagtggaacgtcgccgtcagtatcgtctccgactgcctcccctcctacacctccagcgacaactccgccatcgtcgccacagattccatcaagaacaccgtgtatgtcaaggcgaaagagtgcacg

SEQ ID NO: 303953 - DNA, 311 bp, Zea mays
ggtactatgaaccagagcactggaaatttggggaagtgggtaataaatattttcggcatgccaccggtcaactgtacgctatttcaaaagatttggcagcctacatatcgctaaacaagcatgttttgcacaaatatatcaacgaggacgtgtctttgggagcttggttgatagggttagatgttgagcatattgatgaccgcagactatgctgcggcactccaccagattgcgaatggaaagctcaggctggtaacacctgcgctggctcgttcgattggaaatgcagcggtaatctgaactctgtgcag

SEQ ID NO: 303954 - DNA, 290 bp, Zea mays
cggaccgtgggtcgagaagttcacgaacaagagtctcgggaagatgatcgccctcggggtggcgagctacgacggcgagaaatgggccaaacacaggaagatcctgaaccccgcgttccatctcgagaagctcaagcgcatgcagccggcgttcttgacgtgctgcaccgagctcattgatcgctgggacaaggaggtcgctggtggttccgacgggtcattcgagctggacgtctggccggagttccagagcctcaccggcgacgtgatctcccgcacggcgttcggca

SEQ ID NO: 303955 - DNA, 315 bp, Zea mays
aaaccgctgggttgcacagagaatacaagatatgcttgttaacggcatcaagacttgggcaccagttctgccagtaaataggacagtggttgatttttcatcacctaatattgcaaaggaaatgcatgtgggacatttaaggtctacaattattggagatacattagcacgcatgtttgagttctcgaatgttgttgttctgcgcagaaaccatgtgggagattggggtacacagtttgggatgctaatagaatatctttttgagaaatttccaaattggcaggagataggttgccaggccattggggaccttca

SEQ ID NO: 303956 - DNA, 312 bp, Zea mays
gctcgacatggacgtcctgtaccgcgccggcgagacacaccagggcgtcgccagctactgccctcgcttggtatcagtcggttctcgagggtctcttggctcgttaagttcctctggcactctaggttcgagcagtgcagctgcagatgagcccaacatcttcacatggtctggaaaggtaacaaaatcagtagcaaaacctcatgagcgaaacttgttcctacaaagtttatctgaagaagaacagaacccaagctctagcgatggccaaagcaatgctagtgttgaagataaggacctggtcgcaaatct

SEQ ID NO: 303957 - DNA, 348 bp, Zea mays
acgacctgttcgacaccggggactccatggaggagctggagaatctcgtcacgctgttcgacctgtgggacgcgcaccaggaggctggcttctactcggagcgggtggagatcgtcttccgcgccgtctacgacacgtgcaagcatctggtgggcaaggccgcggcggtgcagaaccgcggggtcatggaccacatcgccgacctttgggtggacgtcgtgagggccatgatgcccgaggcggagtggaggatgagcggccgggtgccgtccatggaggagtacctgccgatcggggaggtgtcgttcgcgatcggccccatcgtccccatggccgcctacctggttt

SEQ ID NO: 303958 - DNA, 324 bp, Zea mays
ctctggcgccggggcggcgatggcggcggcgcggcgcccctgccgggcccgtcgcagctggtgggagcgcgtcaacggctcgccggcgtggcaggacgggatcttctgggccctcgccgtcctctaccgtgccatcgctaccgcctcattcatccaagttgccaggatacagtgcagagtccctgaatatggatggacaacccaaaaggtcttccagttcctgaatttcgtggtcaatggggccaggtgctctatctttgctttccgtcgccaagtgcaacaagtgaaccctccgatctttcagcatgttattcttgatcttcc

SEQ ID NO: 303959 - DNA, 344 bp, Zea mays
gtcgtgtcgccggcggaggtgggcgtccgtcctcccgttccaccagagctcactgcttcgctccacccaccggccaccaccccgtagttaagcaggagtggtacctggtggttttttgtttttcaaaaagaagacagaaatgtcttcctcgaggcctgcccactcttcaagttcatccagcaggactcgccagagctcccgggcaaggatattagcacaaacaacccttgatgctgaactcaatgcagagtacgaagaatctggtgattcctttgattactccaagttggttgaagcacagcggagtactccacctgagcagcaagggcgatcgggaaaggtca

SEQ ID NO: 303960 - DNA, 327 bp, Zea mays
ctattatatctagtgtgaagaagtacaactggggcgctctgtcatttgacatcaagctctgcagaacgaacaactcatctaaatccgtaatgcgtgctcctggagatacacaaggctctctaatcgcagatgctgtaatcgagcatgtggcgtctgtcctgtcactggatgccaacagcgtgagggaaaagaatttccacacctacggtactcttcagtcgttctaccctgacagcgcgggcgaacttctacgtacacgttgcattctatttttgataggctggtctcaacttcaagctacctggatcgagccgaatccataaagga

SEQ ID NO: 303961 - DNA, 334 bp, Zea mays
cgaggagcaagcaagtcgaagcatcaaatggcgcgtcaggagatcgagcacagccacctccccgtccgcgggatcaacctccacgtcgctcaggtcggcaaaggtgacctgggcacggtggtgttcctgcacggcttcccggagatatggtactcgtggcgccaccagatgcttgccgtggccgcggcggggtaccgcgccatcgcgccggactgccgcgggtacggcctgtcggaccagccgccggagaacgaggaggcgtcctgggtctgggatgacctcgtcgcggacgtgctcgccatcctcgacgcgctttccatcccaaaggcgttct

SEQ ID NO: 303962 - DNA, 346 bp, Zea mays
  unsure (1)..(346): unsure at all n locations
ctgnacgcgtgggtcactgatcacaccgtctcgtcggctcgtagggccgccggccgccagccgctgataggcatcgtggctcgagcgtcgttgcgtctggcgctgcttacgccaggacgacgatggaccactatagttctaggaggaatcacgcttggtgaggacatccagcctcttgtctgcgacaatggcactggaatggtcaaggctggttttgctggcgatgatgcaccaagggcggttttccctagcattgttggccgtcctcgccacactggtgtcatggtagggatgggacagaaggacgcatatgttggcgatgaggcacagtccaagagaggtattc

SEQ ID NO: 303963 - DNA, 301 bp, Zea mays
gatcaacacaatagctctccttgttttttttttcaaataaaaaagcacgagctcagcgccatggcgcccgccaaagcgcacagcacaagcactaaccagcagacattgctggatgcgcagtccagctctggcatcacgccttcggctacgtcaagtccatggcgctcaaggccgccctagacctcggcatccccgacgccatccaccagcacggcggctcagccaccctcccacagatagtcaccgagctggccacacttccaccgtccaagacaccgtgtctgcgacgccttatgcgcgt

SEQ ID NO: 303964 - DNA, 300 bp, Zea mays
caagctacctacatggaaggttggtcttgaactgaatgagatcggattgcaggacacccaggctcgcagaaaccatgacgtatctgcgctgtacaccgatctcattcagttcaagcccaagctacctacatctaaggttagggcgatctaccaattcgacatggccgtgtacaccaagatcttcctcaagttccccaggaagttctggcctgatgggaaaggaagggagttcttcctctacgccagcagcatgagaggttactacggagtgtggcaggagttcgagaagcagtaccctga

SEQ ID NO: 303965 - DNA, 303 bp, Zea mays
cccacgcgtccggctccattctcagccgccgccaatcccttcccgtgctccgcaaccgctgagtgagaagaagagatggccggcaagggcgatggccccgctatcggcatcgatttcggcacgacgtactcctgcgtccgcgtgtggcaacacgaccgcgtcgagatcaatggcaacgaccagggtaaccggcacaacgccttgtacgtcgccttcaacgactccgagcgcctatcggagatgcggcaagaaacaggtcgccatgaaccccataacacggctttgatgcaagcgtctcatcgc

SEQ ID NO: 303966 - DNA, 287 bp, Zea mays
tccactgtcatccatcgcctctagcgtccgggacctgcgacgggtctgcgcatcatgtacgccgacttctactccgccgtctacgccatggtcaagaaccccggcacctacgggttcagctcggtgtaccaggcgtgctgacggctcggggggcggcaagtacaactaccagaacagcgcgcggtgcggcatgtcgggcgcgtccgcgtgctccagcccggcgtcgcacctcagctgggacggcatccacctcaccgaggccgcctacatacagatcaccgacggct

SEQ ID NO: 303967 - DNA, 300 bp, Zea mays
ctgatcatcacgtgcgtgattcctctggtgggtgcgcagggttacgcccaggtgaagttcttgaagggattcagcgaagatgctaaggagatgtacgaggatgcaagccaagtggcgacagatgctgtcggcagtatcagaaccgtggcgtcgttctgcgcagagaaaagagtggtcgcagcgtacagcgacaagtgtgaggctctgaggaagcagggcatccgaagcggagtcgtcggagggctttgttacggcttctcgttcttgatgttggtcttcacgtatggcctttgcttctac

SEQ ID NO: 303968 - DNA, 295 bp, Zea mays
cccacgcgtccgccacgcgtccgctctgcaatttctctgaagcgcgctgctgctgagaagaaacgactgaggttgctggaagctgaaaagaccaaggctccagctaggcttttacgcatccaaaaagctgccatgactgtatgcagccggagagaatccgagaggaggaaactgtaagaacctcttgacaaccaacttccaagggcgaagaggcagaaggctgagtatttgtaaccaagaggaagtcctcctggttcaacccatgctgattacttaaagcatgcatatgcccttt

SEQ ID NO: 303969 - DNA, 299 bp, Zea mays
ctccacatcgtcatccatccataacacctccacatttggtcaggcctgggcctagctagtattctctgcttccgagctaagaaaatgggaaccgtaaggccatgggcgacaggtctaagtggacaattgcagaaagcttttgtaactggtgtaccttcgctgaaacgatcagagctggaaacggcatgcgaggatttcagcaacataattggttctacctctacctgcatgctgtacaagggaactttatctagtggagttgaaatcgctgtggcctcaagcttggtaacatctgcaaa

SEQ ID NO: 303970 - DNA, 288 bp, Zea mays
gagcctgagaagaaggaggacgggacgagggcgctcaggagggacatcccgatcccgcagcggtgcgcgctcaagctcaaagtccggcaactggggactggagatacccaaccaagatcacaaccgatacgtgtcgaagggctatctgatctctcactggttgacattgctgctggaggctggcattcaactgcactaactatagatggagaggtgtatgcttgggggagaggagagcacgggaggcttggatttggagatgataagagtagtcacatggtgccccta

SEQ ID NO: 303971 - DNA, 313 bp, Zea mays
attaattctgtggcgaaggacattattaatgagggaagaggttttgcaagcaaggggagtagccctctgatgtacgaatggcatgggaagaaatactggggggctgcgcatggtcttgctggaatcatgcacgtgctaatgcacaccgaactgaaaccagatgagcaggatgatgtaaagaacaccctgcggtatatgatcaagaacaagtttcctagtggcaattatccctcaagtgaaggcaatgaatcagatcacttggtgcactggtgtcatggtgccccaggtgttgctcttacccttgctaaagcat

SEQ ID NO: 303972 - DNA, 326 bp, Zea mays
cgctaatcaggctccagcttgatcttattcataattttttccagattaccacagttgatgaagcaaaggaattctacccgttatttggccttggggctaatattgctcttatcttttctgggcgtacattgaagtatttctcaaatttgcgcaggacattgggtcctggaattgatggctgggaagtatctttgaaaggaatgatgagcatagtggtactccttggacttgtcataacttccatctattggggagtgaacaagtttgttttgaatgatccttcacttccaaaggctgatcgtaagaagaaaaaggaaaagcctaaa

SEQ ID NO: 303973 - DNA, 329 bp, Zea mays
cccacgcgtccgagctacaacgcgctgctggacagcccgctcctggcgcgcgcgggcggtacgacgcctccgccgagacgttccggtcctcgcacgacctgttccgcgccgcgttcccgcgcggcttcgcgtgggaggtgctcaaggtctactccggcccgccgctgctcatccttcaagttccggcactggggccacaaggaggggccctacaagggccacgccgccaccggcgacaaggtcgagttcttcggcgtcgccgtgcttaaggtggacgatgagctgcgagcggaagacgtggaggtgtactacgacccgggcgagatttt

SEQ ID NO: 303974 - DNA, 317 bp, Zea mays
ccggcagaggctgtacaaccagacaggcaacggcatggccgacagcacgctggacgtgtcctacgccgcgcggctgaggcagagctgcccccgctctggcgccgacagcaccctcttccccctggacgtcgtcgccccagccaagttcgacaacttctactacaagaacctcctggccggcaggggccttctcagctccgacgaggttctgttgaccaagagcgccgagacggcgtccctcgtcaaggcgtatgccgccgacgccggtctcttcttccgccactttgcgcagtccatggtcagtatgggcaacatct

SEQ ID NO: 303975 - DNA, 306 bp, Zea mays
gcaagccttgctaggattgcaaaaaataatggaaagacagttttgcattcagcagcaagaatgggtcatgtggaggtggtaactgctctattaaataaggatccagggcttggtttcagaacagataagaagggacaaacagctctacacatggcttcaaaaggcctggcttcaaaaggccagaatgcagaaattctgctcgagttgttgaagcctgatgtctcagttatccatgtagaagacggcaaggggaatagaccattgcatgttgcaactcggaagggaaacaccattatggttcagacc

SEQ ID NO: 303976 - DNA, 167 bp, Zea mays
cggacgcgtgggcggacgcgtgggcggacgcgtggaggaaaactgctcgatgtccttttgtttgttgcttggtaataccgttctgtttgctataattatcgatcagcgggatctgaagtactgtctacattgctcgcgttctaataaagtactgtttggacttgctt

SEQ ID NO: 303977 - DNA, 298 bp, Zea mays
agaaacgtgagatttatgatcagtatggtgaagatgcccttaaggaaggaatgggcggtggaggatcccatgttgatccatttgacatcttctcatcattttttggaccctcttttggaggaggtggtggaagcagcaggggaagaaggcaaaggaggggagaagatgtagttcacccacttaaagtttctctggaagatctttacaatggcacctcaaagaagctctctctttcgcgcaatgtcatctgctccaagtgcaagggcaagggctcgaagtctggtgcctcaatgaggtg

SEQ ID NO: 303978 - DNA, 293 bp, Zea mays
cccacgcgtccggcaggtacgcccgggtacgtgccacctgagtactaccagagcttccggtgcaccaccaagggcgacgtgtacagctacggggtcgtgctcctggagcttctgtcagggaagaagcccatcgacccgaccgagtttggagacaacaatcttgtcggctgggcgaacatgatggtcaaggagaacaggagcggtgacatcttcgatcctacgctgacgaacaccaagtcaggggaagctgagctctaacagtatctgaagatcgctcgcgactgcttggacga

SEQ ID NO: 303979 - DNA, 297 bp, Zea mays
gtgacggtgggcgtgacgcgtgggcggacgcgtgggcggacgcgtgggcggaccgtgggttctagatcgctagctgccgccctttttttttttttttgtacaataataacaacaataaagtatactccgagcaaaagatcggctcaaaatattaatcacagcaagcaaatatgccagttgtcagactagtgtacgtgtgtttgtgtgtgtcatgaacctgtcacctctctgactaatgactagaaatatacagttgaatcgatcgatcctctttatttcttgtgagtcgccatgcaa

SEQ ID NO: 303980 - DNA, 300 bp, Zea mays
tggatgttaggacacttaaagttgctaagaaacacaagtctacttacgagatgaatgagattgcttggaataaagctggagatctattctttattactactgggttagggcacgttgaggtggttaaggatcttgagtttttaaagccctgcaagctgaatgctcatacagcagggtgttattgcattgcaatggatccacttgataggtatttcgctgttggaagtgcagattcacttgtcagtctttggaatgtcaaagagttgttatgcattagaactttcacaaaacttgagtggc

SEQ ID NO: 303981 - DNA, 294 bp, Zea mays
gcgccggcgatgcaccgctgggccgcggcggcgctcgcagcgttcctcgttgccttgccggctgccgccttctacctccctggcgtggcgcccaatgacttccacaaaataattttctgcagaaagatccacttttggtgaaggtgaataagctgacatcaacaaagacacaacttccctactcgtattactctcttcctttttgcaagccaaacatgatagttgacagtgcagagaatcttggagaagttctgcgtggtgatcgcattgagaactctccttatgtgtttgaga

SEQ ID NO: 303982 - DNA, 294 bp, Zea mays
gtaactactacagctattggtcttggtttcatgttttcaacttcatggaagttaacattgctggcacttgtaattgtcccggttatatcagttgctgtgcgtagatttggacgttttcttcgtgagctttcacatcaaacacaagctgctgcagctgtagcttcatccatagctgaggaatctttcggtgccatccgcacagtaagatcctttgctcaggaatatcatgagatttcacgctatggtgaaaaagtagaggagacacttaaacttggtctcaaacaagctaaagtt

SEQ ID NO: 303983 - DNA, 295 bp, Zea mays
accatcgctacgtgggagatctggagatcctgcagtcgctgggagtcaacgcctacagattctccatctcatgggcgagggttctaccaagaggccgggttggtggcgtcaatgcaggcggggtagctttctacaaccgcctgatcgatgcgctcctgcagaaaggaatacagccattcgtcactctgaaccatttcgacatgccgcgcgagctggaggtccggtacggtggctggctggacgctgggatccgggaggagtacgagcactacgcggacgtctgcttcggggcgtt

SEQ ID NO: 303984 - DNA, 291 bp, Zea mays
atcaaaggagtgattgatgcaatggcttacagcaaattgaatgttctccattggcatatcgtggacgagcagtcgtttcccattgagataccctcataccccaaactgtggaacggttcatactcttattcagagagatatacgatgtctgatgctattgacattgtacggtatgccgagaagcgaggtgtaaatgtgttggctgagattgatgttcctggccatgcccgctcatggggtatcggctacccagcattatggccatcagaaagctgcagagaaccacttgat

SEQ ID NO: 303985 - DNA, 288 bp, Zea mays
cgctcagatctcgctgtgattgatgggtatgctaaggctaacggctatatggacgggagaacactctttgtagactgtactgtccacagatcggagtttgaaatggaatgtgtggacagaaatctggtggcctagcctaacgattcgtataggtctgagagactcgttcagttgtaggatttgtggattttttttagatccgtacaggattgtgctgtcgtgtgcccgccaagtgcttggtggttgccaaaaggtgatgcctctgatcggtttggatatgggatttgc

SEQ ID NO: 303986 - DNA, 286 bp, Zea mays
gatcaatgaactgaaggaacaggaaaaggcagaaaaggagaatcaaactattcaaagcgtgcttggcacatctactcgagactatctggtgtgaaagggtaagcctccacgccatactcactcacaccagatcggatcaatgaactgaaggaacaggaaaaggcagaaaaggagaatcaaactattcaaagcgtgcttggcacatctactcgagactatctcatttcaaacaagggagacaaggtacccatctctgagcttgaggggaagtatgttggtctttgct

SEQ ID NO: 303987 - DNA, 300 bp, Zea mays
gaagaaggtggtttacatatacagtcgcgggcgagacctcataaatataagtgacttattgtatctacaatatcaatgatccacgtccacagcctactcaattgtgttgcgtgcaatctcgccaaacgatggtgatggacctgtccctatttcggtcttcctggttgctagtgtcctaaaagagaacagtacaaagcttctgcaagaggctcgagggattgatgacattattaggatattgaataatgttaatggaaatctggacgccaaaagagcttgcgttgttgcactaaagcttca

SEQ ID NO: 303988 - DNA, 281 bp, Zea mays
cccacgcgtccgcttttctcgtttagaacctctaaaatttcccccactcgccagtcgcagcagcacctgtagcagccatggacgccagcggaccggtagcaaggggaagaagggggcggccgggcgcaaggcaggcggccccaggaagaagtcggtgacgcggtccgtcaaggccgggctgcagttccccgtcggccggatcgggcgctacctcaagaagggccggtacgcgcagtcgtgtggcactggcgcccccgtctacctcgccgccgttctggagt

SEQ ID NO: 303989 - DNA, 288 bp, Zea mays
cagcttataagtaccttatgctgtaacaaaatacgccttgaaaacatctcaaagctctgatcattcttaggcagaggtggcagcagaagccttggcggcggcagaaagcttagacctcctctcggccaagctctcactgctttgagatgttttcaaggcctattttgttacagcttataagtaccttatgctgccctggctgtgttgcatcagtcgaccctccctacttagacttatgagtaattgttgcaattttgtatggacatggtactggcttgtcgggatttt

SEQ ID NO: 303990 - DNA, 193 bp, Zea mays
cggaccgtgggtgcttgggattgttctgcctgggtgcggacatatggtttgtatttggatgaaaggttggaatgcttcagagttctgaaatatgatgtcgacattgagcgcttgtccaaaccaggtcaaggtcctgaaaagggtcacagtagaacgagagagttggattcacaggatctgttagagcagctgc

SEQ ID NO: 303991 - DNA, 316 bp, Zea mays
ccgatccccaattcgtccttcggatgtctcattcagcggacgtaggtgtgaaggaagggggacgcggaggaagatggggctcgcgttcgggaagctcttcagccggctcttcgccaagaaggaaatgcggatactcatagtcagactcgacgccgcaggtaaaaccacctgctctacaagctcaagaacgtcgagatcgtcaccaacatccacaccatcggcttcaatgttgatactgttgagtacgagaacattagcttcactgtctcggaagtcgggggtcaggacaagataagacctctatggaggcattact

SEQ ID NO: 303992 - DNA, 161 bp, Zea mays
ggcttctcctccccctcttatcaagtcctcctcgggttagggttccttagggttttgtggaggggcgatggcggcggctgatgtggagtaccgttggttcgtcggcggacttgcctggggcaccagcaacgagtcgctggagaatgccttcgcctcctacg

SEQ ID NO: 303993 - DNA, 275 bp, Zea mays
ggggccaacatcctggtgggcggcgccttcgacggcgcgtccatgaaccccgccgtgtccttcggccccgccctcgtcagctgggagtggggctaccagtgggtgtactgggtcggccccctcatcggcggcggcctcgccggcgtcatctacgagctgctcttcatctcccacacccacgagcagctcccctccaccgactactaaaagccgaagccgaccgacccaggggtgcgcacgcagcgcagctagcatccagcgctctctcccggtcg

SEQ ID NO: 303994 - DNA, 282 bp, Zea mays
gtggtggaccgcctggccttcgacgcctgcaacgccagcgcgccgctcgccgcgttcgccggcgggccaccgagttctgcctccaccgcccgggcttcttctgcttcatcagcggcgagccagggcactgcgaggaagaaggccagaggctcatcgtacgcttgttggtctgggtttgatgctccactgattggtttgctactactttgcttttatgtgtgcagtactgcagtgcagactcacacactagtacctagttgttgttagataatgctcagttgc

SEQ ID NO: 303995 - DNA, 112 bp, Zea mays
cgggatgacgcttcgccggacgcagaaactttaccttgttcctagaattcccaaatgagtgtcgtcgtcgtcgtacaaatggcatgcatcttattgtaagttttggagtttg

SEQ ID NO: 303996 - DNA, 309 bp, Zea mays
gggttttgctgctctccgaccccgagctccgatagccgcagcatcaggcgcgccccccctcgcgtgtgaccgagatggcgctgccgaatcaggggaccgttgattaccccagcttcaagctcgtcatcgtcggcgatggtggaactggtaaaactacatttgtgaagaggcatctcactggagagtttgagaagaaatatgaaccaaccattggtgtggaagttcatccgttggatttcaccactaactgtggtaagatcaggttctactgctgggataccgccaggcaagagaagtttggtggcctca

SEQ ID NO: 303997 - DNA, 315 bp, Zea mays
gcagggagtgcgctcgacggccgccgccattagtgatttagtgttgaagagggagagaatctaaagtgaccggacgctgtccttccttgctgatcggcgacacggtccatccctccctcgctcgctagggttccttttcgtccatggatcagagcttcgggaatctcggggccggagctgggagcagcagcgggggctccaactccaaggcggcggcagcgcgtcgctcctcctcgtctttcccgcagcagcagcagcagcaccaccaccaccagtacgccaggcacggcgccgagatgtcggcggcggaggccg

SEQ ID NO: 303998 - DNA, 312 bp, Zea mays
ccacgcgtccgcgtgaaatgaaatcctttgtgaaggtgaatgtcaggaggtctgtaaaaggtagaactgaaatggatgtcagcatttctggtgaaaatgggcattcattgtccatgatggggtctttgagaccacctgttgttaggaaaagtaagcttgtagttgtcgacttggctggatcagagcgcatagacaagtcaggaagcgagggtcatacgttagaagaggcaaagtctatcaacttgtccttaagtgctctgggaaaatgcatcaatgcgcttgctgaaacagtcctcatgtacctgttcgtga

SEQ ID NO: 303999 - DNA, 316 bp, Zea mays
attcagatttttagatattttattttaaatgtcagttcatatttttttccttgcagaatgttacccctaagaaggcagaagagactgctttgatatctgatgttgttgcagattcaccatacaagattttcatagcgggcattgctggagtgatctcatctaagatgctaatggagattgttagtgcatttggcccattggctgcataccgctttctttttaacaatgagctcggtggaccctgtgcatttcttgagtacgccgaccgctccgttacttctaaggcatgtgctggcctcaatgggatgatgcttgg

SEQ ID NO: 304000 - DNA, 309 bp, Zea mays
gctactcataggataaataaaattgaaggaacaattaaaggaataagagtcacagtcatcgagacacctggcctggtgtctcattaccatggccaaaggaggaacatgaagattctgaattctgtcaagcacttcattaagcgatccccacctgatatcatcttatactttgagcgtttggaccatattaacagcagatacagtgattacccactgctgaagcttatgactgacatattggggtctccaatgtggctcaacactgtccttgtaatgactcactgttcctcatctcctcctgaaggacca

SEQ ID NO: 304001 - DNA, 310 bp, Zea mays
gtgaattgattagaaagcgagggaaaaacaatctccaaaagttcatccatttcattgtggatatttttaggaggtatgatgaagcacctgctgatcttaagccatatcgccaaaaagatggtgctcttctcgctattgggacactctgtgataaactgaagcaaacagatccatataaaacagagcttgagagtatgctggtccgacatgtctttcctgaattcaacagtcgtgttggacacttgcgagcaaaggcagcatgggttgctgggcagtatgccatatcaacttttcagaccagaacaatttt

SEQ ID NO: 304002 - DNA, 310 bp, Zea mays
ggtggatcgcgcgccaagcaagtcttccggccggccgcgaagagcgcgatcaagcaagacaaggtggtggagctcgcgcttcggaagcgtcggcgactcgttcagcggcacgtccatcaagggctacgtggccgagttcatcggcagcctgctgttcgtgttcgccggcgtcggttccggcatcggctacgggcaagtgacgaatggcggcgcgctggacccggcgggcgtggtggcgagtgctgtggcagacggtgtggcggtgttcgtgggcgtgtccgtcgcggcgaacatgtcgggcggccaggtg

SEQ ID NO: 304003 - DNA, 305 bp, Zea mays
ctgacgcgtggggtatgttttctgctggtcacactcacaggtgaagcttgagcaaggccttcaagtgcttaaggttttcaaggatcatgtgtgcaagacatcactactggatgactttggcttttacgataatcgtgagaagatgatgcaatataggaaagcaaaacagcagcagtcactgaaaaaggtatgaagtagattgtcttgctttgattatagtttttccttgaaattgcactctgtcaggttttttttgtaactgcacaagcccatgtgttattgacaaactattcaaatgcttgtgt

SEQ ID NO: 304004 - DNA, 311 bp, Zea mays
ctgatgcctcccggtccggtcaggccgtacgccgcggggtttgccagtccgcgttcaacgacagtcaatatgtcgctcgatgttactcaagtactcctaagcgcgcaatctgctgatggcgcagtaaggaagcatgctgaagaaagcctcaagcagttccaggagcagaacctccctggattcttgctctctctctcaagtgagttggccaatgaagagaaacctgaggagagccgcaggttagctggcttgattcttaagaatgcactggatgcaaaggagcagcacaggaagaatgagcttttccagag

SEQ ID NO: 304005 - DNA, 298 bp, Zea mays
cccactcgtccgcccacgcgtccgcccacgcgtccgcccacgcgtccgggaaagagtatcttcctcgtcttaaaggaaaaagtgtcgaggaaatccagagatatgctgaacttgtcatggcacatcttgttgaagaaattaatgattctgactatttttcagatggcgttccaaaggaaatgatgcgtgttgatgatgtactagtcaggatagcaaacatatcccttattgaggagaagatggctgccacatgaccaggaaaaattacaaacatttttcctagttacttgctctatga

SEQ ID NO: 304006 - DNA, 304 bp, Zea mays
ctgacgcgtgggagcagtcttcaaatacttgcataagatggcaggttccgtaatttccttggacaacttagaagggcgcctcggagaggccggcgatgcggctgtgttcacggaggaaaaccagtgcccggacaccgtgtggaccgcgtccgtaccggtgggcggcgggcggcagctgaaccgcggcgagatctggcggatcacggcccccgcaggcacgacggccgcgcgcatctgggcgcgcacggggtgccagtacgacgcgagcaggctcgggaactggcgcacggcggactgcagcggc

SEQ ID NO: 304007 - DNA, 292 bp, Zea mays
ctagttctagatcgcgagcggccgccatcaagttttgcttctttcaagatcgggtgttcatgtgccctcccttacaagcattggtgcggtacaggatagtcatatcgacctattcgagttcctatcagctgcaggctgagggcattcgccaagggcatttcacacacattttcctggatgaggccggccaagcctctgaaccagaggcgatggttcctttgtcagggttgtgtggaagagacactgtggttgtgttagcaggagatccaaagcaattaggtccggtggttta

SEQ ID NO: 304008 - DNA, 288 bp, Zea mays
ggttttgctgctctccgaccccgagctccgaagccgcagcatcaggcgcggcccccctcgcgtgtgaccgagatggcgctgccgaatcaggggaccgttgattaccccagcttcaagctcgtcatcgtcggcgatggtggaactggtaaaactacatttgtgaagaggcatctcactggagagtttgagaagaaatatgaaccaaccattggtgtggaagttcatccgttggatttcaccactaactgtggtaagatcaggttctactgctgggataccgcaggcaag

SEQ ID NO: 304009 - DNA, 277 bp, Zea mays
cggacgctggtcgtgacgcgtgggctactgatctgaccaagccctaaacagcaccgccctctcacatctcctctcccctcgattcatgaccgccgccgccactcgcgccatcccgcaagacggagacctacaccgacaccaagcgccgcgatgacgtgcgcggcgccaatatcgccgcatcgcgcgccgtcgctgacgccgtgcgcacctcgctgggaccccgtggcatggataagatgatctgttcgggcgatcaggcgcaggaggtcatcatcac

SEQ ID NO: 304010 - DNA, 303 bp, Zea mays
  unsure (1)..(303): unsure at all n locations
cccacgcgtccgcccacgcgtccgcccacgcgtccgcccacgcgtccgcccacgcgtccgacaccgcgtgcgaaccaagcagaccacagcaagaagcgtagtcgtcgccggaaggaaaggcgcggacaagatgtcgtggcaggcgtacgtcgatgagcacctgatgtgcgagatcgaaggacaacatctcagcgccgccgccatcgtcggtcacgaggcagcgcttgggcgcagtccgagagcttcccgagttaaaagcctnagaaggttgttggaatcataaaggactttgatgaacctggt

SEQ ID NO: 304011 - DNA, 300 bp, Zea mays
cccacgcgtccggcccgcagtgtggggcaacccagacgggatccggtgcgccaaggagacgatgccgctgctggactggcacggcccgctgtggctgggcatggactgggacatgttccaccaggcgaggaacgtgtcccgcgggggcggggcgtcgccgcgggtgcccatcaccttcctcgacatcaccaccatgtcggagcggcgcaaggacggccacacctccgtgcacaccatccgccaggggaaggtgctgggccccgaggagcaggccgacccggccacctacgccgactgcat

SEQ ID NO: 304012 - DNA, 289 bp, Zea mays
caccgccttccatgttgtttgttcaaaatttctgcttctgcaactctctttgcttgttctgtgaaaacataggttccatttcaacttccgtcggacaggacctgtattcgtcgagaaaaagtccctttttcatagacgaactttgcacgactgtttcttatatagagatttaagtcgatagatgatgagcccggcaagcaagtccggagcgcggtcaggatcaagaacatcagcaagtctcatgtggccttcaagttccaaacgactgcaccaaagagttgcttcatga

SEQ ID NO: 304013 - DNA, 279 bp, Zea mays
tgcgacgcgtccgggacctggcgccagatatgagaggaagagcgcgcggagagtgagagcccgggagaagcagcggctgggatcaagactgagctaggtctactctaccggaagctgcacagctacgccaccaaatcgaaccagacccgcgtcgtcaagacacctggtgggaaacttgtgtaccagtacaccaagaagcgcgcgaccgaccgaagtgcccagtcaccgggaagaagatcaaggaattccacagctgagacctgctgagtacaagaggtc

SEQ ID NO: 304014 - DNA, 280 bp, Zea mays
gtgcaccgaccaagaaaacctcgcttcacgatctctacgagctccagggcctctccccgtggtatgacaacctctgccgacctgtcaccgacttgctgccccttatcgccagctgtgttcgtggagtcaccagcaaccctgcagtaatcctccgtttccaccttttgtttcttcgcttgcatggttgctgcgcattcactcctgaccgtgtcctcgacgcaatgcagattttccagaaggccatctcatcctccagcgcatatgatgatcagttcaagca

SEQ ID NO: 304015 - DNA, 297 bp, Zea mays
gtgggaagacagagtcgtaccaaacctggctaccaagtcggtggtcgtcatcacggtcgaccgcacaagtgcagcaagttgggaggagacgtggaaagtggtacgtgttttgtgggtgatgtgtaggtggaggtcgggagggtgggtagggacgagccggcgcgaggtggaagagcaggtgcaggtagtgccgtcgtcgtcgtggtcgtcgccaggatgagcgtcgtcgacggcgtcgtgtggtggagcggtgccggcggccgtggtgccgccgccagcgccgtagcggcggggaac

SEQ ID NO: 304016 - DNA, 287 bp, Zea mays
gttggcgtctcctcgcgctccggttcgggttcgggttcttgaggttctccggggttcggtttcgtgggtgggctgatcgagatggcggcgtcggatgttgagtaccggtggttcgtcgtcgagctcgggtgggacacggacgagcagtcactccacgacgccttgagcagctacggcgaggtcctcgactccaagatgatcctcgatcggtagatgcagaggtcccgctgcttcgggttcgtcagcttctccacggacgaggcgatgcggaagcgatcgatggcatg

SEQ ID NO: 304017 - DNA, 296 bp, Zea mays
cttcgggcagctctggaggctggaaccgctcccgccggagaagaaggccatgtggcgacgggagatggactggctgctctgcatcagcgaccacatcgtcgagctggtccccacgtggcagtcgttccccgacggaaccaggcttgaggtcatgacaagcaggccacggtctggtgtgtacatcaatgttccagcagttcggaagctggatcatatgcttgtcgaaatcctggaaagcttcagagacccggaattctggtatgttgagcaaggtatcgctgcaccagactgcgacg

SEQ ID NO: 304018 - DNA, 264 bp, Zea mays
ggccaaatacctagacagattggaagactcaagcagcttacttacctacatttggaacataacgcattggaagggccaataccacgtatgtgcagtagcatggttgacctgaatcttgcagagaattccttgactggggacattccagacacactggtctcccttgtctctctgaattcactcaatatatcccataacatgatctctggtggcattcctgaaggtctgcagtcactgaagctgagtgatatcgatttctcccag

SEQ ID NO: 304019 - DNA, 317 bp, Zea mays
tgaccttcctgtccctgtccaagggtatcaccatcggcggcagcatcttcctctactcgggcatcgccgcggtcgggtgggttttcttcttcacgtgccttccggagacccgcggtcgtacgctggaagagatgggcaagctgttcggcatgccagagccagacacggacatggctgaagcatacaacgccgctgcccaggagaaagcggttgaaattgcggcagtgctcgcaatgattgatgcagcgtcttaccagagcagcgtggcaagattggcttctgtcccttgactcgtgagtgtcgcggtattgcaggac

SEQ ID NO: 304020 - DNA, 321 bp, Zea mays
gttttgacatgaaaaccatattaaaatttatctcttaattaatctcgtatcaaatgcataaaaccttcggaaattcataactccttcgttttaattctgaattgactcgttccagttgcgttagcttcgtataaatatttactacacagtaacagcataaagtataccatgtcgcatacttttatagttagatatttatcatcctatgtctactagattagctcttctaaatccaaaccaacctgaccataattataatttggttagaacatgatctctagttaagtataattaagattagagttgagattaattatttat

SEQ ID NO: 304021 - DNA, 280 bp, Zea mays
cgttacgccgcaccactcttcttcctctgctccgcctcttcacccagcgtcttccgattgctgacggatccctcttcgccgcggccgccgccgcggaccgaccgtcggagagaaggcgaggcgggagcgatggatgccgccgactacggcaagcttttcgtcggcggcatctcatgggagacgagcgaggaccgcctccgcgagtacttcggccgctttggcgaggtcaccgaggccgtcatcatgcgggatcgcagcacggggcgtgcccgctggtttg

SEQ ID NO: 304022 - DNA, 276 bp, Zea mays
cggacgctgggacacgtcctcctcagacagggtgttctgggtatcaaggtgaagatcagcaagaagaagaagttcgtcagcgacggcgtgttctacgccgagctcaatgagatgctgacgcgggagctcgcggaggacggctactccggcgtggaggtgcgtgtcacaccgatgcgcacggagatcatcatccgcgcaacgcgacgcagaacgtgctcggcgagaagggccgcaggatcagggagctcacgtctgtggtccagaagaggttcaact

SEQ ID NO: 304023 - DNA, 299 bp, Zea mays
tggggaagaagaaggccaagaagagcgtggagacctacaaaatctacatcttcaaggtcctgaagcaggtgcacccctacatcggcatctcctccaaggccatgtccatcatgaactccttcatcaacgacatcttcgagaagctcgccggcgaggccgctaagctcgcccggtacaacaagaagcccaccatcacctcccgcgagatccagacctccgtgcgcctcgtcctcccaggagagctcgccaaacacgccgtctccgagggaaccaaggccgtcaccaagttcaccagcaat

SEQ ID NO: 304024 - DNA, 299 bp, Zea mays
tgtgcatcaagaacgtaccaataccacatgtccgtcctgaagagaggttcctcgttgggaggatcggcccgaagcagtacagaatgtaccggtgcatcgtcaggtacggctaccacgacttccacaaggacgacattgagttcgagaaggagctggtgtgcagcgtcgcggagttcatccggtcagggtcgtccaagttgaacggcatgcccgaggagttcgacgaggaggagcagcgcatggcggtagtccgctccaacagcatccgcatgctcgaggaacaggctacagtggagaag

SEQ ID NO: 304025 - DNA, 316 bp, Zea mays
tgggagtcgaaggaagtatttagccgagatggccacttgaagctttctacacaggtgttctttgcatcgatagaccagagaagcgaacgggctgcaggggagagtgcatgcacagcacttgtggctgttgttgcagactggttccaaacaaaccaggacctgatgccaatcaggtcacagtttgacaacctgatccgagaaggatctctggaatggaggagactctgtgagaacgagacctacagagagcgctttcctgataagcactttgatcttgaaactgtccttcatgcaaagatccgtccactcacagttg

SEQ ID NO: 304026 - DNA, 303 bp, Zea mays
gcagtgggcaattgctttgccttgagaaaagatcatgagactgctttgaagaattttcaacgttcggtacagattgactcaagatttgcatattctcataatcctccagtgcagaatactcatgaccacatagagtgtgagcatatgcaaatcttgagtcaagctgtaccggaggattatgagaatagtatcaaattctacagatgtgcactgcaggtagatgaaaggcactacaatgcttggtatggccttggggtggtgtatcttcgccaggaaaagtttgagtttgctgagcatcatttc

SEQ ID NO: 304027 - DNA, 291 bp, Zea mays
agaaaaggtgctgtgaagaggattgctgctcgtttgttggcaacttcaatgagcttcagaagcacacgcaacaaaagcatcctgattcacgcccttcagagatcgatcctgctaggcaagttgattgggagaatttccagcaatcttctgatatcgtagatgtcttgagcacaatacatgcacaagttccaaacgggattgttctgggagactatgtgattgagtatggggatgatgacactggtgaggactatgaagttttccgcagggtcaggacgaactggtggtcat

SEQ ID NO: 304028 - DNA, 237 bp, Zea mays
cttcaccagttttgcttgttaaaaagaaggaccaaacttggaggttttgtattgattacaggtatcttaatgccttaactgtgaaaagcaagtatcctgtgcctgtctttgatcaactcatagatgagctcagcaattctaaatggttcagtaagcttgatgtcaaagccggctatcatcagatattgttgagaccgggtgaggaatacaaaacgggctttccaaacacatgtggga

SEQ ID NO: 304029 - DNA, 316 bp, Zea mays
gccaagcgcacgtccgcagccgacatactccaggcgtaccagctgtacatggccgccatctgcttcaagagagtcgtcttcgtgttctcgaataacaccatctacaatgccgctctgggcaagatgaagatacatatcgtcgattacgggatccattacggcttccagtggccgtgcttccttcgatggatagcggatagggagggcgggccaccggaggtgaggattactggcattgacctgccccagcctgggttccgccctactcagcgcattgaggagacagggcgccggctcagcaagtatgcccagcagt

SEQ ID NO: 304030 - DNA, 306 bp, Zea mays
tgcctttttgcgccttcctggaaaaattggagatcaagaaataactgatgacataaagatgcaatttgtggatgaagttatggaactagtggagctcgacaatctgagggatgccttagttgggctaccaggaatcacagggctttcgacagagcaaagaaaaaggttgacaatagccgtggagctcgttgccaatccatcaatcatatttatggatgaaccaacatcagggcttgatgcaagagctgcagcaattgtcatgagaactgtgcggaacacagttgacactggacggacagttgtttg

SEQ ID NO: 304031 - DNA, 307 bp, Zea mays
cccacgcgtccgcccacgcgtccgcccacgcgtcacccacgcgtccgcccacgcgtccgaaagctctcaactttgaatgaagatgaacccatgagtgatgacaacttgagggaatcaatggatattgatagttctttgtctgatacagcaaatggtagaagatggagaagtcaacacgaacagcttcagcactggcagatgaacaggagaaaactggcattctcaactgttggaacaccggattatattgctccagaggttcttctaaagaagggatatggaatggaatgcgattggtggtctctgg

SEQ ID NO: 304032 - DNA, 295 bp, Zea mays
gcgtcgggaccgggccacgcgtcccgacgggtctcccatccctgataacctcacaaaaccctcgctcgctccccaactccccgccgcgccgccgcctgtactggctgcgtcaagatgagtggcattgtcttctgtagtcggcaccctgaggtgaagtgggctcagaggatcgacaaggtttacatcactgtacagttacctgacgcaaaggatgctaaggtcaatttggatccagatggtgtcctcacattctctggcagtgctggtacaaacttgtatgaattgaaactagatc

SEQ ID NO: 304033 - DNA, 301 bp, Zea mays
ctccgtttgctttgcgcattcatcccacatcaggaaggcgggcaggcgacaatgacgatgatggcgccgcatccgcagccactgccgctgccacagcccccggcgccggcgttcggggacaccacactcaccaaggtgttcgtgggcgggctggcgtgggagacccacaaggacgccctccgcgagcacttcgagcgctacggcgacatcctcgaggccgtcatcatctccgacaagctcaccggccgctccaagggctacggcttcgtgacgttcaaggaggcggacgcggccaagaagg

SEQ ID NO: 304034 - DNA, 299 bp, Zea mays
gaggttgttaatgtcctttgcctttattggtgcaacccatcagaaattgaggaaagatctgaagtcctatttgagaaaaatgagaagcactcaggatcttcagataagatagagagccgactttctcttgacaaaactatggatgccgttctggattcttttgataatctcttctgccgcagatgcttggtttttgattgccgccttcatggttgttcacagaatttggtatttccatgtgagaagcaaccctacagctttgaccctgatgagaacaagaagccatgtggtcatttgtg

SEQ ID NO: 304035 - DNA, 442 bp, Zea mays
ggtgttcccgaatagggacaatgactgcgcgctatggtgcttgagcggcagattgctcggctgcttcgggcagatgctggggcgctcgattccccagcaaaggttatccgctgcatgcccctatttgccgagcacttcaggtgggggcgccaggaggatgcacacgagttcctccgctatgtcgtagatgcctgtcacactgctgacctccgcatgcgcaaggggttacgtgcagcagctgccagtggaaactgtggtgaggatgtccgggggcagggggtttgtctggttatgagggagacatttggcggggcattactgagtcaagtgaagtgccttgagtgcaagggagaatctaacaagactgatgagataatggatatcagtctcgatctacctgggagcagttctgttgctgatgcctttcccgttctttcatccg

SEQ ID NO: 304036 - DNA, 441 bp, Zea mays
atattacaccagaaaccacaataaagacgttcattgaacaattcgatactgctatgaagctcaggtctgatcgagaagcctatgatgatttccgttcatttcaacaaaggccacaagtcctgtctggtcttctgtttgaggagcaatttgcaaatgtttatacaataaatatgttccagaaattccaggatcagttgaagcagctgatgaatgtgaattgcactgaagtcagtaggaatggttcaatagtgacatacacggtgacagtaattggaaaggagaggaagtttgactacagagtgatgtataacagtgctgagaaagaagtgtggtgcatctgcaggtcattccagtttaaaggtattttatgtagccatgctcttgctgtcttgaagcaagagcttgtgatgctaatacctcccaaatatattcttgatcgat

SEQ ID NO: 304037 - DNA, 290 bp, Zea mays
gacgcgtcgcctcctcccttcacccaccccgcagccgccctcgcgtccgtccgtccgtccgttattagggttcggtcgccgccatggcgatcctctcggctctcggcaccgaagtgctcgtccccgttcgcggcgtcatcggcatcggcttcgccgtcgtgcagtgggtggtcgtgtcgcgcgttaagctctccccgggcgctgccggcggtggcggccgcaaagccgggtaaggcgagtccctcatcgaggaagaggaaggggtcaacgaccaaaacgtcgtcgtcaag

SEQ ID NO: 304038 - DNA, 313 bp, Zea mays
cagcgccatttcttaatcgcagcgcctaaacccagcccctcctggttatatcaccgcacagctgctagaaccaggtgcgatttacaggcttaaaacgcaccggcatggccactgtacaggacaacggtgtcctgcagttgcacccctatgccgtcgccgcggcggcagcggcattgatgtcggcgtacatggtgtggttctgggcgctgacgcgacggctgtccgggccgcggatgtggcccctcgtcggcagcctgcccagcgtcgtcctgaatcgggcgcgggttcacgactggatcgtcgacaacctgcg

SEQ ID NO: 304039 - DNA, 300 bp, Zea mays
ctgcggatttctttttctgcacataaggatttaaacatcaagtttcagtcaaaccgcagcagggattataataatccatatcttccagttagttattctgccatggatggtacattgcagcctgctgttggagctgacggaaggaaagtggaggctcaaggcaatgttcttcttgcatcaattgagaatatgcaatatgctgtttctgtagacgtgcttcatactgtgttctcatcatctggtacagtccagaaaattgctatttttgagaagaatgggggaacacaagctttgattcag

SEQ ID NO: 304040 - DNA, 287 bp, Zea mays
atgatggacaccgtgttgaataattccccgcttgacaaggagatggtgcctgcttttccatgcgcgataacatgaatctcacagttctgtttccataagctcgctcttgtgatggttttgcagacttcacatagaaggatgagacatctggcaacgacatgcaaccttttctagctcttgttaatctagattcaggttctgaattctggctataccaatagataagctgggctaaggcaactaattttctgggtatgtcttgcagtactcctgaaagcctggtccca

SEQ ID NO: 304041 - DNA, 328 bp, Zea mays
gagctcctccgagtcaacagtcttggctaccttctccatgaactcactgtggaggagcgaaacctcttgtctgatgcatacaagaacgtcattggagcccgccgcgcctcatggcgcatcatctcctccatcgagcagaaggaggagggccgaggccatgaggagcggggaacacccatccagggataacgtggccagattgagactgagccgaccaagatctgtgatggcatcctcaagccgcttgagacccatcctgtgccgtcttccactgcccccgagtccaaggtcttctatctcaagatgaagggtgattactacagatacc

SEQ ID NO: 304042 - DNA, 304 bp, Zea mays
ggcgaggcaaaagcgcaaacgcgaccacagacagagcgcgcttcaaggccttttttttttgagataacaaagaggagaagaggagatggcggtcacgatcaccttgggtaaggcgaggcagatcttccgcagccgcggcaaccccaccgtccaagttgacgtggggcccaaggacggcagctacgccaaggggggcgtacccaacggggcatccactgggatatatgagggcttggagttgaaggattgaagatctggataacctggcaaaggtggtcctaaagcctgcaacaacggtaaccac

SEQ ID NO: 304043 - DNA, 293 bp, Zea mays
agtaaagcttacatgtcctacgtagcagaaggtctgggggacctactggactgggatcaggccgccatggcttaccagaggaagaacgggtccttcttcaactcgccggccacaacggccgcagctgccatccacaacggctacaacaagagagccatcggttacttggatgctctcatcagcgagtctggcagcagctcgtcagtaccggctgtgtatccacggaaggtgcacagccagctccgcatggtggacaccttggagaggatggggatctctcgcagcttttccta

SEQ ID NO: 304044 - DNA, 120 bp, Zea mays
gtcccacattgttggataccctcgcatgggccccaagagggagctcaagtttgcacttgagtctttctgggatgggaagagcaccgctgaggatctggagaaggttgctagcgacctcag

SEQ ID NO: 304045 - DNA, 286 bp, Zea mays
ttctaaaaaagttccgcaggaaacgcggcccgcagcacgccctttccccacctcgatctcgcgctaggttttcgccacaccgctctcgtcctccgcgaagatgccgaagaacaagggtaagggaggcaagaaccggaagcgtggaaagaacgaggctgacgacgacaagcgcgagctcgtcttcaaggaagacgggcaggagtatgcgcaggtgacccggatgctcggcaacgggcggtgcgaggccacctgcgtggacggcacgcgtcgcctctgccatatccgg

SEQ ID NO: 304046 - DNA, 309 bp, Zea mays
caatccttgagtcaattagcagcctcccacatctttttacgcaaatagaaccaacattgctgcctataatgcgcaggatgttgacatctgatggccaagatgtttatcgaagaagtccttgaaattgtttcctatatgtcattttactcgcctacaatttcactggacatgtggaccttgtggccagtgatgatggaggcgcttaatgattgggctatagatttctttgagaatattcttgttccattagacaactacatttctcggggaactgatcactttcttgcatgcaaagatccagattaccag

SEQ ID NO: 304047 - DNA, 295 bp, Zea mays
gcagctagtacgccgccgcacctccgcccgccaccttcttcccggctccagcgatgtcgggggcgatcggtggcgccgaggtccacggcttccggtgcgcacggcgcagctcccgctgtcgcgggtgctcggtaggccgatccgggtagcgccagccgctgctgcccggccggtctgcgcgtccgctggtagcatacgctgcgtctccacgcctggtgagaaggatgcttctggagttaagctaacaagtgttgatataatcgaggaaaagagcaacttcctccggtaccctttg

SEQ ID NO: 304048 - DNA, 274 bp, Zea mays
gatttatccgctgcagccatgagtaagttgcagtctgagtctgtcaaggatgccatctcccagattgttggggatgccaaggagaagaataggaagttcactgagactgtggaacttcagattggtctgaagaattatgatccacagaaggacaagcgtttcagtggctctgttaagttgccccatatccctcgtcccaagatgaaggtgtgcatgcttggtgatgcccagcatgttgaggaggccgagaagatgggacttgactacatggatg

SEQ ID NO: 304049 - DNA, 311 bp, Zea mays
ggcagtctgcaagcagaccgtctcctgcgccgacatcctcgccgtcgccgcccgtgattccgtcgtcgcgttgggcgggccgtcatggacggttcctctggggcggagggactcgacgacggcgagcctgtccctggcgaacagcgacctgccgcctcccttcttcaacctcggccagctcataacagcgttcggcaacaagggtttcaccgcgaccgagatggccacgctctccggcgcgcacaccatcgggcaggcgcagtgcaagaacttcatggaccacatctacaacgacaccaacatcaaccagg

SEQ ID NO: 304050 - DNA, 296 bp, Zea mays
ccacgcgtccggatgaatgttgggcacaagaatcgtgctgttggtgccactgcactaaatgacaggagtagtcgttcgcacagttgtttaactgttcatgttaagggaagggatctgacatcagggacaatccttcgcggttgcatgcatttagttgatcttgctggcagtgaacgggttgataaatcagaggtcactggagaaaggttaaaagaagcacagcatataaacggatcattgtcagccttgagggatgtaattgcttcgcttgcccaaaggattcacatgtaccttac

SEQ ID NO: 304051 - DNA, 276 bp, Zea mays
cggagccgtggtgctgagcgacgcgcttcgagctggtctcggcggctctacgaggcggtgggcagggaccacgtggtcggtagcagcgctggcggcagtcgggttcgctgccagagagtgcacggaccctcccccggcgccgctggtcgacgcggcggagctgggggtcctggtcgctgtgccgcgccgtggtcgccgggttcatcgccaggctggtgttcctgtagatcacggtggccagcgtgatcgggtacaagcaccagaccgacgcgtcgg

SEQ ID NO: 304052 - DNA, 111 bp, Zea mays
aggtgaggagcctgatagagagaagggagttataaggacgcaagaggagactggtagacatgttaggatgcttacacatgaaatcagaagtagtcttgatagacatgcaat

SEQ ID NO: 304053 - DNA, 327 bp, Zea mays
gctgcagtacggtcggaaatccgggtcgaccacgcgtcggggtgatcaaaggaggctcgtgctagtgttcaagaggttcattttcttccgattaagccaactgataaaagaaactgcattaagctaacctgaatgggaaggggaaaatgcatcgtgttagcaaggggagcaacaagagcaggtccttcaaccttgccaaaaacaatcggattattgaaagaagggtcaaagctgtgatcgacaaatttgctgagcgtggtctgcgagcacttggtgtggcttaccaggaagtgccagatggtaggaaagagagtcctggaggaccat

SEQ ID NO: 304054 - DNA, 300 bp, Zea mays
cacaaggcggtactacatatgttcattgtaaagctggaagaggacgaagcaccactattgtattgtgctacttgattaaatacaggaacatgacccctgaagcagctttggatcatgtacgatccattaggcctcgagtgcttttggcaccctcgcagtggcatgtatgcagtcttttgtgattgctttataagttattagtacaatactactggcgttaagacactatgacaatccacacaattttgcaggctgttaattcatttggagctctcaccggtggacaacttccagtacgga

SEQ ID NO: 304055 - DNA, 282 bp, Zea mays
atttttatcaacaagaaaagtggggctcagcgcggagatcttctcaagcacaagctacattttcttttgaatccggtgcaggtttttgaattaagttcttcacaagggccagaaacaggattatttttgttcagaaagctggcactggcaatgatctttcgagagttttatcatggggaggtggcctaggtgctgttgagaagcaaggtggcctttgcacaattttacatgacatagagcatgcagcagtcactatccttgatagatggaaggtgacagtag

SEQ ID NO: 304056 - DNA, 283 bp, Zea mays
caacgacggcggccttgacgacgacgacgagcagctgtgcggcatctgcctggagcaggcgtgcaccatggaggtgcaggactgcgggcaccagatgtgcgccgcgtgcacgctggcgctgtgctgccacagcaagcccaacccgacgaccctggcactgcagccacccgcctgccccttctgccgcgccaccatcacccggctgctggtggccaacagcaagactactgctacctccaacagcttcaggggactcacctcggccatcaggtccttgtccttg

SEQ ID NO: 304057 - DNA, 304 bp, Zea mays
ggaagaagggcctcctgtctcctctcagttcctgagtcctcgtccgtctctgctccctcctctctctacgtagcaagctggatagccttcctgtagcgcggcagagatgggtgccgctggctccagcacggctgccgcagcggcggcggtgctggtggtggtgctcgtgtcgctcgccgcggcggcggacatgtcggtcgtgtcctacggggagcgcacgacgaggaggcgcggcggatgtacgccgagtggatggcggcgacggccggacctacaacgccgtcggctaggaggagcgccggta

SEQ ID NO: 304058 - DNA, 290 bp, Zea mays
ctacagaacacttacgtgtgcattattcatcaagtatttagttcagccttatttctgcaaatatttgttttcaagttcaagttcaaactattgtgcatattgtgtttatcaaggctctgtagaggtttggaacatgatcctatcttaggccaatctcagggccggccctgagggtatgcgaccgatcagggccccatttgtccagcttatgtccaaatacatatacattatagataatttctattcttgttcaaaaaaaaaaaaaagagaaaaaagaagaaaagaaggga

SEQ ID NO: 304059 - DNA, 174 bp, Zea mays
cttgtgaccctccctcagccgcgtcggtcgcatcctacgatccaaagctctctctgctcgcagccatggcgaagaactacccgaccgtgagcgccgagtacagcaggctgtggagaaggccaggcgcaactccgagccctcatcgccgagaagagctgcgccccgctcatgctc

SEQ ID NO: 304060 - DNA, 190 bp, Zea mays
gctcaggaacgcgctgcacaccgagggcgtcgtcatccactggcacggcatccgacaggtcgggacgccgtgggcggacggcacggcggcgatgtcccagtgcgcgcatcaaccccgaggaaaccttcagctagcgcttcgtcgtcgacaagccggggacgtacttctgccacgggcactacgggatgca

SEQ ID NO: 304061 - DNA, 305 bp, Zea mays
ctagttctagatcgcgagcggccgccctttttttttttttttgacaaatataatattttacatacatcgctacaccactttttacatagaaatatcaccaataatactagttgcaacaaatcacgacatcccattattcatcatcaggactcctacaatatatagttactgacgaagaacagagtcactttattccttgcattatttaatcttgttcccggtacagctagcaagacacaagttttacagatgtaggattatcaggaagcaatccttggaacaacgagaagcttctccttccggcg

SEQ ID NO: 304062 - DNA, 305 bp, Zea mays
ctcaacagcgctacaagtgcagtccatgcatcgatccatggcagcagacatcaagtgcgagcagccgaagcggacgccgagcccgagcgcttcgtctctgaggatcttcggctacgacgtggctggctcgggtatcgccgaccgcatcatcgagcctccgcctcaggacgatggccggccggccgtggtggacagcaggcgcaggttcgagtgccagtactgctgccgcgagttcgctaactcgcaggcgcttggcggacaccagaacgcgcacaagaaggagcggcagcagctgaagagggagc

SEQ ID NO: 304063 - DNA, 301 bp, Zea mays
aaggaaccaatgctgccctcagtgcaagactagatacaagagacagaaaggtagccctcgagttcatggtgatgatgaggaggaagatgttgatgacctggacaatgaattcaactataagcaaggcaatgggaagggcccagagtggcagcttcaaggagatgacgctgatctgtcttcatctgctcgccatgacccacaccatcggattccacgccttacaagtggacaacagatatctggagagatccctgatgcatcccctgaccgtcattctatccgcagtccaacatcgagctat

SEQ ID NO: 304064 - DNA, 317 bp, Zea mays
cccacgcgtccgcccacgcgtccgcccacgcgtccgggagccaccacagtttgttgcacttttccagcccatgattatcttgaagggtggaattggatctggatacaagaagctcatagaagaaaagggtgcgacgggtgagacttatactactgaaggcatagctctaattcgagtatctgggacatctatccacaacaacaagactcttcaagtcgatacggtggcaacatctttaagctcaatggagtgtttcatactgcaatctggaaatgctatgtttacatggtttggcaattctagcacatatgagcaac

SEQ ID NO: 304065 - DNA, 312 bp, Zea mays
cggaccgtgggtcccatcccactaccacccatctcgtcgtccgccgattcgatccggttcatccaacccaggggcagtgatggcgacgaagaggagcgtgggcatcctcggcgaggcggatctgaaggggaagaaggtgttcgtgcgcgccgacctcaacgtcccgctcgacgatgcccagaagatcaccgacgacacccgcatccgcgcctccgtccccaccatcaagttcctcctcgagaagggcgccaaggtcatcctcgccagccacctgggtcgtccaaaaggtgtcaccccaaagtacagcttgaa

SEQ ID NO: 304066 - DNA, 309 bp, Zea mays
tgacattattgatggctactgcccaaaggacaaatcattgtgggcggtgcagaaggtccttgatgaatttgacaagtttgatggcccgacatatcacatgattggcaaccactgcctgtataaccttccgcgcaccagctggtgtctctgcttaagattgcaacagattctgatcgtgcctattatgacttctcgccatgccctgggttcagaatcgttgttctggatgcttatgacttcagttgccttggctggccccatgatcaccctgtgactatagcagcaatgaagctcctggatgagaagaat

SEQ ID NO: 304067 - DNA, 290 bp, Zea mays
aacgaacccagattttcaaaacagaccgctcccggcggccatgcccatgccgatggtgcggcacggcagcggcggcgctgagcccgactgccagaaaccggccacgggatcaggtccgtcagaccgatgcctgcgcccgtcgcacctgtaacctccaggctgaagcgggaagactgcccccgcaccaagcacgactccctcttttccccatggaaggtccttgtcgggccgtcggactggagggaccacgccgccggcaaggaaggggtccagaggtaccgcatccgcaa

SEQ ID NO: 304068 - DNA, 304 bp, Zea mays
ggaccgtggggtaatctgtgcggttctgtgatatacactgtaattatcaagctagtgaatgtattgactgaagttaatattcattgttacagggatacatacaatctggagaagtccatatatttggttatgctagatcaaatctttctgatgatgggttaagagaacgcattcgtgggtatctcaaaggagctccagaagatctttcagaatttttgcaactaataaaatatgtcagtggttcctatgatactggagaaggatttgagaaactgaagagggcaatatcagagtatgaggtgtc

SEQ ID NO: 304069 - DNA, 307 bp, Zea mays
gacgccggcctcgtcttcaccgccacgtccttcttcaagatcctacaggagcccatgcggaacttcccgcaggcgatgatccaggcgtcgcaggcgatgatctcgctgcagcgcctcgactcgtacatgactagcgcggacttgacgagggctccgtggagagggaccccgccgcggcgtcgggcggcatggccgtgcaggtcaaggacggcgtgttcgcgtgggacgacgaggtggacgccggccaggaggtgctgcgcgggatcgacctggacatccgtacgggtgcgctggcggcagtggtggg

SEQ ID NO: 304070 - DNA, 298 bp, Zea mays
aggacaatcacttcaccggcgaggtgccgtcagctcttggcggtctcccgaggctcagggaggtctatcttggtgggaacactttctccggcgagattccggcgagcttggggaatctgtcgtggctagaggcattgtccataccgaggaacagactcactggtggcctttctggtgagctcttccagctggggaacctgacgttcctggacctatcagagaacaacctcgccggtgagatacctctggccatcggtaacctgttggctctccagagcttaaatttgagcggcaatgc

SEQ ID NO: 304071 - DNA, 287 bp, Zea mays
ctggaatgcaggagaacttgccacggcaagagctgcagcttccgcagaacaataatggtttgaaagatcacactgcctgtggtacctcaagtcatgacccaaacactaatccattgtgctgatcttatggtttttccagacattgtcctcatggtctacttccagcgttgaagaggtcaactcagttgggccgggcatacgtttcttccagctctatgtctacaaggacaggaatatcgtacggcaactcgtgaaaagggctgagatggctggcttcaaggccattg

SEQ ID NO: 304072 - DNA, 296 bp, Zea mays
ccacgcgtccgcccacgcgtccggagggttctggtgacgacggcgatctggacagtgatgtcatcggcagccaccgtacttgcgccacgtcggtgccagaggtggatcgcttctacgccgcgttggaaggccccgagctggaccaactcaagccgtcggaggacctggtgctgcctgcggaccggacgtggccgttcctgctgcggttcccggtgtcggcgttcggcatctgcatgggcgtgacagccaggccatcctgtggaaggtgatggcgctgtcggtgccgaccacgttcc

SEQ ID NO: 304073 - DNA, 187 bp, Zea mays
gctgcatcaagtggtaatgcaagtttactactgcccaatttgttgccaccactgttcatacggtacctgaatcagaaatggattccaaaagatggataagattaaagattcaaataggcaagctaaacaattggaagatcttactgtgaaaatgaaggagtgcaagcgcttgatcaaagagtttgat

SEQ ID NO: 304074 - DNA, 284 bp, Zea mays
cccacgcgtccggtaacatacacgagtgattatttcttttcagctaccttaggtttgacgacacaaatccggaagctgaaaagaaagaatacatagatcacattcaagaaattgtccattggatgggatgggaaccctacaaagtaacatacacgagtgattatttccaacctttgtatgagcatgctgttgagttaattcggaaagggctagcctatgtggatcatcagaccgcagaagaaattaaggagtacagggaaaagaagatgaatagtccatggagg

SEQ ID NO: 304075 - DNA, 286 bp, Zea mays
atccaaatcgcgcagatgctgacgtccctgcacatggcggttttcagactatgatccgtttccgagcttcgagggatcaaagatcaagcgttggcgaccaagtgatctggctcttcgagttctacaaggttgaagaccctgagcatctgtttagtgaaggtcaaatatggtgatacacttaaaaggttttatggttgtgccaatgggagtcattttgacatgaatttatctgctctacgggcgaggattgatactgcctttaagtttggtcctgacgttgactttg

SEQ ID NO: 304076 - DNA, 303 bp, Zea mays
gttacttctccctccgccgccactcccctcccattcaccgccaccgccaattccataccgtcctccgccacctctgctgagagcgagaagagatggcaggcaagggtgatgggccggcaatcggcatcgatctcggcacgacgtactcttgcgtcggcgtctggcagcacgaccgtgtcgagatcatcgccaacgaccagggtaaccgcaccacaccctcgtacgtcgccttcaccgactccgagcgcctcatcggagatgcggccaagaaccaggtcgccatgaaccccatcaacaccgtct

SEQ ID NO: 304077 - DNA, 292 bp, Zea mays
ctttccccttccctccctccctctccccgcggaccgccagacgcaatttcgccctcgatccgaccccgattcgtccgcccgcgaccgggattccctccgccaagcgcggatctgaacgctgcgctccgtgtcgccgctcgaatccgccatgaagggggccaaatccaagggcgccgccaaggccgatgccaagctggcggtgaagagcaagggggctgagaagcccgccaagggcaggaaagggaaggccggcaaggaccccaacaagcctaagagggctcccagcgctttc

SEQ ID NO: 304078 - DNA, 286 bp, Zea mays
ccacgcgtccggggcgcagagaatccccaagcaaacaaacagggtagaggtaggcccaggcgcgacgcggcgcgccgggccgaggggctgggtctggcacaccatggctcccatgaagctgtacggagcggtgatgtcgtggaacgtgacgaggtgcgcaacggcgctggaggaggctggctccgactacgagatcgtgcccatcaacttcgccaccgccgagcacaagaaccccgagcacctcgtccgcaacccgtttggtcaggttccagctctgcaggatggt

SEQ ID NO: 304079 - DNA, 277 bp, Zea mays
ggggactgagaactgggaagccgacgctccgctcggcaaagcctgaagcggcgacgacgcttgatcgcagcccgactcacaccgtgagcagttcgagggatggctttcgctagtagaattggaaatgcgctcaggagaactttagcgcccacttgctccccactgcttcagccagtaagatgcatgtcctcttccaagctctttgttggaggactttcttttgccaccgacgaaaccagtctgaaggatgcattttctgagtttgggaatgtacttg

SEQ ID NO: 304080 - DNA, 237 bp, Zea mays
ccacgcgtccgccggatttatatagcttttatctatgtttaattaagacttgtgtttacaattttttatatttgttgttaagttttgaatatatggttttatggtgtgattttaccgaacaaaataccggtttccgtccgattccagccagcgtcatctgattgcatgcaggcgtttaggacctggccggccgtagttactgtaatctccgctgaaatgtcgtatagtaaactttgt

SEQ ID NO: 304081 - DNA, 274 bp, Zea mays
gtgctgccgatcgacacgagccggtcgccgtacctgcggtcgccgggcccggcggggacgctccacaacctcgagtgctacctgcacggcgtggccggcgagcaggaccacgccgccggatggttcaggctggaggtggaccgcgacgtggcgcaggtgaacaagggcgccgacgcgctcagggacgagtacccggtgcccgcgaactggtgggtgccagagaacaggtggatggtcaggggctccgacgaccactgggtgctcaaggacttcg

SEQ ID NO: 304082 - DNA, 315 bp, Zea mays
gaccaggagtagtgcgccgacaacctggagctggccacccgggacgtcgttgaactggctggcgggccgtcgtacgcagaggagcaggggaagctggacgggctggtgtccatgaccaccaacgtcgacggcaagcagccgccgccgtccttcaacctggaccagctgacgagcgttttcgccctcaacaacctgtcgcaggccgacgtgattgctttatctgcagcgcacacggaggggatcgctcactgcagcacgttctcggaccggatccagccgcagtcggtggacccgacgatgaacgcgacgtgcgcg

SEQ ID NO: 304083 - DNA, 121 bp, Zea mays
caacaagatactggcgcagaggagcaatgcccggcatggatgccttcgctgctgtgtcactactcgccacactctttctggttcgttcggcacgtgcccatcctccggcggcggctgcgga

SEQ ID NO: 304084 - DNA, 306 bp, Zea mays
cagacgcgtggacaatctttgcttagaagtggttcttttgttcagtgtcagtaatgtccaagaggtagttgaagcacgaaaaggaagcatggcattagcattagccatgatccttccttttattgtactgttagctggagttgctgtctggtgttatctttctccttcaagtatgatgaggaaccagccacgtttgctcgtgattggaactggctttaattttggatatttggtgggaagaatgatacttgctcatttgtgtgatgaacccaaaggtctaaaatctgggatgttcatgtctctggt

SEQ ID NO: 304085 - DNA, 298 bp, Zea mays
cacacgcgtccggcagagaatgcccaagcaaacaaacagggtagatttagatgtgatgtgaagagaagagaggttgggtctgggacactatggctccgatgaagctgtacggggcggtgatgtcgtggaacgtgacgaggtgcgcaacggcgctggaggaggctggctccgactacgaggtggtgcccatcaacttcgccaccgccgagcacaagagccccgagcacctcgtccgcaacccgtttggtcaggttccagctctgcaggatggtgacttgtacgtgttcgaatcacgagc

SEQ ID NO: 304086 - DNA, 310 bp, Zea mays
cccacacgtccgcccacgcgtccgatggatatcaatgattttgtcaggtttttgagaagcttgggccaagcttgtatgattttctagagagaaatagataccaacctttccctgtggaacttgtgcgggagtttggacggcaactgttggaatctgtagcatatatgcatgagttgcggcttatccacactgatctgaagccagaaaacatactacatgtctcttctgagtatataaaagttccgagtacaaagaagaattcgcaaggtgagatgcatttcaagtgcttgccgaagtccagtgccataaa

SEQ ID NO: 304087 - DNA, 326 bp, Zea mays
atagcacaagcgcactctagcaatggcttctgaggttgtccgccctagcgacgccgagctactaaaggcacaagccgacatatggcggctcagcctctcctacctcacgcccctgtcactgaggtgcgccgtggagcttggcatccctacggcgatctaccgccatggcggggctgcctcagccgctgagctggtcacggcgctgtctctcccctccactaagctgccgttcctccgccgcctgctgcggctcctcgccgcgtcgggcgtgttcaccgtcgacaagcagagctcggaggaggagcggtaccgcatcagccccgtgt

SEQ ID NO: 304088 - DNA, 319 bp, Zea mays
cccacgcgtccgatccatgcagcagcagtcaagtaaagagtccaccagaacagccatgaatcgttcttggtatattttcactcatcaggcttgaggctgattaccttcttgttgttggagtttgcttgagtctaagcattgcaaacattgttggattcaccaagtgcaacaaagatgccaagaagaacatccagactttcgctcaaaatgcactcgcttcccgtgtcacatcatcgctgcaatcagcattcggtgtcatctgaagtcccacgcggaggccctggtattagtatattactcacagcggtgtacaatttgt

SEQ ID NO: 304089 - DNA, 108 bp, Zea mays
ggaatcgggttaagatttcccgatccgtgacgtggcggcatacggcgacgttaggaagtccggagacaccggcagaggcctcgggaagagttatcatttctgcttaac

SEQ ID NO: 304090 - DNA, 306 bp, Zea mays
cacgtccaggctagtgctgggggtcaccacgacgctggtgatcgtcaactgcctcaccacgttccagatctacgccatgccggtgtacgacaacatggaggccgggtacgtgcacaagaagaaccgcccgtgcccgtggtggatgcgctcgggcttccgcgccttcttcggcgcggtcaacttcctcatcgccgtcgcgctgccgttcctgtcgcagctcgccggcctcctcggagggatctcgctgccggtcaccctggcctacccgtgcttcatgtgggtggccatcaagaagccgcggaaggg

SEQ ID NO: 304091 - DNA, 293 bp, Zea mays
cccacgcgtccgcccacgcgtccggagacggccggccggccagagaagggagccattcgctgcagctgcaagcaggatagtcaggagtagcgtgcaacggagatggaggaggactacgtgttcaagatcgtggtggtcggcgactcggcggtggggaagacgcagctgctggggcggttcacccgcgacgagttcttgctggactccaagtcgaccatcggcatcgagttccagacacgcaccgtcgacatcgcgcggcaacgcgtcaaggcccagatctgggacaccgccgg

SEQ ID NO: 304092 - DNA, 298 bp, Zea mays
cccacgcgtccgctcccgaatcggacaagccagcctgtggctactcaattaccatccgtgaaaccatcactgcgacatcggtggatttcacaggtgctaaagcttttgagatatcaggcacgccggttgactgtgtctcgttggccttatctgggaggttgtttccttggtcgtctcctgctttggtgatcagcggtatcaacacaggaccaaactgtgggtatgagatgtttcactcttctgccattgctgctgcaagggaggccttagtgtatggggtgccttcaattgcaatctc

SEQ ID NO: 304093 - DNA, 301 bp, Zea mays
tccccaattcctccttcggatctcgcattcagcgcacgcaggtgtgaaggaagggggcacgcggaggaagatggggctcgcgttcgggaagctcttcagccggctcttcgccaagaaggagatgcggatcctcatggtcggcctcgacgccgccggtaaaaccaccatcctctacaagctcaagctcggcgagatcgtcaccaccatccccaccatcggtttcaatgttgaaactgttgagtacaagaacattagcttcactgtctgggatgtcgggggtcaggacaagatcagacctctt

SEQ ID NO: 304094 - DNA, 302 bp, Zea mays
caaaagcgaggctgcgatatgtgagagagagagagagagaccccgccccaccgacagagagagtgagggaggcgccgacgccgagtcctttctccatcctgcatctgccgctgtttccgacaggatgtttctcacgaggacggagtacgaccgtggggtgaacaccttctctccggaggggcggctgttccaggtcgagtacgccatcgaggccatcaagttgggatccactgcgatcggtttgaagacaaaggatggtgttgtcctcgccgttgagaaacgtgtgacctcaccactgctgg

SEQ ID NO: 304095 - DNA, 235 bp, Zea mays
cccactcgtccgcccacgcgtccggagagagagagacggaaagggggagatgagccggagcctggggatcccggtgaagttgctccatgaggcagcgggtcatgtcgtgacggtggagctcaagaccggcgaagtgtaccgggggtccatggtcgagtgcgaggataactggaattgccagctcgagaacattaccttcaccgccaaggatgggaaggtttcgcagctggagcac

SEQ ID NO: 304096 - DNA, 269 bp, Zea mays
cagccggccaatctagcatccgctcgctgggtctgatagcagagcggcagggcgccatggcggatggagaaggcggacatccgctgcctcatccacacagcgctccgcgtcggctaccgccacctggactgcgccgctgactaccagaacgaagctgaagttggtgacgcgctcgcagaggcattccagaccggactcgtcaagcgggaggacctgttcatcacaaccaagctgtggaactcagaccatgggcatgtgcttgaagcctg

SEQ ID NO: 304097 - DNA, 273 bp, Zea mays
gtgctggtggaggaagaagcagcgcacaggtggcagggatgggtcgcggcggcgggatggggaacccagtcaacgtgggcatcgcggtgcaggcggactgggagaaccgcgagttcatctccaacatctccctcaacgtccgacgcctcttcgacttcctcctcagattcggtcagctcctcttccattccatttccccgcggcctgccctctctcgatctggatctccaacttttggatctggtccgccgccttcgtgcttcataccatacc

SEQ ID NO: 304098 - DNA, 99 bp, Zea mays
gcaacttcaagcacctcaacctcgacttccagctgcaggacggcggtcgcaagctcaaggtcgacgcctggtttggcacccggcgaaccatggccgcca

SEQ ID NO: 304099 - DNA, 302 bp, Zea mays
cccacgcgtccgcgccacttggcaaagcgggcaccggcctcgtagtacttagcgcacgccttgccgaggtcatcgtggccctgggtggtggtctccttgtcggtgccaacaacctcaatggtgcccttgtcgaccttgatgccagggaggacgcctccctccttgaggacatcgatcgctgcgcttacgtcactgagacagtccttgctgcctgctacaaggctctcaacgagcaccatgtcctcctggagggtaccctcctgaagcccaacatggtgactcctggctccgactctaagaag

SEQ ID NO: 304100 - DNA, 305 bp, Zea mays
ggcttgatcatggctctaaggacaagaaacctcctgaattgttacccatagttcttcaggtcctgcttagtcaaccacacagatctagagtgcttgttctgcttggaagatttcttgatatgggaccatgggcagttgatttggccctgtctgttggaatatttccttgtgtgctcaaactgcttcaatcaagtgctatggatatacgtcaaaatctagtgtttatatggagaaaaattctctcccttgataagtcatgtcaggttgaattggttaaagatggaggacatgcatattttattaag

SEQ ID NO: 304101 - DNA, 301 bp, Zea mays
cccacgcgtccgcccacgcgtccgggtacatcagaaccagcgcgtcccccgttgcgaccatcgtgtttctcggcaccgtcgtcggcgggacgccgtcttccccgagaatggcatccttttccagccgcggcccaaacctcctcgcaccggagatcctgaagccggacgtgaccgcccccggggtggacatcctggccgcgtggaccggcgagaactcgccctcggagctcgacagcgacacgaggcgagtgaagttcaacatcatatccggcacgtccatgtcgtgccctcacgtgagcgg

SEQ ID NO: 304102 - DNA, 288 bp, Zea mays
gatgaacaactacatcgtcgagttgtttctgcgttacattgctcagccgtcggtggccactcgggcttccctgttacttatagccgagtcaagcatctgttcgcttggaccaagctcaagtcatttgttcaacgctttgtccagcagtgtcagatctgtttacaagctaaactgggcagatcttcatatccaggcaagttacagcccttggaggtccctaaatcagcttggcatacagtatcccttgacttcgtggaaggtcttcctcgtttaggaacagctaactgc

SEQ ID NO: 304103 - DNA, 273 bp, Zea mays
gcagcggcaacaagctagtagcagatgttttcttcttccacgacgtcctacgcccagggtccgtaatcacgccgatcatcccaccgaccatcaccctaccacctctgctgcctctccgcgaggccgacgcgctcccgttctccaccgggcgcttcgccgacatcctcgccatgttcgcgaagccacggtggagaaggaccctgggcgtaggacgtcgtggaagaagagatacggtcgacgctcgacacctgcgagaacacgcgcccgctccct

SEQ ID NO: 304104 - DNA, 311 bp, Zea mays
gttgcatcctgttaattcaacatccgatgttattgagttaatgagaataggacatgcaaacagagcagtgggttcaacaatgttgaatgaaagaagcagcagatctcacagtattgttaccatacacattcgaggtgtagatttgaaaacaggagctactctgtgtggtgcactacatcttgttgatcttgctgggagtgagagagtgaaccgatcttctgttacagaagaatgctcatgtaccctaccggaacagcaaacttacacaagtcctacagagttctttgggcggccatgcaaaaaccttgatg

SEQ ID NO: 304105 - DNA, 306 bp, Zea mays
ctcgacagacgagtccgggacctgcgacgtggcggacgcgtggcgcccggaacgatgacatcgaactgcgatccatctcatggaggacattatccggacggactgccgaatgagcttcatctcgaatgcccataacattcgtgggcagcatgttgcctttttggcttcgtttagctcgcccagcgtcatatttgagcaactatctgtcatatataatctgccaaagttgtttatttcttcgtttactcttatactcccgtttttcccaaccgggacttctgagcgcatggaagatgagggagatgt

SEQ ID NO: 304106 - DNA, 302 bp, Zea mays
gatcgcgagccgccgcccttttttttttttttttgcccccctgcttcctccgcctgcaccctctcacgagcacccgctcgcccagatctagggttccatccgcgggcaagatgagcagcccccatggcggcctcgacgaccagatcgagcggctcatgcagtgcaagccgctcgctgagcccgaggtaacgccttctccgtcgccctcttctcggttcgaggtgccttttcaccagatctggcggaattgcggggccggggacgggtcccggggagatcgggtttccggacgcgctatgatg

SEQ ID NO: 304107 - DNA, 312 bp, Zea mays
ctcttccgtggccaggatgttcccaagtttgtaatggacgaggtctatgacatggagctctacgagtggaccaaggtggacatctctgatgaggcccagaaggagcgtgtcaatgcgatgattgaggaccaggagccctttgagggcgaggccttgcttgacgcgaaatgcttcaagtgagtgtccttgcctggagacagaactcttccataggcaaattcaagggctaaacagttctgtctccaggcaagcacactcacttgaatttgcctatggaagagtttgcccttttactagtgtcgatgttgatct

SEQ ID NO: 304108 - DNA, 311 bp, Zea mays
ccctctcacacatcacgcccatgacgctagaagaaaaaccacccactcccatgttcgaccagtccccactctcctctcccctctgcgcatgaatagccatgccgagcacctcgccaaaaccgtcacagcagctagagcccgccgtctccacgaatccggcggttccagattgcgatctgttcccgaacttcgaggaatcgacgatcaagatttggtgaaccactggccttgtgaccaagctcttcgagttctacgagattgaagactctgagcatctgtttggtgaaggttgcccacattgcaaccactgc

SEQ ID NO: 304109 - DNA, 304 bp, Zea mays
cgcgttactgcgttaccgccccccgccgtcgcctgcctcagcggatccacgctcggcaggttactgacgccgcccgcctaacttccaccggtctggtggagtggtggggagatctatctgccttggatcgattattctctactacttggtagaagagagtttatccacacaggcagctatgttggaaaagattgggttgccgccgaagccgtccatgcgaggcgccacctgggtggtggacgcatcccactgtcagggttgttctgttcagttctcgttgtttactaggaagcaccattgccaa

SEQ ID NO: 304110 - DNA, 192 bp, Zea mays
gatgatatcaaaaccatctacagtgagactggtgctggggtgacagtgccccgtgctgtttttgttgacctagaacccactgtcatcgatgaggtgaggactggcaactaccagccaactcttccgcccagagcagctaatcagtgggaaggaggatgccgccaacgactttgcccatggtcactacgccgt

SEQ ID NO: 304111 - DNA, 300 bp, Zea mays
gagatacctcaccgtcggcaaacccttatgtacaccgctacatggcccaaggaagtccgaagattgcagatgatcttcttgttcatcctgtacaggtgacaattggaagtgttgattcacttgttgctaatagttctattactcagcatgtagagatcataacaccctcagaaaaacaacggcgcctggagcagatattacgatcccaggattcaggttcaaagatattaatattttgtaccaccaagaggatgtgtgaccaacttgcaaggacactcaccaggcagtttggagcttcgg

SEQ ID NO: 304112 - DNA, 114 bp, Zea mays
cacaattgttggagctgtgtctcctgatggtggtgatttttcagaccctgttacgtccgaaaccatcagtattgttcacgtcttcaggggtttaaatacaaagctcgctaaaag

SEQ ID NO: 304113 - DNA, 311 bp, Zea mays
acgaccgtgggccacgcgtccgatgggatcgtcggagaggaatcgcaaagagggccgtctcatccgagttaaggaagccatggagcacaaggaggctgggcgccaggcccccgagggacccatcctctgcatcaataactgtggcttcttcggcagcgcggcgaccatgaacatgtgctccaagtgccacaaggagatgataacgaagcaggatcaggccaagctggctgcctcctctatcgacagcatcgtgaacggcagcgacgccgtcatggagccggttgttgctggcagcaacacggtagtagctg

SEQ ID NO: 304114 - DNA, 309 bp, Zea mays
cccgaacaacgagaccgccggcacgttcgtgcggcagatcctgtacgacgcgttccacgggcggtacaacagctcggccggcgccatcgtgctgctgttcgtcatctggggctccttcttcttcggcgggctgtccatcacgacgagcgcggcgcgggtggtgtacgcgctgtcgcgggaccagggcgtcccgctgtcgtcggtgtggcgccgtatccacccgcggcacaaggtgccggcgaacgcggtgtggctgtgcgcggcggtgtgcacgctgctgggcctgcccatcctgcgcatcaacgtggt

SEQ ID NO: 304115 - DNA, 111 bp, Zea mays
tggtattattaaaaagacattacatacgcaagtcgttctcgacaatcaagaatgttattaatgtgtaatactgagcactttacttcttaataaaaacttgatatagtagca

SEQ ID NO: 304116 - DNA, 108 bp, Zea mays
acagtctctcctcctcacagaagcctggagctgggcatccaagaagaagcagcctcatgtgttttctggtgtcatcgtaggtggctacctatggcttttgggcttctc

SEQ ID NO: 304117 - DNA, 272 bp, Zea mays
gtggcttcgggggtcgtggtggaggcagaggcggctttggaggacgaggtggtggtagaggaggccgaggatgatttggtggcagatgccggggaggctttggagggcgaagaggcttccgaggaggcagaggaggaggaggtgaccacaagccacaaggaaagaagacgagtttgaatagcttctgtccctactgctttcccttttagatttgaaagaaaggactctggggtttttactgttacctgatcaatgacagagccttctgagga

SEQ ID NO: 304118 - DNA, 105 bp, Zea mays
gtcgagccagcgtcgccgcgatggtgttgttcgagagcgagcagttcctgacggagctgaccagacttttccagcagtgccggacgtcgcgcagcgtctatatca

SEQ ID NO: 304119 - DNA, 104 bp, Zea mays
gtgcctctgggtatcagcataggagaagattctgatgcttcctgtgaatgcaccaaaatgtgcccaccacaataaccaccatgatgggttcatgaacttcatgc

SEQ ID NO: 304120 - DNA, 131 bp, Zea mays
cttgcctcatacctctgtgctccacactgcggccaggcgagctgagtccctccatccgtggatgctttcctgcagctatgtggtatgggggtcattcctgcctcttggcaccaggttggggggcatgtgct

SEQ ID NO: 304121 - DNA, 266 bp, Zea mays
gcaagcccaggcacttcgggacaactccaccatgggctatatgatggccacagagcacctggagatcaaccctgaccaccccattgtgagaacgctgcggcagaaggctgaggccgacaagcatgataaggccgttaaggacctgtggtgctgctgtttgaaaccgccctgctatcttctggcttttccctgaggatccccagacccatccaccgcactctcgcatgtcagctaggtctagtttgatgagtgagtggcacagagaa

SEQ ID NO: 304122 - DNA, 282 bp, Zea mays
tagaagcgctggtaggccttggagatgcgggttaggaagagtggagactgctgcacggactcttgaaccatgaacatatttgatcgaaagatcaattttgatgcgcttgtaatattttctcatataaccccgtcaacgcagcagcacctgaagaaggtctatgcaagttttgccctgtgtatgtttgtggcggctgcaggggcctatggtcctatggtcactcatttcattcaggctggccttatgtctgccttgagctccctgatagtgatgatgtggctg

SEQ ID NO: 304123 - DNA, 285 bp, Zea mays
tagtcccagtgcgccccctacgtgccatagcctggttagagttccccagtgcctccttgtgcatagaccttcttctcccacgcccttctggccctgggtccccggccatccatcggggctgccagagaaccccagacctgcccttacagtagtgtagcgccccctcgctctgtcggctggtgtagaatagccagtagtgtagtgcggtgtgcttttacgtgatggcgggtgggcatcggtcggcgggctccgcgcagccgtctgtccttgatctgcccgcggcgg

SEQ ID NO: 304124 - DNA, 233 bp, Zea mays
ggggacgctacgcagagcgggacatcgttcagttcgtcccattccgagactatgttgaccggtcggggcaccaggtgttcagcatggcccgactggccaaggatgtgctggccgagatcccggagcagctgctgtcctactatgcgcaccagagacatccagcctcggcccccaccccctgccaaccccagcccgatcccagctccagagcagccctgagggattccacatat

SEQ ID NO: 304125 - DNA, 250 bp, Zea mays
gtgcagtgcaatccaagcgaagacaatccaagtaaacaagcaggaatgcgacttgatacttggaaatgtgtgtgacttttacaaagagcaattttgagctgtgactttattaaatcaatttctgtacagttagtaattttaataatgtggcccttttcctagtccctgcaacctgtttcataaagtgcaatggggaaagcaggactgttgagcccttttggtgatgcgagttgaagttcaaggtttctaa

SEQ ID NO: 304126 - DNA, 150 bp, Zea mays
caggtgccgaaagggccggttgagggatatgaggagattgaggagtttctgaggaccatgcaccaactgctgctggaggtggaatagatagagggcaccctgcagtgcccggaatctggacgtatgttccccatcagccgcgggatcccc

SEQ ID NO: 304127 - DNA, 279 bp, Zea mays
ggatgctggctgcagtgagggcgccgcactccccaggtcccctctgtcttctctttcgactttgcagctgtagccgttttgctcctctacccgcaggagctgacatggacccaaatcctcgggccgccctggagcgccagagctccgccttcgggagcggcaacaattcttcgaggacattcaccaggcagagacagagtttgtctttcctctgtcccatctgcatctcgagtcgcagagaccccccataggtagtctctcatccatggaagtgcatgt

SEQ ID NO: 304128 - DNA, 291 bp, Zea mays
atcactgatgcgtctctcgccgtgattgggtactatgggaagtcaatcaaagacctgaccctcgctcgcctctctgctgtctgcgagaggggattttgggtgatggccaatgccctcggcctgcagaagctgaggtgtatgactgtcgtctcctgcccgggactcacggatcttgcccttgcatctgtggccaagttcagcccaagcttgaagactgtgaacctcaagaagtgcagcaaggtctcagacggatgcctcaaggaattcgcagaatcatccagggtcctggag

SEQ ID NO: 304129 - DNA, 276 bp, Zea mays
  unsure (1)..(276): unsure at all n locations
tggtaatgaaatactcattgcagatgctattggtagtactggaatggatcttaagcatgtcgaggagtctctattgtttatgatggctccggtcagcttatgctaacgacctgcattagctatgtctcagactctcagatatgggcattcgaagatgcaagtacagtggtngttggaggaaagacaaattgcgccacacttgaattttgtgaagacatgaancggctacttgataaagtagcagagctcatgagngnngatgagaatgtattagat

SEQ ID NO: 304130 - DNA, 148 bp, Zea mays
gcggatgttgacagaaagaatcaacagactgttgagattcttaaaaggcaaggagcacaattggtggaacttgagaatctttataagcaagaacaggttctacgcaagcgttactataatacaattgaagatatgaaaggaaaataag

SEQ ID NO: 304131 - DNA, 283 bp, Zea mays
tatccatttggcacatagacacaaggaagattacactagtaaccatctttccagttcattcatatacttagaaacagtaaatacctttcctttccacttttatgctgtgttctttgaacatcatttgtgcagtctctgccctcaatgaggaccaaataaagatgatttttgtgcttagcagtttaaggtatatggctgcatatgcaaaactctttcccaattcagtcgctacttttacttctgccctttctatccatcgtcttcattttgtgtgtacagtgct

SEQ ID NO: 304132 - DNA, 278 bp, Zea mays
taccagcactgtctaagctagtgataattggaaacgatttaagtatctagcacattggattggttataaagctaggaatgttcacacagtaggatattatcagtatactgattggaatctatattgccaggaaaagctattcattatgcgttgtgaagtcagatagttaaaaagggtagatagaagtattcgaagtatagttccattttctgagcctaataagacatctgtttacacgggcactgagaactggagttatagagatccagttagaaaca

SEQ ID NO: 304133 - DNA, 216 bp, Zea mays
ggcctgagtttcttgtgcattactcctatccctccttcgttagaataggtctatcagctgtgtaaatagagcaagaccacagtaatctgcatctgaggcatttatgtagagttgcagttgtgtactgctgcatatgcaggctattgtaacagtgtggtacttactgatgacctcatgacaagtaccacaatgtattttagctattttagtcgtatt

SEQ ID NO: 304134 - DNA, 316 bp, Zea mays
gcaggtgaagaaaagttacataggtgttcatcagcagatagaggcagagatgatcaaggttaccaaaacagaattggagaagttaaaaaacagctatagacaattaataaaagaaatgaattctgccaaagagaaatataaagaagctttagctaaaggttaggcaaaattttaaaaattgtttacttaggtgatttttattcttactgtttgaacgttatctttgtaagtagtggaatgattccatttagagcatttcacatataaaaaactcaaaatcaacccacattggctaattggtcaaaaaaaaaagaaa

SEQ ID NO: 304135 - DNA, 221 bp, Zea mays
gttactgctacctgggggctcgcagggcctgggcaacttagctgcaactggcatcggagcatggtcgtttaaagtgtgacaccagtcagctccagaaagtttaaggggtctgtttctcatctccatggacatcttcaacagcttcacctgacaactactgttcctatgaactagccacttgtgttttaagcagaggcaacctctctcttctcctctgtttc

SEQ ID NO: 304136 - DNA, 299 bp, Zea mays
  unsure (1)..(299): unsure at all n locations
ctcttttcttccacacaacataaaatagataaaagccananggggtcacacgagagctccaggctctgggaaggtcnatcagtagatgaggatttgtgacagaacttanagaagcaccttgctagcatggtttctgaagggtgaattctggtggggaaccagaaactccctgtctttggggcagggctaaagcagctcctaaggaccactgaccattagctcttgcttttgatggcattctctttccaccttgtcttctcctatgctcctctgtgttagtgtggcaggtatgacaactc

SEQ ID NO: 304137 - DNA, 289 bp, Zea mays
cagggcggctggaggaagccaagaaggttatccaggacatgccgatggagccagacgtcggcgtcctcggtgcgctcttcggcgcgtccaagatacacggcgacgtcgacctgggcgaggcgatcgggtggcgcgtcattgagctggatccccagaacagcgggcgctacgtgttgctggcgaacctcctcgccacggccggccggtgggaggacgtggccagggtccggcggctgatggacgagcggaacgtgagcaaggaagcagggcggtctgtgatcgaggtcca

SEQ ID NO: 304138 - DNA, 290 bp, Zea mays
cctaaggatgcggcggggtggtgagtctatggattcacggccttacttcgttctgggagatctttgggaatctttcagggaatggagtgcttacggggctggtgttccactggtgttaaatgacagtgactctgttattcagtattatgtgccatatctttctgctatccaactatttgcggacctatctagaccagcttcaagaaacagttaattttctcgcttacttaaggcgtcctggggatgaaagtgatggggaatctatggatactagcagtgagagcagcatt

SEQ ID NO: 304139 - DNA, 293 bp, Zea mays
tgaagaagttgcagaatgcccaaagagtgatgtcattgaagataatcatcatgacatcaatttgggtatacctgtcactatttttagattagcagaagaagacatgccccaggaccctggaaaaactgatgatgaatcatcatatgaaaatatgggagaagagctcggcgacttaaccttgcaggcagaagagtatattattcagatgcaatctcgtttggatgccatgaaaaaagagctacatgagctcaggagaaagaattctgctctgcagatgcaacggtttgttgggg

SEQ ID NO: 304140 - DNA, 263 bp, Zea mays
aacggcgccggcaccatgacgctcgacgacgacggcaagaagaagcgcacgggaacggtatggacggcaagcgcgcacatcatcacagccgtcatcggctccggcgtgctctccctcgcctggtcgactgcacagctgggctgggtcgtggggccgctcaccctgatgatctttgccttgatcacgtactacacctctagccttcttgctgactgctaccgcagcggcgatcagctcaccggcaagaggaactacacctacat

SEQ ID NO: 304141 - DNA, 258 bp, Zea mays
ggcatcctggccaacgtcgccagcgccggtgagaagctccacgagcggctcgtggctgagattcgaggcgccgtggccgaggccggcggcaaggtcaccctcgcggcggtggagaagatggagctggtcaaatcggtcgtgtagtagtcgctgcgcctagacccgctcgtcaagttccagtacggccacgccaagaaggacctgcaggtccagagccacgacgccgtgttccaggtgaagaagggcgagatgctgttc

SEQ ID NO: 304142 - DNA, 283 bp, Zea mays
ggaactcagttacatctcagttcagcataccacccccaaagtgatggtcaaacggagcgtgtgaatcaatgcttggagatgtttttgagatgtgctgttcacaattccccttctcagtgggcaaaatggttagactcagcagagttgtggtacaacacatcctatcatacttctataaagtgttctccatttaaagctttatatggagttgagcctaatttgggatgcattcctgtcactgactctttgaatccttcagaagctcaactcaccttgcagcaaa

SEQ ID NO: 304143 - DNA, 146 bp, Zea mays
attagaatatttcttataaatctgtttactttttatattaagaattaaactgtacctaaaaaaactctgactattcccatttgtcagtttagcattacattgtcttgagcaccagaaaataaaatccatatattaataaaaaccta

SEQ ID NO: 304144 - DNA, 191 bp, Zea mays
atgtaatttgattctgtaaagaatccactttagtcttggcctggcagtatataaatggtgctttatttaacagaatacctgtggaggaaatatagcacacttgatgtaaaaataattgttttatatgtattgacatgactgattgattgattgctattctgtgcacttaattaaactgattgtgatgactt

SEQ ID NO: 304145 - DNA, 298 bp, Zea mays
tgcggctggccattctgggcggttcctagttaggtttctgttcccagctaagctgcagacctctattttctcctctgtgcaatgggaataacaacagtgtatctccatatgctgtctttaggattaacggaataatccgttgttgagcttattggcactgtgcctggtacacagcagccatctactctgctgggcactcactgatgaaggtgggggtcaagggaaggaaagggctttgaactccaggacaatagccacctttttcctgttcctcacagggaacccagtttggccagtg

SEQ ID NO: 304146 - DNA, 177 bp, Zea mays
caaaaagcacaaagagctggggctgaggcaggaagcaggggccctcctggcagctcctctgagtggggagaggttgggcagtgagtgagggacccctaatgcagggactagaagcctcagtttccccattttacccttccactcaatagcctctgtaggttaggctgccccatctca

SEQ ID NO: 304147 - DNA, 274 bp, Zea mays
attgataaatcatatcattaaattattaaataagttttgaagttgatacttgtgtctatattgagtatgcttttagtcactgtgcgagcagaaggatttacaaaagtggtgttagtggacaacgttgtgatggaagtagcactgctcctccttgcacagggtgggttgaaatgatggctcctgttttctcaagagctgcttggcgttgcatttggtttatgatccagaatgacttgatccatgcatggggtctagatatgcagctaggctactg

SEQ ID NO: 304148 - DNA, 278 bp, Zea mays
cttgcgcgtacgcgtacacagccccgatccgaatcgtcctcctcgcgaacctcgccgatcccccactcccctcccctcgcttcaagatagcgatctttgtgaagaccctcaccggcaagactatcaccctcgaggtggagtcttctgacaccattgacaatgtcaaggctaagatccaggacaaggcgggcatccctcctgaccagcagcgccttatcttcgccggcaagcagcttgaggacggccgcacacttgctgactacaatatccagaaggag

SEQ ID NO: 304149 - DNA, 284 bp, Zea mays
gcacctctctccatctccctgctcctccgcctccttcttgatccagccaagccagggatcgccatgtcggactcggaggagcaccacttcgaatcgaaggccgacgccggagcgtccaagacctacccgcagcaggctggcaccgtccgtaagaacggcttcatcgtcatcaagaaccgcccctgcaaggttgtggaggtttctacctcaaagactggtaagcatggccatgccaaatgccactttgttgccatagacatattcaacgggaaaaagcgtgaaga

SEQ ID NO: 304150 - DNA, 274 bp, Zea mays
ggccatggtaggcctttccctaagccagctgctcccagatccacagttcccctatgctgaagtggggcgggcttcatagagacttgggaatgagctgaaggtgaaacattttctccctggatttatactagtctcacatgatccagccatcaccttagaccaccaagccttgattggtgcagccagttgtcgtccttccggggaaggatttctcagttctttggctgataggaagctgtgcgtgtgtgtgtgtgtatgtgtgtgtgtgtatgtg

SEQ ID NO: 304151 - DNA, 260 bp, Zea mays
tctcgagccgattcggctcgaggtgccaattgctattggtgctaccggattggcccctggtttaagattccgaaatgatgttccaaccggcgggcttgccaacgttgctgcaacactgacgaatcttcatggattcgagctcccagcgactatgagacaactctcgtagaagtggttgataactaggaaccaatagatgaatttttataatttgaaaaacaaacagggaaagctgtagattgcagcccccaaaataattg

SEQ ID NO: 304152 - DNA, 148 bp, Zea mays
tgcaaatgtgaccagcaatgtcaaaaactgcacactgtgtctgtgtgcgaacttgtgaaattgacattgagttcaattagctagttggctcgagatttcagttttcatctccatttagaggtaaaaaaaaaagataaaaaaaggggga

SEQ ID NO: 304153 - DNA, 131 bp, Zea mays
gaaaaaagggatcaaggtgttacctgatggtcgggttactaagattcctcaagggatggtgacggaccaatttggaatgattggtctgttaagatatatcagggcagcagagacagacccaggaatggtac

SEQ ID NO: 304154 - DNA, 268 bp, Zea mays
ggttgcttctgcacagacacagccttcttcatcaagtgtgcctgctccttttggagctacgccttccacacatcataaaatatataatgctggtccttctgtggcatctcttacaaactcatttcagattaatgccagatttgaacagctgcaacctttggcactgcatccatgagcatgcgtcatggattactttatcctgctccctacagtcttcccaccagctttagtggcagctttcagcagcctgcctttccagcccaagcag

SEQ ID NO: 304155 - DNA, 276 bp, Zea mays
tagattctttatgaagagctgagtgctgtaactcagtgttggatatttgtgaattggtggtttaaagttcaaatacaaaaagagaagactgaatattcatcaaacattccttcaggaaccacgaaggcatcattttaaatgtgacatacattactgagcaaaacaagaacagatattgtgtgcataaaaccctgctggccattgaattaaggatcatgtaaaaatatgtatgtaggcccggtgcagtggcttatgcctgtaatccaatcactttgg

SEQ ID NO: 304156 - DNA, 99 bp, Zea mays
ctggggatctcttgtcctcagtgccacccggcctcccgtctttcctgaaacccctcgccagcttttgcactctgaggtttctatcttccacacaacata

SEQ ID NO: 304157 - DNA, 229 bp, Zea mays
ctcaccaaccggagggagagcacaagccgcacttcccggcgccggcgcctcccccgcacgtggagacgcaccaccccgtcgttctccacaagatcgaggacgacgacacgaagactcagaccccaccacaggcaccggagtcggagaagaaaggcctgctggacaagatcaaggagaagctacccggtggccacaagaagccggaagacgctgctgccgccgccgccgc

SEQ ID NO: 304158 - DNA, 270 bp, Zea mays
gcacgagggtgtcgacatcgtcgtaatcagggagaacaccgagggcgagtactcggggctcgagcacgaggtcgtacccggggtcgttgagagcctcaaggtgatcacaaagttttgctctgagaggattgccaaatatgcattcgagtatgcttaccttaacaaccgaaagaaagtcactgcagtgcataaagcaaacattatgaagcttgccgatggtttgttcttggagtcttgccgtgaagttgcttcaaaatatcctggtattca

SEQ ID NO: 304159 - DNA, 269 bp, Zea mays
ctgcaggagtgagtaggcctgctgtatttcttgtaactgctgggtactacaagataagttacaatgttttacactttaaaaaaataccagaacgaacatttgcattattggtgacttactagttcagcctctaggttatggcacagcatgctaaaaaatcatgtgtttaaaagtaaatgttgctaaaatgctggcatctggtcctattgggttgatgcattttcacttctgtggtcatgatgaaatggcctggtctaaagatagtgagg

SEQ ID NO: 304160 - DNA, 256 bp, Zea mays
gaggagatggcacaggagtacggaagctatctgacagaatctatgattatgcaacatacaatgatttggggaatccagatcggggaaaagagttcatcaggccaatccttggaggtgacaagatcccttacccgcggcgatgtcgaactggtcgcccaccaactgatacaaacatgctagctgagagcagagtagagaaaccgcacaggatatatgtacctcgggatgaggcgtttgaggagctgaagcaaggcgc

SEQ ID NO: 304161 - DNA, 258 bp, Zea mays
agcttctcgcttttttaaccacagttgtcaacctaactgtcggctggagaaatggaatcagagggtctgcttatgggcctcaatttgttgctaaaccacttgcacctgataaccctccactgaaggtaagatttattgacaacatcgatcctggtgggattgatcatcaaattgctcaactaggatctcaactggcaactagctactcttgtaattgtcatttctaagaacacttgagggagggggaactgctgaagc

SEQ ID NO: 304162 - DNA, 130 bp, Zea mays
gccaggagcgtcttcctccacttgatgaaggtggacccagactccacctggttcctcctgaacgagctttactgccccgtgcagttcacacctccccatcccagcctccaccctgtgcagctgcacgggg

SEQ ID NO: 304163 - DNA, 126 bp, Zea mays
caccgccaggtggaacggcaggtgggttcaggtaccagcctggccgggcaccggctgtgggaccaacgcttccggtgagcgacagaggcagctccccagggcctggagacccgtggggcggactct

SEQ ID NO: 304164 - DNA, 293 bp, Zea mays
aagactttgaggtgccacatcggagtttgcattggatgtgagtggcatccattggaaactagcaaggttgcaacctgtggatgggatggtgtaattaaatactgggattgaagtttggcagagagattgcttgagctcctgggggaggttttgtaacaatccaattcacaagggctgaatgtcatgagatactgtaagttaacacgcccgacgagagaatcccggttcaatggaggagaaaaaaagttgtacttttgaggttaagtatatgtatgttggagacataagaaggg

SEQ ID NO: 304165 - DNA, 287 bp, Zea mays
gtgatctctgtgtgaattttactttatgtgtcatttatactgtatatggatcatgcagactcatacaaatgacgatttggaggaaattagagagctgggttcaggtacttatggggcagtttatcatggtaaatggagaggatgtgatgtcgctgttaatagaataatagcgagtcgctttgtaggcagaccatctgagagagagcgtttgattgcggatttctgcgaatgaagctctgatcctaagctcactccatcatccacatgtggtgtcattttatggtgta

SEQ ID NO: 304166 - DNA, 299 bp, Zea mays
gtccttcaggagaaacctcgcaaatggcagctcgtctaagcaatccctcgagcagcaacaacaaaacgatgatgaagcctcctgtgacaaggcgaagcagacctgcaagagaagcccgctcatcaaaataaacatggacggcatccccattgggaggaaaataaacctctcagcgtacgacagctaccagaagatttcgtctgccgtccaagatttgttctgtggcttccttgatgcagcccagaaggatgaatctagagggcgaggagcagaagagaaaatgttctcagggttgttgg

SEQ ID NO: 304167 - DNA, 289 bp, Zea mays
ctctgaagagatatccgcaaacatgcagcgggcaaggacgaaaatggcggactgggctaaggcgcatgcaaagccttggatccgtcctttggtgatggcagacacgaccaacgagccattgaggttctcacgcacgaggtaacggacttgctaaagaggtcggagaagaggctgcagaagctgtccatgaaagattcgtcagaggactcaaatgtccggataaatgtccagcgttctcttactacagacctgcaaaacctgtcaatggagttccggaaaaagcagtcgt

SEQ ID NO: 304168 - DNA, 294 bp, Zea mays
agtgctctgtccacctctctcgctctgcgccgccgccgccgcactaaggcacgtgctgaggctttcgttggtctcttcgcgcgcgacgagcacggatcgctgtagaaatggctgatggtgaggacatgcagcctcttgtctgccacaatggcactggaatggtcaaggccggttttgctggccatgatgcaccaagggcggttttcgctagcattgttggccgtcctcgccacactggtgtcatggtacggatgggcagaagaaggcatactttggcgatgatgccagtccaag

SEQ ID NO: 304169 - DNA, 272 bp, Zea mays
tcaggttcaagcggaacattaaatcatggatgcgtggtgctcttctgggaagcggctcatttgggatggtgtacgaggggatcagtgatgagggtgcattgtttgctgtgaaggcagtatctttgcttgaccaaggaagcaacgcagaacaatctattgttgcacttgagcagctctaattttgagttttgtgtttatcaggaaattgcactcctcagtcagtttgaacagaaaatatagtccagtattatggaactgacacggtagaatcc

SEQ ID NO: 304170 - DNA, 129 bp, Zea mays
gtcttcaactggttagtgtgaaatagttctgccacctctgacgcaccactgccaatgctgtacgtactgcatttgccccttgagccaggtggatgtttaccgtgtgttatataacttcctggctccttc

SEQ ID NO: 304171 - DNA, 126 bp, Zea mays
tctgaggtgtttgcctgccctgtctgctacgagccattgatgagaaaagggccaccaggcataaacttgccagcaatttataggtcgggattcaagtgttcaaagtgcaacaagtcatttaccagc

SEQ ID NO: 304172 - DNA, 279 bp, Zea mays
atcagcaaataatggttcaagaaggcagaatgcttctcaattatgtgaccatgaatgctattgctattcgcaaaattctcaagaaatatgacaagatacatggttctgtgagtggcagagatttcaagagcaagatgcaaactgagcatattgaactgttgcagtcaccttggctgatagagcttgctgctttccatcttaactgcgatgattcagatgctgatgaacctagagctggagagttcttcaagaatggattcttcaagaatttttcctgtg

SEQ ID NO: 304173 - DNA, 116 bp, Zea mays
gcagtgacaagaacccttaaacagttgcacagcatctcagctcatcttcactgcaccctggatttgcatacaggcttcaagatcccatttgaattttgaagtgactggaccattgt

SEQ ID NO: 304174 - DNA, 179 bp, Zea mays
cgcgccgccgccgcgtctcctcctgtacaggtaagaaggagacgaagagggcgaaatggtgaagcacaacaacgtcatccccaacgggcacttcaagaagcactggcagaactatgtcaagacatggttcaaccagcccgcccgcaagcagagacgccgcattgctcgtcaaaagaagg

SEQ ID NO: 304175 - DNA, 177 bp, Zea mays
ggatcactgggttgcgcactatctcaggattacaattgagcggttacgtcgagcacacaaaccatacctgtaatgcctcctactacccgtgatcgctactgcgctctactacaatcctgcgctgacccttgagatcttaaataagctcggggttgcagctgacatttgtacccattg

SEQ ID NO: 304176 - DNA, 281 bp, Zea mays
agctgctggattctgtttggaaaggtttggcagcagaagataagaacaaggcgtccaaggagtgcctcatagccgcgcttgacaagatggccgatgctgcaagcctgccatattacggtgctgtgaaagaggtggatgctgtcgtggaagagtcgatcaagacagcgggcgtcgaagaaggaaaggcagtggatgaagcggagttcaagaagtcgctcacagaaatccttagggccatcatgctgaggctgaacgacagccccgtcttcgtctctaccgac

SEQ ID NO: 304177 - DNA, 277 bp, Zea mays
caaatggattggctaaaactgacacaaacacatcctgatctagctgggcttaaggggcagtcaaaccgaagttaatttctttggaagaggttaatcagcacaaagcaggagattgtatttggacagttctcaaaggccgcgtgtactacattgctccatacatgaaatttcatcctggaggtgttgatatgcttatgacagccgctgggaaatactgcactgctttgttcaataaataccatgcttgggtaaatgcagagttcctcctggagaagtg

SEQ ID NO: 304178 - DNA, 283 bp, Zea mays
cttctctccttttgctcggaacgcacacacagcgcggtcgcctatctccaatctgctcttcgatccaagatgcagatcttcgtcaagaccctcactggaaagactatcagcctcgatgtggagtcttctgacaccattgacaacgtcaaggccaagatccaggacaaggagggcatgcccccggaccagcagcgactcatcttcgctggcaagcagctcgaagacggtcgcacacttgccgactacaacatccagaaggagagcactctcgagcttgtgctcc

SEQ ID NO: 304179 - DNA, 264 bp, Zea mays
ggcctcacatatatactgccgattccattgggcttcgattccaaatgggacaccaaaaggtctggtggttttcaagaaggaagatttggctacttcatagtgaatgggagccgggtctgcgcgaaccctcacggtctgatcaggaagtacgggctcatgtgctgcaggcagtgcttccgcagcaacgccaaggacattggtttcatcaagtaccgttgaagaggccactgtgctgctgtggagaacttcctacatcaaagaaat

SEQ ID NO: 304180 - DNA, 279 bp, Zea mays
aaaggatgcgcgcactagtgacgcgcatggccctgctcccgccctccccctcgtccgcctgaagcacgtctcgttccagtgcgagtccgtggaagcatcggtcggcttctaccagcgcgtgcttggcttcgagctcgtcaaacgcccggcgtccctcgacttcggaggagcatggatgcacaggtacggcatggggatatatctactgcagcgcggctcggattcgtcgcccaacgctccggcagctgcaagaccgccggcgatcaaccccaagggcaa

SEQ ID NO: 304181 - DNA, 167 bp, Zea mays
gtttgggaaggacaagcagattctggttcttataccattagagaggaaaaagacccggagctaggtcttcctaggggaactcgccttactctctatctcaagtgtgatgataagggttttgctcaccctgagaggattcaaaaacttctaaagacttactctcagtt

SEQ ID NO: 304182 - DNA, 206 bp, Zea mays
gtggaaccacgggctcatctccgacgccacgtaccggctgctggacgccagctgcgtgcacgacagcggcgagcacccgtcgccgcggtgcaacgcagcctacgacaaggcgacggcggagccgggcgacatcgacccctacagcatctacacgccacatgcaaccagacgtcgtttacgccgaggaggatgaggctcaagggccg

SEQ ID NO: 304183 - DNA, 100 bp, Zea mays
gcggaccagctcggagaccgcggccttcgctggagcgcggatcgactggaaggagactccagaggcgcacgtgttcaaggccgacgtaccggggctgaag

SEQ ID NO: 304184 - DNA, 298 bp, Zea mays
ctccttcccggtctcctccgcccgttgccttcgtcccctccatctccggctgcgtcgccggcgagcccgacaccgcgaatcggatccgccgacaaggcgagagggaaaagatggggcttacgttcaccaagctgttcagccggctgttcgccaagaaggagatgcggatcctgatggtgggactcgacgccgccggaaagaccaccatcctctacaagctgaagctaggcgagatcgtcaccaccatccccaccatcggattcaatgttgaaactgtggagtacaagaacatcagctt

SEQ ID NO: 304185 - DNA, 277 bp, Zea mays
gatggccattacgaaatcatagcagcacatgggaagggtgtgttctcaaaagtcgtgcgggcaaaagatcttaaagcgagtaaagatgatcctgaagaagttgctatcaaaattattcgcaacaaggagacaatgtacaaggctggtaagcaagaggtttcaatactggaaaaacttgcaagtgtggaccgtgaggacaaacgccactgcgtgcggtttatttctagtttcatgtaccggaaccatctttgcttagtttttgaatctctcaatatga

SEQ ID NO: 304186 - DNA, 193 bp, Zea mays
  unsure (1)..(193): unsure at all n locations
cttgttcagtgagacgggggatgacaagcatgtgccccgggcagtgtttgtagacttggaacccacagtcattgatgaagttcgcactggcacctaccgccagctcttgcacactgagtaagataggaacangcaaggaagatgctgccaataactatgcccgagggcactacaccattggcaaggagatcat

SEQ ID NO: 304187 - DNA, 288 bp, Zea mays
ctaagagcggccctctgcggctcaggtctagtgatgtgtacacaatggacttaagtgaagaagaaccttgctggcgatgcctcactggtagtggaatgcctggggctggaaatccagctggcgcaggtccacctcctcgcctcgatcatgttggtgtgagcctgccaggtggaagaattttgatatttggtggctcagtggcaggtcttcactcagcatcacagctttatctgttggatccaactgaagaaaagccgacctggagagatttgagtgttcctgggcacc

SEQ ID NO: 304188 - DNA, 278 bp, Zea mays
cttgcgcgtacgcgtacacagccccgatacgaatcgtcctccacgcgagcctcgccgatcccccactcccctcccctcgcttcaagatgcagatctttgtgaagaccctcaccggcaagactatcaccctcgatgtggagtcttctgacaccattgagaatgtcaaggctaagatccaggacaaggagggcatccctcctgaccagcagcgccttatcttcgccggcaagcagcttgaggacggtcgcacacttgctgactacaacatccagaaggag

SEQ ID NO: 304189 - DNA, 308 bp, Zea mays
aggtcgagctcgagcgatttaggcaaagactgcccgtttttgtagagttgtatgattggtggaagagattaaggaatcgttgctgcaaggagtcaaagaagattttcgatggactcctcatctctttctggtggaatatatggttagaaagaaataacagaatctttcatagacttcaaagatctgctatccaggttatgcaattggtgaaagatcaaattgtgagttttagtgtatgcaattggtgaaagatcaaattgtgagttttagtgtatgttagattgagttagtgtatgtttttctctttt

SEQ ID NO: 304190 - DNA, 206 bp, Zea mays
agactgaagcaggcgctcttggctcggcgcggctcgctgcaatccgtggaggaacgcgccgccgagccaccatcatgcctgggcacttacaggaaggcttcggctgcgtggtcaccaaccgattcgaccagttatttgattatgaatcggaccccttcgaggtgctgaaggcagcagagaacaagacaaaagaagccggcgggggc

SEQ ID NO: 304191 - DNA, 192 bp, Zea mays
ggagttcgtgggacgggatgctcctcggacccttccctccaggggcaggaactgagttagcatgggcggggccggccgagcttccaggcgtattttctctgttacatgtacctctgtctttaagctgtctcattttctaatcgctggcatgtcttgcctagataagcatttggaattgcttatgttcaatta

SEQ ID NO: 304192 - DNA, 272 bp, Zea mays
gatcgatacaatgtatctgatctggtgttcgcccatttttatccgatgacttcttgcagtggagctgggccgtcggtacttcccgaactgctcgcaggtgctggacaagttcctggaggacgatctgccggaaggtctggaccagttctacctccagaggggcacagccgatgagcagaaggtgaagaggatgcgcttctgcgagctgaaagaggacgtgctgaaggcgtttagcaaggacaaggcggagggcagcgtgttctcgggcctgt

SEQ ID NO: 304193 - DNA, 248 bp, Zea mays
gctcgacgctatcgagaacatgaacggcaaggagctcgacggccgtaacatcaccgttaaccaggcccagtcccgtggcggtggcggtggcggcggtggctacggcggcggcggcggcagctggagccactgatgtatgcgcccatacctggcatcagccgaatcatcttatctatcgctactatcgtgttaacgttcgcttctgtcaccgtgttagtgtcagtactacctatggaatacgtgttagt

SEQ ID NO: 304194 - DNA, 289 bp, Zea mays
atcgagcgtttctgtcaccaaaaaccaataccatgtcagagttgtcacaggatattgaagatgatttctaatatagttcgaagagatataattgttagggacagtaagcaactccaccattttaaggatggaagttgttcgtgtggagatgaaggttttggatgaagttcttgcagaggggaggcaagcttaattatgttgcatatacggatatacccttgtgctattattcatcttgtacacgttcatcctgtaatacaatgccatggcgatacaatgcagcaatact

SEQ ID NO: 304195 - DNA, 271 bp, Zea mays
gtattgcaaagagggcatgagaagaaagcactggaggtgtttgaggagatgtctcagaaaggggtgcgtgcaactgcagtgacctacacgtcattgatatatgttttttccaggaaagggcaagttcaggagacggataggttgtttaacgtggctgtgaagaagggcatcaggcctgacgttgtcatgtacaatgctctgatcaatagccactgcacaggtggtgatatggaaagagcatatgagatcatggcagagatggagagaagag

SEQ ID NO: 304196 - DNA, 280 bp, Zea mays
  unsure (1)..(280): unsure at all n locations
ctcgagccgcttttgctcggaacgcacacaccgcaatcnccgatctccgatcccctcgtcaatccaaagatgcagatcttagtcaagaccatcactggaaagactatcaccctcgaggtggagtcttctgacaccattgacaacgtccaggccaagatccaggacaaaaagggcatcccccggaccagcagcggctcatctttgctggcagcagctcgaggatgggcgcacactggcagatacatcatccagaaggagagcactctccactggtgctcgc

SEQ ID NO: 304197 - DNA, 283 bp, Zea mays
cgtgcacaaacagctattcattaatatgatccctcatcaataccagctgcagttaggagggcgggtctctctctcccattggtggcaaaacccttggtggcgaagtcccatgagctatctctggcttatgatccaacttcactgaccaaacttgagccccctttagttcttcaggaatttgttaaccatggtggcgtcatgtttaaggtgtacattgttggggatgcaataagggttgtacgtcggttttcacttccaaatgttgagaaggtgatctgtcgat

SEQ ID NO: 304198 - DNA, 273 bp, Zea mays
aagcagattctaatggcaaatggtacatttcaagtggcttaaacccgacgtttgacacattcgattgtaagcttcacgagtttcatgtcgagggagacaaattgatcgcgaacatcacatggagagtccgcaccccagactctggcttctttaccaggtcaccgtgcagcgttttgtgcaggacctatcgcagcccggcatactctacaaccatgacaatgagttcctgcactatcaagatgactggtacattatctaatccaaggttgagaa

SEQ ID NO: 304199 - DNA, 276 bp, Zea mays
atcaaggatttcggagtgacgtaccgagaagttccgcttgtagcagatggtggacttgattgcgatgctccttgcttgctccatcaggccggaaactgggtgtgccttcatacagagatcgtgtggatactcgtggcgcaagagcttaagtgcagcagatattcacaaagcataggtttgatcaagatgcaaaatccaaactgcatggtgatggttgataattgctatggtgaatttgttgagatatcggaacctgcaatggtgggagcagacttg

SEQ ID NO: 304200 - DNA, 274 bp, Zea mays
ggcgttcaatactaactatcgggacacaggaatatttggcatttatactattgctccgcctgacaccctgcaagaattgtcacggttaataatggcggagtttagaagacttgcatcccaggtgtcagaaacagaggttgcccgtgcccgcaatcagctgaaacttctctgttacttcacattgatggatccactgcagttactgagaataatggtcgccagatgctaacttatgggcgagtcatgccgttcctagagctttttgcacgcattg

SEQ ID NO: 304201 - DNA, 151 bp, Zea mays
ctctgagcaagactgttcgattcaatgtgctcaaggtcaccaagggtgctggcaccaagaagcagttccagacgttctgcagggggactgtagccaatgctctagaacagataaaagttattttccaacttacacaaaaaaaaacgagaaa

SEQ ID NO: 304202 - DNA, 293 bp, Zea mays
ctcaggttgtcactgactagtatgaaccattataaacccatgtgacagaatattgctgacaattgtcaatttagactagtagaagtaataactttaaaattattcttgctttaagtgttcctttaaaatattgattgcttttcaaagctttccatttatcctttgtcatcctctttgtatatgatgtagattgttgctgtaagaaatgctaataaggtaccaaactcttgtaagtgatgtaaataggaaggtgggtatatcatgttttcaggatactctactacctcagtttt

SEQ ID NO: 304203 - DNA, 269 bp, Zea mays
gtcggaatcggtcgggacgcctgatgccagtcttgcggcgagacatcaccagagatagggttccaagtgcgagggcatcagcgagcaactcctgatccagtccctcggcaaggcgtacgctgccacaccaacaaatctcaagattattgacctctacttgggttttgcggttgccactgcccttattcaggttgcttacatgggattggttgggtcgtttcccttcaactccttcctctcaggagtcctttcatgcataggaactgcag

SEQ ID NO: 304204 - DNA, 315 bp, Zea mays
cggaatcggtcgaggaatcctgatgtggagaaggattgcccaaccattatccactttgttctggccaacatcaacttcagaaagtacaaggccccaggtgttctgagggaaaccaaggaagagaaagaaatagctgactttgacattttcgatgaccccgaatcgccattttcaaccttcaacttccagtatccaaatcaagcattcaaaaggctacatgatctgatgtacttcaacacactgaacaacattgatgtgataaaggatgccattgttgagagcattgaatacagaagacagaacccatctcgttgc

SEQ ID NO: 304205 - DNA, 188 bp, Zea mays
aaaaattttaagtctgatcagatatttacaactgttcattatagtggtgccttacgcaatcttgcgacagtaaattcaggggcccattgctacttatgccatatgtggacatacttctgtgttcttcaattgtgtaaacttcctggaaagctgtcttcactaagtatcccctagtctctatatatatg

SEQ ID NO: 304206 - DNA, 165 bp, Zea mays
ataaaatccaaatgatttctatatatagtcaattgaactgtcaaggtaccttgtgtgtgattctgaatacacagatacaatgtttttattcctcatgctttactttgatggcttctatcatgaaatagatgtgccattttatgaattaaaaaaagagcaaagggg

SEQ ID NO: 304207 - DNA, 284 bp, Zea mays
atctcaaatggccagtgtctcgaagatcctgaaggagctggtacctcagaacctcacacgcctgatggtcctcagatgcattgacaaagagcctccttctggaatgtgacaaacacaagaataagtcagtggccgaggccaaggtggaattcctgaagcggatctaccgatggcctacctttggatctgccttctttgaggtgaagcaaacctctgagcctgactacccagacatcctcctcattgccatcaaccgacatgggttagtgctcatccacgccaag

SEQ ID NO: 304208 - DNA, 197 bp, Zea mays
agcctgtggaatgaattcctcttcccccttgaggccaggactgactctcctggaagaactcaacctatatacagctgtgccaaatgaaggctacctgcctctgagactcccactgctgcttctgtcgttgttcacttgtcagatacaattttattctcaggatgcaaattccaataaagtacaaatctatgttactg

SEQ ID NO: 304209 - DNA, 269 bp, Zea mays
gcatccgcagagagcttgttccgtccaggcaaccaaaaagcaagttcgcccgccgcgcatatgaagaagtgagctagaggacgttgactcgtacgaagcataccgcccgcaagtccacaggatgcaaggcctcccgcaagcagatcgccacgaatgcggcgaggaagtcggcgccgacgaccggcggcgtgaagaagcccacaggtacatgtccgggaccgtggggctgcgctagatccgcaagtaccagaagggcacggagctgctga

SEQ ID NO: 304210 - DNA, 164 bp, Zea mays
caagatccgggagatcgcggacgggctgtgcctggaggtggagggcaagatggtcaattagaacagcaggatggccatcaataattcactcattgagtggaaatgcttacgctgaaggtccggatggcgtaggtaccgaaagcacagtagtcaccggtgttgac

SEQ ID NO: 304211 - DNA, 276 bp, Zea mays
cagctcgagcggctcgagcggctcgagggacagtgttcgtactcatggcgccgccgcagccgaagacgggcctcaccgtgggcatcaacaagggccatgcctcaccaagcgcgagctgactctgcacccgtcccaccgcaaggggaaagcaacgaagagggtgaccatggtcaggggcctgatcagctaggttgctggctttgatccttatgagaagcgtctcaccgagcttctgcaaggttggcaatgacaagcgcggtctgaagcttgccaaga

SEQ ID NO: 304212 - DNA, 285 bp, Zea mays
ctttttaacaagagaactcaagcaattgctgccatgccggggaagccagtccttcacaacttcgatggcagggggagaatggagcccatccggtggctcctggctgcagctggagtagactttgaagaacaatttctgaaaactcgggatgacatggccaggctaaggaatgctaggagtttgatgtgaccagcaagtgcccatggtggagattgatgggatgaagctggtgcagaccagagccattctcaactacattgccaacagatacaacctctatgggaa

SEQ ID NO: 304213 - DNA, 292 bp, Zea mays
tcacaacagattgtaatacggtgatgatttgtgctcctgcgctgtaggtgatggcaagaatgcccatcttaagacactggaagatgccggggagaggttgcagttggtcaaggctgacatgctggactatggcagcgttgcgtccgcggtcgcccgctgtcagggtgtcttccatgtcgcgagccctgtcccctccggcaaatcctccaaccctgaggaagatgtcatagctcctgctgtaactggcacactgaatgtgttgaaagcttgctatgaggccaaagcgaagaga

SEQ ID NO: 304214 - DNA, 303 bp, Zea mays
ctcattttggtcatgaaagatggtaaactagcacaggcaggacaatacaatgaaattcttggttcaggagacgagttcatggagttagttggtgcacacaaggatgctctcgcagaattggacacaataggtgctgcaaacagaagcaacgagggatccccttccagaggtacagcaaaacttaccagatctctatcatcagctgaaaagaaagataaacaggacgaagggaacaatcagagtgggcagctggtgcaggacggagaaagagaacaaggcaagggtgggttttaggtctactgg

SEQ ID NO: 304215 - DNA, 287 bp, Zea mays
cggacctgggcgaatccgtgcgacgcggggctggatctcagtggatcgtggcagcaaggccactctgccacttacatcgtagctactgccgctcagagcaatggagagagcggtgccagttcggaagtcgcacaccaacacggccgaccttctctcctggtcggccacgggccctgacgcatctgcctcgccggccgcgtcgtcccgccccagcctcaagccggccgcggggattatgccggcgatgttcggcgcgccggtcaccgagcaggaggccgaggatctga

SEQ ID NO: 304216 - DNA, 293 bp, Zea mays
ccagtacaccgtcgacatcctcgagcacgctggcatggctgactgtaagccctgcatgactccaatatacacttaaggcaaggcctcctcctccgatggttcccggtggttgatcccactagctaccatagtcttgccggggcgctgcggtacctcgtcttcacacggcttgacatcgcctacgccgtctagcatgtgtgcctccatatgcatgcccagcgggagcctcatctcactgctatgaagcggatcctgtggtacctctagggctctaccgactttggcctccttcg

SEQ ID NO: 304217 - DNA, 283 bp, Zea mays
gaaagctattgtatggacacgggaggagctgggtgcaaaatttgaatacaaagacatacctgctgatctccaagagatggctcaagactatcgtgttcaaatgctggaaactattattgaattggatgatgaagttatggagaaatatcttgaaggaactgaaccagacgaggaaactgttaagaaactaatcagaaagggaacaatttctgccagctttgtaccagttttatgtggttcagcattcaaaaacaagggtgtccaaccattgcttgatgctgtt

SEQ ID NO: 304218 - DNA, 237 bp, Zea mays
cccacgcgtccgaagaagaccaagcgcacagcgccgaagtccgacgatgtttatctcaagctccttgtcaagctctaccgtttcttggtcaggaggaccaagagcaacttcaatgctgtcattctcaagaggctcttcatgagcaaaaccaatcgcccaccaatctccatgcggcggcttgtcaagttcatggaaggaaaggagaagaacattgctgtgattgttggcacagtcaca

SEQ ID NO: 304219 - DNA, 308 bp, Zea mays
cccacgcgtccgattctgtccagcttacacaagcaacgcgcccactcaggaggttgcacattgaaaatttgcctgattcagctacagaggataagttgattgactggcttgaatgacttcttattgtctactggcagtaaactccagcggtctaaaccatgcctcagttgtacgataaacagagaaaaacgtcaggcctttgtggaatttcttacaccagaggatgctacagcagctatttcttttgatggaaggtctctagatggatctgtgttgagaattcgacgccccaaagaatatgttgaaac

SEQ ID NO: 304220 - DNA, 312 bp, Zea mays
gcaaagaaaaatagaacacttcgcacaacttctttgttggaagaaggtatctgagaaggatggtatcgccatatggacaaagaggttaaatgacaagtcttgctccatgaaacaagataatccaaatggtggtaaatgtgatttgacaagcgacagtgatgtgtggtacaagaagatggaagtttgtatgacccccctacccgaggttaatagtgtagatgaggatgccggtggtcaactagagccttttcccaagaggctttatgcagtacctcctcgtataaccgatggctctgtgcctggtttctcagt

SEQ ID NO: 304221 - DNA, 285 bp, Zea mays
gggccttgtcccgctcgccggctccaacaacgagtcgtggtgccagggcctggacggcctggcgtcccgcgaggccgcctactaccagcagggcgcgcggttcgccaagtggcgcaccgtcgtcagcatccctaacggcccctccgagctcgccgtcaaggaggccgcgtgggggctcgcacgctacgccgacatctcacaggttggttggtttggtttctactcctgccattattattggctgcaacctgcatgccatgaccttcatgcatgcaggacaacggg

SEQ ID NO: 304222 - DNA, 279 bp, Zea mays
cgctgtcgtcactcctcgtcacccagccacgaacagaggcaccacccagcatggccctgcaggcggcgctcctcccatccaccctctcatccgtccccaagaagtgcagcctcgccgtcgcggcgaaggacacggcattccttagcgtatcccacggcgcggacgccgacgttcacggcggacgggtacgagatgagcgtcggcgtcaaccacctgggccacttcctcctggcgcgcctgctcctggacgacatgcagaagtccgactacacgtcccgc

SEQ ID NO: 304223 - DNA, 282 bp, Zea mays
gctcgccggagcccagtgccgtgagcccagttcgacgccgcggacgccggcgcggagaacttcaacaccagctaggccgccgtgtactgggggccctggcagaatgcccgggccaccttgtacggccagcccaacggggccggcccggacgacaactgtggtgcgtgcggctttcaagcacacaaccagtacccttcatgtacagggctcttgcggaaacagccatgttcaagacgcaagggatcggctctgctcaagattggtgcaggaagaccgtctgct

SEQ ID NO: 304224 - DNA, 297 bp, Zea mays
actaaacatattttctgctattagttatcagattaaattataaattgcaccagaatgtttgcaagtaccctgtttttcatgcaaattacggaaacctatgatgcgcaggttatctgaatgatccagaggcgacaaagaacaccattgataaggacggatggctgcacaccggggacattggttatgtggacgatgacgacgagatcttcatcgttgacaggctgaaggagataatcaaatacaagggcttccaagtacctcctgcggagcttgaagcccttctcatcacacatcctg

SEQ ID NO: 304225 - DNA, 290 bp, Zea mays
caagcttccgtctctttctctctgcgagactgcacactgccaccacgcgcaatggcggcattccaccatttgttgccggccttgctccttctactcctgctcccttccacccctgaggcgacgtcctcggcgctgcttggcatcagctacggccgcgttggcaacaacctccctgcagctacatcagtgccgcagattgtggcttccctgggcgtcggccgcgtccgactctacgatgctgacagcaccaccattcgcgccttcgccaacacgggcgtcgagctcgtcgt

SEQ ID NO: 304226 - DNA, 243 bp, Zea mays
cggaccgtgggatcacctggaacgggatccagcaccggaagaactgctggcaggacggggtgctcggcaccaactgccccatcccgcccggctggaactatacgtacgagttccaggtcaaggaccagatcggcagcttcttctagttcccctccaccggcctgcagcgctccgccggctggttcggcggcatcgtcgtcaacaaccgcgacgtcatcgccgtgcccttcgcccgccccgacg

SEQ ID NO: 304227 - DNA, 137 bp, Zea mays
cgcgcactgcttcaagtgcacgcatcccagctgcctggtgaagaagaaggttgagcgctcgcgcgatgggcacgtcacggagatcatctacaagggcacgcgcaaccacccgatgcccacgcagagccgccggccag

SEQ ID NO: 304228 - DNA, 292 bp, Zea mays
atttcttcattgttcgactgtgatgcactctcctgttttacttgctacacgtgctgattttgatgatctctatgaagctcatatgccctgttatgcacttgtatgctcgcgaatgcttgttccgcttgatgatgcaccgtctttggatataccccctgctgttgttaaccttttgcaggagtatgctgatgtttatcctacggacttaccaccgggtcttcctcccctccgtggcattgagcatcagatcgatctcatccccggcgcttcccttccgaaccgcgccccgtac

SEQ ID NO: 304229 - DNA, 291 bp, Zea mays
cacacgcgtccgaccacgcgtccgcacacgcgtccgcgacgcgtggtgaaacttgagatgttgactgctatagcaaatgaaagcaacacatatgagattgtcactgaactatgtgaatatgctggaaatgttgatgtaccaattgcaagagagtctatccgggcagttggaaaaatagcactgcagcagtatgatgttaatgccattgtggacaggcttctacaatttcttgaaatggataaggattatgtgactgctgaaactctagtcttggtgaaagatcttctcaga

SEQ ID NO: 304230 - DNA, 295 bp, Zea mays
gttcacggcgtgcataaataaagtggatcaacgtggctgggttccactagtcatcgcaataaccttcttcgtcatcatgcacgtgtggcatttctgcactgtgaagcgctacgaatttgacatgcacagcaaggtctccatggcgtggattctggggctagggccgagccttggccttgtcagggtcgctgggataggcttcgtgtacacagagctggcgagttgcgtcgcgcacatcttctcccatttcgtcaccaacctccctgccatccactcggtggttgtctttgtctgc

SEQ ID NO: 304231 - DNA, 307 bp, Zea mays
ggaggcgctgtttaacgatggccgggttcagaccgcaagcagggtcatgaagagtatgattgacaagggagttactgagaacatggatgtggcaccaagatactggaagctctattcacgaggggccatgtcgaggaggcaatcggccgtgtcaatctgatggtggaaaatggctgcatgcctgatctggataagttgctggtcggcctatgtgacaatggtagagtgatggaggcgcagaagctggctgattttgcgttggacagggactttgatgttagcttctcgacctatgacagagttctgg

SEQ ID NO: 304232 - DNA, 300 bp, Zea mays
cgacgagaagcgcgagttcaccaccgtcatgaagaagccgctgcgcccgcgtctcgtgccaaggagttgatcggacatcagacttcaatagtgaactttttggacaaattaataaaatagacgatctagcagctcgtctaatagcagatcatggagttactaaaaccagctctttaccgagcacagaactttgccgagggcggtactcggcaaagtctgctttgccgagtgcccgataaaaagcactcggcaaaggcgtggattccgatagtaacttgttttctacattatttttacttt

SEQ ID NO: 304233 - DNA, 313 bp, Zea mays
agctccacgagcccgccgccaggagcggctccctcatcatctccgcctgcgggttcgactctgtccccgccgagctcggcttcctgttccactccaggcagtgggagcccccgtccgcgccggccaccgtggaggcgtacgtgagccttcagtcgaccaagaggatcgtcggtaacatcggcacctacgagtcagctgtgctcggagtggccaacgctggccagctgcaggcgctgcgccggtccagacccaggcgaccccggcccaatattccaggccctccacctcccaaagggtcgctgattgaaggtca

SEQ ID NO: 304234 - DNA, 314 bp, Zea mays
cccacgcgtccgaagacatcgtgccattctacctcgagcacagtcctcgcatcttcccatgcagaactgggattttggcctgatcatcaccttaactgtttgtaggatcttgaagaaccagcccaaaatcctacaaacagttaaggtgatgatcaggccaaaatatgacgggaagtacctgcacaaagtgaccagtgatctgctgggtggtaccagagtggaagagacgctgacaaatgtcgtcattcctactttcgatgtcaagtgcgtaaagccaacaatattcagcacattcaaggcaagatctagtgcct

SEQ ID NO: 304235 - DNA, 193 bp, Zea mays
gtcgtagtactgactcgacgtgatgagggaaagcgtggtacgccgtgcaggtgaccggtccggtaattgcccggggtgcgacccgacgctgtccgagcggacgcgtggggcccacgcgtccgcccacgcgtccgcccacgcgtccgccgccgtgcaggagcggagtctgcgccggttctctgtccggcgtccg

SEQ ID NO: 304236 - DNA, 263 bp, Zea mays
gcagctagcgcgctcctcgagcccagcagagaaaggccggcctacccagtctgtgtctgtgtgtgtgcagtgtccaccggcagcgctaatcgtaatagccatggggtccaccgccggctacgtggccgcggtggtggacgaggaggcgtgcatgtacgcgatgcaggtggcgtcgtcgtccatcctgggcatgacgctgaataacgccatcgagctgggcgtggtggaggtggtgcagaatgaggccggcagcggcaaggcgg

SEQ ID NO: 304237 - DNA, 260 bp, Zea mays
atcagctcatccgctccttgtgtgttagtgcactcgaagctgggacactcagtacaggctatacaatcgagtgggtgatgtctctcttgctaaacaaccctcacatcatgaagaaagctcgcgacgaaattgacgcatgcgtcggggaacccaaacgcctactggacgcgactgatgtcccaaagctgccgtaccttcgatgcattatcctggagacgcttcggctgtaccctgtggtaccccttctagttcctcgtgaa

SEQ ID NO: 304238 - DNA, 315 bp, Zea mays
cgcaatttttggaacctagcggccatctttatattgtatgaaacatacactaaatcattcagtcttttgtgctctagcctgttccttttcttggtatgcatctacaagttgcaaacaacaataaataaaggagtaacaactacaaattgcatagtgtaatatgatcatgttagttaacttacaaattcaaacttgctccaatttcgctcacaaccggatgatgaagcacaaagactaacaattcgtcttgcaaacttatataactcaatccttcttccttcagcaaattaagatggtagatttggattaatcagg

SEQ ID NO: 304239 - DNA, 265 bp, Zea mays
cggacgcgtgggtgcaatctttgcgcgttgctcaatgacgttcctggagagtacttttgtggtcttgatgctagtggcagaaggtacgatactgatcaaagacctgtactctctaagggaactgtagagtttgttgctccaacagaatatatggtgcggccaccgatgccgccttcctatttctttattattgatgtgtctgtatcctcagtacagagtggattgcttgaggttgttgcaaagaccatcaaatcatgccttgatg

SEQ ID NO: 304240 - DNA, 283 bp, Zea mays
gttcttggcacagaagataatctcccagcgaaaaaatgggtatcccttgtcaggaggacactgaataagaatcctggttcatgctgttatggtggctatcgcacgccatctcctgtccctgatacagttgtagaacaagatgctgattttgagggatcgtcgagaaggctggacggtttatcctatttgtatcgtcggtcgttcacacttagccggagtttaagaagtgaagggaatcatatgctgtcacaccaaaggttggatcgtaggttcagtgtctgtg

SEQ ID NO: 304241 - DNA, 279 bp, Zea mays
cccacgggtccgcccacgcgtccggccacgcgttcgattcggaaatcggaagtcacattgggctgggtcgggcaatccgacaacccttatataaagtcccgaaccctagaggaaagcaccttccctccgcaaatcgcggtcctgccttctgcggcttcaatttcggcttctgtccctttgcaagttcaatctcacctccaacaatgggtaaagagaagtcccacatcaacattgtggtaatgggccacgttgactctggcaaagtcgacacaacaggac

SEQ ID NO: 304242 - DNA, 177 bp, Zea mays
cccacgcgtccgggaccaggtcggcagcttcttctacttcccctccacgccgctgcaccgcgccgccgggggctacggcggcatcaccatcaacaaccgcgacgtctataccatcccctttgcctttcccgacggggacatcacgctctttatcggtgactggtataaccgtgggca

SEQ ID NO: 304243 - DNA, 324 bp, Zea mays
ctcaatccatgtggattgggtgggattgagtgggtttcaatcccaaataagtcaaaatctttgataattttttccaatctcatccaatccacatgggataggaataaccgaacaaagtcttactgaggtatgaatttctgctcgtgagataattttgtaatgagacaaatataggctgtttgcctgcagaatccaggtgcttcggctatgaaccatagtgcaattggagaacagcatcagccccctaagccagcaaaggtctcagcaacgcctccagctccctcagctgagcgcccttacgtctgcccctacgatggttgcgac

SEQ ID NO: 304244 - DNA, 180 bp, Zea mays
gcgcgggctcctcctcgccgtagatgtggcggagcgtggacgaaagagatagctattgtcagtcacagtggtttcttgtttcacaccttaagcatgtacagcaaggagtgccatccaaccataagagacgaagttagcaagcactttgcaaactgcgagctacggtcgatggtgttggtt

SEQ ID NO: 304245 - DNA, 317 bp, Zea mays
ctagttctagatcgcggccgctcgcgatctaagaactagcccacgcgtccgcccacgcgtccggtctccttcctcctgatgcccttggcctccctagccctgacgcaggacttctgcgtcgccgacctgacctgcagcgacacgacctcggggtacccgtgcaagtccagcgtcaccgccaacgacttctacttccacggcctggccggccagggcaaaataaacccactcatcaaggccgccgtgaccccggccttcgtgggccagttcccgggcgtcaacgggcttggcatctctgcggccaggctcgacatcga

SEQ ID NO: 304246 - DNA, 320 bp, Zea mays
atttctttcattctctccagccgaaacatctggccggtggcgtttctctttgccgcacagccgccctatggcatgctgttgtccttcgctccctcgtttgtttttggttctagcatctacagtcgaccatcttttctcggtagttggcaaccgaagcttcatcaagcagagagtatcatatctacttcacgatgaacaacctcgctttagctgggatcataactagtggcattgtcatcatcctggtcatgaaatttgtcaccagatggatcgaggtgacacgagaatggcagatggagcgcgcgcggctgcaggccttg

SEQ ID NO: 304247 - DNA, 232 bp, Zea mays
ggcgacgtgggcaagggcttccgctgcatccgcatggtgaacaacatccgcctcaacttcgacgccttccacggctacaagggctaaggtcgccttcaagactgcaccagcgttgtgctgtcggagttggccaacggagacaaccagagcttgaaaatccttccctggggcgacgaagcctacgccgcgggatgcagcagcgccggcaacgggccccggtttcgcggccgcg

SEQ ID NO: 304248 - DNA, 279 bp, Zea mays
cacagaagcggcggcggcggagcaaacgcaggcgaaggcgagggtgtgagggaaggagcaccagccatggtgcacgtcaacttctaccgcaactatggtaagacgttcaagaaaccaaggcgtccttatgagaaggagcgtcttgatgctgaactgaagctggttggtgagtatgggctgaggtgcaagcgtgagctttggagggtccagtatgcactgagcaggatccgtaatgctgcaaggcacttgctcacccttgacgagaagaaccccgtcgta

SEQ ID NO: 304249 - DNA, 282 bp, Zea mays
ctttccacgcagcaggccgctgagctcccagtccggagagacatggactcggaacccgatgtcgagcatcggggccttgacatcgacgtagaacttgacccggaggaccttcagccgtcggtgcccctcaaaaaggtccccggcagcgacctcttcgaggcggcgcgggccggggattgcgaccgcctcgcactcctcctcgacgcaggcgccaacgtcaacgcgcgtgaccgttgggactccgtcgcgctctattacgcctgcatggcgggacacgccgag

SEQ ID NO: 304250 - DNA, 271 bp, Zea mays
ggaagaggctggaatcgatggtggtggaattttcaaggatttcatggaaaatattactcgagccgcttttgatgtgcagtacagtctcttcaaggagacggctgatcatcctttgtacccaaacccaggatcaggattggttcatgaactacatctgcaatatttcaattttcttggaagtctacttgggaaggcaatgtatgaaggcatacttgttgacttgccatttgcaacgttcttcttgagcaaggtgaaacaaaaatacaatttt

SEQ ID NO: 304251 - DNA, 267 bp, Zea mays
gctgcctccgcctctcgagtctcgtccacccgtcatcctcctagctcctctactcgccagtcgccatgggcaagattaagatcggaatcaacggcttcggaaggatcggcaggctcgtggccagggtcgccctccagagcgaggatgtcgagctcgtcgccgtcaacgaccccttcatcaccacggactacatgacctacatgttcaagtacgacaccgtccacggccactggaagcacagcgacatcacactcaaggactccaaga

SEQ ID NO: 304252 - DNA, 320 bp, Zea mays
gtttatcttaaaacacattaattcttgggttacagacatctattgtcataaggttataagattgtctgcagcaactcaggatgttccaaggtctgtgatttgtaatgttcatggagttaaccccaaatttattgagattggcaaattgaaacatcagcagctatgccaaagagagcaagcattcttcaagggtgcatattatatcggaaagatggtatggagtaaaggttacacagagcttcttcagcttcttcataagcaccagatggaattgtctgggcttaaaatggagttgtatggcagtgcggaagatgctgatg

SEQ ID NO: 304253 - DNA, 303 bp, Zea mays
ccctgtgggcactgctgcatttcttggaacaacaaagggcttccgtgttggtttgaacttggctcttgctatagcactacactacattccagagggtatttcagtagctctcccagcatactttgccactagcagcaaatggcaagccttcaaattagcaactctatctggttttgcagagccactgggtgtgattattgtggcatacctattcccaagcaatttgaaccctgaaatactggaaggtctacttggattagtgggaggagtcatggcttttctaacattgtatgaaatgctacc

SEQ ID NO: 304254 - DNA, 303 bp, Zea mays
cccacgcgtccgcagccatctatggcggcgtcgctgctcctccgcgctgtgcgccgaagggagctcgcgtcccctctcggatccctgggtgccaacttacagtcaacatgtgctgccaacatatgctctgtcttatggaatgaacaacaaggaaggcttgatagcggtatttgatcttggaggaggaacttttgatatctctatcctggagatctcaaatggagtttttgaggtgaaagcaacaaatggtgatactttcttgggtggtgaagattttgataacacgctactagagttcttggt

SEQ ID NO: 304255 - DNA, 304 bp, Zea mays
gatccccgtgcggcggtacgcggagcggatataccggtacgccgggtgcagcccggcctgctacgtcgtcgcctacgtctacctcgaccgcctcgcgcggggccaatgcgacgccggcgccggcgaggacgaggacgaggacgaggcggcggttgtcggcatcgactcgtacaccgtccaccgcctcctcatcacctccgtcttggtcgccgccaagttcatggacgacaggcaccacaacaacgcctacttcgcgcgggtgggcggcgtggaggtggcggagatgaacgcgctggagctgcgc

SEQ ID NO: 304256 - DNA, 318 bp, Zea mays
gggatttaatcatggctgcatcttgtgagttctcacatgacctctccaatgtatctagtgagagctgcttcctggagttctctgtaaaggttctgcaggtaactgaaccattagaagatagaatggagaaagccttgttcagtcctccattatctaaacaaagagtcgaatttgctgtacggcacatcaacgagctgcatgctaccacacttgttgattttggctgtggatctggtagccttcttgattcgttgttagagcatccaaccacgctggaaaagcttgttggcgttgatatttctcgaaaaggcctcacac

SEQ ID NO: 304257 - DNA, 314 bp, Zea mays
  unsure (1)..(314): unsure at all n locations
ctcgcatttcttcccatccgatccccccttcgcaaccaaaaccccaactcgccccgcatcgatggcgcccaaggccgagaagaaacccgcggcgaagaagccggcggaggaggagcccgcggccgagaaggcgcccgccgggaagaagccgaagganatgaagcgggtccccgctggcaagtccgctgccaaggaaggcggcgagggcaagaggggcaagaagaagggcaagaagagcgtggagacctacaagatctacatcttcaaggtgctgaagcaggtgcacccggacattggcatctcctccaaggcca

SEQ ID NO: 304258 - DNA, 298 bp, Zea mays
ccggagtgctggatatccgcccgctgctcctcagtcgaccctccgctcccgcccatgcctcgacccaagcccgccgctgccggtggcggctggctttcagggtgggggtgggacctcatgctcggatcgattgccgcgttctacgccgtcatggcgccctacaccaaggtggaggagagcttcaacgtgcaggccatacatgatattctttatcacacttatcacatcgagaagtatgatcatttggaatttcgtggagttgttcctcgaacgtttataggagcatttgttatctcta

SEQ ID NO: 304259 - DNA, 299 bp, Zea mays
ctggaattatctccctggtttgtctcccattctcttgcctttgcaaacggtgcctccattcagacagtctatcttcagaacacaaaatgtgtgaagaaggcatgtttttctgcagcttatgcgaagcagaggttttgaagaacagtaagcattgtagagtatgtgacaaatgtgttgatggctttgaccatcactgcaggtggcttaacaattgcatagggaaaaggaactacaaaggtttctttgttctaatggcttctgcagttatcctgcttgtgatgcagtggttgtcgggggga

SEQ ID NO: 304260 - DNA, 291 bp, Zea mays
tcctcggtgtcgttacccccaccatggccatcgtgctgctggcccttctcctcttcccgtccgcctatgcccaaccatggtcagtttgcggcaacacgggcaactacacggcggccagcacctaccaggacaacctcagccagctcgcggcaagccttcccaagaaagcctcttcgaacacgagtcccctcttcgccacgggtaccgcgggtgcagtgccggacctggtgtacgctcttgcactctgccgtggggacatcaacgcctccgcctgcaaggactgcgtcacca

SEQ ID NO: 304261 - DNA, 292 bp, Zea mays
cggacgcgtggggaaaatgggcatgtcaaggccacaatcaacaacattgatggggcaataatggggttgaaagattctactactggaaaagtcgagccgcaggatgctgctccccaaattgatatccctgttctatccttggatgaactgatagaaaaaactgatgactttggttcaacggctttgataggtgaaggttcttatgggagagtgtactatgcgattcttgataatggaacaaaaatggcagtaaagaaacttgattctactgaaaatgaacccactgctgaat

SEQ ID NO: 304262 - DNA, 293 bp, Zea mays
gacaatacaaggcttctcgatgccacaaagaaattcatccagaggcagcctaaggtattaggtgaagaacctggatctatgttggggcgtgacttagaagctctgatacaaagagcaagggactttaagaaagagtatggtgattcatatgtctcagttgaacatctagtctttggctttgccgaagataagcggtttgggacacagctgttcaaggattttcagattactgtgaagaccttgaaatcagccattgaatcgatcagagggaagcaaaatgtaattgatcaaga

SEQ ID NO: 304263 - DNA, 283 bp, Zea mays
aatggggacgctctgtttatgtcaacatccaaaagtttgtgcagttccagctgactgttaatgttgtcgcacttctggttaacttctcttcagcgtgctttacaggagatgctccactgaccgctgttcaacttctttgggttaacatgatcatggataccctaggagcgcttgctcttgcaactgaaccacctgatgacaacttaatgaagaaatcaccagtcggaaggacagggaggttcatcacgaacgtgatgtggaggaatattgtggggcagtcaat

SEQ ID NO: 304264 - DNA, 278 bp, Zea mays
ggaaacagttgccggattaagtcctgatgatgattcagagccttggactatactcgtgcataagaaaccacaagccagctggattccatacaaccctaggactatgaggcctccacctctaagcaaggatacacgggctctgaagattatgtcatggaatgtcaatggattgaaagcattgctcaaatcaagaggcttctctgtgcagcagttagcacagagggaggactttgatgtgctttgcctccaagaaacaaaaatgcaggagaaggatattg

SEQ ID NO: 304265 - DNA, 317 bp, Zea mays
gtcctgctggacgaggagtttagagcgaaactttcagatttcggattggcaagggaagggccatcagctggtgatacccacgtctctacagcagttatggggaccttgggctatgcagctccagattatgtcgagacaggccatctcactacaaaaagtgatgtgtggagctttggagtagttctatatgagatcctcactggacgtcgctcaatagagaggaaccggcccaagaacgagcagaaacttctggaatgggtcaggctgtatcccgttgaaagcaagcagttcagcaagattatagatgcaaggcttga

SEQ ID NO: 304266 - DNA, 313 bp, Zea mays
atcccgtcgcatcccatcccactaccacccatctcgtcgtccgccgattcgatccggttcttccaacccaggggctgtgatggcgacgaagaggagcgtgggcaccctcggcgaggcggatctgaaggggaagaaggtgttcgtgcgcgccgacctcaacgtccctctcgacgacgcccagaagatcaccgacgacacccgcatccgcgcctccgtccccaccatcaagttcctcctcgagaagggcgccaaggtcatcctcgccagccacctgggtcgtccaaaaggtgtcaccccaaagtacagcttgaag

SEQ ID NO: 304267 - DNA, 315 bp, Zea mays
gccacagacacagatgggaaagaacgtgaggtagagattggacagaagcaagagcggtgctgctgttgcgctcaagggcttgcagtttgtgactgcgaaagttggtcatgatggctgggctgcagtggagaaacggttcaaccagctacaagttgatggcgtgctgctacgctcgagattcgggaaatgcattgggatggatggatctgatgagtttgcaatgcaagtcttcgattcattagcaaggaagagagggataacgaagcaggtgctgactaaggatgagctgaaagatttctgggaccaactaagtga

SEQ ID NO: 304268 - DNA, 315 bp, Zea mays
cggacggtgggggtagttgttctggatgatgatttgattgtccagaaggacttgtcacctctatggaacctcgatatgggtggtaaagtgattggagcagtccagttctgtggagtgagattagggcagctgaaaccttatatagcagaccataacgtcgatgatgattcatgtgtgtggttgtcgggcctgaatgtcattgaattggataaatggagggacactggcattaccagtttgcatgatcaatcagtccagaagttgcgaaaggacagcctgaaatctcagcgactgcaagcactccctgcaggtcta

SEQ ID NO: 304269 - DNA, 314 bp, Zea mays
aacatattgaagttccgcaaaaagaattggcagtttgacatcattggcggttttatatacttcattttggtgttttcaatgttcccacaggttagttacagattctcaaaatggacattttattttaaagtttatcctttgtcgcacgtttaaaatagtagtaactgtggaggttagttactaataataatcttgagcctcagttttcctcttttcttattttttttctgaaatcaatacccggaagcattggaagactctgactctctgccacctttagcaaatttattcccagatttgtaaactaagtatta

SEQ ID NO: 304270 - DNA, 281 bp, Zea mays
cggacgcgtggggtaaagttcacaaattctaagctgaaaaatctaagtgatcaataccaggcattgtttggtgagtacacaagttgtcagaaaaaggtggttggtgatgtagtgagggtttcaggcacattctcagaggtatttgaaaattttgctgcagttctgtcggagttggatgttttacaaagttttgctgatttggcaactagttgcccagttccttatgttaggccagacatcactgcgtcggatgaaggagatattgttctactgggtagcag

SEQ ID NO: 304271 - DNA, 274 bp, Zea mays
cccacgcgtccgcataactctccagtgctcaaagatgtctctgtaaacaaaccagataaccttgcttcagcatcaaacaacattcatcccaagcttgtgatcctccacatgaacatggccctctatgtatatgatgatataatgaggatgactgacaacttgagcgaaaaatacattattggttatggagcctcaagtacagtctacagatgcgacctgaagaactgcaagccaattgcgattaaaaagctgtatgctcactaccctcagagct

SEQ ID NO: 304272 - DNA, 326 bp, Zea mays
ctccccttgctggccaaatcgatcgctccccttcaggctccaggctccggagcttgctttacttcagattgcatctttagcgattcgaagtggcaatggtcttctcttgaaaggtggaaaagaagccatgagatcaaacaaagtatcgcataaggttataactggtgccattcctagcaacgtgggtgaaaaattattggccttgttacaagtagagacgaaattgctgatttactaaagcttcatgatgtaattgatcttgtcattccaagaggtagcaataagctggtttcacaaatcaaggcatcaactaagatccctgttct

SEQ ID NO: 304273 - DNA, 303 bp, Zea mays
cggtgtgattacgagcatagctgggaggaagagcatgctgaagctggcagagaggatggtggcgagcttctgcggtggcgtgaccgcgtctgcggcgcatcagtggacgacgctgtcggggagcggacggcaggacgtccgcgttatgaccaggaagagcgtggacgacccaggcaggccgccgggcatcgtcctcaacgctgccacctccttctggctgcctgtcccgcccaagagggtcttcgacttcctccgcgacgagacctctcgcagcgagtgggacatcctctccaacggtggcgc

SEQ ID NO: 304274 - DNA, 238 bp, Zea mays
gctcttgagcctgagagtccatctcaccgtgtgctgctttctaatctatatgctttgtctggtaaaatgaaccatgttgagaaggtgagggatacaatgatcaagagaaggttgaagaagccaataggatatagcttgattgagattgctggtgttgctcatttgtttcgcatgggtgagaagtctcatcccaaaacttcagagatttaccaatatttggagaaactgatccaaaaga

SEQ ID NO: 304275 - DNA, 286 bp, Zea mays
ccgtgctccgcaaccgctgagtgagtagaagagatggccggcaaaggcgatggccggctatcggcatcgatttcggcacgacgtactcttgcgtcggggtgttgcagcacgaccgcgtcgagatcattgcccaacgacaggggaaccgcaccacgccctcgtaacgtcgctttcacggctccgagcggctcatcggagatgcggccaagaaccaggtcgccaatgaacccatcaacacggtctttgatgcaagcgtctcatcggcaggaagttcagtgatgcgtct

SEQ ID NO: 304276 - DNA, 298 bp, Zea mays
gatagtttgttacttttgagtagatatttgcctatcccttccgatgcccaataccagcagcattgcttgcattatgttggtattgggcatcggaagggataggcaaaaaggatatggttgtgcttccttataaggatagtttgttacttttgagtagatatttgcaacaacttgtcatgggatctcttggaaaagaattcgacctggatggcaaccgtgttaaacaagggctaactgtatatggtaacaaaggaagcactgaccagcatgcttacattcagcagctgagagaaggtgt

SEQ ID NO: 304277 - DNA, 285 bp, Zea mays
ccgtcatcgatctcgtttcaaatccatccatcctcgtttcctccgtcccgcagcatctcaaccccatggccaagatcaagatcgggatcaatgggttcggcaagatcggaaggctggtggcccagggtggccctgcagagtgacgatgtcgagctcgtcgccgtgaacgaccccttcatcagcaccgactacatgacctacatgttcaagtacgacactgtgcacggacaatggaagcacccatgaagtcaaggtgaagactcaaaaaccctctcctttgtgaga

SEQ ID NO: 304278 - DNA, 274 bp, Zea mays
ccgtccactcatctttctcgttaaactctaaatttccccatcgcatcgacagcactgtacagcatggacgcacggaccggtagcaaggggaagaagggggcggccgggcgcaaggcaggcggccccaggaagaagtcggtgacgcggtccgtcaaggccgggctgcagttccccgtcggccggatcgggcgctacctcaagaagggccggtacgcgcagtcgtgggcactggcgcccccgtctacctcgccggcgttctggagtagctcgccgc

SEQ ID NO: 304279 - DNA, 121 bp, Zea mays
ggaaacagtatcttcatggtggaggagtgctctactatggcgagcctttttcacaacagcaatggtcgctgttgtgcttagggcattgatagacttctgtcaaagtggcaagtgtggtttg

SEQ ID NO: 304280 - DNA, 314 bp, Zea mays
cccacgcgtccgcccacgcgtccggtctgtgttcaaagttacacacaggattttaacatctgagagggattggactacagttccagtagtggtacagttgatgatatttgagatgggaaatgtttcagcaccatggagtacgtcaggaactgtggcctaaggtgtctcgtgtactaaattcaattaaaagtgacatgcaaaataagaaccaagagttgatgaagcaaattgaaatttgccaggaggaaaataagatcttggataggctgcaccgccaaaaagttgcggaagtggaaaagctgagtcaaactgtg

SEQ ID NO: 304281 - DNA, 253 bp, Zea mays
ggcatggaaagagatggagaacctcactgcccgactttgctgggagtttgtgaagaaagagggatacatcgctatgtggaggaaacccttaaataactcttgctacattaaccgaggtcctgaaggaaaacctccactttgtgatgctgatgataacccggatgatgtctggtatgttggtctgaaagcatgtattagtcggcttccagagaatggcgaacgaccaactcctgttcaatggcctgcacgctta

SEQ ID NO: 304282 - DNA, 280 bp, Zea mays
atcagcccacgcgtccgcggtacgcgtgggcttactggttatcggagcaaaccattggaaggaaaacaaacttcaaccagattcttgaatatgtcaaggaaataaggggtatgagcatgcaggtctgttgcacactacggcatgatagagaaacaacaagctgaagaactcaagaaggctggacttacagcatataatcataacctagatacatcaagagagtattaccccaacattattaccacacgatcatatgatgataggctgcagactcttcagc

SEQ ID NO: 304283 - DNA, 269 bp, Zea mays
cggacgcgtggtgtcgaggagggtaaacactatctggatataatggtgagcaagtacaggttaaaaccatggcaggagcactatgcctgtgtggttgatatcctacagacgctcaggccagacggaggaggcttacgagttcatcaagactatgcctatggacccaaaatcagctgtgtggtgtgcgctgctcggcgcatgccgtgtccacaggaactatggcctcgccgtggttgcagccaataagcttctcgagctggaacctgaca

SEQ ID NO: 304284 - DNA, 131 bp, Zea mays
cggacgcgtgggtgaagttggaaggctaaatgtcgtcggtggtgctgagattggtccccatagatgttggccaggtggtttatgcctctcaagatcgattggatgtcaggatgtaggtgaatttattattc

SEQ ID NO: 304285 - DNA, 307 bp, Zea mays
gtacttgtcagtgattgctatactgacactctttctggatgtcatgtcgagcagagggtgttcaaagatctcctggctaagaagtgtccaaggattgctgctcaccttgaagcaatggggtttgatgtttcacttgttgctacagaatggtttttgtgcctcttctcaaagagcctgccttcagagacaacacttcgggtatgggatatattattcaatgaaggagccaatgttttgttccgtgttgctctcgcaattttcaagatgcgagaagatgatctactgcgcatccaacatatcggtgatg

SEQ ID NO: 304286 - DNA, 284 bp, Zea mays
  unsure (1)..(284): unsure at all n locations
cccacgagagccgncanacgtcgtccgcgagacgcgtgggcagaccgtggcgcaaatgattacagatgaggaaaagtctgttttccgtacgattggtttacggcttaagcgatatttgccacttggagttcgtggtgtttttgatggtgtaattgaaaatatgcacttgcattggaagcacagggaagttgttaaactaatttcaaagcagaagaccttgtcattcgttgaagagacggcacggcttcttgcatatgagagtggtggtatactagttgcaattg

SEQ ID NO: 304287 - DNA, 278 bp, Zea mays
aaatcgtaagctctataatcaagtacaagatcttaaaggtagcattagagtttactgcagagtgaaacctttcccaaaggcacaatctgatcaaaggtctactgttgatcatattggggaaaacggagaaatcctgattgcgaatcctcaaaagcaagggaaggatggacggaaaatattcacattcaacaaaatatttggacctagtacttcacaatctgaagtttttgctgatacccaaccattaattagatctgtcaaggatggatataatgtat

SEQ ID NO: 304288 - DNA, 272 bp, Zea mays
ggttcaacccagagttccgggggtcaccgaggaggcagatggtcaccatcttctggttcagcttctctacgatgttcttcgcgcacagagagaacaccgtgagcactcttggccgcttcgtcctcatcatctggctcttcgtggtgctcatcatcaactccagctacacggccagcctgacgtccatcctgacggtgcagcagctgtccacgggcatccagggcctggacagtctcctctccagcaacgaccccatcggctaccaggtcggc

SEQ ID NO: 304289 - DNA, 298 bp, Zea mays
cccacgcgtccgctgtctatgggccatgggggcgtccggacatggcgtacttcttcttcaccaaggacatccttgctggtcggccaattacgatctacgagagtgccggtggaggttcacaccagactaccatttcccgggatttcacctacgttgatgacattgtgaaggggtgtgtagcggcactggatacagcaggtcggagcacaggcagtggaggcaagaagcgaggtacagcaccgttcaggacatacaatttaggcaacacttcacccgtgcctgttacacagctagtgga

SEQ ID NO: 304290 - DNA, 289 bp, Zea mays
accaaatattggatcagcttgagctgtcgggcgctgggcgccgtggcttccccatgatgccacagcaaccgagcgggccgcagtgaatgggatgcatccgtcggtcacggccggggtcaacaggttcttgctcccggtgtcagagtgcgagtgtacactcagcacgttgctggacgagttacagcctgaccaatggccagtggaggctgggaaccgtgccatccggtgcaccggtgttgctctcagcgtggctgccgggttgcttggtgcttgcatgcctgggactggt

SEQ ID NO: 304291 - DNA, 289 bp, Zea mays
cggaccgtggggtgcgggaggtgtccctccgcgccatcgacgcgctgtgcctgtcgccgcccaagtccaccgggcgtctcctcgccgccgggttcctcgaatgcgtcctctccctcctccgcaacggcgacaacacgctgctgcagcactgcgcgctgaaggccgcgcaccgcctgtgccaggtgtcggaggaggtgaagaaggcgatgggcgacgccgggttcatgccggagctggtgagcgtcctcggcgcgtccagtaagtcccccgatgcgcgggatatggcggg

SEQ ID NO: 304292 - DNA, 298 bp, Zea mays
gcgcgcacgcgtccgcggacgcgtgcgacgtggacgcgacgcgtgggcgagctgctcaggaagctcgtgctccccgacggcaccgtgctacgcgtgcagcttcccggccggcccacacgggactgactcttctccgacccggcgcgcgacggcgcgagtttgctcaagatttggaacctgaacaagtgcggtggcgtggtgggtgtgttcaactgccagggagccgggtggtgccgcgtgaccaagcggacgcgcgtgcacgacgcgtcgccgggcacgctgaccggcaccgtgcgtg

SEQ ID NO: 304293 - DNA, 308 bp, Zea mays
acgcctttgatggcaaattccctgcacaggttaaatttagcgttttcaaggattgtcttcctattcctgagagtagtttcaagcatgccattaaggagaactacagctcaaagggcaggttcacccaagggctcaacactaaacaagttcaaagactattggcactgttcaagcctatcagcctttctaaaccagctccacaacatattgaggatattcgaaaaccaagtgattatgaagaaagaagacagttgcaacatattgaagaaagggctgcacctattaatgtccacgcacatcctcttgaa

SEQ ID NO: 304294 - DNA, 269 bp, Zea mays
ttcccgagtctccagccaaccacatccagtccaccccatccccctcgaccccgacaaccccgagtcccgacccgatggcgcccaaggccgagaagaagccagcggagaagaagccggcggccgaggagaaggcggagaagacgaccgcaggcaagaagcccaagtccgagaagcgcctgcccgcctcgaagtcctccggcaaggatggcggcgagaagaaggggaagaagaaggccaagaagagcgtggagacctacaaaatctacatc

SEQ ID NO: 304295 - DNA, 328 bp, Zea mays
gccaattctcctgagtgggtcatcagtatgcaggcctgcaatgcccatggcatctactgtgtgccactatatgacacgcttggtgccggggcagtagaattcgtattgtaccatgcagaggtacagattgcttttgttgaggaaaagaagatcggagagatgctcaagacatttcccaatgcgaccagatatctgaaaacacttgtaagcttcggtaaggttgatcctgggcacaaggagatagttgaacagaatggcttgtccatctactcatgggaagagtttctgcaactgggaggtaaagagaagtttgaacttccacccaagg

SEQ ID NO: 304296 - DNA, 315 bp, Zea mays
gagcactggacttgggagaacataaaaatctggactttgaagaattgttggagctttgcatccgtactcaagagagttgctcaggattcagaaggtttgaattatttcagatcattgacgctacaggcaatttcccggaaagtagaatcatcgggtcgggtggttttgctatagtttacaagggtcagttacctgatggatccatggtcgccatcaaaaggatggatgaaggtgccacaatgtttgatttcagcagtgaatttctggctgcgaggcttcagcataccaatctaattagacttttggggtggtgta

SEQ ID NO: 304297 - DNA, 313 bp, Zea mays
acgccgtcgcacccatccccgccagggagctccaacacgccgtcgtacccttctccgccagggagctccaacacaccggcatacccgtctccagcagggagctgtacgacagcgtcgcacccatccccgccaggtagctgtaccaccccgtcgccaccagggagctccacgacaccgtcgcacccgtccccgccagtgagctccacagcaccgtcgccaccagggggctccacgacaccgtcgcacccatccccggcatggatctccaacacgccgtcgtacccttctcggccaggtagctccgacacaccgg

SEQ ID NO: 304298 - DNA, 311 bp, Zea mays
aatctgctcatcaaaaagttggacgtttgttgcgctctgtttgactttacggatgcgtcaaagaacatgaaggagaaggaaataaagacgctgatgttgttggagatagatgagtatgtaaggactgctaacgtgaagttccctgagatcgttgtggaggcaatcacaaaaatgatttcggtgaacttgttcaggacactaatttccccacctagggagaagaaggcgcttcaagcttttgatctagaagaggacgaaccgttgatggaccctgcgtggccacatttgtaccatgtgtatgagttgctcct

SEQ ID NO: 304299 - DNA, 290 bp, Zea mays
  unsure (1)..(290): unsure at all n locations
ggaactcgatcgcaagtataagccagttgacatgacaagatgggatataccacaatttggagatgaactacatgaattcttacgacacaagaggtacttgatcgttgttgacgacatatgggatgctagatcatgggagacaatcagatatgccttgaaggacaataaccgtggaagtagaataatcatgactactcgtaattttgggggtgtcactacagtagaagacggttacaaattanaacctctaactaatggaaactcaaagaaattattctataaagaataca

SEQ ID NO: 304300 - DNA, 286 bp, Zea mays
cccacgcgtccgcccacgcgtccgcccacacagaagcggcggcggcggagcaaacgcaggcgaaggcgagggtgtgagggaaggagcaccagccatggtgcacgtcaacttctaccgcaactatggtaagacgttcaagaaaccaaggcgtccttatgagaaggagcgtcttgatgctgaactgaagctggtcggtgagtatgggctgaggtgcaagcgtgagctttggagggtccagtatgcactgagcaggatccgtaatgctgcaaggcacttgctcaccctt

SEQ ID NO: 304301 - DNA, 275 bp, Zea mays
caattcctgacctcagtggctcctccaacctatccatcattcatcttgagaacaaccaactgaccggaaatgttccttcctactttggcagcttgccaaaactgagcgagctgtaccttgagaacaaccggttgtctggacccattcccaaggctctgctaagtcgaagcattattttcaactactctgggaacgtgtaccttggaacagcagggaagcaaaagaagaagcatgtcatcatcattatatctgctctgcttggagcatccttgcta

SEQ ID NO: 304302 - DNA, 274 bp, Zea mays
gtctgtaagatagttgaggggcagcgctactcggaacgacttaatgataaacagatcactgctctactgaaggtgacttgcgaacgtgcccaagcgcgtgagaaggacatcttggaggtgattgtgatcatatttcttggagtctgcttctaacccgggacctggtgacttagtgagacgtctctcaccactgcaccaggcctgcccttcttctggaaaattacatatttgttattattggtgcatatataatgactaaatatatggaatattt

SEQ ID NO: 304303 - DNA, 325 bp, Zea mays
cccacgcgtccgcccacgcgtccgcccacgcgtccgcccacgcgtccgatccagaaaaatcgtgctgcttgcaagactttattacctttacatgcttttctggggaatagtgatgctgtggaaagaatttggaaggcgtgtgaggataatactcgcgtactgcagtccgtgtctgctatagaggcctttggtaagcttggtgatgttgaaaaggcagagaaggtttttgaggatatgcttgtgcattggaaaacactctcttccaaattctacaacgcgttgctaaaggtgtatgctgatcacaacctcttagacaagggtaagg

SEQ ID NO: 304304 - DNA, 317 bp, Zea mays
gttcttcttcttactatcagtacgacaggatggcaactgcatagtgttaaattgggaaattgctacagcgcttgctgttgtgagaagtgtgactgatgctatttatttcctccacatgttgcttcagttcagattggcttatgttgcaccagagtcacgagtggtgggagctggagacttggttgatgagccaaaaaaagttgctatccattatcttcgtggttactttttacttgatttctttgttgtgcttccactccctcaggtgatgatactgctagtagttcctaaagttgggttatctgctgcaaactatg

SEQ ID NO: 304305 - DNA, 310 bp, Zea mays
gttatgcagaatcaatgaatccatttgcaaagaggaaacttattgagcctacggttcctgaagaaaaggttgctatgaagttgaacaatttggcagtgcccaaattatgtgtgaaactcaacactcttcaattcatcagggatcaacttgatgccatagaagaaggtgtcaaacaatcctgggtctctggcctgtcagctgtcagattgttggattatttgtcttgtatggctagtggaagagctctttccagaagtttgacatcatctgatgaatcggttgatgagttgtttaccatatttgatgatgt

SEQ ID NO: 304306 - DNA, 303 bp, Zea mays
agtcatccttctatgatggtcaatggttatgatcatccatatgcctttttcagttgattggtgacaatgtaatgaagttaaattctttattggcaggcacggccccttttcaatgacaggcgcaagtcccaaagatggctgacccgggcctggaggggcagtttcctacacggggactttaccaggcgcttgcggtggcatcaatgtgcatccagtcagaggctgcatcgcgcccactcatcgccgacgttgtgactgctctgtcataccttgcaaaccagatttatgatcctagcttagcgc

SEQ ID NO: 304307 - DNA, 300 bp, Zea mays
cccacgcgtccgttccgcttatgtgtatgaatctttgggggaagaggaagagaaatggcacgctcagtatggtcaggtcgagaggtcaaatgatgatcaacatttacctccaacaattgatatatgggattgggatgtggtccaagaccatgttaacaaaggtcagcccgtggttaggcttgtgggatgtttatctaggggttcaaataagcttcatccttctcttcctactcgtggtggccttgtaaggactgctcctgtgcgtgaagttcatcttgacctcgtgcaagtttcaacagg

SEQ ID NO: 304308 - DNA, 284 bp, Zea mays
gcgtctcgaccacgtcgcagttcgatgacatcttcactaaggggctatcgtcgagtgtattcattgagtttcgctgcagtctcaacatcggtacatgatagagttgagactgcggggagggggtgttagactccttgttagacatctgtacatgatacctgatgacccatattgtaatgggcttggctcatctaacttctctatataataatactcccaaccctggattagggttagggtttcccacattctaactacgcaaactgacatatttgttatttttc

SEQ ID NO: 304309 - DNA, 310 bp, Zea mays
ggtgtttctcgttgcacgactcaggtgtttccgggagcatggactgctgtgatgctgtcacttgacagcccaggattttggaatgtacggacagaaaacctggacacgtggtatctgggtcaggagacttacatcagggtggtggatccaaatggaggctataatgttactgagatggtggctccagacaacatgctctactgtggcctcctcaaggataaacagaaggctcagaagcctcatggttcgaggtcatcagcctctgcagcaaaactgaactatcatgtgctcgcggctttggtctctttgg

SEQ ID NO: 304310 - DNA, 307 bp, Zea mays
cccacgcgtccgcacacgcgtccgcccacgcgtccgaattctgatgctctccaactggcaaggcttgctgatcctgatgggtctcgtacaattggtgttatcaccaagttagatatcatggacaggggcaatgatgctcgtaacttcttgctgggaaatgtgattccactcaagtttggttatgtaggtgttgtcaatcgcagccaagaggatatcaacttcaatcgaagtgtcaaagacgcgctagcttttgaggaaaagtacttcttgactctacctgcttaccatggtcttgcacattgttgtg

SEQ ID NO: 304311 - DNA, 120 bp, Zea mays
agaggtgggctggcttgtcctgcccctgttaccaagtcgtcctcgggtcagggttccttagggctttgtggaagggctatggcggccgctgatgtggagcaccgttggctcgtcggccgg

SEQ ID NO: 304312 - DNA, 313 bp, Zea mays
gggcagcatggctgaggagagcctccaaggatgacacgttcctccagtacattcagaacaacggcaagaccctgggtgcagaggacagcagcaacgagttcgggtgggacaacaagcatgccggcctcaacgtcctcgtctccaaggatttcatagaaggcgccgcgctgcctttgcagtcgtacaaggagttcgcggacagcttcgtatgcacgctcatcccggagtcgtcttcttccccgcacatcacgtacacccccgggggcatgatctacaagcctggaggcagcaacatgcagcacgtcacctccat

SEQ ID NO: 304313 - DNA, 324 bp, Zea mays
catggtgggacgatctgctggctcctcctgcgccacctcagcaagttcgaatccgtcacccagcactggatctacaagctcatgcagccttccatcgttccatagctgccaggcatctcgtacaagggtgccaacagagtctccttgcttctccagtatggtgttctctcgcccgctgatggtcactagaaccaccaccccgaagctgaacacatctgtcttcagtgaatagacacctcgagacgtgtactcaggagctttgtagccactagtccccacaagcctgcttgtacagtcttcagcggagtccgaagtcagagttct

SEQ ID NO: 304314 - DNA, 281 bp, Zea mays
cggaccgtgggctctgtggattgcatcggattttggcaccaaggagaccaaatggcttgtccgtgctggagttgggctgaaggaggcaccaggcgcagagaaatggaacgatgctgagcggatttctttcatgcggaacaacattcttgagttgtatgagaggcctaactgccccttactgaagacattgatgctgcaaggaaatcctgggctggacaagatatgtgatggattcttccaatacatgccatctctcagagtgttagatctgtctcatacct

SEQ ID NO: 304315 - DNA, 140 bp, Zea mays
gtcatattctccagcaccgtggctaataatgtattgttgcagtacaaaaaaaaaaatataatccacaaggtaaatttcttaatctataaccactatttgaaattggtagtctacaatctatttgatgctttaagtgaact

SEQ ID NO: 304316 - DNA, 316 bp, Zea mays
aattctagggttttgctgctctccgaccccgagctccgaagccgcagcatcaggcgcggcccccctcgcgtgtgaccgagatggcgctgccgaatcaggggaccgttgattaccccagcttcaagctcgtcatcgtcggcgatggtggaactggtaaaactacatttgtgaagaggcatctcactggagagtttgagaagaaatatgaaccaaccattggtgtggaagttcatccgttggatttcaccactaactgtggtaagatcaggttctactgctgggataccgcagggcaagagaagtttggtggcctcag

SEQ ID NO: 304317 - DNA, 314 bp, Zea mays
ggacgcgtgggcggacgcgtgggctatgacaaagaacccatactccagtgtggatgttggccctctaatgcgggatgtgaaaaataaaatatgtaaccagcttgatttaaatggacttttggaggatgattatggtatggaattattagttggtggtagtataatctcacttgatctgagcatttcccaagtctatgagcaagtatggaggaagcaccatggtcaaactcaacattgtttgtccaatgtcagcgcaataactggtgcttcatctatcagagattgcccaccaatgacagtgacctacagactgc

SEQ ID NO: 304318 - DNA, 291 bp, Zea mays
accacccgtccgaccacccgtccgaccacgcgtccgcggacgcgtgggcggacgcgtgggagggggcttgcttcatctgctgtccgatcgtggtttggtttctcggggctcgcgcggtcaagagcgcacctgcattccaccgaaatccgccacggtagttcttgcctaagtgtgtcgttggtcgttgccttgtgacccttgcggattttcttgtttctttttgagttgcgatctttgcaggttagtctcccccccaatccgtaatcatccggcgtctaggaaactgcagtc

SEQ ID NO: 304319 - DNA, 314 bp, Zea mays
ccacaagggcttgaggctaggtacctcagaaattgacaggctacgtggtgctgatttgaagaatctgttgcgtgaaagaaaattagtactcattttggacctggatcacacattgatcaactccaccaaactccaagacatttcttctgccgaaaaagatttgggtattcagtctgctgcttcaaaagatgatccaaatagaagcatcttcgcactagatttaatgccgatgctcacaaagttgagaccatttgtccgagaatttctgaaagaagcaagcaatatgtttgagatgtatatatacacgatgggtg

SEQ ID NO: 304320 - DNA, 298 bp, Zea mays
agctcttcccgccagcggtgggcggcgcttggccatgtacccgtcagggccatggtgggggcggcgccgcggcgcgcccgagcgcgtcgtcgcgggtggagaaggccacgagccacctgctcatggggcccgactgggccgtcaacctcgaaatctgcgacatcctcaacgccgacgtatggcaaacaaaggatgtggtgaaggcagtgaaaaagagattgcagaacaaggacccaaaggttcagttttttgctttaacgcttttggagacaatgatgaagaactgtggtgaatatgt

SEQ ID NO: 304321 - DNA, 301 bp, Zea mays
cccatgcgtccgcccacgcgtccggtcaacggtctcgagctacgcttctgccagcagtgcagcaggttccacaacctggccgaatttgaccagcaaaagaaaagctgtcgcaagcgtctagcaggccacaacgaacgccggagacggccacctcctggaccccttgcgtcacgatatggccgtctcgctgcaccgctcggtgaatagcccggcggcaggttcagaagcttcatgctggatttctcatacccaagggttccaagcgccatgaggtatgggtttccatcggttcgacctggtg

SEQ ID NO: 304322 - DNA, 294 bp, Zea mays
cggacgcgtgggcggacgcgtgggcaggcctcatgtcactatttcttaggttgataaatccagttgttgtctcgccaacagtggcagctgttgggctttcattcttcagttatggcttcacgaaaattgggacatgtatagagatgggaattctgcagttattgatggtggttatttttgcactttacctccggaaaataaagctatttgggtacagagtgtttcttatttatgcggttcctcttggattaggaatcacatgggctgttgctttcgttctcacagcaactggag

SEQ ID NO: 304323 - DNA, 302 bp, Zea mays
ccgagcgctgcctcgactggggcgaagcgggcggccccgacctcatcgtcgacgacggcggcgacgcacgctgctcatccacgagggtgtcaaggccgaggaggattacgagaagaccggcaagatccccgacccggaggtcacggccaaagcggggttaagaaggggccaacaacatcgccgacgggcccaagcctaccccagaagtaccgccagatgaaggagaagcttgtcggcgtctctgaggagaccaccacgggtgtcaagaggctctaccagatgcaggagaccggcggcctcct

SEQ ID NO: 304324 - DNA, 309 bp, Zea mays
cttcggatactctatgatgcccttggtaccctggctgatgctgttggagcagaattaaatcaggcaaaatatctagatatatttatgccgcctttgatcacgaaggtgcagcaactttccaattctgacaaagaaccaattccacaccccgaaaggcctacaaccaatgcaaaggcaatggggacaggagttgctcagtttgcggaaccagtgtttcaaaggtgcatcaatcttatccaatcgcaacagttggcaaagattgatcctactgcagctggtgcggtgtatgatagagaattcattgtttgt

SEQ ID NO: 304325 - DNA, 128 bp, Zea mays
gcgcgcttcagcggaggtgctgggcaaaggcgcgttcgggacggcgtacaaggcggtgatggagaacgggtccgccgtggcggtgaagcggctcaaggacgtggacctcccggagcctgagttccggg

SEQ ID NO: 304326 - DNA, 300 bp, Zea mays
gcacactccgctccgttctggcaattttgttttctgattttgtggaacgctcgtccctgtgggctgtggcacagtggcagggcaagagaaaggagaggatggcgtcgccgataccgcgcgagtgggtcgggctgcagcagtttccggcggctacacagaccaagctgcacgaactcctcggcaaactcaaggaggaggatgtgagcacattaacaattctggtgatggggaaaggtggagtgggaaagtcatccactgttaactccatcgttggggagagggttgcctctgtcagcgctt

SEQ ID NO: 304327 - DNA, 289 bp, Zea mays
ggcgatcccgttcaagagtaggtcttaaaaggagccgatgctgcctgctgcttcgagatgccgccggtcttaaaaggatggattcgtggctgttttcaaatgatcccctactatgttacgtggagttccattcctctttcaaagttcggaagctgcttttatccgaacccagacttgtaattcatcagtgccaattgtgtaatatgccgcgcctctgttatgtgcaattcagagttatgagacaaaaaaaaaaaaaaagggcggccgctcgcgatctagaactaggcag

SEQ ID NO: 304328 - DNA, 270 bp, Zea mays
tctgctcaacccgccggcagaactcgagaagctcaagcacaagaaaaagagactcgtccagtcgcccaactccttcttcatggatgttaagtgccaggggtgcttcagcagatcaatgtcgttctggagaaccatcttgcctcgggctgcggcggagggaagatggttctccagaacgacattgatctgctcaacccgccggcagaactcgagaagctcaagcacaagaaaaagagactcgtccagtcgcccaactccttcttcatggat

SEQ ID NO: 304329 - DNA, 274 bp, Zea mays
ggacggtgggcggtgctcgatagagggttatgcagctggtagttgcattccaagtcctcaaaagaatgttgagagagacttcttgaagaaatattggtccaggtggaaagcggatcatgtaggtcgttgtcgggctatgcctcacataaaaacctttactcgttacagtggccaaaacattgcatggtttctgcttacctcagcaaatttaagcaaagctgcttggggcgcgctacagaagaacaacacacagctaatgatacgttcatatgag

SEQ ID NO: 304330 - DNA, 272 bp, Zea mays
cggacgcgtgggcggacgcgtgggcggacgcgtgggcggacgcgtgggcaggtctgggattgccttttcctagttcaacatggagggcgctcttgttcagtctgctattgttccagccgtttacagaagcagctcaggtcggttccgtgtgcgtgcaagggccagaacaaatgctacaatggtgcggaatacgccaacaaggactcttactcttggtggcttccaagggctgcgtcagacaaactttttggatacgaggtctgtaattaagc

SEQ ID NO: 304331 - DNA, 263 bp, Zea mays
gaagaaattagacagcccaatccgaagatggttctcctggggctgcatctgctataccagaaacagatctgccagaaattgtccaggtgataagatcatgtcgagatggtatccataaggtggttgaattactacagcacaagtttccaaatgtttcaaagactcagctgaatcgcaaagtgagagagatatctgactttgttgacaatcattggaaggtaaagaaagaggtgcttgacaagctgggattggattcgtcacca

SEQ ID NO: 304332 - DNA, 102 bp, Zea mays
ggtaggtacaacatccctgatctggccaagaagtacaaggtgtacgccatagacctgctggggttcggctggagctagaaggcgctggtggactacgaggcc

SEQ ID NO: 304333 - DNA, 290 bp, Zea mays
aggaaaacaaattatacaactttcatgagtatttaagagcaagcacacgggctcagttgatgaattccctgaatcacatttcccatatggctcggaacaacggttgggtggaaatgccccaatggagtatgcaagctttacaataagatttggctcattgaatgtgacccagtgctttactcggtcaccaaacatcttgaagcaaagctcaacgaagtaggtgaagtcctccctgaatagaaataaagaaacaaccacatatgaacttacggcatcttcgtagataaagc

SEQ ID NO: 304334 - DNA, 289 bp, Zea mays
aaagcgtttacagtcacaattaccaactgccaggacaaatgcagtacaactacaggaggagatgtaaaaaagaaaagatgttcttgtaatctccaaccaaggatgcagacatgtcatggaagtaaacggagggcctagccataaaacggctttgcttttattccaaagtccaatacaagtctttgggtaattgggcacagaagatgagggaggagacggagaggggagacccggtcactaccaatgccaagaacaagaaaccagagaggacagtcgtcaatccaatccg

SEQ ID NO: 304335 - DNA, 279 bp, Zea mays
cggacgcgtggcgtgacgcgtgggctcaagcagagcagtgctagctggagatgatgatattccaccttccttccccagcaaaggctcaaaagtatcgtgtggagaacttgtacgagggaccccttgatgatgtgtatgcaactgctatcagaaactgtgatccagagggtcctcttatgctgtatgtttcaaagatgattcctgcatctgacaagggcaggttctttgccttcggtcgtgtcttctcagggaaggttgctactggtatgaaggttcgga

SEQ ID NO: 304336 - DNA, 305 bp, Zea mays
gattctagtaaagggttgggttttactgaggttgcaaaagcccgtgcgagtacaaacaaagttgtttgttgccatttctcattggatgggaaacttcttgccaccggagggcatgataaaaaggtcgttttatggtttacagatgtgctaaaacgtaaatccgcattagaagagcactcttccctaattacagatgttcgatttagccctggcatgacccgccttgccacatcttcctttgacaaaaccgtgcgggtttgggacgctgacaatccagattattcgctccgcacttttacaggtca

SEQ ID NO: 304337 - DNA, 303 bp, Zea mays
ctcatcttttctcgtttagaacctctaaaatttcccccactcgccagtcgcagcagcacctgtagcagccatggacgccagcggaccggtagcaaggggaagaagggggcggccgggcgcaaggcaggcggccccaggaagaagtcggtgacgcggtccgtcaaggccgggctgcagttccccgtcggccggatcgggcgctacctcaagaagggccggtacgcgcagacgtgggcactggcgcccccgtctacctcgccgccgttctggagtacctcgccgccgaggttctggagttggcag

SEQ ID NO: 304338 - DNA, 304 bp, Zea mays
cccacgcgtccggctggtgtcctatcagatgcctatgagaccgtggaagagctcagaggtatacctacgacactggaaagctggcagcctgtgtatcagagaagaaaattcgagctctcttatcccaaactacctggccatctaaaggattgcttaagatattttagtatgtttccaaaaggttacgagatcagtgcagaacgcttagtttgggcgtggatagctcaaggtttcgtaaaggagactcagggacagaatgatttggagaaagtcggaaagaagtaccttattgaccttataagca

SEQ ID NO: 304339 - DNA, 296 bp, Zea mays
cggacgcgtggttattggaaggctttccttcctgtggtctacaacatatttaatcttcatggtgcaacactaatggcaagggagaatgaccgcttctacaatcaaattgcttttcatcttttgcggcttgctgtttttcgaaatgattctattaggaaaagagctgttgttgggttgcagattctcgttaggaacgcattcaactatttcaagaacactacaaggttgagagtcatgttgacaattactttgtcagagttgttgtctgatgtgcaagtgactcaaatgaaatccga

SEQ ID NO: 304340 - DNA, 311 bp, Zea mays
cccacgcgtccgatgcaaaaaggctactctgttactattatgcttaattaccatgcgatcttcgataggggaattctctcaatcagaggaacacgtgactctgggctcatttcccctatcgaagatcccatggcaattatgcaaaaaggctactctgttactattatgcttgctgttcttacatttggagtgtctactcgttggctcctgtacacggaacaagcaccttctgcatggctaaattttgcattgtgtggcttggtggggatcatcacagcatatgcttttgtttggaattcgaagtattacac

SEQ ID NO: 304341 - DNA, 300 bp, Zea mays
cagaacaagaaattggtgcactaagagcagcgtttgcacaagaggtcgctgtctggcataagcttgagcatccaaacgttactaagtttattggggctataatgggcgcaagagatttaaatatacaaacggaacatggacagcttggcatgccaagcaatatttgctgtgttgttgttgagtaccttgctggaggtgcgctgaaaaattttctgataaagaacaggagaaggaagcttgcctttaaagttgtggtccaaatagctcttgaccttgccaggggattatgctatctccact

SEQ ID NO: 304342 - DNA, 296 bp, Zea mays
cgaggatccacttcatgctttcttcgtacgctccagtcatctctgctgagaaggcctaccacgagcagctctctgtggctgagatcaccaacagcgccttcgagccatcttccatgatggccaagtgcgacccacgccatggcaagtacatggcctgctgcctcatgtaccgtggtgatgtggtccccaaggatgtgaatgctgctgtggccaccatcaagaccaaacgcaccatccagttcgtggattggtgcccgactggcttcaagtgcggcatcaactaccagcctcctagc

SEQ ID NO: 304343 - DNA, 298 bp, Zea mays
tccatttcgatcccatttgaaatcaacccatcctcgtttcctccgtctagcagcctctcaccctcatggccaagatcaagatcgggatcaatgggtttggcaggatcggaaggctggtggccagggtggccctgcagagcgacgacgtcgagctcgtcgccgtgaacgaccccttcatcagcaccgattacatgacctacatgttcaagtatgacactgtgcacggacagtggaagcaccatgaggtcaaggtgaaggactccaagacccttctctttggtgagaaggaggttgctgt

SEQ ID NO: 304344 - DNA, 309 bp, Zea mays
cccacgcgtccgcccacgcgtccgcccacgcgtccgcggaggcgaaggaggaggagcagcagcagcaggcggcgccgaggagcggcatcccactcagtgcttgcaaccatggctaggggattgaagaagcacttgaagaggctcaatgcgcccaagcattggatgctcgacaagcttggcggagcttttgctcccaagccatcttctggacctcacaagtccagggagtgccttcctctgatcctcatcatcaggaacaggctcaagtatgctctgaactaccgtgaggtcatttctatcctgatgcaa

SEQ ID NO: 304345 - DNA, 308 bp, Zea mays
ggacctgggctccagcgaagagtgccaatctacggatgatgtgtccaaactaaggaaggagctgcaggaaaccttagcagtctatgataaagcttgtgcaaaccttgttagtgttaagaaaaagattcaggtactttctatcgagtgttctgaagaggctaggaaggtggagcacgcgctagagtgggaggaagctttgaagcagacggtgtctgatgagaaggcgaaacagctcgaggtcatcagtgaagtcgagcaagcaggaaaatcattcacccgagaggcttattcaaggtacaagacagaaa

SEQ ID NO: 304346 - DNA, 309 bp, Zea mays
tggtggactgcgccgcgggcctcggggcctgcaatgtaggatcccggcctgtcggagagctgcggcgcgttcggcgctggcgctggcgctgcgccgtagccggccctggcgtccaagaataagagggtcgaggggaagccgtccatgaacctgatggccgatcgctgctgccgtaagcgcctcaacgaccgcctctccattctacgctccgtcgtgccctagattagcaagatggaccggacttcgattctgggcttcacgatctactacattaaggagctgctggtgagtatcaatctgctttaggaa

SEQ ID NO: 304347 - DNA, 235 bp, Zea mays
cccacgcgtccgaaagatttggatcttcatcagctatataaggaggtcacatcacggggtggtattgacaagttgaaggcagagaatagatggagggaagtgaccgcatcatttattttccccgccactgcaacaaatgcttcttttatgttgaagaaatactatatgtcactcttatatcattttgagcagctatacttttttagagtgcaaggctggtaccaacaagaaatag

SEQ ID NO: 304348 - DNA, 316 bp, Zea mays
gtcgtgtcttccctatctccacgctaccgcacctgtcgccgccgcctccgccctctttgctcccggccccacttcaagcccaagcgtccgcgtctcccgcccgcgccgccacgcctcgatgtccgccgccgccgattcctcctcctccattgcggttagctcgctctcacccgagagcatcgagcacaacgatctgctcatagttgggcctggcgtgctcggccgaatcgtcgctgagatgtggaaacaggaatatccaggttgcaaggtttatggccagactgcaaccacagatcatcacagtgaattgactgat

SEQ ID NO: 304349 - DNA, 309 bp, Zea mays
cggacgcgtgggcggacgcgtgggcgaaaaaatcacagaactcactcgaacgacggtgccgccgcttgcctcgccggaccatggccgctgtgccgtcggggttcctcctcatcactggcccgccgggcgtggggaagacgacgctggtcatgcgggtgtttgaaaccctcagaggctcctacccgaacctcaacattcgcggattctatacccgagaggtgagagagggcggagaaaggatagggttcgaggttgtcacgctcgacggtagaactggaccactttcctcatgcaaggtttccagcccgg

SEQ ID NO: 304350 - DNA, 307 bp, Zea mays
gggttctggaaccattggtactgtgtaccatggaaagtggagaggctcagatgttgctataaagagaatcaacgagcgatgttttgctgggaaggcatctgagcaagagcgtatggtatgaaatgttttcttttagattgaatccatcatgtgctatcttttcttttgtatgtagaggactgatttctggaatgaggcagacaagcttgcatctttgcaccatccaaacgtagtagcattgtacggtgttgttctagatggacctggtggatctgttgcaacggtaacggagtacatggctaatggc

SEQ ID NO: 304351 - DNA, 310 bp, Zea mays
gttaattaaacgtttgggtacggaggtgaacccaaaccagaggcgtatattgtgcatgaataaggttgacttggtggaagacaagaaggacctacttaaagttgcaaaagaatttgaagatcttcctggatatgaaaggtacttcatggtatctgggctaaaaggcaagggagtgaaagaccttgtacagtatttgatggagcaggcagtaagaagaccttgggatgaggagccaactgtaatgactgaagaggtaatgaaaaccataacgttggaggttgtgcgcgagaagatgctgcatcacatccac

SEQ ID NO: 304352 - DNA, 317 bp, Zea mays
agctcttgcaaggagaaaaaaaaaggaggggcaaggaacgcgctggctgagagacatggttctgacgcacgttcacgaccttgacgaggcatccgccgcatcggccgtcgtcttcgcctcgagatacgtgcaggacccgcttccaaggtatgagctgggagagaagtccgtctccaaggacgcggcgtaccagatcatccacgacgagctgctgctggacagcagccgcggctgaacctggcgtcgttcgtgaccacgtggatggagcccgagtgcgacaagctcatcctcgatggcatcaacaagaactacgccga

SEQ ID NO: 304353 - DNA, 306 bp, Zea mays
  unsure (1)..(306): unsure at all n locations
caccacgcgtccgcggaccgtggggagtggnncggacgcgtgtgcggacgcgtgggcggaccgtgggtgcgcctctacatttcttctctcactggtcctccgcctccgcctgactgcatccaagacccgggatcgcacatgtcggactcggaggagcaccacttcgaatcgaaggccgacgctggggcgtccaagacctagccgcagcaggctggcaccgtccgtaagaacggcttcatcgtcatcaagaaccgtccctgcacagttgtggagggttctatctccaagactggtaagcatggccac

SEQ ID NO: 304354 - DNA, 312 bp, Zea mays
cccacgcgtccgcccacgcgtccgcccacgcgtccgcccacgcgtccggtcgacgagctgcagcgacgcctcgtcgaccgcgccgacgacctgcctttcgagttcatcgcgctggaggtcgcgctggaggccgcttgctctttcctagactcgcaggctattgaattagaggctgaagcttacccattactagatgagctgacagcaaaaattagtaccctcaatttggaacgagtccgacgcctaaagagcaagctggttgcattgacaaggagagtacagaaggtcagagatgagatagagcaactgatg

SEQ ID NO: 304355 - DNA, 321 bp, Zea mays
tgaaccagctttcctttgctatgcggctatagtagttgcagcagccttagtgcttatatattttgtcgtccctcatcatggacaaacaaacataatggtgtacattggagtatgttctcttctgggatcactcacggttatgagtgtaagagctcttggaattgccttgaagctaacattgtcaggaacaaaccaattattctatcctcagacttgggcctttgcactgattgtagctacctgtgtgagcacccagattaactatctaaataaggcattggatacatttaatacagcagtagtctcaccaatatattatgt

SEQ ID NO: 304356 - DNA, 313 bp, Zea mays
cacgacggtgggcggaagagtgatggcgaggaccatctagtttttgaccggacatcatgaagtatatgcagccttgtgcatgtaatggatctgtggctccgaagctacatgcatttttctgcttataacagaacccacgcgtccgcatggtaggcctcatgtgcgctttgctactgagggttggtcagtttttcttggaatttaccattcttctcttgttttattgcttgattgtggcctcatgtgcgctttgttgctgcatttctcaggttcgacatgccccatgcctactatcactctcgatttgaagaag

SEQ ID NO: 304357 - DNA, 308 bp, Zea mays
cttttctcgtttagaacctctaaaatttcccccactcgccagtcgcagcagcacctgtagcagccatggacgccagcggaccggtagcaaggggaagaagggggcggccgggcgcaaggcaggcggccccaggaagaagtcggtgacgcggtccgtcaaggccgggctgcagttccccgtcggccggatcgggcgctacctcaagaagggccggtacgcgcacgcgtgaggcactggcgcccccgtctacctcgccgccgttctggagtacctcgccgccgaggttctggagttggcagggaacgcgg

SEQ ID NO: 304358 - DNA, 307 bp, Zea mays
cccacgcgtccgcggacggtgggtgttaaaatttatttatttaacaatgatgtatgcaataaggtaatgtgattttccaattatgcaattcacaggtgaattgtcccttctactcgaagggttggaggttggaggagacacttccattgaagagtacatcattggacctgccaccgaggcagccgatgatcttgttactgacggtgataaggaacaaatcacactttatgggcctgaagaaggccagtcatggattgctcgaccttctaagggacccagcatgcttggaagtgtgctttctcttgca

SEQ ID NO: 304359 - DNA, 301 bp, Zea mays
ccccgattcgtccgcccgcgaccgggattccctccgccaagcgcggatctgaacgctgcgctccgtgtcgccgctcgaatccgccatgaagggggccaaatccaagggcgccgccaaggccgatgccaagctggcggtgaagagcaagggggcggagaagcccgccaagggcaggaaagggaaggccggcaaggaccccaacaagcctaagagggctcccagcgctttcttcgtgttcatggaggaatttcgcaaggagttcaaggagaagaaccctaagaacaagtctgtcgctgcggtg

SEQ ID NO: 304360 - DNA, 299 bp, Zea mays
cccgagtctccagccaaccacatccagtccaccccatccccctcgaccccgacaaccccgagtcccgacccgatggcgcccaaggccgagaagaaaccagcggagaagaaaccggctagccgaagagtaagctgagaagacgaccgcaggcaagaagcccaagtccgagaagcgcctgcccggctcgaagttctccggcaaagaaggcggcgaaaagaaggggaagaagaatgccaataagaacgtggagacctacaaaatctagatcttcaaggtcctaaagcaggtgcaacccgaca

SEQ ID NO: 304361 - DNA, 295 bp, Zea mays
cttaatagcatatagaataaaattcaccccccatccacatgctggcgacaagtggtgtgtctatccgagctatgactacgctcattgcatggtggattctcttgaaaacatcacacattcgctgtgcacacttgagtttgacatacgtcgcccttcatactactggctacttgttgacactggctggtctccggcgacggggagtatcatcaactgcaataaattcctttattcgtggaatcgggataacgagaagtgacaatagcttaattcgtgttgatcgtctagaatatca

SEQ ID NO: 304362 - DNA, 295 bp, Zea mays
cgccggccgcgtgcacctccgtgcgtgccttgagggcgcgtatcacgtcatggaggagccgaccatgtacgccagcgacacgcgcccagccgcgcggcagctgtggcgcccgccgattggcgtgctggaagtcggcgtcctcggcgcgcaggggctaacgccgatgaagactgtcgacggccggggcatgaccgacgcgtactgcgtcgccaagtacgggcagaagtgggtgcgcacgcggaccgtggtggactcttgcagcccccggtggaacgagcagtacacgtgggaggtg

SEQ ID NO: 304363 - DNA, 290 bp, Zea mays
atttcagcatacgactacaagaccactccatcggtacatgaacttctgaatttagtagctcagatacgagcaacgggggctgacattgtgaaaattgaaaccactgctgctgacattgtagacacatcaagaatgtttcaagtacttgcacattgccatgaaaagcaggtgcctatcattgggctggtgaggaaagaacatggttttatttctcgtattatttgcgcaaaatatggcggataccttacttttgcatctcttgaaaatggaaaagaatctaccactgagca

SEQ ID NO: 304364 - DNA, 280 bp, Zea mays
ctcttggcctacacttgctggacctgtcggtgaacaatctcacaggtgagatacctgtggcattggtgaagaagctgacatccatggatcggttcaacttctcatacaacaacctgactgtttgcgcatctgagctctctgcggaggcgtttgccactgcatttgctcagtccaggaatgactgcccaattgctgtgaatccagacagtatcgtgaaaagtagagggaaacataagggaatgaagttggttctggctgttgtgctctccttgttcttctc

SEQ ID NO: 304365 - DNA, 281 bp, Zea mays
cggaccgtggtcggagtgttccaactcctgcctggtgctgctattccaaaacaacaaagagttgagcatcgaggacatcctcaagtccaccaccaacttcgaccaggcctacatagtcgggtgcggcggtttcggcctcgtctacaggtcgacgctgccggacgggaggagggtggcgatcaaaagactgtcgggagactactcgcagatcgagcgggagttccaggccgaggtggagacgctgtcgcgggcacagcacgagaacctcgtcttgctgcagg

SEQ ID NO: 304366 - DNA, 279 bp, Zea mays
gtctgcagcccccaaccacccccagcctcggaaggaaccttccagaagcgcaagactctaaaggccgtcgccttcccactcttcctcgccgcgggggtcgcctgacctcacataaacaatggtgaaggctgtcgctgtgcttggtagcagcgacggtgtcaagggcaccacctctctcacccaacagcgagacggccctaccgctgtcaccggaagtgtctctcggctcaagcctcggctccatgggttccatgtacatgcacttggcgacaccaccaa

SEQ ID NO: 304367 - DNA, 281 bp, Zea mays
cggacgcgtgggcggacgcgtgggtcttactgctgcagttcacaaagatccagtaacacgagaatggacacttgagggaggtgcactagttcttgcactataggggcaactgcctcattgacgagtttgacaagatgaatgatcaagatagggtaagtattcatgaagctatggagcaacaaagtatcagtatatcaaaagcaggaatcgtcacatctcttcaagctagatgcagtgttattgctgcggcaaacccagtagggggaaggtatgattcatca

SEQ ID NO: 304368 - DNA, 280 bp, Zea mays
cttgtcaaggtcttgttccatcattgatccgggtaggtaaatttaactcttgaagcccacgcgtccgcccacgcgtccggaatatccagaaaatggctccaaaaattctccagctctgccaagctacatggctgctacacaatcagcaaaggcgaaactgcggggaaatagctcaccaaaacttagctctgattcagcagagaaaaacggcttcactcgtcgtcactcccttccatcctctaacaacggtaagatggtttcacattctccacgtacacaa

SEQ ID NO: 304369 - DNA, 303 bp, Zea mays
gcgatgtcgcacttcgggaggtcaggcccgccggacatccgcgacaccttctcgctcctcgtcctcaacatcagcttccgcaccacggccgacgacctcttcccgctcttcgagcgctacggcaaggtcgtcgacgtcttcatcccgagggacaggaggtcaggcgtccgtttcaatttccgggccggtggttcgatggctgtttcctcaggttttgttcgtcggtggctcgcaggaccggggactcgaggggtttcgcgttcgtgcggtacaagtacgccgacgaggcgcagaaggctatag

SEQ ID NO: 304370 - DNA, 100 bp, Zea mays
cagacgcgtgggtccgtccacgcccggtcgtactcataaccgcatcaggtctccaaggtggacagcgtctgggccaatggaacaatgtaggcaagggaag

SEQ ID NO: 304371 - DNA, 308 bp, Zea mays
cagagatgaaaaagcaaggctattggggaacttgcttgggcctatatgcagtccgaaaattatgaggaagcggagatgctctataggcaagctcttgctatagaagctgactacaacaaagagtgtaacttggccatctgtttgatgaagactggaaagttggctgaagctaaatatctgattcatgctataccttacaactgtaatgatgaaagtcatgttaagtctctctcccgggctactgaaatgcttagggaatttgacttgcaatccatcccctctcccataactcaggcgaagtccaaaga

SEQ ID NO: 304372 - DNA, 309 bp, Zea mays
cggacgcgtggcgagacgcgtgggcggacgcgtgggtttggaggaggtggtggaagcagcaggggaagaaggcaaaggaggggagaagatgtagttcacccacttaaagtttcatctggaagatcattacaatggcacctcaaagaagctctctctttcgcgcaatgtcatctgctccaagtgcaagggcaagggctcgaagtctggtgcctcaatgaggtgccctggttgccagggctcaggcatgaaagtcactattcgtcagcatggcctttcaatgatacagcaggatgcagcagccttgcaatg

SEQ ID NO: 304373 - DNA, 333 bp, Zea mays
gggagaactgatctttatattggcaggtggatgcaatcaaaaccacgagacaagataattttggccaccaaagttgccggttattcagagcggtctacatttcttcgagacaatgcaaaagtggttcgtgtcgatgctgccaatatcaaagaaagtattgaaaagagtcttaaacgcttgtctacagattacattgatttgcttcagatacactggccagataggtatgtggcactatttggtgagtttagttataatccgaccaaatggaggccaagcatcccttttgaagaacaattgaaggctttacaggagttagttgacgaaggaaag

SEQ ID NO: 304374 - DNA, 319 bp, Zea mays
cgggtttctgtaccaatctcagccttcgtgtctatctgattccaggattcaagcgaattgtggtgaacatgaactccacatcttctcagcgtggttaccctgccaagaggtggtgtgcagcgaacatgagctccacatctatgcgtcactcgtctgagccctggactcaccttacccacaaacagagacgaccacaatggattgcttataatccaaggacaatgaggcctccaccacttagcactgataccaattctatgaagattctgtcctggaacgttaatggactgcaagctattgtacagtcagggttttctgc

SEQ ID NO: 304375 - DNA, 315 bp, Zea mays
aatgaacattcctcttgctggaattgaagccatcctatggagcaatgaccttcaggtcgcgtcggaggatgctatctacgacttcatgataaagtgggcacgtgctcaatacccaaaattggaggaaagacgtgagatcttgggcacacgcttgctgccccttgttcggttctgccatatgacctgcaggaagttgcggaaggttattgcctgcagtgatctggatcacgagcaggcgacgaaatgtgtcacagaggcacttctctacaaagctgatgcaccacataggcagcgtgcccttgcagcagacgtgat

SEQ ID NO: 304376 - DNA, 304 bp, Zea mays
cccacgcgtccgcccacgcgtccgctggggcacgcaggccacgcacccgctgccgcccaagatcgtggcgcagtcctcagggacaacggcatcaagaaggtgaagctgttcgacgccgaccagggcacgctcagcgcgctcgccggcaccggcatcgaggtcatggtcgccatccccaacgtcatgctcgacaccatgacggactacgacaccgccaaggagtgggtgcgccggaacgtgtcccgctacaagttcgacggcggcgtcaccatcaagtacgtggccgtgggcaacgagccgttcc

SEQ ID NO: 304377 - DNA, 299 bp, Zea mays
acgacgggtgcatgcagttcatctcggaggggccgtgggatgtccacgacgaggtcgacctcgagttcctgggcaacgccagcgggcagccgtacacgctgcacaccaacgtgtacgccagcggcaacggcagcagggagcagcagttccacctctggttcgaccccaccgccgacttccacacctactccatccagtggacgcagcagcacatcctgtaagtttcagaactactacttgcccaagccgatcagcagcgattcagcatcagtcagccaataatcctcattcttcttcgc

SEQ ID NO: 304378 - DNA, 301 bp, Zea mays
caaggaagtatcattagtggatcaaggactcaatggaaaacaacgcattctgcagcttgaacatgagatatctctcttgagtcgtttggagcatgaaaatatagttcaatatatagtttcccaccttccttatgtgttccaaaatattgaactatattttggaacacataaggaaggtgggaaactatatatttttcttgaacttgttagtcaaggatctttggcaactttatatcaaaaatatcatttgcaagattcacaagtctcagcatatacacgacagattctgaacggtttgcac

SEQ ID NO: 304379 - DNA, 312 bp, Zea mays
cccacgcgtccgcgcgacccggcccgggaccccgtcgtgctctggctcaacggcgggcccggctgctccagcttcgacggcttcgtctacgagcacgggccattcagctttgagtcatcaggagggtcagctgggagcctgccaaagcttcatctcaacccttatagctggtctaaggtgtcgagtgtgatatacttggactcccctgccggcgtcgggctttcctactcaaacaacgtttcggactacgagactggcgacttcaagaccgccgccgattcgcacactttcctgctcaagtggttccagctc

SEQ ID NO: 304380 - DNA, 255 bp, Zea mays
cccacgcgtccggcttatagcttgtcagccatggccaccgccgccgcgtctaggctcctcaagtcctgcttcgcaggctcccggctcccggccgccacgcggaccacaccggcgtccctcgtggtggccaccggcccacgcggcgccggcgacggggccatctgcacgtccatgtccatgtcgtcctccaagccgccctacggcctgacgtccttccggttcagccccatcaaggagtccgtcgtatcccgcgag

SEQ ID NO: 304381 - DNA, 302 bp, Zea mays
cccacgcgtccgcccacgcgtccgcccacgcgtccgcccacgcgtccgtgttcaagcatcacagatagcaaggaacattacaacaaatgagatggcaaactccatgagatatgcatacctcagaggtccaggtggcagattcaggaatccgtatgatcatgggattcgcaagaactgctctgacttcttgttaaatggatacaatgaggacactgaacggctagagcagacattgcccactgatgaggaaatgggaatgatacagatgacaagtgcagtttcgcagcagaacggtgtcaatc

SEQ ID NO: 304382 - DNA, 291 bp, Zea mays
cggacgcgtggggtttcatcctttgctgggcacgaagaaggtgactacgaacagcttgtgtcataagctcccgctgcgaaaccactgctggagatctgacctagaaatggcagcatcagtagagagccaagtgtcctaggcaaacgcccgtataagacctcaaacggcgacttgcccaacgacgagtggagagatgtattaaaccagagttcagccaggggcagccaacgggtccagtgacacgggtgggaacttacagagcatcgcgggaatgtttcgaggcactggttg

SEQ ID NO: 304383 - DNA, 305 bp, Zea mays
cggacgcgtggcggacgcgtgggatctttacttgaggattgcaacagagctgcatttgaaaaggatgttggttggaggacttgagaaagtctatgagaataggagaatatgccggaatgaaggcatttctactcgtcataatcctgaatttaccactattgaaatgtatgaagcatattcagactatgaaagcatgatgaatatggccgaagaaattgttactcgatgtgctatggctactcatggcaagcttaaggttgactatgagggaactgaaatctctctcgaaagaccatggaggaggg

SEQ ID NO: 304384 - DNA, 99 bp, Zea mays
gcgtattacaataatttgataaactatctgcttcagcaaggcatgactccttacatcaacctttaccactatgatcttcctcttgcggttgagaagaaa

SEQ ID NO: 304385 - DNA, 99 bp, Zea mays
gatccaagttatggtcaccactggcggaaccagcttgaaggatgatattgttcgtctgtaccaacccgtgcacttaattgttggaacacctggccgtat

SEQ ID NO: 304386 - DNA, 215 bp, Zea mays
tcttcctctggcttctcctccccctcttatcaagtcctcctcgggctagggttccttatggttttgtggaggtgctatgtctgcttctgatgtggagtaccgttgcttcgtcggctgacttgccttttccaccagcaacgattcgcttgagaatgccttctcctcctactgcgatatcctcgactccaatgtcatcacctaccggtagacgggga

SEQ ID NO: 304387 - DNA, 283 bp, Zea mays
gaacagcgtccgggacgcgcgtgtgcacctacagcatcaggatgtctgggtactgcaatggcgggcatgtggataacgagctaacacagctggatgagatgattcaggaagggatccagcctgatataactgcgtacaacacaatgattagtgggtattgccattctggggaggtaggggtggcagaggagatgtttaaaaatatgttgatgggtgggattgattcaagtgccacgacgttcgaatggttggtcagagggcattgtatggcacgggatgtcga

SEQ ID NO: 304388 - DNA, 287 bp, Zea mays
gcgcctgaatgccgtgctgattataactttacacctctccatactgttgagccagtggtaaccttactgagttcatctccgccagctgtgcagcaattagctgcagagctcctgtcacatcttcttctagtggaccacctccaagatgtcacagtaacagatcaggcgactactcctcttattcaagtgctttcttcaggtttgccgtatttacatcagatagctatagaagctctagctagccgtgctatagccttgccaaatacgattgccagtgaatgtggtgt

SEQ ID NO: 304389 - DNA, 320 bp, Zea mays
caaggtcctgctggactacgcgtacaggcccctcgtctcagggtgcggcctgcacaagctcctcgtggacgacctcgtcttctcgacgctcaaggccagcgccgccatggggtacctcgcgccggagtacaccaccgtgggccgcctctcggagaagagcgacgtctacgcgttcgggatcatcgtgctccaggtgctcaccggcaggaggaaggtgacggcgacggctcagctgccgccaacaggcaatgtggatgagctcgtcgacggcaacctgcaggggagttactcggcggctgaggccgcatgctggcgaagat

SEQ ID NO: 304390 - DNA, 316 bp, Zea mays
cggacgcgtgggtggcgtcaccattctcgcgccggtgaattcgcctaataccgatggaattgacccggattcttcctcgcgtgtccagattgaggactgctacactcgtctcggcgacgactgcgttgccgtgaagagcgggtgggacgagtacggcatcaggttcaacatgccgagccagcacatcgtcatccggaagctgacctgcgtctcccccacgagcgccatgatcgcgctgggcagcgagatgtccggcggcatccgcgacgtgcgcgccgaagacagcgtggccatcaacacggagtcggccgtcagg

SEQ ID NO: 304391 - DNA, 316 bp, Zea mays
cttgcaagagctatccaggaaagtttgaatgttgagtcaccccctcgcagaaatggcagtgccaatggtggtactatgtatcatccgcctcgcgaaactggcaatgcatatcagccacctcgtgaaaatggcagtgccaatggtggaaatgcatatcacccattaccatttatgttctcatctggattcagagcatgcgcaggatgtcacagagagattggtcacgggcgttttctcagttgcatgggagctgtttggcatccggaatgttttcgttgccatgcatgtagtcaacctatatatgactatgagttct

SEQ ID NO: 304392 - DNA, 310 bp, Zea mays
tgctctagagtacctgaggaagatggttcgcactcttcaaaccactcgcgtcaacaccagctacgcccctcagccccggcagatcccggcctacccagtggtagtcgaggatgccccaccgaatctccctcccgtccgagtggagaacgtcatcaacctggaggacagttcggaggagcagctgccgacccccaccccgttggccgagtccctggccttcgcagctgcgtcatcgacgtcagcatcgccggcaccagccttccaagcacctgcacctggaggcgacgaccccgatgactccggagacggc

SEQ ID NO: 304393 - DNA, 309 bp, Zea mays
ggcgttgttctggtttatttttacatttgtgaccggacaaacatatttccagaaagcaagaagagctacaaccgtgatctgttcctgtttctgtacattcttctcatcatagcatcagcgcttacttcacttaagaagcatcatgaaaaatcagcattttcagggaagtccatactctatcttaatcgccaccagactgaggaatggaaagggtggatgcaggtattatttctgatgtaccactattttgctgcttcggagatatacaatgcaatccgtgtgttcattgcttgctatgtctggatgact

SEQ ID NO: 304394 - DNA, 330 bp, Zea mays
ggcatatcttcatcaccacagcaatccatcaattgtccactgcgatattaaaccaagcaacattctacttgatgaaaatatgactgcacatgttggtgactttggtttagcaagaattctaaacatggatgcatgtgaacataattctggtggaagtagctcggctggaattcgaggcacaattgggtaccttgcaccagagcatgccatgggactcagagttggtgtagaggccgaggtatacagctatggagtgctgctgatggagatacttactaaactaagaccaacagatcatatgtcttttgatggggccacaagccttgtaaa

SEQ ID NO: 304395 - DNA, 298 bp, Zea mays
cacatgattgcgcgaatgcaattcctgatttgagcaagatgatcggggctgttaagggcctagttgcacagtgtgaagatttaaagttgaagtactatgaagagatggataagaggaagaaacttcataatattgttcaagagacaaaaggaaatatcagggttttttgtagatgccggcccttaagcaaagatgaggtgtcatcgggtccagaatgtgtagtggattttgatggatccagtgatggtgacattgtaattacaaatggcggaactaaaaagacctttaagttgataga

SEQ ID NO: 304396 - DNA, 295 bp, Zea mays
cagaggctgtgttccgtcaaaggctctccttgctgtaagtggtaggatgcgagaacttcaagatgaacatcacatgaaatcactgggcctacaggtctcatcaccaggatatgacaggcaggttgttgctgaccatgcaaataatcttgcatctaaaatccgcagcaacttgactaattcaatgaaagctctgggtgtggatatactcactggtattggcaccattgtggggaagcaaaaagtgagatatgggaaagttggtttcccagacaatgaaatcactgctagaaacatc

SEQ ID NO: 304397 - DNA, 309 bp, Zea mays
cccggcctcatgtcggggctcaccctcggcctcatgtccctcagcctcgtcgacctcgaggtgctcgccaaggccggcacgcccaaggacaagctcaacgccgccaggatcctcccggtcgtcaagaaccagcacctgctcctctgcacggtcctcatcggcaactcgctcgccatggaggcgctgcccatattcctcgacacgctcgtgccgccctacgtcgccgtcctcatctccgtcacgctcatcctcggcttcggggagatcatgccgcaagccatctgcacgcgctacgggctcagcgtgggg

SEQ ID NO: 304398 - DNA, 314 bp, Zea mays
cggacgcgtggcaacctctgagagtgaggtgtgccatgttctgtttatagctgctgtgcagtatacaccttcctcagaggttgccacaactccaccgcttggatccactgaacttccaatgtgtcctgtttgcattgaaagattggatcaggacatcagtgggattttggcaactacttgtgatcactctttccgttgctcatgtctttcagtgtggaccaattcatcctgtccggtatgccagttttgtcagaagcagtctgaaaattctacatgttctgtttgccaaaccactggaaacctctggatatgtg

SEQ ID NO: 304399 - DNA, 267 bp, Zea mays
gcagcacataaccccgaaaatattgattacgacatgccgcttcaattcacggaggggacctgcatttattgatgagttaatgcaagtgataccgaattctcagtatgtgaaaagaggaacatatgaactcaagaaaattgtggaatatgcaaataacagggatttcacgtcacttgttgttgtccacacaaatcgaagggaacctgatgctctacttatcatcgggttacctgatggccctactgcacatttcaaactctccaaact

SEQ ID NO: 304400 - DNA, 257 bp, Zea mays
ggcttctcctccccctcttaccaagtcctcctcgggttagggttccttagggttttgtcgatgtgcgatggcggcggctgatgtggagtaccgttgcttcgtcggctggcttgcctgggccaccagcatcgagtctctggagaatgccttcggctcctactgcgagattctcgactccaaggtcatctccgaccggtagacgtggatgtctcgcggcttcggcatcgctatcttctcctccttaaggtccatgctcg

SEQ ID NO: 304401 - DNA, 267 bp, Zea mays
cccacgcgtccggtcgccctcaaattcgttccgtccaggcaaggaagaaatcgagcagccaaggagaggagaagatggctcgtacgaagcagaccgcccgcaagtccaccggaggcaaggccccgcgcaacagctcgccaccaaggcggcgaggaagtctgcgccgacgaccggcggcgtgaagaagccccacaggtacaggcccgggacggtggctctgcgcgagatccgcaagtaccagaagagcacggagctgctgatccggaa

SEQ ID NO: 304402 - DNA, 303 bp, Zea mays
gaaccgggagaatcgcttttatgggctccaataccaccccgaggttacacattcagcccaaggaatggaaacactgcgccgctttctctttgatgtttgtgggatcaaagctgattggaagatgcaagatgtgctcgatgaagaaatcaagaccatccaaagcacggttggccctgacgagcatgttatctgtgcattgtcaggtggtgttgattcaacggtcgccgccactctcgttcacaaggcgataggagataggcttcactgtgtttttgttgataatggtctattaaggcacaagga

SEQ ID NO: 304403 - DNA, 302 bp, Zea mays
gccagcaacatcctcctcgacgaccggtgggtgcccaagatcgccgacttcggcatggcccgtctcttcccggaggccggcgatggccactcccgtgttcatacccgtgttgccggcactaacgggtacatggcgcctgagtacctcatgcacggcgacctctccaccaaggccgacgtcttcagcttcggcgtggttgttctcgagatcgtctcaggccgcaagaactccgcctttatcccgcccccggacgccgaggccgacagcctcctggaatacgcatggaggctgtacaagaaagg

SEQ ID NO: 304404 - DNA, 308 bp, Zea mays
gaggatgacatccacactgtacgatttaatgacaaagaactttgcagcatcatacagtgaggatgacatccacaagagcgtaaaatacaatgtgtgggcaagcacaaccaatggaaacaagaagctcgatgctgcttatcaagaagctcagtcgaagggttctgcgtgccctatattcttgttttattcagtgaatacaagtgggcagtttgttggtgttgctgaaatgacaggggctgtcgattttgagaaaaccctggggtattggcaacaggacaagtggaatggttccttctctgttaagtggc

SEQ ID NO: 304405 - DNA, 287 bp, Zea mays
cccacgcgtccggcagcttctgcttgctctggggggaaggagagagagagagcgagagagatctagtagagaggctagctaggtggtcctcgaacgaagatgttggcggtgttcagcgggcaggtggtggaggtgccggcggactggtggcggcgggcagccggacgccgtcgcccaagacgaaggcgtcgcagctggtggggcgcttcctggccgcctccgagccggccgtgtccgtgcagctcggcgaccacggccacctcgcctactcgcacaccaaccaggcg

SEQ ID NO: 304406 - DNA, 284 bp, Zea mays
gccccaactgcaacaaaacctcctagcaagacatgtaactgctggccaaagtcatgctgcttgtgttgtggatcgaaaagaaaatgttccaaagctaagaaaaaacaagaacaccaaaagaaagtgaaatgcaggaatgcgtccaagcaagtgcatgctctcgaagtagctggaagagaaactgcacctcctgtgcctcgagaaaagtttgagaagagatttgggcagtcagatgcatttttggcttcaacattgcaagataatggtgaaggttgtcgcttcga

SEQ ID NO: 304407 - DNA, 324 bp, Zea mays
cggacggtgggcggacgcgtgggcgaacaaggaagtggacgggcacatccccaactaccccaacctgccgccgcagctgatctgccagctccatgatgtcaccaaacatgcggacatggagacaggacgaatgtacgagcagatgacgctgcaaccgctcaatccaccaagagcagaacgacgcgtacctgcctgccgagatgggaatcatgagcaagcagcagacgaattacttctgcaagacgctgaatgcgagcgacaacagcacgcacggcgggttctctgtgccccgtcgtgcggcagagagcgccttcccccagcagg

SEQ ID NO: 304408 - DNA, 113 bp, Zea mays
cttccttccgcggactacttttttctgaacattcggcgatggcggagacgatccaatccgtgaacgcgcgccacatattttacacatgccgcgaccctacatgcggggtcgac

SEQ ID NO: 304409 - DNA, 308 bp, Zea mays
gtttcatgttaaaacgaatcattttcctgcaagagctctacgtgttggtactgattatattcatcatgccatgcctacatcatccccaagggaaaattctgtcaggggaatcccatcactatcaagacagcacaatcagcatccaaggtccgttagttgtcaggcatcctcactggcatctttcagctaccctgagctgacatccaaacccagatggtggtggagaactctagcttgtgtgccgtacttgctgccactgcacaacatgtggtcttatgctgacgtgatctaccagctgcacacttatt

SEQ ID NO: 304410 - DNA, 301 bp, Zea mays
cggaccgtgggtcggacgcgtgggttggtgcgaaccttctcaacataccctaggacatacgacctgatacatggcaatgacatcttcagtttatatcagaacaagtgtgatgcagacgacattcttctggagatggataggattttacggccagagggtgcagtcatactgcgggacaatgccgatgtactgaacaaggttagaagtatggtggcaggaatgcggtggaagtccaagttactagatcatgaggatggcccgcacgttcccgagaagattctgatttcagtgaaagaatatt

SEQ ID NO: 304411 - DNA, 285 bp, Zea mays
cggaagccatcggtcagctcggtgccagacagtgttaccagggaggatccttccaccaagtacgagctgctccatgagcttgggaaaggttcatatggtgcagtgtacaaagcaagggatctcagaacgcaggagcttgtggctgtcaagatcatctcattaacagaaggggaagaaggctatgaagacatacggggagaaattgagatgctgcagcaatgcagccatccaaatgttgtccgctactttggaagctaccaaggagaggagtacctatggataatt

SEQ ID NO: 304412 - DNA, 134 bp, Zea mays
cttcgtcgcgcccaccatctccatcatcctcgccggccgctacagcggcattgccgatccccacgagaaattcgtgcgcatcatgcggggcacgcaaggcgcgctcattgtggcctccaccctccaaatcatca

SEQ ID NO: 304413 - DNA, 307 bp, Zea mays
tccacgcgtccgcggacggtgggcgacgcgtggcggacgcgtgggccaggaggaagtgacggcggcgcgcgaggaaggagggatcgatcgaggatggtggacgtctcgcgcgtgcagaaggagctcaccgagtgcacccgcgaccgggaggtatcgggcgtctccatcgcgctccacgacggcgccaacatctcccacctcaccggcaccatcgccgggcccgccgacagcccctacgagggcggcacgttcgtcatcgatatccgcctgcccggtggatatccctttgagcctccgaagatgcagt

SEQ ID NO: 304414 - DNA, 311 bp, Zea mays
ccgaaagaaggccacgcttccgcagccgtcgacctccgcccgcaagcccctccgcatcagaataggtcaaccaaaactgccaaaaaacttcgaagaggatacatggacgattttgaaggatgctatcacagctatttttctcaagcagaaactttcttgtgatgttgagaaactctatcaggctgctggtgatctttgtctacacaagctaggggcaaacctatacgaacgaatcaagaaagaatgtgaaatacacatagctgaaaagatatcagcattagtgggccaaagcccagatttggttgtatttt

SEQ ID NO: 304415 - DNA, 110 bp, Zea mays
ggacgtgttcgccttcggcgtcttcctcctcgagctcatctccggccggaagccggtggacggctcccacatgagtctcatcgcgtgggccaaaccttacctgagcgacg

SEQ ID NO: 304416 - DNA, 303 bp, Zea mays
gggtaatctttgatgaagtgcattatgtaaatgatgctgaaagatgtgtagtctgggaggaggtcattataatgctcccgaagcacattaacattgttcttctttcggcaacggtcccaaatactgttgaatttgctgactggattggtcggacaaagcagaagaaaattcgtgtcacatcgaccaacaaaaggcctgttccacttgagcattgcctgttctactctggagaagtgtacaaaatatgtgagagggatatgtttcttgctcaaggatttaaagaagcaaaagatgctttcaaaa

SEQ ID NO: 304417 - DNA, 307 bp, Zea mays
agcagaacaagatcctgaaggtgatcaggaagatccttaaagatgcaaaacaccctgcgcacatagagcttgatgttgttttgcttctttaagggtattgttgactctgaggaccttcccctcaatatctctcgtgagactcttcagcagaacaagatcctgaaggtgatcaggaagaaccttgtgaagaagtgtgttgagctcttctttgagatatctgagaacaaggaggactacaacaagttttacgaggctttctccaagaacctcaagcttggcatccatgaggactcgcagaacaggacca

SEQ ID NO: 304418 - DNA, 298 bp, Zea mays
gaatattccaattttgtccaccaaaatgtgttactgtgttgtaaatttggcttggttggcaaaaacatctgtcttggatttataggaatttgggattataaactagtaccaacgttctcgaatatttgttgtccgctagttcaattttgaagtaaaacgcaacaaataaaaaagaatggagggagtatctgaaacaagctgtacattctgttgctgccatttgctctatggcatgcttagctgtttataggatacctgaggtcatgatctacagtaatctgaactgcgatttaaaaat

SEQ ID NO: 304419 - DNA, 307 bp, Zea mays
cccacgcgtccgcgtgttcgtgtcctggctgccggagaaccaaaggacatgctctgcatatgctccccctgatcgagaatgaggatcatggaatgtgttcgatgcgttgcaggtgttcctgctgctgctgttctgcccgatcaacgtcgtgtaccggtccagtcggtttcagttcctcaggatactgaggaacattgtgctgtcaccgctctacaaggttgtaatggtagacttcttcatggccgatcagctttgcagccaggtgccaatgctacggagcctggagtacctggcgtgctattacatc

SEQ ID NO: 304420 - DNA, 294 bp, Zea mays
ccccgtttcgccgcccctagcccaaatcccccacctactcgccgccgggccgtctcagcctcatccttctccgctagccatggccgccgcgggtcccgggctctactccgagatcgggaagaaggccagagatctcctatataaggactaccacacggaccagaagttcacgctcaccacctacgccgccaacggagctgtgagtttccactcgactctccggtatttgtttttgtgatgtcgccttgttactcttggccttgatttgacatgatgcataggtaggcttttttt

SEQ ID NO: 304421 - DNA, 296 bp, Zea mays
gtccatggatattcgaactaggcaaggattactcaacgctatggttggcaaagttggaaaacggatggacaatcttttgattccattggaactattatgctgcatatccagaactgaattttctgacatgaaagcataccttcgttggcagaagagacagttaaacatgctggaggaaggcctcataaaccatccagttgttggatttggggagttaggtcgaaaagtcaatgagataaggagcctttttagaaagattgaagaatccgagtccttgccaccatctgctgcagagg

SEQ ID NO: 304422 - DNA, 287 bp, Zea mays
gtggcggcggcaggagatgactcgcctagcgcgcgagcaggagatcctggcgcaggagcgctctatggcagcctcacgcgacgctgccgtcctctccttcatacagaagatcaccgggcagaccatcccgatgccatccattgccgcgcccaccatcaacgccatgccaccgccgtcgcatccgaagccgccgccggcccctcagccgcagcccacacccattgcctccgtgtcgccagccccgccgccaccgcaaccaacagcttcgcagactccgcccccgcagc

SEQ ID NO: 304423 - DNA, 285 bp, Zea mays
cacacgcgtccgcggaccgtgggcaaggcagagttccgccggacctacctcggcgtgaggtcggagaacttagtgacgccgtgctccgacctcaagtcgcagagagctcggcggaacagcctcggcctccgcaagtcccggcgcgctctcctcagagaactcggggagtcggcgcacgaagcagccgtgctccccatcgatggtctccccgacgatttcgactggagggacaccggcgccgtcggccccgtcaagaaccagggttcgtgcgggtcgtgctggtcg

SEQ ID NO: 304424 - DNA, 283 bp, Zea mays
cacacgcgtccggttggattctcctccccctccggttcgggttcgggctcgtgatgatctccggtgttcggtttcgtggttgggcggatcgatatttctgcgtcgtatgttgagtaccgctgcttcgtagtcagcgtctcctggaccacggacgatcactccctgcagaacgccttcatcaactactgcgacgtcctcgagttcaagatcatccgcgatcttgagacgcagatgtcccgcggcttcgtcttcgtcaccttctccactgaggatgcgatgctgg

SEQ ID NO: 304425 - DNA, 276 bp, Zea mays
ggccggcaaggacgagccgatcgacgcctttgcagctgagatacagattttggggcacatcagacaccggaacatcgtgaagatactcggctactgctctaacagatctgtcaagctcctgctttacaactacatccccaacggcaacctgctggagctcctgaaggagaacaggagcctggactgggacacgaggtacaagatcgccgtcgggacgcgaatggcctggcctacctgcaccacgactgcattccggcgatactccacagggatgtc

SEQ ID NO: 304426 - DNA, 292 bp, Zea mays
gtctggactcacttctgttgatatggtatctgcctctgatacaaaatctgcaatggcactccaaagattagttcaagctgctgtttggtttctaggagaaaatgctaattatgctgcatctgagtatgcctgggagtctgcaacaccacccggtactgcattaatgatgctagatgctgataaaatggttgctgctgcaagttcccgtaatcctacacttgctagcgctctgacaaggcttcaaaggtgtgcatttagtggaagctgggagatccgcattgctgctgtacaa

SEQ ID NO: 304427 - DNA, 289 bp, Zea mays
gcaagaagtatattagattctatcgtgctgtcatagctggggactcgtatccacacacagcgactatgctaagcagtaccagtcaggtagaccttgacaacattgatttgaaggagtttccaacagttgaaagcctggaattcattgactgcatattggtagagggcgacctgctttacatccctactaaatggtggcactacgtcagatctcttcccaccagcttctcggttagcttttggtggcactacaaggttgttgactactggctcgaccgtggaaaatctgg

SEQ ID NO: 304428 - DNA, 281 bp, Zea mays
ccttatttaacttgaatattggatcaatccttgctgagagaaccttagaataacgcggtttttaagagcttggtactgaacctgggtgcttgaagagcaaaagtttgcaagacagcaaatttatatgtttatattgtgattcagtgaatattagttcaccaactgcttgtatcatgtatttggaattttggatggttaaggtttagatgtctgtaaccggaaggtccgggttcgagccccagcctctgcatattatgcgggtaaagcttgacgcttaaaga

SEQ ID NO: 304429 - DNA, 295 bp, Zea mays
ggacttcaagaccgatctccgcttccagtcctccgccgtcgccgcgctgcaggaggcctggaagcggagatcggtcttgaagtctcaggagatctcacggacgaggagaaagagagagagagacatagactcggactcggagagaaggagatgatgtcgagggagcgcaagaaggcggctgctctacaggagaagctgaagatcctccgctccatcactcactcccacgctctgagcaacacgtcgataatcatggacgcgtcggcgtacatcaaggagctgaagcagaaggtgg

SEQ ID NO: 304430 - DNA, 295 bp, Zea mays
acaaaaacatgtacaataaattcttaacttatctaacttatgaacacgttcagaagttagataagttaagaatctcttgtacatgcttttgttctggttatctggtatagatacatgagtcgccccattccattcgactaccgacgcgcagaattcacgcgaacgcacacgcacccacacgacacatccagaacatgcttagggtttccccgtccccggccgccgcggtgccaacccagctctccggtgcgcccgcgacccctgctcccgtcgtcagggtggcggcgtcgcgcgg

SEQ ID NO: 304431 - DNA, 294 bp, Zea mays
  unsure (1)..(294): unsure at all n locations
gtggccctaaacattacagcgattgattcacaagtaattggacagaaagataagtcaaaaagcatcctcgatgtttggaagcaggttttgcaaaagaaaagactcaagcgggctggaaaggctgaaagcttnttcaatgaagacaaggacatagactttcttttcacgctcatatctaaccgtggcgattatgaagttactatggacgggatccatgaaaatttcttgagattatcgtatcatgacccgatgttgcaaaaaactgtaaaatgtctcgatatacttggagtttca

SEQ ID NO: 304432 - DNA, 293 bp, Zea mays
cacagtggggggctctaatgtcatcatgcttgatgcacaacaatgttggtgtgggtgaacgtgtaggaaagaaacttattgagctagagccagatgatggtggacgttatgttgttctgttcaatctgtatgcagttaatggtttatgggaagatgcaaaagctcttcgtaagatgatggaagagaggggagccaagaaggagacaggtttgagctttatagagtggaatggtttagtccatgagttcagatcaggtgatacaagacacccccaaacaaggcagatctatgca

SEQ ID NO: 304433 - DNA, 279 bp, Zea mays
gatgctgaagcgtacatggctggctggctggctttgcagaggataccgatatggtggagatggtactcgtgggcttgcccggtggcttggacactgtatgggctcgtcgcctcacagtttggagacaccacacacgtcaggctggaagacgatggggaaacggttaaaaacttcgtcaacagattctttggattcgagcatgagaacctgggttatgtagctactgctgttgttgggttcactgttctcttcgctttcgtctttgccttctccatcaaa

SEQ ID NO: 304434 - DNA, 254 bp, Zea mays
tgaaagtttctgaaaaacaagctcgaaaaagaggcatttatgagggaaacgagaaaaaagtgtcactttgccacaggcgagacggaacagatctgaaaagatgtacagaggatattcccgtttcggctgcatcggaggaggacagacaatcaagggcgaacattgctgcctcttttcagcgagttgctgtgttacatttggaagaaaggtgtgagcgagcagttgaatgggcattgaatatggaaccttccatc

SEQ ID NO: 304435 - DNA, 128 bp, Zea mays
cgcctttctcatccccacgccatactacccagggttcgaccgtgacctcaagtggcgcaccggcgcggagatcgtccccgtgcactgcacgagcggcaacggcttccggctgacgcgcgccgcgctgg

SEQ ID NO: 304436 - DNA, 321 bp, Zea mays
cccacgcgtccgcccacgcgtccgcccaaaaccagcttggcactcgcatcgccttcatcatactcctcgctgttcccatgacggtctggttgcagcgttccaccacgcagttttgctgaggacagtacgacgcggtgagatgcctggcgatgccttgcgcggcgcagtagtcggcgaagtccttgccgtgaactcgccaccgcgatcggtgcgcagagtccccagcctccgcacggactgcgtctccacgccgccaagaagcctgatgatcgactccgccgcccgatctttagaactcagcaagatcagccacatgtagcg

SEQ ID NO: 304437 - DNA, 293 bp, Zea mays
cccacgcgtccgccgctttgcttcctccagcctccatccgcttctgtgctcctcgccaccgcccatgccgacgccctcgcctccccctatccgccgcagacggcgacgcctccaactcctccaccgtgtccgctgccaaccaacggggctcttccgcttcctccgtcctcaccttccagcaggccatccagcgcctccaggagtactgggcctccgtaagatgcgccgtcatgcagtgtagcaacaccgaggttggagcgggcacaatgaatcctctcacatttcttagggtc

SEQ ID NO: 304438 - DNA, 284 bp, Zea mays
tgcctctcgagccttgatgcatttctccccttggtttaccatgtccttttgttatttacagatgctacaagggtcctgaactacttgtggatttgttagattatgattactcattggatttgtggagtcttggttgcatgttcgcagcaatggtaagtggaaagaccatgatcaattagttatcttggctaatagacctatgttgatgtgctatatggtattgacagatattccgagtggaccctttctttagtggccaggataattatgatcaattagtgaaa

SEQ ID NO: 304439 - DNA, 288 bp, Zea mays
cagaaatcgggatggttttgaataatgtgagactagtcgcaaaagcccgagagcaaggaaatgatctctttaaagctgccaagtttttagatgcgtccatagcctatggggaagggctcaagtatgatcccttaaattcagtgctccactgcaatcgagctgcttgctggtcaaagctagaaaagtggggaaaagctgtcgacgactgcaacgaggcactaagaatacagccaaactatacaaaggctctcttacggcgagctgcgtcgtatgctaagcttgagcgtt

SEQ ID NO: 304440 - DNA, 286 bp, Zea mays
attggccctggtgtctacgacatccactctcctaggattccctccaccgaggagatcgcagaccgcgtcgagaagatgctcgccgtgctggacaccaacatcctctgggtgaaccctgactgtggtctcaagacacgcaagtacacggaggtcaagcccgccctgaccaacatggtctcggccaccaagctcatccgcacccagcttgccaacgcgaaatgagtcgtttgatagctccatggtttgatagcgcggaatgagccagttgttttgaataatttgggtg

SEQ ID NO: 304441 - DNA, 262 bp, Zea mays
  unsure (1)..(262): unsure at all n locations
cggacgcgtggtctgacgcgtgggttgtgagcgtaaagctgagctcctggcaaatcctcaggagggagtggttcacccctagctttatgtttggtgtcgccacttcgtcattcctnatgtgaggcgcttggaactaaggtggtctgggtccaagcacttgggacgtcttctgccacatatatccggagtggatagcgtactgtagcactgtggatgttggagcgaactcctactacctgtatagagaggttgtcatattgct

SEQ ID NO: 304442 - DNA, 291 bp, Zea mays
cccacgcgtccgcgtcgagcagctgagaaagtgtttcctccactggatttcacccagcaacccccatgccaggagttgatggcaaaagatcttcatggcaatgagtggaaattccgtcacatctttcgtggccagccaaagcggcatcttctaactacaggttggagtgtctttgtaagtgcaaagagactcgttgctggcgactctgtcctttttatctggaatgacaataaccagcttctgctgggaattcgtcgtgcaaatcggccacaaactgtcatgccatcttca

SEQ ID NO: 304443 - DNA, 292 bp, Zea mays
gctgctataaaaccctccgcctccaccggcggctcgccaaactccgtttcgaattctagggttttgctgctctccgaccccgagctccgatagccgcagcatcaggcgcggcccccctcgcgtgtgaccgagatggcgctgccgaatcaggggaccgttgattaccccagcttcaagctcgtcatcgtcggcgatggtggaactggtaaaactacatttgtgaagaggcatctcactggagagtttgagaagaaatatgaaccaaccattggtgtggaagttcatccgatgg

SEQ ID NO: 304444 - DNA, 291 bp, Zea mays
cggacgcgtgggcggacgcgtacggatgctcagacagtgttcgataagatgccaagaagaaacactattacatggacttcaatgatctctggatatgctgtcagtggctgacgtgaagaagctgtcttgttgttccgcaagatgaagatgcgcagagtatttgttaaccaccttactattgttagtctccttagtgcttgtggctctatgcagtcaatttatcatggaaaagaacttcatgcccagataataaagaattgtatggaagagaatctccagattgggagtacg

SEQ ID NO: 304445 - DNA, 102 bp, Zea mays
cagtaccgtggagccagagtcgcacaaatggctgacctcccttacaccggagattgatgagctcctgtacagctaaaccgagaacacggagcacaagttcgt

SEQ ID NO: 304446 - DNA, 293 bp, Zea mays
cggacgcgtggagactggatgctgcttatcgtgtgttggacgagatggggagggctggatttcctcctgacattgtcacgtataattgctttcttaatgtgctatgtagtcttcgaaatgctgatgatgcacttgaactctgtgagaggatgatagaggcacactgtgagcccagtgttcatacctataatatgctgatgatgatgttcttcgagatgggagaggcacatagagcattagatatatggcttgagatggacaaaagaggatgtcaacgtgctatcgatacctac

SEQ ID NO: 304447 - DNA, 297 bp, Zea mays
ctgcaattgaacatgcacatatacgggatgtggattataaccccaagaagcaaaacattgttgcaacagcagaagaggaatttggaattcgcttgtgggatctcagaatgcttaagtatcctctaaaagatctccctgggcactcacattggacatgggctgttcggcacaatcctgcgtatgatgagctccttctgagtgctggaacagattcaactgtaaatttatggttggctaaagttagcagtgacgatcctgaatctgatagcccttctgctttatccaataggcaagaag

SEQ ID NO: 304448 - DNA, 327 bp, Zea mays
ccaaccactactccatcgtcaccggcctctacccctcctcccacggcatcatcaacaactacttccccgatcccatctcgggggactacttcaccatgaaaaaccacgatcccaagtggtggctcggggagccgctctgggccaccgctgccgcccagggggtcctgtctgccacattcttctggccgggttcggaggttacgaagggttcctggaactgccccgacaagtactgccgccactacaatggttcggtgccgtttgaggagagggtcgacaccatccttggctattttgatctcccgcctaaccaaatgccacagttca

SEQ ID NO: 304449 - DNA, 309 bp, Zea mays
cgctacgtcatgaataatgagccttactgcctgaatttaattgatacaccagggcatgttgatttctcgtacgaggtttcccgctctctagctgcctgtgagggcgcacttcttgttgttgatgcttctcacggtgttgaagctcagacgttagcgaatgtgtaccttgcattggaaaacaaccttgaaatcataccggttctaaataaaatagatcttcctggtgctgaacctgatcgtgtcgcacaggaaattgaagagataattggattggactgtcgtgatgcaattcggtgttcagcaaaggaa

SEQ ID NO: 304450 - DNA, 195 bp, Zea mays
gtcttgccaaggttgatgatgtagatgccgtcggtgcggcgcgggttatcgttgccatcgagaacccgcaggacatcatcgtccagtccgcccgcccctatggccagcgtgctgtcctcaagttcgctcagtacactggcgctcatgccatcgctgggaagcacaccctggtaacttcactaaccagcttcagac

SEQ ID NO: 304451 - DNA, 333 bp, Zea mays
cctagtggtgctgggaaaagcacagtggtacaacttctagcacggtattatgagccaactcaaggttccatcactgtcgcaggagaagacatccgtgtatttgacaaaagggaatggtctcgagtagtatctctagtcaatcaggatccggtcctattctccgtgtctgttggagaaaatattgcttatggtctcccagatgatgttgtctctaaggatgagataataaaagctgctaaagctgccaatgctcatgaattcatcatctctcttccacaggggtatgatactcttgttggagagcgaggtagtctcctaagtgggggacaaagg

SEQ ID NO: 304452 - DNA, 276 bp, Zea mays
gtctgcccgcatcttcgtcgacgagtgcggcctcaacggcctcctcacccccgagcagttcctcgaggagcgcgagagcatgctccaagcgctcttcccatcctgtaccaagctgccaggagtactacgtttggtgcatcatcttcatgccaacggagtaccaatggctgttgcgacaggatcccataaacgccattttgcactgaagacccagaatcaccaggaaatgttttccctgatgcatcacgttgtcatgggtgatgatccggaggtgaa

SEQ ID NO: 304453 - DNA, 278 bp, Zea mays
cggaccgtggccttcctctccgccgccgcctcctcgacctccgggcgcgctcccaacgccgtgcccccgatggccaccgccgctgccacggctgatatctcggctgccgatgataagcagcgggactcggcgcttccggagctcacgacggaattcatggtggacatgaaatgtgagggatgtgtaacagctgtgaaaaacaagctgcaaactcttgaaggaataaaaaacattgaggtggacttgtctaaccaagtcgttagagttttggggtctct

SEQ ID NO: 304454 - DNA, 277 bp, Zea mays
ccttcgacaaggtgaacgggttttacttccgcgggcacgcgtctgggacgccaccgtccggcacctcctctccatcgggatggccgctgcggaccaggtgttgctcgctggctgctccgccggcgggctggcggtcatactgcactgcgaccagttccaggccttctccctcggtccaacaacgccgccgccgccggtgctaccgacgacactactaccgtcaagtgcctcgccgacgccgccctcttcctcgacgccatcgacgtctccggcgggc

SEQ ID NO: 304455 - DNA, 264 bp, Zea mays
gattatttctgctgcatatcttgctagccattttcttaattattgcctcatagcctgtttgtgtgcagggggataaaaatataattaaatttgatggtgatcataattctccaagacctcaatcatattatgattcagtttctatattcttctacaaatctttgcatcctcctctgctgcctgcagcacgatcaaagcttcatatgggagcatttaaagttggtaacataaccaatgagaatttcttctttgaaatcatcaatg

SEQ ID NO: 304456 - DNA, 252 bp, Zea mays
cggacgcgtggcgcggtatgatctctcataagcatgaacgtgccctgcaacataacgtcgggaaatcggtatccagtgccggacaaatctgctcccgtttacagtacggtcggtgatggaggcaaccaggaaggacttgcttcaaggttttataacccccagccggattactcagcgttcagggaggccagctatggtcactcagttttacagctgaaaaacaggacccatgctatctaccagtggaataga

SEQ ID NO: 304457 - DNA, 309 bp, Zea mays
gtggaaaggtcgccggctctactggtccaccaccgacgccgaggtcatgcggaacaacccgggacactacgttgccctcgtcatactccgtgttcctgcagataacaagcccgccgccgccggggacgccgcggcgtcctccggccccggcagtggtggtgccaagatcaccagggtcaagctgctgaagcccaaggacacgcttctccttggccaggtctaccgcctcatcaccgcgcaagatgtgacgaaggcggtgcgggcgaggaagaacgagaagatgcagcggtgcgatgccatcaggcagca

SEQ ID NO: 304458 - DNA, 302 bp, Zea mays
ggaccgtggaatttgagttgatatcacctgttcctcttgaacctgggcaaagatttgcgattagggaaggagagctctgtgatatcaactcaaaattcgcagttacattgtccccgggcaaaaccatcttcatctccccaagcagctcaacccttccagtgacatcagctgtcctgaagtagaattgggggctgtaatttgtgacaaaggcagtgtgccggccaccttcatcctttgtcaggacatatatttccgcctcgaactttttgcatgtcttcagactaccaggtttgcacaccacc

SEQ ID NO: 304459 - DNA, 292 bp, Zea mays
gggacttaggaggttttccaccttggttgctcaccatagaaccagcccttaaactgcgatcatcagattcgtcctatctctccttggtggagagatggtggggagtactacttctgaaagtggcaccattattatacaataatggaggtccagttattatggttcagattgaaaatgaatttggttcttttggagatgataagaattaccttcatcaccttgttcaactggccaggagatatcttggaaacgacattattctttatacaactgatgggggcgccttgggtaa

SEQ ID NO: 304460 - DNA, 293 bp, Zea mays
ccgacctccgacgcctcgaggaatactccctcgcggggcttgtctgcctcctccagagcagccgccctaccctcacccgcgccgaggccttgtggtgccttctctccagtgacctccgtattgaagaggcgatcgccataagcagctctttcaatggtgaaccctcatctattgctgagagtgaggagcacctcccagccgtggcagagaccgcacagcgtggatacatccactatcataacaccacagccacagctgctcaggaccccactctttttgacccagaagccttc

SEQ ID NO: 304461 - DNA, 290 bp, Zea mays
gctatagaagatgtcagggatgctgaagaagagcaagcagtgaactcgtttcgggaggttttgtttgctaggggcttgctaccagtcaagcatgataattaccacacgatgcttagatttttaaaagcaaggaagttcgattttgaaaaagcagcacagatgtgggcggacatgctgcagtggagaaaggagttcggtacagacacaatttttgaagattttgaatttcatgaactagaggaggtcctgcaatattatcctcatggttaccatggggttgacaaggaagg

SEQ ID NO: 304462 - DNA, 309 bp, Zea mays
gagaactcgacgggggattccaccaatttaggacgttcaaagtgtgcctttgaaacattggcatctcccacaaagacaataaagaacatgctgactgttcctagttcccctttgtcaccagccaccggtggttcagtcaagattgtgcaaatgacaccagtaacttctgccatgacgacagctaagtggcttcgtgaggtgatatcttcattgccagataagccttcatctaagcttcagcagtttctgtcatcatgcgatagggatttgacaaatgctgtcacagaaagggtcagcatagttttggaa

SEQ ID NO: 304463 - DNA, 311 bp, Zea mays
gcgacatcaccatcttcatcggcgactggtacaacaagaaccacacggatctgaggaagatgctggacaaggggaaggacctcgggattcccgacggcgtgctgataaacggcaagggcccgtaccggtacaacgacagcctcgtgccgcccggcatcgagtacgagaccttcaatgtgcatccgggcaggacgtaccgcatccgggtgcacaacgtggggacgtcgacgagcctcaacttccggatccaggggcacagcatggtgctggtggagacggagggctcctacacgtcgcagcagaactacacg

SEQ ID NO: 304464 - DNA, 302 bp, Zea mays
  unsure (1)..(302): unsure at all n locations
cggacgctggnatagacgaagtatacaagatggatgggatctagccgagttgcaaatgaaaacaaccgccgagtgctcatatctggactgacattttcatttttctatttataccacagcttgagtgaaggaagggctgtatatgtattttacttccccacgtctttccgaatacatgcagtgattgtcaatcctttccgtaacaaagaaatatctccgtcatttcttgaaaagcaatttggagatgcttgccaagcccttggttctgtccctgagaatctgtctttccatgtggactacca

SEQ ID NO: 304465 - DNA, 304 bp, Zea mays
ggcaaaagaagtgatcggtaaaaggatagctgagctcgtttctgctttgaaacaaggggctgagctgtcggagtacacacttcggttgatcgggtcagaccttgagcactacatccgcaaactgctgtacgacggggtgatcaagtacaacatgaggtccagagtcctcaatttcagcatgggcaagcctcgcatcaagttcaacagcaaccagataccagaaaagatatagaatgtacttatccaacatcctgaaaagaatggtttctctccattcgattaccgagcaagatgtatactctgc

SEQ ID NO: 304466 - DNA, 303 bp, Zea mays
ggcgaagaaggaccccgagcacgcgcacaggcacaagatcacggaggaggtcgctgccgcggcggccgtcggcgccggcggctacgtattccacgagcaccacgagaagaagaaggaccacaaggacgccgaggaggccagcggcgagaagaagcaccaccacctcttcggctgaccgtagtaccggccggcgcgcgaccgagctagctagctccggcgcatgcagtacagaattaaacaggtgtgtggttgtgcaacgccacagcttgcgcccgcaatggcactcgtctccgcctcctcgtc

SEQ ID NO: 304467 - DNA, 290 bp, Zea mays
gcgccggcttccccgtcctccaggacaagtaccctcgccgctacaaggcattcctctactgcaacacggcgagcttcatggcatccgtggccctcatcgtgctccttctcaaccctaacctgtacgggccaggcatcaattgctacgcgctctttgtctgcatggtggcgggcatgttcagcctcatcggcgcctacgctgctggaagctccctgcacctgcggacctccatcgtcctcttactgctggttcttgcggtttttgcggccgtgttatacgtgaccatcaag

SEQ ID NO: 304468 - DNA, 294 bp, Zea mays
gtgaaggacatggtcatggacacggagaagagggacctgctcgccgagcgcgcggagggctgctcatgtccctcaagcagcggttccccgggctcactcagacgagcttggacatgagcaagatccagtacaacaaggacgtgggcaaatcgatcctcgagagctactcgagggtcctggagagcctggcctccaacatcatcgcgcggatcgacgacctgctcaacgtcgacgagctgagcaagcaaccagctgacagcatcccgtccgccggagcggacgcgaaggttgcgt

SEQ ID NO: 304469 - DNA, 312 bp, Zea mays
tccccttccgcgtctgtctggcctctggggcttctaggttagcgcgtgccaccaccatggccgaggaggtccaggctccactttccgccaccatggccgaggaggtccaggctccactttccgccaccatggcgaaggaggcccagtcgccgccgtccgcaaccatagcggaggcgacggcgccgccgcagctcgtattatttaactcctttacgaagagggaggagccattccagccccgggtagaggggaaggtagggatgtacgtctgtggcgtcactccctacgactttagccacatcggccacgcgc

SEQ ID NO: 304470 - DNA, 302 bp, Zea mays
cccacgcgtccgcccacgcgtccgcccacgcgtccgcccacgcgtccggataatcttgagattgatgctagtaatgggaactgtcttgaagctcatgcatttcttcaactcctggcaacctttggtatttctgctgaatataatgaagatgacctgtgcaaattgcttccatatgtcagtcgtcgtcgtcagacacctgaactttgtcgattgcttgggttgtcacagaaaatgccaggtgtcattgaagttctggtgaaaagtggaagaactattgatgcaattaatttagcttacgtgtt

SEQ ID NO: 304471 - DNA, 294 bp, Zea mays
gcggagaagctgggggccgtggcggagggcgcggcggaggccttcttccgcagcgagatccggcggcggctggccgtcactgccgcgctcatcgtgctcagccgcgtggggtacttcatcccgctccccgggttcgatcgccgcctcatcccagactcttacctcagcttctccgcgctccctgcagatgaccttggcgatttctcctcagaattgaagctttcttttttccagctggggatcagtcatcaaatttcagcatctattgtcatgcaggttctctgtcatgttctt

SEQ ID NO: 304472 - DNA, 320 bp, Zea mays
  unsure (1)..(320): unsure at all n locations
ggtttaggagggagagatttgacaagccggatgtgaggcagtggaacaagcaggagaattggggaaggaacacagggaaggaagcaggggaatcatcggtgccaaagatggtggggcaaggagtctatggtgttgggcctgtccttgcagcactcatggctcggaggaagggagttttatgcgctgtatatacaggaaagtatggatttgagcgggaacaacaagaaaacgaaagataagaaggcagttgagaaagtgctgcggatggcagaggagactgggctgaaggttattgagactccanagcatgatcttaacat

SEQ ID NO: 304473 - DNA, 308 bp, Zea mays
ctattctccctctgcccctcgatagcgctcccgtcgatgcccacctctctcttctgcaggcggtgatggcagccacagcagaaagccgacgctcggcgtgattcccacccgtcgcgagccaagaggtctcgaggtcatttttgagccaagaggttcgcggccacgggagcatacctacagaaccatcaccaccaccgctctctcttcctctgctcttcaatgcctgcctgagctcaccgcacctcgcctcctcaccgcggatcctccgttaatccggtagaaaatggccgatgccgaggatatccagc

SEQ ID NO: 304474 - DNA, 291 bp, Zea mays
  unsure (1)..(291): unsure at all n locations
cggaccgtggnaacaagcttgggcttatgagtttcagtgccaacctccaaggttctcttggtcagctagattgcagagaaaaaggacagatacaggactcttcggatgaaaccctggatacgcaatcttgtcacgaggtccttggctatcctgccaagtttgatcggtgtcaattattggtggttcttcagcagctggccagttgattatcattgcatcgatgatactgtcattttgaactcccttttgctttagttccactccttaaattcacagcagaaaacaaagatg

SEQ ID NO: 304475 - DNA, 281 bp, Zea mays
  unsure (1)..(281): unsure at all n locations
aaagtagtcagtgccgggaggtgggagcggcttacagaaagcattgatgaagatgttctcagtgaagactgtgaggatgatgacatgaaaggccaagatggatttgatatgttcaacattaatgaaggtgagcttcttggcaatgtggatataacaatcaaagggagaaagagtgaggatggaggcatattccttagattgcggatttctgatgatgatggaacgggtacgcaacatgnattttcgttttgacattgaggctgatccgcactaagtgttgc

SEQ ID NO: 304476 - DNA, 305 bp, Zea mays
cggacggtgggcgagacgcgtgggtgcagttgtgctgcctatgttaaagccaggaagcaactgagcgtgcatgaggtgccaaacatattaacagttgtacttaaaagattatcagtcaggaaaatatggcaagatcaacaaatgtgttactttccctgatatgtttgacatggttccttttgtgactgggtctggtgacaatccccctctttatttcttgtatgccgtggttgtacatgtggatacagaaaatgcatcattctctgggcactatatatcatatgtcaaagatatgcagggtacat

SEQ ID NO: 304477 - DNA, 331 bp, Zea mays
gtactttttaattacaagtactacaataatacaatgcaagagactgaagtcactgaagatttctcttgtccattttgctatgtacgatgtggaagcttcaagggtctaggatgccatttaaactcatcacatgatctattccactatgagttttggatatctgaagagtaccaggttgttaatgttagtctgaaggctgatgcttggagaacagagctttttgcggagggcgttgatccaaggcatcaaacattttcttatcgctcaaggtttaagaagcgtagacgatcaaagaacacaatggagaaaatcaggcatgtacactcacata

SEQ ID NO: 304478 - DNA, 316 bp, Zea mays
  unsure (1)..(316): unsure at all n locations
agggtcaatcatgtgtccaccacaggctagtggttggtgatggctttgtgactatgacaaagggtgaaagtattagaagtttctttgagcatgctgatgaggccgaggaagaggatgaagatgatgacatggacagggatggaaatgattttgatggtgatggtgcccatccacagaagcatgccaagagccctgaactggcaagagaatttcttttggatgctgctgctgtgatattcaaagaacaggttgagaaggccttcagggaaggtacggcacagcaanatgcacatagtaatttttaggtcctttgctc

SEQ ID NO: 304479 - DNA, 354 bp, Zea mays
gagagtttgaccaccatgctacttgtgttgtctcaagatatgagacagtggatacttactatcgccggtgcagtagtgctagttacgtcggaaatgtgtcagttcccttgctttgtatcaatgctttggatgatcctctttgcacaagggaggctattccttgggatgaatgcagggccaataagaacattgttttagcaactactccaaatggtggtcatcttgcattctttcaaggactaactgcgcggagactatggtgggttggagctacttctgagttcctttctgctcttcatgacagctcctacatgcataggcagaaggcaaatgatcatgttttgctctcgtctt

SEQ ID NO: 304480 - DNA, 341 bp, Zea mays
tcaagttaccccatgcttctggcaaggcgcacagcagaacaagatccctgccgctcgcggaacttctggtccagttgccagcgttgcagaagctgcttctcaggcttatttactgccagcctgaaggtgcagcctgcacaaactacctcgtacaatatgcgctggctcttgttttgaaggaaagtttcaagatatactgctcaatcaatgatggcatcattaaccttgttgacatgtattttgagatgccgaagtatgatgcaatcaaggcccttgaaatctataaacgagctggtcagcaggcagaaaaactctctaacttctatgaccactgcaaactt

SEQ ID NO: 304481 - DNA, 313 bp, Zea mays
actccactcatcttttctcgtttagaacctctaaaatttcccccactcgccagtcgcagcagcacctgtagcagccatggacgccagcggagcggtagcaaggggaagacgggggcggccgggcgcaaggcaggcggccccaggaagaagtcggtgacgcggtccgtcaaggccgggctgcagttccccgtcggccggatcgggcgctacctcaagaagggccggtacgcgcacgcgtgcggcactggcgcccccgtctacctcgccgccgttctggagtacctcgccgccgaggttctggcgttggcaggga

SEQ ID NO: 304482 - DNA, 308 bp, Zea mays
ctcctgagcagcttgcttctgctttgtggtggtttatgagtccactgaagcatatcggtgtgccagtgcctgagataatacttacattactactctcattgaggtttatcaatttagtatttgatgaggttcgcaactcagctctagcgattgtagcacgccggataagttggaaaaagctgacagctatggaaactatagatattttcttcagctatgtccaacggatatttaaaaatatatttgatcatgcggagagaatatccaaggccatggtagctcgaggatttcgtggtaatccaatcaat

SEQ ID NO: 304483 - DNA, 309 bp, Zea mays
cggacgcgtggcgagacgcgtgggcggacgcgtgggcggacggtgggcgaactctacctgcctttctctcgtccctggcggcggcggcaggatggagctgtttctactgagtatgacggtgaatgttgtgaacccacacgagtttgtcaaggcctactccgcccatctcaaacgctccggcaagatggagcttcctgagtgggttgacattgtgaagactgcgaggttcaaggagctccctccttatgaccctgactggtactacatcagggctgcatctgtagcaaggaagatctacttgagacaagg

SEQ ID NO: 304484 - DNA, 338 bp, Zea mays
ctcacgcgtccgcggaccgtggcgacgtggctgtgatggaagcggtgctaagccaggtacagaggcaacgacatgtaaaacatgtggatggtcagggcatggtggtctactccacaagaacaccactcggaatattccagcaagtctccacctgcaatacctgtggtggcaccggtgaattctccacgccttgcaacacctgttcgggcgatggccgagtgcgaaggacaaagaggatcagtctaaaggttcctgccggagtggattctggaagcatgctgagggttcggtctgagggtaatgctggccggagaggaggccctcctggggacctttat

SEQ ID NO: 304485 - DNA, 287 bp, Zea mays
ctactgttggtgaccgtgttccttatgtaataattaaagcagcaaaaggggcaaaggcatatgagacatcagaagatccgatttatgtgttggacactattatatgcatctgctcctcaatactagattctcgtgggaaatgagcgtgccggttgaactcgatcattgagtggcgactcgcggaacgctgcaaagagttgcttcatggaagccacaccagatctgtttcaatctcaactccttccaatagcgggataacgaaattcgcaaagtgacgattaacttgc

SEQ ID NO: 304486 - DNA, 393 bp, Zea mays
tctaatagccatatagaactggtagctgcagtacggtcggaattccggtcaccacgcgtccgggacctggtgttgttggagatgtcttcagagaaccaacctcaccgaagctgctctgtgtcatgattggcgatggggttcagattttggatatggcaattgttaccattttctttgccgcatttggcttcatgtctcctgcatcgagaggaatgttgttgacagggatgatagtcttttatatgttacttggaattgtgtctgggtatgctgctgtcaggctctggaggactttaaaaggaacgtccgagggatggaggtctgtctcctggtcaactgcttgtttcttccctggcattgtcttcattgtcctcactgtgttaaacttcatgc

SEQ ID NO: 304487 - DNA, 343 bp, Zea mays
ctcgcggattcttagatcgagccttgccctctccttcgccggcgactaccgtgcacgtgttactttgtggtgctggcgtttgttccaggcgcactcgggccggccgcgtcggcgatgcaagggcacctccgtacctacatgaacgcggggattcccaagcggttcaaagaggatgaggagaaagaacagcttgcaaaagatctcgcaaaagattggaatgctgtgtttgaaaggagcatcaatacattgtttttgactgaaatggtccgtggcttgatgctaactctcaagtacttctttgatagaaatgtcacaattaactatccggttgagaagggtcctc

SEQ ID NO: 304488 - DNA, 295 bp, Zea mays
cccacgcgtccgtgcgctgcttccacggaggcgcaggaggagaaggggaggttcctgttcgcagactcattccgcagaagagtattctttaactatgagaagaggatacggcttctcagccctcctgagaagatatgtgagtacttcgcttctgtgaggaacccagaaggggaagtttacatgttgcctggggacttgatgagagcagtagtccctgtttttcctccatcagagtccaccatagttcgtgaaggaagattaacaagggagcggaccctggagagttgcattgtgc

SEQ ID NO: 304489 - DNA, 303 bp, Zea mays
caccttacggaaagcggacggggttcgtgccgcgacggccggaggacttcggggatggcggcgcctttccggagatccacgtcgcgcagtatccgctcggcatgggacgccgtgatgataagggcggatccaagatccttgcgctcaccgtcgacgcacacggcagcgtcgccttcgacgccgtcgtcaagcagggggagaacgcaggcaagatcgtctactctaagcatagcgacctcgtgccgaagatagccactgccgattcccaggcgacgtcggacgacgacgaggagcagaagcaga

SEQ ID NO: 304490 - DNA, 298 bp, Zea mays
gttgaacctgcacaggatgaagcaatcaataaaaaggatgctgataggaggatttcacctgcttcaacgttggagtcgtcatttgaggctctcaatgtaaagaaatttgatgttgctttcacggtggatcctctataccatcaaactaccgctcagtttgatgaaggtggggcaaagggccttttgttgtataaccttggagtttatggtagctgccgtgtgctgttcgattcatttgaagctccagacaaatgcatcttaagtgatatgcaaactgagcaggctgagacaattgacc

SEQ ID NO: 304491 - DNA, 307 bp, Zea mays
atcacatacagtataccatatgcaatggctgctagtcgtgttgaaaatctcggtcttggccaaggcctagcaatgggtattctcaatttagctattgtcataccacaggttattgtgtcacttggcagtggcccatgggatcagctgtttggcggtggaaatgcacccgcttttgcggtggcagccggtgcatctttcatcggtgggctggtggctattctggggcttcctcgggcacgcattgcatcctcgtcctccaggaggagaggcgggacacaccgataagtctgctcatttaccattacag

SEQ ID NO: 304492 - DNA, 305 bp, Zea mays
cccacgcgtccgcccacgcgtccgcccacgcgtccgcccacgcgtccgcggaggtcaagcccgccctgaccaacatggtctccgctgctaagctcattcgcacccagctcgacagcgccaagtgagcacctttttttgcctttttcgtttccgaggagggcgtcgtcgatgccaatttgtttccaataaacagggctccccccctgtgcccgccgttctgttgtgctccgtctgtggttaggttactagttttcttgatctcgcccccacgcggtacctgttttactatctgtttggtggtttct

SEQ ID NO: 304493 - DNA, 293 bp, Zea mays
  unsure (1)..(293): unsure at all n locations
ctcaaaccacgggatgctacattggtttgagtataagaccctacgatcccatatcatgagaagaccactcatgagatgggatcgaaggttcttatactcagaccacgggatgctacattggtcagtggtgctaacgncactggagtttatggtttcaaagggacttctaagtaccagctctctgtagctatcaaggatgttagtggccataggaatggtgaatataccagtgccacgggaagtgtcgactctgattctgtgctgtgtagaaactgtaagcgccatatagccag

SEQ ID NO: 304494 - DNA, 299 bp, Zea mays
ccgcggtggggccgcgggcaggagacccccggcgaggacccgctgctcaccagcaagtacgccgtcggctacgtcaccgggctgcagggcgcagtgtccggcgccggcgccctcaaggtcgccgcatgctgcaagcactacaccgcctacgacgtcgacaactggaagggcgtcgagcgctacaccttcgacgccgtggtgtcgcagcaggacctggacgacacgttccagcccccgttcaagagctgcgtggtggacggcaacgtggacagcgtcatgtgctcctacaaccaggtcaa

SEQ ID NO: 304495 - DNA, 291 bp, Zea mays
gcagggtcgtgctgggccttctcgacggtggcggtggtcgaaggcatctaccagatccggacggggaagctggtgtccctgtcggagcaggagctggtggactgcgacacgctggacgacggctgcgacggcggcatcagctaccgcgcgctgcggtggatcgcctccaacggcggcatcaccacggaggccgactacccgtacacgggcaccacggacgcctgcaacagggccaagctctcccacaacgcggtcagcatcgccgggctccggcgcgtggccacccggcga

SEQ ID NO: 304496 - DNA, 148 bp, Zea mays
ctgctgctgtgtgtgtttccaatggagaggaaccatagagtatatactcgaaatatcccagccattaaccatcagagaactattgagtagctggctaataagtagttctcaggtggttaatggttgggttaatgcgagtatatactct

SEQ ID NO: 304497 - DNA, 303 bp, Zea mays
tgaggaggaagacgccggagagacgggaagctatgtttttgcacaggagtgtctggaccggctgtcaattgctgttggtggtaatacgattctgtccgtggcagctgagttgctcccatcgtttttctcctctgaagattggaagagacgccacgcggcactagtgaccatagctcagattgcagagggctctgctaagatgatgattaagaatctggagcaggttgttgggatggtgctgaattctttccaggaccctcacccacgggtgaggtgggcagcaattaatgcaatagggcagct

SEQ ID NO: 304498 - DNA, 307 bp, Zea mays
ccgacgcgtccgcccacgcgtccgcccacgcgtccgcacagttggtcttacaggttttggagctcagggttttgggacaccgtcgtttggagcaggtgccgctttcacaaatgcagcaggtgttcaagcagtcagcagctgcatatcaaggaagtggagctcctcctggctttcaagggccacctgggtttcaggttggccaggcaactacccagacaagcactgcagcggcagcgtctgccgcagctgccactgctgctggttatcaggctggggcatctgggcagggccaggtgcctggttctca

SEQ ID NO: 304499 - DNA, 300 bp, Zea mays
cggacgcgtggcgtgacgcgtgggggttaaaaaataatatggctgacatatccccaaatggtcgcttcatagctgctgcggctttagttgctgatgtacaggtgtgggagatagtttactcgaaggatggttcagtgaaggaggttaataaagttatgcaactcaagggtcataagagtgctgttacttgcttgtgctttgctcccaattctgagcaaattattactgcatccaaagatggttccattcgagtatggaacattaatgtaagataccaccttgatgaggatccaaaaacct

SEQ ID NO: 304500 - DNA, 300 bp, Zea mays
caccgttgtttcgtgcttgattaccatcctataatccccagagggtttgaacaagtcacttgttgtgaatagtgcgatcactcttgtgaggcttagctgggtctgtccatacatcgtggcccctcatatggagcatttcatgcaagcatggtgcagtgacttgtgcacgatcagagatggttttgagagagatgtcgcgtttcatggactgtgtgcaatggtggcatgaaaccctacaggagccgctggttcattagcttacatctgccaggcctgtgcaagttggactgagataaatag

SEQ ID NO: 304501 - DNA, 300 bp, Zea mays
agacaagcaaggaatcccccgatggctcatcgcgttctcctcctcctctctctcgcgtcggccgccgcggttgccgccgccgtcgacgcggaggacccgctgatccggcaggtggttcccggtggagatgacaacgatctggagctgaacgcggagtcccacttcctgagcttcgtgcagcggttcggcaagtcctacaaggacgccgacgagcacgcgtaccggctgtccgttttcaaggccaacctgcgccgcgccgccggcaccagctgctggacccgtcggcggacacggcgtcac

SEQ ID NO: 304502 - DNA, 270 bp, Zea mays
atatagaagcaatatccgttgtgcctcagactacaggtggccgggtctactactactatccattttctgctctttcagatccagccaagctcttcaatgatctcagatggaatatcagtagaccccaggcctttgccgctgttatgcgtgtcaggtgcagtcctgaccttggcgaccctgactgcaccttacacgcataacagccccacaacccgagtctactttatgcgtgtaaggtgcagtcagggtctccaagttcaggactatttt

SEQ ID NO: 304503 - DNA, 297 bp, Zea mays
acgggactgccgttaaggtcgaggcgtccgccgcgaaccacgagtccccgcccgcgcccgcgccggtcccggccttccgcgacgccaggtgggtcaacggcacctgggacctcaccaagttcgacaagggcggcggcgtcgactgggacgccgtcatcgacgccgaggccaggagaaggaaatggctcgaagactacccggatgcgacgagcacagacgatgccgtcgtcttcgacacctccattatcccgtggtgggcatggatgaagcggttccaccttcctgaagccgagaagc

SEQ ID NO: 304504 - DNA, 296 bp, Zea mays
gcgttcgagtccccggcacatttccgcatctacaagagcgggaggatcgagcgcctgaaccggcccccggtccttcccgccggcctcgacgaggccaccggtgtcacctcaaaggacgtcgtcctggacgccggcaccggcctttccgtacgcatctacctccccaagctccaggaaccatccaagaagctcccggtcctcgtctacttccacggcggcgcgttcctcctcgagtcggccggctctgccacgtaccacacctacgtcaacccactcgcagccgccgcgggcgtcct

SEQ ID NO: 304505 - DNA, 300 bp, Zea mays
  unsure (1)..(300): unsure at all n locations
cggnacgcgtggcgtggtggaccgccggcgctacactacctgagcggcccgtacggagacaccacctttaccaaggttttcagctggcggccttgcctgggagacgcgaagcagggccttcgcgcgcactttgaggtctatggggacatcctcgaggccgttgtcatcaccgaccgcgccacgggccgctccaagggctacggattcgtaaccttccgggacccagagtcagcgaggatggcctgcatggacccatacccagtgatcgacggccggcgtgctaattgcaaccttgccatc

SEQ ID NO: 304506 - DNA, 306 bp, Zea mays
tctggttccagaaccggagtgccgcgataagcagcggaaggagtcttcgcggcttcaggctgtgaacagaaagttgacggcaatgaacaagcttctcatggaagagaatgagcggcttcagaagcaagtctctcagttggttcatgaaaacgcgcacatgcggcagcagctgcagaatacttcattggccaatgacacaagctgtgaatcaaatgtcactacccctccaaaccctataagggacgcaagtaacccttctggactccttgcgattgcagaggagaccttcacagagttcctctcaaa

SEQ ID NO: 304507 - DNA, 299 bp, Zea mays
ctattcttcagtgcttggcatttacccggccacttacggcatatcttttagaaggatatcattcacaaaattgttctaaaactgaatggtgcttcatgtgtgagttggaaaaggtcttgatagagggcaaacaaggaaaatctccagtatcacctactggaatactatatcatttgaatgagattggggtcagttttggccagggcgatgaagaggatgcccatgaatttatgaggtatgcaattgataatatgcaatctgctagcatggaggaagccaagaaaaatggtatccagcag

SEQ ID NO: 304508 - DNA, 286 bp, Zea mays
gtcgaggctggcgtcgagcagcacgttggaggccttgacgtcgccgtggaccaccgccgggggccgcggcggcgtccagggcgtcgtcggcacgcgcacgccccgaccccgtcgtgggctccccgggctacgtcgacccactcttcctgcgctccggcgtcgccaccaggaagagcgacgtgtacagcttcggcgtactgctgctcgaactcctcgctatgcgggatgccatatgcgccgacacgggggtgccgcctcgccgccgcggtgggtcgtacgctcagcg

SEQ ID NO: 304509 - DNA, 311 bp, Zea mays
cgcgcagccagggaaggaaacaacacgtaagcagcgacgacagcgatgccgacgctgcggcggcgcaacccggaactgcacgtgaaggcgctggagggaatcgtgtcggccaacaccttcttcacggtggcggtgttcatcgggatcacgggcaccatcacgccgtcctcgtccgtgccgcccgcctgcgtcgcgcgggacgacatcgcgcgcaacttcttcctcttcgagatcctctccttcggcctctacctgctgtccagcctcgtggcgcaggggatgaagctcgccgtcacgctcctggccaccga

SEQ ID NO: 304510 - DNA, 298 bp, Zea mays
  unsure (1)..(298): unsure at all n locations
gaacagttgtatcgaaatctgatggtgttgagttcactgtgagagatggcgtattctgccctgccatatcaaaggctgtcaagactatgaagaaaaacgagaaggcccacctcactgtcatgccacaatatggctttggtgtgaaaggtagacaggcatctggagaagaagcttctgtgcctcctaacgcgacattgcacattgatcttcaagtggtgtctggaggacagtcactgagttaggcagtgacaaagagatccttaagaagatccttaaggnaggcgaaggctatgattgt

SEQ ID NO: 304511 - DNA, 202 bp, Zea mays
gatttccacaggtccgcggtgctgctgatgtcaagtcaccagaaacaattcttgaacatgatcgtatcatttggcttggggatttgaattaccggatcgctctttcgtactgctcagctaaagctcttgttgaaatgcatagctggaagcaactgttggagaaagatcagctacggatagaacggagatgtgggcgtgtttt

SEQ ID NO: 304512 - DNA, 170 bp, Zea mays
ctcaatttcaggttctgagtttgtggagatgtttgttggtgttggtgcttccagagttcgtgacctttttaagaaggccaaggagaatgctccttgcatagtgtttgttgatgaaattgatgctgttggaaggcaaagaggtacaggtattggtggtggaatgatgaaag

SEQ ID NO: 304513 - DNA, 129 bp, Zea mays
gtcaccgccacgacaaccccgccgcaatgctgtcgaggggtccccgcctttgcccggggagctccagacctgtcctctcctcttctggggcgtgtcgtataaggtgtgggtcccatctattctctcaag

SEQ ID NO: 304514 - DNA, 319 bp, Zea mays
ctggttcagaacaatttaaatttggaggttatctatggtgatacagattctatcatgatacatactggacttgatgacatctccagggcaaaagcaattgcaggaaaggttattcaggaggtgaacaaaaagtaccgttgtctggagattgatcttgatggcatatacaagagaatgttacttcttaaaaagaagaaatatgctgctattaaagtagcactggatggcagcttacgagagaacattgaacgcaaggggctcgatatggtcagacgtgattggagtttgctgtcaaaagacattggagatttttgtctta

SEQ ID NO: 304515 - DNA, 317 bp, Zea mays
catcccggaggacctcttccacgcgcccaggctggagaccgtgcacctctactccaacaagctcacgggccccgtgccggactcggtggccagggcgccctcgctcgtcgagctccgcctcttcgcaaacagcctcaacggcgcgctgcccgccgacctcggcaagaacgcgccgctcgtgtgcctcgacgtttccgacaactccatctccggcgagatcccccggggtgtatgcgaccgcggcgagcttgaggagctgctcatgctcgacaaccacctgtcgggacacatccccgaggggctcgcccgctgccgga

SEQ ID NO: 304516 - DNA, 314 bp, Zea mays
cggacgcgtgggcggacgcgtgggcaaggactcaaaacttctgcacccacttttgataaacctgctgacgatggatacaactggcggaagtatggccagaaggcagttaagggtctcgagtatccaaggagttactacaaatgtacccacacgagttgtccagttaagaaaaaagtggagcgctcagcagaaggacacatcactcaaataatttatagaggtcagcacaaccaccagcgtccaccaaaaaggaggtccaaagatggtggtggtccactaaatgaagcagatgttcttcatgagaatgaagacat

SEQ ID NO: 304517 - DNA, 308 bp, Zea mays
ggatttgcccagaacttttcctggtcatcctgctttagatgaggatggaagaaatgctttgagacgcttgcttatagcttatgctaaacacaacccatcagttggttactgccaggcaatgaacttttttgctggtctcttgcttctattgatgccggaggagaatgcattttggacattggttgggattatggatgactattttgatggctacttttctgaagaaatgattgagtcacaggtggaccagcttgttttagaggagttagttcgagagaagttccctaaattagcaaatcacctggatt

SEQ ID NO: 304518 - DNA, 300 bp, Zea mays
ggaccggggtggccgagatgctcaacaaaacgagttgattgtgaagcgctatatgtccaaaggagatctgtatgtgcatgccgagttgcatggagcttccagtactataatcaagaatcacaaacctgacactcctattccaccattaacattaaaccaagcaggatgcttcactgtttgccacagcaaagcatgggattcaaaaattgttacaagtgcttggtgggtgtatccacatcaagttagcaagacagctcctactggcgagtaccttactgttggtagttttatgatccgtgg
